United States Patent Application Publication US 2008/0034453 A1 - sequence listing, part 16

SEQ ID NO: 125768 - DNA, 235 bp, Glycine max
tagtagtgttggtgggttgcaaagatgcttgggggtcttctccataggggtcataagataatggggacagtggtgttgatgcgcaagaatgtgttggacgtgattagcgtaaccagcgttgggggaattattggtcaaggtctgtacttagttggctcggcattcgatactcttactgccttcttgggccgatccgtgtctctccagcttattagtggtaccaaagctgatgcca

SEQ ID NO: 125769 - DNA, 339 bp, Glycine max
tcacacacaactacaagaaagaacttccttataaccaaaaccaacaacaactatggcaagttatcagaagcactacgatgatcagggtcgcaaggtcgacgagtatggcaatgttgagaggcaaactgacgaatatggcaacccggttcatgccactagtgtcacttatgtagccactaaaagtgttggtggctacaatgatgacactaataagcaacatgataccaccggtgtctatcctgagaaagataccggtaggcatcattttggtcgtggttacgatggtgacactaataagcaacaacatgatgctattggtgtttatcccggaatagacat

SEQ ID NO: 125770 - DNA, 344 bp, Glycine max
ggttactggaaggcaaccggggcggataagcccattggccaccccaaaccggttgggataaaaaaagctttggtgttttacgcagggaaagctccgaaaggggacaagagcaattggatcatgcacgagtatcgtctcgccgatgtagatcgctccgttcgcaaaaagaacagcctaaggttagatgattgggtgctttgccgtatttacaacaagaagggcacgatcgagaagttccaaccaagcagcgatgttgttgttagccgaaaaatggaatcatcggagatcgaagacaggaagccggagattctgaaaagcggaggaggttgtcttctgccgccggt

SEQ ID NO: 125771 - DNA, 345 bp, Glycine max
cacaggttccatcagtaccaggtggtgggtcgcgcgctgtcgaccccaaccgatgagcaccccaagatctaccgcatgaagctctgggccaccaacgaggttcgcgccaagtccaagttctggtacttcctgagaaagctcaagaaggtgaagaagagcaatggccagatgcttgccatcaacgagatctttgagcgcaacccgaccaccatcaagaactatggcatctggctgcgctaccagagcaggactggttaccacaacatgtacaaggagtaccgcgacaccaccctgaacggcgcagtggagcagatgtacaacgagatggcctcacgccaccgcgtg

SEQ ID NO: 125772 - DNA, 331 bp, Glycine max
  unsure (1)..(331): unsure at all n locations
ttcanaccttgctctatactacacagtacacacactagaagaataatggcttccatcctccactactttttagccctctctctttcatgctcttttcttttcttcttatccgactcagtcacccctacaaaaccaataaaccttgttgttctacccgttcaaaatgatggttccacagggctccattgccacaacctccaaaaaagaacccctctaatgcaagtaccagtcctggtggacctcaatggaaatcacttgtgggttaactgtgagcagcagtatncatccaaaacgtaccaagcacccttctgccactccactcaatgctcta

SEQ ID NO: 125773 - DNA, 340 bp, Glycine max
  unsure (1)..(340): unsure at all n locations
tganagaacttccttataaccaaaaccaacaacaactatggcaagttatcagaagcactacgatgatcagggtcgcaaggtcgacgagtatggcaatgttgagaggcaaactgacgaatatggcaacccggttcatgccactagtgtcacttatgtagccactaaaagtgttggtggctacaatgatgacactaataagcaacatgataccaccggtgtctatcctgagaaagataccggtaggcatcattttggtcgtggttacgatggtgacactaataagcaacaacatgatgctattggtgtttatcccggaatagacattggtagagatcatgag

SEQ ID NO: 125774 - DNA, 199 bp, Glycine max
cgagctatcaccatctatattctgtgctgttccccgtgtgcttgatagagtgtactcatgtttgacgcagaagatctcttctgggggcttcatgaagaagacattattcaactttgcttattcatataagcttaataacatgacgaaagggcttagacatggagaagcatctccacttcttgatacaattgtgtttgac

SEQ ID NO: 125775 - DNA, 140 bp, Glycine max
  unsure (1)..(140): unsure at all n locations
tgttcagaatgatggttccacagggctccattgagacaacctccaaaaaagaacccctctaatgcaagtaccagtcctggtggacctcaatggaaatcacttgtgggttaactgtgagcagcagtactcatccanaacgt

SEQ ID NO: 125776 - DNA, 263 bp, Glycine max
gttgggttggttaaggccttccaaaaggcttactacaacaggtatggtggtggggccaatgagctcagtgaggggtacagcacgggtgttggattgggtgctgagatcattggaacctttgttttggtctacactgtgttctctgcaactgaccccaagaggaatgctagagattctcatgtgccggttttggctccatttccaattggctttgctgtgttcatggttcacttggcaaccatcccagtaacaggcactggcat

SEQ ID NO: 125777 - DNA, 263 bp, Glycine max
cgatctcagattccggccactcctctcgccggcgcgcccttactcttccctcctccgtcgagcactctccgattcgaatcgttcccagcctcgcacgaccatgaatcccgaatacgattatgtgttcatagcttatgctgattggagattctggtgtaggcaagtcatgtcttctcctgaggtttgctgatgattcataccttgacagctgtatcagtaccattggagtggactttaaaatccgcactgtggagcaggatggg

SEQ ID NO: 125778 - DNA, 260 bp, Glycine max
gagaaaagagggagcgtgtttcgttccaaacagcactgaagaaatgactaaagaagaagactttaagctccttaaaatccagacttgtgttctcaaagtgaacattcactgtgacgggtgtaagcagaaagtgaagaaactccttcagagaattgaaggtgtttaccaagttcaaatagatgcagaacagcagaaagtaacggtttcaggtagtgtggattccgctactttgatcaagaaactggtcagagctggtaaac

SEQ ID NO: 125779 - DNA, 261 bp, Glycine max
tagcccaagccctatacaaccaaaccctaacacacacccatttgattcagtttccatggctagcctcaaggttgcatttttggctgcagtgctctgcatggttgtggtgagtgcacccatggcacatgcagctatcacgtgcgggcaggtgacgagtagcctggccaattgcatcggttacctccagaagggaggaacgccgtcgtcgggatgctgcaacggagtgaagagcctcaatgccgccgccaagaccaccgccgt

SEQ ID NO: 125780 - DNA, 266 bp, Glycine max
ctctgagaaaaacagatagtgtgggagagagaagagcggaagagtaaatgacgaccaggttcaagaagaacaggaagaagagaggtcacgtcagcgccggacacggccgtatcggaaagcaccgcaagcatcccggaggtcgcggtaacgccggtggcatgcatcaccaccgtatcctcttcgacaagtaccatcctggtttcttcgggaaggtaggcatgcgctacttccacaaacttcgcaacaaattctacaatccgatcatc

SEQ ID NO: 125781 - DNA, 260 bp, Glycine max
agtcttttccgggtaaatcaccttgaatgcaggagatggactacaataatgaagcaagctatggtatcaagttcaggaacttatatggttctataccagatgtggtggttccattaatgtatacggaatacactactcgcaaggtcctagttatggaatggattgagggggaaaagttgtctgaagtgaaggatctctacctgattgaggtcatttatgaaactagtttcaagcaagttattctaaatttttaatctgta

SEQ ID NO: 125782 - DNA, 260 bp, Glycine max
gcaaaatctaaatgcccttgttaaggttcttcctggtctacttggtggtagtgcagatcttgcctcttccaacatgaccttattgaaatcgtatggggatttccaaaagaatactcccgaagagcgcaatgttaggtttggtgttagagaacatggaatgggagcaatctgtaacggtattgctcttcatagccccggattcattccatactgtgcaactttctttgtcttcactgactatatgagagcttccataagga

SEQ ID NO: 125783 - DNA, 261 bp, Glycine max
accaaggttggcatagcctctcgcaacctcaaatctacacaatgcatttctaaggcttttggcttggaacctgctgcagctaaactcacttgctcccttcagcctgatctcaaagaatttgctcaaaaatgtgtcgacgctaccaaaattgcaggattcgcccttgccacctctgctctcgttgtttctggagcaagtgcagaaggtgttccaaaaaggctaaccttcgacgaaatccagagcaagacatacttggaagtg

SEQ ID NO: 125784 - DNA, 259 bp, Glycine max
actcactccgttagaagcaccaaatcctgatggcaccaaaggcagagaagaagccagcggagaagaagcccgcagaggagaagaagtccacggtgggagacaaggctccggcggagaagaagccaaaggccggaaagaagcttccgaaggagggaggcggcggcggcgaagggaagaagaagaagagaaacaagaagagcgtggagacatacaagatctacatcttcaaggttctgaagcaggttcaccctgacattgg

SEQ ID NO: 125785 - DNA, 259 bp, Glycine max
gtgccgtctttggttcctcatggctgttatctgtctttatgatttcatgattagacaatgtggaattacataactggcgttgcacttaaagtgatgtgatttatgcatttatgcatgagaactaaatagatttttagattcctacttaaacaaaaactttccatgacagtagcatactgatgagactacacacacacacacaaaacaacaacaacaacaacaggacaacaacaaagcatgctcagtattgagacactgt

SEQ ID NO: 125786 - DNA, 259 bp, Glycine max
ctcgagccgctcgagcggctcgagatcatcatggccacctctgcaattcaggcatcagcattcgcaggtcaaactgctctgaatcagctcaatgagttggtccgcaagaccggtggcgccggcaaaggtcgcaccaacatgcgccgtaccgtcaagagtgctcctcagagcatttggtatggccctgatcgtcccatctacctgggtccattctcagagcagattccgtcatacctgaccggagaattccccggtgact

SEQ ID NO: 125787 - DNA, 255 bp, Glycine max
cttcccttctccaacatgccaaacgacagcgttctgagtcttttcatcttcgttaccctcttcacatgccttctctctgctaattcccacgatgaccatattttcctaccgagtcaactccataacgatgactcagtgagttgcactgctaccgacccaaaccttaactacaagccggtgatcggaatcctgacccaccccggcgacggtgcttctggccggctcagcaacgccaccgaggtttcttacatcgcc

SEQ ID NO: 125788 - DNA, 257 bp, Glycine max
gggttcttcacttctcttcttcaattcattctagttctggattccgactcgccgcattgactcggtccgggttggggtcgactcagttcggtttttcattctctcgcgaatctaatctataggaaaagctaagggcacatcacaatgaaggcattgattctggttggggggtttggaacaaggctgaggccactgacactcagttttcctaagcctcttgttgattttgctaacaaacctatgattctgcatcagat

SEQ ID NO: 125789 - DNA, 255 bp, Glycine max
gtcttcacaaaggtaatataaaacatgaagatgctgcccagcttaatggaaatggggcctcccaagcaaatggatcagccactgtcgctgacattttcaactcccaggatgtggtcagcttgagcaggtctgggattgagaatttggcaaaattggagaaccgaaaagaaccctggcttgttgtgctctatgcaccatggtgccgcttctgtcaggctatggaggaatcatatgttgatttggcagaaaagttag

SEQ ID NO: 125790 - DNA, 254 bp, Glycine max
agagaattttgcttgtaaagttcaccatgggtctttttgagaatcctctagctgataccagcttagtcaatgagcttggaagccaggaacacagagacctagcaagggaagcagtgagaaaatctcttgtgctgcttaagaatgggaaaaatgaaagtgcttctcttctgcctcttccaaagaaagtcccaaaaatcctagttgctggatctcatgctgataatttgggttaccaatgtggtgggtggacaatc

SEQ ID NO: 125791 - DNA, 256 bp, Glycine max
ccctctgggactagctgaggacccagagaacttgaggtggtacgttcaagccgagcttgtgaatggacgttgggccatgttgggtgttgcaggaatgctacttcttgaggttttcaccaagattggaatcatcaatgcccctcaatggtatgatgctgggaaatcggagtactttgcttcatcgtcgaccctctttgtgatcgagttcatcttgttccactacgtcgagatccggagatggcaggacatcaagaac

SEQ ID NO: 125792 - DNA, 261 bp, Glycine max
cagcgcctagttgtgagcaccaaaccaaaccacattgtttgcaaggcagcacagaagcaggttactgtccaagagggtgaggacactactactggccttgtctctcgcaggttggccctcactgtgctcattggtgctgctgctgttggctctaaggtggcacctgctgatgcagcctatggagaagctgccaatgtgcttggaaaaccaaagacaaacacagacttcctttcatacaatgggaatggattcaaactctca

SEQ ID NO: 125793 - DNA, 255 bp, Glycine max
gaactgatgcccttgatgctgccggaaacacgactgccgctattgggaagggatttgccattggttctgctgcccttgtatcactggccctctttggtgcctttgtgagccgagctgctattacaactgttgatgtgttgactccaaaggttttcattggtttgattgtgggtgcaatgcttccttactggttttctgctatgactatgaagagtgtgggaagtgctgctctgaagatggttgaagaagtacgca

SEQ ID NO: 125794 - DNA, 254 bp, Glycine max
aaggaccatttattggtcgacatagaccgcctcatccggctcaacttggattcctggtccgaccgggttcttctcatggaagaagccaagaagataacgtttgagttgacagtgaagcagctgatgagctttgatccaggtgaatggactgagacactaaggaaagagtacgtgcttgtgattgaaggatttttctcagttcccttgcctctcttctcaagtacctaccgtagagccatcaaggctaggacgaa

SEQ ID NO: 125795 - DNA, 250 bp, Glycine max
ccggaactaaatatggctgacttgttggaatggtcaaagcaagataagaaacgaatgcttcatgtcgtctaccgtgttggtgaccttgatcgcaccatcaaattttacacagaatgtttaggaatgaagcttttgaggcaaagagatatcccagaggagaaatatgctaatgcttttcttggatttggccctgaagaatcccattttgttgttgaattaacatataattatggggttacctcgtatgaca

SEQ ID NO: 125796 - DNA, 252 bp, Glycine max
gtcaccatcgccgccgctgaaggcgtgctggaccgcgtccaagcagccgccgaacgctctggccgtaatgtgcaagagattcgtgtagtggctgcgagcaagacgaagccagtttctgctctccgtgaggtatacgacgccggccttagatgcttcggcgagaactacgttcaagaactccttcaaaaggcaccacagcttcccgacgatatccagtggcatctcatcggaaatttgcagagcaacaaagtc

SEQ ID NO: 125797 - DNA, 254 bp, Glycine max
agtcttttccgggtaaatcaccttgaatgcaggagatggactacaataatgaagcaagcaatggtatcaagttcaggaacttatatggttctataccagatgtggtggttccattaatgtatacggaatacactactcgcaaggtcctagttatggaatggattgagggggaaaagttgtctgaagtgaaggatctctacctgattgaggtcatttatgaaactagtttcaagcaagttattctaaatttttaa

SEQ ID NO: 125798 - DNA, 256 bp, Glycine max
aaagaaagaaagaaagagcgatcatttccaatcacaatggcagatcaactcaccgatgaacagatctcggagttcaaggaagccttcagtttgttcgataaggatggcgatggttgcatcacaacaaaggagcttggaactgttatgcgttcgttgggtcagaatccaacagaggctgagctccaagacatgatcaatgaagtagatgctgatgggaatggcaccattgacttccctgagttcttgaacctcatgg

SEQ ID NO: 125799 - DNA, 256 bp, Glycine max
gtgaactctgtcttcgagtttcacaagctcctcgcccgacccggcgcggtggagaaagtactctccgtcgtacggcagattcggccggagattgtcaccgtcgtcgagcaagaagcgaaccacaacagaatgagttttgtcgaccggttcacggagtcactgcactattattcaaccctattcgactcgctggagggttcgcctgtgaaccctaacgataaggccatgtcggaggtttacttagggaagcaaatct

SEQ ID NO: 125800 - DNA, 252 bp, Glycine max
tcgaggttctctcacactattcatctcggtgctccgagtctcagattctagggttagggttgacaatttctccaccgatcaggaaatgagttcaactggtggttctaccaagggcggaaggggcaagcccaaagcctccaaatccgtttcaagatcgcagaaagctggtctccaattccccgttggaagaatcgctcgattccttaaggctgggaaatacgccgagcgtgttggtgctggtgctcctgtgta

SEQ ID NO: 125801 - DNA, 254 bp, Glycine max
agaagaacaagtagttgagaactaagaaggagaagcaaatggcttcctcaatgatctcttccccagctgttaccactgtcaaccgtgccggtgccggcatggttgctccattcactggcctcaagtccatggctggcttccccaccaggaagaccaacaatgacattacctccattgctagcaacggtggaagagtgcaatgcatgcaggtgtggccaccagttggcaagaagaagtttgagactctttcctac

SEQ ID NO: 125802 - DNA, 253 bp, Glycine max
attgatgaggaaaatgaacatgcaacaaaggtgccagaagatgttaaagaaggacactttgcggttatagcaatgcatggtgaagaaacaaaaaggttcgttgttgagttagattatttaaccgatcctgctttcttgaagctgctggagcaagcaagggaagagtatggctttcaacagaagggtgcacttgcagttccctgcacccccgaagaacttcagaagattatagagaatcgaccactgcgtaatt

SEQ ID NO: 125803 - DNA, 167 bp, Glycine max
cattttgttcaggaattcaagaggaagaacaagaaggatattagtggaaatgccagagcattgaggaggttgagaacagcatgtgagagggccaagaggactctctcttccactgctcaaaccaccattgagattgattccttgtatgagggtattgacttccacac

SEQ ID NO: 125804 - DNA, 250 bp, Glycine max
ccgattcgttttgcccctttcgttgccctaatttcaaccatgcctcgccgtagctccggtggaagatctgcccgtactgctcctcgtgcagcacctcgtcctgctccagttcaccatgctcctcctccagcccctgctcagagcggtggcggatctatgcttggtggcattggttcaaccatagctcaaggtatggcttttggcactggaagtgcagtggcacacagggctgtggatgctgtcatgggtc

SEQ ID NO: 125805 - DNA, 250 bp, Glycine max
ccatcattgccgagtgctatggctttggaagaccttggatttttatattgagcttacttggacttacaccacttgctgaacgtgtgagcttcatcacagaacaagttgccttttacactggtcccacagtcggaggacttctgaatgctacatgtgggaatgttactgagctcataatagcaatatttgcccttagcagtaacaaaattgctgtggtcaagtattctctgttgggttctattctttcaaa

SEQ ID NO: 125806 - DNA, 251 bp, Glycine max
gcacaattgaatctggaaactggaattcccctttatgaagcggagctcttcttctgtttttcatcctcttcaccctgctaggagccattggaggtttaggtgaccgtggaaaatttgttgatgacgaacctactactggaggtgttattcctccaggcaaaggcttcagggaagctcttggtcttggttcaggtcctttatttggattcacgaaagcaaacgagctatttgtgggaagattggctcaattg

SEQ ID NO: 125807 - DNA, 268 bp, Glycine max
cggctcgagcgatcactaggtcacacttcatcaatggcgggtagaggcaaaaccctaggatccagcgccgctaagaaggccacctcaaggagcagcaaagccggcctccaattccccgtcggtcgtatcgccaggttcctcaaggccggaaagtacgccgagcgcgtcggcgccggagcccccgtctacctcgccgccgttctcgaatatctcgctgctgaggttttggaattggctggaaacgctgcgagagataacaagaagactc

SEQ ID NO: 125808 - DNA, 249 bp, Glycine max
agaaatcccatattttccccccacattaactcacccaacccctctttctaaaaggcctcaaggatacactccggacttaattacgttattttgttagggtcaccgtttcgagatattctaaacttgtactgcaaaatatggagggaaaagaagaggacgtaagagttggagccaacaggtacggagagaggcagccaatagggaccgctgctcaggctaaagactacagagagccaccgtcggcgcctc

SEQ ID NO: 125809 - DNA, 248 bp, Glycine max
cattctcttcactttaaagttacatagtttttcattgttttacttaatctacaatggctgcttcaacaatgactctctcttcatcatcattggctggccaagctatcaagcttgccccctccacccctgagcttggtgttggaagggttagcatgaggaaaacagcctccaagactgtttcctcaggaagcccatggtacggcccagaccgtgtcaagtacttgggcccattctctggtgagccccca

SEQ ID NO: 125810 - DNA, 246 bp, Glycine max
aattgttgtaactttttgattcctaaattctctaaaattcgaaattctaatttcgttaggggaaagagattgtttgtgtgtgagtgagtatggctggaaaaggcgagggtcctgctatcggaatcgatttgggaacgacgtactcttgcgtcggcgtgtggcaacacgatcgtgttgaaatcatagccaacgatcagggtaacagaactaccccatcctacgtggctttcaccgacacagaacggt

SEQ ID NO: 125811 - DNA, 250 bp, Glycine max
atttttctcactgtcttgtctctccagagaactgtatagagagagatggcagctgcaacatctggtgctgtgttaaatgggttgggatcttccttcttgagtggaggaaacaggagccaaacccttctggccactgctattggaggcaaagttggtgctgctgctgttactggtagtcctagaagactcattgtggtagctgctgctgcaccaaagaagtcatggctccctggtgtcagaggtggtggca

SEQ ID NO: 125812 - DNA, 255 bp, Glycine max
ctcagctgctggtctcccccataatgaaattgctgcacagataagccgtcaggtgagcttagtcaatcgactagaaaagtctgataatcttctcgagggtggaggagaagaggacaattttgccatcgtgtttgcagctatgggagttaacatggagactgcacagtttttcacacgtgactatgaggagaatggctcgatggagagattgacccttttccttaatctggcaatgatcctacaattgagcgtgtc

SEQ ID NO: 125813 - DNA, 259 bp, Glycine max
ccgatgacgaactcaaggtgtcaagggagcagttaatggaggtggcaaggaaatcaggcaagttcgacgaagcaagtctagagttccagaagaggatgctaatgtcctccggaatcggcgatgaaacctatataccgaaggccgtcatcgcctccaccgagaacaccgcaacgatgaaagagggtcgggccgaggcctccatggtaatgttcggagccctcgacgagctcttcgagaaaacccgcgtccgaccaaagga

SEQ ID NO: 125814 - DNA, 252 bp, Glycine max
tgccaacacagttcttactttgaagaaactgggtatagacgatctagtgcattttgatttcatggaccctcctgctcccgataccttaatgcgtgcattggaagtgttgaattacttgggtgcactggatgacgatggtaacttaactaaactgggtgagattatgagtgaatttcccttggaccctcagatgtcaaagatgctcgttgtcagtcctgaattcaactgttcaaatgagattctgtcagtttc

SEQ ID NO: 125815 - DNA, 253 bp, Glycine max
gaaagaactgacctcagcggcggcggcggcggcaacagaagaacaacaaccaccacacacaatgggtcgcgtgagaacaaaaacggtgaagaaatcctcccgccaggtgattgagcgttactactcgcgcatgaccctcgacttccacacaaacaaaaagcttctcgaagaagtggccatcatcccttccaagaggctgcggaacaagatcgcgggtttctccacgcatctcatgaagcgcatccagaagggt

SEQ ID NO: 125816 - DNA, 253 bp, Glycine max
gttgggaagggcattgctggaggtgagttggttatcactccagttgacaagaccggttttgaacctgaggatgcagctattgtagggaacacttgcttgtatggtgcaactggtggacaggtcttcgttagagggagagcaggggaaagatttgctgtgagaaactcgcttgctgaagctgtggttgaaggtgcaggagatcattgttgtgagtacatgactggaggctgtgtggttgtcttgggaaaagtgg

SEQ ID NO: 125817 - DNA, 254 bp, Glycine max
gcgactgcgcttcacgatgggtgcttacaagtatgtttcggagctatggcgcaagaagcagtctgatgttatgagattcttgcagcgggtgaggtgctgggagtaccgccagcaaccttctattgtccgtttgacaaggtctactcgcccagacaaggctcgccgcttgggtttcaaggctaagcagggttatgtgatttaccgtgttcgtgtacgaaggggtggccggaagagaccagttccaaaaggtattg

SEQ ID NO: 125818 - DNA, 258 bp, Glycine max
gttctgatggctgtgcgatcattctcttacgatgtgttcctcagcttccgaggggaagatactcgtatatggtttcattcggcaatctctacaatgtccttcgagaaaggggaattcacaccttcattgatgacgacgcaccccaggaaggggacgaaatcacgacagcacttgaggaggctattgagaagtccaagatattcatcatcgtgctctctgaaaactatgcatcttcctccttttgtttaaacgaactca

SEQ ID NO: 125819 - DNA, 249 bp, Glycine max
tctcgagccgaatcggctcgaggcaattcaacaagaccccgaactataagcttggtggaagatattgtccaagtgggtcacggtgatttgcaggataagccatggtggcaaaagatgccaacttgcgaagacttgattgaagccacggcgacactcatatggatcgcttgaacccttcatgtccttgataactttggaaagtatccatatggagcattgatcgtacacaggcaaaacattagcaggaga

SEQ ID NO: 125820 - DNA, 257 bp, Glycine max
cgaccaactcatcagccaatagagcatttggcaagcttcagggcaatgccaaacacttagatgcttcgtccagctgatggtaatgaaactgctggatcatacaaagttgctgtggttaacaggtagagaccctcaattcttgcactttctaggcaaaagttgacccaacttccaggaacttctattgagggatttgaaaagggtggctacaccattctcgaacagctcatcaggtaacaagccggatgttattttga

SEQ ID NO: 125821 - DNA, 259 bp, Glycine max
gacttttcggtggagctggagtgggtaaaacggtactgattatggaattgatcaataacattgccaaagctcatggaggtgtatctgtatttggcggagtaggtgaacgtactcgtgagggaaatgatctttatatggaaatgaaagaatctggagtaattaatgaacaaaatattgcagaatcaaaagtagctctagtatatggtcaaatgaatgaaccgcccggagctcgtatgagagttggtttaactgccctgac

SEQ ID NO: 125822 - DNA, 247 bp, Glycine max
taagaaagagattgaagagacccagcagaccgacaaggacagatggaagggtcttgcctatgatatctcagacgaccaacaagacatcacaagaggaaagggtttggttgactcccttttccacgctccacaggatgctggaactcactatgcagtcatgagctcctacgagtacctcagcactggacttcgccagtacttggacaacaaaatggatggattctacattgctccagcttttgtggac

SEQ ID NO: 125823 - DNA, 251 bp, Glycine max
atcagcaacactatcttccacaatgattttggttatggtgatgttataagttggatgcaataatacaagtttctagtgaggaggaaggagatcttctttgtttgggaatccagaaaagtgacagcgtgaatatcattggacaaaacttcatgactggttacaaaatagtcttcgatcgtgacaacatgaatcttggttggaaggaaactaattgttctgatgatgtgctctcaaatacatccccaattaac

SEQ ID NO: 125824 - DNA, 109 bp, Glycine max
aaagaaaggagatgggagtggagaagcagttgttgaggtctggcaccggtccgaagccaattcccggtcagaacgtaaccgttcactgcactggtttcgggaagaacgg

SEQ ID NO: 125825 - DNA, 252 bp, Glycine max
gcactgagggtggagagagaaagggaagcaaaattcttgaaaaaggagaacatgaatctcaagattcaacttagagaaactgcagaggcggttcatgctgctggagaactacttgtcagactaagagaagctgagcatgcagcgtctgctgcagaggagaatttcagaagagtgcaacacgataatgacaagctaaaaaagcaaatggatacgctgaaaagaacacacagatggagattgttcccatgaaac

SEQ ID NO: 125826 - DNA, 253 bp, Glycine max
tacactgtgaacaaccagatggtgaatgccactctcatgaacattgctgataaccccaccaatgtgcagcttccaggtatgtacaacaaggaagagaacccccgtgttcccatcattgtcaccggtaacgatttctcaacactctatgcacctctcatccgtgatgggcgtatggagaagttctactgggcaccaacaagggaagaccgcattggtgtttgcaccggaattttccgcactgatggtattcctg

SEQ ID NO: 125827 - DNA, 249 bp, Glycine max
  unsure (1)..(249): unsure at all n locations
gtgacgccgctgtcgaagtgcaagctgcggctgctgaagctggagcgcataaaggactacctcttgatggaggaggagtttgtggcgaaccaggagaggctgaaaccacaggaggagaaggccgaggaagatagatccaaggtcgatgatctcagaggttcccctatgagcgttggnaacctcgaggaactcatcgacgagaatcatggccattcgtttcgtcctcggtggggcccgagtactatgttg

SEQ ID NO: 125828 - DNA, 246 bp, Glycine max
ggcctctgcatcagcatctctgctcaagtcttcacttgttcttgacaagtctgagtgggtgaagggacaaacccttcgccaaccttctgcatcagttgtgagatgcaaccccaccaccccatcaggcctcaccatcagagctggttcctatgctgatgagctcgttaagaccgcgaaaacagtggcttcaccagggaggggtattttggccatggatgagtccaatgctacctgtgggaagctttt

SEQ ID NO: 125829 - DNA, 249 bp, Glycine max
gtcaaataatgcattggattcaaatggttctgtggttggctttcctcccaagcagtcctcatattcatgcattcaaatgaatggcaaagaagtctttcgctttgctgtacgatgtgtgccacagtcaattgaatctgctcttcaaaaggctggtctccctgcatctagcattgattggctacttctccatcaggcaaaccagaggattattgacgcagttgccactcggttagaactcccctcagaacg

SEQ ID NO: 125830 - DNA, 270 bp, Glycine max
cgggattcaggtcgagatcgggttgagctacaaaaggctcttggagatcaccttgcatggaaagataggtatcccgtgttctttgactctatagcggcacgattacttccagtcatccccttgattatttatagacttattgaaaatgatgcgatggatacagcagaaagactgttggccatgtattctccattgcttgcttattaccctctaagatttacatttgttcgtgatatacttgcatatttctatggtcatcttcctggaaag

SEQ ID NO: 125831 - DNA, 245 bp, Glycine max
gaacaaactattaatcagcttcttactgagatggatgggttttctggtaattctggtgttattgatttggctgccactaacagaccggatgttcttgattcggcgttgttgatgcctggcgggttcgataggcaagttactgtggatagacctgatgttgccggcagagttaaaatccttcaggtgcattctagaggaaaagcgcttgaaaggatgttaattttgaaaaattgctaggagaaccc

SEQ ID NO: 125832 - DNA, 257 bp, Glycine max
acggaatcctcaaactcctcgacacgcgcctcgtcccctccgccgcctaccgggactccaaggtcttctacctcaagatgaagggagactaccacaggtacctcgccgagttcaagaccggcgctgaccgcaaggaggccgccgagagcacgctctccgcctacaaacccgctcaggacattgctaataccgagttgcctccatctcagcctatgaggctgggacttgctctgaacttctcggtgtttaactatgag

SEQ ID NO: 125833 - DNA, 256 bp, Glycine max
agcagaagaggatgcatataggagggatttgacaattaacagcttgttctaccatatcaacactgactcagttgaagatttcaccaagagaggcatctcggttgttaagtctggaaagatggtgactcctttacctgcaaaggccacgtcatcatgatgatccattacgagttcttcgtgcagttggatttggagctagattcgactttactccagatgaagctctgaaaatagctgctgcatgtgatgatgtgaa

SEQ ID NO: 125834 - DNA, 252 bp, Glycine max
gcaatctgttctaattagaaatagaaggttcatcatctcaaaaaggcttttgtgattctcgatttgatttggatcgcacagaacgaaggcatgggtcaagcttttcggaagctcttcgacaccttcttcggcaacaccgagatgcgggttgtgatgcttggtctagatgctgctggcaaaacaactatactgtacaagctccacattggagaagttttatctactgttcctacaataggtcttaatgtggag

SEQ ID NO: 125835 - DNA, 252 bp, Glycine max
ttcaaacctaggaagttggaagtcatggcagcaaccttggtggcagcaacatcaagttctggtactcttaaagcaactcctttccttggccaaggcaagggtgccaatgccaatgctcttagggatgttgtctccatgggaactgggaagtacaccatgggcaattatttgtggtatggaccagacagagtgaaatacttgggacccttctcagctcagaccccttcatacttgaaaggagaattccctggg

SEQ ID NO: 125836 - DNA, 246 bp, Glycine max
ggtcttggtgcttgatgaagctgatcatttactagacatgggatttcgcaaagacattgagaagataattgctgcggtccctaaacaacgacaaactcttatgttttctgccactgttccagaagaggtccgtcaagtatgtcatattgctttgagaagggatcatgaatttatcaatacagttcaagagggaacggaggagacacattcacaggtctgccagacgcatttagttgccccattgga

SEQ ID NO: 125837 - DNA, 244 bp, Glycine max
ctcaccaccaacgccaaacaagcgctaaatctctcttctctttcttcttcttcctttaaccatgagatagatcttgcacgttcagggaggccaatgcggtaaccaaatcggttccaagttctgggaggtgatctgcgacgagcacggcatcgatcccaccggaaagtacaacgaggaaggcaacagcagcatccaactcgaaaggatcaatgtgtattacaacgaggcctctggcggaaggtac

SEQ ID NO: 125838 - DNA, 247 bp, Glycine max
tgttcgtcgacatccaggaggagtatgtgaaggacgaactgaagaatctcaggcgcgagctcctccgcgcgatggaggaggtgaagcggatccagtcggtgccgctcgtcataggccagttcatggagatgatcgaccagaacaacggcatcgttggatccaccgcaggatccaactactacgtcagaatcctcagcactatcaaccgcgaattgctcaagccttctgcttccgtcgcgctccaccg

SEQ ID NO: 125839 - DNA, 245 bp, Glycine max
cttcgccaagaaccgtgaactcgaagtgatccactccaggtgggccatgctcggagccttgggctgcgtcttcccggagttgctgtcccgcaacggggtgaagttcggagaagccgtgtggttcaaggccgggtcccagatcttcagcgagggtgggctcgactacttgggcaaccctagcctgatccacgcccagagcatcctcgccatctgggccacacaagttatcctaatgggtgccgttg

SEQ ID NO: 125840 - DNA, 245 bp, Glycine max
atttgattggtgtgcatccatgttaagctagtggcgatcggatccagctacagcctacaacctacagatcaaggaaggaagatgttgggtgttataaggcacaagagtattcgccccgccttctccgcaatcagacacttctcttctgcagctaaagagattactgtcagggatgctctcaactccgcactcgatgaggaaatgtcagctgatcctaaagtcttcttgatgggtgaagaggttgg

SEQ ID NO: 125841 - DNA, 241 bp, Glycine max
ggcaagttgaagggaattcttggttacactgaagatgatgtggtctccactgactttatcggcgatacagatcaagtatttttgatgcaaaggctggaattgcattgaataagaactttgtgaagcttgtttcttggtacgacaacgagtggggatacagctcacgtgtcattgatcttcttgtattcgttgccaagaagtctctttaaggtgttacttcaaagtagcttgtcttcacatt

SEQ ID NO: 125842 - DNA, 244 bp, Glycine max
ctcgtctttccgaggtttcggagtgcgaggatgttccaatcatcgacttaggttctcaaaatagagcccagattgttcaccaaatcggtgaagcctgcagaaactatggtttcttccaggtgattaatcacggggtggctttagaagcggcaaaggaaatggaagaagtggcacatggattcttcaagttaccagtggaggagaagctcaagttgtactcggaagacacatcaaagacaatgag

SEQ ID NO: 125843 - DNA, 244 bp, Glycine max
gagaaatggaagccacagttgttgatggcaatggaacggagacaggacatatcattgtgactaccattgggggtagaaatggtcagcccaagcagactataagctacatggcagagcgtgttgtagggcatggatcatttggagttgtcttccaggctaagtgcttggaaactggtgaaactgtggctatcaaaaaggttcttcaagacaagaggtacaagaaccgggagctgcaaacaatgcg

SEQ ID NO: 125844 - DNA, 245 bp, Glycine max
ggcttcttcaagcattcttagaacgcggttcaaacacaatagcaagtgctgcagctgacaaaattcctgggttactaggtgtctttcagaagctgattgcatccaaagcaaatgaccaacaaggttttaatcttctaaacagtataatagagcacatgcctcctgaatcagttgaccaatataggaaacaaatcttcattctgctattccagagacttcagaattccaaaacaaccaagtttatc

SEQ ID NO: 125845 - DNA, 235 bp, Glycine max
gccacgtgcttcaactccttcggcgggatgaagctgttcttcccgaacgtgttgaagtggatcggacgcgccggggtgaagctccacgcgcgcctggcggaggagattcgctccgccgtgagaggcgccgtcggggagatcaccatggcggcgatggagaacatgccgctgatgaagtcggtggtgtacgaggcgttccgcatcgacccgccggtgccgttgcagttcgggaggg

SEQ ID NO: 125846 - DNA, 215 bp, Glycine max
caatttaatcaccattgtacaacccaattcccttcgtcgttttcgattaagagagcaatggcacgtaccaagcaaaccgctcgcaagtccaccggaggaaaggctccgaggaagcaattggcaaccaaagccgctcgcaagtcagccccggcgaccggcggagtgaagaagccccaccgcttcaggccaggaacggtggctctgagggagattcg

SEQ ID NO: 125847 - DNA, 246 bp, Glycine max
atttcaggctctttcctcccacgtttggcgccatgtaagccatgcacgtaacttgaagccagaggactacacggtgttcaccgtcttcgccgattgtcggaagcgggtggacccaccaatgccggagaattatttcggaaacctaattcaagctatttttaccgttacagcggttgggctattagccgcccatccgccacaatttgggggttcattgcatgcagaagccattgaaactcacaatgc

SEQ ID NO: 125848 - DNA, 251 bp, Glycine max
tagtgctaagtgctaacacctgcagtgaacaatggcctctgcatcagcatctctgctcaagtcttcacttgttcttgacaagtctgagtgggtgaagggacaaacccttcgccaaccttctgcatcagttgtgagatgcaaccccaccaccccatcaggcctcaccatcagagctggttcctatgctgatgagctcgttaagaccgcgaaaacagtggcttcaccagggaggggtattttggacatggatg

SEQ ID NO: 125849 - DNA, 130 bp, Glycine max
ctcacgttcttttctttttagctacatatggtgatggtgagccaactgatcatgccgcgagattttataaatggtttacagaggggggtgagaaaggagaagggtggcttcagaatcttcactatggtgt

SEQ ID NO: 125850 - DNA, 260 bp, Glycine max
caagaacactgctttctcctggctcaggaacatcttccatgactgtgctgttcagagttgtgatgcttcactgttgctggactccacaagaaggagcttgtctgagaaggaaacagatagaagctttgggttgagaaatttcaggtacattgagaccatcaaagaagctttggaaagagaatgccctggagttgtttcatgtgctgatatcctcgttctctctgccagagatggcattgtttcgctaggaggtccccata

SEQ ID NO: 125851 - DNA, 258 bp, Glycine max
caaacacgctgttcctacaatcattccaaatgtgcccttccggtcgcaccctcctcccttcctccgtctccgatttccgaccggcattcgacgtcctcgatgccgaccgcgacggcaaaatcagccgcgacgacctccgcgccttctacgccggagtcggcggcggaggagatgacgtgatcggggcaatgatgacagtggctgacaccaataaggacgggttcgtggagtacgaggagttcgagcgcgtggtctcgg

SEQ ID NO: 125852 - DNA, 257 bp, Glycine max
aatcaaaactcaaaacttctcttttctttcattctctctcttttattcatatcatcacaatgccttcaattcccgaagagtccctcctggctccgaacccggatcgcttctgcatgttcccaatccaatacccgcaaatctgggaaatgtacaagaaagccgaagcctcgttctggacggcggaggaggtggacctctcccaggacctccgccactgggactccctcaccgacggcgagcgccacttcgtcacccac

SEQ ID NO: 125853 - DNA, 261 bp, Glycine max
caaacacgctgttcctacaatcattccaaatgtgcccttccggtcgcaccctcctcccttcctccgtctccgatttccgaccggcattcgacgtcctcgatgccgaccgcgacggcaaaatcagccgcgacgacctccgcgccttctacgccggagtcggcggcggaggagatgacgtgatcggggcaatgatgacagtggctgacaccaataaggacgggttcgtggagtacgaggagttcgagcgcgtggtctcggcgg

SEQ ID NO: 125854 - DNA, 109 bp, Glycine max
cgaaccgctgacgccgagtcggctcctatgccgctagctatgacctgcttggtcccccggcacggtggaggtcccgtagcgcgtcatgagcaccgggctaagaggcggt

SEQ ID NO: 125855 - DNA, 262 bp, Glycine max
agagaatggcagcacttggtgggaatcgtgatgtgacaggaagccagaacagcgttgagatcgatgctctagctcgctttgctgttgaagaacacaacaaaaaacagaatgcccttttggagtttgaaaaggtggtaactgcgaaacagcaagtggtttctggtaccttgtacaccatcactttggaggcaaaagatggtgggcaaaagaaggtttatgaagccaagtttgggagaagtcatggttgaacttcaaggaggtg

SEQ ID NO: 125856 - DNA, 108 bp, Glycine max
cagaaaatacggccttgatgataacactatagacttcattggtcatgctttggcgcttcatagcgatgatcgctacttggctgagccagcactggacaccgtgaagag

SEQ ID NO: 125857 - DNA, 105 bp, Glycine max
ctaaattcgcgcattcaaaaaattgagctaaatgatgctggaacggtgaagagcttcttactaaataatgggaaagtgatggaaggagatgcttatgtgtttgca

SEQ ID NO: 125858 - DNA, 226 bp, Glycine max
  unsure (1)..(226): unsure at all n locations
aagaagggaaagatgtgtgctctcttcatcaacgatcttgatgcaggagctggtcgtcttggtggaaccacccaatacactgtcaacaaccagatggtgaatgccaccctcatgaacattgctgataaccccaccaatgtgcagcttcctggtatgtataacaaggatgagaatccccgtgtngcccatcatccgtcaccgggtaacggatttctccacactctat

SEQ ID NO: 125859 - DNA, 256 bp, Glycine max
aaattatggattgcaatggggaagttgttgatcttcctgaagaccgggcaaataatgtctctgctgttataaatgcctttgcctctgaagctttgagaactatttgcttggcctttaaagagataaatagaaacccatgaacccaacatttcagatagtggctatactttcatagccttagtaggaatcaaggatcctgtacgccctggggttaaggaagcaattcaaacttgtatagctgctggaataactatcc

SEQ ID NO: 125860 - DNA, 257 bp, Glycine max
gacagatgctagcagaaaaacatataatctagtggatgccctgactagacacactgcacaggtgtatccaaaatcctggactactatattggtgtctttggataaccaaggcatgtggaacttgaggtctgcaatatgggaaagacaatatcttgggcaacagttctatcttagagtgtggaatgcacagaaaagccttgctaatgaatatgacattcccaataatgttctgctttgtggcaaactgttggacatca

SEQ ID NO: 125861 - DNA, 259 bp, Glycine max
tgaagttgaagtcttgcccttctctcttcaactccaaacacaagacatcatcatccatggctgcctccgtctccactgtcggagctgtcaacagagctcttttgaacctgaatgggtctggacctggggtttcagctcccagttcatccttctttgggagcagcttgaagaaggttattggctcaagggtccccaacacaaagatttcctctggaagcttcaagattgttgctgtagaagagaagaaagagattgaaga

SEQ ID NO: 125862 - DNA, 234 bp, Glycine max
gccatggaaacaggcatagcatgctacactcgcgggcctttcttgcctagtgtttcttccaagcactctccggcttccatttctccatgagttggcgtatggggtctgaaatcaagctctttatttggagaatcgctaagagtggcctccaaatcaacaataaaggtttcaaagacaaagaaggcttcactcgtgaccagatgtgaaattggtgagagtctcgaagaattcctc

SEQ ID NO: 125863 - DNA, 258 bp, Glycine max
ctgagcatgaagacaaatttgactttgaccctcttgatgttactaagacttggcctgaggacattatacccttgcagcctgttggtcgcttggtcctgaataaaaacatagataatttctttgctgagaatgaacaacttgcattttgccctgccattgtggttcctggtgtatactactcagatgataagatgcttcagaccaggatattctcttatgctgattcacaaaggcacagacttggaccatactatctgc

SEQ ID NO: 125864 - DNA, 254 bp, Glycine max
gtaaattaagagcatggctgcacaagctcttgtattatcatcttctcttaccttctcagcggaggctgcaagacaaagtcttggaccaagatcactccaatctccatttggcttctccagaaaagcctcctttcttgttaaggcagctgctaccccccctgtcaagtcaggatcagacaggcctttgtggtttgcatcaaagcaaagtctttcttacttggatggcaaccttccgggtgactatggaattgacc

SEQ ID NO: 125865 - DNA, 257 bp, Glycine max
cgacacacttgctggattaattaccatgttgcatgcttgcctagacatgaaagctattgtgctgggaaaatatcactatgttctctacttcctcgttttggcaatgcagccaaggatgttgttgactgtggatgagaacttgaagcctctgtcagtgcctgttcgtgttggacaagccgtagatgttgttggacaagcaggtcgtccgaaaacaatcactggctttcagacccactccacccctgttctcctggctg

SEQ ID NO: 125866 - DNA, 264 bp, Glycine max
  unsure (1)..(264): unsure at all n locations
attcattttagcatcaaggttgaatctcagagaaaaagaaacatcgacaagcatgtctggaagaggaaagggaggcaagggtctcggaaagggaggagccaaacgacaccgtaaggttctgagggttaacatagagggantcagcaagcccgcgattcgccgtctggccagacgtggtggcgtcaagcgtatcagtggtcttatctatgaagagactgacggtgttctcaagatctttctagagaacgtcattcgcgacgctgt

SEQ ID NO: 125867 - DNA, 246 bp, Glycine max
attcctcactaggagctcctctccactggttcttcatctgcatgcacacagttgcatagttttggaaaccaagaattcctgaagaagggtagcatcaacaagcagttctgaaaatggagatcaccaatgtcagtgagtatgaggctattgcaaagcagaagttgccaaagatggcgtttgactactacgcatctggtgcagaggaccagtggactctgcaagagaaccagaatgccttttccagaa

SEQ ID NO: 125868 - DNA, 253 bp, Glycine max
agctgctcgaatgtacagaatggaatgtgagaaggttgatactctttggtctggggaaattgattgtgatgatttcaaggccaagcttcttagtcaccaggataagccagcaattataaatgtgcacataggtacaactgtgaaaggggctgtggatgatcttgatctggtcataaaaaaaacttgaagaagctggattttcgcatgacagattctacatccattgtgatggggctttgtttggtctcatgat

SEQ ID NO: 125869 - DNA, 253 bp, Glycine max
ctgaaaaatatggagggacaagaagaggacgtaagagttggagccaacaggtacggagagaggcagccaatagggaccgctgctcaggctaaagactacagagagccaccgtcggcgcctctcttcgaaccgggagagttgtcatcgtggtctttctatagggctggcatagcagagtttctggccactttcttgttcctctacatcacagtgctgactgtgatgggtgtgttcaaatctaagagcaagtgtt

SEQ ID NO: 125870 - DNA, 247 bp, Glycine max
agattatcgtgaatgcgtataaaaggaaaataaagaaattagcgtcaaaatgttgggtgtgttcagcagctccatagtgtcgccgccggacgagctcgtggccgtcgagcaccgtactccgtcgccgaagatgacggcggcgactctgcggatacggttacgaggataagaacccctccgccgtatctgtagaagtcgcaaatctatccagcttcttatacccaccacaactagtcgccatttcagc

SEQ ID NO: 125871 - DNA, 260 bp, Glycine max
gtgattattcctcttttaacaatccacacccaaattctagggttccgaaatggacgctggcggaaagatcaagaagggcgccggatgtagaaagggcggcggcccaaagaagaagccggtttcaaggtccgtcaaagccggtctccaattccccgtcggaagaattggccgttatttgaagaaaggaaggtacgctcagcgtgtcggtaccggtgctcccgtatacttggctgcagttctcgaatacctagctgccgagg

SEQ ID NO: 125872 - DNA, 248 bp, Glycine max
ctcgagccgcgttttgaagatgtttctcacaaggactgagtatgaccgaggagtcaacacctgttcccccgaaggacgtttgtttcaggttgagtatgcaatcgaagccatcaagctgggatcaactgcgattgggttgaagaccaaagagggtgttgtcctcgcagttgaaaagcgcatcacttcgccgctcctggagcctagtagtgttgagaaaattatggagattgatgagcacataggttgtg

SEQ ID NO: 125873 - DNA, 252 bp, Glycine max
atccgcagctgctgttattcgcaccgcaaacaaacagtgagccatggccgtcggaaagaacaagcgcatctccaaagggaaaaagggtggcaagaagaaggcagctgatccctttgccaagaaggattggtatgacattaaggccccttctctttttcaagtgaaaaatgttggcaaaaccctcgtctctcgtacgcagggtaccaagattgcttctgaaggacttaaacatagagtgtttgaggtctcctt

SEQ ID NO: 125874 - DNA, 250 bp, Glycine max
acagtgttcatgggagtgcgttaggtgctaaagaagtggatgctacaaggtagaatctgggatggccatacgagcctttccatgtgccagaacgtgtcaagaagcattggagtcgccatacacctgagggtgctaaacttgaagctgagtggaatgccaagtttgtggaatatgagaagcaatacagtgaggaagctgcagagctgaaggctattattactggcgaattaccagctggttgggagaaagc

SEQ ID NO: 125875 - DNA, 249 bp, Glycine max
gtcattggacacagtgcttgtggtggtattaaggggcttctgtctttcccatatgatggaacctactctactgattttattgaggagtgggtcaaaattggcttgcctgcaaaggcaaaggtgaagacacaacatggggatgcaccttttgctgagttgtgctcacactgtgagaaggaagctgtgaatgtttcccttggaaaccttctaacatacccatttgttagagatggcttggtgaacaagaca

SEQ ID NO: 125876 - DNA, 253 bp, Glycine max
gtcttgctgcggtggtaactgtggttgcggaactcctgcaagtgcggcaacggctgcggaggctgcaagatgtacccagacttgagctacactgagtcaaccaccaccgagaccttggtcatgggagtggcacctgttaaggctcaatttgagggtgctgaaatgggtgtgcccgctgagaacgatggctgcaaatgtggaccaaactgctcctgcaacccctgcacttgcaagtgaggtgttgggagagcaa

SEQ ID NO: 125877 - DNA, 257 bp, Glycine max
gaacactcttcttcaatcaagcgaaggtggtctcgattgcaagtgatccacgatacactctacgcttcacaaaaccttcaaacccaattccacagaattcttctgatacaccatgccaccaaagcctttagactatgggtcaataaatgaaaacgtgaagaagagtcaatatgctgtcagaggtgaattataccttcgagcttctgaacttcagaaagagggcaaaaagattatctttactaatgttggcaacccgc

SEQ ID NO: 125878 - DNA, 254 bp, Glycine max
aaaccgaatgagagcattaacctcttcttcttccactttcattccaaagcgttattccttcttcttcttcctctccattctcttcgctcttcgatcctcgtccgggggctgctccgaataccaccaccaccacgcgccgatggccacgataggaggcttacgcgactcccaaggctctcagaacagcgtccaaaccgaggccctcgctcggttcgccgtcgatgaacacaacaagaagcagaattcacttctgg

SEQ ID NO: 125879 - DNA, 259 bp, Glycine max
  unsure (1)..(259): unsure at all n locations
atcccaggcgaggagaaagatggaggggaaggagcaggatgtgtcgttgggagcgaacaagttccccgagagccagccaattgggatggcggcgaagangcatgacgacggcaaggactaccaggagccggcgccggcgccgctggttgacccgacggagtttacgtcatggtcgttttacagagcagggatagcagagtttttggccacttttctgtttctctacatcactgtcttaaccgttatgggagtcgccggg

SEQ ID NO: 125880 - DNA, 259 bp, Glycine max
ctcagtgaaagagaatccgaggcgaagagaagagaaaaattaagatggaggggaaggagcaggatgtgtcgctgggagcgaacaagttcccggagagacagccgattgggacggcggcgcagagccaagacgacggcaaggactaccaagagccggcgccggcgccactggttgactcgacggagtttacgtcatggtccttttacagagcagggatagcagagtttgtggccacttttctgtttctatacatcactgg

SEQ ID NO: 125881 - DNA, 253 bp, Glycine max
ggctatcgcggtgcatggtggcgctggtgtcgaccctaatctcccactcgagcgccaagaagaagcgaaacaacttctcacgcgctgtctcaatcttggaatctctgctcgaaattctaatcttcccgccatagatgtcgtcgaacttgtggtgagggaattggaaacggctccgctgttcaattcgggcctcggatctgccctgacagaaaaaggaacggtggagatggaggctaacatcatggatggtcca

SEQ ID NO: 125882 - DNA, 252 bp, Glycine max
  unsure (1)..(252): unsure at all n locations
gtttatctgatttcaatttggctctggacttgggtttcttgnccaaagctagaaaatacacatttttcaagccaaagtttatcttctatgctacatacttgtctgagaaaattgggtactggagatacataaccatatacagacatctcaaggccaaccctgagtttcaatgttatcccatttttaagtactttgagaactggtgccaggatgagaacagacatggagatttcttctctgccctgatgaagg

SEQ ID NO: 125883 - DNA, 252 bp, Glycine max
ggcaagtgggggttggtttgtgtttttttgttatatttgtatgttgttctgtgctgggtccttaatttgtggctgagaattaattattattattatcaattatgggtctctcaaatttcccaagtgcatctgaaggggtgctacctgtgcttgtgataaacacggttctctcagtggcagtgttgaagaacatgtttagatccatgctccaagtagtacttggtggcagtgctgctgctaatggttcaaaca

SEQ ID NO: 125884 - DNA, 256 bp, Glycine max; identical to SEQ ID NO: 119167

SEQ ID NO: 125885 - DNA, 255 bp, Glycine max
agattattaagtcttctcaagctttgtctaatgatcactgccagtatttcctctttcagttgctccgtggcttgaaatatcttcactcagctaacatccttcatcgtgacttgaaacctgggaatcttctaattaatgcaaattgtgacctaaaaatatgcgattttgggttagcacgtactaactgcagcaagaaccagttcatgaccgagtatgttgtcactcggtggtatagggcaccagagctcctactct

SEQ ID NO: 125886 - DNA, 263 bp, Glycine max
ggaatactcaccaatgagacaaggtgcttgcaatgtgagacagtgacagctagagatgaaacatttttggacttgagtcttgatattgagcaaaacagttcaattacaagctgtttgaaaaatttcagttccactgagacactgaatgctgaagacaaatttttttgcgacaaatgctgcagtttgcaagaagctcagaagaggatgaagataaagaaaccacctcacatcttggtcatccatcttaagcggtttaagtacat

SEQ ID NO: 125887 - DNA, 256 bp, Glycine max
ctcgagccgtctggattgaattatcttcaaaatgagagaaatccttcatgttcaagctggtcaatgtggaaaccaaattggaggcaagttttgggaggtgatgtgtgatgaacatgggattgatgccactggaaattacgtaggtaactttcatcttcaacttgagagggttaacgtgtactacaatgaagcaagtgggggacggtatgttcctcgagctgtgcttatggaccttgaaccaggggacatggatagc

SEQ ID NO: 125888 - DNA, 258 bp, Glycine max
caacaaggcagcagtgcgaagagaaagatagagaagaagcgcttatcgaactcggacggaagcactgagttaactcagagcgagtgaaagtgttgctgcgtgatgtctggtggtatcgcccgtggacgcctcaccgaggagcgcaagtcgtggcggaagaaccatccccatggtcttgttgcgaaccggagacgctgcccgatggaaccgtgaacttgatggtgtggcattgcactatacccgggaagactgggactg

SEQ ID NO: 125889 - DNA, 257 bp, Glycine max
caaaaatattaagatgataaacattggagcacttgttgtactctttgcatttctcttcctcagttgtgcctatgcacaagacacaacaacccttgtgcctgcaatcataacttttggtgactcagccgtggatgtagggaataatgactatcttcccacccttttcaaggctgattaccctccttatgggagggactttgctaaccaccaacctactgggaggttttgcaatggcaaattagctactgattttactg

SEQ ID NO: 125890 - DNA, 250 bp, Glycine max
gcgactgcgcttcacgatgggtgcttacaagtatgtttcggagctatggcgcaagaagcagtctgatgttatgagattcttgcagcgggtgaggtgctgggagtaccgccagcaaccttctattgtccgtttgacaaggtctactcgcccagacaaggctcgccgcttgggtttcaaggctaagcagggttatgtgatttaccgtgttcgtgtacgaaggggtggccggaagagaccagttccaaaaggt

SEQ ID NO: 125891 - DNA, 254 bp, Glycine max
gcttcactctctctctcactgtcttccccgttattctctctccgagcttcactctcttcgcctctgccaaagggagtaaaatggggttctcctcctttctgggtcgtgttctctttgcctcccttttcatcctcactgcatggcagatgtttaatcaatttgatgccaatggtggacccatctcgaaagagttgattcccaaactcactgtggtgaagaaaaatttgtcctctaaattgggggtagcactacca

SEQ ID NO: 125892 - DNA, 254 bp, Glycine max
catccatagacatagtcaccgtcacttctgcagccgttactattccctcattcactggcctcaaggcaagcgcaggcaacgtgagtgccgcagttaaagtctcagctccccaagccacaaggttgggcatcaaggctacgctgaaacacgttggagtcgctgttgtggccactgccgcgagtgcagtgctggctagcaacgccatggccattaaaatataactgggtggtgatgacgggtctctggctttcgtt

SEQ ID NO: 125893 - DNA, 245 bp, Glycine max
catccatagacatggccaccgtcacttctgcagccgttgctattccctcattcactggcctcaaggcaagcgcaggcaaagtgagtgccgcagttaaagtctcagctccccaagccacaaggttgggcatcaaggcttcgctgaaagacgttggagtcgctgttgtggccactgccgcgagtgcagtgctggctagcaacgccatggccattgaagtgttgctgggtggtgatgacgggtctctg

SEQ ID NO: 125894 - DNA, 253 bp, Glycine max
aaaacactcataacacaaagcacaaagcaaagctcatccttgagttaaaaaatggcagcagcttcttccatggctctctcatccccatccttggctggcaaggccgtgaagctgggcccatcagccccagaagtgggaagggtgagcatgaggaagaccgtcaccaagcaggtctcctcaggaagcccatggtacggcccagaccgagtcaagtacttgggcccattctctggcgagcccccgtcctacctaa

SEQ ID NO: 125895 - DNA, 256 bp, Glycine max
ggaatagatacatggaaaaaggaaacaattatgaaaaaggaagcagctaagatgttggaatcggattcctctcctggctatgtttctgaagaagactataagtcactaccagctggttcagctgatccacgagatgaggaggtccctttactaaagaacatctattggaaagaattattagtccttgtgtatgtctgggtggcttttctcattgttcagattattaagacatacactaaaacttgctccatactgt

SEQ ID NO: 125896 - DNA, 231 bp, Glycine max
gtctccttggcccaggccaagattgagaagatcaagggcagcaagaaggccatcaaggtgttctccagtgccaagtaccctgctccagagcgcctgcaggaacatggctccatctacacgggcgcccaggaccctggcctgcagagacgctcccgccacaggatccagagcaagcaccgccccctggacgagcgggccctgcaggagaagctgaagtacttgcctgtgtgt

SEQ ID NO: 125897 - DNA, 255 bp, Glycine max
  unsure (1)..(255): unsure at all n locations
ggctctctctctagggtttgatcagactcaagggtttaagccatgggaaaaaggaaggcaaaggcaaagcagcctccaaagaagcgaatggataagctcgataccgtcttcagctgccctttctgcaatcatggcagcagcgtcgaatgccgccttgacatgaagaacttgataggggaagctatttgcgggatatgccaagagagcttttggantatcatcagagctttatcagagccaatagacatatacagt

SEQ ID NO: 125898 - DNA, 252 bp, Glycine max
cattgttcttctcccaggttatttagaaaagcaaaatggtgaagatttgctgcattggtgctggatatgtggggggtcctactatggcagtcattgcacttaagtgcccatccattgaagttgctgttgttgatatctctaaatcccgcattgcagcctggaacagtgaccagcttcctatctatgaacctggccttgatggtgttgtgaagcaatgccgtggcaagaacctcttcttcagcactgatgttg

SEQ ID NO: 125899 - DNA, 244 bp, Glycine max
cacctgttgcatatgcctcatgccccatagagacaatcaattatgtttctgctcatgacaatgaaaccctatttgacattgtgagcttaaagactccaatggatatcagtgtatctgagagatgcaggataaaccatttggcaaccagtattatagcattatcacagggtataccattgtctcattctggagatgagatactccgctcaaaatcactggatcgagattcttacaattctggtga

SEQ ID NO: 125900 - DNA, 250 bp, Glycine max
attgattccactactggtggttttgaagctggaatttcaaaggatggacagactcgtgaacatgctctgctttcattcacccttggtgtgaaacagatgatttgttgctgtaacaagatggatgctactacaccaaagtactccaaggccaggtatgatgaaattgtgaaggaagtttcttcctatttgaagaaagtaggatacaaccctgacaagattcttttgttcctatatctggttttgagggaga

SEQ ID NO: 125901 - DNA, 219 bp, Glycine max
gtactccaccacatccctatgttgcaatgtatccccctggtggcatttatgctcatctatccatgcctccgggatcttatccttttagtccttttgccatgccttctcctaatggcaaagctgaggcttcaggaaacactcctggcagcatggaagctgatggaaagcctcttgaggtgaaggaaaatgtggcattcaaatgaccaaaaggaattttgg

SEQ ID NO: 125902 - DNA, 252 bp, Glycine max
ttggggtcctcttgggtggcttatccccagtgagactttcccattgcccgactcgttccgctggtcagagtgtcaccgtttgtgttaacctgctcttcaccttcgtcattgcacaagccttcctctctatgctctgccacttcaagtttggcatcgtcttgttcttctctggctgggtcctcgtcatgtctgtcttcgtgcttttcctgttgcccgagactaagaatgtccccatcgaagagatgaccgaga

SEQ ID NO: 125903 - DNA, 247 bp, Glycine max
ggctatcgcggtgcatggtggcgctagtgtcgaccctaatctcccactcgagcgccaagaagaagcgaaacaacttctcacgcgctgtctcaatcttggaatctctgctctaaattctaatcttcccgccatagatgtcgtcgaacttgtggtgagggaatgggaaacggatccgctgttcaattcgggccgtggatctgccctgacagaaaaaggaacggtggagatggaggctagcatcatggat

SEQ ID NO: 125904 - DNA, 253 bp, Glycine max
agcatattccagtgtttttcatttcatcgggcattcaatggccaccacagcagctctatccggtacaagggtgagcacctccttcatgaggaggcaacctatgaccaccacaagcctaaagacattccccaacgttggtgaagctctttttggtctgaaaagtggacgaggtggtcgtgtcacttgcatggcctcgtacaaggtgacagtcataaccccagaaggagaagtggagtttgaatgcccagatgat

SEQ ID NO: 125905 - DNA, 250 bp, Glycine max
gctgatacaccacttaaactggctgattactacaagatccaaggggtgttctcccttggaagtatccctgactaccccactggtagtggtggctaccttcaaacttctgtcatggaagccgatttccgaggctttatagaggttgtgtttgagaccactgaagacactgtggagtcatggcacgttgatggccacagcttctttgtagtaggaatggatggagggcaatggtcatcagcaagcaggctaa

SEQ ID NO: 125906 - DNA, 250 bp, Glycine max
aaaggttgcttggcggggataagattaaagattcaacaatggcctctgcttctgctactcttctcaagtcatctcctgttcttgacaagtgcgagtgggtcaaaggccagacccttcgccaacctctcgtgagatgtaacccttcctcagcatcagctctcaccatcaaagctgcttcctatgctgacgagctcgtcaaaaccgccaaaacagtggcctcaccggggcgtggtattttggcgatggatga

SEQ ID NO: 125907 - DNA, 249 bp, Glycine max
ccccaggattcacttcatgctttcatcttatgctcccgtgatttcagctgagaaggctcaccatgagcagttatcagttggtgaaatcacaaacagcgcattcgagccatcatctatgatggccaagtgtgatcctcgccatggaaaatacatggcttgctgtctcatgtaccggggtgatgttgtgcctaaagatgttaatgcagctgtgggaattatcaagaccaagcgcactattcaatttgttga

SEQ ID NO: 125908 - DNA, 248 bp, Glycine max
gttgccaaccttattctgagcttcccggaagagaggcctataattgtactctctgccatgggaaagacaactaacatgctgttgctggctggagaaaaagctgtaagctgtggagtaactatggctgatagtattgacgagctcagcattataaaagatctgcatctcaggactgtggaagagcttggagtggacagaaatgctattgagaagcatctagaagaattggagcaacttttaaaggggat

SEQ ID NO: 125909 - DNA, 251 bp, Glycine max
gtggtggaatacgctgccagcgacagcgaggagagcagccagatataccctttcatggtggagctgagccgcagctgcaacgacgtggagttcatcctggtgatgggcgacgagtcggagaagacgaaggagctcctgaagcgggagaaggtggagaatgtgcctcacttcagcttctacaagagcaaggagaagatacacgaggaggaagggattggtcccgacatgctggtaggggatgtgctatacta

SEQ ID NO: 125910 - DNA, 245 bp, Glycine max
aaaagataaaatttcctatgatgaattgtctaattattggagctatactaatgaagaaaaaagaaacaaattgagcaatgaatttgtaaatagggcaaaagtaatggataaggaattaatttctctggatatattagaaaaccgaattcgattgtctaatgatgaaactaaaacaaaatatttaactaaaatatatgatcctttcctgaacggacgctttcgtggacaaatcgaaaatgtttttt

SEQ ID NO: 125911 - DNA, 202 bp, Glycine max
  unsure (1)..(202): unsure at all n locations
aaacataccgaatgagagcatcaaactcttcttcttcgatatccattgcgaacgttacttnttcttcttctttctcttcattttcttcgctcttcgatcttcgtccggggactgctccgaataccaccaccaccactcgccgatggccacgatcggaggcttacacgactcccaaggctctcaatacagcgtcgaaaccgaa

SEQ ID NO: 125912 - DNA, 255 bp, Glycine max
ccctcgagccgattcggctcgagctatggcggtggataagattacagaaccaacaatcgcctctgacttctgctactcgtctcaaatcatctcctgttcttgacaagtgcgagtgggtcaaaggccagacccttcgccaacctctcgtgagatgtaacccttcctcagcatcagctctcaccatcaaagctgcttcctatgctgacgagctcgtcaaaaccgccaaaacagtggcctcaccggggcgtggtattt

SEQ ID NO: 125913 - DNA, 243 bp, Glycine max
ttcttctcttaaaagagcctttgctttttctttaggtctttccgaattaagtacttgtttcattttctctcgaagcaagaaaaatgttcatcgagagtttcaaggttgagagtcctaacgtgaagtacacagagactgagattcagtccgtgtataactatgaaaccactgaacttgttcacgagaacaagaatggcacttatcagtgggttgtcaagcccaaaactgtcaaatatgaattta

SEQ ID NO: 125914 - DNA, 246 bp, Glycine max
gggaaatgattcagcttacaatgacgctctttaagtttgctttcattccaggttacaggtttctgccaacgcataccaacaggaggatgaaagcaattgacaaagaaatacgagaatcacttatggtaatcatcaaccgaagattaaaagcaatcaaagcaggggagcctactaacaatgacttgttaggcatactcgtggaatcaaattacaaggaatctgaaaaaagtagtggtggaggaatga

SEQ ID NO: 125915 - DNA, 247 bp, Glycine max
gatcagatgagcgttgaggatgagctttatcagcttcggccaatgaattgtccttatcatattttggtgtacaaaagcaagcttcattcctatcgtgatttccctatcagggtagcagaattaggaactgtttatagatatgaactatctggaagtttacatggccttttccgtgttagaggtttcacacaggatgacgcacatatatgttgtttagatgaccagattaaagatgagatcaggggtg

SEQ ID NO: 125916 - DNA, 248 bp, Glycine max
attgaattctccagagagaagaagaaacttaatcgatcatcacttcacttcactaatacatcatggcagacgagacccagaacaagtatgagagctctgaggttgaggtccaggatcgtggtgtttttgactttctcggtaagaaaaaggatgaagaagacaagcctcatcctcaggaggaggtcatcgccaccgagtttcaaaaagtcactgtctcagaccaaggagagaacaagcacagcctctta

SEQ ID NO: 125917 - DNA, 248 bp, Glycine max
tactgcttcaccttctgctctagaaaattcagtggtgatacatggcttcggctactctctctgtagccaaaccagcccttcaggcaaatgggaaaggcttctctgaattctctggcctccgcagctcatcaggcttccttcccttttctagaaaatcttcagaggatttccattctgtcattgccttccagacctatgcagttggaagcagtggaggatacaagaagggtgtgacagaagcaaaactg

SEQ ID NO: 125918 - DNA, 242 bp, Glycine max
gacaattgacgagcttaatgcagagttggaccgtattggcaggccaattgctgtggactcaggggcccaactttacactattttagagatgtgtcgtgcatttgacaaagtgtttagagaacacctggatggaggacgtcctggtggggaccggatatatggagttttttatcaccaattaccggctgctttaaaaaagctcccttttgatcgcccatcttctttaagaaatgtccagagag

SEQ ID NO: 125919 - DNA, 246 bp, Glycine max
  unsure (1)..(246): unsure at all n locations
cgagacccggaggccaatcgtcncgaaacgtttctcagaggagtggacgagtgccagtcttccacttcggttcgggcntcgttcgagaagatgataaagggaggcccaggacaccgtgtgcagtgccctcgaggccgctgatggtggggcccagttcaaggaggacgtttggtccaggcccggtggcggcggtggcattagcagggtccttcaagacggtgccgtttgggagaaggctggggttaa

SEQ ID NO: 125920 - DNA, 248 bp, Glycine max
gttatcttctagtatttttcaagtaacttaaggtttcaaacctaggaagttggaagtcatggcagcaacattgatggcagcaacaagttctggcactcttaaagcaactcctttcctaggccaaggcaagggtgccaatgccaatgctcttagggatgttgtttccatgggaactgggaagtacaccatgggcaatgatttgtggtatggaccagacagagtgaaatacgtgggacccttttcagctc

SEQ ID NO: 125921 - DNA, 244 bp, Glycine max
cttcaatgaagttgatatgactaatttgatgaagctccgttctgattataaggatgcttttgttgaaaagcatggagtcaaattggggcttatgtctggctttgtcaaagctgctgtcaatgcactccaacatcagccgattgtcaatgcagtcattgatggtgatgatattatatacagagattatatagatatcagcatagctgttggtactccaaagggccttgttgtaccggttatccgc

SEQ ID NO: 125922 - DNA, 245 bp, Glycine max
accaaggtatataaacgtggagctgtgggaaggtccattgacataacacgatattcaggttacgaggagcttaaacaggatctagctcttaagtttggtattgagggacagctggaggatcgagaaagaattggttggaaacttgtatatgtagatcatgagaatgatgttttgcttgtgggagatgacccttgggaggaatttgttaactgtgtccgctgcattaaaatactttctcctcaaga

SEQ ID NO: 125923 - DNA, 245 bp, Glycine max
caagaaccatatttttcttgaaaagtgatggaaccttgacgccattggccattgagttaagtaagccgcatcctcagggtgaaggatatggtcctgttagcgaagtctacgtgccttcgagcgagggagttgaagcttacatttggttactggcaaaggcttatgttgttgtgaatgattcgtgctaccatcaactcgtcagccactggctaaacactcatgcggttgttgagccattcgtcata

SEQ ID NO: 125924 - DNA, 244 bp, Glycine max
acaggttcaaaccggagcaaaaaaacttgttacgatggtttcttccgacaaggatccacgagaggaagtccttcaagcatggtacatggatgatagtgatgaagatcaaagactcccccaccacaaagaacccaaggagtttgtctcgttggaccaacttgctgaacttggagtccttagctggaaattagatgctgataaccatgaaaatgatccagagctgaaaaagattcgtgaagagcgt

SEQ ID NO: 125925 - DNA, 220 bp, Glycine max
cccagagcagctcatcagcggcaaagaagatgccgccaacaactttgcccgtggccattataccattgggaaagagattgttgatctgtgcttggaccgcatcagaaagcttgctgacaattgcactggactccaagggtttttggtcttcaatgccgttggtggaggaactggttctggacttggttcccttctcttggagcgtctctccgttgattat

SEQ ID NO: 125926 - DNA, 246 bp, Glycine max
ctgattcacaaaggcacagacttggaccaaactatctgcaacttcctgctaatgctcccaagtgtgctcaccacaacaatcatcatgaaggtttcatgaatttcattcacagggatgaggaggttaattacttcccttcaaggtatgatcctgttcgtcatgcagaaacgttccccatacctcctgctatctgcagtggaaggcgtgaaaagtgtggaattgagaaggagaacaactttaagcagc

SEQ ID NO: 125927 - DNA, 269 bp, Glycine max
gtggaagagaaaaggaggagcaggaggcatcaccgttaccaaacatggtgaaagggcgacaaggagagcgtgttagactttacgtcaggggttcaatacttggatacaagaggtccaagtcaaatcaatacccaaacacctcattaatccagattgagaatgtaaacactaaggaagaagttgcgtggtactgtgggaagcgtatggcttacatttacaaagccaaggtaaagaaggacggaagccactatcgctgcatttggggtaag

SEQ ID NO: 125928 - DNA, 273 bp, Glycine max
tggatacctaggcacccagagacgaggaagggcgtagtaagcgacgaaatgcttcggggagttgaaaataagcgtagatccggggattcccgatataggtcaacctttcgaactgctgctgaatccacgggcaggcaagagacaacctggtgaactgaaacatcttagtagccagaggaaaagaaagcaaaagcgattcccgtagtagcggcgagcgaaatgggagcagcctaaaccgtgaaaacggggttgtgggagagctatacaagtgtc

SEQ ID NO: 125929 - DNA, 272 bp, Glycine max
tgagagtgaaagcaaggctgaactagacaggttctgtgatgctcttatttccattagacaagaaattgctgagattgagaaaggaaatgctgacattaacaacaatgtccttaagagcgcccctcatccaccatcactgctcatggctgatgcatggacaaaaccatactccagggaatatgcagccttcccagctccttggctccgtgcttcaaagttctggcctcccacaggacgtgttgataatgtgtacggtgaccgcaacctgattt

SEQ ID NO: 125930 - DNA, 268 bp, Glycine max
aattcgtgttgagtgttgagttgaggcagagattcaagagaatggagggtgtgagccccgagcccctgagtccagaattggattccaaatccaaacatgacacagcaaaagaagatgatgacgctttgaaagacagcactgaagccgaagtcaccaaaattcgtctcatgagagcctttgttgaaagccgagatccctcttccaaggaagaaaatgatttgatgatgagaagattcttgcgggctcgtagtttggatgtggagaaggc

SEQ ID NO: 125931 - DNA, 270 bp, Glycine max
tcacattttagaagaataccccctcttttgctgcatcagaggagttgtaaattaagagcatggctgcacaagctcttgtatcatcatcttctcttaccttctcagcggaggctgcaagacaaagtcttggaccaagatcactccaatctccatttggcttctccagaaaagcctcctttcttgttaaggcagctgctaccccccctgtcaagcaaggatcagacaggcctttgtggtttgcatcaaagcaaagtctttcttacttggatg

SEQ ID NO: 125932 - DNA, 267 bp, Glycine max
actctctctcaccaaagccttcctagaacgaaaaaaaaaagaagagcaattttccctcaccaaagaagaagaagcaaacaatggccgatcaacttaccgatgaacagatctccgagttcaaggaagccttcagcttgttcgacaaggacggcgatggttgcatcacaaccaaggagcttggaactgttatgcgttcattggggcaaaacccatctgaggcagagctccaggacatgatcaatgaagtggatgctgatgggaatggta

SEQ ID NO: 125933 - DNA, 270 bp, Glycine max
accgttctttcggagatggctccttcacccttgcctctccattgaaaggatatggtgtgtctcaagtgctggaatctggacgtccagattacaagaaaggtgatttagtgtgggggattactaaatgggaagagtatagcttggtcccctcatctctcatacatttcaaaattgagcacactgatgtcccactttcctactacactggaattcttggtatgccaggaatgactgcttatgctggtttctatgaggtaggttctcccaaaa

SEQ ID NO: 125934 - DNA, 266 bp, Glycine max
  unsure (1)..(266): unsure at all n locations
tttttcacaccaccaagccattcgtagatgnttctccacattgttttcctcctcttcccttcagtcatccacatcccatgccactgtccaagacttctgtgtggcagaccttaagggtgcagacaccccttcaggctacccttgcaagccacctgcaaatgtaacttcagatgactttgtgtacacaggcttagctgaagctgcaaatgtcacaaacataatcaatgctgctgtgaccccagcttttgttgctcaatcccagtctc

SEQ ID NO: 125935 - DNA, 268 bp, Glycine max
aaataattgtagatgcattggagatcactggacagaggggcatcatcaataaaggatggggaggtcttgggaatttggcagaaccaaaggactctatatacttattggataattgcccgcatgattggcttttcttgcgttgcaaggctgtggttcatcacggaggtgctggaacaacagctgccgggctcaaagctgcttgcccaacaaccatagttccttttttcggcgatcaaccattttggggtgagagagtacatgttagagg

SEQ ID NO: 125936 - DNA, 267 bp, Glycine max
ccatctcagcaccatatctgggagtaatagcaatgacgcgtttggcaaggccaagcttctcaaagctatgttataggcgctctgataagagcatcaaccttgtgcataacagcctcaaattagtagctttgtggtgcatccttgctgcttacgtaacaccattctttaccattcctcacacggttcacctcgttctgggttggatcctgtatttgcttggtacctttgcactttgctcaattgcaatcaatgtctttatgctaccaa

SEQ ID NO: 125937 - DNA, 266 bp, Glycine max
ttggcagcgcagtgacggtctcgatgttgtccgcaatgaggtccctggactggaggctttagcacatgacacgagaccgtcatggcagcgcagccctgccacgtactatcattggcatgagccatgggtactgctgatggcgagggagaaggttcagattaagacgattgacaacgccactgcgaggcaggtcacattctccaagcgtcggagagggctcttctagacagctgaggagctttcggttctaagtgatgctaatgctg

SEQ ID NO: 125938 - DNA, 269 bp, Glycine max
acagtttccgttaacgctctccaatacaaaataaccactcactgaatattcggtcgaagatgtccgccgccgaagaagctaaagttcccgccgtcgaaaagccggtggaggaggtgaaggcgccgaagcttgccaaggagaagaaacctaaggctccgaaggaaaagaagccgaaacaggccaaaactgcttctcatcctccatatctccagatgattaaggacgctttgattgctctgaacgagaaaggaggatcgagtccatatgcg

SEQ ID NO: 125939 - DNA, 223 bp, Glycine max
  unsure (1)..(223): unsure at all n locations
cttggagaaaggccagtccctgtgacggggcagccctctctgtccctcggtcagctcgtgtgaatcctgggacctcttccggtcggctctgcccgctgttctggggtcgactgccacgacttttgattcatcaagcttcctccaggncggagcggctatttttcctaaatgagaattgttacattgcaaattgttgaataaaatattttgcgctccttcaagc

SEQ ID NO: 125940 - DNA, 267 bp, Glycine max
  unsure (1)..(267): unsure at all n locations
gtggccgtggttcacgaggcggaggcggttaccatggaagtgccaccaacaatgcacctgctnccatccattgaagatcccgggcatttcccaaccttgagtgccaagtgaggccttcccagaacccttttgacatatctctgtcctattttcaattttgggttctcttatttgaacttaagcaggaaaggaactatggtaattggatttcctggattagaaggttcatttaattttatgccttaaaagtgtaaatttaggttgttc

SEQ ID NO: 125941 - DNA, 268 bp, Glycine max
aacgcaatgagttcgtcgaacctcagagatcttcaacgcgaattggagaacaaagccaatgatctcagcaagcttcaaaaggaaattgcgaagaatcaccaaatgagaaagaaatacacggtccagcttggcgagaacgagctcgtccttaaggaactggatttattgaaagacgacgcaaatgtttataagttgattgggccagtacttgttaagcaagatttggccgaggccaatgcaaatgtccgcaagagaatcgaatacatct

SEQ ID NO: 125942 - DNA, 268 bp, Glycine max
cacaacaacaataacaatggctgcctcactacaagctgcagctaccttcatgcaacccaccaaggttggcatagcctctcgcaacctcaaatctacacaatgcatttctaaggcttttggcttggaacctgctgcagctaaactcacttgctcccttcagcctgatctcaaagaatttgctcaaaaatgtgtcgacgctaccaaaattgcaggattcgcccttgccacctctgctctcgttgtttctggagcaagtgcagaaggtgtt

SEQ ID NO: 125943 - DNA, 266 bp, Glycine max
ctagcccaaccggatcttcacgactaggagatggcaaagtcgaagaaccacaccgctcacaaccagtcctacaaggcccataagaatggcatcaaaaagccaaagaggcatcgccacacttccaccaaagggatggatccaaagtttctgaggaaccagaggtacgcgaggaagcataacaagaagagcggtgaaacagccaccgaagaagagtaaagtgccactctcaaatgggcctattaggatttgatttgttatttaagccc

SEQ ID NO: 125944 - DNA, 264 bp, Glycine max
cgagaagctacacgcggagaccaagcccgcagagaaggctccggcggagaagaagcccaaggccgagaagaagatatcgaaggaaggaggaagcgagaagaagaagaagagaacaaagaagagcgtggagacctacaagatttacatcttcaaggtgctgaagcaggttcaccccgacatcggaatctcaagcaaggccatggggatcatgaacagtttcataaacgacatcttcgagaagctcgcccaggagtcgtcgcgatt

SEQ ID NO: 125945 - DNA, 263 bp, Glycine max
tggacatctctggaatatggcaagaatacacttcccccaataataaataggccgatagttcaatctgaaagggcttcatacccatcaccaaaaccaaggacaaaagattgggataagttggaagctcaagtgaaaaaagaggagaaagaagaaaagcttgatggtgatgctgctttgaataaattgttccgtgatatttaccaaaatgcagatgaggacatgaggagagcaatgagcaagtctttcttggagtcaaatggaac

SEQ ID NO: 125946 - DNA, 262 bp, Glycine max
cagatttcgtaaacaacatagaggaagaatgaaaggaatatcctatcgagggaatcatatttgcttcggaagatatgctcttcaagcacttgagccagcttggataacatctagacaaatagaagcgggacggcgggcaatgtcacgaaatgttcgccgaggtggacaaatatgggtacgcatatttccagacaaaccggttacagtaagacctactgaaacacgtatgggttcaggaaaaggttctcccgaatattgggta

SEQ ID NO: 125947 - DNA, 264 bp, Glycine max
gtttgtatttgtgtaggatacaacttggacaacctgcgacagttaaagttgctgcaaaccttgtccggcttctcgcatataacaataagaatttcttacagaccgggttaattgttggtggttgggataaatatgaaggtggacaaatttatggagttcctctgggtggaacaatagtacagcaaccttttgctatcggaggatctgggtccagttacttgtatggtttctttgaccaagcctggaaagagggaatgaccaagg

SEQ ID NO: 125948 - DNA, 262 bp, Glycine max
attaataacgctcatgactgttcgcttaaagagattaagaatgggcgactcgcaatggtggcaatgcttggcatctttgtacaagcttcagtgactcatgttggaccaattgataatcttgtggagcatctttccaatccatggcataaaacaattattcagacccttgccaattctagctcttagttctagaaagtactgtatgaatatgtggcttgggcttgagcttatccataaaatgaaattactttttatttttcca

SEQ ID NO: 125949 - DNA, 262 bp, Glycine max
atcgtcttctgcttcaaggcaggagtgcttgttattctctattaacaaggaaaatgtcaggtgatgaggttgttgttgcagctgagccagctgctgccatcccaggcgagcctatggatatcatgactgccttgcaacttgtgctcagaaaatctctggcttatggtggtcttgcacgaggccttcacgaaggggcaaaagtgattgagaagcatgctgcacaactctgtcttctagcagaagactgtgaccagcctgacta

SEQ ID NO: 125950 - DNA, 263 bp, Glycine max
gagctttctgattatgacaaagaaggttctattttgcgtgttcgtggaaagaacattttggagaatgaatatgtcaagattggagcatttcatactttagaactcgaactgcagcggccgtttgtgctcagaaaggatgtttgggattctttggctttggaggtactacagcaggcctccggtacattatcaatcctggtgcaagtgctgatctagcagtggtgttgatgcaagaaggattagcccatatcctccttgttggt

SEQ ID NO: 125951 - DNA, 266 bp, Glycine max
gaaattagaggcttaagtggtaagaaagatttcttggatgaagatgatattcaaaagttttcctacttaagggcagtgataaaagagacacttagattgcacttaccagcaccactacttataccaagagaaacaaataaaaaatgcatgttagatggctacgaaattccagccaagacattattatatgtgaatgcttgggcaattcatagagatcctaaggcttggaaagatccagaagagtttatacccgagaggtttttaaa

SEQ ID NO: 125952 - DNA, 259 bp, Glycine max
ctcgagccgcctgacatgggtggtgctggtgctggggcagccgaggatgattatgcagctccttctggtggaagtggtgctggccccaagattgaggaagtggactaaatgtgtagttgctttcatccatttatctgtttaaaacttatttgatgcttttttattggattttaacttttatgatttttgttggatgggatactaattgttttgcccgtgtgatatgaacgttgctttacgcattatgtcatttgcttta

SEQ ID NO: 125953 - DNA, 260 bp, Glycine max
ttcaaacctaggaagttggaagtcatggcagcaacattgatggcagcaacaacaagttctggtactcttaaagcaactcctttccttggccaaggcaagggtgccaatgccaatgctcttagggatgttgtctccatgggaactgggaagtacaccatgggcaatgatttgtggtatggaccagacagagtgaaatacttgggacccttctcagctcagaccccttcatacttgaaaggagaattccctggggattatgg

SEQ ID NO: 125954 - DNA, 262 bp, Glycine max
ttggagctgaccatgaagttggtgacactagtggatgggccctcggagttaattacaacacctgggcctctgggaaaactttcacagttggtgatactttggtgttcaagtatgactccactcatcaagttgatgaggttgatgagagtggatacaacagctgcagctcaagcaacagcatcaagaactaccaagatggaaactccaagattgaattgacttcaccaggcaaaaggtacttcttgtgccccatttcaggcca

SEQ ID NO: 125955 - DNA, 263 bp, Glycine max
ttgtggcgctggcgtggtgaagggtttcgaggggaaaacaaaatacggtacgttgaatggtggtgccaactttgttgcccctggttacaccaagggtgatggtcttggtgctgagattgttggcactttcgtccttgtttacaccgttttctccgccaccgatgccaaacgtaacgccagagactctcacgtccccattttggcacctttgcctattgggttcgcggtgttcttggttcacttggcaaccatccctatcaccg

SEQ ID NO: 125956 - DNA, 262 bp, Glycine max
ctggcccatggctaccttctggtgggcccattcgtgaaggccgggcctctgaggaacaccgagatcgccgggcaagcaggctctctcgccgctggtgggcttgtggtgatcctcagcctttgcctcacaatctatgggatttcatctttaacgaaggagacccatccactgccccgtcactgaccttgacgggccgcaagaaggagcccgatcagctccaaactgctgatgggtgggccaagttcaccggagcttcttcttc

SEQ ID NO: 125957 - DNA, 277 bp, Glycine max
gtttctatccctcactaggagctcttctccattggttctacatctgcatgcacacacttgcatagttttggaaaccaagaatttttgaagggtagcatcaacaagaagttctggaaatggagatcaccaatgtcaacgagtatgaagctatgcaaagcagaagttgccaaagatggtgtttgactactacgcatctggtgcagaggaccagtggactctgcaggagaacagaaatgccttttccagaattgtgtttcggccacgtattcctattgat

SEQ ID NO: 125958 - DNA, 258 bp, Glycine max
cgtgcaacaaattagcagagaaggttaagttcgatgatcctttggaagcggcgcagttacacggtgggtgtggcgcgtggggggtgatattcacggcgctgttcgcgaaaaaggagtatgtgagccaggtttatggggaggggagggcgcacggttgttcatgaggggtggagggaagttgctggcggcgcacgtgattcagattttggttattgttgggtgggtgagtgcgaccatggggaccttgttttgggggtt

SEQ ID NO: 125959 - DNA, 285 bp, Glycine max
caaaaggccatataatttttttttatttgaaataatgtccgggatcatccacaagattgaggagaccctccatgtgggagggcacaagaaagaggagcacaaaggagaacaccatggtgagcacaaaggtgaacacaaaggagaacaccatggtgagcacaaggtgaacacaaaggagaacaacaccatggggagcacaaggagggacttgtggataagatcaaggacaagatccatggtgatggccatgacaagggtgagaaaaagaagaagaaggacaagaag

SEQ ID NO: 125960 - DNA, 274 bp, Glycine max
gacggcaaagacggaggagaggtcgcaaacgcaaaaatggtgaagtttctgaaaccaaacaaggccgtcattgtccttcagggacgctacgccggcaagaaagccgtgatcgttcgaaccttcgacgaaggaactcgcgagcgcccctcggccactgtttggtggcggggataaagaagtaccctgcgaaggtgatcaagaaggactcggcgaagaagacggcgaagaagtcgcgcgtgaaggcgttcgtgaagctcgtcaactaccagcacct

SEQ ID NO: 125961 - DNA, 271 bp, Glycine max
caactaaatcgaaggcaccagcgaagcccaagccagctgctaagcctaaagccaaagctccagccaaggccaaacccgctgctaaaccaaaggcttctgctgctgccaagcccaagcctgctgccgccaagcccaaagccgctaaaccgctgccaagtccaagcctgctgctaaaacaaaggctgttcctgccaagcccgcggcaaagcccaaagccaagcccgtcaaggcttcaaggacgtcgacgaggacttcaccagggaagaaagca

SEQ ID NO: 125962 - DNA, 276 bp, Glycine max
  unsure (1)..(276): unsure at all n locations
aaaaaaatctcaaaataaaacaaataaaccacacacttcacaccctgttcaacataattagncaatacaagaacaagaagaaacaatgtcttgctccaatctcacaatgttggtgtcctcaaaaccttccctttccgatccctccaatcttccttccgctctgtcctcaaccattttcagctcccttcacaaaacccaacttcatgcactcattcacgctcctcaaccacccaaattcagtgtggtctgagagaactcagaacccgcattgattcc

SEQ ID NO: 125963 - DNA, 274 bp, Glycine max
acaatggctgcctcactacaagctgcagctaccttcatgcaacccaccaaggttggcatagcctctcgcaacctcaaatctacacaatgcatttctaaggcttttggcttggaacctgctgcagctaaactcacttgctcccttcagctgatctcaaagaatttgctcaaaaatgtgtcgacgctaccaaaattgcaggattcgcccttgccacctctgctctcgttgtttctggagcaagtgcagaaggcgttccaaaaaggctaaccttcga

SEQ ID NO: 125964 - DNA, 142 bp, Glycine max
taattatcaaacctaaccagtaaaaatggtgaccgtggaggaaatccgcaacgctcagcgttcccatggacccgccaccatcttggccttcggcaccgccacgccgtccaactgcgtctcccaagccgattaccctgactac

SEQ ID NO: 125965 - DNA, 271 bp, Glycine max
gcatatctcatttgaatacattccttgtagtttatactgaaagatgggtttgaagatggcgttactgatcctaggcctttccctcatgctccttttggtctcctctgaggtggcatccacgaatacaaaagaggaggcaaatggagggatgatgccaaatatcccggtggaagctatggagggggttacccaggtcatggcggtggcggttatcctggccatggcggtggcggttatcctggccatggcggtggtggtggctatcctggtc

SEQ ID NO: 125966 - DNA, 244 bp, Glycine max
gagaagcattagcactaggagcagcaacaactagtctcagctgaaatggcctcttcagtgatggcatctgtggccctcaaacctgcccctttcactgttgagaagtcctcagtgagaggccttccctctctctcaaggaactcttctcattcagagttgtggccagtggcaagaagatcaagtctgactaaccttatggaattaatggtggcatggctttgagggatggaactgatgcatctgg

SEQ ID NO: 125967 - DNA, 275 bp, Glycine max
ctcagctttggcagagaatgaggaagtggcttagtcatgccaaaagtttgtgctcccctaaagaaaccaagaattttggcctggacaatctagatgctgaaataaatatgcttgtggagttgttatctcaaggaaatcaacagattggttttgtcacaatgatctacaatatggtaacataatgatggatgaagatacaagagcaatcactttaattgactatgaatatgccagttacaatcctattggatatgatctggcaaatcatttctgtg

SEQ ID NO: 125968 - DNA, 273 bp, Glycine max
caatttccaattcaaaaccctaactccgttcgaagcaccaaatcgtgatggcaccatgggcagagaagaagccagcagagaagaagcccgcggaggagaagaaatcgacggtgggagacaaggctccggcggagaagaagccaaagccggaaagaagcttccgaaggagggaggcgccggcggagaagggaagaagaagaagagaaacaagaagagcgtggagacatacaagatctacatcttcaaggttctgaagcaggttcaccctgacat

SEQ ID NO: 125969 - DNA, 249 bp, Glycine max
cgcaaggtgtctttgatccgagccatcatgtacatggtggctcagtgcttgggtcctatctgtggagttggtgcagataaggctttccaaaagtcttacttcaacaagtatggtggtggagctaattccctcgctgatgggtcagcacaggtactggattgggtgctgagatcattggcacctttgttttggtgtacactgtcttctctgccactgaccctaagatgaatgctagagattcccatgttc

SEQ ID NO: 125970 - DNA, 269 bp, Glycine max
gactgcgcttcacgatgggtgcttacaagtatgtttcggagctatggcgcaagaagcagtctgatgttatgagattcttgcagcgggtgaggtgctgggagtaccgccagcaaccttctattgtccgcttgacaaggtctactgcccagacaaggctcgccgcttgggtttcaaggctaagcagggttatgtgatttaccgtgttcgtgtacgaaggggtggccggaagagaccagttccaaaaggtattgattatggtaagcccacca

SEQ ID NO: 125971 - DNA, 264 bp, Glycine max
gtcttagcaagaagccagaagatttttccaaatatcaggcatttgaattgattcacgccagatgggcaatgcttggtgctgctggattcatcattcccgaggccttcaacaaatatggagcaaactgcggtcctgaggctgtttggtcaagactggagctctgcttcttgatgggggtaccttgaactacttcgggaaacccatccccatcaatcttattgtggctgtcattgctgagattgtcttgtgggaggtgcagagtac

SEQ ID NO: 125972 - DNA, 260 bp, Glycine max
gccctatacaaccaaaccctaacacacacccatttgattcagtttccatggcttacctcaaggttgcatttttggctgcagtgctctgcatggttgtggtgagtgcacccatggcacatgcagctatcacgtgcgggcaggtacgagtagcctggccaattgcatcggttacctccagaagggaggaacgccgtcgtcgggatgctgcaacggagtgaagagcctcaatgccgccgccaagaccacggcgaccgccagac

SEQ ID NO: 125973 - DNA, 264 bp, Glycine max
ttcgatcatctttattttttagaatatccccacttaacatggaataattaacactagcatttccatttttactaacacttcatctgttagtatcaggtgtagtagcaacaacatcgttcacactggttaacaaatgcgactcacagtgtggccaggcattctctcaaacgcagtattgctgcagcggcgcgtatgggtcgcccaccacttgcaagccttcgccttactcgcagattttcaagaacgcttgcacacgcgcctaca

SEQ ID NO: 125974 - DNA, 268 bp, Glycine max
cccagaggtgctagagaagtggttgagagtggacttcaaggagccagtatggttcaaagctggagaccaaatattctcagaaggtgggcttgactatttgggaaacccaaaccttgtccatgcacaaagcatcctggcagtgctggcttccaagttatcctaatgggccttgttgaagggtaccgcatcaatgggcttgatggggtgggagagggcaatgacctctaccctgggggccagtactttgacccactgggcctagctgatg

SEQ ID NO: 125975 - DNA, 126 bp, Glycine max
ttcttcaaactcgcaagcagattgaatctcgtaaccctcttgcatttgctcctaaagtcatcagagattctgattctgtacctgaaagcggggatgacccaaataaaactccagcttccgcacgac

SEQ ID NO: 125976 - DNA, 266 bp, Glycine max
tccaaatcttgtcactctgattggttatcatgcttgtgaaacagagatgtttctcatatacaattttttatcaggtggtaatctcgaaaagtttatccaggagaggtccacaatggatgtggagtggaaaattcttcacaagacgcattagacatagcccgtgcactcgcctatctgcatgatacgtgtgttccccgcgttcttcaccgcgatgtcaagcccagcaacatcttgttggatgatgatttcaatgcttatctatctga

SEQ ID NO: 125977 - DNA, 264 bp, Glycine max
aagcactatagaaaaaaaaggacattcattcatctatggctacccttattgctcccagtaaccactctccccaagaagatgctgaagctctcagaaaggcttttgaaggatggggaactgatgagaacactgtcatagtaatttgggtcatagaactgtgtatcagaggcagcaaatcagaagagtttatgaggaaatttaccaggaggatcttgtgaagcgcctagagtctgagatcaaaggagactttgagaaagccgtgta

SEQ ID NO: 125978 - DNA, 264 bp, Glycine max
gtgcttttcttatgatggatatggctcatataagtgggcttgttgctgcatctgtactttctaatccctttgagtattgtgatattgtgaccaccacaacccacaagtctttacgaggtccaagaggtggtatgatattctcaagaaagatactgtgcatggggttgatttggagcctgccattaacaatgctgtttttcctggtctacaggggggtcctcataaccacacaattggaggactagcagtttgcttgaagtatgc

SEQ ID NO: 125979 - DNA, 263 bp, Glycine max
ggggaggcaagggacaaggaaaatctttccaatgtgagcttgtctttgccaagatgggaatcaaccccatcatgatgagtgctggagagttggaaagtggaaatgcaggagagccagcaaaactgatcaggcagagatacctgaagctgcagacatgatcaagaagggaaagatgtgcgctctcttcatcaacgatcttgatgcaggagctggtcgtcttggtggaaccacacaatacactgtgaacaaccagatggtgaatg

SEQ ID NO: 125980 - DNA, 272 bp, Glycine max
ctgctcgagcggctcgagcggctcgagcggctcgagccaatatagcccaagccctatacaaccaaaccctaacacacacccatttgattaagtttccatggctagcctcaaggttgcatttttggctgcagtgctctgcatggtgtggtgagtgcacccatggcacatgcagctatcacgtgcgggcaggtgacgagtagcctggccaattgcatcggttacctccagaagggaggaacgccgtcgtcgggatgctgcaacggagtgaagag

SEQ ID NO: 125981 - DNA, 291 bp, Glycine max
gattcactgaaacagagcgcagaagaaaatacatttactaatcgagaaaatgagcagcggcgctggaaaggttgtgtgtgtcaccggcgcgtccggttacattgcttcctggatagtcaaattcctcctccttcgcggctacaccgttaaggccaccgttcgcgacacaagtgatccgaaaaaaacaaaccacttgattggcctcgacggtgctaaggagagactgcacctctacgaggcgaatcttctcgaagaaggttcctttaactctgtcgttcaggttgccatgca

SEQ ID NO: 125982 - DNA, 298 bp, Glycine max
cggctcgaggtttgatctgcctgataattatttctatgcggttatggattgtttctgcgagttgacttggagccacacccctcattttcctattgggtactgctctcagtgccctgataaggttcaatggccctctcactttggttccaaacctcctctatatttcaatgctggcatgtttgtttatgagcctaatctcgacacctaccgtgatcttctccaaactgtccaactcaccaagcccacttcttttgctgagcaggactttctcaacatgtacttcacggacaagtacaag

SEQ ID NO: 125983 - DNA, 282 bp, Glycine max
gaaatgatgatgaagcgtcggttccttatggttctcttggttctctatgtcacagtggagcagagtaagctactccaccacgtagaagccgatggtgggtttctaaaaacaagaggagtgcagcttatgctgaatgcgagtccctactatgctaatggctttaatgcctattggcttatgtaccttgcctctgatccttcccagagaaacaaaatctcatcggtatttcaataggcttcaaatttcccactcaacattgccagatacttgggccccagtgat

SEQ ID NO: 125984 - DNA, 288 bp, Glycine max
caaacagactggaaatgggtcgtggggtcagtgctggtggtggacagagttccttggattatctctttggcagtggggtacctgccagcagtgcaaatggtgctcgcactcaaaatgcaagtgctccttcaccaccggttgataagcaaagtccagcaccagcagcagcagcagcacctgcacctgcagcagcagcagcaccagcacctgcaccagcaccagcaccagcaccagctgataagcaaattccagctggaattcctggaagtctcaaaacaattaccatcg

SEQ ID NO: 125985 - DNA, 283 bp, Glycine max
  unsure (1)..(283): unsure at all n locations
gtaaaagtgttgtcccaaagaaagagcatctttctcctttctttcatcaccgttggaagagactgagatgggttcaaaaaccaagacttttacctttgaggaggtggctacgcacaatcacaggaaggattgctggattatagtcaaagggaaggtgtatgnagtcaacccatttttggatgatcatccaggaggtgatgaagttttagtgactgcaacagagaaggatgccaccactgattttgaagatattgggcacagtgattcagcacagagatgatgg

SEQ ID NO: 125986 - DNA, 287 bp, Glycine max
cttagccttccctacaactccaaacattaagacatcatcatccatggctgcctccgtctccactgtcggagctgtcaacagagctcttttgaacctgaatggttctggagctggagcttcagctcccagttcagccttctttgggaccagcttgaagaaggttattgcctcaagggtccccaacagcaaggtttccggtggaagcttcaagattgttgctgtagaagagaagaaagagattgaagagacccagcagaccgacaaggacagatggaagggtcttgcct

SEQ ID NO: 125987 - DNA, 270 bp, Glycine max
ttgggaagttgcaaatctctgctagtaatgatcttaatgaggaaacattagatgctttaaacaaacagggtcatgaggttgatgcctttggaattggtacatatctggttacatgttacgctcaagctgctttaggtgttgttttcaagctggttgaaatatataatcaacctcgtatcaaactttctgaagatgtgtcaaaggtctctattccatgtaagaagcgatgctataggttgtatgggaaagaaggttatcccctggtagaca

SEQ ID NO: 125988 - DNA, 286 bp, Glycine max
  unsure (1)..(286): unsure at all n locations
gggatatggctttgtaaggttttcagatgagagtgagcaagtgagggctatgaccgagctgcaaggggttctttgctcaacaagacccatgaggattggacccgcctctaataaaacccccaccactcagtcccagcccaaagcttcatatcagaattctcaacctcaaggttcacagaatgagaatgatccaaataatacaactatttttgttggtnatttggatcctaatgtcactgatgatcatctgaggcaagttttcagccagtatggagaattagtgcat

SEQ ID NO: 125989 - DNA, 286 bp, Glycine max
cacgcgcacatcagcacaacacaacaattcactaagctaaaatcacttctccatggcttcctcttgtgcttcctctgccattgcagctgttgccatctccacaccaagttcccagaagaatggatcactcttgggaagcacaaaagcttcttttcttagtgggaggaaactgaaggtgaacaactttacagcaccagttggagcacgatccagcactacagtttgcgcagttgctgagcctgataggcctctgtggttcccaggcagcaccctcctccatggctag

SEQ ID NO: 125990 - DNA, 282 bp, Glycine max
actgggtcttcctgattgttgaaccctgacccgaagtctctgggctagctactccccccagctcctagttgatagacatgggggttctggaccagatgatcccttccaatgtggtgctagcaggcaggatcccttctccacctccaaaggccctaaagggtggtgagagatcaccaccttccctcggcctgacatccctcccatcccatatttgtccaagtgttcctgcttctaacagacttggttcttagaatggagctgtgtatctacactccagtttgt

SEQ ID NO: 125991 - DNA, 283 bp, Glycine max
tgattctggttggggggtttgttcaaggctgttgttactgacactcagttttcctaagcctcttgttgattttgctaacaaacctatgattctgcatcagatagaggcccttaaggccattggagttactgaggtggtgctagccatcaactaccaaccagaggttatgttgaatttcttgaaggattttgaaacaaagctcggcatcaagatcacatgttctcaggttactgaaccattgggaacagcaggtcctctggctcttgccagggataagctgata

SEQ ID NO: 125992 - DNA, 286 bp, Glycine max
  unsure (1)..(286): unsure at all n locations
atcccccaactcatcggttccttctcgtcatgaccgcctctcaactcatctccgttagccccgacgaactccgcttccactttgagttggagcccccnaacattttgcgatcttaaggtcctcaatcactccgagatctatgttgctttcaaggtcaaaaccacttctccaaagaaatactttgtgcgacctcacaccgctgttgtacagccctgggactcttgtatcatcagagtcaccctccaagcccaacgggaataccctccagacatgcatgtaaagacaa

SEQ ID NO: 125993 - DNA, 284 bp, Glycine max
agcgcattgaagagttctacagtcaagttgttcaaacacatggctcagtaaagaatttgcctacatcctgcacttcaagactcagaccagggctgtgctttttccctcaaaatgtcgtgtcccaaatcagtaccccaatcttctttgtaaatgcagcctatgactcatggcagatcaaaaacattttggcaccaggtgctgctgatccccgtggccaatggcgtgaatgcaagcttgatatcaaaaactgctcacctaatcaactcagtgtatgcaaggattca

SEQ ID NO: 125994 - DNA, 284 bp, Glycine max
ggtatcatcaagggcaccatgaccaccactcactcctacaccggcgaccaaaggcttctcgacgcgagccaccgtgacctgaggcgcgccagggcggcagctctcaacattgtccccacttcaacaggagtctcaaaggcagtggcccttgtcctcccaaccctcaagggcaaactcagcggcattgcactccgtgtgccaacaccaaacgtctcagtggtggacctcgttgttcaggtctcaaagaagacctttgcagaagaagtgaatgcagcattcagaga

SEQ ID NO: 125995 - DNA, 282 bp, Glycine max
gcaaagtgttatttttctttttttctcatttgcactgcaaattgcaatggcttccaacaaggttattgccaccatcatggtgctttctctccttgcctactcaacatcattcaccaatgcatgtggcacatgccacccaaaacctaccccttctcctcctcctccatcaggaaagtgccctaaggacacattgaagctaggggtgtgtgcagatattctaggtcttgttactgttgttgttggctcccctgtctccagcaagtgttgtgcttgcttgaaggt

SEQ ID NO: 125996 - DNA, 280 bp, Glycine max
ggatagtcttggtgaagaagttgtgaaaccatatactcctacaacattggatactgatgttggatactttgaattggttgtgaagatgtatccacaaggacggatgtctcatcactttagggagatacgtgaaggtgattacatggctgtgaagggaccaaagggacgttttaagtaccagcccaaccaagtaagagctttgggtatgattgctggtggcactggctacaccccaatgttccaagttacaagagctatattagaaaaccacaggacaaaa

SEQ ID NO: 125997 - DNA, 275 bp, Glycine max
gacacctatggaggatggggtgcacatggtggtggtgccttctctgggaaggatcctatcaaggttgataggagtggtgcctacattgtgaggcaagctgcaaagagcattgttgcaaatggacttgctaggagggcaattgtgcaagttgcctatgccattggtgtgcctgagcccttgtctgtgtttgttgacacttatggcactgggaagatccctgacaaggaaatcctcagcattgtgaaggagagttttgacttcaggcctggatgatc

SEQ ID NO: 125998 - DNA, 282 bp, Glycine max
  unsure (1)..(282): unsure at all n locations
atcaaaagatnnaagagaaacaaatggcagcactgggtggctttaccgacatcacacgagcacagaacagcatcgatatcgaaaatctcgctcgctttgctgttgatgaacacaacaaaaaagagattgcagttctgaagtttgtgagggtgattagtacnnagaaacaagtggtttctggcaccttgaactatatcactttggaggcaaatgatggtgtgacgaaaaaggtttatgaaactaaggtgttggagaaaccatggttgaacacnaggaggttca

SEQ ID NO: 125999 - DNA, 275 bp, Glycine max
  unsure (1)..(275): unsure at all n locations
ctcttctttttctctaagtctaaggggtatcctgagatcactttgagcaatgttgaaggctgtggcagttcttggcagcagcgagggtgtcactggaactattttcttcactcaggagagaaatggtccaaccaccgtaactggatctcttgctggtcttaagcctggtctccatggcttccatgtccatgccttgggggacactaccaatggttgcctgtcaatcggagcgcatttcaatcctaataacaacgagcaaggtgccctgagnacga

SEQ ID NO: 126000 - DNA, 264 bp, Glycine max
gggtcgtttgatgaacttggggtgtgccacgggacaccccagctttgtgatgtcgtgctccttcaccaaccaggtcatggctcagcttgaattgtggaaagagaagggttctgggacgtatgagaagaaggtgtatgtgttgcccaagcaccttgacgagaaagtggcttctctccaccttggccagcttggagctaggctcaccaagctttccaaagaccaagctgattacatcagtgtgcctgttgagggtccatacaagcc

SEQ ID NO: 126001 - DNA, 278 bp, Glycine max
tgcaattgaagttgaagtcttgcccttctctcttcaactccaaacacaagacatcatcatccatggctgcctccgtctccactgtcggagctgtcaacagagctcttttgaacctgaatgggtctggacctggggtttcagctccaagttacatcttctttttgagaagtttgaagaaggtaattggctcaagggtccccaacacaaagatttcctctggaagcttcaagattgttgctgtagaagagaagaaagagattgaagaacccagcagaccg

SEQ ID NO: 126002 - DNA, 257 bp, Glycine max
  unsure (1)..(257): unsure at all n locations
ctgatgatgaaattggtgtggatgatctaactgtggctgtcattagcttcnatattttgaaggagctgataccttatagtggtatcttgactttggaaggcatgcataggcccttgctggctgttcagttaacgaagctcaaagatgggctcgcaatgggcctagcgttcaaccatgctgtcttggacgggactgccactcggcagttcatgacctcatgggccgagatctgcagcggttcaccttccacgtcacac

SEQ ID NO: 126003 - DNA, 270 bp, Glycine max
  unsure (1)..(270): unsure at all n locations
gtcatcatccgcagctgctgttattcgcaccgcaaactttcagtgagcctctcatcgncgtcnagnnnaagcgcanctccaaaggganaaagggaggcatccagaaggcagctgatcccnncgccaagaaggattgggacgacacgatggnnccnnctcnnnttcaagtgaaaaatgttggcaaaaccctcgtctctcgtacgcagggtaccaagattgcttctgaaggacttaaacatagagtgtttgaggtctccttggctgatcttc

SEQ ID NO: 126004 - DNA, 267 bp, Glycine max
gtcacctccattcaaattgggtcctgacagcatcatgtttctggagcaggcatcgtagatgtaccggttaagatcatcacaggtgtcgctgacttggtgtacacttctccgggtctgaaggagtatatccacaacggtggtttcatgacagatgtgccaactttagaggaagtggtggtgcaggaaggtgttgctcacttcagcaaccatgaagcagcagaggacgtgagcattcacatctacgacttcattaagctgttctgttct

SEQ ID NO: 126005 - DNA, 275 bp, Glycine max
ctcgagccgcgcccacaacaactcctccttcaggatcgctgccaacgttactttccatttttacccttcatcctcgagaacaaaatggcgaacgcagcatctggtatggccgtccatgatgagtgcaagctaaagtttctggagctcaaggcaaagaggacgtaccggtatatcgtttttaagattgaggagaaatcgaagcaagttattgtggagaagctgggtgaccctgcaaatggctatgatgaattcgctgccagtctcctgctgatgag

SEQ ID NO: 126006 - DNA, 271 bp, Glycine max
attcttcatcacttcattcaacatttctccccatagcttgtttcaccaatggctgctgcggttagtgctgcagtctcttttccatccaccaagtctacctctcttccaagcaggacctccctcattgccccagagagagttgtgttcaagaaggcttcattgcaaaacagagatgtttctagcagtggacgggtagtttccatcagagctcaagtcaccactgaggcaccagccaaggttgaaaaagagtccaagaaacaggtgaaggtgt

SEQ ID NO: 126007 - DNA, 248 bp, Glycine max
ctcttgtcatgaagagtggtaaattcaccctcggttcatagacggccatcaaatcacttaggagctccaaagggaaattgattatcattgctaacaactgcccccctttgaggtaatcagagattgatactatgctatgttggccaaggttggagttcatcattacaatgggaacaatgtggatttgggcactgcatacggaaaatattacagagtgtgctgccttagcattattgatcctggtgatt

SEQ ID NO: 126008 - DNA, 263 bp, Glycine max
  unsure (1)..(263): unsure at all n locations
tacgaatgtccgggttgttttttgtatccacaacattgcttaccttggatgatttgcattcgccgacttctcacttctaaatctcccagaccaatttaagacttcctttgactttactgatggcgcagttaaatccagtaggttgcgtcaggataatcagattggttcaaagctggtacttatatgaatcatggttttgtgcataaccggttagtccatactatgtccaaagatactggtgtcaggtccagnacaatggagtg

SEQ ID NO: 126009 - DNA, 251 bp, Glycine max
ggttacaaagccaaagcaaaaggttgaagatagtatctttggcacttctggaggatttggttttactaagcagaacgagctctatgtgggtcgtgttgctatgcttggatttgcagcatcattgttggtgaaggaataactgggaaaggaatcctagcacaattaaacctggactctggaattcccatttatgaagcggagctcttcttctgtttttcatcctcttcaccctgctaggagccattggaggt

SEQ ID NO: 126010 - DNA, 242 bp, Glycine max
aaacattctcgccgctgatgtttttgttcctgaaaataagcatgtcttctactccagaagtgattttgttttcgatcctgttaaatggccacgggtgcaaatggaggaggacttcctaaagctttacaaacattcaaatctataagatctgttgtgcgggtgccagctctggatcctaaatataagatagcggttcttgcatcaaagcaggaccactgcctggttgatttatacatggatgg

SEQ ID NO: 126011 - DNA, 88 bp, Glycine max
tggcagcagcctcctccatggctctctcttccccatccttggctggcaaggccgtgaagcagggccccgcagcccccgaagtcgggag

SEQ ID NO: 126012 - DNA, 257 bp, Glycine max
atttcaggctctttcctcccacgtttggcgccatgtaagccatgcacgtaacttgaagccagaggactacacggtgttcaccgtcttcgccgattgtcggaagcgggtctacccaccaatgccggagaattattcggaaacctaattcaagctatttttaccgttacagcggctgggctattagccgcccatccgcttattctcgggcttcattgattcagatagccattgaaactcataatgctaggcaattgatg

SEQ ID NO: 126013 - DNA, 242 bp, Glycine max
ccgtaagctcccaagcagtgggaggaggctcgggactctgaccgcgtgcctgttgaagaatgagccggcgactcataggcagtggcttggttaagggaaaccaccggagccgtagcgaaagcgagtcttcacagggcaattgtcactgcttatggacccgaacctgggtgatctatccatgaccaggatgaattttgggttaaactaagtggaggtccgaaccgactgatgttgaagaatca

SEQ ID NO: 126014 - DNA, 245 bp, Glycine max
gtcgaattagaccactctggctatgtacaagttccagagggtactgcaaaaacttcagttgaaggtgtatttgctgctggagatgtgcaggaccatgaatggaggcaagctataactgctgctgatctggatgcgttgcagctttatcagttgagagatatcttgtgagcaatgatcttcttatagagttccatcagcccaaaactgaagaggttaagaaggaacaaacagacagggatgtacac

SEQ ID NO: 126015 - DNA, 88 bp, Glycine max
ggaaaatctttccaatgtgagcttgtctttgccaagatgggaatcaaccccatcatgatgagtgctggagagttggaaagtggaaatg

SEQ ID NO: 126016 - DNA, 245 bp, Glycine max
ggaaaatcgatgggttaaatcagattcctcaacagatgagaacatggctggggagtggaaccacacctctggtcaatggaatggagacgctaatgacaaaggtattcaaaccagtgaggattaagattctatgctatttcagctgagtaccctgaattcagcaacaagggtaagacactagtctttcaattttctgttaagcatgaacagaagcttgactgtggtggtggctacatgaagttgct

SEQ ID NO: 126017 - DNA, 246 bp, Glycine max
gaaatacaagtctgaggacgaggagcataagaagaaagtggaggccaaaaatgtattggaaaattatgcctataacatgaggaacacaatcaaggatgacaagattgcttccaaactgtcttctatgataagaagaaaattgaagatgcgattgagcaggctatccaatggctagatggaaaccaacttgctgaggctgacgaatttgaggataagatgaaggagttggagagcatttgtaatccc

SEQ ID NO: 126018 - DNA, 250 bp, Glycine max
caacgaccgatttggaattgtggagggtcttatgaccactgtcatcgccatcagagctactcagaagactgttgatggtccttcaaacaaggactggagaggtggaagagctctctcgttcaatatattcctagcatcactggagctgctaaggctgtaggaaaagttcttccagcgctgaatggtaaattgactcatatcgtcttccgagtccccactgttgatgtttcagttgttgacctaactgtca

SEQ ID NO: 126019 - DNA, 247 bp, Glycine max
cactcgagccgaatcggctcgaggcttcagaccaggatattctccaatgctccttcacacaggcacagacttggaccacactatctgcaacttcctgctaatgctcccaagtgtgctcaccacataatcatcatgaaggtttcatgaatttcattcacagggatgaggaggtcaattacttcccttcaaggtatgatcctgttcgtcatgcagaaaggttccccatacctcctgctatctgcagtgg

SEQ ID NO: 126020 - DNA, 244 bp, Glycine max
caagaggctccggagcaagtttcgtcacgctggaacgatgaccggcggcggatccacggggaggttgccgacgtggaaggagagagagaacaacaagaggagagagagaagacgaagagcgttgcagctacctcctacactggccttcgcttccaggggaactacaagcttccaaagcactgcgacactcaactaggtcctgaaagctctctgcgccgaagctggctggcatcgtggaagaaga

SEQ ID NO: 126021 - DNA, 244 bp, Glycine max
tggggaggccagggacaaggaaaatctttcgaatgtgagcttgtctttgccaagatgggaatcaaccccatcatgatgagtgctggagagttggaaagtggaaatgcaggagagccagcaaaactatcaggcagagataccgtgaagctgcagacatgatcaagaagggaaagatgtgcgctctcttcatgaacgatcttgatgcaggagctggtcgtcttggtggaaccacacaatacactgt

SEQ ID NO: 126022 - DNA, 242 bp, Glycine max
agggagaaccaaggcgacaccgcgtggggaactgaagaaggtggccacgaagaagggggtttcgctgaaaaagctgtggaagataagattctcgttgggaacttgcctttcgacatcgacacgagaatttggcgtcgctcttcgggcaggctggcaccgttgaggttgctgaggttatttataatagggccactgaccggagtcgtgggtttggatttgttaccatgagtacacttgaagag

SEQ ID NO: 126023 - DNA, 243 bp, Glycine max
aaggaatcaacccttcacctcgtcctccgtctccgtggtggcatgcagatcttcgttaagaccctcaccggcaagactattaccctagaagtcgaaagctccgacaccatcgacaacgtcaggctaagattcaggacaaggagggaatccccccagaccagcagaggctgatcttcgccgggaagcagctcgaggacggacgcacccttgctgactacaacatccagaaggagtcaactctcc

SEQ ID NO: 126024 - DNA, 244 bp, Glycine max
  unsure (1)..(244): unsure at all n locations
gtcggaatcctgtctttcgttgatcnggatcagttggagcctggttgtgctattnngatgcataataaggttctttctgttgttgggcttcttcaagatgaagttgatccaatggtctctgncatgaaggttgagaaggctcctctggaatcttatgctgacattggtggtttagatgcccaaatacaggaaattaaagaagcagttgagctacccctgntgcatcctgaactatatgaagaca

SEQ ID NO: 126025 - DNA, 243 bp, Glycine max
gaacatgcgtagctgaggaaactgcgctaaggcttggactgtctggaaacgtaggagctactggcactgaagcagcactcaccaggaagagaggtttctctgagactgaaactgaaactgagaggatgagtctgctaccactgtggatttgatgcttaatctttcttctaaggaacacgctgctgctgcagatccaactgataagcacaagactttgcctaaggagaagactcttctgcctgc

SEQ ID NO: 126026 - DNA, 225 bp, Glycine max
tagactcaagggatcaagccatggtaaaaatgcaggctttggcaaagcatcctccaaagaagcgagtggataagctcgataccgtcttcagctgcgctttctgcaatcatggcagcagcgtcgaatgcgcgttgacatgaagaacttgataggggaagctatttgcgggatatggcaagagagctttagcactaccatcagagctttatcagagccaatagacat

SEQ ID NO: 126027 - DNA, 256 bp, Glycine max
aactcacacactttgtactctccgtccttcgttcttcgatccagatctctctccttctccatcaaatggcttcgcttctgcaatgttccatgcgcctcgtctgcctttccaatcgagctctggtacccgtaccaggatctccaacccaagttcagtttccctttcaattaagggaagaagtttcccatccgttacattgcagcccagcgggcgtcggtttcagcttagatctgcggcaaaaccagagacagtgaag

SEQ ID NO: 126028 - DNA, 249 bp, Glycine max
aagaagaatagagagtgatggagtgcgtattcggattggtgggtaatggattcgcgatcgtggtggctgattcatcggcggtgcacagcatcctcgtccacaagtccaacgaggacaagatcatgcttctcgattcccacaaactcatcgccgctagcggcgagcccggagacagggttcaattcactgagtacattcagaaaaacgtcgccttgtatcagttccgtaacggcatccctctcaccaccg

SEQ ID NO: 126029 - DNA, 253 bp, Glycine max
gcactattgcttccactggtagagtgcatttggacattctgaaggatggctggagtccagcgttcactatctctaaggtgttattggccatcaaagacatcatcagcaatccagatccatactccccacttatgatgagcatttcacgtcagtatctgactgatagagcgacacacgatgaaatagcagctgagtggccaatgagatttgcaagataggggatgtgcctgtatctaagcatggtcgacattgt

SEQ ID NO: 126030 - DNA, 260 bp, Glycine max
ctctctcaccaaattcttattagaacgaaaaaagaaaagaaaagaaaaaagagcgatttttccctcaccaaagaagaaccaaaacaatggcggatcaactcaccgatgaacagatctccgagttcaaggaagccttcagcttgttcgataaggacggcgatggttgcatcacaaccaaggagcttggaactgttatgcgttcattggggcaaaacccaactgaggcagaactccaggacatgatcaatgaagtggatgct

SEQ ID NO: 126031 - DNA, 259 bp, Glycine max
cgatttgacgcttggtgagttgcttaagtataagtctgaggaatgggtgagagtgttgttgctggtttgggatgataaaacttcgcatgataaggttttcctcaagacggctggtgtgatggggactcatgatgaggaaaccaggaagttttttaagcattcttctgttatgtgtgttctgtcgcctcggtatgccagcaataaaatgagcttcttgaagcaacaggttgttcccgcggtcttcacacaccaccaaaaa

SEQ ID NO: 126032 - DNA, 257 bp, Glycine max
cattttgcaaagaggaggcaccatgacaagcactcttctgtctttgcttttcttgctcttctcccttctcattccatccttcatttcctcttcaccagttcgaaaccctgaagaagtcgtacaagaggtcaacaggaaaataaatgggtctatagcaaggcctaggagaaacttgggctacctctggtgtggcagtggcaaccccattgatgactgttggaggtgcgaccccaactgggagcagaacaggcagaggc

SEQ ID NO: 126033 - DNA, 256 bp, Glycine max
ggagtggctcgccgatcccgctattggaaacaacgccacgctgaggctcgtcgccggtctcgtcttcctccacgagaatgatttcaatgaagccctcaaacacaccaacgccggtggaaccatggaactgcacgcgttgaatattcagatctttattaagatgcataggtcggattacgcagagaggcagctgcggatcatgcagcagattgatgaggatcacactctcactcaactcgccaatgcttggctcaat

SEQ ID NO: 126034 - DNA, 255 bp, Glycine max
cagagagtggtttcagtgagtgatcggtgttcacttgatccttcataagtcgtcatcatcatcatcatcatcaccgttgattgaagaagatgccgatcagaaacatcgccatcggaaggcctgaagaggctactcaccccgacacgttgaaggcggggttggctgagttcatctccaccttgatcttcgtgttcgccggttcaggttccggcatcgcctacaacaagctcaccgacaacggcgccgccactcccg

SEQ ID NO: 126035 - DNA, 237 bp, Glycine max
ctcgagccgattcggctcgatgaaaattgtgctaaagttggaaacccatgacgacaaaaacaagaaaaaggccatgagggcagtatctggtatttcaggggtggagacagtctcagtggacatgaaggacctgaaaatgactataattgggaatgttgatgctgtaatagtagttggcaagcttagaaattgtggtgatcatgctgatatactatcagttggcccagccaaagagga

SEQ ID NO: 126036 - DNA, 160 bp, Glycine max
attcagaaacacaccaagcgaactacattagcaacaacctaacaacaatggctaccaagatattatccctccttgcgcttcttgcgctttttgcgagcgcaacaaatgcgttcattattccacaatgctcacttgctccaagttccattattacacagtt

SEQ ID NO: 126037 - DNA, 255 bp, Glycine max
gaaacctcaatttaaattgggaactgacagcaccatggactggagcaggcatcgtagatgtaccggttaagttcatcacaggtggcgttgacttggtgtacacttctccggggatgaaggagtatatccacaacggtggtttcaagaaagatgtgccaactttagaggaagtggtggtgcaggaaggggttgcacacttcaacaaccaagaagcagcagaggacgtgagcaatcacatctacgacttcattaaga

SEQ ID NO: 126038 - DNA, 271 bp, Glycine max
gagaacccccgtgttcccatcattgtcaccggtaacgatttctcaacactctatgcacctctcatccgtgatgggcgtatggagaagttctactgggcaccaacaagggaagaccgcattggtgtttgcaccggaattttccgcactgatggtattcctgaacaggacattgtcaagcttgttgacaccttccctggccaatccattgatttctttggtgcactgagggccagagtatatgatgatgaagtgaggaagtggatttctggtg

SEQ ID NO: 126039 - DNA, 259 bp, Glycine max
  unsure (1)..(259): unsure at all n locations
cgtgaatgcgtataaaaggaaaataaagaaattagcatcaaaatgttgggtgtgttcagcagctccatagtgtcgccgccggacgagctcgtggcagccggcanccgtactccgtcgccgaagatgacggcggcggcgctgcggaagcggttcgaggagaagaacccctccgccgtgtcggtggaggtcggagagcatgtccagctcgcttatacccaccacaacgagtcgccgtttcagcccagatcctttgctgtca

SEQ ID NO: 126040 - DNA, 257 bp, Glycine max
cttaaattcgagaaaggcagacatacgggttcaattcaaggatgttcctggtgatatttttaagtgtcaaaagcaggggagaaatgagtttgttatacgcctgcaaccttcagaagctatgtacatgaagcttacagtcaagaaacctggactggagatggaacaattcaaagtgaactagatttgtcttataggcaacgctatcaagcagtaaccattccagaggcttatgagcgtctgattcttgactcaattag

SEQ ID NO: 126041 - DNA, 251 bp, Glycine max
ctacacctccggcggaaagaagatctccgccacctccatttacttcgagagtctcccttacaaggtaaactccaccaccggctacatcgactacgaccgcttggaagaaaaagccctagacttcaggccaaaactcataatctgcggtggcagcgcgtaccctcgcgattgggactacaaacgtttcagggaagtcgctgataagtgcggacattgcttctctgcgacatggcgcacactaacggccttgt

SEQ ID NO: 126042 - DNA, 243 bp, Glycine max
gaattatcatcatccttatctgttgtcctagaacttgattactagaccatggcctatgacatattaggtagtccttctggaattctggacacgtacgcatttcggatcactgtcaggatagcacttgctgagaagggtatctgaatatgcgtagcaaggaagatgagctagaggaacaagagtcctcttctcttacaaatgaacccggatcataagaagatcgcggttctcatgcacgatggc

SEQ ID NO: 126043 - DNA, 162 bp, Glycine max
ggataacttatctgcacttatggtaacatatccttcaacccacggtgtttatgaggaaggtattgacgagatttgcaatattattcatgataatggaggtcaagtatatatggatggtgccaacatgaatgctcatgtgggactcacaagcccgggttggat

SEQ ID NO: 126044 - DNA, 253 bp, Glycine max
cagaaagcaagctcatcctagagttttaaaaatggcagcagcctcctccatggctctctcttccccatccttggctggcaaggccgtgaagctgggcccatcagcccccgaagtcgggagggtcagcatgaggaagaccgtcaccaagcaggcctcctccggaagcccatggtacggcccagaccgcgtcaagtacttgggcccattctctggcgagcccccgtcctacctcactggcgagttcccaagtgac

SEQ ID NO: 126045 - DNA, 257 bp, Glycine max
gaaaaaacgacattcattcatctatggctacccttattgctcccagcaaccactctccccaagaagacgctgaggctctcagaaaggcttttgaaggatgggggactgatgagaaaactgtcatagtaatattgggtcatagaactgtttatcagaggcagcaaatcagaagagtctatgaggaaattttccaggaggatcttgtgaaacgcctagagtctgagatcaaaggagactttgagaaagccgtgtaccga

SEQ ID NO: 126046 - DNA, 257 bp, Glycine max
ctcttctttttctctaagtctaaggggtgccctgagatcactttgagcaatggtgaaggctgtggcagttcttggcagcagcgagggtgtcactggaactattttcttcactcaggagggaaatggtccaaccaccgtaactggatctcttgctggtcttaagctggtctccatggcttccatgtccatgccttgggggacactacccaatggttgcctgtcaactggagcgcatttcaatcctaataacaacgagc

SEQ ID NO: 126047 - DNA, 254 bp, Glycine max
gtttgttttgttccttccaattgtcagatctgaatcaccggactcactcttcacactcactcacactgaatggcttctgaaggcgaccatcaccaccaccaccaccaccatcaagatcacgatcatcatcatcatgatcatgatcaccatcatcatcacgatggagagggagagaccaactcatgggtaggtaaggatgggaaggtgtaccatagccacgatggtctggcgccgcattctcacgaacccattta

SEQ ID NO: 126048 - DNA, 145 bp, Glycine max
agtacctggaccattctcactagacccctctctgcctctttggccaccacatacttgtggtgtcagatctggtacatgaatggccattctacccagatacattttggtttatttaagacatcagattccctagaatccttcgttc

SEQ ID NO: 126049 - DNA, 253 bp, Glycine max
ccctagtcaaggagattcatctctgcagacaagacaaaatggtgaagatttgctgcattggtgctggatatgtggggggtccataatggcagtcattgctctgaagtgcccctccattgaagtggctgttgttgacatctccaaatcccggattgcagcatggaacagtgaccagattcctatctatgagccaggccttgatggtgtggtgaagcaatgtcgtggcaagaacctttcttcagcactgatgttg

SEQ ID NO: 126050 - DNA, 254 bp, Glycine max
ctactagcaacatagatggcactatagtggatcatcaatggcagccaagatatcttgcctccttatgctccttggtctttctgcaagtgctgctacggcgaccatgttcccgcaatgctcgctagctcctatagcgtcccttcttatcgcgtacttctcaccatcggtgtcgtcggtatgtgagaatccaattcttcaaccctacaggatccaacaggcaatcgcagctggcatcttacctgcatcagccttgc

SEQ ID NO: 126051 - DNA, 256 bp, Glycine max
gagcaacactgaacaatggcgcaaccttcctcctcctcgaagcctgttgtccctctcctgaaggacgagctggacatcgtgatcccgacaatccgaaacctcgacttcctcgagatgtggcggcccttcttcgaaccttaccacctcatcatcgtgcaggacggagaccccaacaggaccatcaatgtccccgaaggcttcgattatgaactctacaaccgcaacgacgccaatcgcatcctcggacccaaagcct

SEQ ID NO: 126052 - DNA, 255 bp, Glycine max
caaatcctcaaattcgatttgtaccaaattttcttcacaaaatgtctggtcgtgggaaaggtggcaagggtttgggaaagggaggtgccaagaggcacagaaaagttcttcgtgataacattcaaggtatcacgaaacctgcgattcgtaggttagcgagaagaggtggcgttaagaggatcagtggtttgatctatgaggaaaccagaggagttctgaagattttcttggagaacgtgattcgagatgctgtga

SEQ ID NO: 126053 - DNA, 257 bp, Glycine max
gtcttgcaattgaagttgaagtcttgcccttctctcttcaactccaaacacaagacatcatcatccatggctgcctccgtctccactgtcggagctgtcaacagagctcttttgaacctgaatgggtctggacctggggtttcagctcccagttaatcctcctttggaacagcttgaagaaggttattggctcaagggtccccaacacaaagatttcctctggaagcttcaagattgttgctctagaagagaagaaa

SEQ ID NO: 126054 - DNA, 256 bp, Glycine max
ctcgagtcggaagaaactatgtgtacattcataaggaagggaaccatatcagctagttatgcgccagtgacgtgcggctcagctttcaaaaacaagggagtccaaacattgctcgatgcggtagtggattatctaccatcaccacttgacttgacagcaatgaagggcagtgaccctgaaaacccagaagaaacaatagagagggtagcaagtgatcgatgaaccatttgctggactggcttccaagatcatgagt

SEQ ID NO: 126055 - DNA, 255 bp, Glycine max
tgcaaaagagcgtcgtagtcgcaaccctaatcagaagaagcgcagttcaagcgagtgacagccaccagccatgggtcgtatgcacagccgcggtaagggtatatcctcttctgctttgccctacaaaaggacacctcctagctggctcaagatctcttcgcaagatgtcgaagaaaatatctgcaagtttgcgaggaaagtttgacccgtctcagattggtgtcattctcagagattctcacggtattgctcagg

SEQ ID NO: 126056 - DNA, 252 bp, Glycine max
gcagctttgaacgacgcagaaggttcatccaatctccgaatcctttaatcgcattgcaaccatgtcgaggagaaaggtcagagagccaaaggaggaaaacgtgactcttggcccagctgttagagatggcgaacatgtctttggcgtcgctcgcatatttgcctcctttaatgataccttcattcatgtcactgatctgtctgggagggaaacgcttgtccgcatcactggtggaatgaaggttaaggctga

SEQ ID NO: 126057 - DNA, 248 bp, Glycine max
  unsure (1)..(248): unsure at all n locations
tttatttctctcttctctctgcatcgcttcaggttcttctgaaaagatgtctcgcgtgtatgttggtaacttggattcacgagtcaccgagagagatctcgaagacgaattccgtgttttcggagttattcggagtgtttgggttgcacgtagaccacctggtnatgctttnattgactttgatgatcgcagagatgcacaggatgctntccgtgaatggatggcaagaaggttggagggttgagctt

SEQ ID NO: 126058 - DNA, 253 bp, Glycine max
gctgaaagggaacaaggtttacttcagatactgactgagatggatggattcaaactttccacagcacaggttatcatgataggtgccacaaatagattggatattcttgatcctgctctattgaggaagggtcgttttgacaagatcattagagttggtttgccatcagaggatggaagatttgccattttgaaggtgcatgcgaggaataaattttttcgctctgaggaggaaaaggagactctacttaagg

SEQ ID NO: 126059 - DNA, 253 bp, Glycine max
cttcccttctccaacatgccaaacgacagcgttctgagtcttctcctcttcgttaccctcttcacatgccttctctctgctaattcccacgatgaccatattttcctaccgagtcaactccatgacgatgactcagtgagttgcactgctaccgaccaacccttaatttaaggccgggtgatcggaatcctgacccaccccggcgacggtgcctctggccggctcagcaacgccaccggggtttcttacatcg

SEQ ID NO: 126060 - DNA, 255 bp, Glycine max
ctcagtgaaagagaatccgaggcgaagagaagagaaaaattaagatggaggggaaggagcaggatgtgtcgctgggagcgaacaagttcccggagagacagccgattgggacggcggcgcagagccaagacgacggcaaggactaccaggagccggcgccggcgccactggttgacccgacggagtttacgtcatggtccttttacagagcagggatagcagagtttgtggccacttttctgtttctatacatca

SEQ ID NO: 126061 - DNA, 251 bp, Glycine max
  unsure (1)..(251): unsure at all n locations
ggaatatagacagtactatagtgtacaaataatggcagctattatatactgcctccttattcntcttggtctttctgcaagtgctgctacggcgaccatttccccataatgctcacaagctcctatagcttcccttcttcccccgtagctctcaccaacggtgtcttcggtatgtgaacacccaattcttcaaccctacaggatcgaacaggcaatcgcagctggcatctgaccttggagcaccttgttcc

SEQ ID NO: 126062 - DNA, 257 bp, Glycine max
cgatcaaccaagtagctctggcaaacctttctccctactctcagcaacaacaatttcttccattcaaccaactgtctacactgaaccctgctgcttatttgcagcaacaactattaccatttagccagctagctactgcctactctcagcaacaacaacttcttccatttaaccaattggccgcactgaaccccgctgcttatttgcagcagcaaatacttactaccatttagccagctagctgcagcaaaccgtgc

SEQ ID NO: 126063 - DNA, 257 bp, Glycine max
ctgaagagtgcgttgaagcaacaaaggaatacatccatggcgaacaatatagatcagactccaaaacagttaaccaacaagcttacttttatgccagagacctcgaagtccatcccaaggacacatttgtgttcagtatagatggcaccgtactctctaatattccatactacaaaaaacatggatatggggtggagaaatttaactcgaccttgtatgatgaatgggttaacaagggcaatgcaccggcactgccc

SEQ ID NO: 126064 - DNA, 256 bp, Glycine max
ttcttctctcgtgtttctcaaactaaagaacaacaatatgcctccaatcttgccggatttctccaactcggtgaaactcaagtacgtgaaactagggtaccaatacctggtgaaccacattctgactctcactctcatacccatgatgatcgcaatcttcatggagattctacgcttaggccctgaagagatcctgaacctctggcactccctccacttggaccttgtccaaatcctctgctccgccttcctcatc

SEQ ID NO: 126065 - DNA, 251 bp, Glycine max
gtgcgctctcttcatcaacgatcttgatgcaggagctggtcgtcttggtggaaccacacaatacactgtgaacaaccagatggtgaatgccactctcatgaacattgctgataaccccaccaatgtgcagcttccaggtatgtacaacaaggaagagaacccccgtgttcccatcatggtcacggtaacgatttctcaacactctatgcacctctcatccgtgatgggcgtatggagaagttctactgggc

SEQ ID NO: 126066 - DNA, 158 bp, Glycine max
cacaaacacctcgtccctcacaatgcagctagcaatggcggccaacgctgtcgtttcaccgtcgccgttccgacctcagccctttctccggtcatccttctccggcgtctccgtcaagctcactccccaatccataacgctttcacgctccaagcccc

SEQ ID NO: 126067 - DNA, 252 bp, Glycine max
aaaatggcatcattcaccatgacagcttccatccttggcagcccagccgtcaccaaccggtcggcagtagcaacgcagaggagatcactcgtagtgaatgctgccaaagctgttgaagcagaaaaggtcagttatgacaatgacatggatggtagcaatggaaggaggaacttgatgttcgccgcggcggggctgctgtttgctctgttgctgggatggcagtggcagatgagcctaaaccaggaaccccag

SEQ ID NO: 126068 - DNA, 253 bp, Glycine max
attgagcagaacaaggcacaactggttgtgattgctcacgacgtggacccaattgagctggtggtctggcttccagcattgtgcaggaagatggaaattccatactgtcttgtcaagggcaaagcacgcttgggaacgattgtccacaagaaaactgcttcagttttgtgcttgacaactgtcaagaatgaagacaagatggagttcagtagaatcctagaagctattaaggccaacttcaatgacaagtatg

SEQ ID NO: 126069 - DNA, 252 bp, Glycine max
caacaacttctgctacttcctactccaaccgcacttctgttccgcaattatcatgggcaaggtcaagatcggaatcaacggatttggaagaattggccgtttggtagccagagtggctctgcagagagacgatgttgaactcgttgccgttaacgaccctttcatcaccaccgattacatgacatacatgtttaaatacgacagtgttcatggacactggaagcatcacgatgtcaccgttaaggacgagaa

SEQ ID NO: 126070 - DNA, 254 bp, Glycine max
tatgacccatttggtcttagcaagaagccagaagatttttccaaatatcaggcatttgaattgattcacgccagatgggcaatgcttggtgctgctggattcatcattcccgaggccttcaacaaatatggagcaaactgcggtcctgaggctgtttggttcaaggtttgcaagctttataacaactttcactgtgtcaagttcactaatacattatttttttatgacactcaacaaatgaaattcaatagatc

SEQ ID NO: 126071 - DNA, 254 bp, Glycine max
atagtgaagtacactagcaacatcttagcaccaatgggagccaagatttttgccctccttgccctccttgctctttcagcaagcgctgctacctcgacttttattccacaatgctcacaacattacctctctccggtgacagccgcgggatttcaatacccaactatacaatcctacatggtacaagaggccatccaagcaagcatcttacggtcattagcattaaccctccaacaaccatatgctctattgca

SEQ ID NO: 126072 - DNA, 285 bp, Glycine max
gttgtgagcaccaaaccagaccacattgtttgcaaggcacaaaagcaggttgtccaagagggtgaggacactactaacattgtctctcgcaggttggccctcactgttctcattggtgctctgctgttggctctaaggttgcacctgctgatgctgcctatggagaagctgccaatgtgtttggaaagccaaagacaaacactgacttccttccataccatggggatggattcaactctcaattccctcaaagtggaacccaagcaaagaggttgagtacccagg

SEQ ID NO: 126073 - DNA, 272 bp, Glycine max
cagttgcacaccttttgcaaaatggtaatatgcatgggcaagaaatatcttcaggaaggccagatgaaatgacagatcgagtctgggatttcgtgctctgtgatggcccgagaccataaagcgagatccctgccgctctgttgaacaagatgaaacatgaatttaagtagtggtatcgatttgatatccgtgtgtctggtaaagacattattcaaaaccatttgacattctgcatatacaatcatacagcacttcttcctgagcaccactgg

SEQ ID NO: 126074 - DNA, 278 bp, Glycine max
atcaaattagttcattctctttgcgcagttccctacctctcctttcaagatgcagatctacgtcaagaccctcagcggaaagaccatcacccttgaggtggaaagctctgacaccatcgcaacgtcaaggccaagctccaggacaaggaaggaattcccccggatcagcaacgtctcatcttcgccggaaagcagctcgaggacggccgtaccctcgccgactagaacatgcagaaggagtcaacccttcaccttgtccttcgtctccgtagtggcat

SEQ ID NO: 126075 - DNA, 282 bp, Glycine max
gtcgctgcactgctgcagtctattgatgctagcaccatccctacagttgtcactttctagacaagaaccctgacaaccacccatacctcatgaaattcttccaaagctcagcccccaaggtatgctgtctctgaacttctccaccggaccttttgattctttcaagtatgactactcctgctgccgcggaggaattccaggtctaggagatcaagtgccttattggtgacatcgaagccaggcacggtgccttccagtactctagcctgaaagaggaccaga

SEQ ID NO: 126076 - DNA, 277 bp, Glycine max
gcgtgacgaaggaaccacaagtggacagcccagtccccatctcctcgttctcggatgaggacgaggagatcgtacaagccgtagtgtcgggctccattccatcctactcactcgactcgcggctcggcgacacacgccgggccacggccatcaggcatattgtggtgcagaggctgacttcccgatccctgtcaggtttacccctggaaggtttcaactacgactcaatattggggcagtgctgtgagatgccgatagggttcgtgcagatcccgtg

SEQ ID NO: 126077 - DNA, 281 bp, Glycine max
caaaccttgagatgatgggaacagtgccaaaacctgtaccgtgagggtcctggtaaagatccatatagacctgatcaaaagacaccagtgaggaatttctttcttgctggctcttaccaaagcaggactacatagacagcatggaaggtgcaaccttgtctggcagacaagcttcggcctatatctgcgatgcaggggaagaattagtggcattgcggaagaagctcgacgctgagtttaaagacgacttaaaaatatcaaatactaaagatgaattgagc

SEQ ID NO: 126078 - DNA, 280 bp, Glycine max
aaaatttcttccttgccactgccagtgtgtcaccaccatggccaccgtcacaacccaagcctccgccgcgattttccggccatgtgcctcgaaatcgaggtttctgaccggctcttcggtaaactcaaccgggaagtgactatgaggccaatggggtgccctccttctgcctctttcaaggttgaagccaagaagggagagtggttacctagcttggcctccccaacttacctcaatggcactcttcctggtgacaatggatttgaccctctgggactag

SEQ ID NO: 126079 - DNA, 278 bp, Glycine max
aaaagccataggttactactcttcgccttttcctttgcaattgttaccaaacaattcttgcttagcccttacaagcaagcattaacaacaatgaagaaagtagtgttaaaggtgggttacatgatgatagaatcaagcgaaaagttatgagaacagcatctggtctttcaggggttgaatcagtttctattgacatgaaagacgagaaaatgaccttattagggaacattgatccagtgaatgcagtgtgcaagctacgaaagtgttgtcaaactgaa

SEQ ID NO: 126080 - DNA, 278 bp, Glycine max
gcattgtatctacccacttctcaaccaacaatggcaatggcaacccaagcctctctcttcaccccacccctctccggtctcaaacccagcgaccgagccaccgcgccatggaaaaatcctccaccctctccttctccacctcgaagcccctcaagttctcgcgaacaatcagagcagcagccaccgaccagaccacagaggcaccggttgggttcaccccaccggaactggacccaaacaccccttccccgatcttcggaggcagcaccggcgggctc

SEQ ID NO: 126081 - DNA, 276 bp, Glycine max
ctgagattactactgatgacttattgcaagctgcacaaatggaagaacgaggaatgctagatagaaaggaaagaagcagtgagacatggaaacaagtagctataaatgaagctgcaatggctgttgtggctgtgaactttcctgatcttaaaaatatagagtttgtcacgattgctcctagagctggtagggaattgggttatgttcgggtgaagatggattcagtcaaatttaatcaaggaatgctcacacgacaatcccttcttgatcatatta

SEQ ID NO: 126082 - DNA, 273 bp, Glycine max
tcatttcatcgtgcattcaatggccaccacagcagctctatccggaaccatggtgagcacctccttcatgaggaggcaacctatgaccaccacaagcctaaagacattccccaacgttggtgaagctctttttggtctgaaaagtggacgaggtggtcgtgtcacttgcatggcctcgtacaaggtgaagctcataaccccagaaggagaagtggagtttgaatgcccagatgatgttttcattgttgacaaggcagaggacgaaggcattga

SEQ ID NO: 126083 - DNA, 271 bp, Glycine max
cagcgagtgagtgagcgaaccaggtagggtattcggtgttcccctcggctgtgttcgcacgcgacgatggggaccatccccgatccaggcgaattgagcgagttgagtcaacgagcttcgacgagttccagctccaaacctcactcatgaacagctgcaccctcctctggaaggagctgtccgagcacttctagtcgctcgagcaagacgtctaccacaaatgcgaagggctcaagcgctagattcacaccctggacaactccacctcgga

SEQ ID NO: 126084 - DNA, 279 bp, Glycine max
gctcgaaggttgatcaaccttgggctccctaggaccatggacttcctgggtgtcaaccccaacagcttcgacgggcacggcaactacagccttggcctccgtgaccagggcgcgttcccgagatcgcggacgaggtggacaggaagaagaacggcatggacgtgtccatcgtcaccagcaccaagacggggaacatcaagaccgacgtggtgatccggaagatgaagttgaagcgcgaccacttcctgagcaagggcaaggggaaaggacgacgacggt

SEQ ID NO: 126085 - DNA, 278 bp, Glycine max
cttgatgttactaagacttggcctgaggacattatacccttgcagcctgttggtcgcttggtcctgaataaaaacatagacattttctttgctgagaatgaacaacttgcattttgccctgccattgtggttcctggtgtatactactcagatgataagatgcttcagaccaggatattctcttatgctgattcacaaaggcacagacttggaccaaactatctgcaacttcctgctaatgctcccaagtgtgctcaccacaataatcatcatgaagg

SEQ ID NO: 126086 - DNA, 274 bp, Glycine max
cttcttctcttgcggctagggttttagcgcagttcttctagatttaaggaagatgggtaaggaaaaggttcacatcagtattgtggtcattggccatgtcgactctgggaaatccactaccactggtcacctgatttacaagcttggaggcattgacaagcgtgttattgagaggtttgagaaggaagctgctgagatgaacaagaggtctttcaagtatgcctgggtgctggacaaacttaaggctgagcgtgaaagaggaatcaccattgat

SEQ ID NO: 126087 - DNA, 275 bp, Glycine max
atttataccaactaccaacatacatagtgaagtacactagcaacatcttagcaccaatggcagccaagatttttgcgctccttgccctccttgctcttccagcaagtgttgctaccgcgactattattccacaatgctcacaacttcactctctccagtgatagccgcgagttttgaatacccatctatacaatcctacaggctacaagaggccatcacagcaagcatcttacggtcgttagcattgaccgtccaacaaccatatgccctattgc

SEQ ID NO: 126088 - DNA, 272 bp, Glycine max
gtctgcagagtgcagagccttctctcctctattttggcttccaacctttttgctccattcattctcaacaacaaaccaatctctatattttgcttagacaatgagggggggcttgtggcaacttgggcaatcgatcactcaccgtcttgcccatggagataagaaggctgttgctcgccgatgttttgcctcagaagctgagctgaaaaagacagtgtttcatgacttccatgttgctcatggtgggaagatggttccatttgctggatgga

SEQ ID NO: 126089 - DNA, 271 bp, Glycine max
ggagatcaccaatgtcagtgagtatgaggctattgcaaagcagaagttgccaaagatggcgtttgactactacgcatctggtgcagaggaccagtggactctgcaagagaacagaaatgccttttccagaattttgtttcggccacgtattcttattgatgtgagcaagatagacttgacaactactgtcctaggcttcaaaatatccatgccaatcatgattgccccaacagcctttcagaaaatggctcatcctgagggagaatatgca

SEQ ID NO: 126090 - DNA, 210 bp, Glycine max
tgataagcttctcttggagcttaaaagtattggaatttccccaggcttctaagtgtgaaaaatttgcaaagcatttgtagccgcaaccccactttgtttgtttgtacttaactacattcccatttgtttttgctttttgagatttcatcatcctgtatttttggtttctgttttcggacttcaatggaaattaatggatgagaactaatg

SEQ ID NO: 126091 - DNA, 94 bp, Glycine max
caaatccgaagcatgatgcattgtgcgagcattgtctcggctccgtcctacgcgttcccttttctctctggctccgcttccacacaacatacga

SEQ ID NO: 126092 - DNA, 267 bp, Glycine max
tgaacaggtatcttcggagtcgagtcgatatcacagtacgagacgaccacaataatacgaaggttgatacatcgccgaagatgtgaacgggacagcttcggcgcggtagcgcgccagcaaccgacttaaagatgcaaaggctattcagacctcggtggattactatagaattactaccaaatgcaaagggcatgaatgtaattttatctgggctgatgtccgtacctataaataggtaaacagtacccccgtactgttcacgctgac

SEQ ID NO: 126093 - DNA, 273 bp, Glycine max
ctcgagccgggaatggctgaggcctttatgtcaattggacacttggagtttttctatgatcaggcccctgagagtatgaggagcactgccatggcattattttggactgcatcgctgctgggaactatgtgagtaccattatggttactttggtccacaagttcagtgctgggtctaatgggtcaaattggctccctgacaacaacctcaacaaagggaagttggagtacttttactggcttatcaccatattgcagtttctcaatcttattt

SEQ ID NO: 126094 - DNA, 268 bp, Glycine max
ccaatatagcccaagccctatacaaccaaaccctaatatatatccatttgattcagtttccatggctagcctcaaggttgcatttttggctgcagtgctctgcatggttgtggtgagtgcacccatggcacatgcagctatcacgtgcgggcaggtgacgagtagcctggccaattgcatcggttacctccagaagggaggaacgccgtcgtcgggatgctgcaacggagtgaagagcctcaatgccgccgccaagaccaccgccgac

SEQ ID NO: 126095 - DNA, 269 bp, Glycine max
ctacaggctacaacaagcgcttgcggcgagcgtcttacaacaaccaattgcccaattacaacaacaatccttggcacatctaaccatacaaaccatcgcaacgcaacagcgacaacaatttctaccagcactgagccaactagctgtggtgaaccctgtcgcctacttgcaacagcagttgcttgcatccaacccacttgctctggcaaacatagttgcataccaacaacaacaacaattgcaacagtttctaccagcgctcagtcaac

SEQ ID NO: 126096 - DNA, 267 bp, Glycine max
cagtaatagtaatatacataacataaccaatggaagcacgtgcaggagccaatcaacgtattgcaagaatctctgctcatcttcagccttcaaatttccaggaagggagtgatgttcttcttaagtgaggtgagtgcagagcaaaaggtggggcacctcgattcaaagttgcaattttgggggctgctggaggaattggtcaatccctttctttgctgatgaagatgaacccattggtttcagttcttcatctttatgatgttgtca

SEQ ID NO: 126097 - DNA, 267 bp, Glycine max
cacaaacacctcgtccctcacaatgcagctagcaatggcggccaacgctgtcgtttcaccgtcgccgttccgacctcagccctttctccggtcatccttctccggtgtctccgtcaagctcactccccaatccataacgctttcacgctccaagcccctcaccgtcttcgccgccaccaagaaggccgtcgccgtcctcaaggggacctccgccgtcgaaggcgtcgccactctcatccaagaagacgatggcccgacgacagtttc

SEQ ID NO: 126098 - DNA, 267 bp, Glycine max
gaacagaggaagccataggcctagccgtggccaaagccatagacaaaggccttataaagagtagagatgaagttttcatcacttcaaagccttggaacacagatgcacaccgtgaccttattgtcccagctcttaagaccacattaaagaagctggggacggagtatgtggatctttatctgattcattggccagtgaggctgagacatgatcttgaaaatcctactgtttttaccaaggaagatgtgctgccctttgatatagaag

SEQ ID NO: 126099 - DNA, 271 bp, Glycine max
cttgaaaatcctactgtttttaccaaggaagatgtgctgccctttgatatagaagggacatggaaagctatggaagagtgttacaagttgggaatagcaaagtccattggcatatgcaattatggtatcaaaaaactcactaaactcttggaaatagccaccattcctcctgcagtcaatcaggtggaaatgaacccatcttggcagcaagggaaactcagggagttctgcaagcagaaaggaattcatgttagtgcttggtcagctcttg

SEQ ID NO: 126100 - DNA, 268 bp, Glycine max
gattattatggtaagaggctggccacggcttcatcagatcacacgattaagataattggggtgagcaacacggcctctcagcatctcgcaacattgactggtcaccaaggacctgtttggcaagtggcatgggctcaccctaagtttggttctctacttgcatcatgttcctatgatggtcgtgtcattgtttggaaggagggtaaccagaatgaatggactcaagctcatgtgtttgatgaccacaagtcatctgtgaattcggttg

SEQ ID NO: 126101 - DNA, 262 bp, Glycine max
gtgaaagcagagaagtgagatacactaagttatcctcataaatacactctaattaggtggcaagataagtgtctaaccttagtaacattgccacatattgtgttcatttggaattgtgccactaaaattctattcaattcatctatggctgcctcttcttatgctatgcaatcaatcctggcaaaccctttgatccgcatttccagcgggtctagggtgaaccaatttggcgttcctgctttgcacatgagaaggaatgttg

SEQ ID NO: 126102 - DNA, 270 bp, Glycine max
atcgagccgcgagaaaaaaaataacacttttcactttcttcactacgttcttacttcgtatacgctcgtacgaagcaaaccgctcgcaagtccaccggtggcaaggcgccacgtaagcagctcgccaccaaggccgctcggaagtccgctccggcgaccggaggagtgaagaagccccaccgctatcaggccgggaaccgtggcgctgagggaaatcagaaagtaccagaagagcaccgagcttctcatcaggaagcttccgtttcagag

SEQ ID NO: 126103 - DNA, 264 bp, Glycine max
gtcaattgcaaattcttcttgtgtctacttctatggctctgctactttctacctccttctcaaggtaataagcactggcatgaaaatagatacccttttatcaaaatgcaagctcattctcatcaccgtcaatttcaactaccacctgcaataatgcctatgactacataatagttggaggtggcacagcagggtgtcctttggctgcaaccctgtctcagaacttcagtgttttggtgcttgaaagagggggtgttcctttca

SEQ ID NO: 126104 - DNA, 263 bp, Glycine max
tgcaattgaagttaaaagccttagccttccctacaactccaaacacaaagacatcatcatccatggctgcctccgtctccactgtcggagctgtcaacagagtcttttgaacctgaatggttctggagctggagcttcagctcccagttcagccttctttgggaccagcttgaagaaggttattgcctcaagggtccccaacagcaaggtttccggtggaagcttcaagattgttgctgtagaagagaagaaagagattgaag

SEQ ID NO: 126105 - DNA, 255 bp, Glycine max
aaagcacaatagtgtaccaacaatggcagccaaaatattttgcttccttatgctccttggtctttctgcaagttttgctaccgcaaccattttcccacaatgctcacaatttccgatagcttcccttctacccccatacctctcatcagcggtgtcttcaatgtgtgaaaccccaattgttcaaccctacaggatccatttagcaatcgcaacaggcatcttaccattatcacccttgttcctccaacaaccgtc

SEQ ID NO: 126106 - DNA, 264 bp, Glycine max
ggctacaaagccaaagtaaaaggttgaagatggtatctttggcacttctggaggatttggttttactaagcagaacgagctctttgtgggtcgtgttgctatgttggttttgcagcatcattgttgggtgaaggactaactgggaaaggaatcctagcacaattaaacctggaaactggactttacatatatgaagcggacctcttcttctgtgtttcatcctcttcaccctgctaggagccattggaggtttaggtgacgtgg

SEQ ID NO: 126107 - DNA, 266 bp, Glycine max
gtcctaatctttctgcaccatcgttctccatttttggctttacaaaaccactgtgtctgattaagggttctttaatatttccaatatttcttgtagtgaaaaagtgttagctaaaagaagaccaagtttttggtgttgtagaaggaagagaagaattaacatgaaaattcagtgtgacgtgtgtgagagagctccagcaacagtgatttgttgcgcggatgaggctgctttgtgtgccaaatgtgacgttgaagttcatgctgcaa

SEQ ID NO: 126108 - DNA, 263 bp, Glycine max
ctgacaacttcaggcttgacttcgctgtgagccgagagcaaacaaacgagaacggagagaagatgtacatccaaacccgaatggctcaatatgcagaagagctgtgggaattactgaagaaggataacacttttgtgtacatgtgtggactaaaaggaatggaaaagggtattgatgacattatggtgtcattggctgccaaagatggcattgattggactgagtacaagaggcaattgaagaaatcagagcaatggaatgtc

SEQ ID NO: 126109 - DNA, 270 bp, Glycine max
gcggtggatcccgcgggagagctggggggagacggagataaggctgatggccacggcggggctgaggatgctcgacgcggcggcgcaggagaggattctagcgtcgtgcagaaggtgctgcgtgactccggattcatgtttagggacgaatgggcttctgttatcacaggttctgatgaaggagtgtatgcttgggttgttgctaattatgcacttgacactcttggaggtgatcctttggaaacaactgggattattgaacttggtggt

SEQ ID NO: 126110 - DNA, 189 bp, Glycine max
attgagaccatctagcagcttagcgagcacaatagtgtaccatcaatggcatccgatgtattttgcctccttatgctccttggtctatctgcaagtgctgctacggcgaccattgtctcgtaatgctcgcaagctcctatagctttgcttctcccccgtagctctcaccagcggtgtcttcggtatgtg

SEQ ID NO: 126111 - DNA, 215 bp, Glycine max
tttttcacaccaccaagccaacagaagatgtttctccacattgttttcctcctttcccttctctcatccacttcccatgccactgtccaagacttctgtgtggcagaccttaagggtgcagacaccccttcaggctacccctgcaagcccctgcaaatgtaacttcagatgactttgtgtacacaggcttagctgaagctgcaaatgtcacaaac

SEQ ID NO: 126112 - DNA, 215 bp, Glycine max
cttccataaacgggtggtgcctctcttccatctccccagccaagacctctctcaggaaggccacattacgcccttccgtcttcgcaacccttaacactccttcttctccttcctcttcatcttccttcccctctctcattcaagacagcctgtttttgctgcccctgcccccatcatcaccccaactgtgagagaggatatggcaaaggaatacg

SEQ ID NO: 126113 - DNA, 212 bp, Glycine max
aagcactacaacattttctttggtctctcattttctctatagctagatgggttctggtgctttacaacttcttctgatcttgggtcttctggctagctcatgcttagcacaagccccaggtgctgcacccacacaaccacccactacaccccatcaccaccaccaccaagatcagcacctgcaccagccccaccccgccagcaacaccacca

SEQ ID NO: 126114 - DNA, 213 bp, Glycine max
ctcttttaacaatccacacccaaattctagggttccgaaatggacgctggcggaaagatcaagaagggcgccggaggtagaaagggcggcggcccaaagaagaagccggtttcaaggtccgtcaaagccggtctccaattccccgtcggagaattggccgttatttgaagaaaggaaggtacgctcagcgtgtcggtaccggtgctcccgtat

SEQ ID NO: 126115 - DNA, 212 bp, Glycine max
cacctgcagaatgtcattccgcagcatagttcgtgatgtaagggatagtttcgggagcttatctaggcgtagttttgatgtcagacttactgggcatcatagaggaaaatctcaaggatcagtgcaggatttgcatgaccaacctctataattcagaatagccgttgggccagcttacccccggaattatatctgatatcattagacggcta

SEQ ID NO: 126116 - DNA, 210 bp, Glycine max
ctctctttttctctctgttttttgttctctcttcgcttaaaccctatcgttcttctcgttttcgccgattctcgccatgccgaaagctaaatccgacgccaaagccgccgatagcaggttgaagcggaagggcgctggtgctgggagaagcaatcgaagaaagctgctaaggaccctaacaagccgagagacctccaagcgctttcttcg

SEQ ID NO: 126117 - DNA, 211 bp, Glycine max
gcaatagagaaagaggcagatagaaaaaaagagcgacttttgagttcaaaagatgactaacttcccattgatcaacttggagaagctcagtggtgaggaaagaaacgataccatggaaaaaattaaagatgcttgtgaaaactggggttctttgagctggtgaatcatggcattcctcatgacatattggacactgtggagaggttgacca

SEQ ID NO: 126118 - DNA, 209 bp, Glycine max
aattaccaacgacaaaggaaggctttctaaggaggagattgagaagatggtgcaggaagctgagaagtacaaggctgaggatgaggagcataagaagaaagtggaggccaaaaatacattggagaattacgcctatgacatgaggacacaattaaagatgataagattgcttccaagctgtctgctgatgataagaagaaaattgagga

SEQ ID NO: 126119 - DNA, 212 bp, Glycine max
ttaaattgaaggtattcgtgttcagagcttaaccataggtcatatcataatggatattgatttccgttggggtggtgatcctagtattattcaggctgttgaagctacacttgttgcatcaatccctattcagttgaaggatctacagttttcaccattgtccgtgtgatattccaacttgctgaagaatcccttgcatttctgctgttgtt

SEQ ID NO: 126120 - DNA, 209 bp, Glycine max
ctcgaccgattcagaaacacaccatgcgaacgcactagcaacgacctaacaacaatggctaccaagatattagccctccatgcgcttcttgccctttttgtgagcgcaacaaatgcgttcattattccacaatgctcacttgccctagtgccattattccacagttcctcccacctgttacttccatgggcttcgaacacctagctgtg

SEQ ID NO: 126121 - DNA, 207 bp, Glycine max
cgccacacgaaggtcgatgggcgaggccgccggatccgcatgccggcggcctgcgctgccagagtgttccagctcacgcgtgagctgggacataagtctgacggcgagaccatcgagtggctcctccagcaggcggacccgcctcatcgccgccactgggacaggcaccattcccgccaacttcactccctcaacatctccctccgc

SEQ ID NO: 126122 - DNA, 211 bp, Glycine max
caagccaagtgaaagagagaagaaaagtcaaagacaatgtcagggatcattcacaagattgaggagacccttcatgtgggaggccacaagaaggaggaggagcacaagggtgagcagcaccatggtggagaatacaaaggggagatcatggtgaacacagtactgaatacaaaggagagcatcatgttggtgagcacaagccggagcacca

SEQ ID NO: 126123 - DNA, 156 bp, Glycine max
cgaacaagcaacatagaaagtggaatacattagcaatgatagagcaacaatggcggcgaagatgttttccatcctgatgctacctgctctatctgcatgtgttgctaacgcgaccatatttcctcaatactcacaagctcctaagctgcccttctt

SEQ ID NO: 126124 - DNA, 208 bp, Glycine max
atcaagtctgaggtcgagaaaatatgccctggtgtggtctcatgtgctgatatcttggacattgcttctcgtgactctgttgttcttcttggagggccattttggaaagttagacttggaagaagggattccagaactgccactttactgctgctaacactggtgtaattccacctcccacatctaacctcaccaaccttatcacaag

SEQ ID NO: 126125 - DNA, 211 bp, Glycine max
caagaatccacacaaactcagagttgtggcagagagagagagagagagagagagagagagagagaatgactgggtgggatatcgcggtgcatggtggcgctggtgtcgaccctaatctcccactcgagcgccaagaagaagcgaacaacttctcacgcgctgtctcaatcttggaatctctgctctaaattctaatcttcccgccatagat

SEQ ID NO: 126126 - DNA, 190 bp, Glycine max
acgagaacaagaatggcacttatcagtgggttgtcaagcccaaaactgtcaaatatgaatttaaaaccaacactctcgtccctaaactaggggtaatgcttgtggggtggggtggaaacaatggctcaaccctcaccggtggtgtattgctaaccgagagggtatttcatgggcaacaaaggacaaattc

SEQ ID NO: 126127 - DNA, 207 bp, Glycine max
ctttgcccccttgtaaaacttcttattgtgatgtctaaaagcgaagacttgaagcttttgggaggctggttcagcccatttgccctgagggtgcagattgcccttaacctcaagggtctagaatatgaggttgttgaagagccttgaatcccaaaagtgacctgcttcttaagtccaaccctgtgcacaagaaaatcccagttttct

SEQ ID NO: 126128 - DNA, 202 bp, Glycine max
caccccgtgagcctcttgtcgagttcgctcgctacgttttcttcaagcaccacgcttttcgcgattcccgtgatgacccttttccctggaacgctctgctcaggtcgcactctcacgggtgtgaccccagaggggcactattctgctctgcttgatgatcgaaaatggggtgcgtgtggatggtactcgtattcgttggttc

SEQ ID NO: 126129 - DNA, 134 bp, Glycine max
aaagcacaatagtgtaccaacaatggcaggcaaaatattttgcctccttatgctccttggtctttctgcaagtgctgctacggcggccagtttcccgcaatgctcgcaagctcctatagcttcccttcttcccc

SEQ ID NO: 126130 - DNA, 206 bp, Glycine max
gaaaaatgtccgaaaacggagaagagaaattactcgctgtggcgcggcacatagccaaaacgctgggccacaacaacaccatgtctgatgacatattccaaatactatcgaacttcgatggaagattctcgagagagaattttctgagaagggcgcagatgtggatcccagaggctgcgccgcactggatcattccctcaaatccc

SEQ ID NO: 126131 - DNA, 190 bp, Glycine max
cagaaacacaccaagcgaacacattagcaacaacctaacaacaatggctaccaagatattatccctccttgcgcttcttgcgctttttgcgagcgcaacaaatgcgttcattattccacaatgctcacttgctccaagttcattattacacagttcctcccaccagttacttcaatgggcttgaacaccc

SEQ ID NO: 126132 - DNA, 204 bp, Glycine max
tgtcaacagagctcttttgaacctgaatgggtctggacctggggtttcagctcccagttcatccttctttgggagcagcttgaagaaggttattggctcaagggtccccaacacaaagatttcctctggaagcttcaagatgttgctgtagaagagaagaaagagattgaagagacccagcagaccgacaaggacagatggaag

SEQ ID NO: 126133 - DNA, 203 bp, Glycine max
aaactagcaacatacatactgacgtacactagcaacatcttagcaccaatggcagccaagatcatcgccatccttgacctccatgcactctcagcaagcgttgctaccgcgactatgatgccacaatgctcacaacatacctctctccggtgacagccgcgagatttgaatacccaagtatacaatcctacaggctacaagag

SEQ ID NO: 126134 - DNA, 201 bp, Glycine max
gaaaaacaagtagttgagaactaagaagaaggatatggcttcctcaatgatctcctccccagctgttaccaccgtcaaccgtgccggtgccggcatggttgctccattcaccggcctcaaatccatggctggcttcccacgaggaagaccaacaatgacattacctccattgctagcacggtggaagagtacaatgcatgc

SEQ ID NO: 126135 - DNA, 197 bp, Glycine max
tggatacctaggcacccagagacgaggaagggcgtagtaagcgacgaaatgcttcggggagttgaaaataagcgtagatccggggattcccgatataggtcaacctttcgaactgctgctgaatccacgggcagcaagagacaacctggtgaactgaaacatcttagtagccagagaaaagaaagcaaaagcgattc

SEQ ID NO: 126136 - DNA, 197 bp, Glycine max
tgcgattccttctggattagttaggaagagcccttatctgacgcaccctatctttaacacgtaccacactgagcatgagttgcttaggtacttgtataggctacaatcaaaagatctctcactatgccacagtagatcccacttggatcttgtacaatgaagctgaatgcgacactgaaatgatgcctgtgacatgg

SEQ ID NO: 126137 - DNA, 258 bp, Glycine max
tgagaatttagaatcatcttgcaaaggtaactactacgagcttactctttggacgaaaatgatgtgtgttacaagaacattgaataatttgacagggccattgatgggcttaacgtgtacaacatactagagccatgctaccatttccctggtgatgccacagccaaagaaaatggaagcttaccaaagagtttcaagcaattgggggttactgagaagcctcttccagtgaggaatagaatgtttggtagagcttgg

SEQ ID NO: 126138 - DNA, 275 bp, Glycine max
tggaccaagtctggaagatttattcaactattgtgaccggaagttcacattgaagacagtgttaatgcttgctgatcaattgattaacagagttgaatatatgcattcaagaggtttccttcaccgtgacataaagccggacaattttctaatgggtctaggacgaaaagcaaaccaagtgtatgccattgactatggccttgcaaaaaaatatagggatcttcagactcataggcacataccatacagggacaacaagaaccttacagctcagc

SEQ ID NO: 126139 - DNA, 269 bp, Glycine max
ggctggcgaagtaggtgggtgacatcagactggacaagagtgagggcaaagcaggttcattcaagcacacagctggaacatgggctggtgatccagatggcaaaggtattcacacatcgagtgctgccacacactttgccatctctgcaaaaataccagaattcacaggcaagatcagagcattggtccttcagtattctgtactatttgagcaagagattgaatgtggtggagggtacatcaagcttctctctggacttgttaatcag

SEQ ID NO: 126140 - DNA, 281 bp, Glycine max
gtcttcataaacgccgtccaaaacttctcatacccgaatttcatgtctattcggttctagggttgtcttttctctgccgaggtaatgcgagagtgcatttcgatccacattggccaggccggtatccaggttgcgaaacgcctgctgggatctctattgccttgaacacggcattccagcccgatggtcagatgccgagtgacaagaccgttggcggacgatacgacgccttcatcacatttttcagcgagaccggcgacggaaagcacgtgcacgcgccg

SEQ ID NO: 126141 - DNA, 277 bp, Glycine max
cgaactagcaacatacatagtgaagtacactagcaacatttagcaccaatggcagccaagatttttgccatccttgccctccttgctctttcagcaagcgttgctaccgcgactattattccacaatgctcacaacaatacctctctccggtgacagccgcgagatttgaatacccaactatacaatcctacaggctacaagaggccatcgcagcaagcatcttacggtcgttagcattgaccgtccaacaaccatatgccctattgcaacaccatc

SEQ ID NO: 126142 - DNA, 279 bp, Glycine max
agaaagaagaaaaagaagcgaaactaaagtcagcattcgaaaagatgagtagcatcggtacaggttacgatctatcggtcaccactttctcccctgatggccgcgttttccagatcgagtatgccgctaaagccgtcgacaacagcgggactgttattgggatcaagtgcaaagatggggttgtgttgggcgttgagaagcttattccgtcgaaaatgatgcttccgggttccaatagaagaatacactccgttcatcgtcactctgggatggctgagc

SEQ ID NO: 126143 - DNA, 280 bp, Glycine max
aatttgcagagatcaaagaacagaagatggcacaaacgctggcaatgcccgtggcaccttcgctcgctatcatctccaattctcgcctctccaagacactctccgttcccgttctcaacaacccaaagtttcaagggttaagcatcaagtgcgttcgtgttggaggtgtggagattccgaacaacaagcgaatcgagtactcgctgcagtacattcatggagttggcaggaccagagcaaaacagattctgtgtgatatccaaatggataacaaatcacg

SEQ ID NO: 126144 - DNA, 279 bp, Glycine max
tttctcaacaacttctgctacgtcctactccaaccgcactctgttccgcaattatcatgggcaaggtcaagatcggaatcaacggatttagaagaattggccgtttggtagccagagtggctctgcagagagacgatgttgaactcgttgccgttaacgaccctttcatcaccaccgattacatgacatacatgtttaaatacgacagtgttcatggacactggaagcatcacgatgtcaccgttaaggacgagaagacccttctcttcggtacaagcc

SEQ ID NO: 126145 - DNA, 193 bp, Glycine max
tacactgtgaacaaccagatggtgaatgccactctcatgacattgctgataaccccaccaatgtgcagcttccaggtatgtacaacaaggaagagaacccccgtgttcccatcattgtcaccggtaacgatttctcaacactctatgcacctctcatccgtgatgggcgtatggagaagttctactgggcacc

SEQ ID NO: 126146 - DNA, 243 bp, Glycine max
caagatctgagttgtatgagatcaacgagcgtgaccgtggaagccccgtttatcttcgattgagctatacatgtgtcaattcccttggtgatttagtcccctttagcaacaaggtaactttcttccgttcttggacaaaatttagatatacatttcataagtatttctagtattgatctccaatgaatattggaaatttaactagataatctatattgagatctaacgcaaagtttcattatg

SEQ ID NO: 126147 - DNA, 277 bp, Glycine max
cttccattcaaccaactgtctacactgaaccctgctgcttatttagcagcaacaactattaccatttagccagctagctactgcctactctcagcaacaacaacttcttccatttaaccaattggccgcactgaaccccgctgcttatttgcagcagcaaatactactgccatttagcgagctagctgcagcaagtcgtgcttccttcttgacacagcaacagttgctgcctttctacaagcagtttgcggctaaccccgcaaccctctacaactac

SEQ ID NO: 126148 - DNA, 275 bp, Glycine max
tgtttcaccaatggctgctgcggttagtgctgcagttcttttccatccaacaagtgtacgtctcttccaagcaggacctccctcattgccccagagagagttgtgttcaagaaggcttcattgcaaaacagagatgtttctagcagtggacgggtagtttccatcagagctcaagtcaccactgaggcaccagccaaggttgaaaaagagtccaagaaacaggatgaaggtgtggttgtgaacaagtttaaacccaagaccccttacttggtaga

SEQ ID NO: 126149 - DNA, 275 bp, Glycine max
gtcggaaatagcagactttgtcttctccaacaagcttctttggtaacaatttttacaagagaaagtgccccatcagtcttcgaaaatccaatcaagaaacagttgttgctgtttgcaacttcaaatgattcagagaagttgatccctgcatttaaagaagctgcaaaatctttcaagggaaagttgatctttgtatatgtggaaatggataacgaagatgttggaaagcctgtttcagaatactttggtatcagtgggaatgctccaaagtactt

SEQ ID NO: 126150 - DNA, 277 bp, Glycine max
atcgttttgcagccatggaaacaggcatagcatgctacactcgcgggcctttcctgcctagtgtttcttccaagcactctccaccctccatctctccatcttttggcttgaggagtctgaaatcgagctctttatttggagaatcgctaagagtggcatccaaatcaacactaaaggtttcaaagacaaagaatacttcactcgtgaccagatgtgaaattggtgacagtctggaagaattcctcacaaaagcaacaccagataaggggtgatcagg

SEQ ID NO: 126151 - DNA, 280 bp, Glycine max
ttcacattttagaagaataccccctcttttgctgcatcagaggagttgtaaattaagagcatggctgcacaagctcttgtatcatcatcttctcttaccttctcagcggaggcttcaagacaaagtcttggaccaagatcactccaatctccatttggcttctccagaaaagcctcctttcttgttaaggcagctgctaccccccctgtcaagcaaggatcagacaggcctttgtggtttgcatcaaagcaaagtctttcttacttggatgcagccttcc

SEQ ID NO: 126152 - DNA, 276 bp, Glycine max
gcgaagaagtggttgcggcggcgcggaggagccgcgccggagcagggttgaagcacaaactggagagaaaatggacgttttggtgcgacaaccaatccaaacccaagcaaggcgctgcttggggaacctctcttcgcaaggtctacaccttcgacaccgttgaagagttctggtgtttgtatgatcaggtattcaagcccagcaagttgcaaatcaatgccgattttcacttgttcaagactgggattgaccctaaatgggaagatcagagtgcgc

SEQ ID NO: 126153 - DNA, 278 bp, Glycine max
aaacaatttcatcaagcctgccatggcttcctcgtgtgttcctctgccattgcagctgttgccatctccacaccaagttcccagaagaatggatcactcttgggaagcacaaaagcttcttttcttagtgggaggaaactgaaggtgaacagttttacagcaccagttggagcacgatccagcactacagtgtgtgcagttgctgagcctgataggcctctgtggttcccaggcagcacccctcctccgtggctagatggcagtttgccagagatttt

SEQ ID NO: 126154 - DNA, 269 bp, Glycine max
gagagatggagagcatagagcacagaacggtggagtgaacggcataaagatgcatgttgcagagaaaggagaaggagcagtggtgttgttcttgcacggcttcccagaactctggtactcatggcgccaccagattctagctctgagctccctcggttaccgtgcggtggcacctgatctccgtggctacggtgacacagaggccccttctacggtgaacagctacacgtgttttcatctggtgggtgatatcattgctctcatgactc

SEQ ID NO: 126155 - DNA, 269 bp, Glycine max
cgcagatcgattacgaagtaatttcactgaatctattgaagatgtttctcacaaggactgagtatgaccgaggagtcaacaccttttctcctgaaggccgtttatttcaggttgaatatgcaatcgaagccatcaagctgggatcaactgcaattgggttgaagacgaaagagggtgttgtccttgcagttgaaaagcgcatcacttcgccgcttctggagccaagtagtgttgagaaaattatggaaattgatgagcatatggttgtg

SEQ ID NO: 126156 - DNA, 276 bp, Glycine max
gtgcctctagggttatcatttctccatttccatttctctctcacttttcaagaatcgtaagctatgggaaagtcttacccaactgtgagtgctgattaccagaaggccgttgagaaggcgaagaagaagctcagaggcttcatcgctgagaagagatgcgctcctctacatgtccgtttggcatggcactctgctggaacctttgacaagggcacgaagaccggtggacccttcggaaccatcaagcaccctgccgaactggctcacacgctaaca

SEQ ID NO: 126157 - DNA, 272 bp, Glycine max
cggaagcaacccacaaaagcagcacaagaacactcatcagatcccagtgatcaattcaatttgcgttcatcactggtaaggcaaacatgaggggcattctttccgtaaggacagccttggttcaacatcatagtgagaaattgggccttggtttcagagtatttagcactcagggtgcttccactgctagtaccccacagccgccaccaccacctcctccgccggagaaaacccattttggcggccttaaggatgaggacaggatattacta

SEQ ID NO: 126158 - DNA, 192 bp, Glycine max
tgaagttgaagtcttgcccttctctcttcaactcagacacaagacatcatcatccatggctgcctccgactccactgtcggagctgtcaacagagctcttttgaacctgaatgggtctggacctggggtttcagctcgcagttcatccttctttgggagcagcttgaagaaggttataggctcaagggtccc

SEQ ID NO: 126159 - DNA, 266 bp, Glycine max
gaattcgttcagatttgaaaatgtgggttaggttgttcttcttctccttgcagcactttctctttttcacttagccgcagcttctcttaatcgtagcagtttttcagcagatttcttctttgaaacagcttcttcagcttaccagtatgaaggtgcagcacgtgaaggtggcaagggacctagtatatgggacaccttcactcatagccacccagatagaatagcagaccacagtaatggggatgttgtcattgattcatccaccg

SEQ ID NO: 126160 - DNA, 266 bp, Glycine max
gttgtaaagccttgttgctgccatggccaccacgcggctcttgcttctacaaggatcccttcaaacacaaggttcccatccaaggcctctcactctttcccaacccaatgcgccttaaagagacttgaggtgacagaattctctgggcttagatccacttcatgtgtcacatatgctaacagtgctagagaatcttccttttttgatcttgtagcttcccaactcactcccaagaccaatggatcaactcctgtgagggagagaca

SEQ ID NO: 126161 - DNA, 268 bp, Glycine max
ctttatgaagggggatttttcaatgccatcatgagctgtcgacgcaactactcacaaagtccaccatcagtggaatttacctcagagttatggcatcgcaatggttggtctgacaacatttattgtatcctgcttcgattagtacatgaaattcaatgatgttgttcaatttgcagtgtatcctgatgggcgagatagcatatcaagtcatcatccacctggtgaagatacgaatggttatgagcttgcaagtgagcgctgacgcctg

SEQ ID NO: 126162 - DNA, 269 bp, Glycine max
caagaggcacttgtttatgatgacaacactggacatggattctttaatgatgttttcgctgggaattctcttgtgaatgatactgatttgaaccctttggagtttttagcttctctattccctggttttgcttcagaaagcctttctgaagttttctttgccaatggatgcgatttacatctgacaattgagatgctcactcagttagagattcaagttgacagtagcttcaatcagaatccgagtccaaagactctgtcactccgaat

SEQ ID NO: 126163 - DNA, 271 bp, Glycine max
acacaaggcagaaagcaagctcatcgtagagtttaacaatggcagcagcctcctccatggctctctcttcctcatccttggctggcaatgccgtgaagctgggtacagaagctcccgaagtcgggagggtcagcatgaggaagaccgtcaccaagcaggcctcctccggaagcccatggtacggcccagaccgcgtcaagtacttgggcccattctctggcgagcccccgtcctacctcactggcgagttcccaggtgactacgctgggac

SEQ ID NO: 126164 - DNA, 244 bp, Glycine max
gaagcattagcaaaagcaagaagaactagtctaagcagaaatggcctcttcagtgatggcatctgtggccctcaaacctgcccctttcactgttgagaagtcctcagttagaggccttccctccctctcaaggaactcctcttcattcagagttgtggccagtggtggcaagaagatcaagactgacaagccttatggaattaatggtggcatggctttgagggaaggagttgatgcatctggc

SEQ ID NO: 126165 - DNA, 229 bp, Glycine max
cactcatctcttacaacgaaaccctcttcacttgttctatctgtgacgagcatcatggcctcaagagcagtgttattgttggctatgtgtgtgcttccggcgatggttgtggccattcgcccagcaaagaaccctttttgcgtgaagggtcgtgtctactgtgacccttgccgtgctggttttgagacctcagctaccacctacattgctggtgctgagattatgttgc

SEQ ID NO: 126166 - DNA, 265 bp, Glycine max
ccttggtgaaggacttgaccctatctaccctggtggtgcatttgaccctcttggtctggctgatgaccctgatgcattcgctgagttgaaggtcaaggaactcaagaacggtcgcttggctatgttctccatgtttggtttctttgttcaggccattgtcactggcaagggccctattcagaacctttacgaccatgttgctgatcctgttgccaacaatgcttgggcttatgccactaactttgtccctggacaatgagcatgc

SEQ ID NO: 126167 - DNA, 258 bp, Glycine max
ttctagtcccaaagagctaacaagagattcagaccggcatggctaatgaagaggaacagaaaaaccacctcttcggcatcaaagatctcggtcacaagactctccttcagagtgatgcactctatcagtatatacttgaaaccagtgtctatccaagagagcacgagtgcttgaaagagatacgcaagatgactgcaaaacacccactgaacatcatggcaacaccagctagacgaggacaacttctgagcatgcttg

SEQ ID NO: 126168 - DNA, 101 bp, Glycine max
cttactaagcatcatgtgccaaagaatgttctggtaaagttgcacacaggacagtgaagctcctgagaattccaacagatctgtgttttaagagacggtat

SEQ ID NO: 126169 - DNA, 248 bp, Glycine max
accaaatcatcacacacacatactaagacgcaacaattcttctacaatggatctcctccttctggaaaagaccctcataagtctcttcctcgctgcggtggtcgccatcgccgtctccatcctccacggccggaaattcaagctcccaccgggcccactccccgtcccaatcttcggcaactagctccaagtcggcgacgacctcaaccaccgcatactcaccgatttggccaaaaaattcggtgaca

SEQ ID NO: 126170 - DNA, 263 bp, Glycine max
tgaatctcaagattctaagagagatttgctgctctttgaagaagggtgtttgcttgattttggtgatgtcgctgctctcagatctcatcaaccttaacctctcagacagtactgagaaggtgatcgcagagtacatatggatcggtggatcaggaatggacctgaggagcaaagcaaggattctcccaggaccagttagcgaccgctcaaagcttcccaagtggaactatgatggttccagcacaggccaagctctggagaag

SEQ ID NO: 126171 - DNA, 264 bp, Glycine max
ggaaggtcaaggtcaccaattcatggaggtctgaacctacaaatcctggtgacacactttatgtaactggtctatcttcgagggtcaccgaaagagacctagaggagcatttctccaaggaaggaaaggtttcttcatgttttcttgtggtggagccccgtacacggatttctcgtggttttgcttttgttacaatggaatctgctgaagatgcggacgctgtatcaagtatctcaatcaatcagttttagagggtcgtacatc

SEQ ID NO: 126172 - DNA, 266 bp, Glycine max
accaatatagcccaagccctatacaacaaaccctaacacacacccatttgattcagtttccatggctagcctcaaggttgcatttttggctgcagtgctctgcatggttgtggtgagtgcacccatggcacatgcagctatcacgtgcgggcaggtgacgagtagcctggccaattgcatcggttacctccagaagggaggaacgccgtcgtcgggatgctgcaacggagtgaagagcctcaatgccgccgccaagacccgccgac

SEQ ID NO: 126173 - DNA, 266 bp, Glycine max
gatgacactaggtagaattttggaggtgaagcattggtttaatgggtttggtttcccaagctgttcatgatggtggtcggcatgtcataggagttattcccaagacactcatgcctcgagagctaactggtgaaacagtgggagaagtaaaggctgtagctgatatgcaccaaaggaaggcagagatggctaagcattcagatgcctttattgccttaccaggtggttatgggactctagaggagcttcttgaagtcaaacctggg

SEQ ID NO: 126174 - DNA, 241 bp, Glycine max
aataccacaaattgtatcaaccactttacacaaagcggtacgaacatagtaaatggtactacggaagttgaagaaggggcagtgacagacacagcacctgataatgaagaggatcaagagacaggagtgcctgcattttggcttactgctatgaaaaacaatgaagtgttggctgaggagatttcagagcgtgacgaaggtgctcttaagtatctcaaagatatcaagtggagcaggatag

SEQ ID NO: 126175 - DNA, 268 bp, Glycine max
taattatcaaacctaaccagtaaaaatggtgaccgtggaggaaatccgcaacgctcagcgttcccatggacccgccaccatcttggccttcggcaccgccacgccgtccaactgcgtctcccaagccgattaccctgactactacttccgcattaccaacagcgaacacatgactgatctcaaagataagttcaagcgcatgtgtgaaaagtccatgataaagatgcgatacatgctcctgacggaggagtttctgacagagcccgaa

SEQ ID NO: 126176 - DNA, 267 bp, Glycine max
gacgtgtagtatataaaggaggggagaagagagagagaagtgggagagaatagagaagagagatggatccagacgcgttggcaaaggcattcgtggagcactactacagcaccttcgacaccaacaggaacggcttagcgaatctctaccaggagggttccatgctcactttcgaagggcagaagatccaaggcgcttccaacatcgttgccaagctcacctccctcccttttcagcagtgccaccactcaatctccaccgcgactg

SEQ ID NO: 126177 - DNA, 269 bp, Glycine max
caacaagccacatagacagtggaatccgtagctacaatagagcaacaatggcgaccacgatattttccctccttatgctcctagctctttcgacatgtgttgctaacgcgacaattttccatcaatgctcacaagcgcctatagcttccacttttatcgcacaccttccatcaattgtagcttcaacatgtgaacacccagctcttgaaccatgtcggattcaacatgcaatcgcagcgagcaccataccttgatcgccctggtgtttc

SEQ ID NO: 126178 - DNA, 265 bp, Glycine max
aataccaaaaattgtatcaaccactttacacaaagcggtacgaaatagtaaatggtactacggaagttgaagaaggggcagtgaaagaaacagcacctgataatgaagaggatcaagagaaaggagtgcctgcattttggcttactgctatgaaaaacaatgaagtgttggctgaggagatttcagagcgtgacgaaggtgctcttaagtatctcaaagatatcaagtggagcaggatagaaaaccctaaagattcaagcgactt

SEQ ID NO: 126179 - DNA, 263 bp, Glycine max
cccgcattcctacctcgccttctccggcgccgaagaatttgctaggcaacagggtgtggaggttgtggacaacgagtactttatcacacctgacaacgttggcatgctcaagctggcaaaggaagcaaacacaatcctgtttgattaccgaatcccaacatcggggtacgagacgtgcggatccggtgtggagagtccactgcaaatgaatggactcccaataagcgtgtacgcgcccgaaaccgtttgttgcgtgtggttga

SEQ ID NO: 126180 - DNA, 259 bp, Glycine max
atctaagtgagatacacagtagttaggtagcaagcataagtgtctaaccttagaaacatatctgctacatatcgtgtgcattttggaattgtgccactaaaattctattcatctatggctgcctcatcttatgctatgcaatcaatccttgcaaaccctatgatccgcatttccagcgggtctagggagaaccattttggtgttcctgcttatcacatgagaaggaatgttggcctgagagttaggtccatggtgagga

SEQ ID NO: 126181 - DNA, 263 bp, Glycine max
gttaaaagccttagccttccctaaactccaaacagaaagacatcgtcatccatggctgcctccgtctccactgtcggagctgtcaacagagctcttttgaacctgaatggttctggagctggagcttcagctcccagttcagccttctttgggaccagcttgaagaaggttattgcgtcaagggtccccaacagcaaggtttccggtggaagcttcaagattgttgctgtagaagagaagaaagagattgaagagcccagcag

SEQ ID NO: 126182 - DNA, 262 bp, Glycine max
ccataacacaaggcagacagcaagtcatcctagagttttaaaaatggcagcagcctcctccatggctctctcttccccatccttggctggcaaggccgtgaagctgggcccatcagcccccgaagtcgggagggtcagcatgaggaagaccgtcaccaagcaggcctcctccggaagcccatggtacggcccagaccgcgtcaagtacttgggcccattctctggcgagcccccgtcctacctcactggcgagttccaggtg

SEQ ID NO: 126183 - DNA, 264 bp, Glycine max
agaaacattcgagtcttcattgcagatgtcgacctcttccattaacgggtggtggctctcttccatctccccagtcaaaacctctctcaagaaggccacattaggtccttctgtcttcgcaaccgttagcactccttcgtctccttcaacatcatcatcttctacctacacgtcccgcattcaagacaggcatgtctttgcagccactgtacacatcatcataccaactgtgagagatgatatggcaaaggtatacgacaagct

SEQ ID NO: 126184 - DNA, 255 bp, Glycine max
ggattctaaggcgaataaagaagaaatccaacaaaaaatagcaactaattaatcctcggacagtgtaaaatcaaatttccacatttccgagagagaggatatggcaaaggaatacgagcaagctattgaagaactccagaaattgttgagggagaagagtgaactcaaagccacagctgctgagaaagtggagcagataacagcttctctgggaacatcatcatctgatggcatcccatcatcagaagctcagac

SEQ ID NO: 126185 - DNA, 260 bp, Glycine max
atgcagtaagacgacacacattacatatatagatagagagggatggatagaggagatttcccaaatatcatgaatcagtagtagggcggaatggcagcggagacgccacaggggttggtgcggtagcaactagcaacatagaaagcacaatagtgtaccaacaatggcagccaaaatattttgcctccttatgctccttggtctttctgccagtgctgctacggcgaccattttccgcaatgctcgcaagctcctatgct

SEQ ID NO: 126186 - DNA, 266 bp, Glycine max
  unsure (1)..(266): unsure at all n locations
gaccaactagctacatagaaagccaatagtgtatatataatggcagccaaaatattttgcttccttatgctccttggtctttctgcaagtgttgctaccgcaatcaannntcccacaatgctcacaatctcctatagcttcccttcttcccccatacctctcaccagcggtgtcttcaatgtgtgaattcccaattgttcaaccctacaggatccaacaggcaatcgcaacaggcatcttaccattatcacccttgttctccaaca

SEQ ID NO: 126187 - DNA, 265 bp, Glycine max
gagaaatagagagagaacttcaatgagggtgagagtgacacaaatctagagagagcactagtactctaaaagtctattatattcttcaaaatatgaccatgcatcgcgagtcttgggcttttgtcttcggcgttatgggcaacatcatctcctttggagtgttccttgctccattgccaaccttttaccaaatctacaagaagaaatccactgaaggtttccagtcacttccttatgttgttgcactgttcagtgcatgctttgg

SEQ ID NO: 126188 - DNA, 261 bp, Glycine max
atggaagtcgtcgtggcaatgatgaagtgatggcaaggggaacttttgccaacattcgtcttgttaacaagctcttgaatggagaagttggccccaagacagttcacattccgactggggagaagctttatgtgtttgatgcagcccagagatacaaggctgaagggcaggacaccattgtgctggctggagctgaatatggtagtggaagttccagagattgggctgccaagggtcccatgctattgggtgtcaaagctg

SEQ ID NO: 126189 - DNA, 270 bp, Glycine max
  unsure (1)..(270): unsure at all n locations
ggaagagaaaaggaaggccctgcaggctcaaaaaactgaagcaagaaaggtggacatcaaggaatttgcatccatgcagccactgtcaaacaagaaagaaaatgatgagatctttattaaattgggatctgacaaggataagcgcaaagatgctttggagaaggaggagaaatccaagaagtctgtcaacatcactgagtttctgaagccagctgaaggggaaaggtataccctggtgggcgtggtcggggacgtggccgtggtnctaga

SEQ ID NO: 126190 - DNA, 253 bp, Glycine max
gagactaactagcgacatagacagtaggatccattagcatcgatagagcaagaatggcgaccaagatatcttccctccttatgctccttgctctttctacatgtgttgctaacgctacaattgtccctcaatgctcacaagctcctatagctgcgcttcttgacccataccttgcatcagttatagcttcagtatgtgaacacccagctcttcaaccatataggcttctacaagcaatcgcagctagcaacat

SEQ ID NO: 126191 - DNA, 282 bp, Glycine max
ttcacgtctttgagaaatgggtgcttcggcatcggtcacagaaaaatccatccatgaattcatggtcaaggatgctaagggcagagacgtgaacctcagcacctacaaagggaaggttcttcttgtagttaacgtcgcttcaaaatgtggatttacaaattccaattacacccagttaactgagctttacagcaaatataaagacagaggtcttgagatactggcatttccatgcaaccagtttctgaaacaagagcccgggagtagccaggaggcagagga

SEQ ID NO: 126192 - DNA, 266 bp, Glycine max
ctagtttcttacaaggctctactctactgcttcaccttctgctctagaaaattcagtggtgatacatggcttcggctactctctctgtagccaaaccagcccttcaggcaaatcggaaacgcttctctgaattctctggcctccgcagctcatcaggcttcactcccttttctagaaatcatacaaggatttccattctgtcattgccttccagacctatgcagttggaagcagtggaggatacaagaagggtgtgacagaagcaa

SEQ ID NO: 126193 - DNA, 260 bp, Glycine max
tggcagcagcctcctccatggctctctcttccccatccttggctggcaaggccgtgaagctgggcccatcagcccccgaagtcgggagggtcagcatgaggaagaccgtcaccaagcaggcctcctccggaagcccatggtacggcccagaccgcgtcaagtacttgggcccatctctggcgagcccccgtcctacctcactggcgagttcccaggtgactacggctgggacactgctgggctttcggccgacccagaaa

SEQ ID NO: 126194 - DNA, 265 bp, Glycine max
cgtcactacaagcagcagctactttcatgcaacccaccaagttgagcaggagcaacactttgcagcaaaagtctactcagtccatttccaaggcttttggtttggaacctgttggagctaaaaaggtcacatgctcccttcaggctgatcttatacgattggctcacaagtgtgttgatgctaccaaaattgcaggattcgcccttgccacctctgccctcgttgtctctggggcaagtgctgaaggtgttccaaagaggctaac

SEQ ID NO: 126195 - DNA, 269 bp, Glycine max
tctcgagcgaatcggctcgagcaaaaccaaaaccaacttaactccttcttcctctacttcaccaacgaccaaggtcggagagtactggttcccaaaagaagaaggaagagcttagaaaagtgttctccactttcgacaaaaacggcgacggattcataacgaagcaggagctgagggagtccctgaggaacatcagaatcttcatgacagaacaagaggtcgatgatattgttgtcaagtacgattccaacggggacgggttgatcgat

SEQ ID NO: 126196 - DNA, 266 bp, Glycine max
cttggagttaaaagccgatcttcttgttttgttgagtgatgtagaaggtctttatagtggccctccaagtgatccacattcaaagcttattcatacgtatattaaggagaagcatcagaatgaaattacttttggtgacaaatctagagtgggaagaggtggaatgactgccaagtaaaagctgttgttcatgcagctgatgctggcattcctgttgttattaccagtggttttgcagctgagaatattatcaatgttctccaagg

SEQ ID NO: 126197 - DNA, 263 bp, Glycine max
catcacttcattcaacatttctctctcccttagctagtttttaccaatggctgctgcggttagtgctgcagtctcttttccatccaccaagtctacctctctcccaagcaggacctccatcattaccccagagagagttgtattcaagaaggcttcattgcaatacagagatgttgtagcagtggaagggtagtttccatcagagctcaagtcaccactgaggctccagccaaggttgaaaaagagtccaagaaacaggatga

SEQ ID NO: 126198 - DNA, 261 bp, Glycine max
cggagaacgaattacagacctaaaacttgggaatggcacctctcttttgatattcacaaacattatctcgtacttgccagcttcttttggtaggacaattgctcaagcatttaatgatgcaaactacattggacttggtaccattgttttgtccttctttttgttggtagttggattgtttatgttcaggaagcagagagaaaaatcccgcttaactatgcttctagattcaccagcagaagcactggtcttgaaaagtcc

SEQ ID NO: 126199 - DNA, 263 bp, Glycine max
aaagaatctggtcttccaaggtgatgccacgtcttcttccaggggcatagaactcacaaagttagacggtggaggaaaaccagtgggtggcagtgtggggagagtgttatactcttctccagtgcacctttgggaaagctctacagtggtcgcaagctttgaaaccgacttcaccttttccatctcatcagactctactactccaggtgatggccttgccttcttcattgcaccatttgacactaaaatccctccaaactctg

SEQ ID NO: 126200 - DNA, 264 bp, Glycine max
gaagaacaagtagttgagaactaagaaggagaagcaaatggcttcctcaatgatctcttccccagctgttaccactgtcaaccgtgccggtgccggcatggttgctccattcactggcctcaagtccatggctggcttccccaccaggaagaccaacaatgacattacctccatgctagcatcggtggaagagtgcaatgcatgcaggtgtggccaccagttggcaagaagaagtttgagactctttcctacctgccagacctt

SEQ ID NO: 126201 - DNA, 264 bp, Glycine max
cggagaacgaattacagacctaaaacttgggaatggcacctctcttttgatattcacaaacattatctcgtacttgccagcttcttttggtaggacaattgctcaagcatttaatgatgcaaactacattggacttggtaccattgttttgtccttctttttgttggtagttggtattgtttatgttcaggaagcagagagaaaaatcccgcttaactatgcttctagattcaccagcagaagcactggtcttgaaaagtccgc

SEQ ID NO: 126202 - DNA, 266 bp, Glycine max
ggaaattctcaagctctgccctcctgagcagctggtaactcattacaagattggaagtttcaaattaggcgatgttgatgattttctactgaaggtaggtacagttaggggcaagctcaagaagggtggaatagttgacattaatgctgctgcaagaatcgttcttcatgattggaatgaaggtaaaattatatattataccatgcccccaaatagggatcaaggggaaccttcagaggccaatatagtttctgatttttcaaaag

SEQ ID NO: 126203 - DNA, 259 bp, Glycine max
ccacttgctctggcaaacgtagttgcaaaccagccacaacaacagctgcaacagtttctgccagcgctcagtcaactagccatggtgaaccctgccgcctacctacaacagcaacaactgctttcatctagcccgctcgctgtggccaatgcacctacatacctgcaacaacattgttgcaacagattgtaccagctctcactcagctagttgtggcaaaccctgctgcctacttgcaacagctgcttccattcaacca

SEQ ID NO: 126204 - DNA, 263 bp, Glycine max
gttttctttgactggaaagactacctcaaattctaccagctaggaacctattggccatacactccttccatacatttgctgtatggtctgagagctgctcttgatctgatttttgaggaaggactcgaaaatgtgatcgcaaggcacagtcgtttaggcaaagcaaccagattgctgttcgagcatggggtttgaagaattgcacccaaaaggaagagtggtacagtgacactgtgactgctgttcttgttcctgcttacatt

SEQ ID NO: 126205 - DNA, 263 bp, Glycine max
gtttcttacctcaagtatctttcgcagctggaaggattctataattgctctccaaactactaaatctctttttccatggtctgatgtcttatagattgttggtagatgtatcgattccatagcttctaaaacttctgttgatccagcaaacatcacttggtcttacacttataaccgtaagttatcagagcttgataaaattgttgaggacaagataacaccacaagagaaaattgagcctgttcctaaggactggtgggttg

SEQ ID NO: 126206 - DNA, 263 bp, Glycine max
ctagtttcttacaagcctctactatactgcttcaccttctgctctagaatattcagtgctgaaacatggcttcggctactctctctgtagccaaaccagcccttcaggcaaatgggaaaggcttctctgaattctctggcctccgaagctcatcaggcttccttcccttttctagaaaatcttcagaggatttccattctgtcattgccttccagacctatgcagtcggaagcagtggaggatactagaagggtgtgacagaa

SEQ ID NO: 126207 - DNA, 240 bp, Glycine max
tgcactgtgtggaaagtaagcatggcaagagtggtggcactccaacagaaccaactatctttctctcccttagcttcctctctttttgacttcagtggaaccagacttcaaactcaacttcagttcaagagaaaactatgccatccaaaagggtctttctacgtctcggctcgagcaccaagaaaatcctaataatgggaggcaccaggtttattggtgtgttttaaccaggctccctgt

SEQ ID NO: 126208 - DNA, 256 bp, Glycine max
ttcaaaaacacaccaagcgaagcaactagcaacgacctaacaccaatggctaccaagatattagccctccttgcgcttcttgcccttttagtgagcgcaacaaatgcgttcattattccacagtgctcacttgctcctagtgccagtattccacagttcctcccaccagttacttcaatgggcttcgaacatccagccgtgcaagcctacaggctacaactagcgcttgcggcgagcgccttacaacaaccaattg

SEQ ID NO: 126209 - DNA, 263 bp, Glycine max
  unsure (1)..(263): unsure at all n locations
ttcagaaacacaccaagcgaacacattagcaacaacctaacaacaatggctaccaagatattatccctccttgcgcttcttgcgctttttgcgagcgcaacaaatgcgttcattattccacaatgctcacttgccccaagttccattattacacagttcctcccaccagttacttcaatgggcttcgaccanncagctgtgcaagcctataggctacaacaagcaatttcggcgagcgtcttacaacaaccaatttcccagtt

SEQ ID NO: 126210 - DNA, 252 bp, Glycine max
gcacaatagtgtaccaacaatggcagccataatattttgcctccttatgctccttggtctttctgcaagtgctgctacggcgaccattttgccgcaatgctcgctagctcctatagcttcccttcttcccccgtacctctcaccagcggtgtcttcggtatgtgaaaaccaattcttcaaccctacaggatccaacaggcaatcgcagctggcatcttacctttatcagccttgttcctccaacgatcatca

SEQ ID NO: 126211 - DNA, 258 bp, Glycine max
ttttcatcaggactcattgatctggccatcaaaacgaatagtttgattggaggagatgactttaagactggtcagaccaaaatgaaatcggtgttggtggatttcctagtaggggccggcatcaagccaacatctatagtgagttacaaccatttgggaaacaatgatggcatgaatctctcagcccctcaaaccttccgctcgaaggaaatttccaagagcaatgttgttgacgatatggtcaacagcaacgccatc

SEQ ID NO: 126212 - DNA, 259 bp, Glycine max
gccaggattgctttcagaagtgtttgctgttcttgcagacctcaaatgcaatgtggtagcagcagaagtctggacccacaattcaagaatggcatctgttgtttacatcacagacgaggcgacgggattgtccattgacgatccggatcgccttgccaagattaagcagcttctactgtatgtgctgaaaggagacatagataagaagagtgctaacactgctgtttctgttggttctactcacaaggataggaggctg

SEQ ID NO: 126213 - DNA, 260 bp, Glycine max
caaaacactcataacacaaagcacaaagcaaagctcatccttgagttaaaaaatggcagcagcttcttccatggctctctcatccccatccttggctggcaaggccgtgaagctgggcccatcagccccagaagtgggaagggtgagcatgaggaagaccgtcaccaacaggtctcctcaggaagcctatggtacggcccagaccgagtcaagtacttgggcccattctctggcgagcccccgtcctacctaaccggtga

SEQ ID NO: 126214 - DNA, 256 bp, Glycine max
cgaataccttctaaggaaaggatggattccttgcttggaattcgagttggagcacggtttcgtgtaccgtgagcacaacaggtcacctggatactatgatggacgctactggaccatgtggaagctgcctatgtttggctgcactgatgcttctcaggtgttgaagagcttcaagaggctaagactgcataccccaatggcttcatccgtatcattggatttgacaacgttcgccaagtgcagtgcatcagcttca

SEQ ID NO: 126215 - DNA, 258 bp, Glycine max
cttccattaacgggtggtgcctctcttccatctccccagccaaaacctctctcaagaaggccacattaggcccttctgtcttcgcaaccgttagcactccttcttctccttcttcttcttcttcttcttccttcccttctctcattcaagacaggcctgtctttgctgccctgcccccatcatcaccccaactgtgagagatgatatggcaaaggaatacgagcaagctattgaagaactccagacattgttgaggga

SEQ ID NO: 126216 - DNA, 260 bp, Glycine max
caacactttccactatgctggtgtcattgcaaagaatgttactcttggtgttcctaggttaagggaaatcattaatgtggcaaagagaattaaaacgccttctctgtctgtgtacttgagatcagatgttggtaagactaaagagagagccaagagtgtgcagtgtgcttagaatataccactctcaggagtgtgactcaagctacagaggtgtggtatgatccagatccgatgagtacaataattgaagaggacgctga

SEQ ID NO: 126217 - DNA, 258 bp, Glycine max
atttgacacaggaggcacgttgctatgagttgctctttctcaattttgcaattgcaagtgaagaagccctaattttttgcagatctggaaatggcgacggcaacataccctccaccgccaccttattacaggctttacaaagattacttgcaagaccctaattctgctcccgaccctccaccacctattgaaggcacttatctttgttttggagccaattacactactagtgatgttctacctaccttggaagaacaa

SEQ ID NO: 126218 - DNA, 258 bp, Glycine max
cttctcaagtctctcgaagcctctttctctctcttctagaagctatctgtgtttggtgttactaagtctccaacaagcaaagtacatggttgatttggaaatccaggtccccaccccattcgacccgtttgccgaggcgagagaatcggatgcccccggagcaaagggtatgtgcatattcgaattcagcagaggaatgggaagaagagtctgaccacagtgcaagggctgaagaaggagttcagctacgagaagatc

SEQ ID NO: 126219 - DNA, 256 bp, Glycine max
gtgaatcagcaccacattcacctgagctttttgtgaggattccaaagcatggcttcccttgcagcatccactgctgctgcttcccttggcatgtcagaaatgcttggaaaccccatcaacctcagtggtgccacaaggccagctccatctgcctctagccctgcctccttcaagactgtggctcttttctccaaaaagaaggctgcacctccaaaaaaagctgcagctgctgctcctgccaatgatgagcttgcca

SEQ ID NO: 126220 - DNA, 255 bp, Glycine max
gccttagccttccctacaactccaaacacaaagacatcatcatccatggctgcctccgtctccactgtcggagctgtcaacagagctcttttgaacctgaatggttctggagctggagcttcagctcccagttcagccttctttgggaccagcttgaagaaggttattgcctcaagggtccccaacagcaaggtttccggtggaagcttcaagattgttgctgtagaagagaagaaagagattgaagagacccag

SEQ ID NO: 126221 - DNA, 255 bp, Glycine max
ggctgtagctcagagttcgctctcctcgccgtttctctcatcgctagtttcaagtctccttgtgacaatggtgagggttagtgtgttgaatgatgctctgaagagcatgtacaacgccgagaaacgggggaagcgccaagtcatgattaggccgtcctcgaaggtcataataaaattcctcttggtgatgcagaagcatgggtacattggtgagttcgagtatgttgatgaccacagggctgggaaaatcgtggt

SEQ ID NO: 126222 - DNA, 225 bp, Glycine max
  unsure (1)..(225): unsure at all n locations
agcttgaacacaccgcgtttcggagagagacgtcgcaatggggaggaggcctgcaaggtgttatcggcagataaaaaacaagccataccccaaatcacgcttttgccgtggtgttcctgatcctaagatcagaatttatgatgttggtatgaagaagaaaggtgttgatgagtttcccttctgtgttcatctggttagctgggaaaaaganaatgtttcaagtga

SEQ ID NO: 126223 - DNA, 280 bp, Glycine max
gttttctgaaatcttgaccaagattgacaggcgatctggtaaggagcttgagaaggagcccaaatttttgaagaatggtgatgctggtatggttaagatggttccaaccaagcccatggtggttgaaactttctctgagtatcctccccttggtcgttttgctgtgagggacatgcgtcagaccgtagctgttggagtcatcaagagtgttgagaagaaagaccccaccggagccaaggtcacaaaggctgccgccaagaagaagtgattgcattttggc

SEQ ID NO: 126224 - DNA, 283 bp, Glycine max
gtgatttcagtgagtgatcggtgttcacttgatctcatcataatcgtcagcgtcaattgaagaagatgccgatcagaaacatcgccgtcggttggcctgaagaggcgactcaccccgacacgttgaaggcggctttggctgagttcatctcaaccttcatcttcgtgttcgccggctcaggctccggcatcgcctacaacaagctcaccgacaacggcgctgccacccctgccggcatcatctccgcctccatcgcccatgcattcgccgtcttcgtcgccgt

SEQ ID NO: 126225 - DNA, 170 bp, Glycine max
gttgatgttggatggtgcaccaaggctcaacttggcttcgtttgtgaccacttggatggagcctgagtgtgacaagctcataatggcttcacttaacaaaaactatgttgatatggatgagtatcctgtcaccactgagctccagaaccgttgtgttaatataatagcaa

SEQ ID NO: 126226 - DNA, 166 bp, Glycine max
ctcgagcggcttactgagaaatcagatgtgtattcatttggggtggtgttaatggaagtgttatgcacaagaccagccttgaaccctgtccttccaagggagcaggttaacatagctgagtgggcaatgacctggcagaaaaagggtatgcttgatcaaatcatgg

SEQ ID NO: 126227 - DNA, 212 bp, Glycine max
gttgctccctgggctctagagtttgataattggttgaaagatgctcttcttgaaggaagatatgaagatgtaaatcattatgagcagaaagcaccacatgcaaaaaaggctcatccctggccggatcacttttatccgctgcacgttgctattggtgctgctggtgaagatgcaaaggccaaacttatccacagcagtattgaattggggag

SEQ ID NO: 126228 - DNA, 260 bp, Glycine max
caaaacactcataacacaaagcacaaagcaaagctcatccttgagttaaaaaatggcagcagcttcttccatggctctctcatccccatccttggctggcaaggccgtgaagctgggcccatcagccccagaagtgggaagggtgagcatgaggaagaccgtcaccaagcaggtctcctcaggaagcctatggtacggcccagaccgagtcaagtacttgggcccattctctggcgagccccgtcctacctaacggtgag

SEQ ID NO: 126229 - DNA, 260 bp, Glycine max
tgcgcagcttgaaacagagcagagcgaccttgaagagctatggctgtcggaaagaataagaggatttccaagggaaagaagggtggcaagaagaaagccgctgatccctttgccaagaaagactggtacgatatcaaggccccttccctcttccaggtcaagaatattggcaaaaccctcgtctctcgtacccagggaaccaagattgcatccgaagaatcaaacatcgggtttttgaggtctcatggctgatctccagg

SEQ ID NO: 126230 - DNA, 276 bp, Glycine max
tgcaattggatttgaagtcttgcccttctctcttcaactccaaacacaagacatcatcatccatggctgcctccgtctccactgtcggagctgtcaacagagctcttttgaacctgaatgggtctggacctggggtttcagctcccagttcatccttctttgggagcagcttgaagaacgttattggctcaagggtccccaacacggagatttcctctggaagcttcaagattgttgctgtagatgagaagaaagagattgaagagacccagcaga

SEQ ID NO: 126231 - DNA, 278 bp, Glycine max
gtggtcccacagtcggaggacttctgaatgctacatgtgggaatgttactgagctcataatagcaatatttgcccttagcagtaacaaaattgctgtggtcaagtattctctgttgggttctattctttcaaaccttcttctggttcttgggacctctctattatgtggtggcattgcaaaccttaaagtggaacaaaaatatgacagaagacaagcagatgtgaactcacttatgctgttgttgggattgttgtgctacttgcttccaatgctgttc

SEQ ID NO: 126232 - DNA, 131 bp, Glycine max
ctagaatgtcttactccaggtttctggagtatttggacaaggacagagttaaaaaagtggatctttatgacaatggaaacactgctgttgttgaggctgtttcgcccgagttggggaaccggtcacagtat

SEQ ID NO: 126233 - DNA, 239 bp, Glycine max
ctgagtcttgcaattgaagttgaagtcttgcccttctctcttcagatccaaacacaagacatcatcatccatggctgcctccgtctccactgatcggagctgtcaacagagctcttttgaacctgaatgggtctggacctggggtttcagctcccagttcatccttctttgggagaagcttgaagtacgttattggcctcagggtccccaacacaaagatttccgctggaagcttcaag

SEQ ID NO: 126234 - DNA, 169 bp, Glycine max
gtcaaccgtgccggtgccggcatggttgctccattcaccggcctcaaatccatggctggcttccccacgaggaagaccaacaatgagcttacctccattgctagcaacggtggaagagtacaatgcatgcaggtgtggccaccaattggcaagaagaagttcgagactc

SEQ ID NO: 126235 - DNA, 271 bp, Glycine max
tagcaagttacatagaaagtagaatccattagcaacaatagagtctcaatggcgaccaagatattttccctccttatgctccttgctctttctacatgtgttgctaacgcgacaattttccctcaatgctcacaagctcttatagcttcccttcttcccccataccttccatcaattatagcttcagtatgtgaaaacccagctcttcaaccatataggcttcaacaagcaatcgcagcaagcaacatacctttatcgcccttgttgtttc

SEQ ID NO: 126236 - DNA, 264 bp, Glycine max
tggcttcagagaagagactttcgaacccaatgagggagataaaagtgcagaagctcgtcctcaatatctctgttggcgacagtggagatcgtctcaccagagccgccaaggtgttggaacaacttagtggccaaaccccagtgttttccaaagcaatgtacactgttcgttcctttgggattagaagacatgagaagattgcatgctatgtcactgtcagacgtgacaaggcaatgcaacttttggagagtggtatcaaggtga

SEQ ID NO: 126237 - DNA, 265 bp, Glycine max
ttttcatccaaaattctatcaaactcaagctagagtgtgagaagaaggaaaaaatggaaggtgaagaaactgagatgaaacaacaatccaggttcaagaggatttgtgtgttctgtggaagcagccccggaaacaagagtggctatagggatgctgctattgatcttgggaaagagttggtgtcaagaaatattcatctggtttatggaggaggcaccatcggtttgatggggttggtttcccaggctgtttatgaaggaggtcg

SEQ ID NO: 126238 - DNA, 228 bp, Glycine max
cgaagtactactacaagggaagaaaaacttagctactaaggaaggatcaaagagaatggctcaagcaatggcatcaatggctggcttgcgtggttcctctcaggctgtgttggaaggtagccttcaggtgagtggctccacacgcttgaatgtggggagtggaagcagggtggcctcagtcacacgtgcagggttcacagttagagcacaacaacaacaagtgagtgg

SEQ ID NO: 126239 - DNA, 168 bp, Glycine max
ataagccttagccttccctacaactccaaacataaagacatcatcatccatggctgcctccgtctccactgtcggagctgtcaacagagctcttttgaacctgaatggttctggagctggagcttcagctcccagttcagccttctttgggaccagcttgaagaaggt

SEQ ID NO: 126240 - DNA, 266 bp, Glycine max
ctaagagaatggctcccaagggtttaatctttttggctgtgttatgcttctcagcactgtcactgagtcgttgtcttgcggaggataatggacttgttatgaacttctacaaggaatcatgccgtcaggcttgagacatcatcaaagaacaagtcaagcttctctacaagcgccacaagaacactgctttctcctggctcagaaacatctgtccatgactgtgctgttcagagttgtgatgcttcactgttgctggactccacaag

SEQ ID NO: 126241 - DNA, 250 bp, Glycine max
tggccatcaagaggaacagtttgattggaggagatgactttaagagtggtcagaccaaaatgaaatctgtgttggtggatttccttgtgggggccggcatcaagccaacatctatagtgagttacaaccatctgggcaacaatgatggcatgaatctctcagcccctcaaaccttccgctctaaggagatctccaagagcaatgttgttgacgatatggtcaacggcacgccaactctaagagcccgtga

SEQ ID NO: 126242 - DNA, 233 bp, Glycine max
gtgagttacaaccatctgggcaacaatgatggcatgaatctctcagcccctcaaaccttccgctctaaggaaatctccaagagcaatgttgttgacgatatggtcaacagcaacgccatcctctatgagcccggtgaacatccagaccatgtggttgtcattaagtacgtgccttatgtaggggacagcaagagggccatggatgagtacacttctgagatattcatgggtgg

SEQ ID NO: 126243 - DNA, 248 bp, Glycine max
gtagaagtcaggtgtcaaattggtttataaatgctcgagtgcgtctatggaaacctatgattgaagagatgtacaagcaagataattgtattgctggcatggactcaaattcttcatctgaaaatgtgtccaaggtaacaaaaagttatgtcaagacctccaatgatgtgggtgatgattcgcagcactgtcaaagtccaattgtggccgatacaaatcacagtggtggacaagctaaggacctcaga

SEQ ID NO: 126244 - DNA, 263 bp, Glycine max
tcttactctagactcttccttttctcttctctgtctaaggggtgccctgagatcacattgaacaatggtgaaggctgtggccgttcttggcagcagtgagggtgtcactggaactattcacttcgttcaggagggaagtggtccaaccaccgtaactggatctcttgctggtcttaagcctggtctccatggtttccatgtccatgccttgggggacactaccaatggttgcctctcaactggatcacatttcaatcctaata

SEQ ID NO: 126245 - DNA, 282 bp, Glycine max
catagacatggccaccgtcacttctgcagcagtttctattccctcattcactggcctcaatgcaagcgcaggcaaagtgagtgccgtcgcagttaaagtctcagctccccaagccacaaggttctgcggcatcaaggcttccctcaaagacgttggagtcgctgttgtggccactgctgcgagcgcagttctagctagcaacgccatggccattgaagtgttactgggcactgatgacgggtctctggtttactctcccaactctttctccgtggcccctgg

SEQ ID NO: 126246 - DNA, 282 bp, Glycine max; identical to SEQ ID NO: 107945

SEQ ID NO: 126247 - DNA, 280 bp, Glycine max
cttgttacttctcttcgccttttgctttgcaattgtcaccaaacaattcttgcttagctctcacaagcaagcattatcaacaatgaagaaaattgtgttaaaggtggacttacatgatgacaggatcaagcgaaaagctatgaagacagcatctggcctttcgggggtacaatcagtttctgttgacattaatgataagaaaatgaccttattgggggatgttgatccagtgagtgcagtgtcaagctacgaaagtggtgtcacactgaaatagtctcag

SEQ ID NO: 126248 - DNA, 279 bp, Glycine max
ggaaaaggcgtcttcataaacgccgcccaaaacttctcatacccttttattcattccattcgtttctagggttttcttttctttgccgagaaaatgagagagtgcatttcgatccacattggccaggccggtatccaggttggaaacgcctgctgggaactctattgccttgaacacggcattcagcccgatggacagatgccgagtgacaagaccgttggcggaggagacgacgccttcaacacatttttcagcgagaccggcgccggaaagcacgtg

SEQ ID NO: 126249 - DNA, 281 bp, Glycine max
caagcaacatagaaagtggaatccagtagcaacaacagagcaacaatggcgaccaagatattttccctccttatgctccttgctctttctgcatgtgttgctaacgcgacaattttccctcaatgctcacaagctcctatagcttcccttcttcccccataccttccatcaatgatagcttcagtatgtgaaaacccagctcttcagccctataggctccaacaagcaatcgcagcaagcaacatacctttatcacccttgttgtttcaacaatcgccagc

SEQ ID NO: 126250 - DNA, 280 bp, Glycine max
ccggaaccatggtgagcacctccttcatgaggaagcaacctatgacgaccaagagcctaaagacattccccaacgctctttttggtctgagaggtggacgaggtggtcgtgtaacttgcatggcctcgtacaaggtgaagctcataaccccagaaggagaagtggagtttgaatgcccagatgatgttttcattgttgacaaggctgaggaagaaggcattgaacttccctactcgtgcagggctggttcttcgtttcatgtgttcgggaaaattgtgaa

SEQ ID NO: 126251 - DNA, 276 bp, Glycine max
  unsure (1)..(276): unsure at all n locations
gaagagcatcactgaactaacaaagcaaccctatgtcgaaggtggtttgtgtcaccggagccagcggcgccntcggatcatgggtggtcctcctcctcctccagcgtggttacaccgtccatgccaccgtcctcgatatcaaggatgaaaatgagacgaaacatttggaggaaatggaaggagcaaagagtcatctccatttttttgaaatggatcttcttgacatcgactccattgccgctgccataaagggttgttccggcgtaatccaccttg

SEQ ID NO: 126252 - DNA, 278 bp, Glycine max
gagaagacgaagaggaggttcgacaactacgcgaagaggggttgctgtgcggcggcgatgggttgccgcacctgatcgtgagcggagaccagaggcactggggtgagttcatcacacccggaatactattccagtacatctcgggatggatcggctgggtgggtcgaagctacctgattgcgatcagggacgagaagaaacccaccatgaaggagatcatcatcgatgttcctctggcttctcgcttgctcttcaggggtttcagctggcccgttgct

SEQ ID NO: 126253 - DNA, 246 bp, Glycine max
actcgagcgattcggctcgagctttgatttcgcttccgaagacacaagcagcacccactctctcttctcggaccttacaaacatggaacgcatcgttggcggcaagtacaagctcgggcgcaagatcggaagtggatccttcggcgaaatctacctcgcgacgcatattgataccttcgagatcgtcgccgtcaagatcgagaatagtaaaacaaacatcccaaccgtttttacgaggcaaagctc

SEQ ID NO: 126254 - DNA, 153 bp, Glycine max
gactagttctagatcgcgagctgccgccctttttttttttttgtacttaaactacatccccattggtttccactttttgagattccatcacccggtattttgggttcctgtttccggactccaatggaaattaatggatgagacctaatgaat

SEQ ID NO: 126255 - DNA, 274 bp, Glycine max
atttggcctcacaatattatattttgaggcctttgcgggcttctctggacaatcggtttatgatgactggtacatgatattgttcaatgtatttcttacatcattgcctgtcatttctcttggagtttttgaacaagatgttccatcagaagtttgcttacagtttcctgcattgtatcagcaaggacccaaaaatttgttctttgactggtatagaatctgtgcaggatggggaatggtctttattcctcccttgtcatcttcttccttgtga

SEQ ID NO: 126256 - DNA, 158 bp, Glycine max
aaggggaccaattttaatgtgattattgatatgttgaaggaggttgttccgcaactgtcatgtccaattgcactgtttacatattacaatccaatactgaagcgtggtactgagaaatttatgtccaccataagagcactggcgtacatgggcttgta

SEQ ID NO: 126257 - DNA, 275 bp, Glycine max
caagcaacatagaaagtagaatccattatcaacaatagagcaacaatggcgaccaagatattttccctccttatgctccttgctctttctacatgtgttgctaacgcgacaattttccctcaatgctcacaagctcctatagcttcccttcttcccccataccttccatcaattatagcttcagtatgtgaaaacgcagctcttcaaccatataggcttcaacaagcaatcgcagcaagcaacatacctttatcgcccttgttgtttcaacaatc

SEQ ID NO: 126258 - DNA, 273 bp, Glycine max
cttgtttgcttcccaagtctctcgaagcatctttctttctcttcctgcagaagctatccgtgttacttgttcccaagtctccaacaagcaaagtacatggttgatttggaaatccaggtccccagcgcattcgacccgtttgccgaggcgagagaatcagatgcccccggggcaaaggagtatgtgcacatacgaattcagcagaggaatggaaagaagagtctgacaacagtgcaagggctgaagaaggagttcagctacgagaagatcctc

SEQ ID NO: 126259 - DNA, 277 bp, Glycine max
aggcagaaagcaagctcatcctagagttttaaaaatggcagcagcctcctccatggctctctcttccccatccttggctggcaaggccgtgaagctgggcccatcagcccccgaagtcgggagggtcagcatgaggaagaccgtcaccaagcaggcctcctccggaagcccatggtacggcccagaccgcgtcaagtacttgggcccattctctggcgagcccccgtcctacctcactggcgagttcccaggtgactacggctgggacactgctggg

SEQ ID NO: 126260 - DNA, 236 bp, Glycine max
cgatccactacctaacttcaactcactttctctctctctctccccgatctataaattcttctctcactctaaaatctctctctccctcgctccccgatctataaatcgctctctgtctctgaaatctctctctctctctctcggctctctcttctctctctcactcgtgtattgggtataggagagtccgtttattcaagcctagagggtcgttcaggtcctcgctgctggcatct

SEQ ID NO: 126261 - DNA, 275 bp, Glycine max
cttctttcatcgcttcggatcttcaatctcatctccgatctcaaaatgcccgccgtttatggagctcgcttgaccaccttcgaagactccgagaaggagagtgaatacggttacgttcgcaaggtttcaggacccgtcgtcgttgcggatggcatggctggtgctgctatgtatgaactcgtgcttgttggtcatgataatctcattggtgaaattattcgtctcgaaggggattctgctactatccgttatgaggaaactgctgctggtttgat

SEQ ID NO: 126262 - DNA, 275 bp, Glycine max
aggcagaaagcaagctcatcctagagttttaaaaatggcagcagcctcctccatggctctctcttccccatccttggctggcaaggccgtgaagctgggcccatcagcccccgaagtcgggagggtcagcatgaggaagaccgtcaccaagcaggcctcctccggaagcccatggtacggcccagaccgcgtcaagtacttgggcccattctctggcgaccccgtctacctcactggcgagtttcccaggtgactacggcttgggacactgctgg

SEQ ID NO: 126263 - DNA, 275 bp, Glycine max
attgacttgcacgatcgatatgccaatcgcaatattgtgttctttgatatcaacatgaaaggtcaggatggtgttcagggcccagtctatgtgggaactggttgttgtttcaataggcaggctttgtatggttatgatcctgttttgactgaggaagatttggaacctaacattattgtaaagagttgttggggttctagaaagaagggaaagggtggcaataagaagtacagtgacaagaagaaagcgatgggcagaatgatccactgtaccca

SEQ ID NO: 126264 - DNA, 277 bp, Glycine max
aacaacaacaacaacaacgtgtcctccgacctgaaggcgttctccgccgcgctggtcctctcctccatcctcctctccgcccctctccccgccggcgccgacatctcggggctcaccccatgcaaggagtcgaagcagttcgcgaagcgtgagaagcagtcgataaagaagctggagtcgtcgctgaagctctacgaggcgggcagcgcccccgcactggccattaaggcgagcgtggagaagacgaagaggaggttcgacaactacgcgaacaggg

SEQ ID NO: 126265 - DNA, 158 bp, Glycine max
ctagcaacatagaaagcacaatattgtaccaataatggcagcctaaatattttgcctcattatgctccttggtgcttctgcaagtgctgctacggcgagcattttcccgcaatgctcacaagctcctatagcttcccttctcccccatacctctcacc

SEQ ID NO: 126266 - DNA, 269 bp, Glycine max
cttcaagtgtccgccgtggttctcctccgaggcgcggaggctcatcaccaagctcctcgaccccaacccgaacacgcgaatcacaatttcaaaaatcatggactcgtcgtggttcaagaaacccgtgcggagaacttaatggggaaggaaaagagaggaattggatctggaggagaagattaaacagcatgagcagaagtttctacttacgatgaatgcttttcacatcattcggctctcggaggggtcggatttgtcgccgttgttcg

SEQ ID NO: 126267 - DNA, 267 bp, Glycine max
aaaacactcataacacaaagcacaaagcaaagctcatccttgagttaaaaaatggcagcagcttcttccatggctctctcatccccatccttggctggcaaggccgtgaagctgggcccatcagccccagaagtgggaagggtgagcatgaggagaccggcaccaagcaggtctcctcaggaagcccatggtacggcccagaccgagtcaagtacttgggcccattctctggcgagccccgtcctacctaacggtgagttcccagcg

SEQ ID NO: 126268 - DNA, 251 bp, Glycine max
tgatatatccagcatcatcatcacgtaaggggagaggtgtaggtgatgccttatcaacatgctatgctgctggtgagattatcaagattgcagccatcatgaatggccttatgcttgttggggtggcaatagggttggtcctgcttcgcgtcgatgcgtttgtggaagattctgagtgagagttgcatcaactggtaatcagtttttcatatatgtattgttataaagaagaaaaaaagcgaaaaagttgt

SEQ ID NO: 126269 - DNA, 259 bp, Glycine max
catttttcacaccaccaagccaacagaagatgtttctccacattgttttcctcctttcccttctctcatccacttcccatgccactgtccaagacttctgtgtggcagaccttaagggtgcagacaccccttcaggctacccctgcaagccacctgcaaatgtaacttcagatgactttgtgtacacaggcttagctgaagctgcaaatgtcacaaacataatcaatgctgctgtgaccccagcttttgttgctcaatc

SEQ ID NO: 126270 - DNA, 263 bp, Glycine max
tggttctttggctgagtacactgctgcagaagagaggctattggctcacaagccacagaatctgagctttgctgaggctgctagccttcctttaacacttgagactgcttatgaaggccttgaacgaaccgggttttctgctgggaaatctatccttgtgcttggaggtgctggtggagttggaacccattatattcagcttgccaagcatgtttatggagcatccaaggtagcagctactgctacactaggaaactggaact

SEQ ID NO: 126271 - DNA, 270 bp, Glycine max
ctttcccccaattttctttctcaacaatggccgcagcaacacaactccacttaccccctggattccgattccaccccaccgatgaagaactcgtcgttcactatctctgccgcaaatgcgcttcgcaagaaatcgcagttccaataatcgccgaaatcgatctctacaagtacgacccatgggaccttccaggaatggctttgtacggagagaaagagtggtattttttcacgccgagggaccgcaagtacccgaacggttcgcggccga

SEQ ID NO: 126272 - DNA, 157 bp, Glycine max
cctgagtataataggttgttcaatgagggcatggtgtgcactgctagggttgtgtccaaggctgtgatcactggctacaaagatgggttcaaccagattaagtccttggttgatgttggaggtggcattagagggtctcttacggagattgttaggg

SEQ ID NO: 126273 - DNA, 272 bp, Glycine max
ctgaagtacatagatcctacttacatgatccgtgctatcccaagtaatgcatctgataatgtatactgcaccctccttgcccaaagtgctgttcatggtgcaatggcaggatacacaggcttcacggtgggcccagttaatggcagaaattgttacattccattccatctgataaacgagggagagaagagggttgtgataactgatcggatgtgggcaaggttgctatcttcaacccatcagccttgcttcttgaacccaaaagaaatcac

SEQ ID NO: 126274 - DNA, 269 bp, Glycine max
  unsure (1)..(269): unsure at all n locations
ctcgggcaacgttcagcgctagctatcatacagtcncgatggaccgcacgaagcagacggcgaggaagtccagtggcggcaacgcgccaaggaagcagctggccaccaaggcggcgcgcaagtctgccccggcgaccggcggagtgaagaagccccaccgtttccgccccggaacgtcgcgctccgggagatccgcaagtaccagaagagcacggagctgctgatccgcaagctgccgttccagcgcctggtgcgtgagatcgcccagg

SEQ ID NO: 126275 - DNA, 265 bp, Glycine max
caaacgtcattgcagtctccgtggaatacgggttgttcccgacccgacccatacccgcttgctacgaggattcctggaccgcgctcaagtgggtcgcggcgcacgcaactggaaacggatccgagcaatggctcaacaaccacgccgatccagaccgtgttttcatctccggcgacagcgccggcggcaacataacccacacactgctaactcgggtcgggaagttcgggttaccgggcgccagggttgtcgggcgttctgtgca

SEQ ID NO: 126276 - DNA, 268 bp, Glycine max
caaagttagaagtaaagaagatcatggcttctctagcaaccttggctgctgttcaaccagctacgatcaatggccttgctggaagttccctctctggaactaagctctctttcaagccctctcgccacagtgtcaaatccaagaacttcaggagtggtgccgtggtagcaaagtatggtgacaagagtgtgtactttgatttggaggatctgggcacactaaggcagcagtgggacttgtatggctcagatgcaccttcaccctacaa

SEQ ID NO: 126277 - DNA, 272 bp, Glycine max
ctgattcaacgatggacgccaatggcaattgggaagaggacgatgacgaggagttcgagttctcacggaactattttctggccaaggaactcgcctcctcctccgccaagaaatcgaaacacaagctcaccgacatcgatgtcgttgatgaacaggaattgagggatgccgcgtcgaaaattgaacccaatcatgaatacgagatcactctcttgttggattcgtacaaaaccagcactcctgaatggatttttgcgctaaggtgcggtttt

SEQ ID NO: 126278 - DNA, 157 bp, Glycine max
ttgagaccaactagcaacatagaaagcacaatagtgtaccaacaatggcagccaaaatattttgcttccttatgctccttggtctttctgcaagtgttgctaccgcaaccattttcccacaatgctcacaagctcctatagcttcccttcttccccc

SEQ ID NO: 126279 - DNA, 271 bp, Glycine max
aaattagttcattctctttgcgcagttccctacctctcctttcaagatgcagatcttcgtcaagaccctcaccggaaagaccatcacccttgaggtggaaagctctgacaccatcgacaacgtcaaggccaagatccaggacaaggaaggaattccccggatcagcaacgtctcatcttcgccggaaagcagctcgaggacggtcgtaccctcgccgactacaacatccagaaggagtcaacccttcaccttgtccttcgtctccgtggtg

SEQ ID NO: 126280 - DNA, 123 bp, Glycine max
gccagctgtgactgcctgtatcacccttgtacctccatcaatcatcagtgctattacagcagttacctttggcgcattgattggcacaatccatcagggcacaacaattacatgaacttgtgc

SEQ ID NO: 126281 - DNA, 152 bp, Glycine max
gacactctaagcgaagcactctagtcacgacgtatcaacatatggctaccacagatatctaggctctatgcgcttcttgccctgttctgtgagcgcatcaaatgcgttcattataccagagtgctcacttgcgcctagtgccaggattccac

SEQ ID NO: 126282 - DNA, 270 bp, Glycine max
gacgagcgctacaagaacagggagctgctcatcatgcgatccatggatcactgcaatgctgtcaccctgaagcattgcctcttctccaccacaagcagagatgaactttctctcaacttagtgatggagtctgttcctgagtcactacatcgtgtgctgaagcactacagcgatatgaaccagaggatgccgcttatgtatgtccaattatcatactaccagatatgtcgaggtttggccagattccacacggtacctggtgcttgccac

SEQ ID NO: 126283 - DNA, 267 bp, Glycine max
ctctctctctctttgcgctttctgcaaaccgaacatttcatctccaaagggatcaacaggtcgaaggagaaatggggctgacattcacgaagcttttcagccggcttttcgcgaagaaggaaatgcgaattctgatggttggtcttgatgctgctggtaagaccactatcctctacaagctcaagctcggagagatcgttactacaattcctaccattgggttcaatgttgagactgtggaatacaagaacattagcttcactgttt

SEQ ID NO: 126284 - DNA, 148 bp, Glycine max
ctgcagtacatacagccgactgacatgatccgcgctatcgcaagtaatgcatctgaggatgtatactgcgcactccttgctcatagtgctgtgcatcgtgcaatggcatgatacacagggttcaccgtgggcccagttaatggtcgaa

SEQ ID NO: 126285 - DNA, 263 bp, Glycine max
ctagcaccacattcacctgaggcttccaaagcaatggcttcccttgcagcatccactgctgctgcttcccttggcatgtcagaaatgcttggaaaccccatcaacttcagtggtgccacaaggccagctccatctgcttctagtcctgcctcccttcaagactgtggctcttttctccaaaaagaaggctacaccaacacctccaaaaaaagctgctgctgctgctcctgccaatgatgagcttgccaagtggtatggtcctg

SEQ ID NO: 126286 - DNA, 266 bp, Glycine max
cagcgtatcactatacctgagattttggatgatgaatggtttaagaaagaatataagcctcccatttttgaggagaatggggaaatcaacctcgatgatgttgaagctgtctttaaagactctgaagagcaccatgtgacagagaaaaaagaagagcagcctacagccatgaatgcatttgagttaatctccatgtccaaaggactgaaccttgaaaacttgtttgatactgagcagggatttaaaagggaaacaagattcacctc

SEQ ID NO: 126287 - DNA, 281 bp, Glycine max
caaatggcgtactgttgtgagcatccccaacggtccctctgctctggcagttaaggaagctgcctggggtctggctcgctatgcagcaattgctcaggacaatggattggtcccaattgtggaaccagagatcttgcttgatggggagcatggtattgacagaacttttgaagtagcaaaaaaggtctgggcagaggttttcttctaccttgctgagaacaatgtcctttttgagggtattcttcttaagcctagcatggttacacctggagctgagtcca

SEQ ID NO: 126288 - DNA, 283 bp, Glycine max
gagaatcacttatggtaatcatcaaccgaagattaaaagcaatcaaagcaggggagcctactaacaatgacttgttaggcatactcttggaatcaaattacaaggaatctgaaaaaaagtagtggtggaggaatgagtttaagggaagtagtggaagaagtgaagctattttacttggcagggcaggaagcaaatgcagaattgctggtctggacattgttgttattaagcaggcatccagattggcaagaaaaggctagggaggaggttttccaagtgttcg

SEQ ID NO: 126289 - DNA, 285 bp, Glycine max
gaagaacaagtagttgagaactaagaaggagaagcaaatggcttcctcaatgatctcttccccagctgttaccactgtcaaccgtgccggtgccggcatggttgctccattcactggcctcaagtccatggctggcttccccaccagaaagaccaacaatgacattacctccattgctagcaacggtggaagagtgcaatgcatgcaggtgtggccaccagttggcaagaagaagtttgagactctttcctacctgccagaccttgatgatgcacaattggcaaa

SEQ ID NO: 126290 - DNA, 286 bp, Glycine max
ctgaaatccagaggaacccctggtgattggagccatatcattaagcaaattgggatgtttactttcactgggctgaatagcgaacaagtcgcattcatgaggcaggaataccacatttatatgacatctgatgggaggatcagcatggccggtttgagcatgaggactgtgccccatcttgcagatgccatacacgctgcagttactcaactgaaatgaggatagtatcgcagctttcgtgaataaaacctgaatcacccacaacaatgttctaagtactcagcca

SEQ ID NO: 126291 - DNA, 286 bp, Glycine max
gtccaatccaaaatcaaaaacaccaccccacttattatactaccttctaataatcctctccttactgttcttcttcccgtgtgtatcctctacccaacaattcaaagaagcccctcaattctacaactccccaaactgcccctcaattgaacacaacatatgctccgaggaagccgtccacgtggcaatgacactcgacacgacatacatccgaggatccatggcggcgatcctttccgtcctccaacactcttcgtgcccccaaaacaccttcttccacttcgtg

SEQ ID NO: 126292 - DNA, 278 bp, Glycine max
gtttcttacaagcctctactatactgcttcaccttctgctctagaaaattcagtgctgaaacatggcttcggctactctctctgtagccaaaccagcccttcaggcaaatgggaaaggcttctctgaattctatggcctccgaagctcatcaggcttccttcccttctctagaaaatcttcagaggatttccattctgtcattgccttccagacctatgcagttggaagcagtggaggatacaagaagggtgtgacagaagcaatactgaaggttgcc

SEQ ID NO: 126293 - DNA, 280 bp, Glycine max
catcatggccacctctgctattcagcaatcagcattcgcaggtcaaactgctctgaagcagctcaatgagttggtccgcaagaccggtggcgccggcaaaggtcgcaccaacatgcgccgtaccgtcaagagtgctcctcagagcatttggtatggccctgatcgtcccaagtacctgggtccattctcagagcagattccgtcatacctgaccggagaattccccggtgactacggatgggacactgctggactatcagctgacccggaaaccttcgcc

SEQ ID NO: 126294 - DNA, 285 bp, Glycine max
cccttcacaccattctcacaaaacaactttcaaactctgagaaagaatggctgccaacacattgatgagtactgctatctcagccttcccatctctcctttcttcctcaaaatccagatttgccaccgcagttcctctttctagctttggtgtcaccaatgcctcttcttctcgcttttctatgagtgctgactggatgccaggccagcctagacctccttaccttgatggttcagcacctggtgactttggattcgaccctcttcgtcttggtgaagtaccaga

SEQ ID NO: 126295 - DNA, 285 bp, Glycine max
cgtgttcatctactctgagccgcataacttcccggaatcgtgcatacctacgttcaatatgtcgctggtggcaaacgaggatttccagcacatacttcgtgttttgaacacgaacgtagatgggaagcagaagataatgttcgctcttacctcaatcaaaggtattaggaggcgattttctaacatttgctgcaagaaggctgatgttgacatgaacaaaagagctggtgaactgagtgctgctgagttggatagtgtgatgactgtggttgccaacccccggca

SEQ ID NO: 126296 - DNA, 281 bp, Glycine max
accggtgcgaatgcctccatttagaactcctcaggctaacagctcaggctcaggctctaaatatccgagaccaagggatgtagggtccaattcaccctttgatttgccattgaaggatgatgacagcctcacaagctgcccaccattttcagtgccaaactacatggctccaaccctttcagcccgggccaaagcacgtgctagtagtaatcctagagaaaggcttggtggaactccaactagtactgattcaaagaggaggctctcattccctttatcac

SEQ ID NO: 126297 - DNA, 279 bp, Glycine max
tatggctcgtcactccttgctcttagccctcctcctcttcgccgccgtggccaccgccgcgatggcgggccgcgtccgacgccgacgacatcctgatccgtcaggtggtgccacatgttggcgaagcgaagaggaggacaactgctgaacgccgaacaccacttcgcgagcttcaaggccaagttcgccaagacctacgctaccaaggaggagcacgatcatcgcttcggcgtcttcaagtccaacctccgcagagccaggctgcacgccaagctcgac

SEQ ID NO: 126298 - DNA, 280 bp, Glycine max
acttgttctataagagaaaccaaaagcaaccatgacaatgcgttccctttgcttcttagtgtttctagctgcagcaatgcaaggaacacttgcagttgattacactgtcaccaacaacgccctctcaacctctggtggcgtgcgtttccgtgatgcaataggggacgattatgcaaaacaaacgctcgactcagccacccaattcatatggggggtgctccagcaaaacgctcctgctgatagaaaagatgtgcaaaaagtaaacttgttcgtggatgac

SEQ ID NO: 126299 - DNA, 280 bp, Glycine max
ctcgagcgattcggctcgcacattcacctgagcttgctgtgaggattccaaagcatggcttcccttgcagcatccactgctgctgcttcccttggcatgtcagaaatgcttggaaaccccatcaacctcagtgtcgccacaaggccagctccatctgcctctagccctgcctccttcaagactgtggctcttttctccaaaaagaaggctgcacctccaaaaaaagctgcagctgctgctcctgccaatgatgagcttgccaagtggtatggtcctgaca

SEQ ID NO: 126300 - DNA, 279 bp, Glycine max
ccaaattctacttcctttcagctgcacaagagtctccaatcccaactctatctctctctctctctccacttgccaaaggaaaaggctaaagagaagaaaaggcaaagcaagggaccaaccaaaacacacacagagaaacatgtcttccccaagcaagcgccgagagatggacttgatgaaactgatgatgagtgattacaaggtggagatgattaatgatggaatgcaagaattttatgtgcaatttcatggacccaatgacagtccttatcatggtgg

SEQ ID NO: 126301 - DNA, 273 bp, Glycine max
caaagagagagtttgaggaagaaatcatcatggcttcagcagcatctgggtttgtgctgtctcttaatgttgcagcttccaccacaaactcaagggtggtcttgttcaacacaaagaacaacgcttctagactccttgtgagggcttcagatgagcctgcagcggcggcacctgccaccgccacacccccagctgaagctgaagccaaaccaaaaccaccaccaattggtcccaagagaggtgctaaggtgaagattcttaggaaggaatcct

SEQ ID NO: 126302 - DNA, 273 bp, Glycine max
agttgattgacactcttcaggattggaagactgagagatacaaagaaataatcaagtcaggaactgtaaaacccagacctggagttctgagattgatggatgaggctagagatgcagggaaaaagctagctgtttgctcagcagcaactaaaagttcagttattctctgtctttaaaaccttataggaattgagcgctttcaaggccttgattgcttccttgctggtgatgatgtgaaggaaaagaagcctgacccatcaatatacgtgacag

SEQ ID NO: 126303 - DNA, 277 bp, Glycine max
cgtggctgcaggttgggaatatcatacccagaactgactgagatgcaggcccgtgcaatctttcaggctgctgtttcagtgagtaaccatggcattacagttcatccagagataatggttccacttatcggtacacctcaggaattaaggcatcaagtgaatttaataaggaatgttgctgataaagtgttgtctgagatgggttcttctttaagctataaggttggaactatgattgaagttccaagggctgcactagttgcagatgagattgcaa

SEQ ID NO: 126304 - DNA, 280 bp, Glycine max
agaaaaacaagtagttgagaactaagaagaaggaaatggcttcctcaatgatctcctccccagctgttaccaccgtcaaccgtgccggtgccggcatggttgctccattcaccggcctcaaatccatggctggcttccccacgaggaagaccaacaatgacattacctccattgctagcaacggtggaagagtacaatgcacgcaggtgtggccaacaattggcaagaagaagttcgagactctttcctacttgccagacctcgatgatgcccaattggc

SEQ ID NO: 126305 - DNA, 281 bp, Glycine max
ttatcacaaacacctcgtccctcacaatgcagctagcaatggcggccaacgctgtcgtttcaccgtcgccgttccgacctcagccctttctccggtcatccttctccggcgtctccgtcaagctcactccccaatccataacgctttcacgctccaagcccctcaccgtcttcgccgccaccaagaaggccgtcgccgtcctcaaggggacctccgccgtcgaaggcgtcgccactctcatccaagaagacgatggcccgacgacagtttctgttcgcatc

SEQ ID NO: 126306 - DNA, 283 bp, Glycine max
aaacgaacaccacctaaccagctcgtgattcttcccgccgtagatctgttccttttcgccgttcctccatggccgacgacttcgaattctccgacaaagtccctccttccttcgatcgcgtgggttcaaaagggttcaacccagcattaattgttctccttcttgttggtgggttgctgttgatattcctcgttggaaattatgtactatacacatatgcacagaagaccctccctcctagaaaaaaaaagccaatctcaaagaagaagatgaaaaaggagag

SEQ ID NO: 126307 - DNA, 276 bp, Glycine max
gagagagatccatccatcaattccaatggccgatcagctcaccgacgaacagatctccgagttcaaggaagccttcagcctcttcgacaaggacggggatggttgtattaccaccaaggaacttgggaccgtgatgcggtcacttggccagaacccaactgaggcagagctgcaggacatgataaatgaggttgatgctgatgggaatggtaccattgatttcccagaattcctgaatctcatggctcgcaagatgaaagacactgattcagagga

SEQ ID NO: 126308 - DNA, 279 bp, Glycine max
ctccgagcacaagttcgtgctgaaggacaagaagaagccgatcatcttctcgatggcgcgtctcgaccgcgtgaagaacatgacaggcctggtggagatgtacggcaagaacgcgcgcctgagggagctggcgaacctcgtgatcgtcgccggtgaccacggcaaggagtccaaggacagggaggagcaggcggagttcaagaagatgtacagcctcatcgacgagtacaagttgaagggccatatccggtggatctcggcgcagcatgaaccgcgtcc

SEQ ID NO: 126309 - DNA, 278 bp, Glycine max
ctcttcttcggctcaaacctcttcgttccttcgattcatgccatttcttccaaaatggccaaagacccagttcgcgttctcgtcactggagccgcagggcaaattggatatgctcttgtccctatgattgctaggggagtgatgctgggtcctgaccagcccgtgatcctcctcatgcttgacattcctccagcagcagagtcgttgaatggcgttagaatggaattggtggatgctgcattcactcttcttaaaggtgttgttgctacaaccgatgt

SEQ ID NO: 126310 - DNA, 277 bp, Glycine max
aaccaacaaaaattcttacaagacactcattgcggcggagtatgccggcgtccaagttgactttgccccaaattttgagatgggtgtctccaataaaactcctgaatttctcaagatcaatcctattggcaaggttcctgtgttggaaacacctgatggtccagtattcgagagcaatgccattgctagctatgttacccagctgaaaggtgataacactttgtatggatcttctttgattgaacatgcccacattgaacaatggattgatttttca

SEQ ID NO: 126311 - DNA, 280 bp, Glycine max
cttggtatggctgtgtggcacaccaggagcaggaccaagccctatgtacgagcaaagggaagaaagttcgagagggctagaggaaggaggaacagcagaggatttagagtttaagaaatataatataactttgttctattttttttttacaattgttcacttctgaaattaaactgtttgctctaggcgtcggtgacagtttttatgatatttctgttctgataacatatcgtggctcccatgttttacattgacgtgtattacaaaaaactagcatttg

SEQ ID NO: 126312 - DNA, 280 bp, Glycine max
ggcagatagaaaaaaagagcgacttttgagttcaaaagatgactaacttcccattgatcaacttggagaagctcagtggtgaggaaagaaacgataccatggaaaaaattaaagatgcttgtgaaaactggggattctttgagctggtgaatcatggcattcctcatgacatattggacactgtggagaggttgaccaaagagcactacaggaaatgcatggaagagaggttcaaggaattagtggcaagcaaaggtctagatgctgtccaaactgaggt

SEQ ID NO: 126313 - DNA, 262 bp, Glycine max
agaaacaccaatccgctccgagttgtatgttttgcagagctagaagaaatcaacgatgcctcgctatgatgataaatatggtaatacccgcctctatgttggacgcttgtcttcgaggactcgttcccgtgacctggagcgtgtcttcagcagatatggaagagttcgaggcgtagatatgaagaatgatttcgcctttgttgaatttagtgatcctcgagatgctgatgatgctagatacaactggatggtcgtgatgttg

SEQ ID NO: 126314 - DNA, 272 bp, Glycine max
attctactagtttttgatgagacaagccttccaaatggtgttttaaggcttcaacctaaaggcggacatggacatcacaatggattgaaaaatgtaatgggccatttggatggttgcagtgcttttcctcgacttgcagtcggaattggaaatcctcctggaactatggatttaagagcttatcttctacaaaaattcagtgtagaggaacgaaagcagattgacgcttcattggagcaagcagttgcagcagtaaggaccgtagtactcaa

SEQ ID NO: 126315 - DNA, 278 bp, Glycine max
ctcctcccatctctctgctctaaacgacaccgttttagtcttctcctcaagtcatggccacactcaagagcctctgcttcagaggaactgcctttcccgtttgcccctccaatgtcaccaacaatagaaactccaggagctcatattggaggcctgcacaagcagccgtgaagcccaatttccatctcccaatgcgcagttttgagttaaaaaataggacttctccagaggacataaaggctctgagattgataactgccattaaaactccataccta

SEQ ID NO: 126316 - DNA, 276 bp, Glycine max
gaagaacaagtagttgagaactaagaaggagaagcaaatggcttcctcaatgatctcttccccagctgttaccactgtcaaccgtgccggtgccggcatggttgctccattcactggcctcaagtccatggctggcttccccaccaggaagaccaacaatgacattacctccattgctagcaatcggtggaagagtgcaatgcatgcaggtgtggccaccagttggcaagaagaagtttgagactctttcctacctgccagaccttgatgatgcac

SEQ ID NO: 126317 - DNA, 275 bp, Glycine max
aatccacacaaactcagggtagggcagagagagagagagagagagagagagagatagatgatgggagggtgggctatcgcggtgcatggtggcgcttgtgtcgaccctaatctcccactcgagcgccaaggagaagcgatacaacttctcacgcgctgtctcagtcttggaatctctgctctaaattctaatgttcgcgacatagatgtcgtcgagcttgtggtgaggcaattggatactgatccgctgtacaattcgggccgtggatctgccct

SEQ ID NO: 126318 - DNA, 273 bp, Glycine max
tatcattttccgagacaatcccatcttccatttccatcttcaatatttcttctcatcgagaagcttcgcgaacgaaaacaaagaaccctagacagatccattccatagccatgtcaggtgttggccctctatctcaggattgggaacccgtcgtcctccgcaagaaggctcccaccgccgccgccaagaacgacgagaaagccgtcaacgccgcccggcgctccggcgcggaaattgaaaccctaaaaaagtataatgctgggacaaataaag

SEQ ID NO: 126319 - DNA, 276 bp, Glycine max
cctttcactctcgtagacatcacaaaccttccctccattcatcccacgcatggctgccatgaactctagcgtattggcctgtagctatgccatatcaggtgcagcgtgttcggagctcaatgggaaggtcacttccgtggcctatgttgcatgctctggctacaagttgccattgatcaaagctgaggccagagttcctaaagccaaagaatctgaaggaggaaggagaggtgcccttgttctcttggcagctacccttttcacctctgcagcttc

SEQ ID NO: 126320 - DNA, 266 bp, Glycine max
gatgatgttggcaaatttcttcctatatacctatccagtgggattctgcagcatgatccattcgaggtacttgaccaaaaaggtgtgggtcaactaatcaagatttgcacagagaagggtcgtgctgctagaccaaacttgaaggttggaatatgtggggagcatggtggggagccttcttcagttgcattctttgctgaaatcggacttgactatgtttcatgttctccttttagggttccaattgctaggcttgcagcagcaca

SEQ ID NO: 126321 - DNA, 270 bp, Glycine max
gcaattgaagttgaagtcttgcccttctctcttcaactccaaacacaagacatcatcatccatggctgcctccgtctccactgtcggagctgtcaacagagctcttttgaacctgaatgggtctggacctggggtttcagctcccagttcatccttctttgggagcagcttgaagaaggttattggctcaagggtccccaacacaaagatttcctctggaagcttcaagattgttgctgtagaagagaagatagagattgaagagaccca

SEQ ID NO: 126322 - DNA, 272 bp, Glycine max
ctaaggtgaaaaaggagagatggcagctgcaacatctagtgctgtgttaaacgggtttggatctcacttcttgtgtggaggaaagaggagccatgcccttcttgctgctagcattggagggaaagttggtgcttctgttagtcctaaaagagttattgtggcagttgctgctgcaccaaagaagtcatggatccccgctgtaaaaggtggtgggagtttcatagacccagaatggcttgatggctcgctaccaggtgactatggttttgacc

SEQ ID NO: 126323 - DNA, 276 bp, Glycine max
ctcaagtatgcagaactcaagccagtcccatgcctaacatattcagatgctcaaagcttgagggaaaaatgtgcaactccaattcttaaacaggtgaagagcgatgttaccagatatcgctatggagatgagcagcatttggatgaggcattgaaacggatatttcagtatggccaaggaggaggaataccaaggagaagtgctcctgttttacaatcgattcgtgaagaagtcacgcaagatggtaaatactgtttggttttagtttctgaggcc

SEQ ID NO: 126324 - DNA, 275 bp, Glycine max
ggtggtgcctctcttccatctccccagccaaaacctctctcaggaaggccacattacgcccttccgtcttcgcaacccttaacactccttcttctccttcctcttcatcttccttcccctctctcattcaagacaggcctgtttttgctgcccctgcccccatcatcaccccaactgtcagagaggatatggcaaaggaatacgagaaagctattgaagaacttcagaaattgttgagggagaagagtgaactcaaagcgacactgctgaaaaag

SEQ ID NO: 126325 - DNA, 272 bp, Glycine max
attaaaagcaatatagtgtgtttaattgttgcttcatttctattgtgtgaatggcatttgggaagttcattatgaatataggggtagtggcaatggttctgggtttatggattcgggttggatttgcacaacaagtaccttgctactttatttttggagactctttcgtggataatgggaacaacaaccagcttaactcactggctaaggctaattatctcccttatgggattgacttcgctggtggcccaactggaaggttttccaatgga

SEQ ID NO: 126326 - DNA, 273 bp, Glycine max
aaagattcgaaacgaagaaagaaagcgttgtgaagaatggcggaagagggacaagtgatcggtgtccacagcgtagaggagtggaaggaacatctcaagaagggagaagagtccaagaaattgattgtggtggattttactgcttcttggtgcggtccatgccgtttcattgccccaattcttgcagagtttgctacaaagttgccgaatgtcaccttcctcaaggtggatgtggatgaattggagactgtatccaaggagtggggaattgag

SEQ ID NO: 126327 - DNA, 171 bp, Glycine max
gtagcacatctgacaggagggatcgatggaaagctcgcgcaagatgtcaacggcgcagtggcgttgatgccaaaggatgtgtgcgacttcaacgctataaactccgtcggcaaacgcagtaatgatgacaccgccagcgatttcttgggcacatgctttgacgcataggtc

SEQ ID NO: 126328 - DNA, 266 bp, Glycine max
ctagtttcttacaaggctctactctactgcttcaccttctgctctagaaaattcagtggtgatacatggcttcggctactctctctgtagccaaaccagcccttcaggcaaatgggaaaggcttctctgaattctctggcctccgcagctcataaggcttccttcccttttctagaaaatcttcagaggatttccattctgtcattgccttccagacctatgcagttggaagcagtggaggatacaagaagggtgtgacagaagca

SEQ ID NO: 126329 - DNA, 270 bp, Glycine max
cagaagcttgttgatagctatcgttctcacatagtactgacaataaccaatccatcagagtctcttcttaatgagctaagaactgttgaggacatgaagcggcaatgtgatgaaaaaagagatgtttatgaatacatgattgcccaacagatagagaaaggaaagtcaaaaagtgctaaaggtgaaagtttcacgctacagcagttgcaagcagctcatgctgaatatgaagacgaagcaaaactttgtgcctttcggttagaatcgctg

SEQ ID NO: 126330 - DNA, 276 bp, Glycine max
caaatctcgaaccctctcgttcgtgccgatcactaggtcacacttcatcaatggcgggtagaggcaaaaccctaggatccagcgccgctaagaaggccacctcaaggagcagcaaagccggcctccaattccccgtcggtcgtatcgccaggttcctcaaggccggaaagtacgccgagcgcgtcggcgccggagcccccgtctacctcgccgccgttctcgaatatctcgctgctgaggttttggaattggctggaaacgctgcgagagataaca

SEQ ID NO: 126331 - DNA, 270 bp, Glycine max
cactttcgtccttgtttacaccgttttctccgccaccgatgccaaacgtaacgccagagactctcacgtccccattttggcacctttgcctattgggttcgcggtgttcttggttcacttggcaaccatccctatcaccggcactggtatcaaccctgctcgtagtcttggtgctgctatcatcttcaacaaggaccttggttgggatgatcactggatcttctgggtgggacctttcattggtgctgcacttgcagcactctaccacca

SEQ ID NO: 126332 - DNA, 265 bp, Glycine max
cacacagtcacacttttgtgaaggcctaggattgctgagtcaaacttgaattgaaggtgacgaaggagatggcagcaacttcttccttgtgttcatcgaccctccaatcccaaatcaatggattctgccttcacaaaacctctctttcccatcctcgttccctcactttctccaggaagaaaatttcaaccacagtgaaggctacatctcgtgttgacaagttttcaaaaagcgatatcattgtttctccatccattctttctgc

SEQ ID NO: 126333 - DNA, 255 bp, Glycine max
tgcaaagtacccgaccatgtcgcctttgaaggagattgtggatggtattcacagtcaagtggcaaagattgaggatgatctcaaggttcgtgtttctgagtataacaatatccgcagtcagcttaatgctatcaaccgaaagcaaactggaagcttagcagtccgtgatctttccaacttggtaaaacctgaggacattgtaacttcagaaaatttaactaccctccttgcaattgtttccaagtattcacagaa

SEQ ID NO: 126334 - DNA, 250 bp, Glycine max
ttgttgtaaagccttgttgctgccatggccacccacgcggctcttgcttctacaaggatcccttcaaacacaaggttcccatccaaggcctctcactctttcccaacccaatgcgccttaaagagacttgaggtgacagaattctctgggcttagatccacttcatgtgtcacatatgctaacagtgctagagaatcttccttttttgatcttgtagcttccaactcactcccaagaccaatggatcact

SEQ ID NO: 126335 - DNA, 252 bp, Glycine max
aaaacactcataacacaaagcacaaagcaaagctcatccttgagttaaaaaatggcagcagcttcttccatggctctctcatccccatccttggctggcaaggccgtgaagctgggcccatcagccccagaagtgggaagggtgagcatgaggaagaccgtcaccaagcaggtctcctcaggaagcccatggtacggcccagaccgagtcaagtacttgggcccattctctggcgagcccccgtcctaccta

SEQ ID NO: 126336 - DNA, 239 bp, Glycine max
cgcgagcgccgcccttttccctttttttttttttttaggttatttttactttttttgcttattttttttttttttttttttttttttttttttttttttttttttttttttttttaaaaaaaaaaaaaaaaaaaaaaaaaaaaaaaagaggggggggggggggggggggggggggcggcgggcggggggggggggcggcgggggggggccgggggggctggccgccccccgggggggga

SEQ ID NO: 126337 - DNA, 253 bp, Glycine max
aggaggtggtgacaaaggagacagaggaagagaagccagcagcagaagagaaatcagaggagaaaactgaagaagtgaaagaagaagcagaagagcctaaagaaactactgaaacagaaacagaatcagcaccagcagcaaccacagaggaagagaacaaaccagctgagacagtggaagccccagtagaggttcctgttgagaaaactgaagcttagacttatggacagtgtgagtgagaaaaacaagttta

SEQ ID NO: 126338 - DNA, 237 bp, Glycine max
  unsure (1)..(237): unsure at all n locations
gatggtgatgcttctcctattctcactggagaacccatcacaaccatgtccttaagttctggcactacccaggggaaaccaaagtatgtaccttggaatgatgaattgtatgacaccacaatgcagatataccagacctcttttgcctttagaaacagggagtttcctataacaaatgggaaggctttaagcgttatatacgngtagcaaacagttgacaacaaaggggggtctggc

SEQ ID NO: 126339 - DNA, 247 bp, Glycine max
tacaactacaaaggttgctgtaggagataagatattgaagtagtgctaagtgcctaacacctgcagtgaacaatggcctctgcatcagcatctcttctcaagtcttcacttgttcttgacaagtctgagtgggtgaagggacaaacacttcgccaaccttctgctgcatcagttgtgagatgcaaccccaccaccccatcaggcctcacaatcagagctggttcctatgctgatgagctcgttaaga

SEQ ID NO: 126340 - DNA, 254 bp, Glycine max
gaaagaaacatttgagcaaaaatggttcaagcacagcctctacaacatgttggtaatggtgcagggaaagaagatcaagcttattttgatccaagtgctccaccacccttcaagattgcaaatatcagagcagcaattccaaaacattgctgggagaagaacacattgagatctctgagttatgttctgagggatgtgttggtagtgactgcattggtagctgcagcaatcggcttcaatagctggttcttctg

SEQ ID NO: 126341 - DNA, 255 bp, Glycine max
gctttcctcggttataaccttcaaggtggaaagaaaaacccacccactatcccaattccaataaataccttcctctctatattttcgcacaataccctctcacccttcaacgatgagttactacaatcagcagcaaccacccgtcggtgttcctcctccccaaggttacccaccgccggattcttacggaaaggacgcgtaccctccgccagggtacccgccgcatagaggataccctccgcaggcgtatccagc

SEQ ID NO: 126342 - DNA, 248 bp, Glycine max
tgcttccttaacctattttgttatcctcaattttcaatggctcaatcccattctggaaaaacctcttccatgacttcaatactcctcctgtttatgcttcttatcagtaatacaggcacaacaggtgcacaatctggtgtatgctatggaagagttggcaacaatctgccatcgccacaagaagtagtttccctttttaaacagtacgggttccaaaagatgagaatctatgatcgaaaccatgaagt

SEQ ID NO: 126343 - DNA, 248 bp, Glycine max
gccttagccttccctacaactccaaacacaaagacatcatcatccatggctgcctccgtctccactgtcggagctgtcaacagagctcttttgaacctgaatggttctggagctggagcttcagctcccagttcagccttctttgggaccagcttgaagaaggttattgcctcaagggtccccaacagcaaggtttccggtggaagcttcaagattgttgctgtagaagagaagaaagcgattgaaga

SEQ ID NO: 126344 - DNA, 248 bp, Glycine max
ccagggtacacagccttggtttagtatatgatgctggtgaaatagactatgtaagatttttatgtggacaagggtatagtacaaggactttacaactcatcacaggagataacagtagctgccctgaaacaaagaatggttcagcaagggatctaaactatgcttcatttgcactctttgtcccaccctccaactccaatagtgtaagtggcagttttaacaggactgttacaaatgttgggtcacca

SEQ ID NO: 126345 - DNA, 249 bp, Glycine max
cttcaccctttcatagatctgcctgaaaaaaacccctcaattccaaacccttgcgatccgatccaggtcaattaatttctctctctctctctctctctctagaatgtcttcccaacgcgcagatctagcgtgccggatcttcccggagcccgatgcctccgaaatcgaccacttcgaccggttaccggactcgctcctccttttggttttcaacaagatcggcgacgtcaaagccctaggccgctgctg

SEQ ID NO: 126346 - DNA, 246 bp, Glycine max
gcaagggtttgggaagaagaacatggaaactcaccacaaggtggatgcgatgatggagaaggtgttgagggagcatgaggaggctagggctaaggaagatgctgactctgataggaagaaggatctttttgatattttgttgaacctcattgaagctgatggtgctgacaataagctcactagagagagtgccaaagcctttgctctggacatgttcatcgccggcacaaacggccccgcaagcgt

SEQ ID NO: 126347 - DNA, 254 bp, Glycine max
gtttcttacaagcctctactatactgcttcaccttctgctctagaaaattcagtgctgaaacatggcttcggctactctctctgtagccaaaccagcccttcaggcaaatgggaaaggcttctctgaattctctggcctccgaagctcatcaggctctcttcccttttctagaaaatcttcagaggatttccattctgtcattgcctaccagacctatgcagttggaagcagtggaggatacaagaagggtgtg

SEQ ID NO: 126348 - DNA, 247 bp, Glycine max
ctcgagcgaatcggctcgagcactttgtctctgttctgtgtagcgcgagaaatggcgatggcaatggcgcttcgcagagctttcatcttcaattgacaagcctctgcgccctctcttcaatgccggttccctctactacaagtcgtctttgcctgatgaagctgtttacgacaaggagcgacccggagttacatggccgaagcagttgaatgctccacttgaggtcgtggatcctgagattgctgat

SEQ ID NO: 126349 - DNA, 243 bp, Glycine max
ctcgagccgaatcggctcaggcttggcacctcttgtaccccaggtttctgagctcatatggtatccaggttgtcaaagctgaagacagtattggtccagaagtagaaaagttggtggcttctcttccagatggaggtgttcttcttctagaaaatgtgaggttttacaaggaggaagaaaagaatgatcccgagcatgcaaaaaagcttgcctctctggcagatctgtttgtgaatgatgcat

SEQ ID NO: 126350 - DNA, 245 bp, Glycine max
caactgcagaaagacaagaaattcagatgaagaaagccaaactaatcggtatgcttgatgaggtggagcaaaggtacaggcagtaccagcagcagatggagatagtggtttcatcgtttgagcaagctgcggggattggttctgcgaggacttacactgcccttgcattgcaaacaatttcgaagcagtttcggtgtttgaaagatgcgattgcagggcaagttcgaactgcgaataagagctta

SEQ ID NO: 126351 - DNA, 244 bp, Glycine max
gtgactggtggaatgatcaaggaacttcttatatcttttaggagagctacaggacaaaagccacaacgcatcatattttatagggatggtgtgagtgagggacagttttatcaggttctactgtttgagcttgatgctattcgaaaggcatgtgcatccctggaacccaattatcagcctcctgtgacttttgtggtggttcaaaagcgtcaccacacaaggctctttgctagcaaccatcatg

SEQ ID NO: 126352 - DNA, 243 bp, Glycine max
ctcgagccgagcacttgcaaactagttttgttttgggaacatcatcacattacattagattggtggtaatggcagcgtcactacaagcagcagctactttcatgcaacccaccaagttgagcaggagcaacactttgcagcaaaagtctactcagtccatttccaaggcttttggtttggaacctgttggagctaaaaaggtcacatgctcccttcaggctgatcttaaggacttggctcaca

SEQ ID NO: 126353 - DNA, 244 bp, Glycine max
tgcaattgaagttgaagtcttgcccttctctcttcaactccaaacacaagacatcatcatccatggctgcctccgtctccactgtcggagctgtcaacagagctcttttgaacctgaatgggtctggacctggggtttcagctcccagttcatccttctttgggagcagcttgaagaaggttattggctcaagggtccccaacacaaagatttcctctggaagcttcaagattgttgctgtaga

SEQ ID NO: 126354 - DNA, 241 bp, Glycine max
cagtttcaacaattgaagaagaaaatggttgacaatgaatcgctctcagaattcctcgcatctgcggtcgacgcggctcagaaagctggcgagattattcgaaaaggcttctaccagaccaaaaacgtcgaacacaaaggacaggttgatttggtcacagaaactgataaagcatgtgaagaactcatatttaataatctcaaacagctttatcccactcacaagttcatcggggaagaaa

SEQ ID NO: 126355 - DNA, 248 bp, Glycine max
cacaagaactctccaaggatcctccttcccacgagattctttggtgggaaaaatccaagaggtttgaaatttgaaggcagggaagatggattatttcaatgcaccaggaagaaaccatctctttgttccagggccggttaacattccggaccagatcatccgggccatgaacagaaacaatgaggactaccgttctccagcaattccagctatgacaaaaactttgcttgaggatgtcaagaagattt

SEQ ID NO: 126356 - DNA, 243 bp, Glycine max
gcagcactgtaacctcacacctctccaaaatccgttccccctttctttcaaacccttttttttttcttccaacaaatcagcgatggcgacgacgtcggtggtgccggcgaatcggcggcgtgcggaggcgaaccccgccgaggatatggacttcgagacgacggagggcctgaaggccatcgcaaacttcgaggagatgcggatcaaggacgatctgatccgcggaatctaccagtacggctt

SEQ ID NO: 126357 - DNA, 223 bp, Glycine max
ataaaagctattgaattaactgaacaggcgggtacaaaaggagttcaagtacaaattgcaggacgtatcgacggcaaagaaattgcacgtgttgaatggatcagagaaggtagagttcctctacagaccattcgagcgactatcgattattgttgctatacgattcgaactatttatggggttttagggatcaaagtttggatattttctagatgaagagcaa

SEQ ID NO: 126358 - DNA, 242 bp, Glycine max
tatattcatagctagtcgtgtacgcaaaactcatatccatggcggggcaatcgcggaagtggatgattctggtggccaccatatggattcaggcattcaccggcaccaatttcgacttctccgagtactcatcttccttgaagtcccacctcaacatctctcagctgcaactcaactacctcgccaccgccagcgacatgggcaaggtcttcggctggtcctccggcctagctctcatgtac

SEQ ID NO: 126359 - DNA, 241 bp, Glycine max
gtcgaagagaggacgcggtggttcggcggggaacaagttccggatgtcgctgggtctgccggtggcggcgacggtgaactgcgccgacaatacgggggcgaagaacctctacatcatatcggtgaaagggatcaaagggcgtttgaaccgtctcccctcggcttgcgttggcgacatggtgatggccaccgtgaagaaggggaaacccgatctgaggaagaaggttttgccagctgtcatt

SEQ ID NO: 126360 - DNA, 238 bp, Glycine max
tgagttcatgagggcaggattatatgatggatggctacctcatctatttgttggaaacttgctcaagggacaaactgttggtgtaattggagctggtcgaattggatccgcttatgcaagaatgatggttgaagggttcaagatgaacctaatttactatgatctctaccagtccacacgactagaaaagtttatcacagcctatgctacattcttgaaagcaagtggtgaaaccccg

SEQ ID NO: 126361 - DNA, 240 bp, Glycine max
ctgaagtcaagtctgtggagatgcaccatgaatctcttacagaggcacatcctggtgacaatgtgggattcaatgttaagaatgttgctgttaaggatttgaagcgtggttatgttgcctcaaactcaaaggatgaccctgcaaaggaggctgctaacttcacagcccaagtcatcatcatgaaccaccctggtcagattggaaatggctatgcccctgtcctcgactgccacacttctc

SEQ ID NO: 126362 - DNA, 241 bp, Glycine max
gttccttctctcgagacgatccggagggatgggaggtcctggtggccctggatttcctcttgcttttagtcaatccaaagccaagtttcaaatggaaccaaacaccggagtgacatttgatgatgttgctggggtggatgaagccaagcaggactttatggaggtggtggagtttttaaagaagcctgagaggtttactgctgttggggctcgcattcctaaaggagttcttcttgttggt

SEQ ID NO: 126363 - DNA, 240 bp, Glycine max
gttgtgtacttgtgttaattgtgttgttgttgtaggaaatttaagtgaagagagaatgatgatgaagtctgctatgtgtgcattggtgcttgtggcactggttgtggttgaagtggggcccatggctgaggctgcggtgacttgcaacccaacacagttgactccttgtcttccggcaattaattcaggttctgcaccttcgagtgcttgttgccagaagctgaaggagcaaaagccatg

SEQ ID NO: 126364 - DNA, 236 bp, Glycine max
actactctctgttctcaagaacaaaacaaaagaagaaagaaatggcaggaggatcatacgaggaagccattgcagcgttgaccaagcttatcagcgagaaagccgacctgagtggcgtcgccgccgcaaagatcaagcagttgacggcggagctagaaaccgccaccgcaaacgggtcgacgccgtttaacccagacgagaggatccgaaccgggttcgcccacttcaagaacgag

SEQ ID NO: 126365 - DNA, 243 bp, Glycine max
atgaaagggatattcgatttgaacttctggctcggctttgcccaaattccactggagctgatataaggagtgtatgcacagaagctggtatgtatgctatccgtgcccggaggaagactgtaacagagaaagacttccttgatgcagtaaataaagtcatcaaaggataccagaagttcagtgcaactcccaagtatatggtctacaactgagttaatcgttcatcttttcccgagaccatag

SEQ ID NO: 126366 - DNA, 239 bp, Glycine max
ctcaaggcagaaagcaagctcatcctagagttttaaaaatggcagcagcctcctccatggctctctcttccccatccttggctggcaaggccgtgaagctgggcccatcagcccccgaagtcgggagggtcagcatgaggaagaccgtcaccaagcaggcctcctccggaagcccatggtacggcccagaccgcgtcaagtacttgggcccattctctggcgagcccccgtcctacctc

SEQ ID NO: 126367 - DNA, 236 bp, Glycine max
atggtttatggccaggccacggcattctccggccccattgtcaccgtgaaggtgtttgaagacaacgtgttggtgagggagcttgttgagacgaaaggcgaaggaagagtattggttgttgatggaggaggaagcttgaggtgtgcattgatgggagggaatttggtacagattgcatataacatggggtgggctgggattgtggtgaatggttgcgttagagatgtggatgatat

SEQ ID NO: 126368 - DNA, 235 bp, Glycine max
ccgcactgatggtattcctgaacaggacattgtcaagcttgttgacaccttccctggccaatcgtgtgatttctttggtgcactgagggccagagtatatgatgatgaagtgaggaagtggatttctggtgttggtgttgacagtgttgggaagaagcatgtgaactcaaaagatggacctccaacctttgagcagcccaagatgactctggagaagctcttgctgtatggtaac

SEQ ID NO: 126369 - DNA, 232 bp, Glycine max
caacagagccagcgagagcaaaaccctagttcatccatcaccagtcgaggaagaagatggtgaagttccttaagcccaacaaggctgtcatcgtcctgcagggccgctacgccgggcgcaaggcggtgatcgtgaggtccttcgacgagggaaccagggagcgcccctacggccactgcctcgtcgccggaatcaagaagtaccccagcaaggtcatcaagaaggactccgc

SEQ ID NO: 126370 - DNA, 239 bp, Glycine max
gtgcctctagggttatcatttctccatttccattttctctctcacttttcaagaatcgtaagctatgggaaagtcttacccaactgtgagtgctgattaccagaaggccgttgagaaggcgaagaagaagctcagaggcttcatcgctgagaagagatgcgctcctctaatgctccgtttggcatggcactctgctggaacctttgacaagggcacgaagaccggtggacccttcggaa

SEQ ID NO: 126371 - DNA, 238 bp, Glycine max
cttcattacccacacacacaaaagaaacaacactccaagaggaacaccaggtcctccacctcttcctctcatcggcaaccttcaccaactccacaactcatccccacatctctgcctatggcaactcgccaaactccacggtcctctcatgtcgtttcgcctcggcgccgtgcaaaccgtcgtggtttcatcggccagaatcgccgaacaaatcttgaaaacccacgacctcaacttc

SEQ ID NO: 126372 - DNA, 229 bp, Glycine max
ctcgagccgttcttacctcctacgaattccccggtgacgatacccccatcgtctccggcagccgcactcttagccctagaagcccttatggcgaaccctgccatcaaacgcggcgacaacgagtgggtcgacaaaatctacaaactcatggacgaagtcgacgactaaattcccatcccccagcgccagaccgacctcccattcctcctcgccgtcgaagacgttttct

SEQ ID NO: 126373 - DNA, 244 bp, Glycine max
ctctttctctttctctgccaacctgcacactcttcactcgatcagacagaaaatggcaaagaatgtggggatccttgccattgacatctacttccctcccgcttgcgttcagcaggaagcattggagactcatgatggtgccagtaaagggaagtataccattggtcttggacaagattgcatgtcattctgtaccgaagtagaagatgtcatctcaatgagtttgacagtggttacttctctt

SEQ ID NO: 126374 - DNA, 236 bp, Glycine max
cttttatagaagtaaatgaagaaggcactgaagctgcagcggccaccgctgcaactatacaatttgggtgtgcgatgtttccaactgaaatagactttgtagctgaccaccctttcttgttcctgatcagagaagatttaactggaacagtactctttatcggacaggtgttgaatcctcaggctgaataatattaacattggtagcaaaacttatgctcctattctgttgtcttg

SEQ ID NO: 126375 - DNA, 235 bp, Glycine max
ctcaaggagatggctctgggaagaggcagtgcagtggttctactactttgcttcttgctgcttcactctcagatggctcgtgctgccacctacacagttggagattctgggggttggacctttaacactgttgcctggcccaaaggaaagctctttcgggctggtgacacacttgctttcaattatagccctgggactcacaatgtggtggccgtgaacaaggctggatatgata

SEQ ID NO: 126376 - DNA, 232 bp, Glycine max
cttttatagaagtaaatgaagaaggcactgaagctgcagcggccaccgctgcaactatacaatttgggtgtgcgatgtttccaactgaaatagactttgtagctgaccaccctttcttgttcctgatcagagaagatttaactggaacagtactctttatcggacaggtgttgaatcctcaggctgaataatattaacattggtagcgaaacttatgctcctattctgttgt

SEQ ID NO: 126377 - DNA, 236 bp, Glycine max
ggatgctacaaggaagaatcttggatggccatacgagcctttccatgtgccagaagatgtcaagaagcattggagtcgccatacacctgagggtgctaaacttgaagctgagtggaatgccaagtttgtggaatatgagaagcaatacagtgaggaagctgcagagctgaaggctattattactggcgaattaccagctggttgggagaaagcacttccgacatacacaccagaaa

SEQ ID NO: 126378 - DNA, 237 bp, Glycine max
ataaaaaaagaataataaatagaaaaaggagcatgttgattatatagaaagtaaagggcaacaatcatttttgtttaccatgggtaaggacaccatcgctgacataataacctatataagaaatgctgacatgaataaaaaaggaatggttcaaataccatttactaacataacagaaaacattgtaaaaatacttttacgcgagggttttgttgaaaacgtcagaaaacatagaga

SEQ ID NO: 126379 - DNA, 237 bp, Glycine max
ggacactcataacacaaagcacaaagcaaagctcatccttgagttaaaaaatggcagcagcttcttccatggctctctcatccccatccttggctggcaaggccgtgaagctgggcccatcagccccagaagtgggaagggtgagcatgaggaagaccgtcaccaagcaggtctcctcaggaagcccatggtacggcccagaccgagtcaagtacttgggcccattctctggcgagc

SEQ ID NO: 126380 - DNA, 254 bp, Glycine max
ccaaaccctaacacacacccatttgattcagtttccatggctagcctcaaggttgcatttttggctgcagtgctctgcatggttgtggtgagtgcacccatggcacatgagctatcacgtgcgggcaggtgacgagtagcctggccaattgcatcggttacctccagaagggaggaacgccgtcgtcgggatgctgcaacggagtgaagagcctcaatgccgccgccaagaccaccgccgaccgccagacggcg

SEQ ID NO: 126381 - DNA, 258 bp, Glycine max
gagcaagccctgagacaccattgtagagagagagagagttgagactcgagcccaaacctagcccatcctcaactggcccatactatgctccaatctcactgaagccctaatcctttccgttcacttcattcctctctgaaaccctaagaacacagaagccacgctgttctttcaaatcgtaaccgaagaatgaagatggtgcgctgctgtcggtgcttcgcctgagtctcattccgtttgcgcccactatcacaggtt

SEQ ID NO: 126382 - DNA, 256 bp, Glycine max
ttcgagcgattcggctcgagctcgcaccaacaatggcccccattgacagccgagccaacgcgttcgccggaccaggaccaggcccatcaccggcccacaaagagatccgcaccgaggcgtccggaaacgcccctggggccgctacgccgccgagatccgcgaccccggcaagaaaacgcgcgtctggctcggcaccttcgacacagccgaggaagccgctcgagcgtacgacaccgcagcgcgtgagtttcgcggt

SEQ ID NO: 126383 - DNA, 262 bp, Glycine max
cacaaactcagggtagggcagagagagagagagagagagagagagagagagagaatgggagggtgggctatcgcggtgcatggtggcgctggtgtcgaccctaatctcacactcagcgccaagaagaagcgaaacaacttctcacgcgctgtctcaatcttggaatctctgctctaaattctaatcttcgcgagatagatgtcgtcgaacttgtggtgagggaattggaaacggatccgctgttcaattcggggcgtggatc

SEQ ID NO: 126384 - DNA, 263 bp, Glycine max
gtaatagtaatatacataagtaacataaccaatggaagcgcgtgcaggagccaatcagcgtattgcaagaatctctgctcatcttcagcctccaaatttccaggaagggagtgagttcttcttaagagtgctgagtgcagagcaaagggtggggcacctggattcaaagttgcaattttgggggctgctgggggaattggtcaacccctttctttgctgatgaagatgaacccattggtttcagttcttcatctttatgatgt

SEQ ID NO: 126385 - DNA, 261 bp, Glycine max
caaaaacaaagaaaaaaaaaaaacccttagccaacacaaccatcatggccacctctgctattcagcaatcagcattcactggtcaaactgctctgaagcagctcaatgagttcgtcgcaagaccggtggcgccggcaaaggtcgcactaacatgcgccgcaccgtcaagagtgctcctcagagcatttggtatggccctgacggtcccaagtacttgggtccattctcggagcagattccatcatacctgacgggagaatt

SEQ ID NO: 126386 - DNA, 266 bp, Glycine max
aaaaaaaaaatagcaacaaaaacaagaaaaaaggttacctctttcaattttatcccttgttgtgagcttaattcaatttctgctcacacataatggcttgcacgctcgctgattcatactcctattcaagggttcttatcagaaaccagttctgaggagagacattgctgcccggtactccccgggtatatttagtctaaacagtaatgggcttatcagaaaaggttccagcgtcaaaggaattttggtactaggaatagggttac

SEQ ID NO: 126387 - DNA, 252 bp, Glycine max
aagtcactcttcttgcataacccagatctgcagacaatatgcgaagaactggcttgttacatttgttatgccttgtcattgctttagtaagtgtgcaagcagaagatcgtataagtattacacatggacggtgacttatggaactatttctccattgggtagtccccagcaggttattcttatcaatggtcagtttcctgggcctagacttgacttggtgactaatgagaatgtaattctcaaccttatcaa

SEQ ID NO: 126388 - DNA, 251 bp, Glycine max
attgggttcatgaggcctttggatctgcaagggtttgggaagaagaacatggaaactcaccacaaggtggatgcgatgatggagaaggtgttgagggagcatgaggagctagggctaaggaagatgctgactctgataggaagaaggatctttttgatattttgttgaacctcattgaagctgatggtgctgacaataagctcactagagagagtgccaaagcctttgctctggacatgttcatcgccggc

SEQ ID NO: 126389 - DNA, 248 bp, Glycine max
ctttctcttcttccctttcctcctcctcctcttctctatcaatttctccttcttttttatcatacacttcttcaaattctacacactttgccactcatgctgccttcagatcagtgccagcgccgccgagaagaagaaggtgctcatcgtcaataccaacagcggcgggcatgccatcattggcttttactttgcaaaggagcttcttggtgctggccactctgtcaccatactcactgttggcgatg

SEQ ID NO: 126390 - DNA, 255 bp, Glycine max
acttctctctctctctgctcggttctccgatcgccgtcttcgccttgcccattcctgatcaatatgtctagaagatatgatagccgtacaacaatcttctcccccgaaggcgtctttaccaagtggagtatgcaatggaggccattgggaatgctggaactgcaatagggatcttgtcaaaagatggggtagttctggttggtgaaaagaaggtcacatccaagctgctgcaaacctcaacctccactgagaaaa

SEQ ID NO: 126391 - DNA, 261 bp, Glycine max
ctcaattggaaacaacgctatgatataattttgggaacagcaaggggactagcatatctacatgaggagttccatgtgtccatcattcatagagatataaagactggtaatacctcctagatgatgatctccagcccaaaattgctgattttgggttggcaaggcttttgccaagggatcgttctcatcttagcacaaaatttgccggaacattgggatacacagcacctgagtatgcaatgcaaggtcaattatcagaga

SEQ ID NO: 126392 - DNA, 261 bp, Glycine max
atgaaagtacaggatacatcgactatgaccagatggagaaatctgctacactcttcaggccaaaattaattgttgctggagctagcgcttatgcacgtctctatgattatgacgtgtacgcaaggtttgcgataaacagaaagctatactattggcagatatggcacacatcagtggattggttgcagctggtgtcatcccatcaccttttgattatgctgatgtagttactaccacaactcacaagtcacttcgaggacc

SEQ ID NO: 126393 - DNA, 266 bp, Glycine max
aagaaagggaaagcaactaaacattctctctcagtccttaaattctcatcgcaacacaacactctcattcacactccaaaatggtgacctcgtcgcaaaagattctggttaccgcggtgccggtttcataggcacccacaccgtggtccagcttctcaaaggaggcttcagtgtttcaataatcgacaatttcgataactccgtcgtggaagcagtggaccgcgtccgccaagtggtgggccctcagctttctcagaacctggaat

SEQ ID NO: 126394 - DNA, 248 bp, Glycine max
agggattttgatgcccgttggtgccataatagcaaggtatttgaaggtgttcaaatctgcagaccctgcttggttttaccttcatgttacatgccaaacctctgctacatagttggtgttgctgggtggggaactggtctcaaactcggaagtgactcggttggtattaagtataacacccatagagcactcgggatcaccctcttctgccttggtaaccttcaggtttttgctctgctcttgaggcc

SEQ ID NO: 126395 - DNA, 249 bp, Glycine max
atatgctggacttatggttattcgtgcatatcatttggcaaggggagaccaccaccgcaatgtttgcattatacctgtctcagcacacggaacaaatcctgctaggcagctatgtgtggaatgaaaattgtctctgttggaactgatgccaagggaaacattaatatagaagagctgaggaaggctgctgaaacacacaaggataacttatctgcacttatggtaacatatccttcaacccacggtgtt

SEQ ID NO: 126396 - DNA, 253 bp, Glycine max
aaagtgagaaaaaataaaaatcaaagagcataatgtcagggatcattcacaagattggggagacccttcatgtgggagggcacaagaaggaggaggagcataagggtagcaccatgctggagaatacaaaggggagcaccatggtgaacacagtagtgagtacaaaggagagcatcatggtgaacacaaagctggagagtaccatggtgagcacaagccagagcacaaagaggggttcctagacaaagtcaag

SEQ ID NO: 126397 - DNA, 253 bp, Glycine max
gtgcattattcaatggccaccacagcagctctatccggaaccatggtgagcacctccttcatgaggaagcaacctatgacgaccaagagcctaaagacattccccaacgtctttttggtctgaaaggtggacgaggtggtcgtgtaacttgcatggcctcgtacaaggtgaagctcataaccccagaaggagaagtggagtttgaatgcccagatgatgttttcattgttgacaaggctgaggaagaaggcat

SEQ ID NO: 126398 - DNA, 257 bp, Glycine max
aaaaaactttcgaaagattttatccaattgaaattttaaaaatgactgggataaacttaagaattcaattattgaaattgaataaataaacaatttaattggattggtcaatggtatcaaaaaaatggagtactaactcccatttcttatttattattgaattaaccgatcaacttgctttgttatcgaacatttctttgtgatttcaaaaattttccggaaaaaatttgaatctatttttatatgcgaatcaatcc

SEQ ID NO: 126399 - DNA, 257 bp, Glycine max
acgaatttcattgcagagtgttattttgagtatcagcatcaatggctccaattgcagtgggaaacgtgattccagacggcattttggcttacttggatgaagaaaacaaccccaaactgtctccattcactctctcgccaccggcaagaaagtcatcatctttggggttcccggtgccttcactcctacttgcagcttgaagcacgttcctggcttcattgagagagcagaagagctgaaagggaagggtgtggacg

SEQ ID NO: 126400 - DNA, 260 bp, Glycine max
ataggagctcttctccattggttcttcatctgcatgcacacacatgcatagttttggaaaccaagaatttttgaagggtagcatcaacaagaagttctgaaaatggagataccaatgtcagcgagtatgaagctattgcaaagcagaagttgccaaagatggtgtttgactactacgcatctggtgcagaggaccagtggactctgcaggagaacagaaatgccttttccagaattttgtttcggccacgtattcttatt

SEQ ID NO: 126401 - DNA, 258 bp, Glycine max
agaataccttcttaggaagggatggattccttgcttggaattcgagttggagcacggtttcgtgtaccgtgagcacaacaggtcaccaggatactacgatggacgctactgaccatgtggaagctgcctatgtttggttgcactgatgcttctcaggtgttgaaggagcttcaagaggctaagactgcataccccaacggcttcatccgtatcatcggattcgacaacgttcgccaagtgcagtgcatcagcttcatc

SEQ ID NO: 126402 - DNA, 244 bp, Glycine max
ggcaaagcaatggcatcgtcactacaagcagcagctactttcatgcaacccaccaagtttttgcagctaaagtctactcaggccatatactaaggcttttggtttgaacctgctggagttaataaggtcacatgctcccttcaggctgatcttaaggacttggctcacaagtgtgttgatgctaccaaaattgcaggctttgcccttgccacctctgctctcgttgtctctggggcaagtgctg

SEQ ID NO: 126403 - DNA, 249 bp, Glycine max
ctcgagccgcatcaccagaagattgtggtggttgacggtgcgatgccaggtggagggtcatttaggcgaagaattgtgagttttgttgggggtattgacctctggatggaagatacgacactgccttccactcactgttcagaaccctggacacagcacaccatgatgattttcatcagcctaactttcctggtgctgtaatcacaaaaggtggtcccagggaaccttggcatgacattcactcccggc

SEQ ID NO: 126404 - DNA, 251 bp, Glycine max
ctcatctcttacaacgaaaccctcttcatcttgttctatctgtgacgagcatcatggcctcaagagcagtgttattgttggctatgtgtgtgcttccggcgatggtgtggccattcgcccagcaaagaaccctttttgcgtgaagggtcgtgtctactgtgacccttgccgtgctggttttgagacctcagctaccacctacattgctggtgctgagattatgttgcaatgcaagagcagggttagcaacg

SEQ ID NO: 126405 - DNA, 253 bp, Glycine max
tcgggtacctgaatcagggtcacccttctagaggaacaacacttgttattactctttcattggtgctttcgacacttgtgtccttctccactttcacacatgcctttcttcttctgcgtttccggaactgaatcctataaaacctaggcactcacgtcttctcaggagtgccgtgcaacatgaaactcctacatcacagctttctgaaatatggtcacctctggaaagccaaggatggaaaccttatgttgaa

SEQ ID NO: 126406 - DNA, 252 bp, Glycine max
atgagaagagtgaagtaaactcaggctttttctactcaagtgcggaacagagagaagctatggttgcagctgaaagacgacaggttgatgaaaaagttaaaaaaatattgaactgaagaataaggtttgttctggtaatgatagcaattttgttgtcctcaatcaaaaaggaattgatcccccatctctggacctgcttgcaagggaaggaataattgctcttcggagagcaaagaggagaaacatggaaag

SEQ ID NO: 126407 - DNA, 256 bp, Glycine max
caagattgttgctgtagaagagaagaaatagattgaagagacccagcagaccgacaaggacagatggaagggtcttgcctatgatatctcagacgaccaacaagacatacaagaggaaagggtttggttgactcccttttccaagctccacaggatgctggaactcactatgcagtcatgagctcctacgagtacctcagcactggacttcgccagtacttggacaacaaaatggatggattctacattgctccag

SEQ ID NO: 126408 - DNA, 262 bp, Glycine max
agaattggaagccaccgccgctacttccccaccttctcgcgttatcctcatctccgccggtgccagccacaccgttgcccttctctctgggaatgttgtgtgttcgtgggtcgcggagaagacggacagttaggccatggtgacaccgatgataggcccttacccacgcagctcagtgcattggatgctcaacacattgattctattgcctgtagagctgatcataccttgcgtattccgaatcacgctatgaactctatag

SEQ ID NO: 126409 - DNA, 247 bp, Glycine max
aatattaatgccaaacaataatttcgaggtcaagaaaataaataatggtcacagtgttactagtactactactggtactgttgctactgctactactactactcgccggtgaattcttcttcttctcggtggccgaaggcggaagttcatgctttgataaggataaggacaagtctagaaaccaagtatcaagagaatggaccaaaagctccattgtgggaagatatctcaattgcaatgcaaaggc

SEQ ID NO: 126410 - DNA, 244 bp, Glycine max
gcaattgaagttaaaagccttagccttccctacaactccaaacacaaagacatcatcatccatggctgcctccgtctccactgtcggagctgtcaacagagtcttttgaacctgaatggttctggagctggagcttcagctcccagttcagccttctttgggaccagcttgaagaaggttattgcctcaagggtccccaacagcaaggtttccggtggaagcttcaagattgttgctgtagaag

SEQ ID NO: 126411 - DNA, 248 bp, Glycine max
ctaggagctcttctccattggttcttcatctgcatgcacacacttgcatagttttggaaaccaagaatttttgaagggtagcatcaacaagaagttctggaatggagatcaccaatgtcagcgagtatgaagctattgcaaagcagaagttgccaaagatggtgtttgactactacgcatctggtgcagaggaccagtggactctgcaggagaacagaaatgccttttccagaattttgtttcggcca

SEQ ID NO: 126412 - DNA, 247 bp, Glycine max
atcgagccgatcaagaatgccaagtacatagccacacctgggaagggcatcttggcagcagatgagagcactggcaccattgggaagcgcctatcgagcattaagttgagaacattgaggccaaccgccaagctcttcgcgagcttctcttcaccgctccagatgccctccaatacctctctggtgtcatcctctttgaggaaactctttaccagaaaacctccgatgggaagccttttgttgaggt

SEQ ID NO: 126413 - DNA, 253 bp, Glycine max
agaacataccaatctacaataaacgatgattctcattatctccctcattttttctcttctctctttctcccatgcttctgtcctagatttctgtgttgcagattagcaggtcctattggacctgcaggatattcctgcaagaagccttcaaaggtcacagcagatgattttgcttacagtggccttggcattgctggtaacacctcaaacattatcaaagctgcagtgacccctgcatttgatgctcagtttg

SEQ ID NO: 126414 - DNA, 251 bp, Glycine max
atctctccctttcacctttcttcatagcctaccacttttctgctttcatctactctcacttctcttcacacactgagacacacagagagagaaaaataaagggtggatgggtgtcttactgagtgttttctttttataatgaacaaagaactgcacaccctcttcttcaccgaagaagaagatggcaattcagcaccacaatgaccaactagagcataatgaaaatgtctcatctgtccttgatgcccttt

SEQ ID NO: 126415 - DNA, 230 bp, Glycine max
gttcgagataactagaaacagtgtgatgaaaatgaaggtccttgttttcttcgttgctacaattttggtagcatggcaatgccatgcgtacgatatgttccctctccaatgaacactggctatggtgcccgtactccggaggtgaaatgcgcaagttggaggcttgctgtggaagcaacaacatctttggctttgagacgattcctgaagagtgcgttgaagcaagaaag

SEQ ID NO: 126416 - DNA, 245 bp, Glycine max
atatacatggctgaagagggtcaggttgtcggcgtccacaccgttgatgcgtggaaccagcaactgcagaatggaaaagactcccaaaaattgattgtggggattttactgcttcctggtgtggtccatgccgttttattgcaccagttctggcagagattgctaggcatactcctcaagtgatcttcctcaaggtggatgtggatgaagtgaggcctgttgctgaggaatattccattgaggcc

SEQ ID NO: 126417 - DNA, 248 bp, Glycine max
cagtgaaagagaatccgaggcgaagagaagagaaaaattaagatggaggggaaggagcaggatgtgtcgctgggagcgaacaagttcccggagagacagccgttgggacggcggcgcagagccaagacgacggcaaggactaccaggagccggcgccggcgccactggttgacccgacggagtttacgtcatggtccttttacagagcagggatagcagagtttgtggccacttttctgtttctatac

SEQ ID NO: 126418 - DNA, 251 bp, Glycine max
ctcgtgccgattcggctcgagacagccatggccagctccaacttacctattgttctctcagtctccctagccttctttatggtgctacttaccaaggcacactgaccgataccgcgtctttcaccttcaacaagttcaacccagtccaaccaaagattatgctccaaaaagatgctagtatttcatcctctggggtgttacaactcaccaaagttggcagcaacggcgtgcccacctcgggatctctcggt

SEQ ID NO: 126419 - DNA, 246 bp, Glycine max
caagggtttacatcggaaaagttggtagcgaaagaaagatgtcgatcttcgagtacaacgggagtgccctagtggctatggtggggaagaactgcttcgccatgcgagcgatcggagactcggggttcagctccagaccattgccaccgatttccagaggatttcaaaaatccacgacaagctcttcatcggtctctcctgcctcgccaccgacgcccagaccctctaccagcgcctccttttccg

SEQ ID NO: 126420 - DNA, 254 bp, Glycine max
gataacattgatacaaaggtggcgcttcttgctgcatgtgtacgtaggggtttgaaggttctatctgcaacaggggctggtgccagagctgatccaactagaatcgcattgccgatctaagagaatcaactaatgatccattatctcgagctgtaagacaccgtttgaggaaagattatggtattgaaggtggtatcccagttgtgttttctttagaaaaacccaaagctaagctgcttccatttaagggtcca

SEQ ID NO: 126421 - DNA, 259 bp, Glycine max
aatgaaaacccaaagtgcttctctcctctgtctttttctctctcttgctatccttttggctagttgcactgctgcaagtgcaactccaagaagcgcagtgccaagcaccatgtttcaacattcaacagaagcctttttccttccacttttctctttggaattggttcttctgcttaccaggcagaaggagcagcaagtgtagatgggagaagaccaagcatatgggacacctacactagacagcatactgaaaagattt

SEQ ID NO: 126422 - DNA, 256 bp, Glycine max
ggtgagcacctccttcatgaggaggcaacctatgaccaccacaagcctaaagacattccccaacgttggtgaagctctttttggtctgaaaagtggacgaggtggtcgtgtcacttgcatggcctcgtacaaggtgaagctcataaccccagaaggagaagtggagtttgaatgcccagatgatgttttcattgttgacaaggcagaggacgaaggcattgaacttccctactcgtgcagggccggttcttgcgtt

SEQ ID NO: 126423 - DNA, 256 bp, Glycine max
tacctccattgctagcaacggtggaagagtgcaatgcatgcaggtgtggccaccagttggcaagaagaagtttgagactctttcctacctgccagaccttgatgatgcacaattggcaaaggaagtagaataccttcttaggaagggatggattccttgcttggaattcgagttggagcacggtttcgtgtaccgtgagcacaacaggtcaccaggatactacgatggacgctactggaccatgtggaagctgcct

SEQ ID NO: 126424 - DNA, 259 bp, Glycine max
gtgtttctgtaaccatggcatccaccactctatcccctacaaccccttctcagctatgctcaggaaaaagtgggattttcagttcctcacaggcacttcttgtgaagccagtgaagaggcagatgatggggaagagcaagggattgagaattgcatgccaagccaccagcatttccgctgatagagtccctgacatgggcaaaagacagctcatgaatcttcttcttcttggtgccatttcactccccactgctggaat

SEQ ID NO: 126425 - DNA, 262 bp, Glycine max
cctcaatcatccatagacatggccaccgtcacttctgcagcagtttctattccctcattcactggcctcaaggcaagcgcaggcaaagtgagtgccgccgcagttaaagtctcagctccccaagccacaaggttctgcggcatcaaggcttccctcaaagacgttggagtcgctgttgtggccactgctgcgagcgcagttctagctagcaacgccatggccattgaagtgttactgggcactgatgacgggtctctggttt

SEQ ID NO: 126426 - DNA, 263 bp, Glycine max
catccgtgacaccttccgcatcatcctccagatgagcgtcgtcatgatgttcggcggccaaatgcccgtcatcaaggtggggagaatggcggggcaatttgcgaaccgaggtcggattcgtttgaggagaagaacggcgtgaagcttccgagttacagaggggacaacattaacggagactcctttgacgagaagtcgaggattccggatccgcagaggatgattagggcttattgccaagccgcggcgacgctgaatcttct

SEQ ID NO: 126427 - DNA, 266 bp, Glycine max
acgaaaggaacatacaaccaatctcaagttgccactcagatgggaagggttgctgcaaagttaaatatcgactttgtgatatccactggagacaatttctacgatgatggattgactggtatagatgaccctgcatttgaaatttccttctcaaaaatctacactgccaagagcctaccaaaagcaatggtatagtgtgttgggcaaccatgactacaggggtgatgttgaagctcaattgaatccaatccttcagaaaattgatc

SEQ ID NO: 126428 - DNA, 260 bp, Glycine max
tgctattagaagtggacaccctatattgattattgctgaggatattgaacaagaggctttagcaactcttgtggtgaacaaacttagaggatcactgaagattgcagcactgaaggcccctgggtttggagaacgcagaaccagtaccctgatgatattgccatcttgactggaggtactgtaatcagagaagaggttggccttactttggacaaagctgggaaagaggttctcggatatgcctccaaggtggtgctcac

SEQ ID NO: 126429 - DNA, 254 bp, Glycine max
cgtttacaaccaaagtcccctcccccactgccaaacgcaccaccgaagcaaatcaatattaagggcctgtccgtcgtcaaagattacttatctgactacggctacattgaatcctctgggccatttaacgattctttcgatcaggaaataatatcagccattaagacctaccagaaattttccaatcttcaagttaccggcggcctgaacaaacagcttattcagcaaatgttgtccatacgatgcggtgtccc

SEQ ID NO: 126430 - DNA, 254 bp, Glycine max
cacaaactcagggtagggcagagagagagagagagagagagagagagagagagaatgggagggtgggctatacgcggtgcatggtggcgctggtgtcgaccctaatctcacactcgagcgccaagaagaagcgacacaacttctcacgcgctgtctcaatcttggactctctgctctaaattctaatcttcgcgatatagatgtcgtcgcacttgtggtgagggaattggacacggatgcgctgttcaattcgg

SEQ ID NO: 126431 - DNA, 255 bp, Glycine max
ctaaatctcccagaccaatttaagagctcctttgactttattgatgggcatgttaaaccagtggttggaaggaaaatcaattggttgaaagctggacttatagaatcatggtttgtgataactgttagcccaaactatgctaaagaactggtgtcaggtccagacaagggagtggaattggacaacatccttcgcaaaattgatgatgatggtcgtttggttggaattgtgaatggcatggatgttcaggagtgg

SEQ ID NO: 126432 - DNA, 249 bp, Glycine max
cgtgacacaacaggtcaccaggatactacgatggacgctactggaccatgtggaagctgcctatgtttggttgcactgatgcttctcaggtgttgaaggagcttcaagaggctaagactgcataccccaacggcttcatccgtatcatcggattcgacaacgttcgccaagtgcagtgcatcagcttcatcgcctacaagcccccaggcttctaagtgtgaaaaatttgcaaagcatttgtagccgcca

SEQ ID NO: 126433 - DNA, 255 bp, Glycine max
gtcatccagtatgcatgctcaattcgtctatagatcctttgcttcattgccatacacaacaaggttcttcttgctcccaggcttgcccattacttttctagttttgctagcaatgtgggcttggtccaagacctttttagttagtttctactatctcagaggcagacttcaccaaacgtgggttgtacctagatgtggctttcagtatttcttgccatttgctactgagggaatcaataatcaaattgagcaagc

SEQ ID NO: 126434 - DNA, 257 bp, Glycine max
ccattagttcattctctttgcgcagttccctacctctcctttcaagatgcagatcttcgtcaagaccctcaccggaaagaccatcacccttgaggtggaaagctctgacaccatcgacaacgtcaaggcgaagatccaggacaaggaaggaatcccaccggaccagcagaggcttatttttgctggcaaacagctagaggatggaaggaccctcgctgactacaacatccagaaggagtcaactctgcacttggtgt

SEQ ID NO: 126435 - DNA, 258 bp, Glycine max
gtgagaaagagagagtgtgtgtgtgtgcagaagatgtggccattcagcagaaaaggggcttctggtttttcatcatcatccacggcagagcaagtcactgaaggaattgatggaactggtctcactgccattgtcacaggagcatccagtggtattggcactgagactacacgtgtcctttcattgcgtggtgtccatgtgattatgggtgtgagaaatatgcttgctgctaaagatgtcaaagaaacattacttaag

SEQ ID NO: 126436 - DNA, 264 bp, Glycine max
tgcaattgaagttgaagtcttgcccttctctcttcaactccaaacacaagacatcatcatccatggctgcctccgtctccactgtcggagctgtcaacagagctcttttgaacctgaatgggtctggacctggggtttcagctcccagttcatccttctttgggagcagcttgaagaaggttattggctcaagggtccccaacacaaagatttcctctggaagcttcaagattgttgctgtagaagagaagaaagagattgaag

SEQ ID NO: 126437 - DNA, 270 bp, Glycine max
ttaactgctgctgtaattgttaccactcctcaaaagctgtcgttcattgatgttgcaaaaggagttcggatgttttcaaaacttaaggtgccttgtgttgctgttgtggagaacatgtgtcattttgatgctgatggaaaacgatattacccatttggcagaggttcaggttctcaggttgttcagcagtttggaatacctcatctatttgatctccctattagaccaactctctctgcttctggagacagtggaatgcctgaagtggta

SEQ ID NO: 126438 - DNA, 261 bp, Glycine max
ctaaaagccttagccttccctacaactccaaacacaaagacatcatcatccatggctgcctccgtctccactgtcggagctgtcaacagagctcttttgaacctgaatggttctggagctggagcttcagctcccagttcagccttctttgggaccagcttgaagaaggttattgcctcaagggtccccaacagcaaggtttccggtggaagcttcaagattgttgctgtagaagagaagacagagattgaagagacccag

SEQ ID NO: 126439 - DNA, 252 bp, Glycine max
gaacaagtagttgagaactaagaaggagaagcaaatggcttcctcaatgatctcttccccagctgttaccactgtcaaccgtgccggtgccggcatggttgctccattcactggcctcaagtccatggctggcttccccaccagaaagaccaacaatgacattacctccattgctagcaacggtggaagagtgcaatgcatgcaggtgtggcaacagttggctagaagaagtttgagactctttcctacctg

SEQ ID NO: 126440 - DNA, 249 bp, Glycine max
acgggggtgagaaaggagaagggtggcttcagaatcttcactatggtgtgtttggccttggaaacaggcagtatgagcattttaacaaggtggcgaaggtagtggatgacatgctcgttgagcaaggggggaagcgccttgtgccagtgggtctaggtgatgatgatcaatgcattgaggatgactttactgcatggaaagaagaactgtggccagcattggatgaattgcttagagatgaggacgatg

SEQ ID NO: 126441 - DNA, 250 bp, Glycine max
tttggccatggatgagtccaatgctacctgtgggaagcgtttggcttcaattgggctagagaacactgaagctaaccgccaggcataccgtaccctccttgtgacagttccaggacttggtcagtacatctctggtgccattctctttgaggaaactctctaccaatccacaactgatggcaggaagattgtcgacgtgctcctcgagcaaaacattgttcccggtattaaagtcgacaagggtttggta

SEQ ID NO: 126442 - DNA, 247 bp, Glycine max
ggggatgtacttgatcccagcaccagccatctgctcgacgccaccgccaacctcggtgccgtcccccccaggtacggctggaccggcgacgagattggattcgacacctacttctccatggccagaggtaatgctaccgtgcctgctacggagatgaccaagtggttcgacaccaactaccactttattgtccctgaattgggccctgatgtgaacttcacctatgcttctcacaaggctgttgatg

SEQ ID NO: 126443 - DNA, 264 bp, Glycine max
catgttagtcctgatggtaagcaattttctatcacatcacctgaccgtagaatacgtgtgttttggtacagaacgggtaaactaaggcgggtttatgatgaatcccttgaggttgctcaagatctccaaagaagtgatgctccattatacaggttggaagccattgattttggtcgaagaatggctgtcgagaaggaaatagagaagacagaaagtgcaccacttccaaatgcagtttttgacgaaagtgccaattttcttata

SEQ ID NO: 126444 - DNA, 254 bp, Glycine max
acctaatcacttccccacttcccctgtaaatcacgtttagttcgcacaaggttttaaaaaatggctgatgctgaggacattcaacctcttgttgttgataatggaactggaatggtcaaggcgggttttgcaggtgatgacgctcctagggccgtgttccccagtattattgggcgaccacgccataccggtgtaatggttgggatgggtcagaaggatgcttacgtgggtgatgaagctcaatccaaaagggg

SEQ ID NO: 126445 - DNA, 252 bp, Glycine max
gtaaaagatgatgttttcaatgcattttataagttgtggcccgagaagttccaaaacaaaacaaatggtgtgacaccaaggagatggatcaggttctgcaatccagatctgagtaaaataataaccgagtggataggtactgaggattgggtcctaaatactggaaaattggccgagctacggaagtttgtagacaatgaggatctacaagtgcagtggagggaagcaaagaggagtaacaaagttaaagtt

SEQ ID NO: 126446 - DNA, 253 bp, Glycine max
actaaacaaaaaaataaagaaaaatttaccaaaatgccttcttcttccaccaccatagtctcccaatgcgtgatccaccccgaccagaaatcaaacatgaaacccttgagactctctgtttctgaccttccaatgttgtcgtgtcactacatccaaaagggcgtgttactaaccgctccgccctcgtctttcgaggatatgatactctcttttaaacactctcttactatcgcgctctctcactttccggctc

SEQ ID NO: 126447 - DNA, 253 bp, Glycine max
ctcataacacaaagcacaaagcaaagctcatccttgagttaaaaaatggcagcagcttcttccatggctctctcatccccatccttggctggcaaggccgtgaagctgggcccatcagccccagaagtgggaagggtgagcatgaggaagaccgtcaccaagcaggtctcctcaggaagcccatggtacggcccagaccgagtcaagtacttgggcccattctctggcgagcccccgtcctacctaaccggtg

SEQ ID NO: 126448 - DNA, 249 bp, Glycine max
caccgaagcagaccaaggctgagaagaagatcgcttacgatgcgaactgtgcgacctaatggaggagtacggccagatcctcgttgtgaactccgataacgtgggatcgaaccagctccagaacattcgcaagggtctccgtggcgactccgtcgtcctcatggggaagaacaccatgatgaagcgctcagtcaggatgcacgctgagaaaaccggaaacaacgcctatctcaaccttatcccgctcct

SEQ ID NO: 126449 - DNA, 253 bp, Glycine max
agaagatggcagacgctgaggatattcaaccccttgtttgcgacaatggaactggaatggtgaaggcaggatttgcaggagacgatgccccacgtgcagtgtttcctagcattgttggtcgtcctcgtcacactggtgtgatggttggtatgggccagaaagatgcatatgttggtgatgaggcacaatctaaacgtggtattctgactctcaagtatcccattgagcatggtattgttagcaactgggatga

SEQ ID NO: 126450 - DNA, 254 bp, Glycine max
ctcgagatctgttttatgctctctgggtgcctgatctctttatggaaagagttcagagcaatggccaatggtctttgttttgtcccagtgaagcaccgggtttgacagattgttggggtgagaaatttgaggagcttgatcttcaatatgaaagagaaggaaaagcaatgaaggttgtccaggcacagagcctctggttcgaaattctgaagtcacagatagaaaccggaaccccctacatgctttttaaggat

SEQ ID NO: 126451 - DNA, 259 bp, Glycine max
tcaggagggacaaggccaccagcaacatttgcactgctcaggcactgcttgcaaacatggctgccatgtatgctgtgtatcatggacctgaaggcctcaagaacattgcacaccgtgttcatggtcttgctggggcatttgctcttggaataaagaaacttggaactgtggaaattcaggaccttcccttctttgacactgtgaaggttaagacttccaatgcacacgcaattgctgatgctgctctcaaaagtggaat

SEQ ID NO: 126452 - DNA, 265 bp, Glycine max
ttccactcccgcacaaaaactgcgtctttgcagcaccccacagcttccctccaatccaaacacgtcctaatcccccgaaacactcttacccagaaacccatcctcaacctctcctccctcccgggcaccaccttcacccccctcaagctcaaattcttcagcggcggcgccgtccgccgctccaccggcgcctcgggagccagaatgtcagccaccgcagcctccagctacgcggctgccctggccgacgtggctgccgcgaaca

SEQ ID NO: 126453 - DNA, 255 bp, Glycine max
aaggagtcgaacttacttaactataagaggatatacaacaactaacgtgcaacctccaaagttatacaaatgtgcacatggaacaaggtactggatgagaatgcaaagggaaaactctctcaattttgcctaattccggcagaaaatattgttactctttatgatgttcccaacatctggcacattcctttgcttttaagagatcagaaggctcacgaagcaatgtttaaagtgctgaaccttcatggtgtagct

SEQ ID NO: 126454 - DNA, 252 bp, Glycine max
gtgaattagctatgaacaatgatgagctacatgtggttatgttcccattccttgcatttggccacattagtccatttgttcagctctccaacaagttgttctctcatggtgttcatgtcactttcttgtcagctgcatccaacattcccagaatcagatcaactcttaatctcaatccagccatcaatgttatctcactaaagttcccaaatggtataaccaacactgctgaattgccacctcacttagctg

SEQ ID NO: 126455 - DNA, 250 bp, Glycine max
ctaaggttgcctttaggactaaggtgtttcacccgaacatcaatagcaatggtagcatttgtcttgatatcctgaaggagcagtggagccctgcactcaccatctctaaggtactgctttctatctgctcattgctgactgatccaaatcctgatgatccacttgttccggaaatcgctcacatgtacaaaactgaccgggccaagtatgaggccactgcacgcagctggacccagaagtatgccatggg

SEQ ID NO: 126456 - DNA, 250 bp, Glycine max
ccatattcaaaggttttgatgccaccgacaggtttgacggagaagctaaagaagagcgtctctgatatgactactgtccttgaaaggtgtgtgaataggctggagtgggagcgttcgcaagagcaagctaggcaaaaggctgaggatgagatagcacaggaaagaatacaaatggctatgattgattggcatgatttcgtggtgtctgaaacaatagattttgctgatgatgaggatgaagagttacctc

SEQ ID NO: 126457 - DNA, 247 bp, Glycine max
aaagtaaattaagaagatcattaatggcttctcttgcaaccttagctgctgttcaaccagctgcgctcaatggccttgctggaagttccctctctggaactaagctctctttcaagccctctcgccacactgtcaaatccaagaacttcaggagtggtgccgtggtagcaaagtatggtgacaagagtgtgtactttgatttggaggatctgggcaacactacggggcagtgggacttgtatggctc

SEQ ID NO: 126458 - DNA, 249 bp, Glycine max
gcttaaaggagttaaagagtaaaagcaccgtctccgtctccactctcggcttcttcttcgttgcgctttttcccaaaaccaattgcatcactctcgtccgttaccgccgctgccctagaccaccgcaagcgacgtcgcacaccgccttcatccgttagggcaaaaatgagtcgaggaagtggaggtggatacgatcgtcacatcactattttctcccctgaaggacgtctctttcaagtggagtatgct

SEQ ID NO: 126459 - DNA, 248 bp, Glycine max
cagacacttccttcatcaaatggcttctcacgacggcatctccgctgcttcttcagattccgtcttcaatcacctcgttcgtgctcccgaagatcctatcctcggggtaactgttgcttataacaaagatccaagtccagttaagctcaacttgggagttggtgcttaccgaactgaggaaggaaaacctcttgttttgaatgtagtgaggcgagttgagcagcaactcataaatgacgtgtcacgca

SEQ ID NO: 126460 - DNA, 255 bp, Glycine max
ctcgaccgccaataacttgaagctgattgctagagctcaccagctggttatggaaggctataactggggacatgatcaaaaggtggttactatatttagtgctcctaactattgttatcgttgtgggaacatggcatcaattcttgaggttgacgactgcaaaggacacacattcattcagtttgagccagctccaaggaggggagagccagatgtaaccaggagaacacctgattacttcctatgatactattt

SEQ ID NO: 126461 - DNA, 246 bp, Glycine max
tggggagttgatgtggcaataactggctctcagaaggccctttcccttcccactgggataggtattgtggttgcaggacctagagctattgaggcctcaaaacatgctaaatcacttcgagttttctttgactggaaagactacctaaaattctaccagctaggaacgtattggccatacactccttccatacatttgctgtatggtctgagagctgctcttgatctgatttttgaggaaggactt

SEQ ID NO: 126462 - DNA, 248 bp, Glycine max
catattttcagaccgaactcaacactcgcagcaccgccatgagtgccgccacttcctccaccctctccaccgtcaccgatgccaatcttcactccagatttcattctcgtcttgttccattcactcatcatttctcactttctcaacccaaacggatttcttcaatcagatgccaatcaattaataccgataagaagaaatcaagtagaaatctgctggacaatgcaagtagactcctcacggactta

SEQ ID NO: 126463 - DNA, 247 bp, Glycine max
ttgcaattgaagttgaagtcttgcccttctctcttcaactccaaacacaagacatcatcatccatggctgcctccgtctccactgtcggagctgtcaacagagctcttttgaacctgaatgggtctggacctggggtttcagctcccagttcatccttctttgggagcagcttgaagaaggttattggctcaagggtccccaacacaaagatttcctctggaagcttcaagattgttgctgtagaag

SEQ ID NO: 126464 - DNA, 249 bp, Glycine max
ctcaagtaggctatactaaggtgaaaaaggagagatggcagctgcaacatctagtgctgtgttaaacgggtttggatctcacttcttgtgtggaggaaagaggagccatgcccttcttgctgctagcattggagggaaagttggtgcttctgttagtcctaaaagagttattgtggcagttgctgctgcaccaaagaagtcatggatccccgctgtaaaaggtggtgggagtttcatagacccagaatg

SEQ ID NO: 126465 - DNA, 254 bp, Glycine max
ctaggaagttggaagtcatggcagcaacattgatggcagcaacaacaagttctggtactcttaaagcaactcctttccttggccaaggcaagggtgccaatgccaatgctcttagggatgttgtctccatgggaactgggaagtacaccatgggcaatgatttgtggtatggaccagacagagtgaaatacttgggacccttctcagctcagaccccttcatacttgaaaggagaattccctggggattatgga

SEQ ID NO: 126466 - DNA, 258 bp, Glycine max
gatttcagttccaaacaaaacttatcaaaatctcatatactgattcagttctatacataaccatcgagatttattatcaaaccaaaaattctcaaaatctcttcacctctgtgatgaccatggaatacagaaccttagaactcaacatcatatccgcaaaggacatcaagaacgttaacctcttctccaagatggacgtatacgccgtcgttacgctctccggcgaccctctccaccctcagggcgccatcacccacg

SEQ ID NO: 126467 - DNA, 255 bp, Glycine max
cgactcgcaatggtggcaatgcttggcatctttgtacaagcttcagtgactcatgttggaccaattgataatcttgtggagcatctttccaatccatggcataaaacaattattcagacccttgccaattctactcttagttctagaaagtactgtatgaatatgtggcttgggcttgagcttatccataaaatgaaattactttttatttttccacctcgatcatactgtggtcaaggatcaagtttagatgta

SEQ ID NO: 126468 - DNA, 254 bp, Glycine max
aaggaaggcagcaggcgcgcaaattacccaatcctgacacggggaggtagtgacaataaataacaataccgggctcattgagtctggtaattggaatgagtacaatctaaatcccttaacgaggatccattgagggcaagtctggtgccagcagccgcggtaattccagctccaatagcgtatatttaagttgttgcagttaaaaagctcgtagttggaccttgggttgggtcgatcggtccgcctccggtgtg

SEQ ID NO: 126469 - DNA, 249 bp, Glycine max
caagaaagaacttccttataaccaaaaccaacaacaactatggcaagttatcagaagcactacgatgatcagggtcgcaaggtcgacgagtatggcaatgttgagaggcaaactgacgaatatggcaaccggttcatgccactagtgtcacttatgtagccaccaaaagtgttggtggctacaatgatgacgctaataagcaacatgatattactggtgtctatcccgagaaagacaccggtagacatc

SEQ ID NO: 126470 - DNA, 248 bp, Glycine max
ttttggctttcctcttctacaattctaaaatcacgcaaatggcatccaagagaatactgaaggagctcaaggacttacagagagatccaccaacttcatgcagtgcaggacctgtgggtgaggacatgtccattggcaagcaaccatcattggtccaaatgacagtccctatgctggtggtgttttccttgtgaccatccatttccctcccgattatcccttcaaacctcccaaggttgcattcagga

SEQ ID NO: 126471 - DNA, 246 bp, Glycine max
ccaaaccaccctctgattcccgatcccaatgacttctccgctggtggcggagggctccgccatgacggcgttccggtcggtgatgctccgggtgcatcaggcggcggagagatccgggtccatacccagcgggtccgggtcgtggcggtttccaagacgaaacccgtcactctgattcaacaactctacgacgccgggcagcgatactttggcgagaactacgtccaagagatcatcgagatagct

SEQ ID NO: 126472 - DNA, 251 bp, Glycine max
ccaaaccaccctctgattcccgaacccaatgacttctccgctggtggcggagggcgccgccatgacggcgttccggtcggtgatgctccgggtgcatcaggcggcggagagatccgggtccaaacccgacgggtccgggtcgtggcggtttccaagacgaaacccgtcactctgattcaacaactctacgacgccggccaccgatactttggcgaaaactacgtccaagaaatcatcgaaaaagctcctca

SEQ ID NO: 126473 - DNA, 257 bp, Glycine max
atctatctcttgtttcaatttcaacaacggttactcctttttcgttttgagtttcaatcaagccatcatcatgtctaccgcatcgcaacccaaggccaagaaaacggcgtcgtccaagaagcccctctcccacctcccttcgccgtgatgatagcagaggcgattgcgagtctgaaagagagaaccggttcgagccaatacgcgataaccaaatacatcgaagggaagcacaaggagttgcctgcaacctacaagaa

SEQ ID NO: 126474 - DNA, 254 bp, Glycine max
atcttaacgaagatctgcatgccaccacggagacggaggacgacggtgaagggttgatcttcgttaagaccctcaccggcaagactataaccctagaagtcgagagctccgacaccatcgacaacgtcaaggtaagatccaggacaaggagggtatccccccagaccagcagaggctgatcttcgccggcaagcagctcgaggacggacgtacccttgctgactacaacatccagaaggagtcaactctccact

SEQ ID NO: 126475 - DNA, 243 bp, Glycine max
atgcaaaagagagcattacaaagccagaagactagtctagcagaatggctcttcagtgatggcatctgtgcgcctcaaacctgcccctttcactgttgagaagtcctcagttagaggccttcctccctctcaaggaactcctcttcattcagagttgtggccagtggtggcaagaagatcaagactgacaagccttatggaattaatggtggcatggctttgagggaaggagttgatgcatct

SEQ ID NO: 126476 - DNA, 244 bp, Glycine max
cacaaactcagggtagggcagagagagagagagagagagagagagagagagagaatgggagggtgggctatcgcggtgcatggtggcgctggtgtcgaccctaatctcccactcgagcgccaagaaaagcgaaacaacttctcacgcgctgtctcaatcttggaatctctgctctaaattctaatcttcgcgacatagatgtcgtcgaacttgtagtgagggaattggacacggatccgctgtt

SEQ ID NO: 126477 - DNA, 249 bp, Glycine max
gaggggtacaaatgtgacccaaatggagaatatgtgcgacgatggcttcctgaacttgctagattaccaactgaatggatacaccatccatggaatgcaccggagtctgtactccaagctgctggaatgaacttggttcaaattatcctcttcccattgtgggaatagatgcagcagaagtaagacttcaagaagcacttattcaaatgtggcaacaagaagcagcttcaagagctgcaatggaaaatg

SEQ ID NO: 126478 - DNA, 254 bp, Glycine max
aaaggcttcatgatacaaacaggagatcctttaggagatggcactggtgggcagtctatttgggggagagaatttgaggactaatttcataaaagtttgaggcatgataggcctttcacggtatcaatggaaatgcgggcccaaatacaaatggttctcagttctttatcaccacagttgctactccatggttggacaacaagcacactgtatttggtagagttgcgaagggaatggatgttgtacaggctata

SEQ ID NO: 126479 - DNA, 252 bp, Glycine max
ctcgagccggtctatcccttaaaggctctctcttgcagtcgcagaggaaaaccctagctactagtctcagttcgtttgagagagaaaaaatggcagagggtctcgttctccgcggaaccatgcgcgccccaccgacgtcgtgacggcgattgccactcccatcgacaactccgacatgatcgtgacggcgtcgcgcgacaaatccatcattctctggcacctcaccaaggaggacaagacctacggtgtccc

SEQ ID NO: 126480 - DNA, 248 bp, Glycine max
ctgagtcttgcaattgaagttgaagtcttgcccttctctcttcaactccaaacacaagacatcatcatccatggctgcctccgtctccactgtcggagctgtcaacagagctcttttgaacctgaatggtctggacctggggtttcagctcccagttcatccttctttgggagcagcttgaagaaggttattggctcaagggtccccaacacaaagatttcctctggaagcttcaagattgttgctgt

SEQ ID NO: 126481 - DNA, 244 bp, Glycine max
gtgaaggatgtgtgattaagaactgcaaaattcaccattctgtggttgggctgcgatcttgcatatcagaaggtgcaattattgaagacacgttattaatgggggcagattattacgagacggggctgataagaggtttctggctgccaaaggcagtgttccaattggtataggcaggaactctcatatcaaaagggcaattattgacaagaatgctcgaattggggaaaatgtcaagattatt

SEQ ID NO: 126482 - DNA, 242 bp, Glycine max
aaaatgttcctttcatcaatggaagccctcagaacacctttgtcccaggactcattgatctggccatcaaaaggaatagtttgattggaggagatgactttaagagtggtcagaccaaaatgaatcggtgttggtggatttcctagtaggggccggcatcaagccaacatctatagtgagttacaaccatttgggaaacaatgatggcatgaatctctcagcccctcaaaccttccgctcga

SEQ ID NO: 126483 - DNA, 248 bp, Glycine max
gagctttttgtgaggattccaaagcatggcttcccttgcagcatccactgctgctgcttcccttggcatgtcagaaatgcttggaaaccccatcaacctcagtggtgccacaaggccagctccattgcctctagccctgcctccttcaagactgtggctcttttctccaaaaagaaggctgcacctccaaaaaaagctgcagctgctgctcctgccaatgatgagcttgccaagtggtatggtcctga

SEQ ID NO: 126484 - DNA, 249 bp, Glycine max
gaagatcgtcgacgtacttgttgaccaaaacattgttcccggtatcaaggtcgacaagggtttggtgcccctagctggttcgaacgatgagtcatggtgccaaggtcttgatggtcttgcgtctcgtcagctgcatactaccagcaaggtgcccgtttcgccaaatggcgtactgttgtgagcatccccaacggtccctctgctctggcagtgaaggaagctgcctggggtctagctcgctatgctgca

SEQ ID NO: 126485 - DNA, 249 bp, Glycine max
caaagagagagagagagagaaaatgatgaagccatcgatgctcagatctctccactccgccgccacccgcggcgcctctcatctcttccgccgtgggtacgcctccgagccggtgccggagcgcaagtagccgttctcggcgccgccggcgggatcgggcagcctctctcccttctcatgaagctcaatcccctcgtttcgagcctctccctatacgatatcgccggaactcccggcgtcgccgccgat

SEQ ID NO: 126486 - DNA, 249 bp, Glycine max
ctctctcaccaaattcttattagaacgaaaaaagaaaagaaaagaaaaaagagcgatttttccctcaccaaagaagaaccaaaacaatggcggatcaactcaccgatgaacagatctccgagttcaagaagccttcagcttgttcgataaggacggcgatggttgcatcacaaccaaggagcttggaactgttatgcgttcattggggcaaaacccaactgaggcagaactccaggacatgatcaatga

SEQ ID NO: 126487 - DNA, 246 bp, Glycine max
ggaggaacagcaacaggggcaacagcagcagcagaagaagctatgtgataacatgtgcagcaggtgactcacagacagtggtgattggtcttgctgcagactcagggtgtgggaagagcaccttctgaggaggctgacaagtgtgtttggaggagcagcagagccaccgaagggtggcaaccctgactcaaacacactcatcagtgacaccaccactgtcatatgcttggatgattaccactcttt

SEQ ID NO: 126488 - DNA, 244 bp, Glycine max
attcagtagttcttctctctcgaattttcactcactttctgtgcatcaatggcggcgataagtctccggaaggggaacacgcggcttccgccggaggtgaaccgcgtgctgtacgttcggaacctcccttcaacatcaccagcgaggagatgtacgacatctttggcaaatacggcgccattcgccagatccgcatcggcaccaacaaggacactcgcggaaccgctttcgtcgtctacgagga

SEQ ID NO: 126489 - DNA, 244 bp, Glycine max
ttcagcaaaagtccctttacacaaccttttacaatattgacatggttaaagggcttgaaaattaaagacattgataaagaaggatatacttttgatgagctatgcatcaagacaaaacctaatgagcagagcacaagttttgtgcaaaatccttggaaacattaatcggttttgcaatttcaaagctgggaaagaacattcaagtactttcaagttcctttgtgaataagcaagagctatacaa

SEQ ID NO: 126490 - DNA, 243 bp, Glycine max
agggattgatatcctcaggaattctcacattgccaaacatttggcggttagacctaagctacaacaacttttcaggtctattacctgttgagatttctcaaatgactggtctgaagtttctatgttatcctacaaccaattcaatggatccattccaaccgaatttggaaacatgactcaactgcaggcactcgaccttgccttcaacaatttgagtggatctataccctcaagccttggaaa

SEQ ID NO: 126491 - DNA, 241 bp, Glycine max
agttggtgttagtcttggtgtagtgtagctagggagggatatatatctgagtaagatggcatcagagcttgaattgcccccaggcttcagattccatccaacggacgaggagctggtgttgactatctctgccgcaaatgcgcgtcgcagccaatcgccgttcccatcatcgccgaaatcgacctctacaaatacgacccctgggacttacccggattggctacttacggagagaaagagt

SEQ ID NO: 126492 - DNA, 244 bp, Glycine max
cgcagaaggttcatccaatctccgaatcctttaatcgcattgcaaccatgtcgaggagaaaggtcagagagccaaaggaggaaaacgtgactcttggcccagctgttagagatggcgaacattctttggcgtcgctcgcatatttgcctcctttaatgataccttcattcatgtcactgatctgtctgggagggaaacgcttgtccgcatcactggtggaatgaaggttaaggctgacagagat

SEQ ID NO: 126493 - DNA, 267 bp, Glycine max
gaactcggttcggctcgagtagggctaccaataccaataccaataccaattctattctatggcttgctcaagcgcccaaatacacggtctcggaaccccttcctcccgaaccctatttttaggtcagaggctaaataccaaggccgctttatcaagctcaagtccacacctagaagactccgccctctcagagtggttaatgagaaagtcgtcggtatcgatttgggaaccaccaactccgccgtggctgccatggaaggcggcaag

SEQ ID NO: 126494 - DNA, 244 bp, Glycine max
gcatagaagaagcagaaagagaagcattagcaaaagcaagaagaactagtctaagcagaaatggcctcttcagtgatggcatctgtggccctcaaacctgcccctttcactgttgagaagtcctcagtagaggccttccctccctctcaaggaactcctcttcattcagagttgtggccagtggtggcaagaagatcaagactgacaagccttatggaattaatggtggcatggctttgaggga

SEQ ID NO: 126495 - DNA, 247 bp, Glycine max
caaagagaagcattagcactaggagcagcaacaactagtctcagctgaaatggcctcttcagtgatggcatctgtggccctcaaacctgcccctttcactgttgagaagtcctcagtgagaggcctccctctctctcaaggaactcttcttcattcagagttgtggccagtggcaagaagtccaagactgacaaaccttatggaattaatggtggcatggctttgagggatggaactgatgcatctg

SEQ ID NO: 126496 - DNA, 247 bp, Glycine max
atggggagaggttacctgtgaaaatgttaaagttggtgctgataaaaatgtaaattatgtcagccccagggcagatgtacttctccccagaccactggaatccagcgtagttttagatgtacatatatagcatgtggtgttagacatgcttctctagtcactaggcaaggtgaagtttttacatggggcgaagaatcaggaggatgccttggtcatggtgttgggaagaatgtggttcaacctcgtc

SEQ ID NO: 126497 - DNA, 242 bp, Glycine max
gcgaggagaaagatggaggggaaggagcaggatgtgtcgttgggagcgaacaagttccccgagagacagccaattgggacggcggcgcagagccaagacgacggcaaggactaccaggagccgcgccggcgccgctggttgacccgacggagtttacgtcatggtcgttttacagagcagggatagcagagtttgtggccacttttctgtttctctacatcactgtcttaaccgttatggga

SEQ ID NO: 126498 - DNA, 245 bp, Glycine max
gaaaaaccctaagcaaagcaaagcggtaaggatggggaacacggagaagctgatgaaccagatcatggaattgaaattcacttcgaaatcgctgcagcgtcaatcgcgtaagtgcgagaaggagagaaatcggagaagctgaaggtgaagaaggcgatcgagacaggcaacatggacggcgctcgaatctacgcggagaacgcgatccgtaagcgcacggagcagatgaactacctccgcctggc

SEQ ID NO: 126499 - DNA, 240 bp, Glycine max
aaacaatagtgcatagcgtttttcattgtgcattattcaatggccaccacagcagctctatccggaaccatggtgagcacctccttcatgaggaagcaacctatgacgaccaagagcctaagacattccccaacgctctttttggtctgaaaggtggacgaggtggtcgtgtaacttgcatggcctcgtacaaggtgaagctcataaccccagaaggagaagtggagtttgaatgcccag

SEQ ID NO: 126500 - DNA, 241 bp, Glycine max
actactctctgttctcaagaacaaaacaaaagaagaaagaaatggcaggaggatcatacgaggaagccattgcagcgttgaccaagcttatcagcgagaaagccgacctgagtggcgtcgcgccgcaaagatcaagcagttgacggcggagctagaaaccgccaccgcaaacgggtcgacgccgtttaacccagacgagaggatccgaaccgggttcgcccacttcaagaacgagaaattc

SEQ ID NO: 126501 - DNA, 242 bp, Glycine max
attgaagttaaaagccttagccttccctacaactccaaacacaaagacatcatcatccatggctgcctccgtctccactgtcggagctgtcaacagagctcttttgaacctgaatggttctgagctggagcttcagctcccagttcagccttctttgggaccagcttgaagaaggttattgcctcaagggtccccaacagcaaagtttccggtggaagcttcaagattgttgctgtagaaga

SEQ ID NO: 126502 - DNA, 246 bp, Glycine max
gggttcaacaggtgagactcagattactccaacccatgtatctgatgaagaggcaaaccttttcgccatgcaactagccagtgcctcagtactccctatggttctcaaatcagctcttgagctgatctgttggaaatcatagccaaggctggccctggtgttcacctttccccctccgacattgcttctcggctcccaacacacaaccctgatgcacccgttatgttggaccgtatattgcgcctc

SEQ ID NO: 126503 - DNA, 244 bp, Glycine max
caagcaccaggtgccacaagttatataggttgcataggaaaggacaaatttggagaggagatgaagaagaaatgtacactagatggtgtaaaggttaactattatgaaatcgacaatacaccacaggaacttgtgctgtttgtgtggttggtggtgaaaggtcccttgttgccaacttatcagctgcaaattgctacaagtctgagcatttgacgagaccggaaaattgggcattagttgaaaa

SEQ ID NO: 126504 - DNA, 241 bp, Glycine max
ggctttaattctgcacattggaatgctctggttcttaatttatgtgttagattttggcttagctggtgcagctttggcatttgatatcacgagttgggggatcacagtggctcaacttgttatgttgtgatctggtgtaaggatggatggaatggattgtcatggctggcttttaaggatatttgggcctttgttaggctctctcttgcatcagctgtaatgctttgccttgaagtttggt

SEQ ID NO: 126505 - DNA, 239 bp, Glycine max
gaacctggctgatgccatggccagggccaaggtgtttgatatcgacctgcagaaacagttgaggccgtacatggaatccatggttccactccccggaatctatgacccggatttcattctgccaaccaaggagaccgtgccactaacgtaatcaggggcacaaagaaagaacaagttcaacaaatcatcaaagacattaaggagttcaaggaaagcactaaggttgacaaggtggttgt

SEQ ID NO: 126506 - DNA, 243 bp, Glycine max
caaaagagcactgaccaaaccattttattttatttttgaatcaagggtgagggccttccatggcttccgcttgtgcttcctctgcaattacagctgttgccatctctacgccgagttccggcagaagaatggatcaggaggttgttttcttagtggaaggaaattgagggtgaaaaaggagagagcagcaattggaggacgatcgatgggcactacagtgtgcgcagttgctgagcctgacag

SEQ ID NO: 126507 - DNA, 260 bp, Glycine max
ctcaccggtggagtcattgctaaacgcgagggtatttcatgggcaacaaaggacacgactcactcagccaattactttgggtcgctgacacaggcatcagctattagagttgggtctttccaacgggaggacatatatgccccattcaagagcctgcttccaatggtataccctgatgatgtcgtgtctgggggatgggatatcagtaacttgaacctggcatatgtcatggccaaggccaaggtgtatgatgtcgactg

SEQ ID NO: 126508 - DNA, 262 bp, Glycine max
gcagaagaacaagtagttgagaactaagaaggagaagcacatggcttcctcaatgatctcttccccagctgttaccactgtcaaccgagccggtgccggcatggttgctccattcactggcctcaagtccatggctggcttccccaccagaaagaccaacaatgacattatctccattgctagcaacggttggaagagtgcaatgcatgcaggtgtggtcaccagttggcaagaagaagtctgagactctttcctacctgcc

SEQ ID NO: 126509 - DNA, 257 bp, Glycine max
attgaatctcagaattctctaaaagagatctttcactgctctatgaagacagaacgggctgtgcttgattttggagatgtctctgctctcagatctcctcaaccttaacctctccgataccaccgagaacgtgatcgcagagtacatgtggatcggaggatcacgaatggacctgatgagcaaagcagggactcatcgaggagcagttagcgagtcttcagagcttcccaagtggaactatgatggttatcagtcac

SEQ ID NO: 126510 - DNA, 250 bp, Glycine max
gcgcggtgagtgagtgagagacggacgttgcacctccaccgtctcttcttctcagactttggctttgcttatcgattctgtctcctctgatctttgtcattctgggtttgtataagatggctgatgatgaggatattcctcccctcttttgtgaccttggccctggaatggtcaaggctgcatttgctggtgctgatgttcccacggctgtctttcccagtattgttgggcgacctctacacactggtgt

SEQ ID NO: 126511 - DNA, 263 bp, Glycine max
taaagccttagccttccctacaactccaaacagacagacatcttcatccatggctgcctgcgtctccactgtcggagctgtcaacagagctcttttgaacctgaatggttctggagctggagcttcagctcccagttcagccttctttgggaccagcttgcagaaggttattgcctcaagggtccccaacagcaaggtttccggtggaagcttcaagattgttgctgtagaagagaagaaagagattgaagagacccagcaga

SEQ ID NO: 126512 - DNA, 249 bp, Glycine max
accttctcatcccatgaagggagatgttgtcacaaacctagatttcatccggaagaggaagatttctagtgacttcaacatgatgatggatcagagaatctacacatgcgagcatccccagtgcccttacagcaaagttcgccttggtttccatgataggtctgctagggacaatcatcaattgaattgtgcatatagaaacagttctgcagattatggtggtggtcccaatatccatgctactgaggt

SEQ ID NO: 126513 - DNA, 257 bp, Glycine max
aacacaaagcacaaagcaaagctcatccttgagttaaaaaatggcagcagcttcttccatggctctctcatccccatccttggctggcaaggccgtgaagctgggcccatcagccccagaagtgggaagggtgatcatgaggaagaccgtcaccaagcaggtctcctcaggaagcccatggtacggcccagaccgagtcgagtacttgggcgcattctctggcgagtctccgtcctacctaaccggtgagttcccag

SEQ ID NO: 126514 - DNA, 256 bp, Glycine max
gtttaatcctgaataggccaactattagcaggagattcatgcctgagaaagggtctcctgaatatgatgcgttggctaagaaccctgagaaggagtttttgaagactattactggcaagaaagagaccctcattgaccttacaattatagaaattttatcaaggcacgcatctgatgagttctaccttgggcagagagatggtggtgactactggacttctgatgccgggccattagaggcctttaagaggtttgg

SEQ ID NO: 126515 - DNA, 258 bp, Glycine max
ttccaatatattccattctctctgtgtatttccctacctctcccttcaagatgcaatgctcgtcaagaccctcaccggcaagaccatcacccttgaggtggaaagctctgacaccatcgacaacgtcaagggcaagatccaggacaaggaaggaatccccccggaccagcaacgtctcattttcgccggaaagcaacttgaggacggccgtacccttgctgactacaacattcagaaggagagtactcttcacctcgt

SEQ ID NO: 126516 - DNA, 257 bp, Glycine max
ccgttcgaagcaccaaatcgtgatggcaccaaaggcagagaagaagccagcagagaagaagcccgcggaggagaagaaatcgacggtgggagacaaggctccggcggagaagaagccaaaggccggaaagaagcttccgaaggacggaggcgccggcggagaagggaagaagaagaagagaaacaagttgagcgtggagacatacaagatctacatcttcaaggttctgaagcaggttcaccctgacattggtatct

SEQ ID NO: 126517 - DNA, 238 bp, Glycine max
gctattatcatccgcagctgcttttattcgcaccgcaaacagtgagccatggccgtcggcatgaacaagcgcatctccaacgggaagaagggtggcaagaagaaggcagctgatccctttgccaagaaggattggtcatgacattaaggctccttctgtttttcaagtgaaaaatgttggcaaaaccctcgtctctcgtactcagggtgccgagaatggtggtggaccccattaccat

SEQ ID NO: 126518 - DNA, 243 bp, Glycine max
gagaaaagttagggttcacaacttttccttttccttttgcttgcgaatctgaatcacataatcaatcatccattcattagtcatcatgtacgtcggcgaagaaacatcacgctgaagagttcggacggcgaggctttcgaggtggaggacgaggtggcgctggagtcgcagacgatcaaagcacatgatcgcggacgactgcgccgacagcggcatccctctgccgaacgtgacgagcaagat

SEQ ID NO: 126519 - DNA, 257 bp, Glycine max
attctcttcacttttaagttagatagtttttcattgtttcatttaatctacaatggctgcttcaacaatggctctctcttcatcatcattggctggccaagctatcaagcttgccccctccacccctcagcttggtgttggaagggttagcatgaggaaaacagcctccaagactgtttcttctggaagcccatggtacggcccagaccgtgtcaagtacttgggcccattctctggtgagcccccatcctacctca

SEQ ID NO: 126520 - DNA, 257 bp, Glycine max
cgaggtcacgaggagcactagctagtttcacaatttccaaatggctaggggattgaagaagcatctcaagaggctcaatgctcctaagcattggatgcttgacaaactgggtggtgcatttgcgcccaaaccctcatctggaccacacaaatctagggagtgccttcccctcatactcatcctacgaaaccggctaaagtatgctctgacttaccgtgaagtcatcgctattctgatgcagagacatgttcttgttg

SEQ ID NO: 126521 - DNA, 247 bp, Glycine max
ggcggggatacgctgagtttacgcatatcaataagcggaggaaaagattctaccaaggattccccaagtacacggcgagcgaaccgaggccgagcccaccatgaacatcggtcgccctcggcgtccgggttgtagtctggagcagcgtcctcagtcgcggaccgggaccaagtcccctggaagggggcgccagagacggtgagagccgcgtagtgcccggagactgtcggacctagatgcgctgtcg

SEQ ID NO: 126522 - DNA, 244 bp, Glycine max
cttcgtgcgaggacatatacggttcgtgcagttcctaggcgatacgatgcattggcatatgctatacaacacaactaccaagaaaatgggtatctatgggtctccagtactatcatcacggcatcagattgccacggtgcaggtgcacagttctgcgttactaccttgataccaagttctcatgaaactactgattctcctgttgatgctattccaccaacaaatcatcggataattgactggt

SEQ ID NO: 126523 - DNA, 259 bp, Glycine max
tgattttgatgctaaaccaatggtcatgctccttggtccatattccacagggcgaacaaccttcatacaacatttactaagatgtgattatccaggagcacacattggaccagagcctataactgacagatttgttgttgtcatgtctggtccgcatgacaggagtattcctggaaatacaatagctgttgatgctgatatgccgtttagtggccttacaacttttggtggttcatttttgtcgagttccagtgttctc

SEQ ID NO: 126524 - DNA, 252 bp, Glycine max
ttgaattcgatgactatattggatgaactgcttccaatttcaattgagatgggcacgaggaatctgactgggatctggaactttactaacccaggagtggttagtcacaatgaaatcttggagatgtacagagattatgttgacccgaacttcacctggaacaacttcactctcgaggaacaggccaaggtgattgttgctccgaggagcaacaatgagcttgacgctgccaaattgaagaaggatttccag

SEQ ID NO: 126525 - DNA, 259 bp, Glycine max
ggggtggtgaagggagggccccaattggtagaaaaaaacccgcaactccttggggcatatcctgcacttggaagaagaagtagaaaaaggaagaaatatagtgataatttgattcttcgtcgtcgtactaaatagtagagaaaatagaaattgtttctacgtctttacaagaaaaaggagtaattaactgtgacacgttcactaaaaaaaaatccttttgtagcgaatcatttattaagaaaatagataacttaacaca

SEQ ID NO: 126526 - DNA, 257 bp, Glycine max
cgtcactgacgtcatccacgatcctggctgtggcgcgcctctcgctacggtcgccttccgccacccgttccgctacaagaagcataacgagctcttcatcgccgccgatggtctctacaccggccagttcatctactgtggcaagaatgccaccgtcgttgtcggaaatgtgttccctcttcggtccattcctgaaggatctgtcatctgcaacgtcgagcaccatgtcggcgaacgtggcgtcttcgctacggcgt

SEQ ID NO: 126527 - DNA, 256 bp, Glycine max
caaacacataatgatttcccaattggaacatgcatcagcagaacgaacattgacaacgaggactttgttaacttcattgtgaagcattttaaatgggctgtgtttggaaatgagttgaagtggtattggacggagccacagcaaggcaatttcaattacaaggatgctgatgatatgttaagcttgtgtcagaagcacaagatacaaactcgcggccattgtatcttctgggaagtggacgaaacgttcagcagtg

SEQ ID NO: 126528 - DNA, 259 bp, Glycine max
gtatccttcaagtaccttcaggtttcaaacctatgaagttggaactcatggcaccaacattgatggcagcaacaagttctgcgcactcttaaagcaactcctttcctaggctcaacgcaagggtgccaatgccaatgctcttagggatgttgtttccatgggagactgggaagtacaccatgggcactgatttgtggtatggaccagacagagtgaaatacttgggacccttttcagctcagaccccatcatacttgaa

SEQ ID NO: 126529 - DNA, 258 bp, Glycine max
acattttacatgcaaatgaacttacaagacgtctcaaggaagatggggtagatatttctgcaaattctcttcatccaggagtaattgccaccaatctttcccgtcatatcagtccagtgaacggtctaactaaagctattgcaagactcgtgcttaaaaatgtccagcagggagcagcaacaacatgctatgtagcattgcacccacaagtgaagggaactagtggctaatatttttcagccagtaatgtggccaaaa

SEQ ID NO: 126530 - DNA, 252 bp, Glycine max
gtgaagctggtgttccatttttctcaatatcaggttctgagtttgttgagatgtatgttggtgttggtgcttctcgtgttcgtgatttgttcaagaaggccaaagagaatgccccttgcattgtctttgttgatgaaattgatgctgttggaagacaaagagggactggaattggtggtgggaatgatgaaagagagcagacgctcaaccaacttttgacagaaatggatgggattgagggtaacatggtat

SEQ ID NO: 126531 - DNA, 250 bp, Glycine max
gtactggtaaaggtgcattcaaaatagctgtagatatggttcatgaggggcttgatgatattcgttctgcactcaagatagtacgtgccacagcatcttgatcatcttctccacccacagtttgaggatccatctacttacaaggataaagtgatcgccgttggtttgcctgcatcccctggagccgcagtagggcaggttgtattcactgctgcatgatgatgaagatggcatgcacaggagagagtgt

SEQ ID NO: 126532 - DNA, 274 bp, Glycine max
cctagctttgcttatagttcctgtattaatttttctctccctgagattaccaagctctgcaactttgcttctcaacatggagtatcgtctcctacccatttttactttactcaatcttgcactggtggcaatccatgctgctttacctcctgaagtttactggaagtcggtgcttcctactacgccaatgccaaaagccatcactgatatcctttaccccgattgggtggaagagaaaagtacctcagtgaatgttggaggcaatggcgtaaac

SEQ ID NO: 126533 - DNA, 273 bp, Glycine max
ggtaaagaacaaactagattagctcagaaagcagacactaaggccatccatgacatatttattgctagaaacaaaggtatagaaaatatgataactattgacttacatgggcagcacgtgaaacaagcaatgagaatgctgaaactacaccttctgtttggatcatatgttccctctgtccagactctaagggttattacaggatgtggatcacatggtgttggaaagtctaagctgaaacaatcagttataaaccttttagatagagaagca

SEQ ID NO: 126534 - DNA, 267 bp, Glycine max
tgaagaccgtgagaatcacaaacgtattgctcccttgcttcgttttttctcgtcccaaagtgatgaagaactgatcagctaggatgaatatgttgagaacatgaaacctgatcaaaaggatatttattacattgctgctgacagtgtgactagtgcaaagaacacaccgttcttggagaatattgcagagaaggttcaagaacttctgtttggggtggcccaaatagatgaagttgctatacaaaatcttaaatcatacaggaaaag

SEQ ID NO: 126535 - DNA, 272 bp, Glycine max
gattcagccacagttggaaaaaaaaaaaaagttgttcgagatggcacgtacgaaaccaactgctcgaaagtccaaaggaggaaagacacctaggaagcagctcgcaaccaaggctgcacgtaagtctgcaccaactactggtggtgtgaagaagccacatgcgttatcgtcctggtaccgttgctcttcgtgagattaggaaataccagaagagtaccgagcttttgatcaggaagctccccttccagaggctggttcgtgaaattgctcag

SEQ ID NO: 126536 - DNA, 271 bp, Glycine max
agaataccttcttaggaagggatggattccttgcttggaattcgagttggagcacggtttcgtgtaccgtgagcacaacaggtcaccaggatactacgatggacgctactggaccatgtggaagctgcctatgtttggttgcactgatgcttctcaggtgttgaaggagcttcaagaggctaagactgcataccccaacggcttcatccgtatcatcggattcgacaacgttcgccaagtgcagtgcatcagcttcatcgcctacaagccc

SEQ ID NO: 126537 - DNA, 270 bp, Glycine max
ctccaaaaaaagctgcagctgctgctcctgccaatgatgagcttgccaagtggtatggtcctgacagaaggatcttcttgcctgaaggtctcttggaccgatctgagatcccagagtccttgaccggagaagtccccggagactatggttatgacccatttggtcttagcaagaagccagaagatttttccaaatatcaggcatttgaattgattcacgccagatgggcaatgcttggtgctgctggattcatcattcccgaggccttca

SEQ ID NO: 126538 - DNA, 261 bp, Glycine max
gtgagcgtgaaagatgccttgggtgaggctttcagagtctccaaggctcgacgttgctattgacatgggtaatccatttctcaatctcactgttgatggtttccttaagatcggagctgtcgcagccacgcgatcagctgctgaagatacttatcatattatccaaaaggggaatatctcaagtcgtgatttcgagaaaactttgaagaagatgtgtaaagaaggtgtatattggggacctatagctggcgtttatgttgg

SEQ ID NO: 126539 - DNA, 272 bp, Glycine max
aagcaacaaaggaatacatccatggcgaacaatatagatcagactccaaaacagttaaccaacaagcttacttttatgccagagacctcgaagtccatcccaaggacacatttgtgttcagtatagatggcaccgtactctctaatattccatactacaaaaaacatggatatggggtggagaaatttaactcgaccttgtatgatcaatgggttaacaagggcaatgcaccggcactgcccgagactcttaagaattacaacagctggtgt

SEQ ID NO: 126540 - DNA, 260 bp, Glycine max
gaagtttgatgaaggttgtgaattggcctgctttctcaagaacttgggtgatgttggtggggcccactgataatgcattctcaagcctcaaagcagggacactaaactccataaactcacaagaccaaatgcagttgatacagttccacattctccccactctctacaccatctcacagttccaaaccgcaagcaaccctttgcacacgcaagctgggaacagtgatgatggagagtacccttaaatgtcaccactcagg

SEQ ID NO: 126541 - DNA, 272 bp, Glycine max
tgcaattgaagttgaagtcttgcccttctctcttcaactccaaacacaagacatcatcatccatggctgcctccgtctccactgtcggagctgtcaacagagctcttttgaacctgaatgggtctggacctggggtttcagctcccagttcatccttctttgggagcagcttgaagaaggttattggctcaagggtacccaacacaaagatctcatctggaagcttcaagattgttgctgtagaagagaagaaagagattgaagagacccag

SEQ ID NO: 126542 - DNA, 260 bp, Glycine max
gtttctattcctcactaggagctcctctccactggttcttcatctgcatgcacacagttgcatagttttggaaaccaagaattcctgcagaagggtagcatcaacaagcagttctgaaaatggagatcaccaatgtcagagagtatgaggctattgcaaagcagaagttgccaaagatggcgtttgactactacgcatctggtgcagaggaccagtggactctgcaagagaacagaaatgccttttccagaattttgttt

SEQ ID NO: 126543 - DNA, 241 bp, Glycine max
gaaggagcaaaagcaatggcgccgacgaagccgagaaccacgacaaggagaccctgatttggttagggggattggcaagtattcgaggtcgcagatgtaccacaagaggtgcatctgggccatcaaggccaaaaacggtggcgttttgccccgccacgatcccaagcccaagcacgaggccccggcccagaagccgcccaagttctaccccgcggacgatgttaagaagccctcgtcaaca

SEQ ID NO: 126544 - DNA, 254 bp, Glycine max
cttgatgatgcacaattggcaaaggaagtagaataccttcttaggaagggatggattccttgcttggaattcgagttggagcacggtttcgtgtaccgtgagcacaacaggtcaccagcttccacatggaccagtagcgtccatcgtagtatcctggtcgacctgtggtgctcatggtacacgctaaggtgctccaggaggttcacagggtactacggtggacgccatggctacgtcggagctgccggtttctg

SEQ ID NO: 126545 - DNA, 272 bp, Glycine max
ccaaaacaaacagagcaaaagggtattcaaaagcagaatctttgacaggccagagacagtaaaactgtaaaacgttacctttccggcgtcttgccatgcgactcccgtgagagcctcaacggccaaagcaccgagagaacccagcattgcccaccttccatgaatgagttcgcactcacggaacctctgaatcccgaaaacctccgagtagggctgaaacggcgtcggcttaacctcggcgacctcaaccctggttccgatcacatcgccgg

SEQ ID NO: 126546 - DNA, 271 bp, Glycine max
tgcacattcttcatcacttcattcaacatttctctctcccttagctagtctttaccaatggctgctgcggttagtgctgcagtctcttttccatccaccatgtctacctctctcccaagcaggacctccatcattaccccagagagagttgtattcaagaaggcttcattgcaatacagagatgtttgtagcagtggaagggtagtttccatcagagctcaagtcaccactgaggctccagccaaggttgaaaaagagtccaagtaacgga

SEQ ID NO: 126547 - DNA, 274 bp, Glycine max
ctaggaagttggaagtcatggcagcaacattgatggcagcaacaacaagttctggtactcttaaagcaactcctttccttggccaaggcaagggtgccaatgccaatgctcttagggatgttgtctccatgggaactgggaagtacaccatgggcaatgatttgtggtatggaccagacagagtgaaatacttgggacccttctcagctcagaccccttcatacttgaaaggagaattccctggggattatggatgggacatgctggcttatct

SEQ ID NO: 126548 - DNA, 274 bp, Glycine max
tctgttttcactgcaagagcagaaggtggctgggacactgcaaggattgatcaggctcatccagttggggtcacttcggtgtcgtgggcgccatcgatggcacccggagcccttgtcggtgctgggttgcttgatcctgtacagaagctgtgctctggtggttgtgataatactgtgaaggtatggaagctaaacaatggactctggaagatggactgcttccctgctcttcagatgcacatggattgggttcgagatgttgcttgggcaccca

SEQ ID NO: 126549 - DNA, 267 bp, Glycine max
caaggatgcaactctcaaggatgttgtcactgtgattcgcgctgatgaggctcatcacagggatgttaaccactttgcttctgtaagtttccttttcgtctcataatggacaacaacaaaaattgttaggaacacattcttcaacatattttttttaaagaaatttaacatattttcttattagttggaatataatttattgaaaactataagatcccaaaataagttcattaaatatcacctgagatccacgaaatactttcaata

SEQ ID NO: 126550 - DNA, 267 bp, Glycine max
aaattttctctgaagaagaagcaacaatgtctggtcgcggaaagggaggcaagggtttgggaaagggtggagcaaagaggcatcgcaaggtgctccgcgacaacatccagggaatcacgaaacccgcgattcggaggctagccagaagaggcggcgtgaaaagaatcagcggcttgatctacgaggaaaccaggggtgtgctcaagatcttcctcgagaacgtcattcgcgacgccgtcacctacaccgagcacgctaggagaaaga

SEQ ID NO: 126551 - DNA, 264 bp, Glycine max
cgccaaccttctgcatcagttgtgagatgcaaccccatcaccccatcaggcctcaccatcagagctggttcctatgctgatgagctcgttaagaccgcgaaaacagtggcttcaccagggaggggtattttggccatggatgagtccaatgctacctgtgggaagcgtttggcttcaattgggctagagaacactgaagctaaccgccaggcataccgtaccctcctcgtgacagttccaggccttggtcagtacatcctggtg

SEQ ID NO: 126552 - DNA, 276 bp, Glycine max
gttgttaagtccgaagaaaaggaacagcctttggtcacggaggctaatggagaaaagaaggaggatcccaacgcgctttccaacttcaggatttcggaacccttgaggcaaaaattgaaggagaagggtatcgaatcactgtttcccattcaggccatgaccttcgacaccgttctcgatggttctgatttggtcggtcgggctcgcaccggtcagggtaaaactctggcatttgtgttgcccatattagagtctttaataaatggtccaacaaaa

SEQ ID NO: 126553 - DNA, 271 bp, Glycine max
tcacaattctctgtgaactttctagaatctcgttcttcctttgccttctccttcttcttcaaccctttttctttctctttctttcgcactttcattctctaaaaaaatctaagtccctttagtcttcatcttctgtactaatccacgtatggactctaaacgcctcttgatggttctcaaggtttttctgaaggttcctcctacctcatgcagtgcaggctctgttgctgaggacatgtttcactggcaagccacaatcatgggacctgct

SEQ ID NO: 126554 - DNA, 268 bp, Glycine max
caacggcttgaacaggagtatggagctcatgttatatcaactgttcctactgtgccttatatatttgagcttcatgaccgaagcaagttagaagttcagaatcccgcttcattaccctctaatcctaagcataaagtgacagcctgttgggaacctacagtattagctactataatcattcctagtgagtatgtgggacctgttattacccttgtctctgagcgtaggggtcagcagttggagtactcattcatcgacagtcaacggg

SEQ ID NO: 126555 - DNA, 261 bp, Glycine max
aaattcgatttgtaccaaattttcttcacaaaatgtctggtcgtgggaaaggtggcaagggtttgggaaagggaggtgccaagaggcacagaaaagttcttcgtgataacattcaaggtatcacgaaacctgcgattcgtaggttagcgagaagaggtggcgttaagaggatcagtggtttgatctatgaggaaaccagaggagttctgaagattttcttggagaacgtgattcgagatgctgtgacctacaccgagcacg

SEQ ID NO: 126556 - DNA, 258 bp, Glycine max
ggctaatggaaaggatttggccctgcatgcatgcgccggggagcctcccctcacattcctcgactcacttcttcttggagagtgggaagatcgcatgcagagaggactttttcgctatgatgttaccgcctgtgaaaccaaggtgattcctggtgaatatggtttcgttgctcagcttaatgagggtcgtcacctcaagaagagaccaactgagttccgagttgacaaggtccttcaaccctttgatgaaaacaattc

SEQ ID NO: 126557 - DNA, 270 bp, Glycine max
gctaaagatagtttggaggatattggaggatggtgttgaccctgatcagccaggagtagttcagaagtcatctcctttgtatccaaagttttcagctttctttaaaagagtaaccatttctttggatcagagactttatcccgataatcacattattttgtgggagaatgctcgatcacctgctccacatgaatgttttgaagtaaaacagaaaggggataaagaatttacagtgaatatacggctggaaatgaatttgtgccagagagt

SEQ ID NO: 126558 - DNA, 273 bp, Glycine max
ctcgagccgcacaaggcagaaagcaagctcatcctagagttttaaaaatggcagcagcctcctccatggctctctcttccccatccttggctggcaaggccgtgaagctgggcccatcagcccccgaagtcgggagggtcagcatgaggaagaccgtcaccaagcaggcctcctccggaagcccatggtacggcccagaccgcgtcaagtacttgggcccattctctggcgagcccccgtcctacctcactggcgagttcccaggtgactacg

SEQ ID NO: 126559 - DNA, 222 bp, Glycine max
tctattgctcactacgagctcctctccactggttctgcatctgcatgcacacagttgcataggtccgactaccaagaattcctgaagaagggtagcatcaacaagcagttctgtcaatggatatcaccaatgtcagtgagtatgaagctattgcaaagcagaagttgccagagatgtcgtttgactactacgcatctggtgcagatgatcagtggactctgc

SEQ ID NO: 126560 - DNA, 269 bp, Glycine max
ttcacaaggaatagcatcctatcccctgttgctgttacaggtaacacatttcaaatgtggaggggtttccctgggagttggcatgcaacatcatgtagcagatggagcctctggtctgcacttcatcaatacatggtcagatgtggctcgtggcttggatgtttccattccaccattcattgatcgtacaatacttcgtgcccgtgatccacctcgacccgtttttgatcacattgaatacaagcccccaccagccatgaaggctcaac

SEQ ID NO: 126561 - DNA, 265 bp, Glycine max
ttggcatcgaggttgaatctcatcggagagagaaaaaccataaacatgtctggaagaggtaaaggaggtaagggtctcggaaatggaggagcgaaacgacaccgtaaggttctgaaggataacattcagggcataacgaagcccgcaattcgccgtctcgcgagacgtggcggcgtgaagcgtatcagtggtctcatctacgaagaaacccgcggtgttctcaagatcttcctcgagaacgtcattcgcgacgctgtcacctaca

SEQ ID NO: 126562 - DNA, 255 bp, Glycine max
gcgcatacaccaccatatatcacatacagagtaatttcaaaggatggttatatgcatgatcctgtacccataacagtatcagatcccatcacaatgcacgactttgccatcacagagaattatgcaatatttttggatcttcctttgatttttaggccaaaggaaatggtgaagaataagacactgatattctcatttgattcaaccaagaaagctcgttttggtgtgctacctcggtatgctaaggatgaaaag

SEQ ID NO: 126563 - DNA, 259 bp, Glycine max
  unsure (1)..(259): unsure at all n locations
cgcagttccttgatctctcctctcaagatgcaacacaacgtgaanantttgaccggcaagancaccanccttgaggtgnggtcctccgacaccattgacaacatnnaagctaagattcaagacaaggaagggatcccacctgaccagcagagacttatctttgcgggtaaacaacttgaggatggtcgcacccttgccgattacaacatccaaaaggaatcaaccctgcatctcgtgcttcgcttcaggggtggcatgc

SEQ ID NO: 126564 - DNA, 222 bp, Glycine max
acctaatgcagcatcgctaatctcttcattccatggctttgcgcaaccagcataccgtggatcaccctagtttcaaacgcggtatcgtcggcgatggtggctaagcaaagacggcctttgtgaacaggcatatcagcggagaattcgataggaaatatgagccaaccatcggagtggaagttcaaccattggatatcttcacaagctgtggcaggatacgat

SEQ ID NO: 126565 - DNA, 265 bp, Glycine max
gctgtctgctgttagatctgtacccgcctagccattgatttggaaaagtccaacttcaaggatgagtaagcttcagagtgatgctctaagagaagctatctcaggaatcatggctgattccaaggaaaagaacaggaaatttgtggagaccattgaactccaaattgggttgaaaaattatgatccccagaaggacaagcgtttcagtggctctgttaagttgcctcatatacctcgccccaagatgaagatttgtatgcttgga

SEQ ID NO: 126566 - DNA, 267 bp, Glycine max
tcggctccgagaatacttctttcgaagggattctctccttgcttggaagtctcgttggagcacggtttcgtgttccgtgagtacaacaggtcaccaggatactacgatggatcgtatcggatcatgtggaagctgcctatgtttggtcgcactgatgcttctcaggtgttgaaggagcttcacgatgctaagatcgcataccccaacgtcttcatccgtatcatcggattcgacaacgttcgccaagtgcagtgcatcagcttcatc

SEQ ID NO: 126567 - DNA, 262 bp, Glycine max
ctcgagccgaacatgtatacattgataactggaaaggttattgacctgagtgtggatcttagtgctgctagtgctgcagaagagtaaagaaaactcggtgatgtccttccttcatgatctgttgctgatgggatccgtaatggacttgataatgaatgttattaacgtttataataaattgatataaaatatttctttttttttttaaacaagatttgtgtggctggggaatttttcccgtccagaagcctgttgtgcgtaa

SEQ ID NO: 126568 - DNA, 220 bp, Glycine max
ttcacttcaagaaggagaaatattgacaagatatccagctttgtatggtgaacttgccaaaggctagagccccaagtttatggtgtttgcttgctcagactcaagggtgtgcacatctcatgtgctagatttccaaccaggagaggcctttgtggtcagaaatgttgctaacattgtcccaccatatgaccagtcaaaatacgctggaacttgggcagca

SEQ ID NO: 126569 - DNA, 261 bp, Glycine max
ctagtttcttacaaggctctactctactgcttcaccttctgctctagaaaattcagtggtgatacatggcttcggctactctctctgtagccaaaccagcccttcaggcaaatgggaaaggcttctctgaattctctggcctccgcagctcatcaggcttccttcccttttctagaaaatcttcagaggatttccattctgtcattgccttccagacctatgcagttggaagcagtggaggatacaagaagggtgtgacag

SEQ ID NO: 126570 - DNA, 269 bp, Glycine max
ttcacttcaagaaggagaaatatgacaagaatccagctttgtatggtgaacttgccaaaggccagagccccaagtttatgatgtttgcttgctcagactcaaggatgtgcccatctcatgtgctagatttccaaccaggagaggcctttgtggtcagaaatgttgctaacattgtcccaccatatgaccagtcaaaatacgctggaactggggcagcagttgagtatgctgttttgcatcttaaggtgtctgagattgtggtcattgga

SEQ ID NO: 126571 - DNA, 264 bp, Glycine max
cggctcgagctcttcatcttgttctatctgtgacgagcatcatggcctcaagagcagtgttattgttggctatgtgtgtgcttccggcgatggttgtggccattcgcccagcaaagaaccctttttgcgtgaagggtcgtgtctactgtgacccttgccgtgctggttttgagacctcagctaccacctacattgctggtgctgagattatgttgcaatgcaagagcagggttagcaacgaggttgtgtacacgaagaggggta

SEQ ID NO: 126572 - DNA, 272 bp, Glycine max
gtctcaagcaaccatggcaatggcaacccaagcctgtctcttaaccccacccctctccggtctcaaagccagcgaccgcgcctccgtgccatggaagcaaaactccagcctctccttctccagcccgaagcccctcaagttctccagaacaatcagagcagcagccgccgacgagaccacagaggcaccagcaaaagtagaggctgcaccggtcgggttcaccccaccagaacttgacccaaacaccccttccccgatcttcgggggcagca

SEQ ID NO: 126573 - DNA, 277 bp, Glycine max
gatcttgtcatccgacctttgccatgacaggtgcgcttgcttggcaggtcaaaatatgttaataaaaaaagttttattggtttagggagagatcgcacgggagttgcccggggtctctctctcgtgtggtgtgtggtgtttgctgtgctctccttttcgttatgccttttattattacctatctgtcgctccactccgtattacgactctggatcagagggatacatcagaggattcgctccaactcctatcgaataaggtattatctgtcaattta

SEQ ID NO: 126574 - DNA, 276 bp, Glycine max
ctctttctctagtcctgttatttctcagcgcgtaaagcatggctttgttggtggagaaaaccacgagtggtcgcgagtacaaggtcaaggacctttcccaggcacacttcggccgcctcgagagagagctggccgaggttgagatgcccggcctcatggcctgtcggaccgagttcggcccctcccagcccttcaagggggcccgcatcaccggctccctccacatgaccatccagaaagccgttctcattgagaccctcaccgcccttggcgccg

SEQ ID NO: 126575 - DNA, 277 bp, Glycine max
tcaagtccaacctacccctttttcttctcccaccaacttcaccgtcttcttcctcgatcatgtctcacttcaagggcaagtaccatgatgagcttattgtcaatgctgcttacattggcactcctggatcagggtattcttgctgctgatgagtcaacagggacaattggcaagcgtttggccagcatcagtgtagagaatgttgaatccaacaggcgtgctcttagggagctgcttttcaccgctcccggtgctcttaaatatctcagtggtgtca

SEQ ID NO: 126576 - DNA, 99 bp, Glycine max
tgagaactaagaagaaggaaatggcttcctcaatgatctcctccccagctgttaccaccgtcaaccgtgccggtgccggcatggttgctccattcaccg

SEQ ID NO: 126577 - DNA, 275 bp, Glycine max
ctaaattactgatacaggaacagctagcagagaaacaaagttacaagtaaagtaaattaagaagatcattaatggcttctcttgcaaccttagctgctgttcaaccagctgcgctcaatggccttgctggaagttccctctctggaactaagctctctttcaagctctctcgccacactgtcaaatccaagaacttcaggagtggtgccgtggtagcaaagtatggtgacaagagtgtgtactttgatttggaggatctgggcaacactacgggg

SEQ ID NO: 126578 - DNA, 275 bp, Glycine max
cataacacaaagcacaaagcaaagctcatccttgagttaaaaaatggcagcagcttcttccatggctctctcatccccatccttggctggcaaggccgtgaagctgggcccatcagccccagaagtgggaagggtgagcatgaggaagaccgtcaccaagcaggtctcctcaggaagcccatggtacggcccagaccgagtcaagtacttgggcccattctctggcgagcccccgtcctacctaaccggtgagttcccaggcgactacggctggg

SEQ ID NO: 126579 - DNA, 275 bp, Glycine max
gaactacctccccaccatcaacacccaaagctgatattctacttaaactacttcttgtcagtacataaaatgatataggacattaaaacatttatatatatcgtacattaaattattttccccaagcatataagcatgtaatatatatctaatgatttaggacatacatttaaactcaactataaattcacaacaacatgtctattctcaaatacattaagataatgcttattagacatatctgtgttattagacatgcaccattaagtcataaa

SEQ ID NO: 126580 - DNA, 278 bp, Glycine max
ctttatttaggtgacaaaactactcacagagaaagacactcggagaccttgcaagacttcatcaatggctgtcaaagtttatattgtgtactactccatgtatgggcatgttgagaaactagcagaagaaataaagaaaggggcttcctctgtggaaggtgttgaggccaaattatggcaggtacctgagacgctgcaggatgaggtgctcggtaagatgagtgcaccacccaagagcgatgtaccagtcattaccccgaatgaactatccgaggctg

SEQ ID NO: 126581 - DNA, 248 bp, Glycine max
ctaaattctaaggaaactcctcagatcgaaatcgaaaccatgtggcggagactcttctcttcttcaaacctcaaatccctacacacagcactctctccttctcgtccccgactcgccgcccctctcctcacccgccacgtgaccgctcattcaggtgcttcttccgtcaaaaggagggttgaagatgtcgtgccaattgctaccggccacgagcgtgaggagattcaggctgatcttgagggaaggga

SEQ ID NO: 126582 - DNA, 265 bp, Glycine max
tgttactggagcaaacaaagggataggatttgagactgtaaaagagctggcctcaaatggagtcaaggtggtgctcacagcaagagatgagaaaaaaggccatgaagcctttgagagattgaaagagtgtggtttctctgatttggttatttttcaccagcttgatgtcactgaatctgctagtatttcttcactagtagagtttgttaagaccattttgggaagcttgataattggtgaacatgcaggatcatggtgccatctg

SEQ ID NO: 126583 - DNA, 270 bp, Glycine max
atgtactcatatgaagtgtacttttggtgggatatggaatggtggagggggggatggacagaagaacctttttgttgcctctttcttctttgaccgggctgctgaggctggttttgctgatccaaacttgccagtcgcgatagttcgtcctgcagattttgaggatgcagctaagcaagcatgccaaacaaaacttgagaatgccaaatccacttttcctcgtgttgatgagggcaacttccctatctttgcatggatcttatataccag

SEQ ID NO: 126584 - DNA, 276 bp, Glycine max
cggcctcggctgggatgccaccgccgaaaccctaacctccgtgttcgggaaatacggcgagatcgaggactgcaaggccgtcaccgacaaggtctccggtaaatcaaagggttacgcctttatcctcttcaagcacagagacgatgctcgaaaggcgctgaaacaccctcagaagaagatcggaaaccgcaccacctcgtgccagctggcctccgctggccccgttccggctccaccgccgagcgtgaccccggtgtctgagtacacccagaggaa

SEQ ID NO: 126585 - DNA, 266 bp, Glycine max
gtttgttgttgtaactcgttcttcttcttttgttgttctgtgtttgtgtttgtattttctctcacctgaaaatgtcttactgcggtggtaactgtggttgcggaagctcctgcaagtgcggcaacggctgcggaggctgcaagatgtacccagacttgagctacactgagtcaaccaccaccgagaccttggtcatgggagtggcacctgttaaggctcaatttgagggtgctgaaatgggtgtgcccgctgagaacgatggctgc

SEQ ID NO: 126586 - DNA, 274 bp, Glycine max
tccattctctctgtgtatttccctacctctcccttcaagatgcagatcttcgtcaagaccctcaccggcaagaccatcacccttgaggtggaaagctctgacaccatcgacaacgtcaaggccaagatccaggacaaggaaggaatccccccggaccagcaacgtctcattttcgccggaaagcaacttgaggacggccgtacccttgctgactacaacattcagaaggagagtactcttcacctcgtcctccgtctccgtggtggcatgcaga

SEQ ID NO: 126587 - DNA, 275 bp, Glycine max
cctgagctggggccaagaggggaaggtgagaagcgaagatgagcagcgacacaaaagccaacagcaacgttggagggggatccagatcgaggttaaatcactacctctatagcggtgacaagaaacatgtcttcgttggtttaactctcatcaccgctgtctttaccatcccatggttccttatgaacagagggaccaaacaccaatctcatcaagattacttggaaaaagctgataaagcaaggagccaaagactctcatccagttctgcttct

SEQ ID NO: 126588 - DNA, 276 bp, Glycine max
ctagaaatcccatattttccccccacattaactcacccaacccctctttctaaaaggcctcaaggatacactccggacttaattacgttattttgttagggtcaccgtttcgagatattctaaacttgtactgaaaaatatggagggaaaagaagaggacgtaagagttggagccaacaggtacggagagaggcagccaatagggaccgctgctcaggctaaagactacagagagccaccgtcggcgcctctcttcgaaccgggagagttgtcatc

SEQ ID NO: 126589 - DNA, 217 bp, Glycine max
gttccctccatccttccacaaaatgcttatgatcgtgctaatgctcgattttggtttgcctacattgatgagaagtggtttacgtccttgagaagtgttcaagtggctgaagatgatgaggcaaagaagccacactttgagcaagcagaagaagggcttgagaggttggaagaagtgttcaacaagtacagtgaagggaaggcctatttcggaggag

SEQ ID NO: 126590 - DNA, 271 bp, Glycine max
agttggtggaggaccacttggtgaaggacttgacccaatctaccctggtggtgcttttgaccctcttggtctggctgatgactctgatgcattcgctgagttgaaggtcaaggaactcaagaacggtcgcttggctatgttctccatgtttggtttctttgttcaggctattgtcactggcaagggccctattcagaacctttacgaccacgttgctgatcctgttgccaacaatgcttgggcttatgccactaactttgtccctggacaa

SEQ ID NO: 126591 - DNA, 273 bp, Glycine max
ctcgagccgttttcatttcatcgtgcattcaatggccaccacagcagctctatccggaaccatggtgagcacctccttcatgaggaggcaacctatgaccaccacaagcctaaagacattccccaacgttggtgaagctctttttggtctgaaaagtggacgaggtggtcgtgtcacttgcatggcctcgtacaaggtgaagctcataaccccagaaggagaagtggagtttgaatgcccagatgatgttttcattgttgacaaggcagagga

SEQ ID NO: 126592 - DNA, 266 bp, Glycine max
gccttacctttccctccacagccactgcagagatgtattttctcacttctcagcactcagcagcgatatcagttgaagaaacagaaacaaacaaaagaggcagaagatgttgtgggtggacaaatatcgtcccaaaaccctcgaccaggttatggtccacaccgacatcgctcaaactctcaagaaattggtaacggaacaggattgcccccatttactcttctatggcccatctggctccggcaagaaaaccctaatcatggctc

SEQ ID NO: 126593 - DNA, 264 bp, Glycine max
actcgagccgaatcggctcgagaggaacacagaaatttggctagggaagcagtaaggaaatcactggtccttctgaaaaatggtgaatctgctgacaagcctttactgcctcttcctaaaaaggcgccaaaaatacttgtggctggaagcatgctgataatctaggatatcagtgtggtggctggaccatagaatggcaaggagtcagtgggaacaatcttctcaaagggactacattctcgctgctgttaaagacacgttgat

SEQ ID NO: 126594 - DNA, 271 bp, Glycine max
gaaggaatcaacccttcacctcgtcctccgtctccgtggtggcatgcagatcttcgttaagaccctcaccggcaagactataaccctagaagtcgagagctccgacaccatcgacaacgtcaaggctaagatccaggacaaggagggtatccccccagaccagcagaggctgatcttcgccggcaagcagctcgaggacggacgtacccttgctgactacaacatccagaaggagtcaactctccacttggtgttgcgtcttcgtggtggt

SEQ ID NO: 126595 - DNA, 267 bp, Glycine max
gagagagagggaagacggttgtggggattcgatgggggccaccgttcactcgccgctagtcacttatgcttctctcatatctctgcttacactctgtcctccgtttgtcatacttctatggtacaccatgactcttgctgacggatctgtttccgagacattccattatttaaggcagaatgggttgcagggtttgctacatatatggcccacccccactcccaccgcctgcaaaatcattgcagtctatgctgcatttgaggcagc

SEQ ID NO: 126596 - DNA, 270 bp, Glycine max
agaacaagtagttgagaactaagaaggagaagcaaatggcttcctcaatgatctcttccccagctgttaccactgtcaaccgtgccggtgccggcatggttgctccattcactggcctcaagtccatggctggcttccccaccagaaagaccaacaatgacattacctccattgctagcaacggtggaagagtgcaatgcatgcaggtgtggccaccagttggcaagaagaagttagagactctttcctacctgccagaccttgatgatg

SEQ ID NO: 126597 - DNA, 275 bp, Glycine max
ttcatcaactttacttgacaacaatattgtaaaattcaaaatctagtttcatacttttattcttcttcttgaaatggctctccaggctgcttctcttgttcctgcttctttctcggttcttaaagagggaaagagtggtgtgtctctcaaggactccaccttgttcggtctttcattttcagaacctatcaaagctaacttcagctcttctgcattgaggtttaagagggaattcgaacaaaagctctgtgctgtgagggccgaaacagtggcta

SEQ ID NO: 126598 - DNA, 267 bp, Glycine max
gttctaacatcacattcacatgatggacttcatgtttttgacgattttagagaggcttatgcttggctgagtcataatacagaaatagatgataaagtggcttcttggtgggactatggctaccagacaactgccatggctaaccgaactgtcattgttgataataatacctggaataacacacatattgctactgttggtactgccatgtcttccccagagaaggcagcttgggaaattttccactcattggatgtcaactatgtt

SEQ ID NO: 126599 - DNA, 270 bp, Glycine max
acacccttctacttcgcgcctttctttctcttcttccctttcctcctcctcctcttctctatcaatttctccttcttttttatcatacacttcttcaaattctacacactttgccactacctgctgccttcagcatcagtgccagcgccgccgagaagaagaaggtgctcatcgtcaataccaacagcggcgggcatgccatcattggcttttactttgcaaaggagcttcttggtgctggccactctgtcaccatactcactgttggcg

SEQ ID NO: 126600 - DNA, 266 bp, Glycine max
atttcatcgtgcattcaatggccaccacagcagctctatccggaaccatggtgagcacctccttcatgaggaggcaacctatgaccaccacaagcctaaagacattccccaacgttggtgaagctctttttggtctgaaaagtggacgaggtggtcgtgtcacttgcatggcctcgtacaaggtgaagctcataaccccagaaggagaagtggagtttgaatgcccagatgatgttttcattgttgacaaggcagaggacgaaggc

SEQ ID NO: 126601 - DNA, 273 bp, Glycine max
atggaaccttgctccagtgtcaaagacaggatagggtatagcatgattgtagatgctgaggagaaaggactcatcacaccgggtgaaagtgtcctcattgagcctactagtggaaacactggcataggtttggcattcatggcagctgctaagggttataaacttattataaccatgccttcttcgatgagtctcgaaagaagaaccattcttcgagcttttggagctgagttagtcctcactgatcccgccaaaggtatgaaaggagctgtt

SEQ ID NO: 126602 - DNA, 266 bp, Glycine max
gcccaacacgttgaagaggctgagaagataggattggactcctccaagcatacaaatcttcatcttggggcgaggaatgtgaggcaacttaacagagccactaaaacgcttgtccttctggggatcatagtttttcagcccaagatgaagatttgtatgcttggagatgcccaactcgttgaagaggctgagaagataggattggactacatggatgtcgggccttgaagaagcttaacaaagccaagaaattggtgaaaaaacta

SEQ ID NO: 126603 - DNA, 260 bp, Glycine max
gcaaattccaattcccaattcccaattcccaattcgaaacccttattcctttcaaagaaccaaattgagtgatcgtgatggcaccaaaggcagagaagaagccagcggagaagaagcccgcggaggagaagaagtccacggtgggagacaaggctccggcggagaagaacccaaaggccggaaagaagcttccgaaggagggaggcgccggcggagaaggaagaagtagaagagaaacaagaagagcgtggagacataca

SEQ ID NO: 126604 - DNA, 259 bp, Glycine max
gcgccggcgttcatcgttgaaaagcgaaaatggatctacctcgtctgatacttggaacccaaggcctggaggtttccaagttgggatttggttgtgcggggcttagtggagtgtttgacggccctgttcctgacgagcttgtcatctctctactcaagtatgcattcagtaatggaatcactttctttgatacttccgatttttacggtccctacataatgaagttctcgtaggaaaggcactgaaggagttgccacga

SEQ ID NO: 126605 - DNA, 259 bp, Glycine max
cagcagcgctgagtcgagggcgttcagtgttcaccacagtttacacacgagtacccattttctcttctcaatttctcagagtgtgcagagaaaatcatggtggacgcagcagaacgtaggtacttggaggatgacgattcatcactcatgaaaactattaagggggcaacaactggtttagttgctggcactatctgggggaccgtagttgccacctggtatgatgtccctcgtgtagagagaaatgttgctcttccag

SEQ ID NO: 126606 - DNA, 260 bp, Glycine max
gttgggttggttaaggccttccaaaaggcttactacaacaggtatggtggtggggccaatgagctcagtgaggggtacagcacgggtgttggattgggtgctgagatcattggaacctttgttttggtctacactgtgttctctgcaactgaccccaagaggaatgctagagattctcatgtgccggttttggctccacttccaattggctttgtgtgttcatggttcacttggcaaccatcccagtaacaggcactggc

SEQ ID NO: 126607 - DNA, 256 bp, Glycine max
attcaagaccggcatggctaatgaagaggaacagaaaaaccacctcttcggcatcaaagatctcggtcacaagactctccttcagagtgatgcactctatcagtatatacttgaaaccagtgtctatccaagagagcacgagtgcttgaaagagatacgcaagatgactgcaaaacacccactgaacatcatggcaacaccagcagacgaaggcaacttctgcacatgcttgttaagctcacgaattcaaagaacg

SEQ ID NO: 126608 - DNA, 256 bp, Glycine max
ctgcactcgatcaaacacaaaatggaaaagaatgtggggattctcgccattgacatctacttccctcccgcttgcgctcagcaggaagcattggagacacatgatggtgccagtaaagggaagtataccattggacttggccaagactgcatgtcattctgtaccgaagtagaagatgtcatctcaatgagtttgacagtggttacttctcttcttgagaagtatgggattgatcctaaacaaatcggtcgtctgg

SEQ ID NO: 126609 - DNA, 260 bp, Glycine max
ctcgagccgagaaaaaaaggtgaaatatagagtgaagaagaagaaatagagggttttggtgtttgaatcgtgaaaatgttcagaaaccagtacgacacggacgtgacgacatggagcccggcggggaggctgttccaggtggagtacgcgatggaggcggtgaagcagggctcggcggcgatagggctccgatccaagacccacgtggtactcgctgcgtcaacaaggctaactccgaactctcatcgcaccagaagaag

SEQ ID NO: 126610 - DNA, 257 bp, Glycine max
gccaaaagacactctggaggtggatgctgcactaatagcaaccggaagggctccgttcacacaaggtcttggattggagaatattgatgtggtaacacagcgtggatttgttcctgtggatgagcgcatgcgagtaatcgatgcaaatggcaagctggtgcctcatttatactgtattggtgatgcaaatggcaagatgatgcttgctcatctgccagtgcacaaggaatttcagtggttgaacaagtcactggaag

SEQ ID NO: 126611 - DNA, 82 bp, Glycine max
catatctccatttccatttcctctctctcagtttccaagaatcttaagctatgggaaagtcttacccaaccgtgagcgctga

SEQ ID NO: 126612 - DNA, 265 bp, Glycine max
attcgttggctagatcgatcaaagacatcaaggcgtttaaggaagccaccaaagtggacaaggtggttgtactgtggactgccaacacagagaggtacagtaatttggttgtgggccttaatgacaccatggagaatctcttggctgctgtggacagatatgaggctgagatttctccttccaccttgtatgccattgcttgtgttatggaaaatgttctttcattaatggaagccctcagaacacttttgtaccagggctgatt

SEQ ID NO: 126613 - DNA, 251 bp, Glycine max
cacattttagaagaataccccctcttttgctgcatcagaggagttgtaaattaagagcatggctgcacaagctcttgtatcatcatcttctcttaccttctcagcggaggctgcaagacaaagtcttggaccaagatcactccaatctccatttggcttctccagaaaagcctcctttcttgttaaggcagctgctaccccccctgtcaagcaaggatcaacacgcctttgtggtttgcatcaagcaaagt

SEQ ID NO: 126614 - DNA, 237 bp, Glycine max
ggtgatctggttggtgttaacaaggatagttacttaatcttggataccttgccttctgagtatgattctagagttaaggccatggaagttgatgaaaagccaccaatgtcattgtagtcctcggttggctggagaacatagatgatgcaccctccccagatgcctctcttctacagagagtgatgagagtgatggtacgtagaaagatcttcatgcagaacaatcagagactggaga

SEQ ID NO: 126615 - DNA, 248 bp, Glycine max
attcgagggtccctggacctctaatcctcttattttcgacaactcatacttcaaggagttgttgagtggtgagaaagaaggcctccttcagctaccttctgacaaggcacttttgtctgaccctgtgttccgccctcttgttgagaaatatgcatcggacgaagatgccttcttcgctgattacgctgaggctcaccaaaagctttctgagcttgggtttgctgaagcctaagcaacgttttggggat

SEQ ID NO: 126616 - DNA, 256 bp, Glycine max
gatggctgcaacctcttccttgtgctcatcgaccctccaatcccagatcaatggattcttccttcacaaaacctctctttcccatactccttccctcactttctccaggaggaaaatttcaaccacagtgaaggctacatctcgagtcgacaagttttcaaaaagcgatatcattgtctctccgtccattctttctgcaaacttttcaaaattggagagcaagtgaaagcagtagaattggctggttgtgattgga

SEQ ID NO: 126617 - DNA, 250 bp, Glycine max
caaggcataggatcggtgaggcaaacttgaattgaagtgaagaaggagatggctgcaacctcttccttgtgctcatcgaccctccaatcccagatcaatggattcttccttcacatcacctctcttccccatactccttccctcactttctccaggaggaaaatttcaaccacagtgaaggctacatctcgagtcgacaagttttcaaaagcgatatcattgtctctccgtccattctttctgcaaattt

SEQ ID NO: 126618 - DNA, 249 bp, Glycine max
ctaagcacagagaaagaggaagagatggaggcagaggaagaaggtgaagaaggtgcgaagataagcatttacaagtcggcgagaagcataaagcgaagagagaacagtttgtacaacgcactgagatccatctaccaagactccatcttcgtctccgagatctctcttctatggcctcagctccctctcctcgccaacctccgctgcggcctctggtatcccgccccgccgacttccactccacctgct

SEQ ID NO: 126619 - DNA, 237 bp, Glycine max
gcagaaagcaagctcatcctagagttttaaaaatcccagcagcctcctccatggctctctcttccccatccttggctggtcaggccgtgaagctgggcccatcagcccccgaagtcgggagggtcagcatgaggaagaccgtcaccaagcaggcctcctccggaagcccatggtacggcccagaccgcgtcaagtacttgggcccattctctggcggcccccgtcctacctcactgg

SEQ ID NO: 126620 - DNA, 260 bp, Glycine max
tcctaatgcaattgctcctttctcatttggctctctcttaggtacccagttgctcctaatggggtgggttgagagcaagagatgggtggacttcttcaacccaggttctcagtcagtggagtgggccactccatggtcaaaaactgctgagaactttggcaactctactggcgaacaaggctaccctggaggaaaattctttgaccctttgggtttgctggagctatcaaggatggcgtttacattccggatgccgacaa

SEQ ID NO: 126621 - DNA, 256 bp, Glycine max
caaggatgcaactctcaaggatgttgtcactgtgattcgcgctgatgaggctcatcacagggatgttaaccactttgcttctgtaagtttccttttcgtctcataatggacaacaacaaaaattgttaggaacacattcttcaacatattttttttaaagaaatttaacatattttcttattagttggaatataatttattgaaaactataaatcccaaaataagttcattaaatatcacctgagatccacgaaat

SEQ ID NO: 126622 - DNA, 257 bp, Glycine max
gcgaagaaagattcgaaacgaagaaagaaagcgttgtgaagaatggcggaagagggacaagtgatcggtgtccacagcgtagaggagtggaaggaacatctcaagaagggagaagagtccaagaaattgattgtggtggattttactgcttcttggtgcggtccatgccgtttcattgccccaattcttgcagagtttgctaaaaagttgcgaatgtcaccttcctcaaggtggatgtggatgaattggagactgtt

SEQ ID NO: 126623 - DNA, 262 bp, Glycine max
gaactacctccccaccatcaacacccaaagctgatattctacttaaactacttcttgtcagtacataaaatgatataggacattaaaacatttatgtatatcgtacatacaattattttccccaagcatataagcatgtaatatatatctaatgatttaggacatacatttaaactcaactataaattcacaacaacgtgtctattctcaaatacataagataatgcttattagacatatctgtgttattagacatgcacca

SEQ ID NO: 126624 - DNA, 235 bp, Glycine max
atatcttccttgtcactgcccgtgtgtcgccggcatggccaccgtcaccacccaagcctccgccgcaattttccggccatgtacctcgaaatcgaggtttttgaccggctcttccggtaaacttaaccgggaagtgactatgcggccaatggggtgccctccttctgcctctttcaaggttgaagccaagaaaggacagtggttacctggcgttcatcccgaacttacctcaatg

SEQ ID NO: 126625 - DNA, 217 bp, Glycine max
cggtgttctctcccttccgtttcgtggcgtgtgttccaaatggcgaacgtttgattccactgttcaatcgggttttggtggagaaaatcgtgcctccatcaaagaccaacgctggcattttgttacccgagaaatcctccaagctaaattccggaaaagttattgctgttggccctggctttcacagtaaggatgggaagctaattccgtggctgtt

SEQ ID NO: 126626 - DNA, 254 bp, Glycine max
attagttcattctctttgcgcagttccctacctctcctttcaagatgcagatcttcgtcaagaccctcaccggaaagaccatcacccttgaggtggaaagctctgacaccatcgacaacgtcaaggccaagatccaggacaaggaaggaattcccccggatcagcaacgtctcatcttcgccggaaagcagctcgaggacggccgtaccctgccgactacaacatccagaaggagtcaacccttcaccttgtcc

SEQ ID NO: 126627 - DNA, 251 bp, Glycine max
ctctcacacacactttctctctctctctctttcacccagatcttgtagcaatggcgagcgctcccactccacgcgaagagttcgtgtacatggcgaactgagcggagcaggccgagcgctacgaggagatggtggagttcatggagaaggtctccgcctccgccgagagcgaggagctgaccgtggaggagcgtaacctcctctccgtcgcctacagaacgtgatcggccaatgtcacctcctggccatca

SEQ ID NO: 126628 - DNA, 262 bp, Glycine max
gagaatcacttatggtaatcatcaaccgaagattaaaagcaatcaaagcaggggagcctactaacaatgacttgttaggcatactcttggaatcaaattacaaggaatctgaaaaaaagtagtggtggaggaatgagtttaagggaagtagtggaagaagtgaagctattttacttggcagggcaggaagcaaatgcagaattgctctataggacatgttgttattaagcaggcatccagattggcaagaaaaggctaggga

SEQ ID NO: 126629 - DNA, 259 bp, Glycine max
ctcatcttacactcaccggcgattccatctcgcgccaccgtcgactcagctccggccatcgccgttggttccctcactttctcactcttcttcttcttcttcttcttctctcttcttcttcttctcagcggaaatatgccttctcagaaggttgaaacgggtcatcaagacacggtccatgatgttgctatggattactatggtaagaggctggccaggcttcatcagatcacacaatcaagataattggggtgagcaa

SEQ ID NO: 126630 - DNA, 273 bp, Glycine max
cggctcgagattcttggctctgctgtcaccaccgttgacaaacaaactgtgtgcaactgtctcaaggcggatgctgctacctacaacatcaatgaccagtatgctcaggcactccctggtttctgcaaggtcaatgtcccttacaagatcagccgctccactaactgtgcaagcatcaggttctgaacaagccatggacagatttgctcatttctgcagcgggatatgaggcagcagtgaagcacttactatcagaataagagaaatcgagtg

SEQ ID NO: 126631 - DNA, 253 bp, Glycine max
cactgtttgtaggcattagaggtagctggtcaagtggcaggaacagctatctccacttcgccccttccgtacaacaccatggctagccagtgtgaatcactcggtacatgtgcaaggaaaaagctttcaaattggctggcctttgagaatcattacagccaagcacttgatgataaatcgtttttggcaattgctgatattaggaactcagcactgagaaggtttgatgtgcccttatttgtcattattacag

SEQ ID NO: 126632 - DNA, 254 bp, Glycine max
gaggacttggaggtggtagtggtctaggtggtggttatggaggaggaagtggtctaggtggtggaattggtggaggcatttacaaaggaataggaattggaggaggcatttacaaaggaattggaattggaggaggcatttacaaaggcattggtggtggtgtaggtgctataggtggtgttggtggtgtcattggtggtttcaagcatgtgaagccaaaaagccgtgaataatcaatcaactaaggagttaat

SEQ ID NO: 126633 - DNA, 270 bp, Glycine max
ttcttccttattttcttccctagtcacggagattcatctctgcaggttgtattagaaaagagaaaatggtgaagatttgctgcattggtgctggatatgtggggggtccaacaatggcagtcattgctctgaagtgcccctccattgaagtggctgttgttgacatctccaaatcccggattgcagcatggaacagtgaccagcttcctatctatgagccaggccttgatggtgtggtgaagcaatgtcgtggcagaaccttttcttcag

SEQ ID NO: 126634 - DNA, 270 bp, Glycine max
ccggtgagttcccaggcgactacggctgggacactgctgggctttccgcagacccagaaaccttcgccaagaaccgtgaactcgaagtgatccactccaggtgggccatgctcggagccttgggctgcgtcttcccggagttgctgtcccgcaacggggtgaagttcggagaagccgtgtggttcaaggccgggtcccagatcttcagcgagggtgggctcgactacttgggcaacccaagcctgatccacgccagagcatcctcgccat

SEQ ID NO: 126635 - DNA, 268 bp, Glycine max
ggctgggaccttgagtgggaaccctttggccatgactgcaggaatacagaccctgcagcgtattaaggagccaggaacttatgagtacttggacaaaatcaccggtgagcttgttcagggcattattgaagctgggaagagggcaggccatgcaatatgtggtggtcatataagggggatgtttgggtttttcttcacagaaggaccagtgtataattttgcagatgccaaaaagagtgatacggacaagtttctaggttcttttggg

SEQ ID NO: 126636 - DNA, 196 bp, Glycine max
ctacatcaagtccactagtaaagtacagacaagaagaattggaggttttaagaggagatggaacagggaagcgcagagactttgacagaatctatgattatgatatctataatgatttgggcaatccagatggtggtgatcctcgcccaatcattggaggctctagcaactatccttaccctcgcagggttagaac

SEQ ID NO: 126637 - DNA, 133 bp, Glycine max
ctggttttaaatacatgtgacattgaaggaaccagattccttaatcagttgtgtatgcttaagtcatgtatttggagtggctgaatgtatttgtatttgtcattaataaagagagttgtgttagtataaacaa

SEQ ID NO: 126638 - DNA, 271 bp, Glycine max
ctggagtttccatgtctgagaaaccatcttcatcgttgacatctatagctgctcgagaagctgatcccgtgttacaggatttgaatgaaaagaagcagagctttaggcgcaacgtggtgtcgttagcggtggagttgaatcagctacgtagtcgcctagcttcgcaggagcaatcgtatgccaaggaaactctaacaagacaggaagcagagacaaatgccaagaacatggaattgcaaattggaagattgcagagaacttggaagaaaac

SEQ ID NO: 126639 - DNA, 266 bp, Glycine max
gttgttcttcgctttcctgaaactagggttttcaatttcgattcattcgttaataattaaagatgtttgggagggcaccgaagaagagcgataatacgaggtactacgaaatcctcggcgtctctaagaacgcttcgcaggatgatctgaagaaggcttacaagaaagccgccatcaagaatcaccctgacaagggcggtgatcccgagaagtttaaagagctggcacaagcatatgaggttctgagtgacccgagaagcgtgaga

SEQ ID NO: 126640 - DNA, 260 bp, Glycine max
gcaagaacaagaagaagaagaagaaacaatgtcttgctccaatctgacaatgttggagtcctcaaaaccttccctttccgacccctcgaacctctccttccgctctgccctgaactcttttcagctcctttcacaagacccacttccatgcaccccttcacgctcctcaagcacccaaattcagtgtggtctgagagaactgagaacccgcattgtatctgtgaagaacacgcagaaatccacggaggcaatgaacttgt

SEQ ID NO: 126641 - DNA, 264 bp, Glycine max
gaagcatgtacagggagagtaatgggaacctttggatacatggctccagagtatgccttggacggattcttttcaaccaaatccgacgttttcagctttggagtagtccttctagagattctcagtggaaaaaagaacactggattctatcagtccaagcaaatttctagccttttgggtcatgcatggaagttatggacagagaataagctactggatttaatggacccatctctttgtgaaacatgcaagaaaatgaattca

SEQ ID NO: 126642 - DNA, 265 bp, Glycine max
caaaaatatgacagaagacaagcagatgtgaactcacttatgctgttgttgggattgttgtgctacttgcttccaatgctgttcaaatacagtggtgcctcagctgctctcactgtagacccttcactccacttgtcaagtgtatgtagcattgtgatgttgattgcatatgtagtctacattgtctttcaactgtggacacacaggcagttatttgaagccgaagatgagggtgagcattggtgaggacgtggagaagacaagc

SEQ ID NO: 126643 - DNA, 270 bp, Glycine max
gatggttcaagtggtggaggagaaaacagtgcagggaaacaagttgtctgaatcagcaacgctcagaggcaaggacttcagatgaagaagtctaagcttgtctccatgctcgaggaggtagaacaaaggtacagacaatatcaccaccaaatgcaaattgtggtatcatcatttgagcaagcagcgggttatggggcggcaaaatcttacagtgcccttgccctaaaaactatctcagagcaattcaggtgcctaaagatgcaatctcca

SEQ ID NO: 126644 - DNA, 267 bp, Glycine max
cctgaacaggacgttgtcaagattgttgacaccttccctggccaatccattgatttctttggtgcactgagggccagagtatatgatgacgaagtgaggaagtggatttatggtgttggtgttgacggcattgggaagaagcttgtgaactcaaaagatggacctccaacctttgagcagcccaagatgactctggagaagctcttgacgtatggtaacatgcttgtccaagaacaagagaatgtcaagaggtccaattggctgaca

SEQ ID NO: 126645 - DNA, 266 bp, Glycine max
gtgttggcagacttcatgggggccatcggttcaggaaccggaatattgattgcagtaacaatcatctatcagtactttgagacatttgagaaggagagagctagtgagcttggcttcttcggtttctaagttctgccaagcaaataatgttggttggtgactccaacgagctctcccacaccccttgtttgagggatcgttatacttgtaggtcgtttaacatcgtaagggaggacataactagtttgttgtaagatttacttttc

SEQ ID NO: 126646 - DNA, 132 bp, Glycine max
cgaggccctccgccgcatccgcgagggcgccgccatgatccgcaccaagggcgaggacggcaccggcaacatcatcgaggccgttcgccacgtccgctccgtcatgagcgacattagggttccacacaacat

SEQ ID NO: 126647 - DNA, 242 bp, Glycine max
gaaagtgagtgagagaaagatatcgcagacacagagcataatggcttctacccaatgtttcttgtaccaccatgctcttaccacccctgcctgtgccagatccccatcactacgcatctctggttagcaccaagcctaaccagcttgtttgcatcgcacagaaacaacaaacaccacaagaggatattgatgtcagcccaatctctcgccggtaagctctaactgtgctcattggtgctgct

SEQ ID NO: 126648 - DNA, 269 bp, Glycine max
caccaattggcaagaagaagttcgagactctttcctacttgccagacctcgatgatgcccaattggcaaaggaagtcgaataccttctaaggaaaggatggattccttgcttggaattcgagttggagcacggtttcgtgtaccgtgagcacaacaggtcacctggatactatgatggaagctactggaccatgtggaagctgcctatgtttggctgcactgatgcttctcaggtgttgaaggagactcaagagctaagactgcatacc

SEQ ID NO: 126649 - DNA, 264 bp, Glycine max
ggaatttatggcaagcaaaggtctagatgctgtccaaactgaggtcaaggacatggattggaagagcaccttccacttgcatcacctccctgaatcaaacatctcagagatccctgatctcattgatgagtacaggaaggtgatgaaggattttgctttgaggttagagaaactagcagagcagctgttggacttgttgtgtgataatcttggcctagagaaagggtacctcaagaaggctttctatggatcagaggaccaact

SEQ ID NO: 126650 - DNA, 239 bp, Glycine max
caaggatcttaccattatggtttgattaacactactcgaacaattagacttcaaaattctgctccagttatcaatggcaaacagtgatacgctgtcaatagtgtgtccttcatatctgctgatacaccacttaaactggtcgtttacttcaagattcaaggggtgttctcccttggaagtatccctgactaccccactggtagtggtggttaccttcaaacttctgtcatggaagccga

SEQ ID NO: 126651 - DNA, 264 bp, Glycine max
aaacactcataacacaaagcacaaagctcagctcatgcttgagttaaaaaatggcagcagcttcttccatggctgtctcatccccatccttggctgtcaaggccgtgaagctgggcccatcagccccagaagtggaaagggtgagcatgaggaagaccgtcaccaagcaggtctcctcaggaagcccatggtacggcccagaccgagtcaagtacttgggcccattctctggcgagcccccgtcctacctaccggtgagttccc

SEQ ID NO: 126652 - DNA, 265 bp, Glycine max
accaagcatatctcatttgaatacattccttgtagtttatactgaaagatgggtttgaagatggcgttactgatcctaggcctttccctcatgctccttttggtctcctctgaggtggcatccacgaatacaaaagaggatgcaaatggagtggatgatgccaaatatcccggtggaagctatggagggggttacccaggtcatggcggtggcggttatcctggccatggcggtggcggttatcctggcatggcggtggtggtgg

SEQ ID NO: 126653 - DNA, 258 bp, Glycine max
gcaagctcttccaggatatcagcaatctggatcatgcagcaaaaattaagagcagcccggaagcagagaagtactatgctgctactgtatcttctctgaacgatgtccttgccaaacttggttaatgtgattaatttcttgctttcttgtgtaagctttgtgcatgattttctcagacactttattgactgatattttaagaaaatcaaatgatgagggaaaattttctataaaaaaaaaaaaaaaaggcggccgccg

SEQ ID NO: 126654 - DNA, 260 bp, Glycine max
ttgggaattagggttgttcgcgtggcgaagatgaaagaggtggttttgaacgatcgattggggaagaaggtgcgcgtgaagtgcaacgacgatgataccatcggcgacctgaagaagcttgtggcggctcagactggcacaagagccgacaagatccgcatccagaagtggtacaccatctacaaggatcacatcactctcaaggattacgagatccatgacggcatgggtctcgaactctactacaacaaacacaacaa

SEQ ID NO: 126655 - DNA, 259 bp, Glycine max
cccaattttatagggtttatacaattatcgatggcttcttcagatgttgagtaccgtagctttgtcggtggactcgcttgggccactgacgaccaagctctcgagagagccttctctccgtacggcgaaatcgttgaaacgaagattatcaacgatcgtgagactggaagatccaggggttttggatttgtaaccttctcctcggagcagtccatgaaagacgccatcgaagggatgaacggccaaacttgacggccgt

SEQ ID NO: 126656 - DNA, 264 bp, Glycine max
agcgagtgagcgagcgagcgaggtagggttttcgttgttccctcgtctttgaattcagttcgcgacgatggggtccatccccgatccaagcgagttgagcgagttgactcagccgagcttcgacgagttccagcgccaaacttccctcatgaccagctgcaccctcctctggaaggagctctccgaccacttctcctccctcgagcaagacctcaaccacaaatccgaagccctcaaacgcaagattcgcccctcgacaacact

SEQ ID NO: 126657 - DNA, 264 bp, Glycine max
tttgttcctctgagtagtgatggctagcctcaagtttgcatgcgtagttgcggtgatatgcatggttgtggtgatcactgcacccatgacaaatgccatcacgtgcggggaagtagccagatccctatctccatgcatcaattaccttcggagccgccgcggcggatcaccggaggcggaatgctgcagaggagtcacgagcctcaaccgcgccgccagtaacaccgccgaccgacgcaccgcgtgcattgcctgaaatccgtt

SEQ ID NO: 126658 - DNA, 261 bp, Glycine max
gacgttcccttggatgtcaggatggagcaacatagcaaggtcctagaagatggagttcttgatcctgagactaccatagttgccatatttccatcacctatgcattctgctggtccaactgaagtacagtggcatgcaaaggcacggataaatgcaggtgcaaatttctatattgttggtcgtgatccggctggtatgggccacccaactgagaaaatggatttgtatgaccctgatcatggaaaacaagtgcttagcatg

SEQ ID NO: 126659 - DNA, 265 bp, Glycine max
acgccgaatcgagcgattcggctcgagctcgacgttacaaagtagtactacttggtttcaatcaaaccaaaaactcacactttggacggccacagcaacaataacaatggcagcctcactacaagctgcagctaccttcatgcaacccaccaaggtgggcatggccactcgcaacctcaaatctacacaatgcatttctaaggcttttggcttggaaccgctgcagctaaactcatttgctcccttaagcccgtctcaaagattt

SEQ ID NO: 126660 - DNA, 263 bp, Glycine max
aactcacactttggtggccacagcaacaataacaatggcagcctcactataagctgcagctaccttcatgcaacccaccaaggtgggcatggccactcgcaacctcaaatctacacaatgcatttctaaggcttttggcttggaacccgctgcagctaaactcatttgctcccttaagcccgatctcaaagattttgctcaaaaatgtgtcgacgccaccaaaattgcaggattcgcccttgccacctcactctcgttgtttc

SEQ ID NO: 126661 - DNA, 258 bp, Glycine max
  unsure (1)..(258): unsure at all n locations
ctcgagccgcctgacatgggtggtgctggtgctggggcagccgaggatgattatgctgctccttctggtggaagtggtgctggccccaagattgaggaagtggactaaatgtgtagttgctttcatccatttatctgtttaaaatagatttgatgctgttttattggattttaacttttatgatttttgttggatgggtagctaattgttttgcccgtgtgatatgaagtgctttnncgcattagtcatttgctttat

SEQ ID NO: 126662 - DNA, 262 bp, Glycine max
caagaacaacatgaattttctaaccttcgttactgttctactcttcatactacacacaacctcatcttcccagtatttggggaacaaccttctcactcatcgcaagatattcctaaaaaatcacaacattattacctcgtacgctgtcatctttgacggtggtagcacaggaacccgtgtgcatgtcttccattttgaccagaatttggatctccttcccattggtgatagtcttgagcttaataaaagatcacacccggtt

SEQ ID NO: 126663 - DNA, 258 bp, Glycine max
tagttacaggcatagttggttgtgcaggattaaagccaacagttgcagcaattgaagcagggaaagacatagcattggccaacaaagagacaatgattgcgggagccccttttgttcttcctcttgctcacaaacataacataaaaattcttcccgctgattcggaacattctgcaatttttcagtctatccaggggttgccaaagggtgcacttaggaaaatccttttaactggatcaggaggtgcttcagagaatg

SEQ ID NO: 126664 - DNA, 261 bp, Glycine max
gtgaaaaagcaactaagcatagtgtgtaagaaagggagaaaaacaagtgctgtgtagagagaaaaatggctaggtggtgcatgatcttggtggttcttgctcttgccgtggttgcaagtgccagaaacatgcccaatgacgctggtttggaggaccagaagaacttccttgggtatgggttttcgggagttggcaacaatggccttccctttggtggagtgggttctgggtttgatggtaatatggtgggccttctgggct

SEQ ID NO: 126665 - DNA, 259 bp, Glycine max
tgttgaacagttacatgtcttctgtgaggaagatggcatgtgagattcttgagttgatggcagaagggttgaagattcagcaaaaggatgtgtttagcaagcttctaatggataaacaaagtgactctattttcagggtgaatcattacgctgcttgtcctgaaatgactctgaatgatcagaacttgattgggtttggagaacacacagacccacaaatcatctctctgttaagatccaacaacactcaggccttcag

SEQ ID NO: 126666 - DNA, 264 bp, Glycine max
gtgattgagaaaggaggccgtaaaataggatttgaccttgattatgatgagaaagatagcagttacaaccgaatcaagagcttggtgactgaggaactgaagcaatacttcaggccagagttcttgaataggttggatgaaatgattgtactccggcaactcacaaaattggaggtaaaggagatagcagacataatgttgaaggaggtgtttgatagactgaaagccaaggaaattgatctctcagtaacagaaagatttagg

SEQ ID NO: 126667 - DNA, 265 bp, Glycine max
tggctcgtcactccttgctcttagccctcctcctcttcgccgccgtggccaccgccgcgatggcggtggccgcgtccgacgccgacgacatcctgatccgtcaggtggtgccagatgttgccgaaccgcagaggaggacaacctgctgaacgccgagcaccacttcgcgagcttcaaggccaagttcgccaagacctacgccaccaaggaggagcacgatcatcgcttcggagtcttcaagtccaacctccgcagagccaggctg

SEQ ID NO: 126668 - DNA, 263 bp, Glycine max
ggcaaatttgtttcaccatctgaagtctctgtggacaccactgaaggtggaaatactgttgtgaaaggcaagcatattataattgccactggctcggatgtgaaatcattgcctggcgtcactattgatgaaaagaaagtcgtatcatcaacgggggctcttgctttgactgaaatccccaagagactcgtagtcattggggcaggctacattgggctggaaatgggctccgtatggggccgtcttggcaccgagataacagt

SEQ ID NO: 126669 - DNA, 268 bp, Glycine max
ctcgagccgctctctctcaccaaagccttcctagaacgaaaaaaaaaaagaagagcaattatccctcaccaaagaagaagaagcaaacaatggccgatcaacttaccgatgaacagatctccgagttcaaggaagccttcagcttgttcgacaaggacggcgatggttgcatcacaaccaaggagcttggaactgttatgcgttcattggggcaaaacccaactgaggcagagctccaggacatgatcaatgaactggatgctgatgg

SEQ ID NO: 126670 - DNA, 267 bp, Glycine max
ccaaactcaagttcaccaaaagcaaccacaacaagcacttctcttatttcctatcacaccctattacagattcacaagcgcagacacttcaaatggctctggaagctcttcaatcacccagaactgccactccatcgtttagtccctttgaagaaaccaacctcagttacttggagacaccgtggaccaaaggaaagcgttctaagcgtagcgcatggagcagcaactgcaacactcttcatgcaccgaggaagagtacctcgctct

SEQ ID NO: 126671 - DNA, 265 bp, Glycine max
ttcaccgcacgaatatcttgttgtttggagcgatccgagaaaaactctgtaaacatgttggtttaccaggacctccttacaggtgatgagcttctctctgactccttccgttacaaggaaattgagaatggaatgctgtgggaagttgaggggaagtgggttgttaaaggagcagttgatgtagacattggtgcaaacccttctgctgagggtggaggagaagatgagggagttgatgatgcagctgttaaggttgttgacattg

SEQ ID NO: 126672 - DNA, 266 bp, Glycine max
acaagatccaagacttttaatccttgtctctcaattgcttcttgatccatttaacttgactccagaagaagcaagatctgccataattggtcatgttgttcatttggttaatcgggactacgaagccatggctcgtgactattatgctcttgattttctatcacctgatgttgatgtgttaccaattgttccagcactacgggacttttttgatgatgcacttaattatactgtcagtgaacttaacttcaagacactagtggatg

SEQ ID NO: 126673 - DNA, 265 bp, Glycine max
cttcacaagattctcacaaacaactcttgagaaagaaagaatggctgccaacacattgatgagttctgccatctcagccttcccatctctcctttcctcctcaaaatccagatttgccgcagcagttcctctttccagctttgttgtcaccaatgcctcttcttctcgcttttccatgagtgctgattggatgcctggccagcctagacccccctaccttgatggttcagcacctggtgactttggattcgaccctcttcgtctt

SEQ ID NO: 126674 - DNA, 266 bp, Glycine max
ctcgagccgctcgagccgaatcagctcgacctgaaaatgattgccgatacgctgtcttacgactttgactttgtgacatctgagaactgccaaaagagcaaaatcttttttattgcatggtctccttcagtggcccgcattcgcccgaagataatatatgcaacatccaaggacaggttcagaagggagctgcagggcatccattatgagattcaggcaccagacccaacagagatggatcttgaattcctcagagaacgtgcaaa

SEQ ID NO: 126675 - DNA, 263 bp, Glycine max
agagttggagtgatccctgtggttcatgaaattgacaaagaccctgagggcaaggaaatagagaaagctataacaaggttggggtgtcctacacctgttcctgcagtcttcatcggagggaagctggtggggtccaccaatgaagtcatgtccctccaccttagtggttcactcactcaactgctgaaaccatatcgagctttgtcttaaagaagggtgcacatgcaaattaaattaaaacatgttcctgctaccttaattgg

SEQ ID NO: 126676 - DNA, 194 bp, Glycine max
gagatatgtcactgtctatggatgctcagatgctgtaatagttctaggagcagttggcaaggctgtgagagtagaacactgtgaacgagttcatgtaattgtagcagcaaaacgtatttgtattgctaactctcgtgaatgtgtgttctttttgggggtgaatcagcaaccacttattgtttgtgataaccata

SEQ ID NO: 126677 - DNA, 260 bp, Glycine max
  unsure (1)..(260): unsure at all n locations
agagagaaagaaagagagagagagagaggttaggctatggctgttgagagcgtcgtagngtccccagtgaagaggcagagagatgatgatgaagaaaatgaagtctctgtttccatggatgtggagggtggcaaagaccctcttagtaacggtttatactctgtgattcctgggtggttctctgaaattagttcaatgtggcctggagaggctctctacttgaaggtggaaaagattttgtttcaaggatagtctgaata

SEQ ID NO: 126678 - DNA, 265 bp, Glycine max
gtgttggcagacttcatgggggccatcggttcaggaaccggaatattgcttgcagtaacaatcatctatcagtactttgagacatttgagatggagagagctagtgagcttggaatcttcggtttctaagttctgccaagcaaataatgttggttggtgactccaacgagctctcccacaccccttgtttgagggaacgttatacttgtaggtcgtttaacatcgtaagggaggacataactagtatgttgtcaagatttacttt

SEQ ID NO: 126679 - DNA, 267 bp, Glycine max
gagggagcttcaagaggctaagactgcataccccaacggcttcatccgtatcatcggattcgacaacgttcgccaagtgcagtgcatcagcttcatcgcctacaagcccccaggcttctaagtgtgaaaaatttgcaaagcatttgtagccgccaccccactttgtttgtttgtacttaaactacattcccatttgtttttgctttttgagatttcatcatcctgtatttttggtttctgttttcggacttcaatggaaattaatgg

SEQ ID NO: 126680 - DNA, 261 bp, Glycine max
catgccttcccgaagaagaactctcttgaaggtcatcattctcggtgacagcggggtggggaagacgtctttgatgaaccagtatgtgaataagatgtttagtaatcagtacaaggcaaccattggagcggattttttaaccaaagaagtgcaatttgaagataggcttttcaccttacagatttgggatacagctggccaagaaagattccaaagccttggagttgctttctatcgtggtgctgattgttgtgttcttgt

SEQ ID NO: 126681 - DNA, 261 bp, Glycine max
aaacaaggtcaagggataaatttgggttccaggaatagaacaaatttgatactcttaacttgagcatgctgaacctggactctaaatttactgagaatgtgagcaaaagctcactttgaaatggtgtttatggtatgaatgcagtgtatcagaaaaacaatgcaaacttggtgagtaatgtgatcagtaacaagtacaatggcagtattcagcataacaaagagctctacaacaacactggcaacaacatcaacaccaatg

SEQ ID NO: 126682 - DNA, 261 bp, Glycine max
cctgtagctatgccatatcaggtgcagcgtgttcggagctcaatgggaaggtcacttccgtggcctatgttgcatgctctggctacaagttgccattgatcaaagctgaggccagagttcctaaagccaaagaatctgaaggaggaaggagaggtgcccttgttctcttggcagctacccttttcacctctgcagcttccaattcttctgccaatgctgggatcattgaagattaccttgagaggagcaaggccaacaagg

SEQ ID NO: 126683 - DNA, 186 bp, Glycine max
  unsure (1)..(186): unsure at all n locations
cgaagatagaagaagagatggctaaatctccagaaactgaacttcccgtcgaagctttcggttgggctgcttcagacacttctggcacccttgcaccttttcatttctccagaagagaaaatggcgttgatgacngtcatctcaagattctcttctgcggggtttgccactcggatctccacacaa

SEQ ID NO: 126684 - DNA, 264 bp, Glycine max
agcagacttaacaacagcacaaagcgggttactgtctgttcaagctaccatctctctctctctttcttagtgcctccttgccagaagttaaaatggcccaagaaactttcctattcacatctgaatcagtgaacgaggggcaccctgacaagctctgtgaccagatctccgatgctgtgctcgatgcatgctaggagcaggaccctgacagcaaggttgcctgtgaaacctgctccaagaccaacatggtgatggtatttcgga

SEQ ID NO: 126685 - DNA, 259 bp, Glycine max
ctggcttccattgcaacctttgacgtgttgtcgggttcatctgctccacagcacacggatctcacgacgttgagagtgatccatggcaccgttaacgccatatcgtggggcattttgttaccaatgggagccatcacggcacgctaccttaggcacattcaagctctcggccctgcatggttctatgctcatgcaggaatacaactgtttggtttcgttctgggaacagtggggtttgtgatcggaatccggctggggc

SEQ ID NO: 126686 - DNA, 261 bp, Glycine max
gaagaacaagtagttgagcactaagaaggagaagcaaatggcttcctcaatgatctcttccccagctgctaccactgtcaaccgtgccggtgccggcatggttgctccattcactggcctcaagtccatggctggcttccccaccaggaagaccaacaatgacattacctccattgctagcaacggtggaagagtgcaatgcatgcaggtgtggccaccagttggcaagaagaagtttgagactctttcctacctgccaga

SEQ ID NO: 126687 - DNA, 236 bp, Glycine max
ttttcaccttgtctgtctacttcatgtcgaggccacgtcccatttacctaattgattttgcatgttataaacccgatgatgaactcaaggtgtcaagggagcagttgatggaggtagcaagaaaatcaggcaagttcgacgaagcgagtctggagttccagaagaggatgctgatgtcctccggaatcggcgacgagacctacatcccgaaggccgtcgtggcctccacggagaac

SEQ ID NO: 126688 - DNA, 246 bp, Glycine max
cacaagccaagtgaaagtgataaaaaataaaaatcaaagagcataatgtcagggatacttcacaagattggggagacccttcatgtgggagggcacaagaaggaggaggagcataagggtgagcaccatgctggagaatacaaaggggagcaccatggtgaacacagtagtgagtacaaaggagagcatcatggtgaacacaaagctggagagtaccatggtgagcacaagccagagcacaaagag

SEQ ID NO: 126689 - DNA, 264 bp, Glycine max
attgaattcaaaaacttaagttcattccgtgtgttttgctaacttcctcaaaaccaaacatgtctaacacatgcggcaactgcgactgcgctgacaagactagctgcaccaagggaaacagctatggtgttattgtagagactgagaagagttacatcgagactgttgtcatggatgttccagcagctaagcatgatgggaagtgcaagtgtggcactaactgcacttgcacggactgcacctgtggccattaaggaatatgta

SEQ ID NO: 126690 - DNA, 261 bp, Glycine max
  unsure (1)..(261): unsure at all n locations
ggctgctgggactggactctttgtctagattntggatggagatgtgtataagtactatgctgatggagaatggaagaaatctgcttctgggaaaagtgttgccatcatcaaccccactaccagaaagactcaatacaaagttcaagcttgttcacaagaggaggttaacaaggtcatggacttggcaaaatctgcccaaaagttatgggcaaagaccccactatggaaacgtgctgaacttcttcacaaggcagctgctat

SEQ ID NO: 126691 - DNA, 262 bp, Glycine max
atccgcagctgctgttattcgcaccgcaaacaaacagtgagccatggccgtcggaaagaacaagcgcatctccaaagggaaaaagggtggcaagaagaaggcagctgatccctttgccaagaaggattggtatgacattaaggccccttctctttttcaagtgacaaatgttggcaaaaccctcgtctctcgtacgcagggtaccaagattgcttctgaaggacttaaacatagagtgtttgaggtctcctaggctgatctt

SEQ ID NO: 126692 - DNA, 258 bp, Glycine max
ggaagctgcctggggtctggctcgctatgcagcaattgctcaggacaatggatgggtcccagttgtggaaccagagatcttgcttgatggggagcatggtattgacagaacttttgaagtagcaaaaaaggtctgggcagaggctttcttctaccttgctgagaacaatgtcctttttgagggtattcttcttaagcctagcatggttacacctggagctgagtccaaggacaaggccagtcctcagacagttgctga

SEQ ID NO: 126693 - DNA, 266 bp, Glycine max
atttctcagtctccggaactcgtttctaccttcacttcgcacatctcgaaccctctctttccgagcactaggttaaagttcatcaatggcaggtcgtggcaaaaccctatcatccagcgccgccaagaaggccacctcaaggagcagcaaagccggcctccaattccccgtcggccgtatcgcccgtttccttcaggccggaaaatacgccgagcgcgtcggcgccggtgctcccgtttacctcgtcgctgtcctcgaatatctcg

SEQ ID NO: 126694 - DNA, 259 bp, Glycine max
atggatctcaagattcgaagtctggccatacctagagacttacactgaggatgtcgccctggaacttgccaaggagttgcaagccaagccagatctgattgttggaaactacagtgatggaaacattgttgcctctttgttagcacataaattaggagtaactcagtgtaccattgctcatgctctagaaaagaccaagtaccctgagtctgacatttactggaaaaaatttgaagagaaatatcatttctcatgccaa

SEQ ID NO: 126695 - DNA, 258 bp, Glycine max
gaaaaacagatagtgtgggagagagaagagcggaagagaaaatgacgaccaggttcaagaagaacaggaagaagagaggtcacgtcagcgccggacacggccgtatcggaaagcaccgcaagcatcccggaggtcgcggtaacgccggtggcatgcatcaccaccgtatcctcttcgacaagtaccatcctggtttcttcgggaaggtaggcatgcgctacttccacaaacttcgcaacaacttctacaatccgatca

SEQ ID NO: 126696 - DNA, 257 bp, Glycine max
cgacgacagcagccttgtgcggcactatgatgagcagctccttcctgaggagaaaagcagtggtcacaagcctgaaggcattccccaatgctaacgcagtgtttggtgtaaagggtggacgtggaggtggtgtgactgccatggctagcttcaaggtgaagctgataaccccagagggagagaaagaatttgaatgcccagatgatgtatacattcttgaccaggcagaggaggaagggcttgagcttccctactca

SEQ ID NO: 126697 - DNA, 258 bp, Glycine max
tggccattcgcccagcaaagaaccctttttgcgtgaagggtcgcgtctactgtgacccttgccgtgctggttttgagacctcagcaaccacctacattgccggtgctgagattatgttgcaatgcaagagcagggttagcaacgaggttgtgtacaccaagaaggggtacactgactcaactggagcatacacaatgtacgtggacgaggatcacgcagatcaaatatgcagtgccaagcttgtaagcagccctcacc

SEQ ID NO: 126698 - DNA, 259 bp, Glycine max
  unsure (1)..(259): unsure at all n locations
ggaacagcaacgttgtagagggangacttttgggggagagtgagtgagagtaaaaagatgtatctgcgtgcggtggcgcggccgttgatggcgaaggtgaaggcttcgacggggatcgtggggctggacgtggtgccgaacgcgagggaggtgctgattgggctgtacagcaagacgctgaaagagatccagaaggttcccgaagatgaagggtaccgcaaggccgtggagagcttcaccaagcacaggctcggcgtgt

SEQ ID NO: 126699 - DNA, 257 bp, Glycine max
ctcagaaagaaaaaatgcgtaacaataatttcactgtctcatcaatgcatggtgacatgcctcagaaagaaagagatgctattatgggagaatttcgtgctggaacaacccgtgtactaataacaactgatgtttgggcccgtggtcttgatgtacagcaggtttctctagttatcaattatgaccttccaaataatcgtgagctttacattcatcgaattggccgttctggacgttttggaagaaagggtgttgcg

SEQ ID NO: 126700 - DNA, 257 bp, Glycine max
gaagaataccccctcttttgctgcatcagaggagtttaaaattaagagcatggctgcacaagctcttgtatcatcatcttctcttaccttctcagcggaggctgcaagacaaagtcttggaccaagatcactccaatctccatttggcttctccagaaaagcctcctttcttgttaaggcagctgctaccccccctgtcaagcaaggatcagacaggcctttgtggtttgcatcaaagcaaagtctttcttacttgg

SEQ ID NO: 126701 - DNA, 210 bp, Glycine max
tagccattttgaatgcaaactacatggcaatctttgatgcatcggtgagtcctttagaacccatcatggctatgtaagtgtaagagattggttctaaaggactcaccgatgcatcaaagatagccattttgaatgcaaactacatggcaaaacgattggagaattattacccggttcttttccgtggagtcaatggaacagttgctcatg

SEQ ID NO: 126702 - DNA, 260 bp, Glycine max
  unsure (1)..(260): unsure at all n locations
cggctcgaggtgggacagccacagctatgctaatcaatagtttccataaangaactggataagaacttgcagagaaccaagttcggcagcttgggaagtatctaagcataagtttcttgtggagttgctttaagtggttcttcagtggtattggggattcatgtggatttgacaacttccctagcttaggtttgacactatttaagaacacattctactttgacttcagtccaacctatgttggatgtggtcttatctgt

SEQ ID NO: 126703 - DNA, 180 bp, Glycine max
aagcatccataccctcgcaggggaagaactggtagaaaaccaacaaagaaagaccccagatgtgagataccaaccagcgacacttacatcccgcgagacgaaaattttggtcacttgaagtcatcagacttccttacatatgcaataaactccttaactcaaaacgttttacctcagttc

SEQ ID NO: 126704 - DNA, 276 bp, Glycine max
  unsure (1)..(276): unsure at all n locations
gttttgtcgtgnggaacatcatcacattacattagattggcggtaatggcagcgtcactacacgtcgcagctactttcatgcaacccaccaagttgagcaggagcaacactttgcagcagaagtctactcagtccatttccaaggcttttggtttggaacctgttggagctaaaaaggtcacatgctcccttcaggctgatcttaaggacttggctcataagtgtgttgatgctaccaaaattgcaggattcgcccttgccacctctgccctcgtt

SEQ ID NO: 126705 - DNA, 277 bp, Glycine max
ttttacattgctccagcttttatggacaaacttgtggttcacattaccaagaacttcatgaccctgcccaacatcaaggttcctctcattcttggtatctggggagtgaagggacaaggaaaatctttccaatgtgagcttgtctttgccaagatgggaatcaaccccatcatgatgagtgctggagagttggaaagtggaaatgcaggagagccagcaaaactgatcaggcagagataccgtgaagccgcagacttgatcaagaagggaaagatgt

SEQ ID NO: 126706 - DNA, 279 bp, Glycine max
ctcgagccgattctctctgtgtatttccctacctctcccttcaagatgcagatcttcgtccagaccctcaccggcaagaccatcacccttgaggtggaaagctctgacaccatcgacaacgtcaaggccaagatccaggacaaggaaggaatccccccggaccagcaacgtctcattttcgccggaaagcaacttgaggacggccgtacccttgctgactacaacattcagaaggagagtactcttcacctcgtcctccgtctccgtggtggcatgcag

SEQ ID NO: 126707 - DNA, 275 bp, Glycine max
ctcgagccgctcgagccgaatcggctcgagcctgaaaatgattgccgatacgctgtctacccttgacttgtgacatctgagaactgccaaaaacgcaaaatcttttttattgcatggtctccttcagtggcccgcattcgcccgaagatgctatatgcaacatccaaggacaggttcagaagggagctgcagggcatccattatgagattcaggcaacagacccaacagagatggatcttgaagtcctcagagaacgtgcaaactgagcagtcac

SEQ ID NO: 126708 - DNA, 258 bp, Glycine max
gttcttcaattcattctagttctggattccgactagccgcgatgactcggctccgtatttcattctcgcggatctaatattaaggaatagcttaagggcacattacaatgaaggcattgattctggttgggggatttggaacaaggctgaggccactgacactcagtttccctaagcctcttgttgattttgctaacaagcctatgattgtgcatcagatagaagcccttaaggccattggagtgactgaggtagtgc

SEQ ID NO: 126709 - DNA, 274 bp, Glycine max
gaacaagtagttgagaactaagaaggagaagcaaatggcttcctcactgatctcttccccagctgttacctctgtcaaccgtgccggtgccggcatggttgctccattcactggcctcaagtccatggctggcttccccaccagaaagaccatcaatgacattacctccattgctagcaactgtggaagagtgcaatgcatgcaggtgtggccaccagttggcaagacgaagtttgagactctttcctacctgccagaccttgatgatgcacaa

SEQ ID NO: 126710 - DNA, 160 bp, Glycine max
ctcagaaagaaaacaaatcagtggatcttcaagacctcttgcttcggctcacttttgacaacatatgcggcttggctttcggccaagacccgcacaccctagccgtggggctcccagataacgctttcgctctctccttcgatcgagccactgaggccac

SEQ ID NO: 126711 - DNA, 276 bp, Glycine max
agaagctgctgccatggctctctcatccccatccttggctggcaaggccgtgaagctggtcccatcagccccagaagtgggaagggtgagcatgaggaagaccgtcaccaagcaggtctcctcaggaagcccatggtacggcccagaccgagtcaagtacttgggcccattctctggcgagcccccgtcctacctaaccggtgagttcccaggcgactacggctgggacactgctgggctttccgcagacccagaaaccttcgccaagaaccgtga

SEQ ID NO: 126712 - DNA, 272 bp, Glycine max
gggaatgcttaccggtcctgttaccattctcaactggtcctttgttagaaatgaccaacctagatctgagaccacctaccagattgctttgtctatcaaggacgtatggaagaccttgaaaaggctggcatcactgttatccaaattgatgaagctgctttgagagagggtcttccactgaggaaatcagagcaagctcactacttggactgggctgtccatgccttcagaatcaccaatgttggtgtccaggataccacccagatccacac

SEQ ID NO: 126713 - DNA, 271 bp, Glycine max
ctttcatccttgtttacaccgttttctccgccaccgatgccaaacgtagcgctagatactcccacgtccccattttggcacccttgccaattgggttcgctgtgttcttggttcacttggcaaccatccccatcaccggaactggtatcaaccctgctcgtagtcttggtgctgctatcatcttcaacaaggaccttggttgggatgaacactggatcttctgggtgggaccattcatcggtgcagctcttgcagcactctaccaccaggt

SEQ ID NO: 126714 - DNA, 267 bp, Glycine max
aatgaggctaaaaataatattaacattgaccagaagcatagacacgatatcccccgccatcaagttaaacaggtgatatgttctctttgtgagacagaacaagaggttcagcaaaattgtattaactgtggcgtttgtatgggcaagtacttctgtgggacgtgtaagctctttgatgatgatgtatctaagcagcagtatcattgcagtggctgtggaatttgcagaactggaggatgtgaaaatttcttccactgccacaaatgt

SEQ ID NO: 126715 - DNA, 277 bp, Glycine max
agctgatcttgtcaagagaggattggcagttgaggatccctctgccccacatggtcttcgccttgtgatagaggactacccttatgctgttgatggacttgaaatatgggatgctattaagacatgggtccatgagtatgtctctgtgtattacccaacaaatgcagcaattcaacaagacactgaacttcaagcatggtggaaggaagttgtggagaagggtcatggtgacttaaaagataagccttggtggcctaaactgcagactgtggaggat

SEQ ID NO: 126716 - DNA, 271 bp, Glycine max
aaaatatctcctaatgaagggcggcttcctgatgcttaaaaaggtgtttcacatctccatgatatcttttatcgaatgggcttgactgaccgagatattgttgcactatctggaggacatacactggggagagcacatccagagagatcagggtttgatggcccttggacagaggaccctctgaagtttgataactcatactttgtggaacttttgaaagaagattctgctgggctgcttaaacttccaacagacaaggctttattggagg

SEQ ID NO: 126717 - DNA, 256 bp, Glycine max
ggtgtttcagcagctgtctcaaaaactggtgctgctcccattggacgtgttaaacttgtgatccagaaccaggatgagatgctcaaaactggtagactttctgagtcctacaagggtattggtgattgctttaagagaacaatggcagatgagggtgctgtttctctatgaagaggagacactgcaaatgtcatccgttatttccctacccaggctttgaactttgcattcaaggactactcaacggctaatataa

SEQ ID NO: 126718 - DNA, 269 bp, Glycine max
ctcataacacaaagcacaaagcaaagctcatccttgagttatggaatggcagcagcttcttccatggctctctcatccccatccttggctggcaaggccgtgaagctgggcccatcagccccagaagtgggaagggtgagcatgaggaagaccgtcaccaagcaggtctcctcaggaagcccatggtacggcccagaccgagtcaagtacttgggcccattctctggcgagtccccgtcctacctaaccggtgagttcccaggcgacta

SEQ ID NO: 126719 - DNA, 281 bp, Glycine max
gacaactcccgtgttcccatcattgtcaccggtaacgatttctcaacactctatgcacctctcatccgtgatcggcgtatggagaagttctactgggcaccaacaagggaagaccgcattggtgtttgcaccggaattttccgcactgatggtattcctgaacaggacattgtcaagcttgttgacaccttccctggccaatccattgatttctttggtgcactgagggccagagtatatgatgatgaagtgaggaagtggatttctcgtgttggtgttga

SEQ ID NO: 126720 - DNA, 272 bp, Glycine max
caattcccaattcccaattcccaattcgaaacccttattcctttcaaagaaccaaattgagtgatcgtgatggcaccaaaggcagagaagaagccagcggagaagaagcccgcggaggagaagaagtccacggtgggagacaaggctccggcggagaagaagccaaaggccggaaagaagcttccgaaggagggaggcgccggcggagaagggaagaagaagaagagaaacaagaagagcgtggagacatacaagatctacatcttcaaggt

SEQ ID NO: 126721 - DNA, 229 bp, Glycine max
  unsure (1)..(229): unsure at all n locations
cattgctcangacgtacaggcatatatagtaggggagcatggggatagttcggtggcgttgtagtctagcattagcatagggggtgttccggttctgagctttttggagagccaacacattgggtatgagatagagacgttggagaacatacacaagtcagtgatagatggtgcctatgaagtgatcaggctgaaagggtacacttcatggggcattgggtactctggg

SEQ ID NO: 126722 - DNA, 214 bp, Glycine max
atttcattctgattcactatggccaatggtccagcaccgttttctgagattggaaaaagggcaaaagatcttttgtacaaggattacaactttgatcacaagtttagcctgtcaattccaaactccactggattggggcttatagcaaccggattgaagaaggatcaaatttttgttggtgacataagtacactctacaagagtggacatacta

SEQ ID NO: 126723 - DNA, 264 bp, Glycine max
gcagattcttggttgataacacacccataagggtattcaagaatgctgaacctcttggtgttccttttccaaagaaccagcccatgagaatctattctagcctctggaatgctgatgactgggccaccagaggaggattggtgaaaactgattggtccaaagcaccctttacagcatactaccgcaatttcaaggccattgagttctcatccaagtcttccatttcaaattctggggctgaatatgaggcaaatgagcttgatg

SEQ ID NO: 126724 - DNA, 266 bp, Glycine max
gcaaaaagaaagaatcccaggcgaggagaaagatggaggggaacgagcaggatgtgccgttgggagcgaacaagttccccgagagacagccaattgggacggcggcgcagagccaagacgacggcaaggactaccaggagccggcgccggcgccgctggttgacccgacggagtttacgtcatggtcgttttacagagcagggatagcagagtttgtggccacttttctgtttctctacatcactgtcttaaccgttatgggagtc

SEQ ID NO: 126725 - DNA, 268 bp, Glycine max
agagctcgctgctagtgaaccctaacacggcggcaacgagaggtgttcggttgaagctcagatcagcgatggcagcagcaacccgcacttctctgcggttcctcctctcagtctccgtaaccctaactctcgctcacctcgccgcctcaaattccgaaggcgacgctctctacacgctgaaacggagcctctcggaccctgacaacgttctccagagctgggatcccactctcgttagcccctgtacttggttccacgtcacctgcaa

SEQ ID NO: 126726 - DNA, 269 bp, Glycine max
cacaaggcagaaagcaagctcatcctagagttttaaaaatggcagcagcctcctccatggctctctcttccccatccttggctggcaaggccgtgaagctgggcccatcagcccccgaagtcgggagggtcagcatgaggaagaccgtcaccaagcaggcctcctccggaagcccatggtacggcccagaccgcgtcaagtacttgggcccattctctggcgagcccccgtcctacctcactggcgagttcccaggtgactacggctgg

SEQ ID NO: 126727 - DNA, 265 bp, Glycine max
gcttccggtttttctgagaactccttctcagtttcctgatagggtgaggcagctagaggagaagagtttcggaacttttgtcaacagcttccatgacttggaacctgcttatgctgagcaagtgaaaaacaagtgggggaagaaggcgtggattataggaccagtgtccctttgcaacagaactgcagaagataaaaccgagagagggaagctacccactattgatgaggaaaaatgcttgaattggttgaattctaagaaacca

SEQ ID NO: 126728 - DNA, 272 bp, Glycine max
gaaggcacagttacaaactatactttccacaaatactagtctgtttacattcatcactgtcttattgaaggccttgagtatgagactacctactactatagcattggctgtggtgattcttctcgagaattttggttcaaaacacctcccaaagttgatccagattctccctacaaatttgggatcattggtgatttggggcaaacgtttaattctctttccacccttgagcattatctacaaagtggagcgcagactgtcttatttgttgg

SEQ ID NO: 126729 - DNA, 237 bp, Glycine max
gaagaacaagtagttgagaactaagaaggagaagcaaatggcttcctcaatgatctcttccccagctgttaccactgtcaaccgtgccggtgccggcatggttgctccattcactggcctcaagtccatggctggcttccccaccaggaagaccaacaatgacattacctccattgctagcaacggtggaagagtgcaatgcatgcaggtgtggccaccagttggcaagacgaagtt

SEQ ID NO: 126730 - DNA, 281 bp, Glycine max
tacaactacaaaggttgctgtaggagataagatattgaagtagtgctaagtgcctaacacctgcagtgaacaatggcctctgcatcagcatctcttctcaagtcttcacttgttcttgacaagtctgagtgggtgaagggacaaacacttcgccaaccttctgctgcatcagttgtgagatgcaaccccaccaccccatcaggcctcaccatcagagctggttcctatgctgatgagctcgttaagaccgcgaaaacagtggcttcaccagggaggggtat

SEQ ID NO: 126731 - DNA, 273 bp, Glycine max
ggaattccaggctaatccattttatattgctggagagtcttatgccggagtttatgtgcctactcttgcttttgaagttgctaaaggaatccggagtggtacaaagcccgtgatcaattttaagtgttacatggttggaaatggtgtcacggacgctatatttgacggcaatgctcttatcccatttgtgcacgggatgggcctcatatccgacagtatctatgagaatttacaatcttcttgcaaaggaaactactacgatgcttactcttt

SEQ ID NO: 126732 - DNA, 274 bp, Glycine max
cctttggacacaccctctaaaccaatctatcaagtcctgaatctggtgtgcaaatatggagctttgttggcaaacatccatccatggttcttgaagaagcatggagataaaggggtgtgagagggtcctcaccactcacactcctccacttaaaacagtttgttttggcttagctttggcttctctaatcaacaagggatgtgttctaacattctctcttgagtggcagaagcagatatgcattctccaaaggaggagaggctttggctacagc

SEQ ID NO: 126733 - DNA, 273 bp, Glycine max
attttggcatccccgtggcttcaagaagagaatctcaatggaggcccaggagctgaagcgcgtgttccagatgttcgaccgcaacggcgacgggagaataacgaagaaggagctgaacgactcgctggagaacctgggcatcttcatctctgacaaggacctgagccaaatgatccagaggatcgacgtcaacggcgacggttgcgtggacatggacgagtttggggagctgtatcagaccataatggacgagcgcgacaatgaggaggacat

SEQ ID NO: 126734 - DNA, 272 bp, Glycine max
atccagagcaagacctacttggaagtgaaggggacaggaacagcaaaccagtgtccaacaattgatggtggattggagtcatttgccttcaagcaagggaaatacaatgccaagaagttctgccttgagccaacttcattcacagtgaaggcagagggtgtggccaagaacgctccccctgagttccagaacacgaagctcatgacacgtttgacctacactcttgatgagattgagggaccctttgaggtgtcttctgatggcactgtgaa

SEQ ID NO: 126735 - DNA, 140 bp, Glycine max
gattttaatgaatcttcttagagagtcaagcaagagcatacagattgaagcattgcatgtgtgcaagctcatatgctgccaaccaacataagccagctgatatcgtcagtatatttgttgcgaacaaaagtaagatgctg

SEQ ID NO: 126736 - DNA, 134 bp, Glycine max
gattttctgtctaaagaaattcgattcggaactacgatatgtccaaggtccaatatggaaagaatttcagaggttttccttgactttgtccgtgtcaacaaacaattcgaaatgcctcgacttttttagaatag

SEQ ID NO: 126737 - DNA, 275 bp, Glycine max
gagattttggcggaggttagctgcggattgggtgaagccatggttggtatcaatttgaccgatgacaaggttgagaggttcgccaatcgctctgaattaaatgaataataattctcagatttgtttctctgtggcgcttcaatttggactattaagaggttttagttgcttcttatatattataataaggttatgtttttagttttcggtgttttgaaccgtgttaattggattttagaaaaaccaaaaagaaaaaatagataggtagctatttg

SEQ ID NO: 126738 - DNA, 270 bp, Glycine max
cccctcttttgctgcatcagaggagttgtaaattaagagcatggctgcacaagctcttgtatcatcatcttctcttaccttctcagcggaggctgcaagacaaagtcttggaccaagatcactccaatctccatacagcttctccagaaaagcctcctttcttgttaaggcagctgctaccccccctgtcaagcaaggatcagacaggcctttgtggtttgcatcaacataaagtctttcttacttggatggcagccttccgggtgacta

SEQ ID NO: 126739 - DNA, 271 bp, Glycine max
gaaggataacacttttgtgtacatgtgtggactaaaaggaatggaaaagggtattgatgacattatggtgtcattggctgccaaagatggcattgattggactgagtacaagaggcaattgaagaaatcagagcaatggaatgtcgaagtctattaatttctgttcacttgcaccaatatcatctcctactttgtgctgcaacaagtctatcaaccctcctgcgttgtgtagatatatgacgtccctgtaatttttctttgacgattttta

SEQ ID NO: 126740 - DNA, 281 bp, Glycine max
tgctaaccattctctgcacttttcagttacaaagcatttcattgttttacaatatacaacactacaatggctgcttcaacaatggctctctcttcatcatcattggctggccaagctatcaagcttgccccctccacccctcagcttggtgttggaagggttagcatgagaaaaacagcctccaagactgtttcctcaggaagcccatggtacggcccagaccgtgtcaagtacttgggcccattctcaggtgagcccccatcctacctcactggtgaatt

SEQ ID NO: 126741 - DNA, 275 bp, Glycine max
ctcctccgttctcaaaaccctaacccgacgccaccattcatccgatccaatgagttcgagaggagccagcgcgctgctatctcgagccagcaggattcgctcgaagcttcaaacggcgctggaagccaccgttttggaggtggacgacgtgtcgtaccagcacgcgggccacgccgccgtgaagggaagttccgacaaagaaacccacttcaacgtgaagatcgtatcgcccaagttcgagggccagagcctcgtcaaacgacaccgtctcgtct

SEQ ID NO: 126742 - DNA, 273 bp, Glycine max
gtgttggcagacttcatgggggccatcggttcaggaaccggaatatttgctgcagtaacaatcatctatcagtactttgagacatttgagaaggagagagctagtgagcttggcttcttcggtttctaagttctgccaagcaaataatgttggttggtgactccaacgagctctcccacaccccttgtttgagggatcgttatacttgtaggtcgtttaacatcgtaagggaggacataactagtttgttgtcaagatttacttttctttttt

SEQ ID NO: 126743 - DNA, 270 bp, Glycine max
ctcactacctccttcttcggcactgcacgagtggtagttctgaaacttcgagtgatgaggattgcgaacctgcgcgcggtggaggtgctctcggtgctcgcatgaacctctttgacaggttcgccagagttgtgaagtcgtacgcaaacgctgtcttaagctcgtttgaagatccggagaaaatattggagcaagctgtgcttgaaatgaacgacgacttgaccaaaatgcgtcaagctactgcacaagtgttggcatctcaaaagcggt

SEQ ID NO: 126744 - DNA, 267 bp, Glycine max
ggacgaaaagcaaaccaagtgtatgccattgactatggccttgcaaaaaaatatagggatcttcagactcataggcacataccatacagggaaaacaagaaccttacaggcacagcacgctatgcaagtgtcaacactcatcttggaattgaacaaagcagaagggatgatctggaatctcttggttatgtgctcatgtatttcttaaaaggaagtcttccctggcaaggactgagggctggcaccaaaaaacaaaaatatgacaaa

SEQ ID NO: 126745 - DNA, 266 bp, Glycine max
cgcgtcgctccgcgccagtttcaccggacgaatatcttggagtttggagcgatccgagaaaaactctgtaaacatgttggtttaccaggacctccttacaggtgatgagcgtctctctgacttcttccgttacaaggaaattgtgaatggaatgctgtgggaagttgaggggaagtgggttgttaaaggagcagttgatgtagacattggtgcaaacccttctgctgtgggtggaggagaagatgagggagttgatgatgcagctg

SEQ ID NO: 126746 - DNA, 268 bp, Glycine max
cagagttgtggccagtggtggcaagaagatcaagactgacaagccttatggaattaatggtggcatggctttgagggaaggagttgatgcatctggcaggaaaggaaagggaaagggcgtttaccagtttgtagacaaatacggtgctaatgtcgatggttacagtcctatctacgacaccaaggactggtctccaaccggtgatgtctacgctggcggtacgactggcttggctatctgggctgtgactctacttggtcttcttgct

SEQ ID NO: 126747 - DNA, 275 bp, Glycine max
  unsure (1)..(275): unsure at all n locations
gtagccgtatggttccaaaaccgtcgagccagatggaaaaccaaacaatgngagagagattatggngtactcaaagccaattatgatgctcttaancttnactttgacaccctcgatcaggacaacgaagccttacgaaagcaggttaaggaattgaaatcgaggctgctgcaagaagagaacacaggaggaagcggtgtttcggtgaaggaagagataataacgaggcctgcagactcagaagacaaaacgatggaacaaagtaagagtgaccc

SEQ ID NO: 126748 - DNA, 266 bp, Glycine max
ccaagattcaggacaaggaaggcatcccaccggaccagcagaggctgatttttgctggcaagcagctcgaggatggaaggaccctcgctgactacaacatccagaaggaatcaacccttcaccttgtcctccgtctccgtggggggttttaagctcgttgtgtaatgttggatgtgttcccaaaacatttgaagaactttgatgtttaatgggtctgtaataatgtcccttgaaaataagttcggtttgtgttgaactcaattgtg

SEQ ID NO: 126749 - DNA, 263 bp, Glycine max
ctgagtcttgcaattgaagttgaagtcttgcccttctctcttcaactccaaacacaagacatcataatccatggcattctccgtctccactgtcggagctgtcaacagagctcttttgaacctgaatgggtctggacctggggtttcagctcccagttcatccttctttgggagcagcttgaagaaggttattggctcaagggtccccaacacaaagatttcctctggaagcttcaagattgttgctgtagaagagaagaaag

SEQ ID NO: 126750 - DNA, 265 bp, Glycine max
  unsure (1)..(265): unsure at all n locations
ccctacctctcctttcaagatgcagactttcgtcaagaccctcantgttaagaccatcacccttgaggtggaaagctctgataccatcgagcacgtcaaggccaagatccaggactaggaaggatttcccccggatcagcaacgtctcatcttcgccggaaagcagctcgaggacggccgtaccctcgccgactacaacatccagaaggagtcaaccctgcaccttgtccttcgtctccgtggtggcatgcagatcttgttcaag

SEQ ID NO: 126751 - DNA, 267 bp, Glycine max
gcagcttgcagtggatttgctagctaatcagcttctttttgaggccttaaattactctcatttctgcaagtatgcttgctctgaagaaaatcctgagctcctggacatgggaggtccagttgaaggtggatttagtgtcgcatttgatccccttgatggctccagcattgtggacacaaatttcacagtaggcaccatctttggtgtgtggcctggagataagttgactgggatcaccggaagagatcaagttgctgcagccatggg

SEQ ID NO: 126752 - DNA, 267 bp, Glycine max
cggacttctgaaaacctcactctcttcaaggcagatctcttgaactacgaatctcttcgctcagcaatttctggatgcactgcatttttccatcttgcttgccctgtaccctcaatcagtgttcccaaccctcaggttgaaatgattgagcctgctgtgaaaggaacaactaatgtacttgaagctagccttgaagctaaagtgcaacgacttgtctttgtatcatctttagctgctatttccaatagccccaatttgcctaaagat

SEQ ID NO: 126753 - DNA, 262 bp, Glycine max
ctcgagccgctcgagccgaatcggctcgagaattggggtaataccagatggtattgacaaaaatggcaaacctcataaactgagattgtattctattgctagcagtgccattggtgattttggagattccaaaactgtttctctatgcgtgaaacggctggtgtacacaaatgaaaatggagaaattgtcaagggagtctgctcaaatttcttgtgtgacctgaagccaggagctgaagtaacaataactggacctgttggg

SEQ ID NO: 126754 - DNA, 265 bp, Glycine max
gatggctctgggaagaggcagtgcagtggttctactactttgcttcttgctgcttcactctcagatggctcgtgctgccacctacacagttggagattctgggggttggacctttaacactgttgcctggcccaaaggaaagctctttcgggctggtgacacacttgctttcaattatagccctgggactcacaatgtggtggccgtgaacaaggctggatatgatagctgcaagactccaagaggagccaaagtgtataagtca

SEQ ID NO: 126755 - DNA, 268 bp, Glycine max
atcaagaccaagcgcactattcaatttgttgactggtgccccaccgggttcaagtgtggaatcaattaccagcctccgactgttgttccaggtggtgatcttgccaaggttcagagggccgtgtgcatgatctccaattccaccagtgttgttgaggtcttctctcgcatcgaccacaaatttgacctcatgtaagccaagagggcgttcgttcattggtatgttggtgagggtatggaagagggggagttctctgaggcccgtgaag

SEQ ID NO: 126756 - DNA, 180 bp, Glycine max
cttgaaggcatctatccccacaaccatcaacagtggtcgtggtgctgaattcgaatgggctgtcattgctctgttccatctgttgattacgagtaccgctagagtccgtgctcttcgtgaggctttctaccgccagaaccttccctatgtgaccaatttgcttgccactgtcttggtatt

SEQ ID NO: 126757 - DNA, 262 bp, Glycine max
ggttttcacctacatgagtatggtgataccacaaatgggtgtatatcaacaggagcacattttaatcctaataacttgacacatggtgctcctgaggatgaagtccgtcatgcgggtgacctgggaaacatagttgctaatgcagagggggttgcagaggctacaattgtggataatcagataccactctctggccctaattcagtagttggaagagccttggtggtccatgagcttgaggatgaccttggaaaggtgggca

SEQ ID NO: 126758 - DNA, 266 bp, Glycine max
caattggggcaccaatacacgggataagggcgtttttgtccacaaatcagcttaatacttatgataaggctagaaatgctgtggctcttgcactcagtccagttgtcaaagctcttgttgatccagatggtgcactgagggacataaggaatttggatagtattagcttttcagactggtttttatccaaaggtggcacacgcatgagtattacaaaaatgtgggatccagttgcctatgcccttgggcttattgactgtgataat

SEQ ID NO: 126759 - DNA, 193 bp, Glycine max
cgccaccgggaggaactcgaattcgattcgggagttcctggagaagaactataaggacacttctggccaggagactgtcaagttggctattcgcgcattgcttgaagttgttgagagtggagggaagaacatagaagttgcggtgatgactaaggagcagggtctgcgtcaactggaggaagccgaaattgat

SEQ ID NO: 126760 - DNA, 244 bp, Glycine max
attccatggaagaaccctgggtgcacttgctttgactagtaaagtgcaatacagaatgccttttgaacatgttatgcctggagtgacctttttagagtatggaaatgctcaggctgcagttgaattaattaagcagggcaagattgctgcagtttatgttgagcccatccaaggagaaggtggaatttacagtgctacaaaagaatttctacggtctctacgtaatgcttgtggatgaactggg

SEQ ID NO: 126761 - DNA, 268 bp, Glycine max
tatcgagccgaatgcggctcgagcaggctcgagctctctaccaatatacaactgatggcagatagattgtcgacgtgctcatcgagcaaaacattgttcccggtattaaagtcgacaagggtttggtaccccttgctggttccaacgacgagtcatggtgccaaggtcttgatggtcttgcctctcgctcggctgcatactaccagcaaggtgaacgtttcgccaaatggcgtactgttgtgagcatccccaacggtccctctgctct

SEQ ID NO: 126762 - DNA, 255 bp, Glycine max
gctagatccctagtaagccgccatggtgaagtactcaagggagcctgacaatccaaccaggtcttgcaaggctagaggcgccgaccttagggttcattttaagaacactagggaaactgcctttgcaatcaggaagttgcccttggttacagctaaaagatacttggaagatgttctagcgcacaagcaggccattccgttcagacgtttctgtcgtggtgttcggctgacagctcaagcagagtatagacactc

SEQ ID NO: 126763 - DNA, 201 bp, Glycine max
ataaggatcctgatgaagtaatggttaagtatgaagttcatctagaaaatggaaagcttttagcaaagtctgatggggaggagttcacagtcagagagggtcattattgtcctgcattgtcaaaggctgttaaaaccatgaagaagggagagaaagtgcttttgacagttaagccacaatatggatttggtgagaagggga

SEQ ID NO: 126764 - DNA, 265 bp, Glycine max
gcatcagcggagttgtaaattaagagcatggctgcacaaggtcttgtatcatcatcttctcttaccttctcagcggaggctgcaagacaaggtcttggaccaagatcactcgaatctccatttggcttctccaggaaagcctcctttcttgttaaggcagctgctactccccctgtcaagcaaggatcagacaggccattgtggtttgcatcaaagcaaagtctttcttacttggatggcagccttccgggtgactaggatttga

SEQ ID NO: 126765 - DNA, 205 bp, Glycine max
atgtaagtgccatttagagagaaggtcatatacactgtgatctctgctttcattttcctggtttgtagtcagctccctctatatgggatacacttaacaacaggtgctgatccattctattggatgcgagttattctcgcttcaaatcgtggaactgtcatggagcttggaatcactcccattgtgacttctgggctagtaatgc

SEQ ID NO: 126766 - DNA, 267 bp, Glycine max
acgcgatctctctctattctttgaaaccaaagttcaaactctgtcttccatgggttctatttcgaaatcaacgacgatgagttccacagaggcagcagccacagagaagaaaggtggaagagggaaaccgaagacttcaaagtccgtttcccgttcctccaaagctggccttcagtttcccgtcggcagtgtcgctcgctacctcaaggccggtcgctacgcccagcgcgttggctccggttcccctgtttatctctccgcggttct

SEQ ID NO: 126767 - DNA, 175 bp, Glycine max
ctcaattatcacttatgcttcttagtgcctcatataatttcaatttgatttcaattggtaatttcaatcgacatctatcttgttgggcctatgcttcgtcgccgaaggtcttacagggagaagcagtcttcggcggaagttgtttgtataaaacggccgaagttcctctttgtga

SEQ ID NO: 126768 - DNA, 264 bp, Glycine max
gccttgggataagcaaatcaggaatactgatttgcatgttagcagtggtcaagaggcacttgtttatgatgacaacactggacatggattctttaatgatgttactcgctgggaattctcttgtgaatgatactgatttgaaccctttggagtttttagcttctctattccctggttttgcttcagaaagcatttctgaagttttctttgccaatggatgcgatttacatctgacaattgagatgctcactcagttagagattc

SEQ ID NO: 126769 - DNA, 265 bp, Glycine max
gtggatgggaccccaataagagaattcaagaacatggaatcaaaaggagttgcattcccaaaggaacagccaatgaggatatactctagtctatggaatgctgatgactgggcaacaagaggtggacttgtgaagacagattggacacaagctccattcacagcatcatatagaaatatcaatgccaatgcctgcgtccattctggatcatcatcatcatcatcatcttgcactgccaactcttcttcctccaatgcctggttct

SEQ ID NO: 126770 - DNA, 247 bp, Glycine max
ataagctcgaatactcggatcaggacacacatcttttggtggcgtcacaaatccgtgagtggtctggaatcaatacattcgcaccagctacccagagtaagctgcttgaactcctgggaagtcttaaacaagagaatgtgaactccttgcagtacacttgtgctgggacaacgacgtgctggaaaatcttcaactgtgaagtctatcgttggggaaagcatggtttcgattagtactttccagtcgg

SEQ ID NO: 126771 - DNA, 175 bp, Glycine max
ctgaagtacatagatcctacttacatgatccgtgctatcccaagtaatgcatctgataatgtatactgcaccctccttgcccaaagtgctgttcatggtgcaatggcaggatacacaggcttcaccgtgggcccagttaatggcagaaattgttacattccattccatctgataa

SEQ ID NO: 126772 - DNA, 263 bp, Glycine max
gtgctctgctcgtgcctctagggttatcatatctccatttccatttcctctctctcagtttcacagaatcttaagctatgggaaagtcttacccaaccgtgagcgctgattaccagaaggccgttgagaaggcgaagaagaagctcagaggcttcatcgctgagaagagatgcgctcctctaatgctccgtttggcatggcactctgcatggacttacgacgtgagctcgaagaccggtggtcccttcggaacaaaaagcacc

SEQ ID NO: 126773 - DNA, 248 bp, Glycine max
aggttccatacgggctgttggtatggtccactggtgttggtacattgcctatgattcaatctttggatctcccactacgacctggtgggaggattggtgttgatgagtggctccgtgttccttcggtacaagatgtgttaacaataggagactgcagtggatttgttgaaagtaccggaagacaaacacttcctgcattagcccaagtcgcagagaggcaaggtaaatatttagcagctctactaaac

SEQ ID NO: 126774 - DNA, 180 bp, Glycine max
atttacagaagtcctccattctcacagctaggtggtggtgattagtgtatatatatacatacatggttgaagtgggtatttatcagatccctacgagcagtttggacccatttgcggaggcaaaagaaacagatgcaccaggggcgaaagaatatgttcatatccgcatacagcagagga

SEQ ID NO: 126775 - DNA, 262 bp, Glycine max
ctcgagccgctcgagccggttgtagggtggaggatcggacacgcgttggctcactttagctttcaaaacgtcggtttcaaccgcacgcccccttattagtgtgtatagtgagaagaatgaggccacaggacgcacagttgctctacctgcggtgttcaaggcacccatcaggcctgatgtggtgaacttcgtgcaccagaacatggccaagaaccatcgtcagccatactgcgtcaatgaccaggcaggtcaccaaaccagt

SEQ ID NO: 126776 - DNA, 258 bp, Glycine max
actcgagccgaatcggctcgaggcgaacgcactagcaacgaccacacaacaatggcttcaaagacattatccctccttgaccttcttgccctttttgtgagtgcaacaaatgcgttcattattccacaatgctcacttgcaccgagtgccattattccacagttcctccctccagttacttctatgggcttcgaacacccagctgtgcaagcctataggctacaacaagcgcttgcagcgagcgtcttagaacaacca

SEQ ID NO: 126777 - DNA, 256 bp, Glycine max
cggtgccgttggcaagacttgcatgctcatctcctacaccagcaacacttttcctacggactacgtgccaactgtctttgacaatttcagtgcaaatgtcgttgtggatggaagcactgtgaatcatgggttgtgggatactgctggacaagaagattacaatagattgagacccttaagctatcgtggagcagatgtattcctgcttgctttctctctcataagcaaggcagctatgaaaatgttgccaagaaat

SEQ ID NO: 126778 - DNA, 206 bp, Glycine max
aaggcacgttgctatgagttgctctttctcaattttgcaattgcaagtgaagaagccctaattttttgcagatctggaaatggcgacggcaacataccctccaccgccaccttattacaggctttacaaagattacttgcaagaccctaattctgctcccgaccctccaccacctattgaaggcacttatctttgttttggagcca

SEQ ID NO: 126779 - DNA, 266 bp, Glycine max
agaagaaatcatcatggcttcagcagcatctgggtttgtgctgtctcttaatgttgcagcttccaccacaaactcaagggtggtcttgttcaacacaaagaacaacgcttctaggcttcttgttagggcttcagatgagcctgcagcggcggcacctgccaccgccacacccccagctgaagcaagaagccaaaccaaaaccaccaccaattggtcccaagagaggtgctaaggtgaagattcttaggaaggaatcctactggtac

SEQ ID NO: 126780 - DNA, 250 bp, Glycine max
agaagatgagtttgagggcatcagagatagcgaagaagttgaatctgcaacctcacccagaaggtgggttttacgtggagacattccgagaccattccgtccagctttcgacctctcagctcccccccgaatactaagtggatcgccctgtatcgacctccatctattttctcgttccttctgggagtgtgtctcgcctccatcgcataccctgcgccgaaacctggcatcattacatcggcgaccctct

SEQ ID NO: 126781 - DNA, 259 bp, Glycine max
ggagtttgacttgaatggtaatcgggttaatcaaggaattagtgtctatggaaataaaggaagcacagatcagcatgcctacattcaacaactgagggaaggtgtgcacaatttttttgtgacattcattgaggtgctacgcgatagaccacctggtcatgattgggagcttgaaccaggtgtcacatgtggtgactacctgtttggtatgctacagggaacaaggtcagccctgtatgccaataaccgtgaatccatc

SEQ ID NO: 126782 - DNA, 252 bp, Glycine max
aaagctacatacctgcaacaacagttgctgcaacagattgcatcagctctgactgcgctagctgtggcaaaccctgctgcttacttgcacacagctgcttccattcaaccagctgactgtgtcgaagtctgctgcgtacctacaacagcgacaacagttgaataatccactagcggtggctatcacttggtcgctgccatcctacagctagcccaattgcatgcatacaaccgattctctttgatgaaccct

SEQ ID NO: 126783 - DNA, 262 bp, Glycine max
aagctctacagccgcaatgacatcaacaggatccttggccccaaggccaattgcatctccttcaaggactctgcatgccgttgctttggctacatggtctccaaaaagaagtacatctacgccattggtgatgactgctttgttgccactgatccatctggaaacaagattaatgcacttagacagcatatagaaaagctcctctgtccatccacacccttttttttcagcacgctctatgaagctttgcgagaaggtgcag

SEQ ID NO: 126784 - DNA, 169 bp, Glycine max
atttgaaccgagaacaattcgtaggatggagctacttgttctgggtgtcttggattggaggctaagatcagtaaccccactttgcttcctcgttttctttgcgtgcaaagcagattcaactggaacttttacccggttcctcatttcccgggctacagaaatcatcgta

SEQ ID NO: 126785 - DNA, 183 bp, Glycine max
agagtagaaccgtggtggtgtccgctctgcagtttgcttgcaccgatgatatctcaacaaacgtcgccaccgccgagaggctagttagagttgcacataaacagggtgcgaacatcattctcattcaggaactctttgaaggttattacttctgtcaggcacaaagagaggatttcattcaaa

SEQ ID NO: 126786 - DNA, 258 bp, Glycine max
aacaagtgtttctgtaaccatggcatccaccactctatcccctacaaccccttctcagctatgctcaggaaaaagtgggattttcagttcctcacaggcacttcttgtgaagccagtgaagaggcagatgatggggaagagcaagggattgagaattgcatgccaagccaccagcatttccgctgatagagtccctgacatgggcaaaagacagctcatgaatcttcttcttcttggtgccatttcactccccactgc

SEQ ID NO: 126787 - DNA, 246 bp, Glycine max
cacacctcatcgtttctctctctagatctctgtttcttctttttctccaaccttcgtttcaccaccacacttacattactttgtcgaaatggctccaccaattgagaccccaaacaaggtttccagctatcaacagtccccaaaccctcgtcttaacgagaggattctttcatccatttccaggagacacgttgctgcacactcgtggcacgatcttgagataggacccgaagctccaaagatctt

SEQ ID NO: 126788 - DNA, 187 bp, Glycine max
atcacccataatattttgagcattcagaaacacacctagcgaacggactagcaacgacctaacaacaatggctaccaagatattatccctctttgcgcttcttgccctttttgtgagcgcaacaaatgcgttcattattccacaatgctcacttgctcctagtgccattattccacagttcctccct

SEQ ID NO: 126789 - DNA, 259 bp, Glycine max
gtgcaaagtgcagggcaagttgaccctcaaaaccagacacgaacattcgtcaaggtttacaaatcagggtcagttgggcgctcacttgacatctcccggttcagcagttatcatgagctgcgggaggagttggcacagatgtttggtattgaggggaaattagaagaccctcttagatcaggctggcagcttgtattcgtcgacagggagaacgatgttcttctccttggagacgatccgtgggaatcatttgtcaata

SEQ ID NO: 126790 - DNA, 253 bp, Glycine max
gacctgccccccaatcccattcatcctctgactcttcttctcttcaaaacaaacaaataaatatccttttttccaaaactccattaccattaccattcacaatgagttattacaaccagcagcaaccgccggtcggagttccgccgccgcaaggttatccgccggaggggtacggaaaggagggatatccaccgccgggatacccgccagcgggatacccgccagcgggatacccaccgccgggatatccgcc

SEQ ID NO: 126791 - DNA, 245 bp, Glycine max
tcgcattgccgagtcccatcacaaccttaactcgttccgtggaacctctaacattccacgttttcacctcagatggtttactcatactaatgaggttaaactttgtggccatgccacgttagcggctgcacacacactattttcgtatggtttggtgaatttcaatattattgagttttttactgcatctggggtactaactaccaaaaagatcccaccgatcaataactgtaccagtggctcaa

SEQ ID NO: 126792 - DNA, 244 bp, Glycine max
ggtaaagagacctctaacagtgatgctcctgagaacaatcctcagtatactacggtttatgtgggtaaccttgctccggaggcaactcaacttgatctccatcaccacttccattctcttggagctggagtgattgaggaggttcgtgtccagcgtgataaagggtttggttttgtgaggtacagtactcatgctgaagcagctctagccattcagatgggaaatgcccagtctcttctctgtg

SEQ ID NO: 126793 - DNA, 249 bp, Glycine max
ctgctgttcaaccagctgcgctcaatggccttgctggaagttccctctctggaactaagctctctttcaagccctctcgccacactgtcaaatccaagaacttcaggagtggtgccgtggtagcaaagtatggtgacaagagtgtgtactttgatttggaggatctgggcaacactacggggcagtgggacttgtatggctcagatgcaccttcaccctacaaccctcttcagagcaagttcttcgaga

SEQ ID NO: 126794 - DNA, 256 bp, Glycine max
aaaacttcaggcttgacttcgctgtgagtcgagagcaaacaaacgagaaaggggagaagatgtacatccaaacccgaatggctcaatacgcagaagagctttgggaattactgaagaaggataacacttttgtgtacatgtgtggactaaaaggaatggaaaagggaattgatgacattatggtgtcattggctgccaaagatggcattgattggactgagtacaagaggcaattgaagaaagcagagcaatggaa

SEQ ID NO: 126795 - DNA, 254 bp, Glycine max
gaggttgcataactgaacaaacaaagcaaccctatgtcgaaggtggtttgtgtcaccggagccagtggcgaccttggatcatcggtggccctcctcctcctccagcgtggttatacggtccatgccaccgtccaagacatcaaggatgaaaatgagaccaaacatttggaggaaatggaaggagcaaagagtcgtctccatttttttgaaatggatcttcttgacatcgactccattgccgctgccataaaggg

SEQ ID NO: 126796 - DNA, 244 bp, Glycine max
caagaagctcagcattcacttctccaagagaatcctgctgtgtgggaaattagtggacacatggttttaaagaggaggaaggattatgatgaggcgtctgaaggcaatgcttggaggcttcttgctgaggtgtccctttctcaagagaggtttcaagaagtcaatgatcttgtttttgaagccattggctctggtgaattggaggatgtcaatgttcaaagtgtcaaaaaagaagttgatgcag

SEQ ID NO: 126797 - DNA, 240 bp, Glycine max
gctaatgaccgtaagatgcttgcttgcaacagccatccttagtgcatctgtatctccaaagaatcgcggcacaacaactacaacaacagttgctaccaacaatcaatcaagtagttgcagcgaaccttgctgcttacctccagcaacaacagtttcttccattcaatcaactagctggggtgaaccctgctatctacttgcaggcacaacagctactaccatttaaccaacttgtcggga

SEQ ID NO: 126798 - DNA, 240 bp, Glycine max
tcagattctcagttgatggcactcccattagagagttcaagaactcggaggctattggggttcccttcccaaagaatcagccaatgaggatatattctagtttgtggaatgctgatgactgggcaacaagaggtggacttgtgaagacagattggacacaagctccgttcacagcttcctacagaaacttcaatgctgaggcttgcatatggtcttctggagcatcttcttgcgctaaaa

SEQ ID NO: 126799 - DNA, 226 bp, Glycine max
caaggctctactctactgcttcaccttctgctctagaaaattcagtggtgatacatggcttcggctactctctctgtagccaaaccagcccttcaggcaaatgggaaaggcttctctgaattctctggcctccgcagctcatcaggcttccttcccttttctagaaaatcttcagaggatttccattctgtcattgccttccagacctatgcagttggaagcagtg

SEQ ID NO: 126800 - DNA, 248 bp, Glycine max
caatgaacaagatgtacttctatttatcgacaatatctttcgcttcgtccaagcaggatctgaagtatctgccttattgggtcgaatgccttctgctgtgggttatcaacccactcttagtactgaaatgggttctttacaagaaagaatcacttctaccaaagaggggtccataacttctattcatgcagtttatgtacccgcagacgatttaaccgatcctgcgcctgctacgacatttgcacatt

SEQ ID NO: 126801 - DNA, 248 bp, Glycine max
cacttcccttctccaacatgccaaacgacagcgttctgagtcttttcttcttcgttaccctcttcacatgccttctctctgctaattcccacgatgaccatattttcctaccgagtcaactccatgacgatgactcagtgagttgcactgctaccgacccaaaccttaactacaagccggtgatcggaatcctgacccaccccggcgacggtgcctctggccggctcagcaacgccaccggggtttct

SEQ ID NO: 126802 - DNA, 249 bp, Glycine max
ctcagatgcaatattgtgctgcactctaaaggcattgccagtgttcactttctcgaaccaggctgggcttgacatgctggagaccacccttgttgcattacaagatacacctttagagaaaatatttttcgtccatgatcatcaaatatttttttcagagtttccccagattattcaacaggtctacaattttgttgtaataaaagcattgattccacttccatatggcttgctattggatgtttttcc

SEQ ID NO: 126803 - DNA, 254 bp, Glycine max
aagagttatgatccatcagccacttggaactgctggtggaaaagctacagaaatgagcattcgaataagagaaatggcatatcacaagattaagataaacaagatactatcaagaattacagggaaacctgaagagcagattgaattggacactgatcgtgataattttatgaatccttgggaagctaaggaatatggtttagttgatggtgttattgatgatggaaaaccaggattggttgcaccaattggag

SEQ ID NO: 126804 - DNA, 249 bp, Glycine max
gcaaccaaaatgactcaagcccagattcaaccagttaaacttggaacccaaggctttgaggtttcaaaattgggattcggatgtatgggccttactggagcgtacaatgaccctctccaagaacaggatggcatatctgttatcaagtatgcgttcagtaagggaatcacattttttgatactgcggatgtttatggagccaatgctaatgaacttttggttggaaaggctttgaagcagctgcccaga

SEQ ID NO: 126805 - DNA, 238 bp, Glycine max
gaaattatcaacaaagagattggaggcataatgtctgtagaaaaggcgattgaaaaaaagaagctgttcatgttagactaccatgacatacttttaccctacgtcaacaaagtacgcaaactcaaggggaaaacactgtatggttcacgaactttgttctttctaaactcagaggggacactgaggcctctagccattgagttgactcgaccgccgtcatcttcaaataatacgggcc

SEQ ID NO: 126806 - DNA, 245 bp, Glycine max
gaaagtggaatccagtagcaacaacagagcaacaatggcgaccaagatattttccctccttatgctccttgctctttctgcatgtgttgctaacgcgacaattttccctcaatgctcacaagctcctatagcttcccttcttcccccataccttccatcaatgatagcttcagtatgtgaaaacccagctcttcagccctataggctccaacaagcaatcgcagcaagcaacatacctttatcac

SEQ ID NO: 126807 - DNA, 245 bp, Glycine max
aagctcgaggaggttgctgtcaccaccggcgaggaggacgaagatgcaatcctggatctcaaatcgaagctttaccggttcgacaaggacgggaaccagtggaaggagcgtggcgccggcactgtgaagttcctgaagcataaggcttccggcaaggttaggcttctcatgaggcaatccaagacgctcaagatctgcgctaatcatctcattttgcctacgatgagtgtgcaagagcacgctgg

SEQ ID NO: 126808 - DNA, 240 bp, Glycine max
tcataacacaaagcacaaagcaaagctcatccttgagttaaaaaatggcagcagcttcttccatggctctctcatccccatccttggctggcaaggccgtgaagctgggcccatcagccccagaagtgggaagggtgagcatgaggaagaccgtcaccaagcaggtctcctcaggaagcccatggtacggcccagaccgagtcaagtacttgggcccattctctggcgagcccccgtcct

SEQ ID NO: 126809 - DNA, 258 bp, Glycine max
gacttgttaacattattgttggaactcctccttcgagccagtgttgtgcattgatcaagggtttggcggatttggaagctgcactttgcctatgcaccgcaattaagagcaatgtgcttggaatcaacttgaacgtacctgtgacgctcagcgtgatccttagtgcttgtcaaaagactgtccctcctggtttccaatgtccctcctgagataatcaaattaggttcatgagatatctctcgtcatcagagaaatgtt

SEQ ID NO: 126810 - DNA, 253 bp, Glycine max
caaccgttcacaaatcttttctaagtgtagtagaggagaggaaccgcgccaaccctctcttcttcttcttcttcttcaatccttttataacctttatagtttcattcttaatcgttgggaaaaatgttcatcgagaattgtaaggtagagagtgctaatgtgaagtacaccgagactgagattcagtccgtgtacaactactgaaccaccgaacttgttcacgagaacaggaatggcacctatcagtggattg

SEQ ID NO: 126811 - DNA, 245 bp, Glycine max
actcaccaaagccttcctagaacgataaaaaaatcagaagagcaattttccctcaccaaagaagaagaaccaaacaatggccgatcaacttaccgatgaacagatctccgagttcaaggaagccttcaacttgttcgacaaggacggcgatggttccatcacaaccaaggagcttagaactgttatgcgtacattgggcaaaaacccaactgaggcagacctccaggacatgatcaatgaagtga

SEQ ID NO: 126812 - DNA, 180 bp, Glycine max
ctaagtttgagatgatcttacttagcatcttctctttgcacctaagacattgagaatgctaagagaagatgctaagtttgagaccatcttactatatttttcatattggaccgtcttcctctataattttgagttacagtgtccacttaacttgaatttggtgccttttccttttgtcct

SEQ ID NO: 126813 - DNA, 243 bp, Glycine max
ccatgtgttgctaacgcgacaattttccctcaatgctcacaagctcctatagcttcccttcttcccccataccttccatctctgatagcttcagtctgtgaaaacccagctcttcagccctataggctccaacaagcaatcgcagcaagcaacatacctttatcacccttgttgttgcaacaatcgccagccctatctttggtgcagtcattggtacaaaccatcagggcacagcagctgcag

SEQ ID NO: 126814 - DNA, 244 bp, Glycine max
accaagcatatctcatttgaatacattccttgtagtttatactgaaagatgggtttgaagatggcgttactgatcctaggcctttccctcatgctccttttggtctcctctgaggtggcatccacgaatacaaaagaggaggcaaatggagtggatgatgccaaatatcccggtggaagctatggagggggttacccaggtcatggcggtggcggttatcctggccatggcggtggcggttatc

SEQ ID NO: 126815 - DNA, 246 bp, Glycine max
tgagaccaactagcaacatagaaagcacaatagtgtaccaacaatggcagccaaaatattttgcttccttacgctccttggtctttctgcaagtgttgctaccgcaaccattttcccacaatgctcacaagctcctatagcttcccttcttcccccatacctctcaccagcggtgtcttcaatgtgtgataccccaattgttcaaccctacaggatccaacaggcaatcgcaacaggcatcttaca

SEQ ID NO: 126816 - DNA, 240 bp, Glycine max
acacaaggcagccagcaagctcatcctagacttttaaaaatggcagcagcctcctccatggctctctcttccccatccttggctcgcaaggccgtgaagctgggcccatcagcccccgaagtcgggacggtcatcatgaggaagaccgtcaccaagcaggcctcctccggaagcccatggtacggcccagaccgcgtcaagtacttgggcccattctctggcgagcccccgtcctacctc

SEQ ID NO: 126817 - DNA, 117 bp, Glycine max
acacaaggcagaaagcaagctcatcctagagttttaaaaatggcagcagcctcctccatggctctctcttccccatccttggctggcaaggccgtgaagctggggccattagccccc

SEQ ID NO: 126818 - DNA, 245 bp, Glycine max
caaatgcttgtctaccacacttgctagtgttagcagtaacattggtattggttagttatgcaatgggagattcagctcaagacaaacagagatgtgcagaatccctgacaggtgttgcaacgtgtctgccatatttgggtggtgacacgaaagcacccacagcagattgttgcagtggtctcacacaagccatgaagaccaacaagaagtgtgtctgccttattctcaaagacagggatgatcct

SEQ ID NO: 126819 - DNA, 247 bp, Glycine max
gtagtggctaacccattggtcgccgccttcctacagcagcaacaattgctgccatacaccagttctctttgatgaatcctgtcttgtcgaggcagcaacccatcgttggaggtgccatcttttagattacatatgagatgtactcgataatggtgccctcataccgacgtgtgtttcctagaaataatcaatatattgattgagatttatctcaaaaaaagaaagttcggagaaaagggggggaccc

SEQ ID NO: 126820 - DNA, 261 bp, Glycine max
tgagtgtgaatgacaaccaaactggttcgaaatatatgggtaagcaatatttctatatgattcagtagtggttgtaatgaaaggtcaatacatggagctcgagaggatattaactatttttacaaccattgatttatcaaataatatgtttgaaggagaacttctgaaagtccttggcgaattgcattctctcaaagggcttaacctttcgcacaatgcaatcacgggtaccattccacgatcctttggtaatgtaagaaa

SEQ ID NO: 126821 - DNA, 275 bp, Glycine max
gcgatgcggccaagctgatctcggacgccactgcctcggccgggatggggctgatcagctaaggaggattgaggcgtccagggaggtggcggccacgctggcgaagtcgcccaacgtctcgtatttgcccggtggacagaacttgctcatggctctcggtccttcgcggtgatcattgtggcggtgatggtaatctgtttgttgaattgattttgaagggctcaacgatgctgtgtgatgacatgcttggatcatctttgtctttagtttttccg

SEQ ID NO: 126822 - DNA, 260 bp, Glycine max
attgagaccaactagcaacatagaaagcacaatagtgtaccaacaatggctagcaaatattttgcttccttatgctccttggtctttctgcaagtgttgctaccgcaaccattttcccacaatgctcacaagctcctatagcttcccttcttcccccatacctctcaccagcggtgtccttaatgtgtgaaaacccaattgttcaaccctacaggatccaacaggcaatcgcaacaggaatcttaccattatcacccttg

SEQ ID NO: 126823 - DNA, 275 bp, Glycine max
gcaaagtaccacaaggatgtcttgatagtggttggtacagcagactagactgggctctggaatttcttaaaggacaccaggatgatataaagttcaggctagagcttgcatggaaagcttttcaacatgttgcttcctatgactcagcagtatctgagtggttgtggaaacagagtgtgggagataaattccctgctagcttgacagtgcgctctctctcaaaagtcatctccgttatggtgaaaatcctcatcacagagctgcattctatgttg

SEQ ID NO: 126824 - DNA, 269 bp, Glycine max
ataagaagatgtcacaacatctttgcaccacgcgcgagatcaggggcccttcatgcgaactcttcagggcgcggacacgttctccttagcgagcggcgcgatctcctcgccttcgacccctggctcgccgccggcgaccccgaggctgagcagcacgttctcccagttcttggcacggctcttccaggagagatcctggatcatgcagttcctcaccatctcctcgtacgcaggagtgccgaccaccttgatggcgcgctgcaatgtgg

SEQ ID NO: 126825 - DNA, 274 bp, Glycine max
attctatacccttttcatccagcaaggtggaagttgtatgcaacaagttttgcgaaaacccgggacagaggttgcccagatcatgaagaatactctcagtgagtgtgaagagggtggcgtcataggagaggaaaagtactgtgccacttcgcttgaatccatgattgatttcagcacatccaagcttggaaaagatgttgaggttgcgtccacggaagtagtggtagacgaggcaacgggattgcatgaatacaccgtagcaccgggagtgaac

SEQ ID NO: 126826 - DNA, 274 bp, Glycine max
ctcgagccgctcttggtagtctacacaggagtgtcatactgaagggagtgggatgagtgacatcagtcaactccataataacagaagctaccctctttcagatgtcatgccattagacagccccaacatcatcgaagcaactgaggggactaggggtgctgatatccaggctttgatcgaaaaagtgggatatctcactggatgatagaaattgcaaatcattttagtaatatacctcttcgtggctgcctgctatgaaacctacttctggagc

SEQ ID NO: 126827 - DNA, 273 bp, Glycine max
cgctgttcctacaatcattccaaatgtgcccttccggtcgcaccctcctccctcctccgtctccgatttccgaccggcattcgacgtcctcgatgccgaccgcgacggcaaaatcagccgcgacgacctccgcgccttctacgccggagtcggcggcggaggagatgacgtgatcggggcaatgatgacagtggctgacaccaataaggacgggttcgtggagtacgaggagttcgagcgcgtggtctcggcggagagaaagcccgtggggta

SEQ ID NO: 126828 - DNA, 246 bp, Glycine max
atttcgagcacacagacacacaccaagcgatccaacgtagctacaacctatctcaatggctaccaagatattatccctccttgcgcttcttgcgctttttgcgagcgcaacaaatgcgtcaattattccacaatgctcacttgctcctagttccattattccacaggtcctcccaccagttacttcatcggacttcgaacacccagctgtgcaagcctataggctacaacgagcgattgcggcgat

SEQ ID NO: 126829 - DNA, 271 bp, Glycine max
gcttgttgtgatgattccacaacattgcttcccttgcagcatccactgctgctgctacccttggcatgtcagaaatgcttggaaaccccatcaacctcagtggtgccacaaggccagctccatctgcctctagccctgcctccttcaagactgtggctcttttctctaaaaagaaggctgcacctccacagaaagctgcagctgctgctcctgccaatgatgagcttgccaagtggtatggtcctgacagaaggatcttcttgcctgaggg

SEQ ID NO: 126830 - DNA, 273 bp, Glycine max
gcaacatagaaagcacaatactgtaccaacaatggcagccaggatatgttgttccttatgctccttggtctttctgcaagtgctgctaccgcgaccattttcccacaatgctcacaagctcctatagcttcctttcttcccccatacctctcaccagcggtgtcttcagtatgtgaaaacccaattcttcaaccctacaggatccaacaggcaatcgcagcaggcatcttacctttatcacccttgttcctccaacaaccgtcagccctatta

SEQ ID NO: 126831 - DNA, 271 bp, Glycine max
ctactctcagcaacagcagtttctgccattcaaccatactggctaacattgactctgctgcgtatttgcaacaacaactaccattcaggcaactagctgttgtctacccccagcaatttcttccattcaagcaactagcttcattgaactctgctgcttatttacaacagcaacagctatcaccattcaaccagctagctgatgtgagccctgctgacttctagacacaacaatagttgttggtcgttctacctgcacgctgcgcctaacg

SEQ ID NO: 126832 - DNA, 268 bp, Glycine max
cgcaacaaaaagagagaatcccaggcgaggagaaagatggaggggaagacaggatgtgtcgttgggagcgaacaagttccccgagagacagccaattgggacagcggcgcagagccaagacgacggcaaggactaccaggagccggcgccggcgccgctggttgacccgacggagtttacgtcatgctcgttttacagagcagggatagcagagtttgtggccacttttctgtttctctacatcactgtcttaaccgttatgggagtc

SEQ ID NO: 126833 - DNA, 265 bp, Glycine max
gcaacatagaaagcacaatagtgtaccaacaatggcagccaaaatattttgctccttatgctccttggtctttctgcaagtgctgctacggcgaccattttcccacaatgctcacaagctcctatagcttcccttcttcccccgtacctctcaccagcggtgtcttcggtatgtgagaacccaattcttcaaccctataggatccaacaggcaatcgcagctggcatcttacctttatcacccttgttcctccaacaatcatcag

SEQ ID NO: 126834 - DNA, 261 bp, Glycine max
gtgaatcagcaccacattcacctgagctttttgtgaggattccaaagcatgcttcccttgcagcatccactgctgctgcatcccttggcatgtcagaaatgcttggaaaccccatcaacctcagtggtgccacaaggccagctccatctgcctctagccctgcctccttcaagactgtggctcttttctccaaaaagaaggctgcacctccaaaaaaagctgcagctgctgctcctgccaatgatgagcttgccaagtggt

SEQ ID NO: 126835 - DNA, 264 bp, Glycine max
gtctttcctgtgtgttagctaagtttgatggattacttgggcttgggttcaggagatctcagttgaaaatgctgtgccagtatggtacaatatggtgaagcaaaatcttgtaagcgaaaaggtgttctctttttggctcaatggtgatccaaaagcgaaagatggtggtgaactaatttttcgaggtattgatcctaaacacttcaaaggagatcatatttatgtcccagttactaactaaggctactggcagattgaaatggg

SEQ ID NO: 126836 - DNA, 199 bp, Glycine max
ttgcaattggagttgaagtcttgcgcttctctcttcaactcgagagagaagatcatcagccatggctgcatccgtctccagtgtcggcgctgtcaacagagctcttttgaacctgaatgggtctggacctggggtttcagctcccagtgcatccttctttgggagtagcttgaagaaggttattggctcaagggtcccc

SEQ ID NO: 126837 - DNA, 267 bp, Glycine max
gagagatccatcgatcaattaatttccaatggccgatcagctcaccgcgaacagatctctgagttcaaggaagcctttagcctcttcgacaaggacggcgatggttgtattaccaccaaggaacttgggactgtgatgcggtcgcttgggcagaacccaactgaggctgagctgcaggacatgataaatgaggttgatgctgatgggaatggtaccattgatttcccagaattcctcaatctcatggcgcgcaagatgaaagacact

SEQ ID NO: 126838 - DNA, 270 bp, Glycine max
aaaagccataggttactactcttcgccttttcctttgcaattgttaccaacaattcttgcttagcccttacaagcaagcattaacaacaatgaagaaagtagtgttaaaggtgggcttacatgatgatagaatcaagcgaaaagttatgagaacagcatctggtctttcaggggttgaatcagtttctattgacatgaaagacgagaaaatgaccttattagggaacattgatccagtgaatgcagtgtgcaagctacgagagtgttgtc

SEQ ID NO: 126839 - DNA, 242 bp, Glycine max
aacgggtggtgcctctcttccatatccccagccaaaacctctctcataaggccacattatggcgctttccgtcttcgcaacccttaacactccttcttctccttcctcttcatcttccttcccctctctcattcaagacaggcctgtttttgctgcccctgcccccatcatcataccaactgtgagagaggatatggcaaaggaatacgagagagctattgaagaacttcagaaattgttga

SEQ ID NO: 126840 - DNA, 245 bp, Glycine max
aaatacttttggagggatcaattcttatcctgcttcagatatctctatcagatcatgaggaactaaatagtaacgttcctgatccagtggaagagatccgtcaacaagttggcaggatgcctggggatactgttctcaagattctgatgcagaaagttcgtactctagacttaaatttgcttgtgttggagcggtatatggaggacataaatactagatatgtcaatatcttcaaagagtacagc

SEQ ID NO: 126841 - DNA, 269 bp, Glycine max
agctattatactctctagagtaattgcggaatctgctagaatttactataatggcgaaagacgttgagcaggtcacagagcaaggtgaatactccgcgaaggactagcatgaccctcctccggcaccgttgatcgacccagatgatctcacaaagtggtccttgtacagagccgccatagctgagttcatagcaacactcctttttctttacatcaccgtgttgaccattattggctacaagagacagagtgacaccaaaatccccggg

SEQ ID NO: 126842 - DNA, 267 bp, Glycine max
caccaccaagccaacagaagatgtttctccacattgttttcctcgcttgcttctctcatccacttcccatgccactgtccaagacttctgtgtggcagaccttaagggtgcagacaccccttcaggctacccctgtaagccacctgcaaatgtaacttcagatgactttgtgtacacaggcttagctgaagctgcagatgtcacaaacataatcaatgctgctgtgactccagcttttgttgctcaattcccaggtctcaatgggct

SEQ ID NO: 126843 - DNA, 265 bp, Glycine max
ctttgcttctctatgtcctcacccgcattcaacatagcaaagtctccattggtcatttgttgctatgttgaatgctggtgagaacatagagaagcaactgaccaatggcctactttgaaaaaaggggttccccatttgacagtttatactgcattcttagctttctcaatatcttgttttgttattgccatgattctaaacatcaccttcctctaccaccctgtcctaaacctacccaagtcatcatttaaggcttatttggcag

SEQ ID NO: 126844 - DNA, 237 bp, Glycine max
caactagcaacatagaaagcacaatagtgtaccaacaatggcagcaaaatattttgcttccttatgctccttggtctttctgcaagtgctgctaccgcaaccattttcccacaatgctcacaagctcctatagcttcctttcttcccccatacctctcaccagcggtgtcttcagtatgtgaaaacccaattcttcaaccctacaggatccaacaggcaatcgcagcaggcatctta

SEQ ID NO: 126845 - DNA, 263 bp, Glycine max
caaaggtaactgctgtaatagggctgacggttgttggaggaacaggtgatagaggtaagatgcctgctgcctacccccagcaatttcttccattcaaccaactggcagcattgaactctgctgcttatttacaacagcaacagctaccaccattcagccagctagctgatgtgagccctgttgccttcttgacacaacaacagttgttgccgttctacctgcacgctgcgcctaacgctggcaccctcttacaactgcaacaa

SEQ ID NO: 126846 - DNA, 254 bp, Glycine max
atttgtgactgcaagatacaccattctgtagatggactccgtttggatatctgaaggtgatatcatagaggacagtttactaatgggtacggactactatgagaccgaagctgataaggaactccttgccgacaaaggtggcattcgtatcagtattgggaaaaattcatgcatcaggcgagcaatcattgacgacaatgctcgaattggagacaatgttaagatactcattgctgtcattgttcaagaagctg

SEQ ID NO: 126847 - DNA, 265 bp, Glycine max
caaaacactcataacacaaagcacaaagcaaagctcatccttggttaaaaaatggcagcagcttcttccatggctctctcatccccatccttggctggcaaggccgtgaagctgggcccatcagccccagaagtgggaagggtgagcatgaggaagaccgtcaccaagcaggtctcctcaggaagcccatggtacggcccagaccgagtcaagtacttgggcccattctctggcgagcccccgtcctacctaaccggtgagttcc

SEQ ID NO: 126848 - DNA, 261 bp, Glycine max
ttcagaaacacacctagcgaacgcgactagcaacgacctaacacaatggcttccaagacattatccctccttgcgcttcttgccctttttgtgagtgcaacaaatgcgttcattattccacaatgctcacttgctccgagtgccattattccacagttcctccctccagttacttcaatgggcttcgaacacccagctgtgcaagcctataggctacaacaagcgcttgcggcgagcgtcttagaacaaccaattgcccaa

SEQ ID NO: 126849 - DNA, 266 bp, Glycine max
gggtttgtttcaccgaggataggacagtgaggactgagaactactacaatactcaaacgctgttgaagcgaccgacgagtcttgtgtgtgacctcaaaaccctgccgtcagtcaccgtcttctctgccgccatgaagcttgtcaggtttctcatgaagctgaacaacgaaaccgtttcaatcgatctcaagaacggaacagttgttcatggcaccattacaggtgttgatatcagtatgaatacacatttgaaaacagttaaacta

SEQ ID NO: 126850 - DNA, 264 bp, Glycine max
gttgctgcctacccccagcaatttcttccattcaaccaactagtacattgaactctgctgcttatttacagcagcaacaactactaccattcagccagctagctgatgtgagccctgctgccttcttgacacaacaacagttgttgcagttctacctgcacgctatgcctaacgctggcaccctcttacaactgcaacaattgctgccattcacccaacttgctttgacaaactcagcagtgttctaccagcagaccatcattg

SEQ ID NO: 126851 - DNA, 263 bp, Glycine max
caacaatccttggcacatctaacaatacaaaccatcgcaacgcaacagcaacaacaattcctaccagcactgagccacctagccatggtgaaccctgccgcctacttgcaacagcagttgcttgcatcaaacccacttgctctggcaaacgtagttgcaaaccagccacaacaacagctgcaacagcttctgccagcgctcagtcaactagccatggtgaaccctgccgcctacctacaacagcaacaactgctttcatctag

SEQ ID NO: 126852 - DNA, 256 bp, Glycine max
catcattgatacctatggtggctggggtgctcatggtggaggtgccttttcagggaaggaccctaccaaggttgacagaagtggtgcctatattgtaaggcaggctgcaaagagtgtcgtggcaaatggccttgctagaaggtgcattgtgcaagtttcctatgccattggtgtccctgagcccttgtcagtgtttgtggacacttatggaactgggaagattcctgacaaggagattctgcaaattgtgaaggag

SEQ ID NO: 126853 - DNA, 256 bp, Glycine max
gtgcctctagggttatcatttctccatttccattttctctctcacttttcaagaatcgtaagctatgggacagtcttacccaactgtgagtgctgattaccagaaggccgttgagaaggcgaagaagaagctcagaggcttcatcgctgagaagagatgcgctcctctaatgctccgtttggcatggcactctgctggaacctttgacaagggcacgaagaccggtggacgctcggaaccatcaagcaccctgcga

SEQ ID NO: 126854 - DNA, 266 bp, Glycine max
agaagaacaagtagttgagaactaagaaggagaagcaaatggcttcctcaatgatctcttccccagctgttaccactgtcaaccgtgccggtgccggcatggttgctccattcactggcctcaagtccatggctggcttccccaccaggaagaccaacaatgacattacctccattgctagcaacggtggaagagtgcaatgcatgcaggtgtggccaccagttcgcacgaagaatttgagactctttcctactgccagaccttgt

SEQ ID NO: 126855 - DNA, 255 bp, Glycine max
cgaatacagtagccataatagtgctacaatggcggccaagatattttccatccttatgctccttgctctttctggatgtgttgctaatgcgagcattttcccgcaatgctcgctagatcctatagcttccctcttctcccgtaactctcagcagcggtgtcttcggcatgtgaaaacccaattcttaaaccctacaggatccaacaggcaatcgcagctggcatcttcagtttatcagccgtgttcctccaacaa

SEQ ID NO: 126856 - DNA, 256 bp, Glycine max
cttatgttgttgtaaatgactcgtgctaccatcaactcgttagccattggctaaacactcatgcggttgttgagccattcgtcatagcaacaaataggcatctgagtgtggttcaccctatttacaaacttttgtttcctacactatcgtgacaccatgaatattaattcacttgcccgcaaatccttggtcaatgcagacggtattatagagaaaacatttttgtggggtaggtacgctttggaaatgtctgctg

SEQ ID NO: 126857 - DNA, 252 bp, Glycine max
gttctctcacgccgccgccgccgcacctgccgcctcgtctcccgttaaaaagtcggctgctcggtctgcggttgctcatgttaatggcggtaaagatacgaataggagggaaaaaagcagagaggatacctacattgttgttagagatcgaaaagtcagaataactgaggatgcgtctctatatgcactttgtagatcttggttgagaaatggtataaatgaagaaagccagtcacagcagatagatgtaat

SEQ ID NO: 126858 - DNA, 253 bp, Glycine max
ggatgaccactctcccctcccagggtggatggtggagtccctaaaggcagtgaagtacatagactcaggccacttctcagtacctcaaggcaagagagcagtggagctaatagcaggcaaagagagtgccattgcccaagtggctagaaccatccctggcaaaacctatgtgctctcattctctgttggggatgcaagcaactcatgtgaagggtccatgattgtggaagcctttgcaggaaaagacaccatc

SEQ ID NO: 126859 - DNA, 255 bp, Glycine max
cgcttcagcacaatgggtgcctacaagtatgtttcggagctatggcgcaagaagcagtctgatgttatgagattcttgcagcgggtgaggtgctgggagtatcgccagcaaccttctattgtccgtttgacaaggtctactcgcccagataaggctcgtcgcttgggtttcaaggctaagcagggttatgtgatttaccgtgttcgcgtacgaaggggtggccgtaagagaccacttccaaagggtattgtttat

SEQ ID NO: 126860 - DNA, 247 bp, Glycine max
ggcagactagtatccgatcctctttcctctcgaagctttcatcgttcaacatattctcaccatctcagtcatgggcctgctatcttgttttaggtctaccgtcctgagaaaatgttccaaaggaagctctggcatgtcaagattcctgtatacgaacaattttcaacgaaacttgatttcgtctagtggcaatgaatcgtattatgggtattttaacaggagatcatacacttcactttatatggga

SEQ ID NO: 126861 - DNA, 251 bp, Glycine max
atatagcccaagccctatacaaccaaaccctaacacacacccatttgattcagtttccatggctagcctcaaggttgcatttttggctgcagtgctctgcatggttgtggtgagtgcacccatggcacatgcagctatcacgtgcgggcaggtgacgagtagcctggccaattgcatcggttacctccagaagggaggaacgccgtcgtcgggatgctgcaacggagtgaagagcctcaatgccgccgcca

SEQ ID NO: 126862 - DNA, 251 bp, Glycine max
atgagagattgcttgatgccatatgtgagagactgaaaccgtgtttatttacagagaatacttacattgttcgggaaggagatccagttgatgagatgttgttcatcatacgtggtcgccttgagagtgttaccacagatggtgggaggagtggatttttcaaccgcggttttctaaaagaggctgacttctgtggggaggagcttttaacctgggccctggatcctaaatctggttctaatcttccatct

SEQ ID NO: 126863 - DNA, 254 bp, Glycine max
ttgatgtgcatggctgtgatgagtgcaccaatgatggtgcaagccgtgtcatgcaatgatgtttctgtgaacctagcaccgtgcctatcttacctgatgcagggtggagatgttccagaatcgtgctgtagcggagtgaggaacattctgggttctgccagcaccacctttgacaaacaaaccgtgtgcaaatgtcttcagcaagctgctaataactatggcatcaacgacgaatacgctcaggcactccccgc

SEQ ID NO: 126864 - DNA, 250 bp, Glycine max
gtggatgggaccccaataagagaattcaagaacatggaatcaaaaggagttgcattcccaaaggaacagccaatgaggatatactctagtctatggaatgctgatgactgggcaacaagaggtggattgtgaagacagattggacacaagctccattcacagcatcatatagaaattccaatgccaatgcctgcgtccattctggatcatcatcatcatcatcatcttgcactgccaactcttcttcctc

SEQ ID NO: 126865 - DNA, 249 bp, Glycine max
  unsure (1)..(249): unsure at all n locations
cttgatgatctgttttcagctgagagttcttctcctagatangctgatccagcattggcttcagctgtattttctccaactcacaaatcagctgtcttcaatcaatttcagcaccagcaaagcatgttggcacccctgantactaattttgcctctaaaaattttgagcatccttattgcaggnctcgttgggaatgtctccaggaaatgtggaaccatntcgccaatggggtcttagggntccnangc

SEQ ID NO: 126866 - DNA, 238 bp, Glycine max
ctcgaactctgcttcttatttgcaacaacaacaactaccattcagccagctatctgctgcctacccccagcaattgcttccattcaaccaactgtcagctttgaactctcctgcttatttacagcagcaacaactactaccattcagccagctagtcggtgtgagccctgctaccttcttgacactaccacgattgtggccgttctaccagcacgctgcgcctaacgctggcaccctc

SEQ ID NO: 126867 - DNA, 239 bp, Glycine max
cttcaatcggcgtcggacacccagctgtgcacgcctataggctacaacaagcgcttgcggcgagcgtcagagaacaaccaattgcccaattacaacaacaatccttagcagcatcgaaccatacaaaccgcggaagccgcaggaacacgcactgagccacctagccgcggtggaccctatcgcctaatcgcaacaacagctgcttgcgtccaacccaactcgcgttgagacaccaacag

SEQ ID NO: 126868 - DNA, 238 bp, Glycine max
ggtaaaagtggaacgagatggctcagtaactggtggtaatggttcttcattcttgagctgttttgttttgtggtaatactctgcataagaagcccttgttatacccaaacgtgaatttgtaaaacttgtcattctttatactaatattaatttgtaaacaagcaaaaaaaaaaaaaaaaaaaaaaaaaaaaaaaaaaaaaaaaaaaaaagaaataaaaaaaaaaaaaataaagaatag

SEQ ID NO: 126869 - DNA, 252 bp, Glycine max
aaagaaaatcctcaattttctgagcagccaaacactctctctctgtctctcgaaaattctcagtttgcagagaaaatctgaatcatgtcgtggcaagcgtatgtcgacgatcaccttctgtgtgacatcgaaggtaaccacctcactcacgctgctatcatcggccaagacggcagcgtttgggctcagagtaccgacttccctcagttcaaacctgaggagataactgccatcatgaatgactttaatgag

SEQ ID NO: 126870 - DNA, 250 bp, Glycine max
gttgtgagagaaaaagaggaagaagaagaaaacaacaagtggccttcatggctgcagccacttctcaagacacgtttctttgttcaatgcaaagtccacgcggattcccacaagagtgaatgcaatatgtattgcttggactgtgtgaatggagccctttgctctgcatgtctctcttcccacaaagaacacagaataattcagataaggaggtcttcgtaccatgatgtgataagggtgtctgagatac

SEQ ID NO: 126871 - DNA, 162 bp, Glycine max
ttctctggcaagcttagctgttgttcaaccatctactgtcaagggccttgctggaactaagctctctttcaagccctctcgccagagcttcagacccaagaatttcaggagtggtgccgttgtagcaaagtacggtgacaagagtgtgtactttgatttgga

SEQ ID NO: 126872 - DNA, 236 bp, Glycine max
caccaagcgaagtagcctagcaacgacttaacaacaatggctaccaagatattagccctccttgcgcttcttgccctttttgtgagcgcaacaaatgcgttcattattccacaatgctcacttgctcctagtgccattataccacagttcctcctcgcagttacttcaatgggcttcgaacacctaggcgtgcaagcctacaagctacaacaagcgcttgcggcgagcgtcttaca

SEQ ID NO: 126873 - DNA, 248 bp, Glycine max
gccactttggcttcagttgatttccagaccaaggctgttgaagtggccaatgaagttaattcatgggctgaaaaggagacaaatggacttgttaaagaccttctacctcctggatcagttgacagttcaaccagactcatctttgcaaatgcactgtacttcaaaggagcatggaatgaaaagtttgattcttcgataacaaaagactatgattttcaccttcttgatggccgttcaatcagggttcc

SEQ ID NO: 126874 - DNA, 249 bp, Glycine max
aaaacaaagaaaaaaaaaaacccttagccaacacaaccatcatggccacctctgctattcagcaatcagcattcactggtcaaactgctctgaagcagctcaatgagttcgtccgcaagaccggtggcgccggcaaaggtcgcactaacatgcgccgcaccgtcaagagtgctcctcagagcatttggtatggccctgaccgtcccaagtacttgggtccattctcggagcagattccatcatacctga

SEQ ID NO: 126875 - DNA, 252 bp, Glycine max; identical to SEQ ID NO: 26388

SEQ ID NO: 126876 - DNA, 117 bp, Glycine max
ctacagggtccaacaggcaatcgcagctggcatcttacctttagcacctctgttgctccagcgatcatcaggcgtattcgaacagttacctttggtgcattgattggtacaaaacat

SEQ ID NO: 126877 - DNA, 255 bp, Glycine max
ggctaaatggtagtagtatttgccagctagctgcagcaaaccgtgcttccttcttgacacagcaacagttgctgcctttctaccagcagtttgcggctaaccccgcaaccctcttacaactacaacaattgttgccctttgtccaacttgctttgacagaccgagcggcctcctaccaacaacacatcattggtggtgccctcttttagattgcttattagttgtaattcaataataaagttttttggatgatgt

SEQ ID NO: 126878 - DNA, 245 bp, Glycine max
cagcacacccaatagtcaacttctctggagtgataggaactaatgtgcttgctctaggtgctgatctttcttttgactccaaaattggggagttaacaaaatccaatgctggactgagcttcataaagacgacttgattgcctcattgactctgaatgactaaggtgatgctatgaatgctgcatattaccatgtagttaaccccttgaccaatactgctgttggtgctgaagtgacccatagat

SEQ ID NO: 126879 - DNA, 243 bp, Glycine max
ctgaggtgaatgatgaggatgatgacgaggaaggcagtggcgaggaggaggatgacgattagagaatggactgatgataatagcatttatgtaggttctgatgattttgatcatccgtgtaggtggtctggtcatttccttataaacatatttctctttccaaaaaatatttccctgctcctccttccgtaaattgctcgtctttccaaaacgtgaatagtttaaagaagggagttctcttta

SEQ ID NO: 126880 - DNA, 244 bp, Glycine max
ttttgagcattcagaaacacacctagcgaaggcactagcaacgacctaacaacaatggcttccaagacattatccctccttgcgcttcttgccctttttgtgagtgcaacaaatgcgttcattattccacaatgctcacttgctccgagtgccattattccacagttcctccctccagttacttcaatgggcttcgaacacccagctgtgcaagcctataggctacaacaagcgcttgcggcga

SEQ ID NO: 126881 - DNA, 245 bp, Glycine max
gagagagagaacttcaactgagggtgagagtgacacaaatctagggagcactactctaaaagttctattagattcttcaaaacatgaccatgcatcgcgagtcttgggcttttgtcttcggcgttatgggcaacatcatctcctttggagtgttccttgctccattgccaaccttttaccaaatctacaagaagaaatccactgaagggttccagtcacttccttatgttgttgcactgttcagt

SEQ ID NO: 126882 - DNA, 242 bp, Glycine max
cgccaaccttctgcatcagttgtgagatgcaaccccaccaccccatcaggcctcaccatcagagctggttcctatgctgatgagctcgttaagaccgcgaaaacagtggcttcaccagggacgggtattttggccatggatgagtccaatgctacctgtgggaagcgtttggcttcaattgggctagagaacactgaagctaaccgccaggcataccgtaccctcctcgtgacagttccagg

SEQ ID NO: 126883 - DNA, 253 bp, Glycine max
cggctcgagccgttcctcccgttagactaggttaggctaggctagggtgtcgaccagctcgcggtaatggtggccttcaggttccatcagtaccaggtggtggggcgcgcgctgccgacgcccggcgacgagcaccccaagatctaccgcatgaagctctgggccaccaacgaagtccgcgccaagagcaagttctggtactactgaggaagttgaagaaggttaagaagagcaacggtcaggtcctggccat

SEQ ID NO: 126884 - DNA, 284 bp, Glycine max
caaaacaaaaactcacactttggtggccacagcaacaataacaatggcagcctcactacaagctgcagctaccttcatgcaacccaccaaggtgggcatggccactcgcaacctcaaatctacacaatgcatttctaaggcttttggcttggaacccgctgcagctaaactcatttgctcccttaagcccgatctcaaagattttgctcaaaaatgtgtcgacgccaccaaaattgcaggattcgcccttgccacctcagctctcgttgtttctggagcgagtg

SEQ ID NO: 126885 - DNA, 277 bp, Glycine max
taagactttacataagcgagtcattggtcaggatgaagcagttaaagccattagtcgggctatccgtcgagctcgggttggactaaaaaaccctaatcgtcccattgccagcttcatcttttctggtccaactggtgtggggaagtctgaattgaccaaagcattggctgcatattactttggctccgaagaagctatgattcggcttgacatgagtgaattcatggaaaggcacactgtctccaaacttatggggtcacctcctggatatgtttgg

SEQ ID NO: 126886 - DNA, 280 bp, Glycine max
ggctttggaaacacatggcttccctgttccaaatgcaatagaaagcaatagacattgtgtagtcatgtcactcgtccaaggttatcctcttgttcaggttaagcagttactgaatccagagacagtttttgaggcaattcttggtcaggtcgttcggttggcagagcatggtctcattcattgtgatttcaatgaatttaacatcatggtactttgaccgtgatgttgaatgcatctttaagtttttcaggaaaaggttcaatctttcttttcaagaaag

SEQ ID NO: 126887 - DNA, 266 bp, Glycine max
gcaagctcatcctagagttttaaaaatggcagcagcctcctccatggctctctcttccccatccttggctggcaatgccgtgaagctgggcccatcagcccccgtagtcgggagggtcagcatgaggaagaccgtcaccaagcaggcctcctccggaagcccatggtacggcccagaccgcgtcaagtacttgggcccattctctggcgagccaccgtcctacctcactggcgagttcccaggtgactacggctggggcactgctg

SEQ ID NO: 126888 - DNA, 281 bp, Glycine max
gtcagcccgctgggcctgtgagcattgatccaaagacgcatcttttgcttcactcgtcatcactacgcagatcgcagcaaaccagactaaactccgacggagcctcccgtcgctctgcgatccggtgatgccatattcgccaacgtcgaacgcgtcaatgcggagctgtttactttgacgtatggcgcaattgtgcgtcaattgctcacggatctggaagaggctgaggaggttaacaagcagcttgatcaaatgggttacaatattggaatccgtttgat

SEQ ID NO: 126889 - DNA, 280 bp, Glycine max
agtgtttgctttggagaaacgagttggtgttctttgttggcgaatactcactcacgcgtttgtagttgcaggctctaatcagatcccaaatgatcaactttgttcttctcattagtcgccaagggaaggtgagattgacaaaatggtactcaccttattctcagaaagaaaggagtaaggtaatccgtgagctcagtggaatgattctttcccgtgcgcccaagcaatgtaattttgtggaatggcgaggacataaagttgtttataaaaggtatgctag

SEQ ID NO: 126890 - DNA, 282 bp, Glycine max
ctaggaagttggaagtcatggcagcaacattgatggcagcaacaacaagttctggtactcttaaagcaactcctttccttggccaaggcaagggtgccaatgccaatgctcttagggatgttgtctccatgggaactgggaagtacaccatgggcaatgatttgtggtatggaccagacagagtgaaatacttgggacccttctcagctcagaccccttcatacttgaaaggagaattccctggggattatggatgggacactgctggcttatctgctgacg

SEQ ID NO: 126891 - DNA, 269 bp, Glycine max
gcatcttcaacgctttcttctagaacatcttcgatgcgaataaacacttctgatatgggaaattatttagcacaggatcgtgagtctgatggctcaaaatctcgagcatcacataatctcctcttagcatctcaaactagcacccctcgaattactccccctggttcccctcctagtatgtttgcattggtatccccaacaagaacatcatctaagcctgtgtctccaaggcgccatgcaatttccttttcaacctcaagaggaatgtt

SEQ ID NO: 126892 - DNA, 278 bp, Glycine max
ctatttcgaactccgccatggctgccaccaccgccaccgccacgtcatacttttttggcacccgcctcaacaacccgacaaccttaaacaacggaagattccacgcgctcctcaacttcggcaaaaagaaggcggcggaccgccaccgaagaaaaaggaagtgaaagtgaaaccctccggcgaccggctggtgtggtttcctaatgcggagtcgccggagtggctcgacggaagcatgatcggcgaccgcgggttcgacgcgttcggtttcgcgaacc

SEQ ID NO: 126893 - DNA, 276 bp, Glycine max
cacaatggccatgggagttcagcaattgaagaaaggtatggatccaaagattgtttatgaagatcttgttgagattcatcagttccttgaccgcttctacatgtcaagaattggaatccgtatgcttatcgggcagcatgttgagttgcacaatcccaatcctcctccccacgtcgtgggttacatacacacgaaaatgtctcctgtggaggtggcgaggaatgccagtgaagatgcacgttctatatgttgtcgtgaatatggaagtgcccctga

SEQ ID NO: 126894 - DNA, 279 bp, Glycine max
aaatggcttcctcaatgatctcctccccagctgttaccaccgtcaaccgtgccggtgccggcatggttgctccattcaccggcctcaaatccatggctggcttccccacgaggaagaccaacaatgacattacctccattgctagcaacggtggaagagtacaatgcatgcaggtgtggccaccaattggcaagaagaagttcgagactctttcctacttgccagacctcgatgatgctcaattggcaaaggaagtcgaataccttctaaggaaaggat

SEQ ID NO: 126895 - DNA, 254 bp, Glycine max
  unsure (1)..(254): unsure at all n locations
ctcatctttcaatttcaatcaacggttatacacttttctatatatggcatcatcatgtccaccgcanctcacttcgtngcaaattnnacggagtcgtccaagaagctcctctcccatcctaccatcgccgtgatgatagcggatgcgatagcgagtctgaaggagagaatcggttcgagccaatacgcgataaccaaattcatcgaaggcaagcacaaggagttgcctccaacctacaagaagcttgttctcgt

SEQ ID NO: 126896 - DNA, 277 bp, Glycine max
cggtattcggctcgagcacagccaagtcgtaaaagggtttcaagggatggaaaacatgcagagcttctggcaattgggtgatgaactccgtgggcactcaatagcatcggaggatcacaagtggttaatggttgcctcgaaactggccgaacagacaagattgaagggggagcgtgtgaacaaccttgatctttgcaaagggatccattgaaacaaggtcaagggataaatttgggttccaggaagagaacaaatttgagtctcttaactggagcat

SEQ ID NO: 126897 - DNA, 276 bp, Glycine max
taagcgtgaattgcagtgatacaaaggacgagtgtagtgacatcgttgaaacaatttgtggggatgctggaagtatcagcagaattggcgctaaagatcacggtcaatcgggtaagaatacaataggcattatctgctggtcatcttgatgcaaccacactagctgattatcttgttaacaagggtgtgccatttagaacgtctcacgatatcgctggagaagtctgtgctatatggagcgttgaagaactgccaactgctggatttaatgctggg

SEQ ID NO: 126898 - DNA, 267 bp, Glycine max
tatgaagaagttagggtttgtaactttgtcttgtgcttgcgaatctgaatcgaataataatcaatcaatcatcatgtcgtcggcgaagaagatcacactggagagttcggactgcgaggctttcgaggtggacagggcggtggcgctggagtctcagacgataaagcacatgatcgaggacgactgcgccgacagcggcatccctctgccgaacgtgacgagcaagatcctggcgaaggtgatcgagtactgcaagaagcacgtcga

SEQ ID NO: 126899 - DNA, 265 bp, Glycine max
acaggcatagcatgctacactcgcgggcctttcctgcctagtgtttcttccaagcactctccaccctccatctctccatcttttggcttgaggagtctgaaatcgagctctttatttggagaatctctaagagtggcatccaaatcaacactaaaggtttcaaagacaaagaatacttcactcgtgaacagatgtaaaattggtgacagtctggaagaattcctcacaaaagcaacaccagataaggggttgatcaggttgttgg

SEQ ID NO: 126900 - DNA, 276 bp, Glycine max
ctggagtggtcgcctgaaaattgttatgcttggagcaagtatgcagaactggagagatctttatctgagactgatcgagctagagcaatttttgagcttgcaattgctcaaccagcattggacatgcctgaactgttgtggaagcatacattaactttgagactgctgagggtgaatttgagagagcaagggcactttatgaaaggcttcttgatcgaacaaagcacttgaaggtatggataagctatgcggaatttgaggcaacagctatggcta

SEQ ID NO: 126901 - DNA, 275 bp, Glycine max
atcgagcgattgagaccagcaagcaacatagaaagtagaatccattagcaactataatgcaacaatggtgaccaagatattttccctccttatgctccttactctttctacatgtgttgctaacgcgacaattttccctcaagctcacaagctcctatagcttcccttcttcccccataccttccatcaatctacgcttcagtatgtgaaaacccagcttatcaaccatataggcttcaacaagcaatcgcagcaagcaacatacctttatcgcc

SEQ ID NO: 126902 - DNA, 270 bp, Glycine max
ccgaaggtttggattgccggaaaacatgaagcttaagcagttggaaggtctcctcggtggtcttcaacagttccctcaacccaaggtcgagcttgaacagtacccaacaggaccccatatagcttctcgaatgcttttcactgcagagaattcttttgaggatgtgagcgacaaagtagtggctgactttggatgcggttgtggtacgttaggtgttgcagctgcactgttgagtgcagaacctgttcttggcattgacattgatccaga

SEQ ID NO: 126903 - DNA, 271 bp, Glycine max
gggatacaaaagcaaatgttaattacgaataagcaagctataatatgtgcaacactttttggatctatgttacgtggaggtggagtgatgacaaatatttatgagctttgtgacgttgatttgaaagatttcagcatacaagttatggacaacaaggctgtttacttcgaagcttgcctggagatgtgatatttgacaattcatcaggctttagctttacatgtgatttgagtgataacattgctgcgccctggccttcttcatcatcttc

SEQ ID NO: 126904 - DNA, 275 bp, Glycine max
caagaagccagaagatttttccaaatatcaggcatttgaattgattcacgccagatgggcaatgcttggtgctgctggattcatcattcccgaggccttcaacaaatatggagcaaactgcggtcctgaggctgtttggttcaagactggagctctgcttcttgatgggggtaccttgaactacttcgggaaacccatccccatcaatcttattgtggctgtcattgctgagattgttcttgtgggaggtgcagagtactacagaattattaatg

SEQ ID NO: 126905 - DNA, 275 bp, Glycine max
ggcggtcaatctgctggccgcatcgtgatggagctctacgccgacgtcactccccgcaccgccgagaacttccgcgcgctttgcaccggcgagaagggcgtagggcggacggcaagcccctccactacaagggctcgtccttcaccgcgtgatcccgagtttcatgtgtcagggtggcgacttcaccgccacaaacggaaccggcggcgagtcgatttatggcgccaagttcgccgacgagaacttcgtgaagaagcacaccggtcccggcatcc

SEQ ID NO: 126906 - DNA, 207 bp, Glycine max
attgcctattcggcaatatggcggaaaatggttcaattgagctgaacaagtttgtgttgttttgtttgttgttgctaatacaagtggcagtttctgaaatcatttttgaagagcgatttgatgatggatggcgaagtagtgggtgaaatcagactggaaaagcagtgagggcaaagcaggttcattcaagcacacagctggaaattg

SEQ ID NO: 126907 - DNA, 269 bp, Glycine max
tagagatcctacgtttatatgcttgtccttatctgaaaacacttcctaatagcatctgtgacatgatgagattgaagtatattgacatttctcaatgtgttaacttgacatgcttccctgaaaagattggtagattggaagcttggagaagattgacatgagggaatgctccatgattagaaatgtgccaaagtctgcagtgtcattgcaatctctgaggcttgtaatttgtgatgaggaggtatctgggatttggaaagaggttgcca

SEQ ID NO: 126908 - DNA, 269 bp, Glycine max
caagatggtcacattaggcccttctgtcttcgcaactgttagcattacttcttcttcttcttcttcttcttcttcttccttcccttctctcattcaagacaggcctgtctttgctgcccctgcccccatcatcaccccactgtgagagaggatactgcaaaggaatacgagcaagctattgaagaactccagaaattgttgagggagaagagtgaactcaaagccacagctgctgagaaagtggagcagataacagcttctctgggaac

SEQ ID NO: 126909 - DNA, 267 bp, Glycine max
gatttggaagataagaggaaagtgacagctgaagaagcacgtgtatatgctgaagaaaatggtttgtttttcatggagacctctgccaaaactgcatccaacgttaatgatatattctatgaaatagccaagaggttacaagggctcagccagctcagaacccagctgggatggtacttgttgatagacccgccgaaggaactagggctgcatcatgttgttcataagtatttgaactgtatttgcactccccaaccctttttaatt

SEQ ID NO: 126910 - DNA, 268 bp, Glycine max
gtggtgccttatcgctgtggttttcatcgtcttccttctcttatatttctttttttttttggtcttcgcggcacgccgaaacattggccggaaaaggagagggtcctgctatcggaatcgatctgggaaccacctactttgtgtcggcctctggcaacatgaccgagttgaaatcatggccaacgaccaagggaacagaacgacgccgtcttacgtcggtttcactgataccgagggtctcatggggtgatggggctaagaaccaagt

SEQ ID NO: 126911 - DNA, 270 bp, Glycine max
cacacccttagtcgcctgaaaacgattgttgttgcagggcaaacacaaagatccgggtcgacccgtcgcagatccgatccaaataagaaagatgaatattttcaggttagccggagacatgacccatttggccagcgtcctcgtcctcctcctcaagatccacaccatcaaatcctgcgccggtgtctcattgaaaactcaagaactctatgcactcgtttttgcttgtcgctacttagatatctttacttattacgtatctctctataa

SEQ ID NO: 126912 - DNA, 268 bp, Glycine max
gtttcttacaaggctctactctactgcttcaccttctgctctagaaaattcagtggtgatacatggcttcggctactctctctgtagccaaaccagcccttcaggcaaatgggaaaggcttctctgaattctctggctccgcagctcatcaggcttccttcccttttctagaaaatcttcagaggatttccattctgtcattgccttccagacctatgcagttggaagcagtggaggatacaagaagggtgtgacagaagcaaaactg

SEQ ID NO: 126913 - DNA, 268 bp, Glycine max
cttgggagtggtatgtcaaacaagatgtgggaggctcttttagaccatgcaaaaacatgtgttctaagtgggaagctctatgtttattatccagaagatgcaagaaatgttggcgttatttttaacaacatctatgactgcgtggccttatatcaggagaccaattctattctgctgattctctcactgatagccagaaggtttatgtagattcattggtgaagaaagcatatgaaaattgggatcaggttgtggattatgatggcaa

SEQ ID NO: 126914 - DNA, 268 bp, Glycine max
gtgagatatcccccatgttgcagcaattcccccacaatcctgtatggttcttgcttcaggaaggaaggcgagtgcatgttattgaaagggacttgactgaaccagacaggattgtgggggaattgctacaacctgggggtatcttaagttaattgaattgggtctccaagattgtgtgggtgagattgatgctcagccagtactttggctatgctctttacaaggacgggaaaaatactaagctttcttaccccttggaaaattttgc

SEQ ID NO: 126915 - DNA, 272 bp, Glycine max
catggctgcacaagctcttgtatcatcatcatctcttaccttctcagccgaggctacaagacaaagtcttggaccaagatcactccaatctccatttggcttctcaagaaaagcctcctttcttgttaaggcagctgctatccccctgtcaagcaaggatcagacagacctttgtggtttgcatcaaagcaaagtctttcctacttggatggcagccttccgggtgactatggatttgaccctctgggactttcggaccctgaaggaacagg

SEQ ID NO: 126916 - DNA, 273 bp, Glycine max
actacagacacaaatggagtagatgaggcactgacattgatggaagaatttgggatcaaaccagatgtagtaacctttagcaccatcatgaatgcatggagttcagcagggcttatggaaaattgtgaggagatattcacgacatggtgaaggccggtatagaacctgacatccacgcatatagcatccttgcaaaaggctatgtgcgtgccggacagccacgaaaagccgaggctcttctgacttctatgagcaaatatggcgtacaaccaa

SEQ ID NO: 126917 - DNA, 273 bp, Glycine max
caccatcacaccaaccaaacctcactctccctttctcccctgaccctctccctgccatggtcatgggagcctttggccacttcgaaccggtctccaaatgcagcaccgagaaccggtctaaccaaaccgtggcctcggattggacggcaccctcctggtgtcccccagcgcatttccttactacatgctggtcgccatcgaagccggcagcttcctccgtggccttgtcctccttgcctccgtccctttcgtgtacttcacgtacatattcct

SEQ ID NO: 126918 - DNA, 266 bp, Glycine max
cccaaagattcactatgaaaccactggccctgagatatggacagattctggaggtaaagttgatgcccttgtagcaggtataggaactggtggtacaataacaggtgcagggaaattcctcaaggagagaaacccaaaatcaaggtttatggagtggaaccagttgaaagtgcagtcttgagtggaggccagccaggagggcatctgattcagggaattggtgctggtattgttcctgctgtgctggatgtgaatctgcttgatga

SEQ ID NO: 126919 - DNA, 147 bp, Glycine max
ccgcaccagtttcaccgcacgaatatcttgttgtttggagcgatccgagaaaaactctgtaaacatgttggtttaccaggacctccttacaggtgatgagcttctctctgactccttccgttacaaggaaattgaaatggaatgctg

SEQ ID NO: 126920 - DNA, 266 bp, Glycine max
cggctcgaggaacaagtagttgagaactaagaaggagaagcaaatggcttcctcaatgatctcttccccagctgttaccactgtcaaccgtgccggtgccggcatggttgctccattcactggcctcaagtccatgctggcttccccaccaggaagaccaacaatgacattacctccattgctagcaacggtggaagagtgcaatgcatgcaggtgtggccaccagttggcaagaagaagtttgagactctttcctacctgccaga

SEQ ID NO: 126921 - DNA, 265 bp, Glycine max
aaccttgacacgggcattgttgatttgaaagctaatgtaattgaactacaagggactccaaagactgttcatgttgatcaattgactggggcctcaacaattctgtttacattcatcttagatcgtgggatcactgggagttggcaagtacaatgctgaatgaaaagcagaaggatgggcttggttcagccaatgatggcttctatgagtccaagagggagtggttgggaagacgtcatttcattttagcatttgaaagttccgc

SEQ ID NO: 126922 - DNA, 264 bp, Glycine max
gtcaacgttagtgctttatttaggtgacaaaactactcacagagaaagacactcggagaccttgcaagacttcatcaatggctgtcaaagtttatattgtgtactactccatgtatgggcatgttgagaaactacagaagaaataaagaaaggggcttcctctgtggaaggtgttgaggccaaactatggcaggtacctgagacgctgcaggatgaggtgctcggtaagatgagtgcaccacccaagagcgatgtaccagtcat

SEQ ID NO: 126923 - DNA, 268 bp, Glycine max
aagaaagctcgttttggtgtgctacctcggtatgctaaggatgaaaagcttattagatggtttgagttacccaactgcttcatattccacaatgccaatgcttgggaggaggaagatgaagttgttctgatcacatccgccttcagaatccaaatttggatttggtcggtgggactgccaaggaaaagcttgaaaatttctcaaatgagctgtatgaaatgagatttaacatgaaaacgggtgaagcttctcaaaagaaactatcagc

SEQ ID NO: 126924 - DNA, 264 bp, Glycine max
gccttggtcttggagttgttgcaattgttcttgtggtgactgattcccaagtcaaagagtttttctcctttcagaagaaagctaaatttacagacatgaaggctttagtgttcttggtagttgcgaacggacaactgttggctactccttaattcaagggttgcgctgtgttgtgagtatggttaggggaaatgtacttttcagcaagcccttagcttggctcattttctctggtgatcaggtgatggcatatgtgacggtggc

SEQ ID NO: 126925 - DNA, 189 bp, Glycine max
ctggctgtaaagaagcacagtgaagttaaagcgagcaagcgaaacaatgatgggaatgaggcaagaagtgggaaggttgtgggaaaaatttcttttattgatcttgctggaagtgaacgaggtgctgacactactgataacgatcgtcagacacggattgaaggagcagaaatccataagagccttttg

SEQ ID NO: 126926 - DNA, 263 bp, Glycine max
  unsure (1)..(263): unsure at all n locations
attccacacgacatactacttcctgtggagnaggttgaccanagagcactacaggaattgcatcattgagaggcattaggcattagtggcaagcaaaggtctagatgctgtccaactgaggtcaaggatatgactgggagagcaccttccacttgcgtcacctccttgaatcaaacatctcagagatccctgatctcattgatgagtacaggttacaaaaaatcaaaacacctataataacattacacagtttttgcttgtgg

SEQ ID NO: 126927 - DNA, 263 bp, Glycine max
actaagctaaacaatttcatcaagcctgccatggcttcctcgtgtgcttcctctgccattgcagctgttgccatctccacaccaagttcccagaagaatggatcactcttgggaagcacaaaagcttctttacttagtgggaggaaactgaaggtgaacagttttacagcaccagttggagcacgatccagcactacagtgtgtgcagttgctgagcctgataggcctctgtggttcccaggcagcacccctcctccgtggct

SEQ ID NO: 126928 - DNA, 258 bp, Glycine max
agttggtgctgctgttactgttaatcccagaagactcattgtggtagctgctgctgcaccaaagaagtcatggctccctggtgttagaggtggtggcaatctcgtcgacccagaatggcttgatggatcctaccaggtgactatggttttgatccactaggccttgggaaggacccagcattcctcaaatggtacagagaagctgagctcattcatgggaggtgggcaatggctgcagttctaggaatctttgtgggg

SEQ ID NO: 126929 - DNA, 251 bp, Glycine max
ggagattggatcggctatgtcgcttgtgaagcttgattgttcaaataatcagctcacggaacttcctagctcgcttggaagatgcttagaattgtcagacttaaagggatcaaacaatcttattacaagttgccagaagatttagcaaattgttccaaattgtctaaactagatatggaggggaacaagctaacagtgatatctgaaaatctcatttcatcatggaccatgcttactgaattcaatgcatc

SEQ ID NO: 126930 - DNA, 262 bp, Glycine max
cgaaaaagatgaaggtttggagatgggtggtgagtttgatgttagtggggttactgcccgtgtcaacaatgggtcgattcgtggtggagaagaacagcctgagagtgacatcgccggacaaaataagagggaacacgacagtgccattggcaacttcggaatacctcaatacggtggtagcatggccgggaacgtaatttaccctaaggataacaaaaagggttgcaaagagttcgatgagttcgggatttccttcaaatca

SEQ ID NO: 126931 - DNA, 250 bp, Glycine max
ccggaagctgggttacggtgcccaactgcgcgctaacctagaccccacaaagggtgttggtcgattaagacagcaggacggtggtcatggaagtcgaaatccgctaaggagtgtgtaacaactcacctgccgatcaactagccccgaaaatggatggcgccaaagcgcgcgacctatacccggccgtcggggcaaggaccaagccccgatgagtaggagggcgcggcggtcgctgcaaaacccagggcgc

SEQ ID NO: 126932 - DNA, 261 bp, Glycine max
gtgaaaaccttctcttacccttctctcaagtttcaagagatttcatcatggctccaaagaaggacaaggctccaccaccttcctccaagcccgccaaatctggcggtggcaagcagaagaagaagaagtgagcaagggaaagcaaaaggagaaggtgaacaatatggtgctgtttgatcagggcacctatgacaagctcctttctgaagctcccaaatacaagctcatcactccttccattctctctgatcgtttgaggat

SEQ ID NO: 126933 - DNA, 260 bp, Glycine max
caaaacccatcaaagtctttctccctcagtgatcatatattcattcagttctatacaaaatcctcaaaaactcttcctctctgccatgaccatggaatacagaaccttagaactcaacatcatatccgcaaaggacatcaagaatgttaatctcttctccaagatggacgtatacgccgccgtttcgctctccagtgaccctctccaccctcagggcgccaccacccacgtccacaaagacgccggcagcaaccccacgt

SEQ ID NO: 126934 - DNA, 258 bp, Glycine max
gaaaaacaagtagttgagaactaagaagaaggaaatggcttcctcaatgatctcctccccagctgttaccaccgtcaaccgtgccggtgccggcatggttgctccattcaccggcctcaaatccatggtggcttccccacgaggaagaccaacaatgacattacctccattgctagcaacggtggaagagtacaatgcatgcaggtgtggccaccaattggcaagaagatgttcgagactctttcctacttgccagac

SEQ ID NO: 126935 - DNA, 257 bp, Glycine max
cacacaagaagactcctcaatcatccatagacatggccaccgtcacttctgcagcagtttctattccctcattcactggcctcaaggcaagcgcaggcaaagtgagtgccgccgcagttaaagtctcactccccaagccacaaggttctgcggcatcaaggcttccctcaaagacgttggagtcgctgttgtggccactgctgcgagcgcagttctagctagcaacgccatggccattgaagtgttactgggcactg

SEQ ID NO: 126936 - DNA, 260 bp, Glycine max
gtttttgagtgcggcggtccaaacactcttctctgcagcttttgcctacaactcccttcaccatggctgaacaaaccgagaaagcttttctgaagcaaccaaaagtgtttctcagcacaaagaagactgggaagggaaagagacctggaaaaggtgggaaccgcttttggaagtccattgggcttggatttaagactcccagggaagccatcgaaggaacctatattgacaagaagtgccccttcactggcaatgtttcc

SEQ ID NO: 126937 - DNA, 257 bp, Glycine max
gcaaagctcatccttgagttaaaaaatggcagcagcttcttccatggctctctcatccccatccttggctggcaaggccgtgaagctgggcccatcagccccagaagtgggaagggtgagcatgaggagaccgtcaccaagcaggtctcctcaggaagcccatggtacggcccagaccgagtcaagtacttgggcccattctctggcgagcccccgtcctacctaaccggtgagttcccaggcgactacggctggga

SEQ ID NO: 126938 - DNA, 259 bp, Glycine max
gaccagctcccctctcctgatcgtcctgttcctcacagcagcagccctcgcggccgagccagcgaagcaagcggcccccgcggcacaggagacggccgtgcacatcgtgtacgtggaccgccccgaggagccgaccctgaggagttccacatccgcaccctcaacctcgtcctcggcagcgaacagaaggccagggacgcagtgctctaccactacaagaacggcgccagcggcttctccgcgaagtcacccccagcag

SEQ ID NO: 126939 - DNA, 263 bp, Glycine max
ctcgagccgaacatgtatacattgataactggaaaggttattgacctgagtgtggatcttacgtgctgctagtgctgcagaagagtaaagaaaactcggtgatgtccttccttcatgatctgttgctgatgggatccgtaatggacttgataatgaatgttattaacgtttataataaattgatataaaatatttctttttttttttaaacaagatttgtgtggctggggaactttttcccgtccagaagctctgttgtgcgt

SEQ ID NO: 126940 - DNA, 258 bp, Glycine max
gaagctcagaggcttcatcgctgagaagagatgcgctcctctaatgctccgtttggcatggcactctgctggaacctttgacaagggcacgaagaccggtggacccttcggaaccatcaagcaccctgccgaactggctcacagcgctaacaacggtcttgacatcgctgttaggcttttggagccactcaaggcggagttccctattttgagctacgccgatttctaccagttggctggcgtgttccccgttgaggt

SEQ ID NO: 126941 - DNA, 254 bp, Glycine max
gcagataacaacaattgctgctgcagtttatcttagaatggcaggaaggccacctgtgcttccatccaaccacctttcttacacagagaacttcctatatatgctagattcttttggtaatcggcatataaacccaatcctcggctaactcgtgtgctagacattatcttcatcctgcatgcagaacatgaaatgaattgttctacatctgctgtccgacaccttgcatcaagtggcgttgatgtatacactgc

SEQ ID NO: 126942 - DNA, 253 bp, Glycine max
gtgaagtatgtgttcgtgtatgtcccatcgatctacctgttgttgattggaaactagaaactgatattcgaaagaaacagttgcttaattatagtattgatttcggaatctgtatattttgtggaactgtattgaatattgtccaacaaattgtttatcaatgaccgaagaatatgaactttcaacttatgatcgccacgaattaaattataatcaaattgctttgggccgtttaccagtgtcagtaattgat

SEQ ID NO: 126943 - DNA, 253 bp, Glycine max
ctaaggtttcatatttctatgatccagaggttggaaactattattatgggcagggacacccaatgaaaccacacaggattcgaatgacacatgctcttttagcccactatggattgcttcaacactgcaggttctgaagcctatggctgctaaagatagggacctttgcaagttccatgctgatgattatgtggcctttctgagaggcatcacccctgaaacgcagcaagatcaattgagacagctgaagagg

SEQ ID NO: 126944 - DNA, 256 bp, Glycine max
ggcacaggatcaagaatagggacaacaaagataagagagttgagctgctacagaagtttgcacgcacacattttccttctgtgaaatacatggaatatgctgttcaagttgagacctacacgctcaaaaggcaaataatttagttcttaacgtagatggtgcaattggatctcttttcttggatcttcttgctggtagtggaatgttcaccaaacaagagattgatgaaattgtggagattggctatctgaatggc

SEQ ID NO: 126945 - DNA, 104 bp, Glycine max
caaatcatcacacacacatactaagaagcaacaattcttctacaatgggtctcctccttctggaaaagaccctcataggtctcttcctcgctgcggtggtcgcc

SEQ ID NO: 126946 - DNA, 259 bp, Glycine max
gagggtcagagtgagaaagagagagagagagagagaaactgagagaaattcgcaaaccctaatttcggaaagatcggcgatggctgcctccaaggatcgcgagaacttcgtctacatcgtcaagctcgccgaacaggccgagcgatacgaagagatggtggaatcaatgaagaacgttgcgaatctcgacgttgaactgactgtggaggagcggaatttacttctgttgggtacaagaatgtgattggtgctcggagac

SEQ ID NO: 126947 - DNA, 257 bp, Glycine max
ggaaagagaagccacttccaatttcacacacacacagcaacacactgcactgtgtggaaagtaagcatggcaagagtggtggcactccaacagaaccaactatctttctctcccttagcttcctctctttttgacttcagtggaaccagacttcaaactcaacttcagttcaagagaaaactatgccatccaaaagggtctttctacgtctcggcatcgacaccaagaaaatcctaataatgggaggcaccaggttt

SEQ ID NO: 126948 - DNA, 256 bp, Glycine max
cacagcaacaataacaatggcagcctcactacaagctgcagctaccttcatgcaacccaccaaggtgggcatggccactcgcaacctcaaatctacacaatgcatttctaaggcttttggcttggaacccgctgcagctaaactcatttgctcccataagcccgatctcaaagattttgctcaaaaatgtgtcgacgccaccaaaattgcaggattcgccttgccacctcagctctcgttgtttctggagcgagtg

SEQ ID NO: 126949 - DNA, 255 bp, Glycine max
caaggtcaccatggtgacaagagtgtttatcgagcaaattttattttgccagcagcagcattcagtgagaaggaaggaacctatgaaaataccgacggatgcacgcaacaaacattgcctgcagttccaacagttggtgactccagagatgattggaagataattcgagctctatctgaggtggcaggagtgcctttgccctatgatacaatggggccgttctgcccgaatcagtactgtagccccaaaccttgt

SEQ ID NO: 126950 - DNA, 243 bp, Glycine max
tctcaatcttcatctccaacaagtgtttctgtaaccatggcatccaccactctatcccctacaaccccttctcagctatgctcaggaaagagtgggattttcagtccctcacaggcacttcttgtgaagccagtgaagaggcagatgatggggaagagcaagggaatgagaattgcatgcctagccaccagcattcctgctgatagagtccctgacatgggaaaagacagctcatgaatctgc

SEQ ID NO: 126951 - DNA, 252 bp, Glycine max
gtagaaaggtatattagaaaagataaaagagaagcttcctggttatcactccaagacagaggaggaaaaggaaaaggaaaaggagagtggtgctcattgatatttaagattgagacaaggcttttttgttggttggagatgcatgattgtggtgtgctttgttttcatttcatcatatgacagccttgtgggtttctttggtgtttcttgatgcatactatttactttattatgtgtattatccttccatta

SEQ ID NO: 126952 - DNA, 251 bp, Glycine max
  unsure (1)..(251): unsure at all n locations
tttgtttgttgttgtaactcgttcttcttcttttgttgttctgtgtttgtgtttgttttttctctcacctgaaaatgtcttgctgcggtggtaactgtggttgcggaagctcctgcaagtgcggcaacggctgcggaggctgcaagatgtacccagacttgagctacactgagtcaaccaccaccgagaccttggtcatgggagtggcacctgttaggtcaattntgagggtgctgaatgggtgtgccgct

SEQ ID NO: 126953 - DNA, 258 bp, Glycine max
ttctcgagccgaatcggctcgagcacctttgttcactcttcttctcgtgcggctagggttttgccgcagtatcttctagatttgaggaagatgggtaaggaaaaggttcacatcagtattgtggtcattggccatgtcgactctgggaaatccactaccactggtcacctgatttacaagcttggaggcattgacaagcgtgttattgagaggtttgagaggaagctgctgagatgaacaagaggtctttcaagtatg

SEQ ID NO: 126954 - DNA, 259 bp, Glycine max
cttcttgtttctcctgcaatcaacgacacccccccaaaaatgacaggagagacagtgaacccaaaagcttaccctttggccgatgcgcaactcgcaataacaatactggatcttgtgcaacaagctgccaactacaagcaactcaaaaagggtgctaatgaagcgaccaagacactgaacagaggcatctctgagttcgttgtgatggccgcggacactgagcctcttgagattcttctccatcttcctctcctagctg

SEQ ID NO: 126955 - DNA, 230 bp, Glycine max
gctcttggtgcaactgttataggaactgtatccaataaagagaaggcagctcaagccaaggaggatggctgtcatcatgttataatctacaaagaagaggattttgttgcccgtgtcaatgaaattacatctggcaatggagttgaagtagtctatgattctgtaggaaaggatacatttgagggatctttggcatgcttgaagctaaggggctacatgaagttttgggc

SEQ ID NO: 126956 - DNA, 255 bp, Glycine max
ctcatttaattactggttctggtgatcagacatgtgttttatgggatattactactggccttaaaacatctgtctttggaggagagtttcagtctggacatactgcagatgtacttagtatctccattaatggatccaactcgagaatgtttgtatctggttcttgtgatgcaactgctcgattgtgggatactcgcgtggcaagtcgagcagtgcgacatttcatgggcatgagggagatgttaatgcagtcaa

SEQ ID NO: 126957 - DNA, 256 bp, Glycine max
atttctcaacaacttctgctacttcctactccaaccgcacttctgttccgcaattatcatgggctaggtcaagatcggaatcaacggatttggaagaattggccgtttggtagccagagtggctctgcagagagacgatgttgaactcgttgccgttaacgaccctttcatcaccaccgattacttgacatacatgtttaaatacgacagtgttcatgacactggaagcatcacgatgtcaccgttaaggacgaga

SEQ ID NO: 126958 - DNA, 256 bp, Glycine max
caaaacttgacccttaaaaagagatagtaactccaactccaagtcacattggtgacaaagttagaaacaaggagaaagaaagaagatggcaggaaagaaaatcccagatgtgttgctgaattcaggacacaaaatgccagttataggcatgggaacttcagtggagaatcgtccatcaaatgagacccttgcttctatctatgttgaagccattgaggtggttaccgtcattttgacactgctgcagtgtatggaa

SEQ ID NO: 126959 - DNA, 126 bp, Glycine max
gtcagagggaagttctacacttttttgtttggattgatcgagtgtactttttcttttcgagattggcttggtgtgcagtggaaagagggtggaaaagagtggtaagggggagggcggcgccccttg

SEQ ID NO: 126960 - DNA, 253 bp, Glycine max
attggagtcgccatacccctgagggtgctaaacttgaagctgagtggaatgccaagtttgcagaatatgagaagaaatacagtgaggaagctgcagagctgaaggctattattactggtgaattaccagctggttgggagaaagcacttccgacatacactccagaaagccctgctgatgctacaagaaatctgtctcagcaaaatctaaatgcccttttaaggttcttcctggtctacttggtggcagtgca

SEQ ID NO: 126961 - DNA, 260 bp, Glycine max
  unsure (1)..(260): unsure at all n locations
tgggaagatccccttgttgcgaganagaacacaccaacaaaggagcttggaccaaagaagaagacgaacgcctcatacaactacatcaagctccanggtgaaggctgttggagatccctccccaaagctgctggcttgctcagatgtggcaagagttgcagactcagatggataaattacctacagacctgatctcaagagaggcaacttcactgaagagaagatgaactncatcataaacctaccatagcttacttgga

SEQ ID NO: 126962 - DNA, 265 bp, Glycine max
tacaagacaaattcacagtctaaacaagaaattcagaaaattaagctttgggtgaatggagaacctaatttctttggtgaacaaaatccagagggcttgcaccgctttgggtgaccacggcgaacaagtgccttacccactctctgggactctctccccgctatcgccgtcgtcggtggccagagctctggaaagtcctcagtattggaaagtattgttggcaaggattcttacctcgtggatcagggattgttactcggcgacc

SEQ ID NO: 126963 - DNA, 258 bp, Glycine max
gagaagcattagcactaggagcagcaacaactagtctcagctgaaatggcctcttcagtgatggcatctgtggccctcaaacctgcccctttcactgttgagaagtcctcagtgagaggccttccctctctctcaaggaactcttcttcattcagagttgtggccagtggcaagaagatcaagactgacaaaccttatggaattaatggtggcatggtcttgagggatggaactgatgcatctggcaggaaaggaaag

SEQ ID NO: 126964 - DNA, 260 bp, Glycine max
catatctccatttccatttcctctctctcagtttccaagaatcttaagctatgggaaagtcttacccaaccgtgagcgctgattaccagaaggccgttgagaaggcgaagaagaagctcagaggcttcatcgctgagaagagatgcgctcctctaatgctccgtttggcatggcactctgctggaacttacgacgtgagctcgaagaccggtggtcccttcgaaccataaagcacccctccgaactcgctcacggcgcta

SEQ ID NO: 126965 - DNA, 245 bp, Glycine max
tgatgagagccttagaaaatgcaaagccatatttgagcagtttgatgaggattctaatggggcaatagatcaagaggagttgaaaaagtgtttcagtaagctggaaatttactttttccgaggaggaaataaatgatctttttgaagcatgtgatattaacgaggatatgggaatgaagttcaatgagtttattgtacttctttgtgttgtctaccttctcagatgacccgcagctcttcagcta

SEQ ID NO: 126966 - DNA, 215 bp, Glycine max
ctcgagccgagaatccacacaaactcagggttgggcagagagagagcgagagagagagagagagagagagaatgggagggtgggctatcgcggtgcatggtggcgctggtgtcgaccctaatctcccactcgagcgccaagaagaagcgaaacaacttctcacgcgctgtctcaatcttggaatctctgctacaaaattacaaatctccccgcca

SEQ ID NO: 126967 - DNA, 252 bp, Glycine max
gtagaaaggtatattagaaaagataaaagagaagcttcctggttatcactccaagacagaggaggaaaaggaaaaggaaaaggagagtggtgatcattgatatttaagattgagacaaggcttttttgttggttggagatgcatgattgtggtgtgctttgttttcatttcatcatatgacagccttgtgggtttctttggtgtttcttgatgcatcttatttactttattattgtgtatttatctcttcca

SEQ ID NO: 126968 - DNA, 227 bp, Glycine max
gctcgagcggctcgagcggctcgagtgacactaataatatccgatcatctagaacgcaggcgttgagttgagaatggaaggagggacacgaggcacgattctggtcaccaacgacgacggtatcgatgctcctggcttaagagcattggttcactccctcgtcaacgccaaccttttcaacgttctagtgtgcgctcctgatagcgagaaatcagctgtagccacag

SEQ ID NO: 126969 - DNA, 240 bp, Glycine max
agacaacactgtcagagaaatcaagccaaagaacaggagaatcatgggtgctggaggccctgatgatgacgacaataggtggccaccgtggttgaagccactgctgaaagagagcttctttgttcaatgcaagttgcatgctgactctcacaagagcgactgcaacatgtattgcttggactgtatgacgcgcccttctgctctcctgcctcctcaccacaaggatcaccgtgcatccag

SEQ ID NO: 126970 - DNA, 255 bp, Glycine max
cttgcaattgaagttgaagtcttgcccttctctcttcaactccaaacacaagacatcatcatccatggctgcctccgtctccactgtcggagctgtcaacagagctcttttgaacctgaatgggtctggacctggggtttcagctcccagttcatccttctttgggagcagcttgaagaaggttattggctcaagggtccccaacacaaagatttctctggacgcttcaagattgttgctgtagaagagaagaaa

SEQ ID NO: 126971 - DNA, 253 bp, Glycine max
gaagccagaagactttgccaaatatcaggcatttgagttgattcatgccagatgggcaatgcttggtgctgctggattcatcattcctgaggccttcaacaaatatggagcaaactgtggtccagaagctgtttggtacaagactggagctctgcttcttgatgggggtacgctgaactactttgggaaacccatccccatcaatcttattgtggcgtcattgctgagattgttcttgtgggaggtgcagagt

SEQ ID NO: 126972 - DNA, 221 bp, Glycine max
cgcaattcggcgtttgagaatcaatgataattgggatagagatgctgcagctcaatctacccaatatccagatcgacccggtgaacctgagtgcttgtattatttgaggactggagcgtgtggttatgggagtaactgtcgctaccatcaccctgctcatatttcaattggtactcattatggtgaagagtcccctcagagggcagggcaacctgattgcg

SEQ ID NO: 126973 - DNA, 194 bp, Glycine max
tcaatttccaattagggtctcgcttagagtaaccaattaccatcggagtcttcacctttgtcgttcgcaaatccggcgccgaatggagcgccaagcaacattccggcgacatcgaggcctccgccgactccacctacgatctccaaaggaagctcgtgcaagccgctctcgccgttgattactccggtggagac

SEQ ID NO: 126974 - DNA, 255 bp, Glycine max
cttgcaattgaagttgaagtcttgcccttctctcttcaactccaaacacaagacatcatcatccatggctgcctccgtctccactgtcggagctgtcaacagagctcttttgaacctgaatgggtctggacctggggtttcagctcccagttcatccttctttgggagcagcttgaagaaggttattggctcaagggtccccaacacaaagatttccctggaagcttcaagattgttgctgtcgaagagaagaaa

SEQ ID NO: 126975 - DNA, 253 bp, Glycine max
ggcgaatcttcttgaagaaggttcctttaactctgtcgttcaaggttgccatgctgtgtttcacactgcttcttccttttatcacaatgtcaaggacccccaggctgaattgttagacccagctttgaaggggactctcaatgttctgaaatcgtgtgtaaacttgccgacgctggaacgcgttgttctcacctcttctgttgctgcagttgcgtaaacggaaagcctcgaactcccgatgtagtagttgatg

SEQ ID NO: 126976 - DNA, 253 bp, Glycine max
cacacacacacaaattctcaaacccaaatcccaagtctcctaaaaccctaattcgcagtgaaaatgagagagatcttgcacatccagggagggcaatgcggtaaccagatcggagcgaagttctgggaggtgatatgcgacgagcccggcatcgaccacaccggaaagtacagcggcgcctccgagctccaattggagcgcatcaatgtttattacatgaagccagcggcggaaggtacgttccacgcgccgt

SEQ ID NO: 126977 - DNA, 258 bp, Glycine max
ccgtgcttccttcttgacacagcaacagttgctacctttctagcagcagtttgcggctaatcccgcaaccctcttacaactacaacaattgttgccctttgtccaacttgctttgacagaccgagcggccacctaccaccaacacatcattggtggtgcccactgttcgaacgcttatcagatgtaactcactaatgacgtgttatggatgatgtctgtggtcaccagcaatccgtcgttacatatcccgattttcct

SEQ ID NO: 126978 - DNA, 221 bp, Glycine max
tccatacatagccacttcacactcactcactcttgttgccttcatggccaagccagtgtccattgaggtatggaacccaagtggcaaatacagagttgtcagcaccaaaccaatgcctggaactcgttggatcaatcttctcattcaaaatgatgttcgccttgaaatatgtaccgagaagaaaacgattttgtcagttgaagacatcattgcttcgattg

SEQ ID NO: 126979 - DNA, 250 bp, Glycine max
gaaccccaaaaggcacctaatgggcatgctgttatgcatgttaaggatatactgcctcgaggccttatcaactctgggaatctatgttttcttaatgcaaccatgcaggctctcttgtcatgctcacctttcgttcatcttttacagcaattaagaactcgcaaccttcctaaggttgggtatcccacattgacggcatttgctgagttcatagcccaatttgatatgccaagcacaactaaagtaaaga

SEQ ID NO: 126980 - DNA, 265 bp, Glycine max
  unsure (1)..(265): unsure at all n locations
atcgtagagaaataagggaaaaatggtgtcgctgaaactgcagaagcgcctctccgcaagcgtgctcaagtgcggcagaggaaaggtttggcttgaccccaatgaagtcaacgaaatctccatggccaattctcggcaaacatcaggaagttggttaaggatgggtttatcatcaggaagccaaccaagctntcatcccgctcacgtgctcgtagatgaagaggcaaaaggaagggaccgccactatccggttatggtaaacgta

SEQ ID NO: 126981 - DNA, 263 bp, Glycine max
cagcagcagagcttgtatacgtcgccgcttcagcgtagaacatgatcattcccgagaagaaccgtaaagagatctgcaaatacctcttccaagagggagtttgctttgcgaagaaggacttcaatctggcgaagcacccggagattgatgtgccgaatctgcaggtgataaagctgatgcagagcttcaaatccagagagtacgtgagggaaacattgcgtggatgcatattagtggttcctcaccaacgatggaattgagtt

SEQ ID NO: 126982 - DNA, 266 bp, Glycine max
atcaacttgtaatgtaacacttttgagttgcattgttgcatcaccgcaagtccacaacatggctgccactgccgctgcaggcatagcttccttgttttcttcttctattaacagtgtcaaatgtcttcgttcctccaagactgctccattatagacccccttataaccacagtgccctcaaaccgtggcatgtttgtgtcacacttggtggaactttgtccattgggggtgccattaattcgcacaagttgtggggtgctagaatt

SEQ ID NO: 126983 - DNA, 246 bp, Glycine max
caacaactctttgcaagaattgttggaggactaggtgggagggctgcagaagaaattattttcggtgagcctgaagttacaactggagcagctggtgatttgcagcaaatcaccagtttggcacacagatggtgaccacatttggaatgtctgatattggtccttggtcacttatggaaccatcagcacaaggtggggatgtcatcatgagaatgatggcaaggaactcaatgtcagagaggcttg

SEQ ID NO: 126984 - DNA, 109 bp, Glycine max
gtttctaaatggggcagctccaaatggcctatttggacttggaatggataatatatctgttcctagcatcctagccagagaagggcttatttcaaattccttttcaatg

SEQ ID NO: 126985 - DNA, 258 bp, Glycine max
gaactatatacatggggtgatggtacccataatgctgggcttcttggtcatggcagtgatgtcagtcattggataccaaagagaattgctggtccattagagggacttcaaattgcatttgttgcttgtggtcatggcacacagccttggtaacttcaacagggcagctgtttacatttggtgatggaacattcggtgtcttgggccatggagataggcaaaatgtttcatatcctagagaagtagaatccttattgg

SEQ ID NO: 126986 - DNA, 263 bp, Glycine max
gttggaatgactgtattcattgctgtgttgtcagaatatgtggtggatacaattgaggacgcatcagattcatggggtttgtctgtgagcttcctaagcataatcttgctgccgatagttggcaatgcagctgaacatgcaggagcaatcatatttgccttcaagaacaagctggacatctcactgggtgttgcattaggttcagcaactcagattgccatgtttgtggtcccattatgtgtaatcgttgcttggataatggg

SEQ ID NO: 126987 - DNA, 230 bp, Glycine max
cgagcactgcgtcaagatcttgaagaactgcaggaaggcaataccagagaaaacagggaaagtgatcatcgttgatcacgtgctgcggcccgaaggcaacgaactcttcaccgacgttggcattgcatttgacatgagcttcgcgctcacaacgccggcggcaaagagacgacggaagagaactgaaagtggctgttcaaagaaacaggtttcgcccgttacaacatcat

SEQ ID NO: 126988 - DNA, 269 bp, Glycine max
gttcacactaatttactctctccactagctattggctacagttttggagttcttggtattgaaatagtttctggcaagaaaatcagttcctatattatggattcatcctctctcctacaaacggtttggagcctctatggatcaaataggctatatgaagtcgttgatccgaccctagagggtgcttttcctgcagaggaagcatgccaactgcttcagatagggttgctttgtgcacaagcatctgcagagttgagaccatcaatgtc

SEQ ID NO: 126989 - DNA, 165 bp, Glycine max
acaacacggacgcagagccttcgatccagaaaccatgactaagagaacgaagaaggcaggcattgtcggaaaatatggtacccgatatggtgctagtttgcggaagcagattaagaagatggaagttagtcagcatagcaaattcttttgtgaattttgtgggaa

SEQ ID NO: 126990 - DNA, 175 bp, Glycine max
aaaatgccagagacggctcgctacacggcccttgtagccaagaatgcaaaacaagctgcttcagacatgtctaaggtgttgcaagttgaggttgaagctgaagaggacaagttgcagcacatggttgagagtgaaaaccaaaagtatggcttgttcagcaaggaattcgccaaac

SEQ ID NO: 126991 - DNA, 221 bp, Glycine max
ttgtcgacctgcgtgccgacaagaagaagatcaaggatgcggtgaagaaaatgtatgacatccaggccaaaaaagtgaacaccttgatcaggcctgatggcaccaagaaggcatatgtcaggttgacacctgattacgatgcattggatgtggcaaacaagattgggattatctagggtagtactagtacttaggcagctctatggttattcttgaggaaa

SEQ ID NO: 126992 - DNA, 248 bp, Glycine max
tctcatcttacactcaccgtcaagttcgtctcgcgccaccgtcgacgcagttccggccactgcctttggttccctcactttctgtctcttcttcttcttctcagaaatatgccttctcagaaggttgaaacgggtcatcaagacacagtccatgatgttgcgatggattattatggtaagaggctggccacggcttcatcagatcacacgattaagataattggggtgagcaacacggcctctcagca

SEQ ID NO: 126993 - DNA, 250 bp, Glycine max
cttccacaatcggaccgctagtgcccctgcttttgccggtgtgcaatgtatgttttcttgctgcggttctggaaatgttgaattctgaactgagataaaatgagtaggatagaactatcgagggcgagtcagcgccggttccattggggactctgattggtcgtgagcttcgaaatggaaaagttgaaaaaccttttgtgaagtatggacaagctggattggccaagaaaggagaagattactttctgat

SEQ ID NO: 126994 - DNA, 254 bp, Glycine max
ctcgagccgaatcggctcgaggtggtattgtaaacaacactttacgacctccagttccaacattttgtgatccagaatggagattgctgatggagaggtgctggtcatcagaaccatccgaaagaccttccttcactgagattgctaatggattacgttccatggcaaccaagatctctcccaaaggacaaaatcaacagcagcaacctgctgtaccacaaagtcaagtgcagaaatgagttccaacgactgca

SEQ ID NO: 126995 - DNA, 236 bp, Glycine max
ctacaaaggttgctgtaggagataagatattgaagtagtgctaagtgcctaacacctgcagtgaacaatggcctctgcatcagcatctcttctcaagtcttcacttgttcttgacaagtctgagtgggtgagggacaaacacttcgccaaccttctgctgcatcagttgtgagatgcaaccccaccaccccatcaggcctcacaatcagagctggttcctatgctgatgagctcgt

SEQ ID NO: 126996 - DNA, 198 bp, Glycine max
ggcatctttgactgagctctcgttcaactgggtcggcttcataagtgctatgatttcaaacatctccttcacataccgaagcatctattcaaagaaagccatgactgatatggacagtaccatatctatgcctacatttccatcattgctctaattgtctgtataccacctgccgtaattttggaagggcctacactg

SEQ ID NO: 126997 - DNA, 244 bp, Glycine max
ggaagatctgaaggcagaacaaacaaaacttgaggagttagctgaaagtctttgttgggaaaagaagtatgaaaagggtgatattgctatttggagaaagaaaataaatgctaaatcctgcaaagaaagtctcccaatgtttgtggtttagataatgctgatgatgtgtggtaccaaaaaatggaggtctgtaaaacccctttacctgaggtaaccagcaaaaatgaagttgccggaggagagt

SEQ ID NO: 126998 - DNA, 239 bp, Glycine max
ccgagtcaggatctgttgatgtccgagttgtaccttgggagacagatttgcaacgtggtggcttacgagggcccggaccgggtcgagcggcacgagactttgactcagtggagggggagattggactcggccgggttcgacccggttcatctcgggtccaacgcattcaagcaagcgagtatgctacttgctctattcgcaggcggtgatgggtatagggttgaggagaataacggctg

SEQ ID NO: 126999 - DNA, 249 bp, Glycine max
caccagtgttgggttgacagcaaacccaattgtcaacttctctggtgttataggaactaatgttcttgctcttggtgctgatctttcttttgacaccaaaattggggagttaacaaaatccaatgctggactgagcttcaccaaagatgacttgattgcctcattgactctgaatgacaaaggtgatgctttgaatgctgcatattaccatgtagttaagcccttgaccaacactgctgttggtgctga

SEQ ID NO: 127000 - DNA, 243 bp, Glycine max
cagagctccactgagcttgaacagctctgaagctggagattcggttcccagttcagccttctttggcacaagcttgaagaaggttactgcctcaagggtccctaacgtcaagatttctatctggaagtttcaaaatcgttgcggcggagaaagagattgatgagcaacaacagacaaacaaggacagatggaaaggtcttgcctatgatatttcagatgaccagcaagacatcacaagaggaa

SEQ ID NO: 127001 - DNA, 258 bp, Glycine max
gtctattccaaagccagtgtacaagcctattccgaagccagtgtataagcctattccaaagccagttccagtgtataagcctattccaaagccagttccagtgtataagcctattccaaaaccagtgtacagcctattccaaagccagttcccgtgtataagcctataccaaagccagttcccatttataagccaattcccatttttaagccaataccgaaaccagttcccatttataagccaattcccatttttaag

SEQ ID NO: 127002 - DNA, 82 bp, Glycine max
cagaagaacaagtagttgagaactaagaaggtgaagcaaatggcttcctcaatgatctcttccccagctgttaccactgtca

SEQ ID NO: 127003 - DNA, 147 bp, Glycine max
cttaattggaggactcatccgtttcctcaaaggtccaatctttatgctccgtgacgagtaccctaagcttggaagtgtcgtcactctcatactcttccacaagaacatcaccctgctcattggccctgaggtttctgcacacttact

SEQ ID NO: 127004 - DNA, 196 bp, Glycine max
agagtttgttgtgagctataagctagtttatcgtgaggagaatatgaagttgtttgttctctttgttgctgcagtagttttggtagcatggccatgccatggcgcaggctaccaaaggttccctctccgaatgaaaactggctatggtgagcgttcttcggaggtaaaatgcgcaagttttaggcttgctgtggaa

SEQ ID NO: 127005 - DNA, 250 bp, Glycine max
cttaaaagagcctttgctttttctttaggcctttccgaattaagtacttgtttcattttctctcgaagcaagaaaaatgttcatcgagagtttcaaggttgagagtcctaacgtgaagtacacaggactgagattcagtccgtgtacaactatgaaaccactgaacttgtccacgagaacaagaatggcacttatcagtgggttgtcaagcccaaaactgtcaaatatgaatttaaaaccaacacccatg

SEQ ID NO: 127006 - DNA, 253 bp, Glycine max
ctcgaagccctccatcatctcttcttcgccggaatccctctcgctctctctctcgcatctcaaaccttccaactcttctacgacgatagtcttgttcttcaccctctgctgctgcttcttcatcttcttctccttcttctccgtttcggcttcgccttcccaagcctcccaccgtgttctctgcttcttcttctgcttcgtctacctctccgaacggcaccgttttgaagaggaagcgacccgctaggttgga

SEQ ID NO: 127007 - DNA, 248 bp, Glycine max
gtgggaagttgactgagaaagcagatgtttacagttttggagttcttgttattgaaatagtttctggcaagaaaatcagttcctatattatgaattcatcctctctcctacaaacggtttggagcctctatggatcaaataggctatatgaagtcgttgatccgaccctagagggtgcttttcctgcagaggaagcatgccaactgcttcagatagggttgctttgtgcacaagctctgcagagttga

SEQ ID NO: 127008 - DNA, 141 bp, Glycine max
gggggtgttccggttctgagctttttggagagccaacacattgggtatgagaaagagacgttggagaacatacacaagtcagtgatagatggtgcctatgaagtgatcaggctgaagggtacacttcatgggccattgggt

SEQ ID NO: 127009 - DNA, 248 bp, Glycine max
cccaagttgcatccttgttcactcaacaagggaagaagggcaccaaccaggatgccatggttgtttgggagaacttttgttctagagaagatactattttctgtggagtttttgatggccatggccgtatggtcacatggttgcgaaaagagtgagggattctcttcctctaaaactgaatgcccattgggaacaaagtgcatctggtgaagaagtcctcaaggagattagcgttaatactgcaggaa

SEQ ID NO: 127010 - DNA, 247 bp, Glycine max
caccgtaagcgataagcaatagaattcagagagagagagaaagagagtctcttgctctgtatctttgatttgatcattccaatcttcaatttttctatatatccatcaatccgcagagtgcaaagtctaatctttcgcctattgggttctactcctttctctcttcgtttccgatcgatccaattttcttcccatggctacgatcggacacaacaatctcaatgccaaattggttcttctcggggac

SEQ ID NO: 127011 - DNA, 256 bp, Glycine max
attcagaaacacaccaagcgaagcgcactagcaacaacctaacaacaatggctaccaagatattatccctccttgcgcttcttgcgctttttgcgagcgcaacaaatgcgtccattattccacaatgctcacttgctcctagttccattattccacagttcctcccacctgttacttcaatggccttcgaacacccagctgtgcaagcctataggctacaacaagcgattgcggcgagcgtcttacaacaaccaat

SEQ ID NO: 127012 - DNA, 248 bp, Glycine max
ctttcgatctccttcggcttgcagtgttccaaaatgaaggcatcagcgctagggcagttgtcgggcttcaaatacttgtgaggagttcatttcattactttatgcagacagcaagattgagagtcatgttgattatcacattatcagagctaatgtctgatgtgcaagtgactcagatgacgcctgatggaagcttagaagaaagtggtgaagcacggagacttaggaagtctgtagatgaaatgaag

SEQ ID NO: 127013 - DNA, 258 bp, Glycine max
ctcaggacttcaagactgatctgcgtttccagagccacgccgtgcttgcattgcaagaagctgctgaggcataccttgttgggctctttgaggacactaacctgtgtgccattcacgccaagcgtgtaaccattatgcccaaggatattcagctggcaagaaggattcgtggtgagcgtgcttgagttggtggttggaaagatgaagatgattggtggctgcggttggtgtttttgtttttcagattccttcttttat

SEQ ID NO: 127014 - DNA, 239 bp, Glycine max
  unsure (1)..(239): unsure at all n locations
cactcncgnttagcaactataactcttttgagggggttctttactgcaggccacacttcgaccaactgttcaaaagaactggtagtcttgacaaaagcttcgaagggacaccaaaaattgctaaaccagaaaaaaccggggaagagaaacctgcagcaaccaaagtctcaagtatgtttggtggaactagagataaatgtgccggttgtcaaaaaacagtgtatcccactgaaaaggtt

SEQ ID NO: 127015 - DNA, 245 bp, Glycine max
gaataacatcatcacgaggatgataatggggaagaagagtaatgcggaaaacgatgaggtggccaggttgaggaaggtggtgagggaggtcggggagttgcttggggcgtttaacttgggggatgttattgggttcatgaggcctttggatctgcaagggtttgggaagaagaacatggaaactcaccacaaggtggatgcgatgatggagaaggtgttgagggagcatgaggaggctagggcta

SEQ ID NO: 127016 - DNA, 249 bp, Glycine max
ctcgagccggaagaagagaagtagggtttccgaagacgaggaaatcgaatctgacaccaaccctttcgatcaaaacgaacacactctctaccaggttcttggtgtggagaaaacagcatctcaacaggaaataaagaaggcatactacaagttggcattgaggctgcatcctgataagaaccccggcgatgaggaagctaaagcaaagtttcagcaattgcaaaacgttatcgctattcttggggatga

SEQ ID NO: 127017 - DNA, 252 bp, Glycine max
agggccttctgtttctgatactgttataggagagggaaacacaacagcatggaagatgtgtggccttgacaagagtacatgcttgactgtgatgtttgatctttcatcaagtgatcgttcaaacacccctggtgctatcaacccacaattgtacctacagttccttacaagttaccaggacccaagtggtcaatcagtgcttcgtgtcacaacagtaactagaagatgggtagatagttctgttagctctga

SEQ ID NO: 127018 - DNA, 256 bp, Glycine max
gggagaataacgaagaaggagctgaacgactcgctggagaacctgggcatcttcatctctgacaaggacctgagccaaatgatccagaggatcgacgtcaacggcgacggttgcgtggacatggacgagtttggggagctgtatcagaccataatggacgagcgcgacaatgaggaggacatgagggaggccttcaacgtcttcgaccagaacgccgacggcttcatcaccgtcgacgagttgaggaccgtcttgt

SEQ ID NO: 127019 - DNA, 225 bp, Glycine max
gtttgtagcccatttatcattaacaatgcattcttctgtgccaggatcattagtgatatggtatgacagtgttacagttgatggtaaattgaattggcaagatcaactaaatgaacacaataagccattctttgatatatgtgatggaatatttgtgaactatacatggaaggaagactatccaaggctctctgctgctgttgccagtgatcgaaagtttgatgt

SEQ ID NO: 127020 - DNA, 249 bp, Glycine max
caccatctctacgacaacctcctttctctctatctctagctccgatgagtgctctctctaactccagtagtagccacggcaattccttcctcaagatgcccgccatcaagtttaccaagctcttcatcaatggagattttgttgattccatatcaggaaggacatttgagactatagaccccagaaaagaagaggtaattgcaagagttagtgagggagataaagaagacattgatattgctgttaaag

SEQ ID NO: 127021 - DNA, 247 bp, Glycine max
gctgttgattccctctctatatgcatgaatatcaatgggtgggaagccatgctcttcattggagtaaatgcagctgtcagtgtcagagtttccaatgaacttgggcttggacatccaagagctgccaagtactctgtctatgtgatagtctttcagtcacttttcttgggaatctttttcatggctactattttggcgactagagattattatgccattatttttacaaacagtgaggttttgcata

SEQ ID NO: 127022 - DNA, 249 bp, Glycine max
caagttattaaatctcttggtgttgacctgaagaagattaaagactgcgttggagatccccacgcagatatagaaaatcctgtcctaaaggctgaacaggatgcacagattggtaaaggctctcgtggtgatgttactatactgcctactcttgttataaacaacagacagtatagaggtaagttgtcaagacctgctgttctcaaggcaatctgttcaggcttcctagagaccactgaaccatcaatt

SEQ ID NO: 127023 - DNA, 252 bp, Glycine max
cttttctcttctctgtctacggggtgccctgagatcacattgaacaatggtgaaggctgtggccgctcttggcagcagtgagggtgtcactggaactattcacttcgttcaggatggaagtggtccaaccaccgtaactggatctcttgctggtcttaagcctggtctccatggtttccatgtccatgccttgggggacactaccaatggttgcctctcaactggatcacatttcaatcctaataacaagga

SEQ ID NO: 127024 - DNA, 259 bp, Glycine max
atcccaattcccaattcccaattcgaaacccttattcctttcaaagaaccaaattgagtgatcgtgatggcaccaaaggcagagaagaagccagcggagaagaagcccgcggaggagaagaagtccacggtgggagacaaggctccggcggagaagaagccaaaggccggaaagaagcttccgaaggagggaggcgccggcggagaagggaagaagaagaagagaaacaagaagagcgtggagacatacaagatctaca

SEQ ID NO: 127025 - DNA, 258 bp, Glycine max
attgtttaaacctaattctcatttcttcatcgttcgattcttctcctcctaaagatgcagatcttcgtgaaaactttgaccggtaagaccatcacccttgaggtggagtcctccgacaccatcgataacgtgaaagctaagattcaagacaaggaagggatcccacctgaccagcagagacttatctttgcgggtaaacagcttgagggaggttcgaacccttgccgactacaacatccaaaaggaatccactctcca

SEQ ID NO: 127026 - DNA, 244 bp, Glycine max
aactaacagggctgacattcttgactcggccttgttgagacctggccgatttgatagacaggtgacagttgatgttccagatataaggggaaggactgaaatcctaaaggttcatgctagcaacaaaaagtttgatgctgatgtttctcttgaagtgattgcaatgagaacacctggctttagtggagctgatcttgcgaatctgttgaatgaagctgctatattagctggtcgccgtggaaag

SEQ ID NO: 127027 - DNA, 246 bp, Glycine max
gatcgagataactagaaacagtgtgatgaaaatgaaggtccttgttttcttcgttgctacaattttggtagcatggcaatgccatgcgtacgatatgttccctctccgaatgaacactggctatggtgcccgtactccggaggtgaaatgcgcaagttggaggcttgctgtggaagcacagaacatctttggctttgagaccattcctgaagagtgcgttgaagcaacaaaggaatacatccatgg

SEQ ID NO: 127028 - DNA, 243 bp, Glycine max
gaagagcatcactgaactaacaaagcaaccctatgtcgaaggtggtttgtgtcaccggagccagcggcgccatcggatcatgggtggtcctcctcctcctccagcgtggttacaccgtccatgccaccgtccaagatatcaaggatgaaaatgagacgaaacatttggaggaaatggaaggagcaaagagtcatctccatttttttgaaatggatcttcttgacatcgactccattgccgctg

SEQ ID NO: 127029 - DNA, 244 bp, Glycine max
caaattagttcattctctttgcgcagttccctacctctcctttcaagatgcagatcttcgtcaagaccctcaccggaaagaccatcacccttgaggtggaaagctctgacaccatcgacaacgtcaaggccaagatccaggacaaggaaggaattcccccggatcagcaacgtctcatcttcgccggaaagcagctcgaggacggccgtaccctcgccgactacaacatccagaaggagtcaac

SEQ ID NO: 127030 - DNA, 247 bp, Glycine max
cttctcaatcgcaaattttctcccccaaatcgtagatctacggataaattggtgtagtgtggtaagatgggaggaggatttagagtgcttcacttagttaggccatttctctcgtttcttcctgaagttcaaactgctgacaggaaagtgccatttagagagaaggtcatatacactgtgatctctcttttcattttcctggtttgtagtcagctccctctatatgggatacactcaacaacaggtg

SEQ ID NO: 127031 - DNA, 250 bp, Glycine max
atcaaattagttcattctctttgcgcagttccctacctctcctttcaagatgcagatcttcgtcaagaccctcaccggaaagaccatcacccttgaggtggaaagctctgacaccatcgacaacgtcaaggccaagatccaggacaaggaaggaattcccccggatcagcaacgtctcatcttcgccggaaagcagctcgaggacggccgtaccctcgccgactacaacatccagaaggagtcaaccctt

SEQ ID NO: 127032 - DNA, 257 bp, Glycine max
aactaacagggctgacattcttgactcggccttgttgagacctggccgatttgatagacaggtgacagttgatgttccagatataaggggaaggactgaaatcctaaaggttcatgctagcaacaaaaagtttgatgctgatgtttctcttgaagtgattgcaatgagaacacctggctttagtggagctgatcttgcgaatctgttgaatgaagctgctatattagctggtcgccgtggaaagacagctatttcat

SEQ ID NO: 127033 - DNA, 282 bp, Glycine max
tcggcattcggttcggcgcgaggcactctatgactagggatttctccttcttctcctccctctgcctgcagcggtgcaacctatcagcctccaaatccaatggcttcagagaagaaactgtcgaacccaatgagggagatgaaggtgcagaagctcgttctcaatatctctgttggagagagtggagatcgtctcaccagagccgccaaggtgttggaacagcttagtggccaaaccccagtgttttccaaacaaggtacactgttcgttcctttgggatta

SEQ ID NO: 127034 - DNA, 252 bp, Glycine max
gcagaaagtcagctcatcctagagttttaaaaatggcagcagcctcctccatggctctctctatccccatccttggctggcaaggccgtgaagctgggcccatcagcccccgaagtcgggagggtcagcatgaggaagaccgtcaccaagcaggcctcctccggaagcccatggtacggcccagaccgcgtcaagtacttgggcccattctctggcgagcccccgtcctacctcactggcgagttcccaggt

SEQ ID NO: 127035 - DNA, 241 bp, Glycine max
ttgggattcaaacaaaccgcattcgcactgtgcatccctttcttccttcctcgtcttattctccaaccctctccaaaacctccttctcactcttcttctttctgctactctccctctaaacaacgtcgtttctcgtcgtacagccatgtcatacgactacctcttcaagtacatcatcatcggcgacacaggtgtagggaaatcgtgcctgctcctgcaattcaccgataagaggttccaa

SEQ ID NO: 127036 - DNA, 241 bp, Glycine max
caaagagcaaccaccacaccacacagcacttcccttctcctcctccaccatgtcattgccaccgccgtcgctggtaacggcggcgactccgacggagcttccgatccggcagattccgggaagctacgggttcccgttgctgggccccatctcggatcggcttgactacttctggttccagaagccagagagcttcttcagaaagcgagtggagaaatacaagagcaccgtgttccgcacc

SEQ ID NO: 127037 - DNA, 244 bp, Glycine max
gcatgtcagaaatgcttggaaaccccatcaacttcagtggtgccacaaggccagctccatctgcttctagtcctgcctccttcaagactgtggctcttttctccaaaaagaaggctgcaccaacacctccaaaaaaagctgctgctgatgctcctgccaatgatgagcttgccaagtggtatggtcctgacagaaggatcttcttgcgtgatggtctcttggaccgatccgacatcccacagta

SEQ ID NO: 127038 - DNA, 248 bp, Glycine max
ctcgagccgaatcggctcgagcgggctcgagggctgcctcactacaagctgcagctaccttcatgcaacccaccaaggttagcatagcctctcgcaacctcaaatctacacaatgcatttctaaggcttttggcttggaacctgctgcagctaaactcacttgctcccttcagcctgatctcaaagaatttgctcaaaaatgtgtcgacgctaccaaaattgcaggattcgcccttgccacctctgct

SEQ ID NO: 127039 - DNA, 248 bp, Glycine max
ggatagtcttggtgcagaagttgtgaaaccatatactcctacaacattggatactgatgttggatactttgaattggttgtgaagatgtatccacaaggacggatgtctcatcactttagggagatacgtgaaggtgattacatggctgtgaatggaccaaagggacgttttaagtaccagcccaaccaagtaagagctttgggtatgattgctggtggcactggcatcaccccaatgtttcaagtta

SEQ ID NO: 127040 - DNA, 248 bp, Glycine max
cggcaagctccgaaaacaccacaccttcactttccgacctagctccggcaaggaaacggagggcgggagcgtgagatcgtacggagacgaatcgtcggaggaagcgacgagagtgacgcgtagtatcatgatcgtgaaaccgcccgggtaccagagtggatcgcctccggtttctcccgccggttctactactccgatttctccgttttccggaggaaaagattcgtttcggtttcgaagaaggtcgg

SEQ ID NO: 127041 - DNA, 251 bp, Glycine max
ttcaagaggcttctcagttgctgtcttgtttggctgactttgtgtactgcacggtctgtgcatgcatgcagactcagcacaagattgagatggacaagcgagacgggaaatttggaccccaaccagcaatggcagtgcctcctatgcagcagatgtcacgcattgatcaacaagttcctccttcggttgggtatgcaccacaaccagcttatggacagcctgctcaaggatatcctgctccgggttatcct

SEQ ID NO: 127042 - DNA, 259 bp, Glycine max
tcagcgctcatgaagttgaagtcttgcccttctctcttcaactccaaacacaagacatcatcatccatggctgcctccgtctccactgtcggagctgtcaacagagctcttttgaacctgaatgggtctggacctggggtttcagctcccagttcatccttctttgggagcagcttgaagaaggttattggctcaagggtccccaacacaaagatttcctctggaagcttcaagattgttgctgtagaagagaagaaag

SEQ ID NO: 127043 - DNA, 243 bp, Glycine max; identical to SEQ ID NO: 111928

SEQ ID NO: 127044 - DNA, 239 bp, Glycine max
gacatttatcttcgattgtgacggagttatatggaaaggtgataaattaatagacggagtgcctgaaacgcttgacatgcttcggtcaaagggcaaaagattagtttttgtcaccaataactcaacaaagtctaggaagcaatatggaaagaagtttgaaacacttggcctgaatgtcagcgaggaggagattttcgcatcatcctttgcagctgctgcatatctgaagtccattgatt

SEQ ID NO: 127045 - DNA, 241 bp, Glycine max
gtttcgaatagattatcctaagtctttgggaatagtgctgcaatggcttcaagtcaggaggaggtgacccttttgggagctactggaagcccatttgtgtgcagggttcatattgccctcaagttgaagggagttcaatacaaatatgtcgaagaaaatttgaggaacaagagtgaactgcttctcaaatccaacccagttcacaagaaggttccagtgtttattcacaatgagaagccca

SEQ ID NO: 127046 - DNA, 248 bp, Glycine max
ggataccgttccggtcctcgttggccctgttacatacctgttgctctccaagcctgccaagggagttgagaaatccttttctctcctctctctccttcccaaggttcttgctgtctacaaggaagttattgctgaccttaaggcagctggtgcttcatggattcagtttgatgagcctacccttgtcttggaccttgagtctcacaagttgcaagcattcactgacgcatatgcagaacttgcgcctg

SEQ ID NO: 127047 - DNA, 248 bp, Glycine max
ggaacccaaaccgaaaccctaaccctaacggagagatggcggacacttggcatcgatattcgggacggagaaggacagggtgaactgtccgttctacttcaagatcggcgcgtgcaggcacggcgaccggtgctcccggcttcacaccaagccgacaattagcccaacattggttctgtcgaacatgtaccagaggcccgacatgaacatgagcattatcaccaaccccgatcagccacaaccccaat

SEQ ID NO: 127048 - DNA, 252 bp, Glycine max
ctagtttcttacaagcctctactatactgcttcaccttctgctctagaaaattcagtgctgaaacatggcttcggctactctctctgtagccaaaccagcccttcaggcaaatgggaaaggcttctctgaattctctggcctccgaagctcatcaggcttccttcccttttctagaaaatcttcagaggatttccattctgtcattgccttccagacctatgcagttggaagcagtggaggatacaagaagg

SEQ ID NO: 127049 - DNA, 253 bp, Glycine max
gatctcagcttgctgcttttgataaagcttggtgctcatacttgaattgttttgtggtatggaaggttaatgatgctcgatcactggaggaagatttggttagagcagcttgccagcttgaagcttctatgattcaaacttgcaagttaactccagaaggagctggtggtaagcttagtcatgatatgaaagctattcagcatcaggtctctgaagatcaaaaacttttgagagagaaggtgctgcacctgag

SEQ ID NO: 127050 - DNA, 239 bp, Glycine max
aaacactcataacacaaagcacaaagcaaagctcatccttgagttaaaaaatggcagcagcttcttccatggctctctcatccccatccttggctggcaaggccgtgaagctgggcccatcagccccagaagtgggaagggtgagcatgaggaagaccgtcaccaagcaggtctcctcaggaagcccatggtacggcccagaccgagtcaagtacttgggcccattctctggcgagccc

SEQ ID NO: 127051 - DNA, 236 bp, Glycine max
aaattttgtgaattctgagtgctcttgattttgataaaaaggtatgattacgggtggagcagcagcgacagttttctacaatttgaggcaaaaacatcctacgcttgacatgccagtgatcgactacgacttggcacttcttttccaaccagtgctggtgcttggaatcagcattggagttgccttcaatgtgatttttgctgattggatgatcacagtcttgttactaataattt

SEQ ID NO: 127052 - DNA, 242 bp, Glycine max
ccagaagggaggaacgccgtcgtcgggatgctgcaacggagtgaagagcctcaatgccgccgccaagaccaccgccgaccgccagacggcgtgcaactgcctcaagtcggccgccagccaaatctccggcttcaacgccaacaacgccgcctcgctccccggcaaatgcggagtctccatcccctacaagatcagcacctccaccaactgcgctaccatcaaggtttgaagagaaagtcatg

SEQ ID NO: 127053 - DNA, 247 bp, Glycine max
aaaacacacacacacacaaattctcaaacccaaatcccaagtctcctaaaaccctaattcgcagtgaaaatgagagagatcttgcacatccagggagggcaatgcggtaaccagatcggagcgaagttctgggaggtgatatgcgacgagcacggcatcgaccacaccggaaagtacagcggcgactccgagctccaattggagcgcatcaatgtttattacaatgaagccagcggcggaaggtacg

SEQ ID NO: 127054 - DNA, 259 bp, Glycine max
tcggctcgagcgaactcagatgtagaagagcttcttgataaggagcttcctcttaagtttgtggaggtggatgaggaacaatctagacttgtcctcagcaaccgcaaggccgtagctggcaaccaggcacagctaggaattggatcagtggtcactggctctgttcaaagcctgaagccatatggtgctttcattgacattggtggaattaatggcctccttcacgttagtcagatcagtcatgaccgtgtaactgata

SEQ ID NO: 127055 - DNA, 253 bp, Glycine max
tatttttctcactgtcttgtctctccagagaactgtatagagagagatggcagctgcaacatctggtgctgtgttaaatgggttgggatcttccttcttgagtggaggaaacaggagccaaacccttctggccactgctattggaggcaaagttggtgctgctgctgttactgttagtcctagaagactcattgtggtagctgctgctgcaccaaagaagtcatggctccctggtgtcagaggtggtggcaac

SEQ ID NO: 127056 - DNA, 260 bp, Glycine max
ccttatcatctccgaatttcattttcagaagcctctttgggaatcaaatccgaagcatgatgcattgtgcgagcattgtctcggctccgtcctacgcgttcccttttctctctggctccgcttccactactccaactgcgatctcgctcactaagcgcagttggaagccacctccgagcatggcaaaaggcccagtcagagccaccgtttctatagagaaagagaccccggaggccaatcgtcccgaaacgtttctcaga

SEQ ID NO: 127057 - DNA, 258 bp, Glycine max
ctgtcatcaagatggtgaagttcacaactcacaggcttcggcacataatggactgcaaacacaatattcgtaacatgtctgttattgcacacgtcaatcatggaaagtctaccctcactgattctcttgtggctgcttctggtaatatcatagcacaagagggtgaagctgagcgtggcaacactgtcaaatcctccggtatctctctctactatgcgatgccagagggtgatttgaagaatttcaaaggggaacgtg

SEQ ID NO: 127058 - DNA, 257 bp, Glycine max
gtgttcgtaggcatggaaggggtaattgggatgctatgctcagagatcccaagttaaagttttcaaagtacaaaacatctgaggatttatcagtgaggtgggaagaggagcaggtaaaggtctttcaggggccaccttttcctgcacaaagatcattcaagacaacaaaatctaccaaatcggcacattttccaatctctgatggaatgatggaaagggccttgcatgggagcaaatttcttttgccaccaaaattt

SEQ ID NO: 127059 - DNA, 257 bp, Glycine max
gtgaagtgagtagtgagtgctgaatcgaatcgaatcgattctccgaacatggcggcgagcgatcgcacagtgttgcaattctcttcatcatcttcttcttcttcgcagatcttgtccgcgaaggtccaccctctggtcatcttcaacatctgcgattgctatgttcgacgccctgaccaagccgaccgcgtcatcggaaccctactcggctccgtccttcccgacggaaccgtcgatatccgaaattcctatgctgt

SEQ ID NO: 127060 - DNA, 256 bp, Glycine max
atttgttttctctttatttcagatttctgagattatatctcgttttgagcggaaagggtacaagcttgtgggaattaaagtagtgattcctaaaaaggaatttgcccaaaggcactatcacgacctgaaagaaagacccttcttcgatgggctgtgtgattttctaagctctggccctgttattgcaatggtgtgggaaggacagggagttatttcctatggccgaaagctaattggagccacagatccacagaaa

SEQ ID NO: 127061 - DNA, 258 bp, Glycine max
cgtttttgctcttttaccatgctaattctgattacgtatgattaatgctatcagattgtgatactgatggagcaccacttcaaaacactcataacacaaagcacatagcaaagctcatccttgagttaaaaaatggcagcagcttcttccatggctctctcatccccatccttggctggcaaggccgtgaagctgggtgcatcagccccagaagtgggaagggtgagcatgatgtagaccgtcaccaatcaggtctcc

SEQ ID NO: 127062 - DNA, 260 bp, Glycine max
gagcaaccaccacaccacacagcacttcccttctcctcctccaccatgtcattgccaccgccgtcgctggtaacggcggcgactccgacggagcttccgatccggcagattccgggaagctacgggttcccgttgctgggccccatctcggatcggcttgactacttctggttccagaagccagagagcttcttcagaaagcgagtggagaaatacaagagcaccgtgttccgcaccaatgttcctccctccttcccctt

SEQ ID NO: 127063 - DNA, 256 bp, Glycine max
cttcaaaacactcataacacaaagcacaaagcaaagctcatccttgagttaaaaaatggcagcagcttcttccatggctctctcatccccatccttggctggcaaggccgtgaagctgggcccatcagccccagaagtgggaagggtgagcatgaggaagaccgtcaccaagcaggtctcctcaggaagcccatggtacggcccagaccgagtcaagtacttgggcccattctctggcgagcccccgtcctaccta

SEQ ID NO: 127064 - DNA, 255 bp, Glycine max
tgaactttgtccctactcttcggtctggagagtgttctgatattggagatcgcccttccatggaggatacccacatatgcattggagacttggcagaaaaatttagcaataacgaactttgcaaggaagctatttccttttatggtgtatttgatggacacggagggaagagcgctgcacaatttgttcgtgatcatctgccacgggtgattgttgaggatgctgacttccctttggaattagagaaggtagtca

SEQ ID NO: 127065 - DNA, 250 bp, Glycine max
agagaatccgaggcgaagagaagagaaaaattaagatggaggggaaggagcaggatgtgtcgctgggagcgaacaagttcccggagagacagccgattgggacggcggcgcagagccaagacgacggcaaggactaccaggagccggcgccggcgccactggttgacccgacggagtttacgtcatggtccttttacagagcagggatagcagagtttgtggccacttttctgtttctatacatcactgt

SEQ ID NO: 127066 - DNA, 258 bp, Glycine max
ggaaacaggcatagcatgctacactcgcgggcctttcctgcctagtgtttcttccaagcactctccaccctccatctctccatcttttggcttgaggagtctgaaatcgagctctttatttggagaatctctaagagtggcatccaaatcaacactaaaggtttcaaagacaaagaatacttcactcgtgaccagatgtgaaattggtgacagtctggaagaattcctcacaaaagcaacaccagataaggggttgat

SEQ ID NO: 127067 - DNA, 258 bp, Glycine max
gtcaaatagaagctggatcatccctttatgatctgaagcatatgcgtgttgttaactctgcatatttctctccaatatctggaaccaaaattctcactacatcacaggacaaccgtcttcgtgtatgggattctatctttggtaatatggactctcccagccgagaaattgtacatagtcatgatttcaatcggcatttgacaccctttaaagctgaatgggatccaaaggatccatcagagtcccttgctgttgttg

SEQ ID NO: 127068 - DNA, 254 bp, Glycine max
accaattcagttcccaacttttctggatccgccatcttcctttttctttctttgaccttttaccggttgttgcgttggcgcaaatggcattcttcagaagcgtttctgcactttctcgacttcgctctcgcgtgggccaacaatctaatctggcgaattcagttagatggctccaaactccgagctccagtaacactgatctttattctgagttgaaggaactggttccagagtatcaggaacgtgttaagaag

SEQ ID NO: 127069 - DNA, 253 bp, Glycine max
tcctcagcaagaacaagaagaagaagaagaaacaatgtcttgctccaatctgacaatgttggtgtcctcaaaaccttccctttccgacccctcgaacctctccttccgctctgtcctgaacccttttcagctccctacacaaaacccagcttcatgcaccccttcacgctcctcaagcacccaaattcagtgtggtctgagagaactgagaacccgcattgagtctgtgaagaacacgcagaaaatcacggag

SEQ ID NO: 127070 - DNA, 255 bp, Glycine max
gtcaaatagaagctggatcatccctttatgatctgaagcatatgcgtgttgttaactctgcatatttctctccaatatctggaaccaaaattctcactacatcacaggacaaccgtcttcgtgtatgggattctatctttggtaatatggactctcccagccgagaaattgtacatagtcatgatttcaatcggcatttgacaccctttaaagctgaatgggatccaaaggatccatcagagtcccttgctgttg

SEQ ID NO: 127071 - DNA, 253 bp, Glycine max
ttgtagacttgcctgtttccacgggcttcacttatgccacaacagagtttgctactcaacgaagcgactggatacaagttcaccaagtccatcaatttcttaggaagtggttgattgaacatccaaattttttgtcaactgatgtttacattggtggcgattcatactctggcattactattccagcaattgttcaagaaatttctctaggaaatgaaaaagggctccaaccatggataaatctccagggata

SEQ ID NO: 127072 - DNA, 254 bp, Glycine max
gatgatttttgcttccttctttcaacacgggcaggaggtctgggtatcaaccttgctacagcagacactgttataatatttgattctgattggaatcctcaaaatgacctgcaggcaatgagtagagctcatagaattggacaacaagaagttgttaacatatatagatttgttacaagcaaaagtgttgaggaagatattctggaacgtgctaagaagaaaatggttctggaccacttggtgattcaaaaact

SEQ ID NO: 127073 - DNA, 254 bp, Glycine max
aaaaaagctcgaatactcggataaggagagtaagggcggtgcagtgcttcaaacccctttttctcttctcatttcctttcatcactctcttgcttcttttcttcttctcgcaattttccattttcacacttttagcaacatcttttaatggcgtcccaaatccgtgagtggtctggaatcaatacattcgcacctgctacccagactaagttgcttgaactcttgggaaatcttaaacaagagaatgtgaactc

SEQ ID NO: 127074 - DNA, 251 bp, Glycine max
acccggtagctcccttggagaaagtttgccttcttggatgtggtgtttcaactggacttggagctgtctggaacactgcaaaagtggagtcagggtcaattgttgctatttttggccttggaactgttgggcttgctgttgcagagggtgcaaaaactgctggtgcatcccgggttattggcatagatattgacagcaagaagtttgatatagcgaaaaactttggagtcaccgagtttataaatccaaac

SEQ ID NO: 127075 - DNA, 252 bp, Glycine max
ggagaatggaagaaatctgcttctgggaaaagtgttgccatcatcaaccccactaccagaaagactcaatacaaagttcaagcttgttcacaagaggaggttaacaaggtcatggacttggcaaaatctgcccaaaagttatgggcaaagaccccactatggaaacgtgctgaacttcttcacaaggcagctgctatccttaaagagcacaaagcaccaattgcagagtgcctggtgaaagaaatagcaaag

SEQ ID NO: 127076 - DNA, 250 bp, Glycine max
cgttctctctctatctctattaagttgtaactctatttatcactcagatatttgagaaggctttgaaagatggtgcttttgggacttctcatggtgggatttctttctctgggttcatttgtctcagcttctggttatggttggatggatgctcatgcaaccttctatggagggggtgatgcctcaggcaccatgggtggagcatgtggatatgggaacttgtacagccagggctatggaacaaacactg

SEQ ID NO: 127077 - DNA, 252 bp, Glycine max
caagtccaacctacccctttttcttctcccaccaacttcaccgtcttcttcctcgatcatgtctcacttcaagggcaagtaccatgatgagcttattgtcaatgctgcttacattggcactcctggaaagggtattcttgctgctgatgagtcaacagggacaattggcaagcgtttggccagcatcagtgtagagaatgttgaatccaacaggcgtgctcttagggagctgcttttcaccgctcccggtgc

SEQ ID NO: 127078 - DNA, 233 bp, Glycine max
ctcaatcgttagatctcatcttatactcaccggcgagtccatctcgcgccagcgtcgacgccgctccggccaccgctccggccaccgcctttggttccctcactttctcgtccttcttcttctcagaaatatgccttctcagaaagttgaaacgggtcatcaagacacggtccatgatgttgcaatggattactatggtaagaggctggccacggcttcatcagatcacacaa

SEQ ID NO: 127079 - DNA, 251 bp, Glycine max
cgtttcaacaccttaatttgcacacgctgcttcttcagcttgagaaatggcacaagaaacctttctattcacatctgaatctgtaaacgagggtcaccccgacaagctgtgcgaccagatctctgatgcagtgctcgatgcgtgccttgaacaggaccctgacagcaaggttgcctgtgagacatgcaccaagaccaacatggtcatggtctttggagagatcacaaccaaggccaacgtagactatgaga

SEQ ID NO: 127080 - DNA, 244 bp, Glycine max
tgatattgttggccttgtcctccactccggtctcctagtcccatacttttcatggaaatacagccatcgccgtcaccactccaacactggttctcttgagcgggatgaagtatttgtgccaaagcagaagtcctgtatcaagtggtactctaaataccttaacaatcctccaggcagagtcctcactcttgctgtcaccctcacacttggttggcccttgtacttggctttaaatgtttctgga

SEQ ID NO: 127081 - DNA, 253 bp, Glycine max
gtttcttacaaggctctactctactgcttcaccttctgctctagaaaattcagtggtgatacatggcttcggctactctctctgtagccaaaccagcccttcaggcaaatgggaaaggcttctctgaattctctggcctccgcagctcatcaggcttccttcccttttctagaaaatcttcagaggatttccattctgtcattgccttccagacctatgcagttggaagcagtggaggatacaagaagggtgt

SEQ ID NO: 127082 - DNA, 252 bp, Glycine max
atcttctcttaaaagagcctttgctttttctttaggcctttccgaattaagtacttgtttcattttctctcgaagcaagaaaaatgttcatcgagagtttcaaggttgagagtcctaacgtgaagtacacagagactgagattcagtccgtgtacaactatgaaaccactgaacttgttcacgagaacaagaatggcacttatcagtgggttgtcaagcccaaaactgtcaaatatgaatttaaaaccaaca

SEQ ID NO: 127083 - DNA, 249 bp, Glycine max
gagcaatggtgaacctgagaagcccttgatagttcatgttggacggcttggagttgagaagagtttagattttctcaaaagtctcatggataggcttcctgaagcacgaattgcctttatcggagatggaccttacagagaggaactagagaaaatgtttgaaggcatgccagcagtgttcacaggaatgttaggaggggaagaactatctcaagcctatgcaagtggagatgtctttgtgatgccgtc

SEQ ID NO: 127084 - DNA, 248 bp, Glycine max
ctcttaaccctatctcaaattcattcagattctcccttccccttactgatttttcttagaaaactcccaacttcgaatcaatatgaagaaagtggtgctaaaggtggaactccatgatgacaaaatcaagaaaaaggccatgaaggcagtatctggtatttcaggggtagagtcagtctcagtggacatgaaggaccagaaaatgactataattggggatgttgatcctgtaacagtagttggaaagt

SEQ ID NO: 127085 - DNA, 247 bp, Glycine max
  unsure (1)..(247): unsure at all n locations
tttgaatcttattatatgtaacatttanaatatattcattttgaatcttattatatatataaaaagattcaaaatgaatatattttagttgttacatctaatatataaaaattgtacggatataaagattaaataagtaattaaatcaatatatataaaagtatatctaatgacactctagaagtaagaaaatgttaaacatatatatcttagccttaaccatatacaattctatatggttaaaact

SEQ ID NO: 127086 - DNA, 252 bp, Glycine max
ctgcgactctctttccttccctctttttccgaatctgaatcgaaatggcttcggagactgagacgtttgcttttcaggccgagatcaaccagctcctcagtctaatcatcaacaccttctacagcaacaaggagccctttcttcgtgagctcatcagccatgcctctgatgctttggacaagattcgatttgagagtcttacagacaagagcaagcttgatgctcagccagagttgttcattcacattattc

SEQ ID NO: 127087 - DNA, 250 bp, Glycine max
gtgagagtgagagagatggaggttggatttttgggtttggggataatgggcaaggctatggcaatcaatcttctacgccatggcttcaaagtcactgtttggaacagaaccctctccaagtgtgacgaactcgtgcaacatggtgcttcagttggagaaaccccagcaactgtagtcaagaaatgcaagtatacaattgcaatgttatctgatccttcggctgctttatcggttgtgtttgataatgatg

SEQ ID NO: 127088 - DNA, 248 bp, Glycine max
ctcgagccgtccggcttgttcagtctttcttggaactttgttactctcacacatgtctcgatccgtgcctttggtttcaaccatttttgtcttgcttctgcttctggtggccactgagatgatggggccaacaatggtggcagaagcaagaacttgtgagtctcagagccaccgtttcaaggggccatgtttgagtgacaccaactgtggctctgtttgccgaaccgaacgtttcactggaggacact

SEQ ID NO: 127089 - DNA, 247 bp, Glycine max
tattgatacccctggtcacgttgacttcaccttagaagtggagcgtgctcttagggtgttggatggagctatatgcttgtttgacagtgttgctggcgtggagccgcaatcggaaactgtgtggaggcaggctgataaatatggagtcccgcgaatttgttttgtcaataaaatggaccgtcttggagcaaacttttatagaacaagagacatgatagtaacgaatttgggtgctaaaccacttgta

SEQ ID NO: 127090 - DNA, 247 bp, Glycine max
atcatcaacaccttctactccaacaaggagattttccttcgtgaactcatcagcaacgcctccgatgctttggacaagattcgatttgagagtttgacagataagagcaagctcgatgctcagccagagttgttcattcatattattccagacaagactaacaatacactgaccattgttgacagtggtattggcatgaccaaagctgatttggtgaacaattgggtacaattgctagatctggtac

SEQ ID NO: 127091 - DNA, 248 bp, Glycine max
atccagagcaagacctacttggaagtgaaggggacaggaacagcaaaccagtgtccaacaattgatggtggattggagtcatttgccttcaagcaagggaaatacaatgccaagaagttctgccttgagccaacttcattcacagtgaaggcagagggtgtggccaagaacgctccccctgagttccaaaacacaaagctcatgacacgtttgacctacactcttgatgagattgagggaccctttga

SEQ ID NO: 127092 - DNA, 223 bp, Glycine max
ctcttgtcatgaagagtggaaaattcaccctcggttacaagacggttctcaaatcacttaggagctccaaagggaaattgattatcattgctaacaactgcccccctttgaggaaatcagagattgaatactatgctatgttggccaaggttggagttgatcattacaatgggaacaatgtggatttgggcactgcatgtggaaaatattacagagtgtgctg

SEQ ID NO: 127093 - DNA, 250 bp, Glycine max
cttcttcgtctcaaatctcttcgttccttcgattcgttccatttcctccaaaatggccaaagacccagttcgcgttctcgtcactggagctgcagggcaaattgggtatgctcttgtccctatgattgctaggggagtgatgttgggtcctgaccagcccgtgatcctccacatgcttgacattcctccggcagcagagtcattgaatggggttaaaatggaattggtggatgctgcattccctcttctt

SEQ ID NO: 127094 - DNA, 247 bp, Glycine max
ggaattttagaaactgctgattctgagaacttgcaggacagggctgtgattgaggatttaaatgcagataattcgtctgagtcaaaattgaacttgaaatgccctttatgtagaggtgcagtattgaactggaaggtggttgaagaggctagaaattatctgaacatgaagaagagaagttgctcaagggactcgtgctcattcgttggtgattatctggaattgcgtaggcacgcaaggagagttc

SEQ ID NO: 127095 - DNA, 246 bp, Glycine max
cggatctagagtcttcagtttctcctcgttgttcttcgctttcctgttttcaatttcgattctttcgttaatttaataagatgtttgggcaggcacgaagaagagcgataatacgaggtactacgaaatcctcggcgtctccaagaacgcttcgcaggatgatctgaagaaggcttacaagaaagccgccattaagaatcaccccgacaagggcggtgatcccgagaagtttaaagagctggcgca

SEQ ID NO: 127096 - DNA, 249 bp, Glycine max
cttcactctcagatcgctctttctgtcacacactcacattccggtgcaaaatgaaggtcatcgccgcctacttgctcgccgtattgggaggcaatgcagccccttccgctgatgacttaaggaccatccttggctccgttggagctgacgcgaatgatgacaacatcagcaacttcttgtctgaagttaagggcaaagacattgtggagcttatcgccgccggtagggaaaagttggcctccgtgcctt

SEQ ID NO: 127097 - DNA, 245 bp, Glycine max
cagagccaaggtaggttaaacaatcttcttcatcgtcgtcgccgcaatgggacgtgtgatccgtgcgcagcgtatagggagcaggctcggtcttcaagtcccacacgcaccaccgcaagggccctgcccgcttccggagcctggatttcggagagcgcaacggctacctgaagggtgtcgtcactgacgtcatccacgatcctggccgtggcgcgcctctcgctaaggtcgccttccgccacccg

SEQ ID NO: 127098 - DNA, 242 bp, Glycine max
ggtgatggttttcggagatatcacaaccaaggccaacgtggactatgagaagattgtgcgtgacacatgcaggaacattggttttgtctctgatgatgttggtcttgatgctgacaactgcaaggtcctcgtcaacattgagcaacagagtcctgatattgctcaaggtgtgcacggccacctcacaaagaggcctgaggagattggtgctggtgaccaaggtcatatgttcggctatgcca

SEQ ID NO: 127099 - DNA, 238 bp, Glycine max
attcagcaggcatacgcacaaccggtgaatttatcagcgtcttcattttatgtacccggtaacaattccattaggtacattaattatggtgctgcagtaagtgaggtggaaatagatcttctgactggagaaaccagatgtttgcagacagatattatctatgattgtggacagagtctcaacccagctgtggatttaggacagattgaaggatcttttatccaagggttgggttttt

SEQ ID NO: 127100 - DNA, 238 bp, Glycine max
gtgcaacagcttttcaagacttacaagaactccgttgggattgttgtgagcaccgaggatctcggtgcgcattggtactgtggaagggacaagaagatgatgctctctaactgtctctttcgctctggtggctgctccatgatgtttacaaacaaggcttctctcaagagccgtgcgatattgaagctcaagcacatggagaggactcagtatggtgctgatgacgaggcttacaact

SEQ ID NO: 127101 - DNA, 235 bp, Glycine max
ctcgagcgttcaggtactgcgtttcggaagcagacacagatggctcgtacgaagcaaagcgctcgtaagtccacaggaggaaaggctcctaggaagcagcttgcaaccaaggctgcacgtaagtctgcaccaactactggtggtgtgaagaagccccaccgttatcgtcctggtaccgttgctcttcgtgaaattaggaaataccagaagagtaccgagcttttgatccggaagc

SEQ ID NO: 127102 - DNA, 238 bp, Glycine max
cgagctccaagcttggtggaaagaacttgtagaggtgggtcatggggatttgaaggataagccatggtggcaaaagatgcaaactcgtgaagagttggttgaagcttccgctaccctcatatggattgcttcagctcttcatgctgctgttaactttggacagtatccatatggaggtttaatcctgaataggccaactattagcaggagattcatgcctgagaaagggtctcctgaa

SEQ ID NO: 127103 - DNA, 240 bp, Glycine max
caagtagttgagaactaagaaggagaagcaaatggcttcctcaatgatctcttccccagctgttaccactgtcaaccgtgccggtgccggcatggttgctccattcactggcctcaagtccatggctggcttccccaccagaaagaccaacaatgacattacctccattgctagcaacggtggaagagtgcaatgcatgcaggtgtggccaccagttggcaagaagaagtttgagactct

SEQ ID NO: 127104 - DNA, 236 bp, Glycine max
cgaggagccccatccaaagacagtaagttagtgcaacacgagaatgtcactgttacccctcatcttggagctagcaccaaagaggcacaggagggggtagctattgaaatagctgaggctgtgctaggagcattgaaaggggaactttcagcaactgctgtcaatgctcctatggttgctcctgaggtgttgtcagaattggccccatatgtggtgctggctgagaagctggggag

SEQ ID NO: 127105 - DNA, 235 bp, Glycine max
caattctagtaccttatcatggatggagaatcagtcatagaacacatcatcaaaaccatggccatgtcgaaaatgatgaatcttggcacccattgccagagaaaattttcaagagcttggataatgtaacacgcattttaagatttactctacctttcccattgcttgcatatcctatctacctgtggagcaggagtcccgggaagactggttctcactttaatccagacagtga

SEQ ID NO: 127106 - DNA, 233 bp, Glycine max
ctcttttaacaatccacacccaaattctagggttccgaaatggacgctggcggaaagatcaagaagggcgccggaggtagaaagggcggcggcccaacagaagaagccggtttcaaggtccgtcaaagccggtctccaattccccgtcggaagaattggccgttatctgaagaaaggcaggtacgctcagcgtgtcggtaccggtgctcccgtatacttggctgcagttctcg

SEQ ID NO: 127107 - DNA, 239 bp, Glycine max
ttgcaattgaagttgaagtcttgcccttctctcttcaactccaaacacaagacatcatcatccatggctgcctccgtctccactgtcggagctgtcaacagagctcttttgaacctgaatgggtctggacctggggtttcagctcccagttcatccttctttgggagcagcttgaagaaggttattggctcaagggtccccaacacaaagatttcctctggaagcttcaagattgttgc

SEQ ID NO: 127108 - DNA, 237 bp, Glycine max
tagaattgtacccagtgttggagtccatacaaaaatatctctggccccggctctgcaagctagaccaaagaacattgtatgagctgcattaccagctgattacatttggaaaggtcttctgtactaaaagcaagccaaattgcaatgcttgcccaatgagaggggaatgcagacactttgcaagtgcttttgcaagtgcaaggctcgccctgccaggatcagagcagaagagtatag

SEQ ID NO: 127109 - DNA, 237 bp, Glycine max
ctctttttcatcggttgggccgagggtagaaggtgggctgacatcatcaagccaggctgtgtcaacactgaccccatctttcccaacaacaagctcacaggaactgatgttgggtacccaggtgggctttggtttgacccacttggctggggaagtggttctcctgagaagatcaaggagttgagaacaaaggagatcaagaatgggaggttggccatgttggctgtgatgggggca

SEQ ID NO: 127110 - DNA, 236 bp, Glycine max
ctcgagcgattcggctcagcggctcgagagaacaagtagttgcgaactaagaaggagaacgcaaatggcttcctcaatgatctcttccacagctgttaccactgtcaaccgtgccggtgccggcatggttgctccattcactggcctcaagtccatggctggcttccccaccaggaagaccaacaatgacattacctccattgctagcaacggtggaagagtgcaatgcatgcagg

SEQ ID NO: 127111 - DNA, 237 bp, Glycine max
cttatctttctctcttctctctccccgcccaaaccctaactccctaccctattccgctttctctcatccatcatgaaaggaggaaagtccaagaccgaatctaagagagccgatgccaaacttgctgtgaataagaagggcgccgccaccaagactaggaaacccgccggaaaggggaaggcagcgaaagatcctaacaagccaaagaggcctccaagtgctttcttcgttttcatg

SEQ ID NO: 127112 - DNA, 236 bp, Glycine max
aaagggcacagaagagggtttcttttcgtttcgtttcaatggggagcgaagaggagaacggcgaattctacctgcgatactacgtcgggcacaagggcaagttcggtcacgagttcttggagttcgagttccgccccgacgggaagctccgctacgccaacaactccaactacaaaaacgacaccatcatccgcaaggaggtttacctcacccccgccgttctccgcgagtgccgt

SEQ ID NO: 127113 - DNA, 235 bp, Glycine max
cacaaactcagggtagggcagagagagagagagagagagagagagagagagagaatgggagggtgggctatcgcggtgcatggtggcgctggtgtcgaccctaatctcccactcgagcgccaagaagaagcgaaacaacttctcacgcgctgtctcaatcttggaatctctgctctaaattctaatcttcgcgacatagatgtcgtcgaacttgtggtgagggaattggacacgg

SEQ ID NO: 127114 - DNA, 265 bp, Glycine max
cgcatgtacgcgtacgcggcattcggctcgagcaagttgtggtgttgaagctaaatggaggcttgggaacaactatgggttgcactggtcctaaatctgtaattgaagttcgtgatgggttgacatttctagatttaattgtcatccaaattgagaatctcaattccaaatatggaagcaatgttcctttgcttttgatgaattcattcaacactcatgatgacactcaaaagattgttgaaaaataccaaaactcaaatattga

SEQ ID NO: 127115 - DNA, 235 bp, Glycine max
cttgaaattgttcaacaagaaatggagaattcattgggaaagtacggaaaagagcttaatctcgaggctacagagttgaggttggggttgcctggaagcgatgagcctgagaaacgttctgctgttagaagcaacaagagatcttcaccagaagcaagtgaagaagagtgcataagcaagggcaacatgaattcttctgatggttctgatatcacaagtgatgaccaagacaacg

SEQ ID NO: 127116 - DNA, 232 bp, Glycine max
aagaacttcatgaccctgcccaacatcaaggttcctctcattcttggtatctggggaggcaagggacaaggaaaatctttccaatgtgagcttgtctttgccaagatgggaatcaaccccatcatgatgagtgctggagagttggaaagtggaaatgcaggagagccagcaaaactgatcaggcagagataccgtgaagctgcagacatgatcaagaagggaaagatgtgcg

SEQ ID NO: 127117 - DNA, 235 bp, Glycine max
tgacaattttgaggaaagaggtggataataaagctgcagtccttggttttgtcggggcaccgttcactctggcatcatatgtggttgaaggtggttcatcaaaaaacttctcaaaaataaagagattggctttctcagaatccaagatcctgcactcgttactgcagaagtttacaacatcaatggcaagatacattcaataccaagctgacaatggagctcaagctgttcagat

SEQ ID NO: 127118 - DNA, 232 bp, Glycine max
tgacactgtgtccgcgtttactttcactgttgttgttggtcacattcacagtggcctcatctgtcaatgtcagctacgacggtcgctccctcattattgatgctcaacggaaacttcttatctctgcctccattcattacccacgcagcgttaccgcgatgttgcctggtcttgttcatacagccaaggaaggaagagtagatgtgattgaaacctatgttttctggactgg

SEQ ID NO: 127119 - DNA, 231 bp, Glycine max
caccaattggcaagaagaagttcgagactctttcctacttgccagacctcgatgatgcccaattggcaaaggaagtcgaataccttctaaggaaaggatggattccttgcttggaattcgagttggagcacggtttcgtgtaccgtgagcacaacaggtcacctggatactatgatggacgctactggaccatgtggaagctgcctatgtttggctgcactgatgcttctc

SEQ ID NO: 127120 - DNA, 231 bp, Glycine max
ctcgagccgaatcggctcgagcggctcgagatttggagtttggagcgactgaactaatcattaatttgcactcgctgtttcagcttcatcacccttcttttgcatcatttatatctcttgagaaatggcacaagaaacctttctattcacatctgaatctgtaaacgagggtcaccccgacatgctgtgcgaccagatctctgatgcagtacttgatgcgtgccttgaaca

SEQ ID NO: 127121 - DNA, 230 bp, Glycine max
gaaaaacaagtagttgagaactaagaagaaggaaatggcttcctcaatgatctcctccccagctgttaccaccgtcaaccgtgccggtgccggcatggttgctccattcaccggcctcaaatccatggctggcttccccacgaggaagaccaacaatgacattacctccattgctagcaacggtggaagagtacaatgcatgcaggtgtggccaccaattggcaagaaga

SEQ ID NO: 127122 - DNA, 233 bp, Glycine max
ggaaagagaagccacttccaatttcacacacacacagcaacacactgcactgtgtggaaagtaagcatggcaagagtggtggcactccaacagaaccaactatctttctctcccttagcttcctctctttttgacttcagtggaaccagacttcaaactcaacttcagttcaagagaaaactatgccatccaaaagggtctttctacgtctcggcatcgagcaccaagaaaat

SEQ ID NO: 127123 - DNA, 232 bp, Glycine max
cagaaccagaaccaaagggctccacttgacgtcaatgttgcttacgtggaagggcgggatgaggcggaaagaggagcttcaaatcaacctctgacacaggacttcttcatgtcctcggggaagcggaaacgtgatgaaattgcttctcaatataatgctggtggatatatacctcagcaagatggagctggagatgctgcttctcaaattttggaaattgaagtgtatggag

SEQ ID NO: 127124 - DNA, 229 bp, Glycine max
ctcgagccgcttgcagaatcaattttctctctcaatcgtctttcatggctcgtaccaagcaaaccgctcgcaaatccaccggtgggaaggctcctaggaagcaactcgccaccaaggctgcaagaaaatctgcacctaccaccggtggagtcaagaagcctcatcgctatcgtcctggaactgttgctcttcgtgagatccgaaaataccaaaagagcacagagcttct

SEQ ID NO: 127125 - DNA, 231 bp, Glycine max
catagcacaaagcacaaagcaaagctcatccttgagttaaaaaatggcagcagcttcttccatggctctctcatccccatccttggctggcaaggccgtgaagctgggcccatcagccccagaagtgggaagggtgagcatgaggaagaccgtcaccaagcaggtctcctcaggaagcccatggtacggcccagaccgagtcaagtacttgggcccattctctggcgagcc

SEQ ID NO: 127126 - DNA, 235 bp, Glycine max
cttaagaacacgaggaaatactacgggagtggaaaaacaaaggaagcaccatggagagaatcacagcttaaagggttgcacaattttctcgtggaaaaagaggaagaaattgtgacggccctcaagcatgatttggggaagcattacgtggaggcttttagagacgagcttggaacattaatgaagaccttaaacttggcaaccaagtctttgaaaaattggatggcggggaaag

SEQ ID NO: 127127 - DNA, 230 bp, Glycine max
cagaaaatcaatgtcaaaaagaggacaggctatggtacactaggggatgtcctagccaatatggttggcttgcattagttggcctagcactctacatcatattcttctcacctggcatgggaacagttccatgggttgttaactctgagatctatcctctaagatacagaggaatctgtggggggatggcatctacctcaaattgggtctctaatctcattgtggcccag

SEQ ID NO: 127128 - DNA, 231 bp, Glycine max
attctgcagtagaatcttcaagtggtaccaggagagaaagggatggaggtttagttccagtatggtctccaccagcttccagttactcagaacaatttgtaggagatgaaaatggtataacaagcagttcatcttacttgcaaaggcatcctcaatctcaccaaatgctgaattggaagcagctacctcaaactgggtaattcatatataaagcaattagactagatggag

SEQ ID NO: 127129 - DNA, 231 bp, Glycine max
gtttcccctgaactcagctgatgcagcatacacaaaactccgtggaatgctttctacccttggagatcctttcactcgaattatcagcccaaaggaataccaagggtttaaaattggaagtgatgggaacgtacaaggagtgggattgttcataaatgttgaaccaagaacaggacatttggttgtcttgtcatgtgtagatggcagtccagctgctcgtgctggtataca

SEQ ID NO: 127130 - DNA, 229 bp, Glycine max
ttcatcaactttacttgacaacaatattgtaaaactcaaaatctagtttcatactttttttcttcttcttgaaatggctctccaggctgcttctcttgttcctgcttctttctcggttcttaaagagggaaagagtggtgtgtctctcaaggactccaccttgttcggtctttcattttcagaacctatcaaagctaacttcagctcttctgcattgaggtgcaagagg

SEQ ID NO: 127131 - DNA, 229 bp, Glycine max
gttgttatgatacatagcattgattggtgccaccgaagctccaccgtatataatcaacgctaacgacactcgtgcctaaccattaaaacacacactctctctcaccaaattcttattagaacgaaaaaagaaaagaaaagaaaaaagagcgatttttccctcaccaaagaagaaccaaaacaatggcggatcaactcaccgatgaacagatctccgagttcaaggaagc

SEQ ID NO: 127132 - DNA, 228 bp, Glycine max
ggcggcgaaggaagcgggggtggagcgcgtggtggcgacttcgtcgatctcatccattatgccaagccctaactggccagctgataagattaaggcagaagagtgttggacagaccttgaatactgcaaacagaaggggttgtactatcccattgcaaagactctagcagagaaagcgggttgggaatttgcaaaggagacaggttttgatgttgtcatgataaaccc

SEQ ID NO: 127133 - DNA, 225 bp, Glycine max
ctcatgctaatattagtttggctcacagggaccttgggtataggcccaccactgatttggagactgggcttagaaagtttgtgaagtggtaccttgaattttactccaagaagagctcttggtgaatgttgatgtgattcttttgctttgctgcccctattcttttcgctctgcttgtaatttggaggatagaggttttaccgttgtgttaggggttacggatga

SEQ ID NO: 127134 - DNA, 230 bp, Glycine max
caagcctctactatactgcttcaccttctgctctagaaaattcagtgctgaaacatggcttcggctactctctctgtagccaaaccagcccttcaggcaaatgggaaaggcttctctgaattctctggcctccgaagctcatcaggcttccttcccttttctagaaaatcttcagaggatttccattctgtcattgccttccagacctatgcagttggaagcagtggagg

SEQ ID NO: 127135 - DNA, 231 bp, Glycine max
tttaggacctccagacatcaaggtctgtccagctgaggaaaatgttgaagccatatgtcagtttttcaacactattggtaagcagcttgatgaaagcccaaaatcacggcgcataaatgatatgtactttatccggttgaaagaattgagcaccaatccccaacttgcaccacggctgcggtttatggttcgtgatgttctagatttgcgttctaataactggattccaag

SEQ ID NO: 127136 - DNA, 228 bp, Glycine max
gtactgcaaaattggtggctaaatacaggccaggcatgccaattctttctgtggttgttcccgagcttaagaccgatacctttgactgggcatgcagtgatgaggcccctgcaagacatagccttatattccgcgggttggttcccgtattgagtgcagcttctgctagagcttctcatgctgaaacaactgaagaagcaatagaattcgccatgcaacatgccaagt

SEQ ID NO: 127137 - DNA, 229 bp, Glycine max
catctctgctcaagtcttcacttgttcttgacaagtctgagtgggtgaagggacaaacccttcgccaaccttctgcatcagttgtgagatgcaaccccaccaccccatcaggcctcaccatcagagctggttcctatgctgatgagctcgttaagaccgcgaaaacagtggcttcaccagggaggggtattttggccatggatgagtccaatgctacctgtgggaagcg

SEQ ID NO: 127138 - DNA, 228 bp, Glycine max
cctttgccgctgttgttgttgctgcaccaccgaacaacttcccctgtaaatcgcgtttcgtttgtgcaaggttttaaaagatggctgatgctgaggacattcaacctcttgttgttgataatggaactggaatggtcaaggctggttttgcaggtgatgatgctcctagggccgtgttccccagcattattgggagaccacgccatactggtgtaatggttgggatgg

SEQ ID NO: 127139 - DNA, 227 bp, Glycine max
ggcattctctcttctattctattctaaactcgaaacaatcttagagaaagaagcagaagaaaatgccgatttctagaattgccattggaaattcttcggagttgaaccaatctgatgcacttaaggctgcactagctgagttcatctcaatgctcatctttgtttttgccggggaaggctctggaatggcttataataagctgacaaacaatggttcagcaacacca

SEQ ID NO: 127140 - DNA, 230 bp, Glycine max
attcccttcacaagattctcacaaacaactcttgagaaagaaagaatggctgccaacacattgatgagttctgccatctcagccttcccatctctcctttcctcctcaaaatccagatttgccgcagcagttcctctttccagctttgttgtcaccaatgcctcttcttctcgcttttccatgagtgctgactggatgcctggccagcctagacccccctaccttgatgg

SEQ ID NO: 127141 - DNA, 226 bp, Glycine max
cctcttcattgagcttttcttcatcctttccagtatttggcttgggaggttctattatgtgtttggtttcctgttggtagttcttctattgctaattgttgtttgtgctgaagtgtctgtggtcctcacttatatgcatctctgtgtggaagactggcggtggtggtggaaggcattcttcgcatcaggttctgtggctctttacgtcttcttatactccattaac

SEQ ID NO: 127142 - DNA, 229 bp, Glycine max
gagagaggtgttggtgccctaatcgtgagaagaaaggaaagggaaaagaggaaaatggtgtgcataaggaaggcgacggtgaaggaccttctggcgatgcaggcgtgcaacctgttctgcctccctgagaactaccagatgaagtactacctctatcacatcctctcctggccccagctcctctacgtcgccgaagactacaacggccgcatcgtcggctacgtcctcg

SEQ ID NO: 127143 - DNA, 224 bp, Glycine max
gtatttttcaagtaacttaaggtttcaaacctaggaagttggaagtcatggcagcaacattgatggcagcaacaagttctggcactcttaaagcaactcctttcctaggccaaggcaagggtgccaatgccaatgctcttagggatgttgtttccatgggaactgggaagtacaccatgggcaatgatttgtggtatggaccagacagagtgaaatacttggga

SEQ ID NO: 127144 - DNA, 223 bp, Glycine max
ccaatatagcccaagccctatacaaccaaaccctaacacacacccatttgattcagtttccatggctagcctcaaggttgcatttttggctgcagtgctctgcatggttgtggtgagtgcacccatggcacatgcagctatcacgtgcgggcaggtgacgagtagcctggccaattgcatcggttacctccagaagggaggaacccgtcgtcgggatgctgca

SEQ ID NO: 127145 - DNA, 227 bp, Glycine max
ctgtaatttgtgtctgctcactcgctcttctccgccacttctgaatctattgaatcaacaatcatgtcggacgaagagcaccatttcgagtccaaggccgacgccggagcctccaaaacctaccctcagcaagccggtaccatccgcaagaacggctacatcgtcatcaaaggccgcccctgcaaggttgtggaagtttcgacttccaaaactggaaagcacggtca

SEQ ID NO: 127146 - DNA, 266 bp, Glycine max
gcaaagcaagctcagggggcaggtcaagaatgttaagaaattggaagctgaaatagtcgctttgaagatttcatatctcaagaaaatcaacaaaggcaccaatgttgtgatcttggactcgtactcggacgtagcaaaaacagttggaagaacgctaaccagccttggctttaagaacacatggattgttgctgatggttctctgggaacaaagggtggttgcagagtagattaggaacagattcgtataacttctcgtttgcaga

SEQ ID NO: 127147 - DNA, 250 bp, Glycine max
tgcaattgaagttgaagtcttgcccttctctcttcaactccaaacacaagacatcatcatccatggctgcctccgtctccactgtcggagctgtcaacagagctcttttgaacctgaatgggtctggacctggggtttcagctcccagttcatccttctttgggagcagcttgaagaaggttattggctcagggtccccaacacaaagatttcctctggaagcttcaagattgttgctgtagaagagaag

SEQ ID NO: 127148 - DNA, 255 bp, Glycine max
gtctgattcatggaaccatcactttggattccgcaaaattgaaagccatattgatgttgctactggtggaagattgttcaaagtcaatggagaaccaatttttatacgagggggtaactggatattgtctgatgggctactgcgactttcaaagaagcgatacgaaacagatatcaagtttcatgcggaatgaattttaacatgattcgatgctggggtggtggactcgctgaaaggcccgagttttatcgctgt

SEQ ID NO: 127149 - DNA, 252 bp, Glycine max
atggggctcagcactcatattgccaatctcttacacttacatagccatgatgggttctaaaggactcaccgatgcatcaaagatagccattttgaatgcaaactacatggcaaaacgattggagaattattacccggttcttttccgtggagtcaatggaacagttgctcatgaattcatcattgacttggaggctttaagaatactgctggaattgagcctgaagatgttgcaaagcgcctcatggactac

SEQ ID NO: 127150 - DNA, 255 bp, Glycine max
tgaaatctctgtatgaatagccatttaaggacatgattgaagggatgaggcttgatctgagaaagtcaagatacaatagctttgatgaactctacctttactgctactatgtagcagggacagtgggccttatgagtgttccagtaatggggatagcaccagaatcaaaggctacaacagagagcgtttatatgctgcattggcacttggcatagctaatcaacttaccaacattctcagagacgttggagaaga

SEQ ID NO: 127151 - DNA, 257 bp, Glycine max
gagctctacaaccgcaatgacatcaacaggatccttggccccaaggccaattgcatctccttcaaggactctgcatgccgttgctctggctacatggtctccaaaaagaagtacatctacaccattgatgatgactgctttgttgccactgatccatctggacacaagattaatgcacttaaacagcatatagaaacctcctctgtccatccacacccttttttttcaacacctctatgaactttccgagaggtgca

SEQ ID NO: 127152 - DNA, 250 bp, Glycine max
attcccttcacaagattctcacaaacaactcttgagaaagaaagaatggctgccaacacattgatgagttctgccatctcagccttcccatctctcctttcctcctcaaaatccagatttgccgcagcagttcctctttccagctttgttgtcaccaatgcctcttcttctcgcttttccatgagtgctactggatgcctggccagcctagacccccctaccttgatggttcagcacctggtgactttgg

SEQ ID NO: 127153 - DNA, 249 bp, Glycine max
ctgccactctctgagtaggactacactgccatggctgcctcagtctccactgttggagctgtcaacggagctccactgagcttgaacagctctggagctggagcttcagttcccagttcagccttctttggcaccagcttgaagaaggttattgcctcaagggtccctaacgtcaagatttcttctgaagtttcaaaatcgttgccgcggaaaaagagattgatgagaaacaacagacagacaaggaca

SEQ ID NO: 127154 - DNA, 252 bp, Glycine max
tgcatatagtatcttcctcttcgttctcacctttcgaaaacatggcttccctggcggcttccaccgcagctatgtcagaaatgcttggaaaccccgtgagcctgagaggcgccaccaggtctgctccatcaccgtctacacctgttactttcaagaccgttgcgcttttctccaagaagaaggcagaccacctcctccaaagaaaaagcctgctgctgtatcccccgccaatgaggaactcgccaagtggta

SEQ ID NO: 127155 - DNA, 239 bp, Glycine max
aagagtttatagctaaacaggtagtgttttacaaaagactgcacaaagtttattttgttcatgctattcccaagtctccatcaggaaagatattaaggaaagacctcagagcaaagctagaaaccgccgccactcagacgccttaaaggctagctagaacctgcccccttttttcttggcaatatttccttattttttatttatattattggtttcacacgtgtaatttacgtatcaat

SEQ ID NO: 127156 - DNA, 249 bp, Glycine max
gtcttagcaagaagccagaagatttttccatatatcaggcatttgaattgattcacgccagatgggcaatgcttggtgctgctggattcatcattcccgaggccttcaacaaatatggagcaaactgcggtcctgaggctgtttggttcaagactggagctctgcatcttgatgggggtaccttgaacacttcgggaaacccatccccatcaatcttattgtggctgtcattgctgagattgtacctgt

SEQ ID NO: 127157 - DNA, 254 bp, Glycine max
ttaccaagcatatctcatttgaatacattccttgtagtttatactgaaagatgggtttgaagatggcgttactgatcctaggcctttccctcatgctccttttggtctcctctgaggtggcatccacgaatacaaaagaggaggcaaatggagtggatgatgccaaatatcccggtggaagctatggaggggttacccaggtcatggcggtggcggttatcctggccatggcggtggcggttatcctggccatg

SEQ ID NO: 127158 - DNA, 253 bp, Glycine max
caaggcagaaagcaagctcatcctagagttttaaaaatggcagcagcctcctccatggctctctcttccccatccttggctggcaaggccgtgaagctgggcccatcagcccccgaagtcgggagggtcagcatgaggaagaccgtcaccaagcaggcctcctccggaagcccatggtacggcccagacgcgtcaagtacttgggcccattctctggcgagcccccgtcctacctcactggcgagttcccagg

SEQ ID NO: 127159 - DNA, 253 bp, Glycine max
gtctcagtgagagaaactctctctctagaaaccctattgcacgttttgcaatcgaactcgacaatggccaacagcaacctccctcgaagaatcatcaaggaaacgcagcgtttgctcagtgagccagcaccaggaattagtgcctccccttctgaagagaatatgcgatatttcaatgtgatgatccttggccaacccagtcgccttatgaaggaggagttttcaagttagaactatttttgccagaagaata

SEQ ID NO: 127160 - DNA, 248 bp, Glycine max
ggttaccctaataattttatactgctcaataactttggtgatgctaacggtcaaactaacagaaggaggaagaatggctataatcatgggaagcgaagagtgaatcataaaatggatatggagaagagagaagagatgattaggaggactgtttatgtgtcagacattgatcaactggttactgagagcagttggcggggctctttcttaactgtggccaggtcgttgattgccgtgtttgtggggat

SEQ ID NO: 127161 - DNA, 251 bp, Glycine max
gtttctattcctcactaggagctcctctccactggttcttcatctgcatgcacacagttgcatagttttggaaaccaagaattcctgaagaagggtagcatcaacaagcagttctgaaaatggagatcaccaatgtcagtgagtatgaggctattgcaaagcagaagttgccaaagatggcgtttgctactacgcatctggtgcagaggaccagtggactctgcaagagaacagaaatgccttttccagaa

SEQ ID NO: 127162 - DNA, 252 bp, Glycine max
gcttcgtcgcgcacaagatctcgcagacgctcgtctctctgggcgttcgctccgcgttcctctcgccggtggacgctctccacggcgacattggaatcctcaccaatcgcgatgtgctcatcctcctcagcaagtccggcgccaccgaggagctcctccgccttgtgccgtgtgcgagggccaaagcgcgctcctcatcgcgctcacctccgttgaaggcaacgcgctcgccgcggcgtgcgacatgtccgt

SEQ ID NO: 127163 - DNA, 243 bp, Glycine max
cacaagccaagtgaaagtgagaaaaaataaaaatcaaagagcataatgtcagggatcattcacaagattggggagacccttcatgtgggagggcacaagaaggaggaggagcataagggtgagcaccatgctggagaatacaaaggggagcaccatggtgaacacagtagtgagtacaaaggagagcatatggtgaacacaaagctggagagtaccatggtgagcacaagccagagcacaaag

SEQ ID NO: 127164 - DNA, 251 bp, Glycine max
tcaaaagccacgacaatggcagacattacccatctccctatggaacagcttcaggaccttgaatgctgcttagactctaatcctccttgggctgaagctatcctactagcatttcaaaattatatattgatgctgggaacaagtgtgatgattccatcatggattgttcatgccatgggaggaagtgcggtgacaaggcacgggtaatacagactctgctttttgtagctggcattaacacacttctccaa

SEQ ID NO: 127165 - DNA, 251 bp, Glycine max
ctcgagccgcctgcgtttgcaaccaaagaatgtgttttccctgccatcttcaacttcggtgactcaaactcagatactggtggcttggctgcttcccttatagcaccaacgccaccatatggagagacctattttcacagacctgcaggaagattctctgatggccgtctcgtcattgatttcaagcaaagagttttggtctcccttatctaagtgcgtatcttgattccctggggaccaacttctcacac

SEQ ID NO: 127166 - DNA, 245 bp, Glycine max
ctcgagccggaaaaacaagtagttgagaactaagaagaaggaaatggcttcctcaatgatctcctccccagctgttaccaccgtcaaccgtgccggtgccggcatggttgctccattcaccggcctcaaatccatggctggcttccccacgaggaagaccaacaatgacattacctccattgcagcaacggtggaagagtacaatgcatgcaggtgtggccaccaattggcaagaagaagttcga

SEQ ID NO: 127167 - DNA, 246 bp, Glycine max
gttgctgtagaagagaagaaagagattgaagagacccagcagaccgacaaggacagatggcagggtcttgcctatgatatctcagacgaccaacaggacatcacaagaggaaagggtttggttgactcccttttccaagctccacaggatgctggaactcactatgctgtcatgagctcctagagtaccttagcactggacttcgccagtacttggacaacaacatggatggattttacattgctc

SEQ ID NO: 127168 - DNA, 248 bp, Glycine max
gagccatttgggagttaggttctgcacgctctgcttccagcgagtgttctttcttcgtttcaacaccttaatttgcacacgctgcttcttcagcttgagaaatggcacaagaaacctttctattcacatctgaatctgtaaacgagggtcaccccgacaagctgtgcgaccagatctctgatgagtgctcgatgcgtgccttgaacaggaccctgacagcaaggttgcctgtgagacatgcaccaaga

SEQ ID NO: 127169 - DNA, 248 bp, Glycine max
cacaacattctcatcattcacccaacaaaatggctctgcttctgatagtagccatttcactggtaaccctctggctcggttacaccctataccagcggctacgcttcaagctccctcctggcccacggccctggccggtagtcggtaacctctacgacataaaacccgtccggttccggtgcttgctgagtgggcgcagtcttacggccctatcatatcggtctggttcggttcgaccctaaacgtca

SEQ ID NO: 127170 - DNA, 248 bp, Glycine max
ctcaagcaaccatggcaatggcaacccaagcctctctcttaaccccacccctctccggtctcaaagccagcgaccgcgcctccgtgccatggaagcaaaactccagcctctccttctccagcccgaagcccctcaagttctccagaacaatcagagcagcagccgccgacgagaccacagaggcccagcaaaagtagaggctgcaccggtcgggttcaccccaccagaacttgacccaaacacccctt

SEQ ID NO: 127171 - DNA, 249 bp, Glycine max
aaaatatctgttgctctctgctctgcttagggttccaacttccaacccaacacttatcgttctcatgcaacaagggaaaatgaggcctattttctgtggaaattttgaatatgatgcccggcagtcagagctggagcggctttttagacgatatgggaaggttgatagggtggatatgaagtctgttttgcttttatctatatggaagacgagagagatgctgaggctgctattcgtgctcttgatcga

SEQ ID NO: 127172 - DNA, 236 bp, Glycine max
cagcagtttgtttactcactgacaaattcatcatgccaccgattagcacctttgctggtttgtactttgttgctctcttctcctcaatcattgcaactggtattcttgagttgaaatggagtggagtgagcattgaggaatggtggagaaatgagcagttttgggtcattggtggtgtacagctcacctctttgctgttatacaaggtctgctaaaggttctggctggaattgaca

SEQ ID NO: 127173 - DNA, 245 bp, Glycine max
gaaaaacaagtagttgagaactaagaagaaggaaatggcttcctcaatgatctcctccccagctgttaccaccgtcaaccgtgccggtgccggcatggttgctccattcaccggcctcaaatccatggctggcttccccacgaggaagaccaacaatgacattacctccattgctagcaacgtggaagagtacaatgcatgcaggtgtggccaccaattggcaagaagaagttcgagactctttc

SEQ ID NO: 127174 - DNA, 248 bp, Glycine max
ctcgagccgaatcggctcgagggctctggtgtccccaaattcaagtccacaccaccaccttctctgcctctctctccccctcacatttctccttcttcctacttttctattcctcctggtttgagccctgctgagcttcttgactcacctgttctccttaactcttccaacattctgccatctcaacaactggagcatttgttgctcggagcttcaattggaagagcagttccggggggaaccagcga

SEQ ID NO: 127175 - DNA, 249 bp, Glycine max
  unsure (1)..(249): unsure at all n locations
ttacacaagaactctccaaggatcctccttcccacgaaattcatttggtgggaaaatccaagaagagggtggaatttcaagccagggaagatggattatttcaatgcaccaggaagaaaccatctctttgttccggggccggataacatcccggaccagatcattcgggccatgaacagaaacatgaggactaccgttctccagcaattccagctatgaccanaacactgcttgaggatgtcaagaaga

SEQ ID NO: 127176 - DNA, 242 bp, Glycine max
ggatccgatccggtgattctggcaaacgcttccgatgtcagccacttcggctacttccagcgttccagcgttaaggaattcatcgttttcgttggtcgtacagtcgccagtcgcactcctcagggccaacgccaatccgtacaacacgaagagtacaaggtgcacacatacaacaggaatgtctttgcgcgttgggatttatggatgatcattacccgattcggagtgcgttttctcttctc

SEQ ID NO: 127177 - DNA, 239 bp, Glycine max
cagcagcagagcttgtatacgtcgccgcttcagcgtagaacatgatcattcccgagaagaaccgtaaagagatctgcaaatacctcttccaagagggagtttgctttgcgaagaaggacttcaatctggcgaagacccggagattgatgtgccgaatctgcaggtgataaagctgatcagagcttcaaatccagagagtacgtgagggaaacatttgcgtggatgcactattactggtt

SEQ ID NO: 127178 - DNA, 246 bp, Glycine max
ttttgactttctcggtaagaaaaaggatgaagaagacaagcctcatcctcaggaggaggtcatcgccaccgagtttcaaaaagtcactgtctcagaccaaggagagaacaagcacagcctcttagaaaagcttcaccgatctgacagcagctctagctcttcaagtgaggaggaaggagagatggagagaaaaggaagaagaagaagaaggaaaagaaagggctgaaagagaagatcgaggagaaa

SEQ ID NO: 127179 - DNA, 229 bp, Glycine max
gaacaagtagttgagaactaagaaggagaagcaaatggcttcctcaatgatctcttccccagctgttaccactgtcaaccgtgccggtgccggcatggttgctccattcactggcctcaagtccatggctggcttccccaccagaaagaccaacaatgacattacctccattgctagcaaggtggaagagtgcaatgcatgcaggtgtggccaccagttggcaagaaga

SEQ ID NO: 127180 - DNA, 245 bp, Glycine max
gagattcgggataagactccaaattcttatattcttcagcaatttgaaaatcctgccaacccaaagatccattatgaaaacactggaccggagatctggaagggctctagtgggaaggttgatgctcttgtctctgggattgggactggaggtacaataacaggtgctggaaaatatctgaagatcagaaccctgatataaagctatatggcattgaaccagtagaaagtccaatactgtctgga

SEQ ID NO: 127181 - DNA, 255 bp, Glycine max
caaagttacaagtaaagtaaattaagaagatcattaatggcttctcttgcaaccttagctgctgttcaaccagctgcgctcaatggccttgctggaagttccctctctggaactaagctctctttcaagccctctcgccacactgtcaaatccaagaacttcaggagtgttgccctggtaccaaatattggggcaagagtgtgtactttgatttggaggatctgggcaacactacggggcagtgggacttgtatg

SEQ ID NO: 127182 - DNA, 254 bp, Glycine max
cgcagacgaggagcagcctcaggaggagaaggatgtctcacaggaagttcgagcacccaaggcacggttcactgggatttcttcccaggaagcgtgctgctcgtcacaggggaaaagtgaaggcattccccaaggatgacccatccaaggcacccaagctcactgcattcttgggttacaaggccggtatgactcacattgttagagaggtcgagaagccaggatcaaagcttcacaagaaggaaacttgtgag

SEQ ID NO: 127183 - DNA, 276 bp, Glycine max
ggcaatgttcattaatttgggagcactgatgtactccatcactgggtttgactccttctccttgcaaccaaatgctggtgctgctggagaatatgccggacttatggttattcgtgcatatcatttggcaaggggagaccaccaccgcaatgtttgcattatacctgtctcagcacatggtacaaatcctgctagtgctgctatgtgtggaatgaaaattgtctctgttggaactgacgccaagggtaacattaatatagaagaattgagaaaggc

SEQ ID NO: 127184 - DNA, 268 bp, Glycine max
tgatcttccgaggtgggtccagtcagttgttcgcgaagaatggaccgcggaggtttacgatgcggactcatgaggttccacaacatcgaggaggagatggttcaactgttgcaaatcactatggcttgtgtttcccttgtccacgatcagagacccaacatgcaggacgtggtccgtatgattgaggacattaaccggggcgagaccgatgatggcttcagacaatcctccgatgacccttccaaaggatccgagggtcatacaccac

SEQ ID NO: 127185 - DNA, 86 bp, Glycine max
gctcttcagccctataggctccaacaagcaatcgcagcaagcaacatagctttatcacccttgttgtttcaacaatcgccagccct

SEQ ID NO: 127186 - DNA, 273 bp, Glycine max
cttttgtgaaggcctaggattgctgagtcaaacttgaattgaagagtgaagaaggagatggcagcaacttcttccttgtgttcatcgaccctccaatcccaaatcaatggattctgccttcacaaaacctctctttcccatcctcgttccctcactttctccaggaagaaaatttcaaccacagtgaaggctacatctcgtgttgacaagttttcaaaaagcgatatcattgtttctccatccattctttctgcaaactttgcaaaattgggg

SEQ ID NO: 127187 - DNA, 273 bp, Glycine max
gttcgactgcaacccactcgagatgccattcaagttttcctaacagaggctgcaaagttggatgcactggctctatctcacgcccttgagctgaagcttcaatctccaatttggcaggttcgcatgaaagctgtttgtgtccttgaggccatccttagaaagaaggacgatgatcacttttcaccagtggaatcctacttcacggaaaataaagacgtggtgctcacctccctctgaatctccccaagcctctttaagggaaagggctatgaa

SEQ ID NO: 127188 - DNA, 275 bp, Glycine max
  unsure (1)..(275): unsure at all n locations
attttcagcattcaaaaacacaccaagcgaaggnagctagcaacgacctaacaccaatggctaccaagatattagccctccttgcgcttcttgcccttttagtgagcgcaacaaatgcgttcattattccacagtgctcacttgctcctagtgccattattccacagttcctcccaccagttacttcaatgggcttcgaacatccagccgtgcaagcctacaggctacaactagcgcttgcggcgagcgccttacaacaaccaattgcccaatta

SEQ ID NO: 127189 - DNA, 269 bp, Glycine max
gaggaaactccaccctcggtttactaactctcccttgttgtcacccatcgtagcaaaaaaagatgatgctggctctactggcagtcagtccttaagagcacttgcattaattggagctggtttgtcaggtcttttcagtttttcaacaatggcagcagctgatgaagctgaacatggcctctcatgtccaagctatccatggcctcacaagggaattcttagttcatatgatcacgcttcgattcgtcgtggtcatcaagtttatacag

SEQ ID NO: 127190 - DNA, 268 bp, Glycine max
cttattcttctgctttcactctctgactcaatcgttctaatccacaaaaaatgaccttaaattacaacattgccctcgccttctctgcggtgctcacgctgctcctctttcccctactgaccgtaggggagctcgtggaggagcagccactagtcctcaagtaccacaacggccagctcctgaagggccgcatcaccgtcaatctcatctggtacggcaccttcaccccgatccaacggtccataatcgtggacttcataaactcgtt

SEQ ID NO: 127191 - DNA, 93 bp, Glycine max
caacaagcaacatatatcgtggcatccagtagcaacaatagtgcaacaatggcgaccaagatattttccctccttatgctccttgctctttct

SEQ ID NO: 127192 - DNA, 264 bp, Glycine max
caactcttcaaaagggagaagaaaaggaaagaaaactctcaaaaaactattatagcaatggcagaacaaaaccaaaaccaaacaactgaagctggaaggcaccaagaggttggtcacaagagccttctccagagtgatgctctttaccagtatattctggagacaagtgtctacccaagagaacctgaatccatgaaagaactgagagagttgacagcaaaacacccatggaacatcatgacaacctctgcagacgaagggcag

SEQ ID NO: 127193 - DNA, 270 bp, Glycine max
ctcgagccggttactgtcatcaaccgaaccaaggaaactcttcagaatttatgtttggagatagcaaccatgggtgatctcaaacttgttgagcgtccacaaaactatacgcttgctccagaatcaagcaaacaaattaaagccaacattaaggtttcatcaactgaaacaggagttatatttggtaacatagtctatgagacatcttctaatgttcttgagagaacagttattgttctaaatgatatccatattgacatcatggactac

SEQ ID NO: 127194 - DNA, 275 bp, Glycine max
ctaagttatactatgaagcaccctttaaccacctcactttgttgacggtttgaatagaacaggtaagagcttgcagattacggtgggttaattacctccaccccgatctcaaacgagggaagctcacaccccaagaacaacacctcgtcatggaccttcattccaaatggggaaataggtttgagaaccatgcagaaattaaactataagctagctacctgctgatcatcactcatatttttaattactctttatcctacctatatatagtacta

SEQ ID NO: 127195 - DNA, 128 bp, Glycine max
cattcaaaaacacaccaagcgaaggcactagccacgacgcaatgccaatggctaccaagatattagccctccttgcgcttcttgcccttttagtgagcgcaacaaatgcgttcattagtccacagtgc

SEQ ID NO: 127196 - DNA, 259 bp, Glycine max
cctttggacacaccctctaaaccaatctatcaagtcctgaatctggtgagcaaatatggagctttgttggcaaacatccatccatggttcttgaagaagcatggagataaaggggtgtgagagggtcctcaccactcacactcctccacttaaaacagtttgttttggcttagctttggcttctctaatcaacaagggatgtgttctaacattctctcttgagtggcagaagcagatatgcattctccaaaggaggaga

SEQ ID NO: 127197 - DNA, 257 bp, Glycine max
gcagcaacaactactatcattcagccagctagctggtgtgagccctgctaccttcttgacacaaccacaattgttgccgttctaccagcacgctgcgcctaacgctggtaccctcttacaactgcaacaattgctgccattcaaccaacttgctttgacagacccaacagcattctagcaacaacccatcattggtcggtgacctctcttagatttcttgatgagtcatagtctcaataatagagtttcctgtctga

SEQ ID NO: 127198 - DNA, 264 bp, Glycine max
tcctcctgatccttctttagtaggagagtttgatccaagtaccttccaggtcataatgaatgatgatcttgaagagctgaaggaactgggttctggtacctttgggactgtgtatcatgggaaatggcgaggtacagatgttgccattaaaagaataaagaaaattagcttcactggtcgatcatctgagcaagagagactgactgtagaattctggcgggaggcagaaattctttccaagcttcatcatccaaatgtggtggc

SEQ ID NO: 127199 - DNA, 265 bp, Glycine max
cacaacattctcatcattcacccaacaaaatggctctgcttctgatagtagccatttcactggtaaccctctggctcggttacaccctataccagcggctacgcttcaagctccctcctggcccacggcactggccggtagtcggtaacctctacgacataaaacccgtccggttccggtgcttcgctgagtgggcgcagtcttacggccctatcatatcggtctggttcggttcgaccctaaacgtcatcgtttcaaactcgga

SEQ ID NO: 127200 - DNA, 261 bp, Glycine max
ctcgagccgttcttgttgttggaaagaaaccctagcaagcggaacaatggcagacgttgaggtcgatgtggcggctgcagcagcagcagggcagccgaagaagagaacgttcaagaagttcagtttcaggggcgtggatctcgatgcgcttctggacatgtccaccgatgaactcgtgaagatgttcagtgctcgcgcacgtagaaggttccagagaggcctcaccagaaagcccatggccttgatcaagaagcttcgcaa

SEQ ID NO: 127201 - DNA, 260 bp, Glycine max
ctcgagccgaatcggctcgagccgcctccactcccccctcccaggcgctgcccaggtaagtacgcggcggcgatgacaacgacgcttcaagaagaaccgcaagaagcgcggccacgtgtccgccgggcacgtccgcatcggcaagcacaggaagcacccgggaggtcgcggtaacgccggtggcatgcaccaccaccgtatcctcttcgagaagtaccatccgggctacttcggcaaggatggcatgcgttacttccata

SEQ ID NO: 127202 - DNA, 258 bp, Glycine max
gtcaatcccatgatctcaaaaaagaagattgcaaggaaacaagatcactggttgtttgctttggggaaatgttaatagactttgttccaacggtgggaggagtgtcactggctgaagcacccgctttcaagaaagctcctggtggtgcacctgccactgtggctgttggtatctctagactgggaggttcatctgctttcataggcaagatgaatttgggtacatgttgggtaacattttaaagcagaacaatgttga

SEQ ID NO: 127203 - DNA, 262 bp, Glycine max
tcgcgccgccgccgctgctgcaagcgccagcatcgccgtcgtccgaatagtacactctaacgccgccatggggcgtatgcacagccgcgggaagggtatctcgtcgtcggcgatgccgtacaagaggacgcctacctacctggctgaagaccgctgcctccgacgtggaggcgatgatcacaaaggcagcgaagaagggacagatgccgtcgcagatcggcgtcctgctccgtgacgagcacggtatcacccttgtcaagag

SEQ ID NO: 127204 - DNA, 261 bp, Glycine max
caaacctcttctcggcttcgcaatcgcgttcctcctcctcctacattcctctcttgcttccgacatcccctaccccaaagcaatttccgatttgaaggatacaattgtgaagggatttgggtttacggcggaagatgatgttaagattacggggttcgatccgagagacgccgaggtagggcattccgtggagtaccaattcgacctccaaatcgatcacaaggttattcccttcaagcttctcgaagatgtgaaagctgg

SEQ ID NO: 127205 - DNA, 264 bp, Glycine max
ggaatgacaatggacaaaagcagtttgtacatgatccatatgaactttatcgctcagacttctttcctggattaggatggatgctggccagatctacatgggatgagctatcaccaatcatggccaaaagcttactgggatgactggttgagacttaaagagaatcacaaaggacgacagtttatccggcccgaagtatgcagaacatataattttggtgagcatggttctagtttgggacattttttaagcaattcttgagcc

SEQ ID NO: 127206 - DNA, 258 bp, Glycine max
cgatcttcagtttttgtggccccaacacctgggatggcagttagccagatatggattcagagatcatctcttgcagctgatcatgtagctgctggcaattttgatactgcaataagattactgaacaggcaactcgggatacggaactttgcccccttgaaacccatgttcgcagatctacatactggcagtcattcctatctgcgtgccttttcatccgctccagttgtatcaattgctgttgaaagaggttggact

SEQ ID NO: 127207 - DNA, 256 bp, Glycine max
tgcaattgaagttgaagtcttgcccttctctcttcaactccaaacacaagacatcatcatccatggctgcctccgtctccactgtcggagctgtcaacagagctcttttgaacctgaatgggtctggacctggggtttcagctcccagttcatccttctttgggagcagcttgaagaaggttattggctcaagggtccccaacacaaagatttcctctggaagcttcaagattgttgctgtagaagagaagaaaga

SEQ ID NO: 127208 - DNA, 261 bp, Glycine max
atcaaaacaaaaactcacactttggtggccacagcaacaataacaatggcagcctcactacaagctgcagctaccttcatgcaacccaccaaggtgggcatggccactcgcaacctcaaatctacacaatgcatttctaaggcttttggcttggaacccgctgcagctaaactcatttgctcccttaagcccgatctcaaagattttgctcaaaaatgtgtcgacgccaccaaaattgcaggattcgcccttgccacctca

SEQ ID NO: 127209 - DNA, 255 bp, Glycine max
ctcgagccgacaatacttcctaggactagagaagggtcttggaggttctggtgagccagctaacccaggaggacctttcttcaacccacttggctttggtaaggatgagaagtccttgaaggatttgaagctcaaggaagtgaagaatggaaggttggctatgttggcaatcttgggttactttgttcaagctcttgtcacaggtgttggcccataccaaaacctcctagatcatttggctgaccccgtgcacaa

SEQ ID NO: 127210 - DNA, 125 bp, Glycine max
cagaaacacaccaagcgaagcacattagcaacaacctaacaacaatggctaccaagatattatccctccttgcgcttcttgcgctttttgcgagcgcaacaaatgcgttcattattccacaatgc

SEQ ID NO: 127211 - DNA, 278 bp, Glycine max
attgcaaccaaactggacaaatgttagctggattgctcaagtggccacaaggaacctttgcctccaaggttacattggacacaggtgaacaaaaagctactgatgagcgagaagttgatggtggaattgaaaccatctgccttgatctgccagcagtgatcaccacggatttaagacttaaccagccaagatatgcaactttgcccaacataatgaaggcaaaatccaaagttattaagaaagtcgccgctgaagaccttggcgtagatattagatca

SEQ ID NO: 127212 - DNA, 221 bp, Glycine max
ggcagctgctaccccccctgtcaagcaaggatcagacaggcctttgtggtttgcatcaaagcaaagtctttcttacttggatggcagccttccgggtgactatggatttgaccctctgggactttcagaccctgaaggaacaggagggttcattgagccgaaatggctagcatatggtgagataatcaatggtcgttatgacatgttgggtgcagttggtg

SEQ ID NO: 127213 - DNA, 237 bp, Glycine max
ctactcattccagatgacaacgagggtaagattttgagagtgaggttgatacagaaagaaggggttaagtactttagcccagtttacttatttgatgatggctctaccatttcatggataccatgtcgaaggaagtttacatgctcataccctggcatcaatttcttctatggaccagacacttactagggaaatgaggtgtcacttgtagaaatggctggacaatttgacagacta

SEQ ID NO: 127214 - DNA, 271 bp, Glycine max
tgcacttcacgcccagcccgacgtggcgacagctattcgtggcgcgattattctggcgaactgtctgttatccccgtgaggagggggtactgggggaacaagatcgggaagccccacaccgtcccgtgcaaggttacggggaagtgcggctccgttaccgttaggatggttcccgcgccgagaggttcggggatcgtggcggctagggttcccaagaaggtgctgcagttcgcggggattgatgatgttttcacctcctccagaggatcca

SEQ ID NO: 127215 - DNA, 244 bp, Glycine max
atgagtagcaacaatgtcgaagcgaggtcgcggaggatcggcgggaaacaagttccgcatgtcgctgggtctgccggtggcggcgacggtgaactgcgccgacaacaccggcgcgaagaacctctacatcatatcagtgaaggggatcaagggtaggctgaaccggttgccgtcagcttgcgtcggagacatggttatggccaccgtcaagaagggaaagcccgatctgcgtaagaaggtcctg

SEQ ID NO: 127216 - DNA, 255 bp, Glycine max
gtgcatcagtcacacgtgcagggttcacagttagagcacaacaacaacaagtgagtggtgaggtacaaagcagccgtagggcagtgctttcacttgttgctgctggtttggccactggctcttttgttcaagctgtgcttgctgatgccaaatctatcaaagttggaccacctcccccaccttctggtggattgcctggaacgttgaactcagatgaagcaagagaccttcagctgccattgaaagataggttct

SEQ ID NO: 127217 - DNA, 206 bp, Glycine max
gatcgccatttggaaagccggcaacatgcccgtgcagtatcgcaggataaagtgtaggaaggaaggagggatgcgatttacggttactggttctggaatcttcatctccgtgctgatcagcaatgtagctggccatggagacgtatagaggtgaaggttaaaagctcgaaactggtaggctttcattgggtcggaattggggacaa

SEQ ID NO: 127218 - DNA, 274 bp, Glycine max
gaattggggcaccaatacacgggataagggcgtttttgtccacaaatcagcttaatacttatgataaggctagaaatgctgtggctcttgcactcagtccagttgtcaaagctcttgttgatccagatggtgcactgagggacataaggaatttggatagtattagcttttcagactggtttttatccaaaggtggcacacgcatgagtattacaaaaatgtgggatccagttgcctatgcccttgggtttattgactgtgataatatcagtgc

SEQ ID NO: 127219 - DNA, 273 bp, Glycine max
tgatgatggagatggcgagcgaaacgctgtcgttgcggcactcgcggcgttggtgctactcgcggcgagtgtggcggtggatgctcaggagaactcggacgtgaagacgctggtgaagtacaagcacgggaagaagtactgcgacaaaggatgggaatgtaagggctggtcaatttactgttgtaacctcaccattaccgattatttccagacctaccagttcgagaatctgttctccaagcggaactcgccggtggcgcacgcggtcggatt

SEQ ID NO: 127220 - DNA, 271 bp, Glycine max
agcaatgtgtgaacccttaagtgttggtgttcatgcttgtaggagagctaatattggaccagaaacatatgtgttaatcatgggagcaggacctataggacttgttacaatgcttgcagctcgtgcttttggggcacccaggactgtcattgtggatgtagatgactatcgtttatctgttgcaaaatcacttggtgccgatgacattgttaaagtctcaacaaacattcaggatgtggctgaagaagttgtgcagatacagaaggttatg

SEQ ID NO: 127221 - DNA, 167 bp, Glycine max
tgaaaatgtcgcagttgttggaaaaggccaaaaactatgttgcggagaaagtcaccaacatgcccaagccagaggcgagtgtcaccgacgtggacttcaagcgcgtgagccgcgacaggttcgagtagttggccaaggtcaccgttcagagcccttattcaattcaa

SEQ ID NO: 127222 - DNA, 133 bp, Glycine max
attttgagcattcggaaacacacctagcgaacgcagctagcaacgacctaacagcgatggctaccaaggtgttatccctctttgcgcttcttgccctttttgtgagcgcaacaaatgcgatcattattccaca

SEQ ID NO: 127223 - DNA, 270 bp, Glycine max
ctcgagccgcgcctttctctctcttctttttactctctctctgtctctctctacgctttctcgttcgagatccctcaagggatccactaactgaaggagaaatggggttgacattcaccaagcttttcagccggcttttcgccaagaaggaaatgcgaattctgatggtgggtctcgatgcagctggtaagaccaccatcctgtacaagctcaaacttggagagatcgttaccacaattcccaccattgggttccatgtggagactgtgg

SEQ ID NO: 127224 - DNA, 265 bp, Glycine max
cgcacaataacgaagaaatagaaaaaaaaaatgttgcagcttctgtacgcggtgatattcggggaaatgttcgtgatcgggagcttcctcttcaaaactccggcgaggaagctggtcatcatcacattggatcgggtcaagcgcgctcgcggccccgtcgtcgtcaagaccgtcgccgccacgctgctggtggttctcgcttcctcgctctacagcatcgccaagatccggcgtcggaacctcgacgctcccgtcgttaacccca

SEQ ID NO: 127225 - DNA, 264 bp, Glycine max
gttttgagcagcaaaattcagagcgcactcggctacatggcgccagagtttgcctgcaagacggtgaaaatcaccgagaaatgcgatgtatatgggtttggtgtcttggtcttggagatcgtcacagggaagaggccagtcgaatacatggaggatgatgtggtggtactatgcgacatggtgagaggggctttggaagaaggcagggtggaggagtgcattgatgagaggctccaagggaagttcccagcagaagaagctatt

SEQ ID NO: 127226 - DNA, 268 bp, Glycine max
ataagccataggttactactcttcgccttttcctttgcaattgttaccaaacaattcttgcttagcccttacaagcaagcattaacaacaatgaagaaagtagtgttaaaggtgggcttacatgatgatagaatcaagcgaaaagttatgagaacagcatctggtctttcaggggttgaatcagtttctattgacatgaaagacgagaaaatgaccttattagggaacattgatccagtgaatgcagtgtgcaagctacgaaagtgtt

SEQ ID NO: 127227 - DNA, 265 bp, Glycine max
gtagttgagaactaagaagaaggaaatggcttcctcaatgatctcctccccagctgttaccaccgtcaaccgtgccggtgccggcatggttgctccattcaccggcctcaaatccatggctggcttccccacgaggaagaccaacaatgacattacctccattgctagcaacggtggaagagtacaatgcatgcaggagtggccaccaattggcaagaagaagttcgagactctttcctacttgccagacctcgatgatgcccaa

SEQ ID NO: 127228 - DNA, 169 bp, Glycine max
ccaagtttggaatcatcaatgcccctcaatggtatgatgctgggaaatcagagtactttgcatcttcctcaaccctcttcgtgatcgagttcatcttgttccactacgtcgagatccgaagatggcaggacatcaagaaccctggctgtgtcaaccaagaccccatctt

SEQ ID NO: 127229 - DNA, 264 bp, Glycine max
gtaagatgaaggtttggagatgggtggtgagtttgatgttagtggggttactgcccgtgtcaacaatgggtcgattcgtggtggagaagaacagcctgagagtgacatcgccggacaaaataagagggacacacgacagtgccattggcaacttcggaatacctcaatacggtggtagcatggccgggaacgtaatttaccctaaggataacaaaaagggttgcaaagagttcgatgagttcgggatttccttcaaatcaaccc

SEQ ID NO: 127230 - DNA, 270 bp, Glycine max
cctcccaacaccacctcgccgcgatctccgtagcctccgtcgcgtcgagcatcgatcatgtcggcctactgcggaaagtacaaggatgagctcatcaagaatgctgcctacattggcaccccaggcaagggtatccttgctgctgatgagtccactggcaccattggcaagcgcctttccagcatcaatgtcgacaacgttgaggagaaccgccgtgccctccgtgagctcctattctgctgccctggtgctctccagtacatcagcggt

SEQ ID NO: 127231 - DNA, 269 bp, Glycine max
aatgggggctgatgattttgagcccctgactatgatagggaagggtgcatttggagaggtcagagtctgccgagagaaagcaaccggtcatgtatatgctatgaagaaacttaagaaatcagagatgcttcgcagaggccaggttgaacatgtaaaagctgagaggaatctacttgcagaagttgatagcaattgcattgtaaagctttattattcctttcaagatgaagagtacttatatctcataatggagtatctacctggtggtg

SEQ ID NO: 127232 - DNA, 249 bp, Glycine max
atcacacctagcgaacgccctagcaacgacctagcaacaatggcttccaagacattatccctccttgcgcttcttgccctttttgtgagtgaaacgaatgcgttcattattccacaatgctcacttgctccgagtgccattattccacagttcctccgtccagttacttcaatgggcttcgagcacccagctgtgcaagcctataggctacaacaatcgcttgcggcgaccgtcttagaacaaccaatt

SEQ ID NO: 127233 - DNA, 264 bp, Glycine max
tgtgaacagtattgttcttgcgttgtttcggagggtcaattgtttggttgagcaaaaatctgaaattcaatttcagttgaaagcaaatggggaatcttttttgttgtgtgaaagttgatcaatctacggtggctatgagagaaggatttggacgatttgagaaggtacttcagccgggatgccattgcatgccatggttccttggaaaacaacttgctggtcatctctctcttcggctacagcaactggatcttcgttgtgaga

SEQ ID NO: 127234 - DNA, 264 bp, Glycine max
ctcttacacacacaagcactacaacattttctttggtctctcattttctctatagctagatgggttctggtgctttacaacttcttctgatcttgggtcttctggctagctcatgcttagcacaagccccaggtgctgcacccacacaaccacccattacaaccccatcaccaccaccaccaagatcagcacctgcaccagcacccaccccgccagcaacaccaccaccagcaacaccaccaccagcagcagcaactcctccac

SEQ ID NO: 127235 - DNA, 265 bp, Glycine max
ctcgagccgcacagctttagagtcttcactttgcaggaactgagagatgccaccaacggcttcaataggatgctcaagcttggagaagggggtttcgggagtgtctataaaggatccattacgcaacctgatggacaaggtggtgatccaattccagttgcaatcaaaaggctcaacactcgtggcttccagggtcataaagaatggcttgctgaagttcaatttctcggcattgttaatcacccaaatttggttaaacttttgg

SEQ ID NO: 127236 - DNA, 127 bp, Glycine max
agatactcgaatcgcaatgttgtatactgtgatctcaatatgacaggtttagatggcatccgaggaccattatatgtgggaactgggtgtgtcttcaggaggcaggcattttatggatgtgatgccc

SEQ ID NO: 127237 - DNA, 256 bp, Glycine max
attcggtcccaactggagaatgattttgtgcattctcttcaggccgaggttgcggaaggggaagatacggaggctattatacctttgccatagactcccgagaatcttgcttggcattcgaatttctcccgtaagcagctcaggaagaatcaaacacttgggaggtttcatgaattcttaaagctggaaaatgaaattggaaatattacaagacaggaagttgtcagcatggcacctcctctgttcttggatgtac

SEQ ID NO: 127238 - DNA, 261 bp, Glycine max
ggaactagcaccatacatagtgaagtacactagcgacatcttagcaccaatggcagctaagcatttttgccatccttgccctccttgctctttcagcaagcgttgctaccgcgactattattccacaatgctcacaacaatacctctctccggtgacagccgcgagatttgaatacccaactatactatcctacatgctacaagaggccatcgcagcaagcatcttacggtcgttagcattgaccgtccgacaaccatatg

SEQ ID NO: 127239 - DNA, 250 bp, Glycine max
gagccgaatcggtcaggaaaaaactccagggatgcgtatgagggcatgcaagtacggcctcggaggggaagctgaaaattatgttaacaaaataatctggaaccctaatgtatcagtgtcatcatcagtgtgtagtttaagctagacgttgctatggttacgttctttgagatgagagtcttgatgaacagtaccattctgatgtattgctttccttgaaagttaatgcatgcttcttatcttctgtcta

SEQ ID NO: 127240 - DNA, 260 bp, Glycine max
gttccccccggaccagcagcgtctgatcttcgccggcaaacagctggacgatggccgcaccctagcacactacaacatccaaaatgagagcaccctccaccttgtgctccgtctccgtggaggtcactaagtcatgggtcgtttaagctgccgatgtgcctgcgtcgtctggtgccctctctccatatggaggttgtcaaagtatctgctgttcgtgtcatgagtcgtgtcagtgttggtttaataatggaccggttgtg

SEQ ID NO: 127241 - DNA, 237 bp, Glycine max
gtttaaccaaatcatattaagccatggccacctccaacttctcaattgttctctctctctccctagccttctttctagtgctactcaccaaggcaaactcaaccaacaccgtttctttcaccgtcagcaagttttccccacgccaacaaaaccttatcttccaaggagatgctgctatctcaccctccggggtgttacgactcaccaaggttgacagcatcgacgtgcaaacgacgg

SEQ ID NO: 127242 - DNA, 257 bp, Glycine max
caagtactattgcacagtcattgatgcccctggacacagggatttcatcaagaacatgatcactgggacatcccaagctgactgtgctgttcttatcattgattccactactggtggttttgaagctggaatttcaaaggatggacagactcgtgaacatgctctgctttcattcacccttggtgtgaaacagatgatttgttgctgtaacaagatggatgctactacaccaaagtactccaaggccaggtatgatg

SEQ ID NO: 127243 - DNA, 186 bp, Glycine max
ggaaaatccaaggggttcgcgttcctcgcgtacgaggaccagagaagcacgattcttgctgttgacaatttgaatggagctaaagttcttgggaggatcataaaggttgaccatgtgagcaagtacaagaagaaggaagaggaagatgaggaggagctgcagaagaagagggagcccgtggagtct

SEQ ID NO: 127244 - DNA, 168 bp, Glycine max
ctcagtgaaagagaatccgaggcgaagagaagagacaaattaagatggaggggaaggagcaggatgtgtcgctgggagcgaacaagttcccggagagacagccgattgggacggcggcgcagagccaagacgacggcaaggactaccaggagccggcgccggcgccac

SEQ ID NO: 127245 - DNA, 257 bp, Glycine max
ctcgagccgattcggctcgagagttcaacgcctgtcattgatgggagacagtactacagttagactgtgttgacaaggacagctgatggagatgaaggtggcaagcaccagctgattgcagcaactgtgaaagatggcaaactatacatttgcaaggctcaagctggagacaagagatggtttaagggagcaagaagatttgtggagagcacagcaagttctttcagtggtgcctaagaacttatcagtggagtgct

SEQ ID NO: 127246 - DNA, 258 bp, Glycine max
gtcaacggacacaagtggctcctcgatgaccatggtcatgggagatgacatggtgaaggtcattgcttggtatgacaatgaatggggctactcccaaagggttgtggatttggctgacattgttgccaacaaatggaagtgagagccaaacaaattctcattggtaattaaattattatgtatgtaccatgccattgtaattttgtatgcttactactactactaccactacaacacttgttgcttcatttttctttt

SEQ ID NO: 127247 - DNA, 266 bp, Glycine max
tacaaaggtagctcattgccatgtgtaaaatcacctccttggagcataaagctaggaataattctatggaatgggtggagaatcaatttatggagagaagtttgctgatgagaacttcaagttaaagcatactggaccaggacttctatcaatggcaaatgctggtcctgacaccaatggctcacaatttttcattacaaccgtgacaactagctggttggacggaaggcatgttgtttttggtagagttctttctggattggatg

SEQ ID NO: 127248 - DNA, 260 bp, Glycine max
ccaccatcaaacaaagcctcatgccccaatgacacattaaagctaggtgcttgtgctgatctcttaggacttgttaacattattgttggaactcctccttcgagccagtgttgtgcattgatcaagggtttggcggatttggaactgcactttgcctatgcaccgcaattaagagcaatgtgcttggaatcaacttgaacgtacctgtgacgctcagcgtgatccttagtgcttgtcaaaagactgtccctcctggtttc

SEQ ID NO: 127249 - DNA, 257 bp, Glycine max
tctcgtacatccaattttctagggattttgacatttccgatggcatcttcagatgccgagtaccgttgctttgtcggtgggctcgcttgggccactgacgaccatgctctcgagagagccttctctccgtacggcgaatccgttgaaacgaagattatcaacgatcgtgagactggaagatccaggggttttggatttgtaaccttcgcctcggagcagtccatgaaagacgccatcgaagggatgaacggccaaaa

SEQ ID NO: 127250 - DNA, 258 bp, Glycine max
ctataaccgcatcgctatactcttcattctatggcttttcccaatcagcaaaccgtggattaccctagtttcaaactcgttatcgtcggtgatggtggcacaggaaagacaacctttgtgaaaaggcatctcaccggagaatacgagaagaaatatgagccaaccatcggtgtggaggttcacccattggattttttcacaaactgtggaaagattcgattctactgctgggatactgctggacaggagaagtttggt

SEQ ID NO: 127251 - DNA, 259 bp, Glycine max
catcttcttctcttttcacgtcattatcctaatcttgcagattttcacatcccatccaacatgaagggtaggttcatgtttctgtcggtgctcctttgtgccacctttcatgtctccttctccattactgacggcttagtagcaaacggcaacttcgagctgggtccgaagccctccgccctgaaaggaactgtggtgattggtggcagccactcgatcccagaatgggagatctctggcttcgtggagtacataaagt

SEQ ID NO: 127252 - DNA, 253 bp, Glycine max
ttcattcagaggcaacaaaggagttgccaattaagagcatggctgcacaagctcttgtatcatcatcatctcttaccttctcagccgagcatacaagacaaagtcttggaccaagatcactcgaatctccatttggcttctcaagaaaagtctcctttcttgttaaggcagctgctactccccctgtcaagcaaggatcagacagacctttgtggtttgcatcaaagcaaagtctttcctacttggatggcag

SEQ ID NO: 127253 - DNA, 258 bp, Glycine max
ctcgagccgcgagcagtgaataccagttgctcctatagccggcgctcatcaacatggtggacaaggcagtcaccatccgaaccagaaagttcatgacgaacaggcttctctccagaaagcaattcatcgttgatgtccttcatccagggagggctaatgtttccaaggctgaactgaaggagaaattgggcagaatgtatgacgtgaaagacactaacactgtatttgtcttcaagtttcgaactcattttggtggtg

SEQ ID NO: 127254 - DNA, 254 bp, Glycine max
accattgattccgaagagaaaagtaaagatgtttgagccacagcagctatacactcgcgcgaagaccgaggaattcgacctcgaatcaggagaaaccctccacccagggctgagcgtcggcgagaaccagctccgatggggtttcatccgcaaggtctacggcatcctctccgcgcagatcgtcctcaccaccctcgtctccgtcaccaccgttttctatactccaatcaatgacctcctcaagggcaattcca

SEQ ID NO: 127255 - DNA, 255 bp, Glycine max
tggaaatccaaagagcggatgggtttgttatccaaactggtacatactgaaggtctgctgagggttttattgatccaagtacagagaaaatcaggacaataacattagaaattacggtgaatggagaaaaggcacctgtttatggatcaactcaaagaggagcttggtctatacaaggctcaaacaaagcttccgtttaatgctttcggtacaatggcaatggcaagagatgaatttgcaggacatcctgcctct

SEQ ID NO: 127256 - DNA, 249 bp, Glycine max
ctgcaacaggagggatgacttggaatctcttgcatatacactgataaatcttcttcgaggtcgccttccttggcagggtttccagggggaaaacaaaggatttctggtttgtaagaagaaaatgggaacatctcccgagaccctatgctgctttagtcccctaccttttaagcagtttgttgaacatgttgtaaacaacaagtctgatgaagagcctaactatgcaaaataatttctctatttgatggg

SEQ ID NO: 127257 - DNA, 256 bp, Glycine max
tcttacaatctcagctcatagcattcttcttcttccaacgagaatcagtctttgtgttccaaatggctcgtacgaagcaaacagcaacaaagtccaccggaggaaaagctccaaggaagcagctcgccaccacggcagcacgcaagtccgctccggcgacgggcggcgtgaagaagccccaccgtctctagccggggacagtggctctgagggagattcggaagtaccagaagagcacggagcttctcataaggaa

SEQ ID NO: 127258 - DNA, 250 bp, Glycine max
tgcccaagcaccttgatgagaaggtggctgcacttcacctgggcatacttggtgctaagctgacccagcttagcaagtcccaggctgattacatcagtgtgcctgttgagggtccatacaagcctgctcactacaggtactaagtgattgagatgatcaactgaaaagtgagtgagggaaagacaaaaatcggttttatcaatcggatttgattgtttaattttcctttttttgatttttggtgttagac

SEQ ID NO: 127259 - DNA, 170 bp, Glycine max
cttgggagtggtatgtcaaacaagatgtgggaggctcttttagaccatgcaaaaacatgtgttctaagtgggaagctctatgtttattatccagaagatgcaagatatgttggcgttatttttaacaacatctatgagctgcgtggccttatatcaggagaccaatcctg

SEQ ID NO: 127260 - DNA, 257 bp, Glycine max
gttgaagtcttgcccttctctcttcaactccaaacacaagacatcatcatccatggctgcctccgtctccactgtcggagctgtcaacagagctcttttgaacctgaatgggtctggacctggggtttcagctcccagttcatccttctttgggagcagcttgaagaaggttattggctcaagggtcgccaacacaaagatttcctctggaagcttcaagattgttgctgtagaagagaagatagagattgaagaga

SEQ ID NO: 127261 - DNA, 257 bp, Glycine max
atgaatggaggcaagctataactgctgctggatctggatgcgttgcagctttatcagttgagagatatcttgtgagcaatgatcttcttatagagttccatcagcccaaaactgaagaggttaagaaggaactaacagacagggatgtacacgagggctttgacattacacttacaaagcataaggggcagtatgctcttcgaaaattgtatcatgacagtccaaggcttatatgcgtattatatacatcaccaaca

SEQ ID NO: 127262 - DNA, 258 bp, Glycine max
catccatagacatggccaccgtcacttctgcagccgttgctattccctcattcactggcctcaaggcaagcgcaggcaaagtgagtgccgcagttaaagtctcagctccccaagccacaaggttgggcatcaaggcttcgctgaaagacgttggagtcgctgttgtggccactgccgcgagtgcagtgctggctagcaacgccatggccattgaagtgttgctgggtggtgatgacgggtctctggctttcgttccca

SEQ ID NO: 127263 - DNA, 256 bp, Glycine max
gaaaaacaagtagttgagaactaagaagaaggaaatggcttcctcaatgatctcctccccagctgttaccaccgtcaaccgtgccggtgccggcatggttgctccattcaccggcctcaaatccatggctggcttccccacgaggaagaccaacaatgacattacctccattgctagcaacggtggaagagtacaatgcatgcaggtgtgtccaccaattggcaataagaagttcgagactctttcctacttgcca

SEQ ID NO: 127264 - DNA, 258 bp, Glycine max
cctacaacaccatcatcaaggcgttttgcgaaaagggttcgtttgattccgcattatcagtgtttcaagagattgaggagaagggtttgagccctgattccatcacgttcaacactttgcttgatgggttgtattcaaagggtcgttttgaggagggtgagaaagtgtgggagcaaatgggtgtgaagaatgttgctcctggtgtgaggagttactgctccaagttggtggggttggctgaggtgaagaaaatgggtg

SEQ ID NO: 127265 - DNA, 257 bp, Glycine max
cacagatgatgacgcctaacatgatgtcaccattgacgatgccgagcatcttgtcaccaatggtcttgccgagcatgatgtcgcaaatgatgatgacacaatgtcactgcgacgccgtctcgcagattatgctgcaacagcagttaccattcatgttcaacccaatggccatgacgattccacccatgttcttacagcaaccctttgttggtgctgcattctagatagaaatatttgtgttgtatcgaataatgagt

SEQ ID NO: 127266 - DNA, 262 bp, Glycine max
accatcactgctcatggctgatgcatggacaaaaccatactccagggaatatgcagccttcccagctccttggctccgtactgcaaagttctggcctaccacaggacgtgttgataatgtgtacggtgaccgcaacctcatttgcacccttctcccagcatcacaggctgttgaagaacaagcagctgccacagcataatgtgttcaaatgacagctattttcatttcccgttgtacataaactcttattcctattcataca

SEQ ID NO: 127267 - DNA, 256 bp, Glycine max
caagatatcagagcttggtttcacagtctacccctctcctcaggtgtccacctctgttgttgatccatacaacagtgtcctctccacccattctctcttggagcacaccgatgttgctgtcctcttggacaatgaagccatttatgacatctgcagacgctctctcgacattgagcgtcccacctacaccaacctcaaccgccttgtttctcaggtgatttcatctttgactgcttccttgaggtttgatggtgcc

SEQ ID NO: 127268 - DNA, 255 bp, Glycine max
gaagaacaagtagttgagaactaagaaggagaagcaaatggcttcctcaatgatctcttccccagctgttaccactgtcaaccgtgccggtgccggcatggttgctccattcactggcctcaagtccatggctggcttccccaccaggaagaccaacaatgacattacctccattgctagcaacggtggaagacggcaatgcatgcaggtgtggccaccagttggcaagaagaagtttgagactctttcctacct

SEQ ID NO: 127269 - DNA, 254 bp, Glycine max
acacaaagcacaaagcaaagctcatccttgagttataaaatggcagcagcttcttccatggctctctcatccccatccttggctggcaaggccgtgaagctgggcccatcagccccagaagtgggaagggtgagcatgaggaagaccgtcaccaagcaggtctcctcaggaagcccatggtacggcccagaccgagtcaagtacttgggcccattctctggcgagcccccgtcctacctaaccggtgagttcca

SEQ ID NO: 127270 - DNA, 254 bp, Glycine max
agaaggtgcaattattgaagacacgttattaatgggggcagattattacgagacggaggctgataagaggtttctggctgccaaaggcagtgttccaattggtataggcaggaactctcatatcaaaagggcaattattgacaagaatgctcgaattggggaaaatgtcaagattattaacagtgacaatgtccaagaagctgcaagggaaacagatgggtatttcataaaaagtgggattgtcacagtaatca

SEQ ID NO: 127271 - DNA, 252 bp, Glycine max
cttcacttcacatctctctatcttctcaatcttcatctccaacaagtgtttctgtaaccatggcatccaccactctatcccctacaaccccttctcagctatgctcaggaaagagtgggattttcagtccctcacaggcacttcttgtgaagccagtgaagaggcagatgatggggaagagcaagggaatgagaattgcatgccaagccaccagcattcctgctgatagagtccctgacatgggcaaaagac

SEQ ID NO: 127272 - DNA, 258 bp, Glycine max
agctcgaggatactccagttacatagtagtccatgagaggtactgcttcacgataccaaaatcctatgcattggcttcagcagctcctttgctttgtgctggaattacagtttattcaccgatggtgcgccacaagatgaatcaacctggtaaatctcttggagtgattggtcttggtggcctcggtcatatggcagtgaaatttggaaaggcatttggtttgagtgtgacagttttcagcactagcatatccaagaa

SEQ ID NO: 127273 - DNA, 261 bp, Glycine max
cttcacaagattctcacaaacaactcttgagaaagaaagaatggctgccaacacattgatgagttctgccatctcagccttcccatctctcctttcctcctcaaaatccagatttgccgcagcagttcctctttccagctttgttgtcaccaatgcctcttcttctcgcttttccatgagtgctgattggatgcctggccagcctagacccccctaccttgatggttcagcacctggtgactttggattcgaccctcttcg

SEQ ID NO: 127274 - DNA, 257 bp, Glycine max
aacactcataacacaaagcacaaagcaaagctcatccttgagttaaaaaatggcagcagcttcttccatggctctctcatccccatccttggctggcaaggccgtgaagctgggcccatcagccccagaagtgggaagggtgagcatgaggaagaccgtcaccaagcaggtctcctcaggaagcccatggtacggcccagaccgagtcaagtacttgggcccattctctggcgagccccgtcctacctaaccggtga

SEQ ID NO: 127275 - DNA, 254 bp, Glycine max
cttactctagactcttccttttctcttctctgtctaaggggtgctctgagatcacattgaacaatggtgaaggctgtggccgttcttggcagcagtgagggtgtcactggaactattcacttcgttcaggagggaagtggtccaaccaccgtaactggatctcttgctggtcttaagcctggtctccatggtttccatgtccatgccttgggggacactaccaatggttgcctctcaactggatcacatttcaa

SEQ ID NO: 127276 - DNA, 253 bp, Glycine max
gcagcaacaactactaccattcagccagctagctggtgtgagccctgctaccttcttgatacaaccacagttgttgccgttctaccagcacgctgcgcctaacgctggcaccctcttacaactgcaacaattgctgccattcaaccaacttgctttgacaaacccagcagcgttctaccaacaacccatcattggtggtgccctcttttagatttcttatgagttatagttcaataataaagttttttgtctg

SEQ ID NO: 127277 - DNA, 254 bp, Glycine max
gaaaaaggagagagcagcaattggaggacgatcgatgggcactacagtgtgcgcagttgctgagcctgacagacctctatggttcccaggcagcacccctcctccatggcttgatggcactctacctggagacttcggctttgaccctcttggtcttggatctgacccggagagtctgagatggaatgttcaggcagagctagtgcactgcagatgggcaatgttgggtgctgctggcattttcattccagaat

SEQ ID NO: 127278 - DNA, 258 bp, Glycine max
cgctacaacgacaacaacagcgtctgccatcactgaggcacccagccgtcgtgcaccctgccacgctcttgctacagcagctgcttgcatccaacccacttgctctggcgaacgtagctgcataccagcaacaacaacagctgcaacagttctatgccacggctcagtcaactagccatggtgaaccctgccgtctacctacaactactttcatctagcccgctcgcggtgggcaatgcacctacgtacctacaacaa

SEQ ID NO: 127279 - DNA, 250 bp, Glycine max
gaagcctcagacaggatcaaagctggtttcattcacttcaagaaggagaaatacgacaagaatccagctttgtatggtgaacttgccaaaggccagagccccaagttcatggtgtttgcttgctcagactcaagggtgtgcccatctcatgtgctagatttccaaccaggagaggcctttgtggtcagaaatgttgccaacattgtcccaccatatgaccagtcaaaatacgctggaactggggctgcag

SEQ ID NO: 127280 - DNA, 249 bp, Glycine max
ctgactataggtttgatctagccatacagcttggaagattagaggttgctaagggtattgcttctgaagtgcagagtgagtccaaatggaagcaattgggagaattagccatgtctactggaaagttagaaatggctgaagagtgtttaaaacacgcaacagatttgagtgggttattgctgctatattcttctttaggagatgctgaaggaatatcaaaacttgcaactcttgctaaagagcaaggga

SEQ ID NO: 127281 - DNA, 248 bp, Glycine max
gttgggtgtgttcagcagctccatagtgtcgccgccggacgagctcgtggccgccggcagccgtactccgtcgccgaagatgacggcggcggcgctgcggaagcggttcgaggagaagaacccctccgccgtgtcggtggaggtcggagagcatgtccagctcgcttatacccaccacaacgagtcgccgtttcagcccagatcctttgctgtcaaggatgaggtgttctgcttgtttgagggagccc

SEQ ID NO: 127282 - DNA, 249 bp, Glycine max
cctttggacacaccctctaaaccaatctatcaagtcctgaatctggtgagcaaatatggagctttgttggcaaacatccatccttggttcttgaagaagcatggagataaaggggtgtgagagggtcctcaccactcacactcctccacttaaaacagtttgttttggcttagctttggcttctctattcaacaagggatgtgttctaacattctctcttgagtggcagaagcagatatgcattctcca

SEQ ID NO: 127283 - DNA, 248 bp, Glycine max
cttacggcgagcgtcttagaacaaccaattgcccaattacaacaacaatccttagcacatctaaccatacaaaccatcgcaacgcagcagcaacaagcactgagccacctagccgtggtgaaccctatcgcctacttgcgacaacagctgcttgcatccaacccacttgctttggcaaacgtagctgcataccaacaacaacaacagttgctacagtttctgccagcgctcagtcaactagccatggc

SEQ ID NO: 127284 - DNA, 252 bp, Glycine max
  unsure (1)..(252): unsure at all n locations
gaagactatggcttgaaagagtatacaaagcttgaggatanggttccttcctcttcttctctgtcagtgcaaatggattggattatggaactgttagaaagcaatttggaagcaaagtccaggatttacaagnaccctgctttgcgctatgttttcttgatgaataatgggaggtacattgttcagaagaccaaagatagtgaattgggaacccttttgggagatgattggatcagaaaacacgctgcaaaa

SEQ ID NO: 127285 - DNA, 248 bp, Glycine max
gttgaagtcttgcccttctctcttcaactccaaacacaagacatcatcatccatggctgcctccgtctccactgtcggagctgtcaacagagctcttttgaacctgaatgggtctggacctggggtttcagctcccagttcatccttctttgggagcagcttgaagaaggttattggctcaagggtcaccaacacaaagatttcctctggaagcttcaagattgttgctgtagaagagaagaaagaga

SEQ ID NO: 127286 - DNA, 248 bp, Glycine max
aggaagagaatccccgtgtgcccatcatcgtcaccggtaacgatttctccacactctatgcgcctctcatccgtgatgggcgtatggggaagttctactgggcaccaacaagggatgaccgcattggtgtctgcactggaatttttcgcaccgattcaattcctgaacaggacgttgtcaagattgttgacaccttccctggccaatccattgatttctttggtgcactgagggccagagtatatgat

SEQ ID NO: 127287 - DNA, 247 bp, Glycine max
  unsure (1)..(247): unsure at all n locations
gcaacactgcactgtgtggaaacgaaacatggcaagagtggtggcactccaacagaaccaactatctttctctaccttagcttcctctctttctgacttcagtggaaccagacttcaaactcaacttcagttcaagagaaagcaatgccatccaaaagggtctttctacgtctccgcatcgagcattttgtnnatcctaataatgggaggcaccaggtttattggtgtgtttttgtctaggctcctt

SEQ ID NO: 127288 - DNA, 246 bp, Glycine max
gacagaagcaaaactgaaggttgccataaacggatttggaaggattggaaggaacttcttgaggtgctggcacggtcgcaaagactcccctcttgatgtcattgccatcaacgacaccggtggcgtgaaacaagcctctcaccttctcaagtacgattcgatcctcggaaccttcgatgctgatgtcaagcctgttggcagcgacatcatctctgtcgatggaaaggaaatcaaagttgtctctga

SEQ ID NO: 127289 - DNA, 249 bp, Glycine max
atgctctatccgaggcagagaagcgagaagagaatctgaggaaggccttgggtgttgagaaagagtgtgtgcttgatcttgagaaggctctgcgagaaatgcggtcagagcatgccaaaattaaatttacagcggactcaaagttggctgaagcaaatgctttagtagctagcatcgaagagaagtctttagaagtagaagccaaattacgttctgctgatgccaaatttgcagaaatcagcagaaaga

SEQ ID NO: 127290 - DNA, 247 bp, Glycine max
gagaaatagcattgaagcagcatcaaatttcgtgagccgaaatcggttgcctccaaggttaaaagagcagatcttggcttatatgtgcttaagatttaaggcagagaacttgaatcagcatcagcttattgaacagcttccgaaatcgatttgcaaaagcatctgccagcatttgtgttttgcaactgtagagaaagtctatcttttcaaagacgtctcaaaagaaattcttttgtccctggttgca

SEQ ID NO: 127291 - DNA, 249 bp, Glycine max
accccttgctaccaacactgagcttaaccgagcttcgcaaagatgaatcgggaaaagttaatgaagatggccggttcggttagaactggaggaaagggtactgtgagaagaaagaagaaggctgtccacaagacaacaaccacagatgacaaaaggcttcagagcaccctgaagagaataggggtgaatgccatccctgctattgaagaggtcaatatctttaaggatgacgtagttatccagtttcta

SEQ ID NO: 127292 - DNA, 253 bp, Glycine max
cttccggagcctggatttcggagagcgcaacggctacctgaagggtgtcgtcactgacgtcatccacgatcctggccgtggcgcgcctctcgctaaggtcgccttccgccacccgttccgctacaagaagcagaacgagctcttcatcgccgccgagggtctctacaccggccagttcatctactgcggcaagaaggccaccctcgttgtcggcaatgtgttgcctcttcgatccattcctgaaggagctgtc

SEQ ID NO: 127293 - DNA, 247 bp, Glycine max
caaaataaaaagacttcctttttggcaattgtcatttgtcaccaaacaattgttgttagctctcacaagcaagcttcagcaacgacaatgaagaaagtagtcttacagttggacttacatggtgatagaatcaagcaaaaagctatgaaaacagcatctggcctttcaggggttgaatcagtttctgttgatatgaaagacatgaaaatgatcgtgttgggggacattgatccagtgagtgcagtgt

SEQ ID NO: 127294 - DNA, 246 bp, Glycine max
caaaaaggaggggtgacaaagaagttcacatggtgacagaagagaaaccaggctggtgtagtgatccacatttgcctccttgtgctgcatttgtggaaattatggcacctgtcttttctcgtgaggcttggcgttgtgtgtggcacatgattcagaacgatctagtgcatggatggggattggactttgctctcagaagatgtgtagagccagcacatgaaaaaattggtgtaattgattcacaat

SEQ ID NO: 127295 - DNA, 245 bp, Glycine max
gcaaagagtcgtctccatttttttgaaatggatcttcttgacatcgactccattgccgctgccataaagggttgctccggcgtaatccacctcgcatgtcctaatatcatcggtcatgtcgaagatcctgagaagcagatactggagccggcgataaaaggaacagttaatgtgttgaaggcggcgaaggaagcgggggtggagcgcgtggtggcgacttcgtcgatctcatccattatgccaag

SEQ ID NO: 127296 - DNA, 245 bp, Glycine max
ctgcctcagcagcactaaatagtgaattctttaccacagagccctatgcttgtgaaccatcaagtttgccaaagtatcctcccagcaaagaattggatgtaaaactgagagatgaggaagcaagaaggcaaaaggctttaaatgggaaagctagtgcagttgatggtgccaaaaaagtcagagtacgtgagcgtggcagggctgttccggcccctgaagccaatgcagagatccaaacaaactta

SEQ ID NO: 127297 - DNA, 243 bp, Glycine max
ccaaaacctggttcttctgttgccatttttggacttggagctgttggccttgctgctgctgaaggggcaaggatttctggtgcatcaagaattattggggttgatttagtttctagcagatttgaagaagctaagaagtttggggtcaatgaatttgtgaacccaaaagaccatgacaagcctgtacaagaggtgattgctgcaatgacgaatgggggtgtggatcgtgctgttgaatgtact

SEQ ID NO: 127298 - DNA, 249 bp, Glycine max
tggaaacactatcactgttgcttttgatgaaacaaccacattagaggatgttgataatcttgtcaaagtttgtgctggtggaaagcccgtctccttcacagctgcatctcttgcaccagaagttcagagtgcgattccttctggattagttaggaagagcccttatctgacgcaccctatctttaacacgtaccaaactgagcatgagttgcttaggtacttgtataggctacaatcaaaagatctctc

SEQ ID NO: 127299 - DNA, 251 bp, Glycine max
aatcccacgcgaggagaacgttggaagggaaggagcaggatgtgtcgttgggagcgatcaagttccccgagagacagctaattgggacggcggcgcagagccaagacgacggcaacgactaccaggagccggcgccggcgccgctggttgacgcgacggagtttacgtcatagtcgttttacagagcagggatagcagagtttgtggccacttttctgtctctctacatcactgtcgtaatcgttatggga

SEQ ID NO: 127300 - DNA, 255 bp, Glycine max
cttgtgggggccggcatcaagccaacatctatagtgagttacaaccatctgggcaacaatgatggcatgaatctctcagcccctcaaaccttccgctctaaggaaatctccaagagcaatgttgttgacgatatggtcaacagcaacgccatcctctatgagcccggtgaacatccagaccatgtggttgtcattaagtacgtgccttatgtaggggacagcaagagggccatggatgagtacacttctgagata

SEQ ID NO: 127301 - DNA, 245 bp, Glycine max
caccgctggcatctcagggggacacataaacccggcggtgacatttgggctgtttttggcgaggaagttgtcgttgcccagggcgattttctacatcgtgatgcaatgcttgggtgctatttgtggcgctggcgtggtgaagggtttcgaggggaaaacaaaatacggtgcgttgaatggtggtgccaactttgttgcccctggttacaccaagggtgatggtcttggtgctgagattgttggca

SEQ ID NO: 127302 - DNA, 246 bp, Glycine max
attatcattcacttcatcattcatctcctgtaccagagtctttcaccgctggaaatgcaacactcttggagcatcttattatgacagtaatcattggaacccctatccttggggcatctttgatgggatatggatcagcaagcttgatatatggctatgttttgatttttgatttcctgagatgcttgggccactgtaacgttgaagttgttcctcatcaattgttcgagaaactcccatttctta

SEQ ID NO: 127303 - DNA, 220 bp, Glycine max
tgaacacacgtatccaggttgagcatcctgtgacagaaatgatttcctcaacagatttgatagaagagcaaattcgtgtagctatgggagaaaaacttcgatacaaacaggaggatattgtcctcagaggacattctattgaatgccgtatcaatgcagaagatgcttttaagggatttagaccagggccaggtagaattacagcatacttgccatctgg

SEQ ID NO: 127304 - DNA, 246 bp, Glycine max
atacattgtagtatcacttttgtctcggaatttgttcttttgagttatggcaagcttaaaggttgcatgtgtggttttgatgtgcatggctgtgatgagtgcaccaatgatggtgcaagccgtgtcatgcaatgatgtttctgtgaacctagcaccgtgcctatcttacctgatgcagggtggagatgttccagaatcgtgctgtagcggagtgaggaacattctgggttctgccagcaccacctt

SEQ ID NO: 127305 - DNA, 246 bp, Glycine max
gtgctaggaaagtgagtgagagaaagagatcacatagcagaatggcttctactcaatgtttcttgcaccaccatgctcttaccacccctgccagatccccatcacaacgcatcatggttagcaccaagcctaaccagcttgtttgcaaggcacagaagcaagaggatattgatgtcagcccaatctctcgccggttagctctaaccgtgctcattggtgctgctgctgttggctccaaagtccaac

SEQ ID NO: 127306 - DNA, 247 bp, Glycine max
aagaagaagggtgagctaaagtcaattttcctttcctttccactagtcacataatcccgctagtggacatggccagactcttcgccttgcacgacgtcgacgtcaccatcatcaccaccgcacataacgccaccgttttccaaaagtccatcgatttagatgcgagtcgcggtcgccccatcagaacgcacgttgtcaacttccccgccgcacaagtgggtctccccgttgggatcgaagccttcaa

SEQ ID NO: 127307 - DNA, 244 bp, Glycine max
ttctaaagctcaaggctgggagactgataatgttgaggaaatagctttgaagatttctcagttgccaaaggcatcggaaacacataaaaggattacggttatcacccaaggtgcagatcctgtttgcgttgccgaggatggaaaagtgaaaatttaccccgtgataccgttacctaaagagaaattagttgacacaaatggagcaggagatgcttttgttggaggatttctttcacaattggtt

SEQ ID NO: 127308 - DNA, 247 bp, Glycine max
aattatcaaacctaaccagtaaaaatggtgaccgtggaggaaatccgcaacgctcagcgttcccatggacccgccaccatcttggccttcggcaccgccacgccgtccaactgcgtctcccaagccgattaccctgactactacttccgcattaccaacagcgaacacatgactgatctcaaagaaaagttcaagcgcatgtgtgaaaagtccatgataaagaagcgatacatgcacctgacggagg

SEQ ID NO: 127309 - DNA, 253 bp, Glycine max
cacactctcacataactctctctctctctctctctctgagtccttcttcttcttcgtccagccaacatgagctcaatcgttcagggtttctccaagtcactggccatgaccattctctctgagatcggtgacaaaacgttttttgcagctgcgatactggctatgcgacaccctagacgcctagtcttatcaggttgcttatcggctttgattgtgatgaccattctctctgctcttgttggctgggcagctc

SEQ ID NO: 127310 - DNA, 250 bp, Glycine max
gtggtatggtcctgacagaaggatcttcttgcctgagggtctcttggaccgatctgagatcccagagtacttgaccggagaagtccccggagactatggttatgacccatttggtcttagcaagaagccagaagatttttccaaatatcaggcatttgaattgattcacgccagatgggcaatgcttggtgctgctggattcatcattcccgaggccttcaacaaatatggagcaaactgcggtcctgag

SEQ ID NO: 127311 - DNA, 247 bp, Glycine max
aaaataaaaagacttccttttttgcaattgtcatttgtcaccaaacaattgttgttagctctcacaagcaagcttcagcaacgacaatgaagaaagtagtcttacagttggacttacatggtgatagaatcaagcaaaaagctatgaaaacagcatctggcctttcaggggttgaatcagtttctgttgatatgaaagacatgaaaatgatcgtgttgggggacattgatccagtgagtgcagtgtc

SEQ ID NO: 127312 - DNA, 247 bp, Glycine max
cggctcgagctcgagccgattcggctcgagacacagagcaacactgcactgtgtacaaacgaaatttggacaagagtggtggcactccaacagaaccacctatctttctctaccttagcttcctctctttctgacttcagaggaaccagacttcaaactcaacttcagttcaagagaaagcaatgccatccaaaagggtctttctacgtctccgcatcgagcaccaagaaaatcctaataatgggag

SEQ ID NO: 127313 - DNA, 242 bp, Glycine max
agattgggaccgaaaagatggcattctcatgattgaagctgatagacttttacgaccggggggctactttgtctggacttcaccacttacaaatgctcgtgacaaagacagtcagaaaagatggaagatcatacaaagttttgctgaaaacctttgctgggatatgctgtctcagcaagatgaaactgttgtatggaagaaaactattacaaggaattgctatagttcaagaaagaatagtt

SEQ ID NO: 127314 - DNA, 245 bp, Glycine max
atcaactgaaatcaaaagtttggttaaagaacccaaggaagctggtttgaagaagaactccacagaagtccagaagttcctagaagagcttgttaaaattgattttccgggatcaaaggcagcatctgaagcatcttcaaagtttggaccagccttggcttcaggctcagttttctttgtgtttgagaaggtgtcaactttcattgttacagaagagaaagatgttgaagcccctcctggagtag

SEQ ID NO: 127315 - DNA, 239 bp, Glycine max
caatttagcataagcccagcatggccaccgcaacagcagcagccacctcgtccttcatggggacgcgcctcctggaggcccattccggggcggggcgggtgcaggcccggttcgggtttggcaagaagaaagccgccgccccgaagaaagtttccagggggtcgggctctagctccgataggcccctgtggtatccgggcgccaaggcgcccgagtacctggatgggagccttgtcgga

SEQ ID NO: 127316 - DNA, 211 bp, Glycine max
cacttccttgcctactacacattcttcatcacttcattcaacatttctccccttagcttgtttcaccaatggctgctgcggttagtgctgcagtctcttttccatccaccaagtctacctctcttccaagcaggacctccctcattgccccagagagagttgtgttcaagaaggcttcattgaaaaagggatttttttctagcgggggggg

SEQ ID NO: 127317 - DNA, 241 bp, Glycine max
gatccactccaggtgggccatgctcggagccttgggctgcgtcttcccggagttgctgtcccgcaacggggtgaagttcggagaagccgtgtggttcaaggccgggtcccagatcttcagcgagggtgggctcgactacttgggcaacccaagcctgatccacgcccagagcatcctcgccatctgggccacacaagttatcctaatgggtgccgttgaaggttaccgtattgctggtggc

SEQ ID NO: 127318 - DNA, 239 bp, Glycine max
acaatagttacaaccttaaggacattggttgatgctttctatcttctacacatggctctccaatttcgtactgcttatattgctccatcttctcgtgtctttgggcgtggtgagcttgtgatagattcagcacagatagccaagcgatacttgcagcggtatttcatcattgatttcctatccgtgttgccgataccacagattgtggtttggagatttcttcagaggtcaaaaggttc

SEQ ID NO: 127319 - DNA, 239 bp, Glycine max
cttgaatcttcgttatccttctttttttctccttgaactcgaatattcactatggcagatgaggtggttctgctagatttctggccaagtccatttgggatgagggtcaggattgcacttgctgaaaagggtatcaaatatgagtccaaagaagaggacttgcagaacaagagccctttgctcctcaaaatgaacccggttcacaagaaaatcccggttctcatccacaatggcaaacc

SEQ ID NO: 127320 - DNA, 242 bp, Glycine max
aatatattccattctctctgtgtatttccctacctctcccttcaagatgcagatcttcgtcaagaccctcaccggcaagaccatcacccttgaggtggaaagctctgacaccatcgacaacgtcaaggccaagatccaggacaaggaaggaatccccccggaccagcaacgtctcattttcgccggaaagcaacttgaggacggccgtacccttgctgactacaacattcagaaggagagta

SEQ ID NO: 127321 - DNA, 240 bp, Glycine max
ggaagctgcctcagcgacgccgttgcgattcagcctctgacattacctcatggtgcaagaaaatggcaagaggaagaagccaaacattctggtgactgggacaccggggacaggaaagacaaccatgtgcactgctctagcagaagcaacccagctccgccacatcaatgttggagaactagtcaaagaaaagaatttgcatgatggatgggatgatgagcttgattgtcatgttcttaa

SEQ ID NO: 127322 - DNA, 239 bp, Glycine max
ctggcttccccacgaggaagaccaacaatgacattacctccattgctagcaacggtggaagagtacaatgcatgcaggtgtggccaccaattggcaagaagaagttcgagactatttcctacttgccagacctcgatgatgcccaattggcaaaggaagtcgaataccttctaaggaaaggatggattccttgcttggaattcgagttggagcacggtttcgtgtaccgtgagcacaac

SEQ ID NO: 127323 - DNA, 242 bp, Glycine max
gaagatttaactgtgcttagaattgacattttccaaagagtcataattgcaatgatggcaagagggtttaaacagtatgcaattggccccattctaatgctctatgcacagaaatctctacgaggtttggatgtatttggaaaggcaaggaagaagattgagccgcgacaagagcatgaaaaaagggttgttttagagacaatagtgagccttttgccaagggagaagaattcaatgtcagt

SEQ ID NO: 127324 - DNA, 244 bp, Glycine max
atatagtgtctgcagtgctgttggagtattgcctttatccctacaatatggtttctcagtaattgagaagtttttaaagggagcttccagcattgatcaacatatgtattcagaaccatttgaaagaaatctacctgtgcttttgggaatgttgagtgtatggaatgtctcatttcttggatatcctgcccgggctatcttaccctattctcaagccctggagaaatttgccccacacattcaa

SEQ ID NO: 127325 - DNA, 247 bp, Glycine max
gttgaagtcttgcccttctctcttcaactccaaacacaagacatcatcatccatggctgcctccgtctccactgtcggagctgtcaacagagctcttttgaacctgaatgggtctggacctggggtttcagctcccagttcatccttctttgggagcagcttgaagaaggttattggctcaagggtccccaacacaaagatttcctctggaagcttcaagattgttgctgtagaagagaagaaagag

SEQ ID NO: 127326 - DNA, 243 bp, Glycine max
ccgctccgaattagggttttccaattcgcagagcaactcaacacaacgaaccaaaccaacaatgtcgcagccgcagcctcagtcgcagccgcaacacgggcaagcggcgctggagcaggtgcagtgcttcggtcgcaagaagacggcggtggccgtgacctactgcaagcgcgggcgcggcctcatcaagatcaacggctgccccatcgagctcgtcgagccggagatcctccgctttaaggc

SEQ ID NO: 127327 - DNA, 243 bp, Glycine max
cttgccattctcatcctcctctgtctctctctctccaccattgccatggatccttacaagctccggccatccagcgccttcaattctcccttctggactacaaattctggtgctcctgtttggaacaacaactcctctttaaccgttggagctagaggtccaattctgcttgaggattatcatcttgtggagaagcttgcaaactttgacagggaacgtatcccagaacgtgttgtccatgcc

SEQ ID NO: 127328 - DNA, 240 bp, Glycine max
caagatttaactgtgcttagaattgacattttccaaagagtcataattgcaatgatggcaagagggtttaaacagtatgcaattggccccattctaatgctctatgcacagaaatctctacgaggtttggatgtatttggaaaggcaaggaagaagattgagccgcgacaagagcatgaaaaaagggttgttttagagacaatagtgagcctttgccaagggagaagaattcaatgttca

SEQ ID NO: 127329 - DNA, 241 bp, Glycine max
attgtacgctgtggactcctatgttggtttgataaatttctttggaagtgaagcatttttcacattcttggactcaattaaagagtgctatgaagctctggtgattgctaagtttttgggcttgatgtacaattatctaaacatctccttaagtaagaacatagtgccggatgaaatcaagggaagagaaattcatcattcattcccaatgactctttttcagcctcacactactcgtctg

SEQ ID NO: 127330 - DNA, 238 bp, Glycine max
acaggaaggacttcgactttgtaaaatccagtctctcagcagagggatttgatgttgtttatgacataaatggacgcgaggcagatgaagttgaacccatactggatgctctgcctaatctggagcagtttatttactgctcttctgccggtgtctatctcaaatctgatctattacctcacgcagagactgatgcagttgatcctaagagcagacacaagggaaagcttgagacaga

SEQ ID NO: 127331 - DNA, 237 bp, Glycine max
gcagcctccaattcgtgccactctcttcaaaatggccgttaccttctcaaatctccacacagaatcaggtctcaagtccctcgacgacttcctctctgggaaggtctacgtttctggggatcagttcacaaaggacgacatcaaagtgtatggtgctgttttggagaagccaggtgactcttttcccaatgctgccaagtggtacgaggttgtctcatctcagcttgctgcaagctt

SEQ ID NO: 127332 - DNA, 241 bp, Glycine max
gggcagtgcttctctgattccagtttcctggttgccttggcggccactttctcctttcaagggaacggtgaaaaccttggtcgcaaaaccatggctgaagaagattcagcaagcaagacccctcatttccgtggttaacaaggctgcctctctatcttcccccgtgacagcacccagcgtcggcgttcggtttcggctggacaatttggggccgcaaccgggttcgaggaagagggctaaa

SEQ ID NO: 127333 - DNA, 237 bp, Glycine max
caaacctcaaaaaatggatcatcaaaacaaacacgtagcagtctttgctttcccctttggcagccaccttatgcctctcttaaaccttgtcctcaaactagctcattcccttccaaactgttcattctctttcattggcacacacaaatccaatgcaatccttttcccaaaaccccacatcccaaataacatcaaggcctatagcataagtgatggaatcccagagggtcacgtcct

SEQ ID NO: 127334 - DNA, 245 bp, Glycine max
ttttcctcccatggttgtggtagtggtgcttttgatctgcctccggctgctcatacccgcgaattgactgatgcggaggttgagtcccgggttgttattaatgagatcctgaacagttattctatgcacaccaagaaacctaaagttgcttttttgtttttgagtccgggttcgttgcccttcgagaagctctggcacatgttctttcagggtcatgagggaaaattctctgtttatgtacattc

SEQ ID NO: 127335 - DNA, 242 bp, Glycine max
agcgacgccgtttgggtcctcttccacctcgccttcttctcccaatgccttccctccgcctgggcccactcggcgatcctcctcccgggtcaactcgcccgtgactcaccgcagagctgccccgcccctgaccccaacctctactacaagccagtcatcggaatcgtcagccatcccggcgacggcgcctccggccgcctcagcaacgccaccggcgcctcctacatcgccgcctcctatgt

SEQ ID NO: 127336 - DNA, 239 bp, Glycine max
atcagcctttctctcccactcactcactcacaggtaagcaatggcgggaaaaggagggaaggggcttcttgcagcgaaaaccaccgcggcgaataaggacaaagacaaggacaagaagagacctatttctcgctcttcccgtgctggaatccagtttcctgtgggacgtatccataggcagctgaaacaaagggtccaagccaatggacgtgttggggcaacagctgcagtgtacttag

SEQ ID NO: 127337 - DNA, 240 bp, Glycine max
tgcaattgaagttgaagtcttgcccttctctcttcaactccaaacacaagacatcatcatccatggctgcctccgtctccactgtcggagctgtcaacagagctcttttgaacctgaatgggtctggacctggggtttcagctcccagttcatccttctttgggagcagcttgaagaaggttattggctcaagggtccccaacacaaagatttcctctggaagcttcaagattgttgctg

SEQ ID NO: 127338 - DNA, 237 bp, Glycine max
gaattcgatgactatattggatgaactgcttccaatttcaattgagatggggaagaggaatctgactgggatctggaactttactaacccaggagtggttagtcacaatgaaatcttggagatgtacagagattatgttgacccgaacttcacctggaacaacttcactctcgaggaacaggccaaggtgattgttgctccgaggagcaacaatgagcttgacgctgccaaattgaa

SEQ ID NO: 127339 - DNA, 226 bp, Glycine max
attgaagttgaagtcttgcccttctctcttcaactccaaacacaagacatcatcatccatggctgcctccgtctccactgtcggagctgtcaacagagctcttttgaacctgaatgggtctggacctggggtttcagctcccagttcatccttctttgggagcagcttgaagaaggttattggctcaagggtccccaacacaaagatttcctctggaagcttcaag

SEQ ID NO: 127340 - DNA, 200 bp, Glycine max
  unsure (1)..(200): unsure at all n locations
ccgtggaggaaatccgcaacgctcagcgttcccatggacccgccaacatcttgggctttcggcacggcacggcgtccaactgcgtctcccaagccgattaccctgactactacttccgcattaccancagcgagcacatgactgatctcaaagaaaagttcaagcgcatgtgtgaaaagtccatgataaagaagcgatac

SEQ ID NO: 127341 - DNA, 237 bp, Glycine max
tgttactccttctctcgttgattcggatctagagtcttttttcactcttcagttctcgttgttgttcttcgctttcctgaaactagggttttcaatttcgattcattcgttaataattaaagatgtttgggagggcaccgaagaagagcgataatacgaggtactacgaaatcctcggcgtctcgaagaacgcttcgcaggatgatctgaagaaggcttacaagaaagccgccatca

SEQ ID NO: 127342 - DNA, 237 bp, Glycine max
caaaggtatggagcagtttggactggggataacactgctgattgggatcacctaagagtttctatcccaatggttttgacccttggtcttactgggatgtcattctctggtgctgatattggtggattttttgggaatcctgaacctgagttattggttcggtggtatcagctaggagcttactatcctttctttagggcccacgcccatcacgacacaaaaagacgagaaccatgg

SEQ ID NO: 127343 - DNA, 253 bp, Glycine max
ctctcattcgctcaatcccccgccaccgggtctgccgaagttacaccatttatggtcgagtgaagatccccagtgtgggaacaaaagattatattcttcctggaaaaatttcaaatgtcaaagtcatactcaatggtggtcaaagagttacttttctgaggcctgatggatatttcgcattccacaatgttcctgccgggacacatctaattgaagtggctgcaataggctattcttttctccggtacgagtt

SEQ ID NO: 127344 - DNA, 230 bp, Glycine max
gtgatagcgatgtccgaattgggtcttctctaccttgggatgggagtttcaggtggtgaagaaggtgcaagacatggtccctctttgatgcctggtggttcattcgaggactacaagtacatagaagacattctcctcaaggtagacgcacaagtccctgatagtggtcattgtgtgacctacatcggcaaaggtggatcaggaaattttgtgaaaatgatccacaatgg

SEQ ID NO: 127345 - DNA, 250 bp, Glycine max
gggaaggggcttgtggccggaaaaaccacggcagcgaacaaggacaaagacaaggataagaaaaggcctgtctctcgttcatcccgtgctgggatccagtttcctgtgggtcgtatccataggcagttgaagcaaagggtgcaagcaaatggacgtgtgggggcgactgctgctgtgtacttggcctccattctggaatatctgactgctgaggtgctggagctggcggggaatgctagcaaagatctga

SEQ ID NO: 127346 - DNA, 255 bp, Glycine max
atcgtcccactttcttctccttttagggtttcctttttgtttctcctttccagatctgcatcttccattttttaggattaagcggtgagattcgtgaatctgagaaatgtcggattcttctcgggaggagaatgtttacatggcgaaattggcggagcaggccgagcgttacgaggagatggttgagttcatggagaaggtagcaaagactgtggaggttgaggagttgacggtggaggagagaaatcttctctc

SEQ ID NO: 127347 - DNA, 255 bp, Glycine max
gtttgcttgctcagactcaagggtgtgcccatctcatgtgctagatttccaaccaggagaggcctttgtggtcagaaatgttgctaacattgtcccaccatatgaccagtcaaaatacgctggaactggggcagcagttgagtatgctgttttgcatcttaaggtgtctgagattgtggtcattggacacagtgcttgtggtggtattaaggggcttctgtctttcccatatgatggaacctactctactgattt

SEQ ID NO: 127348 - DNA, 253 bp, Glycine max
gtttgacaaggatcaaaatggctacatttcagcaagtgagttgagacacgttatgatcaatctgggtgaaaaactaactgatgaggaggtggagcagatgattgaagaagcagatttggatggtgatggtcaagttaattatgatgaatttgtcaagatgatgatgactattggatgaaattttcaaacaacaaatttattgttcgaattcgatcatttgggccccaatctcattcactcgcatgaaataata

SEQ ID NO: 127349 - DNA, 241 bp, Glycine max
cttcctcagttacttcctcttttcgcatcagcaatttgaagtcggttttagttggtgagactagtaaactcagagtttcaagtgtacctggtgctcatgttggtttcaatagaaagactgtagaatgtaaggtatcacgaattgggaagcaaccaattcctgtgccatccaatgtcacagtcaaattggaaggacaggatatacaagtgaaaggtcctttgggtgaatctgcattaactta

SEQ ID NO: 127350 - DNA, 253 bp, Glycine max
ctcaggggaggcttgagtcattgctgaattaccacaccatgatcaccgacctcatcggcttgcctatgtcgaatgcttcattgcttgatgagggtactgctgctgctgaagcaatgtctatgtgtaataatattcagaaagggaagaagaagaccttcattattgcaagtaactgccaccctcagacaattgatatttgcaagacaagagctgatggttttgatctcaatgttgtgacagcagatcttaaggc

SEQ ID NO: 127351 - DNA, 254 bp, Glycine max
aacgaaacatggcaagagtggtggcactccaacagaaccaactatctttctctaccttagcttcctctctttctgacttcagtggaaccagacttcaaactcaacttcagttcaagagaaagcaatgccatccaaaagggtctttctacgtctccgcatcgagcaccaagaaaatcctaataatgggaggcaccaggtttattggtgtgtttttgtctaggctccttgtcaaagagggtcaccaggtgacttta

SEQ ID NO: 127352 - DNA, 255 bp, Glycine max
gcatttagctagaaagcatatgtgaggacacagtggttgtagacaagaaacagaatctgatgaattttgttccagctcttcggtctggagagttgtctgatattggagaacgtccttacatggaggatactcacatatgcattggagatttggtaaagaagtttaattatgatgtactttctggggaggctgtttccttttatggtgtatttgatggacatggagggaagagtgctgcacaatttgtccgtgata

SEQ ID NO: 127353 - DNA, 249 bp, Glycine max
gaatggagatcactagaataggccaatggttaagtcttctgatatgtgtactactattactgcagacagaaggggttcctgtgggaatcacttttgttgaaaatgcagtggcaaaaggggctgtttgtttggatgggagttctccagcttaccacttccacaagggatctggagcagggattaacaactggatagttcactttgagggaggaggatggtgcaacaacgttactacttgcctttcccgta

SEQ ID NO: 127354 - DNA, 255 bp, Glycine max
gtgctgttccaagtcccatagcagcgatgggaatcgatcttaaggctgggggtaagagcaaaaagaccaaaagaacagcaccaaaatccaatgacatctacctcaaattacttgtcaagctttatcggttccttgttcgaaggactggcagcaatttcaatgctgttatactcaagcgcttgttcatgagcaaggttaacaagcctccaatttctttgtcaaggttaattaagtatacaaaggggaaggaggata

SEQ ID NO: 127355 - DNA, 256 bp, Glycine max
acaaaactcagtttccaattcaccaaactcacaatggttgatctagattggcaaacaaagatggttcactccaacatcatgcctccaatgtcccccaaactctctctcccggatcataacattccaatcccaactttgcaactcccccttcgccaaaacgacatcaccgcagcgtcgtctcctatctgcgctgcatacgacaactaccttcgtctccctgagctcagagccctctgggcctccaaggacttcccca

SEQ ID NO: 127356 - DNA, 255 bp, Glycine max
ctcgagccgtaaaatttaaagaaatcaacacacacatacacaacaacatatggaggtgctacagggtgcaaaccatagcttccatatccatagatgctgccatcccagccatgtttgttagggcagagacagagcaaccaggcatcacaaccgttcaaggggtgaaccttgaggtgccaattattgattttagtgacccagatgaagggagagtggtgcatgagattttggaggcaagtagggactggggcatgt

SEQ ID NO: 127357 - DNA, 249 bp, Glycine max
aggctatggtgcccgtactccggaggtgaaatgcgcaagttggaggcttgctgtggaagcacacaacatctttggctttgagaccattcctgaagagtgcgttgaagcaacaaaggaatacatccatggcgaacaatatagatcagactccaaaacagttaaccaacaagcttacttttatgccagagacctcgaagtccatcccaaggacacatttgtgttcagtatagatggcaccgtactctctaa

SEQ ID NO: 127358 - DNA, 242 bp, Glycine max
  unsure (1)..(242): unsure at all n locations
ggtgaagtcttgcacatcactctacaggtncanacacaagacatcatcatccatggctgcctccgtctccacagtcggagctatcaacagagctcttttgaacctgaatgggtctggacctggggtttcagctcccagttcatccttctttgggagcagcttgaagaaggttattggctcaagggtccccaacacaaagatttcctctggaagcttcaagattgttgctgtagaagagaaga

SEQ ID NO: 127359 - DNA, 242 bp, Glycine max
gcaattgaagttgaagtcttgcccttctctcttcaactccaaacacaagacatcatcatccatggctgcctccgtctccactgtcggagctgtcaacagagctcttttgaacctgaatgggtctggacctggggtttcagctcccagttcatccttctttgggagcagcttgaagaaggttattggctcaagggtccccaacacaaagatttcctctggaagcttcaagattgttgctgtag

SEQ ID NO: 127360 - DNA, 245 bp, Glycine max
gcactcaacattttacactcttttcttcttctcgttgttgcttcgctgttgaatcatggatcagaaggtcgatttcagcgctccccattccatgggaaccactatcatcggcgttacttacaacggcggtgtcgttctcggagccgactctcgaaccagcaccggagtgtatgttgccaaccgagcatcggacaaaatcactcagctcactgataatgtatacgtgtgtcgctctggatcggctg

SEQ ID NO: 127361 - DNA, 248 bp, Glycine max
cagcctggtgtgttgattcaggtctatgaaggtgaacgtacgaggactcgtgataacaatttgcttggcaaatttgagttatctggaattcctcctgctccgagaggtgttcctcagatcaccgtttgctttgacattgacgccaacggtatattgaacgtgtctgcggaggacaaaaccactggacagaagaacaagattacaattaccaacgacaaaggaaggctttctaaggaggagattgagaa

SEQ ID NO: 127362 - DNA, 246 bp, Glycine max
caccaggcgcacgttagcacaaactatcatggccacggcaacagcagctgccacctcgtcctttatggggacgcgtctcctggaggctcactccggggcggggcgagtgcacgcccgattcggcttcggcaagaaaaaggctcccgccccaaagaaagcctccaggggatcgggccgagacaccgacagacccctttggtatccgggcgccaaagcgccgaatatctcgatgggagtcttgtcgga

SEQ ID NO: 127363 - DNA, 253 bp, Glycine max
tgacaagatatcttctcagctaacaccatgggcatctgctttatttgaatttctgccaccctttattaggagacagttgctcctttaccctgaatccgacgactcagcacagttatcacagattgaaactgagaaattactagcatatcttgtggaagtcgagattaacaagcgtctgaaagaaggcacatacaaggggaagaaattcaatgccatttgccacttttttggttatcaagctcgtggatctctg

SEQ ID NO: 127364 - DNA, 252 bp, Glycine max
tgctgcatcaatggcttttcgttcatcggatccttcttattcagagactttgctacgaaatgctgctaaggcctttcaatttgcagatacctataggggtgcctacagtgacaatgctaatgttaggagtggtgtttgcccatattattgtgacttcgatggttatcaggacgaattgttatggggagccgcatggctaaggagggctactcaggatgaaaatttcctcaactacattcaaagcaatggcaa

SEQ ID NO: 127365 - DNA, 212 bp, Glycine max
gttattgctgaccttaaggcagctggtgcttcatggattcggtttgatgagcctagacttgtcttggacctctgaaggtcaaagttggacgatgtcgctgaggaatatgggaattctgcgcgtactttgtctggcatgaatgataatgatgagaccctctataatggaatacatgatagggcatcccggtccctgtcatctctgaatggcga

SEQ ID NO: 127366 - DNA, 245 bp, Glycine max
gtgaaagcgatgtccgaattgggtcttctctaccttgggatgggagtttcaggaggtgaagaaggtgcaagacatggtccctctttgatgcctggtggttcattcgaggcctacaagtacatagaagacattctcctcaaggtggccgcacaagtccctgatagtggtccttgtgtgacctacatcggcaaaggtggatcaggaaattttgtgaaaatgatccacaatggaattgagtatggtga

SEQ ID NO: 127367 - DNA, 252 bp, Glycine max
catagacatggccaccgtcacttctgcagccgttgctattccctcattcactggcctcaaggcaagcgcaggcaaagtgagtgccgcagttaaagtctcagctccccaagccacaaggttgggcatcaaggcttcgctgaaagacgttggagtcgctgttgtggccactgccgcgagtgcagtgctggctagcaacgcattcgccattgaagtgttgctgggtggtgatgacgggtctctggctttcgttcc

SEQ ID NO: 127368 - DNA, 251 bp, Glycine max
atccaattgaaattttaaaaatgactgggataaacttaagaattcaattattgaaattgaataagtaaacaatttaattggattggtcgaatggtatcaaaaaaatggagtactaactcccatttcttatttattattgaattaaccgatcaacttgctttgttatcgaacatttcttcttgatttcaaaaattttccggaaaaaatttgaatctatttttatatgcgaatcaatcctactacttctggtc

SEQ ID NO: 127369 - DNA, 250 bp, Glycine max
atacacacttaagtattataatctcatgctcatgtctcggatatcagtttctagttctaatattatataacgattgaaatggcagcactagctgaaattgagtatcctaggaaggcattcggatgggtagctagggatgcttctggtcttctctcccctttcaagttctgcagaagggaacccggtaatacagatgtggcattcagagtgttgtactgcgggatatgctactcggacctccacagcataa

SEQ ID NO: 127370 - DNA, 252 bp, Glycine max; identical to SEQ ID NO: 119091

SEQ ID NO: 127371 - DNA, 250 bp, Glycine max
gtttggcagaccaccctaatttggtcaagttaattggtttttgtgctgagggagagcagaggctattggtttacgaatatatgccattgggatctttggagaatcatttgcacgatcttccgcgtggtagaaaaccgattgactggaatacaagaatgaaaatagcagctggtgcagctagaggcttagagtatttgcataataaaatgaaacctcctgtcatatatcgggacctgaaatgctccaatat

SEQ ID NO: 127372 - DNA, 251 bp, Glycine max
ccagagactattttcaaagatgaaaactccctattaacaaatggagatttgagctataatgatctgacaggtaatgaaaaccagaaacctacacgtaaagcctcaaatttgacgaagcaggagaatggagatgatggcttaaagaatagtccaaaattaccaagttatatggcagcaactgaatctgccaaggcaaagttgagggcacaagggtccccaaggtttggacaagatgaaactgagaaaaacaa

SEQ ID NO: 127373 - DNA, 250 bp, Glycine max
  unsure (1)..(250): unsure at all n locations
tctcgagccgctcgagccgctcgagcggctcgagcatttcggaggctagttncggagattaatgactaatttgaccgatgctccaaatagagcaaacatattaaaagttatactggcaaaagaggacttgtcttctgatattaatatggatgcaattgcaagtatgactgatggatattccggaagcgatctaaagaatttgtgtgtaactgctgcacaccgtccaattaaagagatattagaaaaggag

SEQ ID NO: 127374 - DNA, 247 bp, Glycine max
aaagattcgaaacgaagaaagaaagcgttgtgaagaatggcggaagagggacaagtgatcggtgtccacagcgtagaggagtggaaggaacatctcaagaagggagaagagtccaagaaattgattgtggtggattttactgcttcttggtgcggtccatgccgtttcattgccccaattcttgcagagtttgctaaaaagttgccgaatgtcaccttcctcaaggtggatgtggatgaattggaga

SEQ ID NO: 127375 - DNA, 249 bp, Glycine max
attaacgtttcttctcttcactctgcccgctgcatcaatggcttcagagaagaaactttcgaacccaatgagggagataaaagtgcagaagctcgtcctcaatatctctgttggcgagagtggagatcgtctcaccagagcctccaaggtgttggaacaacttagtggccaaaccccagtgttttccaaagcaaggtacactgttcgttcctttgggattagaagaaatgagaagattgcatgctatgt

SEQ ID NO: 127376 - DNA, 249 bp, Glycine max
atgcaagcaaaaacctcgaagatttagggtttcgcattgctacttcgcgttcgttcatctctctctcacgcctcaagattttcaagaacacattccaatctggatttctttccattttgtacagccttggataggagtaaacctttgcagatatgggacaaagaagttgtgaatgcccatgttaaacgaccacaggatgaagacatacaatccaatgtactggaaataattggatcaaatattcagtcc

SEQ ID NO: 127377 - DNA, 248 bp, Glycine max
acttgagaatggccttgccagtggtcgtcgacgcagagtacctcaaagaggtcgacaaggctcgccgcgatctccgcgcactcatcgctaacaggaactgcgctcctctcatgcttcgattggcctggcacgatgccggaacttacgatgctaagaccaagactggtggacctaacggttcgatccgtaacgaggaagagtattctcacggcgccaacaatggcttgaagaaggctattgatttctgt

SEQ ID NO: 127378 - DNA, 247 bp, Glycine max
agtgatttcagtgagtgatcggtgttcacttgatctcatcataatcgtcagcgtcaattgaagaagatgccgatcagaaacatcgccgtcggaaggcctgaagaggcgactcaccccgacacgttgaaggcggctttggctgagttcatctcaaccttcatcttcgtgttcgccggctcaggctccggcatcgcctacaacaagctcaccgacaacggcgctgccacccctgccggcctcatctccg

SEQ ID NO: 127379 - DNA, 249 bp, Glycine max
agcctctccaatgagcgcttccgacacggcgtcgttcgcgaacctcgccgccaccaactccctctccacgcggctgccggagttctgctccgcggcgcacctcctctgcttcccggaggtccggcccagcctcgagaaacacaccggagactccgatttccagacctacaacgacgaccagaacttcaccaactacggcaccgacttcgccggcggcctcgacaccttcaagaactactccaacgacct

SEQ ID NO: 127380 - DNA, 239 bp, Glycine max
ggcggttttgcgtgggaaaatgatcgtgtaggggagctcgtgatctgcggatgtggcgatccggccgttattatagtctggccgaattgctccaggcatcggcggagacattggcggatgggtatagtgcgaactacgtataaggcagtgatcgaatcggggttcatagttactgtcaagaggttgaaagatgctaggtatcctgccttggaagagttcagggctcacattcaagtcct

SEQ ID NO: 127381 - DNA, 201 bp, Glycine max
tccagccccatcatggcttcagagcagcaagcggctcttgccgtcaatccctctgatgctgatgctcctaccatatttgacaagatcatcaataaggagattccttctactgtggtttatgaggatcacaaggtgcttgccttcagggacatcaactcctcaagctcctacacatattcttatcattcctaaattcaaaga

SEQ ID NO: 127382 - DNA, 247 bp, Glycine max
ggaaagaaaagccacttcaaatttcagccccataccatactcattaaagtccacacacacagagcaacactgcactgtgtggaaacgaaacatggcaagagtggtggcactccaacagaaccaactatctttctctaccttagcttcctctctttctgacttcagtggaaccagacttcaaactcaacttcagttcaagcgaaagcaatgccatccaaaagggtctttctacgtctccgcatcgagc

SEQ ID NO: 127383 - DNA, 244 bp, Glycine max
gttgccattctcatcctcctctgtctctctctctccaccattgccatggatccttacaagctccggccatccagcgccttcaattctcccttctggactacaaattctggtgctcctgtttggaacaacaactcctctttaaccgttggagctagaggtccaattctgcttgaggattatcatcttgtggagaagcttgcaaactttgacagggaacgtatcccagaacgtgttgtccatgcca

SEQ ID NO: 127384 - DNA, 244 bp, Glycine max
ggaatgtgaatcgctaggcttagctgacttcccaacctctgagaggctgcagtggcatggtcattttcctggaaagccagactggtctgaaaccagccgttttgtggcttgtaccatggtagattcagtgaagggagaaatatacattgctttcaatatgagtcatttacctttcacagttaccttgccggagcgtcctggatacaagatgggaactcttgtagacaccagcaagcctacacca

SEQ ID NO: 127385 - DNA, 239 bp, Glycine max
cctcttctcgcaatccgcactaaaattctagggttccgaaatggacgctgacggaaagatcaagaagggcgccggcggaagaaagggcggcggcccaaagaagaagccggtttcaaggtccgtcaaagccggtctccaattccccgtcggaagaattggccgttatttgaagaaaggaaggtacgctcagcgtgtcggtaccggtgctcccgtatacttggctgcagttctcgaatact

SEQ ID NO: 127386 - DNA, 248 bp, Glycine max
caattgaagttgaagtcttgcccttctctcttcaactccaaacacaagacatcatcatccatggctgcctccgtctccactgtcggagctgtcaacagagctcttttgaacctgaatgggtctggacctggggtttcagctcccagttcatccttctttgggagcagcttgaagaaggttattggctcaagggtccccaacacaaagatttcctctggaagcttcaagattgttgctgtagaagagaa

SEQ ID NO: 127387 - DNA, 249 bp, Glycine max
cacatttgcaaagtgttatttttcttttttttctcatttgcactgcaaattgcaatggcttccaacaaggttattgccaccatcatggtgctttctctccttgcctactcaacatcattcaccaatgcatgtggcacatgccacccaaaacctaccccttctcctcctcctccatcaggaaagtgccctaaggacacattgaagctaggggtgtgtgcagatattctaggtcttgttactgttgttgtt

SEQ ID NO: 127388 - DNA, 244 bp, Glycine max
atttgggtggatagaagacaatccagcactgacagcaggagtgagagctggtgctgtggttgcagttttcgtatgggcacctgaagaagaaggtcaatactaccctggcagggtctctagatggtggctcaagaacagtttggctcatcttcattcctctctgaggaatcttggcactcctctcatcactaagcgatccactgacactctttcttctcttcttgaggttgttaagtccactgga

SEQ ID NO: 127389 - DNA, 245 bp, Glycine max
  unsure (1)..(245): unsure at all n locations
aaaaatggcacctgcaacacagagtctctctctcctcctcctgttctcactctgcatcgccgcaaccgttagatcgagcgacagcgnctacgattgtgtgtacacggcctacgttagaaccggttcggtgttgaaggggggaacggactcgaagatcgggctgaagctgtacgacaagtacggctactacatctacattaaaaacatcgaagcatggggcggcttgatgggcaagggctacagct

SEQ ID NO: 127390 - DNA, 251 bp, Glycine max
ctcataacacaaagcacaaagcaaagctcatccttgagttaaaaaatggcagcagcttcttccatggctctctcatccccatccttggctggcaaggccgtgaagctgggcccatcagccccagaagtgggaagggtgagcatgaggaagaccgtcaccaagcaggtctcctcaggaagcccatggtacggcccagaccgagtcaagtacttgggcccattctctggcgagcccccgtcctacctaaccgg

SEQ ID NO: 127391 - DNA, 245 bp, Glycine max
ggataagattaaagattcaacaatggcctctgcttctgctactcttctcaagtcatctcctgttcttgacaagtgcgagtgggtcaaaggccagacccttcgccaacctctcgtgagatgtaacccttcctcagcatcagctctcaccatcaaagctgcttcctatgctgacgagctcgtcaaaaccgccaaaacagtggcctcaccggggcgtggtattttggcgatggatgagtcaaatgcaa

SEQ ID NO: 127392 - DNA, 247 bp, Glycine max
cttggatcaggtttagggaatggctgcaatcttagctcgaaaatcactccttgctcttcgtgcgcgccaattggctgtaagcggtcaagggctgcacagctcccaatactatggccttcggttaagtgcacactccttctctaccaaaagagaggatgaggaaagggagcaactcgcaaaggacatttcaaaggattggagttctgtctttgaacgtagcattaacactctctttctcactgaaatg

SEQ ID NO: 127393 - DNA, 249 bp, Glycine max
ggtgaaaataggatcatggtaggaatgaaatatacatttggaattaatacaatgtcatattatttgattttgatggaacagctgaggctttggctgcacaagtgagccaagagaactttgataagggactcatatacccaccattcaccaacatcagaaagatttcagcacacatagctgccaatgttgctgctaaggcttatgaacttggcttggccactcgccttcctcaacctaaagatttagtga

SEQ ID NO: 127394 - DNA, 246 bp, Glycine max
gagagagagagagagagagagagagatctatctatctatcaagatggcgttgttggttgagaaaacaagcagtggaagggagtacaaggtgaaggacatgacgcaagccgatttcggaggattggaaatcgagctggcggactgttgaaatgcccggcctcatgtcctcccgcaccgagttcggcccctctcaacccttcaagggcgctaggatcagcggctcgctccacatgactatccaaaccg

SEQ ID NO: 127395 - DNA, 253 bp, Glycine max
ggcgatacgctggaagatttatcaaatgttgtttcagatgcctgtatatgtcttcagaacaacaacatacctttcaatgttcttatctctgactgtggaaagcaagtctatctgttaccacagtgttatgcagagaaacaagctcttggagaagtggatgctgagcttcttgacacccaagtgaatcctgctgtgtgggaaattagtgggcacatggttctaaagaggaagaaggattatgatgaggcatctg

SEQ ID NO: 127396 - DNA, 265 bp, Glycine max
cgcgtacgttcggttcgaaggcaattgactggtgacacaacttctgtgttgaagaactggtggcagcaacatgcaaagtggccttacccaactgaagatgacaaggcaaaacttgtggaggagacagggttgcagctgaagcaaattaataattggttcatcaaccaaaggaaacgtaactggcacagcaactctcaatcggttacttctttaaagtccaaacgcaagaggtagacattatattattttgtccctaactatgtgg

SEQ ID NO: 127397 - DNA, 240 bp, Glycine max
tacaaaagtgttctttgaggaaacctgtttagcatcaaaagatgctatgccttttgatttactaaagaagaagctcttttcgagattaaatacaatggggatcagaattaagaaaacttatgaagaggaatggtcttatatcccagttggtggatccctaccgaacacagaacaaaagaaccttgcatttggtgcagctgccagcatggtgcatccagctacagggtactccgttgtgag

SEQ ID NO: 127398 - DNA, 244 bp, Glycine max
gagagaaactctctctctagaaaccctattgcacgttttgcaatcgaactcgacaatggccaacagcaacctccctcgaagaatcatcaaggaaacgcagcgtttgctcagtgagccagcaccaggaattagtgcctccccttctgaagagaatatgcgatatttcaatgtgatgatccttgggccaacccagtcgccttatgaaggaggagttttcaagttagaactatttttgccagaagaa

SEQ ID NO: 127399 - DNA, 238 bp, Glycine max
ctcgaagatggcaatagaattggcatctcccaattgggttccaaccgcagccgcatgtttggcagccttggccgccctcctcctcttcctcctccgcggtctccgccgccgtaaatacaatctccccccaggccccaagccctggcccatcataggcaacctaaacttaatcggctccctcccacaccagtcgattcacgcgctgagtaaaacatacgggcccatcatgcacgtgtgg

SEQ ID NO: 127400 - DNA, 243 bp, Glycine max
cagcattagcaaccaagcaagagaatggcgacgacagcagccttgtgcggcactatgatgagcagctccttcctgaggagaaaagcagtggtcacaagcctgaaggcattccccaatgctaacgcagtgtttggtgtaaagggtggacgtggaggtggtgtgactgccatggctagcttcaaggtgaagctgataaccccagagggagagaaagaatttgaatgcccagatgatgtatacatt

SEQ ID NO: 127401 - DNA, 244 bp, Glycine max
aattgaagttaaaagccttagccttccctacaactccaaacagcaagacatcatcatccatggctgcctccgtctccactgtcggagctgtcaacagagctcttttgaacctgaatggttctggagctggagcttcagctcccagttcagccttctttgggaccagcttgaagaaggttattgcctcaagggtccccaacagcaaggtttccggtggaagcttcaagattgttgctgtagaaga

SEQ ID NO: 127402 - DNA, 246 bp, Glycine max
aaacaaacataactggctagaatggccctggagaactgtttgcgagtgaccacagtaggcacagccacaccccaatgcttttctccattttttccatcttcaagggataaacttgtcttcccaactcacagaggtttcaagaaatccttgcaaaactcaacactgtcatacccttatctttactccaccggtgctgcctatagaaaatcccgttttgtttgcaatgctcgtgaagcagtaaatgaa

SEQ ID NO: 127403 - DNA, 245 bp, Glycine max
gctagaagcaataagatgaaaatgaaagtgcttgttttgtttgttgctacagttttggtagcatatgaatgccatggctcagactaccaaaagttccctctccaaatgaaaactgggtttggtgggcaatacagcaatgaggtggcatgtgccagttggaggcttggcgtggaagcaaacaacgtagtcaagtggacaaactgttcctgcagcttgcggagagtacatagctgactacgttctag

SEQ ID NO: 127404 - DNA, 244 bp, Glycine max
gtcttgatgtctgaggcattggaagaggttgttccttcaatgaaaggagggtgtgaagaagaagggttgaacctgaaggctactgagctgaggcttgggttgccagggtgtgagtcaccagagagggagggtgtgtttaagagtgtggtggtgtctggggccaagaggggtttctctgatgccattgatggaaactggaatggtggaggatctgaaaaagatgccgctgccttgttttctccaa

SEQ ID NO: 127405 - DNA, 244 bp, Glycine max
gctgccaaacctcgctgaaaattagggtttcgtttcggaggtagacgaagatgttcggaagggcaccgaagaaaagcgacagcaccaggtactacgaaatcctcggcgtttcgaagaacgcttcgccggatgatttaaagaaggcttacaagaaagccgccattaagaaccaccctgacaaaggcggtgatcctgagaagttcaaagagcttgctcaagcctatgaggttctgagtgacctgag

SEQ ID NO: 127406 - DNA, 248 bp, Glycine max
cccagatcttgtagcaatggcgagcgctcccactccacgcgaagagttcgtgtacatggcgaactggcggacaggccgagcgctacgaggagatggtggagttcatggagaaggtctccgcctccgccgagagcgaggagctgaccgtggaggagcgtaacctcctctccgtcgcctacaagaacgtgatcggcgctcgccgcgcctcctggcgcatcatctcctcaatcgagcagaaggaggagagc

SEQ ID NO: 127407 - DNA, 102 bp, Glycine max
gttgagaactaagaaggagaagcaaatggcttcctcaatgatctcttccccagctgttaccactgtcaaccgtgccggtgccggcatggttgctccattcac

SEQ ID NO: 127408 - DNA, 243 bp, Glycine max
gtgagagaaagagatcgcagacacagagcagaatggcttctacccaatgtttcttgcaccaccatgctcttaccacccctgccagtgccagatccccatcactacgcatcttggttagcaccaagcctaaccagcttgtttgcaaggcacagaaacaacaaacaccacaagaggatattgatgtcagcccaatctctcgccggttagctctaactgtgctcattggtgctgctgctgttggct

SEQ ID NO: 127409 - DNA, 237 bp, Glycine max
caccgctggcatctcagggggacacataaacccggcggtgacatttgggctgtttttggcgaggaagttgtcgttgcccagggcgattttctacatcgtgatgcaatgcttgggtgctatttgtggcgctggcgtggtgaagggtttcgaggggaaaacaaaatacggtgcgttgaatggtggtgccactttgttgcccctggttacaccaagggtgatggtcttggtgctgagatt

SEQ ID NO: 127410 - DNA, 239 bp, Glycine max
gcgaaggtgcaacctgacagcctccaaatccaatggcttcagagaagaaactttcgaacccaatgagggagataaaagtgcagaagctcgtcctcaatatctctgttggcgagagtggagatcgtctcaccagagccgccaaggtgttggaacaacttagtggccaaaccccagtgttttccaaagcacggtacactgttcgttcctttgggattagaagaaatgagaagattgcatgc

SEQ ID NO: 127411 - DNA, 263 bp, Glycine max
gtacgtatgctcattctgctccaccccaggagcaaagacactaagaagattctgagcacaatggcatccacacaatgcttcttgcaccaccatgccctcaccactccaaccagagcttcatcacagcgcttagttgtgagcaccaaaccaaaccacattgtttgcaaggcacaaaagcaggttgtccaagagggtgaggacactactaacattgtctctcgcaggttggccctcactgttctcattggtgctgctgctgttgg

SEQ ID NO: 127412 - DNA, 237 bp, Glycine max
tgagaatttctttagctcgagcactttttgtgtaaccaactctattattgcttgatgaacccacaaatcatcttgacctgagggctgttctctggttggaagagtatttgtgccgttggaagaaaactctggtggttgtctcacatgatagggattttctcaatacagtgtgtactgagattattcatctccatgatttgaaacttcatttctatcgtggagatttagatgattttg

SEQ ID NO: 127413 - DNA, 239 bp, Glycine max
cacttgttgtgatcaccggcgaccgcggcctctgcggcggtttcaacaacgcaatcataaagaaagccgaggctagaatcagggaattgaaggagcttggcttgcaatttactgtcataagtgttggcaagaagggtaactcttatttcatccgaaggccttatattcctgttgataagttccttgaaggtggcactcttccaactgctaaggaggctcaggccattgctgatgatgtt

SEQ ID NO: 127414 - DNA, 237 bp, Glycine max
ctctcattcgctcaatcccccgccaccgggtctgccgaaggttacaccatttatggtcgagtgaagatccccagtgtgggaacaaaagattatattcttcctggaaaaatttcaaatgtcaaagtcatactcaatggtggtcaaagagttacttttctgaggcctgatggatatttcgcattccacaatgttcctgccgggacacatctaattgaagtggctgcaataggctatttc

SEQ ID NO: 127415 - DNA, 238 bp, Glycine max
gttgaatcgtgaaaatgttcagaaaccagtacgacacggacgtgaccacatggagccctgcggggaggctgttccaggtggagtacgctatggaggcggtgaagcagggctcggcggcgatagggctccgatcaaagacccacgtggtcctcgcatgcgtcaacaaggccaactccgaactctcctcgcaccagaagaagatcttcaaggtcgacaatcacatcggcgtcgccatcgc

SEQ ID NO: 127416 - DNA, 239 bp, Glycine max
gagagagtgaggttggtgcatgcctaagggtgaatttctatccaaagtgccctcaacctgacctcacttttggactctcccctcactcagatcctggtggcatgaccattcttctccctgatgattttgtgtctggccttcaagtaagaagaggagatgaatggattacagttaagcctgtcccaaatgccttcatcatcaacattggtgaccaaattcaggtgctgagcaatgcaata

SEQ ID NO: 127417 - DNA, 241 bp, Glycine max
aagtgatttacctggcctgacagatgttgaaaagccaaggatgaggggtccaaagagagcttccaagattcgcaagctgttcaatctgtctaaggaggatgatgtgaggaagtatgtcaacacatataggagaacatttacaactaaaaatgggaaaaaggtgagcaaagctcctaagatacaacggctggtcactcccctgaccctccaaagaaagagggcaaggattgcagataagaag

SEQ ID NO: 127418 - DNA, 241 bp, Glycine max
cgtaactgcgtgcactctctctctctctacaacaagaattcatcgattcatttcagcccatcagcatggcgaaggagaagaaaaacttgtccaacaagaacaagaagccaagcaatgcagacgaggttcacttccgcggagtccggaagcgcccctggggccgctatgccgccgagatccgcgaccctggaaagaagacccgcgtctggctcggcaccttcgacaccgccgaggatgccgc

SEQ ID NO: 127419 - DNA, 237 bp, Glycine max
cgggccatgaacagaaacaatgaggactaccgttctccagcaattccagctatgaccaaaacactgcttgaggatgtcaagaagattttcaagaccataactggaatcccatttctcatccctacaactggtactggtgcttgggagagtgctctcacaaacacactgtctcctggggatcgaattgtatctttcctgattggccaattcagcttgctttggattgatcagcagcaa

SEQ ID NO: 127420 - DNA, 240 bp, Glycine max
attgaagttgaagtcttgcccttctctcttcaactccaaacacaagagctcatcatccatggctgcctccgtctccactgtcggagctgtcaacagagctcttttgaacctgaatgggtctggacctggggtttcagctcccagttcatccttctttgggagcagcttgaagaaggttattggctcaagggtccccaacacaaagatttcctctggaagcttcaagattgttgctgtaga

SEQ ID NO: 127421 - DNA, 242 bp, Glycine max
tcaacacaaaccaaaactcaagctaaaattctcactctctctctcatctcgagatcatagtatcatattcaatatcatttcataccaaacacatggctttggaagctctcaactcaccaacaacaaccgctccatcttttccctttgacgacccaactattccatgggcgaaacgaaaacgttcaaagcgttctcgcgaccatccttctgaagaagagtacctcgccctctgcctcatcatg

SEQ ID NO: 127422 - DNA, 244 bp, Glycine max
ctaaaacgtccacacattctccgtcgccacaacaacaatggctccgaagaaaggtgtgaaaggttccgttgtagcagcgaagaagaaggttcaggagaaggtgacgaatcctttgttcgagaagcgtccgaagcagttcgggatcggaggcgcgctgccgccgaagcgggacctgacgcggttcgtgaagtggccgaagaacgtccaaatccaacgcaagaagcgcatcctcaagcagaggctc

SEQ ID NO: 127423 - DNA, 241 bp, Glycine max
ctgcacaagctcttgtatcatcatcttctcttaccttctcagcggaggctgcaagacaaagtcttggaccaagatcactccaatctccatttggcttctccagaaaagcctcctttcttgttaaggcagctgctaccccccctgtcaagcaaggatcagacaggcctttgtggtttgcatcaaagcaaagtctttcttacttggatggcagccttccgggtgactatggatttgaccctct

SEQ ID NO: 127424 - DNA, 240 bp, Glycine max
gggagagcttgctcatgggtttgaaggaggtggctgtgtccagtggcagtgcctgcactagtgctagtttggagccttcgtatgtgttgagggcgttgggagttgaggaggacatggctcacacttctattaggtttggaattgggaggttcactacagaggccgagattgatagggcggttgagctcaccgttcagcaggtggagaagttgagggaaatgagtccgctttatgaaatgg

SEQ ID NO: 127425 - DNA, 248 bp, Glycine max
gtcggctcgagctttgcatgccttttcctattcaccatccagtggggtgctggctttgcaacattttggtacccaggagggtcaagaaatagtagagctgccttattgccatggcatgtgttctttggtatctatatctattgcttggctatagccacaactgctactggtattctagaaaaagctacattccttcaggtcaacaacatcatatcacgctattccaatgaggcacttctggtcaattc

SEQ ID NO: 127426 - DNA, 237 bp, Glycine max
attaacacagcgatgtcgttgaaaacgttaacaacctctcctctttcgggaatcactgttttggtccttctcctcgctctccttctcagattttacatcaaattcgacaccgctgagaggttgttcagtgctgaagagctatcattgttcaatggaactgatgaagggttgccaatccttctaggaattcttggatccgtgtttgatgtaaccaaggggaaatctcattatggttca

SEQ ID NO: 127427 - DNA, 235 bp, Glycine max
gtttgttgttgtaactcgttcttcttcttttgttgttctgtgtttgtgtttgttttttctctcacctgaaaatgtcttgctgcggtggtaactgtggttgcggaagctcctgcaagtgcggcaacggctgcggaggctgcaagatgtacccagacttgagctacactgagtcaaccaccaccgagaccttggtcatgggagtggcacctgttaaggctcaatttgagggtgctga

SEQ ID NO: 127428 - DNA, 234 bp, Glycine max
gttgaagtcttgcccttctctcttcaactccaaacacaagacatcatcatccatggctgcctccgtctccactgtcggagctgtcaacagagctcttttgaacctgaatgggtctggacctggggtttcagctcccagttcatccttctttgggagcagcttgaagaaggttattggctcaagggtccccaacacaaagatttcctctggaagcttcaagattgttgctgtaga

SEQ ID NO: 127429 - DNA, 238 bp, Glycine max
gtgcattcaatggccaccacagcagctctatccggaaccatggtgagcacctccttcatgaggaggcaacctatgaccaccacaagcctaaagacattccccaacgttggtgaagctctttttggtctgaaaagtggacgaggtggtcgtgtcacttgcatggcctcgtacaaggtgaagctcataaccccagaaggagaagtggagtttgaatgcccagatgatgttttcattgttg

SEQ ID NO: 127430 - DNA, 236 bp, Glycine max
ggtttacagagaagcgaagaggcgcagcgtagcagtaactcgtggaattgctagcaatggcgaggatcaaggtttacgagctgaggcagaagacgaaggctgatctgttgaatcagctgaaggacctcaaggccgagcttgccttgcttcgtgttgctaaggtcaccggcggtgcacctaacaagctctctaagatcaaggtggtgaggttgaacattgcccaggttttgacggtg

SEQ ID NO: 127431 - DNA, 237 bp, Glycine max
ctgtttcccgccatatatccaataagctttaaccatgtctgcctttgttggaaagtacgcagatgagcttatcaagaatgccaagtacatagccacaccagggaaggggatcctggcagcagatgagagcacgggcaccatcgggaagcgcctagcgagcattaacgttgagaacattgaggccaaccgccaagcccttcgcgagcttctcttcaccgctccaaatgccctccaata

SEQ ID NO: 127432 - DNA, 238 bp, Glycine max
ctggagggcagatcttcccccggataaggaaccattagattggaacaccaggatgaaaatagctgctggggcagcaaaaggattggaataccttcatgacaaagcaaatcctcctgtcatttatagagacttcaaatcatctaatatattacttgatgaaggttatcatccaaagctttcagactttggtcttgcaaagctcggtccagttggtgacaaatcacacgtttccacccgt

SEQ ID NO: 127433 - DNA, 239 bp, Glycine max
  unsure (1)..(239): unsure at all n locations
gctgttcttgcgcgtgaacaagcctcaggtnagccaaaaccatggttaagcataacaatgttatcccaaacggacacttccgtaagcactggcagaactatgtgaagacttggttcaatcagccagcacggaagacaaggagacgattggctcgtcagaagaaagctgtgaagatattccccagacctacggctggacctctcaggcccattgtacatggtcaaactttgaaatacaac

SEQ ID NO: 127434 - DNA, 226 bp, Glycine max
caaaacactcataacacaaagcacaaagcaaagctcatccttgagttaaaaaatggcagcagcttcttccatggctctctcatccccatccttggctggcaaggccgtgaagctgggcccatcagccccagaagtgggaagggtgagcatgaggaagaccgtcaccaagcaggtctcctcaggaagcccatggtacggcccagaccgagtcaagtacttgggccca

SEQ ID NO: 127435 - DNA, 235 bp, Glycine max
gtacgccctcgaagccgtccgcaagggcaacgccgccgtcgggtccgcggcaccgacaatgttgtccacggcgtcgagaagaaatccaccgccaaactccaagactccaggtcggtgaggaagatagtgaatctggacgaccacattgcgctggcctgcgcggggctgaaggccgacgcacgcgtgctcataaacagggcacgtgtggagtgccagagtcacaggctcaccgtgg

SEQ ID NO: 127436 - DNA, 234 bp, Glycine max
cgggagtcgcattgggcggaggtccctttgcgaatgcgtctctgtacgtgggcgatctcgaggggaatgtaaatgaggagcaactttatgatctgttcagccaggtggctcagattgcttcaattagggtttgcagggatcagaccaagcgatcctctcttggttatgcctatgtcaactttgccaacgctcaggacgcatccaatgccatggaacttctgaacttcactcctc

SEQ ID NO: 127437 - DNA, 237 bp, Glycine max
ttgcaatcaaattagttcattctctttgcgcagttccctacctctcctttcaagatgcagatcttcgtcaagaccctcaccggaaagaccatcacccttgaggtggaaagctctgacaccatcgacaacgtcaaggccaagatccaggacaaggaaggaattcccccggatcagcaacgtctcatcttcgccggaaagcagctcgaggacggccgtaccctcgccgactacaacatc

SEQ ID NO: 127438 - DNA, 233 bp, Glycine max
gcaatatttgcccttagcagtaacaaaattgccgtggtcaagtattctctgttgggttctattctttcaaaccttcttctggttcttgggacctctctattatgtggtggcattgcaaacgttggagtggaacaaaaatatgatagaagacaagcagatgtgaactcacttatgctgttgttgggattgttgtgctacttgcttccaatgctgttcaaatacagtggtgcctc

SEQ ID NO: 127439 - DNA, 236 bp, Glycine max
ttgcaatcaaattagttcattctctttgcgcagttccctacctctcctttcaagatgcagatcttcgtcaagaccctcaccggaaagaccatcacccttgaggtggaaagctctgacaccatcgacaacgtcaaggccaagatccaggacaaggaaggaattcccccggatcagcaacgtctcatcttcgccggaaagcagctcgaggacggccgtaccctcgccgactacaacat

SEQ ID NO: 127440 - DNA, 236 bp, Glycine max
gtatgttttaccatctctacaaccaggtggctaccaacacactggagagagtggctcctctcactcatgcagttgggaacgtactgaaacgtgtatttgtgattggattttcaattatagtctttggtaacaagattagcacccaaactggtataggaacagccattgcaattgctggagtggcactctactcgttcatcaaagccaggatggaggaagagaagcgacaagcgaaa

SEQ ID NO: 127441 - DNA, 251 bp, Glycine max
ccgcatcctcgccatggaagaggccgtcacccagggcaagcctctgaacaaggagcaggaagaggttctccgctccaaaccctccgtccttgctctcatcgacgagctcgagaagctccgccagcctctcgcaccgccctctccgaagagctccaaaacaacggcacctcctctcaaaactctcgcgagaccgagaccgagaccgaaaacgaaaccctagctgagagctccggttcggttgagccgacacg

SEQ ID NO: 127442 - DNA, 248 bp, Glycine max
attatcattcacttcatcattcatctcctgtaccagagtctttcaccgctggaaatgcaacactcttggagcatcttattatgacagtaatcattggaacccctatccttggggcatctttgatgggatatgatcagcaagcttgatatatggctatgttttgatttttgatttcctgagatgcttgggccactgtaacgttgaagttgttcctcatcaattgttcgagaaactcccatttcttagat

SEQ ID NO: 127443 - DNA, 242 bp, Glycine max
taacaacagaacacacagctcttactttcttccgccatattccacaagaactctccaaagatcctccttcccacgagattctttggtgggaaaaatccaagaggtttgaaatttgaaggcagggaagaggattatttcaatgcaccaggaagaaaccatctctttgttccagggccggttaacattccggaccagatcatccgggccatgaacagaaacaatgaggactaccgttctccagc

SEQ ID NO: 127444 - DNA, 243 bp, Glycine max
aaatcgagcgattcggctcacggctcgaggtgagggccttccatggcttccgcttgtgacttcctctgcaattacagcagttgccatactctacgccgagttccgggcagaagaatggatcaggaggtgttttcttagtggaaggaaattgagggtgaaaaaggagagagcagcaattggaggacgatcgatgggcactacagtgtgcgcagttgctgagcctgacagacctctatggttccc

SEQ ID NO: 127445 - DNA, 239 bp, Glycine max
gttatcttctagtatttttcaagtaacttaaggtttcaaacctaggaagttggaagtcatggcagcaacattgatggcagcaacaagttctggcactcttaaagcaactcctttcctaggccaggcaagggtgccaatgccaatgctcttagggatgttgtttccatgggaactgggaagtacaccatgggcaatgatttgtggtatggaccagacagagtgaaatacttgggaccctt

SEQ ID NO: 127446 - DNA, 248 bp, Glycine max
gtcgagtgcaattgcagttaaaagccttagccttccctacaactccaaacataaagacatcatcatccatggctgcctccgtctccactgtcggagctgtcaacagagctcttttgaacctgaatggttctgagctggagcttcagctcccagttcagccttctttgggaccagcttgaagaaggttattgcctcaagggtccccaacagcaaggtttccggtggaagcttcaagattgttgctgtag

SEQ ID NO: 127447 - DNA, 250 bp, Glycine max
ataatcacttccccacttcccctgtaaatcacgtttagttcgcacaaggttttaaaaaatggctgatgctgaggacattcaacctcttgttgttgataatggaactggaatggtcaaggcgggttttgcagtgatgacgctcctagggccgtgttccccagtattattgggcgaccacgccataccggtgtaatggttgggatgggtcagaaggatgcttacgtgggtgatgaagctcaatcaaaaaggg

SEQ ID NO: 127448 - DNA, 242 bp, Glycine max
cgttttacctcgccacgaccctaaacccaaacctgaaacacccgctgaaaaaccacccaaattttaccctgctgatgatatcaagaagccccttgtcaacaagcacaaacccaaacccgctaagctagggctagcattactccgggaacagtgttgattcttcttgctggtagatttaagggaaagagggtagtctttttgaagcagcttccttctggattgcttcttgtaactggtccttt

SEQ ID NO: 127449 - DNA, 234 bp, Glycine max
gccttagccttccctacaactccaaacacaaagacatcatcatccatggctgcctccgtctccactgtcggagctgtcaacagagctcttttgaacctgaatggttctggagctggagctcagctcccagttcagccttctttgggaccagcttgaagaaggttattgcctcaagggtccccaacagcaaggtttccggtggaagcttcaagattgttgctgtagaagagaaga

SEQ ID NO: 127450 - DNA, 231 bp, Glycine max
aagaaaagcgatgtttatagctttggagttgttcttttggaaataatcacaaaccaaccagtaatggaaaggaatcaagaaaagggtcacataagtagaagggttaggtccttgattgagaaggggatatcagggccatagttgactcaaggttagaaggagattatgacattaactcggcttggaaagccttagaaatagcaatggcttgtgtttctaaaaatcccaacg

SEQ ID NO: 127451 - DNA, 239 bp, Glycine max
aattacaccacgcttctaaattctgagaatgaattcgtaagatcgaagcaatagcctttttctctgccgccactggtttcgatcccacacccacaaacgcaaaccctccatcctttgaatgtcttgcgttttcctttcactacctcattcctaactcacacacacacaacgggtgatatcaatgtcgactcctgctaggaagaggctcatgagagatttcaagaggctgcaacaagacc

SEQ ID NO: 127452 - DNA, 241 bp, Glycine max
agcagagcaattcctctgctctatgctgggggatgattctgagattaacttggctgttgttagagacgttctttgtcagtgtggatatgatattgaaacggcctcagatgtattgcttgatttgctgcttccacaaatgacaaaccgaatactgatagacatcctaactacagagtggacaacattgatgatgagaggttctttgctgaccccaatgacagtttgatagacaggagatcag

SEQ ID NO: 127453 - DNA, 239 bp, Glycine max
gaagaacaagtagttgagaactaagaaggagaagcaaatggcttcctcaatgatctcttccccagctgttaccactgtcaaccgtgccggtgccggcatggttgctccattcactggcctcaagtcatggctggcttccccaccagaaagaccaacaatgacattacctccattgctagcaacggtggaagagtgcaatgcatgcaggtgtggccaccagttggcaagaagatgtttga

SEQ ID NO: 127454 - DNA, 241 bp, Glycine max
agcacgaaacactttgagatcatcttcaatcatcattaacacattccaagacttggatggagaagccattgatgtccttaggatcaagaaccctaacatatataacattggcccacttcacttgattgataggcattttcttgagaaagaaaagggcttcaaggccagtggatcaagtttatggaaaaatgattcaaaatgcttagcatggctagacaaatgggaacctaactcagtcata

SEQ ID NO: 127455 - DNA, 240 bp, Glycine max
cagagtgagaaagagaaagagagaattcgtaaaccctaatttcggaaagatcggcgatgactgcctccaaggatcgcgagaacttcgtctacatcgccaaactcgccgagcaggccgagcgttagaagagatggtggaatcaatgaagaacgttgcgaatctcgacgttgaactgacggtggaggagcggaatttgctttctgttgggtacaagaatgtgattggtgctcgtagacgtcc

SEQ ID NO: 127456 - DNA, 236 bp, Glycine max
gtgaatggctcccaagggtttaacctttctggctgtgttaatatgcgtttcagcactgtcactgagtccttctgttgcgggggaagggcaaaataatggccttgttatgaacttctacaggaatcatgccctcaggctgaagacatcatcacagaacaagtcaagcttctctacaagcgccacaagaacactgctttctcctggctcaggaacatcttccatgactgtgctgttca

SEQ ID NO: 127457 - DNA, 244 bp, Glycine max
ctgtcgtcaaaaacctcctcagcctccacatcctcgtcgactacttcaacaacagaaagctccaccagatccccaacggcaccacgctctccaccactctctaccaaaccaccggcaatgccaacgcaacgtcggctccgtcaacatcaccgacctcaaaggcggtaaggttggcttcagctccgctgctcccggctccaaactcgactcctcctacaccaaatccgtcaaacaaatcccctac

SEQ ID NO: 127458 - DNA, 240 bp, Glycine max
atgcttcaacatagatatttagtcaggcttcttgggttttgcttgcaaggagaagagaagatacttgtttatgaatatgtgcccaacaaaagtctcgactatattctctttgatcctgaaaagcaagggagttggattgggggagacgttacaagattattggagggattgctcgaggcattcaataccttcatgaagattctaggcttagaattatacatcgtgatcttaaagctagta

SEQ ID NO: 127459 - DNA, 241 bp, Glycine max
cttgctctacctctgccactttctgagtacaatacaacactgccatggctgcctcagtctccactattggagctgtcaacagagctccactgagcttgaacagctctgaagctgcagattcggtcccagttcagccttctttggcacaatcttgaagaaggttactgcctcatgggtccctaacgtcaagatttgttctggatgtttcaaaatcgttgcggcggagacagagattgatgac

SEQ ID NO: 127460 - DNA, 238 bp, Glycine max
gcgggttactgtctgttcaagctaccatctctctctctctgtcttagtgcctccgtgccagaagttaaaatggcccaagaaactttcctattcacatctgaatcagtgaacgatgggcaccggacaagatctgtgaccagatctccgatgctgtgctcgatgcatgcttggagcaggaccctgacagcaaggttgcctgtgatacctgcaccaagaccaacatggtgatggtttgcgg

SEQ ID NO: 127461 - DNA, 238 bp, Glycine max
atcaaggacaataggatgggatcaatacccacacgggcgttggggtgattcctgtaatccatcatatggtgcattatctgattatcagttcatgcggccacgtgcacgggacaagaagcttgttgaagaatgggcagttcccttgaaaagcattgaagatatatatgagaggtttagactgtattgtcttggaaagttgagaagcaatccttggtcagaactagatggtcttcagcca

SEQ ID NO: 127462 - DNA, 231 bp, Glycine max
ttttcatgtcagatccctttacaacaagccttaattgttgattcattaatcgtagattagggcttttttcattgattacttcagatccgttaaacgtaaccatagatcagggcttttcatgaattacttcagatccgttaaacaacagccttattttttatacttctgtggtttttcaagaaattgttcagatccgttgacaaaaagccttattcgttgattctatatcgt

SEQ ID NO: 127463 - DNA, 231 bp, Glycine max
atcgtcccactttcttctccttttagggtttcctttttgtttctcctttccagatctgcatcttccattttttaggattaagcggtgagattcgtgaatctgagaaatgtcggattttctcgggaggagaatgtttacatggcgaaattggcggagcaggccgagcgttacgaggagatggttgagttcatggagaaggtagcaaagactgtggaggttgaggagttgagg

SEQ ID NO: 127464 - DNA, 235 bp, Glycine max
ggctgaagacagtattggtccagaagtagaaaagttggtggcttctcttccagatggaggtgttcttcttctagaaaatgtgaggttttacaaggaggaagaaaagaatgatcccgacatgcaaaaaagcttgcctctctggcagatctgtttgtgaatgatgcatttggtactgctcacagggcacatgcatcaacagagggtgtcactaaatacctgaagccatctgttgctg

SEQ ID NO: 127465 - DNA, 234 bp, Glycine max
ggcaaatttgtttcaccatctgaagtctctgtggacaccactgaaggtggaaatactgttgtgaaaggcaagcatattataattgccactggctcggatgtgaaatcattgcctggcgcactattgatgaaaagaaagtcgtatcatcaacgggggctcttgctttgactgaaatccccaagagactcgtagtcattggggcaggctacattgggctggaaatgggctccgtat

SEQ ID NO: 127466 - DNA, 241 bp, Glycine max
agcagagcaattcctctgctctatgctgggggatgattctgatattaacttggctgttgttagagacgttctttgtcagtgtggatatgatattgaaacggcctcagatgtattgcttgatttgctgcttccacaaatgacaaaccgaatactgatagacatcctaactacagagtggacaacattgatgatgagaggttctttgctgaccccaatgacagtttgatagacaggagatcag

SEQ ID NO: 127467 - DNA, 242 bp, Glycine max
attggaattgagtggtggtactagtactaattgtactaccccactttggggttgttcatcggtttgtggaaggagagaggagatggaagatgctattgctgttaagcctcatctttttcaagtccttcaaggatggtaagggatgatcatgtgagtgaaaacacaaaatactcaccaacccatttttttggtgtctatgatgggcatgggggcattcaggttgccaattactgccgggaaca

SEQ ID NO: 127468 - DNA, 239 bp, Glycine max
cactcataacacaaagcacaaagcaaagctcatccttgagttaaaaaatggcagcagcttcttccatggctctctcatccccatccttggctggcaaggccgtgaagctgggcccatcagcccagaagtgggaagggtgagcatgaggaagaccgtcaccaagcaggtctcctcaggaagcccatggtacggcccagaccgagtcaagtacttgggcccattctctggcgagccccgtc

SEQ ID NO: 127469 - DNA, 235 bp, Glycine max
gtgagttggagtacttcacagacactaccacactcttcgtagttgagctctttttcattggttgggccgagggtagaaggtgggctgatatcatcaagccaggctgtgtcaacactgacctatctttcccaacaacaagctcacaggaactgatgttgggtacccaggtgggctttggtttgatccacttggctggggaagtggttctcctgagaagatcaaggagttgagaaca

SEQ ID NO: 127470 - DNA, 238 bp, Glycine max
agcacgaaacactttgagatcatcttcaatcatcattaacacattccaagacttggatggagaagccattgatgtccttaggatcaagaaccctaacatatataacattggcccacttcacttgttgataggcattttcttgagaaagaaaagggcttcaaggccagtggatcaagtttatggaaaaatgattcaaaatgcttagcatggctagacaaatgggaacctaactcagtca

SEQ ID NO: 127471 - DNA, 240 bp, Glycine max
gtcgaccccgacctcaacctcgtcaaaggccgcggcggcgccctcctccgcgagaagatggtcgaggccgcctccgacaagttcgtcgtggtcgtcgacgacaccaagctcgtggacggcctcgcggaagcgggctggccatgccggtggaggtggtccagttctgctggaagtacaatctggatcggcttcaggagcttttcaaggaagaaggtgtggaagcaaaattgagattggagg

SEQ ID NO: 127472 - DNA, 246 bp, Glycine max
cttgaattttcttcatccttctctgttctcctagaacttgattacttgaacattccctatgacagatgaggtggttcttctggatttctggccaagtccatttgggatgagggtcaggattgcacttgtgaaaagggtatcgaatatgagtacaaagaagaggacttgaggaacaagagtcctcttctcttacaaatgaacccggttcacaagaagattccggttctcatccacaatggcaaaccc

SEQ ID NO: 127473 - DNA, 230 bp, Glycine max
atgaaatatgacaatccagaacaaattcttgaagagtttttccccctccggctggagtattatgagagaaggaagaaccatatattgaacaaccttgaacgacttttgctgattttggcaacaaagctaggtttatattaggggttgtgaatggagaaattattgtaagcaacaggaagaaagctgatttgttgattgagctgcagcagaaaggtttcactcccatgcct

SEQ ID NO: 127474 - DNA, 243 bp, Glycine max
aaatatgcgtctctgcaacaacatgttcaccaccacctccttgttcttcacatcatcctcatcatcttcttcaatcagttgactcttcgttcctccctctattctttcggatggagcccatggacatcgttgggaaggccaaggaagacgcttctcttcctaaagcgacaatgacgaaaattattaaagagatgttgcccccagacgtgcgtgtcgccagagatgcacaggatttattgatcg

SEQ ID NO: 127475 - DNA, 240 bp, Glycine max
aactgaaccaaatcatcacacacacatactaagaagcaacaattcttctacaatggatctcctccttctggaaaagaccctcataggtctcttcctcgctgcggtggtcgccatcgccgtctccacccccgcggccggaaattcaagctcccaccgggcccactccccgtcccaatcttcggcaactggctccaagtcggcgacgacctcaaccaccgcaacctcaccgatttggccaaa

SEQ ID NO: 127476 - DNA, 246 bp, Glycine max
attggaggctaagatcagtaaccccactttgcttcctcgttttctttgcgtgcaaagcagattcaactggaacttttacccggttcctcatttcccgggctacagaaatcatcgtatctaatatccaaaggctagctttcttgcttacaggccatcatgcattgctgctgcagccatactcactgcagctaatgaaattcctaattggtctgtggttaagcccgagcaagctgagtcctggtgtca

SEQ ID NO: 127477 - DNA, 239 bp, Glycine max
attaacgtttcttctcttcactctgcccgctgcatcaatggcttacagagaagaaactttcgaacccaatgagggagataaaagtgcagaagctcgtcctcaatatctctgttggcgagagtggagatgtctcaccagagcctccaaggtgttggaacaacttagtggccaaaccccagtgttttccaaagcaaggtacactgttcgttcctttgggattagaagaaatgagaagatgc

SEQ ID NO: 127478 - DNA, 208 bp, Glycine max
ctttctagttcgtgttcttcgtcgcaaatccgaagtaagatctctacttgtttttctctaggtttttcgggatggcgtcgaagcgaattttgaaggagcctaaggatttgcagaaggatctccaacatcttgcagtgccggtcctgttcatgaagatatgtttcattggcaagctacaattatgggtactccagacagtccctatgct

SEQ ID NO: 127479 - DNA, 256 bp, Glycine max
cgtcgctccgcaccagtttcaccgcacgaatatcttgttgtttggagcgatccgagaaaaactctgtaaacatgttggtttaccaggatctccttacaggtgatgagcttctctctgactccttccgttacaaggaaattgagaatggaatgctgtgggaagttgaggggtagtgggttgttacaggagcagttgatgtagacattggtgcaaacccttctgctgagggtggacgagaagatgagggacttgatga

SEQ ID NO: 127480 - DNA, 254 bp, Glycine max
ggtcaaatcattcctactgccaggagagtcttctatgcttcccagattactgccaaacccaggcttcttgagcctgtctacctggttgaaatacaggctcctgaacaagctcttggtggaatctacagtgttcttaaccagaagcgtggacacgtgttcgaggaaatgcagaggccaggtaccccactatacaacatcaaggcatacctccctgtcatcgagtcctttggtttctcgagcacaatgagggctgc

SEQ ID NO: 127481 - DNA, 250 bp, Glycine max
tgatcgtggtagtcgtggaatatatttcattctctcctctatggtgttcaatgtagtacccaccatattgagagatatctatggtgacaggtatactggcctacaaatttggagctccctttgcactgattacttccttatcagttgcggcttatgtcgcttttacactgactatcacacagtggaggactaagttcaggagagccatgaataaggcggataatgatgctggtacaagggttatagattc

SEQ ID NO: 127482 - DNA, 245 bp, Glycine max
cccctttgccgctgttgttgttgctgcaccaccgaacaacttcccctgtaaatcgcgtttcgtttgtgcaaggttttaaaagatggctgatgctgaggacattcaacctcttgttgttgataatggaactggaatggtcaaggctggttttgcaggtgatgatgctcctagggccgtgtcccgcagtattatggggagaccacgccatactggtgtaatggatgggatgggtcagaaggatgctt

SEQ ID NO: 127483 - DNA, 256 bp, Glycine max
tgcggctataggttctctcaatgttccacgttctgcttcttcccgttcatcctttgtgggaagataaagcgttccacgcagcctttccttctctgcatcacaactttgtggagacaagattcccacagattcagttttattggcaccaaaaataggtcgcagtccagttatcgttactcctaaagcagtttctgattcccaaaactcacaaacgtgccttgatcccgatgctagcagaagtgtgcttggcattata

SEQ ID NO: 127484 - DNA, 254 bp, Glycine max
ccgcagtcatgggcaaggtcaagatcggaatcaacggatttggaagaattggccgtttggtggccagggtggctctgcagagagacgatgttgaactcgttgccgttaacgatcctttcattaccaccgattacatgacatacatgtttaaatacgacagtgttcacgggcactggaatcatcacgatgtcaccgttaaggatgagaagacccttctcttcggtgacaagccagtcactgtttttggacacagg

SEQ ID NO: 127485 - DNA, 253 bp, Glycine max
gttgagaactaagaaggagaagcaaatggcttcctcaatgatctcttccccagctgttaccactgtcaaccgtgccggtgccggcatggttgctccattcactggcctcaagtccatggctggcttccccaccagaaagaccaacaatgacattacctccattgctagcaacggtggaagagtgcaatgcatgcaggtgtggccaccacttggcaagaagaagtttgagactctttcctacctgccagacctt

SEQ ID NO: 127486 - DNA, 254 bp, Glycine max
tcctaacaaacttatgcaagttacaactttggatagatatgtgaagtaccatgtgcaggagtttgagaaagcttatgcaatcaagtttcctgcttgctctattgctgccaagaggcacattgattccagcaccacaatcttagatgttcacggagtgggccttaagaactttacaaagtctgcccgggaacttattacccgattgcagaagattgatggtgataattaccctgagactctttgccaaatgttta

SEQ ID NO: 127487 - DNA, 116 bp, Glycine max
gttctatggcaaggttgtttcagggtcagatggtaaaaaacattggattggaggagaagatataaaagctgtcgcacatgatgttcccataccaggatataaaactaagactacaa

SEQ ID NO: 127488 - DNA, 254 bp, Glycine max
ggcactgatagctcctgcagcattgattgctcaaaatgctggaatagaaggtgaagttgttgtggagaaaataaagagtggtgaatgggaggtcggttacaatgctatggtagacaggtatgagaatttagtggaggatggagttatcgaccctgccaaggtaacaaggtgtgcattgcagaatgctgcttcagttgctggaatggtgttgaccacacaggccattgtggtggaaaaacctaagcccaaggcac

SEQ ID NO: 127489 - DNA, 251 bp, Glycine max
gctgctcgcagcttgcgttgtgtagccattgcatacagatcctatgaattagacaaagttccatctagtgagcaggatttagaccaatggtccttaccagaacatgagcttgttttgcttgctattgttggaataaaggatccttgtcgccctggtgtcaaagatgctgtaaaagtatgcactgatgctggtgttaaggtacgcatggttactggagacaaccttcaaacagcaaaggcaatagctttgga

SEQ ID NO: 127490 - DNA, 249 bp, Glycine max
cgatctttgaagtaagaagagtgtgttgtgttgaagtatcaaagatgttgattggttctctcttaaacaggcgtcctaagatcaaggggactgtggtgttgatgaccaagaatgtgttcgacgtcaacgacttcatggcgactactaggggcggaccagccgctgttgctggcggcatcttcggtgccgcccaggacattgatggtggaatagttgatggtgctacggccatcttcagccgtaacattg

SEQ ID NO: 127491 - DNA, 254 bp, Glycine max
gacaaaaatcatctggagctgtgccatttggaacaatgtttgccctgatctttttatggtttgggatctcggttccacttgttttcgatggtgcctatgttggttttaagaagcctgcaattgagaatcctgtgaagacaaacaaaattccaaggcagatccctgagcaggcatggtacatgaatccagtcttttcagttctgataggaggaatccttccatttggagctgttttcatcgagcttttctttatc

SEQ ID NO: 127492 - DNA, 254 bp, Glycine max
tgcagaactttgtttcccaacctccattacctccgcttctacctcgctaccatgatcattcctgagaagaaccgcaaggagatctgcaaatacctcttccaagagggagtttgctttgcgaagaaggacttcaatttggcgaacaccctgagattgacgtgccgaatctgcaggtgattaagctgatgcagagtttcaagtctcgcgagtatgtgagggagacttttgcttggatgcactattactggttcctc

SEQ ID NO: 127493 - DNA, 253 bp, Glycine max
ggataagattaaagattcaacaatggcctctgcttctgctactcttctcaagtcatctcctgttcttgacaagtgcgagtgggtcaaaggccagacccttcgccaacctctcgtgagatgtaacccttcctcagcatcagctctcaccatcaaagctgcttcctatgctgacgagctcgtcaaaaccgccaaaacagtggcctcaccggggcgtggtattttggcgatggatgagtcaaatgcaacctgcggg

SEQ ID NO: 127494 - DNA, 245 bp, Glycine max
cgtttttcattgtgcattattcaatggccaccacagcagctctatccggtataatggtgagcacctccttcatgaggaagcaacctatgacgaccaagagcctaaagacattccccaacgctctttttggtctgaaaggtggacgaggtggtcgtgtaacttgcatggcctcgtacaaggtgaagctcataaccccagaaggagaagtggagtttgaatgcccagatgatgttttcattgttgac

SEQ ID NO: 127495 - DNA, 249 bp, Glycine max
gcaagctgcgggatacaatcaaatcttttggctgtgtgcagggaattctgatctcaaattgtccacggctatgcagcgaaattcttgacaagttgaaccacccttttctacttgcattatctatatgcttccttccagaccaaaactcacgtttgtttgattactaattattgtcctggaggagaactattccaacttcttgatcggcaattctgagttacccaattccgaggagaactatgtcctgaa

SEQ ID NO: 127496 - DNA, 244 bp, Glycine max
gaacaagtagttgagaactaagaaggagaagcaaatggcttcctcaatgatctcttccccagctgttaccactgtcaaccgtgccggtgccggcatggttgctccattcactggcctcaagtccatggctggcttccccaccaggaagaccaacaatgacattacctccattgctagcaacggtggaagagtgcaatgcatgcaggtgtggccaccagttggcaagaagagtttgagactcttt

SEQ ID NO: 127497 - DNA, 251 bp, Glycine max
atcaatactattttcttgtcgttgagaagcttcgcgaacgaaagcaaagaaccctagaccgtcacagaaccattccatagccatgtctggtgttggccctctttctcaggattggcgcgctgtcgtcctccgcaagaaggctcccaccgccgccgccaagaaggacgagaaagccgtcaacgccgcccgccgctctggcgccgaaatcgaaaccctaaaaaagtataatgctgggacaaacaaagcagcat

SEQ ID NO: 127498 - DNA, 245 bp, Glycine max
gtggaagaaggagttgttgccttgaatcagcactttgtgcatgtacatggcataggtggaggaagttggtgctggtacaaaatccggtgtcttatggagaattctggctataaggtctcatgcatagacctcaaaagtgctggaattgatcaatctgatgctgattccgtgctatcctatgatgattacaataaaccactaatggatttcatgtctgatttgcctgagaatgaacaggttatatt

SEQ ID NO: 127499 - DNA, 249 bp, Glycine max
cttttgtgaaggcctaggattgctgagtcaaacttgaattgaaggtgaagaaggagatggcagcaacttcttccttgtgttcatcgaccctccaatcccaaatcaatggattctgccttcacaaaacctctctttcccatcctcgttccctcactttctccaggaagaaaatttcaaccacagtgaaggctacatctcgtgttgacaagttttcaaaaagcgatatcattgtttctccatccattcttt

SEQ ID NO: 127500 - DNA, 239 bp, Glycine max
aatggcatggattctcgggcttggaccgagtttaggacttgttcgtgttccgggaatagggttagtatacacaaagcttgcaagtggagtaccccacatcttttcacatttcatcacaaacctaccagccatccattctgttgttgtttttgtatgtgtgaagtatctccctgtctacactgtcccagaagacgaaagattccttgtaaagagaattggacccaagaacttccacatgt

SEQ ID NO: 127501 - DNA, 244 bp, Glycine max
agcaattggaggacgatcgatgggcactacagtgtgcgcagttgctgagcctgacagacctctatggttcccaggcagcacccctcctccatggcttgatggcactctacctggagacttcggctttgaccctcttggtcttggatctgacccggagagtctgagatggaatgttcaggcagagctagtgcactgcagatgggcaatgttgggtgctgctggcattttcattccagaattccta

SEQ ID NO: 127502 - DNA, 246 bp, Glycine max
aatctttcgaagttcgtttgcgtgtgttgtgtggtcagtcaccgatggcagcaccacctgcgagggcacgtgccgattacgattacctcatcaagcttcttcttattggcgatagcggtgtgggaaagagttgtctgcttttgcgattttctgatggttccttcacaaccagttttatcaccaccattggcattgattttaagataagaaccattgaacttgatggcatacgcattaagttacaat

SEQ ID NO: 127503 - DNA, 246 bp, Glycine max
gtgctacttgggtgtggagctacttaaatctaataacgaggggactgaatctttgctcaagtccttgtggcatcactcagatgcaatattatgctgcactctaaaggcattgccagtgtttactttctcgaaccaggctgggcttgacatgctggagaccaccctagttgcattacaagatatacctttggagaaaatatttgatgatcatgaacgaaaaattctcttttcagagtttccccagat

SEQ ID NO: 127504 - DNA, 234 bp, Glycine max
gtcctgagctactcacaatgtggtttggagaaagtgaggctaatgtgagggaaatttttgacaaggctcgcggttctgctccatgtgtcctattctttgatgaacttgactctattgcaactcagaggggtagtagtgtcggagatgctggtggtgctgctgacagggttttgaaccaactgcttacagaaatggatggaatgtcggcgaagaaaactgtgttcatcattgggg

SEQ ID NO: 127505 - DNA, 217 bp, Glycine max
  unsure (1)..(217): unsure at all n locations
cgaagcgctgacgccgagtcggctcctatgccgctagctatgccctgcttggtcccccggcacggtggaggtcccgtagcgcgtcatgagcaccgggctaagaggcggttcagcaactcaagcgaaccgccctnacttactacaacataaggacagaagggagaaggttgtgaaggtggcctcgttatccacacctccggtcagatnaatggaggac

SEQ ID NO: 127506 - DNA, 242 bp, Glycine max
tcattctccatacctcaacgaagaggttaaagagacggcaacactttgctgtccgccttgaccgagcagagcttcgtcttggccctcgattttgccctaaagtactctcagtcacaacagacaccgtacgtcgtcgtcgtcgtcatcaatggcaccgaagcagaccaaggctgagaagaagatcgcttacgatgcgaactgtgcgacctaatggaggagtacggccagatcctcgttgtgaa

SEQ ID NO: 127507 - DNA, 241 bp, Glycine max
gtcacatgctcccttcaggctgatcttaaggacttggctcacaagtgtgttgatgctaccaaaattgcaggattcgcccttgccacctctgccctcgttgtctctggggcaagtgctgaaggtgttccaaagaggctaaccttcgacgaaatccagagcaagacctacttggaagtgaaggggacaggaacagcaaaccagtgcccaacaattgatggtggattggactcatttgccttca

SEQ ID NO: 127508 - DNA, 233 bp, Glycine max
cactatttaccccattttctctaaatccaaacaggccccaaaagaaagagagggaaaattctcttccatggcctcttcacgccctgccaatgtgggaatccttgccatggacatctacttccctcccacctgcgtcacccaggatgctttggacggtcatgatggggtgagcaaagggagatatactattgggcttggacaggattccatggccttctgctctgaggttgaag

SEQ ID NO: 127509 - DNA, 289 bp, Glycine max
cacgcttcggctcgaggacgagaagcttctgtcagtcttccgcgaaggtgtgaagtatggtgctggaattggccctggtgtctatgacatccactccccaagaataccaccaactgaagaaattgctgacagaatcaacaagatgctggcagtgctcgagaagaacatcttgtgggtgaaccctgactgtgggctcaagacccgtaagtacactgaggtgaagccagccctcacaaacatggttgccgcagcaaaactcatccgcaacgaacttgccaagtgaatggta

SEQ ID NO: 127510 - DNA, 175 bp, Glycine max
cctcgatcacttgtgggatgacaccctcgccggtcctcgcccggagaacggcctcggcaagctccgaaagcaccactccttcgctttccgatctgcctccgccaaggaatcagacagcggaagcgcgaaatcgtacggtgaggattcgcccaagaatgcggtgagagtgacgcga

SEQ ID NO: 127511 - DNA, 269 bp, Glycine max
ccacacaccacacacatagtagctattatactctctagagtaattgcggaatctgctagaattttctaataatggcgaaagacgttgagcaggtcacagagcaaggtgaatactccgcgaaggactaccatgaccctcctccggcaccgttgatcgacccagatgagctcacaaagtggtccttgtacagagccgccatagctgagttcatagcaacactcctttttctttacatcaccgtgttgaccattattggctacaagagacag

SEQ ID NO: 127512 - DNA, 267 bp, Glycine max
gcaagctcatcctagagttttaaaaatggcagcagcctcctccatggctctctcttccccatccttggctggcaaggccgtgaagctgggcccatcagcccccgaagtcgggagggtcagcatgaggaagaccgtcaccaagcaggcctcctccggaagcccatggtacggcccagaccgcgtcaagtacttgggcccattctctggcgagcccccgtcctacctcactggcgagttcccaggtgactacggctgggacactgctgg

SEQ ID NO: 127513 - DNA, 266 bp, Glycine max
cagcacaaagcgggttactgtctgttcaagctaccatctctctctctctttcttagtgcctccttgccagaagttaaaatggcccaagaaactttcctattcacatctgaatcagtgaacgaggggcaccctgacaagctctgtgaccagatctccgatgctgtgctcgatgcatgcttggagcaggaccctgacagcaaggttgcctgtgaaacctgcaccaagaccaacatggtgatggttttcggagagatcacaaccaaggc

SEQ ID NO: 127514 - DNA, 271 bp, Glycine max
aatttccatatcccaacggatcgcaatatagcaagtagcgaacatgatttcttccgtgtcctttccagcgtctcttcccgccgttaacttctccggcaacgcgtggcttctccgtcgtgccgcgtcaaatccaggcctatagttgccttcgccaccgccaccgccaccgcggaagctcgctcttcctggacggagcaaccgagaccttcgtatctgaactcctcttgctcttcgctctacgaggttctcggcatccccgccggcgcctcta

SEQ ID NO: 127515 - DNA, 275 bp, Glycine max
gctcgagccgtttgcaaaacaaaagccatagattgttacttctcttcgccttttgctatgcaattgtcaccaaacaattcttgcttagctctcacaagcaagcattatcaacaatgaagaaaattgtgttaaaggtggacttacatgatgacaggatcaagcgaaaagctatgaagacagcatctggcctttcgggggttcaatcagtttctgttgacattaatgacaagaaaatgaccttattgggggatgttgatccagtgagtgcagtgtca

SEQ ID NO: 127516 - DNA, 286 bp, Glycine max
acgtaatctgctcatactgctctagggatgagctctcatgtgctactctcttcaactccaaacacaagacatcatcatccatggctgcctccgtctccactgtcggagctgtcaacagagctcttttgaacctgaatgggtctggacctggggtttcagctcccagttcatccttctttgggagcagcttgaagaaggttattggctcaagggtccccaacacaaagatttcctctggaagctgagggattgttgctgtagaagagaagaaagagattgaagagac

SEQ ID NO: 127517 - DNA, 266 bp, Glycine max
cgttgaaactgtactgtgagagatcaaacctgaaagatggtcatacagtgcttgatgtgggatgcggttggggatcgttggctctatacattgccaagaattacactaactgtagggttacaggaatctgcaattccacaactcaaaaggcttatattgaggagaagtgtagggatcttcagctgcaaaatttgaatattatagttgctgatattagcacatttgaaatggagacttcttatgacagaatattttccatagaaatg

SEQ ID NO: 127518 - DNA, 266 bp, Glycine max
caagtttatcaagaagtctgtgcttcttgtcattctatgtctttgatatcataccgtgatttggttggtgttgcttatactgaagaagaggtaaaggctatggcagctgagattgaggtggttgatggccctaatgatgagggcgagatgtttacactccctggtaaactcagtgatcgctttccccagccatatgcaaatgaagcagcagctaggtttgctaatggaggagcctatcctccagatctaagtcttgttaccaaagc

SEQ ID NO: 127519 - DNA, 250 bp, Glycine max
ggcatcgttttcatttttgtgttttgttttttgttttttgaaaaagggtcttccccgccaccaaaagctagctagcgctggaaaaatgccgagggaaatcatcactctccaggttggccaatgtgggaatcagatcggcatggagttctggaagcagctctgcctcgaacacggcatcagccaagaaagcatcctcgaagacttcgccactaaggggggtgaccgtaaagacgtgttcttctaccaagct

SEQ ID NO: 127520 - DNA, 268 bp, Glycine max
gtggatacctaggcacccagagacgaggaagggcgtagtaagcgacgaaatgcttcggggagttgaaaataagcgtagatccggggattcccgatataggtcaacctttcgaactgctgctgaatccacgggcaggcaagagacaacctggtgaactgaaacatcttagtagccagaggaaaagaaagcaaaagcgattcccgtagtagcggcgagcgaaatgggagcagcctaaaccgtgaaaacggggttgtgggagagctataca

SEQ ID NO: 127521 - DNA, 271 bp, Glycine max
gcgcctctcatccgtgatgggcgtatggagaagttctactgggcaccaacaagggatgaccgcattggtgtctgcactggaatttttcgcaccgattcaattcctgaacaggacgttgtcaagattgttgacaccttccctggccaatccattgatttctttggtgcactgagggccagagtatatgatgacgaagtgaggaagtggatttctggtgttggtgttgacggcattgggaagaagcttgtgaactcaaaagatggacctccaa

SEQ ID NO: 127522 - DNA, 224 bp, Glycine max
tctcgagcgaatcggctcgagcattcatctcctgtaccagagacttttactttctggaagtgcaacacttttggtccaacttattatgacggtaatcattggaatccctatccttggggcttctttgatgggatatggatcagcaagcttgatatatggttatgtcatgatttatgatttcctgagatgcttgggccacagcaatgttgaaattgttcctcatc

SEQ ID NO: 127523 - DNA, 265 bp, Glycine max
gcgcctctcatccgtgatgggcgtatggagaagttctactgggcaccaacaagggatgaccgcattggtgtctgcactggaatttttcgcaccgattcaattcctgaacaggacgttgtcaagattgttgacaccttccctggccaatccattgatttctttggtgcactgagggccagagtatatgatgacgaagtgaggaagtggatttctggtgttggtgttgacggcattgggaagaagcttgtgaactcaaaagatggac

SEQ ID NO: 127524 - DNA, 265 bp, Glycine max
aaaagataaaatttcctatgatgaattgtctaattattggagctatacaaatgaagtcaaaagaaacaaattgagcaataaatttgtaaatagggcaaaagtaatggataaggaattaatttcactggatatattagaaaactgaattcgaatgtctaatgatgaaactaaaacaaaatatttaactaaaatatatgatcctttcctgaacggacgctttcgtggacaaatcgaaaatgttttttcaacctcaatccaatatgaa

SEQ ID NO: 127525 - DNA, 262 bp, Glycine max
ctcgttcttactttgacggtttctagagagagaaagtgatggccggagttaatccaaacggcgtcgccgattttgcggcggttccgacgcatggcggacagttcattcagtacaacatatttggaaacctcttcgaggttacgacgaagtaccgtcctccgatcatgcctatcggacgcggcgcgtacggaatcgttttctcactgttgaataccgagacgaacgagctggtggctgtgaagaagatagcgaacgtttcgac

SEQ ID NO: 127526 - DNA, 256 bp, Glycine max
gaagaataatcgagacacagatcatagtgatcattttttaatttctcagatttatccgacgtcgctgcagatccaccaaccgttatggctgccttcagcggtgatgaaacggcaccgtttttcggcttccttggcgccgcagctgccctcgtcttctcctgtatgggagctgcctatggcacagcgaagagtggcgtgggcgtggcttccatgggtgtaatgagacctgagctggtgatgaagtcgattgttcctg

SEQ ID NO: 127527 - DNA, 260 bp, Glycine max
cttcactgctgagggctttgaacttagtgttgggacaaatcatctggggcatttcctcctctcgcgcctgttgcttgaggacttggaaaaatccgattacccttcaaagcgcttgatcatcgttggttcaataacagggaacacaaacacattggctggtaatgtacctcccaaggctaaccttggtgacttgaggggacttcagggtggtttgaatgggctaaacagctcagccatgattgatggtggagattcgatgg

SEQ ID NO: 127528 - DNA, 267 bp, Glycine max
agaaaccctattgcacgttttgcaatcgaactcgacaatggccaacagcaacctccctcgaagaatcatcaaggaaacgcagcgtttgctcagtgagccagcacctggtattagtgcctccccctctgaagagaatatgcgatatttcaatgtgatgatccttgggcctacccagtcgccttatgaaggaggcgttttcaagttagaactatttttgccagaagaatatccaatggctgctccaaaggttaggtttctaacaaaaat

SEQ ID NO: 127529 - DNA, 253 bp, Glycine max
cgaatatacattgctcgttgatggatttggcatagatccgcagcaagagattacgttggtgaggcaagttgagtatcaagattctctcgtggaagcagcatggccactaggcagtgccatagaagccatatcatcattacctaaatttgagaaattaatgtatttcatttaagctttaaaacgaggagccatatgtatgtgtggaatgaactccatcactcttaaataaaaatcgttttgttcctttttttct

SEQ ID NO: 127530 - DNA, 263 bp, Glycine max
catcacttcattcaacatttctccccttagcttgtttcaccaatggctgctgcggttagtgctgcagtctcttttccatccaccaagtctacctctcttccaagcaggacctccctcattgccccagagagagttgtgttcaagaaggcttcattgcaaaacagagatgtttctagcagtggacgggtagtttccatcagagctcaagtcaccactgaggcaccagccaaggttgaaaaaggagtccaagaaacaggatgaag

SEQ ID NO: 127531 - DNA, 262 bp, Glycine max
ctgctcgagcggctcgagccttcttcttctcttttcacgtcattatcctaaacttgcagattttcacatctcaagcaacatgaaggggttgttcatgtttctgtcggtgctcctttgtgccacctttcatgtctccttctccattactgacggccttgtagcaatcggcaacttcgagctgggtccgaagccctccgccctgaaaggaactgtggtgattggtggcagccactcgatcccagaatgggagatctctggcttc

SEQ ID NO: 127532 - DNA, 262 bp, Glycine max
aatctttcgaagttcgtttgcgtgtgttgtgtggtcagtcaccgatggcagcaccacctgcgagggcacgtgccgattacgattacctcatcaagcttcttcttattggcgatagcggtgtgggaaagagttgtctgcttttgcgattttctgatggttccttcacaaccagttttatcaccaccattggcattgattttaagataagagccattgaacttgatggcaaacgcattaagttacaaatctgggatacagctgg

SEQ ID NO: 127533 - DNA, 265 bp, Glycine max
ctgatgaagaaggcgtagagcttggtcaccatccttgtaaaattggaccaattcaaatcgcagattgcagctagggtacataactcttccccctacactccccaaacgagaccatggaattccgggtccaataacatcccccaaacaccccttacaatcatcactggtcaaatcccgtgtacactgaccaagagtataaagcgtttgcaaatcattcagtttcaacgatttggttccgaatctctcatcactgtcccctgcttca

SEQ ID NO: 127534 - DNA, 258 bp, Glycine max
cacaaggcaggaatcaagctcatcctagagttttaaaaatggcagcagcctccaccatggctctctcttccccatccctggctggcaaagccgtgaagcagggcccatcagcccccgaattcgggagggtcaacatgaagaagaccgtcatcaagcaggccttctccggaagcacatggtactgcccacaccgcgtcaagtagttaggatcaatctctagcgagaccccgttctaactcactgacgagttcacaagtg

SEQ ID NO: 127535 - DNA, 261 bp, Glycine max
gttgagaactaagaaggagaagcaaatggcttcctcaatgatctcttccccagctgttaccactgtcaaccgtgccggtgccggcatggttgctccactcactggcctcaagtccatggctggcttccccaccagaaagaccaacaatgacattacctccattgctagcaacggtggaagagtgcaatgcatgcaggtgtggccaccaattggcaagaagaagtttgagactctttcctacctgccagaccttgatgatgc

SEQ ID NO: 127536 - DNA, 251 bp, Glycine max
tatgcattcaagattcagcaagtgcgtttcggaagcagagaccgaaatacttcgagatggcccgtacaaagcagactgctcgtaagtcaactggaggaaaagctcccaggaagcagcttgcaaccgaggctgcacgtaaatctgatacaacggatggtggtgtgaagaagcctcatcgttatcgccctggaactgttgctcttcgtgagattaggaaataccagaagagcactgagctcctaatcaggaag

SEQ ID NO: 127537 - DNA, 254 bp, Glycine max
cgaatatacattgctcgttgatggatttggcatagatccgcagcaagagattacgttgagtgaggcaagttgagtatcaagattctctcgtggaagcagcatggccactaggcagtgccatagaagccatatcatcattacctaaatttgagaaattaatgtatttcatttaagctttaaaacgaggagccatatgtatgtgtggaatgaactccatcactcttaaataaaaatcgttttgttcctttttttct

SEQ ID NO: 127538 - DNA, 258 bp, Glycine max
cacaaggcagaaagcaagctcatcctagagttttaaaaatggcagcagcctcctccatggctctctcttccccatccttggctggcaaggccgtgaagctgggcccatcagcccccgaagtcgggagggtcagcatgaggaagaccgtcaccaagcaggcctcctccggaagcccatggtacggcccagaccgcgtcaagtacttgggcccattctctggcgagcccccgtcctacctcactggcgagttccaggtga

SEQ ID NO: 127539 - DNA, 245 bp, Glycine max
ctctgctctttgccttctctgacacatttggtgccttgtagatcgtgttttggcaggaaggtggtatggcgaaggacgttgaggttgctgagcgtggctccttctctgggaaggactaccaggaccctccaccagcaccactcattgatgctgaggagctcacaaagtggtccttttacagggctctcattgctgaattcattgccactttgctcttcctctacattactgtgctcacagtcata

SEQ ID NO: 127540 - DNA, 125 bp, Glycine max
ctgggaacaacacacacaaaccattcccttttctcgctccggcaatgaccacccaagcttccaccttcgccgtcgccgttccctccgtcacaacccccttccgcagccaccggaatcccttcgtt

SEQ ID NO: 127541 - DNA, 265 bp, Glycine max
gcttctgtgtttggtgtgtctctgatcaagaccccaagggaaataaaatgatcatatctgtaactggagcaacaggttttattggtagaaggttggtgcaaagattgcatgcagacaatcacagtgttcatgtcttgacacgatctaaatctaaagcagaaacaatttttccagcaaaagactttccaggaatcaagatagcagaagagccagaatggaaagatagcgttcagggctcaacaggggttgtgaatttggctggact

SEQ ID NO: 127542 - DNA, 271 bp, Glycine max
ggctcgtccatcacttcattcaacatttctccccttagcttgtttcaccaatggttgctgcggttagtgctgcagtctcttttgcatccaccaagtctacctctcttccaagcaggacctccctcattgccccagagagtgttgtgttcaagaaggcttcattgcaaaacagtgatgtttctagcagtggacgggtagtttccatcagagctcaagtcaccactgaggcaccagccaaggttgaaaaagagtccaagaaacaggatgaagg

SEQ ID NO: 127543 - DNA, 253 bp, Glycine max
atggccacctctgctattcagcaatcagcattcgcaggtcaaactgctctgtagcagctcaatgagttggtacgcaagatcggttgcgccggcaaaggtcgcaccaagatgcgccgtaccgtcatgagtgctcctcagagcattttgtatggccctgatcgtcccaagtacctgggttcattctcagagtagattccgtcatacctgagcggagaattctccggtgactacggatgggatactgctggatatc

SEQ ID NO: 127544 - DNA, 251 bp, Glycine max
cttcgagttgtaacctctctcttcaaccctaacttagggtttaagttctaaaacccttttcaggttgattggaggagataaaaatgctcgtgttgtttgaaacccctgcgggtattgccctgtttaaagtgctggatgaaggcaagctttctaaagttgaggacttgtggaagaacttttccagcgcagatactgctagacaggtggtcaagttgaaagcattttctaaatttgagaacacttcagaagct

SEQ ID NO: 127545 - DNA, 257 bp, Glycine max
gagaaactctctctctctctctctctctctctctagaaaccctatagcacgttttgcaatcgaactcgacaatggccaacagcaacctccctcgaagaatcatcaaggacacgcagcgtttgctcagtgagccagcacctggtattagtgactccccctctgaagagaatatgcgatatctcaatgtgatgatccttgggcctacacagtcgccttatgaaggaggcgtttacacactagaactatttgtgccagaa

SEQ ID NO: 127546 - DNA, 257 bp, Glycine max
gaacaagtagttgagaactaagaaggagaagcaaatggcttcctcaatgatctattccccagctgttaccactgtcaaccgtgccggtgccggcatggttgctccattcactggcctcaagtccatggctggcttcccaccaggaagaccaacaatgacattacctccattgctagcaacggtggaagagtgcaatgcatgcaggtgtggccaccagttggcaagaagaagtttgagactctttcctacctgccaga

SEQ ID NO: 127547 - DNA, 256 bp, Glycine max
tgcaattgaagttgaagtcttgcccttctctcttcaactccaaacacaagacatcatcatccatggctgcctccgtctccactgtcggagctgtcaacagagctcttttgaacctgaatgggtctggacctggggttcagctcccagttcatccttctttgggagcagcttgaagaaggttattggctcaagggtccccaacacaaagatttcctctggaagcttcaagattgttgctgtagaagagaagaaagag

SEQ ID NO: 127548 - DNA, 244 bp, Glycine max
gactctggtggaaggcattagactttgcttctcttaaacggagctctgtttcattctttgatgtggagaaacacgaaaccgccgtgtcacggtggacaagagcaaagacaagagcagctaaggttggaaaaggttttctaaggatgataaggcacaaaaattggccttgcaacattggctcgaagctattgacccacgtcatcgctatgggcacaatttgcacatgtattacgatactgggttt

SEQ ID NO: 127549 - DNA, 257 bp, Glycine max
gaaaaattgttctctcaccgtgaaagagagagagaggttaggctatggctgatgagagcgttgttgagtccccagtgaagaggcagagagatgatggtgaagaaaatggtgtctctgtttccatggacgcggagggtgcaaagaccctcttagtaacggtttatcatctgtgattcctgggtggttctctgaaatcagtgcaatgtggcctggagaggctcactccttgaaggtggaaaagatttgtttcaaggaaa

SEQ ID NO: 127550 - DNA, 259 bp, Glycine max
gctatatagcataaacatttgagtcttcattgcacaatgtcaacctcttccataaacgggtggtgcctctcttccatctccccagccaaaacctctctcaggaaggccacattacgcccttccgtcttcgcaacccttacactccttcttctccttcctcttcatcttccttcccctctctcattcaagacaggcctgtttttgctgcccctgcccccatcatcaccccaactgtgagagaggatatggcaaaggaata

SEQ ID NO: 127551 - DNA, 163 bp, Glycine max
cacaatgttgctccaaagggaaaatttattgcatttgtatcaaccgaggcagagacagatcagccggcaattgaactgaaacctggaattgaccttctaggacctgttgatgagatattttttgatatctatgacagaatgaaccagtcaacgaacccacttt

SEQ ID NO: 127552 - DNA, 207 bp, Glycine max
cgggtggtgcctctcttccatctccccagccaaaacctctctcaggaaggccacattacgcccttccgtcttcgcaacccttaacactccttcttctccttcctcttcatcttccttcccctctctcattcaagacaggctgtttttgctgcccctgcccccatcatcaccccaactgtgagagaggatatggcaaaggaatacgag

SEQ ID NO: 127553 - DNA, 255 bp, Glycine max
ctcttcttcatattcttcttcttcttcttgttcttgttctatctgtgacgagcatcatggcctcgagagcagtgctattgttggctatgtgtgtgcttccggccatggttgtggccattcgcccagcaaagaacctttttgcgtgaagggtcgcgtctactgtgacccttgccgtgctggttttgagacctcagcaaccacctacattgccggtgctgagattatgttgcaatgcaagagcagggttagcaacga

SEQ ID NO: 127554 - DNA, 257 bp, Glycine max
gctatatagcataaacatttgagtcttcattgcacaatgtcaacctcttccataaacgggtggtgcctctcttccatctccccagccaaaacctctctcaggaaggccacattacgcccttccgtcttcgcaaccataacactccttcttctccttcctcttcatcttccttcccctctctcattcaagacaggcctgtttttgctgcccctgcccccatcatcaccccaactgtgacagaggatatggcaaaggat

SEQ ID NO: 127555 - DNA, 160 bp, Glycine max
accatggcatccaccactctatcccctacaaccccttctcagctatgctcaggaaagagtgggattttcagtccctcacaggcacttcttgtgaagccagtgaagaggcagatgatggggaagagcaagggaatggaattgcatgccaagccaccagcat

SEQ ID NO: 127556 - DNA, 160 bp, Glycine max
atgcattggagaagtacgcttacaacatgagggatgctataaacattaaggagattagcttgaagctttctccagaagacaagaaaaatatcaatgatgcaattgattctgccttagagtggctcgaggtcagcatgatgcaaccccaaatgattttgac

SEQ ID NO: 127557 - DNA, 160 bp, Glycine max
ttgaagttgaagtcttgcccttctctcttcaactccaaacacaagacatcatcatccatggctgcctccgtctccactgtcggagctgtcaacagagctcttttgaacctgaatgggtctggacctggggtttcactcccagttcatccttctttgggag

SEQ ID NO: 127558 - DNA, 257 bp, Glycine max
gcaacttgaggacggccgtacccttgctgactacaacattcagaaggagagtactcttcacctcgtcctccgtctccgtggtggcatgcagatcttcgttaagacactcacaggcaagaccataaccctagaggttgaagctccgacaccatcgataacgtcaaggccaagatccaggacaaggagggtatccccccggaccagcaacgtctcatcttcgccggaaagcagctcgaggacggccgcaccctcgccga

SEQ ID NO: 127559 - DNA, 243 bp, Glycine max
gttagtttcagtgtgaggaagaaagattgcagggtgagcttggaggggtgtagagaaggtgtgaaggggcctttgactattgctgctgaggtttttgagttgacaccttcctgtgtggtggtggaggtcaagaaaaaggaggggataaggccgagtatgagaagttttgtaactctgagttgagacccgcgttggagaatttagggatggaggaatctgcttcttcttcttcttcttgtcatc

SEQ ID NO: 127560 - DNA, 150 bp, Glycine max
attgaagttaaaagccttagccttccctacaactccaaacagcaagacatctgcatccatggctgcctccgtctccactgtcggagctgtcaacagagctcttttgaacctgaatggttctggagctggagcttagctcccagttcagcc

SEQ ID NO: 127561 - DNA, 252 bp, Glycine max
ggtttccggtggaagcttcaagattgttgctgtagaagagaagatagagattgaagagacccagcagaccgacaaggacagatggaagggtgttgcatatgatatctcagacgctcaacaagacatcacaagagaaagggtttggttgactcccttttccatgctccacaggatgctggaactcactatgcagtcatgagctcctacgagtacctcagcactggtattcgccagtacttggacaacaaaatg

SEQ ID NO: 127562 - DNA, 157 bp, Glycine max
tgacaattctcccagctttgttgccatcaatgtcagtcctattgagtatgggcatgttttgctgattccgcgcattttcgagtgtttgcctcaaaggattgaccgtgagagcttcctccttgcacttcacatgcagtggaagctgtcaatccatatt

SEQ ID NO: 127563 - DNA, 157 bp, Glycine max
gaacaagtagttgagaactaagaaggagaagcaaatggcttcctcaatgatctcttccccagctgttaccactgtcaaccgtgccggtgccggcatggttgctccattcactggcctcaagtccatggctggctccccaccagaaagaccaacaatg

SEQ ID NO: 127564 - DNA, 243 bp, Glycine max
gagaatggagagtaaagaggaagatgttaacgttggagcaaacaagttctcagaaaggcaaccaattggtacagcagctcagggtggtggtgacaaggactacaaggaggcacccccagctcctttgtttgaactggtgagctcaaatcatggtccttctacagagctggaattgctgagtttgtggcaactttcttgttcctctacattaccatcttaactgtcatgggtgtcaacaggtca

SEQ ID NO: 127565 - DNA, 253 bp, Glycine max
gaaagatgccgaagaggacaacgcacacatactcaagcgaggatgctgctccggagggtcctcactccgatctctttgtatattactgcaaacattgcggatctacatgtccttataacagatacccaattgcagaaatgcctaaaaggaaaaccgacaaagcttatgtactggacaagagcaaacatctggccagattgaacatgaaggaagacgggaaagtagtgttaaaacgaggggaggggaaatggag

SEQ ID NO: 127566 - DNA, 251 bp, Glycine max
ctcattccccatttcctcacctccttcaaccgctgctaaattctagggttccgaaatggacgctggcggaaagatcaagaagggcgccggaggtagaaagggcggcggcccaaagaagaagccggtttcaagtccgtcaaagccggtctccaattccccgtcggaagaattggccgttatttgaagaaaggaaggtacgctcagcgtgtcggtaccggtgctcccgtatacttggctgcagttctcgaata

SEQ ID NO: 127567 - DNA, 238 bp, Glycine max
gtggaagaaaggaaaaatgcattcgtacggttacagagtcaatgctttgttaaccttcgccataaccattctggccgttatgtccgccatggcttctctctccgataacctcaattcccccactcccttgtgcatgctcaggtcaccaacattaactggtttcagaaacagcccaacggcgacgacgaggtcagcatgacgatgaatatatcagcaaatttgcagtctcttttcacat

SEQ ID NO: 127568 - DNA, 142 bp, Glycine max
cttgtgttctgcaccacttcaggcgtggacatgcccggagcagattaccagctcacgaagcttctcggcctgaggccctccgtgaagcgcctcatgatgtatcagcagggctgcttcgccggcggcacgtactccgcctcga

SEQ ID NO: 127569 - DNA, 106 bp, Glycine max
caacaggacatcacaagaggaaagggtttggttgactcccttttccaagctccacaggatgctggaactcactatgctgtcatgagctcctacgagtaccttagca

SEQ ID NO: 127570 - DNA, 239 bp, Glycine max
acttattatggttgatcgtatactttactcatcagttgtttatcctcacaactatgggtttattccacgtactatttgtgaggacggtgatcccatggatgtcttggttattatgcaggagccagtcttccgggttgctttcttcgggccaaagctattggtctcatgcctatgattgatcagggtgagaaagatgacaagataattgctgtctgtgctgatgatcctgagtataggca

SEQ ID NO: 127571 - DNA, 245 bp, Glycine max
ctcgagcgctttgcaagagtattaacccagatgaagctgttgcttatggtgctgcagtgcaggctgcgattctcagtggcgagggtaatgagaaagtgcaggatcttcttttgttggatgttactctctatccactggtttggagactgcaggaggagtcatgactgtgttgattcccagaaacacaaccattcccaccaagaaggagcaggtgttctcaaccttctctgacaaccagcccggtg

SEQ ID NO: 127572 - DNA, 108 bp, Glycine max
ggcttatggtggatacctaggcacccagagacgaggaagggcgtagtaagcgacgaaatgcttcggggagttgaaaataagcgtagatccggggattcccgatatagg

SEQ ID NO: 127573 - DNA, 218 bp, Glycine max
gcctctcctactatctttaaatccttttgtaccctcaacttccctaagcactagcaccacacaatggtcattgcagcaacccctcttctcttctttcttcttaatttatgcctaagaggcacttatgctgactatggaggtggatggcaaggtggtcatgctacattttatggtgggggtgatgcatctggcacaatgggaggggcttgtggttatgg

SEQ ID NO: 127574 - DNA, 249 bp, Glycine max
ctcgagcgctcgcaagcaaaaagaaagaatcccaggcgaggagaaagatggaggggaaggagcaggatgtgtcgttgggagcgaacaagttccccgagagacagccaattgggacggcggcgcagagccaagacgacggcaaggactaccaggagccggcgccggcgccgctggttgacccgacggagtttacgtcatggtcgttttacagagcagggatagcagagtttgtggccacttttctgtttc

SEQ ID NO: 127575 - DNA, 251 bp, Glycine max
gcgaagcttgaattacaagaggttgttgacgtcttgaagaatcccgataagtacaccgcgctgggcgcaagattccgaaagggtgtcttttggtgggcccaccgggaaccggaaagacccttctggcgagggctgtggcgggggaagctggtggtgccgtttttctcgtgcgcggcttcggagttcgttgaactttttgtgggagttggtccgtcaagggtgagagatttgttagagagagcgaaggggag

SEQ ID NO: 127576 - DNA, 255 bp, Glycine max
tgctcacaccatatgcaggaaccaggtgattttgatgacaagtcagatcctcctttatccgcacaaaatgacattgtagaatctgatatagagttggataatgctgatgttgttgaacctgataatgaccctcctcaaaagatgggagatccttctgctgaaataacggaagaacaaagggatgctgcacaactagcaaaatcaaaagcagtcgatgctatgtcacaaggtaatttggatgaagcactggcccaa

SEQ ID NO: 127577 - DNA, 250 bp, Glycine max
attttgggaagccttcacaagttgggaccaaatcctcatcgtgacctgcacaaactagcccaaaaatatggacgtgtcatgcacttacgtttaggttttgtgccaaccatagttgtttcttcacccaaatctgctgaattgttcctcaagacccatgaccttgtctttgctagtagaccacgtttcgtggcggatcaatacatctcttgggggcagaggaacttaggctttgctgaatatggttcttatt

SEQ ID NO: 127578 - DNA, 252 bp, Glycine max
ggggatagaaataggcatggcgacgtggtgtgctctgtttgccgctacccaattattggttctcggtttaaggagataaaatctcattttagtttgtgtaaccaatgctacagtgagggaaaagtgccttcttcatttaagcaggaagagtacagatttaaagagtatggaagtgagggtgaagccatgaaagataagtgtatgtgcttcaacttgcaatcccgtaatgaaaagtagatagcggcattcaat

SEQ ID NO: 127579 - DNA, 257 bp, Glycine max
tcggaatcgggctcgagctcgagcgaatcggctcactcacgctgcttcttcggacttctccactatatttggggatattggagacttaagcacaggttttgcttcagcgtttctgctaatatttttctctgaactgggagacaagacctttttcattgcagcgctactagcagctaggaactcagctggtgttgtttttattggaacatttggcgcacttgcggcaatgacttggatatctgttgtccttggacgaa

SEQ ID NO: 127580 - DNA, 246 bp, Glycine max
gtcgccgtctccgtcggcgccaacatctccggcggccacgtcaaccccgccgtcaccttcggcgccttcgtgggcggcaacatcaccttactccgcggcatcgtctacgtcatcgcccagctcctcggctccatcgtggcctccctcctcctcgccttcgtcactgcctcccctgttccagcattcgggctttccgctggagtcggagttggcaacgctttggtgttggagatcgtgatgaccttc

SEQ ID NO: 127581 - DNA, 245 bp, Glycine max
  unsure (1)..(245): unsure at all n locations
cttagctaagaaccgtgaactcgaagtgatccactccaggtgagccatgctcggagatntcagctgcgtcttcccggagttgctgtcccgcaacggggtgaatttcggagaagccgtgtggttcaaggccgggtcccagatcttcagcgagggtgggctcgactacttgggcaacccaagctctgatccacgcccagagcatcttcgctgtctgggccacaaagttatcctaatgggtgccgttg

SEQ ID NO: 127582 - DNA, 250 bp, Glycine max
aaacaacaatggacctccgtgaatcgataagcaaccaaaccgacgtggccctgagcatctcaaagctcctgttgtcgaaagaagctcgggacaagaacctcgtgtattcgccgctgtcgttgcacgttgttctgagcatcatcgccgctggctccaagggccccacactcgatcagcttctctccttcctccgatccaaatccaccgatcatctcaactccttcgcctctcagctcttcgccgtcgtgct

SEQ ID NO: 127583 - DNA, 249 bp, Glycine max
taagatattaagataaggacccatttcctcttctaagctatatagtgctcgtctagcctacccactacaagcaacattgttaaccattctcttcactttaaagttacatagtttttcattgttttacttaatctacaatggctgcttcaacaatgactctctcttcatcatcattggctggccaagctatcaagcttgccccctcaacccctgagcttggtgttggaggggttagcatgaggaaaacac

SEQ ID NO: 127584 - DNA, 248 bp, Glycine max
aagtacatcactctctctatctgacagaaccataatagtcatgggtttgaaggagcattttgagcagtatgctgagtaagcaaaaactttgccaccgactcaatcaaacgaagacttgcttatcctttatggattgtacaaacaggccaccgttggacctgtcaacaccagccgtcctggaatgttcaacatgagggacagagctaaatgggatgcatggaaggctgttgaagggaaatccaaggacg

SEQ ID NO: 127585 - DNA, 249 bp, Glycine max
tgaacttcgaagacaaacttcatccaggtggtccatttgacccattggggcttgcaaatgatccagaccaagctgcactgctaaaggtgaaggaaattaagaatggcagacttgctatgtttgccatgcttggtttctacttccaagcatatgtcaccggagaaggtcctgttgagaacctagcaaaacatctcagtgacccttttggcaacaacttgctcactgtcattgccgggtctgctgagagag

SEQ ID NO: 127586 - DNA, 246 bp, Glycine max
  unsure (1)..(246): unsure at all n locations
gttaaaagccttagccttccgtacaactccaaacagaaanacatagacatccatggctnnctccgtctccactgtagganctgtcaacacagctcttttgaacctgaatggttctggagctggagcttcagctcccagttcagccttctttgggaccagcttgaagaaggttattgcctcaagggtccccaacagcaaggtttccggtggaagcttcaagattgttgctgtagaagagaagaaaga

SEQ ID NO: 127587 - DNA, 248 bp, Glycine max
aaccttctcgaggctgccaaatccgccaacccccaacccgccattgtctgggcttcgtccagctccgtctacggcctcaacacccaaaaccctttctccgagctccaccgcaccgaccagcccgccagcctctacgccgccaccaagaaggccggcgaggaaatcgcccacacctacaaccacatttacggcctctccctcaccggactccgtttcttcaccgtctacggcccctggggaagacccga

SEQ ID NO: 127588 - DNA, 248 bp, Glycine max
ctcgttcctcttattagcgacggccattctcgccgttgtgtgctccgccgtgagcggttgctcgccatcggatcgggcggcgctgctggcgttccggaaggcgctgagcgagccctaccttggcctcttcaactcgtggacgggctccaactgctgcctcgactggtacggcatcagctgcgacgccaccaccggccgcgtcaccgacatcaacctccgcggggagtccgaagaccccatcttcgaga

SEQ ID NO: 127589 - DNA, 245 bp, Glycine max
ctctggttgaaagccatgagcatgatggctgcgtatttgcgtgtacccacatccacgcccattactccgcaatctcccacagctacgaggaccaaatgcagaaatctgaaaacctcttgctccgttaatgccgccaaaattccaatgccccctctaaaccctaaagaccccttcctctccaagctcgcttccatcgctgcctcttcccccgacacgctcctcaacactcccaaaaactccgacac

SEQ ID NO: 127590 - DNA, 244 bp, Glycine max
agaagaacaagtagttgagaactaagaaggagaagcaaatggcttcctcaatgatctcttccccagctgttaccactgtcaaccgtgccggtgccggcatggttgctccattcactggcctcaagtccatggctggcttccccaccaggaagaccaacaatgacattacctccattgctagcaacggtggaagagtgcaatgcatgcaggtgtggccaccagttggcaagaagaagtttgagac

SEQ ID NO: 127591 - DNA, 249 bp, Glycine max
ttcgcttggaaaattcagagagacatggcagagcgtggacacagtcttgaaagcatcaaggctagcattgaagcaaggaagcctgattttgaagcatatattgatccacaaaagcaatacgcagatgcagtgatagaagtgttgccaacgcaactcattccagatgacaacgagggtaagattttgagagtgagattgatacagaaagagggggttaagtactttagcccggtttacttgtttgatgat

SEQ ID NO: 127592 - DNA, 244 bp, Glycine max
ctctctcctactatcttttaaatccttttgtaccctcaactccctaagccactagtacctcacaatgcccattgtagcaacctctcttctcttctttcttcttaatttatgcctcagaggcacttatgctgactatggaggtggttggcaaggtggtcatgccacattttatggtggaggtgatgcatctggcacaatgggaggggcttgtggatatggaaatttgtacagccaagggtatggc

SEQ ID NO: 127593 - DNA, 243 bp, Glycine max
atttcattcacagggatgaggaggttaattacttcccttcaaggtatgatcctgttcgtcatgcagaaacgttccccatacctcctgctatctgcagtggaaggcgtgaaaagtgtggaattgagaaggagaacaactttaagcagcccggagagagataccgatcttgggcacctgacaggcaagatagatttaatcgccgatgggttgatgctttatctgacccacgggtcacccatgaaa

SEQ ID NO: 127594 - DNA, 246 bp, Glycine max
ggaattgagttccttaggacttacctcaaccttccatccgaaattgtccctgccactctcaagaagcaggccaagcccgccggaagaccattcggtggcccacccggtgatcgccccaggggcccacctcgctttgacggagagaggagattcggcggtgaccgtgatggataccgtggaggtccacgcggacctggcggtgatttcggtgacaagggtggagctcctgctgactacaggccttct

SEQ ID NO: 127595 - DNA, 248 bp, Glycine max
aaagaaaggagatgggagtggagaagcagttgttgaggtctggcaccggtccgaagccaattcctagtcagaacgtaaccgttcactgcactggattcgggaagaacggtgacctttctcagaaattctggagcacaaaggatccaggctagaacccattcactttcaaaatcggccaaggtactgttatcaaaggatgggatgaaggtgtgcttggcatgcaaattggtgaagttgctcgtctccgg

SEQ ID NO: 127596 - DNA, 217 bp, Glycine max
gcaattgaagttgaagtcttgcccttctctcttcaactccaaacacaagacatcatcatccatggctgcctccgtctccactgtcggagctgtcaacagagctcttttgaacctgaatgggtctggacctggggtttcagctcccagttcatccttctttgggagcagcttgaagaaggttattggctcaagggtccccaacacaaagatttcctct

SEQ ID NO: 127597 - DNA, 240 bp, Glycine max
tgtcgaatcaatactgtataaactacttgtggcagcagatttcaatgttgcagcagctcaacaaggaataatttacattgatgaagttgacaaaataactaagaaggccgagagcttaaatatcagtcgggatgtttctggtgagggtgttcagcaggcattattgaaaatgctggaaggaactatagtaaatgttcctgagaaaggagctaggaagaatccacggggggataacattca

SEQ ID NO: 127598 - DNA, 229 bp, Glycine max
cagtgatcaattcaatttgcgttcatcactggtaaggcaaacatgaggggcattctttccgtaaggacagccttggttcaacatcatagtgagaaattgggccttggtttcagagtatttagcactcagggtgcttccactgctagtaccccacagccgccaccaccacctcctccgccggagaaaacccattttggcggccttaaggatgaggacgggatatttacta

SEQ ID NO: 127599 - DNA, 245 bp, Glycine max
tgcaattacagctgttgccatctctacgccgagttccgggcagaagaatggatcaggaggttgttttcttagtggaaggaaattgagggtgaaaaaggagagagcagcaattggaggacgatcgatgggcactacagtgtgcgcagttgctgagcctgacagacctctatggttcccaggcagcacccctcctccatggcttgatggcactctacctggagacttcggctttgaccctcttggtc

SEQ ID NO: 127600 - DNA, 242 bp, Glycine max
tgataatcatctctactgaccaaatctgaagaaaattgctttctctttggttcctagctcgcactctctctacgcacgcctcaacatcccttctctgctccattcattatgtctccgtcgttggatcttccccccaagggtggcttcagttttgatctatgccgaagaaacgcaatgcttcaaaacaagggcctcaaagccccaacctttctcaaaactggcaccactattgtcggtttagt

SEQ ID NO: 127601 - DNA, 99 bp, Glycine max
ctgggaacaacacacacaaaccattcccttttctcgctccggcaatgatcacccaagcttccaccttcgccgtcgccgttccctccgtcacaaccccct

SEQ ID NO: 127602 - DNA, 245 bp, Glycine max
  unsure (1)..(245): unsure at all n locations
tgtgtctcagggtctgtgacacacacagactcacttcaagttcccagcttttgccattttacccactgtttattgagaagaactgcagaacatggcacagattttggctccctctacgcaatggcagatgagaatctcaaaatcctctcccaatgcaactcccataacatcaaacatgtggagttctttattgtggaaacaaaataagaaagtttcacatgccnattctgctaaatttagagtgc

SEQ ID NO: 127603 - DNA, 236 bp, Glycine max
cacacacaaaaaaaagctttagtttaggatgacccaagtgaggaacaagcaagtggttctaagagactatgtcaccggattccctaaagaatccgacatgaacattgttgaaggcaccataatattgaaggttccagaaggttccaatgatgtccttctaaaaaatctctacttgtcatgtgatccatacatgcgactcctcatggccaaggaccgttctttcggagatggctcct

SEQ ID NO: 127604 - DNA, 241 bp, Glycine max
cagccatgtcttcttcgctcttgcacctcctcttccttccacaactacgatgttctatagtgctttctcagattcttccttcgtggtaaccggtcgaatcatggagcccatggacattgttggcaagttaaaggaagacgcttcgcttcctaaagcaacaatgacaaaaattattaaagagatgttacccccagatgtacgtgttgcaagagatgcccaagatctattgattgagtgttgt

SEQ ID NO: 127605 - DNA, 243 bp, Glycine max
cgtagattccatcatgagaagtattgaacttgatgagtttgagaaggctgcttctctaggatccaaaagggtgaacttgaaacttttggacacaactcttctttcactgctgagaccagatggacatcctggaccttacaggaagttccagccatttgcaaaagataagaatgctaaagttcagaatgattgtctacattggtgtttgccaggaccaatcgactcatggaatgacataatcat

SEQ ID NO: 127606 - DNA, 226 bp, Glycine max
ctctgctctttgccttctctgacacatttggtgccttgtagagcgtgttttggcaggaaggtggtatggcgaaggacgttgaggttgctgagcgtggctccttctctgggaaggactaccaggaccctccaccagcaccactcattgatgctgaggagctcacaaagtggtccttttacagggctctcattgctgaattcattgccactttgctcttcctctacat

SEQ ID NO: 127607 - DNA, 251 bp, Glycine max
agcaagctcatcctagagttttaaaaatggcagcagcctcctccatggctctctcttccccatccttggctggcaaggccgtgaagctgggcccatcagcccccgaagtcgggagggtcagcatgaggaagaccgtcaccaagcaggcctcctccggaagcccatggtacggcccagaccgcgtcaatacttgggcccattctctggcgagcccccgtcctacctcactggcgagttcccaggtgactacg

SEQ ID NO: 127608 - DNA, 245 bp, Glycine max
tgaagttgaagtcttgcccttctctcttcaactccaaacacaagacatcatcatccatggctgcctccgtctccaatgtcggatctgtcaacagagctctcattgaacctgaatgggtctggacctagggtttcagctcccagtgcatccttctttcggagcagcttgcagaaggttattcgctcagggtccccaagacaaagatttcctctggaagcttcaagaatgatgctgtagaagagaag

SEQ ID NO: 127609 - DNA, 251 bp, Glycine max
ccaatatcaaatatgagtcgtcatcccgaggttaagtgggctcagagacttgacaaggtctatatcacggtgcaattggctgattcaaaaaatgccaaggtggatcttacaccagatggtatttttaccttctctggtagtgctggtgctgaagaccatcagtatgagctaaaactggagctctttgacaggttaatgtagaggagagcaaaattaatgtaggagtgcgaagctattctgtgtagtgcaga

SEQ ID NO: 127610 - DNA, 249 bp, Glycine max
cgagataactagaaacagtgtgatgaaaatgaaggtccttgttttcttcgttgctacaattttggtagcatggcaatgccatgcgtacgatatgttccctctccgaatgaacactggctatggtgcccgtactccggaggtgaaatgcgcaagttggaggcttgctgtggaagcacacaacatctttggtttgagaccattcctgaagagtgcgttgaagcaacaaaggaatacatccatggcgaacaa

SEQ ID NO: 127611 - DNA, 249 bp, Glycine max
aaacactcataacacaaagcacaaagcaaagctcatccttgagttaaaaaatggcagcagcttcttccatggctctctcatccccatccttggctggcaaggccgtgaagctgggcccatcagccccagaagtgggaacggtgagcatgaggaagaccgtcaccaagcaggtctcctcaggaagcccaggtacggcccagaccgagtcaagtacttgggcccattctctggcgagcccccgtcctacct

SEQ ID NO: 127612 - DNA, 251 bp, Glycine max
gtgacagtgtgtgtgagtgagtgagtgagagcgacgatgggcgcgagcagcgaccccacccaagacggttccgacgagcagcagaagcgttcggagatctacacctacgaggccccctggcacatctacgccatgaactggagcgtccgccgcgacaagaagtatcgcctcgccatcgcctccctcttagagcagtaccctaaccgcgtggagattgtccagctcgacgactccaacggcgagatccgttc

SEQ ID NO: 127613 - DNA, 252 bp, Glycine max
gattgtatttctctgctcttatgaagggttccaattcttatattctatcgtgtgtggtcacaggagttggaaagtcttgtcttctacttcaattcacggacaagcgctttcagcccgtccatgacttaaccatcggtgttgaatttggtgccaggatgatcacaattgataacaagccaatcaagttgcaaatatgggatacggctggtcaagaatcattcagatctattacaaggtcttattacagagggg

SEQ ID NO: 127614 - DNA, 252 bp, Glycine max
cttctatttttcaagtaacttaaggtttcaaacctaggaagttggaagtcatggcagcaacattgatggcagcaacaacaagttctggtactcttaaagcaactcctttccttggccaaggcaagggtgccaatgccaatgctcttagggatgttgtctccatgggaactgggaagtacaccatgggcatgatttgtggtatggaccagacagagtgaaatacttgggacccttctcagctcagaccccttc

SEQ ID NO: 127615 - DNA, 251 bp, Glycine max
tgggtatttcatgagcactggtgacagaagctatgatgcaatcgggttgatgaaccagatcagtgaacaaactgcggctcaatatgccagcgctcaagagattctgggaaatgagactcctaaggcattaccataagatgcttccagaaacgacagggatgaagatcaggaacatatcgatgctcataacagcatgggaaccattgtcagttggcttcaagtgctctggtggagcgacgtgtacttgactt

SEQ ID NO: 127616 - DNA, 249 bp, Glycine max
atctcgagcgctcgagcggctcagaaacaatactttgtatctacagatgttggtgcggaaaagatgcactggtatgcattagcacaaagaacctcctggtggtgttgatgagcccaacggaaaaaaggaaaggttgctaaggatatttgagggctggtgtgataatgctgtagatctgatacttgcacagatgaagaagcaattctaagacgagacatatatgacaggataccaacattgacatgggga

SEQ ID NO: 127617 - DNA, 252 bp, Glycine max
ggagtttccagcaatcagcgcaggagcgaactgtataagctttactggtggtgatactggcattgcaatttcaaagaaggcaggcatgattcctctgcaaatggagttgggaggaaaagatgcctgcattgtacttgaagatgctgacctgtgatttggttgctgcaaacattataaagggaggtttttcatacagtggtcagagatgcactgctgttaaggttgtcctggtaatggagtccgctgctgatg

SEQ ID NO: 127618 - DNA, 260 bp, Glycine max
cgaaccctctcgttcgtgccgatcactaggtcacacttcatcaatggcgggtagaggcaaaaccctaggatccagcgccgctaagaaggccacctcaaggagcagcaaagccggcctccaattccccgtcggtcgtatcgccaggttcctcaaggccggaaagtacgccgagcgcgtcggcgccggagcccccgtctactcgccgccgttctcgaatatctcgctgctgaggttttggaattggctggaaacgctgcgag

SEQ ID NO: 127619 - DNA, 247 bp, Glycine max
ggcagaaatcaagctcatcctagagttctaaaaatgtcagcagcctcctccatggctctctcttccccatccttggctggctaggccgttcagctgggcccatcagcccccgaagtcgggagggtcagcatgaggaagaccgtcaccaagcaggcctcctccggaagcccatggtacggcccaaccgcgtcaagtacttgggcccattctctggcgagcccccgtcctacctcactggcgagttccc

SEQ ID NO: 127620 - DNA, 248 bp, Glycine max
ttcttcacttctcttcttcaattcattctagttctggattccgactcgccgcattgactcggtccgggttggggtcgactcagttcggtttttcattctctcgcgaatctaatctataggaaaagctaagggcacatcacaatgaaggcattgattctggttggggggtttggaacaaggctgagccactgacactcagttttcctaagcctcttgttgattttgctaacaaacctatgattctgcat

SEQ ID NO: 127621 - DNA, 246 bp, Glycine max
cgtggcttcaagaagagaatctcaatggaggcccaggagctgaagcgcgtgttccagatgttcgaccgcaacggcgacgggagaataacgaagaaggagctgaacgactcgctggagaacctgggcatcttcatctctgacaaggacctgagccaaatgatccagaggatcgacgtcaacggcgcggttgcgtggacatggacgagtttggggagctgtatcagaccataatggacgagcgcgaca

SEQ ID NO: 127622 - DNA, 245 bp, Glycine max
aaaaacaagtagttgagaactaagaagaaggaaatggcttcctcaatgatctcctccccagctgttaccaccgtcaaccgtgccggtgccggcatggttgctccattcaccggcctcaaatccatggctggcttccccacgaggaagaccaacaatgacattacctccattgctagcaacggggaagagtacaatgcatgcaggtgatggccaccaattggcacgaagaagttcgagactctttc

SEQ ID NO: 127623 - DNA, 247 bp, Glycine max
cgcgttctctctccaatttggacctccctttccttcgttcctcactcactgcaacggcgccggagatccgtcgctctcctcctccaccaccaccgcgatgggcgccaattccatgctcgccgagttctctcacgatctcgacgaccagatctcccagctcatgcagtgcaagccactctccgagaacaggtccgaggtttatgtgagaaggctaatcagattttaacggatgaaagtaatgttcagc

SEQ ID NO: 127624 - DNA, 248 bp, Glycine max
ctgggtatgatcgtgctagaggtgttgaaattggaaataaagacataaagcttgagtacttggaagaggctttcactacacagaattggatagttcgtatttataaagtgaaaccacctaaaaacagatggtaactctaaaaaaacagccccaaaaaacaaagactactcttcgggaaatgatacattctagtgaacttgagcgctgaaaatctgttagatgttacaggttgtggactatttttgatg

SEQ ID NO: 127625 - DNA, 246 bp, Glycine max
caaagtagtactacttggtttcaatcaaaacaaaaactcacactttggtggccacacaaacaataacactggcagcctcactacaagctgcagctaccttcatgcaacccaccaaggtgggcatggccactcgcaacctcaaatctacacaatgcacttctcaggcttttggcttggaacccgctgcagctaaactcatttgctcccttaagcccgatctcaaagcttttgctcaaaaatgtgtcg

SEQ ID NO: 127626 - DNA, 240 bp, Glycine max
catgggttcaacaggtgagactcagattactccaacccatgtatctgatgaagaggcaaaccttttcgccatgcaactagccagtgcctcagtactccctatggttctcaaatcagctcttgagcttgatctgttggaaatcatagccaaggctggccctggtgttcacctttccccctcgacattgcttctcggctcccaacacacaaccctgatgcacccgttatgttggaccgtata

SEQ ID NO: 127627 - DNA, 156 bp, Glycine max
cgaaccctctcgttcgtgccgatcactaggtcacacttcatcaatggcgggtagaggcaaaaccctaggatccagcgccgctaagaaggccacctcaaggagcagcaaagccggcctccaattccccgtcggtcgtatcgccaggttcctcaaggc

SEQ ID NO: 127628 - DNA, 249 bp, Glycine max
tagagaagaaaatgaaagtcattgttttcttcgttgctataataattttaggtgcagaatggtaatgcaatgggtcagagcatgagcatgagcatgagcatgagcatggccacagctaccaaattttccctctgcgaatgaaaaccggccccggtggccactacattccggaggtatcgtgcaaaagttgaggcttggtgtggaagcacacaacgtcattgactggagaaccattcctcaagattgcga

SEQ ID NO: 127629 - DNA, 241 bp, Glycine max
gcagacttaacaacagcacaaagcgggttactgtctgttcaagctaccatctctctctctctttcttagtgcctccttgccagaagttaaaatggcccaagaaactttcctattcacatctgaatcagtgaacgaggggcaccctgacaagctctgtgaccagatctccgatgctgtgtcgatgcatgcttggagcaggaccctgacagcaaggttgcctgtgaaacctgcaccaagacca

SEQ ID NO: 127630 - DNA, 243 bp, Glycine max
ccgcgggctagttctatcgggtaaagccaacgattagagtcatcgggttgcgcaacgccctcgacctattctcaaactttaaataggtaggacggtgcggcttctctgttgagccgcgccatggaatcgagagctccaagtgggccatttttggtaagcagaactggcgatgcgggatgacacaataaaacgaagatgggtaagtgtgtaacaaaaaattattcacttgtcaaattcactttc

SEQ ID NO: 127631 - DNA, 236 bp, Glycine max
ctctctttccctctctatctctatctctctttctctgtctctttactggttgaagtttgaaagacaaatacaccatggcagatatcctgagtgaagaacagattgttgattttaaagaggcctttggcttgtttgacaaagatggagatggttgcattactgtggaagaacttgccatgtcattcggtcattggatcagaaccccactgaagaagagctccaagatatgataagcg

SEQ ID NO: 127632 - DNA, 246 bp, Glycine max
aaacactcataacacaaagcacaaagcaaagctcatccttgagttaaaaaatggcagcagcttcttccatggctctctcatccccatccttggctggcaaggccgtgaagctgggcccatcagccccagaagtgggaagggtgagcatgatgaagaccgtcaccaagcaggtctcctcaggtagcccaggtacggcccagatcgagtcaagtacgtgggcgcattctgtggcgagcgcccgtccta

SEQ ID NO: 127633 - DNA, 116 bp, Glycine max
gggaaggctctgacgaggagtactgcagcatcgaccccaagttgaccagctgcgccaccaatgctagcatctgtggggacgaggcacgctgcgtgcgcaccgagaaagcggcctac

SEQ ID NO: 127634 - DNA, 280 bp, Glycine max
aacgggtggtgcctctcttccatctccccagccaaaacctctctcaggaaggccacattacgcccttccgtcttcgcaacccttaacactccttcttctccttcctcttcatcttccttcccctctctcattcaagacaggcctgtttttgctgcccctgcccccatcatcaccccaactgtgagagaggatatggcaaaggaatacgagaaagctattgaagaacttcagaaattgttgagggagaagagtgaactcaaagcgacagctgctgaaaaag

SEQ ID NO: 127635 - DNA, 275 bp, Glycine max
gagaaagtagacacagccatgtccactactggtactgttctggcttccactccaacactaaggctattaggcaaagtggcattggttactggtggagcgtctggaattggagaaagcattgtgcgcctcttccatatccatggtgctaaaatatgtatagctgatgtgcaagacaaccttggaaagcaggtctgtcagtctcttggtgatgaagcaaatgttgtttttgtccattgtgatgttacagtagaggatgatgtttcccatgcagtgga

SEQ ID NO: 127636 - DNA, 275 bp, Glycine max
gatcgatctcatggccggtagtaaaagccataataccatgagtacagcatccaagtccaatgatatctatcttaagctcttggtcaagctttatcgattccatgttcggagaactggcagcaaattcaatgccgctatactcaagagattgttcatgagcaaggttaacaagcccccattgtctttgtcaaggttgattaagtataccaaggggaaggaagataagattgctgtggtcgtgggcaatataaccgatgatattcgtgtttatgaag

SEQ ID NO: 127637 - DNA, 268 bp, Glycine max
ggcggagaacggtgaaggcggcgaggagtacctgttcaagatagtgctgattggggactccgcggtggggaagtccaacctcctctcgcggttcgcgcggaacgagttcgatagcaactccaaggccaccattggggtcgagttccagacgcagctcgtcgagatcgacggcaaagagatcaaggcgcagatctgggacactgcgggacaagagaggtttcgagctgtcacctctgcttactacagaggcgctgttggtgcgctcttg

SEQ ID NO: 127638 - DNA, 277 bp, Glycine max
atgtttgagcgtttcactgagaaagcaatcaaactgattatgctagcccaggtagaagcaagacgtcttggtcacaattttgttggcacagagcaaattctattgggtcttatcggcgaatgaactggtattgctgctaaggtgctaaagtcaatggggatcaacctcaaagatgcacgagtggaagtagaaaaaatatctcgaaggggtagtggatttgtggctgttgagattccatttactccccgtgcatagcgtgttttagaactttcactgg

SEQ ID NO: 127639 - DNA, 279 bp, Glycine max
gtgagcgtgaaagatgccttgggtgaggctttcagagtctccaaggctcgacgttgctattgacatgggtaatccatttctcaatctcactgttgatggtttccttaagatcggagcagtcgcagccacgcgatcagctgctgaagatacttatcatattatccaaaaggggaatatctcaagtcgtgatttcgagaaaactttgaagaagatgtgtaaagaaggtgtatattggggaactatagctggcgtttatgttggaatggaatatggggtaga

SEQ ID NO: 127640 - DNA, 268 bp, Glycine max
gaacaatggaaagccttatgaacagtctgccactgctgaattaccaacgtttgtgcgtttgtttcgttactatgctggttgggcagataaaatccatggtctgacagtgcctgctgatggaaattatcatgtggagacattgcatgaaccaattggtgttgcaggacaaatcataccttggaactttcctctcctcatgtttgcttggacagttggaccagctcttgcatgtggaaatactgtcatccttaagactgctgaacaaaca

SEQ ID NO: 127641 - DNA, 276 bp, Glycine max
cccaaagtgcttctctcctctgtctttttctctctcttgctatccttttggctagtggcactgctgcaagtgtaactccaagaagcgcagtgccaagccaccatgtttcaacattcaacagaagcttttttccttccacttttctctttggatatggttcttctgcttaccaggcagaaggagcagcaagtgtagatgggagaggaccaagcatatgggacacctacactagacagcatactgaaaggatttgggatcatagcaccggtgacatgg

SEQ ID NO: 127642 - DNA, 274 bp, Glycine max
gaagactatctatggctgctagatatttaaaggaaattgctgaattatatgagggtgaacagaatattgagcaggctcttgttaactatgaaaaatcagctgatttttttcaaaatgaagaagtgacaacttctgcaaaccaatgcaaacaaaaagttgcccagtttgctgctcagctagatacatatcagaagtcgattgagatttacgaagagatagctcgccaatccctcaacaataattagctgaagtatggagttaaaggacacctgct

SEQ ID NO: 127643 - DNA, 277 bp, Glycine max
ggcagaaagcaagctcatcctagagttttaaaaatggcagcagcctcctccatggctctctcttccccatccttggctggcaaggccgtgaagctgggcccatcagcccccgaagtcgggagggtcagcatgaggaagaccgtcaccaagcaggcctcctccggaagcccatggtacggcccagaccgcgtcaagtacttgggcccattctctggcgagccctagtactacctcactggcgagttcccaggtgactacggctgggacactgctgggc

SEQ ID NO: 127644 - DNA, 278 bp, Glycine max
ctgatggcaaggttgagaggctctatggtctcgcccccgttgacaagtacttggttaagaacgaagatggtgtctccattgctgcgctcaacctcatgaaccaggacaaagtcctcatggaaagctggtactatttgaaagatgcagtccttgaaggaggcattccatttaacaaggcttatggaatgacagcctttgagtaccatggaacagatccaaggtttaacaaggttttcaacaagggaatggctgatcactctaccatcacaatgaagaaa

SEQ ID NO: 127645 - DNA, 263 bp, Glycine max
ggccttgctatgagtatgataggcgtgcagggatccaggcttgtcctcagtgcaataccagatacaaacgtatcaaaggtagtcccagggttgaaggcgatgaagaggaagatgacactgctgacttggacaatgagtttgattatggggatgtagatgctctgggtccacaaccagtgtcggaatcctatgtattctagacgccccaatactgcgcgaggtgctaataacggatctggtgtggcgacacacttggaacatgg

SEQ ID NO: 127646 - DNA, 271 bp, Glycine max
tatgaagacagcatctggcctttcgggggttcaatcagtttctgttgacattaatgacaagaaaatgaccttattgggggatgttgatccagtgagtgcagtgtcaaagctacgaaagtggtgtcacactgaaatagtctcagttggacccgcaaaagaggaaaaggagaaagagaaagtggagccagcaaaagaacctgttcccctcaagctctatgatgcctatcccttttattatcatatgacaccaccactgtatctgtatagttaa

SEQ ID NO: 127647 - DNA, 272 bp, Glycine max
gtgattgtgaacaagaaagtgtagtgggaaatggcaggtgcgggtgcaggaggagggtatggggacgcgaagcagaggatagactacgtgttcaaggtggtgctgataggggactcggcggtggggaagtcgcagatactagctcggtttgcgaggaacgagttcagcttggactccaagtccaccatcggtgttgaatttcagacgaggactttggttatcgatcacaagaccgttaaggctcagatctgggacactgccggccaagaacg

SEQ ID NO: 127648 - DNA, 265 bp, Glycine max
ggggacacgaattgatgtgcgcagtaaatcaagaacaatatcagagcctgttgaacatccctctgggctccctaaatcgaactatgatggatctagcactggacaggcatcgggtgatgatagtgaagtaatcctatatcgtcaagcaatttccaaagatcctttccgtggtggtgacaatattggggtcatttgcgattcttacaccccactaggtgagcctatgcctacgaacaagagacacagagctgctgaaattttcagt

SEQ ID NO: 127649 - DNA, 260 bp, Glycine max
gacataaaaaaacccttagccatcacaaccatcatggccacctctgctattcagcaatcagcattcactggtcaaactcgctcgatgcagctcaatgagttcgtccgcaagaccggtggcgccggcaaaggtcgcactaacatgcgccgcaccgtcaagagtgctcctcagagcatttggtatggccctgaccgtcccaagtacttgggtcccttctcggagcagattccatcatacctgaccggagaattccctggtga

SEQ ID NO: 127650 - DNA, 272 bp, Glycine max
gagataactagagacagtgtgatgaaaatgaaggtccttgttttcttcgttgctacaattttggtagcatggcaatgccatgcgtacgatatgttcactctccgaatgaacactggctatggtgcccgtactccggatgtgaaatgcgcaagttggaggcttgctgtggaagcacacaacatctttggctttgagaccattcctgaagagtgcgttgaagcagcaaaggcatacatccatggcgagcaatatagatcagactccaaaacagt

SEQ ID NO: 127651 - DNA, 270 bp, Glycine max
  unsure (1)..(270): unsure at all n locations
ggagcatatatattggcctangtgntgcaaggatggctgcttcaggaagcacaatctacaagtccttatactgtagtgagtctactggtaatgaactactttcatacatgcatgtgctttatgaaatttgtccatacttcaagtttgggtacatgtcggcaaatggagcaattgctgaagctctgaaggaggaaagtgaagtccacatagttgactttcagattggccagggaacccagtgggtgagcttgattcaggcctagctcacgc

SEQ ID NO: 127652 - DNA, 269 bp, Glycine max
cttgagaggagcaaggctaacaaggaattgaatgacaagaagaggttagctactactggagcaaactttgcaagagcatacaccgtggaattcggtagttgcaagttccctgagaacttcactggttgccaagatcttgccaaacaaaagaaagtgccattccttagtgacgatttggagcttgaatgcgaaggaaaggacaaatacaagtgcggttctaatgttttctggaaatggtgaaaggaggcaaccttttatgcccaactgcg

SEQ ID NO: 127653 - DNA, 272 bp, Glycine max
gatcgatctcaaggccggaggtaaaagcaaaaaaaccaaaagaacagcacccaagtccaatgatatctatcttaagctcttggtcaagctttatcgcttccttgttcggagaactggcagcaaattcaatgccgttatactcaagagattgttcatgagcaaggttaacaagcccccattgtctttgtcaaggttgattaagtataccaaggggaaggaagataagattgctgtggtggtgggcaatataaccgatgatattcgtgtttatg

SEQ ID NO: 127654 - DNA, 266 bp, Glycine max
gaaacttcaagacactaggctgcatcgcatagaagagcctagtctttacattaagatgcaaatagcaatattcaagcttgatgatattgatcaaaaggaatgcaagaaacttctagaagatgggaagagtacactcgacagcatgacagatattgatccatctgtatatgctagctattactgggtatcatctcagtttcataagacatgccaagaatttgctgagttctacaaaagtgcgcttctctatttggcatacacatcag

SEQ ID NO: 127655 - DNA, 272 bp, Glycine max
acaacactaacaataatgaagccaccaagactgctgcagagaagaaattcaaaacactgccaccatcagagtctctgcctaagaatgaaaccattggaggctacatctttgtttgcaacaacgataccatggcagagaatctccaaagacagctctttggtctgcctccacggtacagagattcagttagaacaataactccagggttgcccctttttctgtacaactactccactcaccaactccatggtatctttgaggctgcaattttg

SEQ ID NO: 127656 - DNA, 253 bp, Glycine max
tgcctcctcttcacacattttctgtgcgcactatcatacattatcggtcacactttcagattgtgtgaagatgcgggcgggtggccgaactgatgtgcctcatgtcaataggaagtcagaggttgaccctttgaagcgggtgacatttgataagcctccatttagtctcagccaaatcaagaaggtcattccacctcactgtttccagcgttctgtgatccgctacagtctactatgatgtttacgacctcac

SEQ ID NO: 127657 - DNA, 269 bp, Glycine max
gggagaggcgcgaaaatgagcggacgcatggggaagaagaagggagcgagcttcgtgatcgattgcgcgaaccggtggaggataagattatggacattgcttctctggagaagttccttcaggagaggattaaggtcggcggcaaggccggtgcactcggcgattccattaccgtcaccagggacaagagcaagatcaccgtttcctccgacagcaacttctctaaacggtatctgaaatatttgaccaagaagtacttgaaaaagcac

SEQ ID NO: 127658 - DNA, 269 bp, Glycine max
catagaaacccaacaacaagaatgaagaagatgattctaaccctcttcttcaatatcattttatctctcctctccctctcccactcctccgtggtggatttctgcgtagagactacacaggccccaatggccccgcagggtactcatgcaagagcccagcaaaggtcacagtggacgacttcgtgcactccggccttggcaccgccggcaacacctcaaacatcatcaaagccgcggtgacagcggcgttcgacgcgcaattccccggc

SEQ ID NO: 127659 - DNA, 270 bp, Glycine max
acctaacgcagcatcgctattctcttcattccatggctttgcctcaccagcaaaccgtggattaccctagtttcaaactcgttatcgtcggcgatggtggcacaggaaagacaacctttgtgaaaaggcatctcaccggagaattcgagaagaaatatgagccaaccatcggtgtggaggttcacccattggattttttcacaaactgtggaaagattcgattttactgctgggatactgctggacaggagaaatttggtggcctcagag

SEQ ID NO: 127660 - DNA, 269 bp, Glycine max
gagagagagagagaggtatcacagtgaaacgacagaagccctaactacgcacgcactcattcttgagaaagctcaatattcattcgtccatggcactctcttctcgtctcttttccaaatccaaattgatctatggctgtcaaatacttctgcaaaaggagcatgctattccagtgcgtcactttgctaaagagtctgcccctcctgcccttaagggagatcagatgctgaagaactttttgtggaggtgaagaacatatttgagactg

SEQ ID NO: 127661 - DNA, 269 bp, Glycine max
caaagagctaacaagagattcaagaccggcatggctaatgaagaggaacagaaaaaccacctcttcggcatcaaagatctcggtcacaagactctccttcagagtgatgcactctatcagtatatacttgaaaccagtgtctatccaagagagcacgagtgcttgaaagagatacgcaagatgactgcaaaacacccactgaacatcatggcaacaccagcagacgaaggacaacttctgagcatgcttgttaagctcacgaattcaaa

SEQ ID NO: 127662 - DNA, 264 bp, Glycine max
ggaagaaagaatggcagcttgcactgtctactcaacacaatcttcggactaaaattgctccatctcaaccccatcaaagacgcaactcagttttttccaccaaaagcaggtagttttctggaggaacagcaagaagggcagctgcagcagcagaagaagctatgtgataacatgtgcagcaggtgactcacaaacagtggtgattggcctggctgcagactcagggtgtgggaagagcaccttctatgaggagctgaccagtgt

SEQ ID NO: 127663 - DNA, 230 bp, Glycine max
  unsure (1)..(230): unsure at all n locations
aattgaacttgaagtcttgctcttctctcttcaactccatacactatatctcacaannnatggatttatnngtntnnantgtcggagntgtttaaagagttagtttgatnctgaatgggtttggacgtgtggtttcagctcccagttcatccttctttgggagcagcttgaagaatgttattggctcaagggtccccaacaccaagatcttctctggaagcttcaagatt

SEQ ID NO: 127664 - DNA, 269 bp, Glycine max
agaccgacaaggacagatggaagggtcttgcctatgatatctcagacgaccaacaggacatcacaagaggaaagggtttggttgactcccttttccaagctccacaggatgctggaactcactatgctgtcatgagctcctacgagtaccttagcactggacttcgccagtacttggacaacaacatggatggattttacattgctccagcttttatggacaaacttgttgttcacattaccaagaacttcatgaccctgcccaacatc

SEQ ID NO: 127665 - DNA, 266 bp, Glycine max
aagaaagaaagaaaaccctagcttaccttttcaactttcaagatgcaaatctttgttaagacactcactggtaagacaatcacccttgaggtggagagttcagataccatagataatgtaaagtccaagattcaagacaaggaagggatcccaccagaccagcaacgtctcatttttgctggcaagcagcttgaggatggacgtacacttgctgattacaacattcaaaaggagtccactctacacttggtgctccgtctccgtgg

SEQ ID NO: 127666 - DNA, 273 bp, Glycine max
ccctcttaatcccaattttctagggtttatacaattttcgatggcttcttcagatgttgagtaccgttgctttgtcggtgggctcgcttgggccactgacgaccaagctctcgagagagccttctctccgtacggcgaaatcgttgaaacgaagattatcaacgatcgtgagactggaagatccatgggtttcggatttgtaaccttcgcctcggagcagtccatgaaagacgccatcgaagggatgaacggccaaaaccttgacggccgtaa

SEQ ID NO: 127667 - DNA, 270 bp, Glycine max
aacaaaatttagaaacaaaaacatgttggtgaaggtgtacggtccaacctatggatgtcctatgagggtgctggtgtgtctgattgagaaggaaattgagtttgaaacagtacatattgatctcttcaagggagagaataaggaacctgagttcctaaagctgcagccatttggatcacttcctgttattcaagatggtgattatactctctatgaatctcgtgcaataatcagatactttgcagagaagtataaagaccaagggacaga

SEQ ID NO: 127668 - DNA, 264 bp, Glycine max
cgaccaatctcaaaactattaccattataaggataacagggtactcccttctcacgttgatgccgaacttgccaatgctcaagcttggtggtacaagccggactatattatcaacgagcttaacataaactccgtgataaccacgccttgctacgaggagatcttgcccatcaactcatggactactcagatgccttatttcatcagaggctatgcgtattccggtggtgggagaaaggtgacacgtgttgaggtaacctggac

SEQ ID NO: 127669 - DNA, 267 bp, Glycine max
cttccgaagaatcccagaacaagccccccagcgagcagtccaataccgaactcatcacgagcgcgaagctggtggcggaggcggcgcagtcggctctgaagagcgacagcgtcaaagtggacaaggccatcgtggctgacgctgccggcgatcttctcgacgcggcggggaagtatggaaaacttgatgacaaacaaggcatatggcaatatgttgacaaggctgctgattatctgcacaattaccagggtgataataccactgctc

SEQ ID NO: 127670 - DNA, 255 bp, Glycine max
caataatattttagttaaaacatgtccatggccatcattaacacttttggaaacgttgatgtctatattctattattatcatcatggtttctcgtatctgctgtgtgtgtttggggacgacccgccacttttctgcaagactttgaaatcacgtggtcaaagactcatatcatgcaaattgatcaaggcagatccatccaactcattctagatcaaaactctgggtgtggctttgcttccaagagtaagtacatg

SEQ ID NO: 127671 - DNA, 266 bp, Glycine max
gcagaaagcaagctcatcctagagttttaaaaatggcagcagcctcctccatggctctctcttccccatccttggctggcaaggccgtgaagctgggcccatcagcccccgaagtcgggagggtcagcatgaggaagaccgtcaccaagcaggcctcctccggaagcccatggtacggcccagaccgcgtcaagtacttgggcccattcgctggcgagcccccgtcctacctcactggcgagttcccaggtgactacggctgggac

SEQ ID NO: 127672 - DNA, 260 bp, Glycine max
ctcgagcgatgaaggcactaattcttgttggagggtttggaacaaggttgaggccatagacactcagtgttcccaagccttatgttgattttgctaacaagcccatgattctgcatcagatagaagctctcaaggccattggcgtcaatgaagtggtactagctatcaattaccaaccagaggtcatgttgaatttcttgaaggagtttgaggcaaaacttggtatcaaaatcacttgttctcaagaaactgaaccgcta

SEQ ID NO: 127673 - DNA, 260 bp, Glycine max
ggtgtatcaaacccttgtgtgatcttctcatctgtcctgatcctaggattgtgacagtttgtctggaaggccttgaaaacatcttgaaggtgggagaagctgataaaaatataggcaatactggtgatgtgaatctatatgcacaaatgattgatgaagctgaggggctggagaaaattgagaacctccagagtcatgacaacacagagatttatgaaaaggcggtcaagattcttgagacatactggttggaggaggaa

SEQ ID NO: 127674 - DNA, 266 bp, Glycine max
ttcattctttatggatcaagaaacaacaagaagaaacaccatgcaagaatgtcatgtgatagccccaacaacaacaacggcaacatcatcgtatcgtggagttcgtcagcgaaaatggggcaaatgggtgtccgaaatccgtgagcctggaaagaagagcagaatatggttagggagctatgagtcaccagagatggctgcagcagcatatgacgtggcagcgttacaccttcggggacgagctgcaagactcaatttccccgaat

SEQ ID NO: 127675 - DNA, 260 bp, Glycine max
tattgatgtgcagcatcagtgcgcgagccaaaaggaagcgccaatctgcattccgcggagtgcgcaaacgcagctggggacgctacgtctctgagataaggctcccgggccagagaacacgcatatggctcggctccttcggctcgcctgagatggcggctcgcgcttatgactccgctgctttcttcctcaaaggaacatctgccactcttaatttccccgacctcgtacactccctgcctcgacctctctcatcttcc

SEQ ID NO: 127676 - DNA, 259 bp, Glycine max
caacttctgctcttccaactcctacaacgctaatctctgctctcatgggcaaggtcaagatcggaatcaacggatttggaagaattggccgtttggttgacagagtcgctctgcaaagagacgatgttgaactcgttgccgttaacgaccctttcattaccaccgattacatgacatacatgtttaaatacgacagtgttcacggacactggaagcatcacgatgtcaccgttaaggacgagaagacccgtctcttcgg

SEQ ID NO: 127677 - DNA, 254 bp, Glycine max
gggacaaggaaaatctttccaatgtgagcttgtctttgccaagatgggaatcaaccccatcatgatgagtgctggagagttggaaagtggaaatgcaggagagccagcaaaactgatcaggcagagataccgtgaagctgcagacatgatcaagaagggaaagatgtgcgctctcttcatcaacgatcttgatgcaggagctggtcgtcttggtggaaccacacaatacactgtgaacaaccagatggtgaatg

SEQ ID NO: 127678 - DNA, 256 bp, Glycine max
atggattttacattgctccagcttttatggacaaacttgttgttcacattaccaagaacttcatgaccctgcccaacatcaaggttcctctcattcttggtatctggggaggcaagggacaaggaaaatctttccaatgtgagcttgtctttgccaagatgggaatcaaccccatcatgatgagtgctggagagttggaaagtggaaatgcaggagagccagcaaaactgatcaggcagagataccgtgaagccgc

SEQ ID NO: 127679 - DNA, 256 bp, Glycine max
ctttattctcccaattcaaaactctcactccgttagaagcaccaaatcctgatggcaccaaaggcagagaagaagccagcggagaagaagcccgcagaggagaagaagtcacggtgggagacaaggctccggcggagaagaagccaaaggccggaaagaagcttccgaaggagggaggcgccggcggcgaagggaagaagaagaagagaaacaagaagagcgtggagacatacaagatctacatcttcaaggttct

SEQ ID NO: 127680 - DNA, 266 bp, Glycine max
  unsure (1)..(266): unsure at all n locations
gaagactatctatgggtgctagatatttaaaggaaattgctgaattgtatgagggtgaacagaatattgagcaggctcttgtttactatgaaaaatcagctgatttttttcaaaatgaagaagtgacaacttctgcaaaccaatgcaaacaaaaagttgcccagtttgctgctcagctagaacaatatcagaagtcgattgagtattacganagagatgctcgccanatcctcaacaataattgcgtaagtatgagttaaggacac

SEQ ID NO: 127681 - DNA, 266 bp, Glycine max
  unsure (1)..(266): unsure at all n locations
gtggcggaagaaccatccccatggttttgttgcgaagcgtgagacgctgcccgatggaaccgtgaacttgatggtgtggcattgcactattcccgggaagactgggactgattgggagggtggctacttcccgcttacgttgcactttagtgaagactacccaagcaagcctccaaagtgtaaattcccacaaggtttcttcnacctaatgtttatccttcgggactatttgcttcctatacttaataggatagtggtgagacacc

SEQ ID NO: 127682 - DNA, 267 bp, Glycine max
gtgcattcaatggccaccacagcagctctatccggaaccatggtgagcacctccttcatgaggaggcaacctatgaccaccacaagcctaaagacattccccaacgttggtgaagctctttttggtctgaaaagtggacgaggtggtcgtgtcacttgcatggcctcgtacaaggtgaagctcataaccccagaaggagaagtggagtttgaatgcccagatgatgttttcattgtgacaaggcagaggacgaaggcattaacttcc

SEQ ID NO: 127683 - DNA, 237 bp, Glycine max
ctcatcatcctccaatggcacctatgccttatccgtggatgccttgtgctccttatgttgttaagcctcaagggtctcaggttcctttggttcccattcctaggttgaagcctcagcaacctgcttcagcccccacgggtaaaaagagtgagaacaagaagagtgaggggaaaactacgaaggttgctagcattagtttgctgggtttgtttctctttatcatgcttttcggtgggc

SEQ ID NO: 127684 - DNA, 257 bp, Glycine max
  unsure (1)..(257): unsure at all n locations
cctagattcagccacagtttcggaggagaagaaaatagtcgttcgagatggtccgtacgaagcaaactgctcgtaagttcacaggaggaaaggctcctaggaagcagcttgcaaccaaggctgcacgtaagtctgcaccaactactggtggtgtgaagaagccacatcgttaccgtcctgggaccgatgcacatcgngagaataggaaactccagaagagntccgagcatttgantaggaagcactccattcagagg

SEQ ID NO: 127685 - DNA, 213 bp, Glycine max
gcaccctgcaaattcaatggcttcagattagaaactatcgaacccaatgagggaaataaaggtgcagatactcgtcctcaatatctccgttggtgagagtggagactgtctcaccagagccgccaaggtgttggaacagcttagtggccaaaccccagtgttttccaaagcaaggtacactgttcggtcctttgggatgagaagaaatgagaa

SEQ ID NO: 127686 - DNA, 266 bp, Glycine max
tcagcatttcccccaaatcaccgtcacaccatgggctcttccgcgatggtattggacccgaaacactcatcgataactccgccgttccacccgtcgacgaaatcggactaccttcaaggcagcttcggcggcgacgccaccgcctccgacgaggacgacctctacagccgcctgaaatccctccagcgccagctgagcttcatcgacatccaggaggagtacgtgaaggacgagcagaagaatcgtaagcgcgacatgctccgagc

SEQ ID NO: 127687 - DNA, 242 bp, Glycine max
gccagattatgcttacctcaaaagaatatttcgtgacctgttaattcgtgaaggattccagtttgattatgtatttgattggaccatcttggactatcagcaatcacagctagatgctcctccaggacgtgccagtatgcctgtattttagggtcctaatgttggaactagttcagcatctgccaccagctggtgactaatgctgatagacagacacgagaagaagactggcgacctcctgg

SEQ ID NO: 127688 - DNA, 218 bp, Glycine max
atcgtttacaaaagttgctgtcaaaggctaatgaagagaatgctgatgaaattcaattggatgattttcctggtggtcccaaggcttttgaaatatgtgcaaagttctgctatggaatgactgttactcttaatgcttacaatgttgtggctgctcgttgtgccgctgagataccttgagatgactgaggatatgacagagggaacattaatttcaaa

SEQ ID NO: 127689 - DNA, 213 bp, Glycine max
aaaaaggtcaagagctagcagcttgggcagcagatttaaaacggcgagagaaggaaataataagaagagaagaggctgtttctagagctggtgttcctgttgatgataagaattggcctccatttttcccaatcattcaccatgatattgccaatgagataccagttcatgctcagaggtttcaatcattggcctttgcaagtgtggtaggaa

SEQ ID NO: 127690 - DNA, 258 bp, Glycine max
  unsure (1)..(258): unsure at all n locations
gtagatggagaacatggtgttttttcttgctgaacttggattgatgcattatcctactgcaatcctgtatcgcccttctctgatcgttgctgctgccgtgtttgcggctcgatgtacccttggaaggagccctttctggacaagcactttgaagcactacacaggctactctgaggagcaactgagggattgcgccaaaatcatggtcaaccttcatgctgccgactcaggaagctaagctaggtcatntttcaagaa

SEQ ID NO: 127691 - DNA, 234 bp, Glycine max
taataattcagttggtgtaggggagaaagctatagtgttttctcagtggacaaggatgctagatatacttgaagcatgtcttaagaattcgtcgatccagtatagaagactggatggaacaatgtcagtcacttctagagataaagctgttaaagattttaacactctccctgaggtctcagttatgattatgtctgtaaaggctgctagtcttggactgaatatggttgctgc

SEQ ID NO: 127692 - DNA, 86 bp, Glycine max
ctgggactttcggaccctgaaggaacaggagggttcattgagccgaaatggctagcacatggtgagataatcaatggtcgttatgc

SEQ ID NO: 127693 - DNA, 261 bp, Glycine max
tgggttctaaaggactcaccgatgcatcaaagatagccattttgaatgcaaactacatggcaaaacgattggagtcttattatcccgttcttttccgtggagtcaatggaacagttgctcatgaattcatcattgacctgagaggctttaagaatactgctggaattgagcctgaagatgttgcaaagcgcctcatggactacggttttctatcaccaacaatgtcatggcctgtgcctggcacactcatgagttagccaa

SEQ ID NO: 127694 - DNA, 230 bp, Glycine max
ggaagcctcggtgactggtttggaggctttctattttcagctggacagcaggccaatgaagctgttcagggccaattaacctctctcagtttcactagtttggctgtaatttatggggctgggcttgttaccagcctttctccctgtacacttagtgtcttaccactgacccttggtttacattggggcaattgagctctgcaaatgcagagcacaggctgctaggagat

SEQ ID NO: 127695 - DNA, 266 bp, Glycine max
  unsure (1)..(266): unsure at all n locations
gtccaagcagagcttgtgcactgcagatgggccatgttgggagctgctggcattttcatcccagaattcctcacaaagattggtatcctgaacaccccttcatggtacactgctggagagttggagtacttcacagacactaccacactcttcgtagttgagctctttttcattggttgggccgagggtagaaggctgggctgatatcataagccaggcatagctaacacatacccgancattcccaacaacaagcgtacaggaac

SEQ ID NO: 127696 - DNA, 222 bp, Glycine max
cgtgtatattcattttagcatcaaggttgaatctcagagaaaaagaaacatcgacaagcatgtctggaagaggaaagggaggcaagggtctcggaaagggaggagccaaacgacaccgtaaggttctgagggataacattcagggaatcaccaagcccgcgattcgccgtctggccagacgtggtggcgtcaagcgtatcagtggtcttatctatgaagaaa

SEQ ID NO: 127697 - DNA, 264 bp, Glycine max
  unsure (1)..(264): unsure at all n locations
gttcccagaagaatggatcactcttgggaagcacaaaagcttcttttcttagtgggaggaaactgaaggtgaacaactttacagcaccagttggagcacgatccagcactacagtttgcgcagttgctgagcctgataggcctctgtggatcccaggcagcaccccatcatcantgcatgactgcagnttgtcaggagactttggcattgaccactatgacttgcactgtaccagtgagccngtagagtaagtcctagcagagc

SEQ ID NO: 127698 - DNA, 252 bp, Glycine max
agatcctgaagaatgtgaaatctttatagttgaaggtgattcagctggaggaagtgctaagcaagggcgtgacaggcgcttccaggccattctccctctgaggggtaagattctgaatattgaaaggagggatgaagcagcaatgtacaaaaatgaagagatccaaaatttaattcttggtcttggtctcggggtgaagggagaggattttaagaaagatgcactccgatatcataagattattattttgac

SEQ ID NO: 127699 - DNA, 241 bp, Glycine max
gcaattgaagttgaagtcttgcccttctctcttcaactccaaacacaagacatcatcatccatggctgcctccgtctccactgtcggagctgtcaacagagctcttttgaacctgaatgggtctggacctggggtttcagctcccagttcatccttctttgggagcagcttgaagaaggttattggctcaagggtccccaacacaaagatttcctctggaagcttcaagattgttgctgta

SEQ ID NO: 127700 - DNA, 248 bp, Glycine max
acagaatggctcccaagggtttaacctttctggctgtgttaatatgcgtttcagcactgtcactgagtccttctattgcgggggaagggcaaaataatggccttgttatgaacttctacaaggaatcatgccctcaggctgaagacatcatcacagaacaagtcaagcttctctacaagcgccacaagaacactgctttctcctggctcaggaacatcttccatgactgtgctgttcagagttgtgat

SEQ ID NO: 127701 - DNA, 217 bp, Glycine max
agcttagtcactcccagcatgaccctcactcgggccaaggtggaggtgaacatgcctaggaaaaggaaaggcaattgctctcagcatgaccgggccttggagcggttctatgaacaggtggtccaggctatccagcgccacatacactttgatgttgtaaagtgcatcctggtggccagcccaggatttgtgagggagcagttctgcgactacatgt

SEQ ID NO: 127702 - DNA, 248 bp, Glycine max
attcagattacattgcaaaaatggcatcattcaccatgacagcttccatccttggcagcccagccgtcaccaaccggtcggcagtagcaacgcagaggagatcactcgtagtgaatgctgccaaagctgttgaagcagaaaaggtcagttatgacaatgacatggatggtagcaatggaaggaggaacttgatgttcgccgcggcggcggctgctgtttgctctgttgctgggatggcagtggcagat

SEQ ID NO: 127703 - DNA, 253 bp, Glycine max
aaatgtcgatggaaaattgaagtcaagacatgagtttcccccggaggagtttgttgaaaacttgaagttaatggagcatagatatggtgcgaaggaatttgtgacaagcaaggacagtagccttttatctccgggcacattctatctcactgaagttgactccatgtatcggagattctattcaaagaaaactaaagaaagcagtttgactcacgctgagaacggtgtgattgctaatggcgttgctaatggc

SEQ ID NO: 127704 - DNA, 249 bp, Glycine max
ctccattctcacttctcaaattgaatcgaacgaattcacaaaccctagttttcgaggatgggtcagatccagtactccgagaagtacttcgatgacacttacgaatatagacatgtggttcttcctcctgaagtcgcaaaactgcttcccaagaatcgtcttctctccgaaaatgagtggcgggcaattggggttcagcagagccgtggctgggttcattatgcaattcatcgccctgagccacacata

SEQ ID NO: 127705 - DNA, 248 bp, Glycine max
agtgagggccttccatggcttccgcttgtgcttcctctgcaattacagctgttgccatctctacgccgagttccgggcagaagaatggatcaggaggttgttttcttagtggaaggaaattgagggtgaaaaaggagagagcagcaattggaggacgatcgatgggcactacagtgtgcgcagttgctgagcctgacagacctctatggttcccaggcagcacccctcctccatggcttgatggcact

SEQ ID NO: 127706 - DNA, 245 bp, Glycine max
cgcgggtgaggtagaacccttccacggtggtgactgcgcgatgggtgcctacaagtatgtttcagagctatggcgcaagaagcagtctgatgtcatgcgcttcttgcagcgggtgaggtgctgggagtataggcagcaaccttccattgttcgcttgacaaggtcgacccgccctgacaaggctcgtcgcttgggcttcaaggctaagcagggctatgtgatataccgtgttcgtgttaggaggg

SEQ ID NO: 127707 - DNA, 246 bp, Glycine max
aggacttgtgaaggccgttggagtttcaaactatagtgagaagcgactccgtgaggcttatgagaagcttaagaagagaggtattccattagctacaaaccaagtaaactacagcctcatctaccgggcccctgaagaaaatggtgtaaaggctgcctgtgatgaacttgggataacaataattgcatattcaccaattgctcaaggtgctctcactggaaagtatactcctgataaaccaccagg

SEQ ID NO: 127708 - DNA, 245 bp, Glycine max
cggtattaaagtcgacaagggtttggtaccccttgctggttccaacgatgagtcatggtgccaaggtcttgatggtcttgcctctcgctcggctgcatactaccagcaaggtgcccgtttcgccaaatggcgtactgttgtgagcatccccaacggtccctctgctctggcagttaaggaagcagcctggggtctggctcgctatgccgcaattgctcaggacaatggattggtcccaattgtgg

SEQ ID NO: 127709 - DNA, 245 bp, Glycine max
cacccaccattggatccaccaatctccaaccttcttctccattgttccgtttctctctccaacgggaagaactttttttttgtgtgtgtttttggtggtgagttggtaagaagcaatggcacgcaagaagatcagagagtatgactccaagagattgttgaaggagcactttaagagactctctggccaggacttgcccatcaagtccgcacaagttacagaatccaccgatttcaatgagctaa

SEQ ID NO: 127710 - DNA, 248 bp, Glycine max
ctaaagtgcaaaacctgagatagaaaatggagaagatgacaatagacgaggttcaatcaaccacgaagatacagcgtgttgctacacacactcacattaaaggcctaggtctcgaggcgagtggaaaagcattgagttttgctgctgggttcgttggacaagttgaggcaagagaagcatcaggtcttgtggtggacatgatacggcaagagactatggctggccgggcacttcttctcgcaggacag

SEQ ID NO: 127711 - DNA, 240 bp, Glycine max
aaattcgatttgtaccaaattttcttcacaaaatgtctggtcgtgggaaaggtggcaagggtttgggaaagggaggtgccaagaggcacagaaaagttcttcgtgataacattcaaggtatcacgaaacctgcgattcgtaggttagcgagaagaggtggcgttaagaggatcagtggtttgatctatgaggaaaccagaggagttctgaagattttcttggagaacgtgattcgagatg

SEQ ID NO: 127712 - DNA, 254 bp, Glycine max
aatagattatcctaagtctttgggaatagtgctgcaatggcttcaagtcaggaggaggtgacccttttgggagctactggaagcccatttgtgtgcagggttcatattgccctcaagttgaagggagttcaatacaaatatgtcgaagaaaatttgaggaactagagtgaactgcttctcaaatccaacccagttcacaagaaggttccagtgtttattcacaatgagaagcccatagcagagtctcttgtgat

SEQ ID NO: 127713 - DNA, 247 bp, Glycine max
agaaagcaagctcatcctagagttttaaaaatggcagcagcctcctccatggctctctcttccccatccttggctggcaaggccgtgaagctgggcccatcagcccccgaagtcgggagggtcagcatgaggaagaccgtcaccaagcaggcctcctccggaagcccatggtacggcccagaccgcgtcaagtacttgggcccattctctggcgagcccccgtcctacctcactggcgagttcccag

SEQ ID NO: 127714 - DNA, 245 bp, Glycine max
agagataactagaaacagtgtgatgaaaatgaaggtccttgttatcttcgttgctacaatttcggtagcatggcaatgccatgcatacgatatgttccctctccgaatgaacactggctatggtgcccgtactccggaggtgaaatgcgcaagttggaggcttgctgtggaaacacacaacatctttggctttgagaccattcctgaagagtgctttgaagcaacaaaggattacttccatggtg

SEQ ID NO: 127715 - DNA, 244 bp, Glycine max
accgaatgagagcatcaaactcttcttcttcgatttccattgcgaacgttactttttcttcttctttctcttcattttcttcgctcttcgatcttcgtccggggactgctccgaataccatcaccaccactcgccgatggccacgatcggaggcttacacgactcccaaggctctcaaaacagcgtcgaaaccgaagcccttgctcgattcgccgtagacgaacacaacaagaagcagaattcg

SEQ ID NO: 127716 - DNA, 243 bp, Glycine max
ctatggacaacattactctcttctctataataactgtaatgtccttcttcttgttagcacctgtggctatcttcatggagggtgtcaaatttacccctgcttacttgcaatctgctggggtgaatgttagacaactttacatcagatctcttcttgctgctctctgtttccatgcgtatcaacaagtttcgtatatgatattgcaaagggtatcacctgttacccactctgtgggtaattgtg

SEQ ID NO: 127717 - DNA, 243 bp, Glycine max
cgagataactagaaacagtgtgatgaaaatgaaggtccttgttttcttcgttgctacaattttggtagcatggcaatgccatgcgtacgatatgttccctctccgaatgaacactggctatggtgcccgtactccggaggtgaaatgcgcaagttggaggcttgctgtggaagcacacaacatctttggctttgagaccactcctgaagagtgcgttgaagcaacaaaggaatacatccatgg

SEQ ID NO: 127718 - DNA, 208 bp, Glycine max
gtagttgagaactaagaaggagaagcaaatggcttcctcaatgatctcttccccagctgttaccactgtcaaccgtgccggtgccggcatcgttgctccattcactggcctcaagtccatggctggcttccccaccaggaagaccaacaatgacattacctccattgctagcaacggtggaagagtgcaatgcatgcaggtgtggcca

SEQ ID NO: 127719 - DNA, 245 bp, Glycine max
gaaaatgttcagaaaccagtacgacacggacgtgacgacatggagcccggcggggaggctgttccaggtggagtacgcgatggaggcggtgaagcagggctcggcggcgatagggctccgatccaagacccacgtggtcctcgcatgcgtcaacaaggctaactccgaactctcatcgcaccagaagaagatcttcaaggtcgacaaccacatcggcgtcgccatcgccggcctcaccgccgacg

SEQ ID NO: 127720 - DNA, 236 bp, Glycine max
gccagtttggtgacacaacatacactaaggtgtttgttggaggcttggcctgggagactcaaaaggagacaatgaagaagtattttgagcaatttggtgagatcttggaggctgttgtcatcactgacaaagccactggaagatctaaaggctatggatttgttacttttcgtgaaccagaagctgccatgagagcttgtgtggatcctgctcctgtaagcgacggtaggagtcct

SEQ ID NO: 127721 - DNA, 243 bp, Glycine max
aagagacaggccctgaactgtactatattgactacattgcaacgcttcacaagcttgaaaagggggcttttggttatggctcctatttttcactctcaatgatggacagacactaccatagtggaatgtcagttgaagaagcaattgatctcgttgataagtgcattatggaaatcagatccaggcttgttgttgcgccgcccaactttgttattaaaatcgtggacaaggatggtgcaagag

SEQ ID NO: 127722 - DNA, 243 bp, Glycine max
ctgacaaagttttctgagaaaataaggattattattgagagaatggctggctcatcggaagaaggacaagtcattagctgccacaccgttgaagaatggaacgatcaactccagaagggcaacgaatccaagaaactcattgttgtggattttactgcttcttggtgtggaccatgccgtttcattgcaccattcttggctgagctggctaagaagttcacaagtgtcatattcctaaaggtg

SEQ ID NO: 127723 - DNA, 238 bp, Glycine max
cttgggaggagttcaaaagacacagactaggcgctgcccaaaattgctctgccactcttaacggcaaccacaagctcactgatgctgttcttcctcccacgaaagactggaggaaagaaggaatagtgagtgatgttaaagatcaaggcagctgcggatcatgctggacattcagcacaactggggcttaagaagcagcctatgcacaagcatttgggaagagtatctctctttctga

SEQ ID NO: 127724 - DNA, 242 bp, Glycine max
gggaactgatgaatgagatattggagaaagggcacagcagagtcccagtctattatgagcagcctacaaacattattggacttgtactggtcaagaatttattgacagttcatccagaagatgaagcacccatgaagagtgtaaccatacgcaggattccaagggttccagaaagtatgccactttatgacattttgaatgagtttcagaagggccatagccacatggcagttgttgtcaga

SEQ ID NO: 127725 - DNA, 246 bp, Glycine max
accatctatactatgttccttttgaaggttagaagtgctacaatacaaacaatggcagctactcaggaagatgtgaagcttttgggtattgtgggaagcccatttgtgtgcagggtccagattgcccttaagttgaagggagttgaatacaaatttttggaagaaaatttgggcaacaagagtgatttgcttctcaaatacaaccctgttcacaagaaggttccagtgtttgttcacaatgagcag

SEQ ID NO: 127726 - DNA, 236 bp, Glycine max
agccccccaagtaaactacacggaaagcatttccaaaactgcagaagtgaagtatgtgcacaagaaacaatcaggtggacaaggtcagtttgcagatatcaccgtccggtttgaacccatgaacccaggtagtggatatgagttcaagagtgaaatcaaaggaggtgctgtaccaaaggaatacattcctggtgtgatgaaaggattggaagagtgtatgagcaatggggtgcttg

SEQ ID NO: 127727 - DNA, 219 bp, Glycine max
actgtgttggagaatgcttgtagtgagcaaggagcaagaatgtctgcaatggacagctctagcaggaatgctggggatatgcttgatcgtctcaccctcacctataacagaactcgtcaagcatcaatcaccactgaattgatagagattatctctggagcttcagcactggaaggttaattacaggagagcaatctgtgtaatatattcaacagtggc

SEQ ID NO: 127728 - DNA, 238 bp, Glycine max
tgagggagtcgatgacgcagctgttaaggttgttgacattgttgatacattcagacttcaggagcaacccgcttttgataagaaacagtttgttaccttcatgaagaggtttatcaagaatttgactcccaagctcgatgcagagaaacaagagttgtttaagaagcacattgagggagcaactaaatacctgctctctaagattaaggatttccagttttttgttggggagagcatg

SEQ ID NO: 127729 - DNA, 176 bp, Glycine max
atcgagccgctggtatgtccttgcaattcaacgtgttgcatcctgcctccggcagcagtgtgagagaactaatggatgcaatctttctgtgtcatgctcagaggagatatgctaccagtctttgttaccagctagcgcgatacagattcatgtggtggtactcaacagtggtaaga

SEQ ID NO: 127730 - DNA, 240 bp, Glycine max
ttttgatctttcaatttttggaaactccaaattttttacctttcaatttttgatactcggacccggcaccggcatgggtcaagcttttcgaaagctctttgacaccttcttcggcaacaccgagatgagggttgtgatgcttggtcttgatgctgctggcaaaacaactatactttacaagtttcacattggagaagttttatccaccgttcctacaattggtttcaatgtggagaaagt

SEQ ID NO: 127731 - DNA, 231 bp, Glycine max
agcaaaaacaaagaatcccaagcgaggagaaagatggaggggaaggagcaggatgtgtcgtacggagcgaacaagttccccgagagacagccaattgggacggcggcgcagagccaagacgacggcaaggactaccaggagccggcgccggcgccgctggttgacccgacggagtttacgtcatggtcgttttacagagcagggatagcagagtttgtggccactttgctg

SEQ ID NO: 127732 - DNA, 238 bp, Glycine max
gtcgcaacttgcagcacatccaatacctacacaagaaaagatgagtgctctggttgaagctttgttcgagggaactgagaaaggttttgctaaagaagctgataaaaagaagaactacttttctgttgctgttgcggatgagggatcccagccgttgttgcttcatgctattgaagagttttcttgcaagtctacttcaaatgctttgaaggaggttgccctggttctaaaggcactc

SEQ ID NO: 127733 - DNA, 228 bp, Glycine max
ccctacctctcccttcaagatgcagatcttcgtcaagaccctcaccggcaagaccatcacccttcagctggaaagctctgacaccatcgacaacgtcaaagccaagatccaggacaaggaaggaatccccccggaccagcaacatctcattttcgccggaaagcaacttgaggacggccgtacccttgctgactacaacattcagaaggagtgtactcttcacctggt

SEQ ID NO: 127734 - DNA, 245 bp, Glycine max
aagtagttgagaactaagaagaaggaaatggcttcctcaatgatctcctccccagctgttaccaccgtcaaccgtgccggtgccggcatggttgctccattcaccggcctcaaatccatggctggcttccccacgaggaagaccaacaatgacattacctccattgctagcaacggtggaagagtacaatgcatgcagatgtggccaccaattggcaagaagaagttcgagactctttcctactt

SEQ ID NO: 127735 - DNA, 205 bp, Glycine max
aagtagttgagaactaagaagaaggaaatggcttcctcaatgatctcctccccagctgttaccaccgtcaaccgtgccggtgccggcatggttgctccattcaccggcctcaaatccatggctggcttccccacgaggaagaccaacaatgacattacctccattgctagcaacggtggaagagtacaatgcatgcagatgtggc

SEQ ID NO: 127736 - DNA, 247 bp, Glycine max
gttttcttcatatcttccttgtcactgcccgtgtgtcgccgccatggccaccgtcaccacccaagcctccgccgcaattttccggccatgtacctcgaaatcgaggtttttgaccggctcttccggtaaacttaaccgggaagtgactatgcggccaatggggtgccctccttctgcctcatacaaggttgaagccaagaagggagagtggttacctggcttggcctccccaacttacctcaatggc

SEQ ID NO: 127737 - DNA, 250 bp, Glycine max
atccattctctctgtgtatttccctacctctcccttcaagatgcagatcttcgtcaagaccctcaccggcaagaccatcacccttgaggtggaaagctctgacaccatcgacaacgtcaaggccaagatccaggacaaggaaggaatccccccggaccagcaacgtctcattttcgccggaaagcaacttgaggacggccgtacccttgctgactacaacattcagaaggagagtactcttcacctcgtc

SEQ ID NO: 127738 - DNA, 247 bp, Glycine max
tcgagttggtgttaggcgtgcaatgagacaacagggtaatgttccatcatcagttatctcaagccacagcatgcatctcggtgttcttgcaactgcttggattgccatattgactggcaccatgttcactgtgtattacaagcccaggactagtccagcagagtttattgttccctatgatcaatacatggagtctctcaaaaacaattataccattgggatgcggttcaaaatgaggtttgaaggt

SEQ ID NO: 127739 - DNA, 246 bp, Glycine max
agttcggattcgagtgggattgttgttgtgtcaggaaatagtgtggggcaaggtgcgacgcattgtgtggaatggatcgggaagcgagggtactgcgatacagagagaaaaggaagaaccgaaaattcgagaagacaattcgatacgcatcgcgaaaagcatatgcggaaacccggcccaggataaaaggccgcttcgccaaacgaacagaaattgactcggatgtggagcgtctctatagccctg

SEQ ID NO: 127740 - DNA, 247 bp, Glycine max
agtgctagaagttgtgatgggacttgcgtgtaacattcttagacttggaggcaaagcaaacttggcaagtaaatatttctgttcctgaaggttgtgctgatccaagtgctagaagttgtgatgggacttgcgtgtaacattcttagaattctcaatgtctatggtgcaaagagaagatgccaagtttgagatgattttactatatttttcatattggactgtcttcctctataattttgagttaaag

SEQ ID NO: 127741 - DNA, 251 bp, Glycine max
cggctcatttctgctcaatgtgtggccctaaattctgctctatgaagataacggaggatgtgaggaagtatgctgaggaacatggctatggaactgatgaagctttgcagcgtgggatggatgctatgagtgctgaatttcaagctgccaagaaaactatcagcggggagcaacatggtgaagctggcggagagatttacttgccagaagattacgttagttccaagaggacttaaatggagcaaatcatt

SEQ ID NO: 127742 - DNA, 247 bp, Glycine max
cgcaaagatagtggcagagctccaagctgtgaagcacaacagtggcaagtcctacaatcagttagcggaggagactggactcaccaacgtctatgttgctcagcttctcaggagacaggctcagctcaatccccaaactgcccctctacttcgggcagcgctgcccgacctgccccaagaccttgtttctgagatgatgagaccccctttgaggtcttatgaccctaatctcatccaagaccccact

SEQ ID NO: 127743 - DNA, 246 bp, Glycine max
acaaggcagaaagcaagctcatcctagagttttaaaaatggcagcagcctcctccatggctctctcttccccatccttggctggcaaggccgtgaagctgggcccatcagcccccgaagtcgggagggtcagcatgaggaagaccgtcaccaagcaggcctcctccggaagcccatggtacggcccagaccgcgtcaagtacttgggcccattctctggcgagcccccgtcctacctcactggcga

SEQ ID NO: 127744 - DNA, 167 bp, Glycine max
taccattacaataattatcaaacctaaccagtaaaaatggtgaccgtggaggaaatccgcaacgctcagcgttcccatggacccgccaccatcttggccttcggcaccgccacgtcgtccaactgcgtctcccaagccgattaccctgactactacttccgcattac

SEQ ID NO: 127745 - DNA, 164 bp, Glycine max
aatagattatcctaagtctttgggaatagtgctgcaatggcttcaagtcaggaggaggtgacccttttgggagctactggaagcccatttgtgtgcagggttcatattgccctcaagttgaagggagttcaatacaaatatgtcgaagaaaatttgaggaacaa

SEQ ID NO: 127746 - DNA, 247 bp, Glycine max
cattaatggcttctcttgcaaccttagctgctgttcaaccagctgcgctcaatggccttgctggaagttccctctctggaactaagctctctttcaagccctctcgccacactgtcaaatccaagaacttcaggagtggtgccgtggtagcaaagtatggtgacaagagtgtgtactttgatttggaggatctgggcaacactacggggcagtgggacttgtatggctcagatgcaccttcacccta

SEQ ID NO: 127747 - DNA, 245 bp, Glycine max
ttcttgtatgatggagaagatccagcacagtgaggtggaagtgaagggactgaagcttcacgtggcagagattggaagtggctccaaaattgtggtattcttgcatggattcccagagatctggtacacatggaggcatgaaatgatttctgtggcaaacgctggttatagggctattgcctttgatttcagaggctatggactttctcagcaaccagcagagcctgaaaaggaaaccatgtttg

SEQ ID NO: 127748 - DNA, 243 bp, Glycine max
atttgactctcacaaaccttgcatccatccacacatggctggcatgaactctagcgtattggcctgtagctatgccatatctggtgcagcatgctccgagctcaatgggaaggtcacttccgtggcctctgttgcatcctctggctacaagttgccattgatcaaatgtgaggccagagttcccaaagccaaagaatctgaaggaaggagaggtgcccttgttctcttggcagctaccctttt

SEQ ID NO: 127749 - DNA, 243 bp, Glycine max
gctagaagcaataagatgaaaatgaaagtgcttgttttgtttgttgctacagttttggtagcatatgaatgccatggctcagactaccaaaagttccctctccaaatgaaaactgggtttggtgggcaatacagcaatgaggtggcatgtgccagttggaggcttggcgtggaagcaaacaacgtagtcaagtggcaaactgttcctgcagcttgcggagagtacatagctgactacgttcta

SEQ ID NO: 127750 - DNA, 245 bp, Glycine max
ctgagggtgagagtgacacaaatctagggagcactactctaaagtttctattagattcttcaaaacatgaccatgcatcgcgagtcttgggcttttgtcttcggcgttatgggcaacatcatctcctttggagtgttccttgctccattgccaaccttttaccaaatctacaagaagaaatccactgaagggttccagtcacttccttatgttgttgcactgttcagtgcaatgctttggattta

SEQ ID NO: 127751 - DNA, 248 bp, Glycine max
ctcgtcgtggtttcttccccggagctcgccaaggaggttctccacacgcagggcgtggccgttcggctcccgcactcgcaacgtcgtcttcgacatcttcaccggcaagggccaggacatggtcttcaccgtctacggcgagcactggcgcaaaatgcgccgcatcatgaccgtccccttcttcaccaacaaggtggtgcaacaataccgccatggctgggaatccgaggccgccgccgtcgtggagg

SEQ ID NO: 127752 - DNA, 246 bp, Glycine max
cgagagtgatttcagtgagtgatcggtgttcacttgatctcatcataatcgtcagcgtcaattgaagaagatgccgatcagaaacatcgccgtcggaaggcctgaagaggcgactcaccccgacacgttgaaggcggcttcggctgagttcatctcaaccttcatcttcgtgttcgccggctcaggctccggcatcgcctacaacaagctcaccgacaacggcgctgccacccctgccggcctcat

SEQ ID NO: 127753 - DNA, 242 bp, Glycine max
ggaagcctgattttgaagcatatattgatccacaaaagcaatacgcagatgcagtgatagaagtgttgccaacccaactcattccagatgacaacgagggtaagattttgagagtgaggttgatacagaaagaaggggttaagtactttagcccagtttacttatttgatgatggctctaccatttcatggataccatgtggaaggaagcttacatgctcctaccctggcatcaaattcttc

SEQ ID NO: 127754 - DNA, 244 bp, Glycine max
attccattctctctgtgtatctccctacctctcccttcaagatgcagatcttcgtcaagaccctcaccggcaagaccatcacccttgaggtggaaagctctgacaccatcgacaacgtcaaggccaagatccaggacaaggaaggaatccccccggaccagcaacgtctcattttcgccggaaagcaacttgaggacgcccgtacccttgctgactacaacattcagaaggagagtactcttca

SEQ ID NO: 127755 - DNA, 239 bp, Glycine max
caaagttagaagtaaagaagatcatggcttctctagcaaccttggcttctgttcaaccagctacgatcaatggccttgctggaagttccctctctggaactaagctctctttcaagccctctcgccacagtgtcaaatccaagaacttcaggagtggtgccgtggtagcaaagtatggtgacaagagtgtgtactttgatttggaggatctgggcaacactacagggcagtgggacttg

SEQ ID NO: 127756 - DNA, 240 bp, Glycine max
caaaaacttccggggcaaggttgctgattttggtttgaccaaactgacagaagttggaagctcatcgcttcccactggtcgtcttgttggaacatttggatacatgccaccggagtatgctcaatatggagatgtttctcccaaagtagacgtgtatgcttttggagttgttctttatgaacttatttcggctaaggaagcaattgtcaagacgaacgattctgttgccgactcaaaggg

SEQ ID NO: 127757 - DNA, 244 bp, Glycine max
tttcgagcgaatcggctcgagcattgttgctggaaatgcgtgaacaggcatggacatactgattttcaactcgtggctttggtggacccacactggaaaatctcaggggtgggattatattagagatggacccaatcttgtgaagaacatggaccgtttggaggcctacaataaaggattaaccacttgggctaattgggttgatcagaatgttgatccctccaaaactaaagtcttctttcaa

SEQ ID NO: 127758 - DNA, 242 bp, Glycine max
tgaagttgaagtcttgcccttctctcttcaactccaaacacaagacatcatcatccatggctgtctccgtctccactgtcggagctgtcaacagagctcttttgaacctgaatgggtctggacctgggccttcagctcccagttcatccttctttgggagcagcttgatgaaggttattggctcaagggtccccaacacaaagatttcttctggaagcttcaagattgttgctgtagaagag

SEQ ID NO: 127759 - DNA, 244 bp, Glycine max
gtctcaagaatatggaacagtggttggagctagggtcttgtatgatggagaaactggaagatcacgtggctatggtttcgtttgctattcaacaaaagctgagatggaagctgcccttgcagcattgaatgatgtggaactagaaggacgggctatgcgtgtaagcttggctcaaggaaaacgtgcataaggttaataaaaatttgggaaggcttagatgttcaacaaagaagccatagaaatg

SEQ ID NO: 127760 - DNA, 241 bp, Glycine max
  unsure (1)..(241): unsure at all n locations
tttgaggccaggcaagccccactcaaccaccacactactcctcgttcatactanncctttctgctcttcttctacctttcaagttttaagagtataaagatggcagagacattcctatttacctcagagtcggtgaacgagggacaccctgacaagctctgcgaccaaatctccgatgctgtcctcgacgcttgcctcgagcaggacccagacagcaaagttgcctgcgaaacatgcacca

SEQ ID NO: 127761 - DNA, 236 bp, Glycine max
ctcgagcgatgaagcgtcggttccttttggttctcttggttctctatgtcacagtggacgcagagtaagctactccaccacgtagaagccgatggtgggtttgtaaaaacaagaggagtgcagcttatgctgaatgggagtccctactatgctaatggctttaatgcctattggcttatgtaccttgcctctgatccttcccagagaaacaatatctcatcggtagttcaacaggc

SEQ ID NO: 127762 - DNA, 239 bp, Glycine max
ctcacaggcacttcttgtgaagccagtgaagaggcagatgatggggaagagcaagggattgagaattgcatgccaagccaccagcatttccgctgatagagtccctgacatgggcaaaagacagctcatgaatcttcttcttcttggtgccatttcactccccactgctggaatgcttattccctacacctacttctttgtccctccaggttcaggttcttcagctggcggtactgttg

SEQ ID NO: 127763 - DNA, 238 bp, Glycine max
gaacaagtagttgagaactaagaaggagaagcaaatggcttcctcaatgatctcttccccagctgttaccactgtcaaccgtgccggtgccggcatggttgctccattcactggcctcaagtccatggctggcttccccaccaggaagaccaacaatgacattacctccattgctagcaacggtggaagagtgcaatgcatgcaggtgtggccaccagttggcaagcagaagtttgag

SEQ ID NO: 127764 - DNA, 230 bp, Glycine max
gtgctatcgatgtatgcagatttgatatgggagagccaaaaggatgcttcgcgtgctgagacttattttgatcaagcggttaaagcagctcctgatgactgttatgttctggcatcttacgctcattttctttgggacgctgaggaagaggaagatgatgaagtgcaagaagattactctgaaatatctcccagtttcttacatggagctgctccaccaccacctcctcc

SEQ ID NO: 127765 - DNA, 230 bp, Glycine max
cacaaagcaagttgccaagggttgtgtggatgagatacgtaacaaaacagcatgctgtaatgctatggaaagctatgtgtctcacttgcaaaaacagagcttcatcacgaacttgcaagcgttggattgtgctgagactttggcaatgaaaatgaaaagatcgaatattactgcagatgtttatggtctctgtcacataagccttaaagacttttccctccaagttggaa

SEQ ID NO: 127766 - DNA, 226 bp, Glycine max
tttgtttctttcttcttctacatccactgcacaattgccacatgaatcattagttagggtttattctccaagaaaagcaatgagtgcgtccaggttcatcaagtgtgtcactgtgggtgacggtgccgttggcaagacttgcatgctcatctcctacaccagcaacacttttcctacggactacgtgccaactgtctttgacaatttcagtgcaaatgtagttgtg

SEQ ID NO: 127767 - DNA, 231 bp, Glycine max
attctttgcatagggcaacctcctttctctgtgactctgagtatcgtatcgttttattattatttctaattctctcttatcaggtccattgaatatgtctccgtcgttggatcttcctcccaagggtggcttcagttttgatctatgccgaagaaacgcaatgcttcaaaacaagggcctcaaagccccaacctttctcaaaactggcaccactattgtcggtttagtttt

SEQ ID NO: 127768 - DNA, 245 bp, Glycine max
acacgctccgaagagaagtggatatggcggaaactcggtgtttggcaattatcgacgaagaggaaatagaagtagacgacgatgacatctacgagaacattgaagctcccaagttcgtcgacctcaccgcacctgattgtcgccgccccgaccatgaccgccactggttctgcttccgcgttgggtgtgaccaaaagcatgagcaagagttggactctgaggcaatttacaagaattttgttctt

SEQ ID NO: 127769 - DNA, 247 bp, Glycine max
acgagcccatcatgctcggggaacagttcaaacgatgccggtgattttgaatgcaacatatgcttcgattacgcgcaagaccctgtgatcacactctgtggtcacctattctgttggccatgcctttataggtggctccaccatcactcccattctcaggaatgccctgtttgcaaggcccttgtgcaggaagagaaattggttcctctttatggaaggggcaaaacacagactgatcccaggacca

SEQ ID NO: 127770 - DNA, 166 bp, Glycine max
gaacataccaatctacaataaacgatgattctcattatctccctcattttgtctcttctctctttctcccatgcttctgtcctagatttctgtgttgcagattatgcaggtcctattggacctgcaggatattcctgcaataagccttcaaaggtcacagcagatg

SEQ ID NO: 127771 - DNA, 212 bp, Glycine max
caaagacaaaggggtttgtatgtgaatctgatcatctagagttgagaatggaaggagggaaacgaggcacgattctggtcaccaacgacgacggaatcgatgctcctggcttaagggcattggttcactccatcgtcaacgcaaaccttttcaacgttctagtgtgcgcccctgatagcgaaaattcatctgttacccagagcatcattggg

SEQ ID NO: 127772 - DNA, 254 bp, Glycine max
  unsure (1)..(254): unsure at all n locations
aatgttatcccatttttaagtactttgagaactggtgccaggatgagaacagacatggagatttcttctctgccctgatgaaggcacagccacaatttctaaatgactggaaggcaaagttgtggnctcgattctgtctgtctatcggtttatgtcacaatgtatctcaatgatggccaggntacngctttcntacgggggcntgggnnttnaccangaaaggnttttgcggggtgtgntttggggggaaaccc

SEQ ID NO: 127773 - DNA, 205 bp, Glycine max
agctgccatggccacccacgcggctcttgcttctacaaggatcccttcaaacacaaggatcccatccaaggcctctcactctttcccaacccaatgcgctttaaagagacttgaggtgacagaattctctgggcttagatccactacatgtgtcacatatgctaacagtgctagagaatcttcctttttggatcttgtagcttcc

SEQ ID NO: 127774 - DNA, 162 bp, Glycine max
tcgagataactagaaacagtgtgatgaaaatgaaggtccttgttttcttcgttgctacaattttggtagcatggcaatgccatgcgtacgatatgttccctctccgaatgaacactggctatggtgcccgtactccggaggtgaaatgcgcaagttggaggc

SEQ ID NO: 127775 - DNA, 249 bp, Glycine max
ctcatagattgcaaacaccgatcagaaagaaaaaatgagttcccttcgtctggctttatgctgtgtggtggtagtgcttggagcactaccacacttctcatatgcacagctagatccttcattttacgatagcacatgttcaaatgtgacttcaatcgtacgtgaggtgctctcaaatgtctcccagtctgatccccgcatactcgcaagtctcatcaggctccattttcacgactgttttgttcaggg

SEQ ID NO: 127776 - DNA, 233 bp, Glycine max
acaaaaacatagaaaaaaaaaaaccctagccaacacaaccatcatggccacctctgctattcagcaatcagcattcactggtcaaactgctctgaagcagctcaatgagttcgtccgcaagaccggtggcgccggcaaaggtcgcactaacatgcgccgcaccgtcaagagtgctcctcagagcatttggtatggccctgaccgtcccaagtacttgggtccattctcggagc

SEQ ID NO: 127777 - DNA, 248 bp, Glycine max
cgttaaaagccttagccttccctacaactccagacatcaagacatcatcatccatggctggctccgtctccactgtcggagctgtcaacagagctcttttgaacctgaatggttctggagctggagcttcagctcccagttcagccttctttgggaccagcttgaagaaggttattgcctcaagggtccccaacagcaaggtttccggtggaagcttcaagattgttgctgtagaagagaagaaagag

SEQ ID NO: 127778 - DNA, 242 bp, Glycine max
gcttggcggggataagattaaagattcaacaatggcctctgcttctgctactcttctcaagtcatctcctgttcttgacaagtgcgagtgggtcaaaggccagacccttcgccaacctctcgtgagatgtaacccttcttcagcatcagctctcaccatcaaagctgcttcctatgctgacgagctcgtcaaaaccgccaaaacagtggcctcaccggggcgtggtattttggcgatggatg

SEQ ID NO: 127779 - DNA, 189 bp, Glycine max
gttattgatgaggtgagaaccggaacttaccgccagcttttccacccagagcagctcaacagcggcaaagaagatgccgccaacaactttgcccgtggccattataccattgggaaagagattgttgatctgtgcttggaccgcatcagaaagcttgctgacaattgcactggactccaagggttttgg

SEQ ID NO: 127780 - DNA, 233 bp, Glycine max
acgcttatggtggatacctaggcacccagagacgaggaagggcgtagtaagcgacgaaatgcttcggggagttgaaaataagcgtagatccggggattcccgatataggtcaaactttcgaactgctgctgaataaacgggcaggcaagagacaacctggtgaactgaaacatcttagtagccagaggaaaagaaagcaaaagcgattcccgtagtagcggcgagcgaaatgg

SEQ ID NO: 127781 - DNA, 243 bp, Glycine max
gtctcaagcaaccatggcaatggcaacccaagcctctctcttaaccccacccctctccggtctcaaagccagcgaccgcgcctccgtgccatggaagcaaaactccagcctctccttctccagcccgaagcccctcaagttctccagaacaatcagagcagcagccgccgacgagaccacagaggcaccagcaaaagtagaggctgcaccggtcgggttcaccccaccagaacttgacccaaa

SEQ ID NO: 127782 - DNA, 219 bp, Glycine max
actatcaagggggacaaacagagatagtagccgttgatatggctcaggttgggtcttcaaactggagcttcatgagcagaaaccacggggcagtatgggacacaagcagggtaccccaaggcgcattgcaatttaggttagtggtaacggcagggtatgatggacaatggatttgggcaaagaaggtcctacctgctgattggaaaaatggacttatat

SEQ ID NO: 127783 - DNA, 175 bp, Glycine max
agagattgaagagacccagcagaccgacaaggacagatggaagggtcttgcctatgatatctcagacgaccaacaggacatcacaagaggaaagggcttggttgactcccttttccaagctccacaggatgctggaactcactatgctgtcatgagctcctacgagtaccttagc

SEQ ID NO: 127784 - DNA, 236 bp, Glycine max
attctcttcagtttaaagttacatagtttttcattgttttacttaatctataatggctgcttcaacaatggctctctcttcatcatcattggctggccaagctatcaagcttgctccctcaatccatgagcttggtgttggaagggacaccatgaggaaaactgcctccaaaactgtttcctcaggaagcccatggtacggccaagaccgtgtcaagtacttgggcccattctcag

SEQ ID NO: 127785 - DNA, 241 bp, Glycine max
gaattctacatctctgagttgggtgcagagggttcatattgctcaagatgttgctgacgcacttaactaccttcataactatactagtcctcctcacgtacacaagaatttgaagagtgggaacgtgcttttggatggcaattttagggctaaagtttcgaatttgggattggcaagagctgtggaggatcacggggatgatggggggtttcaattgacaaggcatgtggtggggactcat

SEQ ID NO: 127786 - DNA, 240 bp, Glycine max
ccaaaacaatttgctcacaaaggaggaaaaatggcacctttcgtttccctctctttgttgcttctctttctcaaccaccccctcctttccctctcaaccaaccctgaagggaacgctctgcatgctttgagaagcaggctttctgatcccaacaatatgttgcagagttgggacccaacactggttaatccctgtacttggttacatgttacctgtgactccaacaatcaggtgattcgc

SEQ ID NO: 127787 - DNA, 231 bp, Glycine max
atggacaccaaggagatgatcaatcatggggttgccatctgtcaccttgacacgtcagcttggagcccgcaacatggggccttcttggctttggggtttggccctgggaaaattgaagtgtgccattggattttcgagaacgacatgacttggaccactgccaattgaggagagaatgagaatttctactttgggttttcctccagttagtaactactaactactatatca

SEQ ID NO: 127788 - DNA, 193 bp, Glycine max
atctctctcaccaaagccatcctagaacgaagataaaaaagaaaaacattttccctcaccaaagaagaagaagcaaacaatggccgatcaacttaccaatgaacagatctccgagtacaaggaagccttcagcttgttcgacaaggacggcgatggttgcatcacaaccaaggagcttggaactgttatgcgt

SEQ ID NO: 127789 - DNA, 230 bp, Glycine max
ctcgagccgctgtcttaaccgttatgggagtcgccggggctaagactaagtgtactaccattgggattcaaggaatcgcttgggccttcggtggcatgatcttcgccctcgtttactgcaccgctggcatctcagggggacacataaacccggcggtgacatttgggctgtttttggcgaggaagttgtcgttgcccagggcgattttctacatcgtgatgcaatgctgg

SEQ ID NO: 127790 - DNA, 236 bp, Glycine max
aaagaaagaaggtttttttagtatagttaacaacatggagagagaggaagatgttaaggttggagcacagaaattctcggagaggcaagcactgggtacaggagctaagagtgacaaggactacaaggaggcaccaccagcacccttgtttgagccaggggagttaaagtcatggtctttttacagagctgggatcgcagagtttgtggccacattctggttcctctacatcactg

SEQ ID NO: 127791 - DNA, 203 bp, Glycine max
tggatggagaattagtcatagaacacatcatcagaactctgatatggtactagaattgaagaatgcagcaagtggccagcaacactgttcaattctagtaccatatcatggatggagaattagtcatagatcacatcatcaacaacatggccattttgaaaacgatgaatcttggcacccgttgccggagaaaactttcaaga

SEQ ID NO: 127792 - DNA, 239 bp, Glycine max
atcctatcgtagcaaagaaagatagattgaaaaccctagcttaccttttcaactttcaagatgcaaatctttgttaagacactcactggtttgacaatcacccttgaggtggagagttcatataccatagataatgtaaagtccaagattcaagacaaggaagggatcccaccagaccagcatcgtctcattttagctggcaagcagcttgaggatggacgtacacttgctgattacaa

SEQ ID NO: 127793 - DNA, 240 bp, Glycine max
gggaatttcttcaggagctgcagctgcagctgctttgaaggttggaaagaggcctgagaatgcaggaaagcttattggggttgtcttcccaagctttggtgaaagatatttgtcaactattcttttccagtcaatacgggaagaatgcgagaaaatgcaacctgagccatgaattgactttgcttgttaatgtttcatactcattttccacaagtatctgtatggaatgacagtgtcaga

SEQ ID NO: 127794 - DNA, 202 bp, Glycine max
ctgcactgtgtggaaacgaaacatggcaagagtggtggcactccaacagaaccaactatctttctctaccttagcttcctctctagagaacttcagtggaaccagacttcaaactcaacttcagttcaagagaaagcaatgccatccaaaagggtctttctacgtctccgcatcgagcaccaagaaaatcctaataatggga

SEQ ID NO: 127795 - DNA, 188 bp, Glycine max
cgcaaagcaaaagtgggttcgtatgcctactttacctacttgacgaaagggaacgaactttgtttcgtttccgggtttatggattggattcagtcagcgtcacgacataatcaaaaggaaggagtgacgctttggttaccggcaaacgcttccaaaggcgaccctctcgagtatccggctgtttccta

SEQ ID NO: 127796 - DNA, 194 bp, Glycine max
ccaaagtgagcagcaccaccataagggttattcccaaagggtggtgtcggtgttagagctgaactcaactcagcacttgtcataagcctcagcactgggctctccctcttcttggggaggtttgtgttcttcaacttccaaagggagaacgtggcaaagcaagtgcctgagcagaacggactcacacactttga

SEQ ID NO: 127797 - DNA, 212 bp, Glycine max
cttaatggatccgggtcacaactactacgagcggggcaacctcgacatattcagtggtagaggcccttgcttggaagcacccgtttgcgaggccaacctaacttctgacgggtcggggccccatcacggctggtacgttaattacgtcgaggtcaccaccactggggtccacgcgccttgttctcagcagcagttcacctttgagcagtggc

SEQ ID NO: 127798 - DNA, 200 bp, Glycine max
caaacgcagttctcaccatttccctctcgattgtgagacttgttgttgttaactgaacttttctgagcaagaatgtctgggcgtggaaagggaggcaagggtttgggaaagggaggagcgaaacgacaccgtaaggtgctgcgcgataacattcagggaatcaccaagcccgcaattcggcgttggcctcttaggggtgg

SEQ ID NO: 127799 - DNA, 267 bp, Glycine max
  unsure (1)..(267): unsure at all n locations
ggacgagggaaatgaattcaaacgggatggctctggacgtgggaactggggtacacagaatgatgacattgctgtggttactnnggaagtggtgaatgaaactgaaaagaattttgctgatgagaagcctgcaggcgncngaagatgcacctgaaggaaacaaggactgtcctgccaatgaaantgaagaaaaggagcctgaggacaaggagntgncacnggangtttntnanagggtctggnaangaaaaanaggncccncccggc

SEQ ID NO: 127800 - DNA, 206 bp, Glycine max
ctttggtgaccacaacaacaataacaatggctgcctcactacaagctgcagctaccttcatgcaacccaccaaggttggcatagcctctcgcaacctcaaatctacacaatgcatttctaaggcttttggcttggaacctgctgcagctaaactcacttgctcccttcagcctgatctcaaagaatttgctcaaaaatgtgtcgac

SEQ ID NO: 127801 - DNA, 178 bp, Glycine max
cctcaatcatccatagacatggccaccgtcacttctgcagcagtttctattccctcattcactggcctcaaggcaagcgcaggcaaagtgagtgccgccgcagtcaaagtctcagctccccaagccacaaggttctgcggcatcaaggcttccctcaaagacgttggagtcgctgttg

SEQ ID NO: 127802 - DNA, 248 bp, Glycine max
ctagtggaaggttcatcatacctagggcaaccacttccattctcaatcaccacactgatctggatcgaggttctcgtaattggctacatagagttccagaggaacgcagagctggacccagaaaagaggctgtacccaggtggcagttacttcgacccactgggcctggcctcagatccagagaagaaagccacccttcaattggcggagatcaagcacgcccgtctcgccatggtgggcttcttggg

SEQ ID NO: 127803 - DNA, 221 bp, Glycine max
actccacaattggcaaggagggtgaaggaactactcaagaaatctggtttcagccatgttgatgaagatacaaagcgaggacttgaccatggtgcttgggttcctctctttttgatgtatccagaagctgacatccctgtttgtcagatatctattcaatctcagcaagatggatcttatcattataacttaggaaaggcttgggcccctcaaaaagatga

SEQ ID NO: 127804 - DNA, 221 bp, Glycine max
gggttatcatttctccatttccattttctctctcacttttcaagaatcgtaagctatgggaaagtcttacccaactgtgagtgctgattaccagaaggccgttgagaaggcgaagaagaagctcagaggcttcatcgctgagaagagatgcgctcctctaatgctccgtttggcatggcactctgctggaacctttgacaagggcacgaagaccggtggac

SEQ ID NO: 127805 - DNA, 245 bp, Glycine max
cttcgtgcgtacgattcttctgagattccaaggcgacgcaccgacaccggacccatctccggcgacatctcaccgatctccggcgaatccacggtccccactagcttccctcgaaatgaatcccgactatgattatctgttcaagctcctgcttattggagactctggtgttggtaaatcatgcctgctactaagattagctgatgattcgcacatcgaaagctacataggcaccattggagtcg

SEQ ID NO: 127806 - DNA, 212 bp, Glycine max
ctttgtttgcttctcaagtctctcgaagcctctttctctctcttctagaagctatctgtgtttggtgttactaagtctccaacaagcaaagtacatggttgatttggaaatccaggtccccaccccattcgacccgtttgccgaggcgagagaatcggatgcccccggagcaaaggagtatgtccatatgcgatttcagcagaggagtgggg

SEQ ID NO: 127807 - DNA, 241 bp, Glycine max
gttgaaatgcctccagcgtgagtttgacgaagtcttaaattcagaagaagggaaggatctatatatcaacacagtagatgccttccaaggtcaagaacgggatgtcattataatgtcttgtgtgcgtgcatccagtcatggtgttggctttgttgcagatatacgtcgaatgaatgttgcccttacgcgtgcgcgaagggccctttgggtcatgggaaatgcaaatgctctgctgcaatct

SEQ ID NO: 127808 - DNA, 201 bp, Glycine max
gttgaaatgcctccagcgtgagtttgacgaagtcttaaattcagaagaagggaaggatctatatatcaacacagtagatgccttccaaggtcaagaacgggatgtcattataatgtcttgtgtgcgtgcatccagtcatggtgttggctttgttgcagatatacgtcgaatgaatgtcgcccttacgcgtgcgcgaagggc

SEQ ID NO: 127809 - DNA, 254 bp, Glycine max
attccacaagaactctccaatagatcctccttcccacgagattctttggtgggaaaaatccacagaggtttgaaatttgaaggcagggaagatggattatttcaatgcaccaggaagaaaccatctctttgttccagggccggttaacattccggaccagatcatccgggccatgaacagaaacaatgaggactaccgttctccagcaattccagctatgacaaaaactttgcttgaggatgtcaagaagattt

SEQ ID NO: 127810 - DNA, 249 bp, Glycine max
cagaagaacaagtagttgagaactaagaaggagaagcaaatggcttcctcaatgatctcttccccagctgttaccactgtcaaccgtgccggtgccggcatggttgctccattcactggcctcaagtccatggctggcttccccaccaggaagaccaacaatgacattacctccattgctagcaacggtggaagagtgcaatgcatgcaggtgtggccaccagttgccaagaagaagtttgagactctt

SEQ ID NO: 127811 - DNA, 245 bp, Glycine max
catagcatctcctttaccaccattctagatatcagagaactttgcagctctcttaggtttttataatacaccacgcaaacagcaagatggccacttccgacagtaacatgctattaaattatgttccagtttatgtgatgctcccactcggagttgtcaatgttgacaatgtttttgaagacccagatggccttagagaacagctcttgcagcttcgagctgcgggtgctgacggggttatggtt

SEQ ID NO: 127812 - DNA, 243 bp, Glycine max
aaaatgaccgggcgcatcggtgattcgccgctgataggcgccgggacctacgcgtgcgacgtgtgcggcgtatcgtgcacgggtgaaggcgaggccatcatacgtggcacgctggcgcgtgaggtggcagcggtgatggaatacaaaggcttgaagcttcaagaagccgtggattttgtgatcaagcaccgtctcgatgaagggatggctggtctcatagctgtgtccaacgctggggaagtg

SEQ ID NO: 127813 - DNA, 243 bp, Glycine max
gaattagctctttcttcattgaaccaatgtgttaatggatgggtgcaaaattagtatgggcactgagcaattttatcgtctttgtttgcatggctagcactgctatcattagtcttatttccataagagattattctggagggatagaacacgtaattggagcaaatgaagcaatcaagattgcttccttggttgtgtttgttcttcttggttttcctcttgcgattacctatagtgttccct

SEQ ID NO: 127814 - DNA, 244 bp, Glycine max
gctatgcctaatggggatcatgttgctgtgaaaaggcttccggctatgagtagaggctcttcacatgatcatggcttcaatgctgagattcaaacattggggcgaatccgacacaggcacattgttaggttgttgggcttctgttcaaatcatgagacaaaccttttggtctatgagtacatgcccaatggaagtttaggcgaggttcttcatggaaagaaagggggtcatttgcattgggata

SEQ ID NO: 127815 - DNA, 248 bp, Glycine max
gtcagagcagatgatctacctggatcaaagcttcacaagaaagagacatgtgaagctgttactatcattgaaactcctccattggttgttgttggagttgtgggatatgttaagacacctcgtggccttcgcacaatcaatactatttgggctcagcatctaagtgaagaagtcaagagacgattttacaaaaactggtgcaaatcaaaaaagaaggcctttaccaaatattcaaaaaaatatgaaac

SEQ ID NO: 127816 - DNA, 247 bp, Glycine max
cttggctcataacaacttgacaggccagattctgcaatgcctggcaacatttccttctcttttggcattggatttgcaaatgaacaacctttatggaaacataccttggaacttttctaagggaaatgcattggagactataaagttgaatggcaaccaattggatggaccattaccatggtctttggcccactgcacaaatctggaagttttggacctggcagacaataacataaaggatacattt

SEQ ID NO: 127817 - DNA, 247 bp, Glycine max
tgcaattgaagttaaaagccttagccttccctacaactccaaacacaaagacatcatcatccatggctgcctccgtctccactgtcggagctgtcaacagagctcttttgaacctgaatggttctggagctggagcttcagctcccagttcagccttctttgggaccagcttgaagaaggttattgcctcaagggtccccaacagcaaggtttccggtggaagcttcaagattgttgctgtagaaga

SEQ ID NO: 127818 - DNA, 245 bp, Glycine max
accagcttgaagaaggttattgcctcaagggtccccaacagcaaggtttccggtggaagcttcaagattgttgctgtagaagagaagaaagagattgaagagacccagcagaccgacaaggacagatggaatggtcttgcctatgatatctcagacgaccaacaagacatcacaagaggaaagggtttggttgactcccttttccaagctccacaggatgctggaactcactatgcagtcatgag

SEQ ID NO: 127819 - DNA, 245 bp, Glycine max
ccttgcatgccttttcctattcaccatccagtggggtgctggctttgcaacattttggtacccaggagggtcaagaaatagtagagctgccttattgccatggcatgtgttctttggtatctatatctattgcttggctatagccacaactgctactggtattctagaaaaagctacattccttcaggtcaacaacatcatatcacgctattccaatgaggcacttctggtcaattccttaggca

SEQ ID NO: 127820 - DNA, 243 bp, Glycine max
ttcactttaaagttacatagtttttcattgttttacttaatctacaatggctgcttcaacaatgactctctcttcatcatcattggctggccaagctatcaagcttgccccctccacccctgagcttggttttggaagggttagcatgaggaaaacagcctccaagactgtttcctcaggaagcccatggtacggcccataccgtgtcaagtacttgggcccattctctggtgagcccccatc

SEQ ID NO: 127821 - DNA, 244 bp, Glycine max
  unsure (1)..(244): unsure at all n locations
tgcaatgattggtgaaatttcactcgaagancagcatccttagaattgagaatgctagattgaaggacgaactagaccgtgtttgtgcactcgctggcaagtttttaggtcgacccatttcatctctaacaggctcaattgggcctccatnnccaaactcaagcttggagcttggtgttgggagcaatggttttggaggattaagcactgtgccttcaacaatgcctgattttggggntggaat

SEQ ID NO: 127822 - DNA, 245 bp, Glycine max
cggatgagaacaagattggccaaggtggatttggggtggtttataagggtgtcctccctagcggacaggagatagctgtgaagaggttgtcagtaacctccttgcagggtgctgtagagttcaggaatgaagctgctcttgtggccaagcttcaacatagaaatttagtgagactattgggattttgcttggagggacaagagaagatccttatctatgaatacataccaaacaaaagtcttgat

SEQ ID NO: 127823 - DNA, 245 bp, Glycine max
cagctggattaatctatgtccggcagtggaacaacatgcagtacgtttcaacagcagcatttttgctctcaatatactctgatttccttcaaagcacaaatcaaaagctcaattgccatgggggcacagtggaccatgaagaaattcttaattttgctaagtcacaggctgattacattttggggtccaacccaatgaacatgagctatttagttgggtatggccctaactaccctaaaagggtg

SEQ ID NO: 127824 - DNA, 240 bp, Glycine max
ttcggaaaaaggggatgccttgtatgccatggaactagctttgtctttggagaagttgacgaatgagaaacttctgcacgttcacagtgtggcagaacgtaacaatgatcctcaattggcagacttcattgagagcgagttcttgtatgagcaggttaaatcgattaaaaagattgcagagtatgtggctcaactgagattagttggaaagggtcatggtgtgtggcactttgatcaaaa

SEQ ID NO: 127825 - DNA, 245 bp, Glycine max
ctttattctcccaattcaaaactctcactccgtcagaagcaccaaatcctgatggcaccaaaggcagagaagaagccagcggagaagaagcccgcagaggagaagaagtccacggtgggagacaaggctccggcggagaagaagccaaaggccggaaagaagcttccgaaggagggaggcgccggcggcgaagggaagaagaagaagagaaacaagaagagcgtggagacatacaagatctacat

SEQ ID NO: 127826 - DNA, 245 bp, Glycine max
ggatgcaagctatgcattgggccttgcactacaagaggagaggggttctattatgatgcgttttacggggacttgggtctcaatgacgatcactttaagcagattgaggctggagcattgaaggctgttgcggaaaagcaaccctttgagcgcattgaagttacacgcgatcaggcacttgagatgttttcagataataagtttaagatcgagattatcaatgatttgcctgccgacaaaactat

SEQ ID NO: 127827 - DNA, 242 bp, Glycine max
gttgcgagcaccaacagagggtgcaaagctatccacgtctccggtggggccacctcggtgttcctcagagatggcatgaccagagcacccgttgttcggttaccctccgctcagcgcgccgcgcagttgaagttcttcttggaggatcctctcaacttcgattcgcttgctgtcgttttcaataagtcaagcagatttgccaggttgcagaacattcagtgtgctattgcgggcaagaatct

SEQ ID NO: 127828 - DNA, 237 bp, Glycine max
attgtttgttgttgtaactcgttcttcttcttttgttgttctgtgtttgtgtttgttttttctctcacctgaaaatgtcttgctgcggtggtaactgtggttgcggaagctcctgcaagtgcggcaacggctgcggaggctgcaagatgtacccagacttgagctacactgagtcaaccaccaccgagaccttggtcatgggagtggcacctgttaaggctcaatttgagggtgctg

SEQ ID NO: 127829 - DNA, 239 bp, Glycine max
ctgctgcataggaagaaaccctagcctctcaccctccctgcgacacgatgcacatcttcgtgaaaaccctaacgggtaagacgatcacccttgtggtggagtcttctgacaccatcgacaacgtgaaggccaagatccaggacaaggaaggcatccctccggaccagcagcgcctcatcttcgccggaaagcagctggaggacggccgcaccctcgccgactacaacatccagaaggag

SEQ ID NO: 127830 - DNA, 238 bp, Glycine max
ggatgtgaaccctctgatgatcaaatggcaatttcattgaagatttctcgaactgaactacgagcaagaatgatagagtgcactctggcaagagaaaagttggctatgagcaatgttcgcttagttatgtctattgctcaaaaatatcataacctgggtgcagaaatgggcgatcttgttcagggtggcttgattggactactgcgtggtattgaaaagtttgattcttcaaaagggt

SEQ ID NO: 127831 - DNA, 243 bp, Glycine max
ggaagaaagagtagatcgatcagagatagaggggagatggaagttgaagggtcatcgaagaagatgatagcgactcaggaggagatggtggaggccagggttcctctggcctacagggaccagtgcgcccacttgctcatccctctcaacaagtgcaggcaggccgagttctacctcccatggaagtgccaggaccagcgtcactcctacgaaaagtgccagtacgagctcgtcatggagaga

SEQ ID NO: 127832 - DNA, 239 bp, Glycine max
gccagccccaccaatagaagaatctaccttagtaaagcacaagatgcagttacaagtatgctggcaaaaggttcagcaataagacaagatgcagtgaacaaagctaaagcatttgatgaaaagcatcagttgactgccaatgcatctgcaaaggtcatttctttggacaagagagttggactcacagagaaattgacagtaggcattgctgcagtgaaccagaaagtcaagtctgtgga

SEQ ID NO: 127833 - DNA, 239 bp, Glycine max
ctagtttcttacaagcctctactatactgcttcaccttctgctctagaaaattcagtgctgaaacatggcttcggctactctctctgtagccaaaccagcccttcaggcaaatgggaaaggcttctctgaattctctggcctccgaagctcatcaggcttccttcccttttctagaaaatcttcagaggatttccattctgtcattgccttccagacctatgcagttggaagcagtgga

SEQ ID NO: 127834 - DNA, 236 bp, Glycine max
cgcactgatggtattcctgaacaggacattgtcaagcttgttgacaccttccctggccaatccattgatttctttggtgcactgagggccagagtatatgatgatgaagtgaggaagtggatttctggtgttggtgttgacagtgttgggaagaagcttgtgaactcaaaagatggacctccaacctttgagcagcccaagatgactctggagaagctcttgctgtatggtaacat

SEQ ID NO: 127835 - DNA, 234 bp, Glycine max
atggccacctctgctattcagcaatcagcattcgcaggtctaactgctctgaagcagctcaatgagttggtccgcaagaccggtggcgccggcaaaggtcgcaccaacatgcgccgtaccgtcaagagtgctcctcagagcatttggtatggccctgatcgtcccaagtacctgggtccattctcagagcagattccgtcatacctgacctggagaatccccggtgactacgga

SEQ ID NO: 127836 - DNA, 238 bp, Glycine max
tgtagctgctgggttgcaggtgcttcaagaaaagaacctcatccatagagatttaaaaccacagaatttactgttggcaactactgcagctacaccagttatgaaaataggggattttggttttgcaaggtctcttacaccccagggattggctgatacgctatgtggttcaccctattacatggctccagagataattgaaaatcagaagtatgatgccaaggctgatttatggagt

SEQ ID NO: 127837 - DNA, 231 bp, Glycine max
agcagcagtgcgaagagaaagttagagaagaagcgcttatcgaactcggacggaagcactgagttaactcagagcgagtgaaagtgttgctgcgtgatgtctggtggtatcgcccgtggacgcctcaccgaggagcgcaagtcgtggcggaagaaccatccccatggttatgttgcgaagcggagacgctgcccgatggaaccgtgaacttgatggtgtggcattgcacta

SEQ ID NO: 127838 - DNA, 235 bp, Glycine max
gaacttccaggggatatggtgtacataaaggcgaccggtgagaagagtgcggagatggttaccgacgaaggtgcaatatatgttactgcaaacagaggttacaactggagggctgctgtccaggatactaagtcagctactcttaacagtttctagtggtattagtggtgcaagctactacactggaactttcaatactgtcaatcgctctccagatggaaggtatgttgcagtc

SEQ ID NO: 127839 - DNA, 238 bp, Glycine max
atcaccccaactgtgagagaggatatggcaaaggaatacgagaaagctattgcagaacttcagaaattgttgagggagaagagtgaactcaaagcgacagctgctgaaaaagtggagcagataacagcttctctagggacatcatcatctgatggcatcccatcatcagaagccttagacaggatcaaagctggtttcattcacttcaagaaggagaaatacgacaagaatccagctt

SEQ ID NO: 127840 - DNA, 159 bp, Glycine max
gtgctctgctcgtgcctctagggttatcatatctccatttccatttcctctctctcagtttccaagaatcttaagctatgggaaagtcttacccaaccgtgagcgctgattaccagaaggccgttgagaaggcgaagaagaagctcagaggcttcatcg

SEQ ID NO: 127841 - DNA, 238 bp, Glycine max
aaaagataatgagttacaacagtatacaatggcaccaggggttaagaggttgggtgaggacaaggctagtgttgtgtgtcacaaggagaattacccttatgcagtgttttattgccacaaatcagaaaccacaaaagcctattctgtcccattggagggtgctgatggaagcagggtcaaagcagttgcagtgtgccatactgacacatcaaagtggaatcccaagcatttggcgttt

SEQ ID NO: 127842 - DNA, 234 bp, Glycine max
atcactgaactaacaaagcaaccctatgtcgaaggtggtttgtgtcaccggagccagcggcgccttcggatcatgggtggtcctcctcctcctccagcgtggttacaccgtccatgccaccgtccaagatatcaaggatgaaaatgagacgaaacatttggaggaaatggaaggagcaaagagtcatctccatttttttgaaatggatcttcttgacatcgactccattgccgc

SEQ ID NO: 127843 - DNA, 234 bp, Glycine max; identical to SEQ ID NO: 119415

SEQ ID NO: 127844 - DNA, 156 bp, Glycine max
cagttatattcttttgggcggcatacaaaacaaactttttcccgcgagtgtttggagtcccaagtcttgaaaaaactgctcatgatgattaccggaaacttgcctctgcaatctatcttcaagtgagcactattagtcaggctcttatatttgtaa

SEQ ID NO: 127845 - DNA, 266 bp, Glycine max
gaactaacaaagcaaccctatgtcgaaggtggtttgtgtcaccggagccagcggcgacatcggatcatgggtggtactactcctcctcgagagtggttacaccgaccatgccaccgtccaagatatcaatgatgaaaatgagacgaaacaatttggtaggaatggaaggagcaaagagtcatctccatttttttgaaatggatcttcgtgacatcgactgcattgccgctgcaataaagggttgttccggcgtaatcaacttgaat

SEQ ID NO: 127846 - DNA, 188 bp, Glycine max
gctcaagacagatccttacttgaatgccaaactctcagatataataatcgggacttcggctgcaccaactgttctaccaccctacaactttacgaatgatgatgttgaattcaatttgattgatggtgctgcgacagctgataatcctgcgatggttcgcgccagtaaagtgatgccacacgaggagg

SEQ ID NO: 127847 - DNA, 222 bp, Glycine max
gggctgcgtcttcccggagttgctgtcccgcaacggggtgaagttcggagaagccgtgtggttcaaggccgggtcccagatcttcagcgagggtgggctcgactacttgggcaacccaagcctgatccacgcccagagcatcctcgccatctgggccacacaagttatcctaatgggtgccgttgaaggttaccgtattgctggtgcccccctcggtgaggt

SEQ ID NO: 127848 - DNA, 277 bp, Glycine max
gtaacaccaaagccagaagcgaaatcgcaatcgcaatccagcgaatatgaaggtcgtcgctgcatacttgctcgcagtgttgggagggaatccttccccttctgccgatgacatcaaacacatcctcggcgcagttggagctgaggctgagaatgagttgattgagttgctcttgactgaagtcaagggaaaagacttcaatgagctaattgctagtggaagtgaaaagatgtctgcagtgtctggtggcggtgcagcggttgccgttgctgctgca

SEQ ID NO: 127849 - DNA, 271 bp, Glycine max
ttcaagcactatggagagcctttttttcgtaataaggagactgaggtgttgcagaaggtgtcaataatgcatagacatcttatttctactggtggaggtgctgtcgtgaggcccatcaattggaaatatatgcagcaggggattagtgtttggttggatgtacctgtagaagtcttgactcagagaataacagctgaaggaactgattctcgcccacttctacattatgaaggaggagatgcatacacaaagactatcacgcatttgtctt

SEQ ID NO: 127850 - DNA, 277 bp, Glycine max
ttcttgtatgatggagaagatccagcacagtgaggtggaagtgaagggactgaagcttcacgtggcagagattggaagtggctccaaaattgtggtattcttgcatggattcccagagatctggtacacatggaggcaccaaatgatttctgtggcaaacgctggttatagggctattgcctttgatttcagaggctatggactttctcagcaaccagcagagcctgaaaaggaaaccatgtttgatctggttcatgaaattgtaggccttttggat

SEQ ID NO: 127851 - DNA, 277 bp, Glycine max
gatttgcagaagcagttgaggccttacatggaatccatgcttccactccccggaatctatgacccggatttcattgctgccaaccaagaggagcgtgccaacaacgtgatcaagggcacaaagcaagagcaagttcaacaaatcatcaaagacatcaaggcgtttaaggaagccaccaaagtggacaaggtggttgtactgtggactgccaacacagagaggtacagtaatttggttgtgggccttaatgacaccatggagaatctcttggctgctg

SEQ ID NO: 127852 - DNA, 155 bp, Glycine max
aaccctaagcacagcaaagcggtaaggatggggaacacggagaagctgatgaaccagatcatggaattggaattcacttcgaaatcgctgcagcgtcaatcgcgtaagtgcgagaaggaggagaaatcggagaagctgaaggtgaagaaggcgat

SEQ ID NO: 127853 - DNA, 266 bp, Glycine max
ttttcacaccaccaacacaatatgtttctccacattgtgttcctccttttccttctctcatccacttcccatgccactgtccaagacttctgtgtggcagacctcaaaggtgcagacacccctgcaggctacccctgcaagccacctgctaatgtcacttcagatgactttgtgtacactggcttagctgaagctgcaaatgtcacaaacataatcaatgctgctgtgaccccagcttttgttgctcaattcccaggtctcaatgg

SEQ ID NO: 127854 - DNA, 161 bp, Glycine max
aggaatggtttctactgtcaagagatgtatcctggcgaggatggacaactatcatggtctaatgctggtgttagagttggtgttggaatcggccttgggatgtgcgtagggcttgggattggtgttggactgctcatgcgatcgtaccaaacaacaactag

SEQ ID NO: 127855 - DNA, 256 bp, Glycine max
gtggatacctaggcacccagagacgatgaagggcgtagtaagcgacgaaatgcttcggggagttgaaaataagcgtagatccggggattcccgatataggtcaacctttcgaactgctgctgaatccacgggcaggcaagagacaacctggtgaactgaaacatcttagtagccagaggaaaagaaagcaaaagcgattcccgtagtagcggcgagcgaaatgggagcagcctaaaccggaaaacggggttgtggg

SEQ ID NO: 127856 - DNA, 205 bp, Glycine max
ttataatttcattttgactctctctctctctctgattgcttccttttcccttttattttgctctcttctctgcacaacaattccttctcattccagatattccaaccatcgaccgatctcaattctcaaccttaacctctcagaatgtcttacgcttatctcttcaaatacatcatcatcggtgacaccggagttgggaagtctt

SEQ ID NO: 127857 - DNA, 266 bp, Glycine max
tgcaattgaagttgaagtcttgcccttctctcttcaactccaaacacaagatctcatcatccatggctgcctccgtctccactgtcggagctgtcaacagagctcttttgaacctgaatgggtctggacctggggtttcagctcccagttcatccttctttgggagcagcttgaagaaggttattggctcaagggtccccaacacaaagatttcctctggaagcttcaagattgttgctgtagaagagaagaaagagattgaagag

SEQ ID NO: 127858 - DNA, 273 bp, Glycine max
gggtacttgagaagaagtctccatgcaacttccttgtgttcggccttggccatgacagcctcatgtggacatcgctaaattacggcggccggacggttttcctcgaggaggacaagtcctggatcgaccaaatccaggagaaggtaccctctttggagtcctaccatgtcatgtacgacacacaggtccaccaggctgaagagctcatgaaaactggaatgaaggaggattgccagaaggttacggacccgagattctccaggtgccctcttg

SEQ ID NO: 127859 - DNA, 260 bp, Glycine max
tgcaattgtaatggcttctacttctaatgccatcttccaatgcacctcttcttcttcttcttcgtttgagtatgacgtgtttgtgagcttccgcggtgaagacacacgcaacagcttcaccgcttttctttttgaagctctgaaaaaacaaggcatcgaggccttcaaagatgataaagatatcaggaaaggcgaatccatagcaccagagctaatacgagccattgaagggtctcatgttttccttgttgtcttttcca

SEQ ID NO: 127860 - DNA, 168 bp, Glycine max
ccctcgtcaggttgttgctttgtgccaagctccattcctacttgatgatcctaatgttggactgctattccctgctgatgcaattgcaagagctaaacactatctttcattgacctcgggcggtttaggcgcttatagtgactcccgcggccttccaggagtgaggaa

SEQ ID NO: 127861 - DNA, 237 bp, Glycine max
aagagattgaagagacccagcagaccgacaaggacagatggaagggtcttgcctatgatatctcagacgaccaacaagacatcacaagaggaaagggttcggttgactcccttttccaagctccacaggatgctggaactcactatgcagtcatgagctcctacgagtacctcagcactggacttcgccagtacttgaaaaacaaaatggatgcatcctacattgctccacctttca

SEQ ID NO: 127862 - DNA, 248 bp, Glycine max
atcgaatcgaaattaagtggagagtgtgtagaaactaaatggggaacgatgacatgacagagagagtagttttcgtgaccgtagggacaacgtgcttcgatgctctcgtcagagccatcgattccgacaacgttaaaaaggccttgtttgcaaaagggtacactcaccttctcattcaaatgggtcgtggatcctatcttcctactaagtctgaaggagatgattgttcgttggctgtagactacttc

SEQ ID NO: 127863 - DNA, 263 bp, Glycine max
attttctttcttgatggtgtcactctaattcatttcctttccccatcccccaactcatcggttccttctcgtcatgaccgcctctcaactcatctccgttagtcccgacaaactccgcttccactttgagttggagcagccaacattttgcgatcttaaggtcctcaataactccgagaactatgttgctttcaaggtcaaaaccacttctccaaagcaatactttgtgcgacctaacaccgctgttgtacagcctgggacta

SEQ ID NO: 127864 - DNA, 267 bp, Glycine max
gttcccgttaggaccaatttcgccgttcggtgttccaacgttcagtcgcaaccgcagctcgactcgcgcaagttagttcttgcagtgaaggaaaagcttgaaaaagaacatcatagtctccctgttggcagaaatggaagggatgacgaagatatgatactgtggtttctcaaagatcgcaagttttctgttgatgatgctatttacaagttgactaaagccattgtatccttcttttcattaatatatcattctggaaatttattc

SEQ ID NO: 127865 - DNA, 235 bp, Glycine max
cgtgatcagaatgtatagacagctagaatattttaaggagtatcaaaaccgagtgagtgctataattggagcttcagaggctaagaatttggtgaaacaagcactagtgctcatcactgtaggaggcaatgattttgtaaacaactacttcttagtgcccaattcagcaaggtcccaacagtacccactacctgcatatgtcaagtatctcatctctgagtaccaaaacttttgc

SEQ ID NO: 127866 - DNA, 257 bp, Glycine max
ctgctctgtttaattgtgtcaattgggtggagagcaattcatgggatggacgctatggacttgttgtctgcactgacagtgcagtctatgctgaaggacctgcccgacctactggaggagctgctgctattgccatgctaattggtcctgatgctcccatttcttttgaaagcaaattgagaggaagtcatatgtctcatgtttacgatttttcacaaacctaatcttgccagtgaatatccagttgttgatggaag

SEQ ID NO: 127867 - DNA, 258 bp, Glycine max
cgatgatattcaggggactgcatctgttgttcttgctggggttgtggcagccctgaagctcattggaggtactctggctgaccacacattcttgtttcttggtgctggagaggcaggaactggaatagcagaactaatagctcttgagatgtcaaagcagacaaagacacctatagaggagactgcgcaagaagatatggcttgtagactcaaagggtttgattgttggttcaagaagggcttcattcaacacttcaa

SEQ ID NO: 127868 - DNA, 174 bp, Glycine max
tgtaaccaagggtgcaacaaaaggtccacgcagagctagacagggtaattgggcttgcaagggtgatgactgatggcagattctcaagcctgccttatctacaatgtgtgatcaaggaagcactgaggcttcacccaccaaccccactatgctccgcaccgtgccatgccactg

SEQ ID NO: 127869 - DNA, 141 bp, Glycine max
gcccattcgtgaaggccgggcctctgaagaacaccgagatcgccgggcaaacggggtctctcgccgctggtgggcttgtggtgatcctcagcctttgcctcacaatctatgggcattcatcttttaacgaaggagacccat

SEQ ID NO: 127870 - DNA, 255 bp, Glycine max
tccagatccagaagatgcaacctgatgctgatgggaaatatccatacactggctccgttgattgtgctgtcaaaaccttcaaagcaggaggaccattcaaattttacaccggattccctgtctattgtgttaggattgctcctcatgtgatgatgacatggattttcctgaaccagatacagaaattgcagaaatcctacgggttgtagtttgtagttctccgtggtaacggatattttctgttgaattcaagct

SEQ ID NO: 127871 - DNA, 202 bp, Glycine max
tgcaattgaagttgaagtcttgcccttctctcttcaactccaaacacaagacatcatcatccatggctgcgctcgtctccactgtcggagctgtacacagagctcttttgagcctgaatgggtctggacctggggtttcagctcccagttcatccttctttgggagcaacttgaagaaggttattggctcaagggtcccaaa

SEQ ID NO: 127872 - DNA, 176 bp, Glycine max
cactgctttctcctggctcaggaacatcttccatgactgtgctgttcagagttgtgatgcttcactgttgctggactccacaagaaggagcttgtctgagaaggaaacagatagaagctttgggttgagaaatttcaggtacattgagaccatcaaagaacgctttggaaagagaa

SEQ ID NO: 127873 - DNA, 115 bp, Glycine max
aaatcaatgcgatgaagacaatgcaggggagagtggtatgctccaccagcgccaagacggtggcagtggaggtggtgcggctcggcccctcaaccaaagtacaagaggcgcgtga

SEQ ID NO: 127874 - DNA, 134 bp, Glycine max
ttcactttaaagttacatagtttttcattgttttacttaatctacaatggctgcttcaacaatgactctctcttcatcatcattggctggccaagctatcaagcttgccccctccacccctgagcttggtgttg

SEQ ID NO: 127875 - DNA, 229 bp, Glycine max
gcttgactagagaaagagagagcaagagcttcgaatcgaaactcagcttaagccaaaaaacacaaatcacaatcgctatggctaggtacgaccgagcaatcaccgtgttctcccctgacggccatctcttcctcgtcgagtacgccctcgaagccgtccgcaagggcaacgccgccgtcggcgtccgcggcaccgacaatgttgtcctcggcgtcgagaagaaatccac

SEQ ID NO: 127876 - DNA, 259 bp, Glycine max
tgtgatgtccatttaaacacataaagctcggcaaagtccccatcctcgtccgatgccttcgatgtaacagtgcttattgtgaatttggttgggattgtggctggtgtatcctatgccataaacagtggttaccagtcttggggtccactatttggcaagctgttctttgctatctgggtcattgcccatctatacccattcttgaagggtctcttgggcaggcaaaatcgtaccccaaccattgttattgttggtccgt

SEQ ID NO: 127877 - DNA, 254 bp, Glycine max
gtcggacaaaaggctcacttcttgatggggagcctatcatttccttgccacctaaatctgtagagttgaaaaaagtggaattttcacaggaggaacgagatttttattccaaactagaggctgattcccgagcacagtttcaggaatatgctgatgctggaactgtgaagcaaaactatgttaacattttgctgatgcttttgcgccttagacaagcgtgcgatcatcctctgcttgtcaaacgttacaattct

SEQ ID NO: 127878 - DNA, 127 bp, Glycine max
gtgaaaagtacagtccatttttagtgatctctttaatttatttgcacatagattaatatggtcgtgtatgattgcttttctattcattgtggcatttttgtgttgtaccctgttgttgtgtttgcaa

SEQ ID NO: 127879 - DNA, 232 bp, Glycine max
tttggccctggatgagtccatgctacctgtgggaagcgtttggcttcaattgggctagagaacactgaagctaaccgccaggcataccgtaccctgcttgtgacagttccaggacttggtccgcctatctctggtgccattctctttgaggaaactctctaccaatccacaactgctcccactacaccgccgacgtgctcctcgagcaaaacattgttcccggtattaaagt

SEQ ID NO: 127880 - DNA, 252 bp, Glycine max
ttcttccattaacgggtctggcctctcttccatctccccagcaaaaacctctctcaagaaggtcacattaggcccttctgtcttcgcaaccgttagcactccttcttctccttcttcttcttcttcttcttccttcccttctctcattcaagacaggcctgtctttgctgcccctgcccccatcatgaccccaactgtgagagaggatatggcaaaggaatacgagcaagctattgaagaactccgaaattg

SEQ ID NO: 127881 - DNA, 131 bp, Glycine max
atttttcttcctcagtagtgtcatttacgcttctcttctctgcagcaactatgcctaaccctaaggtcttcttcgacatgaccatcggcggtcaatctgctggccgcatcgtgatggagctctacgccgac

SEQ ID NO: 127882 - DNA, 251 bp, Glycine max
aggtgtctgcttgaacagttacatgtcttctgtgaggaagatggcatgtgagattcttgagttgatggcagaagggttgaagattcagcaaaaggatgtgtttagcaagcttctaatggataaacaaagtgactctattttcagggcgaatcattacgctgcttgtcctgaaatgactctgaatgatcagaacttgattgggcttggagaacacacagacccacaaatcatctctctgttaagaccaacaa

SEQ ID NO: 127883 - DNA, 261 bp, Glycine max
atttcgattctatcctatgcccttttccatccaaaccaacccctccctcgacgacctacgcacatccaccaggtcctaagcccctcccaattattggtaaccttcacatgcttggacactcccaatcgttccttcaagccctagccaaaaaatatggcaccataatgtccatcaagttaggtcaagtcccaaccattgtagtttcctcacctgaaactgccgcagctattccttaagacccacgacactgtctttgctaga

SEQ ID NO: 127884 - DNA, 250 bp, Glycine max
gttctgagacaaatttattagaagtgatctcaaactggccaatatcacccttggcttgcaacattgcctcaatagggagaagcacagcaaagaatcttatggcttcagaagcaattgatggatatgcatctttgcttcagaatattctcaggcttccatctgaggtttctccacctaaggctgtttcagaaatagcccccaattttaaagactcatggcagtggcatttgcttgaagcttttcaaatatg

SEQ ID NO: 127885 - DNA, 247 bp, Glycine max
atgatgacggcgatgggggtgtacgaggacacgaggagtcctaggaggcgccactttgacgaagaaccagatgagttgccattgctaagcaatgagagcttggtgatgatggtggaaaaagagtgccaacactggtctggtctgcgttacttgaataagtttcaaactggggatttggacttcggtgccagaatggaggccattgattggattcacaaggtccgatcgcattttggatttgtcctct

SEQ ID NO: 127886 - DNA, 237 bp, Glycine max
gtttcaagtttttaaagtattaagatggcagagacattcctatatacctcagagtcagtgaacgagggacaccctgacaagctctgcgaccaaatctccgatgctgtcctcgacgcttgccttgaacaggacccagacagcaaggttgcctgcgaaacatgcaccaagaccaacttggtcatggtcttcggagagatcaccaccaaggccaacgttgactacgagaagatcgtgcgt

SEQ ID NO: 127887 - DNA, 248 bp, Glycine max
agcagtatattttcctgattttgtcaatccaaaaacagtttcctggtgggttgccgagcttcgtcgcttccatgaactagtgcctgttgatggcctatggattgacatgaatgacgcttcaaatttctgctctggacagtgcacaattcccaagggaaaagtgtgccctagtgggacaggacctgggcggatatgttgcttagattgcaagaacatcacaagcacacggtgggatgatctccctacaa

SEQ ID NO: 127888 - DNA, 125 bp, Glycine max
gcagaatggcttctactcaatgtttcttgcaccaccatgctcttaccacccctgccagatccccatcacaacgcatcatggttagcaccaagcctaaccagcttgtttgcaaggcacagaagcaa

SEQ ID NO: 127889 - DNA, 277 bp, Glycine max
ccgacctgaaggcgttctccgccgcgctgttcctctcctccatcctcctctccgcccctctccccgccggcgccgacatctcggggctcaccccatgcaaggagtcgaagcagttcgcgaagcgtgagaagcagtcgataaagaagctggagtcgtcgctgaagctctacgaggcgggcagcgcccccgcactggccattaaggcgagcgtggagaagacgaagaggaggttcgacaactacgcgaagcaggggttgctgtgcggcggcgatgggtt

SEQ ID NO: 127890 - DNA, 271 bp, Glycine max
gagacccagcagaccgacaaggacagatggaagggtcttgcctatgatatctcagacgaccaacaagacatcacaagaggaaagggtttggttgactcccttttccaagctccacaggatgctggaactcactatgcagtcatgagctcctacgagtacctcagcactggacttcgccagtacttggacaacaaaatggatggattctacattgctccagcttttatggacaagcttgttgttcacatctccaagaacttcatgaccctgc

SEQ ID NO: 127891 - DNA, 273 bp, Glycine max
tacaacgcctcgaatccacacagttctactctacgctctaaaccctctctctctctctctctcgatctatcatggctttgcccaatcagcaaaccgtggattaccctagtttcaaactcgtcatcgtcggtgacggcggtactggaaagacaacgttcgtgaaaaggcatcttaccggtgaattcgagaaaaaaatacgaaccgaccattggagtggaggttcacccattggatttcttcacaaactgcggaaagattcgcttctactgttgg

SEQ ID NO: 127892 - DNA, 271 bp, Glycine max
ctgctcgagcggctcgagcctcacaacacttgcttcctgagctttggtgaagctgctgtgctagcttatgatcgtactgatcaatccttctctcgtcatcaaaggttgttttgtgggattgataacatatactgtctcttcttggggagcttgaacaatttgtccctactcaacaagcaatatggattgtcaaagagtactgacgaggccatgtttgtgattgaagcttataagactctccgtgaccggggtccataccctgcagatcaag

SEQ ID NO: 127893 - DNA, 274 bp, Glycine max
ggtcaaatcattcctactgccaggagagtcttctatgcttcccagattactgccaaacccaggcttcttgagcctgtctacctggttgaaatacaggctcctgaacaagctcttggtggaatctacagtgttcttaaccagaagcgtggacacgtgttcgaggaaatgcagaggccaggtaccccactatacaacatcaaggcatacctccctgtcatcgagtcctttggtttctcgagcacattgagggctgcaacatcaggccaggccttcc

SEQ ID NO: 127894 - DNA, 268 bp, Glycine max
cgaagggctatatagcataaacatttgagtcttcattgcacaatgtcgacctcttccattaacgggtggtgcttctcttccatctccccagccaaaccctctctcaagatggccacattaggcccttctgtcttcgcaaccgttagcactccttcttctccttcttcttcttcttcttcttccttcccttctctcattcaagacaggcctgtctttgctgcccctgcccccatcatcaccccaactgtgagagaggatatggcaaagg

SEQ ID NO: 127895 - DNA, 272 bp, Glycine max
agttgtggagatggctagcaggtcaaagttaagcagtatatgttggaatacatatatcaaaagtcaaattgcttcaagcaactttgaaggtgttgtacagttatgggatgtaacaagaagtcaagtaatctctgaaatgagggagcacgagcggcgggtgtggtcaattgatttctcatcagcagacccaacaatgttagcaagtgggagcgatgacggttctgtcaagctatggagtatcaatcaggcaattccatttttgcacttggtgg

SEQ ID NO: 127896 - DNA, 274 bp, Glycine max
tctctcccaatttctctcatcaaagtttcaacctttgataagattgaatcatggggaacgccctgagattcctctacagccattgctgcaagcccacagcagctggtgattctgaatcacttggaccacacggtgtttcctctgccaccgttggtgtttcaacacttgcccatgatctctttcactttgacatcacctcccaggtcccggaaggactcagcaagcatgttgtgtcttctaagaaggctcaggctaattggtatagaaagttagt

SEQ ID NO: 127897 - DNA, 269 bp, Glycine max
gaagttaaaagccttagccttccctacaactccagacgcgcagacatcttcatccatggctgcctccgtctccactgtcggagctgtcaacagagctcttttgaacctgaatggttctggagctggagcttcagctcccagttcagccttctttgggaccagcttgaagaaggttattgcctcaagggtccccaacagcaaggtttccggtggaagcttcaagattgttgctgtagaagagaagaaagagattgaagagacccagcaga

SEQ ID NO: 127898 - DNA, 267 bp, Glycine max
ttgcaattgaagttgaagtcttgcccttctctcttcaactccaaacacaagacatcatcatccatggctgcctccgtctccactgtcggagctgtcaacagagctcttttgaacctgaatgggtctggacctggggtttcagctcccagttcatccttctttgggagcagcttgaagaaggttattggctcaagggtccccaacacaaagatttcctctggaagcttcaagattgttgctgtagaagagaagaaagagattgaagag

SEQ ID NO: 127899 - DNA, 269 bp, Glycine max
tttcttttcgttcgcatcttctctctctctcaggttctctcctcttcttcttcttcttctctctctgtgttcttacctttttacaagtgttactaattaaagtgtgtgattccgcagaaagatgaaggtggtcgccgcgtatttgctcgccgtcctcggtggcaacaacagcacctccgccgatgtcatcaaggaaatccttggctccgttggagtagaagcagatgaagataggattgaatcgtttttgtctgaagttaagggtaagg

SEQ ID NO: 127900 - DNA, 268 bp, Glycine max
cgaccatattggtttcactttggtcttcttcaccctgttagggtttgcatcagattcccccaattcttgtttgattttgcgctttcactagtttttcttcgacatgactcaagatctcgagatgagggatcgctcaacgccttccaactctgtttctttgcctgctccatctactttgcagcatttgaaggagatagcgtctcttatcgagaccggttcgtactcgaaggaagttcgtagaattgctcgcgctgttcgccttacaatt

SEQ ID NO: 127901 - DNA, 271 bp, Glycine max
cacaaatcacactattatatatagtaagtttgagcagaagcttggatatctggcagcagaagaacaagtagttgagaactaagaaggagaagcaaatggcttcctcaatgatctcttccccagctgttaccactgtcaaccgtgccggtgccggcatggttgctccattcactggcctcaagtccatggctggcttccccaccagaaagaccaacaatgacattacctccattgctagcaacggtggaagagtgcaatgcatgcaggtgtg

SEQ ID NO: 127902 - DNA, 268 bp, Glycine max
gagaaaatgagtgaagacgcgaaaaagaacattgccggagctctaacggcgaggcccaactccgatgaccagaaactatcgccgttaccgtcaccggcgccggccgttcctccgaagaaggtcatcatcaagagcgccgacatgatccccgacatgcagaaggaggccgtcgatatcgccgtcgccgcgtttgagaagtacaatgtggagaaagatgttgcggagcagataaagaaggagttcgataagaggcatggccccacttggc

SEQ ID NO: 127903 - DNA, 267 bp, Glycine max
ggaattgagttccttaggacttacctcaaccttccatccgaaattgtccctgccactctcaagaagcaggccaagcccgccggaagaccattcggtggcccacccggtgatcgccccaggggcccacctcgctttgacggagagaggagattcggcggtgaccgtgatggataccgtggaggtccacgcggacctggcggtgatttcggtgacaagggtggagctcctgctgactacaggccttcttttgggggtggtcctggcgga

SEQ ID NO: 127904 - DNA, 271 bp, Glycine max
cttcctctctgcagagtgcagagctttctctccccgttgcttcagtcattctcaataacaaaccaatctttcttagaaaatgagggggggcttgtggcaacttgggcaatcgatcactcgccgtcttgcccatggagataagaaggctgttgctcgtcgatgttttgcctcagaagctgagctgaaaaagacagtgtttcatgacttccatgttgctcatggtgggaagatggttccatttgctgggtggagcatgccaatccaatacaag

SEQ ID NO: 127905 - DNA, 274 bp, Glycine max
gaggggtacaaatgtgacccaaatgctccaatatgtgcgacgatggcttcctgaacttgctagattaccaactgaatggatgcaccatccatggaatgcaccggagtctgtactccaagctgctggaattgaacttggttcaaattatcctcttcccattgtgggaatagatgcagcagaagtaagacttcaagaagcacttattcaaatgtggcaacaagatgcagcttcaagagctgcaatggaaaatggaaccgaggaagggcttggagac

SEQ ID NO: 127906 - DNA, 278 bp, Glycine max
ggaaacagaaaacagtggcttcaccagggaggggtattttggccatggatgagtccaatgctacctgtgggaagcgtttggcttcaattgggctagagaacactgaagctaaccgccaggcataccgtaccctcctcgtgacagttccaggccttggtcagtacatctctggtgccattctctttgaggaaacactctaccaatccacaactgatggcaggaagattgttgacgtgctgcttgagcaaaacattgttcctggtattaaagtcgacaag

SEQ ID NO: 127907 - DNA, 81 bp, Glycine max
cttcactcttctctttctatccagaattctccaccagccatggcagtgtcttcagcaacagcttcctccaaactcatacta

SEQ ID NO: 127908 - DNA, 271 bp, Glycine max
cttggaaacaaggttgatgtagacggtggaaacagtagaagggtcactgagaaaaaagctagagactggtgtgcttcccggggaaacataccatactttgagacctctgcgaaagagggttacaatgttgaagaggcttttttatgcgttgctaaaattgcactagaaaatgaacacgatcaagacatttattttcgaggaatctctgaagcagtttcagaagcagaacaacgaagtgattgtgcatgctgaagtaggatgtaagaagatt

SEQ ID NO: 127909 - DNA, 270 bp, Glycine max
gacacagcacgatgacgatgaagataatggtagcgataaagcgagtggtggactacgccgtgaaaatcagggtgaaggcagacaagacaggggtggtgagccagaacgtgaaaatgtcgatgaaccccttctgcgagatcgctctcgaagaagcccttcgcatcagagagtctggcttggcctccgaggttgtcgccgtcaccatgggaccctctcaatctctcgacactctccgaaccggccttgccatgggagccgacagaggcatcc

SEQ ID NO: 127910 - DNA, 260 bp, Glycine max
gaattagctctttcttcattgaaccaatgtgtaaatggatgggtgcaaaattagtatgggcactgctcaattttatcgtctttgtttgcatggctagcactgctatcattagtcttatttccataagagattattctggagggatagaacacgtaattggagcaaatgaagcaatcaagattgcttccttggttgtgtttgttctacttggttttcctcttgcgattacctatagtgttcccttcgctgttacagcagag

SEQ ID NO: 127911 - DNA, 272 bp, Glycine max
gttggccttccagagggtgcctggggtgaccaagacagaggttggctacacccaggggcttgtgcataatccaacctatgaggatgtgtgtacagggaccaccaaccactcagaggttgtaaggattcaatatgatccaaaaaattgcagctatgagactctgcttgacatgttctggtctagacatgatcctaccactctgaatagacaggggaatgatgtgggaacacagtacagatctggaatatactactacacgccggaacaagaga

SEQ ID NO: 127912 - DNA, 263 bp, Glycine max
ctgatattcacccttttgcaccagtttacttcgctcaaggttatcaggaaatgttcaataatttgggtgaactgttgtacaccatcactgggttttattccttcttcttgctaccaaatgctggtgctgctggagaatatgtcggacttatggttattcgtgcatatcatttggcaaggggagaccaccaccgcaatgtttgcattatatctgtctcagcacatggtacaaatcctgctagtgctgctatgtgtggaatgaaa

SEQ ID NO: 127913 - DNA, 260 bp, Glycine max
gaaaaaccctaagcaaagcaaagcggtaaggatggggaacacggagaagctgatgaaccagatcatggaattgaaattcacttcgaaatcgctgcagcgtcaatcgcgtaagtgcgagaaggaggagaaatcggagaagctgaaggtgaagaaggcgatcgagaaaggcaacatggacggcgctcgaatctacgcggagaacgcgatccgtaagcgcacggagcagatgaactacctccgcctggcctcgcgcctcgacg

SEQ ID NO: 127914 - DNA, 265 bp, Glycine max
gtaaagaggattagagggtcgccacgtttagcaataaccaaaccctctctactcttttttcttctccttctcttcgctagggttttagcttcttcctcttcacttcgttctttttcgcctctacaatgagcaacgacaaggacacattcaacgtcgccgatctcacttctgctctcaacgaggacaatagagcagaccttgtcaatgctcttaagagcaagatacagagtttggctggacaacactcggatattctagagtctct

SEQ ID NO: 127915 - DNA, 261 bp, Glycine max
aaataaaaaaaattgttttcgtgtggaaacaaaaaaacaattcaaaaacaaacatatgatggtgaagccgagtagcgaaaagccagaggagcatagggattccaagtactacaaaggggtccgaaagagaaaatggggcaaatgggtatccgaaataagactacccaacagccgtcagaggatttggttgggatccttcgacacccccgagaaggccgcgcgtgccttcgacgccgcaatgttctgcttacgtggccgcaa

SEQ ID NO: 127916 - DNA, 265 bp, Glycine max
gagtggttcacgcgtgccatgcaggaggagtggtacatagccttgaaggttggtctcatcacgaagttggggccatagatgttaacagaatcgatcttgtgtgggaagcagcactcaaacatggcctaagaccagtgtcaagtttcacacagaaagaaaattaaaatcagcttcagtcaaagtatttttctcaagttgtttcttatttgttttggtgtattgcatgcacatcacagtgaccttataagtgtgattatattctttc

SEQ ID NO: 127917 - DNA, 267 bp, Glycine max
tatctcaaagcaaaaataccatcatttctttcttggcagcattctcaatagttattcatttgttcctctctttgctattgacaattcaattcaagctcgagattcctggtgcaatgacttcaacaaatttggcattttggattcctaatattggtcaactaatatttataacatgtggttggtgctccgatacatggaaaggtttctcatttttggcattcaaagatctttggcctgttgtcaagctttccctttcatctggtatca

SEQ ID NO: 127918 - DNA, 267 bp, Glycine max
ggttattggtgtctactctgtattggctctctctgtgtactttctttatgttcgatgcactgccattgatcccgccgaccagggcgtcatggttgattgtgacaagacatcaaagaatagatcaacacttgatgaagagttggcagaacccagcaagatgggactaaagggtgaaggaatgtctgatcgtcacaattcaagttggtgctctagagttgggtgtttcttctgaagtttccttgttagagacagactgccgcagtaatg

SEQ ID NO: 127919 - DNA, 263 bp, Glycine max
attctctttgcgcagttccctacctctcttttctagatgcagatcttcgtcaagaccctcaccggaaagaccatcacccttgaggtggaaagctctgacaccatcgacaacgtcaaggcctagatccaggacaaggaaggaattcccccggatcagcaacgtctcatcttcgccggaaagcagctcgaggacggccgtaccctcgccgactacaacatccagaaggagtcaacccttcaccttgtccttcgtctccgtggtgg

SEQ ID NO: 127920 - DNA, 259 bp, Glycine max
gttaaatcattcagtgaagcattggatactacccaaaccatcatatggaatggaccaatgggagtgtttgagtttgacaagtttgctgttggtacagaggctattgcaaagaagctggctgatctcagtggaaagggggtgaccacaattatcggaggaggagattctgttgcagctgtggagaaagtaggagttgctagtgtcatgagccacatatctactggtggtggtgccagtttggagttattggaaggcaaag

SEQ ID NO: 127921 - DNA, 266 bp, Glycine max
ttttcggagagatcacaaccaaggccaacgtggactatgagaagattgtgcgtgacacatgcaggaacattggttttgtctctgatgatgttggtcttgatgctgacaactgcaaggtcctcgtcaacattgagcaacagagtcctgatattgctcaaggtgtgcacggccacctcacaaagaggcctgaggagattggtgctggtgaccaaggtcatatgttcggctatgccactgacgagactcccgagctcatgcccttgagc

SEQ ID NO: 127922 - DNA, 269 bp, Glycine max
ccgagaccttggtcatgggagtggcacctgttaaggctcaatttgagggtgctgaaatgggtgtgcccgctgagaacgatggctgcaaatgtggaccaaactgctcctgcaacccctgcacttgcaagtgaggtgttgggagagcaagcttcaagcagagatagcccttaattaggaataatgataaactattaatgtgtagctaaaaacttatgtattatgtctgtgatggttttcgtgcactctggtgttttgtgttaaacaaacat

SEQ ID NO: 127923 - DNA, 295 bp, Glycine max
tgaagtttactttgacttcttccctgtggaggttgatagtcaagagggagttgctcacattggtgaattgaaatctggtgtctatgttccactgcctacaaaaactaatttggtggaaactcccaaggaatggcaactggatctaccttgtgacaaaattcctagtgtcttgactacaactgatgagagattggtaggcacagaacatgagggatatgatccttttcttggtggaattcaaaaatatgccactcccatgatgcccctagatgaagaaattctttctaaagttgca

SEQ ID NO: 127924 - DNA, 291 bp, Glycine max
tgctgaaacagctatctcatattgatccgaatggaatgatattgccgggtgatacccttgcttaacgatgaagatgtcactggttcaacttcgacctctacttgacaaggcgagggttcagcacaagctctgagaaccttgttgcttctgtgctctttaagagactgccagtggtcattcccaaaattgaacctgtagtttatgcatttcaaggattctcgattcgatggcgacaacaatatcaacgctgataccctgatgaatttctagacgaatctgatgctaggggta

SEQ ID NO: 127925 - DNA, 287 bp, Glycine max
gccttctagctggtcataatatcaccattactgatggtattgacaaaactagtgcaactttgcaatttagaaagttagcagattgtgattttctcaagagaaactttaagcagatgtctaatgttttgtgggtggctcctgaggataaggcgagtttatggtcacaacttcattatgtttcgtgtaataatctggaaatgcaagaagcttatcttgtcaatctcgtaaatgtgttacgagaattgtatttgcacagtccagaggaagctcgccaattgagaaggaaa

SEQ ID NO: 127926 - DNA, 287 bp, Glycine max
ataccacacgtggcttcagaagacatcaatatcgaaggattcaatgttccacgagacacaattgtgattattaatggttgggccatgcaaagagatcctaagatatggaaagatgcgacaagctttaaacctgagaggtttgatgaagaaggagaggagaagaagttggtagcatttggtatgggaagaagggcttgcccaggagaacccatggctatgcaaagtgttagctatactttgggattaatgattcaatgttttgactggaaacgagtaagtgagaagaa

SEQ ID NO: 127927 - DNA, 284 bp, Glycine max
attctgcgtagtgacctattggcaaattttttgacagagggcaattttagagcaagtgttgatttgcagcgcactcatcgtatcaaaggaatgattaaaatggtggccacagttggtattcctgagaatacaggtatagcattggcctgtgctatgaatagttcttttagggggcgtgccagttctgatatttacaccatctgctctcaagactgtgaattatggaatcctgcttgcacaaaagcaatgactatgtcatttaatccaaacccgtgttctgatgc

SEQ ID NO: 127928 - DNA, 282 bp, Glycine max
ctcctccacaaaagcatgaggtgttcattagttttagaagtgaagacacccgcaagacattcaccagccatcttaatgctgctttggaaagattagatatcaaaacctacttagacaacaataatctagatagaggagaggaaatacccacaacccttgttagggccatcgaggaagcaaagctatccgtcattgtattctctaaaaactatgcggattctaagtggtgtttggatgagctcctaaaaatacttgagtttggaagggctaaaactctaatta

SEQ ID NO: 127929 - DNA, 287 bp, Glycine max
gagcgagcgagcgagcagtttcaaagagaggatttgggattgggaaggcgagggattgcgctgcgtctcttcctcttctctttcgattcatccctcattcataatcttccaatccaacaacctcagcctcacactcacacatacacacatctgaacgcgtatcgtacctcccatggcttcaaagcgcatcctcaaggagctcaaggacttgcagaaagacccaccaacttcttgcagcgctggtccagtagctgaggacatgttccattggcaagcaacgattatgg

SEQ ID NO: 127930 - DNA, 164 bp, Glycine max
tctagactcttctttttctctaagtctaaggggtgccctgagatcactttgagcaatggtgaaggctgtggcagttcttggcagcagcgagggtgtcactggaactattttcttcactcaggagggaaatggtccaaccaccgtaactggatctcttgctggtc

SEQ ID NO: 127931 - DNA, 196 bp, Glycine max
cattactgatggtattgacaaaactagtgcaactttgcaatttagaaagttagcagattgtgattttctcaagagaaactttaagcagatgtctaatgttttgtgggtggctcctgaggataaggcgagtttatggacacaacttcattatgtttcgtgtaataatctggaaatgcaagaggcttatcttgacaat

SEQ ID NO: 127932 - DNA, 293 bp, Glycine max
ccaggacctattgtgttttaaatccacaaaatccttttgtgttaaataggtggatggggaaactgactttcccccagggcacttctcgaagtgttaaaagaatgcctctttctatagggggaggagctggtgcaaagaatgctattctcatgaatatgccaaatgctgttctttcaatgtggagatattttgttggagatttcgtctttgaagtttctaagatgacttctccctacattaaatgcacagtctctttcttcatagcatttggaaatttggctgatgacaccatc

SEQ ID NO: 127933 - DNA, 292 bp, Glycine max
cttcttcctccaagagaagtaaacaaccctcacattcaccacagcagcacacacagacaaagacaaccttgtttgtctccaatcaaaacctttcaagctggcgttcgaaaaccaagacaaccctgtccgagaaatcaagcccaagaataggagaatcatgggtgctggaggccctgatgatgaggacaacaacaggtggccaccgtggctgaagcctctgctaaaagaaagtttctttgttcaatgcaagcttcacgctgattcgcacaagagcgagtgcaacatgtactgc

SEQ ID NO: 127934 - DNA, 287 bp, Glycine max
gaaaaattgatgcgtgaaaggacacacctgctgttggcttgttgttcaagaatggcaatttgtaagaaagatgtttggagagttgaatgtggaatcccttctggatttccgctcacagttatttgtaatagcatttttaatgagatgctcattagatatagctatgaaaaattactgcgccaggctaaagctccaagtatgtttttacaatccttcaaaaattttgtttctttgtgtgtgtatggtgatgataacttaattagtgttcatgaatatgtcaagcctta

SEQ ID NO: 127935 - DNA, 284 bp, Glycine max
tctcgagccgattcggctcgaggtctttgtggtggtgatgaaaacttgatgcgtgaaaggccacacctgctgttggcttagttgttcaagaatggcaatttgtaagaaagatgtttggagagttgaatgtggaatcccttctggatttccgctcacagttatttgtaatagcatttttaatgagatgctcattagatatagctatgaaaaattactgcgccaggctaaagctccaagtatgtttttacaatccttcaaaaattttgtttctttgtgtgtgtatg

SEQ ID NO: 127936 - DNA, 273 bp, Glycine max
ggcttttccccacaagctggtgcagtttggagagattcaggaaaaagttgtattgaaattttcacaagaggaatttcttacagcttggtcaactcaggtgcgtcctgcaacaactctgttggctgatgggtgtccatatttgtatgctatggtgcatgatagttcagtgtctacaataccaggtgattttgtcattggtgttaagttgacaaccataaacaatatgtgtgcatatgggctcaatcctggtatttcaggttctcgtcttttggg

SEQ ID NO: 127937 - DNA, 284 bp, Glycine max
ccaggacctattgtgttataaatccacagaatccttttgtgttaaataggtggatggggaaactgactttcccccagggcacttctcgaagtgttaaaagaatgcctctttctataggtgggaggagctggtgcaaagaatgctattctcatgaatatgccacatgctgttctttcaatgtggagatattttgttggagatttcgactttgaagtatctaagatgacttctccctacattagatgcacagtctctttctccatagcattaggctatttggctga

SEQ ID NO: 127938 - DNA, 243 bp, Glycine max
agttaatgtagcatgtgctgctgttggcttgacatcaagctatactccgactccattgttggaatctggtttgcaaaaagacagagggttaattgtggagtattttggaaggatgtcttacgttgctcataacgttaatcagccccaagagaaagatttgttggaaggaaatttttcctttgatattaaatctcgctctagattggaaaaagtttcctctacaaaagcacaatttgttagtgg

SEQ ID NO: 127939 - DNA, 211 bp, Glycine max
tcggattcggctcgactcgagcgaatcggctcgagggaaaagctccattactatggcactctaatctcagaaccaccaatttcctgcgccatgtggaatcaatgaagcttcttccatcaggtgcgggtcacatttcacacttgaatgctgtgatacttggtgaatctctcgccactgaagaggatgatttcgttcttccaagtgaggactt

SEQ ID NO: 127940 - DNA, 239 bp, Glycine max
tgcaaaggctggaattgcattgaataagaactttgtgaagcttgtttcttggtacgacaacgagtggggatacagctcacgtgtcattgacctgcttgtattcgttgccaagaagtctttttaaggtggtgtactgcaaagttgcttgtctacacattatgtgcttgtctagttgcgatttagtgtcttgctcgtgcaaaaaatgagaggtctgaataaatcggtttctggaaccagtg

SEQ ID NO: 127941 - DNA, 171 bp, Glycine max
cagatgaggtggttcttctggatttctggccaagtccatttgggatgagggtcaggattgcacttgctgaaaagggtatcgaatatgagtacaaagaagaggacttgaggaacaagagtcctcttctcttacaaatgaacccggttcacaagaagattccggttctcatcc

SEQ ID NO: 127942 - DNA, 289 bp, Glycine max
ataaacacaaaatcaagcacacaagcaaattcacttctctgttctgacacacatattaagttcccgagaaagatctagagagtaattaagatgggtacgtggttcacaaatgcaaggccgtatctgctgttagtggcagttcaatttgggtctgctggcatgttcatatttgcgatggatgctataaagaagggtatgagccattacgtgttcatcgtctatcgtaatgccatcgcctctgtatctcttgctcccttcgcatttgttcttgaaaggaaagttaggccca

SEQ ID NO: 127943 - DNA, 290 bp, Glycine max
caagcacacttgaagttgtgaatgaggcccaaagtcgaaagcccaacagatatgaagtttcccaatacagatatcgcaatgtgccaataaagcgcagagcatgggttgaaggccagatgtactttcgatcagtctgtagtagccattatgtctaaatgcaaagccagcatgagcatgggatacactgatgctcagattttgatggttccagggcgcagattcacagctcatggtacttttttcagaaatctgactcagacagtgcgagtccaaattgttacatctgaaaa

SEQ ID NO: 127944 - DNA, 280 bp, Glycine max
aaagctttctagctggtcataatatcaccattactgatggtattgacaaaactagtgcaactttgcaatttagaaagttagcagattgcgattttctcaagagaaactttaagcagatgtctaatgttttgtgggtggctcctgaggacaaggcgagtttatggtcacaacttcattatgtttcgtgtaataatctggaaatgcaagaagcttatcttgtcaatctcgtaaatgtgttacgagaattgtatttgcacagtccagaggaagctcgccaatt

SEQ ID NO: 127945 - DNA, 264 bp, Glycine max
attaccaagcaagttatgagcaagatggcagaaatgataaacagtctttgtggtggtgatgaaaaattgatgcgtgaaaggacacacctgctgttggcttgttgttcaagaatggcaatttgtaagaaagatgtttggagagttgaatgtggaatcccttctggatttccgctcacagttatttgtaatagcatttttaatgagatgctcattagatatagctatgaaaaattactgcgccaggtaaaagctccaagtatgttt

SEQ ID NO: 127946 - DNA, 241 bp, Glycine max
tgccagttctgatatttacaccatctgctctcaagactgtgaattatggaatcctgcttgcacaaaagcaatgactagtcatttaatccaaacccgtgttctgatgcatggagtttggaatttctgaagcgtaccggatttcattgtgatatcatttgtgtcactggatggactgccactccaatgcaggatgttcaggttacaattgattggtttatttcctctcaggaatgtgttccca

SEQ ID NO: 127947 - DNA, 274 bp, Glycine max
tctcgagccgaatcggctcgaggaaaaattgatgcgtgaaaggagacacctgctgttggcttgttgttcaaggatggcaatttgtaagaaagatgtttggagagttgaatgtggaatcccttctggatttccgctcacagttatttgcaatagcattttgaatgagatgctcattagatatagctaatgaaaaattactgcgccaggctaaagctccaagtatgttttaacaatcctaaaaaatttttgtttctttgtgtgtgtatggtgatga

SEQ ID NO: 127948 - DNA, 190 bp, Glycine max
ggaacaatggcgggtagggtttcgacgtgcttcttcttcgtgtttgctctttctctccttcttccttttcagatctccgctgaggaatcatcggagaaagagttcgtactcacattggatcactctaactttcacgacactgtcagcaagcacgatttcatcgtcgtcgagttctacgctccatggtgtg

SEQ ID NO: 127949 - DNA, 284 bp, Glycine max
ggcagcagtgcgaagagaaagatagagaagaagcgcttatcgaactcggacggaagcactgagttaactcagagcgagtgaaagtgttgctgcgtgatgtctggtggtatcgcccgtggacgcctcaccgaggagcgcaagtcgtggcggaagaaccatccccatggttttgttgcgaaccggagacgctgcccgatggaaccgtgaacttgatggtgtggcattgcactattcccgggaagactgggactgattgggagggtggctacttcccgcttacgctg

SEQ ID NO: 127950 - DNA, 281 bp, Glycine max
gtggtcctaataatggttttgaaatgtggagttctgagtgggcaaatcaaacttcatggcatttgagtttccttattgacaatcccaaacagtctacagtttttgatattactcttgggaatttctcaagattttgagattgctggtaatactcttatgccagctttttctgttccacaggctactgccagatcttctgaaaatgcggaatcctctgcatgatctggaatttgtgttttcttttgcttgttgtttgtttaattcaataaaggaaattcggc

SEQ ID NO: 127951 - DNA, 277 bp, Glycine max
cataaatattccgttttgcgtttctctgcctaaaaggattgaaagatgggtcaagcactaggttgctatcaagttgatcagtcaaatgtggctatcaaggagcattttggaaaatttgatgatgtcctagaacctggatgtcattgcctgccttggtgtcttgggtaccagattgctggtagtttgtcactgcgtgtgcagcaacttgatgttcgatgtgagacgaaaaccaaggacaatgtctttgtcactgtggttgcatctgtgcaataccgag

SEQ ID NO: 127952 - DNA, 278 bp, Glycine max
ctcgagccggccacatctgagggttttcctcatgtgctttcacgcaaaaatggtgaaaaaggcaaaagaagatttgtttctggggatggtgaagagatgacattgattccgggaaccagtgttgaagaggcttacaacaagctaatagttgaacttgagaaaagtgttcctacattggttggcattgaatgtcccaaggatgagaaacttcctcgtcgcaaaatttttgacaaacctaagacgcgctgcttcactattctccctatggagtttaatct

SEQ ID NO: 127953 - DNA, 277 bp, Glycine max
cctcgagccgaatcggctcgagattttgataaaccgcgatcacagagttgccgcaccttaaaaccggaaacaagagcaatcgctacttgatttcaagaatctctcaatttcttcctacttctttgtgtacggtttcttaatggtcataaaatcactctctgtgctggccacagacttcgtgaatcatgttctttaccactcttagtatatttcctggacactctcctattagattaatgacttcgtgccagattcaaacttcttctgtctctggctc

SEQ ID NO: 127954 - DNA, 275 bp, Glycine max
agcagatgtctaatgttttgtgggtggctcctgaggacaaggcgagtttatggtcacaacttcattatgtttcgtgtaataatctggaaatgcaagaagcttatcttgtcaatctcgtaaatgtgttacgagaattgtatttgcacagtccagaggaagctcgccaattgagaaggaaagctctctctcgtattgaatggctgcaaaaagctgatgtgcctaccatagcacagattgaagagttccattcgatgcagaggatgatgaatgctcct

SEQ ID NO: 127955 - DNA, 175 bp, Glycine max
tgaaattttgataaaccgcgatcacaggttgccgcaccttaaaaccggaaacaaaagcaatcgttacttgatttcaagaatctctcaatttcttcctacttctttgtgtacggtttcttaagggaaagaaaatcactctctgtgctggccacagacttcgtgaatcattttcttt

SEQ ID NO: 127956 - DNA, 198 bp, Glycine max
caaaagaaagagagggaaaattctcttccatggcctcttcacgccctgccaatgtgggaatccttgccatggacatctacttccctcccacctgcgtcacccaggatgctttggagggtcatgatggggtgagcaaagggaaatatactattgggcttggacaggattgcatggccttctgctctgaggttgaaaatg

SEQ ID NO: 127957 - DNA, 252 bp, Glycine max
atcattttctctcttctctgcttcttcttgttcaaatcttaggagctgaggagaatcaatcgagagaaatatgtctggtatcgctcgtggacgccttgctgaggaacgaaagtcatggcgcaaaaaccatccacacggtttcgttgccaagcccgagactctacctgttggccccgaaaatttgatggtctggcattgcactattcctggaaagccggggactgattgggagggtggatattccccactgac

SEQ ID NO: 127958 - DNA, 207 bp, Glycine max
ggacattcggctcgagtgatcaactcaccgatgaacagatctcggagttcaaggaagccttcagtttgttcgataaggatggcgatggttgcatcacaacaaaggagcttgggactgttatgcgttcgttgggtcagaatccaacagaggctgagctccaagacatgatcaatgaagtagatgctgatgggaatggcccattgactt

SEQ ID NO: 127959 - DNA, 272 bp, Glycine max
gttccactgcgtacaaaaactaatttggtggaaactcccaaggagatggcaactggatctagcttgtgacaagattcctagtgtcttgactacaactgatgaaagattggtaggcacagaacatgagggatatgatccttttcttggtggaattcaaaaatatgccactcccatgatgcccctagatgaagaaattctttctaaggttgcacaagatatggttgaggaatggtttgattgtgttgatgaggaggattcctttgaggaagttt

SEQ ID NO: 127960 - DNA, 261 bp, Glycine max
ctcgagccgttttgggataagttccgcaaagctcctgacgaatctctcaggaaaaatacagctcagaaacaagttttggaagcaatgtctcacagaatgcatgtagacaacagtgtaaaactgattgggaagcttttatttagcattgaaaagggtccagaagtactcaacgctgttagaccggctggatcggcacttgttgatgactggcactgcctgaaaaccatggtgaggacttttgagacacttgtggatcttgtc

SEQ ID NO: 127961 - DNA, 220 bp, Glycine max
tctgtgtagaagccatgtctaagggtcctggtctctactctgacattggcaagaaagccagagatctcctgttcaaggactaccacagtgaccagaagtttaccatcactacctactcacccactggagttgctataacatcctcggggaccaagaaaggtgacctttttgtggcggatgttaacacccagttgaagaacaagaacatcaccactgatat

SEQ ID NO: 127962 - DNA, 201 bp, Glycine max
gccattgaattcttcttccatttctcttttttctgcatacccatttcgtttttcttcccaaatggccctttcttgctccaaagttttaagcttttatctctcgcccgttgtgggtggtggtgatgttccgaaaaagctcactttttcttcttttttgggtctttctaagggtgttggtggaagcaggagctcgagggtgtg

SEQ ID NO: 127963 - DNA, 201 bp, Glycine max
gagagcttcatcttgagatctgtttgaaggacttgcaggatgatttcatgggtggagctgagattatcaaatctgaccctgttgtgtcattcagggagactgttttggagagatcatgccgcaccgtgatgagcaaatcacccaacaagcacaaccgtctgtacatggaagcaagaccattggaggaaggtcttgctgagg

SEQ ID NO: 127964 - DNA, 214 bp, Glycine max
caaaactggagattggatcacacttatacaaaattctccaattagtaacttgttgagagttgctgcttggaagaaaggctgtttaatggttaaaattgtgatgtctgggaatgcagcagtcaaaaggagtgattgggcctcattggtacaagtgtttttaacaaacagcaacagtacagagcatttcgatgcatgtaagtggacaaattcggaa

SEQ ID NO: 127965 - DNA, 261 bp, Glycine max
gcagctgcagcagcaatggctcccaaacgaggtggaaaggctccggctcttgccgctaagaagaagcctgagaaggtcacgaatccgttgttcgagaagcgtccgaagcagttcggaatcggaggggcgttgcctccgaagagagacttgactaggttcgagaagtggccaaagaatgttcaaattcagaggtagattaggattcgaaagcgaggttgaaggcccccccagttttgaaccagtctaccaaaactctaaaaa

SEQ ID NO: 127966 - DNA, 196 bp, Glycine max
tgaatatgtcaagccttactttagtggttctaaattgaaaagctttctagctggtcataatatcaccattactgatggtattgacaaaactagtgcaactttgcaatttagaaagttagcagattgtgattttctcaagagaaactttaggcagatgtctaatgttttgtgggtggctcctgaggacaaggcgatt

SEQ ID NO: 127967 - DNA, 270 bp, Glycine max
ctcgagccgattcgggtggttacatttccgaataccattgtgcagattgaagcagacatgaactcaaggtttcagcttttgagtaccactaccaatggtgattttgttcaaggaaaagatctcgcgatggttaaagttaatgtagcatgtgctgctgttggcttgacatcaagctatactccgactccattgttggaatctggtttgcaagaagacagagggttaattgtggagtattttggacggatgtcttacgttgctcataacgtt

SEQ ID NO: 127968 - DNA, 271 bp, Glycine max
caaatttgtttaaattgtctcttgatgatgttgaaactcctaaaggttccatgttggatcttaaaatttctcaatctaaaattgcacttcccaaaaacacagttggaggaactattctgcgtagtgatctattggcaaattttttgacagagggcaattttagagcaagtgttgatttgcagcgcactcatcgtattaaaggaatgattaaaatggtggccacagttggtattcctgagaatacaggcatagcattggcctgtgctatgaa

SEQ ID NO: 127969 - DNA, 270 bp, Glycine max
cggctcgagtcactgggtacaaagatgggttcaaccagattaagtccttggttgatgttggaggtggcattggagggtctctttctgagattgttagggcttatcctcacatcaatgccatcaactttgacttgcctcatgtggttgccactgctcctaagtatgatggaatcacccatgttggaggtgacatgttcgtgtccattccagatgctgatgctatttacatgaagtggattctgcatgactggagcgacgagcactgcgtca

SEQ ID NO: 127970 - DNA, 270 bp, Glycine max
attcattcaagattcagcaagtgcgttttggaagcagagaccgaaatacttcgagatggcccgtacaaagcaaactgctcgtaagtcaactggaggaaaagctcccaggaagcagcttgcaaccaaggctgcacgtaagtctgcaccaacaactggtggtgtgaagaagcctcatcgttatcgccctggaactgttgctcttcgtgagattaggaaataccagaagagcactgagctcctaatcaggaagcttcctttccagacgttggt

SEQ ID NO: 127971 - DNA, 184 bp, Glycine max
ctttcaatgtggagatattttgttggagatctcgtctttgaagtttctaagatgacttctccctacattaaatgtacagtctctttcttcatagcatttggaaatttggctgatgacaccatcaattttgaggcttttccccacaagctggtgcagtttggagagattcaggaaaaagttgtat

SEQ ID NO: 127972 - DNA, 185 bp, Glycine max
ctcgagccgcaaaactggagattggatcacacttatacaaaattctccaattagtaacttgttgagagttgctgcttggaagaaaggctgtttaatggttaaaattgtgatgtctgggaatgcagcagtcaaaaggagtgattgggcctcattggtacaagtgtttttaacaaacagcaacagta

SEQ ID NO: 127973 - DNA, 268 bp, Glycine max
ggcaacagtgagaacaccattgaattttgattctagcaagcagagcttttgtcaattttctattgaccttctcggtggaggaattttagtggacaaaactggagattggatcacacttatacaaaattctccaattagtaactgttgagagttgctgcttggaagaaaggctgtttaatggttaaaattgtgatgtcggggaatccacctctcaaagggtgttatggcctcactaggaaagaggtttttatacaaacaggacagttca

SEQ ID NO: 127974 - DNA, 195 bp, Glycine max
ccgaaatgttaagagaatgcctctttctatagggggaggagctggtgcaaagaatgctattctcatgaatatgccaaatgctgttctttcaatgtggagatattttgttggagatctcgtctttgaagtttctaagatgcttctccctacattaaatgtacagtctctgtcttcatagcatttggaagtttggct

SEQ ID NO: 127975 - DNA, 241 bp, Glycine max
ttttagagcaagtgttgatttgcagcgcactcatcgtattaaaggaatgattaaaatggtggccacagttggtattcctgagaatacaggcatagcattggcctgtgctatgaatagttcttttagggggcgtgccagttctgatatttacaccatctgctctcaagactgtgaattatggaatcctgcttgcacaaaagcaatgaccatgtcatttaatccaaacccgtgttctgatgca

SEQ ID NO: 127976 - DNA, 267 bp, Glycine max
cagcggcggcaacagggagagaagatgaagttcaatccacgtgtgtcgagcagccgccgcaagagccgaaaggtcatttcacggcgccatcgagcgtgcggcgggtgcttatgagcgcccctctgtcggcggactgcggctaagtacaacgtgaggtcgatcccagtacggaaggaggacgaggtgcaggtgatgcgaggaacatacaagggtcgcgaggggaaggtgactcaggtctaccgtcgaaagtgggtgattcacattgag

SEQ ID NO: 127977 - DNA, 266 bp, Glycine max
caaaaacacagttggaggaaccattctgcgtagtgatctattggcaaattttctgacagagggcaattttagagcaagtgttgatttgcagcgcactcatcgtattaaaggaatgattaaaatggtggccacagttggtatcctgagaatacaggtatagcattggcttgtgctatgaatagttcttttagggggcgtgccagttctgatatttacaccatctgctctcaagactgtgaattatggaatcctgcttgcacaaaagc

SEQ ID NO: 127978 - DNA, 252 bp, Glycine max
gtgcggtggtgaagaagcgttcggaatagaagaagaagatgtcgtcggtttacgttctagagcctccgacgaaggggaaggtggtggtgaacactacgcgcggtcctttggacattgagctgtggccgaaagaggctccgaggccgcgaggaacttcgttcagctctgcctcgaaaactattacgacaacaccatcttccaccgcatcatcaaggacttcctcgtccatagctgcgagcccaccggcaccgg

SEQ ID NO: 127979 - DNA, 176 bp, Glycine max
cgtgttcctacattggttggcattgaatgtcccaaggatgagaaacttcctcgtcgctaaatttttgacaaacctaagacgcgctgctatcatattctccctatagagattaatctagtagaccgtcataagctcaagagaacttgaagcagatgtctaatgttagggacgagctt

SEQ ID NO: 127980 - DNA, 119 bp, Glycine max
gtgcaggggaaaatcatgtagttcaaatacccctaatggcacaggaggaaattctgtcttctagtgcaagtgctttcagaactgcaatggtgagtaaaaatagcaagcctcaagctact

SEQ ID NO: 127981 - DNA, 123 bp, Glycine max
ggttgccgcaccttaaaaccggaaacaaaagcaatcgttacttgatttcaagaatctctcaatttcttcctacttctttgtgtacggtttcttaagggaaagaaaatcactctctgtgctggc

SEQ ID NO: 127982 - DNA, 184 bp, Glycine max
tgtttaagcttttcttccattaacatattatcacaatgtgtggtattcttgctgttcttggttgttctgatgactctcgagccaaaagggtccgcgtgcttgagctctctcgcagattgaagcaccgtggccctgactgagtgggctccatcaacatggtgactgctttttggcacatcaacgg

SEQ ID NO: 127983 - DNA, 240 bp, Glycine max
ctgccagtagtcatatgcttgtctcaaagattaagccatgcatgtgtaagtatgaactaattcagactgtgaaactgcgaatggctcattaaatcagttatagtttgtttgatggtatctactactcggataaccgtataattctagagctaatacgtgcaacaaaccccgacttctggaagggatgcatttattagataaaaggtcaacacaggctctgcctgttgctttgatgattca

SEQ ID NO: 127984 - DNA, 265 bp, Glycine max
cctgccagtagtcatatgcttgtctcaaagattaagccatgcatgtgtaagtatgaactaattcagactgtgaaactgcgaatggctcattaaatcagttatagtttgtttgatggtatctactactcggataaccgtataattctagagctaatacgtgcaacaaaccccgacttctggaagggatgcatttattagataaaaggtcaacacaggctctgcctgttgctttgatgattcatgataactcgtcggatcgcacggc

SEQ ID NO: 127985 - DNA, 251 bp, Glycine max
ccgattgctagaatggaatttcgatgctcagtcatctcttttaccattctcttctctcttgctcttgcaggagagagccatgtccatgcatcgctacctgaggaagattattgggaagctgtttggccaaacactcccttcccactgaactgcgaaacgttctaaagcctctccctgcaggtgttgaaatcgatgaactccctaagcaaattgatgatacacagtacccaaaaacattcttctataaagaa

SEQ ID NO: 127986 - DNA, 160 bp, Glycine max
gaaattttgataaaccgcgatcacaggttgccgcaccttaaaaccggaaacaaaagcaatcgttacttgatttcaagaatctctcaatttcttcctacttctttgtgtacgatttcttaagggaaagaaaatcactcctgtgctggccacagacttcgtg

SEQ ID NO: 127987 - DNA, 169 bp, Glycine max
gttcaaatacccctaatggcacaggaggaaattctgtcttctagtgcaagtgatttcagaactgcaatggtgagtaaaaatagcaagcctcaagctactgcaatgcatgtgggagctatagaaattatcattgatatttcgcaagtcctgactgcaacttagttggtgc

SEQ ID NO: 127988 - DNA, 262 bp, Glycine max
  unsure (1)..(262): unsure at all n locations
gccccaggggcccacctcgctttgacggagagaggagattcggtggtgaccgtgatggataccgtggaggtccacgcggacctggtggtgatttcggtgacaagggtggagctcctgctgactacaggccttcttttnggggtggtcctggtggaaggcctggttttggtcgtggttccggtggttatggtgcaccaactagttcaaacattccttaaatataatgttatgtgctctaatttttgcagttttggctgtcatt

SEQ ID NO: 127989 - DNA, 237 bp, Glycine max
ataacttcttgcaaggttatgagagacccaaatggcataagtcgtggatcaggatttgttgcattctcaactcctgatgaggcatctagagcactcttggagatgaatggcaaaatggtggtaagcaaacctctgtatgtactctagcccaacggaaagaagataggagagctagactgcgagctcagtttgctcaaatgcgacctgttggaccgccaccatctgtcgctcctggtg

SEQ ID NO: 127990 - DNA, 117 bp, Glycine max
ctcgagcgaatcggctcgaggaaattttgataaaccgcgatcacaggttgccgcaccttaaaaccggaaacaaaagcaatcgttacttgatttcaagaatctctcaatttcttccta

SEQ ID NO: 127991 - DNA, 236 bp, Glycine max
cagagactttcagtactccagtgttaactgttttggtgtttgcatctgtggcaatattcccaaccctacttttgccatctacaccttccatgtgggtggctggaatgacatttggttatggctttgggttcttgtaattatatctgcagcagctattggtgtatcactcccttttgtcatcggcaaactcttccaccatatgattggaggctggctagatccgtataaagcttcta

SEQ ID NO: 127992 - DNA, 263 bp, Glycine max
tggtgattttgttcaaggaaaagatctcgcaatggttaaagttaatgtagcatgtgctgctgttggcttgacatcaagttacactccaactccattgttggaatctggtttgcaaaaagacagagggttaattgtgagtattttggaaggatgtcttacgttgctcacaacgttaatcatgcccaagagatagatttgttggagggaaatttttcctttgatattaaatctcgctctagattggaaaaagtatcctctacaaa

SEQ ID NO: 127993 - DNA, 261 bp, Glycine max
gtgaagttgagggagatgaaacctggcatgctatcacaggaattgaaagaagctcttggtatgcctgaaggtgctcctcctccttggcttattaatatgcagagatatggtcctccaccatcatatcctcatctgagatccctggactgaatgctccaatcccccctggagctagctttggttatcatcctggtggatgggggaagcctcctgttgatgaatatgggcgtccactgtatggagatgtttttggtgttcaac

SEQ ID NO: 127994 - DNA, 262 bp, Glycine max
ctcgagccgcttcttctctgtggaggttgatagtcaagagggagttgctcacattggtgcattgaaatctggtgtctatgttccactgcctacaaaaactaatttggtggaaactcccaaggaatggcaactggactaccttgtgacaaaattcctagtgtcttgactacaactgatgagagattggtaggcacagaacatgagggatatgatccttttcttggtggaattcaaaaatatgccactcccatgatgcccctag

SEQ ID NO: 127995 - DNA, 262 bp, Glycine max
caactacaaataagaggatgaaaaaaattgatactgagatacgagcattacttaaaggtgtcatcaacaaacgagagaatgcaatgaaggctggtgaagtcttgaacaatgacttgttgggcatgcttttggaacaaaccgtatggaaatacaagatcatggaaagaataacattattgcaatgactagcctagaggtaattgaggaatgcaatgcattctacatagcaggacaagaaaccacatcggttttactagtttgg

SEQ ID NO: 127996 - DNA, 244 bp, Glycine max
ctttctatagggggaggagctggtgcaaagaatgctattctcatgaatatgccaaatgctgttctttcaatgtggagatattttgttggagatctcgtctttgaagtttctaagatgacttctccctacattaatgtacagtctctttcttcatagcatttggaaatttgactgatgacaccatcaattttgaggcttttcccacaagctggtgcaatttggagagattcaggaaaaagttgta

SEQ ID NO: 127997 - DNA, 260 bp, Glycine max
gtcacaacttcattatgtttcatgtaataatctggaaatgcaagaagcttatcttgtcaatctcgtaaatgtgttacgagaattgtatttgcacagtccagaggaagctcgccaattgagaaggaaagctctcttcgtattgaatggctgcaaaaagctgatgtgtatatcatagcgcttgttgattcattcgatgacgagtgatgatctccgaatcaacctgattcaaatgataatatcgatctactgttgagcattga

SEQ ID NO: 127998 - DNA, 247 bp, Glycine max
aaacctaagacgcgctgcttcactattctccctatggagtttaatcttgtggtccgtcaaaagtttttaaattttgtgaggttcattatgaagaaaagggacaagcttagttgtcaagttggaatcaacccatactccatggaatggactggtttggccaatagattactgagtaagggcaacgatattctgtgttgcgattatgctagtatggatggtttcactaccaagtaagatataagcagga

SEQ ID NO: 127999 - DNA, 170 bp, Glycine max
ctcgagcgaatcggctcgaggctggtacagtttggagagatacaggaaaaagttgtattgaaattttcacaagaggaatttcttacagcttggtcaacccaggtgcgtcctgcaacaactctgttggctgagggtgtccatatttgtatgctatggtgcatgatagttca

SEQ ID NO: 128000 - DNA, 225 bp, Glycine max
gggcgtgccagttctgatatttacaccatctgctctcaagactgtgaattatggaatcctgcttgcacaaaagcaatgactatgtcatttaatccaaacccgtgttctgatgcatggagtttggaatttttgagcgtaccggatttcactgtgatatcatttgtgtcactggatggactgccaccccaatgcaggatgttcaggttacaattgattagttcatct

SEQ ID NO: 128001 - DNA, 190 bp, Glycine max
gttttagatcgtaaaaactaatcactacgaaaacaagagatatcgaagatggctctgcccaaagctaaggagatcgtgtcgtccaattccgtcgtcgttttcagcaaaacctattgccctttctgcgtcgattgaagaagctcttcggtgacctcggtgccatttacaaggccatcgaactcgacactga

SEQ ID NO: 128002 - DNA, 204 bp, Glycine max
cgcgctgcttcactattctccctatggagtttaatcttgtggttcgtcagaagtttttaaattttgtgaggttcattatgaagaaaagggacaagcttagttgtcaagttggaatcaacccatactccatgaatggactggtttggccaatagattactgagtaagggcaacgatattctgtgtagcgaatatgctagtgttga

SEQ ID NO: 128003 - DNA, 206 bp, Glycine max
cttttaagcgcaggaatggaggtcgcaacaaacacggccgtggacacgtcaagttcattcgatgctccaactgcggcaaatgctgtcctaaggacaaggctatcaagaggtttctggtgaggaacattgttaacaggctgcagtcagagatgttcaggaggcttgtgtctatgaacaatacacgcttccgaatctttatgtaaaga

SEQ ID NO: 128004 - DNA, 258 bp, Glycine max
cggctcgagctcgagcgaatcggctcgagtaagagattggtccataattaatcaaaatgttacctatattccacaaagcttttgctcatccacctgaagagctcaacagccctgcatcttacaaaggttcaagaagcctaaggttcccgaggaaactctcaaagatttcctttcccaccatcctcacaacacttgctctatgagctttggtgatgctgctgttctagcttatgtccgtcctgatcaatctttctctcg

SEQ ID NO: 128005 - DNA, 258 bp, Glycine max
ctcaacttctgctcttccaactcctacaacgcttttctctgcactcatgggcaaggtcaagatcggaatcaacggatttggaagaattggccgtttggttgccagagtcgctctgcaaagagacgatgttaactcgttgccgttaacgaccctttcattaccaccgattacatgacatacatgtttaaatacgacagtgttcacggacactggaagcatcacgatgtcaccgttaaggacgagaagacccttctcttc

SEQ ID NO: 128006 - DNA, 179 bp, Glycine max
ccaggtgattttgtcattggtgttaagttgacaaccataaacaatatgtgtgcatatgggctcaatcctggtatttcaggttctcgtcttttgggcaccattcctcagtccatttcacagcaaactgtttgaatcaaatggcaacagtgagaacaccattgaattttgattccagcaag

SEQ ID NO: 128007 - DNA, 243 bp, Glycine max
gaaggatgtcttacgttgctcataacgttaatcagccccaagagaaagatttgttggagggaaatttttcctttgatattaaatctcgctctagattggaaaaagtttcctctacaaaagcacaatttgtagtggaaaaactttcaaatatgatataattggtgctggttcacatccttagagaattttcttctaagagaggcgatcaagcccaccccaaaatgattgatgccagattgagac

SEQ ID NO: 128008 - DNA, 255 bp, Glycine max
aatcactctctgtgctggccacagacttcgtgaatcattttcttttccactcatcatacgtgctttcgacactctcctatgctgtataggacttcgtgtcagatttaaatttcttctgtctctgtctcagtctctgtttaatttcaagttcaagctggtgaaatcttggtttagtgttcccactctcctatctggtataggacttcgtgggtagacttttctatttctctcctttcttacactctcttcttctca

SEQ ID NO: 128009 - DNA, 258 bp, Glycine max
cgcaatgtgccaataaagcgcagagcatgggttgaaggccagatgtctttcgatcagtctgtagtagcaattatgtctaaatgcaaagccagcatgagaatgggaaacactgatgctcaaattttgatggtccagggcgcagattcatagctcatggacatttttccaaaaatctgctccggaaattcgcagtcccattgtgacatctgtaaagagttactgggcatatgtatgatcctgacaagtttcagatgtttg

SEQ ID NO: 128010 - DNA, 242 bp, Glycine max
ggatggggaaactgactttcccccagggcacttcccgaagtgttaagagaatgcctctttctatagggggaggagctggtgcaaagaatgctattctcatgaatatgccaaatgctgttctttcaatgggagatattttgttggagatctcgtctttgaagtttctaagatgacttctccctacattaaatgtacagtctctttcttcatagcatttggaaatttggctgatgacactatca

SEQ ID NO: 128011 - DNA, 244 bp, Glycine max
ctcgagccgttggatctgatctgctgaaacacgccacactcttcttaccatgggcctcctacgatcacttgtgggatgacaccgtcgccggtcctcgcccggagaacggccttggcaagctccgaaagcccacaccttcgctttccgatctgcctccggcaaggaatcagacagcggaagcgtgaaatcgtacggtgaagatttgccggaggatgcggtgagagtgacgcgaattatcatgatc

SEQ ID NO: 128012 - DNA, 252 bp, Glycine max
agaagatggtgtcaggttctggaatctgcgcaaagcgagtggtggtggacgctcgccaccacatgttgggtcggctagcgtccatcgtggcgaaagagcttctgaatgggcagaaggttgcggtggtcgctgcgaagagatttgcatctccggcggtctggtgaggcagaagatgaaatacgtgagattcctccgcaaacgcatgaacaccaaaccctcccatggccctatccatttcggcgcccaagcaaa

SEQ ID NO: 128013 - DNA, 254 bp, Glycine max
gcaaactgtttggaatcaaatggcaacagtgagaacaccattgaattttgattccagcaagcagagtttttgtcaattttctattgaccttctcggtggaggaattttagtggacaaaactggagattgatcacacttatacaaaattctccaattagtaacttgttgagagttgctgcttggaagaaaggctgtttaatggttaagattgtgatgtctgggaatgcagcagtcaaaaggagtgattgggcctc

SEQ ID NO: 128014 - DNA, 255 bp, Glycine max
gtgatatcatttgtgtcactggatggactgctaccccaatgcaggatgttcaggttacaattgattggtttatttcctctcaggaatgtgttcccaggacctattgtgttttaaatccacaaaatcctttgtgttaaataggtggatggggaaattgactttcccccagggcacttcccgaagtgttaaaagaatgcctctttctatagggggaggagctggtgcaaagaatgctattctcatgaatatgccaaa

SEQ ID NO: 128015 - DNA, 154 bp, Glycine max
ccgcgatcacaggttgccgcaccttaaaaccggaaacaaaagcaatcgttacttgatttcaagaatctctcaatttcttcctacttctttgtgtacgttttcttaagggaaagaaaatcactctctgtctggccacagacttcgtgaatcattt

SEQ ID NO: 128016 - DNA, 239 bp, Glycine max
cttactttagtggttctaaattgaaaagctttctagctggtcataatatcaccattactgatggtattgacaaaactagtgcaactttgcaatttagaaagttagcagattgtgattttctcaagagaactttaagcagatgtctaatgttttgtgggtggctcctgaggataaggcgagtttatggtcacaacttcattatgtttcgtgtaataatctggaaatgcaagaagctgatc

SEQ ID NO: 128017 - DNA, 214 bp, Glycine max
gttggaggaaccattctgcgtagtgatctattggcaaattttttgacagagggcaattttagagcaagtgttgatttgcagcgcactcatcgtattaaaggaatgattaaaatggtggccacagttgtattcctgagaatacaggtatagcattggcctgtgctatgaatagttcttttagggggcgtgccagttctgatatttacaccatctg

SEQ ID NO: 128018 - DNA, 252 bp, Glycine max
atttgttgataactagaacagacaaggttcgtgcccttcgtgaagcattttaccggcaaaaccttcccaatgtgacaaatctgcttgctaccatcttgatcttcctaattgtgatatacttccaaggattcgtgtggttttgcctgtgagatcaaagaatgcccgtggacagcaggggtcttatccaatcaagttattttatacctccaacatgcccattattcttcagtctgcccttgtttccaatctcta

SEQ ID NO: 128019 - DNA, 133 bp, Glycine max
ccagctaccaaagccgccactaatttgcgcctcacacactctctccgcttctctcctaaacccaacaacctacgctttgccaccaagcctggtaatacgctgttatgcacgagggttaaggcccaattaaatg

SEQ ID NO: 128020 - DNA, 293 bp, Glycine max
agattcggctcgcgggattccggtcttctagtgcaagtgatttcagaactgcaatggtgagtaaaaatagcaagcctcaagctactgcaatgcatgtgggagctatagaaattatcattgatagtttcgcaagtgctgactgcaacatagttggtgcaatgctttgggttgatacttatcataccactcctgaaaatgcagttcgtagtatttcggttgcgcctttcagaggcggaacgcccattcgggtggttacatttccgtgtaccattgtgcagattgaaccagacatg

SEQ ID NO: 128021 - DNA, 275 bp, Glycine max
gtttttacaatccttcaaaaattttgtttctttgtgtgtgtatggtgatgataacttaattagtgttcatgaatatgtcaagccttactttagtggttctaaattgaaaagctttctagctggtcataatatcaccattactgatggtattgacaaaactagtgcaactttgcaatttagaaagttagcagattgtgattttctcaagagaaactttaagcagatgtctaatgttttgtgggtggctcctgaggataaggcgagtttatggtcac

SEQ ID NO: 128022 - DNA, 274 bp, Glycine max
gcttggaagaaaggctgtttaatggttaagattgtgatgtctgggaatgcagcagtcaaaaggagtgattgggcctcattggtacaagtgtttttaacaaacagcaacagtacagagcattttgatgcatgtaagtggacaaaatcggaaccacattcctgggaattgatcttcccaatagaggtatgtggtcctaataatggttttgaaatgtggagttctgagtgggcaaatcaaacttcatggcatttgagtttccttattgacaatccca

SEQ ID NO: 128023 - DNA, 275 bp, Glycine max
cttttgcttccttaacctattttgttatcctcaattttcaatggctcaatcccattctggaaaaacctcttccatgacttcaatactcctcctgtttatgcttcttatcagtaatacaggcacaacaggtgcacaatctggtgtatgctatggaagagttggcaacaatctgccatcgccacaagaagtagtttccctttttaaacagtacggcttccaaaggatgagaatctatgatcgaaaccatgaagtcctccaagctctgagagattcca

SEQ ID NO: 128024 - DNA, 275 bp, Glycine max
acttaattagtgttcatgaatatgtcaagccttactttagtggttctaaattgaaaagctttctagctggtcataatatcaccattactgatggtattgacaaaactagtgcaactttgcaatttagaaagttagcagattgtgattttctcaagagaaactttaagcagatgtctaatgttttgtgggtggctcctgaggataaggcgagtttatggtcacaacttcattatgttgcgtgtaataatctggaaatgcaagaagcttatcttgtc

SEQ ID NO: 128025 - DNA, 282 bp, Glycine max
ggatggactgccactccaatgcaggatgttcaggttacaattgattggtttatttcctctcaggaatgtgttcccaggacttattgtgttttaaatccacaaaatccttttgtgttgaataggtggatggggaaactgactttcccccagggcacttcccgaagtgttaagagaatgcctctttctatagggggaggagctggtgcaaagaatgctattctcatgaatatgccaaatgctgttctttcaatgtggagatattttgttggagatctcgtcttt

SEQ ID NO: 128026 - DNA, 276 bp, Glycine max
ctgttccagaagtgctttcacgcaaaaatggtgaaaaaggcaaaaggagatttgtttctggggatggtgaagagatgacattgattccgggaaccagtgttgaagaggcttacaataagctaatagttgaacttgagaaaagtgttcctacattggttggcattgaatgtcccaaggatgagaaacttcctcgtcgcaaaatttttgacaaacctaagacgcgctgcttcactattctccttatggagtttaatcttgtggttcgtcagaagtttt

SEQ ID NO: 128027 - DNA, 235 bp, Glycine max
  unsure (1)..(235): unsure at all n locations
cgcgagnagctcgagcggaatcggctgagctcgagtgaatcagggtcgagatactgcagaagactgactgatggtccatcaaataaggactgcgttggtggaagagctgcttacttcaatattattcccaacatgactggagctgctaagggcgtaggaaaagttcttccaagtatgaatggtaaattgactggcatgtccgtacgagtagccaatgtagatgtttcagttgttg

SEQ ID NO: 128028 - DNA, 269 bp, Glycine max
taggttcctttcattgtacttttcactcagagagatacatataatagaaatagaaacacttttttgagaagcacttcgtttcattgtcatcatcatcatcatcattcagagagtgcatagaatgagttcttcttctggtcagagcagtggctatgatctttccttcaagatcttgttgatcggtgactctgctgtgggaaaaagtagcctccttgttagcttcatctccaactctgctgaagatattgctcccacaattggtgttgatt

SEQ ID NO: 128029 - DNA, 269 bp, Glycine max
ctaatatactatacaaaaagttcttatcagtgacagagtaaaggaggcataccgatgacgatggcgatgacggcgtcgcagttgcggtgcggttgggggtggaggccaacgccgaatcagcagcagcaacgacgtcgtatggttccggtggtgtgttccatcgctatagagaacgcgaagaacaaagagagagcgaaactgaagaagctcttcgatgaagcgtacgagaggtgccgcactgctcccaccgaaggcgtttccttcactct

SEQ ID NO: 128030 - DNA, 269 bp, Glycine max
tatttacaccatctgctctcaagactgtgaattatggaatcctgcttgcacaaaagcaatgactatgtcatttaatccaaacccgtgttctgatgcatggagtttggaatttttgaagcgtaccggatttcactgtgatatcatttgtgtcactggatggactgccaccccaatgcaggatgttcaggttacaattgattggtttatttcctctcaggaatgtgttcccaggacttattgtgttttaaatccacaaaatccttttgtgt

SEQ ID NO: 128031 - DNA, 270 bp, Glycine max
tgcaaattggatactgttactggtcaatattatcctgagtgggctccaatcaattgtcgagttcatcgacaaccaattcacatcactgaaggaaattatgtcagaaagcaagatgtcagcattgaatatgatgcatgtacaattccaaatgattgtggttcattggttgttgccaaggttggaaatcataaacaaattgttggtttccatgttgctggaagcaaaggaagactgggatatgcttcattgataccatatgttgagccagtt

SEQ ID NO: 128032 - DNA, 272 bp, Glycine max
ctcatttcaggttagtaatcaggaagcagtagatactgctcgttcttttctcgtaggcaacaacaaatcacaaccattgctgctggcttgtaaaaagcttgtagatttgtctgtttcacgaggctctttggatgacacaagtgttatgctaatcaaattggagcactatatttaaagttaccttagtacaacagaagtggaggtagtgcataaggttttagattattgcagttgagatcgcattgaggttaagattgcgttgcagtttgcga

SEQ ID NO: 128033 - DNA, 275 bp, Glycine max
tggcaactggatctaccttgtgacaaaattcctagtgtcttgactacaactgatgaaagattggtaggcacagaacatgagggatatgatccttttcttggtggaattcaaaaatatgccactcccatgatgcccctagatgaagaaattctttctaaggttgcacaagatatggttgaggaatggtttgattgtgttgatgaggaggattcctttgaggaagtttctttaagtgcagcactcaatggtgttgagggtttggactatatggaaag

SEQ ID NO: 128034 - DNA, 278 bp, Glycine max
ctaatttggtggaaactcccaaggaatggcaactggatctaccttgtgacaaaattcctagtgtcttgactacaactgatgagagattggtaggcacagaacatgagggatatgatccttttcttggtggaattcaaaaatatgccactcccatgatgcccctagatgaagacattctttctaaggctgcacaagatatggctgatgaatggtttgattgtgttgatgaggaggcttcctttgaggaagtttctttaagtgcagcactcaatggtgtt

SEQ ID NO: 128035 - DNA, 279 bp, Glycine max
caaaattctccaattagtaacttgttgagagttgctgcttggaagaaaggctgtttaatggttaaaattgtgatgtctgggaatgcagcagtcaaaaggagtgattgcgcctcattggtacaagtgtttttaacaaacagcaacagtacagagcatttcgatgcatgtaagtggacaaaatcggaaccacattcctgggaattgatcttcccaatagaggtatgtggtcctaataatggttttgaaatgtggagttctgagtgggcaaatcaaacttca

SEQ ID NO: 128036 - DNA, 184 bp, Glycine max
atcaattttctacaatggcagaacaaggaaaagcccgttcctttaccagtgccttctcttttttgttagtctttaactcatctgtcatgtcaattccattgtttttgaaacctttccatcccccaccttgaaacaaaagtataatttgtctcatgtagttttaagacactcgattaggctgagc

SEQ ID NO: 128037 - DNA, 273 bp, Glycine max
ctcgagcgattcggctcgagggatttggcaaaatgtcttaagctgttttcttgtccacatagaaagcaacaagacaagacagaaaagttttggttctgtggaatttgagtgcaagacgtgcaaccgcaagttctcttcttttcaagcactgggagggcacagggcaagccacaagaggcagaagctggagggggaagaactgaaagaacaggccaaaagtcttagcttgtggaacaaacccaaaatgcacgagtgctccatttgtggccttga

SEQ ID NO: 128038 - DNA, 271 bp, Glycine max
agcaagtgttgatttgcagcgcactcatcgtatcaaaggaatgattaaaatggtggccacagttggtattcctgagaatacaggtatagcattggcctgtgctatgaatagttcttttagggggcgtgccagttctgatatttacaccatctgctctcaagactgtgaattatggaatcctgcttgcacaaaagcaatgactatgtcatttaatccaaacccgtgttctgatgcatggagtttggaatttttgaagcgtaccggatttcac

SEQ ID NO: 128039 - DNA, 270 bp, Glycine max
tgttgccaaggttggaaatcacaaacaaattgttggtttccatgttgctggaagcaaaggaagactgggatatgcttcattgataccatatgttgagccagttgtgcaagctcaaagtgctgaagtttacttcgacttcttccctgtggaggttgatagtcaagagggagttgctcacattggtgaattgaaatctggtgtctatgttccactgcctacaaaaactaatttggtggaaactcccaaggaatggcaactggatctaccttg

SEQ ID NO: 128040 - DNA, 268 bp, Glycine max
tcgaagcctctttctctctcttctagaagctatctgtgtttggtgttactaagtctccaacaagcaaagtacatggttgatttggaaatccaggtccccaccccattcgacccgtttgccgaggcgagagaatcggatgcccccggagcaaaggagtatgtgcatattcgaattcagcagaggaatgggaagaagagtctgaccacagtgcaagggctgaagaaggagttcagctacgagaagatcctcaaggacctcaagaaggagt

SEQ ID NO: 128041 - DNA, 269 bp, Glycine max
gcttgttgttcaaggatggcaatttgtaagaaagatgtttggagagttgaatgtggaatcccttctggatttccgctcacagttatttgccatagcatttttaatgagatgctcattagatatagctatgaaaaattactgcgccaggctaaagctccaagtatgtttttacaatccttcaaaaattttgtttctttgtgtgtgtatggtgatgataacttaattagtgttcatgaatatgtcaagccttactttagtggttctaaatt

SEQ ID NO: 128042 - DNA, 269 bp, Glycine max
ggaaactcttttcctttcttagagatgctggtaatgggggagtttttgttggtaatgttgcttcagcattcacaacttcaagtgtgcttgaggcccaaagtagaaagcccaacagatatgaagtttcccaatacagatatcgcaatgtgccaataaagcgcagagcatgggttgaaggccagatgtctttcgatcagtctgtagtagcaattatgtctaaatgcaaagccagcatgagaatgggaaacactgatgctcaaattttgatg

SEQ ID NO: 128043 - DNA, 267 bp, Glycine max
gaaaatttctaccgcattacattaggtggcatctgtataccttgttgatctacattctcccatcttttctcactgctgaaattaaatataagcggaatttgagtaatattcatatttccggcttattttacgacggcagatacaaattctggactaaacacgagaaaaatcttgctttgacagaagaggaaaagatggaggtgattagaaatagaggcattcctgctgatgttcttgcaaagcgagctcatgaatttgaaaaacatg

SEQ ID NO: 128044 - DNA, 270 bp, Glycine max
gagtttttgtcaattttctattgaccttctcggtggaggaattttagtggacaaaactggagattggatcacacttatacaaaattctccaagctgcaactctcaacaagttactaattggagaattttgtataagtgtgatccaattagtaacttgttgagagttgctgcttggaagaaaggctgtttaatggttaagattgtgatgtctgggaatgcagcagtcaaaaggagtgattgggcctcattggtacaagtatttttaacaaa

SEQ ID NO: 128045 - DNA, 260 bp, Glycine max
ataatgactaacgcctacgaatctcagctcacgcttctcctaatcgacgactctaccgtgcgatcatcctgcatgctgctcagacgcgcggatgactcctacgtcgtcagctacctgagtaccagtcgcgatgctgtgcggtatcagcaccgtgcagctcgaacgcaagcccgtcgagctgcagatcagggataccactagacaggagcgagtcaggactatggcatgcagtaactacagcggcactcatggaattatta

SEQ ID NO: 128046 - DNA, 270 bp, Glycine max
gcaacagtgagaacaccattgaattttgattctagcaagcagagcttttgtcaattttctattgaccttctcggtggaggaattttagtggacaaaactggagattggatcacacttatacaaaattctccaattagtaacttgttgagagttgctgcttggaagaaaggctgtttaatggttaagattgtgatgtctgggaatgcagcagtcaaaaggagtgattgggcctcattggtacaagtgtttttaacaaacagcaacagtaca

SEQ ID NO: 128047 - DNA, 265 bp, Glycine max
  unsure (1)..(265): unsure at all n locations
gaaagatttgttggaaggaaatttttcctttgatattaaatctcgctctagattggaaaaagtttcctctacaaaagcacaatttcttagtggaaaaaccttcaaatatgatatagttggtgctggttcacattcttcagaagatttttctgaaaaggaagatcaagaaaaacccaaaaagattgatgccagattgacancaagaatagatcctcaatacaatgaggttcaggctcagatgganacaaatttgtttaaattgtct

SEQ ID NO: 128048 - DNA, 273 bp, Glycine max
tgaattttgattctagcaagcagagcttttgtcaattttctattgaccttctcggtggaggaattttagtggacaaaactggagattggatcacacttatacaaaattctccaattagtaacttgttgagagttgctgcttggaagaaaggctgtttaatggttaagattgtgatgtctgggaatgcagcagtcaaaaggagtgattgggcctcattggtacaagtgtttttaacaaacagcaacagtacagagcattttgatgcatgtaagt

SEQ ID NO: 128049 - DNA, 118 bp, Glycine max
ggaaaaagtttcctctacaaaagcacaatttgttagtggaaaaaccttcaaatatgatataattggtgctggttcacattcttcagaagattttcctgataaggaagatcaagaaaaa

SEQ ID NO: 128050 - DNA, 274 bp, Glycine max
cgttgccatgctctttcagctcccggccctctttgaaggcagcgttgcggacaatgtgaggtacggaccacaactcagagggaaaaagctaagcgatgatgaggtgcgcaagttgcttctaatggccgacctggatgcttctttcatggataagtccggggctaaactctctgtcggtcaagctcaaagagttgcacttgctaggactttagctaattcaccccaggttttgttgctggatgagccaactagtgccttagatccaatatcgaca

SEQ ID NO: 128051 - DNA, 268 bp, Glycine max
gctactgcaatgcatgttggagctatagaaattatcattgatagtttcgcaagtcctgactgcaacatagttggtgcaatgcttttggttgatacttatcataccaatcctgaaaatgcagttcgtagtatttttgttgcacctttcagaggtggaaggcccattcgggtggttacatttccgaataccattgtgcagattgaaccagacatgaattcaaggtttcagcttttgagtaccactaccaatggtgattttgttcaaggaa

SEQ ID NO: 128052 - DNA, 268 bp, Glycine max
gtggattcttggttaccaatttttgtgaattgtctttatcctgtaagtcaattaccttcagaagctgtcgttgtaaatgttacatgtggtagtggacgtggtggtttacccaccactgcttggattagttctgcagttaacaatcgctcctcagatatcaacaaaaggattcgcacagcacttgggagaggtaagaaaattgtttttcttactagagttgatccttttccagtagctttactggctgttctttttggcgttaagaatg

SEQ ID NO: 128053 - DNA, 261 bp, Glycine max
caaattgttacatctgaaaagagttactggcatgtatatgatcctgacaagtttcagatgtttgacaacagtgaaataggtctttattctaatcccactttggaagatatcccacattgagcttgggaccttttttgctgggacagtgagaaaactttgccaaataatttttctgcagaattgctctcttgcaaattggatactgttactggccaatattatcctgagtgggctccaattaattgtcgagttcatcgacaa

SEQ ID NO: 128054 - DNA, 264 bp, Glycine max
gagtttttgtcaattttctattgaccttctcggtggaggaattttagtggacaaaactggagattggatcacacttatacaaaattctccaagctgcaactctcaacaagttactaattggagaattttgtataagtgtgatccaattagtaacttgttgagagttgctgcttggaagaaaggctgtttaatggttaagattgtgatgtctgggaatgcagcagtcaaaaggagtgattgggcctcattggtacaagtattttt

SEQ ID NO: 128055 - DNA, 264 bp, Glycine max
tgggtgtccatatttgtatgctatggtgcatgatagttcagtgtctacaataccaggtgattttgtcattggtgttaagttgacaaccataaacaatatgtgtgcatatgggctcaatcctggtatttcaggttctcgtcttttgggcaccattcctcagtccatttcacagcaaactgtttggaatcaaatggcaacagtgagaacaccattgaattttgattctagcaagcagagcttttgtcaattttctattgaccttct

SEQ ID NO: 128056 - DNA, 266 bp, Glycine max
taaaccctagtctccatacatcaacttgggaggttaaagagacggcaacgttgtgctgtccgccttgaccgagccagagcttcgtcttggccctcgattttgccctgtaaaactaatcccagtcacaacagaaataatcaatggcaccgaaacagaccaaggctgagaagaagatcgcttacgatgcgaactgtgcgacctaatggaggagtacggccaaatcctcgttgtaaactccgacaacgtgggatcgaaccagctccaga

SEQ ID NO: 128057 - DNA, 275 bp, Glycine max
atatggaaagaattcctcttgccacatctgagggttttcctcacgtactttcacgcaaaaatggtgaccaaggcaaaaggagatttgtttctggggatggtgaagagatgacattgattccaggaaccagtgttgaagaggcttacaacaagctaatagttgaacttgagaaaagtgttcctacattggttggcattgagtgtcccaaggatgagaaacttcctcgtcgcaaaatttttgataaacctaagacgcgctgcttcactattctccct

SEQ ID NO: 128058 - DNA, 267 bp, Glycine max
  unsure (1)..(267): unsure at all n locations
gttactttgacttcttccctgtggaggttgatagtcaagagggagttgctcacattggtgaattgaaatctggtgtctatgttccactgcctacaaaaacgaatttggtggaaactcccaaggaatggcaactggatctacctcgtgacaaaattcctagtgtcttgactacaactgatgagagattggtaggcacagaacatgagggatatgatccttttcttggtggaattcanaaatatgccactcccatgatgcccctagatg

SEQ ID NO: 128059 - DNA, 309 bp, Glycine max
gtacgtacgctcagaatgctctgcattcggctcgtacggcacttcccgaagtgttctgagaatgcctctttctatagggggaggagctggtgcaaagaatgctattctcatgaatatgccaaatgctgttctttcaatgtggagatattttgttggagatctcgtctttgaagtttctaagatgacttctccctcacattaaatgtacagtctctttcttcatagcatttggacatttggctgatgacaccatcaattttgaggcttttccccacaagctggtgcagtttggagatattcaggaaaatg

SEQ ID NO: 128060 - DNA, 270 bp, Glycine max
aatgcttttggttgatacttatcataccaatcctgaaaatgcagttcgtagtatttttgttgcacctttcagaggtggaaggcccattcgggtggttacatttccgaataccattgtgcagattgaaccagacatgaattcaaggtttcagcttttgagtaccactaccaatggtgattttgttcaaggaaaagatctcgcaatggttaaagttaatgtagcatgtgctgctgttggcttgacatcaagttacactccaactccattgtt

SEQ ID NO: 128061 - DNA, 265 bp, Glycine max
gagaaataaggggaaaaaatggtgtcgctgaaactgcagaagcggctggccgcaagcgtgctcaagtgtggcagaggaaaggtgtggcttgaccccaatgaagtcaacgaaatctccatggccaattctcggcaaaacatcaggaagttggttaaggatgggtttatcatcaggaagccaaccaagattcactcacgctcgcgtgctcgtaggatgaaggaggcaaagaagaagggccggcactctggttatggtaagagaaagg

SEQ ID NO: 128062 - DNA, 264 bp, Glycine max
gtttgttgttgtaactcgttcttcttcttttgttgttctgtgtttgtgtttgttttttctctcacctgaaaatgtcttgctgcggtggtaactgtggttgcggaagctcctgcaagtgcggcaacggctgcggaggctgcaagatgtacccagacttgagctacactgagtcaaccaccaccgagaccttggtcatgggagtggcacctgttaaggctcaatttgagggtgctgaaatgggtgtgcccgctgagaacgatggct

SEQ ID NO: 128063 - DNA, 263 bp, Glycine max
gggcacttcccgaagtgttaagagaatgcctctttctatagggggaggagctggtgcaaagaatgctattctcatgaatatgccaaatgctgttctttcaatgtggagatattttgttggagatctcgtctttgaagtttctaagatgacttctccctacattaaatgtacagtctctttcttcatagcatttggaaatttggctgatgacaccatcaattttgaggcttttccccacaagctggtgcagtttggagagattc

SEQ ID NO: 128064 - DNA, 265 bp, Glycine max
cggctcgagggtgatgaaaaattgatgcgtgaaaggacacacctgctgttggcttgttgttcaaggatggcaatttgtaagaaagatgtttggagagttgaatgtggaatcccttctggatttccgctcacagttatttgcaatagcatttttaatgagatgctcattagatatagctatgaaaaattactgcgccaggctaaagctccaagtatgtttttacaatccgtcaaaaattttgtttctttgtgtgtgtatggtgatg

SEQ ID NO: 128065 - DNA, 264 bp, Glycine max
ggagtgttgaaaaccttgaggggaacggtggccctggaaccatcaagaagatcactttcgttgaggatggagaaagcaagtttgtgttgcacaaaatagaatcagttgatgaggcaaacttgggatacagctatagcgtagttggtggagttgggttgccagacacagtggagaagatcacattcgaatgcaaattggctgctggcgccaacggaggtctgctgggaagctaactgtcaaataccaaaccaaaggagatgctca

SEQ ID NO: 128066 - DNA, 174 bp, Glycine max
gaaattttgataaaccgcgatcacaggttgccgcaccttaaaaccggaaacaaaagcaatcgttacttgatttcaagaatctctcaatttcttcctacttctttgtgtacggtttcttaagggaaagaaaatcactctctgtgctggccacagacttcgtgaatcattttcttt

SEQ ID NO: 128067 - DNA, 249 bp, Glycine max
aagtttgcaaaaattatgaaccttagacaatgtgtttatggtgaatttcaacttcttacttattggaagttgtatgagggtaagcatattcctgtatctaatattagtgcaggggatattctctagttctataccctaattgcacggaggaaattctgtcttagtgcaatgattcagaactgcaattggagtaaatagcagcccaagctatgcaatgcattgggacataaaattacttgatattccaat

SEQ ID NO: 128068 - DNA, 265 bp, Glycine max
  unsure (1)..(265): unsure at all n locations
agcaacctcctccttcaacgtggacgaaccagaaccagaaccaaagggctccacttgacgtcaatgttgcttacgtggaagggcgggatgaggcggaaagaggagcttcaaatcaacctctgacacaggacttcttcatgtcctcggggaagcggaaacgtgatgaaattgcttctcaatataatgctggtggatatatacctcagcaagatggagctggagatgctgcttctcanatttttaanatngtggtttgtgggggctt

SEQ ID NO: 128069 - DNA, 262 bp, Glycine max
gttttgtgggtggctcctgaggacaaggcgagtttatggtcacaacttcattatgtttcatgtaataatctggaaatgcaagaagcttatcttgtcaatctcgtaaatgtgttacgagaattgtatttgcacagtccagaggaagctcgccaattgagaaggaaagctctctctcgtattgaatggctgcaaaaagctgatgtgcctaccatagcacagattgaagagttccattcgatgcagaggatgatgaatgctcctg

SEQ ID NO: 128070 - DNA, 265 bp, Glycine max
gaaaaacacttgggcgttggtgcaaatgtttgcttcgttaattttctctggagacaacaggctcactgagacaacaatttttaattgcagagatttggacatcttggttgtttattatacaatagcaactcaatttagaaaattcctaccgcattacattaggtggcacctgtataccttgttgatctacattctcccatcttttctcactgctgaaattaaatataagcggaatttgagtaatattcatatttccggcttgttt

SEQ ID NO: 128071 - DNA, 264 bp, Glycine max
atttcaaagctgggaaagaacattcaagtactttcaagttcctttgtcaataagcaagagcaatacactgtggaaggagtgcagaatcttggagacaaagcagtgatgtgtcatgggctaaatttcagaactgcagtattttactgccataaagtccgtgaaacaacagctttcatggttccattggtggctggtgatggaaccaaaactcaggcacttgctgtttgccactcagatacttctggaatgaatcatcacatgctt

SEQ ID NO: 128072 - DNA, 261 bp, Glycine max
  unsure (1)..(261): unsure at all n locations
gccagactgtgcatagcttccgtgtgtctttgggagtgtagctaagtagtaatttactttcatgggtgaatttcttgtggatgcaacagtgtttgaagataagaagatgggagagggtgctgctgcttccaatcctgctttgcaagtgtctgtttcgtttggtagatttgagaacgatttcttgtcttgggagagatggtcctctttctctccaaacaagtactntggaagaggtgagcagtgtgccacacctggatcagt

SEQ ID NO: 128073 - DNA, 259 bp, Glycine max
  unsure (1)..(259): unsure at all n locations
atcaagaaaaacccaaaaagattgataccagattgagacaaagaatagatcctcaatacaatgaggttcaggctcagatggaaacaaatttgtttaaattgtctcttgatgatgttgaaactcctaaaggttccatgttggatcttanaatttctcaatctanaattgcacttcccanaaacacagttggaggaaccattctgcgtagtgatctattggcaaattttttgacagagggcaattttagagcaagtgttga

SEQ ID NO: 128074 - DNA, 258 bp, Glycine max
  unsure (1)..(258): unsure at all n locations
aaaatggtggccacagttggtattcctgagaatacaggtatatcattggcctgtgctatgaatagttctttcagggggcgtgccagttctgatatttacaccatctgctctcaagactgtgaattatggaatcctgcttgcaccaaagccatgactatgtccattaatcccaacccggtgtctgatgcatggaggttgggatttctgaagcgtaccggatttcccatgtgatatcatntgtgtcactggatggactgc

SEQ ID NO: 128075 - DNA, 271 bp, Glycine max
gggatggtgaagagatgacattgattccgggaaccagtgttgaagaggcttacaacaagctaatagttgaacttgagaaaagtgttcctacattggttggcattgaatgtcccaaggatgagaaacttcctcgtcgcaaaatttttgacaaacctaagacgcgctgcttcactattctccctatggagtttaatcttgtggtccgtcaaaagtttttaaattttgtgaggttcattatgaagaaaagggacaagcttagttgtcaagttgg

SEQ ID NO: 128076 - DNA, 270 bp, Glycine max
ttttagagcaagtgttgatttgcagcgcactcatcgtattaaaggaatgattaaacatggtggccacagttggtattcctgagaatacaggtatagcattggcctgtgctatgaatagttcttttagggggcgtgccagttctgatatttacaccatctgctctcaagactgtgaattatggaatcctgcttgcacaaaagcaatgactatgtcatttaatccaaacccgtgttctgatgcatggagtttggaatttctgaagcgtaccg

SEQ ID NO: 128077 - DNA, 273 bp, Glycine max
gtgaaaaccgtcgacacgtatctcgccgagatcgccgcgtacgggaactctccatctcgaaattcaacggcatcgcaatcctcattcccaaaggctcgagaaaatccgacgacgatctataccgcgccgacgatatctacctcaaggtgcacccgaacctggacgagatagagaaggagaaagtgtgcagcgtattggacccgttaaaattgtcctacgaggcgcgtgtgcacgcgtcaaagaacaagcgcttgccgctgcagatcgtgcttc

SEQ ID NO: 128078 - DNA, 210 bp, Glycine max
gtttcgcaagtcctgactgcaacatagttggtgcaatgcttttggttgatacttatcataccaatcctgaaaatgcagttcgtagtatttttgttgcgcctttcagaggcggaaggcccattcgggtggttacatttccgaataccatcgtgcagattgaaccagacatgaatccaaggtttcagcttttgagtaccactacaaggggag

SEQ ID NO: 128079 - DNA, 267 bp, Glycine max
ctcaggaatgtgttcccaggacttattgtgttttaaatccacaaaatccttttgtgttaaataggtggatggggaaactgactttcccccagggcacttcccgaaatgttaagagaatgcctctttctatagggggaggagctggtgcaaagaatgctattctcatgaatatgccaaatgctgttctttcaatgtggagatattttgttggagatctcgtctttgaagtttctaagatgacttctccctacattaaatgtacagtct

SEQ ID NO: 128080 - DNA, 269 bp, Glycine max
taaatataagcggaatcagagtaatattcagatttccggcttattttacgacggcagatacaaattctggactaaacacgagaaaaatcttgctttgacagaagaggaaaagatggaagtgattagaaatagaggcattcctgctgatgttcttgcaaagcgagctcatgaatttgaaaaacatgttgctcatgaaagcctcaaggatcaaattcctgctgttgacaagttgtattctactaaggttaataagtttgcaaaaattatga

SEQ ID NO: 128081 - DNA, 266 bp, Glycine max
gcgatcacaggttgccgcaccttaaaaccggaaacaaaagcaatcgttacttgatttcaagaatcttccaatttcttcctacttctttgtgtacgatttcttaagggaaagaaaatcactctctgtgctggccacagacttcgtgaatcataaactttgccactctgagtgtatatgctggacactctcctatttgatataggacttcgtgtcagatttaaactactgctgtttctttctcagtcctctgcttaatttcaagttca

SEQ ID NO: 128082 - DNA, 269 bp, Glycine max
gaaaagctttctagctggtcataatatcaccattactgatggtattgacaaaactagtgcaactttgcaatttagaaagttagcagattgtgattttctcaagagaaactttaagcagatgtctaatgttttgtgggtggctcctgaggataaggcgagtttatggtcacaacttcattatgtttcgtgtaataatctggaaatgcaagaagcttatcttgtcaatctcgtaaatgtgttacgagaattgtatttgcacagtccagagg

SEQ ID NO: 128083 - DNA, 271 bp, Glycine max
tggaatcctgcttgcacaaaagcaatgaccatgtcatttaatccaaacccgtgttctgatgcatggagttatggaatttctgaagcgtaccggatttcattgtgatatcatttgtgtcactggatggactgctaccccaatgcaggatgttcaggttacaattgattggtttacttcctcccaggcatgtgttcccaggacctattgtgttttcaatccacaaaatccttttgtgttaaatacgtgcatggggaaattgactttcccccag

SEQ ID NO: 128084 - DNA, 267 bp, Glycine max
caaaatccttttgtgttgaataggtggatggggaaactgactttcccccagggcacttcccgaagtgttaagagaatgcctctttctatagggggaggagctggtgcaaagaatgctattctcatgaatatgccaaatgctgttctttcaatgtggagatattttgttggagatctcgtctttgaagtttctaagatgacttctccctacattaaatgtacagtctctttcttcatagcatttggaaatttggctgatgacaccatc

SEQ ID NO: 128085 - DNA, 268 bp, Glycine max
cttcaacctaacgcagcatcgctatactcttcattccatggctattgcccaatcagcaaaccgtggattaccctagtttcaaactcgttatcgtcggtgatggtggcacaggaaagacaacctttgtgaaaaggcatctcaccggagaattcgagaagaaatatgagccaaccatcggtgtggaggttcacccattggattttttcacaaactgtggaaagattcgattctactgctgggatactgctggacaggagaagtttggtgg

SEQ ID NO: 128086 - DNA, 267 bp, Glycine max
ctggtgcaaagaatgctattctcatgaatatgccaaatgctgttctttcaatgtggagatattttgttggagatctcgtctttgaagtttctaagatgacttctccctacattaaatgtacagtctctttcttcatagcatttggaaatttggctgatgacaccatcaattttgaggcttttccccacaagctggtgcagtttggagagattcaggacaaagttgtattgaaatgttcacaagcaggaattcttacagcttggtcaa

SEQ ID NO: 128087 - DNA, 192 bp, Glycine max
gtcttacgttgctcacaacgttaatcagccccaagagaaagatttgttggagggaaatttttcctttgatattaaatctcgcactagattggaaaaagtttcctctacaaaagcacaatttgttagtggaaaaaccttcaaatatgatataattggtgctggttcacattcttcagaagattttcctgaaaa

SEQ ID NO: 128088 - DNA, 189 bp, Glycine max
ctcgagccgctcgagccgctcgagccggcctcattggtacaagtgtttttaacaaacagcaacagtattgagcattttgatccatgtaagtggacaaaatcggaaccacattcctgggaattgatcttcccaatagaggtatgtggtcctaataatggttttgaaatgtggatttctgagtgggaaatt

SEQ ID NO: 128089 - DNA, 269 bp, Glycine max
tattagtgcaggggaaaatcatgtagttcaaatacccctaatggcacaggaggaaattctgtcttctagtgcaagtgatttcagaactgcaatggtgagtaaaaatagcaagcctcaagctactgcaatgcatgtgggagctatagaaattatcattgatagtttcgcaagtcctgactgcaacatagttggtgcaatgcttttggttgatacttatcataccaatcctgaaaatgcagttcgtagtatttttgttgcgcctttcagag

SEQ ID NO: 128090 - DNA, 268 bp, Glycine max
cttttagggggcgtgccagttctgatatttacaccatctgctctcaagactgtgaattatggaatcctgcttgcacaaaagcaatgaccatgtcatttaatccaaacccgtgttctgatgcatggagtttggaatttctgaagcgtaccggatttcattgtgatatcatttgtgtcactggatggactgctaccccaatgcaggatgttcaggttacaattgattggtttatttcctctcaggaatgtgttcccaggacctattgtgt

SEQ ID NO: 128091 - DNA, 266 bp, Glycine max
gtttctttgtgtgtgtatggtgatgataacttaattagtgttcatgaatatgtcaagccttactttagtggttctaaattgaaaagctttctagctggtcataatatcaccattactgatggtattgacaaaactagtgcaactttgcaatttagaaagttagcagattgcgattttctcaagagaaactttaagcagatgtctaatgttttgtgggtggctcctgaggacaaggcgagtttatggtcacaacttcattatgtttc

SEQ ID NO: 128092 - DNA, 254 bp, Glycine max
  unsure (1)..(254): unsure at all n locations
ttttgataaaccgcgatcacaggttgccgcaccttaaaaccggaaacaaaagcaatcgttacttgatttcaagaatctctcaatttcttcctacttctttgtgtacggtttcttaagggaaagaaaatcactctctgtgctggccacagacttcgtgaatcattttcttttcgcatcttagtntatcatgtgancactctcctatttgatataggacttcgtgtcagatttaaacttcttctggctctttctca

SEQ ID NO: 128093 - DNA, 264 bp, Glycine max
atggagtttaatcttgtggttcgtcagaagtttttaaattttgtgaggttcattatgaagaaaagggacaagcttagttgtcaagttggaatcaacccatactccatggaatggactggtttggccaatagattactgagtaagggcaacgatattctgtgttgcgattatgctagttttgatggtttgattaccgagcaagttatgagcaagatggcagaaatgataaacagtctttgtggtggtgatgaaaaattgatgcgt

SEQ ID NO: 128094 - DNA, 266 bp, Glycine max
tttcatttccttgccaacttagagagagagagagagagagatggcaattgggttcatggaggtgcagcttgtgaaagcaaagggtcttcaagaaacagatatctttgctcatatggacccgtatgtactgttacaatacaaaggtcaagagcgcaagagcagtgtaattcatgagggcggcagaaatcccatatggaatgagaaatttgtattcagagtggaataccctggatcaggtgatcaatacaagctcaaccttagaatca

SEQ ID NO: 128095 - DNA, 265 bp, Glycine max
ataaattgaagattgagagaagatacaaaacagaagagagatgggcgtgacgaaggaacaagttgaattatccttgaaggccaaactgaacccttctcaccttgaagtggttgatatatctggagggtgcggtgcaagttttgtggtagagattgtatccgaacagtttgaaggcaaaaggctacttgagaggcatcgaatggtgaatgctgccttagaggaggaaatgaaacaaattcatgctctctctattaagaaagctgtt

SEQ ID NO: 128096 - DNA, 247 bp, Glycine max
accattcctggtcctgatcctaaatagggttagggtttatgcaatcgaactccagcgacggtgcatttgtgcgtaatcgatggcgaatcgcacggatccagcagcgaagagcataagagggacgaaccctcagaacctggtggagaagattctccgatcgaagatctaccagaacacgtactggaaggagcaatgtttcgggttaacggcggagacgttggtggacaaggccatggagctcgaccac

SEQ ID NO: 128097 - DNA, 257 bp, Glycine max
gttgttactcctataggttccatgttggatcttaaaatttctcaatctaaaattgcacttcccaaaaacacagttggaggaaccattcttgctagtgacctattggcaaattttttgacagagggcaattttagagcttgtgttgatttgcagcgcactcatcgtatcaaaggaatgattaaaatggtggccacagttggtattcctgagaatacaggtatagcattggcctgtgctatgaatagttcgtttagggg

SEQ ID NO: 128098 - DNA, 270 bp, Glycine max
ctcgagccggtcttcttctctaaaataaaaaaccctaacttctgaacctttcaccgcatcgccaccgattccctatctccactaatcaaagaaaagaaaatgagtagacgctcgagcagaactgtctacgttgggaatctacccggtgatatccgtgaaagagaagttgaagatttgtttctgaagtacggacacataacacacatcgacctaaaggttcccccaagaccacctggttatgcatttgtagagtttgaagatgctcaagat

SEQ ID NO: 128099 - DNA, 231 bp, Glycine max
taaaatttctcaatctaaaattgcacttcccaaaaacacagttggaggaaccattctgcgtagtgatctattggcaaattttttgacagagggcaattttagagcaagtgttgatttgcagcgcactcatcgtattaaaggaatgattaaaatggtggccacagttggtattcctgagaatacaggtatagcattggcctgtgctatgaatagttcttttaggggggcgtg

SEQ ID NO: 128100 - DNA, 263 bp, Glycine max
ctggagcagaagaagtttatcaactgggtcccctgaatgagtatgaaaggattggattggaaaaagcaaagagagagttagcaggaagcatccagaagggtgtagagttcatcagaaaataaatgtgataaggaaaaactagtttttgtctcttatatttaaggaccatgtgtaatacttctctttgttcatagatttttttcttcttcttaagaatagtactctaaatttttggtgtcatccgtaattgctgatgataacgg

SEQ ID NO: 128101 - DNA, 260 bp, Glycine max
gtttggagagttgaatgtggaatcccttctggatttccgctcacagttatttgtaatagcatttttaatgagatgctcattagatatagctatgaaaaattactgcgccaggctaaagctccaagtatgtttttacaatccttcaaaaattttgtttctttgtgtgtgtatggtgatgataacttaattagtgttcatgaatatgtcaagccttactttagtggttctaaattgaaaagctttctagctggtcataatat

SEQ ID NO: 128102 - DNA, 264 bp, Glycine max
ctcgagccgctatgtctcaacggaaacattacgaatatcaagtagcacatggttaagccattggactgatcagagtgctacaaagggttataaccctgccttctacaatatgatatatgcagctctatcatttggtcaggtcttggtgactttaacaaattcttattggttaatcatatcaagtctttatgctgccagaaggttgcacgaagccatgcttagctccatattacgagctcccatggtgtttttccaaacaaatcc

SEQ ID NO: 128103 - DNA, 262 bp, Glycine max
cttttagggggcgtgccagttctgatatttacaccatctgctctcaagactgtgaattatggaatcctgcttgcacaaaagcaatgaccatgtcatttaatccaaacccgtgttctgatgcatggagtttggaatttctgaagcgtaccggatttcattgtgatatcatttgtgtcactggatggactgctaccccaatgcaggatgttcaggttacaattgattggtttatttcctctcaggaatgtgttcccaggaccta

SEQ ID NO: 128104 - DNA, 253 bp, Glycine max
gccgggtctaagccggaactccttctggccatgagctgtctttgcaaaggcaaccccgacgcgcttttgatttgcaacggcttcaaggacgcggagtacatttctcttgccctggttgccaacaaacttgccctcaacaccgtgattgttgtggagcaggaggaggaggttgatttgatcgttgaattgagcaagaagctctgtattaagcccgtgattgggcttcgtgcgaacttcggaccaagcattccgg

SEQ ID NO: 128105 - DNA, 230 bp, Glycine max
ctaaagctccaagtatgtttttacaatctttcaaaaattttgtgtctttgtgtgtgtatggtgatgataacttaattagtgttcatgaatatgtcaagccttactttagtggttctaaattgaaaagctttctagctggtcataatatcaccattactgatggtattgacaaaactagtgaacctttgcaattagaaagttaagcagttgtggatttctcaagagaaact

SEQ ID NO: 128106 - DNA, 267 bp, Glycine max
ggaagcaaaggaagactgggatatgcttcattgataccatatgttgagccagttgtgcaagctcaaagtgctgaagtttacttcgacttcttccctgtggaggttgatagtcaagagggagttgctcacattggtgaattgaaatctggtgtctatgttccactgcctacaaaaactaatttggtggaaactcccaaggaatggcaactggatctaccttgtgacaaaattcctagtgtcttgactacaactgatgaaagattggta

SEQ ID NO: 128107 - DNA, 262 bp, Glycine max
cctttgtttgttgatccatctcttgtttcttgctttctttcttcaccatgtcacttgctgggaaaatcaccactgaaatcggggttcatgcaaccgctacaaagtggttcaacctcttcgcaacacaactccatcatgttcaaaacctaactgatagagtgcatggaaccaagctgcatcaaggtgaagactggcatcacaacgagacagtcaagcactggacttataccatagatggtaaggttacaacatgtctggagag

SEQ ID NO: 128108 - DNA, 260 bp, Glycine max
ctggttgccacactacaccgatatttccaccaaacccgtttgcgttgttgtttgcgaataaatggcaactaagaggagcgtgggaacgttgaaggagggtgatttgaaggggaagagggtattcgtgagggtcgatctgaacgtgcctttggatgacaaccttaacatcaccgatgacactagagtccgtgctgctgttcccaccatcaagtacttgactggttatggtgctaaagtgatcctttctagccatttgggac

SEQ ID NO: 128109 - DNA, 227 bp, Glycine max
  unsure (1)..(227): unsure at all n locations
gaaattttgataaaccgcgatcacaggttgccgcaccttaaaaccggaaacaaaagcaatcgttactcgatttcaagaatctctcaatttcttactacatctgtgtgtacgggttcttaacgggtaagaaaatcactctctgtgctggccacagacttcgtgaatcatttacttttccacacttcatacgagctctcgntatggggatgatctgttaattgataaac

SEQ ID NO: 128110 - DNA, 258 bp, Glycine max
tggcatttgagtttccttattgacaatcccaaacagtctacagtttttgatattctcttgggaatttctcaagattttgagattgctggtaatactcttatgccagctttttctgttccacaggctactgccagatcttctgaaaatgcggaatcctctgcatgatctggaatttgtgttttcttttgcttgttcgtttgtttaattcaataaaggaaattaggcatgaccctcttgttgagtatgctctgcctattt

SEQ ID NO: 128111 - DNA, 258 bp, Glycine max
caagtttgtctcagagtacctctgctagatctgaaggaaggcgcacaggtcaggtaaaaaggccaaaaaaaggcatacccgtcacaagtcccaacaaaaacatgaagatccttctgcactggagaaagaaggcacatctcagagagatgatactgctatgagtggcactgaccaagctttgaggtccagctctgaagactcaagaaatagaaaaactccaatagaatctatggaagaacccactggtgctcaagtcat

SEQ ID NO: 128112 - DNA, 260 bp, Glycine max
actgaaaatcatttctggaaccattcttgcaacaattttgggaacaaccttctggaaactcttttcctttcttagagatgctggtaatgggggagtttttgttggtaatgttgcttcagcatttcacaacttcaagtgtgcttgaggcccaaagtagaaagcccaacagatatgaagtttcccaatacagatatcgcaatgtgccaataaagcgcagagcatgggttgaaggccagatgtctttcgatcagtctgtagta

SEQ ID NO: 128113 - DNA, 255 bp, Glycine max
gttttgatggtttgattaccaagcaagttatgagcaagatggcagaaatgataaacagtctttgtggtggtgatgaaaaattgatgcgtgaaaggacacacctgctgttggcttgttgttcaaggatggcaatttgtaagaaagatgtttggagagttgaatgtggaatcccttctggatttccgctcacagttatttgcaatagcatttttaatgagatgctcattagatatagctatgaaaaattactgcgct

SEQ ID NO: 128114 - DNA, 183 bp, Glycine max
tcggctcgagggtatactgagaaaacaatttttacttgcagagatttggacatcttggttgtttattatacaatagcaactcgatttagaaaatttctagcgcattacattaggtggcatctgtataccttgttgatctacattctcccatcttttctcactgctgaatttaaatttaaccgg

SEQ ID NO: 128115 - DNA, 248 bp, Glycine max
gcaaaaggagatttgtttctggggatggtgaagagatgacattgattccgggaaccagtgttgaagaggcttacaataagctaatagttgaacttgagaaaagtgttcctacattggttggcattgaatgtcccaaggatgagaaacttccccgcggaaaatttttgaccaaccttagacgcgctgcttcactattctccctatggagtgtaaactcgtggggcgtcgacagttgttaaaaaatgtga

SEQ ID NO: 128116 - DNA, 263 bp, Glycine max
gtttgtgtcatcctgcaagagactgagaattatgaaagcatcagaagcaaaggggttgggttgtttttgaccaaaataaaaaaacaaagcaggaccatcatgcatgcccatatccaaaacatggagcaaagcaattttcagtgacgtcatccaagagaatttcttctgtttggaatatgcaagagctaggcacttggcctctgtgaaatggttatatttagcttattaaaaagagagatgcacatacacgattttattttccc

SEQ ID NO: 128117 - DNA, 257 bp, Glycine max
cctgccagtagtcatatgcttgtctcaaagattaagccatgcatgtgtaagtatgaactaattcagactgtgaaactgcgaatggctcattaaatcagttatagtgtgtttgatggtatctactcggataaccgtagtaattctagagctaatacgtgcaacaaaccccgacttctggaagggatgcatttattagatacaaggtcaacacaggctctgcctgttgctttgatgattcatgataactcgtcggatcg

SEQ ID NO: 128118 - DNA, 251 bp, Glycine max
ccacaattcacaaccgatacagtttccatctctctcacaaaatgacaacaatatcaaattgctcccttctcttcctcttcctcttcctctccaccctccacatagctgccaccctctcaacccccaccaacttcatcgagtcctcctgcagcaccacccagtacacagcgctctgaatccagtcccactgcgtctgagaatccaacatccagcaagacccccacgagctcgtccagacagctagctcgctc

SEQ ID NO: 128119 - DNA, 256 bp, Glycine max
cacaaaagcaatgactatgtcatttaatccaaacccgtgttctgatgcatggagtttggaatttctgaagcgtaccggatttcattgtgatatcatttgtgtcactggatggactgccactccaatgcaggatgttcaggttacaattgattggtttatttcctctcaggaatgtgttcccaggacttattgtgttttaaatccacaaaatccttttgtgttgaataggtggatggggaaactgactttcccccag

SEQ ID NO: 128120 - DNA, 258 bp, Glycine max
attgacaatcccaaacagtctacagtttttgacattctcttgggaatttctcaagattttgaaattgctggtaatactcttatgccagctttttctgttccacaggctactgccagatcttctgaaaatgcggaatcctctgcatgatctggaatttgtgttttctttcgtttgttcgtttgtttaattcaataaaggaaattaggcatgacccctcttgttgagtatgctctgcctatttgaaaatttccacacctc

SEQ ID NO: 128121 - DNA, 240 bp, Glycine max
attttctattgaccttctcggtggaggaattttagtggacaaaactggagattggatcacacttatacaaaattctccaattagtaacttgttgagagttgctgcttggaagaaaggctgtttaatggttaagattgtgatgtctgggaatgcagcagtcaaaaagactgattgggcctactggtcagtgtgttttaacaaacagcaacagtacagagcattttgatgcatgtaagtgga

SEQ ID NO: 128122 - DNA, 240 bp, Glycine max
actcgagccagattcggctcgagctaaaagcacaatttgttagtggagaaaccttcaaatatagtataattggtgctggttagcattcttcagaagattttcctgaaaaggaagatcaagaaaaacccaaaaagattgataccagattgagacaaagaatagatcctcaatacaatgaggttcaggctcagatggaaacacatttgtttaaattgtctcttgatgatgttgaaactccta

SEQ ID NO: 128123 - DNA, 255 bp, Glycine max
caagaatggcaatttgtaagaaagatgtttggagagttgaatgtggaatcccttctggatttccgctcacagttatttgtaatagcatttttaatgagatgctcattagatatagctatgaaaaattactgcgccaggctaaagctccaagtatgtttttacaatccttcaaaaattttgtttctttgtgtgtgtatggtgatgataacttaattagtgttcatgaatatgtcaagccttactttagtggttcta

SEQ ID NO: 128124 - DNA, 257 bp, Glycine max
accaaactagttggctcaattctctttgaatggctttggaggctttgaattcaccaacagcagccaccactcccttccgtggttaccaagaagaggaggaggaggttgaccttcacctacgcgagccttgggccaagagaaaacgctccaaacgacctcgttttgagtcggaggaagagtacttggctctttgcctcatcatgcttgcacaaagcggtaacaacaacaacacccaattaccgtcttcgtcacagtca

SEQ ID NO: 128125 - DNA, 255 bp, Glycine max; identical to SEQ ID NO: 128123

SEQ ID NO: 128126 - DNA, 256 bp, Glycine max
atctgctggacccctttgggcacaaaattggtggtgaaattgggaacaaatctgaacagaaaaaggctctctgtagttactcggtgtgggtggattgaatgtcttctttgatgatggatcatgtgattggtgggaagtttaaactgggtaggaaaattgggagtgggtcttttggggagctttatatagctgttaatatacaaaccggagaggatgtggcagtcaagctggaacctgtgaagaccaagcatcccca

SEQ ID NO: 128127 - DNA, 258 bp, Glycine max
ctcaaattttgatggttccagggcgcagattcatagctcatggacattttttcaaaaatctgactcagaaagtgcgagtccaaattgttacatctgaaaagagttactggcatgtatatgatcctgacaagtttcagatgtttgacaacagtgaaataggtctttattctaatcccactttggaagatatcccacattcagcttgggaccttttttgctgggacagtgagaaaactttgccaaataatttttctgcag

SEQ ID NO: 128128 - DNA, 258 bp, Glycine max
caaagattaagccatgcatgtgtaagtatgaactaattcagactgtgaaactgcgaatggctcattaaatcagttatagtttgtttgatggtatctactcggataaccgtagtaattctagagctaatacgtgcaacaaaccccgacttctggaagggatgcatttattagataaaaggtcaacacaggctctgcctgttgctttgatgattcatgataactcgtcggatcgcacggcctttgtgccggcgacgcatc

SEQ ID NO: 128129 - DNA, 221 bp, Glycine max
gaaggactttaggttgggatttgggaattagggttattcgcgtggcgaagatgattgaggtggttttgaacgatcgattggggaagaaggtgcgcgtgaagtgcaacgaccgatgataccatcggcgacctgaagaagcttgtggcggctcagactggcacaagagccgacaagatccgcatccagaagtggtacaccatctacaaggatcacatcactct

SEQ ID NO: 128130 - DNA, 250 bp, Glycine max
atggagtttggaatttctgaagcgtaccggatttcattgtgatatcatttgtgtcactggatggactgccactccaatgcaggatgttcaggttacaattgattggtttatttcctctcaggaatgtgttcccaggacttattgggttttaattccccaaatccctttgtgttgaatatgtggatagggaaactgactttccccccagggcacttcccgaagtgttaagagaatgccctttctatagggg

SEQ ID NO: 128131 - DNA, 245 bp, Glycine max
ggtttggggtgtactgcaagagaggcaggagggagtacatggaggatcgttacaccgctgggaataatcttcgcggagaacacaaactggctttttttggcatatttgatgggcacggtggtgcaaaagctgctgaatttgctgcaaataacttgcaaaagaatgtgttagatgaagttattgtgagagatgaagatgatgttgaggaggcatgaacgtgggtacctgaacaccgattcggattt

SEQ ID NO: 128132 - DNA, 262 bp, Glycine max
  unsure (1)..(262): unsure at all n locations
ggcagaaccaaatagctcattagtgagtttttgagttcgtgtgtcctttctttgtgtgttgcaaggttacaagatggaggatcanaatgcatcatctaatggattgggcaaggtgttccacaaggttaagccctaccttgctatgatgtcccttcagtttggctactccggaatgtacatcatcaccatggtttctttcaagcatggcatgagccattgggtactctccgtgtaccgtcatatagttgccactctcatcatg

SEQ ID NO: 128133 - DNA, 272 bp, Glycine max
ttttgtcattggtgttaagttgacaaccataaacaatatgtgtgcatatgggctcaatcctggtatttcaggttctcgtcttttgggcaccattcctcagtccatttcacagcaaactgtttggaatcaaatggcaacagtgagaacaccattgaattttgattctagcaagcagagcttttgtcaattttctattgaccttctcggtggaggaattttagtggacaaaactggagattggatcacacttatacaaaattctccaattagta

SEQ ID NO: 128134 - DNA, 272 bp, Glycine max
gaatggctcccaagggtttaacctttctggctgtgttaatatgcgtttcagcactgtcactgagtccttctgttgcgggggaagggcaaaataatggccttgttatgaacttctacaaggaatcatgccctcaggctgaagacatcatcacagaacaagtcaagcttctctacaagcgccacaagaacactgctttctcctggctcaggaacatcttccatgactgtgctgttcagagttgtgatgcttcactgttgctggactccacaaga

SEQ ID NO: 128135 - DNA, 272 bp, Glycine max
ctcttctctcttgcggctagggtttagcgcacttcttctagatttaaggaagatgggtaaggaaaaggttcacatcagtattgtggttattggccatgttgactctgggaagtccactaccactggccacctgatctacaagcttggaggcattgacaagcgtgttattgagagatttgagaaggaagctgctgagatgaacaagaggtctttcaagtatgcctgggtgcttgataagcttaaggctgagcgtgaagaggaatcacaattga

SEQ ID NO: 128136 - DNA, 273 bp, Glycine max
gtgaaaactgattgttttccattgagtctgatttagttcttagcttctgcttcgatgccttcaatcatgtcacctcagtggcaagataaggctgctggtttcttttcttcctccggggtgaagcttaaagaagccaaggaatcagcaggaacatttgttggcgaggtcacgaaggatacaaagagtaatgtggccgaagtggcaggacgagtgggatcgatggtgaagagtcggtgggcacttcttcagcagccatccacaagacatgctgtg

SEQ ID NO: 128137 - DNA, 274 bp, Glycine max
actgagtaagggcaacgatattctgtgttgcgattatgctagttttgatggtttgattaccaagcaagttatgagcaagatggcagaaatgataaacagtctttgtggtggtgatgaaaaattgatgcgtgaaaggacacacctgctgttggcttgttgttcaaggatggcaatttgtaagaaagatgtttggagagttgaatgtggaatcccttctggatttccgctcacagttatttgcaatagcatttttaatgagatgctcattagatat

SEQ ID NO: 128138 - DNA, 276 bp, Glycine max
cttttctcactgctgaaattaaatataagcggaatttgagtaatattcatatttccggcttattttacgacggcagatacaaattctggactaaacacgagaaaaatcttgctttgacagaagaggaaaagatggaggtgattagaaatagaggcattcctgctgatgttcttgcaaagcgagctcatgaatttgaaaaacatgttgctcatgaaagcctcaaggatcaaattcctgctgttgacaagttgtattctactaaggttaataagtttg

SEQ ID NO: 128139 - DNA, 273 bp, Glycine max
cagagcctctgcttccgacacaaatcaatctttctgatcatatattattcttttgtttttttaatttattctccatacacatgcagacaataagttcgaacaagttcaggagcggcatggatttcttccaccgcgcgaaggcggtgcgcctccgcagccaccacgacaagtacctcctcgcggaggaggacgaggagtcggtgacgcaggaccgcaacggctcctccaaaagcgcacggtggacggtagaatacgtggccgaatacgacaaca

SEQ ID NO: 128140 - DNA, 265 bp, Glycine max
actgagtaagggcaacgatattctgtgttgcgattatgctagttttgatggtttgattaccaagcaagttatgagcaagatggcagaaatgataaacagtctttgtggtggtgatgaaaaattgatgcgtgaaaggacacacctgctgttggcttgttgttcaaggatggcaatttgtaagaaagatgtttggagagttgaatgtggaatcccttctggatttccgctcacagttatttgcaatagcatttttaatgagatgctc

SEQ ID NO: 128141 - DNA, 281 bp, Glycine max
cttgagtttccttattgacaatcccaaacagtctacagtttttgatattctcttgggaatttctcaagattttgaaattgctggtaatactcttatgccagctttttctgttccacaggctactgccagatcttctgaaaatgcggaatcctctgcatgatctggaatttgtgttttctttcgtttgttcgtttgtttaattcaataaaggaaattagacatgaccctcttgttgagtatgctctgtctatttgaaaatctccacactcttttaattgtcg

SEQ ID NO: 128142 - DNA, 280 bp, Glycine max
  unsure (1)..(280): unsure at all n locations
ttcggctcgagtgttgcttatgagtaagctaacagtaatatattgcgggatgattctgggcacctaaaagttgcagactttggggttagcaagttgctggcagttaaagaagacaagcctctaacttgccaagatacttcctgccgctatgtggctcctgaagttttcagacaagaagaatatgacactaaagtggatgtattttcatttgcactaattctgcaagagatgattgaaggctgccctcctttttctgcanagcaagacgatgaagttccca

SEQ ID NO: 128143 - DNA, 268 bp, Glycine max
gttgtattgaaattttcacaagaggaatttcttacagcttggtcaactcaggtgcatcctgcaacaactctgttggctgttgggtgtccatatttgtatgctatggtgcatgatagttcagtgtctacaataccaggtggttttgtcattggtgttaagctgacaaccataaacaatatgtgtgcatatgggctcaatcctggtatttcaggttctcgtcttttgggacacattcctcagtctatttcacagcaaactgtttggaatc

SEQ ID NO: 128144 - DNA, 270 bp, Glycine max
ctgtctttcgcactttcattctctcttaaaaatctaaatcccttttggtcttcatctttgcctctcacccaggtatggcttcgatacgcatcctgatggtgctcaaggatttgcagaaggatcctcctacgtcatgcagcgcaggtcctgtggctgaagacatgtttcactggcaagccacaatcatgggacctgctgatagcccatatgcaggtggtgttttcttagtttcaattcattttcctcctgactatcccttcaagccaccaa

SEQ ID NO: 128145 - DNA, 271 bp, Glycine max
actggatggactgccaccccaatgcaggatgttcaggttacaattgattggtttatttcctctcaggaatgtgttcccaggacttattgtgttttaaatccacaaaatccttttgtgttaaataggtggatggggaaactgactttcccccagggcacttcccgaaatgttaagagaatgcctctttctatagggggaggagctggtgcaaagaatgctattctcatgaatatgccaaatgctgttctctcaatgtggagatattttgttg

SEQ ID NO: 128146 - DNA, 270 bp, Glycine max
ctggtatttcaggttctcgtcttttgggcaccattcctcagtctatttcacagcaaactgtttggaatcaaatggcaacagtgagaacaccattgaattttgattctagcaagcagagcttttgtcaattttctattgaccttctcggtggaggaattttagtggacaaaactggagattggatcacacttatacaaaattctccaattagtaacttgttgagagttgctgcttggaagaaaggctgtttaatggttacaattgtgatgt

SEQ ID NO: 128147 - DNA, 266 bp, Glycine max
catgaattcaaggtttcagcttttgagtaccactaccaatggtgattttgttcaaggaaaagatctcgcaatggttaaagttaatgtagcatgtgctgctgttggcttgacatcaagttacactccaactccattgttggaatctggtttgcaaaaagacagagggttaattgtggagtattttggaaggatgtcttacgttgctcacaacgttaatcagccccaagagaaagatttgttggagggaaatttttcctttgatatta

SEQ ID NO: 128148 - DNA, 273 bp, Glycine max
ggcatccaaagtgcctggaaaccttaaggttgtttattttgtaaattctggttcagaggcaaatgacttggcgatgctgatggcccgtttatacactggtaatatgggtatgatttccttaaggaatgcatatcatggaggaagttctagtacaattggactcaccgcgatgaacacatggaaatacccaataccagagggagaagttcatcatatcatgaatccagatccataccgtggaatctttggctcagatgccaataggtacgccag

SEQ ID NO: 128149 - DNA, 269 bp, Glycine max
gttgtattgaaattttcacaagaggaatttcttacagcttggtcaactcaggtgcgtcctgcaacaactctgttggctgatgggtgtccatatttgtatgctatggtgcatgatagttcagtgtctacaataccaggtgattttgtcattggtgttaagttgacaaccataaacaatatgtgtgcatatgggctcaatcctggtatttcaggttctcgtcttttgggcaccattcctcagtctatttcacagcaaactgtttggaatca

SEQ ID NO: 128150 - DNA, 241 bp, Glycine max
aaaattttgataaaccgcgatcacaggttgccgcaccttaaaaccggaaacaaaagcaatcgttacttgatttcaagaatctctcaatttcttcctacttctttgtgtacggtttcttaagggaaagaaaatcactctctgtgctggccacagacttcgtgaatcattttcttttccactcttagtatatctaatgaacactctcctatttgatataggacttcgtgtcagatttaaactt

SEQ ID NO: 128151 - DNA, 271 bp, Glycine max
ctcttcctcaccgattgctagaatggaatttcgatgctcagtcatctcttttaccattctcttctctcttgctcttgcaggagagagccatgtccatgcatcgctacctgaggaagattattgggaagctgtttggccaaacactcccattcccactgcactgcgagagcttctaaagcctctccctgcaggtgttgaaatcgatgaactccctaagcaaattgatgatacacagtacccaaaaacattcttctataaagaagccttcatc

SEQ ID NO: 128152 - DNA, 272 bp, Glycine max
gcgatggcgacgacgtcggtggtgccggcgaatcggcggcgtgcggcggcgaaccccgccgaggatatggacttcgagacgacggagggcgtgaaggccatcgcgagcttcgaggagatggggatcaaggacgatctgctccgcggaatctaccagtacggcttcgagaagccctcagccattcagcagcgggccgtgactccgatcattcagggccgtgacgtcatcgcccaggcccaatccggaacgagcaaaacctccatgattgctct

SEQ ID NO: 128153 - DNA, 218 bp, Glycine max
tctcattctccctttcctctccgaaccctcgatcactctcacgcgctcctatattcggtcctccaccgtcgctctctcgaacaatcacaacaccgtcttcatcacatggcagacgcatcatctggtatggcagtccatgatgactgcaagttgaagtatttagagcttaaggctagaaggttgcaccgattcatagttggtaagattgacgagcagca

SEQ ID NO: 128154 - DNA, 268 bp, Glycine max
ttgcaatagcatttttaatgagatgctcattagatatagctatgaaaaattactgcgccaggctaaagctccaagtatgtttttacaatctttcaaaaattttgtatctttgtgtgtgtatggtgatgataacttaattagtgttcatgaatatgtcaagccttactttagtggttctaaattgaaaagctttctagctggtcataatatcaccattactgatggtattgacaaaactagtgcaactttgcaatttagaaagttagca

SEQ ID NO: 128155 - DNA, 261 bp, Glycine max
gcaaatccagaatcctttatatgggattatgttctcccggtaattgttagagggtactgagttgggagctgaacaaaaacaatttgtgcaaacgggcattcggtgtcaacgccagattagcaaaattctggatgactcggatcttgacagcatcattgatggtaaagaccttgatgtactagtggcccttatgtcctgcataacagctacatggatttggagatggttgaattcactttgcatgaagttttggttgcctcc

SEQ ID NO: 128156 - DNA, 266 bp, Glycine max
gttgacaaccataaacaatatgtgtgcatatgggctcaatcctggtatttcaggttctcgtcttttgggcaccattcctcagtctatttcacagcaaactgtttggaatcaaatggcaacagtgagaacaccattgaattttgattctagcaagcagagcttttgtcaattttctattgaccttctcggtggaggaattttagtggacaaaactggagattggatcacacttatacaaaattctccaattagtaacttgttgagag

SEQ ID NO: 128157 - DNA, 269 bp, Glycine max
cccttctggatttccgctcacagttatttgcaatagcatttttaatgagatgctcattagatatagctatgaaaaattactgcgccaggctagagctccaagtatgtttttacaatccttcaaaaattttgtatctttgtgtgtgtatggtgatgataacttaattagtgttcatgaatatgtcaagccttactttagtggttctaaattgaaaagctttctagctggtcataatatcaccattactgatggtattgacaaaactagtg

SEQ ID NO: 128158 - DNA, 271 bp, Glycine max
gcaatggtgtataaaaatagcaagcctcaagctactgcaatgcatgtgggagctatagaaattatcattgatagtttcgcaagtcctgactgcaacatagttggtgcaatgcttttggttgatacttatcataccaatcctgaaaatgcagttcgtagtatttttgttgcgcctttcagaggcggaaagcccattcgggtggttacatttccgaataccatcgtgcacattgaaccagacatgaattcaaggtttcagcttttgagtacca

SEQ ID NO: 128159 - DNA, 269 bp, Glycine max
gcagatgtctaatgttttgtgggtggctcctgaggacaaggcgagtttatggtcacaacttcattatgtttcgtgtaataatctggaaatgcaagaagcttatcttgtcaatctcgtaaatgtgttacgagaattgtatttgcacagtccagaggaagctcgccaattgagaaggaaagctctctctcgtattgaatggctgcaaaaagctgatgtgcctaccatagcacagattgaagagttccattcgatgcagaggatgatgaatg

SEQ ID NO: 128160 - DNA, 282 bp, Glycine max
cggcggtgacgaaaggaaagaagaagaagaagcgttctttcggagagttcgaagatgtcgggcgttaccaacaacaacgaggaagacaagaagccaaccgaacagggagcacacatcaaccttaaggttaaggggcaggatgggaatgaagtttttttcaggatcaagagaagcactcaattgaagaagcttatgaatgcttactgtgaccgacagtcggtggatttcaactccattgcttttctgtttgatggacgccgcctccgagctgagcagactcca

SEQ ID NO: 128161 - DNA, 269 bp, Glycine max
cggagtctctctatcaaaaaaagctacctagagcttgcacctattggtatcttctacaatatcctaaagtgtttttcttcttcttcatcaccatgtctttactttcagacctcatcaacctcaatctctcagaatccacagaaaagatcattgctgagtacatatgggttggtggatctggtatggacctcagaagcaaagccaggactcttcctgggccagtgagtgaccctgcaaaacttccgaagtggaactatgatgggtctagc

SEQ ID NO: 128162 - DNA, 271 bp, Glycine max
caacgatattctgtgttgcgattatgctagttttgatggtttgattaccaagcaagttatgagcaagatggcagaaatgataaacagtctttgtggtggtgatgaaaaattgatgcgtgaaaggacacacctgctgttggcttgttgttcaaggatggcaatttgtaagaaagatgtttggagagttgaatgtggaatcccttctggatttccgctcacagttatttgcaatagcatttttaatgagatgctcattagatatagctatgaa

SEQ ID NO: 128163 - DNA, 262 bp, Glycine max
caagaagcttatcttgtcaatctcgtaaatgtgttacgagaattgtatttgcacagtccagaggaagctcgccaattgagaaggaaagctctctctcgtattgaatggctgcaaaaagctgatgtgcctaccatagcacagattgaagagttccattcgatgcagaggatgatgaatgctcctgattcaaatgataatattgatctactgttgagcattgatttgttgggtttacaaggagcaggtaaagcctttccaaaca

SEQ ID NO: 128164 - DNA, 260 bp, Glycine max
tgaaagggctggaaatgcctccctagaagaggttgtgatggccttgagatgcggagacatgtcaatggcaatctctacactggaattaatacaaagcacatctttctgacgagcaagatggtcgaagagtacactggtttgcagatacagccacacaaggctcttgtgggagctaatgccttcgcccatgaaagtggcatacatcaggatggaatgctaaaacacaaaggtacatatgaaataatatcacccgaggacat

SEQ ID NO: 128165 - DNA, 259 bp, Glycine max
gtgattgtttgttgttgtaactcgttcttcttcttttgttgctctgtgtttgtgcttgttttttctctcacctgaaaatgtcttgctgcggtggtaactgtggttgcggaagctcctgcaagtgcggcaacggctgcggacgctgcaagatgtacccagacttgagctacactgagtcaaccaccaccgagaccttggtcatgggagtcgcacctgttaaggctcaatttgatggtgctgaaataggtgtaccgctgat

SEQ ID NO: 128166 - DNA, 265 bp, Glycine max
gaatctcaagattctaagagagattttgctgctctttgaagcagggtgtttgcttgattttggagatgtcgctgctctcagatctcatcaaccttaacctctcagacactactgagaaggtgatcgcagagtacatatggatcggtggatcaggaatggacctgaggagcaaagcaaggactctcccaggaccagttagcgacccttcaaagcttcccaagtggaactatgatggttccagcacaggccaagctcctggagaaga

SEQ ID NO: 128167 - DNA, 261 bp, Glycine max
gtcataatatcaccattactgatggtattgacaaaactagtgcaactttgcaatttagaaagttagcagattgcgattttctcaagagaaactttaagcagatgtctaatgttttgtgggtggctcctgaggacaaggcgagtttatggtcacaacttcattatgtttcgtgtaataatctggaaatgcaagaagcttatcttgtcaatctcgtaaatgtgttacgagaattgtatttgcacagtccagaggaagctcgcc

SEQ ID NO: 128168 - DNA, 264 bp, Glycine max
cttggattagttctgcagttaacaatcgctcctcagatatcaacaaaaggattcgcacagcacttgggaaaggtaagaaaattgtttttcttactagagttgatccttttccagtagctttactggctgttctttttggcgttaagaatgaaattctgagttctaacgccactaaccctatgctgacgcgacttcttgagaactgtaagagtctcaaatatctggttgatgagtgtccttttgcatttgtgaactagtatgtaa

SEQ ID NO: 128169 - DNA, 267 bp, Glycine max
gctgttcctacaatcattccaaatgtgcccttccggtcgcaccctcctcccttcctccgtctccgatttccgaccggcattcgacgtcctcgatgccgaccgcgacggcaaaatcagccgcgacgacctccgcgccttctacgccggagtcggcggcggaggagatgacgtgatcggggcaatgatgacagtggctgacaccaataaggacgggttcgtggagtacgaggagttcgagcgcgtggtctcggcggagagaaacccgtg

SEQ ID NO: 128170 - DNA, 266 bp, Glycine max
ctcgagccgctcgagccgtgaatttgaaaaacatgttgctcattatagcctcaaggatcaaattcctgcagttgacaagttgtattctactaaggtcaataagtttgcaaaaattatgaaccttagacaaagtgttgttggtgatcttaaacttcttactgatgggaagttatatgagggtaagcatattcctgtatctaatattagtgcaggggaaaatcatgtagttcaaatacccctaatggcacaggaggaaattctgtctt

SEQ ID NO: 128171 - DNA, 271 bp, Glycine max
tgccactccaatgcaggatgttcaggttacaattgattggtttatttcctctcaggaatgtgttcccaggacttattgtgttttaaatccacaaaatccttttgtgttgaataggtggatggggaaactgactttcccccagggcacttcccgaagtgttaagagaatgcctctttctatagggggaggagctggtgcaaagaatgctattctcatgaatatgccaaatgctgttctttcaatgtggagatattttgttggagatctcgtc

SEQ ID NO: 128172 - DNA, 258 bp, Glycine max
gttgcggttaaggatccatctgctccccatggagttcggcttttgattgaggactatccttatgcttctgatgggctagagatatgggatgccatcaagtcctgggtgcatgaatatgtctcattctactacaagtcagatgcagcaattcaacaagatcccgagctccaagcttggtggaaagaacttgtccaagtgggtcatggtgatttgaaagataagccatggtggcaaaagatgcaaactcgtgaagagttg

SEQ ID NO: 128173 - DNA, 261 bp, Glycine max
aaacaaatttgtttaaattgtctcttgatgatgttgaaactcctaaaggttccatgttggatcttaaaatttctcaatctataattgcacttcccaaaaacacagttggaggaaccattctgcgtagtgacctattggaaaattttttgacagatggcaattttagagcaagtgttgatttgcagcgcactcatcgtatcaaaggaatgattaaaatggtggccacagttagtattcctgagacacgacgtatagcattgg

SEQ ID NO: 128174 - DNA, 262 bp, Glycine max
cccattcgggtggttacatttccgaataccatcgtgcagattgaaccagacatgaattcaaggtttcagcttttgagtaccactaccaatggtgattttgttcaaggaaaagatctcgcaatggttaaagttaatgtagcatgtgctgctgttggcttgacatcaagttacactccaactccattgttggaatctggtttgcaaaaagacagagggttaattgtggagtatcttggaaggatgtcttacgttgctcactacg

SEQ ID NO: 128175 - DNA, 177 bp, Glycine max
taaaccgcgatcacaggttgccgcaccttaaaaccggaaacaaaagcaatcgttacttgatttcaagaatctctcaatttcttcctacttctttgtgtacggtttcttaagggatagaaaatcactctctgtgctggccacagacttcgtgaatcattttcttttccacacatcata

SEQ ID NO: 128176 - DNA, 234 bp, Glycine max
ctctctcttgcaaaacctaattttcatttcttccctcaaatttcaaaatgcgtgagatcctgcacatccagggtggccagtgcggcaaccagatcggcgacaagttctgtgaggtgctttacgcggacacgggatcgaacctaccggaaggtaccgtggggactcggagttgcagctcgagaggatcaatgtctactacgacgaggccagttacggccggttcgcgtcgcgcgc

SEQ ID NO: 128177 - DNA, 264 bp, Glycine max
ctcgagccgaatcggctcgaggacaatcccaaacagtctacagttattgatattctcttgggaatttctcaagattttgaaattgctggtaatactcttatgccagctttttctgttccacaggctactgccagatcttctgaaaatgcggaatcctctgcatgatctggaatttgtgttttctttcgcttgttcgtttgtttaattcaataaaggaaattaggcatgaccctcttgttgagtatgctctgcctatttgaaaat

SEQ ID NO: 128178 - DNA, 264 bp, Glycine max
ctacattctcccatcttttctcactgctgaaattaaatatctgtcgaatcagagtaatattcagatttccggcttattttacgacggcagatacaaattctggactaaacacgagaaaaatcttgctttgacagaagaggaaaagatggaagtgattagaaatagaggcattcctgctgatgttcttgcaaagcgagctcatgaatttgaaaaacatgttgctcatgaaagcctcaaggatcaaattcctgctgttgacaagtt

SEQ ID NO: 128179 - DNA, 258 bp, Glycine max
ctgctcgagctcgagccgtcgttcttcttcgtcgttatcttcttcttttgttgtttgtgtgttagttttgtctctcacctgaaaatgtcttgctgcggtggtaactgtggttgcggaagcgcctgcaagtgcggcaacggctgcggaggctgcaagatgtacccagacttgagctacaccgagtcaaccaccaccgagaccttggtcatgggaatggcaccagttaaggctcaattcgagagtgctgaaatgggtgtt

SEQ ID NO: 128180 - DNA, 274 bp, Glycine max
caaattataaaaacccccacatactaatgcatctatatcacgaacagaagatcgaattacattaagaaagccccaaaaaaagatgtcgtccgagtgcaaaggtaagagctcatggcctgagttggttggagtggaaggaacggtggcggtggctacaattgagagggagaatcctttggtggacgctaacactgtgctgaaaggaaccatagtcacccctgatttccgatgtgatagggtttgggtttgggtcaccaaagacggaattgtttat

SEQ ID NO: 128181 - DNA, 257 bp, Glycine max
gtgattttgttcaaggaaaagatctcgcaatggttaaagttaatgtagcatgtgctgctgttggcttgacatcaagttacactccaactccattgttggaatctggtttgcaaaaagacagagggttaattgtggagtactttggaaggatgtcttacgttgctcataacgttaatcagccccaagagaaagatttgttggagggaaattttcctttgatattgaatctcgctctagattggaaaaaggtcctctac

SEQ ID NO: 128182 - DNA, 259 bp, Glycine max
cactaattaagttatcatgaatatgtcaagcttttcaatttagaaccactaaagtaaggcttgacatattcatgaacactaattaagtggttctaaattgaaaagctttctagctggtcataatatcaccattactgatggtattgacaaaactagtgcaactttgcaatttagaaagttagcagattgtgattttctctagagaaactttaggcagatgtctaatgttttgtgggtggctcctgaggacaaggcgagt

SEQ ID NO: 128183 - DNA, 262 bp, Glycine max
caccaacagcatcggcggcgacagtcactctccgacaacaacacttccgcggcgaaaaatgtctctggtggcgaacgaggatttccagcacattctgcgtgtgctgaacaccaacgtggatgggaagcagaagataatgttcgctatgacctccatcaagggtattggaaggagattcgccaacatcgcttgcaagaaggccgatgttgacatgaacaaaagggctggtgagttgagtgctgcagagttggatagtgtgatg

SEQ ID NO: 128184 - DNA, 259 bp, Glycine max
aatttctgaagcgtaccggatttcattgtgatatcatttgtgtcactggatggactgccactccaatgcaggatgttcaggttacaattgattggtttatttcctctcaggaatgtgttcccaggacttattgtgttttaaatccacaaaatccttttgtgttgaataggtggatggggaaactgactttcccccagggcacttcccgaagtgttaagagaatgcctctttctatagggggaggagctggtgcaaagaa

SEQ ID NO: 128185 - DNA, 262 bp, Glycine max
gtagaagccatgtctaagggtcctggtctctactctgacattggcaagaaagccagagatctcctgttcaaggactaccacagtgaccagaagtttaccatcactacctactcacccactggagttgctataacatcctcggggaccaagaaaggtgacctttttgtggcggatgttaacacccagttgaagaacaagaacatcaccactgatatcaaagtggacaccggttccaatcttttcacaactatcactgtcaatg

SEQ ID NO: 128186 - DNA, 257 bp, Glycine max
gtaaaaatagcaagcctcaagctactgcaatgcatgttggagctatagaaattatcattgatagtttcgcaagtcctgactgcaacatagttggtgcaatgcttttggttgatacttatcataccaatcctgaaaatgcagttcgtagtatttttgttgcacctttcagaggtggaaggcccattcgggtggttacatttccgaataccattgtgcagattgaaccagacatgaattcaaggtttcagcttttgagt

SEQ ID NO: 128187 - DNA, 261 bp, Glycine max
ccaagacacactcgttcatatatctctctgctcttctcttctcttctacctctcaagtttttgaagtataaagatggcagagacattcctattcacctcggagtcagtgaacgagggacaccctgataagctctgcgaccaaatctccgatgctgtcctcgacgcttgcctcgaacaggacccagacagcaaggttgcctgcgaaacatgcaccaagaccaacttggtcatggtcttcggagagatcaccaccaaggccaa

SEQ ID NO: 128188 - DNA, 261 bp, Glycine max
ccactaccaaacttcaactcactttctctctctctctccccgatctataaatcattctctcactctaaaatctctctctccctccctccccgatctataaatcgttctctgactctgaaatctctctctctctctctctctactcttctctctctctcactcttagaacgcacagttttgtaattgtatgcgttgtatgacacttcgatagctcttctgctgaagaagtgagacacatgtactctgatggagatgtgtatg

SEQ ID NO: 128189 - DNA, 259 bp, Glycine max
  unsure (1)..(259): unsure at all n locations
gaaattttgataaaccgcgatcacaggttgccgcaccttaaaaccggaaacaaaagcaatcgttacttgatttcaagaatctctcaatttcttcctacttctttgtgtacggtttcttaagggaaagaaaatcactctctgtgctggccacagacttcgtgaatcattttcttttccactcttagtataacacctggncactctccnatntgatataggncttcgtgtcagatctaaacttcttctgtctctttctcag

SEQ ID NO: 128190 - DNA, 268 bp, Glycine max
cagttatttgcaatagcatttttaatgagatgctcattagatatagctatgaaaaattactgcgccaggctaaagctccaagtatgtttttacaatccttcaaaaattttgtttctttgtgtgtgtatggtgatgataacttaattagtgttcatgaatatgtcaagccttactttagtggttctaaattgaaaagctttctagctggtcataatatcaccattactgatggtattgacaaaactagtgcaactttgcaatttagaaa

SEQ ID NO: 128191 - DNA, 246 bp, Glycine max
agaaaaataaaaagtaggtaaagtgcatagtagcactagctaaacagtacgtagtgatcataagcaagcatactgatgattaatatggcaaccatggaagacatgagcaacatgagtggtgaaattacacttccagggttccgattccacccaactgaagacacccttctggatttctatctcaaaaacatggttgttggcaagaaacttcgttacgatgttattggtttcctcaacatctatcag

SEQ ID NO: 128192 - DNA, 297 bp, Glycine max
  unsure (1)..(297): unsure at all n locations
ccgggccttcacggccgaagaggacgacaccataatccgggcccatgcccgcttcggcaacaagtgggccaccatagcccgcctcctccacggcagaaccgacaacgctatcaaaaaccactggaactccaccttgaagcgcaagtgctcttcaaccatgatcgacgacaacacccaaccgctgaaaagatccgtgagtgccggcgcggctattccagtctctactggactctacatgaacccgcccacacggggtantcctccggatccgttgtgagcaattccanttacggtttc

SEQ ID NO: 128193 - DNA, 291 bp, Glycine max
ctcgagccgattcggctcgagaaaaaatgagttggtggtgggcaggagcaatcggtgctgccaagaagaaattcgaggaagaggaaccgccgcgaagcttccagagcgtgggcctggtgatcggcgtgacgggcatcgtgggcaacagcctcgccgagatcctccctctcgccgacacccccgccggtccatggaaggtctacggcgtcgcacgccgcccccgtccgccgtggaacgccgaccatcctgtcgagtacatccagtgcgacgtctccgatccccggcgacgcg

SEQ ID NO: 128194 - DNA, 191 bp, Glycine max
aaaaactaatttggtggaaactcccaaggaatggcaactggatctaccttgtgacaaaattcctagtgtcttgactacaactgatgaaagattggtaggcacagaacatgagggatatgatccttttcttggtggaattcaaaaatatgccactcccatgatgcccctagatgaagaatttctttctaggg

SEQ ID NO: 128195 - DNA, 283 bp, Glycine max
gttttattctctttatctctctctctgccctctcatcttcagctccgatggcgagcctgtggcgcgcggcgaccggcatgacggaaaacgccaccgattacgacggcgtcgagttctggtccaaccccgagcgcaccggctggctcaccaagcagggcgagtacatcaagacctggcgccgccgctggttcgtcctcaagcaaggcaagctcttctggttcaaggaatgctccgtcacgcgcgcgtctcgtccacgcggcgtcgtccccgtcgccaagtgtct

SEQ ID NO: 128196 - DNA, 284 bp, Glycine max
  unsure (1)..(284): unsure at all n locations
attccatatccccgttttccttcactcttgaaccccgattcatttccaccagcacaagaagcatggctgcaatatcaataccttctcacatgaaagcttggacatactctgagtatggaaaatccaaggaagttctcaagtttaatcagagtgtggctttgcctgaggtgaaggaagaccaggtcctcatcaaggtcgctgctgcttcccttaaccccattgatcataagagaatggaaggctatttcaagaacagcgactcncctttacctactgctccgggt

SEQ ID NO: 128197 - DNA, 284 bp, Glycine max
gaaatgtggagttctgagtgggcaaatcaaacttcatggcacttgagtttccttattgacaatcccaaacagtctacagtttttgatattctcttgggaatttctcaagattttgaaattgctggtaatactcttatgccagctttttctgttccacaggctactgccagatcttctgaaaatgcggaatcctctgcatgatctggaatttgtgttttctttcgtttgttcgtttgtttaattcaataaaggaaattagacatgaccctcttgttgagtatgct

SEQ ID NO: 128198 - DNA, 280 bp, Glycine max
gggggaggagctggtgcaaagaatgctattctcatgaatatgccaaatgctgttctttcaatgtggagatattttgttggagatcttgtctttgaagtttctaagatgacttctccttatattaaatgtacagtctctttcttcatagcatttggaaatttggctgatgacaccatcaattttgaggcctttccccacaagctggtgcagtttggagagattcaggaaaaagttgtattgaaattttcacaagaggaatttcttacagcttggtcaactc

SEQ ID NO: 128199 - DNA, 279 bp, Glycine max
ggaattttagtggacaaaactggagattggatcacacttatacaaaattctccaattagtaacttgttgagagttgctgcttggaagaaaggctgtttaatggttaagattgtgatgtctgggaatgcagcagtcaaaaggagtgattgggcctcattggtacaagtgtttttaacaaacagcaacagtacagagcattttgatgcatgtaagtggacaaaatcggaaccacattcctgggaattgatcttcccaatagaggtatgtggtcctaataat

SEQ ID NO: 128200 - DNA, 307 bp, Glycine max
ttctcctcgttcggctcatgctcttgatatcttagttatctaattacctcaattaatcccttaattgcaagcatcatggctgaggagaaacaccaccaccacttccaccaccacaagggcgatgatgtgcctggcgaggttgattataagaaggaggagaagcaccacaagcatcttgagcaccttggggaacttggtgctgcggctgccggtgcttatgccttgcatgagaagcatgaggccaagaaagacccagagcatgctcacaggcacaaggtagaagaggagattgcggcagcagctactg

SEQ ID NO: 128201 - DNA, 284 bp, Glycine max
ggtgcattggctacaaaaggcagggccaacatagaagagtggcagatggtttgcagaagtttagggtctgaaattgaaggcaatgacaaactggaggatatgaagaaagtgctttccctcagtttcaatgagttgccttattatcttaagtcttgtttgttgtacctaagcatctttcccgagtttcatgctattgagcacatgcgattgattcgtttgtggatagctgaagggtttgtgaatggagaagaaggaaagacactggaggacgttgcagacagtta

SEQ ID NO: 128202 - DNA, 223 bp, Glycine max
gtttggactatatggaaagaattcctcttgccacatctgagggttttcctcatgtgctttcacgcaaaaatggtgaaaaaggcaaaagaagatttgtttctggggatggtgaagagatgacattgattccgggaaccagtgttgaagaggcttacaacaagctaatagttgaacttgagaaaagtgttcctacattggttggcattgaatgtcccaaggttga

SEQ ID NO: 128203 - DNA, 284 bp, Glycine max
ctcgagccgcacagacttcgtgaatcattttcttttccacacatcatatgacttttgaaaactctcctatttgatataggacttcgtgtcagatttaaatcttcttctgtttctttctcagttctctgtttaatttcaagttcaagctggtgaaatcttggattagtgctcccactttcctatctggtataggtcttcgtgggtagacttttctatttctctcctttctttcactctcttcttctcactaatccgcattgccgttcaaagtggtcttatttgaa

SEQ ID NO: 128204 - DNA, 283 bp, Glycine max
caagtgttagggaggacaaataccgcccctttatgcgcgaagacagtgagaagaacatcaaatggagatatggtgctcctccaaattatgacgttgtcaacaaattatttgatgaaggcagaaccaaggtatggcctccgggttcacttgaagaaaaggtgcagactttagtgaagaattgggagatggaaatgttccacaaggaggatttcaaggataacagatcagtggacccagagaaatacactttcagcctaaacggaaggaagcctattagtttgga

SEQ ID NO: 128205 - DNA, 230 bp, Glycine max
gcagcgcactcatcgtattaaaggaatgattaaaatggtggccacagttggtattcctgagaatacaggtatagcattggcctgtgctatgaatagttcttttagggggcgtgccagttctgatatttacaccatctgctctcaagactgtgaattatggaatcctgcttgcacaaaagcaatgactatgtcatgcaatctaaacccgtgtcctgatgcatggagtttgg

SEQ ID NO: 128206 - DNA, 281 bp, Glycine max
tgcaaatgtttgcttcgttaattgtctctggggacaacaggctcactgagaatacaatttttacttgcagagatttggacatcttggttgtttattatacaatagcaactcaatttagaaaatttctaccgcattacattaggtggcatctgtataccttgttgatctacattctcccatctgttctcactgctgaaattacatataagcggaatttgagtaatattcatatatccggcatattttacgacggcagatacaaattctggactagacacgag

SEQ ID NO: 128207 - DNA, 280 bp, Glycine max
ctcgagccggaaattatcattgatagtttcgcaagtcctgactgcaacatagttggtgcaatgcttttggttgatacttatcataccaatcctgaaaatgcagttcgtagtatttttgttgcacctttcagaggtggaaggcccattcgggtggttacatttccgaataccattgtgcagattgaaccagacatgaattcaaggtttcagcttttgagtaccactaccaatggtgattttgttcaaggtaaagatctcgcaatggttaaagttaatgtag

SEQ ID NO: 128208 - DNA, 282 bp, Glycine max
tgatgatgttgaaactcctataggttccatgttggatcttaaaatttctcaatctaaaattgcacttcccaaaaacacagttggaggaaccattctgcgtagtgatctattggcaaattttttgatagagggcaattttagagcaagtgttgatttgcagcgcactcatcgtattaaaggaatgattaaaatggtggccacagttggtattcctgagaatacaggtatagcattggcctgtgctatgaatagttcttttagggggcgtgccagttctgatat

SEQ ID NO: 128209 - DNA, 275 bp, Glycine max
ggcacttgaaaagatgtttagttgttttacactcaaatatgttcttacctatgaagacaaggatggagattggatgctagttggtgatgttccgtgggagatgttcactgagtcttgcaagaggctgaggataatgaagagttctgaagcaattgggctagcacctagagccatggaaaagtgcaaaagtcgctactagctagtgcaatgctgtatgcttttgtcttctaatcctgaaagatggaagaccacatttaagcatataatacctgagt

SEQ ID NO: 128210 - DNA, 280 bp, Glycine max
ggacacacctgctgttggcttgttgttcaagaatggcacatttgtaagaaagatgtttggagagttgaatgtggaatcccttctggatttccgctcacagttatttgtaatagcatttttaatgagatgctcattagatatagctatgaaaaattactgcgccaggctaaagctccaagtatgtttttacaatccttcaaaaattttgtttccttgtgtgtgtatggtgatgataacttaattagtgttcatgaatatgtcaagccttactttagtggtt

SEQ ID NO: 128211 - DNA, 292 bp, Glycine max
gcatgtgctgctgttggcttgacatcaagttacactccaactccattgttggaatctggtttgcaataagacatatggttaattgtggagtattttggcaggatgtcttacgctgctcacaacgttaatcatccccaagagacagattcgttggagggcactttttcctttgatattagatctcgctctagattggtaacagtttcctctacaagagcacaatttgttagtggtaaaaccttcacatatgatataattggtgctggttcacactcttcagaagattttcctg

SEQ ID NO: 128212 - DNA, 228 bp, Glycine max
  unsure (1)..(228): unsure at all n locations
gtagatnagggacaagcttagttgtcaagttggaatcaacccatactccatggaatggactggtttggccaatagattactgagtaagggcaacgatattctgtgttgcgattatgctagttttgatggtttgattaccaagcaagttatgagcaagatggcagaaatgataaacagtctttgtggtggtgatgaaaaattgatgcgtgaaaggacacacctgctgtt

SEQ ID NO: 128213 - DNA, 191 bp, Glycine max
aaatttgtttaaattgtctcttgatgatgttgaaactcctaaaggttccatgttggatcttaaaatttctcaatctaaaattgcacttcccaaaaacacagttggaggaaccattctgcgtagtgatctattggcaaattttttgacagagggcaattttagagcaagtgttgatttgcagcgaactcatc

SEQ ID NO: 128214 - DNA, 267 bp, Glycine max
gacaagttgtattctactaaggttaataagtttgcaaaaattatgaaccttagacaaagcgttgttggtgatcttaaacttcttactgatgggaagttatatgagggtaagcatattcctgtatctaatattagtgcaggggaaaatcatgtagttcaaatacccctaatggcacaggaggaaattctgtcttctagtgcaagtgatttcagaactgcaatggtgagtaaaaatagcaagcctcaagctactgcaatgcatgtggga

SEQ ID NO: 128215 - DNA, 241 bp, Glycine max
tgaccctggaagttcatcaacatcttcaatgatcgcttgttctgaccaaaggtgcaataatggaaaacaatcatcagatgccacctgttccagtcagaacaaccagtgctcctacactttccagtatggagatgggagtgggacatcaggctattatgtgtcagatatgatgcatttgaacaccatttttgagggatccatggccacaaattctactgcgcctgtagtttttggatgtagc

SEQ ID NO: 128216 - DNA, 277 bp, Glycine max
ctggtttggccaatagattactgagtaagggcaacgatattctgtgttgcgattatgctagttttgatggtttgattaccaagcaagttatgagcaagatggcagaaatgataaacagtctttgtggtggtgatgaaaaattgatgcgtgaaaggacacacctgctgttggcttgttgttcaaggatggcaatttgtaagaaagatgtttggagagttgaatgtggaatcccttctggatttccgctcacagttatttgcaatagcatttttaatga

SEQ ID NO: 128217 - DNA, 252 bp, Glycine max
gttcattatgaagaaaagggacaagcttagttgtcaagttggaatcaacccatactccatggaatggactggtttggccaatagattactgagtaagggcaacgatattctgtgttgcgattatgctagttttgatggtttgattaccaagcaagttatgagcaagatggcagaaatgataaacagtctttgtggtggtgatgaaaaattgatgcgtgaaaggacacacctgctgttggcttgttgttcaag

SEQ ID NO: 128218 - DNA, 276 bp, Glycine max
ggttcggaggacgagggaggagaagagtacctcttcaagatcgtcataatcggagactccgcggtggggaaatcgaacctgctgtcccgctacgcccggaacgagttcaacatgcactccaaggccaccataggcgtcgagttccagactcagtgcttggaaatcgactccaaggaagtcaaggctcagatttgggacaccgccggccaagagcgattccgcgccgtcacctccgcctactaccgcggcgctgtcggcgccctcattgtctacgac

SEQ ID NO: 128219 - DNA, 277 bp, Glycine max
ggttgtttattatacaatagcaactcaatttagaaaatttctaccgcattacattagatggcatctgtataccttgttgatctacattctcccatcttttctcactgctgaaattaaatataagcggaatttgagtaatattcatatttccggcttattttacgacggcagatacaaattcacggataaacacgagataaatcttgctttgacagaagaggcaaagatggaggtgattagaaatagaggcattcctgctgatgttcttgcaaagcga

SEQ ID NO: 128220 - DNA, 290 bp, Glycine max
tgcggaaatccagaagggattccgctcacagttatttgcaatagcatttttaatgagatgctcattagatatagctatgaaaaattactgcgccaggctaaagctccaagtatgtttttacaatccttcaaaaattttgtttctttgtgtgtgtatggtgatgataacttaattagtgttcatgaatatgtcaagccttactttagtggttctaaattgaaaagctttctagctggtcataatatcaccattactgatggtattgacaaaactagtgcaactttgcaatt

SEQ ID NO: 128221 - DNA, 183 bp, Glycine max
gttgagagttgctgcttggaagaaaggctgtttaatggttaagattgtgatgtctgggaatgcagcagtcaaaaggagtgattgggcctcattggtacaagtatttttaacaaacagcaacagtacagagcattttgatgcatgtaagtggacaaaatcggaaccacattcctgggaattgat

SEQ ID NO: 128222 - DNA, 236 bp, Glycine max
gtttaatcttgtggttcgtcagaagtttttaaattttgtgaggttcattatgaagaaaagggacaagcttagttgtcaagttggaatcaacccatactccatggaatggactggtttggccaatagattactgagtaagggcaacgatattctgtgttgcgattatgctagttttgatggtttgattaccaagcaagttatgagcaagatggcagaaatgataaacagtctttgtg

SEQ ID NO: 128223 - DNA, 229 bp, Glycine max
gtattttggaaggatgtcttacgttgctcacaacgttaatcagccccaagagaaagatttgttggagggaaatttttcctttgatattaaatctcgctctagattggaaaaagtttcctctacaaaagcacaatttgttagtggaaaaaccttcaaatatgatataattggtgctggttcacattcttcagaagattttcctgaaaaggaagatcaagaaaaacccaaa

SEQ ID NO: 128224 - DNA, 276 bp, Glycine max
  unsure (1)..(276): unsure at all n locations
gaaattctttctaaggttgcacaagatatggttgatgaatggtttgattgtgttgatgaggaggattcctttgaggaagtttccttaagtgcagcactcaatggtgttgagggtttggactatatggaaagaattcctcttgccacatctgagggttttcctcacgtactttcaccctanaatggtgttttnaggcnnaaggagatttgtttctggggatggtgaagagatgacattgattccaggaaccagtgttgaagaggcttacaacaagct

SEQ ID NO: 128225 - DNA, 255 bp, Glycine max
gtaagtggacaaaatcggaaccacattcctgggaattgatcttcccaatagaggtatgtggtcccaataatggttttgaaatgtggagttctgagtgggcaaatcaaacttcatggcatttgagtttccttattgacaatcccaaacagtctacagtttttgatattctcttgggaatttctcaagattttgaaattgctggtaatactcttatgccagctttttctgttccacaggctactgccagatcttctg

SEQ ID NO: 128226 - DNA, 275 bp, Glycine max
gaatagttcttttagggggcgtgccagttctgatatttacaccatctgctctcaagactgtgaattatggaatcctgcttgcacaaaagcaatgactatgtcatttaatccaaacccgtgttctgatgcatggagtttggaatttttgaagcgtaccggatttcactgtgatatcatttgtgtcactggatggactgccaccccaatgcaggatgttcaggttacaattgattggtttatttcctctcaggaatgtgttcccaggacttattgtg

SEQ ID NO: 128227 - DNA, 266 bp, Glycine max
gacagagggcaattttagagcaagtgttgatttgcagcgcactcatcgtattaaaggaatgattaaaatggtggccacagttggtattcctgagaatacaggtatagcattggcctgtgctatgaatagttcttttagggggcgtgccagttctgatatttacaccatctgctctcaagactgtgaattatggaatcctgcttgcacaaaagcaatgactatgtcatttaatccaaacccgtgttctgatgcatggagtttggaat

SEQ ID NO: 128228 - DNA, 273 bp, Glycine max
gtggaagaggctcacatggtagggatgggacagatgcttattaccagaacatgattcaagcaaaccccaataatgctcttttgcttggaaattatgctaagtttttgaaggaggttcgtggagattatcctaaagcagaggagtatcttgaaagagctattttggctaatcctggcgatgctaatgttttgtccctctacgcggatttaatatggcaaacagagaagaatgctgatcgagctgagggttattttgatcaagctgttaaaactg

SEQ ID NO: 128229 - DNA, 252 bp, Glycine max
agtggttctaaattgaaaagctttctagctggtcataatatcaccattactgatggtattgacaaaactagtgcaactttgcaatttagaaagttagcagattgcgattttctcaagagaaactttaagcagatgtctaatgttttgtgggtggctcctgaggacaaggcgagtttatggtcacaacttcattatgtttcgtgtaataatctggaaatgcaagaagcttatcttgtcaatctcgtaaatgtg

SEQ ID NO: 128230 - DNA, 286 bp, Glycine max
attcaatccaccgctttgttcaactcaaatcctcaatcgctcgcgatttcttcttctggaattctcaaggatctcgataaatggcaaccactgcctgtttcatcattgttagcagaaatgacattcctatatatgaagctgaagttggagtagctgctaaaagggaggattctgctcagctgcatcaatttatccttcatgctgctctcgatattgttcaggaccttgcatggactactagcgctatgtacttgaaatcagtagacaggtttaatgaacttgtggt

SEQ ID NO: 128231 - DNA, 241 bp, Glycine max
gcagcgcacccaaggccaagaaaacggcgtcgtccaagaagcccctctcccatcctaccttcgccgtgatgatagcggaggcgatagcgagtctgaaggagagaaccggttcgagccaatacgcgataaccaaattcatcgaaggcaagcacaaggagttgcctccaacctacaagaagcttgttctcgttcatctcaagaagtctgttgctgctggcaagctcgttaaggtcaaaaactc

SEQ ID NO: 128232 - DNA, 274 bp, Glycine max
agatatcgcaatgtgccaataaagcgcagagcatgggttgaaggccagatgtctttcgatcagtctgtagtagcaattatgtctaaatgcaaagccagcatgagaatgggaaacactgatgctcaaattttgatggttccagggcgcagattcatagctcatggacattttttcaaaaatctgactcagaaagtgcgagtccaaattgttacatctgaaaagagttactggcatgtatatgatcctgacaagtttcagatgtttgacaacagtg

SEQ ID NO: 128233 - DNA, 249 bp, Glycine max
accaatcatctttagttcttcagtaatttattgtgggattctattctaagattttgagaatgtctagctgtgggtgtggaagcagctgcaactgtggcagcaactgcggttgcaacaagtactcttttgacttgagttacgttgagaagacaaccacagagactctagttttgggtgttgggcctgtgaaggcccaattggagggtgctgaaatgggtgttgcatctgagaacggtggctgcaactgtg

SEQ ID NO: 128234 - DNA, 271 bp, Glycine max
agacaaagaatagatcctcaatacaatgaggttcaggctcagatggaaacaaatttgtttaaattgtctcttgatgatgttgaaactcctaaaggttccatgttggatcttaaaatttctcaatctaaaattgcacttcccaaaaacacagttggaggaaccattctgcgtagtgatctattggcaaattttttgacagagggcaattttagagcaagtgttgatttgcagcgcactcatcgtattaaaggaatgattaaaatggtggcca

SEQ ID NO: 128235 - DNA, 268 bp, Glycine max
gaaattttgataaaccgcgatcacaggttgccgcaccttaaaaccggaaacaaaagcaatcgttacttgatttcaagaatctctcaatttcttcctacttctttgtgtacggtttcttaagggaaagaaaatcactctctgtgctggccacagacttcgtgaatcattttcttttccactcttagtataatttctgaacactctcctatttgatataggacttcgtgtcagatttaaacttcttctgtctctttctcagttctctgtt

SEQ ID NO: 128236 - DNA, 270 bp, Glycine max
gaaattttgataaaccgcgatcacaggttgccgcaccttaaaaccggaaacaaaagcaatcgttacttgatttcaagaatctctcaatttcttcctacttctttgtgtacggtttcttaagggaaagaaaatcactctctgtgctggccacagacttcgtgaatcattttcttttccactcttagtttaatccatgaacactctcctatttgatataggacttcgtgtcagatttaaacttcttctgtctctttctcagttctctgttta

SEQ ID NO: 128237 - DNA, 278 bp, Glycine max
tgtgttcatgaatatgtcaagccttactttagtggttctaaattgaaaagctttctagctggtcataatatcaccattactgatggtattgacaaaactagtgcaactttgcaatttagaaagttagcagattgtgattttctcaagagaaactttaagcagatgtctaatgttttgtgggtggctcctgaggataaggcgagtttatggtcacaacttcattatgtttcgtgtaataatctggaaatgcaagaagcttatcttgtcaatctcgtaaa

SEQ ID NO: 128238 - DNA, 183 bp, Glycine max
gcatttttaatgagatgctcattagatatagctatgaaaaattactgcgccaggctaaagctccaagtatgtttttacaatctttcaaaaattttgtttctttgtgtgtgtatggtgatgataacttaattagtgttcatgaatatgtcaagccttactttagtggttctaaattgaaaagct

SEQ ID NO: 128239 - DNA, 267 bp, Glycine max
cgcattgattctctgatagcagacattggctcttggggtgccagtgctgtgacaatacatggtaggtcacgtcaacaacgctatagcaagcttgctgactgggactacgtataccagtgtgccaggaaagcccctactacattgccagtagtggggaatggagatgttttttcatttgtagactggaacaaccacagaactgaatgccctgaacttgctacggacatggttgctcgtggtgcactgattaacccttggatatttact

SEQ ID NO: 128240 - DNA, 221 bp, Glycine max
caaaaaatttctagagcgagaaagtgagaggagagagaaagtagctgatcctccatggcctccaccaaggaacgcgaaaactttgtctacaccgccaagctcgccgaacaagccgaacgctatgaagaaatggtggaagcaatgaagaatgtggcgaactgaacgtggaattgacggtcgaggagcggaaccttctgtcggtagggtacaagaccgtggtg

SEQ ID NO: 128241 - DNA, 270 bp, Glycine max
caataagctaatagttgaacttgagaaaagtgttcctacattggttggcattgaatgtcccaaggatgagaaacttcctcgtcgcaaaatttttgacaaacctaagacgcgctgcttcactattctccctatggagtttaatcttgtggttcgtcagaagtttttaaattttgtgaggttcattatgaagaaaagggacaagcttagttgtcaagttggaatcaacccatactccatggaatggactggtttggccaatagattactgag

SEQ ID NO: 128242 - DNA, 269 bp, Glycine max
aaaaggcaaaagaagatttgtttctggggatggtgaagagatgacattgattccgggaaccagtgttgaagaggcttacaacaagctaatagttgaacttgagaaaagtgttcctacattggttggcattgaatgtcccaaggatgagaaacttcctcgtcgcaaaatttttgacaaacctaagacgcgctgcttcactattctccctatggagtttaatcttgtggtccgtcaaaagtttttaaattttgtgaggttcattatgaaga

SEQ ID NO: 128243 - DNA, 272 bp, Glycine max
taggtttttagggtttacaccgagcagccacacctcccgcagcagccatggttctcaaaactgaactatgccgattcagtggtgccaagatctacccaggaaagggcatcagatttgttcgtggtgattctcaggtttttctgtttgcaaactcaaaatgtaagatgtatttccacaatcgcctgaagccttcaaagctcacctggactgcaatgtacagaaagcaacacaaaaaggacattgctcaagaagctgtgaggaagaggagacgt

SEQ ID NO: 128244 - DNA, 271 bp, Glycine max
caaaaactcattcgcgatctcgttctgtacgtgcagccgcagcaagtgatcgaagcgaaaagagagaaattcatcgtcgcagtaatcatgggtaaggttcatggatcacttgcacgtgctggtaaggttagagggcaaaccccgaaggtggccaagcaggataagaagaagaagccacgtggccgcgcccacaagaggatgcagtacaatcgccgattcgtcaccgccgtggtgggattcggcaagaagaggggacccaactcgtctgaga

SEQ ID NO: 128245 - DNA, 291 bp, Glycine max
cccgctcagacgcagaggagcagaagcctaagcctcaaacatggcgagagggttaaagaaacacctgaagaggctcaatgctccaaaacattggatgcttgacaagcttggtggtgcctttgcacccaagccatcatctggaccccacaagtcccgggagtgtcttcctctgatcctcatcctacgaaacaggctaaagtatgctctaacatatagagaagttattgccatcttgatgcagcgccatgttcttgttgatggcaaggttaggaacaagacatactctggttt

SEQ ID NO: 128246 - DNA, 288 bp, Glycine max
agttgccgcaccttaaaaccggaaacaaaagcaatcgttacttgatttcaagaatctctcaatttcttcctacttctttgtgtacgatttcttaagggaaagaaaatcactctctgtgctggccacagacttcgtgaatcattttcttttccactcttagtttattttctgaacactctcctatttgatataggacttcgtgtcagatttaaacttcttctgtttctttctcagttctctgtttaatttcaagttcaagctggtgaaattgattagtcccactttcct

SEQ ID NO: 128247 - DNA, 287 bp, Glycine max
ctggatttccgctcacagttatttgtaatagcatttttaatgagatgctcattagatatagctatgaaaaattactgcgccaggctaaagctccaagtatgtttttacaatccttcaaaaattttgtttctttgtgtgtgtatggtgatgataacttaattagtgttcatgaatatgtcaagccttactttagtggttctaaattgaaaagctttctagctggtcataatatcaccattactgatggtattgacaaaactagtgcactgcaatttgaattagcagat

SEQ ID NO: 128248 - DNA, 288 bp, Glycine max
ggagaaccctagcctctcaccctccctgcgacacgatgcagatcttcgtgaaaaccctaacgggtaagacgatcacccttgaggtggagtcttctgacaccatcgacaacgtgaaggccaagatccaggacaaggaaggcatccctccggaccagcagcgcctcatcttcgccggaaagcagctggaggacggccgcaccctcgccgactacaacatccagaaggagtccaccctccacctcgtcctccgtctccgcggtggcgccaaacgcaaaaaaactacaccaa

SEQ ID NO: 128249 - DNA, 288 bp, Glycine max
ctcatttcaggttagtaatcaggaagcagtagatactgctcgttcttttctcgtaggcaacaacaaatcacaaccattgctgctggcttgtaaaaagcttgtagatttgtctgtttcacgaggctctttggatgacacaagtgttatgctaatcaaattggagcactatatttaaagttaccttagtacaacagaaggggaggtagtgcataaggttttagattattgcagttgagatcgcattgaggttaagattgcgttgcagttcgacttgacagcttggtggtg

SEQ ID NO: 128250 - DNA, 287 bp, Glycine max
attttcacaagaggaatttcttacagcttggtcaactcaggtgcgtcctgcaacaactctgttggctgatgggtgtccatatttgtatgctatggtgcatgatagttcagtgtctacaataccaggtgattttgtcattggtgttaagttgacaaccataaacaatatgtgtgcatatgggctcaatcctggtatttcaggttctcgtcttttgggcaccattcctcagtccatttcacagcaaactgtttggaatcaaatggcacatgagacacattaattttgat

SEQ ID NO: 128251 - DNA, 286 bp, Glycine max
tgggaatgcagcagtcaaaaggagtgattgggcctcattggtacaagtgtttttaacaaacagcaacagtacagagcatttcgatgcatgtaagtggacaaaatcggaaccacattcctgggaattgatcttcccaatagaggtatgtggtcctaataatggttttgaaatgtggagttctgagtgggcaaatcaaacttcatggcacttgagtttccttattgacaatcccaaacagtctacagtttttgatattctcttgggaatccagatttgaattgctggt

SEQ ID NO: 128252 - DNA, 279 bp, Glycine max
aatatcaccattactgatggtattgacaatactagtgcaactttgctatttagaatgttagcagattgtgattttctcaagagatactttaagcagttgtctaatgtgttgtgggtggctcctgaggataaggcgagtttatggtcacaacttcattatgtctcgtgtaataatcgggatttgcggggggcttatcttgtcaatctcgtaaatgtgtcacgtgatttgtatttgcacagtccagaggcagctcgccaattgagaagactctctccgttg

SEQ ID NO: 128253 - DNA, 285 bp, Glycine max
ctcgagccgcatggagtttggaatttctgaagcgtaccggatttcattgtgatatcatttgtgtcactggatggactgccacccctatgcaggatgttcaggttacaattgattggtttatttcctctcaggaatgtgttcccaggacctattgtgttttaaatccacaaaatccttttgtgttaaataggtggatggggaaactgactttcccccagggcacttctcgaagtgttaaaagaatgcctctttctatagggggagactgtgcaagatctattctca

SEQ ID NO: 128254 - DNA, 284 bp, Glycine max
ggcaagcatttgaacaagctgatttggctagctatctcagtcacatgtaattctaccaaattggactgttgttttgcaccctgacaaaacttgttcggtacagcaagagtggctagttaatatgtggctaaatgtaaccttaaatcttactgataaagatatggcagagtagatgaaatgaagtttcgccaatatgcgcacatgtttatggccaagtggagtctcctgtgaacattttcaagcaaatgcttacatcattagcagctatgactccatcatagttg

SEQ ID NO: 128255 - DNA, 167 bp, Glycine max
attttgcaaagggcaattaaccaagccgtgcaagggtatcctattatttggtccccctggaacaggtaagacaatgcttgcaaaggcagttgctaccgaagctggtgcaaatttcatcaacatttccatgtcaagtatcacatctaagtggtttggtgagggtaaaa

SEQ ID NO: 128256 - DNA, 265 bp, Glycine max
caacgatattctgtgttgcgattatgctagttttgatggtttgattaccaagcaagttatgagcaagatggcagaaatgataaacagtctttgtggtggtgatgaaaaattgatgcgtgaaaggacacacctgctgttggcttgttgttcaaggatggcaatttgtaagaaagatgtttggagagttgaatgtggaatcccttctggatttccgctcacagttatttgcaatagcatttttaatgagatgctcattagatatagc

SEQ ID NO: 128257 - DNA, 283 bp, Glycine max
gaaacttttgggattggatagtgcttttcttagagatgcagcgcttatcttctctcaagatgttgatggttggctgcgcaatatcagctggtgtcaggaacaattcctactgaaagcatacatgtctcaagatgatcttattgtcttgcgttccttagttgtcaaaggtgaaagaatgagagagcaaatgctggaaggagaggttaaagtgtctcctagtgtttgtaatcttattgtaaaaggttgtgaagaagcaagtaagttgataaggagtgtctacatg

SEQ ID NO: 128258 - DNA, 284 bp, Glycine max
gaaagatttgttggagggaaatttttcctttgatattaaatctcgctctagattggaaaaagtttcctctacaaaagcacaatttgttagtggaaaaaccttcaaatatgatataattggtgctggttcacattcttcagaagattttcctgaaaaggaagatcaagaaaaacccaaaaagattgataccagattgagacaaagaatagatcctcaatacaatgaggttcaggctcagatggaaacaaatttgtttaaattgtctctatgatgtgaacctaaag

SEQ ID NO: 128259 - DNA, 284 bp, Glycine max
caccaacttccgctacttcctactccaaccactttcttttttcccgcagtcatgggcaaggtcaagatcggaatcaacggatttggaagaattggccgtttggtggccagggtggctctgcagagagacgatgttgaactcgttgccgttaacgatcctttcattaccaccgattacatgacatacatgtttaaatacgacagtgttcacgggcactggaagcatcacgatgtcaccgttaaggatgagaagacccttctcttcggcaagcagcctgttttgga

SEQ ID NO: 128260 - DNA, 271 bp, Glycine max
gaagaagtggagcgtgctttggcaaaattgggccatgcaaaactgactgaaagatctccaccaccaagattagaaggaccagcggcaaagaatctgcagcttcagttcagaacaagaatgccacctcatttgttcactggtggaaaggttgagggagaacaaggatcagcaatccacgttatgttgatggatcctaacacaggcagtgtcgttcaagttggaccagaatctgttgctaaattgaatgtggtggtacttgaaggtgttaatg

SEQ ID NO: 128261 - DNA, 283 bp, Glycine max
gccagtagtcatatgcttgtctcaaagattaagccatgcatgtgtaagtatgaactaattcagactgtgaaactgcgaatggctcattaaatcagttatagtttgtttgatggtatctactactcggataaccgtagtaattctagagctaataggtgcaaaaaccccggttttttggaggggatgcatttattagataaaaggtcaacacaggctctgcctgttgctttgatgattcatgataactcgtcggatcgcacggctgtgccgggagatcattcaa

SEQ ID NO: 128262 - DNA, 280 bp, Glycine max
ctcgagccgcatggagtttggaatttctgaagcgtaccggatttcattgtgatatcattagtgtcactggatggactgccacccctatgcaggatgttcaggttacaattgattggtttatttcctctcaggaatgtgttcccaggccctattgtgttaaacccccacaaaatcctttggtgttaaataggtggatggggaaactgactttcccccagggcacttctcgaagtgttaaaagactgcctctttctatagggggaagggtgcaagatctatt

SEQ ID NO: 128263 - DNA, 287 bp, Glycine max
tgaaagatgtttggagagttgaatgtggaatcccttctggatttccgctcacagttatttgcaatagcatttttaatgagatgctcattagatatagctatgaaaaattactgcgccaggctaaagctccaagtatgtttttacaatctttcaaaaattttgtttctttgtgtgtgtatggtgatgataacttaattagtgttcatgaatatgtcaagccttactttagtggttctaaattgaaaagctttctagctggtcataatcccattacttggtattgacaa

SEQ ID NO: 128264 - DNA, 263 bp, Glycine max
ggaattttagtggacaaaactggagattggatcacacttatacaaaattctccaattagtaacttgttgagagttgctgcttggaagaaaggctgtttaatggttaagattgtgatgtctgggaatgcagcagtcaaaaggagtgattgggcctcattggtacaagtgtttttaacaaacagcaacagtacagagcattttgatgcatgtaagtggacaaaatcggaaccacattcctgggaattgatcttcccaatagaggt

SEQ ID NO: 128265 - DNA, 285 bp, Glycine max
gaactcaaggagatggctctgggaagaggcagtgcagtggttctactactttgcttcttgctgcttcactctcagatggctcgtgctgccacctacacagttggagattctgggggttggacctttaacactgttgcctggcccaaaggaaagctctttcgggctggtgacacacttgctttcaattatagccctgggactcacaatgtggtggccgtgaacaaggctggatatgatagctgcaagactccaagaggagccaaagataagtcaggcggatcagat

SEQ ID NO: 128266 - DNA, 283 bp, Glycine max
gaaaagatctcgcaatggttaaagttaatgtagcatgtgctgctgttggcttgacatcaagctatactccgactccattgttggaatctggtttgcaaaaagacagagggttaattgtggagtattttggaaggatgtcttacgttgctcataacgttaatcagccccaagagaaagatttgttggaaggaaatttttcctttgatattaaatctcgctctagattggaaaaagtttcctctacaaaagcacaatttgttagtgaaacttcaatatgtatagt

SEQ ID NO: 128267 - DNA, 272 bp, Glycine max
gacagagggcaattttagagcaagtgttgatttgcagcgcactcatcgtattaaaggaatgattaaaatggtggccacagttggtattcctgagaatacaggcatagcattggcctgtgctatgaatagttcttttagggggcgtgccagttctgatatttacaccatctgctctcaagactgtgaattatggaatcctgcttgcacaaaagcaatgaccatgtcatttaatccaaacccgtgttctgatgcagatttgaatctgaagcgta

SEQ ID NO: 128268 - DNA, 282 bp, Glycine max
atttacaccatctgctctcaagactgtgaattatggaatcctgcttgcacaaaagcaatgactatgtcatttaatccaaacccgtgttctgatgcatggagtttggaatttctgaagcgtaccggatttcattgtgatatcatttgtgtcactggatggactgccactccaatgcaggatgttcaggttacaattgattggtttatttcctctcaggaatgtgttcccaggacttattgtgttttaaatccacaaaatccttgtgttgaatagtgatgggga

SEQ ID NO: 128269 - DNA, 283 bp, Glycine max
aaacatgcgaaccgccaataacatcactgacaaatcagtgattcctgtcggcgatggttttctcaagttcgatttctttgaagatggcatggcagatgatgatgatggtcccaagaagataaatctcggtgatttcagtgcacagcttgagcttttcgggaagcaatacgtttcccaaatggtcaagaagcatgctgaagaaaaccacccattttcttgcatcataaacaacccttttgttccatgggtttgtgacgtagctcgacatggatcctctgccatg

SEQ ID NO: 128270 - DNA, 281 bp, Glycine max
aattaattgttaaaggaagcgaaagatagattgatcaaattatcgcagaggaattgaagatgggttggagagggatactgggttttgaatatggtatagttcaggccccattaggccctgatatctctgctcccccacttgttgctgcagttgccaatgctggtgctctgggacttcttagggcccctgattgggaatcgccggattacttgagggaactcataaagacgactaggaccttaactgataaacccttcgggggcgtcgtttactttcctttt

SEQ ID NO: 128271 - DNA, 259 bp, Glycine max
gtttattatcgttgcaatccaatgccccatcatagaattggatccaagtataaagtgtatccaacttatgattttgcttgtccatatgttgattctatagaaggaatcacgcatgcccttcgatctagtgaataccatgatcgcaatgcccagtattactggattcaagaggacatgggtcttagaaaagttcttatctacgaatttagccggttgaatatggtctacactcttctgagcaaacgaaagcttttgtggt

SEQ ID NO: 128272 - DNA, 270 bp, Glycine max
gaaagatttgttggaaggaaatttttcctttgatattaaatctcgctctagattggaaaaagtttcctctacaaaagcacaatttgttagtggaaaaaccttcaaatatgatatagttggtgctggttcacattcttcagaagatttttctgaaaaggaagatcaagaaaaacccaaaaagattgatgccagattgagacaaagattagatcctcaatacaatgaggttcaggctcagatggaaacaatttgtataaattgtctgatgat

SEQ ID NO: 128273 - DNA, 276 bp, Glycine max
aaatgataaacagtctttgtggtggtgatgaaaaattgatgcgtgaaaggacacacctgctgttggcttgttgttcaagaatggcaatttgtaagaaagatgtttggagagttgaatgtggaatcccttctggatttccgctcacagttatttgtaatagcatttttaatgagatgctcattagatatagctatgaaaaattactgcgccaggctaaagctccaagtatgtttttacaatccttcaaaaattttgtttcttgcgggtatggaaaga

SEQ ID NO: 128274 - DNA, 286 bp, Glycine max
gaatctcaagattctaagagagattttgctgctctttgaagaagggtgtttgcttgattttggagatgtcgctgctctcagatctcatcaaccttaacctctcagacactactgagaaggtgatcgcagagtacatatggatcggtggatcaggaatggacctgaggagcaaagcaaggactctcccaggaccagttagcgacccttcaaagcttcccaagtggaactatgatggttccagcacaggccaagctcctggagaagcatgaagtgattatatcccaca

SEQ ID NO: 128275 - DNA, 267 bp, Glycine max
tccctatggagtttaatcttgtggtccgtcaaaagtttttaaatttggtgaggttcattatgaagaagagggacaagcttagttgtcaagttggaatcaacccatactccatggaatggactggtttggccaatagattactgagtaatggcaacgatattctgtgtagcgattatgctagttctgatggtttgattaccaagcaagttatgagcaagatggcatatatgatacacagtctttgtggtggtgatgaaaaatagcgtg

SEQ ID NO: 128276 - DNA, 276 bp, Glycine max
gacggcagatacaaattctggactaaacacgagaaaaatcttgctttgacagaagaggaaaagatggaagtgattagaaatagaggcattcctgctgatgttcttgcaaagcgagctcatgaatttgaaaaacatgttgctcatgaaagcctcaaggatcaaattcctgctgttgacaagttgtattctactaaggttaataagtttgcaaaaattatgaaccttagacaaagtgttgttggtgatcttacacttcttacgtggaagtgatagggt

SEQ ID NO: 128277 - DNA, 281 bp, Glycine max
ggaaaatcatgtagtccaaatacccctaatggcacaggaggaaattctgtcttctagtgcaagtgatttcagaactgcaatggtgagtaaaaatagcaagcctcaagctactgcaatgcttgtgggagctatagaaattatcattgatagcatcgcaagtcctgactgcagcatagttggtgcaatgcttgtggttgatacttatcataccaatccggaaaatgcagttcgcagtatttgtgtggcgcctgtcagaggcggagccatcgagggtacatttc

SEQ ID NO: 128278 - DNA, 277 bp, Glycine max
gaaattctttctaaggttgcacaagatatggttgaggaatggtttgattgtgttgatgaggaggattcctttgaggaagtttctttaagtgcagcactcaatggtgttgagggtttggactatatggaaagaattcctcttgctacatctgaggtttcgcctcaggtgctttcacgcaaaaatggtgaaaaaggcaaaaggagatttgtttctggggatggtgaagagatgacattgattccgggaaccagtgttgatagttacaaagctattgttg

SEQ ID NO: 128279 - DNA, 278 bp, Glycine max
aaagcattgaattcaaaaactaagttcatttcttgtgctttgctttattcctcaaaaccaaacatgtcgaacacatgcggcaactgtgactgcgctgacaagactaactgcaccaagggaaacagctatggtgttatagtagagactgagaagagctacatcgagactgttgacatggatgttccagcagctgagcatgatgggaagtgcaagtgtggcactaactgcacttgcacggactgcacttgtggccattaaggtagatgaaatgattgcca

SEQ ID NO: 128280 - DNA, 276 bp, Glycine max
gtgtaatttatgctaaaaggggtagtggcaaggcttggatccaaccactgctccatgtcaatgataagtttgtgtggccaaaccatgcaaaacaagtttctgtctcttccattgacaacctagaaatggccactttctgccaaccagttgagaaggccaatttaagccactcttttgctgaagggctggctcacagtgttggtttcagtaatcagccactgagagtatacaacacgatgaaatatacggcaatagcatgtggatctgagttcataa

SEQ ID NO: 128281 - DNA, 277 bp, Glycine max
gaaaaacccaaaaagattgataccagattgagacaaagaatagatcctcaatacaatgaggttcaggctcagatggaaacaaatttgtttaaattgtctcttgatgatgttgaaactcctaaaggttccatgttggatcttagaatttctcaatctagaattgcacttcccagaaacacagttggaggaatcattctgcgtagtgatctattggcaaattttttgacagagggcaattttagagcaagtgttgatttgcacatcatcgttaagaatg

SEQ ID NO: 128282 - DNA, 278 bp, Glycine max
gaaaaacccaaaaagattgataccagattgagacaaagaatagatcctcaatacaatgaggttcaggctcagatggaaacaaatttgtttaaattgtctcttgatgatgttgaaactcctaaaggttccatgttggatcttaaaatttctcaatctaaaattgcacttcccaaaaacacagttggaggaaccattctgcgtagtgatctattggcaaattttttgacagagggcaattttagagcaagtgttgatttgacgatcatcgataaggaatg

SEQ ID NO: 128283 - DNA, 278 bp, Glycine max
atggaatcctgcttgcacaaaagcaatgactatgtcatttaatccaaacccgtgttctgatgcatggagtttggaatttctgaagcgtaccggatttcattgtgatatcatttgtgtcactggatggactgccactccaatgcaggatgttcaggttacaattgattggtttatttcctctcaggaatgtgttcccaggacttattgtgttttaaatccacaaaatccttttgtgttgaataggtggatggggaaacgcttccccatggattcccgaa

SEQ ID NO: 128284 - DNA, 259 bp, Glycine max
atgtggaatcccttctggatttccgctcacagttatttgcaatagcatttttaatgagatgctcattagatatagctatgaaaaattactgcgccaggctaaagctccaagtatgtttttacaatctttcaaaaattttgtttctttgtgtgtgtatggtgatgataacttaattagtgttcatgaatatgtcaagccttactttagtggttctaaattgaaaagctttctagctggtcataatatcaccattactgtg

SEQ ID NO: 128285 - DNA, 273 bp, Glycine max
gaaattctttctaaggttgcacaagatatggttgaggaatggtttgattgtgttgatgaggaggattcctttgaggaagtttctttgagtgcactcaatggtgttgagggtttggactatatggaaagaattcctcttgccacatctgagggttttccccatgtgctttcacgcaaaaatggtgaaaaaggcaaaaggagatttgtttctggggatggtgaagagatgacattgattccggaaccagtgttgaagagtacataactgtattga

SEQ ID NO: 128286 - DNA, 273 bp, Glycine max
catgatagttcagtgtctacaataccaggtgattttgtcattggtgttaagttgacaaccataaacaatatgtgtgcatatgggctcaatcctggtatttcaggttctcgtcttttgggcaccattcctcagtccatttcacagcaaactgtttggaataaaatggcaacagtgagaacaccattgaattttgattctagcaagcagagcttttgtcaattttctattgaccttctcggtggaggaattttagtggaaactggaattgacaca

SEQ ID NO: 128287 - DNA, 278 bp, Glycine max
cttggaactttgttactctcacacatgtctcgctccgtgcctttggtttcaaccatttttgtcttgcttctgcttctggtggccactgagatgatggggccaacaatggtggcagaagcaagaacttgtgagtctcagagccaccgtttcaaggggccatgtttgagtgacaccaactgtggctctgtttgccgaaccgaacgtttcactggaggacactgccgtggcttccgtcgcagatgcttctgcaccaaactgtaattttaagattaattaag

SEQ ID NO: 128288 - DNA, 263 bp, Glycine max
gaaactttaggcagatgtctaatgttttgtgggtggctcctgaggacaaggcgagtttatggtcacaacttcattatgtttcatgtaataatctggaaatgcaagaagcttatcttgtcaatctcgtaaatgtgttacgagaattgtatttgcacagtccagaggaagctcgccaattgagaaggaaagctctctctcgtattgaatggctgcaaaaagctgatgtgcctaccatagcgcagattgaagagttcctcgatgca

SEQ ID NO: 128289 - DNA, 161 bp, Glycine max
aaaaaacccttctttctttcaggttcattacttgatcagtgtcaaaagggtagttgcaaattgcaatggctaagcatgatgttgagggtggttccttctcagcaaaggactaccatgatcctcctccagcacctttgattgatgctgaggaactcacacag

SEQ ID NO: 128290 - DNA, 258 bp, Glycine max
ggaaatttggctgatgacaccatcaattttgaggcttttccccacaagctggtgcagtttggagagattcaggaaaaagttgtattgaaattttcacaagaggaatttcttacagcttggtcaactcaggtgcgtcctgcaacaactctgttggctgatgggtgtccatatttgtatgctatggtgcatgatagttcagtgtctacaataccaggtgattttgtcattggtgttaagttgacaaccataaacaatatg

SEQ ID NO: 128291 - DNA, 276 bp, Glycine max
ctctacgccgcacgccgaaaccatggccggaaaaggagagggtcctgctatcggaatcgatctcggaaccacctactcttgcgtcggtgtgtggcaacatgaccgcgttgaaatcatcgccaacgaccaagggaacagaaccacgccgtcttacgtcggattcactgacaccgagcgtctcatcggtgatgcggccaagaatcaagtcgccatgaaccccatcaacaccgtcttcgatgccaagaggttgattggtcgaatcaggacctcgttcag

SEQ ID NO: 128292 - DNA, 278 bp, Glycine max
gaagatgatggcaagcacggccatctccctcgtcttcgccgcgctcttcctcttctcctccgtccactctttctacctccctggtgtcgctcctcgcgatttccaaattggtgaccccctctttgtcaaagtgaacaagttatcatctaccaagactcaacttccatatgactactacttcttgaagtattgcaaacccaaaacgatattgaacaatgcagaaaatttgggagaggttcttagaggtgatcgtattggatcagtattcattcatatga

SEQ ID NO: 128293 - DNA, 273 bp, Glycine max
gctcaatcctggtatttcaggttctcgtcttttgggcaccattcctcagtctatttcacagcaaactgtttggaatcaaatggcaacagtgagaacaccattgaattttgattctagcaagcagagcttttgtcaattttctattgaccttctcggtggaggaattttagtggacaaaactggagattggatcacacttatacaaaattctccaattagtaacttgttgagagttgctgcttggaagaaaggctgtatggttaaatggatgtc

SEQ ID NO: 128294 - DNA, 273 bp, Glycine max
aatggttaaagttaatgtagcatgtgctgctgttggcttgacatcaagttacactccaactccattgttggaatctggtttgcaaaaagacagagggttaattgtggagtattttggaaggatgtcttacgttgctcacaacgttaatcagccccaagagaaagatttgttggagggaaatttttcctttgatattaaatctcgctctagattggaaaaagtttcctctacaaaagcacaatttgttagtggaaactcaaatagttattggtg

SEQ ID NO: 128295 - DNA, 271 bp, Glycine max
atgaatagttcttttagggggcgtgccagctctgatatttacaccatctgctctcaagactgtgaattatggaatcctgcttgcacaaaagcaatgactatgtcatttaatccaaacccgtgttctgatgcatggagtttggaatttctgaagcgtaccggatttcattgtgatatcatttgtgtcactggatggactgccactccaatgcaggatgttcaggttacaattgattggtttatttcctctcaggtattcccagactatgtgt

SEQ ID NO: 128296 - DNA, 273 bp, Glycine max
tggtgagtaaaaatagcaagcctcaagctactgcaatgcatgtgggagctatagaaattatcattgatagtttcgcaagtcctgactgcaacatagttggtgcaatgcttttggttgatacttatcacaccaatcctgaaaatgcagttcgtagtatttttgttgcgccgttcagaggcggaaggcccattcgggtggttacatttccgaataccatcgtgcagattgaaccagacatgaactcaaggtttcagctgagtacctacaatggtg

SEQ ID NO: 128297 - DNA, 274 bp, Glycine max
atccatctcttgtttcttgctttctttcttcaccatgtcacttgctgggaaaatcaccactgaaatcggggttcatgcaaccgctacaaagtggttcaacctcttcgcaacacaactccatcatgttcaaaacctaactgatagagtgcatggaaccaagctgcatcaaggtgaagactggcatcacaacgagacagtcaagcactggacttataccatagatggtaaggttacaacatgtctggagagtattgacattgatgacaacaaaaca

SEQ ID NO: 128298 - DNA, 272 bp, Glycine max
ggcctgtgctatgaatagttctttcagggggcgtgccagttctgatatttacaccatctgctctcaagactgtgaattatggaatcctgcttgcacaaaagcaatgactatgtcatttaatccaaacccgtgttctgatgcatggagtttggaatttctgaagcgtaccggatttcattgtgatatcatttgtgtcactggatggactgccacccctatgcaggatgttcaggttacaattgattggtttatttcccaggaatttcccagga

SEQ ID NO: 128299 - DNA, 268 bp, Glycine max
ctcgatccgcaaaaaccctaggtagagagctcttcctccctttctcacagcaatggccgccgcagcacgccctctcgtcaccgtgcaggccctcgacggtgacatggcaaccgaagcctccacacaccgtcccatccctgacgtcatgaaggcctctatccgccccgacatcgtcaatgtcggacactcgaatttctccaagaacatccgccagccatacgccgtcagtcgtcacgctggtcaccagacctccgcgacctggggacgg

SEQ ID NO: 128300 - DNA, 274 bp, Glycine max
aaacaaaaaaacaattcaaaaacaaacatatgatggtgaagccgagtagcgaaaagccagaggagcatagggattccaagtactacaaaggggtccgaaagagaaaatggggcaaatgggtatccgaaataagactacccaacagccgtcagaggatttggttgggatccttcgacacccccgagaaggccgcgcgtgccttcgacgccgcaatgttctgcttacgtggccgcaacgccaagttcaatttcccgcacccaccgaacgccggcgg

SEQ ID NO: 128301 - DNA, 270 bp, Glycine max
cccccacattaactcacccaacccctctttctaaaaggcctcaaggatacactccggacttaattacgttattttgttagggtcaccgtttcgagatattctaaacttgtactgaaaaatatggagggaaaagaagaggacgtaagagttggagccaacaggtacggagagaggcagccattagggaccgctgctcaggctaaagactacagagagccaccgtcggcgcctctcttcgaaccgggagagttgttcgggcttctaaggctg

SEQ ID NO: 128302 - DNA, 263 bp, Glycine max
gagaaaagtgttcctacattggttggtattgaatgtcccaaggatgagaaacttcctcgtcgcaaaatttttgacaaacctaagacgcgctgcttcactattctccctatggagtttaatcttgtggtccgtcagaagtttttaaattttgtgaggttcattatgaagaaaagggacaagcttagttgtcaagttggaatcaacccatactccatggaatggactggtttggccaatagattactgagtaagggcagtatctg

SEQ ID NO: 128303 - DNA, 277 bp, Glycine max
cagagcatttcgatgcatgtaagtggacaaaatcggaaccacattcctgggaattgatcttcccaatagaggtatgtggtcctaataatggttttgaaatgtggagttctgagtgggcaaatcaaacttcatggcacttgagtttccttattgacaatcccaaacagtctacagtttttgatattctcttgggaatttctcaagattttgaaattgctggtaatactcttatgccagctttttctgttccacaggtcgccagatatcgaaaatgcgg

SEQ ID NO: 128304 - DNA, 278 bp, Glycine max
ctctgcgagatcttcattcgccgattttaaaagatgagtaagcttcagagtgatgctttgcgtgaagccatttcaggaatcatggccgattccaaggagaagaatcgcaaatttgtggagaccatcgaactccaaatcgggttgaaaaactacgatccacagaaggacaagcgtttcagtggctctgtcaagctgccccacatccctcgccccaagatgaaaatttgcatgcttggtgatgctcagcatgttgaaggcgagagataggctggactggt

SEQ ID NO: 128305 - DNA, 251 bp, Glycine max
ggattgtaacatgagttctctcaagttgcaaaaaaggctagcagccgatgtgctgaaatgcggtcgcaaaaaggtctggttggatccaaatgaaaccaacgaaattggaaacaccaattcacgtcaaaatattcgtaaattggtaaaagatggtttgatcatcaagaaaccagttgctgtacacagcagagctagagtacgcaaaaatactgaggcaagacgtaggggtcgtcacagtggttttggaaaaa

SEQ ID NO: 128306 - DNA, 275 bp, Glycine max
aatgcctctttctatagggggaggagctggtgcaaagaatgctattctcatgaatatgccaaatgctgttctttcaatgtggagatattttgttggagatctcgtctttgaagtttctaagatgacttctccctacattaaatgtacagtctctttcttcatagcatttggaaatttggctgatgacaccatcaattttgaggcttttccccacaagctggtgcagtttggagagattcaggaaaaagttgtattgaatttcaagagaattctta

SEQ ID NO: 128307 - DNA, 254 bp, Glycine max
atctataagtgcaggacttaatggtgttgatggtttggactatatggaaagaattcctgttgccacatgtgaggagtatcctcatgtgctttcacgcaaaaattgtgaaagaggcagtagaggatttgtttctggggatggtgaagagatgacattgattccgggaaccagtgttgaggaggcttacaacaagctaatagttgaccttgataaaagtgttcctacattggttggcattgaatgtcccaaggatg

SEQ ID NO: 128308 - DNA, 253 bp, Glycine max
gagatgacattgattccgggaaccagtgttgaagaggcttacaacaagctaatagttgaacttgagaaaagtgttcctacattggttggcattgaatgtcccaaggatgagaaacttcctcgtcgcaaaatttttgacaaacctaagacgcgctgcttcactattctccctatggagtttaatcttgtggtccgtcaaaagtttttaaattttgtgaggttcattatgaagaaaagggacaagcttagttgtc

SEQ ID NO: 128309 - DNA, 259 bp, Glycine max
  unsure (1)..(259): unsure at all n locations
attggaggcaatatatcctagagatccaggtctcgatgcatcatttcaaaagtggggtcacacccaagttgctgtcggagctagggttgcttgttaccatgatgaaatcagactttcccttcctgctatgtggacaccaacgcaccaccttctatttactctatgtcatgttgatctgcaaacaaaattgcaagcccanagccagtggtaattggatatgcagcacttcctttatcttcccatgcgcagctgcgtcata

SEQ ID NO: 128310 - DNA, 266 bp, Glycine max
ataacactccctcttcctctctattcgcctccctttaactccacggtgcagatccgaggagttaccccttagctttttctctttccttattctatttcaaacttccaccagtgatggcaggtttggctccagaaggaacacaatttgatggtcgccaatatgatgctaagatgagtgaattgctttccactgatgggcaagaattcttcacctcatatgacgaagtctatgacagctttgatgccatgggattcaagatctcgcga

SEQ ID NO: 128311 - DNA, 273 bp, Glycine max
gagaaacatggcttccttaagctccttagtgctgctccttgcagctctaattctatcccctcaagttcttgcaaactatgagaatcccccagtgtacaagcctcccactgagaaaccaccagtttataagcccccagttgagaagcctcctgtttacaaacctccagttgagaagcctccagtttataagcctccagtagagaagccaccagtgtacaagccaccagttgagaagccgcagtgtacaagccgcagttgaaccccagtgtacaa

SEQ ID NO: 128312 - DNA, 260 bp, Glycine max
attctcttgggaatttctcaagattttgagattgctggtaatactcttatgccagctttttctgttccacaggctactgccagatcttctgaaaatgcggaatcctctgcatgatctggaatttgtgttttcttttgcttgttcgtttgtttaattcaataaaggaaattaggcatgaccctcttgttgagtatgctctgcctatttgaaaatttccacacctcttttaattatcgtaatgatgtgtgaagttgttattt

SEQ ID NO: 128313 - DNA, 143 bp, Glycine max
gaaattttgataaaccgcgatcacaggttgccgcaccttaaaaccggaaacaaaagcaatcgttacttgatttcaagaatctctcaatttcttcctacttctgtgtgtacgatttcttaaggggaagaaaatcactctctgtg

SEQ ID NO: 128314 - DNA, 173 bp, Glycine max
aaaatgcggaatcctctgcatgatctggaatttgtgtgttctttcgtttgttcgtttgtttaattcaataaaggaaattagacatgaccctcttgttgagtatgctctgtctatttgaaaatttccacacctcttttaattgtcgtaatgatgtgtgaagtgtgtgttatttt

SEQ ID NO: 128315 - DNA, 272 bp, Glycine max
caccattactgatggtattgacaaaactagtgcaactttgcaatttagaaagttagcagattgtgattttcttaagagaaactttaagcagatgtctaatgttttgtgggtggctcctgaggacaaggcaagtttatggtcacaacttcattatgtttcgtgtaataatctggaaatgcaagaagcttatcttgtcaatctcgtaaatgtgttacgagaattgtatctgcacagtccagaggaagctcgccactgaaggaaactcctctcgt

SEQ ID NO: 128316 - DNA, 268 bp, Glycine max
gtcaattaccttcagaagctgtcgttgtaaatgttacatgtggtagtggacgtggtggtttacccaccactgcttggattagttctgcagttaacaatcgctcctcagatatcaacaaaaggattcgcacagcacttgggagaggtaagaaaattgtttttcttactagagttgaatccttttccagtagctttactggctgttctttttggcgttaagaatgaaattctgagttctaacgccactaaccctagctgcggattctgag

SEQ ID NO: 128317 - DNA, 270 bp, Glycine max
gttaatgtagcatgtgctgctgttggcttgacatcaagctatactccgactccattgttggaatctggtttgcaaaaagacagagggttaattgtggagtattttggaaggatgtcttacgttgctcataacgttaatcagccccaagagaaagatgtgttggaaggaaatttttcctttgatattaaatctcgctctagattggaaaaagtttcctctacaaaagcacaatttgttagtggaaaaaccttaaaatgtatagtggtgctg

SEQ ID NO: 128318 - DNA, 265 bp, Glycine max
attcctcagtccatttcacagcaaactgtttggaatctaatggcaacagtgagaacaccattgaattttgattctagcaagcagagcttttgtcaattttctattgaccttctcggtggaggaattttagtggacaaaactggagattggatcacacttatacaaaattctccaattagtaacttgttgagagttgctgcttggaagaaaggctgtttaatggttaagattgtgatgtctgggaatgcagagtcaagatgatggg

SEQ ID NO: 128319 - DNA, 268 bp, Glycine max
tagtggacgtggtggtttacccaccactgcttggattagttctgcagttaacaatcgctcctcagatatcaacaaaaagattcgcacagcacttgggaaaggtaagaaaattgtttttcttactagagttgatccttttccagtagctttactggctgttctttttggcgttaagaatgaaattctgagttctaacgccactaaccctatgctgacgcgacttcttgagaactgtaagagtctcaaatactggtatgatgccttttgc

SEQ ID NO: 128320 - DNA, 271 bp, Glycine max
caacgatattctgtgttgcgattatgctagttttgatggtttgattacctagcaagttatgagcaagatggcagaaatgataaacagtctttgtggtggtgatgaaaaattgatgcgtgaaaggacacacctgctgttggcttgttgttcaaggatggcaatttgtaagaaagatgtttggagagttgaatgtggaatcccttctggatttccgctcacagttatttgcaatagcatttttaatgagatctcataatatagctatgaaaaa

SEQ ID NO: 128321 - DNA, 272 bp, Glycine max
gttcttttagggggcgtgccagttctgatatttacaccatctgctctcaagactgtgaattatggaatcctgcttgcacaaaagcaatgaccatgtcatttaatccaaacccgtgttctgatgcatggagtttggaatttctgaagcgtaccggatttcattgtgatatcatttgtgtcactggatggactgctaccccaatgcaggatgttcaggttacaattgattggtttatttcctctcaggaatgtgtcccacctatgtgtttaaat

SEQ ID NO: 128322 - DNA, 142 bp, Glycine max
ccaagatgaatcatggagccatgaggttgccatatcagtgaaaccactgaaagtgcaaaactggattcttcctgaaatgcctgggcttataactgattttttgatttctcttgatgatcggtttctgtactttgtaaactgg

SEQ ID NO: 128323 - DNA, 258 bp, Glycine max
ttcagaagatttttctgaaaaggaagatcaagaaaaacccaaaaagattgatgccagattgagacaaagaatagatcctcaatacaatgaggttcaggctcagatggaaacaaatttgtttaaattgtctcttgatgatgttgaaactcctaaaggttccatgttggatcttaaaatttctcaatctaaaattgcacttcccaaaaacacagttggaggaaccattctgcgtagtgacctattggcaaatttttgaca

SEQ ID NO: 128324 - DNA, 271 bp, Glycine max
cacaacttcattatgtttcatgtaataatctggaaatgcaagaagcttatcttgtcaatctcgtaaatgtgttacgagaattgtatttgcacagtccagaggaagctcgccaattgagaaggaaagctctctctcgtattgaatggctgcaaaaagctgatgtgcctaccatagcacagattgaagagttcacattcgatgcagaggatgatgaatgctcctgattcaaatgataatatcgatctactgttggcatattgtgggttacaag

SEQ ID NO: 128325 - DNA, 269 bp, Glycine max
ccaagatgaatcatggagccatgaggttgccatatcagtgaaaccactgaaagtgcaaaactggattcttcctgaaatgcctgggcttataactgattttttgatttctcttgatgatcggtttctgtactttgtaaactggcttcatggggatatcagacagtataacattgagaaccttaaaaatcctaaactgaccggacaagtatgggttggtggacttatccagaaaggaagccctgtagtagctaaacttatgtgaacttggc

SEQ ID NO: 128326 - DNA, 268 bp, Glycine max
ctcgagccggtgaattaaaatatattcaattttgcgtttctctgcctaaaaggattgaaagatgggtcaagcattcggttgctaccaagtcgatcagtcaaatgtggctatcaaggagcattttggaaaatttgatgatgtcctagagcctggatgtcactgcctgccttggtgtcttgggtaccagattgctggtagtctgtcgctgcgagtgcagcaacttgatgttcgatgtgagacgaaaaccaggacaatcttgcatgtggtt

SEQ ID NO: 128327 - DNA, 266 bp, Glycine max
ggatttcattgtgatatcatttgtgtcactggatggactgccactccaatgcaggatgttcaggttacaattgattggtttatttcctctcaggaatgtgttcccaggacttattgtgttttaaatccacaaaatccttttgtgttgaataggtggatggggaaactgactttcccccagggcacttcccgaagtgttaagagaatgcctctttctatagggggaggagctggtgcaaagaatgctatctcaaatatgcaatgctg

SEQ ID NO: 128328 - DNA, 264 bp, Glycine max
atatgcttcattgataccatacgttgagccagttgtgcaagctcaaagtgctgaagtttactttgacttcttccctgtggaggttgatagtcaagagggagttgctcacattggtgaattgaaatctggtgtctatgttccactgcctacaaaaactaatttggtggaaactcccaaggaatggcaactggatctaccttgtgacaaaattcctagtgtcttgactacaactgatgagagattggtagcacgacatgaggtatg

SEQ ID NO: 128329 - DNA, 265 bp, Glycine max
aatggcaactggatctaccttgtgacaaaattcctagtgtcttgactacaactgatgagagattggtaggcacagaacatgagggatatgatccttttcttggtggaattcaaaaatatgccactcccatgatgcccctagatgaagaaattctttctaaagttgcacaagatatggttgaggaatggtttgattgtgttgatgaggaggattcctttgaggaagtttctttaagtgcagcacttatgggtgaggtttgactata

SEQ ID NO: 128330 - DNA, 227 bp, Glycine max
gttgaaactcctaaaggttccatgttggatcttaaaatttctcaatctaaaattgcacttcccaaaaacacagttggaggaaccattctgcgtagtgacctattggcaaattttttgacagagggcaattttagagcaagtgttgatttgcagcgcactcatcgtatcaaaggaatgattaaaatggtggccacagttggtattcctgagaatacaggtatagcatt

SEQ ID NO: 128331 - DNA, 264 bp, Glycine max
ggcacaggaggaaattctgtcttctagtgcaagtgatttcagaactgcaatggtgagtaaaaatagcaagcctcaagctactgcaatgcatgtgggagctatagaaattatcattgatagtttcgcaagtcctgactgcaacatagttggtgcaatgcttttggttgatacttatcataccaatcctgaaaatgcagttcgtagtatttttgttgcgcctttcagaggcggaaggcccattcgggtggttcattcgatacatcg

SEQ ID NO: 128332 - DNA, 274 bp, Glycine max
tgtttttgttcttcgatggcggcaacctcaacatcactggcttctcaactctacattggcctgcgccgcccctgcctcaagctcgattctttcaattctcaatctttctctctcttcgaccctaatcttcgcctatccctctctccacccaaaccctcacgcgccgtcatcgccatggccggcaccgggaagttctttgttggtggcaactggaagtgtaacggaacaaaagactcaatcagcaagcttgttgctgcttgacatgcaaatggag

SEQ ID NO: 128333 - DNA, 249 bp, Glycine max
tgggctcaatcctggtatttcaggttctcgtcttttgggcaccattcctcagtctatttcacagcaaactgtttggaatcaaatggcaacagtgagaacaccattgaattttgattctagcaagcagagcttttgtcaattttctattgaccttctcggtggaggaattttagtggacaaaactggagattggatcacacttatacaaaattctccaattagtaacttgttgagagttgctgcttggaa

SEQ ID NO: 128334 - DNA, 262 bp, Glycine max
atagcaatgactatgtcatttaatccaaacccgtgttctgatgcatggagtttggaatttctgaagcgtactggatttcattgtgatatcatttgtgtcactggatggactgccaccccaatgcaggatgttcaggttacagttgattggtttatttcctctcaggaatgtattcccatgacctattgtgtattaaatccacaaaatccttttgtgttaaataggtggatggggaaactgactttccccaagattccgaatg

SEQ ID NO: 128335 - DNA, 264 bp, Glycine max
ggcattcctgctgatgttcttgcaaagcgagctcatgaatttgaaaaacatgttgctcatgaaagcctcaaggatcaaattcctgctgttgacaagttgtattctactaaggttaataagtttgcaaaaattatgaaccttagacaaagtgttgttggtgatcttaaacttcttactgatgggaagttgtatgagggtaagcatattcctgtatctaatattagtgcaggggaaaatcatgtagtcaatacctatggacaggag

SEQ ID NO: 128336 - DNA, 266 bp, Glycine max
gagacgcagccatggggcggagacctgcgaggtgttataggcaaattaagaacaagccataccccaagtcacgtttctgccgtggtgttcctgatcccaagatcaggatttatgatgttggtatgaagaagaagggtgttgatgagtttcctttctgtgtccatctggttagttgggagaaggaaaatgtttcaagtgaggccctggaagctgctcgcattgcttgcaacaagtacatggccaaatttctgaagatcttccacttg

SEQ ID NO: 128337 - DNA, 253 bp, Glycine max
ctttcaatgtggagatattttgttggagatctcgtctttgaagtattctaagatgacttctccctacattaaatgtacagtctctttcttcatagcatttggaaatttggctgatgacaccatcaattttgaggcttttccccacaagctggtgcagtttggagagattcaggaaaaagttgtattgaaattttcacaagaggaatttcttacagcttggtcaactcaggtgcgtcctgcaacaactctgtgg

SEQ ID NO: 128338 - DNA, 274 bp, Glycine max
ctcaagagaaactttaggcagatgtctaatgttttgtgggtggctcctgaggacaaggcgagtttatggtcacaacttcattatgtttcatgtaataatctggaaatgcaagaagcttatcttgtcaatctcgtaaatgtgttacgagaattgtatttgcacagtccagaggaagctcgccaattgagaaggaaagctctctctcgtattgaatggctgcaaaaagctgatgtgcctaccatagcacagattgaggatcatcgtgcaggggatg

SEQ ID NO: 128339 - DNA, 266 bp, Glycine max
aaattctctgtctctctctctctctctcgatcaatcatggctttgcccaatcagcaaaccgtcgattaccctagtttcaaactcgtcatcgtcggtgacggtggtacaggaaagacaacgttcgtgaaaaggcatcttaccggtgaatttgagaagaaatacgaaccgaccattggagtggaggttcacccattggatttcttcacaaactgtggaaagattcgcttctactgttgggatactgccgacaagagttggtgcctcag

SEQ ID NO: 128340 - DNA, 267 bp, Glycine max
ctcgagccgatgaaaaattgatgcgtgaaaggacacacctgctgttggcttgttgttcaagaatggcaatttgtaagaaagatgtttggagagttgaatgtggaatcccttctggatttccgctcacagttatttgtaatagcatttttaatgagatgctcattagatatagctatgaaaaattactgcgccaggctaaagctccaagtatgtttttacaatccttcaaaaattttgtttctttgtgtgtgagtgatgatacttaat

SEQ ID NO: 128341 - DNA, 251 bp, Glycine max
cctcgatccgattcggctcgatctgatgtaagggcaacgatattctacgttgcgattatgctactcttgatggtttgattacaacgcaagttatgagcaagatggcagaaatgataaacagtctttgtggtggtgatgaaaaattgatgcgtgaaaggacacacctgctgttggcttgttgttcaagaatggcaatttgtaagagagatgtccggagagttgaatgtggaatcccttctggatttccgtca

SEQ ID NO: 128342 - DNA, 239 bp, Glycine max
attaattgcaagaatggcacttcgttgcttggtgatgtccctttctgttctcttcactcttggtcttgcgagagaaagccatgccagagacgaagatttttggcatgctgtttggccaaacactcccattccaagttcattgcgagatcttctaaagcctggccctgcaagtgttgagatcgataattcccctatgcaaattgaagaaacacagtacccgaaaaccttcttctataaag

SEQ ID NO: 128343 - DNA, 261 bp, Glycine max
ctcaaccataaacgatgccgaccagggatcagcggatgttgcttttaggactccgctggcaccttatgagaaatcaaagtctttgggttccggggggagtatggtcgcaaggctgaaacttaaaggaattgacggaagggcaccaccaggagtggagcctgcggcttaatttgactcaacacggggaaacttaccaggtccagacatagtaaggattgacagactgagagctctttcttgattcatggtgtgggcaggccg

SEQ ID NO: 128344 - DNA, 259 bp, Glycine max
tggaaatgcaagaagcttatcttgtcaatctcgtaaatgtgttacgagaattgtatttgcacagtccagaggaagctcgccaattgagaaggaaagctctctctcgtattgaatggctgcaaaaagctgatgtgcataccatagcacagattgaagagttccattcgatgcagaggatgatgaatgctcctgattcaaatgataatatcgatctactgttgagcattgatttgttgggtttacaagcagtaagctttcc

SEQ ID NO: 128345 - DNA, 263 bp, Glycine max
aaataggtggatggggaaattgactttcccccagggcacttcccgaagtgttaaaagaatgcctctttctatagggggaggagctggtgcaaagaatgctattctcatgaatatgccaaatgctgttctttcaatgtggagatattttgttggagatcttgtctttgaagtttctaagatgacttctccttatattaaatgtacagtctctttcttcatagcatttggaaatttggctgatgacccacatttgaggctttccc

SEQ ID NO: 128346 - DNA, 266 bp, Glycine max
gcgaagaagtggttgctgcggcgccggaggcagccgcgctgggagacagggctgaagcacaaactggagagaaaatggacgttttggtgcgacaaccaatccaaacccaaacagggcgctgcttggggtacctctcttcgcaaggtctacaccttcgacaccgttgaagagttctggtgtttgtatgatcaggtattcaagcccagcaagttgcaaatcaatgcggattttcacttgttcaagactgggttggccaaagggaagat

SEQ ID NO: 128347 - DNA, 271 bp, Glycine max
  unsure (1)..(271): unsure at all n locations
gtccctttgaaganaccagtctcagttacttagagacaccgtggacgaaaggaaagcgttctaagcgtancgcacggagcaacaactgcaacacccttcatgcaccgaggaagagtacctcgctctttgtctcatcatgctcgctcgcngcggcgccggcagtgtctccaccgccaaacccgctgtctccganaacaattctgcgccgctatccgccgccaaactgagctacaaatgttcggtttgcaacaagctctctctnacaagcact

SEQ ID NO: 128348 - DNA, 273 bp, Glycine max
tggaaaagatacctttatctttctctggtcaggttactaaagataaaaaggatgctaatgttcagatggaaatatccagttcagttaagcatgggaaagggaaagcaacttcattaggttttgatttgcaaactgtggggaaggacttggcttatacattacgcagtgagacaagatttactaattttagaagaaataatgcaaccgctggtctctcatttactttacttggtgatgccttatcatctggattaagtgaagacaatggttgct

SEQ ID NO: 128349 - DNA, 266 bp, Glycine max
tggaaattgtatgcggccaaagaaacagtaagattcgtggtaatgaggaaaatgcagaagatctattaagctttgcatggaaaaactggaggggagggacagtttcaaatattgtagataccacactgaaggattattcttgggatgaaataaagagatgcatccatattggattactatgcgttcaagaagatataaatggcagaccaactatgaattctgtttcaataatgcttaacagcagctcttcccttgtgaccttctga

SEQ ID NO: 128350 - DNA, 246 bp, Glycine max
ctcaggaatgtgttcccaggacttattgtgttttaaatccacaaaatcctattgtgttgaatacgtggatggggaaactgactttcccccagggcacttcccgaagtgttaagagaatgcgtctttctatagggggaggagctggtgcaaagggtgctattctcatgaatatgccacatgctgtgctttcaatgtggagatattttgttggagatctcgtctttgaagtttctaagatgactctcc

SEQ ID NO: 128351 - DNA, 245 bp, Glycine max
tggcgtatggattctgtcaattgtggggaactggtgcaatttcttgaccctgttctacataacttttgtgcttgtcgcacacggttcctgtgctctatgagaagtacgaggataagatagatccacttgcagagaaggcagttattgagattaaaaagcaatatgtcgtgtttgatgctaaggtcttgagtaagatcccattgggtccattgaaagccaagttatcttagttgttaatctttgta

SEQ ID NO: 128352 - DNA, 258 bp, Glycine max
cttcaaaaattttgtttctttgtgtgtgtatggtgatgataacttaattagtgttcatgaatatgtcaagccttactttagtggttctaaattgaaaagctttctagctggtcataatatcaccattactgatggtattgacaaaactagtgcaactttgcaatttagaaagttagcagattgtgattttctcaagagaaactttaagcagatgtctaatgttttgtgggtggctcctgaggtaaggattatggtcac

SEQ ID NO: 128353 - DNA, 258 bp, Glycine max
attactgagtaagggcaacgatattctgtgttgcgattatgctagttttgatggtttgattaccaagcaagttatgagcaagatggcagaaatgataaacagtctttgtggtggtgatgaaaaattgatgcgtgaaaggacacacctgctgttggcttgttgttcaaggatggcaatttgtaagaaagatgtttggagagttgaatgtggaatcccttctggatttccgctcacagttattgcaacattttaatgaga

SEQ ID NO: 128354 - DNA, 261 bp, Glycine max
ctcagatggaaacaaatttgtttaaattgtctcttgatgatgttgaaactcctaaaggttccatgttggatcttaaaatttctcaatctaaaattgcacttcccaaaaacacagttggaggaaccattctgcgtagtgacctattggcaaattttttgacagagggcaattttagagcaagtgttgatttgcagcgcactcatcgtatcaaaggaatgattaaaatggtggccacagttggattctgagatacggtatagc

SEQ ID NO: 128355 - DNA, 231 bp, Glycine max
ctctctcttgcaaaacctaattttcatttcttccctcaaatttcaaaatgcgtgagatccttcacatccagggtggccaatgcggcaaccagatcggcgccaagttctgggaggtggtttgcgcggagcacgggatcgaccctaccggaaggtacggtggggactcggagttgcagctcgagaggatcaatgtctactacaacgaggccagttgcggtcggttcgtgccgc

SEQ ID NO: 128356 - DNA, 250 bp, Glycine max
ggtgattttgttcaaggaaaagatctcgcaatggttaaagttaatgtagcatgtgctgctgttggcttgacatcaagctatactccgactccattgttggaatctggtttgcaaaaagacagagggttaattgtggagtattttggaaggatgtcttacgttgctcataacgttaatcagccccaagagaaagatttgttggaaggaaatttttcctttgatattaaatctcgctctagattggaatagt

SEQ ID NO: 128357 - DNA, 189 bp, Glycine max
gttgtctccgccttcttttatctctctctccactcccatatcgaaacaaagtcgttttgagttccgccgaaggaccgtaggttgcagcagctatggatttggcatccaatctcggtggcaagattgacaaagccgaagttctctctgccgttcagaagtatgagaagtatcatgtttgctatggaggtc

SEQ ID NO: 128358 - DNA, 173 bp, Glycine max
gtgattttctcaagagaaactttaggcagatgtctaatgttttgtgggtggctcctgaggacaaggcgagtttatggtcacaacttcattatgtttcatgtaataatctggaaatgcaagaagcttatcttgtcaatctcgtaaatgtgttacgagaattgtatttgcacagt

SEQ ID NO: 128359 - DNA, 204 bp, Glycine max
agcagattgtgattttcttaagagaaactttaagcagatgtctaatgttttgtgggtggctcctgaggacaaggcaagtttatggtcacaacttcattatgtttcgtgtaataatctggaaatgcaagaagcttatcttgtcaatctcgtaaatgtgttacgagaattgtatctgcacagtccagaggaagctcgccaactgag

SEQ ID NO: 128360 - DNA, 200 bp, Glycine max
gtttaaattgtctcttgatgatgttgaaactcctaaaggttccatgttggatcttaaaatttctcaatctaaaattgcacttcccaaaaacacagttggaggaaccattctgcgtagtgatctattggcaaattttttgacagagggcaattttagagcaagtgttgatttgcagcgcactcaccgtattaaaggaatga

SEQ ID NO: 128361 - DNA, 193 bp, Glycine max
tccaaaatccaatagagaatggacagcacaccaattcaactctgatcgatgtgaaaattatgaaccagaggtctcatatcctctatgaacagttaaaaggctttgttcaaagaatggacatgaatgtggtgaagaaggatctaccacccaaaactgtcttcgtgataactgtccagctatctcgcttacagag

SEQ ID NO: 128362 - DNA, 200 bp, Glycine max
gggatatgcttcattgataccatatgttgagccagttgtgcaagctcaaagtgctgaagtttacttcgacttcttccctgtggaggttgatagtcaagagggagttgctcacattggtgaattgaaatctggtgtctatgttccactgcctacaaaaactaatttggtggaaactcccaaggaatggcaactggatctac

SEQ ID NO: 128363 - DNA, 199 bp, Glycine max
  unsure (1)..(199): unsure at all n locations
tctctctcattctcttctccatcgcgcgtaagaaacacattttagttgctactaatgggaactgttgaagctgcaaacaaggatgcaaatggaagtctcctagagaaaaatccttcagttgtttttgtgttaggtggcccaggaagtggaaagggtacccaatgtgcaaatattgtccanaattttgggtatactcatc

SEQ ID NO: 128364 - DNA, 159 bp, Glycine max
tggcaatttgtaagaaagatgtttggagagttgaatgtggaatcccttctggatttccgctcacagttatttgcaatagcatttttaatgagatgctcattagatatagctatgaaaaattactgcgccaggctaaagctccaagtatgtttttacaat

SEQ ID NO: 128365 - DNA, 159 bp, Glycine max
tttcttcatagcatttggaaatttggctgatgacaccatcaattttgaggcttttccccacaagctggtacagtttggagagattcaggaaaaagttgtattgaaattttcacaagaggaatttcttacagcttggtcaacccaggtgcgtcctgcaac

SEQ ID NO: 128366 - DNA, 205 bp, Glycine max
taaatgcacagtctctttcttcatagcatttggaaatttggctgatgacaccatcaattttgaggcttttccccacaagctggtgcagtttggagagattcaggaaaaagttgtgttgaaattttcacaagaggaatttcttacagcttggtcaactcaggtgcgtcctgcaacaactctgttggctgatgggtgtccaatttgt

SEQ ID NO: 128367 - DNA, 205 bp, Glycine max
cgaatatgatgcatgcacaattccaaatgattgtggttcattggttgttgccaaggttggaaatcacaaacaaattgttggtttccatgttgctggaagcaaaggtagactgggatatgcttcattgataccatatgttgagccagttgtgcaagctcaaagtgctgaagtttactttgacttcttccctgtggaggttgatagt

SEQ ID NO: 128368 - DNA, 241 bp, Glycine max
gaaattttgataaaccgcgatcacaggttgccgcaccttaaaaccggaaacaaaagcaatcgttacttgatttcaagaatctctcaatttcttcctacttctttgtgtacgatttcttaagggaaagaaaatcactctctgtgctggccacagacttcgtgaatcattttcttttccactcttaataaaattcaaaaacactctcctatttgatataggacttcgtgtcagatttaaactt

SEQ ID NO: 128369 - DNA, 205 bp, Glycine max
cttactttagtggttctaaattgaaaagctttctagctggtcataatatcaccattactgatggtattgacaaaactagtgcaactttgcaatttagaaagttagcagattgtgattttctcaagagaaactttaggcagatgtctaatgttttgtgggtggctcctgaggacaaggcgagtttatggtcacaacttcattatgt

SEQ ID NO: 128370 - DNA, 237 bp, Glycine max
caaaaatggcaacagaattggcatcatctcccaattgggttccaagcgcaccacatgtttggcagcctttgccgccctccttctcctcttcctccgcggtctccgccgccgccgatacaacctccccccaggcccaaagccctggcccatcataggcaacctaaacttaattgggtcccttccacatcggtcgatcatcacgcttagcaaaaatacgggcccatcatgcacgtatgg

SEQ ID NO: 128371 - DNA, 253 bp, Glycine max
atagcaagcctcaagctactgcaatgcatgtgggagctatagaaattatcattgatagtttcgcaagtcctgactgcaacatagttggtgcaatgcttttggttgatacttatcacaccaatcctgaaaatgcagttcgtagtatttttgttgcgcctttcagaggcggaaggcccattcgggtggttacatttccgaataccatcgtgctcattgaaccagacatgaactcaaggtttcagcttttgagtac

SEQ ID NO: 128372 - DNA, 256 bp, Glycine max
gcatttggaaatttggctgatgacaccatcaattttgaggcttttccccacaagctggtacagtttggagagattcaggaaaaagttgtattgaaattttcacaagaggaatttcttacagcttggtcaacccaggtgcgtcctgcaacaactctgttggctgatgggtgtccatatttgtatgctatggtgcatgatagttcagtgtctacaataccaggtgattttgtcattggtgttaagttgacaaccataa

SEQ ID NO: 128373 - DNA, 265 bp, Glycine max
ggtccgtcaaaagtttttaaattttgtgaggttcattatgaagaaaagggacaagcttagttgtcaagttggaatcaacccatactccatggaatggactggtttggccaatagattactgagtaagggcaacgatattctgtgttgcgattatgctagttttgatggtttgattaccaagcaagttatgagcaagatggcagaaatgataaacagtctttgtggtggtgatgaaaaattgatgcgtgaaaggacacacctgctg

SEQ ID NO: 128374 - DNA, 256 bp, Glycine max
aattgaagaagatgactggggggggtatcactatgcaatcgacgccgggaagctcaggatacttggatttgtatccagagcggaagatgtcctttttcaaaaatccttacattctcggactggctgctgtcgccggcatcggtggtctcctcttcggctacgacactggtgtgatatcaggggctcttttatacattaaggatgattttgaggaggttagaaacagcaatcttctccaggaaacaatagtcagcat

SEQ ID NO: 128375 - DNA, 164 bp, Glycine max
gagagagggagtcagagaaaccctaggtaagaagaaaagatgccggctggtcatggtttgagatcccgcaccagagattccttctctcgtcctttcaggaagaagggaaccatcgccctcaccacatacctgagaacctaccacgtcggcgactaatgtgacgt

SEQ ID NO: 128376 - DNA, 215 bp, Glycine max
aatttttctgcagaattgctctcttgcaaattggatactgttactggccaatattatcctgagtgggctccaattaattgtcgagttcatcgacaaccaattcacatcactgaaggaaattatgtcagaaagcaagatgtcagcattgaatatgatgcatgtacaattccaaatgattgtggttcattggttgttgccaaggttggaattcacaa

SEQ ID NO: 128377 - DNA, 254 bp, Glycine max
ctacattaaatgtacagtctctttcttcatagcatttggaaatttggctgatgacaccatcaattttgaggcttttccccacaagctggtacagtttggagagattcaggaaaaagttgtattgaaattttcacaagaggaatttcttacagcttggtcaacccaggtgcgtcctgcaacaactctgttggctgatgggtgtccatatttgtatgctatggtgcatgatagttcagtgtctacaataccaggtg

SEQ ID NO: 128378 - DNA, 180 bp, Glycine max
  unsure (1)..(180): unsure at all n locations
gtcacaacttcattatgtttcatgtaataatctggaaatgcaagaagcttatcttgtcaatctcgtaaatgtgttacgagaattgtatttgcacagtccagaggaagctcgccaattgagaaggaaagctctctctcgtattgaatggctgcaaaaagctgatgtgcctancatagcaca

SEQ ID NO: 128379 - DNA, 206 bp, Glycine max
ggagacgcagaaggagtagcggcattaagagtgcggatcgtcgtgaggacactgacagggtggactataatcctcgacgacgttagcagcggcaccatcgacaatgtcacggccaagattcgagacaaggttcgcatacctccggatcagcagcggttgcattttcgccggaaagcagcttgaagatggaaggatcctggccgctt

SEQ ID NO: 128380 - DNA, 203 bp, Glycine max
ggaaccattctgcgtagtgacctattggcaaattttttgacagagggcaattttagagcaagtgttgatttgcagcgcactcatcgtatcaaaggaatgattaaaatggtggccacagttggtattcctgagaatacaggtatagcattggcctgtgctatgaatagttcttttagggggcgtgccagttctgatatttacac

SEQ ID NO: 128381 - DNA, 196 bp, Glycine max
attccgggaaccagtgttgaagaggcttacaataagctaatagttgaacttgagaaaagtgttcctacattggttggcattgaatgtcccaaggatgagaaacttcctcgtcgcaaaatttttgacaaacctaagacgcgctgcttcactattctccctatggagtttaatcttgtggttcgtcagaagtttttaa

SEQ ID NO: 128382 - DNA, 151 bp, Glycine max
gaaggatgaaggaaggggaacagcaacgagtgcctttgagggagagagcggagtggtcagatgttactccgcttcctcaaaacgacggccctaaccctgtcgttccgatccagtacacggaagacttttcccaagttatggattactttcg

SEQ ID NO: 128383 - DNA, 249 bp, Glycine max
gaatgattaaaatggtggccacagttggtattcctgagaatacaggtatagcattggcctgtgctatgaatagttcttttagggggcgtgccagttctgatatttacaccatctgctctcaagactgtgaattatggaatcctgcttgcacaaaagcaatgactatgtcatttaatccaaacccgtgttctgatgcatggagtttggaatttctgaagcgtaccggatttcattgtgatatcatttgtg

SEQ ID NO: 128384 - DNA, 183 bp, Glycine max
cggctcgaggaaattttgataaaccgcgatcacaggttgccgcaccttaaaaccggaaacaaaagcaatcgttacttgatttcaagaatctctcaatttcttcctacttctttgtgtacggtttcttaagggaaagaaaatcactctctgtgctggccacagacttcgtgaatcattttcttt

SEQ ID NO: 128385 - DNA, 188 bp, Glycine max
gccaaatgctgttctttcaatgtggagatattttgttggagatctcgtctttgaagtttctaagatgacttctccctacattaaatgtacagtctctttcttcatagcatttggaaatttggctgatgacaccatcaattttgaggcttttccccacaagctggtgcattttggagagattcaggaaa

SEQ ID NO: 128386 - DNA, 203 bp, Glycine max
agcagctcgaggacggccgtaccctcgccgactacaacatccagaaggagtcaacccttcaccttgtccttcgtctccgtggtggcatgcagatcttcgtcaagactctcactggcaaaaccataaccctagaggtcgaaagctctgacaccattgacaacgtcaaggccacgatccaggacaaggaggaatcccccaaacaa

SEQ ID NO: 128387 - DNA, 100 bp, Glycine max
gaaattttgataaaccgcgatcacaggttgccgcaccttaaaaccggaaacaaaagcaatcgttacttgatttcaagaatctctcaatttcttcctactt

SEQ ID NO: 128388 - DNA, 150 bp, Glycine max
gattgccgcaccttaaaaccggaaacaaaagcaatcgttacttgatttcaagaatctctcaatttcttcctacttctttgtgtaccatttcttaagggaaagaaaatcactctctgtgctggccacagacttcgtgaatcattttctttt

SEQ ID NO: 128389 - DNA, 242 bp, Glycine max
ttcaacaacttattctttgttctcgatctcacgatggctcatttggccctgtctcagatggctgtaactgttcctgttggcagcgatttgtctctcagaagatctgcggttaaggcacctaactttaacttttgggataaatcatgggcaccagtatttactttgtacttgaaggcaaacaactcaagtttaagaagtcgtcatgtggtattcatgtcagtgcaacagcagtgtaccaagtt

SEQ ID NO: 128390 - DNA, 243 bp, Glycine max
cattcctcagtccatttcacagcaaactgtttggaatcaaatggcaacagtgagaacaccattgaattttgattccagcaagcagagtttttgtcaattttctattgaccttctcggtggaggaattttagtggacaaaactggagattggatcacacttatacaaaattctccaattagtaacttgttgagagttgctgcttggaagaaaggctgtttaatggttaagattgtgatgtcggg

SEQ ID NO: 128391 - DNA, 227 bp, Glycine max
gcaaaggattctacccgccgctcgatgggaattgcgcttcaaggcgtctcgtagggctaatccgcctcacgagggtcaccaacggcacgtgcctttggggggccgaggccccctactgctggtcggcaaacggacggcgggcgcacgcgtcgcttctagcccggattctgacttagaggcgttcagtcataatccaacgcacggtagcttcgcgccactcgcttttc

SEQ ID NO: 128392 - DNA, 244 bp, Glycine max
gtttggaatcaaatggcaacagtgagaacaccattgaattttgattctagcaagcagagcttttgtcaattttctattgaccttctcggtggaggaattttagtggacaaaactggagattggatcacacttatacaaaattctccaattagtaacttgttgagagttgctgcttggaagaaaggctgtttaatggttaagattgtgatgtctgggaatgcagcagtcaaaaggagtgattggg

SEQ ID NO: 128393 - DNA, 247 bp, Glycine max
caaacccgtgttctgatgcatggagtttggaatttctgaagcgtaccggatttcattgtgatatcatttgtgtcactggatggactgccactccaatgcaggatgttcaggttacaattgattggtttatttcctctcaggaatgtgttcccaggacttattgtgttttaaatccacaaaatccttttgtgttgaataggtggatggggaaactgactttcccccagggcacttcccgaagtgttaa

SEQ ID NO: 128394 - DNA, 128 bp, Glycine max
cggctcgaggccagttctgatatttacaccatctgctctcaagactgtgaattatggaatcgtgcttgcacaaaagcaatgaccatgtcatttaatccaaacccgtgttctgatgcatggagtttgga

SEQ ID NO: 128395 - DNA, 252 bp, Glycine max
tggtacaagtgtttttaacaaacagcaacagtacagagcattttgatgcatgtaagtggacaaaatcggaaccacattcctgggaattgatcttcccaatagaggtatgtggtcctaataatggttttgaaatgtggagttctgagtgggcaaatcaaacttcatggcatttgagtttccttattgacaatcccaaacagtctacagtttttgatattctcttgggaatttctcaagattttgagattgctg

SEQ ID NO: 128396 - DNA, 260 bp, Glycine max
gatgggtgtccatatttgtatgctatggtgcatgatagttcagtgtctacaataccaggtgattttgtcattggtgttaagttgacaaccataaacaatatgtgtgcatatgggctcaatcctggtatttcaggttctcgtcttttgggcaccattcctcagtccatttcacagcaaactgtttggaatcaaatggcaacagtgagaacaccattgaattttgattccagcaagcagagtttttgtcaattttctattga

SEQ ID NO: 128397 - DNA, 152 bp, Glycine max
gttttgtgggtggctcctgaggacaaggcaagtttatggtcacaacttcattatgtttcgtgtaataatctggaaatgcaagaagcttatcttgtcaatctcgtaaatgtgttacgagaattgtatctgcacagtccagaggaagctcgcca

SEQ ID NO: 128398 - DNA, 187 bp, Glycine max
gaaagatgtttggagagttgaatgtggaatcccttctggatttccgctcacagttatttgcaatagcatttttaatgagatgctcattagatatagctatgaaaaattactgcgccaggctaaagctccaagtatgtttttacaatccttcaaaaattttgtttctttgtgtgtgtatggtgatgat

SEQ ID NO: 128399 - DNA, 191 bp, Glycine max
aatttctcaagattttgaaattgctggtaatactcttatgccagctttttctgttccacaggctactgccagatcttctgaaaatgcggaatcctctgcatgatctggaatttgtgttttctttcgtttgttcgtttgtttaattcaataaaggaaattagacagagcatactcaacaagagggtcatgtc

SEQ ID NO: 128400 - DNA, 211 bp, Glycine max
attttagagcaagtgttgatttgcagcgcactcatcgtatcaaaggaatgattaaaatggtggccacagttggtattcctgagaatacaggtatagcattggcctgtgctatgaatagttcttttagggggcgtgccagttctgatatttacaccatctgctctcaagactgtgaattatggaatcctgcttgcacaaaagcaatgactat

SEQ ID NO: 128401 - DNA, 224 bp, Glycine max
ctcgagcgaatcggctcagagatggcagaaatgataaacagagtttgtggtggtgaagtaaaattgatgcgtgaaaggacacatctgctgttggcttgttgttcaaggatggcaatttgtaagaaagatatttggagagttgaatgtggaatcccttctggatttccgctcacagttatttgcaatagcatttttaatgagatgctcattagatatagctatga

SEQ ID NO: 128402 - DNA, 246 bp, Glycine max
ggtttggttacactaacaatattatactgcctactaactatggaaatactaatggtcaaactaacaacagaaggaggaagaatggctataatcctgggaagcgaagaatgaataataaaatggatatggagaaaagggaggagatgattcggagaactgtttatgtgtctgacattgatcaactggttactgaagagcagctggcagctctctttctcaactgtggccaggttgttgattgccgtg

SEQ ID NO: 128403 - DNA, 252 bp, Glycine max
ggacttattgtgttttaaatccacaaaatccttttgtgttaaataggtggatggggaaactgactttcccccagggcacttcccgaaatgttaagagaatgcctctttctatagggggaggagctggtgcaaagaatgctattctcatgaatatgccaaatgctgttctttcaatgtggagatattttgttggagatctcgtctttgaagtttctaagatgacttctccctacattaaatgtacagtctctt

SEQ ID NO: 128404 - DNA, 154 bp, Glycine max
gtgaaatcttggattagtgctcccactctcctatctggtataggacttcgtgggtagacttttctatttctctcctttctttcactctcttcttctcactgatccgcattgccgttcaaagtggtcttatttgaaaaacacttgggcgttggtg

SEQ ID NO: 128405 - DNA, 243 bp, Glycine max
caagctggtacagtttggagagattcaggaaaaagttgtattgaaatttggctgatgacaccatcaattttgaggcttttccccacaagctggtacagtttggagagattcaggaaaaagttgtattgaaattttcacaagaggaatttcttacagcttggtcaacccaggtgcgtcctgcaacaactctgttggctgatgggtgtccatatttgtatgctatggtgcatgatagttcatggc

SEQ ID NO: 128406 - DNA, 230 bp, Glycine max
cgtcaaagctcccagctacgccctcgccagcatctgcaagtcgctcgtcgccggtggcgtcgccggaggagtgtcacgtactgcagttgctcctctggaacgattgaaaattttgctgcaggtccagaatcctcataacattaaatacaatggaacagtacaaggcctaaaatatatatggaggactgaaggatttcgtggacttttcaaagggaatggtactaattgtg

SEQ ID NO: 128407 - DNA, 215 bp, Glycine max
caggtgcgtcctgcaacaactctgttggctgatgggtgtccatatttgtatgctatggtgcatgatagttcagtgtctacaataccaggtgattttgtcattggtgttaagttgacaaccataaacaatatgtgtgcatatgggctcaatcctggtatttcaggttctcgtcttttgggcaccattcctcagtccatttcacagcaaactgtttg

SEQ ID NO: 128408 - DNA, 185 bp, Glycine max
actctctctctctctacaacaagaattcatctattcatttcagcccatcagcatggcgaaggagaagaaaaacttgtccaacaagaacaagaagccaagcaatgcagacgaggttcacttccgcggagtccggaagcgcccctggggccgctatgccgccgagatccgcgaccctggaaagaaga

SEQ ID NO: 128409 - DNA, 188 bp, Glycine max
aagatgcaccaccctatccagggatagaacatgttgaaggagatatgtttgaaagtgttccaaagggtgatgccattttactaaagcttgtatgtcacaattggttagacgaagactgtgtaaagtttttaaggaattggccacaaaccttggcaacaccttggaaggtgatttgatagactctatat

SEQ ID NO: 128410 - DNA, 218 bp, Glycine max
  unsure (1)..(218): unsure at all n locations
ggtcaacaccccttttaaaagaaagcngtaattctgctccatgggactcttcatgccactatctatgaagtcgataagctcaaaattggtggaggcaactttttaaccaagatcgtacaaaacatcgaggagactgttggtattggtaaaggtgtcactaaactatatgcaaccattgatgcagagaaggcacgagtggggaggaacagaattattga

SEQ ID NO: 128411 - DNA, 187 bp, Glycine max
gtgaaatcttggattagtgctcccactctcctatctggtataggacttcgtgggtagacttttctatttctctcctttctttcactctcttcttctcactgatccgcattgccgttcaaagtggtcttatttgaaaaacacttgggcgttggtgcaaatgtttgcttcgttaattttctctggggac

SEQ ID NO: 128412 - DNA, 249 bp, Glycine max
cttgaaacggtggtgtgtgggttttagggtttttggcagcaaggatggcgtcgagaccagaggtagttgcgccgcctgagattttctacgacgatgccgaagctcgcaagtacacctcttcttcccgtattgttcaaattcaggcgacgctgtcagagagagctctcgaactacttgctttgcctgatgacagcgttcctaaattactccttgatatcggttgtggatcgggacttagcggtgagacac

SEQ ID NO: 128413 - DNA, 225 bp, Glycine max
agagaatccgaggcgaagagaagagaaaaattaagatggaggggaaggagcaggatgtgtcgctgggagcgaacaagttcccggagagacagccgattgggacggcggcgcagagccaagacgacggcaaggactaccaggagccggcgccggcgccactggttgacccgacggagtttacgtcatggtccttttacagagccaggatagcagagtttgtggcca

SEQ ID NO: 128414 - DNA, 164 bp, Glycine max
aaaccgcgatcacaggttgccgcaccttaaaaccggaaacaaaagcaatcgttacttgatttcaagaatctctcaatttcttcctacttctttgtgtacgattctcttaagggacagacaatcactctctgtgctggccacagccttcgtgaatcatttccttt

SEQ ID NO: 128415 - DNA, 191 bp, Glycine max
aaacaatatgtgtgcatatgggctcaatcctggtatttcaggttctcgtcttttgggcaccattcctcagtccatttcacagcaaactgtttggaatcaaatggcaacagtgagaacaccattgaattttgattctagcaagcagagcttttgtcaatttacgattgaccttctcggtggaggtattttag

SEQ ID NO: 128416 - DNA, 228 bp, Glycine max
ggcacttctctcattcaagagtaatggcagaagcaacaaaagggtatgctgtggtcactggagcaaataagggaattggatttgcaatatgcaagcaattggcttctaatgggatcactgtggtgttgacagccagagatgagaagaggggtcttcaagctgtcgagaaactccaagagcttggtctttctggccatgtgggttttcatcaacttgatgttacagacc

SEQ ID NO: 128417 - DNA, 204 bp, Glycine max
tgtacgagcagtggctcgtgaagcacgggaaggtgtacaacgcgctcggcgagaaggagaagcgcttccagatcttcaaggacaacctgcgattcatcgacgaccacaactccgcggaggaccgaacctacaagctcggactgaaccggttcgctgatctcaccaacgaggaatacagggccaagtacttgggaacacagatcg

SEQ ID NO: 128418 - DNA, 231 bp, Glycine max
gaaaaacccaaaaagattgataccagattgagacaaagaatagatcctcaatacaatgaggttcaggctcagatggaaacaaatttgtttaaattgtctcttgatgatgttgaaactgcctaaaggttccatgttggatcttaaaatttctcaatctaaaattgcacttcccagaaacacagttggaggaaccattctgcgtagtgatctattggcaaattttttgacaga

SEQ ID NO: 128419 - DNA, 280 bp, Glycine max
cgagcatcatggcctcgagagcagtgctattgttggctatgtgtgtgcttccggccatggttgtggccattcgcccagcaaagaaccctttttgcgtgaagggtcgcgtctactgtgacccttgccgtgctggttttgagacctcagcaaccacctacattgccggtgctgagattatgttgcaatgcaagagcagggttagcaacgaggttgtgtacaccaagaaggggtacactgactcaactggagcatacacaatgtacgtggacgaggatcacgc

SEQ ID NO: 128420 - DNA, 283 bp, Glycine max
gccagtaccttgatgatattgccatcttgactggaggtactgtaatcagagaagaggttggccttactttggacaaagctgggaaagaggttctcggatatgcctccaaggtggtgctcaccaaggatacaaccacaattgttggtgatggaagtacccaggaagcagtgaacaagagagttgcacaaattaggaacctaattgaggctgctgagcaagagtatgagaaagaaaagctgaatgagagaattgctaaattgtctggtggtgtggctgtgataca

SEQ ID NO: 128421 - DNA, 258 bp, Glycine max
ttccttgatatcttagttatctaattacctcaattaatcccttaattgcaagcatcatggctgaggagacacaccatcaccacttccaacatcacaagggtgatgatgtgcctggcgaggttgattacaagaaggaggagaagcaccacaagcatcttgagcaccttggggcacttggtgctgcggctgccggtgcttatgccttgactgagaacctgaggacaatcccgaccgcgagcatgctcacaggcacaaggt

SEQ ID NO: 128422 - DNA, 278 bp, Glycine max
tgaaattttcacaagaggaatttcttacagcttggtcaactcaggtgcgtcctgcaacaactctgttggctgatgggtgtccatatttgtatgctatggtgcatgatagttcagtgtctacaataccaggtgattttgtcattggtgttaagttgacaaccataaacaatatgtgtgcatatgggctcaatcctggtatttcaggttctcgtcttttgggcaccattcctcggtctattcacaagcaaactgtttggaatcaatggcaacagtgaaac

SEQ ID NO: 128423 - DNA, 194 bp, Glycine max
ctccagggcacttcccgaagtgttaagagaatgcctctttctatagggggaggagctggtgcaaagaatgctattctcatgaatatgccaaatgctgttctttcaatgtggagatattttgttggagatctcgtctttgaagtttctaagatgacttctccctacattaaatgtacagtctctttcttcaaagc

SEQ ID NO: 128424 - DNA, 179 bp, Glycine max
gtcaagccttactttagtggttctaaattgaaaagcattctagctggtcataatatcaccattactgatggtattgacaaaaatagtgcaactttgcaatttagaaagttagcagattgtgattttctcaagagaaactttaagcagatgtctaatgttttgtgggtggctctgaggat

SEQ ID NO: 128425 - DNA, 279 bp, Glycine max
ggcattgtttggtttggtttggttacttgaaaatctcgaatcgcttaattttgatttagttttccaccgcaacgcggaacctctttctcgaactggctaactctcaggcaagtggctcggacgctgattccagcaacacgcggctggtggttgcactgtatgacgccctaaactccggcgactccaacgccgtcgtcaaattcgtagcggcggatctcgagtggtgttcccatggtccgcctctcaccattttttgatgcgcatgctcaccggcgactc

SEQ ID NO: 128426 - DNA, 281 bp, Glycine max
ctatgaaaaattactgcgccaggctaaagctccaagtatgtttttacaatctttcaaaaattttgtttctttgtgtgtgtatggtgatgataacttaattagtgttcatgaatatgtcaagccttactttagtggttctaaattgaaaagctttctagctggtcataatatcaccattactgatggtattgacaaaactagtgcaactttgcaatttagaaagttagcagattgtgattttctcaagagaaacttaggcagatgtctaatgttttgtgggt

SEQ ID NO: 128427 - DNA, 278 bp, Glycine max
gaagaagcagagggagtagcggcattaaaaatgcagatcttcgtgaaaactctgacagggaagactataaccctcgaggtcgagagcagcgacaccatcgacaatgtcaaggccaagattcaagacaaggaaggcattcctccggatcagcagcgtttgattttcgccggaaagcagcttgaagatggaaggaccctggccgattacaacatccagaaggaatcaacccttcatctcgtcctcaggcttcgtggtggcatcattgagccttccctcat

SEQ ID NO: 128428 - DNA, 115 bp, Glycine max
aagagaaagatttgttggaggaaaatttctcatttgatataaaatctcgctgtagattggaaaaaggtcactctacagaagacacaatttgtcagaggacaaaccttcagatatg

SEQ ID NO: 128429 - DNA, 216 bp, Glycine max
cctgaggaggacattgatgaaacaaccaccctcaaggaccttgatctcaactttgtatttcgtgtacaaagaaattggttccacgaactcatcatgcaaattgagcgggactgtgagttcttggaagctgagaaaattatggattacagtcttttggttggcattcattttcgtgatgatattacgtgtaacaaaatgggatcgccacttttctcc

SEQ ID NO: 128430 - DNA, 273 bp, Glycine max
agcttatcttgtcaatctcgtaaatgtgttacgagaattgtatttgcacagtccagaggaagctcgccaattgagaaggaaagctctctctcgtattgaatggctgcaaaaagctgatgtgcctaccatagcacagattgaagagttccattcgatgcagaggatgatgaatgctcctgattcaaatgacaatattgatctactgttgaccattgatttgttgggtttacaggagcaggtaaagttttccaaacaagatcgtttttgatgata

SEQ ID NO: 128431 - DNA, 278 bp, Glycine max
tctagatcgcgagcggccgcccgcgatctagaatcgacaaccaattcacatcactgaaggaaattatgtcagaaagcaagatgtcagcatagaatatgatgcatgcacaattccaaatgattgtggttcattggttgttgccaaggttggaaatcacaaacaaattgttggtttccatgttgctggaagcaacggaagactgggatatgcttcattgataccatatgttgagccagttgtgcaagctcaaagtgctgaagtttactttgacttcttcc

SEQ ID NO: 128432 - DNA, 277 bp, Glycine max
aatttgtaagaaagatgtttggagagttgaatgtggaatcccttctggatttccgctcacagttatttgtaatagcatttttaatgagatgctcattagatatagctatgaaaaattactgcgccaggctaaagctccaagtatgtttttacaatccttcaaaaattttgtttctttgtgtgtgtatggtgatgataacttaattagtgttcatgaatatgtcaagccttactttagtggttctaaattgaaaagctttctagctggtcataatatc

SEQ ID NO: 128433 - DNA, 279 bp, Glycine max
ctagcagagcttttgtcaattttctattgaccttctcggtggaggaattttagtggacaaaactggagattggatcacacttatacaaaattctccaattagaaacttgttgagagttgctgcttggaagaaaggctgtttaatggttaaaattgtgatgtctgggaatgcagcagtcaaaaggagtgattgggcctcattggtacaagtgtttttaacaaacagcaacagtacagagcatttcgatgcatgtaagtggacaaaatcggaaccacattc

SEQ ID NO: 128434 - DNA, 173 bp, Glycine max
atcatcgtaaattcttaaaggagcatgttgtttttaaggaggccatacctataaaagatcccgttgtgttgtcaaagatacatcagacatatagagttggttttttgaaggatgttgttctggcgagagtcttggatgacggtattggtgcagatcttaactcgatagtacat

SEQ ID NO: 128435 - DNA, 224 bp, Glycine max
cacaaggcagaaagcaagctcatcctagagttttaaaaatggcagcagcctcctccatggctctctcttccccatccttggctggcaaggccgtgaagctgggcccatcagcccccgatgtcgggagggtcagcatgaggaagaccgtcaccaagcaggcctcctccggaaccccatgttacggccaagaccgttaaaatttttgcgccttcttgggccccccc

SEQ ID NO: 128436 - DNA, 182 bp, Glycine max
cggctcgaggtctaaatgcaaagccagcatgagaatgggaaacactgatgctcaaattttgatggttccagggcgcagattcatagctcatggacattttttcaaaaatctgactcagaaagtgcgagtccaaattgttacatctgaaaagagttactggcatgtgtatgatcctgacaagt

SEQ ID NO: 128437 - DNA, 266 bp, Glycine max
gtgagaacaccattgaattttgattctagcaagcagagcttttgtcaattttctattgaccttctcggtggaggaattttagtggacaaaactggagattggatcacacttatacaaaattctccaattagtaacttgttgagagttgctgcttggaagaaaggctgtttaatggttaaaattgtgatgtctgggaatgcagcattcaaagggagtgatggggcctcattggtacaagtgtttttaacaaacagcaacagtacaga

SEQ ID NO: 128438 - DNA, 274 bp, Glycine max
tctcgagccgaatcggctcgaggaacaactcaaggatcgacaatcacgtgatgatgaagcaatggccttcgatgaaacattacgtacggctctagagtatggtttgccacctactggtggttggggtttgggaattgatcgtttgaccatgttactgacagactcacagaatattaaggaggttcttctcttccctgccatgaaacctcaagactgagccttcagtcaaagctatgtttaaatctcagcagtaaaatcatacacttcaacagga

SEQ ID NO: 128439 - DNA, 274 bp, Glycine max
catttttaatgagatgctcattagatatagctatgaaaaattactgcgccaggctaaagctccaagtatgtttttacaatctttcaaaaattttgtttctttgtgtgtgtatggtgatgataacttaattagtgttcatgaatatgtcaagccttactttagtggttctaaattgaaaagctttctagctggtcataatatcaccattactgatggtattgacaaaactagtgcaactttgcaatttagaaagttagcagattgtgattttctc

SEQ ID NO: 128440 - DNA, 266 bp, Glycine max
cgagtttatggtcacaacttcattatgtttcgtgtaataatctggaaatgcaagaagcttatcttgtcaatctcgtaaatgtgttacgagaattgtatttgcacagtccagaggaagctcgccaattgagaaggaaagctctctctcgtattgaatggctgcaaaaagctgatgtgcctaccatagcacagattgaagagttccattcgatgcagaggatgatgaatgctcctgattcaaatgataatattgatctactgttgagc

SEQ ID NO: 128441 - DNA, 167 bp, Glycine max
ccgcgatcacaggttgccgcaccttaaaaccggaaacaaaagcaatcgttacttgatttcaagaatctctcaatttcttcctacttctttgtgtacgatttcttaagggaaagaaaatcactctctgtgctggccacagacttcgtgaatcgttttcttttccacac

SEQ ID NO: 128442 - DNA, 201 bp, Glycine max
gttgaaactcctaaaggttccgtgttggatcttaaaatttctcaatctaaaattgcacttcccaaaaacacagttggaggaaccattctgcgtagtgatctattggcaaattttttgacagagggcaattttagagcaagtgttgatttgcagcgcactcatcgtattaaaggaatgattaaaatggtggccacagttggt

SEQ ID NO: 128443 - DNA, 234 bp, Glycine max
ctgatgttcttgcaaagcgagctcatgaatttgaaaaacatgttgctcatgaaagcctcaaggatcaaattcctgctgttgacaagttgtattctactaaggttaataagtttgcaaaaattatgaaccttagacaaagtgttgttggtgatcttaaacttcttactgatgggaagttgtatgagggtacgaatattcctgtatctaatattagtgcaggggagaatcatgtag

SEQ ID NO: 128444 - DNA, 272 bp, Glycine max
tgattctagcaagcagagcttttgtcaattttctattgaccttctcggtggaggaattttagtggacaaaactggagattggatcacacttatacaaaattctccaattagtaacttgttgagagttgctgcttggaagaaaggctgtttaatggttaagattgtgatgtctgggaatgcagcagtcaaaaggagtgattgggcctcattggtacaagtgtttttaacaaacagcaacagtacagagcattttgatgcatgtaagtggacaa

SEQ ID NO: 128445 - DNA, 196 bp, Glycine max
cagcaattgaagtagttgatggaaacttctcttgggatttatcttcccctagtccaactttgcaaaatataaatcttaaagtttttcatgggatgagggttgctgtgtgtggtactgttggatcaggcaagtctactttactttcttgtgtattgggagaagtgccaaagatatcaggcctcctaaaggtttgcgg

SEQ ID NO: 128446 - DNA, 274 bp, Glycine max
gaaaaaccctaagcaaagcaaagcggtaaggatggggaacacggagaagctgatgaaccagatcatggaattgaaattcacttcgaaatcgctgcagcgtcaatcgcgtaagtgcgagaaggaggagaaatcggagaagctgaaggtgaagaaggcgatcgagaaaggcaacatggacggcgctcgaatctacgcggagaacgcgatccgtaagcgcacggagcagatgaactacctccgcctggcctcgcgcctcgacgccgtggtcgcccgc

SEQ ID NO: 128447 - DNA, 270 bp, Glycine max
tgatcaacgcatataattaataataattagtatctattcaagtatcaacaatataagcaatatattgctgtggctaaagctcgatattaatttcgtggtttgttaatataggttcaacgttgtgctgatgatagaaccattttggttacaacatatgaaggcacgcataaccatccactgccacctgctgctatggccatggcatcaaccactacagctgctgctagcatgttgctttctggatcaatgtccagtgcagatggaataatg

SEQ ID NO: 128448 - DNA, 272 bp, Glycine max
gaaagatgtttggagagttgaatgtggaatcccttctggatttccgctcacagttatttgtaatagcatttttaatgagatgctcattagatatagctatgaaaaattactgcgccaggctaaagctccaagtatgtttttacaatccttcaaaaattttgtgtctttgtgtgtgtatggtgatgataacttagttagtgttcatgaatatgtcaagccttactttagtggttctaaattgaaaggctttctagctggtcataatatcacca

SEQ ID NO: 128449 - DNA, 272 bp, Glycine max
agattctggtgaatgcgtagaaaaggaaaataaagaaattagcgtgaaaaatgttgggtgtgttcagcagctccatagtgtcgccgccggaggagctcgttgccgccggcagccgtacaccgtcgccgaagatgacggcggcggcgctgcggaagtggttcgaggagaagaacccctccgcagtgtcggtggaggtcggagagcatgtccagctcgcttatacccaccagaacgagtcgccgtttcagcacagatcctttgctgtgaaggat

SEQ ID NO: 128450 - DNA, 206 bp, Glycine max
gttttctttgaaacgcacagcttcaatcaccgaccacaccacccatcaacgacatgcttcctctttcccttctcaagactgcccaaggccaccctatgttggtggaactgaaaaatggggagacatataacgggcatttggttaattgcgacacatggatgaacatccatctgcgagaagtcatttgtacatctaaagacggggat

SEQ ID NO: 128451 - DNA, 261 bp, Glycine max
agctggtgcagtttggagagattcaggaaaaagttgtattgaaattttcacaagaggaatttcttacagcttagtcaactcaggtgcgtcctgcaacaactctgttggctgatgggtgtccatatttgtatgctatggtgcatgatagttcagtgtctacaataccaggtgattttgtcattggtgttaagttgacaaccataaacaatatgtgtgcatatgggctcaatcctggtatttcaggttctcgtcttttgggca

SEQ ID NO: 128452 - DNA, 204 bp, Glycine max
tctcaagtccaacctacccctttttcttctcccaccaacttcaccgtcttcttcctcgatcatgtctcacttcaagggcaagtaccatgatgagcttattgccaatgctgcttacattggcactcctggaaagggtattcttgctgctgatgagtcaacagggacaattggcaagcgtttgaccagcataagtgtagagaatgt

SEQ ID NO: 128453 - DNA, 237 bp, Glycine max
tgtggaggtaccaaagttgggaaaagaggctgcaactaaggcaatcaaggaatggggtcaacccaagtccaagattacccatctcatcttttgcaccactagtggtgtcgacatgcctggtgctgattatcagctcactaaactattaggccttcgcccctccgtcaagcgttacatgatgtaccaacaaggctgctttgccggtggcacggtgcttcgtttggccaaagacctcgc

SEQ ID NO: 128454 - DNA, 170 bp, Glycine max; identical to SEQ ID NO: 102635

SEQ ID NO: 128455 - DNA, 234 bp, Glycine max
aatggttaaagttaatgtagcatgtgctgctgttggcttgacatcaagttacactccaactccattgttggaatctggtttgcacaaagacagagggttaattgtggagtattttggaaggatgtcttacgttgctcacaacgttaatcagccccaagagaaagatttgttggagggaaattttacctttgatattaaatctcgctctagattggaaaaagtttcctctacaaa

SEQ ID NO: 128456 - DNA, 233 bp, Glycine max
gagctgcttggtgcagacaaatttgttgtttcatctaatcaagaggaaatgacggcattggctaaatcgttggactttataatcgacacagcatctggtgatcacccgtttgatccttacatgtcactgttgaagacatatggtgtttttgtcctagttggtttcccaagtcaagtcaaattcagccctgcaagccttaatataggatcaaagactgtagccggaagtgttac

SEQ ID NO: 128457 - DNA, 235 bp, Glycine max
ctcgagccgattcggctcgagatcaaattcgtcacaaagcccttataccagtacacacacccatttgtgtctgttgatttgaacatgatggctaatgcattcaagacaactgttgctggacttgagaaagaactagaagcactgattactgataatcagatacaggctcgaattgattcgcacaacaaaattttgtatgcgcggcatgcagatcaaaggaatgccacctttcaaa

SEQ ID NO: 128458 - DNA, 219 bp, Glycine max
cagttgtgcaagctcaaagtgctgaagtttactttgacttcttccctgtggaggttgatagtcaagagggagttgctcacattggtgaattgaaatctggtgtctatgttccactgcctacaaaaactagtttggtggaaactcccaaggaatggcaactggatctaccttgtgacataattcctagtgtcttgactaaactgatgagagcttcgtatg

SEQ ID NO: 128459 - DNA, 211 bp, Glycine max
attttgttggagatctcgtctttgaagtctctaagatgacttctccctacattaaatgtacagtctcctgcttcagagcattcggacatttggctgatgctaccatcaatcttgaggcttttccccacacgctgcgtatagtttgagcgcgattcaggaaaaagttgtattgatattttcacaatcgggatttctacagctgtgtcaaccc

SEQ ID NO: 128460 - DNA, 213 bp, Glycine max
ctctcactcttccaacaatcgaaatccaaaaccctaccgacaccacactcaatcgaaattcttcattctcttctcatcgatggggcagaagtctctgatctacgcgttcgtgtcgcggggaacagtgattctcgcggagtacaccgaattcagcggaaacttcaactccatcgccttccagtgccttcagaactccctgccaccaacaacaag

SEQ ID NO: 128461 - DNA, 215 bp, Glycine max
cacacttagaattaagttagtagcgagagagggagaaatgaaggttttttacttcttcgttgtgctattggctttggcatcctccattgcctttgcttatgatccaagccccctgcaagacttttgtgtggctatcaatgataccaaaactggtgtgttcgtgaatggaaaattttgcaaggatccaaagcttgcaaggctgaagatttcttctt

SEQ ID NO: 128462 - DNA, 214 bp, Glycine max
gccctagttcatttttcttctccgttctcttctctctctgttcttcactcactctcattcattcaccatgacgaaacaacatgccaattggtctccttacgataacaacggaggatcatgtgttgcgattgctggagcagattactgcgttatcgccgcagatacgagaatgtccaccggttacaacatcctcctcgcgattactccaaaatct

SEQ ID NO: 128463 - DNA, 213 bp, Glycine max
ctgatatttacaccatctgctctcaagactgtgaattatggaatcctgcttgcacaaaagcaatgactatgtcatttaatccaaacccgtgttctgatgcatggagtttggaatttctgaagcgtaccggatttcattgtgatatcatttgtgtcactggatggactgccactccaatgcaggatgttcaggtacaattgattggtttatttc

SEQ ID NO: 128464 - DNA, 211 bp, Glycine max
gtgatgataacttaattagtgttcatgaatatgtcaagccttactttagtggttctaaattgaaaagctttctagctggtcataatatcaccattactgatggtattgacaaaactagtgcaactttgcaatttagaaagttagcagattgtgattttctcaagagaaactttaggcagatgtctaatgtttgtgggtggctcctgaggac

SEQ ID NO: 128465 - DNA, 210 bp, Glycine max
ctttaagcagatgtctaatgttttgtgggtggctcctgaggacaaggcaagtttatggtcacaacttcattatgtttcgtgtaataatctggaaatgcaagaagcttatcttgtcaatctcgtaaatgtgttacgagaattgtatctgcacagtccagaggaagctcgccaactgagaaggaaagctctcctcgtattgaatggctgcaa

SEQ ID NO: 128466 - DNA, 206 bp, Glycine max
attagatatagctatgaaaaattactgcgccaggctaaagctccaagtatgtttttacaatccttcaaaaattttgtttctttgtgtgtgtatggtgatgataacttaattagtgttcatgaatatgtcaagccttactttagtggttctaaattgaaaagctttctagctggtcataatatcaccatactgatggtattgacaaa

SEQ ID NO: 128467 - DNA, 213 bp, Glycine max
gtaatattcatatttccggcttgttttacgacggcagatacaaattctggactaaacacgagaaaaatcttgctttgacagaagaggaatagatggaagtgattagaaatataggcattcctgctgatgtacttgcaaatcgagctcatgagtttgaaagacatgttgctcatgaaagcctcaaggatcaaatcctgctgttgacaagttgta

SEQ ID NO: 128468 - DNA, 211 bp, Glycine max
tggaaatgcaagaagcttatcttgtcaatctcgtaaatgtgttacgagaattgtatttgcacagtccagaggaagctcgccaattgagaaggaaagctctctctcgtattgaatggctgcaaaaagctgatgtgcctaccatagcacagattgaagagttccattcgatgcagaggatgatgaatgctcctgatcaaatgataatatcgat

SEQ ID NO: 128469 - DNA, 208 bp, Glycine max
attggccagtaccactgaaaatcatttctggaaccattcttgcaacaattttgggaacaaccttctggaaactcttttcctttcttagagatgctggtaatgggggagtttttgttggtaatgttgcttcagcattcacaacttcaagtgtgcttgaggcccaaagtagaaagcccaacagatatgaagttcccaatacagatatcgc

SEQ ID NO: 128470 - DNA, 210 bp, Glycine max
tcggctcgagtgaaaaggctgatcaagagaaacccattaagattgataccagattgagacaaagaatagatcctcaatacaatgaggttcaggctcagatggaaacaaatttgtttaaattgtctcttgatgatgttgaaactcctaaaggttccatgttggatcttaaaatttctcaatctaaaattgccttcccaaaaacacagttgg

SEQ ID NO: 128471 - DNA, 205 bp, Glycine max
ggtatgtggtcctaataatggttttgaaatgtggagttctgagtgggcaaatcaaacttcatggcatttgagtttccttattgacaatcccaaacagtctacagtttttgatattctcttgggaatttctcaagatattgagattgctggtaatactcttatgccagctttttctgttccacaggcactgccagatcttctgaaa

SEQ ID NO: 128472 - DNA, 204 bp, Glycine max
caaaaatatgccactcccatgatgcccctagatgaagaaattctttctaaagttgcacaagatatggttgaggaatggtttgattgtgttgatgaggaggattcctttgaggaagtttctttaagtgcagcacttaatggtgttgagggtttggactatatggaaagaattcctcttgccacatcgagggttttcctcatgtgc

SEQ ID NO: 128473 - DNA, 201 bp, Glycine max
ctaaattgaaaagctttctagctggtcataatatcaccattactgatggtattgacaaaactagtgcaactttgcaatttagaaagttagcagattgtgattttctcaagagaaactttaagcagatgtctaatgttttgtgggtggctcctgaggataaggcgagtttatggtcacaacttcatatgtttcgtgtaataa

SEQ ID NO: 128474 - DNA, 203 bp, Glycine max
gataaacagtctttgtggtggtgatgaaaaattgatgcgtgaaaggacacacctgctgttggcttgttgttcaaggatggcaatttgtaagaaagatgtttggagagttgaatgtggaatcccttctggatttccgctcacagttatttgcaatagcatttttaatgagatgctcattagatatagctataaaaattactgcg

SEQ ID NO: 128475 - DNA, 210 bp, Glycine max
gggcagtagccgagattccgtgagttgcaaaaatgaagacgattctttccaccgagaccatgaacatcccggacggcgtgagcatcaaagttcatgccaaggtcatcgaagttgagggcccccgcggaaaattggtgcgagacttcaagcatttgaatctcgattttcagctcattactgacgaaaacggaaaagaaagctgaaaatcga

SEQ ID NO: 128476 - DNA, 208 bp, Glycine max
ggagggtgcatcataagggccgtgttcttggaccggatcaagaaggcttatcagaggaaccctaatttggcgagtttgattgtggacccggagtttgcaagggaaatggtgcagagacaggctgcgtggaggagggttgtggggttggcggtttcggctgggattagtactcccggaatgtgtgccatcttgcttactttgataccta

SEQ ID NO: 128477 - DNA, 208 bp, Glycine max
ggaaatttttcctttgatattaaatctcgctctagattggaaaaagtttcctctacaaaagcacaatttgttagtggaaaaaccttcaaatatgatataattggtgctggttcacattcttcagaagattttcctgaaaaggaagatcaagaaaaacccaaaaagattgataccagattgagacaaaaatagatcctcaatacaatga

SEQ ID NO: 128478 - DNA, 205 bp, Glycine max
cttcctcgtcgcaaaatttttgacaaacctaagacgcgctgcttcactattctccctatggagtttaatcttgtggttcgtcagaagtttttaaattttgtgaggttcattatgcagaaaagggacaagcttagttgtcaagttggaatcaacccatactccatggaatggactggtttggccaaagattactgagtaagggcaa

SEQ ID NO: 128479 - DNA, 204 bp, Glycine max
caaaaatcagcggtatttactcaaaacttggtttcatgatcattatgttgtagaccaaacttttgaatcttatgctgatcttttggcatattgcttcaccaaatgggagagacatgtgaaggaacaagagtctaatttgtctcaaattaaaggcaagaaaagtgagagtggccatttcaataatttcaacaacttatggatttg

SEQ ID NO: 128480 - DNA, 134 bp, Glycine max
tgcaaatgtttgcttcgttaatttcctctggggacaacaggctcactgagaaaacaatttttacttgcagagatttggacatcttggttgtttattatacaatagccactcaatttagaaaatttctaccgcat

SEQ ID NO: 128481 - DNA, 205 bp, Glycine max
gacaaaactggagattggatcacacttatacaaaattctccaattagtaacttgttgagagttgctgcttggaagaaaggctgtttaatggttaaaattgtgatgtctgggaatgcagcagtcaaaaggagtgattgggcctcattggtacaagtgtttttaacaaacagcaacagtacagagcatttgatgcatgtaagtggac

SEQ ID NO: 128482 - DNA, 198 bp, Glycine max
tctcgagccgctcgagccgctcgaagggctcgaggattatgctaagcctttgggaatagtgcagcaatggactcaagtcaggaggtggtgacacttttgggagctactggaagcccatttgtgtgcagggttcatattgccctcaagttgaagggagttcaatacaaatatgtcgaagtccatttgaggacaagcgtg

SEQ ID NO: 128483 - DNA, 208 bp, Glycine max
aaaacacttgggcgttggtgcaaatgtttgcttcgttaattttctctggggacaacaggctcactgagaaaacaatttttacttgcagagatttggacatcttggttgtttattatacaatagcaactcaatttagaaaatttctaccgcattacattaggtggcatctgtataccttgttgatctcattctcccatcttttctcact

SEQ ID NO: 128484 - DNA, 205 bp, Glycine max
ctccaattagtaacttattgagagttgctgcttggaagaaaggctgtttgatggttaagattgtgatgtctgggaatgcagcagtcaaaaggagtgattcggcctcactggtacaagtgtttttaacaaacagcaacagtacagagcattttgatgcatgtaagtggacaaaatcggaaccacatcctgggaattgatcttccca

SEQ ID NO: 128485 - DNA, 203 bp, Glycine max
tgcaaagcgagctcatgaatttgaaaaacatgttgctcatgaaagcctcaaggatcaaattcctgctgttgacaagttgtattctactaaggttaataagtttgcaaaaattatgaaccttagacaaagtgttgttggtgatcttaaacttcttactgatgggaagttatatgagggtaagctattcctgtatctaatattag

SEQ ID NO: 128486 - DNA, 204 bp, Glycine max
gaaagatttgttggagggaaatttttcctttgatattaaatctcgctctagattggaaaaagtttcctctacaaaagcacaatttgttagtggaaaaacctttaaatatgatataattggtgctggttcacattcttcagaagattttcctgaaaaggaagatcaagaaaaacccaaaaagattataccagattgagacaaaga

SEQ ID NO: 128487 - DNA, 205 bp, Glycine max
tgataaaccgcgatcacaggttgccgcaccttaaaaccggaaacaaaagcaatcgttacttgatttcaagaatctctcaatttcttcctacttctttgtgtacggtttcttaagggaaagaaaatcactctctgtgctggccacagacttcgtgaatcattttcttttccactcttagtaaaatctatgaacactctcctatttg

SEQ ID NO: 128488 - DNA, 206 bp, Glycine max
gaaagatgtttggagagttgaatgtggaatcccttctggatttccgctcacagttatttgtaatagcatttttaatgagatgctcattagatatagctatgaaaaattactgcgccaggctaaagctccaagtatgtttttacaatccttcaaaaattttgtttctttgtgtgtgtatggtgatgtaacttaattagtgttcatga

SEQ ID NO: 128489 - DNA, 208 bp, Glycine max
gaagaagatggcgtcgagcggaggcatgccgttttgtagggcagcggggatgacatacatcacatactcaaacatatgcgcgaatctggtcaggaattgcctcaaggaaccctacaaggctgaagccatctctcgtgagaaggtccattttgctctctccaaatgggtcgacgccaagcctgaaaaactactattcgttcagacaccc

SEQ ID NO: 128490 - DNA, 205 bp, Glycine max
ttttagagcaagtgttgatttgcagcgcactcatcgtattaaaggaatgattaaaatggtggccacagttggtattcctgagaatacaggtatagcattggcctgtgctatgaatagttcttttagggggcgtgccagttctgatatttacaccatctgctctcaagactgtgaattatggaatctgcttgcacaaaagcaatga

SEQ ID NO: 128491 - DNA, 187 bp, Glycine max
tgaaattttgataaaccgcgatcacaggttgccgcaccttaaaaccggaaacaaaagcaatcgttacttgatttcaagaatctctcaatttcttcctacttctttgtgtacggtttcttaagggaaagaaaatcactctctgtgctggccacagacttcgtgaatcattttcttttccactctcgta

SEQ ID NO: 128492 - DNA, 194 bp, Glycine max
gtgaattatggaatcctgcttgcacaaaagcaatgactatgtcatttaatccaaacccgtgttctgatgcatggagtttggaatttctgaagcgtaccggatttcattgtgatatcatttgtgtcactggatggactgccactccaatgcaggatgttcaggttacaattgattggtttatttctctcaggaat

SEQ ID NO: 128493 - DNA, 154 bp, Glycine max
ttcggctcgagtccaaaatccaatagagaatggacagcacaccaattcaactctgatcgatgtgaaaattatgaaccagaggtctcatatcctctatgaacagttaaaaggctttgttcaaagaatggacatgaatgtggtgaagaaggatcta

SEQ ID NO: 128494 - DNA, 254 bp, Glycine max
tctggaaccattcttgcaacaattttgggaacaaccttctggaaactcttttcctttcttagagatgctggtaatgggggagtttttgttggtaatgttgcttcagcattcacaacttcaagtgtgcttgaggcccaaagtagaaagcccaacagatatgaagtttcccaatacagatatcgcaatgtgccaataaagcgcagagcatgggttgaaggccagatgtcttttgatccatctgtagtagcaattat

SEQ ID NO: 128495 - DNA, 243 bp, Glycine max
agaaccctctctttccggcaactaggttaaagttcatcaatggcaggtcgtggcaaaaccctaggatccagcgccgccaagaaggccacctcaaggagcagcaaagccggcctccaattccccgtcggccgtatcgcccgtttcctcaaggccggaaaatacgccgagcgcgtcggcgccggtgctcccgtttacctcgccgctatcctcgaatatctcgcagccgaggttttggagttggct

SEQ ID NO: 128496 - DNA, 239 bp, Glycine max
gcatttggaaatttggctgatgacaccatcaattttgaggcttttccccacaagctggtacagtttggagagattcaggaaaaagttgtattgaaattttcacaagaggaatttcttacagcttggtcaacccaggtgcgtcctgcaacaactctgttggctgatgggtgtccatatttgtatgctatggtgcatgatagttcagtgtctacaataccaggtgattttgtcattggtgt

SEQ ID NO: 128497 - DNA, 170 bp, Glycine max
tgaaattttgataaaccgcgatcacaggttgccgcaccttaaaaccggaaacaaaagcaatcgttacttgatttcaagaatctctcaatttcttcctacttctttgtgtacggtttcttaagggaaagaaaatcactctctgtgctggccacagacttcgtgaatcattt

SEQ ID NO: 128498 - DNA, 255 bp, Glycine max
ccacattcagcttgggaccttttttgctgggacagtgagaaaactttgccaaataatttttctgcagaattgctctcttgcaaattggatactgttactggccaatattatcctgagtgggctccaattaattgtcgagttcatcgacaaccaattcacatcactgaaggaaattatgtcagaaagcaagatgtcagcattgaatatgatgcatgtacaattccaaatgattgtggttcattggttgttgccaaa

SEQ ID NO: 128499 - DNA, 255 bp, Glycine max
ttgcagtggcagaagcgaagtgaagtgggaaagagacagaaccgaaaatggttgcgactttgagtcttccgatcatagacctctcttctccccatcgtctttccacagccaattccattcgtcaggcatgcgtggaatatggtttcttttaccttgtgaaccatggggtggacaccgattttgtgagcaaagtcttcgaccaaagttgcaagttcttctcgcttccggtccaacgcaaaatggacctggcccgca

SEQ ID NO: 128500 - DNA, 234 bp, Glycine max
ctgtggttatggataagcaacaagaatgcaaagaaattaccacctggtcccatagggttgccaattttgggaagccttcacaagttgggtgcaaatcctcatcgtggcctgcaccaactagcccaaaaatatggacctatcatgcacttacgcttaggttttgtgcccaccatagttatttcttccccccaagctgctgaactgttcctcaagacccatgaccttgtctttgct

SEQ ID NO: 128501 - DNA, 247 bp, Glycine max
cagttttctgtttaatttcaagttcaagctggtgaaatcttggattagtgctcccactctcctatctggtataggacttcgtgggtagacttttctatttctctcctttctttcactctcttcttctcactgatccgcattgccgttcaaagtggtcttatttgaaaaacacttgggcgttggtgcaaatgtttgcttcgttaattttctctggagacaacaggctcactgagacaacaatttttaa

SEQ ID NO: 128502 - DNA, 252 bp, Glycine max
tggattctgattatggtattcccagggaagtctcagatcttcaaaagattcggtctttgtaccagccagagctccctccttgtctccagggaaccactgtgagggttgaatttggtgacgcaaccaccactgctgaccccactgatgcactcaccgtctgcagggcttttcctaacacttatggacaccctttggctcactttctcagggcaactgccaaagtcgctgatgctcagatcataactgagttcc

SEQ ID NO: 128503 - DNA, 248 bp, Glycine max
tctaaatgcaaagccagcatgagaatgggaaacactgatgctcaaattttgatggttccagggcgcagattcatagctcatggacattttttcaaaaatctgactcagaaagtgcgagtccaaattgttacatctgaaaagagttactggcatgtatatgatcctgacaagtttcagatgtttgacaacagtgaaataggtctttattctaatcccactttggaagatatcccacattcagcttggga

SEQ ID NO: 128504 - DNA, 242 bp, Glycine max
aacaggtttactgagaaaacaatttttactttcagagatttggacatcttggttgtttattatagcaatagaaaatcgatttagaaaatttctaccgcattacagtaggtggcatctgtataccttgttgatctacattctcccatctaacctcactgttgagattaactgtaagcggagtcagagtaatattcagatttccggcttattttacgacggcagatacaaattctggactaaac

SEQ ID NO: 128505 - DNA, 253 bp, Glycine max
cgtctttgaagtttctaagatgacttctccctacattaaatgtacactctccttcttcatagcatttggaaatttggctgatgacaccatcaattttgaggcttttccccacaagctggtacagtttggagagattcaggaaaaagttgtattgaaattttcacaagaggaatttcttacagcttggtcaacccaggtgcgtcctgcaacaactctgttggctgatgggtgtccatatttgtatgctatggtg

SEQ ID NO: 128506 - DNA, 245 bp, Glycine max
agctggtgcaaagaatgctattctcatgaatatgccaaatgctgttctttcaatgtggagatattttgttggagatctcgtctttgaagtttctaagatgacttctccctacattaaatgtacagtctctttcttcatagcatttggaaatttggctgatgacaccatcaattttgaggcttttccccacaagctggtgcagtttggagagattcaggaaaaagttgtattgaagttttcacaag

SEQ ID NO: 128507 - DNA, 156 bp, Glycine max
caagggtctctatggacaatgctagttgccatgattgtacactgatcaaggttgatagtgttaacaaacctggaattctgctggaagttgtgcaaatcttgacagaacttgacttcataattaccatagcttacatatctgctgatgggggttggt

SEQ ID NO: 128508 - DNA, 254 bp, Glycine max
actcgagccgattcggctcgagcttactgatgggaagttgtatgagacgtaagcatattcctgtatctaatattagtgcaggggaaaatcatgtagttcagatacgcctaatggcacatgaggtaattctgtcttctagtgcaagtgatttcagaactgcaatggtgagtaaaaatagcaagcctcaagctactgcaatgcatgttggagctatagaaattatcattgatactttcgcaagtcctgactgcaac

SEQ ID NO: 128509 - DNA, 250 bp, Glycine max
gaagatttgatgtctgctgggatcattgatccaacaaaggtggtcagatgttgcctggagcatgcagcctctgtagccaaaaccttcttaatgtcagattgcgtggttgttgagataaaggaacctgaggccatacctgctggaaaccccatggacaattcaggatatggactctagagcaacgagcaacggctgcttcagtgagaagagtattttgttctccctcggatgaaatgcaaaatttggtggc

SEQ ID NO: 128510 - DNA, 248 bp, Glycine max
attgaccttctcggtggaggaattttagtggacaaaactggagattggatcacacttatacaaaattgtccaattagtaacttgttgagagttgctgcttgtaagaaaggctgtttaatggttaaaattgtgatgtctgggaatgcagcagtcaaaaggagtgattgggcctcattggtacaagtgtttttaacaaacagcaacagtacagagcattttgatgcatgtaagtggacaaatcggaacca

SEQ ID NO: 128511 - DNA, 255 bp, Glycine max
ggggagtgacagcgaggcagagaaggagaagaagaagatgcttgcgctcgctcccattgctaaaccccttgccggaaagaagctttgcaagcgaaccctaaaacttgttcgtagagctgccgaacacaaatgcctgaaaagaggagtgaaggaggttgttaaaagcataaggagaggtcataaaggattgtgtgtgatagctgggaacatatcgccgattgatgtcatcactcatcttcctattctctgtgaaga

SEQ ID NO: 128512 - DNA, 251 bp, Glycine max
ggcttgcaatccgattggaaactttgggaggcctcatgatatggttgactgcaacctttgccgtcatgcagaatggcagggcggagaaccagcaagaattcgcatccaccatggggttactacttagctatgctctgaacattactagtttgcttaccggtgtgctgaggctggcaagtttggctgagactagtttaaacgcagttgaacggattggcacttacattgatttgccctcggaggctccctct

SEQ ID NO: 128513 - DNA, 249 bp, Glycine max
gtcttcctttcctctctctcttgtttgcattcatgtgagggtgattttgcagagagttaacagcacaaaccactcactctcttaacttgagattattttttttctttccccaaacccaaagaccaatgagttgcaacgggtgccgcgtccttcgaaagggttgcagcgagtcatgtatcctgcggccgtgtctacagtggatcgatacgcccgaagcacaaggccatgccactgtcttcgttgccaaat

SEQ ID NO: 128514 - DNA, 248 bp, Glycine max
attgaattttgattctagcaagcagagcttttgtcaattttctattgaccttctcggtggaggaattttagtggacaaaactggagattggatcacacttatacaaaattctccaattagtaacttgttgagagttgctgcttggaagaaaggctgtttaatggttaaaattgtgatgtctgggaatgcagcagtcaaaaggagtgattgggcctcattggtacaagtgtttttaacaaacagcaaca

SEQ ID NO: 128515 - DNA, 248 bp, Glycine max
aagaaatgataaacagtctttgtggtggtgatgaaaaattgatgcgtgaaaggacacacctgctgttggcttgttgttcaagaatggcaatttgtaagaaagatgtttggagagttgaatgtggaatcccttctggatttccgctcacagttatttgtaatagcatttttaatgagatgctcattagatatagctatgaaaaattactgcgccaggctaaagctccaagtatgtttttacaatccttc

SEQ ID NO: 128516 - DNA, 250 bp, Glycine max
tggaaatttggctgatgacaccatcaatttcaatacaacttcttactgaatctctccaaactgtaccagcttgtagggaaaagcctcaaaattgatggtgtcatcagccaaatttgaggcttttccccacaagctggtacagtttggagagattcaggataaagttgtattgaaattttcacaggaggaatttcttacagcttggtcaacccaggtgcgtcctgcaacaactctgttggctgatgggtgt

SEQ ID NO: 128517 - DNA, 250 bp, Glycine max
ctgatatttacaccatctgctctcaagactgtgaattatggaatcctgcttgcacaaaagcaatgaccatgtcatttaatccaaacccgtgttctgatgcatggagtttggaatttctgaagcgtaccggatttcattgtgatatcatttgtgtcactggatggactgctaccccaatgcaggatgttcaggttacaattgattggtttatttcctctcaggaatgtgttcccaggacctattgtgtttt

SEQ ID NO: 128518 - DNA, 251 bp, Glycine max
ctgctctcaagactgtgaattatggaatcctgcttgcacaaaagcaatgactatgtcatttaatccaaacccgtgttctgatgcatggagtttggaatttttgaagcgtaccggatttcactgtgatatcatttgtgtcactggatggactgccaccccaatgcaggatgttcaggttacaattgattggtttatttcctctcaggaatgtgttcccaggacttattgtgttttaaatccacaaaatcctt

SEQ ID NO: 128519 - DNA, 252 bp, Glycine max
aaaaatagcaagcctcaagctactgcaatgcatgtgggagctatagaaattatcattgatagtttcgcaagtcgtgactgcaacatagttggtgcaatgcttttggttgatacttatcataccaatcctgaaaatgcagttcgtagtatttttgttgcgcctttcagaggcggaaggcccattcgggtggttacatttccgaataccattgtgcagattgaaccagacatgaattcaaggtttcagcttttg

SEQ ID NO: 128520 - DNA, 164 bp, Glycine max
aagaatggcaatttgtaagaaagatgtttggagagttgaatgtggaatcccttctggatttccgctcacagttatttgtaatagcatttttaatgagatgctcattagatatagctatgagaaattactgcgccaggttaaagctccaagtatgtttttacaat

SEQ ID NO: 128521 - DNA, 251 bp, Glycine max
atcagtagtgtcatttacgcttctcttctctgcagcaactatgcctaaccctaaggtcttcttcgacatgaccatcggcggtcaatctgctggccgcatcgtgatggagctctacgccgacgtcactccccgcaccgccgagaacttccgcgcgctttgcaccggcgagaagggcgtagggcggagccgcaagcccctccactacaagggctcgtccttccaccgcgtgatcccgagtttcatgtgtcagg

SEQ ID NO: 128522 - DNA, 244 bp, Glycine max
ctttctttcactctcttcttctccatgatccgcatccacgttcacaatggtcttatttgaaaaacacttgggcgttggagcaaatgtttgcgtcgttaattttctctggacacaacaggctcactgagaaaacaatttttaattgcatagatctcgacatcttggttgtttaatatacaatagcaactcgatttagaaaattcctaccgcattacattatgtggcacctgtataccttgttgat

SEQ ID NO: 128523 - DNA, 235 bp, Glycine max
gggaaactgactttcccccagggcacttcccgaaatgttaagagaatgcctctttctatagggggaggagctggtgcaaagaatgctattctcatgaatatgccaaatgctgttctttcaatgtggagatattttgttggagatctcgtctttgaagtttctaagatgacttctccctacattaaatgtacagtctctttcttcatagcatttggaaatttggctgatgacacca

SEQ ID NO: 128524 - DNA, 237 bp, Glycine max
aaaggatgaagatcatgccaccgaaggcccaaggtgtctttggtgagggcgttgttgtacatgatagcacagtgtgccggtgcaatctgcggtgctgggttggccaaagggttccagaaatcgttctacaacaggtacggatgtggggttaacactgtcagcgatggctacaacaaaggtaccgctttgggtgctgagatcattggtacctttgttcttgtctacaccgttttctcc

SEQ ID NO: 128525 - DNA, 225 bp, Glycine max
ctgtggttatggataagcaacaagaatgcaaagaaattaccacctggtcccatagggttgccaattttgggaagccttcacaagttgggtgcaaatcctcatcgtggcctgcaccaactagcccaaaaatatggacctatcatgcacttacgcttaggttttgtgcccaccatagttatttcttccccccaagctgctgaactgttcctcaagacccatgacctt

SEQ ID NO: 128526 - DNA, 245 bp, Glycine max
gtttgttgtgagctataagctagtttatcgtgaggagaatatgaagttgtttgttttctttgttgctgcagtagttttggtagcatggccatgccatggcgcaggctaccaaaggttccctctccgaatgaaaactggctatggtgagcgttcttcggaggtaaaatgcgcaagttttaggcttgctgtggaagcacacaacatccgagcctttaaaaccattcctgaagagtgcgttgaaccaa

SEQ ID NO: 128527 - DNA, 246 bp, Glycine max
aaaactagtgcaactttgcaatttagaaagttagcagattgcgattttctcaagagaaactttaagcagatgtctaatgttttgtgggtggctcctgaggacaaggcgagtttatggtcacaacttcattatgtttcgtgtaataatctggaaatgcaagaagcttatcttgtcaatctcgtaaatgtgttacgagaattgtatttgcacagtccagaggaagctcgccaattgagaaggaaagct

SEQ ID NO: 128528 - DNA, 241 bp, Glycine max
gtttcgtgtaataatctggaaatgcaagaagcttatcttgtcaatctcgtaaatgtgttacgagaattgtatttgcacagtccagaggaagctcgccaattgagaaggaaagctctctctcgtattgaatggctgcaaaaagctgatgtgcctaccatagcacagattgaagagttccattcgatgcagaggatgatgaatgctcctgattcaaatgacaatatcgatctactgttgagca

SEQ ID NO: 128529 - DNA, 249 bp, Glycine max
ttcctctacaaaagcacaatttgttagtggaaaaaccttcaaatatgatataattggtgctggttcacattcttcagaagattttcctgaaaaggaagatcaagaaaaacccaaaaagattgataccagattgagacaaagaatagatcctcaatacaatgaggttcaggctcagatggaaacaaatttgtttaaattgtctcttgatgatgttgaaactcctaaaggttccatgttggatcttaaaat

SEQ ID NO: 128530 - DNA, 252 bp, Glycine max
ctcgagccgaatcggctcgagaagattggtaggcacagaacatgagggatatgatccttttcagggtggaattcaaaaatatgccactcccatgatgcccctagatgaagaaattctttctaaggttgcacaagatatggttgaggaatggtttgattgtgttgatgaggaggattcctttgaggaagtttctttgagtgcagcactcaatggtgttgagggtttggactatatggaaagaattcctcttgc

SEQ ID NO: 128531 - DNA, 104 bp, Glycine max
gcagttttagagcaagtgttgatttgcctcgcactcatcgtattaaaggaatgattaaaatggtggccacagttcttattcctgaggatgcaggtatagcccgg

SEQ ID NO: 128532 - DNA, 237 bp, Glycine max
gtttctttgtgtgtgtatggtgatgataacttaattagtgttcatgaatatgtcaagccttactttagtggttctaaattgaaaagctttctagctggtcataatatcaccattactgatggtattgacaaaactagtgcaactttgcaatttagaaagttagcagattgtgattttctcaagagaaactttaagcagatgtctaatgttttgtgggtggctcctgaggataaggcg

SEQ ID NO: 128533 - DNA, 244 bp, Glycine max
atcgtatcaaaggaatgattaaaatggtggccacagttggtattcctgagaatacaggtatagcattggcctgtgctatgaatagttcttttagggggcgtgccagttctgatatttacaccatctgctcttaagactgtgaattatggaatcctgcttgcacaaaagcaatgactatgtcatttaatccaaacccgtgttctgatgcatggagtttggaatttttgaagcgtaccggatttca

SEQ ID NO: 128534 - DNA, 234 bp, Glycine max
gaaaaacccaaaaagattgataccagattgagacaaagaatagatcctcaatacaatgaggttcaggctcagatggaaacaaatttgtttaaattgtctcttgatgatgttgaaactcctaaaggttccatgttggatcttaaaatttctcaatctaaaattgcacttcccaaaaacacagttggaggaaccattctgcgtagtgatctattggcaaattttttgacagagggc

SEQ ID NO: 128535 - DNA, 245 bp, Glycine max
gtcaagccttactttagtggttctaaattgaaaagctttctagctggtcataatatcaccattactgatggtattgacaaaactagtgcaactttgcaatttagaaagttagcagattgtgattttctcaagagaaactttaagcagatgtctaatgttttgtgggtggctcctgaggataaggcgagtttatggtcacaacttcattatgtttcgtgtaataatctggaaatgcaagaagctta

SEQ ID NO: 128536 - DNA, 236 bp, Glycine max
ctgaaccaaatcatcacacacacatactaagaagcaacaattcttctacaatggatctcctccttctggaaaagaccctcataggtctcttcctcgctgcggtggtcgccatcgccgtctccaccctccgcggccggaaattcaagctcccaccgggcccactccccgtcccaatcttcggcaactggctccaagtcggcgacgacctcaaccaccgcaacctcaccgatttggcc

SEQ ID NO: 128537 - DNA, 246 bp, Glycine max
atcaagacgagatatatgtacctaaacgaagagatcttgaaagagaatccaaacatgtgtgcttacatggcaccttctttggatgctaggcaagacatggtggtggtagaggtaccaaagctagggaaagaggctgcagtaaaggccataaaggagtggggccagccaaagtcaaagattacccacttgatcttctgcaccactagcggtgtggacatgcctggtgctgattaccaactcaccaaa

SEQ ID NO: 128538 - DNA, 251 bp, Glycine max
gctatggtgcatgatagttcagtgtctacaataccaggtgattttgtcattggtgttaagttgacaaccataaacaatatgtgtgcatatgggctcaatcctggtatttcaggttctcgtcttttgggcaccattcctcagtccatttcacagcaaactgtttggaatcaaatggcaacagtgagaacaccattgaattttgattccagcaagcagagtttttgtcaattttctattgaccttctcggtgg

SEQ ID NO: 128539 - DNA, 244 bp, Glycine max
atgagtaagggcaacgatattctgtgttgcgattatgctagttttgatggtttgattaccaagcaagttatgagcaagatggcagaaatgataaacagtctttgtggtggtgatgaaaaattgatgcgtgaaaggacacacctgctgttggcttgttgttcaaggatggcaatttgtaagaaagatgtttggagagttgaatgtggaatcccttctggatttccgctcacagttatttgcaata

SEQ ID NO: 128540 - DNA, 238 bp, Glycine max
aaaaaactaatttggtggaaactcccaaggaatggcaactggatctaccttgtgacaaaattcctagtgtcttgactacaactgatgagagattggtaggcacagaacatgagggatatgatccttttcttggtggaattcaaaaatatgccactcccatgatgcccctagatgaagaaattctttctaaagatgcacaagatatggttgaggaatggtttgattgtgttgatgagga

SEQ ID NO: 128541 - DNA, 243 bp, Glycine max
acaccatcaattttgaggattttccccacaagctggtgcagtttggagagattcaggaaaaagttgtattgaaattttcacaagaggaatttcttacagcttggtcaactcaggtgcgtcctgcaacaactctgttggctgatgggtgtccatatttgtatgctatggtgcatgatagttcagtgtctacaatacgtgattttgtcattggtgttaagttgacaaccataaacaatatgtgtg

SEQ ID NO: 128542 - DNA, 128 bp, Glycine max
tctgctcgagctcgagccgttccattctctctgtgtatttccctacctctcccttcaagatgcagatcatcgtcaagaccctcaccggcaagaccatcacccttgaggtggaaagctctgacaccatc

SEQ ID NO: 128543 - DNA, 237 bp, Glycine max
cggctcgagcggctctacgtgtgtgcatggtgacgataacttaattagtgttcatgaatatgtcaagccttacttgagtggctctaaattgaagagctttctagctggtcataatatcaccattactgatggtattgacaccactagtgcaactttgcagtttacagagttagcagattgcgagtttctcaagagaaattttaagcagatgtctaatgctttgtgggtggcacctga

SEQ ID NO: 128544 - DNA, 241 bp, Glycine max
gtttgttgtgagctataagctagtttatcgtgaggagaatatgaagttgtttgttttctttgttgctgcagtagttttggtagcatggccatgccatggcgcaggctaccaaaggttccctctccgaatgaaaactggctatggtgagcgttcttcggaggtaaaatgcgcaagttttaggcttgctgtggaagcacacaacatccgagcctttaaaaccattcctgaagagtgcgttgaa

SEQ ID NO: 128545 - DNA, 242 bp, Glycine max
atcgagccgattcggctcgaggcaaaaagaaagaatcccaggcgaggagaaagatggaggggaaggagcaggatgtgtcgttgggagcgaacaagttccccgagagacagccgattgggacggcggcgcagagccaagacgacggcaaggactaccaggagccggcgccggcgccgctggttgacccgacggagtttacgtcatggtcgttttacagagcagggatagcagagtttgtggcc

SEQ ID NO: 128546 - DNA, 239 bp, Glycine max
gtttcgtgtaataatctggaaatgcaagaagcttatcttgtcactctcgtaaatgtgttacgagaattgtatttgcacagtccagaggaagctcgccaattgagaaggaaagctctctctcgtattgaatggctgcaaaaagctgatgtgcctaccatagcacagattgaagagttccattcgatgcagaggatgatgaatgctcctgattcaaatgacaatatcgatctactgttgag

SEQ ID NO: 128547 - DNA, 247 bp, Glycine max
caacaatggacctccgtgaatcgataagcaaccaaaccgacgtcgctctgagcatcacaaagctcctgttgtcgaaaaacgctcgggacagtaacctcgtgtactcgccgctgtcgttgcacgttgttctgagcatcatcgcttctggctccaagggccccacactcgatcagcttctctccttcctccgatccaagtccaccgaccatctcaactccttcgcctctcagctcgtcgccgtcgtgct

SEQ ID NO: 128548 - DNA, 273 bp, Glycine max
cgaaagcgattttgagggaagaagaagatgaggccgatttttgctgggaacttggagtacgatactcgtcaatcagagcttgagcgcttgttctcaaagtatggaaggattgaccgcgtggacatgaaatctggaacttctactaagggaaaatatgctgagcttctgtcttggtttgcgaacctctctgcaaattttttttgggaaggaaaacttcctgcttgtctgctctccttctactcacagatctgcattttcacatctgatcactgg

SEQ ID NO: 128549 - DNA, 282 bp, Glycine max
cctccaaaacaagtaaacaaacaacactctcacattcagcacaacacaaacactaacacaaacaaagacaacaaccttgtttgtctgcaatcaaaacctttcaagctggcgttcgagaaccaagacacccctgtccgagaaatcaagcccaagaaccggagaatcatgggtgctggaggccctgatgacgaggacaataggtggccaccatggctgaaactcttctcaaagagagcttctttgttcaatgcaagcttcacgctgattcgcacaagagcgagt

SEQ ID NO: 128550 - DNA, 281 bp, Glycine max
ttggaatccaaaaatgagagaaatcatcagcattcacataggtcaggccgggatccaggttggcaactcctgctgggaactctactgcctggaacatggcatccagcccgatggcatgatgccaagtgactcctccttcggtgtagcccacgacgccttcaacaccttcttcagcgaaaccggatccggcaagcacgtccctcgcgccgtcttcgtcgatctcgagcccaccgtcatcgacgaatccgttgtggcacttaccgtcaactcttccaccccga

SEQ ID NO: 128551 - DNA, 187 bp, Glycine max
gaaattttgataaaccgcgatcacaggttgccgcaccttaaaaccggtaacaaaagcaatcgttacttgatttcaagaatctctcaatttcttcctacttctttgtgtacggtttcttaagggaaagaaaatcactctctgtgctggccacagacttcgtgaatcattttcttttccacacaacata

SEQ ID NO: 128552 - DNA, 278 bp, Glycine max
caggttcatcatcataaccttcaatgaaaagaaatggctgaggcaagcattggcagcaaaagcagcagatggtctttacagggaatgacagctctcgtcaccggtggatccaaaggaatcggatatgctatcgtggaggagttggcacagcttggagccactgtgcacacttgcgctcggaacgaagctgaactcaatgaatccttaaatgaatggaacacaaaaggatacagagtaactggttccgtctgtgacgtggcgtctcgtgcagaaagaca

SEQ ID NO: 128553 - DNA, 279 bp, Glycine max
ggtagacttttctatttctctcctttctttcactctcttcttctcactaatccgcattgtcgttcaaagtggtcttatttgaaaaacacttgggcgttggtgcaaatgtttgcttcgttaattttctctggagacaacaggtttactgagaaaacaatttttacttgcagagatttggacatcttggttgtttattatacaatagcaactcgatttagaaaatttctaccgcattacattaggtggcatctgtatacctgggattctacattctcccat

SEQ ID NO: 128554 - DNA, 278 bp, Glycine max
tgcacccagccgcagcagcaagtgatcgaagcgaaaagagagtaatcagcagagaaattcatcgtcgtagttatgggtaaagttcacggatcacttgcacgtgccggtaaggttagaggccaaaccccaaaagtggccaagcaggataagaagaagaagccacgtggccgcgctcacaagaggatgcagtataatcgccgattcgtcaccgccgtggtgggattcggcaagaagaggggacctaactcgtctgagaagtgaggctgaggcttaaagaa

SEQ ID NO: 128555 - DNA, 282 bp, Glycine max
tcgagcttcagcaatggtgtacgtcaaggctcagaaatcaaaagcctacttcaagagatatcaagtcaagttcaagagaagaagagagggaaaaaccgattaccgtgccaggattcggttgattaatcaggacaagaacaaatataacactccgaaataccgatttgtggttcgctttagcaacaaggacattgttgcacaaataatatctgctagcattgccggcgatttagttcttgctacagcatattcacatgagctgccacgatatggtcttgaagt

SEQ ID NO: 128556 - DNA, 277 bp, Glycine max
caggtgcgtcctgcaacaactctgttggctgatgggtgtccatatttgtatgctatggtgcatgatagttcagtgtctacaataccaggtgattttgtcattggtgttaagttgacaaccataaacaatatgtgtgcatatgggctcaatcctggtatttcaggttctcgtcttttgggcaccattcctcagtccatttcacagcaattcgtttggaatcaaatggcaacagtgagaacaccattgaattttgattccagcaagcagagtttttgtc

SEQ ID NO: 128557 - DNA, 278 bp, Glycine max
atggaatcctgcttgcacaaaagcaatgaccatgtcatttaatccaaacccgtgttctgatgcatggagtttggaatttctgaagcgtaccggatttcattgtgatatcatttgtgtcactggatggactgctaccccaatgcaggatgttcaggttacaattgattggtttatttcctctcaggaatgtgttcccaggacctattgtgttttaaatccacaaaatccttttgtgttaaataggtggatggggaaattgactttcccccagggcactt

SEQ ID NO: 128558 - DNA, 280 bp, Glycine max
gcagacttaacaacagcacaaagcgggttactgtctgttcaagctaccatctctctctctctttcttagtgcctccttgccagaagttaaaatggcccaagaaactttcctattcacatctgaatcagtgaacgaggggcaccctgacaagctctgtgaccagatctccgatgctgtgctcgatgcatgcttggagcaggaccctgacagcaaggttgcctgtgaaacctgcaccaagaccaacatggtgatggttttcggagagatcacaaccaaggcc

SEQ ID NO: 128559 - DNA, 279 bp, Glycine max
gagaagactttgtggacatgctggatggtatcttctcatttgttctactggacacccgtgacaacagttttatagtggctcgggatgctattggggtcacttccttgtacattggatgggggttagatggctctgtttggatttcatcagaaatgaaaggcctgaatgatgattgtgaacactttgagtgttttccacctggtcacttgtactctagcaaagaaagagggttccgcagatggtacaatcctccttggttctctgaggctattccatctg

SEQ ID NO: 128560 - DNA, 276 bp, Glycine max
gggatgagaaatggttatggacaactaagatggccttcaggagcagtgtatgaaggtgatttctctggtggatatatccatggtacgggcacatacattcgttctgataaattgaaatataaaggtagatggaggttgaatcttaaacatggtttggggtttcaagtttatcctaatggagatacctttgaagggccttggatgcaaggaacacaagaggggcctggcaagtatacctggaccaatggaaatgtgtatgtagggaatatgacaggt

SEQ ID NO: 128561 - DNA, 277 bp, Glycine max
gccagattgagacaaagaatagatcctcaatacaatgaggttcaggctcagatggatacaaatttgtttaaattgtctcttgatgatgttgaaactcctaaaggttccatgttggatcttaaaatttctcaatctaaaattgcacttcccaaaaacacagttggaggaaccattctgcgtagtgacctattggcaaattttttgacagagggcaattttagagcaagtgttgatttgcagcgcactcatcgtatcaaaggaatgattaaaatggtgg

SEQ ID NO: 128562 - DNA, 262 bp, Glycine max
caaatggcaacagtgagaacaccattgaattttgattccagcaagcagagtttttgtcaattttctattgaccttctcggtggaggaattttagtggacaaaactggagattggatcacacttatacaaaattctccaattagtaacttgttgagagttgctgcttggaagaaaggctgtttaatggttaagattgtgatgtctgggaatgcagcagtcaaaaggagtgattgggcctcattggtcaaagtatttttaacaa

SEQ ID NO: 128563 - DNA, 269 bp, Glycine max
ggaatttcgatgctcagtcatctcttttaccattctcttctctcttgctcttgcaggagagagccatgtccatgcatcgctacctgtggaagattattgggaagctgtttggccaaacactcccattcccactgcactgcgagatcttctaaagcctcgccctgcaggtgttgaaatcgatgaactccctaagcaaattgatgatacacagtacccaaaaacattcttctataaagaagaccttcatccaggcaaaatcatgacggtac

SEQ ID NO: 128564 - DNA, 277 bp, Glycine max
gagaaaccctagggtttggcagaagctgatcggagaagatggtgcagcgtctcacctaccgcaaggggcacagctatgccaccaaatccaaccagcccagagtcgtcaagactcccggtggcaagcttgtttatcagaccacgaagaagagggccagcggacccaagtgccctgtcactggaaagaggattcaagggattccacatctaaggccaacagaatataagagatcaaggttacccaaaaaccgaaggactgtgaaccgtgcttatggtgg

SEQ ID NO: 128565 - DNA, 279 bp, Glycine max
ggaaatttttcctttgatattaaatctcgctctagattggaaaaagtttcctctacaaaagcacaatttgttagtggaaaaaccttcaaatatgatataattggtgctggttcacattcttcagaagattttcctgaaaaggaagatcaaggaaaacccaaaaagattgatgccagattgagacaaagaatagatcctcaatacaatgaggttcaggctcagatggaaacaaatttgtttaaattgtctcttgatgatgttgaaactcctaaaggttcc

SEQ ID NO: 128566 - DNA, 290 bp, Glycine max
ggctcgagttgaattgacctggattcaaactcttctaacagaattacatgtatattttcaaactcctttgatttactgtgataatcaaagtgcagtgtccatagctcacaatccagtgttccatagtagaacaaaacatatagaaattgatgtcttttttgtaagagaacaagttttggccaaacagctctcagttgtgcatcttcctgccttagatcaatgggtagatgtcttaaccaagccactttcctcaacaagatctgaagtactgagggacaaactcaatgcga

SEQ ID NO: 128567 - DNA, 187 bp, Glycine max
gaaattttgataaaccgcgatcacaggttgccgcaccttaaaaccggaaacaaaagcaatcgttacttgatttcaagaatctctcaatttcttcctacttctttgtgtacggtttcttaagggaaagaaaatcactctctgtgctggccacagacttcgtgaatcattttcttttccacacaacata

SEQ ID NO: 128568 - DNA, 281 bp, Glycine max
gtttgagggggttttcaccacttaaacgtgagttcagagcagcagctaaattggattgtgcaaatgcatcaactcaaaatcaagttttgttctacaagcaagtttgatttgaaggtgtattcactgggagatgtggcacagcactagatcatggtgtcgtggctgttgggtatggtacagctaatggtcatgattattggtcgctaaggacttcatggggtcctagctggggagaagatggctacatcaggttagaaagagatcttgctaacagcagatca

SEQ ID NO: 128569 - DNA, 279 bp, Glycine max
ctcgagccgctcgagccgattcattccccttatctttctctcttctctctccccgcccaaaccctaactcgctaccctattccgctttctctcatccatcatgaaaggaggaaagtccaagaccgaatctaagagagccgatgccaaacttgctgtgaataagaagggcgccgccaccaagactaggaaacccgccggaaaggggaaggcagcgaaagatcctaacaagccaaagaggcctccaagtgctttcttcgttttcatggaggaattcaggaa

SEQ ID NO: 128570 - DNA, 248 bp, Glycine max
taagtttttgaattatgtgatgttcattatgaagaaaagggacaatcttagttgtcaagttggaatcaacccatacaccatggactggactggattggccactagattactgagtaagggcaacgatattctgtgttgcgattatgctagttttgatggtctgattaccaatcgagttatgagctaaatggcagagatgataaacagtctatgtggtggtgatgtaaaattactgcgtggtaggacac

SEQ ID NO: 128571 - DNA, 273 bp, Glycine max
gagaaaccctagggtttggaagaagctgatcggagaagatggtgcagcgtctcacctaccgcaagcgccacagctatgccaccaaatccaaccagcacagagtcgtcaagactcccggtggcaagcttgtttatcagaccacgaagaagagggccagcggacccaagtgccctgtcactggaaagaggattcaagggattccacatttaaggccaacagaatataagagatcaaggttacccaaaaaccgaaggactgtgaaccgtgcatatg

SEQ ID NO: 128572 - DNA, 274 bp, Glycine max
  unsure (1)..(274): unsure at all n locations
cggctcgagaggatgtcttacgttgctcataacgttaatcagccccaagagaaagatttgttggacggaaatttttcctttgatattaaatctcgctctagattggaaaaagtttcctctacaaaagcacaatttgttagtggaaaaaccttcaaatatgatatagttggtgctggttcacattcttcagaagatttttctgaaaaggaagantcagaaaaacccaaaaagattgatgccagattgaggacaagaatagatcctcaatacaatg

SEQ ID NO: 128573 - DNA, 274 bp, Glycine max
cctctttcctatctggtataggacttcgtgggtattcttttctatttttcttctttctttcactctcttcttctctttaatccgcattgtcgttcaaagtggtcttatttgaaaaacacttgggcgttggtgcaaatgtttgcttcgttaattttctctggagacaacaggtttactgagaaaacaatttttacttgcagagatttggacatcttggttgtttattatacaatagcaactcgatttagaaaatttctaccgcattacattaggt

SEQ ID NO: 128574 - DNA, 271 bp, Glycine max
ggaaggagtttgtgtccaaactgaaactgtgctaagacaagcccttggagaaaggattaggcctgttctgactgtcaataagatggacaggtgcttccttgaactccaggttgatggagaggaggcttaccagacattccagagggttattgagaatgctaatgttatcatggctacatatgaagatccactacttggtgatgttcaggtctacccagagaaaggaacagttgctttttctgctggtttgcatggctgggcttttaccctg

SEQ ID NO: 128575 - DNA, 272 bp, Glycine max
ctcatatcctcaatcaccccccctcgcactcgctcttcccttcctctggtggcgacaatgtcgactcctgctaggaagaggctgatgagagacttcaagatgctgcaacatgacccgcctgcagggatcagtggtgccccccaggataacaacataatgctgtggaatgctgtcatctttggtgctgatgatactccatgggatggaggcacgttcaagttgacactccaatttactggggtctcaaatgaataccaccgactgtacgattt

SEQ ID NO: 128576 - DNA, 247 bp, Glycine max
taatttttacttgcagagatttggacatcttggttgtttattatacaatagcaactcaatttagaaaatttctatcgctttacattagttggcatctgtataccttgttgatctacattctcccatcttttctcactgctgaaattatatataagcggaatttgattaatattcatatttccggcttattttacgactgtttatacaaattctggactaaacacgaggtaaatctagctttgacaga

SEQ ID NO: 128577 - DNA, 283 bp, Glycine max
tcggctcgagtgtgatatcatttgtgtcactggatggactgccaccccaatgcaggatgttcaggttacaattgattggtttatttcctctcaggaatgtgttcccaggacttattgtgttttaaatccacaaaatccttttgtgttaaataggtggatggggaaactgactttcccccagggcacttcccgaaatgttaagagaatgcctctttctatagggggaggagctggtgcaaagaatgctattctcatgaatatgccaaatgctgttctttcaatg

SEQ ID NO: 128578 - DNA, 254 bp, Glycine max
tgttggagcaggctggcagagcactgtagcatatgtgaacataggatgttattacctcataggtatcccggttggaatagtgcttggtaacattattcatttgcaagtcaagggtatttggattggaatgttgtttgggacactaattcaaactatagtcctaactataatcacctacaaaactaattgggatgagcaggtaattatagcccgtagtcgtattaataagtggtctaaagtggaatctgatcatg

SEQ ID NO: 128579 - DNA, 265 bp, Glycine max
tgtatggtgatgataacttaattagtgttcatgaatatgtcaagccttactttagtggttctaaattgaaaagctttctagctggtcataatatcaccattactgatggtattgacaaaactagtgcaactttgcaatttagaaagttagcagattgtgattttctcaagagaaactttaagcagatgtctaatgttttgtgggtggctcctgaggataaggcgagtttatggtcacaacttcattatgtttcgtgtaataatct

SEQ ID NO: 128580 - DNA, 271 bp, Glycine max
tctaaattgaaaagctttctagctggtcataatatcaccattactgatggtattgacaaaactagtgcaactttgcaatttagaaagttagcagattgtgattttctcaagagaaactttaagcagatgtctaatgttttgtgggtggctcctgaggataaggcgagtttatggtcacaacttcattatgtttcgtgtaataatctggaaatgcaagaagcttatcttgtcaatctcgtaaatgtgttacgagaattgtatttgcacagtc

SEQ ID NO: 128581 - DNA, 185 bp, Glycine max
attttgatataccgcgatcacaggttgccgcacctcaaaaccggaaacaaaagcaatcgttacttgatttcaagaatctctcaatttcttcctacttctttgtgtacgatttcttaacggaaagaaaatcactctctgtgctggccacagacttcgtgaatcattttcttttccacacaacatac

SEQ ID NO: 128582 - DNA, 270 bp, Glycine max
ctcgtcgcaaaatttttgacaaacctaagacgcgctgcttcactattctccctatggagtttaatcttgtggtccgtcaaaagttttgaaattttgtgaggttcattatgaagaaaagggacaagcttagttgtcaagttggaatcaacccatactccatggaatggactggtttggccaatagattactgagtaagggcaacgatattctgtgttgcgattatgctagttttgatggtttgattaccaagcaagttatgagcaagatgg

SEQ ID NO: 128583 - DNA, 268 bp, Glycine max
  unsure (1)..(268): unsure at all n locations
ctcgagccgttgaaatctggtgtctatgttccactgcctacacgactctanntggtggaaactcccaaggaatggcaactggatctaccttgccacaaaattcctagtgtcttgactacaactgatgagagattggtaggcacagaacatgagggatatgatccttttcttggtggaattcaaaaatatgccactcccatgatgcccctagatgaagaaattctttctaaagttgcacaagatatggttgaggaatggtttgattgtg

SEQ ID NO: 128584 - DNA, 268 bp, Glycine max
cattcctcagtccatttcacagcaaactgtttggaatcaaatggcaacagtgagaacaccattgaattttgattctagcaagcagagcttttgtcaatttactattgaccttctcggtggaggaattttagtggacaaaactggagattggatcacacttatacaaaattctccaattagtaacttgttgagagttgctgcttggaagaaaggctgtttaatggttaagattgtgatgtctgggaatgcagcagtcataaggagtgat

SEQ ID NO: 128585 - DNA, 267 bp, Glycine max
gaaaaattactgcgccaggctaaagctccaagtatgtttttacaatctttcaaaaattttgtttctttgtgtgtgtatggtgatgataacttaattagtgttcatgaatatgtcaagccttactttagtggttctaaattgaaaagctttctagctggtcataatatcaccattactgatggtattgacaaaactagtgcaactttgcaatttagaaagttagcagattgtgattttctcaagagaaactttaggcagatgtctaat

SEQ ID NO: 128586 - DNA, 251 bp, Glycine max
gcagaatcctaattttatgaccatggctgagcgcctgggtaatgcattgatgcaggatccgtctatgtctgccatgcttgaaagtttttctaatccatcaaataaagaccagcttgaagaaagaatggcacgcatcaaagaggatccatctctgaaacatattttggaggagatagagactgagggtcctgctgctatgatgaggtactggaataatgaggaggttttgcagaagttgggacaagccatgg

SEQ ID NO: 128587 - DNA, 269 bp, Glycine max
ttctgaattcttcactttgatcatcatcttcttcaattccagcaaggatgtcacatcaaggcgaatcatcggacccgaaatcggggaagaaggacttctcgaccgcgattctggaacgtaaaaagtcgccgaaccggcttgttgtggatgaggctgtcaacgacgacaactccgtagtgaccatgcacccccaaaccatggaaaagcttcagcttttccgaggggacactatccttatcaagggtaagatacgaaaggatactatttgc

SEQ ID NO: 128588 - DNA, 271 bp, Glycine max
cgctcgagccgaatcggctcgagcgaagatctagctagaggcagagaacgttctccctaatcttactgccgatggcgatcttctacgctttggtggccagaggcaccgtcgtcctggcggagttcagcgccgtcaccggcaacaccggcgccgtctcccgccgcatcctcgagaagcttccggcggagtccgactccaggctctgcttctctcaggatcgctacatcttccacatactccgatcggatggcatcacctacgtctgtatggc

SEQ ID NO: 128589 - DNA, 197 bp, Glycine max
ctcgagccgtgaaattttgataaaccgcgatcacaggttgccgcaccttataaccggaaacaaaagcaatcgttacttgatttcaagaatctctcaatttcttcctacttctatgtgtacggtttcttaagggaaagaaaatcactctttgtgctggccacagacttcgtgaatcattttcttttccacacaacata

SEQ ID NO: 128590 - DNA, 257 bp, Glycine max
agaccatatgcaacttatatcattgttaagttgaaacggggaaaagtacattaaaaaaacgagaaaagtaaaatccaaatccaaaacataatgacaagacaggttattatctaaacttcaaaagggtcttcgcaaaatcaagaacaacccatgacaattggtctgcttaatcgacttcctcaattttgggtccagcaccgcttccactgccagcagcaggaccatcctcatccatggctccacccgcatcaccacca

SEQ ID NO: 128591 - DNA, 238 bp, Glycine max
ctcgagccgctcgagccgagccgaatcggctcgagctcgagccgtaagatttgaacattttgacaaaccgcgatcacaggttgccgcaccttaaaacaggagacaacagcaatcgttacttgatttcaagaatctctcaatttcttcctacttctttgtgtacggtttcttaagggaaagaaaatcactctctgtgctggccacagactccgtgagtcattttcttttccacacaaca

SEQ ID NO: 128592 - DNA, 264 bp, Glycine max
cattttcccaatttcgcgataccaaaacctcagcaatcaacaatgtcgtttttcccaaggggccgtctcgacgacgacacggtggacgactacgacgagtacgaccccaccccttacggcggcggctacgacatcgccctcaactacggccgccccatcccaccctccgatgagacctgctaccctctaggagcctcttcttctgatgacaacttcgattatgatcgccctcaatacacctctaacgctgaaccctctgcttat

SEQ ID NO: 128593 - DNA, 188 bp, Glycine max
taaattttgataaaccgcgatcacaggttgccgcaccttaaaaccggaaactaaagcaatcgttacttgatttcaagaatctctcaatttcttcctacttctttgtgtacgatttcttaagggaaagaaaatcactctctgtgctggccacagacttcgtgaatcattttcttttccacacaacatac

SEQ ID NO: 128594 - DNA, 266 bp, Glycine max
ccagacatgaattcaaggtttcagcttttgagtaccactaccaatggtgattttgttcaaggaaaagatctcgcaatggttaaagttaatgtagcatgtgctgctgttggcttgacatcaagttacactccaactccattgttggaatctggtttgcaaaaagacagagggttaattgtggagtattttggaaggatgtcttacgttgctcacaacgttaatcagccccaagagaaagatttgttggagggaaatttttcctttga

SEQ ID NO: 128595 - DNA, 269 bp, Glycine max
  unsure (1)..(269): unsure at all n locations
cttaaacgtatataggattgaggtgtatactcctcagaggcaaagatgagtggtgttggatatattgggtccaagatcagcctcatatcaaagtctgacattcgttatgtgggcatattgcatagcatcanttcagccgattcaaccgtagctcttgaacaagttcgttcttatggaacggagggccgccgaggaagtcctgcagaggaaattcctccttctgacaatatttttgaatatatagtgtttcgtggttcagatgtaaaaga

SEQ ID NO: 128596 - DNA, 266 bp, Glycine max
caatatattccattctctctgtgtatttccctacctctcccttcaagatgcagatcttcgtcaagaccctcaccggcaagaccatcacccttgaggtggaaagctctgacaccatcgacaacgtcaaggccaagatccaggacaaggaaggaatccccccggaccagcaacgtctcattttcgccggaaagcaacttgaggacggccgtacccttgctgactacaacattcagaaggagagtactcttcacctcgtcctccgtctc

SEQ ID NO: 128597 - DNA, 261 bp, Glycine max
aagaatggcaatttgtaagacagatgtttggagagttgaatgtggaatcccttctggatttccgctcacagttatttgtaatagcatttttaatgagatgctcattagatatagctatgaaaaattactgcgccaggctaaagctccaagtatgtttttacaatccttcaaaaattttgtttctttgtgtgtgtatggtgatgataacttaattagtgttcatgaatatgtcaagccttactttagtggttctaaattgaa

SEQ ID NO: 128598 - DNA, 203 bp, Glycine max
gctcgatgacaggttcatcatcataaccttcaatgaaaagaaatggctgaggcaagcattggcagcaaaagcagcagatggtctttacagggcatgacagctctcgtcaccggtggatccaaacgaatcggatatgctatcgtggaggagatggcacagctaggagccactgtgtacacttgcgctcggaacgaagctgaact

SEQ ID NO: 128599 - DNA, 262 bp, Glycine max
gtcctgactgcaacatagttggtgcaatgcttttggttgatacttatcataccaatcctgaaaatgcagttcgtagtatttttgttgcgcctttcagaggcggaaggcccattcgggtggttacatttccgaataccattgtgcagattgaaccagacatgaattcaaggtttcagcttttgagtaccactaccaatggtgattttgttcaaggaaaagatctcgcaatggttaaagttaatgtagcatgtgctgctgttgg

SEQ ID NO: 128600 - DNA, 262 bp, Glycine max
cttacgtaaccttgcacagattgacatcactgttcctcctcgggacacggttttcattcaaggagatggaaatgtcaaaggagcgtatatcactgaggccgatgtgggagtttttacaatccaagcggcaaatgaccctaatgccttgaacaaagctgtgcacataagactccctaacaattatttgtccttaaatgatatcatctctttgtgggagaaaaaaatagggaagactcttgagaaaatttatgttccagaggaa

SEQ ID NO: 128601 - DNA, 262 bp, Glycine max
  unsure (1)..(262): unsure at all n locations
gaagaatcccagaacaagccccccagcgagcagtccactaccgaactcatcacgagcgcgaagctggtggcggaggcggcgcagtcggctctgaagagcgacagcgncaaagtggacaaggccaaggtggctgacgctgccggcgatcttctcgacgcggcggggaagtatggaaaacttgatgacaaacaaggcatagggcaatatgttgacaaggctgctgattatctgcataattaccagggtgataataccactgctc

SEQ ID NO: 128602 - DNA, 262 bp, Glycine max
atccctaacgcgtgcatagcagagtcagagacagagacgcagccatggggcggagacctgcgaggtgttataggcaaattaagaacaagccataccccaagtcacgtttctgccgtggtgttcctgatcccaagatcaggatttatgatgttggtataaagaagaagggtgttgatgagtttcctttctgtgtccatctggttagttgggagaaggaaaatgtttcaagtgaggccctggaagctgctcgcattgcttgcaa

SEQ ID NO: 128603 - DNA, 263 bp, Glycine max
ctctgctccactttggaacgccttttggcgtgggagaagaagctctacgaggagattaaggctagagaaggtgtgaagattgaacatgaaaagaaattgtcagcactgcagactcaggaatacaaaggagaggatgaagctaagatattcaaaaccaaggcttccataaataggctgcagtcactaataagtgttacatctcaggctgtgtctaccacctcaactgccattattggccttagggactctgatcttgtccctca

SEQ ID NO: 128604 - DNA, 186 bp, Glycine max
aaattttgataaaccgcgatcacaggttgccgcaccttaaaaccggaaacaaaagcaatcgttacttgatttcaagaatctctcaatttcttcctacttctttgtgtacgatttcttaagggaaagaaaatcactctctgtgctggccacagacttcgtgaatcattttcttttccacacaacata

SEQ ID NO: 128605 - DNA, 266 bp, Glycine max
gattttctcaagagaaactttaagcagatgtctaatgttttgtgggtggctcctgaggacaaggcgagtttatggtcacaacttcattatgtttcgtgtaataatctggaaatgcaagaagcttatcttgtcaatctcgtaaatgtgttacgagaattgtatttgcacagtccagaggaagctcgccaattgagaaggaaagctctctctcgtattgaatggttgcaaaaagctgatgtgcctaccatagcacagattgaagagtt

SEQ ID NO: 128606 - DNA, 258 bp, Glycine max
ctcctcttagactccagtttaagcagttcctttccttccctctcaattctcaaattgttatattaataaaagtgagaaagtttaggcttgtgcttttattttgtgtgaatgtaatatactttgtgtacgtagacttggctattgggagtgctaggttgggaagtgtttcgcattcaacaattctgtagttgaaggtgattaaatgaattatagctatttgtttctttacacttaaaaaaaaaaaaaaaaaaaaagaaa

SEQ ID NO: 128607 - DNA, 199 bp, Glycine max
ctgcaatgcatgtgggagctatagaaattatcattgatagtttcgcaagtcctgactgcaacatagttggtgcaatgcttttggttgatacttatcataccaatcctgaaaatgcagttcgtagtatttttgttgcgcctttcaaggcggaaggcccattcgggtggttacatttccgaataccattgtgtcgattgaa

SEQ ID NO: 128608 - DNA, 258 bp, Glycine max
gtgcaagtgatttcagaactgcaatggtgagtaaaaatagcaagcctcaagctactgcaatgcatgtgggagctatagaaattatcattgatagtttcgcaagtcctgactgcaacatagttggtgcaatgcttttggttgatattatcataccaatcctgaaaatgcagttcgtagtatttttgttgcgcctttcagaggcggaaggcccattcgggtggttacatttccgaataccattgtgcagattgaaccaga

SEQ ID NO: 128609 - DNA, 266 bp, Glycine max
caagactgtgaattatggaatcctgcttgcacaaaagcaatgactatgtcatttaatccaaacccgtgttctgatgcatggagtttggaatttctgaagcgtaccggatttcattgtgctatcatttgtgtcactggatggactccactccaatgcaggatgttcaggttacaattgattggtttatttcctctcaggaatgtgttcccaggacttattgtgttttaaatccacaaaatccttttgtgttgaataggtggatgggg

SEQ ID NO: 128610 - DNA, 247 bp, Glycine max
gatcagatgccgttgttgttcagagcaagggtcgatcgtctttttctcaaacagctgctgtgaggcatcttacaggttctgttaccagagcccatggacttcgttttgctgtggttgttgctagatttaatgaaattgttaccaaccgctcttggaaggtgctttgggtactttcaataattattcagttcaagatgaggatatcgatgttgtgtgggtacctggtagttttgaaattggtgttgtg

SEQ ID NO: 128611 - DNA, 192 bp, Glycine max
agttggtattcctgagaatacaggtatagcattggcctgtgctatgaatagttcttttagggggcgtgccagttctgatatttacaccatctgctctcaagactgtgaattatggaatcctgcttgcacaaaagcaatgactagtcatttaatccaaacccgtgttctgatgcatggagtttggaatttttg

SEQ ID NO: 128612 - DNA, 175 bp, Glycine max
ggagagttgaatgtggaatcccttctggatttccgctcacagttatttgtaatagcatttttaatgagatgctcattagatatagctatgaaaaattactgcgccaggctaaagctccaagtatgtttttacaatccttcaaaaatttgtttctttgtgtgtgtatggtgatgat

SEQ ID NO: 128613 - DNA, 148 bp, Glycine max
ctgctgttgacaagttgtattctactaaggttaataagtttgcaaaaattatgaaccttagacaaagtgttgttggtgatcttaaacttcttactgatgggaagttgtatgagggtaagcatattcctgtatctaatattagtgcagg

SEQ ID NO: 128614 - DNA, 131 bp, Glycine max
caaacccgtgttctgatgcatggagtttggaatttctgaagcgtaccggatttcattgtgatatcatttgtgtcactggatggactgctaccccaatgcaggatgttcaggttacaattgattggtttatt

SEQ ID NO: 128615 - DNA, 122 bp, Glycine max
cggatttcattgtgatatcatttgtgtcactggatggactgccactccaatgcaggatgttcaggttacaattgattggtttatttcctctcaggaatgtgttcccaggacttattgtgttt

SEQ ID NO: 128616 - DNA, 281 bp, Glycine max
ttcggctcgaggcaaactgtttggaatcaaatggcaacagtgagaacaccattgaattttgatcctagcaagcagagcttttgtcaattttctattgaccttctcggtggaggaattttagtggacaaaactggagattggatcacacttatacaaattctccaattagtaacttattgagagttgctgcttggaagaaaggctgtttgatggttaagattgtgatgtctgggaatgcagcagtcaaaaggagtgattgggcctcactggtacaagtgttt

SEQ ID NO: 128617 - DNA, 172 bp, Glycine max
ctcgagccgctcgagccgcttgggaatttctcaagattttgaaattgctggtaatactcttatgccagctttttctgttccacaggctactgccagatcttctgaaaatgcggaatcctctgcatgatctggaatttgtgtttctttcgtttgttcgtttgtttaattcaat

SEQ ID NO: 128618 - DNA, 204 bp, Glycine max
ctcgagccgaactcggctcgagcggctcgagttacgttgctcacaacgttaatcctcccacagagaaagatttgttggagggaaatttttcctttgatattaaatctcgctctagattggaaaaagtttcctctacaaaagacaatttgttagtggaaaaaccttcaaatatgatataattggtgctggttcacattcttcaga

SEQ ID NO: 128619 - DNA, 261 bp, Glycine max
gcgcagagcatgggttgaaggccagatgtcttttgatcagtctgtagtagcaattatgtctaaatgcaaagccagcatgagaatgggaaacactgatgctcaaattttgatggttccagggcgcagattcatagctcatgacattttttcaaaaatctgactcagaaagtgcgagtccaaattgttacatctgaaaagagttactggcatgtgtatgatcctgacaagtttcagatgtttgacaacagtgagatatgtctt

SEQ ID NO: 128620 - DNA, 265 bp, Glycine max
cgaaaacgttcaaagcgttctcgcgaccatccttctgaagaagagtacctcgccctctgcctcatcatgctcgctcgcggcggcaccaccaccgtcaacaaccgccacgtcagccctccaccgccacagccacagccacagcgacaccagatccttccaccaagctcagttacaaatgctccgtttgcgacaagagcttcccctcttaccaagcgctcggtggacacaaggccagtcaccggaaatcgccgccgccgccgaagac

SEQ ID NO: 128621 - DNA, 183 bp, Glycine max
tgaaattttgataaaccgcgatcacaggttgccgcaccttaaaaccggaaacaaaagcaatcgttacttgatttcaagaatctctcaatttcttcctacttctttgtgtacggtttcttaagggaaagaaaatcactctcgtgctggccacagacttcgtgaatcattttcttttccacacaa

SEQ ID NO: 128622 - DNA, 242 bp, Glycine max
gaacaggggtttattcccttgactcgtattgaagataatttgaatgggacacaaattgcacataaagctggcgaattatctgtatttttgggtgtaccacttttttactgatgagaattgaacttaattagaaattaaatgcacaaaaagcttcagaattgtcctatttattttgtgtaccttttgaactattttgaaaaaaaaaaaacgttttttttttccaaaatatttccatttttata

SEQ ID NO: 128623 - DNA, 259 bp, Glycine max
gaaaaacccaaaaagattgataccagattgagacaaagaatagatcctcaatacaatgaggttcaggctcagatggaaacaaatttgtttaaattgtctcttgatgatgttgaaactcctaaaggttccatgttggatctaaaatttctcaatctaaaattgcacttcccaaaaacacagttggaggaaccattctgcgtagtgatctattggcaaattttttgacagagggcaattttagagcaatgttgattgcacg

SEQ ID NO: 128624 - DNA, 145 bp, Glycine max
gtgctgatggcattaagcctgaagccatcgatgctttgcatattatcccgaaggagctttcacttaagattgttagtaagattgaagctggggaaaggttcagtgtgtatgttgtggttccaatgtggccagagggtgtcccaaa

SEQ ID NO: 128625 - DNA, 159 bp, Glycine max
atatattccattctctctgtgtatttccctacctctcccttcaagatgcagatcttcgtcaagaccctcaccggcaagaccatcacccttgaggtggaaagctctgacaccatcgacaacgtcaaggccaagatccaggacaggaaggaatcccccgga

SEQ ID NO: 128626 - DNA, 208 bp, Glycine max
tgttcttgcaaagcgagctcatgaatttgaaaaacatgttgctcatgaaagcctcaaggatcaaattcctgctgttgacaagttgtattctactaaggttaataagtttgcaaaaattatgaaccttagacaaagtgtgttggtgatcttaaacttcttactgatgggaagttatatgagggtaagcatattcctgtatctaatatta

SEQ ID NO: 128627 - DNA, 258 bp, Glycine max
gaaagatgtttggagagttgaatgtggaatcccttctggatttccgctcacagttatttgcaatagcatttctcatgagatgctcattagatatagctatgaaatattactgcgccaggctaaagctccaagtatgttttacattccttcaaaaattttgtttctttgtgtgtgtatggtgatgataacttaattagtgttcatgaatatgtcaagccttactttagtggttctaaattgaaaagctttctagctagt

SEQ ID NO: 128628 - DNA, 250 bp, Glycine max
ggaatcctgcttgcacaaaagcaatgactatgtcatttaatccaaacccgtgttctgatgcatggagtttggaatttttgaagcgtaccggatttcactgtgatatcatttgtgtcactggatggactgccaccccatgcaggatgttcaggttacaattgattggtttatttcctctcaggaatgtgttcccaggacttattgtgttttaaatccacaaaatccttttgtgttaaataggtggatgggg

SEQ ID NO: 128629 - DNA, 152 bp, Glycine max
atttcattgtgatatcatttgtgtcactggatggactgctaccccaatgcaggatgttcaggttacaattgattggtttatttcctctcaggaatgtgttcccaggacctattgtgttttaaatccacaaaatccttttgtgttaaataggt

SEQ ID NO: 128630 - DNA, 261 bp, Glycine max
ctcgagccgcgctgcttcactattctccctatggagtttaatcttgtggttcgtcagaagtttttaaattttgtgaggttcattatgaagaaaagggacaagcttagttgtcaagttggaatcaacccatactccaggaatggactggtttggccaatagattactgagtaagggcaacgatattctgtgttgcgattatgctagttttgatggtttgattaccaagcaagttatgagcaagatggcagaaatgataaaca

SEQ ID NO: 128631 - DNA, 152 bp, Glycine max
ctcgagccgctcgagccgattcggctcgagtacatttccgaataccatcgtgcagattgaaccagacatgaactcaaggtttcagcttttgagtaccactaccaatggtgattttgttcaagggaaagatctcgaatggttaaagttaatgt

SEQ ID NO: 128632 - DNA, 160 bp, Glycine max
gaaattttgataaaccgcgatcacaggttgccgcaccttaaaaccggaaacaaaagcaatcgttacttgatttcaagaatctctcaatttcttcctacttctttgtgtacggtttcttaagggaaagaaaatcctctctgtgctggccacagacttcgtg

SEQ ID NO: 128633 - DNA, 175 bp, Glycine max
tgataaaccgcgatcacaggttgccgcaccttaaaaccggaaacaaaagcaatcgttacttgatttcaagaatctctcaatttcttcctacttctttgtgtacgatttcttaagggaaagaaaatcactctcttgctggccacagacttcgtgaattattttcttttccacacaa

SEQ ID NO: 128634 - DNA, 255 bp, Glycine max
gtctcaaccaatatccaccattccattcagtggcagagatggcagttccccgagctgcacactggtcagaaaaatacaacaatgtggtaaagggaacgagtgaaaagggttttgccgtgtttggctatttgctctgattccaattgatgagatagcaacagcgtttaaacagggagaaggcaatgtgaatgaagatgaagcaggttccgtggcagagagttcttagagcactactaatagggtagctattttctt

SEQ ID NO: 128635 - DNA, 238 bp, Glycine max
gtgaggtgaactcgtgagggttgtggtagtttggcagcgacacgtatcttcatcaataatcgcagaagcagtttccggtgcatctcatcgtcttccaaaatgaacgacgcagatgtctcgaagcaaatccacagatggtgcgtttcatccgccaggaagctgaggagaaagccaacgagatctctgaattcaatatcgagaagctgcagttggttgaagccgaaaagaagaagatcag

SEQ ID NO: 128636 - DNA, 135 bp, Glycine max
ctcgagccgaatcggctcgaggttttaaatccacaaaatccttaggtgttgaataggtgactggggaaactaactttccgccagggcacttcccgaagtgttaagagaatgcctctttctatagggggaggactg

SEQ ID NO: 128637 - DNA, 163 bp, Glycine max
cttgccagcttctgcagaaaactgaaagttctaaatctttgtggatgtgttagagctgcatccgatactgcattacaggctattggacaatactgcaatcagctacaatctttgaaccttggatggtgtgatatgttggcgatgttggagtgactactttagc

SEQ ID NO: 128638 - DNA, 252 bp, Glycine max
ggtgttgttactgctgctcttttctcttttcttttctctttagttctctcttctcctttctttttctttttcttcttcttctgagcttgtttaagcttttcttccattaacatattatcataatgtgtggattcttgctgttcttggttgttctgatgactctcgagccaaaagggtccgcgtgcttgagctctctcgcagattgaagcaccgtggccctgactggagtgggctccatcaacatggtgactg

SEQ ID NO: 128639 - DNA, 249 bp, Glycine max
acaagtttggtgccatgggaattgacacccctggcgtcgttgcactgcttggagcacacagtgttggtcgaacccattgtgtgaagttggtgcaccgtttgtacacagagattgatccagctctgaacctgaccacgtccctcacattctgaagaagtgccctgatgccattccagaccctcaggcggtgcagtacgtgagaaacgaccgtggcactcccatgattctagacaacaactactacagaaa

SEQ ID NO: 128640 - DNA, 235 bp, Glycine max
cgcaatggttaaagttaatgtagcatgtgctgctgttggcttgacatcaagttacactccaactccattgttggaatctggtttgcaaaaagacagagggttaattgtggagtattttggaaggatgtcttacgttgctcacaacgttaatcatgccccaagagaaagatttgttggagggaaatttttcctttgatattaaatctcgctctagattggaaaaagtttcctctac

SEQ ID NO: 128641 - DNA, 184 bp, Glycine max
tcaagctactgcaatgcatgtgggagctatagaaattatcattgatagtttcgcaagtgctgactgcaacatagttggtgcaatgcttttggttgatacttatcataccaatcctgaaaatgcagttcgagtatttttgttgcgcctttcagaggcggaaggcccattcgggtggttacatttc

SEQ ID NO: 128642 - DNA, 144 bp, Glycine max
ctcgagccgattgaattttgattccagcaagcagagtttttgtcaattttctattgacctatctcggtggaggaattttagtggacaaaactggagattggatcacacttatacaaaattctccaattagtaacttgttgagag

SEQ ID NO: 128643 - DNA, 114 bp, Glycine max
aattttgaggcttttccccacaagctggtgcagtttggagagattcaggaaaaagttgtgttgaaattttcacaagaggaatttcttacagcttggtcaactcaggtgcgtcct

SEQ ID NO: 128644 - DNA, 240 bp, Glycine max
attgaaaagctttctagctggtcataatatcaccattactgatggtattgacaaaactagtgcaactttgcaatttagaaagttagcagattgcgattttctcaagagaaactttaagcagatgtctatgttttgtgggtggctcctgaggacaaggcgagtttatggtcacaacttcattatgtttcgtgtaataatctggaaatgcaagaagcttatcttgtcaatctcgtaaatgtg

SEQ ID NO: 128645 - DNA, 248 bp, Glycine max
gagaacaaccctgactttgtggtcgaagttgtctctctcttctttgaagattctgaaaggcttctcaaagatctcacctttgccctagatcagaatggcgttgacttcaaaaaagttgatgctcattgcaccagttaaagggtagcagttcaagcataggtgcacaaagggtgaaaaatgcctgcattgctttcaccaacttctgtgaggagcagaacacagatgcgtgcgtcagatgtctgcaacaa

SEQ ID NO: 128646 - DNA, 183 bp, Glycine max
gaaattttgataaaccgcgatcacaggttgccgcaccttaaaaccggaaacaaaagcaatcgttacttgatttcaagaatctctcaatttcttcctacttctttgtgtacggtttcttaagggaaagaaatcactctctgtgctggccacagacttcgtgaatcattttcttttccacacaac

SEQ ID NO: 128647 - DNA, 236 bp, Glycine max
gaagacggttgtggggattcgatgggggccaccgttcactcgccgctagtcacttatgcttccgtcatatctctgcttacactctgtcctccgtttgtcatacttctatggtacaccatgactctgctgacggatctgtttccgagacattccattatttaaggcagaatgggttgcagggtttgctacatatatggcccacccccactcccaccgcctgcaaatcattgcagtct

SEQ ID NO: 128648 - DNA, 152 bp, Glycine max
gaaaaacccaaaaagattgataccagattgagacaaagaatagatcctcaatacaatgaggttcaggctcagatggaaacaaatttgtttaaattgtctcttgatgatgttgaaactcctaaaggtccatgttggatcttaaaatttctcaa

SEQ ID NO: 128649 - DNA, 283 bp, Glycine max
cacgagtacaagattcacaatgcagagatccttttccgtgaggatgctacagtggatgatctcatagatgtcattgaaggaaaccgaaaatacatgaagtgtgtatatgtctacaacaagatagatgttattggtattgatgatgtggacagattagcccgtcaaccaaattctgttgtcattagctgcaatttgaagctgaacttagacagactgcttgcaaggatgtgggatgaaatgggtctggttagagtttacacaaaaccacaaggccagcagcctg

SEQ ID NO: 128650 - DNA, 279 bp, Glycine max
gacccacaaaaatggagaaccaacaaccggcacctatctccgtgacactgctacatctgctatccaaaacttcgctcccatcaacaaaatccaccaacatctctgcgcgtttcacttttactcatatgacatgagccggcaagtggaggcacaccatttttgcgcgcaccagaacgaggagatgaggcagtgccttatctacgacagccccgagaagaaagccaggctcatagggctggaatacatcatctccgaaaacctttacttgacactccccga

SEQ ID NO: 128651 - DNA, 272 bp, Glycine max
ggcgggtgctcgtactgctactgtcatgcctagaagggcggcggtcatcgtgtcggcggcgacggcggagacgcgaagaagaagggcgaatcgaaagggttcgtggaagagatgaggttcgtggcgatgaggctgcacacgagggaccaggccagggagggcgagaaggaggtcaagcagcccgaggagatagccgttaccaagtgggacccatccgtcgaagggtacctgaaatttcttgtggacagtaagctcgtttatgacacgctgga

SEQ ID NO: 128652 - DNA, 273 bp, Glycine max
gcaaagctcaaagcaaggttggaagtcctacagaaaaatcaaaggaattttatgggacaagatttggagggcctaagtatcaaagagcttcaaaatttggaacatcaacttgatagtgctctaaaacacattagatcacggaagaaccaaatcatgcatgaatctatttcagagcttcataaaaaggataaggtcctacaggaacaaaataacactctcgcaaagaagataaaggagaaagagaaggcactagcccagcatgcacaaatggag

SEQ ID NO: 128653 - DNA, 271 bp, Glycine max
ccaagcaagttatgagcaagatggcagaaatgataaacagtctttgtggtggtgatgaaaaattgatgcgtgaaaggacacacctgctgttggcttgttgttcaaggatggcaatttgtaagaaagatgtttggagagttgaatgtggaatcccttctggatttccgctcacagttatttgcaatagcatttttaatgagatgctcattagatatagctatgaaaaattactgcgccaggctaaagctccaagtatgtttttacaatcctt

SEQ ID NO: 128654 - DNA, 271 bp, Glycine max
gaggattcctttgaggaagtttccttaagtgcagcactcaatggtgttgagggtttggactatatggtaagaattcctcttgccacatctgagggtttttctcacgtactttcacgcaaaaatggtgataaaggcaaaaggagatttgtttctggggatggtgaagagatgacattgattccaggaaccagtgttgaagaggcttacaacaagctaatagttgaacttgagaaaagtgttcctacattggttggcattgagtgtcccaagg

SEQ ID NO: 128655 - DNA, 272 bp, Glycine max
gcaaagatgtttcctttcgggcaaaagggtcaaaagataaaggggactatggtggttatgcagaagaatgtgttggatatcaacagcatcaccagtgttggagggatcgttgaccaaggcttaggcttcataggcagtgcagtcgatgcacttacttttgcagccaccaaaatctccatccagttgattagtgctaccaaggctgatggtgggaaaggaaaaattggaaagagtacaaatttaagaggaaagataacattaccaaccttggg

SEQ ID NO: 128656 - DNA, 270 bp, Glycine max
ctttccaatacaataatcactaactgaatattcgatcggagatgtctgccgccgccgaagaagctaacgctcccgccgtcgaaaagccggttgaggaggtgaaggcgccgaaccccgcgaaggagaagaaacctaaggctccgaaggaaaagaagccaaaacaggccaaaacagcttcacatcctccatattttcagatgattaaggaggctttgatcgctttgaacgagaaaggaggatcgagtccttatgcgatacgaagtacatgga

SEQ ID NO: 128657 - DNA, 276 bp, Glycine max
aaactattgaaagcatcacttgggtcaatagatttcatcacctctttatgtcaatctgaagatgagtcagaaaagatcaaggaagctgttaatacatcttcttatggaagtgaatatgttcatgctgccctttcagttaatcagaaggtaacattgattcatctagaggataggccacgtcctggggttgttaatgttattcaagaattgcaagatgaagcaaagttacgtgtgatgatgttaactggtgatcatgagtctagtgcaaggcgagtt

SEQ ID NO: 128658 - DNA, 279 bp, Glycine max
cttactttagtggttctaaattgaaaagctttctagctggtcctaatatcaccattactgatggtattgacaaaactagtgcaacgttgcaatttagaaagttagcagattgtgattttctcaagagaaactttaggcagatgtctaatgttttgtgggtggctcctgaggacaaggcgagtttatggtcacaacttcattatgtttcatgtaataatctggaaatgcaagaagcttatcttgtcaatctcgtaaatgtgttacgagaattgtatttgc

SEQ ID NO: 128659 - DNA, 276 bp, Glycine max
gtctgggaatgcagcagtcaaaaggagtgattgggcctcattggtacaagtatttttaacaaacagcaacagtacagagcattttgatgcatgtaagtggacaaaatcggaaccacattcctgggaattgatcttcccaatagaggtatgtggtcccaataatggttttgaaatgtggagttctgagtgggcaaatcaaacttcatggcatttgagtttccttattgacaatcccaaacagtctacagtttttgatattctcttgggaatttctca

SEQ ID NO: 128660 - DNA, 270 bp, Glycine max
cctcagtctatttcacagcaaactgtttggaatcaaatggcaacagtgagaacaccattgaattttgattctagcaagcagagcttttgtcaattttctattgaccttctcggtggaggaattttagtggacaaaactggagattggatcacacttatacaaaattctccaattagtaacttgttgagagttgctgcttggaagaaaggctgtttaatggttaaaattgtgatgtctgggaatgcagcagtcaaaaggagtgattgggcc

SEQ ID NO: 128661 - DNA, 269 bp, Glycine max
tgatgagagattggtaggcacagaacatgagggatatgatccttttcttggtggaattcaaaaatatgccactcccatgatgcccctagatgaagaaattctttctaaggttgcacaagatatggttgaggaatggtttgattgtgttgatgaggaggattcctttgaggaagtttctttaagtgcagcactcaatggtgttgagggtttggactatatggaaagaattcctcttgctacatctgagggttttcctcatgtgctttcac

SEQ ID NO: 128662 - DNA, 266 bp, Glycine max
tagatcgcgagcggccgcccgcgatctagaactagcggctcgagcgagaactttctcgagcgccgcctccagacccttgttttcaagtccggcatggccaagtccatccaccatgctagggttcttatcaagcagagacatatcagggttggtaggcaagtggtgaacatcccatctttcttggtaagggttgactcacagaagcacattgacttttcacttacaagtccccttggtggtggtcgccctggaagagtgaagagaag

SEQ ID NO: 128663 - DNA, 154 bp, Glycine max
gaaattttgataaaccgcgatcacaggttgccgcaccttaaaaccggaaacaaaagcaatcgttacttgatttcaagaatctctcaatttcttcctacttctttgtgtacggtttcttaagggaaagaaaatcactctctgtgctggccacaga

SEQ ID NO: 128664 - DNA, 269 bp, Glycine max
gggtaagcatattcctgtatctaatattagtgcaggggaaaatcatgtagttcagatacccctaatggcacaggaggaaattctgtcttctagtgcaagtgatttcagaactgcaatggtgagtaaaaatagcaagcctcaagctactgcaatgcatgttggagctatagaaattatcattgatagtttcgcaagtcctgactgcaacatagttggtgcaatgcttttggttgatacttatcatgccaatcctgaaaatgcagttcgta

SEQ ID NO: 128665 - DNA, 269 bp, Glycine max
cgatattctgtgttgcgattatgctagttttgatggtttgattaccaagcaagttatgagcaagatggcagaaatgataaacagtctttgtggtggtgatgaaaaattgatgcgtgaaaggacacacctgctgttggcttgttgttcaaggatggcaatttgtaagaaagatgtttggagagttgaatgtggaatcccttctggatttccgctcacagttatttgcaatagcatttttaatgagatgctcattagatatagctatgaaa

SEQ ID NO: 128666 - DNA, 272 bp, Glycine max
gaaaaatttgtacaaatgatgaagagcatctatgaaacagaagttacagattggccagtaccactgaaaatcatttctggaaccattcttgcaacaattttgggaacaaccttctggaaactcttttcctttcttagagatgctggtaatgggggagtttttgttggtaatgttgcttcagcattcacaacttcaagtgtgcttgaggcccaaagtagaaagcccaacagatatgaagtttcccaatacagatatcgcaatgtgccaataaa

SEQ ID NO: 128667 - DNA, 260 bp, Glycine max
cagagtagagcagcagagaagagagaaaacggcactgcagccgtagaaggaaaaccgaccatggtgcacgtctccttttacaggaactatggtaagacgtttaagaagccccgccgtccgtacgagaaggagcgtctagacgcggagctgaagctggtgggggagtacgggctgcggtgaagagggagctgtggagggtgcagtacgcgctcacacgcatatgcgaaaaagcgcggaatatctttacctcgacgagaaga

SEQ ID NO: 128668 - DNA, 279 bp, Glycine max
gagaaaccctagggtttggaagaagctgatcggagaagatggtgcagcgtctcacctaccgcaagcgccacagctatgccaccaaatccaaccagcacagagtcgtcaagactcccggtggcaagcttgtttatcagaccacgaagaagagggccagcggacccaagtgccctgtcactggaaagaggattccagggattccacatttaaggccaacagaatataagagatcaaggttacccaaaaaccgaaggactgtgaaccgtgcatatggtggtg

SEQ ID NO: 128669 - DNA, 273 bp, Glycine max
gggtacaacaggaaataatcctaattatggaactacaagaaatcctcatgcacctgacaggtatactggtggatcttcttcaggtccggctgcaattgtggcttctggactatgttctgctgcattgggaactgatggtggaggttcagtccgtattccttcttccctttgtggtgtggtgggatttaagacaacttacgggcggacaagcatggaggggtcattatgtgattctgggactgtggaaattattggacccattgcttcaacggt

SEQ ID NO: 128670 - DNA, 271 bp, Glycine max
ctcgagccgttcaacaaagaagaggaagagctggtcgtgttcaaccaggagaatgttatcatctctatcctagatgtgtatatgattcttttgcagagcatcaattacctgaaattttgaggatgcccttgcaatctctctgtctgcaaataaaaagtttgaaactaggaagtatatctgagttcttgtctagggctttgcagtcacccgagatacttgcggtgcaaaaagcaattgaatatttaaaaacaattggagctttggatgagaa

SEQ ID NO: 128671 - DNA, 269 bp, Glycine max
aaattttgataaaccgcgatcacaggttgccgcaccttaaaaccggaaacaaaagcaatcgttactttatttcaagaatctctcaatttcttcctacttctttgtgtacggtttcttaagggaaagaaaatcactctctgtgctggccacagacttcgtgaatcattttcttttccactcaacgtacaattctcgaacactctcctatttgatataggacttcgtgtcagatttaaacttcttctgtctctttctcagttctctgttta

SEQ ID NO: 128672 - DNA, 266 bp, Glycine max
gggcaccattcctcagtctatttcacagcaaactgtttggaatcaaatggcaacagtgagaacaccattgaattttgattctagcaagcagagcttttgtcaattttctattgaccttctcggtggaggaattttagtggacaaaactggagattggatcacacttatacaaaattctccaattagtaacttgttgagagttgctgcttggaagaaaggctgtttaatggttaaaattgtgatgtctgggaatgcagcagtcaaaa

SEQ ID NO: 128673 - DNA, 266 bp, Glycine max
gttgttgtaactcgttcttcttcttttgttgttctgtgtttgtgtttgttttttctctcacctgaaaatgtcttgctgcggtggtaactgtggttgcggaagctcctgcaagtgcggcaacggctgcggaggctgcaagatgtacccagacttgagctacactgagtcaaccaccaccgagaccttggtcatgggagtggcacctgttaaggctcaatttgagggtgctgaaatgggtgtgcccgctgagaacgatggctgcaaat

SEQ ID NO: 128674 - DNA, 266 bp, Glycine max
ctcgagccgctttctaaagttgcacaagatatggttgaggaatggtttgattgtgttgatgaggaggattcctttgaggaagtttctttaagtgcagcacttaatggtgttgagggtttggactatatggaaagaattcctcttgccacatctgagggttttcctcatgtgctttcacgcaaaaatggtggctaaggcaaaagaagatttgtttctggggattttgaagagatgacattgattccgggaaccagtgttgaagaggc

SEQ ID NO: 128675 - DNA, 268 bp, Glycine max
gttgatgaggaggattcctttgaggaagtttctttgagtgcagcactcaatggtgttgagggtttggactatatggaaagaattcctcttgccacatctgagggttttccccatgtgctttcacgcaaaaatggtgacaaaggcaaaaggagatttgtttctggggatggtgaagagatgacattgattccgggaaccagtgttgaagaggcttacaataagctaatagttgaacttgagaaaagtgttcctacattggttggcattg

SEQ ID NO: 128676 - DNA, 269 bp, Glycine max
acaccatcaattttgaggcttttccccacaagctggtgcagtttggagagattcaggaaaaagttgtattgaaattttcacaagaggaatttcttacagcttggtcaactcaggtgcgtcctgcaacaactctgttggctgatgggtgtccatatttgtatgctatggtgcatgatagttcagtgtctacaatacgtgattttgtcattggtgttaagttgacaaccataaacaatatgtgtgcatatgggctcaatcctggtatttca

SEQ ID NO: 128677 - DNA, 271 bp, Glycine max
gcttatcagggttttgctagtggaagtctagatgcagatgcccaacctgttcgtttgtttgttgctgatggaggcgaattgctggtagcacaaagctatgcaaagaatctgggtctttatggggaacgtgttggcgccttaagcattgtctgcaagtcagctgatgttgcaagcagggttgagagccagctgaagctagtgattaggcccatgtactcaagtcctcccattcatggtgcatccattgtggctgccattctcaaggaccgga

SEQ ID NO: 128678 - DNA, 269 bp, Glycine max
cttgccagcttctgcagaaaactgaaagttctaaatctttgtggctgtgttagagctgcatccgatactgcattacaggctattggacaatactgcaatcagctacaatctttgaaccttggatggtgtgataatgttggcgatgttggagtgactactttagcatatgggtgtcctgatcttaggatagttgacttgtgtggctgtgtccgtataacagatgacagtgtgattgctttggcgactagatgcccccatctgaggtccct

SEQ ID NO: 128679 - DNA, 267 bp, Glycine max
tgtaagcctcttcaacaagctaatagttgaacttgagaaaagtgttcctacattggttggcattgaatgtcccaaggatgagaaacttcctcgtcgcaaaatttttgacaaacctaagacgcgctgcttcactattctccctatggagtttaatcttgtggtccgtcaaaagtttttaaattttgtgaggttcattatgaagaaaagggacaagcttagttgtcaagttggaatcaacccatactccatggaatggactggtttggc

SEQ ID NO: 128680 - DNA, 262 bp, Glycine max
caaaatccttttgtgttaaataggtggatggggaaactgactttcccccagggcacttcccgaaatgttaagagattgcctctttctatagggggaggagctggtgcaaagaatgctattctcatgaatatgccaaatgctgttctttcaatgtggagatattttgttggagatctcgtctttgaagtttctaagatgacttctccctacattaaatgtacagtctctttcttcatagcatttggaaatttggctgatgaca

SEQ ID NO: 128681 - DNA, 264 bp, Glycine max
ggcatattctcccttctcccaagcggagaccagcacgaagaactatactagctcggtcggaccggaccggtagttaagagagggatcgaattcgaagcgaagttagacggagaaagcgagaatgatgttggacggaaccgaagacgaagagaagtttctcgccgccggaatcgccggccttcagcagaattccttctacatgcaccgtgcattggactcgaacaatctcagggacgctttgaagtattcggctcagatgctctc

SEQ ID NO: 128682 - DNA, 262 bp, Glycine max
ctgactcagaaagtgcgagtccaaattgttacatctgaaaagagttactggcatgtattcgatcctgacaagtgtcagatgtttgacaacagtgaaataggtctttattctaatcccactttggaagatatcccacattcagcttgggaccttttttgctgggacagtgagaaaactttgccaaattctttttctgcagaattgctctcttgcaaattggatactgttactggccaatattatcctgagtgggctccaatta

SEQ ID NO: 128683 - DNA, 265 bp, Glycine max
accagttgagaatctctcttcagacatatgggcatggaggaaatatggccagatacccataaaggggtctccatatccaagggggtactatagatgtagcagctcaaaggggtgtttggcaaggaaacaggttgaaagaaacagatcagacccaacaatgttcatagtgacttacactgctgagcacaaccaccctgcacctactcacagaaactctcttgctggttccacacgccagaagccattggcacctcaaacagccacc

SEQ ID NO: 128684 - DNA, 270 bp, Glycine max
ttgacaaccataaacaatatgtgtgcatatgggctcaatcctggtatttcaggttctcgtcttttgggcaccattcctcagtccatttcacagcaaactgtttggcatcaaatggcaacagtgagaacaccattgaattttgattctagcaagcagagcttttgtcaattttctattgaccttctcggtggaggaattttagtggacaaaactggagattggatcacacttatacaaaattctccaattagtaacttgttgagagttgct

SEQ ID NO: 128685 - DNA, 270 bp, Glycine max
cacataccctttgatgcaaaagctgaggcaagtgcttgtggactatgcattggccaatggggagaacgagaagaacacgaacacatcaatcttccaaaagatcgcaacatttgaggaggagttgaagacccttttgcctaaggaagtggaaggtgcaagagttgcatatgagaatgaccaatgtgctattcccaacaagatcaaggaatgcaggtcttaccccttgtacaagtttgtgagagaggagttggggacagcattgcttactgg

SEQ ID NO: 128686 - DNA, 264 bp, Glycine max
cattctctctgtgtatttccctacctctcccttcaagatgcagatcttcgtcaagaccctcaccggcaagaccatcacccttgaggtggaaagctctgacaccatcgacaacgtcaaggccaagatccaggacaaggaaggaatccccccggaccagcaacgtctcattttcgccggaaagcaacttgaggacggccgtacccttgctgactacaacattcagaaggagagtactcttcacctcgtcctccgtctccgtggtgg

SEQ ID NO: 128687 - DNA, 262 bp, Glycine max
gcatgatagttcagtgtctacaataccaggtgattttgtcattggtgttaagttgacaaccataaacaatatgtgtgcatatgggctcaatcctggtatttcaggttctcgtcttttgggcaccattcctcagtctatttcacagcaaactgtttggaatcaaatggcaacagtgagaacaccattgaattttgattctagcaagcagagcttttgtcaattttctattgaccttctcggtggaggaattttagtggacaaa

SEQ ID NO: 128688 - DNA, 263 bp, Glycine max
aggaaattctgtcttctagtgcaagtgatttcagaactgcaatggtgagtaaaaatagcaagcctcaagctactgcaatgcatgtgggagctatagaaattatcattgatagtttcgcaagtcctgactgcaacatagttggtgcaatgcttttggttgatacttatcataccaatcctgaaaattcagttcgtagtatttttgttgcgcctttcagaggcggaaggcccattcgggtggttacatttccgaataccatcgtg

SEQ ID NO: 128689 - DNA, 262 bp, Glycine max
ggagagttgaatgtggaatcccttctggatttccgctcacagttatttgcaatagcatttttaatgagatgctcattagatatagctatgaaaaattactgcgccaggctaaagctccaagtatgtttttacaatccttcaaaaattttgtttctttgtgtgtgtatggtgatgataacttaattagtgttcatgaatatgtcaagccttactttagtggttctaaattgaaaagctttctagctagtcataatatcaccat

SEQ ID NO: 128690 - DNA, 262 bp, Glycine max
ctttgtcatctcatcctgacgtagacaagatttcctttactggacgctctgcaactggaagcaggattatgacagctgcagcacagctaacgaagcctgtttctctagagcttggtggaaaaagcccaatcattgtttttgaggatgttgaccttgataagactgctgaatggaccatctttggctgcgttcgtacaaatggtcagatatgcagtgcaacatctcgccttattgtgcatgaacgtatagcaacagaatttgt

SEQ ID NO: 128691 - DNA, 263 bp, Glycine max
accagttgagaatctctcttcagacatatgggcatggaggaaatatggccagaaacccataaaggggtctccatatccaagggggtactatagatgtagcagctcaaaggggtgtttggcaaggaaacaggttgaaagaaacagatcagacccaacaatgttcatagtgacttacactgctgagcacaaccaccctgcacctactcacagaaactctcttgctggttccacacgccagaagccattggcacctcaaacagcca

SEQ ID NO: 128692 - DNA, 255 bp, Glycine max
ttcaagttcaagctggtgaaatcttggattagtgctcccactctcctatctggtataggacttcgtgggtagacttttctatttctctcctttctttcactctcttcttctcactgatctgcattgccgttcaaagtggtcttatttgaaaaacatctgggcgttggtgcaaatgtttgcttcgttaattttctctggagacaacaggctcactgagaaaacaatttttacttgcagagatttggacatcttggt

SEQ ID NO: 128693 - DNA, 267 bp, Glycine max
cgatcgaagtttcacatcagccttatccagtttagggtttcggttccttaccctacctttgacgtatcgaaaccttaaatttgggattaggtctgagcaatctggttggtagaacctttggtcttagagagtcaagttttatgtctggattagacgatcaaattcctactgccttcgatccttttgctggtgcaaatgctgatgactcgggtgctgggtcaaaggagtatgtgcatattcgcgttcagcagcgaaatggtaggaaaa

SEQ ID NO: 128694 - DNA, 254 bp, Glycine max
agcgatgcggatgaggcgccactcgatgtttccatttgcctgcatgactttggtattgtggagtgtggttcgtttagtggtgtcaagtcttgcgaacgtgagggtgcatgagtggtaatcgggatgtatttgttgcacggctccatgcttgcgcatgcaacgtgtgacatgcatccttatcatagtcaccatagccttcgtggcttaggtgctgacgataggttcctgtgttgcctacctaccagacggtattc

SEQ ID NO: 128695 - DNA, 259 bp, Glycine max
gcttttggttgatacttatcataccaatcctgaaaatgcagttcgtagtatttttgttgcgcctttcagaggcggaaggcccattcgggtggttacatttccgaataccattgtgcagattgaaccagacatggattcaaggtttcagcttttgagtaccactaccaatggtgattttgttcaaggaaaagatctcgcaatggttaaagttaatgtagcatgtgctgctgttggcttgacatcaagctatactccgact

SEQ ID NO: 128696 - DNA, 262 bp, Glycine max
cacattagttcattctctttgcgcagtgcactacctctcctttcaagatgcagatcttcgtcaagaccctcaccggaaagaccatcacccttgaggtggaaagctctgacaccatcgacaacgtcaaggccaagatccaggacaaggaaggaattcccccggatcatcaacgtctcatcttcgccggcaagctgcttgaggactgccgtaccctcgccgactacaacatccagaaggagtcaacccttcaccttgtccttcg

SEQ ID NO: 128697 - DNA, 258 bp, Glycine max
ggacttattgtgttttaaatccacaaaatccttttgtgttaaataggtggatggggaaactgactttcccccagggcacttcccgaaatgttaagagaatgcctctttctatagggggaggagctggtgcaaagaatgctattctcatgaatatgccaaatgctgttctttcaatgtggagatattttgttggagatctcgtctttgaagtttctaagatgacttctccctacattaaatgtacagtctctttcttca

SEQ ID NO: 128698 - DNA, 262 bp, Glycine max
ggaaaatcatgtagttcagatacccctaatggcacaggaggaaattctgtcttctagtgcaagtgcattcagaactgcaatggtgagtaaaaatagcaagcctcaagctacttcaatgcatgttggagctatagaaattatcattgatagtttcgcaagtcctgactgcaacatagttggtgcaatgtctttggttgatacttatcataccaatcctgaaaatgcagttcgtagtatttttgttgcacctttcagaggtgga

SEQ ID NO: 128699 - DNA, 216 bp, Glycine max
atgaagttcaggctcagatggaaacaaatttgtttaaattggctcttgatgatggtgaaaatcctaaagggtccatgttggatcctcaaatttctcaatctaaaattgcacttcccaaaaacacagttggcggaacgattctgcgtagtgatctattggccaattttttgacagaggggcattttaagagcaatggtgatttgcagcgcactccat

SEQ ID NO: 128700 - DNA, 264 bp, Glycine max
ccggatttcattgtgatatcatttgtgtcactggatggactgctaccccaatgcaggatgttcaggttacaattgattggtttatttcctctcaggaatgtgttcccaggacctattgtgttttaaatccacaaaatccttttgtgttaaataggtggatggggaaattgactttcccccagggcacttcccgaagtgttaaaagaatgcctctttctatagggggaggagctggtgcaaagaatgctattctcatgaatatgc

SEQ ID NO: 128701 - DNA, 268 bp, Glycine max
tgcaacagtgagaacaccattgacaattgagcaaagctctgcgtgctagaatcaaaattcaatggtgttctcactgttgccatttgattttagcaagcagagcttttgtcaattttctattgaccttctcggtggaggaattttactggacaaaactggagattggatcacacttatacaaaattctccaattagtaactttctgagagttgctgcttggaagacaggctgtttaatggttaagattgtgatgtctgggaatgcagca

SEQ ID NO: 128702 - DNA, 287 bp, Glycine max
attcggctcgaggcttctcttctcaatcaaacatggacgagaagaacggacaacacgaggccgaggccatgcgccgaatcgccttctttggcgtactatttccaccattgctactctagtcactgttatcagtgtcccaatggtgtacagccatatgcaaaccatccaatctcaaatgcagaatgaagtggatttctgcaaaatgcgctccggaaacatctggcgtgaagtcacccgaactcaagtcctctccaacgtacaagagaaaccccgtgtggctcgtcaag

SEQ ID NO: 128703 - DNA, 273 bp, Glycine max
caccattgaattttgattctagcaagcagagcttttgtcaattttctattgaccttctcggtggaggaattttagtggacaaaactggagattggatcacacttatacaaaattctccaattagtaacttgttgagagttgctgcttggaagaaaggctgtttaatggttaagattgtgatgtctgggaatgcagcagtcaaaaggagtgattgggcctcattggtacaagtgtttttaacaaacagcaacagtacagagcattttgatgcat

SEQ ID NO: 128704 - DNA, 273 bp, Glycine max
tcgagcgattcgctcgggtgtatggtgatgataacttaatgagtgttcatgaataagtcaagccttactttagtgagctctaaattgaaaagctttctagctggtcataatatcaccattactgatggtaatggcaaaactagtgcaactttgcaatttagaaagttagcagattgtgattttctcaagagaaactttaagcagatgtctaatgttttgtgggtggctcctgaggataaggcgagtttatggtcacaacttcattatgtttcg

SEQ ID NO: 128705 - DNA, 274 bp, Glycine max
ctgactttcccccagggcacttcccgaagtgttaagagaatgcctctttctatagggggaggagctggtgcaaagaatgctattctcatgaatatgccaaatgctgttctttcaatgtggagatattttgttggagatctcgtctttgaagtttctaagatgacttctccctacattaaatgtgcagtctctttcttcatagcatttggaaatttggctgatgacaccatcaattctgaggcttttccccacaagctggtgcagtttggagaga

SEQ ID NO: 128706 - DNA, 278 bp, Glycine max
tactcgagccgattcggctcgaggatatcatttgtgtcactggatggcactgccaccccaatgacaggatgttcaggttacaatatgattggtttatttcctctcaggaatgtgttcccaggacttattgtgttttaaatccacaaaatccttttgtgttaaataggtggatggggaaactgactttcccccagggcacttcccgaaatgttaagagaatgcctctttctatagggggaggagctggtgcaaagaatgctattctcatgaatatgcca

SEQ ID NO: 128707 - DNA, 272 bp, Glycine max
gacccacaaaaatggagaaccaacaaccggcacctatctccgtgacactgctacatctgctatccaaaacttcgctcccatcaacaaaatccaccaacatctctgcgcgtttcacttttactcatatgacatgagccggcaagtggaggcacaccatttttgcgcgcaccagaacgaggagatgaggcagtgccttatctacgacagccccgagaagaaagccaggctcatagggctggaatacatcatctccgaaaacctttacttgacac

SEQ ID NO: 128708 - DNA, 271 bp, Glycine max
cgcagttccttgatctctcctctcaagatgcagaacttcgtgaaaactttgaccggcaagaccatcacccttgaggtggaatcctccgacaccattgacaacgtaaaagctaagattcaagacaaggaagggatcccacctgaccagcagagacttatctttgcgggtaaacaacttgaggatggtcgcacccttgccgattacaacatccaaaaggaatcaaccctccatctcgtgcttcgcctcaggggtggcatgcaaatctttgtca

SEQ ID NO: 128709 - DNA, 271 bp, Glycine max
ttctcgagccgaatcggctcgagctggtacagtttgtggggacaaggctcaaaattgatggtgtcatcagccaaatttgaggcttttccccacaagctggtacagtttggagagattcaggaaaaagttgtattgaaattttcacaagaggaatttcttacagcttggtcaacccaggtgcgtcctgcaacaactctgttggctgctgggtgtccatatttgtatgctatggtgcatgatagttcagtgtctacaataccaggtgattttg

SEQ ID NO: 128710 - DNA, 267 bp, Glycine max
gaatcctgcttgcacaaaagcaatgactatgtcatttaatccaaacccgtgttctgatgcatggagtttggaatttctgaagcgtaccggatttcattgtgatatcatttgtgtcactggatggactgccacccctatgcaggatgttcaggttacaattgattggtttatttcctctcaggaatgtgttcccaggacctattgtgttttaaatccacaaaatccttttgtgttaaataggtggatggggaaactgactttccccca

SEQ ID NO: 128711 - DNA, 270 bp, Glycine max
attaggtggcatctgtataccttgttgatctacattctcccatcttttctcactgctgaaattaaatataagcggaatttgagtaatattcatatttccggcttattttacgacggcagatacaaattctggactaaacacgagataaatcttgctttgacagaagaggaaaagatggaggtgattagaaatagaggcattcctgctgatgttcttgcaaagcgagctcatgaatttgaaaaacatgttgctcatgaaagcctcaaggat

SEQ ID NO: 128712 - DNA, 138 bp, Glycine max
gttaatgtagcatgtgctgctgttggcttgacatcaagttacactccaactccattgttggaatctggtttgcaaaaagacagagggttaattgtggagtattttggaaggatgtcttacgttgctcacaacgttaat

SEQ ID NO: 128713 - DNA, 135 bp, Glycine max
ggcaacagtgagaacaccattgaattttgattctagcaagcagagcttttgtcaattttctattgaccttctcggtggaggaattttagtggacaaaactggagattggatcacacttatacaaaattctccaat

SEQ ID NO: 128714 - DNA, 259 bp, Glycine max
agaaaagaaaacccatcacactaaaaacacatacataattcacatggacaagttcaacatgccagaaagtttcaacgaccatctccactggtatgattcatcactgaaatcagtatcagactcggcagagaggctctacacatacaaaaaagtagctcatggcttctctacaaggctaactacacaagaagctaagttactatcaaagcaacctggagttctctctgtgatcccagaagttagatatgaactccacaca

SEQ ID NO: 128715 - DNA, 271 bp, Glycine max
acaaacaccaaataaaaatagcaatcatggcaaataagtaccatgttcgttctattagtttgccttctagatctcatcctagcaccattagagttgaggaggagcttagcaagatcaaaacttgggaaggaacattcacatccacatcagggtccattcacacaggcatatccttgattgaagatttgtacatttgcttggatgatcttctcaacatggcatctacccaaaaggtgatttctcaccatagaggtgaaaaatgtgtgcaaga

SEQ ID NO: 128716 - DNA, 135 bp, Glycine max
gaaattttgataaaccgcgatcacaggttgccgcacctcaaaaccggaaacaaaagcaatcgttacttgatttcaagaatctctcaatttcttcctacttctttgtgtacgatttcttaagggaaagaaaatcac

SEQ ID NO: 128717 - DNA, 268 bp, Glycine max
atgaaaaattgatgcgtgaaaggacacacctgctgttggcttgttgttcaaggatggcaatttgtaagaaagatgtttggagagttgaatgtggaatcccttctggatttccgctcacagttatttgcaatagcatttttaatgagatgctcattagatatagctatgaaaaattactgcgccaggctaaagctccaagtatgtttttacaatccttcaaaaattttgtttctttgtgtgtgtatggtgatgataacttaattagtgt

SEQ ID NO: 128718 - DNA, 268 bp, Glycine max
gtcactggccaatattatcctgagtgggctccaattaattgtcgagttcatcgacaaccaattcacatcactgaaggaaattatgtcagaaagcaagatgtcagcattgaatatgatgcatgtacaattccaaatgattgtggttcattggttgttgccaaggttggaaatcacaaacaaattgttggtttccatgttgctggaagcaaaggaagactgggatatgcttcattgataccatatgttgagccagttgtgcaagctcaaa

SEQ ID NO: 128719 - DNA, 135 bp, Glycine max
atcgtattaaaggaatgattaaaatggtggccacagttggtattcctgagaatacaggtatagcattggcctgtgctatgaatagttcttttagggggcgtgccagttctgatatttacaccatctgctctcaag

SEQ ID NO: 128720 - DNA, 266 bp, Glycine max
tacaattccaaatgattgtggttcattggttgttgccaaagttggaaatcacaaacaaattgttggtttccatgttgctggaagcaaaggaagactgggatatgcttcattgataccatacgttgagccagttgtgcaagctcaaagtgctgaagtttactttgacttcttccctgtggaggttgatagtcaagagggagttgctcacattggtgaattgaaatctggtgtctatgttccactgcctacaaaaagcaatttggtgg

SEQ ID NO: 128721 - DNA, 134 bp, Glycine max
ccgcgatcacaggttgccgcaccttaaaaccggaaacaaaagcaatcgttacttgatttcaagaatctctcaatttcttcctacttctttgtgtacggtttcttaagggaaagaaaatcactctctgtgctggc

SEQ ID NO: 128722 - DNA, 266 bp, Glycine max
ggcggctctcagaaaagccgtgttctttgtaatcgctcaatgcttcaccttttccgcatatgctgcaaggtttgaaatcacaaaccgatgcacatacactgtctgggctgcgtctgtgcctgttggcggtggcgtgcaattaaacccgggccagtcatggtccgtggacgtgcctgcaggaacgaaaggggcccgcgtttggtcccgaaccggctgcaacttcgacggttcgggccgcggtggatgccagaccggtgactgcgggg

SEQ ID NO: 128723 - DNA, 267 bp, Glycine max
ggtgatcttaaacttcttactgatgggaagttatatgagggtaagcatattcctgtatctaatattagtgcaggggaaaatcatgtagttcaaatacccctaatggcacaggaggaaattctgtcttctagtgcaagtgatttcagaactgcaatggtgagtaaaaatagcaagcctcaagctactgcaatgcatgtgggagctatagaaattatcattgatagtttcgcaagtcctgactgcaacatagttggtgcaatgcttttg

SEQ ID NO: 128724 - DNA, 263 bp, Glycine max
tgaatatgatgcatgtacaattccaaatgattgtggttcattggttgttgccaaagttggaaatcacaaacaaattgttggtttccatgttgctggaagcaaaggaagactgggatatgcttcattgataccatacgttgagccagttgtgcaagctcaaagtgctgaagtttactttgacttcttccctgtggaggttgatagtcaagagggagttgctcacattggtgaattgaaatctggtgtctatgttccactgccta

SEQ ID NO: 128725 - DNA, 263 bp, Glycine max
ggcaatttgtaagaaagatgtttggagagttgaatgtggaatcccttctggatttccgctcacagttatttgtaatagcatttttaatgagatgctcattagatatagctatgaaaaattactgcgccaggctaaagctccaagtatgtttttacaatccttcaaaaattttgtttctttgtgtgtgtatggtgatgataacttaattagtgttcatgaatatgtcaagccttactttagtggttctaaattgaaaagctttc

SEQ ID NO: 128726 - DNA, 260 bp, Glycine max
gtttctttgagtgcagcactcaatggtgttgagggtttggactatatggaaagaattcctcttgccacatctgagggttttccccatgtgctttcacgcaaaaatggtgaaaaaggcaaaaggagatttgtttctggggatggtgaagagatgacattgattccgggaaccagtgttgaagaggcttacaataagctaatagttgaacttgagaaaagtgttcctacattggttggcattgaatgtcccaaggatgagaa

SEQ ID NO: 128727 - DNA, 130 bp, Glycine max
gagaagccatatttggactgatactgataaggaccgcacaggcatgctgccttttgtttttgatgactcttttgggtttgagcaatatgttgattatgctcttgatgttcctatgtattttgtctatcgg

SEQ ID NO: 128728 - DNA, 131 bp, Glycine max
aattttcacaagaggaatttcttacagcttggtcaactcaggtgcgtcctgcaacaactctgtcagctgatgggtgtccatatttgtatgctatggtgcatgatagttcagtgtctacaataccaggtgat

SEQ ID NO: 128729 - DNA, 265 bp, Glycine max
agcgtggttacactttcaccacatctgcggaacgggaaattgtgagggacatgaaggagaaactggcctacattgctctggattatgagcaggagttggaaactgccaagaccagttcagctgttgaaaagagctatgagctacctgatgggcaggtgatcacgattggcgctgaacgattccgatgccctgaagttctgttccagccatccatgattgggatggaatctcctggtatccatgagacaacatataactctatcat

SEQ ID NO: 128730 - DNA, 254 bp, Glycine max
caccattcctcagtccatttcacagcaaactgtttggaatcaaatggcaacagtgagaacaccattgaattttgatcctagcaagcagagcttttgtcaattttctattgaccttctcggtggaggaattttagtggacaaaactggagattggatcacacttatacaaaattctccaattagtaacttattgagagttgctgcttggaagaaaggctgtttgatggttaagattgtgatgtctgggaatgcag

SEQ ID NO: 128731 - DNA, 263 bp, Glycine max
gttacatacatcaactgctatcaggacttgagcactgtcatagtcgaaacgtacttcaccgtgatattaaaggatcaaaccttcttattgacaatgaaggaatacttaaaattgctgacttcggacttgcatctttctttgatccaaatcgccggcaacccatgactaatcgtgtggttaccctttggtaccgacctcttgagttgcttcttggtgccacagaatatggtgcggccatcgacctttggagtgttggttgcatt

SEQ ID NO: 128732 - DNA, 259 bp, Glycine max
tgtatgtccgcttgctgagcctcctgatggggaagatgtgcctatagttaattttgctccagctagtgttgtccgctgcagaagatgtcgcacatatgtgaatccttatatgacatttacggaagctggaagaaagtttcgttgcaacgtctgtaccttgcttaatgatgtgcctagtgagtattatgcacaattagatgcaactggaaaaagagttgacataaatcaacgacctgaacttacaaaggggactgtagaa

SEQ ID NO: 128733 - DNA, 262 bp, Glycine max
ctcctcttaatgagaggattatttcatccatgaccagaagatctgttgctgcacacccgtggcacgaccttgagatagggcctggtgctccaacgatcttcaattgtgtgattgagattgggaaagggagcaaggtgaaatatgaactggacaaaaaatcgggtcttatcaagatcgaccgtgtccattactcatcagttgtgtatcctcacaattatgggtttatcccacgtactatttgtgaggacagtgatcccctgga

SEQ ID NO: 128734 - DNA, 261 bp, Glycine max
ctcgagccgctgggaattgatcttcccaatagaggtatgtggtcctaataatggttttgaaatgtggagttctgagtgggcaaatcaaacttcatggcacttgagtttccttattgacaatcccaaacagtctacagtttttgatattctcttgggaatttctcaagattttgaaattgctggtaatactcttatgccagctttttctgttccacaggctactgccagatcttctgaaaatgcggaatcctctgcatgatc

SEQ ID NO: 128735 - DNA, 261 bp, Glycine max
gaggattcctttgaggaagtttccttaagtgcagcactcaatggtgttgagggtttggactatatggaaagaattcctcttgccacatctgagggttttcctcacgtactttcacgtaaaaatggtgattaaggcaaaaggagatttgtttctggggatggtgaagagatgacattgattccaggaaccagtgttgaagaggcttacaacaagctaatagttgaacttgagaaaagtgttcctacattggttggcattgag

SEQ ID NO: 128736 - DNA, 262 bp, Glycine max
ctcgagccgaatcggctcgagcgaagatctagctagaggcagagaccgttctccctaatcatctgccgatggcgatcttcaccgctttggtggccagaggcaccgtcgtcctggcggagttcagcgccgtcaccggcaacaccggcgccgtctcccgccgcatcctcgagaagcttccggcggagtccgactccaggctctgcttctctcaggatcgctacatcttccacatactccgatcggatggcatcacctacgtctg

SEQ ID NO: 128737 - DNA, 257 bp, Glycine max
aagatttttctgaaaaggaagatcaagaaaaacccaaaaagattgatgccagattgagacaaagaatagatcctcaatacaatgaggttcaggctcagatggaaccaatttggttaaattggctcctgatgaagttgaaactcctaaaggttccatgttggatcttaaaatttctcaatctaaaattgcacttcccaaaaacacagttggaggaaccattctgcgtagtgacctattggcaaattttttgacagagg

SEQ ID NO: 128738 - DNA, 263 bp, Glycine max
cgtaaatgtgttacgagaattgtatttgcacagtccagaggaagctcgccaattgagaaggaaagctctctctcgtattgaatggctgcaaaaagctgatgtgcctaccatagcacagattgaagagttccattcgatgcagaggatgatgaatgctcctgattcaaatgataatatcgatctactgttgagcattgatttgttgggtttacaaggagcaagtaaagcttttccaaacaagattgtttttgatgataagcttg

SEQ ID NO: 128739 - DNA, 258 bp, Glycine max
attgaaccagacatgaattcaaggtttcagcttttgagtaccactaccaatggtgattttgttcaaggaaaagatctcgcaatggttaaagttaatgtagcatgtgctgctgttggcttgacatcaagttacactccaactccattgttggaatctggtttgcaaaaagacagagggttaattgtggagtactttggaaggatgtcttacgttgctcataacgttaatcagccccaagagaaagatttgttggaggga

SEQ ID NO: 128740 - DNA, 258 bp, Glycine max
ggaagactgggatatgcttcattgataccatatgttgagccagttgtgcaagctcaaagtgctgaagtttacttcgacttcttccctgtggaggttgatagtcaagagggagttgctcacattggtgaattgaaatctggtgtctatgttccactgcctacaaaaaacaatttggtggaaactcccaaggaatggcaactggatctaccttgtgacaaaattcctagtgtcttgactacaactgatgaaagattggta

SEQ ID NO: 128741 - DNA, 249 bp, Glycine max
gacaagaaagtaaggccaaagatgacattctcaattttcatgaagatagcggtgctcagctggatagagccagttattgaccagaatttgtattttttggggatgaagtacacaacagcaacctttgccgttaccataaccaatatgcttcctgccattacctttatcttcgcatgcattcttaggcttgagaagattaaaataagaagtatacggagccaagcaaaggtggtgggaacctaacaactg

SEQ ID NO: 128742 - DNA, 257 bp, Glycine max
gatgattcaaaacagaaaaaaaatgaggttttttacagtgaaagtagctctgtgctgtgtggtggttatgctactaaccctctcagatgcacagctagataactctttttacaaggacacgtgtccaagagtgcatctattgtgcgttaagttgtcaggaatggttccaaatctgatccccgcattcttgccagtctcataaggctccactcttctcagattgtttcgttaaagggtgtgatgcatcatttctgttg

SEQ ID NO: 128743 - DNA, 262 bp, Glycine max
gaaggttatgggtttattgagtttaatagtcgtgctggagctgagagaattcttcaaacatataatggggcaataatgccaaatggggggcagagtttcaggttgaattgggaacttttagtgctggtgagaggtcgcgccacgacgattctccagattacaccatatttgttggtgacttggctgcagatgttactgattatcttcttcaggagacatttagggctcgttataactcggtgaagggtgcaaaagttgtcat

SEQ ID NO: 128744 - DNA, 256 bp, Glycine max
aaaaattttgtttctttgtgtgtgtatggtgatgataacttaattagtgttcatgaatatgtcaagccttactttagtggttctaaattgaaaagctttctagctggtcacaatatcaccattactgatggtattgacaaaactagtgcaactttgcaatttagaaagttagcagattgtgattttctcaagagaaactttaggcagatgtctaatgttttgtgggtggctcctgaggacaaggcgagtttatggt

SEQ ID NO: 128745 - DNA, 259 bp, Glycine max
ggtttctcttcctcccttggagaaaaagaagagccaccgctgcgacgccgttcgtgcatttttgaggtgccgctgtcatgtttgggcgtggtggaccaaggaggagtgataactccaaatattatgatattctcgggatttccaaaaatgccagtgaagatgaaatcaagaaggcctatagaaaggcggctatgaagaaccatccagataagggaggagatcctgaaaagtttaaggagttaggtcaagcatatgaagt

SEQ ID NO: 128746 - DNA, 145 bp, Glycine max; identical to SEQ ID NO: 123606

SEQ ID NO: 128747 - DNA, 169 bp, Glycine max
aaaccgcgatcacaggttgccgcaccttaaaaccggaaacaaaagcaatcgttacttgatttcaagaatctctcaatttcttcctacttctttgtgtacggtttcttaagggaaagaaaatcactctctgtgctggccacagacttcgtgaatcattttcttttccaca

SEQ ID NO: 128748 - DNA, 257 bp, Glycine max
tgcccactttttttcttccaacgctcctcctccttctcatagccttcgccacctctgtctccggccgccgtgacctcgtcggagactttctccggctgccctccgaaactgataacgacgacaacttcaagggcacccggtgggccgtcctcctcgccggttccaatggttactggaattacagacatcaggctgatgtttgtcacgcctatcaaatattgaggaaaggtggtctgaaagaagaaaatattattgtt

SEQ ID NO: 128749 - DNA, 255 bp, Glycine max
ctctgtcactcaaagcccattctctagtttctaacacacaaacactctctttttgtttctttgttttgatttcaaccacaaccatgttacaagtatacgacgccgctttcgtcgacacagagctctccaaacgcacttcaatcttcggcctccgcctctgggtcctcatcggcatcctcgtcggatccctcatcgtcatcaccctcttcctcctctccctctgcctcacctcccgccgccgccaccaccaccacc

SEQ ID NO: 128750 - DNA, 235 bp, Glycine max
aaaaaaaaaaacgtgattcgctcttctcttcgaataaaccacaaaaccaacaaacgagaagaggagtgagagaagatggggttgtcgttcacgaagctgttcagcaggttgtttgcgaagaaggaaatgaggattctgatggtaggtctcgatgctgctggtaagacaaccatcttgtacaagctcaagcttggagaaatcgtcaccaccatccccaccatcggatttaatgttg

SEQ ID NO: 128751 - DNA, 287 bp, Glycine max
agcttgcttgcttctcattccagccaatggaattcgatcatttgccagaacaaatggttatgaaactgaggttgaagaagttgatccttttgcgcaattcagagaggccccagaatacagaaaccagcggaagtgcactctaattgacacaaccaatgcgcaattagtatgtgatccttcacttgttcatgttgccatgaccattgattggcactacttaagagggtctattgctgcagtgcattctgtcgtgaaacacacttcctgcccgctgaatctgttctttc

SEQ ID NO: 128752 - DNA, 284 bp, Glycine max
gttggatcttaaaatttctcaatctaaaattgcacttcccaaaaacacagttggaggaaccattctgcgtagtgatctattggcaaattttttgacagagggcaattttagagcaagtgttgatttgcagcgcactcatcgtattaaaggaatgattaaaatggtggccacagttggtattcctgagaatacaggtatagcattggcctgtgctatgaatagttcttttagggggcgtgccagtctgatatttacaccatctgctctcaagactgtgaatatgg

SEQ ID NO: 128753 - DNA, 248 bp, Glycine max
ctgatgttcttgcaaagcgagctcatgaatttgaaaaacatgttgctcatgaaagcctcaaggatcaaattcctgctgttgacaagatgtattctactaaggttaataagtatgcaaaaattatgaaccttagacaaagtgatgttggtgatcttaaacttcttactgatgggaagttgtatgagggtaagcatattcctgtatctaatattagtgcaagggagaatcatgtagttcaaataccccta

SEQ ID NO: 128754 - DNA, 286 bp, Glycine max
atccgcattgccgttcaaagtggtcttatttgaaaaacacttgggcgttggtgcaaatgtttgcttcgttaattttctctggggacaacaggctcactgagaaaacaatttttacttgcagagatttggacatcttggttgtttattatacaatagcaactcaatttagaaaatttctaccgcattacattaggtggcatctgtataccttgttgatctacattctcccatcttttctcactgctgaaattaaatataagcggaatttgagtaatattcatatttc

SEQ ID NO: 128755 - DNA, 283 bp, Glycine max
tggcaaaaggagatttgtttctggggatggtgaagagatgacattgattccgggaaccagtgttgaagaggcttacaataagctaatagttgaacttgagaaaagtgttcctacattggttggcattgaatgtcccaaggatgagaaacttcctcgtcgcaaaatttttgacaaacctaagacgcgctgcttcactatgctccctatggagtttaatcttgtggttcgtcagaagtttttaaattttgtgaggttcattatgaagaaaagggacaagcttagt

SEQ ID NO: 128756 - DNA, 278 bp, Glycine max
aacgatattctgtgttgcgattatgctagttttgatggtttgattaccaagcaagttatgagcaagatggcagaaatgataaacagtctttgtggtggtgatgaaaaattgatgcgtgaaaggacacacctgctgttggcttgttgttcaaggatggcaatttgtaagaaagatgtttggagagttgaatgtggaatcccttctggatttccgctcacagttatttgcaatagcattttaatgagatgctcattagatatagctatgaaaaatactgc

SEQ ID NO: 128757 - DNA, 282 bp, Glycine max
gaaaaattgatgcgtgaaaggacacacctgctgttggcttgttgttcaagaatggcaatttgtaagaaagatgtttggagagttgaatgtggaatcccttctggatttccgctcacagttatttgtaatagcatttttaatgagatgctcattagatatagctatgaaaaattactgcgccaggctaaagctccaagtatgtttttacaatccttcaaaaattttgtttctttgtgtgtgtatggtgatgataacttaattagtgttcatgaatatgtcaag

SEQ ID NO: 128758 - DNA, 282 bp, Glycine max
  unsure (1)..(282): unsure at all n locations
atcatttctggaaccattcttgcaacaattttgggaacaaccttctggaaactcttttcctttcttagagatgctggtaatgggggggtttttgttggcaatgttgcttcagcattcacaacttcaagtgtgcttgaggcccaaagtagaaagcccaacagatatgaagtttcccaatacagatatcgcaatgtgccaataaagcgcagagcatgggttgaaggccagatgtctttcgatcagtctgtagtagcaattatgtctacatgcanagccagcatg

SEQ ID NO: 128759 - DNA, 277 bp, Glycine max
atcagcttctccacaaggatgggcaagtttacaaaatacaaagaggtgataagggggactccatgaaggtgtcatatttataccagctagaaagattgaatgggggagctgttgtgggagagattagcagaaggttctctacaaatgagaacacattgacagttggatgtttatatgtggttgattctcagacagctttgaaggcaaagctgaacaatcacggcaaccttggggcctattgcagctgagctaacagtaagtcatcttgacaactcga

SEQ ID NO: 128760 - DNA, 242 bp, Glycine max
caaaactagtgcaactttgcaatttagaaagttagcagattgtgattttctcaagagaaactttaagcagatgtctaatgttttgtgggtggctcctgaggataaggcgagtttatggtcacaacttcattatgtttcgtgtaataatctggaaatgcaagaagcttatcttgtcaatctcgtaaatgtgttacgagaattgtatttgcacagtccagaggaagctcgccatttgagaggga

SEQ ID NO: 128761 - DNA, 250 bp, Glycine max
aaacaaatttgtttaaattgtctcttgatgatgttgaaactcctaaaggttccatgttggatcttaaaatttctcaatctaaaattgcacttcccaaaaacacagttggaggaaccattctgcgtagtgatctattggcaaattttttgacagagggcaattttagagcaagtgttgatttgcagcgcactcatcgtattaaaggaatgattaaaatggtggccacagttggtattcctgagaatacagg

SEQ ID NO: 128762 - DNA, 279 bp, Glycine max
gtaatattcagatttccggcttattttacgacggcagatacaaattctggactaaacacgagaaaaatcttgctttgacagaagaggaaaagatggaagtgattagaaatagaggcattcctgctgatgttcttgcaaagcgagctcatgaatttgaaaaacatgttgctcatgaaagcctcaaggatcaaattcctgctgttgacaagttgtattctactaaggttaataagtttgcaaaaattatgaaccttagacaaagtgttgttggtgatctta

SEQ ID NO: 128763 - DNA, 240 bp, Glycine max
ggtgatgataacttaattagtgttcatgaatatgtcaagccttactttagtggttctaaattgaaaagctttctagctggtcataatatcaccattactgatggtattgacaaaactagtgcaactttgcaatttagaaagttagcagattgcgattttctcaagagaaactttaagcagatgtctaatgttttgtgggtggctctgaggacaaggcgatttatggtcacacttcattag

SEQ ID NO: 128764 - DNA, 282 bp, Glycine max
gctggtgcaaagaatgctattctcatgaatatgccaaatgctgttcttttaatgtggagatattttgttggagatctcgtctttgaagtttctaagatgacttctccctacattaaatgtacagtctctttcttcatagcatttggaaatttggctgatgacaccatcaattttgaggcttttccccacaagctggtgcagtttggagagattcaggaaaaagttgtattgaaattttcacaagaggaatttcttacagcttggtcaactcaggtgcgtcct

SEQ ID NO: 128765 - DNA, 274 bp, Glycine max
atgcagcctccaattcgtgccactctcttcaaaatggccgttaccttctcaaatctccacacagaatcaggtctcaagatcatcgacgacttcctctctgggaaggtctacgtttctggggatcacttcacaaaggacgacatcaaagtgtatggtgctgttttggagaagccaggtgactcttttcccaatgctgccaagtggtacgaggttgtctcatctcagcttgctgcaagcttccccggcaatgctcaaggggtgagattcagtggca

SEQ ID NO: 128766 - DNA, 286 bp, Glycine max
ctacattctcccatcttttctcactgctgaaattaaatataagcggaatttgagtaatattcatatttccggcttattttacgacggcagatacaaattctggactaaacacgagaaaaatcttgctttgacagaagaggaaaagatggaggtgattagaaatagaggcattcctgctgatgttcttgcaaagcgagctcatgaatttgaaaaacatgttgctcatgaaagcctcaaggatcaaattcctgctgttgacaagttgtattctactgaggttaataag

SEQ ID NO: 128767 - DNA, 225 bp, Glycine max
ctcgagccgaatcggctcgcgcggctcgagcggctcgagctcgagccggaaattttgataaaccgcgatcacaggttgccacaccttaaaaccggaaacacaagcaatcgttacttgatttcaagaatctctcaatttcttcctacttctttgtgtacgatttcttaagggaaagaaaatcactctctgtgctggccacagacttcgtgaatcattttcttttcc

SEQ ID NO: 128768 - DNA, 276 bp, Glycine max
ctcgagccgtttcgatgcatgtaagtggacaaaatcggaaccacattcctgggaattgatcttcccaatagaggtatgtggtcctaataatggttttgaaatgtggagttctgagtgggcaaatcaaacttcatggcacttgagtttccttattgacaatcccaaacagtctacagtttttgatattctcttgggaatttctcaagattttgaaattgctggtaatactcttatgccagctttttctgttccacaggctactgccagatcttctga

SEQ ID NO: 128769 - DNA, 279 bp, Glycine max
gtttggagagttgaatgtggaatcccttctggatttccgctcacagttatttgcaatagcatttttaatgagatgctcattagatatagctatgaaaaattactgcgccaggctaaagctccaagtatgtttttacaatctttcaaaaattttgtttctttgtgtgtgtatggtgatgataacttaattagtgttcatgaatatgtcaagccttactttagtggttctaaattgaaaagctttctagctggtcataatatcaccattactgatggtatt

SEQ ID NO: 128770 - DNA, 185 bp, Glycine max
tgaaattttgataaaccgcgatcacaggttgccgcacctcaaaaccggaaacaaaagcaatcgttacttgatttcaagaatctctcaatttcttcctacttctttgtgtacgatttcttaagggaaagaaaatcactctctgtgctggccacagacttcgtgaatcattttcttttccacacaac

SEQ ID NO: 128771 - DNA, 272 bp, Glycine max
ctcgagccgcagctatggtgttatagtagagactgagaagagctacatcgagactgttgacatggatgttccagcagctgagcatgatgggaagtgcaagtgtggcactaactgcacttgcacggactgcacttgtggccattaaggaatatgtatgaaaatgtaattgccatgtgtttggcaatacaaatctccaaataatgtaatcttcgtatgaataaatgtgtgctgttatcctacttcagggtctatgctaacatgcagtctgaatc

SEQ ID NO: 128772 - DNA, 295 bp, Glycine max
cgtacgggctcggaatcacgtgactcgagcgtatcggctcaggcaattgaaccaactgattaccgtttccgttttgagtactactaccaatggtgatcttgttcacgggaaagatctcgccatggttaaagtcaatgtagcatctgctgctgctggcttgacatcaagctatcctccgactccatcgttggaatctggtttgcaaacagacagagcggttaattgtggagtattttggaaggatgtcttacgttgctcataacgttaatcagccccaagagaaagatttgttgga

SEQ ID NO: 128773 - DNA, 214 bp, Glycine max
gcaagaatggcacttcgttgcttggtgatgtccctttctgttctcttcactcttggtcttgcgagagaaagccatgtcagagacgaagatttttggcatgctgtttggccaaacactcccattccaagttcattgcgagatcttctaaagcctggccctgcaagtgttgaaatcgatgatcaccctatgcaaattgaagaaacacagtacccga

SEQ ID NO: 128774 - DNA, 225 bp, Glycine max
gtttggatcaacgagaaccgtttccgcatcgtgcgccagcacggagaaggtggcttcgcctacgtctacctcgtcaaggaggctcccgacgactccgccgccgctggcctcgccaagaagctcaaaggctcctctcatctctccgatgatggaacttatgctatgaaaaaggtcctcattcagaacaatgaacagctggatttggtcagggaggagatccgtgtt

SEQ ID NO: 128775 - DNA, 277 bp, Glycine max
gaaaaattactgcgccaggctaaagctccaagtatgtttttacaatctttcaaaaattttgtttctttgtgtgtgtatggtgatgataacttaattagtgttcatgaatatgtcaagccttactttagtggttctaaattgaaaagctttctagctggtcataatatcaccattactgatggtattgacaaaactattgcaactttgcaatttagaaagttagcagattgtgattttctcaagagaaactttaggcagatgtctaatgttttgtggg

SEQ ID NO: 128776 - DNA, 271 bp, Glycine max
atcaaacttcatggcacttgagtttccttattgacaatcccaaacagtctacagtttttgatattctcttgggaatttctcaagattttgaaattgctggtaatactcttatgccagctttttctgttccacaggctactgccagatcttctgaaaatgcggaatcctctgcatgatctggaatttgtgttttctttcgtttgttcgtttgtttaattcaataaaggaaattagacatgaccctcttgttgagtatgctctgtctatttga

SEQ ID NO: 128777 - DNA, 273 bp, Glycine max
ataaaagaggcgcaagatgagtggtagggtttctgggaaggtgaagtggttcaacgatcagaaggggtttggattcataacccctgacgatggcagcgaggaactcttcgttcaccaatctcagatcaaatctgacggtttccgaagcctagctgaaggagagtccgttgagttcgctattgaatctgaatctgacggacgcgacaaggctgttgatgtcactggccccgacggcgccaggatccagggaaccagacgcggcggtgatggtgg

SEQ ID NO: 128778 - DNA, 277 bp, Glycine max
gccagcgtctctacgacaatctcctttctctctaactcataactcagatgagttccctctctaataactctagtagtagccacggcaattccttcctccacatgccccccatcaagtttaccaagctcttcatcaatggagatttcgctgattccttatctggaaggacatttgagactatagaccccagaacagaagaggcaattgcaagagttagtgagggagataaagaagatattgatattgctgttaaagcagcacgtcaggcatttgactc

SEQ ID NO: 128779 - DNA, 258 bp, Glycine max
  unsure (1)..(258): unsure at all n locations
tgaaattttgataaaccgcgatcacaggttgccgcaccttaaaaccggatacaaaagcaatcgttacttgatttcaagaatctctcaatttcttcctacttctttgtgtacggcttcttacgggaaagagaatcactctctgtgctggccacagacttcgagaatcattttctttaccacacaacataaaaccaaaanaaagtatgctnttacaatccttcaaaaatattgattcttagtgtgtgcatggtgatgata

SEQ ID NO: 128780 - DNA, 274 bp, Glycine max
cacaattgattggtttatttcctctcaggaatgtgttcccaggacttattgtgttttaaatccacaaaatccttttgtgttgaataggtggatggggaaactgactttcccccagggcacttcccgaagtgttaagagaatgcctctttctatagggggaggagctggtgcaaagaatgctattctcatgaatatgccaaatgctgttctttcaatgtggagatattttgttggagatctcgtctttgaagtttctaagatgacttctccctac

SEQ ID NO: 128781 - DNA, 276 bp, Glycine max
gatggcagaaatgataaacagtctttgtggtggtgatgaaaaattgatgcgtgaaaggacacacctgctgttggcttgttgttcaaggatggcaatttgtaagaaagatgtttggagagttgaatgtggaatcccttctggatttccgctcacagttatttgcaatagcatttttaatgagatgctcagtagatatagctatgaaaaattactgcgccaggctaaagctccaagtatgtttttacaatccttcaaaaatttgtttctttgtgtgtg

SEQ ID NO: 128782 - DNA, 277 bp, Glycine max
ctatacccaagtattccaaggccaggtatgatgaaattgtgaaggaagtctcttcctacttgaagaaagtaggatacaaccctgacaagattccttttgttcctatctctggttttgatggagacaacatgattgagaggtccacaaaccttgactggtacaagggtccaactctgcttgatgcacttgaccagattagtgagcccaagaggccctctgacaagcccctcaggcttccccttcaggatgtgtacaagattggaggtattggaactgt

SEQ ID NO: 128783 - DNA, 274 bp, Glycine max
gtttctttgagtgcagcactcaatggtgttgagggtttggactatatggaaagaattcctcttgccacatctgagggttttccccatgtgctttcacgcaaaaatggtgaaaaaggcaaaaggagatttgtttctggggatggtgaagagatgacattgattccgggaaccagtgttgaagaggcttacaataagctaatagttgaacttgagaaaagtgttcctacattggttggcattgaatgtcccaaggatgagaacttcctcgtcgcaa

SEQ ID NO: 128784 - DNA, 279 bp, Glycine max
gtgaaaaaggcaaaaggagatttgtttctggggatggtgaagagatgacattgattccgggaaccagtgttgaagaggcttacaataagctaatagttgaacttgagaaaagtgttcctacattggttggcattgaatgtcccaaggatgagaaacttcctcgtcgcaaaatttttgacaaacctaagacgcgctgcttcactattctccctatggagtttaatcttgtggttcgtcagaagtttttaaattttgtgaggttcattatgaagaaaaggg

SEQ ID NO: 128785 - DNA, 281 bp, Glycine max
atcagcttctccacaaggatgggcaagtttacaaaatacaaagaggtgataagggagactccatgaaggtgtcatatttataccagctagaaagattgaatgggggagctgttgtgggagagattagcagaaggttctctacaaatgagaacacattgacagttggatgtttatatgtggttgattctcagacagctttgaaggcaaagctgaacaatcacggcaaccttggggccttattgcagcatgagctaacacgtaagtcattcttgacaatctcg

SEQ ID NO: 128786 - DNA, 226 bp, Glycine max
ggagttctgagtgggcaaatcaaacttcatggcatttgagtttccttattgacaatcccaaacagtctacagtttttgatattctcttgggaatttctcaagattttgaaattgctggtaatactcttatgccagctttttctgttccacaggctactgccagatcttctgaaaatgcggaatcctctgcatgatctggaatttgtgtttccttccgcttgttcgt

SEQ ID NO: 128787 - DNA, 263 bp, Glycine max
gttaattgtggagtattttggaaggatgtcttacgttgctcataacgttaatcagccccaagagaaagatttgttggaaggaaatttttcctttgatattaaatctcgctctagattggataaagtttcctctacaaaagcacaatttgttagtggaaaaaccttcaaatatgatatagttggtgctggttcacattcttcagaagatttttctgaaaaggaagatcaagaaaaacccaaaaagattgatgccagtttgagac

SEQ ID NO: 128788 - DNA, 271 bp, Glycine max
tgtggaggtaccaaagttgggaaaagaggctgcaactaaggcaatcaaggaatggggtcaacccaagtccaagattacccatctcatcttttgcaccactagtggtgtcgacatgcctggtgctgattatcagctcactaaactattaggccttcgcccctccgtcaagcgttacatgatgtaccaacaaggctgctttgccggtggcacggtgcttcgtttggccaaagacctcgctgaaaacaacaagggtgctcgcgtgcttgtcgtt

SEQ ID NO: 128789 - DNA, 244 bp, Glycine max
ataagggcaagtcatgggtattcactctagtggtgaattggaaaagaagttaagtgctgcatcaaagacatcacgcttggcgatcctgtattttactgcaacatggtgtggcccttgtcgcttcatttcccctatttatacaagcttggctgaaaagtacccaaaagtggtttttttgaaagttgacagagatgaggccagggacgttgctgcaggttggaatattagcagtgttccgacattt

SEQ ID NO: 128790 - DNA, 237 bp, Glycine max
ataacataattagtgttcatgaaagagaacaagccttactatagtggttctagaatagataagctttctagctggtcataatatcaccattactgatggtattgccaacactagtgcaactttgcaatttagaaagttagcagattgcgattttctcatgagatactttaatcagatgtctaatgttttgtgggtggctcctgtcgacaaggcgagtttatggtcacacttcataaa

SEQ ID NO: 128791 - DNA, 259 bp, Glycine max
ctggtatagtagaaagcttggatgtcttggttaaggagtttgtagctgccagcgatgaagagaagaaattcgtgtttacccgaatggaagaggaagttgagaagctgaagggttctgcctcaaggcacgggaagatttacttgaaagctgccaagaattacttggaaaaaggttctgattatgctaagaacgaaatccagcgcctacagcgcatacttgacaagtccattagtcctgccaaggccgtcgtcttaactct

SEQ ID NO: 128792 - DNA, 276 bp, Glycine max
gggaggggcattatcggaagatgttctcaaacgctgcgtttcggagttccgcctcgcgccgcggtcttggaccgattacctcggcctgaccgtcggcgggacgctctcccctgccggcgtcacggccaggccttccgctacggcccgcaaaccgccaacgtaacggaattggaggtggtgagcggcaaaggcgaaaccttagtctgttccgaatcacaaaattcggaactcttcttcgccaccctgggaggattaggccagttcggcatcataact

SEQ ID NO: 128793 - DNA, 269 bp, Glycine max
  unsure (1)..(269): unsure at all n locations
gaaattttgataaaccgcgatcacaggttgccgcaccttaaaaccggaaacaaaagcaatcgttacttgatttcaagaatctctcaatttcttcctacttctttgtgtacggtttcttaagggaaagaaaatcactctctgtgctggccacagacttcgtgaatcattttcttttccacactacatacaatataanaacactcgcatatactatataagaatacgtgtcagatctaaacttctactgtctctatctcagtactctgttg

SEQ ID NO: 128794 - DNA, 223 bp, Glycine max
aaacactgatgctcaaattttgatggttccagggcgcagattcataactcatggacattttttcaaaaatctgactcagaaagtgcgagtccaaattgttacatctgaaaagagttactggcatgtatatgatcctgacaagtttcagatgtttgacaacagtgaaataggtcttattctaatcccatttggaagatatcccacattcagttgggaccttttt

SEQ ID NO: 128795 - DNA, 176 bp, Glycine max
tgaaattttgataaaccgcgatcacaggttgccgcaccttaaaaccggaaacaaaagcaatcgttacttgatttcaagaatctctcaatttcttcctacttctttgtgtacgatttcttaagggaaagaaaatcactctctgtgctggccacagacttcgtgaatcattttctttt

SEQ ID NO: 128796 - DNA, 202 bp, Glycine max
tgaaaaattgatgcgtgaaaggacacacctgctgttggcttgttgttcaaggatggcaatttgtaagaaagatgtttggagagttgaatgtggaatcccttctggatttccgctcacagttatttgcaatagcatttttaatgagatgctcattagatatagctatgtacaattattgcgctaggctaatgctccaagtatg

SEQ ID NO: 128797 - DNA, 251 bp, Glycine max
tgtggaatcccttctggaattccggtcacagttatttgtaataggctttttaatgagatgctcattagatatagctatgaaaaattactgcgccagggctaaagctccaagtatgtttttacaatccctcaaaaattttggttccttgtgtgtgtaaggtgatgataactaattagtgttcatcgatatgtcagcttacttagtggtctaaatgaaagcttctagcggtcatatatcacattacgatgtat

SEQ ID NO: 128798 - DNA, 223 bp, Glycine max
aacttaattagtgttcatgaatatgtcaagccttactttagtggttctaaattgaaaagctttctagctggtcataatatcaccattactgatggtattgacaaaactagtgcaactttgcaatttagaaagttagcagattgagattttctcaagagaaactttaagcagatgtctaatgttttgtgggtggctcctgaggataaggcgagtttatggtcac

SEQ ID NO: 128799 - DNA, 275 bp, Glycine max
gcgacacccagatggattttgcgccgaatccgtgccctttgcgttcttcttcgttcgtgaatctcgttgagaggattaaacagcttggtaccctcgccgtttctgcagtcattgggaacatcttctccgcgatcttgaccttctgcttcgcattagttggcactttgttgggggctttgactggagctttgataggacaagaaactgagagtggcttcattcgaggggctgctgttggtgccatatcaggagccgttttctccattgaagtgttt

SEQ ID NO: 128800 - DNA, 281 bp, Glycine max
aatatcaccattactgatggtattgacaaaactagtgcaactttgcaatttagaaagttagcagattgtgattttctcaagagaaactttaggcagatgtctaatgttttgtgggtggctcctgaggacaaggcgagtttatggtcacaacttcattatgtttcatgtaataatctggaaatgcaagaagcttatcttgtcaatctcgtaaatgtgttacgagaattgtatttgcacagtccagaggaagctcgccaattgagaaggaaagctctctctcg

SEQ ID NO: 128801 - DNA, 232 bp, Glycine max
gattagtgctcccactttcctatctggtataggacttcgtgggtagacttttctatttctctcctttctttcactctctactttccactaatccgcattaccgttcaaagtggtcttatatgaaacactcttgggcgttagtgcatatgtaagcttcgtaaattttctctggtgacaacaggtttactgttacaacactttcaacgtattaagagtatgacttcaatggtgg

SEQ ID NO: 128802 - DNA, 274 bp, Glycine max
catctgctgttggcttgttgttcaagaatggcaatttgtaagaaagatgtttggagagttgaatgtggaatcccttctggatttccgctcacagttatttgtaatagcatttttaatgagatgctcattagatatagctatgaaaaattactgcgccaggctaaagctccaagtatgtttttacaatccttcaaaaattttgtttctttgtgtgtgtatggtgatgataacttaattagtgttcatgaatatgtcaagccttactttagtggtt

SEQ ID NO: 128803 - DNA, 270 bp, Glycine max
ctcgcaagcaaaaagaaagaatcccaggcgaggagaaagatggaggggaaggagcaggatgtgtcgttgggagcgaacaagttccccgagagacagccgattgggacggcggcgcagagccaagacgacggcaaggactaccaggagccggcgccggcgccgctggttgacccgacggagtttacgtcatggtcgttttacagagcagggatagcagagtttgtggccacttttctgtttctctacatcaccgtcttaaccgttatggga

SEQ ID NO: 128804 - DNA, 271 bp, Glycine max
gggaagttgtatgagggtaagcatattcctgtatctaatattagtgcaggggaaaatcatgtagttcaaatacccctaatggcacaggaggaaattctgtcttctagtgcaagtgatttcagaactgcaatggtgagtaaaaatagcaagcctcaagctactgcaatgcatgtgggagctatagaaattatcattgatagtttcgcaagtcctgactgcaacatagttggtgcaatgcttttggttgatacttatcataccaatcctgaaa

SEQ ID NO: 128805 - DNA, 270 bp, Glycine max
gcaatgcttctggttgatacttatcataccaatcctgaaaatgcagttcgtagtatttttgttgcgcctttcagaggcggtcggcccattcgggtggttacatttccgaataccattgtgcagattgaaccagacatgaattcaaggtttcagcttttgagtaccactaccaatggtgattctgttcaagggaaagatctcgcaatggttaaagttaatgtagcatgtgctgctgttggcttgacatcaagttacactccaactccactg

SEQ ID NO: 128806 - DNA, 267 bp, Glycine max
aattaccttcagaagctgtcgttgtaaatgttacatgtggtagtggacgtggtggtttacccaccactgcttggattagttctgcagttaacaatcgctcctcagatatcaacaaaaggattcgcacagcacttgggagatgtaagaaaattgtttttcttactagagatgatccttttccagtagctttactggctgttctttttggcgttaagaatgaaattctgagttctaacgccactaaccctatgctgacgcgacttcttg

SEQ ID NO: 128807 - DNA, 268 bp, Glycine max
gctggtcataatatcaccattactgatggtattgacaaaactagtgcaactttgcaatttagaaagttagcagattgtgattttctcaagagaaactttaagcagatgtctaatgttttgtgggtggctcctgaggataaggcgagtttatggtcacaacttcattatgtttcgtgtaataatctggaaatgcaagaagcttatcttgtcaatctcgtaaatgtgttacgagaattgtatttgcacagtccagaggaagctcgccaat

SEQ ID NO: 128808 - DNA, 230 bp, Glycine max
  unsure (1)..(230): unsure at all n locations
ganaggacacacctgctgttggcttgttgttcaaggatggcaatttgtaagaaagatgtttggagagttgaatgtggaatcccttctggatttccgctcacagttatttgcaatagcatttttaatgagatgctcattagatatagctatgaaaaattactgcgccaggctaaagctccaagtgtttttacaatccttcaaaaattttgtttctttgtgtgtgtatggtg

SEQ ID NO: 128809 - DNA, 175 bp, Glycine max
cccacatcgttcccttcaagccctagccaaaaaatatggacccataatgtccatcaagttaggtcaagtcccaaccattgtagtttcctcacctgaaactgctgagctattccttaagacccacgacactgtctttgctagcaggccaaaaactcaagcatcggaatacatgtct

SEQ ID NO: 128810 - DNA, 279 bp, Glycine max
gggaaactgactttcccccagggcacttcccgaaatgttaagagaatgcctctatctatagggggaggagctggtgcaaagaatgctattctcatgaatatgccaaatgctgttctttcaatgtggagatattttgttggagatctcgtctttgaagtttctaagatgacttctccctacattaaatgtacagtctctttcttcatagcatttggaaatttggctgatgacaccatcaattttgaggcttttccccacaagctggtacagtttggagag

SEQ ID NO: 128811 - DNA, 277 bp, Glycine max
tgtttcgtgtaataatctggcaatgcaagaagcttatcttgtcaatctcgtaaatgtgttacgagaattgtatctgcacagtccagaggaagctcgccaactgagaaggaaagctctctctcgtattgaatggctgcaaaaagctgatgtgcctaccatagcacagattgaagagttccattcgatgcagaggatgatgaatgctcctgattcaaatgataatattgatctactgttgagcattgacttgttgggtttacaaggagcaggcacagct

SEQ ID NO: 128812 - DNA, 259 bp, Glycine max
ctggtacagtttggagagattcaggaaaaagttgtattgaaattttcacaagaggaatttcttacagcttggtcaacccaggtgcgtcctgcaacaactctgttggctgatgggtgtccatatttgtatgctatggtgcatgatagttcagtgtctacaataccaggtgattttgtcattggtgttaagttgacaaccataaacaatatgtgtgcatatgggctcaatcctggtatttcaggttctcgtcttttgggca

SEQ ID NO: 128813 - DNA, 270 bp, Glycine max
ggctaaagtttcctctacaatagcataatgtgttagtggagtcactttcaaatatgacataattggagagggttcacattcttcagaagattctcctgaaaaggagaatcagtgcaaatccaaaaagattgatgccagattgggacagagcatagaatcctcaatacaatgaggttcaagctcagatggaaacaaatctgggtagattgtctcttgacgatgctgaaactcctaacagctccatgttgacatcttaaaatttcgcaatct

SEQ ID NO: 128814 - DNA, 269 bp, Glycine max
cacaacttcattatgtttcgtgtaataatctggaaatgcaagaagcttatcttgtcaatctcgtaaatgtgttacgagaattgtatttgcacagtccagaggaagctcgccaattgagaaggaaagctctctctcgtattgaatggctgcaaaaagctgatgtgcctaccatagcacagattgaagagttccattcgatgcagaggatgatgaatgctcctgattcaaatgataatattgatctactgttgagcattgattcgttggga

SEQ ID NO: 128815 - DNA, 268 bp, Glycine max
cttgctgttaatgaattaaaggagcatgttgagatctggcacctattgtctagcaaagtatactttgttatgcaagttgaacccctgatatcaagaattcgcacttcagggctcaatatttttctgcagctgaaggattctcagcattgtctccctgatgaattaagttctgaacatttgcagcactgttcacaaaaacttaagcttttgggacatgaagaaacctcaccagtcattcaggcagctattacagaacatctggcaaatg

SEQ ID NO: 128816 - DNA, 265 bp, Glycine max
caaaattctccaattagtaacttattgagagttgctgcttggaagaaaggctgtttgatggttaagattgtgatgtctgggaatgcagcagtcaaaaggagtgattgggcctcactggtacaagtgtttttaacaaacagcaacagtacagagcattttgatgcatgtaagtggacaaaatcggaaccacattcctgggaattgatcttcccaatagagatatgtggtcctaataatggttttgaaatgtggagttctgagtggg

SEQ ID NO: 128817 - DNA, 181 bp, Glycine max
ttttgataaaccgcgatcacaggttgccgcaccttaaaaccggaaacaaaagcaatcgttacttgatttcaagaatctctcaatttcttcctacttctttgtgtacggtttcttaagggaaagaaaatcactctctgtgctggccacagacttcgtgaatcactttcttttccacacaaca

SEQ ID NO: 128818 - DNA, 175 bp, Glycine max
tgaaattttcacaagaggaatttcttacagcttggtcaactcaggtgcgtcctgcaacaactctgttggctgatgggtgtccatatttgtatgctatggtgcatgatagttcagtgtctacaataccaggtgatttggccatgggggtaaggtggccacctatacactatgtgtg

SEQ ID NO: 128819 - DNA, 277 bp, Glycine max
gcaaaaattatgaaccttagacaaagtgttgttggtgatcttaaattcttccgatgggaagttatctgagggtaagcatattcctgtatctaatattagtgcaggggaaaatcatgtagttcaaatacccctaatggcacaggaggaaattctgtcttctagtgcaagtgatttcagaactgcaatggtgagtaaaaatagcaagcctcaagctactgcaatgcatgtgggagctatagaaattatcattgatagtttcgcaagtcctgactgcaac

SEQ ID NO: 128820 - DNA, 277 bp, Glycine max
atgagatcttctcctaggcttagccctgtctttttgggaaatggcccttttccaggactgccacctaccactttggagggtttggctgaccgtgctcggagtagatggatagagaacaatgggagccaagttgatagcaagaaacaatttcagctcaacttggataagattaaaagtggtgaagatacaaggactacattaatgataaagaatatcccgaacaaatacacctctaaaatggtattagctgccattgatgaaaatcacaggggtactt

SEQ ID NO: 128821 - DNA, 271 bp, Glycine max
ccaattcggagaccgaagaaccaaaacagactgagtaattggtctctcttcctccgctgcttctacacacaatgaaggtccaagttatatcacgctccgtggatgagttcacccgagagcgaagtcaagaccttcagagggtgttccggaattacgatcccagccttcgtcctcaagagaaggcggtggagactgtgcgtgctgttaatgcggtgaagttggacaagatatttgcaagaccatttattggagcattggatgggcatgtaga

SEQ ID NO: 128822 - DNA, 270 bp, Glycine max
caaattcctgctgttgacaagttgtattctactatggttaataagtttgcaaaaattatgaaccttagacaaagtgttgttggtgatcttaaacttcttactgatgggacgttgtatgagggtaagcatattcctgtatctaatattagtgcaggggaaaatcatgtagttcaaatacccctaatggcacaggaggaaattctgtcttctagtgcaagtgatttcacaactgcaatggtgagtaaaaatagcaagcctcaagctactgca

SEQ ID NO: 128823 - DNA, 264 bp, Glycine max; identical to SEQ ID NO: 128062

SEQ ID NO: 128824 - DNA, 263 bp, Glycine max
caaaaatatgccactcccatgatgcccctagatgaagaaattctttctaaggttgcacaagatatggttgaggaatggtttgattgtgttgatgaggaggattcctttgaggaagtttctttaagtgcagcactcaatggtgttgagggtttggactatatggaaagaattcctcttgccacatctgagggttttccccatgtgctttcacgcaaaaatggtgaaaaaggcaaaaggagatttgtttctggggatggtgaaga

SEQ ID NO: 128825 - DNA, 258 bp, Glycine max
acgatcctgcttgcacaaaagcaatgactatgtcatttaatccaaacccgtgttctgatgcatggagtttggaatttttgacgcgtaccggatttcactgtgatatcatttgtgtcactggatggactgccaccccaatgcaggatgttcaggttacaattgattggtttatttcctctcaggaatgtgttcccaggacttattgtgttttaaatccacaaaatccttttgtgttaaataggtggatggggaaactga

SEQ ID NO: 128826 - DNA, 261 bp, Glycine max
aaaaattactgcgccaggctaaagctccaagtatgtttttacaatccttcaaaaattttgtttctttgtgtgtgtatggtgatgataacttaattagtgttcatgaatatgtcaagccttactttagtggttctaaattgaaaagctttctagctggtcataatatcaccattactgatggtattgacaaaactagtgcaactttgcaatttagaaagttagcagattgtgattttcttaagagaaactttaagcagatgt

SEQ ID NO: 128827 - DNA, 264 bp, Glycine max
caggaaaaagttgtattgaaattttcacaagaggaatttcttacagcttggtcaactcaggtgcgtcctgcaacaactctgttggctgatgggtgtccatatttgtatgctatggtgcatgatagttcagtgtctacaataccaggtgattttgtcattggtgttaagttgacaaccataaacaatatgtgtgcatatgggctcaatcctggtatttcaggttctcgtcttttgggcaccattcctcagtccatttcacagcaa

SEQ ID NO: 128828 - DNA, 273 bp, Glycine max
cctcattcttatttttctcctctcttcactttcactctctctctctactccagccatcatcatcctagcagtgattctcccagatctcggcaccgagattttgattccggtctgcgccatcattggaatagggttcgccctcttccagtgggtcctcgtctccaaggttaagctctccgctgccagagacgcttcccctaacgccgccggcaaataatggctacaacgatgatctcatcggagaagaggaaggcctcatcgatcacgacgttg

SEQ ID NO: 128829 - DNA, 272 bp, Glycine max
ggaaatgcaagaagcttatcttgtcaatctcgtaaatgtgttacgagaattgtatttgcacagtccagaggaagctcgccaattgagaaggaaagctctctctcgtattgaatggctgcaaaaagctgatgtgcctaccatagcacagattgaagagttccattcgatgcagaggatgatgaatgctcctgattcaaatgataatattgatctactgttgagcattgatttgttgggtttacaaggagcaggtaaagcttttccacacaaga

SEQ ID NO: 128830 - DNA, 271 bp, Glycine max
gcaaaacaaaagccatagtttgttacttctcttcgccttttgctttgcaattgtcaccaaacaattcttgcttagctctcacaagcaagacattatcaacaatgaagaaaattgtgttaaaggtggacttacatgatgacaggatcaagcgaaaagctatgaagacagcatctggcctttcgggggttcaatcagtttctgttgacattaatgacaagaaaatgaccttattgggggatgttgatccagtgagtgcagtgtcaaagctacg

SEQ ID NO: 128831 - DNA, 264 bp, Glycine max
caaaaatatgccactcccatgatgcccctagatgaagaaattctttctaaggttgcacaagatatggttgaggaatggtttgattgtgttgatgaggaggattcctttgaggaagtttctttgagtgcagcactcaatggtcgttgagggtttggactatatggaaagaattcctcttgccacatctgagggttttccccatgtgctttcacgcaaaaatggtgaccaaggcaaaaggagatttgtttctggggatggtgaaga

SEQ ID NO: 128832 - DNA, 265 bp, Glycine max
gttttaaatccacaaaatccttttgtgttaaataggtggatggggaaactgactttcccccagggcacttcccgaaatgttaagagaatgcctctttctatagggggaggagctggtgcaaagaatgctattctcatgaatatgccaaatgctgttctttcaatgtggagatatcttgttggagatctcgtctttgaagtttctaagatgacttctccctacattaaatgtacagtctctttcttcatagcatttggaaatttgg

SEQ ID NO: 128833 - DNA, 266 bp, Glycine max
cggatcgcaatatagcaagtagcgaacatgatttcttccgtgtcctttccagcgtctcttcccgccgttaacttctccggcaacgccgtggcttctccgtcgtgccgcgtcaaatccaggcctatagttgccttcgccaccgccaccgccaccgcggaagctcgctcttcctggacggagcaaccgagaccttcgtatctgaactcctcttgctcttcgctctacgaggttctcggcatccccgccggcgcctctaaccaagaaat

SEQ ID NO: 128834 - DNA, 262 bp, Glycine max
cttgttgagagttgctgcttggaagaaaggctgtttaatggttaaaattgtgatgtctgggaatgcagcagtcaaaaggagtgattgggcctcattggtacaagtgtttttaacaaacagcaacagtacagagcatttcgatgcatgtaagtggacaaaatcggaaccacattcctgggaattgatcttcccaatagaggtatgtggtcctaataatggttttgaaatgtggagttctgagtgggcaaatcaaacttcatgg

SEQ ID NO: 128835 - DNA, 178 bp, Glycine max
ctcgagccgcgcgatcacaggttgccgcaccttaaaaccggaaacaaaagcaatcgttacttgatttcaagaatctctcaatttcttcctacttctatgtgtacgatttcttaagggaaagaaaatcactctctgtgctggccacagacttcgtgaatcatactcttgtccacacaac

SEQ ID NO: 128836 - DNA, 256 bp, Glycine max
ctcgagccgttttaatgagatgctcattagatatagctatgaaaaattactgcgccaggctaaagctccaagtatgtttttacaatctttcaaaaattttgtttctttgtgtgtgtatggtgatgataacttaattagtgttcatgaatatgtcaagccttactttagtggttctaaattgaaaagctttctagctggtcataatatcaccattactgatggtattgacaaaactagtgcaactttgcaatttaga

SEQ ID NO: 128837 - DNA, 142 bp, Glycine max
ctacacccaagtattccaaggccaggtatgatgaaattgtgaaggaagtctcttcctacttgaagaaagtaggatacaaccctgacaagattccttttgttcctatctctggttttgagggagacaacatgattgagaggtc

SEQ ID NO: 128838 - DNA, 263 bp, Glycine max
ccctcgagccgaatcggctcgagcggctcgagaaattttttgacagacggcaattttagagctactgtcgatttgcagcgcacacatcgtatcaaaggaatgattaaaatggtggccacagttggtattcctgagaatacaggtatagcattggcctgtgctatgaatagttcttttagggggcgtgccagttctgatatttacaccatctgctctcaagactgtgaattatggaatcctgcttgcacaaaagcaatgactat

SEQ ID NO: 128839 - DNA, 266 bp, Glycine max
gcatgtaagtggacaaaatcggaaccacattcctgggaattgatcttcccaatagaggtatgtggtcctaataatggttttgaaatgtggagttctgagtgggcaaatcaaacttcatggcatttgagtttccttattgacaatcccaaacagtctacagtttttgatattctcttgggaatttctcaagattttgagattgctggtaatactcttatgccagctttttctgttccacaggctactgccagatcttctgaaaatgc

SEQ ID NO: 128840 - DNA, 260 bp, Glycine max
atatgtcaagccttactttagtggttctaaattgaaaagctttctagctggtcataatatcaccattactgatggtattgacaaaactagtgcaactttgcaatttagaaagttagcagattgcgattttctcaagagaaactttaagcagatgtctaatgttttgtgggtggctcctgaggacaaggcgagtttatggtcacaacttcattatgtttcgtgtaataatctggaaatgcaagaagcttatcttgtcaatc

SEQ ID NO: 128841 - DNA, 260 bp, Glycine max
gcaaagccagcatgagaatgggaaacactgatgctcaaattttgatggttccagggcgcagattcatagctcatggacattttttcaaaaatctgactcagaaagtgcgagtccaaattgttacatctgaaaagagttactggcatgtatatgatcctgacaagtttcagatgtttgacaacagtgaaataggtctttattctaatcccactttggaagatatcccacattcagcttgggacttttttgctgggacagtg

SEQ ID NO: 128842 - DNA, 259 bp, Glycine max
agcaacagtacagagcattttgatgcatgtaagtggacaaaatcggaaccacattcctgggaattgatcttcccaatagaggtatgtggtcctaataatggttttgaaatgtggagttctgagtgggcaaatcaaacttcatggcatttgagtttccttattgacaatcccaaacagtctacagtttttgatattctcttgggaatttctcaagattttgagattgctggtagtactcttatgccactttttctgttcc

SEQ ID NO: 128843 - DNA, 257 bp, Glycine max
  unsure (1)..(257): unsure at all n locations
cgcgctccgagatcggaacccggtcgaatttcgggtcgtcggtgcgggcagagtcggtggttggcgttggcggtggcggtggcgcgaanattcgnctgnnnnnnnnnnnnnnnnnnnnnnnnnnatgaagatggtggtgagacatagggacttgagggaaatcgtggaggctattaaggagaatttcgataacgcggcttccgctggggatcaggtttctgagatgcttgagatcagtagggcgcacttgatcggag

SEQ ID NO: 128844 - DNA, 262 bp, Glycine max
ctgcgccaggctaaagctccaagtatgtttttacaatctttcaaaaattttgtttctttgtgtgtgtatggtgatgataacttaattagtgttcatgaatatgtcaagccttactttagtggttctaaattgaaaagctttctagctggtcataatatcaccattactgatggtattgacaaaactagtgcaactttgcaatttagaaagttagcagattgtgattttcacaagagaaactttaggcagatgtctaatgttt

SEQ ID NO: 128845 - DNA, 261 bp, Glycine max
gaaaagttgtattgaaattttcacaagaggaatttcttacagcttggtcaactcaggtgcgtcctgcaacaactctgttggctgatgggtgtccatatttgtatgctatggtgcatgatagttcagtgtctacaataccaggtgattttgtcattggtgttaagttgacaaccataaacaatatgtgtgcatatgggctcaatcctggtatttcaggttctcgtcttttgggcaccattcctcagtctatttcacagcaaa

SEQ ID NO: 128846 - DNA, 269 bp, Glycine max
ctcgagccgtcctggtatttcaggttctcgtcttttgggcaccattcctcagtctatttcacagcaaactgtttggaatcaaatggcaacagtgagaacaccattgaattttgattctagcaagcagagcttttgtcaattttctattgaccttctcggtggaggaattttagtggacaaaactggagattggatcacacttatacaaaattctccaattagtaacttgttgagagttgctgcttggaagaaaggctgtttaatggtta

SEQ ID NO: 128847 - DNA, 191 bp, Glycine max
agacaaatttgtataaattgtctcttgatgatgttgaaactcctaaaggttccatgttggatcttaaaatttcgccatctaaaattgcacttcccaaaaacacaggtggaggaaccattctgcgtagtgatctatttggcaattttttgacagatggcaattttagagcaaatgttgatttgcagcgcact

SEQ ID NO: 128848 - DNA, 260 bp, Glycine max
tgacaacagtgaaataggtctttattctaatcccactttggaagatatcccacattcagcttgggaccttttttgctgggacagtgagaaaactttgccaaataaattttctgcaaaattgctctcctgcaaattggatactgttactggccaatattatcctgagtgggctccaattaattgtcgagttcatcgacaaccaattcacatcactgaaggccattatgtcagaaagccagatgtcagcattgaatatgatg

SEQ ID NO: 128849 - DNA, 264 bp, Glycine max
atcacattcgactccaaattggttgctggtcccaatggagggtctgctgggaagctcactgtcaaatacgaaacaaaaggagatgctgagcccaaccaagacgaactcaaaactggaaaagccaaggctgatgctctcttcaaggccattgaggcttaccttttggcccatcccgattacaactaatcctcttcaacttacttgtcatcactttcttgcttggagacttatccaatcactctgttctcaacttaagttgccttc

SEQ ID NO: 128850 - DNA, 254 bp, Glycine max
aatggttaaagttaatgtagcatgtgctgctgttggcttgacatcaagttacactccaactccattgttggaatctggtttgcaaaaagacagagggttaattgtggagtattttggaaggatgtcttacgttgctcacaacgttaatcatccccaagagaaagatttgttggagggaaatttttcctttgatattaaatctcgctctagattggaaaaagtttcctctacaaaagcacaatttgttagtggaa

SEQ ID NO: 128851 - DNA, 262 bp, Glycine max
gcggcgccgaagccttcctcgccttcccctcctccgcctccgcctccgccatcaccctcggccgctacaacctcacctcctacaaagccatcgacgaagtcaaagcctttaccttcgactcgtgggacctcgcggccgaagaatccaacggcgccgtaaccatctacggctccgtcaagatccccgattcggcgaggaacgtcagccacgtgtggcaggtgggtcccgtggccgcgggcaagcctggggtccacagcttcga

SEQ ID NO: 128852 - DNA, 260 bp, Glycine max
atgttttgtgggtggctcctgaggacaaggcgagttttggtcacaacttcattatgtttcgtgtaataatctggaaatgcaagaagcttatcttgtcaatctcgtaaatgtgttacgagaattgtatttgcacagtccagaggaagctcgccaattgagaaggaaagctctctctcgtattgaatggctgcaaaaagctgatgtgcctaccatagcacagattgaagagttccattcgatgcagaggatgatgaatgctc

SEQ ID NO: 128853 - DNA, 258 bp, Glycine max
gtttgcaagattggggaaaacctccccataagaacttttgttgggcaccagagtgaagttaattgtatcaaatgggatcccactggttcattattagcctcatgttctgatgatatgactgcaaagatatggagtatgaaacaagataaatatcttcatgagtttagggagcattccaaggagatatatactatcagatggagcccaactggtcccggtacaaataaccctaataaaaatttggtgttggctagtgca

SEQ ID NO: 128854 - DNA, 252 bp, Glycine max
agattccggtccgaggcgatctgtcattagggtacagttgacaacatacacaatatgtgtgcctatagggtcaatcctggtattgcaggtactcggtcgcttgggcagcatcctcaatccgattcgacaggaactgtttagaattaaatggcaacagtgacgaaaccattgagattttgattctagcaagcagagcttttgtcaattttctattgaccttctcggtggaggaattttagtggacaacctgga

SEQ ID NO: 128855 - DNA, 235 bp, Glycine max
ctctgcctcaaagaaggaggagaaaaatgtgcttccccaagaaaagaaagatgaccaaaaaaccgtggacactgctttgttaaaggccattgagagtgttccagagctcaagtcttacttgggtgctaggttttccttgaaggcaggagtgaagccccatgagctagttttctagagtgctaaaattattttcctacatctgtttgtcgagcttgttcccaatagttgacggttt

SEQ ID NO: 128856 - DNA, 263 bp, Glycine max
  unsure (1)..(263): unsure at all n locations
ggaaacaaaagcaatcgttacttgatttcaagaatctctcaatttcttcctacttctttgtgtacggtttcttaagggaaagaaaatcactctctgtgctggccacagacttcgtgaatcattttcttttccacacatcatacgaatctcgtgcacnctcctatnngatataggacttcgtgtcagatttaaacttcttctgtctctatctcagttctctgtctaatttcaagtcagttactggcaatcttggattagtgctc

SEQ ID NO: 128857 - DNA, 255 bp, Glycine max
  unsure (1)..(255): unsure at all n locations
gaaattttgataaaccgcgatcacaggttgccgcaccttaaaaccggaaacaaaagcaatcgttacttgatttcaagaatcttccaatttcttcctacttctttgtgtacgatttcttaagggaaagaaaatcactctctgtgctggccacagacttcgtgaatcattttcttttccacacttcgtacaaccatcgganagtctcctatttgatataggacttcgtgtcagatttaaacttcttctgtttcctct

SEQ ID NO: 128858 - DNA, 272 bp, Glycine max
ggttggggaagtgaaagctaatttgaagaaaggtattggagcgaatgaattgctgtcccatctttcagcacatcctgcacctgctcaagaaaagatgagtgctctggttgaagctctattcgagggaactgagaaaggttttgctaaagaagctgataagaagaagaactactttgctgctgctgttgccgaagagggatcccagctgttattgcttcatgctattgaagaattttcttgcaagtctacttccaatgctttgaagaggttgc

SEQ ID NO: 128859 - DNA, 269 bp, Glycine max
ctcgagccgctcgagccgattcggctcgagctcgagcgcgaatgtttcatcctaacatacatgcggaacgcagtatatgcttggacatgcttacacatcagtggagccctatatatgatgtagctgcaattcttacctcaatccagtcattgttgtgtgatccaaacccaaattcaccagcaaattctgaagctgctcggatgttcagcgaaaacaagcgcgaatacaacaaaagtacgcgagattgttgagcaaagttggatgctgat

SEQ ID NO: 128860 - DNA, 269 bp, Glycine max
agctgtttaatggttagaattgtgatgtctgggaatgcagcagtcaaaaggagtgattgggcctcattggtacaagtgtttttgacaaacagcaacagtacagagcatttcgatgcatgtgagtggacaaaatcggaaccacattcctgggaattgatcttcccaatagaggtatgtggtcctaataatggttttgaaatgtggagttctgagtgggcaaatcaaacttcatggcacttgagtttccttattgacaatcccaacagtct

SEQ ID NO: 128861 - DNA, 272 bp, Glycine max
atttgcaatagcatttttaatgagatgctcattagatatagctatgaaaaattactgcgccaggctaaagctccaagtatgtttttacaatccttcaaaaattttgtttctttgtgtgtgtatggtgatgataacttaattagtgtccatgattaggtccaggccttacttaagtggtccaaattggaaagctttctagctcgtactaaattccccattactgatggtattgccaaaactgtggcactttgcaatttagaaagttacgatgt

SEQ ID NO: 128862 - DNA, 274 bp, Glycine max
ctcgagccgtttcgatgcatgtaagtggacaaaatcggaaccacattcctgggaattgaaccttcccaatagaggtatgtggtcctaataatggttttgaaatgtggagttctgagtgggcaaatcaaacttcatggcacttgagtttccttattgacaatcccaaacagtctacagtttttgatattctcttgggaatttctcaagattttgaaattgctggtaatactcttatgccagctttttctgttccacaggctactgcagatcttct

SEQ ID NO: 128863 - DNA, 271 bp, Glycine max
ctgaggacaaggcgagtttatggtcacaacttcattatgtttcatgtaataatctggaaatgcaagaagcttatcttgtcaatctcgtaaatgtgttacgagaattgtatttgcacagtccagaggaagctcgccaattgagaaggaaagctctctctcgtattgaatggctgcaaaaagctgatgtgcctaccatagcacagattgaagagttccattcgatgcagaggatgatgaatgctcctgattcaaatgataatatcatctactg

SEQ ID NO: 128864 - DNA, 174 bp, Glycine max
ccgcgatcacaggttgccgcaccttaaaaccggaaacaaaagcaatcgttacttgatttcaagaatctctcaatttcttcctacttctttgtgtacggtttcttaagggaaagaaaatcactctctgtgctggccacagacttcgtgaatcattttcttttccacacaacatac

SEQ ID NO: 128865 - DNA, 269 bp, Glycine max
gaaatttggctgatgacaccatcaattttgaggcctttccccacaagctggtgcagtttggagagattcaggaaaaagttgtattgaaattttcacaagaggaatttcttacagcttggtcaactcaggtgcgtcctgcaacaactctgttggctgatgggtgtccatatttgtatgctatggtgcatgatagttcagtgtctacaataccaggtgattttgtcattggtgttaagttgacaaccataaacaatatgtgtcatatgggc

SEQ ID NO: 128866 - DNA, 268 bp, Glycine max
gcaaactgtttggaatcaaatggcaacagtgagaacaccattgaattttgattctagcaagcagagcttttgtcaattttctattgaccttctcggtggaggaattttagtggacaaaactggagattggatcacacttatacaaaattctccaattagtaacttgttgagagttgctgcttggaagaaaggctgtttaatggttaagattgtgatgtctgggaatgcagcagtcaaaaggagtgattgggcctcattggtcaagtgt

SEQ ID NO: 128867 - DNA, 267 bp, Glycine max
tcgggtgtactttcttgcgaaaccgagagagcgaaggggcaaacacaattttttttatcttcttttttattttttgtagagagagagagagagaaaatgttggggatcttcagcagttcagtggtgtcgccgccggaggagctggtggccgctggcagcagaacgccgtcgccgaagacgacggcggggaagctgctgaaccggttcgtggagagcaaggcgtcggcggtgtcgctgcaggtgggggaacacgtgcagttcttacac

SEQ ID NO: 128868 - DNA, 274 bp, Glycine max
atttgcaatagcatttttaatgagatgctcattagatatagctatgaaaaattactgcgccaggctaaagctccaagtatgtttttacaatccttcaaaaattttgtttctttgtgtgtgtatggtgatgataacttaattagtgttcatgaatatgtcaagccttactttagtggttctaaattgaaaagctttctagctagtcataatatcaccattactggatggtattgacaaaactagtgcaactttgcaatttagaaagtgcagattg

SEQ ID NO: 128869 - DNA, 273 bp, Glycine max
aatatattcaattttgcgtttctctgcctaaaaggattgaaagatgggtcaagcattcggttgctactaagtcgatcagtcaaatgtggctatcaaggagcattttggaaaatttgatgatgtcctagagcctggatgtcactgcctgccttggtgtcttgggtaccagattgctggtagtctgtcgctgcgagtgcagcaacttgatgttcgatgtgagacgaaaaccaaggacaatgtctttgtcaatgtggttgcatctgtgaataccga

SEQ ID NO: 128870 - DNA, 270 bp, Glycine max
ttgtgttttaaatccacaaaatccttttgtgttgaataggtggatggggaaactgactttcccccagggcacttcccgaagtgttaagagaatgcctctttctatagggggaggagctggtgcaaagaatgctattctcatgactatgccaaatgctgttctttcaatgtggagatattttgttggagatctcgtctttgaagtttctaagatgacttctccctacattaaatgtacagtctctttcttcatagcatttggatttggctg

SEQ ID NO: 128871 - DNA, 268 bp, Glycine max
ctcgagccgctcgagccgattcattccccttatctttctctcttactctctccccgcccaaaccctaactctctaccctattccgctttctctcatccatcatgaaaggaggaaagtccaagaccgaatctaagagagccgatgccaaacttgctgtgaataagaagggcgccgccaccaagactaggacacccgccggaaaggggaaggcagcgaaagatcctaacaagccaaagaggcctccaagtgctttcttcgttttcggagg

SEQ ID NO: 128872 - DNA, 266 bp, Glycine max
aagaaaatgaaagtccttgttttctttgttgctatagttctagcagcatggcattgccatggctcagaccatgaccatgaccatggccacacctaccaaattttccctctgagaatgaaaactggccatggtggccactacattccggaggtatcatgccaaagttggaggcttggtgtggaagcacacaacgtcattgactggaaaaccgttcctcaagattgcgagggatatattgggaactacatgcttggcgacatatagat

SEQ ID NO: 128873 - DNA, 266 bp, Glycine max
ccacattcagcttgggaccttttttgctgggacagtgagaaaactttgccaaataatttttctgcagaattgctctcttgcaaattggatactgttactggccaatattatcctgagtgggctccaattaattgtcgagttcatcgacaaccaattcacatcactgaaggaaattatgtcagaaagcaagatgtcagcattgaatatgatgcatgtacaattccaaatgattgtggttcattggttgttgccaaagttgaaatcac

SEQ ID NO: 128874 - DNA, 266 bp, Glycine max
cttgctttgacagaagaggaaaagatggaagtgattagaaatagaggcattcctgctgatgttcttgcaaagcgagctcatgaatttgaaaaacatgttgctcatgaaagcctcaaggatcaaattcctgctgttgacaagttgtattctactaaggttaataagtttgcaaaaattatgaaccttagacaaagtgttgttggtgatcttaaacttcttactgatgggaagttgtatgagggtaagcatattcctgtactaatatt

SEQ ID NO: 128875 - DNA, 213 bp, Glycine max
taggcatataatttcctagcagaagattgtgttgtatcaatgtagtaatgtttttgttgagttaaccttgcacttttggccaacattggtgactcggatcagtaaaatacacatatttggcactatcaaaaaaaaaaaaaaaaaaaaaaaaaaaaaaaaaaaaaaaaaaaaaaaaaaaaaaaaaaaaaaaaaaaaaaaacaagggggggggcc

SEQ ID NO: 128876 - DNA, 267 bp, Glycine max
aaagatgataatcctattggggcaactttaattggaagagcttatgtgcctgtttcggaggtcttggatggtgaggaaatagataggtgggttgaaatcttggacgaggaaaaaacccaatacaagagggttcaaagatccatgtgaagctgcaatattttgatgtcacaaaagaccgcaactgggctcgaggcattagaagtcccaaattccccggcgttccctatactttcttctcacagaggcaaggatgtaaggttctctgta

SEQ ID NO: 128877 - DNA, 268 bp, Glycine max
gagaacaaccctgactttgtggtcgaagttgtctctctcttctttgaagattctgaaaggcttctcaaagatctcacctttgccctagatcagaatggcgttgacttcaaaaaagttgatgctcatgtgcaccagttaaagggtagcagttcaagcataggtgcacaaagggtgaaaaatgcctgcattgctttccgcaacttctgtgaggagcagaacacagatgcgtgcgtcagatgtctgcaacaagtgaaacaaggactgcctt

SEQ ID NO: 128878 - DNA, 167 bp, Glycine max
atcaaacttcatggcacttgagtttccttattgacaatcccaaacagtctacagtttttgatattctcttgggaatttctcaagattttgaaattgctggtaatactcttatgccagctttttctgttccacaggctactgccagatcttctgaaaatgcggaatcc

SEQ ID NO: 128879 - DNA, 268 bp, Glycine max
caccgtattaaaggaatgattaaaatggtggccacagttggtattcctgagaatacaggtatatcattggcctgtgctatgaatagttctttcagggggcgtgccagttctgatatttacaccatctgctctcaagactgtgaattatggaatcctgcttgcacaaaagcaatgactatgtcatttaatccaaacccgtgttctgatgcatggagtttggaatttctgaagcgtaccggatttcattgtgatatcatttgtgcactgg

SEQ ID NO: 128880 - DNA, 268 bp, Glycine max
attttgttggagatcttgtctttgaagtttctaagatgacttctccttatattaaatgtacagtctctttcttcatagcatttggaaatttggctgatgacaccatcaattttgaggcctttccccacaagctggtgcagtttggagagattcaggaaaaagttgtattgaaattttcacaagaggaatttcttacagcttggtcaactcaggtgcgtcctgcaacaactctgttggctgatgggtgtccatatttgtagctatggtg

SEQ ID NO: 128881 - DNA, 265 bp, Glycine max
caaatggcaacagtgagaacaccattgaattttgattccagcaagcagagtttttgtcaattttctattgaccttctcggtggaggaattttagtggacaaaactggagattggatcacacttatacaaaattctccaattagtaacttgttgagagttgctgcttggaagaaaggctgtttaatggttaagattgtgatgtctgggaatgcagcagtcaaaaggagtgattgggcctcattggtacaagtatttttacaaacag

SEQ ID NO: 128882 - DNA, 264 bp, Glycine max
cccaaacagtctacagtttttgatattctcttgggaatttctcaagattttgaaattgctggtaatactcttatgccagctttttctgttccacaggctactgccagatcttctgaaaatgcggaatcctctgcatgatctggaatttgtgttttctttcgcttgttcgtttatataattcaataaaggaaattaggcatgaccctcttgttgagtatgctctgcctatttgaaaatttccacacctcttttagattcgtaatg

SEQ ID NO: 128883 - DNA, 264 bp, Glycine max
gcatcgcgaaaagcatatgcggaaacccggcccaggataaaaggccgcttcgccaaacgaacagaaattgactcggatgtggagcgtctctatagccctggccctgcggtgctcatgctggacactccatacggcgtcgtaccatcgttttagttaatttcaaaatgaagaaacgatggagtgcatgaatcttagaataatgattagcgattctgtgggattgttaggggaaaaaggtgaagaatcgaatcggtacacgtgatt

SEQ ID NO: 128884 - DNA, 263 bp, Glycine max
gttttaaatccacaaaatccttttgtgttaaataggtggatggggaaactgactttcccccagggcacttcccgaaatgttaagagaatgcctcttactatagggggaggagctggtgcaaagaatgctattctcatgaatatgccaaatgctgttctttcaatgtggagatattttgttggagatctcgtctttgaagtttctaagatgacttctccctacattaaatgtacagtctctttcttcatagcatttgaaatttg

SEQ ID NO: 128885 - DNA, 263 bp, Glycine max
tggatgcagtagaaaagaagcaatatggttggttttgggtctgccccaatggtggtaagaattgccattatatacatgctcttccacctggttatgttttgaaatctcaaatgaaggctttgttagaggaagaaagtgaaaaaatatcaattgaagaggagattgaaaatcagcgtgccaaagtggcaactacaactcctatgactcctgagttattctttgagtggaagaagaagaagatagaagagagagatgcatatagc

SEQ ID NO: 128886 - DNA, 161 bp, Glycine max
ctggtttggccaatagattactgagtaagggcaacgatattctgtgttgcgattatgctagttttgatggtttgattaccaagcaagttatgagcaagatggcagaaatgataaacagtctttgtggtggtgatgaaaaattgatgcgtgaaaggacacac

SEQ ID NO: 128887 - DNA, 263 bp, Glycine max
agagttgaatgtggaatcccttctggatttccgctcacagttatttgcaatagcatttttaatgagatgctcattagatatagctatgaaaaattactgcgccaggctaaagctccaagtatgtttttacaatccttcaaaaattttgtttctttgtgtgtgtatggtgatgataacttaattagtgttcatgaatatgtcaagccttactttagtggttctaaattgaaaagctttctagctggtcataatatccattactg

SEQ ID NO: 128888 - DNA, 267 bp, Glycine max
gttttaaatccacaaaatccttttgtgttaaataggtggatggggaaactgactttcccccagggcacttcccgaaatgttaagagaatgcctctttctatagggggaggagctggtgcaaagaatgctattctcatgaatatgccaaatgctgttctttcaatgtggagatattttgttggagatctcgtctttgaagtttctaagatgacttctccctacattaaatgtacagtctctttcttcatagcatttggaattggctga

SEQ ID NO: 128889 - DNA, 264 bp, Glycine max
caaaaatatgccactcccatgatgcccctagatgaagagattctttctagagttgcacaagatatggttgaggaatggtttgattgtgttgatgaggaggattcctttgaggaagtttctttaagtgcagcacttaatggagttgagggtttggactatatggaaagaattcctcttgccacatctgagggttttcctcatgtgctttcacgcgaaaatggtgcaaaaggcaaaacaagatttgtttctggggatgtgaagaga

SEQ ID NO: 128890 - DNA, 260 bp, Glycine max
caacacggcactgagttattagtaattgtgttgtgttgtgttgagcagagagaaggatcaagaaaggataagaagaaagagggaatagggttagggttagggttagggttaggttgaggatgccgaagaacaagggaaagggaggtaagaacaggaagaggggaaagaacgcggcggacgacgagaagcgagagctggtgttcaaggaggacgggcaggagtacgcgcaggtgctccggatgctgggtaacgcggtgcga

SEQ ID NO: 128891 - DNA, 261 bp, Glycine max
ggagtattttggaaggatgtcttacgttgctcacaacgttaatcatccccaagagaaagatttgttggagggaaatttttcctttgatattaaatctcgctctagattggaaaaagtttcctctacaaaagcacaatttgttagtggaaaaaccttcaaatatgatataattggtgctggttcacattcttcagaagattttcctgaaaaggaagatcaagaaaaacccaaaaagattgataccagattgagaacgaatag

SEQ ID NO: 128892 - DNA, 144 bp, Glycine max
ccgcgatcacaggttgccgcaccttagaaccggagacaaaagcgatcgttacttgatttcaagaatcgctcaacttcttcctacttctctgtgcaccatttcttaagggaaagaaaatcactctccgtgctggtcacagacttc

SEQ ID NO: 128893 - DNA, 257 bp, Glycine max
ctcttcgatgtggtcgctttcacccacgtgatgcacctcgcggcgcaggccggggttcgctacgccatggagaatccccactcctacgtccacagcaacatcgcgggcctcgtcacgcttctcgaggcctgcaaatcggcgaaccctcagcccgcggtcgtttgggcctcgtccagctccgtctacgggctcaacgagaaggttccattttccgaatcggaccagaccgaccggcccgctagcctctacgccgcacc

SEQ ID NO: 128894 - DNA, 261 bp, Glycine max
gttgggagcaaggcaggatgcgttcagtattttctttgaatgggatgctagttttggaattccaggagcattttacatcaaaaactttatgactgatgagtttttcctcgtcagtgttaaactcgaggacattccaaaccatggaaccattgaatttgtttgcaactcatgggtttacaacttcaggagttacaaaaagaatcgcattttctttgtcaatgatacatatcttccaagtgccacaccagctccaacttaagt

SEQ ID NO: 128895 - DNA, 161 bp, Glycine max
cgcgatcacaggttgccgcaccttaaaaccggaaacaaaagcaatcgttacttgatttcaagaatctctcaatttcttcctacttctttgtgtacggtttcttaagggaaagaaaatcactctctgtgctggccacagacttcgtgaatcattttcttttc

SEQ ID NO: 128896 - DNA, 263 bp, Glycine max
caatatattccattctctctgtgtatttccctacctctcccttcaagatgcagatcttcgtcaagaccctcaccggcaagaccatcacccttgaggtggaaagctctgacaccatcgacaacgtcaaggccaagatccaggacaaggaaggaatccccccggaccagcaacgtctcattttcgccggaaagcaacttgaggacggccgtacccttgctgactacaacattcagaaggagagtactcttcacctcgctccgtct

SEQ ID NO: 128897 - DNA, 264 bp, Glycine max
caagcaagttgctgctcaagaagctgagagggctaaatttgttgtagaaaaagctgaacaagacaaaagaagtgctgttattagagctcagggtgaagccaagagtgcccagttgattggtgaagctattgccaataatcctgcgtttatcaccttaaggaaatttgagcggcaaagggaatcggtcacacaatttcaaattctgccaacaaggtttacttgaattcagatgatctcttgctgaatcttcaggagtaatttgga

SEQ ID NO: 128898 - DNA, 109 bp, Glycine max
tgaaattttgataaaccgcgatcacaggttgccgcaccttaaaaccggaaacaaaagcaatcgttacttgatttcaagaatctctcaatttcttcctacttctttgtgt

SEQ ID NO: 128899 - DNA, 264 bp, Glycine max
cttagacaaagtgttgttggtgatcttaaacttcttactgatgggaagttgtatgagggtaagcatattcctgtatctaatattagtgcaggggaaaatcatgtagttcaaatacccctaatggcacaggaggaaattctgtcttctagtgcaagtgatttcagaactgcaatggtgagtaaaaatagcaagcctcaagctactgcaatgcatgtgggagctatagaaattatcattgatagtttcgcaagtcctgctgcaaca

SEQ ID NO: 128900 - DNA, 259 bp, Glycine max
catatttgtatgctatggtgcatgatagttcagtgtctacaataccaggtgattttgtcattggtgttaagttgacaaccataaacaatatgtgtgcatatgggctcaatcctggtatttcaggttctcgtcttttgggcaccattcctcagtccatttcacagcaaactgtttggaatcaaatggcaacagtgagaacaccattgaattttgattctagcaagcagagcttttgtcaattttctattgactctcggtg

SEQ ID NO: 128901 - DNA, 259 bp, Glycine max
cttcagttgttccctttgatttcatgtgggaataatcgtttagcttccaataatgtgcaagatatagccaagcctgttagactaaatggatcctcccatgagttgcagaatggcttagattcagcaatgcgtcatactcacagaattttagcaattttagaggcattattttcattgaagccatcttctgttggcacgccttggagttacagctcaaatgagatagttgcagcagctatggttgctgcacagttctgaa

SEQ ID NO: 128902 - DNA, 258 bp, Glycine max
  unsure (1)..(258): unsure at all n locations
gaagattttcctgatcatgnagatcaagaaaaactcaaganagatgatgccagattgagacaaagaatacatcctcaatacaatgaggttcaggctcagatggaaacaaatttgtttaaattgtctcttgatgatgttgaaactcctaaaggttccatgttggatcttaaaatttctcaatctaaaattgcacttcccaaaaacacagttggaggaaccattctgcgtagtgatctattggcaaattttttgcagagg

SEQ ID NO: 128903 - DNA, 256 bp, Glycine max
gcaatggtgagtaaaaatagcaagcctcaagctactgcaatgcatgtgggagctatagaaattatcattgatagtttcgcaagtcctgactgcaacatagttggtgcaatgcttttggttgatacttatcataccaatcctgaaaatgcagttcgtagtatttttgttgcgcctttcagaggcggaaggcccattcgggtggttacatttccgaataccattgtgcagattgaaccagacatgaattcagtttcag

SEQ ID NO: 128904 - DNA, 260 bp, Glycine max
gtcaagagggagttgctcacattggtgaattgaaatctggtgtctatgttccactgactatacgatttaatttggtggaaactcccaaggaatggcaactggatctaccttgtctcaaaattcctagtgtcttgactacaactgatatgagattggtaggcacagaacatgagggatatgatccttttcttggtggaattcaaaaatatgccactcccatgatgcctctagatgaagagattctttctaagggcacaaga

SEQ ID NO: 128905 - DNA, 259 bp, Glycine max
aatttttaattacagagatttggacatcttggttgtttattatacaatagcaactcaatttagaaaattcctaccgcattacattaagtggcacctgtataccttgttgatctacattctcccatcttttctcactgctgaaattaaatataagcggaatttgagtaatattcatatttccggcttgttttacgacggcagatacaaattctggactaaacacgagaaaaatcttgctttgacagaagaggaaagatgg

SEQ ID NO: 128906 - DNA, 260 bp, Glycine max
caaccctttgagagttagaatggctgctgctattgaaatccccacaatagtgtttccaaactcctctgcccaacagaggatgccagtggttggaatgggatctgcccctgacttcacatgcaagaaagacacaaaggaggctatcattgaggccgtgaaacagggtacagaaacttcgacactgtggtgctatggctctgaacaagctctcggtgaagctctcaaggaagctatccatcttgggctcgtctcccgcaaga

SEQ ID NO: 128907 - DNA, 164 bp, Glycine max
ctgtgaattatggaatcctgcttgcacaaaagcaatgactatgtcatttaatccaaacccgtgttctgatgcatggagtttggaatttttgaagcgtaccggatttcactgtgatatcatttgtgtcactggatggactgccaccccaatgcaggatgttcagg

SEQ ID NO: 128908 - DNA, 267 bp, Glycine max
ctcgaggttctctgtttaatttcaagttcaagctggtgaaatcttggattagtgctcccactttcctatctggtataggacttcgtgggtagacttttctatttctctcctttctttcactctcttcttctcactaatccgcattgccgttcaaagtggtcttatttgaaaaacacttgggcgttggtgcaaatgtttacttcgttaattttctctggagacaacaggtttactgagagaacaatttttacttgcagagatttggac

SEQ ID NO: 128909 - DNA, 275 bp, Glycine max
ggatgatcaacttctggatgcaatatgtgagcggctggtatcgtctctgagcactcaaggaacctacattgttcgtgagggtgaccccgtgactgaaatgctttttatcattagaggtagactggatagttctactacaaatggtggccgtagtggtttcttcaactcaatcatactgagacctggagatttttgtggggaggaactactttcttgggctttactcccaaaatcaactattaatttgccttcttcaactagacagttaaagccct

SEQ ID NO: 128910 - DNA, 278 bp, Glycine max
cggaaacaaaagcaatcgttacttgatttcaagaatctctcaatttcttcctacttctttgtgtacggtttcttaagggaaagaaaatcactctctgtgctggccacagacttcgtgaatcattttcttttccactcttagtttatttactgaacactctcctatttgatataggacttcgtgtcagatttaaacttcttctgtctctttctcagttctctgtttaatttcaagttcaagctggtgaaatcttggattagtgtccactctcctatctg

SEQ ID NO: 128911 - DNA, 270 bp, Glycine max
gaaattttgataaaccgcgatcacaggttgccgcaccttaaaaccggaaacaaaagcaatcgttacttgatttcaagaatctctcaatttcttcctacttctttgtgtacggtttcttaagggaaagaaaatcactctctgtgctggccacagacttcgtgaatcattttcttttccactcttcatacaaataatgaacactctcctatttgatataggacttcgtgtcagatttaaacttcttcagactctttctcagttctgtttaat

SEQ ID NO: 128912 - DNA, 278 bp, Glycine max
tgaaattttgataaaccgcgatcacaggttgccgcacctcaaaaccggaaacaaaagcaatcgttacttgatttcaagaatctctcaatttcttcctacttctttgtgtacgatttcttaagggaaagaaaatcactctctgtgctggccacagacttcgtgaatcattttcttttccactcttagtttatttcatgaacactctcctatttgatataggacttcgtgtcagatttaaacttcttctgtttctttctcagtctctgtttaatttcaag

SEQ ID NO: 128913 - DNA, 270 bp, Glycine max
cgcaatccgttccaaaccacataagcttcaacaaagatggatgtagaaaagttgaagaagatggccagttctgttcgaactggtgggaagggtactatgagaaggaagaagaaagctgtccacaagactactactacagatgacaaaaggcttcaaagcaccctgaagaggataggagtgaatgctatccctgcaattgaagaagtcaacatctttaaggatgaaatagttatccagtttttaaaccccaaagacaagcatctattgctg

SEQ ID NO: 128914 - DNA, 278 bp, Glycine max
cacaaacttgagttggattttggtgatcttgtgaattgatctgcgatgtcggacgaggtagttctgttggatacatgggctagcatgtatggtatgagggctaggattgcattggctgaaaagggtgttaggtatgaatacaaggaagagaatctcatgaacaggagtcctttgcttttgcagatgaacccaattcacaagaagattcctgttttgatccataatggcaaacccatttgtgaatctgcaataatagtgcagtcattgatgaggtctgg

SEQ ID NO: 128915 - DNA, 284 bp, Glycine max
  unsure (1)..(284): unsure at all n locations
catggtcatagtctacacctaattagccaaacacaccacagcaccaaactagttggctcaattctctttgaatggctttggaggctttgaattcaccaacagcagccaccactcccttccgtggttaccaagaagaggaggaggccgttnnccttcacctacgcgagccttgggccaagagaaaacgctccaaacgacctcgttttgagtcggaggaagagtacttggctctttgcctcatcatgcttgcacaaagcggtaacaacacaacacccaattaccgt

SEQ ID NO: 128916 - DNA, 258 bp, Glycine max
agttgtattgaaattttcacaagaggaatttcttacagcttggtcaactcaggtgcgtcctgcaacaactctgttggctgatcgggtgtccatatttgtatgctatggtgcatgatagttcagtgtctacaataccaggtgatttggtcattggtgttaagttgacaaccataaacaatatgtgtgtctatgggctcaatcctggtatttcaggttctcgtcttttgggcaccattcctcagtccatcacagcaactg

SEQ ID NO: 128917 - DNA, 275 bp, Glycine max
gttgatgaggaggattcctttgaggaagtttctttaagtgcagcacttaatggtgttgagggtttggactatatggaaagaattcctcttgccacatctgagggttttcctcatgtgctttcacgcaaaaatggtgataaaggcaaaagaagatttgtttctggggatggtgaagagatgacattgattccgggaactagtgttgaagaggcttacaacaagctaatagttgaacttgagaaaagtgttcctacattgttggcattgaatgtccc

SEQ ID NO: 128918 - DNA, 276 bp, Glycine max
gtagaagtgctagctgacctgaacctttcaattaagaaagcgtatatttctgctgatggcaagtggttcatggatgtttttcatgtcaccgatcaaaatggaaacaagataatcgacgagagtgttttaaaatatattgaacagtcacttgggaacattcactatggaagaaccaacctctctaacggtctcactgcgttggaattaacaggaactgaccgagttggtcttttatcggaagtgtttgctgtactggctgacttcaatgtgatgtgg

SEQ ID NO: 128919 - DNA, 277 bp, Glycine max
aaatattcatttcagtgaagctgaatgctataagatcgataacaagaacaacaaagtttattgccgtgctagtaaagacaaaaagttgggtggccaagaagacttttccattgattatgattacctggtaatagctatgggaggccgttctaataccttcaacacacctggtgttcaagagcatgcccatttcttgaaggaagtggatgaagctctaaaaattcgtcattcagtggttgacctttttgaaagagctagcctccttctttaccagtgg

SEQ ID NO: 128920 - DNA, 278 bp, Glycine max
ttggcaaattttttgacagagggcaattttagagcaagtgttgatttgcagcgcactcatcgtatcaaaggaatgattaaaatggtggccacagttggtattcctgagaatacaggtatagcattggcctgtgctatgaatagttcttttagggggcgtgccagttctgatatttacaccatctgctctcaagactgtgaattatggaatcctgcttgcacaaaagcaatgactatgtcatttaatccaaacccgtgttctatgcatggagtttggaa

SEQ ID NO: 128921 - DNA, 275 bp, Glycine max
tggaggtttctattacagatgaaattgcaggcactatggagctcaaccctgataggctgggtgagctcaaagcatttgatgacacaaaagctggtgtgaaaggccttgttgatgaaggggtcgcaaagatcccaagattatttcatcatccacctgatgaatttgtcatggcttcaaagttaggcaacacagaatacactatacctgttatagaccttgcagaagttggcaaagatccaagttcacgccaagaaattatagcagaataagggaag

SEQ ID NO: 128922 - DNA, 286 bp, Glycine max
aattcggctcgaaaacacttgggcgttggtgcaaatgtttgcttcgttaattttctctggagacaacaggtttactgagaaaacaatttttacttgcagagatttggacatcttggttgtttattatacaatagcaactcgatttagaaaatttctaccgcattacattagctggcatctgtataccttgttgatctacattctcccatcttttctcactgctgaaattaaatataagcggaatcagagtaatattcagatttccggcttttttacgacggcagat

SEQ ID NO: 128923 - DNA, 274 bp, Glycine max
ctaaaattgcacttcccaaaaacacagttggaggaaccattctgcgtagtgatctattggcaaattttttgacagagggcaattttagagcaagtgttgatttgcagcgcactcatcgtattaaaggaatgattaaaatggtggccacagttggtattcctgagaatacaggtatagcattggcctgtgctatgaatagttcttttagggggcgtgccagttctgatatttaaaccatctgctctcaagactgtgaattcggaatcctgcttgc

SEQ ID NO: 128924 - DNA, 281 bp, Glycine max
ctgcactgtacgaggagatctagttaaaatgctgttggagctggttaggaaaaagcgagacaagtttgatcatattgttattgaaaccacaggtcttgcaaagccagctcctgttattgaaacattttgcagtgatgagctggtctctcagcatgtaaaactggatggagttgtaactttggttgattgcaagcatgccagtaaacatttaaatgaagtgaaaccaagatttgtggttaatgaggcagtagaacaagttgcatagctgatcgtattatttt

SEQ ID NO: 128925 - DNA, 164 bp, Glycine max
cttttctctttcctctctctctctctacgctttctcgtttgagataccctcaagggatccactaactgaaggagcaatggggttgacatttaccaagctttttagccggcttttcgccaagaaggaaatgcgaattctaatggttggtcttgatgccgctggta

SEQ ID NO: 128926 - DNA, 267 bp, Glycine max
ggcgagtttatggtcacaacttcattatgtttcgtgtaataatctggaaatgcaagaagcttatcttgtcaatctcgtaaatgtgttacgagaattgtatttgcacagtccagaggaagctcgccaattgagaaggaaagctctctctcgtattgaatggctgcaaaaagctgatgtgcctaccatagcacagattgaagagttccattcgatgcagaggatgatgaatgctcctgattcaaatgataatattgatcactgttgagc

SEQ ID NO: 128927 - DNA, 241 bp, Glycine max
  unsure (1)..(241): unsure at all n locations
gataacttaattagtgttcatgaatatgtcaagccttactttagtggttctanattgaaaagctttcaagccagtcctaataaccaccataacggatggaatggccaaaccaagtgcacctttccaatttagaaggttagcggattgggatttcctcaggagaaactttaagcagatgtctaatgttttgtgggtggctcctgaggacaaggcgagtttatggtcacaacttcattatgtt

SEQ ID NO: 128928 - DNA, 270 bp, Glycine max
gggagttgctcacattggtgaattgaaatctggtgtctatgttccactgcctacacgacataatttggtggaaactcccaaggaatggcaactggatctaccttgtcactaaattcctagtgtcttgactacaactgatgagagattggtaggcacagaacatgagggatatgatccttttcttggtggaattcaaaaatatgccactcccatgatgcccctagatgaagaaattctttctaaagttgcacaagatggttgaggaatggt

SEQ ID NO: 128929 - DNA, 274 bp, Glycine max
cgtcttctgaagtcaagggtgacagcacatggaagagttggggcaacagctgcagtttattctgctgccatcctggagtatttaactgcagaggtgttggagttggctggcaatgcgagcaaggatctgaaggtgaagcgtattaccccaagacatctacagcttgccatccgtggagatgaagaacttgataccctcatcaaaggaacaatagctggtggaggtgttattcctcatatccacaagtcccttatcaaaatcttcgaaggaatga

SEQ ID NO: 128930 - DNA, 278 bp, Glycine max
tcgcgtgtactttcttacgaaaccgagagagcgaatgggcaaacacaatttctcttatctgctaatgtattgcttctatagagagagagatagaaaatgttggggatcttcagcagattcagtggtgtcgccgccggatgatatcatagtcgatggtagacacgaatgccgtagcagaagacaatggcggcataagctgtctgcaccaggttacgtgcgagattcaagcgtcgtcagtatcgctttacctctgagaacacgtgcttaaacgtacacac

SEQ ID NO: 128931 - DNA, 270 bp, Glycine max
cgtaaatgtgttacgagaattgtatttgcacagtccagaggaagctcgccaattgagaaggaaagctctctctcgtattgaatggctgcaaaaagctgatgtgcctaccatagcacagattgaagagttccattcgatgcagaggatgatgaatgctcctgattcaaatgataatatcgatctactgttgagcattgatttgttgggtttacaaggagcaggtaaagcttttccaaacaagatcgtttttgatgatacttgtgttggcta

SEQ ID NO: 128932 - DNA, 269 bp, Glycine max
tccttttagcaagttaacaacacttttgtcttcgttccattatctagttctcaattctcttcaccctttgcctctgaaagaaatgggtagtcttgaagcggaaagaacaacagtaggattggcagcaagagacccttcagggattctctccccatacacctacaatctaagaaacacaggccctgatgatgtttacattaaagttcactactgtggaatttgccattctgatctccaccagattaaaaatgatctgcatgtccaactat

SEQ ID NO: 128933 - DNA, 270 bp, Glycine max
  unsure (1)..(270): unsure at all n locations
ctcgagccgattcggctcgangttgccaaagttggaaatcacaaacaaattgttggtttacatgttgctggaagcaaaggaagactgggatatgcttcattgataccatacgttgagccagttgtgcaagctcaaagtgctgaagtttactttgacttcttccctgtggaggttgatagtcaagagggagttgctcacattggtgaattgaaatctggtgtctatgttccactgcctacaaaaatcgatttggtgaaactcccaaggaat

SEQ ID NO: 128934 - DNA, 179 bp, Glycine max
tgaaattttgataaaccgcgatcacaggttgccgcaccttataaccggaaacaatagcaatcgttacttgatttcaagaatctctcaatttcttcctacttctttgtgtacgatttcttaagggaaagaaaatcactctctgtgctggccacagacttcgtgaatcattttcttttcca

SEQ ID NO: 128935 - DNA, 266 bp, Glycine max
aaaccatggcagtgaaagtatacggtccccactgtgcttccaccaagcgggtgctggtttgtctggttgagaaggaagtcgaatttgaggttgtccctgttgatgtcactaagggggagcagaaggatcctgagtacctcaaactacagccatttggagttgttcctgtcatcaaagatggagattataccttatatgaatctcgtgctataatgaggtattatgcagaaaaatacagatctcaaggggtgagttgctgggaaaaa

SEQ ID NO: 128936 - DNA, 267 bp, Glycine max
ataatctggaaatgcaagaagcttatcttgtcaatctcgtaaatgtgttacgagaattgtatttgcacagtccagaggaagctcgccaattgagaaggaaagctctctctcgtattgaatggctgcaaaaagctgatgtgcctaccatagcacagattgaagagttccattcgatgcagaggatgatgaatgctcctgattcaaatgataatattgatctactgttgagcattgatttgttgggtttacaagagcaggtaaagcttt

SEQ ID NO: 128937 - DNA, 263 bp, Glycine max
gaatgattaaaatggtggccacagttggtattcctgagaatacaggtatagcattggcctgtgctatgaatagttcttttagggggcgtgccagttctgatatttacaccatctgctctcaagactgtgaattatggaatcctgcttgcacaaaagcaatgactatgtcatttaatccaaacccgtgttctgatgcatggagtttggaatttttgaagcgtaccggatttcactgtgatatcatttgtgtctggatggactgc

SEQ ID NO: 128938 - DNA, 267 bp, Glycine max
tcgaaacgaagaaagaaagcgttgtgaagaatggcggaagagggacaagtgatcggtgtccacagcgtagaggagtggaaggaacatctcaagaagggagaagagtccaagaaattgattgtggtggattttactgcttcttggtgcggtccatgccgtttcattgccccaattcttgcagagtttgctaaaaagttgccgaatgtcaccttcctcaaggtggatgtggatgaattggagactgtttccaagagtggggaattgagg

SEQ ID NO: 128939 - DNA, 263 bp, Glycine max
gtttgttgttgtaactcgttcttcttcttttgttgttctgtgtttgtgtttgttttttctctcacctgaaaatgtcttgctgcggtggtaactgtggttgcggaagctcctgcaagtgcggcaacggctgcggaggctgcaagatgtacccagacttgagctacactgagtcaaccaccaccgagaccttggtcatgggagtggcacctgttaaggctcaatttgagggtgctgaaatgggtgtgccctgagaacgatggctg

SEQ ID NO: 128940 - DNA, 266 bp, Glycine max
gtaataatctggaaatgcaagaagcttatcttgtcaatctcgtaaatgtgttacgagaattgtatttgcacagtccagaggaagctcgccaactgagaaggaaagctctctctcgtattgaatggctgcaaaaagctgatgtgcctaccatagcacagattgaagagttccattcgatgcagaggatgatgaatgctcctgattcaaatgataatattgatctactgttgagcattgatttgttgggtttcaaggagcaggtaaag

SEQ ID NO: 128941 - DNA, 181 bp, Glycine max
gaaattttgatataccgcgatcacaggttgccgcaccttaaaaccggaaacaaaagcaatcgttacttgatttcaagaatctctcaatttcttcctacttctttgtgtacagtttcttaagggaaagaaaatcactctctgtgctggccacagacttcgtgaatcattttctgttccacac

SEQ ID NO: 128942 - DNA, 175 bp, Glycine max
cttgttgagagttgccgcttggaacaaaggctgtataatagttataattgtgatgtctgggaatgcagcagtctcaaggagtgattgaggcgctcattggtacaagtgggttgaacaaacagcaacagtacagagcatttcgatgcatgtaagtggacataatcggatgcacatt

SEQ ID NO: 128943 - DNA, 262 bp, Glycine max
ggccaagggtctataacaattcctggatgcattgccgccactccaattgaaatgcccattgatcctgtggaaggcattccacttgaaatgcctcttgtttactattatgggcacgcgactcctagtaacaatgtagaattgtataaagtgcttgttaaggagcttgcagggatgattgagaggcaatttactggaaatgctgaatctagagcttcaggcatggtgataaatactatgggatggatagggtgtaggctatgat

SEQ ID NO: 128944 - DNA, 261 bp, Glycine max
gcaagatggcagaaatgataaacagtctttgtggtggtgatgaaaaattgatgcgtgaaaggacacacctgctgttggcttgttgttcaagaatggcaatttgtaagaaagatgtttggagagttgaatgtggaatcccttctggatttccgctcacagttatttgtaatagcatttttaatgagatgctcattagatatagctatgaaaaattactgcgccaggctaaagctccaagtatgtttttcaatccttcaaaaa

SEQ ID NO: 128945 - DNA, 261 bp, Glycine max
caagaattctttgatggaaattttccagtggattcttggttaccaatttttgtgaattgtctttatcctgtaagtcaattaccttcagaagctgtcgttgtaaatgttacatgtggtagtggacgtggtggtttacccacctctgcttggattagttctgcagttaataatcgctcctcagatatcaacaaaaagattcgcacagcacttgggaaaggtaagaaaattgtttttcttactagagttgaccttttccagtag

SEQ ID NO: 128946 - DNA, 263 bp, Glycine max
agagttgaatgtggaatcccttctggatttccgctcacagttatttgcaatagcatttttaatgagatgctcattagatatagctatgaaaaattactgcgccaggctaaagctccaagtatgtttttacaatccttcaaaaattttgtttctttgtgtgtgtatggtgatgataacttaattagtgttcatgaatatgtcaagccttactttagtggttctaaattgaaaagctttctagctggtcaatatcaccattactg

SEQ ID NO: 128947 - DNA, 254 bp, Glycine max
gtatttccctacctctcccttcaagatgcagatcttcgtcaagaccctcaccggcaagaccatcacccttgaggtggaaagctctgacaccatcgacaacgtcaaggccaagatccaggacaaggaaggaatccccccggaccagcaacgtctcattttcgccggaaagcaacttgaggacggccgtacccttgctgactacaacattcagaaggagtgtactcttcacctcgtcctccgtctccgtggggcat

SEQ ID NO: 128948 - DNA, 196 bp, Glycine max
ctcgagccgctcgagccgctcgagcggctcgagagcagtcaaaagacctgattgggcctcaatggtacaaacgtttttaacaaacagcaacagtacagagcatttcgatgcatgtaagtggacaaaatcggaaccacattcctgggaattgatcttcccaatagaggtatgtggtcctaataatggttttgaaatg

SEQ ID NO: 128949 - DNA, 261 bp, Glycine max
cggctcgagattatgaagaaaagggacaagcttagttgtcaagttggaatcaacccatactccatggaatggactggtttggccaatagattactgagtaagggcaacgatattctgtgttgcgattatgctagttttgatggtttgattaccaagcaagttatgagcaagatggcagaaatgataaacagtctttgtggtggtgatgaaaaattgatgcgtgaaaggacacacctgctgttggcgttgttcaaggatggc

SEQ ID NO: 128950 - DNA, 262 bp, Glycine max
  unsure (1)..(262): unsure at all n locations
gtcctgactgcaacatagttggtgcaatgcttttggttgatacttatcataccaatcctgaaaatgcagttcgtagtatttttgttgcgcctttcagaggcggaaggcccattcgggtggttacatttccgaataccattgtgcagatataancagacatgaattcaaggtttcagcttttgagtaccactaccaatggtgattttgttcaaggaaaagatctcgcaatggttaaagttaatgtagtgtgctgctgttggct

SEQ ID NO: 128951 - DNA, 264 bp, Glycine max
ttcgccttcgatcaaagggaagaacaaacattcaattcatggcggctgcaaagcttcaagctttatggaatcacccagctgggcctaaaaccattcacttctgggcacctacctttaagtggggcatcagcattgccaacattgctgatttctcaaaaccacctgagaaactttcctatcctcagcaaatagcggtcacagctactggaattatctggtctcgttacagcactgtaatcaccccaaaaatggaacctgtttagt

SEQ ID NO: 128952 - DNA, 244 bp, Glycine max
ctcgagccgctcgagccgtgtcattgatcttgtcctaacagaggtagctatgcctattttgtctggaataggccttttgttcaagatcatgagcgacaaaactctgaagttgattcctgtgataatgatgtcatctcatgatcctatgggtatagtctttaagtgtttgtcaaaaggtgcagttgactttttagtgaaacctattcggaggaatgaacttaaaaacctctggcagcacgtttgg

SEQ ID NO: 128953 - DNA, 258 bp, Glycine max
ggcaattttagagcaagtgttgatttgcagcgcactcatcgtattaaaggaatgattaaaatggtggccacagttggtattcctgagaatacaggtatagcattggcctgtgctatgaatagttcttttagggggcgtgccagttctgatatttacaccatctgctctcaagactgtgaattatggaatcctgcttgcacaaaagcaatgactatgtcatttaatccaaacccgtgttctgatatggagtttggaatt

SEQ ID NO: 128954 - DNA, 259 bp, Glycine max
caccgtttctttcacttcacaaaaatgaaaaacatgaaattgtgttcggtgatgctatgcttatcactagcgttccttcttggggccacagcagaacaatgtggcacacaagctggtggagcgttatgcccaaatagattatgttgcagcaaatttgggtggtgtggtgacacagattcctaccgtggagaaggttgccagagccaatgcaaatctgcaacaccctcaacaccaactccaacaacctagtagtggtgga

SEQ ID NO: 128955 - DNA, 160 bp, Glycine max
ggcgagtttatggtcacaacttcattatgtttcgtgtaataatctggaaatgcaagaagcttatcttgtcaatctcgtaaatgtgttacgagaattgtatttgcacagtccagaggaagctcgccaattgagaaggaaagctctctctcgtattgaatgg

SEQ ID NO: 128956 - DNA, 262 bp, Glycine max
gatgataacttaattagtgttcatgaatatgtcaagccttactttagtggttctaaattgaaaagctttctagctggtcataatatcaccattactgatggtattgacaaaactagtgcaactttgcaatttagaaagttagcagattgtgattttctcaagagaaactttaagcagatgtctaatgttttgtgggtggctcctgaggataaggcgagtttatggtcacaacttcattatgtttcggtaacaatctggaaat

SEQ ID NO: 128957 - DNA, 260 bp, Glycine max
gctaattccatatccccgttttccttcactcttgaaccccgattcatttccaccagcactagaatatacgctgcaatatcaataccttctcacatgaaagcttggacatactctgagtatggaaaatccaaggaagttctcaagtttaatcagagtgtggctttgcctgaggtgaaggaagaccaggtcctcatcaaggtcgctgctgcttcccttaaccccattgatcataagagaatggaaggctttcaagaacagcg

SEQ ID NO: 128958 - DNA, 263 bp, Glycine max
tagagcttgcacctattggtatcttctacaatatcctaaagtgtttttcttcttcttcatcaccatgtatttactttcagacctcatcaacctcaatctctcagaatccacagaaaagatcatttctgagtacatatgggttggtggatctggtatggacctcagaagcaaagccaggactcttcctgggccagtgagtgaccctgcaaaacttccgaagtggaactatgatgggtctagcacagataagctccaggggatga

SEQ ID NO: 128959 - DNA, 260 bp, Glycine max
gaagtttttaaattttgtgaggttcattatgaagaaaagggacaagcttagttgtcaagttggaatcaacccatactccatggaatggactggtttggccaatagattactgagtaagggcaacgatattctgtgttgcgattatgctagttttgatggtttgattaccaagcaagttatgagcaagatggcagaaatgataaacagtctttgtggtggtgatgaaaaattgatgcgtgaaaggcacacctgctgttggc

SEQ ID NO: 128960 - DNA, 260 bp, Glycine max
aaaattctccaattagtaacttgttgagagttgctgcttggaagaaaggctgtttaatggttaagattgtgatgtctgggaatgcagcagtcaaaaggagtgattgggcctcatcggtacaagtgtttttaacaaacagcaacagtacagagcattttgatgcatgtaagtggacaaaatcggaaccacattcctgggaattgatcttcccaatagaggtatgtggtcctaataatggttttgaatgtggagttctgagt

SEQ ID NO: 128961 - DNA, 263 bp, Glycine max
ctcgagccgagaggatccaccaagaccctcggcaacttcgttaaggctacttttgattgcttagatgaaaacctatggattcctgacaccagaattctggaaggagactcgcttctccaaatctccattccaagagtacacagatctactggcaaaaccaacaggaaagactctaatcttggaggaggaaagggtggatgcttgatttgctagttttgctttatggatgttttaggaactttattatttacatactttgttgg

SEQ ID NO: 128962 - DNA, 260 bp, Glycine max
gtggaatcccttctggatttccgctcacagttatttgcaatagcatttttaatgagatgctcattagatatagctatgaaaaattactgcgccaggctaaagctccaagtatgtttttacaatctttcaaaaattttgtttctttgtgtgtgtatggtgatgataacttaattagtgttcatgaatatgtcaagccttactttagtggttctaaattgaaaagctttctagctggtcataatatccattactgatggtat

SEQ ID NO: 128963 - DNA, 265 bp, Glycine max
gagcaagaacactgttccaatacggaatctaaggcaaagcaaaccaaacatcttgaatcatgggttcaacaggtgagactcagattaccccaacccacgtatctgatgaagaagcaaaccttttcgccatgcaactagccagtgcttctgtccttccaatgatcctcaaatcagcacttgagctagacgtgttggaaatcatagccaaggctggccctggtgttcatctttcccccactgacatttcttctagtcccaacacaga

SEQ ID NO: 128964 - DNA, 275 bp, Glycine max
gcaggatgttcaggttacaattgattggtttatttcctctcaggaatgtgttcccaggacttattgtgttttaaatccacaaaatccttttgtgttgaataggtggatggggaaactgactttcccccagggcacttcccgaagtgttaagagaatgcctctttctatagggggaggagacagtgcaaataatgctattctcatgaatatgccaaatgctgttctttcaatgtggagatattttgttggagatctcgtctttgaagtttctaaga

SEQ ID NO: 128965 - DNA, 186 bp, Glycine max
gaaattttgataaaccgcgatcacaggttgccgcaccttaaaaccggaaacaaaagcaatcgttacttgatttcaagaatctctcaatttcttcctacttctttgtgtacggtttcttaagggaaagaaaatcactctctgtgctggccacagacttcgtgaatcattttcttttccacacaacat

SEQ ID NO: 128966 - DNA, 154 bp, Glycine max
ctttaagcagatgtctaatgttttgtgggtggctcctgaggacaaggcaagtttatggtcacaacttcattatgtttcgtgtaataatctggacatgcaagaagcttatcttgtcaatctcgtaaatgtgttacgagaattgtatctgcacagc

SEQ ID NO: 128967 - DNA, 188 bp, Glycine max
gtttcttcagtttggtataactttagccgaggtcaggaggagcactagctaagttcacaatttcaaaatggctaggggactaaagaagcatttgaaaaggctcaatgctcctaagcattggatgcttgacaaactgggtggtgcatctgcgcctaaaccctcatctggaccacacaaatcgagggagt

SEQ ID NO: 128968 - DNA, 147 bp, Glycine max
ctcaagtttttgaagtatagagatggcagagacattcctatttacctcagagtcagtgaacgagggacaccctgacaagctctgtgaccaaatctctgatgctgtcctcgacgcttgcctcgaacaggacccagacagcaaggttgc

SEQ ID NO: 128969 - DNA, 208 bp, Glycine max
gcagattcatagctcatggacattttttcaaaaatctgactcagaaagtgcgagtccaaattgttacatctgaaaagagttactggcatgtatatgatcctgacaagtttcagatgtttgacaacagtgaaataggtctttattctaatcccactttggaagatatcccacattcagcttgggaccttttttgctgggacagtgacaa

SEQ ID NO: 128970 - DNA, 198 bp, Glycine max
gttgtattgaaattttcacaagaggaatttcttacagcttggtcaactcaggtgcgtcctgcaacaactctgttggctgatgggtgtccatatttgtatgctatggtgcatgatagttcagtgtctacaataccaggtgattctgtccttggtgttaagttgacaaccataaacaatatgtgtgcatatgggctcaat

SEQ ID NO: 128971 - DNA, 154 bp, Glycine max
ctcgagcgaaatttttgacaaacctaagacgcgctgcttcactattctccctatggaacttaatcttgtggttcgtcagaagtttttaaattttgtgaggttcattatgaagaaaagggacaagcttagttgtcaagttggaatcaacccatac

SEQ ID NO: 128972 - DNA, 198 bp, Glycine max
gtttatttcctctcaggaatgtgttctccaggacttattgtgttttaaatccacaaaatccttttgtgttgaataggtggatggggaaactgactttcccccagggcacttcccgaagtgttaagagaatgcctctttctatagggggaggagctggtgcaaagaatgctatactcatgaatatgccaaatgctgttc

SEQ ID NO: 128973 - DNA, 190 bp, Glycine max
taagatttgaaattttgataaaccgcgatcacaggttgccgcaccttaaaaccggaaacaaaagcaatcgttacttgatttcaagaatctctcaatttcttcctacttctttgtgtacggtttcttaagggaaagaaaatcactctctgtgctggccacagacttcgtgaatcattttcttttccacaca

SEQ ID NO: 128974 - DNA, 153 bp, Glycine max
attggtgttaagttgacaaccataaacaatatgtgtgcatatgggctcaatcctggtatttcaggttctcgtcttttgggcaccattcctcagcccatttcacagcaaactgtttggaatcaaatggcaacagtgagaacaccattgaatttt

SEQ ID NO: 128975 - DNA, 269 bp, Glycine max
gacaaaactggagattggatcacacttatacaaaattctccaattagtaacttgttgagagttgctgcttggaagaaaggctgtttaatggttacaattgtgatgtctgggaatgcagcagtcaaaaggagtgattgggcctcattggtacaagtgtttttaacaaacagcaacagtacagagcatttcgatgcatgtaagtggacaaaatcggaaccacattcctgggaattgatcttcccaatagaggtatgtggtcctaataatgg

SEQ ID NO: 128976 - DNA, 225 bp, Glycine max
gattgttgtgactcgttcttcttcgtcgttatcttcttcttttgttgtttgtgtgtttgtttattctctcacctgaaaatgtcttgctgcggtggtaactgtggttgcggaagcgcctgcaagtgcggcaacggctgcggaggctgcaagatgtacccagacttgagctacaccgagtcaaccaccaccgagaccttggtcatgggagtggcaccagttaaggct

SEQ ID NO: 128977 - DNA, 159 bp, Glycine max
gacattttgataaaccgcgatcacaggttgccgcaccttaaaaccggaaacaaaagcaatcgttacttgatttcaagaatctctcaatttcttcctacttctttgtgtacgatttcttaagggaaagaaaatcactctctgtgctggccacagacttcg

SEQ ID NO: 128978 - DNA, 156 bp, Glycine max
aaccgcgatcacaggttgccgcaccttaaaaccggaaacaaaagcaatcgttacttgatttcaagaatctctcaatttcttcctacttctttgtgtacgatttcttaagggaaagaaaatcactctctgtgctggccacagacttcgtgaatcatt

SEQ ID NO: 128979 - DNA, 173 bp, Glycine max
gttggtattcctgagaatacaggtatagcattggcctgtgctatgaatagttcttttagggggcgtgccagttctgatatttacaccatctgctctcaagattgtgaattatggaatcctgcttgcacaaaagcaatgactatgtcatttaatccaaacccgtgttctgatgc

SEQ ID NO: 128980 - DNA, 120 bp, Glycine max
gcaaagaatgctattctcatgaatatgccaaatgctgttctttcaatgtggagatattttgttggagatctcgtctttgaagtatctaagacgacttctccctacattaaatgtacagtc

SEQ ID NO: 128981 - DNA, 133 bp, Glycine max
gaaattttgataaaccgcgatcacaggttgccgcaccttaaaaccggaaacaaaagcaatcgttacttgatttcaagaatctctcaatttctttctacttcattgtgtacgatttcttaagggaaagaaaatc

SEQ ID NO: 128982 - DNA, 166 bp, Glycine max
cccaaaaacacagttggaggaaccattctgcgtagtgacctattggcaaattttttgacagagggcaattttagagcaagtgttgatttgcagcgcattcatcgtatcaaaggaatgattaaaatggtggccacagttggtattcctgagaatacaggtatagcat

SEQ ID NO: 128983 - DNA, 270 bp, Glycine max
ggttattcaacgagaacaacgagatgatcctcgtctacgacttcatggcgcgtggaacgctacgcgatcatctatacaacaccgacaacccccctttgacgtggcagcagcgcttgcagatctgcatcggcgccgcgcgtggactgcattacctccacaccggcgcgaacatcacgatcatccaccgcgacgtgaaaactaccaacatgttgttggatgataagtgggtggccaaggtttcggacttcgggctttcgagaatcgtgccca

SEQ ID NO: 128984 - DNA, 257 bp, Glycine max
gatgcatgtaagtggacaaaatcggaaccacattcctgggaattgatcttcccaatagaggtatgtggtcctaataatggttttgaaatgtggagttctgagtgggcaaatcaaacttcatggcacttgagtttccttattgacaatcccaaacagtctacagtttttgcatattctcttgggaatttctgcaagattttgaaattgctggtaatactcttatgccactttttctgttccacaggctactgccagat

SEQ ID NO: 128985 - DNA, 165 bp, Glycine max
gttcaaatacccctaatggcacaggaggaaattctgtcttctagtgcaagtgctttcagaactgcaatggtgagtaaaaatagcaagcctcaagctactgcaatgcatgtgggagctatagaaattatcattgatagtttcgcaagtcctgactgcaacatagtt

SEQ ID NO: 128986 - DNA, 108 bp, Glycine max
gtttggagagttgaatgtggaatcccttctggatttccgctcacagttatttgcaatagcatttttaatgagatgctcattagctatagctatgccaaattactgcgc

SEQ ID NO: 128987 - DNA, 127 bp, Glycine max
gacgtgtttcatgtggaaatatttgttggagatctcgtctttgaagtttctaagatgacttctccctacattaaatgtacagtctctttcttcatagcatttggaaatttggctgatgacaccatca

SEQ ID NO: 128988 - DNA, 196 bp, Glycine max
taagcagatgtctaatgttttgtgggtggctcctgaggataaggcgagtttatggtcacaacttcattatgtttcgtgtaataatctggaaatgcaagaagcttatcttgtcaatctcgtaaatgtgttacgagaattgtatttgcacagtccagaggaagctcgccaattgagaaggaaagctctctctcgtatt

SEQ ID NO: 128989 - DNA, 187 bp, Glycine max
tggaaattttgataaaccgcgatcacaggttgccgcaccttaaaaccggaaacaaaagcaatcgttacttgatttcaagaatctctcaatttcttcctacttctttgtgtacggtttcttaagggaaagaaaatcactctctgtgctggccacagacttcgtgaatcattttcttttccacacaaca

SEQ ID NO: 128990 - DNA, 155 bp, Glycine max
atcaagacgagatatatgtacctaaacgaagagatcttgaaagagaatccaaacatgtgtgcttacatggcaccttctttggatgctaggcaagacatggtggtggtagaggtaccaaagctagggaaagaggctgcagtaaaggccataaagga

SEQ ID NO: 128991 - DNA, 120 bp, Glycine max
ctcgagccgtttggaaatttggctgatgacaccatcaattttgaggcttgtccccacaagctggtacagtttggagagattcaggaaaaagttgtattgaaattttcacaagaggaattc

SEQ ID NO: 128992 - DNA, 172 bp, Glycine max
aattttgataaaccgcgatcacaggttgccgcaccttaaaaccggaaacaaaagcaatcgttacttgatttcaagaatcttccaatttcttcctacttctttgtgtacgatttcttaagggaaagaaaatcactctctgtgcttgccacagacttcgtgaatcattttcttt

SEQ ID NO: 128993 - DNA, 115 bp, Glycine max
ttcagaggcggaaggcccattcgggtggttacatttccgaataccattgtgcagattgaaccagacatgaattcaaggtttcagcttttgagtaccactaccaatggtgattttg

SEQ ID NO: 128994 - DNA, 227 bp, Glycine max
tctcgagccgaatcggctcgagggaacctcagcacagattggcttactaaagaggcgctaccgcgatcaagcaacaccctgcttttgaaggtgtgaatcgggcattgatcagatgtgccaccccacccgagatccccaaggctgtagagtttgagaagataccctcaccagcttcatcaagtggtggtgaaaaggctgctaaccatatctcaatagctaatcagaaa

SEQ ID NO: 128995 - DNA, 214 bp, Glycine max
gcagaatcctaattttatgaccatggctgagcgcctgggtaatgcattgatgcaggatccgtctatgtctgccatgcttgaaagtttttctaatccatcaaataaagaccagcttgaagaaagaatggcacgcatcaaagaggatccatctctgaaacatattttggaggagatagagactggcggtcctgctgctatgatgaggtactggaat

SEQ ID NO: 128996 - DNA, 149 bp, Glycine max
caggatgttcaggttacaattgattggtttatttcctctcaggaatgtgttcccaggacctattgtgttttaaatccacaaaatccttttgtgttaaataggtggatggggaaattgactttcccccagggcacttcccgaagtgttaa

SEQ ID NO: 128997 - DNA, 266 bp, Glycine max
gtcaatctcgtaaatgtgttacgagaattgtatttgcacagtccagaggaagctcgccaattgagaaggaaagctctctctcgtattgaatggctgcaaaaagctgatgtgcctaccatagcacagattgaagagttccattcgatgcagaggatgatgaatgctcctgattcaaatgataatattgatctactgttgagcattgatttgttgggtttacaaggagcaggtaaagcttttccaaacaagattgtttttgatgataa

SEQ ID NO: 128998 - DNA, 114 bp, Glycine max
agctctgctcctgagaatacaggcatatcattggcctgtgctatgaatagttcttttagggggcgtgccagttctgatatttacaccatctgctctcaagactgtgacttatgg

SEQ ID NO: 128999 - DNA, 203 bp, Glycine max
gcaatggtgagtacaaatagcaagcctcaagctactgcaatgcatgtgggagctatagaaattatcattgatagtttcgcaagtgctgactgcaacatagttggtgcaatgcttttggttgatacttatcataccaatcctgaaaatgcagttcgtagtatttttgttgcgcctttcagaggcggaaggcccactcgggtggt

SEQ ID NO: 129000 - DNA, 264 bp, Glycine max
ataaacaatatgtgtgcatatgggctcaatcctggtatttcaggttctcgtcttttgggcaccattcctcagtctatttcacagcaaactgtttggaatcaaatggcaacagtgagaacaccattgaattttgattctagcaagcagagcttttgtcaattttctattgaccttctcggtggtggatttttagtggacaaaactggagattggatcacacttatacaaaattctccaattagtaacttgttgagagttgctgct

SEQ ID NO: 129001 - DNA, 156 bp, Glycine max
aaaacgttgagggaaatggtggcccaggaaccatcaagaagatcactttccttgaggatggagaaaccaagtttgtgctgcacaaaatagaaagcattgatgaggcgaacttgggatacagctacagcgtggttgggggtgctgcattgccagaca

SEQ ID NO: 129002 - DNA, 178 bp, Glycine max
cagaaatgataaacagtctttgtggtggtgatgaaaaattgatgcgtgaaaggacacacctgctgttggcttgttgttcaagaatggcaatttgtaagaaagatgtttggagagttgaatgtggaatcccttctggatttccgctcacagttatttgtaatagcatttttaatgagat

SEQ ID NO: 129003 - DNA, 203 bp, Glycine max
aggtgatgtgttgaagactgaacttccttattttgacatttgtgttgcaaacattccctaccaaatatcttctcctctcacattcaagttactcaagcatgaacctgcttttagggctgcaatcataatgttccagagagaatttgccatgagactggttgctcagcctggtgataaactatattgtcgtctcacagtcaaca

SEQ ID NO: 129004 - DNA, 193 bp, Glycine max
gaaagatgtttggagagttgaatgtggaatcccttctggatttccgctcacagttatttgcaatagcatttttaatgagatgctcattagatatagctatgaaaaattactgcgccaggctaaagctccaagtatgtttttacaatccttcaaaaattttgtttctttgtgtgtgtatggtgatgataactta

SEQ ID NO: 129005 - DNA, 135 bp, Glycine max
ggcaaatcaaacttcagcggcatttgagtttccttattgacaatcccaaacagtctacagtttttgatattctcttgggaatttctcaagattttgagattgctggtaatactcttatgccagctttttctgttc

SEQ ID NO: 129006 - DNA, 258 bp, Glycine max
agttagcagattgtgattttctcaagagaaactttaggcagatgtctaatgttttgtgggtggctcctgaggacaaggcgagtttatggtcacaacttcattatgtttcatgtaataatctggaaatgcaagaagcttatcttgtcaatctcgtaaatgtgttacgagaattgtatttgcacagtccagaggaagctcgccaattgagaaggaaagctctctctcgtattgaatggctgcaaaaagctgatgtgccta

SEQ ID NO: 129007 - DNA, 268 bp, Glycine max
ccgaataccatcgtgcagattgaaccagacatgaattcaaggtttcagcttttgagtaccactaccaatggtgattttgttcaaggaaaagatctcgcaatggttaaagttaatgtagcatgtgctgctgttggcttgacatcaagttacactccaactccattgttggaatctggtttgcaaaaagacagagggttaattgtggagtattttggaaggatgtcttacgttgctcacaacgttaatcacccccaagagaaagatttgt

SEQ ID NO: 129008 - DNA, 245 bp, Glycine max
  unsure (1)..(245): unsure at all n locations
gaaattgcgcataaaccgcgatcacaagccgctgcagcttaaaaccggaaacataagcaatctcttcatcatgtcaataatacgggcaatttcttactgaaattgggggtcagaaatcgttggggaatggttatcactctctgtgatggccattgactacgtgaatcatcttcttgtccacacaaattgcaaacagntgnatcaaggtgaagacttgtatgactacgtgacagtattacactgga

SEQ ID NO: 129009 - DNA, 255 bp, Glycine max
gtgaattatggaatcctgcttgcacaaaagcaatgactatgtcatttaatccaaacccgtgttctgatgcatggagtttggaatttctgaagcgtaccggatttcattgtgatatcatttgtgtcactggatggactgccactccaatgcaggatgttcaggttacaattgattggtttatttcctctcaggaatgtgttctcaggacttattgtgttttaaatccacaaaatccttttgccttgaataggtggc

SEQ ID NO: 129010 - DNA, 251 bp, Glycine max
ctctctctctctagagcgtcgtcgtttagttagggcagaaaaccccttttcggatcggtggagcgaacctcgccggcgagacccccgaggctgttcaatcggcgatcgagcaacggcgaaaagcgacgaagatgaaggttttcgtgaagactctcaagggcacgcacttcgaaattgaagtgaacccttcggacacgcttcctgaagtgaagaaaaatatagaaactgttcagggtgcagatgtctatcct

SEQ ID NO: 129011 - DNA, 243 bp, Glycine max
ctcgagcgttttagagcaagtgttgatttgcagcgcactcatcgtattaaaggaatgattaaaatggtggccacagttggtattcctgagaatacaggcatagcattggcctgtgctatgaatagttcttttagggggcgtgccagttctgatatttacaccatctgctctcaagactgtgaattatggaatcctgcttgcacgcaagcaatgaccatgtcatttaatccaaacccgtgttct

SEQ ID NO: 129012 - DNA, 106 bp, Glycine max
gaaattttgataaaccgcgatcacaggttgccgcaccttaaaaccggaaacaaaagcaatcgttacttgatttcaagaatctctcaatttcttcctacttctttgt

SEQ ID NO: 129013 - DNA, 173 bp, Glycine max
agaaaaccctagctcaccgtttcaagatgcaaatcttcgttaagaccctcactggtaagaccatcactctcgaagtcgagagttcagataccatagacaatgtaaaggccaaaattcaagacaaggaagggatcccaccagatcagcaacggctcatttttgctggcaagcag

SEQ ID NO: 129014 - DNA, 230 bp, Glycine max
aagggaagctccaccaggtgagaagccagaaccagtacgcacccacctccgcaacatgattattgtgcctgagatgattggtagcattattggagtgtacaatggcaaaacctttaatcaggttgaaatcaaacctgagatgattgggcattatcttgctgagttttctatttcatacaaacccgttaagcacgggagacctggtattggtgctactcactcatccaggt

SEQ ID NO: 129015 - DNA, 234 bp, Glycine max
cgtaaccatagatcagggctttttcatgaattacttcagatccgttaaacaacagccttattttttatacttctgtggtttttcaagaaattgttcagatccgttgacaaaaagccttattcgttgattctatatcgtttttcgagagatattgctcagatctgttagcaactgccttgtttgttgattctattgccgtggattagggttttttttcacgagattgcttcagat

SEQ ID NO: 129016 - DNA, 253 bp, Glycine max
ctctctctagggtttgatcagactcaagggtttaagccatgggaaaaaggaaggcaaaggcaaagcctcctccaaagaagcgaatggataagctcgataccgtcttcagctgccctttctgcaatcatggcagcagcgtcgaatgccgccttgacatgaagaacttgataggggaagctatttgcgggatatgccaagagagctttagcactaccatcacagctttatcagagccaatagacatatacagtga

SEQ ID NO: 129017 - DNA, 263 bp, Glycine max
ttttcttctatagagacacacggagagagtctcagagcaataaacacccttcaatggctaccactaaagtttacattgtttactattctacgtacggacatgttgagaagttagctgaagagattaaaaagggagctggttccgttgaaggtgtggaagcaaagctatggcaggtacctgaaacactttctgaagaggtccttgggaagatgggtgcacctccaaagagtgatgtaccgattattacacccaacgagctacct

SEQ ID NO: 129018 - DNA, 260 bp, Glycine max
ggttatcatacaccagcacagaaaacgatatggtgcttttgcaccatgaactggaaatagaatacccagatagccaaattacagagaagcatagagctactttacttgaatttgggaagactcttaatggaaaaaccacaactgccatggcccttactgttggcattccagctgctgttggagctttgctcttattgacaaacaaaattcagacaagaggagtcttaaggcctatcgaacctgaagtatacactccagca

SEQ ID NO: 129019 - DNA, 210 bp, Glycine max
gttaattccggtcgtcgtcgaacccgtcatcggaaactcgaggttgttggttacccctaccgtgaaggagcatgccacggagatcgcggagacttggaagagcagcctggaggatcgtggcggcgtggaaaacctgaagacacctgacgtccacactttcttgcagaccgttgttaccttcgggattgtcaagaacgatgactccgattt

SEQ ID NO: 129020 - DNA, 256 bp, Glycine max
attgagacaaagaatagatcctcaatacaatgaggttcaggctcagatggaaacaaatttgtttaaattgtctcttgatgatgttgaaactcctaaaggttccatgttggatcttaaaatttctcaatctaaaattgcacttcccaaaaacacagttggcggaaccattctgcgtagtgatctattggcaaattttttgacagagggcaattttagagcaagtgttgatttgcagcgcactcatcgtattaaagga

SEQ ID NO: 129021 - DNA, 252 bp, Glycine max
ataccaggtgattttgtcattggtgttaagttgacaaccataaacaatatgtgtgcatatgggctcaatcctggtatttcaggttctcgtcttttgggcaccattcctcagtctatttcacagcaaactgtttggactcaaatggcaacagtgagaacaccattgaaaattgacaaaagctctgcttgctagaatcaaaattcaatggtgttctcactgttgccatttgattctagcaagcagagcttttgt

SEQ ID NO: 129022 - DNA, 258 bp, Glycine max; identical to SEQ ID NO: 118620

SEQ ID NO: 129023 - DNA, 105 bp, Glycine max
aagatttgaaattttgataaaccgcgatcacaggttgccgcacctcaaaaccggaaacaaaagcaatcgttacttgatttcaagaatctctcaatttcttcctac

SEQ ID NO: 129024 - DNA, 211 bp, Glycine max
ctgcaaactgtttggaatcaaatggtgttctcactgttgccagttgattccaaacagtttgctgtgaaatagactgaggaatggtgcccaaaagacgagaaccccattgaattttgattagtgcaagcagagcttttgtcaattttctattgaccttctcggtggaggaattttagtggacaaaactggagatgggatcacacttatacaa

SEQ ID NO: 129025 - DNA, 188 bp, Glycine max
aaacaaattgttggtttccatgttgctggaagcagaggaagactgggatatgcttcattgataccatacgttgagccagttgtgcaagctcaaagtgctgaagtttactttgacttcttccctgtggaggttgatagtcaagagggagttgctcacattggtgaattgaaatctggtgtctatgttcc

SEQ ID NO: 129026 - DNA, 262 bp, Glycine max
tctcaatttcttcctacttctttgtgcacgatttcttaagggaaagaaaatcactctctgtgctggtcacagacttcgtgaatcattttcttttccattcttagtttattttctgaacactctcctatttgatataggacttcgtgtcagatttaaacttcttctgtttctttctcagttgtctgtttaatttcaagttctcgctggtgaaatcttggattagtgctcccactctcctatctggtataggacttcgtaggta

SEQ ID NO: 129027 - DNA, 261 bp, Glycine max
tgaaaatgcagttcgtagtatttttgttgcgcctttcagaggcggaaggcccattcgggtggttacatttccgaataccattgtgcagattgaaccagacatgaattcaaggtttcagcttttgagtaccactaccaatggtgattttgttcaaggaaaagatctcgcaatggttaaagttaatgtagcatgtgctgctgttggcttgacatcaagctatactccgactccattgttggaatctggtttgcaaaaagacag

SEQ ID NO: 129028 - DNA, 248 bp, Glycine max
ctcgagccgcacgtgatgatggatccggaggatttcttgaggttgaagaaggagttggggatgatgagaaattgcggggaaatggtggcgttttgcttcaggtcgagggagctcgtggaggtggcgaggatgtgtagggatctgaggcagaaggtgccggagatattggaggtggaggtggaccccacgggtgggcccgggatgatggaggcggcgatgaaggtttactcggagaaagagaaaaggaa

SEQ ID NO: 129029 - DNA, 246 bp, Glycine max
gcgctgcttcactattctccctatggagtttaatcttgtggtccgtcagaagtttttaaattttgtgaggttcattatgaagaaaagggacaagcttagttgtcaagttggaatcaacccatactccatggaatggactggtttggccaatagattactgagtaagggcaacgatattctgtgttgcgattatgctagttttgatggtttgattaccagccaagttatgagcacgatggcagaaat

SEQ ID NO: 129030 - DNA, 243 bp, Glycine max
ctccctacattaaatgtacagtctctttcttcatagcatttggaaatttggctgatgacaccatcaattttgaggcttttccccacaagctggtgcagtttggagagattcaggaaaaagttgtattgaaattttcacaagaggaatttcttacagcttggtcaactcaggtgcgtcctgcaacaactctgttggctgatgggtgtccatatttgtatgctatggtgcatgatagttcagtgt

SEQ ID NO: 129031 - DNA, 244 bp, Glycine max
gcagattcatagctcatggacattttttcaaaaatctgactcagaaagtgcgagtccaaattgttacatctgaaaagagttactggcatgtatatgatcctgacaagtttcagatgtttgacaacagtgaaataggtctttattctaatcccactttggaagatatcccacattcagcttgggaccttttttgctgggacagtgagaaaactttgccaaataattttcctgcagaattgctctc

SEQ ID NO: 129032 - DNA, 247 bp, Glycine max
gcagcagtcaaaaggagtgattgggcctcattggtacaagtgtttttaacaaacagcaacagtacagagcatttcgatgcatgtaagtggacaaaatcggaaccacattcctgggaattgatcttcccaatagaggtatgtggtcctaataatggttttgaaatgtggagttctgagtgggcaattcaaattccagggcactggatttcccttatggacactcccaaacagtcaacagttttaaatc

SEQ ID NO: 129033 - DNA, 254 bp, Glycine max
gaaaaacccaaaaagattgatgccagattgagacaaagaatagatcctcaatacaatgaggttcaggctcagatggaaacaaatttgtttaaattgtctcttgatgatgttgaaactcctaaaggttccatgttggatcttaaaatttctcaatctaaaattgcacttcccaaaaacacagttggaggaacctttctgcgtagtgacctattggcaaattttttgacagagggcaattttagagcaagtgttga

SEQ ID NO: 129034 - DNA, 255 bp, Glycine max
ggcaattttagagcaagtgttgatttgcagcgcactcatcgtattaaaggaatgattaaaatggtggccacagttggtattcctgagaatacaggtatagcattggcctgtgctatgaatagttcttttagggggcgtgccagttctgatatttacaccatctgctctcaagactgtgaattatggaatcctgcttgcacaaaagcaatgactatgtcatttaatccaaacccgtgttctgatgcatggagtttg

SEQ ID NO: 129035 - DNA, 247 bp, Glycine max
ctccttttagcaagttaacaacacttttgtcttcgttccattatctagttctcaattctcttcaccctttgcctctgaaagaaatgggtagtcttgaagcggaaagaacaacagtaggattggcagcaagagacccttcagggattctctccccatacacctacaatctaagaaacacaggccctgatgatgtttccattaaagttcactactgtggaatttgccattctgatctccaccagattaa

SEQ ID NO: 129036 - DNA, 238 bp, Glycine max
ccaaagtagaagtgtggatggattagcaatgcttgcagaggaagatcctctagaggatgaagtattctatccgcaaggccttgttctagttcctcgaggaggagatgatgacagtgttgttgttggctcacacatgaggggtagccggttgcgagcttcatctgctggtgatgaggaggtggatctacttctacctggtacagcaagactccaaatacagcttggtgtgaacatgcca

SEQ ID NO: 129037 - DNA, 247 bp, Glycine max
attgctcatcagttgatagcagtgcctctactgtgccaagcttgtgtgatgagaaaaaggagaacatgaatttgaaggctacagagttgaggctgggtcttcccggatcccaatcgcctgaaagggagccggatcttttctctttaagcccagcaaagcttgatgagaagccactgttccctttgcttcctactaaagacgggatttgcttgtcggcgcaaaaaactgttgtttctggcaacaaaag

SEQ ID NO: 129038 - DNA, 257 bp, Glycine max
ccagcatgagaatgggaaacactgatgctcaaatagtgatggttccagggcgcagattcatagctcatggacattttttcaaaaatctgactcagaaagtgcgagtccaaattgttacatctgaaaagagttactggcatgtgtatgatcctgacaagtttcagatgtttgacagcagtgagataggtctttattctaggcccactttggaagatatcccacattcagcttgggcacttttttgctgggacagtgag

SEQ ID NO: 129039 - DNA, 258 bp, Glycine max
ggaaaaagttgtattgaaattttcacaagaggaatttcttacagcttggtcaactcaggtgcgtcctgcaacaactctgttggctgatgggtgtccatatttgtatgctatggtgcatgatagttcagtgtctacaataccaggtgattttgtcattggtgttaagttgacaaccataaacaatatgtgtgcatatgggctcaatcctggtatttcaggttctcgtcttttgggcaccattcctcagtctatttcaca

SEQ ID NO: 129040 - DNA, 231 bp, Glycine max
cttaaaaaaaaaaaaaaaagggatcaaatttaagttccttgatcctaataaagttccgtgcttttgtttgtactcatgaagagacttggcagttctgattctctgggggctctcatgacgatttgtccaccaacagacgaacacagtccgaggaacaaccacgcgtatgggagggagtttcagtccatgctggaaggactcgccaaaaaagggtccttgaaaaacccaggg

SEQ ID NO: 129041 - DNA, 257 bp, Glycine max
gtggcgtggacaacctgaagacacctgacgtcgacactttcttgcagcacgtagttaccttcgggattgtcaagaacgatgactccgatttgtaccggaagcttgttattgcttccgcttggaggaaacagatgccgaagctcgcgctttcgcttggtctcgctcagcaaatgcctgatatgattgaagagttgatcagcaaagtgcagcagcttgatgcggttcacttcacctatgaagtgggtctggtggaaaag

SEQ ID NO: 129042 - DNA, 245 bp, Glycine max
cttaatttaaaacctccactcatcccataaatcactgtttacactcctcgattttaccgcaacatgacacaagaacgctatggcaacaccaacttctgtatgagtgttaacaacaacggctacattagcgctaatgacccgttgaactggggcgcggcggcggaggcgatgtccgggagccacctcgacgaggtcaagcccatggtgaagaattaccgaggcccgttctgtaactctccggcgag

SEQ ID NO: 129043 - DNA, 250 bp, Glycine max
gcagattgtgattttctcaagagaaactttaagcagatgtctaatgttttgtgggtggctcctgaggataaggcgagtttatggtcacaacttcattatgtttcgtgtaataatctggaaatgcaagaagcttatcttgtcaatctcgtaaatgtgttacgagaattgtatttgcacagtccagaggaagctcgccaattgagaaggaaagctctctctcgtattgaatggctgcaaaaagctgatgtgc

SEQ ID NO: 129044 - DNA, 203 bp, Glycine max
gcaagcctcaagctactgcaatgcatgttggagctatagaaattatcattgatagtttcgcaagtcctgactgcaacatagttggtgcaatgcttttggttgatacttatcataccaatcctgaaaatgcagttcgtagtatttttgttgcacctttcagaggtagaaggcccatgcgggtggttacatttccgaatcccatt

SEQ ID NO: 129045 - DNA, 228 bp, Glycine max
aaagaattcctcttgccacatctgagggttttcctcatgtgctttcacgcaaaaatggtgaaaaaggcaaaagaagatttgtttctggggatggtgaagagatgacattgattccgggaaccagtgttgaagaggcttacaacaagctaatagttgaacttgagaaaagtgttcctacattggttggcattgactctccacaggataagaaccttcctcgtcaaaatt

SEQ ID NO: 129046 - DNA, 231 bp, Glycine max
gcaattatgtctaaatgcaaagccagcatgagaatgggaaacactgatgctcaaattttgatggttccagggcgcagattcatagctcatggacattttttcaaaaatctgactcagaaagtgcgagtccaaattgttacatctgaaaagagttactggcatgtgtatgatcctgacaagtttcagatgtttgacaacagtgaaataggtctttatcctaatcccactttg

SEQ ID NO: 129047 - DNA, 261 bp, Glycine max
gtgattttctcaagagaaactttaggcagatgtctaatgttttgtgggtggctcctgaggacaaggcgagtttatggtcacaacttcattatgtttcatgtaataatctggaaatgcaagaagcttatcttgtcaatctcgtaaatgtgttacgagaattgtatttgcacagtccagaggaagctcgccaattgagggggaaagctctctctcgtattgaatggctgcaaaaagctgatgtgcctaccatagcacagattg

SEQ ID NO: 129048 - DNA, 143 bp, Glycine max
gaaattttgataaaccgcgatcacaggttgccgcaccttaaaaccggaaacaaaagcaatcgttacttgatttcaagaatctctcaatttcttcctacttctttgtgtacgatttcttaagggaaagaaaatcactctctgtg

SEQ ID NO: 129049 - DNA, 250 bp, Glycine max
cagaacatgagggatatgatccttttcttggtggaattcaaaaatatgccactcccatgatgcccctagatgaagaaattctttctaaagttgcacaagatatggttgaggaatggtttgattgtgttgatgaggaggattcctttgaggaagtttctttaagtgcagcacttaatggtgttgagggtttggactatatggaaagaattcctcttgccacatctgagggttttcctcatgtgctttcacg

SEQ ID NO: 129050 - DNA, 253 bp, Glycine max
attctgcagttaacaatcgctcctcagatatcaacaaaaagattcgcacagcacttgggaaaggtaagaaaattgtttttcttactagggttgatccttttccagtagctttactggctgttctttttggcgttaagaatgaaattctgagttctaacgccaccaatcctatgctgacgcgacttcttgagaactgtaaaagtctcaaatatctggttgatgagtgtccttttgcatttgtgaactagtatgt

SEQ ID NO: 129051 - DNA, 117 bp, Glycine max
gaaattttgataaaccgcgatcacaggttgccgcaccttaaaaccggaaacaaaagcaatcgttacttgatttcaagaatttctcaatttcttcctacttctttgtgtacgatttct

SEQ ID NO: 129052 - DNA, 263 bp, Glycine max
  unsure (1)..(263): unsure at all n locations
gttttgcagggatcggagattgaagtcgaggactcaaactcaaaccctaacgctccttcctcagggaacagtccaagcagcaacaatgagcagaagaaaacctgcgccgattgcggcaccaccaagactcctctctggaggggtggtcctgcaggacccaagtctctgtgcaacgcgtgcgggatcagaagcaggaagaagaagagagcgatcttgggantaaacaaggggagcaacgaggncggaaggaaaggaaagggncc

SEQ ID NO: 129053 - DNA, 250 bp, Glycine max
gttgcgattatgctagttttgatggtttgattaccaagcaagttatgagcaagatggcagaaatgataaacagtctttgtggtggtgatgaaaaattgatgcgtgaaaggacacacctgctgttggcgtgttgttcaaggatggcaatttgtaagaaagatgtttggagagttgaatgtggaatcccttctggatttccgctcacagttatttgcaatagcatttttaatgagatgctcattagatatag

SEQ ID NO: 129054 - DNA, 227 bp, Glycine max
cccacattcagcttgggaccttttttgctgggacagtgagaaaactttgccaaataatttttctgcagaattgctctcttgcaaattggatactgttactggccaatattatcctgagtgggctccaattaattgtcgagttcatcgacaaccaattcacatcactgaaggaaattatgtcagaaagcaagatgtcagcattgaatatgatgcatgtacattcccaa

SEQ ID NO: 129055 - DNA, 285 bp, Glycine max
tccgctcaattaggatcgcgtttggagttggtgttgtctctctgatcctcttatacttgtttttgtgtcgtcgttcctcgaagagtggcgaagagggtcctcccacagttgcaggtgcgtggccaataattggtcacctcccattgttgcttggttcaaagacacctcataaaacattgggtgacttggctgacaagtatggacccatattctccatcaagcttggtgcaaaaaatgctgtggtgattagcaactgggaaatggctaagaatgctataccacaaa

SEQ ID NO: 129056 - DNA, 264 bp, Glycine max
tctagatgcgagcggccgcccttgcttcttcctccgtcgctactgaatgggtgaagggaaagcaaatggaggaagttttgaccattagaaacactgaaattgcaaagcatctttcgcttccaccagtcaagcttcactgcagcatgcttgctgaggatgctataaaagcagctgttaaagattatgaagctaagcgtgcctcagcatctgctggtggacaggcaacaactggagagaaagctgtcatgcttgagtacttcattt

SEQ ID NO: 129057 - DNA, 261 bp, Glycine max
ttggtattcctgagaatacaggtatagcattggcctgtgctatgaatagttcttttagggggcgtgccagttctgatatttacaccatctgctctcaagactgtgaattatggaatcctgcttgcacaaaagcaatgactatgtcatttaatccaaacccgtgttctgatgcatggagtttggaatttttgaagcgtaccggatttcactgtgatatcatttgtgtcactggatggactgccacccaatgcaggatgttca

SEQ ID NO: 129058 - DNA, 257 bp, Glycine max
atcgattcgaacgttcttgaagttgaaagtcattaactatgggaatgatagtggaggttgaaaacgaaaacggagacctaaacgacgccgttcttgttccaccccctaacttctctcatggtcgaggactgcattttccgatccggcctccccaacccttccaatttcccctttctccaaaccctaaaccttcgttccatcatatacctgtgccctgagccttatccggaagaaaatctggcttccttcgttcgcag

SEQ ID NO: 129059 - DNA, 248 bp, Glycine max
gcgctgcttcactattctccctatggagtttaatcttgtggttcgtcagaagtttttaaattttgtgaggttcattatgaagaaaagggacaagcttagttgtcaagttggaatcaacccatactccatggaatggactggtttggccaatagattactgagtaagggcaacgatattctgtgttgcgattatgctagttttgatggtttgattaccaagcaagttatgagccaatggcagaaatgat

SEQ ID NO: 129060 - DNA, 256 bp, Glycine max
caagaacgatgactccgatttgtaccggaagcttgttattgcttccgcttggaggaaacagatgccgaagctcgcgctttcgcttggtctcgctcagcaaatgcctgatatgattgaagagttgatcagcaaagggcagcagcttgatgcggttcactttacctatgaagtgggtctggtggaaaagttccctcctgttcccttgttgaagtcttttctcaaggatgctaagaaagttgcggcttctattttggaa

SEQ ID NO: 129061 - DNA, 271 bp, Glycine max
ctttctccgagaacaaaaaaaaaaacgtgattcgctcttctcttcgaataaaccacaaaaccaacaaacgagaagaggagtgagagaagatggggttgtcgttcacgaagctgttcagcaggttgtttgcgaagaaggaaatgaggattctgatggtaggtctcgatgctgctggtaagacaaccatcttgtacaagctcaagcttggagaaatcgtcaccaccatccccaccatcggatttaatgttgagactgtggagtacaagaacat

SEQ ID NO: 129062 - DNA, 194 bp, Glycine max
ctgactttcccccagggcacttcccgaaatgttaagagaatgcctctttctatagggggaggagctggtgcaaagaatgctattctcatgaatatgccaaatgctgttctttcaatgtggagatattttgttggagatctcgtctttgaagtttctaagatgacttctccctacattaaatgtacagtctcttt

SEQ ID NO: 129063 - DNA, 172 bp, Glycine max
cgcgatcacaggttgccgcaccttaaaaccggaaacaaaagcaatcgttacttgatttcaagaatcttccaatttcttcctacttatttgtgtacgatttcttaagggaaagaaaatcactctctgtgctggccacagacttcgtgaatcattttcttttccacacaacata

SEQ ID NO: 129064 - DNA, 261 bp, Glycine max
ctcgagccgacttgaaaacaaaacccaccaccaccttagttaaaaaaaaaaaaaaggttagataaaaattaagctttgttcggtggtgaccatggaaagcaccgactcatcaagcggttcacaacaaccgaacctgccacctgggtttcggttccaccccactgatgaagagcttgtagttcactacctcaagaaaaaagcagcttctgctcctcttccggtagccatcatcgccgaggttgactctacaagttcgatcca

SEQ ID NO: 129065 - DNA, 246 bp, Glycine max
gcaagcaaaaagaaagaatcccaggcgaggagaaagatggaggggaaggagcaggatgtgtcgttgggagcgaacaagttccccgagagacagccgattgggacggcggcgcagagccaagacgacggcaaggactaccaggagccggcgccggcgccgctggttgacccgacggagtttacgtcatggtcgttttacagagcagggatagcagagtttgtggccacttttctgttctctacatca

SEQ ID NO: 129066 - DNA, 247 bp, Glycine max
gaaagcacaaagaaaagaagaagaggttttgatcggatgcgatgagcacacaggggcaagtgattattgatgaggcggttctggatgacataatccggcgcttaacggaggtccgactggcccgacccggcaagcaggttcagctctccgagtctgagatcaagcaactctgcgtcgcttccagagacatcttcattaaccagcccaatttgcttgaactcgaagcccccatcaagatttgtggtga

SEQ ID NO: 129067 - DNA, 232 bp, Glycine max
cttaattagtgttcatgaatatgtcaagccttactttaggcggttctaaattgaaaagctttctagctggtcataatatcaccattactgatggtattgacaaaactagtgcaactttgcaatttagaaagttagcagattgtgattttctcaagagaaactttaggcagatgtctaatgttttgtgggtggctcctgaggacaaggcgagtttatggtcacaacttcatta

SEQ ID NO: 129068 - DNA, 261 bp, Glycine max
gagagagggagtcagagaaaccctaggtaagaagaaaagatgccggctggtcatggtttgagatcccgcaccatagattccttctctcgtcctttcaggaagaagggaaccatcgccctcaccacatacctgagaacctaccacgtcggcgactatgttgacgtcaaggttaacggtgccgttcacaagggaatgccccacaaattctaccatggccgcaccggacgcgtctggattgtcaccaaacgtctgttggcgtcg

SEQ ID NO: 129069 - DNA, 259 bp, Glycine max
gcaaatgtttgcttcgttaattttctctggagacaacaggtttactgagaaaacaatttttacttgcagagatttggacatcttggttgtttattatacaatagcaactcgatttagaaaatttctaccgcattacattaggtggcatctgtataccttgttgatctacattctcccatcttgtctcactgctgaaattaaatataagcggaatcagagtaatattcagatttccggcttatttacgacggcagataca

SEQ ID NO: 129070 - DNA, 256 bp, Glycine max
atggactgctaccccaatgcaggatgttcaggttacaattgattggtttatttcctctcaggaatgtgttcccaggacctattgtgttttaaatccacaaaatccttttgttttaaataggtggatggggaaattgactttcccccagggcacttcccgaagtgttaaaagaatgcctctttctatagggggaggagctggtgcaaagaatgctattctcatgaatatgccaaatgctgtccttcaatgtggagat

SEQ ID NO: 129071 - DNA, 261 bp, Glycine max
ggggaagagaaaaagaactagctagcttgctagagtgtgagaactctagcatatactagtactactacattccttcatcttcctttttatttttcaccataaaaaaacaagagcacaaagatggtgagagctccttgttgtgaaaagatgggtttgaagaagggtccttgggctaccgaggaagatcaaattctcacatcttacatccaaaaacatggccatggcaattggcgtgccctcccaaagcaagcaggccttcta

SEQ ID NO: 129072 - DNA, 255 bp, Glycine max
actccaagtatgtttttacaatccttcaaaaattttgtttctttgtgtgtgtatggtgatgataacttaattagtgttcatgaatatgtcaagccttactttagtggttctagcttgaaaagctttctagctagtcataatatcaccattactgatggtattgacaaaactagtgcaactttgcaatttagaaagttagcagattgtgattttctcaagagaaactttaagcagatgctaatgttttgtgggtgg

SEQ ID NO: 129073 - DNA, 245 bp, Glycine max
ggaatggactggtttggccaatagattactgagtaagggcaacgatattctgtgttgcgattatgctagttttgatggtttgattaccaagcaagttatgagcaagatggcagaaatgataaacagtctttgtggtggtgatgaaaaattgatgcgtgaaaggacacacctgctgttggcttgttgttcaagaatggcaatttgtaagaaagatgtttggagagttgaagtggaatccttctgga

SEQ ID NO: 129074 - DNA, 250 bp, Glycine max
aaaaattttgtttctttgtgtgtgtatggtgatgataacttaattagtgttcatgaatatgtcaagccttactttagtggttctaaattgaaaagctttctagctggtcataatatcaccattactgatggtattgacaaaactagtgcaactttgcaatttagaaagttagcagattgtgattttctcaagagatactttaggcagatgtctaatgttttgtgggtggctctgaggacaaggcgagttt

SEQ ID NO: 129075 - DNA, 183 bp, Glycine max
gaaattttgataaaccgcgatcacaggttgccgcaccttaaaaccggaaacaaaagcaatcgttacttgatttcaagaatctctcaatttcttcctacttctttgtgtacggtttcttaagggaaagaaaatcactctctgtgctggccacagacttcgtgaatcattttcttttccacacaa

SEQ ID NO: 129076 - DNA, 184 bp, Glycine max
gttgtattgaaattttcacaagaggaatttcttacagcttggtcaactcaggtgcgtcctgcaacaactctgttggctgatgggtgtccatatttgtatgctatggtgcatgatagttcagtgtctacaataccaggtgattttgtcattggtgttaagttgacaaccataaacaatatgtgtg

SEQ ID NO: 129077 - DNA, 255 bp, Glycine max
aatttagaaagttagcagattgcgattttctcaagagaaactttaagcagatgtctaatgttttgtgggtggctcctgaggacaaggcgagtttatggtcacaacttcattatgtttcgtgtaataatctggaaatgcaagaagcttatcttgtcaatctcgtaaatgtgttacgagaattgtatttgcacagtccagaggaagctcgccaattgagaaggaaagctctctctcgtatgaatggctgcaaaaagc

SEQ ID NO: 129078 - DNA, 251 bp, Glycine max
atttgtgtcactggatggactgccaccccaatgcaggatgttcaggttacaattgattggtttatttcctctcaggaatgtgttcccaggacttattgtgttttaaatccacaaaatccttttgtgttaaataggtggatggggaaactgactttcccccagggcacttcccgaaatgttaagagaatgcctctttctatagggggaggagctggtgcaaagaatgctattctcagaatatgccaaatgct

SEQ ID NO: 129079 - DNA, 252 bp, Glycine max
  unsure (1)..(252): unsure at all n locations
caaattctggactaaacacgagccaaatcttgctttgacagaagaggaaaagatggaggtgatcagaaatagaggcattcctgctgatgttcttgcaaagcgagctcatgaatttcaaaaacatgttgctcatgaaagcctcaaggatcaaattcctgctgttgacaagttgtattctactaaggttaataagtttgcaaaaattatgaaccttagacaaagtgttgttggtngacttaaacttcttactga

SEQ ID NO: 129080 - DNA, 249 bp, Glycine max
  unsure (1)..(249): unsure at all n locations
tgaagtttctaagatgacttctccctacattaaatgtacagtctctttcttcatagcatttggaaatttggctgatgacaccatcaattttgaggcttttccccacaagctggtaccccttggagagattcaggaaaaagttgtattgaaattttcacaagaggaatttcttacagcttggtcaacccaggtgcgtcctgcaacaactctgtntggctgatgggtgtccatatttgtatgctatggtgc

SEQ ID NO: 129081 - DNA, 177 bp, Glycine max
taaaccgcgatcacaggttgccgcaccttaaaaccggaaacaaaagcaatcgttacttgatttcaagaatctctcaatttcttcctacttctttgtgtacggtttcttaagggaaagaaaatcactctctgtgctggccacagacttcgtgaatcattttcttttccacacaacata

SEQ ID NO: 129082 - DNA, 270 bp, Glycine max
cctcagtctatttcacagcaaactgtttggaatcaaatggcaacagtgagaacaccattgaattttgattctagcaagcagagcttttgtcaattttctattgaccttctcggtggaggaattttagtggacaaaactggagattggatcacacttatacaaaattctccaattagtaacttgttgagagttgctgcttggaagaaaggctgtttaatggttaaaattgtgatgtctgggaatgcagcagtcaaaggagtgattgggcct

SEQ ID NO: 129083 - DNA, 258 bp, Glycine max
ctttattctaatcccactttggaagatatcccacattcagcttgggatcttttttgctgggacagtgagaaaactttgccaaataatttttctgcagaattgctctcttgcaaattggatactgtcactggccaatattatcctgagtgggctccaattaattgtcgagttcatcgataaccaattcacatcactgatggaaattatgtcagaaagcaagatgtcagcattgaatatgatgatgtacaattccaaatg

SEQ ID NO: 129084 - DNA, 182 bp, Glycine max
ctccatggaatggactggtatggccaatagattactgagtaagggcaacgatattctgtgttgcgattatgctagttttgatggtttgattaccaagcaagttatgagcaagatggcagaaatgataaacagtctttgtggtggtgatgaaaaattgatgcgtgaaaggacacacctgctgt

SEQ ID NO: 129085 - DNA, 248 bp, Glycine max
cacagttggtattcctgagaatacaggcatagcattggcctgtgctatgaatagttcttttagggggcgtgccagttctgatatttacaccatctgctctcaagactgtgaattatggaatcctgcttgcacaaaagcaatgaccatgtcatttaatccaaacccgtgttctgatgcatggagtttggaatttctgaagcgtaccggatttcattgtgatatcatttgtgtcatggatggactgctac

SEQ ID NO: 129086 - DNA, 243 bp, Glycine max
gtatgctatggtgcatgatagttcagtgtctacaataccaggtgattttgtcattggtgttaagttgacaaccataaacaatatgtgtgcatatgggctcaatcctggtatttcaggttctcgtcttttgggcaccattcctcagtctatttcacagcaaactgtttggaatcaaatggcaacagtgagaacaccattgaattttgattctagcaagcagagcttttgtcaattttctattga

SEQ ID NO: 129087 - DNA, 249 bp, Glycine max
cttcttttcacactgccgctgcaacaatggcttcagagaagcaactttcgaacccaatgagggagataaaagtgcagaagctcgttctcaatatctctgttggcgagagtggagatcgtctcaccagagccgccaaggtgttggaacaacttagtggccaaaccccagtgttttccaaagcaaggtacactgttcgttcctttgggattagaagaaatgagaagattgcatgctatgtcactgtcagag

SEQ ID NO: 129088 - DNA, 257 bp, Glycine max
tttggagagttgaatgtggaatcccttctggatttccgctcacagttatttgcaatagcatttttaatgagatgctcattagatatagctatgaaaaattactgcgccaggctaaagctccaagtatgtttttacaatccttcaaaaattttgtttctttgtgtgtgtatggtgatgataacttaattagtgttcatgaatatgtcaagccttactttagtggttctaaattgaaaagcttctagctggtcataata

SEQ ID NO: 129089 - DNA, 256 bp, Glycine max
ggcaaatcaaacttcatggcatttgagtttccttattgacaatcccaaacagtctacagtttttgatattctcttgggaatttctcaagattttgagattgctggtaatactcttatgccagctttttctgttccacaggctactgccagatcttctgaaaatgcggaatcctctgcatgatctggaatttgtgttttcttttgcttgttcgtttgtttaattcaataaaggaaattagcatgaccctcttgttga

SEQ ID NO: 129090 - DNA, 249 bp, Glycine max
taataatctggaaatgcaagaagcttatcttgtcaatctcgtaaatgtgttacgagaattgtatttgcacagtccagaggaagctcgccaattgagaaggaaagctctctctcgtattgaatggctgcaaaaagctgatgtgcctaccatagcacagattgaagagttccattcgatgcagaggatgatgaatgctcctgattcaaatgataatattgatctactgttgagcatgatttgttgggttta

SEQ ID NO: 129091 - DNA, 245 bp, Glycine max
ggcatctctctctgttttctagaatgggagctgggcgtgaagtctccatctcacttgatggagtgagggacaagaaccttatgcagctcaaaaagctcaatctcgctcttttccctgttcgttacaatgacaaatactataccgatgcactcgcttccggtgaattcaccaaactagcttactatagtgatatttgtgttggagcgattgcgtgccggctggagaagaaagaggtggggggcaag

SEQ ID NO: 129092 - DNA, 240 bp, Glycine max
aatggacctccgtgaatcgataagcaaccaaaccgacgtggccctgagcatctcaaagctcctgttgtcgaaagaagctcgggacaagaacctcgtgtattcgccgctgtcgttgcacgttgttctgagcatcatcgccgctggctccaagggccccacactcgatcagcttaactccttcctccgatccaaatccaccgatcatctcactccgctcgcctctcagctcttcccgtcgtg

SEQ ID NO: 129093 - DNA, 255 bp, Glycine max
cccatactccatggaatggactggtttggccaatagattactgagtaagggcaacgatattctgtgttgcgattatgctagttttgatggtttgattaccaagcaagttatgagcaagatggcagaaatgataaacagtctttgtggtggtgatgaaaaattgatgcgtgaaaggacacacctgctgttggcttgttgttcaagaatggcaatttgtaagaaagatgtttggagagttgatgtggaaccctcctg

SEQ ID NO: 129094 - DNA, 241 bp, Glycine max
ttcagtgtctacaataccaggtgattttgtcattggtgttaagttgacaaccataaacaatatgtgtgcatatgggctcaatcctggtatttcaggttctcgtcttttgggcaccattcctcagtccatttcacagcaaactgtttggaatcaaatggcaacagtgagaacaccattgaattttgattctagcaagcagagcttttgtcaattttctattgaccttccggtggaggaattt

SEQ ID NO: 129095 - DNA, 242 bp, Glycine max
cctgccagtagtcatatgcttgtctcaaagattaagccatgcatgtgtaagtatgaactaattcagactgtgaaactgcgaatggctcattaaatcagttatagtttgtttgatggtatctactcggataaccgtagtaattctagagctaatacgtgcaacaaaccccgacttctggaagggatgcatttattagataaaaggtcaacacaggctctgcctgttgcttgatgattcatgat

SEQ ID NO: 129096 - DNA, 116 bp, Glycine max
gaaattttgataaaccgcgatcacaggttgccgcaccttaaaaccggaaacaaaagcaatcgttacttgatttcaagaatctctcaatttcttcctacttctttgtgtacggtttc

SEQ ID NO: 129097 - DNA, 283 bp, Glycine max
cggctcgagaattttagagcaagtgttgatttgcagcgcactcatcgtatcaaaggaatgattaaaatggtggccacagttggtattcctgagaatacaggtatagcattggcctgtgctatgaatagttcttttagggggcgtgccagttctgatatttacaccatctgctctcaagactgtgaattatggaatcctgcttgcacaaaagcaatgactatgtcatttaatccaaacccgtgttctgatgcatggagtttggaatttttgaacgtaccggatt

SEQ ID NO: 129098 - DNA, 290 bp, Glycine max
tgcggctcgagaacacacaagaattctttgatggaaattttccagtggattcttggttaccaatttttgtgaattgtctttatcctgtaagtcaattaccttcagaagctgtcgttgtaaatgttacatgtggtagtggacgtggtggtttacccaccactgcttggattagttctgcagttaacaatcgctcctcagatatcaacaaaaggattcgcacagcacttgggaaaggtaagaaaattgtttttcttactagagttgatccttttccagtagcttactggctg

SEQ ID NO: 129099 - DNA, 275 bp, Glycine max
gtcctgactgcaacatagttggtgcaatgcttttggttgatacttatcataccaatcctgaaaatgcagttcgtagtatttttgttgcgcctttcagaggcggaaggcccattcgggtggttacatttccgaataccattgtgcagattgaaccagacatgaattcaaggtttcagcttttgagtaccactaccaatggtgattttgttcaaggaaaagatctcgcaatggttaaagttaatgtagcatgtgctgctgttggcttgcatcaagct

SEQ ID NO: 129100 - DNA, 275 bp, Glycine max
ggcggctctcagaaaagccgtgttctttgtaatcgctcaatgcttcaccttttccgcatatgctgcaaggtttgaaatcacaaaccgatgcacatacactgtctgggctgcgtctgtgcctgttggcggtggcgtgcaattaaacccgggccagtcatggtccgtggacgtgcctgcaggaacgaaaggggcccgactttagtcccgaaccggctgcaacttcgacggttcgggctgcggtggatgccagaccggtgactgcggggtgtcctcga

SEQ ID NO: 129101 - DNA, 279 bp, Glycine max
aaccactcttaatttctctctgccttgctcatttacacacctctccaacctttcactttcagctttatttgaatccctctctctcctttccaaatggccagcgttgaggttgcacatcaaacaccaacaacagttccagaaaatgaaacaaccgaggtaatcaagacccaggaaacaaccccggaaccagtaccagccactgaggctcctgcaacagaacaagcagcagctgaggttcctgctcaagaagaacaacaagcaactgaggtcctgccccag

SEQ ID NO: 129102 - DNA, 277 bp, Glycine max
agcaacagtacagagcattttgatgcatgtaagtggacaaaatcggaaccacattcctgggaattgatcttcccaatagaggtatgtggtcctaataatggttttgaaatgtggagttctgagtgggcaaatcaaacttcatggcatttgagtttccttattgacaatcccaaacagtctacagtttttgatattctcttgggaatttctcaagattttgagattgctggtaatactcttatgccagctttttctgttccacaggctatgccagatc

SEQ ID NO: 129103 - DNA, 266 bp, Glycine max
tgttcttccactgtgtttctctcatcatatttactctttgataagctcatcattgtatgatggcgaagatccagcacagtgaagtggaagtgaagggactgaagctgcacgtggcagagattggaagtggctccaaggcagtggtgttcttgcatggattcccagagatctggtacacatggaggcaccaaatgattgctgcggcaaatgctggttatagggctattgcctttgattccagaggctaatggactcctctgagcatc

SEQ ID NO: 129104 - DNA, 270 bp, Glycine max
ggaatggtttgattgtgttgatgaggaggattcctttgaggaagtttctttaagtgcagcacttaatggtgttgagggtttggactatatggaaagaattcctcttgccacatctgagggttttcctcatgtgctttcacgcaaaaatggtgaaaaaggcaaaagaagatttgtttctggggatggtgaagagatgacattgattccgggaaccagtgttgaagaggcttacaacaagctaatagttgaacttgagaaaagtgtcctaca

SEQ ID NO: 129105 - DNA, 271 bp, Glycine max
gtcaattaccttcagaagctgtcgttgtaaatgttacatgtggtagtggacgtggtggtttacccaccactgcttggattagttctgcagttaacaatcgctcctcagatatcaacaaaaggattcgcacagcacttgggagaggtaagaaaattgtttttcttactagagttgatccttttccagtagctttactggctgttctttttggcgttaagaatgaaattctgagttctaacgccactaaccctatgctgatccgactcttgag

SEQ ID NO: 129106 - DNA, 190 bp, Glycine max
tgaaaaacacttgggcgttggtgcaaatgtttgcttcgtgaattttctctggggacaacaggctcactgagaaaacaatttttacttgcagagatttggacatcttggttgtttattatacaatagcaactcaatttagaaaatttctaccgcattacattaggtggcatctgtataccttgttgatcta

SEQ ID NO: 129107 - DNA, 276 bp, Glycine max
ggcaacagtgagaacaccattgaattttgattctagcaagcagagcttttgtcaattttctattgaccttctcggtggaggaattttagtggacaaaactggagattggatcacacttatacaaaattctccaattagtaacttgttgagagttgctgcttggaagaaaggctgtttaatggttaaaattgtgatgtctgggaatgcagcagtcaaaaggagtgattgggcctcattggtacaagtgtttttaacaaacagcaacatacagagcat

SEQ ID NO: 129108 - DNA, 274 bp, Glycine max
gtggaggttgatagtcaagagggagttgctcacattggtgaattgaaatctggtgtctatgttccactgcctacaaaaactaatttggtggaaactcccaaggaatggcaactggatctaccttgtgacaaaattcctagtgtcttgactacaactgatgaaagattggtaggcacagaacatgagggatatgatccttttcttggtggaattcaaaaatatgccactcccatgatgcccctagatgaagaaattctttctaaggttgcacaag

SEQ ID NO: 129109 - DNA, 277 bp, Glycine max
  unsure (1)..(277): unsure at all n locations
gccctagccaacgacagcgtttctnncttccaccgtcggcggcggaaggatgcacgagtgttccatctgtcacaagagtttccctaccggtcaggccctgggtggccacaagcgctgccactacgacggngggaacaaccacagtaacagcaacgccaacggaaacaacagcagcggcgccactacctccgacggcggcgctgcctcctcctcccacacgctccgtgggtttgacctgaaccttccggcgccgtgacggagttctggtgccgatggg

SEQ ID NO: 129110 - DNA, 271 bp, Glycine max
cagaaagcaagatgtcagcattgaatatgatgcatgtacaattccaaatgattgtggttcattggttgttgccaaagttggaaatcacaaacaaattgttggtttccatgttgctggaagcaaaggaagactgggatatgcttcattgataccatacgttgagccagttgtgcaagctcaaagtgctgaagtttactttgacttcttccctgtggaggttgatagtcaagagggagttgctcacattggtgaattgaaatcggtgtctatg

SEQ ID NO: 129111 - DNA, 272 bp, Glycine max
ttttgtttctttgtgtgtgtatggtgatgataacttaattagtgttcatgaatatgtcaagccttactttagtggttctaaattgaaaagctttctagctggtcataatatcaccattactgatggtattgacaaaactagtgcaactttgcaatttagaaagttagcagattgtgattttctcaagagaaactttaagcagatgtctaatgttttgtgggtggctcctgaggataaggcgagtttatggtcacaacttcatatgtttcgtg

SEQ ID NO: 129112 - DNA, 269 bp, Glycine max
atgtcaagccttactttagtggtttaaattgaaaagctttctagctggtcataatatcaccattactgatggtattgacaagactagtgcaactttgcaatttagaaagttagcagattgcgattttctcaagagaaactttaagcagatgtctaatgttttgtgggtggctcctgaggacaaggcgagtttatggtcacaacttcattatgtttcgtgtaataatctggaaatgcaagaagcttatcttgtcaatctcgtaatgtgtt

SEQ ID NO: 129113 - DNA, 272 bp, Glycine max
ggcaattgatactaaagcatgcaatgctcttctcctcaaggtcaaccaaattggttctgtgactgagagtattgaagctgtcaggatgtccaaaaaagctggatggggtgtcatggccagtcacagaagtggagagactgaggataccttcattgctgacctttctgttggtttggctacgggtcaaattaagactggagctccatgcaggtctgagcgtcttgctaaatataaccagctcttgagaattgaggaggacttgggctgaagca

SEQ ID NO: 129114 - DNA, 176 bp, Glycine max
tgccactccaatgcaggatgttcaggttacaattgattggtttatttcctctcaggaatgtgttcccaggacttattgtgttttaaatccacaaaatccttttgtattgaataggtggatggggaaactgactttcccccagggcacttcccgaagtgttaagagaatgcctcttt

SEQ ID NO: 129115 - DNA, 275 bp, Glycine max
gcttcattaccaaagtcaactcgagtatactgtggccatgagtactcagtgaacaacttgcaatttgctctgacacttgagccagacaatttgaggatacaacaaaaattaacctgggctcggaatcaacgacaagctggccaagcaacaattccctcaaccattgaggatgagttggagaccaatccctttatgagggttgatctacctgagatccaggagagggtgggctgcaagtcacctgttgaagcattaggagagataagaagcagaaa

SEQ ID NO: 129116 - DNA, 274 bp, Glycine max
ctgctcgagctgctcgagcggctcagctcacccaccctccatacacactctctctgagtcggtcgagttgaatcggtgagagtcagtgaccgagtcgaaccatgtcggacgaagaacaccatttcgaatccaaggccgatgctggagcctccaagacctatcctcaacaagccggaaccatccgcaaaaacggttacatcgtcatcaagggtcgtccctgcaaggttgttgaagtttctacttccaagattggtaagcacggtctgccaagtgt

SEQ ID NO: 129117 - DNA, 187 bp, Glycine max
gaaattttgataaaccgcgatcacaggttgccgcaccttaaaaccggaaacaaaagcaatcgttacttgatttcaagaatctctcaatttcttcctacttctttgtgtactgtttcttaagggaaagaaaatcactctctgtgctggccacagacttcgtgaattcttttcttttccacacaacata

SEQ ID NO: 129118 - DNA, 273 bp, Glycine max
gagagattggtaggcacagaacatgagggatatgatccttttcttggtggaattcaaaaatatgccactcccatgatgcccctagatgaagaaattctttctaaagttgcacaagatatggttgaggaatggtttgattgtgttgatgaggaggattcctttgaggaagtttctttaagtgcagcacttaatggtgttgagggtttggactatatggaaagaattcctcttgccacatctgagggttttcctcatgtgctttccgcaaaaatg

SEQ ID NO: 129119 - DNA, 193 bp, Glycine max
ggctactgccagatcttctgaaaatgcggaatcctctgcatgatctggaatttgtgttttctttcgcttgttcgtttgtataattcaataaaggaaattaggcatgaccctcttgttgagtatgctctgcctatttgaaaatttccacacctcttttaattgtcgtaatgatatgtgaagtgtgtgttatttt

SEQ ID NO: 129120 - DNA, 269 bp, Glycine max
ggtgaattgaaatctggtgtctatgttccactgcctacaaaaactaatttggtggaaactcccaaggaatggcaactggatctaccttgtgacaaaattcctagtgtcttgactacaactgatgaaagattggtaggcacagaacatgagggatatgatccttttcttggtggaattcaaaaatatgccactcccatgatgcccctagatgaagaaattctttctaaggttgcacaagatatggttgaggaatggtttgatgtgttgat

SEQ ID NO: 129121 - DNA, 268 bp, Glycine max
aaagaattaaagtagcaacaaatactcttccctacacttggcagaataaaaatggttcaacaagaaatccgaaggggtccctggacagaacaggaggactacaaattagtgtattttgttaacatgtttggagatcgtagatgggactttatagcaaaggtatcaggtttgaaggtggagggagactgtaaataggtttgaatagaacaggtaagagttgcaggttacggtgggttaattacctccaccccgatctcaaacggggaag

SEQ ID NO: 129122 - DNA, 214 bp, Glycine max
atggtattagattctggtgttatactgcaggccatgtccttggtgctgctatgttcatggttgacatagccggtgttcgagtgctttacaccggagactattcacgtgaggaagaccgccatctccgagctgctgagaccccacagttctcccctgatgtatgcattatagactccacctatggtgtacagcaccatcagcctcgccacacacg

SEQ ID NO: 129123 - DNA, 214 bp, Glycine max
ttcacattcttcagaagatttttctgaaaaggaagatcaagaaaaacccaaaaagattgatgccagattgagacatagaatagatcctcaatacaatgaggttcaggctcagatggaaacaaatttgtttatattgtctcttgatgatgttgaaactcctaaaggttccatgttggatcttaaaatttctcaatctaaaattgcacttcccaaa

SEQ ID NO: 129124 - DNA, 184 bp, Glycine max
aaattttgataaaccgcgatcacaggttgccgtaccttagaaccggaaacacaagcaatcgttacttgatttcaagaatctctcaatttcttcctacttctttgtgtacggtttcttaagggaaagaaaatcactctctgtgctggccacagacttcgtgaatcattttcttttccacacaaca

SEQ ID NO: 129125 - DNA, 270 bp, Glycine max
ctcgagccgaaatttttgacaacctaagacgcgctgcttcactattctccctatggagtataatcttgtggttcgtcagaagtttttaaattttgtgaggttcattatgaagaaaagggacaagcttagttgtcaagttggaatcaacccatactccatggaatggactggtttggccaatagattactgagtaagggcaacgatattctgtgttgcgatgatgctagttttgatggtttgattaccaagcaagttatgagcagatggca

SEQ ID NO: 129126 - DNA, 227 bp, Glycine max
ttgcaatagcatttttaatgagatgctcattagatatagctatgaaaaattactgcgccaggctagagctccaagtatgtttttacaatccttcaaaaattttgtttctttgtgtgtgtatggtgatgataacttaattagtgttcatgaatatgtcaagccttactttagtggttctaaattgaaaagctttctagctggtcataatatcaccattactgatggta

SEQ ID NO: 129127 - DNA, 266 bp, Glycine max
aaagaatagatcctcaatacaatgaggttcatgctcagatggaaacaaatttgtttaaattgtctcttgatgatgttgaaactcctaaaggttccatgttggatcttaaaatttctcaatctaaaattgcacttcccaaaaacacagttggaggaaccattctgcgtagtgatctattggcaaattttttgacagagggcaattttagagcaagtgttgatttgcagcgcactcaccgtattaaaggaatgattaaatggtggcca

SEQ ID NO: 129128 - DNA, 268 bp, Glycine max
cgctgtgttgggttgttgctttattttcttcctcctcgtcacaagatacttcatcaaacgacagccaaagttcttctgggtgtcagcaatggcaccactgacgtccgttatattgggaagtctgctggtctatgtcacacacgctgagaaacatggagttcaagtgataggaaatttgaagaaggggctgaatccaccttcggcaacggatttggtgtttgtgtcaccttacatgggcactgccataaaaactggattcgtcactggc

SEQ ID NO: 129129 - DNA, 271 bp, Glycine max
aaaaagaaaaacgtgattcgctcttctcttcgaataaaccacaaaaccaacaaacgagaagaggagtgagagaagatggggttgtcgttcacgaagctgttcagcaggttgtttgcgaagaaggaaatgaggattctgatggtaggtctcgatgctgctggtaagacaaccatcttgtacaagctcaagcttggagaaatcgtcaccaccatccccaccatcggatttaatgttgagactgtggagtacaagaacatcagctcactgtgtg

SEQ ID NO: 129130 - DNA, 170 bp, Glycine max
tcgatcacaggttgccgcaccttaaaaccggaaacaaaagcaatcgttacttgatttcaagaatctctcaatttcttcctacttctttgtgtacggtttcttaagggaaagaaaatcactctctgtgctggccacagacttcgtgaatcattttcttttccacacaacat

SEQ ID NO: 129131 - DNA, 267 bp, Glycine max
aatttttctgcagaattgctctcttgcaaattggatactgttactggccaatattatcctgagtgggctccaattaattgtcgagttcatcgacaaccaattcacatcactgaaggaaattatgtcagaaagcaagatgtcagcattgaatatgatgcatgtacaattccaaatgattgtggttcatcagttgttgccaaagttggaaatcacaaacaaattgttggtttccatgttgctggaagcaaaggaagactgggtatgctt

SEQ ID NO: 129132 - DNA, 270 bp, Glycine max
aaaagcacaatttgttagtggaaaaaccttcaaatatgatataattggtgctggttcacattcttcagtagattttcctgaaaaggaagatcaagaaaaacccaaaaagattgataccagattgagacaaagaatagatcctcaatacaatgaggttcaggctcagatggaaacaaatttgtttaaattgtctcttgatgatgttgaaactcctaaaggttccatgttggatcttaaaatttctcaatctaaaattgcactcccaaaaac

SEQ ID NO: 129133 - DNA, 266 bp, Glycine max
cggctcgagagcttatcttgtcaatctcgtaaatgtgttacgagaattgtatttgcacagtccacaggaagctcgccaattgagaaggaaagctctctctcgtattgaatggctgcaaaaagctgatgtgcctaccatagcacagattgaagagttccattcgatgcagaggatgatgaatgctcctgattcaaatgataatatcgatctactgttgagcattgatttgttgggtttacaaggagcaggtaaagctttccaaacaa

SEQ ID NO: 129134 - DNA, 269 bp, Glycine max
gtaatattcatatgtccggcttgtgttacgacggcagatacaaattctggactagacacgagctaaatcttgctttgacagaagaggagaagatggaagtgattagaaatagaggcattcctgctgatgttcttgcaaagcgagctcatgaatttgaaaaacatgttgctcatgaaagcctcaaggatcagattcctgctgttgacaagttgtattctactaaggttaataagtttgcaaaaattatgaaccttagacaagtgttgttg

SEQ ID NO: 129135 - DNA, 269 bp, Glycine max
tctaaattgaaaagctttctagctggtcataatatcaccattactgatggtattgacaaaactagtgcaactttgcaatttagaaagttagcagattgtgattttctcaagagaaactttaagcagatgtctaatgttttgtgggtggctacctgaggataaggcgagtttatggtcacaacttcattatgtttcgtgtaataatctggaaatgcaagaagcttatcttgtcaatctcgtaaatgtgttacgagaattgatttgcacag

SEQ ID NO: 129136 - DNA, 266 bp, Glycine max
caaggtttcagcttttgagtaccactaccaatggtgattttgttcaaggaaaagatctcgcaatggttaaagttaatgtagcatgtgctgctgttggcttgacatcaagttacactccaactccattgttggaatctggtttgcaaaaagacagagggttaattgtggagtattttggaaggatgtcttacgttgctcacaacgttaatctcccccaagagaaagatttgttggagggaaatttttcctttgatataaatctcgct

SEQ ID NO: 129137 - DNA, 267 bp, Glycine max
ttcctctacaaaagcacaatttgttagtggaaaaaccttcaaatatgatatagttggtgctggttcacattcttcagaagatttttctgaaaaggaagatcaagaaaaacccaaaaagattgatgccagattgagacaaagaatagatcctcaatacaatgaggttcaggctcagatggaaacaaatttgtttaaattgtctcttgatgatgttgaaactcctaaaggttccatgttggatcttaaaatttctcaattaaaattgca

SEQ ID NO: 129138 - DNA, 265 bp, Glycine max
ctgctttggagattaatctgattctgctaaaggatacaagtcacgtggcgtacacgagcaatgcttggtcaatgggaagaagctgcaaaggatcttcatgtggcttcaaagttagactatgatgaggaaataaatgctgtacttaaaaaggtggaaccaaatgctcacaagattgaggaacaccgtcggaagtatgaaaggctgcacaaagaaagagaggataaaaaaaaggagcgtgagaggcagcggcaccgtctgaagctca

SEQ ID NO: 129139 - DNA, 267 bp, Glycine max
ccaagctatatatctaagcatacttgtactctcgacaatgtcatgtttttagcacatggtggaagggaaagaactcagaaggaatttgagaacttgtgcaagagctctggtttttccaagtttcatgtagcaagtagtgacatctcatctacgttaggagtaatggaattctataagtagaaattgcccatgacaaatagtaatttgaatctatgatagcccacatgttacattgggtgcatccagacccaaaagccttaaataaat

SEQ ID NO: 129140 - DNA, 182 bp, Glycine max
ttttgataaatcgcgatcacaggttgccgcaccttaaaaccggaaacaaaagcaatcgttacttgatttcaagaatctctcaatttcttcctacttctttgtgtacgatttcttaagggccagaaaatcactctctgtgctggccacagacttcgtgaatcattgtcttttccactcttagt

SEQ ID NO: 129141 - DNA, 268 bp, Glycine max
gttcttctaattgactcttgttctgaacgacttttcaagagaatcaaaccatggcagtgaaagtatacggtccccactgtgcttccaccaagcgggtgctgttttgtctggttgagaaggaagtcgaatttgaggttgtccctgttgatgtcactaagggggagcagaaggatcctgagtacctcaaactacagccatttggagttgttcctgtcatcaaagatggagattataccttatatgaatctcgtgctataagaggtattat

SEQ ID NO: 129142 - DNA, 192 bp, Glycine max
ctcgagccgctcgagccggaaaatgcggaatcctctgcatgatcaggaatttgtgttttctttcgtttgctcgtttgtttaattcaataaaggaaattagacatgaccctcttgttgagtatgctctgtctatttgaaaatttccacacctcttttaattgtcgtaatgatgtgtgaagtgtgtgttatttt

SEQ ID NO: 129143 - DNA, 268 bp, Glycine max
gcagcagccatggttctcaaaactgaactatgccgattcagtggtgccaagatctacccaggaaagggcatcagatttgttcgtggtgattctcaggttttcctgtttgcaaactcaaaatgtaagaggtatttccacaatcgcctgaagccttcaaagctcacctggactgcaatgtacagaaagcaacacaaaaaggacattgctcaagaagctgtgaggaagaggagacgtgctgccaaaaagccttactctaggccattgttgg

SEQ ID NO: 129144 - DNA, 264 bp, Glycine max
atttgtaagaaagatgtttggagagttgaatgtggaatcccttctggatttccgctcacagttatttgcaatagcatttttaatgagatgctcattagatatagctatgaaaaattactgcgccaggctaaagctccaagtatgtttttacaatctttcaaaaattttgtttctttgtgtgtgtatggtgatgataacttaattagtgttcatgaatatgtcaagccttactttagtggttctaaattgaaaagtttctagctg

SEQ ID NO: 129145 - DNA, 254 bp, Glycine max
tctgtcttctagtgcaagtgatttcagaactgcaatggtgagtaaaaatagcaagcctcaagctactgcaatgcatgtgggagctatagaaattatcattgatagtttcgcaagtcctgactgcaacatagttggtgcaatgcttttggttgatacttatcataccaatcctgaaaatgcagttcgtagtattcttgttgcgcctttcagaggcggaaggcccattcgggtggttacatttccgaataccatcg

SEQ ID NO: 129146 - DNA, 265 bp, Glycine max
gccgttcaaagtggtcttattcgaaaaacacttgggcgttggtgcaaatgtttgcttcattaattttctctggagacaacaggctcactgagaaaacaatttttacttgcagagatttggacatcttggttgtttattatacaatagcaactcaatttagaaaatttctaccgcattacattaggtggcatctgtataccttgttgatctacattctcccatcttttctcactgctgaaattaaatataagcggatctgagtaat

SEQ ID NO: 129147 - DNA, 263 bp, Glycine max
aaagaatcccaggcgaggagaaagatggaggggaaggagcaggatgtgtcgttgggagcgaacaagttccccgagagacagccgattgggacggcggcgcagagccaagacgacggcaaggactaccaggagccggcgccggcgccgctggttgacccgacggagtttacgtcatggtcgttttacagagcagggatagcagagtttgtggccacttttctgtttctctacatcaccgtcttaaccgttatgggatcgccggg

SEQ ID NO: 129148 - DNA, 230 bp, Glycine max
ggatatatttattcagtcgaagagagccagaggagcctgaagatgcaactaaaggaagagatgtgttcaatgaaaagccacctgctgatgaacttttggcagtatcggatattggaaagtcagttacaacatcacttcctgacaatgtgattctacacaccactatgggtgatattcacatgaaattatacccagaggaatgtccaaaaactgtggagaatttcactact

SEQ ID NO: 129149 - DNA, 223 bp, Glycine max
ctcgagcgcaatggttaaagttaatgtagcatgtgctgctgttggcttgacatcaagttacactccaactccattgttggaatctggtttgcaaaaagacagagggttaattgtggagtattttggaaggatgtcttacgttgctcacaacgttaatcagccccaagagaaagatttgttggagggaaatttttcctttgatattaaatctcgctctagttgg

SEQ ID NO: 129150 - DNA, 222 bp, Glycine max
taccaagcaagttatgagcaagatggcagaaatgataaacagtctttgtggtggtgatgaaaaattgatgcgtgaaaggacacatctgctgttggcttgttgttcaaggatggcaatttgtaagaaagatatttggagagttgaatgtggaatcccttctggatttccgctcacagttatttgcaatagcatttttaatgagatgctcattagatatactat

SEQ ID NO: 129151 - DNA, 221 bp, Glycine max
  unsure (1)..(221): unsure at all n locations
gataaaccgcgatcacaggttgccgcaccttaaaaccggaaacaaaagcaatcgttacttgatttcaagaatctctcaatttcttcctacttctttgtgtacggtttcttaagggaaagaaaatcactctctgtgctggccacagacttcgtgaatcattttcttttccacacaacatacgacccctnatcagtctcctataagatataggattacggtca

SEQ ID NO: 129152 - DNA, 219 bp, Glycine max
ctcgagcgctcgagccgctctttctatagggggaggagatggtgcaaagaatgctattctcaggaatatgccaaatgctgttctttcaatgtggagatattttgttggagatctcgtctttgaagtttctaagatgacttctccctacattaaatgtacagtctctttcttcatagcatttggaaatttggctgatgacaccatcaattttgaggcttt

SEQ ID NO: 129153 - DNA, 224 bp, Glycine max
gtttcctctactaaagcacaatttgttagtggaaaaaccttcaaatatgatataattggtgctggttcacattcttcagaagattttcctgaaaaggaagatcaagaaaaacccaaaaagattgatgccagattgagacaaagaatagatcctcaatacaatgaggttcaggctcagatggaaacaaatttgtttaaattgtctcttgatgatgttgaactcct

SEQ ID NO: 129154 - DNA, 222 bp, Glycine max
cctgccagtagtcatatgcttgtctcaaagattaagccatgcatgtgtaagtatgaactaattcagactgtgaaactgcgaatggctcattaaatcagttatagtttgtttgatggtatcttctactcggataaccgtagtaattctagagctaatacgtgcaacaaaccccgacttctggaagggatgcatttattagataaaaggtcaacacaggtctgc

SEQ ID NO: 129155 - DNA, 222 bp, Glycine max
gctggtcataatatcaccattactgatggtattgacaaaactagtgcaactttgcaatttagaaagttagcagattgtgattttctcaagagaaactttaggcagatgtctaatgttttgtgggtggctcctgaggacaaggcgagtttatggtcacaacttcattatgtttcatgtaataatctggaaatgcaagaagcttatcttgtcaatctcgtaatg

SEQ ID NO: 129156 - DNA, 217 bp, Glycine max
cacttttcatccttcgatcatacacttagttgcttccaattaagatggttctgctagagaagctctgggatgatgttgtggctggccctcaacctgagcgtggccttggcaagctcagaaaactcaccaccctcaaaactattgatgaaggagaaagtagcaagctgcagaagacgttgtcgatgccgtcgacaccaataaccccgatgactccgac

SEQ ID NO: 129157 - DNA, 230 bp, Glycine max
caaaaattactgcgccaggctaaagctccaagtatgtttttcatagctatatctaatgaccatctcattaaaaatgctattgcaaataactgtgagcggaaatccagaagggattccacattcaactctccaaacatctttcttacaaattgccatccttgaacaacaagccaacagcatttttaatgagatgctcattagatatagctatgaaaaattactgcgccagg

SEQ ID NO: 129158 - DNA, 223 bp, Glycine max
gtgctgatggcattaagcctgaagccatcgatgctttgcatattatcccgaaggagctttcacttaagattgttagtaagattgaagctggggaaaggttcagtgtgtatgttgtggttccaatgtggccagagggtgtcccagaaagtgcatcagttcaggcaatattggattggcagaggagaacaatggatatgatgtacaaggatgttgttcagggctc

SEQ ID NO: 129159 - DNA, 223 bp, Glycine max
gaaattttgataaaccgcgatcacaggttgccgcaccttaaaaccggaaacaaaagcaatcgttacttgatttcaagaatctctcaatttcttcctacttctttgtgtacgatttcttaagggaaagtaaatcactctctgtgctggccacagacttcgtgaatcattttcttttccactctaagtctaatccctgtacactctcctatttgatataggcttc

SEQ ID NO: 129160 - DNA, 219 bp, Glycine max
taaattgaaaagctttctagctggtcataatatcaccattactgatggtattgacaaaactagtgcaactttgcaatttagaaagttagcagattgcgattttctcaagagaaactttaagcagatgtctaatgttttgtgggtggctcctgaggacaaggcgagtttatggtcacaacttcattatgtttcgtgtaataatctggaaatgcaagagct

SEQ ID NO: 129161 - DNA, 218 bp, Glycine max
tgtgatatcatttgtgtcactggatggactgccaccccaatgcaggatgttcaggttacaattgattggtttatttcctctcaggaatgtgttcccaggacttattgtgttttaaatccacaaaatccttttgtgttaaataggtggatggggaaactgactttcccccagggcacttcccgaaatgttaagagaatgcctctttctatagggggaga

SEQ ID NO: 129162 - DNA, 218 bp, Glycine max
gtcacaacttcattatgtttcgtgtaataatctggaaatgcaagaagcttatcttgtcaatctcgtaaatgtgttacgagaattgtatctgcacagtccagaggaagctcgccaactgagaaggaaagctctctctcgtattgaatggctgcaaaaagctgatgtgcctaccatagcacagattgaagagttccattcgatgcagaggatgatgatgc

SEQ ID NO: 129163 - DNA, 220 bp, Glycine max
tttgattaccaagcaagttatgagcaagatggcagaaatgataaacagtctttgtggtggtgatgaaaaattgatgcgtgaaaggacacacctgctgttggcttgttgttcaagaatggcaatttgtaagaaagatgtttggagagttgaatgtggaatcccttctggatttccgctcacagttatttgtaatagcatttttaatgagatgctcatagat

SEQ ID NO: 129164 - DNA, 222 bp, Glycine max
catttattccaccacccccaaagggaccacctacagaactgttggtggaacaaaaccatgagattattcagttatgctacaacagaggctttgatttcaagttatatctccctcactaccagtcacaggagaactggatgcgacactatggagataagtggaccagattcgtcgagagaaaggccaattttgatcccttggctattcttgcacctggcagaa

SEQ ID NO: 129165 - DNA, 218 bp, Glycine max
cagcattgaatatgatgcatgtacaattccaaatgattgtggttcattggttgttgccaaggttggaaatcacaaacaaattgttggtttccatgttgctggaagctaaggaagactgggatatgcttcattgataccatatgttgagccagttgtgcaagctcaaagtgctgaagtttacttcgacttcttccctgtggaggttgatagtcaagagg

SEQ ID NO: 129166 - DNA, 188 bp, Glycine max
cacattttgataaaccgcgatcacaggttgccgcaccttataaccggttacaaaagcaatcgttacttgatttcatgattctctcaatttcttcctacttctttgtgtaccaattcttaagggaaagataatcactctctgtgctggccacagacttcgtgaatcattttcttttccacacaacatac

SEQ ID NO: 129167 - DNA, 227 bp, Glycine max
ctttttctttctttgaccttttaccggttgttgcgttggcgcaaatggcattcttcagaagcgtttctgcactttctcgacttcgctctcgcgtgggccaacaatctaatctggcgaattcagttagatggctccaaactccgagctccagtaacactgatctttattctgagttgaaggaactggttccagagtatcaggaacgtgttaagaagctgaagaagatc

SEQ ID NO: 129168 - DNA, 230 bp, Glycine max
gaagacggttgtggggattcgatgggggccaccgttcactcgccgctagtcacttatgcttccgtcatatctctgcttacactctgtcctccgtttgtcatacttctatggtacaccatgactcttgctgacggatctgtttccgagacattccattatttaaggcagaatgggttgcagggtttgctacatatatggcccacccccactcccaccgcctgcaaatcatt

SEQ ID NO: 129169 - DNA, 223 bp, Glycine max
ctggaagatggtcgtactcttgctgattataatatccagaaggagtccactctgcatttggtgttgaggcttcgtggaggtatgcagatatttgtgaagactctgacagggaagaccattaccttggaggtggaaagctctgatactattgacaatgtgaaagctaagattcaggacaaggaaggtatccctccagatcagcagaggctcatttttgctggga

SEQ ID NO: 129170 - DNA, 220 bp, Glycine max
ccttcggggcctcttccccgggcgtcgaacagtcaactcagaactggtacggacaaggggaatccgactgtttaattaaaacaaagcattgcgatggtccctgcggatgttgacgcaatgtgatttctgcccagtgctctgaatgtcaaagtgaagaaattcaaccaagcgcgggtaaacggcgggagtaactatgactctcttaaggtagccaaagcct

SEQ ID NO: 129171 - DNA, 219 bp, Glycine max
atttgctctcggagctggcccagttccaggtctccttctaccagaaatctttcctagtcgaataagagccaaagccatggcagtctgtatgtcagtgcattgggtgataaatttctttgttggactactgttcttgcgtttgctggagaaacttggtccacagctgctttactctatgtttgctaccttttgcatcatggcagtaatttttgtaaaaga

SEQ ID NO: 129172 - DNA, 219 bp, Glycine max
gaaaaattactgcgccaggctaaagctccaagtatgtttttacaatctttcaaaaattttgtttctttgtgtgtgtatggtgatgataacttaattagtgttcatgaatatgtcaagccttactttagtggttctaaattgaaaagctttctagctggtcataatatcaccattactgatggtattgacaaaactagtgcaactttgcaatttaaaagt

SEQ ID NO: 129173 - DNA, 220 bp, Glycine max
tggttttgaaatgtggagttctgagtgggcaaatcaaacttcatggcatttgagtttccttattgacaatcccaaacagtctacagtttttgatattctcttgggaatttctcaagattttgaaattgctggtaatactcttatgccagctttttctgttccacaggctactgccagatcttctgaaaatgcggaatcctctgcatgatctggaattgtg

SEQ ID NO: 129174 - DNA, 218 bp, Glycine max
cggctcgagcggctcgagggtgtccatatttgtatgctatggtgcatgatagttcagtgtctacaataccaggtgattttgtcattggtgttaagttgacaaccataaacaatatgtgtgcatatgggctcaatcctggtatttcaggttctcgtcttttgggcaccattcttcagtccatttcacagcaaactgtttggaatcaaatggcaacagga

SEQ ID NO: 129175 - DNA, 218 bp, Glycine max
gagacaaagaatagatcctcaatacaatgaggttcaggctcagatggaaacaaatttgtttaaattgtctcttgatgatgttgaaactcctaaaggttccatgttggatcttaaaatttctcaatctaaaattgcacttcccaaaaacacagttggaggaaccattctgcgtagtgatctattggcaaattttttgacatcgggcaattttaggcaag

SEQ ID NO: 129176 - DNA, 221 bp, Glycine max
caaagcttcagaaactatgctcatgaaagcttatgcttttttgaagtacaacaatgcgaccaatttgattgtcaggacccatttggcagaattggtcaatgaagacttttatgatgaaaaattcaattttattggcacaattgggactccagcttttcatcgacaaattgctgcacatttggagaaaatgccattatggcaaaaagcaattttgtgtggaa

SEQ ID NO: 129177 - DNA, 220 bp, Glycine max
tgcacttgctgaaaagggtatcgaatatgagtacaaagaagaggacttgaggaacaagagtcctcttctcttacaaatgaacccggttcacaagaagattccggttctcatccacaatggcaaacccatttccgaatccctcattgctgttcagtacattgaggaggtttggaatgacagaaatcccttgttgccttcagacccttaccagagactcagg

SEQ ID NO: 129178 - DNA, 218 bp, Glycine max
cacagttggtattcctgagaatacaggtatagcattggcctgtgctatgaatagttcttttagggggcgtgccagttctgatatttacaccatctgctctcaagactgtgaattatggaatcctgcttgcacaaaagcaatgactatgtcatttaatccaaacccgtgttctgatgcatggagtttggaatttctgaagcgtaccggatttcatgtga

SEQ ID NO: 129179 - DNA, 186 bp, Glycine max
gaaattttgataaaccgcgatcacaggttaccgcaccttaaaaccggaaacaaaagcaatcgttacttgatttcaagaatctatcaatttcttcctacttctttgtgtacggtttcttaaggtaaagaaaatcactctctgtgctggccacagacttcgtgaatcattttcttttccacacaacat

SEQ ID NO: 129180 - DNA, 224 bp, Glycine max
ctcgagcgaatcggctcagtgataacttaattagtgttcatgaatatgtcaagccatactttagtggttctaaattgaaaagctttctagctggtcataatatcaccattactgatggtattgacaaaactagtgcaactttgcaatttagaaagttagcagattgtgattttctcaagagaaactttaagcagatgtctaatgttttgtgggtggctctgagg

SEQ ID NO: 129181 - DNA, 220 bp, Glycine max
ggatcgcaatatagcaagtagcgaacatgatttcttccgtgtcctttccagcgtctcttcccgccgttaacttctccggcaacgccgtggcttctccgtcgtgccgcgtcaaatccaggcctatagttgccttcgccaccgccaccgccaccgcggaagctcgctcttcctggacggagcaaccgagaccttcgtatctgaactcctcttgctctcgctc

SEQ ID NO: 129182 - DNA, 215 bp, Glycine max
ctgagtaagggcaacgatattctgtgttgcgattatgctagttttgatggtttgattaccaagcaagttatgagcaagatggcagaaatgataaacagtctttgtggtggtgatgaaaaattgatgcgtgaaaggacacacctgctgttggcttgttgttcaaggatggcaatttgtaagaaagatgtttggagagttgaatgtggaatccttct

SEQ ID NO: 129183 - DNA, 216 bp, Glycine max
ctatgcttgcaaaagttttaacggagaaaagattggctttaatcaaagcatgggaagaaagtgaaaagacaaaagcagagaacagggcatacaagaagcactctgctgttggattgtgggaggatagcaagaaagcatccgtagaggcacaactcaagaaaattgaggaaagcatggaaaaaaagaaggccgaatatgttgaaaaaatgaagaaaa

SEQ ID NO: 129184 - DNA, 217 bp, Glycine max
ttgcaatagcatttttaatgagatgctcattagatatagctatgaaaaattactgcgccaggctagagctccaagtatgtttttacaatccttcaaaaattttgtttctttgtgtgtgtatggtgatgataacttaattagtgttcatgaatatgtcaagccttactttagtggttctaaattgaaaagctttctagctggtcataatatcacctta

SEQ ID NO: 129185 - DNA, 214 bp, Glycine max
cattctctctgtgtatttccctacctctcccttcaagatgcagatcttcgtcaagaccctcaccggcaagaccatcacccttgaggtggaaagctctgacaccatcgacaacgtcaaggccaagatccaggacaaggaaggaatccccccggaccagcaacgtctcattttcgccggaaagcaacttgaggacggccgtacccttgctgactaa

SEQ ID NO: 129186 - DNA, 218 bp, Glycine max
ctcgagcgtgtttctggggatggtgaagagatgacattgattccgggaaccagtgttgaagaggcttacaataagctaatagttgaacttgagaaaagtgttcctacattggttggcattgaatgtcccaaggatgagaaacttcctcgtcgcaaaatttttgacaaacctaagacgcgctgcttcactattctccctatggagtttaatcttgggtt

SEQ ID NO: 129187 - DNA, 218 bp, Glycine max
tgatggtattgacaaaactagtgcaactttgcaatttagaaagttagcagattgtgattttctcaagagaaactttaagcagatgtctaatgttttgtgggtggctcctgaggacaaggcgagtttatggtcacaacttcattatgtttcgtgtaataatctggaaatgcaagaagcttatcttgtcaatctcgtaaatgtgttacgagaatttattt

SEQ ID NO: 129188 - DNA, 223 bp, Glycine max
  unsure (1)..(223): unsure at all n locations
gaaatttttataaaccgcgatcacaggttgccgcaccttaaaaccggaaacaaaagcaatcgttacttgatttcaagaatctctcaatttcttcctacttctttgtgtacgatttcttaagggaaagaaaatcactctctgtgctggccacagacttcgtgaatcattttcttttccacacatcatacaactttagcncactctcctatttgatatcggcttc

SEQ ID NO: 129189 - DNA, 219 bp, Glycine max
ctcagatggaaacaaatttgtttaaattgtctcttgatgatgttgaaactcctaaaggttccatgttggatcttaaaatttctcaatctaaaattgcacttcccaaaaacacagttggaggaactattctgcgtagtgatctattggcaaattttttgacagagggcaattttagagcaagtgttgatttgcagcgcactcatcgtattaaaggatgat

SEQ ID NO: 129190 - DNA, 213 bp, Glycine max
gaaattttgataaaccgcgatcacaggttgccgcaccttaaaaccggaaacaaaagcaatcgttacttgatttcaagaatctctcaatttcttcctacttctttgtgtacgatttcttaaaggaaagaaaatcactctctgtgctggccacagacttcgtgaatcattttcttttccactcttagtttatttgctgaacactctcctatttga

SEQ ID NO: 129191 - DNA, 215 bp, Glycine max
cttttgtgttgaataggtggatggggaaactgactttcccccagggcacttcccgaagtgttaagagaatgcctctttctatagggggaggagctggtgcaaagaatgctattctcatgaatatgccaaatgctgttctttcaatgtggagatattttgttggagatctcgtctttgaagtttctaagatgacttctccctacattaaatgacag

SEQ ID NO: 129192 - DNA, 177 bp, Glycine max
cggctcgagatcacaggttgccgcaccttaaaaccgttaacaaaagcaatcgttacttgatttcaagaatctctcaatttcttcctacttctttgtgtacgatttcttaagggaaagaaaatcactctctgtgctggccacagacttcgtgaatcattttcttttccactcttagtt

SEQ ID NO: 129193 - DNA, 193 bp, Glycine max
gatttgaaattttgataaaccgcgatcacaggttgccgcaccttaaaaccggaaacaaaagcaatcgttacttgatttcaagaatctctcaatttcttcctacttctttgtgtacggtttcttaagggaaagaaaatcactctctgtgctggccacagacttcgtgaatcattttcttatccacacatcatac

SEQ ID NO: 129194 - DNA, 219 bp, Glycine max
cgggcttggaccgagtttaggacttgttcgtgtcccgggaatagggttagtatacacagagcttgcaagtggagtaccccacatcttttcacatttcatcacaaacctaccagccatccattctgttgttgtttttgtatgtgtgaagtatctccctgtctacactgtcccagaagacgaaagattccttgtaaagagaattggacccaagaactccac

SEQ ID NO: 129195 - DNA, 216 bp, Glycine max
gaaattttgataaaccgcgatcacaggttgccgcaccttaaaaccggaaacaaaagcaatcgttacttgatttcaagaatctctcaatttcttcctacttctttgtgtacggtttcttaagggaaagaaaatcactctctgtgctggccacagacttcgtgaatcattttcttttccactcttagtatcattttagaacactctcctatttgatat

SEQ ID NO: 129196 - DNA, 210 bp, Glycine max
gattcctttgaggaagtttctttaagtgcagcactcaatggtgttgagggtttggactatatggaaagaattcctcttgctacatctgagggttttcctcatgtgctttcacgcaaaaatggtgaaaaaggcaaaaggagatttgtttctggggatggtgaagagatgacattgattccgggaaccagtgttgaagaggcttacaacaag

SEQ ID NO: 129197 - DNA, 225 bp, Glycine max
cccagctgagagcaagatcttggtgaatgcatggtggctggccaacaaccctgcacactggaagaagccagaggagttccggcctgagaggttcttcgaggaggagtcgcttgttgaagccaatggcaatgactttaggtaccttccctttggtgttggcagaagaagctgccctggaatcattcttgcattgccaattcttggcatcactttgggacgttggtc

SEQ ID NO: 129198 - DNA, 253 bp, Glycine max
catatgttgagccagttgtgcaagctcaaagtgctgaagtttactttgacttcttccctgtggaggttgatagtcaagagggagttgctcacattggtgaattgaatctggtgtctatgttccactgcctacaaaaactaatttggtggaaactcccaaggaatggcaactggatctaccttgtgacaaaattcctagtgtcttgactacaactgatgaaagattggtaggcacagaacatgagggatatgat

SEQ ID NO: 129199 - DNA, 257 bp, Glycine max
tctcgagcgattcggctcgagccattactgatggtattgacaaaactagtgcaactttgcaatttagaaagttagcagattgtgattttctcaagagaaactttaagcagatgtctaatgttttgtgggtggctcctgaggataaggcgagtttatggtcacaacttcattatgtttcgtgtaataatctggaaatgcaagaagcttatcttgtcaatctcgtaaatgtgttacgagaattgtatttgcacagtcca

SEQ ID NO: 129200 - DNA, 188 bp, Glycine max
tgaaattttgataaaccgcgatcacaggttgccgcatcttaaaaccggaaacaaaagcaatcgttacttgatttcaagaatctctcaatttcttcctacttctctgtgtacgatttcttaagggaaagaaaatcactctctgtgctggccacagatctcgtgaatcatttgcttttccacacaacata

SEQ ID NO: 129201 - DNA, 255 bp, Glycine max
cttacgttgctcacaacgttaatcagccccaagagaaagatatgttggagggaaatttttcctttgatattaaatctcgctctagattggaaaaagtttcctctacaaaagcacaatttgttagtggaaaaaccttcaaatatgatataattggtgctggttcacattcttcagaagattttcctgaaaaggaagatcaagaaaaacccaaaaagattgataccagattgagacaaagaatagatcctcaataca

SEQ ID NO: 129202 - DNA, 255 bp, Glycine max
atggttttgaaatgtggagttctgagtgggcaaatcaaacttcatggcatttgagtttccttattgacaatcccaaacagtctacagtttttgatattctcttgggaatttctcaagattttgaaattgctggtaatactcttatgccagctttttctgttccacaggctactgccagatcttctgaaaatgcggaatcctctgcatgatctggaatttgtgttttctttcgcttgttcgtttgtttaattcaat

SEQ ID NO: 129203 - DNA, 252 bp, Glycine max
gaaaaatttgtacaaatgatgaagagcatctatgaaacagaagttacagattggccagtaccactgaaaatcatttctggaaccattcttgcaacaattttgggaacaaccttctggaaactcttttcctttcttagagatgctggtaatgggggagtttttgttggtaatgttgcttcagcattcacaacttcaagtgtgcttgaggcccaaagtagaaagcccaacagatatgaagtttcccaatacaga

SEQ ID NO: 129204 - DNA, 250 bp, Glycine max
cgcgatcacaggttgccgcaccttaaaaccggaaacaaaagcaatcgttacttgatttcaagaatctctcaatttcttcctacttctttgtgcacgatttcttaagggaaagtaaatcactctctgtgctggtcacagacttcgtgaatcattgtcttttccattcttagtttattttctgaacactctcctatttgatataggacttcgtgtcagatttaaacttcttctgtttctttctcagttttct

SEQ ID NO: 129205 - DNA, 257 bp, Glycine max
agaaccttctgaggttaaagcaaaaaacaaagagagagagagagagaaaatgatgaagccatcgatgctcagatctctccactccgccgccacccgcggcgcctctcatctcttccgccgtgggtacgcctccgagccggtgccggagcgcaaggtagccgttctcggcgccgccggcggtgatcgggcagcctctctcccttctcatgaagctcaatcccctcgtttcgagacctctccctttacgatatcgccgg

SEQ ID NO: 129206 - DNA, 206 bp, Glycine max
gcttggaagaaaggctgtttagtggacaaaactggagattggatcacacttatacaaaattctccaattagtaacttgttgagagttgctgcttggaagaaaggctgtttaatggttaagattgtgatgtctgggaatgcagcagtcaaaaggagtgattgggcctcattggtacaagtgcttttaaccaaacagccacagtacag

SEQ ID NO: 129207 - DNA, 185 bp, Glycine max
gaaattttgataaaccgcgatcacaggttgccgcaccttaaaaccggaaacaaatgcaatcgttacttgatttcaagaatctctcaatttcttcctacttctatgtgtactgtttcttaagtgaaagataatcactctctgtggtggctacagacttcgtgaatcattttggattccacacttag

SEQ ID NO: 129208 - DNA, 253 bp, Glycine max
caattttctagggttttattcattttccgatggcttctgcagatgttgagtaccgttgctttgtcggtgggctcgcttgggccactgacgaccatgccctcgagagagccttctctcagtacggcgaaatcgttgaaacgaagattatcaacgatcgtgagactggcagatccaggggttttggatttgtgaccttcgtctcggagcagtccatgaaagatgcgatcggagcgatgaatggacagaacttgga

SEQ ID NO: 129209 - DNA, 252 bp, Glycine max
ctcgagccgtcctggtatttcaggttctcgtcttttgggcaccattcctcagtctatttcacagcaaactgtttggaatcaaatggcaacagtgagaacacattgaattttgattctagcaagcagagcttttgtcaattttctattgaccttctcggtggaggaattttagtggacaaaactggagattggatcacacttatacaaaattctccaattagtaacttgttgagagttgctgcttggaagaaa

SEQ ID NO: 129210 - DNA, 251 bp, Glycine max
atgatgttgaaactcctaaaggttccatgttggatcttaaaatttctcaatctaaaattgcacttcccaaaaacacagttggaggaaccattctgcgtagttctctattggcaaattttttgacagagggcaattttagagcaagtgttgatttgcagcgcactcatcgtattaaaggaatgattaaaatggtggccacagttggtattcctgagaatacaggtatagcattggcctgtgctatgaatagt

SEQ ID NO: 129211 - DNA, 252 bp, Glycine max
gccatgcttgacaaatttcccgaaaaatatgaacctgctgtttggtggccttcatctcatcagttccaaagaagaagtaaaacacaagagagtaacaatggatggagtgaagatctagaaatggaaatgagggaagtgattgaagtggtaaagaataaagacttagaggattatgagaggcttgggaacatagctttgaaggtaaacaagagtttggcgattgcagggcctctattgagtggcattgcagca

SEQ ID NO: 129212 - DNA, 253 bp, Glycine max
gaaagatgtttggagagttgaatgtggaatcccttctggatttccgctcacagttatttgcaatagcatttttaatgagatgctcattagatatagctatgaaaaattactgcgccaggctaaagctccaagtatgtttttacaatctttcaaaaattttgtttctttgtgtgtgtatggtgatgataacttaattagtgttcatgaatatgtcaagccttactttagtggttctaaattgaaaagctttcta

SEQ ID NO: 129213 - DNA, 240 bp, Glycine max
cgttgagccagttgtgcaagctcaaagtgctgaagtttactttgacttcttccctgtggaggttgatagtcaagagggagttgctcacattggtgaattgaatctggtgtctatgttccactgcctacaaaaactaatttggtggaaactcccaaggaatggcaactggatctaccttgtgacaaaattcctagtgtcttgactacaactgatgagagttggtagccacagaacatgagg

SEQ ID NO: 129214 - DNA, 235 bp, Glycine max
ggcaactggatctaccttgtgacaaaattcctagtgtcttgactacaactgatgaaagattggtaggcacagaacatgagggatatgatccttttcttggtggaattcaaaaatatgccactcccatgatgcccctagatgaagaaattctttctaaggttgcacaagatatggttgaggaatggtttgattgtgttgatgaggaggattcctttgaggaagtttctttgagtgc

SEQ ID NO: 129215 - DNA, 243 bp, Glycine max
atttgctctcggagctggcccagttccaggtctccttctaccagaaatctttcctagtcgaataagagccaaagccatggcagtctgtatgtcagtgcattgggtgataaatttctttgttggactactgttcttgcgtttgctggagaaacttggtccacagctgctttactctatgtttgctaccttttgcatcatggcagtatttttgtaaaaaggaatgtggtggaaaccaaagggaag

SEQ ID NO: 129216 - DNA, 251 bp, Glycine max
  unsure (1)..(251): unsure at all n locations
ctagatttgaaattttgataaaccgcgatcactggttgccgcaccttaaaaccggaaacaaaagcaatcgttacttgatttcaagaatctctcaatttcttgctacttctttgtttactgtttcttaagggaaagaaaatcactctctgtgctggccacagacttcgtgaatcattttcttttccactcttcgtcacgtcagngnagacnctgcnatntgatataggacttcgtgtcagatttaaacttct

SEQ ID NO: 129217 - DNA, 260 bp, Glycine max
gatttgcagcgcactcatcgtattaaaggaatgattaaaatggtggccacagttggtattcctgagaatacaggtatagcattggcctgtgctatgaatagttcttttagggggcgtgccagttctgatatttacaccatctgctctcaagactgtgaattatggaatcctgcttgcacaaaagcaatgactatgtcatttaatccaaacccgtgttctgatgcatggagtttggaatttctgaagcgtaccggatttca

SEQ ID NO: 129218 - DNA, 187 bp, Glycine max
gaaattttgataaaccgcgatcacaggttgccgcaccttaaaaccggaaacaaaagcaatcgttacttgatttcaagaatctctcaatttcttcctacttctttgtgtacggtttcttaagggaaagaaaatcactctctgtgctggccacagacttcgtgaatcattttcttttccacacatcata

SEQ ID NO: 129219 - DNA, 252 bp, Glycine max
ctcgagccgctgggaattgatcttcccaatagaggtatgtggtcctaataatggttttgaaatgtggagttctgagtgggcaaatcaaacttcatggcattgagtttccttattgacaatcccaaacagtctacagtttttgatattctcttgggaatttctcaagattttgaaattgctggtaatactcttatgccagctttttctgttccacaggctactgccagatcttctgaaaatgcggaatcctct

SEQ ID NO: 129220 - DNA, 251 bp, Glycine max
attttggaaggatgtcttacgttgctcataacgttaatcagccccaagagaaagatttgttggaaggaaatttttcctttgatattaaatctcgctctagattggaaaaagtttcctctacaaaagcacaatttgttagtggaaaaaccttcaaatatgatatagttggtgctggttcacattcttcagaagatttttctgaaaaggaagatcaagaaaaacccaaaaagattgatgccagattgagacaa

SEQ ID NO: 129221 - DNA, 249 bp, Glycine max
gacaaaactggagattggatcacacttatacaaaattctccaattagtaacttgttgagagttgctgcttggaagaaaggctgtttaatggttaagattgtgatgtctgggaatgcagcagtcaaaaggagtgattgggcctcattggtacaagtgtttttaacaatcagcaacagtacagagcattttgatgcatgtaagtggacaaaatcggaaccacattcctgggaattgatcttcccaatagag

SEQ ID NO: 129222 - DNA, 245 bp, Glycine max
gctttgcagctcacagtggtcctatttgaaaaacacttgagcattggtgcaaatgtttgcttcgttagttttctctggagacaacaggtttactgcgagaacaatttttacttgcagagatttggacatcttggttgtttattatacaatagcaactcgatttagaaaatttctaccgcattacattaggtggcatctgcataccttgatgatctacattctcccatctttgctcactgctgaaa

SEQ ID NO: 129223 - DNA, 248 bp, Glycine max
attgtggttcattggttgttgccaaggttggaaatcacaaacaaattgttggtttccatgttgctggaagcaaaggaagactgggatatgcttcattgataccatatgttgagccagttgtgcaagctcaaagtgctgaagtttacttcgacttcttccctgtggaggttgatagtcaagagggagttgctcacattggtgaattgaaatctggtgtctatgttccactgcctacaaaaactaatttg

SEQ ID NO: 129224 - DNA, 249 bp, Glycine max
agcaagcagagcttttgtcaattttctattgaccttctcggtggaggaattttagtggacaaaactggagattggatcacacttatacaaaattctccaattagtaacttgttgagagttgctgcttggaagaaaggctgtttaatggttaaaattgtgatgtctgggaatgcagcagtcaaaaggagtgattgggcctcattggtacaagtgtttttaacaaacagcaacagtacagagctttcgatg

SEQ ID NO: 129225 - DNA, 252 bp, Glycine max
gccagatgtccttcgatcagtctgtagtagcaattatgtctaaatgcaaagccagcatgagaatgggaaacactgatgctcaaattttgatggttccagggcgcagattcatagctcatggacattttttcaaaaatctgactcagaaagtgcgagtccaaattgttacatctgaaaagagttactggcatgtatatgatcctgacaagtttcagatgtttgacaacagtgaaataggtctttattctaatc

SEQ ID NO: 129226 - DNA, 251 bp, Glycine max
gcaatgactatgtcatttaatccaaacccgtgttctgatgcatggagtttggaatttctgaagcgtaccggatttcattgtgatatcatttgtgtcatggatggactgccacccctatgcaggatgttacaggttacaattgattggtttatttcctctcaggaatgtgttcccaggacctattgtgttttaaatccacaaaatccttttgtgttaaataggtggatggggaaactgactttcccccaggg

SEQ ID NO: 129227 - DNA, 248 bp, Glycine max
gtgattagatatagaggcattcctgctgatgttcttgcaactcgcgctcatgaatttgcataacatgttgctcatgaccgcctcaaggatcagattcctgctgttgacaagtagtattctactaaggttaataagtttgcacaaattatgaaccttagacaatgtgtcgttggtgatctctaaacttcttactgatgggaagttatatgagggtcatcataatcctggatctaatattagtgcagggg

SEQ ID NO: 129228 - DNA, 244 bp, Glycine max
tggatggactgccacccctatgcaggatgttcaggttacaattgattggtttatttcctctcaggaatgtgttcccaggacctattgtgttttaaatccacaaaatccttttgtgttaaataggtggatggggaaactgactttcccccagggcacttctcgaagtgttaaaagaatgcctctttctatagggggaggagctggtgcaaagaatgctattctcatgaatatgccaaatgctgtt

SEQ ID NO: 129229 - DNA, 246 bp, Glycine max
attcagactgtgaaactgcgaatggctcattaaatcagttatagtttgtttgatggtatctactcggataaccgtagtaattctagagctaatacgtgcaacaaaccccgacttctggaagggatgcatttattagataaaaggtcaacacaggctctgcctgttgctttgatgattcatgataactcgtcggatcgcacggcctttgtgccggcgacgcatcattcaaatttctgccctatcaac

SEQ ID NO: 129230 - DNA, 219 bp, Glycine max
ccagtgttgaagaggcttacaataagctaatagttgaacttgagaaaagtgttcctacattggttggcattgaatgtcccaaggatgagaaacttcctcgtcgcaaaatttttgacaaacctaagacgcgctgcttcactattctccctatggagtttaatcttgtggttcgtcagaagtttttaaattttgtgaggttcattatgaagaaaagggaca

SEQ ID NO: 129231 - DNA, 249 bp, Glycine max
ggtttatagatctttgcgaaggaggtttacagcgctcaaccaaagatgcagaacgaggaaggacagatcactgagctttacattcctaggaagtgcccgccacaaacagattgattaccgctaaggaccatgcttcggttcagatcaacattgggcatgtggatgagaatggcgtctacaatggccatttctccacttttgccctctgcggattcatccgtgctcagggtgatgctgacagtgctctag

SEQ ID NO: 129232 - DNA, 249 bp, Glycine max
ttttaaatccacaaaatccttttgtgttaaataggtggatggggaaactgactttcccccagggcacttcccgaaatgttaagagaatgcctctattctatagggggaggagctggtgcaaagaatgctattctcatgaatatgccaaatgctgttctttcaatgtggagatattttgttggagatctcgtctttgaagtttctaagatgacttctccctacattaaatgtacagtctctttcttcata

SEQ ID NO: 129233 - DNA, 245 bp, Glycine max
cttagttgtcaagttggaatcaacccatactccatggaatggactggtttggccaatagattactgagtaagggcaacgatattctgtgttgcgttatgctagttttgatggtttgattaccaagcaagttatgagcaagatggcagaaatgataaacagtctttgtggtggtgatgaaaaattgatgcgtgaaaggacacacctgctgttggcttgttgttcaagaatggcaatttgtaagaaa

SEQ ID NO: 129234 - DNA, 247 bp, Glycine max
ttctcgagccgaatcggctcgagcggctcgagatttccctcatggattttcaaaaacctctatggctattcttgcttctccaccactctcctctcaagctcccaagccaacaaattcaacgttggtggaagcaaagggtgggttccaaacccttccgagagttacaacaattgggctggaagaaaccgattccaaatcaatgacacaatagttttcaagtacaataagggttcggattcggtgttgg

SEQ ID NO: 129235 - DNA, 235 bp, Glycine max
caagttgaagcatgagacaaagcatgaacacatctttgtggttggaaatactggcaagaagtttgagattattcttgattttcttggtttggtggagaaattttattacctctcagggagatatgacattgagcttactgtcggggatgctgtcatggagaactctttcttatggctgcttggtcaagttgatttagatcttcctgaagcacctgagaaggcagcccgtcttcct

SEQ ID NO: 129236 - DNA, 244 bp, Glycine max
gccatgcttgacaaatttcccgaaaaatatgaacctgctgtttggtggccttcatctcatcagttccaaagaagaagtaaaacacaagagagtaacaatggatggagtgaagatctagaaatggaaatgagggaagtgattgaagtggtaaagaataaagacttagaggattatgagaggcttgggaacatagctttgaaggtaaacaagagtttggcgattgcagggcctctattgagtggca

SEQ ID NO: 129237 - DNA, 244 bp, Glycine max
ggcattcctgctgatgttcttgcaaagcgagctcatgaatttgataaacatgttgctcatgaaagcctcaaggatcaaattcctgctgttgacaagttgtattctactaaggttaataagtttgcaaaaattatgaaccttagacaaagtgttgtcggtgatcttaaacttcttactgatgggatgttgtatgagggtaagcatattcctgtatctaatattagtgcaggggagaatcatgtag

SEQ ID NO: 129238 - DNA, 250 bp, Glycine max
accgcccgcaacattgcctgggtccacgcctgcaccgtcacggatgggataattactcagatcagagagtacttcaacaccgccctcaccgtcaccgcatccacgattccggcgagattgttccggctagctccggcgccggccgtttgccctgtgtctgggaaagcagcgtctccggtcgggtcgggaaatccgtacccggtttggttcttgcaatataaaataattattaacaagtaattagggaaga

SEQ ID NO: 129239 - DNA, 246 bp, Glycine max
caaaactagtgcaactttgcaatttagaaagttagcagattgtgattttctcaagagaaactttaggcatgtctaatgttttgtgggtggctctgaggacaaggcgagtttatggtcacaacttcattatgtttcatgtaataatctggaaatgcaagaagcttatcttgtcaatctcgtatatgtgttacgagaattgtatttgcacagtccagaggaagctcgccaattgagaaggaaagctct

SEQ ID NO: 129240 - DNA, 243 bp, Glycine max
agcaactggatctaccttgtgacaaaattcctagtgtcttgactacaactgatgaaagattggtaggcagagaacatgagggatatgatcctttcttggtggaattcaaaaatatgccactcccatgatgcccctagatgaagaaattctttctaaggttgcacaagatatggttgaggaatggtttgattgtgttgatgaggaggattcctttgaggaagtttctttgagtgcagcactcaa

SEQ ID NO: 129241 - DNA, 238 bp, Glycine max
tctcgagccgcttcttgcaaggttatgcgagacccgactggaatcagcagaggatcaggatattgttgcattttcaactcctgaggaagcaactcgagctcttggtgagatgaatggtaaaatgtttgctggaaaacctctgtatgttgcccttgcacagagaaaagaagagagaagagcaaggttacaggcacaattttcacagatgaggcctgttgcaataacgccttctgttgcg

SEQ ID NO: 129242 - DNA, 243 bp, Glycine max
tacaattccaaatgattgtggttcattggttgttgccaaagttggaaatcacaaacaaattgttggtttccatgttgctggaagcaaaggaagactgggatatgcttcattgataccatacgttgagccagttgtgcaagctcaagtgctgaagtttactttgacttcttccctgtggaggttgatagtcaagagggagttgctcacattggtgaattgaaatctggtgtctatgttccactg

SEQ ID NO: 129243 - DNA, 246 bp, Glycine max
tggggaaactgactttcccccagggcacttcccgaagtgttaaaagaatgcctctttctatagggggaggagctggtgcaaagaatgctattctcatgaatatgccaaatgctgttctttcaatgtggagatattttgttggagatctcgtctttgaagtttctaagatgacttctccctacattaaatgtacagtctctttcttcatagcaattggaaatttgggctgtgacaccatcaattttg

SEQ ID NO: 129244 - DNA, 245 bp, Glycine max
gtttcgcaagtcctgactgcaacatagttggtgcaatgcttttggttgatacttatcataccaatcctgaaaatgcagttcgtagtatttttgttgcgcctttcagaggcggaaggcccattcgggtggttacatttccgaataccattgtgcagattgaaccagacatgaattcaaggtttcagcttctcgagtaccactagcaatggtgattttgttcaaggaaaagatctcgcaatgggtaa

SEQ ID NO: 129245 - DNA, 173 bp, Glycine max
taagatttgaaattttgataaaccgcgatcacaggttgccgcaccttaaaaccggaaacaaaatcaatcgttacttgatttcaagaatctctcaatttcttcctacttctttgtgtacggtttcttaagggaaagaaaatcactctctgtgctggccacagacttcgtgaatc

SEQ ID NO: 129246 - DNA, 175 bp, Glycine max
agattaccaagcaagttatgagcaagatggcagaaatgataaacagtctttgtggtggtgatgaaaaattgatgcgtgaaaggacacacctgctgttggcttgttgttcaaggatggcaatttgtaagaaagatgtttggagagttgaatgtggaatcccttctggatttccgct

SEQ ID NO: 129247 - DNA, 167 bp, Glycine max
tgataaaccgcgatcatcggttgccgcaccttaaaaccggaaacaaaagcaatcgttacttgatttcaagaatctctcaatttcttcctacttctttgtgtacggtttcttaagggaaagaaaatcactctctgtgctggccacagacttcgtgaatcatttccttt

SEQ ID NO: 129248 - DNA, 169 bp, Glycine max
cggatgagaaacttcctcgtcgcaaaatttttgacaaacctaagacgcgctgcttcactattctccctatggagtttaatcttgtggttcgtcagaagtttttaaattttgtgaggttcattatgaagaaaagggacaagcttagttgtcaagttggaatcaacccata

SEQ ID NO: 129249 - DNA, 254 bp, Glycine max
cgaaccctctctttccggcaactaggttaaagttcatcaatggcaggtcgtggcaaaaccctaggatccagcgccgccaagaaggccacctcaaggagcagcaaagccggcctccaattccccgtcggccgtatcgcccgtttcctcaaggcgggaaattaggcggacggcttcggcgccggtgctcccgtttacctcgccgctgtctcgaatatcttggaaccgaggttttggagttggctggaaacgctgcg

SEQ ID NO: 129250 - DNA, 171 bp, Glycine max
ctgtgttgattcccagaaacacaaccattcccaccaagaaggagcaggtgttctcaacctactctgacaaccagcccggtgtgttgattcaggtctatgaaggtgaacgaacgaggactcgtgacaacaatttgcttggcaaatttgagttatctggaattcctcctgctc

SEQ ID NO: 129251 - DNA, 265 bp, Glycine max
gctactctttgctctgctctgcttagggttccaacttcaaacccaacagcacttatcgttctcatgcaacaagggaaaatgaggcctattttctgtggaaattttgaatatgatgcccggcagtcagagctggagcggctttttagacgatatgggaaggttgatagggtggatatgaagtctggatttgcttttatctatatggaagacgagagagatgctgaggctgcaattcgtgctcttgatcgagtagaatttggtcgga

SEQ ID NO: 129252 - DNA, 170 bp, Glycine max
cgaagactgaaaaatggcgtcatggaattcatttccgcttcaagttacctacgaggctctgggttggttcgccttcgtttcctggtccatcagtttctatcctcaagtcatcttgaattttcgcaggaagagtgtggttggactcaacttcgatttcgtggtgctaaatc

SEQ ID NO: 129253 - DNA, 258 bp, Glycine max
gtttactttgacttcttccctgtggaggttgatagtcaagagggagttgctcacattggtgaattgaaatctggtgtctatgttccactgcctacaaaaactaatttggtggaaactcccaaggaatggcaactggatctaccttgtgacaaaattcctagtgtcttgactacaactgatgagagattggtaggcacagaacatgagggatatgatccttttcttggtggaattcaaaaatatgccactcccatgatg

SEQ ID NO: 129254 - DNA, 256 bp, Glycine max
atgggctcaatcctggtatttcaggttctcgtcttttgggcaccattcctcagtccatttcacagcaaactgtttggaatcaaatggcaacagtgagaacaccattgaattttgattctagcaagcagagcttttgtcaattttctattgaccttctcggtggaggaattttagtggacaaaactggagattggatcacacttatacaaaattctccaattagtaacttgttgagagttgctgcttggaagaaagg

SEQ ID NO: 129255 - DNA, 169 bp, Glycine max
ctcgagcgctttgataagagaaaaaattgatccaagttatgaggatgtcttgaatcgtgtagtaacttatgcttctggacttccatttgctttggatgttataggttccaacttgtttgaaaaaactgtagcagaatgggaatctgctatggaacattatagaagaatt

SEQ ID NO: 129256 - DNA, 172 bp, Glycine max
gcgcctttcagaggcggaaggcccattcgggtggttacatttccgaataccattgtgcagattgaaccagacatgaattcaaggtttcagcttttgagtaccactaccaatggtgattttgttcaaggaaaagatctcgcaatggttaaagttaatgtagcatgtgctgctg

SEQ ID NO: 129257 - DNA, 171 bp, Glycine max
aattttgataaaccgcgatcacaggttgccgcaccttaaaaccggaaacaaaagcaatcgttacttgatttcaagaatctctcaaattcatcctacttcattgtgtacaatttcttaagggaaagaaaatcactctctgtgctggccacagacttcgtgaatcattttctt

SEQ ID NO: 129258 - DNA, 163 bp, Glycine max
ggcgaaccaaatatatcatacatatgttctagatactatagagcacctgagctcatatttggcgcaactgaatatacttcagccattgacatctggtctgttggatgtgttttagctgagctgctgcttggacagcctctgttccctggtgagagtggagttg

SEQ ID NO: 129259 - DNA, 253 bp, Glycine max
cttgtttcttgctttctttcttcaccatgtcacttgctgggaaaatcaccactgaaatcggggttcatgcaaccgctacaaagtggttcaacctcttcgcaacacaactccatcatgttcaaaacctaactgatagagtgcatggaaccaagctgcatcaaggtgaagactggcatcacaacgagacagtcaagcactggacttataccatagatggtaaggttacaacatgtctggagagtattgaatccat

SEQ ID NO: 129260 - DNA, 253 bp, Glycine max
gtaaaaactaatcactacgaaaacaagagatatcgaagatggctctgcccaaagctaaggagatcgtgtcgtccaattccgtcgtcgttttcagcaaaacctattgccctttctgcgtcgctgtgaagaagctcttcggtgacctcggtgtcaattacaaggccatcgaactcgacactgaatccgatggaaaagagctccaagcagcattagttgagtggacggaccagcgaaccgtgcctaatgtgtttat

SEQ ID NO: 129261 - DNA, 163 bp, Glycine max
gaaagcctcaaggatcaaattcctgctgttgacaagttgtattctactaaggttaataagtttgcaaaaattatgaaccttagacaaagtgttgttggtgatcttaaacttcttactgatgggaagttgtatgagggtaagcatattcctgtatctaatattg

SEQ ID NO: 129262 - DNA, 169 bp, Glycine max
acagaacatgagggatatgatccttttcttggtggaattcaaaaatatgccactcccatgatgcccctagatgaagaaattctttctaaggttgcacaagatatggttgaggaatggtttgattgtgttgatgaggaggattcctttgaggaagtttccttaagtgcag

SEQ ID NO: 129263 - DNA, 259 bp, Glycine max
cgcttagttgtcaagttggaatcaacccatactccatggaatggactggtttggccaatagattactgagtaagggcaacgatattctgtgttgcgattatgctagttttgatggtttgattaccaagcaagttatgagcaagatggcagaaatgataaacagtctttgtggtggtgatgaaaaattgatgcgtgaaaggacacacctgctgttggcttgttgttcaaggatggcaatttgtaagaaggatgtttggag

SEQ ID NO: 129264 - DNA, 242 bp, Glycine max
gtaaaaactaatcactacgaaaacaagagatatcgaagatggctctgcccaaagctaaggagatcgtgtcgtccaattccgtcgtcgttttcagcaaaacctattgccctttctgcgtcgatgtgaagaagctcttcggtgacctcggtgccaattacaaggcattggacttcgacactgaatccgatggaaaagagctccaagcagcattagttgagtggacggaccagcgaaccgtgcct

SEQ ID NO: 129265 - DNA, 165 bp, Glycine max
caattttctattgaccttctcggtggaggaattttagtggacaaaactggagattggatcacacttatacaaaattctccaattagtaacttgttgagagttgctgcttggaagaaaggctgtttaatggttaaaattgtgatgtctgggaatgcagcagtcaaa

SEQ ID NO: 129266 - DNA, 166 bp, Glycine max
attttgagattgctggtaatactcttatgccagctttttctgttccaggctactgccagatcttctgaaaatgcggaatcctctgcatgatctggaatttgtgttttcttttgcttgttcgtttgtttaattcaataaaggaaattaggcatgaccctcttgttga

SEQ ID NO: 129267 - DNA, 168 bp, Glycine max
ctgaaaatgcggaatcctctgcatgatctggaatttgtgttttctttcgtttgttcgtttgtttaattcaataaaggaaattagacatgaccctcttgttgagtatgctctgtctatttgaaaatttccacacctcttttaattgtcgtaatgatgtgtgaagtgtgt

SEQ ID NO: 129268 - DNA, 167 bp, Glycine max
tctaattctagataattttggtgcttgggagtccctaatgattaaatgaaccaagattttaccatgactgcaattttagagagacgcgagagcgaaagcctatggggtcgcttctgtaactggataaccagcaccgaaaatcgtctttacattggatggtttggtgt

SEQ ID NO: 129269 - DNA, 169 bp, Glycine max
tggcaatgttgcttcagcattcacaacttcaagtgtgcttgaggcccaaagtagaaagcccaacagatatgaagtttcccaatacagatatcgcaatgtgccaataaagcgcagagcatgggttgaaggccagatgtctttcgatcagtctgtagtagcaattatgtct

SEQ ID NO: 129270 - DNA, 167 bp, Glycine max
gaatttcttacagcttggtcaactcaggtgcgtcctgcaacaactctgttggctgatgggtgtccatatttgtatgctatggtgcatgatagttcagtgtctacaataccaggtgattttgtcattggtgttaagttgacaaccataaacaatatgtgtgcatatgg

SEQ ID NO: 129271 - DNA, 168 bp, Glycine max
gaaattttgataaaccgcgatcacaggttgccgcaccttaaaaccggaaacaaaagcaatcgttacttgatttcaagaatctctcaatttcttcctacttctttgtgtacgatttcttaagggaaagaaaatcactctctgtgctggccacagacttcgtgaatcatt

SEQ ID NO: 129272 - DNA, 161 bp, Glycine max
gttgccgcaccttaaaaccggaaacaaaagcaatcgttacttgatttcaagaatctctcaatttcttcctacttctttgtgtactgtttcttaagggaaagaaaatcactctctgtgctggccacagacttcgtgaatcattttcttttccacacaacata

SEQ ID NO: 129273 - DNA, 230 bp, Glycine max
gttgattcggatctagagtcttttttcactcttcagttctcgttgttgttcttcgctttcctgaaactagggttttcaatttcgattcattcgttaataattaaagatgtttgggagggcaccgaagaagagcgataatacgaggtactacgaaatcctcggcgtctcgaagaacgcttcgcaggatgatctgaagaaggcttacaagaaagccgccatcaagaatcacc

SEQ ID NO: 129274 - DNA, 247 bp, Glycine max
gaaagatgtttggagagttgaatgtggaatcccttctggatttccgctcacagttatttgtaatagcatttttaatgagatgctcattagatatagctatgaaaaattactgcgccaggctaaagctccaagtatgtttttacaatccttcaaaaattttgtttctttgtgtgtgtatggtgatgataacttaattagtgttcatgaatatgtcaagccttactttagtggttctaaattgaaaagc

SEQ ID NO: 129275 - DNA, 241 bp, Glycine max
attgggcctcattggtacaagtgtttttaacaaacagcaacagtacagagcatttcgatgcatgtaagtggacaaaatcggaaccacattcctgggaattgatcttcccaatagaggtatgtggtcctaataatggttttgaaatgtggagttctgagtgggcaaatcaaacttcatggcacttgagtttccttattgacaatcccaaacagtctacagtttttgatattctcttgggaat

SEQ ID NO: 129276 - DNA, 257 bp, Glycine max
cttcctcctctctccgcatcgctgcgttttccgaatcgaaaggtacgtaagtaacaatggtggaggccaagggtaggaaagaggaggtcgtcactcgagagttcaccatcaacctccacaaacgcttgcatggctgcacattcaagaagaaggctcctaaagcaattaaggagataaggaagtttgctcagaaagcgatggggacgaatgatgtgagagtggatgtgaagctgaacaaggctgtgtggagccagggg

SEQ ID NO: 129277 - DNA, 167 bp, Glycine max
attttgataaaccgcgatcacaggttgccgcaccttaaaaccggaaacaaaagcaatcgttacttgatttcaagaatttctcaatttcttcctacttctttgtgtacggtttcttaagggaaagaaaatcactctctgtgctggccacagacttcgtgaatcatttt

SEQ ID NO: 129278 - DNA, 255 bp, Glycine max
gcttcattaccaaagtcaactcgagtatactgtggccatgagtactcagtgaacaacttgcaatttgctctgacacttgagccagacaatttgaggatacaacaaaaattaacctgggctcggaatcaacgacaagctggccaagcaacaattccctcaaccattgaggatgagttggagaccaatccctttatgagggttgatctacctgagatccaggagagggtgggctgcaagtcacctgttgaagcatta

SEQ ID NO: 129279 - DNA, 247 bp, Glycine max
cgatattctgtgttgcgattatgctagttttgatggtttgattaccaagcaagttatgagcaagatggcagaaatgataaacagtctttgtggtggtgatgaaaaattgatgcgtgaaaggacacacctgctgttggcttgttgttcaagaatggcaatttgtaagaaagatgtttggagagttgaatgtggaatcccttctggatttccgctcacagttatttgtaatagcatttttaatgagatg

SEQ ID NO: 129280 - DNA, 164 bp, Glycine max
gtggtgccttatcgctgtggttatcatcttcttcttcctctttcttagatctcttctttctctacgccgcacgccgaaaccatggccggaaaaggagagggtcctgctatcggaatcgatctcggaaccacctactcttgcgtcggtgtgtggcaacatgaccg

SEQ ID NO: 129281 - DNA, 156 bp, Glycine max
tctgtcttctagtgcaagtgatttcagaactgcaatggtgagtaaaaatagcaagcctcaagctactgcaatgcatgtgggagctatagaaattatcattgatagtttcgcaagtgctgactgcaacatagttggtgcaatgctttgggttgatac

SEQ ID NO: 129282 - DNA, 165 bp, Glycine max
caaaattaacctctccgcttccctccgatccattcactccctccctcttaaaacctccttgcggatcaaatgctcccaaacagatgggaatggaagtcctgcaaagaggacagtgcttcatgatctttatgagaaagaagggcagagtccatggtatgataatct

SEQ ID NO: 129283 - DNA, 166 bp, Glycine max
ggaaaaagttgtattgaagttttcacaagaggaatttcttacagcttggtcaactcaggtgcgtcctgcaacaactctgttggctgatgggtgtccatatttgtatgctatggtgcatgatagttcagtgtctacaataccaggtgattttgtcattggggtaaat

SEQ ID NO: 129284 - DNA, 166 bp, Glycine max
gttgtctccgccttcttttatctctctctccactcccatatcgaaacaaagtcgttttgagttccgccgaaggaccgtaggttgcagcagctatggatttggcatccaatctcggtggcaagattgacaaagccgaagttctctctgccgttcagaagtatgagaa

SEQ ID NO: 129285 - DNA, 152 bp, Glycine max
cttcgtgggtagacttttctatttctgtcctttctttcactctcttcttctcactgatccgcattgccgttcaaagtggtcttatttgaaaaacactttggcgttggtgcaaatgtttgcttcattaatttcctctggaaacaacaggctca

SEQ ID NO: 129286 - DNA, 253 bp, Glycine max
ggtaaacctgcaaccaaaacttcaagcgttgctagacgtgtgagaggtgtccttacgcaggttgacaagcctagatttgtttctgcattttgtcaaacaaattgcggtgatgttagtccaaatgtacttggagctttttgtatagacactgaactaccttgtgacttcaatcatagtacatgtggaggaaagaatgaattatgctatggccgaggacctggttatccagatgaatttgaaagcacacgtatta

SEQ ID NO: 129287 - DNA, 256 bp, Glycine max
agccactgcatttctgcttgttttctctgaacatggtagtcacaaacacaaaccagttaggggaaaccattgattccacttatgataggaaagctgaaaagaaagcctttgatgattcaaaagctggtgttagaggtcttgtagagtccggagtgacgaagattcctcgcatgtttcatgctggcaagctggatgtcattgaaacctcacctagtcacaccaagttgagtatccccatcatagacctcaaggacat

SEQ ID NO: 129288 - DNA, 254 bp, Glycine max
cagggagacaagacagagcagtacaggttactaccaatggctaccaaggtttatattgtttattattctacatatggacatgttgagaagctagctagagagatagaaaaaggggctgcttcggtggatggagtagaagcaaaactgtggcaggtacctgaaaccttgcctgaagaggtccttgcaaagttgggagcacctccaaagagtgatgctccaattattactcccaatgagcttcctgaggctgatgg

SEQ ID NO: 129289 - DNA, 251 bp, Glycine max
tggaaactcccaaggaatggcaactggatctaccttgtgacaaaattcctagtgtcttgactacaactgatgagagattggtaggcacagaacatgagggatatgatccttttcttggtggaattcaaaaatatgccactcccatgatgcccctagatgaagaaattctttctaaagttgcacaagatatggttgaggaatggtttgattgtgttgatgaggaggattcctttgagggagtttctttaagt

SEQ ID NO: 129290 - DNA, 243 bp, Glycine max
cggacatcgtgactttatcaagaacatgattactggtacctcccaggctgattgtgctgtccttatcattgactccaccactggtggttttgaagctggtatttctaaggatggacagactcgtgagcatgctcttcttgctttcacccttggtgtgaagcagatgatctgctgctgtaacaagatggatgccactaccccgaagtactctaaggctaggtatgatgaaattgtgaaggaagt

SEQ ID NO: 129291 - DNA, 265 bp, Glycine max
ccagacatgaattcaaggtttcagcttttgagtaccactaccaatggtgattttgttcaaggaaaagatctcgcaatggttaaagttaatgtagcatgtgctgctgttggcttgacatcaagttacactccaacttcattgttggaatctggtttgcaaaaagacagagggttaattgtggagtattttggaaggatgttgtacgttgctcacaacgttaatcagccccaagagaaagatttgttggagggaaatttttcctttg

SEQ ID NO: 129292 - DNA, 259 bp, Glycine max
gccgaaggttcatccaatctccgaaggccttcaccggattgcaaccatgtcgaggagaaaggttagagagccaaaggaggaaaacgtgactctgggcccagctgttagagatggtgaacatgtttttggagtcgctcgcatctttgcctccttcaatgacaccttcattcatgtcactgatctgtctgggagggaaacacttgtccgcatcactggcgggatgaaggttaaagctgacagagatgaatcatctccatat

SEQ ID NO: 129293 - DNA, 262 bp, Glycine max
atcgagccgcttttaaaagagaaaaaattgatccaagttatgaggatgtcttgaatcgtgtagtaacttatgcttctggccttccattggctttggaagttataggttccaacttgtttgaaaaaactgtagcagaatgggaatctgctatggaacattataaaagaattcccagtgatgaaatccaagagattctaaaagtaagctttgatgctttgggggaagaacaaaagaatgtttttcttgacattgcttgttgctt

SEQ ID NO: 129294 - DNA, 261 bp, Glycine max
aacaaattgttggtttccatgttgctggaagcaaaggaagactgggatatgcttcattgataccatatgttgagccagttgtgcaagctcaaagtgctgaagtttacttcgacttcttccctgtggaggttgatagtcaagagggagttgctcacattggtgaattgaaatctggtgtctatgttccactgcctacaaaaactaatttggtggaaactcccaaggaatggcaactggatctaccttgtgacaaaattccta

SEQ ID NO: 129295 - DNA, 260 bp, Glycine max
gcaaaatggtggtaagcaaacctctgtatgtgactctagcccaaaggaaagaagataggagagctagactgcaggctcagtttgctcaaatgcgacctgttggaatgccaccatctgttggtcctcgtgtgccaatgtatcccccaggtggtccaggtattggtcaacaattattttatagccaaggccctcctgctatcattccttcccagcctggatttggctatcaacaacaacttatgcctggtatgaggccaggt

SEQ ID NO: 129296 - DNA, 251 bp, Glycine max
ctctgttacgtcgtcatctcatagccaccgccacaacccttcgagtttcgaaaaccctaaccccacaaccccctctcacaaactcactctttttcattgtttgataattcgaacttcctccatctttcccgaagtttgctatcatggctgggttggtgccagaacgatcacaatttgatgctcgtcaatatgatgctaagatgaatgagttacttggaactgatgggcaagatttttttacttcttatgac

SEQ ID NO: 129297 - DNA, 263 bp, Glycine max
caacaactgtgaaatctgtggaatcaaaggggcaagctgagaagtgtgcctgagagaaagaggaagaaccagtatcgcggaatccgccagcgtccatggggaaagtgggctgctgagattcgcgacccaagaaagggggttcgtgtttggcttggaactttcagcactgctgaagaagctgcaagagcttacgatgctgaagcaaggaggatccgtggcaagaaagccaaggtgaatttccctgatgagccttcaggcgctgc

SEQ ID NO: 129298 - DNA, 264 bp, Glycine max
attatgggaacaaccttctggaaactcttttcctttcttagagatgctggtaatgggggagtcaatgttggtagtgttgcttcagcattcacaacttcaagtgtgcttgaggcccaaagtagagagcccaacagctatgaggtttcccagtacagatatcgcaatgtgccaataaagcgcagagcatgggttgaaggccagatgtctttcgatcagtctgtagtagcacttatgtctagatgcaaagccagcatgagagtggga

SEQ ID NO: 129299 - DNA, 256 bp, Glycine max
acagaagttacagattggccagtaccactgaaaatcatttctggaaccattcttgcaacaattttgggaacaaccttctggaaactcttttcctttcttagagatgctggtaatgggggagtttttgttggtaatgttgcttcagcattcacaacttcaagtgtgcttgaggcccaaagtagaaagcccaacagatatgaagtttcccaatacagatatcgcaatgtgccaataaagcgcagagcatgggttgaag

SEQ ID NO: 129300 - DNA, 257 bp, Glycine max
ggctcagatggaaacaaatttgtttaaattgtctcttgatgatgttgaaactcctaaaggttccatgttggatcttaaaatttctcaatctaaaattgcacttcccaaaaacacagttggaggaaccattctgcgtagtgatctattggcaaattttttgacagagggcaattttagagcaagtgttgatttgcagcgcactcatcgtattaaaggaatgattaaaatggtggccacagttggtattcctgagaata

SEQ ID NO: 129301 - DNA, 258 bp, Glycine max
atgatagttcagtgtctacaataccaggtgattttgtcattggtgttaagttggcaactataaacaatatgtgtgcatatgggctcaatcctggtatttcaggttctcgtcttttgggcaccattcctcagtccatttcacagcaaactgtttggaatcaaatggcaacagtgagaacaccattgaattttgatcctagcaagcagagcttttgtcaattttctattgaccttctcggtggaggaattttagtggaca

SEQ ID NO: 129302 - DNA, 259 bp, Glycine max
gaagtttttaaattttgtgaggttcattatgaagaaaagggacaagcttagttgtcaagttggaatcaacccatactccatggaatggactggtttggccaatagattactgagtaagggcaacgatattctgtgttgcgattatgctagttttgatggtttgattaccaagcaagttatgagcaagatggcagaaatgataaacagtctttgtggtggtgatgaaaaattgatgcgtgaaaggacacatctgctgttg

SEQ ID NO: 129303 - DNA, 258 bp, Glycine max
cttcctcctctctccgcatcgctgcgttttccgaatcgaaaggtacgtaagtaacaatggtggaggccaagggtaggaaagaggaggtcgtcactcgagagttcaccatcaacctccacaaacgcttgcatggctgcacattcaagaagaaggctcctaaagcaattaaggagataaggaagtttgctcagaaagcgatggggacgaatgatgtgagagtggatgtgaagctgaacaaggctgtgtggagccagggga

SEQ ID NO: 129304 - DNA, 259 bp, Glycine max
cccagctgagagcaagatcttggtgaatgcatggtggctggccaacaaccctgcacactggaagaagccagaggagttccggcctgagaggttcttcgaggaggagtcgcttgttgaagccaatggcaatgactttaggtaccttccctttggtgttggcagaagaagctgccctggaatcattcttgcattgccaattcttggcatcactttgggacgtttggtccaaaactttgagctcttgcctccccctggccag

SEQ ID NO: 129305 - DNA, 264 bp, Glycine max
tgcacccagccgcagcagcaagtgatcgaagcgaaaagagagtaatcagcagagaaattcatcgtcgtagttatgggtaaagttcacggatcacttgcacgtgccggtaaggttagaggccaaaccccaaaagtggccaagcaggataagaagaagaagccacgtggccgcgctcacaagaggatgcagtataatcgccgattcgtcaccgccgtggtgggattcggcaagaagaggggacctaactcgtctgagaagtgaggc

SEQ ID NO: 129306 - DNA, 154 bp, Glycine max
gaaatgttgataaaccgcgatcacaggttgccgcaccttaaaaccggaaacaaaagcaatcgttacttgatttcaagagtctctcaatttcttcctacttctttgtgtacggtttcttaagggaaagaaaatcactctctgtgctggccacaga

SEQ ID NO: 129307 - DNA, 236 bp, Glycine max
cgagagaaattttgataaaccgcgatcacaggttgccgcaccttaaaaccggaaacaaaagcaatcgttacttgatttcaagaatctctcaatttcttcctacttctttgtgtacgatttcttaagggaaagaaaatcactctctgtgctggtcacagacttcgtgaatcattttcttttccacacaacatacgaatgtgctaaacggggatgtgctgtataggacttcgtgccag

SEQ ID NO: 129308 - DNA, 257 bp, Glycine max
cccagctgagagcaagatcttggtgaatgcatggtggctggccaacaaccctgcacactggaagaagccagaggagttccggcctgagaggttcttcgaggaggagtcgcttgttgaagccaatggcaatgactttaggtaccttccctttggtgttggcagaagaagctgccctggaatcattcttgcattgccaattcttggcatcactttgggacgtttggtccaaaactttgagctcttgcctccccctggcc

SEQ ID NO: 129309 - DNA, 256 bp, Glycine max
gtcacaacttcattatgtttcgtgtaataatctggaaatgcaagaagcttatcttgtcaatctcgtaaatgtgttacgagaattgtatctgcacagtccagaggaagctcgccaactgagaaggaaagctctctctcgtattgaatggctgcaaaaagctgatgtgcctaccatagcacagattgaagagttccattcgatgcagaggatgatgaatgctcctgattcagatgataatattgatctactgttgagc

SEQ ID NO: 129310 - DNA, 256 bp, Glycine max
caagaacaattactttagtgttttctcttgtcacataaaagtcatctaagaagaattacaagatcatcatcacaataacaagatgagttcaggaattagagcatggagtgtggcagcaagtgttggaattgtggaggccttgaaagaccaaggcatatgcaggtggaatcatgccttaagatcagctcaacaccatctcaaaaaccatgttggctcattctctcaggctaacaagctttcttcttctgctatgata

SEQ ID NO: 129311 - DNA, 257 bp, Glycine max
ctttccaatacaataatcactaactgaatattcgatcggagatgtctgccgccgccgaagaagctaacgctcccgccgtcgaaaagccggttgaggaggtgaaggcgccgaaccccgcgaaggagaagaaacctaaggctccgaaggaaaagaagccaaaacaggccaaaacagcttcacatcctccatattttcagatgattaaggaggctttgatcgctttgaacgagaaaggaggatcgagtccttatgcgata

SEQ ID NO: 129312 - DNA, 256 bp, Glycine max
gatgacaccatcaattttgaggcttttccccacaagctggtgcagtttggagagattcaggaaaaagttgtgttgaaattttcacaagaggaatttcttacagcttggtcaactcaggtgcgtcctgcaacaactctgttggctgatgggtgtccatatttgtatgctatggtgcatgatagttcagtgtctacaataccaggtgattttgtcattggtgttaagttggcaactataaacaatatgtgtgcatatg

SEQ ID NO: 129313 - DNA, 256 bp, Glycine max
aagctttctagctggtcataatatcaccattactgatggtattgacaaaactagtgcaactttgcaatttagaaagttagcagattgtgattttctcaagagaaactttaggcagatgtctaatgttttgtgggtggctcctgaggacaaggcgagtttatggtcacaacttcattatgtttcatgtaataatctggaaatgcaagaagcttatcttgtcaatctcgtaaatgtgttacgagaattgtatttgcac

SEQ ID NO: 129314 - DNA, 260 bp, Glycine max
cagaaaacagcatcgaacccgtcgtagcagaaaaacttgtcaccatggtttcttccgacaaggatccacgagaggatgtccttcaagcctggtacatggatgatagtgatgaagatcaaagactcccccaccacaaagaacccaaggagtttgtctcgttggaccaacttgctgaacttggagtccttagctggaaactagatgctgataaccatgaaaatgatccagagctgaagaagattcgtgaagagcgtggttac

SEQ ID NO: 129315 - DNA, 261 bp, Glycine max
cgcgaggctggtcataatatcaccattactgatggtattgacaaaactagtgcaactttgcaatttagaaagttagcagattgtgattttctcaagagaaactttaagcagatgtctaatgttttgtgggtggctcctgaggataaggcgagtttatggtcacaacttcattatgtttcgtgtaataatctggaaatgcaagaagcttatcttgtcaatctcgtaaatgtgttacgagaattgtatttgcacagtccagag

SEQ ID NO: 129316 - DNA, 254 bp, Glycine max
cttttgggtaccactaccaatggtgattttgttcaaggaaaagatctcgcaatggttaaagttaatgtagcatgtgctgctgttggcttgacatcaagttacgctccaactccattgttggaatctggtttgcaaaaagacagagggttaattgtggagtactttggaaggatgtcttacgttgctcataacgttaatcagccccaagagaaagatttgttggagggaaatttttcctttgatattaaatctcg

SEQ ID NO: 129317 - DNA, 255 bp, Glycine max
tgatcaaacccgcatgtggaaggttggggagcgtgtccgatctacaaggccagcaggtgatcaaggcccattatatcctttcactgctggtgtctttgtggcattgatgatggcccagattgaaatcctgaggaagaaagggcattcctactctgaaatcattaatgagagtgtcattgaggctgttgactctttgaatcctttcatgcatgctcgtggtgtttctttcatggttgataactgttcaaccacggc

SEQ ID NO: 129318 - DNA, 179 bp, Glycine max
taggaaattttgataaaccgcgatcacaggttgccgcaccttaaaaccggaaacaaaagcaatcgttacttgatttcaagaatctctcaatttcttcctacttctttgtgtacggtttcttaagggaaagaaaatcactctctgtgctggccacagacttcgtgaatcattttcttttc

SEQ ID NO: 129319 - DNA, 259 bp, Glycine max
gagtttctcttctctgtctaaggggtgccctgagatcacattgaacaatggtgaaggctgtggccgttcttggcagcagtgagggtgtcactggaactattcacttcgttcaggagggaagtggtccaaccaccgtaactggatctcttgctggtcttaagcctggtctccatggtttccatgtccatgccttgggggacactaccgatggttgcgtctcaactggatcacatttcaatcctaataacaaggagcatgg

SEQ ID NO: 129320 - DNA, 254 bp, Glycine max
aatatgtcaagccttactttagtggttctaaattgaaaagctttctagctggtcataatatcaccattactgatggtattgacaaaactagtgcaactttgcaatttagaaagttagcagattgtgattttctcaagagaaactttaggcagatgtctaatgttttgtgggtggctcctgaggacaaggcgagtttatggtcacaacttcattatgtttcatgtaataatctggaaatgcaagaagcttatctt

SEQ ID NO: 129321 - DNA, 255 bp, Glycine max
ggccgttgaggctaccttttggccaatcctcattacaactgatccaattcgatcttcagtattcagtgatctgcaaagaccttgttttatattatatacaagagttttcttgccttgtgtggagtgttattcaatcactttgagtgtgtggtgtggcttccaattgatgtaacgagtgtttcctttcttatttcctttttccacagaattgtgagagccagttgatgtctttgtatgtcacttcatcaataaatc

SEQ ID NO: 129322 - DNA, 252 bp, Glycine max
gatagtcaagagggagttgctcacattggtgaattgaaatctggtgtctatgttccactgcctacaaaaactaatttggtggaaactcccaaggaatggcaactggatctaccttgtgacaaaattcctagtgtcttgactacaactgatgagagattggtaggcacagaacatgagggatatgatccttttcctggtggaattcaaaaatatgccactcccatgatgcccctagatgaagaattctttcta

SEQ ID NO: 129323 - DNA, 260 bp, Glycine max
gaatttcttacagcttggtcaactcaggtgcgtcctgcaacaactctgttggctgatgggtgtccatatttgtatgctatggtgcatgatagttcagtgtctacaataccaggtgattttgtcattggtgttaagttgacaaccataaacaatatgtgtgcatatgggctcaatcctggtatttcaggttctcgtcttttgggcaccattcctcagtctatttcacagcaaactgtttggaatcaaatggcaacagtgag

SEQ ID NO: 129324 - DNA, 258 bp, Glycine max
ttaaattctgataaaccgctaccatcttggtaaacatgtttgctatgtccagtttccgcagaggtttgacgggattgataggaatgatcgatatgccaatcgtaatacagttttctttgatataaacttgagaggtttggatggcattcaaggtcctgtttatgtgggtactggatgtgtcttcaacaggacagctttatatggttatgaacctcctcttaaacccaagcataaaaagcctgggttgttatcatcact

SEQ ID NO: 129325 - DNA, 255 bp, Glycine max
gtccaagccgacgtgtccgatccggctcaggtgaagtcgctcttcgactcggccgagcgcgccttcgactcgccgatccacatccttgtcaactcggcgggcgtgatcgacggcacgtatccctccgtcgccgacaccaccgtggagtcctatcgaccgcactttcgcggtgaacgcgcgtggcgccttcgcgtgcgccagggaggccgcgaaccgcctcaagcgcgggtgcggagggcggatcattctactgac

SEQ ID NO: 129326 - DNA, 254 bp, Glycine max
actctctctctctctacaacaagaatcgatctactcatttcagcccatcagcatggcgaaggagaagaaaaacttgtccaacaagaacaagaagccaagcaatgcagacgaggttcacttccgcggagtccggaagcgcccctggggccgctatgccgccgagatccgcgaccctggaaagaagacccgcgtctggctcggcaccttcgacaccgccgaggatgccgcccgcgcctacgacgtcgccgcccgaa

SEQ ID NO: 129327 - DNA, 253 bp, Glycine max
actctctctctctctacaacaagaattcatctattcatttcagcccatcagcatggcgaaggagaagaaaaacttgtccaacaagaacaagaagccaagcaatgcagacgaggttcacttccgcggagtccggaagcgcccctggggccgctatgccgccgagatccgcgaccctggaaagaagacccgcgtctggctcggcaccttcgacaccgccgaggatgccgcccgcgcctacgacgtcgccgcccga

SEQ ID NO: 129328 - DNA, 254 bp, Glycine max
gttgaaactcctaaaggttccatgttggatcttaaaatttctcaatctaaaattgcacttcccaaaaacacagttggaggaactattctgcgtagtgatctattggcaaattttttgacagagggcaattttagagcaagtgttgatttgcagcgcactcatcgtattaaaggaatgattaaaatggtggccacagttggtattcctgagaatacaggcatagcattggcctgtgctatgaatagatcttttag

SEQ ID NO: 129329 - DNA, 253 bp, Glycine max
cagaactggaggaagcgaaaatttcttccattgctacaagtgtggttgttgctactcaactcttctgaaaaacagtcacccttgtgtagaaggagcaatgcatcatgattgccctgtaagttttgagtatttgtttgaatcgagaaacgatgtcactgttatgccatgtggacatacgatccataagagctgcctgaatgagatgagagaacatttccagtatgcatgccctctctgctcaaagtcagtctgt

SEQ ID NO: 129330 - DNA, 254 bp, Glycine max
  unsure (1)..(254): unsure at all n locations
atggttttgaaatgtggagttctgagtgggcaatgaanattcatggcatttgagtttccttattgacaatcccaaacagtctacagtttttgatattctcttgggaatttctcaagattttgagattgctggtaatactcttatgccagctttttctgttccacaggctactgccagatcttctgaaaatgcggaatcctctgcatgatctggaatttgtgttttcttttgcttgttcgtttgtttaattcaat

SEQ ID NO: 129331 - DNA, 249 bp, Glycine max
tctagctggtcataatatcaccattactgatggtattgacaaaactagtgcaactttgcaatttagaaagttagcagattgtgattttctcaagagaaactttaagcagatgtctaatgttttgtgggtggctcctgaggataaggcgagtttatggtcacaacttcattatgtttcgtgtaatagtctggaaatgcaagaagcttatcttgtcaatctcgtaaatgtgttacgagaattgtatttgca

SEQ ID NO: 129332 - DNA, 251 bp, Glycine max
catagcatttggaaatttggctgatgacaccatcaattttgaggcttttccccacaagctggtgcagtttggagagattcaggaaaaagttgtattgaaattttcacaagaggaatttcttacagcttggtcaactcaggtgcgtcctgcaacaactctgttggctgatgggtgtccatatttgtatgctatggtgcatgatagttcagtgtctacaataccaggtgattttgtcattggtgttaagttga

SEQ ID NO: 129333 - DNA, 251 bp, Glycine max
cggctcgagctcgaccgttccattctctctgtgtatttccctacctctcccttcaagatgcagctctacgtcaagaccctcaccggcaagaccatcacccttgaggtggaaagctctgacaccatcgacaacgtcaaggccaagatccaggacaaggaaggaatccccccggaccagcaacgtctcattttcgccggaaagcaacttgaggacggccgtacccttgctgactacaacattcagaaggagag

SEQ ID NO: 129334 - DNA, 249 bp, Glycine max
cggctcgagcggctcgagggtgtccatatttgtatgctatggtgcatgatagttcagtgtctacaataccaagtgattttgtcattggtgttaagttgacaaccataaacaatatgtgtgcatatgggctcaatcctggtatttcaggttctcgtcttttgggcaccattcttcagtccatttcacagcaaactgtttggaatcaaatggcaacagtgagaacaccattgaattttgattccagcaagc

SEQ ID NO: 129335 - DNA, 250 bp, Glycine max
ctaaattgaaaagctttctagctggtcataatatcaccattactgatggtattgacaaaactagtgcaactttgcaatttagaaagttagcagattgtgattttctcaagagaaactttaagcagatgtctaatgttttgtgggtggctcctgaggataaggcgagtttatggtcacaacttcattatgtttcgtgtaataatctggaaatgcaagaagcttatcttgtcaatctcgtaaatgtgttacg

SEQ ID NO: 129336 - DNA, 249 bp, Glycine max
attgggcctcattggtacaagtgtttttaacaaacagcaacagtacagagcatttcgatgcatgtaagtggacaaaatcggaaccacattcctgggaattgatcttcccaatagaggtatgtggtcctaataatggttttgaaatgtggagttctgagtgggcaaatcaaacttcatggcacttgagtttccttattgacaatcccaaacagtctacagtttttgatattctcttgggaatttctcaag

SEQ ID NO: 129337 - DNA, 250 bp, Glycine max
cctcagtctatttcacagcaaactgtttggaatcaaatggcaacagtgagaacaccattgaattttgattctagcaagcagagcttttgtcaattttctattgaccttctcggtggaggaattttagtggacaaaactggagattggatcacacttatacaaaattctccaattagtaacttgttgagagttgctgcttggaagaaaggctgtttaatggttaagattgtgatgtctgggaatgcagcag

SEQ ID NO: 129338 - DNA, 249 bp, Glycine max
cttttctatttctctcctttctttcactctcttcttctcagtgatccgcattgccgttcaaagtggtcttatttgaaaaacacttgggcgttggtgcaaatgtttgcttcgttaattttctctggggacaacaggctcactgagaaaacaatttttacttgcagagatttggacatcttggttgtttattatacaatagcaactcaatttagaaaatttctaccgcattacattaggtggcatctgtat

SEQ ID NO: 129339 - DNA, 250 bp, Glycine max
cattcctcagtccatttcacagcaaactgtttggaatcaaatggcaacagtgagaacaccattgaattttgattctagcaagcagagcttttgtcaattttctattgaccttctcggtggaggaattttagtggacaaaactggagattggatcacacttatacaaaattctccaattagtaacttgttgagagttgctgcttggaagaaaggctgtttaatggttaagattgtgatgtctgggaatgca

SEQ ID NO: 129340 - DNA, 254 bp, Glycine max
cggctcgagcggctcgaggcttacaacaagctaattgttgaacttgagaaaagtgttcctacattggttggtattgaatgtcccaaggatgagaaacttcctcgtcgcaaaatttttgacaaacctaagacgcgctgcttcactattctccctatggagtttaatcttgtggtccgtcagaagtttttaaattttgtgaggttcattatgaagaaaagggacaagcttagttgtcaagttggaatcaacccata

SEQ ID NO: 129341 - DNA, 258 bp, Glycine max
cttaccttcgcatatgaatgagcagcacatcttgaacgctgtcaggattgagaaggatgtagatggttttcatccgttaaatattggtcgtcttgccatgcgtggaagagaacctctgtttgttccttgtacaccaaagggatgcatagagctactgcacagatacaatgtttctatccaaggaaagagggctgttgtgattgtccggagcaatattgttggaatgccagctgctctcttgcctccaagggaagatgc

SEQ ID NO: 129342 - DNA, 274 bp, Glycine max
cttatcttgtcaatctcgtaaatgtgttacgagaattgtatttgcacagtccagaggaagctcgccaattgagaaggaaagctctctctcgtattgaatggctgcaaaaagctgatgtgcctaccatagcacagattgaagagttccattcgatgtcaaggatgatgaaatgcctcctgatctcaaatggataaatattggatctaactgtatgagcaattgatttggttggggtttagacaaggagcagggtaacagcttattccaaaacaag

SEQ ID NO: 129343 - DNA, 201 bp, Glycine max
aattaaacaaacgaacaaacgaaattagacatgaccctcttgttgagtatgctctgtctatttgaaaatttccacacctcttttaattgtcgtaatgatgtgtgaagtgtgtgttattttaaaaaaaaaaaaaaaaaaaaaaaaaaaaaaaaaaaaaaaaaaaaaaaaaaaaaaaaaaaaaaaaaaaaaatggggtgcccc

SEQ ID NO: 129344 - DNA, 257 bp, Glycine max
cttaattagtgttcatgaatatgtcaagccttactttagtggttctaaattgaaaagctttctagctggtcataatatcaccattactgatggtattgacaaaactagtgcaactttgcaatttagaaagttagcagattgtgattttctcaagagaaactttaggcagatgtctaatgttttgtgggtggctcctgaggacaaggcgagtttatggtcacaacttcattatgtttcatgtaataatctggaaatgc

SEQ ID NO: 129345 - DNA, 258 bp, Glycine max
cacttttgcttccttaacctattttgttatcctcaattttcaatggctcaatcccattctggaaaaacctcttccatgacttcaatactcctcctgtttatgcttcttatcagtaatacaggcacaacaggtgcacaatctggtgtatgctatggaagagttggcaacaatctgccatcgccacaagaagtagtttccctttttaaacagtacggcttccaaaggatgagaatctatgatcgaaaccatgaagtcctc

SEQ ID NO: 129346 - DNA, 256 bp, Glycine max
caagcagagcttttgtcaattttctattgaccttctcggtggaggaattttagtggacaaaactggagattggatcacacttatacaaaattctccaattagtaacttgttgagagttgctgcttggaagaaaggctgtttaatggttaaaattgtgatgtctgggaatgcagcagtccataggagtgattgggcctcattggtacaagtgtttttaacaaacagcaacagtacagagcatttcgatgcatgtaag

SEQ ID NO: 129347 - DNA, 253 bp, Glycine max
tgacaccatcaattttgaggcttttccccacaagctggtacagtttggagagattcaggaaaaagttgtattgaaattttcacaagaggaatttcttacagcttggtcaacccaggtgcgtcctgcaacaactctgttggctgatgggtgtccatatttgtatgctatggtgcatgatagttcagtgtctacaataccaggtgattttgtcattggtgttaagttgacaaccataaacaatatgtgtgcatat

SEQ ID NO: 129348 - DNA, 255 bp, Glycine max
tagcagatgtctaatgttttgtgggtggctcctgaggacaaggcgagtttatggtcacaacttcattatgtttcgtgtaataatctggaaatgcaagaagcttatcttgtcaatctcgtaaatgtgttacgagaattgtatttgcacagtccagaggaagctcgccaattgagaaggaaagctctctctcgtattgaatggctgcaaaaagctgatgtgcctaccatagcacagattgaagagttccattcgatg

SEQ ID NO: 129349 - DNA, 253 bp, Glycine max
gaaattggtaaacccaaaatattagcatagacataaattaagaaatcaaagagacagaaagttgagagagaagtgttcacgtctttgagaaatgggtgcttcggcatcggtcacagaaaaatccatccatgaattcatggtcaaggatgctaagggcagagacgtgaacctcagcacctacaaagggaaggttcttcttgtagttaacgtcgcttcaaaatgtggatttacaaattccaattacacccagtta

SEQ ID NO: 129350 - DNA, 255 bp, Glycine max
cttgactacaactgatgagagattggtaggcacagaacatgagggctatgatccttttcttggtggaattcaaaaatatgccactcccatgatgcccctagatgaagaaattctttctaaagttgcacaagatatggttgaggaatggtttgattgtgttgatgaggaggattcctttgaggaagtttctttaagtgcagcacttaatggtgttgagggtttggactatatggaaagaattcctcttgccacatc

SEQ ID NO: 129351 - DNA, 254 bp, Glycine max
  unsure (1)..(254): unsure at all n locations
atttttaatgagatgctcattagatctagctatgagagattactgcgccaggctaaagctccatgtacgtttttacaatccttcaaaaattttgtttctttgtgtgtgtatggtgatgataacttagttagtgttcatgaatatgtctagccatagcttagtggttctaaattgtaaagctttctagcttgtactggtatcaccagnactgatggtanngacaaaacnagngcaagcttgcaatttagaaagtt

SEQ ID NO: 129352 - DNA, 245 bp, Glycine max
tctcgagccgattcggctcgagatttcattgtgatatcatttgattcactggatggactaccactccaatgcaggatgtgcaggttacaattgattggtttatttcctctcaggaatgtgttcccaggacttattgtgttttaaatccacaaaatccttttgttttgaataggtggatggggaaactgactttcccccagggcacttcccgaagtgttaagagaatgcctctttctataggggga

SEQ ID NO: 129353 - DNA, 252 bp, Glycine max
gtcaagccttactttagtggttctaaattgaaaagctttctagctggtcataatatcaccattactgatggtattgacaaaactagtgcaactttgcaatttagaaagttagcagattgcgattttctcaagagaaactttaagcagatgtctaatgttttgtgggtggctcctgaggacaaggcgagtttatggtcactccttcattatgtttcgtgtaataatctggaaatgcaagaagcttatcttgtc

SEQ ID NO: 129354 - DNA, 231 bp, Glycine max
cacatagtagctattatactctctagagtaattgcggaatctgctagaattttctaataatggcgaaagacgttgagcaggtcacagagcaaggtgaatactctgataaggactaccatgaccctcctccggcaccgttgatcgacccagatgagctcacaaagtggtccttgtacagagccgccatagctgagttcatagcaatactcctttttctttacattcacgtgt

SEQ ID NO: 129355 - DNA, 250 bp, Glycine max
cactaactgcgactggagtgaacacgtttctctactataatagtatgatctctatcttcatgagcattccgtcatttggccgattactcgatcgatattgcggcttgtccgtactagacggtacagatttgagaggttcaggtccaatttgtagtgagagtctcacaagattaatgtcgtgcagcgtggacatctcaggtgcgtactgggacacctctgttggatgatggatgtccatctttgtatgcta

SEQ ID NO: 129356 - DNA, 254 bp, Glycine max
gagaaattgagtttccgagataaccagttttctctttgattcatcaatggcaactgcgaggaccgtgaaggatgtttcgcctcacgattttgtgaaggcttatgcttcccacctcaagcgttccggcaagatggagcttcctgagtggaccgatattgtaaaaacagcaaaatttaaggagttggctccatatgatcctgactggtactacattagggctgcctcaatggcaagaaagatctatttgagaggtg

SEQ ID NO: 129357 - DNA, 260 bp, Glycine max
gctgttggtctttgggcaggtcttattattggatttgtaactgagtactatactagcaatgcatatagttaggtgcaagatgttgcagactcctgcaggactggtgctgcaactaatgttatatttggccttgccttgggatacaagtctgttattattccaatcttttgctattgccattagtatttttgttagtttcacctttgctgccatgtatggtattgctgttgctgcgcttggcatgctgagtaccattgcca

SEQ ID NO: 129358 - DNA, 250 bp, Glycine max
ctttttaacacggaaaaaggattcctttactctgtcacttaaaaataaacgagagacaaataccacatcaggtgtcgatggagatatctgtgatcccttttctaagttcactcttatatcagatgtagatctctcagtgaagcatgcaatatccgatctagatggttggctagccagagctgattcaggtcttgttgatgaactggagaagcttccttatgtttgtgctgcaatgcaacaattagaacag

SEQ ID NO: 129359 - DNA, 249 bp, Glycine max
acgacttcttgagaactgtaagagtctcaaatatctggttgatgagtgtccttttgcatttgtgaactagtatgtaatattttattcacttaaataaagcgcattactatgtgcaatgagtgtgtttaaatataaaaaaaaaaaaaaaaaaaaaaaaaaaaaaaaaaaaaaaaaaaagaaaaaacaaaaaaaaacaaaaaaaaaaaaaggtgaaagtgtgaaataaaagggggggggtccccttttttt

SEQ ID NO: 129360 - DNA, 251 bp, Glycine max
tgtgctttcacgcaaaaatggtgataaaggcaaaagacgacttgtttctggggatggtgaagagatgacattgattccgggaaccagtgttgaagaggcttacaacaagctaatagttgcacttgagaaaagtgttcctacattggttggcattgaatgtcacaaggatgagaaacttcctcgtcgcaaaatttttgacaaacctaagacgcgctgcttcactaatctcctaatgggatttaaccttgggg

SEQ ID NO: 129361 - DNA, 251 bp, Glycine max
acaatttgttagtggaaaaaccttcaaatatgatatagttggtgctggttcacattcttcagaagatttatctgaaaaggaagatcaagagaaacccaaaaagattgatgccagattgagacaaagaatagatcctcaatacaatgaggttcacgctcagatggaaacaaatttgtttaaattgtctcttgatgatgttgaaactcctaaaggttccatgttggatcttaagatttctcaatctaaaattg

SEQ ID NO: 129362 - DNA, 250 bp, Glycine max
ctttgaagtttctaagatgacttctccctacattaaatgtacagtctctttcttcatagcatttggaaatttggctgatgacaccatcaattttgaggcttttccccacaagctggtacagtttggagagattcaggaaaaagttgtattgaaattttcacaagaggaatttcttacagcttggtcaacctcaggtgcgtcctgcaacaactctgttggctgatgggtgtccatatttgtatgctatggt

SEQ ID NO: 129363 - DNA, 246 bp, Glycine max
gttggtgcttcccggtctgaggagttaattattagaatgttgtgtccctctgacaagattggacgtgtcattgggaagggtggtagtacaattaaaagtatgaggcaggctagtggtgcccatattgaggttgatgattccaaggctaattttgatgagtgtttaatcattataactacaacagagtcgccaagtgatctgaagtccatggcagttgaagctgttctgctgatgcaagggaagata

SEQ ID NO: 129364 - DNA, 214 bp, Glycine max
cagagtagagcagcagagaagagagaaaacggcactgcagccgtagaaggaaaaccgaccatggtgcacgtctccttttacaggaactatggtaagacgtttaagaagccccgccgtccgtacgagaaggagcgtctagacgcggagctgaagctggtgggggagtacgggctgcggtgcaagagggagctgtggagggtgcagtacgcgctca

SEQ ID NO: 129365 - DNA, 248 bp, Glycine max
aaattcctagtgtcttgactacaactgatgaaagattggtaggcacagaacatgagggatatgatccttttcttggtggaattcaaaaatatgccactcccatgatgcccctagatgaagaaattctttctaaggttgcacaagatatggttgaggaatggtttgattgtgttgatgaggaggattcctgcgaggaagtttctttgagtgcagcactcaatggtgttgagggtttggactatatggaa

SEQ ID NO: 129366 - DNA, 253 bp, Glycine max
ccaatagattactgagtaagggcaatgatattctgtgttgcgattatgctagttttgatggtttgattaccaagctggttatgagcaagatggcagaaatgataaacagtctttgtggtggtgatgaaaaattgatgcgtgaaaggacacacctgctgttggcttgttgttcaaggatggcaatttgtaagaaagatgtttggagagttgaatgtggaatcccttctggatttccgctcacagttatttgcaa

SEQ ID NO: 129367 - DNA, 247 bp, Glycine max
gtgttttaaatccacaaaatccttttgtgttaaatagggatggggaaattgactttcccccagggcacttcccgaagtgttaaaagaatgcctctttctaacgggggaggagctggtgcaaagaatgctattctcatgaatatgccaaatgctgttctttcaatgtggagatattttgttggagagcttgtctttgaagtttctaagatgacttctccttatattaaatgtacagtctctttcttca

SEQ ID NO: 129368 - DNA, 227 bp, Glycine max
gtcatcttggattagtgctcccactctcctatctggtataggacttcgtgggtagacttttctatttcgctcctttctttcactctcttcttctcactgatccgcattgccgtccagattggtcttatgttatagacacttgggcgttggtgcagatgtctgcttcgttaattttctctggggactcctcgctcactgagaaaacaatttgtacttgcagagctttg

SEQ ID NO: 129369 - DNA, 246 bp, Glycine max
ggccaatattatcctgagtgggctccaattaattgtcgagttcatcgacaaccaattcacatcactgaaggaaattatgtcagaaagcaagatgtcagcattgaatatgatgcatgtacaattccaaatgattgtggttcaacggttgttgccaaagttggaaatcacaaacaaattgttggtttccatgttgctggaagcacaggaagactgggatatgcttcattgataccatacgttgagcca

SEQ ID NO: 129370 - DNA, 246 bp, Glycine max
atcaattaccttcagaagctgtcgttgtaaatgttacatgtggtagtggacgtggtggtttacccaccactgcttggattagttctgcagttaacaatcgctcctcagatatcaacaaaaggattcgcacagcacttgggagaggtaagaaaattgtttttcttactagagttgatccttttccaacagctttactggctgttctttttggcgttaagaatgaaattctgagttctaacgccacta

SEQ ID NO: 129371 - DNA, 234 bp, Glycine max
  unsure (1)..(234): unsure at all n locations
gcgttccttctccttctgtccgctgcgactctctttccttccctctttttccgaatctgaatcgaaatggcttcggagactgagacgtttgcttttcaggccgagatcaaccagctcctcagtctaatcatcaacaccttctacagaatatagattggatgtnttcgtgagntcatcagcaatgcctctgatgctttggacaagattcgatttgagagtcttacagacaagagc

SEQ ID NO: 129372 - DNA, 248 bp, Glycine max
ctcgagccgattcggctcgagctggtgcaaagaatgctattctcaggaatatgccaaatgatgttctttcaatgtggagaacttttgttggagatctcgtctttgaagtttctaagatgacttctccctacatttaatgtacagtctctttcttcatagcatttggaaatttggctgatgacaccatcaattttgaggcttttccccacaagctggtgcgctttggagagattcaggaaaaagttgta

SEQ ID NO: 129373 - DNA, 247 bp, Glycine max
ctcgagccgaatcggctcgagcggctcgaggtgcttctaactgagctttatatagatacaattggagatgcagggaaatatagaaatgaagctctctaatagttttccatctatcaaatttgtggttgcaaagaaggctgatagcctttaccccgttgtcagtggtgcaagcatagttgcaaaggtcacaagggaccgtgctttaagagaatgggtgcttgatgagactgctgaaaacatgcagagg

SEQ ID NO: 129374 - DNA, 223 bp, Glycine max
caaaattcctagtgtcttgactacaactgatgaaagattggtaggcacagaacatgagggatatgatccttttcttggtggaattcaaaaatatgcctctcccatgatgcccctagatgaagaaattctttctaaggttgcacaagatatggttgaggaatggtttgattgtgttgatgaggaggatcctttgaggaagtttctttgagtgcaacactcaatg

SEQ ID NO: 129375 - DNA, 247 bp, Glycine max
gcatgatagttcagtgtctacaataccaggtgattttgtcattggtgttaagttgacaaccataaacaatatgtgtgcatatgggctcaatcctggtatttcaggttctcgtcttttgggcaccattcctcagtctatttcacagcaaactgcttggaatcaaatggcaacagtgagaaacccattgaattttgattctagcaagcagagcttttgtcaattttctattgaccttctcggtggagga

SEQ ID NO: 129376 - DNA, 242 bp, Glycine max
caatcatcaactcagtcagcgaatgaatctgtggacggacgagaactcctcggtgatggaggccttcatgccatcctccgatctctcctccatctggccccctcccgctcctccgcagccgcaatccacggcggtcttcaatcaggacaccctccagcaccgcctccaggccttaatcgagggcgcccgagagacctggacctacgccatcttctggcagtcctcttacgactattccggct

SEQ ID NO: 129377 - DNA, 239 bp, Glycine max
gctttctagctggtcataatatcaccattactgatggtattgacaaaactagtgcaactttgcaatttagaaagttagcagattgtgattttctcaagagaaactttaagcagatgtctaatgttttgtgggtggctcctgaggataaggcgagtttatggtcacaacttcattatgtttcgtgtaataatctggaaatgcaagaagcttatcttgtcaatctcgtaaatgtgttacga

SEQ ID NO: 129378 - DNA, 240 bp, Glycine max
gaaaactttgccaaataatttttctgcagtattgctctcttgcaaattggatactgtcactggccaattctatcctgagtgggctccaattaattgtcgagttcatcgacaaccaattcacatcactgaaggcaattatgtcagaaagcaagatgtcagcattgattatgatgcatgtacaattccaaatgattgtggtttcttggttgttgccaaggttggaaattacaaacaaattgt

SEQ ID NO: 129379 - DNA, 240 bp, Glycine max
ggagtttggaatttttgaagcgtaccggatttcactgtgatatcatttgtgtcactggatggactgccaccccaatgcaggatgttcaggttacaattgattggtttatttcctctcaggaatgtgttcccaggacttattgtgttttaaatccacaaaatccttttgtattaaataggtggatggggaaactgactttcccccagggcacttcccgaaatgttaagagaatgcctcttt

SEQ ID NO: 129380 - DNA, 241 bp, Glycine max
ctctgagatcattaaagattccattttggaggcccctgcgatgaattttttcccaaatgtgcgttctggtagctatgccgagattggaccgcgcgtttctatggatgatgaacacatttgtattgatgatctgggagctcatcttggatttgtgttcaagtgtccgataccgagtgcattttatgcagtttttgatggccatggggggcctgatgcagcagcctttgttaagaggaatgct

SEQ ID NO: 129381 - DNA, 238 bp, Glycine max
ctccgactccattgttggaatctggtttgcaaaaagacagagggttaattgtggagtattttggaaggatgtcttacgttgctcataacgttaatcagccccaagagaaagatttgttggaaggacatttttcctttgatattaaatctcgctctagattggaaaaagtttcctctacaaaagcacaatttgttagtggaaaaaccttcaaatatgatatagttggtgctggttcaca

SEQ ID NO: 129382 - DNA, 239 bp, Glycine max
ctcgagcgcctacctctcccttcaagatgcagatgctcgtcaagaccctcaccggcaagaccatcacccttgaggtggaaagctctgacaccatcgacaacgtcaaggccaagatccaggacaaggaaggaatccccccggaccagcaacgtctcattttcgccggaaagcaacttgaggacggccgtacccttgctgacaacaacattcagaaggagagtactcttcacctcgtcctc

SEQ ID NO: 129383 - DNA, 239 bp, Glycine max
caaggatgaagatcatgccaccgaaggcccaaggtgtctttggtgagggcgttgttgtacatgatagcacagtgtgccggtgcaatctgcggtgctgggttggccaaagggttccagaaatcgttctacaacaggtacggaggtggggttaacactgtcagcgatggctacaacaaaggtaccgctttgggtgctgagatcattggtacctttgttcttgtctacaccgttttctccgc

SEQ ID NO: 129384 - DNA, 241 bp, Glycine max
ctttgtttgcttctcaagtctctcgaagcctctttctctctcttctagaagctatctgtgtttggtgttactaagtctccaacaagcaaagtacatggttgatttggaaatccaggtccccaccccattcgacccgtttgccgaggcgagagaatcggatgcccccggagcaaaggagtatgtgcatattcgaattcagcagaggaatgggaagaagagtctgaccacagtgcaagggctg

SEQ ID NO: 129385 - DNA, 239 bp, Glycine max
aaagaatagatcctcaatacaatgaggttcatgctcagatggaaactaatttgtttaaattgtctcttgatgatgttgaaactcctaaaggttccatgttggatcttaaaatttctcaatctatgattgcacttcccaaaaacacagttggaggaactattctgcgtagtgatctattggcaaattttttgacagagggcaattttagagcaagtgttgatttgcagcgcactcatcgt

SEQ ID NO: 129386 - DNA, 244 bp, Glycine max
ctttcaagatgcagatcttcgtcaagaccctcaccggaaagaccatcacccttgaatctgaaagctctgacaccatcgacaacgtcaaggccaagatccaggacaaggaaggtattcccccggatcagcaacgtctcatcttcgccggaaagcagctcgaggacggccgtaccctcgccgactacaacatccagaaggagtcaacccttcaccttgtccttcgtctccgtggtggcatgcagat

SEQ ID NO: 129387 - DNA, 249 bp, Glycine max
gttcattctctttgcgcagttccctacctctcctttcaagatgcagatcttcgtcaagaccctcaccggaaagaccatcacccttgaggtggaaagctctgacaccatcgacaacgtcaaggccaagatccaggacaaggaaggaattcccccggatcagcaacgtctcatcttcgccggaaagcagctcgaggacggccgtaccctcgccgactacaacatccagaaggagtcaacccttcaccttgt

SEQ ID NO: 129388 - DNA, 252 bp, Glycine max
actcgagccgctcgagccgattcggctcgagtgagtttcgagcagtggcgtcagggaactcaaatgacacacaatcaatgcttgactgtcgtcacggggaagcacttgtggtgaactttgcattccagcttcaccacatgcgcgatgaaactgtatcgacagtgaacgagcgagaccaacttcttcgcatggttaagagcttgaatccaaaacttgtgacagttgtggagcaggattaaaccaacaccctcc

SEQ ID NO: 129389 - DNA, 172 bp, Glycine max
ccgcgatcacaggttgccgcaccttaaaaccggaaacaaaagcaatcgttacttgatttcaagaatctctcaatttcttcctacttctttgtgtacgatttcttaagggaaagaaaatcactctctgtgctggccacagacttcgtgaactcttttcttttccacacaacat

SEQ ID NO: 129390 - DNA, 242 bp, Glycine max
aaagctttctagctggtcataatatcaccattactgatggtattgacaaaactagtgcaactttgcaatttagaaagttagcagattgtgattttctcaagagaaactttaggcagatgtctaatgttttgtgggtggctcctgaggacaaggcgagtttatggtcacaacttcattatgtttcatgtaataatctggaaatgtaagaagcttatcttgtcaatctcgtaaatgtgttacga

SEQ ID NO: 129391 - DNA, 239 bp, Glycine max
tatgcttcattgataccatatgttgagccagttgtgcaagctcaaagtgctgaagtttaactcgacttcttccctgtggaggttgatagtcaagagggagttgctcacattggtgaattgaaatctggtgtctatgttccactgcctacaaaaataaatttggtcgaaactcccaaggaatggcaactggatctacctcgtgacaaaattcctagtgtcttgactacaactgatgaaag

SEQ ID NO: 129392 - DNA, 239 bp, Glycine max
caaactctctggcatggattcaatttgatgccttccattgcgtttctactactttggtgtgtggcactgctcactgccactactttgtctttactttacgtgctcaagtgcatctttcacttggacatggtgaaggaggagttctcacatcatgttggagtgaactgcatgtatgctccttggatttcttggcttctcatgcttcaatcagcacccatcatcgttcattcaacttcttg

SEQ ID NO: 129393 - DNA, 238 bp, Glycine max
  unsure (1)..(238): unsure at all n locations
ctcgagcgtttgaagtttctaagatgacttctccctacattaaatgtacagtctccgtcttcatagcatttggaaatttggctgatgacaccatctattttgaggcttttccccacaagctggtaccccttggagagattcaggaaaaagttgtattgaaattttcacaagaggaatttcttacagtatggtcaacccaggtgcgtcctgcaatactcgnttggccgatgggtgtcca

SEQ ID NO: 129394 - DNA, 238 bp, Glycine max
cttctccctacattaaatgtacagtctctttcttcatagcatttggaaatttggctgatgacaccatcaattttgaggcttttccccacaagctggtgcattttggagagattcaggaaaaagttgtattgaaattttcacaagaggaatttcttacagcttggtcaactcaggtgcgtcctgcaacaacttccttggctgatgggtgtccatatttgtatgctatggtgcatgatag

SEQ ID NO: 129395 - DNA, 246 bp, Glycine max
acaaattgttggtttccatgttgctggaagcaaaggaagactgggatatgcttcattgataccatatgttgagccagttgtgcaagctcaaagtgctgaagtttacttcgacttcttctctgtggaggttgatagtcaagagggagttgctcacattggtgaattgaaatctggtgtctatgttccactgcctacaaaacaccatttggtggaaactcccaaggaatggcaactggatctaccttg

SEQ ID NO: 129396 - DNA, 232 bp, Glycine max
gctcgagtaattaataacaagctagctattagttcgattttgtagtaagtgaggtgccaatatcgtgaagatagctcttggtactttggatgactcttttagcgctgcctctcttaaggcttatttcgcagagttccacgcaactctgattcccagtgttcgctggtcgtttgatcagccatcgcttacaacgagcttataaaagatgcagccttgacaacggggctggtgg

SEQ ID NO: 129397 - DNA, 240 bp, Glycine max
attgaaccagacatgaattcaaggtttcagcttttgagtaccactaccaatggtgattttgttcaaggaaaagatctcgcaatggttaaagttaatgtagcatgtgctgctgttggcttgacatcaagctatactccgactcgattgttggaatctggtttgcaaaaagacagagggttaattgtggagtattttggaatagagtcttacgttgctcataacgttaatcagccccaagag

SEQ ID NO: 129398 - DNA, 227 bp, Glycine max
gtaatactcttatgccagctttttctgttccacaggatactgccagatcttctgaaaatgcggaatcctctgcatgatctggaatttgtgttttctttcgtatgatcggttgtataattcaataaaggaaattaggcatgaccctcttgttgagtatgctctggctaattgaaaatttcgacaccgctttcacttgtcgtaatgatgtgtgtagtgtgtgtcatttt

SEQ ID NO: 129399 - DNA, 232 bp, Glycine max
acttgttgagagttgctgcttggaagaaaggctgtttaatggttaagattgtgatgtctgggaatgcagcagtcaaaaggagtgattgggcctcattggtacaagtgtttttaacaaacagcaacagtacagagcattttgatgcatgtaagtggacaaaatcggaaccacattcctgggaattgatcttcccaatagaggtatgtggtcctaataatggttttgaaatgtg

SEQ ID NO: 129400 - DNA, 237 bp, Glycine max
ctgtcttctagtgcaagtgatttcagaactgcaatggtgagtaaaaatagcaagcctcaagctactgcaatgcatcgtgggagctatagaaattatcattgatagtttcgcaagtcctgactgcaacatagttggtgcaatgcttttggttgatacttatcataccaatcctgaaaatgcagttcgtagtatttttgttgcgcctttcagaggcggaaggcccattcgggtggttac

SEQ ID NO: 129401 - DNA, 238 bp, Glycine max
ataattctccaattagtaacttgttgagagttgctgcttggaagaaaggctgtttaatggttaagattgtgatgtctgggaatgcagcagtcaaaaggagtgattgggcctcattggtacaactgtttttaacaaacagcaacagtacagagcattttgatgcatgtaagtggacaaaatcggaaccacattcctgggaattgatcttcccaatagaggtatgtggtcctaataatgg

SEQ ID NO: 129402 - DNA, 246 bp, Glycine max
gcggcggcttcttcttccgtttttgtctatcggcgtgaacaatggcgacttacgctgcgatgaagcccacaaagcccggcttggaggagccccaggagcagatccacaagataaggatcaccctttcctccaagcacgtcaaaaacctcgagaaggtttgtgcggacttggttcgcggtgcaaaggacaagcgcctcagggttaagggacctgtcaggatgcccactaaggttcttctcatcacta

SEQ ID NO: 129403 - DNA, 236 bp, Glycine max
atcacgagagccagtccattgcttggatggctcagagtgccagggagaaaggtgctaaagtgcatagtgcatggtttaaatggccaaccctcaaactctgctccactgatttgaggaaacagatttgcaataagaagaagaggaagaaggattcagccactggtctttttgtcttcccggttcagtctagagtgactggggctaagtattcataccagtggatggccttggcccaa

SEQ ID NO: 129404 - DNA, 235 bp, Glycine max
cctgtttgctgtagaagaaactacgtcaattaagaaaagaaaagatgcagataacaaacatgatgacaaagaatttggagatcattttcccacaaagaaagctagagtagtttggtctgtggatcttcatcagaagtttgtcaaagcagtgaatcaaatcggatttgatattggtcccaagaaaattctagatctgatgaatgttccatggttgactagagaaaatgttgctagt

SEQ ID NO: 129405 - DNA, 231 bp, Glycine max
acttatcataccaatcctgaaaatgcagttcgtagtatttttgttgcgcctttcagaggcggaaggcccattcgggtggttacatttccgaataccattgtgcagattgaaccagacatgaattcaaggtttcagcttttgagtaccactaccaatggtgattttgttcaagggaaagatctcgcaatggttaaagttaatgtagcatgtgctgctgttggcttgacatca

SEQ ID NO: 129406 - DNA, 237 bp, Glycine max
  unsure (1)..(237): unsure at all n locations
ggtttggccaatagattactgagtaagggcaacgatattctgtgttgcgattatgctagttttgatggtttgattaccaagcaagttatgagcatgatggcagaaatgataaacagtctttgtggtggtgatgaaaaattgatgcgtaaaaggacacatctgctgttggcttgttgttcaaggatggcaatttgtatcatagatatttggcaccntgaatgtggaatcccttctgga

SEQ ID NO: 129407 - DNA, 237 bp, Glycine max
ggttggggaagtgaaagctaatttgaagaaaggtattggagcgaatgaattgctgtcccatctttcagcacatcctgcacctgctcaagaaaagatgagtgctctggttgaagctctattcgagggaactgagaaaggttttgctaaagaagctgataagaagaagaactactttgctgctgctgttgccgaagagggatcccagctgttattgcttcatgctattgaagaatttct

SEQ ID NO: 129408 - DNA, 242 bp, Glycine max
gccagcgagtgagtgagcgagccaggtagggttttcggtgttcccctctttgtgttcgttcgcgacgatggggtccatccccgatccaggcgagttgagcgagttgactcagccgagcttcgacgagttccagcgccaaacctctctcatgaccagctgcaccctcctctggaaggagctctccgaccacttctcctccctcgagcaagacctcaaccacaaatccgaagccctcaagcgca

SEQ ID NO: 129409 - DNA, 242 bp, Glycine max
gagagattcaggaaaaagttgtattgaaattttcacaagaggaatttcttacagcttggtcaacccaggtgcgtcctgcaacaactctgttggctgatgggtgtccatatttgtatgctatggtgcatgatagttcagtgtctacaataccaggtgattttgtcattggtgttaagttgacaaccataaacaatatgtgtgcatatgggctcaatccggtatttcagttctcgtctttgggc

SEQ ID NO: 129410 - DNA, 234 bp, Glycine max
ctgcttgcacaaaagcaatgactatgtcatttaatccaaacccgtgttctgatgtcatggagtttggaatttttgaagcgtaccggatttcactgtgatatcatttgtgtcactggatggactgccaccccaatgcaggatgttcaggttacaattgattggtttatttcctctcaggaatgtgttcccaggacttattgtgttttaaatccacaaaatccttttgtgttaaat

SEQ ID NO: 129411 - DNA, 234 bp, Glycine max
ttggcgattgattaccccagaaggactttgtttgttacaagaaaccaagggcaagtttcatgtctgaattcgacacaaacatcccaactgcttttgatccctttgctgatgcaaatgctgaggactcaggtgctgggacgaaagagtatgttcatgttcgtgtacaacagcgcaacggaaggaaaagcctaacaactgttcaaggtttaaagaaagagtacagctatagcaaga

SEQ ID NO: 129412 - DNA, 233 bp, Glycine max
gggtaagcatattcctgtatctaatattagtgcaggggaaaatcatgtagttcaaatacccctaatggcacaggaggaaattctgtcttctagtgcaagtgatttcagaactgcaatggtgagtaaaaatagcaagcctcaagctactgcaatgcatgtgggagctatagaaattatcattgatagtttcgcaagtcctgactgcaacatagttggtgcaatgcttttggttg

SEQ ID NO: 129413 - DNA, 236 bp, Glycine max
gttccactgcctacaaaaactaatttggtggaaactcccaaggaatggcaactggatctaccttgtgacaaaattcctagtgtcttgactacaactgatgagagattggtaggcacagaacatgagggatatgatccttttcttggtggaattcaaaaatatgccactcccatgatgcccctagatgaagaaattctttctaaagttgcacaagatatggtttgaggaatggtttg

SEQ ID NO: 129414 - DNA, 229 bp, Glycine max
cactgttgagcaggctatccaaaacaagaagttgttcatcttagatcaccatgactatctcattccttatttgaggaaaataaatgcaaataccacaaagacttatgctacaagaaccatatttttcttgaaagatgatggaactttgacaccattggccattgagttaagtaagccacatcctcagggtgaagaatatggtcctgttagcgaagtctacgtgcctgcc

SEQ ID NO: 129415 - DNA, 237 bp, Glycine max
atccttcgatcatacacttagttgcttccaattaagatggttctgctagagaagctctgggatgatgttgtggctggccctcaacctgagcgtggccttggcaagctcagaaaactcaccaccctcaaaactattgatgaaggagaaagtagcaagctgcagaagacgttgtcgatgccgtcgacaccaacaaccccgatgactccgacgactccaacgacaccgggatcggcccgt

SEQ ID NO: 129416 - DNA, 258 bp, Glycine max
tggatgcagtagaaaagaagcaatatggttggttttgggtctgccccaatggtggtaagaattgccattatatgaatgctcttccacctggttatgttttgaaatctcaaatgaaggctttgttagaggaagaaagtgaaaaaatatcaattgaagaggagattgaaaatcagcgtgccaaagtggcaactacaactcctatgactcctgagttattctttgagtggaagaagaagaagatagaagagagagatgcca

SEQ ID NO: 129417 - DNA, 272 bp, Glycine max
tcgaggaaagagaagcattagcaaaagcaagaagaactagtctaagcagaaatggcctcttcagtgattgcatctgtggccctcaaacctgcccctttcactgttgagaagtcctcagttagaggccttccctccctctcaaggaactcctcttcattcagagttgtggccagtggtggcaagaagatcaagactgacaagccttatggaattaatggtggcatggctttgagggaaggagttgatgcatctggcaggaaaggaaagggaaa

SEQ ID NO: 129418 - DNA, 255 bp, Glycine max
caagaagcttatcttgtcaatctcgtaaatgtgttacgagaatagtatttgcacagtccagaggaagctcgccaactgagaaggaaagctctctctcgtattgaatggctgcaaaaagctgatgtgcctaccatagcacagattgaagagttccattcgatgcagaggatgatgaatgctcctgattcaaatgataatattgatctactgttgagcattgatttgttgggtttacaaggagcaggtaaagctttt

SEQ ID NO: 129419 - DNA, 253 bp, Glycine max
gccagttctgatatttacaccatctgctctcaagactgtgaattatggaatcctgcttgcacaaaagcaatgactatgtcatttaatccaaacccgtgttctgatgcatggagtttggaatttctgaagcgtaccggatttcattgtgatatcatttgtgtcactggatggactgccactccaatgcaggatgttcaggttacaattgattggtttatttcctctcaggaatgtgtgcccaggacttattgtg

SEQ ID NO: 129420 - DNA, 257 bp, Glycine max
tgtgaattgatctgcgatgtcggacgaggtagttctgttggatacatgggctagcatgtatggtatgagggctaggattgcattggctgaaaagggtgttaggtatgaatacaaggaagagaatctcatgaacaggagtcctttgcttttgcagatgaacccaattcacaagaagattcctgttttgatacataatggcaaacccatttgtgaatctgcaataatagtgcagtacattgatgaggtctggaatgaca

SEQ ID NO: 129421 - DNA, 261 bp, Glycine max
ggattcctttgaggaagtttctttgagtgcagcactcaatggtgttgagggtttggactatatggaaagaattcctcttgccacatctgagggttttccccatgtgctttcacgcaaaaatggtgataaaggcaaaaggagatttgtttctggggatggtgaagagatgacattgattccgggaaccagtgttgaagaggcttacaataagctaatagttgaacttgagaaaagtgttcctacattggttggcattgaatg

SEQ ID NO: 129422 - DNA, 259 bp, Glycine max
aaaaccttcaaatatgatataattggtgctggtacacattcttcagaagattttcctgaaaaggaagatcaagaaaaacccaaaaagattgatgccagattgagacaaagaatagatcctcaatacaatgaggttcaggctcagatggaaacaaatttgtttaaattgtctcttgatgatgttgaaactcctaaaggttccatgttggatcttaaaatttctcaatctaaaattgcacttcccaaaaacacagttggag

SEQ ID NO: 129423 - DNA, 237 bp, Glycine max
ctacttgaatccatgcgcatcagtttgaagaattgtgttagcggtgaggtgatctatgtcaatatgtgataattcatagcatatatatggggaggggaaaagtggatttgaagaggatcgagaacatcatcaataggcaagtgactttctccaagagaatgtctggcttgcttaagaaagcgcgcgagatttctgtgctgtgcgatgctgatgtggctctcatcgtcttctccacta

SEQ ID NO: 129424 - DNA, 252 bp, Glycine max
tccgagatgacttctccctacattaaatgcacactctctttcttcatagcatttggacatttggctgatgacaccatcaattttgaggcttttccccacaagctggtgcagtttggagagattcagggaaaagttgtattgaaattttcacaagaggaatttcttacagcttggtcatctcaggtacgtcctgcaacaactctgttggctgatgggtgtccatatttgtatgctatggtgcatgatagttca

SEQ ID NO: 129425 - DNA, 135 bp, Glycine max
gctcgagcgcgtcgagccgattcagctcaggatctattggcaaattttttgacagagggcaattttagagcaagtgttgatttgcagcgcactcatcgtattataggaatgattaaaatggtggccacacttggt

SEQ ID NO: 129426 - DNA, 259 bp, Glycine max
ggtgtctacaataccaggtgattttgtcattggtgttaagttgacaaccataaacaatatgtgtgcatatgggctcaatcctggtatttcaggttctcgtcttttgggctacattcctcagtctatttcacagcaaactgtttggaatcaaatggcaacagtgagaacaccattgaattttgattctagcaagcagagcttttgtcaattttctattgaccttctcggtggaggaattttagtggacaaaactggagat

SEQ ID NO: 129427 - DNA, 252 bp, Glycine max
cttctatggcagttcacgttagcctgcatcaagatgggaaagcctgatttggcacaaaaagcagttgattcagcagagaaaaggctttcagcggatagatggcccgaatattatgatacccggaacggaaggtttattgggaagcaatcacggttgatgcagacatggaccattgctggtttcgtgacctctaagatgcttctagataatccagaaaaggcatccttgttgttttaggcggaggatttgaac

SEQ ID NO: 129428 - DNA, 252 bp, Glycine max
cgcaccagtttcaccgcacgaatatcttgttgtttggagcgatccgagaaaaactctgtaaacatgttggtttaccaggacctccttacaggtgatgagcttctctctgactccttccgttacaaggaaattgagaatggaatgctgtgggaagttgaggggaagtgggttgttaaaggagcagttgatgtagacattggtgcaaacccttctgctgagggtggaggagaagatgagggagttgatgatgca

SEQ ID NO: 129429 - DNA, 253 bp, Glycine max
cgaagatccagaagcacaacttttgctcaaagcttcagaaactatgctcatgaaagcttatgcttttttgaagtataacaaatagaccaatttgattgtcaggacccatttggcagaattggtcaatgaagacttttatgatgaaaaatttaattttattggcacaattgggactccagcttttcatcgacaaattgctgcacacttggagaaaatgccattatggcaaaaagcaattttgtgcggaatggga

SEQ ID NO: 129430 - DNA, 250 bp, Glycine max
cgttgagccagttgtgcaagctcaaagtgctgaagtttactttgacttcttccctgtggaggttgatagtcaagagggagttgctcacattggtgaattgaaatctggtgtctatgttccactgcctacaaaaaagaatttggtggaaactcccaaggaatggcaactggatctaccttgtgacaaaattcctagtgtcttgactacaactgatgagagattggtagccacagaacatgagggatatgat

SEQ ID NO: 129431 - DNA, 250 bp, Glycine max
attggtgttaagttgacaaccataaacaatctgtgtgcatatggactcaatcctggtatctcaggttctcgtctatttgggcaccattcctcagtccatttcacagcaaactgtttggaatcacatggcaacagtcagaacaccattgaattttgattctagcaagcagagcttttgtccatttactattgaccttctcggtggaggaattttagtggtcaaaactggagattggatcacacgtatacaa

SEQ ID NO: 129432 - DNA, 265 bp, Glycine max
gtgaaaatagcaagcctcaagctactgcaatgcatgtgggagctatagatattatcattgatagtttcgcaagtacctgactacaacatagttggtgcaatgcttttggttgatacttatcataccaatcctgaaaatgcagttcgtagtatttttgttgcgcctttcagaggcggaaggcccattcgggtggttacatttccgaataccatcgtgcagattgaaccagacatgaattcaaggtttcagcttttgagtaccacta

SEQ ID NO: 129433 - DNA, 265 bp, Glycine max
gaaagagaagcattagcaaaagcaagaagaactagtctaagcagaaatggcctcttcagtgattgcatctgtggccctcaaacctgcccctttcactgttgagaagtcctcagttagaggccttccctccctctcaaggaactcctcttcattcagagttgtggccagtggtggcaagaagatcaagactgacaagccttatggaattaatggtggcatggctttgagggaaggagttgatgcatctggcaggaaaggaaaggga

SEQ ID NO: 129434 - DNA, 132 bp, Glycine max
cctcgctgacgacaccatcaactttgaggcttgtccccacaagctgatacacaaaggagagattcaggaaaaagttgtactgaaattttcgcaagaggaatctcttacagcatggccaactcaagcgcgtcc

SEQ ID NO: 129435 - DNA, 261 bp, Glycine max
gattaccaagcaagttatgagcaagatggcagaaatgataaacagtctttgtggtggtgatgaaaaattgatgcgtgaaaggacacacctgctgttggcttgttgttcaaggatggcaatttgtaagaaagagctttggagagttgaatgtggaatcccttctggatttccgctcacagttatttgcaatagcatttttaatgagatgctcattagatatagctatgaaaaattactgcgccaggctaaagctccaagtat

SEQ ID NO: 129436 - DNA, 238 bp, Glycine max
cgctgatgacaccatcaattttgaggcctttccccacaagctggtgcagtttggagagattcaggaaaaagttgtattgaaattttcacaagaggaatttcttacagcttggtcaactcaggtgcgtcctgcaacaactctgttggctgatgggtgtccatatttgtatgctatggtgcatgatagttcagtgtctacaataccaggtgattttgtcattggtgttaagttgacaacc

SEQ ID NO: 129437 - DNA, 254 bp, Glycine max
ctcaatggtgttgagggtttggactatatggaaagaattcctcatgccacatctgagggttttccccatgtgcattcacgcaaaaatggtgataaaggcaaaaggagatttgtttctggggatggtgaagagatgacattgattccgggaaccagtgttgaagaggcttacaataagctaatagttgaacttgagaagagtgttcctacattggttggcattgaatgtcccaaggatgagaaacttcctcgtcg

SEQ ID NO: 129438 - DNA, 148 bp, Glycine max
attttgataaaccgcgatcacaggttgccgcaccttaaaaccggactcaaaagcaatcgttacttgatttcaagaatctctcaatttctacctacttctctgtgtacgatttcttaagggatagtcaatcactctctgtgctggccac

SEQ ID NO: 129439 - DNA, 147 bp, Glycine max
cgcgatcacaggttgccgcaccttaaaaccggacacaaaagcaatcgttacttgatttcaagaatcttccaatttcttcctacttctttgtgtaccatttcttaagggaaagaaaatctctctctgtgctggccacagacttcgtga

SEQ ID NO: 129440 - DNA, 269 bp, Glycine max
cgaaaaggaagatcaagaaaaacccaaaaagattgataccagattgagacaaagaatagatcctcaatacaatgaggttcaggctcagatggaaacaaatttgtttaaattgtctcttgatgatgttgaaactcctaaaggttccatgttggatcttaaaatgtctcaatctaaaattgcacttcccaaaaacacagttggaggaaccattctgcgtagtgatctattggcaaattttttgacagagggcaattttagagcaagtgttg

SEQ ID NO: 129441 - DNA, 256 bp, Glycine max
cgatgattgaaatggtaaacatggattacattaacaaagcctttgaaaggttggagaagaatgacgtgagatacaggtttgttgtggatgtcaaaggcagcaaacttgtcgatcagtaaaagacagaaagtatactactagcacgacacacgcaacatccatccttccatcatgaagagtctggaaaagttattaattaattgagaactaaagctgtatttgatgttcactctaaaaaagaagctgtggtttgttt

SEQ ID NO: 129442 - DNA, 260 bp, Glycine max
tgcaaagaatgctattctcatgaatatgccaaatgctgttctttcaatgtggagatattttgttggagatctcgtctttgaagtttctaagatgacttctccctacattaaatgtacagtctctttcttcatagcatttggaaatttggctgatgacaccatcaattttgaggcttttccccacaagctggtgcagtttggagagattcaggaaaaagttgtattgaagttttcacaagaggaatttcttacagcttggt

SEQ ID NO: 129443 - DNA, 259 bp, Glycine max
cgctcgaagcaccagtctcaccgcacgaatatctcgttgattggagcgatccgagattaactctgtaaacatgttggattaccaggacctcacgacaggccatgaacttctcgctgactccttccgttacaaggaaattgcagaatggaatgctgtgaggagctcagcggaactcgggcgctaacagcgagcacgtgatgcagacattggtgcaaacccttctgctgcagatttagaagaagatgagcgcgatgatgct

SEQ ID NO: 129444 - DNA, 154 bp, Glycine max
aaattttgataaaccgcgatcacaggttgccgtaccttaaaaccggtaacaaaagcaatcgttacttgatttcaagaatctctcaatttcttcctacttctttgtgtacggtttcttaagggaaagaaaatcactctctgtgctggccacagaa

SEQ ID NO: 129445 - DNA, 245 bp, Glycine max
ctcgaccgggacaaaatcggaaccacattcctgggaattgctcttcccaatagaagtatgtggtcctaataatggttttgaaatgtggagttctgagtgggcaaatcaaacttcatggcacttgagtttccttattgacaatcccaaacagtctacagtttttgatattctcttgggaatttctcaagattttgaaattgctggtaatactcttatgccagctttttctgttccacaggctactg

SEQ ID NO: 129446 - DNA, 254 bp, Glycine max
gaaagttcacgctattcttacctacaataacacaaaccacttgataaagaaggatgttccttgtgagactgaccaacttactcatgtttacacatttatcctccgtccggatgcaacctacagcatcctgattgataatgtggagaagcaaactggtagtctctactctgattgggatcttctccctccaaagacaatcaaggatcctgaggctaaaaaaccagaagattgggatgacaaagaatatattcctg

SEQ ID NO: 129447 - DNA, 251 bp, Glycine max
ggaatgtgttcccaggacttattgtgttttaaatccacaaaatccttttgtgttaaataggtggatggggaaactgactttcccccagggcacttcccgaaatgttaagagaatgcctctttctatagggggaggagctggtgcaaagaatgctattctcatgaatatgccaaatgctgttctttcaatgtggagatattttgttggagatctcgtctttgaagtttctaagatgacttctccctacatta

SEQ ID NO: 129448 - DNA, 248 bp, Glycine max
  unsure (1)..(248): unsure at all n locations
atggactgccactccactgcaggatgttcaggttacaattgatcggcttatttcctctcaggaatgtgttcgcaggacttattgtgtgtgaaatccactaaatcctttagtgttgaataggtggatggggtanatgactttcccccagggcactttccgaagtgttaagagaatgcctcttactatagggggacgagctggtgcctagaatgctattctcatgaatatgccaaatgctgttctttcaa

SEQ ID NO: 129449 - DNA, 245 bp, Glycine max
atttttcctttgatattaaatctcgctctagattggaaaaagtttcctctacaaaagcacaatttgttagtggaaaaaccttcaaatatgatataattggtgctggttcacattcttcagaagattttcctgaaaaggaagatcaagaaaaacccaaaaagattgataccagattgagacaaagaatagatcctcaatacaatgaggttcaggctcagatggaaacaaatttgtttaaattgtct

SEQ ID NO: 129450 - DNA, 247 bp, Glycine max
tgtcaactcaggtgcgtcctgcaacaactctcctagctgatgggtgtccatatttgtatgctatggtgcatgatagttcagtgtctacaataccaggccattttgtcattggtgttaagttggcaactataaacaatatgtgtgcatatgggctcaatccgtgtatttctggttctcgtcttttgggcagcattcctcagtccatttcacagcaaactgtttggaatcaaatggcaacagtgagaac

SEQ ID NO: 129451 - DNA, 255 bp, Glycine max
gtggcatgatcttcatccttgtttactgcaccgccggtatttcaggaggacacataaacccggcggtgacattcgggttgttcctaggacgcaaggtgtcgttgataagggtgttgttgtacatggtggcacagtgtgcggtgctatctgtggtactggattggccaaggggttccaaaaagcatactacaacaggtatggaggtggtgccaactctgttgctgatggctacaacaatggtactgctttgggtgc

SEQ ID NO: 129452 - DNA, 258 bp, Glycine max
cttgattctgcaactacacatggttgtgttttggcaaaacatagaaaatcgtcaactttggagtccaatgatttattgctacaccttgagaaaattgggatttaaaaattcccggatactcaagtgaagagaagaagaatcagaacaaacctctattaaatgacctccacaagaggcgcctagatatggttcgcacattgatggaatctttgccctctgagtcgagtgttaacagttctaaagagatgagtatacagg

SEQ ID NO: 129453 - DNA, 255 bp, Glycine max
ctttgtcattggtgttaagttggcaactataaacaatatgtgtgcatatgggctcaatcctggtatttcaggttctcgtcttttgggcaccattcctcagtccatttcacagcaaactgtttggaatcaaatggcaacagtgagaacaccattgaattttgatcctagcaagcagagcttttgtcaattttctattgaccttctcggtggaggaattttagtggacaaaactggagattggatcacacttataca

SEQ ID NO: 129454 - DNA, 250 bp, Glycine max
gcaccgtaagggttgtgaagcaggcagagaagagccatggtgcacgtttctttctaccgaaactatgggaaaacgttcaagcagcctcgtcgtccctacgagaaggagcgtttggacgccgagttgaagctggtcggtgagtacgggcttcgctgcaagagggagttatggagggtccagtacgccctgagccgcatccgtaacaacgccagaaacctattgacccttgatgagaagaaccctcgccgta

SEQ ID NO: 129455 - DNA, 249 bp, Glycine max
cttcaccatccccagaaacaaatctccttttgcctttttcaccatttttgcgtgaaagcacatggggaaaaccctcagatgtggcaagaggaattctttccatatagtccaaaccctcaacactattgagtgctgctattaaagaaacttcctcgtcgcaaaatttttgacaaacctaagacgcgctgcttcactattctccctatggagtttaatcttgtggttcgtcagaagtttttaaattttgtg

SEQ ID NO: 129456 - DNA, 247 bp, Glycine max
atgacttctccctacattaaatgtacagtctctttcttcatagcatttggaaatttggctgatgacaccatcaattttgaggcttttccccacaagctggtgcagtttggagagattcaggaaaaagttgtattgaaattttcacaagaggaatttcttacagcttggtcaactcaggtgcgtcctgcaacaactctgttggctgatgggtgtccatatttgtatgctatggtgcatgatagttcag

SEQ ID NO: 129457 - DNA, 184 bp, Glycine max
aaattttgataaaccgcgatcacaggttgccgcaccttaaaacctgaaacaaaagcaatcgttacttgatttcaagaatctctcaatttcttcctacttctttgtgtacgatttcttaagggaaagataatcactctctgtgctggccacagacttcgtgaatcattttcttttccacacaaca

SEQ ID NO: 129458 - DNA, 224 bp, Glycine max
ggaaatttggctgatgacaccacaattttgaggcctttccccacaagctggtgcattttggagagattcaggaaaaagttgtattgaaattttcacaagaggaatttcttacagcttggtcaactcaggtgcgtcctgcaacaactctgttggctgatgggtgtccatatttgtatgctatggtgcatgatagttcagtgtctacaataccaggtgattttgtc

SEQ ID NO: 129459 - DNA, 222 bp, Glycine max
cttaattagtgttcatgaatatgtcaagccttactttagtggttctaaattgaaaagctttctagctggtcataatatcaccattactgatggtattgacaaaactagtgcaactttgcaatttagaaagttagcagattgtgattttctcaagagaaactttaggcagatgtctaatgttttgtgggtggctcctgaggacaaggcgagtttatggtcaca

SEQ ID NO: 129460 - DNA, 225 bp, Glycine max
aagttgacaaccataaacaatatgtgtgcatatgggctcaatcctggtatttcaggttctcgtcttttgggcaccattcctcagtctatttcacagcaaactgtttggaatcaaatggcaacagtgagaacaccattgaattttgattctagcaagcagagcttttgtcaattttctattgaccttctcggtggaggaattttagtggacaaaactggagattgg

SEQ ID NO: 129461 - DNA, 224 bp, Glycine max
gaaattttgataaaccgcgatcaaggttgccgcaccttaaaaccggaaacaaaagcaatcgttacttgatttcaagaatctctcaatttcttcctacttctttgtgtacgatttcttaagggaaagaaaatcactctctgtgctggtcacagacttcgtgaatcattttcttttccacacaacatacgactcctctatagggggatgtgctgtataggacttcg

SEQ ID NO: 129462 - DNA, 231 bp, Glycine max
gttgccaagaaatggattcctgagttgaggcattatgctcctggtgttccaattattcttgttggaacaaaacttgatcttcgggatgataagcagttctttcaagaccatcctggtgcagtgcctatcaccacagcacagggtgaggagctgagaaagcttatcggtgctccagtttacattgaatatagttcaaaaacgcaacagaatgtgaaggctgtttttgatgcg

SEQ ID NO: 129463 - DNA, 225 bp, Glycine max
gttcttttagggggcgtgccagttctgatatttacaccatctgctctcaagactgtgaattatggaatcctgcttgcacaaaagcaatgactatgtcatttaatccaaacccgtgttctgatgcatggagtttggaatttttgaagcgtaccggatttcactgtgatatcatttgtgtcactggatggactgccaccccaatgcaggatgttcaggttacaattg

SEQ ID NO: 129464 - DNA, 220 bp, Glycine max
atcgtatcaaaggaatgattaaatggtggccacagttggtattcctgagaatacaggtatagcattggcctgtgctatgaatagttcttttagggggcgtgcagttctgatatttacaccatctgctctcaagactgtgaattatggaatcctgcttgcacaaaagcaatgactatgtcatttaatccaaacccgtgttctgatgcatggagtttggaat

SEQ ID NO: 129465 - DNA, 225 bp, Glycine max
catatgcttgtctcaaagattaagccatgcatgtgtaagtatgaactaattcagactgtgaaactgcgaatggctcattaaatcagttatagtttgtttgatggtatctactactcggataaccgtagtaattctagagctaatacgtgcaacaaaccccgacttctggaagggatgcatttattagataaaaggtcaacacaggctctgcctgctgctttgatg

SEQ ID NO: 129466 - DNA, 221 bp, Glycine max
  unsure (1)..(221): unsure at all n locations
tagtttcgcaagtcctgactgcaacatagttggtgcaatgcttttggttgatacttatcataccaatcctgaaaatgcagttcgtagtatttttgttgcgccttcagaggcggaaggcccattcgggtggttacatttccgaataccatcgtgcatcttgaaccagacatgaattcaaggtttcagcttttgagtatcnataccaatggtgattttgttca

SEQ ID NO: 129467 - DNA, 194 bp, Glycine max
  unsure (1)..(194): unsure at all n locations
ctcgagcggaaattttgataaaccgcgatcacaggttgccgcaccttaaaaccggtaacaaaagcaatcgttacttgatttcaagaatcttccaatttcttcctactcttttgtgtacgatttcttaagggaaagaaaatcactctctgtgctggccacagacttcgtcactcacnnncttttccacacaacat

SEQ ID NO: 129468 - DNA, 232 bp, Glycine max
caaatatgatataattggtgctggttcacattcttcagaagattttcctgaaaaggaagatcaagaaaaacccaaaaagattgataccagattgagacaaagaatagatcctcaatacaatgaggttcaggctcagatggaaacaaatttgtttaaattgtctcttgatgatgttgaaactcctaaaggttccatgttggatcttaaaatttctcaatctaatattgcactt

SEQ ID NO: 129469 - DNA, 233 bp, Glycine max
gctttctagctggtcataatatcacattactgatggtattgacaaaactagtgcaatcttgcaatttagaaagttagcagattgtgattttctcaagagaaactttaagcagatgtctaatgttttgtgggtggctcctgaggataaggcgagtttatggtcacaacttcattatgtttcgtgtaataatctggaaatgcacgaagcttatcttgtcaatctcgtaaatgtgt

SEQ ID NO: 129470 - DNA, 224 bp, Glycine max
gtttggccaatagattactgagtaagggcaacgatattctgtgttgcgattatgctagttttgatggtttgattaccaagcaagttatgagcaagatggcagaaatgataaacagtctttgtggtggtgatgaaaaattgatgcgtgaaaggacacacctgctgttggcttgttgttcaaggatggcaatttgtaagaaagatgtttggagagttgaatgtgga

SEQ ID NO: 129471 - DNA, 222 bp, Glycine max
tctcgagccaatcggctcggacaagatagaagcagttgatgaatcaaacttgggatatagctacagcgtagtgggtggtgctgcgttgccagacacagcggagaagatcacattccactccaaattggctgctggtcccaatggaggctctgctggcaagctcactgtcgaataccaaaccaaaggagatgctcagcccaaccaagaccaactcaaaactgg

SEQ ID NO: 129472 - DNA, 219 bp, Glycine max
gtttacaaagcctaatgttgttctttagttgtttccttgttctctgtcactgatggctgattattcagcacgaactgaatcctgcgaggtagttgtaaatgtaaccaaggacacctccaaaacaatggaaccctcagactcctttgtctctgttcctttcttgcagaagttggtagctgaggtggtgggaacatctttcttgatatttgcagggtgtgc

SEQ ID NO: 129473 - DNA, 220 bp, Glycine max
atcgagcgattcggctgagaaactctcaaggaatggcaacaggatctaccttgtgacaaaattcctagtgtcttgactacaactgatgaaagattggtaggcacagaacatgagggatatgatccttttcttggtggaattcaaaaatatgccactcccatgatgcccctagatgaagaaattctttctaaggttgcacaagatatggttgaggaatggt

SEQ ID NO: 129474 - DNA, 217 bp, Glycine max
cttatccctctaatcactctagctgttgcaaatttctactatttttcaatggcttctgcagatgttgagttccgttgctttgttggtgggcttgcttgggtcaccggcaacgatgccctcgagaaagccttttcaatctacggcgacatcgttgaatcgaaggttatcaacgaccgtgagactggaaggtccagaggattcggatttgtgaccttcg

SEQ ID NO: 129475 - DNA, 226 bp, Glycine max
cgacttcttccctgtggaggttgatagtcaagagggagttgttcacattggtgaattgaaatctggtgtctatgttccactgcctacaaaaactgatttggtggaaactcccaaggaatggcaactggatctaccttgtgacaaaattcctagtgtcttgactacaactgatgaaagattggtaggcacagaacatgagggctatgatccttttcttggtggaatt

SEQ ID NO: 129476 - DNA, 225 bp, Glycine max
accagggcgcagattcaatgctcatggacatttcttcaaaaatctgactcagaaagtgcgagtccaaattgttacatctgaaaagagttactggcatgtgtatgatccttacaagtttcagatgtttgacagcagtgagataggtctttattctaatcccactttggaagatatcccacattcagcttgggaccttttttgctgggacagtgagaaaatttgcca

SEQ ID NO: 129477 - DNA, 225 bp, Glycine max
gggaagttgtatgagggtaagcatattcctgtatctaatattagtgcaggggaaaatcatgtagtcaaaatacccctaatggcacaggaggaaattctgtcttctagtgcaagtgatttcagaactgcaatggtgagtaataatagcaagcctcaagctactgcaatgcatgtgggagctatagaaattatcattgatagtttcgcaagtcctgactgcaacata

SEQ ID NO: 129478 - DNA, 216 bp, Glycine max
ggcagactagtatccgatcctctgtcctctcgaagctttcatcgttcaacatattctcaccatctcagtcatgggcctgctatcttgttttaggtcaccgtcctgagaaaatgttccaaaggaagctctggcatgtcaagattcctgtatacgaacaattttcaacgaaacttgatttcgtctggtggcaatgaatcgtattatgggtattttaac

SEQ ID NO: 129479 - DNA, 217 bp, Glycine max
cttgttggtaaaaaagaaagagaagagaagaatcgaagacgaagatggaggacgcatcagcatcaaagttcattccacaccaaatcggacctgtccaaacgacgcgcttcgattcggtctccatggagtcaagagcgacatcgttggttctcaccctcttcaatcttcactccaatctacaaggagaatggatgaagcgatgaagaggcaatgcaaa

SEQ ID NO: 129480 - DNA, 157 bp, Glycine max
aattttgataaccgcgatcacaggttgccgcaccttaaaaccggaaacaaaagcaatcgttacttgatttcaagaatctctcaatttcttcctacttctttgtgtacggtttcttaagggaaagaaaatcactctctgtgctggccacagacttcgt

SEQ ID NO: 129481 - DNA, 212 bp, Glycine max
ggagtttggatttttgaagcgtaccggatttcactgtgatatcatttgtgtcactggatggactgccaccccaatgcaggatgttcaggttaaattgattggtttatttcctctcaggaatgtgttcccaggacttattgtgttttaaatccacaaaatccttttgtgttaaataggtggatggggaaactgactttcccccagggcacttc

SEQ ID NO: 129482 - DNA, 154 bp, Glycine max
attttgataaacgcgatcacaggttgccgcaccttaaaaccggatacaaaagcaatcgttatctgatttcaagaactctccaatttcttcctacctcctgtgtacgatttcttaagggaaagaaaatcactctctgtgcttgccacagacttcg

SEQ ID NO: 129483 - DNA, 216 bp, Glycine max
gctttgacagaagaggaaaagatggaggtgattagaaatagaggcattcctgctgatgttcttgcaaagcgagctcatgaatttgaaaaacatgttgctcatgaaagcctcaaggatcaaattcctgctgttgacaagttgtattctactaaggttaataagtttgcaaaaattatgaaccttagacaaagtgttgttggtgatcttaaacttctt

SEQ ID NO: 129484 - DNA, 221 bp, Glycine max
gttgaacctgataatgaccctcctcaaaagatgggagatccttctgctgaaataacggaagaacaaagggatgctgcacaactagcaaaatcaaaagcagtcgatgctatgtcacaaggtaatttggatgaagcactggcccaactgacagaagccattttgttgaatccgcaatcagctatactttatgctactagagctagcatctatatgaaattgaa

SEQ ID NO: 129485 - DNA, 206 bp, Glycine max
gtgtggttgaaagctaagaagtagcaaagatgtttccattcgggcacaagggtcaaaagataaaggggactatggtggttatgcagaagaatgtgttggatatcaacagcatcaccagtgttgacgggatcgtcggcaccggcttagacttcttaggcagtgcactcgatacagttacttgtttagcctcctccatctccatccaa

SEQ ID NO: 129486 - DNA, 218 bp, Glycine max
ctttctcttccttctcatcattctcatattattgtcgccacttcgacctcaatcaccctcgcgccctcgctcttcccttcctggtggcgacaatgtcgactcctgctaggaagaggctgatgagagacttcaagaggctgcaacaagacccgcctgcagggatcagcggtgccccccaggataacaacataatgctgtggaatgctgtcatatttggt

SEQ ID NO: 129487 - DNA, 213 bp, Glycine max
agagattggatcacacttatacaaaattctccaattagtaacttgttgagagttgctgcttggaagaaaggctgtttaatggttaaaattgtgatgtctgggaatgcagcagtcaaaaggagtgattgggcctcattggtacaagtgtttttaacaaacagcaacagtacagagcatttcgatgcatgtaagtggacaaaatcggaaccacat

SEQ ID NO: 129488 - DNA, 213 bp, Glycine max
gcagagcttttgtcaattttctattgaccttctcggtggaggaattttagtggacaaaactggagattggatcacacttatacaaaattctccaattagtaacttattgagagttgctgcttggaagaaaggctgtttgatggttaagattgtgatgtctgggaatgcagcagtcaaaaggagtgattgggcctcactggtacaagtgttttt

SEQ ID NO: 129489 - DNA, 217 bp, Glycine max
ttttacgacggcagatacaaattctggactaaacacgaccaaacatctgctttgacagaagaggaaaagatggaggtgattagaaatagaggcattcctgctgatgttcttgcaaagcgagctcatgaatttgaaaaacatgttgctcatgaaagcctcaaggatcaaattcctgctgttgacaagttgtattctactaaggttaataagtttgcaa

SEQ ID NO: 129490 - DNA, 216 bp, Glycine max
gtttattcttctctcggcgtcgccatggacgaagaagaggtgcgcaagatcttcagcaagttcgacaagaacggcgacggcaagatctcgtgcgcggactgaaggagatgatggcggcgctgggatccaaaacgacgtcggacgaggtgaagcgcatgatggcggagctggaccggaacggcgacggctacattgatttgacggagttcggcgagt

SEQ ID NO: 129491 - DNA, 227 bp, Glycine max
ttactttagtggttctaaattgataagctttctagctggtcataatatcaccattactgatggtattgacaaaactagtgcaactttgcaatttagaaagttagcagattgtgattttctcaagagaaactttaagcagatgtctaatgttttgtgggtggctcctgaggataaggcgagtttatggtcactactttcatatgtttcgtgtaataatctggaaatgc

SEQ ID NO: 129492 - DNA, 224 bp, Glycine max
ttgaaaacacagtgcttgtttagactagtatcttccatggctccgaaagatagaatcctggttttgggacccacaggagccattggaagacacatagtttgggcaagtgtaaaggcagggaatcccacttttatattggttagggacacccctgcctctgttaacaagccaaggcttgtcactgctgctaatcctgaaaccagggaagagctcaatcagagctt

SEQ ID NO: 129493 - DNA, 229 bp, Glycine max
tgatgataacttaattagtgttcatgaatatgtcaagccttactttagtggttctaaattgaaaagctttctagctggtcataatatcaccattactgatggtattgacaaaactagtgcaactttgcaatttagaaagttagcagattgcgattttctcaagagaaactttaagcagatgtctaatgttttgtgggtggctcctgaggacaaggcgagtttatggtca

SEQ ID NO: 129494 - DNA, 225 bp, Glycine max
caatttgtaagaaagatgtttggagagttgaatgtggaatcccttctggatttccgctcacagttatttgcaatagtatttttaatgagatgctcattagatatagctatgaaaaattactgcgccaggctaaagctccaagtatgtttttacaatccttcaaaaattttgtttctttgtgtgtgtatggtgatgataacttaattagtgttcatgaatatgtca

SEQ ID NO: 129495 - DNA, 225 bp, Glycine max
ctcgagccgctcgtctttgaagtttctaagatgacttctccctacattaaatgtacagtcatcttcttcatagcatttggaaatttggctgatgacaccatcaattttgaggcttttccccacaagctggtgcattttggagagattcaggaaaaagtgttattgaaattttcacaagaggaatttcttacagcttggtcaactcaggtgcgtcctgcaacaact

SEQ ID NO: 129496 - DNA, 226 bp, Glycine max
agtttgttgtgagctataagctagtttatcgtgaggagaatatgaagttgtttgttttctttgttgctgcagtagttttggtagcatggccatgccatggcgcaggctaccaaaggttccctctccgaatgaaaactggctatggtgagcgttcttcggaggtaaaatgcgcaagttttaggcttgctgtggaagcacacaacatccgagctcttaaaaccattcc

SEQ ID NO: 129497 - DNA, 224 bp, Glycine max
gagcgaatcggctcgagggaatgattaaaatggtggccacagttggtattcctgagaatacaggtatagcattgacctgtgctatgaatagttcttttagggggcgtgccagttctgatatttacaccatctgctctcaagactgtgaattatggaatcctgcttgcacaaaagcaatgactatgtcattacatccaaacccgtgttctgatgcatggagtttg

SEQ ID NO: 129498 - DNA, 233 bp, Glycine max
ggccaatagattactgagtaagggcaacgatattctgtgttgcgattatgctagttttgatggtttgattaccaagcaagttatgagcaagatggcagaaatgataaacagtctttgtggtgggcatgaaaaattgatgcgtgaaaggacacacctgctgttggcttgttgttcaagaatggcaatttgtaagacagatgtttggagagttgaatgtgggaatccttctggat

SEQ ID NO: 129499 - DNA, 230 bp, Glycine max
ggaaggcctcaaacagccttagtcaaagggcaggttgaagaggagaagggtggaatcaagaccgatgctttcttcaaaactaatctttccgatgtatatgctgttggtgatgttgctactttccctttgaaattatacggtgaattgagaagagttgaacatgttgatcattctcgcaaatcagctgaacaggctgtgaaggccatcaaggcagctgaggaaggaagaac

SEQ ID NO: 129500 - DNA, 231 bp, Glycine max
agaaaagaaaatcctcaattttctgagcagccaaacactctctctctgtctctcgaaaattctcagtttgcagagaaaatctgaatcatgtcgtggcaagcgtatgtcgacgatcaccttctgtgtgacatcgaaggtaaccacctcactcacgctgctatcatcggccaagacggcagcgtttgggctcagagtaccgacttccctcagttcaaacctgaggagataact

SEQ ID NO: 129501 - DNA, 230 bp, Glycine max
gaaaatcatgtagttcaaatacccctaatggcacaggaggaaattctgtcttctagtgcaagtgatttcagaactgcaatggtgagtaaaaatagcaagcctcaagctactgcaatgcatgtgggagctatagaaattatcattgatagtttcgcaagtcctgactgcaacatagttggtgcaatgcttttggttgatacttatcataccaatcctgaaaatgcagttcg

SEQ ID NO: 129502 - DNA, 187 bp, Glycine max
aggaagactgggatatgcttcattgataccatatgttgagccagttgtgcaagctcaaagtgctgaagtttactttgacttcttccctgtggaggttgatagtcaagagggagttgctcacattggtgaattgaaatctggtgtctatgttccactgcctacaaaaacccatttggtggaaactccc

SEQ ID NO: 129503 - DNA, 214 bp, Glycine max
taagcatattcctgtatctaatattagtgcaggggaaaatcatgtagttcaaatacccctaatggcacaggaggaaattctgtcttctagtgcaagtgatttcagaactgcatatggtgagtaaaaatagcaagcctcaagctactgcaatgcatgtgggagctatagaaattatcattgatagtttcgcaagtcctgactgcaacatagttgg

SEQ ID NO: 129504 - DNA, 224 bp, Glycine max
cttgtgacaaaattcctagtgtcttgactacaactgatgagagattggtaggcacagaacatgagggatatgatccttttcttggtggaattcaaaaatatgccactcccatgatgcccctagatgaagaaattctttctaaagttgcacaagatatggttgaggaatggtttgattgtgttgatgaggaggattcctttgaggaagtttctttaagtgcagca

SEQ ID NO: 129505 - DNA, 225 bp, Glycine max
gaaaagaaaaaccagctttcttcaagcacctagatttcctctctctctaaatggcgttctcttcttttctcggcagagtcctcttcgcctccgttttcatcctctccgcttaccaagaatttaattcttatggagttgatgggggacccgcagcaatagcactcagaccgaagtttgatgcctttgcacatcaagtacattctaaagttggctttcaacttccag

SEQ ID NO: 129506 - DNA, 223 bp, Glycine max
gtgactgtcagaaacaaacattatttggttttctgaattgtttggattgcgagaaaaaaaaagggggggaaatggcaaaggatattcgattcttcgacctcaacacgggcgccaagatcccttcagtcggcttgggaacttggcagtctgatcctggccttgttgctgaagccgtcgcggcggccatcaaggttggttaccgccacattgattgtgctcaaat

SEQ ID NO: 129507 - DNA, 227 bp, Glycine max
ctttaagtgcagcacttaatggtgttgagggtttggactatatggaaagaattcctcttgccacatctgagggttttcctcatgtgctttcacgcaaaaatggtgaaaaaggcaaaagaagatttgtttctggggatggtgaagagatgacattgattccgggaaccagtgttgaagaggcttacaacaagctaatagttgacactgagaaaagtgttcctacattg

SEQ ID NO: 129508 - DNA, 192 bp, Glycine max
caaaatgttgggtgtgttcagcagctccatagtgtcgccgccggacgagctcgtggtcgccggcagccgtactccgtcgccgaagatgacggcggcggcgctgcggaagcggttcgaggagaagaacccctccgccgtgtcggttgaggtcggagagcatgtccagctcgcttatatccaccacaacgagtc

SEQ ID NO: 129509 - DNA, 234 bp, Glycine max
gctcgagccgctcgagccgctcgagccgctttgaacgccgaagaacgttcatccaatccccgcagcccttgaccgcattgcaacgatgtcgaggagaaaggtcagagagccaaaggaagaaaacgtgactctgggcccagctgttagagatggtgaacatgtctttggcgtcgctcgcatctctgcctccttcaatgataccttcattcatgtcactgatttgtctgggaggga

SEQ ID NO: 129510 - DNA, 229 bp, Glycine max
ctcgagccggcttcttgttgttggaaagaaaccctagcaagcggaacaatggcagacgttgaggtcgatgtggcggctgcagcagcagcagggcagccgaagaagagaacgttcaagaagttcagtttcaggggcgtggatctcgatgcgcttctggacatgtccaccgatgaactcgtgaagatgttcagtgctcgcgcacgtagaaggttccagagaggcctcacca

SEQ ID NO: 129511 - DNA, 223 bp, Glycine max
gccacatctgagggttttccccatgtgctttcacgcaaaaatggtgcataaggcaaaaggagatttgtttctggggatggtgaagagatgatcttgattccgggaaccagtgttgaagaggcttacaataacctaatagttgaacttgagaaaagtgttcctacattggttggcattgaatgtcccaaggatgagaaacttcctcgtcgcaaaatttttgaca

SEQ ID NO: 129512 - DNA, 220 bp, Glycine max
ctcgagccgctcgtctttgaagtttctaagatgacttctccctacattaaatgtacagtctctttcttcatagcatttggaaatttggctgatgacaccatcaattttgaggcttttccccacaagctggtgcagtttggagagattcaggaaaaagttgtattgaaattttcacaagaggaatttcttacagcttggtcaattcaggtgcgtcttgcaa

SEQ ID NO: 129513 - DNA, 224 bp, Glycine max
gtcagaagtttttaaattttgtgaggttcattatgaagaaaagggacaagcttagttgtcaagttggaatcaacccatactccatggaatggactggtttggccaatagattactgagtaagggcaacgatattctgtgttgcgattatgctagttttgatggtttgattaccaagcaagttatgagcaagatggcagagatgataaacagtctttgtggtggt

SEQ ID NO: 129514 - DNA, 223 bp, Glycine max
ggcaactataaacaatatgtgtgcatatgggctcaatcctggtatttcaggttctcgtcttttgggcaccattcctcagtccatttcacagcaaactgtttggaatcaaatggcaacagtgagaacaccattgaattttgatcctagcaagcagagcttttgtcaattttctattgaccttctcggtggaggaattttagtggacaaaactggagattggatc

SEQ ID NO: 129515 - DNA, 224 bp, Glycine max
ctcgagccgtccgccacttctgaatctattgaatcaacaatcatgtcggacgaagagcacactttcgagtccaaggccgacgccggagcctccaaaacctaccctcagcaagccggtaccatccgcaagaacggctacatcgtcatcaaaggccgcccctgcaaggttgtggaagtttcgacttccaaaactggaaagcacggtcacgctaagtgtcactttgt

SEQ ID NO: 129516 - DNA, 224 bp, Glycine max
caacaagctaattgttgaacttgaaaaagtgttcctacattggttggtattgaatgtcccaaggatgagaaacttcctcgtcgcaaaatttttgacaaacctaagacgcgctgcttcactattctccctatggagtttaatcttgtggtccttcataagtttttaaattttgtgaggttcattatgaagaaaagggacaagcttagttgtcaagttggaatcaa

SEQ ID NO: 129517 - DNA, 224 bp, Glycine max
atacaggcatagcattggcctgtgctatgaatagttcttttagggggcgtgccagttctgatatttacaccatctgctctcaagactgtgaattatggaatcctgcttgcacaaaagcaatgaccatgtcatttaatccaaacccgtgttctgatgcatggagtttggaatttctgaagcgtaccggatttcattgtgatcctatttgtgtcactggatggact

SEQ ID NO: 129518 - DNA, 184 bp, Glycine max
gaaattttgataaaccgcgatcacaggttgccgcaccttaaaaccggaaacaaaagcaatcgttacttaatttcaagaatctctcaatttcttcctacttctttgtgtactatttcttaagggaaagaaaatcactctctgtgctggccacagacttcgtgaatcattttcttttccacacaac

SEQ ID NO: 129519 - DNA, 225 bp, Glycine max
ctcgagccggcttgttgttcaaggatggcaatttgtaagaaagatgtttggagagttgaatgtggaatcccttctggatttccgctcacagttatttgcaatagcatttttaatgagatgctcattagatatagctatgaaaaattactgcgccaggctaaagctccaagtatgtttttacaatccttcaaaaattttgtttctttgtgtgtgtatggtgatgat

SEQ ID NO: 129520 - DNA, 222 bp, Glycine max
gagccgaatcggctcgagcgaagtgttaagagaatgcctctatctatagggggaggaactggtgcaaagaatgctattctgatgaatatgcgaaatgctgttctttcaatgtggagatattttgttggagatctcgtctttgaagtttcttagatgacttctccctacattatatgtacagtctctttcttcatagcatttggaattttggctgatgacacc

SEQ ID NO: 129521 - DNA, 224 bp, Glycine max
attttgttgaaggagaggaagtatctaatggtgcagcagttgagaacaaacagcaagaagtacttaaggtaattgttacggaagtcttgggtggtggtaaattctatgttcagacagttggagatcaaaagattgcatccattcagcaacagcttgcttctttgaacctaaaggatgctcctgtgcttggtgctttcaatcctaagaagggtgatatagtcctt

SEQ ID NO: 129522 - DNA, 220 bp, Glycine max
ctcgagccgccaattatcagcttgaaatgatgagatgcctgagggaggttaatgttgacaacaacacagttggatggtaccagtctacattgcttggctccttccagactgtggagcttattgaaacctttatgaattaccaggagaatattagacgctgtgtttgcataatatatgatccatcaaggtctgatcaaggtgttctagctctgaaggcatt

SEQ ID NO: 129523 - DNA, 221 bp, Glycine max
taggtttttagggtttacaccgagcagcgacacctccctcccgcagtagccatggttctcaaaactgaactatgccgattcagtggtgccaagatctacgccggttaggtcatcatatttgttcgtagtgattctcaggttttcctgtttgccaactcaaaatgtaagcggtatttccacagccgcctgaagccctcaaagctcacctggactgctatgta

SEQ ID NO: 129524 - DNA, 224 bp, Glycine max
ggttcgtcagaagtttttaaattttgtgaggttcattatgaagaaaagggacaagcttagttgtcaagttggaatcaacccatactccatggaatggactggtttggccaatagattactgagtaagggcaacgatattctgtgttgcgattatgctagttttgatggtttttttaccaagcaagttatgagcaagatgtcagaaatgataaacagtctttgtg

SEQ ID NO: 129525 - DNA, 234 bp, Glycine max
gcaaactgtttggaatcaaatggcaacagtgagaacaccgatgaattttgattctagcaagcagagcttttgtcaattttctattgaccttctcggtggaggaattttagtggacaaaactggagattggatcacacttatacaaaattctccaattagtaacttgttgagaggggctgcttggaagaaaggcttcttaatggttaagattgtgatgtctgggaatgcagcagt

SEQ ID NO: 129526 - DNA, 223 bp, Glycine max
ctcgagccgctcgagccgctcttatttgcttcttcgagtttcacagccaagtcgtaaaagggcttcaagggctggaaaacatgcagagcttctggcaattgggtgatgaactccgtgggcactcaaaagcatcggaggatcacaagtggttaatggttgcctcgaaactggccgaacagacaagattgaagggggagcgtgtgaacaaccttgatctttcaaa

SEQ ID NO: 129527 - DNA, 220 bp, Glycine max
ttcggattgcggcgacgtgagcggttcgctgcccgcgacgttatgagaagtccactgaaccttatcatttagagaagaaggcagaagacaagaagcctgaggagaaaaaaccagaagaaaaacctaaagagagtacggtggttttgaagatcaaactacactgtgacggttgcattgcgaaaattcgaagaatcattcttaggttcaaaggtgttcaatt

SEQ ID NO: 129528 - DNA, 221 bp, Glycine max
cttgcacaaaagcaatgactatgtcatttaatccaaacccgtgttctgatgcatggagtttggaatttttgaagcgtaccggatttcactgtgatatcatttgtgtcactggatggactgccaccccaatgcaggatgttcaggttactattgaacggtttatttcctctcaggaatgtgttcccaggacttattgtgttttaaatccacaaaatcctttt

SEQ ID NO: 129529 - DNA, 221 bp, Glycine max
gaattttagtggacaaaactggagattggatcacacttatacaaaattctccaattagtaacttgttgagagttgctgcttggaagaaaggctgtttaatggttaagattgtgatgtctgggaatgcagcagtcaaaaggagtgattgggcctcattggtacaagtatttttaacaaacagcaacagtacagagcattctgatgcatgtaagtggacaaaa

SEQ ID NO: 129530 - DNA, 192 bp, Glycine max
aagatttgaaattttgataaaccgcgatcacaggttgccgcaccttaaaaccggaaacaaaagcaatcgttacttgatttcaagaatctctcaatttcttcctacttctttgtgtacggtttcttaagggaaagaaaatcactctctgtgctggccacagacttcgtgaatcattttcttttccacacaaca

SEQ ID NO: 129531 - DNA, 222 bp, Glycine max
tgggcctcattggtacaagtatttttaacaaacagcaacagtacagagcattttgatgcatgtaagtggacaaaatcggaaccacattcctgggaattgatcttcccaatagaggtatgtggtcccaataatggttttgaaatgtggagttgagtgggcaaatcaaacttcccggcatttgagtttctctattgacaatcccaaacagtctacagtttttga

SEQ ID NO: 129532 - DNA, 225 bp, Glycine max
cgattatgctagttttgatggtttgattaccaagcaagttatgagcaagatggcagaaatgataaacagtctttgtggtggtgatgaaaaattgatgcgtgaaaggacacacctgctgttggcttgttgttcaagaatggcaatttgtaagaaagatgtttggagagttgaatgtggaatcccttctggatttccgctcacagttatttgtaatagcattttaat

SEQ ID NO: 129533 - DNA, 223 bp, Glycine max
ctcttcctcaccgattgctagactggaatttcgatgctcagtcatcgcttttaccattctcttctctcttgctcttgcaggagagagccatgtccatgcatcgctacctgaggaagattattgggaagctgtttggccaaacactcccattcccactgcactgcgagagcttctaaagcctctccctgcaggtgttgaaatcgatgaactccctaagcaaatt

SEQ ID NO: 129534 - DNA, 220 bp, Glycine max
gttctttcaatgtggagatattttgttggagatctcgtctttgaagtttctaagatgacttctccctacattaaatgtacagtctctttcttcatagcatttggaaatttggctgatgacaccatcaattttgaggcttttccccacaagctggtgcagtttggagagattcaggaaaaagttgtattgcaattttcacaagaggaatttcttacagctt

SEQ ID NO: 129535 - DNA, 218 bp, Glycine max
gagaatacaggtatatcattggcctgtgctatgaatagttctttcagggggcgtgccagttctgatatttacaccatctgctctcaagactgtgaattatggaatcctgcttgcacaaaagcaatgactatgtcatttaatccaaacccgtgttctgatgcatggagtttggaatttctgaagcgtaccggatttcattgtgatatcatttgtgtcac

SEQ ID NO: 129536 - DNA, 209 bp, Glycine max
gataggtgagagtgttgattccatcaaatctcttcagatccgccaggtcctcacccaggctgttagcctcggcatgattgttacctctgcactgataatatggaaggcattgatgtgcattactggcagtgaatctcctgttgttgttgttctttctggaagcatggaacccggattcaagcggggagacatcttattcttgcacatga

SEQ ID NO: 129537 - DNA, 260 bp, Glycine max
ggcgagtttatggtcacaacttcattatgtttcgtgtaataatctggaaatgcaagaagcttatcttgtcaatctcgtaaatgtgttacgagaattgtatttgcacagtccagaggaagctcgccaactgagaaggaaactctctctcgtattgaatggctgcaaaaagctgatgtgcctaccatagcacagattgaagagttccattcgatgcagaggatgatgaatgctcctgattcaaatgataatattgatctact

SEQ ID NO: 129538 - DNA, 242 bp, Glycine max
ttcggctcgaggagatattttgttggagatctcatctttgaagtttctaagatgacttctccctacattaaatgtacagtctctttcttcatagcatttggaaatttggctgatgacaccatcaatttgaggcttttccccacaagctggtacagtttggagagattcaggaaaaagttgtattgaaattttctcaagaggaatttcttacagcttggtcaacccaggtgcgtcctgcaaca

SEQ ID NO: 129539 - DNA, 253 bp, Glycine max
gctctagattggaaaaagtttcctctacaaaagcacaatttgttagtggaaaaaccttcaaatatgatatagttggtgctggttcacattcttcagaagatttttctgaaaaggaagatcaagaaaaacccaaaagattgatgccagattgagacaaagaatagactctcaatacaatgaggttcaggctcagatggaaacaaatttgtttaaattgtctcttgatgatgttgaaactcctaaaggttccatg

SEQ ID NO: 129540 - DNA, 245 bp, Glycine max
gcgtagtgatctattggcaaattttctgacagagggcaattttagagcaagtgttgatttgcagcgcactcatcgtattaaaggaatgattaaaatggtggccacagttggtattcctgagaatacaggtaagcattggcttgtgctatgaatagttcttttagggggcgtgccagttctgatatttacaccatctgctctcaagactgtgaattatggaatcctgcttgcacaaaagcaatgac

SEQ ID NO: 129541 - DNA, 241 bp, Glycine max
caaagatgagatctccaacaaaatatctccacattgaaagaacaatcatttggagatatttagttggagatctcgtctttgaagtttctaagatgacttctccctacattaaatgtacagtctctttcttcaagcattactgaaatttggctgatgacaccatcaattttgaggcttttccccacaagctggtacatcttggagagattcaggaaaaagttgtattgaaattttcacaaga

SEQ ID NO: 129542 - DNA, 239 bp, Glycine max
ggaagcccttgagaaaggtgaatttgttaaagatgacagaagggtactacagcccttctcgaaaggaccaaggagctgtatcgggaagaatctggctctgcacgagatccgcctgaccctagcttatctttatggcatttcgacttatatgccacgagtgcgagcgagaactggcttcagcaaaaaagttatcttgcgtgggataggcctgcgctacaagtcgtagtccaggggacgga

SEQ ID NO: 129543 - DNA, 242 bp, Glycine max
gttctttcaatgtggagatattttgttggagatctcgtctttgaagtttctaagatgacttctccctacattaaatgtacagtctctttcttcatagcatttggaaatttggctgatgacaccatcaatttgaggcttttccccacaagctggtgcagtttggagagattcaggaaaaagttgtattgaaattttcacaagaggaatttcttacagcttggtcaactcaggtgcgtcctgca

SEQ ID NO: 129544 - DNA, 218 bp, Glycine max
tttaccggagaggtgttaaaaactccagtatcattggacatgcttggccgcatattcaatggttctggaaaaccaattgataatggtccacccatattacccgaggcttacttggacatatcaggaagttcatcaaccctagtgagagaacctatcctgaggagatgatacagacagggatatctaccattgatgtcatcaattctattgctagaggt

SEQ ID NO: 129545 - DNA, 196 bp, Glycine max
gacttattgtgttttaaatccacaaaatccctttgtggtcaatatgggggttgggggaaactgacttttcccaggggacttcccgaagtgttaagagaatgcctccttctatagggaggaggagctggtgcaagaatgccattgctctggatatgccaaaatgctggtactttcaatggggagatattttggtgga

SEQ ID NO: 129546 - DNA, 246 bp, Glycine max
ttccgccgctcgtgccgcgaggggatctgcggctcctgcgccatgaacatcgacggttgcaacggcctcgcgtgcctcaccaagatcccctccgaaggcgccgccaccacgatcacccctctgccacacatttcgtgatcaaggacctcgtcgtcgacatgacgaacttctacaatcagtacaagagtatcgagccgtggctcaagaggaagaacccaccggagccggggaaggagattctacaga

SEQ ID NO: 129547 - DNA, 247 bp, Glycine max
atgaggataaggcgagtttatggtcacaacttcattatgtttcgtgtaataatctggaaatgcaagaagcttatcttgtcaatctcgtaaatgtgttacgagaattgtatttgcacagtccagaggaagctgccaattgagaaggaaagctctctctcgtattgaatggctgcaaaaagctgatgtgcctaccatagcacagattgaagagttccattcgatgcagaggatgatgaatgctcctgat

SEQ ID NO: 129548 - DNA, 240 bp, Glycine max
caacaactctgttggctgatgggtgtccatatttgtatgctatggtgcatgatagttcagtgtctacaataccaggtgattttgtcattggtgttaagttgacaaccataaacaatatgtgtgcatatgggccaatcctggtatttcaggttctcgtcttttgggcaccattcctcagtctatttcacagcaaactgtttggaatcaaatggcaacagtgagaacaccattgaattttga

SEQ ID NO: 129549 - DNA, 245 bp, Glycine max
tgatcacacttatacaaacctctccaactcctaacttgttgagagttgctgcttggaagaaagattgtttaatggttaaaattgtgatgtctgggaatgcagcagtcaaaaggagtgtttgggcctcatgtacaagtgtttttaacaaacagcaacagtacagagcatttcgatgcatgtaagtggacaaaatcggaaccacattcctgggaattgatcttcccaatagaggtatgtggtcctaa

SEQ ID NO: 129550 - DNA, 236 bp, Glycine max
cttttgtgttaaataggtggatggggaaactgactttcccccagggcacttctcgaagtgttaaaagaatgcctctttctatagggggaggagctggtgcaaagaatgctattctcatgaatatgctaaagctgttctttcaaggtggagatattttgttggagatttcgtctttgaagtttctaagatgacttctccctacattaaatgcacagtctctttcttcatagcatttg

SEQ ID NO: 129551 - DNA, 243 bp, Glycine max
acaaattctggactaaacacgagaaaaatcttgctttgacagaagaggtaaagatggaagtgattagaaatagaggcattcctgctgatgttcttgcaaagcgagctcatgaatttgaaaaacatgttgccatgaaagcctcaaggatcaaattcctgctgttgacaagttgtattctactaaggttaataagtttgcaaaaattatgaaccttagacaaagtgttgttggtgatcttaaact

SEQ ID NO: 129552 - DNA, 243 bp, Glycine max
gcgatctcgttctgttctgtacctgcacccagccgcagcagcaagtgatcgaagcgaaaagagagtaatcagcagagaaattcatcgtcgtagttatgggtaaagttcacggatcacttgcacgtgccggaaggttagaggccaaaccccaaaagtggtcaagcaggataagaagaagaagccacgtggccgcgctcacaagaggatgcagtataatcgccgattcgtcaccgccgtggtggg

SEQ ID NO: 129553 - DNA, 247 bp, Glycine max
agcagttgaaagtagcaaagatgtttcctttcgggcaaaagggtgcaaagataaaggggcctatggtggcaatgcagaagaatgtgttggatatcaacagcatcaccagtgttggagggatcgttgaccaaggcttaggcttcataggcagtgcagtcgatgcacttacttttgcagccaccaaaatctccatccagttgcttagtgctactcaaggctgatggtgggaaaggaaaaattggaaaga

SEQ ID NO: 129554 - DNA, 240 bp, Glycine max
ctttgttcactgttcttctcttgcggctagggttttagcgcacatcttctagatttaaggaagatgggtaaggaaaaggttcacttcagtattgtggtcattggccatgtcgactctgggaaatccataccactggtcacctgatttacaagcttggaggcattgacaagcgtgttattgagaggtttgagaaggaagctgatgagatgaacaagaggtctttcaagtatgcctgggtgc

SEQ ID NO: 129555 - DNA, 240 bp, Glycine max
tcaaggcctggagtcatcattaacaaaccagatggaggtgatgtttatgaaggagttccaaaggattacaccggcgaagatgttactgttggtaacttttttgctgctttacttggaaacaagtcggccttactggtggcagtgggaaggttgtggacagtggacctgatgatcatctatttgtatactatactgcgaatggaggtccaggggtgctcgggatgcctgctggtccttact

SEQ ID NO: 129556 - DNA, 248 bp, Glycine max
gaaaatcctcaattttctgagcagccaaacactctctctctgtctctcgaaaattctcagtttgcagagaaaatctgaatcatgtcgtggcaagcgtatgtcgacgatcaccttctgtgtgacatcgaaggtaccacctcactcacgctgctatcatcggccaagacggcagcgtttgggctcagagtaccgacttccctcagttcaaacctgaggagataactgccatcatgaatgactttaatgag

SEQ ID NO: 129557 - DNA, 193 bp, Glycine max
ttttactttccctatggctcgtcacatcctgctcttagccctcctcctcttcgccgcagtggccaccgcagcgatggggtgccgcgtccgacgccgacgacatcctgatccgtcaggtggtgccagatttggcgaaccgaaggaggaggacaacctgctgaacgccgagcaccacttcgcgagcgtcaaggcc

SEQ ID NO: 129558 - DNA, 215 bp, Glycine max
gttgctcataacgttaatcatccccaagagaaagatttgttggagggtaatttttcctttgatattaaatctcgctctagattggaaaaagtttcctctacaaaagcacaatttgttagtggacaaacttcaaatatgataaattggtgctggtcacatctcagagatttcctgaaagagtcaggatactcaaagatgtgcagatgagcaagata

SEQ ID NO: 129559 - DNA, 240 bp, Glycine max
tttaagtgcagcacttaatggtgttgagggtttggactatatggaaagaattcctcttgccacatctgagggttttcctcatgtgctttcacgcaaaaatggtgaaaaaggcaaaagaagatttgttctggggatggtgaagagatgacattgattccgggaaccagtgttgaagaggcttacaacaagctaatagtggaacttgagaaaagtgttcctacattggttggcattgaatgt

SEQ ID NO: 129560 - DNA, 240 bp, Glycine max
acggctcgagctcgagccgattcggctcgaggtttgaccaaaacccctcacaacacataaccccaacagcacacagaaagaaagaagagaacaacagaacaatggaaggaggaggagctgctccgccgccgacaccgtgatgtccgacgcggcgccaccgaccgcaacagcctccggtggcgatggggatcgagaatattccggcgacgctgagccacggcgacaggttcatccagtaca

SEQ ID NO: 129561 - DNA, 214 bp, Glycine max
cgagaacaaaaaaaaaaacgtgattcgctcttctcttcgaataaaccacaaaaccaacaaacgagaagaggagtaagagaagatggggttgtcgttcaggaagctgttcagcaggttgtttgcgaagaggaaatgaggattcccgactggctaggtccacgaatgctagctcggctacagacaagccatacttgtcaccaagtctccagagctt

SEQ ID NO: 129562 - DNA, 254 bp, Glycine max
attcggctcgagagggggatgagctggtgcaaagaatgctattctcatgaatatgccaaatgctgttctttcaatgtggagatattttgttggagatttcgtctttgaagtttctaagatgacttctccctacattaaatgacagtctctttcttcatagcatttggaaatttggctgatgacaccatcaattttgaggcttttccccacaagctggtgctaccttggagagattcaggaaaaagttgtgttga

SEQ ID NO: 129563 - DNA, 189 bp, Glycine max
taagatttgaaattttgatataccgcgatcacaggttgccgcaccttaaaatcggaaacaaaagcaatcgttacttgatttcaagaatctctcaatttcttcctacttctttgtgtacggtttcttaagggaagaaaatcactctctgtgctggccacagacttcgtgaatcattttcttttccacaca

SEQ ID NO: 129564 - DNA, 228 bp, Glycine max
ggcgatgatgtaagtgattagaactagaggcattcctgctgatgttcttgcaaagcgagctcatgaatttgaaaatcatgttgctcatgaaagcctcaaggatcaaattcctgctgttgacaagttgtatctactactgttaataagtttgcaaaaattatgaaccttagacaaagtgttgttggtgatcttaaacttcttactgatgggaagttgtatgggggtaag

SEQ ID NO: 129565 - DNA, 235 bp, Glycine max
ttggaagaaaggctgtttaatggttaaaattgtgatgtctgggaatgcagcagtcaaaaggagtgattgggcctcattggtacaagtgtttttaacaaacagcaacagtacagagcatttcgatgcattaagtggacaaaatcggaaccacattcctgggaattgatcttcccaatagaggtatgtggtcctaacaatggttttgaaatgtggagttctgagtgggcaaatccaa

SEQ ID NO: 129566 - DNA, 243 bp, Glycine max
cttgttgagagttgctgcttgtgaagaaaggctgtttaatggttaaaattgtgatgtctgggaatgcagcagtcaaaaggagtgattgggcctcattggtacaagtgtttttaacaaacagcaacagacagagcatttcgatgcatgtaagtggacaaaatcggaaccacattcctgggaattgatcttcccaatagaggtatgtggtcctaataatggttttgaaatgtggagttctgagtg

SEQ ID NO: 129567 - DNA, 239 bp, Glycine max
ctcgagccgcttcataagtacctcaaggacaaaggtgcacttagtccttcaacagccatcaattttggcttggatattgctagagggatggcttatcttcacaatgaaccaaatgttatcatgtatgagacctaaagccaaggaatgttcttttagtcaactccagtgctgaccatttaaaagttggtgattttggacttagtaagctcattaaggtccaaagtgctcatgacgtatac

SEQ ID NO: 129568 - DNA, 117 bp, Glycine max
ctcgagccgtgataattttgctgaagtgcacaaactctatgaaggtggagttacactacctatcaaactattcttcagcaagatcgtcccctactaccagctgataccaaggacaat

SEQ ID NO: 129569 - DNA, 237 bp, Glycine max
cggctcgagctcgagccgattcggctcgaggtttggagagattcaggaaaaagttgtattgacctgttcactagaggaatttcttacagcttggtcaacccaggtgcgtcctgcaacaactctgtggctgatgggtgtccatatttgtatgctatggtgcatgatagttcagtgtctacaataccaggtgattttgtcattggtgttaagttgacaaccataaacaatatgtgtgca

SEQ ID NO: 129570 - DNA, 188 bp, Glycine max
tactatttgaaattttgataaaccgccttcacaggttgccgcaccttaaaaccggaaacaaaagcaatcgttacttgatttcaagaatctctcaatttcttcctacttctttgtgtacggtttctaagggaaagaaaatcactctctgtgctggccacagacttcgtgaatcattttcttttccacac

SEQ ID NO: 129571 - DNA, 235 bp, Glycine max
aattcctagtgtcttgactacaactgatgagagattggtaggcacagaacatgagggatatgatccttttcttggtggcattcaaaaatatgccactcccatgatgcccctagatgaagaaattcttctaaagttgcacaagatatggttgaggaatggtttgattgtgttgatgaggaggattcctttgaggaagtttctttaagtgcagcacttaatggtgttgaagggttgg

SEQ ID NO: 129572 - DNA, 244 bp, Glycine max
gaaaaattgatgcgtgtaaggacacacctgctgttggcttgttgttcaaggatggcaatttgtaagaaagatgtttggagagttgaatgtggaatcccttctggatttccgctcacagttatttgcatagcatttttaatgagatgctcattagatatctctatgaaaaattactgcgccaggctaaagctccaagtatgtttttacaatctttcaaaaattttgtttctttgtgtgtgtatgg

SEQ ID NO: 129573 - DNA, 240 bp, Glycine max
aaatttggctgatgacaccatcaattttgaggcttttccccacaagctggtacagtttggagagattcaggaaaaagttgtattgaaattttcacaagaggaatttcttacagcttggtcaacccggtgcgtcctgcaacaactctgttggccgatgggtgtccatatttgtatgctatggtgcatgatagttcagtgtctacaataccaggtgattttgtcattggtgttaagttgaca

SEQ ID NO: 129574 - DNA, 216 bp, Glycine max
gttgttggtgatcttaaacttcttactgatgggaagttatatgagggtaagcatattcctgtatctaatattagtgcaggggaaaatcatgtagttcaaatacccctaatggcacaggaggaaatctgtcttctagtgcaagtgatttcagaactgcaatggtgagtaaaaatagcaagcctcaagctactgcaatgcatgtgggagctatagaaa

SEQ ID NO: 129575 - DNA, 238 bp, Glycine max
agacaacatttggacgcggtagagaagaaagaaaggaaagggtagggtagatcaggcaggcttcagttcagccatgagaactcacactcacacttacacttatactattttctctctaattctctctccttatttcttcgaacccattccgaggttataacgttaacctctgatacatttaatgataagatcaaggagaaagacactgcatggtttgtgaaattctgcgttccctggt

SEQ ID NO: 129576 - DNA, 236 bp, Glycine max
gccaaatgctgttctttcaatgtggagatattttgttggagatctcgtctttgaagtttctaagatgacttctccctacattaaatgtacagtctctttcttcatagcatttggaaatttggtgatgacaccatcaattttgaggcttttccccacaagctggtacagtttggagagattcaggaaaaagttgtattgaaattttcacaagaggaatttcttacagcttggtcaac

SEQ ID NO: 129577 - DNA, 238 bp, Glycine max
  unsure (1)..(238): unsure at all n locations
ctcgagccgttcttcttcttcctctcttcttcttcttcttcttcttcttgtcatggctgctacgtctaatctctccactctctcctcctcttccctctccaaacccccgtcctctttcccttccgcaacacaccaacaaacaacaacgcttcttttctacacaacaacctcctcaaanaccaaaactctctctctcacaaactctcttcccctctgcttctctgatgcaacccaaaaa

SEQ ID NO: 129578 - DNA, 160 bp, Glycine max
tctcgagccgaatcggctcgagcggaaacaaaagcaatcgttacttaatttcaagaatctctaaatttcttcctacttctttatgtacgatttcttaagggaaagaaaatcactctctgtgctggcacagacttcgtgaatcattttcttttccacacaa

SEQ ID NO: 129579 - DNA, 247 bp, Glycine max
gaagtttcccaatacagatatcgcaatgtgccaataaagcgcagagcatgagttgaaggccagatgtctttcgatcagtctgtagtagcaattatgtctaaatgcaaagccagcatgagaatgggaaaactgatgctcaaattttgatggttccagggcgcagattcatagctcatggacattttttcaaaaattcgactcagaaagtgcgagtccaaattgttacatctgaaaagagttactggca

SEQ ID NO: 129580 - DNA, 228 bp, Glycine max
tcttgttcctctcgcccagaatccgagatcaaccccgacgaaggcaaggggtttttctcggcttcttcagatttctgaaatggcgcctgtttcagctttagccaagtacaagctcgtcttcctggggaccaatccgtgggcaaaaccagcatcatcactcgcttcatgtatgataaattcgataacacctatcaggctacaattggtattgattttctatcaaaaact

SEQ ID NO: 129581 - DNA, 239 bp, Glycine max
aaagcattgcaccaactatgttgcagttcgtagtatttttgttgcgcctttcagaggcggaaggcccattcgggtggttacatttccgaataccatcgtgcatattgaaccagacatgaattcaagtttcagcttttgagtaccactaccaatggtgattttgttcaaggaaaagatctcgcaattgttaaagttaatgtagcatgtgctgctgttggcttgacatcaagttacactcc

SEQ ID NO: 129582 - DNA, 164 bp, Glycine max
gaaattttgataaaccgcgatcacaggttgcctcaccttaaaaccggaaacaaaagcaatcgttacttgatttcaagaatctctcaatttcttcctacttctttgtgtacggtttcttaagggaagaaaatcactctctgtgctggccacagacttcgtgaatc

SEQ ID NO: 129583 - DNA, 237 bp, Glycine max
ctctacaaaagcacaatttgttagtggaaaaaccttcaaatatgatataattggtgctggttcacattcttcagaagattttcctgaaaaggaagatcaagaaaaacccaaaaagattgatacagattgagacaaagaatagatcctcaatacaatgaggttcaggctcagatggaaacaaatttgtttaaattgtctcttgagatgatcgaaactcctaaaggttccatgttggat

SEQ ID NO: 129584 - DNA, 232 bp, Glycine max
cttaattagtgttcatgaatatgtcaagccttactttagtggttctaaattgaaaagctttctagctagtcataatatcaccattactgatggtattgacaaaactagtgcaactttgcaattagaaagttagcagattgtgattttctcaagagaaactttaagcagatgtctaatgttttgtgggtggctcctgaggacaaggcgagtttatggtcacaacttcattatg

SEQ ID NO: 129585 - DNA, 235 bp, Glycine max
ccgcgatcacaggttgccgcaccttaaaaccggaaacaaaagcaatcgttacttgatttcaagaatcttccaatttcttcctacttctttgtgtacgatttcttaagggaaagaaaatcacctctgtgctggccacagacttcgtgaatcattttcttttccactcttagtctatctcctggatactctcctatttgatataggtcttcgtgtcagatttaaactccttctgttt

SEQ ID NO: 129586 - DNA, 228 bp, Glycine max
ctcgagccgataataataactccattttccctctgtcttccccccctcctctacaaaaatatattattagcatggagaaggtgaattttgtgaagaatggagagcttagattgcctccgggttccgtttccacccgactgatgagcagctggttctgcaatacttgaagcgcaaggtcttctcctgccctttgccagcctctatcattcctgaggttcatgtttgcaa

SEQ ID NO: 129587 - DNA, 185 bp, Glycine max
tgaaattttgataaaccgcgatcacaggttgtcgcaccttaaaaccggaaacaaaagcaatcgttacttgatttcaagaatctctcaatttcttcctacttctttgtgtacggtttcttaaggaaagaaaatcactctctgtgctggccactcaattcgtgaatcattttcttttccacacaaca

SEQ ID NO: 129588 - DNA, 239 bp, Glycine max
gggtttttgagtgcggtgcggcgatcctagcactctcttctgcagctttcgccgacagcttcattcaccatggctgagcaaaccgagaaggcttttttgaaacaaccaaaagtgtttctcagctcgaagaaaactgggaagggaaagagacccggaaagggtgggaaccgcttttggaaatccattgggcttggatttaagactcccagggaagccatcgaaggaacctacattgacaa

SEQ ID NO: 129589 - DNA, 256 bp, Glycine max
cgtgatgataacttaattagtgttcatgaatatgtcaagccttactttagtggttctaaattgaaaagctttctagctggtcataatatcaccattactgatggtattgacaaaactagtgcaactttgcaatttagaaagttagcagattgtgattttctcaagagaaactttaagcagatgtctaatgttttgtgggtggctcctgaggataaggcgagtttatggtcacaacttcattatgtttcgtgtaata

SEQ ID NO: 129590 - DNA, 254 bp, Glycine max
agccctacctctttttcttctctctcaacactttcagcttctacctcctcgatcatgtctcacttcaagggcaagtaccatgatgagcttatcgccaatgctgcgtacattggcactcctggaaagggtattcttgctgctgatgagtcaacagggacaattggcaagcgtttggccagcatcagtgtagagaacattgaatccaacaggcgagctcttagggagctgcttttcactgctcctggtgttcttca

SEQ ID NO: 129591 - DNA, 249 bp, Glycine max
gaagtgttaaaagaatgcctctttctatagggggaggagctggtgcaaagaatgctattctcatgaatatgccaaatgctgttctttcaatgtggagatattttgttggagatctcgtctttgaagtttctaagatgacttctccctacattaaatgtacagtctctttcttcatagcatttggaaatttggctgatgacaccatcaattttgaggcttttccccacaagctggtgcagtttggagaga

SEQ ID NO: 129592 - DNA, 249 bp, Glycine max
ctcgagcgattcggctcaggttggttctttctttccccactttgtgagtgttagccttgaatcgattggattgacatggcgagcgcgatggttgaggacgccaacttcgaagatgaccagctcgccaatatgaccaccgacgacgtcgtcagagcttctcgtcttctcgacaacgagattcgcatcctcaaagaagagttgcagaggaccaatttggagttggaatcgtacaaggacaagatcaaggag

SEQ ID NO: 129593 - DNA, 247 bp, Glycine max
cttaagatggtgggatagttggtattcctgagaatacaggtctagcattggcctgtgctatgcatagttcttttagggggcgtgccagttctgatatgtacaccatctgctctcaagactgtgaatgatggtatcctgcttgcacaaaagcaatgactatgtcatttaatccaaacccgtgttctgatgcatagagtttggaatttctgaagcgtaccggatatcattgtgatatcattcgtgtcac

SEQ ID NO: 129594 - DNA, 170 bp, Glycine max
gaccgcgatcacaggttgccgcacctcaaaaccggaaacaaaagcaatcgttacttgatttcaagaatctctcaatttgctcctacttctttgtgtacgatttcttaagggaaagaaaatcactctctgtgctggccacagacttcgtgaatcattttcttttccacaca

SEQ ID NO: 129595 - DNA, 248 bp, Glycine max
caagaatggcacttcgttgcttggtgatgtccctttctgttctcttcactcttggtcttgcgagagaaagccatgccagagacgaagatttttggcatgctgtttggccaaacactcccattccaagttcattgcgagatcttctaaagcctggccctgcaagtgttgaaatcgatgatcaccctatgcaatctgaagaaacacagtacccgagaaccttcttctataaagaagaccttcatccaggc

SEQ ID NO: 129596 - DNA, 251 bp, Glycine max
agcgttctatatattattgaattgacaatgaggcctgctcttgctttgcttcctcttctatttgctttcttgttagctgccactacagaatcaagaaaagatacaggggaatattggaaaatgatcatgaaagatcaggaaatgccagaaggacttcaaggtcttgtttcatttcaatctgaaaataaccctaagactcaagagcagcttggtaaaggttccaaaaaccattgtgaagagtctctagttac

SEQ ID NO: 129597 - DNA, 252 bp, Glycine max
cggaagtttctttgagtgcagcactcaatggtgttgagggtttggactatatggaaagaattcctcttgccacatctgagggttttccccatgtgctttcacgcaaaaatggtgaaaaaggcaaaaggagatttgtttctggggatggtgaagagatgacattgattccgggaaccagtgttgaagaggcttacaataagctaatagttgaacttgagaaaagtgttcctacattggttggcattgaatgtc

SEQ ID NO: 129598 - DNA, 252 bp, Glycine max
cgggaagccaaagcgaaaccctaaccctaacggagagatggcggacacttggcatcgatattcgggacggagaaggacagggtgaactgtccgttctacttcaagatcggcgcgtgcaggcacggcgaccggtgctcccggcttcacacgaagcccacaattagcccaacgttggttctgtcgaacatgtaccagacgcccgacatgaacatgaacatcatcaccaaccccgatcagccccagccccaatct

SEQ ID NO: 129599 - DNA, 255 bp, Glycine max
cgaacactgcaggaagagagaaaggcgatggacctcggaacctatgaagtgccagaaggagtggacattctaggaagatacgatgcagagtttgcaaaaatcctcacaaaagacgctttgaaattcgttgctgagctgcaacgtgagttcaggagcgatatcaagcatgcattagagagcagaagagaggcaaagaagaagtacaatgaagggaactcttccggggtttgatcctgccaccagtcacattagaga

SEQ ID NO: 129600 - DNA, 243 bp, Glycine max
tgctattctcatgaatatgccaaatgctgttctttcaatgtggagatattttgttggagatctcgtctttgaagtttctaagatgacttctccctacattaaatgtacagtctctttcttcatagcatttggaaatttggctgatgacaccatcaattttgaggcttttccccacaagctggtgcactttggagagattcaggaaaaagttgtattgaaattttcacaagaggaatttcttac

SEQ ID NO: 129601 - DNA, 244 bp, Glycine max
ccctgtggaggttgatagtcaagagggagttgctcacattggtgaattgaaatctggtgtctatgttccactgcctacaaaaagctatttggtggaaactcccaaggaatggcaactggatctaccttgtgacaaaattcctagtgtcttgactacaactgatgaaagattggtaggcacagaacatgagggatatgatccttttcttggtggaattcaaaaatatgccactcccatgatgccc

SEQ ID NO: 129602 - DNA, 246 bp, Glycine max
  unsure (1)..(246): unsure at all n locations
ggaagtttctttaagtgcagcactcaatggtgttgagggtttggactatatggaaagaattcctcttgccacatctgagggttttccccatgtgcttccacgcaacattggatcctgaggcaaatggagatttgtttctgggggtggtgaagagatgacattgattccgggaaccagtgttgaagaggcttacaatcagctaaggtnngaacttgagaaaagtgttcctacattggttggcattga

SEQ ID NO: 129603 - DNA, 249 bp, Glycine max
ctcgaccgtgatgacaaaatcaagaaaaaggccatgaaggcagtatctggtatttcaggggtagagtcagtctcagtggacatgaaggaccagaaaatgactataattggggatgttgatcctgtaacagtagttggaaagtttacaaaattcagtcttggcaagcttagaaaattctgtcatgttgagatactttcagttggaccagccaaagaggaaccaaagaaagaggagaagaagccagaagcc

SEQ ID NO: 129604 - DNA, 250 bp, Glycine max
ctcgagcgattcggctcagtgcaaattgtcacaccaaaaaattcttgcttagctatcacaaacaatctttaacaccaatgaagaaagtagtattaaaggtggacttaaataatgatagaatcaagaaaaaagctatgaagacagcatctggcctttcaggggttgaatcgatttctgttgacgttaagtacatgaaactagtcttattgggtgagattgatccagtgagtgcagtgtcaaagctacgaaa

SEQ ID NO: 129605 - DNA, 251 bp, Glycine max
gtttggaatttctgaagcgtaccggatttcattgtgatatcatttgtgtcactggatggactgccactccaatgcaggatgttcaggttacaattgattggtttatttcctctcaggaatgtgttcccaggacctattgtgttttaaatccacaaaatccttttgtgttaaataggtggatggggaaactgactttcccccagggcacttcccgaagtgttaaacatttgcctctttctatagggggagga

SEQ ID NO: 129606 - DNA, 251 bp, Glycine max
ctcgagccgtgtgaattatggaatcctgcttgcacaaaagcaatgactatgtcatttaatccaaacccgtgttctgatgcatggagtttggaatttctgaagcgtaccggatttcattgtgatatcatttgtgtcactggatggactgccactccaatgcaggatgttcaggttacaattgattggtttatttcctctcaggaatgtgttcccaggacttattgtgttttaaatccacaaaatccttttgt

SEQ ID NO: 129607 - DNA, 246 bp, Glycine max
gctcctcagatatcaacaaaaagattcgcacagcacttgggaaaggtaagaaaattgtttttcttactagggttgatccttttccagtagctttactggctgttctttttggcgttaagaatgaaattctgagttctaacgccaccaatcctatgctgacgcgacttcttgagaactgtaaaagtctcaaatatctggttgatgagtgtccttttgcatttgtgaactagtatgtaatattttatt

SEQ ID NO: 129608 - DNA, 247 bp, Glycine max
ctctttttgaagacccatccttcaaggtatatgctgagaaatatgctgaagatcaggaagcattctttaaagattatgctgaagcccatgcaaaacttagcaaccttggagccaaatttgatcctccagagggcattgtgatagatgattctccaaatgcaggggcagagaagtttgtagcagccaagtactccactggaaaggaataaaaacaagtgtcatgttttcttgtgccagtatcttttag

SEQ ID NO: 129609 - DNA, 242 bp, Glycine max
cacgaatggatttcattcccggcattgatggcccaagtgagggtgttcctcgggttctggcatgctttagcaataatctcctccgtggagagcccctcaagcttgtggatggtggccaatcccagaggacttttgtgtatattaaggatgctattgaagctgtcttattgatgattgaaaatcccgccagggctaatggacatatttttaatgtgggaaacccaaacaatgaggttacagtt

SEQ ID NO: 129610 - DNA, 243 bp, Glycine max
ccacagttggtattcctgagaatacaggtatagcattggcctgtgctatgaatagttcttttagggggcgtgccagttctgatatttacaccatctgctctcaagactgtgaattatggaatcctgcttgcacaaaagcaatgactatgtcatttaatccaaacccgtgttctgatgcatggagtttggaatttctgaagcgtaccggatttcattgtgatatcatttgtgtcactggatgga

SEQ ID NO: 129611 - DNA, 243 bp, Glycine max
gtcaatctcgtaaatgtgttacgagaattgtatttgcacagtccagaggaagctcgccaattgagaaggaaagctctctctcgtattgaatggctgcaaaaagctgatgtgcctaccatagcacagattgaagagttccattcgatgcagaggatgatgaatgctcctgattcaaatgacaatatcgatctactgttgagcattgatttgttgggtttacaaggagcaggtaaagcttttcca

SEQ ID NO: 129612 - DNA, 179 bp, Glycine max
ttttgataaaccgcgatcacaggttgccgcaccttaaaaccggaaacaaaagcaatcgttacttgatttcaagaatctctcaatttcttcctacttctttgtgtacgatttcttaagggaaagaaaatcactctctgtgctggccacagacttcgtgaatcattttcttttccacacaa

SEQ ID NO: 129613 - DNA, 185 bp, Glycine max
gaaattttgataaaccgcgatcacaggttttcgcaccttaaaaccggaaacaaaagcaatcgttacttgatttcaagaatctctcaatttcttcctacttctttgtgtatggtttcttaagggaaagaaaatcactctctgtgctggccacagacttcgtgaatcattttcttttccacacaaca

SEQ ID NO: 129614 - DNA, 248 bp, Glycine max
gggataagttccgcaaagctcctgagggttctctcaggaaaaatgcagctcagaaacaagttttggaagcaatgtctcatagaatgcatgtagacaacagtgtaaaacttattgggaagcttttatttggtattgaaaagggtccagaagtactcaacgctgttagaccggcaggatcggcacttgttgatgattggcactgccttaaaaccatggtgaggacttttgagacacttgtggatccttgt

SEQ ID NO: 129615 - DNA, 246 bp, Glycine max
ctcgagccgcgccacttctgaatctattgaatcaacaatcatgtcggacgaagagcaccatttcgagtccaaggccgacgccggagcctccaaaacctaccctcagcaagccggtaccatccgcaagaacggctacatcgtcatcaaaggccgcccctgcaaggttgtggaagtttcgacttccaaaacttgaaagcacggtcacgctaagtgtcactttgttggaattgatattttcactgccaa

SEQ ID NO: 129616 - DNA, 179 bp, Glycine max
ctcgagcgcgcgattacaggttgccgcaccttaaaaccggaaacaaaagcaatcgttacttgatttcaagaatctctcaatttcttcctacttctttgtgtacggtttcttaagggaaagaaaatcactctctgtgctggccacagacttcgtgaatcattttcttttccacacaacat

SEQ ID NO: 129617 - DNA, 244 bp, Glycine max
agtaattgcggaatctgctagaattttctaataatggcgaaagacgttgagcaggtcacagagcaaggtgaatactccgcgaaggactaccatgaccctcctccggcaccgttgatcgacccagatgagctcacaaagtggtccttgtacagagccgccatagctgagttcatagcaacactcctttttctttacatcaccgtgttgaccattattggctacaagagacagagtgacaccaaaa

SEQ ID NO: 129618 - DNA, 244 bp, Glycine max
gggataagtgtgaatgtgacgctgatattctctcttgcaagatatgaagctgtaatagatgcttacttggatggtcttgaggcatctgggttaaatgacctctctagagttacaagtgttgcctctttctttgtcagtagagtggacactctcattgacaaggcccttgagaaaattggcaccccagaggctcttaatctacgtgggaaggcagcagtagcccaagcagcattggcttaccagc

SEQ ID NO: 129619 - DNA, 183 bp, Glycine max
gaaattttgataaaccgcgatcacaggttgccgcaccttaaaaccggaaacaaaagcaatcgttacttgatttcaagaatctctcaatttcttcctacttctttgtgtacgatttcttaagggaaagaaaatcactctctgtgctggccacagacttcgtgaatcattttcttttccacacaa

SEQ ID NO: 129620 - DNA, 245 bp, Glycine max
gtcttacgttgctcataacgttaatcagttccaagagatagatttgttggaaggacatttttcctttgatattaaatctcgctctagattggaaaaagtttcctctacaaaagcacaatttgttagtggaaaaaccttcaaatatgatatagttggtgctggttcacattcttcagacgatttttctgaaaaggtagatcaagaatgacccaaacagattgatgccagattgagactaagtatag

SEQ ID NO: 129621 - DNA, 184 bp, Glycine max
tgaaattttgataaaccgcgatcacaggttgccgcaccttaaaaccggaaacaaaagcaatcgttacttgatttcaagaatcttccaatttcttcctacttctttgtgtacgatttcttaagggaaagaaaatcactctctgtgctggccacagacttcgtgaatcattttcttttccacacaa

SEQ ID NO: 129622 - DNA, 244 bp, Glycine max
aaagattgataccagattgagacaaagaatagatcctcaatacaatgaggttcaggctcagatggaaacaaatttgtttaaattgtctcttgatgatgttgaaactcctaaaggttccatgttggatcttaaaatttctcaatctaaaattgcacttcccaaaaacacagttggaggaaccattctgcgtagtgatctattggcaaattttttgacagagggcaattttagagcaagtgttgat

SEQ ID NO: 129623 - DNA, 243 bp, Glycine max
gtattaatggaatgattaaaatggtggccacagttggtattcctgagaatacaggtatttcattggcctgtgctatgaatagttctttcagggggcgtgccagttctgatatttacaccatctgctctcaagactgtgaattatggcatcttgcttgcacaaaagcaatgactatgtcatttaaaccaaacccgtgttctgatgcatggagtttggaatttctgaagcgtaccggatttcatt

SEQ ID NO: 129624 - DNA, 243 bp, Glycine max
ggatcacacttatacaaaattctccaattagtaacttgttgagagttgctgcttggaagaaaggctgtttaatggttaaaattgtgatgtctgggaatgcagcagtcaaaaggagtgattgggcctcattggtacaagtgtttttaacaaacagcaacagtacagagcatttcgatgcatgtaagtggacaaaatcggaaccacattcctgggaattgatcttcccaatagaggtatgtggtc

SEQ ID NO: 129625 - DNA, 149 bp, Glycine max
gccgttcaaagtggtcttatatgaaaaacacttcgggcgttggtgcacatgtatgcttcgataatgctctctggatacaacaggtctattgagaatacaattgagacttgcagatatttggacatcttcgatgtgcattatccaatcgc

SEQ ID NO: 129626 - DNA, 239 bp, Glycine max
ctagctgttgcaaatttctactatttttcaatggcttctgcaactgttgagttccgttgctttgttggtgggcttgcttgggtcaccggcaacgatgccctcgagaaagccttttcaatctacggcgacatcgttgaatcgaaggttatcaacgaccgtgagactggaaggtccagaggattcggatttgtgaccttcgcctcagagcagtcaatgaaagatgcgatcgcaggaatgaa

SEQ ID NO: 129627 - DNA, 240 bp, Glycine max
gttgaaactcctaaaggttccatgttggatcttaaaatttctcaatctaaaattgcacttcccaaaaacacagttggaggaaccattctgcgtagtgatctattggcaaattttttgacagagggcaattttagagcaagtgttgatttgcagcgcactcaccgtattaaaggaatgattaaaatggtggccacagttggtattcctgagaatacaggtatatcattggcctgtgctatg

SEQ ID NO: 129628 - DNA, 240 bp, Glycine max
tgcaagtacgtttcgctcttcatcgcgctcgctagcgaagggaccgatgttagggcgctttttgagttgacgcttttggatcagagtgggaaggagaggcacaaggtgcatagccattttgagaggaccctcgagagtggaccctacacgttaaaataccgtggtagcatgtggggttacaagcggttttttaagagaacagcactagagacatcagattaccttaaagatgattgcctt

SEQ ID NO: 129629 - DNA, 244 bp, Glycine max
gttcaggctcagatggaaacaaatttgtttaaattgtctcttgatgatgttgaaactcctaaaggttccatgttggatcttaaaatttctcaatctaaaattgcacttcccaaaaacacagttggaggaaccattctgcgtagtgacctattggcaaattttttgacagagggtgattttagagcaagtgttgatttgcagcgcactcatcgtatcaaaggaatgattaaaatggtggccacag

SEQ ID NO: 129630 - DNA, 242 bp, Glycine max
ggaatcctgcttgcacaaaagcaatgactatgtcatttaatccaaacccgtgttctgatgcatggagtttggaatttttgaagcgtaccggatttcactgtgatatcatttgtgtcactggatggactgccaccccaatgcatgatgttcaggttacaattgattggtttatttcctctcaggaatgtgttcccaggacttattgtgttttaaatccacaaaatccttttgtgttaaatagg

SEQ ID NO: 129631 - DNA, 242 bp, Glycine max
gcttattttacgacggcagatacaaattctggactaaacacgagctaaatcttgctttgacagaagaggaaaagatggaagggattaggaatagaggcattcctgctgatgatcttgcaaagcgagctcatgaatttgaaaaacatgttgctcatgaaagcgtcaaggatcaaattcgtgctgttgacaagttgtattctactaaggttaataagtttgcgaaaattatgaaccttagacaa

SEQ ID NO: 129632 - DNA, 236 bp, Glycine max
cacagtttcggaggagaagaaaatagtcgttcgagatggcccgtacgaagcaaactgctcgtaagtccacaggaggaaaggctcctaggaagcagcttgcaatcaaggctgcacgtaagtctgcaccaactactggtggtgtgaagaagccacatcgttaccgtcctggtaccgttgctcttcgtgagattaggaaataccagaagagtaccgagcttttgatcaggaagctcccc

SEQ ID NO: 129633 - DNA, 239 bp, Glycine max
ttctaagatacacatattaagttcaccagagagagagagagacattaatcaagatgggtacgtggttcacaaatgcaaggccgtatctgctgttagtggcggttcaatttggctcagcaggcatgttcatatttgcgatggatgctataaagaagggtatgagccattactcgttcatcgtctatcgtaatgccatcgcctctgtatctcttgctcccttcgcattcgttttagaaagg

SEQ ID NO: 129634 - DNA, 236 bp, Glycine max
tgcatctcctgaaacacaaccttgtgcagaaagcacttctgcccaacagggctggagacaggttgttgatgcattatgcaacgttgtatcagcctcaccaacaaaagcagctacagcagttgtacttcaggcggagcgggaattgcagccctggattgccaaggatgatgattcaggtcagaagatgtggagaatcaatcagcggattgtaaaattgattgtggaacttatgagga

SEQ ID NO: 129635 - DNA, 237 bp, Glycine max
agcagattgcgattttctcaagagaaactttaagcagatgtctaatgttttgtgggtggctcctgaggacaaggcgagtttatggtcacaacttcattatgtttcgtgtaataatctggaaatgcaagaagcttatcttgtcaatctcgtaaatgtgttacgagaattgtatttgcacagtccagaggaagctcgccaattgagaaggaaagctctctctcgtattgaatggctgca

SEQ ID NO: 129636 - DNA, 242 bp, Glycine max
atcaaaacaaacaaacaacacagtttttcttgtctctatattcttccggccaccgcagatggcggcggagcacgacagctgctgctcgcgctgtgtcaccttcctaataaccataggcctcacagcgctcttcctatggctgagtctccgcgttgacgaaccaaaatgctacctcgactacatttacgttcctgccctcaacaaaaccctaaattccaattccactcacaacaaaaacacca

SEQ ID NO: 129637 - DNA, 243 bp, Glycine max
ctccttctgacaacctcggcacagacagcatgcaggggccaggccttcaccgaaaacaaggttttctcctcatgccgtgatcttcctcacctatcctcgtagctccactggaactttaaccagagcacagggaagttggacatagcatgtcatcacacaggaatctctggaacagacaagtgggttgcatgggctatcaatcccagcaacaacctcaattcagctatgacgggagcacaagca

SEQ ID NO: 129638 - DNA, 242 bp, Glycine max
ggacacacctgctgttggcttgttgttcaagaatggcaatttgtaagacagatgtttggagagttgaatgtggaatcccttctggatttccgctcacagttatttgtaatagcatttttaatgagatgctcattagatatagctatgaaaaattactgcgccaggctaaagctccaagtatgttttttcaatccttcaaaaattttgtttctttgtgtgtgtatggtgatgataacttaatt

SEQ ID NO: 129639 - DNA, 243 bp, Glycine max
aaagctttctagctggtcataatatcaccattactgatggtattgacaaaactagtgcaactttgcaatttagaaagttagcagattgtgattttctcaagagaaactttaagcagatgtctaatgttttgtgggtggctcctgaggataaggcgagtttatggtcacaacttcattatgtttcgtgtaataatctggaaatgcaagaagcttatcttgtcaatctcgtaaatgtgttacgag

SEQ ID NO: 129640 - DNA, 235 bp, Glycine max
tggggaactgtgaaaggaggaggaaatgatgaagatggtttaaggactttgaacattagccaatgcactgcactcaccccatctgctgttcaagctgtttgtgactcattcccttctctccacacatgctcagggaggcactcactcatcatgagtggctgcctcaacttgacatcagtgcattgtgcctgtgctgtccatgcgcaccgtgcattcaccactttcccttatcctg

SEQ ID NO: 129641 - DNA, 280 bp, Glycine max
cttaccttcgcatatgaatgagcagaacatcttgaacgctgtcaggattgagaaggatgtagatggttttcatccgttaaatattggtcgtcttgccatgcgtggaagagaacctctgtttgttccttgtacaccaaagggatgcatagagctactgcacagatacaatgtttctattaaaggaaagagggctgttgtgattggttggagcaatattgttggaatgccagctgctctcttgcttcaaagggaagatgctactgtcagtattgtccattct

SEQ ID NO: 129642 - DNA, 275 bp, Glycine max
ctcgtaaatgtgttacgagaattgtatttgcacagtccagaggaagctcgccaattgagaaggaaagctctctctcgacttgaatggctgcaaaaagctgatgtgcctaccatagcacagattgaagagttccattcgatgcagaggatgatgaatgctcctgattcaaatgataatattgatctactgttgagcattgatttgttgggttgacaaggagcaggtaaagcttttccaaacaagattgtttttgatgataagcttgtgttggctaa

SEQ ID NO: 129643 - DNA, 277 bp, Glycine max
cttatcttgtcaatctcgtaaatgtgttacgagaattgtatttgcacagtccagaggaagctcgccaattgagaaggaaagctctctctcgtattgaatggctgctaaaagctgatgtgcctaccatagcacagattgaagagttccattcgatgcagaggatgatgaatgctcctgattcaaatgataatattgatctactgttgagcattgatttgttgggtttacaaggagcaggtaaagcttttccaaacaagattgtgtttgatgataagct

SEQ ID NO: 129644 - DNA, 272 bp, Glycine max
gtgcacgttgtgttgcaactttgttgaatgagatgaaacgcggtggcaaggattgtcgctttggtgtaatctcaatgtgcatagggtcaggtatgggagctgctgctgtatttgaaaggggggacttttaaagatttgtgcaagtttagaatagttcataaaaataacgatcttttgtcaccggatgcttgatattagacataatttgaagtgtttctattttgaattcagttttggttgaaatgttacaaaaaattggaagtgtaaacaag

SEQ ID NO: 129645 - DNA, 273 bp, Glycine max
ctcgagccgaatcggctcgaggccgcatggcgatgctggtctcatcggccgcaagatcatcatcgacacctatggaggatggggtgcacatggtggtggtgccttctctgggaaggatcctaccaaggttgataggagtggtgcctacattgtgaggcaagctgcaaagagcattgttgcaaatggacttgctaggagggcaattgtgcaagtttcctatgccattggtgtgcctgagcccttgtctgtgtttgttgacacttatggcactgg

SEQ ID NO: 129646 - DNA, 272 bp, Glycine max
tctcgagccgaatcggctcgaggcacagaacatgagggatatgatccttttcttggtggaattcaaaaatatgccactcgcatgatgcccctagatgaagaaattctttctaaggttgcacaagatatggttgaggaatggtttgattgtgttgatgaggaggattcctttgaggaagtttctttgagtgcagcactcaatggtgttgagggtttggactatatggaaagaattcctcttgccacatctgagggttttccccatgtgctttc

SEQ ID NO: 129647 - DNA, 275 bp, Glycine max
ctcgagccgctgcatcggaagaaaccctagccactctcccggcgtcacgatgcagatctacgtgaaaaccctaacgggtaaaacgatcacgttggaggtggagtcttcggacaccatcgacaacgtgaaggccaagatccaggacaaggaaggcatccctccggaccagcagcgcctcatcttcgccgggaatcaactggaggacggccgcaccctcgccgactacaacatccagaaggagtccacgcttcacctcgtcatccgcctccgtggcg

SEQ ID NO: 129648 - DNA, 266 bp, Glycine max
ctcgagccgctcgagccgttcaggttctcgtcttttgggcaccattcctcagtctatttcacagcaaagtgtttggactcaaatggcaacagtgagtacaccattgaattttgattctagcaagcagagcttttgtcaattttctattgaccttctcggtggaggaattttagtggacaaaactggagattggatcacacttatacaaaattctccaattagtaacttgttgagagttgctgcttggaagaaaggctgtttaatgg

SEQ ID NO: 129649 - DNA, 274 bp, Glycine max
agcatttttaatgagatgctcattagatatagctatgaaaaattactgcgccaggctaaagctccaagtatgtttttacaatccttcaaaaattttgtttctttgtgtgtgtatggtgatgataacttaattagtgttcatgaatatgtcaagccttactttagtggttctaaattgaaaagctttctagctggtcataatatcaccattactgatggtattgacaaaactagtgcaactttgcaatttagaaagttagcagattgtgattttc

SEQ ID NO: 129650 - DNA, 276 bp, Glycine max
gtgatatcatttgtgtcactggatggactgccaccccaatgcaggatgttcaggttacaattgattggtttatttcctctcaggaatgtgttcccaggacttattgtgttttaaatccacaaaatccttttgtgttaaataggtggatggggatactgactttcccccagggcacttcccgaaatgttaagagaatgcctctttctatagggggaggagctggtgcaaagaatgctattctcatgaatatgccaaatgctgttctttcaatgtgga

SEQ ID NO: 129651 - DNA, 278 bp, Glycine max
ggttcgtcagaagtttttaaattttgtgaggttcattatgaagaaaagggacaagcttagttgtcaagttggaatcaacccatactccatggaatggactggtttggccaatagattactgagtaagggcaacgatattctgtgttgcgattatgctagttttgatggtttgattaccaagcaagttatgagcaagatgtcagaaatgataaacagtctttgtggtggtgacgaaaaattgatgcgtgaaaggacacacctgctgttggcttgttgtt

SEQ ID NO: 129652 - DNA, 271 bp, Glycine max
acattcttcagaagattttcctgaaaaggaagatcaagaaaaacccaaaaagattgataccagattgagacaaagaatagatcctcaatacaatgaggttcaggctcagatggaaacaaatttgtttaaattgtctcttgatgatgttgaaactcctaaaggttccatgttggatcttaaaatttctcaatctaaaattgcacttcccaaaaacacagttggaggaaccattctgcgtagtgatctattggcaaattttttgacagagggc

SEQ ID NO: 129653 - DNA, 269 bp, Glycine max
gttgaatgtggaatcccttctggatttccgctcacagttatttgtaatagcatttttaatgagatgctcattagatatagctatgaaaaattactgcgccaggctaaagctccaagtatgtttttacaatccttcaaaaattttgtttctttgtgtgtgtatggtgatgataacttaattagtgttcatgaatatgtcaagccttactttagtggttctaaattgaaaagctttctagctggtcataatatcaccattactgatggtat

SEQ ID NO: 129654 - DNA, 267 bp, Glycine max
aaactgtttggaatcaaatggcaacagtgagaacaccattgaattttgattctagcaagcagagcttttgtcaattttctattgaccttctcggtggaggaattttagtggacaaaactggagattggatcacacttatacaaaattctccaattagtaacttgttgagagttgctgcttggaagaaaggctgtttaatggttaaaattgtgatgtctgggaatgcagcagtcaaaaggagtgattgggcctcattggtacaagtgt

SEQ ID NO: 129655 - DNA, 266 bp, Glycine max
ggcgagtttatggtcacaacttcattatgtttcgtgtaataatctggaaatgcaagaagcttatcttgtcaatctcgtaaatgtgttacgagaattgtatttgcacagtccagaggaagctcgccaattgagaaggaaagctctctctcgtattgaatggctgcaaaaagctgatgtgcctaccatagcacagattgaagagttccattcgatgcagcggatgatgaatgctcctgattcaaatgataatattgatctactgttga

SEQ ID NO: 129656 - DNA, 269 bp, Glycine max
gtttaatttcaagttcaagctggtgaaatcttggattagtgctcccactgacctatctggtataggacttcgtgggtagacttttctattgctctcctttctttcactctcttcttctcactaatccgcattgccgttcaaagtggtcttatttgaaaatcacttttgcgttggtgcaaatgtttacttggttaatgtactctggagactacaggtttacttagacgacaatttttagttgcagagatttggacaacgtggttgtttat

SEQ ID NO: 129657 - DNA, 138 bp, Glycine max
caaaagcaatcgttacttgatttcaagaatctctcaatttcttcctacttctttgtgtacgatttcttaagggaaagaaaatcactctctgtgctggccacagacttcgtgaatcattttcttgtccacacaacatac

SEQ ID NO: 129658 - DNA, 192 bp, Glycine max
ctcgagccgtgaaattttgataaaccgcgatcacaggttgccgcatcttaaaaccggaaacaaaagcaatcgttacttgatttcaagaatctctcaatttcttcctacttctttgtgtacggtttcttaagggaaagaaaatcactctctgtgctggccacagacttcgtgaatcattttcttttccacaca

SEQ ID NO: 129659 - DNA, 194 bp, Glycine max
taagatttgatattttgataaaccgcgatcacaggttgccgcaccttaaaaccggaaacaaaagcaatcgttacttgatttcaagaatctctcaatttcttcctacttctttgtgtacgatttcttaagggaaagaaaatcactctctgtgctggccacagacttcgtgaatcatggtcttgtccacacaacat

SEQ ID NO: 129660 - DNA, 198 bp, Glycine max
ctcgagccgtttgaaattttgataaaccgcgatcacaggttgccgcaccttataaccggaaacaaaagcaatcgttacttgatttcaagaatctctcaattactacctacttctttgtgtacgatttcttaagggagagaatatcactcgctgtgctggccacagacttcgtgaatcatttgcttatccacacaacat

SEQ ID NO: 129661 - DNA, 268 bp, Glycine max
actttagtggttctaaattgaaaagctttctagctggtcataatatcaccattactgatggtattgacaaaactagtgcaactttgcaatttagaaagttagcagattgtgattttctcaagagaaactttaagcagatgtctaatgttttgtgggtggctcctgaggataaggcgagtttatggtcacaacttcattatgtttcgtgtaataatctggaaatgcaagaagcttatcttgtcaatctcgtaaatgtgttacgagaatt

SEQ ID NO: 129662 - DNA, 266 bp, Glycine max
ttcatctgccactgcttgtgatcgctgcttgtatcaatccaaggcttcctatttctccaaagcttctgctctttcatctggggcatgtgggtatggctctttggcactagacataagtggtggacaccttgcagctggtgtggattctctcttcaaaaatggagcaggttgtggtgcctgctttcagataagatgcaagaacccaactctgtgtagcaaagaaggtaccaaagtggtattgactgatcttaatcacaacaatcaaa

SEQ ID NO: 129663 - DNA, 265 bp, Glycine max
gtattgtagcaaatgtccttccgcagtattgttcgtggtgttagggacggatttgggagcttatcaaggcggagttttgatgtgaggctttctggtgggggcaagttgaatagtttggtccatgaggagcacgaatgcctgccagttgtacagaacagccggtgggctagccttccgcctgagcttcttcgtgatgtgtttaaaagattggaagaaagtgagactacatggcctgctcgtaagcacgtggttgcgtgtgctgctg

SEQ ID NO: 129664 - DNA, 260 bp, Glycine max
gggcacttcccgaaatgttaagagaatgcctctttctatagggggaggagctggtgcaaagaatgctattctcatgaatatgccaaatgctgttctttcaatgtggagatattttgttggagatctcgtctttgaagtttctaagatgacttctccctacattaaatgtacagtctctttcttcatagcatttggaaatttggctgatgacaccatcaattttgaggcttttccccacaagctggtacagtttggagaga

SEQ ID NO: 129665 - DNA, 181 bp, Glycine max
ttttgataaaccgcgatcacaggttgccgcaccttaaaaccggaaacaaaagcaatcgttacttgatttcaagaatctctcaatttcttcctacttctttgtgtacgatttcttaagggatagagaatcactctctgtgctggccacagacttcgtgaatcattttcttttccacacaaca

SEQ ID NO: 129666 - DNA, 266 bp, Glycine max
caatggtgttgagggtttggactatatggaaagaattcctcttgccacatctgagggttttccccatgtgcttccacgcaacattcgagagtgaggcaaaaggagatttgcttctggggatggtgaagagatgacattgattccggggaccagtgtagaagaggcttacaataagctaatagtatggacttgagtaaagtgtacctacatgggactggcattagtgacccaaggatgagaaacttcctcgtcgcaaaatttttgac

SEQ ID NO: 129667 - DNA, 269 bp, Glycine max
cttttgcttccttaacctattttgttatcctcaattttcaatggctcaatcccattctggaaaaacctcttccatgacttcaatactcctcctgtttatgcttcttatcagtaatacaggcacaacaggtgcacaatctggtgtatgctatggaagagttggcaacaatctgccatcgccacaagaagtagtttccctttttaaacagtacggcttccaaaggatgagaatctatgatcgaaaccatgaagtcctccaagctctgagag

SEQ ID NO: 129668 - DNA, 142 bp, Glycine max
ctcgagccgattttgttggagatctcgtctttgaagtttctaagatgacttctccctacattaaatgtacagtctctttcttcatagcatttggaagtttggctgatgacaccatcaattttgaggcttttccacacaacat

SEQ ID NO: 129669 - DNA, 270 bp, Glycine max
ctcttatgccagctttttctgttccacaggctactgccagatcttctgaaaatgcggaatcctctgcatgatctggaatttgtgttttctttcgtttgttcgtttgtttaattcaataaaggaaattagacatgaccctcttgttgagtatgctctgtctatttgaaaatttccacacctcttttaattgtcgtaatgatgtgtgaagtgtgtgttattttaaaaaaaaaaaaaaaaaaaaaaaaaaaaaaaaaaaaagggggggggccc

SEQ ID NO: 129670 - DNA, 258 bp, Glycine max
gggaaactgactttcccccagggcacttcccgaagtgttaagagaatgcctctttctatagggggaggagctggtgcaaagagtgctattctcatgaatatgccaaatgctgttctttcaatgtggagatattttgttggagatctcgtctttgaagtttctaagatgacttctccctacattaaatgtacagtctcttacttcatagcatttggacgtttggctgatgacaccatcaatattgaggcttttccccac

SEQ ID NO: 129671 - DNA, 264 bp, Glycine max
gagatgctggtaatgggggagtttttgttggcaatgttgcttcagcatttacaacttcaagtgtgcttgaggcccaaagtagaaagcccaacagatatgaagtttcccaatacagatatcgcaatgtgccaataaagcgcagagcatgggttgaaggccagatgtctttcgatcagtctgtagtagcaatcatgtctaaatgcaaagccagcatgagaatgggaaacactgatgctcaaattttgatggttccagggcgcagat

SEQ ID NO: 129672 - DNA, 261 bp, Glycine max
ttctcccacgacaacgtatcacaagctcccaatatagcaagcagcaaacatgatttcttccgtgtcctttccagcgtctcttcccgccgttaacttctccggcaacgccatggcttcgccgtcgtgccgcgtcaaatcccggccaatagtcgccttcgccaccgccactgccaccgctgaagctcgctcttcctggacggagcaaccgagaccttcctatctgaactcctcttgctcttcgctttacgatatcctcggcat

SEQ ID NO: 129673 - DNA, 265 bp, Glycine max
ctcgagccggtgccagttctgatatttacaccatctgctctcaagactgtgaattatggaatcctgcttgcacaaaagcaatgactatgtcatttaatccaaacccgtgttctgatgcatggagtttggaatttctgaagcgtaccggatttcattgtgatatcatttgtgtcactggatggactgccacccctatgcaggatgttcaggttacaattgattggtttatttcctctcaggaatgtgttcccaggacctattgtgt

SEQ ID NO: 129674 - DNA, 266 bp, Glycine max
atcggagcgaatcgcgtggatcatactcgtcgtgctctgcaagctcgacggcaaagcggaactctacaaagacgtggcgcactcgtacctgtttctcgcgaataacatgcaatacgtcgtcgtaaaggtgcgcaaattaaacctagggtttcttctcggcgaagagtggttggcgaacatgaattgaaagttagagagtacacgtctaagtacgagagcgtcgggtggagcgctgtcttctcgtcgttgccggaaaatcccgcggc

SEQ ID NO: 129675 - DNA, 267 bp, Glycine max
atcatcttttgtttgttcttcagtactttagtgtgtgatttaattccaagatttttggaatgtctagctgtgggtgtggaagtagctgcaactgtggcagcaactgcggttgcaacaagtactcttttgacttgagctatgttgagaagacaaccacagagactcttgttttgggtgttgggtctgtgaaggcccaattggagggtgctgaaatgggtgttgcagctgagaacggtggctgcaactgtggatcaagctgcacctgcg

SEQ ID NO: 129676 - DNA, 267 bp, Glycine max
ctttcttcatagcattcggaaatttggctgatgacaccatcaatactgaggcttttccccacaagctggtgcagtttggagagattcaggaaaaagttgtattgaaattttcacaagaggaatttcttacagcttggtcaactcaggtgcgtcctgcaacaactctgttggctgatgggtgtccatatttgtatgctatggtgcatgatagttcagtgtctacaataccaggtgattttgtcattggtgttaagttgacaaccataa

SEQ ID NO: 129677 - DNA, 265 bp, Glycine max
ctctaatcactctagctgttgcaaatttctactatttttcaatggcttctgcagatgttgagttccgttgctttgttggtgggcttgcttgggtcaccggcaacgatgccctcgagaaagccttttcaatctacggcgacatcgttgaatcgaaggttatcaacgaccgtgagactggaaggtccagaggattcggatttgtgaccttcgcctcagagcagtcaatgaaagatgcgatcgcaggaatgaacggccaggaccttga

SEQ ID NO: 129678 - DNA, 262 bp, Glycine max
atttgtatgctatggtgcatgatagttcagtgtctacaataccaggtgattttgtcattggtgttaagttgacaaccataaacaatatgtgtgcatatgggctcaatcctggtatttcaggttctcgtcttttgggcaccattcctcagtctatttcacagcaaactgtttggaatcaaatggcaacagtgagaacaccattgaattttgattctagcaagcagagcttttgtcaattttctattgaccttctcggtggagg

SEQ ID NO: 129679 - DNA, 175 bp, Glycine max
ctcgagccgctcgagccgttttgataaaccgcgatcacaggttgtcgcacctcaaaaccggaaacaaaagcgatcgttacttgatttcaagaatctctcaatttcttcctacttctttgtgtacgatttcttaagggaaagaaaatcactctctgtgctggccacagacttcgtg

SEQ ID NO: 129680 - DNA, 262 bp, Glycine max
ctcgagccgccttcagaagctgtcgttgtaaatgttacatgtggtagtggacgtggtggtttcacccaccactgcttggattagttctgcagttaacaatcgctcctcagatatcaacaaaaggattcgcacagcacttgggagaggtaagaaaattgtttttcttactagagttgatccttttccagtagctttactggctgttctttttggcgttaagaatgaaattctgagttctaacgccactaaccctatgctgacg

SEQ ID NO: 129681 - DNA, 261 bp, Glycine max
gaaacatggtattctgggatgaaggaaaaatttgtacaaatgatgaagagcatctatgaaacagaagttacagattggccagtaccactgaaaatcatttctggtaccattcttgcaacaattttgggaacaaccttctggaaactacttttcctttcttagagatgctggtaatgggggagtttttgttggtaatgttgcttcagcattcacaacttcaagtgtgcttgaggccctaagtagaaagcccaacagatatga

SEQ ID NO: 129682 - DNA, 258 bp, Glycine max
attggttggcattgaatgtcccaaggatgagaaacttcctcgtcgcaaaatttttgacaaacctaagacgcgctgcttcactattctccctatggagtttaatcttgtggttcgtcagaagtttttaaattttgtgaggttcattatgaagaaaagggacaagcttagttgtcaagttggaatcaacccatactccatggaatggactggtttggccaatagattactgagtaagggcaacgatattctgtgttgcga

SEQ ID NO: 129683 - DNA, 262 bp, Glycine max
gaagattttcctgaaaaggaagatcaagaaaaacccaaaaagattgatgccagattgagacaaagaatagatcctcaatacaatgaggttcaggctcagatggaaacaaatttgtttaaattgtctcttgatgatgttgaaactcctaaaggttccatgttggatcttaaaatttctcaatctaaaattgcacttcccaaaaacacagttggaggaaccattctgcgtagtgatctattggcaaattttttgacagagggca

SEQ ID NO: 129684 - DNA, 264 bp, Glycine max
gagaaacttcctcgtcgcaaaatttttgacaaacctaagacgcgctgcttcactattctccctatggagtttaatcttgtggtccgtcaaaagtttttaaattttgtgaggttcattatgaagaaaagggacaagcttagttgtcaagttggaatcaacccatactccatggaatggactggtttggccaatagattactgagtaagggcaacgatattctgtgttgcgattatgctagttttgatggtttgattaaccagcaa

SEQ ID NO: 129685 - DNA, 264 bp, Glycine max
gtttcctttcattttccctcactttctcgctccccaaacgcccctctctctcctccaatggccgaccagctcaccgacgaccagatcgccgagttcaaggaggccttcagcctcttcgacaaggacggcgatggtgcaattactaccaaggaacttgggactgttatgaggtcacttggtcaaaacccaactgaggcagaactgcaggatatgataaacgaggttgatgctgatggcaacggaaccatcgatttcccagagttc

SEQ ID NO: 129686 - DNA, 265 bp, Glycine max
ctggaagcaaaggaagactgggatatgcttcattgataccatatgttgagccatctgtgcaagctcaaagtgctgaagtttactttgacttcttccctgtggaggttgatagtcaagagggagttgctcacattggtgaattgtcatctggtgtctatgttccactgcctacaaaaactaattttgtggaaactcccaaggaatggcaactggatctaccttgtgacaaaattcctagtgtcttgactacaactgatgaaagatt

SEQ ID NO: 129687 - DNA, 260 bp, Glycine max
gaataccgatgctttgttggtgggctcgcttgggccactgacaactacgatctggagaaagccttctctcagtacggtgacgtcgttgaatcgaagattatcaacgatcgtgagactggaagatccaggggatttggatttgttaccttcgcctccgaggattcaatgagggatgcgatcgaagggatgaacggtcagaaccttgatggacgcaacatcactgtgaacgaagctcagtcccgcggaagccgcggtggagg

SEQ ID NO: 129688 - DNA, 182 bp, Glycine max
ctcgagccgcgcgatcacaggttgccgcaccttaaaaccggaaacaaaagcaatcgttacttgatttcaagaatctctcaatttcttcctacttctttgtgtacgatttcttaagggaaagaaaatcactctctgtgctggccacagacttcgtgaatcattttcttttccacacaacatac

SEQ ID NO: 129689 - DNA, 260 bp, Glycine max
gtgtgcatatgggctcaatcctggtatttcaggttctcgtcttttgggcaccattcctcagtctatttcacagcaaactgtttggaatcaaatggcaacagtgagaacaccattgaattttgattctagcaagcagagcttttgtcaattttctattgaccttctcggtggaggaattttagtggacaaaactggagattggatcacacttatacaaaattctccaattagtaacttgttgagagttgctgcttggaaga

SEQ ID NO: 129690 - DNA, 262 bp, Glycine max
aaagataagaaaatcctcaattttctgagcagccaaacactctctctctgtctctcgaaaattctcagtttgcagagaaaatctgaatcatgtcgtggcaagcgtatgtcgacgatcaccttctgtgtgacatcgaaggtaaccacctcactcacgctgctatcatcggccaagacggcagcgtttgggctcagagtaccgacttccctcaggtaagctttccattttcctttactctttttcccagtcggatctcgattta

SEQ ID NO: 129691 - DNA, 253 bp, Glycine max
  unsure (1)..(253): unsure at all n locations
caagatgttacaagttgttgctccctctttgtcccttgtctcctcccaaccttctacttccaaagatgctgaatccgcctccgctgctaacatggattttaatgttgatctaacaaccggggcacgcaatctttcctctacgcttcagaagctccttctttgggagaagaaactctttaatgaagttaaggcggaggaaaagatgcgggtcatgcacgataggaagtgtcacaggtgaagcgtttggatgant

SEQ ID NO: 129692 - DNA, 261 bp, Glycine max
ctcgtaaatgtgttacgagaattgtatttgcacagtccagaggaagctcgccaattgagaaggaaagctctctctcgtattgaatggctgcaaaaagctgatgtgcctaccatagcacagattgaagagttccattcgatgcagaggatgatgaatgctcctgattcaaatgacaatatcgatctactgttgagcattgatttgttgggtttacaaggagcaggtaaagcttttccaaacaagatcgtttttgatgataaa

SEQ ID NO: 129693 - DNA, 264 bp, Glycine max
cgcaacaaaaagaaagaatcccaggcgaggagaaagatggaggggaaggagcaggatgtgtcgttgggagcgaacaagttccccgagagacagccgattgggacggcggcgcagagccaagacgacggcaaggactaccaggagccggcgccggcgccgctggttgacccgacggagtttacgtcatggtcgttttacagagcagggatagcagagtttgtggccacttttctgtttctctacatcaccgtcttaaccgttatg

SEQ ID NO: 129694 - DNA, 155 bp, Glycine max
aaggaagatcaaggaaaacccaaaaagattgatgccagattgagacaaagaatagatcctcaatacaatgaggttcaggctcagatggaaacaaatttgtttaaattgtctcttgatgatgttgaaactcctaaaggttccatgttggatcttaa

SEQ ID NO: 129695 - DNA, 256 bp, Glycine max
gtaccaggcatctcaaaatggtgtgataggcataaccttggtagctaattggtttttgccgctcagagataccaaatctgatcaaaaggctacagaaagagcaattgacttcatgtatggatggtttatggatccattaacatctggagactatcccaacagcatgcgatcacttgtgaggacaagattaccaaagtttactgcagagcaatccaaactacttattggttcatttgattttattggcctaaactat

SEQ ID NO: 129696 - DNA, 257 bp, Glycine max
gtttggaatcaaatggcaacagtgagaacaccattgaattttgattctagcaagcagagcttttgtcaattttctattgaccttctcggtggaggaattttagtggacaaaactggagattggatcacacttatacaaaattctccaattagtaacttgttgagagttgctgcttggaagaaaggctgtttaatggttaagattgtgatgtctgggaatgcagcagtcaaaaggagtgattgggcctcattggtaca

SEQ ID NO: 129697 - DNA, 261 bp, Glycine max
ttagtaaagcgcactcactctaacggcgtaccttttgcatgatgggtcagcgagaaaatgggaacagcggcttaagccattaggtgtaggcgcctttcagaggtggaatcttctagttcttcctatttgacccgaaaccgatcgatctagccatgagcaggttgaagagagctctaacaggccttggaggaccgaacccacgtatgtggcaaaatacggggatgacttgtggctaggggtgaaaggccaaccaagatcgga

SEQ ID NO: 129698 - DNA, 259 bp, Glycine max
ctccttctcgctctttcagctttgacttttgttggaaactaaggcctaatcacaatggtgaagttcacagctgtagagctacgtcgtattatggactatgagcatgatatccgtaatatgtctgtcattgctcatgttgatcacggaaaatcaatcctcactgattctcttgtggctgctgctggtattattgctcaagaagttgccggtgatgtccgtatgactgatacccgtgcagatgaagctgagcgtggtatta

SEQ ID NO: 129699 - DNA, 261 bp, Glycine max
aagggatcaaggtaaatgcaacttctgacttgatgctggcatatgtggacttctttcttggtggggatgaatagagaatagaccttcctcctcgattgcatgaaaggttcccaatgtcattgccttttggaggtgatggaagttatatggctccattcacccttcacaatgataatatccttaccagcctcatgagtcagtctgtgcaacctacaacctggtatagattggttgctgggctgaatgcacaactgcggttag

SEQ ID NO: 129700 - DNA, 261 bp, Glycine max
gtggaatcccttctggatttccgctcacagttatttgcaatagcatttttaatgagatgctcattagatatagctatgaaaaattactgcgccaggctaaagctccaagtatgtttttacaatctttcaaaaattttgtttctttgtgtgtgtatggtgatgataacttaattagtgttcatgaatatgtacagccttactttagtggttctaaattgaaaagctttctagctggtcataatatcaccattactgatggta

SEQ ID NO: 129701 - DNA, 278 bp, Glycine max
tcgggattcggctccatgtcaggtaaaggctgaccaagccaatgatgcttagctggtcttttcggatgatcagccacactgggactgagacacggcccggactcccacggggggcagcagtggggaatcttggacaatgggcgaaagcccgatccagcaatatcgcgtgagtgaagaagggcaatgccgcttgtaaagctctttcgtcgagtgcgcgatcatgacaggactcgaggaagaagccccggctaactccgtgccagcagccgcggtaagac

SEQ ID NO: 129702 - DNA, 256 bp, Glycine max
caacgattacctcatcgaagaagaggaaggcctcaacgatcacaacgttgtcctcaaatgcgccgaaatccaaaacgccatttccgaaggagcaacctctttccttttcactgaatacaagtatgtgggaatcttcatggtggcttttgccattttgatattcctattccttggctctgtggaaggattcagcacgagctaccagccttgcacctatgatcaaactaaaatgtgtaagccagctcttgctactgct

SEQ ID NO: 129703 - DNA, 258 bp, Glycine max
gaaaattaaacatgggaagaggaagggttgttctggaaagaatagagaacaagatcaaccgtcaagtaacattctcaaaacgcagaagtgggttgctgaagaaggcctttgagctttctgtgctatgtgatgctgaagttggccttatcatcttttctagccgtggcaagctttttcagtacagcagcactgatattaccaaaatcattgagaggtatcgccaatgtcgttacagcaagtcacacactggtgattcat

SEQ ID NO: 129704 - DNA, 257 bp, Glycine max
attttgttggagatctcgtctttgaagtttctaagatgacttctccctacattaaatgtacagtctctttcttcatagcatttggaaatttggctgatgacaccatcaattttgaggcttttccccacaagctggtacagtttggagagattcaggaaaaagttgtattgaaattttcacaagaggaatttcttacagcttggtcaacccaggtgcgtcctgcaacaactctgttggctgatgggtgtccatatttg

SEQ ID NO: 129705 - DNA, 259 bp, Glycine max
attgaatatgatgcatgtacaattccaaatgattgtggttcattggttgttgccaaggttggaaatcacaaacaaattgttggtttccatgttgctggaagcaaaggaagactgggatatgcttcattgataccatatgttgagccagttgtgcaagctcaaagtgctgaagtttacttcgacttcttccctgtggaggttgatagtcaagagggagttgctcacattggtgaattgaaatctggtgtctatgttccac

SEQ ID NO: 129706 - DNA, 262 bp, Glycine max
ggacaaggcaagtttatggtcacaacttcattatgtttcgtgtaataatctggaaatgcaagaagcttatcttgtcaatctcgtaaatgtgttacgagaattgtatctgcacagtccagaggaagctcgccaactgagaaggaaagctctctctcgtattgaatggctgcaaaaagctgatgtgcctaccatagcacagattgaagagttccattcgatgcagaggatgatgaatgctcctgattcaaatgataatattgac

SEQ ID NO: 129707 - DNA, 261 bp, Glycine max
ctttaagcagatgtctaatgttttgtgggtggctcctgaggacaaggcgagtttatggtcacaacttcattatgtttcgtgtaataatctggaaatgcaagaagcttatcttgtcaatctcgtaaatgtgttacgagaattgtatttgcacagtccagaggaagctcgccaattgagaaggaaagctctctctcgtattgaatggctgcaaaaagctgatgtgcctaccatagcacagattgaagagttccattcgatgca

SEQ ID NO: 129708 - DNA, 264 bp, Glycine max
acagtttggagagattcaggaacaagttgtattgatattttcacaagaggaatttcttacagcttggtcaacccaggtgcgtcctgcaacaactctgttggctgatgggtgtccatatttgtatgctatggtgcatgatagttcagtgtctacaataccaggtgattttgtcattggtgttaagttgacaaccataaacaatatgtgtgcatatgggctcaatcctggtatttcaggttctcgtcttttgggcaccattcctca

SEQ ID NO: 129709 - DNA, 253 bp, Glycine max
ctcgagccgctcgagccgattcggctcgagcttatccctctaatcactctagctgttgcaactttctacactttttcaatggcttctgcagatgttgagttccgttgctttgttggtggtcttgcttgggtcaccggcaacgatgccctcgagaaagccttttcaatctacggcgacatcgttgaatcgaaggttatcaacgaccgtgagactggaaggtccagaggattcggatttgtgaccttcgcctcag

SEQ ID NO: 129710 - DNA, 254 bp, Glycine max
cttttatttcgttcctctattcgctacgtcgtcgttagggtcgtcttcggatcggtggaacttgactgcgccggcgtgaattccgacgctgcgagtggcttcgaattgcgatagctgtgacgaatatgaaggttttcgttaagactctcaaaggcactcacttcgaaatcgaagtgacgccgcaagacacggtttctgagctgaagaaaaatatagccactgttcagggtgcagatgtctatcctgctgcacac

SEQ ID NO: 129711 - DNA, 254 bp, Glycine max
tgcctataaaaataaaaactaagtcccccaaaacccaatcatatcatttcatttcttcctttgtcgtccatcccgtaaccatgtctcagactgttgtcctcaaagttggtatgtcatgtgaaggatgtgttggagcagtgaagagagttctaggaaaattggatggtgtggaatcatatgacattgatttgaaggaacaaaaggtggtagtgaaaggaaatgtccagccagacacagttctgcagaccgtttcc

SEQ ID NO: 129712 - DNA, 256 bp, Glycine max
caggaatgtgttcccaggacctattgtgttttaaatccacaaaatccttttgtgttaaataggtggatggggaaactgactttcccccagggcacttcccgaagtgttaaaagaatgcctctttctatagggggaggagctggtgcaaagaatgctattctcatgaatatgccaaatgctgttctttcaatgtggagatattttgttggagatctcgtctttgaagtttctaagatgacttctccctacattaaat

SEQ ID NO: 129713 - DNA, 242 bp, Glycine max
  unsure (1)..(242): unsure at all n locations
ggaatttcctcttcctgatatcaaancaaggagacgcatctnccagatacacacgtccaaggntgacattagctgatgatgtcaacttggaagaatttgttatgactaaagacgaattctccggagctgatataaaggcaatatgtactgaagctggtttactnncctctacgagaacgtcgaatgaaggtgactcatgccgactttaagaaggccaaggataaagtgatgtttaagaagaa

SEQ ID NO: 129714 - DNA, 256 bp, Glycine max
ttaaagtttgaagtgaagtgaagaaatttaaggttggggatgaagtttatggtgatatcaatgtgaaagctttggaatatccaaaggtgattggttctttggctgagtacactgctgcagaagagaggctattggctcacaagccacagaatctgagctttgctgaggctgctagccttcctttaacacttgagactgcttatgaaggccttgaacgaaccgggttttctgctgggaaatctatccttgtgcttgg

SEQ ID NO: 129715 - DNA, 261 bp, Glycine max
aataatctggaaatgcaagaagcttatcttgtcaatctcgtaaatgtgttacgagaattgtatttgcacagtccagaggaagctcgccaattgagaaggaaagctctctctcgtattgaatggctgcaaaaagctgatgtgcctaccatagcacagattgaagagttccattcgatgcagaggatgatgaatgctcctgattcaaatgataatatcgatctactgttgagcattgatttgttgggtttacaaggagcagta

SEQ ID NO: 129716 - DNA, 166 bp, Glycine max
ctcgagccgtatcggctcgagattgagacaaagaatagatcctcaatacaatgaggttcaagctcagatggaaacaaatttgtttaaattgtctcttgatgatgttgaaactcctaaaggttccatgttggatcttaaaatttctcaatctaaaattgcacttccc

SEQ ID NO: 129717 - DNA, 258 bp, Glycine max
cgaaaatatgtatcaaccaccaattcagtatttccccttggggtccaggatttgtgctggctgctatactgagattggttttggacgatatctaaattgcttgaatgcattctggcatcctgaatgcttccgctgccgtgcttgcaacctaccaatctctgattacgagttctccacatctggctcccacccttaccataaatcatgctataaggaaagctaccatccaaaatgtgatgtctgcaagcacttcattcc

SEQ ID NO: 129718 - DNA, 166 bp, Glycine max
cccgaagtgttaaaagaatgcctctttctatagggggaggagctggtgcaaagaatgctattctcatgaatatgccaaatgctgttctttcaatgtggagatattttgttggagatcttgtctttgaagtttctaagatgacgtctccttaaattaaatgtacagt

SEQ ID NO: 129719 - DNA, 254 bp, Glycine max
ggcaactggatctaccttgtgacaaaattcctagtgtcttgactacaactgatgagagattggtaggcacagaacatgagggatatgatccttttcttggtggaattcaaaaatatgccactcccatgatgcccctagatgaagaaattctttctaaagttgcacaagatatggttgaggaatggtttgattgtgttgatgaggaggattcctttgaggaagtttctttaagtgcagcacttaatggtgttgag

SEQ ID NO: 129720 - DNA, 255 bp, Glycine max
acaatttctcaatctaaaattgcacttcccaagaacacagttggaggaactattctgcgtagcgatctattggcaaatttgttgacagagggcaattttagagcaagtgttgatttgcagcgcactcatcgtattaaaggaatgattaaaatggtggccacagttggtattcctgagcatacaggcatagcattggcctgtgctatgaatagttcttttaggaggcgtgccagttctgatatttacaccatctgt

SEQ ID NO: 129721 - DNA, 254 bp, Glycine max
caggtgcgtcctgcaacaactctgttggctgatgggtgtccatatttgtatgctatggtgcatgatagttcagtgtctacaataccaggtgattttgtcattggtgttaagttgacaaccataaacaatatgtgtgcatatgggctcaatcctggtatttcaggttctcgtcttttgggcaccattcctcagtctatgtcacagcaaactgtttggaatcaaatggcaacagtgagaacaccattgaattttga

SEQ ID NO: 129722 - DNA, 257 bp, Glycine max
tggatggggaaattgactttcccccagggcacttcccgaagtgttaaaagaatgcctctttctatagggggaggagctggtgcaaagaatgctattctcatgaatatgccagatgctgttctttcaatgtggagatatattgttggagatcttgtctttgaagtttctaagatgacttctccttagatgaaatgtacagtcgctttcttcatagcatttggaaatttggctgatgacaccatcaattttgaggcctt

SEQ ID NO: 129723 - DNA, 255 bp, Glycine max
ctcgagccgctcgagccggaacaaatttggaatgggattgggagcaggattgcttggtggtgccttgggtgcgaatgttgatcggagacatggtatctgatgctgctgaatatgatgcgggctttgatgatgctggtggatttgatttttaattttcagtttttcaatcaaccctgtatttttttttttcttttatatttctggatttcactttttgcctttttcggttgcgtaatgatgttctatgagattgct

SEQ ID NO: 129724 - DNA, 256 bp, Glycine max
cgcaaaaatggtgaaaaaggcaaaagaagatttgtttctggggatggtgaagagatgacattgattccgggaaccagtgttgaagaggcttacaacaagctaatagttgaacttgagaaaagtgttcctacattggttggcattgaatgtcccaaggatgagaaacttcctcgtcgcaaaattcttgacaaacctaagacgcgctgcttcactattctccctatggagtttaatcttgtggtccgtcaaaagtttt

SEQ ID NO: 129725 - DNA, 258 bp, Glycine max
gcattatctatatgggctgtagcatgcatgtgtggtaccttgagacttgaaaatgtgttaacattctttgcaggagctctactggagaagcagattgtttttgtctgttctaatttgggaatcctatctgcttcagttttatcagttattccactaatccggccctatcaatggcaaagcttgcttatgccagttttaccaaatggcatgctcgagtttctggatgcacctgtcccctacatagttggtatcaagaaa

SEQ ID NO: 129726 - DNA, 261 bp, Glycine max
gtcaggtaaaggctgaccaagccaatgatgcttagctggtcttttcggatgatcagccacactgggactgagacacggcccggactcccacggggggcagcagtggggaatcttggacaatgggcgaaagccgatccagcaatatcgcgtgagtgaagaagggcaatgccgcttgtaaagctctttcgtcgagtgcgcgatcatgacaggactcgaggaagaagccccggctaactccgtgccagcagccgcggtaagagg

SEQ ID NO: 129727 - DNA, 249 bp, Glycine max
gttcctacattggttggtattgaatgtcccaaggatgagaaacttcctcgtcgcacattttttgacaaacctaagacgcgcttcactattctccctatggagtttaatcttgtggtccgtcagaagtttttaaattttgtgaggttcattatgaagaaaagggacaagcttagttgtcaagttggaatcaacccatactccatggaatggactggtttggccaatagattactgagtaagggcaacgat

SEQ ID NO: 129728 - DNA, 248 bp, Glycine max
gtttaatcttgtggtccgtcaaaagtttttaaattttgtgaggttcattatgaagaaaagggacaagcttagttgtcaagttggaatcaacccatactccatggaatggactggtttggccaatagattactgagtaagggcaacgatattctgtgttgcgattatgctagttttgatggtttgattaccaagcaagttatgagcaagatctcataaatgataaacagtctttgtggtggtgatgaaa

SEQ ID NO: 129729 - DNA, 252 bp, Glycine max
aggctcgagcggctcgaggagggtttggactatatggaaagaattcctcttgccacatctgagggttttcctcatgtgctttcacgcaaaaatggagataaaggcaaaagaagatttgtttctggggatggtgaagagatgacattgattccgggaaccagtgttgaagaggcttacaacaagctaatagttgaagttgagaaaagtgttcctacattggttggcattgaatgtcccaaggatgagaaactt

SEQ ID NO: 129730 - DNA, 255 bp, Glycine max
catgaatatgccaaatgctgttctttcaatgtggagatattttgttggagatctcgtctttgaagtttctaagatgacttctccatacattaaatgtacagtctctttcttcatagcatttggaaatttggctgatgacaccatcaattttgaggcttttccccacaagctggtacattctggagagattcaggaaaaagttgtattgaaattttcacaagaggaatttcttacagcttggtcaacccaggtgcg

SEQ ID NO: 129731 - DNA, 254 bp, Glycine max
aattaattgtcgagttcatcgacaaccaattcacatcactgaaggaaattatgtcagagagcaagatgtcagcattgcatatgatgcatgtacaattccaaatgattgtggttcattggttgttgccaaggttggaaatcacaaacaaattgttggtttccatgttgctggaagcacatgaagactgggatatgcttcattgataccatatgttgagccagttgtgcaagctcaaagtgctgaagtttacttcg

SEQ ID NO: 129732 - DNA, 253 bp, Glycine max
ctaaaaagcgcaagataacaaaatccccaaaatatctctcgctctgaaaccgccatggatttgtagcagagcgagttcgatcgcctcctgttcttcgagcacgctcgtaaggccgcagaagccgaatacgagaagaaccctctcgacgctgataacttaacaagatggggtggagctttattagagttgtctcagtttcagagttttcctgaatcgaagaaaatgacccaagaggctgtttcaaagctagagg

SEQ ID NO: 129733 - DNA, 253 bp, Glycine max
tggatcttaaaatttctcaatctaaaattgcacttcccaaaaacacagttggaggaaccattctgcgtagtgacctattggcaaattttttgacagagggcaattttagagcaagtgttgatttgcagcgcactcatcgtatcataggaatgattaaaatggtggccacagttggtattcctgagaatacaggtatagcattggcctgtgctatgaatagttctttcagggggcgtgccagttctgatattta

SEQ ID NO: 129734 - DNA, 268 bp, Glycine max
gctcgacggttcagcagatgtctaagcgttgtgggtggctcctgaggacaactgcggtttatggtcacaacttcattatgtgtcgtgtaataatctggaaatgcaagaagcttcatcttgtcagtctcgtaaatgtgttacgagaattgtttttgcacagtccagaggaaactcgccaattgagaaggtaagctatctctcgtattgaatggctgcaaaaagctgatgtgcctaccatagcacagattgaagagttccattcgatgca

SEQ ID NO: 129735 - DNA, 257 bp, Glycine max
ggaggaaccattctgcgtagtgatctattggcaaattttttgacagagggcaattttagagcaagtgttgatttgcagcgcactcatcgtattacaggaatgattaaaatggtggccacagttggtattcctgagaatacaggtatagcattggcctgtgctatgaatagttcttttagggggcgtgccagttctgatatttacaccatctgctctcaagactgtgaattatggaatcctgcttgcacaaaagcaat

SEQ ID NO: 129736 - DNA, 263 bp, Glycine max
actcgagccgaatcggctcgagggctgatgacaccatcaattttgagccgttttccccacaagttggtgtatattggagagattcaggaaaaagttgtgttgaaattttcacaagaggaatttcttacagcttggtcaactcaggtgcgtcctgcaacaactctgttggctgatgggtgtccatatttgtatgctatggtgcatgatagttcagtgtctacaataccaggtgattttgtcattggtgttaagttggcaactat

SEQ ID NO: 129737 - DNA, 251 bp, Glycine max
ggagaattgttgggtctgctgagaattcatgttgaaaaaggtgtaaatcttgccatcagggatgtggtgagcagtgacccttatgttgtcatcaaaatggtaaggcagaagctgaagactcgggtagtcaagaagaatctaaatcctgaatggaatgatgacttgaccttgtctatttcagaccctcatgctccaattcatctacatgtgtatgacaaggacacatttagcatggatgacaaaatggggga

SEQ ID NO: 129738 - DNA, 246 bp, Glycine max
attgacaaaactagtgcaactttgcaatttagaaagttagcagattgcgattttctcaagagaaactttaagcagatgtctaatgttttgtgggtggctcctgaggacaaggcgagtttatggtcacaacttcattatgtttcgtgtaataatctggaaatgcaagaagcttatcttgtcaatctcgtaaatgtgttacgagaattgtatttgcacagtccagaggaagctcgccaattgagaagg

SEQ ID NO: 129739 - DNA, 252 bp, Glycine max
caaactgtttggaatcaaatggcaacagtgagaacaccattgaattttgatcctagcaagcagagcttttgtcaattttctattgaccttctcggtggaggaattttagtggacaaaactggagattggatcacacttatacaaaattctccaattagtaacttattgagagttgctgcttggaagaaaggctgtttgatggttaagattgtgatgtctgggaatgcagcagtcaaaaggagtgattgggcc

SEQ ID NO: 129740 - DNA, 251 bp, Glycine max
gttcttttagggggcgtgccagttctgatatttacaccatctgctctcaagactgtgaattatggaatcctgcttgcacaaaagcaatgactatgtcatttaatccaaacccgtgttctgatgcatggagtttggaatttttgaagcgtaccggatttcactgtgatatcatttgtgtcactggatggactgccaccccaatgcaggatgttcaggttacaattgattggtttatttcctctcaggaatgt

SEQ ID NO: 129741 - DNA, 253 bp, Glycine max
cccatactccatggaatggactggtttggccaatagattactgagtaagggcaacgatattctgtgttgcgattatgctagttttgatatgtttgattaccaagcaagttatgagcaagatggcagaaatgataaacagtctttgtggtggtgatgaaaaattgatgcgtgaaaggacacactagctgttggcttgttgttcaaggatggcaatttgtaagaaagatgtttggagagttgaatgtggaatccc

SEQ ID NO: 129742 - DNA, 252 bp, Glycine max
cggctcgaggaagtttttaaattttgtgaggttcattatgaagaaaagggacaagcttagttgtcaagttggaatcaacccatactccatggaatggactggtttggccaatagattactgagtaagggcaacgatattctgtgttgcgattatgctagttttgatggtttgattaccaagcaagttatgagcaagatggcagaaatgataaacagtctttgtggtggtgatgaaaaattgatgcgtgaaag

SEQ ID NO: 129743 - DNA, 252 bp, Glycine max
caaaactggagattggatcacacttatacaaaattctccaattagtaacttgttgagagttgctgcttggaagaaaggctgtttaatggttaaaattgtgatgtctgggaatgcagcagtcaaaaggagtgattgggcctcattggtacaagtgtttttaacaaacagcaacagtacagagcatttcgatgcatgtaagtggacaaaatcggaaccacattcctgggaattgatcttcccaatagaggtatg

SEQ ID NO: 129744 - DNA, 251 bp, Glycine max
ggtggacgtggtggtttacccaccactgcttggattagttctgcagttaacaatcgctcctcagatatcaacaaaaagattcgcacagcacttgggaaaggtaagaaaattgtttttcttactagggttgatccttttccagtagctttactggctgttctttttggcgttaagaatgaaattctgagttctaacgccaccaatcctatgctgacgcgacttcttgagaactgtaaaagtctcaaatatct

SEQ ID NO: 129745 - DNA, 151 bp, Glycine max
aagaatggcaatttgtaagaaagatgtttggagagttgaatgtggaatcccttctggatttccgctcacagttatttgtaatagcatttttaatgagatgctcatgagatatagctatgagaaattactgcgccaggctaaagctccaagt

SEQ ID NO: 129746 - DNA, 245 bp, Glycine max
acagcatccgcggcacgacggtaaccctccaacaacaacacttccgctgcgaaaaatgtctctggtggcgaacgaggatttccagcacattctgcgtgtgctgaacaccaacgtggatgggaagcagaagataatgttcgcaatgacctccatcaagggtattggaaggagcttcgccaacatcgcttgcaagaaggctgatgttgacatgaacaaaagggctggtgagttgactgctgctgagt

SEQ ID NO: 129747 - DNA, 245 bp, Glycine max
gaaggcccattcgggtggttacatttccgaataccatcgtgcatattgaaccagacatgaattcaaggtttcagcttttgagtaccactaccaatggtgattttgttcaaggaaaagatctcgcaatggttaaagttaatgtagcatgtgctgctgttggcttgacatcaagttacactccaactccattgttggaatctggtttgcaaaaagacagagggttaattgtggagtattttggaagg

SEQ ID NO: 129748 - DNA, 117 bp, Glycine max
gttgccgcaccttaaaaccggaaacaaaagcaatcgttacttgatttcaagaatctctcaatttcttcctacttctttgtgtacgatttcttaagggaaagaaaatcactctctgtg

SEQ ID NO: 129749 - DNA, 251 bp, Glycine max
ggaatttctgaagcgtaccggatttcattgtgatatcatttgtgtcactggatggactgctaccccaatgcaggatgttcaggttacaattgattggtttatttcctctcaggaatgtgttcccaggacctattgtgttttaaatccacaaaatccttttgtgttaaataggtggatggggaaattgatttccccagggggtacttcccggtgtgtaaaaagaatccctctctctatagggggaggagctg

SEQ ID NO: 129750 - DNA, 249 bp, Glycine max
acagtttggagagattcaggaaaaagttgtattgaaattttcacaagaggaatttcttacagcttggtcaacccaggtgcgtcctgcaacaactctgttggctgatgggtgtccatatttgtatgctatggtgcatgatagttcagtgtctacaataccaggtgattttgtcattggtgttaagttgacaactataaacaatatgtgtgcatatgggctcaatcctggtatttcaggttctcgtctttt

SEQ ID NO: 129751 - DNA, 249 bp, Glycine max
gctgaatgtgcctattactcctcttgcagagccaataaatattgaaaatcagtctgtccagggttcagcatcatcaggtagggcacggagagatgctgcagcaagggctatgcagggttggcactcacaacgtctccttagcaatggtgaatttagtgatcctattattaaggataggaattctttgtctatgcaaaagcgtgaaaaacaacttaaaaacatcaatttacttaaacgcaagaaatcatc

SEQ ID NO: 129752 - DNA, 248 bp, Glycine max
gaaaaattgatgcgtgaaaggacacacctgctgttggcttgttgttcaaggatggcaatttgtaagaaagatgtttggagagttgaatgtggaatcccttctggatttccgctcacagttatttgcaatagcatttttaatgagatgctcattagatatagctatgaaaaattactgcgccaggctaaagctccaagtatgtttttacaatccttcaaaaattttgtttctttgtgtgtgtatggtga

SEQ ID NO: 129753 - DNA, 235 bp, Glycine max
attggatagtgcttttcttagagatgcagcgcttatcttctctcaagatgttgatggttggctgcgcaatatcagttggtgtcaggaacaattcctactgaaagcatacatgtctcaagatgatcttattgtcttgcgttccttagttgtcaaaggtgaaagaatgagagagcagatgctggaaggagagttaaagtgtccccagtgttggaatcttattgtaaaaggtgtgaag

SEQ ID NO: 129754 - DNA, 214 bp, Glycine max
ggtggtttacccaccactgcttggattagttctgcagttaacaatcgctcctcagatatcaacaaaaggattcgcacagcacttgggagaggtaagaaaattgtttttcttactagagttgatccttttccagtagctttactggctgttctttttggcgttaagaatgaaattctgagttctaacgccactaaccctatgctgacgcgacttc

SEQ ID NO: 129755 - DNA, 250 bp, Glycine max
agggtatcctgatttcatcattggaaactacagtgatgggaatcttgttgcatctttattggcttataaaatgggagttacacagtgcacaatcgcgcatgcacttgagaagacaaaatatccagattcagatttatattggaagaaatttgaggataaataccacttttcatgccaatttactgctgacctaatagccatgaataatgctgattttatcatcaccagtacataccaggagattgcggga

SEQ ID NO: 129756 - DNA, 249 bp, Glycine max
tgagtgggctccaattaattgtcgagttcatcgacaaccaattcacatcactgaaggaaattatgtcagaaagcaagatgtcagcattgaatatgatgcatgtacaattccaaatgattgtggttctttggttgttgccaaggttggaaatcacaaacaaattgttggtttccaggttgctggaagcctaggaagactgggatatgcttcattgataccatatgttgagccagttgtgcaagctcaaag

SEQ ID NO: 129757 - DNA, 245 bp, Glycine max
cgaaaatatgtatcaaccaccaattcagtatttccccttggggtccaggatttgtgctggctgctatactgagattggttttggacgatatctaaattgcttgaatgcattctggcatcctgaatgcttccgctgccgtgcttgcaacctaccaatctctgattacgagttctccacatccgggaattacccttaccataaatcatgctataaggaaagctaccatccaaaatgtgatgtctgca

SEQ ID NO: 129758 - DNA, 245 bp, Glycine max
tgcctataaaaataaaaactaagtcccccaaaacccaatcatatcatttcatttcttcctttgtcgtccatcccgtaaccatgtctcagactgttgtcctcaaagttggtatgtcatgtgaaggatgtgttggagcagtgaagagagttctaggaaaattggatggtgtggaatcatatgacattgatttgaaggaacaaaaggtggtagttataggaaatgtccagccagacacagttctgcag

SEQ ID NO: 129759 - DNA, 244 bp, Glycine max
attagacagagggttaattgtggaatattttggaaggatgtaatagggggcttataacgttaatcagcgccaagagaaagatttgttggagggaaatttttcctttgatatgaaatctcgctctagattggaaaaagtttcctctactaaagcacaatttgttagtggaaaaaccttcaaatatgatataattggtgctgggtcacattcttcagaagattgtcctgaaaaggaagatcaagaa

SEQ ID NO: 129760 - DNA, 246 bp, Glycine max
ctcgagccgattcggctcgagaaaaggagctggtttacgaggtacccgacaagagatggacatcaacgaaaatgaaaatacagatgaagatattctcaaggtgttccgaaaacagaaagttgatgtagaaattgaagaggctgtttcaagggtgctgtccatggtcgactcaccagatgctcgtgagcaatatcatcgcatgcttgagaaatatcgtcaagctaaggctgaacttgcgggtacgag

SEQ ID NO: 129761 - DNA, 180 bp, Glycine max
gaaattttgataaaccgcgatcacaggttgccgcaccttaaaattggaaacaaaagcaatcgttacttgatttcaagaatctctcaatttcttcctacttctttgtgtacgatttcttaagggaaagaaaatcactctctgtgctggccacagatttcgtgaggcattttcttttccaca

SEQ ID NO: 129762 - DNA, 246 bp, Glycine max
ttctcccacgacaacgtatcacaagctcccaatatagcaagcagcaaacatgatttcttccgtgtcctttccagcgtctcttcccgccgttaacttctccggcaacgccatggcttcgccgtcgtgccgcgtcaaatcccggcaattagtcgcttcggcaaccgccactgccaccgctaaagctcgctcttcctggacggagcaaccgagaccttcctatctgaactcctcttgctcttcgcttta

SEQ ID NO: 129763 - DNA, 247 bp, Glycine max
gaaaaagtttcctctacaaaagcacaatttgttagtggaaaaaccttcaaatatgataattggtgctggttcacattcttcagaagattttcctgaaaaggaagatcaagaaaaacccaaaaagattgataccagattgagacaaagaatagatcctcaatacaatgaggttcaggctcagatggaaacaaatttgtttaaattgtctcttgatgatgttgaaactcctaaaggttccatgttggat

SEQ ID NO: 129764 - DNA, 242 bp, Glycine max
ccaatagattactgagtaagggcaacgatattctgtgttgcgattatgctagttttgatggtttgattaccaagcaagttatgagcaagatggcagaatcgataaacagtctttgtggtggtgatgaaaaattgatgcgtgaaaggacacacctgctgttggcttgttgttcaagaatggcaatttgtaagaaagatgtttggagagttgaatgtggaatcccttctggatttccgctcaca

SEQ ID NO: 129765 - DNA, 242 bp, Glycine max
tgcaagtgttgctttgcagcgcactcatcgtattaaaggaatgattaaaatggtggccacagttggtattcctgagaatactcgtatagcattggcctgtgctatgaatagttcttttagggggcgtgccagttctgatatttacaccatctgctctcaagactgtgaattatggaatcctgctttcacaaaagcaatgactttgtcatttaatccaaacccgtgttctgatgcatggagtt

SEQ ID NO: 129766 - DNA, 244 bp, Glycine max
ctcactcacaaacgcacactgaattcaaaaacatcgaaagagagaggcatggccgagcaaaccttcatcatgatcaagccagatggcgttcaaagaggccttattggcgagattattagcagatttgagaggaagggtttttaccttgaaagggttgaaactcgttactgtggaccgtccttttgctgagaagcactatgctgatttgtctgcaaagcctttctttagtggtttggtggattac

SEQ ID NO: 129767 - DNA, 245 bp, Glycine max
gcaagatggcagaaatgataaacagtctttgtggtggtgatgaaaaattgatgcgtgaaaggacacacctgctgttggcttgttgttcaagaatggcaatttgtaagaaagatgtttggagagttgaatgtggaatcccttctggatttccgctcacagttatttgtaatagcatttttaatgagatgctcattagatatagctatgaaaaattactgcgccaggctaaagctccaagtatgttt

SEQ ID NO: 129768 - DNA, 246 bp, Glycine max
gggaaatttttcctttgatattaaatctcgctctagattggaaaaagtttcctctactaaagcacaatttgttagtggaaaaaccttcaaatatgatataattggtgctggttcacattcttcagaagattttcctgaaaaggaagatcaagaaaaacccaaaaagattgatgccagattgagacaaagaatagatcctcaatacaatgaggttcaggctcagatggaaacaaatttgtttaaatt

SEQ ID NO: 129769 - DNA, 185 bp, Glycine max
cagaaatgataaacagtctttgtggtggtgatgaaaaattgatgcgtgaaaggacacacctgctgttggcttgttgttcaaggatggcaatttgtaagaaagatgtttggagagttgaatgtggaatcccttctggatttccgctcacagttatttgcaatagcatttttaatgagatgctcata

SEQ ID NO: 129770 - DNA, 195 bp, Glycine max
gttatgagcaagatggcagaaatgataaacagtctttgtggtggtgatgaaaaattgatgcgtgaaaggacacacctgctgttggcttgttgttcaaggatggcaatttgcaagaaagatgtttggagagttgaatgtggaatcccttctggatttccgctcacagttatttgcaatagcatttttaatgagatg

SEQ ID NO: 129771 - DNA, 244 bp, Glycine max
ctcgagccggctcgagttttgacaaacctaagacgcgctgcttcactattctccctatggagtttaatcttgtggtccgtcagaagtttttaaattttgtgaggttcattatgaagaaaagggacaagcttagttgtcaagttggaatcaacccatactccatggaatggactggtttggccaatagattactgagtaagggcaacgatattctgtgttgcgattatgctagttttgatggttt

SEQ ID NO: 129772 - DNA, 165 bp, Glycine max
ctcgagccgattttgataaaccgcgatcacaggttgccgcaccttaaaaccggaaacaaaagcaatcgttacttgatttcaagaatctctcaatttcttcctacttctttgtgtacggtttcttaagggaaagaaaatcactctctgtgctggccacagacttcg

SEQ ID NO: 129773 - DNA, 244 bp, Glycine max
attttgttggagatctcgtctttgaagtttctaagatgacttctccctacattaaatgtacagtctctttcttcatagcatttggaaatttggctgatgacaccatcaattttgaggcttttccccacaagctggtacactttggagagattcaggaaaaagttgtattgaaattttcacaagaggaatttcttacagcttggtcaacccaggtgcgtcctgcaacaactctgttggctgatgg

SEQ ID NO: 129774 - DNA, 238 bp, Glycine max
tttggactatatggaaagaattcctcttgccacatctgagggttttccccatgtgctttcacgcaaaaatggtgataaaggcaaaaggagatttgtttctggggatggtgaagagatgacattgattccgggaaccagtgttgaagaggcttacaataagctaatagttgaacttgagataagtgttcctacattggttggcattgaatgtcccaaggatgagaaacttcctcgtcgc

SEQ ID NO: 129775 - DNA, 238 bp, Glycine max
tctcgagccgaatcggctcgaggtcatcgacgcgcaaattgttgatactgaaaggaaatcttctaaacagaaaaacaatgggagaagatctgttctgggctattagaggaggtggtggagcgagttttggtgtcattttgtcgtttactattaaactcgttccggtgccggaaacggttaccgttttccgcgttgagaagactcttgaaacgaatgtcactgcacatgaccttgtcgt

SEQ ID NO: 129776 - DNA, 239 bp, Glycine max
ctttctagctggtcataatatcaccattactgatggtattgacaacactagtgcaactttgcaatttagaaagttagcagattgtgattttctcaagagaaactttaggcagatgtctaatgttttgtgggtggctcctgaggacaaggcgagtttatggtcacaacttcattatgtttcatgtaataatctggaaatgcaagaagcttatcttgtcaatctcgtaaatgtgttacgag

SEQ ID NO: 129777 - DNA, 239 bp, Glycine max
gtggagattatcctaaagcagaggagtatcttgaaagagctattttggctaatcctggcgatgctaatgttttgtccctctacgcggatttaatatggcaaacagagaagaatgctgatcgagctgagggttattttgatcaagctgttaaaactgcaccggatgattgctatgtcttggcttcttatgcaaaattcctctgggatgttgaagaagatgaagataaagactgccaacat

SEQ ID NO: 129778 - DNA, 246 bp, Glycine max
tgactatttatttgccatttttaagaagttcaacttgaatgttcaagcagtcaacgtgttgcttgataagattcatagcattgatagacctgttgagtttgctttccgagttgaagaagatgctgtttggagtcaggtcgccaaggctcaactcagggatgggctagtaagtgatgcaattgagtactttatacgatgtgatgatgctacacaatttttagatgttatccgtgctgctgaagatgg

SEQ ID NO: 129779 - DNA, 125 bp, Glycine max
gaatttgaaaaacatgttgctcatgaaagcctcaaggatgcaaattcctgctgttgacaagttgtattctactaaggttaataagtttgcaaaaattatgaaccttagacaaagtgttgttggtg

SEQ ID NO: 129780 - DNA, 243 bp, Glycine max
ccgccacctcctccgccgatgatggcggtagtgccaccgccccccggcgcggttgtcccgccggcgcaccacctgcatccgccttacgtggctcagcatcagcagcacgcggtgttcggttcctacggtgctcctcaatcctccacccacgaggttcgacatctcttcgtcgctggcctccccgaagacgtaaaaccccgcgacatctacaacctcttccgcgaatttcccggttccgagtcc

SEQ ID NO: 129781 - DNA, 243 bp, Glycine max
gaaaaattgatgcgtgaaaggacacacctgctgttggcttgttgttcaaggatggcaatttgtaagaaagatgtttggagagttgaatgtggaatcccttctggatttccgctcacagttatttgcaatagcatttttaatgagatgctcattagatatagctatgaaaaattactgcgccaggctaaagctccaagtatgtttttacaatccttcaaaaattttgtttctttgtgtgtgtat

SEQ ID NO: 129782 - DNA, 241 bp, Glycine max
agcaaaggaagactgggatatgcttcattgataccatatgttgagccagttgtgcaagctcaaagtgctgaagtttactttgacttcttccctgtggaggttgatagtcaagagggagttgctcacattggtgaattgaaatctggtgtctatgttccactgcctacaaaaatcaatttggtggaaactcccaaggaatggcaactggatctaccttgtgacaaaattcctagtgtcttga

SEQ ID NO: 129783 - DNA, 242 bp, Glycine max
ttgagacaaagaatagatcctcaatacaatgaggttcaggctcagatggaaacaaatttgtttaaattgtctcttgatgatgttgaaactcctaaaggttccatgttggatcttaaaatttctcaatctaaaattgcacttcccaaaaacacagttggaggaaccattctgcgtagtgatctattggcaaattttctgacagagggcaattttagagcaagtgttgatttgcagcgcactca

SEQ ID NO: 129784 - DNA, 228 bp, Glycine max
gttcattggttgttgccaaggttggaaatcacaaacaaattgttggtttccatgttgctggaagcataggaagactgggatatgcttcattgataccatatgttgagccagttgtgcaagctcaaagtgctgaagtttactttgacttcttccctgtggaggttgatagtcaagagggagttgctcacattggtgaattgaaatctggtgtctatgttccactgccta

SEQ ID NO: 129785 - DNA, 251 bp, Glycine max
aagaagcttatcttgcatttccagattattacatgaaacataatgaagttgtgaccataaactggaaatgcaagaagcttatcttgtcaatctcgtaaatgtgttacgagaattgtatttgcacagtccagaggaagctcgccaattgagaaggaaagctctctctcgtattgaatggctgcaaaaagctgatgtgcctaccatagcacagattgaagagttccattcgatgcagaggatgatgaatgctc

SEQ ID NO: 129786 - DNA, 137 bp, Glycine max
ccgcgatcacaggttgccgcaccttaaaaccggaaacaaaagcaatcgttacttgatttcaagaatctctcaatttcttcctacttctttgtgtacgatttcttaagggaaagaaaatcactctctgtgctggccac

SEQ ID NO: 129787 - DNA, 242 bp, Glycine max
ttcgagtttcacagccaagtcgtaaaagggtttcaagggatggaaaacatgcagagcttctggcaattgggtgatgaactccgtgggcactcaaaagcatcggaggatcacaagtggttaatggttgcctcgaaactggccgaacagacaagattgaagggggagcgtgtgaacaaccttgatctttcaaagggacccattgaaacaaggtcaagggataaatttgggttccaggaagagaa

SEQ ID NO: 129788 - DNA, 238 bp, Glycine max
gttagcatgtcaaaagttgcggtatcattcacacacattatcaagagtggtgaacctgcttttagtgttctggtttcaagatttcttttgggtgagagctttcctgtgccagtctatctgtctttaattccaatcattggtggatgtgcacttgctgctgtgactgagctcaatttcaatatgatcggttttatgggggccatgatatcgaatttggcatttgtattccgtcatatct

SEQ ID NO: 129789 - DNA, 241 bp, Glycine max
gaaaaattgatgcgtgaaaggacacacctgctgttggcttgttgttcaagaatggcaatttgtaagaaagatgtttggagagttgaatgtggaatcccttctggatttccgctcacagttatttgtaatagcatttttaatgagatgctcattagatatagctatgaaaaattactgcgccaggctaaagctccaagtatgtttttacaatccttcaaaaattttgtttctttgtgtgtgt

SEQ ID NO: 129790 - DNA, 240 bp, Glycine max
tgggtgctctggatcacatatcggaactctttgactgctccagtggcagttccaagcacaagaagcgcaagaattgcagacggtggaggtgaaagtgaagatggactgcgaaggatgcgagaggaaagtgaggaaggcggtggaggggatgaaaggcgtgaaccaggtggatgtggagcgtaaggccaacaaagtcagcgtggtcggctacgtcgaggcctctaaggtggtcgcccgcat

SEQ ID NO: 129791 - DNA, 240 bp, Glycine max
gagagttgctgcttggaagaaaggctgtttaatggttaagattgtgatgtctgggaatgcagcagtcaaaaggagtgattgggcctcattggtacaagtgtttttaacaaacagcaacagtacagagcattttgatgcatgtaagtggacaaaatcggaaccacattcctgggaattgatcttcccaatagaggtatgtggtcctaataatggttttgaaatgtggagttctgagtgggc

SEQ ID NO: 129792 - DNA, 231 bp, Glycine max
tgattgtgttgatgaggaggattcctttgaggaagtttctttgagtgcagcactcaatggtgttgagggtttggactatatggaaagaattcctcttgccacatctgagggttttccccatgtgctttcacgcaaaaatggagagaaaggcaaaaggagatttgtttctggggatggtgaagagatgacattgattccgggaatcagtgttgaagaggcttacaataagct

SEQ ID NO: 129793 - DNA, 240 bp, Glycine max
ggactactgaggaatttgagagatagagagttagcccgttatgcctttgatttctatgaggtcacctccaaaacaccaaacagggcaagggaggcaatagcacaaatgaaggctgcagctctctcgggagttaacaacaagctgtttgggcttgatggaaacatctcgaccaactccgaaaatactgaaaggcacactgcaagagatgtgaatcaaaacatgcattctcttctgggcatg

SEQ ID NO: 129794 - DNA, 239 bp, Glycine max
ttaacatatacaaattctctgtgttgtgttgtgtacttgtgttaattgtgttgttgttgtaggaaatttaagtgaagagagaatgatgatgaagtctgctatgtgtgcattggtgcttgtggcactggttgtggttgaagtggggcccatggctgaggctgcggtgacttgcaacccaacacagttgactccttgtcttccggcaattaattcaggttctgcaccttcgagtgcttgtt

SEQ ID NO: 129795 - DNA, 239 bp, Glycine max
gttagcatgtcaaaagttgcggtatcattcacacacattatcaagagtggtgaacctgcttttagtgttctggtttcaagatttcttttgggtgagagctttcctgtgccagtctatctgtctttaattccaatcattggtggatgtgcacttgctgctgtgactgagctcaatttcaatatgatcggttttatgggggccatgatatcgaatttggcatttgtattccgtaatatctt

SEQ ID NO: 129796 - DNA, 240 bp, Glycine max
caaagaatagatcctcaatacaatgaggttcaggctcagatggaaacaaatttgtttaaattgtctcttgatgatgttgaaactcctaaaggttccatgttggatcttaaaatttctcaatctaaaattgcacttcccaaaaacacagttggaggaactattctgcgtagtgatctattggcaaattttttgacagagggcaattttagagcaagtgttgatttgcagcgcactcatcgt

SEQ ID NO: 129797 - DNA, 240 bp, Glycine max
aacacagaacagttgaagtgaacggcataaaaatgcatgttgcagagaatggagagggtccagtggtgttgttcctccatggcttccctgagctctggtactcatggcgccaccagattctctctctcagctccctcggctaccgcgccgtcgctcccgatctccgtggctacggtgacaccgaggcaccaccttcaatcagcagctacaactgctttcacatagtggggtgatctcgtt

SEQ ID NO: 129798 - DNA, 235 bp, Glycine max
cctagatgaagaaattctttctaaagttgcacaagatatggttgatgaatggtttgattgtgttgatgaggaggattctttgaggaagtttctttaagtgcagcacttaatggtgttgagggtttggactatatggaaagaattcctcttgccacatctgagggttttcctcatgtgctttcacgcaacaatggtatcaaaggcaaaagaagatttgtttctggggatggtgaag

SEQ ID NO: 129799 - DNA, 239 bp, Glycine max
gtttctgtctctgtgtttgcggctgaggattccgaacgagcgaccttcttcgtttctcgcaaagtttaagtcatcatgggtaaggaaaagactcacatcaacattgtcgtcattggacatgtcgactctgggaagtcaactaccactggtcatttgatctacaagcttggaggtattgacaagcgtgtgattgagaggttcgagaaggaggctgctgagatgaacaagaggtcattcaa

SEQ ID NO: 129800 - DNA, 238 bp, Glycine max
gacaagcttagttgtcaagttggaatcaacccatactccatggaatggactggtttggccaatagattactgagtaagggcaacgatattctgtgttgcgattatgctagttttgatggtttgattaccaagcaagttatgagcaagatggcagaaatgataaacagtctttgtggtggtgatgaaaaattgatgcctgaaaggacacacctgctgttggcttgttgttcaaggatgg

SEQ ID NO: 129801 - DNA, 239 bp, Glycine max
accacatacagaggtttctctagtgatcttcgttcttctgtggagatcttgttttttcatctcacttttcttctaattaaggaacaagctttccgcagttgaaaaccctagctagctagcttccaccaatttgaatcaccaatggctcgctctttctctaacgtcaaggttctctctgctcttgtggccgacggattctccaacactctcaccaggcgtgggtacgcagcagcgacaca

SEQ ID NO: 129802 - DNA, 237 bp, Glycine max
agcttggtcaactcaggtgcgtcctgcaacaactctgttggctgatgggtgtccatatttgtatgctatggtgcatgatagttcagtgtctacaataccaggttattttgtcattggtgttaagttgacaaccataaacaatatgtgtgcatatgggctcaatcctggtatttcaggttctcgtcttttgggcaccagtcctcagtccatttcacagcaaactgtttggaatcaaat

SEQ ID NO: 129803 - DNA, 235 bp, Glycine max
gtttgatcctggctcagaaggaacgctagctatatgcttaacacatgcaagtcgaacgttgttttcggggagctgggcagaaggaaaagaggctcctagcgtgaaggttgcttgtctcgcccaggaggtgggaacagttgaaaacaaagtggcgaacgggtgcgtaatgcgtgggaatctgccgaacagttcgggccaaatcctgaagaaagtccgcaagcgctgtttgatgagc

SEQ ID NO: 129804 - DNA, 239 bp, Glycine max
gacaaaactagtgcaactttgcaatttagaaagttagcagattgtgattttctcaagagaaactttaggcagatgtctaatgttttgtgggtggctcctgaggacaaggcgagtttatggtcacaacttcattatgtttcatgtaataatctggaaatgcaagaagcttatcttgtcaatctcgtaaatgtgttacgagaattgtatttgcacagtccagaggaagctcgccaattgag

SEQ ID NO: 129805 - DNA, 238 bp, Glycine max
aggatctctccaagactctcatgaggacaggatcagctgtttaggtttgtcagctgatggaagtgccttgtgtacaggaagttgggacacaaacttaaagatatgggcgtttggagggcataggaggacaacttaaagccattgaaggcaaggccaaataggggacgaattgcgtacaactcttcattttagccttgcaactattgcatcagttagtttatgctcatgtccgtttgtc

SEQ ID NO: 129806 - DNA, 237 bp, Glycine max
aaagctttctagctggtcataatatcaccattactgatggtattgacaaaactagtgcaactttgcaatttagaaagttagcagattgtgattttctcaagagaaactttaagcagatgtctaatgttttgtgggtggctcctgaggataaggcgagtttatggtcacaacttcattatgtttcgtgtaataatctggaaatgcaagaagcttatcttgtcaatctcgtaaatgtgt

SEQ ID NO: 129807 - DNA, 237 bp, Glycine max
catacccttttctttcgtgcctagctactccttaattactttcattctttaatttgctgctagctatagcttcattagttcattcacaaaattaattattacaatggtgagtgttgaagagatccgtcaggcacaacgtgcagaaggccctgccactgtcatggctattggcaccgccactcctcccaactgcgtgatccagagtacctatcctgactattatttccgcatcaccaa

SEQ ID NO: 129808 - DNA, 237 bp, Glycine max
attggttggcattgagtgtcccaaggatgagaaacttcctcgtcgcaaaatttttgataaacctaagacgcgctgcttcactattctccctatggagtttaatcttgtggttcgtcagaagtttttaaattttgtgaggttcattatgaagaaaagggacaagcttagttgtcaagttggaatcaacccatactccatggaatggactggtttggccaatagattactgagtaaggg

SEQ ID NO: 129809 - DNA, 237 bp, Glycine max
gaaaagctttctagctggtcataatatcaccattactgatggtattgacaaaactagtgcaactttgcaatttagaaagttagcagattgtgattttctcaagagaaactttaagcagatgtctaatgttttgtgggtggctcctgaggataaggcgagtttatggtcacaacttcattatgtttcgtgtaataccgtggaaatgcaagaagcttatcttgtcaatctcgtaaatgt

SEQ ID NO: 129810 - DNA, 237 bp, Glycine max
agagattcaggaaaaagttgtattgaaattttcacaagaggaatttcttacagcttggtcaactcaggtgcgtcctgcaacaactctgttggctgatgggtgtccatatttgtatgctatggtgcatgatagttcagtgtctacaataccaggtgattttgtcattggtgttaagttgacaaccataaacaatatgtgtgcatatgggctcaatcctggtatttcaggttctcgtct

SEQ ID NO: 129811 - DNA, 238 bp, Glycine max
cacatggcgtcacgggacaacaagaaggcgtccagcagccgagccggccgaattcgcaccctctccgatctgaaccgtccctccgccgattccgacagcgactccgatggccctcaggagtattacaccggcggcgaaaagagtggaatgcttgtccaggatccttcaaagggaaatgatgtggatgaaattttcaatcaagctaggcaacttggggctgttgaaaggcctcttgatc

SEQ ID NO: 129812 - DNA, 237 bp, Glycine max
ggttaattgtggagtattttggaaggatgtcttacgttgctcacaacgttaatcatccccaagagaaagatttgttggagggaaatttttcctttgatattaaatctcgctctagattggaaaaagtttcctctacaaaagcacaatttgttagtggaaaaaccttcaaatatgatataattggtgctggttcacattcttcagaagattttcctgaaaaggaagatcaagaaaaac

SEQ ID NO: 129813 - DNA, 235 bp, Glycine max
agacaagctgactaccttcatcattaagaaccctccagaggttaagaaaggatccaaagacaagaaggccatgaggagagctgagaaggagagactgaaggaaggtgaaatggctgatgaggaacagaagaaagtgaagaaagaggttaagaagaaaggctcttcatcttcaaaagatggcactgctaaatccacctcttcaaagaagaaagcaagtggctctgatgaagaccgc

SEQ ID NO: 129814 - DNA, 235 bp, Glycine max
caagactgtgaattatggaatcctgcttgcacaaaagcaatgactatgtcatttaatccaaacccgtgttctgatgcatggagtttggaatttctgaagcgtaccggatttcattgtgatatcatttgtgtcactggatggactgccactccaatgcaggatgttcaggttacaattgattggtttatttcctctcaggaatgtgttcccaggacttattgtgttttaaatccac

SEQ ID NO: 129815 - DNA, 203 bp, Glycine max
cggctcgagctcgagccgtgaaattttgataaaccgcgatcacaggttgccgcaccttaaaaccggaaacaaaagcaatcgttacttgatttcaagaatctctcaatttcttcctacttctttgtgtacgatttcttaagggaaagaaaatcactctctgtgctggccacagacttcgtgaatcattttcttttccacacaac

SEQ ID NO: 129816 - DNA, 216 bp, Glycine max
  unsure (1)..(216): unsure at all n locations
atggaacattagaagacggctgtttgcctgcactgatcagttcttagagcatgaattcagcatccccgcagtttgtttcctcatgaaggatgagtttgtacgatccgatccaccagattagtatgttgggangtggcttcaaaagtaatggaaatttaagtgcagccatgcctctaattgatgagacagacatgaagtgtgatagtcactcagagg

SEQ ID NO: 129817 - DNA, 239 bp, Glycine max
gcaggtgcagcagcagagagtgcggtaggctcatccgagaccggaagcagcaatggggatcgatctcaaggccggaggtaaaagcaaaaaaaaccaaaagaacagcacccaagtccaatgatatctatcttaagctcttggtcaagctttatcgcttccttgttcggagaactggcagcaaattcaatgccgttatactcaagagattgttcatgagcaaggttaacaagcccccattg

SEQ ID NO: 129818 - DNA, 234 bp, Glycine max
aagcaagttatgagcaagatggcagaaatgataaacagtctttgtggtggtgatgaaaaattgatgcgtgaaaggacacacctgctgttggcttgttgttcaagaatggcaatttgtaagaaagatgtttggagagttgaatgtggaatcccttctggatttccgctcacagttatttgtaatagcatttttaatgagatgctcattagatatagctatgaaaaattactgcgc

SEQ ID NO: 129819 - DNA, 232 bp, Glycine max
gcagaattgctctctagcaaattggatactgttactggccaatattatcctgagtgggctccaattatgtctcgagtacatcgacaaccaattcacatcactgaaggaaattatgtcagaaagcaagatgtcagcattgaatatgatgcatgtgcaattccaaatgattgcggttccctggttgttgccaaattcggaaatcacaatcaaattggtggtttccatgttgctg

SEQ ID NO: 129820 - DNA, 233 bp, Glycine max
atttttctgcagaattgctctcttgcaaattggatactgttactggccaatattatcctgagtgggctccaattaattctagagttcatcgacaaccaattcacatcactgaaggaaattatgtcagaaagcaagatgtcagcattgaatatgatgcatgtacaattccaaatgattgtggttcattggttgttgccaaagttggaaatcacaaacaaattgttggtttccat

SEQ ID NO: 129821 - DNA, 233 bp, Glycine max
ctctttcttctcataactctgccgccgcaacagccccaaatccaatggcttcagagaagaaactttcgaacccaatgagggagataaaggtgcagaagctcgtcctcaatatctccgttggcgagagtggagatcgtctcaccagagccgctaaggttttggaacagcttagtggccaaacccctgtgttttccaaagcaaggtacacggttcgttcctttgggattagaaga

SEQ ID NO: 129822 - DNA, 233 bp, Glycine max
ctcgagccgctcgagccgctcgagccgcacaacttcattatgtttcatgtaataatctggaactgcaagaagcctatcttgtcaatctcgtaaatgtgttacgagaattgtatttgcacagtccagaggaagctcgccaattgagaaggaaagctctctctcgtattgaatggctgcaaaaagctgatgtgcctaccatagcacagattgaagagttccattcgatgcagagg

SEQ ID NO: 129823 - DNA, 182 bp, Glycine max
gaaattttgataaaccgcgatcacaggttgccgcacctcaaaaccggaaacaaaagcaatcgttacttgatttcaagaatctctcaatttcttcctacttctttgtgtacgatttcttaagggaaagaaaatcactctctgtgctggccacagacttcgtgaatcattttcttttccacaca

SEQ ID NO: 129824 - DNA, 239 bp, Glycine max
cctgaggataaggcgagtttatggtcacaacttcattatgtttcgtgtaataatctggaaatgcaagaagcttatcttgtcaatctcgtaaatgtgttacgagaattgtatttgcacagtccagaggaagctcgccaattgagaaggaaagctctctctcgtattgaatggctgcaaaaagctgatagtgccttacgcatagcacagattcgaagcagcttcgcattccgtatgcagag

SEQ ID NO: 129825 - DNA, 232 bp, Glycine max
ttatgatgaaaaattcaattttattggcacaattgggactccagcttttcatcgacaaattgctgcacatttggagaaaatgccattatggcaaaaagcaattttgtgtggaatgggacattgtttgtctcggagaagcaaagaaacatggtattctgggatgaaggaaaaatttgtacaaatgatgaagagcatctatgaaacagaagttacagattggccagtaccactg

SEQ ID NO: 129826 - DNA, 232 bp, Glycine max
agcaagttatgagcaagatggcagaaatgataaacagtctttgtggtggtgatgaaaaattgatgcgtgaaaggacacacctgctgttggcttgttgttcaaggatggcaatttgtaagaaagatgtttggagagttgaatgtggaatcccttctggatttccgctcacagttatttgcaatagcatttttaatgagatgctcattagatatagctatgaaaaattactgcg

SEQ ID NO: 129827 - DNA, 231 bp, Glycine max
ctcgagccgcatgtgctttcacgcaacaatggtgatcaaggcaaaagaagatttgtttctggggatggtgaagagatgacattgattccgggaaccagtgttgaagaggattacaacaagctaatagttgaacttgagaaaagtgttcctacattggttggcattgaatgtcccaaggatgagaaacttcctcgtcgcaaaatttttcacaaacctaagacgcgctgcttc

SEQ ID NO: 129828 - DNA, 231 bp, Glycine max
ctgaaaatcatttctggaaccattcttgcaacaattttgggaacaaccttctggaaactcttttcctttcttagagatgctggtaatgggggagtttttgttggtaatgttgcttcagcattcacaacttcaagtgtgcttgaggcccaaagtagaaagcccaacagatatgaagtttcccaatacagatatcgcaatgtgccaataaagcgcagagcatgggttgaaggc

SEQ ID NO: 129829 - DNA, 235 bp, Glycine max
cgtctttgaagtttctaagatgacttctccctacattaaatgcacagtctctttcttcatagcatttggaaatttggctgatgacaccatcaattttgaggcttttccccacaagctggtgcagtttggagagattcaggaaaaagttgtgttgaaattttcacaagaggaatttcttacagcttggtcaactcaggtgcgtcctgcaacaactctgttggctgatgggtgtcca

SEQ ID NO: 129830 - DNA, 258 bp, Glycine max
gcgcctctaacctcgcagttccttgatctctcctctcaagatgcagatattcgtgaaaactttgaccggcaagaccatcacccttgaggtggaatcctccgacaccattgacaacgtaaaagctaagattcaagacaaggaagggatcccacctgaccagcagagacttatctttgcgggtaaacaacttgaggatggtcgcacccttgccgattacaacatccaaaaggaatcaaccctccatctcgtgcttcgcct

SEQ ID NO: 129831 - DNA, 252 bp, Glycine max
ctcatcacaatatataagcaggccataacctaatgcttttgcactacaaatcagttttctacttgaatcttcgttatccttctttttttctccttgaaccaatattcactatggcagatgaggtggttctgctagatttctggccaagtccatttgggatgagggtcaggattgcacttgctgaaaagggtatcaaatatgagtccaaagaagaggacttgcagaacaagagccctttgctcctcaaaatga

SEQ ID NO: 129832 - DNA, 250 bp, Glycine max
ctagttttgatggtttgattaccaagcaagttatgagcaagatggcagaaatgataaacagtctttgtggtggtgatgaaaaattgatgcgtgaaaggacacacctgctgttggcttgttgttcaaggatggcaatttgtaagaaagatgtttggagagttgaatgtggaatcccttctggatttccgctcacagttattcgcaatagcatttttaatgagatgctcattagatatagctatgaaaaatt

SEQ ID NO: 129833 - DNA, 250 bp, Glycine max
gctaatagttgaacttgagaaaagtgttcctacattggttggcattgaatgtcccaaggatgagatacttcctcgtcgcaaaatttttgacaaacctaagacgcgatgcttcactattctccctatggagtttaatcttgtggttcgtcagaagtttttaaattatgcgaggttcattatgaagaaaatagacaagcttagttgtcaagttggaatcaacccatactccatggaatggactggtttggcc

SEQ ID NO: 129834 - DNA, 255 bp, Glycine max
gagacggcaacgttgtgctgtccgccttgaccgagccagagcttcgtcttggccctcgattttgccctgtaaaactaatcccagtcacaacagaaataatcaatggcaccgaaacagaccaaggctgagaagaagatcgcttacgatgcgaactgtgcgacctaatggaggagtacggccaaatcctcgttgtaaactccgacaacgtgggatcgaaccagctccagaacattcgcaagggtctccgcggcgact

SEQ ID NO: 129835 - DNA, 253 bp, Glycine max
ctcgttcttcttcgtcgttatcttcttcttttgttgtttgtgtgtttgttttttctctcacctgaaaatgtcttgctgcggtggtaactgtggttgcggaagcgcctgcaagtgcggcaacggctgcggaggctgcaagatgtacccagacttgagctacaccgagtcaaccaccaccgagaccttggtcatgggagtggcaccagttaaggctcaattcgagagtgctgaaatgggtgttcccgctgagaac

SEQ ID NO: 129836 - DNA, 254 bp, Glycine max
ctggtacagtttggagagattcaggaaaaagttgtattgaaattttcacaagaggaatttcttacagcttggtcaacccaggtgcgtcctgcaacaactctgttggctgatgggtgtccatatttgtatgctatggtgcatgatagttcagtgtctacaataccaggtgattttgtcattggtgttaagttgacaaccataaacaatatgtgtgcatatgggctcaatcctggtatttcaggttctcgtctttt

SEQ ID NO: 129837 - DNA, 252 bp, Glycine max
ctttcatcattcatcgctttccaccaggcacgcagattctctccttccttctctctatccaaattttgattctttcgatcaaacccgcaacacccacctcaccaaaaccctacgcaacccatccatgacgcttggcttaggaggatccagtgtcgtggttcctaggaacttcagattgctggaggagcttgaacgtggagaaaaaggaattggagatggcacagttagctatggaatggatgatggtgatga

SEQ ID NO: 129838 - DNA, 251 bp, Glycine max
agcacacctcgagcgaatcggctcactcgacgttcaggaaaaagttgtattgaaattttcaacagaggaatttcttacagactggtcaactcaggtgcgtcctgcaacaactctgttggctgatgggtgtccatatttgtatgctatggtgcatgatagttcagtgtctacaataccaggtgattttgtcattggtgttaagttgacaaccataaacaatatgtgtgcatatgggctcaatcctggtattt

SEQ ID NO: 129839 - DNA, 251 bp, Glycine max
cccaggtgcgtcctgcaacaactctattggctgatgggtgtccatatttgtatgctatggtgcatgatagttcagtgtctacaataccaggtgattttgtcattggtgttaagttgacaaccataaacaatatgtgtgcatatgggctcaatcctggtatttcaggttctcgtcttttgggcaccattcctcagtccatttcacagcaaactgtttggaatcaaatggcaacagtgagaacaccattgaat

SEQ ID NO: 129840 - DNA, 250 bp, Glycine max
tgtccatatttgtatgctatggtgcatgatagttcagtgtctacaataccaggtgattttgtcattggtgttaagttgacaaccataaacaatatgtgtgcatatgggctcaatcctggtatttcaggttctcgtcttttgggcaccattccttagtccatttcacagcaaactgtttggaatcaaatggcaacagtgagaacaccattgaattttgattctagcaagcagagcttttgtcaattttcta

SEQ ID NO: 129841 - DNA, 250 bp, Glycine max
ctcccaaggaatggcaactggatctaccttgtgacaaaattcctagtgtcttgactacaactgatgagagattggtaggcacagaacatgagggatatgatcctttacttggtggaattcaaaaatatgccactcccatgatgcccctagatgaagaaattctttctaaggttgcacaagatatggttgaggaatggtttgattgtgttgatgaggaggatacctttgaggaagtttctttaagtgcagc

SEQ ID NO: 129842 - DNA, 251 bp, Glycine max
ggatcacacttatacaaaattctccaattagtaacttgttgagagttgctgcttggaagaaaggctgtttaatggttaaaattgtgatgtctgggaatgcagcagtcaaaaggagtgattgggcctcattggtacaagtgtttttaacaaacagcaacagtacagagcatttcgatgcatgtaagtggacaaaatacctgccacattcctgggaattgatcttcccaatagaggtatgtggtcctaataat

SEQ ID NO: 129843 - DNA, 238 bp, Glycine max
ggctcgagctcttcttctcttgcggctagacttttagcgacttcactctagatttaaggaagatggctaaggaaaaggttcacatcagtattgtggtcattggccatgtcgactctgggaaatccactaccactggtcacctgatttacaagcttggaggcattgacaagcgtgttattgagaggtttgagaaggaagctgctgagatgaacaagaggtctttcaagtatgcctgggt

SEQ ID NO: 129844 - DNA, 250 bp, Glycine max
gtcttggaaccctaaccgcacctctctctttcttcccgtgtgcgtcaaagcgaagcaacgcgacacgatggtgttctacttcaaagcgcgccccgaagccggcgatttcaccatcttcatgggccttgacaagtacgagaacgaggaactcatcaaatacggttttcccgaagacatctggttccatgtcgataaaatgtcttcagcccatgtctatgtcaggttgcacaaaggccagaccatcgatgac

SEQ ID NO: 129845 - DNA, 252 bp, Glycine max
cttgtgacaaaattcctagtgtcttgactacaactgatgaaagattggtaggcacagaacatgatggatatgatccttttcttggtggaattcaaaaatatgccactcccatgatgcccctagatgaagaaattctttctaaggttgcacaagatatggttgaggaatggtttgattgtgttgatgaggaggattcctttgaggaagtttctttgagtgcagcactcaatggtgttgagggtttggactata

SEQ ID NO: 129846 - DNA, 252 bp, Glycine max
cagaaatgataaacagtctttgtggtggtgatgaaaaattgatgcgtgaaaggacacacctgctgttggcttgttgttcaagaattgcaatttgtaagaaagatgtttggagagttgaatgtggaatcccttctggatttccgctcacagttatttctaatagcatttttaatgagatgctcattagatatagctatgaaaaattactgcgccaggctaaagctccaagtatgtttttacaatccttcaaaa

SEQ ID NO: 129847 - DNA, 255 bp, Glycine max
ctctttgaatatgaaagctgcagttggcgcacaatataaagggaagaagcaagattatttctctggaatggacagtttcgacaaggaacgcttgctttatctcagttgtgaaaggttgttctatggagaaaaaggagtgtggaatggatccctgaaagcagagttgaggccaattgaaaaagtgcaagcaaacaaaactagaacattcacagcagcaccaattgatacactacttggagccaaggtttgcgttga

SEQ ID NO: 129848 - DNA, 254 bp, Glycine max
ctcgagccgttagtaacttgttgagagttgctgcttggaagaaacgctgtttaatggttaaaattgtgatgtctgggaatgcagcagtcaaaaggagtgattgggcctcattggtacaagtgtttttaacaaacagcaacagtacagagcatttcgatgcatgtaagtggacaaaatcggaaccacattcctgggaattgatcttcccaatagaggtatgtggtcctaataatggttttgaaatgtggagttct

SEQ ID NO: 129849 - DNA, 253 bp, Glycine max
ttcttcatagcatttggaaatttggctgatgacaccatcaattttgaggcttttccccacaagctggtgcactttggagagattcaggaaaaagttgtattgaaattttcacaagaggaatttcttacagcttggtcaactcaggtgcgtcctgcaacaactctgttggctgatgggtgtccatatttgtatgctatggcgcatgatagttcagtgtctacaataccaggtgattttgtcatcggtgttaagt

SEQ ID NO: 129850 - DNA, 249 bp, Glycine max
atcaccattactgatggtattgacaaaactagtgcaactttgcaatttagaaagttagcagattgtgattttctcaagagaaactttaagcagatgtctaatgttttgtgggtggctcctgaggataaggcgagtttatggtcacaacttcattatgtttcgtgtaataatctggaaatgcaagaagctttacctgtcaatctcgtaaatgtgttacgagaattgtatttgcacagtccagaggaagct

SEQ ID NO: 129851 - DNA, 248 bp, Glycine max
aaaggacacacctgctgttggcttgttgttcaaggatggcaatttgtaagaaagatgtttggagagttgaatgtggaatcccttctggatttccgctcacagttatttgcaatagcatttttaatgagatgctcattagatatagctatgaaaaattactgcgccaggctaaagctccaagtatgtttttacaatctttcaaaaattttgtttctttgtgtgtgtatggtgatgataacttaattagt

SEQ ID NO: 129852 - DNA, 254 bp, Glycine max
tactcgagccgattcggctcgagagctatgaaaaattactgcgccacgctaaagctccaagtactgtttttacaatccttcaacaattttgtttctttgtgtgtgtatggtgatgataacttaattagtgttcatgaatatgtcaagccttactttagtggttctaaattgaaaagctttctagctggtcataatatcaccattactgatggtattgacaaaactagtgcaactttgcaatttagaaagttagc

SEQ ID NO: 129853 - DNA, 252 bp, Glycine max
ctcgagccggttaagttgacaaccataaacaatatgtgtgcatatgggctcaatcctggtatttcaggttctcgtcttttgggcaccattcctcagtctatttcacagcaaactgtttggaatcaaatggcaacagtgagaacaccattgaatttcgattctagcaagcagagcttttgtcaattttctattgaccttctcggtggaggaattttagtggacaaaactggagattggatcacactatacaaa

SEQ ID NO: 129854 - DNA, 253 bp, Glycine max
tctggatttccgctcacagttatttgcaatagcatttttaatgagatgctcattagatatagctatgaaaaattactgcgccaggctaaagctccaagtatgtttttacaatccttcaaaaattttgtttctttgtgtgtgtatggtgatgataacttaattagtgttcatgaatatgtcaagccttactttagtggttctaaattgaaaagctttctagctggtcataatatcaccattactgatggtattg

SEQ ID NO: 129855 - DNA, 249 bp, Glycine max
actggatctaccttgtgacaaaattcctagtgtcttgactacaactgatgaaagattggtaggcacagaacatgagggatatgatccttttcttggtggaattcaaaaatatgccactcccatgatgcccctagatgaagaaattctttctaaggttgcacaagatatggttgaggaatggtttgattgtgttgatgaggaggattcttatgaggaagtttctttgagtgcagcactcaatggtgttga

SEQ ID NO: 129856 - DNA, 248 bp, Glycine max
gtcagagtgagaaagagagagagagagagagaaactgagagaaattcgcaaaccctaatttcggaaagatcggcgatggctgcctccaaggatcgcgagaacttcgtctacatcgccaagctcgccgaacaggccgagcgatacgaagagatggtggaatcaatgaagaacgttgcgaatctcgacgttgaactgactgtggaggagcggaatttactttctgttgggtacaagaatgtgattggtgc

SEQ ID NO: 129857 - DNA, 247 bp, Glycine max
atacaggcatagcattggcctgtgctatgaatagttcttttagggggcgtgccagttctgatatttacaccatctgctctcaagactgtgaattatggaatcctgcttgcacaaaagcaatgaccatgtcatttaatccaaacccgtgttctgatgcatggagtttggaatttctgaagcgtaccggatttcattgtgatatcatttgtgtcactggatggactgctaccccaatgcaggatgttca

SEQ ID NO: 129858 - DNA, 244 bp, Glycine max
cgcaagtcctgactgcaacatagttggtgcaatgcttttggttgatacttatcataccaatcctgaaaatgcagttcgtagtatttttgttgcgcctttcagaggcggaaggcccattcgggtggttacatttccgaataccatcgtgcatattgaaccagacatgaattcaaggtttcagcttttgagtaccactaccaatggtgattttgttcaaggaaaagatctcgctatggttaaagtt

SEQ ID NO: 129859 - DNA, 247 bp, Glycine max
gtacagtctctttcttcatagcatttggaaatttggctgatgacaccatcaattttgaggcttttccccacaagctggtgcagtttggagagattcaggaaaaagttgtattgaaattttcacaagaggaatttcttacagcttggtcaactcaggtgcgtcctgcaacaactctgttggctgatgggtgtccatatttgtatgctatggtgcatgatagttcagtgtctacaataccaggtgattt

SEQ ID NO: 129860 - DNA, 247 bp, Glycine max
actgtgatatcatttgtgtcactggatggactgccaccccaatgcaggatgttcaggttacaattgattggtttatttcctctcaggaatgtgttcccaggacttattgtgttttaaatccacaaaatccttttgtgttaaataggtggatggggaaactgactttcccccagggcacttcccgaaatgttaagagaatgcctctttctatagggggaggagctggtgcaaagaatgctattctcat

SEQ ID NO: 129861 - DNA, 121 bp, Glycine max
ggttgccgcaccttaaaaccggaaacaaaagcaatcgttacttgatttcaagaatctctcaatttcttcctacttctttgtgcactatttcttaagggaaagaaaatcactctctgtgctg

SEQ ID NO: 129862 - DNA, 248 bp, Glycine max
ttcacaaactagtaatattattcttcgaatccattttattattcataatgggtattttcacatttgaggatgaaaccacctcccctgtggctcctgctaccctttacaaagctctagttacagatgccgacaacgtcatcccaaaggctgtcgaagccttcaggagtgttgaaaaccttgaggggaacggtggccctggaaccatcaagaagatcactttcgttgaggatggagaaagcaagtttgtg

SEQ ID NO: 129863 - DNA, 249 bp, Glycine max
tgtacttgaggctatttggccatatagtggtcactatcaccctacagaagagaactttaaagaattcataagctttcttgacgagcacaatgtggatctttctaatgtcaagaaatgtgccatagatgacgatgctccttcaattgttgggtccaattcatttattgacattaatgaatcacaacaaattaataagggtcctactctttctacttccaattatgtcaacaacaatagtgtcactattaa

SEQ ID NO: 129864 - DNA, 249 bp, Glycine max
tgcggcgtgtggtctttctctccgtgacacagcacaaacaaattctcagtgttggagacttgagctcatagagaaatcatagtttgtttaatttcaattctgagcaaaggtcaacatgcaagttttttccattgaaggcgaaagtgctttgtcagttgttggtccaaggccaatggaatggtctactgttccatacaatgcccctcaagctcctgggccaaatggaaagcagcggacctcaagtttgga

SEQ ID NO: 129865 - DNA, 251 bp, Glycine max
tgctgctctcaactttggccagtacccttatggtggctatgtgcctaatcgtccaccactgatgagaaggttaataccagaagagggtgatccagaatatgcaagtttccatgctgaccctcagaagtattttctgaatgcattgcctagcttgctgcaagccacaaagttcatggctgtggttgacacactctccactcactcacctgatgaggagtacttgggggagaggcaacaaccttcaatttggt

SEQ ID NO: 129866 - DNA, 251 bp, Glycine max
atttaatttgtagataggagctccacccgaagtggtggcgcgtatggctgcggctaagcaagagtttgaggcacggcaaagatcttcagttggttcaagggaaacttcaaaagaccctgaacttgaccaattcatggaagcatactatgacatgcttgtgaagtatagagaggaattaacaaggcctattcaagaggctatggatttcatgcgaaggatagaaactcagctaaatatgctttgcaatggac

SEQ ID NO: 129867 - DNA, 252 bp, Glycine max
aaatggcaacagtgagaacaccattgaattttgattctagcaagcagagcttttgtcaattttctattgaccttctcggtggaggaattttagtggacaaaactggagattggatcacacttatacaaaattctccaatgtctaacttgttgagagttgctgcttggaagaaaggctgtttaatggttaaaattgtgatgtctgggaatgcagcagtcaaaaggagtgattgggcctcattggtacaagtgt

SEQ ID NO: 129868 - DNA, 246 bp, Glycine max
caaaaggagtgattgggcctcattggtacaagtgtttttaacaaacagcaacagtacagagcattttgatgcatgtaagtggacaaaatcggaaccacattcctgggaattgatcttcccaatagaggtatgtggtcctaataatggttttgaaatgtggagttctgagtgggcaaatcaaacttcatggcatttgagtttccttattgacaatcccaaacagtctacagtttttgatattctctt

SEQ ID NO: 129869 - DNA, 244 bp, Glycine max
ctcgagccgcaaaagcacaatttgttagtggaaaaaccttcaaatatgatatagttggtgctggttcacattcttcagaagatttttctgaaaaggaagatcaagaaaaacccaaaaagattgatgccagattgagacaaagaatagatcctcaatacaatgaggttcaggctcagatggaaacaaatttgtttaaattgtctcttgatgatgttgaaactcctaaaggttccatgttggatct

SEQ ID NO: 129870 - DNA, 244 bp, Glycine max
cagaggagtatgcagggacatcctggcatgagctgaattatatacgacaagccatcgggttcttggtaatacatcaaaagaggaagaaatctttggaagagattcggcaagatctttgtccggtattgactgtgaggcaaatctatcgaatcagcacaatgtactgggatgacaagtatggaacccagagtgtgtccaatgaggtagttagtgaaatgagagaaattgtcagcaaggacaatca

SEQ ID NO: 129871 - DNA, 242 bp, Glycine max
aaacaatatgtgtgcatatgggctcaatcctggtatttcaggttctcgtcttttgggcaccattcctcagtctatttcacagcaaactgtttggaatcaaatggcaacagtgagaacaccattgaattttgattctagcaagcagagcttttgtcaattttctattgaccttctcggtggaggaattttagtggacaaaactggagattggatcacacttatacaaaattctccaattagta

SEQ ID NO: 129872 - DNA, 145 bp, Glycine max
ccggaaacaaaagcaatcgttacttgatttcaagaatctctcaatttcttcctacttctttgtgtacgatttcttaagggaaagaaaatcactctctgtgctggccacagacttcgtgaatcattttcttttccacacaacatac

SEQ ID NO: 129873 - DNA, 247 bp, Glycine max
ggaaatttggctgatgacaccatcaattttgaggcttttccccacaagctggtgcagtttggagagattcaggaaaaagttgtgttgaaattttcacaagaggaatttcttacagcttggtcaactcaggtgcgtcctgcaacaactctgttggctgatgggtgtccatatttgtatgctatggtgcatgatagttcagtgtctacaataccaggtgattttgtcattggtgttaagttggcaacta

SEQ ID NO: 129874 - DNA, 247 bp, Glycine max
gaaaaattaaaccaaccatactacaccagacactcctcctaaccttcaataattctcttctcacccttataaaaagaaactcattttaactcagactttgcatttcaccttatctatctatcttttctaacatggctgctgggactggactctttgcagagattttggatggagatgtgtacaagtactatgctgatggagaatggaagaaatctgcttctgggaaaagtgttgccatcatcaaccc

SEQ ID NO: 129875 - DNA, 248 bp, Glycine max
cttactcttgttctcaagggattcgattttctctgcactcacttatagggtttcctccgcgctatcagcaatcatggccgacgaaacaccaaatgagatgaaggaggaggttccagaaattgttccttttgatcctaccaagaagaagaagaagaagaagattacaattgtagatcctgctgatgaccctgtggagaaattggctgagaagacagaaaacctctcagtttctgagggggttgagactg

SEQ ID NO: 129876 - DNA, 250 bp, Glycine max
  unsure (1)..(250): unsure at all n locations
aaaacaggcaatgacaagcagagttgtgagcctttggtatcgccctcctgagctgcttcttggggctactgtttatggtgttggtattgacctttggagtgctggttgcatcttggcagagctgcttgctggaaagccactaatgcctggccgaacagaggttgaacaactgcacaacatatttaagtcccccngntctccatctgaggaatactggaggaagtatagattgccaaatgctactatcttt

SEQ ID NO: 129877 - DNA, 242 bp, Glycine max
cagaaatgataaacagtctttgtggtggtgatgaaaaattgatgcgtgaaaggacacacctgctgttggcttgttgttcaaggatggcaatttgtaagaaagatgtttggagagttgaatgtggaatcccttctggatttccgctcacagttatttgcaatagcatttttaatgagatgctcattagatatagctatgaaaaattactgcgccaggctaaagctccaagtatgtttttacaa

SEQ ID NO: 129878 - DNA, 244 bp, Glycine max
cctcgagccgattcggctcgagcaaaaacacagttggaggaaccatactgcgtagtgatctattggcaaattttttgacagacggcaattttagagcaagtgttgatttgcagcgcactcatcgtattaaaggaatgattaaaatggtggccacagttggtattcctgagaatacaggtatagcattggcctgtgctatgaatagttcttttagggggcgtgccagttctgatatttacaccat

SEQ ID NO: 129879 - DNA, 241 bp, Glycine max
cacgcggctggccccgaccgcgtacgccgcgctccggtcggcatttcggcagggtatggagaactaccccattgccaacgaggaacgcctatttgacacgtgttatgatttcagtgggtataaggagatttcagttccgaagatagattttgaatttgccggtggcgtcacggtggagttgccattggtggggatattctatgtggtaagtgcgcaacaagtgtgtttggcttttgctgca

SEQ ID NO: 129880 - DNA, 244 bp, Glycine max
caaaatccttttgtgttgaataggtggatggggaaactgactttcccccagggcacttcccgaagtgttaagagaatgcctctttctatagggggaggagctggtgcaaagaatgctattctcatgaatatgccaaatgctgttctttcaatgtggagatattttgttggagatctcgtctttgaagtttctaagatgacttctccctacattaaatgtacagtctctttcttcatagcatttg

SEQ ID NO: 129881 - DNA, 245 bp, Glycine max
ctcgagccgctcgagccgagaaacttaatcgatcatcacttcacttcactaatacatcatggcagacgagacccagaacaagtatgagagctctgaggttgaggtccaggatcgtggtgtttttgactttctcggtaagaaaaaggatgaagaagacaagcctcatcctcaggaggaggtcatcgccaccgagtttcaaaaagtcactgtctcagaccaaggagagaacaagcacagcctcttag

SEQ ID NO: 129882 - DNA, 245 bp, Glycine max
gttgctggaagcaaaggaagactgggatatgcttcattgataccatacgttgagccagttgtgcaagctcaaagtgctgaagtttactttgacttcttccctgtggaggttgatagtcaagagggagttgctcacattggtgaattgaaatctggtgtctatgttccactgcctacaaaaactaatttggtggaaactcccaaggaatggcaactggatctaccttgtgacaaaattcctagtgt

SEQ ID NO: 129883 - DNA, 243 bp, Glycine max
cagcgatcgaagtttcacatcagccttatccagtttagggtttcggttccttaccctacctttgacgtatcgaaaccttaaatttgggattaggtctgagcaatctggttggtagaacctttggtcttagagagtcaagttttatgtctggattagacgatcaaattcctactgccttcgatccttttgctgatgcaaatgctgatgactcgggtgctgggtcaaaggagtatgtgcatattc

SEQ ID NO: 129884 - DNA, 245 bp, Glycine max
tggaaatgcaagaagcttatcttgtcaatctcgtaaatgtgttacgagaattgtatttgcacagtccagaggaagctcgccaattgagaaggaaagctctctctcgtattgaatggctgcaaaaagctgatgtgcctaccatagcacagattgaagagttccattcgatgcagaggatgatgaatgctcctgattcaaatgataatatcgatctactgttgagcattgatttgttgggtttacaa

SEQ ID NO: 129885 - DNA, 249 bp, Glycine max
aaaaaacaaagagagagagagagagaaaatgatgaagccatcgatgctcagatctctccactccgccgccacccgcggcgcctctcatctcttccgccgtgggtacgcctccgagccggtgccggagcgcaaggtagccgttctcggcgccgccggctgggatcgggcagcctctctcccttctcatgaagctcaatcccctcgtttcgagcctctccctttacgatatcgccggaactcccggcgtcg

SEQ ID NO: 129886 - DNA, 246 bp, Glycine max
  unsure (1)..(246): unsure at all n locations
ctgactttcccccagggcacttcccgaagtgttaaaagaatgcctctttctatagggggaggagctggtgcaaagaatgctattctcatgaatatgccaaatgctgttctttcaatgtggagatattttgttggagatctcgtctttgaagtttctaagatgacttctccctacattaaatgtacagtctctttcttcatagnctttggaaatttggctgatgacaccatcaattttgaggctttt

SEQ ID NO: 129887 - DNA, 250 bp, Glycine max
gaaaaattgatgcgtgaaaggacacacctgctgttggcttgttgttcaaggatggcaatttgtaagaaagatgtttggagagttgaatgtggaatcccttctggatttccgctcacagttatttgcaatagcatttttaatgagatgctcattagatatagctatgaaaaattactgcgccaggctaaagctccaagtatgtttttacaatccttcaaaaattttgtttctttgtgtgtgtatggtgatg

SEQ ID NO: 129888 - DNA, 267 bp, Glycine max
gtctaacacaggtatgccaggagtgactgcatatgcaggtctatttgaagtaggatctcttcagaaaggagaaaatgtttttgtttcggctgcctctggcgcagttggtcaacttgttgggcaatttgctaaactgaatggttgttatgtagttggaagtgctggatctaaagagaaggtggatctgctgacaaataaatttggatttgatggaggttttaactacaaggaagagcctgaccttgatgcagctttgaaaaggtctat

SEQ ID NO: 129889 - DNA, 267 bp, Glycine max
ctcgagccgattcggctgagattcaggaaaaagttgtattgaacttttcacaagaggaatttcttacagcttggtcaactcaggtgcgtcctgcaacaactctgttggctgatgggtgtccatatttgtatgctatggtgcatgatagttcagtgtctacaataccaggtgattttgtcattggtgttaagttgacaaccataaacaatatgtgtgcatatgggctcaatcctggtatttcaggttctcgtcttttgggcaccattc

SEQ ID NO: 129890 - DNA, 268 bp, Glycine max
cttcacctcgtcctccgtctccgtggtggcatgcagatcttcgttaagaccctcaccggcaagactattaccctagaagtcgaaagctccgacaccatcgacaacgtcaaggctaagattcaggacaaggagggaatccccccagaccagcagaggctgatcttcgccgggaagcagctcgaggacggacgcacccttgctgactacaacatccagaaggagtcaactctccacttggtgttgcgtcttcgtggtggtatgcagattt

SEQ ID NO: 129891 - DNA, 282 bp, Glycine max
cggaatcggctcgaactcgagcgtttttgacaaacctaagacgcgctgcttcactattctccctatggagtttactcttgtggttcgtcagaagtttttaaattttgtgaggttcattatgaagaaaagggacaagcttagttgtcaagttggaatcaacccatactccatggaatggactggtttggccaatagattactgagtaagggcaacgatattctgtgttgcgattatgctagttttgatggtttgattaccaagcaagttatgagcaagatggc

SEQ ID NO: 129892 - DNA, 267 bp, Glycine max
aggaaactgactttcccccagggcacttcccgaagtgttaagagaatgcctctttctatagggggaggagctggtgcaaagaatgctattctcatgaatatgccaaatgctgttctttcaatgtggagatattttgttggagatctcgtctttgaagtttctaagatgacttctccctacattaaatgtacagtctctttcttcatagcatttggaaatttggctgatgacaccatcaattttgaggcttttccccacaagctggtg

SEQ ID NO: 129893 - DNA, 272 bp, Glycine max
cactctcccaccccacttacatacacactctcccactcctccgagccggtcgagttgaatcggtgagtcagtgaccgagttgaaccatgtcggacgaagagcaccatttcgaatccaaggccgatgccggagcctccaagacctatcctcagcaggccggaaccatccgcaaaaacggctacatcgtcatcaagggtcgtccctgcaaggttgttgaagtttctacttccaagactggtaagcacggccatgctaagtgtcactttgttggg

SEQ ID NO: 129894 - DNA, 265 bp, Glycine max
caccattactgatggtattgacaaaactagtgcaactttgcaatttagaaagttagcagattgtgattttctcaagagaaactttaagcagatgtctaatgttttgtgggtggctcctgaggataaggcgagtttatggtcacaacttcattatgtttcgtgtaataatctggaaatgcaagaagcttatcttgtcaatctcgtaaatgtgttacgagaattgtatttgcacagtccagaggaagctcgccaattgagaaggaaa

SEQ ID NO: 129895 - DNA, 264 bp, Glycine max
atttcaaccctatctctgctctctttttcttcatcatttgtttttgggtctctctgtttccaagtttttgagttatggcatcgatacgcatcgtgaaggagctcaaggatttgcagaaggaccctcctacatcctgcagcgcaggtcccgtggcggaggatatgtttcactggcaggcaacaatcatgggacctcctgatagcccatatacaggttgcatttaggactaaggtattccacccaaacatcaatagtaatggaagt

SEQ ID NO: 129896 - DNA, 197 bp, Glycine max
taagatttgaaattttgataaaccgcgatcacaggttgccgcaccttaaaaccggaaacaaaagcaatcgttacttgatttcaagaatctctcaatttcttcctacttctttgtgtacgatttcttaagggaaagacaatcactctctgtgctggccacagacttcgtgaatcattttcttttccacacaacatacg

SEQ ID NO: 129897 - DNA, 269 bp, Glycine max
actcaccctcattaccaacacgaaagcatagccaaaaccttttttcgaagtctctgattttcctaatggctccggcaaaggcagagaagaagccggcggagaagaagccagcggcggagaaggcaccggcggagaagaagccgaagggaatgaagaagatctcgaaggaaggagggagcgagaagaagaagaagcgcacgaagaagagcgtggagacctacaagatctacatcttcaaggtcctcaagcaggttcaccccgacattggt

SEQ ID NO: 129898 - DNA, 271 bp, Glycine max
cgctacttgttaagggctgcactataccagaatgtctcagggaagaggcagtgcatctttgcctattgtggtcactgtggtttcactactgtgccttttggaacgtgctaacgcagcaacttactccgttggaggacctgggggatggaccttcaacactaatgcttggcccaatggaaaaagattcagagctggtgatatcctaatcttcaactatgactcaacgacccacaatgtggttgctgtggacagaagtggatacaacagctgc

SEQ ID NO: 129899 - DNA, 163 bp, Glycine max
caggttgccgcaccttaaaaccggaaacaaaagcaatcgttacttgatttcaagaatctctcaatttcttcctacttctttgtgtacgatttcttaagggaaagaaaatcactctctgtgctggccacagacttcgtgaatcattttcttttccacacaacat

SEQ ID NO: 129900 - DNA, 262 bp, Glycine max
atttactcaaaacttggtttcatgatcattatgttgtagaccaaacttttgaatcttatgctgatcttttggcatattgcttcactaaatgggagagacatgtgaaggaacaagagtctaatttgtctcaaattaaaggcaagaaaagtgagagtggccatttcaataattttcaacaacttatggatttggcagtttcatggaatctcagtgcaaatatcatgaaggaacgaatcaaagctgataaaagtgatatggttta

SEQ ID NO: 129901 - DNA, 261 bp, Glycine max
gaaaggggtgtctggatttttgttggatttcctgatgggcggagtgtcggcggctgtgtccaagacagctgcggctccaatcgaacgagttaagttgctcatccaaaaccaggatgaaatgatcaagagtggtcggttgtctgaaccatacaaaggaattggcgattgtttcactcgaaccatgaaggatgaaggggtgattgctctttggagaggaaacactgctaatgttatcagatacttccctactcaggctctgaa

SEQ ID NO: 129902 - DNA, 259 bp, Glycine max
tttgtcataacaaagtctcctttcttggggaacctaaaagctatgagagagtctgaagtgctttacaccattgaagccattatagcctaccctgaaaatgaaagctcgtggagatatctacgaggactttataaaggtgaaactacttcatgggtaaatgatcctcaagtttcttcagtatgcttaaagattttgagaactaagagcaactacgtgtttgctcttagcactattttagatcttacatgctttggttatc

SEQ ID NO: 129903 - DNA, 263 bp, Glycine max
ctcgagccgctcaaagattaagccatgcatgtgtaagtatgaactaattcagactgtgaaactgcgaatggctcattaaatcagttatagtttgtttgatggtatctactactcggataaccgtagtaattctagagctaatgcgtgcaacaaaccccgacttctggaagggatgcatttattagataaaaggtcaacacaggctctgcctgttgctttgatgattcatgataactcgtcggatcgcacggcctttgtgccgg

SEQ ID NO: 129904 - DNA, 261 bp, Glycine max
gtttgataaaatattgtacacataaatctagctccaattcctaatcacctggttaatttcttcacatagagctatccagatccaacgttaacatgaagaatgttttagtcaggtcagctgcgcgagctctgcttggcggcggtgggcggagctactaccgccagctctcaacggcggcgatcgtggaacagagacaccagcacggtggcggcgcgtttggaagcttccacttgcggaggatgtccactcttccagaggtaa

SEQ ID NO: 129905 - DNA, 240 bp, Glycine max
cggctcgagttctcatttcttcatcgttcgattcttctcctcctaaagatgcagatcttcgtgacaactttgaccggtaagaccatcacccttgaggtggagtcctccgacaccatcgataacgtgaaagctaagattcaagacaaggaagggatcccacctgaccagcagagacttatctttgcgggtaaacagcttgaggatggtcgaacccttgccggatacaaatcaaaaagggat

SEQ ID NO: 129906 - DNA, 259 bp, Glycine max
gaaaaacccaaaaagattgataccagattgagacaaagaatagatcctcaatacaatgaggttcaggctcagatggaaacaaatttgtttaaattgtctcttgatgatgttgaaactcctaaaggttccatgttggatcttaaaatttctcaatctaaaattgcacttcccaaaaacacagttggaggaaccattctgcgtagtgatctattggcaaattttttgacagagggcaattttagagcaagtgttgatttgc

SEQ ID NO: 129907 - DNA, 260 bp, Glycine max
cttacaacaagctaatagttgaacttgagaaaagtgttcctacatatggttggcattgaatgtcccaaggatgagaaacttcctcgtcgcaaaatttttgacaaacctaagacgcgctgcttcactattctccctatggagtttaatcttgtggtccgtcaaaagtttttaaattttgtgaggttcattatgaagaaaagggacaagcttagttgtcaagttggaatcaacccatactccatggaatggactggtttggc

SEQ ID NO: 129908 - DNA, 250 bp, Glycine max
atttccgaataccatcgtgcagattgaaccagacatgaattcaaggtttcagcttttgagtaccagtaccaatggtgattttgttcaaggaaaagatctcgcaatggttaaagttaatgtagcatgtgctgctgttggcttgacatcaagttacactccaactccattgttggaatctggtttgcaaaaagacggagggttaattgtggagtatcttggaaggatgtcttacgttgctcacaacgttaat

SEQ ID NO: 129909 - DNA, 262 bp, Glycine max
agaagcttatcttgtcaatctcgtaaatgtgttacgagaattgtatttgcacagtccagaggaagctcgccaattgagaaggaaagctctctctcgtattgaatggctgcaaaaagctgatgtgcctaccatagcacagattgaagagttccattcgatgcagaggatgatgaatgctcctgattcaaatgataatatcgatctcctgttgagcattgatttgttgggtttacaaggagcaggtaaagcttttccagacaag

SEQ ID NO: 129910 - DNA, 258 bp, Glycine max
gcagcagtcaaaaggagtgattgggcctcattggtacaagtgtttttaacaaacagcaacagtacagagcatttcgatgcatgtaagtggacaaaatcggaaccacattcctgggaattgatcttcccaatagaggtatgtggtcctaataatggttttgaaatgtggagttctgagtgggcaaatcaaacttcatggcacttgagtttccttattgacaatcccaaacagtctacagtttttgatattctcttggga

SEQ ID NO: 129911 - DNA, 239 bp, Glycine max
tagggtatagcactttaccttagtgtcattggggctggaagttttcttagtagtttattaataacaattgtggatcatgtcactggtaagattgggaagagttggattggtaaggatttgaatagtagccgcttggacaaattttactggcttcttgcagccatcaccacattgaacttgttcatgtatgtgatctttgctcgcaagtataactacaagaatgtgccaaaaggtggcac

SEQ ID NO: 129912 - DNA, 256 bp, Glycine max
agaagcttatcttgtcaatctcgtaaatgtgttacgagaattgtatttgcacagtccagaggaagctcgccaattgagaaggaaagctctctctcgtattgaatggctgcaaaaagcagatgtgcctaccatagcacagattgaagagttccattcgatgcagaggatgatgaatgctcctgattcaaatgataatatcgatctactgttgagcattgatttgttgggtttacaaggagcaggtaaagcttttcca

SEQ ID NO: 129913 - DNA, 253 bp, Glycine max
cacttatacaaaattctccaattagtaacttgttgagagttgctgcttggaagaaaggctgtttaatggttaagattgtgatgtctgggaatgcagcagtcaaaaggagtgattgggcctcattggtacaagtgtttttaacaaacagcaacagtacagagcattttgatgcatgtaagtggacaaaatcggaaccacattcctgggaattgatcttcccaatagaggtatgtggtcctaataatggttttga

SEQ ID NO: 129914 - DNA, 259 bp, Glycine max
cgctccgcaccagtttcaccgcacgaatatcttgttgtttggagcgatccgagaaaaactctgtaaacatgttggtttaccaggacctccttacaggtgatgagcttctctctgactccttccgttacaaggaaattgagaatggaatgctgtgggaagttgaggggaagtgggttgttaaaggagcagttgatgtagacattggtgcaaacccttctgctgagggtggaggagaagatgagggagttgatgatgcagc

SEQ ID NO: 129915 - DNA, 251 bp, Glycine max
ctccttctttacttagttcaactcaacccaaggaggtaattaatatggctctgggaagaggcagtgcagtggttctactactttgcttcttggtgcttcagtctgagatggctcgtgctgccacttatagagttggagattctaggggttggacctttaacaccgttacctggccccaaggaaaacgctttagggcaggtgacacacttgcgttcaattatagtcctggggctcacaatgtggtggcggtg

SEQ ID NO: 129916 - DNA, 250 bp, Glycine max
aaaggcgaaagactttaggtttggaattgggaattagggttgttcgcgtcacgaagatgatagaggtggtgttgaacgatcgattggggaagaaggtgcgcgtgaagtgcaacgacgatgacaccatcggcgacctgaagaagctggtggcggctcagacgggcacaagagccgacaagatccgcatccagaagtggtacaccatatacaaggatcacatcactctcaaggattacgagatccacgacgg

SEQ ID NO: 129917 - DNA, 250 bp, Glycine max
attttgttggagatctcgtctttgaagtttctaagatgacttctccctacattaaatgtacagtctctttcttcatagcatttggaaatttggctgatgacaccatcaattttgaggcttttccccacaagctggtgcagtttggagagattcaggaaaaagttgtattgaaattttcacaagaggaatttcttacagcttggtcaactcaggtgcgtcctgcaacaactctgttggctgatgggtgtcc

SEQ ID NO: 129918 - DNA, 252 bp, Glycine max
cgaatttctgcattttccttcttccatcggcgcggcacactcagacacacacatttcgtcggaatgggaagggtgattcgcgcacagcgtaagggtgcggggtcggtgttcaagtcccacacccaccaccgcaacggtccggcgaggttccgcagcctcgacttcggcgagcgcaacggctacctcaaaggggtcgtcaccgatatcatccacgaccctggtcgcggtgctcctctagccaaggtggcgttc

SEQ ID NO: 129919 - DNA, 247 bp, Glycine max
agttgtcaagttggaatcgacccatactccatggaatggactggtttggccaatagattactgagtaagggcaacgatattctgtgttgcgattatgctagttttgatggtttgattaccaagcaagttatgagcaagatggcagaaatgataaacagtctttgtggtggtgatgaaaaattgatgcgtgaaaggacacacctgctgttggcttgttgttcaagaatggcaatttgtaagaaagatg

SEQ ID NO: 129920 - DNA, 242 bp, Glycine max
  unsure (1)..(242): unsure at all n locations
ctggtgcaaagaatgctattctcatgaatatgccaaatgctgttctttcaatgtggagatattttgttggagatctcgtctttgaagtttctaagatgacttctccctacattaaatgtacagtctctttcttcatagcatttggaaatttggctgatgacaccatcaattttgaggcttttccccacaagctagtatccctgtngagagattcaggaaaaagttgtattgaagttttcaca

SEQ ID NO: 129921 - DNA, 259 bp, Glycine max
actgaccctaagaggaatgctagagattcccatgttccggttttggctccacttcccattggatttgctgtgttcatggttcacttggccaccatcccagtcactggtcctggtatcaaccctgctaggagtcttggagctgctgttatctacaaccaagataagccatgggatgaccattggatcttttgggtaggaccatttattggggcagccattgcagccttctaccaccagttcatcttgagagcaggtgcag

SEQ ID NO: 129922 - DNA, 248 bp, Glycine max
gtctaacacaggtatgccaggagtgactgcatatgcaggtctatttgaagtaggatctcttcagaaaggagaaaatgtttttgtttcggctgcctctggcgcagttggtcaacttgttgggcaatttgctaaactgaatggttgttatgtagttggaagtgctggatctaaagagaaggtggatctgctgacaaataaatttggatttgatggaggttttaactacaaggaagagcctgaccttgatg

SEQ ID NO: 129923 - DNA, 244 bp, Glycine max
cacaattccaaatgattgtggttcgttggttgttgccaaggttggaaatcacaaacaaattgttggtttccatgttgctggaagcagaggaagactgggatatgcttcattgataccatatgttgagcccgttgtgcaagctcaaagtgctgaagtttactttgacttcttccctgtggaggttgatagtcaagagggagttgctcacattggtgaattgaaatctggtgtctatgttccactg

SEQ ID NO: 129924 - DNA, 247 bp, Glycine max
gcaagttatgagcaagatggcagaaatggtaaacagtctttgtggtggtgatgaaaaattgatgcgtgaaaggacacacctgctgttggcttgttgttcaaggatggcaatttgtaagaaagatgtttggagagttgaatgtggaatcccttctggatttccgctcacggttgtttgcgatagcatttttaatgagatgctcattagatatagctatgaaaaattactgcgccaggctaaagctcca

SEQ ID NO: 129925 - DNA, 258 bp, Glycine max
actcaccctcattaccaacacgaaagcatagccaaaaccttttttcgaagtctctgattttcgctaatggctccggcaaaggcagagaagaagccggcggagaagaagccagcggcggagaaggcaccggcggagaagaagccgaagggtacgaagaagatctcgaaggaaggagggagcgagaagaagaagaagcgcacgaagaagagcgtggagacctacaagatctacatcttcaaggtcctcaagcaggttcac

SEQ ID NO: 129926 - DNA, 266 bp, Glycine max
aagttagctgattgtgattttctcaagagaaactttaggcagatgtctaatgttttgtgggtggctcctgaggacaaggcgagtttatggtcacaacttcattatgtttcatgtaataatctggaaatgcaagaagcttatcttgtcaatctcgtaaatgtgttacgagaattgtatttgcacagtccagaggaagctcgccaattgagaaggaaagctctctctcgtattgaatggctgcaaaaagctgatgtgcctaccatagc

SEQ ID NO: 129927 - DNA, 247 bp, Glycine max
ggctgatgacaccatcaattttgaggcttttccccacaagctggtgcagtttggagagattcaggaaaaagttgtattgaaattttcacaagaggaatttcttacagcttggtcaactcaggtgcgtcctgcaacaactctgttggctgatgggtgtccatatttgtatgctatggtgcatgatagttcagtgtctccaataccaggtgattttgtcattggtgttaagttgacaaccataaacaat

SEQ ID NO: 129928 - DNA, 244 bp, Glycine max
  unsure (1)..(244): unsure at all n locations
atattccccaagggcaagggagcagttaacaccttgggggtcaagttctacaacgatctcattaatgagattatagcaaatggcttaaagccatttgtcacgctgcttcattgggacctcccacaagctcttgaagatgaatatgggggatttctcaaacctgaaatagtggaggacttccgtaactatgctgacttttgcttcaagccactgcgcgatcgggtgnagcactgggtaaccctaa

SEQ ID NO: 129929 - DNA, 245 bp, Glycine max
agaagatattacaattgaaggattcaatatcccacgagacacaattgtgatcattaatggttggggcatgcagagagatcctcagttgtggaatgatgccacatgctttaaacctgagaggtttgatgtggaaggagaggagaaaaagttggtagcatttggcatgggaagaagggcttgcccaggagaacccatggctatgcaaagtgtcagctttactttgggattgtcgattcaatgttttg

SEQ ID NO: 129930 - DNA, 245 bp, Glycine max
agtgtctacaataccaggtgattttgtcattggtgttaagttgacaaccataaacaatatgtgtgcatatgggctcaatcctggtatttcaggttctcgtcttttgggcaccattcctcagtccatttcacagcaaactgtttggaatcaaatggcaacagtgagaacaccattgaattttgattctagcaagcagagcttttgtcaattttctattgaccttctcggtggaggaattttagtgg

SEQ ID NO: 129931 - DNA, 235 bp, Glycine max
tggtggccacagttggtattcctgagaatacaggtatagcattggcctgtgctatgaatagttcttttagggggcgtgccagttctgatatttacaccatctgctctcaagactgtgaattatggaatcctgcttgcacaaaagcaatgactatgtcatttaatccaaacccgtgttctgatgcatggagtttggaatttctgaagcgtaccggatttcattgtgatatcattgt

SEQ ID NO: 129932 - DNA, 213 bp, Glycine max
attctctctgtgtatttccctacctctcccttcaagatgcagatcttcgtcaagaccctcaccggcaagaccatcacccttgaggtggaaagctctgacaccatcgacaacgtcaaggccaagatccaggacaaggaaggcatccccccggaccagcaacgtctcattttcgccggaaagcaacttgtggacggccgtacccttgctgactac

SEQ ID NO: 129933 - DNA, 243 bp, Glycine max
tcatgggcctgctatcttgttttaggtctaccgtcctgagaaaatgttccaaaggaagactctggcatgtcaagattcctgtatacgaacaattttcaacgaaacttgatttcgtctggtggcaatgaatcgtattatgggtattttaacaggagatcatacacttcactttatatgggaactggaactgtgggtgggattacaagtgctagaatcagggtgccaaatgtaggatgtgaagga

SEQ ID NO: 129934 - DNA, 235 bp, Glycine max
tcaagattcagcaagtgcgttttggaagcagagaccgaaatacttcgagatggcccgtacaaagcaaactgctcgtaagtcaactggaggaaaagctcccaggaagcagcttgcaaccaaggctgcacgtaagtctgcaccaacaactggtggtgtgaagaagcctcatcgttatcgccctggaactgttgactctcgtgatatgcatgaaataccagaagagcactgagctcct

SEQ ID NO: 129935 - DNA, 247 bp, Glycine max
gtcgttctgaacggaaaagcactggcgtcgtaccctgaggcttctcttctcttctcttctctgtcgtgagtcaccatggtgagggttagtgtgctgaacgatgctctgaagagcatgtacaatgctgagaaaaggggaaagcgccaagtcatgattaggccatcctccaaagtcattatcaaattccttttggtgatgcaaaagcacggatacatcggagagtttgagtatgttgatgaccacaggg

SEQ ID NO: 129936 - DNA, 244 bp, Glycine max
actgatggtattgacaaaactagtgcaactttgcaatttagaaagttagcagattgcgattttctcaagagaaactttaagcagatgtctaatgttttgtgggtggctcctgaggacaaggcgagtttatggtcacaacttcattatgtttcgtgtaataatctggaaatgcaagaagcttatcttgtcaatctcgtaaatgtgttacgagaattgtatttgcacagtccagaggaagctcgcc

SEQ ID NO: 129937 - DNA, 244 bp, Glycine max
aatagccataatgagtcacccaatccccagcactgatgattcccattcggtgcaaattattttaccacagaaacagttgggtcggaagtcagacatgtacctattttgttgttcatatactcacaatgttgctccaaagggaaaatttattgcatttgtatcaaccgaggcagagacagatcagccagcaattgaactaaaacctggaattgaccttctaggatctgttgatgagatatttttt

SEQ ID NO: 129938 - DNA, 266 bp, Glycine max
agtcagcacgcaattcgggtcgatggtgtgcatatttgtatgctatggtgcatgatagttcagtgtctacaataccaggtgattttgtcattggtgctaggtttggaaccataaacaatatgtgtgcatatgggctcaatcctggtatttcaggttctcgtcttttgggcaccattcctcagtccatttcacagcaaactgtttggaatcaaatggcaacagtgagaacaccattgaattttgattctagcaagcagagcttttgt

SEQ ID NO: 129939 - DNA, 242 bp, Glycine max
attttgattctagcaagcagagcttttgtcaattttctattgaccttctcggtggaggaattttagtggacaaaactggagattggatcacatgtatacaaaattctccaattagtaacttgttgagagttgctgcttggaagaaaggctgtttaatggttaaaattgtgatgtctgggaatgcagcagtcaaaaggagtgattgggcctcattggtacaagtgtttttaacaaacagcaac

SEQ ID NO: 129940 - DNA, 172 bp, Glycine max
gaaattttgataaaccgcgatcacaggttgccgcaccttaaaacctgaaacaaaagcaatcgttacttgatttcaagaatctctcaatttcttcctacttctttgtgtacggtttcttaagggatagataatcactctctgtgctggccacagacttcgtgaatcattttct

SEQ ID NO: 129941 - DNA, 253 bp, Glycine max
attcattccccttatctttctctcttctctctccccgcccaaacgctaactccctaccctattccgctttctctcatccatcatgaaaggaggaaagtccaagaccgaatctaagagagccgatgccaaacttgctgtgaataagccgcggcgccgccaccaagactaggaaacccgccggaaaggggaaggcagcgaaagatcctaacaagccaaagaggcctccaagtgctttcttcgttttcatggagga

SEQ ID NO: 129942 - DNA, 226 bp, Glycine max
cggctcgatgtttggtcagccattaaaaatgacaacagaatggctgcgtccctccttcggttgcactttcacgattgcatagtaaatggttgtgatgcttctgtgcttcttgatgataccccatatttcacgggcgaaaagaatgcttctcctaatcgcaattcacttcgggggatggaagtgattgataatataaaagaacaagttgaaaggccatgtccatcaa

SEQ ID NO: 129943 - DNA, 255 bp, Glycine max
ctcaagtctctcgaagcctctttctctctcttctagaagctatctgtgtttggtgttactaagtctccaacaagcaaagtacatggttgatttggaaatccaggtccccaccccattcgacccgtttgccgaggcgagagaatcggatgcccccggagcaaaggagtatgtgcatattcgaattcagcagaggaatgggaagaagagtctgaccacagtgcaagggctgaagaaggagttcagctacgagaagat

SEQ ID NO: 129944 - DNA, 254 bp, Glycine max
tggttggcattgaatgtcccaaggatgagatccttcctcgtcgcaaaatttttgacaaacctaagacgcgctgcttcactattctccctatggagtttaatcttgtggttcgtcagaagtttttaaattttgtgaggttcattatgaagaaaagggacaagcttagttgtcaagttggaatcaacccatactccatggaatggactggtttggccaatagattactgagtaagggcaacgatattctgtgttgc

SEQ ID NO: 129945 - DNA, 241 bp, Glycine max
cagaataatcagcatcgttgaaaagtggaaccgttcagaagaagctccccaggtagcttatacatttgatgcggggccaaatgctgttctaattgcacgcaacaggaaagctgctacctctttgattcagaggctgctttactacttccctccaaattcagatgacctcagcagttacattattggggcgcagtcaattgcaaaagatgctgggatcaatggaatacaggatgtagaagct

SEQ ID NO: 129946 - DNA, 96 bp, Glycine max
gccaaatgctgttctttcaatgtgcagatattttgttggagatctcgtctttgaagtttctaagatgacttctccctacattaaatgtacagtctc

SEQ ID NO: 129947 - DNA, 224 bp, Glycine max
gttacatttccgaataccattgtgcctattgaaccagacatgaattcaaggtttcagcttttgagtaccactaccaatggtgattttgttcaaggaaaagatctcgcaatggttacagttaatgtagcatgtgctgctgttggcttgacatcaagctatactccgactccattgttggaatctggtttggtataataccgagggttaattgtggagtattttgg

SEQ ID NO: 129948 - DNA, 213 bp, Glycine max
caggtgcgtcctgcaacaactctgttggctgatgggtgtccatatttgtatgctatggtgcatgatagttcagtgtctacaataccaggtgattttgtcattggtgttaagttgacaaccataaacaatatgtgtgcatatgtcctcaatcctggtatttcaggttctcgtcttttgggcaccattcctcagtctatttcacagcaaactgtt

SEQ ID NO: 129949 - DNA, 251 bp, Glycine max
  unsure (1)..(251): unsure at all n locations
agcagatgtctaatgttttgtgggtagctcctgatgataaggcgagtttatggtcacaacttcattatgtttcgtgttataatctggaaatgcaagaagnctatcttgtcaatctcgtaaatgtgttacgagaattgtatttgcacagtccagaggaagctcgccaattgagaaggaaagctctctctcgtattgacaggctgcaaaaagctgatgtgcctaccatagcacagtatgaagagttcattcga

SEQ ID NO: 129950 - DNA, 256 bp, Glycine max
cggctcgaggccacagttggtattcctgagaatacaggtatagcattggcctgtgctatgaatagttcttttagggggcgtgccagttctgatatttacaccatctgctctcaagactgtgaattatggaatcctgcttgcacaatagcaatgactatgtcatttaatccaaacccgtgttctgatgcatggaagctggaatttttgaagcgtatcggaattcactgtgatatcatttgtgtcactggatggactg

SEQ ID NO: 129951 - DNA, 209 bp, Glycine max
atcttaaaattccaattccatataataaaaacttgagtgtccttaataaaataggcagtttggacaacacttgagaaaatggcaggacaaattaaaacggcccagtacatccacaattcataacagccatgcatggcctaaaatcccagtaccatagtgatattagcaacaaacaccttctcccttcaaaaagatatggaggagaagtt

SEQ ID NO: 129952 - DNA, 213 bp, Glycine max
tgccaaagttggaaatcacaaacaaattgttggtttccatgttgctggaagcataggaagactgggatatgcttcattgataccatacgttgagccagttgtgcaagctcaaagtgctgaagtttactttgacttcttccctgtggaggttgatagtcaagagggagttgctcacattggtgacttgaaatctggtgtctatggtccacagaa

SEQ ID NO: 129953 - DNA, 202 bp, Glycine max
ggtgtccatatttgtatgctatggtgcatgatagttcagtgtctacaataccaggtgattttgtcattggtgttaagtttgcaaccataaacaatatgtgtgcatatgggctcaatcctggtatttcaggttctcgtcttttgggcaccattcctcagtccatttcacagcaaactgtttggaatcaaatggcaacagtgag

SEQ ID NO: 129954 - DNA, 242 bp, Glycine max
ggagagttgaatgtggaatcccttctggatttccgctcatagttatttgcaatagcatttttaatgagatgctcattagatatagctatgaaaaattactgcgccaggctaaagctccaagtatgtttttacaatctttcaaaaattttgtttctttgtgtgtgtatggtgatgataacttaattagtgttcatgaatatgtcaagccttactttagtggttctaaattgaaaagctttcta

SEQ ID NO: 129955 - DNA, 243 bp, Glycine max
acgcttggcagaagaatttggaccggattgggcaatgcagcacattattccccaggttttggacatggttactgatccacattatctgtatcgaatgacaatcttacaatcaatttctctactagctcctgttctgggctcagagatttcttcttcaaaactgctccctctggtcattaatgcatcaaagcatagggtacccaatatctaattcaatgtagctaaagtgttgcagtctctcat

SEQ ID NO: 129956 - DNA, 252 bp, Glycine max
ggaatgtgttcccaggacctattgtgttttaaatccacaaaatccttttgtgttaaataggtggatggggaaactgactttcccccagggcacttcccgaagtgttaaaagaatgcctctttctatagggggaggagctggtgcaaagaatgctattctcatgaatatgccaaatgctgttctttcaatgtggagatattttgttggagatctcgtctttgaagtttctaagatgacttctccctacattaa

SEQ ID NO: 129957 - DNA, 239 bp, Glycine max
ggagttctgagtgggcaaatcaaacttcatggcacttgagtttccttattgacaatcccaaacagtctacagtttttgatattctcttgggaatttctcaagattttgaaattgctggtaatactcttatgccagctctttctgttccacaggctactgccagatcttctgaaaatgcggaatcctctgcatgatctggaatttgtgttttctttcgtttgttcgtttgtataattcaa

SEQ ID NO: 129958 - DNA, 238 bp, Glycine max
attcttcacgcagatgagaaggattacaaaactgcatatagttatttctttgaagcttttgagtctttcaatgctcttgatgaccccaaggctgtatttagcctgaaatacatgttgttatgcaagattatggtgagtcaagctgatgatgtggctggaatcatatcttctaaagctggcgtgcaatatcttgggcctgatttggatgctatgaaagccattgcagatgctcattcta

SEQ ID NO: 129959 - DNA, 238 bp, Glycine max
gtttcgtgtaataatctggaaatgcaagaagcttatcttgtcaatctcgtaaatgtgttacgagcattgtatctgcacagtccagaggaagctcgccaactgagaaggaaagctctctctcgtattgaatggctgcaaaaagctgatgtgcctaccatagcacagattgaagagttccattcgatgcagaggatgatgaatgctcctgattcaaatgataatattgatctactgttga

SEQ ID NO: 129960 - DNA, 238 bp, Glycine max
cgctccgcaccagtttcaccgcacgaatatcttgttgtttggagcgatccgagaaaaactctgtaaacatgttggtttaccaggacctccttacaggtgatgagcttctctctgactccttccgttacaaggaaattgagaatggaatgctgtgggaagttgaggggaagtgggttgttaaaggagcagttgatgtagacattggttgcaaaccttctgctgagggtggaggagaaga

SEQ ID NO: 129961 - DNA, 242 bp, Glycine max
ttaaaatttctcaatctaaaattgcactttccaaaaacacagttggaggaaccattctgcgtagtgacctattggcaaattttttgacagagggcaattttagagcaagtgttgatttgcagcgcactcatcgtatcaaaggaatgattaaaatggtggccacagttggtattcctgagaatacaggtatagcattggcctgtgctatgaatagttcttttagggggcgtgccagttctgat

SEQ ID NO: 129962 - DNA, 242 bp, Glycine max
aatttctgaagcgtaccggatttcattgtgatatcatttgtgtcactggatggactgccactccaatgcaggatgttcaggttacaattgattggtttatttcctctcaggaatgtgttcccaggacttattgtgttttaaatccacaaaatccttttgtgttgaataggtggatggggaaactgactttcccccagggcacttcccgaagtgttaagagaatgcctctttctataggggga

SEQ ID NO: 129963 - DNA, 257 bp, Glycine max
gcgactaagagttgctgcttcttccgccactcagcacttcgctccctctgtgcttcaccaaccatggccgaaatcgaagctaccgttccagatccctctcaaatcgacgtcaaacttttcaaccgctggagcttcgacgacgttgaggttactgatatgtctctggctgattacattggagtgtccccgtcaaagcatgctacatatgttcctcacactgctggtaggtactcagtgaagaggttcaggaaggcgca

SEQ ID NO: 129964 - DNA, 265 bp, Glycine max
gagagcttagttgtcaagttggaatcaacccatactccatggaatggactggtttggccaatagattactgagtaagggcaacgatattctgtgttgcgattatgctagttttgatggtttgattaccaagcaagttatgagcaagatggcagaaatgataaacagtctttgtggtggtgatgaaaaattgatgcgtgaaaggacacacctgctgttggcttgttgttcaagaatggcaatttgtaagaaagatgtttggagagt

SEQ ID NO: 129965 - DNA, 240 bp, Glycine max
cctgaggacaaggcgagtttatggtcacaacttcattatgtttcgtgtaataatctggaaatgcaagaagcttcacttgtcaatctcgtaaatgtgttacgagaattgtatttgcacagtccagaggaagctcgccaattgagaaggaaagctctctctcgtattgaatggctgcaaaaagctgatgtgcctaccatagcacagattgaagagttccattcgatgcagaggatgatgaat

SEQ ID NO: 129966 - DNA, 237 bp, Glycine max
ctcaaagattaagccatgcatgtgtaagtatgaactaattcagactgtgaaactgcgaatggctcattaaatcagttatagtttgtttgatggtatcttctactcggatacacgtagtaattctagagctaatacgtgcaacaaaccccgacttctggaagggatgcatttattagataaaaggtcaacacaggctctgcctgttgctttgatgattcatgataactcgtcggatcg

SEQ ID NO: 129967 - DNA, 154 bp, Glycine max
tgggagccatagcagcggaagctctagcttgggtagcgaatcacaatggcgagaggattaaagaatcatctgaagaggcttaatgccccaaagcattggatgtttgacaaactgggtggtgcatttgctcctaagccctcatctggaccacaca

SEQ ID NO: 129968 - DNA, 238 bp, Glycine max
ataatctggaaatgcaagaagcttatcttgtcaatctcgtaaatgtgttacgagaattgtcatttgcacagtccagaggaagctcgccaattgagaaggaaagctctctctcgtattgaatggctgcaaaaagctgatgtgcctaccatagcacagattgaagagttccattcgatgcagaggatgatgaatgctcctgattcaaatgataatattgatctactgttgagcattgatt

SEQ ID NO: 129969 - DNA, 212 bp, Glycine max
ctcccactctcctatctgctctaggacttcgtgggtagacttttctatttctctcctttctttcactctcttcttctcactgatccgcattgccgttcaaagtggtcttatttgaaaaacgcttgggcgttggtgcaaatgtttgcttcgttaattttctctggggacaacaggctcactgatacaacatttcctacttgtcaagatttgga

SEQ ID NO: 129970 - DNA, 240 bp, Glycine max
gtcaagccttactttagtggttctaaattgaaaagctttctagctagtcataatatcaccattactgatggtattgacaaaactagtgcaactttgcaatttagaaagttagcagattgtgattttctcaagagaaactttaagcagatgtctaatgttttgtgggtggctcctgaggacaaggcgagtttatggtcacaacttcattatgtttcgtgtaataatctggaaatgcaagaa

SEQ ID NO: 129971 - DNA, 247 bp, Glycine max
  unsure (1)..(247): unsure at all n locations
acagtctctttcttcatagcatttggacatttggctgatgacaccatcaattttgaggcttttccacacaacataacaaaattaaaaaagagattcaggaaaaagttgtattgaaattttcacaagagttatttcttacagcttggtcaactcaggtgcgtcctgcaacaatctnnttagctacagggtgtccatatttgtatgctatggtgcatgatagttcagtgtctacaataccaggtgattt

SEQ ID NO: 129972 - DNA, 248 bp, Glycine max
ctttcccccagggcacttcccgaagtgttaaaagaatgcctctttctatagggggaggagctggtgcaaagaatgctattctcatgaatatgccaaagtgctgttctttcaatgtggagatattttgttggagatcttgtctttgaacgtttctaagatgacttctccttatattaaatgtacagtctctttcttcatagcatttggaaatttggctgatgacaccatcaattttgaggcctttcccc

SEQ ID NO: 129973 - DNA, 251 bp, Glycine max
ctcgagcctggaagaaagtggagaagataagggtctatattgggaagatgcaaaaaagatgccaataacttcaagggtcattcaggagactctaagagttgcttcaattttgtcttttactttcagagaagcagtagaggatgttgaataccaaggtcaattaccaaatctgatatgataccttatttttaatttttaacacaaggtctcctttccttttctcacttaagctcacagattctatgttggtt

SEQ ID NO: 129974 - DNA, 261 bp, Glycine max
atagttcagtgtctacaataccaggtgattttgtcattggtgttaagttgacaaccataaacaatatgtgtgcatatgggctcaatcctggtatttcaggttctcgtcttttgggcaccattcctcagtctatttcacagcaaactgtttggaatcaaatggcaacagtgagaacaccattgaattttgattctagcaagcagagcttttgtcaattttctattgaccttctcggtggaggaattttagtggacaaaactg

SEQ ID NO: 129975 - DNA, 243 bp, Glycine max
agtcgagcgaatcggtcgagggctcgagaatgttttgtgggacgctcctgaggataaagcgagtttatggtcacaacatcattatgattcgtgtaataatctggaaatgcaagaagcttatcttgtcaatctcgtaaatgtgttacgagaattgtatttgcacagtccagaggaagctcgccaattgagaaggaaagctctctctcgtattgaatggctgcaaaaagctgatgtgcctaccat

SEQ ID NO: 129976 - DNA, 237 bp, Glycine max
gtttcccaatacagatatcgcaatgtgccaataaagcgcagagcatgggttgaaggccagatgtctttcgatcagtctgtagtagcaattatgtctaaatgcaaagccagcatgagaatgggaaacactgatgctcaaattttgatggttccagggcgcagattcatagctcatggacaacgtttcaaaaatctgactcagaaagtgcgagtccaattgttacatctgaaaagagtt

SEQ ID NO: 129977 - DNA, 234 bp, Glycine max
cgaaaatcaattttctgtcttctctgcgtcttcttcctctatcaatcgttttccatggctcgtaccaagcaaaccgctcgcaaatccaccggtggaaaggctcctaggaagcaactcgccaccaaggtactattttttttattatttagggtttcgttttttttttctagttagggtttctcgatttcaattaccttttattcctaatttcccgaaggtttattgatacttgat

SEQ ID NO: 129978 - DNA, 237 bp, Glycine max
ctcgagccggttttgatggtttgattaccaagcaagttatgagcaagatggcagaaatgataaacagtctttgtggtggtgatgaaaaattgatgcgtgaaaggacacatctgctgttggcttgttgttcaaggatggcaatttgtaagaaagatatttggagagttgaatgtggaatcccttctggatttccgctcacagttatttgcaatagcatttttaatgagatgctcatta

SEQ ID NO: 129979 - DNA, 249 bp, Glycine max
cgagcgagcagtttcaaagagaggatttgggattgggaaggcgagggattgcgctgcgtctcttcctcttctctttcgattcatccctcattcataatcttccaatccaacaacctcacactcacactcacacatacacacatctgaacgcgtatcgtccctcccatggcttcaaagtgcatcctcaaggagctcaacgacttgcagaaagacccaccaacttcttgcagcgctggtccagtagctgag

SEQ ID NO: 129980 - DNA, 249 bp, Glycine max
ctcgagccgttccgctcacagttatttgcaatagcatttttaatgagatgctcattagatgtagctatgaaaaattactgcgccaggctaaagctccaagtatgtttttacaatctttcaaaaattttgtttctttgtgtgtgtatggtgatgataacttaattagtgttcatgaatatgtcaagccttactttagtggttctaaattgaaaagctttctagctggtcataatatcaccattactgatg

SEQ ID NO: 129981 - DNA, 255 bp, Glycine max
gaaaaaggcaaaaggagatttgtttctggggatggtgaagagatgacattgattccgggaaccagtgttgaagaggcttacaataagctaatagttgaacttgagaaaagtgttcctacattggttggcattgaatgtcccaaggatgagaaacttcctcgtcgcaaaatttttgacaaacctaagacgcgctgcttcactattctccctatggagtttaatcttgtggttcgtcagaagtttttaaattttgtg

SEQ ID NO: 129982 - DNA, 240 bp, Glycine max
gtcacaacttcattatgtttcgtgtaataatctggaaatgcaagaagcttatcttgtcaatctcgtaaatgtgttacgagaattgtatttgcacagtccagaggaagctcgccaattgagaaggaaagctctctctcgtattgaatggctgcaaaaagctgatgtgcctaccatagcacagattgaagagttccattcgatgcagaggatgatgaatgctcctgattcaaatgacaatat

SEQ ID NO: 129983 - DNA, 237 bp, Glycine max
aaccgaaacacattcaccacgatggcgaccaaagcgatggaggtggtgaagggtctggacgtgaaacggtacatgggtcggtggtacgagattgcgtgtttcccgtcgaggtttcagcccagtgacggcgtcaacaccagagccacctacgctctcagagatgacggcaccgtcaacgttctcaatgagacttggagtggcggcaaaagaagcttcattgagggcactgcttataag

SEQ ID NO: 129984 - DNA, 237 bp, Glycine max
caagacttacttgaccagccaaatcctgctgaccctgcccagacagaaggctatcatctattcatccaggatgcagcagagtacaagagaagggtccgccagcaggcaaagcaatatccacctcttctctagggttgcatcagctaaatttatgaactatttttactatggcagatgtttcttcttttgtcccgtgttaaaactgtgttgtcagcgtgattaatggctgccataaca

SEQ ID NO: 129985 - DNA, 226 bp, Glycine max
cttgcacaaaagcaatgactatgtcatttaatccaaacccgtgttctgatgcatggactttggaatttctgaagcgtaccggatttcattgtgatatcatttgtgtcactggatggactgccactccaatgcaggatgttcaggttacaattgattggtttatttcctctcaggaatgtgttcccaggacttattgtgttttaaatccacaaaatccttttgtgtt

SEQ ID NO: 129986 - DNA, 237 bp, Glycine max
agcagatgggtgtcgtcatgaatggtttcatggtatggtgcattgataatggcacgtctccagatgccaatggtgtatgggtaatgatggatggagaggaacagattgaatacccactgaagcccatcgttgaaaatgcaaaaccaactttgaggcaaatacatgcaccatttctcagatgcagctgaagcttacattgagatgagaaattctgaaagtccgtatatgcctagatat

SEQ ID NO: 129987 - DNA, 237 bp, Glycine max
atggtgttcactttgtacagcattggtactgagcttaccagagatgaccgtagaaaattgtactctaattttggtttgctatacccatatggtcatgaggaacttgctgtctgcgaggacattgatcaggttcgtgctgttatggaaaaatatcccccctatcaatctatttttgctaagctatcatatggagagagccagatgcttgacaaggtcttctacgaggaggaggtgaaa

SEQ ID NO: 129988 - DNA, 250 bp, Glycine max
agcattgaattcaaaaacttaagttcattccttgtgttttgctttcttcctcaaaaccaaacatgtcgaacacatgcggcaactgcgactgcgctgacaagactagctgcaccaagggaaacagctatggtgttattgtagagactgagaagagttacatcgagactgttgtcatggatgttccagcagctgagcatgatgggaagtgcaagtgtggcactaactgcacttgcacggactgcacctgtgg

SEQ ID NO: 129989 - DNA, 238 bp, Glycine max
tgggaaaccaatctatacccaatcttatggctattcaatcttgaggagatttttgcctgaagagtaggttgaggctgtgaaaggtctttcactcactgctgatggaaatggcgttgtttttgatgtaccagctaaagatttagacatatatcttaatggtcaggaaaatgcctcgaatgtatgtttagaggtagtgaaaacactgccacagttgcaacagaaagagccacaatcaaga

SEQ ID NO: 129990 - DNA, 231 bp, Glycine max
gttcccaggacttattgtgttttaaatccacaaaatccttttgtgttaaataggtggatggggaaactgactttcccccagggcacttcccgaaatgttaagagaatgcctctttctatagggggaggagctggtgcaaagaatgctattctcataagaatgccaaatgctgttctttcaatgtggagatattttgttggagatctcgtctttgaagtttctaagatgact

SEQ ID NO: 129991 - DNA, 254 bp, Glycine max
catggatccaaccaggttggccatatctgctgcagatttgaatttaaagctgatgaggtggcgtgctttgccttctttaaacttgaatgccttatcttccatgatgtgtcttctcctcggagctggaacacttggatgccaggttgcgcgcatgcttatggcatggggtgttcgaaaaattactctagttgacaatggaagggtggctatgtctaacccattgaggcagtctctttatactttggatgactgtc

SEQ ID NO: 129992 - DNA, 232 bp, Glycine max
tggatccagacgcgttggcaaaggcattcgtggagcactactacagcaccttcgacaccaacaggaacggcttagcgaatctctaccaggagggttccatgcgcactttcgaagggcagaagatccaaggcgcttccaacatcgttgccaagctcacctccctcccttttcagcagtgccaccactcactcttcaccgtcgactgccagccctccggcgtcaacccggcatg

SEQ ID NO: 129993 - DNA, 236 bp, Glycine max
cttgacgtagaggagaatgattacaaaactgcatatagttatctctctgaagcttttgagtctttcaatactcttgatgagcccaaggctgaagttggcctggcatagatgttgttatgcgagattatggtgagtcaagctgatgatgtggcttgaatcatattttctatagctggcgtgcaatatcttgggcctgatttggatgctatgaaagttattgcagatgctgattctaa

SEQ ID NO: 129994 - DNA, 237 bp, Glycine max
ctcgagccgctcgagccgcattactcaaatcttttcagaatgaaagcagatgctgcaaaggctgatgtccactatttactctctggtgtgtggaaagcatcagtggagcgcattttcctttggattggaggctcccgtccatcacagcttctaaacatcatcgtgccacaacttacacctttgactgatcaacaaattgttagtattagcaacctccgtctatcgtctcaacaagct

SEQ ID NO: 129995 - DNA, 242 bp, Glycine max
gctaggggaagaattgtacttcactgttggctcacaacacattccttttggtgcatctccacaggatgtgtggactgagcttggacgtccctgtggcattcatcaaaagcaggtagatcaaatggttattcattctgcttcagatcttcggccacggacaactctctgtggagactacttttataattattttactcgtggtctggacatattatttgatggacagactcacaaaatcaaga

SEQ ID NO: 129996 - DNA, 218 bp, Glycine max
tggggtttcgccttcttctccaaaatatgaggaagaagctagatactcgtttccctgcggctaggattaagaaaattatgcaagctgacgaggatgtagggaagattgcaatggctgtgcctcttctagtctctaaagcactagagctatttctgcaagatttgtgtgatcaaacatatgagataactttgaggacgggggcaaagactatgaatgct

SEQ ID NO: 129997 - DNA, 253 bp, Glycine max
ggagttctgagtgggcaaatcaaacttcatggcacttgagtttccttattgacaatcccaaacagtctacagtttttgatattctcttgggaatttctcaagattttgaaattgctggtaatactcttatgccagctttttctgttccacaggctactgccagatcttctgaaaatgcggaatcctctgcatgatctggaatttctgttttctttcgtttgttcgtttgtttaattcaataaaggaaattaga

SEQ ID NO: 129998 - DNA, 256 bp, Glycine max
acgcttggcagaagaatttggaccggattgggcaatgcagcacattattccccaggttttggacatggttactgatccacattatctgtatcgaatgacaatcttacaatcaatttctctactagctcctgttctgggctcagagatttcttcttcaaaactgctccctctggtcattaatgcatcaaaagatagggtacccaatatcaaattcaatgtagctaaagtgttgcagtctctcatcccaattgttgat

SEQ ID NO: 129999 - DNA, 240 bp, Glycine max
tggctcgtcactccttgctcttagccctcctcctcttcgccgccgtggccaccgccgcgatggcgtggcgcgtccgacgccgacgacatcctgatccgtcaggtggtgccagatgttggcgaagcgaagaggaggacaacctgctgaacgccgagcaccactacgcgagcttcaaggccaagttcgccaagacctacgccaccaaggaggagcacgatcatcgcttcggcgtcttcaagt

SEQ ID NO: 130000 - DNA, 219 bp, Glycine max
gggatttgccatcggttcttctgcccttgtatctctggccctctttggtgcctttgtgagccgagctgcttttacaactgttgatgtgttgactccaaaggttttcattggtttgattgtgggtgcaatgcttccttactggttttctgctcatgaccatgaagtgtgtgggaagtgctgctctgaagatggttgaggacgtacgcaggcaattcaaca

SEQ ID NO: 130001 - DNA, 247 bp, Glycine max
gtgcatgatagttcagtgtctacaataccaggtgattttgtcattggtgttaagttggcaactataaacaatatgtgtgcatatgggctcaatcctggtatttcaggttctcgtcttttgggcaccattcctcagtccatttcacagcaaactgtttggaatcaaatggcaacagtgagaacaccattgaattttgatcctagcaagcagagcttttgtcaattttctattgaccttctcggtggag

SEQ ID NO: 130002 - DNA, 255 bp, Glycine max
atttcttcttcggttgttcaagtacatggccttcgtcaccactgctgacctgtgtgatgcgaacccccagttaattttgagtggggagcttcgtgcccttcagccagtctttcagatttacggtcgtcgacaggtcttctctggacctatagttaccttgaaggtgtttgaagtcaatgttttggttcgtgagttccttgaagagaaaggcaatggaagagtgcttgttgttggtggaggcgcgagtttacgctg

SEQ ID NO: 130003 - DNA, 189 bp, Glycine max
tgaaattttgataaaccgcgatcacaggttgccgcaccttaaaaccggaaacaaaagcaatcgttacttgatttcaagaatcttcaaatttcttcctacttctttgtgtacgatttcttaagggaaagaaaatcactctatgtgctggccacagacttcgtgaatcattttcttttccacacaacatac

SEQ ID NO: 130004 - DNA, 246 bp, Glycine max
atcgtaaatgtgttacgagaattgtatttgcacagtccagaggaagctcgccaattgagaaggaaagctctctctcgtattgaatggctgcaaaaagctgatgtgcctaccatagcacagattgaagagttccattcgatgcagaggatgatgaatgctcctgattcaaatgacaatatcgatctactgttgagcattgatttgttgggtttacaaggagcaagtaaagcttttccaaacaaatcg

SEQ ID NO: 130005 - DNA, 247 bp, Glycine max
ggtgatgataacttaattagtgttcatgaatatgtcaagccttactttagtggttctaaattgaaaagctttctagctggtcataatatcaccattactgatggtattgacaaaactagtgcaactttgcaatttagaaagttagcagattgtgattttctcaagagaaactttaggcagatgtctaatgttttgtgggtggctcctgaggacaaggcgagtttatggtcacaacttcatatgtttc

SEQ ID NO: 130006 - DNA, 251 bp, Glycine max
gttgtattgaaattttcacaagaggaatttcttacagcttggtcaactcaggtgcgtcctggaacaactctgttggctgatgggtgtccatatttgtatgctatggtgcatgatagttcggtgtctacaataccaggtgattttgtcattggtgttaagttgacaaccataaacaatatgtgtgcatatgggctcaatcctggtatttcaggttctcgtcttttgggcaccattcctcagtctatttcaca

SEQ ID NO: 130007 - DNA, 251 bp, Glycine max
agtgtctacaataccaggtgattttgtcattggtgttaagttgacaaccataaacaatatgtgtgcatatgggctcaatcctggtatttcaggttctcgtcttttgggcaccattcctcagtccatttcacagcaaactgtttggaatcaaatggcaacagtgagaacaccattgaattttgattctagcaagcagagcttttgtcaattttctattgaccttctcggtggaggaattttagtggacaaaa

SEQ ID NO: 130008 - DNA, 104 bp, Glycine max
aaaggaaattaggcatgaccctcttgttgagtatgctctgcctatttgaaaatttccacacctcttttaattgtcgtaatgatgtgtgaagtgtgtgttatttt

SEQ ID NO: 130009 - DNA, 249 bp, Glycine max
gggatccgcagtaggtgagaaaatcacccgtttggtagaatatgctactaatcaacttttacctcttattctggtatgtgcgtccggaggagcgcgtatgcaagaaggaagtttgagcttgatccaaatggctaaaatctcttctgctttatatgattatcaaaaaaataaaaagttattctatgtatccatacttacatctcccactactgggggggtaactgctagttttggcatgttgggggatat

SEQ ID NO: 130010 - DNA, 248 bp, Glycine max
gcttcttcgagtttcacagccaagtcgtaaaagggtttcaagggatggaaaacatgccgagcttctggcaattgggtgatgaactccgtgggcactcaaaagcatcggaggatcacaagtggttaatggttgcctcgaaactggccgaacagacaagattgaagggggagcgtgtgaacaaccttgatctttcaaagggacccattgaaacaaggtcaagggataaatttgggttccaggaagagaac

SEQ ID NO: 130011 - DNA, 236 bp, Glycine max
ccgggaaccagtgttgaagaggcttacaacaagctaatagttgaacttgagaatagtgttcctacattggttggcattgaatgtcccaaggatgagaaacttcctcgtcgcaaaatttttgacaaacctaagacgcgctgcttcactattctccctatggagtttaatcttgcggtccgtcaaaagtttttaaattttgtgaggttcattatggagaaaagggacaagcttagttg

SEQ ID NO: 130012 - DNA, 251 bp, Glycine max
ggacaagcttagttgtcaagttggaatcaacccatactccatggaatggactggtttggccaatagattactgagtaagggcaacgatattctgtgttgcgattatgctagttttgatggtttgattaccaagcaagttatgagcaagatggcagaaatgataaacagtctttgtggtggtgatgaaaaattgatgcgtgaaaggacacacctgctgttggcttgttgttcaagaatggcaatttgtaaga

SEQ ID NO: 130013 - DNA, 246 bp, Glycine max
gtgaatgcgtataaaaggaaaataaagaaattagcgtcaaaatgttgggtgtgttcagcagctccatagtgtcgccgccggacgagctcgtggccgccggcagccgtactccgtcgccgaagatgacggcggcggcgctgcggaagcggttcgaggagaagaacccctccgccgtgtcggtggaggtcggagagcatgtccagctcgcttatacccaccacaacgagtcgccgtttcaacccagat

SEQ ID NO: 130014 - DNA, 250 bp, Glycine max
  unsure (1)..(250): unsure at all n locations
ttcacaatcccaacacccattttggagaatcagaatctaactagccaatagccatgaagagacagagagagaacgaagtaacaacgttggaaanctgggacatgcaaatttgttcaacttcaatcacacccgacacaagtgtttccagttccaccatatctccggaagatgtatttgagtgcaaaacgtgctaccgcaagttcaactcttttcaagcgctgggtggccatagggctgtcacaacaagagg

SEQ ID NO: 130015 - DNA, 185 bp, Glycine max
  unsure (1)..(185): unsure at all n locations
atttttgttgcgcttttcagaggcggaaggtacattcgggtggttacatttccacttaccatagtattccangnntnaggnntgagttcaaggtttcagattttgagtacaactttgagtggagattttgatgaaggataagatctggcaatggatatagtaacatgtagcatgtgctgctgttg

SEQ ID NO: 130016 - DNA, 244 bp, Glycine max
ctcctaacaatttctctctgtttccttcttcaccgcatcaatggagttggacggcgttctcctcggcatgtgcaaccctctcctcgacatctctgccgtcgtcgacgacgctttcttgcaaaaatacggtatcaagttgaacgatgcgattctcgctgaggataagcacaaacctatgtatgaagaattggctaacaatcctaatgtggagtacattgctggaggtgctactcagaattcaatc

SEQ ID NO: 130017 - DNA, 230 bp, Glycine max
atggtgaagagatgacattgattccgggaaccagtgttgaagaggcttacaataagctaatagttgaacttgagaaaagtgttcctacattggttggcattgaatgtcccaaggatgagaaacttcctcgtcgcaaaatttttgacaaacctaagacgcgctgcttcactattctctctatggagtttaatcttgtggttcgtcagaagtttttaaattttgtgaggttc

SEQ ID NO: 130018 - DNA, 241 bp, Glycine max
ggaaaactatcaccttggaggttgaaagttcagagacaattgataatgtcaaggcaaaaatacaggacaaggaaggtatccccccagaccaacagaggttgatctttgctgggaagcaactggaggatggaaggactcttgctgactacaacattcagaaagagtctactcttcaccttgtcttgagtcttcgtggtgggttttgagtttgagaatggtctgcaggtcccctgtttggtgt

SEQ ID NO: 130019 - DNA, 240 bp, Glycine max
atggtgtttactttgtacagcattggtactgagcttaccagagatgaccgtagaaaattgtactctaattttggtttgctatacccatatggtcatgaggaacttgctgtctgcgaggacattgatcaggttcgtgctgttatggaaaaatatcccccctatcaatctatttttgctaagctatcatatggagagagccagatgcttgacaaggcattctacgaggaggaggtgaaaagg

SEQ ID NO: 130020 - DNA, 247 bp, Glycine max
gatttgaaattttgataaaccgcgatcacaggttgccgcaccttaaaaccggaaacaaaagcaatcgttacttgttctcaagaatcttcaaactttcttctgttttctctgcactcggttcttcaggaaaagaaaatcactctctgtatttattacagacttcgtgactcattttcttttcaactttcagttcacttgctgaacactctcctataaacatataggacttcgtgtcagatttgaactt

SEQ ID NO: 130021 - DNA, 246 bp, Glycine max
ctcttcccttcctctggtggcgacaatgtcgactcctgctaggaagaggctgatgagagacttcaagaggctgcaacaagacccgcctgcagggatcagtggtgccccccaggataacaacataatgctgtggaatgctgtcatatttggtcctgatgatactccatgggatggaggcacgttcaagttgacactccaatttactgaggactatccaaataaaccaccgactgtacgatttgtgtc

SEQ ID NO: 130022 - DNA, 244 bp, Glycine max
ggcgagtttatggtcacaacttcattatgtttcgtgtaataatctggaaatgcaagaagcttatcttgtcaatctcgtaaatgtgttacgagaattgtatttgcacagtccagaggaagctcgccaattgagaaggaaagctctctctcgtattgaatggctgcaaaaagctgatgtgcctaccatagcacagattgaagagttccattcgatgcagaggatgatgaatgctcctgattcaaat

SEQ ID NO: 130023 - DNA, 245 bp, Glycine max
ctcgagcctggaagaaagtggagaagataagggtctaaattgggaagatgcaaaaaagatgccaataacttcaagggtcattcaggagactctaagagttgcttcaattttgtcttttactttcagagaagcagtagaggatgttgaataccaaggtcaattaccaaatctgatatgataccttatttttaatttttaacacaaggtctcctttccttttctcacttaagctcacagattctatg

SEQ ID NO: 130024 - DNA, 237 bp, Glycine max
gtctgccaaaactgggtactaaggtttctgagtctgaagtaaggcaattgatggaagcggctgatgtggacggaaatgggaccattgattacattgaatttataacagctaccatgcacatgaatagaatggaaagagaggaccacctatataaagcttttgaatattttgacaaggatagaagcgggtacatcacagtggaagagttggagtctgcccttaaaaaatataatatgg

SEQ ID NO: 130025 - DNA, 223 bp, Glycine max
  unsure (1)..(223): unsure at all n locations
actcgagccgaatcggctcgagctcgagccgaataacttcccctgacaatcgcgtttcgtacgtgcaaggttttaaaagacggctgatgctgaggacattcaacctcttgttgttgataatggaactggaatggtcaaggctggttttgcaggtgatgatgctcctagggccgtgttccccagcattattgggagnacacgccatactggtgtaatggttggg

SEQ ID NO: 130026 - DNA, 133 bp, Glycine max
ggatggccgttgcgtggtacccaatatatcatatccccatgggaagaacaattaaagacctttctacatgcttcctcacttatcacacgctttcatcttcatttcaagagcatggcacctgtgacgatagaca

SEQ ID NO: 130027 - DNA, 244 bp, Glycine max
gaaagaaaagacatccaactttagaggataataacatgtcaaagggtgacaaggttgaggttttggacttctgggctagcccattttgtgcaagagtgaaagttgctttggaagagaagggggtgaactatgtagccagtgaagaggatttgtttggaggcaagagtgagcttctcctgaagtcaaatcctatccatcaaagggttacctgtgctcttgcacaatgacaaacctctagccgagt

SEQ ID NO: 130028 - DNA, 240 bp, Glycine max
ctcgagccgctcgagccgctcgtcgcaaaatttttgacaaacctaagacgcgctgcttcaatattctccatatggagtttaatcttgttgttcgtcagaagtttttaaattttgtgaggttcattatgaagaaaagggacaagcttagttgtcaagttggaatcaacccatactccatggaatggactggtttggccaatagattactgagtaagggcaacgatattctgtgttgcgatt

SEQ ID NO: 130029 - DNA, 237 bp, Glycine max
  unsure (1)..(237): unsure at all n locations
gttctttcaatgtggagatattttgttggagatctcgtctttgaagtttctaagatgacttctccctacattaaatgtacagtctctttcttcatagcatttggaaatttggctgatgacaccatcaattttgaggcttttccacacaagctggtaggcagnnnagngattcaggaaaaagttgtatcgnaattttcanaagaggaatttcttacagcttggtcaactcaggtgcgt

SEQ ID NO: 130030 - DNA, 227 bp, Glycine max
gtaatactcttatgccagctttttctgttccacaggctactgccagatcttctgaaattgcggaatcctctgcatgatctggaatttgtgttttcttttgcttgttcgtttgtttaattcaataaaggaaattaggcatgaccctcttgttgagtatgctctgcctatttgaaaatttccacacctcttttaattatcgtaatgatgtgtgaagtgtgtgttatttt

SEQ ID NO: 130031 - DNA, 245 bp, Glycine max
agagaagatgagggtggaggagttaggtgggttcattgatgatggatatctcaatggttatctttcagtaactcgagcccttggggattgggacttgaaatttccacttggtgctgcataagctcttattgctgagccagatgttcggctggttacattgactgatggtgatgagttacaaatcattgggtgtgatgggatttaggatgtaatgtctagccaagttgcagttagtcttgttcgcc

SEQ ID NO: 130032 - DNA, 246 bp, Glycine max
gtcaggcggggctacccgctgagtttaagcatatcaataagcggaggaaaagaaactaacaaggattcccttagtaacggcgagcgaaccgggaaaagcccaccatgaaaatcggtcgccctcggcgtccgaattgtagtctggagaagcgtcctcagtggcggaccgggcccaagtcccctggaagggggcgccagagagggtgagagccccgtcgtgcccggaccctgtcgcaccacgaggcgc

SEQ ID NO: 130033 - DNA, 251 bp, Glycine max
atccttcaaaaattttgtttctttgtgtgtgtatggtgatgataacttaattagtgttcatgaatatgtcaagccttactttagtggttctaaattgaaaagctttctagctggtcataatatcaccattactgatggtattgacaaaactagtgcaactttgcaatttagaaagttagcagattgcgattgtctcattaggtactctacgcaggcgtctaatgttttgtgggtggctcctgaggacaagg

SEQ ID NO: 130034 - DNA, 252 bp, Glycine max
caacagtgagaacaccattgaattttgattctagcaagcagagcttttgtcaattttctattgaccttctcggtggaggaattttagtggacaaaactggagattggatcacacttatacaaaattctccaattagtaacttgttgagagttgctgcttggaagaaaggctgtttaatggttaagattgtgatgtctgggaatgcagcagtcaaaaggagtgattgggcctcattggtacaagtgtttttaa

SEQ ID NO: 130035 - DNA, 251 bp, Glycine max
gttgatttgcagcgcattcatcttattcaatgaatgattaaaatggtggccacagttggtattcctgagaatacaggtatagcattggcctgtgctatgaatagttcttttagggggcgtgccagttctgatatttacaccatctgctctcaagactgtgaattatggaatcttgcttgcacaaaagcaatgactatgtcatttaatccaaacccgtgttctgatgcatggagtttggaatttctgaagcg

SEQ ID NO: 130036 - DNA, 251 bp, Glycine max
gcgctgcctcattccagcccccgaagggtacacaactccttttccgtggcctaaaagccgtgattatgcctactatgctaatgttccttacaagagcctgaggatggagaaggctgttcaaaactgggtgcaattccagggaaatgtgtttaaatttccaggtggagggaccatgttccctcacggagcagatgcatatattgatgaacttgcgtcagttattccacttgctgatggttctgtcagaacag

SEQ ID NO: 130037 - DNA, 247 bp, Glycine max
acctagtgcaccgtcaagggttgtgaagcaggcagagaagagccatggtgcacgtttctttctaccgaaactatgggaaaacgttcaagaagcctcgtcgtccctacgagaaggagcgtttggacgccgagttgaagctggtcggtgagtacgggcttcgctgcaagagggagttatggagggtccagtacgccctgagccgcatccgtaacaacgccagaaacctattgacccttgatgagaagaa

SEQ ID NO: 130038 - DNA, 243 bp, Glycine max
gagaaacatatgccttttgtccggttctcagagaagcataggaagctactaaatgcattcttaaggcaaaaccctggtttgcttgagaaatctttctcactcatgctaaaggttccaagatttattgattttgataacaagcgtgcccacttccgatcaaaaattaagcatcagcatgaccatcaccatagcccattgagaatatcagtaagaagggcatatgttctagaagattcttacaac

SEQ ID NO: 130039 - DNA, 164 bp, Glycine max
aaaagcccgcaagtccctcctcgccacgcacgacgtattcatcgtcgaaggcgatgtcaacgacgcgaaactcttggcgaactcttcgatgtggttgctttcactcacgtgatgcacatcgcggcgcaggctggggttcgctacgccatggagaatccccactc

SEQ ID NO: 130040 - DNA, 251 bp, Glycine max
ctctctctctgcgtccatggagttttggggtgttgaggtgaaaactggagaatctctcaaggttgatccaggagatgacaagattatccacctttcaaatgcatgcatgggggatgtcactaaggatataggaggtggaccagtagccctgtatgtgaagtttggtaaccagaagtttgtacttggaacactttcccctgataaatttcctcagatatcttatgatttggtatttgagaaggaatttgagc

SEQ ID NO: 130041 - DNA, 249 bp, Glycine max
ttgacttcttccctgtggaggttgatagtcaagagggagttgctcacattggtgaattgaaatctggtgtctatgttccactgcctacaaaaacccatttggtggaaactcccaaggaatggcaactggatctaccttgtgacaaaattcctagtgtcttgactacaactgatgaaagattggtaggcacagaacatgagggatatgatccttttcttggtggaattcaaaaatatgccactcccatga

SEQ ID NO: 130042 - DNA, 248 bp, Glycine max
actggagattggatcacacttatacaaaattctccaattagtaacttattgagagttgctgcttggaagaaaggctgtttgatggttaagattgtgatgtctgggaatgcagcagtcaaaaggagtgattgggcctcactggtacaagtgtttttaacaaacagcaacagtacagagcattttgatgcatgtaagtggacaaaatcggaaccacattcctgggaattgatcttcccaatagagatatg

SEQ ID NO: 130043 - DNA, 99 bp, Glycine max
gaagtttctaagatgacttctccctacattaaatgcacagtctctttcttcatagcatttggaaatttggctgatgacaccatcaattttgaggctttt

SEQ ID NO: 130044 - DNA, 245 bp, Glycine max
cccaggtttgtcctgcaacaactctgtttgctgatgggtgtccatatttgtatgctatggtgcatgatagttcagtgtctacaataccaggtgattttgtcattggtgttaagttgacaaccataaacaatatgtgtgcatatgggctcaatcctggtatttcaggttctcgtcttttgggcaccattcctcagtccatttcacagcaaactgtttcgcaatcaaatggcaacagtgagaacacc

SEQ ID NO: 130045 - DNA, 233 bp, Glycine max
gttgatttgcagcgcactcatcgtattaaaggaatgattaaaatggtggccacagttggtattcctgagaatacaggtatagcattggcctgtgctatgaatagttcttttagggggcgtgccagttctgatatttacaccatctgctctcaagactgtgaattatggaatcctgcttgcacaaaagcaatgactatgtcatttaatccaaacccgtgttctgatgcatggag

SEQ ID NO: 130046 - DNA, 243 bp, Glycine max
gtgccggcgcgcgctgaagtttgctaggttcatgagcaggttcgggaagagttaccgaagcgaggaagagatgagggagaggtacgagatattctcgcaaaacctcaggttcatccgctcccacaacaagaaccgcttgccctacactctctctgttaatcattttgctgattggacttgggaggagttcaaaagacacagactaggcgctgcccaaaattgctctgccactcttaacggcaa

SEQ ID NO: 130047 - DNA, 245 bp, Glycine max
  unsure (1)..(245): unsure at all n locations
gtttggccaatagattactgagtaagggcaacgatattctatngtgcgattatgctagtttttatggtttgattaccaagcaagttatgagcaagatggcagaaatgataaacagtctttgtggtggtgatgaaaaattgatgcgtgaaaggacacacctgctgttggcttgttgttcaagaatggcaatttgtaagaaagatgtttggagagttgaatgtggaatcccttctggatttccgctc

SEQ ID NO: 130048 - DNA, 246 bp, Glycine max
atgatgcatgtacaattccaaatgattgtggttccttggttgttgccaaggttggaaatcataaacaaattgttggtttccatgttgctggaagcaaaggaagactgggatatgcttcattgataccatatgttgagccagttgtgcaagctcaaagtgctgaagtttactttgacttcttccctgtggagcgtgatagtcaagagggagttgctcacattggtgaattgaaatctggtgtctatg

SEQ ID NO: 130049 - DNA, 227 bp, Glycine max
gggttgttttaggagcagttgatgtatatcttggtgcaaacccttctgctgagggtggaggagacgatgagggagttgatgatgcagctgtttaggttgttgacattgttgacacattcagacttcaggagcaacccgcattcgataagaagcagtttgttaccttcatgaagaggtttctcaagaatttgactcccatgctcgttgcagagcaacaggtgttgttt

SEQ ID NO: 130050 - DNA, 242 bp, Glycine max
ggttagtgaattaatggaggttcgtggagattcggacacttcaatggtgtctttctctgagtttttagttatgtttgacgatccagattgggattttggcatcatgcctactctggtgaagcttgaaaccggggatagaaacaggcatggtgacacggtatgctcggtttgccgctacccaattattggttctcggtttaaggagataaaatctcattttagtttgtgtaaccaatgctaca

SEQ ID NO: 130051 - DNA, 239 bp, Glycine max
gagactcctgaagatgctgccagagtggggcttgtcagtgggaaggataatataatagatcgtagtattcaagatgctcatgttaatgccattcgacgtgcgaaaaatttcatctatattgagaatcagtatttccttggaagcagttatgattggagtgctgatggcattaagcctgaagccatcgtggctttgcatattatcccgaaggagctttcacttaagattgtaagtaagat

SEQ ID NO: 130052 - DNA, 244 bp, Glycine max
gttctgagtgggcaaatcaaacttcatggcacttgagtttccttattgacaatcccaaacagtctacagtttttgatattctcttgggaatttctcaagattttgaaattgctggtaatactcttatgccagctttttctgttccacaggctactgccagatcttctgaaaatgcggaatcctctgcatgatctggaatttgtgttttctttcgtttgttcgtttgtttaattcaataaaggaa

SEQ ID NO: 130053 - DNA, 248 bp, Glycine max
tggatcttaaaatttctcaatctaaaattgcacttcccaaaaacacagttggtaggaaccattctgcgtagtgacctattggcaaattttttgacagagggcaattttagagcaagtgttgatttgcagcgcactcatcgtatcaaaggactgattaaaatggtggccacagttggtattcctgagaatacaggtatagcattggcctgtgctattttttttcttttagggggcgtgccagttctgat

SEQ ID NO: 130054 - DNA, 242 bp, Glycine max
gaaactttaagcagatgtctaatgttttgtgggtggctcctgaggacaaggcgagtttatggtcacaacttcattatgtttcgtgtaataatctggaaatgcaagaagcttttcttgtcaatctcgtaaatgtgttacgagaattgtatttgcacagtccagaggaagctcgccaattgagaaggaaagctctctctcgtattgaatggctgcaaaaagctgatgtgcctaccatagcacag

SEQ ID NO: 130055 - DNA, 242 bp, Glycine max
cccaaggttggaaagcgctcaccagcatggtgtgatcgtattctttcatatggcaagggaatgagattattgagttacagaagggcagagctcaaactgtctgatcacagacctgtgaccgccaaatatatggttgaagttgagacattttctcctaggaagctacagcgagccctaactttcactgatgcagagattgaaaatgaacaagtcatgacaaatttaagtaattggactttagc

SEQ ID NO: 130056 - DNA, 239 bp, Glycine max
gttccattggcctccgctgctgctcttgccagaaggctagaagggaaggtggcactgataactggtggagcaagtggtataggtgagtgcacagcaagacttttctccaagcatggagccaaagtggtgattgctgatatccaagacgagttaggccactcaatttgcaaagacttggattcatcttcagctacttacattcattgtgatgtcacaaaagaagaaaacatcgaacacgc

SEQ ID NO: 130057 - DNA, 238 bp, Glycine max
  unsure (1)..(238): unsure at all n locations
gacggtttctagagagagatagtgatggccggagttaatccaaacggcgtcgccgattttgcggcggttccgacgcatggcggacagttcattcagtacaacatatttggcaacctcttcgaggttacgacgaagtaccgtcctccgatcatgcctatcggacgcggcgcgtacggaatcgtttgctcactgttgaataccganacgaactagctggtggctgtgaagaagatagcga

SEQ ID NO: 130058 - DNA, 241 bp, Glycine max
ccttaagctccttagtgctgctccttgcagctctaattctattccctcaagttcttgctgactatgagaagcccccggtgtacaagcctcccattgagaagccaccactttacaagcccccaattgagaaacctcctgtttataaacctccagttgagaaaccccccatttataagcccccagtagagaagccaccagtgtacaagcctcctgtagagaaacccccagtttacaagccccc

SEQ ID NO: 130059 - DNA, 242 bp, Glycine max
ggtgattttgtcattggtgttaagttgacaaccataaacaatatgtgtgcatatgggctcaatcctggtatttcaggttctcgtcttttgggcaccattcctcagtctatttcacagcaaactgtttggaatcaaatggcaacagtgagaacaccattgaattttgattctagcaagcagagcttttgtcaattttctattgaccttctcggtggaggaattttagtggacaaaactggaga

SEQ ID NO: 130060 - DNA, 241 bp, Glycine max
cttgaggatattgtgccctcttctcacaactgtgatgttcctcatgtgaatcgtactgattaccagctcattgatattgctgaggatggatttttgagtctgcttactgaaaatgggaacaccaaggatgacctcaagcttcccactgatgagagtctgctcactcagataaaggatggatttgctgagggcaaggatcttgttgtgtctgtcatgtctgctaatgggtgaggaacagatt

SEQ ID NO: 130061 - DNA, 176 bp, Glycine max
ctcgagccgattcggctcgagcgcgatcacaggttgccgcaccttataaccggaaacaaaagcaatcgttacttgatttcaagaatctctcaatttcttcctacttctttgtgtacgatttcttaagggaaagaaaatcactctctgtgctggtcacagacttcgtgaatcatttt

SEQ ID NO: 130062 - DNA, 235 bp, Glycine max
aaggttctagcaccttgcatggatccaaacagatagaaagttaggtggccttggtgacttgaattatcctttgatttctgatgtcaccaaatccatatcgaaatcttatggtgttctcattcctgatcaggtatgttctgacatgaaattggtttaaaaaattgttacttatggatggatgaattataagacaatagaagtcaaataatttgtctgttttttctcacactaaatg

SEQ ID NO: 130063 - DNA, 238 bp, Glycine max
ccttgaagtatcctatagagcatggcatagtcagcaactgggacgatatggagaagatttggcatcacacattttacaatgagctacgtgttgcccctgaagaacaccccgtacttcttaccgaggcaccactcaatcccaaggccaacagagagaagatgacccaaattatgtttgagactttcaatgtgcctgccatgtatgttgcaattcaggctgtcttgtctctgtatgccag

SEQ ID NO: 130064 - DNA, 237 bp, Glycine max
gttgggatctccatacgccggatctgctaaaatacgcttgatccatatgggcctcctcgaccacttgtgggacgacaccgtcgccggcccaaggccggaaaacggtctcggcaagctcccaaaacaccacaccttcactttccgacctagctccggcaaggaaacggagggcgggagcgtgagatcgtacggagacgaatcgtcggaggaaacgacgagagtgacgcgtagtatcat

SEQ ID NO: 130065 - DNA, 237 bp, Glycine max
tgggaatgcagcagtcaaaagaagtgattgggcctcattggtacaagtattttgaacaaacagcaacagtacagagcattttgatgcatgtaagtggacaaaatcggaaccacattcctgggaattgatcttcccaatagaggtatgtggtcccaataatggttttgaaatgtggagttctgagtgggcaaatcaaacttcatggcatttgagtatccttattgacaatcccaaaca

SEQ ID NO: 130066 - DNA, 231 bp, Glycine max
gctccgggaggcgttcgagctgtacgatctggacaagaacgggctgatctcggcgaaggagctgcactccgtgatgcggaggttgggggagcagtgctccctcagtgactgccggaggatgatcggaaacgtcgatgccgacggcgacggcaacgtcaatttcgaagagttcaagaagatgatgagtcgctcgtaggtgatggtagctaagtgactcatttatttaagtga

SEQ ID NO: 130067 - DNA, 232 bp, Glycine max
attgaatgtcccaaggatgagaaacttcctcgtcgcaaaatttttgacaaacctaagacgcgctgcttcactattctccctatggagtttaatcttgtggtccgtcagaagtttttaaattttgtgaggttcattatgaagaaaagggacaagcttagttgtcaagttggaatcaacccatactccatggaatggactggtttggccaatagattactgagtaagggcaacg

SEQ ID NO: 130068 - DNA, 184 bp, Glycine max
tgaaattttgataaaccgcgatcacaggttgccgcaccttaaaaccggaaacaaaagcaatcgttacttgatttcaagaatctctcaatttcttcctacttctttgtgtaccgtttcttaagggaaagaaaatcactctctgtgctggccacagacttcgtgaatcattttcttttccacacaa

SEQ ID NO: 130069 - DNA, 236 bp, Glycine max
cttatggcatctggagcatcagagtagatggaaatgatgctcttgctgtttatagtgcagttcacactgctagagaaatcgctataaaagaaaaaaggccagttttaattgaggctctcacttatagagttggacatcactctacatctgatgattcaactaagtaccggggaactgatgagattgaatattggaagatggcaaggaatccagtgaataggttcaaaagatgggta

SEQ ID NO: 130070 - DNA, 244 bp, Glycine max
caatcatctttagttcttcagtaatttattgtgggattctattctaagattttgagaatgtctagctgtgggtgtggaagcagctgcaactgtggcagcaactgcggttgcaacaagtactcttttgacttgagttacgttgagaagacaaccacagagactctagttttgggtgttgggcctgtgaaggcccaattggagggtgctgaaatgggtgttgcatctgagaacggtggctgcaact

SEQ ID NO: 130071 - DNA, 242 bp, Glycine max
agttgtcaagttggaatcaaccatactccatgcattggtctggtttggccaatacattactgagtaagggcaacgatattctgtgttgcgattatgctagttttgatggtttgattaccaagcaagttatgagcaagatggcagaaatgataaacagtctttgtggtggtgatgaaaaattgatgcgtgaaaggacacacctgctgttggcttgttgttcaagaatggcaatttgtaagaaa

SEQ ID NO: 130072 - DNA, 169 bp, Glycine max
aaattttgataaaccgtgatcacaggttgccgcaccttaaaaccggaaacaaaagcaatcgttacttgatttcaagaatctctcaatttcttcctacttctttgtgtacggtttcttaagggaaagaaaatcactctctgtgctggccacagacttcgtgaatcatttt

SEQ ID NO: 130073 - DNA, 240 bp, Glycine max
attatgtcagaaagcaagatgtcagcattgaatatgatgcatgtacaattccaaatgattgtggttcattggttgttgccaaagttggaaatcacaaacaaattgttggtttccatgttgctggaagcaaaggaagactgggatatgcttcattgataccatacgttgagccagttgtgcaagctcaaagtgctgaagtttactttgacttcttccctgtggaggttgatagtcaagagg

SEQ ID NO: 130074 - DNA, 238 bp, Glycine max
caagatatggttgaggaatggtttgattgtgttgatgaggaggattcctttgaggaagtttctttaagtgcagcactcaatggtgttgagggtttggactatatggaaagaattcctcttgctacatctgcgggttttcctcatgtgctttcacgcaaaaatggtgcaaaaggcaaaaggagatttgtttctggggatggtgaagagatgacattgattccgggaaccagtgttgaag

SEQ ID NO: 130075 - DNA, 241 bp, Glycine max
ggctcacaagaaggttccggttcttgttcatgcccacaaacccatcgctgagtcattcgtcatcgttgaatacgttgatgaaacatggaagcagtatccactgttgcctcgagacccttatcaaagagcacttgctcgattttgggctaatttcgctgagcaaaagcttttagatgcagcatggattggtatgtatagcagcggggatgagcagcaaaacgctgtgaaagtagccagagaa

SEQ ID NO: 130076 - DNA, 241 bp, Glycine max
cagaaccgaaaatggttgcgactttgagtcttccgatcatagacctctcttctccccatcgtctttccacagccaattccacgtgtcaggcatgcgtggaatatggtttcttttaccttgtgaaccatggggtggacaccgattttgtgagcaaagtcttcgaccaaagttgcaagttcttctcgcttccggtccaacgcaaaatggacctggcccgcaaggaatatagaggttacactcc

SEQ ID NO: 130077 - DNA, 202 bp, Glycine max
gattcggcttgggatctttgccatttcacaaagttgcagtggtgtggcagctcgagcttgtggtcttgttagtttagaacctacaaagattgcagagatccttaaagatcgtccatcttggttccgtgcttgtcggagcctagaagtttttactatgtttcctgctggaaatggaggaaccattgaacttgtttccacacaa

SEQ ID NO: 130078 - DNA, 176 bp, Glycine max
taaaccgcgatcacaggttgccgcctcttaaaaccagaaacaaaagcaatcgttacttgctatacccaaatctctcactttcttcctacttctttgtgtacaatttcttaaggtaaagaaaatcactctctgctgcaggccacagacttcgcaaatcattttcttttccacacaac

SEQ ID NO: 130079 - DNA, 257 bp, Glycine max
cacttatacaaaattctccaattagtaacttgttgagagttgctgcttggaagaaaggctgtttaatggttaagattgtgatgtctgggaatgcagcagtcaaaaggagtgattgggcctcattggtacaagtgtttttaacaaacagcaacagtacagagcattttgatgcatgtaagtggacaaaatcggaaccacattcctgggaattgatcttcccaatagaggtatgtggtcctaataatggttttgaaatg

SEQ ID NO: 130080 - DNA, 240 bp, Glycine max
ggttagtgaattaatggaggttcgtggagattcggacacttcaatggtgtctttctctgagtttttagttatgtttgacgatccagattggggttttggcatcatgcctactctggtgaagcttgaaaccggggatagaaacaggcatggtgacacggtatgctcggtttgccgctacccaattattggttctcggtttaaggagataaaatctcattttagtttgtgtaaccaatgcta

SEQ ID NO: 130081 - DNA, 236 bp, Glycine max
gcaatgggcggtatatttctgcgcttcttggcggcgacgcggcggcggcggcgtcttcgccggagagttctacttctagagtctcctccttccactcgtcgccgcgcctccagctctacttcaacgagatcaaagataccgataagctcgttgtgatagatttctcggcgtcgtggtgcggtccttgcaaattcatagagccagcgattcacgccatggccgacaagttcaacgac

SEQ ID NO: 130082 - DNA, 236 bp, Glycine max
gtgaggctgatgttgatggagatggccaaataaactacgaggagttcgttaaggtgatgatggccaagtgagtgatcatcacattatggccacaagaacctaaatgaagaagtgttgattaaaaggaaatgaccaaaaaaacagaggtaaggggaaggacaagggtttgggctgtataacagtgcgatagtagtccttgtcctttcttcttcctacatttatatttgacggttttt

SEQ ID NO: 130083 - DNA, 237 bp, Glycine max
aatcatctttagttcttcagtaatttattgtgggattctattctaagattttgagaatgtctagctgtgggtgtggaagcagctgcaactgtggcagcaactgcggttgcaacaagtactcttttgacttgagttacgttgagaagacaaccacagagactctagttttgggtgttgggcctgtgaaggcccaattggagggtgctgaaatgggtgttgcatctgagaacggtggct

SEQ ID NO: 130084 - DNA, 96 bp, Glycine max
ttaggcatgaccctcttgttgagtatgctctgcctatttgaaaatttccacacctcttttaattgtcgtaatgatgtgtgaagtgtgtgttatttt

SEQ ID NO: 130085 - DNA, 236 bp, Glycine max
caaggatgagaaacttcctcgtcgcaaaatttttgacaaacctaagacgcgctgcttcactattctccctatggagtttaatcttgtggtccgtcaaaagtttttaaattttgtgaggttcattatgaagaaaagggacaagcttagttgtcaagttggaatcacccatactccatggaatggactggtttggccaatagattactgagtaagggcaacgatattctgtgttgcga

SEQ ID NO: 130086 - DNA, 235 bp, Glycine max
cggctcgagctggtgcaaagaatgctattctcatgaatatgccaaatgctgttctttcaatgtggagatattttgttggagatctcgtctttgaagtttctaagatgacttctccctacattaaatgtacagtctctttcttcatagcatttggaaatttggctgatgacaccattaattttgaggcttttccccacaaactggtgcagtttggagagattcaggaaaaagttgt

SEQ ID NO: 130087 - DNA, 232 bp, Glycine max
ggaatttcttacagcttggtcaactcaggtgcgtcctgcaacaactctgttggctgatgggtgtccatatttgtatgctatggtgcatgatagttcagtgtctacaataccaggtgattttgtcattggtgttaagttgacaaccataaacaatatgtgtgcatatgggctcaatcctggtatttcaggttctcgtcttttgggcaccattcctcagtctatttcacagcaa

SEQ ID NO: 130088 - DNA, 233 bp, Glycine max
ggccaatattatcctgagtgggctccaattaattgtcgagttcatcgacaatcaattcacatcactgaaggaacttatgtcagaaagcaagatgtcagcattgaatatgatgcatgtacaattctaaatgattgtggtcctttggttgttgccaaagttggaaatcacaaacaaattgttggtttccatgttgctggaagctagctacgactgggatatgcttcattgatacc

SEQ ID NO: 130089 - DNA, 232 bp, Glycine max
tttgtgaggttcattatgaagaaaagggacaagcttagttgtcaagttggaatcaacccatactccatggactagactggtttggccaatagattactgagtaagcgcaacgatattctgtgttgcgattatgctagttttgatgctccgattaccaagcagttatgagcaagatggcagaaatgataaacagtctttgtggtggtgatgaaaaattgatgcgtgaaaggac

SEQ ID NO: 130090 - DNA, 231 bp, Glycine max
gttgggatctccatacgccggatctgctaaaatacgcttgatccatatgggcctcctcgaccacttgtgggacgacaccgtcgccggcccaaggccggaaaacggtctcggcaagctccgaaaacaccacaccttcactttccgacctagctccggcaaggaaacggagggcgggagcgtgagatcgtacggagacgaatcgtcggaggaagcgacgagagtgacgcgtag

SEQ ID NO: 130091 - DNA, 233 bp, Glycine max
catcaattttgaggcttttccccacaagctggtacatcttggagagattcaggaaaaagttgtattgaaattttcacaagagatatttcttacagcttggtcaacccaggtgcgtcctgcaacaactctgttggctgatgggtgtccatatttgtatgctatggtgcatgatagttcagtgtctacaataccaggtgactttgtcattggtgttaagttgacaaccataaaca

SEQ ID NO: 130092 - DNA, 232 bp, Glycine max
ttgggattggagggattgacgctgcgtctcttcctcttctctttcgatccatccctcattcctaatcctccaatccaaccacctcagcctcacactcacatatacacatatctgaacgcgtatcgtccctcctatggcttcaactcgcatcctcaaggagctcaaggacttgcagaaagacccaccaacttcttgcagcgctggtccagtagctgaggacatgttccattgg

SEQ ID NO: 130093 - DNA, 211 bp, Glycine max
ctcgagcctcttctctctctctctctcgttcgtgttcttcgtcgcaaattcaaagctggctctctactccgctttctctaggttttcgctatggcgtcgacgcgaattttgaaggagcttaaggatttgcagaaggatcctccaacatcttgcagtgccggtctgttgttgctgaagatatgttccattggcaagctacaattatgggtcc

SEQ ID NO: 130094 - DNA, 164 bp, Glycine max
gctggtgcaaagaatgctattctcatgaatatgccaaatgctgttctttcaatgtggcaataccccgttggagatctcgtctttgaagtttctaagatgacttctccctacattaaatgtacagtctccttcttcatagcatttggaaatttggctgatgacac

SEQ ID NO: 130095 - DNA, 231 bp, Glycine max
gcagaagcatagttgatggttaaaattgtgatgtctgggaatgcagcagtcaaaaggagtgattgggcctcattggtacaagtgtttttaacaaacagcaacagtacagagcatttcgatgcatgtaagtggacaaaatcggaaccacattcctgggaattgatcttcccaatagaggtatgtggtcctaataatggttttgaaatgtggatttctgagtgggcaaatcaa

SEQ ID NO: 130096 - DNA, 204 bp, Glycine max
aaaccgcgatcacaggttgccgcaccttaaaaccggaaacaaaagcaatcgttacttgatttcaagaatctctcaatttcttcctacttctttgtgtacggtttcttaagggaaagaaaatcactctctgtgctggccacagacttcgtgaatcattttcttttccacacaacatacgacgttacgaacgggggatgtgctgca

SEQ ID NO: 130097 - DNA, 232 bp, Glycine max
atggaatcctgcttgcacaaaagcaatgactatgtcatttaatccaaacccgtgttctgatgcatggagtttggaatttctgaagcgtaccggatttcattgtgatatcatttgtgtcactggatggactgccactccaatgcaggatgttcaggttacaattgattggtttatttcctctcaggaatgtgtctccaggacttattgtgttttaaatccacaaaatcctttt

SEQ ID NO: 130098 - DNA, 102 bp, Glycine max
atttttgaagcgaaccggacatcactgtgatatcatttgtgtcactggatggaccggaaccccaatgcaggatgttcaggttacaattgactggcccatttc

SEQ ID NO: 130099 - DNA, 255 bp, Glycine max
cggaactcaataaaggaaattaggcatgacgctcttgttgagtatgctctgcctatgtgaaaattacgagacctcccttaagggtcgcagcgcagagttgatagtgcagtagcatttttaatgagatgctcattagatatagctatgaaaaattactgcgccaggctaaagctccaagtatgtttttacaatccttcaaaaattttgtttctttgtgtgtgtatggtgatgataacttaattagtgttcatgaat

SEQ ID NO: 130100 - DNA, 245 bp, Glycine max
caaacctaagacgcgctgcttcactattctccctatggagtttaatcttgtggttcgtcagaagtttttaaattttgtgaggttcattatgaagaaaagggacaagcttagttgtcaagttggaatcaacccatactccatggaatggactggtttggccaatagattactgagtaagggcaacgatattctgtgttgcgattatgctagttttgatggtttgattaccaagcaagttatgagca

SEQ ID NO: 130101 - DNA, 245 bp, Glycine max
tggaatctggtttgcaaaaagacagagggttaattgtggagtattttggaaggatgtcttacgttgctcataacgttaatcagccccaagagaaagatttgttggaaggaaatttttcctttgatattaaatctcgctctagattggaaaaagtttcctctacaaaagcacaatttgttagtggaaaaaaccttcaaatatgatatagttggtgctgattcacattcttcagaaggatttttctg

SEQ ID NO: 130102 - DNA, 260 bp, Glycine max
cacaccaaaaaattcttgcttagctctcacaaacaatctttaacaacaatgaagaaagtagtattaaaggtggacttaaataatgatagaatcaagaaaaaagctatgaagacagcatctggcctttcaggggttgaatcgatttctgttgacgttaaggacatgaaactagtcttattgggtgagattgatccagtgagtgcagtgtcaaagctacgaaagtggtgtcacactgaactaatttcatttggaccagcaaa

SEQ ID NO: 130103 - DNA, 257 bp, Glycine max
gaaaagctttctagctggtcataatatcaccattactgatggtattgacaaaactagtgcaactttgcaatttagaaagttagcagattgtgattttctcaagagaaactttaggcagatgtctaatgttttgtgggtggctcctgaggacaaggcgagtttatggtcacaacttcattatgtttcatgtaataatctggaaatgcaagaagcttatcttgtcaatctcgtaaatgtgttacgagaattgtatttgc

SEQ ID NO: 130104 - DNA, 257 bp, Glycine max
aaatgataaacagtctttgtggtggtgatgaaaaattgatgcgtgaaaggacacacctgctgttggcttgttgttcaaggatggcaatttgtaagaaagatgtttggagagttgaatgtggaatcccttctggatttccgctcacagttatttgcaatagcatttttaatgagatgctcattagatatagctatgaaaaattactgcgccaggctaaagctccaagtatgtttttacaatctttcaaaaattttgtt

SEQ ID NO: 130105 - DNA, 252 bp, Glycine max
aacagttctcttgcttggaggaagggtagcagcctcagctgctgcaatttccaaagcagatgagaagaaggcatggctgatattggcttgggccagcaccatatcagggaatctctcattgttgggatcagctgctaacttgatagtgtgtgaacaggcgatccgtgcgcaaactatcctatacatttaacctttggggtcacctgaaatttggccttccttccacaatcatagtcactgctattggtttga

SEQ ID NO: 130106 - DNA, 250 bp, Glycine max
tcaaaaattttgtttctttgtgtgtgtatggtgatgataacttaattagtgttcatgaatatgtcaagccttactttagtggttctaaattgaaaagctttctaactggtcataatatcaccattactgatggtattgacaaaactagtgcaactttgcaatttagaaagttagcagattgtgattttctcaagagaaactttaagcagatgtctaatgttttgtgggtggctcctgaggataaggcgag

SEQ ID NO: 130107 - DNA, 244 bp, Glycine max
gcaggcgatttgagagagaatgggaaggaagaaggggtatgttgagttcgaggagtcgccgccggacgatttcgatccggcgcatccgtacaacgacccggtggcgatgctggatatgagggagcacatcgtgagggagaagtggatccaaatcgagaaggccaagatcattagggagaagctccgatggtgctaccgcatcgaaggcgtcaaccacctccagaagtgccgccacctcgtcaac

SEQ ID NO: 130108 - DNA, 248 bp, Glycine max
cttgaatcttcgttatccttctttttttctccttgaactcgaatattcactatggcagatgaggtggttctgctagatttctggccaagtccatttgggatgagggtcaggattgcacttgctgaaaagggtatcaaatatgagtccaaagaagaggacttgcagaacaagagccctttgctcctcaaaatgaacccggttcacaagaaaatcccggttctcatccacaatggcaaacccatttgtgg

SEQ ID NO: 130109 - DNA, 246 bp, Glycine max
gaaaaatatgcgaggggacccagaagaaagacaggccatcaataaccagatactgtgtgctacactttttcctacttggacttgttggaataacaatgaaagaaggattctacctcttgggtttggagaaaacatcacctacttttgctgctgctatgcagaattctgttccagcacttacctttctgatggctgctctactcagatatgagagtgtgcacttcaacaggattgatggtctggcta

SEQ ID NO: 130110 - DNA, 248 bp, Glycine max
ggtttgaacaaaggtaggaggttaattgcagtgaagagactagagaagttggtggaagaaggagaaagggagttccaagcagaaatgagaataattggaaaaacccaccacaggaacctagttcgcttgttgggtttctgtgccgagggttctaaaaggcttctggtttatgagtacatgcctaatggttcccttgaaaaccttatctttggagctcagagtcagagacgtccagggtgggatgagag

SEQ ID NO: 130111 - DNA, 257 bp, Glycine max
cccaccactgcttggattagttctgcagttaacaatcgctcctcagatatcaacaaaaggattcgcacagcacttgggagaggtaagaaaattgtttttcttactagagttgatccttttccagtagctttactggctgttctttttggcgttaagaatgaaattctgagttctaacgccactaaccctatgctgacgcgacttcttgagaactgtaagagtctcaaatatctggatgatgagtgtccttttgcatt

SEQ ID NO: 130112 - DNA, 256 bp, Glycine max
gcctcattggtacaagtgtttttaacaaacagcaacagtacagagcattttgatgcatgtaagtggacaaaatcggaaccacattcctgggaattgatcttcccaatagaggtatgtggtcctaataatggttttgaaatgtggagttctgagtgggcaaatcaaacttcatggcatttgagtttccttattgacaatcccaaacagtctacagtttttgatattctcttgggaatttctcaagattttgagattg

SEQ ID NO: 130113 - DNA, 265 bp, Glycine max
cctcgagccgaatcgctcgagatttgtaagaaagatatttggagacgttgaatgtggaatcacttctggatttccgctcacagttatttgcaatagcatttttaatgagatgctcattagatatagctatgacaaattactgcgccaggctaaagctccaagtatgtttttacaatccttcaaaaattttgtttctttgtgtgtgtatggtgatgataacttaattagtgttcatgaatatgtcaagccttactttagtggttct

SEQ ID NO: 130114 - DNA, 255 bp, Glycine max
gaggaatttagtggacaaaattggagattggatcacacttatacaaaattctccaattagtaacttgttgagagttgctgcttggaagaaaggctgtttaatggttaaaattatgatgtatgggaatgcagcagtcaaaaggagtgtttgggcctgattggtataagtgtttttaacaaacagcaacagtacagagcatttcgatgcatgtaagtggacaaaatcggatccacattctgggaattgatcttccca

SEQ ID NO: 130115 - DNA, 257 bp, Glycine max
cttttatgtttttgattgattattacagatgaacgtgatgggaaacctattggaataaaggtgtgtgtatacaccaaaacatgcaaatgttcttctagttaaatcattacttttgataaatataaaaactaactctttttttttcgtaattatgcagattgcttctgattggttatatgtttatccaagaggaattcgtgaccttttattatataccaaagaaaagtacaataatcctttgatttacatcactgaaa

SEQ ID NO: 130116 - DNA, 251 bp, Glycine max
ggggatgaagaagaatctgagaagtctgtatctgaggtgaatgatgaggatgatgacgaggaaggcagtggcgaggaggaggatgacgattagagaatggactgatgataatagcatttatgtaggttctgatgattttgatcatccgtgtaggtggtctggtcatttccttataaacatatttctctttccaaaaaatatttccctgctcctccttccgtaaattgctcgtctttccaaaacgtgaatag

SEQ ID NO: 130117 - DNA, 234 bp, Glycine max
gggagaagtacatgatggaagtgacgaaagaccctaattcagatttcgaactcgaactctacaccatcccaagctcttcaagatggttcgcgtgggaagaaatccacgaaacggagagacaagcgttcaaggaatacttcgacggaaactcaataacgcgaacccctaagatatacaaagagtaccgagacttcatcatcaacaagtacagggaagagccctcgaggaggctca

SEQ ID NO: 130118 - DNA, 245 bp, Glycine max
cgaggaacatggagaagactttgtggacatgctggatggtatcttctcatttgttctactggacacccgtgacaacagttttatagtggctcgggatgctattggggtcacttccttgtacattggatgggggttagatggctctgtttggatttcatcagaaatgaaaggcctgaatgatgattgtgaacactttgagtgttttccacctggtcacttgtattctagctgagaaagagggttcc

SEQ ID NO: 130119 - DNA, 253 bp, Glycine max
agaatggcaatttgtaagaaagatgtttggagagttgaatgtggaatcccttctggatttccgctcacagttatttgtaatagcatttttaatgagatgctcattagatatagctatgaaaaattactgcgccaggctaaagctccaagtatgtttttacaatccttcaaaaattttgtttctttgtgtgtgtatggtgatgataacttaattagtgttcatgaatatgtcaagccttactttagtggttcta

SEQ ID NO: 130120 - DNA, 253 bp, Glycine max
cctcgagccgaatcggctcgagattaaattagtggttaaggttgtacggaggagctctaacaacagatggagacacaaaattggttcgaaagagtgaagcctttagcagctgtggtatcaatgcagtttggatatgcagctatggatgttctatccaaggctgcaatgaacaaagggatgagcaactatgtgtttgtcgtttatcgtcatgctgttgcattctttgttatggcccctttggcatggttttttg

SEQ ID NO: 130121 - DNA, 178 bp, Glycine max
aagacctcgatcacaggtattcgcaccttaaaaccggaaacaaaagcaatcgttacttgatttcaagaatctctcaatttcttcctacttctttgtgtacgatttcttaagggaaagaaaatcactctctgtgctggccacagacttcgtgaatcattttcttttccacacaacatac

SEQ ID NO: 130122 - DNA, 252 bp, Glycine max
aaagcattgaattcaaaaactttagttcattccttgtgttttgctttcttcctcaaaaccaaacatgccgaacacatgcggcaactgcgactgcgctgacaagactagctgcaccaagggaaacagctatggtgttattgtagagactgagaagagttacatcgagactgttgtcatggatgttccagcagctgagctcgatgggaagtgcaagtgtggcactaactgcacttgcacggactgcacctgtgg

SEQ ID NO: 130123 - DNA, 250 bp, Glycine max
aggacttattgtgttttaaatccacaaaatccttttgtgttgaataggtggatggggaaactgactttcccccagggcacttcccgaagtgttaagagaatgcctctttctatagggggaggagctggtgcaaagaatgctattctcatgaatatgccaaatgctgttctttcaatgtggagatattttgttggagatctcgtctttgaagtttctaagatgacttctccctacattaaatgtacagtct

SEQ ID NO: 130124 - DNA, 250 bp, Glycine max
tctgcgtgtgtttgtgaattgttgttgagatctgaatcaaaatcagaaacgataatggctacaccggaccacctcttcaacctccgcaacaacttctacctcggcgcttaccaagccgccatcaacagcagcgacgttgccaacctctcccaagaagataccctcgagcgcgacaccctcgtccaccgctgctacatcgccctcggccagctccagttcgtcatctccgagatccacgacgatgctccca

SEQ ID NO: 130125 - DNA, 249 bp, Glycine max
atggctcccaagggtttaacctttctggctgtgttaatatgcgtttcagcactgtcactgagtccttctgttgcgggggaagggcaaaataatggccttgttatgaacttctacaaggaatcatgccctcaggctgaagacatcatcacagaacaagtcaagcttctctacaagcgccacaagaacactgctttctcctggctcaggaacatcttccatgactgtgctgttcagagttgtgatgcttca

SEQ ID NO: 130126 - DNA, 210 bp, Glycine max
acaaaacttgctatagcagtaagctataactcatttgaggctctgtgagaattgagaaatggctaaagatgttgaggttcaagagcaaggaggagagtactctgccaaagactaccatgaccctcctccagcacctttgttcgaccaaaaggggttcacacagtggtccttctatagagccctcatcgctgagttcatagcaacccttct

SEQ ID NO: 130127 - DNA, 237 bp, Glycine max
cctcgagccgctcgagccgctcgagcggtcgacaaaaatatgccactcccatgatgccccacagatgaagacaattctttctaaagttgcacaacatatggttgaggaatggtttgattgtgttgatgaggaggattcctttgaggaagtttctttaagtgcagcacttaatggtgttgagggtttggactatatggaaagaattcctcttgccacatctgagggttttcctcatgt

SEQ ID NO: 130128 - DNA, 256 bp, Glycine max
cgaagtttcacatcagccttatccagtttagggtttcggttccttaccctacctttgacgtatcgaaaccttaaatttgggattaggtctcagcaatctggttggtagaacctttggtcttagagagtcaagttttatgtctggattagacgatcaaattcctactgccttcgatccttttgctgatgcaaatgctgatgactcgggtgctgggtcaaaggagtatgtgcatattcgcgttcagcagcgaaatggt

SEQ ID NO: 130129 - DNA, 247 bp, Glycine max
cgaaatgttaagagaatgcctctttctatagggggaggagctggtgcaaagaatgctattctcatgaatatgccaaatgctgttctttcaatgtggagatattttgttggagatctcgtctttgaagtttctaagatgacttctccctacattaaatgtacagtctctttcttcatagcatttggaaatttggctgatgacaccatcaattttgaggcttttccccacaagctggtactctttggag

SEQ ID NO: 130130 - DNA, 246 bp, Glycine max
gtgagaacaccattgaattttgattctagcaagcagagcttttgtcaattttctattgaccttctcggtggaggaattttagtggacaaaactggagattggatcacacttatacaaaattctccaattagtaacttgttgagagttgctgcttggaagaaaggctgtttaatggttaaaattgtgatgtctgggaatgcagcagtcaaaaggagtgattgggcctcattggtacaagtgttttta

SEQ ID NO: 130131 - DNA, 245 bp, Glycine max
ttgggatctccatacgccggatctgctaaaatacgcttgatccatatgggcctcctcgaccacttgtgggacgacaccgtcgccggcccaaggcggaaaacggtctcggcaagctccgaaaacaccacaccttcactttccgacctagctccggcaaggaaacggagggcggtcgcgtgagatcgtacggagacgaatcgtcggaggacgcgacgagagtgacgcgtagtatcatgatcgtgaaa

SEQ ID NO: 130132 - DNA, 252 bp, Glycine max
cgtgttctgatgcatggagtttttggattttgtgaatgcgatacgcggattgtcactgtggatagtcatttcgtgtcacgtggatggacttgccaccccaatgcaggatgttcaggttacaattgattggtttatttcctctcaggaatgtgtttccaggacttattgtgttttaaatcctcaaaatccttttgttttaaataggtggatggggaaactgactttcccccagggcacttcccgaaatgttaa

SEQ ID NO: 130133 - DNA, 260 bp, Glycine max
gttaaagttaatgtagcatgtgctgctgttggcttgacatcaagttacactcgaactccattgttggaatctggtttgcaaaaagacagagggttaattgtggagtattttggaaggatgtcttacgttgctcacaacgttaatcggacccaagagaaagatttgttggagggaaatttttcctttgatattaaatctcgctctagattggaaaaagtttcctctacaagagcgcaatttttaagtgggaaagccttcaa

SEQ ID NO: 130134 - DNA, 265 bp, Glycine max
tcaagattcagcaagtgcgttttggaagcagagaccgaaatacgtcgagatggcccgtacaaagcaaactgctcgtaagtcaactggaggaaaagctcccaggaagcagcttgcaaccaaggctgcacgtaagtctgcaccaacaactggtggtgtgaagaagcctcatcgttatcgccctggaactgttgctcttcgtgagattaggaaataccagaagagcactgagctcctaatcaggatgcttcctttccagaggttggtt

SEQ ID NO: 130135 - DNA, 264 bp, Glycine max
gtttctttgagtgcagcactcaatggtgttgagggtttggactatatggaaagaattcctcttgccacatctgagggttttccccatgtgctttcacgcaacagtggagagaaacgcacaaggagatttgtttctggggatggtgaagagatgacattgcttccgggaaccagtgttgaagaggcttacaatagaggaatagttgaacttgagaaaagtgttcctacattggttggcattgaatagtcccaaggatgagaaact

SEQ ID NO: 130136 - DNA, 266 bp, Glycine max
gtgctttcacgcaaaaatggtgaaaaaggcaaaagaagatttgtttctggggatggtgaagagatgacattgattccgggaaccagtgttgaagaggcttacaacaagctaatagttgaacttgagaaaagtgttcctacattggttggcattgaatgtcccaaggatgagaaacttcctcgtcgcaaaatttttgacaaacctaagacgcgctgcttcactattctccctatggagtttaatcttgtggtccgtcaaaagttttt

SEQ ID NO: 130137 - DNA, 265 bp, Glycine max
gcacaacaaagtacaacacagtgcaggggctcaattatggagaaagcaattcaaagacagagagttctgcttgaacatcttcaacccatttcttcaagttcaaatttttcctctcaaacccatcaagctacggatctctcagcttcattatgttttgctgggaattcttcgcatggtcaaacaggtggatcagatgatgacgtggtgattgtagctgcatatcgtactgccatctgcaaagcaaagcgtgggggctttaaggata

SEQ ID NO: 130138 - DNA, 267 bp, Glycine max
cacacctgctgttggcttgttgttcaaggatggcaatttgtaagaaagatgtttggagagttgaatgtggaatcccttctggatttccgctcacagttatttgcaatagcatttttaatgagatgctcattagatatagctatgaaaaattactgcgccaggctaaagctccaagtatgtttttacaatctttcaaaaattgtgtttctttgtgtgtgtatggtgatgataacttaattagtgttcatgaatatgtcaagccttact

SEQ ID NO: 130139 - DNA, 268 bp, Glycine max
ggtgatgataacttaattagtgttcatgaatatgtcaagccttactttagtggttctaaattgaaaagctttctagctagtcataatatctgcattactgatggtattgacaaaactagtgcaactttgcaatttagaaagttagcagattgtgattttctcaagagaaactttaagcagatgtctaatgttttgtgggtggctcctgaggacaaggcgagtttatggtcacaacttcattatgtttcgtgtaatagtctggaaatgc

SEQ ID NO: 130140 - DNA, 262 bp, Glycine max
cttctccctacattaaatgcacagtctctttcttcatagcatttggaaatttggctgatgacaccatcaattttgaggcttttccccacaagctggtgcagtttggagagattcaggaaaaagttgtgttgaaattttcacaagaggaatttcttacagcttggtcaactcaggtgcgtcctgcaacaactctgttggctgatgggtgtccatatttgtatgctatggtgcatgatagttcagtgtctacaataccaggtga

SEQ ID NO: 130141 - DNA, 263 bp, Glycine max
atctcaaattcattcagattctcccttcccctttttgatttttcttagaaaactcccaacttcgaatcaatatgaagaaagtggtgctaaaggtggaactccatgatgacaaaatcaagaaaaaggccatgaaggcagtatctggtatttcaggggtagagtcagtctcagtggacatgaaggaccagaaagtgactataattggggatgttgatcctgtaacagtagttggaaagtttacaaaattcagtcttggcaagctt

SEQ ID NO: 130142 - DNA, 215 bp, Glycine max
  unsure (1)..(215): unsure at all n locations
atagttggtgcaatgcttttggttgatacctancataccattcctgagaatgcagttcgcggtatanntgttgcgcctttcagaggcggaaggcccattcgggtggttacatttgcgaataccattgtgcagattgaaccagacatgaattcaaggtttcagcttttgacgaccactaccaatggtgattttgttcaagggaaagatctcgcaat

SEQ ID NO: 130143 - DNA, 264 bp, Glycine max
ggacaaaatcggaaccacattcctgggaattgatcttcccaatagaggtatgtggtcctaataatggttttgaaatgtggagttctgagtgggcaaatcaaacttcatggcatttgagtttccttattgacaatcccaaacagtctacagtttttgatattctcttgggaatttctcaagattttgaaattgctggtaatactcttatgccagctttttctgttccacaggctactgccagatcttctgaaaatgcggaatcct

SEQ ID NO: 130144 - DNA, 269 bp, Glycine max
ttggaaaaaaaaaaaaaagttgttcgagatggcacgtacgaggcaaactgctcgtaagtccacaggaggaaaggcacctaggaagcagctcgcaaccaaggctgcacgtaagtctgcaccaactactggtggtgtgaagaagccacatcgttatcgtcctggtaccgttgctcttcgtgagattaggaaataccagaagagtaccgagcttttgatcaggaagctccccttccagaggctggttcgtgaaattgctcaggacttcaaga

SEQ ID NO: 130145 - DNA, 246 bp, Glycine max
ggtaatactcttatgccagctttttctgttccacaggctactgccagatcttctgaaaatgcggaatcctctgcatgatctggaatttgtgttttctttcgtttgttcgtttgtttaattcaataaaggaaattagacatgaccctcttgttgagtatgctctgtctatttgaaaatttccacacctcttttaattgtcgtaatgatgtgtgaagtgtgtgttattttaaaaaaaaaaaataatga

SEQ ID NO: 130146 - DNA, 254 bp, Glycine max
atagttcagtgtctacaatgccatgtgattttgtcattggtgttaagttgacaaccataaacaatatgtgtgcatatgggctcaatcctggtatttcaggttctcgtcttttgggcaccattcctcagtctatttcacagcagactgtttggaatcatatggcaacagtgagaacaccattgaattttgattctagcaagcatagcttttgtcaattttctattgaccttctcggtggaggaattttagtggac

SEQ ID NO: 130147 - DNA, 258 bp, Glycine max
tttttctctaagtctaaggggtgccctgagatcactttgagcaatggtgaaggctgtggcagttcttggcagcagcgagggtgtcactggaactattttcttcactcaggagggaaatggtccaaccaccgtaactggatctcttgctggtcttaagcctggtctccatggcttccatgtccatgccttgggggacactaccaatggttgcctgtcaactggagcgcatttcaatcctaataacaacgagcacggtgc

SEQ ID NO: 130148 - DNA, 260 bp, Glycine max
ggggatgaagaagaatctgagaagtctgtatctgaggtgaatgatgaggatgatgacgaggaaggcagtggcgaggaggaggatgacgattagagaatggactgatgataatagcatttatgtaggttctgatgattttgatcatccgtgtaggtggtctggtcatttccttataaacatatttctctttccaaaaaatatttccctgctcctccttccgtaaattgctcgtctttccaaaacgtgaatagtttaaagaa

SEQ ID NO: 130149 - DNA, 263 bp, Glycine max
  unsure (1)..(263): unsure at all n locations
gggagagggagggttcagctgaagcagatcgagaataaaatcagccgccangtgacgttttccaaaaggagaactgggctgcgcaagaaagccaacgaaatctctgtgctctgtgatgctcaagtagcactgattgtgttcaatgctaaagggaagctttttgagtattcttctgaatccagcatggaaaacgtnctggaacgatatgagagacatgcccatataggacaacttgttggagacggagatgattcacagggaaa

SEQ ID NO: 130150 - DNA, 261 bp, Glycine max
gattttgttacagtttttcaaattattctgtggcaaggagagaagaaaagatcatagaaagtggtgattcttcgaatattgaagagagaaatatggggttgagattgaaggagacattctacttgtcccatggagcaccaactcttgccgtagatgattcaatccctgcgtggaacttcttcaattcgtggaaggagcagtttccgacgagaccctcttccattcttattatctccgcccactgggacacccatgttccca

SEQ ID NO: 130151 - DNA, 255 bp, Glycine max
aatcatctttagttcttcagtaatttattgtgggattctattctaagattttgagaatgtctagctgtgggtgtggaagcagctgcaactgtggcagcaactgcggttgcaacaagtactcttttgacttgagttacgttgagaagacaaccacagagactctagttttgggtgttgggcctgtgaaggccaattggagggtgctgaaatgggtgttgcatctgagaacggtggctgcaactgtggatcaagctg

SEQ ID NO: 130152 - DNA, 258 bp, Glycine max
ccacaagccagtaataatacttagctttgaatctccctgttgacatacatgggtttgcttctctgattacaaaaatcacttttggggagatggggaggttcgaaaaccatgttgtcaaaggaggcatcaagttgccaattgggttcaggttttgtcccaccgatgaagagcttctccttcactacctcaagaagaaggcgtttgctcaacaattacccgcttcagtcatttcagagtttgacgtgtttcagactgagc

SEQ ID NO: 130153 - DNA, 258 bp, Glycine max
ctccttggagggcaacctcgcctcagacacgttcgccatatccgggtcgggtcaaccgggaattatattcgggagcatggattccgggttcagctccaacgcaaacgaagactccaaaacaaccgggttaatgggcatgaaccgagggtcgctctcgtttgtgacccaaatggggtttccgaaattctcgtactgcatctccggcaaagatgcttccggcgtgttactcttcggcgacgccacgttcaagtggcttgg

SEQ ID NO: 130154 - DNA, 260 bp, Glycine max
attgaatcctatcctatcgtagcaaagaaagatagatagagaaccctagcttaccttttcaactttcaagatgcaaatcgtcgttaagacactcactggtaagacgatcacccttgaggtggagagttcagataccatagataatgtaaagtccaagattcaagacaaggaagggatcccaccagaccagcaacgtctcatttttgctggcaagcagcttgaggatggacgtacacttgctgattacaacatccaaaagg

SEQ ID NO: 130155 - DNA, 261 bp, Glycine max
tttggaagatatcccacattcatcttgggaccttttttgctgggacagtgagaaaactttgccaaataatttttctgcagaattgctctcttgcaaattggatactgtcactggccaatattatcctgagtgggctccaattaattgtcgagttcatcgacaaccaattcacatcactgaaggaaattatgtcagaaagcaagatgtcagcattgaatatgatgcatgtacaattccaaatgattgtggttcattggttgt

SEQ ID NO: 130156 - DNA, 252 bp, Glycine max
attccaatatattccgttccgtctgtgtatgtccctacctctcccttcaatatgcagatcttcgtcaagaccctcaccggcaagaccatcacccttgaggtggaaagctctgacaccatcgacaacgtcaaggccaagatccaggacaaggaaggaatccccccggaccagcaacgtctcattttcgccggaaagcaacttgaggacggacgcacccttgctgactacaacatccagaaggagactactctt

SEQ ID NO: 130157 - DNA, 254 bp, Glycine max
ctaccccaatgcaggatgttcaggttacaattgattggtttatttcctctcaggaatgtgttcccaggacctattgtgttttaaatccacaaaatccttttgtgttaaataggtggatggggaaattgactttcccccagggcacttcccgaagtgttaaaagaatgcctctttctatagggggaggagctggtgcaaagaatgctattctcatgaatatgccaaatgctgttctttcaatgtggagatatttt

SEQ ID NO: 130158 - DNA, 252 bp, Glycine max
gggcaacgatatcgtgtgttgcgattatgctagttttgatggtttgattaccaagcaagttatgagcaagatggcagaaatgataaacagtctttgtggtggtgatgaaaaattgatgcgtgaaaggacacacctgctgttggcttgttgttcaagaatggcaatttgtaagaaagatgtttggagagttgaatgtggaatcccttctggatttccgctcacagttatttgtaatagcatttttaatgagat

SEQ ID NO: 130159 - DNA, 253 bp, Glycine max
tgccaccccaatgcaggatgttcaggttacaattgattggtttatttcctctcaggaatgtgttcccaggacttattgtgttttaaatccacaaaatccttttgtgttaaataggtggatggggaaactgactttcccccagggcacttcccgaaatgttaagagaatgcctctttctatagggggaggagctggtgcaaagaatgctattctcatgaatatgccaaatgctgttctttcaatgtggagatat

SEQ ID NO: 130160 - DNA, 256 bp, Glycine max
cacaagctggtgcagtttggagagattcaggaaaaagttgtattgaaattttcacaagaggaatttcttacagcttggtcaactcaggtgcgtcctgcaacaactctgttggctgatgggtgtccatatttgtatgctatggtgcatgatagttcagtgtctacaataccaggtgattttgtcattggtgttaagttgacaaccataaacaatatgtgtgcatatgggctcaatcctggtatttcaggttctcgtc

SEQ ID NO: 130161 - DNA, 256 bp, Glycine max
gagatgacattgattccgggaaccagtgttgaagaggcttacaacaagctaatagttgaacttgagaaaagtgttcctacattggttggcattgaatgtcccaaggatgagaaacttcctcgtcgcaaaatttttgacaaacctaagacgcgctgcttcactattctccctatggagtttaatcttgtggtccgtcaaaagtttttaaattttgtgaggttcattatgaagaaaagggacaagcttagttgtcaag

SEQ ID NO: 130162 - DNA, 256 bp, Glycine max
ctcgagccgattcggctcgaggtttggagagattcaggaaaaaggtgtattgaaattttcacaagaggaatttcttacagcttggtcaactcaggtgcgtcctgcaacaactctgttggctgatgggtgtccatatttgtatgctatggtgcatgatagttcagtgtctacaataccaggtgattttgtcattggtgttaagttgacaaccataaacaatatgtgtgcatatgggctcaatcctggtatttcaggt

SEQ ID NO: 130163 - DNA, 249 bp, Glycine max
ggacttcgtgggtagacttttctatttctctcctttctttcactctcttcttctcactaatccgcattgccgttcaaagtggtcttatttgaaaaacacttgggcgttggtgcaaatgtttgcttcgttaattttctctggagacaacaggtttactgagaaaacaatttttacttgcagagatttggacatcttggttgtttattatacaatagcaactcgatttagaaaatttctaccgcattacat

SEQ ID NO: 130164 - DNA, 250 bp, Glycine max
tgataacttaattagtgttcatgaatatttcaagccttactttagtggttctaaattgaaaagctttctagctagtcataatatcaccattactgatggtattgacaaaactagtgcaactttgcaatttagaaagttagcagattgtgattttctcaagagaaactttaagcagatgtctaatgttttgtgggtggctcctgaggacaaggcgagtttatggtcacaacttcattatgtttcgtgtaat

SEQ ID NO: 130165 - DNA, 252 bp, Glycine max
actggagctacctggtgacaaaattcctagtgtcttgactacagctgatgaaagattggtaggcacaggacatgagggatatgatccttttcttggtggaattcaaaaatatgccactcgcatgatgcccctagatgaagaagttctttctaaggttgcacaagatatggttgaggaatggggtgattgtgttgatgaggaggattcctttgaggaagtttctttgagtgcagcaggcaatggtgttgaggg

SEQ ID NO: 130166 - DNA, 211 bp, Glycine max
aaaccgcgatcacaggttgccgcaccttaaaaccggaaacattagcaatcgttacttgatttcaagaatctctcaatttcttcctacttctttgtgtacggtttcttaagggaaagaaaatcactctctgtgctggccacagacttcgtgaatcattttcttttccacacaacatacgagatttctatatggggatgtgctgcacggcacc

SEQ ID NO: 130167 - DNA, 254 bp, Glycine max
gggcaccattcctcagtctatttcacagcaaactgtttggaatcaaatggcaacagtgagaacaccattgaattttgattctagcaagcagagcttttgtcaattttctattgaccttctcggtggaggaattttagtggacaaaactggagattggatcacacttatacaaaattctccaattagtaacttgttgagagttgctgcttggaagaaaggctgtttaatggttaaaattgtgatgtctgggaatg

SEQ ID NO: 130168 - DNA, 256 bp, Glycine max
atttccataaccttagtcatcttcttctttcatctttctccctaacggtatcgagggaaaaatatggcggaagaacacagatgccaggcaccgcgcttctgcgccaacaattgcggtttctttggcagccctgccacgcagaatatgtgctccaagtgctaccgcgatttccagctcaaggagcagcaatcttccaacgccaagatggttctcaatcagtcgctggttccttcaccgccaccggcggtgatttctc

SEQ ID NO: 130169 - DNA, 255 bp, Glycine max
cttatggcatctggagcatcagagtagatggaaatgatgctcttgctgtttatagtgcagttcacactgctagagaaatcgctataaaagaaaaaaggccagttttaattgaggctctcacttatagagttggacatcactctacatctgatgattcaactaagtaccggggaactgatgagattgaatattggaagatggcaaggaatccagtgaataggttcaaaagatgggtagaaaggaatggttggtgga

SEQ ID NO: 130170 - DNA, 260 bp, Glycine max
gcttcttcgagtttcacagccaagtcgtaaaagggtttcaagggatggaaaacatgcagagcttctggcaatagggtgatgaactccgtgggcactcaaaagcatcggaggatcacaagtggttaatggttgcctcgaaactggccgaacagacaagattgaagggggagcgtgtgaacaaccttgatctttcaaagggacccattgaaacaaggtcaagggataaatttgggttccaggaagagaacaaatttgattct

SEQ ID NO: 130171 - DNA, 105 bp, Glycine max
gctcgagccgcgatcacaggttgccgcaccttaaaaccggaaacaaaagcaatcgttacttgatttcaagaatctctcaatttcttcctacttctttgtgtacga

SEQ ID NO: 130172 - DNA, 248 bp, Glycine max
ctcatctttcaatttcaatcaacggttatacccttttctatttgagcatcatcatgtccaccgcagcgcagcccaaggccaagaaaacggcgtcgtccaagaagcccctctcccatcctaccttcgccgcgatgatagcggaggcgatagcgagtctgaaggagagaaccggttcgagccaatacgcgataaccaaattcatcgaaggcaagcacaaggagttgcctccaacctacaagaagcttgtt

SEQ ID NO: 130173 - DNA, 247 bp, Glycine max
gtcgagccgtgagtgactacaaggtggagatgattaatgatggaatgcaagagttttatacgcattaccatggacccaatgagagtgcttatcatggaggtgtgtggaaagtgagggttgagctgccagatgcttatccttataaatctccttccataggctttatcgataagatctatcacccaaatgttgatgagatgtcaggatcagtttgtcttgatgttatcactcaaacctggagtcccat

SEQ ID NO: 130174 - DNA, 242 bp, Glycine max
gtaaaacccaaaaagattgatgccagattgagacaaagaatagatcctcaatacaatgaggttcaggctcagatggaaacaaatttgtttaaattgtctcttgatgatgttgaaactcctaaaggtttcatgttggatcttaaaatttctcaatctaaaattgcacttcccagaaacacagttggaggaaccattctgcgtcatgacctattggcaaattttttgacagagggcaattttag

SEQ ID NO: 130175 - DNA, 242 bp, Glycine max
cttggaagaaaggctgtttaatggttaagattgtgatgacagaaaatgcagcagtcaaaaggagtgattgggcctcattggtacaagtaactttaacaaacagcaacagtacagagcattttgatgcatgtaagtggacaagaacggaaccacattcctgggaattgatcttccctgtagaggtatgtggtcccaataatggttttgaaatgtggagttctgagtgggcaaatcaaacttca

SEQ ID NO: 130176 - DNA, 235 bp, Glycine max
gtaagaagcttatcttgtcaatctcgtaaatgtgttacgagaattgtatttgcacagtccagaggaagctcgccaattgagaaggaaagctctctctcgtattgaatggctgcaaaaagcagctgtgcctaccatagcacagattgaagagttccattcgatccagaggatgatgaatgctcctgattcaaatgataatattgatctactgttgagcattgatttgttgggttta

SEQ ID NO: 130177 - DNA, 246 bp, Glycine max
agcttttgtcaattttctattgaccttctcggtggaggaattttagtggacaaaactggagattggatcacacttatacaaaattctccacttagtaacttgttgagagttgctgcttggaagaaaggctgtttaatggttaagattgtgatgtctgggaatgcagcagtcaaaaggagtgattgggcctcattggtacaagtgtttttaacaaacagcaacagtacagagcattttgatgcatgt

SEQ ID NO: 130178 - DNA, 245 bp, Glycine max
atttaatccaaacccgtgttctgatgcatggagtttggaatttttgaagcgtaccggatttcactgtgatatcatttgtgtcactggatggactgccaccccaatgcaggatgttcaggttacaattgattggtttattcctctcaggaatgtgttcccaggacttattgtgttttaaatccacaaaatccttttgtgttaaataggtggatggggaaactgactttcccccagggcacttcccg

SEQ ID NO: 130179 - DNA, 233 bp, Glycine max
gtattacttatggtattgacaaaactagtgcaactttgcaatttagaaagttagcagattgtgattttctcaagagaaactttaagcagatgtctaatgttttgtgggtggctcctgaggataaggcgagtttatggtcagtacttcattatgtttcgtgtaataatctggatatgcaagaagcttatcttgtcaatctcgtaaacgtgttacgagtactgtacttgcacagt

SEQ ID NO: 130180 - DNA, 233 bp, Glycine max
gtacaaaatcggaaccacattcctgggaattgatcttcccaatagaggtatgtggtcctaataatggttttgaaatgtggagttctgagtgggcaaatcaaacttcatggcatttgagtttccttattagacaatcccaaacagtctacagtttttgatattctcttgggaatttctcaagattttgagattgctggtaatactcttatgccagctttttctgttccacaggc

SEQ ID NO: 130181 - DNA, 192 bp, Glycine max
ctcgagccggaaattttgataaaccgcgatcacaggttgccgcaccttaaaaccggaaacactagcaatcgttacttgatttcaagaatctctcaatttcttcctacttctttgtgtacggtttcttaagggaaagaaaatcactctctgtgctggccacagacttcgtgaatcatactcttttccacacaa

SEQ ID NO: 130182 - DNA, 230 bp, Glycine max
cctcgagccgaatcggctcgagctcacttctcatccttcgatcatgctcttagttgcttccacttaagatggttctgctaacgaagcgactgggatgatgttgtggctggccctcaacctgagcgtggccttggcaagctcagaaaactcaccaccctcaaaactattgatgaaggagaaagtagcaagctgcagaagacgttgtcgatgccgtcgacaccaacaacccc

SEQ ID NO: 130183 - DNA, 243 bp, Glycine max
gtcacagttatttgtaatagcatttttaatgagatgctcattagatatagctatgaaaaattactgcgccaggctaaagctccaagtatgtttttacaatccttcaaaaattttgtttctttgtgtatgtatggtgatgataacttaattagtgttcatgaatatgtcaagccttactttagtggttctaaattgaaaagctttctagctggtcataatatcaccattactgatggtattgac

SEQ ID NO: 130184 - DNA, 188 bp, Glycine max
gttgctggaagcaaaggaagactgggatatgcttcattgataccatacgttgagccagttgtgcaagctcaaagtgctgaagtttactttgacttcttccctgtggaggttgatagtcaagagggagttgctcacattggtgaattgaaatctggtgtctatgttccactgcctacagtaactaattt

SEQ ID NO: 130185 - DNA, 245 bp, Glycine max
gtacaataccaggtgattttgtcattggtgttaagttggcaactataaacaatatgtgtgcatatgggctcaatcctggtatttcaggttctcgtcttttgggcaccattcctcagtccatttcacagcaaactgtttggaatcaaatggcaacagtgagaacaccattgaatattgatcctagcaagcagagcttttgtcaattttctattgaccttctcggtggaggaattttagtggacaaa

SEQ ID NO: 130186 - DNA, 244 bp, Glycine max
gtaaatgttacatgtggtagtggacgttgtggtttacccaccactgcttggattagttctgcagttaataatcgctcctcagatatcaacaaaaagattcgcacagcacttgggaaaggtaagataggtgtttttcttactagagttgatccttttccagtagctttactggctgttctttttggcgttaagaatgaaattctgagttctaacgccactaaccctatgctgacgcgacttcttg

SEQ ID NO: 130187 - DNA, 237 bp, Glycine max
ttgagaagcactcttcgttcttcgactgtctacgatctgctttctctgaactgtgaaaatgtcgctcggagaaactgcttgttcatacgcagctctcatccttcatgaagatggaattagtgtaactgctgacaagatcagcaccttgttgaaaactgcaaaggttccagtagactcttattggccaaccttgtttgctaaacttgctgagaagaaaaatcttggcgatttgatagc

SEQ ID NO: 130188 - DNA, 152 bp, Glycine max
gatcctgccagtagtcatatgcttgtctcgcagattaagccatgcatgtgtaagtatgaactaattcagactgtgcaactgcgaatggctcattaaatcagttatagtttgtttgatggtatctactactcggataaccgtagtaattcgac

SEQ ID NO: 130189 - DNA, 250 bp, Glycine max
gcaatttcctatatggctaaacacttgtacccaattggcaccaccctcaaaactattgatgaaggagaaagtagcaagctgcagaagacgttgtcgatgccgtcgacaccaacaaccccgatgactccgacgactccaacgacaccgggatcggcccgtaaagctgacaacgtttggagctccgtcttccatcctgggagcaactccgccactcccaccatcggtgctcagatgtttgacaaaccacttc

SEQ ID NO: 130190 - DNA, 244 bp, Glycine max
gtctcatgtgctttcacgcaaaaatggtgataaaggcaaaagaagatttgtttctggggatggtgaagagatgacattgattccgggaaccagtgttgaagaggcttacaacaagctaatagttgaacttgagaaaagtgttcctacattggttggcattgaatgtcccaaggatgagaaacttcctcgtcgcaaaatttttgacaaacctaagacgcgctgcttcactattctccctatggag

SEQ ID NO: 130191 - DNA, 240 bp, Glycine max
cgtgtgcatatgggctcaatcctggtatttcaggttctcgtcttttgggcaccattcctcagtctatttcacagcaaactgtttggaatcaaatggtaccagtgagaacaccattgaattttgattctagcaagcagagcttttgtcaattttctattgaccttctcggtggaggaattttagtggacaaaactggagattggatcacacttatacaaaattctccaattagtaacttgt

SEQ ID NO: 130192 - DNA, 237 bp, Glycine max
cccggatttagtgccgaattaatgccaaaagtccgtgagagagaaagccaggcaaaaatcaagcgttacatgacaatgatggcaacaatgacaaacgaagagttggatagttcaaaccccaagctcatgaatgagtcacgaatgatgcggatagctcgaggtgcaggtcgtcaaattagggaagtgatggagatgttggaagagtacaaacgtcttgcacagatatggagcaaaatg

SEQ ID NO: 130193 - DNA, 119 bp, Glycine max
ttgagattttgataaaccgcgatcacaggttgccgcaccttaaaaccggatacattagcaatcgttacttgacttcaagaatctctcaagtccgtcctagttctctgtgcacgatttct

SEQ ID NO: 130194 - DNA, 240 bp, Glycine max
atgaagcttatcttgtcaatctcgtaaatgtgttacgagaattgtatttgcacagtccagaggaagctcgccaattgagaaggaaagctctctctcgtattgaatggctgcaaaaagctgatgtgcctaccatagcacagattgaagagttccattcgatgcagaggatgatgaatgctcctgattcaaatgacaatatcgatctactgttgagcattgatttgttgggtttacaaggag

SEQ ID NO: 130195 - DNA, 212 bp, Glycine max
tcggaattcggcgtctcccactgtagcttcgaggatattgacgctactgacatttcactggctgattacataggagttgcggcatctaagcacgccacatatgttcctcacaccgccggaaggtactccgtgaagcggttcaggaacgcgcagtgtaccattgttggcacgttccccaactccctcatgatgctcggtagaaactatggcaa

SEQ ID NO: 130196 - DNA, 236 bp, Glycine max
atgctcccaagcagtgggaggaggctcgggactctgaccgcgtgcctgttgaagaatgagccggcgactcataggcagtggctaggataagggaaaccaccggagccgtagcgaaagcgagtcttcacagggcaattgtcactgcttatggacccgaacctgggtgatctatccatgaccaggatgaagcttgggtgaaactaactggaggtccgaaccgactgatgttgaagaat

SEQ ID NO: 130197 - DNA, 167 bp, Glycine max
catgatcatatctttgcatctaggccttatgtccttgctgcggagataatggactatgatttcaaaggtgtagctttcacaccttatggtgatcactggagacagctaaggaagatctttgcattggagctattaagttccaaacgcgtccaatctttccaaacaat

SEQ ID NO: 130198 - DNA, 150 bp, Glycine max
gttttctcaagagagactttaagcagatgtctcatgttttgtgggtggctcctgaggataaggcgagtttatggtcacaacttcattatgtttcgtgtaataatctggaaatgcaagaagcttatcttgtcaattccggaaatgtgttac

SEQ ID NO: 130199 - DNA, 238 bp, Glycine max
ggacaaaatcggaaccacattcctgggaattgatcttcccaatagaggtatgtggtcctaataatggttttgaaatgtggagttctgagtgggcaaatcaaacttcatggcatttgagtttccttattgagaatcccaaacagtctacagtttttgatattctcttgggaatttctcaagattttgagattgctggtaatactcttatgccagctttttctgttccacaggctactgc

SEQ ID NO: 130200 - DNA, 241 bp, Glycine max
attcctcagtctatttcacagcaaactgtttggaatcaaatggcaacagtgagaacaccattgaattttgattctagcaagcagagcttttgtcaattttctattgaccttctcggtggaggaattttagtggacaaaactggagattggatcacacttatacaaaattctccaattagtaacttgttgagagttgctgcttggaagacaggctgtttaatggttaaaattgtgatgtctg

SEQ ID NO: 130201 - DNA, 241 bp, Glycine max
atggacaaaactggagattggatcacacttatacaaaattctccaattagtaacttgttgagagttgctgcttggaagaaaggctgtttaatggttaagattgtgatgtctgggaatgcagcagtcaaaaggagtgattgggcctcattggtacaagtgtttttaacaaacagcaaaagtacagagcattttgatgcatgtaagtggacaaaatcggcaccacattcctgggaattgatct

SEQ ID NO: 130202 - DNA, 236 bp, Glycine max
ctgccagtagtcatatgcttgtctcaaagattaagccatgcatgtgtaagtatgaactaattcagactgtgaaactgcgaatggctcattaaatcagttatagtttgtttgatggtatctactactcggataaccgtagtaattctagagctaatacgtgcaacaaaccccgacttctggaagggatgcatttattagataaaaggtcaactcaggctctgcctgctgctttgatg

SEQ ID NO: 130203 - DNA, 234 bp, Glycine max
gttctttcaatgtggagatattttgttggagatctcgtctttgaagtttctaagatgacttctccctacattaaatgtacagtctctttcttcatagcatttggaaatttggctgatgacaccatcaattttgaggcttttccccacaagctggtgcagtttggagagattcaggaaaaagttgtattgaaattttcacaagaggaatttcttacagcttggtcaactcaggtg

SEQ ID NO: 130204 - DNA, 233 bp, Glycine max
gcaaattcctgctgttgacaagttgtattctactaaggttaataagtttgcaaaaattatgaaccttagacaaagtgttgttggtgatcttaaacttcttactgatgggaagttgtatgagggtaagcatattcctgtatctaatattagtgcaggggaaaatcatgtagttcaaatacccctaatggcacaggaggaaattctgtcttctagtgcaagtgctttcagaactg

SEQ ID NO: 130205 - DNA, 240 bp, Glycine max
gccaagacctacgccaccaaggaggagcaccatcatcgcttcggcgtcttcaagtccaacctccgcagagccaggctgcacgccaagctcgacccctccgccgtccacggcgtcaccaaatactccgatctaactccggccgagttccgccgccagttcctcggcctcaagccgctccgcttcccggcgcacgcccagaaggcgcccatcctccccaccaaggatctcccaaaggatttc

SEQ ID NO: 130206 - DNA, 256 bp, Glycine max
atcttacgttgctcatacgttaatcagccccaagagaaagatttgttggaaggaaatttttcctttgatattaaatctcgctctagattggaaaaagtttcctctacaaaagcacaatttgttagtggaaaaaccttcaaatatgatatagttggtgctggttcacattcttcagaagatttttctgaaaaggaagatcaagaaaaacccaaaaagattgatgccagattgagacaaagaatagacctcaatacaa

SEQ ID NO: 130207 - DNA, 251 bp, Glycine max
tgtaactgactttccccagggcacttcccgaagtgttaagagaatgcctctttctatagggggattagctggtgctaagaatgctattctcatgaatatgccaaatgctgatctttcaatgtagagatagtttgatggagatctcgactttgaagtttctaagatgacttctccctactttaaatgtacagtctactttcttcatagcatttggaaatttggctgatgacaccatcaattttggacttttc

SEQ ID NO: 130208 - DNA, 245 bp, Glycine max
aggcagttctgaatcttatttcaaatataatgttacgagcgttctaaatgatgctggatatgttccgtctaatactgaaaagtatccccttggaggcatcatctctgccattgagaatgcttttcacgcatctcgtcaaatagtttgctcgaaagattctgttgaggaacttcgcctatgcttttataaggacttccagccacgagattgtgctcttggatctgcacattaaaatcaacatgtta

SEQ ID NO: 130209 - DNA, 249 bp, Glycine max
gcgaggagaaagatggaggggaaggagcaggatgtgtcgaggggagcgaacaagttccccgagagacagccgattgggacggcggcgcagagccaagacgacggcaaggactaccaggagccggcgccggcgccgctggttgacccgacggagtttacgtcatggtcgttttacagagcagggatagcagagtttgtggccacttttctgtttctctacatcaccgtcttaaccgttatggagtcgccg

SEQ ID NO: 130210 - DNA, 248 bp, Glycine max
aggcttgtgaaaagttaaccagatagaactttcagactgtgaaatatatgcttcttgtgaaccttgcccaatgtgctttggagcaatccacctctcacgagttaagaggttggtttatggagcaaaggcagaggcagcaattgctattgggttcgatgacttcatttcagatgcattgcaacatactggattctatcagaaggcacaattggagattaaaagggctgatggcaaagaagtaacattgc

SEQ ID NO: 130211 - DNA, 248 bp, Glycine max
aatgcttgtgaaaagcttaccagatagaactttcagactgtgaaatatatgcttcttgtgaaccttgcccaatgtgctttggagcaatccacctctcacgagttaagatgttggtttatggagcaaaggcagaggcagcaattgctattgggttcgatgacttcatttcagatgcattgcgaggtactggattctatcagaaggcacaattggagattaaaagggctgatggcaaagaactaacattg

SEQ ID NO: 130212 - DNA, 250 bp, Glycine max
acttttgcttccttaactattttgttatcctcaattttcaatggctcaatcccattctggaaaaacctcttccatgactgcaatactcctcctgtttatgcttcttatcagtaatacaggcacaacaggtgcacaatctggtgtatgctatggaagagttggcgacaatctgccatcgccacaagaagtagtttcgctttttaaacagtacggcttccaaaggatgagaatctatgatcgaaccatgaag

SEQ ID NO: 130213 - DNA, 257 bp, Glycine max
attctcttatctttctcttgttaactaattaaaatgactctcacaaaggccttgttctttgtgaccgctctatgctgcacctctgccgcatatgctgacaaggtttgacatcacaaaccgatgctcataccctgtttgggccgcggctgtgcctgacggtggcaggaggatgaactcgggccagtcatgggctttagacgtgcctgcaggaacgaaaggggcccgcgtttgggcccgaaccggctgcaattcgacgg

SEQ ID NO: 130214 - DNA, 249 bp, Glycine max
aggctcgagttgggattaggttctgcacgctctgcttccagcgagtgatctttcttcgattcaacaccttaatttgcatacgctgcttcttatacttgagaaatggcacaagaaacctttctaatcacatctgaatctgtaaacgagggtcaccccgacaagctgtgcgaccagatctctgatgcagtgctcgatgcgtgccttgaacaggaccctgacagcaaggttgcctgtgagacatcaccaaga

SEQ ID NO: 130215 - DNA, 162 bp, Glycine max
gaaattttgataaacgcgatcacaggttgccgcaccttaaaaccggaaacaaaagcaatcgttacttgatttcaagaatctctcaatttcttcctacttctttgtgtacgatttcttaagggaaagaaaatcactctctgtgctggccacagacttcgtgaa

SEQ ID NO: 130216 - DNA, 248 bp, Glycine max
atgaaaaattgatggttaaaggacacacctgctgttggcttgcagttcaaggatggcaatttgtaagaaagatgtttggagagttgaatgtggaatcccttctggatttccgctcacagttatttgcaatagcatttttaatgagatgctcattagatatagctatgaaaaattactgcgccaggctaaagctccaagtatgtttttacaatccttcaaaaattttgtttctttgtgttgtatggtga

SEQ ID NO: 130217 - DNA, 134 bp, Glycine max
accgcgatcacaggttgccgcaccttaaaaccggaaacaaaagcaatcgttacttgatttcaagaatctctcaatttcttcctacttctatgagaacgatttcttaagggaaagaaaatcactctctgtgctgg

SEQ ID NO: 130218 - DNA, 258 bp, Glycine max
tcggctcgagtacagcatcgctgcggacggtaaccctccaacaacaacacttccgctgcgaaaaatgtctctggtggcgaacgaggatttccagcacattctgcgtgtgctgaacaccaacgtggatgggaagcagaagataatgttcgcaatgacctccatcaagggtattggaaggagattcgccaacatcgcttgcaagaaggctgatgttgacatgaacaaaagggctggtgagttgactgctgctgattggat

SEQ ID NO: 130219 - DNA, 245 bp, Glycine max
  unsure (1)..(245): unsure at all n locations
tgtcgagcagnactcccaggcgaggagaaagatggaggggaaggagcaggatgtgtcgttgggagctgataagttccccgagagacagccgattgggacggcggcgcagagccaagacgacggcaaggactaccaggagccggcgccggcgccgctggttgacccgacggagtttacgtcatggtcgttttacagagcagggatagcagagtttgtggccacttttctgtttctctacacaccgt

SEQ ID NO: 130220 - DNA, 246 bp, Glycine max
atctaaattgaaagctttctagctggtcataatatcaccattactgatggtattgacaaaactagtgcaactttgcaatttagaaagttagcagattgtgattttctcaagagaaactttaagcagatgtctaatgtttagtgggtggctcctgaggataaggcgagtttatggtcacaacttcattatacatcgtgtaataatctggaaatgcaagaagcttatcttgtcaatctcgtaatgtgt

SEQ ID NO: 130221 - DNA, 250 bp, Glycine max
atcgagccgcaatcctctgtaacttcaaaacatacacctctactctctgtttctcttcactctctctctccctccctcttcaacgaacatggcaattaaaaaccaagacaccgctgtcagagaaatcaagcccaagaacaggatcatcatgggtgctggagggcctgatgatgaggacaataggtggccagcgtggttgaagccactgctgaaagagagcttctttgttcaatgcaagttcatgctgatt

SEQ ID NO: 130222 - DNA, 248 bp, Glycine max
tggaaatgtgaaaagcttatcttgtcaatctcgtaaatgtgttacgagaattgtatttgcacagtccagaggaagctcgccaattgagaaggaaagctctctctcgtattgaatggctgcaaaaagctgatgtgcctaccatagcacagattgaagagttccattcgatgcagaggatgatgaatgctcctgattcaaatgacaatattcatctactgttgagcattgatttgttgggttacaaggag

SEQ ID NO: 130223 - DNA, 235 bp, Glycine max
tttcgagccgaatggctcggatccttttgtgttaaatagggttatggggaaattgagtttcccccagggcacttcgcgaagtgttaaaagaatgcctctttctatagggggaggagctggtgcaaagaatgctattctcatgaatatgccaaatgctgttctttcaatgtggagatattttgttggagatcttgtctttgaagtttctaagatgacttctccttatattaaatgt

SEQ ID NO: 130224 - DNA, 167 bp, Glycine max
aaccgcgatcacggttgccgcaccttaaaaccggaaacaaaagcaatcgttacttgatttcaagaatctctcaatttcttcctacttctttgtgtacgatttcttaagggaaagaaaatcactctctgtgctggccacagacttcgtgaatcattttcttttccaca

SEQ ID NO: 130225 - DNA, 243 bp, Glycine max
aggcatttggtctgataagcagggtcccaatattctgttagatgacacccttccaactgaagttaacaaggatctgatgaatgccgtgaaggattccattgttcagggatttcagtggggtgcacgagaagggcctctctgtgatgagcccatcagaaatgttaaattcaagattgttgatgcaaagattgctaatgagtcactccatcgggggtctggccagatcattccaacagacgacga

SEQ ID NO: 130226 - DNA, 246 bp, Glycine max
ctagctcaaagtgtgaagtttactttgacttcttccctgtggaggttgatagtcaagagggagttgctcacattggtgaattgaaatctggtgtctatgttccactgcctacaaaaactaatttggtggaaactcccaaggaatggcaactggatctaccttgtgacaaaattcctagtgtcttgactacaactgatgagagattggtaggcacagaacatgagggatatgatcctttcttggtgg

SEQ ID NO: 130227 - DNA, 248 bp, Glycine max
  unsure (1)..(248): unsure at all n locations
ctcgtttcattcttttccttcttttgtcttcccttagtttgaagatcatggggagagggagggttcagctgaagcagatcgagaataaaatcagccgccaagtgacgttttccaaaangagaactgggctgcgcaagananccaacgnnatctctgtgctctgtgatgctcaagtanccctgattgtgtcaatgctaaagggaaacttttgagtattcttctgaatccagcatggaancgtgctggaa

SEQ ID NO: 130228 - DNA, 244 bp, Glycine max
tgttgatagtcagagggagttgctcacattggtgaattgaaatctggtgtctatgttccactgcctacaaaaactaatttggtggaaactcccaaggaatggcaactggatctaccttgtgacaaaattcgtagtgtcttgactacaactgatgaaagattggtaggcacagaacatgagggatatctcccttttcttggtggaattcaaaaatatgccactcccatgatgcccctagtgaaga

SEQ ID NO: 130229 - DNA, 204 bp, Glycine max
actcatcgtatcaaaggaatgattaaaatggtggatacagttggtattcctgagaatacaggtatagcattggcctgtgctatgaatagttcttttagggggcgtgccagttctgatatttacaccatctgctctcaagactgtgaattatggaatcctgcttgcacaaaagcaatgactatgtcatttaatccacacccgtgt

SEQ ID NO: 130230 - DNA, 244 bp, Glycine max
attgttattatatctctctctctctcccccaagaaattcaacagagttttgattaacttgaaattgttcaacaagaaatggagaattcattgggaaagtacggaaaagagcttaatctcgaggctacagagttgaggttggggttgcctggaagcgatgagcctgagaaacgttctgctgttagaagcaacaagagatcttcaccagaagcaagtgaagaagagtgcataagcaaggcaacatg

SEQ ID NO: 130231 - DNA, 237 bp, Glycine max
ctcgtattcaatccgacgcgcgctagatcaaccgttgaactacgcgcgcatgtacctcgcggatcttcttccggcgaccgtccggcgaatcatctacttcgactccgacctcatcgtcgttgatgacgtggcgaactatggagcattgatctccacgcgcgcgtgctcggcgctcccgagtactgccacgctaacttcacgaactacttcacgcaccgcttctggacgacgctagct

SEQ ID NO: 130232 - DNA, 243 bp, Glycine max
atcaaacatatggttgatgattcggtggaatcagatgagaatgagactcagaaaggggttgactataatgggccgattcgggtttgcgggtaacttggttgctttcttagagagaattgatgttgaatttgtcaagagcttgcagtgcatagatcgtcatacccgggactatgttgagagactcagggatgagcccttgtctctggttcttgcgcagaatgttcaggaatatccgtaagagtt

SEQ ID NO: 130233 - DNA, 245 bp, Glycine max
actttttaacgagatgctcattagatatagctatgaaaaattactgcgccaggctaaagctccaagtatgtttttacaatccttcaaaaattttgtttctttgtgtgtgtatggtgatgataacttaattagtgttcatgaatatgtcaagccttactttagtggttctaaattgaaaagctttaatcctagtcataatatcaccattactgatggtattgacaaaactagtgcaacttgcaatt

SEQ ID NO: 130234 - DNA, 232 bp, Glycine max
ggagaactagaactagggtttcatctttgccatcagtaaacgacaatgatttacgacgttaactctcctcttttccgatccttcctcagccagaagggaggctcctctgataagaggaaatcggacgaacagaagccaaaagagcagaaacccaaagccagcgagaacaaacctataatgactgagtgataacagctgagctgcattcagttgtagaatgaaaataggtggt

SEQ ID NO: 130235 - DNA, 242 bp, Glycine max
ctacgacctttcaagttcaagctgttgaaatcttggattagtgctcccactctcctatctggtataggacttcgtgggtagacttttctatttctctcctgtctttcactttcttcttctcactgatccgcattgccgttcaaagtggtcttatttgaataacacttgggcgttggtgcaaatgcttgcttcgttaattatctctggcgacaacaggctcactgagaaaacgattttacttg

SEQ ID NO: 130236 - DNA, 242 bp, Glycine max
attcctcatctatttcacagcaaactgtttggaatcaaatggcaacagtgagaacaccattgaattttgattctagcaagcagagcttttgtcaattttctattgaccttctcggtggaggaattttagtgggcaaaactggagattggatcacacttatacaaaattctccaattagtaacttgttgagagttgctgcttggaagaaaggctgtttaatggttaaaattgtgtgtctggga

SEQ ID NO: 130237 - DNA, 245 bp, Glycine max
ataaactttaggcagatgtctaatgttttgtaggtagctcttgaggacaaggcgagtttatggtcacaacttcataatgtttcagtctctaatctggaaatgcaagaagcttatcttgtcaatctcgtaaatgtgttacgagaattgtatttgcacagtccagaggaagctcgccaattgagaaggaaagctctctctcgtattgaatggctgcaaaaagctgatgtgcctaccatgcacagatt

SEQ ID NO: 130238 - DNA, 247 bp, Glycine max
ttagcattgcattcaaaaacttaagttcattccttgtgttttgctttcttcctcaaaaccaaacatgtcgaacacatgcggcaactgcgactgcgctgacaagacactctgcaacaagggaaacagctatggtgttaatgtagagactgagctgagttacatcgagactgttgtcatggatgttccagcagctgagcatgatgggatgtgtcaatctggcactaactgcacttgcacggctgcactg

SEQ ID NO: 130239 - DNA, 242 bp, Glycine max
ggaaaatagcctcacaaaagcaaagacaaaacaaaccaaggacgagaacacgatgttgcttgaacttgcacttggtttattggttttggctctgtttctgcacttgcgtcccacacacaaagcaaacgcaaaaacacatcgccatctcccaaacccaccaagcccaaagcctcgtcttcccttcatacgacaccttcatctcttaaaagacaaacttctccactacgcactcatcgcctctc

SEQ ID NO: 130240 - DNA, 239 bp, Glycine max
gtacttcttgtctaaccgagagagcgtaagggcaaacacaattttttttatcttcttttctattttttgtagagagagagagagagaaaatgttggggatcttcagcagttcagctttgtcgtcgccggctgagctggtggccgctggcagcaggacgccgtcgccgaagacgacggcggggaagctgctgaaccggttcgtggagagcaaggcgtcggcggtgtcgctgcggtggggg

SEQ ID NO: 130241 - DNA, 239 bp, Glycine max
aaaacaagttggaggaaccattctgcgtagtgacctattggcaaattttttgacagagggcaattttagagcaagtgttgatttgcagcgcactcatcgtatcaaaggaatgattaaaatggtggccacagttggtattcctgagaatacaggtatagcattggcctgtgcttagaatagttcttttagggggcgtgccagttctgatatttacaccatctgctctcaagatgtgaatt

SEQ ID NO: 130242 - DNA, 242 bp, Glycine max
agcatttctgcagaattgctctcttgcaaattggatactgttactggccaatattatcctgagtgggctccaattaattgtcgagttcatcgacaaccaattcacatcactgaaggaaattatgtcagaaagcaagatgtcagcattgaatatgatgcatgtacaattccaaatgattgtggttcattggttgttgccaaagttggaaatcacaaacaaatcgttggtttccatgtgctgga

SEQ ID NO: 130243 - DNA, 242 bp, Glycine max
gttcacattatttgcaatagcatttttaatgagatgctcattagatatagctatgaaaaattactgcgccaggctaaagctccaagtatgtttttacaatctttcaaaaattttgtttctttgtgagtgtatggtgatgataacttaattagtgttcatgaatatgtcaagacttactttagtggttctaaattgaaaagctttctagctggtcataatatcaccattactgatgtattgac

SEQ ID NO: 130244 - DNA, 240 bp, Glycine max
gtaaaattgatgcgtgaaaggacacacctgctgttggcttgttgttcaaggatggcaatttgtaagaaagatgtttggagagttgaatgtggaatcccttctggatttccgctcacagttatttgcaatagcatttttaatgagatgctcattagatatagctatgaaaaattactgcgccaggctaaagctccaagtatgtttttacaatccttcaaaaattttgttgtcttgtgtgtg

SEQ ID NO: 130245 - DNA, 259 bp, Glycine max
ggagagttgaatgtggaatcccttctggatttccgctcacagttatttgcaatagcatttttaatgagatgctcattagatatagctatgaaaaattactgcgccaggctaaagctccaagtatgtttttacaatccttcaaaaattttgtttctttgtgtgtgtatggtgatgataacttaattagtgttcatgaatatgtcaagccttactttagtggttctaaattgaaaagctttctagctggtcataatatcac

SEQ ID NO: 130246 - DNA, 263 bp, Glycine max
ggctcgagtcgtgttctactgcaggattttactggagtccctgctgttgttgacctggcttgcatgcgtgatgctatgaataagcttggcagtgattctaataagattaatcctctggttcctgttgatcttgtcattgatcattcagttcaagttgatgtagcaaggtcagagaatgcagtgcaagccaatatggagcttgagtttcagagaaacaaggagagatttgcttttcttaaatgggggtcaaatgctttccgtaa

SEQ ID NO: 130247 - DNA, 253 bp, Glycine max
ctgaataccattgtgcagattgaaccagacatgaattcaaggtttcagcttttgagtaccactaccaatggtgattttgttcaaggaaaagatctcgcgatggttaaagttaatgtagcatgtgctgctgttggcttgacatcaagctatactccgactccattgttggaatctggtttgcaaaaagacagagggttaattgtggagtattttggaaggatgtcttacgttgctcataacgttaatcagcccc

SEQ ID NO: 130248 - DNA, 250 bp, Glycine max
ggtgatgataacttaattagtgttcatgaatatgtcaagccttactttagtggttctaaattgaaaagctttctagctggtcataatatcaccattactgatggtattgacaaaactagtgcaactttgcaatttagaaagttagcagattgtgattttctcaagagaaactttaagcagatgtctaatgttttgtgggtggctcctgaggataaggcgagtttatggtcacaacttcattatgtttcgt

SEQ ID NO: 130249 - DNA, 254 bp, Glycine max
  unsure (1)..(254): unsure at all n locations
ggancaactcaacacaaaccaaaactnaagcnaaaattctcngctctctctctcatctcgagatcatagtatcatattcaatatcatttcataccaaacacatggctttggaagcnctcaactcaccaacaacaaccgctccatcttttccctttgacgacccaactattccatgggcgaaacgaaaacgnnncnagcgttctcgcgannnnncttctgaagaagagtaccncgccctctgcctcatcatgctg

SEQ ID NO: 130250 - DNA, 252 bp, Glycine max
tgtcgagccgtttttaatgagatgctcattagatatagctatgaaaaattactgcgccaggattaagctccaagtatgtttttacaatccttcaaaaattttgtttcttgtagtgtgtatggtgatgataacttaattagtgttcatgaatatgtcaagccttactttagtggttctaaattgaaaagctttctagctggtcataatatcaccattactgatggtattgacaaaactagtgcaactttgcaa

SEQ ID NO: 130251 - DNA, 252 bp, Glycine max
gtaagatgtttggagagttgaatgtggaatcccttctggatttccgctcacagttatttgtaatagcatttttaatgagatgctcattagatatagctatgaaaaattactgcgccaggctaaagctccaagtatgtttttacaatccttcaaaaattttgtttctttgtgtgtgtatggtgatgataacttaattagtgttcatgaatatgtcaagccttactttagtggttctaaattgaaaagctttct

SEQ ID NO: 130252 - DNA, 251 bp, Glycine max
gtcaattttgaggcttttccccacaagctggtgcaccttggagagattcaggaaaaagttgtgttgaaattttcacaagaggtatttcttacagcttggtcaactcaggtgcgtcctgcaacaactctgttggctgatgggtgtccatatttgtatgctatggtgcatgatagttcagtgtctacaataccaggtgattttgtcattggtgttaagttggcaactataaacaatatgtgtgcatatgggct

SEQ ID NO: 130253 - DNA, 253 bp, Glycine max
ggaattttagtggacaaaactggagattggatcacacttatacaaaattctccaattagtaacttgttgagagttgctgcgtggaagaaaggctgtttaatggttaaaattgcgatgtctgggaatgcagcagtcaaaaggagtgattgggcctcattggtacaagtgtttttaacaaacagcaacagtacagcgcatttcgatgcatgtaagtggacaaaatcggaaccacattcctgggaattgatcttcc

SEQ ID NO: 130254 - DNA, 265 bp, Glycine max
attcggctcgaggtaaagcacaatttgttagtggaaaaaccttcaaatatgatatagttggtgctggttcacattcttcagaagatttttctgaaaaggaagatcaagaaaaacccaaaaagattgatgccagattgagacaaagaatagatcctcaatacaatgaggttcaggctcagatggaaacaaatttgtgtaaattgtctcttgatgatgctgaaactcctaaaggggccatgttggatcttaaaatttctcaatcgaa

SEQ ID NO: 130255 - DNA, 253 bp, Glycine max
gcctgcagtaattggagggtcttacacctttgttccaaccacaatctcaaagatcgctgctggccgattcagtgatgaaccagatcctatagagaaattcaagaggataatgaggtcaatccaaggtgctcttattgttgcttcgactctacaaatagtactgggcttcagtggtctgcggcgtaatgttgtcaggttcttaagtccactttcgtcagttcctttggtatctcttgttggttttgggctgtat

SEQ ID NO: 130256 - DNA, 248 bp, Glycine max
  unsure (1)..(248): unsure at all n locations
attactgagtaagggcaacgatattctgtgttgcgattatgctagttttgatggtttgattaccacacaacatatgagtttgatcgcaaaaatgataaacagtcttcgtagtcatgatgcacaattgatgcgtgaaaggacacatctgctgttggcttgttgttcaaagatggcaatcgtgtaaaccananannnggagagntgaangnggaatcccatctgagattccgctcacagttatttgcaat

SEQ ID NO: 130257 - DNA, 247 bp, Glycine max
ggattttcttcatccttctctgttctcctagaacttgattacttgaacattccctatgacagatgaggtggttcttctggatttctggccaagtccatttgggatgagggtcaggattgcacttgctgaaaagggtatcgaatatgagtacaaagaagaggacttgaggaacaagagtcctcttctcttacaaatgaacccggctcacaagaagattccggttctcatccacaatggcaaacccatt

SEQ ID NO: 130258 - DNA, 248 bp, Glycine max
ggaatgtctcaaggatgagaaacttcctcgtcgcaaaatttttgacaaacctaagacgcgctgcttcactattctccctatggagtttaatcttgtggttcgtcagaagtttttaaattttgtgaggttcattatgaagaaaagggacaagcttagttgtcaagttggaatcaacccatactccatggaatggactggtttggccaatagattactgagtaagggcaacgatattctgtgttgcgatt

SEQ ID NO: 130259 - DNA, 248 bp, Glycine max
ggacattgtttgtctcggaaaagcaaagaaacatggtattctgggatgaaggaaaaatttgtacaaatgatgcagagcatctatgaaacagaagttacagattggccagtaccactgaaaatcatttctggaaccattcttgcaacaatcttgggaacaaccttctggaaactcttttcctttcttagagatgctcgtaatgggggagtttttgttggtaatgttgcttcagctctcacaacttcaag

SEQ ID NO: 130260 - DNA, 258 bp, Glycine max
ttcggctcgagcttgcggctagggttttagcgcagttcttctagatttaaggaagatgggtaaggcaaaggttcacatcagtattgtggttattggccatgttgactctgggaagtccactaccactggccacctgatctacgagcttgtaggcattgacaatcgcgctattgagagatttgagaaggaagctgctgagatgaacaagaggtcagtcaagtatgcctgggtgcttgataagcttaaggctgagcgtga

SEQ ID NO: 130261 - DNA, 250 bp, Glycine max
cttgttggtaaagaaagagaagaaaagagtggactcgaagacgaagacgaccatggaggacgcatcagcatcaaagttcatcccacaccaaatcggaggggtccaaaacgacgtgcttcgatttggtctccatggagtcaagagcgacatcgttggttcccaccctcttcaatcttcactccaatctacaaggagaatggatgaagcgatgaagaagcaatgcaaagttaacctgtacggaactgctttt

SEQ ID NO: 130262 - DNA, 250 bp, Glycine max
ggcttttccccacaagctggtacttgttggagagattcaggaaaaagttgtattgaaattttcacaagatgaatttcttatagcttggtcaacccaggtgcgtcctgcaacaactctgttggctgatgggtgtccatatttgtatgctatggtgcatgatagttcagtgtctacaataccaggtgattttgtcattggtgttaagttgacaaccataaacaatatgtgtgcatatgggctcaatcctggt

SEQ ID NO: 130263 - DNA, 253 bp, Glycine max
ctcaaacttcccctctctacgccgttcctcccaaatggatgcaccaatggcattttggggtgttgaggttaaggttggtcagaccgtgacagttgacccaatggatcctgtggattcatacatacacatatctcaggttgcgctcggagaggcgaaaaaggagaaacctaatgagtcttcggttttgtatttgacagttggtgatcagaagattgtcttgggaaccctttctagggatggcattcctcatcta

SEQ ID NO: 130264 - DNA, 184 bp, Glycine max
ttgaacttttgataaaccgcgatcacaggttgccgcaccttacaaccggaaacaaaagcaatcgttatgtgatttcaagaatctctcaatttcttcctacttctttgtgtacgatttcttacgggaaagaaaatcactctctgtgctggccacagacttcgtgaatcattttcttttccacaca

SEQ ID NO: 130265 - DNA, 254 bp, Glycine max
  unsure (1)..(254): unsure at all n locations
agcgttcattttttctcgcgcccaaatacaaaatcacatcacaacagggttccggcgaccatgtcngatgctccggcgagtccatnnnnnnnnnnnnnnnnnnnnnnnnnnnagannggcgagcacagtccccgctccaatttccgcgagcaggaccgcttcctccccatcgccaacatcagccgcatcatgaagaaagcgcttccttcccaacgggaaaatcgccaaggaagccaaggaaaccgtgcaggaat

SEQ ID NO: 130266 - DNA, 248 bp, Glycine max
caggtatatcattggcctgtgctatgaatagttcttttagggggcgtgccagttctgatatttacaccatctgctctcaagactgtgaattatggaatcctgcttgcacaaaagcaatgactatgtcatttaatccaaacccgtgttctgatgcatggagtttggaatttctgaagcgtaccggatttcattgtgatatcatttgtgtcactggatggactgccactccaatgcaggatgttcaggtt

SEQ ID NO: 130267 - DNA, 249 bp, Glycine max
cgggaaataaagcaagagctgtaaaagctggtatagtagtcccactgatacagtttctgaaggatgctgggggtggaatggtagatgaagcactagctattatggcaatccttgcaagccaccatgaaggccgggtagcgattggtcaggccgagccaattcctattcttgttgaggttatacgaaccggctctccacgcaaccgagaaagccctgctgctgtcttgtggtcactatgcactggagatc

SEQ ID NO: 130268 - DNA, 247 bp, Glycine max
ctttttacttcccctatggcccgtcaccccttgctcttagccctcctcctcttcgccgccgtggccaccgccgcgatggcgctggcgcgtccgacgccgacgacatcctgatccgtcaggtggtgccagatgttggcgaagccgaagaggaggacaacctgctgaacgccgagcaccacttcgcgagcttcaaggccaagttcaccaagacctacgccaccaaggaggagccacatcatcgcttcgg

SEQ ID NO: 130269 - DNA, 248 bp, Glycine max
gtaagatggaggtgattagaaatagaggcattcctgctgatgttcttgcaaagcgagctcatgaatttgaaaaacatgttgctcatgaaagcctcaaggatcaaattcctgctgttgacaagttgtattctactaaggttaataagtttgcaaaaattatgaaccttagacaaagtgttgttggtgatcttaaacttcttactgatgggaagttatatgagggtaagcatattcctgtatctaatatt

SEQ ID NO: 130270 - DNA, 247 bp, Glycine max
gtttggagagattcaggaaaaagttgtattgacattgtcacaagaggagtttcttacagcttggtcaacccaggtgcgtcctgcaacaactctgttggctgatgggtgtccatatttgtatgctatggtgcatgatagtgcaatgtctacaataccaggtgattttgtcattggtgttaggttgacaaccataaacaatatgtgtgcatatgggctcgctcctggtatttcaggttctcgtcttttg

SEQ ID NO: 130271 - DNA, 247 bp, Glycine max
ggagaatgctggaaaactcattattgcggtcttcccaagctttggagagcgttatttatcatctgtgctctttgaatccgtgaagcgagaagcagagagcatggtcttcgagccttgaatatgaagttatacgagccatttgctgcttttcaagttgcattctctccttgggttgtgtatctattttttctcttatggatctgaaaaataaaaaatggtttatgtttggttgttaattgactacgat

SEQ ID NO: 130272 - DNA, 250 bp, Glycine max
gcgcagaggagagcagcagagaagagagaaaacggcactgcagccgtagaaggaaaaccgaccatggtgcacgtctgccttttacaggaactatggtaagacgtttaagacgccccgccgtccgtacgagaaggagcgtctagacgcggagctgaagctggtgggggagtacgggctgcggtgcaagagggagctgtggagggtgcagtacgcgctcagccgcatccgcaacaacgcgcggaatctcctt

SEQ ID NO: 130273 - DNA, 246 bp, Glycine max
ggaaaaagtttcctctacaaaagcacaatttgttagtggaaaaactttcaaatatgatataattggtgctggttcacattcttcagaagattttcctgaaaaggaagatcaagaaaaacccaaaaagattgatgccagattgagacaaagaatagatcctcaatacaatgaggttcaggctcagatggaaacaaatttgtttaaattgtctcttgatgatgttgaaactcctaaaggttccatgtt

SEQ ID NO: 130274 - DNA, 253 bp, Glycine max
gggtaagcatattcctgtatctaatattagtgcaggggaaaatcatgtagttcaaataccctaatggcacaggaggaaattctgtcttctagtgcaagtgatttcagaactgcaatggtgagtaaaaatagcaagcctcaagctactgcaatgcatgtgggagctatagaaattatcattgatagtttcgcaagtcctgactgcaacatagttggtgcaatgcttttggttgatacttatcataccaatcctg

SEQ ID NO: 130275 - DNA, 244 bp, Glycine max
caaaaatctgactcagaaagtgcgagtccaaattgttacatctgaaaagagttactggcatgtgtatgatcctgacaagtttcagatgtttgacagcagtgagataggtctttattctaatcccactttggaagatatcccacattcagcttgggaccttttttgctgggacagtgagaaaactttgccaaatcaatttgtctgcagaattgctctcttgcaaattggatactgtcactggcca

SEQ ID NO: 130276 - DNA, 244 bp, Glycine max
gcagaaattatgaaccttagacacagtgttgttggtgatcttaaacttcttactgatgggaagttgtatgagggcaagcatattcctgtatctaagattagtgcaggggaaaatcatgtagttcaaatccccctaatggcacaggaggaaattctggcctctagtgcaagtgctttcagaactgcaatggtgagtaaaaatagcaagcctcaagctactgcaatgcatgtgggagctatagaaa

SEQ ID NO: 130277 - DNA, 244 bp, Glycine max
  unsure (1)..(244): unsure at all n locations
tgcagttttgaaagttagcagattgtgagtttctcaagagatacntnaggctngtgtctaatgttttgtgggtggtgcctgaggacaaggcgagtttatggtcacaacttcattatgtttcatgtaataatctggaaatgcaagaagcttatcttgtcaatctcgtaaatgtgacgtgagaattgtatttgcacagtccagaggaagctcgccaattgagaaggaaagctctctctcgtattga

SEQ ID NO: 130278 - DNA, 193 bp, Glycine max
cctcgagccggaaattctgataaaccgcgatcacatgttgccgcaccttaaaaccggaaacaaaagcaatcgttacttgatttcaagaatctctcaatttcttcctacttctttgtgtacgatttcttaagggaaagaaaatcactctctgtgctggccacagactccgtgaagcagtttcttttccacacaa

SEQ ID NO: 130279 - DNA, 187 bp, Glycine max
tgaaattttgataaaccgcgatcacaggttgccgcaccttaaaaccggaaacaaaatcaatcgtcacttgatttcaagaatctctcaatttcttcctacttctttgtgtacggtttcttcagggaaagaaaatcactctctgtgctggccacagacttcgtgaatcattttcttttccacacaacat

SEQ ID NO: 130280 - DNA, 245 bp, Glycine max
ggcagtattaacaagcattgttttgaaacgtaatgtgaccatgttggatatagcaagcactcgcatgcttggtcagtatggtttccttgctaaggtgttttcaatctttgaagagttaggcatatcagttgatgttgtagctacaagtgaagtcagtgtttccttgacactggatccatcaaagctatggagcagagagctaattcagcaggcaagtgaacttgaccatgttgtagaagaactcg

SEQ ID NO: 130281 - DNA, 247 bp, Glycine max
ggacttattgtgttttaaatccacaaaatccatgagttgctaaataggtggatggggatactgactttcccccagggcacttctcgaaatgttacgagaatgcctctttctatagggggaggtgctggtgcaaagaatgctattctcatgaatatgccaaatgctgttctttcaatgtggagatattttgttggagatctcgtctttgaagtttctaagatgacttctccctacattaaatgtacag

SEQ ID NO: 130282 - DNA, 251 bp, Glycine max
ggttaattgtggagtactttggaaggatgtcttacgttgctcataacgttaatcagccccaagagaaagatttgttggagggaaatttttcctttgatattaaatctcgctctagattggaaaaagtttcctctacaaaagcacaatttgttagtggaaaaactttcaaatatgatataattggtgctggttcacattcttcagaagattttcctgaaaaggaagatcaagaaaaacccaaaaagattgat

SEQ ID NO: 130283 - DNA, 246 bp, Glycine max
cttgcacaaaagctatgactatgtcatttaatccaaacccgtgttccgatgcatggagtttggaatttttgaagcgtaccggatttcactgtgatatcatttgtgtcactggatggactgccaccccaatgcaggatgttcaggttccaattgattcgtttatttcctctcaggaatgtgttcccatgacttattgtgttttaaatccacaaaatccttttgtgttacataggtggatggggaaac

SEQ ID NO: 130284 - DNA, 247 bp, Glycine max
gtttggagagttgaatgtggaatcccttctggatttccgctcacagttatttgcaatagcatttttaatgagatgctcattagatatagctatgaaaaattactgcgccaggctaaagctccaagtatgtttttacaatctttcaaaaattttgtgcctttgtgtgtgtatggtgatgataacttaattagtgttcatgaatatgtcaagccttactttagtggttctaaattgaaaagctttctag

SEQ ID NO: 130285 - DNA, 245 bp, Glycine max
ggcagtattaacaagcattgttttgaaacgtaatgtgaccatgttggatatagcaagcactcgcatgcttggtccgtatggtttccttgctaaggtgttttcaatctttgaagagttaggcatatcagttgatgttgtagctacaagtgaagtcagtgtttccttgacactggctccatcaaagctatggagcagagagctaattcagcaggcaagtgaacttgaccatgttgtagaagaactcg

SEQ ID NO: 130286 - DNA, 242 bp, Glycine max
gttggcttcagttaaagtcattaggaacatacaaactagtcaatcggcgggatatgggtttattgagtctactagtcgagctggtgccgagagagtccttcaaacatacaatggcaccattatgccgaatggcgggcagtacttcagattgaactgggcaacttttagtgcaggtgagaggcgtcatgatgacagcccggatcacaccatatttgttggagacctggctgcagatgttacgg

SEQ ID NO: 130287 - DNA, 245 bp, Glycine max
gtgctggttcacattcttcagaagattttcctgaaaaggaagatcaagaaaaacccaaaaagattgataccagattgagacaaagaatagatcctcaatacaatgaggttcaggctcagatggaaacaaatttgtttaaattgtctcttgatgatgttgaaactcctaaaggttccatgttggatcttaaactttctcaatctaaaattgcacttcccaaaaacacagttggaggaaccattctg

SEQ ID NO: 130288 - DNA, 221 bp, Glycine max
  unsure (1)..(221): unsure at all n locations
tgttgagccagttgtgcaagctcaaagtgctgaagtttactttgacttcttccctgtggaggttgatagtcaagagggagttgctcacattggtgaattgaaatctggtgtctatgttccactgaatataagaagaaanttggtggaaactcccagggaatggcaactggatctaccttgtgacaaaattccagcnngtcttgactacaactgatgagaga

SEQ ID NO: 130289 - DNA, 244 bp, Glycine max
ggaagaaggaaaaaaggtgaaatatagagtgaagaagaagaaatagagggttttggtgcttgaatcgtgaaaatgtggagaaaccagtacgacacggacgtgacgacacggagcccggcggggaggctgttccaggtggagtacgcgacggaggcggtgaagcagggctcggcggcgatagggctccgatccaagacccacgtggtcctcgcatgcgtcaacaaggctaactccgaactctcat

SEQ ID NO: 130290 - DNA, 249 bp, Glycine max
cagtaatggtggccacagttggtattcctgagacgccaggtatagcattggcctgtgctatgaatagttcttttagggggcgtgccagttctgatatttacaccatctgctctcaagactgtgaattatggaatcctgcttgcacaaaagcaatgactatggcatttaatccaaacccgtgttctgatgcatggagtttggaatttttgaagcgtaccggatttcactgtgatatcatttgtgtcactg

SEQ ID NO: 130291 - DNA, 244 bp, Glycine max
gctccatcacctaatcacttccccacttcccctgtacgtcacgtttagttcgcacaaggtttttaaaaaatggctgatgctgaggacattcaacctcttgttgttgataatggaactggaatggtcaaggcgggttttgcaggtgatgacgctcctagggccgtgttccccagtattattgggcgaccacgccataccggtgtaatggttgggatgggtcagaaggatgcttacgtgggtgatg

SEQ ID NO: 130292 - DNA, 244 bp, Glycine max
gtttggagagttgaatgtggaatcccttctggatttccgctcacagttatttgtaatagcatttttaatgagatgctcattagatatagctatgaaaaattactgcgccaggctaaagctccaagtatgtttttacaatccttcaaaaattttgtttctttgtgtgtgtatggtgatgataacttaattagtgttcatgaatatgtcaagccgctctttagtggttctaaattgaaaagctttc

SEQ ID NO: 130293 - DNA, 243 bp, Glycine max
gggaaatgcaagaggcttatcttgtcaatcacgtaaatgtgttacgagaactgtatttgcacagtccagaggaagctcgccaattgagaaggaaagctctctctcgtattgaatggctgcaaaaagctgatgtgcctagcatagcacagattgaagagttccattcgatgcagaggatgatgaatgctcctgattcagctgataatattgatctactgttgagcattgatttgttgggtttac

SEQ ID NO: 130294 - DNA, 244 bp, Glycine max
caggctgaacactctcctatttgatataggacttcgtgtcagatttaaacttcttctgtctctttctcacttctctgtttaatttcaagttcaagctggtcaaatcttggattagtgctccccctctcctatctggtctaggacttcgtgggtagacttttctatttctctcctttctttcactctcttcttctctctgatccgcattgccgttcaaagtggtcttatttgaaaaacacttggg

SEQ ID NO: 130295 - DNA, 240 bp, Glycine max
gttgtttaatggttaagattgtgatgtctgggaatgcagcagtcaaaaggagtgattgggcctcattggtacaagtgtttttaacaaacagcaacagtacagagcattttgatgcatgtaagtggacaaaatcggaaccacattcctgggaattgatcttcccaatagaggtatgtggtcctaataatggttttgaaatgtggagttctgagtgggcaaatcaaacttcatggcatttga

SEQ ID NO: 130296 - DNA, 242 bp, Glycine max
ggataaggcgagtttatggtcacaacttcattatgtttcgtgtaataatctggaaatgcaagaagcttatcttgtcaatctcgtaaatgtgttacgagaattgtatttgcacagtccagaggaagctcgccaattgagaaggaaagctctctctcgtattgaatggctgcaaaaagctgatgtgcctaccatagcacagattgaagagttccattcgatgcagaggatgatgaatgctcctg

SEQ ID NO: 130297 - DNA, 240 bp, Glycine max
atttgttggaaggaaatttttcctttgatattaaatctcgctctagattggaaaaagtttcctctacaaaagcacaatttgttagtggaaaaaccttcaaatatgatatagttggtgctggttcacattcttcagaagatttttctgaaaaggaagatcaagaaaaacccaaaaagattgatgccagattgagacaaagaatagatcctcaatacaatgaggttcaggctcagatggaaa

SEQ ID NO: 130298 - DNA, 242 bp, Glycine max
tttggagagattcaggaaaaagttgtattgaaattttcacaagaggaatttcttacagcttggtcaactcaggtgcgtcctgcaacaactctgttggctgatgggtgtccatatttgtatgctatggtgcatgatagttcagtgtctacaataccaggtgattttgtcattggtgttaagttgacaaccataaacaatatgtgtgcatatgggctcaatcctggtatttcaggttctcgtct

SEQ ID NO: 130299 - DNA, 243 bp, Glycine max
caacaatcgcaaccgccactccgaccactaccgcctcctcaagtccaacgtcgacgctctcaacctcatccaggtcggcctcactctcaccgacgccgccggcaaccttcccgatctcgccggaaaccgctccatctgggaattcaacttccgtgacttcgacgttgcgcgtgacgcctacgcgctggactccatcgatctcctccgccgtcaaggaatcgatttcgcgcgtaacgccaccga

SEQ ID NO: 130300 - DNA, 240 bp, Glycine max
cgaattttagtggacaaaactggagattggatcacacttatacaaaattctccaattagtaacttgttgagagttgctgcttggaagaaaggctgtttaatggttaaaattgtgatgtctgggaatgcagcagtcaaaaggagtgattgggcctcattggtacaagtgtttttaacaaacaccaacagtacagagcatttcgatgcatgtaagtggacaaaatcggaaccacattcctgg

SEQ ID NO: 130301 - DNA, 246 bp, Glycine max
aaagctttctagctggtcataatatcaccattactgatggtattgacaaaactagtgcacactttgcaatttagaaagttagcagattgtgattttctcaagagaaactttaagcagatgtctaatgttttgtgggtggctcctgaggataaggcgagtttatggtcacaacttcattatgtttcgtgtaataatctggaaatgcaagaagcttatcttgtcaatctcgtaaatgtgttacgagaa

SEQ ID NO: 130302 - DNA, 188 bp, Glycine max
gaaattttgataaaccgcgatcacaggttgccgcaccttaaaaccggaaacaaaagcaatcgttacttgatttcaagaatctctcaatttcttcctacttctttgtgtacgatttcttaagggaaagaaaatcactctctgtgctggccacagacttcgtgaatcattttcttttccacacaacatac

SEQ ID NO: 130303 - DNA, 190 bp, Glycine max
cagccgcggtaagggtatatcctcttctgctttgccctacaaaaggacaccccctagctggctcaagatctcttcgcaagattgtggaagataatatctggaatttttggaaggatgtgactccgtctgagattggtgtcattcttcgacgatctcacggtacagaacttttccaagcgtcactggcagc

SEQ ID NO: 130304 - DNA, 249 bp, Glycine max
  unsure (1)..(249): unsure at all n locations
ccagcgttcattttttctcgcgcccaaatacaaaatcacatcacaacagggttccggcgaccatgtccgatgctccggcgagtcccatnnnnnnnnnnnnnnnnnnnnnnnnnnnagagcggcgagcacagtccccgctccaatttccgcgagcangaccgcttcctccccatcgccaacatcagccgcatcatgaagaaagcgcttcctcccaacgggaaaatcgccaaggacgccaaggaaaccgtg

SEQ ID NO: 130305 - DNA, 243 bp, Glycine max
agaattttcttcatccttctctgttctcctagaacttgattacttgaacattccctatgacagatgaggtggttcttctggatttctggccaagtccatttgggatgagggtcaggattgcacttgctgaaaagggtatcgaatatgagtacaaagaagaggacttgaggaacaagagtcctcttctcttacaaatgaacccggttcacaagaagattccggttctcatccacaatggcaaac

SEQ ID NO: 130306 - DNA, 240 bp, Glycine max
atctggaaatgcaagaagcttatcttgtcaatctcgtaaatgtgttacgagaattgtatttgcacagtccagaggaagctcgccaattgagaaggaaagctctctctcgtattgaatggctgcaaaaagctgctgtgcctaccatagcacagattgaagagttccattcgatgcagaggatgatgaatgctcctgattcaaatgataatatcgatctactgttgagcattgatttgttgg

SEQ ID NO: 130307 - DNA, 238 bp, Glycine max
tgtttctctttttggcttctcttcaagccactttaagtcaagatattgaacatggttcacttctagtagatggagctcagactaaggctgaaacaggtgataactttatttgtgccactattgattggtggcctcatgataagtgtgactataaccattgcccttggggatattcttctgttgtaaatttggacttgtctcatcctttcctagccaaggcaatccaagccctcaagcc

SEQ ID NO: 130308 - DNA, 239 bp, Glycine max
agttgagggtttggactatatggacagaattcctcttgctacatctgagggttttcctcatgtgctttcacgcaaaaatggtgaaaaaggcaaaaggagatttgtttctggggatggtgaagagatgacattgattccgggaaccagtgttgaagaggcttacaacaagctaattgttgaacttgagaaaagtgttcctacattggttggtattgaatgtcccaaggatggcaaacttc

SEQ ID NO: 130309 - DNA, 249 bp, Glycine max
caaagttggaaatcacaaacaaattgttggtttccatgttgctggaagcaaaggaagactgggatatgcttcattgataccatacgttgagccagtacgtgcaagctcaaagtgctgaagtttactttgacttcttccctgtggaggttgatagtcaagagggagttgctcacattggtgaattgaaatctggtgtctatgttccactgcctacaaaaagcaatttggtggaaactcccaaggaatggc

SEQ ID NO: 130310 - DNA, 243 bp, Glycine max
aattacatatagcacaattgtttaagagtgtattactaaggaaaaacaatgaaagttgtgtacttccttgttgccatcttggctttgacatcctctcttgtctctgcctatgatcctagtcctctgcaagatttctgtgtggcagccaaagtaaaagatggtgtgtttgtgaacgggaaattttgcaaggaccctaagcttgtcaaagctgaagatttcttcagacatgtagaaccggggaag

SEQ ID NO: 130311 - DNA, 242 bp, Glycine max
ctcgagccgcgttttgcaaggccaagtctctcaaagctatgctataggcgttccgacaagagcatcaacttggtgcagaacatcctcaaatttgtggcactgtggatcattcttgcggcttacacaacacccttcttcatcattcctcccacggttcaccctttgttgggatggcctctctacttgcttggtgtctttgcattgtgctcaattacggtcaatgcctttctgctgccaatgtt

SEQ ID NO: 130312 - DNA, 239 bp, Glycine max
  unsure (1)..(239): unsure at all n locations
gtcatttaatccaaacccgtgttctgatgcatggagtttggaatttttgaagcgtataggatttcactgtgatatcatttgtgtcactggatggactgttaccccaatgcaggattttcaggttacaattgattggtttatttcctctcaggaatgtgttcccaggatttattgtgttttaaatccacaaaatacctttgtcttngantattggatggggaaactgactttcccccagg

SEQ ID NO: 130313 - DNA, 199 bp, Glycine max
tgttaatgtagcatgtgctgctgttggcttgacatcaagctatactccgactccattgttggaatctggtttgcaaaaagacagagggttaattgtggagtattttggaaggatgtcttacgttgctcataacgttaatcagccccaagagagagatttgttggaaggaaatttttccgttgatattaaatctcgctct

SEQ ID NO: 130314 - DNA, 223 bp, Glycine max
  unsure (1)..(223): unsure at all n locations
cttttccacacaacatactatatcatggagagattcaggaacaagttgnattgaaattttcaattgaggaattgtttacagcttggtcaactcaggtgcgtcatgcaacaactctgtttgctgatgggtgtccatatttgtatgctatggtgcatgatagttcagtgtctacaataccatgtgattttgtcattggtgttaagttgacaaccataaacaatat

SEQ ID NO: 130315 - DNA, 237 bp, Glycine max
gttctaaattgaaaagctttctagctggtcataatatcaccatatactgtggtattgacaaaactagtgcaactttgcaatttagaaacgttagcagattgtgattttctcaagagaaactttaagcagatgtctaatgttttgtgggtggctcctgaggataaggcgagtttatggtcacaacttcattatgtttcgtgtaataatctggaaatgcaagaagcttatcttgtcaat

SEQ ID NO: 130316 - DNA, 249 bp, Glycine max
atcagattgaaccagacatgaattcaaggtttcagcttttgagtaccactaccaatggtgattttgttcaaggaaaagatctcgcaatggttaaagttaatgtagcatgtgctgctgttggcttgacatcaagttacactccaactccattgttggaatctggtttgcaaaaagacagagggttaattacggagtattttggaaggatgtcttacgttgctcacaacgttaatcaggcccaagagaaag

SEQ ID NO: 130317 - DNA, 207 bp, Glycine max
gacaagaaagtaaggccaaagatgacattatcaattttcatgaagatagcggtgctcagcttgctagagccagttattgaccagaatttgtattttttggggatgaagtacacaacagcaacctttgccgttgccacgaccaatatgctccgtgacaaccactatctcgcagcattcatacgcttgagtaggtagatataaaaagta

SEQ ID NO: 130318 - DNA, 242 bp, Glycine max
atgggaattgatcttcccaatagaggtatgtggtcctaataatggttttgaaatgtggagttctgagtgggcaaatcaaacttcatggcacttgagtttccttattgacaatcccaaacagtctacagtttttgatattctcttgggaaattctcaagattttgaaattgctggtaatactcttatgccagctttttctgttccacaggctactgccagatcttctgaaaatgcggaatcct

SEQ ID NO: 130319 - DNA, 241 bp, Glycine max
gtcttttgtgcaccattcctcagtctatttcacagcaaactgtttgtaatcaaatggcaacagtgagaacaccattgaattttgattctagcaagcagagcttttgtcaattttctattgaccttctcggtggaggaattttagtggacaaaactggagattggatcacacttatacaaaattctccaattagtaacttgttgagagttgctgcttggaagaaaggctgtttaatggttaa

SEQ ID NO: 130320 - DNA, 237 bp, Glycine max
gtgagaacaccattgaattttgattctagcaagcagagcttttgtcaattttctattgaccttctcggtggaggaattttagtggacaaaactggagattggatcacacttatacaaaattctccaattagtaacttgttgagagttgctgcttggaagaaaggctgtttaatggttaagattgtgatgtctgggaatgcggcagtcaaaaggagtgattgggcctcattggtacaa

SEQ ID NO: 130321 - DNA, 236 bp, Glycine max
atcgagcgtttcagaggcggaaggcccattcgggtggttacatttccgaataccatcgtgcaaattgaaccagacatgaattcaaggtttcagcttttgagtaccactaccaatggtgattttgttcaaggaaaagatctcgcaatggttaaagttaatgtagcatgtgctgctgttggcttgacatcaagttacactccaactccattgttggaatctggtttgcaaaaagacag

SEQ ID NO: 130322 - DNA, 238 bp, Glycine max
tggagatttgtttctggggatggtgaagagatgacattgattccgggaaccagtgttgaagaggcttacaacaagctaattgatgaacttgagaaaagtgttcctacattggttggtattgaatgtcccaaggatgagaaacttcctcgtcgcaaaatttttgacaaacctaagacgcgctgcttcactattctccctatggagtttaatcttgtggtccgtcagaagtttttaaatt

SEQ ID NO: 130323 - DNA, 241 bp, Glycine max
tgaaaatgcagttcgtagtatttctgttgcgcctttcagaggcggaaggcccattcgggtcattacatttccgaataccattgtgcatattgaaccagacatgacttcaaggtttcagctcttgcgtaccactaccaatggtgatcttgttcaaggaatagatctcgcactggctcaagttaatgtagcatgtgccactgttgacttgacatcaagctatactccgactccattggtggaa

SEQ ID NO: 130324 - DNA, 241 bp, Glycine max
cttgagataagtgttcctacattggttggtattgaatgtcccaaggatgagaaacttcctcgtcgcaaaatttttgacaaacctaagacgcgctgcttcactattctccctatggagtttaatcttgtggtccgtcagaagtttttaaattttgtgaggttcattatgaagaaaagggacaagcttagttgtcaagttggaatcaacccatactccatggaatggactggtttggccaata

SEQ ID NO: 130325 - DNA, 240 bp, Glycine max
tgatcctgccagtagtcatatgcttgtctcaaagattaagccatgcatgtgtaagtatgaactaattcagactgtgaaactgcgaatggctcattaaatcagttatagtttgtttgatggtatctactactcggataaccgtagtaattctagagctaatacgtgcaacaaaccccgacttctggaagggatgcatttattagataaaaggtcaacacaggctctgcctgttgctttgat

SEQ ID NO: 130326 - DNA, 235 bp, Glycine max
gctcattagatatagctatgaaaaattactgcgccaggctaaagctccaagtatgtttttacaatccttcaaaaattttgtttctttgtgtgtgtatggtgatgataacttaattagtgttcatgaatatgtcaagccttactttagtggttctaaattgaaaagctttctagctggtcataatatcaccattactgatggtattgacaaaactagtgcaactttgcaatttaga

SEQ ID NO: 130327 - DNA, 235 bp, Glycine max
  unsure (1)..(235): unsure at all n locations
ctaccttcgcattttggtcaaagagccctgttgacattgagccaagacggatcagattgcaatctaatagttacacgactaacacacttttggatatagtgactgctgcaaccatacagttcaaggaaatgggtggaagcaggtggcctgctgaagcagtgaaaccaaatgtacagcctacagatagttgngagtgatttggtgattggatggatgctaatcaacctgccaatgg

SEQ ID NO: 130328 - DNA, 235 bp, Glycine max
aattcctcagtctatttcacagcaaactgtttggaatcaaatggcaacagtgagaacaccattgaattttgattctagcaagcagagcttttgtcaattttctattgaccttctcggtggaggaattttagtggacaaaactggagattggatcacacttatacaaaattctccaattagtaacttgttgagagttgctgcttggaagaaaggctgtttaatggttaaaattgtg

SEQ ID NO: 130329 - DNA, 234 bp, Glycine max
actgatttaaggaaatgggttcatgacaatgtgagtgctgaagttgctgcatctgtaagaattatctatggaggctctgtaaatggaggaaactgcaaagaattggcagcacagcccgatgttgatggatttttggttggtggtgcatccctcaaggcggaatttgtggacatcataaacgctgctactgtgaagaagaattgaaattcgtagttaggaactgataatgctgcc

SEQ ID NO: 130330 - DNA, 233 bp, Glycine max
ccaaaatatgccactcccatgatgcccctagatgaagaaattctctctaaggttgcacaagatatggttgacgaatggtttgattgtgttgatgaggaggattcctttgaggaagattctttaagtgcagcactcaatggtgttgagggtttggactatatggaaagaattcctcttgctacatctgagggttttcctcatgtgctttcacgcaaaaatggtgtctaaggcaa

SEQ ID NO: 130331 - DNA, 238 bp, Glycine max
gcaagcaaaaagaaagactcccaggcgaggagaaagatggaggggaaggagcaggatgtgtcgttgggagcgaacaagttccccgagagacagccgattgggacggcggcgcagagccaagacgacggcaaggactaccaggagccggcgccggcgccgctgtgttgacccgacggagtttacgtcatggtcgtcttacagagcagggatagcagagtttgtggccacttttctgttt

SEQ ID NO: 130332 - DNA, 245 bp, Glycine max
ctccaacttctctattgttctctccgtctccctagccttctttttggtgctacttaccaaggcacactcgaccgataccgtttctttcaccttcaacaagttcaacccagtccaaccaaacattatgctccaaaaagatgctagtatttcatcctctggggtgttacaactcaccaaagttggcagcaacggcgtgcccacctcgggatctctcggtcgtgccctttacgctgccccaatccaga

SEQ ID NO: 130333 - DNA, 227 bp, Glycine max
attaattgcaagaatggcacttcgttgcttggtgatgtccctctctgttctcttcactcttggtcttgcgagagaaagccatgccagagacgaagatttttggcatgctgtttggccaaacactcccattccaagttcattgcgagatcttctaaagcctggccctgcaagtactgaactcgatgatcactctatgcaaattgaagaaacacagtacccgaaaacct

SEQ ID NO: 130334 - DNA, 230 bp, Glycine max
tagatattttggcttcctaatttcacggaaaaagtatgttgtctgcattgatgatgattgtgttcctgcaaaagataattcagggattttggtggatgctgtggctcagcatattgtgaacctgcagactcctgccacccccttcttctttaatacactgtatgatccattctgtaagggtgcagattttgttcgtgggtacccattcagcctgcggagtggggctgatt

SEQ ID NO: 130335 - DNA, 185 bp, Glycine max
aaattttgataaaccgcgatcacaggttgccgcaccttaaaaccggaaacaaaagcaatcgttacttgatttcaagaatctctcaatttcttcctacttctttgtgtacggtttcttaagggaaagaaaatcactctctgtgctggccacagacttcgtgaatcattttcttttccacacaacat

SEQ ID NO: 130336 - DNA, 232 bp, Glycine max
attctgtgttgcgattatgctagttttgatggtttgattaccaagcaagttatgagcaagatggcagaaatgataaacagtctttgtggtggtgatgaaaaattgatgcgtgaaaggacacacctgctgttggcttgttgttcaaggatggcaatttgtaagaaagatgtttggagagttgaatgtggaatcccttctggatttccgctcacagttatttgcaatagcattt

SEQ ID NO: 130337 - DNA, 232 bp, Glycine max
tgcgtttcggaagcagacacagatggctcgtacgaagcaaaccgctcgtaagtccacaggaggaaaggctcctaggaagcagcttgcaaccaaggctgcacgtaagtctgcaccaactactggtggtgtgaagaagccccaccgttatcgtcctggtaccgttgctcttcgtgagattaggaaataccagaagagtaccgagcttttgatccggaagctccccttccagagg

SEQ ID NO: 130338 - DNA, 229 bp, Glycine max
cggctcgaggggaaaatcatgtagttcatacccctaatggcacaggaggaaattctgtcttctagtgcaagtgatttcagaactgcaatggtgagtaaaaatagcaagcctcaagctactgcaatgcatgtgggagctatagaaattatcattgatagtttcgcaagtcctgactgcaacatagttggtgcaatgcttttggttgatacttatcataccaatcctgaaa

SEQ ID NO: 130339 - DNA, 229 bp, Glycine max
actcgagccgaatcggctcgaccttcccgccccattaaatggaatatgggcaatattgagcgaacaatgagatgctgacatggccagagaaagtcaaatttgcaattgggcttctaccagctatgcttggtggacagccatatgttgaggctcaagatggtctttcagttcaagaatggatgaaaaagcagggcgtacctgagcgagtaactgatgaggtgttcatagc

SEQ ID NO: 130340 - DNA, 227 bp, Glycine max
tctagctggtcataatatcaccattactgatggtattgacaaaactagtgcaactttgcaatttagaaagttagcagattgtgattttctcaagagaaactttaagcagatgtctaatgttttgtgggtggctcctgaggataaggcgagtttatggtcacaacttcattatgtttcgtgtaataatctggaaatgcaagaagcttatcttgtcaatctcgtaaatg

SEQ ID NO: 130341 - DNA, 228 bp, Glycine max
cttaattagtgttcatgaatatgtcaagccttactttagtggtactaaattgaaaagctttctagctggtcataatatcaccattactgatggtattgacaaaactagtgcaactttgcaatttagaaagttagcagattgtgattttctcaagagaaactttaagcagatgtctaatgttttgtgggtggctcctgaggataaggcgagtttatggtcacaacttca

SEQ ID NO: 130342 - DNA, 228 bp, Glycine max
gatttttgtaaccttttagcaagtaaaaaaaaagtaagacataaattgtttcgtttcaatccttctgataaaaaagaaagaaggatttcagattattcaatatttaatcaaatcatatctatagatcattgtcattttacacatcctactattttccatgatactacggatttattagcaaagaggcggagaaatagattaattattccatttcagttccaatcgatt

SEQ ID NO: 130343 - DNA, 226 bp, Glycine max
aaatattcatttcagtgaagctgaatgctataagatcgataacaagaacaacaaagtttattgccgtgctagtaaagacaaaaagttgggtggccaagaagacttttccattgattatgattacctggtaatagctatgggaggccgttctaataccttcaacacacctggtgtttcagagcatgcccatttcttgaaggaagtggatgaagctctaaaaattcgt

SEQ ID NO: 130344 - DNA, 226 bp, Glycine max
tacagttggtattcctgagaatacaggtatagcattggcctgtgctatgaatagttcttttagggggcgtgccagttctgatatttacactatctgctctcaagactgtgaattatggaatcctgcttgcacaaaagcaatgactatgtcatttaatccaaacccgtgttctgatgcatggagtttggaatttctgaagcgtaccggatttcattgtgatatcatt

SEQ ID NO: 130345 - DNA, 226 bp, Glycine max
ctcgagccgctcgagccgctacattggttggcattgaatgtcccaaggatgagaaacttactcgtcgcacaatttttgacaaacctaagacgcgctgcttcactattctccctatggagtttaatcttgtggtccgtcaaaagtttttaaattttgtgaggttcattatgaagaaaagggacaagcttagttgtcaagttggaatcaacccatactccatggaatg

SEQ ID NO: 130346 - DNA, 227 bp, Glycine max
gaaccagtgttgaagaggcttacaacaagctaattgttgaacttgagaaaagtgttcctacattggttggtattgaatgtcccaaggatgagaaacttcctcgtcgcaaaatttttgacaaacctaagacgcgctgcttcactattctccctatggagtttaatcttgtggtccgtcagaagtttttaaattttgtgaggttcattatgaagaaaagggacaagctt

SEQ ID NO: 130347 - DNA, 247 bp, Glycine max
gtccgtattctgctcgttccagtctggagagattcaggatacagttgtattgaaattttcacaagaggaatttcttacagcttggtcaactcaggtgcgtcctgcaacaactctgttggctgatgggtgtccatatttgtatgctatggtgcatgatagttcagtgtctacaataccaggtgattttgtcattggtgttaagttgacaaccataaacaatatgtgtgcatatgggctcaatcctggt

SEQ ID NO: 130348 - DNA, 226 bp, Glycine max
ggaacagccaacacatgtatggtagggagttccaatcgatgttggacggactcgacgaggaagggtgtgttgaagaaccggggtatcaatctgagaagaagcgtcgtctaagtgtggatcaagtgaaggctttggagaagaactttgaggttgaaaacaagcttgaacctgagaggaaggtgaagcttgcccaagaacttgggttgcaacctagacaggtagccgt

SEQ ID NO: 130349 - DNA, 225 bp, Glycine max
gatgcatgtaagtggacaaaatcggaaccacattcctgggaattgatcttcccaatagaggtatgtggtcctaataatggttttgaaatgtggagttctgagtgggcaaatcaaacttcatggcacttgagtttccttattgacaatcccaaacagtctacagtttttgatattctcttgggaatttctcaagattttgaaattgctggtaatactcttatgcca

SEQ ID NO: 130350 - DNA, 104 bp, Glycine max
ggaaattagacatgaccctcttgttgagtatgctctgtctatttgaaaatttccacacctcttttaattgtcgtaatgatgtgtgaagtgtgtgttattttaaa

SEQ ID NO: 130351 - DNA, 168 bp, Glycine max
aaccgcgatcacaggttgccgcaccttaaaaccggaaacaaaagcaatcgttacttgatttcaagaatcttccaatttcttcctacttctttgtgtacgatttcttaagggaaagaaaatcactctctgtgctggccacagacttcgtgaatcattttcttttccaca

SEQ ID NO: 130352 - DNA, 236 bp, Glycine max
ggttttgaaatgtggagttctgagtgggcaaatcaaacttcatggcatttgagtttccttattgacaatcccaaacagtctacagtttttgatattctcttgggaatttctcaagattttgagattgctggtaatactcttatgccagctttttctgttccacaggctactgccagatcttctgaaaatgcggaatcctctgcatgatctggaatttgtgttttcttttgcttgtt

SEQ ID NO: 130353 - DNA, 227 bp, Glycine max
cgtggttacatttccgaataccatcgtgcagattgaaccagacatgaattcaaggtttcagcttttgagtaccactaccaatggtgattttgttcaaggaaaagatctcgcaatggttaaagttaatgtagcatgtgctgctgttggcttgacatcaagttacactccaactccattgttggaatctggtttgcaaaaagacagagggttaattgtggagtattttg

SEQ ID NO: 130354 - DNA, 220 bp, Glycine max
aacttaattagtgttcatgaatatgtcaagccttactttagtggttctaaattgaaaagctttctagctggtcataatatcaccattactgatggtattgacaaaactagtgcaactttgcaatttagaaagttagcagattgtgattttctcaagagaaactttaagcagatgtctaatgttttgtgggtggctcctgaggataaggcgagtttatggt

SEQ ID NO: 130355 - DNA, 224 bp, Glycine max
ggaatggcaactggatctatcttgtgacaaaattcctagtgtcttgactacaactgatgagagattggtaggcacagaacatgagggatatgatccttttcttggtggaattcaaaaatatgccactcccatgatgcccctagatgaagaaattctttctaaggttgcacaagatatggttgaggaatggtttgattgtgttgatgaggaggattcctttgagg

SEQ ID NO: 130356 - DNA, 213 bp, Glycine max
gtgatgataacttaattagtgttcatgaatatgtcaagccttacttactggttctaaattgaaaagctttctagctggtcataatatcaccattactgatggtattgacaaaactagtgcaactttgcaatttagaaagttagcagattgtgattttctcaagagaaactttaggcagatgtctaatgttttgtgggtggctcctgaggacaa

SEQ ID NO: 130357 - DNA, 224 bp, Glycine max
tgttggaatctggtttgcaaaaagacagagggttaattgtggagtattttggaaggatgtcttacgttgctcataacgttaatcagccccaagagaaagatttgttggaaggaaatttttcctttgatattaaatctcgctctagattggaaaaagtttcctctacaaaagcacaatttgttagtggaaaaaccttcaaatatgatatagttggtgctggttca

SEQ ID NO: 130358 - DNA, 224 bp, Glycine max
  unsure (1)..(224): unsure at all n locations
tctcgagccgattcggctcgagccattactgatggtattgacaaaactagtgcaactttgcacatttagaaagttagcagaatgtgattttctcaagagaaactttaagcagatgtctaatgttttgtgggtggctcctgaggataaggcgagtttatggtcacaacttcattatgtttcgtgtaataatctggaaatgcaagaagctngttgtgtcaatctcg

SEQ ID NO: 130359 - DNA, 225 bp, Glycine max
ccaatatattccattctctctgtgtatttccctacctctcccttcaagatgcagatcttcgtcaagaccctcaccggcaagaccatcacccttgaggtggaaagctctgacaccatcgacaacgtcaaggccaagatccaggacaaggaaggaatccccccggaccagcaacgtctcattttcgccggaaagcaacttgaggacggccgtacccttgctgactac

SEQ ID NO: 130360 - DNA, 222 bp, Glycine max
gtttgttcttcagtactttagtgtgtgatttaattccaagattttgagaatgtctagctgtgggtgtggaagtagctgcaactgtggcagcaactgcggttgcaacaagtactcttttgacttgagctatgttgagaagacaaccacagagactcttgttttgggtgttgggtctgtgaaggcccaattggagggtgctgaaatgggtgttgcagctgagaa

SEQ ID NO: 130361 - DNA, 221 bp, Glycine max
caaaaatatgccactcccatgatgcccctagatgaagaaattctttctaaggttgcacaagatatggttgaggaatggtttgattgtgttgatgaggaggattcctttgaggaagtttctttgagtgcagcactcaatggtgttgagggtttggactatatggaaagaattcctcttgccacatctgagggttttccccatgtgctttcacgcaaaaatgg

SEQ ID NO: 130362 - DNA, 221 bp, Glycine max
ctcgtctttgggcaccattcctcagtctatttcacagcaaattgtttggaatcaaatggcaacagtgagaacaccattgaattttgattctagcaagcagagcttttgtcaattttctattgaccttctcggtggaggaattttagtggacaaaactggagattggatcacacttatacaaaattctccaattagtaacttgttgagagttgctgcttgga

SEQ ID NO: 130363 - DNA, 221 bp, Glycine max
gtttgttgttgtaactcgttcttcttcttttgttgttctgtgtttgtgtttgtgttttctctcacctgaaaatgtcttgctgcgtcggtaactgtggttgcggaagctcctgcaagtgcggcaacggctgcggaggctgcaagatgtacccagacttgagctacactgagtcaaccaccaccgagaccttggtcatgggagtggcacctgttaaggctcaa

SEQ ID NO: 130364 - DNA, 224 bp, Glycine max
gaaaaactttcaaatatgatataattggtgctggttcacattcttcagaagattttcctgaaaaggaagatcaagaaaaacccaaaaagattgatgccagattgagacaaagaatagatcctcaatacaatgaggttcaggctcagatggaaacaaatttgtttaaattgtctcttaatgatgttgaaactcctaaaggttccatgttggatcttaaaatttct

SEQ ID NO: 130365 - DNA, 222 bp, Glycine max
caagcatctccttctcaaactagtagtattattcttccattccgttctacatataatcattcataatgggtgttttcacattcgaggatgaaatcaactcccctgtggctcctgctactctttacaaggccctagttacagatgccgacaacgtcatcccaaaggctcttgattccttcaagagtgttgaaaacgttgagggaaatggtggcccaggaacca

SEQ ID NO: 130366 - DNA, 222 bp, Glycine max
  unsure (1)..(222): unsure at all n locations
ctctcttccctctccccgcccaaaccctaaccccctancctattccgctttctctcatccatcatgaaaggagcagagtccaagaccgaatctacgagagccgatgccaaacttgctgtgaatcagaagggcgccgccaccaagactagggaacccgccggaaaggggaaggcagcgaaagatcctagcaagccatagaggcctccaagtgctttcttcgtt

SEQ ID NO: 130367 - DNA, 220 bp, Glycine max
  unsure (1)..(220): unsure at all n locations
ttgttatcctcaattttcaatggctcaatcccattctggatacacatcctnnatgacttcaatactccccctgnntatgcttcttatcagtaatacaggcacaacaggtgcacaatctggtgtatgctatggaagagttggcaacaatctgccatcgccacaagaagtagttcccctttttaaacagtacggcttccaaaggatgagaatctatgatcga

SEQ ID NO: 130368 - DNA, 215 bp, Glycine max
cacacctgctgctggcttgttgttcaaggcttgcaatttgtaagacagatgtttggagagttgaatgtggaatcccttctggatttccgctcacagttatttgcaatagcatttttaatgagatgctcattagatatagctatgaaaaattactgcgccaggctaaagctccaagtatgtttttacaatccttcaaaaattttgtttctttgtgt

SEQ ID NO: 130369 - DNA, 233 bp, Glycine max
ttcgactctagaagcatttcatttccatgatgaccgaaccaactacaactacactgagccaactctagcaggaaatgcaggtttagtagctgcacttgtggcattgtccggtgataaaaccaccggtatagacaaaaacacccttttctctgctgttcccccaatgtttcccacaccaccaccacctccagcaccatggaaaccatgaggtgttgtattgtgtcattcattgt

SEQ ID NO: 130370 - DNA, 222 bp, Glycine max
caaaccctaacaccaaaaccagaagcgaaatcgcaatcgcaatccagcgaatatgaaggtcgtcgctgcatacttgctcgcagtgttgggagggaatccttccccttctgccgatgacatcaaacacatcctcggcgcagttggagctgaggctgagaatgagttgattgagttgctcttgactgaagtcaagggaaaagacttcaatgagctaattgctag

SEQ ID NO: 130371 - DNA, 220 bp, Glycine max
gtgaaaaccttctcttacccttctctcaagtttcaagagatttcatcatggctccaaagaaggacaaggctccaccaccttcctccaagcccgccaaatctggcggtggcaagcagaagaagaagaagtggagcaagggaaagcaaaaggagaaggtgaacaatatggtgctgtttgatcagggcacctatgacaagctcctttctgaagctcccaaata

SEQ ID NO: 130372 - DNA, 218 bp, Glycine max
ttcattatgaagaaaagggacaagcttagttgtcaagttggaatcaacccatactccatggaatggactggtttggccaatagattactgagtaagggcaacgatattctgtgttgcgattatgctagttttgatggtttgattaccaagcaagttatgagcaagatggcagaaatgataaacagtctttgtggtggtgatgaaaaattgatgcgtga

SEQ ID NO: 130373 - DNA, 216 bp, Glycine max
gaaattttcacaagaggaatttcttacagcttggtcaactcaggtgcgtcctgcaacaactctgttggctgatgggtgtcactatatgtatgctatggtgcatgatagttcagtgtctacaataccaggtgattttgtcattggtgttaagttgacaaccataaacaatatgtgtgcatataggctcaatcctggtatttcaggttctcgtctttt

SEQ ID NO: 130374 - DNA, 216 bp, Glycine max
cggttcgaggacaattgcaacagaatttccccctgtttgtgctattatagggggaatccttggacaggaggttatcaaagcaatttctgggaaaggagaccccctaaagaattttttcttttttgatgcttttgatgggaagggcattatagaagacatctctccgaagtgattaactaatggccgaagctttggcaatataaagtagggatgtaa

SEQ ID NO: 130375 - DNA, 234 bp, Glycine max
tcgtacttcggctcgagctcgagccgggatttcattgtgatatcatgttttgtcactggatggactgctaccccaatgcaggatgttcaggttacaattgattggtttatttcctctcaggaatgtgtatcgaggacctattgtgttttaaatccacaaaatccttttgtcgtaaataggtggatggggaaattgactttcccccagggcacttcccgaagtgttaaaagaatg

SEQ ID NO: 130376 - DNA, 216 bp, Glycine max
gttggaatcaacccatactccatggaatggactggtttggccaatagattactgagtaagggcaacgatattctgtgttgcgattatgctagttttgatggtttgattaccaagcaagttatgagcaagatggcagaaatgataaacagtctttgtggtggtgatgaaaaattgatgcgtgaaaggacacacctgctgttggcttgttgttcaagg

SEQ ID NO: 130377 - DNA, 217 bp, Glycine max
ggacacacctgctgttggcttgttgttcaaggatggcaatttgtaagaaagatgtgtggagagttgaatgtggaatcccttctggatttccgctcacagttatttgcaatagcatttttaatgagatgctcattagatatagctatgaaaaattactgcgccaggctaaagctccaagtatgtttttacaatccttcaaaaattttgtttctttgtg

SEQ ID NO: 130378 - DNA, 217 bp, Glycine max
attctgtgttgcgattatgctagttttgatggtttgattaccaagcaagttatgagcaagatggcagaaatgataaacagtctttgtggtggtgatgaaaaattgatgcgtgaaaggacacacctgctgttggcttgttgttcaagaatggcaatttgtaagaaagatgtttggagagttgaatgtggactcccttctggatttccgctcacagtta

SEQ ID NO: 130379 - DNA, 218 bp, Glycine max
atttttgttgcgcctttcagaggcggaaggcccattcgggtggttacatttccgaataccattgtgcagattgaaccagacatgaattcaaggtttcagcttttgagtaccactaccaatggtgattttgttcaaggacaagatctcgcaatggttaaagttaatgtagcatgtgctgctgttggcttgacatcaagctatactccgactccattgtt

SEQ ID NO: 130380 - DNA, 217 bp, Glycine max
gccatgactggttcagaaacagagaaggctttattaagtacgacgcccaaattaacaaaagccatgactggttcagaaacagagaaggttccttttggtttctttgctcggaatggcaagtatgtagaatgcctgctttctgtgagtaagaaattggacgtagagggcctagttactggggtcttctgcttcttacagctagctagcccagagctcc

SEQ ID NO: 130381 - DNA, 217 bp, Glycine max
actggatctaccttgtgacaaaattcctagtgtcttgactacaactgatgagagattggtaggcacagaacatgagggatatgatccttttcttggtggaattcaaaaatatgccactcccatgatgcccctagatgaagaaattctttctaaagttgcacaagatatggttgaggaatggtttgattgtgttgatgaggaggattcctttgaggaa

SEQ ID NO: 130382 - DNA, 215 bp, Glycine max
ctttgtttgatatgttcattcagtaccaatacaaacgaaaactacaccaaagtggaaaggcccctatagaagctagaagtaacctctagtagtctagtagtcggcctaaccaaagcgtcacgacaacagaaaatgacccttatgaatggaatcttaagtagggggcttagcccgcccgcctaccaatcaaagaggctgagagtaagcgtaactct

SEQ ID NO: 130383 - DNA, 237 bp, Glycine max
agagagatgacattgattccgggaaccagtgttgaagaggcttacaacaagctaatagttgaacttgagaaaagtgttcctacattggttggcattgaatgtcccaaggatgagaaacttcctcgtcgcaaaatttttgacaaacctaagacgcgctgcttcactattctccctatggagtttaatcttgtggtccgtcaaaagtttttaaattttgtgaggttcattatgaagaaa

SEQ ID NO: 130384 - DNA, 229 bp, Glycine max
tggaaatgcaagaagcttatcttgtcaatctcgtaaatgtgttacgagaattgtatttgcacagtccagaggaagctcgccaattgagaaggaaagctctctctcgtaatgaatggctgcaaaaagctgatgtgcgctaccatagcacagattgaagagttccattcgatgcagaggatgatgaatgctcctgattcaaatgataatattgatctactgttgagcattg

SEQ ID NO: 130385 - DNA, 229 bp, Glycine max
attggttggcattgaatgtcccaaggatgagaaacttcctcgtcgcaaaatttttgacaaacctaagacgcgctgcttcactattctccctatggagtttaatcttgtggttcgtcagaagtttttaaattttgtgaggttcattatgaagaaaagggacaagcttagttgtcaagttggaatcaacccatactccatggaatggactggtttggccaatagattactg

SEQ ID NO: 130386 - DNA, 229 bp, Glycine max
cgagaaattttgtttctatgtgtgtgtatggtgatgataacttaattagtgttcatgaatatgtcaagccttactttagtggttctaaattgaaaagctttctagctggtcataatatcaccattactgatggtattgacaaaactagtgcaactttgcaatttagaaagttagcagattgtgattttctcaagagaaactttaagcagatgtctaatgttttgtgggt

SEQ ID NO: 130387 - DNA, 223 bp, Glycine max
ggttctcgtcttttgggcaccattcctcagtctatttcacagcaaactgtttggaatcaaatggcaacagtgagaacaccattgaattttgattctagcaagcagagcttttgtcaattttctattgaccttctcggtggaggaattttagtggacaaaactggagattggatcacacttatacaaaattctccaattagtaacttgttgagagttgctgctt

SEQ ID NO: 130388 - DNA, 225 bp, Glycine max
agccagttgtgcaagctcaaagtgctgaagtttactttgacttcttccctgtggaggttgatagtcaagagggagttgctcacattggtgaattgaaatctggtgtctatgttccactgcctacaaaaactaatttggtggaaactcccaaggaatggcaactggatctaccttgtgacaaaattcctagtgtcttgactacaactgatgagagattggtaggca

SEQ ID NO: 130389 - DNA, 223 bp, Glycine max
gtttggagagttgaatgtggaatcccttctggatttccgctcacagttatttgtaatagcatttttaatgagatgctcattagatatagctatgaaaaattactgcgccaggctaaagctccaagtatgtttttacaatccttcaaaaattttgtttctttgtgtgtgtatggtgatgataacttaattagtgttcatgaatatgtcaagccttactttagtg

SEQ ID NO: 130390 - DNA, 224 bp, Glycine max
cacagtttcggaggagaagaaaatagtcgttcgagatggcccgtacgaagcaaactgctcgtaagtccacaggaggaaaggctcctaggaagcagcttgcaatcaaggctgcacgtaagtctgcaccaactactggtggtgtgaagaagccacatcgttaccgtcctggtaccgttgctcttcgtgagattaggaaataccagaagagtaccgagcttttgatc

SEQ ID NO: 130391 - DNA, 218 bp, Glycine max
ttcggctcgaggtttgaagatgtcaaacgcttaaatgatctcctaattgaaaagaacaaaataactgggtgggacactcctattcatgttgatgcagccagcggtgggttcatagccccatttatttacccagagcttgagtgggacttccggttacaactagtgaagagcatcaatgttaatgggcacaagtatggtttggtatatgctggaatcgg

SEQ ID NO: 130392 - DNA, 158 bp, Glycine max
aatttattttgggccgttttcactttgttaggttcattggggttattgttcgttgcaatttccagttatcttggtatggatttgttctttatttctgagaaaattagtgatttttcttttattccggactttatttattttccatttattccacacaa

SEQ ID NO: 130393 - DNA, 138 bp, Glycine max
ggtattgacaaaactagtgcaactttgcaatttagaaagttagcagattgtgattttctcaagagaaactttaagcagatgtctaatgttttgtgggtggctccctgaggacaaggcgagtttatggtcacaactcca

SEQ ID NO: 130394 - DNA, 222 bp, Glycine max
ggaaaagatctcgcaatggttaaagttaatgtagcatgtgctgctgttggcttgacatcaagttacactccaactccattgttggaatctggtttgcaaaaagacagagggttaattgtggagttctttggaaggatgtcttacgttgctcataacgttaatcagccccaagagaaagatttgttggagggaaatttttcctttgatattaaatctcgctct

SEQ ID NO: 130395 - DNA, 220 bp, Glycine max
cttgttgagagttgctgcttggaagaaaggctgtttaatggttaagattgtgatgtctgggaatgcagcagtcaaaaggagtgattgggcctcattggtacaagtgtttttaacaaacagcaacagtacagagcattttgatgcatgtaagtggacaaaatcggaaccacattcctgggaattaatcttcccaatagaggtatgtggtcctaataatggt

SEQ ID NO: 130396 - DNA, 223 bp, Glycine max
cccatactccatggaatggactggtttggccaatagattactgagtaagggcaacgatattctgtgttgcgattatgctagttttgatggtttgattaccaagcaagttatgagcaagatggcagaaatgataaacagtctttgtggtggtgatgaaaaattgatgcgtgaaaggacacacctgctgttggcttgttgttcaagaatggcaatttgtaagaaa

SEQ ID NO: 130397 - DNA, 229 bp, Glycine max
gctgtgactaatgctgtgtcgtggcgcacgaagggataaactataagaaaaatgaggttttcttggatgtggtggagagtgttaatatacttgtcaatagcggtggacaaataattagatctgacgtcgttggggcgttgaagatgacaacgtatttgagtggtatgcctgagtgcaaacttggcttaaatgatagagtattgttagaggcacaaggtagaacaaccaa

SEQ ID NO: 130398 - DNA, 225 bp, Glycine max
tagggaatggactggtttggccaatagattactgagtaagggcaacgatattctgtgttgcgattatgctagttttgatggtttgattaccaagcaagttatgagcgagattgcatgaatgatgctcagtctctgaggtggtgatgattgattgatgcgtgtcgatgcacacctgctgttggcgctctgatccaggatggcatttgtacgactgatgatggagag

SEQ ID NO: 130399 - DNA, 217 bp, Glycine max
atcaacccatactccatggaatggactggtttggccaatagattactgagtaagggcaacgatattctgtgttgcgattatgctagttttgatggtttgattaccaagcaagttatgagcccgatggcagaaatgataaacagtctttgtggtggtgatgaaaaattgatgcgtgaaaggacacatctgctgttggcttgttgttcaaggatggcaa

SEQ ID NO: 130400 - DNA, 219 bp, Glycine max
gaatattatgctcaattagatgcaactggaaaaagagttgatataaatcaacgacctgagcttactaaggggaccgtagaatttgttgcccctgctgagtacatggtgcggcctcctatgccaccagtgtatttcttcctcattgatgtttccatatctgctgttagaagtggcatgattgaggttgtagccaatacaataaagtcatgcttagatgag

SEQ ID NO: 130401 - DNA, 220 bp, Glycine max
ctcgagccggaggaaaaagaggattggagggtcgccacgtttagcaacaaccaaaccctctctactctttcttcttctcttcgctagggttttagcttcttcctcttcacttcgttcttctggcctctacaatgagcaacgacaaggacaccttcaacgtcgctgatctcacttccgctctcaacgaggactatagagcagaccttgtcaatgctctcaa

SEQ ID NO: 130402 - DNA, 221 bp, Glycine max
gaaattttgataaaccgcgatcacaggttgccgcaccttaaaaccggaaacaaaagcaatcgttacttgatttcaagaatcttccaatttcttcctacttctttgtgtacgatttcttaagggaaagaaaatcactctctgtgctggccacagacttcgtgaatcattttcttttccactcttagtttatttgctggacactctcctatttgatataggac

SEQ ID NO: 130403 - DNA, 225 bp, Glycine max
gcggaatctgctagaattttctaataatggcgaaagacgttgagcaggtcacagagcaaggtgaatactccgcgaaggactaccatgaccctcctccggcaccgttgatcgacccagatgagctcacaaagtggaccttgtacagagccgccatagctgagtgcatagcaacactcctttttctttacatcaccgtgttgaccattattggctaaaagagacaga

SEQ ID NO: 130404 - DNA, 204 bp, Glycine max
tctatgatatgcacaatgagtaatgataagcttctgtgggatcgtcctattctggcgtaggaactcttgatgatgtgctggccaatttcgataccaatcttggaattcctttcggatgtgagatctatgatgctgttcgtataagctacgccgcatacctgatgcttgtatttctagttgtcttctttccattgcgtctcaaca

SEQ ID NO: 130405 - DNA, 222 bp, Glycine max
tctccaagtatgtcatcacattccttcaaaaattttgattctttgtgtgtgtatggtgatgataacttaattagtgtttatgaatatgtcaagccttactttagtggttctaaattgacaagctttctagctggtcataatatcaccattactgatggtattgacaaaactagtgcaactttgcaatttagacagttagcagattgtgatcttctcaagaga

SEQ ID NO: 130406 - DNA, 218 bp, Glycine max
cagggcacttcccgaagtgttaagagaatgcctctttctatagggggaggagctggtgcaaagaatgctattctcatgaatatgccaaatgctgttctttcaatgtggagatattttgttggagatctcgtctttgaagtttctaagatgacttctccctacattaaatgtacagtctctttcttcatagcatttggaaatttggctgatgacaccat

SEQ ID NO: 130407 - DNA, 171 bp, Glycine max
atcgagcttaatcggctcgagcaacgatattctgtgttgcgattatgttagttttgatggtttgattaccaagcaagttaagagagagatcgcagcaatgataaacagtctttgtggtggtgatgaaaaattgatgcgtgaaaggacacacctgatgttggcttgttgttc

SEQ ID NO: 130408 - DNA, 218 bp, Glycine max
gtttggaatttctgaagcgtaccggatttcattgtgatatcatttgtgtcactggatggactgctaccccaatgcaggatgttcaggttacaattgattggtttatttcctctcaggaatgtgttcccaggacctattgtgttttaaatccacaaaatccttttgtgttaaataggtggatggggaaattgactttcccccagggcacttcccgaagt

SEQ ID NO: 130409 - DNA, 217 bp, Glycine max
gagtgaacagcataaaagcacaacttgactgacatacgcaaccaaactaaagataaacaaaatttagaaacaaaaacatgttggtgaaggtgtacggtccaacctatggagcccccaagagggtgctggtgtgtctgattgagaaggaaattgagtttgaaacagtacatattgatctcttcaagggagagaataaggaacctgagttcctaaagct

SEQ ID NO: 130410 - DNA, 221 bp, Glycine max
gctgatggaagttggaaggaacgtggaaagggagaactgaaggttaatgtttccagtgaaaccaaaaaagccagacttctaatgaggtctaagggaaattttagattgattttgaatgcacgtctctaccctgatatgaagctcacaaatatggacaagaagggtgttacttttgcctgcatcaatagtgccagcgaagggaaaggtggtctttcaacatt

SEQ ID NO: 130411 - DNA, 221 bp, Glycine max
ggttcatcgtcccactttcttctccttttagggtttcctttttgtttctcctttccagatctgcatcttccattttttaggattaagcggtgagattcgtgaatctgagaaatgtcggattcttctcgggaggagaatgtttacatggcgaaattggcgacgcaggccgagcgttacgaggagatggttgagttcatggagaaggtagcaaagactgtgga

SEQ ID NO: 130412 - DNA, 212 bp, Glycine max
gagaaaatggggtctctaatggcctctcttactctcactcttgtattggcattactctctctaagcttgccatctcaaacctcagctgacaagtacgagtattcatgtcctccaccaccggagaagctgaacacataccactctccaccaccatcacttcaggtgtcgctggcagaataccctgctccgcgtgaggatgattagcagtatgg

SEQ ID NO: 130413 - DNA, 216 bp, Glycine max
atttcagtgtctacaataccaggtgattttgtcattggtgttaagttgacaaccataaacaatatgtgtgcatatgggctcaatcctggtatttcaggttctcgtcttttgggcaccattcctcagtctatttcacagcaaactgtttggaatcaaatggcaacagtgagaacaccattgaattttgattctagcaagcagagcttttgtcaattt

SEQ ID NO: 130414 - DNA, 215 bp, Glycine max
gagataactagaaacagtgtgatgaaaatgaaggtccttgttttcttcgttgctacaattttggtagcatggcaatgccatgcgtacgatatgttccctctccgaatgaacactggctatggtgcccgtactccggaggtgaaatgcgcaagttggaggcttgctgtggaagcacacaacgtctttggctttgagaccattcctgaagagtgcgt

SEQ ID NO: 130415 - DNA, 216 bp, Glycine max
tgatggaatggactggttcggtgaatagattactgagtgagggcaacgatattctgtgttgcgattatgctagttttgatggtttgattaccaagcaagttatgagagaaatggcagaaatgataaacagtctttgtggtggtgatgaaaaattgatgcgtgaaaggacacacctgctgttggcttgttgttcaagatgggcaatttgtaagaaag

SEQ ID NO: 130416 - DNA, 100 bp, Glycine max
ctcagccttggagttgtgaatgcgctccatcaagactctcttgttcgtgaaaacattacctttcaccttcatgtacatagcatggtacatgtgcttgtca

SEQ ID NO: 130417 - DNA, 218 bp, Glycine max
caaggaatggcaactggatctaccttgtgacaaaattcctagtgtcttgactacaactgatgagagattggtaggcacagaacatgagggatatgatccttttcttggtggaattcaaaaatatgccactcccatgatgcccctagatgaagaaattctttctaaagttgcacaggatatggttgaggaatggtttgattgtgttgatgaggaggatt

SEQ ID NO: 130418 - DNA, 219 bp, Glycine max
tacaaaccgcccttgttctatgctcttcagtgtacgtaatgataagcttcagtgggttcctcctatttggcgaaggaactcttgatgatgtgctggccaatttcgataccaatcttggaattcctttcggtactgtgctcaatgatgctgttcgcataacctacgacgatcacctgacgctggtagatccagatgactactctccagtgcgtctcaaca

SEQ ID NO: 130419 - DNA, 216 bp, Glycine max
gatttggacatcttggttgtttattatacaatagcaactcaatttagaaaatttctaccacattacattaggtggcatctgtataccttgttgatctacattctcccatcttttctcactgctgaaattaaatataagcggaatgtgagtactattcaaatttccggcttattttacgacggcagatacaaattctggactaaacacgagaaaaat

SEQ ID NO: 130420 - DNA, 220 bp, Glycine max
aaacagtctttgtggtggtgatgaaaaattgatgcgtgaaaggacacacctgctgtaggcttgttgttcaagaatggctatttgtaagatagatgtttggagagttgaatgtacagacccttctggatttccgctcacagttatttgtaatagcatttttaatgagatgctcattagatatagctatgtcaaattactgcgccaggctaaagctccaagt

SEQ ID NO: 130421 - DNA, 217 bp, Glycine max
gccagttctgatatttacaccatctgctctcaagactgtgaattatggaatcctgcttgcacaaaagcaatgactatgtcatttaatccaaacccgtgttctgatgcatggagtttggaatttctgaagcgtaccggatttcattgtgatatcatttgtgtcactggatggactgccactccaatgcaggatgttcaggttacaattgattggttta

SEQ ID NO: 130422 - DNA, 217 bp, Glycine max
gccctagttccaggaggcattcgcattggggcaccagcaatgacaacaagaggacttggtgagaaagaattttcactcattgctgatttcattcatgagggtgtgcaaataagtcttgaagccaaaagtttggtctcaggaacgaagctccaagattttttgaagtttgtaacatcttctgaatttcctttgggagagaaggtatcagagttgcgta

SEQ ID NO: 130423 - DNA, 226 bp, Glycine max
ggggatgcttccatggaatttatcaagcatgtttgtgctgtcctggcccttgaccaaagtgtgcagcatgaagttttggtcttgagaaaaaatttgctcaaatatgttgatgttaaggagtttgctcctgaagctaagtttcatggtccttgtcataccttcatcttatccaatgtcatatgcatgtattgtaatgactgcagagacttggatttgtgccgtgatt

SEQ ID NO: 130424 - DNA, 213 bp, Glycine max
ctcgagccgctcgagccgtggagtttggaatttttgaagcgtaccggatatcacagtgaaatcgtttgtgtcactggatggactgccaccccaatgcaggatgttcaggttacaattgattggtttatttcctctcaggaatgtgttcccaggacttattgtgttttaaatccacaaatccttttgtgttaaataggtggatggggaaactga

SEQ ID NO: 130425 - DNA, 212 bp, Glycine max
gcggtggcgacggcgaggaccccgagcaggccaagctccgggccgggctcaactcggccatcataagggagaagcccaacgtgaagtggaacgacgtcgcagggttggagagcgccaaacaggccttgcaggaggctgtgattttgcctgtaaagttccctcagttctttactgggaaaagacgaccctggagagctttcttgttgtatgga

SEQ ID NO: 130426 - DNA, 212 bp, Glycine max
cacagttggaggaaccattctgcgtagtgatctattggcaaattttttgacagagggcaattttagagcaagtgttgatttgcagcgcactcatcgtattaaaggaatgattaaaatggtggccacagttggtattcctgagaatacaggtatagcattggcctgtgctatgaatagttcttttagggggcgtgccagttctgatatttaca

SEQ ID NO: 130427 - DNA, 187 bp, Glycine max
gaaattttgataaaccgcgatcacaggttgccgcaccttaaaaccggaaacaaaagcaatcgttacttgatttcaagaatcttccaatttcttcctacttctttgtttacgatttcttaagggaaagaaaatcactctctgtgctggccacagacttcgtgaatcattttcttttccacacaacata

SEQ ID NO: 130428 - DNA, 210 bp, Glycine max
aagcctaccagtagtcatatgcttgtctcaaagattaagccatgcatgtgtaagtatgaactaattacagactgtgaaactgcgaatggctcattaaatcaattatagtttatttgatgatatctactacggataaccgtagtaattctagagctaatacgtgcaacaaaccccgaattctggaagggatgcatttattagataaaaggt

SEQ ID NO: 130429 - DNA, 207 bp, Glycine max
ctccctgcgacacggtgcagatcttcgtgaaaaccctaacgggtaagacgatcacccttgaggtggagtcttctgacaccatcgacaacgtgaaggccaagatccaggacaaggaaggcatccctccggaccagcagcgcctcatcttcgccggaaagcagctggaggacggccgcaccctcgccgactacaacatccagaaggagt

SEQ ID NO: 130430 - DNA, 206 bp, Glycine max
gtgaagttggtgcaccgtttgtacccagagattgatccagctctgaaccctgaccacgtccctcacattctgaagaagtgccctgatgccattccagaccctaaggccgtgcagtacgtgagaaacgaccgtggcacccccatgattctagacaacaattactacagaaatatattggacaacaagggcttgttgatagtggatca

SEQ ID NO: 130431 - DNA, 206 bp, Glycine max
gctgttggcttgacatcaagttacactccaactccattgttggaatctggtttgcaaaaagacagagggttaattgtggagtattttggaaggatgtcttacgttgctcacaacgttaatcatccccaagagcaagatttgttggagggaaatttttcctttgatattaaatctcgctctagattggaaaaagtttcctctacaaa

SEQ ID NO: 130432 - DNA, 208 bp, Glycine max
  unsure (1)..(208): unsure at all n locations
ctcgagccgcaaaaagacagagggttaattgtggagtattttggaaggatgtcttacgttgctcacaacgttaatcagcgccaagagaaagatttgttggagggaaatttttcctttgatattaaatctcgctctagattggaaaaagtttcctctacaaaagcacaatttgtntagtggaaaaaccttcaaatatgatataattggt

SEQ ID NO: 130433 - DNA, 204 bp, Glycine max
ggtttctcttcctcccttggagaaaaagaagagccaccgctgcgacgccgttcgtgcatttttgaggtgccgctgtcatgtttgggcgtggtggaccaaggaggagtgataactccaaatattatgatattctcgggatttccaaaaatgccagtgaagatgaaatcaagaaggcctatagaaaggcggctatgaagaaccatc

SEQ ID NO: 130434 - DNA, 204 bp, Glycine max
gttaaaattaatgtaacatatgctactattagcttgacatcaaattacactccaactccattgttggaatctagtttacaaaaagacagagggttaattgtggagtattttggaaggatgtcttacgttgctcacaacgttaatcatacccaagagaaagacttgttggagggaaatttttcctttaatattaaatctcgctct

SEQ ID NO: 130435 - DNA, 203 bp, Glycine max
ggttgatacttatcataccaatcctgagaatagcagttcgtagtatttttgtggcgcctttcacaggcggaaggcccattccggtggttacatttccgaataccatcgtgcagattaaagcagacatgaattcacggtttcagcttttgagtaccactaccaatggtgattttgttcaaggaaaagatctcgcaatggttaaa

SEQ ID NO: 130436 - DNA, 207 bp, Glycine max
gagcaattgagtttctaagataaccacttatactactttaattacatacaataggcaaccgcgaagaccgtgaaggatgtttcacctcacgatttcgtgaaagcttacgcctaccatactcaagacgttccggcaagatggaacttcctaagtggactgatattgtaaaaacagcaaaatttaaggaattggctccatatgatcctg

SEQ ID NO: 130437 - DNA, 207 bp, Glycine max
ggagtttggaatttctgaagcgtaccggatttcattgtgatatcatttgtgtcactggatggactgctaccccaatgcaggatgttcacgttacaattgattggtttatttcctctcaggaatgtgttcccaggacctattgtgttttaaatccacaaaatccttgtgtgttacataggtggatggggagattgactttcccccagg

SEQ ID NO: 130438 - DNA, 208 bp, Glycine max
tcattctccatacctcaacgaagaggttaaagagacggcaacactttgctgtccgccttgaccgagcagagcttcgtcttggccctcgattttgccctaaagtactctcagtcacaacagacaccgtcgtcgtcgtcgtcgtcatcaatggcaccgaagcagaccaaggctgagaagaagatcgcttacgatgcgaactgtgcgacct

SEQ ID NO: 130439 - DNA, 209 bp, Glycine max
cagcgaagtcgtaggagggtttcaaaagatggagaacatgcagagcttctggcaattgggcgatgaactccgtggacactcaaaagcatcggaggatcacaaatggttaatggttgcttcgaaattggcggaacagacaagattgaagggggagcgtgtgaacaaccttgatctttcaaagggccccattgaaacaaggtcaagggata

SEQ ID NO: 130440 - DNA, 217 bp, Glycine max
tggcgaccaccgagccggagcaccgccgcgacgaaaacgacgacgacagcgtgacggcggaggatgaggacaccggagcgcaggtcgctccgatcgtgaagctcgaagaggtcgccgtcaccaccggcgaggaggacgaggatcccatccttgatctgaaggcgaactgtatcggtttgacaaggaggggaaccagtggaaggagcgtggcggcggg

SEQ ID NO: 130441 - DNA, 219 bp, Glycine max
atcagagtaatattcagatttccggcttattttacgacggcagatacaaattctggactaaacacgagaaaaatcttgctttgacagaagaggaaaagatggaagtgattagaaatagaggcattcctgctgatgttcttgcaaagcgagctcatgaatttgaaaaacatgttgctcatgaaagcctcaaggatcaaattcctgctgttgacaagttgt

SEQ ID NO: 130442 - DNA, 216 bp, Glycine max
gtcgcgtgtactttcttgcgaaacagaagggcgaaggggcacacacaacttttttgtttttttgtagagcgagagagaaaaaaatgttggggatcttcagcagttccgtggtgtcgccgccggaggagctggtggctgccggcagcagaacgccgtcgccgaagacgacggcggggaagctgctgaaccggttcgtggagaacaaggcgtcggcgg

SEQ ID NO: 130443 - DNA, 217 bp, Glycine max
gagaatacaggtatagcattggcttgtgctatgaatagttcttttagggggcgtgccagttctgatatttacaccatctgctctcaagactgtgaattatggaatcctgcttgcacaaaagcaatgactatgtcatttaatccaaacccgtgttctgatgcatggagtttggaatttttgaagcgtaccggatttcactgtgatatcatttgtgtca

SEQ ID NO: 130444 - DNA, 217 bp, Glycine max
gtttggagagttgaatgtggaatcccttctggatttccgctcacagttatttgcaatagcatttttaatgagatgctcattagatatagctatgaaaaattactgcgccaggctaaagctccaagtatgtttttacaatccttcaaaaattttgtttctttgtgtgtgtatggtgatgataacttaattagtgttcatgaatatgtcaagccttact

SEQ ID NO: 130445 - DNA, 217 bp, Glycine max
agcatttggaaatttggctgatgacaccatcaattttgaggcttttccccacaagctggtgcattttggagagattcaggaaaaagttgtattgaaattttcacaagaggaatttcttacagcttggtcaactcaggtgcgtcctgcaacaactctgttggctgatgggtgtccatatttgtatgctatggtgcatgatagttcagtgtctacaata

SEQ ID NO: 130446 - DNA, 217 bp, Glycine max
  unsure (1)..(217): unsure at all n locations
gaaattttgataaaccgcgatcacaggttgccgcaccttaaaaccggaaacaaaagcaatcgttacttgatttcaagaatctctcaatttcttcctacttctttgtgtacggtttcttaagggaaagaaaatcactctctgtgctggccacagacttcgtgaatcattttcttttccacacaacatacgattcagngaacgggggatgtgctgcccc

SEQ ID NO: 130447 - DNA, 219 bp, Glycine max
aattttcacaagaggaatttcttacagcttggtcaactcaggtgcgtcctgcaacaactctgttggctgatgggtgtccatatttgtatgctatggtgcatgatagttcagtgtctacaataccaggtgattttgtcattggtgttaagttggcaactataaacaatatgtgtgcatatgggctcaaacctggtatttcaggttctcgtcttttgggca

SEQ ID NO: 130448 - DNA, 218 bp, Glycine max
gctgaaattcaatataagcggaatctgagtaatattcatatttccggcttattttacgacggcagatacaaattctggactaaacacgagacaaatcttgctttgacagaagaggaaaagatggaagtgattagaaatagaggcattcctgctgatgttcttgcaaagcgagctcatgaatttgaaaaacatgttgctcatgaaagcctcaaggatca

SEQ ID NO: 130449 - DNA, 216 bp, Glycine max
gtgcggtaggctcatccgagaccggaagcagcaatggggatcgatctcaaggccggaggtaaaagcaaaaaaaccaaaagaacagcacccaagtccaatgatatctatcttaagctcttggtcaagctttatcgcttccttgttcggagaactggcagcaaattcaatgccgttatactcaagagattgttcatgagcaaggttaacaagccccca

SEQ ID NO: 130450 - DNA, 215 bp, Glycine max
caagtaagttgatgagagaaagtgtgctacattgttcaaagactgtacggaaaattccatttgtcatttttgcacacggtgattctcgggttggaaaatctttgctagttgatagacttatcacagatttttgtgatcatctagaaattggggaggatgctgtttattcaaggaatccttcggatcctttctggagtgggtataggagacaacca

SEQ ID NO: 130451 - DNA, 215 bp, Glycine max
cttgttgagagttgctgcttggaagaaaggctgtttaatggttaacattgtgatgtctgggaatgcagcagtcaaaaggagtgattgggcctcattggtacaagtgtttttaacaaacagcaacagtacagagcatttcgatgcatgtaagtggacaaaatcggaaccacattcctgggaattgatcttcccaatagaggtatgtggtcctaata

SEQ ID NO: 130452 - DNA, 215 bp, Glycine max
aggtggttctgctagatttctggccaagtccatttgggatgagggtcaggattgcacttgctgaaaagggtatcaaatatgagtccaaagaagaggacttgcagaacaagagccctttgctcctcaaaatgaacccggttcacaagaaaatcccggttctcatccacaatggcaaacccatttgtgaatctctcgttgctgttcagtacattgag

SEQ ID NO: 130453 - DNA, 215 bp, Glycine max
ggatggactgccactccaatgcaggatgttcaggttacaattgattggtttatttcctctcaggaatgtgttcccaggacttattgtgttttaaatccacaaaatccatgactccctgaataggtggatggggaaactgactttcccacaggggacttcccgaagtgttaagagaatgcctctttctatagggggaggagctggtgcaaagaatg

SEQ ID NO: 130454 - DNA, 214 bp, Glycine max
ctaaaccctactcattctccatacctcaacgaagaggttaaagagacggcaacactttgctgtccgccttgaccgagcagagcttcgtcttggccctcgattttgccctaaagtactctcagtcacaacagacaccgtcgtcgtcgtcgtcgtcatcaatggcaccgaagcagaccaaggctgagaagaagatcgcttacgatgcgaactgtgc

SEQ ID NO: 130455 - DNA, 219 bp, Glycine max
agacaagggacaagcttagttgtcaagttggaatcaacccatactccatggaatggactggtttggccaatagattactgagtaagggcaacgatattctgtgttgcgattatgctagttttgatggtttgattaccaagcaagttatgagcaagatggcagaaatgataaacagtctttgtggtggtgatgaaaaattgatgcgtgaaaggacacacc

SEQ ID NO: 130456 - DNA, 213 bp, Glycine max
gtttaatggttaaaattgtgatgtctgggaatgcagcagtcaaaaggagtgattgggcctcattggtacaagtgtttttaacaaacagcaacagtacagagcatttcgatgcatgtaagtggacaaaatcggaaccacattcctgggaattgatcttcccaatagaggtatgtggtcctaataatggttttgaaatgtggagttctgagtggg

SEQ ID NO: 130457 - DNA, 212 bp, Glycine max
gaaagatttgttgtaaggaaatttttcctttgatattaaatctcgctctagattggaaaaagtttcctctacaaaagcactatttgttagtggaaaaaccttcaaatatgatatagtttgtgctggttcacattcttcagaagatttttctgaaaaggaagatcaagaaaaacccaaaaagattgatgccagattgagacaaagaatagatc

SEQ ID NO: 130458 - DNA, 213 bp, Glycine max
cattactgatggtattgacaacactagtgcaactttgcaatttagaaagttagcagattgtgattttctcaagagaaactttaagcagatgtctaatgttttgtgggtggctcctgaggataaggcgagtttatggtcacaacttcattatgtttcgtgtaataatctggaaatgcaagaagcttatcttgtcaatctcgtaaatgtgttacg

SEQ ID NO: 130459 - DNA, 212 bp, Glycine max
gccaggtaagatttagaagtcttattccaagctacattagggactcatctgtagctgttattgtatatgatgttgcaagccggcagactttcctaaatactgcaaagtggattgaagaggtgcgaacagagagaggcagtgatgtcattattgttcttgttgggaacaaaactgatcttgtcgagaaaagacaagtctctatagaggaaggg

SEQ ID NO: 130460 - DNA, 210 bp, Glycine max
gcgcgtggttacacctcctgttgatgctactactaattggatgtggcagcttgccaaggcccatgtttgctccaatgatgctggggtgcaccaacttgttaaccattggttacgtacacatgccaacttggaaccatttatattggcggctcataggcaattaagtgctatgcatccaattttcaagttgttggacccccacatgaggta

SEQ ID NO: 130461 - DNA, 213 bp, Glycine max
attgaatgtcccaaggatgagaaacttcctcgtcgcaaaatttttgataaacctaagacgcgctgcttcactattctccctatggagtttaatcttgtggttcgtcagaagtttttaaattttgtgaggttcattatgaagaaaagggacaagcttagttgtcaagttggaatcaacccatactccatggaatggactggtttggccaataga

SEQ ID NO: 130462 - DNA, 216 bp, Glycine max
attggcctgtgctatgaatagttcttttagggggcgtgccagttctgatatttacaccatctgctctcaagactgtgaattatggaatcctgcttgcacaaaagcaatgactatgtcatttaatccaaacccgtgttctgatgcatggagtttggaatttctgaagcgtaccggatttcattgtgatatcatttgtgtcactggatggactgccac

SEQ ID NO: 130463 - DNA, 211 bp, Glycine max
cactcacaaacacacactgaactaaaaaacatcaaaagagacatggctgagcaaaccttcatcatgatcaagcctgatggcgtccaaagaggccttattggcgagatcattagcagatttgagaagaaaggtttctacttgaaaggtgcgaaacttgttactgtggaccgtccttttgctgagaagcactatgctgatttgtctgccaagc

SEQ ID NO: 130464 - DNA, 211 bp, Glycine max
atttcacagcacattgtatttcatcaaatggcaacagtgagaacaccattgaagtttgattctagttagcagagcttttgtcaattttctattgaccttctcggtggaggaattttagtggacaaaactggagattggatcacacttatacaaaattctccaattagtaacttgttgagagttgctgcttggaagaaaggctgtttaatgg

SEQ ID NO: 130465 - DNA, 211 bp, Glycine max
cgctcgagccgattcggctcgagcctgagtgggctccaattaattgtcgagttcatcgacaacagattcacatcactgaaggaacttatgtcagaaagcaagatgtcagcattgaatatgatgcatgtacaattccaactgattgtggttcattggttgttgccaaggttggaaatcacaaacaaattgttggtttccatgttgctggaag

SEQ ID NO: 130466 - DNA, 203 bp, Glycine max
ctgcaatgcatgtgggagctatagaaattatcattgatagtttcgcaagtcctgactgcaacatagttggtgcaatgcttttggttgatacttatcataccaatcctgaaaatgcagttcgtagtatttttgttgcgcctttcagaggcggaaggcccattcgggtggttacatttccgaataccatcgtgcacattgaacca

SEQ ID NO: 130467 - DNA, 209 bp, Glycine max
attcctggtcctgatcctaaatagggttagggtttatgcaatcgaactccagcgacggtgcatttgtgcgtaatcgatggcgaatcgcacggatccagcagcgaagagcataagagggacgaaccctgagaacctggtggagaagattctccgatcgaagatctaccagaacacgtactggaaggagcaatgtttcgggttaacggcgg

SEQ ID NO: 130468 - DNA, 211 bp, Glycine max
gcaaaggattctacccgccgctcgatgggaattgcgcttcaaggcgtctcgtagggctaatccgcctcacgagggtcaccaacggcacgtgcctttggggggccgaggccccctactgctggtcggcaaacggacggcgggcgcacgcgtcgcttctagcccggattctgacttagaggcgttcagtcataatccaacgcacggtagcttc

SEQ ID NO: 130469 - DNA, 209 bp, Glycine max
ctcgagccgattcggctcgagaagcaaagggacaagcttagttgtcaagttggaatcaacccatactccatggaatggactggtttggccaatagattactgagtaagggcaacgatattctgtgttgcgattatgctagttttgatgggttgattaccacgcaagatatgagtctgatggcagaactgataaaccgcactcgtggtgg

SEQ ID NO: 130470 - DNA, 243 bp, Glycine max
ccacattcctgggaattgatcttcccaatagaggtggtcctaataatggttttgaaatatgtagttctgagtgggcaaatcaaacttcatggcatttgagtttccttattgacaatcccaaacagtctacagtttgtgatattctcttaggaatttctcaagattttgatattgctggtaatactcttatgccagctttttctgttccacaggctactgccagatcttctgaaaatgcggaat

SEQ ID NO: 130471 - DNA, 245 bp, Glycine max
actcgagccgaatcggctcgagcaattcaccaagcgtccctatgaacaaccttatggtgtactatacatggttaacggatactaaagacacctctaaagaaggatatagttttgaagagatatgcatcaagaaagaagcgtttgagggagaagagaagttttgtgcaaaatccttgggaacagtaattggttttgccatttcaaagctgggagagaacattcaagtactttcaagttcctttgtc

SEQ ID NO: 130472 - DNA, 241 bp, Glycine max
gtgttgaagaggcttacaacaagctaatagttgaacttgagaaaagtgttcctacattggttggcattgaatgtcccaaggatgagaaacttcctcgtcgcaaaatttttgacaaacctaagacgcgctgcttcactattctccctatggagtttaatcttgtggtccgtcaaaagtttttaaattttgtgaggttcattatgaagaaaagggacaagcttagttgtcaagttggaatcaa

SEQ ID NO: 130473 - DNA, 242 bp, Glycine max
ctctctctcaccaaagccttcctagaacgaaaaaaaaaagaagagcaattttccctcaccaaagaagaagaagcaaacaatggccgatcaacttaccgatgaacagatctccgagttcaaggaagccttcagcttgttcgacaaggacggcgatggttgcatcacaaccaaggagcttggaactgttatgcgttcattggggcaaaacccaactgaggcagagctccaggacatgatcaatg

SEQ ID NO: 130474 - DNA, 238 bp, Glycine max
cctgccagtagtcatatgcttgtctcaaagattaagccatgcatgtgtaagtatgaactaattcagactgtgaaactgcgaatggctcattaaatcagttatagtttgtttgatggtatcttctactcggataaccgtagtaattctagagctaatacgtgcaacaaaccccgacttctggaagggatgcatttattagataaaaggtcaacacaggctctgcctgttgctttgatga

SEQ ID NO: 130475 - DNA, 238 bp, Glycine max
attgaatatgatgcatgtacaattccaaatgattgtggttcattggttgttgccaaggttggaaatcacaaacaaattgttggtttccatgttgctggaagcaaaggaagactgggatatgcttcattgataccatatgttgagccagttgtgcaagctcaaagtgctgaagtttacttcgacttcttccctgtggaggttgatagtcaagagggagttgctcacattggtgaattga

SEQ ID NO: 130476 - DNA, 243 bp, Glycine max
aaggattcaagttctgatctcatctccaacatcaactacccttccatagcagtaaacttcaccggcaaagcagccgtgaacgtgagtagaactgtcacaaacgttggtgaagaagatgaaacagcgtactctcccgttgtggaagctcccagtggagtaaaagtcacagtgactccagataaacttcagtttacaaagagtagtaaaaaacttggctaccaagttattttttcctcaactttg

SEQ ID NO: 130477 - DNA, 243 bp, Glycine max
aaaccttagtgttcatgaatatgtcaagccttactttagtggttcccaattgaaaagctttctagctagtcataatatcaccattactgcatggtattgacaaaactagtgcaactttgcaatttagaaagttagcagattgtgattttctcaagagaaactttaagcagatgtctaatgttttgtgggtggctcctgaggacaaggcgagtttatggtcacaacttcattatgttccgtgta

SEQ ID NO: 130478 - DNA, 235 bp, Glycine max
attgtggttcattggttgttgccaaagttggaaatcacaaacaaattgttggtttccatgttgctggaagcaaaggaagactgggatatgcttcattgataccatacgttgagccagttgtgcaagctcaaagtgctgaagttgactttgacttcttccctgtggaggttatagtcaagagggagttgctcacattggtgaattgaaaccggtgtctatgttcgctgcctacaaa

SEQ ID NO: 130479 - DNA, 240 bp, Glycine max
catcgagcgattcggctcgagggcaaattttgtgacagagtggaattgtagatcaagtgttgatttgcagcgcattcatcggatcaaaggaatgattaaaatggtggccacagttggtattcctgagaatacaggtatagcattggcctgtgctatgaatagttcttgtagggggcgtgccagttctgatatttacaccatctgctctcaagactgtgaattatggaatcctgcttgcac

SEQ ID NO: 130480 - DNA, 170 bp, Glycine max
ccgcgatcacaggttgccgcaccttaaaaccggaaacaaaagcaatcgttacttgatttcaagaatctctcaatttcttcctacttctttgtgtacggtttcttaagggaaagagaatcactctctgtgctggccacagtcttcgtgaatgattttcttttccacacaac

SEQ ID NO: 130481 - DNA, 241 bp, Glycine max
gcctagtaccagaattatgtgatacgaatggagcatacctggtggcaacagaccaaggttatggagacagaacagactttgtcatgagcccacgcgccttcttgaaattgggacgtgatgaatattcatctgaagagcttaagaaatacggcacagtggatattgaatacaaaagggttccatgcacatacaccggcaatgtcacgttccacatcaaggaaactagcaccaaccctggtta

SEQ ID NO: 130482 - DNA, 237 bp, Glycine max
gccaaagcctagaattgattacactttgaaggctgttggtggaagtttgacggcactgcctggaatttcagatatgattgatgatatggtgaactcaatcgttaccgatacgctccaatggcctcataggattgttgttcctcttgggggcatacctgttgatactagtgaactggagcttaaaccccagggaacgcttagagtgactgtaattaaagcgaatgacctaaagaatat

SEQ ID NO: 130483 - DNA, 236 bp, Glycine max
cagagcattttgatgcatgtaagtggacaaaatcggaaccacattcctgggaattgatcttcccaatagaggtatgtggtcccaataatggttttgaaatgtggagttctgagtgggcaaatcaaacttcatggcatttgagtttccttattgacaatcccaaacagtctacagtttttgatattctcttgggaatttctcaagattttgaaattgctggtaatactcttatgcca

SEQ ID NO: 130484 - DNA, 236 bp, Glycine max
cttactttagtggttctaaattgaaaagctttctagctggtcataatatcaccattactgatggtattgacaaaactagtgcaactttgcaatttagaaagttagcagattgtgattttctcaagagaaactttaggcagatgtctaatgttttgtgggtggctcctgaggacaaggcgagtttatggtcacaacttcattatgtttcatgtaataatctggaaatgcaagaagct

SEQ ID NO: 130485 - DNA, 238 bp, Glycine max
ggatccactaactgaaggagctatggggttgacatttaccaagctttttagccggcttttcgccaagaaggaaatgcgaattctaatggttggtcttgatgccgctggtaagaccaccatcctgtacaagctcaaacttggagagatcgttaccacaattcccaccattgggttcaacgtggagactgtggaatacaagaacattagtttcactgtctgggatgttggtggccaggac

SEQ ID NO: 130486 - DNA, 170 bp, Glycine max
cgcgatcacaggttgccgcaccttaaaacctgaaacataagtaatcgttacttgatttcaagaatcttccaatttctttctacttcttagtgtacgatttcttaagggaaagaaaatcactctctgtgctggccacagactccgtgaattctctcctgatccacacattg

SEQ ID NO: 130487 - DNA, 238 bp, Glycine max
gcgcactcatcgtattaaaggaatgattaaaatggtggccacagttggtattcctgagaatacaggtatagcattggcctgtgctatgaatagttcttttagggggcgtgccagttctgatatttacaccatctgctctcaagactgtgaattatggaatcctgcttgcacaaaagcaatgactatgtcatttaatccaaacccgtgttctgatgcatggagtttggaatttctgaag

SEQ ID NO: 130488 - DNA, 237 bp, Glycine max
tgggaatagtgctgcaatggcttcaagtcaggaggaggtgacccttttgggagctactggaagcccatttgtgtgcagggttcatattgccctcaagttgaagggagttcaatacaaatatgtcgaagaaaatttgaggaacaagagtgaactgcttctcaaatccaacccagttcacaagaaggttccagtgtttattcacaatgagaagcccatagcagagtctcttgtgattgt

SEQ ID NO: 130489 - DNA, 237 bp, Glycine max
ccagacatgaattcaaggtttcagcttttgagtaccactaccaatggtgattttgttcaaggaaaagatctcgcaatggttaaagttaatgtagcatgtgctgctgttggcttgacatcaagctatactccgactccattgttggaatctggtttgcaaaaagacagagggttaattgtggagtattttggaaggatgtcttacgttgctcataacgttaatcagccccaagagaaa

SEQ ID NO: 130490 - DNA, 236 bp, Glycine max
gtacagtctctttcttcatagcatttggaaatttggctgatgacaccatcaattttgaggcttttccccacaagctggtacggaatggagagattcaggaaaaagttgtattgaaattttcacaagaggaatttcttacagcttggtcaacccaggtgcgtcctgcaacaactctggttggctgatgggtgtccatatttgtatgctatggtgcatgatagttcagtgtctacaat

SEQ ID NO: 130491 - DNA, 235 bp, Glycine max
gtgggagagagaagagcggaagagaaaatgacgaccaggttcaagaagaacaggaagaagagaggtcacgtcagcgccggacacggccgtatcggaaagcaccgcaagcatcccggaggtcgcggtaacgccggtggcatgcatcaccaccgtatcctcttcgacaagtaccatcctggtttcttcgggaaggtaggcatgcgctacttccacaaacttcgcaacaaattctaca

SEQ ID NO: 130492 - DNA, 240 bp, Glycine max
aaaaatatgccactcccatgatgcccctagatgaagaaactctttctaaggttgcacaagatatggttgaggaatggtttgattgtgttgatgaggaggattcctttgaggaagtttctttgagtgcagcactcaatggtgttgagggtttggactatatggaaagaattcctcttgccacatctgagggttttccccatgtgctttcacgcaaaaatggtgaaaaaggcaaaaggagat

SEQ ID NO: 130493 - DNA, 235 bp, Glycine max
ctcgagccgcaccattgaattttgattctagcaagcagagcttatgtcaattttctattgaccttctcggtggaggaattttagtggacaaaactggagattggatcacacttatacaaaattctccaattagtaacttgttgagagttgctgcttggaagacaggctgtttaatggttaagattgtgatgtctgggaatgcagcagtcaaaaggagtgattgggcctcattggt

SEQ ID NO: 130494 - DNA, 237 bp, Glycine max
ttcaaatatgatataattggtgctggttcacattcttcagaagattttcctgaaaaggaagatcaagaaaaacccaaaaagattgataccagattgagacaaagaatagatcctcaatacaatgaggttcaggctcagatggaaacaaatttgtttaaattgtctcttgatgatgttgaaactcctaaaggttccatgttggatcttaaaatttctcaatctaaaattgcacttccc

SEQ ID NO: 130495 - DNA, 239 bp, Glycine max
ggagatgcaagaagcttatcttgtcaatctcgtaaatgtgttacgagaattgtatttgcacagtccagaggaagctcgccaattgagaaggaaagctctctctcgtattgaatggctgcaaaaagctgatgtgcctaccatagcacagattgaagagttccattcgatgcagaggatgattgaatgcccctgatcgaatgataatatcgatctactgttgagcattggtttgttgggtt

SEQ ID NO: 130496 - DNA, 235 bp, Glycine max
ccatactccatggaatggactggtttggccaatagattactgagtaagggcaacgatattctgtgttgcgattatgctagttttgatggtttgattaccaagcaagttatgagctagatggcagaaatgataaacagtctttgtggtggtgatgaaaaattgatgcgtgaaatgacacatctgctgttggcttgttgttcaaggatggcaatttgtaagaaagatatgtggagag

SEQ ID NO: 130497 - DNA, 235 bp, Glycine max
ggaatgagttgggctaagtaccttgtgagcctttgtgccttgaagggaatgactactagcttgcttgttgggtcaatggggcaagctaggtacactactcagattgcaaggtcgcacatgatcccaccctttttcgcattggttcacccgataaccggaacccctgtgaatgcgactctcttgagcactattagttgctctgccatcgctcttttctcaagcttggatgtattgt

SEQ ID NO: 130498 - DNA, 235 bp, Glycine max
gttttatgggggccatgatatcgaatttggcatttgtattccgtaatatcttttcgaaaaagggcatgaagggaaagtctgttagtggaatgaattactacgcatgtttatctattttatctcttgctattctcacacccttcgcaattgctgtggaaggaccgcaaatgtgggctgctggatggcaaacagccatgtctcaaattggaccccaattcatatggtggctagctgc

SEQ ID NO: 130499 - DNA, 236 bp, Glycine max
gagcccatatgcacacatattgtttatggttgtcaacttttgggcaccattcctcagtctatttcacagcaaactgtttggaatcaaatggcaacagtgagaacaccattgaattttgattctagcaagcagagcttttgtcaattttctattgaccttctcggtggaggaattttagtggacaaaactggagattggatcacacttatacaaaattctccaattagtaacttgtt

SEQ ID NO: 130500 - DNA, 236 bp, Glycine max
ggaaatgcaagaagcttatcttgtcaatctcgtaaatgtgttacgagaattgtatttgcacagtccagaggaagctcgccaattgagaaggaaagctctctctcgtattgaatggctgcaaaaagctgatgtgcctaccatagcacagattgaagagttccattcgatgcagaggatgatgaatgctcctgattcaaaacctaatatcgatctactgttgagcattgatttgttgg

SEQ ID NO: 130501 - DNA, 232 bp, Glycine max
  unsure (1)..(232): unsure at all n locations
tcacccctggcacgacttagagattgggccaggagctccagcagttttcaactgtgtggttgaaattggcaaaggaagtaaggttaagtatgagctggacaagacaagtggacttataaaggttgatcgtattctttactcatcagtagtctacccacacaactaacgatattnnccaanaaccatttgtgaagacagtgatcctatggacgtgctggttctaatgcaggaa

SEQ ID NO: 130502 - DNA, 232 bp, Glycine max
gtttctcttcctccctggaagaaaaagaagagtcaccgctacgacgccgttcgtgcttttttgaggtgccacagtcatgtttgggcgtggtggaccaaggaggagtgacaactccaaatattatgatattctcggggtttccaaaaatgccagtgaagatgaaatcaagaaggcctatagaaaggctgctatgaagaaccatccagataagggaggagatcctgaaaagttc

SEQ ID NO: 130503 - DNA, 234 bp, Glycine max
tggagttgccctccgcaatccatgtcaaacgcatcgctaacgatccatcccaacagatcggggaatctgtgcttctcattaagggtcctcagggaaggattaacagagctatctggggaccccttaacacaaccattatcagtgctggcgaagatgctgttattcgtatttgggattccgagaccggaaaactgcttcaagagtccgacaaggaatctggccataaaaagactg

SEQ ID NO: 130504 - DNA, 234 bp, Glycine max
cgcgctgcttcactattctccctatggagtttaatcttgtggttcgtcagaagtttttaaattttgtgaggttcattatgaagaaaagggacaagcttagttgtcaagttggaatcaacccatactccatggaatggactggtttggccaatagattactgagtaagggcaacgatattctgtgttgcgattatgctagttttgatggtttgattaccaagcaagttatgagca

SEQ ID NO: 130505 - DNA, 226 bp, Glycine max
atttctttgtattgttattattatagcaggcacctaatagatagatagatagatacgtagggatagggttaaggccatggagcgcatcatctgcgccaagtacaagctaggtcgcaagatcggaagcggatccttcggcgaaatctaccttgcgacgaatattgataccttcgagatcgtcgccgtcaagatcgagaacggtaaaacgaagcatccacaattgctt

SEQ ID NO: 130506 - DNA, 237 bp, Glycine max
gcggaatttgagtaatattcatatttccggcttattttacgacggcagatacaaattctggactaaacacgagaaaaatcttgctttgacagaagaggaaaagatggaggtgattagaaatagaggcattcctgctgatgttcttgcaaagcgagctcatgaatttgaaaaacatgttgctcatgaaagcctcaaggatcaaattcctgctgttgacaagttgtattctactaaggg

SEQ ID NO: 130507 - DNA, 235 bp, Glycine max
gcttagtgaggctgacatgatcgctgttctttgggaaatgatatttaggggaactgacacggtggcaattctgctggagtggatcttggctcggatggttctccaccccgacatccaagccaaagcacagcgcgaaatagactccgtctgcggaccctacaggctcgtatccgaagcagacatgccgaacctgcgctaccttcagggcatagtaaaagaaactctccgcgtgcac

SEQ ID NO: 130508 - DNA, 233 bp, Glycine max
  unsure (1)..(233): unsure at all n locations
cgggtgtactttcttgcgaaaccgagagatcgaaggggcaaacacgatttgttgtantctctgttttatttgttgtagagagagagagagagaaaatgttggggattctcagcagttcagtggtgtcgccgccggaggagctggtggccgctggcagcagaacgccgtcgccgaagacgacggcggggaagctgctgaaccggttcgtggatagcaaggcgtcggcggtgtcg

SEQ ID NO: 130509 - DNA, 231 bp, Glycine max
cacactcccatcttctcatctcgtaaaccctaaaccccgttttcagtgacatcgagatcgatcgaacatggatgaggagtacgatgtgatcgtgttgggcacgggtctcaaggagtgcattctcagcggtcttctctccgtcgatggcctcaaggttctgcacatggacagtgtcgactattacggaggagaatccacttcgctcaatcttattcagctttggaagagatt

SEQ ID NO: 130510 - DNA, 230 bp, Glycine max
aaagtgttcctacattggttggtattgaatgtcccaaggatgagaaacttcctcgtcgcaaaatttttgacaaacctaagacgcgctgcttcactattctccctatggagtttaatcttgtggtccgtcagaagtttttaaattttgtgaggttcattatgaagaaaagggacaagcttagttgtcaagttggaatcaacccatactccatggaatggactggtttggcc

SEQ ID NO: 130511 - DNA, 231 bp, Glycine max
aaagatgtttggagagttgaatgtggaatcccttctcgatttccgctcacagttatttgtaatagcatttttaatgagatgctcattagatatagctatgaaaaattactgcgccaggctaaagctccaagtatgtttttacaatccttcaaaaattttgtttctttgtgtgtgtatggtgatgataacttaattagtgttcatgaatatgtcaagccttactttagtggt

SEQ ID NO: 130512 - DNA, 227 bp, Glycine max
cttcacagcacttgacaaaagtacgtggtgatgagaacaccaattgcaagcaatgatgaaagtggtttgaaggttgggttttggagcccagaagaggacagaatattagtggatttcattgagaaacatggccatggagattggagatcccttccaaggcttgcaggcttaaacaggtgtggaaagagttgcagactaaggtggactaattacctcaggcctgatat

SEQ ID NO: 130513 - DNA, 230 bp, Glycine max
ctcgagccgttgcaatttagaaagttagcagattgtgattttctcaagagaaactttaagcagatgtctaatgttttgtgggtggctcctgaggataaggcgagtttatggtcacaacttcattatgtttcgtgtaataatctggaaatgcaagaagcttatcttgtcaatctcgtaaatgtgttacgagaattgtatttgcacagtccagaggaagctcgccaattgag

SEQ ID NO: 130514 - DNA, 229 bp, Glycine max
  unsure (1)..(229): unsure at all n locations
gtacagtctctttcttcatagcatttggatgtttggctgatgacaccatcaattttgaggcttttacacacaagataggagatagnggagagattcaggaaaaagttgtattgaaattttcacaagaggaatttgttacagcttggtcaacccaggtgcgtcctgcaagaattctggtggctgatgggtgtgcatatttgtatgctatggtgcatgatagttcagtgtc

SEQ ID NO: 130515 - DNA, 235 bp, Glycine max
cggctcgagatttttttttatttgaaataatgtccgggatcatccacaagattgaggagaccctccatgtgggagggcacaagaaagaggagcacaaaggagaacaccatggtgagcacaaaggtgaacacaaaggagaacaccatggtgagcacaaaggtgaacacaaaggagaacaacaccatggggagcacaaggagggacttgtggataagatcaaggacaagatccatgg

SEQ ID NO: 130516 - DNA, 232 bp, Glycine max
cttaattagtgttcatgaatatgtcaagccttactttagtggttataaattgaaaagctttctagctagtcataatatcaacattactgatggtattgacaaaactagtgcaactttgcaatttagaaagtgagcagattgtgattttctcaagagaaactttaagcagatgtctaatgttttgtgggtggctcctgaggacaaggcgagtttatggtcacaacttcattat

SEQ ID NO: 130517 - DNA, 232 bp, Glycine max
cgaggcgagaaggtcggagaagaaggtccacgacatgatggacgcggctcggaagagagcgcaacgacgcgccgtttacctcgccaagagacgcggcgatcctcagcaatccattcagctcgtcggctttcctagccgaacctatcgcgacgacgctctctaccaagcctcacaggatcagcagggcctgataccttggaatgggaaacaggatgtattgatagaccgattt

SEQ ID NO: 130518 - DNA, 228 bp, Glycine max
ctaaattgaaaagctttctagctggtcataatatcaccattactgatggtattgacaaaactagtgcaactttgcaatttagaaagttagcagattgtgattttctcaagagaaactttaagcagatgtctaatgttttgtgggtggctcctgaggataaggcgagtttatggtcacaacttcattatgtttcgtgtaataatctggaaatgcaagaagcttatcttg

SEQ ID NO: 130519 - DNA, 226 bp, Glycine max
taaatccaaaggcttgtttctcaaaacattcgcagtggccgcctaagagctttcgccttcgccaggcttgagagcttgtgctgcttttatccttccttggatgtctgaggtcattatattatttctttgttgaccattttcgtctgtggttgattgatgctgtaagttagtagtttttttttctttagtatgatttagttaaacatggttaaatgaaagagatgtt

SEQ ID NO: 130520 - DNA, 228 bp, Glycine max
gtttggactatatggaaagaattcctcttgccacatctgagggttttcctcatgtgctttcacgcaaaaatggtgaaaaaggcaaaagaagatttgtttctggggatggtgaagagatgacattgattccgggaaccagtgttgaagaggcttacaacaagctaatagttgaacttgagaaaagtgttcctacattggttggcattgaatgtcccaaggatgagaaac

SEQ ID NO: 130521 - DNA, 197 bp, Glycine max
ctcgagccgtgaaattttgataaaccgcgatcacaggttgccgcaccttaaaaccggaaacaaaagcaatcgttacttgatttcaagaatctctcaatttcttcctacttctgtgtgtacggtttcttaagggaaagagaatacatctctgtgctggccacagacttcgtgaatcattttcttttccacacaacata

SEQ ID NO: 130522 - DNA, 248 bp, Glycine max
gtgcagaagagcgtcgcagttgtaaccctaatcagaagaagcgcagttcaagcgagtgacagccaccagccatgggtcgtatgcacagccgcggtaagggtatatcctcttctgctttgccctacaaaaggacacctcctagctggctcaagatctcttcgcaagatgtcgaagaaaatatctgcaagtttgcgaagaaaggtttgaccccgtctcagattggtgtcattctcagagattctcacggt

SEQ ID NO: 130523 - DNA, 247 bp, Glycine max
gacaaagtgttgttggtgatcttaaacttcttactgatgggaagttgtatgagggtaagcatattcctgtatctaatattagtgcaggggaaaatcatgtagttcagatacccctaatggcacaggaggaaattctgtcttctagtgcaagtgatttcagaactgcaatggtgagtaaaaatagcaagcctcaagctactgcaatgcatgttggagctatagaaattatcattgatagtttcgcaag

SEQ ID NO: 130524 - DNA, 247 bp, Glycine max
caccattgaattttgattctagcaagcagagcttttgtcaattttctattgaccttctcggtggaggaattttagtggacaaaactggagattggatcacacttatacaaaattctccaattagtaacttgttgagagttgctgcttggaagaaaggctgtttaatggttaaaattgtgatgtctgggaatgcagcagtcaaaaggagtgattgggcctcattggtacaagtgtttttaacaaacag

SEQ ID NO: 130525 - DNA, 246 bp, Glycine max
cagttatcgagcgagaacgagaaactgaagaaggataacgaaacgctgagttgcgagctggcacgtgcgaggaagcagtgcgatgagctcgtggcttttctcagggaccgtctgatggtgggtcccgatcagatcgatcgcatcatgcggcaaggaagttgcggatctgaaaacgcggtaggtgaaggcggtggtggaggacactgtttgaaactgtttggtgtttggttaaaaggggatacacta

SEQ ID NO: 130526 - DNA, 240 bp, Glycine max
cttgactattacaccttccccattttgatttgatctgattgaattggcctcttgccagcaatccagaatgtggaagctcaagttcgccgatggagggaatccatggcttcggacattgaacaatcacgttggaagacaggtgtgggagttcgatcctaagcttggatcgtcgcaagatctcctcgagatttcgaaagctcgccagaattatcacgataaccgctttacccagaatcacag

SEQ ID NO: 130527 - DNA, 247 bp, Glycine max
atggttgaggaatggtttgattgtgttgatgaggaggattcctttgaggaagtttctttaagtgcagcacttaatggtgttgagggtttggactatatggaaagaattcctcttgccacatctgagggttttcctcatgtgctttcacgcaaaaatggtgaaaaaggcaaaagaagatttgtttctggggatggtgaagagatgacattgattccgggaaccagtgttgaagaggcttacaacaagc

SEQ ID NO: 130528 - DNA, 248 bp, Glycine max
ctttcgtgttagtgagagaaagttctctctgcttctctctcttagactcaaaaccctattgcgtgctttgcaatcgaccccgattatggccaacagtaacctccctcgaagaatcatcaaggcaacgcagcgtttgctcagtgagccagcacctgcaattagtgcgtccccttcggaagacaatatgcggtatttcactgtgatgatccttggcccaactcagtcgccttatgaagggggcgttttca

SEQ ID NO: 130529 - DNA, 249 bp, Glycine max
gaaactcccaaggaatggcaactggatctaccttgtgacaaaattcctagtgtcttgactacaactgatgagagattggtaggcacagaacatgagggatatgatccttttcttggtggaattcaaaaatatgccactcccatgatgcccctagatgaagaaattctttctaaagttgcacaagatatggttgaggaatggtttgattgtgttgatgaggaggattcctttgaggaagtttctttaagt

SEQ ID NO: 130530 - DNA, 246 bp, Glycine max
gttgaatgtggaatcccttctggatttccgctcacagttatttgtaatagcatttttaatgagatgctcattagatatagctatgaaaaattactgcgccaggctaaagctccaagtatgtttttacaatccttcaaaaattttgtttctttgtgtgtgtatggtgatgataacttaattagtgttcatgaatatgtcaagccttactttagtggttctaaattgaaaagctttctagctggtcat

SEQ ID NO: 130531 - DNA, 243 bp, Glycine max
cttaattagtgttcatgaatatgtcaagccttactttagtggttctaaattgaaaagctttctagctggtcataatatcaccattactgatggtattgactgaactagtgcaactttgcaatttagaaagttagcagattgtgattttctcaagagaaactttaagcagatgtctaatgttttgtgggtggctcctgaggataaggcgagtttatggtcacaacttcattatgtttcgtgtaa

SEQ ID NO: 130532 - DNA, 247 bp, Glycine max
ttccactgcctacaaaaactaatttggtggaaactcccaaggaatggcaactggatctaccttgtgacaaaattcctagtgtcttgactacaactgatgaaagattggtaggcacagaacatgagggatatgatccttttcttggtggaattcaaaaatatgccactcccatgatgcccctagatgaagaaattctttctaaggttgcacaagatatggttgaggaatggtttgattgtgttgatga

SEQ ID NO: 130533 - DNA, 247 bp, Glycine max
cggaaaaagttgtattgaaattttcacaagaggaatttcttacagcttgggcaactcaggtgcgtcctgcaacaactctgttggctgatgggtgtccatatttgtatgctatggtgcatgatagttcagtgtctacaataccaggtgattttgtcattggtgttaagttgacaaccataaacaatatgtgtgcatatgggctcaatcctggtatttcaggttctcgtcttttgggcaccattcctca

SEQ ID NO: 130534 - DNA, 248 bp, Glycine max
ctaaggcaaaaactgcaaagattgttaggggaataattgactcggttgctaaaattccagggacatctgatctacaaattgcactctgcaaagaaatggtgctgtggactcgtgctgaaaagcgtacctttctgagacagcgagttgaggcaaggcttgcagcacttctgatggaaagtaaggagtattcagaagctttgactcttctctctggcttggtcaaagaagttaggagattagatgacaag

SEQ ID NO: 130535 - DNA, 186 bp, Glycine max
taagatttgaaattttgataaaccgcgatcacaggttgccgcaccttaaaaccggaaacaaaagtaatcgttacttgatttcaagaatctctcaatttcttcctacttctttgtgtacggtttcttaagggaaagaaaatcactctctgtgctggccacagacttcgtgaatcattttcttttcca

SEQ ID NO: 130536 - DNA, 244 bp, Glycine max
tgaaaatgcagttcgtagtatttttgttgcgcctttcagaggcggaaggccattcgggtggttacatttccgaataccattgtgcagattgaaccagacatgaattcaaggtttcagcttttgagtaccactaccaatggtgattttgttcaaggacaagatctcgcaatggttaaagttaatgtagcatgtgctgctgttggcttgacatcaagctatactccgactccattgttggaatctg

SEQ ID NO: 130537 - DNA, 244 bp, Glycine max
tcagcattgaatatgatgcatgtacaattccaaatgattgtggttcattggttgttgccaaagttggaaatcacaaacaaattgttggtttccatgttgctggaagcaaaggaagactgggatatgcttcattgataccatacgttgagccagttgtgcaagctcaaagtgctgaagtttactttgacttcttccctgtggaggttgatagtcaagagggagttgctcacattggtgaattgaa

SEQ ID NO: 130538 - DNA, 244 bp, Glycine max
cagaatcattaaagataagattatattgctaagaagaaaaaatatgaaggttgtctacttgcttgttgccctcttggctttgacatcaactgttgtctctgcctatgaccctagtcctctgcaagatttttgtgtggcagccaaagaaaaagatggtgtatttgtgaacgggaaattctgcaaggaccccaagcttgtcaaagcagaagatttcttcagacatgtggaacctgggaaaactgac

SEQ ID NO: 130539 - DNA, 243 bp, Glycine max
ctcgagcgtgatgacaaaatcaagaaaaaggccatgaaggcagtatgcggtattacaggggtagagtcagtctcagtggacatgaaggaccagaaaatgactataattggggatgttgatcctgtaacagtagttggaaagtttacaaaattcagtcttggcaagcttagaaaattctgtcatgttgagatactttcagttggaccagccaaagaggaaccaaagaaagaggagaagaagcca

SEQ ID NO: 130540 - DNA, 235 bp, Glycine max
cttccaacgctcctcctccttctcatagccttcgccacctctgtctccggccgccgtgacctcgtcggagactttctccggctgccctccgaaactgataacgacgacaacttcaagggcacccggtgggccgtcctcctcgccggttccaatggttactggaattacagacatcaggctgatgtttgtcacgcctatcaaatattgaggaaaggtggtctgaaagaagaaaata

SEQ ID NO: 130541 - DNA, 244 bp, Glycine max
agctgaaattaaatataagcggaatcagagtaatattcagatttccggcttattttacgacggcagatacaaattctggactaaacacgagaaaaatcttgctttgacagaagaggaaaagatggaagtgattagaaatagaggcattcctgctgatgttcttgcaaagcgagctcatgaatttgaaaaacatgttgctcatgaaagcctcaaggatcaaattcctgctgttgacaagttgtat

SEQ ID NO: 130542 - DNA, 244 bp, Glycine max
gcattgaattcaaaaacttaagttcattccttgtgtgttgctttcttcctcaaaaccaaacatgtcgaacacatgcggcaactgcgactgcgctgacaagactagctgcaccaagggaaacagctatggtgttattgtagagactgagaagagttacatcgagactgttgtcatggatgttccagcagctgagcatgatgggaagtgcaagtgtggcactaactgcacttgcacggactgcacc

SEQ ID NO: 130543 - DNA, 244 bp, Glycine max
tggagatcttgtctttgaagtttctaagatgacttctccttatattaaatgtacagtctctttcttcatagcatttggaaatttggctgatgacaccatcaattttgaggcctttccacacaagataaaaaagaaaagagagattcaggaaaaagttgtattgaaattttcacaagaggaatttcttacagcttggtcaactcaggtgcgtcctgcaacaatctggttggctgatgggtgtcca

SEQ ID NO: 130544 - DNA, 245 bp, Glycine max
ctggatacctaggcacccagagacgaggaagggcgtagtaagcgacgaaatgcttcggggagttgaaaataagcgtagatccggggattcccgatataggtcaacctttcgaactgctgctgaatccacgggcaggcaagagacaacctggtgaactgaaacatcttagtagccagaggaaaagaaagcaaaagcgattcccgtagtagcggcgagcgaaatgggagcagcctaaaccgtgaaaa

SEQ ID NO: 130545 - DNA, 240 bp, Glycine max
ttcaggaaaaagttgtattgaaattttcacaagaggaatttcttacagcttggtcaactcaggtgcgtcctgcaacaactctgttggctgatgggtgtccatatttgtatgctatggtgcatgatagttcagtgtctacaataccaggtgattttgtcattggtgttaagttgacaaccataaacaatatgtgtgcatatgggctcaatcctggtatttcaggttctcgtcttttgggca

SEQ ID NO: 130546 - DNA, 244 bp, Glycine max
caatagcatatctatggcttctacttgttcttcctctttttccgttaccaaaaaatatgatgttttcatcagctttagaggagaggatactcgcgctgacttcactagccatcttcatgctgctctgcgcagaaacaacatcgatacatacatagactacaggatccacaaaggagacgagatctgggtagaaatcatgaaagcaatcaaagagtccactctcttcttggttattttctcagag

SEQ ID NO: 130547 - DNA, 244 bp, Glycine max
ctcactgctgaaattaaatataagcggaatcagagtaatattcagatttccggcttattttacgacggcagatacaaattctggactaaacacgagacaaatcttgctttgacagaagaggaaaagatggaagtgattagaaatagaggcattcctgctgatgttcttgcaaagcgagctcatgaatttgaaaaacatgttgctcatgaaagcctcaaggatcaaattcctgctgttgacaagt

SEQ ID NO: 130548 - DNA, 241 bp, Glycine max
cgactctgattgtcgggtttgatccctacactcactcgccctccctctaccagacggatccctctggcacgttctcggcgtggaaggcgaacgccaccgggaggaactcgaattcgattcgggagttcctggagaagaactataaggacacttctggccaggagactgtcaagttggctattcgcgcattgcttgaagttgttgagagtggagggaagaacatagaagttgcggtgatgac

SEQ ID NO: 130549 - DNA, 243 bp, Glycine max
cttccttcactatcctttctcttcatcttcacttccttcatacgtctccgtctcacactcaatactctctattgttattcatggaattggggatcagtgctctaatcgtggagtgaaaaaattcacacagcaattgagcagcttctctggtgctgaaggatattgtgtcgaggttggaaatggatcatgggattcatggtttgagcctttgaaagagcaggctgagattgtttgtgaaaaggt

SEQ ID NO: 130550 - DNA, 243 bp, Glycine max
aaacagtctacagtttttgatattctcttgggaatttctcaagattttgaaattgctggtaatactcttatgccagctttttctgttccacaggctactgccagatcttctgaaaatgcggaatcctctgcatgatctggaatttgtgttttctttcgtttgttcgtttgtttaattcaatacaggtaattagacatgaccctcttgttgagtatgctctgtctatttgaaaatttccacacc

SEQ ID NO: 130551 - DNA, 243 bp, Glycine max
acaaaaactaatttggtggaaactcccaaggaatggcaactggatctaccttgtgacaaaattcctagtgtcttgactacaactgatgagagattggtaggcacagaacatgagggatatgatccttttcttggtggaattcaaaaatatgccactcccatgatgcccctagatgaagaaattctttctaaagttgcacaagatatggttgaggaatggtttgattgtgttgatgaggaggat

SEQ ID NO: 130552 - DNA, 243 bp, Glycine max
ggtgccacaagttggcggctaaggttggtagtgtggtgggccaaattgtggaggaacgaaaaagagatggtggttttgttgggaagaatgatttcttagcactttgctatccttgcccaaagaagaaagattggctgattcagatctggtggctattctgtgggaaatggtatttcgaggaacagacacagttgcaatactccttgaatgggttatggcaaggatggttttacaccaagactt

SEQ ID NO: 130553 - DNA, 217 bp, Glycine max
acgtacgctcgctcttcattccgctcgaggaaattttgataaaccgcgatcacaggttgccgcaccttaaaaccggtaacaaaagcaatcgttacttgatttcaagaatctctctcttccttcctacttctttgtgtacgttttcttaagggatagaaaatcactctctgtgctggccacagacttcgtgaatcattttcttttccacacaacatac

SEQ ID NO: 130554 - DNA, 245 bp, Glycine max
ctttccttctctagcacaatttacaatctcaatggctggaatttgctgtggtgttgttggagaaggtgacactccggctccactcgagcccactcctcgcccctccaggcgccggagtttggacatcttacctttaaaatatatcgccgacatgcccatgccgccgccggagggtttacggaagcgtcccaagctcaacctcagggactgcgataacgcaattgaaaattgcgacgaatccactg

SEQ ID NO: 130555 - DNA, 243 bp, Glycine max
tagaaatagaggcattcctgctgatgttcttgcaaagcgagctcatgaatttgaaaaacatgttgctcatgaaagcctcaaggatcaaattcctgctgttgacaagttgtattctactaaggttaataagtttgcaaaaattatgaaccttagacaaagtgttgttggtgatcttaaacttcttactgatgggaagttatatgagggtaagcatattcctgtatctaatattagtgcagggga

SEQ ID NO: 130556 - DNA, 241 bp, Glycine max
gtttgaagatgtcaaacgcttaaatgatctcctaattgaaaagaacaaaataactgggtgggacactcctattcatgttgatgcagccagcggtgggttcatagccccatttatttacccagagcttgagtgggacttccggttacaactagtgaagagcatcaatgttagtgggcacaagtatggtttggtctatgctggaatcggttgggttatctggagaagcaagcaggacttgcct

SEQ ID NO: 130557 - DNA, 241 bp, Glycine max
gaacgtgatgataaattgcttgctgagcacatggctaagctacgccaagataatgaagaggtcagtggtgatgaagacagtgaggaggaagaagatacaggaatgggcgaggttgatgtggataatggtgccgggataacggactgacaaaaaacttgtaggtatagtaaggcatagatagcagagtacggctttactaattttgtcttttttattattattctttacaaaactgtcttta

SEQ ID NO: 130558 - DNA, 241 bp, Glycine max
gtttctcttcctcccttggagaaaaagaagagccaccgctgcgacgccgttcgtgcatttttgaggtgccgctgtcatgtttgggcgtggtggaccaaggaggagtgataactccaaatattatgatattctcgggatttccaaaaatgccagtgaagatgaaatcaagaaggcctatagaaaggcggctatgaagaaccatccagataagggaggagatcctgaaaagtttaaggagtta

SEQ ID NO: 130559 - DNA, 244 bp, Glycine max
gttggatcttaaaatttctcaatctaaaattgcacttcccaaaaacacagttggaggaaccattctgcgtagtgatctattggcaaattttttgacagagggcaattttagagcaagtgttgatttgcagcgcactcatcgtattaaaggaatgattaaaatggtggccacagttggtattcctgagaatacaggtatagcattggcctgtgctatgaatagttcttttagggggcgtgccagt

SEQ ID NO: 130560 - DNA, 243 bp, Glycine max
tagggtttttgagtgcggtgcggcgatcctagcactctcttctgcagctttcgccgacagcttcattcaccatggctgagcaaaccgagaaggcttttttgaaacaaccaaaagtgtttctcagctcgaagaaaactgggaagggaaagagacccggaaagggtgggaaccgcttttggaaatccattgggcttgcatttaagactcccagggaagccatcgaaggaacctacattgacaaga

SEQ ID NO: 130561 - DNA, 239 bp, Glycine max
ctgaggataaggcgagtttatggtcacaacttcattatgtttcgtgtaataatctggaaatgcaagaagcttatcttgtcaatctcgtaaatgtgttacgagaattgtatttgcacagtccagaggaagctcgccaattgagaaggaaagctctctctcgtattgaatggctgcaaaaagctgatgtgcctaccatagcacagattgaagagttccattcgatgcagaggatgatgaat

SEQ ID NO: 130562 - DNA, 241 bp, Glycine max
atcctcaatacaatgaggttcaggctcagatggaaacaaatttgtttaaattgtctcttgatgatgttgaaactcctaaaggttccattttggatcttaaaatttctcaatctaaaattgcacttcccaaaaacacagttggaggaaccattctgcgtagtgatctattggcaaattttttgacagagggcaattttagagcaagtgttgatttgcagcgcactcatcgtattaaaggaat

SEQ ID NO: 130563 - DNA, 238 bp, Glycine max
gatcgcgagctgccgctcttttttctttttttaaattttaatttaaagtctttgtatttcgtatgtaaagatgtaaaattatgattattaggtggtgcatgtgttgcgtcatgggccaatgttatcctctgcttttaagttggaagaggcccagctcacgtgtgatgtacggctgtgattgtgtaatttgcaaaatcaaaaataacccccgagtcaaaaaaaaaaaaaagaagaaaaa

SEQ ID NO: 130564 - DNA, 256 bp, Glycine max
gtaatagtcttatgccagctttttctgttccacaggctactgccagatcttctgaaaatgcggaatcctctgcatgatctggaatttgtgttatcttttgcttgttcgtttgtttaattcaatagaggaaattaggcatgatcctcttgttgagtatgctctgcctatttgaaaatttccacacctcttttaattatcgtaatgatgtgtgaagtgtgtgttattttaagttcaagaaaatctcaggaatacctag

SEQ ID NO: 130565 - DNA, 242 bp, Glycine max
ccaggtgattttgtcattggtgttaagttgacaaccataaacaatatgtgtgcatatgggctcaatcctggtatttcaggttctcgtcttttgggcaccattcctcagtccatttcacagcaaactgtttggaatcaaatggcaacagtgagaacaccattgaattttgattccagcaagcagagtttttgtcaattttctattgaccttctcggtggaggaattttagtggacaaaactgg

SEQ ID NO: 130566 - DNA, 239 bp, Glycine max
gaaagatttgttggaaggaaatttttcctttgatattaaatctcgctctagattggaaaaagtttcctctacaaaagcacaattcgttagtggaaaaaccttcaaatatgatatagttggtgctggttcacattcttcagaagatttttctgaaaaggaagatcaagaaaaacccaaaaagattgatgccagattgagacaaagaatagatcctcaatacaatgaggttcaggctcaga

SEQ ID NO: 130567 - DNA, 238 bp, Glycine max
gtattcctgagaatacaggtatagcattggcctgtgctatgaatagttcttttagggggcgtgccagttctgatatttacaccatctgctctcaagattgtgaattatggaatcctgcttgcacaaaagcaatgactatgtcatttaatccaaacccgtgttctgatgcatggagtttggaatttctgaagcgtaccggatttcattgtgatatcatttgtgtcactggatggactgc

SEQ ID NO: 130568 - DNA, 242 bp, Glycine max
attttgataaaccgctatcacaggttgccgcaccttaaaaccgtaaacaaaatgcaatcgttacttgatttcaagaatctctcaatgtcttcctacttctttgtgcacgatttcttaagggaaagaaaatcactctctgtgctggtcacagacttcgtgaatcattttcttttccattcttagtttatttcctgaacactctcctatttgatataggacttcgtgtcagatttaaacttctt

SEQ ID NO: 130569 - DNA, 240 bp, Glycine max
cgcagtgagaagaagagggggtcagagtgagaaagagaaagagagaattcgtaaaccctaatttcggaaagatcggcgatgactgcctccaaggatcgcgagaacttcgtctacatcgccaaactcgccgagcaggccgagcgttacgaagagatggtggaatcaatgaagaacgttgcgaatctcgacgttgaactgacggtggaggagcggaatttgctttctgttgggtacaagaat

SEQ ID NO: 130570 - DNA, 260 bp, Glycine max
ggaattcggcgcgagattgtggagtattgtggaaggatgtcttacgttgctcacaacgttaatcatcgtccaagagaaagatttgttggagtgaaatttttcctttgatattaaatctcgctctagattggaaaaagtttcctctacaaaagcacaatttgttagtggaaaaaccttcaaatatgatataattggtgctggttcacattcttcagaagagtttcctgaaaaggaagatcaagaaaaacccaaaaagattg

SEQ ID NO: 130571 - DNA, 240 bp, Glycine max
gcaaaatattttcttctatctcatcctttcttttagttttatttttatttttttatcttgggtaaaaaaaatcatgggtgttttcacttctgaaagcgaacacgtttcccccgtctctgctgcaaaattatacaaagctattgtcctagatgccagcaatgtcttcccaaaagcattgccaaatttcattaagagcgtagaaaccattgaaggagatggagggccaggaaccattaagaa

SEQ ID NO: 130572 - DNA, 240 bp, Glycine max
attttgttggagatctcgtctttgaagtttctaagatgacttctccctacattaaatgtacagtctctttcttcatagcatttggaaatttggctgatgacaccatcaattttgaggcttttccccacaagctggtgcagtttggagagattcaggaaaaagttgtattgaaattttcacaagaggaatttcttacagcttggtcaactcaggtgcgtcctgcaacaactctgttggctg

SEQ ID NO: 130573 - DNA, 231 bp, Glycine max
agtgacatcttggattagtgctcgcactctcctatctgctatgagacttcgtgggtagacttttctatttctctcctttctttcactctcttcttcacactgatctgcattgccgtggcatagtggtcttatttgaataacacttgggcgtcagtgcaatgtttgcttcgttaatgctctctggggacgacaggctcactgacagttcaatttctactttcagagatttgg

SEQ ID NO: 130574 - DNA, 222 bp, Glycine max
gtacagagcatttcgatgcatgtaagtggacaaaatcggaaccacattcctgggaattgatcttcccaatagaggtatgtggacctaataatggttttgaaatgtggagttctgagtgggcaaatcaaacttcatggcacttgagtttccttattgacaatcccaaacagtctacagtttttgatattctcttgggaatttctcaagattttgaaattgctg

SEQ ID NO: 130575 - DNA, 214 bp, Glycine max
tagacgcgctgcttcactattctccctatggagtttaatcttgtggtccgtcaaaagtttttaaattttgtgatgttcattatgaagaaaagggacaagcttagttgtcaagttggaatcaacccatactccatggaatggactggtttggccaatagattactgagtaagggcaacgatattctgtgttgctattatgctaattttgatggtt

SEQ ID NO: 130576 - DNA, 234 bp, Glycine max
agtaaaattgcacttcccaaaaacacagttggaggaaccattctgcgtagtgacctagtggcaaattttttggcagatggcaattttagcgcaagtgatgatttgcagcgcactcatcgtatctaaggtatgattacaatggtggccacagttggtattcctgagtatacaggtatagcattggcctgtgctatgaatagttcttttagggggcgtcccagttctgatatttac

SEQ ID NO: 130577 - DNA, 236 bp, Glycine max
tatggacaaaacgcacagcggggtaggagcaggatccgaatccgacgcacccgacccggaaccacctggatccaccacccgggttaaccccggaagagttcgaggacctcaaaccctccgtgctggagcaccatacctactccgtaacacccacagcgccaatgctcctccctcctcgcgcagcgtatccacgcgccgccgcatacggtgtggaccgtcgtgcgctgcttcgacaa

SEQ ID NO: 130578 - DNA, 231 bp, Glycine max
aggtggccacagttggtattcctgagaatacaggtatagcattggcctgtgctatgaatagttcttttagggggcgtgccagttctgatatttacaccatctgctctcaagactgtgaattatggaatcctgcttgcacaaaagcaatgactctgtcatttaatccaaacccgtgttctgatgcatggagtttggaatttctgaagcgtaccggctttcattgtgatatca

SEQ ID NO: 130579 - DNA, 230 bp, Glycine max
cgaagctctttctctctcttctagaagctatctgtgtttggtgttactaagtctccaacaagcaaagtacatggttgatttggaaatccaggtccccaccccattcgacccgtttgccgaggcgagagaatcggatgcccccggagcaaaggagtatgtgcatattcgaattcagcagaggaatgggaagaagagtctgaccacagtgcaagggctgaagaaggagttca

SEQ ID NO: 130580 - DNA, 228 bp, Glycine max
tcaaacttcatggcatttgagtttccttattgacaatcccaaacagtctacagtttttgatattctcttgggaatttctcaagattttgaaattgctggtaatactcttatgccagctttttctgttccacaggctactgccagatcttctgaaaatgcggaatcctctgcatgatctggaatttgtgttttcattcgcttgttcgtttgtataattcaataaaggaa

SEQ ID NO: 130581 - DNA, 226 bp, Glycine max
aggctgtttaatggttaagattgtgatgtctgggaatgcagcagtcaaaaggagtgattgggcctcattggtacaagtatttttaacaaacagcaacagtacagagcattttgatgcatgtaagtggacaaaatcggaaccacattcctgggaattgatcttcccaatagaggtatgtggtcccaataatggttttgaaatgtggagttctgagtgggcaaatcaa

SEQ ID NO: 130582 - DNA, 228 bp, Glycine max
agatgaactttttggattacaggctatgctctttggcggaacagactcgtcaactggaactttagagtgggcattatctaatttagtgaatgacccagaggtgctgcagaaggcaagagatgagttggacgctcaagtaggaccagatcggctgttaaatgagtcagaccttccaaaacttccttatctcaggaagatagtccttgaaacacttaggttgtaccctcc

SEQ ID NO: 130583 - DNA, 229 bp, Glycine max
ctttgcaatttagaaagttagcagattgtgattttctcaagagaaactttaggcagatgtctaatgttttgtgggtggctcctgaggacaaggcgagtttatggtcacaacttcattatgtttcatgtaataatctggaaatgcaagaagcttatcttgtcaatctcgtaaatgtgttacgagaattgtatttgcacagtccagaggaagctcgccaattgagaaggaa

SEQ ID NO: 130584 - DNA, 230 bp, Glycine max
tagatgaagaaattctttctaaggttgcacaagatatggttgatgaatggtttgattgtgttgatgaggaggattcctttgaggaagtttctttaagtgcagcactcaatggtgttgagggtttggactatatggaaagaattcctcttgctacatctgagggttttcctcatgtgctttcacgcaaaaatggtgaaaaaggcaaaaggagatttgtttctggggatggt

SEQ ID NO: 130585 - DNA, 231 bp, Glycine max
cgcgctgcttcactattctccctatggagtttaatcttgtggttcgtcagaagtttttaaattttgtgaggttcattatgaagaaaagggacaagcttagttgtcaagttggaatcaacccatactccatggaatggactggtttggccaatagattactgagtaagggcaacgatattctgtgttgcgattatgctagttttgatggtttgattaccaagcaagttatga

SEQ ID NO: 130586 - DNA, 229 bp, Glycine max
cagtgcagatattcgtgaaaactttgaccggcaagaccatcacccttgaggtggaatcctccgacaacattgacaacataaaagcacagattcaagacaaggaagggatcccacctgaccagcagagacttatctttgcgggtaaacaacttgagtatggtcgcacccttgccgattacaacatccagaaggaatccagcctccatctcgtgcttcgcctcaggggtgg

SEQ ID NO: 130587 - DNA, 233 bp, Glycine max
agtttggtataaccttagccgaggtcacgaggagcactagctagtttcacaatttccaaatggctaggggattgaagaagcatctcaagaggctcaatgctcctaagcattggatgcttgacaaactgggtggtgcatttgcgcccaaactctcatctggaccacacaaatctagggagtgccttcccctcatactcatcctacgaaaccggctaaagtatgctctgacttac

SEQ ID NO: 130588 - DNA, 222 bp, Glycine max
ctttccattgactcctcattatcaaagaaaatggctctcattgggttgctcttgatgggttttctcacaatgttctcctctgctcatgcctatggtggagggtggactaatgctcatgccaccttctattcagggagtgatgcatctgggacaatgggtggggcatgtgggtatgggaatctctacagccaagggtatggaacaaacactgctgctctaagc

SEQ ID NO: 130589 - DNA, 226 bp, Glycine max
tggagtttaatcttgtggttcgtcagaagtttttaaattttgtgaggttcattatgaagaaaagggacaagcttagttgtcaagttggaatcaacccatactccatggaatggactggtttggccaatagattactgagtaagggcaacgatattctgtgttgcgattatgctagttttgatggtttgattaccaagcaagttatgagcaagatggcagaaatgat

SEQ ID NO: 130590 - DNA, 225 bp, Glycine max
tgataacttaattagtgttcatgaatatgtcaagccttactttagtggttctagatttagaagctttctagcttgtcatagtatcaccatagctgttggtattgacaaaactagtgcaactttgcaatttagaaagttagctgattgtgattttctcaagagaaactttaagcagatgtctaatgttttgtgggtggctcctgaggacaaggcgagtttatggtc

SEQ ID NO: 130591 - DNA, 227 bp, Glycine max
agtttatcagcagatttgaagcacccttgatgagggagagagtcttccacttctcagcagagtctattgcaaaactgaaagcaaaggccaacatggaatccgataccacaaaaatctcttcattccagtcactatcagcacttgtttggagatccataactcgtgcatgctccctaccatatgagcaaagaacaagttgcaggttaaccgcaaacaatcgaacaaga

SEQ ID NO: 130592 - DNA, 226 bp, Glycine max
gaaccagacatgaattcaaggtttcagcttttgagtaccactaccaatggtgattttgttcaagggaaagatctcgcaatggttaaagttaatgtagcatgtgctgctgttggcttgacatcaagttacactccaactccactgttggaatctggtttgcaaaaagacagagggttaattgtggaatattttggaaggatgtcttacgttgctcataacgttaatc

SEQ ID NO: 130593 - DNA, 228 bp, Glycine max
tggctggcaaagccgtctatgtcaaatttcattggaaaaccacctgtggcgaaaagtgtctcttggacgacgaggccattagggttggaggatcgaaccacagtcatgccacccaagacctttacgattcaattgctgctggaaactatcctgagtggaaactctacatccaaacattggatcccgaaaacgaagacaggcttgactttgacccccttgatgtaacta

SEQ ID NO: 130594 - DNA, 227 bp, Glycine max
gcaatttgtaagaaagatgtttggagagttgaatgtggaatcccttctggatttccgctcacagttatttgcaatagcatttttaatgagatgctcattagatatagctatgaacaattactgcgccaggctaaagctccaagtatgtttttacaatctatcaaaaattttgtttctttgtgtgtgtatggtgatgataacttaattagtgttcatgaatatgtcaa

SEQ ID NO: 130595 - DNA, 230 bp, Glycine max
aatctggaaatgcaagaagcttatcttgtcaatctcgtaaatgtgttacgagaattgtatttgcacagtccagaggaagctcgccaattgagaaggaaagctctctctcgtattgaatggctgcaaaaagctgatgtgcctaccatagcacagattgaagagttccattcgatgcagaggatgatgaatgctcctgattcaaatgataatattgatctactgttgagcat

SEQ ID NO: 130596 - DNA, 231 bp, Glycine max
gaagactgaagactgtccctccgatggaattcccgagttcgctctcgttggccgctccaacgtcggcaaatcctcgctccttaattccctcgtccgccgcaagaaactcgccttaacttcgaagaaacccggcaaaacacaatgtataaaccattttcggattaataatagctggtacctggttgatttgcctggttatgggtatgcatctgcaccacatgaacttaggat

SEQ ID NO: 130597 - DNA, 231 bp, Glycine max
aggagatttgtttctggggatggtgaagagatgacattgattccgggaaccagtgttgaagaggcttacaataagctaatagttgaacttgagaaaagtgttcctacattggttggcattgaatgtcccaaggatgagaaacttcctcgtcgcaaaatttttgacaaacctaagacgcgctgcttcactattctccctatggagtttaatcttgtggttcgtcagaagttt

SEQ ID NO: 130598 - DNA, 230 bp, Glycine max
agtattccttacgaccttcctcttgctaatcaccagcgccaaatcagacttattttcctttaacataccacgttttgagccaggtgctttaaacatactactcgatggtagtgccaagacaacaggtggagtgctacaactcaccaaaaaggacaaaagcggcaacccaacccaacacagcgttggcctctctgcattctatgcagcacttcatctctccgacgcaaaaa

SEQ ID NO: 130599 - DNA, 223 bp, Glycine max
ggagaacacaaacagcgcgagacagaggcacagagagaaaatggtttcggggtcagggatctgtgccaagagggtaattgtggacgcacgacaccacatgctggggaggctggcatcgatcgtggcgaaagaacttctgaatgggcagaaggtggtggtggtacgctgcgaggagatttgcatctccggtgggctcgtcaggcagaagatgaagtacttgcgt

SEQ ID NO: 130600 - DNA, 221 bp, Glycine max
tgatgaggaggattcctttgaggaagtttctttaagtgcagcactcaatggtgttgagggtttggactatatggaaagaattcctcttgccacatctgaggcgtttccccatgtgctttcacgcaaaaatggtgccaaaggcaaaaggagatctgtttctggggatggtgaagagatgacattgattccgggaaccagtgttgaagaggcttacaataagc

SEQ ID NO: 130601 - DNA, 223 bp, Glycine max
ggaagcaaaggaagactgggatatgcttcattgataccatatgttgagccagttgtgcaagctcaaagtgctgaagtttactttgacttcttccctgtggaggttgatagtcaagagggagttgctcacattggtgaattgaaatctggtgtctatgttccactgcctacaaaaactaatttggtggaaactcccaaggaatggcaactggatctaccttgtg

SEQ ID NO: 130602 - DNA, 227 bp, Glycine max
ctgccacgatcacccctacagtcctgcctctgacaggagttggtttcttttctcttatattgtttgggggcccgcttgcacccggtcttgcgagtattggaatgactccacttctagcagctgtatatgtgggtgccttgcagaacatatttagcaagagtgccaagtacagcttatttgatccctgcaaagaaatggcctatattccattggatgaggataccaag

SEQ ID NO: 130603 - DNA, 228 bp, Glycine max
gaatatgtcaagccttactttagtggttctaaattgaaaagctttctagctggtcataatatcaccattactgatggtattgacaaaactagtgcaactttgcaatttagaaagttagcagattgtgattttcttaagagaaactttaagcagatgtctaatgttttgtgggtggctcctgaggacaaggcaagtttatggtcacaacttcattatgtttcgtgtaat

SEQ ID NO: 130604 - DNA, 228 bp, Glycine max
ctggaagcaaaggaagactgggatatgcttcattgataccatacgttgagccagttgtgcaagctcaaagtgctgaagtttactttgacttcttccctgtggaggttgatagtcaagagggagttgctcacattggtgaattgaaatctggtgtctatgttccactgcctacaaaaactaatttggtggaaactcccaaggaatggcaactggatctaccttgtgaca

SEQ ID NO: 130605 - DNA, 229 bp, Glycine max
cgtccatctgggaagacccatgggctttcaagcccgagaggttcctcaaagaagatgtttccatcatgggatcggacttgaggcttgcacccttcggggctggacgtagggtgtgtccgggccgggccttgggcttggccacggcccctctctggctcgcgcaacttcttcgccacttcatatggcttcccgcacaaaccgtggatctttccgaatgccttaggctttc

SEQ ID NO: 130606 - DNA, 228 bp, Glycine max
ttcgagcgaatcggctcaggcattttgatgcatgtaagtgagacaaaatcggaaccactttcctgggaattgatcttcccaatagaggtatgtggtcccaataatggttttgaaatgtggagttctgagtgggcaaatcaaacttcatggcatttgagtttccttattgacaatcccaaacagtctacagtttttgatattctcttgggaatttctcaagattttgaa

SEQ ID NO: 130607 - DNA, 222 bp, Glycine max
gtttatggtcacaacttcattatgtttcgtgtaataatctggaaatgcaagaagcttatcttgtcaatctcgtaaatgtgttacgagaattgtatttgcacagtccagaggaagctcgccaattgagaaggaaagctctctctcgtattgaatggctgcaaaaagctgatgtgcctaccatagcacagattgaagagttccattcgatgcagaggatggtga

SEQ ID NO: 130608 - DNA, 222 bp, Glycine max
attgaccttctcggtggaggaattttagtggacaaaactggagattggatcacacttatacaaaattctccaattagtaacttgttgagagttgctgcttggaagaaaggctgtttaatggttaagattgtgatgtctgggaatgcagcagtcaaaaggagtgattgggcctcattggtacatctccttttaacaaacagcaacagtacagagcattttgat

SEQ ID NO: 130609 - DNA, 218 bp, Glycine max
gctgactgtcctgttcttatcattgattcgaccactggtggttttaaagctggtatttccaaggatggacagactcgtgcacatgctctgctttcattcacccttggtgtgaaacagatgatttgctgctgtaacaaaatggatgctactacacccaagtattccaaggccaggtatgatgaaattgtgtaggaagtctcttcctacttgaacaaagt

SEQ ID NO: 130610 - DNA, 209 bp, Glycine max
gccgcagcagcctcaggaggagaataaggatgtctcacaggaagttcgagcacccaaggcacgggtcactgggatttctccccaggaagcgtgctgctcgtcacaggggataagtgaatgcattccccaaggatgacccatccaaggcacccaagctcactgcattcttgggttacaaggctggtatgactcacattggtagagaggtc

SEQ ID NO: 130611 - DNA, 225 bp, Glycine max
gtttggaatttctgaagcgtaccggatttcattgtgatatcatttgtgtcactggatggactgccactccaatgcaggatgttcaggttacaattgattggtttatttcctctcaggaatgtgttcccaggacttattgtgttttaaatccacaaaatccttttgtgttgaataggtggatggggaaactgactttcccccagggcacttcccgaagtgttaaga

SEQ ID NO: 130612 - DNA, 226 bp, Glycine max
gtttgtttgaagacaccaacctttgtgcgatccacgccaagagagtgaccatcatgcccaaggacattcaactcgcacgccgcatccgtggagaacgtgcttaggcttataataatgataatagcatagttgtcgccttttcgttttgcaatacatttcttgtttcttagggttttagtgttattttccagtttgttatgttttgtatagaagatagatatatcaa

SEQ ID NO: 130613 - DNA, 227 bp, Glycine max
agcagctgctccttcaccgagaaatccacgtgtctctcggaaaacctcaccgactccgtcgtcgacctccgtctcggcgagctggcgctgcggaacagcaaatcggtgaaatactcgccgacggcggaggagctcctcgatttgtcgcaggccttcagcgacttctccgcctgcagcagcgacatctccggcgagctgcagcgtctggtacagctgccgtcgccgaa

SEQ ID NO: 130614 - DNA, 225 bp, Glycine max
aaagctttctagctggtcataatatcaccattactgatggtattgacaaaactagtgcaactttgcaatttagaaagttagcagattgtgattttctcaagagaaactttaagcagatgtctaatgttttgtgggtggctcctgaggataaggctagtttatggtcacaacttcattatgtttcgtgtaataatctggaaatgcaagaagcttatcttgtcaatc

SEQ ID NO: 130615 - DNA, 226 bp, Glycine max
acttaatggtgttgagggtttggactatatggaaagaattcctcttgccacatctgagggttttcctcatgtgctttcacgcaaaaatggtgaaaaaggcaaaagaagatttgtttctggggatggtgaagagatgacattgattccgggaaccagtgttgaagaggcttacaacaagctaatagttgaacttgagaaaagtgttcctacattggttggcattgaa

SEQ ID NO: 130616 - DNA, 227 bp, Glycine max
gtttctcttcctccctggaagaaaaagaagagtcaccgctacgacgccgttcgtgcttttttgaggtgccacagtcatgtttgggcgtggtggaccaaggaggagtgacaactccaaatattatgatattctcggggtttccaaaaatgccagtgaagatgaaatcaagaaggcctatagaaaggctgctatgaagaaccatccagataagggaggagatcctgaaa

SEQ ID NO: 130617 - DNA, 264 bp, Glycine max
gtcaatctcgtaaatgtgttacgagaattgtatttgcacagtccagaggaagctcgccaattgagaaggaaagctctctctcgtattgaatggctgcaaaaagctgatgtgcctaccatagcacagattgaagagttccattcgatgcagaggatgatgaatgctcctgattcaaatggataatatcgatctactgttgagcattgatttgttgggtttacaaggagcaggtaaagcctttccaaacaagatcgtttttgatga

SEQ ID NO: 130618 - DNA, 275 bp, Glycine max
cagatacgtgactctagagctactatgccagtattgtgttcatggccctcttcatatccattgcagcaactggcatccttgagatgcaatggggcggtgttagcatagacgactggtggaggaacgaacagttttgggtgatcggaggtgtatcttctcatctttttgccctatttcagggtttactgaaggtcttggctggtgtgaacacaaacttcactgtgacgtcaaaagcagcagatgatggagaattctcagaactctacatcttcaag

SEQ ID NO: 130619 - DNA, 153 bp, Glycine max
gaaattttgataaaccgcgatcacaggttgccgcaccttaaaaccggaaacaaaagcaatcgttacttgatttcaagaatctctcaatttcttcctacttctttgtgtacgatttcttaagggaaagaaaatcactctctgtgctggccacag

SEQ ID NO: 130620 - DNA, 251 bp, Glycine max
aaaatttctaccgcattacattaggtggcatctgtataccttgttgatctacattctcccatcttttctcactgctcaaattaaatataagcggaatcagagtaatattcagatttccggcttattttacgacggcagatacaaattctggactaaacacgagaaaaatcttgctttgacagaagaggaaaagatggaagtgattagaaatagaggcattcctgctgatgttcttgcaaagcgagctcatg

SEQ ID NO: 130621 - DNA, 250 bp, Glycine max
ttttgatgcaacgctgtcactgagaaaggatctctatctacgaaggagcggaataaaacccttctctctgtgattaagagaatggcttcagatcggaaacttcacacttttgaggaggtggcaaagcacaaccagaccaaggattgctggctcatcatttctggcaaggtgtatgatgtcacccctttcatggaggatcatcccggaggtgatgaggttttgttatctgcaacagggaaagatgcaacca

SEQ ID NO: 130622 - DNA, 247 bp, Glycine max
cccctagattcagccacagtttcggaggagaagaaaatagtcgttcgagatggcccgtacgaagcaaactgctcgtaagtccacaggaggaaaggctcctaggaagcagcttgcaaccaaggctgcacgtaagtctgcaccaactactggtggtgtgaagaagccacatcgttaccgtcctggtaccgttgctcttcgtgagattaggaaataccagaagagtaccgagcttttgatcaggaagctc

SEQ ID NO: 130623 - DNA, 253 bp, Glycine max
gtgtttttaacaaacagcaacagtacagagcattttgatgcatgtaagtggacaaaatcggaaccacattcctgggaattgatcttcccaatagaggtatgtggtcctaataatggttttgaaatgtggagttctgagtgggcaaatcaaacttcatggcatttgagtttccttattgacaatcccaaacagtctacagtttttgatattctcttgggaatttctcaagattttgagattgctggtaatactc

SEQ ID NO: 130624 - DNA, 257 bp, Glycine max
atttgctagagaggtgattgccggtgtaaacccaaatgtgatccgtcgtcttcaagaattcccaccaaagagcacacttgatcccacactctatggtgatcaaaccagtaccataacaaaagaacaattggagattaacatgggaggggtcacagtagaagaggcacttagtactcagagattattcatattagattaccaagatgcattcatcccatatttgacgaggataaacagcctacctactgcaaaagctt

SEQ ID NO: 130625 - DNA, 261 bp, Glycine max
ccgctgtcagagaaatcaagcccaagaacaggagaatcatgggtgctggagggcctgatgatgaggacaataggtggccaccgtggttgaagccactgctgaaagagagcttctttgttcaatgcaagttgcatgctgattctcacaagagcgaatgcaacatgtattgcttggactgtatgaatggccctctctgctctctctgcctcgcccaccacaaagatcaccgtgcaatccagattaggaggtcctcataccatg

SEQ ID NO: 130626 - DNA, 251 bp, Glycine max
tgcttttggttgatacttatcataccaatcctgaaaatgcagttcgtagtatctttgttgcgcctttcagaggcggaaggcccattcgggtggttacatttccgaataccattgtgcagattgaaccagacatgaattcaaggtttcagcttttgagtaccactaccaatggtgattttgttcaaggaaaagatctcgcaatggttaaagttaatgtagcatgtgctgctgttggcttgacatcaagctat

SEQ ID NO: 130627 - DNA, 247 bp, Glycine max
cccatactccatggaatggactggtttggccaatagattactgagtaagggcaacgatattctgtgttgcgattatgctagtttagatggtttgattaccaagcaagttatgagcaagatggcagaaatgataaacagtctttgtggtggtgatgaaaaattgatgcgtgaaaggacacacctgctgttggcttgttgttcaaggatggcaatttgtaagaaagatgtttggagagttgaatgtgga

SEQ ID NO: 130628 - DNA, 245 bp, Glycine max
caacttgggaggttaaagagacggcaacgttgtgctgtccgccttgaccgagccagagcttcgtcttggccctcgattttgccctgtaaaactaatcccagtcacaacagaaataatcaatggcaccgaaacagaccaaggctgagaagaagatcgcttacgatgcgaagtgtgcgacctaatggaggagtacggccaaatcctcgttgtaaactccgacaacgtgggatcgaaccagctccaga

SEQ ID NO: 130629 - DNA, 246 bp, Glycine max
attctggactaaacacgagaaaaatcatgcatagacagaagatgaaaagatagaactgattagaaatagaggcattcctgctgatgttcttgcaaagcgagctcatgaatttgaaaaacatgttgctcatgaaagcctcaaggatcaaattcctgctgttgacaagttgtattctactaaggttaatatatttgcaaaaattatgaaccttagacaaagtgttgttggtgatcttaaacttcttac

SEQ ID NO: 130630 - DNA, 246 bp, Glycine max
gttaatcagccccaagagaaagatttgttggagggaaatttttcctttgatattaaatctcgctctagattggaaaaagtttcctctacaaaagcacaatttgttagtggaaaaactttcaaatatgatataattggtgctggttcacattcttcagaagattttcctgaaaaggaagatcaagaaaaacccaaaaagattgatgccagattgagacaaagaatagatcctcaatacaatgaggct

SEQ ID NO: 130631 - DNA, 237 bp, Glycine max
cggctcgagattgaaccagacatgaattcaaggtttcagcttttgagtaccactaccaatggtgattttgttcaaggaaaagatctcgcaatggttaaagttaatgtagcatgtgctgctgttggcttgacatcaagttacactccaactccattgttggaatctggtttgcaaaaagacagagggttaattgtggagtattttggaaggatgtcttacgttgctcacaacgttaat

SEQ ID NO: 130632 - DNA, 81 bp, Glycine max
gaaattttgataaaccgcgatcacaggttgccgcaccttaaaaccggaaacaaaagcaatcgttacttgatttcaagaatc

SEQ ID NO: 130633 - DNA, 183 bp, Glycine max
gaaattttaataaaccgcgatcacaggttgccgcaccttaaaaccggaaacaaaagcaatcgttacttgatttcaagaatctctcaatttcttcctacttctttgtgtacgatttcttaagggaaagaaaatcactctctgtgctggccacagacttcgtgaatcattttcttttccacacaa

SEQ ID NO: 130634 - DNA, 258 bp, Glycine max
cggctcgaggagcaagatggcagaaatgataaacagtctttgtggtggtgatgaaaaattgatgcgtgaaaggacacacctgctgttggcttgttgttcaaggatggcaatttgtaagaaagatgtttggagagttgaatgtggaatcccttctggatttccgctcacagttatttgcaatagcatttttaatgagatgctcattagatatagctatgaaaaattactgcgccaggctaaagctccaagtatgttttt

SEQ ID NO: 130635 - DNA, 247 bp, Glycine max
ggttgatagtcaagagggagttgctcacattggtgaattgaaatctggtgtctatgttccactgcctacaaaaactaatttggtggaaactcccaaggaatggcaactggatctaccttgtgacaaaattcctagtgtcttgactacaactgatgaaagattggtaggcacagaacatgagggataacatccttttcttggtggaattcaaaaatatgccactcccatgatgcccctagatgaagaa

SEQ ID NO: 130636 - DNA, 244 bp, Glycine max
tgataacttaattagtgttcatgaatatgtcaagccttactttagtggttctaaattgaaaagctttctagctagtcataatatcaccattactgatggtattgacaaaactagtgcaactttgcaatttagaaagttagcagattgtgattttctcaagagaaactttaagcagatgtctaatgttttgtgggtggctcctgaggacaaggcgagtttatggtcacaacttcattatgtttcg

SEQ ID NO: 130637 - DNA, 242 bp, Glycine max
agcttatcttgtcaatctcgtaaatgtgttacgagaattgtatttgcacagtccagaggaagctcgccaattgagaaggaaagctctctctcgtattgaatggctgcaaaaagctgatgtgcctaccatagcacagattgaagagttccattcgatgcagaggatgatgaatgctcctgattcaaatgataatattgatctactgttgagcattgatttgttgggtttacaaggagcaggta

SEQ ID NO: 130638 - DNA, 244 bp, Glycine max
gatgtcttacgttgctcacaacgttaatcaaccccaagagaaagatttgttggagggaaatttttcctttgatattaaatctcgctctagattggaaaaagtttcctctacaaaagcacaatttgttagtggaaaaaccttcaaatatgatataattggtgctggttcacattcttcagaagattttcctgaaaaggaagatcaagaaaaacccaaaaagattgataccagattgagacaaaga

SEQ ID NO: 130639 - DNA, 239 bp, Glycine max
attcggacttttgcttgcagtgagactgttaaatttggccatgtcacattcttctggaatggaaaccgctctgggtattttaatgcagaattggaggaatatgtggaaattcctagtgattctgggattacattcaatgaacaaccattaatgaaagcattgcagattgctgaaaaggctagggatgctattcttagcgggaaatttgatcaggtacgcgtcaaccttccaaatggtga

SEQ ID NO: 130640 - DNA, 244 bp, Glycine max
ctcaatcctggtatttcaggttctcgtcttttgggcaccattcctcagtccatttcacagcaaactgtttggaatcaaatggcaacagtgagaacaccattgaattttgattctagcaagcagagcttttgtcaattttctattgaccttctcggtggaggaattttagtggacaaaactggagattggatcacacttatacaaaattctccaattagtaacttgttgagagttgctgcttgga

SEQ ID NO: 130641 - DNA, 253 bp, Glycine max
tgagggttttcctcatgtgctttcacgcaaaaatggtgacaaaggcaaaagaagatttgtttctggggatggtgaagagatgacattgattccgggaaccagtgttgaagaggcttacaacaagctaatagttgaacttgagaaaagtgttcctacattggttggcattcaatgtcccaaggatgagaaacttcctcgtcgcaaaatttttgacaaacctaagacgcgctgcttcactattctccctatggag

SEQ ID NO: 130642 - DNA, 256 bp, Glycine max
ctctttcttcatagcatttggaaatttggctgatgacaccatcaattttgaggcttttccccacaagctggtgcaatttggagagattcaggaaaaagttgtattgaaattttcacaagaggaatttcttacagcttggtcaactcaggtgcgtcctgcaacaactctgttggctgatgggtgtccatatttgtatgctatggtgcatgatagttcagtgtctacaataccaggtgattttgtcattggtgttaag

SEQ ID NO: 130643 - DNA, 248 bp, Glycine max
ggtgatgaaaaattgatgcgtgaaaggacacacctgctgttggcttgttgttcaaggatggcaatttgtaagaaagatgtttggagagttgaatgtggaatcccttctggatttccgctcacagttatttgcaatagcatttttaatgagatgctcattagatatagctatgaaatattactgcgccaggctaaagctccaagtatgtttgtacaatccttcaaaaattttgtttctttgtgtgtgta

SEQ ID NO: 130644 - DNA, 248 bp, Glycine max
caaaagcacaatttgttagtggaaaaaccttcaaatatgatataattggtgctggttcacattcttcagaagattttcctgaaaaggaagatcaagaaaaacccaaaaagattgataccagattgagacaaagaatagatcctcaatacaatgaggttcaggctcagatggaaacaaatttgtttgaattgtctcttgatgatgttgaaactcctaaaggttccatgttggatcataaaatttctcaa

SEQ ID NO: 130645 - DNA, 245 bp, Glycine max
ggacacacctgctgttggcttgttgttcaagaatggcaatttgtaagaaagatgtttggagagttgaatgtggaatcccttctggatttccgctcacagttatttgtaatagcatttttaatgagatgctcattagatatagctatgaaaaattactgcgccaggctaaagctccaagtatgtttttacaatccttcaaaaattttgtttctttgtgtgtgtatggtgatgataacttaattagt

SEQ ID NO: 130646 - DNA, 238 bp, Glycine max
agagaatgcctttttctatagggggaggagctggtgcaaagaatgctattctcatgaatatgccaaatgctgttctttcaatgtggagatattttgttggagatctcgtctttgaagtttctaagatgacttctccctacattaaatgtacagtctctttcttcatagcatttggaaatttggctgatgacaccatcaattttgaggcttttccccacaagctggtactcattggaga

SEQ ID NO: 130647 - DNA, 237 bp, Glycine max
cggctcgaggaaattctttctaaggttgcacaagatatggttgaggaatggtttgattgtgttgatgaggaggattcctttgaggaagtttctttaagtgcagcactcaatggtgttgagggtttggactatatggaaagaattcctcttgccacatctgagggttttccccatgtgctttcacgcaaaaatggtgaaaaaggcaaaaggagatttgtttctggggatggtgaagag

SEQ ID NO: 130648 - DNA, 244 bp, Glycine max
gttgaaaacgatgaatcttggcacccgttgccggagaaaattttcaagagcttggataatgtaacacgtattttaagatttacattaccttttccattgcttgcatatcctatctacctgtggagcaggagtcccgggaagactggttctcactttaatcctgacagtgacttgtttgttcccagtgagagaaaagatgttattacctcaacagtttgttggacagctatggctgctttgcttg

SEQ ID NO: 130649 - DNA, 248 bp, Glycine max
ggaagttggaaggaacgtggaaagggagaactgaaggttaatgttgccagtgaaaccaaaaaagccagacttcttatgaggtcaaagggaaattatagattgattttgaatgcacgactttaccctgatatgaagctcacaaatatggacaagaagggtgttacttttgcctgcctcaatagtgccatacgaaggaaaggtggtctttcaacatttgccttgaagttcaaggatggctccatagtgga

SEQ ID NO: 130650 - DNA, 179 bp, Glycine max
cggctcgatgaaattttgataaaccgcgatcacaggttgccgcaccttaaaacctgaaacaaaagcaatcgttacttgatttcaagaatctctcaatttcttcctacttctttgtgtacggtttcttaagggaaagaaaatcactctctgtgctggtcacagacttcgtgaatcatttt

SEQ ID NO: 130651 - DNA, 251 bp, Glycine max
gtctttattctaatcccactttggaagatatcccacattcagcttgggaccttttttgctgggacagtgagaaaactttgccaaataatttttctgcagaattgctctcttgcaaattggatactgttactggccaatattatcctgagtgggctccaattaattgtcgagttcatcgacaaccaattcacatcactgaaggaaattatgtcagaaagcaagatgtcagcattgaatatgatgcatgtaca

SEQ ID NO: 130652 - DNA, 248 bp, Glycine max
gtctaatgttttgtgggtggctcctgaggacaaggcaagtttatggtcacaacttcattatgtttcgtgtaataatctggaaatgcaagaagcttatcttgtcaatctcgtaaatgtgttacgagaattgtatctgcacagtccagaggaagctctccaactgagaaggaaagctctctctcgtattgaatggctgcaaaaagctgatgtgcctaccatagcacagattgaagagttccattcgatgc

SEQ ID NO: 130653 - DNA, 242 bp, Glycine max
cccaaatggttatgagcttgcaagtgagcgctggacgcctgttcatacagtagagagtatagtattaagtatcatatcgatgctttctagtcctaatgatgaatctcctgcaaatgttgaagctgcgaaggagtggagagataggagagatgaattcaagaagaaggttagccgatgtgtgcggaagtcacaagaaatgttgtgatttacagcttggattctcatcttccttttgtgaacag

SEQ ID NO: 130654 - DNA, 241 bp, Glycine max
cagccactgccattgatgcaccaacagatgcttccaaggggacatgtctaccgatatcctcctggctccaatatgcaaaatattcaactggcaggagtacctggaggaatggtcagttacggcattggtcaaccaatgcccacacaggccctggcctcggcccttgccaatgctactcctgaacagcagaggactatgcttggtgaagctttatacccgttagtagataagctggagcatg

SEQ ID NO: 130655 - DNA, 239 bp, Glycine max
gagacatcagtgcctccttctggtctccctggtgttggtctcctacgctgcccggtcggaatcagcgctgggcggctggagccccatcaaggacgtaaacgacagccacgtggcggagatcgccaactacgcgctgagcgagtacgacaagcgttctggggccaagctcacccttgtcaaggtcgtcaagggcgagactcaggtcgtttccggcaccaactaccgtctcgtcctcaaag

SEQ ID NO: 130656 - DNA, 239 bp, Glycine max
cggctcgagcggtggaggaattttagtggacaaaactggagattggatcacacttatacaaaattctccaattagtaacttgttgagagttgctgcttggaagaaaggctgtttaatggttaagattgtgatgtctgggaatgcagcagtcaaaaggagtgattgggcctcattggtacaagtgtttttaacaaacagcaacagtacagagcattttgatgcatgtaagtggacaaaat

SEQ ID NO: 130657 - DNA, 239 bp, Glycine max
ctcgagccgattcggctcgagaaaaattgatgcgtgaaaggacaagcctgctgttggcttattgttcaaggatggcaattagtaagaaagatgtttggagagttgaatgtggaatcccttctggatttccgctcacagttatttgcaatagcatttttaatgagatgctcattagatatagctatgaaaaattactgcgccaggctaaagctccaagtatgtttttacaatctttcaaa

SEQ ID NO: 130658 - DNA, 227 bp, Glycine max
tcgggcttctcgacgctttgggaatcgagcgagtttttctggtgggccatgactggggagcctccatagcctggcatttctgcttgctgaggcccgatcgtgtgaaggccctcgtcaacatgagcgtcgtgttccgccccagaaaccctaatcgaaagcccattcagagcctcagggccatcatgggcgacgattactatatctgcaggttccagaaacctggggag

SEQ ID NO: 130659 - DNA, 246 bp, Glycine max
atttgcaatagcatttttaatgagatgctcattagatatagctatgaaaaattactgcgccaggctaaagctccaagtatgtttttacaatctttcaaaaattttgtttctttgtgtgtgtatggtgatgataacttaattagtgttcatgaatatgtcaagccttactttagtggttctaaattgaaaagctttctagctggtcataatatcaccattactgatggtattgacaaaactagtgca

SEQ ID NO: 130660 - DNA, 252 bp, Glycine max
caataccaggtgattttgtcattggtgttaagttgacaaccataaacaatatgtgtgcatatgggctcaatcctggtatttcaggttctcgtcttttgggcaccattcctcagtctatttcacagcaaactgtttggaatcaaatggcaacagtgagaacaccattgaattttgattctagcaatcagagcttttgtcaattttctattgaccttctcggtggaggaattttagtggacaaaactggagatt

SEQ ID NO: 130661 - DNA, 224 bp, Glycine max
agagaatgcctttttctatagggggaggagctggtgcaaagaatgctattctcatgaatatgccaaatgctgttctttcaatgtggagatattttgttggagatctcgtctttgaagtttctaagatgacttctccctacattaaatgtacagtctctttcttcatagcatttggaaaatttgctgatgacaccatcaattttgaggcttgtccacacaagata

SEQ ID NO: 130662 - DNA, 164 bp, Glycine max
gaaattttgataaaccgcgatcacaggttgccgcaccttaaaaccggaaacaaaagcaatcgttacttgatttcaagaatctctcaatttcttcctacttctttgtgtacggtttcttaagggaaagaaaatcactctctgtgctggccacagacttcgtgaat

SEQ ID NO: 130663 - DNA, 238 bp, Glycine max
gaagtctgctggagttgaatttccaccacgagatgagaaaagtgtaccattcttcactcccgctcaaactcagccaattattcattctgctgcagaatatgatgatgctactattcaggcttctcttcagtcagatgcatctgaccttagtttgctagagattcaaaatgctcaaggactagctgatgtattgatggaaatgcttagcgccttgagtcctaaagaccgtgagggtgtg

SEQ ID NO: 130664 - DNA, 240 bp, Glycine max
ttttgatattctcttgggaatttctcaagattttgagattgctggtaatactcttatgccagctttttctgttccacaggctactgccagatcttctgaaaatgcggaatcctctgcatgatctggaatttgtgttttcttttgcttgttcgtttgtttaattcaataaaggaaattaggcatgaccctcttgttgagtatgctctgcctatttgaaaatttccacacctcttttaatta

SEQ ID NO: 130665 - DNA, 250 bp, Glycine max
gttgggatctccatacgccggatctgctaaaatacgcttgatccatatgggcctcctcgaccacttgtgggacgacaccgtcgccggcccaaggccggaaaacggtctcggcaagctccgaaaacaccacaccttcactttccgacctagctccggcaaggaaacggagggcgggagcgtgagatcgtacggagacgaatcgtcggaggaagcgacgagagtgacgcgtagtatcatgatcgtgaaaccg

SEQ ID NO: 130666 - DNA, 253 bp, Glycine max
cggtatactgtactaatatgtgtaggtccccgtaattcgagtgagattgtcatggcgcaaaagcagatatggtttggtattcccttgttccctgtattggttatgttcttcatttcttgtctagcagaaactaatcgagctccgtttgatctcccagaagcggaagctgaattagttgcaggctataatgtagaatatgcgcgggatgcgatccttaatagtccactgttggcggaagcaatgtcccggggtc

SEQ ID NO: 130667 - DNA, 259 bp, Glycine max
tgatgatctgatgacgcagcgcctggcattagtgcgtctccttcggaggacaatatccggtatttcaatgtgatgatccttggaccgactcagtcgccatatgaccggggagttctcaagttggacattatttttgccagaagaatatgcactcgctgctccaacaggttaggtttctgacaccaatatctcatccgaacattgatcagcttcgcaggatatgtgctgacattctgaacactaagcggagtcctgcccc

SEQ ID NO: 130668 - DNA, 256 bp, Glycine max
attcaagattcagcaagtgcgttttggaagcagagaccgaaatacttcgagatggcccgtacaaagcaaactgctcgtaagtcaactggaggaaaagctcccaggaagcagcttgcaaccaaggctgcacgtaagtctgcaccaacaactggtggtgtgaagaagcctcatcgttatcgccctggaactgttgctcttcgtgagattaggaaataccagaagagcactgagctcctaatcaggatgcttcctttcc

SEQ ID NO: 130669 - DNA, 254 bp, Glycine max
gaattttatgtgcaatttcatggacccaatgacagtccttatcatggtggtgtgtggaaagtaagagttgagttaccggatgcttatccttacaaatctccttccattggctttatcaacaagatctatcacccaaatgttgatgagatgtcaggatcagtttgtctggatgttatcaatcaaacctggagtcccatgtttgatcttgttaatgtgtttgaggtgtttctacctcaacttctgctgtatcccaa

SEQ ID NO: 130670 - DNA, 253 bp, Glycine max
aagcacgatcatttccatgatgtccgaaccaactacaactacactgagccaactctagcaggaaatgcaggtttagtagctgcacttgtggcattgtccggtgataaaaccaccggtatagacaaaaacacccttttctctgctgttcccccaatgtttcccacaccaccaccacctccagcaccatggaaaccatgaggtgttgtattgtgtcattcattgtcctcctttccatcaagtgccaaaagtgact

SEQ ID NO: 130671 - DNA, 254 bp, Glycine max
caatgaggttcaggctcagatggaaacaaatttgtttaaattgtctcttgatgatgttgaaactcctaaaggttccatgttggatcttaaactttctcaatctaaaattgcacttcccaaaaacacagttggcggaaccattctgcgtagtgacctattggcaaattttttgacagagggcaattttagagcaagtgttgatttgcagcgcactcatcgtatcaaaggaatgattaaaatggtggccacagttg

SEQ ID NO: 130672 - DNA, 250 bp, Glycine max
acaaaaactaatttggtggaaactcccaaggaatggcaactggatctaccttgtgacaaaattcctagtgtcttgactacaactgatgagagattggtaggcacagaacatgagggatatgatccttttcttggtggaattcaaaaatatgccactcccatgatgcccctagatgaagaaattctttctaaagttgcacaagatatggttgaggaatggtttgattgtgttgatgaggaggatcctttga

SEQ ID NO: 130673 - DNA, 250 bp, Glycine max
cgttggacacaacccatactccatggaatggactggtttggccaatagattactgagtaagggcaacgatattctgtgttgcgattatgctagttttgatggtttgattaccaagcaagttatgagcaagatggcagaaatgataaacagtctttgtggtggtgatgaaaaattgatgcgtgaaaggacacacctgctgttggcttgttgttcaaggatggcaatttgtaagaccctgtttggagagttg

SEQ ID NO: 130674 - DNA, 250 bp, Glycine max
ggaaaagaaggggttcctcgacaagattaaggagaagctaccagggcacaagaagacagaggaggccacagctactactcctcctccaccaccacctgttgcatcattggagcatggtgaaggtgctcatcatgaaggagaggccaaggagaagaaaggtatattagaaaagataaaagagaagcttcctggttatcactccaagacagaggaggaaaaggaaaaggaaaaggagagtggtgctcattga

SEQ ID NO: 130675 - DNA, 252 bp, Glycine max
gagagttgctgcttggaagaaaggctgtttaatggttaaaattgtgatgtctgggaatgcagcagtcaaaaggagtgattgggcctcattggtacaagtgtttttaacaaacagcaacagtacagagcatttcgatgcatgtaagtggacaaaatcggaaccacattcctgggaattgatcttcccaatagaggtatgtggtcctaataatggttttgaaatgtggagttctgagtgggcaaatcaaacttc

SEQ ID NO: 130676 - DNA, 249 bp, Glycine max
gtgatttcagaactgcaatggtgagtacaaatagcaagcctcaagctactgcaatgcatgtgggagctatagaaattatcattgatagtttcgcaagtcctgactgcaacatagttggtgcaatgcttttggttgatacttatcataccaatcctgaaaatgcagttcgtagtatttttgttgcgcctttcagaggcggaaggcccattcgggtggttacatttccgaataccattgtgcagattgaac

SEQ ID NO: 130677 - DNA, 211 bp, Glycine max
agacagttagcagattgtgattttctcaagagaaactttaggcagatgtctaatgttttgtgggtggctcctgaggacaaggcgagtttatggtcacaacttcattatgtttcatgtaataatctggaaatgcaagaagcttatcttgtctatctcgtaaatgtgttacgagaattgtatttgcagagtccagaggaagctcgccaattga

SEQ ID NO: 130678 - DNA, 252 bp, Glycine max
gttggaatcaacccatactccatggaatggactggtttggccaatagattactgagtaagggcaacgatattctgtgttgcgattatgctagttttgatggtttgattaccaagcaagttatgagcaagatggcagaaatgataaacagtctttgtggtggtgatgaaaaattgatgcgtgaaaggacacacctgctgttggcttgttgttcaaggatggcaatttgtaagaaagatgtttggagagttgaa

SEQ ID NO: 130679 - DNA, 250 bp, Glycine max
gcgctgcttcactattctccctatggagtttaatcttgtggtccgtcaaaagtttttaaattttgtgaggttcattatgaagaaaagggacaagcttagttgtcaagttggaatcaacccatactccatggaatggactggtttggccaatagattactgagtaagggcaacgatattctgtgttgcgattatgctagttttgatggtttgattaccaagcaagttatgagcaagatggcagaaatgata

SEQ ID NO: 130680 - DNA, 250 bp, Glycine max
gtcgcgtgtactttcttgcgaaacagaagggcgaaggggcaaacacaacttttttgtttttttgtagagcgagagagaaaaaaaatgttggggatcttcagcagttccgtggtgtcgccgccggaggagctggtggctgccggcagcagaacgccgtcgccgaagacgacggcggggaagctgctgaaccggttcgtggagaacaaggcgtcggcggtgtcgctgcaggtgggagaacacgtgcagttgg

SEQ ID NO: 130681 - DNA, 247 bp, Glycine max
ataaaatcaagaaagcatgcatatgatgaagaaggtgtgtgggtttgcaatagtggtgatggcagcactttttctggtggagatgagtcccatggcagaggctgtgacttgtagccctgtggagttgagtccctgtttgggggcaatcacgtcctcttcaccaccatcgacaacttgttgccagaaggtgagggaacaaaggccatgcctctgtggttacctcaaaaaccctagtctgaggccatat

SEQ ID NO: 130682 - DNA, 164 bp, Glycine max
ctcgagccgattcggctcgagggacggatacctaggcacccagagacgaggaagggcgtagtaagcgacgcaatgcttcagggagttgacaataagcgtagatccggggattcccgatatacgccaacctctcgaactgctgctgaatccacgggcatgcaaga

SEQ ID NO: 130683 - DNA, 258 bp, Glycine max
attcaagattcagcaagtgcgttttggaagcagagaccgaaatacttcgagatggcccgtacaaagcaaactgctcgtaagtcaactggaggaaaagctcccaggaagcagcttgcaaccaaggctgcacgtaagtctgcaccaacaactggtggtgtgaagaagcctcatcgttatcgccctggaactgttgctcttcgtgagattaggaaataccagaagagcactgagctcctaatcaggctgcttcctttccag

SEQ ID NO: 130684 - DNA, 257 bp, Glycine max
attatgcccaaaatgtaaagggaaaggttcaaaaagtggaactgctggtaggtgttttggatgcaaaggcactggtatgaaaattacaagaaggcagattggactaggcatgattcaacaaatgcaacatgtctgtcctgactgcagaggatctggtgaggtcattaacgagagagataaatgtcctctgtgcaaaggaaacaaggtttcccaggaaaagaaggtgctggaagtgcatgttgagaagggcatgcagc

SEQ ID NO: 130685 - DNA, 248 bp, Glycine max
ctcactcactgcagatctcaattgcatcgctgtccatggctaccatcgttagcatcaaggcccgccagatcttcgacagtcgtggcaatccaactgtcgaggtggatttgacttgctccgatggtacttttgccagagctgctgttccaagtggtgcatccactgggatttatgaggcccttgaattgagagatggaggatctgactaccttggaaagggtgtatcaaaggctgttgacaatgtgaac

SEQ ID NO: 130686 - DNA, 247 bp, Glycine max
gagatttgatagcctcaactcaagtaagggttttctctttgagaaaatcgtatcttacaccttttggtgaccactttgagtgagagaagagaaattaagagagatactcaaattagattcaagagagatggccatcaaccatgaaacttgggctttcattttcggtcttctaggcaacgtgatctcctttatggtgttcctcgctccattaccaactttttaccaaatctacaagaaaaaatctacg

SEQ ID NO: 130687 - DNA, 261 bp, Glycine max
attcgagctcgagctcgagagaaggtggttcctcgacaagattaaggagaagctaccagggcacaagccgacagaggcggccagagctactacacctccaccaccaccacctgtcccatcattggagcatggtgaaggtgctcatcatgaaggagaggccaaggagaagaaaggtatattagaaaagataaaagagaagcttcctggttatcactccaagacagaggacgaaaaggaaaaggaaaaggcgagtggtgctca

SEQ ID NO: 130688 - DNA, 250 bp, Glycine max
gagaagctaaagaaagaaaggagatgggagtggagaagcagttgttgaggtctggcaccggtccgaagccaattcccggtcagaacgtaaccgttcactgcactggtttcgggaagaacggtgacctttctcagaaattctggagcacaaaggatcctggccagaacccattcactttcaaaatcgtccaaggttctgttatcaaaggatgggatgaaggtgtgcttggcatgcaaattggtgaagttgc

SEQ ID NO: 130689 - DNA, 252 bp, Glycine max
ctcgagccgttttcttgtatgagactataacaaaatgtatcgccaggctaattcacagacaagatcttcaggagcatcaggaaggacctcatctgtgaattagcctggcgatacattttcttgtatgagactataacaaaatcaaagtttgaggtgccatcgactgaggagcctatacatgaccgaattacacgaaatgttgcatctgcactgtcatccctaaagtagcctgggaaattagggccgtgctgt

SEQ ID NO: 130690 - DNA, 257 bp, Glycine max
gtggttatcatcttcttcttcctctttcttagatctcttctttctctacgccgcacgccgaaaccatggccggaaaaggagagggtcctgctatcggaatcgatctcggaaccacctactcttgcgtcggtgtgtggcaacatgaccgcgttgaaatcatcgccaacgaccaagggaacagaaccacgccgtcttacgtcggattcactgacaccgagcgtctcatcggtgatgcggccaagaatcaagtcgccatg

SEQ ID NO: 130691 - DNA, 247 bp, Glycine max
ctcgagccgattcggctcgaggttcccaggacttattgtgtttcaaatccacaaaatccgtttgtgttgaataggtggatggggtaactgactttcccccagggcacttcccgaagtgttaagagaatgcctctttctatagggggaggagctggtgcaaagaatgctattctcatgaatatgccaaatgctgttctttcaatgtggagatattttgttggagatctcgtctttgaagtttctaaga

SEQ ID NO: 130692 - DNA, 208 bp, Glycine max
tctttctatagggggaggagctggtgcaaagaatgctattctcatgaatatgccaaatgctgttctttcaatgtggagatattttgttggagatctcgtctttgaagtttctaagatgacttctccctacattaaatgtacagtctccttcttcatagcatttggaagtttggctgatgacaccatcaattttgaggcttttccccac

SEQ ID NO: 130693 - DNA, 224 bp, Glycine max
gtgagaagtccactgaaccttatcatttagaggaaggagaagtcgtaacaaggtttccgtaggtgaacctgcggaaggatcattgtcgatgcctcacaatcagattgacccgcgaacttgtttattcatctaccgtcgggagggaggggatgaccacggcgccccgtgcgcccggcctcctcgtcctcgcgacaaacacaaaccccggcgcttcgtgcgccaag

SEQ ID NO: 130694 - DNA, 243 bp, Glycine max
agactattgaattggaaaatcttttgataaatgcatgcatcacaatgtactctgctgaagctaggaaagacagtagaggagctcatgcccgtgaagacttcaaggttagagatgatggaagctggatgaaacacactgtgggattctgggagaacgagaaagtccggttggactacaggccagtgcatttgaatgtattggatgatgaggttgaatcattccctcccaaggctcgggtgtatt

SEQ ID NO: 130695 - DNA, 250 bp, Glycine max
cagctcgaattcaagcggctcggctctaagccagttctgatatggacaccacactgctctcaagactgtgaattatggaatcctgcatgcacaaaagcaatgaccatgtcatttaatccaaacccgtgttctgatgcatggagtttggaattcctgaagcgtaccggatttcattgtgatatcatttgtgtcactggatggactgctaccccaatgcaggatgttcaggttacaattgattggtttattt

SEQ ID NO: 130696 - DNA, 253 bp, Glycine max
tttggcatcaaatggcaacagtgagaacaccattgaattttgattctagcaagcagagcttttgtcaatttcctattgaccttctcggtggaggaattttagtggacaaaactggagattggatcacacttatacaaaattctccaattagtaacttgttgagagttgctgcttggaagaaaggctgtctaatggttaagattgtgatgactgggaatgcagcagtctccaggtgtgaatgggcctcattggt

SEQ ID NO: 130697 - DNA, 251 bp, Glycine max
gcttatcttgtcaatctcgtaaatgtgttacgagaattgtatttgcacagtccagaggaagctcgccaattgagaaggaaagctctctctcgtattgaatggctgcaaaaagctgatgtgcctaccatagcacagattgaagagttccattcgatgcagaggatgatgaatgctcctgattcacatgataatattgatctactgttgagcattgatttgttgggtttacaaggagcaggtaaagcttttcc

SEQ ID NO: 130698 - DNA, 255 bp, Glycine max
aggaattttagtggacaaaactggagattggatcacacttatacaaaattctccaattagtaacttgttgagagttcgctgcttggaagaaaggctgtttaatggttaaaattgtgatgtctgggaatgcagcagtcaaaaggagtgattgggcctcattggtacaagtgtttttaacaaacagcaacagtacagagcatttcgatgcatgtaagtggacaaaatcggaaccacattcctgggaattgatcttcc

SEQ ID NO: 130699 - DNA, 252 bp, Glycine max
gtgatgataacttaattagtgttcatgaatatgtcaagccttactttagtggttctaaattgaaaagctttctagctggtcataatatcaccattactgatggtattgacaaaactagtgcaactttgcaatttagaaagttagcagattgtgattttctcaagagaaactttaagcagatgtctaatgttttgtgggtggctcctgaggataaggcgagtttatggtcacaacttcattatgtttcgtgta

SEQ ID NO: 130700 - DNA, 243 bp, Glycine max
aataagttcattattccacagatcagcaacctagactagcatatggttcatctccctctttctgtccatctttgctactggaatcctggagatgaggtggagtggtgtcggaatcgacgagtggtggaggaatgaacagttttgggtcatcggtggtgtctcggcacatctctttgctgttttccaaggcttgctcaaagtgcttgctggaattgacaccaacttcactgtcacctccaaggc

SEQ ID NO: 130701 - DNA, 243 bp, Glycine max
aaggcgttctctacacgctcgccgatggtgcggttgcggcggaccctgcggttgctgcggactctgcggcttccaccaccgatgctaaagaacagatagcggaggctggttcggcttcatttccgaagccatggagttcgttctcaaggtgttgaaggatggcctttctgccgtgcatgtcacttatgcatatggatttgctatcatattgctcactgttatagttaaggccgctacgcttcc

SEQ ID NO: 130702 - DNA, 239 bp, Glycine max
gtgaaatttacagataatcttgttggtgggaacaaagctacaaatgatcataactgagatggcactaaggattcaagataggggggaagtcgtcaagggtgcacctgtggttgagccaggagatggattgttctggttcaatcgacctcgcttcatcctctttttgattcatcttgttctctttcaagtaaattttatgatttattttcctatgattcaacctactgtcaaattgaagc

SEQ ID NO: 130703 - DNA, 239 bp, Glycine max
ctcgtcgtattgatgtcggaaaagggccggccacttccaaaatttggtgaatgggatgtcaatgatccaacctcagctgaggggttcacagtgatttttaataaggccagggatgagaaaaagacaggtggtaacccagattcaccaggaaagactgccactgatcctcatagcaaacctgctgtagagcctggcaaaactcaaactaaaaaatggttttgctgcatgcaaaacccttc

SEQ ID NO: 130704 - DNA, 248 bp, Glycine max
attttcctgaaaaggaagatcaagaaaaacccaaaaagattgataccagattgagacaaagaatagatcctcaatacaatgaggttcaggctcagatggaaacaaatttgtttaaattgtctcttgatgatgttgaaactcctaaaggttccatgttggatcttaaaatttctcaatctaaaatcgcacttcccaaaaacacagttggaggaaccattctgcgtagtgatctattggcaaattttttg

SEQ ID NO: 130705 - DNA, 246 bp, Glycine max
cgaatagattatcctaagtctttgggaatagtgctgcaatggcttcaagtcaggaggaggtgacccttttgggagctactggaagcccatttgtgtgcagggttcatattgccctcaagttgaagggagttcaatacaaatatgtcgaagaaaatttgaggaacaagagtgaactgcttctcaaatccaacccagttcacaagaagattccagtgtttattcacaatgagaagtccatagcagagt

SEQ ID NO: 130706 - DNA, 249 bp, Glycine max
gcagatgtctaatgttttgtgggtggctcctgaggataaggcgagtttatggtcacaacttcattatgtttcgtgtaataatctggaaatgcaagaagcttatcttgtcaatctcgtaaatgtgttacgagaattgtatttgcacagtccagaggaagctcgccaattgagaaggaaagctctctctcgtattgaatggctgcaaaaagctgatgtgcctaccatagcacagattgaagagttccattc

SEQ ID NO: 130707 - DNA, 245 bp, Glycine max
agccgatgaaatgctgaggatgggttttgttgaagatgttgaaatgattctaggcaaggtagaaaatgttaataaagttcagacacttcttttcagtgctactttgccagactgggttaagcaaattgctttaaaatttttgaagccagataagaaaactgctgaccttgttggaaatacaaaaatgaaggccagcaccaatgttaggcatattgttcttccttgtactagttctgccagggccc

SEQ ID NO: 130708 - DNA, 240 bp, Glycine max
tctcgctctagattggaaaaagtttcctctactaaagcacaatttgttagtggaaaaaccttcaaatatgatataattggtgctggttcacattcttcagaagattttcctgaaaaggaagatcaagaaaaacccaaaaagattgatgccagattgagacaaagaatagatcctcaatacaatgaggttcaggctcagatggaaacaaatttgtttaaattgtctcttgatgatgttgaa

SEQ ID NO: 130709 - DNA, 217 bp, Glycine max
cgacaaggaccagaatgggttcatctctgctgctgagctccgccatgtgatgaccaacctcggggagaagctcaccgatgaagaggttgatgagatgattcgcgaggccgatgttgatggcgatggccaaataaactacgaggagttcgttaaggtgatgatggccaagtgatcatcacattatggccacaaaaacctaaatgaagaaatgttgatt

SEQ ID NO: 130710 - DNA, 344 bp, Glycine max
ctaatgttttatgggtggctcctgaggacaaggcgagtttatggtcacaacttcattatgtttcgtgcaataatctggaaatgcaagaagcttatcttgtcaatctcgtaaatgtgttacgagaattgtatttgcacagtccagaggaagctcgccaattgagaaggaaagctctctctcgtattgaatggctgcaaaaagctgatgtgcctaccatagcacagattgaagagttccattcgatgcagaggatgatgaatgctcctgattcaaatgataatattgatctactgttgagcattgatttgttgggtttacaaggagcaggtaaagcttttccaaac

SEQ ID NO: 130711 - DNA, 341 bp, Glycine max
caaagtttcttcctttctctgctctttgtcttctctgacacatttggggccttgttgagtgtgtttttgcaagagggtatggcgaaggacgttgaggttgctgagcgtggctccttctctgggaaggactaccaggaccctccaccagcaccactcattgatgctgaggagctcacaaagtggtccttttacagggctcttattgctgagttcattgccactttgctcttcctctacattactgtgctcacagttatagggtacaagcaccagacggatcatgctgatgcgtgtggtggggttggcattcttggcattgcatgggcctttggtggcatgat

SEQ ID NO: 130712 - DNA, 168 bp, Glycine max
gtgacctccccggagcccagcaagcttccgatccgcaaaatccccggcgactgcgggttcccggtgatcggtcccttcaaggaccgccaagattatttctacaagcaagggcgcgacgagttcttcaagtcccgcatccaaaagtaccagtcaacggtcttccgcacc

SEQ ID NO: 130713 - DNA, 335 bp, Glycine max
cttatttgaaaaacacttgggcgttggtgcaaatgtttgcttcgttaattttctctggagacaacaggctcactgagaaaacaatttttacttgcagagatttggacatcttggttgtctattatacaatagcaactcaatttagaaaatttctaccgcattacattaggtggcatctgtataccttgttgatctacattctcccatcttttctcactgctgaaattaaatataagcggaatttgagtaatattcatatttccggcttattttacgacggcagatacaaattctggactaaacacgagaaaaatcttgctttgacagaagaggaa

SEQ ID NO: 130714 - DNA, 334 bp, Glycine max
aattttaataaaccgcgatcacaggttgccgcaccttaaaaccggaaacaaaagcaatcgttacttgatttcaagaatttctcaatttcttcctacttctttgtgtacgatttcttaagggaaagaaaatcactctctgtgctggtcacagacttcgtgaatcattttcttttccactcctagtttatttactgaacactctcctatttgatataggacttcgtgtcagatttaaactttttctgtatctttctcagttctctgtttaatttcaagttcaagctggtgaaattttggattagtgctcccactctcctatctggtataggacttc

SEQ ID NO: 130715 - DNA, 344 bp, Glycine max
ggtctttattctaatcccactttggaagatatcccacattcagcttgggaccttttttgctgggacagtgagaaaactttgccaaataatttttctgcagaattgctctcttgcaaattggatactgttactggtcaatattatcctgagtgggctccaattaattgtcgagttcatcgacaaccaattcacatcactgaaggaaattatgtcagaaagcaagatgtcagcattgaatatgatgcatgtacaattccaaatgattgtggttcattggttgttgccaaggttggaaatcacaaacaaattgttggtttccatgttgctggaagcaaaggagattg

SEQ ID NO: 130716 - DNA, 336 bp, Glycine max
ctcgcaatggttaaagttaatgtagcatgtgctgctgttggcttgacatcaagttacactccaactccattgttggaatctggtttgcaaaaagacagagggttaattgtggagtattttggaaggatgtcttacgttgctcataacgttaatcagccccaagagaaagatttgttagagggaaatttttacctttgatattaaatctcgctctagattggaaaaagtttcctctacaaaagcacaatttgttagtggaaaaaccttcaaatatgatataattggtgctggttcacattcttcaggagattttcctgaaaaggaagatcaagaaaa

SEQ ID NO: 130717 - DNA, 345 bp, Glycine max
aataaaccgcgatcacaggttgccgcaccttaaaaccggaaacaaaagcaatcgttacttgatttcaagaatttctcaatttcttcctacttctttgtgtacgatttcttaagggaaagaaaatcactctctgtgctggtcacagacttcgtgaatcattttcttttccactcctagtttatttaactgaacactctcctatttgatataggacttcgtgtcagatttaaactttttctgtatctttctcagttctctgtttaatttcaagttcaagctggtgaaattttggattagtgctcccactctcctatctggtataggacttcgtgggtagatattcta

SEQ ID NO: 130718 - DNA, 345 bp, Glycine max
tggtgcagtttggagagattcaggaaaaagttgtgttgaaattttcacaagaggaatttcttacagcttggtcaactcaggtgcgtcccgcaacgactctgttggctgatgggtgcccatatttgtatgctatggtgcatgatagttcagtgtctacaataccaggtgattttgtcattggtgttaagttgacaaccataaacaatatgtgtgcatatgggctcaatcctggtatttcaggttctcgtcttttgggcaccattcctcagtccatttcacagcaaactgtttggaatcaaatggcaacagtgagaacaccattgaattttgattctagcaagcaga

SEQ ID NO: 130719 - DNA, 286 bp, Glycine max
tagtaactcggtgaaggtcttggctggtgtgaacacaaacttcactgtgacctcaaaagcagcagatgatggagaattctcagaactctacatattcaagtggacatcactcttgatccctccaatgactttacttatcatgaatattgtcggggtggttgtcgggatctcagatgccatcaacaatggttatgactcatggggacctctctttggtagattgttctttgcattgtgggtgatcctccatctctaccccttcttgaagggggtgctttgggaaaca

SEQ ID NO: 130720 - DNA, 349 bp, Glycine max
cagtcataggactcatcaccaacatcatggtcatgctgaaaatgatgaatcatggcatccggtgagatgactatcaatgttcttgtttttaaaacatgctctttttatctaagttttttccttttaagtgatcaaagtttctgacataagaggtgtattggtaatccctgcagttgcctgaaaaattgttcagaagcttggacactgtaactcgtatgttaagattcacagcaccttttccacttcttgcatttcctgtgtaccttgtaagttattctgctttgaccataatttgaacattaattactctttagtcttggtagaagaattgacatggtggctgttgata

SEQ ID NO: 130721 - DNA, 342 bp, Glycine max
  unsure (1)..(342): unsure at all n locations
tgaggaatttcttacagcttggtcaactcaggtgcgtcncgcaacgactctgttggctgatgggtgcccatatttgtatgctatggtgcatgatagttcagtgtctacaataccaggtgattttgtcattggtgttaagttgacaaccataaacaatatgtgtgcatatgggctcaatcctggtatttcaggttctcgtcttttgggcaccattcctcagtccatttcacagcaaactgtttggaatcaaatggcaacagtgagaacaccattgaattttgattctagcaagcagagcttntgtcaattttctattgaccttctcggtggaggaatttagtg

SEQ ID NO: 130722 - DNA, 340 bp, Glycine max
tgaagctggaatttcaaaggatggacagactcgtgaacatgctctgctttcattcacccttggtgtgaaacagatgatttgttgctgtaacaagatggatgctactacaccaaagtactccaaggccaggtatgatgaaattgtgaaggaagtttcttcctatttgaagaaagtaggatacaaccctgacaagattccttttggtcctatatctggttttgagggagacaacatgattgagaggtccacaaaccttgactggtacaagggtcctactctggtagatgcacttgaccagatctctgagcccaagaggccttctgacaagcccctcaggcta

SEQ ID NO: 130723 - DNA, 339 bp, Glycine max
  unsure (1)..(339): unsure at all n locations
caaaaatctgactcagaaagtgcgagtccaaattgttacatctgaaaagagttactggcatgtgtatgatcctgacaagtttcagatgtttgacaacagtgaaataggtctttattctaatcccactttggaagatatcccacattcagcttgggaccttttttgctgggacagtgagaaaactttgccaaataatttttctgcagaattgctctcttgcaaattggatactgttactggccaatattatcctgagtgggctccaattaattgtcgagttcatcgacaaccaattcacatcactgaaggaaattatgtcagnaagcaagatgtcagcat

SEQ ID NO: 130724 - DNA, 342 bp, Glycine max
  unsure (1)..(342): unsure at all n locations
tccaagtatgtttttacaatccttggagctttagcctggtgcagtaatttttcatagctatatctaatgagcatctcattaaaaatcatcatganaaattactgcgccaggctaaagctccaagtatgtttttacaatccttcaaaaattttgtttctttgtgtgtgtatggtgatgataacttaattagtgttcatgaatatgtcaagtattactttagtggttctaaattgaaaagctttctagctggtcataatatcaccattactgatggtattgacaaaactagtgcaactttgcaatttagacagttagcagattgtgattttctcaagagaaact

SEQ ID NO: 130725 - DNA, 116 bp, Glycine max
  unsure (1)..(116): unsure at all n locations
tgtattgctacatgcatgcgcacanaaccccactggtgtggntncaacccttgancaatgggagcagattaggctnctaatangatcaanagctttnttancttnctnngacagtg

SEQ ID NO: 130726 - DNA, 330 bp, Glycine max
tgaaattttaataaaccgcgatcacaggttgccgcaccttaaaaccggaaacaaaagcaatcgttacttgatttcaagaatttctcaatttcttcctacttctttgtgtacgatttcttaagggaaagaaaatcactctctgtgctggtcacagacttcgtgaatcattttcttttccactcctagtttattttccgaacactctcctatttgatataggacttcgtgtcagatttaaactttttctgtttctttctcagttctctgtttaatttcaagttcaagctggtgaaattttggattagtgctaccactctcctatctggtata

SEQ ID NO: 130727 - DNA, 288 bp, Glycine max
gaagtttcccagtacagatatcgcaatgtgccaataaagcgcagagcatgggttgaaggccagatgtctttcgatcagtctgtagtagcaataatgcctaaatgcaaagccagcatgagaatgggaaacactgatgctcaaattttgatggttccagggcgcagattcatagctcatggacattttttcaaaaatctgactcagaaagtgcgagtccaaattgttacatctgaaaagagttactggcatgtgtatgatcctgacaagtctcagatttgtgacaacagt

SEQ ID NO: 130728 - DNA, 349 bp, Glycine max
ccgttaccctagccgcctccaccatcagttcccagcacggtggaaaatttgccatcgatgctacatccggcgttactccggtgaacactccccgcgggagctgggacctcgggtccggttccgggtccggttccaattcggatttcgggttggaaccgaatttcttttataataaggggtttgtgatgtcggcgatggtgagcggagaggggaagtgtagcaagcccgaagtggaggttggggtgcagcacgtgacttgcacggaggatgctgccactttcgttgctcttgccgcggccttggatttgagtatcgacgcttgcaagttgttctctcagaaactccgaaa

SEQ ID NO: 130729 - DNA, 351 bp, Glycine max
gttgaaactcctaaaggttctatgttggatcttaaaatttctcaatctaaaattgcacttcccaagaacacagttggaggaaccattctgcgtagtgatctattggcaaattttttgacagagggcaattttagagcaagtgttgatttgcagcgcactcatcgtattaaaggaatgattaaaatggtggccacagttggtattcctgagaatacaggtatagcattggcctgtgctatgaatagctcttttagggggcgcgccagttctgatatttacaccatctgctctcaagactgtgaattatggaatcctgcttgcacaaaagcaatgactatgtcatttaatcca

SEQ ID NO: 130730 - DNA, 358 bp, Glycine max
acttcttggttgttgcagcagaggccccgagagaatcctagtttatgaatatatggcaaatagcagccttgacaaattcttatttggttccaaaaaaggttccctcaattggaaacaacgttatgatataattttgggcacagcaaggggactagcatatctacatgaggagttccatgtgtccatcattcatagagatataaagaccggtaatatccttctagatgattatctccagcccaaaattgcagattttgggttggcaaggcttttgccaagggatcgttcacatctcagcacaaaatttgctggaacactgggatacacagcacctgaatatgcaatgcaaggtcaatta

SEQ ID NO: 130731 - DNA, 356 bp, Glycine max
  unsure (1)..(356): unsure at all n locations
taagatntgaaattttaataaaccgcgatcacaggttgccgcaccttaaaaccggaaacaaaagcaatcgttacttgatttcaagaatttctcaatttcttcctagttctttgtgtacgatttcttaagggaaagaaaatcactctctgtgctggtcacagacttcgtgaatcattttcttttccactcctagtttattttctgaacactctcctatttgatataggacttcgtgtcagatttaaactttttctgtttctttctcagttctctgtttaatttcaagttcaagctggtgaaattctggattagtgctcccactctcctatctggtatgacnnttcgtgggtagactt

SEQ ID NO: 130732 - DNA, 349 bp, Glycine max
tgttgccatttgattccaaacagtttgctgtgaaatggcaacagtgagaacaccattgaattttgattctagcaagcagagcttttgtcaattttctattgaccttctcggtggaggaattttagtggacaaaactggagattggatcacacttatacaaaattctccaattagtaacttgttgagagttgctgcttggaagaaaggttgtataatggtcaagattgtgatgtctgggaatgcagcagtcagaaggagtgattgggcctcattggtacaagtgtttttaacaaacagcaacagtacagagcattttgatgcatgtaagtggactaaatcagaaccacat

SEQ ID NO: 130733 - DNA, 342 bp, Glycine max
gggatgccagaaaacgagccagttcgtggaggccgtggaggtggacgaggtgggggacgtggatttggacgtggtcgtgggtttagtcgtgactcctcgaatgatgagaactcattccctaccagcagagctccttataatcagggtccttttgaagaaggagatgctgggaagtcttctgaaagacgcagttatggtggaccacgagttccttaccgtggtggtcgtcgtggaggtttcagcaatggtgaaactggtgaaggtgaagacggacgacctcgaagagcatttgatcgtcgcagtgggactggacgaggaaatgaattcaaacgtgaaggtcag

SEQ ID NO: 130734 - DNA, 342 bp, Glycine max
cttcgttccttccccaacccaatcttcgccttcgcccacaacaactcctccttcaggatcgctgccaacgttactttccatttttacccttcatcctcgagaaaaaaatggcgaacgcagcatctggtatggccgtccatgatgagtgcaagctaaagtttctggagctcaaggcgtagaggacgtaccggtatatcgtttttaagattgaggagaaatcgaagcaagttattgtggagaagctgggtgaccctgcaaatggctatgatgaattcgctgccagtcttcctgctgatgagtgtcgatatgctgtttatgattttgattttgtcactgaagaga

SEQ ID NO: 130735 - DNA, 336 bp, Glycine max
gaaattttaataaaccgcgatcacaggttgccgcaccttaaaaccggaaacaaaagcaatcgttacttgatttcaagaatttctcaatttcttcctacttctttgtgtacgatttcttaagggaaagaaaatcactctctgtgctggtcacagacttcgtgaatcattttcttttccactcctagtttatttactgaacactctcctatttgatataggacttcgtgtcagatttaaactttttctgtttctttctcagttctctgtttaatttcaagttcaagctggtgaaattttggattagtgctcccactctcctatctggtataggacttc

SEQ ID NO: 130736 - DNA, 342 bp, Glycine max
cgctctgtttctgtctctgtgtttgcggctgaggattccgaacgagcgaccttcttcgtttctcgcaaagtttaagtcatcatgggtaaggaaaagactcacatcaacattgtcgtcattggacatgtcgactctgggaagtcaactaccactggtcatttgatctacaagcttggaggtattgacaagcgtgtgattgagaggttcgagaaggaggctgctgagatgaacaagaggtcattcaagtatgcctgggtgcttgacaagctcaaggctgagcgcgaaagaggaattaccattgatattgctttgtggaagtttgaaaccaccaagtactactgc

SEQ ID NO: 130737 - DNA, 343 bp, Glycine max
gaaatgagaaatgaaggcttgcttccaaatgtattttgttatactgctctaattggtggtcactgtaagttaggtcagatggacatagtggggagtatcttactggaaatgtcttcaaacggcatacgacctaataaaattacctacactattatgattgatgggtattgtaaattgggaaatatgaaagaagctagggagcttttaaatgagatgataagaaatggaatagctccagataccgtcacttataatgcattgcaaaaaggatattgcaaggaaagggagctaacagttactttacaaagtgatcataaatctaacataggactacccttagaag

SEQ ID NO: 130738 - DNA, 345 bp, Glycine max
gaaacacgcacatcatcgtacatacataccactgttcagaaccatgaattgggttcgcggagagtctctcggcagtggcagtttcgccaccgtcaacatagccataccgacaaacacttccactcagtttctttcttccaccgccgtcaaatcctcccatgttcaaacctcgtctatgctgaaaaacgagaaggaaatactcgatcgccttggagcttccccttatgtcattaactgtttcggcgacgatcacacggtagaaaacggagaagagtattacaacattttcctcgaatacgccgcaggtggttctctcgctgatcaggtaaaaaaacacggagggag

SEQ ID NO: 130739 - DNA, 199 bp, Glycine max
ccggcttattttacgacggcagatacaaattctggactaaacacgagaaaatttctaccgcattacattaggtggcatctgtataccttgttgatctacattctcccatcttttctcactgctgaaattaaatataagcggaatttgagtaatattcatatttccggcttattttacgacggcagatacaaattctgga

SEQ ID NO: 130740 - DNA, 343 bp, Glycine max
gaaattttcacaagaggaatttcttacagcttggtcaactcaggtgcgtcccgcaacgactctgttggctgatgggtgcccatatttgtatgctatggtgcatgatagttcagtgtctacaataccaggtgattttgtcattggtgttaagttgacaaccataaacaatatgtgtgcatatgggctcaatcctggtatttcaggttctcgtcttttgggcaccattcctcagtccatttcacagcaaactgtttggaatcaaatggcaacagtgagaacaccattgaattttgattctagcaagcagagcttttgtcaattttctattgaccttctcggtgga

SEQ ID NO: 130741 - DNA, 340 bp, Glycine max
gttggtgcaatgcttttggttgatacttatcataccaatcctgaaaatgcagttcgtagtatttttgttgcgcctttcagaggcggaaggcccattcgggtggttacatttccgaataccattgtgcagattgaaccagacatgaattcaaggtttcagcttttgagtaccactaccaatggtgattttgttcaagggaaagatctcgcaatggttaaagttaatgtagcatgtgctgctgttggcttgacatcaagttacactccaactccattgttggaatctggtttgcaaaaagacagagggttaattgtggagtattttggaaggatgtcttacg

SEQ ID NO: 130742 - DNA, 338 bp, Glycine max
gtattaaaggaatgattaaaatggtggccacagttggtattcctgagaatacaggtatagcattggcctgtgctatgaatagttcttttagggggcgcgccagttctgatatttacaccatctgctctcaagactgtgaattatggaatcctgcttgcacaaaagcaatgactatgtcatttaatccaaacccgtgttctgatgcatggagtttggaatttctgaagcgtaccggatttcattgtgatatcatttgtgtcactggatggactgccaccccaatgcaggatgttcaggttacaattgattggtttatttcctctcaggaatgtgttccc

SEQ ID NO: 130743 - DNA, 333 bp, Glycine max
  unsure (1)..(333): unsure at all n locations
caaaaatctgactcagaaagtgcgagtccaaattgttacatctgaaaagagttactggcatgtgtatgatcctgacaagtttcagatgtttgacaacagtgaaataggtctttattctaatcccactttggaagatatcccacattcagcttgggaccttttttgctgggacagtgagaaactttgccaaataattttactgcagaattgctctcttgcaaattggatactgttactggccaatattatcctgagtgggctccaattaattgtcgagttcatcgacaaccaattcacatcacntgaggcaattatgtcagaaagcaagatgtc

SEQ ID NO: 130744 - DNA, 345 bp, Glycine max
tatcgagccgaatcggctcgagcaacgactctgttggctgatggatgcccatatttgtatactatggtgcatgatagttcacgtgtcacaataccaggtgattttgtcattggtgttaagttgacaaccataaacaatatgtgtgcatatgggctcaatcctggtatttcaggttctcgtcttttgggcaccattcctcagtccatttcacagcaaactgtttggaatcaaatggcaacagtgagaacaccattgaattttgattctagcaagcagagcttttgtcaattttctattgaccttctcggtggaggaattttagtggacaaaactggagattggatc

SEQ ID NO: 130745 - DNA, 368 bp, Glycine max
cgtagtaactcggaatcggctcgaaacggggaccgctccgtatagaatatttaacctggggaacacgtcgccggttactgttcccactcttgtcagtatattggagcgccatttgaaggtgaaggccaagaggaatattgtggacatgcctggaaacggcgacgttccgtttactcacgcgaatattagttcggcccggagagaactcgggtacaagcccaccaccgatttgcaaaccgggttgaagaagttcgtcaagtggtacctttcctattacggctacaatcacggcaaacctgtaaattaattttattttattttgtttccccccccttttttttttctttttcggaaaggggtttttcttt

SEQ ID NO: 130746 - DNA, 344 bp, Glycine max
aagaaagaaagaaaaaaaaaaaacagcgccctagatttgctcttctttgcttcggaagaaagagaaaaacaaataacaatggcgttcgcttctttcctcggcagagttctcttcgcttccgtcttcatactctctgcttaccaagaatttaacgaatttggagttgatgggggacctgcagcaaaagcactcagacctaagtttgatgcctttacacatcgagtgcattctcaagttggctttcaacttcctgagattgatctgaaatttttaattgctggggctattgctctgaagggccttggaggggttcttttcatatttggcagctcttttggagcttt

SEQ ID NO: 130747 - DNA, 340 bp, Glycine max
aaattttgtgaggttcattatgaagaaaagggacaagcttagttgtcaagttggaatcaacccatactccatggaatggactggtttggccaatagattactgagtaagggcaatgatattctgtgttgcgattatgctagttttgatggtttgattaccaagcaagttatgagcaagatggcagaaatgataaacagtctttgtggtggtgatgaaaaattgatgcgtgaaaggacgcacctgctgttggcttgttgttcaaggatggcaatttgtaagaaagatgtttggagagttgaatgtggaatcccttctggatttccgctcacagttatttgc

SEQ ID NO: 130748 - DNA, 337 bp, Glycine max
  unsure (1)..(337): unsure at all n locations
tanaccgcgatcacaggttgccgcaccttaaaaccggaaacaaaagcaatcgttacttgatttcaagaatttctcaatttcttcctacttctttgtgtacgatttcttaagggaaagaaaatcactctctgtgctggtcacagacttcgtgaatcattttcttttccactcctagtttatttgctgaacactctcctatttgatataggacttcgtgtcagatttaaactttttctgtgtctttctcagttctctgtttaatttcaagttcaagctggtgaaattttggattagtgctcccactctcctatctggtataggacttcgtgggtagact

SEQ ID NO: 130749 - DNA, 339 bp, Glycine max
  unsure (1)..(339): unsure at all n locations
ganaaatttaattttattggcacaattgggactccagcttttcatcgacaaattgctgcacacttggagaaaatgccattatggcaaaaagcaattttgtgtggaatgggacattgtttgtctcggaaaagcaaagaaacatggtattctgggatgaaggaaaaatttgtacaaatgatgaagagcatctatgaaacagaagttacagattggccagtaccactgaaaatcatttctggaaccattcttgcaacaattttgggaacaaccttctggaaactcttttcctttcttagagatgctggtaatgggggagtttttgttggcaatgttgcttca

SEQ ID NO: 130750 - DNA, 338 bp, Glycine max
ctaatgttttatgggtggctcctgaggacaaggcgagtttatggtcacaacttcattatgtttcgtgcaataatctggaaatgcaagaagcttatcttgtcaatctcgtaaatgtgttacgagaattgtatttgcacagtccagaggaagctcgccaattgagaaggaaagctctctctcgtattgaatggctgcaaaaagctgatgtgcctaccatagcacagattgaagagttccattcgatgcagaggatgatgaatgctcctgattcaaatgataatattgatctactgttgagcattgatttgttgggtttacaaggagcaggtaaagctttt

SEQ ID NO: 130751 - DNA, 341 bp, Glycine max
gtgttgaagaggcttacaacaagctaatagttgaacttgagaaaagtgttcctacattggttggcattgaatgtcccaaggatgagaaacttcctcgtcgcaaaatttttgacaaacctaagacgcgctgcttcactattctccctatggagtttaatcttgtggtccgtcaaaagtttttaaattttgtgaggttcattatgaagaaaagggacaagcttagttgtcaagttggaatcaacccatactccatggaatggactggtttggccaatagattactgagtaagggcaatgatattctgtgttgcgattatgctagttttgatggtttgattacc

SEQ ID NO: 130752 - DNA, 339 bp, Glycine max
  unsure (1)..(339): unsure at all n locations
gtgagttgcaggcagtgtcatctctcctttgacgacaagatgagcatcccaattccccatcggcagttattcatagacggagactggaaagtccccgtcctcaagaatcggattcccatcatcaacccttccacccaacacatcattcaggatatcccagcagctactaaggaagacgttgatctcgctgtcgctgccgccaaagctgccctctcccgcaacaagggcgccgattgggcctccgcttccggctccgttcgggctcgctacctccgcgccatcgctgccaagatcaccgagaaaaagcctgaactagcanaactcgaagctattgactgt

SEQ ID NO: 130753 - DNA, 342 bp, Glycine max
attttaataaaccgcgatcacaggttgccgcaccttaaaaccggaaacaaaagcaatcgttacttgatttcaagaatttctcaatttcttcctacttctttgtgtacgatttcttaagggaaagaaaatcactctctgtgctggtcacagacttcgtgaatcattttcttttccactcctagtttatttgctgaacactctcctatttgatataggacttcgtgtcagatttaaactttttctgtttctttctcagttctctgtttaatttcaagttcaagctggtgaaattttggattagtgctcccactctcctatctggtataggacttcgtgggtaga

SEQ ID NO: 130754 - DNA, 334 bp, Glycine max
gattgaagccagcgagtgagtgagcgagccaggtagggttttcggtgttcccctctttgtgttcgttcgcgacgatggggtccatccccgatccaggcgagttgagcgagttgactcagccgagcttcgacgagttccagcgccaaacctctctcatgaccagctgcaccctcctctggaaggagctctccgaccacttctcctccctcgagcaagacctcaaccacaaatccgaagccctcaagcgcaagattcacaccctcgacaactccacctcggactccctccgcctcctcgaccaccgcgaaacctctctcgacgccactctccagat

SEQ ID NO: 130755 - DNA, 224 bp, Glycine max
aattcatagggttcatggtatcaccttatcgtacaaacaagcatggagaggcaaggagcgtatcatggctgcaatgcgtggatcttttgaagaaggttatcgcttgcttccacaatactgtgaacaggtgcacgcactaatccaggcagtattcatctgttatggaatcagctgatgtgttcacgctctcactcttcagatcaaatgctgtaatgttcgcatgt

SEQ ID NO: 130756 - DNA, 341 bp, Glycine max
  unsure (1)..(341): unsure at all n locations
aacaaaatctagcagaagcaaattcacttctaagatacacatattaagttcaccagagagagagagagacattaatcaagatgggtacgtggttcacaaatgcaaggccgtatctgctgttagtggcggttcaatttggctcagcaggcatgttcatatttgcgatggatgctataaagaagggtatgagccattacgtgttcatcgtctatcgtaatgccatcgcctctgtatctcttgctcccttcgcattcgttttagaaaggcaaattaggcccaagatgacttnccgggtattntcagagattatggcactgagctttatccgaataatactggac

SEQ ID NO: 130757 - DNA, 335 bp, Glycine max
ctaatggttcagcaatgtttatagtggatgtcaatgagccttcatctgatccctttccctgggacatcaataaagactccttgtcagtggatatcaaacatgtttttacaggagagggtatttcaaatggatatgggttcagataccctggatcaaagcccggttccctctttgtatttcaaaatggtgtccttgcctttgtttggaaggacactagggctgtcttgactttgcagagacttgacttgcaagatcttttgaagaaaggagaaagaataccttctctgcctcccatcaacaatttttcatatttgatcaagtcctactcaaatgtg

SEQ ID NO: 130758 - DNA, 342 bp, Glycine max
cttctccctacattaaatgtacagtctctttcttcatagcatttggaaatttggctgatgacaccatcaattttgaggcttttccccacaagctggtgcagtttggagagattcaggaaaaagttgtgttgaaattttcacaagaggaatttcttacagcttggtcaactcaggtgcgtcccgcaacgactctgttggctgatgggtgcccatatttgtatgctatggtgcatgatagttcagtgtctacaataccaggtgattttgtcattggtgttaagttgacaaccataaacaatatgtgtgcatatgggctcaatcctggtatttcaggttctcgtc

SEQ ID NO: 130759 - DNA, 342 bp, Glycine max
gtggttcattgatgtcttggttgttctcttctgtattggtggtattgagggcttgcaaacatgcttggttgctcttttgtccaggtggttcaagcatgctggagagtcatacatcaaagtacctttcttaggagccatttcatacctgactttggctgtttctccattctgtataacatttgccgttctctgggcagtttatcgcaacgtatcctttgcctggattggtcaagatatacttggaattgcactgataatcacagttctacagattgtacatgtaccaaatctcaagggtggtacagtacttctcggctgtgcccttcattacgacatcttttg

SEQ ID NO: 130760 - DNA, 104 bp, Glycine max
gagagaaattaggcatgaccctcttgttgagtatgctctgcctatctgaaaatttccacacctcttttaatggtcgtaatgatgtgtgaagtgtgtgttatttt

SEQ ID NO: 130761 - DNA, 339 bp, Glycine max
  unsure (1)..(339): unsure at all n locations
tgatataattggtgctggttcacattcttcagaagattttcctgaaaaggaagatcaagaaaaacccaaaaagattgatgccagattgagacaaagaatagatcctcaatacaatgaggttcaggctcagatggaaacaaatttgtttaaattgtctcttgatgatgttgaaactcctaaaggttccatgttggatcttaaaatttctcaatctaaaattgcacttcccaagaacacagttggaggaaccattctgcgtagtgatttattggcacattttttgacagagggcaattttagagcaagtgtngatttgcagcgcactcantcgtatagagg

SEQ ID NO: 130762 - DNA, 339 bp, Glycine max
ggaaaaagttgtgttgaaattttcctgaatctctccaaactgcaccagcttgtggggaaaagcctcaaaattgatggtgtcatcagcgaaatttgaggcttttccccacaagctggtgcagtttggagagattcaggaaaaagttgtgttgaaattttcacaagaggaatttcttacagcttggtcaactcaggtgcgtcccgcaacgactctgttggctgatgtgtgcccatatttgtatgctatggtgcatgatagttcagtgtctacaataccaggtgattttgtcattggtgttaagttgacaaccataaacaatatgtgtgcatatgggctcaa

SEQ ID NO: 130763 - DNA, 341 bp, Glycine max
tttggaaggatgtcttacgttgctcataacgttaatcagccccaagagaaagatttgttagagggaaatttttcctttgatattaaatctcgctctagattggaaaaagtttcctctacaaaagcacaatttgttagtggaaaaaccttcaaatatgatataattggtgctggttcacattcttcaggagattttcctgaaaaggaagatcaagaaaaacccaaaaagattgataccagattgagacaaagaatagatcctcaatacaatgaggttcaggctcagatggaaacaaatttgtttaaattgtctcttgatgatgttgaaactcctaaaggttc

SEQ ID NO: 130764 - DNA, 338 bp, Glycine max
agacctcaatacaatgaggttcaggctcagatggaaacaaatttgtttaaattgtctcttgatgatgttgaaactcctaaaggttctatgttggatcttaaaatttctcaatctaaaattgcacttcccaagatcactacgcagaatggttcctccaactgtgttcttgggaagtgatctattggcaaattttttgacagagggcaattttagagcaagtgttgatttgcagcgcactcatcgtattaaaggaatgattaaaatggtggccacagttggtattcctgagaatacaggtatagcattggcctgtgctatgaatagttcttttagggggc

SEQ ID NO: 130765 - DNA, 335 bp, Glycine max
atcgagccgaatcggctcgagccacagttggtattcctgagaatacaggtatagcattggactgtgctatgaatagttctattagggggcgcgccagttctgatatttacaccatctgctctcaagactgtgaattatggaatcctgcttgcacaaaagcaatgactatgtcatttaatccaaacccgtgttctgatgcatggagtttggaatttctgaagcgtaccggatttcattgtgatatcatttgtgtcactggatggactgccaccccaatgcaggatgttcaggttacaattgattggtttatttcctctcaggaatgtgttccagga

SEQ ID NO: 130766 - DNA, 340 bp, Glycine max
  unsure (1)..(340): unsure at all n locations
agcatttgganatttggctgatgacaccatcaattttgaggcttttccccacaagctggtgcagtttggagagattcaggaaaaagttgtgttgaaattttcacaagaggaatttcttacagcttggtcaactcaggtgcgtcccgcaacgactctgttggctgatgggtgcccatatttgtatgctatggtgcatgatagttcagtgtctacaataccaggtgattttgtcattggtgttaagttgacaaccataaacaatatgtgtgcatatgggctcaatcctggtatttcaggttctcgtcttttggggcacattcctcagtccatttcacagcaa

SEQ ID NO: 130767 - DNA, 340 bp, Glycine max
cattcttcaggagattttcctgaaaaggaagatcaagaaaaacccaaaaagattgataccagattgagacaaagaatagatcctcaatacaatgaggttcaggctcagatggaaacaaatttgtttaaattgtctcttgatgatgttgaaactcctaaaggttctatgttggatcttaaaatttctcaatctaaaattgcacttcccaagaacacagttggaggaaccattctgcgtagtgatctattggcaaattttttgacagagggcaattttagagcaagtgttgatttgcagcgcactcatcgtattaaaggaatgattaaaatggtggccacag

SEQ ID NO: 130768 - DNA, 304 bp, Glycine max
gttaagagaatgcctctttctatagggggaggagctggtgcaaagaatgctattctcatgaatatgccaaatgctgttctttcaatgtggggatatttggtgggagatctcgcctttgaagtttctaagatgacttctccctacattaaatgtacagtctctttcttcatagcatttggaaatttggctgatgacaccatcaattttgaggcttttccccacaagctggtgcagtttggagagattcagggaaacagtgtagtgaaattttcacaagaggcatttcttacagcttggtcaactc

SEQ ID NO: 130769 - DNA, 334 bp, Glycine max
ctggtaatgggggagtttttgttggcaatgttgcttcagcattcacaacttcaagtgtgcttgaggcccaaagtagaaagccaaacagatatgaagtttcccagtacagatatcgcaatgtgccaataaagcgcagagcatgggttgaaggccagatgtctttcgatcagtctgtagtagcaattatgtctaaatgcaaagccagcatgagaatgggaaacactgatgctcagattttgatggttccagggcgcagattcatagctcatggacattttttcaaaatctgactcagaagtgcgagtccaaatgtacatctgaaagagtactggca

SEQ ID NO: 130770 - DNA, 349 bp, Glycine max
cggaaaagttgtgttgaaattttcctgaatctctccaaactggaccaggttgtggggaaaagcctcaaaattgatggtgtcatcaactaaatttgaggcttttccccacaagctggtgcagtttggagagattcaggaaaaagttgtgttgaaattttcacaagaggaatttcttacagcttggtcaactcaggtgcgtcccgcaacgactctgtaggctgatggctgcccatatttgtatgctatggtgcatgatagttcagtgtctacaataccaggtgattttgtcattggtgttaagttgacaaccataaacaatatgtgtgcatatgggctcaatcctggtatt

SEQ ID NO: 130771 - DNA, 332 bp, Glycine max
  unsure (1)..(332): unsure at all n locations
tatcgagccgattcggctcgagcaagaacgccaccttgttgcaacagtgggcaagtttagtgtgatatgggattttcagcaggtgaagaacagtgctcatgaatgttacaggaatcaagaagggctgaagagctgttactgttacaagataatattgaaggatgagtccattgtagaatcgcgatttatgcacgacaaatttgctgttagtgactctccagaagctccgttggtggtggcaactcctatgaaagtcagctcaatcagcatgtctggaaagcgacatggttaaactctgtntacanttttctttaaaggttcaaattctagtg

SEQ ID NO: 130772 - DNA, 337 bp, Glycine max
taagatttgaaattttaataaaccgcgatcacaggttgccgcaccttaaaaccggaaacaaaagcaatcgttacttgatttcaagaatttctcaatttcttcctacttctttgtgtacgatttcttaagggaaagaaaatcactctctgtgctggtcacagacttcgtgaatcattttcttttccactcctagtttatttgctgaacactctcctatttgatataggacttcgtgtcagatttaaactttttctgtttctttctcagttctctgtttaatttcaagttcaagctggtgaaattttggattagtgctcccactctcctatctggtata

SEQ ID NO: 130773 - DNA, 325 bp, Glycine max
aagaatttgatgaatcagacaagtcacatcataatgaagctccagaatatagacgtctaattgcaattcatgctgggaagcctaaaggtggattagcagaatgcctcaaagtggatcctgataaagtgagacgtctaagtttaagtgagcaacagcttgaaaaggctgccataaatcatggacaacaaattgtcaggtttactcagcggaatatactaagggtgtatccaaaaggtactcgcattgactcatcagattataacccattaattgggtggatgcatggagctcagatggttgcatttaacatgcaggggtatgggag

SEQ ID NO: 130774 - DNA, 332 bp, Glycine max
ctcctggagttctgcaaaaggagaaggaccacgttgagggttttgctcctgaggttgcttgggtgacaaagtctggggaatccgaattagaaattcctatagctattcgtcctactagtgaaacagtgatgtatccctactactctaagtggataaggggacatcgtgacttgcctttgaaacttaatcagtggtgcaatgttgtaagatgggagttcagcaaccccactccattcatcaggagtcgcgagtttctttggcaagaagggcacactgcttttgcaacaaaggatgaagcagatgcagaggttcttgagattctggaattatat

SEQ ID NO: 130775 - DNA, 333 bp, Glycine max
agggtaggcattgacccctttgcacaaaggaaaagaggggtggtgttgtgttaaaaaaatattgaacttggttggttctaagtagaaacaaaaattgtcattttcccatttctgcatttttggtttgggagaggagaaaccaagaattaagaaatgggttgctccgtaagagtttgttgtgtcttatttttggtgttgttggtggcatgtgttagaggggaggacccttatagattctacacttggaatgtcacatatggagacatttatccacttggtgttaaacaacagggtattttgataaactggcaatttccagggccacacattgag

SEQ ID NO: 130776 - DNA, 340 bp, Glycine max
caacagcacaaagcgggttactgtctgttcaagctaccatctctctctctctttcttagtgcctccttgccagaagttaaaatggcccaagaaactttcctattcacatctgaatcagtgaacgaggggcaccctgacaagctctgtgaccagatctccgatgctgtgctcgatgcatgcttggagcaggaccctgacagcaaggttgcctgtgaaacctgcaccaagaccaacatggtgatggttttcggagagatcacaaccaaggccaacgtggactatgagaagattgtgcgtgacacatgcaggaacattggttttgtctctgatgatgttggtc

SEQ ID NO: 130777 - DNA, 337 bp, Glycine max
atttggtgaaaatgacagaaggcacgtgacttgggtggggacacgctgtactattagcgctgcgacgctgccattgattgggccatgtatgtaatgtaacattacgctagatggaaagggcggatgaccatccttgtatgtaactcgcggatgggatgaaaagtgtcgaagtcaaagctttgcttgagcgccaaaatttgtaatataaggatttatgtattcttgataagctggggttaaagaacatgtcaaaatggagtaactgaagcaacccctaaaagattcacttctcgttttcctttttaaggaacatttgtgggttacagcaaaatatgta

SEQ ID NO: 130778 - DNA, 330 bp, Glycine max
cgtaaatgtgttacgagaattgtatttgcacagtccagaggaagctcgccaattgagaaggaaagctctctctcgtattgaatggctgcaaaaagctgatgtgcctaccatagcacagattgaagagttccattcgatgcagaggatgatgaatgctcctgattcaaatgataatattgatctactgttgagcattgatttgttgggtttacaaggagcaggtaaagcttttccaaacaagattgtttttgatgataagcttgtgttggctaacacacaagaattctttgatggaaatttccagtggattcttggttaccaatttttgtg

SEQ ID NO: 130779 - DNA, 331 bp, Glycine max
  unsure (1)..(331): unsure at all n locations
gaaaaacacttgggcgatggtgcaaatgtttgcttcgttaattttctctggagacaacaggctcactgagaaaacaatttttacttgcagagatttggacatcttggttgtctattatacaatagcaactcaatttagaaaatttctaccgcattacattaggtggcatctgtataccttggtgatctacattctcccatcttttctcactgctgaaattaaatataagcgggatttgagtaatattcatatttccggctctatttacgacggcagatacaaattctggacttaacacgagnataatcctgctttgacagaagaggaaaga

SEQ ID NO: 130780 - DNA, 345 bp, Glycine max
gaacaacaagcaactgaggttcctgccccagaatcaaccaccgaagcaccaaaggaagaaaccaccgaagcaccaacaacagaaacagtagaaacaacaactacagaagaagccaagccagaggagcctaaagaagttgcagttgagaccgaggaggtggtgacaaaggagacagaggaagagaagccagcagcagaagagaaatcagaggagaaaactgaagaagtgaaagaagaagcagaagagcctaaagaaactactgaaacagaaacagaatcagcaccagcagcaaccacagaggaagagaacaaaccagctgagacagtggaagccccagtagaggtt

SEQ ID NO: 130781 - DNA, 336 bp, Glycine max
gtataccttgttgatctacattctcccatcttttctcactgctgaaattaaatataagcggaatttgagtaatattcatatttccggcttattttacgacggcagatacaaattctggactaaacacgagaaaaatcttgctttgacagaagaggaaaagatggaagtgattagaaatagaggcattcctgctgatgttcttgcaaagcgagctcatgaatttgaaaaacatgttgctcatgaaagcctcaaggatcaaattcctgctgttgacaagttgtattctactaaggttaataagtttgcacaaattatgaaccttagacaaagtgttgt

SEQ ID NO: 130782 - DNA, 346 bp, Glycine max
tctcgagccgattcggctcgaggacgagttggccagatcattgcccaacttctttcagagcgtcttattccatttgtcgcactagacgtaagaagtgatagagtggcagttgggcgtgctctggatctccctgtgtactttggagatgctggtagtagagaggtcctacataaggttggggctgaaagggcatgtgctgcagcaataactcttgatacacctggtgcaaattatagaacagtttgggctttgagcaagtacttcccaaatgtgaagacttttgttcgtgcccatgatgttgatcatggatttacattagaaaggctgagctactgctgttgtccgg

SEQ ID NO: 130783 - DNA, 339 bp, Glycine max
cttgtgacaaaattcctagtgtcttgactacaactgatgagagattggtaggcacagaacatgagggatatgatccttttcttggtggaattcagaaatatgccactcccatgatgcccctagatgaagaaattctttctaaggttgcacaagatatggttgaggaatggtttgattgtgttgatgaggaggattcctttgaggaagtttctttaagtgcagcacttaatggtgttgaaggtttggactatatggatagaattcctcttgccacatctgagggtattcctcatgtgctttcacgtcaaaatggcgataaatgctataggagatttgtct

SEQ ID NO: 130784 - DNA, 268 bp, Glycine max
tgctgcatctttatggagcttatgaataaaaaagctctggttccgggcaaagaccatgtgcatcagatgcgcttattgacagagcttcttggcagccgaactgaggctgaccttgggttagtgaaaaatgaagatgcaagaagatatatcagacaactgtctcaatatgctcgccaacctttagctgcagtctgccccatgttcatccggcagccattgatctggttgataaatggtgacagtgatccacaaaagattccagttgaga

SEQ ID NO: 130785 - DNA, 342 bp, Glycine max
atcaccattactgatggtattgacaaaactagtgcaacgttgcaatttagaaagttagcagattgtgatgttctcaagagacactttaagcagatgtctaatgttttatgggtggctcctgaggacaaggcgagtttatggtcacaacttcattatgtttcgtgcaataatctggaaatgcaagaagcttatcttgtcaatctcgtaaatgtgttacgagaattgtatttgcacagtccagaggaagctcgccaattgagaaggaaagctctctctcgtattgaatggctgcaaaaagctgatgtgcctaccatagcacagattgaagagttccattcgatg

SEQ ID NO: 130786 - DNA, 334 bp, Glycine max
  unsure (1)..(334): unsure at all n locations
gcttcatataaccaaactcttcactctgcttctgcttctttggaaagcacttaaccaaactctctgtttcagcttcctctgttttttgggtacgaacagagtttctctgtttttgacgatggccataaaggcgattgaactgttgaaagggtgcggatcacaagaagaaataatggaagtgcttgctgcggtggcttcggatttgggggatgtgatcgatgatgtgaacaccttgcaggtgattccactgaatggtgcaatgaccaatgaggtttttcagataaactggccaaccanaaatggtggtgagatcagaaaggtctggttcgtttat

SEQ ID NO: 130787 - DNA, 340 bp, Glycine max
tgaaacaagagcagagagatgtcagcagaattttcaggatcagctgaccttactttggaggggaaccaattaagtggaccagaatttccagttttcaattttagttgcatttctatagccacaaacaatttctctgaagaaaataagcttgggcaagggggttttggccctgtctacaagggaaagcttccaggcggagaacaaatagctgttaagaggctttcaagacggtctggccaaggcttagaggagttcaagaatgaaatgatgctgatagccaaactacaacacagacatttagttagattaatgggttgctctattcaaggggaagagaagt

SEQ ID NO: 130788 - DNA, 343 bp, Glycine max
  unsure (1)..(343): unsure at all n locations
tgaattgttgtaactttttgattcctaaattctctaaaattcgaaattctaatttcgttaggggacagagattgtttgtgtgtgagtgagtatggctggacaaggcgagggtcctgctatcggaatcgatttgggaacgacgtactcttgcgtcggcgtgtggcaacacgatcgtgttgaaatcatagccaacgatcagggtaacagaactaccccatcctacgtggctttcaccgacacagaacggttgatcggcgatgcggcgaagaaccaggtcgctatgaacccaaccaacaccgtttttgatgctaagcgtntgattggaaggcgtttttccgatgca

SEQ ID NO: 130789 - DNA, 336 bp, Glycine max
  unsure (1)..(336): unsure at all n locations
tggaaatgtttcctttgatattaaatctcgctctagattggaaaaagtttcctctacaaaagcacaatttgttagtggaaaaaccttcaaatatgatataattggtgctggttcacattcttcaggagattttcctgaaaaggaagatcaagaaaaacccanaaagattgataccagattgagacaaagaatagatcctcaatacaatgaggttcaggctcagatggaaacaaatttgtttaaattgtctcttgatgatgttgaaactcctaaaggttctatgttggatcttaaatgtctcaatctaaattgcacttccaagaacacattggagga

SEQ ID NO: 130790 - DNA, 345 bp, Glycine max
  unsure (1)..(345): unsure at all n locations
agagaatgcctctttctatagggggaggagctggtgcaaagaatgctattctcatgaatatgccaaatgctgttctttcaatgtggagatatgttgttggagatctcgtctttgaagtttctaagatgacttctccctacattaaatgtacagtctctttcttcatagcatttggaaatttggctgatgacaccatcaattttgaggcttttccccacaagctggtgcagtttggagagattcaggacaaagttgtgttgaaattttcacaagaggaatttcttacagcttggtcaactcatgtgcgntccgcaacgactctgttggctgatgggtgcccatatt

SEQ ID NO: 130791 - DNA, 343 bp, Glycine max
atgcaccatagcatacaaatatgggcacccatcagccaacagagtctacaataccaggtgattttgtcattggtgttaagttgacaaccataaacaatatgtgtgcatatgggctcaatcctggtatttcaggttctcgtcttttgggcaccattcctcagtccatttcacagcaaactgtttggcatcaaatggcaacagtgagaacaccattgaattttgattctagcaagcagagcttttgtcaattttctattgaccttctcggtggaggaattttagtggacaaaactggagattggatcacacttatacaaaattctccaattagtaacttgttgag

SEQ ID NO: 130792 - DNA, 342 bp, Glycine max
agagtgaagagcgaagagaatggctcccaagggtttaatctttttggctgtgttatgcttctcagcactgtcactgagtcgttgtcttgcggaggataatggacttgttatgaacttctacaaggaatcatgccctcaggctgaagacatcatcaaagaacaagtcaagcttctctacaagcgccacaagaacactgctttctcctggctcagaaacatcttccatgactgtgctgttcagagttgtgatgcttcactgttgctggactccacaagaaggagcttgtctgagaaggaaacagatagaagctttgggttgacgaattcaggtacattgagacc

SEQ ID NO: 130793 - DNA, 333 bp, Glycine max
gatgacttctccctacattaaatgtacagtctctttcttcatagcatttggaaatttggctgatgacaccatccattttagaggcttttccccacaagctggtgcagtttggagagattcaggaaaaagttgtgttgaaattttcacaagaggaatttcttacagcttggtcaactcaggtgcgtcccgcaacgactctgttggctgatgggtgcccatatttgtatgctatggtgcatgatagttcagtgtctacaataccaggtgatgttgtcattggtgttaagttgacaaccataaacaatatgtgtgcatatgggctcaatcctggta

SEQ ID NO: 130794 - DNA, 340 bp, Glycine max
  unsure (1)..(340): unsure at all n locations
tagagtggtggtttaccaccactgcttggattagttctgcagttaacaatcgctcctcagacatcaacaaaaggattcgcacagcacttgggaaaggtaagaaaattgtttttcttactagagttgatccttttccagtagctttattggctgttctttttggcgttaagaatgaaattctgagttctaacgccactaaccctatgctgacgcgacttcttgagaactgtaagagtctcaaatatctggttgatgagtgtccttttgcatttgtgaactagtatgtaatattttattcacttaaatanagcgcattactatgtgcaatgagtgtgtttaa

SEQ ID NO: 130795 - DNA, 343 bp, Glycine max
aaatcttgtcaaggcacacatctgatgagttctaccttggggagagagatggtggtgactattggacttctagatgctggttccactagaggccttcaagaggtttggaaagaagcttcaagagattgaacaaaagcttatacagaagaacaaggacgagacgttgagaaaccgcagtgggccggctaaaatgccttacactttgctctatccttctagtgaggagggattgactttcagaggaattcccaacagtatctccatctaggggctctatggttgttgcagtactttccctggttttcaaataaagtgaatagaaggactatgattccttcatcta

SEQ ID NO: 130796 - DNA, 337 bp, Glycine max
  unsure (1)..(337): unsure at all n locations
tgtttgattgtgttgatgaggaggattctttgaggaagtttctttaagtgcagcacttaatggtgttgagggtttggactatatgtgaaggaattcctcttgccacatctgagggttttcctcatgtgctttcacgcaaaaatggcgataaaggcataaggagatttgtctctggggatggtgaagagatgacattgattccangaaccagtgttgaagaggctacaacaagctaatatttgaacttgagataagtgttcctacattggtttgcattgaatgttccaaggatgagaaactcctcgtcgncaaattgtgacaaactaagagcgctgct

SEQ ID NO: 130797 - DNA, 343 bp, Glycine max
gtttgttaacaacagcaacagtacagagcattttgatgcatgtaagtggacaaaatcagaaccacattcctgggaattaatcttcccaatagaggtatgtggtcctaataatggttttgaaatgtggagttctgagtgggcaaatcaaacttcatggcatttgagtttccttattgacaatcccaaacagtctacagtttttgatattctcttgggaatctctcaagattttgaaattgctggtaatactcttatgccagctttttctgttccacaggctactgccagatcttctgacaatgcggaatcctctgcatgatctggaattcgtgttttctttcgc

SEQ ID NO: 130798 - DNA, 339 bp, Glycine max
  unsure (1)..(339): unsure at all n locations
ctcatgtgctttcacgcaaaaatggcgaaaaaggcaaaaggagatttgtctctggggatggtgaagagatgacattgattacaggacacaatgtaggaacacttttctcaagttcaactattagcttgttgtaagcctcttcaacactggttcctggaatcaatgtcccaaggatgagaaacttcctcgtcgcaaaattgttgacaaacctaagacgcgctgcttcactattctccctatggagtttaatcttgtggtccgtcaaaagtttgtaaattttgtgaggttcattatgaaganatgggacaagcttagttgtcaagttggaatcaagccata

SEQ ID NO: 130799 - DNA, 334 bp, Glycine max
ctttgaagtttctaagatgacttctccctacattaaatgtacagtctctttcttcatagcatttggaaatgtggctgatgacaccatcaattgtgaggctttgccccacaagctggtgcagtttggagagattcaggaaaaagttgtgttgaaattttcacaagaggaatttcttacagcttggtcaactcaggtgcgtcccgcaacgactctgttggctgatgggtgcccatatttgtatgctatggtgcatgatagttcagtgtctacaataccaggtgattttgtcattggtgttaagttgacaaccataaacaatatgtgtgcatatggg

SEQ ID NO: 130800 - DNA, 325 bp, Glycine max
ccgcattacattatgtggcatctgtataccttgttgatcaacatcctcccatctttcctcactgctgaaatcaattataggcggaatttgagtaatatacagattcccggcttattttacgacggcatatacaatttctggactaaacacgagaaaaatcttgctttgacagaagaggaaacgatggaagtgattagaaatagaggcattcctgctgatgttcttgcaaagcgagctcatgaatttgaaaaacatgttgctcatgaaagcctcagggatcaagttctggctgttgacaagttgtattctactagggttaataagt

SEQ ID NO: 130801 - DNA, 336 bp, Glycine max
tcagaaaaatgggttcttcttcttctatgtggacggtgtgtgtgattttggcatcactggcctctgcagcactctgtgccaacccacgcaagccagtggatgtacaatttggccgaaactacgtgcccacatgggcctttgatcacatcaaatatttcaatggtggttctgacattcagcttcatcttgacaagtacactggtactggcttccagtccaaagggtcttacttgtttggtcacttcagcatgtacataaagatggttcctggagattctgctggcacagtcactgctttctatttatcttcccaaaacgcggagcatgatgagatag

SEQ ID NO: 130802 - DNA, 333 bp, Glycine max
  unsure (1)..(333): unsure at all n locations
ganaaacccaaaaagattgataccagattgagacaaagaatagatcctcaatacaatgaggttcaggctcagatggaaacaaatttgtttaaattgtctcttgatgatgttgaaactcctaaaggttctatgttggatcttaaaatttctcaatctaaaattgcacttcccaagaacacagttggaggaaccattctgcgtagtgatctattggcaaattttttgacagagggcaattttagagcaagtgttgatttgcagcgcactcatcgtattaaaggaatgattancatggtggccacagttggtattcctgagaatacaggtatagca

SEQ ID NO: 130803 - DNA, 329 bp, Glycine max
gaattctccagagagaagaagaaacttaatcgatcatcacttcacttcactaatacatcatggcagacgagacccagaacaagtatgagagctctgaggttgaggtccaggatcgtggtgtttttgactttctcggtaagaaaaaggatgaagaagacaagcctcatcctcaggaggaggtcatcgccaccgagtttcaaaaagtcactgtctcagaccaaggagagaacaagcacagcctcttagaaaagcttcaccgatctgacagcagctctagctcttcaagtgaggaggaaggagaagatggagagaaaaggaagaagaagaag

SEQ ID NO: 130804 - DNA, 337 bp, Glycine max
cttctctctcacatttcattacttctagcaagctattacatctcttccttcctctgtctacatttcatttcattcaaaacaatcatggcatctcttcattccacatgttcaacaaaaaccgtcctttatgcattggtattgttggcctcttccatggcaacttctaccaggattttgacataacatggggagatggtcgtgccaagatactcaacaacggcgatcttcttactctttcccttgacaaagcctccggatcagggtttcagtccaagaacgagtatctctttggcaagattgatatgcaactcaagcttgtacccggaaattctgcagg

SEQ ID NO: 130805 - DNA, 335 bp, Glycine max
gcttttgagtaccactaccaatggtgattttgttcaagggaaagatctcgcaatggttaaagttaatgtagcatgtgctgctgttggcttgacatcaagttacactccaactccattgttggaatctggtttgcaaaaagacagagggttaattgtggagtattttggaaggatgtcttacgttgctcataacgttaatcagccccaagagaaagatttgttagagggaaatttttcctttgatattaaatctcgctctagattggaaaaagtttcctctacaaaagcacaatttgttagtggaaaaaccttcaaatatgatataattggtgctg

SEQ ID NO: 130806 - DNA, 340 bp, Glycine max
gtggaagcaacatggttcgtggggtgactagtcatggtctcaaggctgttgctcgtggatgcccttctttgaaggctctttctctatggaatgttgctaccgttggtgatgagggcctaattgagattgctaatggatgccaccagctagagaagcttgacctttgcacgtgccctgcaattactgataaggctttggttgcaattgcaaagaactgccagaatctgactgagttgtcatttgaatcttgccctaacattggtaatgaaggtctacgagctattgggaagttatgctccaatctgaagtccatatccatcaaggactgcactggtgttag

SEQ ID NO: 130807 - DNA, 334 bp, Glycine max
cttgctttgacagaagaggaaaagatggaagtgattagaaatagaggcattcctgctgatgttcttgcaaagcgagctcatgaatttgaacaacatgttgctcatgaaagcctcaaggatcaaattcctgctgttgacaagttgtattctactaaggttaataagtttgcaaaaattatgaaccttagacaaagtgttgttggtgatcttaaacttcttactgatgggaagttgtatgagggtaagcatattcctgtatctaatattagtgcaggggaaaatcatgtagttcacatacccttaatggcacaggaggacattctgtcttctagtg

SEQ ID NO: 130808 - DNA, 340 bp, Glycine max
  unsure (1)..(340): unsure at all n locations
ctcgagtcgtaaacttcttactgatgggaagttgnatgaggagaagcatattcctgcagtaatattagatacaggaatatgcttaccctcatacaacttcctagatctaatattagtgcaggggaaaatcatgtagttcaaatacccttaatggcacaggaggatattctgtcttctagtgctagtgatttcagaactgcaatggtgagtaaaaatagcaaacctcaagctactgcaatgcatgtgggagctatagaaattatcattgatagtttcgcaagtcctgattgcaacatagttggtgcaatgcttttgggtgatacttatcataccaatctga

SEQ ID NO: 130809 - DNA, 333 bp, Glycine max
taataacttagaccctgcaaataagataggtgaaggaggatttgggcctgtatacaagggtgtgttgtcagatggtcatgtgattgctgttaagcagctctcctccaaatcgaaacaagggaaccgtgaatttgtcaatgaaattggaatgatatctgctttgcagcatccaaatctggtgaagctttatggctgttgcattgaaggaaaccagttgctactaatatatgaatacatggagaacaacagtcttgctcatgcactttttggtgaacaagagcagaagctgcacttggattggctcacaagaatgaagatctgtgtggggatagc

SEQ ID NO: 130810 - DNA, 338 bp, Glycine max
caatattctccaattagtaacttgttgagagttgctgcttggaagataggttgtgcaatggtcaagattgtgatgtctgggaatgcagcagtcataaggagtgatggggcctcattggtacaagtgatgttaacaaacagcaagagtatagagcattttgatgcatgtaagtggacaaaatcagaaccacattcctgggaattaatcttcccaatagaggtatgtggtcctaataatggttctgaaatgtggagttctgagtgggcaaatcaaacttcatggcattctagttgccttattgacaatctcaaacagtctacagtttgtgatatgctctt

SEQ ID NO: 130811 - DNA, 339 bp, Glycine max
gtcctgactgcaacatagttggtgcaatgcttttcgttgatactgagcatagcaatcctgaaaaggcagtgcgtagtatgtcttgttgcagcatactggacctgttatgaccttcgagtaggtatcattccgtcaagctgtgggcagcttgaaccagacatgcatgcaaggtttcagctgttgaggaccactaccaatggtgattttgttcaagggaaagatctcgcaatggttaaagttaatgtagcatgtgctgctgttggcttgacatcaaggtacactccaactccattgttggaatctggtgtcgcaaaagacagagggttaattgtggagtat

SEQ ID NO: 130812 - DNA, 140 bp, Glycine max
ctcttcttctcttgcggctagggctctagcgcagcttcttctagctttaaggaagatgggtacggacaagggtcccatctagaatggtggtcatgggccatgtccgactctgggaaatccactaccactggtcacctgat

SEQ ID NO: 130813 - DNA, 333 bp, Glycine max
tggatgagttggtggggttctatggttggtgtaaagacacgggaattgcgaggtcttctgagtaccctgatgtgcagagaatcactgataagcttttggggactcttgagggtttcttgaaggagatgagttgtaggccaaagagtcctgagaggaagttagaagtgaaggtaactgtgaatgaatcacaaccagaggcagatatgaataaggtgaaggctcttccagcacctgagactgagagttttacacctccaccacccatgtcggttgcacagcctaataaggcagctcccaattctcaaaagcagacgagtgatttggtggatctaa

SEQ ID NO: 130814 - DNA, 333 bp, Glycine max
  unsure (1)..(333): unsure at all n locations
ganattttaataaaccgcgatcacaggttgccgcaccttaaaaccggaaacaaaagcaatcgttacttgatttcaagaatttctcaatttcttcctacttctttgtgtacgatttcttaagggaaagaaaatcactctctgtgctggtcacagacttcgtgaatcattttcttttccactcctagtttatttgctgaacactctcctatttgatataggacttcgtgtcagatttaaactttttctgtttctttctcagttctctgtttaatttcaagttcaagctggtgaaattttggattagtgctcccactctcctatctggtataggac

SEQ ID NO: 130815 - DNA, 328 bp, Glycine max
ctcagggcacttcccgaagtgttaagagaatgcctctttctatagggggaggagctggtgcaaagaatgctattctcatgaatatgccaaatgctgttctttcaatgtggagatattttgttggagatctcgtctttgaagtttctaagatgacttctccctacattaaatgtacagtctctttcttcatagcatttggaaatttggctgatgacaccatcaattttgaggcttttccccacaagctggtgcagtttggagagattcaggaaaaagttgtgttgatattttcacaagaggaatttcttacagcttggtcaactcaggt

SEQ ID NO: 130816 - DNA, 336 bp, Glycine max
gtagtggacgtggtggtttagaacgacagcttctgaaggtaattgtctttatcctgtaagtcaagtaccttcagaagctgtcgttgtaaatgtcacatgtggtagtggacgtggtggtttacccaccactgcttggattagttctgcagttaacaatcgcttgtcagatatcaacaaaaggattcgcacagcacttgggaaaggtaagaaaattgtttttcttactagagttgatcctgttccagtagctttactggctgttctgtttggtgttaagaatgaaattctgagttctaacgccactaatcctatgctgacgcgacttcttgaaaactg

SEQ ID NO: 130817 - DNA, 339 bp, Glycine max
caggaatgtgttcccaggacctattgtgttttaaatccacaaaatccttttgtgttaaataggtggatgggaaaactgactttccctcagggcacttcccgaagtgttaagagaatgcctctttctatagggggaggagctggtgcaacgaatgctattctcatgaatatgccaaatgctgttctttcaatgtggagatattttgttggagatctcgtctttgaagtttctaagatgacttctccctacattaaatgtacagtctctttcttcatagcatttggaaatttggctgatgacaccatcaattttgaggcttttccccacaagctggtgcag

SEQ ID NO: 130818 - DNA, 342 bp, Glycine max
  unsure (1)..(342): unsure at all n locations
ggttgtttaatggtcaagattgtgatgtctgggaatgcagcagtcaaaaggagtgattgggcctcattggtacaagtgtttttaacaaacagcaacagtacagagcattttgatgcatgtaagtggacaaaatcagaaccacattcctgggaattaatcttcccaatagaggtatgtggtcctaataatggttttgacatgtggagttctgagtgggcaaatcaaacttcatggcatntgagtttccttattgacaatcccaaacagtctacagtttttgatattctcttgggaatctctcaagatnttgaaattgctggtaatactcttatgccagctttt

SEQ ID NO: 130819 - DNA, 335 bp, Glycine max
ctcgagccgaatcggctcgagggatggcagggcaaagatagtgccggtggccaccaatcagatcttacaggaaacaaagcctgcaggagggtgatcagggggatgggatctatgtgaaagtgatcatggatggagcaccttacctcagaaagattgacttgaaagtctataggggctatcctgaactactcaaagctttagaaaccatgttcaagttgaccataggtgagtactctgaaagagagggttacaagggttctgaatatgcacctacatatgaagacaaacatggtgactggatgctagttggagatgttccatgggacatgtttatg

SEQ ID NO: 130820 - DNA, 331 bp, Glycine max
gaaacacagtgagttaagtgttcacaaaaaacaatggatgatattgtaggatacggttttcgtccaacagatgaagagcttgtgaagttctacctcaaacacaagttgctcgatgatgatccctgtgtccacttcatcctcgacgttgacctttgtgaagtggaaccttgggacttaccattgttattagcagattcagctgtgcgattcaatggccgtgaatggttcttcttcagtcctgtcgattacaagtattcaaatagtaaaagggttaacaggacaaccaagtgtggcttctggaaacccactggaaaagaccgtggcattagga

SEQ ID NO: 130821 - DNA, 331 bp, Glycine max
  unsure (1)..(331): unsure at all n locations
cgcgaagtgttaagagaatgcctctttctatagggggaggagctggtgcaaagaatgctattctcatgaatatgccaaatgctgttctgtcaatgtggagatattttgttggagatctcgtctttgaagtttctaagatgacttctccctacattaaatgtacagtctctttcttcatagcatttggaaatttggctgatgacaccatcaattttgaggcttttccccacaagctggtgcagtttggagagattcaggaaaaagttgtgttgaaattttcacaagaggaatttcttacagcttggtcaactcaggtgcgtcncgcaacgac

SEQ ID NO: 130822 - DNA, 330 bp, Glycine max
tgaaattttaataaaccgcgatcacaggttgccgcaccttaaaaccggaaacaaaagcaatcgttacttgatttcaagaatttctcaatttcttcctacttctttgtgtacgatttcttaagggaaagaaaatcactctctgtgctggtcacagacttcgtgaatcattttcttttccactcctagtttatttgctgaacactctcctatttgatataggacttcgtgtcagatttaaactttttctgtttctttctcagttctctgtttaatttcaagttcaagctggtgacattttggattagtgctcccactctcctatctggtata

SEQ ID NO: 130823 - DNA, 332 bp, Glycine max
gttgctcatgaaagcctcaaggatcaaattcctgctgttgacaagttgtattctactaaggtaataagtttcaaaattatgaaccttagacaaagtgttgttggtgatcttaaacttcttactgatgggaagttgtatgagggtaagcatattcctgtatctaatattagtgcaggggaaaatcatgtagttcaaatacccttaatggcacaggaggaaattctgtcttctagtgcaagtgatttcagaactgcaatggtgagtacaaatagcaaacctcaagctactgctatgcatgtgggagctatagacatcatcattgatagtgtcgc

SEQ ID NO: 130824 - DNA, 322 bp, Glycine max
tgggactgttatgaggtcacttggtcaaaacccaactgaggcagaactgcaggatatgataaacgaggttgatgctgatggcaacggaaccatcgatgtcccagagtacctcaacctgatggctcccaagatgaaagacaccgactcagaggaggagcttaaggaggctttccgtgtatttgacaaggatcagaatggtttcatctctgcagctgagctccgccatgtcatgacaaatcttggggagaagctgacggacgacgaggtggatgagatgatccgtgaggccgatgttgacggtgatggacagatcaactatgag

SEQ ID NO: 130825 - DNA, 334 bp, Glycine max
aaaggatcagcactcagaggagaaaaagaacgaggtcaacgacaccagtaacgccgtcgttacgagttactggggaatctacaagcccaaggttcgtagggaggacgggacagagtggccgtggaactgcttcatgccatgggatagttaccactctgatgtgtcaatagacgtgaccaagcatcatacaccaaagtcattaacggacaaggttgcttttagggctgtcaagtttctaagggttctctctgatatctacttcaaggaacggtatgggtgccatgctatgatgctggaaacaatagcagcagttccaggaatggtgggagggatg

SEQ ID NO: 130826 - DNA, 270 bp, Glycine max
ggttaaagttaatgtagcatgtgctgctgttggcttgacatcaagttacactccaactccattgttggaatctggttttgcaaaacgacagagggttaatggtggagtattttggaaggatgtcttacgttgctcataacgttaatcagccccaagagaaagatttgttagagggaaatttttcctttgatattaaatctcgctctagattggaaaaagtttcctcgtacaaagcacaatttgttagtgtgaaacacttcaaatatgata

SEQ ID NO: 130827 - DNA, 316 bp, Glycine max
actttaagcagatgtctaatgttttgtgggtggctcctgaagacaaggcgagtttatggtcacaacttcattatgtttcgtgtaataatctggaaatgcaagaagcttatcttgtcaatctcgtaaatgtgttacgagatctgtatttgcacagtccagaggaagctcgccaattgagaaggaaagctctctctcgtattgaatggctgcaaaaagctgatgtgcctaccatagcacagattgaagagttccattcgatgcagaggatgatgaatgctcctgattcaaatgataatattgatctactgttgagcat

SEQ ID NO: 130828 - DNA, 324 bp, Glycine max
gattaaaatggtggccacagttggtattcctgagaatacaggtatagcattggcctgtgctatgaatagttcttttagggggcgcgccagttctgatatttacaccatctgctctcaagactgtgaattatggaatcctgcttgcacaaaagcaatgactatgtcatttaatccaaacccgtgttctgatgcatggagtttggaatttctgaagcgtaccggatttcattgtgatatcatttgtgtcactggatggactgccaccccaatgcaggatgttcaggttacaattgattggtttatttcctctcaggaatgtgttcc

SEQ ID NO: 130829 - DNA, 332 bp, Glycine max
ttgatttgttgggtttacaaggagcaggtaaagcttttccaaacaagattgtttttgatgataagcttgtgttggctaacacacaagaattctttgatggaaattttccagtggattcttggttaccaatttttgtgaattgtctctatcctgtaagtcaattaccttcagaagctgtcgttgtaaatgttacatgtggtagtggacgtggtggtttacccaccactgcttggattagttctgcagttaacaatcgctcctcagacatcaacaaaaggattcgcacagcacttgggaaaggtaagaaaattgtttttcttactagagttgat

SEQ ID NO: 130830 - DNA, 333 bp, Glycine max
ggctgaccttgggttagtgcaaaatgaagatgcaagaagatatatcagacaacttcctcaatatcctcgccaacctttagctgcagtcttcccccatgttcatccggcagccattgatcttgttgataaaatgttgacagttgatcccaccaaaagaattacagttgaagaagcactagcccatccataccttgaaaaactgcatgatgtagctgatgaaccaatctgcatggagccattttcatttgattttgagcaacaacaattggatgaagagcaaatgaaagagatgatctacagggaagcattagcactcaatcctgagtatgctta

SEQ ID NO: 130831 - DNA, 331 bp, Glycine max
tgaccggaaagacgtgttcttctatcaagccgatgaccagcattatataccacgggctctcctgattgacttggagccaagagtcattaatggaattcaaaacagtgactaccgaaacctctacaatcatgagaacatctttgtctcggatcatggaggtggtgcaggaaacaattgggccagtggatacgatcagggacaacacgttgaagaagaaataatggacatgattgacagagaagcagatggcagtgacagtcttgagggttttgttctatgtcattcaattgcaggaggaacaggctcaggtatgggctcatacttgttggag

SEQ ID NO: 130832 - DNA, 271 bp, Glycine max
ggagtcctcaaagatctatgcttacctcttcctctgcatgatctttctctcttccgccactcccattctcggttgtggctactgtggcaaaccctccaaaaagcacaagcctggtaaaacaccaaagacacccaaaacaccgttgttaagccaccagtcaccatccctcccattaatgttcctcccgttgttcttccaccaatagtgaagcccccaggtattctccctccaattccattattaacccaccaaccacacagggaagggaggg

SEQ ID NO: 130833 - DNA, 266 bp, Glycine max
gtacgaatcatgtcaaaaatattcagaagtatgtttgaagctgtgccacgagatgaacatcaaggcaattgatctatggtctgcactccagaaaggggtaactggagagatgtttgtttcacggatggaattcatcttacttctgaggggagcaatatagtggcaaaagagatcttgaaggtcatcaaagaagcagagtgggaaccttgcctgcactggaattcaatgccactgaatatggagaagattcacttatgatcctgttg

SEQ ID NO: 130834 - DNA, 265 bp, Glycine max
gaatagatcaggttatgaagagtgttctcatcactttggaccgagaattgatgactatcttccaattctaagcccctttttctcaaagcaaagaaagaaagccttggaggttcgcagagaacaggttgagttctagttccaattatagaacaaagaagaagagcaattcaaaaccctgggtcagatcacaccgccacaacgttttcctacctagacacactttttgacctcaaagttgaagggaagaaatcgcaccctctgatgc

SEQ ID NO: 130835 - DNA, 257 bp, Glycine max
gcacggagctccgttcagctgaacccttcctccgtcgtggcaagcaccacggcaaagacatcatcaagaagtctcagaggaagagcagcaggtacctcttctccttccccggcttaattgctcccatcgccggtggcaagatcggtgacctcaaggacttgggcaccaaaaaccccgttctctacctcgatttcccccagggtcaaatgaagttattcgggaccatttatatcaaagaacagatactgactctacag

SEQ ID NO: 130836 - DNA, 261 bp, Glycine max
gtcaccgagcgtgtccttgcagcatgctacaaggctttgaatgatcaccatgtccttcttgagggtaccctattgaagccaaacatggtcaccctggatcccaatctgctaaggtttcccctcaggtggttgcgagcacactgtcagagcccttcagagaaccgtgcctgctgcagttcctgctgtcgttttcttgtctggtggccagagtgaggaggaggcatccgtcaacctcaacgccattaaccagtcaatgggaag

SEQ ID NO: 130837 - DNA, 266 bp, Glycine max
ggccgttcaatcagggttcccttcatgacgagcaggaagaatcagtttattagggcttttgatggtttcaaagtccttggtcttccctacaagaaggtgaagataagcgccaattcaccatgtactttttccttccagaaacaaaagatgggctgttagctttggctgagaagttggcttctgaatctgggtctttgaacgcaagccttcctaataacaaattggcagtaggagacttcaggatctcaagatcaaaatttctttgg

SEQ ID NO: 130838 - DNA, 268 bp, Glycine max
  unsure (1)..(268): unsure at all n locations
cgcgtttcggagagagacgtcgcaatnggggaggaggcctgcaaggtgttatcggcagataaaaaacaagccataccccaaatcacgcttttgccgtggtgttcctgatcctaagatcagaatttatgatgttggtatgagaagaaaggtgttgatgagtttcccttctgtgttcatctggttagctgggaaaaagaaaatgtttcaagtgaagcattggaagctgctagaattgcatgaacaaatatatggcgaaattgctggaaaa

SEQ ID NO: 130839 - DNA, 167 bp, Glycine max
gttctaaaggatggtactactttggaggaaaataaagtagctgaaaatagttttattgtaattatgttatcaaagactaagagttcatctggtgaaggatctactacttcaactgctccttcagttaaggcaagtgcaactcctacttcaacctctgtgtctgctgc

SEQ ID NO: 130840 - DNA, 263 bp, Glycine max
tttcccctcttcttcccctctctcgtgttatccgctttagttttctcgggaaaatcatggtgaaaggtccaggtctctactctgacatcggcaagagagctcgcgatcttctgttcaaggattatcagaatgaccacaagttcaccatcaccacttacacttccactggagtggaaatcacttcaactggagtcaggaaaggtgaaatatatctggccgagtcagcactaaggtgaagaacaagaacatcacaactgatgtca

SEQ ID NO: 130841 - DNA, 260 bp, Glycine max
gttaatttgcttcccttttttcacactcactctcactaaatggcttcctctgttgctttagttttgggtctatgtctagcactcaacatggttctgccgacacgtgcagctacccacacagtgggagacacctcaggttgggcactcggtgctgattacagtacatgggccagtggcttgaaattgacagtcggagatagtcttgttttcaattatggggctggtcacacagtggacgaagtgaaagaagtgattacaag

SEQ ID NO: 130842 - DNA, 262 bp, Glycine max
gctttttagtggtgacggacagtccaaaaagggccggagaggactaaatgagatgcctcttcctccaagcatttaccaaagattgacatcaagttctactctaatgaatttggcgcaggctttagcttaccataaatgtgttacgagatatgccgctgcaggagctgcaacgacccaggagcagcggactattcaaaatctatctgacacccttcgaaccattcttcggttgtaggtcaatggcatggttgtgtaactagta

SEQ ID NO: 130843 - DNA, 262 bp, Glycine max
atctggatcgaggttctcgtaattggctacatagagttccagaggaacgcagagctggacccagaaaagaggctgtacccaggtggcagttacttcgacccactgggcctggcctcagatccagagaagaaagccacccttcaattggcggagatcaagcacgcccgtctcgcatggtgggcttctgggctttgcagtccaagctgccgccactggcaagggcccgctcaacaactgggccacccacttgaggacccatcca

SEQ ID NO: 130844 - DNA, 261 bp, Glycine max
cgggaaccagatttccaccattctgagtaacttcacacaccatataacagaaaatgaggtggggcttgtggcaacttgcggcaatcaatccctcgccgtcttgctcacggtaataataaagctgttgcttgtcgatattttgcctcagatgctgagctgaaaaagacagtcctttatgacttccatgttgctaatggagggaagatggtgccatttgctggatggagcagccaatccaatacaaggatcaattatggactc

SEQ ID NO: 130845 - DNA, 240 bp, Glycine max
tagcttcagctgatagtgtggcgcactcttacatggatgacgtcatcaccctcgttttgggaagcttcattctcgccctcgccgtcgaacgctacaacgttcaccggagattggccttgaatgtaacactgctgttttgtggcgacccggttaatccagcgctgttactgctggggctgtgcgcgacgatattcttcgtgagcatgtggctgcacaacgtggcgacggcggtgatgatga

SEQ ID NO: 130846 - DNA, 259 bp, Glycine max
gttgatgttgacaattctcccagctttgttgccatcatgtcagtcctattgagtatgggcatgttttgctgattccgcgcattttcgagtgtttgcctcaaaggattgaccgtgagagcttcctccttgcacttcacatggcagttgaagctgataatccatattttcgattgggttacaacagtttgggcgtttgcaaccattaaccatcttccaccttccaggcttattatttggctctgccttcccaattgagaag

SEQ ID NO: 130847 - DNA, 191 bp, Glycine max
ctcaacctgaatgcaatgaacaagttggaggtgttgaagccatggactctctcattctcattcgggcgagcactgcaacaaagcacactcaagacatggggtggaaagaaggagaatgtcgccaaagctcaagaggcatttctggcaagatgcaaggccattctgatgctactcggggaatatgttgtgga

SEQ ID NO: 130848 - DNA, 262 bp, Glycine max
agatatggctgaggaatgtttgaagtatgcaatggatttgagtggcttgttactgctatattcttctttaggagatgctgaaggaatatcaaaacttgcaatccttgccaaggagcaagggaaaaacaatgttgcattcctttgctatttatgttgggtaaattagaagactgccttcaactgttggtagaaagcaatcgaattccagaggcagctttaatggctcgatcttatctcccaagtaaggtccagagatagtggc

SEQ ID NO: 130849 - DNA, 261 bp, Glycine max
ctcgagccgctcgagccgcacaaggcagaaagcaagctcatcctagagttttaaaaatggcagcagcctcatccatggctctctcttcccatccttggctggcaaggccgtgaagctgggcccatcagccccgaagtcgggagggtcagcatgaggaagaccgtcaccaagcaggcctcctccggaagcccatggtacggcccagaccgcgtcaagtacttgggcccatctctggcgagcccccgtcctacctcactggcg

SEQ ID NO: 130850 - DNA, 254 bp, Glycine max
atatgctcatctacttactgttggaggggcctaaatgatgctccacataaaactcagatatcatgccgcactgaccgtgctggacttattgattctgctccttggataagaattccatatccatttcaatggggagcaccttcatttgatgcaggtgaagcctttgccatgatgatggcatcttttgttgctcttgtggagtccagtggagctttcattgctgcatataggtatgcaagtgcaagccattgcca

SEQ ID NO: 130851 - DNA, 251 bp, Glycine max
catttgtgcccatctctggtttcgagggtgacaacatgattgagaggtccaccaaccttgactggtacaagggaccaactctcctgaggctcttgaccaaatcaatgagcccaagaggccctcagacaagccactcaggctccattgcaggatgtctacaaattggtggtattggtaccgtgccagtgggacgtgttgagactggtgtcgtgaagcccgtatggtggtgacttttggtccactgggctgac

SEQ ID NO: 130852 - DNA, 260 bp, Glycine max
caaaaggagcatcgagtaggtttcctactcccttctcatcgttggcaagatgagtgccatgaaattttgccgtgaatgcaataacattctgtaccctaaggaagacagagaccagaaagttcttctcttcgcttgccgcaactggaccatcaggaggttgctgataacttctgtgtgtataggaatgagatacatcactctgttggagagcgcactcaggtgttgcaggatgtcgctgcagatccacgcttcctcgaacc

SEQ ID NO: 130853 - DNA, 257 bp, Glycine max
gtcgcgctgatgggcaaaactgtggcaactttctcactgatcggccatctaccaaggttcatgctgccccgggtggtggatcttcttgcattacctctttggtggtcctccagggaactgattcatactaccatgtgatgtatcatgtgtaaaatggatagtgtgcattgtgtttagaccagtggactttgtttcttgttcaattgaatctcttgacaatttggtgtggcttgatggccaactaagctgattcatag

SEQ ID NO: 130854 - DNA, 255 bp, Glycine max
gcctcacagaggttaggaagaatggcacctgtgctggttgaggccagatggtaagacacaagtaaccgtcgagtactacaatgacaatggtgccatggttccagttcgtgtccacactgtcctaatttccacccaacatgatgagactgtgagcaatgatcaaattgctgcggaccttaaagagcatgttatcaagcctgtcattcctgagaagtaccttgatgagaagaccatcttccacctaacccttctggc

SEQ ID NO: 130855 - DNA, 252 bp, Glycine max
aatcgttcaaaaccaatctatctatctatttggtataagcatggagctttgttggcaaaaatccatccatggctcttaaagaagcttggaggattttgtgtgagagggttctcacccttcacactccacctcctacagtttgcttatgctttagccattggtttctctaatcaatcaccacaaaagggtatacatggaggaacataattctctgagtgggctgaagcagagaagctatggccacatcttagc

SEQ ID NO: 130856 - DNA, 250 bp, Glycine max
attttctagggttttattcattttccgatggttctgcaatgttgagtaccgttgctttgtcggtgggctcgcttgggcactgacgaccatgccctcgagagagccttctctcagtacggcgaaatcgttgaaacgaagattatcaacgatcgtgagacggcagatccaggggttttggatttgtgaccttcgcctcggagcagtccatgaaagatgcgatcggagcgatgaatggtcagaacttggacgg

SEQ ID NO: 130857 - DNA, 245 bp, Glycine max
gagcaacatcaagctttatgtcaggagggtgttataatggacaattgtgaggagctcattcctgagtaccttggatttgtgaaggtgttgttgactccgatgacttgccgctcaacatctctcgtgagatgctgcaacaaaacaagatctcgaggtgacaggaagaatctctgaagaagtcattgagatgttcaatgaaattgcggagaactagaagttacaaaagttctagatgcttttcgaga

SEQ ID NO: 130858 - DNA, 258 bp, Glycine max
cgttcatggatccagtaagcgtgtggggtaacacgcccttggcgacggtggatcccgagatccatgacctcatcgagaaggagaagcgccgtcaatgccgcggaatcgagctcatcgcctccgagaacttcacctccttcgccgtcatcgaggccctcggaacggtctccacgaacaaatactccgagggcatgccgggcaaccgctactacggcggcaatgaataatcgaccagatcgaaaactctgccgctcagcg

SEQ ID NO: 130859 - DNA, 261 bp, Glycine max
gttcgcaacacgatcactattctgcgacgatggtggcacattcgagttcttggtggaagggcactcgtcgcgatctcgccctacacttctccgccatcggcatcgccgtcgctatcggcgtctccgtcctcggcgccgcctgggggatctacatcaccggaagcagcttgatcggcgctgcaatcagggctcttcgaatcacttccaaaaatctcattagtgtaatcttctgtgaagctgttgctataatggtgttattgt

SEQ ID NO: 130860 - DNA, 255 bp, Glycine max
  unsure (1)..(255): unsure at all n locations
gagaatgtctagctgtgggtgtggaagcagctgcaactgtggcagcaactgcggttgcaacaagtactcttttgacttgagttacgttgagaagacaaccacagagactctagttttgggtgctgnggcgtgaaggcccaattggagggtgctgaaatgggtgttgcatctgagaacggtggctgcaactgtggatcaagctgcacctgtgacccatgcaactgcagtaaggtcaagatgtataccttgaagcag

SEQ ID NO: 130861 - DNA, 250 bp, Glycine max
gcaagttcgacgctgagattgtttactctctctaaaacgccatcacgtgactcacatgtgcggcgcgccggtggtgctcaacatgttaaccaacgcgaactccccgttggagaaaccggttcagatcctcaccgccggaggccgcctcctgcggcggtgctctcagaacagaggctttggggtttgtcgtgagtcacgggtatggtttgactgagaccggagattggtggtgtcatgcgctggaaggggg

SEQ ID NO: 130862 - DNA, 248 bp, Glycine max
gcacggccatgctaagtgtcactttgttgggatgatatttcactgccaagaagcttgaagatattgtgccctcttcccacaactgtgatgttccccatgtgaatcgtactgattaccagttgattgacattgctgaggatggattcttagcttgcttactgaaaatgggaacaccaaggatgacctgaagttacctacagatgagagtctgcttactcagataaaggatgggtttgctgaggtaagga

SEQ ID NO: 130863 - DNA, 150 bp, Glycine max
gcgaggagctgaccgtggaggagcgtaactcctctccgtcgcctacaagatcgtgatcggcgctcgccgcgcctcctggcgcatcatctcctcaatcgagcagaaggaggagatccgggcaagaggaccacgtcgcgtcatccgcgacta

SEQ ID NO: 130864 - DNA, 251 bp, Glycine max
ggagtcgcgagtgctgtcacgcgccggaacttgttctccctccctcacctccgcaagctgccgccggaggtcggcgccggcccctccctcgtcgccgtgaaggccgtgggctccgtggcggaggcgggaacctgatttgggggaggcaactgcgcccagagctctgctcgccggcgctgaagaaggaggccgtcctcctccggccatgcctcgccgcgcctcctcgccggccgagggagtgattccgccgg

SEQ ID NO: 130865 - DNA, 259 bp, Glycine max
tgaaccctaattatacagaatttaaattcccacagattaaagcacatccatggcacaagatcttccataagcgcatgcctccagaggctgttgatttggtatcaagactactacaatactccctacttgcggtgcacagctttagatgccttgacgcatcctttctttgacgaacttcgtgatccaaattctcgcttgccaaatggccgattccttccaccactatttaatttcaaatcgcataactgaaaggtgtcca

SEQ ID NO: 130866 - DNA, 272 bp, Glycine max
tccaaagggtggcttttttgagcttgtgatttgcccccactacttctttgagattactgtgttttatgggatcttcttcatttctcagacattatattcattcgctttcgctgtaggcactactatgtacttggtgggtaggagttactcaactaggaaatggtatctttctaagtttgaagatttccctaagcatgttaaggctgtcatcccatttgtcttctaaatgttgtaatgaacatctaattctacttgagttgtaagtgtgctgc

SEQ ID NO: 130867 - DNA, 266 bp, Glycine max
aaacaaagctagcatagcatttttcttttacaaagcaagacacccttttccttttcattccatcatctctttagctttgtccaaagaccatgtctgtggtggctgataattctgcaaacaatggaagccaccaagtggttttaaatgtaaacggtgatgcccccaagaagtgtgatgactcagccaaccaagactgtgtacctcttctgcagaagttggtagcagaggtggtggggacgtacttcttgatatttgcagggtgtgct

SEQ ID NO: 130868 - DNA, 174 bp, Glycine max
ctgcgactgcctccaggggttccaggtctgccactcgctcggcggcggaacgggctccgggatggggacgcttcttatttccaagatcagagaggagtatcctgacaggatgatgcttactttctccgtttttaccttcgcccaagtggtctccgacacttgttgttacgagcc

SEQ ID NO: 130869 - DNA, 261 bp, Glycine max
ggaacacaggaaaagcctccaaaaccaacccaccgttggcgcgatggctttcccctccaaaggcgatgacgagcaggttctggtgcagcgtaaatcgaatgcgagagttttgacactaaacaggactaaacagttgaatgccctctctttttatatggtttctcggctacttgaaattttttctgaagatgagaaagattctgatattaaattggttgtcgtgaagggaaatggaagggctttttgtgctggtggtgatgt

SEQ ID NO: 130870 - DNA, 258 bp, Glycine max
atcgaagaagcacttgctcaccgtcgagaagaagcagattaaggccattctcgactccgccgacgcgcctttcttctgttccacgcgcttccctctccagatccgcgccggttccggatcctcgcatttgctcgaatcgggaaccgttttacctatcaagattcatagggatgaagagagtgggaagattttgaatttggtgtttgtttgggctgaggatggaatgaaattgaaggtggatgtgcctgttgttttcga

SEQ ID NO: 130871 - DNA, 267 bp, Glycine max
cgttgggccatgttgggtgttgcaggaatgttgcttcctgaggttttcaccaagtttggaatcatcaatgcccctcaatggtatgatgctgggaaatcagagtactttgcatcttcctcaaccctcttcgtgatcgagttcatcttgttccactacgtcgagatccgaagatggcaggacatcaagaaccctggctgtgtcaaccaagaccccatcttcaagcaatacagcttgcccccacatgagtgtggataccctggtagtgtg

SEQ ID NO: 130872 - DNA, 239 bp, Glycine max
gactaacaatacactgaccattgttgacagtggtattggcatgaccaaagctgatttggtgaacaacttgggtacaattgctagatctggtaccaaggaattcatggaagccttggctgctggtgctgatgttagtatgattggacagtttggtgtggggttctactctgcatatcttgttgctgagaaggtcattgttacaaccaaacacaatgatgatgaccagtatgtttgggaat

SEQ ID NO: 130873 - DNA, 270 bp, Glycine max
ctgcaacagcgtgtagtaccatcatgttcgtgagtagggccggaagctctgcttagagtgtcttgattctgctatcatggatactaatgaatgccaaccccttcatgctgatatacaaagattttatgaaagcctaaatatgaaactggaccaacaaattccacttctattggttgaaagacaagcactgaatgaagcaagagaaggagagaagaatggccactatcacatgccggaaaccagagggctctgcctctcagaggagctcag

SEQ ID NO: 130874 - DNA, 268 bp, Glycine max
atcaaaggagaggaaaagtactgtgccacttcgcttgaatccatgattgatttcagcacttccaagcttggaaaaaatgttgaggttgtgtccacggaagtagtggaggacaaggaaacgggattgcagaaatacaccgtagcaccgggagtgaacaagttatcaggggacaaggctgttgtgtgccacaagcagaactacccttatgctgttttttactgtcacaaaactgagaccacaagagcttactctgtgcctttggagggtg

SEQ ID NO: 130875 - DNA, 266 bp, Glycine max
gccttcattgagtttacagacgaagaaggtgcaagggctgctttgaacctgtctggaaccatgcttggatattacccgttgagagtgctaccttcaaaaactgctattgcccctgttaatccaacatttttgcccaggtctgaagatgaaagggagatgtgttcaagaacaatttattgcacaaatattgacaagaagcttactcaagccgatgtcaaacacttctttgaatctatttgtggagaggttcaacggttgaggcttct

SEQ ID NO: 130876 - DNA, 265 bp, Glycine max
gcaagaatggcacttcgttgcttggtgatgtccctttctgttctcttcactcttggtcttgcgagagaaagccatgccagagacgaagatttttggcatgctgtttggccaaacactcccattccaagttcattgcgagatcttctaaagcctggccctgcaagtgttgaaatcgatgatcaccctatgcaaattgaagaaacacagtacccgaaaaccttcttctataaagaagaccttcatccaggcaaaacaatgaaagtac

SEQ ID NO: 130877 - DNA, 261 bp, Glycine max
cacctttgttcactcttcttctcttgcggctagggttttagcgcacttcttctagatttaaggaagatgggtaaggaaaaggttcacatcagtattgtggtcattggccatgtcgactctgggaaatccactaccactggtcacctgatttacaagcttggaggcattgacaagcgtgttattgagaggtttgagaaggaagctgctgagatgaacaagaggtctttcaagtatgcctgggtgctggacaaacttaaggct

SEQ ID NO: 130878 - DNA, 254 bp, Glycine max
ctctctcttgcaaaacctaattttcatttcttccctcaaatttcaaaatgcgtgagatccttcacatccagggtggccaatgcggcaaccagatcggcgccaagttctgggaggtggtttgcgcggagcacgggatcgaccctaccggaaggtacggtggggactcggagttgcagctcgagaggatcaatgtctactacaacgaggccagttgcggtcggttcgtgccgcgcgcggttctcatggacctcgaa

SEQ ID NO: 130879 - DNA, 258 bp, Glycine max
ccgtggcttcaagaagagaatctcaatggaggcccaggagctgaagcgcgtgttccagatgttcgaccgcaacggcgacgggagaataacgaagaaggagctgaacgactcgctggagaacctgggcatcttcatctctgacaaggacctgagccaaatgatccagaggatcgacgtcaacggcgacggttgcgtggacatggacgagtttggggagctgtatcagaccataatggacgagcgcgacaatgaggagga

SEQ ID NO: 130880 - DNA, 263 bp, Glycine max
ctgtaataaacaccctcctccactatgcctcaaaatccaacgacacctttcacatgccccactcagacctcaaaaccatctccgacatgctccgaaagtgtccctcgccatgcaacttcctcgtcttcggcctcacccacgagaccctcctttggaaagccctcaaccacaacggaagaaccgtcttcatcgacgaaaaccggtactacgccgcgtatttcgaagaaaaacaccccgaaatcgatgcttacgacgtggcatac

SEQ ID NO: 130881 - DNA, 266 bp, Glycine max
tttctttcgtcttaatttgttctcttcagccatggcgatggtgcaagatgaacgatgcgttcagaaaagctactggattgaacatacgacggacttgtccgtagagtcaatgatgctcgattccaacgcctctgatctcgacaaggaggagagacccgaagttttgtccctactaccaccatatgaaggaaaatcagttgtagaacttggagcaggtattggaagattcacagttgaattggccaagaaagctggccagttacttg

SEQ ID NO: 130882 - DNA, 268 bp, Glycine max
gccaagtgaaagtgagaaaaaataaaaatcaaagagcataatgtcagggatcattcacaagattggggagacccttcatgtgggagggcacaagaaggaggaggagcataagggtgagcaccatgctggagaatacaaaggggagcaccatggtgaacacagtagtgagtacaaaggagagcatcatggtgaacacaaagctggagagtaccatggtgagcacaagccagagcacaaagaggggttcctagacaaagtcaaggacaag

SEQ ID NO: 130883 - DNA, 265 bp, Glycine max
ggtgatcctaaacttgtcggaaagtacagaagtcacaaacgcacccggttcgttatcagatcttgccttggtggtcttaagcaatcttttattgctagtggtagtgaggattctcaggtttacatatggcacagaagctcaggggatttagtagaggcattgcctggtcattctggagcagttaactgtgtgagctggaatccagctaacccacacatgttagcttccgccagtgatgaccggacaattcggatatggggcctaa

SEQ ID NO: 130884 - DNA, 265 bp, Glycine max
agcacagaagagggaaaacggcaccgccgccgtagaagaaaacaaccatggtgcacgtctccttttacaggaactatgggaagacattcaagaagccgcgtcgtccgtacgagaaggagcgtctcgacgcggagttgaagctggttggtgagtacgggcttcggtgcaagagagagctgtggagggtgcagtacgcgctcagccgcatccgcaacaacgcgcggaacctcctcaccctcgacgagaagaacccgcgccggatctt

SEQ ID NO: 130885 - DNA, 262 bp, Glycine max
cttgtttctttttcttctatagagacacacggagagagtctcagagcaataaacacccttcaatggctaccactaaagtttacattgtttactattctacgtacggacatgttgagaagttagctgaagagattaaaaagggagctggttccgttgaaggtgtggaagcaaagctatggcaggtacctgaaacactttctgaagaggtccttgggaagatgggtgcacctccaaagagtgatgtaccgattattacacccaa

SEQ ID NO: 130886 - DNA, 259 bp, Glycine max
gtttgttgttgtaactcgttcttcttcttttgttgttctgtgtttgtgtttgttttttctctcacctgaaaatgtcttgctgcggtggtaactgtggttgcggaagctcctgcaagtgcggcaacggctgcggaggctgcaagatgtacccagacttgagctacactgagtcaaccaccaccgagaccttggtcatgggagtggcacctgttaaggctcaatttgagggtgctgaaatgggtgtgcccgctgagaacga

SEQ ID NO: 130887 - DNA, 257 bp, Glycine max
caacattagcatcaaaaccagagtggttctagtaatccggtgctgctagaggatgggaactagtgaatggcatatcgagcgaagatctagcttcggcactgaatcccccttagcaagagaggcaggaaatgtgcctgaaactgggtcactctctattgttgtgcttggcgcttctggggatcttgctaagaagaagacatttcctgcacttttccatctataccggcagggattcttaccagcagatgaagttcaca

SEQ ID NO: 130888 - DNA, 256 bp, Glycine max
aacttctgctcttccaactcctagaacgcttttctctgcactcatgggcaaggtcaagatcggaatcaacggatttggaagaattggccgtttggttgccagagtcgctctgcaaagagacgatgttgaactcgttgccgttaacgaccctttcattaccaccgattacatgccatacatgtttaaatacgacattgttcacggacactggaagcatcaggatgtcaccgttaaggacgagaagacccttctcttc

SEQ ID NO: 130889 - DNA, 259 bp, Glycine max
ggttatttcaataatgtttcagaatatctcagaattggacctcctgtgtattttgttgtgaaaaactataactacagctcagaatcaacgcatacaaatcagctttgctccattagccattgcaattcagactctcttttaaatgagattgctagagcggcccttgtaccagacacaagttatattgccaagccagctgcctcatggcttgatgattttcttgtgtgggtgtctccagaagcatttgggtgctgcagga

SEQ ID NO: 130890 - DNA, 255 bp, Glycine max
ccacgactcacaagagcttgcggggcccacgtgcggggatgatcttttaccggaagggccccaagccgccgaagaaggggcagccggagaacgcggtttatgatttcgaggacaagattaacttcgcggtgttcccttcgctgcagggtgggccccacaaccaccagatcggtgctctcgccgtggcgctgaagcaggccgcgtcgcccgggtttaaggcctacgcgaacaggttaaggcgaacgcgttgcgctt

SEQ ID NO: 130891 - DNA, 257 bp, Glycine max
ccaagccccactcaaccaccacaccactctctctgctcttcttctacctttcaagtttttaaagtattaagatggcagagacattcctatttacctcagagtcagtgaacgagggacaccctgacaagctctgcgaccaaatctccgatgctgtcctcgacgcttgccttgaacaggacccagacagcaaggttgcctgcgaaacatgcaccaagaccaacttggtcatggtcttcggagagatcaccaccaaggcc

SEQ ID NO: 130892 - DNA, 258 bp, Glycine max
gcgatctgcttcgtgttgtagctagctcctcgaaaatgctggcacgcctcgccgcgagtcgcttcaacgagatccgtcagattttccgtcagccttctagggctttctcgaccgctctgaactaccaccttgacacaccggacaacaaccctaaacttccatgggaattcaccgaggccaatcaagcaaaggttaaggagattttgtctcactatccatccaactataagcaatctgctacaattcctcttttggatc

SEQ ID NO: 130893 - DNA, 256 bp, Glycine max
tgtgaatcgggtgaatgatctctggggacaacctcaattcaatggccttgacctggagtttgatcaacctcttagagagcttggcttccctggtgtgcctcataaatcttcagtatttatcgtacctacttctgcctgccttgttgaactgatagagactcctttccttgttgtcacgcttagtgagattgagattgttaatcttgagagagttggacttgggcagaaaaactttgatatgacagtagtatttaag

SEQ ID NO: 130894 - DNA, 250 bp, Glycine max
aagctattccccaacacaattgtctccattcatgcatatcgcgatcggatttatgttggtgatgtccaagagtccttccattattgcaagtataggcgtgatgaaaaccaactttacatatttgctgatgattgtgttccaaggtggcttactgcatcataccacatagattttgacaccatggcaggtgcagacaagtttggaaatatctattttgtgcggttgccacaggatgtttcagatgagatag

SEQ ID NO: 130895 - DNA, 257 bp, Glycine max
ggaaatctgtgatactcagatatgcatttcctataaagtgcactgaagttattctagctgatgataatgagactattcttgagattcgagcagagtatgatccttcaaagaagaccaagcctaagggggttctccattgggttgctcaaccttctcctggagttgatccattaaaggtggaagtcagattgtttgagaggctgttcctattagagaatcccgctgaacttgacaactggcttggcgatttaaaccca

SEQ ID NO: 130896 - DNA, 261 bp, Glycine max
ggaattcaaatatttctttctttcatattcaagtactttgtactatttgttgtgaggagcaagagaaaacaatgggtttccgcatacctgctattgtcacgcaagcatcgttttctacaacccaagcagcctccaagagggttgaagtacaaaaaggatatcttgcggtctatgttggagataagatgaggcggttcatgattccagtatcatacttgaacaaaccttcatttcaagaattacttagtcaagcagaagaag

SEQ ID NO: 130897 - DNA, 260 bp, Glycine max
gtgggtctcaagcttcatgtgtctctttgctttcatgggtctaagaaaccaaatatccccctacctaaatgggtatctcagattggtgaatctcaacccagtattttcttcacagataggtcaggacagcattataaagaatgcctgtccatggcagttgataatcttcctgttcttgatgggaagactccagtccaagtgtaccagagtttctgtgagagcttcaagtcttcattctctccattcatgggctctacaat

SEQ ID NO: 130898 - DNA, 262 bp, Glycine max
tgacgacaaaacggggaagatcgtcgatgctcgcttcaaaaccttcggttgtggatccgccattgcttcttcctccgtcgctactgaatgggtgaagggaaagcaaatggaggaagttttgaccattaaaaacactgaaattgcaaagcatctttcacttccaccagtcaagcttcactgcagcatgcttgctgaggatgctataaaagcagctgttaaagattatgaagctaagcgtgcctcagcatctgctggtggacag

SEQ ID NO: 130899 - DNA, 265 bp, Glycine max
cgagtacccattttctcttctcaatttctcagagagaaaatcatggtggacgcagcagaacgtaggtacttggaggatgacgattcatcactcatgaaaactattaagggggcaacaactggtttagttgctggcactatctgggggaccgtagttgccacctggtatgatgtccctcgtgtagagagaaatgttgctcttccagggctgattaggactttcaagatgatgggcaactatggtttgacctttgctgccataggag

SEQ ID NO: 130900 - DNA, 267 bp, Glycine max
caaggccattaatctgtggtctgcaattcagacaagagaggattggttagacgttagcttcacggatggagttcatctatcagcagagggaagcaaggtagtggtgaaggaaatattaaaggttctaagagaagtagattggaaacctagtctgcattggatgtcaatgccaactgaatatgcagaagattcaccatattatcctccaagtcctgatggaacaacaaccataaatgtgtctcatattatctcccgaaggtgtttgca

SEQ ID NO: 130901 - DNA, 263 bp, Glycine max
ttcatccctaacgcgtgcatagcagagtcagagacagagacgcagccatggggcggagacctgcgaggtgttataggcaaattaagaacaagccataccccaagtcacgtttctgccgtggtgttcctgatcccaagatcaggatttatgatgttggtatgaagaagaagggtgttgatgagtttcctttctgtgtccatctggttagttgggagaaggaaaatgtttcaagtgaggccctggaagctgctcgcattgcttgc

SEQ ID NO: 130902 - DNA, 261 bp, Glycine max
tgacatcataacaacatgcaacttgtatttaggattcagccagctcttagttaagagcttcacctctgagttccctcacgttgaacgatacttttggaccttggtcaaccagcctaacttcagaaagattctaggtcaggttaagcaaactgaggctgttccacctattccatcggcaaagaagccttcccagtctaaggaatctaagcccaagcctaaggatgaaccaaagaaagtggctaaaccagagcccaaagaagt

SEQ ID NO: 130903 - DNA, 257 bp, Glycine max
aacattgaaaaggtatccggcggaattgtcactatcttcattggtatgcttatcgggtgctttgcaagccagcgtggtggcaatagtagcgactcgtcattctgggcttgtggcatgggccttaggttgggacttcaggctctatggccctctctacacgggaatagttacctctggaattacatattatgcccaaggattgatattgcaaaccagaggcccagtatttttaactgccttcaatcccctttgcatgg

SEQ ID NO: 130904 - DNA, 256 bp, Glycine max
ggaaagagtgctgataacagtctgtatgttgttgaggggatgcaattcgaccgtggttatatttctccatacttcgttactgacagtgagaaaatggctgttgagtatgagaactgtaagttgctgttagttgacaaaaagataaccaatgcacgggatcttatcaacatactggaggatgctattagaagtggacaccctatattgattattgctgaggatattgaacaagaggctttagcaactcttgtggtga

SEQ ID NO: 130905 - DNA, 257 bp, Glycine max
gaaaaaaaaaaacccttagccaacacaaccatcatggccacctctgctattcagcaatcagcattcactggtcaaactgctctgaagcagctcaatgagttcgtccgcaagaccggtggcgccggcaaaggtcgcactaacatgcgccgcaccgtcaagagtgctcctcagagcatttggtatggccctgaccgtcccaagtacttgggtccattctcggagcagattccatcatacctgaccggagaattccctgg

SEQ ID NO: 130906 - DNA, 245 bp, Glycine max
ctacattcccatttgtttttgctttttgagatttcatcatcctgtatttttggtttctgttttcggacttcaatggaaattaatggatgagaactaatgaataagctattgtgttgtgttgctttgtttcaaaataacttcaataacccatcgtccttgcatttctctctaaaaaaaaaaaaaaaaaaaaaaaaaaaaaaaaaaaaaaaaaaagaaaaaaagagagaaaagaagagaaaagaaac

SEQ ID NO: 130907 - DNA, 215 bp, Glycine max
gcagtgttgggagtacttctgatccgaaagaatgaggactttgaaaaccttaagaagctatttgatgagactacattatatgacaagcaatggcaagcaacttggcaggatgagattcaagcattccaaaatgagtagtggattgcgtttgtagtctcctcctcatgtcctatacagtgctgcgataattgtatacaacagcatgtatgatagac

SEQ ID NO: 130908 - DNA, 259 bp, Glycine max
attgaatctcagaattctctaaaagagatctttttctgctctttgaagaaagaagggtctttgcttgattttggagatgtctctgctctcagatctcatcaaccttaacctctccgataccaccgagaaggtgatcgcagagtacatatggatcggtggatcaggaatggacctgaggagcaaagcaaggactctcccaggaccagttagcgacccttcagagcttcccaagtggaactatgatggttccagcacaggt

SEQ ID NO: 130909 - DNA, 262 bp, Glycine max
gaaaaaaaaaatattttcatttcattttcgagtaaaagtaaaacacagttcctgatcaatggcatctcgccgccgcatgttattgaaggtcataatcctcggagacagcggggttggtaaaacatcactgatgaatcagtatgtgaatcgtaaatttagtaatcagtataaggcaaccatcggtgcagattttcttaccaaggaagttcaatttgaagataggttgttcacattgcagatttgggatactgctggtcaagaa

SEQ ID NO: 130910 - DNA, 258 bp, Glycine max
atctatatcattgatactgtgactggtcgcatattgcatcgcatgacacaccatggttgccagggtcctgttcatgctgtatttagtgaaaactgggttgtctaccactattttaatctcagagcacacagatatgagatgtcagttgttgaggtctatgatcagtctcgagcggataacaaagatgtctggaagtttgttcttgggaagcataatcttacatcacccatctcttcttattatcgagcagaagttgtt

SEQ ID NO: 130911 - DNA, 257 bp, Glycine max
gaagaaacggccgagcctttctgttttcccatgcaatgaatattgtcacggggccaaaagaagacaggcatctcttgactggcctccatactgttgctgatgtttattgtggcgattgccgtgaagtgttgggttggaagtatgaaagagcttatgaagcatcccagaagtacaaggaaggaaagttcatacttgaaaagtcaaaaattgttaaggagaactggtagcattcctttctgctccccattctattcatt

SEQ ID NO: 130912 - DNA, 256 bp, Glycine max
tatttttcttcctcagtagtgtcatttacgcttctcttctctgcagcaactatgcctaaccctaaggtcttcttcgacatgaccatcggcggtcaatctgctggccgcatcgtgatggagctctacgccgacgtcactccccgcaccgccgagaacttccgcgcgctttgcaccggcgaccagggcgtagggcggagcggcaagcccctccactacaagggctcgtccttccaccgcgtgatcccgagtttcatgt

SEQ ID NO: 130913 - DNA, 254 bp, Glycine max
gtccttcttcaaataccgtaaaaccttcaagaatccaccacttccaccaggtcctagaggccttcccataatagggaatcttcatcaactagatagtccttctcttcatgagcagctatggcatctctcaaagaaatatggtcctttattttcccttcaatttggattaaggccagccatagttgtttcctctccaaaattggccaaagaggtaatgaaagacaatgaccttgagtgctgtggacgacctaaat

SEQ ID NO: 130914 - DNA, 251 bp, Glycine max
tctctagtcctgttatttctcagcgcgtaaagcatggctttgttggtggagaaaaccacgagtggtcgcgagtacaaggtcaaggacctttcccaggccgacttcggccgcctcgagatcgagctggccgaggttgagatgcccggcctcatggcctgtcggaccgagttcggcccctcccagcccttcaagggggcccgcatcaccggctccctccacatgaccatccagaccgccgttctcattgagac

SEQ ID NO: 130915 - DNA, 255 bp, Glycine max
attccaagtttctaattttgctcatggcatggctaccaactgctgtaactttcgttttcttaccagttatcaggcaccacaggggagttcaacagccaaatgattccaaggctttctataatttcctctacaccactcttgtccttgcagggttcctcatggtggtgatcatattgcaaaaaagtttcacctttacaaagagtgagtattatatcactactagtcttatgcttctcttgctcatcctgccacttg

SEQ ID NO: 130916 - DNA, 229 bp, Glycine max
  unsure (1)..(229): unsure at all n locations
atggattcagctgccaccccagaaaactcatcaatatcaattggagatgatgattttgagcagagttcccaaaagtgtaaatcaggaggggatgaatatgatgaagatgaacctgatgccaaaagatggaaaattcgaagggtgaaaattgcagggtatcgtacagcaccctggacanggtagaacaaagtgagagcaaccttagnnagttcgtaagttcaaagacaac

SEQ ID NO: 130917 - DNA, 256 bp, Glycine max
cccgcaggaaagtcacctgttggtgatacacgcgtacagttccattccgatcaacttcgcttattggtagttcatgagactcaattggcaatatatgatgcctctaagatggaacgcattcggcagtgggttccccaagatgttctgtctgcccccatatcatatgcagcttattcctgcaacagtcagttaatatatgctacattttgtgatgccaacattggtgtttttgatgctgatagcttgaggctcagat

SEQ ID NO: 130918 - DNA, 258 bp, Glycine max
gctggaatgttcttttcctactgtatggtctttgctatgtcactcaccaaggccccaaattggagactcatgttgggtgttctttcaattccctctctcatttattttgcactcacgctattcttcttgcctgaatctccaagatggcttgtcaaaggccggatgctagaggccaagaaggttttgcaacgacttcgcggcagacaagatgtcgctggtgagatggctttactagttgagggtcttggagttgggcgt

SEQ ID NO: 130919 - DNA, 260 bp, Glycine max
tgaatctcagaattctctaaaagagatctttttctgctctttgaagaaagaagggtctttgcttgattttggagatgtctctgctctcagatctcatcaaccttaacctctccgataccaccgagaaggtgatcgcagagtacatatggatcggtggatcaggaatggacctgaggagcaaagcaaggactctcccaggaccagttagcgacccttcagagcttcccaagtggaactatgatggttccagcacaggtcaa

SEQ ID NO: 130920 - DNA, 263 bp, Glycine max
gtgcaggctgcgattctcagtggcgagggtaatgagaaagtgcaggatcttcttttgttggatgttactcctctatccactggtttggagactgcaggaggagtcatgactgtgttgattcccagaaacacaaccattcccaccaagaaggagcaggtgttctcaacctactctgacaaccagcccggtgtgttgattcaggtctatgaaggtgaacgaacgaggactcgtgacaacaatttgcttggcaaatttgagttatc

SEQ ID NO: 130921 - DNA, 213 bp, Glycine max
tggaaatgcaagaagcttatcttgtcaatctcgtaaatgtgttacgagaattgtatttgcacagtccagaggaagctcgccaattgagaaggaaagctctctctcgtattgaatggctgcaaaaagctgatgtgcctaccatagcacagattgaagagttccattcgatgcagaggatgatgaatgctcctgattcaaatgataatattgatt

SEQ ID NO: 130922 - DNA, 221 bp, Glycine max
gcccattctggtggttacatttccgaatcccattgtgcagattgaaccagacatgaattcaaggtttcagcttttgagtaccactaccaatggtgattttgttcaagggaaagatctcgcacatggttaaagttaatgtagcatgtgctgctgttggcttgacatcaagttacactccaactccattgttggaatctggtttgcacaaagcccgagggcta

SEQ ID NO: 130923 - DNA, 278 bp, Glycine max
caggctcagatggaaacaaatttgtttaaattgtctcttgatgatgttgaaactcctaaaggttccatgttggatctgaaaatttctcaatctaaaattgcacttcccaagaacacagttggaggaaccattttgcgtagtgatctattggcaaattttttgacagagggcaattttagagcaagtgttgatttgcagcgcactcatcgtattagaggaatgattaaaatggtggccacagttggtattcctgagaatacaggtatatcattggcctg

SEQ ID NO: 130924 - DNA, 265 bp, Glycine max
gtggaatcctgcttgcacaaaagcaatgactatgtcatttaatccaaacccgtgttctgatgcatggagtttggaatttctgaagcgtactggatttcattgcgatatcatttgtgtcactggatggattgccaccccaatgcaggatgttcaggttacaattgattggtttatttcctctcaggaatgtgttcccaggacctattgtgttttaatccacaaatccttttgtgttaaataggtggatgggataattgactttccc

SEQ ID NO: 130925 - DNA, 260 bp, Glycine max
cacacttatacaaaattctccaattagtaacttattgagagttgctgcttggaagaaaggctgtttaatggtcaagattgtgatgtctgggaatgcagcagtcaaaaggagtgattgggcctcattggtacaagtgtttttaacaaacagcaacagtacagagcattttgatgcatgtaagtggacaaaatcagaaccacattcctgggaattgatcttcccaatagaggtatgtggtcctaataatggttttgatatgt

SEQ ID NO: 130926 - DNA, 269 bp, Glycine max
gacaaaatcagaaccacattcctgggaattgatcttcccaatagaggtatgtggtcctaataatggttttgaaatgtggagttctgagtgggcaaatcaaacttcatggcatttgagtttccttattgacaatcccaaacagtctacagtttttgatattctcttgggaatctctcaagattttgaaattgctggtaatactcttatgccagctttttctgttccacaggctactgccagatcttctgaaaatgcggaatcctctgcat

SEQ ID NO: 130927 - DNA, 276 bp, Glycine max
tctcgagccgattcggctcgagggacaaaactggagattggatcacacttatacaaaattctccaattagtaacttgttgagagttgctgcttggaagaaaggctgtttaatggtcaagattgtgatgtctgggaatgcagcagtcaaaaggagtgattgggcctcattggtacaagtgtttttaacaaacagcaacagtacagagcattttgatgcatgtaagtggacaaaatcagaaccacattcctgggaattgatcttcccaatagaggtat

SEQ ID NO: 130928 - DNA, 275 bp, Glycine max
gtctctttcttcatagcatttggaaatttggctgatgataccatcaattttgaggcttttccccacaagctggtgcagtttggagagattcaggaaaaagttgtattgaaattttcacaagaggaatttcttacagcttggtcaactcaggtgcgtcctgcaacaactctgttggctgatgggtgtccatatttgtatgcaatggtgcatgatagttcagtgtctacaataccaggtgattttgtcattggtgtcaagttgacaaccataaacaa

SEQ ID NO: 130929 - DNA, 219 bp, Glycine max
cttcccaagaacacagttggaggtaccattctgcgtagtgatctattggcaaattttttgacagagggcaattttagagcaagtgttgatttgcagcgcactcatcgtattagaggaatgattaaaatggtggccacagttggaattcctgagaatacaggtatatcattggcctgtgctatgaaaggttcttttagggggcgcgccagttctgatatt

SEQ ID NO: 130930 - DNA, 250 bp, Glycine max
ctcgagccgattcggctcagcaattaccttcagaagctgtcgatgtaaatgttacatgtggtagtggacgtggtggtttacccaccactgcttggattagttctgcagttaacaatcgctcctcagatatcaacaaaaggattcgcacagcacttgggaaaggtaagaaaattgtttttcttactagagttgatccttttccagtagctttactggctgttctttttggcgttaagaatgaaattctgag

SEQ ID NO: 130931 - DNA, 230 bp, Glycine max
cgtaaatgtgttacgagaattgtatttgcacagtccagaggaagctcgccaattgagaaggaaagctctctgtcgtattgaatggctgcaaaaagctgatgtgcctaccatagcacagattgaagagttccattcgatgcagaggatgatgaatgctcctgattcaaatgataatattgatttactgttgagcattgattgtgtgggtttacaaggagcaggtaaagctt

SEQ ID NO: 130932 - DNA, 197 bp, Glycine max
gaaattttcacaagaggaatttcttacagcttggtcaactcaggtgcgtcctgcaacaactctgttggctgatgggtgtccatatttgtatgcaatggtgcatgatagttcagtgtctacaataccaggtgattttgtcattggtgtcaagttgacaaccataaacaatatgtgtgcatatggcctcaatcctggta

SEQ ID NO: 130933 - DNA, 96 bp, Glycine max
cggttcacgtcttttgggcaccattcctcagtccatttcacagcaaactgtttggaatcaaatggcaacagtgagaacaccattgaattttgattc

SEQ ID NO: 130934 - DNA, 252 bp, Glycine max
aatctctcaagattttgaaattgctggtaatactcttatgccagctttttctgttccacaggctactgccagatcttctgaaaatgcggaatcctctgcatgatctggaatttgtgttttctttcgcttgttcgtttgtttaattcaataaaggaaattaggcatgaccctcttgttgagtatgctctgcctatttgaaaatttccacacctcttttaattgtcgtaatgatgtgtgaagtgtgtgttattt

SEQ ID NO: 130935 - DNA, 212 bp, Glycine max
cacaagctggtgcagtttggagagattcaggaaaaagttgtattgaaattttcacaagaggaatttcttacagcttggtcaactcaggtgcgtcctgcaacaactctgttggctgatgggtgtcatcgttgtatgcaatggtgcatgatagttcagtgtctacaataccaggtgattttgtcattggtgtcaagttgacaaccataaacaat

SEQ ID NO: 130936 - DNA, 198 bp, Glycine max
gctgtttaatggtcaagattgtgatgtctgggaatgcagcagtcaaaaggagtgattgggcctcattggtacaagtgtttttaacaaacagcaacagtacagagcattttgatgcatgtaagtggacaaaatcagaagcacattcctgggaattgatcttcccattagaggtatgtggtcctagtaatggtcttgaaa

SEQ ID NO: 130937 - DNA, 262 bp, Glycine max
caaaacactcataacacaaagcacaaagcaaagctcatccttgagttaaaaaatggcagcagcttcttccatggctctctcatccccatccttggctggcaaggccgtgaagctgggcccatcagccccagaagtgggaagggtgagcatgaggaagaccgtcaccaagcaggtctcctcaggaagcccatggtacggcccagaccgagtcaagtacttgggcccattctctggcgagcccccgtcctacctaaccggtgag

SEQ ID NO: 130938 - DNA, 267 bp, Glycine max
ctcgagccgttgggattgtcaatacggaaactcaaacagtctacagtttttgatattctctttggaatctctcaagattttgaaattgctggtaatactcttatgccagctttttctgttccacaggctactgccagatcttctgaaaatgcggaatcctctgcatgatctggaatttgtgttttctttcgcttgttcgtttgtttaattcaataaaggaaattaggcatgaccctcttgttgagtatgctctgcctatttgaaaat

SEQ ID NO: 130939 - DNA, 268 bp, Glycine max
tcacaacttcattatgtttcgtgtaataatctggaaatgcaagaagcttatcttgtcaatctcgtaaatgtgttacgagaattgtatttgcacagtccagaggaagctcgccaattgagaaggaaagctctctctcgtattgaatggctgcaaaaagctgatgtgcctaccatagcacagattgaagagttccattcgatgcagaggatgatgaatgctcctgattcaaatgataatattgatttactgttgagcattgattggtggg

SEQ ID NO: 130940 - DNA, 273 bp, Glycine max
gcatgatagttcagtgtctacaataccaggtgattttgtcattggtgtcaagttgacaaccataaacaatatgtgtgcatatgggctcaatcctggtatttcaggttctcgtcttttgggcaccattcctcagtccatttcacagcaaactgtttggaatcaaatggcaacagtgagaccaccattgaattttgattctagcaagcagagcttttgtcagttttctattgaccttctcggtggaggaatcttagtggacaaactggagattgg

SEQ ID NO: 130941 - DNA, 212 bp, Glycine max
tactgatggtattgacaaaactagtgcaactttgcaatttagaaagttagcagattgtgattttctcaagagaaactttaagcagatgtctaatgttttgtgggtggctcctgaggacaaggcgagtttatggtcacaacttcattatgtttcgtgtaataatctggaaatgcaagaagcttatcttgtcaatctcgtaaatgtgttacgag

SEQ ID NO: 130942 - DNA, 227 bp, Glycine max
atccttttgtgttaaataggtggatgggaaaattgactttcccccagggcacttcccgaagtgttaagagaatgcctctttctatagggggaggagctggtgcaaagaatgctattctcatgaatatgccaaatgctgttctttcaatgtggagatattttgttggagatctcgtctatgaagtttctaagatgacttctcccttcattaaatatacagtctctttc

SEQ ID NO: 130943 - DNA, 244 bp, Glycine max
  unsure (1)..(244): unsure at all n locations
ctcgagccgctcgagccgtttttaacaaacagcaacagtacagagcattttgatgcatgtaggtggacaagatcagaaccacattcctgggaattgatcttcccaatagaggtatgtggtccttcgtntagttttgaaatgtggagttctgagtgggcaaatcagacttcatggcatttgagtttcgttattggcaatccctaacagtctacagttttgatattctcttgggaatctctcaaga

SEQ ID NO: 130944 - DNA, 268 bp, Glycine max
tttggctgatgataccatcaattttgaggcttttccccacaagctggtgcagtttggagagattcaggaaaaagttgtattgaaattttcacaagaggaatttcttacagcttggtcaactcaggtgcgtcctgcaacaactctgttggctgatgggtgtccatatttgtatgcaatggtgcatgatagttcagtgtctacaataccaggtgattttgtcattggtgtcaagttgacaaccataaacaatatgtgtgcatatgggctc

SEQ ID NO: 130945 - DNA, 269 bp, Glycine max
tgacaaccataaacaatatgtgtgcatatgggctcaatcctggtatttcaggttctcgtcttttgggcaccattcctcagtccatttcacagcaaactgtttggaatcaaatggcaacagtgagaacaccattgaattttgattctagcaagcagagcttttgtcagttttctattgaccttctcggtggaggaatcttagtggacaaaactggagattggatcacacttatacaaaattctccaattagtaacttgttgagagttgct

SEQ ID NO: 130946 - DNA, 243 bp, Glycine max
gtcatttaatccaaacccgtgttctgatgcatggagtttggaatttctgaagcgtactggatttcattgcgatatcatttgtgtcactggatggactgccaccccaatgcaggatgttcaggttacaattgattggtttatttcctctcaggaatgtgttcccaggacctattgtgttttacaatccacaaaatccttttgtgttaaataggcggatgggaaaattgactttcccccagggca

SEQ ID NO: 130947 - DNA, 257 bp, Glycine max
ctaatgttttgtgggtggctcctgaggacaaggcgagtttatggtcacaacttcattatgtttcgtgtaataatctggaaatgcaagaagcttatcttgtcaatctcgtaaatgtgttacgagaattgtatttgcacagtccagaggaagctcgccaattgagaaggaaagctctctctcgtattgaatggctgcaaaaagctgatgtgcctaccatagcacagattgaagagttccattcgatgcagaggatgatg

SEQ ID NO: 130948 - DNA, 214 bp, Glycine max
ctaaaagattgatgccagattgagacaaagaatagatcctcaatacaatgaggttcaggctcagatggaaacaaatttgtttaaattgtctcttgatgatgttgaaactcctaaaggttccatgttggatctgaaaatttctcaatctaaaattgcacttcccaagaacacagttggaggaaccattctgcgtagtgatctattggcaaatttt

SEQ ID NO: 130949 - DNA, 202 bp, Glycine max
cccgtgtgcccatcatcgtcaccggtaacgatttctccacactctatgcgcctctcatccgtgatgggcgtatggagaagttctactgggcatccaacaagggatgaccgcattggtgtctgtcactggaatttttcgcaccgattcaatatcctgtacatgacgttgtcaagattgttctcaccttccctggctaatccat

SEQ ID NO: 130950 - DNA, 210 bp, Glycine max
gctgttctttcaatgtggagatattttgttggagatctcgtctttgaagtttctaagatgacttctccctacattaaatgtacagtctctttcttcatagcatttggaaatttggctgatgataccatcaattttgaggcttttccccacaagctggtgcagtttggagagattcaggaaaaagttgaattgaaatttcacaagaggaat

SEQ ID NO: 130951 - DNA, 260 bp, Glycine max
gaaccacattcctgggaattgatcttcccaatagaggtatgtggtcctaataatggttttgaaatgtggagttctgagtgggcaaatcaaacttcatggcatttgagtttccttattgacaatcccaaacagtctacagtttttgatattctcttgggaatctctcaagattttgaaattgctggtaatactcttatgccagctttttctgttccacaggctactgccagatcttctgaaaatgcggaatcctctgcatg

SEQ ID NO: 130952 - DNA, 242 bp, Glycine max
aagttgacaaccataaacaatatgtgtgcatatgggctcaatcctggtatttcaggttctcgtcttttgggcaccattcctcagtccatttcacagcaaactgtttggaatcaaatggcaacagtgagaacaccattgaattttgattctagcaagcagagcttttgtcagttttctattgaccttctcggtggaggaatcttagtggacaaaactggagattggatccgacttatacaaaa

SEQ ID NO: 130953 - DNA, 268 bp, Glycine max
ctttagtggttctaaattgaaaagctttctagctagtcataacatcaccattactgatggtattgacaaaactagtgcaactttgcaatttagacagttagcagattgtgattttctcaagagaaactttaagcagatgtctaatgttttgtgggtggctcctgaggacaaggcgagtttatggtcacaacttcattatgtttcgtgagacaatctggaaatgcaagaagcttatcttgtcaacctcgtaaatgtgttacgagaattg

SEQ ID NO: 130954 - DNA, 222 bp, Glycine max
ttttcatttcatcgtgcattcaatggccaccacagcagctctatccggaaccatggtgagcacctccttcatgaggaggcaaactatgaccaccacaagcctacagacattccccaacgttggtgaagctctttttggtctgaaaagtggacgaggtggtcgtgtcacttgcatggcctcgtacaaggtgaagctcataaccccagaaggagaagtggagtt

SEQ ID NO: 130955 - DNA, 209 bp, Glycine max
tttcacagcaaactgtttggaatcaaatggcaacagtgagaacaccattgaattttgattctagcaagcagagcttttgtcagttttctattgaccttctcggtggaggaatcttagtggacaaaactggagattggatcacacttatacaaaattctccaattagtaacttgttgagagttgctgcttggaagaaaggctgtttaatg

SEQ ID NO: 130956 - DNA, 234 bp, Glycine max
ttgcgattatgctagttttgatggtttgattaccaagcaagttatgagcaagatggcagaaatgataaacagtctttgtggtggtgatgaaaaattgatgcgtgaaaggacgcacctgctgatggcttgttgttcaaggatggcaatttgtaagaaagatgtttggagagttgaatgtggaatcccttctggatttccgctcacagttatttgcaatagcatttttaatgagat

SEQ ID NO: 130957 - DNA, 197 bp, Glycine max
ttaaacaatctgagtaataatctattaggcaaatttaaagacagagggaaattttaagagcaagtgttgatttgcagggggctcatcgtattagagggatccttaccctggtggtcacagtctgggtattcctggggatagaggtctatccttggcctgtgctatgaatagttcttttagggggcgcgccagtcctg

SEQ ID NO: 130958 - DNA, 178 bp, Glycine max
caagcagagcttttgtcagttttctattgaccttctcggtggaggcatcttagtggacaaaactggagattggatcacacttatacaaaattctccaattagtcacttgttgagagttgctgcttggaagaacaggctgtttaatggtcaagattgtgatgtctgggaatgcagcagt

SEQ ID NO: 130959 - DNA, 263 bp, Glycine max
gatttcattgcgatatcatttgtgtcactggatggactgccacccaaatgcaggatgttcaggttacaattgattggtttatttactctcaggaatgtgttcccaggacctattgtgttttaaatccacaaaatccttttgtgttaaataggtggatgggaaaattgactttcccccagggcacttcccgatgtgttaagagaatgcccctttctatatggggaggcgctggtgcatagaatgcagttctcatgactatgcca

SEQ ID NO: 130960 - DNA, 259 bp, Glycine max
taaaacctgtcaccggtgttagtagggtcacaatcaagagaacaagaaatattcgtttcttcatctccaaacctgatgtcttcaagagtccaaattctgagacctatgtcatatctggcgaggcgacaatagaggacttgagctctcagttgcaggcacaggctgctcaacagttcaggatgccagatatgggatctgtaacggcaaaacaagaagatgctgcagctgcagcagtgcaacctgatgaagaggaggaggt

SEQ ID NO: 130961 - DNA, 187 bp, Glycine max
ctcgagccgctcgagccgattcggctcgagaattttttgacagagggcaattttagaacaagtgttgatttagtagcgcactcatcgtattagaggaatgattaaaatggtggcaacagttggtattcctgagcatataggtatatcatgggcctgtgatatgaatagttcttttagggggcgcgcc

SEQ ID NO: 130962 - DNA, 235 bp, Glycine max
cggaggtaaggcccatgagtgctccatttgccacaaatccttccccaccggataggaccttagcggacacaaacgttgtcactactaaggtaacggtaacggaaataacaacaacagtaacagcgttgtcaccgtcgcctcggaaggcgtggggtccacccacactgtcagtcacggccaccaccgcgacttcgatctcaacatcccggcctttccggatttatcgaccaaggtc

SEQ ID NO: 130963 - DNA, 201 bp, Glycine max
agcacatataatatgtgtgcatatgggctcaatcctggtatttcaggttctcgtcttatcggcaccattcctcacttcatttcacagcacactgttagggatcaaatggcaacagtgagaggagcattgaattttgattctagcacgcagagcctttgtcagttgtctattgtccttctcggtggaggagtcttagcggac

SEQ ID NO: 130964 - DNA, 257 bp, Glycine max
gcatgatgttcaggttacaattgattggtttatttccactcaggaatgtgttcccaggacctattgtgttttaaatccacaaaatccttttgtgttaaataggtggatgggaaaattgactttcccccaggggacttcccgaagtgtttagagaatgcctctatctatagggggaggagctggtgcaaagaatgctattctcatgaatatgccacatgctgttctttcaatgtggagatattttgttggagatctcg

SEQ ID NO: 130965 - DNA, 198 bp, Glycine max
ctcgagccgattcggctcgagattttctcaagagagactttaagcagatgtctaatgttttgtgggtggctcctgaggacaaggcgagtttatggtcacaacttcattatgtttcgtgtaataatctgggaatgcaagaagcttatcttgtcaatctcgtaaatgtgttacgagaattgtatttgcacagtccagagg

SEQ ID NO: 130966 - DNA, 212 bp, Glycine max
gggaaaattgactttcccccagggcacttcccgaagtgttaagagaatgcctctttctatagggggaggagctggtgcaaagaatgctattctcatgaatatgccaaatgctgttctttcaatgtggagatattttgttggagatctcgtctttgaagtttctacgatgacttctccctacattaaatgtacagtctcttgcttcatagcat

SEQ ID NO: 130967 - DNA, 183 bp, Glycine max
ctcgaccggcaatggtggccacagatggtagtcctgagtacgatggtatagcagaggcctgcgccaggtacagatcataataggggcgcgccagtgctcatagatacaccaggtgcactcaggactgggaaatctggactcctgcttgtagaaaagcaaggactacgtcagttggtccacacc

SEQ ID NO: 130968 - DNA, 240 bp, Glycine max
atggatttcatccaacaatagaaagttgaaactagtgtgttaaaaataaataaaaaaaaaataataaaaaaaaaatgagtaaataaaatcataattgaaggcaagtgagcttcctgattgtccatcccagacaatatacagtgattgatattctctagggaatctctctagattttgagattgctggaaactactcgtatgccagctttttctgattcacaggctactgacagatcttct

SEQ ID NO: 130969 - DNA, 249 bp, Glycine max
gaaattttcacaagaggaatttcttacagcttggtcaactcaggtgcgtcctgcaacaactctgttggctgatgggcgtccatatttgtatgcaatggtgcatgatagttcagtgtctacaataccaggtgattttgtcattggtgtcaagttgacaaccatacacaatatgtgtgcatatgggctcaatcctggtatttcaggttctcgtcttttgggcaccattcctcagtccatttcacagcaaac

SEQ ID NO: 130970 - DNA, 254 bp, Glycine max
  unsure (1)..(254): unsure at all n locations
gcgtacgtaagttcaggactcggcccgtctagcatttaagaaatttggctgaatgataccatcaattttgaggcttttccccacaagctggtgcagttttgagagattcaggtaaaagttgtattgaaattttcacaagaggaatttcttacagcttggtctactcaggtgcgtcctggaagaactctgttggctgatgggtgtccatatttgtattcaatggtgcaaggaacanaaagtgtctacaataccag

SEQ ID NO: 130971 - DNA, 217 bp, Glycine max
ctcgagccgaatcggctcgagctgctgttggctttttgttcaaggatggcaatttgtaagaaagatgtttggagagttgaaagtggaatcccttctggatttccgctcacagttatttgcaatagcatttttaatgagatgctcattagatatagctatggaaaattactgcgccaggctaaagctccaagtatgtttttacaatccttcaaaaatt

SEQ ID NO: 130972 - DNA, 206 bp, Glycine max
caggttctcgtcttttgggcaccattcctcagtccatttcacagcaaactgtttggaatcaaatggcaacagtgagaacaccattgaattttgattctagcaagcagagcttttgtcagttttctattgaccttctcggtggaggaatcttagtggacaaaactggagattggatcacacttatacaaaattctccaattagtaac

SEQ ID NO: 130973 - DNA, 205 bp, Glycine max
caatggtgcatgatagttcagtgtctacaataccaagtgattttgtcaatggtggcacattgacaaccattaacaattaggggcatatatgggctaaccccgggaattaagggttcgggcctttgggaccattcccagtcattttacagaaactgtttggaatcaatggcacagtgagacaccatgaatttgattcagcagcaga

SEQ ID NO: 130974 - DNA, 285 bp, Glycine max
aaagctttctagctagtcataacatcaccattactgatggtattgacaaaactagtgcaactttgcaatttagaaagttagcagattgtgattttctcaagagaaactttaagcagatgtctaatgttttgtgggtggctcctgaggacaaggcgagtttatggtcacaacttcattatgtttcgtgtaataatctggaaatgcaagaagcttatcttgtcaatctcgtaaatgtgttacgagaattgtatttgcacagtccagaggaagctcgccaattgagaa

SEQ ID NO: 130975 - DNA, 295 bp, Glycine max
attcggctcgagacaaaactggagattggatcacacttatacaaaattctccaattagtaacttattgagagttgctgcttggaagaaaggctgtttaatggtcaagattgtgatgtctgggaatgcagcagtcaaaaggagtgattgggcctcattggtacaagtgtttttaacaaacagcaacagtacagagcattttgatgcatgtaagtggacaaaatcagaaccacattcctgggaattgatcttcccaatagaggtatgtggtcctaataatggttttgaaatgtggag

SEQ ID NO: 130976 - DNA, 280 bp, Glycine max
gtttgatgataggtcttcagtagggtcacaaactggacgaacacgcgtggatggaaaagagttttttcgccaagttaggagtcgtttatcttatgagcagtttggtgcatttttggcaaatgttaaggaactgaattctcataaacaaactaaagaggaaacactacagaaagctaatgagttatttgggcctgaaaacaaggacctctatactatatttgagggactgataacgcgcaatgtccattagcactatcatgcggaaattaatttcatgact

SEQ ID NO: 130977 - DNA, 278 bp, Glycine max
caaaatttttgacaaacctaagacgcgctgcttcactattctccctatggagtttaatcttgtggtccgtcaaaagtttttaaattttgtgaggttcattatgaagaaaagggacaaacttagttgtcaagttggaatcaacccatactccatggaatggactggtttggccaatagattactgagtaagggcaatgatattctgtgttgcgattatgctagttttgatggtttgattaccaagcaagttatgagcaagatggcagaaatgataaaca

SEQ ID NO: 130978 - DNA, 277 bp, Glycine max
gttggaatcaacccatactccatggaatggactggtttggccaatagattactgagtaagggcaatgatattctgtgttgcgattatgctagttttgatggtttgattaccaagcaagttatgagcaagatggcagaaatgataaacagtctttgtggtggtgatgaaaaattgatgcgtgaaaggacgcacctgctgttggcttgttgttcaaggatggcaatttgtaagaaagatgtttggagagttgaatgtggaatcccttctggatttccgc

SEQ ID NO: 130979 - DNA, 274 bp, Glycine max
ggcagcactgggtggctttaccgacatcaccggagcacagaacagcatcgatatcgaaaatctcgctcgctttgctgttgatgaacacaacaaaaaagagaatgcagttctggagtttgtgagggtgattagtgcaaagaaacaagtggtttctggcaccttgtactatatcactttggaggcaaatgatggtgtgacgaaaaaggtttatgaaactaaggtgttggagaaaccatggttgaacatcaaggaggttcaggaattcaagcccatc

SEQ ID NO: 130980 - DNA, 261 bp, Glycine max
cggaatcctctgcatgatctggaatttgtgttttctttcgcttgttcgtttgtttaattcaataaaggaaattaggcatgaccctcttgttgagtatgctctgcctatttgaaaatttccacacctcttttaattgtcgtaatgatgtgtgaagtgtgtgttattttaaaaaaaaaaaaaaaaaaaaaaaaaggggggccccccgataagtgacctcttcgcccggggatttatttcgggccgggaacctgagggggtaca

SEQ ID NO: 130981 - DNA, 274 bp, Glycine max
acaaaatcagaaccacattcctgggaattgatcttcccaatagaggtatgtggtcctaataatggttttgaaatgtggagttctgagtgggcaaatcaaacttcatggcatttgagtttccttattgacaatcccaaacagtctacagtttttgatattctcttgggaatctctcaagattttgaaattgctggtaatactcttatgccagctttttctgttccacaggctactgccagatcttctgaaaatgcggaatcctctgcatgatctg

SEQ ID NO: 130982 - DNA, 272 bp, Glycine max
tgcatatgggctcaatcctggtatttcaggttctcgtcttttgggcaccattcctcagtccatttcacagcaaactgtttggaatcaaatggcaacagtgagaacaccattgaattttgattctagcaagcagagcttttgtcagttttctattgaccttctcggtggaggaatcttagtggacaaaactggagattggatcacacttatacaaaattctccaattagtaacttgttgagagttgctgcttggaagaaaggctgtttaatgg

SEQ ID NO: 130983 - DNA, 275 bp, Glycine max
caacaactctgttggctgatgggtgtccatatttgtatgcaatggtgcatgatagttcagtgtctacaataccaggtgattttgtcattggtgtcaagttgacaaccataaacaatatgtgtgcatatgggctcaatcctggtatttcaggttctcgtcttttgggcaccattcctcagtccatttcacagcaaactgtttggaatcaaatggcaacagtgagaacaccattgaattttgattctagcaagcagagcttttgtcagttttctatt

SEQ ID NO: 130984 - DNA, 276 bp, Glycine max
aaaattttgtttctttgtgtgtgtatggtgatgataacttaattagtgttcatgaatatgtcaagccttactttagtggttctaaattgaaaagctttctagctagtcataacatcaccattactgatggtattgacaaaactagtgcaactttgcaatttagaaagttagcagattgtgattttctcaagagaaactttaagcagatgtctaatgttttgtgggtggctcctgaggacaaggcgagtttatggtcacaacttcattatgtttcgt

SEQ ID NO: 130985 - DNA, 274 bp, Glycine max
aattgctgcagcattacctggaatggaaacactatcttctgcaaaacaagaagacatggttgatgtaaacttaaagtctacaactggcagtgcgcagtctcaacctcagccaagtggatgtgcttgttaaatatactttatcatgtgcggtccacctttttgtgtcattccttttgttttatgcagatttttctagtcttctacatcattatatgaaaagatgaaagaatatataagcgatcggggtaggggttgatacaagttgtgtctagaa

SEQ ID NO: 130986 - DNA, 280 bp, Glycine max
gaaaaaggcaaaaggagatttgtctctggggatggtgaagagatgacactgattccgggaaccagtgttgaagaggcttacaacaagctaatagttgaacttgagaaaagtgttcctacattggttggcattgaatgtcccaaggatgagaaacttcctcgtcgcaaaatttttgacaaacctaagacgcgctgcttcactattctccctatggagtttaatcttgtggtccgtcaaaagtttttaaattttgtgaggtttattatgaagaaaagggaca

SEQ ID NO: 130987 - DNA, 279 bp, Glycine max
cttagtggacaaaactggagattggatcacacttatacaaaattctccaattagtaacttattgagagttgctgcttggaagaaaggctgtttaatggtcaagattgtgatgtctgggaatgcagcagtcaaaaggagtgattgggcctcattggtacaagtgtttttaacaaacagcaacagtacagagcattttgatgcatgtaagtggacaaaatcagaaccacattcctgggaattgatcttcccaatagaggtatgtggtcctaataatggttt

SEQ ID NO: 130988 - DNA, 275 bp, Glycine max
tgaatgtggaatcccttctggatttccgctcacagttatttgcaatagcatttttaatgagatgctcattagatatagctatgaaaaattactgcgccaggctaaagctccaagtatgtttttacaatccttcaaaaattttgtttctttgtgtgtgtatggtgatgataacttaattagtgttcatgaatatgtcaagccttactttagtggttctaaattgaaaagctttctagctagtcataacatcaccattactgatggtattgacaaaa

SEQ ID NO: 130989 - DNA, 276 bp, Glycine max
tggatctgaaaatttctcaatctaaaattgcacttcccaagaacacagttggaggaaccattctgcgtagtgatctattggcaaattttttgacagagggcaattttagagcaagtgttgatttgcagcgcactcatcgtattagaggaatgattaaaatggtggccacagttggtattcctgagaatacaggtatatcattggcctgtgctatgaatagttcttttagggggcgcgccagttctgatatttacaccatctgctctcaagactgtg

SEQ ID NO: 130990 - DNA, 275 bp, Glycine max
cattcctcagtccatttcacagcaaactgtttggaatcaaatggcaacagtgagaacaccattgaattttgattctagcaagcagagcttttgtcagttttctattgaccttctcggtggaggaatcttagtggacaaaactggagattggatcacacttatacaaaattctccaattagtaacttgttgagagttgctgcttggaagaaaggctgtttaatggtcaagattgtgatgtctgggaatgcagcagtcaaaaggagtgattgggcct

SEQ ID NO: 130991 - DNA, 272 bp, Glycine max
cttgcacaaaagcaatgactatgtcatttaatccaaacccgtgttctgatgcatggagtttggaatttctgaagcgtactggatttcattgcgatatcatttgtgtcactggatggactgccaccccaatgcaggatgttcaggttacaattgattggtttatttcctctcaggaatgtgttcccaggacctattgtgttttaaatccacaaaatccttttgtgttaaataggtggatgggaaaattgactttcccccagggcacttcccga

SEQ ID NO: 130992 - DNA, 269 bp, Glycine max
actggtttggccaatagattactgagtaagggcaatgatattctgtgttgcgattatgctagttttgatggtttgattaccaagcaagttatgagcaagatggcagaaatgataaacagtctttgtggtggtgatgaaaaattgatgcgtgaaaggacgcacctgctgttggcttgttgttcaaggatggcaatttgtaagaaagatgtttggagagttgaatgtggaatcccttctggatttccgctcacagttatttgcaatagcat

SEQ ID NO: 130993 - DNA, 271 bp, Glycine max
ctgatgcatggagtttggaatttctgaagcgtactggatttcattgcgatatcatttgtgtcactggatggactgccaccccaatgcaggatgttcaggttacaattgattggtttatttcctctcaggaatgtgttcccaggacctattgtgttttaaatccacaaaatccttttgtgttaaataggtggatgggaaaattgactttcccccagggcacttcccgaagtgttaagagaatgcctctttctatagggggaggagctggtgc

SEQ ID NO: 130994 - DNA, 273 bp, Glycine max
cttgatgatgttgaaactcctaaaggttccatgttggatctgaaaatttctcaatctaaaattgcacttcccaagaacacagttggaggaaccattctgcgtagtgatctattggcaaattttttgacagagggcaattttagagcaagtgttgatttgcagcgcactcatcgtattagaggaatgattaaaatggtggccacagttggtattcctgagaatacaggtatatcattggcctgtgctatgaatagttcttttagggggcgcgcc

SEQ ID NO: 130995 - DNA, 274 bp, Glycine max
gctttctagctagtcataacatcaccattactgatggtattgacaaaactagtgcaactttgcaatttagaaagttagcagattgtgattttctcaagagaaactttaagcagatgtctaatgttttgtgggtggctcctgaggacaaggcgagtttatggtcacaacttcattatgtttcgtgtaataatctggaaatgcaagaagcttatcttgtcaatctcgtaaatgtgttacgagaattgtatttgcacagtccagaggaagctcgcca

SEQ ID NO: 130996 - DNA, 273 bp, Glycine max
  unsure (1)..(273): unsure at all n locations
cttaaacgagaatcccgagaattattttgcggaagttgagcaagttgcatttaaccctgctcatcttgttcctggtatcgagccatctgccgacccagttctacagtcgcgtcttttctcataccccgacacccaccgccaccgtattggcgtcaactaccaacagctcccagtaaaccagccacgcgtaccttatcgcatgggtaacttccagcgcgacggcagcatggctttctacaaccagggtgcacgaccanactacctctcgtcgct

SEQ ID NO: 130997 - DNA, 274 bp, Glycine max
gccaaggaaaggccataggcattgatcgatttggagcaagtgctccagcaggaaaaatatacaaggagtttggtatcaccaaggaagctgttattgctgctgccaaagaactttcgtagatctatttgttgactttcttttaagttttatctcatctagaacttgtggttttcactggtggtggctttgggttactattacattatttgttttttgagatatcacttttagccacaataaagaagatcagattgttcttgcatattatagtcag

SEQ ID NO: 130998 - DNA, 273 bp, Glycine max
tccaaacccgtgttctgatgcatggagtttggaatttctgaagcgtactggatttcattgcgatatcatttgtgtcactggatggactgccaccccaatgcaggatgttcaggttacaattgattggtttatttcctctcaggaatgtgttcccaggacctattgtgttttaaatccacaaaatccttttgtgttaaataggtggatgggaaaattgactttcccccagggcacttcccgaagtgttaagagaatgcctctttctataggggg

SEQ ID NO: 130999 - DNA, 271 bp, Glycine max
gtcctgcaacaactctgttggctgatgggtgtccatatttgtatgcaatggtgcatgatagttcagtgtctacaataccaggtgattttgtcattggtgtcaagttgacaaccataaacaatatgtgtgcatatgggctcaatcctggtatttcaggttctcgtcttttgggcaccattcctcagtccatttcacagcaaactgtttggaatcaaatggcaacagtgagaacaccattgaattttgattctagcaagcagagcttttgtca

SEQ ID NO: 131000 - DNA, 270 bp, Glycine max
gtttggaatttctgaagcgtactggatttcattgcgatatcatttgtgtcactggatggactgccaccccaatgcaggatgttcaggttacaattgattggtttatttcctctcaggaatgtgttcccaggacctattgtgttttaaatccacaaaatccttttgtgttaaataggtggatgggaaaattgactttcccccagggcacttcccgaagtgttaagagaatgcctctttctatagggggaggagctggtgcaaagaatgcta

SEQ ID NO: 131001 - DNA, 271 bp, Glycine max
gtgtttttaacaaacagcaacagtacagagcattttgatgcatgtaagtggacaaaatcagaaccacattcctgggaattgatcttcccaatagaggtatgtggtcctaataatggttttgaaatgtggagttctgagtgggcaaatcaaacttcatggcatttgagtttccttattgacaatcccaaacagtctacagtttttgatattctcttgggaatctctcaagattttgaaattgctggtaatactcttatgccagctttttctg

SEQ ID NO: 131002 - DNA, 270 bp, Glycine max
gtcaattcttgtgagcgccatcaactcagttcccttgcttccaaagattatggagttggtagggcttggatacactggatggtttgtctaccgataccttctgtttaagtctagcaggaaggagctagctacagacattgaatcactgaagaagaaaattactggaactgaatagagtggtgttagcaggtatcaagtcaagtttatcttctgagcaccatttgtttttgttgtgctgttatcccctgtataagagtcatatgtatccct

SEQ ID NO: 131003 - DNA, 270 bp, Glycine max
tgcagtttggagagattcaggaaaaagttgtattgaaattttcacaagaggaatttcttacagcttggtcaactcaggtgcgtcctgcaacaactctgttggctgatgggtgtccatatttgtatgcaatggtgcatgatagttcagtgtctacaataccaggtgattttgtcattggtgtcaagttgacaaccataaacaatatgtgtgcatatgggctcaatcctggtatttcaggttctcgtcttttgggcaccattcctcagtcca

SEQ ID NO: 131004 - DNA, 266 bp, Glycine max
ggaaaaagttgtattgaaattttcacaagaggaatttcttacagcttggtcaactcaggtgcgtcctgcaacaactctgttggctgatgggtgtccatatttgtatgcaatggtgcatgatagttcagtgtctacaataccaggtgattttgtcattggtgtcaagttgacaaccataaacaatatgtgtgcatatgggctcaatcctggtatttcaggttctcgtcttttgggcaccattcctcagtccatttcacagcaaactg

SEQ ID NO: 131005 - DNA, 268 bp, Glycine max
gctcattagatatagctatgaaaaattactgcgccaggctaaagctccaagtatgtttttacaatccttcaaaaattttgtttctttgtgtgtgtatggtgatgataacttaattagtgttcatgaatatgtcaagccttactttagtggttctaaattgaaaagctttctagctagtcataacatcaccattactgatggtattgacaaaactagtgcaactttgcaatttagaaagttagcagattgtgattttctcaagagaaac

SEQ ID NO: 131006 - DNA, 268 bp, Glycine max
gattttcctgaaaaggaagatcaagaaaaacccaaaaagattgatgccagattgagacaaagaatagatcctcaatacaatgaggttcaggctcagatggaaacaaatttgtttaaattgtctcttgatgatgttgaaactcctaaaggttccatgttggatctgaaaatttctcaatctaaaattgcacttcccaagaacacagttggaggaaccattctgcgtagtgatctattggcaaattttttgacagagggcaattttagag

SEQ ID NO: 131007 - DNA, 265 bp, Glycine max
ggaagactgggatatgcttcattgataccatatgttgagccagttgtgcaagctcaaagtgctgaagtttactttgacttcttccctgtggaggttgatagtcaagagggagttgctcacattggtgaactgaaatctggtgtctatgttccactgcctacaaaaactaatttggtggaaactcctaaggaatggcaactggatctaccttgtgacaaaattcctagtgtcttgactacaactgatgagagattggtaggcacag

SEQ ID NO: 131008 - DNA, 152 bp, Glycine max
gtgtccttttgcatttgtgaactagtatgtagtattttattcacttaaataaagcgcattactatgtgcaatgagtgtgtttaaatataaaaaaaaaaaaaaaaaaaaaaaaaaaaaaaaaaaaaaaaaaaaaaaaaaaaaaaaaaaaaaga

SEQ ID NO: 131009 - DNA, 270 bp, Glycine max
ctcgagccgattcggctcgagactgattccgggaaccagtgttgaagaggcttacaacaagctaatagttgaacttgagaaaagtgttcctacattggttggcattgaatgtcccaaggatgagaaacttcctcgtcgcaaaatttttgacaaacctaagacgcgctgcttcactattctccctatggagtttaatcttgtggtccgtcaaaagtttttaaattttgtgaggttcattatgaagaaaagggacaaacttagttgtcaagt

SEQ ID NO: 131010 - DNA, 269 bp, Glycine max
ctcgagccgtgaccttctcggtggaggaatcttagtggacaaaactggagattggatcacacttatacaaaattctccaattagtaacttgttgagagttgctgcttggaagaaaggctgtttaatggtcaagattgtgatgtctgggaatgcagtagtcaaaaggagtgattgggcctcattggtacaagtgtttttaacaaacagcaacagtacagagcattttgatgcatgtaagtggacaaaatcagaaccacattcctgggaat

SEQ ID NO: 131011 - DNA, 270 bp, Glycine max
gaggaaccattctgcgtagtgatctattggcaaattttttgacagagggcaattttagagcaagtgttgatttgcagcgcactcatcgtattagaggaatgattaaaatggtggccacagttggtattcctgagaatacaggtatatcattggcctgtgctatgaatagttcttttagggggcgcgccagttctgatatttacaccatctgctctcaagactgtgaattgtggaatcctgcttgcacaaaagcaatgactatgtcattta

SEQ ID NO: 131012 - DNA, 273 bp, Glycine max
attcttcagaagattttcctgaaaaggaagatcaagaaaaacccaaaaagattgatgccagattgagacaaagaatagatcctcaatacaatgaggttcaggctcagatggaaacaaatttgtttaaattgtctcttgatgatgttgaaactcctaaaggttccatgttggatctgaaaatttctcaatctaaaattgcacttcccaagaacacagttggaggaaccattctgcgtagtgatctattggcaaattttttgacagagggcaatt

SEQ ID NO: 131013 - DNA, 271 bp, Glycine max
atcaaatggcaacagtgagaacaccattgaattttgattctagcaagcagagcttttgtcagttttctattgaccttctcggtggaggaatcttagtggacaaaactggagattggatcacacttatacaaaattctccaattagtaacttgttgagagttgctgcttggaagaaaggctgtttaatggtcaagattgtgatgtctgggaatgcagcagtcaaaaggagtgattgggcctcattggtacaagtgtttttaacaaacagcaa

SEQ ID NO: 131014 - DNA, 267 bp, Glycine max
cttttgtcagttttctattgaccttctcggtggaggaatcttagtggacaaaactggagattggatcacacttatacaaaattctccaattagtaacttattgagagttgctgcttggaagaaaggctgtttaatggtcaagattgtgatgtctgggaatgcagcagtcaaaaggagtgattgggcctcattggtacaagtgtttttaacaaacagcaacagtacagagcattttgatgcatgtaagtggacaaaatcagaaccaca

SEQ ID NO: 131015 - DNA, 267 bp, Glycine max
gctggaagcaaaggaagactgggatatgcttcattgataccatatgttgagccagttgtgcaagctcaaagtgctgaagtttactttgacttcttccctgtggaggttgatagtcaagagggagttgctcacattggtgaactgaaatctggtgtctatgttccactgcctacaaaaactaatttggtggaaactcctaaggaatggcaactggatctaccttgtgacaaaattcctagtgtcttgactacaactgatgagagattg

SEQ ID NO: 131016 - DNA, 267 bp, Glycine max
gaaattttcacaagaggaatttcttacagcttggtcaactcaggtgcgtcctgcaacaactctgttggctgatgggtgtccatatttgtatgcaatggtgcatgatagttcagtgtctacaataccaggtgattttgtcattggtgtcaagttgacaaccataaacaatatgtgtgcatatgggctcaatcctggtatttcaggttctcgtcttttgggcaccattcctcagtccatttcacagcaaactgtttggaatcaaatggc

SEQ ID NO: 131017 - DNA, 269 bp, Glycine max
cacaacttcattatgtttcgtgtaataatctggaaatgcaagaagcttatcttgtcaatctcgtaaatgtgttacgagaattgtatttgcacagtccagaggaagctcgccaattgagaaggaaagctctctctcgtattgaatggctgcaaaaagctgatgtgcctaccatagcacagattgaagagttccattcgatgcagaggatgatgaatgctcctgattcaaatgataatattgatttactgttgagcattgatttgttgggt

SEQ ID NO: 131018 - DNA, 265 bp, Glycine max
gtgagaacaccattgaattttgattctagcaagcagagcttttgtcagttttctattgaccttctcggtggaggaatcttagtggacaaaactggagattggatcacacttatacaaaattctccaattagtaacttgttgagagttgctgcttggaagaaaggctgtttaatggtcaagattgtgatgtctgggaatgcagcagtcaaaaggagtgattgggcctcattggtacaagtgtttttaacaaacagcaacagtacag

SEQ ID NO: 131019 - DNA, 266 bp, Glycine max
actcgagccgattcggctcgagattgaattttgattctagcaagcagagcttttgtcagttttctattgaccttctcggtggaggaatcttagtggacaaaactggagattggatcacacttatacaaaattctccaattagtaacttgttgagagttgctgcttggaagaaaggctgtttaatggtcaagattgtgatgtctgggaatgcagcagtcaaaaggagtgattgggcctcattggtacaagtgtttttaacaaacagc

SEQ ID NO: 131020 - DNA, 266 bp, Glycine max
gggaaaattgactttcccccagggcacttcccgaagtgttaagagaatgcctctttctatagggggaggagctggtgcaaagaatgctattctcatgaatatgccaaatgctgttctttcaatgtggagatattttgttggagatctcgtctttgaagtttctaagatgacttctccctacattaaatgtacagtctctttcttcatagcatttggaaatttggctgatgataccatcaattttgaggcttttccccacaagctgg

SEQ ID NO: 131021 - DNA, 265 bp, Glycine max
attgagagttgctgcttggaagaaaggctgtttaatggtcaagattgtgatgtctgggaatgcagcagtcaaaaggagtgattgggcctcattggtacaagtgtttttaacaaacagcaacagtacagagcattttgatgcatgtaagtggacaaaatcagaaccacattcctgggaattgatcttcccaatagaggtatgtggtcctaataatggttttgaaatgtggagttctgagtgggcaaatcaaacttcatggcatttg

SEQ ID NO: 131022 - DNA, 268 bp, Glycine max
aaataggtggatgggaaaattgactttcccccagggcacttcccgaagtgttaagagaatgcctctttctatagggggaggagctggtgcaaagaatgctattctcatgaatatgccaaatgctgttctttcaatgtggagatattttgttggagatctcgtctttgaagtttctaagatgacttctccctacattaaatgtacagtctctttcttcatagcatttggaaatttggctgatgataccatcaattttgaggcttttccc

SEQ ID NO: 131023 - DNA, 268 bp, Glycine max
ggaatcttagtggacaaaactggagattggatcacacttatacaaaattctccaattagtaacttgttgagagttgctgcttggaagaaaggctgtttaatggtcaagattgtgatgtctgggaatgcagcagtcaaaaggagtgattgggcctcattggtacaagtgtttttaacaaacagcaacagtacagagcattttgatgcatgtaagtggacaaaatcagaaccacattcctgggaattgatcttcccaatagaggtatgtg

SEQ ID NO: 131024 - DNA, 271 bp, Glycine max
attggtacaagtgtttttaacaaacagcaacagtacagagcattttgatgcatgtaagtggacaaaatcagaaccacattcctgggaattgatcttcccaatagaggtatgtggtcctaataatggttttgaaatgtggagttctgagtgggcaaatcaaacttcatggcatttgagtttccttattgacaatcccaaacagtctacagtttttgatattctcttgggaatctctcaagattttgaaattgctggtaatactcttatgcca

SEQ ID NO: 131025 - DNA, 269 bp, Glycine max
cttctccctacattaaatgtacagtctctttcttcatagcatttggaaatttggctgatgataccatcaattttgaggcttttccccacaagctggtgcagtttggagagattcaggaaaaagttgtattgaaattttcacaagaggaatttcttacagcttggtcaactcaggtgcgtcctgcaacaactctgttggctgatgggtgtccatatttgtatgcaatggtgcatgatagttcagtgtctacaataccaggtgattttgtc

SEQ ID NO: 131026 - DNA, 268 bp, Glycine max
gcatgtgctgctgttggcttgacatcaagttacactccaactccattgttggaatctggtttgcaaaaagacagagggttaattgcggagtattttggaaggatgtcttacgttgctcataacgttaatcagccccaagagaaagatttgttggagggaaatttttcctttgatattaaatctcgctctagattggaaaaagtttcctctacaaaagcacaatttgttagtggaaaaccttcaaatatgatataattggtgctggttc

SEQ ID NO: 131027 - DNA, 104 bp, Glycine max; identical to SEQ ID NO: 130008

SEQ ID NO: 131028 - DNA, 266 bp, Glycine max
ctcgagccgaatcggctcgaggcaacagtgagaacaccattgaagtttgattctagcaagaagagcttttgtcagttttctattgaccttctcggtggaggaatcttagtggacaaaactggagattggatcacacttatacaaaattctccaattagtaacttgttgagagttgctgcttggaagaaaggctgtttaatggtcaagattgtgatgtctgggaatgcagcagtcaaaaggagtgattgggcctcattggtacaagt

SEQ ID NO: 131029 - DNA, 260 bp, Glycine max
gtgcatatgtgctcaatcctggtatttcaggttctcgtcttttgggcaccattcctcagtccatttcacagcaaactgtttggaatcaaatggcaacagtgagaacaccattgaattttgattctagcaagcagagcttttgtcagttttctattgaccttctcggtggaggaatcttagtggacaaaactggagattggatcacacttatacaaaattctccaattagtaacttattgagagttgctgcttggaagaaa

SEQ ID NO: 131030 - DNA, 264 bp, Glycine max
cttgttgagagttgctgcttggaagaaaggctgtttaatggtcaagattgtgatgtctgggaatgcagcagtcaaaaggagtgattgggcctcattggtacaagtgtttttaacaaacagcaacagtacagagcattttgatgcatgtaagtggacaaaatcagaaccacattcctgggaattgatcttcccaatagaggtatgtggtcctaataatggttttgaaatgtggagttctgagtgggcaaatcaaacttcatggca

SEQ ID NO: 131031 - DNA, 263 bp, Glycine max
ctttgaagtttctaagatgacttctccctacattaaatgtacagtctctttcttcatagcatttggaaatttggctgatgataccatcaattttgaggcttttccccacaagctggtgcagtttggagagattcaggaaaaagttgtattgaaattttcacaagaggaatttcttacagcttggtcaactcaggtgcgtcctgcaacaactctgttggctgatgggtgtccatatttgtatgcaatggtgcatgatagttcag

SEQ ID NO: 131032 - DNA, 263 bp, Glycine max
ggtggctcctgaggacaaggcgagtttatggtcacaacttcattatgtttcgtgtaataatctggaaatgcaagaagcttatcttgtcaatctcgtaaatgtgttacgagaattgtatttgcacagtccagaggaagctcgccaattgagaaggaaagctctctctcgtattgaatggctgcaaaaagctgatgtgcctaccatagcacagattgaagagttccattcgatgcagaggatgatgaatgctcctgattcaaatg

SEQ ID NO: 131033 - DNA, 263 bp, Glycine max
ttttgggcaccattcctcagtccatttcacagcaaactgtttggaatcaaatggcaacagtgagaacaccattgaattttgattctagcaagcagagcttttgtcagttttctattgaccttctcggtggaggaatcttagtggacaaaactggagattggatcacacttatacaaaattctccaattagtaacttgttgagagttgctgcttggaagaaaggctgtttaatggtcaagattgtgatgtctgggaatgcagca

SEQ ID NO: 131034 - DNA, 263 bp, Glycine max
aaatttgtttaaattgtctcttgatgatgttgaaactcctaaaggttccatgttggatctgaaaatttctcaatctaaaattgcacttcccaagaacacagttggaggaaccattctgcgtagtgatctattggcaaattttttgacagagggcaattttagagcaagtgttgatttgcagcgcactcatcgtattagaggaatgattaaaatggtggccacagttggtattcctgagaatacaggtatatcattggcctgtg

SEQ ID NO: 131035 - DNA, 264 bp, Glycine max
caaaaggagtgattgggcctcattggtacaagtgtttttaacaaacagcaacagtacagagcattttgatgcatgtaagtggacaaaatcagaaccacattcctgggaattgatcttcccaatagaggtatgtggtcctaataatggttttgaaatgtggagttctgagtgggcaaatcaaacttcatggcatttgagtttccttattgacaatcccaaacagtctacagtttttgatattctcttgggaatctctcaagattt

SEQ ID NO: 131036 - DNA, 263 bp, Glycine max
caactctgttggctgatgggtgtccatatttgtatgcaatggtgcatgatagttcagtgtctacaataccaggtgattttgtcattggtgtcaagttgacaaccataaacaatatgtgtgcatatgggctcaatcctggtatttcaggttctcgtcttttgggcaccattcctcagtccatttcacagcaaactgtttggaatcaaatggcaacagtgagaacaccattgaattttgattctagcaagcagagcttttgtcag

SEQ ID NO: 131037 - DNA, 269 bp, Glycine max
aagaagaagaagcaaacaatggccgatcaacttaccgatgaacagatctccgagttcaaggaagccttcagcttgttcgacaaggacggcgatggttgcatcacaaccaaggagcttggaactgttatgcgttcattggggcaaaacccaactgaggcagagctccaggacatgatcaatgaagtggatgctgatgggaatggtaccattgacttccctgagttcctaaatctcatggccaggaagatgaaggacactgattctgagga

SEQ ID NO: 131038 - DNA, 266 bp, Glycine max
gaaaattgactttcccccagggcacttcccgaagtgttaagagaatgcctctttctatagggggaggagctggtgcaaagaatgctattctcatgaatatgccaaatgctgttctttcaatgtggagatattttgttggagatctcgtctttgaagtttctaagatgacttctccctacattaaatgtacagtctctttcttcatagcatttggaaatttggctgatgataccatcaattttgaggcttttccccacaagctggtg

SEQ ID NO: 131039 - DNA, 265 bp, Glycine max
gtatggtacagctaatggtcatgattattggatcgtaaggaattcatggggtcctagctggggagaagatggctacatcaggttagaaagaaatcttgctaacagcagatcaggcaagtgtggaattgcaattgagccatcttatccccttaagaatggtccaaatccacctaatcctggaccatcacccccttcacctgtgaagccaccaaatgtctgtgacaactactacagctgtgctgatagtgctacttgttgctgtatt

SEQ ID NO: 131040 - DNA, 265 bp, Glycine max
gcaccattcctcagtccatttcacagcaaactgtttggaatcaaatggcaacagtgagaacaccattgaattttgattctagcaagcagagcttttgtcagttttctattgaccttctcggtggaggaatcttagtggacaaaactggagattggatcacacttatacaaaattctccaattagtaacttattgagagttgctgcttggaagaaaggctgtttaatggtcaagattgtgatgtctgggaatgcagcagtcaaaag

SEQ ID NO: 131041 - DNA, 265 bp, Glycine max
tgatgatgttgaaactcctaaaggttccatgttggatctgaaaatttctcaatctaaaattgcacttcccaagaacacagttggaggaaccattctgcgtagtgatctattggcaaattttttgacagagggcaattttagagcaagtgttgatttgcagcgcactcatcgtattagaggaatgattaaaatggtggccacagttggtattcctgagaatacaggtatatcattggcctgtgctatgaatagttcttttaggggg

SEQ ID NO: 131042 - DNA, 261 bp, Glycine max
gaaaggctgtttaatggtcaagattgtgatgtctgggaatgcagcagtcaaaaggagtgattgggcctcattggtacaagtgtttttaacaaacagcaacagtacagagcattttgatgcatgtaagtggacaaaatcagaaccacattcctgggaattgatcttcccaatagaggtatgtggtcctaataatggttttgaaatgtggagttctgagtgggcaaatcaaacttcatggcatttgagtttccttattgacaa

SEQ ID NO: 131043 - DNA, 264 bp, Glycine max
cagttctgatatttacaccatctgctctcaagactgtgaattgtggaatcctgcttgcacaaaagcaatgactatgtcatttaatccaaacccgtgttctgatgcatggagtttggaatttctgaagcgtactggatttcattgcgatatcatttgtgtcactggatggactgccaccccaatgcaggatgttcaggttacaattgattggtttatttcctctcaggaatgtgttcccaggacctattgtgttttaaatccaca

SEQ ID NO: 131044 - DNA, 260 bp, Glycine max
atgaagaaaagggacaaacttagttgtcaagttggaatcaacccatactccatggaatggactggtttggccaatagattactgagtaagggcaatgatattctgtgttgcgattatgctagttttgatggtttgattaccaagcaagttatgagcaagatggcagaaatgataaacagtctttgtggtggtgatgaaaaattgatgcgtgaaaggacgcacctgctgttggcttgttgttcaaggatggcaatttgtaa

SEQ ID NO: 131045 - DNA, 259 bp, Glycine max
cagaaccacattcctgggaattgatcttcccaatagaggtatgtggtcctaataatggttttgaaatgtggagttctgagtgggcaaatcaaacttcatggcatttgagtttccttattgacaatcccaaacagtctacagtttttgatattctcttgggaatctctcaagattttgaaattgctggtaatactcttatgccagctttttctgttccacaggctactgccagatcttctgaaaatgcggaatcctctgc

SEQ ID NO: 131046 - DNA, 262 bp, Glycine max
gacctattgtgttttaaatccacaaaatccttttgtgttaaataggtggatgggaaaattgactttcccccagggcacttcccgaagtgttaagagaatgcctctttctatagggggaggagctggtgcaaagaatgctattctcatgaatatgccaaatgctgttctttcaatgtggagatattttgttggagatctcgtctttgaagtttctaagatgacttctccctacattaaatgtacagtctctttcttcatagca

SEQ ID NO: 131047 - DNA, 266 bp, Glycine max
  unsure (1)..(266): unsure at all n locations
tctcgagccgctcgagccgctcgagccggaaattgctggtaatactcgtatgccagctttttactgntccacaggctactgccagatcttctgaaaatgcggaatcctctgcatgatctggaatttgtgttttctttcgcttgttcgtttgtttaattcaataaaggaaattaggcatgaccctcttgttgagtatgctctgcctatttgaaaatttccacacctcttttaattgtcgtaatgatgtgtgaagtgtgtgttatttt

SEQ ID NO: 131048 - DNA, 264 bp, Glycine max
tgggaattgatcttcccaatagaggtatgtggtcctaataatggttttgaaatgtggagttctgagtgggcaaatcaaacttcatggcatttgagtttccttattgacaatcccaaacagtctacagtttttgatattctcttgggaatctctcaagattttgaaattgctggtaatactcttatgccagctttttctgttccacaggctactgccagatcttctgaaaatgcggaatcctctgcatgatctggaatttgtgtt

SEQ ID NO: 131049 - DNA, 264 bp, Glycine max
cttttgtgttaaataggtggatgggaaaattgactttcccccagggcacttcccgaagtgttaagagaatgcctctttctatagggggaggagctggtgcaaagaatgctattctcatgaatatgccaaatgctgttctttcaatgtggagatattttgttggagatctcgtctttgaagtttctaagatgacttctccctacattaaatgtacagtctctttcttcatagcatttggaaatttggctgatgataccatcaatt

SEQ ID NO: 131050 - DNA, 263 bp, Glycine max
gggagtttcttcttggatcttaccctcttgtttgctaatattctcattcttctgtctctgcttcttctccttctgaactaagagatggggttgtctttcaccaagctttttagccggctctttgctaagaaagagatgcgtattctcatggtaggtcttgatgctgctggtaagactaccatcttgtacaagctcaagctgggagaaattgtcacaaccattcccacaattggattcaatgtggagactgtggaatataagaa

SEQ ID NO: 131051 - DNA, 263 bp, Glycine max
cacagagcaagaacactgttccaatacggaatctaaggcaaagcaaggcaaacatcttgaatcatgggttcaacaggtgagactcagattaccccaacccacgtatctgatgaagaagcagcccttttcgccatgcaactagccagtgcttctgtccttccaatgatcctcaaatcagcacttgagcttgatctgttggaaatcatagccaaggctggccctggtgttcatctttcccccactgacatttcttctcagctccc

SEQ ID NO: 131052 - DNA, 263 bp, Glycine max
gttggaaaacaaagtatagagtgaaagaatgggtgagaaaagcaagattttgatcataggaggcaccggctacatcggcaaacatatagtggaagcaagcgcaaaggctggaaatcccacttttgctttggtgagggaatccacactctctgacccctccaaggcacagatcaaccacaattttgaggctttgggcgttaatttggtccgcggggatctgtacgatcatgagaagttggtgaaagctatcaagcaagtagatg

SEQ ID NO: 131053 - DNA, 263 bp, Glycine max
ctttattcgactttgctagagaattagaagaataaacataataccccagatggcttcaaaaacttgttcctcccttgcccttttcctcacactcaacctcgttttcttctcacttgtctctgcatgcggttatacaccatgccctggtccaaacccaaagccaaggcccaaccccaaccctaaccctaaccccaacctctatggctcgtgcccccgtgacgcactcaaactaggtgtatgcgccaatgtgctaaacttggtga

SEQ ID NO: 131054 - DNA, 262 bp, Glycine max
gtcgaaaagttcctctctctctcacacacacacatccggggcatgagactcttcggtataggcagaaaccagagaacattccgcccgaaaaaaagtactccttctggaagtaagggagctcaacttcgaaaacatattgatgccacgttaggtagtggaaatctgagggaagcagtaaagctacctcctggggaggatttaaatgagtggctagctgtcaacactgttgatttcttcaatcaggtgaatctgctttatggta

SEQ ID NO: 131055 - DNA, 261 bp, Glycine max
cgagctccggtgctgttactttgaagaaattagagtgctcaaagcaagcctacgctctgtatacattagcatgggataacaccacaggattctgatcctattgtgttggccttcgggatcggagtaatgattaacagggacagtcgggggcattcgtatttcatagtcagaggtgaaattcttggatttatgaaagacgaacaactgcgaaagcatttgccaaggatgttttcattaatcaagaacgaaagttgggggctc

SEQ ID NO: 131056 - DNA, 254 bp, Glycine max
atttacccccacaacaccccaaaaaccaaggaagcatattactacagaatgatctttgagaggttcttccctcagaactcagctaggctcactgttcctggaggagcaagtgttgcatgtagcacagccaaagctgttgagtgggatgctgcttggtctaacaaccttgatccctctggtagagcagcacttggagtgcacatttcagcctatgaaaaccagaacaacaagggtgtagaaattgagaagataat

SEQ ID NO: 131057 - DNA, 258 bp, Glycine max
cactaatgcagacattgaagaggtacatggctctcttgaacgagatgatgaggatgtctattttgatgatgaatctgcagaagttgttatatctactcagcggttgggagatgaccatgcaagtgggtctctattcacaaattccaactggtttgctttccaagaggatagagatcgggttgccaatgaacgctcaacaggttcccttgcttctccatcacctaatgctgatgaggtttttgtaaaagccagtgggga

SEQ ID NO: 131058 - DNA, 259 bp, Glycine max
gttagctttgtttctgcacttgcgtcccacaccaagtgcaaactcaaaagcacttcgccacctcccagaccctccaagcccaaagcctcgtcttcccttcattggccaccttcgcctcttaaaagataaacttctccactatgcactcatcgatctctccaaaaagcatggccccttattctctctctccttcggctccatgccaaccgtcgttgcctccacccctgagttgttcaagctcttcctccaaacccacgag

SEQ ID NO: 131059 - DNA, 260 bp, Glycine max
acaacacaacacaaccaaatccaacatggtagccattctgaagagacaaagagaaaccgaagccgaggagagcatcataagactggcagaaagtctcatgcaactgtcgcgagtccaacaaaaaagcaagcctcttctcaaaaccttttctccaacggagttcgagtgcaaaacctgtaaccgcaagtttccatcttttcaagcccttggtggtcacagggcgagccacaagaagcccaagttcgaaggtgaagaatcaa

SEQ ID NO: 131060 - DNA, 258 bp, Glycine max
gggttatcgtttctccatttccatttactctctcacttttcagcaatcgtaagcgatgggaaagtcttacccaactgtgagtgctgattaccagaaggccgttgaggaggcgaagaagaagctcagaggcttcatcgctgagaagagatgcgctcctctaatgctccgtttggcatggcactctgctggaacctttgacaagggcacgaagaccggtggacccttcggaaccatcaagcaccctgccgaactggctca

SEQ ID NO: 131061 - DNA, 260 bp, Glycine max
gtgaatttcttgaatgagaggactctaaagggtaccttctatggaaactacaaaccccgcactgaccttccttctgttgtggagaagtacatgaatggggaattggaactggagaaattcatcactcacacagttccattctctgagattaacaaggcttttgattacatgctgaaaggggagtccatcagatgcatcattcgtatgggggagtaaatctatcaaaccaatgatgacatggtccctgtgagggactgagt

SEQ ID NO: 131062 - DNA, 256 bp, Glycine max
cgcacgaatatcttgttgtttggagcgatccgagaaaaactctgtaaacatgttggtttaccaggacctccttacaggtgatgagcttctctctgactccttccgttacaaggaaattgagaatggaatgctgtgggaagttgaggggaagtgggttgttcaaggagcagttgatgtagacattggtgcaaacccttctgctgagggtggaggagaagatgagggagttgatgatgcagctgttaaggttgttgac

SEQ ID NO: 131063 - DNA, 259 bp, Glycine max
cagatatttcattgcaccaatattcaagagcaatggccatgctcaatatcatcgccattgtctcccgcttactcttaatgattccatcccaagccaaaattcccggcgtctattccggtgggccatggcaaagcgctcacgccactttctacggtggcagcgacgcctcaggaactatgggaggggcgtgtaggtacgggaacctatattcccaaggctacggcgtgaacactgcggcactaagcactgctctattcaa

SEQ ID NO: 131064 - DNA, 254 bp, Glycine max
tgcgaagagaaagagagagaagaagcgcttatcgaactcggacggaagcactgagttaactcagagcgagtgatagtgttgctgcgtgatgtctggtggtatcgcccgtggacgcctcaccgaggagcgcaagtcgtggcggaagaaccatccccatggttttgttgcgaaccggagacgctgcccgatggaaccgtgaacttgatggtgtggcattgcactattcccgggaagactgggactgattgggaggg

SEQ ID NO: 131065 - DNA, 258 bp, Glycine max
gtcattttcagggattgagcttggagaagaagctaatgctgaggaagatttgtctgatgatggatcacaggctggagagaagaaaaggaggcttaacatggaacaagtgaagacccttgagaagagctttgagttgggaaacaagcttgaacctgagaggaaaatgcagttggcaagggctcttggcttgcaacctagacaaattgctatatggttccagaacaggagggctaggtggaagaccaagcattggagaag

SEQ ID NO: 131066 - DNA, 258 bp, Glycine max
tcaaaagggagaagaaaaggaaaggaaacaaaacgcacaaaggattattatagcaatggcagaacaaaaccaaaaccagacaactgaagctggaaggcaccaagaggttggccacaagagccttctccagagtgatgctctttaccagtatattctggagaccagtgtctacccaagagaacctgaatccatgaaagaactgagagagttgacagcaaaacacccatggaacatcatgacaacctacgcagacgaagg

SEQ ID NO: 131067 - DNA, 252 bp, Glycine max
cgcgcatgtacctcgcagatcttcttccggcgaccgtgcggcgaatcatttacttcgactccgacctcatcgtcgttgatgacgtggcgaagctctggagcatcgatctccacgcgcgcgtgcttggcgcgccggagtactgccacgcgaacttcaccaactacttcacgcaccgcttctggtcaaaccctagctacgcggcgtcatttaagagacgcgacgcgtgctacttcaacactggcgtaatggtga

SEQ ID NO: 131068 - DNA, 255 bp, Glycine max
tctctctctgattgcttccttttcccttttattttgctctcttctctgcacaacaattccttctcattccagatattccaaccatcgaccgatctcaattctcaaccttaacctctcagaatgtcttacgcttatctcttcaaatacatcatcatcggtgacaccggagttgggaagtcttgtcttctacttcaattcacagacaagcgctttcagcccgtccatgacttgaccatcggtgttgaatttggtgcc

SEQ ID NO: 131069 - DNA, 257 bp, Glycine max
cagaaaaacggaaggagttttatacaaaattagaggaaaagcagcaagcaatggaagctgagaagaatcaaagtgaagctaggaccgcggaagagatggaggaagctatcaagcagctaaggaagagtctaacttttaaagcaagccctatgccaagcttttaccatgaagggccccctcctaaggttgaattgaagaagctaccagcaacgcgagcaaaatctccaaagctgggccggcgaaagagcaacaatggt

SEQ ID NO: 131070 - DNA, 250 bp, Glycine max
tggaaagggtattcttgctgctgatgagtcaacagggacaattggcaagcgtttggccagcatcagtgtagagaatcttgaatccaacaggcgtgctcttagggagctgcttttcaccgctcccggtgctcttaaatatctcagtggtgtcatcctctttgaggaaactctctaccagagcacagctgcaggcaagccctttgtggaagtcttgaaggaggctggtgttcttcctggcatcaaggttgac

SEQ ID NO: 131071 - DNA, 250 bp, Glycine max
cggctcgaggtttatgaggcctttgggttgactgtggttgaggccatgacttgtgggttgccaacgtttgccacatgcaatggtggtcctgctgagatcattgtgcatggaaaatctggttaccacattgatccttaccatggtgaccatgctgctgagatccttgttgagttctttgagaagagcaaggctgatccatctcactgggacaaaatctcccagggtggactcaagcgtattcatgagaagt

SEQ ID NO: 131072 - DNA, 251 bp, Glycine max
ggaatttcgatgctcagtcatctcttttaccattctcttctctcttgctcttgcaggagagagccatgtccatgcatcgctacctgaggaagattattgggaagctgtttggccaaacactcccattcccactgcactgcgagagcttctaaagcctctacctgcaggtgttgaaatcgatgaactccctaagcaaattgatgatacacagtacccaaaaacattcttctaaaagaagacttccaccaggc

SEQ ID NO: 131073 - DNA, 250 bp, Glycine max
ctggtgcaagtgttgattcagctagacggaaccttgctgcaacttttgttaatgcatttgtaaatgctggctttggtcaggataaattaatgactgttccatcagattcttcaagcagtgcttcttctggaaattggctttccaaaaataaggaacatgggaagactagtgctgcagctcgtctgggtatgattttactctgggatgttgactcgggacttgctcaatttgacaagtacttccatagtaa

SEQ ID NO: 131074 - DNA, 254 bp, Glycine max
cgaaacgcagcaagcctaatgccggtgaggggaatgaaaatggccaagttaaggcagaggaagagtccaaagggggtaatagtaatgcaaatgatgagaaacagaacaagagctaatcaaaacctcctgaacctaccaaaggattacattcatgttagagcaagaagaggtcaagccactgatagtcatagtcttgcagaaagagttcggagggagaaaatcagtgaaagaatgaagcttctccaagatcttgt

SEQ ID NO: 131075 - DNA, 198 bp, Glycine max
cttctattctattccatcatcaatggagaagaccgagggatgcggatctgcgacgaacggggtgctggctccgccgggcaaagtggcgttgataaccggaattaccggacaagacggttcgtacctgacggaattcctcctggacaaggggtacgaggtgcacggcctgatccgccgctcgtcgaacttcaacacgca

SEQ ID NO: 131076 - DNA, 177 bp, Glycine max
gctgaagggaacaacaaaaggaggtgtaatgggaggggacagagagagagttggggattgggagtgcagcagttgcaacaacaggaactacgccttcagatcactctgcaaccgatgcaagctaccccgcctccacgtcgacaccaaaaccccctctgattccaagtggctccctcg

SEQ ID NO: 131077 - DNA, 246 bp, Glycine max
ctctctctatctctcacacacactttctctctctctctctctcacccagatcttgtagcaatggcgagcgctcccactccacgcgaagagttcgtgtacatggcgaagctggcggagcacgccgagcgctacgaggagatggtggagttcatggagaaggtctccgcctccgccgagagcgaggagctgaccgtggaggagcgtaacctcctctccgtcgcctacaagaacgtgatcggcgctcgc

SEQ ID NO: 131078 - DNA, 247 bp, Glycine max
gcgaagtcgtaggagggtttcaaaagatggcgaacatgcagagcttctggcaattgggcgatgaactccgtggacactcaaaagcatcggaggatcacaaatggttcatggttgcctcgaaattggcggaacagccaagattgaagggggagcgtgtgaacaaccttgatctttcaaagggccccattgaaacaaggtcaagggatacatttgggttccaggcagagaacaaatttgattctcttaa

SEQ ID NO: 131079 - DNA, 249 bp, Glycine max
ctgagagggctttgttcttatggaataatgatcacattgagaccttaatcaagcagaactacaaaattatacttcccgttgtcttacctgctctggagtataacgcccgaaaccactggaaccaggctgtccagagcttgacaataaatgtccgcaagatattcgcggacactgaccctgaattctatgaagagtacatgatcaaagttcgggaaaatgaagcgcaagagaaggatatgaagtcaaagc

SEQ ID NO: 131080 - DNA, 257 bp, Glycine max
agcacaagcacttagaattaagttagtagcgagagcgggagatatgtaggttgtttacttacttcgttgtgctattggctttggcatcctccattgcctttgcttatgatcctagccccctgcaagaacttttgtgtggctatcactgataccaaaactggtgtgttcgtgaatggccaattttgcaaggatccaaagcttgctaaggctgaagatttcttctttcctggattgggacccggagacacttcaaaccc

SEQ ID NO: 131081 - DNA, 249 bp, Glycine max
atcttgagagcatttcaagcgtgaccctaatcaaagacggatctaactcaactacttgaatgttggaagttactacttcagcacaagaacttactttgggtttgattttaatgacttgtacaagaattctgatctatataggatgaacaagcagcttatatcagaactgggtcaacccactcccggttcacaggatctttatttccctactcaataactctcagtcattcttggtccaatgccaagctt

SEQ ID NO: 131082 - DNA, 250 bp, Glycine max
atttgaaccaagtgaagttgagttacaagcttataaaatgggtttttcttggataagagggaagtgcattggtaagggcgcgtttggcaccgtcagcgtcgcgcttcgcaaacgcgacgatcaaactcaaaatttcgcggtgaagtccgtggatttaaaaacgggtctcccgggtcagctcgaagcgttggagaatgagattcggattctccggcgcatgtcctctccgcacgtggtaacttttctcggc

SEQ ID NO: 131083 - DNA, 247 bp, Glycine max
cgccgctctctctcgctcctgcctctacttctcaacccaatccgaggatgctacatggatcaaaaagaaggttgaggacataatgccaatcgctactggccacgagcgcgaggagcttcaggctgagctcgagggaaggaatattcttgaaatagaccatcccgaaggtccattcggcacaaaggaagcacctgctgttgtcaaatcttactatgataaaaggatagtcggatgcccaggaggtgaa

SEQ ID NO: 131084 - DNA, 250 bp, Glycine max
caccttttaagggtcttggcgatgccggtgtggaggctgccaagtcttctcaagaaagcagtgctgctgtcgttcttgcctcttctgaaggactgtctgctcaatcaaagcttagcagtgcttatgcaattgcttctggggctgtgctgggattatttgaagataatagatacaagtcagaagcaaagaaatcaacacttaggtccattgatattattggtcttgggatgggacctgaactggagaagaa

SEQ ID NO: 131085 - DNA, 244 bp, Glycine max
caggttcgaatcctgtccccgcctaatcatctgaggccgtagtcagcctccatctttcagattcggctgtaactcagtgagtgctttcctgttcccatggctttcttgattggtaaacccatccagcgatttacaacaaacaagtctttcgtctccctatggtcgagatactagtaacctcttgttggaggaatcagttaaaaaatgaacgaaagcaaatgaacttcgaatggctattccacac

SEQ ID NO: 131086 - DNA, 272 bp, Glycine max
ccagaatcggtgtaggttacaggtttaagggttttgttttcatttaggtcactaatccgatatcatgaagctcgatacgactagtctcgaatcgtttcccacactgattgcacctcaaaacgacgtcgccggagaactctccgccgctccgtcctttgaccttccgaattccaatgacttcgatgggttcttgaaagacgctattcagatggtgaagcccgcgaagggtactacaactcttgcttttatatttaaagagggtgttatggtag

SEQ ID NO: 131087 - DNA, 272 bp, Glycine max
gtttgtttcccttctttctttccacgcacactcacactacaatggcaatttctgttgctttaattttgggtctatgtttagcaatgaacatggccctgccgacaggtgcagctacccacacggtgggagacacctcaggttgggcactcggtgttgattacagcacatgggctagtggcttgaaatttaaagttggtgatagtcttgttttcaattatgggactggtcacacggtggacgaagtaaaagaaagcgattacaagagttgcaca

SEQ ID NO: 131088 - DNA, 267 bp, Glycine max
  unsure (1)..(267): unsure at all n locations
gtgcaaacatctagagaagagagatgcttccgaatgtggatcaatagtcttggaatttccacacaacatacgatacacnananagctgtcanaactggatggatacttttagaagtgttaccctcgatatttcctggatcagttaactggacacatgcaacaagtaccccaattagaatgccattcagaaaagtagagaactgcaatcaggtcataaaaattggtaaacaactgagattctcactagtcaatgtagctggtcatgac

SEQ ID NO: 131089 - DNA, 267 bp, Glycine max
gatgagcttgattctgtatctaccgccaaggttgctttagctgaaacagaggtccgaaaaattcccaatgaaactgctaagcatgcaaatggtgaacatcaagcagaagaaaatagtaatgacctcatatgggctgatccaggttcatgctgttatgcactgtatgcaaagttgaaccctgatacagttctcttgcatcaatcacctttggcccttgcgaaagctttaaagaactcggtggaattggacgggttaaagaaggcacat

SEQ ID NO: 131090 - DNA, 270 bp, Glycine max
ttatcataaactgaaattttagctgttatattaccatctctccaacggcttcatggtagtttggagaagttggaggttgttaaagaagaaggccagtcaagcatagaaggtccaagttatggcaagaaggtcattgaagaaggtgtgaaactaacggccaatgttgatttgcaaagagaagatgaatgtgggatttgcttagagccttgcaccaaaatggttttacctggttgctgccatgccatgtgtattaaatgctaccgcaagtgg

SEQ ID NO: 131091 - DNA, 258 bp, Glycine max
catagtcatgacagttctctctacggcgtcccaaagttctcacgtggcggtagtcacgatagtgctgggaatacatgctaagcacattatgctacatgtccaaggttaggaaccaagaaggggtcgcaaattgagatgagatccttgcgaatgcagatgcagtcatcgcggcacgtggtgacctgagactggccatgccagtagtgtcgatatcactcgcacaggacgtgatgattcgcaaggtcgacatcgatggga

SEQ ID NO: 131092 - DNA, 242 bp, Glycine max
ctcgagccgctcgagccgctcgagccgattcggctcgaggtacggtgggagaactgaaggtgagcagtaacggtcatggatgttgcaaatcagggccaggctatgcttccccacagtaagccatctctggtcccagagagtctctcatttatgtaacctctgtctacacagggaccggaatagagaagccacactatttgacgacagtggatgtggatccaaactctccatgttattccaaa

SEQ ID NO: 131093 - DNA, 269 bp, Glycine max
tcctttctctgtctccatcgtttcgcattgcacaagcactctctctttcccttaccctttttcaggtttcaacgctccaactatccatggcaaaccgctggctcagacccgaggtgtatccactgttcgctgcggttggtgctgctgttgggatctgtggattccaactggttcgtaatatctgcatcaaccctgaagtcagggtgaacaaggagggaaggaaggcaggagttttggagaactttgctgagggagagaagtatgccgag

SEQ ID NO: 131094 - DNA, 269 bp, Glycine max
aaagaattcagctataacaagatacttaaagacgttaagaaagagttctgttgcaatggaacagttgttcaggacccagaactaggacaggttattcaacttcaaggtgatcagaggaagaatgtttctactttcctagtacaggctggtatcgtgaagaaggatcatatcaagattcatggtttctgagcgattggagtctcaagtggcaagccttatctgcctgactatgtgttaggcataatagatagataatcggagttgtgtat

SEQ ID NO: 131095 - DNA, 263 bp, Glycine max
tagggctggaccatctgaggttagggtgattcctccatccagggttgtatctgttgctggaaaggtcataattgcttactgtggttgattttgctgctgaggttgaggaggtctattgtaaatatttgcagcataagctttaggctgctcaattgctccaggttgctgcatggaaaggcaaaggtctgtatggtggtcagcagaggagcacaaaccacaaacccttgcgacaggtacagatttctgattcaaggccagctggg

SEQ ID NO: 131096 - DNA, 155 bp, Glycine max
tttacttttgagtttggtcagcaggaggtatcaccacgcacctcaggaagactctctcacagcagtggccctcttaatggctccctaacagatagccctccggtttctccttctgaaattgacgatttcaagtataaccgttccacacaacatac

SEQ ID NO: 131097 - DNA, 268 bp, Glycine max
caacgccctccactcttctctcaattcctccctcatctctcaagaccaagcccctcatggcgcgcgctccatttccactcaagttgtgaggcaccgaatgaagagtgtgaggaatatccagaagatcaccaaggccatgaagatggttgccgcgtccaagctgcgggccgttcagaccagaactgaaaattcccgcggcctctggcaaccgttcaccgctcttctcggtgacgatcccagtgttgacgttaagaaaaacgttgtcgtt

SEQ ID NO: 131098 - DNA, 270 bp, Glycine max
tggaaaagatggtgtatgcaaattctcagctgaaaatgttgccgttcaagtcattgactcggtcaatatcaccttgggtgctgagaatgaattaaaacatgcagttgcatttgttcggccggttagtgtggcctttcaggtggtgaatgggttccatttctacgagaatggagtatacactagtgacatttgcggtagcacttcccaggatgtgaaccatgccgtccttgctgtggggtatggagttgaaaatggcgtcccatattggct

SEQ ID NO: 131099 - DNA, 267 bp, Glycine max
gcttctaacgcactcttctaaacttaacacaatggagcttagcaaattgacgttagagatcttctcaaaattggagctgcaatggctctcgcactacgaagcatcaaccaaaacgcgcattctcagcattgacggcggaggaaccaccgccattgtcgccggcgcttccctcgtccacctcgaggaccagatccgcgcccaaacctccgatcctcacgcgcaaatcactgattactttgacatcatcgccggcaccggcattggcgc

SEQ ID NO: 131100 - DNA, 265 bp, Glycine max
gaagattctggtgaatgcgttgaaaaggaaaataaagaaattagcgtgaaaaatgttgggtgtgttcagcagctccatagtgtcgccgccggaggagctcgttgccgccggcagccgtacaccgtcgccgaagatgacggcggcggcgctgcggaagtggttcgaggagaagaacccctccgcagtgtcggtggaggtcggagagcatttccagctcgcttatacccaccagaacgagtcgccgtttcagcccagatcctttgct

SEQ ID NO: 131101 - DNA, 263 bp, Glycine max
gtttcttcctttctctgctctttgtcttctctgacacatttggggccttgttgagtgtgtttttgcaagagggtatggctcaggacgttgaggttgctgagcgtggctccttctctgggaaggactaccaggaccctccaccagcaccactcattgatgctgaggagctcacaaagtggtccttttacagggctcttattgctgagtttattgccactttgctcttcctctacattactgtgctcacagttatagggtacaag

SEQ ID NO: 131102 - DNA, 262 bp, Glycine max
gttgtactctggatgtttgcaaaagagggtggttataacagctggaatctgtgtcttgatccaaaacaaagccgagaagaagggagataggtatgaggcaatctacagcttctactttggggactacggtcacatttcagtgcagggttcatacctgacctatgaggacacttatcttgctgtgactggtggatctggcatctttgaaggggcttatggtcaggtcaagctgcatcaaattgtgttcccctttaaactattc

SEQ ID NO: 131103 - DNA, 254 bp, Glycine max
gggtttctctttctctttctctgactgcttcttcactttctctcgttgcaatcgaaaaaaatcatgggcagaaaattcttcgtcggtggcaactggaaatgcaatgggaccactgaggaggtgaagcagattgttactactttaaatgaagctaaagtccctggagaagatgttgtagacgttgttgtgagccctccttttgtgttccttccttttgtaaaaagtttgctgcgccctgatttccatgtctcgga

SEQ ID NO: 131104 - DNA, 260 bp, Glycine max
tctcgagccgattcggctcgagggtggattaattgaaggtattgcggtctatgttaggctgaacgctaactatgcacctagtcactgggtgaaagcagggcaaggacagaaatgggaccagggttatgatgttactgcacgctttttggactattgtgatagtctcaaaagtgggtttgtggcacaacttaacaagttgatgagaactggttatagtgatcaatacttcgttcagttactgggaaaaccggttgatcagc

SEQ ID NO: 131105 - DNA, 261 bp, Glycine max
attttgagagcattgaaggggtgagcaaaatcaaagacggatataacccagctacttggatgttggaagttacaacttcagcacaagaacttagtttgggtgttgattttactgacttgtacaagaattctgatctatataggagaaacaagcagcttatacaagaactgggtcagcccgctcctggttcaaaggatctttatttccctactcaatactctcagtcattcttggtccaatgccaagcttgcttatggaagc

SEQ ID NO: 131106 - DNA, 257 bp, Glycine max
gggatttgcttgctccatggaaggttgacaattttggcacagtaaacctcgttgaagcatgcaggaaacgtaatgttaacagattcattcttatcagttccattttagttaatggagctgctatgggacaattattcaatccggcttacatctttcttaatgtttttggactcaccttagtagcaaaactacaggcagagaaatatatcaggaaatccggtataaactacacaataataagacctggtgggttgaga

SEQ ID NO: 131107 - DNA, 261 bp, Glycine max
cttactacagatactcaacagtggtgactaacaaatctaacaagagtctcaattctctcaatctttcaatatccaagctttatggtccaatctggggtgtcacaaaatcaggtgattcatacacattcccatcatggctcagctcattatcagcaggcaaaagccttgaatttgtctacatccattctgcttcagcagcagatgtctccgtgacaaactacgtgttggcctgagagtgacatgggaatggtttactgcttt

SEQ ID NO: 131108 - DNA, 259 bp, Glycine max
gaagagctgcttcatttaacatcattcctagcagcactggagctgccaaggctgttgggaaagtccttcctgctttgaatggaaaattgactggtatggcattccgtgttcccaccgtggatgtctctgttgttgacctcacggtgaggctggagaaggaagcctcatatgatgaaattaaaaatgctatcaaggaggaatcagagggcaagttgaagggaattcttggttacactgaagatgatgtggtctccaccga

SEQ ID NO: 131109 - DNA, 246 bp, Glycine max
  unsure (1)..(246): unsure at all n locations
aatcaatcttctgcgagtgtttggttgaaagtagcttangatgttcctttcgggcaaaagggtcagaagatagaggggactatggtgactatgcagaagaatgtgttggatatcaacagcatcaccagtgttggagtgatcgttgaccaaggcttaggcttcataggcagtgcagtcgatgcacttacttttgcagccaccaaaatctgcatccagttgattagtgctaccaaggctaatggtggg

SEQ ID NO: 131110 - DNA, 263 bp, Glycine max
gaggttctgcctgaccctacttaagcatgcatattatgtcagtgaagacttggtgtgaagccttggagcttacgttagaagagcaaaaggcccggggctagggtgagctgaggggggacagcgtaagtgagcgaatgtgtgtaagcccagtcaaacatgactgttctaggcggggcgggccacccaccttcgaatggtgttggtcctacggaccgtgaatggattcgcctctggcctctgggcacgtcggaaccgcatgagtt

SEQ ID NO: 131111 - DNA, 251 bp, Glycine max
tttcttcagaaaatttgccatcgtttagggaagcgcgagagccttcgttgttcaagatgagagctaagtggaagaagaagcgcatgaggaggttgaagaggaagcgccgaaagatgagacaaagatctaagtaggtgcttgaacaaggagtggagatgatgtgcttttccatctgctaccagcttcatgacattttatgctgtcatggctcttatgatgatcttgaggtctagtggcgaagggacttccat

SEQ ID NO: 131112 - DNA, 258 bp, Glycine max
gccaagtgaaagtgagaaaaaataaaaatcaaagagcataatgtcagggatcattcacaagattggggagacccttcatgtgggagggcacaagaaggaggaggagcataagggtgagcaccatgctggagaatacaaaggggagcaccatggtgaacacagtagtgagtacaaaggagagcatcatggtgaacacaaagctggagagtaccatggtgagcacaagccagagcacaaagaggggttcctagacaaagt

SEQ ID NO: 131113 - DNA, 255 bp, Glycine max
gcttcttcgagtttcacagccaagtcgtaaaagggtttcaagggatggaaaacatgcagagcttctggcaattgggtgatgaactccgtgggcactcaaaagcatcggaggatcacaagtggttaatggttgcctcgaaactggccgaacagacaagattgaagggggagcgtgtgaacaaccttgatctttcaaagggacccattgaaacaaggtcaagggataaatttgggttccaggaagagaacaaatttg

SEQ ID NO: 131114 - DNA, 257 bp, Glycine max
gtggtttcagtgagtgatcggtgttcacttgatccttcataagtcgtcatcatcatcatcatcatcaccgttgattgaagaagatgccgatcagaaacatcgccatcggaaggcctgaagaggctactcaccccgacacgttgaaggcggggttggctgagttcatctccaccttgatcttcgtgttcgccggttcaggttccggcatcgcctacaacaagctcaccgacaacggcgccgccactcccgccggcctc

SEQ ID NO: 131115 - DNA, 259 bp, Glycine max
gtttccgcaattggttttgaaggtttcgagaaaaggttggaaatatcctttttccagccgggactttttgctgaccctgaaggaaggggtctaagggctcttacaaaatcccagttgggtgagattctaacaccagctgcttgcaccattgtatcttcgctcaaaaacgataatgtcgactcctatgttctatctgagtccagcctctttgtttatgcctacaagatcatcatcaaaacctgtggtactactaagctat

SEQ ID NO: 131116 - DNA, 244 bp, Glycine max
aaaagcgcaaccctctctctcgctgctggtctcccccatttggcattcgcagatcgaatacgagtaatttcactgaatcttattgaagatgtttctcacaagaactgagtatgatcgatgagtcaacaccttttctcctgaaggccgtttatttcaggttgaatatgcaatcgaagccatcaagctgggatcaactgcgattggattgaagacgaaagatggtgttgtccttgcgttgaaaagc

SEQ ID NO: 131117 - DNA, 244 bp, Glycine max
cagcattcgggctttccgctggagtcggagttggcaacgcgttggtgttggagatcgtgatgaccttcggtttggtgtacacagtctacgccactgccgttgaccccaagaagggcaatttgggaattattgctcccatcgccattggtttcattgttggcgctaacattttgttgggtggggccttctccggagcagccatgaaccctgctgtgacatttgggcctgctgtctgagctggacc

SEQ ID NO: 131118 - DNA, 245 bp, Glycine max
tggaagcatcccagcaagtttgggcagttccccagcctcagtgataaacttagccaacaacaagttaagtggaagcatcccagcaagtttgggcttcatgggttctaaaataaaggagattctgttcctcaataaccagttaactggatgcattcctgagggagttggactattcacagagatgcaagttctggatgtgagcttcaactcactcatgggtcatttgccagaccactatcatgcct

SEQ ID NO: 131119 - DNA, 245 bp, Glycine max
gttgagctacaagaagagcttgatattgaagttcttgattatggagaaccagagagaaatgatatggttgagtacttcggtgaacaattgtcaggctttgcctgcaccgttaatgggtgggtgcaatcctatggttcccgttgcgtgaagccaacgatcatctatggtgatgtaagccgcccaaagccaatgaccgtattctggtcatctctggctcagagctttaccaagcgccaatgaaggga

SEQ ID NO: 131120 - DNA, 245 bp, Glycine max
gtttgtttcccttctttctttccacgcacactcacactacatggcaatttctgttgctttaattttgggtctatgtttagcaatgaacatggccctgccgacaggtgcagctacccacacggtgggagacacctcaggttgggcactcggtgttgattacagcacatgggctagtggcttgaaatttaaagttggtgatagtcttgttttcaattatgggactggtcacacggtgacgaagtaaa

SEQ ID NO: 131121 - DNA, 250 bp, Glycine max
  unsure (1)..(250): unsure at all n locations
cagttcttccctattttcctccctagtcaaggagattgctctctgccggttgttttggacgnaggtagatggtgaagatttgctgcattggtgctggatatgtggggggtctaacaatggcagtcattgctctgaagtgcccctccattgaagtggctgttgttgacatctccaaatcccggattgcagcatggagcagtgaccagcttcctatctaggagccaggccttgctggtgtgggaagcaatgt

SEQ ID NO: 131122 - DNA, 248 bp, Glycine max
acaacacaacacaaccaaatccaacatggtagccattctgaagagacaaagagaaaccgaagccgaggagagcatcataagactggcagaaagtctcatgcaactgtcgcgagtccaacaaaaaagcaagcctcttctcaaaaccttttctccaacggagttcgagtgcaaaacctgtaaccgcaagtttccatcttttcaagcccttggtggtcacagggcgagccacaagaagccaagttcgaagg

SEQ ID NO: 131123 - DNA, 245 bp, Glycine max
gtggatgaccccaccagagaagcacctaccatcaccccatgatgtctttgttggcaactggaaacccacaaaaaatgacacattgtccaaaagggtacccggatttggtgccacaataaacttgctctatggggatcaaacttgtggtcagggatcagataatgaggccatgaacaacatcatttcacactatctttattatcttgatctcttgggtgttggcagagaagagcagggcctaatga

SEQ ID NO: 131124 - DNA, 244 bp, Glycine max
gtttgtttggaagacaatctggtacaactcctggatattcctattctactgctaacaaaaacatggccgtgatttgggaggaaaagaccctctatgattacttgctcaaccccaaaaagtatattccaggaacgaagatggtatttcctggtcttaagaaacctcaggaacgtgcagatcttattgcatatcttaaagaatctactgcttaatgattaaattttcatacagtatgcactttgct

SEQ ID NO: 131125 - DNA, 242 bp, Glycine max
actcgagcgattcggctcaggcagacttaacaacagcacaaaccgggttactgtctgttcaagctaccatctctctctctctttcttagtgcctccttgccagaagttaaaatggcccaagaaactttcctattcacatctgaatcagtgaacgaggggcaccctgacaagctctgtgaccagatctccgatgctgtgctcgatgcatgcttggagcaggaccctgacagaaggttgcctgt

SEQ ID NO: 131126 - DNA, 245 bp, Glycine max
  unsure (1)..(245): unsure at all n locations
ttctcttccaatggcgtcttctctttccacccaaccttcgactctagacgctctctccgncttcgcttctctcaattccgatctctcatccctccaccccgcctacctccgactctcactccgtcctcgtcttcccaagagacttcacatacaggcggctgggagtacctatggaaatcactttcgtgttacaacatatggggaatcacatggaggaggtgttggttgtgttattgatggatgtc

SEQ ID NO: 131127 - DNA, 241 bp, Glycine max
atcttctcgaacttcaatctattctcaacacaaaagatcttaataacagcttcttcgtcatgggcatccttggaacaatggcaagaaatttggacacaatagtggggcctggagtgttgcttctttatcctttatacgcatcaatgagggcaattgagagtccttcaaccttagatgatcagcagtggctaacatattgggttttatactccttcaccgccctctttgactttcatgttac

SEQ ID NO: 131128 - DNA, 239 bp, Glycine max
ctcgagcgtgcggcggtccaaacactcttctctgcagcttttgcctacaactcccttcaccatggctgaacaaaccgagaaagcttttctgaagcaaccaaaagtgtttctcagcacaaagaagactgggaagggaaagagacctggaaaaggtgggaaccgcttttggaagtccattgggcttggatttaagactcccagggaagccatcgaaggaacctatattgacagaagtgccc

SEQ ID NO: 131129 - DNA, 242 bp, Glycine max
gatccccgtcgtgatcgagaagacgggccggggcgagcgcgcctacgacatctactcgcgcctcctcgaggaccggatcgtcttcatcggcacgccgatcgacgaccacgtcgcgaacgtcgtgatcgcccagctcctgttcctccagaaggagaacaagcaccaggacatcaacctgtacatcaactcgccgggcgggcatgtcacggcgggcctcgcgatctacgacagatgcagttcgt

SEQ ID NO: 131130 - DNA, 229 bp, Glycine max
ccacaatgaggtgattctactaggccacagtgactcttacacaagagacaagctgatgcaagtgaccatcgcatacaaccatttcggagagggacttatccagagaatgccacgttgtagacatggatatttccacgtggtgaacaatgactacactcactgggagatgtatgctattggtggaagtgctaaccccagcatcaacagccaggggaacagatacaatgct

SEQ ID NO: 131131 - DNA, 240 bp, Glycine max
gtgggctcttcacgagaagatctgatcaaagatgcacttattgcaactagggagtccttgcaaggtgaaaaactcaggagttctgtgtgcacaattgctgtggttggtgttggtgagccattccacattttggatcaggaaactgttcaacagttgattgatacttttgagattgtgagggaggaagaagctgctccagctgaagaagaagctcagccagcagccggacaagatgctccc

SEQ ID NO: 131132 - DNA, 240 bp, Glycine max
gacgacgagggcgcacaactgagctttcattccaaatgtggacgaaccagatgcaggaaacgttgaactcaaagaagaaaggggatgctgcttttcggcacaaggattttaaaactgcaattgatagctatacgatgttcattgatgttggaaccatggtttctccaacggtttatgtacgtcgtagtctatgttatcttatgagcaatatgcccgacgaagcacttaatgatgcaatgc

SEQ ID NO: 131133 - DNA, 240 bp, Glycine max
gcagggttaattccatatcctcatcataatcagtcacctagaaacacgtatcagtgtgccatgggtaagcaagctatgggaaatatagcatttaaccagctgcggcggatggacagtttgctttacctactggtttatcctcaacgacctttgcttacaactaagacaattgagctggttggatatgataagcttggagcggtcgaaatgccacagtagctgtaatgagctaagtggtat

SEQ ID NO: 131134 - DNA, 239 bp, Glycine max
ctgctgcataggaagaaaccctagcctctcaccctccctgcgacacgatgcaaatcttcgtgaaaaccctaacgggtaagacgatcacccttgaggtggagtcttctgacaccatcgacaacgtgaaggccaagatccaggacaaggaaggcatccctccggaccagcagcgcctcatcttcgccggaaagcagctggaggacggccgcaccctcgccgactacaaatccagaaggagt

SEQ ID NO: 131135 - DNA, 239 bp, Glycine max
cattagcatgggtacttcagcaaggcgaggatgttgtacctatccctggaacaactaagattaagaacctggatcaaaacataggtgccttagcagtgaaactgtcagaaaaagacctgagagaaatttctgaggcggttcccattggtgatgtagcaggtggtagatactacaatggattggatcacttttcatggaagtatgctaacacacctccaaaagattcaaaatctcaacct

SEQ ID NO: 131136 - DNA, 236 bp, Glycine max
gaagaagcgcagttcaagcgagtgacagccaccagccatgggtcgtatgcacagccgcggtaagggtatatcctcttctgctttgccctacaaaaggacacctcctagctggctcaagatctcttcgcaagatgtcgaagaaaatatctgcaagtttgcgaagaaaggtttgaccccgtctcagattggtgtcattctcagagattctcacggtattgctcaggtcataacgtcac

SEQ ID NO: 131137 - DNA, 236 bp, Glycine max
actcgagccgaatcggctcggcattcacttcacttgtggttccacactctctctctctccacaccacactgaggcaccacacagtggaaggaaggaacactcaaatcactgaaccagccatggctaccttctccaaggaacgcgagaactttgtatacgttgccaagttagctgaacaagctgaacgctatgatgaaatggtggatgccatgaagaaggtggcgaactggacgttg

SEQ ID NO: 131138 - DNA, 238 bp, Glycine max
actcgagccgaatcggctcgagtcaagtttcagttccaaacaaaacccatcaaagtctttatccctcagtgatcatatattcattcagttctatacaaaatcctcaaaaactcttcctctctgccatgaccatggaatacagaaccttagaactcaacatcatatccgcaaaggacatcaagaatgttaatctcttctccaagatggacgtatacgccgccgtttcctctccggtgac

SEQ ID NO: 131139 - DNA, 236 bp, Glycine max
cttgagctctgcgagatcttgagtcgccgatttgaaaagatgagtaagcttcagagtgatgctttgcgtgaagccatctcaggaatcatggccgattccaaggagaagaatcgcaaatttgtggagaccatcgaactccaaatcggtttgaagaactacgatccacagaaggacaagcgtttcagtggctccgtcaagttgccccacatccctcgccccaagataaaatttgcatg

SEQ ID NO: 131140 - DNA, 238 bp, Glycine max
aagagcatgtggtggatgccttggcgattacaggcgacgaaggacgtgatagcctgcgataagcttcggggagctggcaaataagctttgatccggagatttccgaatggggaaacccaccgcgcaagctgtatcgcatgatgaatacatagtcatgcgaggcgaaccgggtgaactgaaacatctcagtagctcgaggaaaagacatcaaccgagattccgaaagtagtggcgagcg

SEQ ID NO: 131141 - DNA, 256 bp, Glycine max
gaaacaccatactttaaagcccagagtgcaacgtactttgcaaaaaccctaaaccctctctctttctctctcggcgactctgcactcatcaatggcaacgcaatcgttagacgaagaaacaactaagaaagtcatacgacaggttgagttttatttcggcgatagcaaccttctcaccgatggtttcatgaggaatagtatcactgaaagcgaagatggcatgattagtttggcgctgatttgctcgtttaatcga

SEQ ID NO: 131142 - DNA, 243 bp, Glycine max
gatctttttatggtttgggatctcggttccacttgttttcgttggtgcctatgttggttttaagaagcctgcaattgagaatcctgtgaagacaaacaaaattccaaggcagatccctgagcaggcatggtacatgaatccagtcttttcagttctgataggaggaatccttccatttggagctgttttcatcgagcttttctttatccttacttcaatctggttgaatcagttttactacat

SEQ ID NO: 131143 - DNA, 242 bp, Glycine max
gagaaagccgtcgctatcctagtctcttcttcccctctacccatttcagtttcaggatggaatctcaggtgaagcacgcccttgttgtcaaagttatgggtcgtactgggtctagggggcaggtgactcaggttagagtgaagtttttggatgatcaaaaccgacacatcatgaggaacgtgaagggacccgtgagagaaggagacattctcaccctacttgagtctgaaagagaagcaaga

SEQ ID NO: 131144 - DNA, 249 bp, Glycine max
aaattggcgtgaagcataaaccagtatcatgtgaagttcaggcacacaaaggtgacagagtcaaagtacactatcggggaaaactcactgatggaactgttttcgattctagctttgaaagaaataatccaattgaatttgagcttggtactggtcaagtgatcaaaggttgggaccagggattattgggaatgtgtcttggtgagaagcggaagctgaaaataccatcaaaacttggctatggagagc

SEQ ID NO: 131145 - DNA, 250 bp, Glycine max
cataattccaaatggcttcgtctactctcatctgtgacactcagcaatggaaggagttaaaggctcatgctgaggatgtagaaaagactcatttacgtgatttattgagcgatgatgagagatcccagtcaatggtggttgaatttgatggaattctattggactcatcaaggcagcaagccactcttgaaacaagggaaaaactcttcaaattggcagaggttacatccctcaagcaaaagataaacca

SEQ ID NO: 131146 - DNA, 256 bp, Glycine max
ctttgctgatgatgccccccttttaccttctggatttcgcatacttcctcttgaatctggaaaggaagcttccagccccaatcgcacccttgaccttgcatcttcccttgacgttggtcccagtggaaaccgagcttcagatgaatgtgctggaaattccagctatatgagatctgtgatgacaatagcatttgaatttgcatttgaaagccatatgcaagagcatgtagcagctatggcacgtcaatatgttcgg

SEQ ID NO: 131147 - DNA, 248 bp, Glycine max
ctgagctagagcagtaaccgtcatcaccactgccagtacggtaccatggctgtgcttcaatctttcgtttcggtccacccagattctcacttccccatacagaacctcctctacggagtgttcaagccccaatccgcttctcctcctcgtcccggcgtcgccatcggagacttcgtcctcgacctctccgaaatctcttccgctggtctcttcgacggccctctcctcaaaaactccgattgcttcct

SEQ ID NO: 131148 - DNA, 243 bp, Glycine max
ggaaaaagtgcatttgggacagcatacaaagcgacactggaagatggtaaccaagttgctgtgaagaggttgagggaaaagactactaaagggcagaaggagtttgaaactgaggttgctgcacttggcaaaatcagacacccaaatctcttggcacttagagcctactatttaggaccaaaaggagagaagcttcttgtgtttgattacatgaccaaaggaagcctagcatcattccttcat

SEQ ID NO: 131149 - DNA, 243 bp, Glycine max
gtggaacgcagaccgaggcgtttccagttcgaaagggaaatgaaagtgtctttgttggtgaagggtaggtgagagaaacgaaaggggtgtgtgttgggttgaataggtatagataggatcaatgagcaacaacaacgcaggaaaggtggtgtgtgtgacgggtgcttctggtttcatagcttcatggatcgtcaaattccttctccaacgtggttacactgtcagggccaccgttcgctaccc

SEQ ID NO: 131150 - DNA, 243 bp, Glycine max
ccgagaactctgttgtttggccacctactgcagtagatgatgaaaagatggatgtttctacttcaaggaggtatggttcagagagctggatgtcaatggggaggaatgagcctacatattcggatcttctttcaggctttggtaccagtggggatccttctcattcatccctgaaggatcaaatgagccctgcttattctgctagaaagcaatcattggatcatgaaggcaaacttcacatgc

SEQ ID NO: 131151 - DNA, 242 bp, Glycine max
atattttcttccccaaatcgtagatctacggtttaactggagtagtgtggtaagatgggaggtggatttagagtgcttcatttagttaggccgtttctatcgtttcttcctgaagttcaaactgctgacaggaaagtgccatttagagagaaggtcatatacactgtgatctctcttttcattttcctggtttgtagtcagctccctctatatgggatacactcaacaacaggtgctgatcc

SEQ ID NO: 131152 - DNA, 254 bp, Glycine max
attataattcacaatcatcaaagagagagatggtgaacgtggtggaattgcagaaacagttgcagagtgggaatgtgaatgttgatgccaacggggaactcatgtatgtcaaggtcatgaccgatgaacagttggaaactctgaggaagcaaatagcagtttatggcaccatttgtgagcaacttattgagatgcacagaacactctcagctcaacaggatcttgcaggggttagattgggaaacatatactgt

SEQ ID NO: 131153 - DNA, 245 bp, Glycine max
gtgtgagtttaatggcttcattagggctggagattctggcatttccatgtaatcaatttggtgaggaggaacccggaagcaatgatcaaattcaggagtttgtctgcactcgctttaaatctgaatttcccatctttgataagatatgtgacacgcaccaattacaagtttgtccctctgttattgtgctcgattgaagtgaatggagacagtgcttgtcctttgtataagttcttaaagtcagg

SEQ ID NO: 131154 - DNA, 241 bp, Glycine max
gctattcttacctacaataacacaaaccacttgatatagaaggatgttccttgtgagactgaccaacttactcatgtttacacatttatcctccgttcggatgcaacctacagcatcctgattgataatgtggagaagcaaactggtagtctctactctgattgggatcttctccctccaaagacaatcaaggatcctgaggctaaaaaaccagaagattgggatgacaaagaatatattc

SEQ ID NO: 131155 - DNA, 240 bp, Glycine max
ctgcttcttctccttctgaactaagagatggggttgtctttcaccaagctttttagccggctctttgctaagaaagagatgcgtattctcatggtaggtcttgatgctgctggtaagactaccatcttgtacaagctcaagctgggagaaattgtcacaaccattcccacaattggattcaatgtggagactgtggaatataagaatattagctttactgtatgggatgtgggtggccaa

SEQ ID NO: 131156 - DNA, 235 bp, Glycine max
ctcgagcctattcggctgagaacccacacagggtggcttttacgaaaccatgatcgtagagcaaaagtttgtggtgacgattccagagggtttggcgccagagcaagtggcaccattactgtgtgcgggtgtgacagtgtacagtccactggtacactttgggctgaaagagagtgggctaagaggtggaatattggggcttggaggagtgggacacatgggggtgaagatagca

SEQ ID NO: 131157 - DNA, 237 bp, Glycine max
ctcttgcgtcggtgtgtggcaacatgaccgcgttgaaatcatcgccaacgaccaggggaacagaaccacgccgtcttacgtcggattcactgacaccgagcgtctcatcggtgatgcggccaagaatcaagtcgccatgaaccccatcaacaccgtcttcgatgccaagaggttgattggtactagattcagtggactctctgttcagagtgatatcaaattgtggcctttcaaggt

SEQ ID NO: 131158 - DNA, 245 bp, Glycine max
cggctcgaggtttatgaggcctttgggttgactgtggttgaggccatgacttgtgggttgccaacgtttgccacatgcaatggtggtcctgctgagatcattgtgcatggaaaatctggttaccacattgatccttaccatggtgaccatgctgctgagatccttgttgagttctttgagaagagcaaggctgatccatctcactgggacaaaatctcccagggtggactcaagcgtattcatga

SEQ ID NO: 131159 - DNA, 251 bp, Glycine max
ctttgctgatgatgccccccttttaccttctggatttcgcatacttcctcttgaatctggaaaggaagcttccagccccaatcgcacccttgaccttgcatcttcccttgacgttggtcccagtggaaaccgagcttcagatgaatgtgctggaaattccagctatatgagatctgtgatgacaatagcatttgaatttgcatttgaaagccatatgcaagagcatgtagcagctatggcacgtcaatatg

SEQ ID NO: 131160 - DNA, 239 bp, Glycine max
ggagaatttcattgaaggcgctgagcgattcgttggagaatctaggcatcttgatcccggacaaggaccttgctcagatgatcgagagaatcgacatgaacggagacggttgcatagacgtggacgagtttggggacttgtatgagtccatcatggaggagcctgatgaggaggaggacatgagggaggcctttaacgtctttgaccagaaccgcgacggtttcatcaccgtcgaggaa

SEQ ID NO: 131161 - DNA, 237 bp, Glycine max
ggagaatctcattgaaggagctgagcgattcgttggagaatctaggcatcttgatcccggacaaggaccttgctcagatgatcgagagaatcgacatgaacggagacggttgcatagacgtggacgagtttggggacttgtatgagtccatcatggaggagcctgatgaggaggactcgctgagtaaggcctttaacgtctttgaccagaaccgcgacggtttcatcaccgtcgagg

SEQ ID NO: 131162 - DNA, 242 bp, Glycine max
ttgaaaagaaaatcctcacccattttcttcgtagccaaacactctgaaattctcagttatgtcgtggcaagcgtatgtggatgatcacctactgtgtgaaatcgaaggtaaccacctcactcacgccgctatcatcggccaagacggaagcgtttgggctcagagcaccaacttccctcagttcaaacctgaggaaataactgccatcaataatgactttaatgagcctggatcacttgctc

SEQ ID NO: 131163 - DNA, 248 bp, Glycine max
gaagcatttgatcatgccatttatgatggtgttgatgtcatctctgcctcgttgggtgggtctaatccctatcccgaagccttgttcacggatgggatttccataggggcattccatgcagttgccagaaacatagtcgtagtttgactctgctggatatgatggaccagcacctttaagtgtcacaaatgttgcaccctggtccttcaccgttgctgctagtacaatggacagagattttcgcagca

SEQ ID NO: 131164 - DNA, 235 bp, Glycine max
ctgaaattgagttagctaaaagggtgaaagatctctccttcatggagacagggttggatcagtatgctatagcaaaatttgctgaaagttttgaaatgattcctagaactttggctgagaatgctgggttgaatgcaatggagatcatatcttctctgtatgcagaacatgcatctggaaatgccaaagttggcattgatttggaagaaggcgtatgtacggatgtctcaacctt

SEQ ID NO: 131165 - DNA, 235 bp, Glycine max
tcttctttgtcttccatttccaattctctgtgtagaagtcatgtctaagggtcctggtctctactctgacattggcaagaaagccagagatctcctgttcaaggactaccacagtgaccagaagtttaccatcactacctactcacccactggagttgctataacatcctcggggaccaagaaaggtgacctttttgtggcggatgttaacacccagttgaagaacaagaacatc

SEQ ID NO: 131166 - DNA, 239 bp, Glycine max
cgtcgctccgcaccagtttcaccgtacgaatatctttttgtttggagcgatccgagaaaaactctgtaaacatattggtttaccaggacctccttacaggtgatgagcttctctctgactccttccgttacaaggaaattgagaatggaatgctgtgggaagttgaggggaagtgggttgttaaaggagcagttgatgtagacattggtgcaaacccttctgctgagggtggaggagaa

SEQ ID NO: 131167 - DNA, 239 bp, Glycine max
caggtgagttcttagggagctgcttttcactgctcctggtgttcttcaatatctcagtggtgtcatcctctttgaggaaaccctctaccagagcacagctgcaggcaagccctttgtgaatgtcttgaaggaagctggtgtgcttcctggcatcaaggttgacaagggcacagtcgagcttgctggaactaatggagaaaccaccactcagggtctagatggccttggtcagcgttgtg

SEQ ID NO: 131168 - DNA, 240 bp, Glycine max
gtgcaccgtaacggttgtgctgcaggcagagtagagccatggtgcacgtttctttctaccgaaactatgggaaaacgttcaagaagcctcgtcgtccctacgagaaggagcgtttggacgccgagttgaagctggtcggtgagtacgggcttcgctgcaagagggagttatggagggtccagtacgccctgagccgcatccgtaacaacgccagaaacctattgacccttgatgagaaga

SEQ ID NO: 131169 - DNA, 237 bp, Glycine max
gatggcattgctggcctttatcgtggtttcaacatctcatgtgttggaatcatagtgcaccgtggtctttactttggaatgtatgattctctgaaaccagtggtcttggttggtggattgcaggatagcgtctttgcgagttttctcttgggatgggggatcacaataggtgccggcttggcctcttaccccattgatactgtgcgtagaagaatgatgatgacatctggagaagct

SEQ ID NO: 131170 - DNA, 235 bp, Glycine max
cttctggtcatctctggctcagagctttaccaagcgcccaatgaagggaatgcttaccggtcctgttaccattctcaactggtcctttgttagaaatgaccaacctagatctgagaccacctaccagattgctttgtctatcaaggacgaagtggaagaccttgaaaaggctggcatcactgttatccaaattgatgaagctgctttgagagagggtcttccactgaggaaatca

SEQ ID NO: 131171 - DNA, 231 bp, Glycine max
gagaaggccaagaagaagctgacagtttcagaggcacccaatgttcttacagttgcattaaagagatttcagtctgggaaatttgggaagctcaacaagcctattcaatttcctgaaatacttaacttggcacctttcatgagcgggactagtgataaatcacccatatacagattgtatggggtagttgttcacttagatatcatgaatgctgccttttcgggtcactat

SEQ ID NO: 131172 - DNA, 228 bp, Glycine max
  unsure (1)..(228): unsure at all n locations
gtttcgctgtctctcccatcctttcgcattctcaatacccttttgatttgtgaaaggaaagcaaacatggttgaccaggtccaacaccctacaatcatggacaaggttgctggttatttccatcttcgntcacgtnctttatctggtattagaagttatgatggagcctaccgccacccagctatgtaccaaagaccctcttttgggaattacacgaatgcaccattg

SEQ ID NO: 131173 - DNA, 219 bp, Glycine max
cgtggttacacctacatggatgtttgtgaggtctgcccagaaaagttgccaaattatgaacagattatcaaaagcttctttgaagagcatcttcacactgatgaggagatccgcttttgtgctgctggaagtggctattttgatgttagggatcgcaatgaagcttggattcgtgtgtgggtcaagaaaggaggaatgatcatcttacctgccggaatt

SEQ ID NO: 131174 - DNA, 230 bp, Glycine max
ctcattttccctcactttctcgctcgccaaacgcccctctctctcctccaatggccgaccagctcaccgacgaccagatcgccgagttcaaggaggccttcagcctcttcgacaaggactgcgatggttgtattactactaaggaacttgggactgtgatgcggtcactagggcaaaacccaactgaggcagaactgcaggatatgattaatgaggttgatgctgatggc

SEQ ID NO: 131175 - DNA, 231 bp, Glycine max
gaagtgtctgcttcttccgattccggcacgcccccatcaccatggtgaacgttccgaaaacaaagaagacctactgcaagagtaaggtgtgcaggaagcacaccctgcacaaggttacccaatacaagaagggtaaagatagcattgctgcccaaggaaaacgccgttacgatcgcaaacaatctggttatggcggacaaactaagcccgtcttccacaagaaggctaaga

SEQ ID NO: 131176 - DNA, 222 bp, Glycine max
gcaacaaaccccgacttctggaagggatgcatttattagataaaaggtcaacacaggctctgcctgttgctttgatgattcatgataactcgtcggatcgcacggcctttgtgccggcgacgcatcattcaaatttctgccctatcaactttcgatggtaggatagtggcctaccatggtggtgacgggtgacggagaattagggttcgattccggagaggg

SEQ ID NO: 131177 - DNA, 219 bp, Glycine max
cggctcgagcggctcgagcaaagaaggcgtcttcataaacgcctttcttctccgtttccgtatcctcgttcgaaattcgctttttgatctgcgaaaatgagagagtgcatctcgatccacattggtcaggctggtatccaggtcggaaatgcttgctgggagctctactgcctcgagcacggcatcgggccctctgggcaaatgccaagtgacaagaca

SEQ ID NO: 131178 - DNA, 218 bp, Glycine max
ccaaggtcaaacaagtttcgtggaaaccgagagctttcgtttacgagggtttcctgacggaattggaatgcgatcacctgatttccatcgccaaatcggagctgaagagatccgcggtggccgataattagtccggcgagagcaagttgagcgaagtcagaacgagctccggcatgttcattcccaagaacaaggatccaattgttgctggtgtagag

SEQ ID NO: 131179 - DNA, 222 bp, Glycine max
actactgctcgagcgaatcggctcactcgacgtgctcctcttaggacagtatgttaggtacaccagggacttcgtgctggacgtcaacaaagccctcgctgtggaccccaggatcgagatttgcatgctcccggttggtgatggaatcactatctgccgtcggatcaagtgatttctgatcatcataatcgtggaccaccgttgcttcttctgcacacccta

SEQ ID NO: 131180 - DNA, 226 bp, Glycine max
acagcacatagcgggttactttctgttcaagctaccatctctctctctctttcttagtgcctccttgccagaagttaaaatggcccaagaaactttcctattcacatctgaatcagtgaacgaggggcaccctgacaagctctgtgaccagatctccgatgctgtgctcgatgcatgcttggagcaggaccctgacagcaaggttgcctgtgaaacctgcaccaag

SEQ ID NO: 131181 - DNA, 227 bp, Glycine max
  unsure (1)..(227): unsure at all n locations
atttctgaactatgaggagttacctcttgctcctgaagctgcctgtgtaggactagaaatcagagttgttggtaatgatagtggtgaaaaggtttccattttggctggtactcttgctcgattggttagggatgctcctcattataagaaggatgggtataatgacttccacacaacatacaagacaaaaaancagccaaaatggaaaccttttcatcactatcatt

SEQ ID NO: 131182 - DNA, 226 bp, Glycine max
gcttgcatgtctattttcttcttgtgggggattttaacatacccattatatatcaagttaagcgtctccgtgatgggaagagttttgctactaggaaagtggatgcaattcaaaagggaaatgtcatattcactttgctggcttcatttcacaaggaagaagtagggtttcaccaccaggaagtgtctatcccatcagtccctgctccagatacgcttttatcgtt

SEQ ID NO: 131183 - DNA, 141 bp, Glycine max
ccttgtgagcctttgtgccttgaagggaatgactactagcttgcttgttgggtcaatggggcaagctaggtacactactcagattgcaaggtcgcacatgatcccaccctttttcgcatcggttcacccgaaaaccggaac

SEQ ID NO: 131184 - DNA, 215 bp, Glycine max
gcacaatttctctttctctctttttttgtgtgtccaaaatggctcctagttctgctcacaacaatggttactatgtgctatagctagttgggatagtggttagcactatggttgctacctgtgctggtagcttctaccaagactttgatctaacatggggtggtgaccgtgctaagatattcaacggtggccagcttctatcactttccctagac

SEQ ID NO: 131185 - DNA, 217 bp, Glycine max
cacacctggtgcttttgagtgcctcaggggtgtgatcttgtttgcagaaaccctataccaaaagacagcttcaggaaaacccgtcgtagagttgatgaaggaaggaggagtgctccctggtatcaaggttgacaagggcacagtagagcttggcggaactaatggggagactactactcaaggtttggatggccttggcgcccgatgccagaagtac

SEQ ID NO: 131186 - DNA, 142 bp, Glycine max
tagatatatgaatgtgatggacatgaatgcaggccttggaggatttgcagctgcacttgaatcacaaaagtcttgggtgatgaatcttgtgccgtcaattgctgagaacactttgggtgttgtctatgagagaggtctgatc

SEQ ID NO: 131187 - DNA, 215 bp, Glycine max
aactctttcttctcataactctgccgccgcaacagccccaaatccaatggcttcagagaagaaactttcgaacccaatgagggagataaaggtgcagaagctcgtcctcaatatctccgttggcgagagtggagatcgtcttaccagagccgctaaggtgttggaacagcttagtggccaagcccctgtgttttccaaagcaaggtacacggttc

SEQ ID NO: 131188 - DNA, 182 bp, Glycine max
tgaaattgtcagattttggactttgtaaaccattagattgtcgtacacttgaagaaaatgatttttctgtgggtcagaatgtgaatggatctacacaaagctcaacttctaaacgctcacaacaggaacaactgcaacactcgcaaataaacaggagaacacttgcttattccacacaacat

SEQ ID NO: 131189 - DNA, 226 bp, Glycine max
tcgcaagcgaaaagaacgaatcccaggcgaggagaaagatggaggggaaggagcaggatgtgtcgttgggagcgaacaagttccccgagagacagccaattgggacggcggcgcagagccaagacgacggcaaggactaccaggagccggcgccggcgccgctggttgacccgacggagtttgcgtcatggtcgttttacagagcagggatagcagagtttgtggc

SEQ ID NO: 131190 - DNA, 222 bp, Glycine max
gagctatgcagcaggcattcagggaagtgctctggtaaaactaattcatcactgtgttaaacttcagcgcttatggataatggattgcattggagacaaaggactaggtgttgtagctacgacatgtaaagatttgcaagaattgagggtttttccatctgttccctttggggatccagcagctgtcacagaaaaagggctggttgcaatatcaatgggctg

SEQ ID NO: 131191 - DNA, 221 bp, Glycine max
gtcagatcttgaggctcccttgctccctaagaggaagaaggtttgggtggactatttcgttcagtttctatggatccttgttatttttgtggtccttcccatctccttcaccatttatttccttacataccttggggttgtaagatctgagtggaagtcctataagacgcgtcagaaggaacatgatgagaatgtgaagaaggttatcaaacgtctcaaac

SEQ ID NO: 131192 - DNA, 212 bp, Glycine max
ccaggtccagacatagtaaggattgacagactgagagctctttcttgattctatgggtggtggtgcatggccgttcttagttggtggagcgatttgtctggttaattccgttaacgaacgagacctcagcctgctaaatagctatgtggaggtaaccctccacggccagcttcttagagggactatggccgcttaggccacggaagtttgag

SEQ ID NO: 131193 - DNA, 212 bp, Glycine max
taaatgcgtcgtttcagatgaatggaaaggggagtttttccctgacattcccaaaattaaatatgagtgtccgtcaagtaagaatgtgctttcatttaaatggtataatgcagaggaggaaattcttgggaagaagatgaaggattggttaagatttagtgttgcattttggcatacattccgtggcacatgtgctggcggctttggtgcac

SEQ ID NO: 131194 - DNA, 220 bp, Glycine max
caacttctgctacccactctcttcttccaagtccaaccacgcttttctctacagtcatgggcaaggtcaagatcggaatcaacggatttggaagaattggccgtttgcgttgccagagtcgctctgcaaagagacgatgtggagctcgttgccgttaacgaccctttcattaccaccgattacatgacatacatgtttaaatacgacagtgttcacggac

SEQ ID NO: 131195 - DNA, 224 bp, Glycine max
gttggatcaaaatgtttaactttattccgggaatttcaagattccatcacaaaggtacactggaaagcaccttgtttcagtggtgatggtgagtgggtagttggtggttctgctagcaaaggtgagcacaagatttacatatgggatagagctggacatcttgtgaaaatccttgaaggacctaaggaagctctgatagatttagcatggcatcctgtgcatcc

SEQ ID NO: 131196 - DNA, 224 bp, Glycine max
ctcagtcatctcttttaccattctcttctctcttgctcttgcaggagagagccatgtccatgcatcgctacctgatgaagattattgggaagctgtttggccaaacactcccattcccactgcactgcgagaggctctaaagcctctccctgcaggtgttgaaatcgatgaactccctaagcaaattgatgatacacagtacccaaaaacattcttctataaag

SEQ ID NO: 131197 - DNA, 217 bp, Glycine max
ctcgagccgctaaacaggccaactattagcaggagattcatgcctgaaaaggggtctccagaatatgatgcgttggctaagaaccctgagaaggagtttttgacgactattactggcaagaaggagaccctcattgaccttacagttatagaaatcttgtcaaggcacgcatctgatgagttctaccttgggcagagagatggtggtgactactgga

SEQ ID NO: 131198 - DNA, 204 bp, Glycine max
ccacttttgtaccagggctgattgatcttgccatcgcgagggacactttgattggtggagatgacttcaagagtggtcagaccaaaatgaaatctgtgttggttgattttcttgtgggggctggtatcaagccaacatctatagttagttacaaccatctgcgacacaatgatgatatgcatctctcggctccacaaaccttcc

SEQ ID NO: 131199 - DNA, 211 bp, Glycine max
gaacaagggacttggagaggcactttgaaccatatggaaagatagttagtgtgaggatcagaaggaattttgcttttgttcaatatgaatcagaggatgatgctagcagagcactggaagctacaaatatgagcaagttactggatcgagttatttctgttgaatttgctgttaaagatgatgatgataggagaaatggatatcgccctga

SEQ ID NO: 131200 - DNA, 249 bp, Glycine max
gttgaagtaccagcagaagcatcctcataattacatcttgcttgcactcttcaccgtgtctatcagctccaccgtcggagtcacttgcgccaacaccgacgggaaaattgtgcttgaggccttgattttgacctccgctgtggtttcatctcttaccggctatgccttttgggcgtccaagaagggcaaggattttagcttccttggcccagtgttgttcacctccctctttactctcatcctcactgg

SEQ ID NO: 131201 - DNA, 246 bp, Glycine max
  unsure (1)..(246): unsure at all n locations
ctctctcaagccctaatttcccctcatttccatggccacagaagaggcacantgtcgcggtggaacccgctcccgaacctgcctccgccgatcctcccccggaggagaaggaggagaccaaacctgaagccaaggctaagaaaaccaaggagctcaaacctaaaaaggtttccagacctcgcaaccctcccactcatccttcctacgaagagatggttaaagatgcaattacctcgctgaaggaga

SEQ ID NO: 131202 - DNA, 243 bp, Glycine max
cgcacgaatatcttgttgtttggagcgatccgagaaaaactctgtaaacatgttggtgtaccaggacctccttacaggtgatgagcttctcgctgactccttccgttacaaggaaattgagaatggaatgctgtgggaagttgaggggaagtgggttgtaaagggaccagttgatgtaaacattgtgcaaacccttctgctgagggtggaggagaagatgagggagttgatgatgcagctgtt

SEQ ID NO: 131203 - DNA, 243 bp, Glycine max
ctcgaaggatccagatgttggaaaaccaggcacgatatcaagccgatttcaagaatgataaggatgcagccagtatcttgggcaaactcacttctgaagcaggcaatgaagagtgggatgatagcttactgaccaaagaggaagtagaggcaagattgcagaggacggtggaagcaatcatcaaaagcgaaagagcaatggcatttgcatatgcacatcagctatggaaagccactccgaaat

SEQ ID NO: 131204 - DNA, 243 bp, Glycine max
gttccccctcacatgtttatgttgtctcagctagtccccttcgagttctcagtttctcttcatatgtcagggatatgcgtcaaactgttactgtgggagtcatcaagaacgtggagaagaaggatcctactggagccaaggtcaccaaggctgcccagaagaagaagtgaatcgtgcggtttggttcatcaggggatgtcgtttcttatggttacaataaatgttggtttcttgcccttgtgt

SEQ ID NO: 131205 - DNA, 247 bp, Glycine max
gaagttgtaaggagagctttattgaagatggccgaagaagctgacttttttggcgatactgtgccccccaaattgaaagttcctttcatacttaggacgcctgacatgtcagccatgcaccatgacacaagttctgatctgcaagtggttggaaacaagttaaaggatatattagagatctcaaacacatcccttaaaatgaggacgatcgttgttgaactgtgtgacattgttgctactcgcggag

SEQ ID NO: 131206 - DNA, 246 bp, Glycine max
  unsure (1)..(246): unsure at all n locations
ggtcaatgccgaggaagatttgtctgatgatggatcacaagcaggggagaagaagaggaggctcaacatggagcaagtgaagacacttgagaagagctttgagttggggaacaagcttgagccagagaggaaaatgcagcttgcaagagcnttggcttgcagccaagacaatngctatanggttccngaccagaagggctaggtggangcccaagcattggagnaagactatgatgttctcaaaag

SEQ ID NO: 131207 - DNA, 250 bp, Glycine max
actggtcttcgcttctcattcatcatttctcacctaaccttctcgtcctctcagtctcagatcagaaacctccgccagccatggcagcgttccagaagatcaaggtcgtcaaccccatcgtcgagatggacggagatgaaatgactagggttatctggaagtcaatcaaggacaagctcattttgcccttcttggagttggacatcaagtattatgacttaggccttccttaccgtgatgagaccgatga

SEQ ID NO: 131208 - DNA, 236 bp, Glycine max
cctgccagtagtcatatgcttgtctcaaagattaagccatgcatgtgtaagtatgaactaattcagactgtgaaactgcgaatggctcattaaatcagttatagtttgtttgatggtatctactactcggataaccgtagtaattctagagctaatacgtgcaacaaaccccgacttctggaagggatgcatttattagataaaaggtcaacacaggctctgcctgttgctttgat

SEQ ID NO: 131209 - DNA, 234 bp, Glycine max
ccaaaaccggtttgcgttgttgtttgcgaagaaatggcgactaagaggagctcaggaacgttgacggagggtgatttgacagggaagagggtgttcgtgagggtcgatccccacgtgcctttggatgacaaccttaacatcaccgatgacactagagtccgtgctgctgttcccaccatcaagtacttcactggtcatggagccaaagtgatcctttctagccacttgggacgt

SEQ ID NO: 131210 - DNA, 247 bp, Glycine max
  unsure (1)..(247): unsure at all n locations
caccatcctcgtgctcctcgaagctcgaaagcagcagcaacaagaacaacaacaacgttgtctttctcaacacaacatacgatacaaggaagaggaaggaacgatgtcttcgtcatcgggaagcacagcagcagcaacgccgattctgaaggaggaggtggacatgatgattcccagatnacgtaacttcgacttcttggggatgtggaggcccttcttcgagggttatcatttgataatagtgcag

SEQ ID NO: 131211 - DNA, 249 bp, Glycine max
ctccttttagcaagttaacaacacttttgtcttcgttccattatctagttctcaattctcttcacctcttgcctctgaaagaaatgggtagtcttgaagcggaaagaacaacagtaggattggcagcaagagacccttcagggattctctccccatacacctacaatctaagaaacacaggccctgatgatgtttacattaaagttcactactgtggaatttgccattctgatctccaccagattaaaa

SEQ ID NO: 131212 - DNA, 245 bp, Glycine max
caccttttccttttcccttccgttggtgccattcgtgcagcaccggatcctctcatttctccggcgataactctcccttttccggcgaattcaccgcttcctcgatatgaatcccgcgtatgactatctgttcaagctccttctgattggagactctggtgttggtaaatcatgccttcttctaagatttgctgatgattcatacattgagagctcacataagcaccatcggagttgattttaaa

SEQ ID NO: 131213 - DNA, 227 bp, Glycine max
gttaagtgttgagtgcagtgcaggtcatggcctgagattcggttctttacttgttgggttgttctgatcttctctcatagcaatcagctcacactcccatcttctcatctcgtaaaccctaaaccccgttttcagtgacatcgagatccatcgaacatggatgaggagtacgatgtgatcgtgttgggcacgggtctcaaggagtgcattctcagcggtcttctctc

SEQ ID NO: 131214 - DNA, 244 bp, Glycine max
cttgccgctcatgaagccaagaaatcccgtcttcagggtcgcatgccaagagtcattttgttctactgtagatcatcagagcgaccaaagcatcagtggcctgtgaaccagaagctcttcactttggatgttatgtaccttcatgataaacctggaccagataactgcccccaggaggtttacgatacactggtggaggcacttgaacatgttagtgaatatgagggttatatcttggagagtg

SEQ ID NO: 131215 - DNA, 226 bp, Glycine max
gcgctccgttgggcgccgcatcacctttgaggtcagggactacgtcgtgtttgagctgacggcggtgagcttcgatggcgtcgatatcgcgctcttcaacgccggcgactccattagcaagtacttcagtcccatcaccgtcaatccgggaacggtgatcgtcgacaacagataccgcgtttcgaatggacgagaatgtcccattggtaattcccgaatcattccc

SEQ ID NO: 131216 - DNA, 238 bp, Glycine max
cgagtctttgaaatctccctttcaaaccttacactcctcatttcgtttccgtagcagttttctcacacttcaccgctgcttccccttcacctctgatttcgttagtcagagatcaaaatgtctcgaagatatgacagccgtacaacaatcttctcccctgaaggacgtctttaccaagtggaatatgctatggaggctattggtaacgctggtaccgcaatagggatcttatcaaaag

SEQ ID NO: 131217 - DNA, 238 bp, Glycine max
agctagtgtttcaaactcagatgtggtccaaaatgtatctcagggtgtcagagagaatgtgctattttgctcagatttcaatgatcattcagaccagtcagtattttggacattattatctcctgatcaaaatggaattcataactcagcagagacttcgttgtcattgtcattcagtccagttcaacatccgccaattggagttccacagtctgtgggattttcttttcagcctttg

SEQ ID NO: 131218 - DNA, 232 bp, Glycine max
tcaatttctaattagggtttcgcttagagtaaccaataaccatgggagtcttcacctttgtcgtccgcaaatccggcagcgaatggagcgccaagcaacattccggcgacatcgaggcctccgccgattccaccttcgatctccaacggaagctcgtgcaagccgctctcgccgttgattcctccggtggagttcagtcctctttctctcccgtgtctcctacctccgctgt

SEQ ID NO: 131219 - DNA, 234 bp, Glycine max
ctcgagccagtgtatagagaccggtggcgaaggtaaggtggtgcaaacaagcaaaacctaattcgcgaaaatcagatcggcgatcggaggcagaacctgaagctgagcgaagatggttctcgcggagttaggtggtagcatttcgcgtgctcttcagcagatgagcaatgcgacgatcatcgacgagaaagtcctcaacgattgcctcaacgacatcactcgcgcgcttctcca

SEQ ID NO: 131220 - DNA, 234 bp, Glycine max
gtcagcatgtggctgcggcggggtaccctgctcaaggtggtcgtgcggcttccatagaaactgggaccaagctttacatttcaaacttggattatggtgtttccaatgatgatattaaggaattgtttgctgaagtgggtgacttgaaacggcatgcggttcattatgacaggagtggcagatcaaagggtacagcagaagtagtattttcacgacgagctgatgctgtatctg

SEQ ID NO: 131221 - DNA, 187 bp, Glycine max
atgggttcaacaggtgagactcagattactccaacccatgtatctgatgaagaggcaaaccttttcgccatgccactagccagtgcctcagtactccctatggttctcaaatcagctcttgagcttgatctgttggaaatcatagccaaggctggccctggtgttcacctttccccctcggacattg

SEQ ID NO: 131222 - DNA, 238 bp, Glycine max
gaagaaaaaaaggtgaaatatagagtgaagaagaagaaatagagggttttggtgtttgaatcgtgaaaatgttcagaaaccagtacgacacggacgtgacgacatggagcccggcggggaggctgttccaggtggagtacgcgatggaggcggtgaagcagggctcggcggcgatagggctccgatccaagacccacgtggtcctcgcatgcgtcaacaaggctaactccgaactctc

SEQ ID NO: 131223 - DNA, 165 bp, Glycine max
tctgtatgtatgcttgacatatacaagtgggaaatccaatgaaatgtgtggtcctaaaaatggtgcaagattagcaactctctatggagattggcggggtggagttgttttaaactgttttatgggaatacttgccactgattatgtgtaattattgcattatta

SEQ ID NO: 131224 - DNA, 231 bp, Glycine max
tcaatttctaattagggtttcgcttagagtaaccaataaccatgggagtcttcacctttgtcgtccgcaaatccggcagcgaatggagcgccaagcaacattccggcgacatcgaggcctccgccgattccaccttcgatctccaacggaagctcgtgcaagccgctctcgccgttgattcctccggtgagttttcagtcctctttctctcccgtgtctcctacctccgct

SEQ ID NO: 131225 - DNA, 230 bp, Glycine max
gagattacccatagatagagagcgcggcataacctacacttacccttcttctctctgtgtgtgtgcgcatcaaacgcaaccagacacagccatggccactgcaagaactgtgaaggacgtttctcctcatgagttcgtcaaagcttactcttctcacctcaagcgatctggcaagatggagctgccagagtggactgatattgtgaaaactgcaagatttaaggagttgg

SEQ ID NO: 131226 - DNA, 229 bp, Glycine max
cttaaacgatcatctttgaaatctaaggtgcagaggaataaattggccactgctggtgaagcaattgagtatagatgccttatacgtgccactgatgggaaaaagacaatttctacttcggttggaccaaaggatcatcagcgctttcaagcttcttatgcaactatattaaaggcgcatatgactgctctaaagaagagagaaaggcaagacaagaagaagcctgcag

SEQ ID NO: 131227 - DNA, 200 bp, Glycine max
gtcgagccgaatcggctgaagactcaaacttctgctacccactctcttcttccaagtccaaccaggcttttctctacagtcatgggcaaggtcaagatcggaatcaacggatttggaagaattggccgtttggttgccagagtcgctctgcaaagagacgatgtggagctcgttgccgttaacgaccctttcattcccac

SEQ ID NO: 131228 - DNA, 233 bp, Glycine max
cttatacttactggcaaccctgtatgtgctgacactgacgcttccatcggcagcagcagtgtattgggcatttggagacatgcttctaaatcactccaatgcttttgctctccttccaaaatcacccttccgtgacatggctgtcattttaatgctcatccaccagtttataacattcgggtttgcatgcaccccattatacttcgtgtgggagaaagcaatagggatgcacg

SEQ ID NO: 131229 - DNA, 266 bp, Glycine max
gggatcacatgcaattcaaagatgttgttgttaaagttgccaatgtagagttgtactacaaggctgttcacttctacttggaagagcatccagatcttatcaatgatgttctgaacgtccttgcacttcgtgtggaccatgcacgtgttgttgacagcatgcggaaggctggtcacctccgtcttgtgaaacctcatatgcttgcagttcaaagcgacaatgtatctgctgttaatgaagcgttgaatgagatatatgtcgaggag

SEQ ID NO: 131230 - DNA, 264 bp, Glycine max
ccaagaaatccagctgtaagaaatataatcctgaaactaggcccccttatttggttgacccaaaaaagagaaggcagtatgacagtgctggatttgaggcccttgatgcggatagcatggacatggaaattgatttatctaatcttgggactgtgaacacaatgtttacagctttattcagcaaaatgggtgtccctatcaagactaccatttcagctaatgttcttgaagaagcctctaatggaacagttacaatcagacccc

SEQ ID NO: 131231 - DNA, 263 bp, Glycine max
ggttctgcacgctctgcttccagcgagtgttctttcttcgtttcaacaccttaatttgcatacgctgcttcatagaaatgagaaatggcacaagaaacctttctattcacatctgaatctgtaaacgagggtcaccccgacaagctgtgcgaccagatctctgatgcagtgctcgatgcgtgccttgaacaggaccctgacagcaaggttgcctgtgagacatgcaccaagaccaacatggtcatggtctttggagagatcac

SEQ ID NO: 131232 - DNA, 240 bp, Glycine max
gttccccctcacatgtttatgttgtctcagctagtccccttcgagttctcagtttctcttcatctgtcagggatatgcgtcaaactgttgctgtgggagtcatcaagaccgtggagaagaaggatcctactggagccaaggtcaccaaggctgcccagaagaagaagtgaatcgtgcggtttggttcatcaggggatgtcgtttcttatggtctacaataatgttggtttcttgccttgt

SEQ ID NO: 131233 - DNA, 258 bp, Glycine max
gcctcgaatccacacagttctactcagagctctaaaccctctctctctctctctctcgatctatcatggctttgcccaatcagcaaaccgtggattaccctagtttcaaactcgtcatcgtcggtgacggcggtacaggaaagacaacgttcgtgaaaaggcatcttaccggtgaattcgagaaaaaatacgaaccgaccattggagtggaggttcacccattggatttcttcacaaactgcggaaagattcgcttct

SEQ ID NO: 131234 - DNA, 259 bp, Glycine max
gctttgatagctatgatgtttccattcttcaatgacttcctaggcctgattggttcactgtccttttggccattaaccgtttacttccccatagaaatgtacattaagcagtcaaagatgcaaaggttttccttcacgtggacatggctcaagatactgagctgggcttgcttgatcgtttctattatctcagctgctggttccatccaaggcctcgctcaagatctcaagaaatatcagcccttcaaagcccagcaat

SEQ ID NO: 131235 - DNA, 266 bp, Glycine max
gtcattgacaaaagcacacaaagtctcttcccctcataaagcactgattttcacgcagaactcagctttagttcgtgcttcattaacatgggtgctggtgactactacaaaatactgaaggtgaagcatgatgccactgatgaagaagtgaagaaggcttataagaaattggcaatgaaatggcacccagataagaaccttgaagaccctcttaggaaagaagagtttgaggccaagtttaaacaagtttctgaggcctatgatgt

SEQ ID NO: 131236 - DNA, 260 bp, Glycine max
gccttgctgaggaacgaaagtcatggcgcaaaaaccatccacacggtttcgttgcgaagcccgagactctacctgatggcaccgtaaatttgatggtctggcattgcactattcctggcaagaccgggactgattgggagggtggatatttcccactgacaatgcacttcagtgaagattaccctagcaagcctcccaagtgcaaattccctcaaggtttctttcaccctaatgtgtatccatctggaactgtttgcttg

SEQ ID NO: 131237 - DNA, 261 bp, Glycine max
ctgatgttagcatttattccatgcgtactggtcagtacagccgagtttcaaaactcattactctgaagggcaagcaagcaaatgctctgttttggtcacctgccggtcgctacattgtactggctgggttgaaaggcttcaatggacagttggaattttacaacgttgatgaacttgaaaccatggctactgctgaacattttatggcaacagatattgaatgggatccaactggaagatatgttgcaactgcggtgactt

SEQ ID NO: 131238 - DNA, 255 bp, Glycine max
atgcaactgacatggacaatgaattggcagcagccgagtacatcgatgatatctacaaattttacaaagagactgaagaagatggttgtgtgcatgactacatgggttcgcagccagatattaatgccaagatgaggtcaatccttgtggactggttgatagaagtgcataggaagtttgagctcatgccagaaactctttatttgaccttgaacattgtcgatcggttcctgtctgtgaaggctgtgcctagaa

SEQ ID NO: 131239 - DNA, 223 bp, Glycine max
ttctattaatgtgaacctttctttcaggatcttaacttgatcagtgtgcagtgtccaaatcataagggtagatgcaaattgcaatggctaagcatgatgttgagggtggttccttctctgcaaaggactaccatgatcctcctccagcaccgtagatttctgctgaggaactcacacagtggtccttatacatggctttgaaacctgagaaaattgtcaccat

SEQ ID NO: 131240 - DNA, 264 bp, Glycine max
  unsure (1)..(264): unsure at all n locations
ccaacactgagcttaaccgagcttcgcaaagatgaatcgggaaaagttaatgaagatggccggttcggttagagctggaggaaagggtactgtgagaagaaagangaaggctgtccacaagacaacaaccanagatgacaaaaggcttcagagcaccctgaagagaataggggtgaatgccatccctgctattgaagaggtcaatatctttaaggatgacgtagttatccagtttctaaatcccaaagttcaagcatccntgct

SEQ ID NO: 131241 - DNA, 260 bp, Glycine max
gtcgcagctaaaccaagccaaccactaacttgtttggtccacgacatggctctgatcctgcatgcaaccaaaacaaaccagactgtcttcaagactctgattgcggcagagtacagtggcgtccaagtggaattggcccctaatttcgagatgggagtctctaacaaaactcctgaatttctcaagatgaatcctattggaaaggttcctgtttaggaaacgcccgatggtccagtctttgagagcaatgcaatcgctcg

SEQ ID NO: 131242 - DNA, 257 bp, Glycine max
aaaattttcaaagtcgaagcgagaacttgccatttcgagggttttagggttagggttttctaaaattgcaagaacatgggtttcaacattcaaccctatgggattcagtccatgctcaaggaaggccataagcacctttctggcctggatgaagcggttctcaagaacatcgacgcctgcaaacaactttccactatcactcgaacgcgcctcggtcccaatgggatgaataagatggttataaatcacttggacaa

SEQ ID NO: 131243 - DNA, 258 bp, Glycine max
cgacctctcgacgaggatgacatcgccctcctcaagacctacggtttgggaccttactgcacaagcataaaaaaggcggagaaggaaatcaaagatatggccaagaaagtgaatgacttatgtggtataaaggagtctgatactggtttagctgcaccaagccagtgggatcttgtttctgataagcaaatgatgcaggaggagcagcctcttcaggtggcaaggtgcacaaagattataaacccaaattctgaagat

SEQ ID NO: 131244 - DNA, 255 bp, Glycine max
tgttgtaactcgttcttcttcttttgttgttctgtgtttgtgtttgtattttctctcacctgaaaatgtcttgctgcggtggtaactgtggttgcggaagctcctgcaagtgcggcaacggctgcggaggctgcaagatgtacccagacttgagctacactgagtcaaccaccaccgagaccttggtcatgggagtggcacctgttaaggctcaatttgagggtgctgaaatgggtgtgcccgctgagaacgatg

SEQ ID NO: 131245 - DNA, 259 bp, Glycine max
gattatcctaagtctttgggaatagtgctgcaatggcttcaagtcaggaggaggtgaaccttttgggagctactggaagcccatttgtgtgcagggttcatattgccctcaagttgaagggagttcaatacaaatatgtcgaagaaaatttgaggaacaagagtgaactgcttctcaaatccaacccagttcacaagaaggttccagtgtttattcacaatgagaagcccatagcagagtctcttgtgattgttgaata

SEQ ID NO: 131246 - DNA, 254 bp, Glycine max
  unsure (1)..(254): unsure at all n locations
cacacttcagagaatagttcatttatttatcctgctgaaaatatgtccatagatagcatatncttcccctctcattggaattcttcctcaagttcacatggatatgcatcctctagtcacaacattgttgtacctcctcaccagtcagatgcctcaggcacttctaatgatcattttgtgcattcgtctagtgctggaccattctttacagtgtcggaaaattatttacaccaaccttcttcctccaattatga

SEQ ID NO: 131247 - DNA, 254 bp, Glycine max
tatcaatacagtctgtgataaagagcgccatcacaggcaaaacgagacccttgccgatcaaccctagaagcgggttatacctcttgctcacggccgatgacgtgtacgttcaggatttctgcacgtcggtgtgtgggttccactacttcacgtttccctcgttggttgggtatactcttccgtacgcttgggtgggtaactcggcaaagttctgccctggacagtgtgcttatccgttttcggtgcccgcgtat

SEQ ID NO: 131248 - DNA, 259 bp, Glycine max
tgagtggtgagaaggaaggtctccttcagctaccttctgacaaggctcttttgtctgaccctgtattccgccctctcgttgataaatatgcagcggacgaagatgccttctttcctgattacgctgaggctcaccaaaagctttccgagcttgggtttgctgctgcctaagcaacgtttagagaaatattatgggcaccatgcctcttcaacaatcccctaaacgttgcttaggcatggtgcccataatatttctctaa

SEQ ID NO: 131249 - DNA, 258 bp, Glycine max
gcaaaaaccaaagtgagagagaaaatgatgaagccatcgatgctcagatctcttcactctgccgccacccgcggcgcctcccacctctcccgccgtggctacgcctccgagccggtgccggagcgcaaggtggccgttctaggtgccgccggcgggatcgggcaacccctctcccttctcatgaagctcaaccccctcgtttccagcctctccctctacgatatcgccggaactcccggtgtcgccgccgatgtcagc

SEQ ID NO: 131250 - DNA, 257 bp, Glycine max
ctcgagccggttgcaactcctgctcaggctcaagaggttcatgctgatttaaggaaatggactcatgacaatgtgagtgctgaagttgctgcatctgtaagaattatctatggaggctctgtaaatggaggaaactgcaaagaattggcagcacagcccgatgttgatggatttttggttggtgtggcatccctcaaggcggaatttgtggacatcataaacgctgctactgtgaagaagaattgaaattcgtagtt

SEQ ID NO: 131251 - DNA, 256 bp, Glycine max
ctcaccgattgctagaatggaatttcgatgctcagtcatctcttttaccattctcttctctcttgctcttgcaggagagagccatgtccatgcatcgctacctgcggaagattgctgggaagctgtttggccaaacactcccattcccactgcactgcgagagcttctaaagcctctccctgcaggtgttgaaatcgatgaactccctaagcaaattgatgatacacatctaccaaaaacattcttctataaagaa

SEQ ID NO: 131252 - DNA, 255 bp, Glycine max
gattaattatagtttaggcagcaaattatggattcccatgatgaggagcatgctgccaaactacttagagctcaaacccacatatggaatcacatatttagcttcatatactccatgtcccttaaatgtgtggttgacttaggcataccagatatcatacacaactatggccaacccatgccactctcaaacctcattgcttcactaccaatccacccatccaaaacgtgctttgtccatcgcttgatgcgaatc

SEQ ID NO: 131253 - DNA, 263 bp, Glycine max
ctcgagccgattcggctcgagaggaatcttgtatccatccattgactgtatacgagatgttacagcagaggttggggctgctgttgtatgtgcagcagttgcagaaaagcaggctgaaggacatggtgatgtagggttcaaagagctagagaacatgtcaaaagaagaaactgtggagtatgtcagaggcaatatgtggtaccctgagtattgccctcttgttcatgaaaaatgaacttttatgaaggctttttgctattgat

SEQ ID NO: 131254 - DNA, 255 bp, Glycine max
ctcatcaccaatggtgcaggtcttgcatcatacccaatagacactgttagaagaagaatgatgatgacctctggtgaagctgtcaagtacaagagctccttggatgcattcacacagatcctcaagaatgagggtgccaagtccttgttcaagggtgccggtgccaacatcctccgtgccgttgccggtgctggtgtgcttgctggttatgacaagttgcaggttcttgtgttcggcaagaagtacggctctggt

SEQ ID NO: 131255 - DNA, 256 bp, Glycine max
ctaagatggaagccattgagaacatcggtgctgactcatttgtggttagccgtgaacaagatcagctgcaggctgtaatgggtaccatggatggtttcattgactcagtttctgctgtccatcctcttgtgcctaaacaaagcctgttgaagcctcatggtaaactagtcatggttggtgcaccagagaagcctttggagttgccagcattctctttacttatggggaggaaaatggttggtggcagtagcatcgg

SEQ ID NO: 131256 - DNA, 254 bp, Glycine max
aattggaagacagttacccatggcttttctagagcgtgtcaaagatgaatttgtggcaaaatatggtggtggaaaggctgccactgctcctgtgaacagccttaacaaggaatttgggccaaagttgagggaacatatgcagtactgtgttgatcatcctgaagagataagcaagcttgcaaaggtgaaagctcaagtttctgaagttaagggtgtcatgatggagaatattgaaaaggttctagacaggggtg

SEQ ID NO: 131257 - DNA, 251 bp, Glycine max
tggtgaggagacaggctgttgatatctcaccccttcgacgtgttaatcaggctatatatcttctaacaacaggtgctcgggaagctgctttcagaaacatcaagacaattgctgaatgcttggccgatgaacttattaatgcagccaaaggttcatccaatagttatgctatcaagaaaaaggatgaaattgagagagttgccaaggctaatcgttaagccaacccaacaaccagtattgtggccagaaag

SEQ ID NO: 131258 - DNA, 224 bp, Glycine max
tctgtatgtatgcttgacatatacaagtgggaaatccaaggaaatgtgtggtcctaaaaatggtgcaagataagcaactctctatggagattggcggggtggggttgtttcaaactgcaacaggggaatacttgccactgattatgtctcagttattgcataattaaactaatatacgtgccactgtcaatgttggttcttatggatgtggtagtgccataccc

SEQ ID NO: 131259 - DNA, 246 bp, Glycine max
tgcagatcaagttgtcaaggagcttgatggcagttttgcctttgttgtctatgacagcaaggttggcagtgtctttgcagcactgggttctgatggaggagtgaagctgtattggggtattgcagctgatggatctgtggtgatctctgatgatctagaagtcataaaagagggttgtgccaaatcctttgctccctttccaacagggtgtatgtttcacagtgaaggaggtctgatgagctttga

SEQ ID NO: 131260 - DNA, 255 bp, Glycine max
cttactctttttccatcaagtcaccaagataatggcaagcatttctagcattccatcacacataaaaacgagggtttattctgaatatgggaacacagaagagattctaaaatttgatcccaacgtacctataccagacatcaaggaagaccaggtgctcatcaaggttgtggctacagctcttaatcctgtggattataagagggctcttggctatttcaagaacactgactctcccttacctagtgttccggg

SEQ ID NO: 131261 - DNA, 239 bp, Glycine max
gagtttttaaatgagataggcatgatttctgctctgcagcatcctcatcttgttaaactctatggatgttgtgtggagggagatcaactattgttggtatatgaatatatgaaaaacaatagtcttgctcgcgctctatttggcgccgaagaacaccaaataaaattggactggacaacaagatacaagatttgtgttggtattgctagaggtttggcatacctccacgaagaatcaag

SEQ ID NO: 131262 - DNA, 240 bp, Glycine max
cagcattactcctgagattccgccaactgttactgccgttaagaaccctacttctaagattgtctatgatgatcacaaccatgaaagatttcccccaggtgacccaagcaagagggcatttgcctacttcgtacttacaggtggtaggtttgcttatgcctctgtggtccgtctccttgtcctcaagtttgtgctaagcatgtctgccagtaaggatgttcttgctctggcttcacttga

SEQ ID NO: 131263 - DNA, 239 bp, Glycine max
agggtttccttcacatctctgtaatttccatttccacagttactcttgtgccttagcgagatttgaagcgagtgatggctgcgaaggaagagaatcgaatatttgttggaggtttatcctgggacgttacggagcgtcaactcgagcatgcctttgctcgttacggcaaaattctcgaatgccagatcatgatggaaagggatacaggccgtccacgtggagttgggtttatcacattt

SEQ ID NO: 131264 - DNA, 247 bp, Glycine max
gcattccatagttctcagattgttcacgtctctcgcggcctcgtctctccctcgcgccgcccacaatagaaggttactgctctattattgtttgacgatggctgatgctcatgggactgataagaacattgaggtgtggaaaatcaagaaattgatcaaagctcttgaggctgccagaggaaatgggacaagtatgatttcccttatcatgcctccacgtgatcaaatatctcgtgtcaccaagatg

SEQ ID NO: 131265 - DNA, 227 bp, Glycine max
atctcgactcgacctcgcgacgtttagagtcaagtcttaaaagggatcatcggatgaactacatgcagagcttactggcaattgggtgatgaactccgtgggcactcaaaagcatcggaggatcacaagtggttaatggttgcctcgaaactggccgaacagacaagattgaagggggagcgtgtgaacaaccttgatctttcaaagggactcattgaaacaatgtc

SEQ ID NO: 131266 - DNA, 251 bp, Glycine max
agcgtagtgagtcggaatggggcgagtcgagcgattcggtcgacaagcgcgcaaagagaagagatctgcctcctttttacgtcccaaatcaaatctaaggcttcttcaagttgaaaatggggctgtcgttcatgaagttgtccagccggctgtttgccaagaaagagatgcgtatactaatggtgggtctcgatgctgcgggtaagaccaccattctgtacaagctcaagcttggagagattgtcaccacc

SEQ ID NO: 131267 - DNA, 238 bp, Glycine max
cctcgagccgaatcggctcgagcacttcaagggcaagtaccatgacgagcttattgtcaaacctgcttacattggcactcctggaaagggtattcttgctgctgatgagtcaacagggacaattggcaagcgtttggccagcatcagtgtagagaatgttgaatccaacaggcgtgctcttagggagctgcttttcaccgctcccggtgctcttaaatatctcagtggtgtcatcctc

SEQ ID NO: 131268 - DNA, 235 bp, Glycine max
caggttcatcgtcccactttcttctccttttagggtttcctttttgtttctcctttccagatctgcatcttccattttttaggattaagcggtgagattcgtgaatctgagaaatgtcggattcttctcgggaggagaatgtttacatggcgaaattggcggagaggccgagcgttacgaggagatggttgttctcatggagaaggtagcaaagactgtggaggttgaggagttg

SEQ ID NO: 131269 - DNA, 239 bp, Glycine max
actgcatcggcgtgaacaatggcgacgtacgctgcgatgaagcccaataagcctggcttggaggagtcccaagaacagatccacaagataaggatcaccctttcctccaagcacgtcaaaaatctcgagaaggtttgtggggacttggttcgtggtgcaaaggataagaggctcagggttaagggacctgtcaggatgcccactaaggttcttcacatcactaccaggaagtccccctg

SEQ ID NO: 131270 - DNA, 246 bp, Glycine max
aatgggagcatctttcttttctccagagcattttcctttgttcaccgagtctgtccggagccttaagcaacctgaactgcattcagatgatctaccggccaaggaggaagaaggcgccgaatctgccatggatatgagccatgaatcaagtgtgagcatgcaagcagcctaatggttgtaaattcgtaatgtatgataatcatgtagataacaattagttatacccttggatcagtgcatgggatg

SEQ ID NO: 131271 - DNA, 246 bp, Glycine max
ctcgcagcgggtcagccgctccaacccgggggcctggctcattatccgccccgacggagacggcacctggaagccatggggccgccttgaagcctggcgcgagcccaacaactctaacgccgtcggctaccgctttgaagtccttcccggcaccgccgaccccgttaccctagccgcctccaccatcagttcccagcacggtggaaaatttgccatcgatgctacatccggcgttactccggtgaa

SEQ ID NO: 131272 - DNA, 235 bp, Glycine max
gtttcacagcagcaatggtttacgtcaaggctcagaaatcaaaagcctacttcaagagatatcaattcaagttcaagagaagaagagcaggaaaaaccgattaccgtgccaagattcggttgattaatcaggacaagaacaaatataacactccgaaataccgatttgttgttcgctttagcaacaaggacattgttgcacaaataatatctgctagcattgctggcgatattgt

SEQ ID NO: 131273 - DNA, 216 bp, Glycine max
  unsure (1)..(216): unsure at all n locations
ctaagagttgctgcttcttcagcgactccgcacctcgtagcatctgngccctcaacaaccatggctgaaatcgaaactaccgttccagattccactcaaattgaggtataactcttcaatcgctggagcttcgaggatgttgaggttaatgatatgtctctggctgattagattggagtgtctacatcaaagcatgctaatgttagttcctcacac

SEQ ID NO: 131274 - DNA, 236 bp, Glycine max
ctagaggtcattgaaccaattcagtacaatgatggacttgatcattttcgtctatctccgacacaactccgtgccaagttcacaaggcgcaatgcggatgctgtgtttgccttccagctccggaatcctgttcacaatggccatgctttgctaatgactgacacccgaaagcgccttcttgagatgggctataagaatcctgtcctcttgcttcatccacttggaggctacaccaa

SEQ ID NO: 131275 - DNA, 240 bp, Glycine max
gttcggggaagagttctgttattgcattgattgagagattctatgaccctattgctggaaaagtgatggtggatggaaaggacattaggaagttgaacttgaagtctttgaggcttaaaattgggttggtgcagcaagagccagcactttttgcagcaagcattttcgagaacattgcatatgggaaagaaggtgcaaccgaggctgaggtgattgaggccgcgcgtgctgcgaacgtgc

SEQ ID NO: 131276 - DNA, 249 bp, Glycine max
ttcggctcgaggtcagtgacaaggacaagctcgcggacaagttggagtcagatgaaaaggagaaaattgagactgcagtgaaagaagcattggaatggctggatgacaaccagagtgtggagaaagaagattatgaagagaagctgaaggaggttgaagccgtttgcaacccaatcatcagtgctgtgtatcagagatcaggaggagccccaggtggtgcaggtggcgaaggcgaagacgaggatgatt

SEQ ID NO: 131277 - DNA, 234 bp, Glycine max
ctagaggtcattgaaccaattcagtacaatgatggacttgatcattttcgtctatctccgacacaactccgtgcagagttcacaaggcgcaatgcggatgctgtgtttgccttccagctccggaatcctgttcacaatggccatgctttgctaatgactgacacccgaaagcgccttcttgagatgggctataagaatcctgtcctcttgcttcatccacttggaggctacacc

SEQ ID NO: 131278 - DNA, 236 bp, Glycine max
ctcgagccgaaacaagcactgaccgaccaaatggatttgaagtcaattactgacagggaagtttgctgcttcatgatctcatgcaaaaactcgaccaacatcgactctgttattgactggcttgtaaagcattccaaatcaaagagctgagaacctactttctgttttgaattctaatgcaatttacgggtaacattttctggatttactagaggcatttgcatgtctaactcgtt

SEQ ID NO: 131279 - DNA, 235 bp, Glycine max
ctcagaaccctcgatcactcccacgcgctcctatatcctctccttcaccgtcgctctctccaacgatcacaacaacatcgtcatcccatggcaaacgccgcatctggtatggcagtccatgatgactgcaagttaaggtttttggagctgaagacaaagaggacacaccgtttcatagttttcaagattgaggagcagcagaagcaggtcattgtggagaagcttggtgagccag

SEQ ID NO: 131280 - DNA, 224 bp, Glycine max
ccaaggcggacaagggaatgatcgtcgtagcctcctagggtgcagactgagcaatttggcgcagaaacactctcttccatggtgctcatcaagatgcgtgagattgctgaggcttacctaggctccacagtgaagaatgctgttgtcaccgtccctgcttacttcaatgattctcagcgtcaagccaccaaagacgctggtgtcattgctggtctaaatgtgat

SEQ ID NO: 131281 - DNA, 234 bp, Glycine max
gccggcgcgcgctgaagtttgctaggttcatgagcaggttcgggaagagttaccgaagcgaggaagagatgagggagaggtacgagatattctcgcaaaacctcaggttcatccgctcccacaacaagaaccgcttgccctacactctctctgttaatcattttgctgattggacttgggaggagttcaaaagacacagactaggcgctgcccaaaattgctctgccactctta

SEQ ID NO: 131282 - DNA, 234 bp, Glycine max
aagagagcagaggaaaaggggaagaaaaatgttgagtgcgacggcgatcggcgcgttattgggtttgggaacccagatgtactgcaatgctctccgcaaactcccctacatgcgccatccgtgggagcacgtggtcggaatgggcgttgggcgcggtgtttgtgaaccagcttctgaaatgggaggcccaagtggagcaagacctcgacaagatgctcgaaaaggccaaggccg

SEQ ID NO: 131283 - DNA, 232 bp, Glycine max
cttatggataaaggaactaatgcagttgatgttctcgagggaaggcaatacaggctgcagtatccatgggttggaattgtgaaccgttcacaagctgatattaatagaaacgtagacatgatcgctgctcgtaggaaggagcgggaatattttgagacaaatcctgaatatggacatttggcgcataaaatgggctcagaatatcttgctaagcttctatcccagcatttgg

SEQ ID NO: 131284 - DNA, 234 bp, Glycine max
ctcaatgtataaaccatgggagatattgtgctccagatccggagaaggattttggagagggatatgaagggaaggatgtggtgtatgaaaatttgaggcagctttgtgttcatagagttgccaatgagagcaaccgttcttgggtttggtgggattatgtgacagatttccatgtcagaagttctatgaaggagaaaagatatagcaaagattgtgctgaggaagtcatgaaat

SEQ ID NO: 131285 - DNA, 234 bp, Glycine max
catatttctaaccacactcatgaggctttccttcctgtcttggatttcattacattgctaaactatattatttttattggtgaattgctacactatattctaatgataattaaacttagactatatggtgttgatggatgtggaataaactcaattgttgtctataatggtcatcggagatggacatggtgaagcatcaccatactttgatggatggaaggcttatgatgaaaa

SEQ ID NO: 131286 - DNA, 240 bp, Glycine max
cagacgcgttggcaaaggcattcgtggagcactactacagcaccttcgacaccaaccggaacggtttagcgaatctgtatcaggagggttccatgctgaccttcgaagggcagaagatccagggcgcttccagcatcgtcgctaagctcacttccctccctttccagcagtgccaccactccatctccaccgtcgactgccagccctccggtgtcaacgctggcatgcttgtctttgtca

SEQ ID NO: 131287 - DNA, 246 bp, Glycine max
tcggcgcgagaacttctgctacttcctactccaaccgcacttctgttccgcaattatcatggtacaggtcaagatcggaatcaacggatttggaagaattggccgtttggtagccagagtggctctgcagagagacgatgttgaactcgttgccgttaacgaccctttcatcaccaccgattacatgacatacatgtttaaatacgacagtgttcatggacactggcagcatcacgatgtcaccgt

SEQ ID NO: 131288 - DNA, 235 bp, Glycine max
aaaagggagaagaaaaggaaagaaaactctcaaaaaactattatagcaatggcagaacaaaaccaaaaccaaacaactgaagctgcaaggcaccaagaggttggtcacaagagccttctccagagtgatgctctttaccagtatattctggagacaagtgtctacccaagagaacctgaatccatgaaagaactgagagagttgacagcaaaacacccatggaacatcatgacaa

SEQ ID NO: 131289 - DNA, 229 bp, Glycine max
cgaagtttctgttatgtctctgacctggttgatggccttatccgtctcatggaaggatcaaacaccggaccaatcaaccttggaaacccaggtgaatttacaatgactgaacttgctgagacagttaaagagcttattaatccaggtgtggagatcaagatggtggagaacactcctgatgacccacgacaaagaaaaccagacatcacaaaagcaaaggaattgttgg

SEQ ID NO: 131290 - DNA, 231 bp, Glycine max
ctcgagccgctaacacacactgtctctgatcctgcattattgttgacaacatggccacggaacttctccaaattgatccccctcagctcacttttacctttgaattgaagaaacagagttcctgcttggttcatctcatcaacaacaactcttctcaccatgtcgccttcaaggtcaaaaccacgtcgcccaagaaatactgcgtcagaccaactgtcggcatcgtcaagc

SEQ ID NO: 131291 - DNA, 231 bp, Glycine max
acacttttgtaccagggctgattgatcttgccatcgcgaggaacactttgattggtggagatgacttcaagagtggtcagaccaaaatgaaatctgtgttggttgattttcttgtgggggctggtatcaagccaacatctatagttagttacaaccatctgggaaacaatgatggtatgaatctctcggctccacaaaccttccgctccaaggaaatctccaagagcaacg

SEQ ID NO: 131292 - DNA, 231 bp, Glycine max
tttgtagtaagtgaggtgccaatatggtgaagatagctcttggtactttggatgactcttttagcgctgagtctcttaaggcttatttcgcagagttccacgcaactctgattatacgtgttcgctggtgttggatcagccatcgcttacaacgagcttacaaaagatgcagccttggatccaacggggctggtggcagtagctgtggcacatgcatttgcactgtttgta

SEQ ID NO: 131293 - DNA, 232 bp, Glycine max
ttcaccccttcttcttttacgttcatgctgttttcatagtgaggatcttctgaagaaatggcaaatcaccctttgacacactctcactctttccgcgagaggtttgatgcaactctcactggtcacaggaatgaaattttggcccttttgtcaaggcttgaagccaagggcaagggaatcctgcaacaccaccaggtggttgcagagtttgaagaaatccctgaggagagca

SEQ ID NO: 131294 - DNA, 220 bp, Glycine max
ctcgcgccgctcgagccggtcagagtgagaaagagagagagagagacagaaactgagagtaattcgcagcaccctaatttcggaaagatcggcgatggctgcctccaaggatcgcgagaacttcgtctacatcgccaagtcgccgaacaggctgagcgatacgaagagatggtggaatcaatgaagaacgttgcgaatctcgacgttgaactgaactgtg

SEQ ID NO: 131295 - DNA, 222 bp, Glycine max
gcaacctttgctgtggtagtggaagcacacaaagagcacaacgttacatatagtaactatggcgagagtgggtagaatgaaacttggttcagaagggtttgaagtgtctatgcagggacttgggtgcatgggcatgtctgattctatggtcctcctaagccagagcccgatatgattgcactcatccaccacgccgtccaaagcggtgtcacttttcttgac

SEQ ID NO: 131296 - DNA, 227 bp, Glycine max
gaaaagcccggtggtgctggcgagtttggaaagtactttagcttgcctgctctcaacgatcgtagaatcgatagacttccttactctgtgaggatacttttggaatctgcaatccggaactgtgatgagtttcaagttaaagtaacgacgttgaaaaaattattgattgggagaatacctctccgaagctggtggagattccattcaagccagctagtgtgcttctc

SEQ ID NO: 131297 - DNA, 227 bp, Glycine max
gaaaaaatgggttcttcttcttctatgtggacggtgtgtgtgattttggcatcactggcctctgcagcactctgtgccaacccacgcaggccagtggatgtacaatttggccgaaactacgtgcccacatgggcctttgatcacatcaaatatttcaatggtggttctgacattcagcttcatcttgacaagtacactggtactggcttccagtccaaagggtctta

SEQ ID NO: 131298 - DNA, 218 bp, Glycine max
gagcttctctcggactccttccgttacaatgaaattgagaatggaatgctgtgggaagttgaggggaagtgggttgttaagggagcagttgatgttgacattggtgcaaacccttctgctgagggtggagaagatgaggagtcgatgacgcagctgttaaggttgttgacattgttgatacattcagacttcatctcaacccgcttttgataagaaac

SEQ ID NO: 131299 - DNA, 223 bp, Glycine max
atctttgatgaaccaatatgtgaataagaagtttagtaatcagtacaaggcaaccattggagcggatttttttaccaaagaagtgcaattcgaagataggcttttcaccttacagatttgggatacagctggccaagaagattccaaagccttggagttgctttctatcgtggtgctgattgttgtgttcttgtatatgatgttaattcgatgaaatcatttg

SEQ ID NO: 131300 - DNA, 223 bp, Glycine max
gcaagcaataagaaagaatcccaggcgaggagaaagatggaggggaaggagcaggatgtgtcgttgggagcgaacaagttccccgagagacagccaattgggacggcggcgcagagccaagacgacggcaaggactacaggagccggcgccggcgccgctggttgacccgacggagtttacgtcatggtcgttttacagagcagggatagcagagtttgtggc

SEQ ID NO: 131301 - DNA, 225 bp, Glycine max
tggaaagttgctcctgctctagctgctggttgtacagcaatattgaagccatctgaattggcatctgtgacctgtttggagctggctgaaatatgcagagaagttggccttcctccaggggtattaaacattgttactgattaggcaatgaagctggtgctcctttgtcatctcatcctgacgtagacaagatttcctttactggaagctctgcaactggaagca

SEQ ID NO: 131302 - DNA, 223 bp, Glycine max
atctcggaagtgcacgaaaaaaatatttatagagcagtcccggttgaccagttctttcacggaggaaaatcttgaattccagcggaagattcttgtgagatctggccttggggagaacacttaccttcctgaggcctcctcaacattcctcccaacccttcatctgaagaagctagaaaagaagccgagaccgtgatgtttggtgccattgatgagcttttag

SEQ ID NO: 131303 - DNA, 219 bp, Glycine max
tccagccacacgcttcagaagacatggcctcattgggtgggttacaaaatgtgagcggcatcaattttcttatcaaagagggtccaaaagtcaatgcaaagttcgagctgaagccgccaccatatccactgaatgtttggagccggtgatgagccagcagacacttgagtttcactgggggaagcaccacaagacttatgtggaaaatctgaaaaaaca

SEQ ID NO: 131304 - DNA, 220 bp, Glycine max
tggaccccctctctctcttctgcaccggagccctcctcgccggcggcctctactggttcgtgtgcgttctgggccccgccgagcagaagggcaaacgcaccaccgatctttccggcggctccatctccgccgagaagtccaagacaactacaaacagtactggtccttcttccgccgcccaaaggagatcgagaccgccgacaaagtccccgacttcgtc

SEQ ID NO: 131305 - DNA, 223 bp, Glycine max
tgtactacgctggtgccgaaacccttccggaaccctaaggtatgtgagtaatcagtggttgagattggttgagaagacgatgggtagaaaggagtatatggttactcgtgagtacaccattaacctccacacgcgctccatgtctgcacattttagaagaaaactcctaaagctattaatgtgataaggaactttgcccaaaaggccatggtgaccaatgatg

SEQ ID NO: 131306 - DNA, 220 bp, Glycine max
atcgcaatggccatggctcttcctcttcgcagactctcctccaccctcaacaaaccctacgccagcgctacttccatttatcatcgcatgtcctcctcgctctccgctcaggagaaagacaaatctcgcgccgatggataaagcagctcaacgatcctctcgagaccatcgatcccgagatcgctgacataatcgaactcgaaaaagcgcgtcaatggaa

SEQ ID NO: 131307 - DNA, 219 bp, Glycine max
ctcgagccgtttggcgattcagagagaaagagaaatgggagaacgaaaaggaatcccaattgctctggggctcttggcgatgctcctcttcttcattgcttcttcctcttcctctcacctcgttcgtgcttccatgacgccgacgacgcgatcttctacgagtcattcgacgaggattttgacggacggtggattgtgtccgacaaggaggattacaac

SEQ ID NO: 131308 - DNA, 222 bp, Glycine max
ctcgagccgccaagcaccactcaaccaccaccctcctctctccctctcttcttctacctttaaagttcttaaagtattaagatggcagagacattcctatttacctcagagtcagtgaacgagggacaccctgacagctctgcgaccaaatctccgatgctgtcctcgacgcttgccttgaacaggacccactcagcaaggttgcctgcgaaacatgcacca

SEQ ID NO: 131309 - DNA, 222 bp, Glycine max
gggactggttgggctgtggaggatgccaaggacaaaatcatgaagctcttagaagagtacgaaagtggcggggttgtgagtgaagcttgccaatgcatccgtgatctgggaatgcctttctttaaccatgaggtatgaagaaagctttgattatggcgatggagaaaaagaatgatcatatgctagatctactgcaggagtgcttcagtgagggcctgatca

SEQ ID NO: 131310 - DNA, 217 bp, Glycine max
gaactatagtaaatgctggagccataccggatattgtagatgtactgaaaaatggaagcatggaggctagagaaaatgcagctgcaactctcttcagtttatcggttctagacgagaataaggtgcaaatagggcagctggagctatccctgctctaataatgttactttgtgaaggtactcccagaggatgctgggggtggaatggtagatgaagc

SEQ ID NO: 131311 - DNA, 219 bp, Glycine max
ctgctcgagcggctcgagcgcttctcctctttgtgttctggctatgcttcttggcaagagttagttcggacgaggattgcgtgtacacggtgtacgttcggacgggttcgatcatcaagggaggcaccgattcgtaattggtctgaagctatacgacaagtccggctacggcatatacatcaccaacctcgaggcatggggcgggttaatggatccggg

SEQ ID NO: 131312 - DNA, 218 bp, Glycine max
cgggcgagatgtttcaggtgaccactttgctgagtgaggcggagagattggagaaggagttgttgcagaatccacctccgtcggaagcggatgtggaggcggctagggttgttgttcaggagacaggggaggtgtgtctcagttgaaagctgccaaggcgagtaagcaggagattggtgctgctgtggatcagcttaagacggcgaaggagagtttgg

SEQ ID NO: 131313 - DNA, 219 bp, Glycine max
ctgagaggcaccatggcgacactggattccgacgtgaccatggttccggccggcgaaccctccaccagcgccggtccttcttcgtccaccaagaagccgaagcgattcgagatcaagaagtggaatgccgttctctctgggcttgggatattgttgtggataattgcgctatttgctgcaaccatatcatggatctctgtattgagtgccaggccaacc

SEQ ID NO: 131314 - DNA, 218 bp, Glycine max
ctttggtatctcttgttggttttgggctgtatgagttagggttccctggggtagctaaatgtgtagagatcggattgcctcagcttatattgctagtatttgtttcacagtatgtgccccatgtgctacattgggaaaacatatcttcgaccgttttgctgtgttatttacaattgtaattgtgtggatatatgctcatctacttactgttggagggg

SEQ ID NO: 131315 - DNA, 223 bp, Glycine max
gggtctcaatggcagaactgatcctgagagtttcaaggcctgtgttccaatggtcacccacacagactcagaaccttatatctacagaattattgatcttgacacttctcctattctcactggaaaacccatcaaaccacatcctctaagttctggcactacccaggggaaaccaaagtatgtaccttggaatgatgaattgtatgaaaccacaatgcagata

SEQ ID NO: 131316 - DNA, 216 bp, Glycine max
cttctttctttttctgtgagcctttctttcaggttcttaacttgatcagtgtgcagtgtccaaatcataagggtagttgcaaattgcaatggctaagcatgatgttgagggtggttccttctctgcaaagactaccatgatcctcctccagcaccgttgattgatgctgaggaactcacacagtggtccttctacagggctttgattgctgagttc

SEQ ID NO: 131317 - DNA, 215 bp, Glycine max
gccgcagcacgaggagcagcctcaggaggagaaggatgtctcacaggaagttcctccacccaaggcacggttcactgggatttcttcccaggaagcgtgctgctcgtcacaggggaaaagtgaaggcattcccaaggatgacccatccaaggcacccaagctcactgcattcttgggttacaaggccggtatgactcacattgttagagaggtcg

SEQ ID NO: 131318 - DNA, 221 bp, Glycine max
agccaagtgaaagtgagaaaaaataaaaatcaaagagcataatgtcagggatcattcacaagattggggagaccctatcatgtgggagggcacaagaaggaggaggagcataagggtgagcaccatgctggagatacaaaggggagcaccatggtgaacacagtagtgagtacaaaggagagcatcatggtgaacacaaagctggagagtaccatggtgag

SEQ ID NO: 131319 - DNA, 261 bp, Glycine max
aaagaccaagcataaggttgatattgatacagtggagaagtttcagacgttgaggttgcaggaacagaagtattttgatgacatggttcagaaatgcaaggatgtgggtgcaacccttgtcgtttgccaatggggttttgacgatgaagcaaatcatctcttaatgcacaggaacttgcccgctgtcagatgggttggtggtgtagagttggaattgatagctatagcaactggtggaagaattgttcctaggttccagga

SEQ ID NO: 131320 - DNA, 263 bp, Glycine max
gtggtttcagtgagtgatcggtgttcacttgatccttcataagtcgtcatcatcatcatcatcatcaccgttgattgaagaagatgccgatcagaaacatcgccatcggaaggcctgaagaggctactcaccccgacacgttgaaggcggggttggctgagttcatctccaccttgatcttcgtgttcgccggttcaggttccggcatcgcctacaacaagctcaccgacaacggcgccgccactcccgccggcctcatctcc

SEQ ID NO: 131321 - DNA, 269 bp, Glycine max
gtggtgaaaggtcccttgttgccaacttatcagctgcaaattgctacaagtctgagcatttgacgagaccggaaaattgggcattagttgaaaaggccaagtattactacatttctggctttttcctcactgtatctcctgattccatacaattggttgctcaacatgcagctgcaaataacaagatcttcatgatgaacctttctgctccctttatatgtgagttctttaagggtgcactggacaaagttctgcccactatatggatt

SEQ ID NO: 131322 - DNA, 267 bp, Glycine max
agttttgcaattgaaatggcttctacttctaatgccatcatccaatgcacctcttcttcttcttcgtttgagtatgacgtgtttgtgagcttccgcggtgaagacacacgaaacagcttcacaggttttctttttgaagctctgaaaaaacaaggcatcgaggccttcaaagatgataaagatatcaggaaaggcgaatccatagcaccagagctaatacgagccattgaagggtctcatgttttccttgttgtcttttccaaggac

SEQ ID NO: 131323 - DNA, 264 bp, Glycine max
cttgttcttcagtctcctcctattatccgccaccgtagccgccgccgaacggatcgacgatgaagacgaccttctgatccgtcaagtggtgccggagccggaggaccaccacctgctcaacgcggagcaccacttctccgccttcaagacaaagttcggcaagacctacgccacgcaggaggagcacgaccaccgcttccgtatcttcaagaacaattgctccgcgccaagtcacaccagaaattggatccctccgccgtccac

SEQ ID NO: 131324 - DNA, 263 bp, Glycine max
cttctccttccaagttctaaccatttcccactgtcttcgattttacgggattaaatctgccatggcagcagcacccgctagatctcgtgccgattactcttacctcatcaagcttcttcttatcggcgacagcagtgtggggaagagttgtctacttttgaggttttctgatggctcattcacaaccagttttatcaccaccattggtatcgattttaagataagaaccattgaactagacagcaaacggattaagttacaaa

SEQ ID NO: 131325 - DNA, 262 bp, Glycine max
ctcagggtcatgcaaggcatgtttgatggtgtgcttgacaatacaggtcggggagtcgctgatgaagaagagtatgaggctgctgatggtgattggggtgaggagcttgacatagttgatgcagatggcttacaaaatggagatgttgctgcgattttggaggatggagaggtggctgaagaaaatgatgaagagggtggatgggagatggaggatttaggcctgggcccagaagctgacagtcccaaagcttctatcagta

SEQ ID NO: 131326 - DNA, 266 bp, Glycine max
ctcatatctcatacagactacagtaatattttatttgcactactactactactttatttaagcagaagcaggcgagtgaggaagagcgaagagtgaagagaatggctcccaagggtttaacctttctggctgtgttaatatgcgtttcagcactgtcactgagtccttctgttgcgggggaagggcaaaataatggccttgttatgaacttctacaaggaatcatgccctcaggctgaagacatcatcacagaacaagtcaagctt

SEQ ID NO: 131327 - DNA, 265 bp, Glycine max
acacccttcatttacaaacatcggattcattctcctatctgctaacacttttactttttcttcatggctctctttctctttgctattttaatcttgatggtcccttctagtaatgcctattggccaccttcacctggctactggccaagttccaaattcaggtccatgagtttttacaaagggtttagagacgctctggggccctcagcaccaaagcctagaccagaatgcattaacaatcttgcttgatagagcctcaggaagt

SEQ ID NO: 131328 - DNA, 267 bp, Glycine max
gagcaacttcatttgctgaggctctccgcatgggcagtgaagtttatcatgtattaaagggactaatcaaggcaaaatatggacaagatgcatgtaatgttggagatgaaggaggatttgctcccaatgttcaagataacagggaggggcttgttttactcatggatgccattgacaaggctggttatactggcaagattaaaataggtatggatgttgcagcttcagagttttacactaaggatgggaagtatgatttgaacttca

SEQ ID NO: 131329 - DNA, 270 bp, Glycine max
caagaatagactacaaagctgagggacttaacccacctcacacacaccctcgtgccactgagattgtgtttgtgttggatggacaactagatgttggattcatcaccacagccaataaactcatctcaaagtcaattaagaagggtgaaatctttgtgttcccaaaaggtttggtgcactatcagaagaacaatggggataagcctgcttctgtgctttctgccttcaacagccaactccctggcacagtgtctatagctgcagctcttt

SEQ ID NO: 131330 - DNA, 262 bp, Glycine max
ggaaggtcaaggttgcagcctcctaccccacccggttactttggcaatgtgattttcacaaccacacctatagctgtggcaggtgatctgatgtcaaaaccaacatggtatgctgcaagcagaatccacaatgcattgttacgaatggacaacgattatttgagatcggctcttgactatctagaactgcaacccgatctaaaagcgctggttcgtggggctcatactttcaagtgtccaaaccttggtatcactagctgga

SEQ ID NO: 131331 - DNA, 261 bp, Glycine max
agactttcttgatgtgcacaatcaggctcgtgccgaggttgttgttggtccactctcatggactcacacccttcaagcctacgctcaaaggtatgccaattagagaatcctcgactgcaacctcgaacactccatgggacccttcggcgagaatctcgctgaagggtacggcgaaatgaagggttcggatgctgtcaaattttggctcactgagaagccttactatgaccactactccaacgcttgtgtccatgatgagtg

SEQ ID NO: 131332 - DNA, 263 bp, Glycine max
gcggcacccacacacacagttcgtcggaatgggaagggtgattcgcgctcagcgtaagggtgctgggtcggtgttcaagtctcacactcaccaccgcaagggtccggcgaggttccgcagcctcgacttcggcgagcgcaacggctacctcaagggcgtcgtcaccgacatcatccacgaccccggtcgcggcgcccctctcgccaaggtggcattccgccaccccttccgctacaagaagcaaacggagctcttcgtcgccg

SEQ ID NO: 131333 - DNA, 259 bp, Glycine max
ctctctgtgagttgtggaaattgattagaattgaaaataatgtctggttcggaggacgagggaggagaagagtacctcttcaagatcgtcataatcggagactccgcggtggggaaatcgaacctgctgtcccgctacgcccggaacgagttcaacatgcactccaaggccaccataggcgtcgagttccagactcagtgcttggaaatcgactccaaggaagtcaaggctcagatttgggacaccgccggccaagagc

SEQ ID NO: 131334 - DNA, 261 bp, Glycine max
cccaactgagttctctgttgcagttcatgtggatggtgcaagcaagttgtttgatcagacgtgttttctggatgttaagggatactgtcgcgaagagaggagccacgaagggcttggaatgggtggttctcttgtctaccaaaaatttgccaagacttgtgactgtggttcacctagatcaactctgaagtgttggaaagaggaagatgaagaagagtagttttcttaagtgtctttattatgtccttgcgaaaataagtc

SEQ ID NO: 131335 - DNA, 261 bp, Glycine max
ctcgagccgaatcggctcgagactcattggaggaggccatgaagctctgtttggagaatggcttggaaggaattgtctcagcgatcaagggaatattcagaaatcctggtgcagtaaccaagatcaaagagtccaagctttctctactttcttatggataattaaacaatgttccagaggcagtttacatgcaacatctaatgggaatcgatggggtaattgtggatttggttcaagacataactgaggcagttgcggata

SEQ ID NO: 131336 - DNA, 263 bp, Glycine max
caagcatcccaaaaccctagctcgcgttctgctttcgtcttttacatcaggatggagtctcaggtgaagcacgcacttgttgtcaaagttatgggtcgtactggatccagaggacaagtaacccaggttagagtgaaatttttggatgatcagaaccgtcacatcatgaggaatgtgaaaggacctgtgcgagaaggagacattctcaccctactcgagtctgaaagggaagcaagaagattgcgctagatggtttcttttgg

SEQ ID NO: 131337 - DNA, 262 bp, Glycine max
gggtttttgagtgcggtgcggcgatcctagcactctcttctgcagctttcgccgacagcttcattcaccatggctgagcaaaccgagaaggcttttttgaaacaaccaaaagtgtttctcagctcgaagaaaactgggaagggaaagagacccggaaagggtgggaaccgcttttggaaatccattgggcttggatttaagactcccagggaagccatcgaaggaacctacattgacaagaagtgccccttcactggcaatg

SEQ ID NO: 131338 - DNA, 265 bp, Glycine max
gtttagtatcgtacatagcttgaatacacagtgcttgtttagactagtatcttccatggctccgaaagatagaatcctggttttgggacccacaggagccattggaagacacatagtttgggcaagtgtaaaggcagggaatcccacttttatattggttagggacacccctgcctctgttaacaagccaaggcttgtcactgctgctaatcctgaaaccagggaagagctcattcagagcttccaaaattctggagttactcta

SEQ ID NO: 131339 - DNA, 268 bp, Glycine max
attttccccttcaacccttccttttttgcgttcattctgttttcatagtgacgtacttctgatgaaatggcaaatcatcctttgacacactctcactctttccgcgagaggtttgatttaactctcactggtcacaggaacgaaattttggtccttctgtcaaggcttgaagccaagggctagggaatcctgcaacatcaccaagtggttgcagagtttgaagaaatccctgaggagagcagaaagaaactccaagatggtgtctttg

SEQ ID NO: 131340 - DNA, 259 bp, Glycine max
agttgatgagacttggttttctgacccgggtttctgtagggaatcacagatgtggtatacactttcaaagactttggccgaagatgctgcctggaaattcgtaaaagagaacaacattgacatggttactattgacccagcaatggtgataggacctctcttgcaaccagtccttaacacaagtgctgcttcaattttaaacgtaattaatggtgcacaaacatttccaaatgcatcttttggttgggtcaatgtgaaa

SEQ ID NO: 131341 - DNA, 260 bp, Glycine max
ccggtgcagacatgggcatatacttcccatacactgaaactgagcgtaggttaacagaattccactctgacatcgaactacttctttacagctcagtggagaatgaggaacacatatgcgtattgaaggaccgcaacaaaccaataatcttcaccatggcaaggcttgaccgttgtgaagaacatcacggggcttgtcgagtggtacgggaagaacgcacgcctccgcgagttggtgaacctggtggtggtagctggaga

SEQ ID NO: 131342 - DNA, 236 bp, Glycine max
tgtgcgttcagtgagtgatcggtgttcacttgagccttcataagtcgacatgcatcatcatcatcatcaccgttgattgactgaagatgccgagcagagacatcgccatcgtaaggcctgaagaggctactcaccccgacacgttgaaggcggggttggctgagttcatctccaccttgatcttacgtgttcgccggttcaggttccggcatcgcctacaacaagctgaccgacaa

SEQ ID NO: 131343 - DNA, 263 bp, Glycine max
cgctctctaattacatttctaatctcattctccttctgttcaaacactctcatggcatcagataagaagattaggatcggcatcaacggatttggaaggattggccgtttggtggccagggttgcccttcaaaggaatgatgttgaacttgttgctgtcaacgatcctttcatcaccactgattacatgacatacatgttcaagtacgacaccgttcatggccagtggaagcattttgatgtgaaggtgaaggactctaagac

SEQ ID NO: 131344 - DNA, 262 bp, Glycine max
gaaacagacacagagagagagagtgagaaaaaacgaaacgatggagggaggagtctcctacgcgcgcatgcctcgtgtcaaaatccgcgagctgaaggacgactacgccaagttcgagctccgcgacaccgacgcgagtatagccaacgcgctgcggcgcgtgatgatcgcggaggtgccgacggtcgccatcgacctcgtggagatcgaggtcaactcgtcggtgctcaacgacgagttcatcgcgcacaggctcggcctc

SEQ ID NO: 131345 - DNA, 259 bp, Glycine max
caaagctggatctcgtgtggttccatatcaagaagatgagagccaagactcagttcctgtcagtatcgtctctaaagatctccaaaggaatgacaaagagagtgaagatttatcgctgatccgtgatcagttacatcagattgagaaccagcagtcaagtctacttgatcttctgcagaaattcatgggtcgctcacaaaatggaatgcgttctttagagactcgtgtgcatggccttgagttggcattggatgagatc

SEQ ID NO: 131346 - DNA, 260 bp, Glycine max
gttatgttcgtggcaattatcgagttggtgtgaactcttcggattttaggcgagtggagataagtgaggagacaaagacggattggaacgaaaaggagaccacgaatcttctggaagctattacgcattacagtgatgattggaagagggtttctcagcatgttcctggcagaactgagaaggagtgtgttgctcattttctgaagcttccttttgtggatcaattccagcattatcaacaacaccctgctgtcaatggc

SEQ ID NO: 131347 - DNA, 264 bp, Glycine max
caattttctagggttttattcattttccgatggcttctgcagatgttgagtaccgttgctttgtcggtgggctcgcttgggccactgacgaccatgccctcgagagagccttctctcagtacggcgaaatcgttgaaacgaagattatcaacgatcgtgagactggcagatccaggggttttggatttgtgaccttcgcctcggagcagtccatgaaagatgcgatcggagcgatgaatggacagaacttggacggccgtaaca

SEQ ID NO: 131348 - DNA, 260 bp, Glycine max
atggagcttgattgggaaaccaggtatgaaatcgctgttggggcagcgaaagggttggagtatttgcatcatgggtgtgagaggcccgtcattcatagagatgttaagtctagtaacatattgttggatgagtttttgaaacctaggattgccgatttcgggcttgctaagcttgtccaagccaacgttggcaaggattcctccactcgtgtcattgccggaacccacggctacattgctcctgaatatggctacacata

SEQ ID NO: 131349 - DNA, 258 bp, Glycine max
gtgggctatcgcggtgcatggtggcgctggtgtcgaccctaatctcccactcgagcgccaagaagaagcgaaacaacttctcacgcgctgtctcaatcttggaatctctgctctaaattctaatcttcccgccatagatgtcgtcgaacttgtggtgagggaattggaaacggatccgctgttcaattcgggccgtggatctaccctgacagaaaaaggaacggtggagatggaggctagcatcatggatggtccaaa

SEQ ID NO: 131350 - DNA, 261 bp, Glycine max
ctcgagccggttgcaactcctgctcaggctcaagaggttcatgctgatttaaggaaatgggtccatgacaatgtgagtgctgaagttgctgcatctgtaagaattatctatggaggctctgtaaatggaggaaactgcaaagaattggcagcacagcccgatgttgatggatttttggttggtggtgcatccctcaaggcggaatttgtggacatcataaacgctgctactgtgaagaagaattgaaattcgtagttagga

SEQ ID NO: 131351 - DNA, 261 bp, Glycine max
gttgtgtaccccattgaagtatcagagatagtggaatttgacatgaagggtgtgtggggatccatggaggagtgccagagacttggcctcaccaaagccattggagtcagcaacttctccatcaagaagcttgaaaaattgctctcttttgctaccgtccctcccgcagtgaatcaagtagaagttaaccttgggtggcaacaacagaagcttagagatttctgcaaggaaaagggtattactgtaactgccttctcaccc

SEQ ID NO: 131352 - DNA, 247 bp, Glycine max
actcgagccgaatcggctcgagcttaagtcaagagaagaagtgaagtgctgcttcaatggctatcaagtcaggaagaggtgaaccttttgggggttattggaagcccatttctgcacagggtgcagaagctctcaaattgaagggagttgaatacaaatatttggaagatgatttgaacaacaagagtgatttgctcctcaagtataacccagtttataaaatgattccagtgtttgttcacaatga

SEQ ID NO: 131353 - DNA, 243 bp, Glycine max
accaaatcatcacacacacatactaagaagcaacaattcttctacaatggatctcctccttctggaaaagaccctcataggtctcttcctcgctgcggtggtcgccatcgccgtctccaccctcgcggccggaaattcaagctcccaccgggcccactccccgtcccaatcttcggcaactggctccaagtcggcgacgacctcaaccaccgcaacctcaccgatttggccaaaaaattcggt

SEQ ID NO: 131354 - DNA, 243 bp, Glycine max
caggaggagcactagctaagttcacaatttcaaaatggctaggggactaaagaagcatttgaaaaggctcaatgctcctaagcattggatgcttgacaaactgggtggtgcatttgcgcctaaacctcatctggaccacacaaatcgagggagtgcctccccctcattcttattctgcgaaaccggctgaagtatgctctgacataccgtgaagtcattgctattctgatgcagcgccatgtt

SEQ ID NO: 131355 - DNA, 241 bp, Glycine max
ctttctctcttctctctccccgcccaaaccctaactccctacccacattccgctttctctcatccatcatgaaaggaggaaagtccaagaccgaatctaagagagccgatgccaaacttgctgtaataagaagggcgccgccaccaagactaggaaacccgccggaaaggggaaggcagcgaaagatcctaacaagccaaagaggcctccaagtgctttcttcgttttcatggaggaattc

SEQ ID NO: 131356 - DNA, 243 bp, Glycine max
  unsure (1)..(243): unsure at all n locations
gcaaagggacctgccagaagggtgattcctgcgagtatgntcatggtgtttttgagtcctggctacatcccgcccaataccggacaaggctttgcaaggatgagacgggctgtgctagaaaatatgcttctttgctcacaaacctgaagnnctacgccctgtgtatgcttccactgggtcggctatncaatcaccaaaatcctattcagctagtggacttgacatgacagcgatgagtccatg

SEQ ID NO: 131357 - DNA, 235 bp, Glycine max
ctcgagccgctcccttttcctaacctcaccggcgggtgctcgtactgctactgtcatgcctagaagggcggcggtcatcgtgtcggcggcgacggcggagacgccgaagaagaagggcgaatcaaagggttcgtggaagagatgaggttcgtggcgatgaggctgcacacgatggaccaggccagggagggcgagaaggaggtcaagcagcccgaggagaaagccgttaccaagt

SEQ ID NO: 131358 - DNA, 245 bp, Glycine max
gcaagaatggcacttcgttgcttggtgatgtccctttctgttctcttcactcttggtcttgcgagagaaagccatgccagagacgaagatttttggcatgctgtttggccaaacactcccattccagttcattgcgagatccttctaaagcctggccctgcaagagttgaactcgatgatcaccctatgcaaattgaagaaacacagtacccgaaaaccttcttctataaagaagaccttcatcc

SEQ ID NO: 131359 - DNA, 245 bp, Glycine max
gtttttgattacttcacggacagaacacctcgatcgtattttgaagtaagggaagcttcacttgtttggagttacagatatgcagatgttgagttcggaagactgcaagcaagggacatgctgcacatctctggacaggtccaatttctaatgcatctgttgaagttgttcaagggagccgatctgttgaggtgcgagctgctaatgttacaaagggagcagctattgaccgcattctaggtgag

SEQ ID NO: 131360 - DNA, 245 bp, Glycine max
ctcgcattccgtggagatctagtgcttctgctgcaagacctcgctgaaaattagggtatcgattcggaggtagacgaagatgttcggaagggctccgaagaaaagcgacagcaccaggtactacaaatcctcggcgtttccaagaacgcttcgccggatgacttaaagaaggcttacaagaaagccgccattaagaaccatcctgacaaaggcggggatcccgagaagtttaaagagcttgctca

SEQ ID NO: 131361 - DNA, 242 bp, Glycine max
  unsure (1)..(242): unsure at all n locations
caagaatccctccctttctggctttctctctctaaaactatcatgtcctccaccgcggctcccgtccttcccatatccaacccccaaaccaccgccgcagagnggtcgccatcgaggctccgggaacaacccggccttccgcgccttcatcaacaacctctccgcgtccctccgacacggcctcgaccagcgcaccccgtggtcggagctcggggaccgctccgcgttctcgaagcccgagt

SEQ ID NO: 131362 - DNA, 241 bp, Glycine max
tagccagctagcgcttcttctctcgcattccgtggagatctagtgctgccaaacctcgctgaaaattagggtttcgtttcggaggtagacgaagatgttcggaagggcaccgacgaaaagcgcacaccagggactacgaaatcctcggcgtttcgaagaacgcttcgccggatgatttaaagaaggcttacaagaaagccgccattaagaaccaccctgacaaaggcggtgatcctgagaa

SEQ ID NO: 131363 - DNA, 233 bp, Glycine max
atttctccatttccattttctctctcactattcaagaatcgtaagctattcacgaaagtcttacccaactcagagtgctgattaccagaaggccgttgagaaggcgaagaagaagctcagaggctcatcgctgagaagagatgcgctcctctaatgctccgtttggcatggcactctgctggaacctttgacaagggcacgaagaccggtggacccttcggaaccacaagcac

SEQ ID NO: 131364 - DNA, 242 bp, Glycine max
gacacggggaggtagtgacaataaataacaataccgggctcattgagtctggtaattggaatgagtacaatctaaatcccttaacgaggatccattggagggcaagtctggtgccagcagccgggtaattccagctccaatagcgtatatttaagttgttgcagttaaaaagctcgtagttggaccttgggttgggtcgatcggtccgcctccggtgtgcaccggtcggctcgtcccttctg

SEQ ID NO: 131365 - DNA, 243 bp, Glycine max
attagtgttcatgaatatgtcaagccttactttagtggttctaaattgaaaagctttctagctggtcataatatcaccattactgatggtattgacaaaactagtgcaactttgcaatttagaaattagcagattgcgattttctcaagagaaactttaagcagatgtctaatgttttgtgggtggctcctgaggacaaggcgagtttatggtcacaacttcattatgtttcgtgtaataatc

SEQ ID NO: 131366 - DNA, 243 bp, Glycine max
ttttgggggagagtgagtgagagtaaaaagatgtttctgcgtgcggtggtgcggccgttgatggcgaaggtgaaggcttcgacggggatcgtagggctggacgtggtgccgaacgcgagggagggctgattgggctgtacagcaagacgctgaaagagatccagaaggttcccgaagatgaagggtaccgcaaggccgtggagagcttcaccaagcacaggctcggcgtgtgcaaggaggagg

SEQ ID NO: 131367 - DNA, 243 bp, Glycine max
ctcccatcttttctcactgctgaaattaaatataagcggaatttgagtaatattcatatttccggcttgttttacgacggcagatacaaattctggactaaacacgagaaaaatcttgctttgcagaagaggaaaagatggaagtgattagaaatagaggcattcctgctgatgttcttgcaaagcgagctcatgaatttgaaaaacatgttgctcatgaaagcctcaaggatcaaattcctg

SEQ ID NO: 131368 - DNA, 238 bp, Glycine max
cacccactcactgcaccactcctcgctgccatcattgcgtattatcaatggcgaccatcgagccggagcaccgccgcgacgaaaacgacgacgacagcgtgacggcggaggatgaggacacggagcgcaggtcgctccgatcgtgaagctcgaagaggtcgccgtcaccaccggcgaggaggacgaggatcccatccttgacctgaaggcgaactgtatcggtttgacaaggagggga

SEQ ID NO: 131369 - DNA, 239 bp, Glycine max
caagctggaaagtgggctgaacctcatgtggaaaccattagaactaaatgggtcccagctgtaagagcacagtggtctgtggtgaagacaaatgctgaacctcatgtgcaattattgaccagacaactgttgaagtttacgaggcatcaaagaatgcaatttcaccccaattcagcaaggccaaagaatttgtagatccttattatcaggaagctagacagttcagcatgccatacatt

SEQ ID NO: 131370 - DNA, 220 bp, Glycine max
  unsure (1)..(220): unsure at all n locations
ctcggatctccgnagnaantctggagctaatacgcggatcaaaccttgacttttggaagggatgcatttattagactaaaggtgaacacaggttctggccttcgctttgatgattcatgataatcgtcggatcgcactgcctgtgtgccggcggcgtatgatttaggtttctggactagaaggttccgatcttccgatagtggggtggcatggtggtgac

SEQ ID NO: 131371 - DNA, 243 bp, Glycine max
gcaggattatttcttgatgcgattgatgtctccaggggacataccatctagtcattattcagtggtgttgtaaggctacagggagtgcaaaagaatctgccgcacttttgtactaatcaccttgtcccacttcgtgcttcttccctcagaatttgattgtcggtattagaaccccactattcattcttaatacagcctttgactcatggcaggtccacacaagcttagctcaatcatcagcag

SEQ ID NO: 131372 - DNA, 242 bp, Glycine max
gagcagggtcctgtgctagaacaagttggtttcccacttggtgtggttaaaggcatagctgggcagacacgattgaaggttacagtcagagggtcacaaggtcatgctggaactgttccaatgcgatgcgccaggatcctatggctgctgcagcagaacaaattgtagtcttggaaagcctctgtaaacaccctgaagaatacctttcttatgatggtcattgcagtgattcaacagtgaaa

SEQ ID NO: 131373 - DNA, 243 bp, Glycine max
  unsure (1)..(243): unsure at all n locations
cgcggaggcgcgtgagttgccgtgcaagcacatctaccactccgagtgcatcctcccgtggctctcgatgcggaactcgtgcccggtgtgccgccacgagcttccttccgatttggaaactaggttccgagccagatcgacgaggaagcgataggattaacgatttggaggcttccaggaggcggattcgccgtnaggcgattctccggcggccggagaaccggggagagtcatttgccggtg

SEQ ID NO: 131374 - DNA, 244 bp, Glycine max
  unsure (1)..(244): unsure at all n locations
ataagcttcaacaaagatggatgtatnaaagttgaagaagatggccagttctgttcgaactggtgggaagggtactatgagaaggaagaagaaagctgtccacaagactactactacagatgcaaaaggcttcaaagcacnctgaagaggataggagtgaatgctatccctgcaattgaagaagtcaacatctttaaggatgaaatagttatccagtttttaaaccccaaagtacaagcatctt

SEQ ID NO: 131375 - DNA, 243 bp, Glycine max
tatcgagccgaatcggctcgagcagaaacacacttctttttgcttgttgtgcaaaagaggtgaccactaaagcgcaggttaatgtcgtgatgtctgataaggcgttggttcaagcatttgcaaaagaggtggctagattggagagtgagttgaaaactcctggtcctgctacctccaattgtgattatgcagcattattgagaaagaaagatcttcagatagaaaagatggagaaggagatta

SEQ ID NO: 131376 - DNA, 240 bp, Glycine max
ctccgtaccagtttcactgcataagtttgagagaaaactctgcaaacatgttggtttatcaggacctccttacaggtgatgagccttctcggactccttccgttacaatgaaattgagaaggaatgctgtgggaagttgaggggaagtgggttgttaagggagcagttgatgttgacattggtgcaaacccttctgctgagggtggagaagatgagggagtcgatgacgcagctgttaag

SEQ ID NO: 131377 - DNA, 241 bp, Glycine max
taattacttacttggagggttttagagaaatggcttcgtcttgttctagctttatgatcactttggcccttttggtcctcgtgttggggactaatactagtagtgccaatgccaatccaaacttcacacaaacttctactccagttcttgcccaaaactctttgacactgtgaaacgcacagtggaatcggccatatcaaaggagacccgcatgggtgcttctctcctacgtttattcttc

SEQ ID NO: 131378 - DNA, 239 bp, Glycine max
actcgagccgattcggctcgagatttgttgacatcgtttatcatcaaaatgcccgtgttcttctccatgacgagaacatatatcgtattgaatattcacctggaccaatgaaactgtctatcaactgatggactctggacatgataaacctgaggtgactgctgtgtcaatggaccctaatttttcaacctatctacactatgacttcctgtctgtcgtctctgacaaaaaacagaagt

SEQ ID NO: 131379 - DNA, 241 bp, Glycine max
tagagacgttgttctctctgaccccaacatggctgctgtcttactcagacttcattttcacgattgctttgtacatggatgtgatggttcaattctgattgagaatggtccacaatcggagaacctgcatttggacatcaaggggttagagggtttgaagtgatagaaagagccaagacaaaattggaaggctcttgccccggcttggtttcttgtgcagacatagtggctttggcagcca

SEQ ID NO: 131380 - DNA, 241 bp, Glycine max
gcgacctctctttctttttctctcagattcttgcgcggtttatcatgggggatagtcagtattcgttttctctcaccacatttagctccttctggaaagcttgttcagattgagcatgctttgcggctgttgggtctggacaaacgtctttgggaattaaagctgcaaatggagttgtcattgctaccgagaagaaattaccatctatattggttgatgaagcatcagtccagaaaattca

SEQ ID NO: 131381 - DNA, 240 bp, Glycine max
gccaaaggaaaaggctaaagagaagaaaaggcaaagcaagggaccaaccaaaacacacacagagaaacatgtcttccccaagcaagcgccgagagatggacttgatgaaactgatgatgaggattacaaggtggagatgattaatgatggaatgcaagaattttatgtgcaatttcatggacccaatgacagtccttatcatggtggtgtgtggaaagtaagagttgagttgccggatgc

SEQ ID NO: 131382 - DNA, 239 bp, Glycine max
ggagcatacccagatgaatggctgccaaaaaatggaaatcactttgtttttgaatgggagacagcccagatgtccaaagctcccattcaaaagtttgctgattatgttgcaagcatattgttcctacagttgtggtgttggcattattgacactattgtgttggtatgtagctggggctcttggagcatacccagatgaatggctgccaaaaaatggaaatcactttgtttttgctctt

SEQ ID NO: 131383 - DNA, 241 bp, Glycine max
ctccgtaccagtttcactgcataaatttgagagaaaactctgcaaacatgttggtttatcaggacctccttacaggtgatgagcttctctcggactccttccgttacaatgaaattgagatggaatgctgtgggaagttgaggggaagtgggttgttaagggagcagttgatgttgacattggtgccaaacccttctgctgagggtggagaagatgagggagtcgatgacgcagctgttaa

SEQ ID NO: 131384 - DNA, 212 bp, Glycine max
ccatttccattttctctctcacttttcaagaatcgtaagctatgggaaagtcttacccaactgtgagtgctgattaccagaaggccgttgagaaggcgaagaagaagctcagaggcttcagcgctgagaagagatgcgctcctctaatgctccgtttggcatggcactctgctggaacctttgacaagggcacgaagaccggtggacccttc

SEQ ID NO: 131385 - DNA, 221 bp, Glycine max
gctcaagatagggaaattgaacttccaaatgggggctatgtaaagaataggtctttgcccctttcaaccctgattgatatactcaagcagaaaactggaaaagatgatatagatgttgggaaactgagacctacactctttgatgtttttggagaagatgctagtcctaaagtgaagaagttcatgaatgttatttttaacaaactccaacatggaagtgg

SEQ ID NO: 131386 - DNA, 221 bp, Glycine max
ctcgagccgtttttactctctctctctctctacgactttctcgttcgagatccctcaagggatccactaactgaaggagaaatggggttgacattcaccaagcttttcagccggcttttcgccaagaaggaaatgcgaattctgatggtgggtctcgatgcagctggtaagaccaccatcctgtacaagctcaaacttggagagatcgttaccacaattcc

SEQ ID NO: 131387 - DNA, 219 bp, Glycine max
cttggggaaccattgcccctggcctaccttatgttgaacaaactataaccaatgctggaaattggttgattgggggtgacctagaggtcattgaaccaattcagtacaatgatggacttgatcattttcgtctatctccgacacaactccgtgctgagttcacaaggcgcaatgcggatgctgtgtttgccttccagctccggaatcctgttcacaatg

SEQ ID NO: 131388 - DNA, 221 bp, Glycine max
ctgagaaaataatggggtgggagagcttcgtggtggtgcacaacatagcaaagaggcacaacgtgggaacacttgctcgcagtgccaccgcgttcggcgtatcagaactcatcctcgttggtcgaagagatttcaactgtttcgggagccatgggtcctcctcccacctccgatttcgacacttccactccctccaagacgttcgcaaattcctcaaagac

SEQ ID NO: 131389 - DNA, 223 bp, Glycine max
gccgtaggtagcagttgcacacggcgcaaaggggaacaagaagaagaagatggtgtccttgaagcttcagaagcggctcgccgctagcgtcctaaagtgtggcagaggcaaggtctggctcgatccaaatgaagtcaatgaaatctccatggccaattctcgacaaaacataagaaagttggttaaggatgggtttattatcaggaagccaactaagattcac

SEQ ID NO: 131390 - DNA, 226 bp, Glycine max
ctcgttttaagtgttccccacccattcgtgatgcatacaacaaagacaaattatgggaggctgtattagagggacacattgacctattaagtactgatcattcaccaactgtgcctgaactcaagcttatggaggagggtgacttcttaaaagcttgggggggcatatcatctttgcagtttaatcttccagtgacgtggtcatatgggaagaaatatggacttac

SEQ ID NO: 131391 - DNA, 224 bp, Glycine max
cttctttcactctttcgcttctgaatcttcaacaatggtgctcgaggcgacgatgatctgtatcgacaattctgaatggatgcgtaacggagattactctgcttctcgatttcaagctcaagcagacgctgtcaatctcatatgcggtgctaaaacgcagtctaatccggaaaatacagtgggagttctcacaatggctgggaaaggcgttcgtgttttggtta

SEQ ID NO: 131392 - DNA, 217 bp, Glycine max
ctcgacactctcatccttgcctctagcgacggttccgtgcatcctactccatctcttcctccatcgccgcctctaagataaaaaatccattcggtttcgtcaatgccgatacagatgagttgttggctgaaccaaattgcttcgttcaagcgcacgatggacctgcttacgatgtcagattttatggtgatggcgaagatgctctgttgctgagctg

SEQ ID NO: 131393 - DNA, 220 bp, Glycine max
gcaaaaagacagaatcccaggcgaggagaaagatggaggggaaggagcaggatgtgtcgttgggagcgaacagagttccccgagagacagccaattgggacggcggcgcagagccaagacgacggcaaggactaccaggagccggcgccggcgccgctggttgacccgacggagtttacgtcatggtcgttttacagagcagggatagcagagtttgtgg

SEQ ID NO: 131394 - DNA, 221 bp, Glycine max
ttggaaattagtatacgtggatcatgaaaatgacattcttcttgttggtgatgacccttgggatgaatttgtcagctgtgtccagagcataaagatattgtcatctgcagaagtgcagcaaatgagcttggatggggatttaggtggtaatgttccaatccccaatcaagcttgcagtgggacagacagtggcaatgcatggaggggacagtatgaagata

SEQ ID NO: 131395 - DNA, 234 bp, Glycine max
cgaggcataatgagcattttcaggtctactataagttcaacagtctttctatgctcagggagcctttgatgttgatttctggctttttatttctgtttgttgcgtgcattgtctacacgcatgcagatatatcaatctccaaatcttctgcatcttatttggcaaagctccagtgggacgaggtgcaagcaactattcagcaggtccatggtatcattggccgctgcttaactg

SEQ ID NO: 131396 - DNA, 229 bp, Glycine max
cgtgtcgtccgcggggaagcctccgctttcgacttcctctttcaagagaaagtgcagctctgagaatttaggctctggaaaatgcggtagtcctccagccgctgtcattgttccaaaaagagtaggaaaatgaggttgaagagggtagtgagggtaccggctataagcttgaagatggctgatattccaccagatgattattcttggagaaagtatggacagaaaccaa

SEQ ID NO: 131397 - DNA, 218 bp, Glycine max
gtgagaatcatggcttccttaagctccttagtgctgctccttgcagctctaattctatcccctcaagttcttgcaaactatgagaatcccccagtgtacaagcctcccactgagaaaccaccagtttataagcccccagttgagaagcctcctgtttacaagcctccagttgaaaaccgaccaatttataagcctccagtagagaagccaccagtgta

SEQ ID NO: 131398 - DNA, 216 bp, Glycine max
gcaaaatgtttggttttgttcacttgtacaatggccaagaggctgtgtcaacagggttcatcaagcttctgaagaaggaagattctgtagtgagcacctacagagatcatgttcatgcattgagtaagggggtcccatctcggcaagtgatgagtgaactgtttgggaaggcgacagggtgctgccgaggtcaaggtggttcaatgcatatgttct

SEQ ID NO: 131399 - DNA, 215 bp, Glycine max
ctttgatcaaataggccttgctcaaaagattgaaaagcatgagcttcttgagatgagacgtgttgctgcttatatttacaagaaggcaggtaggtggaagcagtctattgctttgtcaaagaaggataacctttacaaagatgccatggagacagcctcccaatccggggagcgtgaacttgctgaggagttgcttgtttatttcattgatcagg

SEQ ID NO: 131400 - DNA, 215 bp, Glycine max
gtgtttcgctgtctctcccatcctttcgcattctcaatacccttttgatttgtgaaaggaaagcgaacatggttgagcaggtccaagagcctacgatggtgggcaaggtcgccggtcagcgccatctccgcgctggtctttcatctggtattagaagttatgatggagcctaccgccacccagctatgtaccaaagaccctcttttgggaattac

SEQ ID NO: 131401 - DNA, 213 bp, Glycine max
tgaaacttgaaagacacaagagtgagagaaggaaaaatagcagaagaagatcatggctgattgggggccagtttttgtgtctgtggtgctcttcattctcttgactccagggttgctgatccagattcctggtaaaggcaagatggtagagtttggcaactttcagacaagtggagtgtcgatattggttcactccatcctctactttgctct

SEQ ID NO: 131402 - DNA, 214 bp, Glycine max
attctctctgtgtatttccctacctctcccttcaagatgcagatcttcgtcaagaccctcaccggcaagaccatcacccttgaggtggaaagctctgacaccatcgacaacgtcaaggccaagatccaggacaaggaaggaatccccccggaccagcaacgtctcattttcgccggaaagcaacttgaggacggccgtacccttgctgactaca

SEQ ID NO: 131403 - DNA, 214 bp, Glycine max
ctccctcagaagcgaagaagaagccacagagaactagtctgctactctcagccgcaagaaaaaaatggcatctcacatcgttggatacccccgtatgggtcccaagagagagctcaagttcgctctcgagtctttctgggatggcaagagcagcgccgaggatttgcagaaggtgtcttctgatctcagggcatccatctggaagcagatggct

SEQ ID NO: 131404 - DNA, 214 bp, Glycine max
cgatcgcattgcttcgcctcacaacagcagctggagcagcaatggctcccaaacgaggtggaaaggctccggctcttgccgctaagaagaagcgtcgagaaggtcacgaatccgttgttcgagaagcgtccgaagcagttcggaatcggaggggcgttgcctccgaagagagacttgactaggttcgtgaagtggccaaagaatgttcaaattc

SEQ ID NO: 131405 - DNA, 212 bp, Glycine max
cccatctcgggtttcgagggtgacaacatgattgagaggtccagcagccttgactgagacaagggaccaactctcgttgaggctcttgaccaaatcaatgagcccaagaggccctcagacaagccactcaggcttccattgcaggatgtctacaaaattggtggtattggtaccgtgccagtgggacgtgttgagactggtgtcgtgaagcc

SEQ ID NO: 131406 - DNA, 212 bp, Glycine max
ggaagaggaaatctggggtgcattcttcaaggtggaagggtcagcagtccttgcaggcacagagtaaaagatccattttcaaataaagtaccgtgtgatgtattaatggagtaatgcgtttatgtgcttgtgacggtaagacttgcatgcggggccatgtaaatacctttaatgataactatgagaagaatgtgactggtagtagagtttat

SEQ ID NO: 131407 - DNA, 211 bp, Glycine max
catggaccagaataccagggacattattatgcgtgaattccgttctgggtcttcccgtgtcttgataaccactgatcttttggctcgtggtattgatgtccaacaagtgtctctagttataaattttgatctcccaacacagcctgagaactatctccatcgtattggtcgtagtgggaggttcggaaggaagggtgttgcgatcaacttt

SEQ ID NO: 131408 - DNA, 217 bp, Glycine max
ctgcataaacttttcgaggaatgttcaagatagtgttgcccgcggtttttgctatgaacttgctcagatgtgttatatatctggaatggcatttacacctgagccagtagttcccccagtcagtgctcgccctgatcaagtggaaaaggttcttaaaactcggtatcacgatgccaagaataaactgcaaggaaaagagcttgatttactcattgtt

SEQ ID NO: 131409 - DNA, 221 bp, Glycine max
ctgccagtagtcatatgcttgtctcaaagattaagccatgcatgtgtaagtatgaactaattcagactgtgaaactgcgaatggctcattaaatcagttatagtttttttgatggtatctactactcggataaccgtagtaattctagagctaatacgtgcaacaaaccccgacttctggaagggatgcatttattagataaaaggtcaacacaggctctg

SEQ ID NO: 131410 - DNA, 210 bp, Glycine max
ccgatgcaccagcttcaggcaaagactatacaaccaaacaggaaatggaaaagcagacttcactcttgatcaagtgtatgctgctgaattgcgcactaggtgtccaagatctggtggggaccagaatctctttgtcctagactttgttaccccaattaaatttgacaacttctattacaagaacttgttggccaacaagggtctcttaag

SEQ ID NO: 131411 - DNA, 223 bp, Glycine max
aaaaaaaattgttttcgtgtggaaacaaaaaaacaattcaaaaacaaacatatgatggtgaagccgagtagcgaaaagccagaggagcatagggattccaagtactacaaaggggtccgaaagagaaaatggggcaaatgggtatccgaaataagactacccaacagccgtcagaggatttggttgggatccttcgacacccccgagaaggccgcgcgtgcct

SEQ ID NO: 131412 - DNA, 259 bp, Glycine max
attaattgcaagaatggcacttcgttgcttggtgatgtccctttctgttctcttcactcttggtcttgcgagagaaagccatgccagagacgaagatttttggcatgctgtttggccaaacactcccattccaagttcattgcgagatcttctaaagcctggccctgcaagtgttgaaatcgatgatcaccctatgcaaattgaagaaacacagtacccgaaaaccttcttctataaagaagaccttcatccaggcaaa

SEQ ID NO: 131413 - DNA, 257 bp, Glycine max
gtaaaacaaagaaatggcttctcatcatctccaatatcttgtgcttgccatagccacacttctcacaatctcttcacatgcacaactcactcctgatttttacaacaatgtttgtcctcaggcactgcctatcattaagtcagttgttcaacgagcaatatttcgtgaacggcgcattggagcatctttacttcgtttgcacttccatgactgttttgtcaatggctgtgatggatcaattctgctggatgacaccc

SEQ ID NO: 131414 - DNA, 255 bp, Glycine max
acactctgtaactctttattttattttctttctttctttctccgatcgcatagctcgctcgcaaccaccatgccttcccgaagaagaactctcttgaaggtcatcattctcggtgacagtggggtggggaagacatctttgatgaaccaatatgtgaataagaagtttagtaatcagtacaaggcaaccattggagcggattctttaaccaaagaagtgcaattcgaagataggcttttcaccttacagatttgg

SEQ ID NO: 131415 - DNA, 255 bp, Glycine max
agtaggcaagagattgggttttaagctgttaaaataacagtgaagtttggtacaaaatggcttcagttggtgtggcaccaacatcatcaggcttgagagaatccagtggtgttgatagattgcctgaggagatgaatgatatgagaattagggacgataaagaaatggaagccaccgttgtcgatggtaacggaacggagaccggacatatcattgttactaccattgggggtagaaatggtcaaccgaagcaga

SEQ ID NO: 131416 - DNA, 254 bp, Glycine max
ggcgacatggtggttaaacagattgatagggcgaaaaaagaaggtgacggtagactggccatatccttttgctgagggcaagttatttgttctcaccataagtgctggcttggaaggttaccatgttagtgtggatgggaggcatgtgacatcctttccctatcgcacgggatttgctcttgaggatgctactggactatctattaatggggatgttgatgtgcactctatattctttgcttccttacctacat

SEQ ID NO: 131417 - DNA, 255 bp, Glycine max
ttgggaagctccttcattgcttcctgtgttgccaagaggaattcaaggccattctccacagccacagggctcaggtgttgagacccccattggatcgcatggtgtctgaatactttgagcgcagtgtgaaggctttagatgtttgcaatgccattcgtgacggtattgagcagattcgccaatggcagaagctgttggagattgtgctctatgcattggggcatcagaggagcattggtgagggccaatttcgta

SEQ ID NO: 131418 - DNA, 255 bp, Glycine max
tttctttctcttcctgcagaagctatccgtgttacttgttcccaagtctccgacaagcaaagtacatggttgatttggaaatccaggtccccagcgcattcgacccgtttgccgaggcgagagaatcagatgcccccggggcaaaggagtatgtgcacatacgaattcatcagaggaatggaaagaagagtctgacaacagtgcaagggctgaagaaggagttcagctacgagaagatcctcaaggacctcaaga

SEQ ID NO: 131419 - DNA, 249 bp, Glycine max
gaaagatcaagactgcttattctttgttcttcatctaacccaacgggatctgtctaccccaaagaattacttgaagagatagcccgaattgttgcaaagcaccccaggcttctggttctctctgatgaaatttacgaacacataatttatgcaccagcaactcacacgagctttgcatctttaccaggaatgtgggacagaactcttactgtgaatggattttctaaggcctttgcaatgactggttgg

SEQ ID NO: 131420 - DNA, 252 bp, Glycine max
gccattcgtattgtcgcagagaaagaaaaccctagctcaccgtttcaagatgcaaatcttcgttaagaccctcactggtaagaccatcactctcgaagtcgagagttcagataccatagacaatgtaaaggccaaaattcaagacactcaagggatcccaccagatcagcaacggctcatttttgctggcaagcagcttgaggatggacgtacccttgctcgatataacatccaaaaggagtccactctcca

SEQ ID NO: 131421 - DNA, 252 bp, Glycine max
ctttctcattccccatctcctcaccttattcagccactgctaatttctagggttccgaaatggacgctggcggaaagatcaagaagggcgccggaggaagaaagggcggcggccctaagaagaagccggtttcaaggtccgtcaaggccggtctccaattccccgtcggaagaattggccgttatttgaagaaaggaaggtacgcccagcgtgtcggtaccggtgctcccgtttacttggccgcagttctcg

SEQ ID NO: 131422 - DNA, 246 bp, Glycine max
ctctcacctgaaaatgtcttgctgcggtggtaactgtggttgcggaagctcctgcaagtgcggcaacggctgcggaggctgcaagatgtacccagacttgagctacactgagtcaaccaccaccgagaccttggtcatgggagtggcacctgttaaggctcaatttgagggtgctgaaatgggtgtgcccgctgagaacgatggctgcaaatgtggaccaaactgctcctgcaacccctgcacttg

SEQ ID NO: 131423 - DNA, 252 bp, Glycine max
aaaaccctagcagccggcgagaatggcagacgttgaggttgatgcggcggcacggcaggggcagcgcaccgaagaagagaacgttcaagaaattcagcttcaggggcgtggatctggacgcgcttctggacatgtccaccgacgaactggtgaagatgttcagtgcgcgtgcacgtagaaggttccagagaggtctgacgaggaagcccatggccttgattaagaagctccgcaaagctaaaagggaagcac

SEQ ID NO: 131424 - DNA, 256 bp, Glycine max
agtaacttcaactggtcttgctcctgaaattgcttactttcatactgaggaattttctgaagaaggtcatgatggaggaaataagagctcggaatttgttaatgacatcataataaaacctgctgaccgtcataatcttttgagacctgagaccgtggagtcattgtttgttttgtaccgtatcacagaagatccaaaatatcgggaatggggttggcaaatctttgaagcttttgaaaatcacacaaaggttgat

SEQ ID NO: 131425 - DNA, 248 bp, Glycine max
agagttttcaaatggcagagggaaaaggtagagtttgtgtcacgggaggcactgggttccttggttcatggatcatcaagagactccttgaagatggatatgctgttaataccactattagatctgacccaggacgcaagagagatgttagcttcctcacaaacctacctgctgcatcagaaaagctaaaaattttcaatgctgatctcagcgacccagagagttttggtccagcagttgagggttgt

SEQ ID NO: 131426 - DNA, 251 bp, Glycine max
cggctcgagaatttgttgagtttttgaacttaatggccaagaaaatgaaggaaactgatgcagaggaagatctcaaagaggctttcaaggtgtttgacaaggatcaaaatggctacatttcagcaagtgaggtatatgtataaacttttattctttctattcactttttattgtaactttctttctctgacggcaatgaccaatcaaagtattcatgagatttctgacaaagtaaggttccttcaaacttg

SEQ ID NO: 131427 - DNA, 249 bp, Glycine max
gttttacacagagaagtacatggggttgccatctgaaaacaagttgggatatgaaagcggttctgttatgaaccaagtgcagcagttgaaagggcggttgttgcttgtgcacggcatgattgatgagaatgttcacttcaggcacactgcaagacttatcaatgcacttgtggcagctggaaaaccgtatgagttaatagttttcccagatgaacgtcacatgccaaggcgtcatagcgatcgagttta

SEQ ID NO: 131428 - DNA, 252 bp, Glycine max
cacaaaacttgctatagcagtaagctataactcatttgaggctctgtgagaattgagaaatggctaaagatgttgaggttcaagagcaaggaggagagtactctgccaaagactaccatgaccctcctccagcacctttgttcgacccagaggagctcacacagtggtccttctatagagccctcatcgctgagttcatagcaacccttctcttcctttatgtcactgtgctcaccattattggctacaaaa

SEQ ID NO: 131429 - DNA, 244 bp, Glycine max
ctcacaaggactgagtatgaccgaggagtcaacaccttttctcccgaaggccgtttgtttcaggttgagtatgcaatcgaagccatcaagctgggatcaactgcgattgggttgaagaccaaagaaggagttgtccttgcagttgaaaagcgcatcacatcgccgctcctggagcctagtagtgttgagaaaattatggaaattgatgagcacatcggttgtgcaatgagtgggttgattgcag

SEQ ID NO: 131430 - DNA, 249 bp, Glycine max
tctcgagccgaatcggctcgagcagaaacacacttctttttgctacttgtgcaaaagaggtgaccactaaagcgcaggttactgtcgtgatgtctgataaggcgttggtcaagcatttgcaaaaagaggtggctagattggagagtgagttgaaaactcctggtcctgctacctccaattgtgattatgcagcattattgagaaagaaagatcttcagatagaaaagatggagaaggagattagggagc

SEQ ID NO: 131431 - DNA, 247 bp, Glycine max
gctcagagcaccaacttccctcagttcaaacctgaggaaataactgccatcaataatgactttaatgagcctggatcacttgctccaactggattgtatatcggtggcaccaaatacatggtcatccagggtgagcctggtgctgtcattcgagggaagaagggtcctggtggtgttactgtgaagaagaccggtgcggccttgatcattggcatttatgatgaaccaatgactccaggtcaatgca

SEQ ID NO: 131432 - DNA, 245 bp, Glycine max
ctcgagccgaaaagccgttttcaagttggagactcccttgtgttcaactaccaatctggcaaagactcagtgctctatgtgaagagtgaagactatgccagctgcaacactaattcaccctatgcaaaatactctgatggccacacagtcatcaagctaaaccaatcaggccctcacttcttcattagtggcaacaaagacaactgcaacaagaatgagaagttgacagtgattgtgcttgctga

SEQ ID NO: 131433 - DNA, 244 bp, Glycine max
gaagggtcatggaatgcagttcccaaagggtggttgggaaactgatgaatccatggaacaagctgctttaagggaaaccatagaagaagctggggttgttggcagtgttgaaggtaaattgggaaaatggtattacaagagcaaacgccaacccataatgcatgagggatacatgttccctttgcttgttaagaaggaattggataactggccagagatgaacacaagaaaacgaagatggatg

SEQ ID NO: 131434 - DNA, 247 bp, Glycine max
gtggtttcagtgagtgatcggtgttcacttgatccttcataagtcgtcatcatcatcatcatcatcaccgttgattgaagaagatgccgatcagaaacatcgccatcggaaggcctgaagaggctactcaccccgacacgttgaaggcggggttggctgagttcatctccaccttgatcttcgtgttcgccggttcaggttccggcatcgcctacaacaagctcaccgacaacggcgccgccactcc

SEQ ID NO: 131435 - DNA, 245 bp, Glycine max
tgctgagttgcagcgtcttactggcatctacaagaatattttgaacaatgctggggtcaagctgattgaaggccatggaaagattatagatcctcacacggttgatgttaatgggaagctatattcagccaaacacattttagttgcagttggaggtcgccccttcattcctgatatccctgggaaggaatatgcaatagattcagatgctgcccttgatttaccaacaaaacctgtgaaaatag

SEQ ID NO: 131436 - DNA, 157 bp, Glycine max
agctcgagcctgaggaatcttgagaaatggcaggggacagtaagagcaagattctgttcatcggagggactggttacatcggaaaattcatcctggaagccagcgccaaagctggccacccaactttccttttggtgagggagtccactctctccaa

SEQ ID NO: 131437 - DNA, 243 bp, Glycine max
atagtgctaagaactctaatggtggacaagatgaatatgctgatattcaagtcccttcagatttctttgctgctagttttctctatcagaaacaccacagcagaaaagaaaacccatcacacaaaacacacatacataattcacatggacaagttcaacatgccagagagttttaacgaccatctcctctggtttgattcatcactaaaatcagtatcagactcagcagagatgctctacaca

SEQ ID NO: 131438 - DNA, 240 bp, Glycine max
gtttcactcacactgtgtttagagcagaatcagatcgtgtgttccgtacgttcgttcgttcatttccagtgtcaaacatggcgtctcagatgagcaagaagagaaagtttgttgcggacggagtgttcttcgccgaactgaacgaggttctgactcgtgaattggcggaggacggttactccggcgtggaagttagggttacgccgatgcgcaccgagatcatcatcagagccaccagaa

SEQ ID NO: 131439 - DNA, 241 bp, Glycine max
aaacacgacagcaagactcctactaatactaaagaagcagtggcgtattgtgctgtgtcggtggcattgttgttggagtgagcgaagaatatgtattctagagattcatggggtggaccgttggagataaacgcgacggactcggcgacggaggacgagcggagccggaacctgcaggacgttgacagggcagcgctgtcgcgtcccttggatgagacgcagcagagctggctccttggcc

SEQ ID NO: 131440 - DNA, 247 bp, Glycine max
gcagtttcagacacagagagaggggtttcggactggaaggactgacgctgcgtctcttcctcttctctgtcgatccatccctcattcctaatcctccaatccaaccacctcagcctcacactcacttatacacatatctgaacgcgtatcgtccctcctatggcttcaaagcgcatcctcaaggagctcaaggacttgcagaaagacccaccaacttcttgcagcgctggtccagtagctgaggaca

SEQ ID NO: 131441 - DNA, 246 bp, Glycine max
aaacacatttggtcacagcatactccactctctctacctcagagacttattaagatgaagcccaagacttgcgagctttgtcatcaactagcttctctctattgtccctccgattccgcatttctctgcttccactgcgacgccgccgtccacgccgccaacttcctcgtagctcgccacctccgccgcctcctctgctccaaatgcaaccgtttcgccgcaattcacatctccggtgctatatcc

SEQ ID NO: 131442 - DNA, 249 bp, Glycine max
gttttctcttcttcgttcgtttcgttgaaaagcgactttttctctctgcaactctcccttttcttccttcgtagatcgaaagggaatcttcttccatggcctccaagcggattctgaaggagcttaaggacctccagaaagaccctccaacctcttgcagcgccggtcctgtagcggaagatatgtttcattggcaagcgactataatgggtccccctgatagcccttatgctgggggtgtttttctag

SEQ ID NO: 131443 - DNA, 252 bp, Glycine max
gctggtgctctgtggggattatcagtctcggaaactaacagtgttgccattggacgagaaggaggtgttgcacctctgattgcacttgcacggtctgaagcagaggatgttcatgaaactgccgcaggagcactatggaatcttgctttcaatgctagtaatgctctaagaatagtagaggaaggtggagtatctgcacttgttgatctctgttcttcatcagtatcaaaaatggcacgattcatgtctgcg

SEQ ID NO: 131444 - DNA, 253 bp, Glycine max
gtttcaccgcacgaatatcttgttgtttggagcgatccgagaaaaactctgtaaacatgttggtttaccaggacctccttacaggtgatgagcttctctctgactccttccgttacaaggaaattgagattggaatgctgtgggaagttgaggggaagtgggttgttaaaggagcagttgatgtagacattggtgcaaacccttctgctgagggtggaggagaagatgagggagttgatgatgcagctgttaa

SEQ ID NO: 131445 - DNA, 223 bp, Glycine max
atcacagctgtcattgctcttggattgtttgagatgattctctggtattttgagtatgtaaatttcaacaatactggaatgagacctattgtgctcacaacatgtgttgtcactgttggggctataagaaaatcaatatcacgacttctcattctctctgtttcaatgggttatggtgttgtgcgacccactctgggtggtcttacatcaaagggtcctttac

SEQ ID NO: 131446 - DNA, 218 bp, Glycine max
caattattggtgttttttcattgtttggattggtgtcaacctgggatgggattggagctttattgtatgcacattaacaattctattcgcaattgtgttcatatgcatgggcaactcgttgtaccgaaacaatgtcccaaagggaagccctctagttcgaatcattcaggtgtttgtggcagcctttagaaacagaaaacttctgattccacacaaca

SEQ ID NO: 131447 - DNA, 247 bp, Glycine max
gaaagccgtgttgaatagaataagaataagaaaatgtaaagatttcttaatggagaagtgagcggtgagaggaaacagaagagagaagagcaatcggtgagtgacatggaatggattcaggtcctccggcgaacgatttgtgttcagtgtgccatggcaactttcatattccatgccaagccaattgttctcactggttttgcggaaattgcataatgcttgtgtggcatcacgatcagtgggttgt

SEQ ID NO: 131448 - DNA, 251 bp, Glycine max
ctcaccgattgctagaatggaatttcgatgctcagtcatctcttttaccattctcttctctcttgctcttgcaggagagagccatgtccatgcatcgctacctgaggaagattattgggaagctgtttggccaaacactcccattcccactgcactgcgagagcttctaaagcctctccctgcaggtgttgaaatcgatgaactccctaagcaaattgatgatacacagtacccaaaaacattcttctata

SEQ ID NO: 131449 - DNA, 251 bp, Glycine max
catttttctctctcccttagtcaaagggattcatcgttcttcttcccaggttatttagaaaagcaaaatggtgaagatttgctgcattggtgctggatatgtggggggtcctactatggcagtcattgcacttaagtgcccatccattgaagtcgctgttgttgatatctctaaatcccgcattgcagcctggaacagcgaccagcttcctatctatgaacctggccttgatggtgttgtgaagcaatgcc

SEQ ID NO: 131450 - DNA, 252 bp, Glycine max
aaagaaaggcagcgatggaagaagacttcgacatccccggcggcgaggaaatggatctcggcgaagacaaggtcggcgaggagcgggagatcggctcccgcggcctcaagaagaagctcctcaaagaaggtcaaggctgggaaacccccgaagtcggcgacgaagtccaagttcattacacggggactttgctcgacggaactaagtttgattcgagccgcgacagggattctcccttcagcttcacgctcg

SEQ ID NO: 131451 - DNA, 254 bp, Glycine max
tgcaggctgtggttgctgccctgtgtatgaatatttatattgttggtttgaatcaattgtctgatgttgaaattgacaagataaacaagctttatcttccattagcatctggggaatattcctttgaaactggtgtcactattgttgcatctttttcaattctgagtttttggcttggctgggttgtaggttcatggccattattctgggccctttttgtaagctttgtgctaggaagtgcttattcaatcaat

SEQ ID NO: 131452 - DNA, 258 bp, Glycine max
ctgattcactgcaccttcggtcggagttatatctgttgtcgctatgtatgacgatggagatatttgattgaagttattcaccaaaatttgcataaggggaaaactaaggctaggtttaggctaatgggggcctcaagctccaaaatggatgatgatgataaggcactccagctttgccgtgaaaggaagaaatttgttaagcaagcacttgatgggcgttgctcttttgcagcttctcatgtttcatatgtccagtca

SEQ ID NO: 131453 - DNA, 229 bp, Glycine max
gcaaaaagcaagaatcccaggcgaggagaaagatggaggggaaggagcaggatgtgtcgttgggcgcgaacaagttccccgagagacagccaattgggacgccggcgcagagccaagacgacggcaaggactaccaggagccggcgccggcgcgctaggttgacccgacggagtttacgtcatggtcgttttacagagcagggatagcggagtgtctggccacttatct

SEQ ID NO: 131454 - DNA, 251 bp, Glycine max
tgatgggtagtgtgagttatagcaatctgaagaacgccatgatagcattcttggtccctctaccctccatcctattctacctctcattccactcggccattagtactccttcttcttggtcttctctgtggacatggtgctatcaccaccctctgctattggccaatgtccttttcttcttcaatgtcaatttcctcttctggctcatcggcctaatccaatccagccactggatgattgacccgtattgg

SEQ ID NO: 131455 - DNA, 250 bp, Glycine max
gggtgaggaagaggaagagagaaatgtccaatttgagatcaacacatatgatttcaagattgattctggtcccgtcagcttggtagttaatgcttgtgcaagcagggatcttcaagataacattgtgggagtttgttttgtggcacaaggtataactgctcagaaaacaatgatggaaaaattcccccgaattgaaggtgactacaaggcaactgtacagaacccaaacccattgatccctccattattt

SEQ ID NO: 131456 - DNA, 246 bp, Glycine max
tgttcagattgatgccctagggagagtttcattttcttctattcgtcgtcctcgccctcttcttgaggttgaccctccaaacacttctgctagctctgatcaatagatttcagagaagccccttgagcaggaacctaggtttgctgcaagagtcacaattgaggatggtctttgtcttcttcttgatgtggatgatattgatcgttacctacagttgaatcagccacaagatagtggaacacattt

SEQ ID NO: 131457 - DNA, 245 bp, Glycine max
caagaatgaaatgggtctctaccttcacacttctattcctctcccactcgcccctcacaatctccgcagaagatgggctagtggcgaatggagattttgaggctaccccaagaaacgggttcccaaacgaggcgattgtggagggccccagcgaggtcccaaactggaagtcaaacggcaacgttgagcttgtggaatcggggcaaaaacagggtgggatgatcctcatcgtaccgcagcgtaga

SEQ ID NO: 131458 - DNA, 241 bp, Glycine max
ggaatcaacccttcacctcgtcctccgtctccgtggtggcatgcagatcttcgttaagaccctcaccggcaagactataaccctagaagtcgagagctccgacaccatcgacaacgtcaaggctaagatccaggagcaggacggtatccccccagaccagcagaggctgatcttcgccggcaagcagctcgaggacggacgtacccttgctgactacaacatccagaaggagtcaactctc

SEQ ID NO: 131459 - DNA, 251 bp, Glycine max
ccgcaactcactgtcttccttctctagggtttttagctcccccaatttcttcgctcaacatggttcttcaaaatgatattgatttgctaaatcctccggttgagcttgagaagaggaaacacaagctcaagcgtcttgttcagtcaccaaactctttcttcatggatgttaagtgccagggttgcttcaacataaccactgtctttagccactctcagactgttgttgtatgcggaaactgccagactgtc

SEQ ID NO: 131460 - DNA, 250 bp, Glycine max
gagcgtgggagataccgtaatctgcttgatatgaatgcttacttgggaggctttgcagctgcactgattgatgatcctgtgtgggtgatgaacactgttcctgttgaggctgaggtcaacacacttggtgccatatatgaacgtggattgattggaacctatatgaattggtgtgaagccatgtccacttaccctcgaacttatgacttcatacatggtgactcagtttttagcctctaccagaacaggt

SEQ ID NO: 131461 - DNA, 254 bp, Glycine max
actcgagccgaatcggctcgagcgctgatttcagctgagtaaggctctccatgagcagttatcaccttggtgaaatcacaaacagctgcttcgagccatcatctatgatggccaagtgtgatcctcgccatggaaaatacatggcttgctgtctcatgtaccggggtgatgttgtgcctaaagatgttaatgcagctgtgggaattatcaagaccaagcgcactattcaatttgttgactggtgccccacaagg

SEQ ID NO: 131462 - DNA, 237 bp, Glycine max
ctttttcttctctctcaacaacttcaccttcttcctcctcgcatccgtctcacttcaagggcaagtaccatgatgagcttatcgccaatgctgcgtacattggcactcctggaaagggtattcttgaagctgatgagtcaacagggacaattggcaagcgtttggccagcatcagtgtagagaacattgaatccaacaggcgagctcttagggagctgcttttcactgctcctggtg

SEQ ID NO: 131463 - DNA, 243 bp, Glycine max
ctcagttttattcgaatcccactctcaatctcctttccaaatggccagcgttgaggttgcacagcaaacaccaacaacagttccagaaaatgaaacaaccgaggtaagcaagacccaggaaacaaccccagtcactgaggctcctgcaacagaacaaccagcagctgaggttcctgcaacagaacaaccagccgctgaggctcctgccccagaatcaaccaccgaagcaccaaaggaagaaac

SEQ ID NO: 131464 - DNA, 143 bp, Glycine max
cgtgtatcgaatattagtgcaggggtaaatcatgtagttcagatatccctattggcataggagtacattctgtgcttcttgtgcaagggatcgcagaattacgatggtttttaagaatatgtatcctcaagctattgcaatgc

SEQ ID NO: 131465 - DNA, 248 bp, Glycine max
gagtttaattcgaaactttctgactttggtttagctaaggcgggtcctactggcgatagaactcatgtgtccacacaagtaatgggtactcaaggatatgcagcacctgaatatgttgcaactggtaggctttagcttcacctaaatcatgagttggtggtttaatttcggctcatcatactgataactggtgtctgggttttcatgattttccttatgagttttagtcctcatttgcgcgtcaaacc

SEQ ID NO: 131466 - DNA, 242 bp, Glycine max
aaacgagttgtggctaatcatgcaaggagttactgccagtcagaggttactttctgtccaagtcctcagagtagtttctattcagccactgtctattcggaagcgaaacaaagtttcaccaacactgaggtcagtgagtgtgctagtgttgacaagtcttgtgtaagtggagaaatggcaaattcctgtgattttaatgagagcaggaagaccagcatctgtagagcaatactggcagtgat

SEQ ID NO: 131467 - DNA, 241 bp, Glycine max
ggaagtagctatcaagaagggaaaaaaatattcgaacttcaaagggaaatgattcagcttacaatgacgctctttaagtttgctttcattccaggttacaggaggatgaaagcaattgacaaagatatacgagaatcacttatggtaatcatcaaccgaagattaaaagcaatcaaagcaggggagcctactaacaatgacttgttaggcatactcttggaatcaaattacaaggaatctg

SEQ ID NO: 131468 - DNA, 247 bp, Glycine max
atttccctcatgtgacaattcgggagctgcaaggttttggtcttgtgttagaatgttgggagaacccacccttggaaaaaattaaggaaaacgaagaacctcattgattggagaagttggtttaatggtaaaagtttgtttgccatattttgatcctgagtatgagaacttcagcaatagaatgaaccctccaagggtctctatggacaatgctagttgccatgattgtacactgatcaaggttgat

SEQ ID NO: 131469 - DNA, 248 bp, Glycine max
aggaagatgagtttgagggcatcagtgatagcgaagaagtttaatctgcaacctcacccagaaggtgggttttacgtggagacattccgagaccattccgtccagctttcgacttctcagctcccccccgaatacaaagtggatcgccctgtatcgacctccatctattttctcgttccttctgggagtgtgtctcgcctccatcgcataccctgcgccgaaacctggcatcattacatcggcgaccc

SEQ ID NO: 131470 - DNA, 241 bp, Glycine max
ccctgtcccaggaaaatctgggttttgacaaactacttgaaattgatcaagggaatgaggatcgttggactgacgggtggaatagcgtctggaaagagcacacgtttccaatctgttcaagtcccatgatgttcccattgtagatgctgacgttgtcgctcgcgaggtgttaatgaaagggagtggtggttggaagaaagtcgttgcagcttttggggacgaaattcgtcttgaagatgga

SEQ ID NO: 131471 - DNA, 242 bp, Glycine max
ctgccattgcagctccagcaagtctaacggttgaatttgaaggcaatggttgccatgcgggtgctggccttatgcctaacagaaatgatgcttgtctggctgcttctgaattagccctggctgtagagaggcatgtgttggattctggttcaattgatactgttggcactgtcggtatcctggaactgcatcctggagcaatcaacagcatccccagcaaatctcacctagaaattgacaca

SEQ ID NO: 131472 - DNA, 241 bp, Glycine max
cgagaatctgttctccaagcggaactcgctggtggcgcacgcggtcggattttgggactaccactccttcatcgccgccgccgcgctttttcagccggaacggttcggcaccatcgggaacaagacgatgcagatgatggagatcgccgccttctgcggacacgtcggcagcaagacctcttgtggttatggagtggccactggaggacctttggcctggggtctttgttataatcatgaa

SEQ ID NO: 131473 - DNA, 247 bp, Glycine max
cttacacttacccacagggaggcgaacagagaaactcagagacccgaaggcagatttcaagatgaagttcaacattgcgaatcccaccaccggttgtcagaagaagctggagatcgatgatgacctgaagctgcgagcattttgggacaagaggatctcacaagaggttgttggtgatgctctgggtgaggaattcaaaggttatgtcttcaaaattactggaggttgcgacaagcaaggatttcca

SEQ ID NO: 131474 - DNA, 247 bp, Glycine max
ttccagggaggcatcactcaccaagattttgctgggcacaagggtacaataagagctggtgatgttcaggtatgagtaacactattagttaatgttactgaaaagagaagattaattaggttgttagaatatattatttttgctcgtgcagtggatgaccgcaggaaggggaataattcactctgaaatgccagcagaagcaaacaacaacaagggattgcaactgtggatcaatttatcatccagg

SEQ ID NO: 131475 - DNA, 254 bp, Glycine max
aagaaactaacaaggattcccttagtaacggcgagcgaaccgggaaaagcccaccatgaaaatcggtcgccctcggcgtccgaattgtagtctggagaagcgtcctcagtggcggaccgggcctaagtcccctggaagggggcgccagagagggtgagagccccgtcgtgcccggaccctgtcgcaccacgaggcgctgtcggcgagtcgggttgtttgggaatgcagccccaatcgggcggtaaattccgtcc

SEQ ID NO: 131476 - DNA, 265 bp, Glycine max
gctcgaagcgcaattggacaagcgtttggccagcatcagtgtagagaacattgaatccaacaggcgagctcttagggagctgcttttcactgctcctggtgttcttcaatatctcagtggtgtcatcctctttgaggaaaccctctaccagagcacagctgcaggcaagccctttgtgaatgtcttgaaggaagctggtgtgcttcctggcatcaaggttgacaagggcacagtcgagcttgctggaactaatggagaaaccacc

SEQ ID NO: 131477 - DNA, 257 bp, Glycine max
ctcactcatcaatctcgtttgttctcactaactattacttcatcatgtcgtcgagcacagttggtcaagtcatcaaatgcaaagctgcggtttcatgggaggcagggaagccacttgtgattgaagaagtagaggtggcaccaccacaagctggtgaagtgcgtttgaagatcctctacacctctctttgccacactgatgtttacttctgggaagccaagggccaaactccattgtttcctcgtatatttggtcat

SEQ ID NO: 131478 - DNA, 255 bp, Glycine max
ggtttggagaaaaactacattaaggaggcattttctggaacaaatggacctgctatgggaacaaaagtggccaagtaccctcaatgtccacaccctgaactggttagaggacttagagaacacacagatgctggtggcatcatcctattgctccaagatgaccaagtgcctggcctagaattcttcaaagatggcaagtgggtggagattccaccctccaagaacaatgccatttttgtgaacacaggtgaccaa

SEQ ID NO: 131479 - DNA, 250 bp, Glycine max
ctcgagccgtccgcactccgtcttcatcaatcagcatcaccaccgctccaacacaggggagaatgagggagatccttcacgttcagggagggcaatgcgggaaccagatcggttcgaagttctgggaagtggtgtgcgacgagcacggcatagatccgacggggaagtacgtcggaaactcagatctacaactcgagcgcgtgaacgtgtactacaacgaagcttcctgcgggcggtttgtcccacgcgc

SEQ ID NO: 131480 - DNA, 250 bp, Glycine max
gagaaagagaaatggcaacaagcgaagaagtggttgcgacagcgccggaggcagccgcgccggaggagggttgaagcacaaactggagagaaaatggacgttttggtgcgacaaccaatccaaacccaagcaaggcgctgcttggggaacctctacttcgcaaggtctacaccttcgacaccgttgaagagttctggtgtttgtatgatcaggtattcaagcccagcaagttgcaaatcaatgccgattt

SEQ ID NO: 131481 - DNA, 253 bp, Glycine max
aaactttgcttctttcccaccatagtcccattttttttttatccattaggcaacacagggcaaaaccgcaacctcagacagacaaacatcatggacgcaggttacaatcctcgtcccgtcgaagaggtctttagggatttcaagggtcgcagagctgctttgattaaagccctcaccactgatgttgatcagttctaccagcagtgcgatcccgagaaggaaaatctttgcctttatggatttccaagtgagc

SEQ ID NO: 131482 - DNA, 270 bp, Glycine max
ttcggctcgagggcttcaaaagggagaagggaaggaaagagaactcacaaaaaactattatagcggtgggggaacaaaaccaaaaccaaacaactgaagctggaaggcaccaagaggttggtcacagagagccttctccagagtgatgctctttaccagtatattctggagacgagtgtctacccaagagaacctgaatccatgaaagaactgagagagttgacagcaaaacacccatggaacatcatgacaacctctgcagacgaaggg

SEQ ID NO: 131483 - DNA, 257 bp, Glycine max
ccaatatattccattctctctgtgtatgtccctacctctcccttcaggatgcagatgttcgtcaagaccctcaccggcaagaccatcacccttgaggtggaaagcgctgacaccatcgacaacgtcaaggccaagatccaggacaaggaaggaatccccccggaccagcaacgtctcattttcgccggaaagcaacttgaggacggccgtacccttgctgactacaacattcagaaggagactactcttcacctcgt

SEQ ID NO: 131484 - DNA, 254 bp, Glycine max
ggaaaatgaaaaacaaaaagaaaaagttgtcgatgatgaagatgaagaggacgatgacgatgatgatgatgacgatgatgatgaggaagagagcaagaccaaaaagaagtcatcagcacctaagaagagtggaagagcacaacttggtgatggccagcagggtgagcgacctccagagtgcaagcagcagtagaagtatttatgcagaatgtcatttatgtagttgagttttgttggtgtacgagactgtccta

SEQ ID NO: 131485 - DNA, 252 bp, Glycine max
cggcacgagctcgagccgaatcggctcgagcggctcgagctcaatcaggaacccattagttacaggaacacggaagtatttggatgataatggaagtaccttttgtggagaaccctgcatgattgctggaagtcattcgtgcacccttgacagattgtatgcatgggagagaaaactttatgatgaagtaaaggctggtgagttcatcaagaaggattttgatcgaaaatgtgacctgctaaggcatcaatt

SEQ ID NO: 131486 - DNA, 253 bp, Glycine max
gcactttctctcgtttcaatcgaaaccaaactccaaacgtgggcagaaaattcttcgtcggtggcaactggaaatgccctgggaccactgaggaggtaaagaagattgttactactttgaatgaggctaaagtccctggagaagatgtcgtagaagttgttgtgagccctccttttgtgttccttcctgttgtaaaaagtttgctgcgccctgatttccatgtttcggcacaaaactgttgggttcgcaaagg

SEQ ID NO: 131487 - DNA, 284 bp, Glycine max
gcgtacgtgagcacagaatacggcacaaactcaaaccacgcactttgcgatatctgcgacatctccgaatccccgacaatggccacccaagtgagcaagaagagaaagttcgtagctgatggagtgttcttcgctgaactgaacgaggtactgacaagggagttagccgaggacggatactaccgagcgtggaagttagggttacgaccgatgcacaccgaaatcatcatcagagacaccagaacccaaaacattctacagtgagaagggaaggagaatcaggg

SEQ ID NO: 131488 - DNA, 246 bp, Glycine max
caaagagaatggctcaagcaatggcctcaatgactagcttacgtggttcctctcaggctgtgttggaaggtagccttggctccacacgcttgaatgtggggagtggaagcagggtggcctcagtcacacgtgcagggttcacagttagagcacagcaacaacaagtgaatggtggtgaggtacaaagtagccgtagggcagtgctttcacttgttgctgctggtttgaccactggctcttttgttc

SEQ ID NO: 131489 - DNA, 249 bp, Glycine max
cgatgccacaacttctgtgttggattggtggtacactggaaattaaccatggctcaaacaacaagcctcacaagaataggccttgctggcctggctgtgatgggccaaaaccttgctctcaacattgctgagaaaggctttcccatttctgtctacaaccggaccgcgtccaaggttgatgagacagttgaaagagcaaaacaagaaggaaaccttcctgtgtatggctaccatgaccctaaattcttt

SEQ ID NO: 131490 - DNA, 253 bp, Glycine max
aaatggaggctgtggttgctgccctgtttatgaatatttatattgttggtttgaatcaattgtctgatgttgaaatagacaagataaacaagccgtatcttccattagcatctggggaatattcctttgaaactggtgtcactattgttgcatcattttcaattctgggtttttggcttggctgggttgtaggttcatggccattattttgggccctttttgtaagctttgtgctaggaactgcttattcaat

SEQ ID NO: 131491 - DNA, 249 bp, Glycine max
ggaacacagaaaatggcaaacatacctcgggtgaagcttggaagctaaggcctggaggtttccaagttaggatttggttgtatgggcctaagtggagtgtacaacgatcctgttcccgaagaggttggcatctctttgatcaaacacgcattcaccaaaggggtcactttctttgattctgcagatttttatggagcacgtgccaatgaagttttggtcggaaaggctctcagggactttcctcgagat

SEQ ID NO: 131492 - DNA, 258 bp, Glycine max
cggagaagtttcgtcacgccggagcgatgaccggcggcggatccacggggaggttgccgacgtggaaggagagagagaacaacaagaggagagagagaagacgaagagcgaatgcagctaagatctacactggccttcgagcccaggggaactacaagcttccaaagcactgcgacaacaacgaggtcctgaaagctctctgcgccgaagctggctggatcgtggaagaagatggcacaacttatcgaaagggatgta

SEQ ID NO: 131493 - DNA, 253 bp, Glycine max
ggaaaagaagggagttcgtgtggcagggatagggcacaggatcaagaatagggacaacaaagataagagagttgagctgctacagaagtttgcacgaacacattttccttccgtgaaatacatggaatatgctgttcaagttgagacctacacactcacaaaggcagataatttagttcttaacgtagatggtgcaattggatctcttttcttggatcttcttgctggtagtggaatgttcaccaaacaagag

SEQ ID NO: 131494 - DNA, 253 bp, Glycine max
aagcaggcaaataccacacaacctacaaattcctaaacgaactcgatacctcatactgcacatcttactaccatacatgaaataatagtataaagatggcagagacattcctatatacctcagagtcagtgaacgagggacaccctgacaagctctgcgaaccaatcaccgatgctgtcctcgacgcttgcctcgagcaggacccagacaacaaagttgccagcgaaacatgcaccaaaaccaacttggtcat

SEQ ID NO: 131495 - DNA, 251 bp, Glycine max
ggccctatcaactttcgatggtaggatagtggcctaccatggtggtgacgggtgacggagaattagggttcgattccggagagggagcctgagaaacggctaccacatccaaggaaggcagcaggcgcgcaaattacccaatcctgacacggggaggtagtgacaataaataacaataccgggctcattgagtctggtaattggaatgagtacaatctaaatcccttaacgaggatccattggagggcaag

SEQ ID NO: 131496 - DNA, 251 bp, Glycine max
ggaaccatggattcctctttgcaattaactatcatagccataaggatgaccttgttagtgtttctctggcacactaagagaaatagaggaggtagcaagaacaagagtaaagaggctcctatcccagctggtgcatggccactaattggtcacctccaccttctgggtggcgatgatcaacttctctaccgaacacttggaacaatggctgaccaatatggaccagcattcaacatctggctcggcactcg

SEQ ID NO: 131497 - DNA, 245 bp, Glycine max
ggcgtacgcgtcgctgctggagtacaacaacatcgagggcatgagcttgttctcggagctctctcgccgtcgtattcggagtgtgagcagcctcatcaaggttggccgcatcgagccggtgatggtgctccgtgtcgacaaggaaacgggttacatcgatctcagcaagcgcagggtctccgaagaggacatccaggcctgcgaggagaggtacaacaagagcaagctcgtccactccatcatgc

SEQ ID NO: 131498 - DNA, 251 bp, Glycine max
ggttgcccaggatttcaagactgatctgcgtttccagagccatgctgtgcttgcgttgcaagaggctgctgaggcataccttgttgggctctttgaggacactaacttgtgtgccattacacgccaagcgtgtgactattatgcccaaggatattcagctggcaagaaggattacgtggtgagcgtgcttgagttggtacgttctgtgtttgtgaagatggattgttggtggctgcggatggtgttttgtt

SEQ ID NO: 131499 - DNA, 249 bp, Glycine max
gacattgtttgttgtaggaagaggaatcttgagaaatggcaggggacagcaagagcaagattctgttcatcggagggactggttacatcggaaaattcatcgtggaagccagcgccaaagctggccacccaactttccttttggtgagggagtccactctctccaaccccgcaaaatcacccctcatcgacaatttcaaaggcctcggtgtcaatcttgttttaggagatctatacgatcaccaaagtt

SEQ ID NO: 131500 - DNA, 205 bp, Glycine max
aagagcatccagaaatttgaaaatacaggttctactgggccatgttgactgtgatgctgaaaagtctctgatgagtaggttcaaagttcaaggattccctacaatcttggaaagaagagctgataaagatagtcctattccttatgaaggcgcaagaactgactcggctgttgaatcatttgcattagagcaactggaaataaac

SEQ ID NO: 131501 - DNA, 245 bp, Glycine max
ctcattaattgcaagagtggcacttcgttgcttggtgatgtccctgtctgttctcttcactcttggtcttgcgagagaaagccatgccagagacgaagatttttggcatgctgtttggccaaacactcccattccaagttcattgcgagagcttctaaagcctggccctgcaagtgttgaaatcgatgatcaccgtatgcaaattgaagaaacacagtacccgaaaaccttcttctataaagaag

SEQ ID NO: 131502 - DNA, 244 bp, Glycine max
gctagctaggttgaaaatagtttggttttgtagtaagtgaggtgtggtgccaaaatggtgaagataactcttggtactttcgatgactcttttggtgttgcctctcttaaggcttatttggcagagttccatgcaactctgaaatgtaagaacgctggtgttggttcagccatcgcttacaacgagcttacaaaagatgcagccttggatccaacggggctggtggcagtagtgtggcccatgc

SEQ ID NO: 131503 - DNA, 245 bp, Glycine max
gcatttgagattcttgcgatcagctatgcagtaaagagaagagaaaagagagatagatagggtagacaaatgagtgtatcattgactgtgatggacttcaatctccatgatgatgagccacaagacagtcgtaagacgtgggggaagagaagggatatgtgcataagcgttattaccagttactcacccatcatcctctgtacccaacaaggagtggaagcgcaattggattttctccagcaggg

SEQ ID NO: 131504 - DNA, 251 bp, Glycine max
aagcttgctacggagtttccacattgcataccttaggtcttccgaattcgaagttaatttgcacgatgggttatgactaaggctcagatcaccattgtggtggttggtcatgtggaccctgaggaggcaaccaccattaacgagctgaagaagcctgttgtggagacagaagctccagggcatgccatatgagggcatgcacgcacggcctcggaggggaatcagaacattatgttcacaaaataatctgg

SEQ ID NO: 131505 - DNA, 246 bp, Glycine max
cgttgcgagatgacaagcaatttctgattgatcatccgggatccgcacgaatcacaactgctcagggtgaagaactgaagaaaatgattggtgcagtcacttatactgcgtgcagctccaaaacacagcagaatgtgcagacagtttttgatgctggcatacaggttgcattgaggccaccaaagccacagtagataccacgcaagtcatagacctgtcctttcctctgatatttcattattcagt

SEQ ID NO: 131506 - DNA, 247 bp, Glycine max
ggagatgttattgactgtatccctgtctcacaccagccagcttgtgatcaccctgacctcaaaaatcacaagattcagatgaaaccaaatttccatccagaaggtcacccttttggagaaagcaaagtctcttcaaattccaagccaattactcagccgtggcaccaaaatgggaggtgccctgatggaacaattccggtccgaaggacgaaaaaggatgacatgttaagggcaagctctgttcagc

SEQ ID NO: 131507 - DNA, 246 bp, Glycine max
cggctcgagcgcacagcctcaggaggagaataaggatgtctcacaggacgttcgagcacccaaggcacgggtcactgggatttctccccaggaagcgtgctgctcgtcacaggggaaaagtgaaggcattccccaaggatgacccatccaaggcacccaagctcactgcattcttgggttacaaggctggtatgactcacattgttagagaggtcgagacgccaggatcaaagcttcacaagaagg

SEQ ID NO: 131508 - DNA, 243 bp, Glycine max
gcaagatcgaatggcggcactagagaggaagtggcttttctcctttgccggtgctccccgtcctggccaccccaaatcaatcaggggtcagttaattgatcaatgcagacggtcaaatgtttgtaaactgttggaatgtgactttggcgaaagcaaatgtcattctcccagcagcataatgcagatgtttcaaagctcgcttttctgcttgcaaccccagggtgattcatacacgcgaagatc

SEQ ID NO: 131509 - DNA, 247 bp, Glycine max
cacaaagcgggttactgtctgttcaagctaccatctctctctctctttcttagtgcctccttgccagaagttagaatggcccaagaaactttcctattcacgtctgaatcagtgaacgaggggcaccctgacaagctctgtgaccagatctccgatgctgtgctcgatgcatgcttggagcaggaccctgacagcaaggttgcctgtgaaacctgcaccaagaccaacatggtgatggttttcggag

SEQ ID NO: 131510 - DNA, 244 bp, Glycine max
atagacttgtgtgatatcattaatatggaccctgggcaagctaaggatctctttgaagatactcaagaagcgtttgggcagtaaaaatccaaaaatacagcttctggctctttttgtactggaggcccttagtaaaaattgtggtgaaagtgtatttcagcagatcgttgagcgagatatcttacatgaaatggttaagatagtaaagaagaagccggatttaaatgtgagggacaaaatactg

SEQ ID NO: 131511 - DNA, 247 bp, Glycine max
ctcactttctcgctccccaaacgcccctctctctcctccaatggccgaccagctcaccgacgaccagatcgccgagttcaaggaggccttcagcctcttcgacaaggacggcgatggttgcattactaccaaggaacttgggactgttatgaggtcacttggtcaaaacccaactgaggcagaactgcaggatatgataaacgaggttgatgctgatggcaacggaaccatcgatttcccagagttc

SEQ ID NO: 131512 - DNA, 254 bp, Glycine max
aaaagaagagcatcactgaactaacaaagcaaccctatgtcgaaggtggtttgtgtcaccggagccagcggcgccatcggatcatgggtggtcctcctcctcctccagcgtggttacaccgtccatgccaccgtccaagatatcaaggatgaaaatgagacgaaacatttggaggaaatggaaggagcaaagagtcatctccatttttttgaaatggatcttcttgacatcgactccattgccgctgccataaa

SEQ ID NO: 131513 - DNA, 261 bp, Glycine max
cgagaagagtttgtggtggactatgactacctaatcatagccgtgggagcaaatgtcaacacatttaatactcctggtagtgatggagaattgtcatttcttgaaggaagttgaagatgcacagaagattagaagaaccgttattgactgctttgagagagcaagtttgcctagtgtaagtgaagaagaaaagaagagaattcttcattttgctattgttggaggtggtccaactggagtggagtttgcagcctcactaca

SEQ ID NO: 131514 - DNA, 254 bp, Glycine max
ggatcgagccgctcgagccgctcgagcggctcgagtgctgcataactaaaacctagcactcacccacgtgcgacacgaagcagatcagccgtgaaaaccctaacgggtaagacgatcacccttgaggtggagtcttctgacaccatcgacaacgtgaaggccaagatccaggacaaggaaggcatccctccggaccagcagcgcctcatcttcgccggaaagcagctggaggacggccgcaccctcgccgacta

SEQ ID NO: 131515 - DNA, 255 bp, Glycine max
  unsure (1)..(255): unsure at all n locations
ctccgtcttgtgaaaccgtatatgattgcagttcaaagcaacaatgtatntgctgttaatgaagcgttgaatgagatatatgtcgaggaggaagattatgatagattgcgcgagtcaattgatttgcacgataactttgatcaaataggccttgctcaaaagattgaaaagcatgagcttcttgagatgagacgtgttgctgcttatatttacaagaaggcaggtaggtggaagcagtctattgctttgtcaaag

SEQ ID NO: 131516 - DNA, 256 bp, Glycine max
gcagtttcagacacagagagaggggtttgggattggagggattgacgctgcgtctcttcctcttctctttcgatccatccctcattcctaatcctccaatccaaccacctcagcctcacactcacatatacacatatctgaacgcgtatcgtccctcctatggcttcaaagcgcatcctcaaggagctcaaggacttgcagaaagacccaccaacttcttgcagcgctggtccagtagctgaggacatgttccatt

SEQ ID NO: 131517 - DNA, 258 bp, Glycine max
ccgaggcgaagagaagagaaaaattaagatggaggggaaggagcaggatgtgtcgctgggagcgaacaagttcccggagagacagccgattgggacggcggcgcagagccaagacgacggcaaggactaccaggagccggcgccggcgccactggttgacccgacggagtttacgtcatggtccttttacagagcagggatagcagagtttgtggccacttttctgtttctatacatcactgtcttaaccgtcatggg

SEQ ID NO: 131518 - DNA, 264 bp, Glycine max
ggcaaaatgggttcttcttcttctatgtggacggtgtgtgtgattttggcatcactggtctctgcagcactctgtgccaacccacgcaggccagtggatgtacaatttggccgaaactacgtgcccacatgggcctttgatcacatcaaatatttcaatggtggttctgacattcagcttcatcttgacaagtacactggtactggcttccagtccaaagggtcttacttgtttggtcacttcagcatgtacataaagatggtt

SEQ ID NO: 131519 - DNA, 259 bp, Glycine max
cctgccagtagtcatatgcttgtctcaaagattaagccatgcatgtgtaagtatgaactaattcagactgtgaaactgcgaatggctcattaaatcagttatagtttgtttgatggtatctactactcggataaccgtagtaattctagagctaatacgtgcaacaaaccccgacttctggaagggatgcatttattagataaaaggtcaacacaggctctgcctgttgctttgatgattcatgataactcgtcggatc

SEQ ID NO: 131520 - DNA, 255 bp, Glycine max
ctctctttctctctcttcaaatcaaaacccatcacaattcacaacaacatacaaatcccaaatcctatcttttctcttctcatataaaagaacccttctttcgaatccttcccgctcttttccctctgatttaattcatgcgcagatccaaaccctaatccatctctccgagggtttgatggctgaccaaggattggaagggagccagccggtggatctacagaagcatccttctgggatcgtgcctacccttca

SEQ ID NO: 131521 - DNA, 254 bp, Glycine max
caaattcgtcaatcaatctcccaccgagttccctacatggctgaatccgtggagcttccgagtcgcttggcgattctcccctttcggaacaaggtcctcttgcccggcgccataatcagagtccgctgcacttcccccaccagtgtgaagttggtgctacaagagctttggcagtgataagagattggggtgattggcatcctgccggttcgtgatgttgttgaaattaagccagtggggtcccactgtatctg

SEQ ID NO: 131522 - DNA, 255 bp, Glycine max
ggttcatcgagtacaaagttgatgtgatctttgctggccatgtccatgcttatgaaagatcatatcgatactctaatgttgactacaacataacaggcggtaacaggtatccattacctaacaaatcagcacctgtttacataacagtcggagatggtggaaatcaagaaggtcttgcttcaaggtttttggatccacagccagaatattctgcttttcgagaagcaagctacggacattccacactggagataa

SEQ ID NO: 131523 - DNA, 283 bp, Glycine max
gcgcacgtgagctcggctctcgggtgcatatactccactacaaggatatcctctcagctgggtatcctccacaacaagggtatcctccagctgggtaccctccacatcaaggctatcctcctgctggttaccccccagctggttatcctggttcatcacatgcaccaggttctcatgggcacggcggtatgggagcaatgctcgctgggggtgctgctgcggctgctgctgcttatggtgctcaccatgtctctcatggctcccatggctcctatggccaata

SEQ ID NO: 131524 - DNA, 263 bp, Glycine max
tgaatcttcaacaatggtgctcgaggcgacgatgatctgtatcgacaattctgaatggatgcgtaacggtgattactctccttctcgatttcaagctcaagcagacgctgtgaatctcatttgcggtgctaaaacgcagtctaatccagaaaatacagtgggagttctcacaatggcagggaaaggcgttcgtgttttggtcacccctaccagtgatctgggcaagatcttagcctgcatgcatgggctagatataggtggtg

SEQ ID NO: 131525 - DNA, 252 bp, Glycine max
ttctcaaaaccattgactttggattatctgtcttctttaagccaggtgatatatttaatgatgtggtgggcagcccatactatgttgccccggatgttttgcgaaagcgttatggtcctgaggcagatgtttggagtgctggtgttatcctttacattcttttgagtggagtacctccattttgggctgaaaacgaacaaggaatatttgaacaagttctgcgtggtgatcttgacttttcttctgatccct

SEQ ID NO: 131526 - DNA, 250 bp, Glycine max
tagataagccttcctctctgcagagtgcacagctttctctccccgttgcttcattcattctcaataacataccaatcattcttagaaaatgagggggggcttgtggcaacttgggcaatcgatcactcgccgtcttgcccatggagataagaaggctgttgctcgtcgatgttttgcctcagaagctgagctgaaaaagacagtgtttcatgacttccatgttgctcatggtgggaagatggttccattt

SEQ ID NO: 131527 - DNA, 251 bp, Glycine max
caaagttcaaccgccgattatacacagagatatccgttcaagtaatgtgctaatatttgaaatatacaaggccaagatagctgactttaacctttctaatcaggcccctgacatggctgcacgtcttcattcaactcgtgtattgggaacttttggttatcatgctccagaatatgcaatgactgggcagttgactcaaaaaagtgatgtctatagttttggtgttgttcttcttgagcttcttacaggaa

SEQ ID NO: 131528 - DNA, 256 bp, Glycine max
tgtgctcatggtggaggtgccttttcagggaaggaccctaccaaggttgacagaagtggtgcctatatcgtgaggcaggctgcaaagagtgttgtggcaaatggccttgccagaaggtgcattgtccaagtttcctatgccattggtgtccctgagcccttgtcagtgtttgtggacacttatggaactgggaagattcctgacaaggagattcttcaaattgtgaaggagaatttcgacttcagacctggaatga

SEQ ID NO: 131529 - DNA, 257 bp, Glycine max
caaccacttatcccctttctccttctaacgagtgaggaaaaatggcgcgtaagaagatcagagagtatgactcaaagaggttgttgaaggagcactttaagagactctctggcaaggagttgccgatcaagtctgcacaaattaccgcatcaactgatttcactgagctacaagagaaggaaccctggctttcatcttctaaattggttgttaaacctgacatgttatttggaaagcgtggcaaaagtggtttggtt

SEQ ID NO: 131530 - DNA, 253 bp, Glycine max
aatctttcgaagttcgtttgcgtgtgttgtgtggtcagtcaccgatggcagcaccacctgcgagggctagtgccgattacggttacctcatcaagcttcttcttattggcgatagcggtgtgggaaagagttgtctgcttttgcgattttctgatggttccttcacaaccagttttatcaccaccattggcattgattttaagataagaaccattgaacttgatggcaaacgcattaagttacaaatctggga

SEQ ID NO: 131531 - DNA, 252 bp, Glycine max
gggagatgctgtcaagtatgtgaaacaactacaagaacgtgtgcaaactctggaggagcaagcagcgaagagaacacttggatcgggagtgctggtgaaaagatctattatcttcgctgatgatgaaacttctgacagccactgtgagcattcactccccgaagtcgaagtcagggtttctgggaaagacgtactcatcagaactcaatgcgacaaacacagtggacatgctgcaatgatactcagcgaatt

SEQ ID NO: 131532 - DNA, 244 bp, Glycine max
  unsure (1)..(244): unsure at all n locations
cctcactctaacacacgcgtcccagaataattacaattataccaataaataaatagttaaatattattaaattaaataaccttcctttttttcctcttcttcctctccgaactttgaaaacgtgcaagcaaaccccacacctccacacaacatacgattaaanggtnctggtggtgttactgtgatgaagaccggtgcggccttgatcattggcatttatgatgaaccaatgactccaggtcat

SEQ ID NO: 131533 - DNA, 252 bp, Glycine max
ctatcgagccgattcggctcgagcaaatcagcacttgagcttgatcacttggaaatcatagcacaggctggccctggtgttcatctttcccccactgacatttcttctcagctcccaacacagaaccctgatgcacccgttatgttggaccgtatattgcgcctattggcttgctacaatatcctctctttttctctccgcactctccctgatggcaaggttgagaggctctatggtctcgctcccgttgcc

SEQ ID NO: 131534 - DNA, 253 bp, Glycine max
caacacctatggctccctagtgactggagccaacgttcagaaaatcccaggactcaacacccttggcgtgtctttatcacgcattgactatgccccaggtggcatcaacccacctcacacgcacccacgtgccaccgaggtagtgtttgtgcttgaaggaacactagatgttgggttcataaccacagccaacgtgctcatatcaaagagcataagcaagggtgaaatatttgtgttcccaaaagggttggtt

SEQ ID NO: 131535 - DNA, 251 bp, Glycine max
ggcaattgcaaatgaagctggtgcaagtttcattaatgtctcaatgtcaaccatcacatcaaaatggtttggagaggatgataagaatgtccgagctctgttctcactggcagctaaggttgccccaacaattatctttgttgacgaggttgacagcatgcttggacagaggactagagtaggagagcacgaggctatgaggaagattaaaaatgaattcatgacacactgggatgggctattaacaggac

SEQ ID NO: 131536 - DNA, 247 bp, Glycine max
aaagacggcgtcttcataaacgcctttattctccgtttccgtttccttcccggaattcgatttttcatctctgaaaatgagagagtgcatctcgatccacattggtcaggccggtatccaggtcggaaatgcttgctgggagctctactgtcttgagcacggcatcgggcccgatgggcaaatgccaagtgacaaaacagttggcggaggtgatgatgctttcaacactttcttcagtgagactggt

SEQ ID NO: 131537 - DNA, 242 bp, Glycine max
ctcttcctcaccgattgctagactggaatttcgatgctcagtcatctcttttaccattctcttctctcttgctcttgcaggagagagccatgtccatgcatcgctacctgaggaagattattgggaagctgtttggccaaacactcccattcccactgcactgcgagagcttctaaagcctctccctgcaggtgttgaaatcgatgaactccctaagcaaattgatgatacacagtacccaa

SEQ ID NO: 131538 - DNA, 244 bp, Glycine max
aaaatgcccactttttttcttccaacgctcctcctccttctcatagccttcgctccctctgtctccggccgccgtgacctcgtcggagactttctccggctgccctccgaaactgataacgacgacaacttcaagggcacccggtgggccgtcctcctcgccggttccaatggttactggaattacagacatcaggctgatgtttgtcacgcctatcaaatattgaggaaaggtggtctgaaag

SEQ ID NO: 131539 - DNA, 245 bp, Glycine max
aaccttcttttgtgaaggaacgtagagcaatgaagagggagtatgaagagtttaaagtgcgagttaatgctttggtagcaaaggctcagaaaacaccagatgaaggatggactatgcaagatggaacttcatggccaggaaacaactcacgtgatcaccctggcatgattcaggttttccttggacacagtggtgcccatgacatagagggaaatgaacttcccaggttggtgtatgtttctaga

SEQ ID NO: 131540 - DNA, 250 bp, Glycine max
ccgctcgagctcgagccgaatcggctcgagcggctcgagctcaatcaggaacccattagttacaagttcgagagaagtatatggatgataatggaagtgacttttgtgaagaaccctgcatgattgctggaagtcattcgtgcacccttgacagattgtatgcatgggagagcaaactttatgatgaagtaaaggctggtgagttcatcaagaaggattttgatcgaaaatgtgacctgctaaggcatca

SEQ ID NO: 131541 - DNA, 249 bp, Glycine max
cctcagtagtgtcatacacgcttctcttctctgcagcaactatgcctaaccctaaggtcttcttcgacatgaccatcggcggtcaatctgctggccgcatcgtgatggagctctacgccgacgtcactccccgcaacgccgagaacttccgcgcgctttgcaccggcgagaagggcgtagggcggagcggcaagcccctccactacaagggctcgtccttccaccgcgtgatcccgagtttcatgtgtc

SEQ ID NO: 131542 - DNA, 243 bp, Glycine max
gactcttaatttctctctgccttgctcatttacacacctctccaagctttcactttcagccttatttgaatccctctctctcctttccaaatggccagcgttgaggttgcacatcaaacaccaacaacagttccagaaaatgaaacaaccgaggtaatcaagacccaggaaacaaccccggaaccagtaccagccactgaggctcctgcaacagaacaagcagcagctgaggttcctgctcaa

SEQ ID NO: 131543 - DNA, 240 bp, Glycine max
accagtttcaccgcacgaatatcttgttgtttggagcgatccgagaaaaactctgtaaacatgttggtttaccaggacctccttacaggtgatgagcttctctctgactccttccgttacaaggaaattgagaatggaatgctgtgggaagttgaggggaagtgggttgttaaaggagcagttgatgtagacattggtgcaaacccttctgctgagggtggaggagaagatgagggagtt

SEQ ID NO: 131544 - DNA, 240 bp, Glycine max
ctcgatcactctcacgcgaacctatattcgctcctccaccgtcgcactctcgaacaaccacaacaccatcttcatcacatggcaaacgcagcatctggtatggcagtccatgatgactgcaagttgaggtttttggagctgaaggcaaaaaggacacaccgtttcatagtttttaagattgaggagcagcagaagcaggtcattgtggagaagcttggtgagcctgcccagggctatgaa

SEQ ID NO: 131545 - DNA, 246 bp, Glycine max
caaccactcttaatttctctctgccttgctcatttacacacctctccaacctttcactttcagctttatttgaatccctctctctcctttccaaatggccagcgttgaggttgcacatcaaacaccaacaacagttccagaaaatgaaacaaccgaggtaatcaagacccaggaaacaaccccggaaccagtaccagccactgaggctcctgcaacagaacaagcagcagctgaggttcctgctca

SEQ ID NO: 131546 - DNA, 249 bp, Glycine max
gagaaaagtgttcctacattggttggcattgaatgtcccaaggatgagaaacttcctcgtcgcaaaatttttgacaaacctaagacgcgctgcttcactattctccctatggagtttaatcttgtggttcgtcagaagtttttaaattttgtgaggttcattatgaagaaaagggacaagcttagttgtcaagttggaatcaacccatactccatggaatggactggtttggccaatagattactgagt

SEQ ID NO: 131547 - DNA, 242 bp, Glycine max
aatcattaaagataagattatattgctaagaagaaaaaatatgaaggttgtctacttgcttgttgccctcttggctttgacatcaactgttgtctctgcctatgaccctagtcctctgcaagatttttgtgtggcagccaaagaaaaagatggtgtatttgtgaacgggaaattctgcaaggaccctcagcttgtcaaagcagaagatttcttcagacatgtggaacctgggaaaactgaca

SEQ ID NO: 131548 - DNA, 241 bp, Glycine max
ctcgagccggaactgctttatgaagacaaaggtaacacacaaatatctgggaattgtgatgcagattgggctggctgtcccatggataggagatccacatcaggatactgtgtctctattggaggaaatgttatctcttggaaaagtaagaagcaagttgttgttgctcgatctagtgcagaggctgaatacagatctatgactatggttacatgtgaacttatgtgggttaaacaaattc

SEQ ID NO: 131549 - DNA, 245 bp, Glycine max
gtggaattcatgatggggtacaggaacgacactttcgcggaggataatgcggttcgtgaagctgcgtcggggctagagagcgtcgagaaactcatcaagttgctgtcgcatactcaacaacaataccagacaacctcaaagtcttccatggaaaacatcgaccccgactacacagctgtcgctgacgtcgcggtttctaagttcaagaaggtcatttcgcttctgggccgcaccagaaccggtca

SEQ ID NO: 131550 - DNA, 242 bp, Glycine max
cactgagtcaaccaccaccgagaccttggtcatgggagtggcacctgttaaggctcaatttgagggtgctgaaatgggtgtgcccgctgagaacgatggctgcaaatgtggaccaaactgctcctgcaacccctgcacttgcaagtgaggtgttgggagagcaagcttcaagcagagatagcccttaattaggaataatgataaactattaatgtgtagctaaaaacttatgtattatgtct

SEQ ID NO: 131551 - DNA, 244 bp, Glycine max
  unsure (1)..(244): unsure at all n locations
ctgggctcttctcaactttctntngcctganatatttagttctgctgaaacttttgatgaatggtttcaaatctctggtgaaaatgacgaacatgaggttgttcaacaactacacaaggtcctccgtccattcctccttcgaaggttgaagtcagatgttgagaaaggtttgccaccgaaaaaggaaaccattctcaaagtaggcatgtcgcaaatgcagaaacagtattataaggcattactg

SEQ ID NO: 131552 - DNA, 168 bp, Glycine max
cgagtaccgccaggaaaccctcgacaacctccgcgccgccatggagaacaccggtattctctgcgccgtcatgctcgacaccaaggggcctgcgattcgaactggttttctcaaggacggtaagcctatccaactgatacaaggtaatgaaataaccatttccacaca

SEQ ID NO: 131553 - DNA, 246 bp, Glycine max
ccaatatgaatccttctgaatttcgtacatttattgaaaacatggcttctgagtatcatggagatacctatcaccttataactaagaactgcaatcattttacagacgatctctcttatagattgactgggaaacaaatcccaggttgggtgaatcggcttgctaagctaggtgctttgtgcagctgtctacttcctgaaagtcttcaagtaacaagtgttaaacagctacctgaataccatgaat

SEQ ID NO: 131554 - DNA, 247 bp, Glycine max
tgcacaccctacaaattaattttttgacaaactatattgttcttgatacagggattgattagcatcacggtatcagctatactgccacaatttcgtcccccaccatgcccaacacaagctaattgccaagaagccacatcctcacaactgtggatactctacatctccctcctcctcacatctgttggatcaggtggcattagaccatgtgttgtgcccttttcagcagaccaaattgacatgacca

SEQ ID NO: 131555 - DNA, 244 bp, Glycine max
ccttaagcaggataatctcattcaaggtcgttgtcttggtgagttaactaagcaagtgttttcagatcttgctgccagtaaatatcagatggctgaatatagaatatcaatatctggtaggaagcaaagtgagtgggaccaactagccagttggatagtgaataatgatttgtacagcgagaatgtcgtttggttgattcagcttccacggttgtacaatggctacaaagcaatgggaattgtg

SEQ ID NO: 131556 - DNA, 241 bp, Glycine max
gctttagttgccttcaagatatttgcagcagagcaggtcgatgttgctataatggaggtaggattaggtggaaaatacgatgcaacaaatgtggttcagtcacctcttgtatgtggaataacttctcttgggtatgaccacatggagattcttgggaatactgtgggagaaattgctggtgagaaggctggcatcttcaagaatcggattccagcttttacagtgcctcaacctgatgaag

SEQ ID NO: 131557 - DNA, 242 bp, Glycine max
ctcgagccgggtaagacagagagaaagaaatgacctcagcggcggcggcggcggcaacagcagaacaaccaccaccacacacaatgggtcgcgtgagaacaaaaacggtgaagaaatcctcccgccaggtgattgagcgttactactcgcgcatgaccctcgacttccacacaaacaaaaagtcgctcgaagaagtggccatcatcccttccaagaggctgcggaacaagatcgcgggtttc

SEQ ID NO: 131558 - DNA, 244 bp, Glycine max
cggagttccagatcgtgctgagcatcatcagggatggcttgaagaccgatcccaagaggtaccacaagatgaaggacagaatcgtcggtgtctccgaagaaaccaccaccggtgtcaagaggctctaccagatgcaggccaatggctccctcttgttccctgccatcaacgtcaatgactcggtcaccaagagcaagtttgataacttgtatggatgccgtcactcgcttcccgatggactgat

SEQ ID NO: 131559 - DNA, 243 bp, Glycine max
gtgttggtgagaagaatgtgttgatttttgaccttggtggtgggacatttgatgtgtctttactcaccattgaggagggtatctttgaggtgaaagccactgctggtgacacccatcttggaggtgaagattttgataacaggatggtgaaccactttgttcaagagttcaagagaaagaacaagacggacattagtggaaaccccagagcacttagaaggttgaggactgcttgtgagaggg

SEQ ID NO: 131560 - DNA, 243 bp, Glycine max
ctggcggagtgcgtcgatccggcgaaattcgtgctggaggcgatctcggaggtgtttccggtcgacaagagaggggagaaggccggccacgacttgggctgggcctgcgtccttgtcctggagtcgttaattccggtcgtcgtcgaccccgtcatcggaaaatcgaggttgttggttacccctaccgtgaaggagcatgccacggagatcgcggagacttggaagagcaacctggaggatcgt

SEQ ID NO: 131561 - DNA, 239 bp, Glycine max
gtgctcactgggaacaaaggagaaatcagaaaacattgtaactttgttaacaagaaatctgttgaacttgatattgctactgtggcctccgaagaatcatcatcagaggagggtatggttagctcaatctaattggattaggatgaatagtttacactttaaaaatggtgcgattagagaccaataaagaagctttaggcatattcatgccatgtgcccgcgccactacttgttgtgta

SEQ ID NO: 131562 - DNA, 239 bp, Glycine max
ctcgccctcctccagttctacaaggtcgacgactccggcaaggtccagaggctccgcaaggtatgccccaacgccgagtgcggctccgggactttcatggccaaccacttcgatcgccactattgcggcaagtgtggtttgacctatgtttaccagaaggctgaggcttagggttacatttcgttttttctaatttctggattttggacatttattattagtatcatactctgtttttt

SEQ ID NO: 131563 - DNA, 244 bp, Glycine max
ttgctccctcagaagcgaagaagaagccacagagaactagtctgctactctcacccgcaagataaagatggcatctcacatcgttggatacccccgtatgggtcccaagagagagctcaaattcgctctcgagtctttctgggatagcaagagcagcgccgaagctttgcagatggtgtcttctgatctcagggcatccatctggaaacagatggctgatgctgggaccaagtacatccccagc

SEQ ID NO: 131564 - DNA, 248 bp, Glycine max
gttggccctgaatactgcaaccagtcccccaatttgcaggctcaaaatggtactcacttagattcaggagaggcggtggatgcctcatctactttttctaatgaagaagacgatcaagtcactcatggtagtgtatcattaggttatgatggggaaggagatgaatctgagtctaagagaaggaaactggaatcatatgcagagttgagtggagccactagagccattcgcgagcctagagttgttgt

SEQ ID NO: 131565 - DNA, 249 bp, Glycine max
gtgtcatttacgcttctcttctctgcagcaactatgcctaaccctaaggtcttcttcgacatgaccatcggcggtcaatctgctggccgcatcgtgatggagctctacgccgacgtcactccccgcaccgccgagaacttccgcgcgctttgcaccggcgagaagggcgtagggcggagcggcaagcccctccactacaagggctcgtccttccaccgcgtgatcccgagtttcatgtgtcagggtggc

SEQ ID NO: 131566 - DNA, 241 bp, Glycine max
  unsure (1)..(241): unsure at all n locations
gggaaggtccccttgctgtgagaaagcacacacaaacaaaggtgcatggaccaaagaagaagatcatcgcctcatttcttacattagagctcacggtgaaggctgctnccgctctctccccaaagccgccggccttctccgttgcggcaagagctgtcgtctccgctggatcaactatctccgccctgacctcaagcgcgccaatttcaccctcgaagaagaccaatcatcatcaaatcca

SEQ ID NO: 131567 - DNA, 94 bp, Glycine max
ccgattgcgagaatggaatttcgatgctcagtcatctcttttaccattctcttctctcttgctcttgcaggagagagccatgtccatgcatcgc

SEQ ID NO: 131568 - DNA, 240 bp, Glycine max
gaggcgcagtgttattgttggctatgtgtgtgcttccggcgatggttgtggccattcgcccagcaaagaaccctttttgcgtgaagggtcgtgtctactgtgacccttgccgtgctggttttgagacctcagctaccacctacattgctggtgctgagattatgttgcaatgcaagagcagggttagcaacgaggttgtgtacacgaagaaggggtacaccgactcaaccggagcataca

SEQ ID NO: 131569 - DNA, 238 bp, Glycine max
gggatttccatggaagtctcaaaagaagaagctcgagtggcacccgcaccggccctagtggcgatgctgccatcccctggcatgggccacctaatcccaatgatcgagttcgcaaagcgagtggtgtgctaccataacctggcggtgagcttcgtgatccccactgacggcccaccttcaaaagcccaaaaggcagttctggaggcccttccggactcaatttcccacaccttcctcc

SEQ ID NO: 131570 - DNA, 236 bp, Glycine max
ggaagtgccaagtttaagactgtggctgaggctgtagcatccgcacctgacaacggtgagacaaggtatgttatttacgtgaaaaagggaacttataaagaaaatgttgaaatcggcaagaagaagaccaacgtgatgcttgtaggagatggtaaggatgcaactgtaatcaccggcagcggcaatttcatcgacggaacaaccacgtttaagactgccactgttgctgctgtggg

SEQ ID NO: 131571 - DNA, 237 bp, Glycine max
cggctcgagttcccttataaccaccaacctctccctttcccccttttcatttcttcctcgattatccatttccataaccttagtcatcctcttctttcatctttctccctaacggtatcgagggaaaaatatggcggaagaacacagatgccaggcaccgcgcttctgcgccaacaattgcggtttctttggcagccctgccacgcagaatatgtgctccaagtgctaccgcgattt

SEQ ID NO: 131572 - DNA, 238 bp, Glycine max
cagaaagatccaacactcactcttccaacttccactctctctctttccgaccaaaatgtcgatcaacagcgaatctacgccgccaccggtgatcggaaaaatcgggccttacaccgtcttcatgacgccgccgtctacacccaaacccgccgacgacaaccccgttaccaccaccaagatcgcacctccgccgcctcagattcccaaagccgttccttcccccaaacccaaacctctc

SEQ ID NO: 131573 - DNA, 237 bp, Glycine max
gtgcctctagggttatcatatctccatttccatttcctctctctcagtttccaagaatcttaagctatgggaaagtcttacccaaccgtgagcgctgattaccagaaggccgttgagaaggcgaagaagaagctcagaggcttcatcgctgagaagagatgcgctcctctaatgctccgtttagcatggcactctgctggaacttacgacgtgagctcgaagaccggtggtcccttc

SEQ ID NO: 131574 - DNA, 238 bp, Glycine max
acaaaatctcccagggtggactcaagcgtattcatgagaagtacacatggcaaatttactcggacaggctcttgacactcactggtgtgtatggcttctggaagcacgtgaccaatcttgaacgccgtgagagcaaacgttacctcgagatgttctatgctctcaagtaccgcaaattggctgagtctgtgccccttgctattgaagagtaaattcatgtttgaagagaacatcaatg

SEQ ID NO: 131575 - DNA, 234 bp, Glycine max
atttgcttcttcgagtttcacagccaagtcgtaagagggtttcaagggatggaaaacatgcagagcttctggcaattgggtgatgaactccgtgggcactcaaaagcaagagaggatcacaagtggttaatggttgcctcgaaactggccgaacagacaagattgaagggggagcgtgtgaacaaccttgatctttcaaagggacccattgaaacaaggtcaagggataaattt

SEQ ID NO: 131576 - DNA, 234 bp, Glycine max
aagcaagcaacattttgttggatgaaagcatgaatccaaaaatttcagactttggcttggccagaatatttgggggaaaccaaaatgaagccaacagaaacagagtggttggtacatatggttatatgtccccagaatatgcaatggaaggtctgttttcaattaaatctgacgtctatagttttggcgtattgctacttgagattatgagtggccgcaagaacactagctttc

SEQ ID NO: 131577 - DNA, 232 bp, Glycine max
ctcgagccgcaacaattgagatctcacactgcaattccttcttctcccagaatcggtcactacatccgcaatcatgaagctcgataccaccggtctcgaatcgtttcccacactgcttgcgcctcaaaacgacgtcgttggagaactctccgccgctccatccttcgaccttccgaattccaacgatttcgatgggtttgtgaaagaagctattcagatggtgaagcccgcg

SEQ ID NO: 131578 - DNA, 240 bp, Glycine max
  unsure (1)..(240): unsure at all n locations
cacaaaccaaaactcaagctaaaattctcacnctctctctcatctacgagatcatagtatcatattcaatatcatttcataccaaacacatggctttggaagctctcaactcaccaacaacaaccgctccatcttttccctttgacgacccaactattccatgggcgaaacgaaaacgttcaaagcgttctcgcgaccatccttctgaagaagagtacctcgccctctgcctcatcatgc

SEQ ID NO: 131579 - DNA, 233 bp, Glycine max
gagagaaattcgcaaaccctaatttcggaaagatcggcgatggctgcctccaaggatcgcgagaacttcgtctacatcgccaagctcgccgaacaggccgagcgatacgaagagatggtggaatcaatgaagaacgttgcgaatctcgacgttgaactgactgtggaggagcggaatttactttctgttgggtgcaagaatgtgattggtgctcggagagcatcgtggaggat

SEQ ID NO: 131580 - DNA, 239 bp, Glycine max
ttcatatgtacgtatgtttcagcttctcagtggatgggaccccaataagagaattcaagaacatggaatcaaaaggagttgcattcccaaaggaacagccaatgaggatatactctagtctatggaatgctgatgactgggcaacaagaggtggacttgtgaagacagattggacacaagctccattcacagcatcatatagaaatttcaatgccaatgcctgcgtccattctggatca

SEQ ID NO: 131581 - DNA, 230 bp, Glycine max
cagctgagcagctagaaaattattcaaaaactgaagaggctaaagtagaggagctcatcaaggcagtagcagattctggcgccaaagtgattgtcagtggaggagcagtgagagaaatggctttgcatttctgtgagcgttacaagcttatggttctgaaaatcagctcaaagtttgaactacgtcgattttgccggacaaccggctctgttgccatgctaaaactttgc

SEQ ID NO: 131582 - DNA, 230 bp, Glycine max
gcagaagaagcaagagattaaggaagcctctgagctatttgatactgatggctcaggtactattgatgccaaggagctgaatgttgctatgagggcccttggatttgagatgacagaagagcaaatcaatcaaatgatagcagatgtggacaaggatggacgtggagcaattgattatgaagaatttgagtacacgatgacagccaaaataggagaaagggacactaaag

SEQ ID NO: 131583 - DNA, 231 bp, Glycine max
ctttttcttcttcttcttcttcgttgaatcgcgattgttctgtatgtgcgactgaaagaagagagatcgaaaatggcgttggctttcgacgagttcggaaggcctttcataatcctgaaggaacaggagcagaagagcagacttcgaggtttggacgctcagaaagccaacatctccgccggcaaagccgtcgctcgcatcctccgaacctccctcggccccaaaggcatg

SEQ ID NO: 131584 - DNA, 231 bp, Glycine max
gaggaagaggaaaaagaggattggagggtcgccacgtttagcaacaaccaaaccctctctactctttcttcttctcttcgctagggttttagcttcttcctcttcacttcgttcttctggcctctacaatgagcaacgacaaggacaccttcaacgtcgctgatctcacttccgctctcaacgaggacaatagagcagaccttgtcaatgctctcaagagcaagatacaga

SEQ ID NO: 131585 - DNA, 228 bp, Glycine max
gtttagcaataaccaaaccctctctactcttttttcttctccttctcttcgctagggttttagcttcttcctcttcacttcgttctttttcgcctctacaatgagcaacgacaaggacacattcaacgtcgccgatctcacttctgctctcaacgaggacaatagagcagaccttgtcaatgctcttaagagcaagatacagagtttggctggacaacactcggatat

SEQ ID NO: 131586 - DNA, 168 bp, Glycine max
ttcaaattcgctttttgatctgcgacaattagagagtgactatcgatccacattagtcaggctggtatccaggtcggaaatgcttgctgggagctctactgcctcgagcacggcatcgggcccgatgggcaaatgccaagtgacaagacagttggcggtggtgatgat

SEQ ID NO: 131587 - DNA, 230 bp, Glycine max
ctcgagcgaatcggctcaggtgcaaggggctgaaaagaacacgctctttttctttgacggttcctctcatagctttgcccttgaggatttgctgaaggcttcagctgaagttcttggaaaaggaagctatggaacagcatacaaggctgttttggaggagggaacaacagtggtagttaaaaggttgaaggaagttgtggttggaaagaaggagtttgagcagcagttgg

SEQ ID NO: 131588 - DNA, 234 bp, Glycine max
ctcacaaccactcttaatttctctctgccttgctcattgacacacctctccaacctttcactttcagctttatttgaatccctctctctcctttccaaatggccagcgttgaggttgcacatcaaagaccaacaacagtgccagatcatgaaacaaccgaggtaatcaagaaccaggaaacaaccccggaaccagtacgagccactgaggctcctgcaacagaacaagcagcag

SEQ ID NO: 131589 - DNA, 232 bp, Glycine max
ctcgagcgaatcggctcgagtgctttgatagctatgatgttaccattcttcaatgactatcctaggcctgattggttcactgtccttttggccattaaccgtttacttccccatagaaatgtacattaagcagtcaaagatgcaaaggttttccttcacgtggacatggctcaagatactgagctgggcttgcttgatcgtttctattatctcagctgctggttccatccaa

SEQ ID NO: 131590 - DNA, 229 bp, Glycine max
cgtgaaacaacagctttcatggttccattggtggctggtgatggaaccaaaactcaggcacttgctgtttgccactcagatacttctggaatgaatcatcacatgcttcatgaactcatgggagactgatcctggaactaaccctgtttgccatttccttggaagcaaggccattttatgggtacccaatttatctatggacactgcctatcagactaacgttgttgtt

SEQ ID NO: 131591 - DNA, 229 bp, Glycine max
gacagctgaaactggaacataccgttggatggctcctgaggtcattgaacacaaaccatatgaccagaaggcagatgttttcagttttggaatagctctttgggagcttttaacgcgagaactgccttactcttgcctgaccccattacaagcagcagttggcgtggtgcagaagggcctgcggcctacaattcccaaaaatacgcacccaagactttctgaacttctt

SEQ ID NO: 131592 - DNA, 228 bp, Glycine max
gttctagcgcgcgagcggccggccgcgatctaggaggactttgatcagagaataatggagtacttcattaaattgatcaagaaaaagcatggagcggatattagcaatgacaacagagcacttggcaagctgaggagagaggctgagcgtgcaaagagggctctcagcagccagcaccaggtccgcgtggaaattgaatcactttttgatggtgttgatttttctgag

SEQ ID NO: 131593 - DNA, 227 bp, Glycine max
tgaactggactatctgcttttcattgtccgggatgttaatgtgaaccccaatcctgatgaactggctgatatcaaatatgtgaaccgtgatcagttgaaggagctgttgaggaaagctgatgcaggtgaggaaggtctgaagctatcaccttggttcagactagttgtggacaatttcttattcaaatggtgggaccatcttgagcaaggaactcttggggaggcca

SEQ ID NO: 131594 - DNA, 228 bp, Glycine max
tccatttccatttcctctctctctctttccaagaatcttaagctatgggaaagtcttacccaaccgtgagcgctgattaccagaaggccgttgagaaggcgaagaagaagctcagaggcttcatcgctgagaagagatgcgctcctctaatgctccgtttggcatggcactctgctggaacttacgacgtgagctcgaagaccggtggtcccttcggaaccataaagc

SEQ ID NO: 131595 - DNA, 228 bp, Glycine max
gcgaaatcatttaagataagagtgcattactactaagaggagaaaaaatgaaagttgtatacttccttgttgctatcttggctttgacatccactgtggtctctgcctatgaccctagtcctctgcaagatttttgtgtggcggccaaagaaaaagatggtgtatttgtgaatggaaaattctgcaaagatcccaagcttgtgaaagctgaagatttcttcaaacatg

SEQ ID NO: 131596 - DNA, 228 bp, Glycine max
caggcgcagacgcaaacgcaaacgcaaacgcaaacgcaaacgcagagcgtgatccattgacgaagatggtgcagcgtctcacctaccgcaagcggcacagctatgccaccaagtccaaccaacacagggtcgtcaaaacccctggtgggaagctcgtttatcagactaccaagaagagggccagcggacccaagtgccccgtcactggcaagaggattcaggggattc

SEQ ID NO: 131597 - DNA, 241 bp, Glycine max
cgaagaccgcctcatgtgcagctacggcggccatatcgtcccccgcccccacgacaagtccctctgctacgtcggcggcgacacgcgcatcatcgtctccgaacgtcccacctcactcgcggacctctccacgcgcctctcgaaaacattcctgaatggaagacccttcccgctcaagtaccagctccccaacgaggacctcgattccctcatctccgtcaccaccgacgaggacctcgag

SEQ ID NO: 131598 - DNA, 228 bp, Glycine max
gatctctttcacttcggccatgcccgttctctcgagcaagccaaaaaactgtttccgaacacttatcttcttgttggatgctgcaatgatgagatcacccataagtataagggcaaaactgtcatgactgagaaggaacgctatgagtctcttcgccactgcaggtgggttgatgaagtcattccagatgcgccatgggtaatcactcaggagttccttgacaaccat

SEQ ID NO: 131599 - DNA, 228 bp, Glycine max
actcactcactcactcactcactcactcgcaagcaaaaagaaagaatcccaggcgaggagaaagatggaggggaaggagcaggatgtgtcgttgggagcgaacaagttccccgagagacagccaattgggacggcggcgcagagccaagacgacggcaaggactaccaggagccggcgccggcgccgctggttgacccgacggagtttacgtcatggtcgttttacag

SEQ ID NO: 131600 - DNA, 213 bp, Glycine max
  unsure (1)..(213): unsure at all n locations
ggaaaattagcctcacaaaagcaaagatcaaacaaaccaaggacgagaacacgatgttgcttgaacttgcacttggtttattggttttggctctgtttctgcacttgcgtcccacccacactacaaaccaaaaagnanttcgccatctcccaaacccaccaagcccaaagcctcgtcttcccttcataggacaccttcatctcttaaaagaca

SEQ ID NO: 131601 - DNA, 226 bp, Glycine max
caaagagttgggagtatgttgaacaccatctcaagtatcctccttctgtcccatctgacaaactaactcatgtatacactgcaattctgaagcccgataatgaattgcaaattttgattgatggtgaggagaagaaaaaggcaaatttcttgtcttctgaggactttgagcctcctcttatcccttccaagacaatccctgaccctgatgataagaaacctgagga

SEQ ID NO: 131602 - DNA, 227 bp, Glycine max
acctcgagcgattcggctcagttcttctcttcttcttcaagataccgacgacgatccaaacgatagacactcgttgcgacggaacttgtagctgaatccgagcgaactctgtacccatacgtgactggatcctctgtagtcgctatcaaatacaaagatgggattctaatggccgctgacatgggaggttcgtatggatctaccctgcggtataagagtgttgagcg

SEQ ID NO: 131603 - DNA, 229 bp, Glycine max
ctctctcaccaaagccttcctagaacgaaaaaaaaaagaagagcacttttccctcaccaaagaagaagaagcaaacaatggccgatcaacttaccgatgaacagatctccgagttcaaggaagccttcagcttgttcgacaaggacggcgatggttgcatcacaaccaaggagcttggaactgttatgcgttcattggggcaaaacccaactgaggcagagctccagga

SEQ ID NO: 131604 - DNA, 226 bp, Glycine max
gctgatgatggtgttggtcactggaaaagagagaagcaagaaagaatgggctaagttgatttcctctgctggttataacaactacaagataactccagtctttggcttaaggtctctcattgagatctatccatagtaagttaatgagatgtgccagcactctatcattcatatatgtaagggctataatttttctgtttcgattcatgagtgaatggtgaataag

SEQ ID NO: 131605 - DNA, 223 bp, Glycine max
cttctttctttttctgtgagcctttctttcaggttcttaacttactcagtgtgcagtgtccaaatcataagggtagttgcaaattgcaatggctaagcatgatgttgagggtggttccttctctgcaaaggactaccatgatcctcctccagcaccgttgattgatgctgaggaactcacacagtggtccttctacagggctttgattgctgagttcattgcc

SEQ ID NO: 131606 - DNA, 224 bp, Glycine max
gaacagtgattttgccttgactatgctgttttcagggacgtccaaaaggtgtaacacctaaatacagtttgaagcctcttgtgccaaggctgtctcaacttcttggaattgaggttacgatggccaatgactctattggggaggaagttgaaaagttggttacacaacttccagaaggtggtgttttgcttctagagaatgtgaggttctacaaggaggaagag

SEQ ID NO: 131607 - DNA, 228 bp, Glycine max
ccgcgagcgatcgcacagtgttgcaattctcttcatcatcttcttcttcgcagagcttgtccgcgaaggtccaccctctggtcatcttcaacatctgcgattgctacgttcgacgccctgaccaagccgatcgcgtcatcggaaccctactcggctccgtccttcccgatggaaccgtcgatatccgcaattcctatgctgttcctcacaacgaatctatcgaacagg

SEQ ID NO: 131608 - DNA, 228 bp, Glycine max
gtctcttggatccagacttgtgctcatcaaaacccacagtactgtcacggctctcgtggagtgcgtaaaggccattcaagcaacaaaagtagtgtttaaccatctgtatgatccggtttcacttgtccgtgatcacaacatcacagaaaaactagtggaacaaggcatatcagtccaaagctacaatggagatctgttgtatgagccatgggaagtatatagcgagag

SEQ ID NO: 131609 - DNA, 221 bp, Glycine max
atttggagtttggagcgactgaactaatcattaatttgcactcagtgtttcagcttcatcacccttcttttgcatcatttatatctcttgagaaatggcacaagtcacctttctattcacatctgaatctgtaaacgagggtcaccccgacatgctgtgcgaccagatctctgatgcagtacttgatgcgtgccttgaacaggaccctgacagcaaggttg

SEQ ID NO: 131610 - DNA, 224 bp, Glycine max
cttatggtggatacctaggcacccagagacgaggaagggcgtagtcacagcgacgaaatgcttcggggagttgaaaataagcgtagatccggggattcccgatataggtcaacctttcgaactgctgctgaatccacgggcaggcaagagacaacctggtgaactgaaacatcttagtagccagaggaaaagaaagcaaaagcgattcccgtagtagcggcgag

SEQ ID NO: 131611 - DNA, 212 bp, Glycine max
actgtaaagaaaatatttattgttgataagaacgtaaaacaaagggcattaattgggcagggggttggaaggatcatttgcggggaaaaccataccatattagtgctttgtatgttgttgacctgaagaagttcagagagactgcatccggagataatctcagagttttctatgaaacccttagcaaggatccaaatagtctagccaacttg

SEQ ID NO: 131612 - DNA, 222 bp, Glycine max
cgttgtttacatcttggatcacgttcgtgctttggagattgagatgctccatcgcattaagcaacaaggattggacattgttcctcgtattctcattatcacccgtcttctccccgatgcagtaggaactacttgtggccaacgtcttgagaaggtgttcggaactgagcactcccacattcttcgagttccctttagaactgagaagggaattgttcgcaa

SEQ ID NO: 131613 - DNA, 222 bp, Glycine max
tgctgaaggggtgttctctaatactggctggtatgctactaatcagtttgctgttgatgtgatatttggcaaccggatgaagcagtatgagtgcttgacaaatgattcctccattgctgctgcggtttttgtgcccttttatgctggatttgacatagcacgttatctttggggttataatatttcaatgagggatgctgcttctcttgatctggttcactg

SEQ ID NO: 131614 - DNA, 222 bp, Glycine max
gattaagccatgcatgtgtaagtatgaactaattcagactgtgaaactgcgaatggctcattaaatcagttatagtttgtttgatggtatctactactcggataaccgtagtaattctagagctaatacgtgcaacaaaccccgacttctggaagggatgcatttattagataaaaggtcaacacaggctctgcctgttgctttgatgattcatgataactc

SEQ ID NO: 131615 - DNA, 219 bp, Glycine max
agcaagctagctaggttgaaaatagtttggttttgtagtaagtgaggtgaggtgccaaaatggtgaagataactcttggtactttcgatgactcttttggtgttgcctctcttaaggcttatttggcagagttccatgcaactctgaaatgagagttcgctggtgttggttcagccatcgcttacaacgagcttacaaaagatgcagccttggatccaa

SEQ ID NO: 131616 - DNA, 220 bp, Glycine max
ggaatttcgatgctcagtcatctcttttaccattctcttctctcttgctcttgcaggagagagccatgtccatgcatcgctacctgaggaagattattgggaagctgtttggccaaacactcccattcccactgcactgcgagagcttctaaagcctcgccctgcaggtgttgaaatcgatgaactccctaagcaaattgatgatacacagtacccaaaa

SEQ ID NO: 131617 - DNA, 222 bp, Glycine max
ccctcgagccgaatcggctcgagctcttcctcaccgattgctagaaacgaatttcgatgctcactcatctcttttaccattcccttctctcttgctcttgcaggagagagccatgtccatgcatcgctacctgaggaagattattgggaagctgtttggccaaacactcccattcccactgcactgcgagagcttctaaagcctctccctgcaggtgttgaa

SEQ ID NO: 131618 - DNA, 218 bp, Glycine max
caagacggcgtcttcataaacgcctttcttctccgtttccgtttcctcgttcaaattcgctttttgatctgcgaaaatgagagagtgcatctcgatccacattggtcaggctggtatccaggtcggaaatgcttgctgggagctctactgcctcgagcacggcatcgggcccgatgggcaaatgccacgtgacaagacagttggcggtggtgatgatg

SEQ ID NO: 131619 - DNA, 220 bp, Glycine max
cgagagctcctcattcattggtctgggattcagcaaaggaggacttcgtggcaagatggtcttcttggcacaaactgtcctattcctgcaaagtggaactggacttaccagtttcaggtgaaggatcaaattggaagctttttctacttcccttcccttcatcttcagagacctgctggtggatttgggggtttcatcataaacaacagacccatcattc

SEQ ID NO: 131620 - DNA, 222 bp, Glycine max
ttccccaactctcttctcgtcatgaccgcctctcaactcatctccgttagtcccgacgaactccgcttccattttgagttggagaagcaaacattttgcgatcttaaggtcctcaataattcccagaactatgttgctttcaaggtcaaaaccacttcaccaaagaaatactttgtgcgacctaacaccggcgttgtacagccctgggactcctgtctcatc

SEQ ID NO: 131621 - DNA, 197 bp, Glycine max
cgaagatggaggacgcatcagcatcaaagttcatcccacaccaaatcggaggggtccaaaacgacgtgcttcgatttggtctccatggagtcaagagcgacatcgttagttcccaccctcttcaatcttcactccaatctacaaggagaatggatgaagcgatgaagaagcaatgcaaagttaacctgtacggaact

SEQ ID NO: 131622 - DNA, 234 bp, Glycine max
  unsure (1)..(234): unsure at all n locations
caaacantanttaacacactgagtcttaagtttctctgtttatcacaaagatggtgagaaccccatcttgtgacaaaagtggaacgagganaggtacttggactccggaggnagatagaaagttaattgcttatgtcactagntatggctcctggaattggcgccaacttcccaggtttgctggtctggcaagatgtggcaaaagttgtagactgagatggatgaattatctaa

SEQ ID NO: 131623 - DNA, 231 bp, Glycine max
attaattgcaagaatggcacttcgttgcttggtgatgtccctttctgttctcttcactcttggtcttgcgagagaaagccatgccagagacgaagatttttggcatgctgtttggccaaacactcccattccaagttcattgcgagatcttctaaagcctggccctgcaagtgttgaaatcgatgatcaccctatgcaaattgaagaaacacagtacccgaaaaccttctt

SEQ ID NO: 131624 - DNA, 227 bp, Glycine max
cagaacctgattaaggagagtatggcacagtttagtggcaaaactttggtgcagtggttggtagcaacactgctgattgccttgttgggtggtgcacaagctgttgtgttatgtaacatcgactcaagtcaactaaacttgtgtcgtgctgcagttactggtcaaaaccctccaccaccagatgagaaatgttgtgcagttattcgccaagccaatttaccttgcct

SEQ ID NO: 131625 - DNA, 223 bp, Glycine max
  unsure (1)..(223): unsure at all n locations
tgacaaaccttggaattgtgagctggatgtctgattgtgtggccgacaaccttcggtcattctctttgagctggccggcctcattggctgttcttcaggcagcttatttcttcatccactacctttttgcaagtcagactggacacgtgggggctttatactctgcatttcttgccatgcatagggcagnttgggttcctggtattctggcagcccttgcttt

SEQ ID NO: 131626 - DNA, 236 bp, Glycine max
tgaagattgggatgatgaggaagatggtgagtggacaccccctaccattgccaaccctgattacaagggcccatggaaggcaaagaaaatcaagaaccccaactataaaggaaaatggaaggcaccattgattgataacccagatttcaaggatgaccccgacctatatgttttccccaacttgaagtacgtgggcattgaattgtggcaggtgaaatctggtactttgtttgaca

SEQ ID NO: 131627 - DNA, 228 bp, Glycine max
gtgaagagtgagagagagagagagagagaggcacttggaatccaaaaatgagagaaatcatcagcattcacataggtcaggccgggatccaggttggcaactcctgctgggaactctactgcctggaacatggcatccagcccgatggcatgatcccaagtgactcctccttcggtgtagcccacgacgccttcaacaccttcttcagcgaaaccggatccggcaagc

SEQ ID NO: 131628 - DNA, 226 bp, Glycine max
ttcttgtcctatcttttttttcttttagatttttctttaaaattctctatcgaccaaagatcttcaacaaaccggttaagtttgtgtagtttggtaagatgggtggtggatttagagtgtgtcacttagttagaccatttctctcgtttcttcctgaagttcagactgctgacaggaaagtgccatttagagagaaggtcatatatactgtgatctctctgttcat

SEQ ID NO: 131629 - DNA, 224 bp, Glycine max
cgacgccgtacgacgagcgcgtggagaaccacgagaaccacgcggtgcacgccacgcaccagatcgcggagtcgtggattcacgcgtcgcggaaggttctggagagaatcgcggacgaggtgctctccagaaccttcctgaaagcagcagaggactgctacgccgtggagaggatctggaagcttctcgcggaggtggaggacctccacctgatgatggatccg

SEQ ID NO: 131630 - DNA, 220 bp, Glycine max
tgttgttgtaactcgttcttcttcttttgttgttctgtgtttgtgtttgttttttctctcacctgaaaatgtcttgctgcggtggtaactgtggttgcggaagctcctgcaagtgcggcaacggctgcggaggctgcaagatgtacccagacttgagctacactgagtcaaccaccaccgagaccttggtcatgggagtggcacctgttaaggctcaatt

SEQ ID NO: 131631 - DNA, 224 bp, Glycine max
gccactgatctgtggcagctccagagggcggcatggcactggcaaggcagctatgcatgcaggtccacatgtacaaaaagcagaaaagatctcagttgggaaagagattcgagagaaattctctggtgcagttgaagcgttctcccggaggaaccctgcaaatgctagtcctcgtggtgatcacaccaaacacaggagttttgaggatgtaccagtgcaaaagg

SEQ ID NO: 131632 - DNA, 238 bp, Glycine max
ctcgagccgcaaaacataagcaccgctcttttctctccgaaatccccatctcccttcacttctgagctctggacgagatcccagatctcaccatctttcacgcactcttccatcagattcaccctttcgtttaacgcaaactcataacttgaaggttaatggctgctccaccggcaagggctcgtgccgattacgattatctcataaagcttctcttgatcggtgacagcggtgttgg

SEQ ID NO: 131633 - DNA, 225 bp, Glycine max
cgatgaactccctaagcaaattgatgatacacagtacccaaaaacattcttctataaagaagaccttcatccaggcaaaacaatgaaagtacaattcaccaagcgtccctatgcacaaccttatggtgtatatacatggttaacggatattaaagacacctctaaagaaggatatagttttgaagagatatgcatcaagaaagaagcgtttgagggagaagagaa

SEQ ID NO: 131634 - DNA, 222 bp, Glycine max
atcttgtcctatcttttttttcttttagatttttctttaaaattctctatcgaccaaagatcttcaacaaaccggttaagtttgtgtagtttggtaagatgggtggtggatttagagtgcttcacttagttagaccatttctctcgtttcttcctgaagttcagactgctgacaggaaagtgccatttagagagaaggtcatatatactgtgatctctctgt

SEQ ID NO: 131635 - DNA, 239 bp, Glycine max
ggaattaggctcgaagataccactaccacctttacgccttcaacagtatcaaccaccagcaaatagatggaattcgtagcggccgtatggattcaatgcatctacggcaacaactacactttatcaaactactccgacgccctcaaatcactcatgcacctctatcagctccgaatcgacaacctctccgtcgctagaggcgttggcaacgcctttagacttctagcgggcatggcctc

SEQ ID NO: 131636 - DNA, 213 bp, Glycine max
gaagaagcgcgtcaagaagtttatacgcccccagagtgatcgcaagatctccgtcaagccaagctggcgcagacccaagggtattgattctcgtgtcaggagaaagttcaaaggatgcactttgatgcccaacataggttatggctcagacaagaaaacccgccattatctaccaaatggtttcaagaaatttgtcgtgcacaatgtgaaaga

SEQ ID NO: 131637 - DNA, 219 bp, Glycine max
cggagagagaaattgagtttccgagataaccagttttctctttgattcatcaatggcaactgcgaggaccgtgaaggatgtttcgcctcacgatttcgtgaaggcttatgcttcccacctcaagcgttccggcaagatggagcttactgagtggaccgatattgtaaaaacagcaaaatttaaggagttggctccatatgatcctgactggtactacat

SEQ ID NO: 131638 - DNA, 223 bp, Glycine max
gttctcttctccaatcctcctccatccccactgtgtgatctgatcctaaatcctatagccatgactaccatggaggttaagctatggaatgacaagcgcgagagagaaatgtatgacaactttggggagctttatgccattatcaaagccactgagaggcttgagaaggcctatgttagagatataatctcaccccaggaatatgagttagagtgccagaagc

SEQ ID NO: 131639 - DNA, 221 bp, Glycine max
aaaatatctatcaaaagtaaaaagcgaagagaagggaaaaactttaatttttttatggtaaaaaattcaattatacctgttatttcacaagaaaaaaaagaaaaaaacccaggatcggttgaatttcaaatattcaaatttaccgatagaatacgaagacttacttcacattttgaattgcaccgaaaagactatttatctcaaagaggtttacgtaaaat

SEQ ID NO: 131640 - DNA, 218 bp, Glycine max
gagggagtagcggcattaaaaatgcagatcttcgtgaaaactctgacagggaagactataaccctcgaggtcgagagcagcgacaccatcgacaatgtcaaggccaagattcaagacaaggaaggcatacctccggatcagcagcgtttgattttcgccggaaagcagcttgaagatggaaggaccctggccgattacaacatccagaaggaatcaac

SEQ ID NO: 131641 - DNA, 218 bp, Glycine max
tgaaattttcacaagaggaatttcttacagcttggtcaacccaggtgcgtcctgcaacaactctgttggctgatgggtgtccatatttgtatgctatggtgcatgatagttcagtgtctacaataccaggtgattttgtcattggtgttaagttgacaaccataaacaatatgtgtgcatatgggctcaatcctggtatttcaggttctcgtcttttg

SEQ ID NO: 131642 - DNA, 245 bp, Glycine max
agtgtttgtaggtctgcctccacgatacagagattcagtaagaacaataactccagggttgcccatttttctgtacaactactccactcaccaactcacatggtatctttgaggtatgtgtgcgtatattttcttttttttagtctgttgttgcatcactttaatttgatgaaaatgcttttgtttttggacatcaagctatggattaggccatctcttttacctttagcagctatggtctaatt

SEQ ID NO: 131643 - DNA, 245 bp, Glycine max
acaaaacttgctatagcagtaagctataactcatttgaggctctgtgagaattgagaaatggctgtgtatgttgaggttcaagagcaaggaggagagtactctgccaaagactaccatgaccctcctccagcacctttgttcgacccagaggagctcacacagtggtccttctatagagccctcatcgctgagttcatagcaacccttctcttcctttatgtcactgtgctcaccattattggct

SEQ ID NO: 131644 - DNA, 245 bp, Glycine max
cctgaacaaattgagtctgcaaaacaaatggttaaccaagtcataagtggcgagaatcgtcatagaaatccagcaatgtctggtggttattctcagcaaggttaccaagctcggccacccactagctggggtccccctgctgctcctatgcaacaatctggttatggctatgtgcagccaggagcatactctggtccaccccagtataacatgcctcagcaacaatatgcaggctatcctcccca

SEQ ID NO: 131645 - DNA, 243 bp, Glycine max
gcggctagggttttagcgcacttcttctagatttaaggaagatgggtaaggaaaaggttcacatcagtattgtggtcattggccatgtcgactctgggaaatccactaccactggtcacctgatttacaagcttggaggcattgacaagcgtgttattgagaggtttgagaaggaagctgctgagatgaacaagaggtctttcaagtatgcctgggtgctggacaaacttaaggctgagcgtg

SEQ ID NO: 131646 - DNA, 226 bp, Glycine max
atgggctagcaaccttagctactgcttgcgactctgaatcgcctaataatcaatcaatcatcatgtcgtcggcgaagaagatcacactgaagagttcggacggcgatgatttcgaggtggacgaggcggtggcgctggagtctcagacgataaagcacatgatcgaggacgactgcgccgacagcggcatccctctgccgaacgtgacgagcaagatcctggcgaa

SEQ ID NO: 131647 - DNA, 241 bp, Glycine max
gaaagatggctaggtctagtgcttatcctttgttcttgatttcttccattctgtttattccacacatcattggatgggaagtagaagccaagcccccagtagtgaagggactgtcatattctttctattccaaaacatgccccaagcttgagtccattgtgaggaaacatcttcaagaaggtgttcaaggatgtcatggccaagctcctggcttactccgcattttcttccatgattgttt

SEQ ID NO: 131648 - DNA, 244 bp, Glycine max
tgcttttgttgaaggtgatgcttcaagtgccagttacttcctagctggtgcagcagtaactggtgggactatcactgttaatggctgtggcacaagcagtttacagggagatgtaaaatttgctgaagttcttgaaaagatgggagctaaggttacatggtcagagaacagtgtcaccgttactggaccgccacaagattcttctggtcaaaaagtcttgcaaggcattgatgtcaatatgaac

SEQ ID NO: 131649 - DNA, 240 bp, Glycine max
tgttctatatcgcgagctgccgctcgcgatctagaacgtggagctattacaatttgtccctactcaacaagcaatatggattgtcaaagagtactactgaggccatgtttgtgattgaagcttataagactctccgtgaccggggtccataccctgcagatcaagtggtcaaggaacttgatggcagttttgcttttgatgtctatgacagcaaggttggcagtgtctttgcagcactgg

SEQ ID NO: 131650 - DNA, 242 bp, Glycine max
tgatcttccacgacggccgtttcgtgcagaggccagacccactgaacgctctcatcaccttcacgtggctccccttcggcttcatcctctccatcataagggtctacttcaaccttcctctcccagaacgcattgtccgctacacctacgagatgctcggcatcaacctcgtcatccgcggccaccgccctcctccgccttcccccggcacccccggcaacctctacgtctgcaaccaccgc

SEQ ID NO: 131651 - DNA, 241 bp, Glycine max
gctgtgttcatggttcacttggccaccatcccagtcactggtactggtatcaaccctgctaggagtcttggagctgctgttatctacaaccaagataagccatgggatgaccattggatcttttgggtaggaccatttattggggcagccattgcagccttctaccatcagttcatcttaagagcaggtgcagctaaggctcttggatcattcaggagtaacccccataattgagttgtct

SEQ ID NO: 131652 - DNA, 236 bp, Glycine max
gtgattgtttgttgttgtaactcgttcttcttcttttgttgttctgtgtttgtgtttgttttttctctcacctgaaaatgtcttgctgcggtggtaactgtggttgcggaagctcctgcaagtgcggcaacggctgcggaggctgcaagatgtacccagacttgagctacactgagtcaaccaccaccgagaccttggtcatgggagtggcacctgttaaggctcaatttgagggt

SEQ ID NO: 131653 - DNA, 193 bp, Glycine max
cctttgttcactcttcttctcttgcggctagggttttagcgcagctcttctagtttacaggaagatgggtaaggaaaaggttcacatcagtattgtggtcattggccatgtcgactctgggaaatccactaccactggtcacctgagctacaagcttggaggaatagacaatcgagctattgatggaatcggg

SEQ ID NO: 131654 - DNA, 241 bp, Glycine max
gttgctccctttcgtgccgtcagatcttttcattctccgccgtcgtcctccgccgcagccatgcccggagctgagactcacgatgtggagtggccggcgaacgcgtgagggacactttcttcagcttcttccaggacacagatgaccccaaatggaagtctagccctgtcgtccccgtcaatgaccccactcttctcttcgtcaacgctggtatgaaccagttcaagccaatatctttggg

SEQ ID NO: 131655 - DNA, 243 bp, Glycine max
caagaatggcacttcgttgcttggtgatgtccctttctgttctcttcactcttggtcttgcgagagacagcgatgccagagacgaagatttttggcatgctgtttggccaaacactcccattccaagttcattgcgagatcttctaaagcctggccctgcaagtgttgaaatcgatgatcaccctatgcaaattgaagatacacagtacccgaaaaccttcggctataaagaagaccttcatc

SEQ ID NO: 131656 - DNA, 235 bp, Glycine max
caagaatggcacttcgttgcttggtgatgtccctttctgttctcttcactcttggtcttgcgagagaaagccatgccagagacgaagatttttggcatgctgtttggccaaacactcccattccaagttcattgcgagatcttctaaagcctggccctgcaagtgttgaaatcgatgatcaccctatgcaaattgaagaaacacagtacccgaaaaccttcttctataaagaaga

SEQ ID NO: 131657 - DNA, 240 bp, Glycine max
ctgggtgatgcaccagtaccatctgggtcagtacgaggaagagagagaaggagagcttgtggtgtcaaagatattctaccagacacaaccgaggcaatgcaattggtcagatagaagtgccacaaccggtgaaggaagtggagaacaacaatctaacaacaacaacaacaataatggaagaagagacagtggaagtgggacttgttcttcttctaaggaaattaatgttactcacagaga

SEQ ID NO: 131658 - DNA, 241 bp, Glycine max
ctcttcgagggtttgggcttctcttcctcccttggagaaaaagaagagccaccgctgcgacgccgttcgtgcatttttgaggtgccgctgtcatgtttgggcgtggtggaccaatgaggagtgataactccaaatattatgatattctcggcgatttccaaaaatgccagtgaagatgaaatcaagaaggcctatagaaaggcggctatgaagaaccatccagataagggaggagatcctg

SEQ ID NO: 131659 - DNA, 237 bp, Glycine max
gttgtaactcgttcttcttcttttgttgttctgtgtttgtgtttgttttttctctcacctgaaaatgtcttgctgcggtggtaactgtggttgcggaagctcctgcaagtgcggcaacggctgcggaggctgcaagatgtacccagacttgagctacactgagtcaaccaccaccgagaccttggtcatgggagtggcacctgttaaggctcaatttgagggtgctgaaatgggtgt

SEQ ID NO: 131660 - DNA, 237 bp, Glycine max
aacctcgcagttccttgatctctcctctcaagatgcagatattcgtgaaaactttgaccggcaagaccatcacccttgaggtggaatcctccgacaccattgacaacgtaaaagctaagattcaagacaaggaagggatcccacctgaccagcagagacttatctttgcgggtaaacaacttgaggatggtcgcacccttgccgattacaacatccaaaaggaatcaaccctccatc

SEQ ID NO: 131661 - DNA, 183 bp, Glycine max
aaaaaaaaaaaaaaaaaaaaaaaaaaaaaaaaaaaaagaaaagaaaaaaaaaaacaaaaacaagtaaaaaaaaggcaaacaaaaaaaaaaaaaaacacaccgccaaaaaagtaaacaaaaaaaaaaaaagcgaaaccccccccttccccccaaaaacatccttacaaacaccggggagaaaaa

SEQ ID NO: 131662 - DNA, 235 bp, Glycine max
aaaattttgatgacaaagaatggtatgttggaaaagctcagaagaaatctgaaagggagaatgaattgaaacaacgatttgagcagagcatgaaagaagctgctgataaatatcaaggcgcaaacttgtatgtaaaaaatttagatgatagcattggtgatgaaaaacttaaggagctgttctccccttttggtaccattacctcttgcaaggttatgagagacccaaatggctt

SEQ ID NO: 131663 - DNA, 237 bp, Glycine max
ctgacatggcttcttcactcagaatttcaagactcatctctcgctccttttcttctacctccttcttttcacgaggtgggaatggtttccttggttcaagacactgcaaatacagcacttcttctgccattgaagaagaacccgttaaaccatcagtgcaagtagaacacacccaactcttaattgatggaaaatttgtagatgctgcttctggtaaaacttttccaactttagatc

SEQ ID NO: 131664 - DNA, 233 bp, Glycine max
gtgatttggagtttggagcgactgaactaatcattaatttgcactcgctgtttcagcttcatcacccttcttttgcatcatttatatctcttgagaaatggcacaagaaacctttctattcacatctgaatctgtaaacgagggtcaccccgacatgctgtgcgaccagatctctgatgcagtacttgatgcgtgccttgaacaggaccctgacagcaaggttgcctgtgaga

SEQ ID NO: 131665 - DNA, 233 bp, Glycine max
tttatttgtaacacttaattttcattgattgagtgtgtgttgctacaacaatggcctcaagccagggttggactccgaagcagaacaagagatttgagaatgcccttgccatcttcgacaaggacaccccagataggtggcacacggtggccagggccgtcggaggaaaaacggtggaggaagtgaaaaggcattatgagaagctcgtggaagatgtgaagaagatagaggaa

SEQ ID NO: 131666 - DNA, 235 bp, Glycine max
ctcgagccgcaaatgggctaataagcttttattcaagatttgatgagatattagctgctttatctttgttttttgacaggagtgaaaaaccgttgatcacttggaattctatgatatctggctgcgttcaggctggaaaatcaagtgatgccatggagttgttctgccaaatgaacatgtgtggacaaaaaccagatgcaattactatcgctagtctactatccgggtgttgcca

SEQ ID NO: 131667 - DNA, 233 bp, Glycine max
ggtttggtgagttacccaagagaaaggatgaagagagagcgccagcagcttggttccaacgcaggaacctcaagctgcggttattcaagcggaaaatcgaatctttgggaggaagaaggaggcatggacgagcttcatgcagtggtgggttacaaggtgaggtcatcggacatggcggaagtggcgcagaagctggagcgtcttgaggaagccatgggaaatgtccaagatga

SEQ ID NO: 131668 - DNA, 234 bp, Glycine max
  unsure (1)..(234): unsure at all n locations
atgagcagcaaaggatcactgatgttgcttcttcctctaactcttcatctttgtcatcttctacacaatatgatgtataccntgagtttcgaggtgaagacagtcgaaggagcttcacaagccatctatatgaatctttgaatgaagtgaaagtccaaacctatatagatgatcgacttgaaaagggagaagaaatctcacctacactcaccaaagccatcgaaaattctcgtg

SEQ ID NO: 131669 - DNA, 233 bp, Glycine max
aaaataaaaagatttccttttttgcaattgtcatttgtcaccaaacaattgttgttagctctcacaagcaagcttcagcaacgacaatgaagaaagtagtcttacagttggacttacatggtgatagaatcaagcaaaaagctatgaaaacagcatctggcctttcaggggttgaatcagtttctgttgatatgaaagacatgaaaatgatcgtgttgggggacattgatcca

SEQ ID NO: 131670 - DNA, 231 bp, Glycine max
agagattgcgttcactgagagtgttgatagtcgttttgagggacttgggtggcatgttatttgggtaaagaatggaaataatggctatgatgatattcgtgctgccattaaggaagcaaaagctgtcaaagacaaacccacattaatcaaggtcacaacaaccattggttatggttctcctaacaaggctaactcctacagtgtgcatggaagtgcactgggtgccaaaga

SEQ ID NO: 131671 - DNA, 234 bp, Glycine max
gattattcatagtgaggcaatagtagcagcaattcacactggtctttgcttctcgttactcatttctcacctaactttctattcttctcagtctcagatcagaaccttagccatggcagcgttccagaagatcaaggtcgccaaccccatcgtcgagatggacggagatgaaatgactagggttatctggaagtcaatcaaggacaagctcattttgcccttcttggagttgga

SEQ ID NO: 131672 - DNA, 256 bp, Glycine max
ccaaaccctaactcccgaccctgttcccctctcgtatccgtcatgaaaggaggaaagtccaagaccgaatctaagagagccgatcccaaacttgctgtgaataagaagggagccgccaccaaggctaggaaacccgccggcaaggggaaggcagcgaaagaccctaacaagccaaagaggcctccaagtgctttcttcgttttcatggaggagttcaggaaggtattcaacaaagaacatcctgaaaacaaagcag

SEQ ID NO: 131673 - DNA, 248 bp, Glycine max
gctccttcgccacaactctctgccaacatgggtatctccagagattctatgcacaagaggcgtgccactggtggcaagaagaaggcctggaggaaaaagagaaagtatgagcttggtcgccagcctgctaacactaagctgtcaagcaacaagacagtcaggaggatccgtgttagaggtggaaatgtgaaatggagggcattgagattggatactggaaattactcctggggaagtgaagctgtaac

SEQ ID NO: 131674 - DNA, 242 bp, Glycine max
gtttacttcacttcatgacggattcttctcctcttatccctccctcaccggtcacagtcaccgagatcgactcgaagaggaccctccgaacaaattcaatgccggatttgtcttgaaactgatggtagaaatttcatagttccaggtaagtgcaaaggtacgtcaaagtacgtacatagagagtgtttagatcattggcgagccgtgaaggaagggtttgcatttgcccattgcactacttg

SEQ ID NO: 131675 - DNA, 243 bp, Glycine max
gggattgactacttgaagtatgataactgtgagaataacaatataagccccaaagaaaggtaccctccaatgagtgaagctttggcaaacactggaaggccaattttcttctctttgtgtgaatggggatcagaagatccagcaacttgggccaaaagtgtgggaaatagttggagaacaacaggagacattcaagataagtgggatagtatgatatctcgtgcagatctaaatgaccaatgg

SEQ ID NO: 131676 - DNA, 243 bp, Glycine max
aaagaaaatcctcaattttctgagcagccaaacactctctctctgtctctcgaaaattctcagtttgcagagaaaatctgaatcatgtcgtggcaagcgtatgtcgacgatcaccttctgtgtgacatcgaaggtaaccacctcactcacgctgctatcatcggccaagacggcagcgtttgggctcagagtaccgacttccctcagttcaaacctgaggagataactgccatcatgaatgac

SEQ ID NO: 131677 - DNA, 244 bp, Glycine max
ttttcaattcctcaagagtatacaagggatggttctgtttggaagagtgatgaaacttctgcccagtcattcagccatgtggtagatttgcttttcttatcacagaggtgtctagtatccaaagcagccaaacaattgatggagctagttcatcagacgctacaggatgtttgcctgtcatctacaagagttgcttttgaattttatcacacagctagagatgctgtactactttatgaagtag

SEQ ID NO: 131678 - DNA, 241 bp, Glycine max
tttcgcttctgaatcttcaacaatggtgctcgaggcgacgatgatctgtatcgacaattctgaatggatgcgtaacggtgattactctccttctcgatttcaagctcaagcagacgctgtgaatctcatttgcggtgctaaaacgcatctaatccagaaaatacagtgggagttctcacaatggcagggaaaggcgttcgtgttttggtcacccctaccagtgatctgggcaagatcttag

SEQ ID NO: 131679 - DNA, 246 bp, Glycine max
ctcgagcgcaaaaacgcattgtgtttctctctttccgcggcgtagatctgagcagtatgggaaaccctaactgctctcaccactctctttgctttttttcctctccgatcaacgacctctttcgtcgccctaagtcatggcaggacttgcacccgagggatcacagtttgatgactctcaatatgataccaagatgaatgagttgcttacatctgatggacaggattttttcacatcttatgatga

SEQ ID NO: 131680 - DNA, 250 bp, Glycine max
gccagctcttcctcactctcattcgcactggccgcagcagcacgtcctctcgtcaccgtgcaggccctcgacagtgacatggccaccgacgcctccgccaccgtccctatccctgacgtcatgaagtcctccatccgcccggacatcgtcaacttcgtacactccaacatctccaagaacagccgacaaccctatgcagtcagccgccgcgccggccaccagacttccgccgagtcctggggaaccggtc

SEQ ID NO: 131681 - DNA, 249 bp, Glycine max
tgttgccgccttcaaagagggagtttaaagatatttatgtagtctttgagcttatggagtctgatctccatcaggtcatcaaagctaatgacgacttgacccgcgaacaccatcagttttttctttatcagatgctacgtgcaatgaagtatatgcatacagctaatgtatatcacagagaccttaagcccatgaatatactggcaaatgcaaactgcaaactcaaagtttgtgattttggattggcta

SEQ ID NO: 131682 - DNA, 247 bp, Glycine max
aaaacatcaaaagagacatggctgagcaaaccttcatcatgatcaagcctgatggcgtccaaagaggccttattggcgagatcattagcagatttgagaagaaaggtttctacttgaaaggtttgaaacttgttactgtggaccgtccttttgctgagaagcactatgctgatttgtctgccaagcctttctttagtggtttggtggattacattatctctggccctgttgttgccatgatctggga

SEQ ID NO: 131683 - DNA, 245 bp, Glycine max
cggctcgagcattcgttcactgtcactttacccaatcctaacactttcttctctctgtttaccttcttcctcgcatcaatggagttggacggcgttctcctcggcatgtgcaaccctctcctcgacatctctgccgtcgtcgacgacgctttcttgcaaaaatacggtatcaagttgaacgatgcgattctcgccgaggataaacacaaacctatgtatgaagaattggctaacaatcctaatgt

SEQ ID NO: 131684 - DNA, 243 bp, Glycine max
ggcgatggagccggagttgaagaatgcggtgattgaggacttggataggttcgtgaagaggaaggagttttataagagggttgggagggcgtggaaacgtggctacttgctctatggccctcctggtactggcaagtctagcttgatagctgctatggccaattacttgaagtttgacatctttgacctccaacttgggaacatagtaagggattctgacctcaggaaactgcttctggcgac

SEQ ID NO: 131685 - DNA, 242 bp, Glycine max
gagaaaaaggagaacatgaatttgaaggctacagagttgaggcttggtcttcccggattccaatcgcctgaaagggaaccggatcttttctctttaagctcaccaaagcttgatgagaagccactcttccctttgcttcctactaaagacgggatttgctcgtcggggcagaaagctgttgtttctggcaacaaaagaggttttgctgataccatggatgggttttctcaggggaagtttgc

SEQ ID NO: 131686 - DNA, 242 bp, Glycine max
ctcgagcgcgagaaaaccctagttcgcttgcagtcacacaagaggccaatcctattcatagctcgagatgggtgaagaagtgaaggtagttgttccagaatcagtgttgaagaagcgcaagagggaggaggaatgggcgttggccaagaagcaagaactcgatgctgccaagaagaagagagccgagagccgcaaactcatctacaacagagctaagcagtacgctaaggagtacgatcacc

SEQ ID NO: 131687 - DNA, 243 bp, Glycine max
aaagaaagaaagaaaaccctagcttaccttttcaactttcaagatgcaaatctttgttaagacactcactggtaagacaatcacccttgaggtggagagttcagataccatagataatgtaaagtccaagattcaagacaaggaagggatcccaccagaccagcaacgtctcatttttgctggcaagcagcttgaggatggacgtacacttgctgattacaacattcagaaggagtccactct

SEQ ID NO: 131688 - DNA, 240 bp, Glycine max
ctttctctctctctctctgtgagttgtggaaattgattagacttgaaaataatgtctggttcggaggacgagggaggagaagagtacctcttcaagatcgtcataatcggagactccgcggtggggaaatcgaacctgctgtcccgctacgcccggaacgagttcaacatgcactccaaggccaccataggcgtcgagttccagactcagtgcttggaaatcgactccaaggaagtcaag

SEQ ID NO: 131689 - DNA, 244 bp, Glycine max
gtatgggttacttcttaggagaggtgttatttccctaccatgctgagtctgaagttgaattgaatctatccgtcggagattatattgtcgttcgaaaggtgacaaacaatggatgggctgagggtgaatgcaaagggaaagcaggttggtttccatttggttacattgaaagaagggagcgagtcctcgcaagcaaggtggctgaagtgttttgaatgtttctgcttggttgagttggtggttt

SEQ ID NO: 131690 - DNA, 239 bp, Glycine max
tgaagaagatgtacggcctgatcgagacctacaagttgaacggccaattcagatggatttcatcgcagatgaaccgtgtgaggaatggagagctctaccgcgtgatctgcgacaccaggggtgctttcgtgcagcctgctgtatacgaggcttttggtttgacagtggttgaggccatgacttgcggcttgccaacattcgccacatgcaatggtggtcctgctgagatcattgtgcac

SEQ ID NO: 131691 - DNA, 250 bp, Glycine max
ctcagatggaaacaaatttgtttaaattgtctcttgatgatgttgaaactcctaaaggttccatgttggatcttaaaatttctcaatctaaaattgcacttcccaaaaacacagttggaggaaccattctgcgtagtgacctattggcaaattttttgacagagggcaattttagagcaagtgttgatttgcagcgcactcatcgtatcaaaggaatgattaaaatggtggccacagttggtattcctga

SEQ ID NO: 131692 - DNA, 254 bp, Glycine max
ggctcgagctctaggaggcaaaacttgctataggagtaagctatgacgcatttgaggctctgtgagaattgagaactggccaaagatgttgagggtcaacagcaaggaggagagtactctgccagagactaccatgacactcgtccagcaggctttgatgcgatacagcggagctcacagagtggtcagtctatagagcgctcatcgctgagttgatagcaacccgtctgcaccgatatgtcactgtgctcacc

SEQ ID NO: 131693 - DNA, 238 bp, Glycine max
aagaagcacaatttctctttctctctttttttgtgtgtccaaaatggctcctagttctgctcacaacaatgggttctatgtgcttatgctagttgggatagtggttagcactatggttgctacctgtgctggtagcttctaccaagactttgatctaacatggggtggtgaccgtgctaagatattcaatggtggccagcttctatcactttccctagacaaagtctctggctctggc

SEQ ID NO: 131694 - DNA, 239 bp, Glycine max
gtggagtgtctgctgctgtgtcaaagacagctgctgctccaattgaacgagtcaaattgcttatccaaaatcaggatgaaatgatcaaaagtggtcggttatctgagccatacaagggaattggtgattgttttgctcgaaccatgaaggatgagggtgtgattgctctttggaggggcaatactgctaatgttatcagatatttccctactcaggctctgaactttgcctttaaggat

SEQ ID NO: 131695 - DNA, 240 bp, Glycine max
ggttggtcccattccataggaagagatcaaagagaagagaaaagatgtttgagccgcagcagctatacactcgagcgaagaccgaggaattcgacctcgaatcaggggaaaccctctacccagggctgagcgtcggcgagaaccagctccgatggggcttcatccgcaaggtctacggcatcctctccgcccagatcgtcctcaccaccctcgtctctgtcaccaccgttttctatactc

SEQ ID NO: 131696 - DNA, 239 bp, Glycine max
aacatatacggcgtcttccttctgtataagcctatcatcacttgtgcctctgcttgtgagccttttcagtgtggtttgtgctgccggtaacttctactaagactttcagattacgtggggagatggtcgtgcagatatactcaacaacgccaatcttctcactctctcccttgataaggcctctggctctggcttcgaatccaagaacgaatactggattaggcaagattgacatgcag

SEQ ID NO: 131697 - DNA, 245 bp, Glycine max
ctcttacatcactgcatcccctcttggagttcctcagcaggtcattgctatcaacaacaagttcccaggtcctattatcaatgttactacaaacaacaacgttgctgtcaatgttcggaacaagttggatgagagcctcctcattcattggtctgggattcagcaaaggaggagttcgtggcaagatggtgttcttggcacaaactgtcctattcctgcaaagtggaactggacttaccagtttc

SEQ ID NO: 131698 - DNA, 250 bp, Glycine max
taggttaagttgacaaccataaacaatatgtgtgcatatgggctcaatcctggtatttcaggttctcgtcttttgggcaccattcctcagtccatttcacagcaaactgtttggaatcaaatggcaacagtgagaacaccattgaattttgattccagcaagcagagtttttgtcaattttctattgaccttctcggtggaggaatttcagtggacaaaactggagattggatcacacttatacaaaatt

SEQ ID NO: 131699 - DNA, 244 bp, Glycine max
gaacaaacatgggaaacctgctttggaaatggttactcaaaaggccctagagaaaaaggcacaagctggaaagtgggctgaacctcatgtggaaaccattaaaactaaatgggtcccggccgtaaaagaacagtggtctgtggtgaaaacaaatgctgaacctcatgtgcaattattgaccacgaaaactgttgaagtttatgaggcatcaaagaatgcaatttccccccacttaagcaaggca

SEQ ID NO: 131700 - DNA, 239 bp, Glycine max
tctcagcgaatcggctcaggacatgtttgagcaaattatggctgcgtccaggggaacgcaaattgtcatgttcctcgactatgatggtactttgtcgcctattgttgatgacccagaccatgctttcatgtcggattcgatgaggagaacggtgaggaaacttgcaaggtgttttcctactgctatagttaccggcagatgcaaagacaaggtttacagttttgttcgcttggctgagc

SEQ ID NO: 131701 - DNA, 238 bp, Glycine max
ccccaagagggttcagaaggcaattgatacaaaagcatgcaatgctcttctccttaaggtcaaccaaattggttctgtgactgagagtattgaagctgtcaggatgtccaaaaaagctggatggggtgtcatggcgagtcacagaagtggagagactgaggataccttcattgctgacctttctgttggtttggcaacgggtcaaattaagactggagctccatgcaggtcagagcgt

SEQ ID NO: 131702 - DNA, 233 bp, Glycine max
cgaaggatcagttgcgtgaattttgggagcaaattacagaccagagttttgattcacggcttcagaccttttttgacatggtggacaaagatgccgatggacgaattaatgaagaagaagtaaaagagattatcaccttaagcgcttcagccaataagctgtcaaaattaaaagatcgtgcagaggaatatgctgcccttatcatggaggaactggatccggacaaccttgga

SEQ ID NO: 131703 - DNA, 238 bp, Glycine max
gacacggggaggtagtgacaataaataacaataccgggctcattgagtctggtaattggaatgagtacaatctaaatcccttaacgaggatccattggagggcaagtctggtgccagcagccgcggtaattccagctccaatagcgtatatttaagttgttgcagttaaaaagctcgtagttggaccttgggttgggtcgatcggtccgcctccggtgtgcaccggtcggctcgtccc

SEQ ID NO: 131704 - DNA, 241 bp, Glycine max
gcacaatcgcgcatgcacttgagaagacaaaatatccagattcagatttatattggaagaaatttgaggataaataccacttttcatgccaatttactgctgacctaatagccatgaataatgctgattttatcatcaccagtacataccaggagattgcaggaacgaaaaatactgttggccagtatgagagccacgctggttttactcttcctgggctctatagggttgtccatggcat

SEQ ID NO: 131705 - DNA, 239 bp, Glycine max
cgcgtcttcataaacgcctttcttctccgtttccgtttcctcgttcaaattcgctttttgatctgcgaaaatgagagagtgcatctcgatccacattggtcaggctggtatccaggtcggaaatgcttgctgggagctctactgcctcgagcacggcatcgggcccgatgggcaaatgccaagtgacaagacagttggcggtggtgatgatgctttcaatactttcttcagcgagactg

SEQ ID NO: 131706 - DNA, 238 bp, Glycine max
gtttacaatgctcgtcgaccgatgaagcaaaggtatcattataatgtcgctgatgtgcggctggcccaacacattgataaaggaaatgcagatggtttatctatcagcagtgtggcttcttgttctaatctttgggcactcagtatggatgctggtactggtttcaccgcacaagtttatgaactgactcaccacttccttcacaaggaatggactatggaacagtgggagaagaatt

SEQ ID NO: 131707 - DNA, 244 bp, Glycine max
aggcgcgtcgccgtgccccgacgacgtggcggtcatgctcggcgaggtcgacggcgacggcatcaccgtagaaaggctcatgagctacgtcgggtcgggtctgaaacccgggtcggatccggacgagctcaaggaggcgttcgaggtgttcgacacggatcgcgacgggaagatctcggcggaggagctgcttagggttttcaaggccatcggcgacgagcggtgcacgttagaggagtgccgg

SEQ ID NO: 131708 - DNA, 240 bp, Glycine max
cggagtttgggaaggaattgcaatcaatggatgtgataaagacgcagcaaatctcatctcgaccaatcgagaaggtggtggttcaccctctcgtgcttctcagcatcgtcgacaactacaacagagtcgccaaagacactcgcaagcgcgtcgtcggcgtcttgctcggctcctccttcaaaggcaccgtcgacgtcaccaacagctacgccgtgccctttgaagaagatgacaaggatc

SEQ ID NO: 131709 - DNA, 236 bp, Glycine max
cccatgctaccttgaaaggtccgagtgtggttaaggagatcataattggaataacacttggcttagctgctggtggtgtgtggaagatgcaccactggaatgaacagaggaaaaccaggaccttctacgatttactggaaaagggtgagattactgttgttgcagaggaacagtgaaaatgttcttgttttgttgcctatgctctccatttataggctttttttttcccgtgttat

SEQ ID NO: 131710 - DNA, 236 bp, Glycine max
caaaaagaaagaatcccaggcgaggagaaagatggaggggaaggagcaggatgtgtcgttgggagcgaacaagttccccgagagacagccaattgggacggcggcgcagagccaagacgacggcaaggactaccaggagccggcgccggcgccgctggttgacccgacggagtttacgtcatggtcgttttacagagcagggatagcagagtttgtggccacttttctgtttctct

SEQ ID NO: 131711 - DNA, 234 bp, Glycine max
ggaattggtgccacccctttgattagtattctcaaagatgtgctaaacaacatgaaacaacagaaagacatagaagaagggatggtagaaagtggagtcaagaacaagaggaaaccttttgccaccaaccgcgcctatttctactgggttactcgtgagcaaggttcctttgaatggttcaagggtgtgatggatgatgttgccgagtatgacaaggatggaataatagaactt

SEQ ID NO: 131712 - DNA, 239 bp, Glycine max
ctcgagccgctccatttcgcaatgagttattacaaccagcagcaacaaccgccgccagttggagttccaccgccgcaaggttataagccggaggggtacggaaaggaaggctatccaccgccaggatacccgccgccgggatacccaccgccgggatatctgccgcaacaaggctatcctccgccgccctacccggcgcaggggtatcctccgccctacgctcctcaatacgctcagcc

SEQ ID NO: 131713 - DNA, 241 bp, Glycine max
tgaatacacatgaccctggtgtgctccatgcggttttggtagcaggtttgtatccaagggttgggagatttctaacaaataaaggtggaaaaagggttatagttgaaacaacaagtggagataaagttcgcctgcacaatcattccacaaattttaagttgtcattcaagaaaaatttaggtaacactttaattgtgtacgatgagattactcgcggtgacgggggtatgaacataaggaa

SEQ ID NO: 131714 - DNA, 243 bp, Glycine max
ctcaatatagtgcaacctttgctgtggtagtggaagcacacaaagagcacaacgttacatatagtaactatggcgagagtgggtagaatgaaacttggttcagaagggtttgaagtgtctatgcagggacttgggtgcatgggcatgtctgcattctatggtcctcctaagccagagcccgatatgattgcactcatccaccacgccgtccaaagcggtgtcacttttcttgacacttctgat

SEQ ID NO: 131715 - DNA, 242 bp, Glycine max
ggattatgtcagatgagtcgcttatgagagttgaagaggctagggtacatgcagaggaagcttctgctctctctgctgctgcagtgaatcatagcctagagttatggaatcagttggataaacataaaaattctgggctgatgcctgatattgatgctaaactagcgtctgcagctgccaatattgcctcaaatgctgctgcttcaagcaggactagttgctgatgcagcattactttcatc

SEQ ID NO: 131716 - DNA, 234 bp, Glycine max
ctcgagccgttgccgactgttatcgttcacctgaccctgttcatggcaagcgtaactacacctattcagatgttgtcagatccgtgttaggaggtaggaaatttcagctgtgtggattagctcagtacataaatcttgtcggtgtaactatcggttacacgataacggcttcaattagtatggtggcggtgaagaggtccaactgttttcacaaacatggtcatcttgataagt

SEQ ID NO: 131717 - DNA, 230 bp, Glycine max
gaaaagcgtgaatcatgtcggacgaagagcatcacttcgattctcaggcggatgcgggagcgtccaagacgtatcctcagcaggctggtaccattcgcaagaatggctacatcgtcatcaaatccaggccttgcaaggttgtagaggtctctacgtcaaagacaggcaagcatggacatgcaaagtgtcactttgttgcaattgatatttttaatgggaaaaagcttgaa

SEQ ID NO: 131718 - DNA, 236 bp, Glycine max
ctgccagtagtcatatgcttgtctcaaagattaagccatgcatgtgtaagtatgaactaattcagactgtgaaactgcgaatggctcattaaatcagttatagtttgtttgatggtatctactactcggataaccgtagtaattctagagctaatacgtgcaacaaaccccgacttctggaagggatgcatttattagataaaaggtcaacacaggctctgcctgttgctttgatg

SEQ ID NO: 131719 - DNA, 239 bp, Glycine max
cttgttagctctgatgtcactgccatgcaggaagctgctgattcacttgactacatcattgacactgtgcctgttggtcaccctcttgagcctgatctctctttgctcaaacttgatggcaagttgatcttgatgggtgtcatcaacacccctcttcaatttgttagccccatggtcatgctagggaggaggtcaatcacgggaagctttattgggagcatgaaggagacagaggagat

SEQ ID NO: 131720 - DNA, 242 bp, Glycine max
ctcatgtttacacatttatcctccgtccggatgcaacctacagcatcctgattgataatgtggagaagcaaactggtagtctctactctgattgggatcttctccctccaaagacaatcaaggatcctgaggctaaaaaaccagaagattgggatgacaaagaatatattcctgatcctgaggataagaaaccagaggggtatgatgacatcccaaaagagctcccagaccccgaagccaag

SEQ ID NO: 131721 - DNA, 255 bp, Glycine max
acaggctccacaaaacatctcatcattcacccaacaaaatggcgctgcttctgataattcccatctcactggtcaccctctggctcggttacaccctataccagcgattaagattcaagctccctccgggccacggccctggccggtagtcggtaacctctacgacataaaacccgtccgctttcggtgcttcgcggagtgggcgcagtcttacggccccataatatcggttctgttcggttcgacactaaacgt

SEQ ID NO: 131722 - DNA, 258 bp, Glycine max
agcactcttcatcaagctccgctccaacacaggggaaaatgagggagatccttcacgtgcagggagggcaatgcgggaaccagatcggttccaagttctgggaagtggtgtgcgacgagcacggcatagatcgacggggaagtacgtcggaaactcagatctgcaactcgagcgcgtgaacgtctactacaatgaagcctcgtgcgggcgcttcgtgccacgcgcggtgctgatggacctggagcccggaactatgga

SEQ ID NO: 131723 - DNA, 258 bp, Glycine max
attaattgcaagaatggcacttcgttgcttggtgatgtccctttctgttctcttcactcttggtcttgcgagagaaagccatgccagagacgaagatttttggcatgctgtttggccaaacactcccattcaagttcattgcgagatcttctaaagcctggccctgcaagtgttgaaatcgatgatcaccctatgcaaattgaagaaacacagtacccgaaaaccttcttctataaagaagaccttcatccaggcaaa

SEQ ID NO: 131724 - DNA, 262 bp, Glycine max
gttcattctgttttcttgaagtctttccctagccaatggccactgatcgtttgacccgggttcacagtctccgtgagaggcttgatgaaaccctcactgccaacaggaacgaaattttggcccttctgtcaaggtcgaagctaagggcaaggggatcctgcaacaccaccaggtcattgctgagtttgaggaaatccctgaggagaacaggcagaagcttactgatggtgcctttggagaagtcttgagatctacacaggaa

SEQ ID NO: 131725 - DNA, 261 bp, Glycine max
gttaacagcatggagagggaggaagatgttaaggttggagcacagaaattctcggagaggcaagcactgggtacaggagctaagagtgacaaggactacaaggaggcaccaccagcacccttgtttgagccagggagttaaagtcatggtctttttacagagctgggatcgcagagtttgtggccacattcttgttcctctacatcactgtcttgactgtcatgggtgtcaacagggcacccaacaagtgctcttctgttg

SEQ ID NO: 131726 - DNA, 262 bp, Glycine max
gaaacccacaaaaaatgacacattgtccaaaagggtgcctggatttggtgccacaataaacttgctctatggggaccaaacttgtggccagggatcagataatgaggccatgaacaacatcatttcacactatcttattaccttgatctcataggtgttggcagagaagaggcaggacctaatgaagtactctcatgtgctgaacaagctgcttttaagccccctggctcaccatcttctgccacaaattgagccttgcctt

SEQ ID NO: 131727 - DNA, 263 bp, Glycine max
ctcgagccgattcggctcgaggaaagaagaagaagacgcgttctttcggagagttcgaagatgtcaggcgttaccaacaacaacgaggaagacaagaagccaaccgaacagggagcacacatcaaccttaaggttaggggcaggatgggaatgaagtttttttcaggatcaagagaagcactcaattgaagaagcttatgaatgcttactgtgaccgacagtcggtggatttcaactccattgcttttctgtttgatggacgc

SEQ ID NO: 131728 - DNA, 264 bp, Glycine max
gtctgttttccttgtttcccctattattatctcgctctcacaaaatattggcattctctagtgctttgattctgtggtcgttgctagcaatcaacatggccctgccaaccctcgcaaccgtctacaccgtgggagaacttcaggttgggcaattggtactgattatagcacttggactggcgacaagatcttttcagtgggtgatagtctcgcgttcaactatggagctgggcacacagtggatgaagttaaagagagcgatta

SEQ ID NO: 131729 - DNA, 252 bp, Glycine max
cttcttccttattttcttccctagtcaaggagattcatctctgcaggttgttttagaaaagaaaaaatggtgaagatttgctgcattggtgctggatatgtggggggtccaacaatggcagtcattgtctgaagtgcccctccattgaagtggctgttgttgacatctccaaatcccggattgcagcatggaacagtgaccagcttcctatctatgagccaggccttgatggtgtggtgaagcaatgtcgtg

SEQ ID NO: 131730 - DNA, 255 bp, Glycine max
gaaagagaatccgaggcgaagagaagagaaaaattaagatggaggggaaggagcaggatgtgtcgctgggagcgaacaagttcccggagagacagccgattgggacggcggcgcagagccaagacgacgcaaggactaccaggagccggcgccggcgccactggttgacccgacggagtttacgtcatggtccttttacagagcagggatagcagagtttgtggccacttttctgtttctatacatcactgtctt

SEQ ID NO: 131731 - DNA, 256 bp, Glycine max
agtgagattcatcaattttgaaagaacaaaacttcctgaagaaattctaaagcataatctagaagaaaaaaagaaaatatttttcagatataattcttgaagttgaaaggagtgatgccgaggttcaggctagggagtatacaaccaaaggcttcagaatcttgctgtcactcttgataaggtaaggtatgttatgagatgtatttttggcgatccacggaaagcaccatatcctcttgagaagctcagtcctgaa

SEQ ID NO: 131732 - DNA, 259 bp, Glycine max
atcgtgagacttatcttgaacggcttgctttaaggtatgatcgtgaaggataaccatcacagttagatcctgttgatgtgtttgttagtacagtggatcccctagaagagccacctcttgttactgcaaacccgttttgtctatactttctgttgattaccctgtcgacaaagtttcctgctatgtatcagatgatggttcagctatgttgacctttgaagcactatctgaaacagctgagtttgcgaagaagtgggtg

SEQ ID NO: 131733 - DNA, 257 bp, Glycine max
ctagtttctagatcgcgagcggccgctcgtcgagccgaatcggctcagggaagtctcttcttactagaagaaggttggttacaacccatacaagattccctttgttcccatctctggttttgagggtgaaacatgattgagaggtccaccaaccttgactggtacaagggaccaactctccttgaggctcttgaccaaatcaatgagcccaagaggccctccgacaagcctctaaggcttccattgcaggatgtcta

SEQ ID NO: 131734 - DNA, 278 bp, Glycine max
cgaagctcgaatgacgtcagctcgacgctgaagactgcaggtctgacctcatttcctgattacctggtgttacatatgcggagatttgttatggaggcagattgggtaccaaaaaagcttgatgtgtacattgatgttcctgatatcataatatcagtcacatgcgcacaaaggtcagcagtctggggaagagctattacctgatggtgttcctgaagaggaagattcaaacaaaatttcggccaacgatgaaattgttgcccagctggtttccatgg

SEQ ID NO: 131735 - DNA, 262 bp, Glycine max
gggaaggataacatgggatttcaggagactatctgaggaagaatcggattggggcaataagcttctgtttttaccagcagcaaagaatatgtcaatgcttgtggttgagtccagcccttggaatgcaaatgatttggaattccgtatcctacatacttccaccctgcaaaggatgctgatgtgttcatgtggcaagatagaatgaggcaactagataggaagtggcttttctcctttgctggtgctccccgtcctggcaacc

SEQ ID NO: 131736 - DNA, 253 bp, Glycine max
gtggaagcttggaaaaccatttgttcaggagaggctcatattttcaaccactttcttggagcttacgtttgaaggtagctcttgatgctgccaaagggcttgcatttctccacagtgcagaagcaaaatgatatatagagattttaagacttcaaatatcttgctggattcaaaatataatgcaaaactttctgattttgggctggcaaaggatggaccaacaggtgacaaaagtcatgtctccaccagggta

SEQ ID NO: 131737 - DNA, 258 bp, Glycine max
ctgccagtagtcatatgcttgtctcaaagattaagccatgcatgtgtaagtatgaactaattcagactgtgaaactgcgaatggctcattaaatcagttatagtttgtttgatggtatctactactcggaaaccgtagtaattctagagctaatacgtgcaacaaaccccgacttctggaagggatgcatttattagataaaaggtcaacacaggctctgcctgttgctttgatgattcatgataactcgtcggatcg

SEQ ID NO: 131738 - DNA, 279 bp, Glycine max
tcttcattcggctctatccacccccgaaaagcgatacaacatgctggcctgcttgtacgcgttcgaacccaagtgaaccggagaaaacccgatcgaaccgaaccggttccgccactggttcagcgtctcgtgcctttccacgcggtccatccctcgcacgccaccacgttgcagatttgcttccctaagtaaacctccgacatggccttgtcgttcgggttcacaggcgaaccctccagcgagtcgaatagagttgaataatagtgcagtgactcggtg

SEQ ID NO: 131739 - DNA, 249 bp, Glycine max
acaaccctctctctatattccattgccacccagttttgaatatatttttattccttctttgtttcttcactttcttccatacacataaccatgtcttctcagactgttgtcctcaaagttggtattcatgtcaagggtgtgctggagcagtgaacagggttttgggaaaaatggaaggtgttgagtcatttgacattgatctgaaggagcagaaggtgacagtgaaaggaaatgtggagccagatgaag

SEQ ID NO: 131740 - DNA, 251 bp, Glycine max
cttctttctttttctgtgagcctttctttcaggttcttaacttgatcagtgtgcagtgtccaaatcataagggtagttgcaaattgcaatggctaagcatgatgttgagggtggttccttctctgcaaggactaccatgatcctcctccagcaccgttgattgatgctgaggaactcacacagtggtccttctacagggctttgattgctgagttcattgccacaatgctcttcctttacatcacagtgct

SEQ ID NO: 131741 - DNA, 255 bp, Glycine max
ggcagttggagatggaaaaccactgaacacagttgcattccaaaatgcagttttttatgccaagtcatttgctgacaaaggtggggctaaactatatgttctatctggcaagtggctcactggaagtttaaccttaccagccacctcactctctttcttgaaagaggcgcaaccatcatcgcatcacaggattatgcacactggactgcaatggatcccctaccctcctatggtcgaggtattgatgttcctgtt

SEQ ID NO: 131742 - DNA, 256 bp, Glycine max
tttcaacgctgcaactatccatggcaaaccactggctcagacccgaggtgtatccactgttcgctgcggttggtgccgctgttgggatctgtggattccaattggttcgtaatatctgcatcaaccctgagtcagggtgaacaaggagggaagaaaggcaggagtgttggagaactttgctgagggagagaagtatgctgagcatttcctgaggaagtatgtgcgcaacagaactcctgagattatgccctccatc

SEQ ID NO: 131743 - DNA, 257 bp, Glycine max
tgcaaattgtcacaccaaaaaattcttgcttagctctcacaaacaatctttaacaacaatgaagaaagtagtattaaaggtggacttaaataatgatagaatcaagaaaaaagctatgaagacagcatctgcctttcaggggttgaatcgatttctgttgacgttaaggacatgaaactagtcttattgggtgagattgatccagtgagtgcagtgtcaaagctacgaaagtggtgtcacactgaactaatttcatt

SEQ ID NO: 131744 - DNA, 247 bp, Glycine max
ctagaatggaatttcgatgctcagtcatctcttttaccattctcttctctcttgctcttgcaggagagagccatgtccatgcatcgctacctgaggaagattattgggaagctgtttggccaacactcccattcccactgcactgcgagagcttctaaagcctctccctgcaggtgttgaaatcgatgaactccctaagcaaattgatgatacacagtacccaaaaacattcttctataaagaagac

SEQ ID NO: 131745 - DNA, 248 bp, Glycine max
cgtgaataccctaattcggagggtttcagttttcgccctcttttctcatctccaacatcttcgtcgtcacggaggctagtcttcctgttatcacaaacaatgtctgacggtcaagaatcagacagaatattgagatatggaagatcaagaaattgataaaggcattggaagctgctcgaggtaatggtaccagcatgatttctctgataatgcctccacgtgatcaaatatctcgggtcactaagatg

SEQ ID NO: 131746 - DNA, 257 bp, Glycine max
atctatgaacctggccttgatggtgttgtgaagcaatgccgtggcaagaacctcttcttcagcactgatgttgaaaagcatgtctttgaggctgacatagtgtttgtctctgtcaacaccccatacaaactcagggtcttggagctggcaaagcagcagatttgacatattgggagagtgcagctcgcatgattgctgatgtctcgaagtctgacaagatcgtggtggagaaatccacagtccctgtcaaaactgct

SEQ ID NO: 131747 - DNA, 247 bp, Glycine max
cgttgttgttgttctaaaacgtccacacattctccgtcgccacaacaacaatggctccgaagaaaggtgtgaaaggttccgttgtagcagcgaagaagaaggttcaggagaaggtgacgaatctttgttcgagaagcgtccgaagcagttcgggatcggaggcgcgctgccgccgaagcgggacctgacgcggttcgtgaagtggccgaagaacgtccaaatccaacgcaagaagcgcatcctcaag

SEQ ID NO: 131748 - DNA, 248 bp, Glycine max
ccctctttcttcctcttcctcagtagtgcgattttcgattctcttctctgcaactatgcctaaccctaaggtcttcttcgacatgaccatcggcggtcaacctgccggccgcatcgtgatgggctctacgccgacgtgactccgagcaccgccgagaacttccgcgcgctctgcaccggcgagaagggcgccgggcggagcggcaagcccctccactacaaaggctcgtccttccaccgcgtgatccc

SEQ ID NO: 131749 - DNA, 247 bp, Glycine max
ctttttcaacttcaagctgagaggattttgtgtgcacagagactagctgctcaagctacaaatgagaattctgcttcttcagtgcaaatacactggtacatcatgaccagtccattcactgataggcaacacgcaaattctttgaaagtcataaattttttggtctcgaggcagaacaggttacctttttccagcaaggaacaatcccttgtgtttccaaggatggtagatttattatggagactcc

SEQ ID NO: 131750 - DNA, 248 bp, Glycine max
acgtagcagcagcggaagtctagcttgggcagcgaatcacaatggcgagaggattgaagaagcatttgaagaggcttaatgccccaaagcattggatgcttgacaaactgggtggtgcattgctcctaagccctcatctggaccacacaaatccagggaatgcctgccactcatactcattttgcgaaaccggctgaagtatgctctgacataccgtgaagtcattgctattctgatgcagcgacatg

SEQ ID NO: 131751 - DNA, 253 bp, Glycine max
aattgcaagaatggcacttcgttgcttggtgatgtccctttctgttctcttcactcttggtcttgcgagagaaagccatgccagagacgaagatttttggcatgctgtttggccaaacactcccatccaagttcattgcgagatcttctaaagcctggccctgcaagtgttgaaatcgatgatcaccctatgcaaattgaagaaacacagtacccgaaaaccttcttctataaagaagaccttcatccaggca

SEQ ID NO: 131752 - DNA, 252 bp, Glycine max
gcgaagagaatggctcccaagggtttaatctttttggctgtgttatgcttctcagcactgtcactgagtcgttgtcttgcggaggataatggacttgttatgaactgctacaaggaatcatgccccaggctgaagacatcatcaaagaacaagtcaagcttctctacaagcgccacaagaacactgctttctcctggctcagaaacatcttccatgactgtgctgttcagagttgtgatgcttcactgttgc

SEQ ID NO: 131753 - DNA, 254 bp, Glycine max
gaattttgagggagaatacaaattattggaagtaaaaaagataaattcaacagaacagagagttggaggattttgtccactgactccaaaggaggtgggcatttttcttcatgctcttgggtatccccatctacaccaatatacattgcagcaggagagatctatggtggtaatactcatctttcggagctctcatcccgctaccctaatctaatctttaaggaatcccttgcaactcctgaagagctgaaaga

SEQ ID NO: 131754 - DNA, 256 bp, Glycine max
gaacagttatctgcaagaatttggatgtggcttcaagggttgctcgttctgatggtctggactgcataacactggatggtgatcaagtaagcaagaaaggtagtatgactggaggattttatgatcaagacgatcaagattgaggtttatgaatatcattaagcagaatgcagacactattcatattagagaggaggaattggagaaagttagatttaatctacaagagatagaccaaaagattaatgaaattgtt

SEQ ID NO: 131755 - DNA, 261 bp, Glycine max
ttctctctctttcaattttagacagaagactaaaagagtgaagagaacaaacagagcaatggaaggaggaggagctgctccgccggccgacaccgtgatgtccgacgcggcgcctccgccgcagcaagcgatggctatggggatcgagaatattccggcgacgctgagccacggtggcaggttcatccaatacaacatattcggaaacatattcgaagtcaccgccaaatacaagccacccatcatgcccatcggaaaagg

SEQ ID NO: 131756 - DNA, 260 bp, Glycine max
cagcacaaagcgggttactgtctgttcaagctaccatctctctctctctttcttagtgcctccttgccagaagttaaaatggcccaagaaactttcctattcacatctgaatcagtgaacgaggggcaccctgacaagctctgtgaccagatctccgatgctgtgctcgatgcatgcttggagcaggaccctgacagcaaggttgcctgtgaaacctgcaccaagaccaacatggtgatggttttcggagagatcacaac

SEQ ID NO: 131757 - DNA, 258 bp, Glycine max
ctcgagccgcagaagcagaacgaggagaagcagaaggagcaaaagcaatggcgccgaagacagccgagaaccacgacaaggaaccctgatttggttagggggattggcaagtattcgaggtcgcagatgtaccacaagaggggcatctgggccatcaaggccaaaaacggtggcgttttgccccgccacgatcccaagcccaagcccgaggccccggcccagaagccgcccaagttctaccccgcggacgatgttaag

SEQ ID NO: 131758 - DNA, 257 bp, Glycine max
gtttggagagccattaataagcaaagtggtgaagttgttgcaatcaagaaaatgacaaagagatattactcttgggaggagtgtgtaaacctgagagaagtcaagtcattacggaaaatgaatcatgcaaatattgtgaagctgaaggaagttatacgagaatgtgacactctgtgccttgtttttgagtacatggaatacaacctgtatcaacttgtgaaaaacagggaaaagctgttctctgaaaatgaagttag

SEQ ID NO: 131759 - DNA, 274 bp, Glycine max
ctctcaagtaccgcaaattggctgagtctgtgccccttgctgctgagtaaactgaggataaagagttggataaagaaatggaggaaccggctttttctttctcatttggagtttgtcgcacttgagttttataaataatgtccgtgattttagttttgtgattaagctttcgataagaggagagaaagagaaggaaaaaaaaagttgcttttttttttgttgttgcatgatttggatcttgattggaaaagcttcgaattggggtagttttacc

SEQ ID NO: 131760 - DNA, 260 bp, Glycine max
cttgtggcgaacgtcttgagaaggtgttcggaactgagcactcccacattcttcgagttcgctttagaactgagaagggaattgttcgcaagtggatctcaagattcgaagtctggccctacttggaaacttacactgaggatgttgcccacgagcttgccaaagagttgcaaggcaagccagatctgattgttggaaactacagtgatggaaacattgtcgcttctttgttggcacataaattaggtgtcactcagtgt

SEQ ID NO: 131761 - DNA, 263 bp, Glycine max
caaacaaccttctttctttttctgtgagcctttctttcaggttcttaacttgatcagtgtgcagtgtccaaatcataagggtagttgcaaattgcaatggctaagcatgatgttgagggtggttccttctctgcaaaggactaccatgatcctcctccagcaccgttgattgatgctgaggaactcacacagtggtccttctacagggctttgattgctgagttcattgccacaatgctcttcctttacatcacagtgctcac

SEQ ID NO: 131762 - DNA, 256 bp, Glycine max
cgtgaatgcgtataaaaggaaaataaagaaattagcgtcaaaatgttgggtgtgttcagcagctccatagtgtcgccgccggacgagctcgtggccgccggcagccgtactccgtcgccgaagatgacggcggcggcgctgcggaagctgttcgaggagaagaacccctccgccgtgtcggtggaggtcggagagcatgtccagctcgcttatacccaccacaacgagtcgccgtttcagcccagatcctttgctg

SEQ ID NO: 131763 - DNA, 258 bp, Glycine max
ctttctctagtcctgttatttctcagcgcgtaaagcatggctttgttggtggagaaaaccactcgtggtcgcgagtacaaggtcaaggacctttcccaggccgacttcggccgcctcgagatcgagctggccgaggttgagatgcccggcctcatggcctgtcggaccgagttcggcccctcccagcccttcaagggggcccgcatcaccggctccctccacatgaccatccagaccgccgttctcattgagaccctc

SEQ ID NO: 131764 - DNA, 260 bp, Glycine max
agggtgtgagaatggagagcaaagaggaagatgtaagggttggagcaactaagttctcagaaaggcaaccaattggtacagcagctcagggtgacaaggactacaaagaaccacccccagcacctttgtttgagcctggtgagctaaagtcatggtccttctacagagctggaattgctgagtttgtggccactttcttgttcctctacattaccatcttaactgtcatgggtgtcaacaggtcaccctccaagtgtgcc

SEQ ID NO: 131765 - DNA, 260 bp, Glycine max
ctatttctcagtctctgtgtttgcggctgaggattccgaacgagtgaccttcttcgtttctcgcaaagtttaagtaatcatgggtaaggaaaaggttcacatcaacattgtcgtcattggacatgtcgactctgggaagtcaactaccactggtcacttgatctacaagcttggaggtattgacaagcgtgtgattgagaggttcgagaaggaggctgccgagatgaacaagaggtcattcaagtatgcctgggtgctcg

SEQ ID NO: 131766 - DNA, 258 bp, Glycine max
gagagagagagagagagaggagagagtattggcgcttcatcaagatgggtatttctagggattccatgcacaagaggcgtgccactggtggcaagaaaaaggcttggagaaagaagagaaagtatgagcttggagcgtcaggcagcaaacaccaagttatcaagcaacaagacaatcaggaggattcgtgttagaggtggcaatgttaaatggagggcattgaggcttggatactggcaattactcatggggtagtga

SEQ ID NO: 131767 - DNA, 250 bp, Glycine max
gaaacacgtagacatcagtttcaagttagtttgtgcaatatttattcattgacctgatatttttctatgtatgtttcacttttgaagatggtctcaaatagcggcgcgtttgcctgggcgaaccgacaatgaaataaaaaacttttggaattcaacgataaagaaaagactcaagaacatgtcgtccacgacgaccacaacctcaacctcaccaaatgcaagcgagacctcaatatccgagcctagtaat

SEQ ID NO: 131768 - DNA, 253 bp, Glycine max
gatttcttgcgcggtttatcatgggggatagtcagtattcgttttctctcaccacatttagcccttctggaaagcttgttcagattgagcatgctttgacggctgtcgggtctggacaaacgtctttgggaattaaagctgcaaatggagttgtcattgctactgagaagaaattgccatctatattggttgatgaagcatcagtccagaaaattcagttattaacaccaaatataggtgtcgtatatagtgg

SEQ ID NO: 131769 - DNA, 257 bp, Glycine max
  unsure (1)..(257): unsure at all n locations
gaaacacaaacactgaaacactcaagtgagttcgatagtntatttgtttttctttttcacaaagatggtgagaaccccgtcttgtgacaaaagtggaatgaggaaaggtacttggactccagaggaagatatgaagttaattgcttatgtcactaggtatggctgctggaattggcgccaactccccaagtttgcaggtcttgcaagatgtgggaaaagttgtagattgagatggatgaattatctaaggcctaatg

SEQ ID NO: 131770 - DNA, 255 bp, Glycine max
ctcataatcaaataccatttcattcattcttacatattgcttaattttatctgaattttgaaacaccttctgaatggctttttcaagagttgcattgttaatatgcacggtaattgggtattttgtgattgcctctgcgggcaatttttaccaagattttgatatcacttggggagatgggcgtgctaagatactcaacaatggcgagcttctcactctgtctcttgacaaagcctctggctcgggtttccaatc

SEQ ID NO: 131771 - DNA, 267 bp, Glycine max
aacatatatggcttcttccttctctccaagcctatcatcacttgtgcctctgcttgtgagccttttcattgtggtttgtgctgccggtaacttcaaccaagactttcagattacgtggggagatggtcgtgcaaaaatactcaacaacgccaatcttctcactctctcccttgacaaggcctctggctctggcttccaatccaagaacgaatacttatttggcaagattgacatgcagctcaagctcgttcctggaaactctgctgg

SEQ ID NO: 131772 - DNA, 259 bp, Glycine max
catcggaagaaaccctagccactaggccggcgtcacgatgcagatcttcgtgaaaaccctaacgggtaaaacgatcacgttggaggtcgagtcttcggacaccatcgacaacgtgaaggccaagatccaggacaaggaaggcatccctccggaccagcagcgcctcatcttcgccgggaagcagctggaggacgcccgcacccttgccgactacaacatccagaaggagtccacgcttcacctcgtcctccgcctccgt

SEQ ID NO: 131773 - DNA, 257 bp, Glycine max
gtgaataagagatatcaatatattatgataatggagggatacaataagaaggttatgattgtggggatggtgttgggcatggccatgattgggatggccaatggccaatactcgttttgtcgcatgcccagcgatgggttggcggcatgcaagccgagtgtgagtggggactatcctgctgatccctccactgcttgttgctcagccattgccaaggctgatcttaaatgcttctgccgcttcaaggattcgggcct

SEQ ID NO: 131774 - DNA, 253 bp, Glycine max
acggagccttccactgtggaccgagactacgcaaaggtagaacaccatagaaacttcgctgactttctaataaaccttgatttcgctacgctcaataagaacccggaatagcggaaatcggttcgtgttccgcttccaaactcagtcgtctttgcccaagtgtgaactgcggacgactctccagtggttccattccttcttactttacttctgggtcaacccaacccgaatgggaagaagagggtcagccaaa

SEQ ID NO: 131775 - DNA, 255 bp, Glycine max
aaaaaaaagcgaacacagcacagcactgcactcttcgcaacacaacaaaaaaagacaacccagagagcgcgtcttaataaacgctcttctctgaaaacccccatttcttttcttctttcttcttctctttcgcttcttcgatcttcgatcttcgtcgctgaaaatgagagagtgcatttcaatccacatcggccaggccgggattcaggttggaaacgcctgctgggagctttactgcctcgaacacggcattca

SEQ ID NO: 131776 - DNA, 253 bp, Glycine max
aatcatagtcagtcattgcttcggcgacttctcgatattatttgttctgacagagccaccgacagagcatgggcgacaagtacaacctgaagaaccccgccgtgaagcggatcctctaggaggttaaggagatgcagtcgtacccttccgacgatttcacgagcgttcctctcgaggaaaatatatttgagtggcaatttgcgattagagggcctcgtgatacggaatttgacggtggtatgtatcatggaag

SEQ ID NO: 131777 - DNA, 258 bp, Glycine max
ctcgagccgctgccagtagtcatatgcttgtgtcaaagattaagccatgcatgtgtaagtgtgaactaattcagactgtgaaactgcgaatggctcattaaatcagttatagtttgtttgatggtatcttctactcggataaccgtagtaattctagagctaatacgtgcaacaaaccccgacttctggaagggatgcatttattagataaaaggtcaacacaggctctgcctgttgctttgatgattcatgataact

SEQ ID NO: 131778 - DNA, 251 bp, Glycine max
ctcgagccgaatcggctcgaggcaattgaaacaactctatggtcgcttgagtggggcattgctgagcttgtgaaccacccagagatccagcaaaagttaagggatgagattgacagagttcttggagcagggcaccaagtgactgagccagacatccaaaagctcccatacctccaagcagtggtcaaggaaactcttcgtcttagaatggcaatccctctccttgtaccacacatgaacctccacgacgc

SEQ ID NO: 131779 - DNA, 247 bp, Glycine max
gtgcgaagagaaagaaagagaagaagcgcttatcgaactcggacggaagcactgagttaactcagagcgagtgaaagtgttgctgcgtgatgtctggtggtatcgcccgtggacgcctcaccgaggagcgcaagtcgtggcggaagaaccatccccatggttttgttgcgaaccggagacgctgcccgatggaaccgtgaacttgatggtgtggcattgcactattcccgggaagactgggactgat

SEQ ID NO: 131780 - DNA, 250 bp, Glycine max
cgaatgtacacattgaggctccatcaggtatgagcgtgaaggtgaagcagacatgcttgctcctgtagatgtttttgttagtaccgtggatcccatgaaggaacctcctctggttacagcaaacactgttctttcaatcttggccatggattacccggttgataaaatatcatgctacatttctgatgatggagcctcaatgtgtacatttgagtccttatcagaaactgcagagtttgctagaaagtgg

SEQ ID NO: 131781 - DNA, 244 bp, Glycine max
gtcgcgtgtactttcttgcgaaacagaagggcgaaggggcaaacacaacttttttgtttttttgtagagcgagagagaaaaaaatgttggggatcttcagcagttccgtggtgtcgccgccggaggagctggtggctgccggcagcagaacgccgtcgccgaagacgacggctgggaagctgctgaaccggttcgtggagaacaaggcgtcggcggtgtcgctgcaggtgggagaacacgtgca

SEQ ID NO: 131782 - DNA, 249 bp, Glycine max
aaagactttgatgttgaatgacagaattcaaaacccagatgcactccaacatgttctgaggaaagctgaggagtatctgggcacagtgcctcctgaaactccctactcagaatttgagcacaagttccaggagattggtttggagagagggtggggtgacaacgcagagcgtgttcttgagtcaattcaacttctcttggatcttcttgaggcccctgacccttgcacccttgagactttccttggaag

SEQ ID NO: 131783 - DNA, 250 bp, Glycine max
ctcgagccgaatcggctcgagggaatttcgatgctcagtcatctagtttaccattctcttagctcttgctcttgcaggagacgagccatgtccatgcatcgctacctgaggaagattattgggaagctgtttggccaaacactcccattcccactgcactgcgagagcttctaaagcctctccctgcaggtgttgaaatcgatgaactccctaagcaaattgatgatacacagtacccaaaaacattctt

SEQ ID NO: 131784 - DNA, 205 bp, Glycine max
  unsure (1)..(205): unsure at all n locations
gctagattcgacgattccagaagtgccttcctcctcctcctccttcttcccctctaatcggatccaaatccaaatccaaatccagttcaaagaagatgcaatacaagaacctggggcgatctggcctgaaggtgagccagctctcctacggcgcgtgggtgagcttcgggaaccagctggacgtgaangaggcgaagcctcctac

SEQ ID NO: 131785 - DNA, 254 bp, Glycine max
ctctgccttgctcatttacacacctctccaacctttcactttcagctttatttgaatccctctctctcctttccaaatggccagcgttgaggttgcacatcaaacaccaacaacagttccagaaaatgaaacaaccgaggtaatcaagacccaggaaacaaccccggaaccagtaccagccactgaggctcctgcaacagaacaagcagcagctgaggttcctgcccaagaagaacaacaagcaactgaggttc

SEQ ID NO: 131786 - DNA, 210 bp, Glycine max
tcgggatcggagtaatgattaacagggacagtcgggggcattcgtatttcatagtcagaggtgaaattcttggatttatgaaagacgaacaactgcgaaagcatttgccaaggatgttttcattaatcaagaacgaaagttgggggctcgaagacgatcagataccgtcctagtctcaaccataaacgatgccgaccagggatcagcgga

SEQ ID NO: 131787 - DNA, 276 bp, Glycine max
gtttagttacgtacatagcttgaaaacacagtgcttgtttagactagtatcttccatggctccgaaagatagaatcctggttttgggacccacaggagccattggaagacacatagtttgggcaagtgtaaaggcagggaatcccacttttatattggttagggacacccctgcctctgttaacaagccaaggcttgtcactgctgctaatcctgaaaccagggaagagctcattcagagcttccaaaattctggagttactctaatccagggaga

SEQ ID NO: 131788 - DNA, 275 bp, Glycine max
ccagcatttgacgacagacactaactattactacggctggtttaggtctggtctccaaccacgtttaggtttatcttgagcgatgtcgggcctgtataactccaacttctcaccagtgagagctgcttctcctcagattagaaccaacccagaagtcgacagtcagtaccttacggagttgctggcagagcatcagaagtttggtcccttcatgcaagcccttcccatatgcagtcgtctcttgaatcaagaaatattaagagtttctggaatgc

SEQ ID NO: 131789 - DNA, 273 bp, Glycine max
caggacccttgaattttcctccccttgtctatgatcgaggaagaaaatctgtaatatattatgcaaaaaataattaaggtcttttcctttaaatgggctggttcaatgaaccgagaccactgcaggttcatggggatggtaggattaagaggctatgttttttaatcttccgatgttactgttgttttttttttaatttcaataaggatattatatatgtagtactatgcaagtagcttagagttgggtagaagggcatgttcatggtgttaa

SEQ ID NO: 131790 - DNA, 271 bp, Glycine max
gtttggagagccattaatacgcaaagtggtgaagttgttgcaatcacgaaaatgcgaaagaaatatcactcttgggaggagtgtgtaaacctgagagaagtcaagtcattacggaaaatgaatcatgcagatattgtgaagcttaaggaagttatacgagaatgtgacactctatgccttgattttgagtacatggaatacaacctgtatcaacttgtgaaaaacagggaaaagtagttttctgaaaatgaagttagaaattggtgttttc

SEQ ID NO: 131791 - DNA, 271 bp, Glycine max
cagtctgcaaagctggtgctagcgtcctgaaaattcctctttacaagcatattgctaatatcgcgggtaacaaaaagttggttttgcctgttcctgctttcaatgtcattaatggtggatcacatgctggaaacaaacttgctatgcaggagtttatggttcttcctgtgggagcttcctcgttcaaggaagcgatgaagatgggtgtagaagtgtatcacaatttgaagtctgtgattaagaagaaatatggtcaagatgcaataaatgt

SEQ ID NO: 131792 - DNA, 273 bp, Glycine max
gttcatctcaatctagatttgtgtgcggtgcgtctccggtgaagagaagaagatggcgaccgtaccaggacagctcatatgggaggtcgtaaagaagaacaactctttcttggtgaaagagttcggaaggggcactcagagcgtgcagttcagcagagagcccaacaatctctacaacctcaacactttcaagtactccggtttggcgaacaagaaaactgtcacgattcaacctgcgggtaaagaccagtctgtgttgctggcaacacccaa

SEQ ID NO: 131793 - DNA, 271 bp, Glycine max
cggctcgagtgttattgttgttaagggtgatttaaagaacttgaaggggaaggtagagaaagttgatgaagataatgttcatataagaccagaaatggaggatcttccaaaaactattgctgtaaatgaaaaggaactttgtaaatattttgaacctggaaaccacgttaaggtagtttctggtgctcaagagggggctacaggcatggttgtgaaggtcgagcagcatgtgttgatcttaatatctgatacaacaaaagagcatatccgt

SEQ ID NO: 131794 - DNA, 272 bp, Glycine max
cgtacatagcttgaaaacacagtgcttgtttagactagtatcttccatggctccgaaagatagaatcctggttttgggacccacaggagccattggaagacacatagtttgggcaagtgtaaaggcagggaatcccacttttatattggttagggacacccctgcctctgttaacaagccaaggcttgtcactgctgctaatcctgaaaccagggaagagctcattcagagcttccaaaattctggagttactctaatccagggagatatga

SEQ ID NO: 131795 - DNA, 273 bp, Glycine max
cgcagagtagagcagcacagaagagggaaaacggcaccgccgccgtagaagaaaacaaccatggtgcacgtctccttttacaggaactatgggaagacattcaagaagccgcgtcgtccgtacgagaaggagcgtctcgacgcggagttgaagctggttggtgagtacgggcttcggtgcaagagagagctgtggagggtgcagtacgcgctcagccgcatccgcaacaacgcgcggaacctcctcaccctcgacgagaagaacccgcgccgg

SEQ ID NO: 131796 - DNA, 270 bp, Glycine max
attatcctaagtctttgggaatagtgctgcaatggcttcaagtcaggaggaggtgacccttttgggagctactggaagcccatttgtgtgcagggttcatattgccctcaagttgaagggagttcaatacaaatatgtcgaagaaaatttgaggaacaagagtgaactgcttctcaaatccaacccagttcacaagaaggttccagtgtttattcacaatgagaagcccatagcagagtctcttgtgattgttgaatacattgatgagac

SEQ ID NO: 131797 - DNA, 270 bp, Glycine max
gggttttgctatggagaagctagaagcagagaacgttctggtccttccctctgagcaacccaacaacaataggccaaagccaaaaccaaagcgtttcgtgaaaaaccaaatccccgactcaatccttaacaaccctcttctgagcgccgcaatctctgtgctcccttccaactacaacttcgactccccacaagtgcgtctggcgcgtgctctccacgggagcaaaacgcgtggctctccagttcccggagggtctcctcatgtactctc

SEQ ID NO: 131798 - DNA, 266 bp, Glycine max
ctcgagccgttcacacccaccattggatccaccaatctccaaccttcttctccactgttccgtttctctctccaacggagagtcttttgttttttgtggcgagtttgttgcacgtttaagaagcaatggcacgcaagaagatcagagagtatgactccaagaggttgttgaaggagcactttaagagaatctctggccaggagttgcccatcaagtctgcacaggttacagaatccaccaatttcagtgagctagcagagaaggaa

SEQ ID NO: 131799 - DNA, 272 bp, Glycine max
ctcgtacttgccagcttcttttggtaggacaattgctcaagcatttaatgatgcaaactacattggacttggtaccattgttttgtccttctttttgttggtagttggtattgtttatgttcaggaagcagagagaaaaatcccgcttaactatgcttctagattcaccagcagaagcactggtcttgaaaagtccgcttacctaccctttaaggtaaatagttctggagtaatgcctatcatattttctacatcatcattagctcttcctg

SEQ ID NO: 131800 - DNA, 227 bp, Glycine max
acaagttgcaagcattcactgacgcatatgcagaacttgcgcctgcttgggctggtttgaatgttcttgttgagacctactttgctgacatccctgctgaggcatacaagaccctcacatctctgaatggcgtcactgcatatggatttgatttggtccgtggaaccaacactcttgatttgatcaagggtggatttcccagcggaaaatacctctttgctggagtg

SEQ ID NO: 131801 - DNA, 271 bp, Glycine max
ctcgagccgctcattaattgcaagaatggcacttcgttgcttggtgatgtccctttctgttctcttcactcttggtcttgcgagagaaagccatgccagagacgaagatttttggcatgctgtttggccaaacactcccattccaagttcattgcgagatcttctaaagcctggccctgcaagtgttgaaatcgatgatcaccctatgcaaattgaagaaacacagtacccgaaaaccttcttctataaagaagaccttcatccaggcaaa

SEQ ID NO: 131802 - DNA, 263 bp, Glycine max
gattttattaggatatgaagatggctttacgttctggatccgatctgtgaatctcttatatattacttgctcttacagtagctgctgcctgctgattcattggcatcaaacatgagcggactggagctgttcttgttgctgtggctgctgctatcggcaacttgctgcaaggatgggataatgccaccattgcaggatctattttgtacataaagagggagtttaatcttcaaagtgaacccacaatagaaggtctaattgtg

SEQ ID NO: 131803 - DNA, 268 bp, Glycine max
cggctcgagctctaacgaaagagcgagaaagcgaagacagccatggcgtcgtttcttcaatcgtttctggatccgaagaagaactggttcgccgctcagcacatgaaatccctctccaaacgcctccgcaaatatgggctccgatacgacgatttgtacgatccttactacgatctggatgtgaaggaggcgctgaatcggcttccgaaagaggtggtggacgctcgccacgcgcgtcttaaacgcgccatcgatctttccatgaagc

SEQ ID NO: 131804 - DNA, 270 bp, Glycine max
ctccaattcaaccatggcttcgatactcacggtaacagccttggtgctgatagctttggcaacagtttctctccaaacctcagcttcatcagtgggtaaattcatcgacgaaaccatcacttcccacaagatcgtcattttttccaagacctattgcccgtactgtagaagggcaaaagctgttttcaaagagttgaaccaagttccacatgttgttgagctcgacgagagagaggatggttcaaagattcacgatatcatgattaatat

SEQ ID NO: 131805 - DNA, 267 bp, Glycine max
ctttgcttcccaaagaaagagaaaataaaaagcaatgggtagccttgaagcggaaagaacaacagtaggattggcagcaagagacccttcagggattctctccccatacacctacaatctaagaaacacaggccctgatgatgtttacataaaagttcactactgtggaatttgccattctgatctccaccagattaaaaatgatcttggcatgtccaactatcccatggtcccaggacatgaagtggttggtgaggtactggaggt

SEQ ID NO: 131806 - DNA, 266 bp, Glycine max
cctcgagccgattcggctcgaggccgaagaaggggcagccggagaccgcggtttatgatttcgaggacaagatcaactttgacggtgttcccttcgctgcagggtgggccccacaaccaccagatcggggctcttgccgtggcgctgaagcaggccgcgtcgcccgggtttaaggcctacgccaagcaggttaaggccaacgccgttgcgcttgggaattacttgatggggaaagggtacagtcttgtcactggaggcacggagaa

SEQ ID NO: 131807 - DNA, 268 bp, Glycine max
gatttctacaccacaatcacccttgccaggtttgaggagctcaacatggatctcttcaggaagtgtatggagcccgttgagaagtgtttgagggatgctaagatggacaagagcactgtccatgacgttgtccttgttggtggatccactagaattcctaaagtgcagcaattgttgcaggatttcttcaatggcaaggagctttgcaagagcattaaccccgatgaggccgttgcttatggagcagctgtacaggctgctattttga

SEQ ID NO: 131808 - DNA, 269 bp, Glycine max
gcaagaatggcacttcgttgcttggtgatgtccctttctgttctcttcactcttggtcttgcgagagaaagccatgccagagacgaagatttttggcatgctgtttggccaaacactcccattccaagttcattgcgagatcttctaaagcctggccctgcaagtgttgaaatcgatgatcaccctatgcaaattgaagaaacacagtacccgaaaaccttcttctataaagaagaccttcatccaggcaaaacaatgatagtacaatt

SEQ ID NO: 131809 - DNA, 265 bp, Glycine max
aaaccacacaagggaagctaatccgagaactgaagggacatgggcattgggttaactctttagcattgagcaccgagtatgttcttcgcactggagcttttgatcatactggaaaaaagtattcatctccagaggaaatgaagaaggttgctcttgaaaggtatcaattaatgagaggcaatgcccctgaaaggttggtctctggatctgatgatttcactatgttcctttgggaacctttcatcaacaagcaccccaaaactcg

SEQ ID NO: 131810 - DNA, 170 bp, Glycine max
ggatagtacttaatagagttagccattggaataccatcagtgtcttagcctgcggttttggacactggcagtgaccttatatggacacagtgcaagccttgcacatggtgttataaacaattcaacacccatttttgatcccaagaagtcctcttctttttccaaggttt

SEQ ID NO: 131811 - DNA, 260 bp, Glycine max
cggctcgagaatttgttgagtttttgaacttaatggccaagaaaatgaaggaaactgatgcagacgaagatctcaaagaggctttcaaggtgtttgacaaggatcaaaatggctacatttcagcaagtgaggtatatgtataaacttttattctttctattcactttttattgtaactttctttctctgacggcaatgaccaatcacagtattcatgagatttctgacaaagtaaggttccttcaaacttgaacaaaaag

SEQ ID NO: 131812 - DNA, 266 bp, Glycine max
ggtggtcccgccatgattagagctgctgcaaagaaccacaaggatgttttggtagtggttgatacagaagactaccctgcccttctggaatttcttaaaagaaaccaggatgatcaaaagttcaggctaaagctcgcatggaaagcttttcaacatgttgcttcctatgattctgcagtatctgagtggttgtggaagcagagtgtgggagataaattcccacctagcttgacagtgcctctttcactcaaaagttctctccgtta

SEQ ID NO: 131813 - DNA, 266 bp, Glycine max
gaggaagtgaaggccaaatatccaaaagtttcatatgccgacctttaccagctagctggtgttgttccagtagaggtcactgggggtccaactatggactttgttccagggagaaaagattcattggaatctccagtagaagggtgtcttccggatgccgaacaagagaattactgagaggggagtcaaaagatttactgaagcttcccacagacaaggctctagttgaagatcctaatttccgcaagtatgttgaactatatgcg

SEQ ID NO: 131814 - DNA, 261 bp, Glycine max
cggagattccctgacgcagagaaagcaaaagacagtcgcagcattcgtcctggaaaggggaaaatgcgtaaccgtcgctacatctcacgccgtggaccactcatcgtgtacggaacggaaggagccaaagccgttaaggccttccgtaacgtccccggcgtggaagtcgctaacgtcgagaggcttaaccttctgaaacttgctccaggaggacacctcgggaggtttgtggtttggacaaaaagcgcttttgagaagctg

SEQ ID NO: 131815 - DNA, 262 bp, Glycine max
acctggagtctttgaatggctttggagtccatttactttctttctcggttatactgacccgaatcctgccaaatcacatctttctcgcttgcatgaatggcattttcgttcagggcttgaccgctacatatggataattggaatgatttatgcttattatcatccaactgttgaacgatggatggaaaaattggaggaagcagaaatcaagcgcagaatatcaatcaaggcaactgttgttctgatatgttcattggtgggt

SEQ ID NO: 131816 - DNA, 264 bp, Glycine max
ccgattgctagaatggaatttcgatgctcagtcatttcttttaccattctcttctctcttgcccttgcaggagagagccatgtccatgcatcgctacctgtggaagattattgggaagctgtttggccaaacactcccattcccactgcactgcgagatcttctaaagcctctccctgcaggtgttgaaatcgatgaactccctaagcaaattgatgatacacagtacccaaaaacattcttctataaagaagaccttcatcca

SEQ ID NO: 131817 - DNA, 264 bp, Glycine max
ctaatactttgggatttaaggcccctgggattgacaggtaaattttatgagaaggtctgtgaaacatgtcatattactttgaataaaattgctatttttggcgacaatggaactataattcctggaggtgtaagagtaggtacccctgccatgacgtcaagaggatgtctggaagctcattttgagacaatggctgaatttctcattagagctgcacaaattgcaagcatactgcagagggagcatgggaaattgcagaagaca

SEQ ID NO: 131818 - DNA, 264 bp, Glycine max
ggcagttggagatggaaaaacactgaacacagttgcattccaaaatgcagttttttatgccaagtcatttgctgacaaaggtggggctaaactatatgttccatctggcaagtggctcactggaagttttaaccttaccagccacctcactctctttcttgaaagaggcgcaaccatcatcgcatcacaggattatgcacactggactgcaatggatcccctaccctcctatggtcgaggtattgatgttcctgttgggagata

SEQ ID NO: 131819 - DNA, 266 bp, Glycine max
atataaccttttctctccggttaccagaaccgtaagttgctgaacatgaacccgcaatcgccggttcgggcggaaccggagcctccggttccgacgttctccccacggttcgcgctcacgtccggttcgcagcggaaaatcgcgatcgcggtcgatctgagcgacgaaagcgcctacgcggtgcgctgggcggtgcagaactacctgcgaccgggcgacgccgtgatcctcctgcacgtgcgtcccacgagcgttctctacggcgc

SEQ ID NO: 131820 - DNA, 269 bp, Glycine max
ctcgagcagaaatatagtttggaagcaatgaaagtcattgagcacatgaagactcttccaaagattgaaggactagttcctatctacattagccctcattctggtgaatttagtggagaaaatattagactgggatctcgtggtgacagttactatgagtacttaatcaaagtatggcttcagagtggagctagtagcaacactaatacatcattcctatatgaaatgtataaggaagcaatgaatggtgttagacatcttcttgttcg

SEQ ID NO: 131821 - DNA, 265 bp, Glycine max
caaagagctaacaagagattcaagaccggcatggctaatgaagaggaacagaaaaaccacctcttcggcatcaaagatctcggtcacaagactctccttcagagtgatgcactctatcagtatatacttgaaaccagtgtctatccagaagagcacgagtgcttgaaagagatacgcaagatgactgcaaaacacccactgaacatcatggcaacaccagcagacgaaggacaacttctgagcatgcttgttaagctcacgaatt

SEQ ID NO: 131822 - DNA, 262 bp, Glycine max
gaggggaagtacttagaaacagaaacacagagatggaaccagaaacatctctgaactttactttgatgctgactttcttactttatctgaacttggttatgggagtgctgagcgttgatcattatcgcagagttgactttcctgatgaattcgtttttggttcaggcacctctgcttatcaggtggaaggagcttctaacgaagatgggagaactcctagcatctgggatacctttgcccatgcggtgtatgagcatggaga

SEQ ID NO: 131823 - DNA, 260 bp, Glycine max
gccgataaaggtcttcgtcgaacacgcggatgtttctccgtcgccgtcggaggcgacgacgccggcggaaggaacatactgcgagtggaatccgaaagcggcggtgaagagcaactcgacgggattctcgaagctgtggaggttacgagacgtgaagctgcggacaacagcgacggaaaagacgcgttcgtgttcttgaaccacgcgccggcggcgaagcgtgcggagaaggcgagcagcgtcgtcgtgaagaaggttga

SEQ ID NO: 131824 - DNA, 262 bp, Glycine max
cagccatggggcgaagacccgcgaggtgttataggcaaattaagaacaaaccataccccaagtcacggttttgccgtggtgttcctgatcccaagatcaggatttacgatgttggtatgaagaagaagggtgttgatgaatttcctttctgtgtccatctggttagttgggagaaggaaaacgtttctagtgaggccctggaagctgctcgtattgcttgcaacaagtacatggccaaatttgctggaaaggatgctttcca

SEQ ID NO: 131825 - DNA, 263 bp, Glycine max
accaaaagcaatggctaatacaccttcgaattcttcaattctcctctccctttttctattggccatcgccctctccctcgctgagtcccaatctttcatcggagtaaactacggccaggtcgccgacaaccttccggcgccggaggacacggccagcctcctcaaatccaccaccatcggaaaattccgtctctacggcgccgatcccgccatcatcaaggccctcgccaactccggcatcggaatcgtcatcggcgcctcca

SEQ ID NO: 131826 - DNA, 259 bp, Glycine max
gtcaaggaatggcatcattgaccggtgtgctgcctccatttgttccatttgctcaagcatttgcggctgttcttacagctgtccttactggttctctctattacatggctgcctctcctaaagatcctacttatgttgttgcacctgttttacaatctcgctctggtcgccaagatttgaaaaagctatttgaagcctggtatgaaaaacggcaaatgaaaaaaatctattccccacttctggaaggactgctggcact

SEQ ID NO: 131827 - DNA, 257 bp, Glycine max
gtggatttgacatgctccgatggtacttttgctagagctgctgttccaagtggtgcatccactgggatttatgaggcccttgaattgagagatggaggatctgactaccttggaaagggtgtatcaaaggctgttgacaatgtgaacaccattattgcccctgctttggttggcaaggacccaactcagcagactgctattgacaacttaatggttcaacaacttgatggaactgttaacgaatggggttggtgcaa

SEQ ID NO: 131828 - DNA, 259 bp, Glycine max
accagtttcaccgcacgaatatcttgttgtttggagcgatccgagaaaaactctgtaaacatgttggtttaccaggacctccttacaggtgatgagcttctctctgactccttccgttacaaggaaattgagaatggaatgctgtgggaagttgaggggaagtgggttgttaaaggagcagttgatgtagacattggtgcaaacccttctgctgagggtggaggagaagatgagggagttgatgatgcagctgttaagg

SEQ ID NO: 131829 - DNA, 261 bp, Glycine max
ctgcgatcgagctcttgatcttgactcagcaaagaagaaagttcttgatttcgttgagagtaggatgggctacattgcacccaatctttctgctatagttgggagtgctgttgcagccaaactcatggggacagctggtggtctagcatctcttgcaaagatgcctgcttgtaatgttcagcttcttggtgccaagaaaaagaatcttgctgggttctccacagcaacatctcaatttcgtgtaggttaccttgagcaaac

SEQ ID NO: 131830 - DNA, 261 bp, Glycine max
cacccagaaagcacaaaagctacacacatatccaatcttttctttttcttcatttcgtccaccagattcatacacaattcacgtatacgtacaattattaaaaggaagagatggcaggagaatcatacgaggaagccatcacgagtctgaccaagcttctcagtgagaaagctgagctcggtggcgttgccgccgcaaagataaaggagctgacggcggagcttgatgccgccggttcgaagccgtttaacccggaggaga

SEQ ID NO: 131831 - DNA, 257 bp, Glycine max
gtgaaattcctcatgagggaccattttgtgatctgatgtggagtgatcctgaagatatcgaaacatgggcagtcagtcctcgtggagctggttggctttttggatcccgggtcacttctgagttcaataacataaacaatcttgatctggtttgtcgggcacaccaactcgttcaagaaggtcttaagtatatgttccaggataaaggccttgtaactgtatggtccgcacctaattactgttaccgttgtggaaat

SEQ ID NO: 131832 - DNA, 259 bp, Glycine max
ggatggtactatgatttcaagcatacacactttgatcaatattcacctccagacttctacacaagagtggggattgctggagtccctaatgatactataatgaagagaactaaggcaatagaggataactggttacctacatggaatgaggtattcgagttccctctcactgttccggagttggcgttgcttcgcatagaagttcatgagtatgacatgtctgagaaagatgactttggtggacaagcatgcctaccta

SEQ ID NO: 131833 - DNA, 258 bp, Glycine max
aagaaagaagcgtttgagggagaagagaagttttgtgcaaaatccttgggaacagtaattggttttgccatttcaaagctgggaaagaacattcaagtactttcaagttcctttgtcaataagcaagagcaatacactgtggaaggagtgcagaatcttggagacaaagcagtgatgtgtcatgggctaaatttcagaactgcagtattttactgccataaagtccgtgaaacaacagctttcatggttccattggtg

SEQ ID NO: 131834 - DNA, 262 bp, Glycine max
cacaaattacaaaatcccctcatattatctctctctctcttaaaccatcatgtcctccaccgcgcctcccgtcctccccatctccaactcccaaaccaccgcgggaaccaccggtgcaggcggcggcgccatcgaggctccggccaacaacccggccttccgcgctttcatcaacaacctctccaactccctccgccacggcctcgaccagcgccgcccctggtcggagctcgcggaccgctcagcgttctcgaaacccgag

SEQ ID NO: 131835 - DNA, 259 bp, Glycine max
ctcgagccgctcgagccgctctgagtatcgtatcgttttattattatttttaattctcacttatcaggtccattgaatatgtctccgtcgttggatcttcctcccaagggtggcttcagttttgatctatgccgaagaaacgcaatgcttcaaaacaagggcctcaaagccccaacctttctcaaaactggcaccactattgtcggtttagttttccaggatggtgtcattcttggtgctgatactagggcaactgaag

SEQ ID NO: 131836 - DNA, 259 bp, Glycine max
agccgctacatatttgacctctaccatcggaggaaggaaatttctaaagaactgtatgaattctgtttagatcaaggatatgctgaccgcaatctaattgcaaaatggaagaagcctggttatgaacgtctttgctgcctgaggtgcatgcagccacgtgatcacaattttgccaccacttgtgtttgcagagttcccaagcaacttagggaggagaaggtcatagagtgtgttcactgtgggtgcaagggttgtgcaa

SEQ ID NO: 131837 - DNA, 256 bp, Glycine max
cgagagaagagaggaacgaagactgaaaaatggcgtcatggaattcatttccgcttcaagttacctacgaggctctgggttggttcgccttcgtttcctggtccatcagtttctatcctcaagtcatcttgaattttcgcaggaagagtgtggttggactcaacttcgatttcgtggtgctaaatctgaccaagcacagttcctatctcatatacaacgcttctctctacttcagctctgctattcagaagcagta

SEQ ID NO: 131838 - DNA, 255 bp, Glycine max
tggatttcttgcaagcacaagaaaatcagatacttgtgggtgtggccgtggccgttgtagccattgggcttggtgcagtatatctctattcatccaagaagaccaaaggttgcttggacccagagaactttaaggcattcaaacttgttaagcgtgcacagctgagccataatgttgcaaagttcacatttgcactcccaacacctacatctgttttgggtcttccaattgggcaacacataagttgcaggggta

SEQ ID NO: 131839 - DNA, 259 bp, Glycine max
gaaacagtagaaaaaacaactacagaagtagccccagaggagcctaaagaagttccagttgagaccgaggaggtggtggcaaaggagacagaggaagagaagccagcagaagagaaatcagaggagaaaactgaagaagtgaaagaagaagcagaggagcctaaagaaactactgaaacagaatcagcagcagcagcaccaccagcaaccacagaggaagagaacaaaccagctgagtcagttgaaaccccagtagagg

SEQ ID NO: 131840 - DNA, 258 bp, Glycine max
gtcactgctttgtttagatcagaaccagatcgtgttctcttcttccattggcaaacatggcaactcaaatgagcaagaagagaaagtttgtggcggatggagtgttcttcgccgaactgaacgaggttctgacacgtgagttggcggaggacggttactccggcgtggaggttagggttacgccgatgcgcaccgagattatcatcagagccaccagaacccaagccgttctcggtgagaagggaaggagaattaggg

SEQ ID NO: 131841 - DNA, 257 bp, Glycine max
ttctgatccaaggtttaagatgttatagtttccttgaattctcatctgggttcaacctgtttgatgttttgactgaatcagtttgaaatagtggcgattatctgataccaaacataaaagattcagctctttttcttgtttctttgtcacaagacttggattttgagaatctggagacatgggttgttgtgcaagtaaagagtcagagccgcaacacaatggttacagacatgctgggactggttgtgtgcacaacc

SEQ ID NO: 131842 - DNA, 259 bp, Glycine max
caatgatgatgccccatcatcggctccacctgctggaagtcagcaaaatggggtgaatgttgctgagttaatagtgggccgtgcgctttggaactgtcattagacatcgtgactttgaagagagatctaactattatgattctcttcttgctgctgaatcgcgtgcaatttctggaaggaaaggcacccactctgccaaggatcctccagtgatgcatataactgatttgaccatggcatcggctaagaaagccagaga

SEQ ID NO: 131843 - DNA, 255 bp, Glycine max
ccacactcccctctcaggtttttgtggataagattgagctataatggctgccaggagaccgggtttgattgctttgtttgatgttgatggaactcttacagctcccaggaaggtggtcacaccggagatgttgacattcatgcaagaactgcggaaggttgtaacggttggagttgttgggggttctgaccttataaagatatcagagcaacttggcagcacagttaccaatgactatgattatgtattttctga

SEQ ID NO: 131844 - DNA, 255 bp, Glycine max
tgaaacccctagaaaaaaccccactttctctctttcactagctccgttcaagttctaactaagcacttcgtcgctgcttttgcttctgtagaagatgtctctgcgagtgctgaaccctaacgccgaagtgctgaacaaatcggcggcacttcacatgaacatcaatgccgccaagggtctgcaagatgtcctcaaaaccaacctcggtcccaaaggaaccatcaaaatgctcgttggtggtgccggtgatatcaa

SEQ ID NO: 131845 - DNA, 256 bp, Glycine max
gatttcttgcttcttttttttctcctttctgatcactaccatggctagaaagaagttgaatcttacatacatacccaatgactcaaagaggaagacaacattgaagaaaagaaagaatggtttgatgaagaagatgaatgaaattagcactctttgtgggattgaaacatgtgctataatctatagtccaaatgatcctcagccagaggtttggccatctgactctggagtccaaagggtgctttcaaggttcatg

SEQ ID NO: 131846 - DNA, 257 bp, Glycine max
gcaaaaagaaagaatcccaggcgaggagaaagatggaggggaaggagcaggatgtgtcgttgggagcgaacaagttccccgagagacagccaattgggacggcggcgcagagccaagacgacggcaaggactaccaggagccggcgccggcgccgctggttgacccgacggagtttacgtcatggtcgttttacagagcagggatagcagagtttgtggccacttttctgtttctctacatcactgtcttaaccgtt

SEQ ID NO: 131847 - DNA, 259 bp, Glycine max
aaactacctcaaaattctaagaacaatttctctgagttgttttgtgagataatagcacatagcataacaagggaaggagtattaacaaccgctaacctgaagagaaaaagagcagaagaagaagaaacaccaacgatgggtgtggattactacaagatcttgcaagttgataggagcgccaaagacgatgacttgaagaaggcttataggaaacttgctatgagatggcaccctgataagaacccaacaacaagaaaga

SEQ ID NO: 131848 - DNA, 258 bp, Glycine max
tatcaatctgtcatacagccataccagaagttgatgaagacacaggaaatgtctcatatgaaactgaatctccagatgaagcagcatttgtgattgcagcgagagaaattggttttgaattctataaaaggactcagactagtttatcaatgtatgaattggatccagtttctggtgacaaaattgaaaggatgtacaagcttcttaatgttttagaattcaatagctcaaggaagcgaatgtcagtgatagtgaaag

SEQ ID NO: 131849 - DNA, 254 bp, Glycine max
aagaaatcgaagaacgacaagctcgtgaactcaaagccggacttcaccccctaaagcacaagtttgccttctggtacactcgtcgaacacctggagttcgaaatcaaacatcatatgaggacaacataaagaaaattgttgaatttagtacggttgaaggattttgggtctgctactgccatcttgctcgtcctgcttctttacctagtccaacagatttgcaccttttcaaggaaggaatccgtcctctatgg

SEQ ID NO: 131850 - DNA, 255 bp, Glycine max
caccacacacatagtagctagtatactctctagagtaattgcggaatctgctagaatgtgctaatgatggcgaaagacgttgagcaggttacagagcaaggtgaatactccgcgaaggactaccatgaccctcctccggcaccgttgatcgacccagatgagctcacaaagtggtccttgtacagagccgccatagctgagttcatagcaacactcctttttctttacatcaccgtgttgaccattattggctac

SEQ ID NO: 131851 - DNA, 256 bp, Glycine max
tgatcaagtgtagtatctgttcttatcagtttaatatctgatatgtgggccattggtccacacgatattagatggaatttttaatggggagagaccaacacagtagcttgctattgggtctctcgcgtgtcgtccatgcgttgcactttagcttgggcctggcacaccctacgtttagtcaaactttttcagttagtttgggttttctaatctcgtatgtggtgggagtgccacggtatgggttgctataggcaga

SEQ ID NO: 131852 - DNA, 253 bp, Glycine max
attaatggtggatcacatgctggaaacaaacttgctatgcaggagtttatggttcttcccgtgggagcttcctctttcaaggaagccatgaagatgggtgtagaagtatatcacaatttgaagtctgtgattaagaagaaatatggtcaagatgcagtaaatgttggtgacgaaggtggctttgcccctaacatccaggaaaacaaggaaggtttggaattgctgaaaactgccattgccaaagctggttaca

SEQ ID NO: 131853 - DNA, 254 bp, Glycine max
ctcctggcctggccaagcatgctggtgccttctggggaggccctgattatggagtactcagctgggataacaagcttgctggtgctcaggttcttctgagtcgtttgaggttattcttgagtcccgggtatccatatgaagaaattttaaagacctttcacaaccagacaagcataatcatgtgctcctatctaccagttttcacaagctttaatagaaccaaaggtggcttgattcaattaaaccacggtagg

SEQ ID NO: 131854 - DNA, 256 bp, Glycine max
cacccatcttcgtgttgtctcccaaaaacgacaccgccgaagcagaaccctaaaactttgcttcaacgatgcagcacgacgaggtcatatggcaagttatcaggcacaaccattgcagttacatggccaaaattgcgacggggaatttttgtagaaacccttacaacgtgactggggtttgtaaccgaagctcgtgccctttggctaatagtcgctatgccaccattcgcgacgacaatggagtgttttaccttta

SEQ ID NO: 131855 - DNA, 255 bp, Glycine max
ggaagtagctatcaagaagggaaaaaaatattcgaacttcaaagggaaatgattcagcttacaatgacgctctttaagtttgctttcattccaggttacaggaggatgaaagcaattgacaaagaaatacgagaatcacttatggtaatcatcaaccgaagattaaaagcaatcaaagcaggggagcctactaacaatgacttgttaggcatactcttggaatcaaattacaaggaatctgaaaaaagtagtggt

SEQ ID NO: 131856 - DNA, 256 bp, Glycine max
aaaagcaccgtctccgtctccactctcggcttcttcttcgttgcgctttttcccaaaaccaattgcatcactctcgtccgttaccgccgctgccctagaccaccgcaagcgacgtcgcacaccgccttcatccgttagggcaaaaatgagtcgaggaagtggaggtggatacgatcgtcacatcactattttctcccctgaaggacgtctctttcaagtggagtatgctttcaaggctgtgaaggctgcaggaatc

SEQ ID NO: 131857 - DNA, 255 bp, Glycine max
ctcgagccgattcggctcgaggatttaagaaaggatagagtgaaaaattgttgatagtacgtgatagtattggcaattttgtcatgaggaaaatttatatgatttgattgacagaatatggagtttgaggtgaagattccgactgagagcttctagctggaatcaggaaagaagtagaagctggatctctgcctgctaatgttgctgcaggaatggaagaagtgtacaataactataaaaatgcagttatccgaa

SEQ ID NO: 131858 - DNA, 254 bp, Glycine max
tgctcgagcgaatcggctcgagctccattctcacttctcaaatagaatcgaacgaattcacaaaccctagttttcgaggctgggtcagatccagtactccgagaagtacttcgatgacacttacgaatatagacatgtggttcttcctcctgaagtcgcaaaactgcttcccaagaatcgtcttctctccgaaaatgagtggcgggcaattggggttcagcagagccgtggctgggttcattatgcaattcatc

SEQ ID NO: 131859 - DNA, 280 bp, Glycine max
  unsure (1)..(280): unsure at all n locations
aaatgtccgaaaacggagaagagaaattactcgctgtggcgcggcacatagccaaaacgctgggccacaacaacaccatgtctgatgacatattccaaatactatcgaatctnccgatggaagattctcgagagagaatctttctgagaaggggcgcagatgtgngatcccagagggctgcgccggcactggaatcattgccctncaaatnccctaagaaccggccggattctctnccctaacgtctnccttccgaaccggcnacaatctgggggcccga

SEQ ID NO: 131860 - DNA, 254 bp, Glycine max
gagctggtttcccctgccccatcaaatgctgagacaacaacttttgatgtggttggccctgtctgtgagtctgcagatttcttaggaaaaggaagagaactacctactccagccaagggtactagtttggttgttcatgatgctggtgcttattgcatgagcatggcatcaacctacaatcttaagatgcggcctcctgagtattgggttgaagatgatggatcagtgagcaaaataaggcatggagagacttt

SEQ ID NO: 131861 - DNA, 255 bp, Glycine max
tttggaatgtagttggatataatggacagaggtactgatgctcggaatctgttactaggaaaagttattcctcttcgacttggttatgtaggtgttgtaaatcgcagtcaggaggatattcaaattaaccggagtataaaggatgctcttgttgctgaagagaattttttccgcaatcgtcctgtatacaatggtctagcagatagttgtggtgttcctcaactagcaaagaagttgaaccagattctagcacaa

SEQ ID NO: 131862 - DNA, 251 bp, Glycine max
gctatttggctcctccataattcaaatgagcttcgacaatggtggttggggtgctattctagctaacttgtacgctaggaaggcggacatcatcttaagaggatactctggttggaattcaaggcgggctttggaggttttggatgaaattttccccaaggatgcttatgtgcaaccatcattggtaattgtgtattttggtggcaatgattctattgatcctcacccatctggccttggtcctcatgtac

SEQ ID NO: 131863 - DNA, 253 bp, Glycine max
gttctgcggagtaagggatgcggacatgagttatcgtttcggaggatttgctcaaggcttcggcggacagactggcggatgggtataatcgggaactacgtataaggcagtgatgggatcggggttcatagttactgtgccgaggttaacagatgcaaggtaccctggcttggaagagttcagtgctcacattcaaatccttgggacgctcacccaccctaacctcggccctctcagggcttatttccaggct

SEQ ID NO: 131864 - DNA, 253 bp, Glycine max
gctgaggccattgatgatggcaagattggaccaagggatgaccccaaggttcgttccaagatcttgtctgaagagttcggttgggacaaggatcttgccaagaaaatctggtgctttggccctgagacccttggacccaacatggtggttgatatgtgcaagggagtccagtatttgaatgaaatcaaggattctgtggttgctggattccagtgggcatcaaaagaaggtgctttggctgaagaaaacatga

SEQ ID NO: 131865 - DNA, 254 bp, Glycine max
gccccactcaaccaccacacatctcctcgttcacgctacccctttctgctcttcttctacctttcaagttctaaaagtataaagatggcagagacattcctatttacctcagagtcggtgaacgagggacaccctgacaagctctgcgaccaaatctccgatgctgtcctcgacgcttgcctcgagcaggacccagacagcaaagttgcctgcgaaacatgcaccaaaaccaacttggtcatggtcttcggaga

SEQ ID NO: 131866 - DNA, 252 bp, Glycine max
cctgtctcaactgactgagcggttgaaacactggaaaaatgttcttcaaagcaatgttgaggataggtttccagcagtattaaagttggaagaagaaagcaaggtgttgcgggactttcacgttattgatgttgaagttccagggcaatatttcactgaccaggaaattgcaccagatcataccgtgaagttggatagggttgcagctgatattccaattgtgcggaggcatgggagcagtttccggcgctt

SEQ ID NO: 131867 - DNA, 253 bp, Glycine max
acagtctctacaatgttgatggaggtcaccgagccattgttttcaaccgtctagttggtttcaaagacaaggtctatgctgaaggaactcacttcataattccgtggtttgagaggccggttatctatgatgtccgtgcacgaccccatctagttgagagtacatctgggagtcgtgatctacagatggtgaaaattggacttcgagttcttactcgcccgttgcccaaccaattacctacggtttatcggac

SEQ ID NO: 131868 - DNA, 248 bp, Glycine max
tttgatacaatttgtaaggttaattctcagctcatcagcaatgtctgcactgatgctctctctgcagagaagtattattatttcatccgtcttatgggacgcaaggcatcacacgttgctttggaatgcaccctccagtcccatccaaatatggtaattcttggtgaggaggttgctgcatcaaagcttaccctttctgaaattgcaaaacagattactgatgcaattcaggctagagcagagcaaga

SEQ ID NO: 131869 - DNA, 251 bp, Glycine max
atttctctctctttctccgatctgttttgcttctggggctacccgctcctgcaatttgcttttgcgattggagtggaaggccattctcgcaacgtttgagttcagcagatccagaatttttcagaaaccaggttaaggagaatgaagaatacggaacgaattgccaatttggctttagcaggtttaaccttagcgccgcttgttgtgaaagtagatccgaatttgaatgttattttgactgcttgcctcac

SEQ ID NO: 131870 - DNA, 261 bp, Glycine max
tgccgctgcaacaatggcttcagagaagaaactttcgaacccaatgagggagataaaagtgcagaagctcgttctcaatatctctgttggcgagagtggagatcgtctcaccagagccgccaaggtgttggaacaacttagtggccaaaccccagtgttttccaaagcaaggtacactgttcgttcctttgggattagaagaaatgagaagattgcatgctatgtcactgtcagaggtgacaaggcaatgcaacttttgga

SEQ ID NO: 131871 - DNA, 251 bp, Glycine max
ctcgagcgaatcggctcagtatttggttactggcaaaggctacatgttgttgtgaatgctgcatgctaccatcaaatcattagccattggctaagcactcatgcaattgttgagccatttgtcatagcaacaaacaggcaactgagtgtggttcaccctatttacaaacttctgtttcctcactaccgtgacaccatgaatattaattcacttgcccggaaagccctggtcaatgcagatggtattataga

SEQ ID NO: 131872 - DNA, 252 bp, Glycine max
ctttgagagagagagagggaggagggagagtgttgacgctccatcaagatgggtatttctagggattccatgcacaagaggcgtgccactggtggcaagaagaaggcatggagaaagaagagaaagtatgagcttgggcgtcaggccgcaaacaccaagttatcaagcaacaaaactatccggaggattcgtgttcgaggtggcaatgttaaatggagggcattgaggttggataccggcaattactcatgg

SEQ ID NO: 131873 - DNA, 251 bp, Glycine max
ctaccaggattttgacataacatggggagatggtcgtgccaagatactcaacaacggcgatcttcttactctttcccttgacaaagcctccggatcagggtttcagtccaagaacgagtatctctttggcaagattgatatgcaactcaagcttgtacccggaaattctgcaggcactgtcactgcctattagcttctcagtggatgggaccccaataagagaattcaagaacatggaatcgaaaagagtt

SEQ ID NO: 131874 - DNA, 255 bp, Glycine max
gtttaaggataagaaagtaattcttggtgttgatgacatggatatttttaagggcattagtctgaaacttctagctgtggagcatctgctgcagcagaatccagatttgcagggcaaagttgtcctagttcatattgtaaatcctgcaaggggctcagggaaggatgttcaggaagcaaagaatgaaacatattcaattgcccagaggatcaatgatacatatagctcaaataattatcagccagtcattctcat

SEQ ID NO: 131875 - DNA, 264 bp, Glycine max
gaagaaggttcctttaactctgtcgttcaaggttgccatgctgtgtttcacactgcttctcccttttatcacaatgtcaaggacccccaggctgaattgttagacccagctttgaaggggactctcaatgttctgaaatcgtgtgtaaacttgccgacgctggaacgcgttgttttaacctcttctgttgctgcagttgcgtacaacggaaagcctcgaactcccgatgtagtagttgatgagacttggttttctgacccgggt

SEQ ID NO: 131876 - DNA, 254 bp, Glycine max
cgcgctacatatttgacctctaccatcggaggaaggaaatttctaaagaactgtatgaattctgtttagatcaaggatatgctgaccgcaatctaattgcaaaatggaagaagcctggttatgaacgctttgctgcctgaggtgcatgcagccacgtgatcacaattttgccaccacttgtgtttgcagagttcccaagcaacttagggaggagaaggtcatagagtgtgttcactgtgggtgcaagggttgtg

SEQ ID NO: 131877 - DNA, 253 bp, Glycine max
cgggcattgagaaggaaggacgctttcagaggcgaaaggccatggggagataccgtctgtgatccatggatctccgatcgggaaaccgtatccaagctccgcggctagtctgcgctctttggacttttaaaacttagcgaactgaaacatcttagtagctaaaggtagggaaatcaaccgagaccccgttagtagcggcgagcgagagcgtattggggtttgacgaaaaacaaacacgaagcttcgtttctct

SEQ ID NO: 131878 - DNA, 251 bp, Glycine max
caaaaagaaaaaaaaaaccctaacgcactcgagaccctgagatttttcatcttcgtttctcattctctttttgatcatggacgtcgaggtgcggcagatcttcaacaagttcgacaagaacggcgacggaaaaatctcggtaacggagctgaaggacatgctcgcggccctcggatccaaaacgacggacgaggagttgaaacgcatgatggaggagctcgaccagaacggcgacggtttcatcgacctca

SEQ ID NO: 131879 - DNA, 250 bp, Glycine max
ctctttctcaattttgcaattgcaagtgaagaagccctaattttttgcagatctggaaatggcgacggcaacataccctccaccgccaccgtattacaggctttacaaagattacttgcaagacctaattctgctcccgaccctccaccacctattgaaggcacttatctttgttttggagccaattacactactagtgatgttctacctaccttggaagaacaaggggtgcgccactctattctaaggg

SEQ ID NO: 131880 - DNA, 258 bp, Glycine max
cagaaaactgctgcttctcgacccacttttgaagttcaaaacttaaaccctagttctctctctctttctttctcctgcatcttcaaccatgtcagcgatgctgcaacctcagatcattctgctcaaggcaggcacggacacttcgcaagggaagccacagctggtgagcaacatcaatgcctgcaccgccgtcgccgacgtcgtccgcaccaccctcggccctcgcggcatggacaagctcatccacgacgacaaggg

SEQ ID NO: 131881 - DNA, 258 bp, Glycine max
cagcaccacaatgtcttcttcaagtggcaaagatttgggagaaggatcaagctctccaacagaaaactaccaacagagtccagggacacttagccgctatgagtctcaaaagagaagggattggaacactttggtcagtacttgaagaatcaaaggcccccagttcctctttctcagtgcaattgcaaccatgtgttggattttcttaggtatcttgaccagtttgggaagaccaaggttcaccttcaagggtgcatg

SEQ ID NO: 131882 - DNA, 263 bp, Glycine max
ggaagtaccagaagagcacggagcttctcataaggaagcttcctttccagaggctcgtaagggaaatcgctcaggacttcaagaccgatctacgcttccagagcagtgctgactccgctcttcaggaagccgctgaggcctacctcgttgggctctttgaggataccaacctctgcgctattcatgctaagagggttaccattatgcccaaggacattcagctagctcgtaggattaggggcgagagagcttagggtttatga

SEQ ID NO: 131883 - DNA, 251 bp, Glycine max
gcatttgctgctgtaacttctggaaaaataaatcttccaggggataaaatattgggtttggcaaattttttgctgggaattggaatcccaggagatgccaaggacttcttcaatcaagttgaatcattagctcttctagagaacaactgggtttccatcccactggtactgtcacttcctgcaacggtttattccttatccaaaaaagatcagctcaaggttagggtgaacactgtacttggttcagctgc

SEQ ID NO: 131884 - DNA, 249 bp, Glycine max
caaatcccaactactactcacactcactgcagatctcaatccatggctaccatcgttagcatcaaggcccgccagatctttgacagtcgtggcaatccaaccgtcgaggtggatttgacatgctccgatggtacttttgctagagctgctgttccaagtggtgcatccactgggatttatgaggcccttgaattgagagatggaggatctgactaccttggaaagggtgtatcaaaggctgttgacaat

SEQ ID NO: 131885 - DNA, 249 bp, Glycine max
ctctttgcgcagttccctacctctcctttcaagatgcagatcttcgtcaagaccctcaccggaaagaccatcacccttgaggtggaaagctctgacaccatcgacaacgtcaaggccaagatcaggacaaggaaggaattcccccggatcagcaacgtctcatcttcgccggaaagcagctcgaggacggccgtaccctcgccgactacaacatccagaaggagtcaacccttcaccttgtccttcgtc

SEQ ID NO: 131886 - DNA, 252 bp, Glycine max
aaagacggcgtcttcataaacgcctttcttctccgtttccgtttcctcgttcaaattcgctttttgatctgcgaaaatgagagagtgcatctcgatccacattggtcaggctggtatccaggtcggaaatgcttgctgggagctctactgcctcgagcacggcatcgggcccgatgggcaaatgccaagtgacaagacagttggcggtggtgatgatgctttcaatactttcttcagcgagactggtgctgg

SEQ ID NO: 131887 - DNA, 254 bp, Glycine max
caaaggtaaggtaggttaacactcttcttcatcgtcgtcgcaatgggacgtgtgatccgtgcgcagcgtaagggagcaggctcggtcttcaagtcccacacgcaccaccgcaagggccctgctcgcttccggagcctggacttcggggagcgcaacggctacctcaagggcgtggtcaccgacgtcatccatgaccctggccgcggcgcgccgctcgccaaggtcgccttccgccaccctttcagatacaagaa

SEQ ID NO: 131888 - DNA, 253 bp, Glycine max
cttacacttacccacagggaggcgaacagagaaactcagagacccgaaggcagatttcaagatgaagttcaacattgcgaatcccaccaccggttgtcagaagaagctggagatcgatgatgacctgaagctgcgagcattttgggacaagaggatctcacaagaggttgttggtgatgctctgggtgaggaattcaaaggttatgtcttcaaaattactggaggttgcgacaagcaaggatttccaatgaag

SEQ ID NO: 131889 - DNA, 209 bp, Glycine max
tgcacgtgttattatggaaatgagaaataaaaaaatggtcatctcacatcgttggatacccccgtatgggtcccaagagagagctcaagttcgctctcgagtcttgctgggatggcaagagcagcgctcgggatttgcagaaggtgtcttctgatctcagggcatccatctggaagcagatggctgatgcggggatcaagtacatcccc

SEQ ID NO: 131890 - DNA, 257 bp, Glycine max
gaagaagatggctttaggtgttcctgctcttccgttgacatacgtggctcacgttctggcagttgttgccagcgtcttggtcgtggtctgggtcgtcaatttcaggggtggcttggcttgggattctgataacaagtccctcatcttcaacattcatccagttcttattgttattggcttactagttcatgggggtgaagctattataagttacaaagcttttcccctaaagaaggaagtgaagaaattgatacacc

SEQ ID NO: 131891 - DNA, 234 bp, Glycine max
cttacgactatggcgctctggagccagccatcagcggtgaactcatgcagctgcaccaccagaagcaccaccagacttacatcaccaacttcaacaaggccctcgagcagctccaagacgccgtcccaagaaagattcctccgccgtcgttaagctccagggcgccatcaagttcaacggcggaggtcacgtcaaccattctattttctggaaaaatctagctcctgttcgtga

SEQ ID NO: 131892 - DNA, 249 bp, Glycine max
gtcaattcatcatttgctctctgctctgcttgttcaaattttaggagcggagaatccagagaaagagagatgtctggtatcgcccgtggacgtcttgccgaggagcgaaagtcatggcgcaaaaccaccctcatggtttcgttgccaagcccgagactctccctgatgccaccgttaatttgatggtctggcattgcactattcctggcaaggctgggactgattgggagggtggatatttcccactga

SEQ ID NO: 131893 - DNA, 245 bp, Glycine max
  unsure (1)..(245): unsure at all n locations
ctgcaaacaacatctatggcctttgtttcactacatgcttccactgaacatacgacttgtgcggtcgntttgataggtccctgtggcaagcttatctctctgttcacaagatatttgcggataagtgatggaagtcattagccctgatgatgactttgtgtgggttcatgactaccatttgatggtacttccaacatttttgagaaagagatttaacagggtgaggctaggattcttcctccata

SEQ ID NO: 131894 - DNA, 207 bp, Glycine max
  unsure (1)..(207): unsure at all n locations
gattggtgctcgcagacgtgccgtggaggatcctgtcttccattgagcagaaggaagaaacaaaagggaacgagttgaatgcgaacggattaaggagtacagacagaaggttgaattggagctatcgaacacttatgatgtatgagaggatatacactatcctcggtcactggtgatcattgntataagatgaagaatatacgtact

SEQ ID NO: 131895 - DNA, 245 bp, Glycine max
gttttattaggattttctcttctttgttttcaattaggtttttttgttgctctccttcaaactccatctttccaaatcctctctttgcgattgtgttttgatctgcttcctactgcgatagtatctctactgttacatggccatggcggtttccgcaattggttttgaaggtttcgagaaaaggttggaaatatcctttttccagccgggactttttgctgaccctgaaggaaggggtctaaggg

SEQ ID NO: 131896 - DNA, 252 bp, Glycine max
ctcattctttcgggtgatttctttcttggggcggtagttgcatgtacactgacaaaacttggcttaaggttggaagaggttcagacttcaaaagccgaagttaacaaggcaactacacaggccttttgatcattgtctccatgctgcagctgggtcaatcttcaattcttccacatccaattgatcacaattctgttgacaggattgtcctctgcattagattgttgtgcaataccggtgatgagataagaa

SEQ ID NO: 131897 - DNA, 253 bp, Glycine max
gaacattgaatccaacaggcgagctcttagggagctgcttttcactgctcctggtgttcttcaatatctcagtggtgtcatcctctttgaggaaaccctctaccagagcacagctgcaggcaagcccttgtgaatgtcttgaaggaagctggtgtgcttcctggcatcaaggttgacaagggcacagtcgagcttgctggaactaatggagacaccaccactcagggtctagcatggcttagtcagcgttgtg

SEQ ID NO: 131898 - DNA, 248 bp, Glycine max
gtttcgtttcgggtttgacgttgttcacaatcactttctgcgcttcactcactcccttcgtgcggttttctttctttgtcgaactcgtgcgaagatgcgtgagattcttcacatacagggaggccaatgcggaaaccagatcggagcgaagttctgggaggtggtgtgcgcggacacgggatcgattccacggggaggtaccagggggacaacgagttgcaactcgagcgagtcaacgtctattacaa

SEQ ID NO: 131899 - DNA, 248 bp, Glycine max
aattcacaatcatcaaagagagagatggtgaacgtggtggaattgcagaaacagttgcagagtgggaatgtgaatgttgatgccaacggggaactcatgtatgtcaaggtcatgaccgatgaacagttggaaactctgaggaagcaaatagcagtttatggcaccatttgtgagcaacttattgagatgcacagaacactctcagctcaacaggatcttgcaggggttagattgggaaacatatactg

SEQ ID NO: 131900 - DNA, 248 bp, Glycine max
gaacataagaaggttatcactggcattgcacttcctgttggatccgacaaactttattctggcagcactgatgggacagttcggatatgggactgccatactggtcgatgtgttaaagtcatcatcttggtgctgaggttacctctttgatcagtgaggggccatggatttttgttggtctgcaaaatgctgtcaaggcttggaacatccagaccattacagagtttactcttgatggacccaaaggc

SEQ ID NO: 131901 - DNA, 249 bp, Glycine max
attcattggcatggggtgtttcagctgtttagtgcatgggcagatggtcctgaatatgtaactcaatgcacaattagtccgggaactaagtagacttataaattcaatgtgacacaacaagacggaaccttatggtggcatgctcatgcatctgttttacgtgccactgttcatggtgctttcatcattcaccctcgttcagggcaatttccctttcctaaacctttcaagcaagttcccattatatta

SEQ ID NO: 131902 - DNA, 248 bp, Glycine max
cgctcgagcgaatcggctgaccaggtccagacatagtaaagattgacagactgagcgctctttcttgattctatgggtggtggtgcatggccgttcttagttggtggagcgatttgtctggttaattccgttaacgaacgagacctcagcctgctaaatagctatgtggaggtaaccctccacggccagcttcttagagggactatggccgcttaggccacggaagtttgaggcaataacaggtctgt

SEQ ID NO: 131903 - DNA, 253 bp, Glycine max
gccagtagtcatatgcttgtctcaaagattaagccatgcatgtgtaagtatgaactaattcagactgtgaaactgcgaatggctcattaaatcagttatagtttgtttgatggtatctactacgtggataaccgtagtaattctagagctaatacgtgcaacaaaccccgacttctggaagggatgcatttattagataaaaggtcaacacaggctctgcctgttgctttgatgattcatgataactcgtcgg

SEQ ID NO: 131904 - DNA, 243 bp, Glycine max
ctagttcattgcactgcaacttagccacttgaacccccttcgtaagcctcttcacatcttcacttcttcacttcttcttccgcactaatacgaaacgagagggaattcacaaaagaggttaccatgatggacgatgagagagaggagaaggagttggatctcacttctccggaagttgtcaccaagtacaagagcgccgcgcagattgttaacagggctttgcagttagttatttcagaatgt

SEQ ID NO: 131905 - DNA, 255 bp, Glycine max
cctcactccagccacacgcctcagtagaccatggcctcattgggtgggttacaaaatctaagcggcatcaattttcttatcaaaaaagagggtccaaaagtcaatgcgaagttcgagctgaagccgccaccatatccactgaatggtttggagccggtgatgagccagcagacacttgagtttcattgggggaaacaccacaagacatatgtggaaaatctgaaaaaacaaattgttgggacagagcttgatggg

SEQ ID NO: 131906 - DNA, 258 bp, Glycine max
gaggaaacctgcgtcagagagaaatcggtggagtcgctgtgcagaattggagcacagatgagggagcaagacttggttgagcacttcattcctttagttaagaggctggctgctggtgagtggttcacgcacgggtttcgtcgtgcggtttgttccatattgcttaccccagtgcaccagagtcggtgaagactgaactgagagccatatatggtcagctgtgtcaagatgatatgcccatggttaggagatccgctg

SEQ ID NO: 131907 - DNA, 247 bp, Glycine max
ctctttttgtttcttcagtttggtataaccttagccgaggtcacgaggagcactagctagtttcacaatttccaaatggctaggggattgaagaagcatctcaagaggctcaatgctcctaacattggatgcttgacaaactgggtggtgcatttgcgcccaaaccctcatctggaccacacaaatctagggagtgccttcccctcatactcatcctacgaaaccggctaaagtatgctctgactta

SEQ ID NO: 131908 - DNA, 244 bp, Glycine max
ctaattcccaccgcaaggtaaaaaaaaaaaaaaaaaccagtggtgcgcgatgccaccgaagttcgatccctcacaggtggtggacgtgttcgtccgagtcaccggcggcaaggtcggcgcgcgagttccctcgctccaaaaatcggtccattgggtctctccccaaagaagatcggagaagacattgcgaaggaaaccgcaaaggactggaagggcctccgcgtaacggtgaagctgacagtac

SEQ ID NO: 131909 - DNA, 243 bp, Glycine max
gcgaagtggcggagcaggccgagcgctacgaggagatggtggagttcatggagaaggtctccgcctccgccgagagcgaggagctgaccgtggaggagcgcaacctcctctccgtcgctacaagaacgtaatcggcgctcgccgcgcctcctggcgcatcatctcctccattgagcagaaggaggagagccgcggcaacgaggaccacgtcgccgtcatccgtgactaccgctccaagatcga

SEQ ID NO: 131910 - DNA, 245 bp, Glycine max
aaaagattgagaaggtgctggatgtttatgaggagaggctgtcaaagagcaagtacttggctggtgacttcttcagccttgctgatcttagccacctcccatttggtcactatttggtgaaccaaaccgggagaggaaatttggtcagagacaggaagcatgtgagtgcttggtgggatgatattagtaacagacctgcttggcagaaggttcttcagctatataaataccctgtctagttagtt

SEQ ID NO: 131911 - DNA, 248 bp, Glycine max
gttagaaatgaccaacctagatctgagaccacctaccagattgctttggctatcaaggacgaagtggaggaccttgaaaaggctggcatcactgttatccaaattgatgaagctgctttgagagagggtctgccactgaggaaatcagaacaagctcactacttggactgggctgtccatgccttcagaatcaccaatgttggtgtgcaggataccactcagatccacacccacatgtgctactccaa

SEQ ID NO: 131912 - DNA, 248 bp, Glycine max
cttcaatcgcaacttttccttcttcagctgaaatagtatctgaaccactgggggttgtgttagtcatctctgcatggaactacccattcttgttgtcacttgatccagtcattggagctattgcagctggtaatgctgttgttttaaaaccatcagaaattgctcctgccacatcatcactgctggcaaaactgctcggagactacttggataactcatgtattaaagttgttgagggagcagttgat

SEQ ID NO: 131913 - DNA, 251 bp, Glycine max
cagattacgaaggacttcttggtggtctacacagaagtgtcatactgaagggagtgggaagcagtgcaatcagtcaactccataataacagaagctaccctctttcagatgtcatgccattagacagccccaacatcatcgaagcaactgaggggactaggggtgctgatatccaggctttgatcgcaaaagtgggatatctcactggatgatagaaattgaaaatcattttagtaatatgcctcttcgtg

SEQ ID NO: 131914 - DNA, 253 bp, Glycine max
agggggtcagagtgagaaagagaaagagagaattcgtaaaccctaatttcggaaagatcggcgatgactgcctccaaggatcgcgagaacttcgtctacatcgccaaactcgccgagcaggccgagcgttacgaagagatggtggaatcaatgaagaacgttgcgaatctcgacgttgaactgacggtggaggagcggaatttgctttctgttgggtacaagaatgtgattggtgctcgcagagcgtcctgga

SEQ ID NO: 131915 - DNA, 256 bp, Glycine max
gggggagctggagaaggttctggaagggttgccacggaccaaaggagggtttgtttgtgagagttgtggggatgtgaggtttgcgccgtgtgggaactgcagtgggagtaggaaggtgtttgatgagatgaagaggtgttgaagaggtgtttggagtgcaatgagaatggcttgattcggtgtcctaattgttgctcttcttgaagtttgcaaaaaataaaaataaaacagaaaaaaaagaaataaaaaagaagac

SEQ ID NO: 131916 - DNA, 245 bp, Glycine max
caatattgcatcagttgttggtttggttggcaatgttggacaagccaattatagtgctgcgaaagcaggagtaattggcctgacaaaaactgttgcaaaggaatatgctagcagaaacatcactgttaatgcagttgctccagggtttattgcatccgacatgactgccaagctaggacaagacattgagaaaaagattttggagacgatcccattaggaagatatggccaaccagaagaagttg

SEQ ID NO: 131917 - DNA, 242 bp, Glycine max
atcgctgtggttatcatcttcttcttcctctttcttagatctcttctttctctacgccgcacgccgaaaccatggccggaaaaggagagggtcctgctatcggaatcgatctcggaacccctactcttgcgtcggtgtgtggcaacatgaccgcgttgaaatcatcgccaacgaccaggggaacagaaccacgccgtcttacgtcggattcactgacaccgagcgtctcatcggtgatgcgg

SEQ ID NO: 131918 - DNA, 245 bp, Glycine max
tgaagtgtctgcttcttccgattccggcacgcccccatcaccatggtgaacgttccgaaaacaaagaagacatactgcaagagtaaggagtgcaggaagcacaccctgcacaaggttaccaatacaagaagggtaaagatagcattgctgcccaaggaaaacgccgttacgatcgcaaacaatctggttatggcggacaaactaagcccgtcttccacaagaaggctaagaccaccaagaagatt

SEQ ID NO: 131919 - DNA, 248 bp, Glycine max
tccaaaacttgtagctgaggatattattactcagcaaaaattcatggaagttccaatcaagtatccggcaaaactcacccttagggtggttcttacttgtatcatggcggccaccggtgggttgatttttggctatgaccatggtgtttcaggtggagtgacctccatggattccttcctgaagaagttcttcccatctgtatatgacaaggagtctaacgtgaagccttcttcaaaccagtactgca

SEQ ID NO: 131920 - DNA, 248 bp, Glycine max
acagcacaaagcgggttactgtctgttcaagctaccatctctctctctctttcttagtgcctccttgccagaagttaaaatggcccaagaaactttcctattcacatctgaatcagtgaacgaggggcaccctgacaagctctgtgaccagatctccgatgctgtgctcgatgcatgcttggagcaggaccctgacagcaaggttgcctgtgaaacctgcaccaagaccaacatggtgatggttttcg

SEQ ID NO: 131921 - DNA, 243 bp, Glycine max
gcgttcattctgttttcctgttgaagtctttccgtagccaatggccaccgatcgtttgacccgggttcacagtctccgtgagaggcttgatgaaaccctcactgccaacaggaatgaaattttggcccttctgtcaaggatcgaagccaagggcaagggcatcctgcaacaccaccaggtcattgctgagtttgaggaaatccctgaggagaacagacagaagctcactgatggtgcctttgg

SEQ ID NO: 131922 - DNA, 256 bp, Glycine max
tggctctacaaaattaggaactgttgcaacagttgttgctgcagccaattcaacagccttggaatgttcaaaagaaattgaagcagcaatgcagatttctttgcgcaatgctctgggaatgatgaaaataggactactgatggtcctatggatgatttaacaataatgaaggaaacactaagagtgaaggatgaggagctacagaatttgtctcgagaccttcgggcacgtgattcaactataaaagatatagcag

SEQ ID NO: 131923 - DNA, 270 bp, Glycine max
ctgaaactaatcatcaacatgatccccatttgggtgttcacattaccatttggaatatgtgcttcccaaacctctactttcttcatcaagcaaggtgccatcatgaacagaaaaataggcaatggatttgtggttcccccagcttcaattttcactcttgcagccatagggatgatagtttcagtgatcatctatgacaagctccttgtgccagtgctaagaaaactaacaggaaatgagagaggaatcaacatcctccaaaggattggc

SEQ ID NO: 131924 - DNA, 252 bp, Glycine max
tggaatctggtttgcaaaaagacagagggttaattgtggagtactttggaaggatgtcttacgttgctcataacgttaatcagccccaagagaaagatttgttggagggaaatttttcctttgatattaaatctcgctctagattggaaaaagtttcctctacaaaagcacaatttgttagtggaaaaactttcaaatatgatataattggtgctggttcacattcttcagaagatttgttagaacatgtct

SEQ ID NO: 131925 - DNA, 264 bp, Glycine max
cgctctcatctccgacacccagcaatggaaggacctcaaggcacatgtggaggacatcaataaaacacatcttcgcgatctattgagcgatgataagcggtgccagtccatgctcgttgaattcgatgacattctgttggactattcaaggcaacaagccactcctgaaactatccagaagctatttgaattagcggaggctgcatcgctcaaagaaaagattatccgcatgtacagtggggaacatataaatagcacagaaaa

SEQ ID NO: 131926 - DNA, 261 bp, Glycine max
aacaaaacaaccacccaacaaaccctaattcaacttttccgatctgatcacttcgagtaaaaattccaaatgagtcgggcacaggatgcaaaccgatcattcttcccttttggaaatccttttaggatgatatcacctaaaagccctaaaatttcttcacagctgttgttaattctacatgcttttgaagcaactttggaagagaggctgaaaaagcttattcccaagagcaaggatgagatcctcagcttgtcttggatg

SEQ ID NO: 131927 - DNA, 261 bp, Glycine max
gataaacacatttttagttgcaactaatgggaactgttgaagctgcaaacaaggatgcaaatggaagcctcctagagaaaaatcctacagttgtttttgtgttaggtggcccaggcagtggaaagggtacccagtgtgcaaatattgtcgaaaattttgggtatactcacctcagtgctggtgatcttctgcgagcagaaatcaaatctggttctgaaaatggcacaatgattcagaatatgattaaagaaggaaaaattg

SEQ ID NO: 131928 - DNA, 258 bp, Glycine max
cttggcactcgttcctcttattagcgacggccattctcgccgttgtgtgctccgccgtgagcggttgctcgccatcggatagggcggcgctgctggccttccggaaggcgctgagcgagccctaccttggcctcttcaactcgtggacgggctccaactgctgcctcgactggtacggcatcagctgcgacgccaccaccggccgcgtcaccgacatcaacctccgcggggagtccgaagaccccatcttcgagaaag

SEQ ID NO: 131929 - DNA, 260 bp, Glycine max
ctggagagagagtgagtgcaaagccatcgtcttcttctcagacaagtagtttggtacaagatggctgatgctgaggatattcaaccccttgtctgtgacaatggaactggaatggtgaaggcaggatttgctggtgatgatgctcctagggctgtgtttcccagtattgttggccgacctctacatactggtgttatggttgggatgggtcaaaaggatgcctatgtaggtgatgaagcccagtcaaaaagaggtattct

SEQ ID NO: 131930 - DNA, 258 bp, Glycine max
tttcagtgagtgatcggtgttcacttgatctcatcataatcgtcagcgtcaattgaagaagatgccgatcagaaacatcgccgtcggaaggcctgaagaggcgactcaccccgacacgttgaaggcggctttggctgagttcatctcaaccttcatcttcgtgttcgccggctcaggctccggcatcgcctacaacaagctcaccgacaacggcgctgccacccctgccggcctcatctccgcctccatcgcccatgc

SEQ ID NO: 131931 - DNA, 266 bp, Glycine max
tgaatctcagaattctctaaaagagatctttttctgctctttgaagaaagaagggtctttgcttgattttggagatgtctctgctctcagatctcatcaaccttaacctctccgataccaccgagaaggtgatcgcagagtacatatggatcggtggatcaggaatggacctgaggagcaaagcaaggactctcccaggaccagttagcgacccttcagagcttcccaagtggaactatgatggttccagcacaggtcaagctcct

SEQ ID NO: 131932 - DNA, 259 bp, Glycine max
ctccatacgccggatctgctaaaatacgcttgatccatatgggcctcctcgaccacttgtgggacgacaccgtcgccggcccaaggcggaaaacggtctcggcaagctccgaaaacaccacaccttcactttccgacctagctccggcaaggaaacggagggcgggagcgtgagatcgtacggagacgaatcgtcggaggaagcgacgagagtgacgcgtagtatcatgatcgtgaaaccgcccgggtaccagagtgga

SEQ ID NO: 131933 - DNA, 266 bp, Glycine max
ttccttcacatcttctctctcaccattctcttcttcttctccctttcttagattctcccttttttctctttaccctccgccacggctgaggataaggagatgtcttcctctgtcaccaatggcgatgattctctcactggccacatcatatctacaactattggaggcaaaaatggggaacccaaacaggtattatattattactcttattttgaattatttgttgggtcatttatcctggattgcaagtttaatgtctggtacaa

SEQ ID NO: 131934 - DNA, 257 bp, Glycine max
ctcgagccgaatcggctcgagcgactccgtccttgacgtcgtgcgcaaggaggccgagaattgcgactgcctccaggggttccaggtctgccactcgctcggcggaggaaccggctccgggatggggacgctttagatttccaagatcagagaggagtaccctgacagaatgatgctcaccttctccgtttttccttcccccaaggtctctgatactgtggttgagccttataacgctactctttctgttcatcagt

SEQ ID NO: 131935 - DNA, 258 bp, Glycine max
ttcagttactgaggatatcttaacggggttcaagatgcaatgccgtggatggaggtcagtttactgcatgcccctaaggcctgcattcaaaggatccgcaccaatcaatctttctgatcgattgcaccaagttcttcgttgggcccttggatcagttgaaattttctttagcagacattgccccctctggtatggttttgcagggggtcgcctcaaatggctgcagagactggcttacataaacaccattgtctaccc

SEQ ID NO: 131936 - DNA, 256 bp, Glycine max
ctttcaagatgcagatcttcgtcaagaccctcaccggaaagaccatcacccttgaggtggaaagctctgacaccatcgacaacgtcaaggccaagatccaggacaaggaaggaattcccccggatcagcaacgtctcatcttcgccggaaagcagctcgaggacggccgtaccctcgccgactacaacatccagaaggagtcaacccttcaccttgtccttcgtctccgtggtggcatgcagatcttcgtcaagac

SEQ ID NO: 131937 - DNA, 260 bp, Glycine max
gtttgggtttctcttcctcccttggagaaaaagaagagccaccgctgcgacgccgttcgtgcatttttgaggtgccgctgtcatgtttgggcgtggtggaccaaggaggagtgataactccaaatattatgatattctcgggatttccaaaaatgccagtgaagatgaaatcaagaaggcctatagaaaggcggctatgaagaaccatccagataagggaggagatcctgaaaagtttaaggagttaggtcaagcatatg

SEQ ID NO: 131938 - DNA, 258 bp, Glycine max
agcggggctaccgctgagtttaagcatatcaataagcggagaagaagaaaccagcagcagagaagaaggaggaagttgaagtgacagaagggaagaaggaagctgaagtcatagaagagaagaaggaagtggaagtgacggaagagaagaaggaaattgaagtaacagaagagaagaagaaagctgaagtcatagaagagaagaaggaagtggaagtgacggaagagaagaaggaaattgaagtaacagaagagaaga

SEQ ID NO: 131939 - DNA, 257 bp, Glycine max
tttcagaactgcaatggtgagtaaaaatagcaagcctcaagctactgcaatgcatgttggagctatagaaattatcattgatagtttcgcaagtcctgactgcaacatagttggtgcaatgcttttggttgatacttatcataccaatcctgaaaatgcagttcgtagtatttttgttgcacctttcagaggtggaaggcccattcgggtggttacatttccgaataccattgtgcagattgaaccagacatgaatt

SEQ ID NO: 131940 - DNA, 257 bp, Glycine max
ctggctcagaaggaacgctagctatatgcttaacacatgcaagtcgaacgttgttttcggggagctgggcagaaggaaaagaggctcctagcgtgaaggttgcttgtctcgcccaggaggtgggaacagttgaaaacaaagtggcgaacgggtgcgtaatgcgtgggaatctgccgaacagttcgggccaaatcctgaagaaagctaaaaagcgctgtttgatgagcctgcgtagtattaggtagttggtcaggtaa

SEQ ID NO: 131941 - DNA, 254 bp, Glycine max
gggaagactaaaactaagaccccactctctttttccgagtcttccagtgaaagaaaggcagcgatggaagaagacttcgacatccccggcggcgaggaaatggatctcggcgaagacgaggtcggcgaggagagggagatcggctctggcggcctcaagaagaagctcctcaaggaaggtcaaggctgggaaacccccgaagtcggtgacgaatccaagttcattacacggggactttgctcgacgggactaag

SEQ ID NO: 131942 - DNA, 263 bp, Glycine max
tgattgctagggctccatcttctggagatgttgtggcacattctattgttaaggaaccgtataatgttgcacaagaaatggagcgaaaaagagcactgtccatggtcctctctcaaacaaggcaacaagaacgaagagatgaagaggttcttgttgaagcaaaaaaatagctgaaaaacgcctacctcccaaggttgctggacagtctcagtttgttgcttctaatgctggtgccaaagctatagagagggctgtccctggtg

SEQ ID NO: 131943 - DNA, 260 bp, Glycine max
gggagatagcagcaggaacaatacctgacccagggtcattgaaggcaagtgacacaacaatgttggatgtgccagtgaaggtgcctcatagcatattactgagcttggcaaaggacattggtgcagattgggacattgattaccaattggatattggacttgttattgaccttcctgtcattggcaacttcaccattcctctttctcagaagggagagatcaagctccctaccctcactgacatgtttgcctaattccaa

SEQ ID NO: 131944 - DNA, 258 bp, Glycine max
gagaatacaggcatagcattggcctgtgctatgaatagttcttttagggggcgtgccagttctgatatttacaccatctgctctcaagactgtgaattatggaatcctgcttgcacaaaagcaatgaccatgtcatttaatccaaacccgtgttctgatgcatggagtttggaatttctgaagcgtaccggatttcattgtgatatcatttgtgtcactggatggactgctaccccaatgcaggatgttcaggttaca

SEQ ID NO: 131945 - DNA, 227 bp, Glycine max
gagagagagagagagagagatctatctatctatcaagatggcgttgttggttgagaaaacaagcagtggaagggagtacaaggtgaaggacatgacgcaagccgatttcggaagattggaaatcgagctggcggaggttgaaatgcccggcctcatgtcctcccgcaccgagttcggcccctctcaacccttcaagggcgctaggatcaccggctccctccacatga

SEQ ID NO: 131946 - DNA, 257 bp, Glycine max
tgagaaatggcaggggacagcaagagcaagattctgttcatcggagggactggttacatcggaaaattcatcgtggaagccagcgccaaagctggccacccaactttccttttggtgagggagtccactctctccaaccccgcaaaatcacccctcatcgacaatttcaaaggcctcggtgtcaatcttgttttaggagatctatacgatcaccaaagtttggtgagtgctataaagcaggtcgatgtggtaatttc

SEQ ID NO: 131947 - DNA, 258 bp, Glycine max
cagagggttaattgtggagtactttggaaggatgtcttacgttgctcataacgttaatcagccccaagagaaagatttgttggagggaaatttttcctttgatattaaatctcgctctagattggaaaaagtttcctctacaaaagcacaatttgttagtggaaaaactttcaaatatgatataattggtgctggttcacattcttcagaagattttcctgaaaaggaagatcaagaaaaacccaaaaagattgatgc

SEQ ID NO: 131948 - DNA, 258 bp, Glycine max
ctcgcaagcaaaaagaaagaatcccaggcgaggagaaagatggaggggaaggagcaggatgtgtcgttgggagcgaacaagttccccgagagacagccaattgggacggcggcgcagagccaagacgacggcaaggactaccaggagccggcgccggcgccgctggttgacccgacggagtttacgtcatggtcgttttacagagcagggatagcagagtttgtggccacttttctgtttctctacatcactgtctta

SEQ ID NO: 131949 - DNA, 262 bp, Glycine max
ctcgagccgaatcggctcgagctccatgtctcacttctcaaattgcatcgaacgaattcacaaaccctagttttcgaggatacggtcagatccagtactccgagaagtacttcgatgacacttacgaatatagacatgtggttcttcctctagaagtcgcaaaactgcttcccaagaatcgtcttctctccgaaaatgagtggcgggcaattggggttcagcagagccgtggctgggttcattatgcaattcatcgccctga

SEQ ID NO: 131950 - DNA, 261 bp, Glycine max
gttcacagagagaatggctgcggaaaacgttgttgagttcacagacttacccgtcaagaggccaagagaagaagaagaaggaaccaatggcgtctccaacgacgccgtttcagcgctccccaatgaccctcaataccctggcatctctgcggttattcccggggaggcacattccttgaagatggaaaagattttgtttcaagggaagtctgactatcagaatgtcatgtcttccagtcatcaacatatggccaagttctt

SEQ ID NO: 131951 - DNA, 258 bp, Glycine max
ctcatctggagatcgcacatttgctagtcctcttgctagaaaattgggcgaagagaaaaatgtacctctctctagcattaaaggaacaggacctgaagggctcattgtgaaggccgacattgatgattacttggcttctggtgctaaagaagtttcagcatcctccaaggccaaggttgcaacagatgcagcattggattatactgacattcctgtctctcagatacggaaggtcacagcttcacggctactattatc

SEQ ID NO: 131952 - DNA, 255 bp, Glycine max
gatccatctcttgtttcttgctttctttcttcaccatgtcacttgctgggaaaatcaccactgaaatcggggttcatgcaaccgctacaaagtggttcaacctcttcgcaacacaactccatcatgttcaaaacctaactgatagagtgcatggaaccaagctgcatcaaggtgaagactggcatcacaacgagacagtcaagcactggacttataccatagatggtaaggttacaacatgtctggagagtattg

SEQ ID NO: 131953 - DNA, 254 bp, Glycine max
gtttgttgttgtaactcgttcttcttcttttgttgttctgtgtttgtgtttgttttttctctcacctgaaaatgtcttgctgcggtggtaactgtggttgcggaagctcctgcaagtgcggcaacggctgcggaggctgcaagatgtacccagacttgagctacactgagtcaaccaccaccgagaccttggtcatgggagtggcacctgttaaggctcaatttgagggtgctgaaatgggtgtgcccgctgag

SEQ ID NO: 131954 - DNA, 256 bp, Glycine max
gcgcgtcttaataaacgctcttctctgaaaacccccatttcttttcttctttcttcttctctttcgcttcttcgatcttcgatcttcgtcgctgaaaatgagagagtgcatttcaatccacatcggccaggccgggattcaggttggaaacgcctgctgggagctttactgcctcgaacacggcattcagcctgatgggcagatgccaagtgacaagaccgttggtggaggtgatgatgctttcaacaccttcttc

SEQ ID NO: 131955 - DNA, 256 bp, Glycine max
gccatgatctcgggcttattccagcttggtagtgcatacgagtgggtggtcaccaagaaatctggtcgttcctcggagggcgatttggtttcattgattgagaaaggaccaaagcatcaaagagggtcctcagcacctgatctagaggaaatgaaagaggaacttcgaaagcaggagcagcaaaaggcctctaagaagaagaaaaaacataacagaatatatatgaaggagcttgctttggcttttcttcttctaa

SEQ ID NO: 131956 - DNA, 255 bp, Glycine max
ctcacccccagctgctgagtaatggaaaaactcaaggtgctggggaattccagtgttatgaccaaaacatgctcagctttctcaagcaacatgctgaagcatctggaaatcctctgtgggggcttggtggtcctcatgatgcacctacctatgaccagcccccatacaatggcttcttcaatgatggggcttcttgggagtccacacatggggacttcttcctctcttggtattccaatcagctcatagctcatg

SEQ ID NO: 131957 - DNA, 255 bp, Glycine max
cgcacaagagcgagtgcaacatgtactgcttggattgtatgaacggtgctctctgctctctctgcctcgcttaccataaagatcatcgtgctattcagataaggaggtcctcataccatgatgtgattagggtgaatgagattcagaaggtgttggacatcacaggggtccaaacctacattatcaacagcgcgagggttgttttcttgaatgagaggccgcagccaaggcctggtaaaggtgtcaccaacactt

SEQ ID NO: 131958 - DNA, 256 bp, Glycine max
ttctcagtctctgtgtttgcggctgaggattccgaacgagtgaccttcttcgtttctcgcaaagtttaagtaatcatgggtaaggaaaaggttcacatcaacattgtcgtcattggacatgtcgactctgggaagtcaactaccactggtcacttgatctacaagcttggaggtattgacaagcgtgtgattgagaggttcgagaaggaggctgccgagatgaacaagaggtcattcaagtatgcctgggtgctcg

SEQ ID NO: 131959 - DNA, 236 bp, Glycine max
ggaactcagaagggtgcatctgcaatttttgaggaagtcagaaagcgtggtctcaaagtttcagttgtaggtatccccaaaaccatagataatgatattccagttattgataagtcttttggctttgacactgctgttgaggaggctcaacgagctataaatgcagcacatgttgaagctgaaagtgtagaaaatggcataggtgttgtcaagttgatgggtagaaacagcggatt

SEQ ID NO: 131960 - DNA, 244 bp, Glycine max
agccgctacatatctgacctctaccatcggaggaaggaaattgctaaacaactggatgaattctgtttagatcaaggatatgctgaccgcaatctaattgcaaaatggaagaagcctggatatgaacgtctttgacgcctgaggtgcatgcagccacgtgatcacaattttgccaccacttgtgtttgcagagttcccaagcaacttagggaggagaaggtcatagagtgtgttcacttgtggg

SEQ ID NO: 131961 - DNA, 242 bp, Glycine max
gactggtgtgaacctttccctacctaccccagaacatatgatatgcttcatgcatacggacttatctcacatctctcctcggagaggtgtagtatggtagacttattcctggaaatggatagaatactgcgtccagagggatgggtcattctttctgatacaataggagctatagagatggctcgcatgcttgcagcacaagtacgttgggatgcaaggataattgatcttcagaatggcag

SEQ ID NO: 131962 - DNA, 244 bp, Glycine max
ggttcttccttctcaaatattcttgagatccccattttctccgaagcaaagccatggctaagggtcctggtctctactctgacatcggcaagaaagctagggatctgctgttcaaggactaccacagtgaccagaagttcaccatcaccacctactcaccgactggagtggctattacagcatcaggaaccaggaaaagtgaactgtttctggctgatgtcaacacccagttgaagaacaaaaa

SEQ ID NO: 131963 - DNA, 242 bp, Glycine max
gaaaagagaaccaaaattagaagagaaaggtgcacaaggggttttgtgtttgaacccatcatcatcatcatgatcatagagaaattccatgaccgtgggcaagtaccaaattgttaactccaacgagggtcagcctcttcccgattcccacagagtcaccgtcagggtgacttcgtcttatgggaacaactatcactacggggatcgcgttcagacggggcattttgcgtttgcggcagtgg

SEQ ID NO: 131964 - DNA, 240 bp, Glycine max
aaaagtttgccctagccaatatcctcttggtccttctcttgaacttgagcactttgctcaatgttcttgcttgtccctattgcccttacccttctcccaagcctccaaaaaagcctcacgttgtgaaaccaccggttcacaaaccaccaaaaccatgtccaccacccaagtcatctccaaaaccaccccatgtacaccctccctatgttccaaaacctcctcactaccctaaaccaccag

SEQ ID NO: 131965 - DNA, 237 bp, Glycine max
gaattcctcatcataggatgcgacggcatctgggatgtgatgtcaagtcagcatgctgttagccttgttcgcaaaggcctgaggcggcatgatgacccagagaaatgtgccagggacctggttatggaagcattacgcctgaacacattcgacaatctcacggtgatcattgtatgtttctcttcccttgaccacgtggagccagagccatcccctcctcgccaacggaagttgaga

SEQ ID NO: 131966 - DNA, 239 bp, Glycine max
cgagaaagcaaagacagtcatggcgtcgtttcttcaatggtttctggatccgaagaagaactggttcgccgctcagcacatgaaatccctctccagacggcttcgcaaatacgggctccgatatgacgatttgtacgatccttactacgatctagatgtgaaggaggcgctgaatcggcttccgaaagaggtggtggacgctcgccacgcgcgtcttaaacgcgccatcgatctttcca

SEQ ID NO: 131967 - DNA, 238 bp, Glycine max
cttgacccgaagagcccgtttccattttctcagactgttgaagcgtttgcccatctggaaacaaacagagcaactggaaaaatagttgtctatcccattccatgaacatgcataagctccactacaatctacatgcttctgtctgtgatttaaggtttgtgttaaaagagtgaggcacattagtacatgttctccatagcctaaagctacccacttactcttcaagagtgtgtagtgg

SEQ ID NO: 131968 - DNA, 241 bp, Glycine max
tttgataccaaatagtaagtagatcacaccaattaccaatatatattgcagagtggttctagtaactcagtgctgctagaagatggaaactagtgaatggcatatcgagcgaagatctagcttcggctctgaatcccccttagcaagagaggcaggaaatgtgcctgaaactgggtcactctctattgtggtgcttggtgcttctggtgatcttgctaagaagaagacatttcctgcactt

SEQ ID NO: 131969 - DNA, 242 bp, Glycine max
gtttcatctaagacaactatgtcggaaaaaaacatgtcatggaatttaaagccttatgcacggagggacgatgtagatgcaatgattcgtgtgagagaatggtcagtgaaagcagtaaatgttagccagaaagctccccaatgcacccaatatcacaacattccggctgtattattttctaccggagggtatgctggtaaccacttccatgaattcactgacattgttattccactgttttt

SEQ ID NO: 131970 - DNA, 243 bp, Glycine max
ggcacttcgttgcttggtgatgtccctttctgttctcttcactcttggtcttgcgagagaaagccatgccagagacgaagatttttggcatgctgtttggccaaacactcccattccaagttcattgcgagatcttctaaagcctggccctgcaagtgttgaaatcgatgatcaccctatgcaaattgaagaaacacagtacccgaaaaccttcttctataaagaagaccttcatccaggcaa

SEQ ID NO: 131971 - DNA, 240 bp, Glycine max
gatttcttgcttcttttttttctcctttctgatcactaccatggctagaaagaagttgaatcttacatacatacccaatgactcaaagaggaagacaacattgaagaaaagatagacacgtttgatgaagaagatgaatgaaattagcactctttgtgggattgaaacatgtgctataatctatagtccaaatgatcctcagccagaggtttggccatctgactctggagtccaaagggt

SEQ ID NO: 131972 - DNA, 238 bp, Glycine max
gttttattcattttccgatggcttctgcagatgttgagtaccgttgctttgtcggtgggctcgcttgggccactgacgaccatgccctcgagagagccttctctcagtacggcgaaatcgttgaaacgaagattatcaacgatcgtgagactggcagatccaggggttttggatttgtgacattcgcctcggagcagtccatgaaagatgcgatcggagcgatgaatggacagaactt

SEQ ID NO: 131973 - DNA, 239 bp, Glycine max
cttggtgagtgtcactgctgaagagagaaccacgcagaactgacgcaatgggaagcacaagtttgcttcatctattacttggtgttgttttggctctgctgagtgtgtctcttgtggaaggagaagatgcatacaaatactacacgtggactgtgacatatggcattctttctccactaggtagtcctcagcaggtggttcttatcgatggtcagtttcctgggcctcaactagacttg

SEQ ID NO: 131974 - DNA, 242 bp, Glycine max
atggaccgttatgacgacgaagatgaaggaattgaggtgttcagttctggaattggtgatctttattatcccagtaacgacatggatccatatatcaaagataaaaacgatgatgattctgatgaactcgaagacatgatcatcaacccaactgattctgtcattgtttatgcatgtactgaggatgaagtcagttatcttgaggtattggttatcagagatgccgattctagcgaaatgaa

SEQ ID NO: 131975 - DNA, 239 bp, Glycine max
catgtacatgatgtctgtagacccagaggatgctcctgatcaagcagaatatgtggaaattggattagagtcggggcttcctgtttcagtcaatgggaagaggctttcaccagcatctttacttgctgagctcaatgagattggtggaaagcatggaattggcaggattgacatggttgagaatcggcttgtaggtatgaagagccgaggagtgtacgaaactcctggtggaaccatac

SEQ ID NO: 131976 - DNA, 238 bp, Glycine max
aacctcaatcaatccacatttaaattataagaaacgcccttcaagatacaaacaatgtcatctcgcattgttgcggagagcggcggagagtgtcgatcggaaccgacataatccacgacccgatccttctattcctggacgagccaacctcgggacttgattcaacgagcgcgtacatggtggtgaaggtgctgcagagaatcgcacagagcggaagcatcgtgatcatgtcgattca

SEQ ID NO: 131977 - DNA, 238 bp, Glycine max
gtgcttgcaaattatgaaggatccagttgggatgatagtgatccttcaatcttcaaaatgaatgttttgagtggcagcattataagaggcgaataccaaattacaaatggttatagcccagataaagctaccaaaatcatgagggatcactggaacacgtatatcattgaagatgatttcaagttcatgtcagaaaatggcttaaatgctgtgagaattcccgtggggtggtggacaa

SEQ ID NO: 131978 - DNA, 238 bp, Glycine max
tagaagcagggttgatcccaattccggggtacagtagtggtaccaccacaacctcacccttcaccttggattgggtgaacactagtcctgcttatgatgatggcttcaaaggaatcactgctaagagatcctcctctggaagaccccttgagcaggaaaggaagaaaggtgtgccatggactgaagaggaacataagttgtttctactggggctgaagaagtatggcaaaggtgattg

SEQ ID NO: 131979 - DNA, 238 bp, Glycine max
gaattcctcatcataggatgcgacggcatctgggatgtgatgtcaagtcagcatgctgttagccttgttcgcaaaggcctgaggcggcatgatgacccagagaaatgtgccagggacctggttatggaagcattacgcctgaacacattcgacaatctcacggtgatcattgtatgtttctcttcccttgaccacgtggagccagagccatcccctcctcgccaacggaagttgagat

SEQ ID NO: 131980 - DNA, 240 bp, Glycine max
gtgatggcatcaatgactctccagcattagctgctgcagatgttggtatggcaattggggctgggacagatgttgcaatagaagctgctaactatgtgctgatgagagataacttggaagatgtgatcactgccattgatctttccaaaaagacctttttccgtattcgattgaattatgtatttgcgatggcttacaatgttgttgctataccagttgctgccggggttttctttcctt

SEQ ID NO: 131981 - DNA, 235 bp, Glycine max
caggtggattgtgcctatctagatctataggtgacacagacgtgggagaatttattgtgccaataccacatgttaagcaagtaaagctttcaaatgctggtggaaggcttattatagcttctgatggtatttgggatgctttatcatctgatatggctgctaagtcttgtcggggtctacctgcagagcttgctgcaaaactagtggttaaggaagctctaaggtcaagaggcct

SEQ ID NO: 131982 - DNA, 239 bp, Glycine max
tcttaatttctctctgccttgctcatttacacacctctccaacctttcactttcagctttatttgaatccctctctctcctttccaaatggccagcgttgaggttgcacatcaaacaccaacaacagttccagaaaatgaaacaaccgaggtaatcaagacccaggaaacaaccccggaaccagtaccagccactgaggctcctgcaacagaacaagcagcagctgaggttcctgctca

SEQ ID NO: 131983 - DNA, 239 bp, Glycine max
cagaaaattggagggtactagctgtgtctcgtcggattatatggcacaacaatctgacattaatgaaaggatgagggctcatactgattgactggcttattgaggtgcacgacaaatttgacctcttgcacgagacattgtttctcacagtcaatcttatagatcgatgtttggcaaagcagacagtggcaagaaagaagcttcagttggttggtctagttgccatgcttttggcatgc

SEQ ID NO: 131984 - DNA, 236 bp, Glycine max
gtgatgcaatgcttgggtgctatttgtggcgctggcgtggtgaagggtttcgaggggaaaacaaaatacggtgcgttgaatggtggtgccaactttgttgcccctggttacaccaagggtgatggtcttggtgctgagattgttggcactttcatccttgtttacaccgttttctccgccaccgatgccaaacgtagcgccagagactcccacgtccccattttggcacccttgcc

SEQ ID NO: 131985 - DNA, 237 bp, Glycine max
accaaagtcatcaagcttctttgcagactttggaatggatagtggctttccaaagaaatctgggccaagctcctccaaagtgcaaattcaggaaactgatgaagcaagaaggaagttctcaaatgctaaatctatttcttcatcccaatattttggagatcagaacaaggctgcagatgtggattctcaagctacattgtctaagttttcgggttcaagtgccatctccagtgctga

SEQ ID NO: 131986 - DNA, 234 bp, Glycine max
actcgagccgaatcggctcgagtgctttcaacaccttcttcagtgaaactggggctggaaaacacgtgcctcgtgcgatttactgtagatctcgagcctactgtgattgatgaagttaggacttggacataccgccaactatttcatcctgagcagctcattagcggaaaggaggatgctgcaaacaactttgcccgtggccactataccattggaaaggagattgttgagctt

SEQ ID NO: 131987 - DNA, 236 bp, Glycine max
ggcgggtacggtttcgacttgtttcttcttcgtgtttcttctttctctccttcttccttttcagatctccgctgaggaatcctcggagaaggagttcgtactcacattggatcactctaactttcacgacactgtcagcaagcacgatttcatcgtcgtcgagttctacgccccatggtgtggtcactgtaagaagcttgctccggagtatgagaaagctgcttctatcttgagta

SEQ ID NO: 131988 - DNA, 237 bp, Glycine max
gaaaggcaacgttcaaaagaacatagggtgtttgacactatgcactgctttactctctctcatcacaatcttcattattcccttttgtgagtccttcaactacggccaagccctgtcccagagcctcctctattttgagtcacaacgttcaggtcgcttaccctacaatcaaagggtcacttggcgacaccattctgccctcactgatggcctagaacaaggggtggacttggtggg

SEQ ID NO: 131989 - DNA, 233 bp, Glycine max
gttcactcttcttctcttgcggctagggtttagcgcagttcttctagatttaaggaagatgggtaaggaaaaggttcacatcagtattgtggttattggccatgttgactctgggaagtccactaccactggccacctgatctacaagcttggaggcattgacaagcgtgttattgagagatttgagaaggaagctgctgagatgaacaagaggtctttcaagtatgcctggg

SEQ ID NO: 131990 - DNA, 232 bp, Glycine max
aagccttcgaatctctctgaaacttttctcttctctttgattcttctctatcagttaaacattagaatgagccgttcacaggatccacacccttcccgatctttcttcccttttggaaatccttttcggatgatatcacctaaaggctctcgcatgtctccacaacttcttgcagtgttgcaagcttttgaggcaacattggcagagaggctgaaaaatcttatgcctaaaa

SEQ ID NO: 131991 - DNA, 235 bp, Glycine max
gttggtgcaggtcaaaaggcactggttttcttacatggattcccagaaatatggtatacatggaggcaccagatgattgctgcagcaaatgctggctaccgggctattgcctttgatttcagaggctatggactttctgagcatcctgcggagccagaaaaagcaaacttacttgaccttgttgatgatgtcgtgggtctgttggattcattaagcattaccaaggctgtgcttg

SEQ ID NO: 131992 - DNA, 235 bp, Glycine max
ccgcactctccctgatggcaaggttgagaggctctatggtctcgcccccgttgccaagtacttggttaagaacgaagatggtgtctccattgctgcgctcaacctcatgaaccaggacaaagtcctcatggaaagctggtactatttgaaagatgcagtccttgaaggaggcattccatttaacaaggcttatggaatgacagcctttgagtaccatggaacagatccaaggttt

SEQ ID NO: 131993 - DNA, 237 bp, Glycine max
taggaatcctgtcctcttgcttcatccacttgggggctacaccacagctgatgatgtcccacttggttggcggatgaagcaacatgggaaggtacttgaggatggtgttctgtgatccagagacgaatgtggtatccgtattcccatctcccatgcactatgctggacccacggaggtgcagtggcatgcagaggctaggatcatggcaggggctcacttctgatatcgttggtcgt

SEQ ID NO: 131994 - DNA, 235 bp, Glycine max
aaagacaagagatctgcctcctttttatcaaatctatctcttcttcaagaatagttgaaaatggggctgtctttcaccaagttgttcagccgactgtttgccaccaaagagatgcgtatactgctggtgggtctcgatgctgcgggtaagaccaccattctgtacaagctcaagcttggagagattgtcaccaccatcccaccattgggtttaatgtggagactgtggaatataa

SEQ ID NO: 131995 - DNA, 234 bp, Glycine max
aaattcttcgtcggtggcaactggaaatgcgatgggaccactgaggaggtgaagaagattgttactactttaaatgaagctaaagtccctggagaagatgttgtagaagttgttgtgagccctccttttgtgttccttccttttgtaaaaagtttgctgcgccctgatttccatgtctcggcccaaaattgttgggtcgcaaaggtggtgcttatactggagagtgctgaaatg

SEQ ID NO: 131996 - DNA, 237 bp, Glycine max
ctagaaatcatcgaagtactcaaattagcatggctgtcacggttgcattcttgaatttgatcatcatgttttcagtagtctctacaagcaagtcactgagcttgaactactattcaaaaacatgccctgatgtggaatgcattgttgccaaggcagtgaaggatgccactgctagggacaaaactgttccagctgccttctgcgaatgcagttccatgactgtttcgttcgggggtg

SEQ ID NO: 131997 - DNA, 229 bp, Glycine max
ggtggcaacaggggttggggctaacaatggagtgttaattaaaggaggagatgccttggaaagggctcagacggtgaagtatgtgatatttgatgaaacaggcactctaactcagggaaaagccactgttactgcagccaagacattcacaggaatggaacgtggagaatttcttaaattggtggcttctgtgaagctagcagtgaacacccactagcaaaagcagttt

SEQ ID NO: 131998 - DNA, 231 bp, Glycine max
aatagatcaacatttgcttggggtctagaagcccgtgtaccatttttggacaaggcgtttatcaatgctgcaatgagtattgaccctgagtggaagatgataaaaagagatgaaggacgaattgagaagtggattctgaggagagcctttgatgatgaagagcatccttatctgccaaagcacaattttataaggcagaaagaacaattcagtgatggagttggctatagt

SEQ ID NO: 131999 - DNA, 232 bp, Glycine max
tgcatcggaagaaaccctagccactctcccggcgtcacgatgcaggtcttcgtgaaaaccctaacgggtaaaacgatcacgttggaggtggagtcttcggacaccatcgacaacgtgaaggccaagatccaggagaaggaaggcatccctccggaccagcagcgcctcatcttcgccgggaagcagctggagacggccgcagcctcgccgactgcaacatacaggaagggtc

SEQ ID NO: 132000 - DNA, 235 bp, Glycine max
ctttaccagttgccacactacaccgagattccccctaaacacgattgcagtggtgcttgcgaagaaatgggcgataaggagagcgtgggaacgttgaaagagggtgatttgaaagggaagaaggtgttcgtgagggtcgatctgaacgtgcctttggatgacaaccttaacatcaccgatgacactagagtccggctgctgttcccaccatcaagtacttaactggtcatggagc

SEQ ID NO: 132001 - DNA, 237 bp, Glycine max
ctcgagccgaatcggctcgagggcgggaagccctcttttgtttgaatcaggcgaaggcatgtggttcttgttacgagatcgaagtgcactgggaattatgcatgctcaggcaattctgtaagggtagtcatcactgatagctgtcctgggtgtggttcagatgctcaatatcattttgatttgagtggcactgctttggtgcgatggcaatttcaggccaagacgagaagctacgca

SEQ ID NO: 132002 - DNA, 230 bp, Glycine max
agtggatccagccattactatcaaagctattggacatcaatggtattggacttatgagtattcagactataacaactctgatgaacaatcacttgcttttgatagttatatgattccagaagatgatctagaattagggcaattacgtttactagaagtggacaatagagtggtagtgccagctaaaactctctgcgtgttattataacatcagctgatgtacttcatag

SEQ ID NO: 132003 - DNA, 232 bp, Glycine max
cgaaaccctaggttttagtgagtggcgaaaatggcggtgattttttcaagtgcaataccaggaggggcagcaccagcagcaatcgagcaagtgcagtgcttcgggcggaagaagacggcggtggcagtgacctactgcaagcgcggccgaggcctcattaagatcaacgggtgcccgatcgagctggtggaccggagatcctccgcttcaaggccttcgagccagtcctcct

SEQ ID NO: 132004 - DNA, 233 bp, Glycine max
aagattcacccaacaaaatggctctgcttctgctagtagccatttcactggtaaccctctggctcggttacaccctataccaacggctacgcttcaagctccctcctggcccacggccctggccggtagtcggtaacctctacgacatagaacccgtccggttccggtgcttcgctgagtgggcgcagtcttacggccctatcatatcggtctggttcggttcgaccctaaac

SEQ ID NO: 132005 - DNA, 228 bp, Glycine max
cgtcttcataaacgcctttcttctgcgtttccgtttcctcgttcaaattcgctttttgatctgcgaaaatgagagagtgcatctcgatccacattggtcaggctggtatccaggtcggaagtgcttgctgggagctctactgcctcgagcacggcatcgggcccgatgggcaaatgccaagtgacaagaagttggcggtggtgatgatgctttcaatactttcttcag

SEQ ID NO: 132006 - DNA, 223 bp, Glycine max
cgatcctagcactctcttctgcaggtttcgccgacagcttcattcaccatggctgagcaaaccgagaaggcttttttgagacaaccaaaagtgtttctcagctcgaagaaaactgggaagggaaagagacccggaacgggtgggaaccgcttttggaaatccattgggcttggatttaagactcccaggaagccatcgaaggaacctacattgacaagaagtg

SEQ ID NO: 132007 - DNA, 228 bp, Glycine max
gtgctcgaggcgacgatgatctgtatcgacaattctgagtggatgcgtaacggagattactctccttctcgatttcaagctcaagcagacgctgtgaatctcatatgcggtgctaaaacgcagtctaatccgggaaatacagtgggagttctcacaatggctgggaaaggcgttcgtgttttggttaccctaccagtgatctgggcaagatcttagcctgcatgcatc

SEQ ID NO: 132008 - DNA, 227 bp, Glycine max
cgatgacggagcaccaggtcgcgaaactaatggaagaagacatgggttcggctatgcagtatcttcaaggaaaaggtctttgcctcatgccaatttcacttgccactgcaatctccactgccacgtgtcccaccaggaacgttaacgttaaccccttgatcaacgccgccgccggagccacccatttccgaccgcagccaaccccgccggcgaagggccgtcgtctc

SEQ ID NO: 132009 - DNA, 223 bp, Glycine max
gtcgaactcgtgcgaagatgcgtgagattcttcacatacagggagggcaatgcggaaaccagatcggagcgaagttctgggaggtggtgtgcgcggagcacggggatcgattccacggggaggtaccagggggacaacgagttgcaactcgagcgagtcaacgtctattacaatgaagcgagttcggaaggttcgtgccgagggcggtgctcatggatctaga

SEQ ID NO: 132010 - DNA, 221 bp, Glycine max
gttttaggtgaggcttaccaagttctgagtgacccagctcaaagacaagcttatgatgctcatggaaaatcaggaatttcaactggagcaattattgatcctgcagcaatctttgccatgctttttggtagtgagctttttgaggaatatataggtcagttagccatggcatcaatggcttcatggacatctttactgaaggagaacagtttgatagtaaa

SEQ ID NO: 132011 - DNA, 226 bp, Glycine max
aatgtttcaagacataacgacattgttgttggatcacaaggcgtttaaagacactgtcgacatttttgtcgatcgttacagagacatgcacatttccgttgttgccggaattgaggctagggggttcatgtttggtccctcaattgcgttgggcattggtgcaaagtttgttcctttacgcaaacacggaagctgccaggtgaagtaatttcagaaaaatatgctc

SEQ ID NO: 132012 - DNA, 221 bp, Glycine max
tgggagttaggttctgcacgctctgcttccagcgagtgttctttcttcgtttcaacaccttaatttgcacacgctgcttcttcagcttgaggaatggcacaagaaacctttctattcacatctgaatctgtaaacgacggtcaccccgacaagctgtgcgaccagatctctgatgcagtgctcatgcgtgccttgaacaggacctgacagcaaggttgcct

SEQ ID NO: 132013 - DNA, 224 bp, Glycine max
gtttcctctgctaattccatatccccgttttccttcactcttgaaccccgattcatttccaccagcacaagaagcatggctgcaatatcaataccttctcacatgaaagcttggacatactctgagtatggaaaatccaaggaagttctcaagtttaatcagagtgtggctttgcctgaggtgaggaagaccaggtcctcatcaaggtcgctgctgcttccctt

SEQ ID NO: 132014 - DNA, 222 bp, Glycine max
ctcgagccgcgcaagcgaaaagaaagaatcccaggcgaggagaaagatggaggggaaggaacaggatgtgtcgttgggagcgaacaagttccccgagagacagccaattgggacggcggcgcagagccaagacgacggcaaggactaccaggagccggcgccggcgccgctggttgacccgaggagtttacgtcatggtcgttttacagagcagggatagca

SEQ ID NO: 132015 - DNA, 219 bp, Glycine max
atgatgcaaagtgttttgttgttgcttttttcagttattaattttgtatcttattgtactaagtaatttaacggatgtaaatcatgattgataacaggtgaatggagagatttacaaccatgaagagctcaggacacagctgactaatcacaagttccgtactggatgtgattgtgatgtattgcacacctgtacgaagaacatggagaagactttgtg

SEQ ID NO: 132016 - DNA, 224 bp, Glycine max
ttccaactttgctttgtgctgatggatgttgcatggttgatcgaagaatgggtatttatggttatccaatagagattcaagcacttttcttcatggcattgagatgtgctttgtcaatgctgaaacaggatgacgccgaagggaaggaatgtgttgagcgtattgtgaagcgtttgcatgcacaagttatcatatgcggagttacttttggctcgacttccaac

SEQ ID NO: 132017 - DNA, 272 bp, Glycine max
ctcactttctcgctccccaaacgcccctctctctcctccaatggccgaccagctcaccgacgaccagatcgccgagttcaaggaggccttcagcctcttcgacaaggacggcgatggttgcattactaccaaggaacttgggactgttatgaggtcacttggtcaaaacccaactgaggcagaactgcaggatatgataaacgaggttgatgctgatggcaacggaaccatcgatttcccagagttcctcaacctgatggctcgcaagatga

SEQ ID NO: 132018 - DNA, 265 bp, Glycine max
gagattttgctgctctttgaagaagggtgtttgcttgattttggtgatgtcgctgctctcagatctcatcaaccttaacctctcagacactactgagaaggtgatcgcagagtacatatggatcggtggatcaggaatggacctgaggagcaaagcaaggactctcccaggaccagttagcgacccttcaaagcttcccaagtggaactatgatggttccagcacaggccaagctcctggagaagacagtgaagtgattatatac

SEQ ID NO: 132019 - DNA, 266 bp, Glycine max
gtttctcttcctcccttggagaaaaagaagagccaccgctgcgacgccgttcgtgcatttttgaggtgccgctgtcatgtttgggcgtggtggaccaaggaggagtgataactccaaatattatgatattctcgggatttccaaaaatgccagtgaagatgaaatcaagaaggcctatagaaaggcggctatgaagaaccatccagataagggaggagatcctgaaaagtttaaggagttaggtcaagcatatgaagttttaagtg

SEQ ID NO: 132020 - DNA, 267 bp, Glycine max
ccgattgctagaatggaatttcgatgctcagtcatctcttttaccattctcttctctcttgctcttgcaggagagagccatgtccatgcatcgctacctgaggaagattattgggaagctgtttggccaaacactcccattcccactgcactgcgagagcttctaaagcctctccctgcaggtgttgaaatcgatgaactccctaagcaaattgatgatacacagtacccaaaaacattcttctataaagaagaccttcatccaggc

SEQ ID NO: 132021 - DNA, 268 bp, Glycine max
gatcttctgaagaaatggcaaatcaccctttgacacactctcactctttccgcgagaggtttgataaaactctcactggtcacaggaatgaaattttggcccttttgtcaaggcttgaagccaagggcaagggaatcctgcaacaccaccaggtggttgcagagtttgaagaaatccctgaggagagcagaaagaaactccaaggtggtgtctttggagaagttttgagatctacacagtaagccatagtgctgccaccatttgtggc

SEQ ID NO: 132022 - DNA, 266 bp, Glycine max
  unsure (1)..(266): unsure at all n locations
ggaagaatcactcccttatccatttccacaccacaccatagtcacaancaacgctctctcttcagcctccattctacgctctcacaaccgccagtctctgacccgaagagcgaaccataatggaagagtaaattaccggaaaccgaataaccgtttctccgtgaaagcctccgccaaagagattgcctttgaccagcattcccgctctgctatgcaggccggcattgacaagctcgccgacgctgttgggctcactcttgggccca

SEQ ID NO: 132023 - DNA, 267 bp, Glycine max
ctcgcgccctcgctcttcccttcctggtggcgacaatgtcgactcctgctaggaagaggctgatgagagacttcaagaggctgcaacaagacccgcctgcagggatcagcggtgccccccaggataacaacataatgctgtggaatgctgtcatatttggtcctgatgatactccatgggatggaggcacgttcaagttgactctccagtttactgaggattatccaaataaaccaccaactgtgcgatttgtgtctcgcatgtttc

SEQ ID NO: 132024 - DNA, 269 bp, Glycine max
tcactttctgcgcttcactcactcccttcgtgcggttttctttctttgtcgaactcgtgcgaagatgcgtgagattcttcacatacagggagggcaatgcggaaaccagatcggagcgaagttctgggaggtggtgtgcgcggagcacgggatcgattccacggggaggtaccagggggacaacgagttgcaactcgagcgagtcaacgtctattacaatgaagcgagttgcggaaggttcgtgccgagggcggtgctcatggatctag

SEQ ID NO: 132025 - DNA, 273 bp, Glycine max
gtggtgccttatcgctgtggttatcatcttcttcttcctctttcttagatctcttctttctctacgccgcacgccgaaaccatggccggaaaaggagagggtcctgctatcggaatcgatctcggaaccacctactcttgcgtcggtgtgtggcaacatgaccgcgttgaaatcatcgccaacgaccaggggaacagaaccacgccgtcttacgtcggattcactgacaccgagcgtctcatcggtgatgcggccaagaatcaagtcgccatg

SEQ ID NO: 132026 - DNA, 267 bp, Glycine max
gatcttctgaagaaatggcaaatcaccctttgacacactctcactctttccgcgagaggtttgatccaactctcactggtcacaggaatgaaattttggcccttttgtcaaggcttgaagccaagggcaagggaatcctgcaacaccaccaggtggttgcagagtttgaagaaatccctgaggagagcagaaagaaactccaaggtggtgtctttggagaagttttgagatctacacaggaagccatagtgctgccaccatttgtgg

SEQ ID NO: 132027 - DNA, 264 bp, Glycine max
ggaagaatcactcccttatccatttccacaccacaccatagtctcaaccaacgctctctcttcagcctccattctacgctctcccaaccgccagtctctgacccgaagagcgaaccataatggaagagtaaattaccggaaaccgaataaccgtttctccgtgaaagcctccgccaaagagattgcctttgaccagcattcccgctctgctatgcaggccggcattgacaagctcgccgacgctgttgggctcactcttgggcc

SEQ ID NO: 132028 - DNA, 263 bp, Glycine max
ctcgcgccctcgctcttcccttcctggtggcgacaatgtcgactcctgctaggaagaggctgatgagagacttcaagaggctgcaacaagacccgcctgcagggatcagcggtgccccccaggataacaacataatgctgtggaatgctgtcatatttggtcctgatgatactccatgggatggaggcacgttcaagttgactctccagtttactgaggattatccaaataaaccaccaactgtgcgatttgtgtctcgcatg

SEQ ID NO: 132029 - DNA, 263 bp, Glycine max
tcactttctgcgcttcactcactcccttcgtgcggttttctttctttgtcgaactcgtgcgaagatgcgtgagattcttcacatacagggagggcaatgcggaaaccagatcggagcgaagttctgggaggtggtgtgcgcggagcacgggatcgattccacggggaggtaccagggggacaacgagttgcaactcgagcgagtcaacgtctattacaatgaagcgagttgcggaaggttcgtgccgagggcggtgctcatgg

SEQ ID NO: 132030 - DNA, 253 bp, Glycine max
  unsure (1)..(253): unsure at all n locations
taactctctcatcttctacagcattcttctgctcttcagatcaaattttcagaccatggcttcctccaccaacgctctcctcctcannggnaanggcancttcgngagattcggngagatgctcatcggtttcgtccccagcgtctccggcgtgtcccttgcggaggctccgggcttcctcaaggtccccggcggcggcccgccaacggtgcgcatcgccgtcggggctgcggccgaaaggggcgttcgtcgg

SEQ ID NO: 132031 - DNA, 266 bp, Glycine max
actatgggcacaaatggggtcactaatggccactattgtgttcatgtacacaatctttgagcgcttcttccctccacacttgcgtgaaaaacttcaagcctatactcaaaaactcaccaaccatttcaacccttacatccaaataagcttccctgagttctcaggggaacgactgaagaagagtgaagcatacacagccatccaaacctacctgagtgcaaactcatcccagagagccaaaaggctcaaagctgaagatctgaatg

SEQ ID NO: 132032 - DNA, 266 bp, Glycine max
gcaaaaccagcaagagatgctgcagccaaagcaaaaatggaagctgaagcaccatcaactgaggaagtgccacttcatgaagaaaatgaatggaatataagtgttgttgatgatattgagctggatagtccggataccagaagttcagatgttctgccggaaggtctcacacatgaacttcctactgctgacgagtttcataaggcaactcttgacgctccattagttgacaatgacgaccttgaagatcttcgtaggcaacttga

SEQ ID NO: 132033 - DNA, 268 bp, Glycine max
cttctatctctgcaattcaaacacaaaaaccatggcttccactaatgctcttcctcccaccggcaacggcctcatcgtgagcttcggcgagatgctcatcgacttcgttcccaccgtctccggcgtgtccctcgcggaggctccgggattcctcaaggcccccggcggcgcccccgccaacgttgccatcgccgtcgcgagactcggtcgcaaagcggcgttcgtcgggaagctcggcgacgacgagttcgggcacatgctggccgga

SEQ ID NO: 132034 - DNA, 265 bp, Glycine max
gccgaacaccattgggttgggttatctgaagctttttcagcggaggaaacataactgcgcacgtttgggaaccctattttggtgaacatctcaagaatcagagttttttttaccactatcaggtttaggattattatctgaaatggcatcggtgtctactcagcaacagttccgttacacgcagccaccatcaaaggtgcttcatttgagaacattgccgtgggagtgcacagaggacgaactaattgaacttgggaagctattt

SEQ ID NO: 132035 - DNA, 260 bp, Glycine max
cggctcgaggttggccctgctgttgctatcccagctgcagtgaaatctgctggtcttgaacttggcaacattgacttatttgaaatcaatgaggcatttgcatcgcagtatgtttattgcctcaagaaattgggacttgatcccagaaaggtcaatgtcaatggtggtgccattgctcttggacatcctttgggcgttacaggtgcacgttgtgttgcaactttgttgaatgagatgaaacgcggtggcaaggattgtcg

SEQ ID NO: 132036 - DNA, 256 bp, Glycine max
ccaatatgaatccttctgaatttcgtacatttattgaaaacatggcttctgagtatcatggagatacctatcaccttataactaagaactgcaatcattttacagacgatctctcttatagattgactgggaaacaaatcccaggttgggtgaatcggcttgctaagctaggtgctttgtgcagctgtctacttcctgaaagtcttcaagtaacaagtgttaaacaggtaactgaataccatgaattctcggaaga

SEQ ID NO: 132037 - DNA, 242 bp, Glycine max
catttgtcttgcaaactttctgtcgcacaaataactctaaactaagcacttccatacacaaattttctctcccagaagaaatattttcatttcatttcgagtaaaagtaaaacacagttcctgatccatggcatctcgccgccgcatgttgttgaaggtcataatcctcggagacagccggggttggtaaaacatccttgatggatccgtatgtgaatcgtaaatttaagtattcggtataa

SEQ ID NO: 132038 - DNA, 269 bp, Glycine max
agagcgcactgaactaattggccggatatctctttactgttggctgggttcctcagtgtgtaccaccttagttgagcttggggagcttggaaggctttcttcatcaatgaagaagttagagaaagatctcaagaacaagaataaatatgataatgagcaataccgtgccaaactaaacaagtcaaatgagagaactctatcacttatcaaagcaggaattgatacagtggtagcagttggactgcttcaattggcacccaagacagtta

SEQ ID NO: 132039 - DNA, 256 bp, Glycine max
atggtgctgacaataagctcactagagagagtgccagagcctttgctctggacatgttcatcgccggcacaaacggccccgcaagcgtcctagagtggtcactggcggactggtgagaaacccccacgttttcaagaaggcaagagaagagattgagtcagtggtaggcaaagaaaggctggtcaaagaatcagacattcccaacctaccatacctacaagcagtgctgacggaaaccctaaggctgcagccgcca

SEQ ID NO: 132040 - DNA, 261 bp, Glycine max
actcgagcgaatcggctcgagtgctttcaacaccttcttcagtgaaactggggctggacagcacgtgcctcgtgcgacttttgtagatctcgagcctactgtgattgatgaagttaggactgggacataccgccaactatttcatcctgagcagctcattagcggaaaggatgatgctgcaaacaactttgcccgtggccactataccattggaaaggagattgttgagctttgcttggatcgcatcagaaagcttgctga

SEQ ID NO: 132041 - DNA, 260 bp, Glycine max
gatttcccttctaagccaatgactttgtatgcaacaatatgggatgcatctgattgggctaccaatggaggcaaatacagggttaactacaagtatgcaccctatgttgctgaattctctgaccttgtcctgcacggttgtgcagtggatccaattgagcagcacgtggccacgtgtgacaatgctcaaagctctgaggcaacaattcctccttctggtgttacaccagcacaaagaatcaaaatggagaatttcaggaa

SEQ ID NO: 132042 - DNA, 262 bp, Glycine max
gatttgacttactctccggcgctgccattctttctttctatcttcaatcaatttcaagatcgtaacactggtattatatggcctccttcagagcattctggaacagtccagttggtcccaaaacaactcacttttggggacctattgccaactggggatttgtggcagctggattggctgacttgaacaaacctccagaaatgatctctggcaacatgacaggagcaatgtgtgtctattcagcattgttcatgagatttgc

SEQ ID NO: 132043 - DNA, 269 bp, Glycine max
aaaattttcgaagttgaagcgagaacttgccatttcaagggttttagggttagggttttctcaaattgcaaggacatgggtttcaaccttcaaccatatgggattcaatccatgctcaaggaaggccataagcacctttctggcctcgacgaagcggttctcaagaacatcgacgcttgcaaacaactttccactattactcgaacgtgcctcggtcccaatggaatgaataagatggttataaatcacttggacaagctttttgtcac

SEQ ID NO: 132044 - DNA, 262 bp, Glycine max
gaaaagggagagtgctttgaaaatgggaaagtttagttcaagttacagtacttctgattttgttcactttggagttctacttccctttcttctgttatcacagttgttctttcaacttgcatggtgtggctccatagtaaagttccttcctggattagagggaccccttccttttgttcttgaaaccgggtatgtgggagtgggtgaatcagaggatgtgcaggcattctactacttcattgagtcagagaacaatccaaag

SEQ ID NO: 132045 - DNA, 258 bp, Glycine max
ctcttcttcgtctcaaacctcttcgttccttcgattcattccatttcttccaaaatggccagagacccagttcgcgttctcgtcactggagccgcacggcaaattggatatgctcttgtccctatgattgctaggggagtgatgctgggtcctgaccagcccgtgatcctccacatgcttgacattcctccagcagcagagtccttgaatggggttaaaatggaattggtggatgctgcattccctcttcttaaaggt

SEQ ID NO: 132046 - DNA, 257 bp, Glycine max
gtttctcttcctcccttggagaaaaagaagagccaccgctgcgacgccgttcgtgcatttttgaggtgccgctgtcatgtttgggcgtggtggaccaaggaggagtgataactccaaatattatgatattctcgggatttccaaaaatgccagtgaagatgaaatcaagaaggcctatagaaaggcggctatgaagaaccatccagataagggaggagatcctgaaaagtttaaggagttaggtcaagcatatgaag

SEQ ID NO: 132047 - DNA, 258 bp, Glycine max
gtttcgggagaaaaagcaatccactcagagagctagatgaattcaacaatgcctcgctatgatgataaatacggcaatacccgcctctatgtgggacacttgtcttcgaggactcgttcccgtgatctggagcgtgcctttagcagatatggaagagttcgaggtgtggatatgaagaatgatttcgcttttgttgattttagtgatcctcgagatgctgatgatgcaagatataacctggatggtcgggatgttgat

SEQ ID NO: 132048 - DNA, 256 bp, Glycine max
tctcgagcgaatcggctcgagttgatgcacagaagatacgtcacctgacaataatgaacagaaaggtcaatattccaagttctggaatgagtttggtaaatccattaaacttggtatcatcgaggatgccaccaacagaaatcgtttggcaaaactgctcagatttgagagcaccaagtctgagggtaaattgacatctctggatcagtacatatctagaatgaaagctgggcagaaggatatcttttacataact

SEQ ID NO: 132049 - DNA, 257 bp, Glycine max
gaagattctggtgaatgcgtagaaaaggaaaataaagaaattagcgtgaaaaatgttgggtgtgttcagcagctccatagtgtcgccgccggaggagctcgttgccgccggcagccgtacaccgtcgccgaagatgacggcggcggcgctgcggaagtggttcgaggagaagaacccctccgcagtgtcggtggaggtcggagagcatgtccagctcgcttatacccaccagaacgagtcgccgtttcagcccagat

SEQ ID NO: 132050 - DNA, 257 bp, Glycine max
gtcactagctctgtgcattcttctctcgctctctgccttccatcacactcggcatttcctttcccaagatagtagatgatggcagacactgaggatattcaacctcttgtttgttacaatggaacaggaatggttaatgctggattttctggagatgatgccccacgtactgtgtttcccagcattgtaggtcgtcctcgtcacactggtgtgatggttggcatgggccaaaaagatgcatatgttggtgatgaggc

SEQ ID NO: 132051 - DNA, 258 bp, Glycine max
ggaacacaaaaaatggcagatattcctcgggtgaagcttggaagccaaggcctggaggtttccaagttaggatttggttgtatgggcctaagtggagtgtacaacgatcctgttcccgaagaggttggcatctctttgatcaaacacgcattcaacaaaggggtcactttctttgattctgcagatttttatggagcacgtgccaatgaagttttggtcggaaaggctctcagggactttcctcgagatcaatttcag

SEQ ID NO: 132052 - DNA, 259 bp, Glycine max
tacatgttgggcacaacttttatgaaagatatttcctttgctggcttgtctactagttcacgctctgaaagtttaaattcattgtttgacaactatatccaaattgatacttcattgagagcatttatagaacagtatagaatgattcttgaagataggcatgaagaggaagccaaagcaaattttgatgcttggcatgaaacacctgacctgaagtctccttccccttttgaaaagcaaatgttgtcagtttacacac

SEQ ID NO: 132053 - DNA, 259 bp, Glycine max
cgacgacctcgttggttttcctttgtaagttgtaagcatttggcaccagcaagccctgtcttcttcttcgatcagattagggcatttcatttctgcgatggccgcagcacccgctagagctcgtgccgattacgattacctcatcaagcttcttcttatcggcgacagcggtgtcgggaagagttgtctgcttttgagattttctgatggctcattcacaaccagttttatcaccaccattggtatcgattttaagata

SEQ ID NO: 132054 - DNA, 256 bp, Glycine max
gtgattccagaccttaatttttctctcattcgcttcaaatttcaggaaatcaattatggctcaaccctcaacaagaataggccttgctggactggctgttatgggccaaaatctagcactcaatattgctgagaaaggctttcccatttctgtttataaccgaaccacttccaaggttgatgagactgtagaacgagcaaaacaggaaggaaatcttccagtttatggctaccatgaccccgaagcttttgttcat

SEQ ID NO: 132055 - DNA, 258 bp, Glycine max
ctctacacacacctcagaagaacagaacagaaccaccacataacagtgcttttcaaaggcggtttgagcaatggcgttcttaaataaaattggaaatctgctcaagaattctgctgtcaagcacatcaatcaggatttttcggcgtctaccccttcacttttccaagcaattagatccatgtcatctgcaaagcttttcgtcggaggtatttcttacagcactgatgatatgagtttgcgagagtcttttgctcgcta

SEQ ID NO: 132056 - DNA, 224 bp, Glycine max
atcatcgcgtgatacagtaggtacatgacgctgcagagggtagtgacggtaccgcatataatcttggagatggctgatattccaccagatgattactcttggagaaagtattgacataaacccattaaaggagcacctcatccaatgggtcactacgagtgcagtcgtgtgacagggtgtccagcgcgcaaacatgtggaacgagctttgggtgatcccgctat

SEQ ID NO: 132057 - DNA, 252 bp, Glycine max
aaacaatttaattggattggtcgaatggtatcaaaaaaatggagtactaactcccatttcttatttattattgaattaaccgatcaacttggtttgttatcgaacatttcttttttgatttcaaaaattttccgggaaaaatttgaatctatttttatatgcgaatcaatcctactacttctggtcctgaggtttctgcgcttgaaaaaacaaatctgggacgtatcgtccaaataattggtccggtactag

SEQ ID NO: 132058 - DNA, 255 bp, Glycine max
tgatcacacacaaacatgggtgtgtcttcaaagtctccgtcgatgtagttggatttagactccacgattactgcgatataattaagcagcccatggatctgggtactgtgaagtctaatctctctaagaacgtgtacgccacgcgtgcagatttcgcctctgatgtgagattgacgttcagcaatgcactggcttataaccctaagggtcacgacgtgtacaccatggcggaacagcttctggctaagtttgagg

SEQ ID NO: 132059 - DNA, 256 bp, Glycine max
aacacaaattcctttttttcttggcactttatgtccttgccatcggcgacggaggtcacaagccctgcgtccagaccttcgccgccgatcagttcgacgaggacacgcctgaggagaaggatgccaagagctcattcttcaactggtggtacttggggattgtggctggctcaactgcttctgtttttgttgtcatatatcttcaggacaatgttgggtggggagtggggctaggagtgctggcaggggtgttggc

SEQ ID NO: 132060 - DNA, 255 bp, Glycine max
aaatggaacaggtggtgcagatcataaggaggaggaatggacatttgaagcaggatggggatgagatcgagctagacattgaggctgttgacacagagacactttgggaacttgatcgattggtgactaattacaagaagatggttagcaagattaagaggcaggcattgatgggcaacattgacaacaacaacaacgatgtgcagtctaacaaaggcaacggggaattgccttctagcgagaaggttgatgggg

SEQ ID NO: 132061 - DNA, 255 bp, Glycine max
cttgttcctctcgcccagaatccgagatcaaccctgacccctaaggccaggggtttttctcggcttcttcagattcctgaaatggcgtctgtttcagctttagccaagtacaagctcgtcttcttgggtgaccaattcgtgggcaaaaccagcatcatcactcgcttcatgtacgataaattcgataacacctatcaggctacaattggtattgattttctatcaaaaactatgtatctcgaagatcgaactgtt

SEQ ID NO: 132062 - DNA, 264 bp, Glycine max
ggtggaactgacaaccatttagtgttagtgaacttaagaaacaagggcattgatggttctagggttgagaaggtactggaagcagttcatatagctgccaataaaaatactgttccaggggatgtgtctgctatggttcctggaggcattcgaatgggaacccctgctctcacatctaggggatttgttgaggaagatttcgaaaaagtagctgaatactttgatgcagctgtcaagttagccttgcagattaaggaaaacacc

SEQ ID NO: 132063 - DNA, 244 bp, Glycine max
attgtgttgcagttttgagtttcctctttccactgtatatataataagaccattctctcagcctagctaataagatttgtgagagaaagggagaaagggtgtgagaatggagagcaaagaggaagatgtaagggttggagcaactaagttctcagaaaggcaaccaattggtacagcagctcagggtgacaaggactacaaagaaccacccccagcacctttgtttgagcctggtgagctaaag

SEQ ID NO: 132064 - DNA, 241 bp, Glycine max
cggaaatggcggttctcagaatggtaactcaatgcactatgggaccctggttggggaagtgaaagctaatttgaagaaaggtattggagcgaatgaattgctgtcccatctttcagcacatcctgcacctgctcaagaaaagatgagtgctctggttgaagctctattcgagggaactgagaaaggttttgctaaagaagctgataagaagaagaactactttgctgctgctgttgccgaa

SEQ ID NO: 132065 - DNA, 240 bp, Glycine max
cggcgtcttcataaacgcctttattctccgtttccgtttccttcccggaattcgatttttcatctctgaaaatgagagagtgcatctcgatccacattggtcaggccggtatccaggtcggaaatgcttgctgggagctctactgtcttgagcacggcatcgggcccgatgggcaaatgccaagtgacaaaacagttggcggaggtgatgatgctttcaacactttcttcagtgagactg

SEQ ID NO: 132066 - DNA, 241 bp, Glycine max
acaagattgaagggggagcgtgtgaacaaccttgatctttcaaagggccccattgaaacaaggtcaagggataaatttgggttccaggaagagaacaaatttgattctcttaacttaagcatgttgaacctggactctaaatttactgagaatgtgagcaaaagctcgcttcgaaatggtgtttatggtatgaatgcagtgtatcagaaaaacaatgcaaacttggtgagtaatgtgatca

SEQ ID NO: 132067 - DNA, 238 bp, Glycine max
gtgctcgaggcgacgatgatctgtatcgacaattctgaatgtttgcgtaacggagattactctccttctcgatttcaagctcaagcagacagagtcaatctcatatgtggtgctaaaacgcagtctaatccggaaaatacagtgggagttctcacaatggctgggaaaggcgttcgtgttttggttacccctaccagtgatctgggcaagatcttagcctgcatgcatggactagata

SEQ ID NO: 132068 - DNA, 239 bp, Glycine max
cgacaatgaagaaagtagtcttacagttggacttacatggtgatagaatcaagcaaaaagctatgaaaacagcatctggcctttcaggggttgaatcagtttctgttgatatgaaagacatgaaaatgatcgtgttgggggacattgatccagtgagtgcagtgtccaagctacgaaagtgttgtcacactgaaatagtttcagttggaccagcaaaagaggagaagaaggagaatgtg

SEQ ID NO: 132069 - DNA, 240 bp, Glycine max
cggcagatttaaattatattgggttagatggagaaattggctgcatggtgaatggagcagggttagcaatggccacaatggatataattaaattgcatgggggtactcctgccaattttctggatgtaggtggcaatgcctctgaaaaccaggttgttgaggcatttaaaatattgactgctgatgacaaagtgaaggcaattttggttaacatttttggtggtataatgaagtgtgatg

SEQ ID NO: 132070 - DNA, 237 bp, Glycine max
actttgttttgcttgtgttgatgctgaggaattccgattggctcagatttgtggtctcaatgtcatcattcaggtggatgatttggaagaggttagtgagttttaccagaacagaggatgctttaatgaactgatatctctaatggagagtggacttggactggagcgtgcccatatgggtatctttactgagttgggagttctttatgcaagatatcgtcctgagaagttaatgga

SEQ ID NO: 132071 - DNA, 235 bp, Glycine max
tgaagattggtcccaacgagccatctgagctgtctatccatgagaacgcctatggcttggctagatacgctgtcatatgccaggagaatggcctggttcccattgttgagcctgagatccttgttgatggacctcatgacattcacaagtgtgccgccgtcaccgagcgtgtccttgcagcatgctacaaggctttgaatgatcaccatgtccttcttgagggtaccctattgaa

SEQ ID NO: 132072 - DNA, 238 bp, Glycine max
tcccaccccacttacatacacactctcccactcctccgagccggtcgagttgaatcggtgagtcagtgaccgagttgaaccatgtcggacgaagagcaccatttcgaatccaaggccgatgccggagcctccaagacctatcctcagcaggccggaaccatccgcaaaaacggctacatcgtcatcaagggtcgtccctgcaaggttgttgaagtttctacttccaagactggtaagc

SEQ ID NO: 132073 - DNA, 236 bp, Glycine max
caattttctagggttttattcattttccgatggcttctgcagatgttgagtaccgttgctttgtcggtgggctcgcttgggccactgacgaccatgccctcgagagagccttctctcagtacggcgaaatcgttgaaacgaagattatcaacgatcgtgagactggcagatccaggggttttggatttgtgaccttcgcctcggagcagtccatgaaagatgcgatcggagcgatg

SEQ ID NO: 132074 - DNA, 236 bp, Glycine max
ctcctcttcctcttcgatcatcacctctccacaatgccgccgaagttcgacccctcccagatagtcgacgtcttcgtccgcgttaccggcggcgaagtcggcgcggcgagttccctggccccgaagatcggtcccctcggtctctcccccaagaagatcggagaagacatcgccaaagaaaccgccaaggactggaagggcctccgcgtcaccgtcaagctcaccgttcagaatcg

SEQ ID NO: 132075 - DNA, 239 bp, Glycine max
ctcaaaacaaccttctttctttcaggttcttgatcagtgtcaaaaccaaaagggtggttgcaaattgcaatggctaagcatgatgttgagggtggttccttcgctgcaaaggactaccatgatcctcctccagcaccattgattgatgctgaggaactcacacagtggtccttctacagggctttgattgctgagttcattgccacaatgctcttcctttacatcacagtgctcactgt

SEQ ID NO: 132076 - DNA, 241 bp, Glycine max
caacaacactctctcttctcgctcttggcttttcgctcttcactcactctcattcattcatttccaccgttcatggatcccgtaagcgtgtggggtaacacgcccttggcgacggtggatcccgagatccatgacctcatcgagaaggagaagcgccgtcaatgccgcggaatcgagctcatcgcctccgagaacttcacctccttcgccgtcatcgaggccctcggcagcgctctcacga

SEQ ID NO: 132077 - DNA, 237 bp, Glycine max
gattagaatctgggatccgatcacagccatggcaggggcagcctctgctctgttcctcctcgacatcaaaggccgcgtcctcatctggcgcgactaccgcggcgatgtctccgccctcgacgccgaacgcttcttcaccaaactcatcgaaaaacaggccgatccgcaagctcaagatccggttgtgcacgacaacggcgtgacctacatgttcatccaacacagcaacgtgtacct

SEQ ID NO: 132078 - DNA, 200 bp, Glycine max
ttggagcgatccgagaaaaactctgtaaacatgttggtttaccaggacctccttacaggtgatgagcttctctctgactcgttccgttacaaggaaattgagaatggaatgctgtgggaagttgaggggaagtgggttgttaaaggagcagttgatgtagacattggtgcaaacccttctgctgagggtggaagagaaga

SEQ ID NO: 132079 - DNA, 237 bp, Glycine max
gagctcttcctccctttctcacagcaatggccgccgcagcacgccctctcgtcaccgtgcaggccctcgacggtgacatggcaaccgatgcctccgccaccgttcccatccctgacgtcatgaaggcctctatccgccccgacatcgtcaatttcgtacactcgaacatctccaagaacagccgccagccatacgccgtcagtcgtcgcgctggtcaccagacctccgccgaatcct

SEQ ID NO: 132080 - DNA, 238 bp, Glycine max
cacatactggttgatggtatttgctgcggatgagtccacaagagggaaggtcactgaggtgttcaaacatgcatcctctgtgggtatgtcagtttgtaggacttgggccttcaatgatggccaatggcgtgctcttcagaaatctccatcagtttatgatgaagacgtattcaaggccttggactttgtggtaagtgaagcaaggaaatacaaaatcaggctcatattatcactggtt

SEQ ID NO: 132081 - DNA, 238 bp, Glycine max
cgtgagcgctcgagccgctgctgttggcttgacatcaagttacactccaactccattgttggaatctggtttgcaaaaagacagagggttaattgtggagtactttggaaggatgtcttacgttgctcataacgttaatcagccccaagagaaagatttgttggagggaaatttttcctttgatattaaatctcgctctagattggaaaaagtttcctctacaaaagcacaatttgtt

SEQ ID NO: 132082 - DNA, 240 bp, Glycine max
ctgattgtggtctggccaagatgttgatgaagccagaagaacttgctaccatgtcagcggtggcaggcacattcggctatattgctccagaatatgctcaaacgactagagtcaatgagaagatagatgtctatagctttggagttgtcctattggaactgacaactggctaagaagccaatcgtggagatgaatattcatgtctcgcggaatgggcgtggcgccacattcagataggga

SEQ ID NO: 132083 - DNA, 235 bp, Glycine max
ctcttagtcccaattttctagggttttattcattttccgatggcttctgcagatgttgagtaccgttgctttgtcggtgggctcgcttgggccactgacgaccatgccctcgagagagccttctctcagtacggcgaaatcgttgaaacgaagattatcaacgatcgtgagactggcagatccaggggttttggatttgtgaccttcgcctcggagcagtccatgaaagatgcga

SEQ ID NO: 132084 - DNA, 234 bp, Glycine max
ggtcgagcgattcggctcactaacactcattaattgcaagaatggcacttcgttgcttggtgatgtccctttatgttctcttcactcttggtcttgcgagagaaagccatgccagagacgaagatttttggcatgctgtttggccaaacactcccattccaagttcattgcgagatcttctaaagcctggccctgcaagtgttgaaatcgatgatcaccctatgcaaattgaag

SEQ ID NO: 132085 - DNA, 235 bp, Glycine max
tgttactggccaatattatcctgagtgggctccaattaattgtcgagttcatcgacaaccaattcacatcactgaaggaaattatgtcagaaagcaagatgtcagcattgaatatgatgcatgtacaattccaaatgattgtggttcattggttgttgccaaggttggaaatcacaaacaaattgttggtttccatgttgctggaagcaaaggaagactgggatatgcttcattg

SEQ ID NO: 132086 - DNA, 236 bp, Glycine max
ggcgaagaaggattgtagtcacaggaggtgcaggacgtgttgcaagagtaggggttttgattgctccacgcacgtgaagagcacgtgggtgccggcgtcacggcggagggagaggcagctcaagggggtggcggcggccggtgcggcggttgggtccaatggggccacttccggtgccaagaaacctaggcttgttgctactcaaactacttcgcatacttcaacgtctaataata

SEQ ID NO: 132087 - DNA, 233 bp, Glycine max
aaaagaaaagaagaggaaaaggagagtggagaggaagaaaaggattgaagttgttgctgtgagaaagagaaagagtgaaatcggagtttgggaaggaattgcaatcaatggatgtgataaagacgcagcaaatctcatctcgaccaatcgagaaggtggtggttcaccctctcgtgcttctcagcatcgtcgacaactacaacagagtcgccaaagacactcgcaagcgcgtc

SEQ ID NO: 132088 - DNA, 234 bp, Glycine max
ggagtgagtcactcttcttgcataacccagatctgcagacaatatgcgaagaactggcttgttacatttgttatgccttgtcattgctttagtaagtgtgcaagcagaagatgcgtataagtattacacatggacggtgacttatggaactatttctccattgggtagtccccagcaggttattcttatcaatggtcagtttcctgggcctagacttgacttggtgactaatga

SEQ ID NO: 132089 - DNA, 230 bp, Glycine max
ttgccattctcatcctcttctttctctctctaccattgccatggatccctacaagcaccggccatccagcgccttcaattctcccttctggactacaaattctggtgctcctatttggaacaacaactcctctttaaccgttggagctagaggtccaattctgctggaggattatcatcttgtggagaagcttgcaaattttgatagggaacgtatcccagaacgtgttg

SEQ ID NO: 132090 - DNA, 228 bp, Glycine max
caaagtttatgtgttcagggaaagtcttgttggcaatctcatatctccttcaattagggaggcacttgacaaccctcttaactatgcaagaagttaccttgctgatttgcttgatcaatgcattgaaagggtcatatacttggactcggatgttgtagtagttgatgatgtccaagagctttggaaggtttctttgacagggtcaagggtcattggtgctcctgaata

SEQ ID NO: 132091 - DNA, 238 bp, Glycine max
ggaaaccctagctggataggtcaaacatcatcatgtcggacgaagagcaccatttcgagtccaaggcagacgccggtgcctccaaaacctaccctcagcaagccggtaccattcgcaagaacggctacatcgtcatcaaaggacgcccctgcaaggttgtggaagtttcgacttccaaaactggaaagcacggtcacgccaagtgccactttgttggaattgatattttcactgccaa

SEQ ID NO: 132092 - DNA, 236 bp, Glycine max
ggttaccggcgacggcggcgtgcggcggtgcagccactgtgcctcggagaagacgccgcagtggcgcgcgggaccgctgggaccgaagacgctgtgcaacgcgtgcggggttcggttcaagtcgggtcggctcgtacccgaataccgacccgcggcgagccccacgttcgtgctgactcagcattcgaactcgcaccgcaagtcatggagctccgtcgccagaaggagctgctccg

SEQ ID NO: 132093 - DNA, 229 bp, Glycine max
ggccttattattgctgttattatcagtaccggtattaatccaaaggccaaatcctattacctctttgatggttatgcacatctctcttctggtcttgcctgtggcttggctggcctttctgctggcatggctattggtattgttggtgatgccggtgttagagccaatgcacaacaaccaaaactttttgttggaatgattctcatcctcatttttgctgaagcacttg

SEQ ID NO: 132094 - DNA, 233 bp, Glycine max
cttgggagaagaggtcgagtttcacagcagcaatggtgtacgtcaaggctcagaaatcaaaagcctacttcaagagatatcaagtcaagttcaagagaagaagagagggaaaaaccgattaccgtgccaggattcggttgattaatcaggacaagaacaaatataacactccgaaataccgatttgttgttcgctttagcaacaaggacattgttgcacaaataatatctgct

SEQ ID NO: 132095 - DNA, 234 bp, Glycine max
agcttattatcctagccttgcaaaactcccagcaaatgataaattgtctcgccaactgaaacagaatatacaggagatggagcacatgcttagtgaatctaccacagatgctgatcttccaccagtggctgaaagttattcaaagaagatggaaaaaacaataaccagggtaaaatcaatccctgtggtttgcgacaatgtggacaagaaattgagacaaatatttgatttgac

SEQ ID NO: 132096 - DNA, 232 bp, Glycine max
acaatcttctgagatgtaatttgaatcgaaacagagtggcgcattatggtgaacttgctcctgagtgtgtgcacacatattacaaatatgggtgtgcacttttatacaaggctcaggaggaagctgatcctttagctgatgtgcccaagaaggaggatggatctcaacatggctccaacaaagatggttctgtgaagggttctttgaatgctgaatcttccacagcttcttt

SEQ ID NO: 132097 - DNA, 231 bp, Glycine max
cttttcgcgtgatacagtaggaaaatgaggttgaagagggtagtgagggtaccggctataagcttgaagatggctgatattccaccagatgattattcttggagaaagtatggacagaaaccaattaaaggatcacctcatccaaggggttactacaagtgcagtagtgtgagagggtgtccagcgcgaaaacatgtggaacgagctttggatgatccagctatgctggtg

SEQ ID NO: 132098 - DNA, 231 bp, Glycine max
gtgaacttcagcacatttctggtcataggcaaaacatctcctgtaacatatcaagtgctaggccacctcaagacatgccttgttctaggatttggctacacattactgcatgaccctttcaccggaaggaacattcttggaatactaattgccgtttttgggatgggtttatactcttatttctgcactgaggagaacaaaaagaaacagttagctagtgatctcccactg

SEQ ID NO: 132099 - DNA, 195 bp, Glycine max
ctggcggagtgcgtcgatccggcgaaattcgtgctggaggcgatctcggaggtgtttccggtcgacaagagaggggagaaggccggccacgacttgggctgggcctgcgtccttgtcctggagtcgttaattccggtcgtcgtcgaccccgtcatcggaaaatcgaggttgttggttacccctaccgtgaaggag

SEQ ID NO: 132100 - DNA, 265 bp, Glycine max
tgggtgagctaaagtcaattttccttcctttcctttccactagtcacataatcccgctagtggacatggccagactcttcgccttgcacgacgtcgacgtcaccatcatcaccaccgcacataacgccaccgttttccaaaagtccatcgatttagatgcgagtcgcggtcgccccatcagaacgcacgttgtcaacttccccgccgcacaagtgggtctccccgttgggatcgaagccttcaacgtcgatacgcctcgggaaat

SEQ ID NO: 132101 - DNA, 262 bp, Glycine max
tctatccactcacctgcctcttcctcacccctttctccagctaacgagtaaggaaaaatggcgcgtaagaagatcagagagtatgactcaaagaggttgttgaaggagcactttaagagactttctggcaaggagttgccgatcaagtctgcacaaattactgcatcaactgatttcactgagctacaagagaaggaaccctggctttcatcttctaaattggttgtgaaacctgacatgttatttggaaagcgtggcaaaa

SEQ ID NO: 132102 - DNA, 259 bp, Glycine max
caaatcgaacaaaatcaatcaactaactcctccaacgttgttgttattatgcagacaacaagttccaacacctccggcgccaactcgatccgttccggcatggagctcttccaccgcgcgaaggcgggacgcctccgcagccaccacgacaagtacctcctggccgacgaggacgaggagtccgtcacgcaagaccgcaacggatcctcccgcaacgccaagtggacggtggagctcatcccggagttcgacaacatca

SEQ ID NO: 132103 - DNA, 258 bp, Glycine max
tctcgagccgaatcggctcgagaacgaaaccctcttcatcttgttctatctgtgacgagactcatggcctcaagagcagacgttattgttggctatgtgtgtgcttccggcgatggttgtggccattcgcccagcaaagaaccctttttgcgtgaagggtcgtgtctactgtgacccttgccgtgctggttttgagacctcagctaccacctacattgctggtgctgagattatgttgcaatgcaagagcagggttag

SEQ ID NO: 132104 - DNA, 256 bp, Glycine max
gggtagctctttctactcaaaacaatacaaaacatcaatttctgtttcagttcgcggagatcaatatttgtcgctgaggtcgatcgtcgataaaaggcaatgtttttgtgggattggttttatgggattctagcgtcgcttggcctgtggcagaaggaggccaagatcttattcttgggcctcgataacgctggcaaaaccaccttgcttcacatgctcaaagatgagagattagtccagcatcagcctacccaat

SEQ ID NO: 132105 - DNA, 251 bp, Glycine max
gctcccgctacgtttgcgataacttgttccgcaatctccaagcgatattggccgagtcacagagtgttgtgacatctgaggccattcatcaggcgttccggcggccagaggaggggtttacggcgcttgtttcggagctgtggagctctcggccgcagattgcgactactgggacgtgttgtttggttggggttatttgtcggcagacactctttgtggcaagtcttggagattcccgtgctgtgttgggt

SEQ ID NO: 132106 - DNA, 241 bp, Glycine max
tgctccctcctggcccacggccctggccggtagtcggtaacctctacgacataaaacccgtccggttccggtgcttcgctgagtgggcgcagtcttacggccctatcatatcggtctggttcggttcgaccctaaacgtcatcgtttcaaactcggagttggccaaggaggttctgaaggagcacgatcagcagctggcggaccggcaccggagccggtcggcggcgaagttcagccgcga

SEQ ID NO: 132107 - DNA, 254 bp, Glycine max
ggaaaacttgttggttataatacagattgtgaggctgcaattactgcaattgaggatgcactcattgatagagcaaaatctcttgcttgtgctgtatttggtgaagctcagcctttcaaagagttggtcaactttcagccagagaaaggggcaattcttgcgaatgcaacacctgtaggaatgcatcccaatacagacagaattcctgtggcagaggctactttggaagactaccggttagtctttgatgctgt

SEQ ID NO: 132108 - DNA, 256 bp, Glycine max
atacgacacacacaaaaaaaagctttagtttaggatgacccaagtgaggaacaagcaagtggttctaagagactatgtcaccggattccctaaagaatccgacatgaacattgttgaaggcaccataatattgaaggttccagaaggttccaatgatgtccttctaaaaaatctctacttgtcatgtgatccatacatgcgactcctcatggccaaggaccgttctttcggagatggctccttcacccttgcctct

SEQ ID NO: 132109 - DNA, 259 bp, Glycine max
ggttgattgtcgaatatatttatggaaatggaacgctcgtatagtgatctcagatgtggatggtacaattacaaggtcagatgttcttggtcagttcatgcctttggttggtattgactggtcacagacaggtgttgcacatttattctccgctatcaaggaaaatggttatcaactgctttttctcagtgctcgttcaatttctcaggcctatattacacggcaattcttactaaaccttaaacaggatggaaaagtt

SEQ ID NO: 132110 - DNA, 255 bp, Glycine max
agaacatcacggggcttgtcgagtggtacgggaagaacgcacgcctccgcgagttggtgaacctggtggtggtggctggagacaggaggaaggagtcgaaggacttggaagagaaggccgagatgaagaagatgtatggcctcatcgagacctacaagttgaacggccaattcagatggatatcctctcagatgaaccgtgtgaggaacggagagctctaccgtgtcatctgtgacacaaggggtgcctttgtgc

SEQ ID NO: 132111 - DNA, 251 bp, Glycine max
attccattgccacccagttttgaatatatttttattccttctttgtttcttcactttcttccatacacataaccatgtcttctcagactgttgtcctcaaagttggtatgtcatgtcaagggtgtgctggagcagtgaacagggttttgggaaaaatggaaggtgttgagtcatttgacattgatctgaaggagcagaaggtgacagtgaaaggaaatgtggagccagatgaagttctgcaagccgtttcc

SEQ ID NO: 132112 - DNA, 252 bp, Glycine max
cttgctcagaacattcccatggtcatgcgccgcaaagaaatcaacgattatggcactgctaaagctattgaaggcgatttcaagcctggccaaagttgcttaatcattgaggatttggttaccagtggcacgtcagttttggaaactgcggcgccattgcgtgctgtgggattaaagatcagtgatgctgttgtgttgatcgatagagagcaaggtggcagagaaaacttggaggagaatggcatcaagctg

SEQ ID NO: 132113 - DNA, 252 bp, Glycine max
gtggtttcttggttggaaaggggcatcagggttctcagcctcttccacagccgaacaagtcactcaagggattgatggaaccgccctcaccgccatcgtcacaggagcaacaagtggccttggtctggagaccacccgggttcttgcattgcgcggtgtccatgttgttatggcagtaaggagtctggacagtggtaagaatgtcaaagaaacaatacttaaggaaatcccctcggctaaaattgatgtcat

SEQ ID NO: 132114 - DNA, 252 bp, Glycine max
catttctattctctggctgagttcacaagccttagccaaaccagctctactcccacattcgccggaggagattacactttgaatttcactgatgattctgggatcgtgcacattaattcaggatggtccaagaccagggtgagcagtgctgttcattccacagatcctgttgcaatatatcaagttgacaaggtgctactccctgaggccatttttggcactgatatacctcctgcacgagctcctgcacca

SEQ ID NO: 132115 - DNA, 248 bp, Glycine max
gtccatcaaaaccttaaaaagattcagtgaagaacaaggtaatggcatcccctggtgtgcaagcaagtcatcctccttcaataacatccaacttcggaccaacttctctttttgatggcaacaccaaggtgtacatcagttattcttgcccctatgcacaacgtgtatggatcgctcggaacttcaagggactaaaagacaagatcaatttggtccctataaaccttcaagacaggccagcttggtat

SEQ ID NO: 132116 - DNA, 252 bp, Glycine max
gcgcttcacgatgggtgcttacaagtatgtttcggagctatggcgcaagaagcagtctgatgttatgagattcttgcagcgggtgaggtgctgggagtaccgccagcaaccttctattgtccgtttgacaaggtctactcgcccagacaaggctcgccgcttgggtttcaaggctaagcagggttatgtgatttaccgtgttcgtgtacgaaggggtggccggaagagaccagttccaaaaagtattgttta

SEQ ID NO: 132117 - DNA, 249 bp, Glycine max
attctctaaaattcgaaattctaatttcgttaggggaaagagattgtttgtgtgtgagtgagtatggctggaaaaggcgagggtcctgctatcggaatcgatttgggaacgacgtactcttgcgtcggcgtgtggcaacacgatcgtgttgaaatcatagccaacgatcagggtaacagaactaccccatcctacgtggctttcaccgacacagaacggttgatcggcgatgcggcgaagaaccaggtc

SEQ ID NO: 132118 - DNA, 259 bp, Glycine max
ctgccagtagtcatatgcttgtctcaaagattaagccatgcatgtgtaagtatgaactaattcagactgtgaaactgcgaatggctcattaaatcagttatagtttgtttgatggtatctgctactcggataaccgtagtaattctagagctaatacgtgcaacaaaccccgacttctggaagggatgcatttattagataaaaggtcaacacaggctctgcctgttgctttgatgattcatgataactcgtcggatcg

SEQ ID NO: 132119 - DNA, 254 bp, Glycine max
aattaactagctaggatggtcagtgttgaagagatccgtaatgcacaacgtgcagagggccctgccactgtcatggctattggcaccgcaactcctccaaactgtgtcgatcagagtacctatcctgactattatttccgcatcaccaacagccggcacatgaccgagctctaagaaaaattcaagcgcatgtgtgataagtcaatgattaagaagcgatacatgtacttaaatgaagaaatcctgaaagagaa

SEQ ID NO: 132120 - DNA, 253 bp, Glycine max
ctcgagccgcttattcctctttcctcttcattctcttcccaaataaaactataatcagtcttcagtgatcgtcaacacttaagacccaagtgtaaatgaagaaagtggtggtgaagttgaatttgcacgatgacaaagcaaagcaaaaggccatgaagtcggtttctagcctagcaggcatcgattctatctccatggacatgaaggagaagaaactgactgtcgtgggtgaaatagaccctgtcgatgtggt

SEQ ID NO: 132121 - DNA, 251 bp, Glycine max
gattcatcatcgaggtcgagatggcgaaggaggcgagcgaaggaaggccttcgagaggacctgtctatcgtagcctcttcgccaaggatggattccctgctcctatccaaggtctcaatagttgctgggacgtttttcgattgtctgttgagaaatatccatcaaatccaatgcttggtcgccgggaaattgtggatgggaagccgggcaagtacaagtggctaacatacaaagaagtatatgaccaggtg

SEQ ID NO: 132122 - DNA, 247 bp, Glycine max
gttttctctgcgcgttaaactactcagctgcggaaatcagcactttagccaagagaaaattccagtgcgacgcgggcaagcagtacagtgtgaccgacctcaactacccttcgtttgcggtgttgtttgaatcatcagggagcgtggttaagcacacgaggactctcactaacgtggggcccgcgggaacttacaaagcttccgtgacgtcagacactgcgtccgttaaaatctcggtagaaccgca

SEQ ID NO: 132123 - DNA, 250 bp, Glycine max
ggaaaacaaagtatagagtgaaagaatgggtgagaaaagcaagattttgatcataggaggcaccggctacatcggcaaacatatagtggaagcaagcgcaaaggctggaaatcccacttttgctttggtgagggaatccacactctctgacccctccaaggcacaactcatccacaattttgaggctttgggcgttaatttggtccgcggggatctgtacgatcatgagaagttggtgaaagctatcaag

SEQ ID NO: 132124 - DNA, 248 bp, Glycine max
cggctcgacgcggaggagcaactttgcgaggcggccagaaaaggtgacacggagaaagtgaggtctctcatagactccggcgctgacgtcagccacttcgacggcgagggcctcaatcctctgatgcacgccgcaaagcacggccatgcacccgtcctcaccctcctcctctccgctggcgctccctggaacgctctttccccctccaacctctccgccggcgactacgccatgcaagaaggccacaa

SEQ ID NO: 132125 - DNA, 240 bp, Glycine max
gtcactgctttgtttagatcagaaccagatcgtgttctcttcttccattggcaaacatggcaactcaaatgagcaagaagagaaagtttgtggcggatggagtgttcttcgccgaactgaacgaggttctgacacgtgagttggcggaggacggttactccggcgtggaggttagggttacgccgatgcgcaccgagattatcatcagagccaccagaacccaagccgttctcggtgaga

SEQ ID NO: 132126 - DNA, 253 bp, Glycine max
cttagcttgagtattttcaagaggggatcaaagggaagaagaagggaaggactcaaacttgcacacgcaacctttggttcctttcccaacactcaccatggtggcagattctaagtccaattccgacctctccttcggaaaaatctttgccagcagtgctttctctgcatgtttcgctgaggtgtgtactattcctttggatactgccaaagtgaggcttcagcttcaaaagcaagctgtagctggtgatgtt

SEQ ID NO: 132127 - DNA, 250 bp, Glycine max
cttagcatcatttcatatatacaaataacatatatggcttcttccttctctccaagcctatcatcacttgtgcctctgcttgtgagccttttcattgtggtttgtgctgccggtaacttcaaccaagactttcagattacgtggggagatggtcgtgcaaaaatactcaacaacgccaatcttctcactctctcccttgacaaggcctctggctctggcttccaatccaagaacgaatacttatttggca

SEQ ID NO: 132128 - DNA, 249 bp, Glycine max
ctgatcctcaacgtgttcaaacaccttcaattatggagtactggaaacccttggctgaagatatggatccctctgctggaatagaagccgattatcatcacaagaataacagggtttattgttggaaaggtcttaggctttcagcacgacaagacttggagggattttctaagtttactgatcatggcattgaaggggttgtccctctagaacttttgccacctgatgtccgatctaaataccaagcta

SEQ ID NO: 132129 - DNA, 235 bp, Glycine max
ctcgggaaaatcacagcgacgctcaggaaaaactctaaactgtgaaaaaaccactgcgatcaatggcaacgatcaaggccgtgaaagctcgccagatcttcgacagccgtggaaatccaaccgtcgaagttgacgttattctcagcgatggaagcttccacagagcagagatcttaaaaagtgcttcaacaggtgtttatgaggctttggaattaagggatggaggctcagacta

SEQ ID NO: 132130 - DNA, 249 bp, Glycine max
taatactcccggagtgatggagaattgccatttcttgaaggaagttgaagatgcacaaaagattagaagaaccgttattgactgctttgagagagcaagtttgcctagtgtaagtgaagaagaaaagaagagaattcttcattttgctattgttggaggtggtccaactggagtggagtttgcagcctcactacatgactatgtcactgaggatttggtcaacatatatcctgggataaaagatctagt

SEQ ID NO: 132131 - DNA, 244 bp, Glycine max
caaccttgtgccataccccaggatccacttcatgctttcttcttatgctccggttatctctgccgccaaggcctaccacgagcagttgtcggtgccagagatcacgaatgccgtgtttgagcccgcgagcatgatggccaagtgtgatcccaggcatggcaagtacatggcttgctgcttgatgtaccgtggtgatgttgttcctaaggacgtgaatgctgctgttgccaccatcaagactaag

SEQ ID NO: 132132 - DNA, 246 bp, Glycine max
gattgctagaatggaatttcgatgctcagtcatctcttttaccattctcttctctcttgctcttgcaggagagagccatgtccatgcatcgctacctgaggaagattattgggaagctgtttggccaaacactcccattcccactgcactgcgagagcttctaaagcctctccctgcaggcgttgaaatcgatgaactccctaagcaaattgatgatacacagtacccaaaaacattcttctataa

SEQ ID NO: 132133 - DNA, 246 bp, Glycine max
cggagaaggagcaagataaatgagagattccagatattgagggatctcatacctcatagtgatcaaaagagggacacggcatcatttttattagaggtgatggagtatgttcagtacttacaggagaaggtacaaaagtatgaaggttcatatcaaggttggggtcaagagcccctgaagttgatgccatggagaaatagtcattggcgtgtccagagctttgctggtcaacctacagctgtaaag

SEQ ID NO: 132134 - DNA, 254 bp, Glycine max
cagatatgatgtatgaccttatccacaaggctcaatcaacagatgagtcttatacagctgcattaaatgctgttttggagaagcacagtgcaactgcacatgacatacttgatggagataatcttgctactttcctgtctaaattgcatcatgatattagtaaccttaaggcgatgcttcgtgcaatatacatagctggtcatgcaacagagtcctttacagattttgttgtgggacatggagtattatggtcc

SEQ ID NO: 132135 - DNA, 245 bp, Glycine max
ctaaaatcatataattctctttcatctgaattttccctttcaaatctcttcctttgaagttttcgtagttctctgcatcatggagatggaacgcgtcttcgagtttcctcacactcacatagagaagcgcccgagaaagagagcgagattgggctgggacatccctgaggtccccaaggctcaggtaggattgttttgtggacaagatgttgggataatttcaagctttgctccttcaaggggtc

SEQ ID NO: 132136 - DNA, 248 bp, Glycine max
aattgatcatggatactgcctgcccacaagctttgaagattgtacctttgagtggctttactggcctcaagctcgccagccatactccccagaaactattgactacataaagtcactggatgctgaagaagatattgcccttttaaagtttcatggatgggatctgccagttgaatgtgcccgcactcttaggatctcaaccatgcttttgaagaaaggggtagagagaggattgaccccttttgcca

SEQ ID NO: 132137 - DNA, 245 bp, Glycine max
tggctatcgcttcctctttctctctttaaatacacacacacacacactcactttcttgcttgttctaactaccatgacaacccacattgataacctgtgggtgttggccttggtctcaaaatgcacacaagagaacattgcatggtcactcttgaccatcatggtcactctctggctctccatgaccttcttctgctggtctcatcccggtggtcctgcttggggcaagtactactcctttcatt

SEQ ID NO: 132138 - DNA, 243 bp, Glycine max
ttcccatattagaatcctcatcttatcatttgtactctccctcacttaatttattgtactcctttgcagtgaagtctgagcgttgcacccaaagatatttaccaattataatataaggttgtaatttgtaagcaaaagaagatggtgaagatatgtggaattggagcagggtatgtagggggtccaacaatggctgtgattgccctcaaatgcccctcaattgaagtggctgtggttgacatc

SEQ ID NO: 132139 - DNA, 236 bp, Glycine max
gaaatagaaggttcatcatctcaaaaaggcttttgtgattctcgatttgatttggatcgcacagaacgaaggcatgggtcaagcttttcggaagctcttcgacaccttcttctgcaacaccgagatgcgggttgtgatgcttggtctagatgctgctggcaaaacaactatactgtacaagctccacattggagaagttttatctactgttcctacaataggttttaatgtggaga

SEQ ID NO: 132140 - DNA, 244 bp, Glycine max
tcttgctactgctgttttcagcaccatatctttcctgcttggtggtgtcacatcgcttatttctggattccttggaatgaaaattgcaacttacgccaatgcaagaaccaccctggaggcaagaaagggtgttgggaaggctttcattacggcttttagatctggtgcagttatgggttttctccttgctgcaaatggtcttttggttctttacattgccatcaacttgttcaagatttactat

SEQ ID NO: 132141 - DNA, 244 bp, Glycine max
caaccctaacgcgtgcagagcagagagagacgcagccatggggcgaagacccgcgaggtgttataggcaaattaagaacaaaccataccccaagtcacggttttgccgtggtgttcctgatcccaagatcaggatttacgatgttggtatgaagaagaagggtgttgatgaatttcctttctgtgtccatctggttagttgggagaaggaaacgtttctagtgaggccctggacactgctcgta

SEQ ID NO: 132142 - DNA, 251 bp, Glycine max
gtttcggaggagaagaaaatagtcgttcgagatggcccgtacgaagcaaactgctcgtaagtccacaggaggaaaggctcctaggaagcagcttgcaaccaaggctgcacgtaagtctgcaccaactactggtggtgtgaagaagccacatcgttaccgtcctggtaccgttgctcttcgtgagattaggaaataccagaagagtaccgagcttggtgatcaggaagctccccttccagaggctggttcgt

SEQ ID NO: 132143 - DNA, 250 bp, Glycine max
ttcgacactttcctcgcctcaaagattatgcgaacaacatggttgtccttgctgcatccattgtgagcaaatctgggaaagtgctagtttctagacagtttgtggatatgactcgcataagaattgaaggtcttctagcagcatttcccaagttggtagggactggaaaacaacacacatatgttgagactgagaatgtgcgctatgtttaccagccaatagaggcactgtacctgcttctcgtaacaaa

SEQ ID NO: 132144 - DNA, 250 bp, Glycine max
gaaacggctaccacatccaaggaaggcagcaggcgcgcaaattacccaatcctgacacggggaggtagtgacaataaataacaataccgggctcattgagtctggtaattggaatgagtacaatctaaatcccttaacgaggatccattggagggcaagtctggtgccagcagccgcggtaattccagctccaatagcgtatatttaagttgttgcagttaaaaagctcgtagttggaccttgggttggg

SEQ ID NO: 132145 - DNA, 247 bp, Glycine max
gccagtagtcatatgcttgtctcaaagattaagccatgcatgtgtaagtatgaactaattcagactgtgaaactgcgaatggctcattaaatcagttatagtttgtttgatggtatctgctactcggataaccgtagtaattctagagctaatacgtgcaacaaaccccgacttctggaagggatgcatttattagataaaaggtcaacacaggctctgcctgttgctttgatgattcatgataact

SEQ ID NO: 132146 - DNA, 250 bp, Glycine max
ttctcgagccgaatcggctcgagcggctcgagcacaaacacctcgtcgctcacaatgcagctagccatggcggccaacgctgagcgtttcaccgtcgccgttccgacctcagccctttctccggtcatccttctccggcgtctccgtcaagctcactccccaatccataacgctttcacgctccaagcccctcaccgtcttcgccgccaccaagaaggccgtcgccgtcctcaaggggacctccgccgtc

SEQ ID NO: 132147 - DNA, 243 bp, Glycine max
gtgaacttcagcacatttctggtcataggcaaaacatctcctgtaacatatcaagtgctaggccacctcaagacatgccttgttctaggatttgactacacattactgcatgaccctttcaccggaaggaacattcttggaatactaattgccgtttttgggatgggtttatactcttatttctgcactgaggagaacaaaaagaaacagttagctagtgatctcccactggcctctcaggtc

SEQ ID NO: 132148 - DNA, 242 bp, Glycine max
gctttttgtgaggattccaaagcatggcttcccttgcagcatccactgctgctgcttcccttggcatgtcagaaatgcttggaaaccccatcaacctcagtggtgccacaaggccagctccatctgcctctagccctgcctccttcaagactgtggctcttttctccaaaaagaaggctgctcctccaaaaaaagctgcagctgctgctcctgccaatgatgagcttgccaagtggtatggt

SEQ ID NO: 132149 - DNA, 241 bp, Glycine max
ctactcgcaagcaaatcagaacaagagaagagaatggcaggagcagaggggctaaacagagaacagtacgtgtaccttgcgaactgtcggagcaggcggagcggtacgaagagatggtggagttcatgcagaaggtggtggtggggtggacgccggcgtcggagctcacggtggaggagcgcaacctcctctcggtggcctacaagaacgtgatcgggtctctgcgtgccgcgtggcgcat

SEQ ID NO: 132150 - DNA, 239 bp, Glycine max
tgaaactgcagaagcggctcgcagagagcgtgctcaagtgtggcagaggaaaggtttggcttgaccccaatgaagtcaacgaaatctccatggccaattctcgccaaaacataaggaagctggttaaggatgggtttatcatcaggaagcccaccaagattcactctcgctcacgtgctcgtcgaatgaaggaagccaagaggaaaggacgtcactctggatacggtaagcgtaagggt

SEQ ID NO: 132151 - DNA, 237 bp, Glycine max
cgcttgtgctgccttcgtttgcgtttttatcacagaggaattaacatatatatagcaagcatggcagtcacactctacgaccttagctcttcctctgggttgaagaaacttgatgagtaccttctcccacgcagttacatcaccgggtaccaagctacaaaggatgatcttactgtttatgcagctttgccaactgctccatcagatgaatatggaaatgtttccaggtggtacaag

SEQ ID NO: 132152 - DNA, 237 bp, Glycine max
tgaaaattaaggttgtagcacctccagagaggaagtacagtgtctggattggaggctctatcttggcctccctcagcaccttccaacagatgtggattgcgaaggcagagtatgatgaatctggacgatcaatcgtacacaggaaatgcttctaagttataacaatggagtatgaaagatggaccagggaaattactatttatacgaacactacaaaaataccatcaagtggttgag

SEQ ID NO: 132153 - DNA, 235 bp, Glycine max
ttcagatctctctctctcactccctctcccttccttccatcccaaccacaaggatgctgagaagacataaaaaatggtaaagatttgctgcattggagctggctatgttggtggcccaaccatggctgtgattgccttgaagtgtcctgagatcgaggtggtcgtggtggacattgctgctccacgaatcaacgcgtggaacagtgaccacctcccgatatacgagcccggcctt

SEQ ID NO: 132154 - DNA, 233 bp, Glycine max
gcataatgcagaacctgaagctgttgatcttttgatggaggttgaagatctggatatgttgagtggacatgttgacaaaacaaattttaaaaggacttgcctatatctcaccagttcagctagatacctcccgggaccagatgatatgctagttttggacattgcatattcaatctataaacaatttgaagaatatccaaatgcactccaaattgcattgttcatggataaca

SEQ ID NO: 132155 - DNA, 235 bp, Glycine max
cggctcgaggggagaagaaaaggaaagaaaactctcaaaaaactattatagcaatggcagaacaaaaccaaaaccaaacaactgaagctggaaggcaccaagaggttggtcacaagagccttctccagagtgatgctctttaccagtatattctggagacaagtgtctacccaagagaacctgaatccatgaaagaactgagagagttgacagcaaaacacccatggaacatcat

SEQ ID NO: 132156 - DNA, 233 bp, Glycine max
gaaaggttcctgtcttggaaacgcccgatggtccagtctttgagagcaatgccattgctcgttacgttgctcgactcaagggtgacaacgctttgttctcatcttctgccattgataatgcccacattgaccagtggattgacttttcatccttggagatcgatgctaatattatgaaattatacctaccaagacttggatttgccccataccttcctccagttgaggagggt

SEQ ID NO: 132157 - DNA, 235 bp, Glycine max
tcttctgagagtgtttggttgaaagtagcaaagatgtttcctttcagggcaaaagggtcaaaagataaaggggactatggtggttatgcagaagaatgtgttggatatcaacagcatcaccagtgttggagggatcgttgaccaaggcttaggcttcataggcagtgcagtcgatgcacttacttttgcagccaccaaaatctccatccagttgattagtgctaccaaggctgat

SEQ ID NO: 132158 - DNA, 237 bp, Glycine max
ctcaggtgtccacctctgttgttgagccatacaacagtgtcctctccacccattctctcttggagcacaccgatgttgctgtcctcttggacaatgaagccatttatgacatctgcagacgctctctcgacattgagcgtcccacctacaccaacctcaaccgccttgtttctcaggtgatttcatctttgactgcttccttgaggtttgatggtgccctgaatgtggatgtgactg

SEQ ID NO: 132159 - DNA, 232 bp, Glycine max
atcatatttatctttgcaactaaaatggcgtcgtcacaaccagagatggagcatccaaagaaggtttttggttgggctgctcgggactcatctgggcttctctccccattcaacttctccagaagagaaacgggggagaaagatttggtattcaaagtgcaatactgtggaatatgccactcagatctacatatgttaaagaacgagtggggcaacacaacctatcctctgg

SEQ ID NO: 132160 - DNA, 232 bp, Glycine max
atttgaagcgtggttatgttgcctcaaactcaaaggatgaccctgcaaaggaggctgctaacttcacagcccaagtcatcatcatgaaccaccctggtcagattggaaatggctatgcccctgtcctcgactgccacacttctcacattgctgtcaagtttgctgaactcatgaccaagattgacaggcgatccggcaaagagcttgagaaaggagcccaagtttttgaaga

SEQ ID NO: 132161 - DNA, 237 bp, Glycine max
gtaaaggcgaaagactttaggtttggaattgggaattagggttgttcgcgtcacgaagatgatcgaggtggtgttgaacgatcgattggggaagaaggtgcgcgtgaagtgcaacgacgatgacaccatcggcgacctgaagaagctggtggcggctcagacgggcacaagagccgacaagatccgcatccagaagtggtacaccatatacaaggatcacatcactctcaaggatta

SEQ ID NO: 132162 - DNA, 233 bp, Glycine max
gcggagagtttgcagctgcatcatcgatcatcgtcacctcatggacggacacgattcacaagacccgaagcagagccctgctgacatgactgcctttgtgcaaaatcttctccagcagatgcaaaataggttccagacaatgtccgactccattgttacaaagattgatgatatgggaagtcgcataaatgagttggaacaaagcatcaatgacctaagagcagagatgggag

SEQ ID NO: 132163 - DNA, 233 bp, Glycine max
gttgacaaccataaacaatatgtgtgcatatgggctcaatcctggtatttcaggttctcgtcttttgggcaccattcctcagtccatttcacagcaaactgtttggaatcaaatggcaacagtgagaacaccattgaattttgattccagcaagcagagtttttgtcaattttctattgaccttctcggtggaggaattttagtggacaaaactggagattggatcacactta

SEQ ID NO: 132164 - DNA, 234 bp, Glycine max
cacacgcacacagttacgctcttcaaatctatctcttctcagcgattcttgcttcaagttccagaaatgggtgtggcacaaaacattcccgatgcggaggagggaaccttggagattggaatggaatacagaactgtttctggagttgctgggccactggtcattcatgataaagttaagggacccaagtgtcaagagattgttaacattcgcttaggagatggtactactcgg

SEQ ID NO: 132165 - DNA, 231 bp, Glycine max
agaaggcggactggatacattttctcgtagttatgaaaaatttggcttcatacgcagagctacaggcattacttacagagagtaggcacctggagctaagtcagcagcattaattggagacttcaacaattggaatccaaatgcagatgtaatgaccaggaatgaatttggtgtgtgggagatcttcttgccaaacaatgtggatggttcaccaccaattccccatggttc

SEQ ID NO: 132166 - DNA, 230 bp, Glycine max
gttcatgggggtgaagctattataagttacaaagcttttcccctaaagaaggaagtgaagaaattgatacaccttgttttccatgccatcgcattaatacttggaatagttggaatttatactgccttcaagtttcacaatgaaagtgggattgccaatctctacagcttgcattcatggcttggaattggggttattgtcctttatggcattcagtggatatatgggtt

SEQ ID NO: 132167 - DNA, 229 bp, Glycine max
tgatgagactgcaaggatttgggactgccaatctggaaagtgtgtaggtgtgatcaatcttggtggtgaagtaggttgtatgatcagtgaaggcccctgggtttttgttgggatacccaattttgtcaaggcctggaacacacaaaatttatcggagctaagtctaaatggtcctgttggacaagtttatgcacttgttgtgaataatgatatgctctttgctggtaca

SEQ ID NO: 132168 - DNA, 233 bp, Glycine max
gccgaggagagaaacatacggtgctcttgatttgggagggtcttcattgcacgtcacgtttgaggggaatagcaataaagagccgcaacatttgttcaatagtgagactagtttgtatgttaggattgggtctgtgaaccatcatttgacggcttattcactcgcggggtatggcctcaatgaggcatttgataagtctgttgctcatgtctttaaggagtttgggtatggta

SEQ ID NO: 132169 - DNA, 230 bp, Glycine max
gaaaaaaaaaaaaaaaacatggtggtaaaggtgtatggtccaacctatggatcccccaagagggccctggtgtgtctgattgagaaggaatttgattttgaaacagggcatgtggatctcttcaggggagagattaaggaccctgagttccttaagctgcagcaatttggaccccttcctgttattcaagacggtgattatactccctatgaatctcgtgcaataatcag

SEQ ID NO: 132170 - DNA, 230 bp, Glycine max
catttatcaactcactcatcaatctcgtttgttctcactaactattacttcatcatgtcgtcgagcacagttggtcaagtcatcaaatgcaaagctgcggtttcatgggaggcagggaagccacttgtgattgaagaagtagaggtggcaccaccacaagctggtgaagtgcgtttgaagatcctctacacctctctttgccacactgatgtttacttctgggaagccaa

SEQ ID NO: 132171 - DNA, 226 bp, Glycine max
gtttagttacgtacatagcttgaaaacacagtgcttgtttagactagtatcttccatggctccgaaagatagaatcctggttttgggacccacaggagccattggaagacacatagtttgggcaagtgtaaaggcagggaatcccacttttatattggttagggacacccctgcctctgttaacaagccaaggcttgtcactgctgctaatcctgaaaccagggaa

SEQ ID NO: 132172 - DNA, 229 bp, Glycine max
gaaggcgtcttcataaacgcctttcttctccgtttccgtttcctcgttcaaattcgctttttgatctgcgaaaatgagagagtgacatctcgatccacattggtcaggctggtatccaggtcggaaatgcttgctgggagctctactgcctcgagcacggcatcgggcccgatgggcaaatgccaagtgacaagacagttggcggtggtgatgatgctttcaatacttt

SEQ ID NO: 132173 - DNA, 233 bp, Glycine max
ggagaaactgcgaaaatggcatcggagtcaggtcaaagtcccaatccttcttggtttacgcccaaaaggcttcttatgatattttgtctcattaacatgctaaactatgtggatcgaggagctatagccagtaacggtgtcaatggaagtcttgcaacttgcactgactctggaatttgtacaggtggcagtggaattcagggggattttaacttgaacaattttcaagatgg

SEQ ID NO: 132174 - DNA, 232 bp, Glycine max
ctcaaacattgtttgttgtaggaagaggaatcttgagaaatggcaggggacagcaagagcaagattctgttcatcggagggactggttacatcggaaaattcatcgtggaagccagcgccaaagctggccacccaactttccttttggtgagggagtccactctctccaaccccgcaaaatcacccctcatcgacaatttcaaaggcctcggtgtcaatcttgttttaggag

SEQ ID NO: 132175 - DNA, 194 bp, Glycine max
  unsure (1)..(194): unsure at all n locations
tcacaattnttattttttaatgatactattttgttattgttattgatggtatcatcatcgggaaaaagcagagaaatggatagggtgaagggtccatggagcccagaagaggacgaggccctgcgggcgctggttcaggcccacgggcctcgaaactggtcggtgataagcaagtccattccggggagatccgg

SEQ ID NO: 132176 - DNA, 231 bp, Glycine max
gctccctcttaaaacctccttacggatcaaatgctcccaaacagatgggaatggaagtcctgcaaagaggacagtgcttcatgatctttatgagaaagaagggcagagtccatggtatgataatctctgcagacctgttacagacctgcttcctcttatagcaagtggtgtcagaggcgtcactagcaaccctgcgatctttcagaaagctatctcatcatcgaatgctta

SEQ ID NO: 132177 - DNA, 226 bp, Glycine max
caaattgttacatctgaaaagagttactggcatgtgtatgatcctgacaagtttcagatgtttgacaacagtgagataggtctttattctaatcccactttggaagatatcccacattcagcttgggatcttttttgctgggacagtgagaaaactttgccaaataatttttctgcagaattgctctcttgcaaattggatactgttactggccaatattatcctg

SEQ ID NO: 132178 - DNA, 229 bp, Glycine max
cggcgcggcacacacagacacacacatttcgtcggaatgggaagggtgattcgcgcacagcgtaagggtgcggggtcggtgttcaagtcccacacccaccaccgcaagggtccggcgaggttccgcagcctcgacttcggcgagcgcaacggctacctcaaaggggtcgtcaccgatatcatccacgaccctggtcgcggtgctcctctagccaaggtggcgttccgcc

SEQ ID NO: 132179 - DNA, 226 bp, Glycine max
ctcgagccgcagtggtggactgagttatcaagtgcctactggacgcagagatggacgcatatcacaggcttcagatgtcagtaacttgcctgctccttttgactctgttgaagttcaaacacaaaagttcacagcaaagggactcaacactcaagacctcgtcacccttgttggtgcacataccattggtactacagcttgccagttcttcagtaacagattgtac

SEQ ID NO: 132180 - DNA, 226 bp, Glycine max
catgcttgaagcaggaccctgacagcaaggttgcctgtgaaacctgcaccaagaccaacatggtgatggttttcggagagatcacaaccaaggccaacgtggactatgagaagattgtgcgtgacacatgcaggaacattggttttgtctctgatgatgttggtcttgatgctgacaactgcaaggtcctcgtcaacattgagcaacagagtcctgatattgctca

SEQ ID NO: 132181 - DNA, 226 bp, Glycine max
ctagaatggaatttcgatgctcagtcatctcttttaccattctcttctctcttgctcttgcaggagagagccatgtccatgcatcgctacctgaggaagattattgggaagctgtttggccaaacactcccattcccactgcactgcgagagcttctaaagcctctccctgcaggtgttgaaatcgatgaactccctaagcaaattgatgatacacagtacccaaa

SEQ ID NO: 132182 - DNA, 224 bp, Glycine max
ctcgagccgcggtgatcgcaacctcgtttgcacccttctcccaacatcacaggttgttgaagaacaagctgctgcaacggcctaatcttttcttccattgacaagtattttcattttttaaattgtacataaactcttcctatcattcaggcgttgctgcttgacctttgcttcattatatcataatgatgatgatgtaagtttcattcagccacataaccata

SEQ ID NO: 132183 - DNA, 241 bp, Glycine max
actccgatggcgagcctgtggcgcgcggcaaccggcatgacggacaacgccaccgattacgacggcgtagagttctggtcgaaccccgagcggaccggctggctcaccaagcagggcgagtagatcaagacctggcgccgccgctggttcgtcctcaagcaaggcaagctcttctgttcaaggagtccgccgtcacgcgtgcgtctcgtccacgcggcgtggtccccgtcgccacgtgcct

SEQ ID NO: 132184 - DNA, 241 bp, Glycine max
gatcaataagaaccgttgcatccttcactgtggaaaagcaagcagtatctagttatagcaaatttcttgtagatgcttacaaatcaggagttcatgaaggtttcatagctggagctggtctacgcacagttatctcagttattttctgtgcgtctgctttggctgtatggtttggccaaagatgataatggagaaaggatataatgggggcacagtgatgaatgtgattattgccgtgcta

SEQ ID NO: 132185 - DNA, 242 bp, Glycine max
atcgtggagccctacaacagcgtcctctccacccactcccttctggaacacaccgacgtggctgttctcttggaacacgaagccatctacgacatctgtaggagatctctcgacatcgagaggcccacctacaccaagctcaacaggctcatttcccagatcatttcgtcgctaacccttccttgaggtttgatggcgctatcaatgtggatatcactgagtttcagaccaaccttgttcca

SEQ ID NO: 132186 - DNA, 243 bp, Glycine max
aatgaaccataaccatgtcagacgaggagcaccacttcgagtcaaaggctgatgctggagcatcaaagacatttccccagcaagctggaaccatccgcaaaaacggttacattgtcatcaagaacaggccatgcaaggttgtggaggtttcaacttccaaaactggcaagcatggaccgcaaagtgtcactttgttgcaattgacatcttcactgggaaaaagcttgaggatattgtcccatc

SEQ ID NO: 132187 - DNA, 243 bp, Glycine max
gaagaagatggagatgtatcagatctggagcaggagaatagcgttgggagcgttcgcgtttgttctgcttttcctatcggcctcagcagacgacgtcgttgtgctctctgaagataacttcgagaaggaagttggtcaggacagaggagctctcgttgagttctatgctccttggtgggacactgcaaaaagcttgctccagaatatgaaaagcttggtagcagcttcaagatagccaaatct

SEQ ID NO: 132188 - DNA, 242 bp, Glycine max
gcaagcaaccctttgcacacgcaagctgggaacagtgatgatggagagtaccctttaaatgtcaccacctcagggaaccaagtgaatgtaacaactggggtggttgatactacagtgtccaatactatctacagtgataaccagcttgcagtgtatcaggtagataaggtacttctccaatgaagcttttcggcgcaacggcaccggctgcttcaccggcagaggctccggcaccgaccaag

SEQ ID NO: 132189 - DNA, 243 bp, Glycine max
acagaagtctgccttagtgggtttattgcttttgatgttcctcctccaaagggtccattgtggattcttggcgatgttttcatgagggcatatcacaccgtctttgactgatggaaatctccaagttggctttgccgaagcagtctgaattacgctttctggaggattttctttgtaatttgttaagcgtgttgtaaataagctgttataattgtagctctggttactttttgaaaccacgaa

SEQ ID NO: 132190 - DNA, 244 bp, Glycine max
tttaaattcccacagattaaagcacatccatggcacaagatcttccataagcgcatgcctccagaggctgttgatttggtatcaagactactacaatactcccctaacttgcggtgcacagcttttgatgccttgacgcatcctttcttcgacgagcttcgtgatccaaatactcgctgccaaatggccgattccttccaccactatttaatttcaaatcccatgaactgaaaggagtcccatc

SEQ ID NO: 132191 - DNA, 244 bp, Glycine max
cttgtgctcagaaaatctctggcttatggtggtttgtcgcgtggccttcatgaaggtgcaaaagtgattgagaagcatgctgcacaactctgtgttcttgcagaagactgtgaccagcctgactatgttaaactggttaaggccctttgtgcagagcacaatgttagcctgctgacagtccgagtgcaaagacccttggagaatgggctggtttgtgcaagattgattccgaaggaaaagcaag

SEQ ID NO: 132192 - DNA, 245 bp, Glycine max
tagtagccgagattccgtgagttgcaaaaatgaagacgattctttccaccgagaccatgaacatcccggacggcgtgagcatcaaagttcatgccaaggtcatcgaagttgagggcccccgcggaaaattggtgcgagacttcaagcatttgaatctcgattttcagctcattactgacgaaacggtaaaagaaagctgaaaatcgacgcgtggtttggttctcggaaaacatccgccgccattc

SEQ ID NO: 132193 - DNA, 251 bp, Glycine max
actggaatcgctgagaaggacataaatcacatagctagttgttaaagtgagagattagaagaagaaatggcaactttccagttgttgacatggggaaacttaacaccgaagagagagcagcagccatggagattataaaagatgcctgtgagaactggggtttccttgaattggtgaaccatgggatatccttgagttgatggacactgtggagaggctcacaaaagagcactacaagaagactatggagc

SEQ ID NO: 132194 - DNA, 238 bp, Glycine max
attttgctgaagtgcacaaactctatgaaggtggagttacactacctacaaactttcttagcaagatcgcccctataccagtgatcaaggaaatttttcgaactgatggcgaacagttcctcaagtatccaccacctaaagtgatgcaggtggataagtctgcatggatgactgtgaagaatttgcaagagaaacgattgctggtttaaatccaaatgtcattaagattatagaggag

SEQ ID NO: 132195 - DNA, 242 bp, Glycine max
ttctcgagccgatgtcggctcgagcatgaaagagacttgaagaagggtacggctctttcgttgcagaggatcaagctttcaaggattgacctggagtgggtccatgtcctcagcgaaggatgggccacacccctcagaggcttcatgagagaagccgagttcctccaaacgcttcattgaactctctccgactcgatgatgggtcggtcgtgaagatgtcagtgcccatcgtgctggctatt

SEQ ID NO: 132196 - DNA, 240 bp, Glycine max
cttacccttacccttggcttacttcaactctctcacttgcatgttggtctcttatgatgttgatctcttgggccactgggattgctgaagccccaaagactgatcctgagttttggaagtctttgttccctgttgctgttgcagatacaattggagatgtagcggcaacagttacatgtcaaaagttgcggtatcattcacacacattatcaagagtggtgaacctgcttttagtgttct

SEQ ID NO: 132197 - DNA, 245 bp, Glycine max
cgtcaacgccagacaaatcttcctctctcagccaattcttctcgacctccgtgctcccatccgcatctgcggtgatatacatggtcagtaccaggacttgctgaggctttttgaatatggtggctaccctcctgcggcaaactacttgtttctgggggattatgtggatagagggtagaagtttggagactatatgtttgcttttggcctacaaaataagatatccagacaaaatttatctcttg

SEQ ID NO: 132198 - DNA, 241 bp, Glycine max
ctctctctatattccattgccacccagttttgaatatatttttattccttctttgtttcttcactttcttccatacagataaccatgtcttctcagactgttgtcctcaaagttggtatgtcatgtcaagggtgtgctggagcagtgaacagggttttgggaaaaatggaaggtgtgagtcatttgacattgatctgaaggagcagaaggtgacagtgaaaggtaatgtggagccagatga

SEQ ID NO: 132199 - DNA, 241 bp, Glycine max
aaccacatcactctttctttcaaatctagggtttcctccttctgcaaccatcaatgtcggcaatcgcggctccccaacacagatcctcgaagacagagtcctacgtggacaataagcgcaaggaggatatccgccatgccaacatcgtggccgcacgctcagtcgccaacgcggtcgcaccagtctgggccctaagggcatggacaagatgatctccacctcctccgacgaggtcatcatc

SEQ ID NO: 132200 - DNA, 238 bp, Glycine max
caattctctgtgttgtgttgtgtacttgtgttaattgtgttgttgttgtaggaaatttaagtgaagagagaatgatgatgaagtctgctatgtgtgcattggtgcttgtggcactggttgtggttgaagtggggcccatggctgaggctgcggtgacttgcaacccaacacagtgactccttgtcttccggcaattaattcaggttctgcaccttcgagtgcttgttgccagaagctg

SEQ ID NO: 132201 - DNA, 238 bp, Glycine max
cactccagagccaaggtaggttaaacaatcttcttcatcgtcgtcgccgcaatgggacgtgtgatccgtgcgcagcgtaagggagcaggctcggtcttcaagtcccacacgcaccaccgcaagggccctgcccgcttccggagcctggatttcggagagcgcaacggctacctgagggtgtcgtcactgacgtcatccacgatcctggccgtggcgcgcctctcgctaaggtcgcctt

SEQ ID NO: 132202 - DNA, 238 bp, Glycine max
ttttgatttcaactttgaagtttagttgttttgtggaatggcagcgaagagcaaaatcctagtccttggaggaacaggatacataggaaaattcatagttaaggcaagcgcagatgcaggacaccccacttttgctttagttagagagaccaccctttctcatcctgaaaagtcaaacttattgagagcttcaagagctctggagttactcttctttatggtgatgtaaatgatcatg

SEQ ID NO: 132203 - DNA, 240 bp, Glycine max
ctttacattggttgctagcaagtggtatggggaggcaaccctgctgtgacaaacttggggtgaagaaaggtccatggactgctgaggaagacaaaaaactcataaacttcattctctccaatggccagtgctgttggcgagctgttcccaagcttgctgggcttcggcgttgtggaagagttgtcgtcttcgttggactaattatctaaggcctgacttgaagagagggctcctcacaca

SEQ ID NO: 132204 - DNA, 242 bp, Glycine max
cttaccaggtccagacatagtaaggattgacagactgagagctctttcttgattctatgagtggtggtgcatggccgttcttagttggtggagcgatttgtctggttaattccgttaacgaacgagacctcagcctgctaaatagctatgtggaggtaaccctccacggccagctcttagagggactatggccgcttaggccacggaagtttgaggcaataacaggtctgtgatgcccttag

SEQ ID NO: 132205 - DNA, 246 bp, Glycine max
aagaatagctctttctatcaaacggatggtgctgaggatctattgagctatgcttggcaactttggaaggatggaacacctttggaactgatggaccccatattaagagaatcctataatcagaatgaagtcatcagaagcatccatattggtttgttgtgtgtccaagaagatccagcgacagacccacaatgggaacaatagttcttatgctagacagtaacactgttactctaccaactccta

SEQ ID NO: 132206 - DNA, 239 bp, Glycine max
gttcttcacaagtatgccaacgaggatgtgtcactaggatcctggtttattggacttgatgtggagcatatagatgatcgaagactttgttgtggcactcctcctgattgtgagtggaaggcacaagctggaaacatttgtgttgcatcatttgattggagctgcagtggaattgcaggtctgctgagaggattaaagaggtacataggaggtgtggagagggtgagaatgttttgtgg

SEQ ID NO: 132207 - DNA, 235 bp, Glycine max
attagtcccaattttctagggttttattcattttccgatggcttctgcagatgttgagtaccgttgctttgtcggtgggctcgcttgggccactgacgaccatgccctcgagagagccttctctcagtacggcgaaatcgttgaaacgaagattatcaacgatcgtgagatggcagatccaggggttttggatttgtgaccttcgcctcggagcagtccatgaaagatgcgatcg

SEQ ID NO: 132208 - DNA, 209 bp, Glycine max
atgagtaacgtgatcccaccgtggcagtcatagcccattggctgggacaatgggtcgacaaagttaccaaggcgacgaactagattgcgccactgaaactactagcctgatatgttgctgagaggatgaatggtgatccgtgggaacgaggactatacccgattatgacctgagatggcaacggagttgatgacgtgggagctacagct

SEQ ID NO: 132209 - DNA, 240 bp, Glycine max
gctcgagctctgggctagggtttagcgcacttcttctagatttaaggatgatgggtaaggtaaaggttcacatcagtattgtggtcattggccatgtcgactctgggaaatccactaccactggtcacctgattgacaagcttggaggcattgacaagcgtgttattgagaggttgagaaggaagctgctgtgatgaagaagaggtctttcaagtatgcctgggtgctggacaaacttaa

SEQ ID NO: 132210 - DNA, 239 bp, Glycine max
atagggtttccggattcttgcgttttaatcttcgcaattcaaaaacatggggcactccaatgtgtggaactctcatccaaagatctacggacctggttctcgcacctgccgtgtgtgtgggaatcctcatggattgatcaggaagtatgggcttatgtgttgcaggcagtgctccgtagcaatgccaaggaaattggcttcattaagtatcgctgaaggattagtgtccaactgcccca

SEQ ID NO: 132211 - DNA, 237 bp, Glycine max
atggcgcaatctcttgtctgctggtgcagcccattgtagggtacagtagcgaccgatgtagatctcgtttcggtcgctgcattcccttcatcttagccggggccattgctgttgccatcgccgtcttcctaattggctatgcagccgatataggacacgctgctggcgacgactcgcaatgttgacccgcccacgggctgttgctatcttcgtggtcggcttctggatcctggacgt

SEQ ID NO: 132212 - DNA, 236 bp, Glycine max
tttggggtgatgatgctagtgagttcaacccagaaagatttgctgaaggagtagcaaaggcaacaaaaggccaagttgtgtttttcccatttggatggggtcctagagtgtgcttaggccaaaattttgctttattagaagcgaagttggttttgtcattactcttacaacgttctcatttgagctttctcctacctatgcagatgctccagtcactgtgctcactcttaatgcaa

SEQ ID NO: 132213 - DNA, 236 bp, Glycine max
agagttttgattaacttgaaattgttcaacaagaaatggagaattcattgggaaagtacggaaaagagcttaatctcgaggctagagagttgaggttggggttgcctggaagcgatgagcctgagaaacgttctgctgttagaagcaacaagagatcttcaccagaagcaaggaagaagagtgcataagcaagggcaagatgaattcttctgatggttctgatatcacaagtgatg

SEQ ID NO: 132214 - DNA, 239 bp, Glycine max
tctcgagccgaatcggctcgaggcgatggtgttagtcacactgtgctcctctatgagggctatccactccctcatgccattcttcgtttggatcttgctggccgtgatctgactgactctttgatgaagatcctcactgagagagggtacatgttcaccacctctgccgagcggaaattgttcgtgacatgaaggagaagcttgcttatgttgccttggattatgagcaagaacttgag

SEQ ID NO: 132215 - DNA, 237 bp, Glycine max
tctactccagccattgaagccactcaaaagcttcctcaagatccaagtgctgttgctgtaatagaaagcacgtcagatggtcagtgcaagatcattggagaaatttctgcatgtaagttatggaaatgtgattacttatccgcagcatgggctttagcaaatctctctgccggcagtttgttatgggagttgaagataatgtcaccccaaggtcactgcctcagttcagtttagatt

SEQ ID NO: 132216 - DNA, 238 bp, Glycine max
aggaagtgttccattggcctccgctgctgctcttgcaagaaggctagaagggaaggtggcactgataactggtaggagcaagtggtataagtgagtgcagagcaagagttttctccaagcatggagccaaagtggtgattgctgatatccaagacgagttaggccactcaattgcaaagagttggattcatcttcagctacttacattcattgtgatgtcagaaaagaagaatagatc

SEQ ID NO: 132217 - DNA, 245 bp, Glycine max
cactcactcactcactcactcactcactcgcaagcaaaaagaaagaatcccaggcgaggagaaagatggaggggaaggagcaggatgtgtcgttgggagcgaacaagttccccgagagacagccaattgggacggcggcgcagagccaagacgacggcaaggactaccaggagccggtccggcgccgctggttgacccgacggagtttacgtcatggtcgttttacagagcagggatagcagagt

SEQ ID NO: 132218 - DNA, 278 bp, Glycine max
tatactctctctagagtaattgcggaatcagctagaattttctaataatggccaaagacgttgagcaggttacagagcaaggtgaatactccgcgaaggattaccatgacccacctccggcgccgttgatcgacccagatgagccactaagtggtccttgtacagagccgccatagctgagttcatagcaacactccttttcctttacatcaccgtgttgaccattattggctacaagagacagagtgacaccaaaatccccggtaacaccgagtgcg

SEQ ID NO: 132219 - DNA, 273 bp, Glycine max
caggtgtctctcactctcccaccgaatccacattctaaagtaatacgccggagaatgacgtcacactcccactacccacccgacttagacgccgactccgtcacctcctccccacgctccgatcacttccacgacgcgccgcccgcatccgcttcatgtgcagcttcggcggcaagatcctcccccgcccccacgacaaccagctccgctacgtcggcggcgacacccgcatcgtcgccgtcaaccgctccatcactttctccgccctcattc

SEQ ID NO: 132220 - DNA, 272 bp, Glycine max
ctgggaggtgaacttccaaagtccaactggagtactccactaagcttcttgtgtctctctttcactgctttctcgggaaacattcccgattccattgcccatttggagtctcttaccacactatttctggagcgttgcaatttgatggactgattccctcatcattgtttaatctaactcaactcttcagtatagatctatcatttaataaattagttggccccattccatattggtgttattctttgccttccttgttagagttggatctt

SEQ ID NO: 132221 - DNA, 273 bp, Glycine max
tctctacaacaagaattcatctattcatttcagcccatcagcatggcgaaggagaagaaaaacttgtccaacaagaacaagaagccaagcaatgcagacgaggttcacttccgcggagtccggaagcgcccctggggccgctatgccgccgagatccgcgaccctggaaagaagacccgcgtctggctcggcaccttcgacaccgccgaggatgccgcccgcgcctacgacgtcgccgcccgaaacttccgtggccccaaagccaaaaccaac

SEQ ID NO: 132222 - DNA, 271 bp, Glycine max
  unsure (1)..(271): unsure at all n locations
gaaattttgataaaccgcgatcacaggttgccgcaccttaaaaccggaaacaaaagcaatcgttacttgatttcaagaatcttccaatttcttcctacttcttggtgtacgatttcttaagggaaagaaaatcactctctgtcctggccacagacttcgtgaatcattttcttttccactcttagtatattcggngaacactctcctatttgatataggacttcgtgtcagatttaaactttttctgtttctttctcagttctctgcttaa

SEQ ID NO: 132223 - DNA, 272 bp, Glycine max
aacgatacgtaataagttctatcattgaggaagtttcctgtgcatcgtctccgaaaatgaacgacgcagatgtctcaaagcaaatccagcagatggtgcagttcatccgccaggaagctgaggaaaaggccaacgagatctctgtctccgccgaagaggaattcaatatcgagaagctgcagttggtcgaagccgacaagaagaagatcaggcaagaatacgaacgcaaagagcgccaagttgaaattcgcaagaagattgagtactcgatg

SEQ ID NO: 132224 - DNA, 268 bp, Glycine max
gcagatttgacatattgggagagtgcagctcgcatgattgctgatgtctcgaagtctgacaagatcgtggtggagaaatccacagtccctgtcaaaactgctgaagccatagagaagattctgacccacaatagcaagggatcaaattccagattctatcaaaccctgaattccttgcagagggaactgcaatcaaagatctctttaacccagaccgtgttcttattggaggcagggaaaccccagagggccaaaaagctattcaaac

SEQ ID NO: 132225 - DNA, 265 bp, Glycine max
cactctttcactcttcttgtatgatggagaagatccagcacagtgaggtggaagtgaagggactgaagcttcacgtggcagagattggaagtggctccaaaattgtggtattcttgcatggattcccagagatctggtaacatggaggcaccaaatgatttctgtggcaaacgctggttatagggctattgcctttgatttcagaggctatggactttctcagcaaccagcagagcctgaaaaggaaaccatgtttgatctggtt

SEQ ID NO: 132226 - DNA, 264 bp, Glycine max
tggaattgtgagcaattgggatgatatggaaaagatttggcgtcataccttctataatgagcttcgtgttgccccagaagagcatccagttctcttaactgaggcccctcttaaccccaaggctaatcgtgagaagatgcccaaatcatgtttgagaccttcaacacccctgctatgtccgtagccatccaagctgttctttcactgtatgcaagtggtcgtacaactggtattgtgttggattctggtgatggtgtcagccac

SEQ ID NO: 132227 - DNA, 269 bp, Glycine max
tccaatatattccattctctctgtgtatttccctacctctcccttcaagatgcagatcttcgtcaagaccctcaccggcaagaccatcacccttgaggtggaaagctctgacaccatcgacaacgtcaaggccaagatccggacaaggaaggaatccccccggaccagcaacgtctcattttcgccggaaagcaacttgaggacggccgtacccttgctgactacaacattcagaaggagagtactcttcacctcgtcctccgtctccg

SEQ ID NO: 132228 - DNA, 276 bp, Glycine max
tcgagctcatttctcatttctcacattattattcacatctccatctagatctctctctctctctctcccaagaaattcatcaacagacttgtgattaatttgcaattgttcaagtgatctatcaagaaattgataattcaatgggaagtacgaaaaagagcttaatctcgaggctacagagttgagattggggttgcctggaagcgatgagcctgggaaacgttctattgttagaagcaataagagatcttcaacagaagcaagcgaggaagagtg

SEQ ID NO: 132229 - DNA, 268 bp, Glycine max
ggaggttagcggcggcgggaagatcaccgatgagttcaccgggaagggctcgatcgggcaggtctgccaggtcatcggtgccgtcgtcgatgtcagattcgacgagggtttgcctccgatcatgaccgcgctggaggttctggatcactcctcgaggctcgagttggaggtggctcaacatttgggtgagggcgttgtccgaaccattgccatggatgccaccgaagggtcgttagagggtggcgcgtcctcaacactggctccccta

SEQ ID NO: 132230 - DNA, 269 bp, Glycine max
gctcgagctcgagccgctttgcacaaaccctaacacctaaaagccagaagaagcgaaatcgtgatcgacatctagcggatatgaaggtcgtcgctgcatacttgctcgcagtgttgggagggaatccatctccttctgcgatgatatcaaaaacatcctcggcgcagttggttctgaggctgagcatgagttgattgagttgctcttgaccgaagtcaagggcaaagacttcaatgagctacttgctagtggaagtgaaaagatttctg

SEQ ID NO: 132231 - DNA, 269 bp, Glycine max
gtgctttatttaggtgacaaaactactcacagagaaagacactcggagaccttgcaagacttcatcaatggctgtcaaagtttatattgtgtactactccatgtatgggcatgttgagaaactagcagaagaaataaagaaggggcttcctctgtggaaggtgttgaggccaaattatggcaggtacctgagacgctgcaggatgaggtgctcggtaagatgagtgcaccacccaagagcgatgtacgagtcattaccccgaatgaact

SEQ ID NO: 132232 - DNA, 266 bp, Glycine max
gcagactgcgcaatcgggttcggcaagaacgccattggcggccagagacggcaagatctatgtggtggaggacgacggcgacgacgacgcggtgaacccgaagccgggaaccctccggcacgccgtgatccaagacgacccttatggataatcttcgccagagacatggtgatccaacttaaagaagagcttctcatgaactccttcaagaccatcgacggaagaggtgccagcgtgcacgttgctgggggtccatgcataacgat

SEQ ID NO: 132233 - DNA, 265 bp, Glycine max
cacaaattctcaaatccaaatccaattccaattccaattcccaatcttctcaaaccctaattcctcatcttgaaaatgagagaaatcttgcacatccagggagggcaatgcgggaaccagatcggagcgaagttctgggaggtgatatgcgacgagcacggcatcgaccacaccggaaagtacagtggcgactctgaactccaattggaacgcatcaatgtttattacaacgaagcgagtggcggaaggtacgtccacgcgccgt

SEQ ID NO: 132234 - DNA, 267 bp, Glycine max
cgaacgaggatttccagcacattctgcgtgtgctgaacaccaacgtggatgggaagcagaagataatgttcgctatgacctccatcaagggtattggaaggagattcgccaacatcgcttgcaagaaggccgatgttcacatgaacaaaagggctggtgagttgagtgctgcagagttggatagtgtgatgactgtggtggcgaaccctaggcaattcaagatcccggattggtttttgaacaggaagaaggattacaaggatggaa

SEQ ID NO: 132235 - DNA, 267 bp, Glycine max
attcagtagttcttctctctcgaatttccactcactttctgtgcatcaatggcggcgataagtctccggaaggggaacacgcggcttccgccggaggtgaaccgcgtgctgtacgttcggaaccttcccttcaacacaccagcgaggagatgtacgacatctttggcaaatacggcgccattcgccagatccgcatcggcaccaacaaggacactcgcggaaccgctttcgtcgtctacgaggacatctacgacgccaaaaccgccg

SEQ ID NO: 132236 - DNA, 268 bp, Glycine max
cgccttcaaccccaaccaccgcatcggagtttactacaccaaactcgacgcctacgccgcctaccgcggccagcaggtctccgtcgccacctccctccccgccacctaccagggccaccgcgacacctccgtctggtcccctacctctacgccaccgccgtccccgtctcccccttcacgctccagatcctccagcaggacaaaacctccggaggaattctggtcaacgtaaaagtcaacggtagagtcaagtggaaggtcggaactt

SEQ ID NO: 132237 - DNA, 262 bp, Glycine max
aaaacaatggctgttgccaacaatgtgctttgcattagcttcattatcgctttaacgtgcgcagttgaagctcgaattccggggatttactctggtggtgcatggcgaagtgctcacgccaccttctacggaggtccgacgcttccggcaccatggggggagcgtgtgggtatgggaacctgtacagccaggggtacggtgtgaacacggcggcattgagcacggcactcttcaacagcgggcttagctgcggtgcgtgttt

SEQ ID NO: 132238 - DNA, 256 bp, Glycine max
tgaggactgagtttcttgcaaggaataattgattccttcaactccatcttcacacatgataacaactgcaattatcacaacaccaattctccttcttcttcttcctcaacgaatcgaatggaagcttctcctactcttcggtttcgaacgagcgcgttgcatacaagctcaaaggctacttcgatttagcaacgcaagagatcgcgaagggcgttatggcagaggaatggggcttgatcgacgacgcgcttcttca

SEQ ID NO: 132239 - DNA, 261 bp, Glycine max
cctgccagtagtcatatgcttgtctcaaagattaagccatgcatgtgtaagtatgaactaattcagactgtgaaactgcgaatggctcattaaatcagttatagtttgtttgatggtatcttctactcggataacgtagtaattctagagctaatacgtgcaacaaaccccgacttctggaagggatgcatttattagataaaaggtcaacacaggctctgcctgttgctttgatgattcatgataactcgtcggatcgca

SEQ ID NO: 132240 - DNA, 262 bp, Glycine max
gtttccctttcattttccctcactttctcgctcgccaaacgcccctctctctcctccaatggccgaccagctcaccgacgaccagatcgccgagttcaaggaggccttcagcctcttcgacaaggacggcgatgttgtattactactaaggaacttgggactgtgatgcggtcactagggcaaaacccaactgaggcagaactgcaggatatgattaatgaggttgatgctgatggcaatggaaccatcgacttcccagagt

SEQ ID NO: 132241 - DNA, 266 bp, Glycine max
gggaatcgaaaatccgaggaagtagttgatcctaagctccctgagatgccattttcaaaggctcttaaacgtgctttgttgattgctcttcggtgtgttgatcccgatgcaacaaagaggccaaaaatgggacattgatacacatgcttgaggcagacgacctgttattccatactgaacaaagaactgagggagagtcttcccgttcctatcaaagtgagcacaaggactcaaatttagataagagaacaggtggaggtgtcatt

SEQ ID NO: 132242 - DNA, 264 bp, Glycine max
cggctcgaggtcttaataaacgctaacctctgtacccttcgctaaaatgagagagagcatctccatccacattggccagcccggaaatcaggtcggaaatgcttgctgggagctctattgcctcgagcatgccatcaggctgatgggcagatgccaactgataagaccattggtggaggtgacgatgctttcaacaccttcttcagcgagaacgatgcaggacagcacgtgcctcgtgcagtatacgtagatcttgagcccact

SEQ ID NO: 132243 - DNA, 266 bp, Glycine max
  unsure (1)..(266): unsure at all n locations
ccttttctttttctcttctcactgcatcgcttcaggttcttctgaaaagatgtctcgcgtgtatgttggtaacttggattcacgagtcaccgagagagatctcgaagacgaattccgcgttttcggagttattcggngtgtttgggttgcacgtagaccacctggtnntgcttttattgactttgatgaccgcagagacgcacaggatgctatncgtgaattggatggcaagaatggttggagggttgagtttctcacaactctag

SEQ ID NO: 132244 - DNA, 262 bp, Glycine max
accagtaggagatcgctcggttatggttatgtcaactttagcaacccgcaagatgctgccagagctttggatgttctgaacttcactactctcaataacaggcccatccgtatcatgtattcgcatcgtgatccagtatccgtaaaagtgggcaaggaaatatatttattaagaatttggatagggcaattgaccacaaggcgttgcatgatactttttctacatttgggaatatcctttcgtgcacggtagctacagattc

SEQ ID NO: 132245 - DNA, 260 bp, Glycine max
ctgcaacaaaccccgacttctggaagggatgcatttattagataaaaggtcaacacaggctctgcctgttgctttgatgattcatgataactcgtcggatcgcacggcctttgtgccggcgacgcatcattcaatttctgccctatcaactttcgatggtaggatagtggcctaccatggtggtgacgggtgacggagaattagggttcgattccggagagggagcctgagaaacggctaccacatccaaggaaggcagc

SEQ ID NO: 132246 - DNA, 246 bp, Glycine max
cttggcgggacgccacgtatagcaacaaccaaaccctctctactccaacttcgtatcttcgctaaggttatagcttctacctcatcacttcgtacttctggactctacaatgagcaacgacaacgacaccttcccgtcgctgatcacacttccgatctcaacgaggaccgtagagccgacctcgtgaatgctctccagagcaagatacagcagtctggctggacaacattctgatatactagagtc

SEQ ID NO: 132247 - DNA, 265 bp, Glycine max
ggacgccattggcctggatatatagcacgcggtaactgtggggattgttattatgctggaacttacactgataaaaaatgccggacaaattgtggagaaccctcccagagatggtaccatattcctcggtcgtgctgaacccaagtgggaactatctggttgtgtttgaagaatggggaggtgatcctactggaattactttggtgaaaagaacaacagcaagtgtgtgtgctgatatataccaagggcaaccaactcttaagaa

SEQ ID NO: 132248 - DNA, 264 bp, Glycine max
cgagtttcgaaaaccctaaccccacaaccccctctcacaaactcactctttttcattgtttgataattcgaacttcctccatctttcccgaagtttgctatcatggctgggttggcgccagacggatcacaattgatgctcgtcaatatgatgctaagatgaatgagttacttggaactgatgggcaagatttttttacttcttatgacgaagtttgtgaaagctttgatgctatgggattgcaggagaaccttctgaggggta

SEQ ID NO: 132249 - DNA, 262 bp, Glycine max
tgaagccacagaatattttgacgacaaatatctcattggggttggagggcaaggacgtgtttacaaagccttgttgcctactggtgaactcgttgctgtgaagaaactccactcagttccagatggagaaatctcaatcagaaagctttcacaagtgagatccaagctttgacagaaatccgacatcgtaacattgtacagttacatgggttttgttcacattcacaatactcatttttggtgtgtgaattcctggagaagg

SEQ ID NO: 132250 - DNA, 258 bp, Glycine max
tggaaagatgctggtgattggatcacaggcaccatttaaggtgaaggggttgtggcttttccgtggacaagagattccaaaatttgtgattgatgaatgctatgatatggagctctacgactggaccaaggttacatctctgatgaaactcagaaagagcgcgtcaatcagatgatcgaggattttgaaccatttgagggagagtctcttttggatgccaagtgctttaagtgagaaacaaaaaccgttattccccag

SEQ ID NO: 132251 - DNA, 260 bp, Glycine max
ctaattcagactgtgaaactgcgaatggctcattaaatcagttatagtttgtttgatggtatctactactcggataaccgtagtaattctagagctaatacgtgcaacaaaccccgacttctggaagggatcatttattagataaaaggtcaacacaggctctgcctgttgctttgatgattcatgataactcgtcggatcgcacggcctttgtgccggcgacgcatcattcaaatttctgccctatcaactttcgatgg

SEQ ID NO: 132252 - DNA, 258 bp, Glycine max
gcaattcggcgtttgaaaatcaatgataattgggatagagatgctgcagctcaatctacccaatatccagatcgacccggtgaacctgagtgcttgtattatttgaggactggagcgtgtggttatgggataactgtcgctaccatcaccctgctcatatttcaattggtactcattatggtgaagaactccctcagagggcagggcaacctgattgcgagtattttcttaagactgggatgtgcaagtatggatcaa

SEQ ID NO: 132253 - DNA, 262 bp, Glycine max
ggcagcacttggtgggaatcgtgatgtgacaggaagccagaacagcgttgagatcgatgctctagctcgctttgtctgttgaagaacacaacaaaaaacagaatgcccttttggagtttgaaaaggtggtactgcgaaacagcaagtggtttctggtaccttgtacaccatcactttggaggcaaaagatggtgggcaaaagaaggtttatgaagccaaagtttgggagaagtcatggttgaacttcaaggaggtgcaagag

SEQ ID NO: 132254 - DNA, 262 bp, Glycine max
  unsure (1)..(262): unsure at all n locations
ttcggatacactgggtgctctcatgacgatttgtccaccaacagacgaacatcgtccgangaacaaccacgtgtatgggaagnagttccagtccatgctggaaggactcgacgaagaaggttgcgtggatncancagggtaccactctganaagaancgacgactaaacgtanatcaggtgaaggccttggagaagancttcgaagtagagaacanactggaacctgaccgaaaggtgaagctcgcgcaaganctcggcttg

SEQ ID NO: 132255 - DNA, 258 bp, Glycine max
ctcgagccgaatcctcctgatttcctcttctacgattctaaaatatcgcgaatggcatccaaaggaatactgaaggagctcaaggacttacagagagatccaccaacttcatgcagtgcaggccctgtggggaggacatgttccattggcaagcaaccatcattggtccaaatgacagtccctatgctggtggtgttttccttgtgaccatccatttccctcccgattatcccttcaaacctcccaaggtagcattca

SEQ ID NO: 132256 - DNA, 248 bp, Glycine max
tattgttctacctcaggatcgtcatttacgtgatgcatctctgtagcaactatgtcgaactctaaggatttccactacatgttcatcgtcggtcaatcagctggccgcattcgtgatggagctttacgccgacgtcactctccgcattgtcgagaaccttcgcttgctttgcaccggcgataatgtcgtaggtctgtttggcaagctccgtcattataatggcacgtccgtccaccgcgagagcccga

SEQ ID NO: 132257 - DNA, 265 bp, Glycine max
tagatctacccaactactacgccactactactcactcactgcagaacacactagaatgtctgatgatggcgagtagctacagcccaaagccatggagtggtgctcagaattgccggatccatctgtcgaggtggtttgacttgctccgatggtacttttgccagagctgctgttccaagtggtgcatccactgggatttatgaggcccttgaattgagagatggaggatctgactaccttggaaagggtgtatcaaaggctgttg

SEQ ID NO: 132258 - DNA, 255 bp, Glycine max
ggaagaactgacctcagcggcggcggcggcggcaacagaagaacaacaaccaccacacacaatgggtcgcgtgagaacaaaaacggtgaagaaatcctcccgccagtgattgagcgttactactcgcgcatgaccctcgacttccacacaaacaaaaagcatctcgaagaagtggccatcatcccttccaagaggctgcggaacaagatcgcgggtttctccacgcatctcatgaagcgcatccagaagggtccg

SEQ ID NO: 132259 - DNA, 253 bp, Glycine max
ctctgctcgtagggtttctccacctagagggaaatggctcccaaaccgcctagtacgggtctgtttgttggactgaacaagggtcacgtcgtcaccaagaagaattgcctccacgcccctcagatcgtaaggggaaaacaagcaagagggtgcactttgtgaggaacctcataagagaggtagccggttttgcaccctatgaaaagcgtataactgagttgctgaaggttgggaaggataagagggcactgaa

SEQ ID NO: 132260 - DNA, 250 bp, Glycine max
ggaatatgcggaattaacacattagctacatatcctgtcaagaccaagcctaatcctcctatccctcctcccccaggtcctgtaagatgtaatttgtttatcactgttcagaaggagaaacatgttgctgtgccaagagctttcttggaatatgcttttcttggaaatgctgtgggttaacttctgccgtgtgctgcaaagacaagcgccactgttgcccccaagattatccgatttgtgatacaagaag

SEQ ID NO: 132261 - DNA, 247 bp, Glycine max
tgcttcatgaactcatgggagttgatcctggaactaaccctgtttgccatttccttggaagcaaggccattttatgggtacccaatttatctatggacatgcctatcagactaacgttgttgtttaattagtccatgcatctgcatcttgggcaccataagattgtatataaaataaattatggtgtgttgtgtatgttgtgcaagacctggaacttcacctttctacgtacgtgtgctgttaggat

SEQ ID NO: 132262 - DNA, 250 bp, Glycine max
agtgcctcaccggcgactgcgacggtgttcttgagtgcaacaaaacaggtacacctccgaacacgttggtggaattcgcgttgaaccagtacaccaacctcacttctacgacatctccctcgtcgacggtttcaacattcccttgcaggtgagcccgacctacaactgcagctccgtgaaatgcgccgccgacatcatcggagagtgtcccactcagcttcaggttcccggcggctgcaacaaccgtgca

SEQ ID NO: 132263 - DNA, 251 bp, Glycine max
gaagattttgacttaaagaaagtagaggaacaagcagcagagttggagaaggatttgattgtcaaggaacttgaaacgcttgacgtgcttgaagaattagggctaccaagaggattgtggaggacttgaagcagcagttacaaaaggaggctatgaaatgtttagcaactcgagatgtaaattcatatgaagaagctggaactcctgttattaaggagaatgatgaggacaattgtggaaatattgtcaat

SEQ ID NO: 132264 - DNA, 246 bp, Glycine max
gtgctgtgcaggtcaaggcccttttacttgttcgtccggttgttcccatcttctctctcgtaccaatcaaatcacacttttgtgttgtgttgggaaacctaaaccccgttttcggtgagatcgagatcgatcgaacatggatgaggagtacgatgtgatcgtgttgggcacgggtctcaaggagtgcattctcagcggtcttctctccgtcgatggcctcaaggttctgcatatggataggaacga

SEQ ID NO: 132265 - DNA, 246 bp, Glycine max
gaagacataagggaacttttctctgagcttggagagttgaagcgttttgctgttcattatgacaaaaatggacatccaagtggttcagctgaagtcgttatactagaagaagtgatgcatttgctgcccttaaacgatataataacgtacttttggatggaaagcccatgaagattgagattgttggttccaattcagaattgcccataagtgctcgggtaaatgtcactggggtgaatggacgta

SEQ ID NO: 132266 - DNA, 248 bp, Glycine max
agttaccgaagcataacaatgtgtcttggaggggaaactcggggatgcaagatgggaaatcttcggatcattctgctgcgattaaggatctggtgggaggtactatgatgcaggggatgctatcaagtttaactttcctgcttcgttttccattactatgttgagttggagtgtgattgagtacagtgcaaagtatgaggctgctggggagcttgatcatgtgaaggagattatcaagtggggtactg

SEQ ID NO: 132267 - DNA, 247 bp, Glycine max
gtggattcagtccttgcctccagaagaacatagccatgggatatgtgaaatctggattgcacaaggcagccaccaaagtaaagattattattcggggaaacccaatgaaggagtcgttacaaaaatgccatttgtaccaacaaaatactataagccttcctgatttacttctgtatttatatcttaaacatttcctaattgctctctcccttgttgacaaattttcccataatcgagtgttacagtc

SEQ ID NO: 132268 - DNA, 251 bp, Glycine max
gtgctctgctcgtgcctctagggttatcatatctccatttccatttcctctctctcagtttccaagaatcttaagctatgggaaagtcttacccaaccgtggcgctgattaccagaaggccgttgagaaggcgaagaagaagctcagaggcttcatcgctgagaagagatgcgctcctctaatgctccgtttggcatggcactctgctggaacttacgacgtgagctcgaagaccggtggtcccttcggaa

SEQ ID NO: 132269 - DNA, 252 bp, Glycine max
ggaagaagagaagattttcatcagttgagttgagagaaggaaagggaaaatgggtaaggatctgagcgaggaacaagtgtcttccatgaaggaagccttctctctattcgacactgacggagacggtcggatcgctccgtcggagctggggatcctgatgaggtctctgggaggtaacccgacgcaggcccaactcaaagccatcgtggctgaagagaacctcacggcccccttcgacttcccccgattcct

SEQ ID NO: 132270 - DNA, 246 bp, Glycine max
attctggtgaatgcgtagaaaaggaaaataaagaaattagcgtgaaaaatgttgggtgtgttcagcagctccatagtgtcgccgccggaggagctcgttccgccgagcgccgtacaccgtcgccgaagatgacggcggcggcgctgcggaagtggttcgaggagaagaacccctccgcagtgtcggtggaggtcggagagcatgtccagctcgcttatacccaccagaacgagtcgccgtttcagc

SEQ ID NO: 132271 - DNA, 247 bp, Glycine max
agcaagaacactgttccaatacggaatctaaggcaaagcaaaccaaacatcttgaatcatgggttcaacaggtgagactcagattaccccaacccacgtactgatgaagaagcaaaccttttcgccatgcaactagccagtgcttctgtccttccaatgatcctcaaatcagcacttgagcttgatctgttggaaatcatagccaaggctggccctggtgttcatctttcccccactgacatttctt

SEQ ID NO: 132272 - DNA, 250 bp, Glycine max
gcaccagcaacaacagagaatgaacagtactgaggaggggatgcaaggcataggcataggcataggctgcttccaaaacgacgtcgtagggcagctggagtgagtcccactatgagcaactcctcctcctcgctatccatggagctggacgagtccccggagagcagaatccaacggttgatatcggagcacccggtcatcatcttcacccgatcctcctgctgcatgtgccacgtcatgaagaagctcc

SEQ ID NO: 132273 - DNA, 234 bp, Glycine max
cgcaagcaaaaagaaagaatcccaggcgaggagaaagatggaggggaaggagcaggatgtgtcgttgggagcgaacaagttccccgagagacagccattgggacggcggcgcagagccaagacgacggcaaggactaccaggagccggcgccggcgccgctggttgacccgacggagtttacgtcatggtcgttttacagagcagggatagcagagtttgtggccacttttctg

SEQ ID NO: 132274 - DNA, 247 bp, Glycine max
gttgcttcggtgttgaatcatggatcagaaagtcgatttcagtgctccgcattccatgggaaccactatcatcggcgttacttacaacggcggtgtcgtctcggagccgactctcgaaccagcactggagtgtatgttgccaaccgagcatcggacaaaatcacacagctcactgataatgtttacgtgtgtcgctctggatcggctgctgattctcagattgtctctgactatgtgcgctacttcc

SEQ ID NO: 132275 - DNA, 246 bp, Glycine max
gatggctaggtctagtgcttatcctttgttcttgatttcttccattctgtttatttcacacatttatgcctcccaagtagaagccaagcccccagtagtaagggactatcatattctttctattccaaaacatgccccaagcttgagtccattgtgaggaaacatctcaagaaggtgctcacggctgacaatggccaagctcctgccttactccgcatagtcttccatgatcgctgagttcatgga

SEQ ID NO: 132276 - DNA, 244 bp, Glycine max
caatatattccattctctctgtgtatttccctacctctcccttcaagatgcagatcttcgtcaagaccctcaccggcaagaccatcacccttgaggtgaaagctctgacaccatcgacaacgtcaaggccaagatccaggacaaggaaggaatccccccggaccagcaacgtctcattttcgccggaaagcaacttgaggacggacgtacccttgctgactacaacattcagaaggagagtact

SEQ ID NO: 132277 - DNA, 247 bp, Glycine max
aacaacttctgctacttcctactccaaccgcacttctgttccgcaattatcatgggataggtcaagatcggaatcaacggatttggaagaattggccgttggtagccagagtggctctgcagagagacgatgttgaactcgttgccgttaacgaccctttcatcaccaccgattacatgacatacatgtttaaatacgacagtgttcatggacactggaagcatcacgatgtcaccgttaaggacga

SEQ ID NO: 132278 - DNA, 251 bp, Glycine max
cgaagactagatctgatctgagagaatggctcctcggtctagcagcaaggacgcccaagaccttttccgcgctctttggtctgcttatgctgcaacccccataatctcaagatcattgatctctatgtcatctatgccgtattcaccgctttcatccaggttgtttacatggctttggttggatcatttccatttaactccttcctatcaggagtactttcttgtgtaggaactgctgttcttgctgtttg

SEQ ID NO: 132279 - DNA, 247 bp, Glycine max
gttacgccgtcgtcgctgtttgtgtgtgtatcaggtgcagctaccaacgatggtgaagggtcgtcaaggagagcgcgtcagactctacgtgaggggtcaatccttggatacaaaaggtccaagtccaaccagtacccaaacacatccctgatccaaattgagggagtgaacaccaaagaagaagtaggatggtatgctggcaagaaaatggcctatatctacaaggctaaggtgaaaaaggatggaa

SEQ ID NO: 132280 - DNA, 248 bp, Glycine max
ccgaaattctaaaaagaaaggaaattcttagaaaagtttttgctggatttgatcctaatactgtggccaaaatggaggagaaagaaatcatggaaatagatcaaacaaagaagttttgttagccgattgcagagttaggtgcatagtagacaatgccaaatgcataatgaagattgtgagggaatgtggatcattcagctgctatatatggggctatgtgaatcacaaaccagtgattaacagataca

SEQ ID NO: 132281 - DNA, 248 bp, Glycine max
gtatcgagccgaatcggctcgagctctctgtgtatttccctacctattccttcaagatgcaactcttcgtcaagaccctcaacggcaagaccatcaccctgaggtggaaagctctgacaccatcgacaacgtcaaggccaagatccaggacaaggaaggaatccccccggaccagcaacgtctcattttcgccggaaagcaacttgaggacggacgtacccttgctgactacaacattcagaaggagt

SEQ ID NO: 132282 - DNA, 246 bp, Glycine max
tcctgccagtagtcatatgcttgtctcaaagattaagccatgcatgtgtaagtatgaactaattcagactgtgaaactgcgaatggctcattaaatcattatagtttgtttgatggtatctactactcggataaccgtagtaattctagagctaatacgtgcaacaaaccccgacttctggaagggatgcatttattagataaaaggtcaacacaggctctgcctgttgctttgatgattcatgat

SEQ ID NO: 132283 - DNA, 236 bp, Glycine max
gagcacacacaaacccgtccctcacactctccaaaccctagcggcactacacactagttctatcgctatctccccaagatgtcgagcgccgatcccgacacagagaagaggaggaggcacccgccgttggcgacgacgaggacaccggagctcacgtcgctccaatcgtcaagctcgaggaggttgctgtcaccaccggcgaggaggacgaagatgaaatcctggatctcaaatcg

SEQ ID NO: 132284 - DNA, 248 bp, Glycine max
ctcgagccgaatcggctcgagcggctcgagcgaagagaacagaaaggatgtttgagccacagcagctatacactcgcgcgaggaccgaggaattcgcctcgaatcaggagaaaccctctacccagggctgagcgtcggcgagaaccagctccgatggggtttcatccgcaaggtctacggcatcctctccgcgcagatcgtcctcaccaccctcgtctccgtcaccaccgttttctatactccaatca

SEQ ID NO: 132285 - DNA, 244 bp, Glycine max
cctttgttcactcttcttctcttgcggctagggttttagcgcagttccttctagatttaaggaagatgggtaaggaaaaggttcacatcagtatttggtcattggccatgtcgactctgggaaatccactaccactggtcacctgatttacaagcttggtggcattgacaagcgtgttgttgagagggttgcgaaggaagctgctgacatggacaagagggctttcaagtatggctgggtgctc

SEQ ID NO: 132286 - DNA, 239 bp, Glycine max
ctagtcctgttatttctcagcgcgtaaagcatggctttgttggtggagaaaaccacgagtggtcgcgagtacaaggtcaaggacctttcccagccgacttcggccgcctcgagatcgagctggccgaggttgagatgcccggcctcatggcctgtcggaccgagttcggcccctcccagcccttcaagggggcccgcatcaccggctccctccacatgaccatcccatcgaccgttctc

SEQ ID NO: 132287 - DNA, 243 bp, Glycine max
gattacccatagatagagagcgcggcataacctaaacttacccttcttctctctgtgtgtgtgcgcatcaaacgcaaccagaagcagccatggcactgcaagaactgtgaaggacgtttctcctcatgagttcgtcaaagcttactcttctcacctcaagcgatctggcaagatggagctgccagagtggactgatattgtgaaaactgcaagatttaaggagttggctccttatgatcctga

SEQ ID NO: 132288 - DNA, 243 bp, Glycine max
agaaggtccagatttccgtgacttgtctcctgagcaaatgaaggatgtcataccaagaatccaggtgatggcacgatccttaccgctcgacaagctaagttagttaccactttgaggaaaatgttcggtgacgttgttgctgttactggcgatggaactaatgatcgtcccctgcacagcgtgaggcagacattggacttgcaatgggcatagcaggaactgacgtcgctaaagaaaatgctg

SEQ ID NO: 132289 - DNA, 275 bp, Glycine max
cgcgtgcgcgggctccggctcgaggtcgctttcagctccggtaacctctccttctccgccgccgttgctatctccgccgcgaccttccatccctcaacgccccacagatcttcaatttgattgctgggtcaacaatttctgtcattctcaatcatggcaactagacttcagtttgaaaataattgtgaagttggagtcttctctaaactcaccaatgcttactgtttggttgcgattggaggttctgaaagcttctacagtgtatttgaagctga

SEQ ID NO: 132290 - DNA, 240 bp, Glycine max
ctctctctagagtaattgcggaatcagctagaattttctaataatggccaaagacgttgagcaggttacagagcaaggtgaatactccgcgaagattaccatgacccacctccggcgccgttgatcgacccagatgagctcactaagtggtccttgtacagagccgccatagctgagttcatagcaacactccttttcctttacatcaccgtgttgaccattattggctacaagagacag

SEQ ID NO: 132291 - DNA, 216 bp, Glycine max
gacatcgaagagcttctttacagctcagtggagaatgaggaacacatatgcgtattgaaggaccgcaacaaaccaataatcttcaccatggcaaggttgaccgtgtgaagaacatcacggggcttgtcgagtggtacgggaagaaacgaaggcttcgcgagttggtgaactggtggtggtggctgaagacaggaggaaggattcgaggctttgaaa

SEQ ID NO: 132292 - DNA, 245 bp, Glycine max
tggaaaactgctctttccaaagacaatgttgatgatgtgaagatttccaaccgattagataacactccttgtgtagtggtgacatcaaaatttggtggagtgctaacatggagagaatcatgcagtctcaaactttgtcagatgctagcaagcaagcatacatgcgcggcaagagggttcttgagatcaatcctaggcaccctattatcaaggagctccgagagagagtagtaaagaaccctgag

SEQ ID NO: 132293 - DNA, 247 bp, Glycine max
caggaggttaaataataacagccttacaggatcctgccctcagtctcttagcaacattgaaggtctaacccttgtggacctctcctacaacaatctggtggttccctgccaagaatatcagcaagaactttaaagattgtgggtaactctttaatttgtggcccaaaagcaaacaactgttctactattttaccagagccactttccttccctccagatgcactgagaggccaatcagactctggta

SEQ ID NO: 132294 - DNA, 244 bp, Glycine max
gccacaccctgcttcgtgaatcttagtgcatcaagatctctgtctctctgcaatcgaaaatgagcaagggaccgggtctcttcaccgatatcggcaaaaatccaaagatcttttgactaaggactacagctccgatcagaaactcaccgtttcctcctacagcgtctccggagtgaccctcacttcaacatctgtgacgaaaggaggactctcaacaggggatgtggcagcactgtacaagtat

SEQ ID NO: 132295 - DNA, 241 bp, Glycine max
ttggaccatatccaatatcacagctggtaataaacagcagattcaggctgtgattgaggctaatctaattgctcctttggtcaatctgcttcaaatgctgagtttgatatcaagaaagaagctgcttgggctatctcaaatgctacatccggtggttctcatgaacaaatcaagttcctagtaagccaagggtgtattaagcccttgtgtgatcttctcatctgtcctgatcctagaattg

SEQ ID NO: 132296 - DNA, 232 bp, Glycine max
tgagtggagagggtggtgaagaaaccaaagatatccttctcctggatgtggctcccctcactctcggaattgaaactgttggtggagtcatgacaagttgattcccagaaacactgttatcccgaccaagaaatctcaagtgttcaccacctaccaggaccagcagactaccgtctccattcaggttttcgaaggtgagaggagtctcacaaaggattgtcgccttcttggg

SEQ ID NO: 132297 - DNA, 243 bp, Glycine max
ctcacactccctcacttaaaacagtttgttttggcttagctttggcttctctgatcaacaagggatgtgttctaacattctttcttgagtggcggagcagatacacattctccgacggaggagaggcttggctacagcctggcaaaccggcaagtcacaaaaaaggcaatggactccattggggtctctatggctatgtattgctcatgtagttcttcttgctgtagaatgtaataataaaca

SEQ ID NO: 132298 - DNA, 243 bp, Glycine max
cacgctctctaattacatttctaatctcattctccttctgttcaaacactctcatggcatcagataagaagattaggatcggcatcaacggatttgaaggattggccgtttggtggccagggttgcccttcaaaggaatgatgttgaacttgttgctgtcaacgatcctttcatcaccactgattacatgacatacatgttcaagtacgacaccgttcatggccagtggaagcattttgatgt

SEQ ID NO: 132299 - DNA, 235 bp, Glycine max
  unsure (1)..(235): unsure at all n locations
ctcttctcactgcatcgcttcaggttcttctgaaaagatgtctcgcgtgtatgttggtaacttggattcacgagtcaccgagaggatctcgaagacgaattccgcgttttcggagttattcggagtgtttgggttgcacgtagaccacctggtncatgcttttattgactttgatgaccgcagagacgcacaggatgctatccgtgaattggatggcaagaatggttggagggtt

SEQ ID NO: 132300 - DNA, 243 bp, Glycine max
  unsure (1)..(243): unsure at all n locations
gggatctgacaaggataagcgcaaagatgctttggagaaggagnagnaatccaagangtctgtcaacatccnctgagtntctgaagccagctgaagggacaggtactaccctggtgggcgtggtcggggacgnggccgtggttctagaggaggttacagtggananncatacancaatgctccagctccatcanttgaggatcctgggcacttcccatccttgggtggcaagtgaggttttcc

SEQ ID NO: 132301 - DNA, 239 bp, Glycine max
gccagagtggccaccatgtccgactttatctgccagagataaagccggaagacagccaaaaactaccaattgtcctccatttccacggcggcggttttgcataagtgaaccggactggttcatgtactaccaagtctacacccggttcgcccggtccactcggtccatcgtggtttccccgttcctccgccgtgccccagagcaccgcctccccgccgccatcgatgacggctttgaca

SEQ ID NO: 132302 - DNA, 243 bp, Glycine max
ggatccttgtgaagcgtgatgagctcaccttggagggtattaagcaattttatgtcaatgttgaaaaggaggaatggaagctggacacactctggatctttatgagacattagctatcactcagagtgtcatttttgttaacaccagaaggaaagttgattggttgactgacaagatgagaagccgtgaccacacagtctcagcaacccacggagacatggaccagaataccagggacattat

SEQ ID NO: 132303 - DNA, 263 bp, Glycine max
acaacttggacagaagaaaacttctccaacaaatggctagagtagcaggcatttttctgtgcctcctgattttagtcatggatgttgcagctgggattcttggcttcgaggctgaaatagcacaaaacaaggttaagcacttaagattgtggatatttgagtgtagagagccaagtcatcaagccttcatgttagggttgggtgcagcagtgcttttgggactagcccatgctatagccaatttgcttggtggctgcaattgc

SEQ ID NO: 132304 - DNA, 261 bp, Glycine max
tctcgagcgctagctattagttcgattttgtagtaagtgaggtgccaatatggtgaagatacctcttggtactttggatgactcttttagcgctgcctctcttaaggcttatttcgcagagttccacgcaactctgatttgcgtgttcgctggtgttggatcagccatcgcttacaacgagcttacaaaagatgcagccttggatccaacggggctggtggcagtagctgtggcacatgcatttgcactgtttgtaggtgt

SEQ ID NO: 132305 - DNA, 259 bp, Glycine max
cttctttccaaatcccaactactactcacactcactgcagatctcaatccatggctaccatcgttagcatcaaggcccgccagatctttgacagtcgtggcaatccaaccgtcgaggtggatttgacatgctccgatggtacttttgctagagctgctgttccaagtggtgcatccactgggatttatgaggcccttgaattgagagatggaggatctgactaccttggaaagggtgtatcaaaggctgttgacaatgt

SEQ ID NO: 132306 - DNA, 257 bp, Glycine max
gaaatgatatggttgagtacttcggtgagcaattgtcaggctttgccttcactgttaatgggtgggtgcaatcctatggttcccgttgtgtgaagccaccaatcatctatggtgatgtgagccgcccaaagccaatgactgtcttctggtcatctctggctcagagctttaccaagcgcccaatgaagggaatgcttaccggtcctgttaccattctcaactggtcctttgttagaaatgaccaacctagatctgag

SEQ ID NO: 132307 - DNA, 253 bp, Glycine max
cttctttccaaatcccaactactactcacactcactgcagatcacaatccatggctaccatcgttagcatcaaggcccgccagatctttgacagtcgtggcaatccaaccgtcgaggtggatttgacatgctccgatggtacttttgctagagctgctgttccaagtggtgcatccactgggatttatgaggcccttgaattgagagatggaggatctgactaccttggaaagggtgtatcaaggctgttgac

SEQ ID NO: 132308 - DNA, 258 bp, Glycine max
gtaagcaagaggcatatgctggaccaaccaaacgtggccttccgtatggtgggatattgatgagtggatgtcagaccgaccaaacttctgccgatgcaagtcctgcaggaagcgctgccagtgcttatggagcttttagcaatgcaatacaggctataattgaggagactgatggtgcaatcacaaaccaagaacttgttcaaagggcaagagagaagctgaagaactccggtttcactcaaaaaccgggactctatt

SEQ ID NO: 132309 - DNA, 257 bp, Glycine max
tggagactcatttggttttgttgcttgctttgatcttcactgtagttgccggcgttggagcccaaggcccatccacctctcccgcgcctcccacaccccagtcttcacaacctcccatccagtcttctccgccacctgttccttcctcacctcctccggctcagtctccaccaccagcttccagtcccccaccagcttcagtcagctctcctccacctgcgtcgtctcctccttcatctccaccacccgcatctcct

SEQ ID NO: 132310 - DNA, 256 bp, Glycine max
cgcaacaaaaagaaagaatcccaggcgaggagaaagatggaggggaaggagcaggatgtgtcgttgggagcgaacaagttccccgagagacagccaattgggacggcggcgcagagccaagacgacggcaaggactaccaggagccggcgccggcgccgctggttgacccgacggagtttacgtcatggtcgttttacagagcagggatagcagagtttgtggccacttttctgtttctctacatcactgtcttaa

SEQ ID NO: 132311 - DNA, 260 bp, Glycine max
ggctgctaggcgtcaaccttaccgacacatatatacttccaatggattaacacttcatgacatagctctatcgttggccaatggtcaaaaccttaccacgggagacagtgatgatatgtgtgcagtatgtggagatggaggagatttgattctttgcaatggatgccccagggcatttcatgcagcatgcttgggtttacagtgtgaaccagacattggatagcaatgtctaagttgtagagatggtgccggtcaacgtg

SEQ ID NO: 132312 - DNA, 262 bp, Glycine max
cgagaacaaaaaaaaaaaaaaaaatccgggatccgctcttctcttggaaaattgaaaaccagaagtacgaccgaaagagaagagcgatttagaattgagagaagatggggttgccgtccacgaagctgttcagcaggttgtttgcgaagaaggaaatggggattctgatggtaggtctcgatgctcctggtaagacaaccatcttgtacaggctcacgcttggagaaatcgtcaccactatccccaccatcggattaaatgt

SEQ ID NO: 132313 - DNA, 264 bp, Glycine max
gtgaagcgcagaagcacgtttgggaaggggcaattcctctccagattcacctccacgaatccgaagtcaccactctccctcctcctccacccgctctcgtgttggcacctcggctaggttatttgcctttgctgatttcgctattgaagcctcagttcagcagcacgcttccacctggagtcgacaccatttggtttgagtacaaaggcctccctctcaagtggtatatacctactggagttctttttgatcttttgtgcgtgg

SEQ ID NO: 132314 - DNA, 262 bp, Glycine max
gaatatcatcacttaatttgaaggaaagatggtgagcgtagctgagatccgccaggcacaaagggcagaaggcccagcaaccatccttgccattggaactgcaaacccaccaaactgtgttgatcagagcacctatcctgactactacttcagaatcaccaacagtgagcacatgaccgagctcaaagagaaattccagcgcatgtgtgacaagtctatgatcaagaggagatatatgtacctaaacgaagagatcttgaaa

SEQ ID NO: 132315 - DNA, 263 bp, Glycine max
gctaggggaagtagaaaatgctcagcagtgttttaataagtgcatggaatcaggtaatgctgtttgtttggatcggagggttatagttgaagcagctgaaggtttacagaaggctcaggaagtggtcaagtgtataaataatgctgctgaacttttaaaagagaggacttctgatgcagctgttactgctttagaactagcttctaaggcattgtcaataagtttatactcagaaaaattgcttcaaatgaaggcagaggctc

SEQ ID NO: 132316 - DNA, 262 bp, Glycine max
gacagcctaaaactgggggcatgtgtggatgtgctcggtggcctcatacacattggcataggcagcagtgccaagcagacatgttgtccagtgcttgcagggcttgtggacttggatgctgcagtgtgtctctgcacaaccattagggctaagattctcaacatcaacatcatcatccctattgctcttcagcttctcattgactgtggcaagaccccacctgatggattcaagtgtgcagatagttagttaatatatattt

SEQ ID NO: 132317 - DNA, 222 bp, Glycine max
ctgtggtctaagtctcagtgtgagtaatgtctgagtcaagatgtggctgagaaatctgtaattccagtgcttcttctgatgacaacctgatgagtcgaaggctcttgtcttagttgagaagactcaagaagttgccgaagtgaaaccaactgagggctctgtcaaccgagatgcagtgcttgcaagagttgcaactgagaagagattgtcactaatcaaagc

SEQ ID NO: 132318 - DNA, 256 bp, Glycine max
ctctctagacttagattttgtgaatggctgaagtggaagagggacaggtcatcggcgtccacaccgttgatgagtggaagctgcaactccagaatgcaaaagactccaaaaaactgattgtggtggattttactgcttcctggtgtggtccatgccgttttatggccccagttcttgcagagattgcaaagaaaactcctgaattgatcttcctcaaagtggatgtggatgaagtgaggcctgttgctgaggaata

SEQ ID NO: 132319 - DNA, 266 bp, Glycine max
cgcacgaatatcttgttgtttggagcgatccgagaaaaactctgtaaacatgttggtttaccaggacctccttacaggtgatgagcttctctctgactccttccgttacaaggaaattgagaatggaatgctgtgggaagttgaggggaagtgggttgttaaaggagcagttgatgtagacattggtgcaaacccttctgctgagggtggaggagaagatgagggagttgatgatgcagctgttaaggttgttgacattgttgaca

SEQ ID NO: 132320 - DNA, 236 bp, Glycine max
gcagacttaacaacagcacaaagcgggttactgtctgttcaagctacgatctctctctctcgttcttagtgcctccttgccagaagttaaaatggcccaagaaactttcctattcacatctgaatcagtgaacgaggggcaccctgacaagctctgtgaccagatctccgatgctgtgctcgatggcatgcttggagcaggaccctgacaagcaggttgcctgtgaaacctgaacc

SEQ ID NO: 132321 - DNA, 257 bp, Glycine max
gtgcttctggatgactattgtgaggctgttgttggagattttggccttgcaaagctccttgaccatgctgattcccatgtcacaactgctgtccgtggcactgttggacacattgcaccagagtacctctccaccggccaatcatctgagaaaacagatgtctttggatttggcattctcttgttagagctcataactggaatgacagcactcgagtttgggaaaacagtgaatcaaaaaggtgctatgctagagtg

SEQ ID NO: 132322 - DNA, 257 bp, Glycine max
gattgttgtgactcgttcttcttcgtcgttatcttcttcttttgttgtttgtgtgtttgttttttctctcacctgaaaatgtcttgctgcggtggtaactgtggttgcggaagcgcctgcaagtgcggcaacggctgcggaggctgcaagatgtacccagacttgagctacaccgagtcaaccaccaccgagaccttggtcatgggagtggcaccagttaaggctcaattcgagagtgctgaaatgggtgttcccgc

SEQ ID NO: 132323 - DNA, 255 bp, Glycine max
atgactatatgctctactatatatgcccaatgcacacgcttttcactttgatggtgtatggagcattgggtatatataacaagtataatgaagttccctctgtgatggctgcaaagattttggcatgctttcttgtggtgatcttggtttgggaaatcccgggattctttgacatattttggagcccatttgctttatttttgggttatactgatcctgcaaagcctgatctccctcgaatgcatgagtggcatt

SEQ ID NO: 132324 - DNA, 253 bp, Glycine max
cttccgtgtctctgaaaataggcgacggaaccgccagatacagaagagcaacagtgtgttcctccgcagttaacattctcatgatagtctccgtcatcaccaccaacctcttcgccctctacgccttctcttcttccccaaaagaccctcattcccaccttcaccttcttgacaaaaacttctccctcatctctgagcaggtcaccctcattctccgagagatcgatatgtctcagaagaaacttgcccaaat

SEQ ID NO: 132325 - DNA, 259 bp, Glycine max
gcaaagcattgctcggactagattgtttttcaagctcatggaggaatgcttgcgtttatttgagcacaaaagacatgctgatggcatgttacttggctccagctctcgcaacccagtaggggaggcacctgcttccccaaagtactctgacagactttctcctgcaatcaacaattatctgtctgaggcctcaaggcaggaagtcaggcctcagggaacaccagataatggttatttatggcagagagtaaattcccag

SEQ ID NO: 132326 - DNA, 256 bp, Glycine max
gtcccattcattgcactgatagcagcgatggggatcgatcttaaggctgggggtaagagcaaaaagaccaaaagaacagcaccaaagtccaatgacatctacctcaaattacttgtcaagctttatcgattccttgttcgaaggacagacagcaatttcaatgctgtgatactcaagcgcttgttcatgagcaaggttaacaagcctccaatttctttgtcaaggttaattaagtatacgaaggggaaggaggata

SEQ ID NO: 132327 - DNA, 256 bp, Glycine max
ccatctcttgtttcttgctttctttcttcaccatgtcacttgctgggaaaatcaccactgaaatcggggttcatgcaaccgctacaaagtggttcaacctcttcgcaacacaactccatcatgttcaaaacctaactgatagagtgcatggaaccaagctgcatcaaggtgaagactggcatcacaacgagacagtcaagcactggacttataccatagatggtaaggttacaacatgtctggagagtattgaatc

SEQ ID NO: 132328 - DNA, 254 bp, Glycine max
ctcgatccgaatcggctcgagtttttttgcaggaaatttgtgaagcaggtggtgactggtgccctgccaagtgtgatattgcgttttatttttgtgcgcagttccacccgtgatgatattgttttctgctgtggagggttctatttcccgcagtgcaaggaagaagagtgcatgttttaaagtcttgtacttcacaatctggaacgtgttttttgttaatgtatttactggttctgttatcagtcagctctcag

SEQ ID NO: 132329 - DNA, 261 bp, Glycine max
tgatcaaaatattcgggaggtaacccttgagagtttgcggaagtccattggtgttgttccacaagatactgtacttttcaatgatacaatatttcataacattcactatggtcggctatcagcaacaaaagaggaggtctatgaagctgctcaacaagcagcaattcataacactatcatgaattttcctgataaatattcaactgttgtgggagagcgaggactaaagttaagtggtggtgagaagcaacgtgttgccct

SEQ ID NO: 132330 - DNA, 257 bp, Glycine max
aagccaaggagctcaaaaaggatgtttcctttagaaatctttcttatatatggctggcggtgttatgtggcactttgcctgtagcatcattctttccctttgtttacttcatggtgaaggattttaatattgctgaaacagaggaagacataagtacctatgctggatatgtgggatcatcaatgatgcttggcaggtctttgacatccatattgtggggtatgatttctgatcgctatggtagaaaacctgttatc

SEQ ID NO: 132331 - DNA, 255 bp, Glycine max
cagggttaagcggtgagatttgcgaatctgagaaatggcggattcttctcgggaggagaacgtttacatggcgaaattggcggacaggccgagcgttacgaggagatggttgagttcatggagaaggttgcaaagactgtggaggttgaggagttgacggtggaggagaggaatctcctctctgtggcttacaagaacgtgattggtgcgaggagggcttcgtggaggatcatatcctccattgagcagaaggag

SEQ ID NO: 132332 - DNA, 254 bp, Glycine max
aactcagccgtgtattttgaagttgagctagtgtcatttgagaaagagaaggagtcctgggatctgaacactgaagagaaacttgaagctgctggtaagaagaaagaagagggaaatgtcttgtttaaagctagtaaatatgcaagagcttccaaaagatatgaaaaggccgtgaagtacatagaatatgattcctcctttggtgaggaggagaaaaagcaggccaagaccttgaaggttgcctgcaatctgaa

SEQ ID NO: 132333 - DNA, 254 bp, Glycine max
atcgagccgaatcggctcgaggagatgaaacacttggtgagcttagcaagaaaaaagcaacagaaggtgtaagggttttaaacgcttgtttgggatgatagaacttcggttcctttgttaaaaaaagatgggttaatggccactcatgatcaagaaacagaggagtatttccggggcactgaagtgcattgtgttttatgccctcgcaatcctgatgatggtggaagctttgttcaggatttagaaatttccac

SEQ ID NO: 132334 - DNA, 253 bp, Glycine max
aaagggtccaattttttgaaaattattaccatcattcatattcatcaacgacccctcttctgtgcccacttccaaatcttctcctctcgctatgggttgcggctcctcccttccagataggggctcaaggcagttgggtcgacccaattcagagaatggtggagggcaggacgccaagaatctgagggtcaagcttgttctcttaggtgattctggtgttggtaaaagctgtattgttctacgatttgttcgt

SEQ ID NO: 132335 - DNA, 249 bp, Glycine max
gagatatcaatatattatgataatggagggatacaataagaaggttatgattgtggggatggtgttgggcatggccatgattgggatggccaatggccaatactcgttttgtcgcatgcccagcgatgggttggcggcatgcaagccgagtgtgagtggggactatcctgctgatccctccactgcttgttgctcagccattgccaaggctgatcttaaatgcttctgccgcttcaaggattcgggcct

SEQ ID NO: 132336 - DNA, 177 bp, Glycine max
tgtgactctgaggtccattgaatatgtctccgtcgttggatcttcctcccaagggtggcttcagttttgatctatgccgaagaaacgcaatgcttcataacaagggcctcaaagccccaacctttctcaaaactggcaccactattgtcggtttagttttccaggatggtgtcattc

SEQ ID NO: 132337 - DNA, 252 bp, Glycine max
ctcgagccgattcggctcgaggacgcttcgcaaatctcaatcgaagctcagaaaaatgagagccatcatcagcattcacataggtcaggccgggatccaggtcggaaactcctgctgggaactctactgcctcgaacatggcatccagcccgacggcatgatgccttttgactccaccttcggtgtagcccacgacgccttcaacaccttcttcagcgaaaccggatctggatcgatcgtcccccgtgctgt

SEQ ID NO: 132338 - DNA, 252 bp, Glycine max
gattgttgtgactcgttcttcttcgtcgttatcttcttcttttgttgtttgtgtgtttgttttttctctcacctgaaaatgtcttgctgcggtggtaactgtggttgcggaagcgcctgcaagtgcggcaacggctgcggaggctgcaagatgtacccagacttgagctacaccgagtcaaccaccaccgagaccttggtcatgggagtggcaccagttaaggctcaattcgagagtgctgaaatgggtgtt

SEQ ID NO: 132339 - DNA, 255 bp, Glycine max
cagactagagagagtaagagtaagagaagagatggaaagagtagcatcagtatctcggccactgaaaatatacttcctcccattcttctcaccggggcacctaatccctctggtccagctggctcgcttggtggcggcacgaggccagcacgtgaccatcatcaccacccccgccaacgctcaactcttcgaccagaacatcgacaaggacaccgcctccggccaccacatccgcgtccacatcatcaagttccc

SEQ ID NO: 132340 - DNA, 251 bp, Glycine max
agtcgctgctccgtaccagtttcactgcataaatttgagagaaaactctgcaaacatgttggtttatcaggacctccttacaggtgatgagcttctctcggactccttccgttacaatgaaattgagaatggaatgctgtgggaagttgaggggaagtgggttgttaagggagcagttgatgttgacattggtgcaaacccttctgctgagggtggagaagatgagggagtcgatgacgcagctgttaagg

SEQ ID NO: 132341 - DNA, 251 bp, Glycine max
gagttcctaaagccaaagaatctgaaggaggaaggagaggtgcccttgttctcttggcagctacccttttcacctctgcagcttccaattcttctgccaatgctgggatcattgaagatgcacttgagaggagcaaggccaacaaggaattgaatgacaagaagaggttagctactactggagcaaactttgcaagagcatacaccgtggaattcggtagttgcaagttccctgagaacttgactggttgc

SEQ ID NO: 132342 - DNA, 250 bp, Glycine max
ggctcgagccgaatcggctcagcggctcgagcggctcgagcgctctacaagagctcaaccgcgcgaaggaaatcattgactcacagaattttgcatcgcctttgaaccaggtgcacagcagaatatggctgatgcattggagtctgttcatcttttttaatcatgacaatgggagaacacaaataattgatctgttcaatcaggacaagtatctaaatgctatccaaactagtgctccacaccttttgcg

SEQ ID NO: 132343 - DNA, 248 bp, Glycine max
gtcgctccgcaccagtttcaccgcacgaatatcttgttgtttggagcgatccgagaaaaactctgtaaacatgttggtttaccaggacctccttacaggtgatgagcttctctctgactccttccgttacaaggaaattgagaatggaatgctgtgggaagttgaggggaagtgggttgttaaaggagcagttgatgtagacattggtgcaaacccttctgctgagggtggaggagaagatgagggag

SEQ ID NO: 132344 - DNA, 269 bp, Glycine max
catcaaagtactcaaattagcatggctgtcatggttgcattcttgaatttgatcatcatcttttcagtagtctctacaacaggcaagtcactgagcttaaactactatgcaaaaacatgccctaatgtggagttcattgttgccaaggcagtaaaggatgccactgctagggacaaaactgttccagcagcaattctgcgaatgcacttccatgattgtttcgttcgggggtgtgatgcctctgtgctgctaaattcaaaaggaaacaa

SEQ ID NO: 132345 - DNA, 266 bp, Glycine max
tgtgaatcaagaaccgctctgctatggctgctctgcaatacttggaatcgctgcgtaattcgcaccctgagctctccgattggtacaattcgctggcggatctgtaccagaagaagctctggcaccagctcactctcaagctcgagcagtttgtggctctcgccgtcttccaggctggtgatgctttaatacaatatatcacaatttcatcacagactttgagacgaaaatcaaccttctcaagcttgcacattttgctgttatag

SEQ ID NO: 132346 - DNA, 268 bp, Glycine max
gggagataaagaagacattgacattgctgttaaagcagcacgtcatgcatttgacaacggtccatggcctcgccttcccggctctgagagagcaagaatattgctgaaatgggcagaaataattgaggaaaacgcagaagaacttgcagcactagatgcgattgatgcggggaagttgtaccatatgtgtaggatgtggaagttccagcagcggcaaacactcttcgttactatgctggtgcagccgataagattcatggagaggtgt

SEQ ID NO: 132347 - DNA, 187 bp, Glycine max
acggtggcttgaagatgtataacatgccgcaacttcctgttgccggttgattgtctcttttgaggggatggttctgttccggctagatctagtttccattactgttctataaaactggttctgtttgtttccgtttttatgtaacctgttgtttgtagggaagacaatataaaactgctattatttt

SEQ ID NO: 132348 - DNA, 270 bp, Glycine max
ctcatcaatctcgtttgttctcactaactattacttcatcatgtcgtcgagcacagttggtcaagtcatcaaatgcaaagctgcggtttcatgggaggcagggaagccacttgtgattgaagaagtagaggtggcaccaccacaagctggtgaagtgcgtttgaagatcctctacacctctctttgccacactgatgtttacttctgggaagccaagggccaaactccattgtttcctccgtatatttggtcatgaagctggagggattt

SEQ ID NO: 132349 - DNA, 267 bp, Glycine max
ctcgagccgcatagctgcagcattagggtttttcatctgcttcaatggggaagggaacagggagttttggtaagagaaggaacaagactcacactctctgtgtgaggtgtggccgccgcagcttccatctccagaagagtcgttgcgccgcttgtgctttccccgccgcacgcactaggaaatataactggagcgcaaggcaatccgcagaaagaccaccggaactggcaggatgaggtacttgcgtaacgtgcctcgccgattcaa

SEQ ID NO: 132350 - DNA, 267 bp, Glycine max
tcctcgagccgaatcggctcgagcttttttcctttctctctctctctctctctctccctctatctttcattatatggaaacacaattctaaatgtcgtcgtttaaaaggttatagtgttgagtgcctcagcaaataagctaggaaatctcaaagtgcatgctgatgcgtatgcatctttgataatggaagagcttgaccctgatcataatggatatatagagatgtggcagctagaaactcttctgaaggaaatggctagtgcggaa

SEQ ID NO: 132351 - DNA, 267 bp, Glycine max
ccttccttttttgcgttcattctgttttcatagtgacgaacttctgaagaaatggcaaatcatcctttgacacactctcactctttccgcgagaggtttgatgaaactctcactggtcacaggaacgaaattttggcccttctgtcaaggcttgaagccaagggcaagggaatcctgcaacatcaccaagtggttgcagagtttgaagaaatccctgaggagagcagaaagaaactccaagatggtgtctttggagaagttttgaga

SEQ ID NO: 132352 - DNA, 267 bp, Glycine max
ctctaaagttgacatgtgggcaatgggtgctataatggctgagcttttctctcttcgtcctcttttcccaggtgccagtgaagcggatgagatttacaaaatatgtggtgtgataggcaatccaacctttgaatcatgggcggatggactcaaacttgcaagggatattaactaccagtttccacagcttgccggtgtgcatctttctgctttaattccgtctgctagtgatgatgcaatcagccttattacatcactttgctcctg

SEQ ID NO: 132353 - DNA, 263 bp, Glycine max
cttgctgtctacaaggaagttattgctgaccttaaggcagctggtgcttcatggattcagtttgatgagcctacccttgtcttggaccttgagtctcacaagttgcaagcattcactgacgcatatgcagaacttgcgcctgctttgtctggtttgaatgttcttgttgagacctactttgctgacatccctgctgaggcatacaagaccctcacatctctgaatggcgtcactgcatatggatttgatttggtccgtggaac

SEQ ID NO: 132354 - DNA, 263 bp, Glycine max
tcacagatgaggtttccattggggcatttcatgcaattgctagaaacagaattttagttgcctctgcagggaatgatggacccacacctggaactgttctcaatgtggctccttgggtcttcacaattgctgctagcacattagacagagactttagcagtaatttaaccatcaacaataggcaaattacgagagccagtcttttcgtaaatttgccacccaataaagccttttctctgatccttgcgactgatgctaagctt

SEQ ID NO: 132355 - DNA, 265 bp, Glycine max
atctcactcaccattcaccaacctgcttctctgttctcttctttcccttcccaagaagaagaagaagaagatgccttcttcagaatcatcaacagccttctccgaaaccatttgtgtgaccggcgctggtggcttcatcgcctcttggatggtcaaactcctcttggagaaaggctacactgtccgaggaacctcagaaacccagatgatcccaagaacgggcacttaaaagagtttgaaggagcttcccagagactaactctgc

SEQ ID NO: 132356 - DNA, 266 bp, Glycine max
ctttggtcttctattcagagggaaggatagtcttggtgaagaagttgtgaaaccatatactcctacaacattggatactgatgttggatactttgaattggttgtgaagatgtatccacaaggacggatgtctcatcactttagggagatacgtgaaggtgattacatggctgtgaagggaccaaaggaagagctggatgcctttgccattaagttccctaatcaattcaaagtttactatgttctaaatcagccaccagaaatat

SEQ ID NO: 132357 - DNA, 263 bp, Glycine max
cggctcgagaatttgctcacaaaggaggaaaaatggcacctttcgtttccctctctttgttgcttctctttctcaaccaccccctcctttccctctcaaccaaccctgaagggaacgctctgcatgctttgagaagcaggctttctgatcccaacaatatgttgcagagttgggacccaacactggttaatcctgtacttggtttcatgttacctgtgactccaacaatcatgtgattcgcttagacttgggcaactctaacg

SEQ ID NO: 132358 - DNA, 265 bp, Glycine max
gtttgccacttaggggaacaatcacagcatctggtgatcttgttcctttgtcctacattgctggtttgctaactggtagaccaaactccaaggctgttggaccctctggtgagattctgaatgccaaagaagcctttgaattggccaacatcggtgctgagttctttgagttgcaacctaaggaaggccttgccttgtgaatggcactgctgttggttctggcttggcctcaattgttctatttgaagccaacatcattgctgtc

SEQ ID NO: 132359 - DNA, 264 bp, Glycine max
ggccaggcaagccccactcaaccaccacacctctcctcgttcacgctacccctttctgctcttcttctacctttcaagttttaaaagtataaagatggcagagacattcctatttacctcagagtcggtgaacgagggacaccctgacaagctctgcgaccaaatctccgatgctgtcctcgacgcttgcctcgagcaggacccagacagcaaagttgcctgcgaaacatgcaccataaccaacttggtcatggtcttcggaga

SEQ ID NO: 132360 - DNA, 262 bp, Glycine max
cgagcatcatggcctcaagagcagtgttattgttggctatgtgtgtgcttccggcgatggttgtggccattcgcccagcaaagaaccctttttgcgtgaagggtcgtgtctactgtgacccttgccgtgctggttttgagacctcagctaccacctacattgctggtgctgagattatgttgcaatgcaagagcagggttagcaacgaggttgtgtacacgaagaaggggtacaccgactcaaccggagcatacacaatgta

SEQ ID NO: 132361 - DNA, 260 bp, Glycine max
ctcgagccgcttttgttgttctgtgtttgtgtttgttttttctctcacctgaaaatgtcttgctgcggtggtaactgtggttgcggaagctcctgcaagtgcggcaacggctgcggaggctgcaagatgtacccagacttgagctacactgagtcaaccaccaccgagaccttggtcatgggagtggcactgttaaggctcaatttgagggtgctgaaatgggtgtgcccgctgagaacgatggctgcaaatgtggacca

SEQ ID NO: 132362 - DNA, 258 bp, Glycine max
acacaatcagcctcaagaaacactataatgcctggagcatttacttctaggcttaacggattagtagaccatttcaagatggccttggattgcttctttgcagtttggtttgtagtaggaaatgtttggatctttggaggtcacacttctccttctgatgctccacaattgtacaggttttgtattgtgtttcttacctttagctgtatcggatatgcaatgccatttatactttgtgcaactatttgtcgctgcctg

SEQ ID NO: 132363 - DNA, 264 bp, Glycine max
tgcagagtgttattttgagtatcagcatcaatggctccaattgcagtgggaaacgtgattccagacggcattttggcttacttggatgaagaaaacaaaccccaaactgtctccattcactctctcgccaccggcaagaaagtcatcatctttggggttcccggtgccttcactcctacttgcagcttgaagcacgttcctggcttcattgagagagcagaagagctgaaagggaagggtgtggacgaaataatctgtatcagt

SEQ ID NO: 132364 - DNA, 263 bp, Glycine max
agcaaacgcaaagaacaaatccccctccaccgagctccaccctccttacttcgagatgattgcggatgcgatatcgtccttgaaagaccgcacgggttcgagccagccagcgatagccaagttcatcgaggacaagcacagcaaagtgctccctcccaacttccggaaacttctctccgttcagttgaagaactcgtcaaatcggagaagctttacaaggtcaaaaactcttacaaactttcttccgccacggacaaagagac

SEQ ID NO: 132365 - DNA, 258 bp, Glycine max
gcatcttctattcgctgggataaagcttttcctctgcaggggccttgtgcagtaaaccccctacgggcggtcgtccgtcgtaaagtagtccccgcgaactttcgggaagaggggtagtcttgtgcgtaacatagcatttctggtcgaacccgcccaacccaactaagacgaaccgaacctgacagaccatcttttttggggagggtactccgagtagtgggtacctcgtaggacctcgacccgcctactcgggtcttg

SEQ ID NO: 132366 - DNA, 262 bp, Glycine max
gtttcgggagaaaaagcaatccactcagagagctagaagaattcaacgatgcctcgctatgatgataaatacggcaatacccgcctctatgtggggcacttatcttcgaggactcgttcccgggatctggagcgtgccttcagcagatatggaagagttcggggtgtggatatgaagaatgatttcgccttgttgattttagtgatcctcgagatgctgatgatgcaagatataacttggatggtcgggatgttgatggaag

SEQ ID NO: 132367 - DNA, 259 bp, Glycine max
ctttctattctcataagataactaactcactttgtgtgatagagtctctcattctcatggctattaccggcgatattttccggcagagcataacggaaatgcttgcggagtccccttccggtgcgccagaacttcacgttctcgccgtcgatgacagcctcgttgatcgcaaggtgatcgaacggttgctgaagatttcttcctgcaaagtgacggttgtggagagtggaacgcgcgctcttcagtatcttgggttgga

SEQ ID NO: 132368 - DNA, 259 bp, Glycine max
gctagtttagttacgtacatagcttgaaaacacagtgcttgttcagactagtatcttccatggctccgaaagatagaatcctggttttgggacccacaggagccattggaagacacatagtttgggcaagtgtaaaggcagggaatcccacttttatattggttagggacacccctgcctctgttacaagccaaggcttgtcactgctgctaatcctgaaaccagggaagagctcattcagagcttccaaaattctgga

SEQ ID NO: 132369 - DNA, 259 bp, Glycine max
caagaatccaaattcaatacgtaattttagtattcaaagaatcttctttcataatcttatttttcagttattaaaccccttttttttaccaagttcaatattaataagattagtaaatatttatttgtttcgatgcaacaataaatttatatttttaataagtagttttattggttggataattggtcacactttttttatgaaatggattgaattgatattagtccgcatacagcaaactaattcgattaaatctaac

SEQ ID NO: 132370 - DNA, 260 bp, Glycine max
ctgtgatgactacttcaaactcacatacccctgtactcctggtgctgactactatggacgtggagccattcccattttttggaactacaactatggtgctgtcggagaagctttgaagattgacctactaagccatccagaatacatagagcagaatgccacccttgctttccaggctgcaatttggagatggatgacaccaatgaaaaagtcacagccctctgctcatgatgcttttgtcggcagctggaagcctacca

SEQ ID NO: 132371 - DNA, 263 bp, Glycine max
gacaaaagcaaaaggaaagaatatcaacaaggtaaagtagattccttactagacatggcgttgaaggacacattctacatatctcatggatcaccaactttgtccatagatgaatccattctggtcaggaagttccttcagtcatggaagaaggacgtgtttcctcaaagaccctcttcaattcttgtcatctctggtcattgggaaaccgcagttcccacggtcaacgtcgttgactccatcaacgacaccatctacgattt

SEQ ID NO: 132372 - DNA, 263 bp, Glycine max
cattataagaggtgaataccaaattacaaatggatatggcccagataaagcttccaaaatcatgagggatcactggaacacgtatatcactgaagatgatttcaagttcatgtcagaaaatggcttaaatgctgtgagaattcccgtgggatggtggacaaccctagacccaacaccaccaaagccatttgttgggggatccttggaagtgttggataatgccttcacatgggcagaaaagtatggaatcaaggtaattgtgg

SEQ ID NO: 132373 - DNA, 262 bp, Glycine max
actcgagccgaatcggctcgagttggaacctagttaccaacctccgctaacatttgttgtgactcaaaagcgacatcacacacgactcttctcaaacaatcatgacgacagaaatagcactgataagagtgggaatatcttacctggtattttttttttaacttctgtcattttctatcattagtgcattcaccaaccaaaggatatctgtgaaaatctaagaggaaatatgcctagatagcttgtcaaagggtcatctcag

SEQ ID NO: 132374 - DNA, 259 bp, Glycine max
cggctcgagctcactcactctgcactcaccactgccacacttcaatcgcactaatggctgtcaccttctcagatctacacaccgaagagggcatcaaatccctcgatcaattcctttctgggaaaacctatatttctggggatcagttgacaaaggatgatattaaagtgtatgcagctgttgttgaaagccaggggacacttttcctaatgctgccaagtggtacgatgctgtctcttctcaacttgctccaagcttt

SEQ ID NO: 132375 - DNA, 259 bp, Glycine max
tcgcaagcaaaaagaaagaatcccaggcgaggagaaagatggaggggaaggagcaggatgtgtcgttgggagcgaacaagttccccgagagacagccaattgggacggcggcgcagagccaagacgacggcaaggactaccaggagccggcgccggcgccgctggttgacccgacggagtttacgtcatggtcgttttacagagcagggatagcagagtttgtggccacttttctgtttctctacatcactgtcttaac

SEQ ID NO: 132376 - DNA, 256 bp, Glycine max
cggaggagcaagaagagacagcctacgattcctcggagaaggttgtggtggtcggaatcgacgagcacgacggcgacttggaggcgccgccgttctcatggcggaagctgtggctcttcaccgggcccgggtttctgatgagcatcgcttttctggatcccgggaacctcgagggggatcttcatccggtgccattgctgggtactcgctcctgtggctcctcatgtgggccacggctatgggccttcttatccag

SEQ ID NO: 132377 - DNA, 258 bp, Glycine max
cattttcatccaagccctcagatagacctgttccaaatgcgactttacaagttaccggtgctgttggttggcggagagaaggccttgtatacaaaaagaatgaagtcttcttggatattgtggagagtgtgaatcttcttatgtcttcaaaaggtgttgttctacgcagtgatgttacggggaagatcttatgaagtgctttctttctggaatgccggatttgaagttgggtttgaatgacaagattggccttgagaa

SEQ ID NO: 132378 - DNA, 258 bp, Glycine max
cagataccatagacaatgtgaaagctaagattcaggacaaggaaggtatcccaccagaccaacagaggcttatctttgccgggaaacagcttgaagatggaagaacccttgctgactataacatccagaaggaatctaccctgcacttggtgttgcggcttcgtggtggcatgcaaatctttgttaagactttgactggaaaaaccataactttggaggttgaaagttctgataccattgataatgtgaaggcaaaga

SEQ ID NO: 132379 - DNA, 256 bp, Glycine max
gaacatctgaaaatgatgaaaagttagaccactcgaagggatcaagacctgtagatgatatagttgttgatgaccaggacagaccattacggacttctcagctgcatactaaagatgttcaagctaaacctctcagtggttctgctaggagttgcactaaagttcacaagaagggcattgcacttggtagatcagtggaccttacaaagtacagtggctatgatgaattagttgctgaattggatcagctgtttga

SEQ ID NO: 132380 - DNA, 258 bp, Glycine max
taacaagatggcttcttttcatatccaatattcattccttgtgcttgtgcttgctatggtgatcacattgatgaaccctaccaatgcaaccctctctccccatttctatgataaagtttgccctcaggcattgccagttataaagtcagtggttcaacgagcaattatccgtgagcgacgcatcggagcatctcttctgcgcttgcatttccatgattgtttcgtaaatgggtgtgatggatcaatattgctagatga

SEQ ID NO: 132381 - DNA, 255 bp, Glycine max
catgaatctcatacatgcaaatttagaagatcgagtttctctatgtaataataaaagatatatgaaacattaattaatattccgggaagaattacaggtgtaagaaaagatgggcaaatccgccacttctttcacaggccatctaaagcatacacaacaggaacaaggaaaagaagaaaggtcacaccgacgaagaaggaagcgagacaaggtggcacaaaacaggaaaaactagacccgtttttgttggtggtg

SEQ ID NO: 132382 - DNA, 253 bp, Glycine max
gttggatcaaaatgtttaactttattccgggaatttcaagattccatcacaaaggtacactggaaagcaccttgtttcagtggtgatggtgagtgggtagttggtggttctgctagcaaaggtgagcacaagatttacatatgggatagagctggacatcttgtgaaaatccttgaaggactaaggaagctctgatagatttagcatggcatcctgtgcatcctattgttgtatctgtttcgctgaatggttt

SEQ ID NO: 132383 - DNA, 239 bp, Glycine max
ctaaaatcaaccatgggttcagcagctgagactcagattactccaacccatgtatctgatgaagaggcaaatctttttgccatgcaactagccagtgcctctgtactccctatggttctcaaatcagctcttgagcttgatctgttggaaatcatagccaaggctggccctggtgttcatcttcccccactgacatttcttctcagcttccaacacagaaccctgatgcacccgttatg

SEQ ID NO: 132384 - DNA, 252 bp, Glycine max
  unsure (1)..(252): unsure at all n locations
gtaattaataacaagctagctattagttcgattttgtagtaagtgaggtgccaatatggtgaagatagctcttggtactttggatgactcttttagcgctgcctctcttaaggcttatttcgcagagttccacgcaactctgattatacgtgttcgctggtgttggatcagccatcgcttacaacgagcttacaaaagatgcagccttggatccatcggggctggtggcnatagtgtgnnacatgcatttgc

SEQ ID NO: 132385 - DNA, 250 bp, Glycine max
gcagaagctgccatacggcgacgttgattccagtttgagggccttggccggtcgcgccgagggtttcggccgcctcgccattggtggcctccacggtcctctctatttcgtcaccactctttcagatgatggccctgggtcccttcgcgaaggttgtcgtagaaaggaaccgttgtggattgtgtttgaggtttcgggtacgattcatctttcatcgtacctcagtgtgtcctcatataagacaatagat

SEQ ID NO: 132386 - DNA, 248 bp, Glycine max
tccgcatccgctagctcgcgcaggcaccagcaggtgaggttattgtgatttgaatggagggaagtggaggtggcggtgcttcaccgtctgcaccgttgaagcaatacttacaggaattctcgaagctgtttcagtactatctggataaatccactccccatcccccctacaggtggattgggactttcgtcattgcatccatctacgttttgcgtgttgtttatgtgcaggggttttacattgtctct

SEQ ID NO: 132387 - DNA, 244 bp, Glycine max
tgccttagatgttctgggccgcacgcgcgctacactgatgtattcaacgagtctatagccttggccgacaggtccgggtaatctttgaaatttcatcgtgatggggatagatcattgcaattgttggtcttcaacgaggaattcctagtaagcgcgagtcatcagctcgcgttgactacgtccctgccctttgtacacaccgcccgtcgctcctaccgattgaatggtccggtgaagtgttcgg

SEQ ID NO: 132388 - DNA, 245 bp, Glycine max
attaaattcaatggaggctaggactaagatgtctgaagtgctaccattcatagtgatggtgattatggaaggttggaccataggactcacgatttttgcaaaaactgcaataactaatggaatgagtccatttgtgttcattgtttataccaatgctctggccactataatactgttcccttgtttctttttaccacaccaagaggacagaaaggagaggccatcttttactttctctttgttca

SEQ ID NO: 132389 - DNA, 243 bp, Glycine max
tttgtgtccaaaccgaaactgttctacgacaagcccttggagaaaggattaggcctgttctgactgtcaataagatggacaggtgcttccttgaactccaggttgacggagaggaggcttaccagacattccagagagttattgagaatgctaatgtgatcatggctacatatgaagatccacttctcggtgatgttcaggtctatccagagaaaggaacagttgctttttctgctggtttgc

SEQ ID NO: 132390 - DNA, 246 bp, Glycine max
aaacaaccttctttctttttctgtgagcctttctttcaggttcttaacttgatcagtgtgcagtgtccaaatcataagggtagttgcaaattgcaatggctaagcatgatgttgagggtggttccttctctgcaaaggactaccatgatcctcctccagcaccgttgattgatgctgaggaactcacacagtggtccttctacagggctttgattgctgagttcattgccacaatgctcttccttt

SEQ ID NO: 132391 - DNA, 249 bp, Glycine max
aacatatacaaattctctgtgttgtgttgtgtacttgtgttaattgtgttgttgttgtaggaaatttaagtgaagagagaatgatgatgaagtctgctatgtgtgcattggtgcttgtggcactggttgtggttgaagtggggcccatggctgaggctgcggtgacttgcaacccaacacagttgactccttgtcttccggcaattaattcaggttctgcaccttcgagtgcttgttgccagaagctga

SEQ ID NO: 132392 - DNA, 251 bp, Glycine max
gaacactattggagtaccagctggagggtggactgcatttagatttagagcagataatccaggagtttggttcatgcactgccacttggaggtacacacaacatgggggctaaagatggcctttttggtggacaatggcaaaggtccaaagcaatcagtgataccaccacctaaagatcttcccaaatgctaatgcgtcaatcatcaattaattatgcaatacacaaaagaaaggccttccaatgccgaaa

SEQ ID NO: 132393 - DNA, 246 bp, Glycine max
cgagcattacagggcaaaggactattctcttgctcatgctcccttctcaggtagcagttatgctgggggtcagtgggctgcaggtgatgaaccactttactatattgtatctctgaaggatgtagttattgccaaaccaagggatactgaagatcatatttcatggcttcttcagcatgggtggcatgaaaaagctttggctgtggttgaatctggtcagggacggagtgaactacttgatgaggt

SEQ ID NO: 132394 - DNA, 243 bp, Glycine max
attcgattctctctgcactcacttctagggttttctctgcgctataagcaatcatggcggatgaaacaccaaatgagatgaaggaggaggttccagaaattgttccttttgatcctaccaagaagaagaagaagaagaaaattacaattgtagatcctgctgatgaacctgtggagaaattggctgagaagacagaaaacctctcagtttccgagggggttgagactgcatttactggtttga

SEQ ID NO: 132395 - DNA, 246 bp, Glycine max
ctccgctctaaattctctgtctctctctctctctctcgatcaatcatggctttgcccaatcagcaaaccgtcgattaccctagtttcaaactcgtcatcgtcggtgacggtggtacaggaaagacaacgttcgtgaaaaggcatcttaccggtgaatttgagaagaaatacgaaccgaccattggagtggaggttcacccattggatttcttcacaaactgtggaaagattcgcttctactgttgg

SEQ ID NO: 132396 - DNA, 244 bp, Glycine max
ttcacaatttcgagatctgaaatcgaaatcgaaaccgaaactgaagagagagacaaaaaaatgagggagccatcgtcggtgggattcgaaggcaacggcgccgtttcttcgccgccgcaagctctcctcgagagactgaaagactacggtcaagaagacgctttcgccctctggtacgagctctcttacgaggaacgcgagtttctcatcaaggacattgagagtttagatctttcgagaattg

SEQ ID NO: 132397 - DNA, 242 bp, Glycine max
cctcgagccgaatcggctcgagggtttctcttcctcccttggagacaaagaagagccaccgacgcgacgccgttcgtgcatacttgaggtgccgctgtcatgtttgggcgtggtggaccaaggaggagtgataactccaaatattatgatattctcgggatttccaaaaatgccagtgaagatgaaatcaagaaggcctatagaaaggcggctatgaagaaccatccagataagggaggaga

SEQ ID NO: 132398 - DNA, 246 bp, Glycine max
cgcactgaattcgatcaatcaatccatcttcgattgccttgtttcgatcggatgaagatggccgatcagttatcgaagggagacgaattcgagaacaaggctgagaagacgctcagcggttggggcttgtatggctccaagtatgaagatgccgccgatctcttcgatacagccgccaattgcttcaagctcgccatatcatgggacaaggctggagcgacatacctgaagttggcaagttgtcat

SEQ ID NO: 132399 - DNA, 247 bp, Glycine max
ctcgagccgttcgcattgcacaagcactctctctttcccttaccctttttcaggtttcaacgctccaactatccatggcaaaccgctggctcagacccgaggtgtatccactgttcgctgcggttggtgctgctgttgggatctgtggattccaactggttcgtaatatctgcatcaaccctgaagtcagggtgaacaaggagggaaggaaggcaggagttttggagaactttgctgagggagagaa

SEQ ID NO: 132400 - DNA, 250 bp, Glycine max
tcgggttttgagaaaatgtattcattcaatgcaactcttctagatggtgtaaacaatacaataatcatgcaaggtttgccaggattgaactaccttgtagcagaagcagatggagctgaccctttgagagatcctagggtgcctggtaaacaacaatcagttatctcatttacaaagaaaactactcctggaatcaacgtagctcgtggagatgggtttcccactaaggtatttttcaatggcgaagaat

SEQ ID NO: 132401 - DNA, 247 bp, Glycine max
agaaaaggaaactcgtcaaacttagagagaaatactttcagcagaatggtggttccattttgctacagcaactctctacaagtgaaaactcctcccgaattactcaaattttcacagaagaagaactaaagaaagcaaccaacaacttcgacgagagcttaatcattggtagtggaggttttggaactgttttcaaaggatatcttgcagataacagagttgttgctgtcaaaaagtccaaaatagt

SEQ ID NO: 132402 - DNA, 247 bp, Glycine max
cttttcttattttgtcttctttccatttccctcctcacttgttctgagatcttgaaaaaaaaaaaaaaaaaagtgtttgaaaactgaagacccttttaggaataggagaatgcaggatccaacgttgttccaacccatgaaaccccattttcccgaacaggaacaatttaaatgcccgcgctgtgactccaccaacaccaagttctgctactacaacaactacaacctctcgcagccaggccatttt

SEQ ID NO: 132403 - DNA, 249 bp, Glycine max
gaaaatcaggtgaaatatagagtgaagaagacgaaatagatggttttggtgtctgaatcgtgaaaatgttcagaaaccagtacgacacggacgtgacgatcatggatgcccggcggggagcgctcgttccaggtggagtacgcgatggaggcggtgaagcagggctcggcggcgatatggctccgatccaatacccacgtggtcctcgcatgcgtcttcaaggctaactccgaactctcatcgtaccag

SEQ ID NO: 132404 - DNA, 244 bp, Glycine max
cattcaccaacctgcttctctgttctcttctttcccttcccaagaagaagaagaagaagatgccttcttcagaatcatcaacaggcttctccgaaaccatttgtgtgaccggcgctggtggcttcatcgcctcttggatggtcaaactcctcttggagaaaggctacactgtccgaggaaccctcagaaacccagatgatcccaagaacgggcacttaaaagagtttgaaggagcttcccagag

SEQ ID NO: 132405 - DNA, 243 bp, Glycine max
ccttatctgccaaagcacattttatacaggcagaaagagcaattcagtgatggagttggctatagctggattgatggccttaaggcccatgctgcaaaacatgtgactgacaaaatgatgcttaatgctggtaacatctaccctcacaacaccccaacaaccaaggaagcatattactacagaatgatctttgagaggttcttccctcagaactcagctaggctcaccgttcctggaggagca

SEQ ID NO: 132406 - DNA, 251 bp, Glycine max
aaatctttgtgaagacgcttactgggaagaccattactttggaggtagagagctctgacacaattgacaatgtgaaggccaagatccaagacaaggagggtattcctccagaccagcaaaggttgatttttgctgggaagcagcttgaagatggacgcacgctggcagactacaacattcaaaaggagtctacccttcaccttgtccttcgtctgaggggaggtatgcagatctttgtgaagactttgaca

SEQ ID NO: 132407 - DNA, 248 bp, Glycine max
cgaagtagtgctgtactttacaggagccaccaacatactgtacacgtttggtggacatgcagttactgtagagattatgcacgccatgtggaagccacagaagttcaagtacatatacttgctggccactttgtatgttttcactctaacgattccttctgctgctgccgtttactgggcttttggtgatgaacttctcaatcattccaatgcattctctctcctccccaaaaatcgatttcgtgatg

SEQ ID NO: 132408 - DNA, 249 bp, Glycine max
ctcaacttctgctcttccaactcctacaacgcttttctctgcactcatgggcaaggtcaagatcggaatcaacggatttggaagaattggccgtttggttgccacgagtcgctctgcaaagagacgatgttgaactcgttgccgttaacgaccctttcattaccaccgattacatgacatacatgtttaaatacgacagtgttcacggacactggaagcatcacgatgtcaccgttaaggacgagaaga

SEQ ID NO: 132409 - DNA, 244 bp, Glycine max
aaccaatcatctttagttcttcagtaatttattgtgggattctattctaagattttgagaatgtctagctgtgggtgtggaagcagctgcaactgtggcagcaactgcggttgcaacaagtactcttttgacttgagttacgttgagaagacaaccacagagactctagttttgggtgttgggcctgtgaaggcccaattcggagggtgctgaaatgggtgttgcatctgagaacggtggctgc

SEQ ID NO: 132410 - DNA, 243 bp, Glycine max
aagagtttgtggaatctagtgagagagagcagaggaaaaggggaagaaaaatgttgagtgcgacggcgatcggcgcgttattgggtttgggaacccagatgtactccaatgctctccgcaaactcccctacatgcgccatccgtgggaacacgtggtcggaatggggttgggcgcggtgtttgtgaaccagcttctgaaatgggaggcccaagtggagcaagacctcgacaagatgctcgaaa

SEQ ID NO: 132411 - DNA, 241 bp, Glycine max
acttcttcttgtgctggcataacttcaacaacttattctttgttctcgatctcacgatggctcatttggccctgtctcagatggctgtaactgttcctgttggcagcgatttgtctctcagaagatctgcggttaaggcacctaactttaacttttgggataaatcatgggcaccagtatttactttgtacttgaaggcaaacaactcaagtttaagaagtcgtcatgtggtattcatgtc

SEQ ID NO: 132412 - DNA, 192 bp, Glycine max
ctcacccttcagatctctctctctcactccctctcccttccttccataccacatacgatatagctgagaagacataaaaactggtgaagatttgctgcattggagctggccatgtgggtggcccaaccatggctgtgattgccttgaagtgtcctgagatcgaggtggtcgtggtggacattgctgctccac

SEQ ID NO: 132413 - DNA, 241 bp, Glycine max
aaagtttcttcctttctctgctctttgtcttctctgacacatttggggccttgttgagtgtgtttttgcaagagggtatggcgaaggacgttgaggttgctgagcgtggctccttctctgggaaggactaccaggaccctccaccagcaccactcattgatgctgaggagctcacaaagtggtccttttacagggctcttattgctgagttcattgccactttgctcttcctctacattac

SEQ ID NO: 132414 - DNA, 246 bp, Glycine max
ctgttttccttcttcctcgcatcaatggagttggacggcgttctcctcggcatgtgcaaccctctcctcgacatctctgccgtcgtcgacgacgctttcttgcaaaaatacggtatcaagttgaacgatgcgattctcgccgaggataaacacaaacctatgtatgaagaattggctaacaatcctaatgtggagtacattgctggaggtgctactcagaattcaatcagggttgctcagtggatg

SEQ ID NO: 132415 - DNA, 247 bp, Glycine max
tgaatttcaatttccctaggggcttaatatctcccctcacttgtgcctagccttatgtcatagtattatcattcattctcatctttctctcttctctctccacccaaaccctaactcccgaccctgttcccctctcgtatccgtcatgaaaggaggaaagtccaagaccgaatctaagagagccgatcccaaacttgctgtgaataagaagggagccgccaccaaggctaggaaacccgccggcaag

SEQ ID NO: 132416 - DNA, 246 bp, Glycine max
gcctctttctatagggggaggagctggtgcaaagaatgctattctcatgaatatgccaaatgctgttctttcaatgtggagatattttgttggagatcttgtctttgaagtttctaagatgacttctccttatattaaatgtacagtctctttcttcatagcatttggaaatttggctgatgacaccatcaattttgaggcctttccccacaagctggtgcagtttggagagttcaggaaaaagtt

SEQ ID NO: 132417 - DNA, 245 bp, Glycine max
atcgagtactgcaagaagcacgtcgaggccgcgaatcccgaagacaaaccctccgaggacgatctcaaggcctgggacgctgaattcgtcaaggtcgaccaggccacgctcttcgatctcatcctggctgctaactacttgaacatcaagagcctgctggaccttacatgtcaaactgtagccgacatgatcaaggggaagactccagaggaaattcgcaagacctttaacattaagaatgactt

SEQ ID NO: 132418 - DNA, 241 bp, Glycine max
gttttctctgatcgggatctggaagggaagcgaatcgacatgggtttcttggtgacgacgctgatcttcgtagtgatcggaatcatcgcgtgcctctgcaccagaatttgctgcaacagaggaccttctgccaatctatttcaccttactttggtaattactgcaacaatttgctgctggatgatgtgggcgattgtatatctggcacagatgaaaccactcattgtgcctatactgaacg

SEQ ID NO: 132419 - DNA, 240 bp, Glycine max
gctagttctgagtattctgatcgctccctgagagagctcgtcgcggcggttgcagaagaagattgcaagatgaagttcaacatcgcgaatcccaccactggatgccagaagaagctcgagatcgacgacgatctgaaactgcgagcattttgggacaagaggatctcacaggaggtcatcggagatgcactcggtgaggaatttaagggctatgtcttcaaaattaccggaggttgtgac

SEQ ID NO: 132420 - DNA, 237 bp, Glycine max
caagcacaagcacttctctaattccctttcacactctattacagatttcacaagtgcttacacttcaaatggctttggtagctcttcaatcacccaccacagccactccatcgtttagtccctttgaagaaaccagtcttagttacttagagacaccgtggacgaaaggaaagcgttctaagcgtagccgcacggagcaacaactgcaacacccttcatgcaccgaggaagagtacc

SEQ ID NO: 132421 - DNA, 242 bp, Glycine max
ctcgagccgaatcggctcgagcggctcgaggtgaatgcgtataaaaggaaaataaagaaatacgcgtcaaaatgttgggtgtgttcagcaactccatagtgtcgccgccggacgagctcgtggccgccggcagccgtactccgtcgccgaagatgacggcggcggcgctgcggaagcggttcgaggagaagaacccctccgccgtgtcggtggaggtcggagagcatgtccagctcgcttat

SEQ ID NO: 132422 - DNA, 245 bp, Glycine max
tcctatcgtagcaaagaaagaaagaaagaaaaccctagcttaccttttcaactttcaagatgcaaatcttcgttaagacactcactggtaagacaatcacccttgaggtggagagttcagataccatagataatgtaaagtccaagattcaagacaaggaagggatcccaccagaccagcaacgtctcatttttgctggcaagcagcttgaggatggacgtacacttgctgattacaacatccag

SEQ ID NO: 132423 - DNA, 248 bp, Glycine max
gcggactctcaccacaggtgtcaatggagagcttcacccttcaaggttttgtgagaaggacttgctcaaggttgttgatagggagtacacatttgcatacattgatgacccctgcagtggcacataccctttgatgcaaaagctgaggcaagtgcttgtggactatgcattggccaatggggagaacgagaagaacacgaacacatcaatcttccaaaagatcgcaacatttgaggaggagttgaaga

SEQ ID NO: 132424 - DNA, 245 bp, Glycine max
gtccaattctccttcgctttccctctttatctgaaaggtatggagtgttttgacttctggaagagataatggtgcagtgcctagacggattaaagcatttgtgtgctgctctggtaaattgttgtgatgccgattcgtcaaagcaacctacaggtttagaaaatccagaagttcttgcaagagaaacagtgtttagtgtaagtgagattgaagcgctatatgaattgttcaagaagatcagcagt

SEQ ID NO: 132425 - DNA, 243 bp, Glycine max
gcagagcttcaaatccagagagtatgtgagggagacatttgcgtggatgcactattactggttcctcaccaacgatggaattgagttcctcaggacatacctcaaccttccttccgaaattgtccctgccactctcaagaagcaggccaagcccgcgggaagaccattcggtggcccacccggtgatcgccccaggggcccacctcgctttgacggagagaggagattcggtggtgaccgtga

SEQ ID NO: 132426 - DNA, 241 bp, Glycine max
gttataaaattgcacattgagaagaaagtatgcagtgaagttaatgaatggatggtcgagataaggagttctgctaaaaatattggggaaacagcaattggtcatgctgtgacagttcgtcaaagggacaaggaaatgctagaacagcagaggaaggctgaggagcaaagtatttcaggactaggggatctagcttatactttggaagctgaagaacttgaagaagattcagttttacagt

SEQ ID NO: 132427 - DNA, 232 bp, Glycine max
  unsure (1)..(232): unsure at all n locations
ggaatgacagaggaaaagaaaacctcaaggcgaaaggcccttgccaagtggctgaaggagagcattctgagattaggtcctacatttatcaaagttggtcagcaattctccacaagagtggacattcttccacacaacatacgacagaanntntctgaacttcagnancaagngcctccanttccctcacagactactatatctattctcgaacaacaacttctacatcctt

SEQ ID NO: 132428 - DNA, 238 bp, Glycine max
cttcccttccctctcttcactatcactctctctctctctccatctctctcatccatcatgggagcagtgattctcccagatctcggcaccgagattttgattcccgtctgcgccatcattggaatagcgttcgccctcttccagtgggtcctcgtctctaaggtcaagctctccgctgcgagagacgcttcctccaacgccggcggcggcaaaaatggctacaacgattacctcatcg

SEQ ID NO: 132429 - DNA, 240 bp, Glycine max
gtgagaacaagaaaaagaggcgcaagatgagtggtagggtttctgggaaggtgaagtggttcaatgatcagaaggggtttggattcataagccctgacgatggcagcgacgatctcttcgttcaccaatctcagatcaaatctgacggtttccgaagcctcgccgaaggagagtccgttgagttcgccattgaatcggaatctgacggacgcgcgaaggctgttgatgtcactggccccg

SEQ ID NO: 132430 - DNA, 239 bp, Glycine max
gccatacaatgccactttgtctgtacaccaactggttgaaaatgcagatgaatgcatggttcttgacaatgaagcactttatgacatttgctttaggacattgaaactcagcacccctagctttggtgatctcaaccatctgatttctgcgaccatgagtggggttacctgttgtctgaggtttcctggacaactgaactctgacctcaggaagctggctgtcaatctgattccatttc

SEQ ID NO: 132431 - DNA, 243 bp, Glycine max
ccatctctgatctcactcaccattcaccaacctgcttctctgttctcttctttcccttcccaagaagaagaagaagaagatgccttcttcagaatcatcaacaggcttctccgaaaccatttgtgtgaccggcgctggtggcttcatcgcctcttggatggtcaaactcctcttggagaaaggctacactgtccgaggaaccctcagaaacccagatgatcccaagaacgggcacttaaaaga

SEQ ID NO: 132432 - DNA, 244 bp, Glycine max
gctttgccctgccgccgataacaattttctgtatcgtgtattttttttttccttgttcacagctctgcgagatcttcattcgccgattttaaaagatgagtaagcttcagagtgatgctttgcgtgaagccatttcaggaatcatggccgattccaaggagaagaatcgcaaatttgtggagaccatcgaactccaaatcggattgaaaaactacgatccacagaaggacaagcgtttcagtgg

SEQ ID NO: 132433 - DNA, 263 bp, Glycine max
ggctcgagggaatctcaaaaactactccttccagtttatctattccatcatacagtgaaaacagcaatgcctcaagtcttcccacaccaaggtctgagggtgaaatcttgtcttctcccaatcttaagcccttcacattcaatgagctaaagaatgccacccgaaattttcggcccgatagtcttctcggtgaagggggatttggatatgtctacaagggatggattgatgaacacacatttacggcttcaaaacccggatca

SEQ ID NO: 132434 - DNA, 266 bp, Glycine max
cggctcgaggttgttcttctctttcttttattgcttcctttcccattcttcatcttcttctctctgaaccgtactcaaactcactttcccacttatttatacaatgtcggcttacaaagaccaggatccccgtcttcatggcatcaaaactaagattcgtgtcgtccccaatttccccaaatccggtcttatgttcctagacattactactctattgcttgatcccaaagcattccaggactcactagatttgttcgtggagcggt

SEQ ID NO: 132435 - DNA, 268 bp, Glycine max
gctaagctaactgaactctctctcgttgttcccttggcctctcgctctataaatacacatcgcatcattctctcacttgcacattgaaatctgaaccttccggatttcgttttgctttgttcaggtagccagccagtcatggtgctcttcaatgtttcacgcgtagagaccactcccttcgatggccagaagcctggaacctctggtctccgcaagaaggtgaaagtgttcgtgcaacctcattacctccataactttgttcagtcaa

SEQ ID NO: 132436 - DNA, 235 bp, Glycine max
tcggacagagagtggggaaggaaaaacacagactaaatggcgccaaatgctctctttctcttctctttcctcgccatgctcctccttctgctccgctcaaccgccgccggccacaactaccgcgacgccctccgcaaaagcattctcttcttcgaaggccagcgctccggcaaactccccgccgaccagcgcctccgctggcgccacgactctgcattgcacgacggcgccaccg

SEQ ID NO: 132437 - DNA, 261 bp, Glycine max
catccatccatcaattccaatggccgatcagctcaccgacgaacagatctccgagttcaaggaagccttcagcctcttcgacaaggacggggatggttgtattaccaccaaggaacttgggaccgtgatgcggtcacttggccagaacccaactgaggcagagctgcaggacatgataaatgaggttgatgctgatgggaatggtaccattgatttcccagaattcctgaatctcatggctcgcaagatgaaagacactga

SEQ ID NO: 132438 - DNA, 263 bp, Glycine max
tctgattgttgtgactcgttcttcttcgtcgttatcttcttcttttgttgtttgtgtgtttgttttttctctcacctgaaaatgtcttgctgcggtggtaactgtggttgcggaagcgcctgcaagtgcggcaacggctgcggaggctgcaagatgtacccagacttgagctacaccgagtcaaccaccaccgagaccttggtcatgggagtggcaccagttaaggctcaattcgagagtgctgaactgggtgttcccgctgc

SEQ ID NO: 132439 - DNA, 239 bp, Glycine max
cgcgacgatccaagtgatagacactcgtcgcgatggaacgtgtagctgaatccgagcgaactctgtacccatacgtgactggatcctctgtagtcgctatcacctacaaagatgggattctaatggccgctgacatgggaggttcgtatggatctaccctgcggtacaagagtgttgagcgtatcaagcctattggaaagcattctcttcttggtgctagcggggagataagtgacttt

SEQ ID NO: 132440 - DNA, 245 bp, Glycine max
gttcttctaccttattttctttccctagtcaaggagattcatctctgcagcaggttgttttagaaaagaaaaaatgctgaagatttgctgcattggggctggatatgtggggggtccaacaatggcagtcattgcactgaaatgcccctcaattgaagtggctgttgttgacatctctaaatccaggattgcagcatggaacagtgaccagctccctatctatgagccaggccttgatgatgtgg

SEQ ID NO: 132441 - DNA, 166 bp, Glycine max
aatcgctcttcttccatcctttcctctcctctctccgcatttcccaagcagagcagatattagaagatggcagacgctgaggatattcaaccccttgtttgcgacaatggaacaggaatggttaaggcaggatttgcaggagatgatgccccacgtgctgtgtttc

SEQ ID NO: 132442 - DNA, 257 bp, Glycine max
gcgtagttagcttctcttttctgccgaaagctgcagaattgtgttgttttctctcctttgggggtcaaacaagcggttctcttcatgatgccaagtgttaaccctgacaaagattccgagccatttgttgagaccgatccaaccggtcgctatggtagatacagtgagttgctcggatgtggtgctgtgacgaaagtgtaccgtgcatttgatcaagaagaaggaatagaggtggcatggaaccaggttaagctgag

SEQ ID NO: 132443 - DNA, 258 bp, Glycine max
gccaaaatggtgaagataactcttggtactttcgatgactcttttggtgttgcctctcttaaggcttatttggcagagttccatgcaactctgattttcgtgttcgctggtgttggttcagccatcgcttacaacgagcttacaaaagatgcagccttggatccaacggggctggtggcagtagctgtggcccatgcatttgcactgtttgtaggtgcctccgtcgcagccaacatctcgggtggccatttgaaccca

SEQ ID NO: 132444 - DNA, 261 bp, Glycine max
cttagggttttccaattcacagagcaacacaacgaaccaacaatggcgcacctcagccgcagtcgcagccgcagcacgggcaagcagcgctggagcaggtgcagtgcttcggtcgcaagaagaccgccgtggccgtgacctactgccagcgcgggcgcggtctcatccagatccacggctgccccattgaactcgtggagccggagatcctccgcttcaaagccttcgagcctatcctcctgttgggtaagagccgcttcg

SEQ ID NO: 132445 - DNA, 252 bp, Glycine max
ggcttattattggtcttgatggtagtttcttaaaaacaccttttagtggtatattgttaggggcgatgggtcgagatcctaatgaccagtactatccttttgttgtggttgatgcttaaagcaagaacaaagactcttagaagtggtttctacaaaacttgttaaatgatattggtcatgagcagaagtgggtcttcatttcagatcaacaaaagggattagtcccagctttgcagaaactgctaccagttt

SEQ ID NO: 132446 - DNA, 267 bp, Glycine max
ctttcttcagtttggtataactttagccgaggtcaggcggagcactagctaagttcacaatttcaaaatggctaggggactaaagaagcatttgaaaaggctcaatgctcctaagcattggatgcttgacaaactgggtggtgcatttgcgcctaaaccctcatctggaccacacaaatcgagggactgcctccccctcattcttattctgcgaaaccggctgaagtatgctctgacataccgtgaagtcattgctattctgatgca

SEQ ID NO: 132447 - DNA, 227 bp, Glycine max
gttcgaacaagttcaggactggcatggacttctttcaccgcgcgaaggcggtgcgcctccgcagccaccacgacaagtacctcctcgcggaggacgacgaggattcggtgacgcaggaccgcaaaggctcctcgaaaagcgcgcggtggacggtagaatacgtggctgaatacgataacataattcgcctgaagagctgttacggcaagtacctcacggcttcaaac

SEQ ID NO: 132448 - DNA, 245 bp, Glycine max
ggggtgaggacaaccatagtgaccactccactcaacatagccatgcgtcgtggaacaataggcaaagagacagagacagatatgagaatcgtgaccatacaattccctagtgcacaagctcgtttacctgagggatgcgaaaatacagagtcaatcccctcccctgacttgatactagactttcttaaaggcaatcaggatgttggaagcccccttggaacacctactccttcaacaccgtcctc

SEQ ID NO: 132449 - DNA, 270 bp, Glycine max
aattagtgttcatgaatatgtacaagccatactttagtggttctaaattgaaaagcttctagctggtcataatatcaccattactgatggtattgacaaaactagtgcaactttgcaatttagaaagttagcagattgcgattttctcaagagaaactttaagcagatgtctaatgttttgtgggtggctcctgaggacaaggcgagtttatggtcacaacttcattatgtttcgtgtaataatctggaaatgcaagaagcttatcttgt

SEQ ID NO: 132450 - DNA, 256 bp, Glycine max
  unsure (1)..(256): unsure at all n locations
cttcatttgtaaagggtctcacagcgtaacagacttgaactacccttcaatcacattaccaaatctgcgcctaaaacccgtaaccattactcgcacagtcacaaatgttggaccaccagccacatacactgcaaatgtccactcgcctgctggatataccattgtcgttgtgccaagatccttgactttcacganaattggggaaaagaagaaagtccaagttattgtgcaggcaagcagtgtaactacgcggaga

SEQ ID NO: 132451 - DNA, 157 bp, Glycine max
ttcttttttcccgcagtcatgggcaaggtcaagatcggaatcaacggatttggaagaattggccgtttggtggccagggtggctctgcagagagacgatgttgaactcgttgccgttaacgatcctttcattaccaccgattacatgacatacatgt

SEQ ID NO: 132452 - DNA, 254 bp, Glycine max
gggagattcagctgggatcccgagtcaaaaactccaaccattgatgaaatagagttcaatgtcaagaggggaatgaaggtggcagtttgtggatctgtaggttctggaaagtctagtttgctatcaggaattttgggagaaatatataaacaatctgggacagtgaagaccagtggaacaaaggcttatgtgccacaagcagcatggatcctgactggcaacataagggacaacattacctttggaaaagagta

SEQ ID NO: 132453 - DNA, 255 bp, Glycine max
ctcgaccattcagttcaaggcctgctggaaacgatgtcattggtattgatttgggtacaaccaattcatgtgtttccgttatggaaggaaagaaccccaaagttattgagaattctgaaggtgcacgaacaacaccatctgtagttactttcaaccagaaaggggagctgcttataggtaccccagctaagcgtcaagctgtaactaacccaacaaacactctctttggtaccaagcggttgattggtaggcgct

SEQ ID NO: 132454 - DNA, 256 bp, Glycine max
ctcatatcctcaatcaccccctcgcactcgctcttcccttcctctggtggcgacaatgtcgactcctgctaagaagaggctgatgagagacttcaagaggctgcaacaagacccgcctgcagggatcagtggtgccccccaggataacaacataatgctgtggaatgctatcatatttggtcctgatgatactccatgggatggaggcacgttcaagttgacactccaatttactgaggactatccaaatgaaaca

SEQ ID NO: 132455 - DNA, 247 bp, Glycine max
ctggaagaggtcaaggatcacaaagagctgcagcagtggctgctctttcacaagttcttacggccgaaaagaaaaaatcacctgatggttctcctgttgctagcaggagtcctatcactcaaggtagcgctactgaaactaaaagtgactcctctgaagttgaagaagttgcagaagccaaggaaacagaggaactcccccctgagacaggtagcaatggggatttggaaccaaaacaagaaaatgt

SEQ ID NO: 132456 - DNA, 240 bp, Glycine max
ggcatttgggctatcaaggccaaaaacggtggcgttttacctcgccacgaccccaaacccaaacctgaaactcccactgaaaaaccacccaaattttaccccgctgatgatgtcaagacaccccttgtcaacaagcacaaacccaaaccagctaagctcagggctagcattacccccggaacagtgttgattcttcttgcgggtagatttaagggaaagagggtagtgtttttaaaccac

SEQ ID NO: 132457 - DNA, 243 bp, Glycine max
ccacacccccactctccccttcgcctccacctccaaatgggcccggcccaccccaaagcccaacccaaagcccctcctcaaaaccctctccgtcctcgaccgcgccctcatcggcgccgccgcgggcggtctcgccggcgccttcacttacgtctgcctcctccccctcgatgccatcaaaaccaagatgcagaccaagggcgcggcacagatttacaaaaacaccctcgacgcaatcgtgaa

SEQ ID NO: 132458 - DNA, 249 bp, Glycine max
cagcaagggaccttatcttgctcttcatctaagaatggcaaaggatgtgtgggtgaggactggatgcctccccggtttgagtcccgaatttgatgagattgttaacagtgagagggtacaacggccagaactcttgactgcaagatcaaatatgacttaccatgaaaggaagatggctggtctatgccccttgaatgctgtggaggttaccaggcttttgaaaggtctaggagctccaaagaatgcaag

SEQ ID NO: 132459 - DNA, 250 bp, Glycine max
aacgaaaccctcttcatcttgttctatctgtgacgcgcatcatggcctcaagagcagtgttattgttggctatgtgtgtgcttccggcgatggttgtggccattcgcccagcaaagaaccctttttgcgtgacgggtcgtgtctactgtgacccttgccgtgctggttttgagacctcagctaccacctacattgctggtgctgagattatgttgcaatgcaagagcagggttagcaacgaggttgtgta

SEQ ID NO: 132460 - DNA, 253 bp, Glycine max
gttgagctgagtgagtcacagttgttctcattgaagcagaagaagaaatggcggcttctctgcaactgttccaatgcaaactagcgagaccctttcggtccttccctttgcgaaggtcaactccccctctgagtctgaggtgttgcgcttcgcccccttcttcctacagcatcactctcattcccggcgatggtatcggccccgaaatcatctctgtggccaaagacgttcttgtcctcgtgggttctctcga

SEQ ID NO: 132461 - DNA, 251 bp, Glycine max
tctctcttggaccttcagatagaaggtgccaagtacatatttgaggcgagaacaattcgtaggatggagctacttgttctcggtgtcttagattggaggctaagctcagtaacaccactttgcttcctcgctttctttgcgtgcaaagtagattcaactggaacttttatccggttccttatttccagggcaacagaaatcatcgtatctaatatccaagaggctagctttcttgcttactggccttcatg

SEQ ID NO: 132462 - DNA, 257 bp, Glycine max
tgatggcaatggcaccattgacttccccgagttcttgaacctcatggccagaaagatgaaggacactgattctgaggaggagctgcaggaggcgttcagagtgtttgacaaggaccagaatgggttcatttctgctgctgaactccgccatgtgatgaccaacctcggggagaagctcactgatgaagaggttgatgagatgattcgagaggctgatgttgatggcgacggccaaataaactacgaggcatttgtta

SEQ ID NO: 132463 - DNA, 261 bp, Glycine max
tgcaattacaagtgcatactaccgaggagccgtgggtgctttgatcgtgtacgatgtaacccgacacgtgacattcgagaacgtggagagatggttgaaggagcttcgggatcacacagaagcatacgttgtggtcatgctggtgggaaacaaagcagaccttcgacatttgcgtgcagtgtccacagaagacgccacagaatatgcggcgaaagagaacatcgtattcatggaaacctctgcccttgagtccctgaacgt

SEQ ID NO: 132464 - DNA, 187 bp, Glycine max
ttcacgattttctgagattggggaatctatcatcgaggatgatgatggcaagatgagacccttggttctgaaaaacaagcctccaagatggcacgaacagttacaatgttggtgccttaatttccgtggacgagtaacagttgcgtctgttaaaaactttcagttgattgctgccacccaaccaccc

SEQ ID NO: 132465 - DNA, 266 bp, Glycine max
gagattgcaaaattctcttccgtttcaggattagtgtttcaccgttacagtgaaacatggcaaaaccaaagcgaatctctctgcgtctctttgcgctgctcctcttgatttccacctcttcgtttcagcttctccgcgcttccgatgacgccgatgatgatgcgatcttctatgattcgttcgacgaggattttgaagaccgttgggttgtgtctcagaaagatgagtacagtggtgtctggaaacatgccaagagtgagggacat

SEQ ID NO: 132466 - DNA, 260 bp, Glycine max
ctctcgcaatcttcaccacattcaccgagcatttgcattcacattgaatatggctgaggctacacaatctaatgctgagttgttggagtggcctaagaaagataagcgccgcttcctgcatgttgtgtatcgtgttggtgatcttgatcgcaccattaagttttatactgaatgttttgggatgaagcttttgaggaaaagagatattccagaggagaaatatgccaatgcttttcttggatttggccctgaacaatccc

SEQ ID NO: 132467 - DNA, 251 bp, Glycine max
tttctctctctttctttctcttcgagggtttgggtttctcttcctccctggaagaaaaagaagagtcaccgctacgacgccgttcgtgcttttttgaggtgccacagtcatgtttgggcgtggtggaccaaggaggagtgacaactccaaatattatgatattctcggggtttccaaaaatgccagtgaagatgaaatcaagaaggcctatagaaaggctgctatgaagaaccatccagataagggaggag

SEQ ID NO: 132468 - DNA, 256 bp, Glycine max
ggcgccaccacccacgtccacaaagacgccggcagcaaccccacgtggaactaccccgtgaaattctccgtcaacgaatcgctggccaaggagaatcgtttgtctcttgagatcaagctcgtctccgaccgcaccctcggcgacaccgttatcggcaccgtccatgttcctctcagggaactcatggacaatcccggcgacgacggttccttccgccaagtcagttaccaggtgatgaaacagtcagggaaatcca

SEQ ID NO: 132469 - DNA, 258 bp, Glycine max
ctctctcacatttcattacttctaccaagctactacatttttaacttcctctttctacatttcattcaaaacaatcatggcttctcttcattccattacattttcaacaaaaactgtcctttatgtatttgtattggcctcttccatcgcagcctctgctggcaacttctaccaggattttgacgtaacttggggagatggtcgtgccaagatactcaacaacggcgatcttctcactctttcccttgacaaagcctc

SEQ ID NO: 132470 - DNA, 258 bp, Glycine max
ctcgagccgcaacgcttaacctctctcattccccatttcctcatctccttcaaccgctgctaaattctagggttccgaaatggacgctggcggaaagatcaagaagggcgccggaggtagaaagggcggcggcccaaagaagaagccggtttcaaggtccgtcaaagccggtctccaattccccgtcggaagaattggccgttatttgaagaaaggaaggtacgctcagcgtgtcggtaccggtgctcccgtatactt

SEQ ID NO: 132471 - DNA, 253 bp, Glycine max
ctgaaattgagttagctaaaagggtgaaagacttctccttcaaggagacagggttggatcagtatgctatagcaaaatttgctgaaagttttgaaatgattcctagaactttggctgagaatgctgggttgaatgcaatggagatcatatcttctctgtatgcagaacatgcatctggaaatgccaaagttggcattgatttggaagaaggcgtatgtaaggatgtctcaaccttgagcatttgggatctcca

SEQ ID NO: 132472 - DNA, 258 bp, Glycine max
cggctcgagagttatctaattacctcaattaatcccttaattgcaagcatcatggctgaggagaagcaccaccaccactttcaccaccacaagggcgatgatgtgcctggcgaggttgattataagaaggaggagaagcaccacaagcatcttgagcaccttggggaacttggtgctgcagctgccggtgcttatgccttgcatgagaagcatgaggccaagaaagacccagagcatgctcacaggcacaaggtagaa

SEQ ID NO: 132473 - DNA, 269 bp, Glycine max
gctgcctcctccgcctccattcccagtttcgacgccgccacctgccttgccttcgctgccaaacacggcttcggcgtccgcgccatcgccttggaagtcgccgacgcggaagccgctttcagcgccagcgtcgcgaaaggagccgagccggcgtcgccgccggttctcgtcgacgatcgcaccggcttcgcggaggtgcgcctctacggcgacgtggtgctccgctacgtcagctacaaggacgccgcgccatagccccacacgcagat

SEQ ID NO: 132474 - DNA, 256 bp, Glycine max
gtttacgatctcactctgcactctctccttctcatcctcttctcttcgcttctctgttcgtgccacttcttctcgagcaatggcatctcatattgttggttatccacgcatgggacccaatagagaacttaagtttgctttggaatctttttgggatggaaagagtagtgctgatgatctgcagaaggttgctgctgaccttaggtcagccatctggaagcagatggctgatgctggaataaagtatattcctagc

SEQ ID NO: 132475 - DNA, 258 bp, Glycine max
acaccaacaacgctttagctctctctcttctctccataaccgccacctgcgatctggcactaacagatcgccgctgctacatctgaatccgatccagccaacagatctctccaattcaaatggagaatctaatctctttggtcaacaaaatccagagagcttgcaccgccttaggtgaccacggcgaaaacagtgcactccccacactatgggactctctccccgccatcgccgtcgtcggaggccagagctcaggaa

SEQ ID NO: 132476 - DNA, 257 bp, Glycine max
tagcaacaacaattggatgaagagcaaataaaagagatgatctacagggaagcattagcactcaatcctgagtatgcttaaagcagaaaaactcaaggacttgaagcaggcttagaaggaaaaataataattcgttttcaatttttttaatcactttaagttcagttcttacaatcacgaaaggatcaagttgaatgaaaattcaaccttgttgccgatcaaactccctaggtaatttattcaatctgtgtgactag

SEQ ID NO: 132477 - DNA, 252 bp, Glycine max
tatggctctgaatctttgtatctcacctaagtttaaatgggttccttccttagatagtgcttcctattctttgagaccttcacttgggtcttgttttggtaacataaacattgctagtgtgagtctaagtactactagaagtttgagtttgaggaggagtgggagtgttagtgtaagatctagtttagaaactgcggggcccacagtcacagtgggacaggtcactgaggttaacaaggacaccttctggcc

SEQ ID NO: 132478 - DNA, 252 bp, Glycine max
tatcgagcgattcggctcgagcaatcatcctgcaaattgacaaaaaaactcaacatgttactacaagtgcccttcgacattctctacaggatagactaagcaaaggttcatctggtaggagccgtgatgaaatatatctcaaactacgtaccagtactgcgcctccattgaaattgattgacttgcctggattggaccagcggatagtggatgacaaaatgatcagtgaatatgttgagcacaatgatgcta

SEQ ID NO: 132479 - DNA, 251 bp, Glycine max
aagatggagaagtatcagatctggagcaggagaatagcgttggcagcgtttgcgtttgctctgctgttccaatcggcctcagcagacgacgtcgttgtgctctctgaagataacttcgagaaggaagttggtcaggacagaggagctctcgttgagttctatgctccttggtgtggacactgcaaaaagcttgctccagaatatgaaaagcttggtagcagcttcaagaaagccaaatctgttttaattgg

SEQ ID NO: 132480 - DNA, 249 bp, Glycine max
gtggttgttgccggagacaggaggaaggagtcgaaggacttggaagagaaggccgagatgaagaagatgtacggcctgatcgagacctacaagttgaacgggcaattcagatggatttcatctcagatgaaccgtgtgaggaacggagagctgtaccgtgtgatctgcgacaccaagggagctttcgtgcagccggctatatacgaggcttttggtttgacagtggttgaggccatgacttgtgggttg

SEQ ID NO: 132481 - DNA, 253 bp, Glycine max
cttctataaagaagaccttcatccaggcaaaacaatgaaagtacaattcaccaagcgtccctatgcacaaccttatggtgtatatacatggttaacggatattaaagacacctctaaagaaggatatagttttgaagagatatgcatcaagaaagaagcgtttgagggagaagagaagttttgtgcaaaatccttgggaacagtaattggttttgccatttcaaagctgggaaagaacattcaagtactttca

SEQ ID NO: 132482 - DNA, 257 bp, Glycine max
atccgcagctgctgttattcgcaccgcaaacaaacagtgagccatggccgtcggaaagaacaagcgcatctccaaagggaaaaagggtggcaagaagaaggcagctgatccctttgccaagaaggattggtatgacattaaggccccttctctttttcaagtgaaaaatgttggcaaaaccctcgtctctcgtacgcagggtaccaagattgcttctgaaggacttaaacatagagtgtttgaggtctccttggctg

SEQ ID NO: 132483 - DNA, 266 bp, Glycine max
ctcaccggccgcaagatcatcatcgacacctatggaggatggggtgcacatggtggtggtgccttctctgggaaggatcctaccaaggttgataggagtggtgcctacattgtgaggcaagctgcaaagagcattgttgcaaatggacttgctaggagggcaattgtgcaagtttcctatgccattggtgtgcctgagcccttgtctgtgtttgttgacacttatggcactgggaagatccctgacaaggaaatcctcagcattgt

SEQ ID NO: 132484 - DNA, 263 bp, Glycine max
aaaaaattagaaagtattgtgacatgacactactatcatgtgcctatgctggaactggaaatgtcctcaaggttcaaaatctgttgggtcattgttcacaacatcttgataaaggtgaaactcaccagggtcctgctgtgcttggaattgctatggtagctatggctgaagaattaggacttgagatggcgattcgatcattagaacatcttctacaatatggagagcagaatattcgccgagcagttcctttggcacttggt

SEQ ID NO: 132485 - DNA, 260 bp, Glycine max
aattcatcattttctctcttctctgcttcttcttgttcaaatcttaggagctgaggagaatcaatcgagagaaatatgtctggtatcgctcgtggacgccttgctgaggaacgaaagtcatggcgcaaaaaccatccacacggtttcgttgccaagcccgagactctacctgatggcaccgtaaatttgatggtctggcattgcactattcctggcaagaccgggactgattgggagggtggatatttcccactgacaat

SEQ ID NO: 132486 - DNA, 249 bp, Glycine max
gagacatcagtgcctccttctggtctccctggtgttggtctcctacgctgcccggtcggaatcagcgctgggcggctggagccccatcaaggacgtaaacgacagccacgtggcggagatcgccaactacgcgctgagcgagtacgacaagcgttctggggccaagctcacccttgtcaaggtcttcaagggcgagactcaggtcgtttccggcaccaactaccgtctcgtcctcaaagccaaggatgg

SEQ ID NO: 132487 - DNA, 252 bp, Glycine max
cggcaaaggacatggatcggataaaagggccatggagtcctgaagaggacgaagcgttacggaggttggttcagacttacggccctaggaactggtccgttataagcaaatccattccgggtcggtctgggaaatcgtgccgcttgcggtggtgcaaccagctgtctccggaggtggagcgccggcctttcacggcggaggaagacgaggcgatcctgaaggctcacgccaggttcgggaacaagtgggcca

SEQ ID NO: 132488 - DNA, 248 bp, Glycine max
cccaatttcattccatggccgattcaacctcaagcgattcactctctttagacatcgattccttatctccttcacctcaggaacatatcatcagaacacgtcatggttccgtatctgttgctgtatatggagaccaggataagccagctcttatcacatacccagatttggctttaaattatgtctcctgctttcaggggttattatttggtcccgaggcatattaccttctgctccataatttctgc

SEQ ID NO: 132489 - DNA, 254 bp, Glycine max
acctcttcggtataagctgaaaccagagaacattccgcccgaaaaaaagtactccttctggaagtaagggagctcaacttcgaaaacatattgatgccacgttaggtagtggaaatctgagggaagcagtaaagctacctcctggggaggatttaaatgagtggctagctgtcaacactgttgatttcttcaatcaggtgaatctgctttatggtacccttacagagttctgtactcctgagaattgtcggaca

SEQ ID NO: 132490 - DNA, 178 bp, Glycine max
gaaacagttgggtcggaagtcagacatgtacctattttgttgttcatatactcacaatgttgctccaaagggaaaatttattgcatttgtatcaaccgaggcagagacagatcagccagtcattgaactaaaacctggaattgaccttctaggacctgttgatgagatattttttgat

SEQ ID NO: 132491 - DNA, 261 bp, Glycine max
ctgctgcctcactctctcactctctcaggagtatataatctgagcgatgtcagatctcgaggctcccttgcgccctaagaggaagaaggtttgggtggactattttgttcagtttcgatggatccttgttatttttgtggtccttcccatctccttcaccatttatttccttacataccttggggatgtaagatccgagtggaagtcctataagacgcgtcagaaggaacatgatgagaatgtgaagaaggttatcaaacg

SEQ ID NO: 132492 - DNA, 259 bp, Glycine max
gcagaaggccatataatttttttttatttgaaataatgtccgggatcatccacaagattgaggagaccctccatgtgggagggcacaagaaagaggagcacaaaggagaacaccatggtgagcacaaaggtgaacacaaaggagaacaccatggtgagcacaaaggtgaacacaaaggagaacaacaccatggggagcacaaggagggacttgtggataagatcaaggacaagatccatggtgatggccatgacaaggg

SEQ ID NO: 132493 - DNA, 252 bp, Glycine max
gcaaaaggccatataatttttttttatttgaaataatgtccgggatcatccacaagattgaggagaccctccatgtgggagggcacaagaaagaggagcacaaaggagaacaccatggtgagcacaaaggtgaacacaaaggagaacaccatggtgagcacaaaggtgaacacaaaggagaacaacaccatggggagcacaaggagggacttgtggataagatcaaggacaagatccatggtgatggccatg

SEQ ID NO: 132494 - DNA, 247 bp, Glycine max
  unsure (1)..(247): unsure at all n locations
gtatcccgatcatagatcttcaagaggttaacaaaagttcatctctgcatgcttaagtggttgaccaaattggaagtgcatgcagaaagtggggtttttttcaggtgatgaatcatggtgttggtgttgatgttttggatgagatgatatgtggaatccgtaggtttcatgaacaagatgncaaggtaaggaaaaccttttactccagagatagcaataagagagtcagatatttttccaatggtgg

SEQ ID NO: 132495 - DNA, 248 bp, Glycine max
cttgctgatacattacattggtcagatatgcatcatgctatgtgccgaccatggtccttgtgtctctggtgctcacaatactattgtgacagcaagggcagggaaagacctagtttccagtctcgtatcaggtaaatacatgcctctaatctgtcaactactggtgtaggtattgtatctgatggggtgaccaaaactttttatgctaataatgccataaaatggttagtaacgagcttctgaatcag

SEQ ID NO: 132496 - DNA, 247 bp, Glycine max
agtacctctatattggggaattactgctgatggctacgtagcatttgccgatgatgcagaattgcttaaaggtgcttgtggcaagtcacttgcttctttccctcaaggatgtttctactctacagctgttggaggattgatgtgctatgagaatcctaaaaataagattactgcagttcctgctaatgaggaggaaatctggggagcgactttcaaggtggaagggccagcagttgtcgtagccaga

SEQ ID NO: 132497 - DNA, 243 bp, Glycine max
cttcaacctaacgcagcatcgctatactcttcattccatggctttgcccaatcagcaaaccgtggattaccctagtttcaaactcgttatcgtcggtgatggtggcacaggaaagacaacctttgtgaaaaggcatctcaccggagaattcgagaagaaatatgagccaaccatcggtgtggaggttcacccattggattttttcacaaactgtggaaagattcgattctactgctgggatac

SEQ ID NO: 132498 - DNA, 245 bp, Glycine max
tggcgatggtgaagagaagcattggtgtttgtaagaggctttctggttcttcttcttgtttgagcacttcaactgcaacaagtgataatgatattgctcggaggcttcagcatccaccatttgattacaaaccacggccatacaaaggacctttggctgatgaaagttttgccaaacggaaaaagttccttggtccttccttgttccacttctatcaaaaacctctcaacattgtggagggcaag

SEQ ID NO: 132499 - DNA, 258 bp, Glycine max
gttacaacacatatttctttttcttttccctttttcctaggcacagcacacgccctctcaaatagaaactgagagatgaattctgatcagtttcagaagaacagcatgttcgtagaaacccctgaagatggtggcaaaaacttcgacgatgatggacgagtcagaagaacgggtacatggataactgcgagtgcccatatcataacggcagtgatagggtcaggagtgttgtcacttgcatgggcaattgcacaaatg

SEQ ID NO: 132500 - DNA, 254 bp, Glycine max
ctccgtttcgccatctctctctctcaacactctcttcttcgccaaagcgcttcctctatctcgtccctcccttctctctctccctctccccaaatccctcctctctctctccacgcgccgccgcaccttcgccgtccgcgccgaatcccaaaacggcgccgatgccgtccccgcacactacgacttcgacctcttcaccatcggcgccggcagctgcggcgtccgagccgctcgcttcgctgccaactacggcg

SEQ ID NO: 132501 - DNA, 221 bp, Glycine max
ccgttcttttctctctgaaattcccatattcatcacttctgagctctggacgagatccctctctctcccattccagatctcgccatcagattcaccctttcattttaagcaaagtcataacttgaagaaggttcatggctgctccaccggcaagggctcgtgccgattacgattatctcataaagcttctcttgatcggtgacagcggtgttggaaaaagt

SEQ ID NO: 132502 - DNA, 243 bp, Glycine max
tccagccacacgcttcagaagacatggcctcattgggtgggttacaaaatgtgagcggcatcaattttcttatcaaagagggtccaaaagtcaatgcaaagttcgagctgaagccgccaccatatccactgaatggtttggagccggtgatgagccagcagacacttgagtttcactgggggaagcaccacaagacttatgtggaaaatctgaaaaaacaagttgttgggacagagcttgatg

SEQ ID NO: 132503 - DNA, 242 bp, Glycine max
gaaaaagttagggtttgtaactttgtcttttgcttgcgaatctgaatcgaataataatcaatcaatcatcatgtcgtcggcgaagaagatcacactgaagagttcggacggcgaggctttcgaggtggacgaggcggtggcgctggagtctcagacgataaagcacatgatcgaggacgactgcgccgacagcggcatccctctgccgaacgtgacgagcaagatcctggcgaaggtgatcg

SEQ ID NO: 132504 - DNA, 246 bp, Glycine max
ctctctagtacctcctcctcctcctccttcttcttcttccctggcatcggatccagatccaaatccagtttaacaaagaaaatgcagtacaagaacctgggccgatcgggactgaaggtgagccagctctcctacggggcgtgggtgagcttcggtaaccagctagacgtgaaggaggccaaggccctcctccagtgctgccgcgaccacggcgtgaacttcttcgacaacgccgaggtctacgcc

SEQ ID NO: 132505 - DNA, 226 bp, Glycine max
ctcaaaaccaaacatgtcgaacacatgcggcaactgtgactgcgctgacaagactaactgcaccaagggaaacagctatggtgttatagtagagactgagaagagctacatcgagactgttgacatggatgttccagcagctgagcatgatgggaagtgcaagtgtggcactaactgcacttgcacggactgcacttgtggccattaaggaatatgtatgaaaatg

SEQ ID NO: 132506 - DNA, 152 bp, Glycine max
atgcttgtctcaaagattaagccatgcatgtgtaagtatgaactaattcagactgtgaaactgcgaatggctcattaaatcagttatagtttgtttgatggtatctactactcggataaccgtagtaattctagagctaatacgtgcaacaa

SEQ ID NO: 132507 - DNA, 153 bp, Glycine max
cacactctctctcaccaaattcttattagaacgaaaaaagaaaagaaaagaaaaaagagcgatttttccctcaccaaagaagaaccaaaacaatggcggatcaactcaccgatgaacagatctccgagttcaaggaagccttcagcttgttcg

SEQ ID NO: 132508 - DNA, 148 bp, Glycine max
cgaagtcccctcggatacagcattgaagacgttagaccaaacggtggaatcaagaaattcagatctgctgcttactccaactgcgctcgcaaaccttcctgatatccatccagattgatagttcattgcatgcaaccatagttttatt

SEQ ID NO: 132509 - DNA, 149 bp, Glycine max
ggctaacaaaccctgacactccttcttctccgcttcctcttcgatcatcgcttcagaatgccgccgaagttcgacccctcccagatcgtcgacgtcttcgtacgcgtcaccggcggtgaggtcggcgcggcgagttccctcgccccgaa

SEQ ID NO: 132510 - DNA, 149 bp, Glycine max
agcagcaattccaacaaatagttgaagttcaagagtcagctaggattctaatggatatttccaatggaaataaactctctggaaattcggtggttggtgtgcaaggaaacctttatgctgatctcaaggacatccttgagacgtggaga

SEQ ID NO: 132511 - DNA, 147 bp, Glycine max
gtgaaatggagaccctctgctctgcattggtgttcccatctttcagaatcagaacttcagctttctccaaatgtggcatcagggcttccattgccgttgagcaacaaacttcccagactaaggttgctctcctcagaattggtacca

SEQ ID NO: 132512 - DNA, 149 bp, Glycine max
aatgtgatcctgagaaggagaatttgtgcttgtatggctttcccagtgagcagtgggaagtaaatttacctgctgaagaagtaccaccagagcttcctgagcccgtactgggcattaactttgctagggatggcatgcaagaaaaagac

SEQ ID NO: 132513 - DNA, 147 bp, Glycine max
ctcgacgattcggctcgagttattgcggctcctgatgactagcttttgatgcgtgatttcatctccaatggcaatttggccactgcccttagagggagaaatggtcaaccatccccgaatctttcatggtcaaccaggctgaaaatc

SEQ ID NO: 132514 - DNA, 145 bp, Glycine max
ctcgagcgaatcggctcgaggtggtttcaagtttcttagtgaaggtgctgccgcttccttggagatggggaatgaagtatttctgggacacccttttggatgcagatcttgagagtgatgctcctggttggcagtacatatctgg

SEQ ID NO: 132515 - DNA, 147 bp, Glycine max
ggcagttgcagtagagcatggcattccatgggaaaggctaagagcaccacctgttgatactcctccacatgatcttcatatttctgattgtctatatgatttgcatcccggtgatcacgtagagattcagtggagaagaaacaaaga

SEQ ID NO: 132516 - DNA, 147 bp, Glycine max
gtgtctctccgcagcagccttcttcgccgtttcagctcaagagccaccagcaggtaagatatggttaagcataacaacgttatccccaatgggcacttcaggaaacactggcaaaactatgtgaagacttggtttaatcaaccagca

SEQ ID NO: 132517 - DNA, 146 bp, Glycine max
ccacctccaacatcatacacaacctctattgttctctgttgtacgttcccatatatagtaacatcactatcgtcaccatttgcggcaaaagccaaacaaacctgcttggtactcgccacgaagagtataccctgtggaggcagctt

SEQ ID NO: 132518 - DNA, 148 bp, Glycine max
ggttcggtaaggttagctacgatacactgcggttaccgcacaaggttctggctcaagagtctgacggctccgttaaattcggtcacggcgattcctccgcctacctgtttgatcctgatatttacactgatggtaggatctccgttca

SEQ ID NO: 132519 - DNA, 147 bp, Glycine max
tgaagaagcactagcccatccataccttgaaaaactgcatgatgtagctgatgaaccaatctgcatggagccattttcatttgattttgagcaacaacaattggatgaagagcaaataaaagagatgatctacagggaagcattagc

SEQ ID NO: 132520 - DNA, 146 bp, Glycine max
gatttgtgaaccgtgttgttgcatcaatgttcaacacagtttcaaacaaaaagattgctattctgggatttgccttcaagaaagacactggtgacacaagggagactcctgccattgatgtatgccaggggctactaggtgataag

SEQ ID NO: 132521 - DNA, 145 bp, Glycine max
cgaagtcagcactggtgaggagccaaactggagattttgatcataataggtggctctttgaaacaaagggaacctatggctatggcaatgctatatggccaaaggaaggtggttttggaaatgaaaaagagtatgattttgttca

SEQ ID NO: 132522 - DNA, 148 bp, Glycine max
agttgccagcttccagggtgtgttggatggaaaatacgatgaccttccagagcagtcgttttacatggttggcggtattgaggaggtcattgccaaggccgagaaaattgctaaggaatctgcagcgtcttaatcacacacagccctg

SEQ ID NO: 132523 - DNA, 144 bp, Glycine max
agtgataaatgaggctgtccaaaaagccgctgctgctctgaagggctctgatcatcggagggccacaaatgttagtgccaggttggatgctcaacagaagaaattgaatctttctgttcttccaacaactacaattggatcttt

SEQ ID NO: 132524 - DNA, 143 bp, Glycine max
cagtgttggaccccaatttcgaagctgagacaggttgctgatgccctggacgttgagatgcacgctggtcttgcttctgaaggtggatgtaagctcaagatgttgatcacttatgttgataatctcccttctggggatgagaa

SEQ ID NO: 132525 - DNA, 145 bp, Glycine max
tacactcgacgattttctgtcaagcatgaacagaagcttgactgcggtggtggctacatgaagttgctcagtggtgatgttgatcagaagaaatttggtggggatactccttacagtattatgtttggcccagatatctgtggtt

SEQ ID NO: 132526 - DNA, 258 bp, Glycine max
aaaacccttctttctttcaggttcattacttgatcagtgtcaaaagggtagttgcaaattgcaatggctaagcatgatgttgagggtggttccttctcagcaaaggactaccatgatcctcctccagcacctttgattgatgctgaggaactcacacagtggtccttctacagggctttgattgcacaactcattgccacattacttttcctttacatcacagtgctcactgtgattggttacaagagccgagtgatg

SEQ ID NO: 132527 - DNA, 255 bp, Glycine max
ctgatcctcaacgtgttcaaacaccttcaattatggagtactggaaacccttggctgaagatatggatccctctgctggaatagaagccgattatcatcacaagaataacagggtttattgttggaaaggtcttaggctttcagcacgacaagacttggagggattttctaagtttactgatcatggcattgaaggggttgtccctctagaacttttgccacctgatgtccgatctaaataccaagctaaaccaa

SEQ ID NO: 132528 - DNA, 254 bp, Glycine max
gcgagtgagactgaggttgggtttggaaggcaagggcttgtgttgtcacaatccaggagagaagtaatggcgaacatagacatcgaagggatcttgaagcagcagcagccttatgatgggcgcgttccgaagacgaagatagtgtgtactttgggccctgcttctcgatccgtagaaatgaccgagaagcttctgagggcagggatgaacgttgctcgtttcaatttctctcatggcacccacgactatcacca

SEQ ID NO: 132529 - DNA, 251 bp, Glycine max
ggaacacgcttcttgttccaaggttaccaacttgcacgagttactgacgtgtctaacaagcgctatagtgtgtaggactgctttgggaagaacgtacgaaggggaagggattgagacaagcatgttccatggcctgcttaaagaagcacaggatttgatatcttccactttctacactgattatattccatttgttgggggagtgattgataaactcaccggattgatgggtcgtcttgagaattgttcaa

SEQ ID NO: 132530 - DNA, 250 bp, Glycine max
ctcgagccgctcgagccgattcggctcgaggcagctttgaaacccggttcatccgaagccactcaccgaaccatgtcgaggagaaaggttagagagacaaaggaggaaaatgtgactctgggtccagctgttagagatggtgaacacgtttttggcgttgctcgcatctttgcctccttcaacgacaccttcatccatgtcactgatttgtctagcagggaaaccttgtccgaatcactggtggtatgaa

SEQ ID NO: 132531 - DNA, 249 bp, Glycine max
gtcttccctcccatctcccacttcttgcaatctctgcagccatggcgagtaccaaagttcagagggttatgacccaacctattaacttgattttcaggtttcttcagagcaaagcgcgcattcagatttggctttttgagcagaaggatttgaggattgaaggccgaatcatcggttttgatgaatacatgaatttggttcttgatgatgctgaagaagtgaacgtcaagaagaaaagcagaagacatt

SEQ ID NO: 132532 - DNA, 251 bp, Glycine max
cacacatagtagctattatactctctagagtaattgcggaatctgctagaattttctaataatggcgaaagacgttgagcaggtcacagagcaaggtgaatactccgcgcaggactaccatgaccctcctccggcaccgttgatcgacccagatgagctcacaaagtggtccttgtacagagccgccatagctgagttcatagcaacactcctttttctttacatcaccgtgttgaccatattggctacaa

SEQ ID NO: 132533 - DNA, 252 bp, Glycine max
gctttgattctctgttctctgttttgttctgtttcgcgtattgtcttcatacaggaacttgaacaatgaagaatgcaaagggcaagggagcagcaagggcttcaaaagaatcactgaagcccgttgatgaccgaaaggttggaaagcggaaggcttccggtaagcctgggagaagtagtgcaccaaagaaggagaagaaggccaagaaagaccccaacaagcctaaaagaccacccagtgctttcttatgtt

SEQ ID NO: 132534 - DNA, 260 bp, Glycine max
ccaaatccttcaccctcattctcctcatcctcaccacattcctcatggcccaaacccaagcccaagctcccgcaccggccccctcaggcgcggtgaacctcaccgcgatcctcgaaaagggtggccagtacaccaccctaatcaaactcctaaaggacacacaacaactcactcagatcgagtcccagctcaaatcaaactcacaaggcttcactctcttcgcacccactgacaatgccttccagagcctcaaacccggt

SEQ ID NO: 132535 - DNA, 252 bp, Glycine max
cagcaatggccaagtccaagaacaatgccaagcagttgtcctacatctcagttccttctcagatcatcaactccatctcatcttcttctcttcaatctctgcttgaatctcccaagaagtgtgcaagacactccaaattcttcacctttgtcaagtgcataaggccaagactcttccttttcactctctttttccttgctttctttgccatgctcaagtttggtctcaatctttacaccccttacctccatt

SEQ ID NO: 132536 - DNA, 251 bp, Glycine max
gcaactctttttgtttcttcagtttggtataaccttagccgaggtcacgaggagcactagctagtttcacaatttccaaatggctaggggattgaagaagcatctcaagaggctcaatgctcctaagcattggatgcttgacaaactgggtggtgcatttgcgcccaaaccctcatctggaccacacaaatctagggagtgccttcccctcatactcatcctacgaaaccggctaaagtatgctctgactt

SEQ ID NO: 132537 - DNA, 249 bp, Glycine max
cgggagaaaaagcaatccactcagagagctagaagaattcaacgatgcctcgctatgatgataaatacggcaatacccgcctctatgtggggcacttatcttcgaggactcgttcccgggatctggagcgtgccttcagcagatatggaagagttcggggtgtggatatgaagaatgatttcgcctttgttgattttagtgatcctcgagatgctgatgatgcaagatataacttggatggtcgggatg

SEQ ID NO: 132538 - DNA, 246 bp, Glycine max
ctcgagccgctcgagccgattcggctcgagcaaggctgcaatgaacaaagggatgagcaaggtgtgttgctcgtttatcgtcatgctgttgcattctttgttatggcccctttggcatggttttttgacaagaaagtaaggccaaagatgacattatcaattttcatgaagatagcggtgctcagcttgctagagccagttattgaccagaatttgtattttttggggatgaagtacacaacagca

SEQ ID NO: 132539 - DNA, 252 bp, Glycine max
ccgggtctggtctccgtagcggacaccccccaaagatccccttccccagttcccaagaaagcagcctccccatccccttctggctcctccaaaaagaaagccccacttctctccgatgcctctctggacaaccctgatctcggcccattccttctcaagctggcccgcgacaccattgcctctggcgatggccccgccaaggccctcgacttcgccatccgggcctccacttcctttgagcgctgcgccatc

SEQ ID NO: 132540 - DNA, 251 bp, Glycine max
ggaacacaaaaaatggcagatattcctcgggtgaagcttggaagccaaggcctggaggtttccaagttaggatttggttgtatgggcctaagtggagtgtacaacgatcctgttcccgaagaggttggcatctctttgatcaaacacgcattcaccaaaggggtcactttctttgattctgcagatttttatggagcacgtgccaatgaagttttggtcggaaaggctctcagggactttcctcgagatca

SEQ ID NO: 132541 - DNA, 226 bp, Glycine max
ctcatggattctgacaaaatactcccttctcatgtggtcgtaaatggccacgccccacttgattccggccacgcccgtctcaaagaactcggtttcaaacaagaactcaagcgtgctctttcggttatttcgaattttgcgttttcgttttctattatatccgtgttacctggagtgaccactctttacaacaccgggttgaattatcgctcccctgtttcgctgg

SEQ ID NO: 132542 - DNA, 248 bp, Glycine max
agagaaaccagcctttcagcttcctgatttcattgctgccactggaattgagaaaatcagacaggcttatattgagaaagaggatagtaagaagctgaaacaaaagcaaagggagcgcatgcaaccaaaaatggggaaaatggatatagattatcaggttcttcatgatgcattctttaaataccaaacaaagcctaaattgacctctcttggagacctgtatcatgaaggaacagagtttgaggtga

SEQ ID NO: 132543 - DNA, 247 bp, Glycine max
caccatcatagtatttcgttagaaggggaatttggcagattcattagaagaaaatggcgggtggtggaaaggtttcgttcaaagtcacactcacctccgatccaaagttacccttcaaagtgtttagcgttccagaggcggcaccttttactgccgttctcaaattcgccgccgaagaattcaaagtcccgccccagaccagcgctatcatcaccaacggtactaaatcaacaaaggtgccattttg

SEQ ID NO: 132544 - DNA, 245 bp, Glycine max
ctgcttccgagttccgagttgcgagttgcagagagagcaatgagtcaggaatcgttgatatatcagctcgtggctcgggggacgatggtgttagcggagtacaccgagttcactgggaacttccctgcaattgcagctcagtgcctccagaaactaccctcttccaagaacaagttcacctacaattgcgaccaccacaccttcaattttctcgtcgaagacggttacgcttactgtgttgttgc

SEQ ID NO: 132545 - DNA, 237 bp, Glycine max
ctcgagccgcgcactttgcgattactgcgtcatctccaattccccggcaaatggcaacccagtggagcatgaagaaaaattcgtagctgatggagtggtcttcgctgaactgaacgaaggtctgaccagggaattaaccgaaggccgatactccggcgtggcagttaaggttacgccgatgcgcaccgaaatcatgatcagaggcaacaaaacccaagccgttctcggtgagaaggg

SEQ ID NO: 132546 - DNA, 247 bp, Glycine max
cggctcgagcattttgcttcatcgtattccacccacctcggaggcctaagccaaagatcctgcagacattgtaagtaaatcttatgaagatggagatgataactaatgttaccgagtatgaggcaattgcaaaggaaaaattgccaaagatggtttatgactactatgcatcaggggcagaggatcagtggactttgaaggagaaccgaaatgcattctcaaggattctgttccggccgctattctt

SEQ ID NO: 132547 - DNA, 253 bp, Glycine max
tggagactaataatgcatgtactatgcattctcattgcatagagatgtccatggaagtgcaccaagttgtgccaccacctcacaagagcacccttcagaaactcaagggtaggctcaaggaaactttcttccctgatgatcctctgcgccaattcaagggacaacctcttaagagaaaactgatccttggagctcaatatgtgttccctattctccaatggggtcctaagtataatctcaaactcttcaaatc

SEQ ID NO: 132548 - DNA, 250 bp, Glycine max
ggcgggtagaggcaaaaccctaggatccagcgccgctaagaaggccacctcaaggagcagcaaagccggcctccaattccccgtcggtcgtatcgccaggttcctcaaggccggaaagtacgccgagcgcgtcggcgccggagcccccgtctacctcgccgccgttctcgaatatctcgctgctgaggttttggaattggctggaaacgctgcgagagataacaagaagactcgaattgttccacgccac

SEQ ID NO: 132549 - DNA, 246 bp, Glycine max
gtgggctatcgcggtgcatggtggcgctggtgtcgaccctaatctcccactcgagcgccaagaagaagcgaaacaacttctacacgcgctgtctcaatcttggaatctctgctctaaattctaatcttcccgccatagatgtcgtcgaacttgtggtgagggaattggaaacggatccgctgttcaattcgggccgtggatctgccctgacagaaaaaggaacggtggagatggaggctagcatca

SEQ ID NO: 132550 - DNA, 245 bp, Glycine max
atccttcgtttcaatttctctctctcagcgctttctgcaatcgaacctttcatctccaaagggatccacaggccgaaggagaaatggggctgacattcacaaagcttttcagtcggcttttcgcgaagaaggaaatgcgaattctgatggttggtcttgatgctgctggtaagaccactatcctgtacaagctcaagctcggagagatcgttaccacaattcctaccatcgggttcatgttgaga

SEQ ID NO: 132551 - DNA, 244 bp, Glycine max
atccatctcttgtttcttgctttctttcttcaccatgtcacttgctgggaaaatcaccactgaaatcggggttcatgcaaccgctacaaagtggttcaacctcttcgcaacacaactccatcatgttcaaaacctaactgatagagtgcatggaaccaagctgcatcaaggtgaagactggcatcacaacgagacagtcaagcactggacttataccatagatggtaaggttacaacatgtctg

SEQ ID NO: 132552 - DNA, 246 bp, Glycine max
gcatctgagtgcttattatttgtaatatatatagtcactcaagcttctaggatttgtgccagctacatgaaaatgggaagcaacttcaggtttttgagtctttgcctcttggcattgattgcatcaacccatgctcaacttcagcttggtttttatgccaagagttgcccaaacgacaagcaaatcgttttgaaatttgtccatgaccatatccacaatgctccatcactagcagctgtattgata

SEQ ID NO: 132553 - DNA, 243 bp, Glycine max
caggaaaatgcctgacacagaagattcttaagaaaaagcctaagaagggttcaaagaatgctaaaccaattaccaaaactgaaaattgtgaaagcttcttcaatttcttcaacccaccgcaagttcctgaagatgatgaagacattgatgaagatgcggctgaggaacttcagaatcagatggaacaagattatgacatagggtcaacaataagagacaagattattccccatgctgtatcat

SEQ ID NO: 132554 - DNA, 238 bp, Glycine max
tatggttctgtgacagaggatatcttgactggatttaaaatgcattgccatggttggcggtctgtgtattgcattcctaagcggcctgcattcaaggggtctgcgcctatcaacctttcagatcgtctgcatcaagttcttcggtgggctcttgggtctgttgagatttttttcagcagacattgtccaatctggtatggttatggtggtgggttgaaatggttggaacgttttccta

SEQ ID NO: 132555 - DNA, 240 bp, Glycine max
caaaatccaaagctcattagtggcatagctccactagttttaactctaagcaacaagtgcttcttcaagaagggtacgtgtgctgacttgtggtaataagttcaggatcagaaaagaacttgaccctcacattcagcatgtccttctctaggtctgcttctcagcctcggttcttccaacacaagaaagaggcattttggttctataggtttctatctattgtgtatgattatgtcacaa

SEQ ID NO: 132556 - DNA, 243 bp, Glycine max
ctctttctctttctctgccaacctgcacactcttcactcgatcaaacagaaaatggcaaagaatgtggggatccttgccattgacatctacttccctcccgcttgcgttcagcaggaagcattggagactcatgatggtgccagtaaagggaagtataccattggtcttggacaagattgcatgtcattctgtaccgaagtagaagatgtcatctcaatgagtttgacagtggttattctctt

SEQ ID NO: 132557 - DNA, 242 bp, Glycine max
gcatcgcaccttcaacttaacctattccacttgtaatcgtaatacgctttgctagaagaagagacaaagtgtgtctgtgtgtgtgagagcgtgagcaatggctggctcgtgggcacgccgttctctgattgttctagccatcatttccttcggatgtctatttgcgatttccattgctaaggaggaagccaccaagttagggacggtcatcggcattgatcttggaacaacctattcatgtg

SEQ ID NO: 132558 - DNA, 242 bp, Glycine max
attccttaatttaaaacctccactcattccataaatctctgtttactctcctcgattttaccgcaacatgacacaagaaggaaatggcaacaccaacttctgtatgagtgttaacaacaacggctacattagcgctaatgacccgttgaactggggcgcggcggcggaggcgatggccgggagccacctcgacgaggtcaagcgcatggtggaggagtaccggaggccggtcgtgaagctcg

SEQ ID NO: 132559 - DNA, 240 bp, Glycine max
ctcgagccgctcagcttagggttttaccgttaaacgattctcttcgtctttctctgttctgagaccactaccgtttcgtcgtcaccatgccgcaaggggattacatagagcgtcacagaagagactatggctaccgtcttgatcacttcgagcggaagcgcaagaaagaggcgcgtcaagttcacaaacgttcttcaattgcccagaaggctctaggtattaagggcaaatgattgccaa

SEQ ID NO: 132560 - DNA, 240 bp, Glycine max
acgacattcattcatctatggctacccttattgctcccagcaaccactctccccaagaagacgctgaggctctcagaaaggcttttgaaggatgggggactgatgagaaaactgtcatagtaatattgggtcatagaactgtttatcagaggcagcaaatcagaagagtctatgaggaaattttccaggaggatcttgtgaaacgcctagagtctgagatcaaaggagatttgagaaagc

SEQ ID NO: 132561 - DNA, 236 bp, Glycine max
caaaacccttcccatcctaattaaggtgaaaatgaaggcatcacccattgcttggttcactttggtggttgtgtttcttgtggctgaagttcaagtttcaatggcagtgacatgcagcccagtgcagctgagtgcatgtgtaagtgcaataacctacttcaacccctccatcaaacctatgctgctccaagatcaaagaacagaaaccatgcctctgccaatacctcaagaacccc

SEQ ID NO: 132562 - DNA, 241 bp, Glycine max
gagcaatgcaatcccaagataatacatcgtgatctaaaggctgcaagtatcctactagatgatgaatttgaagctgttctaggtgattttgggctagccaagctggttgatgcaaggatgactcatgtcaccactcaagttaggggcacaatgggtcacattgccccagagtatttgtccactggaaaatcttcagaaaagactgatgtttttggatatggcataacacttcttgaacttg

SEQ ID NO: 132563 - DNA, 238 bp, Glycine max
caaggcaagcgcttctcctctttgtgttctggctatgcttcttggcaagagttagatcggacgaggattgcgtgtacacggtgtacgttcggacgggttcgatcatcaagggaggcaccgattcagtaattggtctgaagctatacgacaagtccggctacggcatatacatcaccaacctcgaggcatggggcgggttaatggatccgggtcacaactactacgagcggggcaacct

SEQ ID NO: 132564 - DNA, 236 bp, Glycine max
tgaatctccaacgatggtgctcgaggcgactatgatctgtattgacaattcggaatggatgcgtaacggggattactctccttctcgatttcaagcccaaacagacgccgtcaatcttatttgcggtgctaaaacccagtctaatccagaaaatacggtgggagttctcacgatggcggggaagggcgttcgtgttttggtgacccctaccagtgatctgggcaagatcttagctt

SEQ ID NO: 132565 - DNA, 238 bp, Glycine max
cgggcattgagaaggaaggacgctttcagaggcgaaaggccatggggagataccgtctgtgatccatggatctccgatcgggaaaccgtatccaagctccgcggctagtctgcgctctttggacttttaaaacttagcgaactgaaacatcttagtagctaaaggaagggaaatcaaccgagaccccgttagtagcggcgagcgagagcggattggggtttgaagaaaaacaaacacg

SEQ ID NO: 132566 - DNA, 236 bp, Glycine max
gccttctcttgtttgttgttgttgttggaagccaaaaccctagcagccggcgagaatggcagacgttgaggttgatgtggcggcggcggcggcggcggcggctgcagggcagccaaagaagagaacgttcaagaagttcagcttcaggggggtggatctggacgcgcttctggacatgtccactgacgaactcgtgaagatgttcagtgctcgcgcacgcagaaggttccagagag

SEQ ID NO: 132567 - DNA, 235 bp, Glycine max
gtcatctagttacaatgaccaccactaaacagtttgaggttgtcggccgtaagaagcccaccgaaaccgataagaaccccaaggtttaccgcatgaagttgtttgcccccaaccatgtggttgctaagagcagattctggtattacttgtctttcctgaaaaaggttaagcgaaccaccggtgaaattttggaggttcacgaaatctttgaaaagaatcccaaccatgtcaagaa

SEQ ID NO: 132568 - DNA, 238 bp, Glycine max
gttgatcttcctgaagaccgggcaaataatgtctctgctgttataaatgcctttgcctctgaagctttgagaactatttgcttggcctttaaagagataaatgaaacccatgaacccaacatttcagatagtggctatactttcatagccttagtaggaatcaaggatcctgtacgccctggggttaaggaagcaattcaaacttgtatagctgctggaataactatccgcatggtta

SEQ ID NO: 132569 - DNA, 242 bp, Glycine max
gaaaaaagaaagatcatggcgatggcaaacttggctcgacggaagggttacgccgtcgttttgtcgtcgaggtcgtcgctttgtctgacaaggtggagggggttcgcgtccggatctgacgaaaacgacgtcgtggtcatcggcggcggtcccggcggctacgtggcggccattaaagcggcgcagctgggtctgaaaaccacttgcatcgaaaaacgtggcactctcggcggtacctgcct

SEQ ID NO: 132570 - DNA, 240 bp, Glycine max
aaccgctccaagaccgagttgcaatcgtcaccggctcgtcccgcggaatcggccgagaaatcgcgcttcacctcgcctcactcggcgcgcgactcgtcgtcaactacacctccaactcggcccaagccgactcagtcgcggcgcagatcaacgccggttccgccaccacgacaccgcgcgccgtcgtggtccaagccgacgtgtccgatccggctcaggtgaagtcgctcttcgactcgg

SEQ ID NO: 132571 - DNA, 236 bp, Glycine max
gaattgaggctgctgccctcacttgatacactgaaggtgaaagataagaaggatcgaggaaccttaacagtaaaggtcatgtattatcagtttaacaaggaagagcagctggttgcactagaggcagaaaagaagatactagaagaaaggaagaaactgaaagaagctggaatgataggaagcacgatggatgcactagatggagcagtatcagtggtaggctctggtgttggact

SEQ ID NO: 132572 - DNA, 237 bp, Glycine max
gtcaattgaagtctaaagaaaacatagaacgaagaagaagaacagatcagaaaaatggcgtccaaagttccaaagaaggccaatctcctggatcaccactccatcaagcacatcctcgacgagtctgtctccgaggtcgtaacgagtcgtgggtatgtggaagacgtgagattgagcaatgcgaggcttttcattggggcaatcatcatcgtcattgctttattcgcccaattctac

SEQ ID NO: 132573 - DNA, 234 bp, Glycine max
aacactcattaattgcaagaatggcacttcgttgcttggtgatgtccctttctgttctcttcactcttggtcttgcgagagaaagccatgccagagacgaagatttttggcatgctgtttggccaaacactcccattccaagttcattgcgagatcttctaaagcctggccctgcaagtgttgaaatcgatgatcaccctatgcaaattgaagaaacacagtacccgaaaacct

SEQ ID NO: 132574 - DNA, 232 bp, Glycine max
ttcgacgattcggtcactttctagctggtcatactatcaccattactgatggtattgacaaaactagtgcaactttgcaatttagaaagttagcagattgcgattttctcaagagaaactttaagcagatgtctaatgttttgtgggtggctcctgaggacaaggcgagtttatggtcacaacttcattatgtttcgtgtaataatctggaaatgcaagaagcttatcttgt

SEQ ID NO: 132575 - DNA, 236 bp, Glycine max
ctttcttttctctttcctctctctctctctacgctttctcgtttgagatccctcaagggatccactaactgaaggagcaatggggttgacatttaccaagctttttagccggcttttcgccaagaaggaaatgcgaattctaatggttggtcttgatgccgctggtaagaccaccatcctgtacaagctcaaacttggagagatcgttaccacaattcccaccattgggttcaacg

SEQ ID NO: 132576 - DNA, 240 bp, Glycine max
gtggaagagtttcagaaagggcatgtggatgcagagaagatcattaacgttgcatacatgtttaatacaccagaaggcagagtgaagaatccagaatttcttaaggaggtttcatatgcttgcaagaaagaagatcatatcatcgtgggttgtcaaagtggagtgagatctctgtatgcaactgctgatcttctaacggaaggatttaaggatgtgagcaacatgggaggaggttatctg

SEQ ID NO: 132577 - DNA, 240 bp, Glycine max
gcgtcggcggtgtcgctgcaggtgggggaacacgtgcagttggcttacacacaccacaacgaatcaccgtggcatcccagatcatttgctgttaaggatgagatattctgcttgtttgagggggctctagacaatttgggcagcctgagacaacagtatggactggccaagtcagccaatgaagtgattttggtgattgaggcttacaaagctttacgtgatcgagcaccctaccctgcc

SEQ ID NO: 132578 - DNA, 211 bp, Glycine max
cggctcgaggcacacctcaaatgtggccagaccttattcaaaaggccaaagatggacgccttgatgtcattcagacctatgtgttttggaatggccatgaaccttctcctgggcaatactatgtcgaagataggttcgacttggttaaattcgtgaagctcgtgcagcaagcaggcctctatgtgcatctccgtatgggtccctacatatg

SEQ ID NO: 132579 - DNA, 234 bp, Glycine max
attaactttctctctctctctctacaaaacttagctctgtttttaattattccttgcattctcttgtactaagatcgaagcaactaccatcaccaatgggagccaaaacggctcgttttgcttgtccactactaagggatgtagtgatccgttaaactggggagcggcggcagaggcgatctacgggagccacctggacgaggtgaagcgcatggtggccgagtaccgcaagcc

SEQ ID NO: 132580 - DNA, 240 bp, Glycine max
gcgagagtttgttgttgtaactcgttcttcttcttttgttgttctgcgtttgtgtatgtttattctctcacctgaaaatgtcttgctgcggtggtaactgtggttgcggaagctcctgcaagtgcggcaacggctgcggaggctgcaagatgtacccagacttgagctacactgagtcaaccaccaccgagaccttggtcatgggagtggcacctgttaaggctcaatttgagggtgctg

SEQ ID NO: 132581 - DNA, 234 bp, Glycine max
ttaatgatcaacttgcaggaactgtgtgggggggattggcaaatcctaaattaacatttagtgacaatgtgaaactgagggttggcaataacaagctttctttacttagtgttgctgtcggtctcccgaatgttggtgtgcactttgaaacatggaatgcgggggtgttaggcccagtcactctgaagggtctaaatgaggggactcgggacttgtccagtcagaaatggtctt

SEQ ID NO: 132582 - DNA, 221 bp, Glycine max
acacttcagatctcatcttggtccaattgaaggtctagctgttagtattgatggtctgctttgctgtacaatatcaaatgaccgctctgtgaaaatatatgacgtcataactttgacatgatggtcatgattcgcttgccatatattcctggtgctgttgactgggtttacaaacaaggggatgtcaaagctaggcttgccattagtgataggaactcatc

SEQ ID NO: 132583 - DNA, 241 bp, Glycine max
tgccgagagcacgctctccgcctacaaagccgctcaggacattgctaataccgagttgcctccaactcaccctatcaggctgggtcttgctctgaacttctccgtgttttactatgagattcttaactctcctgatcgggcttgcagccttgcaaaacaggcttttgatgaggctattgctgaattggatacattgggagaggagtcatacaaggatagcactttgatcatgcaactgcta

SEQ ID NO: 132584 - DNA, 232 bp, Glycine max
caaaatcctagaggttgtgatattatggctcctacacttcaacgtgcactttctcatctgctcactcttgtagcttcactttcaatactcctagtggtaccctcctcttgtttcaaccctaaaaagattgtgaatgcttcctatgcttcatactccttatatggttcagattggtctcctgctgtagccacttggtatggaccagcccaaggggacggtagtgaaggtggtg

SEQ ID NO: 132585 - DNA, 234 bp, Glycine max
cgaagaaggaaatgcgaattctgatggttggtcttgatgctgctggtaagaccactatcctgtacaagctcaagctcggagagatcgttaccacaattcctaccatcgggttcaatgttgagactgtggaatacaagaacattagcttcactgtttgggatgttggtggccaggacaagattcgtcccttgtggaggcactacttccagaacacccagggtcttatttttgttg

SEQ ID NO: 132586 - DNA, 233 bp, Glycine max
cttgcggctagggttttagcgcagctcttctagatttaacgaagatgggtaaggaaaaggttcacatcagtattgtggtcattggccatgtcgactctgggaaatccactaccactggtcacctgatttacaagcttggaggcattgacaagcgtgttattgagaggtttgagaaggaagctgctgagatgaacaagaggtctttcaagtatgcctgggtgctggacaaactt

SEQ ID NO: 132587 - DNA, 235 bp, Glycine max
cggctcgagcagctctagctagggtttcgcaagtgcgatcgaagaagaacaacgacgatggcgatggctgcagctctgcgtcgcgaaggaaggcgtttgacccaaccaatcaacgccctccactcttctctcaattcctccctcatctctcaagaccaagcccctcatggcgcgcgctccatttccactcaagttgtgaggaaccgaatgaagagtgtgaggaatatccagaaga

SEQ ID NO: 132588 - DNA, 234 bp, Glycine max
gttgggctggcttcttcattttgcaatcattcactttgaagaagtacccggcagagctctcactgacagcttggatttgtgtgatgggtattattgagggttcaatcgcatcccttatatttgaacgagacttcagtgtatgggccataggctgggactcaagacttcttgcttgtgtttactctggggtgatttgttctggaatggcatactatgtacaaggggttgtaacca

SEQ ID NO: 132589 - DNA, 233 bp, Glycine max
atcattccctcactccccaaatacaacgcaaccacaaccttcggctccgttggaatctttgacacccctttaaccgtgggacctgaggtgtactccaaggttgtcggaaaagccgagggcttgtttgcctccacgtcacaaacgcagtttgacctgttactgatttacaacttcgcgttgacccaagggaagtacaacggcagcaccatcacgttcacggggaggagccccct

SEQ ID NO: 132590 - DNA, 258 bp, Glycine max
gtctgaggctccggatccggctcgaggtgtggtcttcttccttattttcttccctagtcaaggagattcatctctgcaggttgttttagaaaagaagaaatggtgaagatttgctgcattggtgctggatatgtggggggtccaacaatggcagtcattgctctgaagtgcccctccattgaagtggctgttgttgacatctccaaatcccggattgcagcatggaacagtgaccagcttcctatctatgagccaggc

SEQ ID NO: 132591 - DNA, 232 bp, Glycine max
actcgagcgttccttaatttaaaacctccactcattccataaatctctgtttaatctcctcgattttaccgcaacatgacacaagaaggaaatggcaacaccaacttctgtatgagtgttaacaacaacggctacattagcgctaatgacccgttgaactggggcgcggcggcggaggcgatggccgggagccacctcgacgaggtcaagcgcatggtggaggagtaccgga

SEQ ID NO: 132592 - DNA, 232 bp, Glycine max
ctcctcctcaccgactgctagcatggatatctgatgctcagtcatatcttcaatcattctcatctctcatgctctagcacgatagagctatgtccacgcatcgctacctgaggaagattatcgggaagctgtttggccaaacactcccattcccactgcactgcgagagcttctaaagcctctccctgcaggtgcgtgaaatcgatgaactccctaagcaaattgatgatac

SEQ ID NO: 132593 - DNA, 232 bp, Glycine max
gcgcacagcagaactctgcttcttcggattccgatcgcacgcgccgtcaccatggtgaacgttccgaaaacaaagacgacatactgcaagagtaaggagtgcaggaagcacacgctgcacaaggttacccaatacaagaagggtaaggatagcattgctgcccaaggaaaacgccgttatgatcgcaaacaatccggttatggtggacaaactaagcccgtcttccacaaga

SEQ ID NO: 132594 - DNA, 231 bp, Glycine max
gcagtgtgtcgacggtggaggagagaagccaagaggatcgagagagatggtggaaaatgggattgaaggccatttctgatggcaaattagctgtgttgcttttatctggtggccaggggactcgacttggaagttcagatccaaaaggatgtttcaatattggacttccatctggaaaatcactttttcaacttcaagctgagaggattttgtgtgcacagagactagctg

SEQ ID NO: 132595 - DNA, 233 bp, Glycine max
catctctaaaaccacacttaaaaatgaggcactgtttggctatgtttcttttcctagtcacaacaacctatgctaacacggttgtccctaccaccacccaaaagccaccaagaagctttgcaaaccaattcctaatcccccagaacgcggcacgtgcggtgctgaggctgcggccattggtgtgggactccaaattagcacactatgctcagtggtatgcaaaccagaggcgc

SEQ ID NO: 132596 - DNA, 235 bp, Glycine max
ctctaggaatgatggaaaacgggtatgtctggataacaactacttttctgtctacttggctggatataggtagtcccctatcttcagatgcaacggatgacatgcaaggagttattatacttcgaatgtatataccagattcagagcgcaaaagatggtttttttctaggtggaaaaacttgactactggaaagactgctaatggttcccagggtttgagtacttatggtatctt

SEQ ID NO: 132597 - DNA, 231 bp, Glycine max
ctgccatcagatgcagattgtggtgtcatcttttgacatggttgctggctgtggagcagcagaaccatataccacacttgccttaagaacaatttctcgccactttcggtgtttgcgtgatgccatcagtggccaaattcaggtgacccaaagaagccttggggagcaagaaggaataccccgtctccgctatgtggatcagcaacttagacaacaaaaggcacttcagca

SEQ ID NO: 132598 - DNA, 229 bp, Glycine max
caacacatcaattctctctcatactctcactactctctttgctctttgttttctccactatggctgcacaacgaaacttccaagactacttgcctgtgatggccaacaagcttggtggggatggcctaattgatgaactgtgcaatgggttcaatctgttgaaggattctgataaaggggtcatcacctttgagagcctcaagaggaactctgccttgtttggccttca

SEQ ID NO: 132599 - DNA, 230 bp, Glycine max
tggagatcgagtggcaattgtggggatatataaggctcttgcagggaaaagcaaaggcagtgtgaatggagtattcaggactgttctcatagccaacaatgtttctcttctcaacaaagaggctaatgcaccaatctacagtgctgaagatgtcaaaaacattaaagagatagctgcaagagatgatgcatttgatctgctaagtaattcacttgcaccttctatatatg

SEQ ID NO: 132600 - DNA, 231 bp, Glycine max
cacaacacaacccatggccaccacctccgcattcctcctccttttcctcctcctgctgctccacctcgccaccgccgcgcacggcatcggcatcaactacggcacgctcggcgacaaccttccaccgccggcggcgtggacgaacttcctgaagacgaagacgaccatcgaccgcgtgaagatctacgacgtgaacccggacatcctgcgggccttcgccggcagcggcat

SEQ ID NO: 132601 - DNA, 235 bp, Glycine max
gcaaggagttgcacaggccattcttcgaggacttatagattttaaaagggaaccatggcccagtatttctgaaagtgctaaaagccttgttaggcaaatgttagaaccagaccccaagcttcgattaactgccaaacaagtgcttgagcatccctggattcaaaatgctaagaaggctcctaatgttccacttggagatgttgtcaagtcaaggcttaagcaattttcaatgatg

SEQ ID NO: 132602 - DNA, 274 bp, Glycine max
ttcggctcgcggggcacacagtggcatttacttatccaggctcttgcacataggccagggggacccccctcccttcgtgtgaccggtgttgatgactcacagtcgactcatgcacgaggtggaggactttggattgttggagaaaggctttcagattttgccaggtcttgtggagttccatttgaattccacagtgctgcaatatctggctgtgaggttgtacgaggaaatattgaaatccgagcaggggaagctctggctgtaaactttcctt

SEQ ID NO: 132603 - DNA, 262 bp, Glycine max
caaacgcacacagttacgctcttcaaatcaatctcttctcagaaatgggtgtggctcaaaacattcccgatgcggaggagggaaccttggagattggaatggaatacagaactgtgtctggagttgctgggccattggtcattcttgataaagttaagggacctaagtttcaagagattgttaatattcgcttgggagatggaactactcggcgtggacaagtgctagaagttgatggtgaaaaggctgttgttcaggtctt

SEQ ID NO: 132604 - DNA, 256 bp, Glycine max
ctcgtcactagctctgtgcattcttctctcgctcactgccttccatcacactcggcatttgctttcccaagatagtagacgatggcagacactgaggatattcaacctcttgtttgtcacaatggaacaggaatggttaacgctggatttgctgaagctgatgccccatgtgctctgtttcccagcattgtaggtcgtcctcgtcacactggtgtgatggatggcattggcgatcaagatgcatatgatggtgatg

SEQ ID NO: 132605 - DNA, 259 bp, Glycine max
gtttccttctcccaaggtttctgataccgttgtggagccttacaatgctactctttctgttcaccagcttgttgagaatgctgatgagtgtatggttttggacaatgaggctctctatgacatctgtttcaggactctcaagctcgctacgcccacgtttggtgaccttaaccacctgatatctgccaccatgagtggagttacttgttgtctacgtttccctgggcaactgaactctgatcttcgcaagcttgctgtt

SEQ ID NO: 132606 - DNA, 259 bp, Glycine max
caagaagttatcataactaatacaattccagtggcagaacagaactatttccctcaattaactgtcttgtcggtggcaaaccttctgggcgagactgtttggcgtgttcatgatgattgctcaggtggaattgaaccttattcaagtttgggcattgattgaacaatttgtatcattggtatgctcgttccagcttatgacactgtggtaacaagcggcagaactgtaaagtccattcatagtgaaacttttgtttaag

SEQ ID NO: 132607 - DNA, 257 bp, Glycine max
ctcgtcactagctctgtgcattcttctctcgctctctgccttccatcacactcggcatttcctttcccaagatagtagaagatggcagacactgaggatattcaacctcttgtttgtcacaatggaacaggaatggttaacgctggattttctggagctgatgccccacgtgctgtgtttcccagcattgtaggtcgtcctcgtcacactggtgtgatggttggcatgggccaaaaagatgcatatgttggtgatga

SEQ ID NO: 132608 - DNA, 260 bp, Glycine max
gggagctgagttttgactatgcacaaaatgaatgcgagcaagatgattctacattagagaactcaatgaaggaaaacttggattggctagctgacctaaccttgaaggagaatgaattcctgcaaggttaggtcagctagccaatctgccccactttttgttgataataagcgtgattctagcgaaaagctgagacagatgcggccaactttatctcggaagttcaattcatatgtgctgcctacaccagttgatgcgaa

SEQ ID NO: 132609 - DNA, 266 bp, Glycine max
aaaaaaactaagaagacccatgagagcatcaacaacaggctcgctctcgtcatgaagagtggcaaattcaccctcggttacaagaccgttctcaaatctcttaggagctccaaagggaaattgattatcattgctaacaactgcccccctttgaggaagtcagagattgaatactatgctatgttggcaaaggttggggttcatcattacaatgggaacaatgtggatttgggcactgcatgtggcaaatattacagagtgtgctg

SEQ ID NO: 132610 - DNA, 265 bp, Glycine max
taaaccgcgatcacaggttgccgcaccttaaaaccggaaacaaaagcaatcgttacttgattgcaagaatctctcaatttcttcctacttctttgtgcacgatttcttaagggaaagaaaatcactctctgtgctggtcacagacttcgtgaatcattttcttttccattcttagtttatttgctgaacactctcctatttgatataggacttcgtgtcagatttaaacttcttctgtttctttctcagttttctgtttaatttc

SEQ ID NO: 132611 - DNA, 258 bp, Glycine max
tctggggtggagtactgtcacaggaatatggtggttcatagagatttgaagcctgagaatttacttttggactccaaatgtaatgtcaagattgctgattttggcttgagcaacatcatgcgtgatggtcactttcttaaaacaagttgtggaagccctaactatgcagctcctgaggttatctctgggaaattgtatgctggacctgaagtggatgtctggagctgtggtgtaattttatatgcccttctttgtggc

SEQ ID NO: 132612 - DNA, 261 bp, Glycine max
agcgtgaatcatgtcggacgaagagcatcacttcgattctcaggcggatgcgggagcgtccaagacgtatcctcagcaggctggtaccattcgcaagaatggctacatcgtcatcaaatccaggccttgcaaggttgtagaggtctctacgtcaaagacaggcaagcatggacatgcaaagtgtcactttgttgcaattgatatttttaatgggaaaaagcttgaagatattgttccatcatcccacaatgtgatgttcca

SEQ ID NO: 132613 - DNA, 260 bp, Glycine max
ttcaccccttccttttttgcgtacattctgttttcataggcttcttttttctcttgttgcagtgacgaacttctgaagatatggcaaatcatcctttgacacactctcactctttccgcgagaggtttgatggaactctcactggtcacaggaacgaaattttggcccttctgtcaaggcttgaagccaatggtaagggaatcctgcaatatcatcaagtggttgcagagtttgaagaacatccctaacgagagcagaaa

SEQ ID NO: 132614 - DNA, 257 bp, Glycine max
gtgatttcagtgagtgatcggtgttcacttgatctcatcataatcgtcagcgtcaattgaagaagatgccgatcagaaacatcgccgtcggaaggcctgaagaggcgactcaccccgacacgttgaaggcggctttggctgagttcatctcaaccttcatcttcgtgttcgccggctcaggctccggcatcgcctacaacaagctcaccgacaacggcgctgccacccctgccggcctcatctccgcctccatcgcc

SEQ ID NO: 132615 - DNA, 258 bp, Glycine max
ttcattctttatggatcaagaaacaacaagaagaaacaccatgcaagaatgtcatgtgatagccccaacaacaacaacggcaacatcatcgtatcgtggagttcgtcagcgaaaatggggcaaatgggtgtccgaaatccgtgagcctggaaagaagagcagaatatggttagggagctatgagtcaccagagatggctgcagcagcatatgacgtggcagcgttacaccttcggggacgagctgcaagactcaattt

SEQ ID NO: 132616 - DNA, 259 bp, Glycine max
atcacgatgtcaccgttaaggacgagaagacccttctcttcggtgacaaggcagtcactgtttttggacacagaaaccctgaagagatcccatgggggtcaactggagctgacatcattgttgagtccaccggagttttcaccgataaggacaaggctgccgcacatttgaagggtggtgccaagaaggttattatttctgcccccagtaaggatgcccccatgtttgttgttggtgttaatgagcacgagtacaagcc

SEQ ID NO: 132617 - DNA, 258 bp, Glycine max
gtgaggtgaggtgccaaaatggtgaagataactcttggtactttcgatgactcttttggtgttgcctctcttaaggcttatttggcagagttccatgcaactctgattttcgtgttcgctggtgttggttcagccatcgcttacaacgagcttacaaaagatgcagccttggatccaacggggctggtggcagtagctgtggcccatgcatttgcactgtttgtaggtgtctccgtcgcagccaacatctcgggtggc

SEQ ID NO: 132618 - DNA, 266 bp, Glycine max
ctcgagccggtcgatacctaaaattcctaatcagaaaaaaaaaaccctagtaatgccgccgctggggaggaagcgaaaggtagcacccaaatcttctctatccaccgagccacctctcaagcagcaacaaccaaaacccgaaaatccccctcaagaatacgaagaagtcgaagaggaagttgaggaagaagaggtagaggaagaggtcgaagaggaagaagaagaagaagaggaggacgaggaagaagaggaggaggaagaagaag

SEQ ID NO: 132619 - DNA, 267 bp, Glycine max
gtggtttcagtgagtgatcggtgttcacttgatccttcataagtcgtcatcatcatcatcatcatcaccgttgattgaagaagatgccgatcagaaacatcgccatcggaaggcctgaagaggctactcaccccgacacgttgaaggcggggttggctgagttcatctccaccttgatcttcgtgttcgccggttcaggttccggcatcgcctacaacaagctcaccgacaacggcgccgccactcccgccggcctcatctccgctt

SEQ ID NO: 132620 - DNA, 269 bp, Glycine max
cgcaacagagatgacaacccgatttaagaagaaccgcaagatgcgcggccacgtcagcgccggccacggccgtattggaaagcaccgcaagcaccccggcggccggggaaatgccggcggcatgcaccaccacaggatcctcttcgacaagtaccacccggggttcttcgggaaggtagggatgaggtactttcataagctccgcaacaaattctactcccccatcgtcaacatcgacaagctatggtctctgataccccaagacgcga

SEQ ID NO: 132621 - DNA, 260 bp, Glycine max
cttcaacttgctccctcagaagcgaagaagaagccacagagaaccagtctcctactctctctcacccacaagaaaaatggcatctcacatcgttggatacccccgcatgggtcccaagagagagctcaagttcgctctcgagtctttctgggatggcaagagcagcgccgaggatttgcagaaggtggctgctgatctcaggtcatccatctggaagcagatggctggtgctgggatcaagtacatccccagcaacactt

SEQ ID NO: 132622 - DNA, 256 bp, Glycine max
tgttgttgctgcaccaccgaacaacttcccctgtaaatcgcgtttcgtttgtgcaaggttttaaaagatggctgatgctgaggacattcaacctcttgttgttgataatggaactggaatggtcaaggctggttttgcaggtgatgatgctcctagggccgtgttccccagcattattgggagaccacgccatactggtgtaatggttgggatgggtcagaaggatgcttacgtgggtgatgaagcccaatcaaaa

SEQ ID NO: 132623 - DNA, 254 bp, Glycine max
tcacgaccaaggccaacgttgactacgagaagatagtgcgtgacacctgcaggaacatcggcttcgtctcaaatgatgtgggactggatgccgacaactgcaaggtcctcgtcaacattgagcagcagagccctgatattgctcagggtgtacacggccaccttaccaaaaaacctgaagaaattggtgctggtgaccagggtcacatgtttggctatgccactgatgaaacccctgaattgatgccattgagc

SEQ ID NO: 132624 - DNA, 255 bp, Glycine max
aaatttgttacgggaaattattggttatcgcccagacattatttgtcttcaggaggttcaaagcgatcattatgacgaattcttttctcctgaactagacaaacatggatatcatggtctttacaagagaaaaacaaatgaggtgtacagtggcaacacaaatacaattgatgggtgtgcaacatttttccgtagagacagattttcacatgttaagaaatacgaggttgaatttaacaaggctgcacagtcttt

SEQ ID NO: 132625 - DNA, 258 bp, Glycine max
gtgtacagaatgtacagtgagcttatttcaaagagtattacagaaggtggaccttttgcatctagaacatcctatgacaaacttctacgttcggttaagagggagacacttaagctgattgagacattcttggataaggcagaagaccagccacaaatcggcaaacaatttgtgccgccaatgatggatcctgttcttggagattactccaggcatgttcctgatgcaagggaatcagaggttattgtcactttttgc

SEQ ID NO: 132626 - DNA, 257 bp, Glycine max
tttcaatcgaaaaaaatcatgggcagaaaattcttcgtcggtggcaactggaaatgcaatgggaccactgaggaggtgaagaagattgttactactttaaatgaagctaaagtccctggagaagatgttgtagaagttgttgtgagccctaccttttgtgttccttccttttgtaaaaagtttgctgcgccctgatttccatgtctcggcccaaaattgttgggttcgcaaaggtggtgcttatactggagaggtta

SEQ ID NO: 132627 - DNA, 261 bp, Glycine max
cacggggaggtagtgacaataaataacaataccgggctcattgagtctggtaattggaatgagtacaatctaaatcccttaacgaggatccattggagggcaagtcgggtgccagcagccgcggtaattccagctccaatagcgtatatttaagttgttgcagttaaaaagctcgtagttggaccttgggttgggtcgatcggtccgcctccggtgtgcaccggtcggctcgtcccttctgccggcgatgcgctcctgtcc

SEQ ID NO: 132628 - DNA, 259 bp, Glycine max
gcagacttaacaacagcacaaagcgggttactgtctgttcaagctaccatctctctctctctttcttagtgcctccttgccagaagttaaaatggcccaagaaactttcctattcacatctgaatcagtgaacgaggggcaccctgacaagctctgtgaccagatctccgatgctgtgctcgatgcatgcttggagcaggaccctgacagcaaggttgcctgtgaaacctgcaccaagaccaacatggtgatggttttc

SEQ ID NO: 132629 - DNA, 256 bp, Glycine max
ggcagaccttccgggtctacttgaaggggcacatcgaggttttggtttaggccatgagtttctacggcacactgaaaggtgttctgctctggtacatgttgttgatggttcatcacagcagccagatctcgagtttgacgcagttcgtctagagctgaagctatttaatcctgaacttgctgagaagccttatgtagttgcttttaacaaaatggatcttccagaagcatatgaaaactgggaatccttcaaagaa

SEQ ID NO: 132630 - DNA, 254 bp, Glycine max
ctttgaggaaaccctctaccagagcacagctgcaggcaagccctttgtgaatgtcttgaaggaagctggtgtgcttcctggcatcaaggttgacaagggcacagtcgagcttgctggaactaatggagaaaccaccactcagggtctagatggccttggtcagcgttgtgccaagtactacgaagctggtgcacgttttgccaaatggcgtgcagtgctgaagattggtcccaacgagccatctgagctgtcta

SEQ ID NO: 132631 - DNA, 250 bp, Glycine max
ctttcatttcactcactcactcttcgtttcgtttctcattctcactctagatctgtgtttctctctccaaccttcgtttcaccacacttccatcacttgtcgagtgtagaaatggctccaccaattgagaccccaaccaaggtttccagctatcagcactccccaaaccctcgtcttaacgagaggattctttcatccatttccaggaaacatgttgctgctcacccgtggcatgatcttgagataggac

SEQ ID NO: 132632 - DNA, 255 bp, Glycine max
gatcgaattccggaggcagctttaatggctcgatcttatctcccaagtaaggtctcagagatagtggcaatttggagaaaagacctcaataaggttaatccaaaagctgctgaatcattggctgatcctgaagaatatccaaatttgtttgaagattggcaggttgcactagctgtcgaatctaaagctgtggaaacaaggaatgtgtaccctcctgcggagcagtacgtcaaccatgctgacaaatcacaaatt

SEQ ID NO: 132633 - DNA, 258 bp, Glycine max
tgaatctcaagattctaagagagattttgctgctctttgaagacgggtgtttgcttgattttggtgatgtcgctgctctcagatctcatcaaccttaacctctcagacactactgagaaggtgatcgcagagtacatatggatcggtggatcaggaatggacctgaggagcaaagcaaggactctcccaggaccagttagcgacccttcaaagcttcccaagtggaactatgatggttccagcacaggccaagctcct

SEQ ID NO: 132634 - DNA, 255 bp, Glycine max
gcaacttgaggacgggcgcaccctcgccgactacaacatccagaaggaatcaacccttctcctcgtcctccgtctccgtggtggcatgcagatcttcgttaagaccctcaccggcaagactataaccctagaagtcgagagctccgacaccgtcgacaacgtcaaggctaagatccaggacaaggagggtatccccccagaccagcagaggctgatcttcgccggcaagcagctcgaggacggacgtacccttgc

SEQ ID NO: 132635 - DNA, 253 bp, Glycine max
ttgaaagttaagaagtagcaaagatgtttccattcgggcacaagggtcaaaagataaaggggactatggtggttatgcagaagaatgtgttggatatcaacagcatcaccagtgttgacgggatcgtcggcaccggcttagacttcttaggcagtgcactcgatacagttacttttttagcctcctccatctccatccaacttattagtgctaccaaggctgatggtgggaaaggaaaagttggacaggctac

SEQ ID NO: 132636 - DNA, 262 bp, Glycine max
ggaggggttctgtgacctccttctattccaaattcatcgattctcacaatcttaattgtgggcgttcctacttcgaatccccatcgcgtcgccgcttctgcaacttcattcgatatctcttccgcttctgcgtctaaagctacgaccgactttgtgtcgttgacccgccactatggaaggtgctattgggagctctccaaagctcgtctcagcatgcttgtggttgcaacatctgggactgggtttgtcttggggagtggta

SEQ ID NO: 132637 - DNA, 260 bp, Glycine max
ctctcaacggagcacctctcttcaggtcgccatctagactgcaatcatggctgatggaccacagcatccatcagttgttcagaagctagctggacagtcttacctggtgtccaggctaagccccaactttaactctgggaattattcctcgactggttcttacttcaatggaggactgcactcttctgggttggctgttgtgtcgcctggatctcaagttactgtgcatgctccagcagagaaaggagtgagtgggtttc

SEQ ID NO: 132638 - DNA, 252 bp, Glycine max
agcacgtgcatggaaacttgaagcccagcaatattctattgggcaacgacatggagcccaagattggagacttcgggcttgagaggatagtgacgggtgacacaagctataacgctggcgggtccgcgcgtatttttgggagcaagagatccacggcatcacgagatagtttccaagacatgacgtttgggcctagcccgagcccgagcccaagctcaataagtggtgtgtctccttatcatgctcctgagt

SEQ ID NO: 132639 - DNA, 251 bp, Glycine max
atcattttcccttctttttattctctgcacaacaattcgagattccaaccatcgatctcaattttcaaccttaacctctaagaatgtcttacgcttatctcttcaaatacatcatcatcggtgacaccggagttggaaagtcttgtcttctacttcaattcacggacaagcgctttcagcccgtccatgacttaaccatcggtgttgaatttggtgccaggatgatcacaattgataacaagccaatcaag

SEQ ID NO: 132640 - DNA, 253 bp, Glycine max
ggaggagctgatggaagagaagctcggggatgagttggagaaggtggtgttcatgcacggctttgacaaggagggtcaccctgtgtgttacaacatatatgaggagttccagaacaaggagttgtacaagaagactttttctgatgaggagaagagggagaagttcctgaggtggagaattcagttcctggagaagagtataaggcagcttgatttcaaccctggtggcatatgcaccattgttcatgttaat

SEQ ID NO: 132641 - DNA, 256 bp, Glycine max
ctcgagccgctcccctttgccgctgttgttgttgctgcaccaccgaacaacttcccctgtaactcgcgtttcgtttgtgcaaggttttaaaagatggctgatgctgaggacattcaacctcttgttgttgataatggaactggaatggtcaaggctggttttgcaggtgatgatgctcctagggccgtgttccccagcattattgggagaccacgccatactggtgtaatggttgggatgggtcagaaggatgctt

SEQ ID NO: 132642 - DNA, 259 bp, Glycine max
cggctcgaggcttcaacttgctccctcagaagcgaagaagaagccacagagaactagtctcctaagctcacccgcaagagaaaaatggcatctcacatcgttggatacccccgtatgggtcccaagagagagctcaagttcgctctcgagtctttctgggatggcaagagcagcgccgaggatttgcagaaggtgtcttctgatctcagggcatccatctggaagcagatggctgatgctgggatcaagtacatcccca

SEQ ID NO: 132643 - DNA, 251 bp, Glycine max
cttggaagaaaaggccgagatgaagaagatgtacggcctgatcgagacctacaagttgaacggccaattcagatggatttcatcgcagatgaaccgtgtgaggaatggagagctctaccgcgtgatctgcgacaccaggggtgctttcgtgcagcctgctgtatacgaggcttttggtttgacagtggttgaggccatgacttgcggcttgccaacattcgccacatgcaatggtggtcctgctgagatca

SEQ ID NO: 132644 - DNA, 243 bp, Glycine max
tctctttgtcgcttggatcactgatctcatctcaattttcagatatgtcgacatctgataagccagaagtggtggaaaggggtagcaaggatgaaaaacacaaggaagatgatcaagaggaggggaagggtggattcattgagaaggtgaaggatttcattcatgacattggtgagaagattgaggaagctattgggtttgggaagccaactgctgacgttactgcgattcacattccatcga

SEQ ID NO: 132645 - DNA, 250 bp, Glycine max
cggttctttacttgttgggttgttctgatcttctctcatagcaatcaaatcacactcccatcttctcatctcgtaaaccctaaaccccgttttcagtgacatcgagatcgatcgaacatggatgaggagtacgatgtgatcgtgttgggcacgggtctcaaggagtgcattctcagcggtcttctctccgtcgatggcctcaaggttctgcacatggacaggaatgactattacggaggagaatccactt

SEQ ID NO: 132646 - DNA, 251 bp, Glycine max
cacatttctagattcacgcttctaccactacactacttccacttcctctctcttttctcttcgcaacaagccactctcatcccctacaatcacccatttgggcaacaccaaaccatcaaagagtttctcggttggtgcctcctcttctagggattctgttgtgactttgcttgattacggtgctggcaatgttcggagtgtcaggaatgcaatcagattcctcgggtttgacatcaaagatgtgcaaactc

SEQ ID NO: 132647 - DNA, 254 bp, Glycine max
ctcagcgatggtgttggatccgccgcccttcctcccgtcgacaaagtccgcctacctccaaggcggcgacgccacggccttcgatgaggaagatctctacgcccgactcaaatccctagtgcgtcactcgagttcgtcgacatccaggaggagtatgtgaaggacgaactgaagaatctcaggcgcgagctcctccgcgcgatggaggaggtgaagcggatccagtcggtgccgctcgtcataggccagttcat

SEQ ID NO: 132648 - DNA, 247 bp, Glycine max
ctcgagcgttctactccactgttactcgtgccagatttgaggagctcaacatggatctcttcaggaaatgtatggagccggtggagaaatgtttgagggatgctaagatggacaaaagaagtgttgatgatgttgtccttgttggtggttctaccagaattcccaaggttcaacaactgctgcaggacttctttaatggaaaagagctttgcaagagcattaatcccgatgaggctgttgcatatgg

SEQ ID NO: 132649 - DNA, 246 bp, Glycine max
ggtccttctaagccctgcaatctttcttctggttccaagctttgagtttcagctagaaggcaagcgagtaggcattgttggattgggaaaaattggcagagaagttgctaaaaggctggaggccttcggctgcagaattatgtacaattcaagaaaccagaagccatttgtctcgtaccctttttactctaatgttgttgagcttgctggtaatagtgatgtccttgtgctttcttgctcattaaa

SEQ ID NO: 132650 - DNA, 243 bp, Glycine max
tcttcctcaccgattgctagaatggaatttcgatgctcagtcatctcttttaccattctcttctctcttgctcttgcaggagagagccatgtccatgcatcgctacctgaggaagattattgggaagctgtttggccaaacactcccattcccactgcactgcgagagcttctaaagcctctccctgcaggtgtagaaatcgatgaactccctaagcaaattgatgatacacagtacccaaaa

SEQ ID NO: 132651 - DNA, 243 bp, Glycine max
tgaacatcaagagcctgctggaccttacatgccaaactgtagccgacatgatcaaggggaagactcccgaggaaattcgcaagacctttaacattaagaatgacttcacccctgaggaagaagaggaagttcgtcgggaaaatcaatgggcatttgaatgattttgttgagctcataaaatatgaatcaaagatctgccatgtggatttatgctatgcttgtttgtttatcaaagatcttcct

SEQ ID NO: 132652 - DNA, 243 bp, Glycine max
caacaacactctctcttctcgctcttggcttttcgctcttcactcactctcattcattcatttccaccgttcatggatccactaagcgtgtggggtaacacgcccttggcgacggtggatcccgagatccatgacctcatcgagaaggagaagcgccgtcaatgccgcggaatcgagctcatcgcctccgagaacttcacctccttcgccgtcatcgaggccctcggcagcgctctcacgaac

SEQ ID NO: 132653 - DNA, 243 bp, Glycine max
gaccaatgtaaatataatgttcacctgcttccgggagacctttcatatgctgattatatccagcatcgctgggactcgtttggtaggctagtgcagccacttgctagtgctagaccatggatggtaacacaaggaaaccatgaagtagagagcatacctttgttaaaggatgggcttttgtcctataattccagatggaaaatgccatttgaggaaagcggatcaaattcaaatctctattat

SEQ ID NO: 132654 - DNA, 243 bp, Glycine max
cggctcgagctcgaccgaatcggctcgacggctcgagtaaaaactggagacggcattaactaagagctgccttagtgggtttattgctactgacgttcctcctccaaagggtccattgtggattcttggcgatgttttcatgagggcatatcacaccgtctttgactacggaaatctacaagttggttttgccgaagctgtctaattaggctttctggaggattttctttgaaaaattgttaa

SEQ ID NO: 132655 - DNA, 238 bp, Glycine max
gcccaatcgtagccgtcggactctggggtttcaacgccgtcttcgatcttcggacattggcgacccaaatgagcaagaagagaaagttcgtagctgatggagtgttcttcgctgaactgaaagaggttctgacaagagagttggccgaggacggttactccggcgtggaagttagggttacgccgatgcgcaccgaaatcataattagaagcaccagaacccaagctgttctcggtga

SEQ ID NO: 132656 - DNA, 252 bp, Glycine max
gcaagagacgatctatgcataagcgttcccagcttcttcaagtgccccatctctctcgacgtcatgaaatcccctgtcagcctctgcaccggagtcacctacgaccgctccagcatccaacgctggctcgacgccggcaacaacacctgccccgccaccatgcaactcctccataccaaagacttcatccccaaccgtactctccaaagcctcatccagatctggtccgattcgcttcttcgccacccaacc

SEQ ID NO: 132657 - DNA, 244 bp, Glycine max
atcgaaacgaggtcgttttgtgttccgccgaaggaccggaggttgtagcaggctagcagctatggatttggcatccaatctcggtggcaagattgacaaagccgaagttctctctgccgttcagaagtatgagaagtatcatgtttgctatggaggtcaagaggaagagaggaaagctaattataccgatatggttaataaatactacgatcttgttaccagcttttatgagtttggctggggg

SEQ ID NO: 132658 - DNA, 246 bp, Glycine max
cattgttgatgatttgaatttccaggaagctctggaaggaaaaatcgttgtcaaaactcagtcttcaatctcccactatggaattcgccttactgtcaaaggatccgtcaacttgcaggttcgtggaggatcagctggggttgttgaatcattctacggtgttattaagcccatccctattgtgaataggaccattgaggttaaatcttctggaaagattggttctggtacatcagagataccatt

SEQ ID NO: 132659 - DNA, 246 bp, Glycine max
agcacgtgcatggaaacttgaagcccagcaatattctattgggcaacgacatggagcccaagattggagacttcgggcttgagaggatagagacgggtgacacaagctataacgctggcgggtccgcgcgtatttttgggagcaagagatccacggcatcacgagatagtttccaagacatgacgtttgggcctagcccgagcccgagcccaagctcaataagtggtgtgtctccttatcatgctc

SEQ ID NO: 132660 - DNA, 243 bp, Glycine max
accgaccacaccacccatcaacgacatgcttcctctttcccttctcaagactgcccaaggccaccctatgttggtggaactgaaaaatggggagacatataacgggcatttggttaattgcgacacatggatgaacatccatctgcgagaagtcatttgtacatctaaagacggagatagattttggaggatgcctgaatgctacatacgaggcaatacaatcaagtaccttcgagtacctga

SEQ ID NO: 132661 - DNA, 243 bp, Glycine max
aagagatgggaagagctccttgttgtgacaaggccaatgtaaagaaagggccatggagtcctgaagaagatgaaaagctaagagagtacatagagaaacatggaactggagggaactggattgctctcccacaaaaagctggtttgaaaagatgtgggaagagttgtagactcagatggcttaattatctcagaccaaaccttaagcatggggagttttctgaaggtgaagatagaataatct

SEQ ID NO: 132662 - DNA, 245 bp, Glycine max
ctcaaagaaggatactatgtgatggaccctgcgaaagcagttgaaatggtagatgagaacaccatctgtgttgcagccattttggggtcaactatgaccggagagtttgaggatgtgaagcttctcgatgaacttcttactaaaaagaacaatgagacaggttgggataccccaattcatgtagatgctgccagtggggggtttattgccccatttctatatcctgatttagagtgggacttccg

SEQ ID NO: 132663 - DNA, 247 bp, Glycine max
gtttgatggtgccctgaatgtggatgtgactgaattccagaccaacttggtcccataccctagaatccatttcatgctttcctcctatgcaccagttatctctgctgagaaggcctaccatgaacagctctcagtggcagaaattaccaacagtgcttttgagccatcgtccatgatggccaagtgtgatcctcgtcacggaaagtacatggcgtgttgcctgatgtaccgtggtgatgttgtgccc

SEQ ID NO: 132664 - DNA, 252 bp, Glycine max
gaaattttgataaaccgcgatcacaggttgccgcaccttaaaaccggaaacaaaagcaatcgttacttgatttcaagaatctctcaatttcttcctacttctttgtgcacgatttcttaagggaaagaaaatcactctctgtgctggtcacagacttcgtgaatcattttcttttccattcttagtttatttgctgaacactctcctatttgatataggacttcgtgtcagatttaaacttcttctgtttct

SEQ ID NO: 132665 - DNA, 242 bp, Glycine max
  unsure (1)..(242): unsure at all n locations
gccacaagcaggaggagcatggcctattgttggtcatttgcacctcttcggggctcatcaacttccacacaacataaaacaggaaaaagctgacaaacatgggccaattttcacgataaaacttggagtatacaaagttctggtgttgagtagctgggagatggccgaagatgttnnacactgtccatgacaaagcattctccacgaggccctgtgttgcagcctcaaagctaatgacctac

SEQ ID NO: 132666 - DNA, 243 bp, Glycine max
cggctcgagggcacctgtcttttctcgtgaagcttggcgttgtgtgtggcacatgattcagaatgatctagtgcatggatggggattggactttgctctcagaagatgtgtagagccagcacatgaaaaaattggtgtaattgattcacaatggattgttcatcaagtaattccttctcttgggaaccaggttagacctcactagcttacaatatagttagggccacttattttctttgatga

SEQ ID NO: 132667 - DNA, 243 bp, Glycine max
aatgattattcccgagtctgggcactcggcatatgacaaggctgcacagtattttaatatcaaactatggcgtgtaccagttaacaagaatttccaagctgatgtgaaagcgatccgacgtcatattaacaaaaataccatcttgattgttggatctgctccagggtttcctcatggagtaattgaccccattgaaataatttggcaatttcttccgtaggaacttggtcatctggcatcaag

SEQ ID NO: 132668 - DNA, 242 bp, Glycine max
gagaagtaatggcgaacatagacatcgaagggatcttgaagcagcagcagccttatgatgggcgcgttccgaagacgaagatagtgtgtactttgggccctgcttctcgatccgtagaaatgaccgagaagcttctgagggcagggatgaacgttgctcgtttcaatttctctcatggcacccacgactatcaccaggaaaccctcaacaatctcaagactgccatgcacaacactggcata

SEQ ID NO: 132669 - DNA, 241 bp, Glycine max
ggcgcaagaagcagtctgatgttatgagattcttgcagcgggtgaggtgctgggagtaccgccagcaaccttctattgtccgtttgacaaggtctactcgcccagacaaggctcgccgcttgggtttcaaggctaagcagggttatgtgatttaccgtgttcgtgaccgaaggggtggccggaagagaccagttccaaaaggtattgtttatggtaagcccaccaaccaaggtgttactca

SEQ ID NO: 132670 - DNA, 245 bp, Glycine max
  unsure (1)..(245): unsure at all n locations
gcttctctccttccttcaacgtcgcaaaagaaaatggccaccggagaanattttcaagtttgtggacacgctatattgtacagaagcagcaatattgtggccagggtttttgatcgtcaaatttgcactcctgctcctggcactagtgtgtaatttaattcttgcaggttcatcatgctcggcgattctatgaaaatttggtaccaagtcacacagtatatgaggtcgagtgcccagaccattca

SEQ ID NO: 132671 - DNA, 250 bp, Glycine max
tacctgcaccagccttggtgaaggaattagatgagacaagccaagtgtacccaaaatttgtgtttgatgattacatgaagctatatgctggtctcaagtttcaggctaaagagccaaggtttgaagctatgaaggccaatgcaagcgtagttgatgtgggggccatagccacagtttgagtctcagggctctcagcatgtggaatcggttatgtgtgtttctgttaataataaacaaaggctactcacaa

SEQ ID NO: 132672 - DNA, 246 bp, Glycine max
cggctcgagcttctacagcattcttctgctattcaaatcaaattttcaaaccatggcttcctccaccaatgatatactacgaaaaggcaacggtatatacgtgagcttcggcgagatgctcatcgatttcgtccccaccgtctccggcgtgtcccttgcggaggctcgggctttcttcaaggcccccggcgtcggcccccgccaacgtcgccatcgccgtcgcgaggctcggcggaaaggcggcgt

SEQ ID NO: 132673 - DNA, 237 bp, Glycine max
ctcgagccgctcgagccgcataaatattccgttttgcgtttctctgcctaaaaggattgaaagatgggtctagcactaggttgctatcaagttgatcagtcaaatgtggctatcaaggagcattttggaaaatttgatgatgtcctagaacctggatgtcattgcctgccttggtgtcttgggtaccagattgctggtagtttgtcactgcgtgtgcagcaacttgatgttcgatgt

SEQ ID NO: 132674 - DNA, 238 bp, Glycine max
gggcagtgccggcgcgcgctgaagtttgctaggttcatgagcaggttcgggaagagttaccgaagcgaggaagagatgagggagaggtacgagatattctcgcaaaacctcaggttcatccgctcccacaacaagaaccgcttgccctacactctctctgttaatcattttgctgattggacttgggaggagttcaaaagacacagactaggcgctgcccaaaattgctctgccactc

SEQ ID NO: 132675 - DNA, 238 bp, Glycine max
actccatgtcccttaaatgtgtggttgacttaggcataccagatatcatacacaactatggccaacccatgccactctcaaacctcattgcttcactaccaatccacccatccaaaacttgcttcgtccattgcttgatgcgaatcatgatccattctggcttcttctctcaacaaaaccatgacttggagaatgagctagaagccaagtatgtgctaaccgatgcatctgtactatt

SEQ ID NO: 132676 - DNA, 241 bp, Glycine max
gtgaaacatgcactgccaaacctatgaccactgtggaatggtacttggtgttcacctgtgtagctgtggtgctatcagagttgccaaacttgaattccattgctggggtgtcactcattggagctgtcactgctgtagggtattgtactgccatttgggtaacctctgtggcacggggtgccctaccggatgtgagctataaccctgtgaggactggaaacagtgttgaagatgcctttag

SEQ ID NO: 132677 - DNA, 239 bp, Glycine max
agccatcctgtgttgctcctactacgtgcttttcaccccggctcttctctagcaaatcaaagaaagaccggaagccgaaaactgaaattggtaaccaagtgagtccgttacctgagctcattgcagagcctacggatgctcggtccatgtcatttgttggaactcacgagtacttggcaccggagatcattaagggtgaaggtcacgggagtgcggttgattggtggactttcgggatc

SEQ ID NO: 132678 - DNA, 240 bp, Glycine max
gcaccagcaacaacagagaatgaacagtactgaggaggggatgcaaggcataggcataggcataggctgcttccaaaacgacgtcgtagggcagctggagctgagtcccactatgagcaactcctcctcctcgctatccatggagctggacgagtccccggagagcagaatccaacggttgatatcggagcacccggtcatcatcttcacccgatcctcctgctgcatgtgccacgtcat

SEQ ID NO: 132679 - DNA, 244 bp, Glycine max
gtgctctgctcgtgcctctagggttatcatatctccatttccatttcctctctctcagtttccaagaatcttaagctatgggaaagtcttacccaaccgtgagcgctgattaccagaaggccgttgagaaggcgaagaagaagctcagaggcttcatcgctgagaagagatgcgctcctctaatgctccgtttggcatggcactctgctggaacttacgacgtgagctcgaagaccggtggtcc

SEQ ID NO: 132680 - DNA, 242 bp, Glycine max
ggttgacgaagaagacgaagaagaagaatggagaagtcagggaagagagtgttgcttacctccaacggcgacgacatttctcaaggcattgccttccatttggtgaagcaagggtgcaggttggttttgctgggagatcagaattccctgcggagcatcgcgaacaaaatcatggattccctctccctcgcagacagaggcaccgtgcaggtcgttggattggacatggaggatcaaagcga

SEQ ID NO: 132681 - DNA, 238 bp, Glycine max
aagggttcaagcaaaggtcgtctaaagatagaggatatacagttatcagaggaagagatggacatgttcatagatctacatccatttactaatgcttctccttatactgttgtggagacaatgtcactgggaaaggcccttacacttttccgagagctaggtttaaggcatctgctagtggtacccaagttctccggtagatcacctgtggtgggtatactcacacgacacgatttca

SEQ ID NO: 132682 - DNA, 234 bp, Glycine max
gagaaaacaggctcaaacccatgcctattatactctgtggtgactggaatggaagcaagcgtgggcatgtttacaagttcctaaggtcacaggggtttgtatcatcatatgacattgctaatcaatacagtgacagttatgcagattctcacaagtgggttagtcaccgaaatcataggggaaatatctgtggtgttgacttcatttggctttgcaatcccaaccaagcacgta

SEQ ID NO: 132683 - DNA, 234 bp, Glycine max
atcactactctctgttctcaagaacaaaacaaaagaagaaagaaatggcaggaggatcatacgaggaagccattgcagcgttgaccaagcttatcagcgagaaagccgacctgagtggcgtcgccgccgcaaagatcaagcagttgacggcggagctagaaaccgccaccgcaaacgggtcgacgccgtttaacccagacgagaggatccgaaccgggttcgcccacttcaaga

SEQ ID NO: 132684 - DNA, 233 bp, Glycine max
caacaacactctctcttctcgctcttggcttttcgctcttcactcactctcattcattcatttccaccgttcatggatccagtaagcgtgtggggtaacacgcccttggcgacggtggatcccgagatccatgacctcatcgagaaggagaagcgccgtcaatgccgcggaatcgagctcatcgcctccgagaacttcacctccttcgccgtcatcgaggccctcggcagcgc

SEQ ID NO: 132685 - DNA, 235 bp, Glycine max
cggctcgagaggggatgagcttttggctgttgctggtgctccctatgacacgctcgaggaagtattagggaaaagggactctggtggactgggttccctccaagattttggggtgaagtaccgagaagtgccacttgccgaggatggtggacttgactggaatgcactcatgagttctgtcaaacccaaaacaaaatgtgcactcatacagcggtcttgtggttattcatggcgt

SEQ ID NO: 132686 - DNA, 232 bp, Glycine max
tgggttcaacaggtgagactcagattactccaacccatgtatctgatgaagaggcaaaccttttcgccatgcaactagccagtgcctcagtactccctatggttctcaaatcagctcttgagcttgatctgttggaaatcatagccaaggctggccctggtgttcacctttccccctccgacattgcttctcggctcccaacacacaaccctgatgcacccgttatgttgga

SEQ ID NO: 132687 - DNA, 240 bp, Glycine max
  unsure (1)..(240): unsure at all n locations
tatctttgcaactanaatggcgtcgtcacaaccagagatggagcatccaaagaaggtttttggttgggctgctcgggactcatctgggcttctctccccattcaacttctccagaagagacacggggggagacagatttggtatttcaaagtgcaatactgtggaatatgccactcagatctacatatgttaaagaacgagtgggggaacacaacctatccctctgttcctgggcacgag

SEQ ID NO: 132688 - DNA, 241 bp, Glycine max
attttgttccatagaactgcaaaattcaccattctgtggttgggctgcgatcttgcatatcagaaggtgcaattattgaagacacgttattaatgggggcagattattacgaggtaataatgtggttaaacaacttggccagttacgcctagtatttccaagttttaatagccaagttttcacgtgtgaaagtggttgaaacacttggatattcaattcatcgattataagtttgcaattg

SEQ ID NO: 132689 - DNA, 241 bp, Glycine max
tctgtctctgtgtttgcggctgaggattccgaacgagcgaccttcttcgtttctcgcaaagtttaagtcatcatgggtaaggaaaagactcacatcaacattgtcgtcattggacatgtcgactctgggaagtcaactaccactggtcatttgatctacaagcttggaggtattgacaagcgtgtgattgagaggttcgagaaggaggctgctgagatgaacaagaggtcattcaagtatg

SEQ ID NO: 132690 - DNA, 245 bp, Glycine max
  unsure (1)..(245): unsure at all n locations
tgagtgaatagggatcagggatgtggaggctgaagatagcagatggaggaaatgatccatacatattcagcacaaacaatttcgtaaggaggcagacatgggagtttgatcctgaagcaggcagtccagaggaacgggcccaagttgaaacagctcgtcagcatttctaccacaaccgcttcaaagncaagccctgcgctgacctcctttggcgttttcaggttctcagagaaaataacttcaaa

SEQ ID NO: 132691 - DNA, 251 bp, Glycine max
cagaatttctatctatctcttgtttcaatttcaacaacggttactcctttttcgttttgagtttcaatcaagccatcatcatgtctaccgcatcgcaacccaaggccaagaaaacggcgtcgtccaagaagcccctctcccaccctcccttcgccgtgatgatagcagaggcgattgcgagtctgaaagagagaaccggttcgagccaatacgcgataaccaaatacatcgaagggaagcacaaggagttg

SEQ ID NO: 132692 - DNA, 253 bp, Glycine max
ctcgagccgctcattaattgcaagaatggcacttcgttgcttggtgatgtccctttctgatctcttcactcttggtcttgcgagagaaagccatgccagagacgaagatttttggcatgctgtttggccaaacactcccattccaagttcattgcgagatcttctaaagcctggccctgcaagtgttgaaatcgatgatcaccctatgcaaattgaagaaacacagtacccgaaaaccttcttctataaagaa

SEQ ID NO: 132693 - DNA, 253 bp, Glycine max
ctacaacaagaattcatctattcatttcagcccatcagcatggcgaaggagaagaaaaacttgtccaacaagaacaagaagccaagcaatgcagacgaggttcacttccgcggagtccggaagcgcccctggggccgctatgccgccgagatccgcgaccctggaaagaagacccgcgtctggctcggcaccttcgacaccgccgaggatgccgcccgcgcctacgacgtcgccgcccgaacttccgtggccc

SEQ ID NO: 132694 - DNA, 247 bp, Glycine max
ctgggatccgatcacagccatggcaggggcagcctctgctctgttcctcctcgacatcaaaggccgcgtcctcatctggcgcgactaccgcggcgatgtctccgccctcgacgccgaacgcttcttcaccaaactcatcgaaaaacaggccgatccgcaagctcaagatccggttgtgcacgacaacggcgtgacctacatgttcatccaacacagcaacgtgtacctcatgatagccacagacaga

SEQ ID NO: 132695 - DNA, 250 bp, Glycine max
gttggaggaccttcttggcctgttgcattaggccgaagagatgcaacaaaagccaatcggatggaagctaatcaacaaattccttcaccgttcgagcctctagataacatcattgcaaagtttacttcaaagggtcttaacttgagagatgttgtagccctttcaggttcttacttttttcaccaaatatttgaagcttttttaatacatgacatcatacatagttaaattcaatttgatacaataatgt

SEQ ID NO: 132696 - DNA, 248 bp, Glycine max
ctctgctcgtgcctctagggttatcatatctccatttccatttcctctctctcagtttccaagaatcttaagctatgggaaagtcttacccaaccgtgagcgctgattaccagaaggccgttgagaaggcgaagaagaagctcagaggcttcatcgctgagaagagatgcgctcctctaatgctccgtttggcatggcactctgctggaacttacgacgtgagctcgaagaccggtggcccttcggaa

SEQ ID NO: 132697 - DNA, 251 bp, Glycine max
cttttattgcttcctttcccattcttcatcttcttctctctgaaccgtactcaaactcactttcccacttatttatacaatgtcggcttacaaagaccaggatccccgtcttcatggcatcaaaactaagattcgtgtcgtccccaatttccccaaatccggtcttatgttcctagacattactactctattgcttgatcccaaagcatttaaggactcaatagatttgttcgtggagcggtacaagggca

SEQ ID NO: 132698 - DNA, 246 bp, Glycine max
ctccaccaaaccattctcatcaaccgacgctctctccgccttcgcttctctcaatcccgatctccgatccttctcccccggctacctccgtctctcactccgtcctcgtcttcccaagagacttcagatacgggctgctgggagtatctatggaaatcactttcgtgtttcaacatatggagaatcgcatggaggaggtgttggttgtattattgatggatgtcctcctcaccttccctctccgaa

SEQ ID NO: 132699 - DNA, 248 bp, Glycine max
ctacccgccgctcgatgggaattgcgcttcaaggcgtctcgtagggctaatccgcctcacgagggtcaccaacggcacgtgcctttggggggccgaggccccctactgctggtcggcaaacggacggcgggcgcacgcgtcgcttctagcccggattctgacttagaggcgttcagtcataatccaacgcacggtagcttcgcgccactggcttttcaaccaagcgcgatgaccaatgtgcgaatcaa

SEQ ID NO: 132700 - DNA, 248 bp, Glycine max
actacctcaatctttctcatgggaaagtttgccctagccaatatcctcttggtccttctcttgaacttgagcactttgctctatgttcttgcttgtacctattgcccttacccttctcccaagcctccaaaaaagcctcccgttgtgaaaccaccggttcacaaaccaccaaaaccatgtccaccacccaagtcatctccaaaaccaccccatgtacaccctccctatgttccaaacctcctcactac

SEQ ID NO: 132701 - DNA, 245 bp, Glycine max
tctcgagccgattcggctcgagctccaactctccttcgctttcccactttctctgaaaggtatggagtgctttgacttctggaagagataatggtgcagtgcctagacggattaaagcatttgtgtgctgctctgataaattgttgtgatgctgattcgtcaaagcaacctacaggtttagaaaatcctgaagttcttgcaagagagaccgtgtttagtgtaagtgagattgaagcactgtatga

SEQ ID NO: 132702 - DNA, 261 bp, Glycine max
gttcggctcgatatatgcctatgcttatctatcattttcttactttcctctcacgctctgccacaaaactccgtctccgcaataacggaataaaaaaacaagtttaattactattatggcgccgacggatcataagacaagcaacgctaaggctatcggtaacggtaacagcggggtgaaggaggtgcattttcgtggagtgagaaagaggccgtgggggagatacgccgcggagatcagagatcccggatagaagagccg

SEQ ID NO: 132703 - DNA, 250 bp, Glycine max
ccatgacaagggtgagaaaaagaagaagaaggacaagaagaagaaggagcatggacatgaccatcatggtcatagcagcagcagtgacagtgattagatcttatatgttaagcaggtgtacggtacgatggtagtgaggagccagaatccctcttcctgctttatgatataataaaaataaaatagcgattccggaaatcatgtctgtagctgctctttttatttatgtgataaatgtaaaacgctttgg

SEQ ID NO: 132704 - DNA, 245 bp, Glycine max
ctttcttgtggtgatcttggtttgggaaatccctggattctttgacatattttggagcccatttgctttatttttgggttatactgatcctgcaaagcctgatctccctcgaatgcatgagtggcatttcagatctgggcttgatcgctacatctggataattggaatgatttatgcctactttcatccaaatgttgagaaatggatggaaaaattggaagagagtgagatcaagggagagctac

SEQ ID NO: 132705 - DNA, 244 bp, Glycine max
gttcgatgagtatggcatttccttcaaatccaaacccggtgctcttcccactatcgttttgctcgatcgaggaaattgcttctttgctttgaaggtatggaatgcacagaaggctggagcttctgctgttcttgtttcggatgatattgaggaaaagttgataaccatggacactcctgaggaggatgggtcatctgcaaaatacatagagaacataacaataccatctgctctcattgagaaa

SEQ ID NO: 132706 - DNA, 244 bp, Glycine max
acaaaacagagcaaagagagagtgtgtgaaaagtgaaacaaaaaacagaacaacaatggcgacacttaaggttcctcagcctcttccccccgttgcagatgattgtgagcagctccgaaaagccttctcaggttggggaactaacgaggagctgattgtatcgatcttggctcataggaatgctgctcagaggaagcttatcagagaaacttatgcccagacctatggagaagactcctcaagg

SEQ ID NO: 132707 - DNA, 246 bp, Glycine max
cagaattaacattcttcttccaggacaacagcaacttctagtgagtgaagttgctaatgcatccaagggacctgtgattcttgtcataatgtctggtgggggcatggacgtgtcctttgctaaatctaatgataaaatcacaagcatcctttgggttggctaccccggtgaagctggtggagctgccatagctgatgttatttttgggttttataatccaagtggaaggctaccatgacatggtat

SEQ ID NO: 132708 - DNA, 245 bp, Glycine max
gctgacaaggcttttggccgtgacattgttgacgcacattacaaagcctgtctttatgctggcatcaacatcagtggaattaatggagaagtgatgcccggtcagtgggaattccaagttggaccttcagttggaatctcagctggtgacgaggtgtgggcagctcgttacatcttggagaggatcactgagattgctggtgtggtggtttcctttgatcccaagccaattcagggtgattggaa

SEQ ID NO: 132709 - DNA, 244 bp, Glycine max
tcaacatcatcttaacatgcaagaggctaaaccgctcaggcctgcaccgtcttgtgttgtctaaagctgggcccaaagtattcgccataaagccgaaaaattggtcagaatatgctcactcttttctcaaacactgcgtcaatgccggtaacgtggatgcctgttacactctcggaatgatccgattttactgtttgaaaaaccgagggagcgggctctcgttaatggcgaagcggctatgaag

SEQ ID NO: 132710 - DNA, 241 bp, Glycine max
atgacttcttctgggagtgcatttaaccacgtcgaggtgggaagccatccggggagcttctagaactgattgaaagagactttggtcatttggaaaattccttgatgagttcaaaggtgctgctgcaacacaatttggttcaaggtcggattcggtagcatatagagccagaaaatttgatggggaaaatgtagcaaatcctccttcacccgatgaggacaacaagctagtgtgctcaaga

SEQ ID NO: 132711 - DNA, 241 bp, Glycine max
caatttcacaagtgctattttcagtacattttcttagttgtgataatatgagagtgagcgcagagtttgagcgtgttctcaagtatttcgatgaagatggggatggtaagatttccccatctgagcttaggaaccggctatgcatgatgggtggtgagttattgttcaaagacgctgaaaagttgattgaggaattggattctgacggtgatgggtttttgagtttggaagattttgtgaa

SEQ ID NO: 132712 - DNA, 242 bp, Glycine max
tggaaacttactaaaagctcttgggacacaggttgcagagccattaagggcaatggtggtgggagctccattggaggatgctaggcatcttgctcaacgttatgacagaatgcgacaggaagcagaagcccaggctattgaagtttctaaacgccaggcaaaagtaagagaaatgccacccaatggagagaatgctatgaaattagaagcagctgaagctaagctgcaggactgaagacaaa

SEQ ID NO: 132713 - DNA, 242 bp, Glycine max
ggacagttgacaggctataagttggtacctggctcaaactgcttaccattggcaggttctgaggccaagtttctaagaagagctgctttcttgaggcataatctttgggtaacaccctattcacacgatcaaatgtttcctgggggagaatttcctaatcaaaatccacgtgtcagccaaggactagctacatgggttaagcaaaaccgatcattggaagaaactgatatagttctttggta

SEQ ID NO: 132714 - DNA, 244 bp, Glycine max
tctcgagccgaatcggctcgagtccttatctatcttcacctccatcatttaacagttcccctactaacttctgaagatgggtggcattgcattcggacgcttggatgattctttcagtttaacctcaatcaaggcctatattgctgagttccattcaaccttgctctttgtttttgccggtgttggttcagccatagcctatggtaagttgacatcagatgcagcacttgatcctgctgggtta

SEQ ID NO: 132715 - DNA, 244 bp, Glycine max
gcgaaatcatttaagataagagtgcattactactaagaggagaaaaaatgaaagttgtatacttccttgttgctatcttggctttgacatccactgtggtctctgcctatgaccctagtcctctgcaagatttttgtgtggcggccaaagaaaaagatggtgtatttgtgaatggaaaattctgcaaagatcccaagcttgtgaaagctgaagatttcttcaaacatgtggaacctgcgaatac

SEQ ID NO: 132716 - DNA, 245 bp, Glycine max
ctacaccttaggtttaggagaggcgaatatcgcgggaaagaagatatttctcttcgacgcggtttgcaggccgagggagattcactcgttggagacgacgccgtttgatgattacgtggggaaccacgagaacaagacgctgcacgccacgcagcagatcgccgagtgttggacgcgctcggtgaagaagctgctggagagagtaacggagtcggtggagaaaaaggcgttggagaaggccgcga

SEQ ID NO: 132717 - DNA, 237 bp, Glycine max
ccaaaggtttcagacactgttgtggaaccctacaatgctactctctctgttcaccagcttgttgaaaatgcagacgagtgcatggtgcttgacaatgaagctttgtatgacatctgcttccgtaccctcaagctaaccacccctagctttggtgacttgaaccatttgatctcagcgacaatgtctggtgtcacttgttgtttgaggttccctggtcagttaaactctgtctgcgaa

SEQ ID NO: 132718 - DNA, 240 bp, Glycine max
gagaaagtgagaggagagagaaagtagcagatcctccatggcctccaccaaggaacgtgaaaacttcgtctacgtcgccaagctcgccgaacaagccgaacgctatgaagaaatggtggaagcaatgaagaatgtggcgaactaaacgtggaattgacggtagaggagcggaaccttctgtcggttgggtacaagaacgtggtgggtgctcgtagggcttcgtggaggatctttcctcga

SEQ ID NO: 132719 - DNA, 239 bp, Glycine max
gaagtaatggcgaacatagacatcgaagggatcttgaagcagcagcagccttatgatgggcgcgttccgaagacgaagatagtgtgtactttgggccctgcttctcgatccgtagaaatgaccgagaagcttctgagggcagggatgaacgttgctcgtttcaatttctctcatggcacccacgactatcaccaggaaaccctcaacaatctcaagactgccatgcacaacactggcat

SEQ ID NO: 132720 - DNA, 244 bp, Glycine max
aaaaaagacaacccagagagcgcgtcttaataaacgctcttctctgaaaacccccatttcttttcttctttcttcttctctttcgcttcttcgatcttcgatcttcgtcgctgaaaatgagagagtgcatttcaatccacatcgaccaggccgggattcaggttggaaacgcctgctgggagctttactgcctcgaacacggcattcagcctgatgggcagatgccaagtgacaagaccgttgg

SEQ ID NO: 132721 - DNA, 243 bp, Glycine max
cactcacaaacacacactgaactaaaaaacatcaaaagagacatggctgagcaaaccttcatcatgatcaagcctgatggcgtccaaagaggccttattggcgagatcattagcagatttgagaagaaaggtttctacttgaaaggtttgaaacttgttactgtggaccgtccttttgctgagaagcactatgctgatttgtctgccaagcctttctttagtggtttggtggattacattatc

SEQ ID NO: 132722 - DNA, 240 bp, Glycine max
gcagaaatgaggagtcgaggaatcaataaagatcgacttcaactactacaagatgttagtggtgcttttagaccaggaattttgacagcacttgtgggtgttagtggtgctggaaagacaacccttatggatgtattagctggaagaaaaacaggtggatacattgaaggaagtattagcatctcaggttacccaaagaaccaagcaacattttctcgtatcagcggtattgtgaacaaa

SEQ ID NO: 132723 - DNA, 238 bp, Glycine max
gtaagcgtaagatggcaaaaggagattttcaaagatgtagaacttgacactacccagtctgcttatgtttttaaatgccaattgtatgatttgactggtgtgcctcctaaaagacaaaaaattatggtcaagggtggtcttttgaaggatgatgctgattggtcaacagtaggggtgaaagagagtcaaaagctaatgatgatgggtacagctgatgaagttgtgagactcctgagaa

SEQ ID NO: 132724 - DNA, 239 bp, Glycine max
cttccacctcgccttcttctcccaatgccttccctccgcctgggcccactcggcgatcctcctcccgggtcaactcgcccgtgactcaccgcagagctgccccgcccctgaccccaacctctactacaagccagtcatcggaatcgtcagccatcccggcgacggcgcctccggccgcctcagcaacgccaccggcgcctcctacatcgccgcctcctatgtcaaattcgttgaggccg

SEQ ID NO: 132725 - DNA, 240 bp, Glycine max
atagattgctagctatatatcaaagaaaaagcttgctttgtgtggaggctgcagagaaaattcaaggtggtgttcatggccatgatgtggattagagtcatacttatactagcggcttgcatgcttcccctttcagtggaagccatggttcgccactacaagttcaacgtggtggtgaagaatgtcacaagattgtgttcaacaaagcccatagtaaccgtaaatggaagttcccgggcc

SEQ ID NO: 132726 - DNA, 237 bp, Glycine max
ctcgagccgcgaaggttcatccaatctccgaaggccttcaccggattgcaaccatgtcgaggagaaaggttagagagccaaaggaggaaaacgtgactctgggcccagctgttagagatggtgaacatgtttttggagtcgctcgcatctttgcctccttcaatgacaccttcattcatgtcactgatctgtctgggagggaaacacttgtccgcatcactggcgggtgaaggttaa

SEQ ID NO: 132727 - DNA, 236 bp, Glycine max
ctcgagccgcaggattattctatgcaacctcctgctcaagaactcgtcgccagggatttgcacgacaccgtttggacattccgccacatttaccgtggacaaccaaaacgtcatttgcttaccactggatggagtctatttgttagtggaaagaggctcttggccggagactctgttttgtttattagagatgaaaagcagcatcttcttttgggtatcagacgagtaacaggcaa

SEQ ID NO: 132728 - DNA, 240 bp, Glycine max
gtgatgtggtaattagggggaaagattggaatcaaccagcaaaatcttgcatgagtgagacagaaccattctttggattgaagtaccctgcagggacaccaatggcatgggtgatagtgaacaaggttttgagtaggataaagaagccagtgcaattcctagatgtgactacactctcacagtacagaaaagatgcacatcctgaaggctacagtggggttatgccactgattgcagcca

SEQ ID NO: 132729 - DNA, 275 bp, Glycine max
agctggcgcagctaccctgaggcttctcttctcttctcttctctgtcgtgagtcaccatggtgagggttagtgtgctgaacgatgctctgaagagcatgtacaatgctgagaaaaggggaaagcgccaagtcatgattaggccatcctccaaagtcattatcaaattccttttggtgatgcaaaagcacggatacatcggagagtttgagtatgttgatgaccacagggctggtaaaatcgtggttgaattgaacggtagactgaacaagtgtgg

SEQ ID NO: 132730 - DNA, 270 bp, Glycine max
tctcgagccgaatcggctcgacgggcaattcgagtcttgaatccatctttcaaccttaacactactcacttcgtttccgacgcagctttttacacactccaccgctgcttccccttcacctccgatttcgttaatcagagatcaaaatgtctcgaagatatgacagccgtacaacaatcttctccccggaaggacgtctttaccaagtggaatatgcaatggaggctattgggaatgctggtaccgcaatagggatcttatcaaaagatg

SEQ ID NO: 132731 - DNA, 266 bp, Glycine max
gagaggagccatgctatgctggtgtacccatgtcttccattattgaaaaaggttatggtgttggtgatgttatctctcttttgtggtttaaacgaagccttccccgttactgtactcaatttattgagatatgcatcatgctatgtgccgaccatggtccttgtgtctctggtgctcacaatactattgtgacagcaagggctgggaaggacctagtttctagtcttgtatcaggtttgcttacaattggtcctcgatttgggggt

SEQ ID NO: 132732 - DNA, 262 bp, Glycine max
tgggaataatgtgtcaattttgcataatgtgacattgggagggactggtaaggctagtggggatagacaccctaagattggtgatggggtgttgataggtgcagggacttgtattttggggaacattaagattggtgatggagctaagattggtgcatgttctgttgtgttgaaggaagtgccaccaagaactactgctgttgggaaccctgctaggttggttggagggaaggataaccctattaaattggataagatgcct

SEQ ID NO: 132733 - DNA, 267 bp, Glycine max
gtttggggaggcgcatggatgtactttgcaactggaaattcatcgtaccttaagcttgctactgctcctggcctggccaagcatgctggtgccttctggggaggccctgattatggggtactcagctgggataacaagcttgctggtgctcaggttcttctgagtcgtttgaggttgttcttgagtcctgggtatccatatgaagaaattttgaggacctttcacaatcagacaagcataatcatgtgctcctatctaccagttttc

SEQ ID NO: 132734 - DNA, 266 bp, Glycine max
aattaataacaagctagctattagttcgattttgtagtaagtgaggtgccaatatggtgaagatagctcttggtactttggatgactcttttagcgctgcctctcttaaggcttatttcgcagagttccacgcaactctgattttcgtgttcgctggtgttggatcagccatcgcttacaacgagcttacaaaagatgcagccttggatccaacggggctggtggcagtagctgtggcacatgcatttgcactgtttgtaggtgtc

SEQ ID NO: 132735 - DNA, 265 bp, Glycine max
ctcactcacaaacgcacactgaattcaaaaacatcgaaagagagaggcatggccgagcaaaccttcatcatgatcaagccagatggcgttcaaagaggccttattggcgagattattagcagatttgagaggaagggtttttacttgaaagggttgaaactcgttactgtggaccgtccttttgctgagaagcactatgctgatttgtctgcaaagcctttctttagtggtttggtggattacattgtctctggccctgttgttg

SEQ ID NO: 132736 - DNA, 267 bp, Glycine max
gttttctatatcactctcaactttactcctcttcaatcagttgcatattctttgctattccaatggccactgttgaggttgtgtcagccaaggttgccctcccagaggacacaaaagaggcatcattgaaggttgacgaggagaagaacacagaagaagttgttgagactccaacaccagaaactgtagtcactgagcaaaccaaggaggaaagtactgaggccccacgacctgcagcttcagaagacaagccctcggttgaagttc

SEQ ID NO: 132737 - DNA, 267 bp, Glycine max
gccaagtgaaagtgagataaaataaaaatcaaagagcataatgtcagggatcattcacaagattggggagacccttcatgtgggagggcacaagaaggaggaggagcataagggtgagcaccatgctggagaatacaaaggggagcaccatggtgaacacagtagtgagtacaaaggagagcatcatggtgaacacaaagctggagagtaccatggtgagcacaagccagagcacaaagaggggttcctagacaaagtcaaggacaa

SEQ ID NO: 132738 - DNA, 269 bp, Glycine max
atcggtgttcacttgatccttcataagtcgtcatcatcatcatcatcatcaccgttgattgaagaagatgccgatcagaaacatcgccatcggaaggcctgaagaggctactcaccccgacacgttgaaggcggggttggctgagttcatctccaccttgatcttcgtgttcgccggttcaggttccggcatcgcctacaacaagctcaccgacaacggcgccgccactcccgccggcctcatctccgcttccatcgcccatgctttcg

SEQ ID NO: 132739 - DNA, 263 bp, Glycine max
taaaaatactgaaacaactggtccctgcgtgatccatgttgtcactgaacaaggccacggatacccttatgcagaaagagcagcagccaagtaccatgtggtatctaagtttgatccagcaactggagaacaattcaaggccaaggccaccaccaagtcatattcaacatactttgcagaggctttgattgcagaagcagaagctgacaaagacattattggaattcatgctgcgatgggaggtggactggcatgaatcactt

SEQ ID NO: 132740 - DNA, 264 bp, Glycine max
atttacgaggagttcatgccaactggagggacagatgttaaggtatatacagttggccctgaatatgctcatgctgaggcaaggaagtctcctgtggttgatggtgttgtgatgagaaatcctgatgggaaggaagttaggtatccagtcctcctgactcctgctgagaaagaaatggcaagagaagtttgcattgcattcaggcaagcggtttgtgggtttgatctcttgagatgcgagggacgatcctatgtttgtgacgtg

SEQ ID NO: 132741 - DNA, 265 bp, Glycine max
gccacagattacaaggatgccaaattttttgtcatcaaatcttacagtgaagataatgttcacaagagcattaaatatggtgtctgggctagtacaccaaatggaaacagaaagttagatgctgcatatctccaagcaatggagaagcaagatgcctgtcctatatttctttttttttcggtaaatgctagtgctcagttctgtggggtagctgaaatggttggacctgtcaattttgacaagagtgtggacttttggcagcaag

SEQ ID NO: 132742 - DNA, 265 bp, Glycine max
gacaaacccgtccctcacactctccaaaccctagcggcactacacactagttctatcgctatctccccaagatgtcgagcgccgatcccgagcacagagaagaggaggaggcacccgccgttgaggacgacgaggacaccggagctcacgtcgctccaatcgtcaaggtcgaggaagttgctgtgaccaccggcgaggaggacgaggatgcaatcctggatctcacatcgaagctttaccggttcgacaaggacgggaaccagtg

SEQ ID NO: 132743 - DNA, 266 bp, Glycine max
gctgaagtagacgttaaaaagctcacaaaacggcctgctcctcctcgatttggaagaaaactgactgagactcaaaaggcgagagctactcacatttgccttgattgtggatacatatacaccttacagaaatcttttgatgagcagccggacacatacgggtgtcctcaatgtcaagcaccaaagaagaggtttgctcggtatgatgttaacactggaaaagctattggtgggggcttgcctccaattggagttattattggact

SEQ ID NO: 132744 - DNA, 267 bp, Glycine max
cgcctctaacctcgcagttccttgatctctcctctcaagatgcagatattcgtgaaaactttgaccggcaagaccatcacccttgaggtggaatcctccgacaccattgacaacgtaaaagctaagattcaagacaaggaagggatcccacctgaccagcagagacttatctttgcgggtaaacaacttgaggatggtcgcacccttgccgattacaacatccaaaaggaatcaaccctccatctcgtgcttcgcctcaggggtggc

SEQ ID NO: 132745 - DNA, 265 bp, Glycine max
acttaacaacagcacaaagcgggttactgtctgttcaagctaccatctctctctctctttcttagtgcctccttgccagaagttaaaatggcccaagaaactttcctattcacatctgaatcagtgaacgaggggcaccctgacaagctctgtgaccagatctccgatgctgtgctcgatgcatgcttggagcaggaccctgacagcaaggttgcctgtgaaacctgcaccaagaccaacatggtgatggttttcggagagatca

SEQ ID NO: 132746 - DNA, 259 bp, Glycine max
tgatggctggtttcatacaggtgatattggagaatggcaatcaaatggagccatgaaaattattgataggaagaagaatatctttaaattgtcccaaggagaatatattgctgtggagaatattgaaaacaagtatttgcaatgcccacttatagcatcgatatgggtgtatggaaacagctttgagtcattcttggtagctgttgtgatccctgaaagaacggtcattgaggattgggcaaaagagcacaatgtgaca

SEQ ID NO: 132747 - DNA, 260 bp, Glycine max
ctctctatgacatctgtttcaggactttgaagctcgccacgccgacatttggtgaccttaaccacctgatatctgccaccatgagtggagttacttgttgtctacgtttccctgggcaattgaactctgatcttcgcaagcttgctgtcaatcttatcccattccctcggctccatttcttcatggttgggtttgcgcccttgacatcaagaggatcccagcaataccgtgctttgactgttcctgaattgactcagcaa

SEQ ID NO: 132748 - DNA, 267 bp, Glycine max
tcggtcgagttcgaaccgcgcgttgctccgcaccagtttcaccgcacgaatatcttgttgtttggagcgatccgagaaaaactctgtaaacatgttggtttaccaggacctccttacaggtgatgagcttctctctgactccttccgttacaaggaaattgagaatggaatgctgtgggaagttgaggggaagtgggttgttaaaggagcagttgatgtagacattggtgcaaaccttctgctgagggtggaggagaagatgaggga

SEQ ID NO: 132749 - DNA, 260 bp, Glycine max
gcaagaatggcacttcgttgcttggtgatgtccctttctgttctcttcactcttggtcttgcgagagaaagccatgccagagacgaagatttttggcatgctgtttggccaaacactcccattccaagttcattgcgagatcttctaaagcctggccctgcaagtgttgaaatcgatgatcaccctatgcaaattgaagaaacacagtacccgaaaaccttcttctataaagaagaccttcatccaggcaaaacaatgaa

SEQ ID NO: 132750 - DNA, 268 bp, Glycine max
agcgaagaagtggttgctgcggcgccggaggcagccgcgccggatgagcggttgaagcacaaactggagagaaaatggacgttttggtgcgacaaccaatccaaacccaagcaaggcgctgcttggggaacctctcttcgcaaggtctacaccttcgacaccgttgaagagttctggtgtttgtatgatcaggtattcaagcccagcaagttgcaaatcaatgccgattttcacttgttcaagactgggattgaccctaaatgggaag

SEQ ID NO: 132751 - DNA, 262 bp, Glycine max
gagaatccgaggcgaagagaagagacaaattaagatggaggggaaggagcaggatgtgtcgctgggagcgaacaagttcccggagagacagccgattgggacggcggcgcagagccaagacgacggcaaggactaccaggagccggcgccggcgccactggttgacccgacggagtttacgtcatggtccttttacagagcagggatagcagagtttgtggccacttttctgtttctatacatcactgtcttaaccgtcatg

SEQ ID NO: 132752 - DNA, 258 bp, Glycine max
agagcgtagaggcagtggttttctttttttgatttctctttgtagaatcgaatcgagttaatttttgatcgtgtgagtgtccgatcttgaaatccacaacaacaatggtgagaggattgctcaacaagctcgtctctcgctccctctcggtcgccggaaaatggcagcacaatcaactccgccgcctcaacatccacgagtaccagggtgctgaattgatgagcaaacacggagtcaacgttccgagaggcgtggctg

SEQ ID NO: 132753 - DNA, 261 bp, Glycine max
aacgctcgcccgcaccgtccagatcgtaatcaagagaagaggagcgagttttgtttttccttgcagcccaagccatggcgcctctgatcctgcatggtggaaaaaccaacaaaaattcttacaagacactcattgcggcggagtatgccggcgtccaagttgactttgccccaaattttgagatgggtgtctccaataaaactcctgaatttctcaagatcaatcctattggcaaggttcctgtgttggaaacacctgatg

SEQ ID NO: 132754 - DNA, 260 bp, Glycine max
tctcgagccgctcgagccgctcgagcggctcgaggccttctcctcattcttctatccattgtatcattccatcttccaaattttaaggtgacaggaacataggaacttgaggtgatgaaagcaacagaatgttaaaggaagctttgatgtgaggtgaggtgaggaaatcagaagaggagtttgaaaatgagtacagcaagattcatcaagtgtgttactgtcggcgatggagccgtgggaaagacctgtatgctcatctc

SEQ ID NO: 132755 - DNA, 255 bp, Glycine max
gaagagatggaaagagtagcatcagtatctcggccactgaaaatatacttcctcccattcttctcaccggggcacctaatccctctggtccagctggctcgcttggtggcggcacgaggccagcacgtgaccatcatcaccacccccgccaacgctcaactcttcgaccagaacatcgacaaggacaccgcctccggccaccacatccgcgtccacatcatcaagttccccaacgcccacgtagggctaccggaa

SEQ ID NO: 132756 - DNA, 254 bp, Glycine max
ttcagatccggatatattatgaatactagcattgctggtcttgaaaaagcggatgccttcctgttggttggtacccagccacgggtggaagctgccatggttaatgccagaatacgcaagactgtcagagcaaaccaagccaaagttgggtacattgggcctgctactgatttcaactatgaccacaaacatcttggtactggccctcaaacacttctcgaaattgctgagggtcgccacccatttttcaagac

SEQ ID NO: 132757 - DNA, 263 bp, Glycine max
caagtgtaaaatgatggagaagatttttagcacagaaggaaatagtgcagacaaggtgtgtataggagtaaataaggaaagagagagagagaaagacccttacccttctctatcgctcgctttcctttgacgcttctgacccttgctttgtctgcgtctttcttctttctttctttctttctctgtgtgtcgtaatggctctcccagactcttcttcccgtcgcaactccctgatcccctccttcatctactcctcttcctcc

SEQ ID NO: 132758 - DNA, 264 bp, Glycine max
gcttgtctcaaagattaagccatgcatgtgtaagtatgaactaattcagactgtgaaactgcgaatggctcattaaatcagttatagtttgtttgatggtatctactactcggataaccgtagtaattctagagctaatacgtgcaacaaaccccgacttctggaagggatgcatttattagataaaaggtcaacacaggctctgcctgttgctttgatgattcatgataactcgtcggatcgcacggcctttgtgccggcgac

SEQ ID NO: 132759 - DNA, 265 bp, Glycine max
gcaaaagtggatgctttggataagaataagaacactgctctccattatgcagctggttatggcagaaaggaatgtgtggcccttctccttgaaaatggtgctgcagttactctccagaatatggatggtaaaactccaatagatgttgcgaagtaaacaatcaaaatgaagtcctgaagctacttgagaaagatgcttttctgtaattgcaatgcatgatgccatgctgtcaccaacaagcaaaggggaaactgaggggaagaag

SEQ ID NO: 132760 - DNA, 261 bp, Glycine max
ggcacagatagatgtccatggaaaaaagaaagtgtcaggcaacaagattaccggcattcagttctcccaaaaaaacagtcagagaataatgatcacatcagaagattctaaaatttgtatatttgatggcactgagcttgttcagaaatacaaaggtcttcctaagtcaggaagtcagatgtctggttcatttacatcaagtggaaaaaatataatctcagttggagaggactcccatgtatatatttggaactttgatga

SEQ ID NO: 132761 - DNA, 259 bp, Glycine max
agaaattcgtaaacccaaaatattagcatagacataaattaagaaatcaaagagacagaaagttgagagagaagtgttcacgtctttgagaaatgggtgcttcggcatcggtcacagaaaaatccatccatgaattcatggtcaaggatgctaagggcagagacgtgaacctcagcacctacaaagggaaggttcttcttgtagttaacgtcgcttcaaaatgtggatttacaaattccaattacacccagttaactga

SEQ ID NO: 132762 - DNA, 257 bp, Glycine max
gtcgtttgtaacgcccttgtttgcgttttttgcacagaagaattaacacatatatagcaagcatggcagtcacactctacgaccttagctctgcctctgggttgaagaagcttgatgagtaccttctcccacgcagctacatcaccgggtaccaagctacaaaggatgatcttactgtttatgcagctttgccaactgctccatcagatgaatatggaaatgtttccaggtggtacaagcacattgatgctttgttg

SEQ ID NO: 132763 - DNA, 256 bp, Glycine max
caattttcaataattcacgactccttccgagatctctctctctcgcccacaatccaaccatggcgaatacggggaatttagacgcggcgatagagcaattgctgaacgtggagaagcagatgaggctcgccggtgacgtggcgggtaccagaaaagcagccaccgatattttgcagctctgcttcgatgcacgagcctggaaaacactcaatgaccagattgtcgttttgtcaaaacgacgtggccagctcaagca

SEQ ID NO: 132764 - DNA, 253 bp, Glycine max
gccacaagtgttggtgagaagaatgtgttgatttttgaccttggtggtgggacatttgatgtttctttactaaccattgaggagggtatctttgaggtgaaagccacagctggtgacacccatcttggaggtgaggattttgataacagaatggtgaaccactttgttcaagagtttaagagaaagaacaagaaggacataagtgggaaccccagagcacttagaaggttgaggactgcttgtgagagggcca

SEQ ID NO: 132765 - DNA, 256 bp, Glycine max
acaaaacttgctatagcagtaagctataactcatttgaggctctgtgagaattgagaaatggctaaagatgttgaggttcaagagcaaggaggagagtactctgccaaagactaccatgaccctcctccagcacctttgttcgacccagaggagctcacacagtggtccttctatagagccctcatcgctgagttcatagcaacccttctcttcctttatgtcactgtgctcaccattattggctacaaaaggcag

SEQ ID NO: 132766 - DNA, 254 bp, Glycine max
gttgggggagagttagttgaggttgttggaatttcagatggtgcagatgtagaaacagaacctggtccagttggtgttaaagaaggaagtttagttggtaaatatgaatctcttgtacagattactgtaataccaaaggggaaagagcagtcctctgtcaaggaggcagattcatccccaaaaggtgtgactgataaactacaagaagtcttgaaaaagatcaaaaccccagtcaaaactgggatttatgatga

SEQ ID NO: 132767 - DNA, 258 bp, Glycine max
aagaatgtaagaggggatggaactggagagcgcaaggaatgggataggatctatgattatgatgtctacaatgacttgggcaacccggatagcggtgataaatatgcacgccccgttcttggtggttcagccttaccttaccctcgcagaggaagaaccggaagaggaaaaactagaaaagatcccaacagtgagaagccgagcgattttgtttaccttccaagagatgaagcatttggtcacttgaagtcatcagat

SEQ ID NO: 132768 - DNA, 261 bp, Glycine max
ctcgagccggaggaagtggaatcaaatctgtgaagatagtgtatcgatcagctaggggcccagatgacttggacaccagacttctgcgagccatggttacaaaaggcctgattgaaccaatatcaaacaccattgtaaaccttgtgaatgcggatttcatagccaagcagaaagggcttcgcataagcgaggaaagagtggttgttgattcatctcctgagatgcctgttgattcaatccaggtacagatatccagtgtgg

SEQ ID NO: 132769 - DNA, 260 bp, Glycine max
gttaaagaccggcaccatgaagaagtctaccttggaaacttgaagaggttccaattcagagaactccagattgctactaacaacttcagcagcaaaaacatactgggaaagggtggttttggaaatgtctacaaaggagttttccctgatggcactcttgtggctgtcaagaggcttaaagatggtaatgccattggaggagagattcaatttcagaccgaagttgaaatgatcagcctagcagtgcaccgaaacctcct

SEQ ID NO: 132770 - DNA, 253 bp, Glycine max
caatgatgtggactgtcacagctgtcttttttctactagtgggagctgttgtttggattttagagcataggctgaatgatgattttaggggacctcccaaacaacaaatggtcacaattttgtggtttagtttttcaaccatgttctttgctcacagggaaaacacagtgagcactctcggtcgctttgtgctgcttatatggttatttgtagttctaataattaactcaagttacacagcaagcttgacatc

SEQ ID NO: 132771 - DNA, 254 bp, Glycine max
aagaaagcgtatttgaggatacaaagtatttggtgcagtctgctgtagatggttataatgtttgcatatttgcctatggtcaaactggctctggaaagacatttacaatctatggatctgacaacaaccctggacttaccccccttgcaattgcagaactttttagaattttaagaagagataataacaagtattctttttccttaaaggcatacatggtggagttgtatcaggatacccttatagatctgtta

SEQ ID NO: 132772 - DNA, 254 bp, Glycine max
ctttctctctcttgatcgacacccaccacgcgttagagagagacacaccacgagagatcggaaaatgggtacgcttcagtcttggagaagagcctacggtgccatcaaggacaccaccaaagtgggtctggcccatgtcaatagcgattacgcggatttggacgttgccattgtcaaagccacgaaccacgtcgagtgtccccccaaagagaggcacctcagaaagattctgtttgccacgtctgctgtgaggc

SEQ ID NO: 132773 - DNA, 251 bp, Glycine max
tctcgagccgaatcggctcgagttgttgttgtaactcgttcttctatttttgttgttctgtgtttgtgtttgttttttctctcacctgaaaatgtcttgctgcggtggtaactgtggttgcggaagctcctgcaagtgcggcaacggctgcggaggctgcaagatgtacccagacttgagctacactgagtcaaccaccaccgagaccttggtcatgggagtggcacctgttaaggctcaatttgagggtg

SEQ ID NO: 132774 - DNA, 255 bp, Glycine max
agagcttgcacctattggtatcttctacaatatcctctcatagtgctcttcttcttcttcattttcattatcaagatgtctttgctttcggatctcatcaacctcaatctctcagaatccacagaaaagatcgttgctgagtacatatgggttggtggatctggtatggacctcagaagcaaagccaggactcttcctgggccagtgagtgaccctgcaaagcttccaaagtggaactacgatggctctagcaca

SEQ ID NO: 132775 - DNA, 258 bp, Glycine max
cgaatatctccttattctctctcttcccaatctcaatcccagtgagtgctttctttctgtaactaaccccaatcatcaactcagtcagccgcaatccacggcggtcttcaatcaggacaccctccagcaccgcctccaggccttaatcgagggcgcccgagagacctggacctacgccatcttctggcagtcctcttacgactattccggctccactctcctcggttggggcgacggttactacaaaggcgacgacga

SEQ ID NO: 132776 - DNA, 278 bp, Glycine max
gaaagtttgattacagagctgagaaaagaacttagattgtcaaatgaggagcacagagaacttctaggtcgggttaatgcagatgatgtgatacggaggataagggaatggagacaggcaggtggccatcagcctggtgtacttagtactggtcaaggtcttcatgattcaattcccagtcccacagtctctgcttctcgcaaaaagcagaagttacaccatctgtaccaccatcacgatcttttggtgggccttctcctccttttcacccccaaaca

SEQ ID NO: 132777 - DNA, 275 bp, Glycine max
ccgattgctagaatggagtttcgatgctcagtcatctcttttaccattctcttctctcttgctcttgcaggagagagccatgtccatgcatcgctacctgaggaagattattgggaagctgtttggccaaacactcccattcccactgcactgcgagagcttctaaagcctctcccacgcaggtgttgaaatcgatgaactccctaagcaattgatgatacacagtacccaaaaacattcttctataaagaagaccttcatccaggcaaaacaat

SEQ ID NO: 132778 - DNA, 261 bp, Glycine max
ccaaggagaaattgatggtggaacaaccaaggtagcaatcggacgtgggaatccactatctgagcagggggtgcatgagttccaaactgagattgaaatgctctcaaaacttcgtcaccgccaccttgtttcactgattggctactgtgaagaatacactgaaatgatccttgtctatgactgtatggcctatggaacactcagggagatctgtacaagagacagaaacctccacgtccatggtagcagaggcttgagata

SEQ ID NO: 132779 - DNA, 271 bp, Glycine max
cagagttcctttctttctcctaaggagatagtttcttttcttcataagctgtcacaagttgataaacaaaacttcatacccgttgctctcgaagagtgggacaggaaatatcttgaacttctttatgggatttgtgcagattcaaataaatatcctttacccttgcgtcaagaggttttccagaaggtggaaaggctatttatgcttgtttacgagccagagatcctgaagttaggatgatatttttctctctctatcatgagtctctcgg

SEQ ID NO: 132780 - DNA, 270 bp, Glycine max
aacccaactaaccaaaccagctatggcggcgatgcagaggccactcaagagaaccattgcaatcgccaagctacgcgcgtgcttttcctctctccgacccgccgccgccgccgacatcgtcgcgtctcctccgccgcagctcccgccgttcgatcaccagccgcacccttacaacggtcccttcgccgatgaagtcctcgccaagcgaaaacgttcctcggtccttccgtcttccactactataagaaacctgtgagtctccgaaatcaa

SEQ ID NO: 132781 - DNA, 269 bp, Glycine max
caggtgctcacacaattggtatcgctcattgctcatcattatcaaaccggttgttcaatttcactggcaagggtgatcaagacccgtcactagatagtgaatatgctgcaaatttgaaagcattcaagtgcacagacctcaacaagttgaacaccacaaaaattgagatggaccctggaagtcgcaagacatttgatcttagctacatagtcacgttattaagagaaggggtctatttgagtcagatgctgcattattgactaactcag

SEQ ID NO: 132782 - DNA, 271 bp, Glycine max
caaaggagaaattgatggtggaacaaccaaggtagcaattaaacgtgggaatccactatctgagcagggggtgcatgagttccaaactgagattgaaatgctctcaaaacttcgtcaccgccaccttgtttcactgattggctactgtgaagaaaacactgaaatgatccttgtctatgactgtatggcctatggaacactcagggacatctgtacaagacccagaaacctccacgtccatggaagcagaggcttgagatatgcattggag

SEQ ID NO: 132783 - DNA, 270 bp, Glycine max
ctgaaacactcagtagggtttgcggtttcagagtttgtgacgcacgcatccatggccaccaccaccaacgccgccgcagccccgccgcgccagctctcccagaaggaagccgacatccagatgatgttagccgccgacgtccacctcggcaccaaaaactgcgacttccaaatggaacgttacatcttcaagcgccgcaacgacgggtttacattattaaccttgggaagacatgggagaagcttcagttagcagctagggttattgttg

SEQ ID NO: 132784 - DNA, 272 bp, Glycine max
aaatacgctttgcctaaatgggagatcaatggtctggttgagtatgtctctgggggtccccaacctggaggcatgttcttcccagtgactcatggaatccatgctgtgaggcttggcaatgatgcctcaatctcccaaagcatcaaggtcaaacccggtcaactgtatgctctaattcttggggcctcaaggacttgtgcgcaggatgagttttgaggatctctgtgcctccacagactggtgatgttcctttgcagaccctttatagcctc

SEQ ID NO: 132785 - DNA, 295 bp, Glycine max
ctcgagagattcggctcgagcactcactctctcactcactcactcactcgcaagcaaaaagaaagaatcccaagcgaggagaaagatgacggggaaggagcaggatgtgtcgttgggagcgaacaagttccccgagagacagccaattgggacggcggcgcagagccaagacgacggcaaggactaccaggagccggcgccggcgccgctggttgacccgacggagtttcgtcatggtcgttttacagagcagggatagcagagtttgtggccacttttctgtttctctacatca

SEQ ID NO: 132786 - DNA, 269 bp, Glycine max
cgcgccgagcaccggagacgtgcaactaacttcccccgcctccggcgaagattccgacgacctcgaagacgttcgcctcctcgactcctacgacaaaaacgacgtcgttcacgatgaaacgaaaagaattcaggtcagaatcaccggcatgacctgcgccgcgtgctccaactccgtcgaaacggctctccggtccgttcacggctcaccgaagcctccgtcgctcttcttcaaaacaaagccgacgtcgttttcgtccccggcctcgt

SEQ ID NO: 132787 - DNA, 264 bp, Glycine max
gaagagtaccgagcttttgatccggaagctccccttccagaggctggttcgtgaaacttgtcaggacttcaagactgatctgcgtttccagagccacgccgtgcttgcattgcaagaagctgctgaggcataccttgttgggctctttgaggacactaacctgtgtgccattcacgccaagcgtgtaaccattatgcccaaggtattcagctggcaagaaggattcgtggtgagcgtgcttgagttggtggttggaaagatgaa

SEQ ID NO: 132788 - DNA, 267 bp, Glycine max
gccagctgatggtctagctccggtctggaataatgatgtcaggttcttctgtgttaaggattcttctggtagtccaattgcgtatttttattttgatccttatagtcgtcctgctgaaaaaaggcaaggtgcatggatgaatgaagtctttgctcgtagtcgtgtattatcgcgtgatggcacctcagcaagattgcctgttgtcacatggtgtgcaatcaaactcctccagtaggaaacaagccaagtctaatgacattccgtgag

SEQ ID NO: 132789 - DNA, 265 bp, Glycine max
gttgatggcactggagttggcaaaagcaggcagttcccaaccttctttcttgatcctccatctgaaacatttccggagatctgaaaattttgtgcgagtgataaaatgcaatagtgtggaagtgtttgaaggaagagaaccccaagctattaagatatgttcagtggtgcgtagagcatggaagacatatcagtctaacatgaaaacttgattctgaaggttccttcaagtcagagacaagtgcatttttcctggactgaagttg

SEQ ID NO: 132790 - DNA, 267 bp, Glycine max
aaggtgttcagccctgaggaaatcagtgccatgattctgactaagatgaaggaaactgcggaagcattccttggaaagaaaattaatgatgccgtggtcactgtcccagcttacttcaatgatgctcagaggcaggccaccaaggatgctggtgtcattgctggtctcaatgttgctagaattatcaatgaccccactgctgcgccattgcctatggattggacaagaaaggtggcgagaagaacattctagtctttgatcttggtg

SEQ ID NO: 132791 - DNA, 267 bp, Glycine max
gtgaaacactagctagggtattgggagctctcgttgtttcggagttagggaccttacgcagccatggccactgctacgaatgccgccgccgccccaccacgccagctctcccagaaggaagctgacatccagatgatgttggccgccgacgtccacctcggcaccaagaactgcgacttccaaatggaacgttacatcttcaacgccgcaacgacgggatttacattattaaccttgggaagacgtgggagaagcttcagctagcag

SEQ ID NO: 132792 - DNA, 268 bp, Glycine max
gccgcatcattcttctgcctaatctgctcatccattatttactatggaaaagcagaggcgcatcaagttaatttctatgtgcacaataaatgtccctttccaatatggccagcaactgcaccaaacagtggccaaccagtgatagcagatggtggattctaccttgctccaggccaaacccaacgtgtcatagcaccatggacatgaatggtagaatttgggcgagaacaggctgcaattttgcttcaaattggaaaccagcttgtga

SEQ ID NO: 132793 - DNA, 184 bp, Glycine max
aatgggtcgagtgagaacgaagacggtgaagaaatcctctcggcaggtgatagagcgtcactactcgcgcatgaccctagaattccacacgaacaagaagcttctggaggaagtggcgataatcccgtcgaagaggctaaggaacaagaatcgcggggtactcgacgcacctgatgaagcgcat

SEQ ID NO: 132794 - DNA, 256 bp, Glycine max
ggaaaacaagaactcccgacaattattggatgacataagagcaaaacttcttgataatttatctaggcttcaacatgcaccaagtgtcccattccaggaacggccacctgatgcagagcttctagagatagatgaagatcaagatgatagagatgaaagatgggatcccgaatctgacaaggatgttggcgatgacagcaatcctgtcgcagaagggtgaaaagtgaatacgttgatgctgaggatcaagacccct

SEQ ID NO: 132795 - DNA, 265 bp, Glycine max
  unsure (1)..(265): unsure at all n locations
ttcagttcttcttattccacacaagatacgatcctgcnctgngnatcgagtatntgagcagggggtgcatgagttcctaactgagactgaaatgctctcaaaacttcgtcaccgccaccttgtttcactgattggctactgtgaagaaaacactgaaatgatccttgtctatgactgtatggcctatggaacagctcagggagtctgtacaagacccagaaacctccacgtccatggaagcagaggcttgagatatgcattggag

SEQ ID NO: 132796 - DNA, 264 bp, Glycine max
gcaccattgagtccgatcccggtgtgtttacagaacttattcagcaaatgcaagtgaaaggagtacaggttgaggaactttattcattggatcttgactctctcaacagccttaggcctgtttatgggttgatttttcttttcaaatggcgtccaggagaaaaggatgaccgagtggttatcaaagatcccaaccctaactgttttttgctagtcaggtaattaataatgcttgtgcaacccaagcaatcttgtccattcttat

SEQ ID NO: 132797 - DNA, 263 bp, Glycine max
ataaaaaaggacattcattcatctatggctacccttattgctcccagcaaccactctccccaagaagatgctgaagctctcagaaaggcttttgaaggatggggaactgatgagaacactgtcatagtaattttgggtcatagaactgtgtatcagaggcagcaaatcagaagagtttatgaggaaatttaccaggaggacttgtgaagcgcctagagtctgagatcaaaggagactttgagaaagccgtgtaccgatggata

SEQ ID NO: 132798 - DNA, 264 bp, Glycine max
gccaaatcaatcaaattctttgagttgaacacaggggccaagattccttctcttgggttagggacttggcaagctgaacctggtgttgtagctgaagctctcaccacagccattcaggttggatacaggcatattgactgtgctagtgcgtataagaatcaagcagagattggtctctgctcttaagaagctttttgatgatgtgtggtgaagcgtgaggacttatggatcacttgcaaactctggtgttcagatcgtgcacca

SEQ ID NO: 132799 - DNA, 258 bp, Glycine max
  unsure (1)..(258): unsure at all n locations
cactgagagaagaaggaaaaactaaccaacaccacagcccctaatttccttttcctcacaatagcggctaacctcganaaccgtcaatacggcacccacataaacgccgtcgttcgtgcttgcggcccagacttcaatacccctctcccgtcggatttcgatctagactcatccagcgacgacgaagagaaaacgacgacgctcgtatctcaaggtgttgatacaaaaagctaacgcggcaaacgaagcgtcgctgtt

SEQ ID NO: 132800 - DNA, 239 bp, Glycine max
aacacaggcgcagagcgtgatccattgacgaagatggtgcagcgtctcacctaccgcaagaggcacagctatgccaccaaatccaaccaacacagggtcgtcaaaacccctggtgggaagctcgtttatcagaccaccaagaagagggccagcgggcccaagtgccccgtcactggcaagaggattcaggggattccacacttaggcctgcagagtacaagagatcaaggttacccaga

SEQ ID NO: 132801 - DNA, 265 bp, Glycine max
tctcgagcgattcggctcgagtggtcaacctcccccaccaccgacctcctttcatcagcagcagtggcggatctggatcacacaattcaggcggtgaatttcttcctcctccttctccaggaatttcattggggttctctaagagcacattcacgtatgaggagttggcacgcgcaactgatggcttctctgatgccaacctcttggacaaggaggatttggatatgtgcacagaggaattcttcccaacggcaaggaggtggca

SEQ ID NO: 132802 - DNA, 261 bp, Glycine max
gtttggagatgggtggtgagtttgatgttagtggggttactgcccgtgtcaacaatgggtcgattcgtggtggagaagaacagcctgagagtgacatcgccggacaaaataagagggacacacgacagtgccattggcaacttcggaatacctcaatacggtggtagcatggccgggaacgtaatttaccctaaggaaacaaaaagggttgcaaagagttcgatgagttcgggatttccttcaaatcaacccccggtgctc

SEQ ID NO: 132803 - DNA, 261 bp, Glycine max
gtgtttttgccgatgataatgacatcataggtgctgtcaaagatgatttgatagctgttaaggagagggaccctgcttgcataagttatgtgcattgcttgttgaatttcaagggtttcttggcatgccaggctcataggattgctcacaaattgtggctccaagggaggaaggtcttggcactgttgattcagaataggtttctgatgtttttgctgtggatattcaccctggtgcgaaaattggacgtgggattttgct

SEQ ID NO: 132804 - DNA, 261 bp, Glycine max
tctcgagccgattcggctcgaggctgggtcttccagtggcggcgacggtgaactgcgccgacaacacgggggcgaagaacactctacatcatttcggtgaaagggatcaaaggccgtttgaaccgtcttccctcggcctgcgttggcgacatggtgatggccaccgtgaagaagggaaaacccgatctgaggaagaaggcttgccagctgtcatcgttcgccagcgcaagccatggcgccgaaaggacggcgtctacatgt

SEQ ID NO: 132805 - DNA, 262 bp, Glycine max
ccgtcttctccccgctgcagtaggaactacttgtggccaacgtcttgagaaggtgttcggaactgagcactcccacattcttcgagttccctttagaactgagaagggaattgttcgcaagtggatctcaagattcgaagtctggccctacttggaaacttacactgaggatgttgcccacgagcttgccaaagagttgaaggcaagccagatctgattgttggaaactacagtgatggaaacattgtcgcttctttgttgg

SEQ ID NO: 132806 - DNA, 260 bp, Glycine max
ggtgattttggttctggacaatgtctcgtgtttatgttgggaatttagaccctcgagtcagtgagagggacctcgaagatgaatttcgtatatatggtgttcttaggagtgtctgggttgctcgaagaccaccgggatatgcatttattgagtttgatgataggagggatgcacttgatgcaattcaggccttggatgaaaaaatggttggcgtgtagagctttctcataattccaaggtggtggccgaggagggcgtgg

SEQ ID NO: 132807 - DNA, 257 bp, Glycine max
agaggttaaagagacggcaacactttgctgtccgccttgaccgagcagagcttcgtcttggccctcgattttgccctaaagtactctcagtcacaacagacaccgtcgtcgtcgtcgtcgtcatcaatggcaccgaagcagaccaaggctgagaagaagatcgcttacgatgcgaactgtgcgacctaatggagggtacggccagatcctcgttgtgaactccgataacgtgggatcgaaccagctccagaacattc

SEQ ID NO: 132808 - DNA, 258 bp, Glycine max
gttgaactgacgaagatgtgcagagatctgaggcacaaggtgccggagatattggaggtggaggtggatccgaagggaggaccgaggattcaagaggcggcgatgaagctctacgtttcgaagagcgcgttcgagaaggttcacttgttgcaggcgatgcaggcgattgaggcggcgatgaagagattcttctagcgtataagcaggtgttggcggtggtgatgggaagctccgaggctaacggtaaccgagttgggt

SEQ ID NO: 132809 - DNA, 256 bp, Glycine max
atacaaagcattgaattcaaaaacttaagttcattccttgtgttttgctttcttcctcaaaaccaaacatgtcgaacacatgcggcaactgcgactgcgctgacaagactagctgcaccaagggaaacagctatggtgttattgtagagactgagaagagttacatcgagactgttgtcatggatgttccagcagctagcatgatgggaagtgcaagtgtggcactaactgcacttgcacggactgcacctgtggc

SEQ ID NO: 132810 - DNA, 262 bp, Glycine max
gcgttcttctctctccaccaaaccattctcatcaaccgacgctctctccgccttcgcttctctccttcccgatctccgatccttctcccccggctacctccgtctctcactccgtcctcgtcttcccaagagacttcagatacgggctgctgggagtatctatggaaatcactttcgtgtttcaacatatggagaatccatggaggaggtgttggttgtattattgatggatgtcctcctcaccttcctctctccggagctg

SEQ ID NO: 132811 - DNA, 257 bp, Glycine max
gaccattcatcggtgcagctcttgcagcactctaccaccaggtcgtaatcagggccattcccttcaagtccaagtgattcaatcaaacggttcatgcttaatcaagttgggaacaacaacaacaacaaaaatcaagccaatgtttgtgggttttggtttcatttcattaagatgatctgtttatctcttttctttttttaaaatttaaagtctttgtattttgtatgtaaagatgtaaaattatgattattaggtgg

SEQ ID NO: 132812 - DNA, 257 bp, Glycine max
agctcatagaaattctcgtcctcttcctacataagtcttctcttatcataaacgcgtcgttgctcggataaggttgtgctgcggtgattcactcgtactttgcttaatatggcggttgagaagttgagcattgcaaaagatgtgactgaattaattggcaaaactccattggtatatctcaaccgcatcgtggatgctgtgttgccaaagttgctgcgaactagaaatgatggaaccttgctccagtgtcaaagaca

SEQ ID NO: 132813 - DNA, 254 bp, Glycine max
ggaatttcgatgctcagtcatctcttttaccattctcttctctcttgctcttgcaggagagagccatgtccatgcatcgctacctgaggaagattattgggaagctgtttggccaaacactcccattcccactgcactgcgagagcttctaaagcctctccctgcaggtgttgaaatcgatgaactccctaagaaattgatgatacacagtacccaaaaacattcttctataaagaagaccttcatccaggcaa

SEQ ID NO: 132814 - DNA, 256 bp, Glycine max
aaggattaacatgacatgtgtcaatcaagaaactggagcggttgagccacatttgtttcctatgcttgctaattggaaacgtgagcatacaatggaagacgttttgattcaattgaagagagaaatgatgtctcctcaaaataggaagctaactcagcctcctgaaggcaatgaagaagccagggttgatcaaagggcctggtggtgagatgttgtattgtgtaattccatggagaatccaagcataataataata

SEQ ID NO: 132815 - DNA, 257 bp, Glycine max
  unsure (1)..(257): unsure at all n locations
ctcttcttctcttgcggctanggttntagcgcagttcttctagatttaaggaagatgggtaaggaaaaggttcacatcagtattgtggtcattggccatgtcgactctgggaaatccactaccactggtcacctgatttacaagcttggaggcattgacaagcgtgttattgagaggtttgagaaggaagctgctagatgaacaagaggtctttcaagtatgcctgggtgctggacaaacttaaggctgagcgtgaa

SEQ ID NO: 132816 - DNA, 255 bp, Glycine max
gttcttttcaaggtttatatagttggtgatgctataaaggtcgttaggcggttttcattacctgatgtaagcaagtgggaactctcgaaagatgctgggatatatcgttttccaagggtttcttgtgctgcagcttctgcagatgatgctgatttggatcctactgttgctggtaagttatcatgtattcttgactaaaagctttctatagatctttaccttttccatacttaaacaggttttcacattgccccc

SEQ ID NO: 132817 - DNA, 101 bp, Glycine max
gagaaatggagcttggatcttatgcagaaactgcttccacgccatattgagatgatagaaatgattgacgaggagctggttcggaccataattgcagaata

SEQ ID NO: 132818 - DNA, 185 bp, Glycine max
tatacctataaattcaatgttatacaacaagaaggtacattgtggtggcatgctcactcaggagttttacgtgccacggttcatggtgctttcatcattcaccctcgttcgggtctgtttccttttccaaaaccccaaaacaaagtaccaataatattaggtgattggaaggccggaattttggg

SEQ ID NO: 132819 - DNA, 260 bp, Glycine max
cttctcttgcggctagggttttagcgcattcttctagatttaaggaagatgggtaaggaaaaggttcacatcagtattgtggtcattggccatgtcgactctgggaaatccactaccactggtcacctgatttacaagcttggaggcattgacaaccgtgtaatagagggtttggaaaggaccgctgctgttataaacaggggttcttaaaagtacccgtgggtgctggacaaacttaaggctgagcgtgaaagagaatc

SEQ ID NO: 132820 - DNA, 263 bp, Glycine max
ggactggtttggccaatagattactgagtaagggcaacgatattctgtgttgcgattatgctagtttcgatggtttgattaccaagcaagttatgagcaagatggcagaaatgataaacagtctttgtggtggtgatgaaaaattgatgcgtgaaaggccacccctgctgtgggcttgttctccagggatggcaatttgaaagaaagatgtttggagagttgaatgtggaatcccttctggatttccgctcacagtatttgca

SEQ ID NO: 132821 - DNA, 105 bp, Glycine max
caaatgccttcaagataagatgacagccaaggaaagtgcaacctggcttgcaataatcaatcaagaggaggccttggcgcgtgagctttacccggattattgccc

SEQ ID NO: 132822 - DNA, 101 bp, Glycine max
gacttgggtataggggcgaaagactaatcgaaccgtctagtagctggttccctccgaagtttccctcaggatagctggagcccgcgggcgagttctatcgg

SEQ ID NO: 132823 - DNA, 264 bp, Glycine max
ggccgttcagcagaaaagagaaagagggttctggattttcatcttcttcctctgccgaggaagttactgaaggaatcgatggcactgccctcactgctattgttacaggggcatctagtggtattggtgctgagactacccgtgttcttgctatgcgtggtgtccatgtaattatgggggtgaaaaatatgaatgctgcaaaaaatataaaagaaacaatacttaaagggattccctcagctaaagttgatgctatggagttag

SEQ ID NO: 132824 - DNA, 204 bp, Glycine max
gaactcggaccttttagagttaacagtgatggaagaacactttacacaaatcaatatgcatggaacaatgtggcaaacgtgattttcctagagtctccagcaggagttggtttttcatattcaaacacttcttctgactacactaaaactggtgacaagagcacagctatggactcttacactttgcttcaaactgggctcgag

SEQ ID NO: 132825 - DNA, 97 bp, Glycine max
ctacgccaccaaggaggagcacgatcatcgcttcggcgtcttcaagtccaacctccgcagagccaggctgcacgccaagctcgacccctccgccgtc

SEQ ID NO: 132826 - DNA, 256 bp, Glycine max
cacaaaccgatgcacatacactgtctgggctgcgtctgtgcctgttggcggtggcgtgcaattaaacccgggccagtcatggtccgtggacgtgcctgcaggaacgaaaggggcccgcgtttggtcccgaaccggctgcaacttcgacggttcgggccgcggtggatgccagaccggtgactgcgggggtgtcctcgactgcaaagcatacggtgcgcctcccaacaccctggctgaatacggcctgaacggttca

SEQ ID NO: 132827 - DNA, 262 bp, Glycine max
gtttgttgttgtaactcgttcttcttcttttgttgttctgtgtttgtgtttgttttttctctcacctgaaaatgtcttgctgcggtggtaactgtggttgcggaagctcctgcaagtgcggcaacggctgcggaggctgcaagatgtacccagacttgagctacactgagtcaaccaccaccgagaccttggtcatgggagtggcacctgttaaggctcaatttgagggtgctgaaatgggtgtgcccgctgagaacgatgg

SEQ ID NO: 132828 - DNA, 99 bp, Glycine max
ctcagaacacttttgtaccagggctgattgatcttgccatcgcgaggaacactttgattggtggagatgacttcaagagtggtcagaccaaaatgaaat

SEQ ID NO: 132829 - DNA, 100 bp, Glycine max
ctttcgtaaagaagctggatctcatggtcgagacactctaggaatattccgagtccaccaatttgagaaagtggagcagttttgcctcactagcccaaat

SEQ ID NO: 132830 - DNA, 258 bp, Glycine max
ctttttcttctctctcaacaacttcaccttcttcctcctcgatcatgtctcacttcaagggcaagtaccatgatgagcttatcgccaatgctgcgtacattggcactcctggaaagggtattcttgctgctgatgagtcaacagggacaattggcaagcgtttggccagcatcagtgtagagaacattgaatccagcaggcgagctcttagggagctgcttttcactgctcctggtgttcattcatatctcagggtgt

SEQ ID NO: 132831 - DNA, 108 bp, Glycine max
attcggctcgaggaaattttgatacaccgcgatcacaggttgccgcaccttaaaaccggaaacaaaagcgatcgttacttgatttcaagaatctctcaatttcttcct

SEQ ID NO: 132832 - DNA, 89 bp, Glycine max
atgactcaacacttcatgaaaagctactctgatctcctcatcaggacgtgccacaggcgcggtgtgcatgctatgggaggaatggcagc

SEQ ID NO: 132833 - DNA, 93 bp, Glycine max
cattctctctgtgtatttccctacctctcccttcaagatgcagatcttcgtcaagaccctcaccggcaagaccatcacccttgaggtggaaag

SEQ ID NO: 132834 - DNA, 95 bp, Glycine max
caaatcatcacacacacatactaagaagcaacaattcttctacaatggatctcctccttctggaaaagaccctcataggtctcttcctcgctgcg

SEQ ID NO: 132835 - DNA, 95 bp, Glycine max
gaggtagaagacagaagcatggtgaagatgtggtgcattctttaaaggtttccttggaggacgtttataatggcacagcaaagaaactatctctt

SEQ ID NO: 132836 - DNA, 167 bp, Glycine max
cctaaaccctagtctccatacatcaacttgggaggttaaagagacggcaacgttgtgctgtccgccttgaccgagccagagcttcgtcttggccctcgattttgccctgtaaaactaatcccagtaacaacagaaataatcaatggcaccgaaacagccaagggttg

SEQ ID NO: 132837 - DNA, 255 bp, Glycine max
ttcactcttcttctcttgcggctagggttttagcgcacttcttctagatttaaggaagatgggtaaggaaaaggttcacatcagtattgtggttattggccatgttgactctgggaagtccactaccactggccacctgatctacaagcttggaggcatggcaacccgttaattggagatttttgaaagagaccgcttcaatatcaacaaggggtcttacaaatatgcctgggtgcttgataagcttaggctgag

SEQ ID NO: 132838 - DNA, 251 bp, Glycine max
gctttagccatcactaacactcagtctctgaattgcggctgagggtttcgagtaacgttttttgtttctgagtttaagatatcatgggtaaagagaaggttcacattaacattgtggtcattggccatgttgactctgggaattcaaccaccaatggccacttgatttacaagcttggaggtattgacaagcgtgttattgagaggtttgagaaagaagctgctcagatgaacaagaggtcattcaatacg

SEQ ID NO: 132839 - DNA, 126 bp, Glycine max
gaaataatcaccaatggcaattgaacacgaagacgatctcaaagacgagaagaaccctcgacccctcgacgaggatgacatcgccctcctcaaaacctacggtttgggaccttattccacaagcat

SEQ ID NO: 132840 - DNA, 282 bp, Glycine max
catgcgtattcggctcgagcaattagtagccttattggaaaacaagtggtgaaagttggaagaagctctggcttgaccactggagttgttttggcttatgccctagagtacaatgatgagaaaggtatatgctttctaacggatcttcttgttgttggtgagaaccaacaaacttttgaccttgaaggagacagtggaagtctcatcatgttaaaaggtgacaatggtgagaaaccacgaccaattgggataatatggggaggaactgctaacagaggccgc

SEQ ID NO: 132841 - DNA, 270 bp, Glycine max
tcggaactcggctcggggtcgagccgattcggctcgacggctcgagctgagttccgattagcgagggaaaatgagcacgcagaagaagcgaccgtgccacataggagcgttcaagcaccgcgccgtgggggatcccaagtacgccgagaagctgtggaaggttctggaacacgctattcatgagatatacaatcacaacgctagtggccttagctttgaagagctttacaggaatgcttataacatggtgttacaaaaatttggggagaa

SEQ ID NO: 132842 - DNA, 258 bp, Glycine max
cggcgacggcgctgtcggcaaaacctgcttgttgatttcctacaccagcaacacttttcccacggactacgtgcccacggtttttgacaatttcagtgctaatgttgtggtggatggaagcaccgtaaacttggcattgtgggatactgctggtcaggaagattataataggcttagacccttgagctatcgaggagctgatgtttttatacttgccttttctctcataagcaaggctagctatgaaaatattgcaaa

SEQ ID NO: 132843 - DNA, 258 bp, Glycine max
gcaacttacgcaaagctgcagctcaggaagttgttgacaaagttcggcagcatagtggtgtactagtggatcaggcgcaacttgtatcgaaggaactgatcagagttgctattctttggcatgaaatgtggcatgaagcactggaagaagctagccgtttgtatattggtgagcataatattgaagggatgctaaatgtgttggagccattgcatgaaatgcttgaagaaggagcaatgaaaaacaatgtcaccataa

SEQ ID NO: 132844 - DNA, 258 bp, Glycine max
cagcaaatcagaatgcatactttaaaggtttattttatgcatcctctactgcagctaccgctatgagtaatctgataccagcattaacgtttgtaattgcggcaattgcgggatttgagaaagttgacataagcttaagaagcacggccaagatattagggacagtttgttgcgtcgctggagccttaaccatggctttggtcaaaggacagaagctgttacacacagagttccttccttctatacatcttactggca

SEQ ID NO: 132845 - DNA, 259 bp, Glycine max
aaacgcggacatgatgagatagactttgagttcttggggaacagaacaggacaaccttacattctgcaaacaaatgtgttcaccggaggcaagggtgatagagagcaaagaatctatctctggtttgatcccacgaaagaataccacagatactccattctctggaacttgtatcagattgtgttctttgtggacgaggtgccaatcagggtgttcaagaacagcaaggacttgggagtgaaattcccattcgaccagc

SEQ ID NO: 132846 - DNA, 261 bp, Glycine max
cggctcgagcgtgtatgcgtataaaaggcaaataaagatattagcgtcaaaatgttgggtgtgttcagcagctccatagtgtcgccgccgggcgagcgcgttgcagccggcgtccgtactccgtcgccgaatatgacggcggcggcgctgcggaatcggtgcgaggagaagaacccctccgccgtgtcggtcgaggtcgcagatcatgtccagcacgcttatacccaccacaacgagtcgccgtttcagcccagatccttt

SEQ ID NO: 132847 - DNA, 257 bp, Glycine max
ctcgagcgcttctcttgcggctagggttttagcgcacttcttctagatttaaggaacatgggtaaggaaaaggttcacatcagtattgtggtcattggccatgtcgactctgggaaatccactaccactggtcacctgatttacaagcttggaggcattgacaagcgtgttattgagaggtttgagaaggaagctgctgagatgaacaagaggtctttcaagtatgcctgggtgctggacaaacttaaggctgagcg

SEQ ID NO: 132848 - DNA, 262 bp, Glycine max
atttgattggtgtgcatccatgttaagctagtggcgatcggatccagctacagcctacaacctacagttttggtttggtttgcttgattgaagatcaaggaaggaagatgttgggtgttataaggcacaagagtattcgccccgccttctccgcaatcagacacttctcttctgcagctaaagagattactgtcagggatgctctcaactccgcactcgatgaggaaatgtcagctgatcctaaagtcttcttgatgggtga

SEQ ID NO: 132849 - DNA, 260 bp, Glycine max
attctctctgtgtatttccctacctctcccttcaagatgcagatcttcgtcaagaccctcaccggcaagaccatcacccttgaggtggaaagctctgacaccatcgacaacgtcaaggccaagatccaggacaaggaaggaatccccccggaccagcaacgtctcattttcgccggaaagcaacttgaggacggccgtacccttgctgactacaacattcagaaggagagtactcttcacctcgtcctccgtctccgtgg

SEQ ID NO: 132850 - DNA, 255 bp, Glycine max
ttgttgttgtaactcgttcttcttcttttgttgttctgtgtttgtgtttgttttttctctcacctgaaaatgtcttgctgcggtggtaactgtggttgcggaagctcctgcaagtgcggcaacggctgcggaggctgcaagatgtacccagacttgagctacactgagtcaaccaccaccgagaccttggtcatgggagtggcacctgttaaggctcaatttgagggtgctgaaatgggtgtgcccgctgagaac

SEQ ID NO: 132851 - DNA, 259 bp, Glycine max
agccaaacacaccacagcaccaaactagttggctcaattctctttgaatggctttggaggctttgaattcaccaacagcagccaccactcccttccgtggttaccaagaagaggaggaggaggttgaccttcacctacgcgagccttgggccaagagaaaacgctccaaacgacctcgttttgagtcggaggaagagtacttggctctttgcctcatcatgcttgcacaaagcggtaacaacaacaacacccaattacc

SEQ ID NO: 132852 - DNA, 255 bp, Glycine max
cgagcgaaagaaggcgtcttcataaacgcctttcttctccgtttccgtttcctcgttacaaattcgctttttgatctgcgaaaatgagagagtgcatctcgatgcacattggtcaggctggtatccaggtcggaaatgcttgctgggagctctactgcctcgagcacggcatcgggcccgatgggcaaatgccaagtgacaagacagttggcggtggtgatgatgctttcaatactttcttcagcgagactggtg

SEQ ID NO: 132853 - DNA, 258 bp, Glycine max
ctctcatccagatcttgcaaaaaaaaaaaaaacccaatggcagcgagcgctcccattccacgcgaagagttcgtgtacatggcgaatctgccggaacaggccgagcgctacgaggagatggtggagttcatggagaaggtctccgcctccgccgagaccgaggagctgaccgtggaggagcgaaacctcctctccgtcgcctacaagaacgtaatcggcgttcgcggcgcctcctggcgcatcatctcctccattgag

SEQ ID NO: 132854 - DNA, 263 bp, Glycine max
aaacgcggagatgatgagatagactttgagttcttggggaacagaacaggacaaccttacattctgcaaacaaatgtgttcaccggaggcaagggtgatagagagcaaagaatctatctctggtttgatcccacgaaagaataccacagatactccattctctggaacttgtatcagattgtgttctttgtggacgaggtgccaatcagggtgttcaagaacagcaaggacttgggagtgaaattcccattcgaccagccaat

SEQ ID NO: 132855 - DNA, 254 bp, Glycine max
cgagccatggcgtaaaagaatacttgacccgggtagcgagattgtgttgaaatggaaccgggtcttcatagtttcatgcttggtggctctttttgttgatccattgtacttttatttgcctagtgtgatagaaaatacagggtcttcatgtgtaaggacagacctaacattgcgcattgtcgtgacctttcttcgcactattgctgaccttttttatctgttgcacctgataattaagtttaggacagcatatg

SEQ ID NO: 132856 - DNA, 255 bp, Glycine max
ttcatatgcaaaagcgtaataagaaataacgagagaaaaattctggggtttagaggagaaaaggggagaaagggtgggtattgcttcacacaaacacaacagtgtctgctgcaccttgcaatggtttcgctatcaacatggtttcgctacattgcccacaagctcgaatactccttctccctcagctggaagaactacaaaggaggtcaaattacagacagagaggtacgtgatgttgtttggaaaaacttcttt

SEQ ID NO: 132857 - DNA, 255 bp, Glycine max
cgcaacaaaaagaaagaatcccaggcgaggagaaagatggaggggaaggagcaggatgtgtcgttgggagcgaacaagttccccgagagacagccaattgggacggcggcgcagagccaagacgacggcaaggactaccaggagccggcgccggcgccgctggttgacccgacggagtttacgtcatggtcgttttacagagcagggatagcagagtttgtggccacttttctgtttctctacatcactgtctta

SEQ ID NO: 132858 - DNA, 254 bp, Glycine max
cggctcgagagaggcttgtgaatcaactgaagaagcagccattaagggttgttccattgtttgaaaaacttgctgatcttgaggctgctcctgctgcggtagcccgcctattctctatagattggtacagagaccgtatcaatgggaaacaagaagttatgatagggtactcggactcgggaaaagatgctggtcgtttctctgcagcatgggcactatacaaggctcaagaagagctcataaaggttgcaaaa

SEQ ID NO: 132859 - DNA, 255 bp, Glycine max
ctgattacaacattcaaaaggagtccactctacacttggtgctccgtctccgtggtggaatgcaaatctttgttaagaccttgaccggaaagacaatcacccttgaggtcgagagctctgacaccattgacaatgttaaggctaagattcaggacaaagagggtatcccaccagaccaacaaaggcttatctttgcaggaaagcagctagaagatggcagaaccttggctgattacaatatccagaaggaatcta

SEQ ID NO: 132860 - DNA, 252 bp, Glycine max
aaaagttgctgcacttaataagctgaagaaaaggggcacgcactctgaagcattggagaaagcaaaagcagttgtcagtcatttgcatacaagatacattgtagatatgcaatccttggattcaacagtctccgagattaaccgattacgtgatgaacagttgtatccaagacttattcagcttgttgatgggatggccactatgtggaaaaccatgctagagcaccatgtgaagcaatcagatactgtgac

SEQ ID NO: 132861 - DNA, 254 bp, Glycine max
gcaacggccacacacacccttagtcgcctgaaaacgattgttgttgcagggcaaacacaaagatccgggtcgacccgtcgcagatccgatccaaataagaaagatgaatattttcaggttagccggagacatgacccatttggccagcgtcctcgtcctcctcctcaagatccacaccatcaaatcctgcgccggtgtctcattgaaaactcaagaactctatgcactcgtttttgcttgtcgctacttagata

SEQ ID NO: 132862 - DNA, 254 bp, Glycine max
ccacaattcacaaccgaaacagtttccatctctctcacaaaatgacaacaatatcaaattgctcccttctcttcctcttcctcttcctctccaccctccacatagcttccaccctctcaacccccaccaacttcatcaagtcctcctgcagcaccacccagtacccagccctctgcatccagtccctctccgtctacgcctccaccatccagcaagacccccacgagctcgtccagacagccctctccctctcc

SEQ ID NO: 132863 - DNA, 251 bp, Glycine max
aagaaagtgaacctatttggtgttttcctaaccgaatcaatctttattctttggttattcttcgtcttctacatgggtcgccttcttctctttctcattattcccagccttgtcgcattgtctttcctctcagaggtacaatcagcgtcgttcaagattgtgaacaagtgccgccacacgatatggccgggattactctccggtgccacctcgccgccgcttcccaccaccggattcaccctcgagagcgg

SEQ ID NO: 132864 - DNA, 246 bp, Glycine max
ctcagaaccttctgaggttaaagcaaaaaacaaagagagagagagagagaaaatgatgaagccatcgatgctcagatctctccactccgccgccacccgcggcgcctctcatctcttccgccgtgggtacgcctccgagccggtgccggagcgcaaggtagccgttctcggcgccgccggcggcgatcgggcagcctctctcccttctcatgaagctcaatcccctcgtttcgagcctctcccttt

SEQ ID NO: 132865 - DNA, 254 bp, Glycine max
attgcttctcctccacacacgcacagagacacacacttttgcagtcacattgagaatggggcgtgttcgcacgaagacggtgaagaaatcctcgcggcaagtgatagagaggtactactcccgcatgacgctggacttccacacgaacaagaaggttctggaagaggtggccatcattccctccaagaggctccgcaacaagatcgcggggttctccacccatctcatgaagcggatccagaagggtcccgtgc

SEQ ID NO: 132866 - DNA, 265 bp, Glycine max
cgaagaacaagccacacagacccagtctcctactctctctcacccacaagataaatggcatctcacatcgttggatatccccgcatgggtcccaagagagagggcaagttcgctctcgagtctttctgggatggcaagagcagcgccgaggatttgcagaaggtggctgctgatctcaggtcatccatctggaagcagatggctggtgctgggatcaagtacatccccagcaacactttctcgttctatgaccagctgctcgacg

SEQ ID NO: 132867 - DNA, 245 bp, Glycine max
atcgagcgcatcggctgagacaaagttccgacgagacatacagtatggtagagatttggtgcattggagctggctatgttggtggcccaaccatggctgtaattgccttgaagtgtcctgagatcgaggtggtcgtggtggacattgctgcaccgcgaatcaacgcgtggaacagcgaccacctcccgatatatgagcctggccttgatgatgtggtgaagcagtgcagggggaagaatctcttc

SEQ ID NO: 132868 - DNA, 252 bp, Glycine max
aaaaaagtactgggctttaagtgggtgagaacaagagctcaaatcaaatcgaatcgacaaaagaaagacagatcatattcatggcgatggcaagcctggctcgacggaagggttacgccgtcgttttgtcgtcgaggtcgtcgttttgtctgacaagctggaggggattcgcgtccggatctgacgaaaacgacgtcgtcgtcatcggcggcggtcccggcggctacgtggccgccatcaaagccgcgcagt

SEQ ID NO: 132869 - DNA, 243 bp, Glycine max
aagctacctagagcttgcacctattggtatcttctacaatatcctctcatagtgctcttcttcttcttcattttcattatcaagatgtctttgctttcggatctcatcaacctcaatctctcagaaataacagaaaagatcgttgctgagtacatatgggttggtggatctggtatggacctcagaagcaaagccaggactcttcctgggccagtgagtgaccctgcaaagcttccaaagtgg

SEQ ID NO: 132870 - DNA, 250 bp, Glycine max
gtgtttttataacaggtaattggtttgagagatgtaattcctccacccttgcgtagagagtttaatgatgtctacatagccactgaactcatggatactgatcttcaccatatcattcgctccaatcaaaatctgtcagaggagcactctcaagtgagtgctttcaattttttttttaaatatatcataattattatgtttacattttggattttttttgttttgctgatgattgtatgctcttttactt

SEQ ID NO: 132871 - DNA, 247 bp, Glycine max
aaaatattgtacacataaatctagctccaattcctaatcacctggttaatttcttcacatagagctatcaagatccaacgttaacatgaagaatgttttagtaaggtcagctgcgcgagctctgcttggcggcggtgggcggactactaccgccagctctcaacggcggcgatcgtggaacagagacaccagcacggtggcggcgcgtttggaagcttccacttgcggaggatgtccactcttccag

SEQ ID NO: 132872 - DNA, 251 bp, Glycine max
cggctcgagtgacgacaatgaagattatccacctctctggcaagtcatgttgctcttggttcttactaggcctactctctatcattgcttcccttgcttcagctgcagagaatcactaccatgagtttgttattcaaactgtgccagtgaagaggctgtgcagaacccaaaacatactcactgtaaatggccagtttcctggcccaacagtggaagcaagaaatggagattcccttgcaattaaagtagtc

SEQ ID NO: 132873 - DNA, 250 bp, Glycine max
cacaatacctctatcttgtgccacttatatagtacgtccatcctagtgaaacaaaccatggtttccgaaacaaaccagtccaagaatgtgtgtgtaattggagctggaccatcagggctagtggcagcgagggagctgaaaagagaaggtcataaggtggttgtgttggagcagaaccatgatattggaggtcaatggctatataacccaaatgtacaagaggaggaccctttgggaagagacccttggc

SEQ ID NO: 132874 - DNA, 251 bp, Glycine max
atcttgtccatctatccaaatttccccatcccgcaactaatttatttatttatttttcctttatttatcttctttctctggctcgagcatccaaaagggttgttttttttttttataagaagaagaggagagggaagatgatgatgatgacaatggaggggatgatggacaagggggtgttggatgatgtgataagaaggcttctggaagggaaaggagggaaacaggtgcaactctctgagtcggagatc

SEQ ID NO: 132875 - DNA, 251 bp, Glycine max
gttaccatttgctcccagtacagagcttaaccgagcttcacaaagatgaatcgggaaaagttgatgaagatggccggttcggttagaactgggggaaagggtaccatgagaagaaagaagaaggctgtccacaagacaacaaccacagatgacaaaaggcttcagagcaccctgaagagaataggggtgaatgccatcccggctattgaggaggtcaatatctttaaggatgacgtattatccagtttcta

SEQ ID NO: 132876 - DNA, 252 bp, Glycine max
atcacatagctagttgtttaaagtaagagagaagaaagaagcaaatggcaaactttccagttgttgacatggggaagcttaacaccgaagagagacctgcagccatggagattataaaagatgcctgtgagaactggggtttctttgagttggtgaaccatgggatatccattgagcttatggacacagtggagaagctcacaaaagagcattacaagaagactatggagcaaaggttcaaagaaatggtga

SEQ ID NO: 132877 - DNA, 252 bp, Glycine max
cgcaacttcagcacttttccataaacaaccttggagatccatttattgaaagcaactatggtgtccactcccggcagtttgaagttggtgttttggattggtttgcccgattgtgggaactggagaaaaatgagtactggggctatataacaaactgtggtacagaaggcaatctccatggcatcctagttgggagagaggtctttccagatgggattttgtatgcctcacgggagtcacattattctgtgt

SEQ ID NO: 132878 - DNA, 248 bp, Glycine max
gtcgagccgaatcggctcgagcaaaatcaaaggcaaaaacggaacgtaaaaaggacaaaaagaaacagagatcgcgtttttgtgctccagagctggaagcaactgaaccccgtttgcttcgattgattaaagcctttcccattgctgaaagagatggttgcctttgggaagaagttgaaagacagacaaattcaagaatggcaaggatattacataaactacaaactcatgaagaaacgagtgaagca

SEQ ID NO: 132879 - DNA, 248 bp, Glycine max
gttagatctaacaaccacttatcccctttctccttctaacgagtgaggaaaaatggcgcgtaagaagatcagagagtatgactcaaagaggttgttgaaggagcactttaagagactctctggcaaggagttgccgatcaagtctgcacaaattaccgcatcaactgatttcactgagctacaagagaaggaaccctggctttcatcttctaaattggttgttaaacctgacatgctatttggaaagc

SEQ ID NO: 132880 - DNA, 249 bp, Glycine max
tctcacactagttgtgaatctcaaatatcaaactcatcaaggtaaacaaagatggctaagtctagtgcttatcctttgttcttgatttcttccattctgtttatttcacacatttatgcctcccaagtagaagccaagcccccagtagtgaagggactgtcatattctttctattccaaaacatgcgccaagcttgagtccattgtgaggaaacatctcaagaaggtgttcaaggatgacaatggccaa

SEQ ID NO: 132881 - DNA, 247 bp, Glycine max
catttatcaactcactcatcaatctcgtttgttctcactaactattacttcatcatgtcgtcgagcacagttggtcaagtcatcaaatgcaaagctgcggtttcatgggaggcagggaagccacttgtgattgaagaagtagaggtggcaccaccacaagctggtgaagtgcgtttgaagatcctctacacctctctttgccacactgatgtttacttctgggaagccaagggccaaactccattgt

SEQ ID NO: 132882 - DNA, 249 bp, Glycine max
cttttcttttcctctaaaagtgagtccttccttcttcgatcacttgttaaattcacatatcatagcaatggcagcacgttcctacagccccatcatggttgccctctctttgcttcttttggtcacattctctaatgtagctgaggcttatacacgcagtggaacacttcgtccttcagattgtaaaccaaagtgtacttaccgttgctctgcaacttcacacaagaagccatgcatgtttttctgcca

SEQ ID NO: 132883 - DNA, 252 bp, Glycine max
gttcttcatggcaagaaagggggccacttgcattggtacacaaggtataagattgctgtggaggcttcaaagggcctttgctatctacaccatgactgttcaccactcattgtccatagagatgttaaatccaacaacatccttcttgattccaattttgaagcacatgttgctgattttgggctcgctaaattcctgcaagattctggagcatctgaatgcatgtctgctattgctggttcttacggatac

SEQ ID NO: 132884 - DNA, 254 bp, Glycine max
cttaacaacagcacaaagcgggttactgtctgttcaagctaccatctctctctctctttcttagtgcctccttgccagttaaaatggcccaagaaactttcctattcacatctgaatcagtgaacgaggggcaccctgacaagctctgtgaccagatctccgatgctgtgctcgatgcatgcttggagcaggaccctgacagcaaggttgcctgtgaaacctgcaccaagaccaacatggtgatggttttcgga

SEQ ID NO: 132885 - DNA, 250 bp, Glycine max
aggaacttcaagatgccaaagaagggtcgaccactttccttgcagaccgtagagctgaaagtaaggatgtgctgcactggctgcgagagagttgttaaaaacgccatttacaaactcaaaggcattgattcagtggaggtggacttagagatggaaagggtgagggttggtgggtatgttgacaggaacaaggtgcttaaggctgtgaggagggccgggaagagggcagaattctggccttaccctaatc

SEQ ID NO: 132886 - DNA, 246 bp, Glycine max
tgatctttaacacctacatatggtggatgaacactttctctatgaaagtcttacgaggatcatttgatgaaggttccacagagtacgatgaggttcctcgcccaatagcatatgggagagtcctcaagacatggtcaaaatgggtagatgacaacattgactcaaatcgaactaaagttttcttcagcagcacgtcccctcttcatatcaagagtgaggattggaacaacccagatggtataaaat

SEQ ID NO: 132887 - DNA, 248 bp, Glycine max
ccggaagctctagcttgggcagcgaatcacaatggcgagaggattgaagaagcatttgaagaggcttaatgccccaaagcatctgatgcttgacaaactgggtggtgcatttgctcctaagccctcatctggaccacacaaatccagggaatgcctgccactcatactcattttgcgaaaccggctgaagtatgctctgacataccgtgaagtcattgctattctgatgcagcgacatgtccttgttg

SEQ ID NO: 132888 - DNA, 247 bp, Glycine max
ccgcactctcttttcttcctcagaaacacatccttatggcagagcgcggaggtggcgatcgtggcggcgaccgtggcggtttcggacgtggattcggcgggcgaggacgcggaggtgacaggggccgaggcccccgccgcgaggaagaggagaagtgggtcccagtgaccaaactgggccgcctggtgaaggagggacgaatccgaagccttgaacagatctacctgcactcgctcccgatcaagga

SEQ ID NO: 132889 - DNA, 249 bp, Glycine max
agctgcgaacgcatctgctggacttcggactatcaaacgggttgaacaaactttgcaagatcttggggtcaatttgaagccaagggttccaacgaaagctgtttgtgcagagcatcttgaattaagaaaagaaatactaacttggcttaatctccagaagcaggtgcaatataaagaggctgaaggttcctcttttcgtgatgggtcatatggtgaaacacctggaacaccaaagcatttacatcgtgt

SEQ ID NO: 132890 - DNA, 249 bp, Glycine max
gttaggttctgcacgctctgcttccagcgagtgttctttcttcgtttcaacaccttaatttgcacacgctgcttcttcagcttgagaaatggcacaagaaacctttctattcacatctgaatctgtaaacgagggtcaccccgacaagctgtgcgaccagatctctgatgcagtgctcgatgcgtgccttgaacaggaccctgacagcaaggttgcctgtgagacatgcaccaagaccaacatggtcat

SEQ ID NO: 132891 - DNA, 251 bp, Glycine max
gtgaaacactagctagggtattgggagctctcgttgtttcggagttagggaccttacgcagccatggccactgctacgaatgccgccgccgccccaccacgccagctctcccagaaggaagccgacatccagatgatgttggccgccgacgtccacctcggcaccaagaactgcgacttccaaatggaacgttacatcttcaagcgccgcaacgacgggatttacattattaaccttgggaagacgtggga

SEQ ID NO: 132892 - DNA, 252 bp, Glycine max
ctcgagccgctcgagccgctttagcaaattccaattcccaattcccaattcccaattcgacacccttaaccctttcaaagaaccaaattgagtgatcgtgatggcaccaaaggcagagaagaagccagcggagaagaagcccgcggaggagaagaagtccacggtgggagacaaggctccggcggagaagaagccaaaggccggaaagaagcttccgaaggagggaggcgccggcggagaagggaagaagaa

SEQ ID NO: 132893 - DNA, 245 bp, Glycine max
ttgaaaaatacgactatgacgggaagattggactccagttctgtagaagttttttccagagttcaagaaattctagtaaattgcaaagagctgaaaacttgtcagaatgacagttggggggagagaccagagttatgcccaaaatggttagcattgctgactatggagaaggcttgtctgtctgccatttctcttgatgaaaccagtggtgctgtacggaaggctggtggaaatttcaaggaaaa

SEQ ID NO: 132894 - DNA, 245 bp, Glycine max
caacttcaacctcaccaaaggaactaagaatttcattgaggctagagaaagtggtgatcaatatgtcaaagaatccagaagttttctttgatattctaattggaaagatgaaagctggacgagtagtgatggagttgtttgccgatgcaaccccaaaaacagctgaaaacttcagggctctctgcactggggaaaaggggattggacgatctgggaaacctttacactacaaaggttctgtattt

SEQ ID NO: 132895 - DNA, 248 bp, Glycine max
cgaaaacccccaactccaacctctgttcatcgtctaccgcgctttcttttcaaccagaactatgattaagctttttaaagtaaaggaaaagcagagagaacttgcagaaaatgcaagtggcggaccacctgttaagaagcaaagtgctggagagttgcgtcttcacaaagatataagtgagctgaatctaccaaaatcatgtaccatgcaattccccaatggcaaagatgatctgatgaactttgaag

SEQ ID NO: 132896 - DNA, 244 bp, Glycine max
ggaggatcaactgcagtgactgcaattcttattgataatcagaagttatgggtagcaaatgttggagactcacgagcagttttgtcgagaaaaggggtggccgaacagatgactattgatcatgagcccaatactgagaggggcatcattgagaacaaaggcggctttgtctcaaacatgccaggagacgttgcaagagtaaatgggcagcttgcagtttctcgagcatttggagacaaaaatt

SEQ ID NO: 132897 - DNA, 248 bp, Glycine max
tgcggggctacccgctgagtttaagcatatcaataagcggaggaaaagaaactaacaaggattcccttagtaacggcgagcgaaccgggaaaagcccaccatgaaaatcggtcgccctcggcgtccgaattgtagtctggagaagcgtcctcagtggcggaccgggcccaagtcccctggaagggggcgccagagagggtgagagccccgtcgtgcccggaccctgtcgcaccacgaggcgctgtcgg

SEQ ID NO: 132898 - DNA, 247 bp, Glycine max
attattattagggtttggcgattcagagagaaagagaaatgggagaacgaaaaggaatcccaattgctctggggctcttggcgatgctcctcttcttcattgcttcttcctcttcctctcacctcgttcgtgcttccgatgacgccgacgacgcgatcttctacgagtcattcgacgaggattttgacggacggtggattgtgtccgacaaggaggattacaacggtgtctggaagcatgctaagag

SEQ ID NO: 132899 - DNA, 248 bp, Glycine max
ctcgagccgcaaaaatgaaaaacatgaaattgtgttcggtgatgctatgcttatcactagcgttccttcttggggccacagcagaacaatgtggcacacaagctggtggagcgttatgcccaaatagattatgttgcagcaaatttgggtggtgtggtgacacagattcctactgtggagaaggttgccagagccaatgcaaatctgcaacaccctcaacaccaactccaacaacacctagtagtggt

SEQ ID NO: 132900 - DNA, 248 bp, Glycine max
tagtcatatgcttgtctcaaagattaagccatgcatgtgtaagtatgaactaattcagactgtgaaactgcgaatggctcattaaatcagttatagtttgtttgatggtatctgctactcggataaccgtagtaattctagagctaatacgtgcaacaaaccccgacttctggaagggatgcatttattagataaaaggtcaacacaggctctgcctgttgctttgatgattcatgataactcgtcgg

SEQ ID NO: 132901 - DNA, 246 bp, Glycine max
gcgtaaacgtgcatgcaggccacaagggaaagccagtgcatgtttcagttggctcaaagtctccatttgattacgtctacgccgccacggaaactcaattacacgatgaccccaacgtggcactcttcttcttggaaaaggacttgcattctggaacaaagttggacttgcacttcaccaggagtacatctaatcaagccacgttcttgtcacgccaagttgcggattcgatacccttttcatcca

SEQ ID NO: 132902 - DNA, 240 bp, Glycine max
caacattctcataatcaaataccatttcattcattcttacatattgcttaattttatctgaattttgaaacaccttctgaatggctttttcaagagttgcattgttaatatgcacggtaattgggtattttgtgattgcctctgcgggcaatttttaccaagattttgatatcacttggggagatgggcgtgctaagatactcaacaatggcgagcttctcactctgtctcttgacaaag

SEQ ID NO: 132903 - DNA, 242 bp, Glycine max
ctcgagccgaaaatgttgatacatagaattttggacccaaatcctgaaactcgtataacaattgagcagataagaaatgatgaatggtttcagaggagttatgttcctgtcagtcttcttgagtatgaagatgtaaatcttgatgatgtaaatgctgcttttgacgatgctgaggaaccaagggctgatcaacaatgtgataaggaggacatgggtcctctaatgcttaatgcatttgactt

SEQ ID NO: 132904 - DNA, 243 bp, Glycine max
tttctgtttgttcttcttccttattttcttccctagtcaaggagattcatctctgcaggttgttttagaaaagaaaaaatggtgaagatttgctgcattggtgctggatatgtggggggtccaacaatggcagtcattgctctgaagtgcccctccattgaagtggctgttgttgacatctccaaatcccggattgcagcatggaacagtgaccagcttcctatctatgagccaggccttgat

SEQ ID NO: 132905 - DNA, 245 bp, Glycine max
gggaaggaaagatgcagatattcgtgaaaaccctaaccgggaagacaatcacccttgaggtggagtcaagcgacaccattgacaatgtcaaagccaagattcaggacaaagaagggattcctccggatcagcagaggttgatcttcgcggggaaacagctggaggatggccgtaccctcgccgattacaacatccaaaaagagtcaacattgcatcttgttttgaggcttcgtggtggtattatt

SEQ ID NO: 132906 - DNA, 251 bp, Glycine max
gttcgagggatcggaacgaagaaaggaagcggtgtgaagaatggcggaagagggacaagtgatcggtgtccacagcgtagaggagtggaaggaacatctcaagaagggagaagagtccaagaaattgattgtggtggattttactgcttcttggtgcggtccatgccgtttcattgccccaattcttgcagagtttgctaaaaagttgccgaatgtcaccttcctcaaggtggatgtggatgaattggaga

SEQ ID NO: 132907 - DNA, 244 bp, Glycine max
gattcgaaacgaagaaagaaagcgttgtgaagaatggcggaagagggacaagtgatcggtgtccacagagtagaggagtggaaggaacatctcaagaagggagaagagtccaagaaattgattgtggtggattttactgcttcttggtgcggtccatgccgtttcattgccccaattcttgcagagtttgctaaaaagttgccgaatgtcaccttcctcaaggtggatgtggatgaattggaga

SEQ ID NO: 132908 - DNA, 246 bp, Glycine max
ctcgagccgtcctgccagtagtcatatgcttgtctcaaagattaagccatgcatgtgtaagtatgaactaattcagactgtgaaactgcgaatggctcattaaatcagttatagtttgtttgatggtatctactactcggataaccgtagtaattctagagctaatacgtgcaacaaaccccgacttctggaagggatgcatttattagataaaaggtcaacacaggctctgcctgttgctttgat

SEQ ID NO: 132909 - DNA, 249 bp, Glycine max
ctcgagccgctcgagccggaagttggagacactgttggatccaaatttgcttggaaatcgttatatagagtgaagtagaggagttaatccaagtggccttaatatgcacacaaaaatctccttatgagagaccaaagatgtctgaggtggtgagaatgctggagggtgaaggtttggaagaaaagtgggatgaatggttgaatatgacagaggatatacaaaatttcaccttcaacctctgcactccta

SEQ ID NO: 132910 - DNA, 244 bp, Glycine max
tcttaacgcattgtggtgctaattcggtggtggaggcgatttgtgaaggggtgcctttgatcaccatgcctaggtttggtgaccattttttgtgtgagaagcaagcgactgaggtgcttgggcttggggtggagttgggtgtgtctgagtggagcatgtctccttatgatgcgaggaaggaggtggtgggttgggaacgaattgagaatgctgtgaggaaggtgatgaaggatgaaggaggctt

SEQ ID NO: 132911 - DNA, 247 bp, Glycine max
aagaaattcaaatgaagaaagccaaactaattggcatgcttgatgaggtggagcaaaggtacaggcagtaccaccagcagatggagatagtgggttcatcatttgagcaagctgcggggattggttcagcaaggacttacactgcccttgcattgcaaacaatctcgaagcagtttcggtgcttgaaagatgcattgcagggcagttcgcactgcgaataagagcttaggagaagaagattgctttg

SEQ ID NO: 132912 - DNA, 243 bp, Glycine max
gcaagccccactcaaccaccacacctctcctcgttcacgctacccctttctgctcttcttctacctttcaagttttaaaagtataaagatggcagagacattcctatttacctcagagtcggtgaacgagggacaccctgacaagctctgcgaccaaatctccgatgctgtcctcgacgcttgcctcgagcaggacccagacagcaaagttgcctgcgaaacatgcaccaaaaccaacttggt

SEQ ID NO: 132913 - DNA, 243 bp, Glycine max
aggaagtgaagaggaggcgagaatgaagatatattcggtctcgactaggcactactttgcgtttggggctcttgtgtctgaagagctttcttacaagattaaagaattgcctggagttcggtgggtgcttcctgattcttacttgaatgttaaggaaaaggattatggaggtgagccctttattaacgggcaagctgctccctatgatcccaagtatcacgaagagtgggttagaaacaatgc

SEQ ID NO: 132914 - DNA, 243 bp, Glycine max
gccgaggcacgagcagcatcaatactagcaggtttgagtttcactcctgagatgcagaagaaggcaacaaaaacattttctggaggatggcggatgcgaatagctcttgctcgtgcattgtttatagagcctgatatattgcttcttgatgagcctacgaatcatcttgatcttcatgctgtcttatggcttgaatcgtacttggttaaatggccaaaaacatttatcgttgtttctcatgct

SEQ ID NO: 132915 - DNA, 245 bp, Glycine max
catatcataccctttctatcctacttgctacttcccacttccattcttttcttaaccagctaggatggtgagtgttgaagagattcgtaaggcgcaacgtgcagaaggccctgccactgtcatggctattggcaccgccactcctcccaactgcgtggatcagagtacctatcctgactattatttccgcatcaccaacagcgagcacatgaccgagctcaaagaaaaattcaagcgcatgtgtg

SEQ ID NO: 132916 - DNA, 244 bp, Glycine max
atggagttgtgcattatgcttttggaatgttgcagccaagagagaacctatctccgatattatggtcttttggggcagcgtttctgcatgattaacaaagtacaccaagaaaattttgaaaagtgctttgtgcaacagtactccatgattcaccgacttgaaacaaataaactgcgaaatgtggcaaagttttttgctcatttacttggcacagatgctctaccttggcatgttttatcatata

SEQ ID NO: 132917 - DNA, 249 bp, Glycine max
ttgttgtaagactttgtaattgaggtgctgcaatggcttcaagtcaggaagaggtgactcttttgggagtaattggaagcccatttgcttgcagggtgaagattgcccttaagttgaagggagttgaatacaaatatgtggaagaaaatttggccaacaagagtgatttgcttctcaaatccaacccagttcacaagaaagttccagtttttattcacaatgagaagcccatagcagagtctcttgtga

SEQ ID NO: 132918 - DNA, 239 bp, Glycine max
ctcaattctcaaccttaacctctcagaatgtcttacgcttatctcttcaaatacatcatcatcggtgacaccggagttgggaagtcttgtcttctacttcaattcacagacaagcgctttcagcccgtccatgacttgaccatcggtgttgaatttggtgccaggatgatcacaattgataacaagccaatcaagttgcaaatatgggatacggctggtcaagaatcattcagatctat

SEQ ID NO: 132919 - DNA, 238 bp, Glycine max
aagaaattcaaatgaagaaagccaaactaattggcatgcttgatgaggtggagcaaaggtacaggcagtaccaccagcagatggagatagtgggttcatcatttgagcaagctgcggggattggttcagcaaggacttacactgcccttgcattgcaaacaatctcgaagcagtttcggtgcttgaaagatgcaattgcagggcaggttcgcactgcgaataagagcttaggagaaga

SEQ ID NO: 132920 - DNA, 239 bp, Glycine max
ggaaaaaatggtgtcgctgaaactgcagaagcggctggccgcaagcgtgctcaagtgtggcagaggaaaggtgtggcttgaccccaatgaagtcaacgaaatctccatggccaattctcggcaaaacatcaggaagttggttaaggatgggtttatcatcaggaagccaaccaagattcactcacgctcgcgtgctcgtaggatgaaggaggcaaagaagaagggccggcactctggtt

SEQ ID NO: 132921 - DNA, 240 bp, Glycine max
tctcgagccgattcggctcgagaaacaaacctcacaaggcaaatgacttgagatgggaagctatccaagcagttcgaagtagagatggggtgttgggtttaggtcactttagattactgaagaggctgggttgtggggatattggcagtgtttacctctctgagttgagtggaactaaatgttactttgcaatgaaggtaatggacaaagggtctctagcaagtcgtaaaaagctacttc

SEQ ID NO: 132922 - DNA, 240 bp, Glycine max
gttatgaggacgtcttgaatcgtgtagtaacttatgcttctggccttccattggctttggaagtcataggttccaacttgtttggaaagactgtagcagaatgggaatctgctatggaacattataaaagaattcccagtgatgaaatcctagagattctaaaagtaagctttgatgctttgggggaagaacaaaagaatgtttttcttgacattgcttgttgcttcagagggtataaat

SEQ ID NO: 132923 - DNA, 244 bp, Glycine max
gccgaagaaggtattgacgtcgatgatgaaaatgaaattggtgaaaacattactgcttctcctttgtgtgaaactcttctgttatgcagtgattggtgctcctcaaacttgtcctgctaacaatgaggataaatgcggcgattcagatgaatggaaaggggagtttttccctgacattcccaaaattaaatatgagggtccgtcaagtaagaatgtgctttcatttaaatggtataatgcagag

SEQ ID NO: 132924 - DNA, 239 bp, Glycine max
tttctctctcgttttttctcaaaaagttgcaagagttaaagcaaaaaccaaagtgagagagaaaatgatgaagccatcgatgctcagatctcttcactctgccgccacccgcggcgcctcccacctctcccgccgtggctacgcctccgagccggtgccggagcgcaaggtggccgttctaggtgccgccggcgggatcgggcaacccctctcccttctcatgaagctcaaccccctcg

SEQ ID NO: 132925 - DNA, 239 bp, Glycine max
gatccgtcaactctgcgtcaacgccagacaaatcttcctctctcagccaattcttctcgacctccgtgctcccatccgcatctgcggtgatatacatggtcagtaccaggacttgctgaggctttttgaatatggtggctaccctcctgcggcaaactacttgtttctgggggattatgtggatagagggaagcaaagtttggagactatatgtttgcttttggcctacaaaataagat

SEQ ID NO: 132926 - DNA, 237 bp, Glycine max
gaattgttgttgagatctgaatcaaaatcagaaacgataatggctacaccggaccacctcttcaacctccgcaacaacttctacctcggcgcttaccaagccgccatcaacagcagcgacgttgccaacctctcccaagaagataccctcgagcgcgacaccctcgtccaccgctgctacatcgccctcggccagctccagttcgtcatctccgagatccacgacgatgctcccaca

SEQ ID NO: 132927 - DNA, 241 bp, Glycine max
tgtatctctgtctaccttaccttacctcacctcacaagggacaaagataaaaaatgaagatcattgagaaaattcacgcagcctcggctgatccaaacagggtggtgttctcatttgagttcttcccgcccaagactgaggatggggtggacaatctgtttgagaggatggaccgcatggtggtgcacaacccctcattttgcgacatcacttggggtgctggagggacaacggctgatct

SEQ ID NO: 132928 - DNA, 237 bp, Glycine max
ggtggcatgatcttcgccctcgtttactgcaccgctggcatctcagggggacacataaacccggcggtgacatttgggctgtttttggcgaggaagttgtcgttgcccagggcgattttctacatcgtgatgcaatgcttgggtgctatttgtggcgctggcgtggtgaagggtttcgaggggaaaacaaaatacggtgcgttgaatggtggtgccaactttgttgcccctggttac

SEQ ID NO: 132929 - DNA, 240 bp, Glycine max
atttgctccgtcaaaccggcggcaccgcgttcatcgacggcggtctggcgacggagctggagcgccatggcgccgacctcaatgatgctcttttgagcgcccagtgcctcttttccttccctcacatcattcgccaagtgcaccttgattacctggaaaatggtgcagacattatagtcacagcatcttaccaagccaccattcaagggtttaaagccaaaggctattctgatgaagaga

SEQ ID NO: 132930 - DNA, 267 bp, Glycine max
cttcgtctctcggtttcatctagttttccctctgttcttcttcacgccacagttgatctgtctcgaacctttgtgaccaaggttgagaaacgctcactggtgggctatgagtttgagatatggcagtgtggtcttggttgctttagtgcttctgccacacatggcttctgctgcttcaattgtgaagaacctaccgggttacaagggtgatcttccattcaaacttgaaactgggtacataggagtgggagaagaagaagaggtgca

SEQ ID NO: 132931 - DNA, 255 bp, Glycine max
ctttcgatttaaccctagcccaggaggaatgcttgcagaggatacagagacgtatagatgttccatatgatagttctataattgagcaccaggatgcccttagggctttgtggaatgctgcgtttcctgaagaagaacttcatggcttgatatctgagcaatggaaggaaatgggctggcaaggaaaagatccatcaacagattttaggggtggtggttttatatcattggagaattttctcttctttgctagga

SEQ ID NO: 132932 - DNA, 259 bp, Glycine max
cggctcgaggctatttccttacaaagaatggtgggtagtacctgccaaagttgccttcgatcaaactgcatggtctgcactttggaacagcatatattatactgttgttgcattactgcgtcttgatcctcctatgagtattttaaatgaattgaaggcaacgtttttccccatgttgacggccggatggaagctatggccatttgcccatctcattacttatggtgtgataccggttgaacaaagactcctctgggtg

SEQ ID NO: 132933 - DNA, 262 bp, Glycine max
atttctctctgccttgctcatttacacacctctccaacctttcactttcagctttatttgaatccctctctctcctttccaaatggccagcgttgaggttgcacatcaaacaccaacaacagttccagaaaatgaaacaaccgaggtaatcaagacccaggaaacaaccccggaaccagtaccagccactgaggctcctgcaacagaacaagcagcagctgaggttcctgctcaagaagaacaacaagcaactgaggttcct

SEQ ID NO: 132934 - DNA, 246 bp, Glycine max
ctcgagccgcttcactgggtcgaagaagaacccacgctcccaaatcttcctccaccctaaacgacgacgtttcctgcgaggaatgcggcggaggccactctccttcgaagcttcttctctgcgacaaatgcgaccgtggctaccacctcttctgcctccgtcccattcttccctctgtccccaaaggctcttggttctgcccctcttgctccaatcacaaacctaagtgtttccctcttgtgcaga

SEQ ID NO: 132935 - DNA, 252 bp, Glycine max
ctgcgactctctttccttccctctttttccgaatctgaatcgaaatggcttcggagactgagacgtttgcttttcaggccgagatcaaccagctcctcagtctaatcatcaacaccttctacagcaacaaggagccctttcttcgtgagctcatcagcaatgcctctgatgctttggacaagattcgatttgagagtcttacagacaagagcaagcttgatgctcagccagagttgttcattcacattattc

SEQ ID NO: 132936 - DNA, 259 bp, Glycine max
gtttagtgttatatctccgcagtggatcaaatcaaacaaacacttccatccatcaccctttctctctgcttagggttttgatcgcatcggatcttcactctcttctccgatctcaaaatgcccgccgtttatggagctcgcttgaccaccttcgaagactccgagaaggagagtgaatacggttacgttcgcaaggtatcaggaccagtcgtcgttgcagatggcatggctggggctgctatgtatgaactcgtgcgtg

SEQ ID NO: 132937 - DNA, 256 bp, Glycine max
agagaatggctcccaagggtttaatctttttggctgtgttatgcttctcagcactgtcactgagtcgttgtcctgcggaggataatggacttgttatgaacttctacaaggaatcatgccctcaggctgaagacatcatcaaagaacaagtcaagcttctctacaagcgccacaagaacactgctttctcctggctcagaaacatcttccatgactgtgctgttcagagttgtgatgcttcactgttgctggactc

SEQ ID NO: 132938 - DNA, 257 bp, Glycine max
  unsure (1)..(257): unsure at all n locations
gataaccattagggaaatgtggaggacaagctccaaacagcttacctgttgtgacagaggttcaagatgatgagaattcacaactgcaaacagaagaaaagaagagggaagaagtatttttgaaggacaggatacccacctggtttgcagcttctggatatgtgggcttggctgacgaagtcatcgcnncaataccaattatcttccctcctctcaaatggtacttggttctgtgctcttacatcctcgcccctgcc

SEQ ID NO: 132939 - DNA, 248 bp, Glycine max
ctcgcaagcaaaaagaaagaatcccaggcgaggagaaagatggaggggaaggagcaggatgtgtcgttgggagcgaacaagttccccgagagacagccaattgggacggcggcgcagagccaagacgacggcaaggactaccaggagccggcgccggcgccgctggttgacccgacggagtttacgtcatggtcgttttacagagcagggatagcagagtttgtggccacttttctgtttctctacat

SEQ ID NO: 132940 - DNA, 256 bp, Glycine max
cccgcgtcgagcgagtgccaaggttgagatccaaaccaaacattacataaagttaaccatccaatccaaactcagctcctcctagggttttttcaattccaaatcttccttccctctgcaatcagactcagtcgctcaggccaaatgccagaaccgaggttcgccgcaaccgttacaaggtcgccgttgacgccgacgagggccgccggagaagagatgccacaatggtcgagatccgcaagagcaagcgcgaaga

SEQ ID NO: 132941 - DNA, 254 bp, Glycine max
cttcatcttgttctatctgtgacgagcatcatggcctcaagagcagtgttattgttggctatgtgtgtgcttccggcgatggttgtggccattcgcccagcaaagaaccctttttgcgtgaagggtcgtgtctactgtgacccttgccgtgctggttttgagacctcagctaccacctacattgctggtgctgagattatgttgcaatgcaagagcagggttagcaacgaggttgtgtacacgaagaaggggta

SEQ ID NO: 132942 - DNA, 254 bp, Glycine max
aagaggcacgctgctgccaaggttttcagccatcctgatgttgttgctgaagtgccatggtacggtattgaacaagaatacaccttgttgcagaaagatatccaatggcctcttgggtggcctgttggtggttttcctggacctcagggtccatactactgtggtgttggcgctgacaaggcttttggccgtgacattgttgacgcacactacaaagcctgtatttatgctggcatcaacatcagtggaattaa

SEQ ID NO: 132943 - DNA, 255 bp, Glycine max
gctccaattatcaactctttcaaaagggagaagaaaaggaaaggaaacaaaacgcacaaaggattattatagcaatggcagaacaaaaccaaaaccagacaactgaagctggaaggcaccaagaggttggccacaagagccttctccagagtgatgctctttaccagtatattctggagaccagtgtctacccaagagaacctgaatccatgaaagaactgagagagttgacagcaaaacacccatggaacatca

SEQ ID NO: 132944 - DNA, 253 bp, Glycine max
aaaggaataccaagattaccaccacaaagcaatgggcggtatactttctgcgcttcttggcggcgacgcggcggcggcggcgtcttcgccggagagttctacttctagagtctcctccttccactcgtcgccgcgctggcagctctacttcaacgagatcaaagataccgataagctcgttgtgatagatttctcggcgtcgtggtgcggtccttgcaaattcatagagccagcgattcacgccatggccgac

SEQ ID NO: 132945 - DNA, 256 bp, Glycine max
gataaccattagggaaatgtggaggacaagctccaaacaccttcctgttgtgacagaggttcaagatgatgagaattctcaactgcaatcagaagaaaagaagagggaagaagtatttttgaaggacaggatacccacctggtttgcagcttctggatatgtgggcttggctgcgatatccatagcaacaataccaattatcttccctcctctcaaatggtacttggttctgtgctcttacatcctcgcccctgcc

SEQ ID NO: 132946 - DNA, 246 bp, Glycine max
agatgattcagcttctgttcacggtgatattttcggaggcttcgatgatagcgttgctgctgttcaagacccctttgaggaagctcgtgataatgggcttggatcggttgaagcgaggtcgtggacccttgatggtgaagaccgttgcagggaccgttctcgtggtgttgttgtcgagtgtgtatagcatgttgaagattcagaagcgtgggatccaagagggtgctgttgttaaccccaccgatc

SEQ ID NO: 132947 - DNA, 254 bp, Glycine max
gttaggtcatttagaaagaacatagttcaaaggaacaagaatgaagaggaagcagctttcgtgaaggtgagcatggatggtgcaccgtatctacgaaaggtggacataaagttgtacaagagctaccaggagctgtcagatgcgctggctaagatgttcagttccttcacgattgaaaaatgtgggtcccaagggatgaaggactttatgaatgagaccaaattgatagaccttttgaacggctctgattatgt

SEQ ID NO: 132948 - DNA, 250 bp, Glycine max
cagaaaccaatccggtgatatttgcataagaggcgaccagattatgaaaggttatctaaatgatggagaggctacagagagaaccatagacaaagatggttggttgcacacaggtgacatcggttacatcgacgatgacgatgagttattcatcgttgacaggctcaaggaattgatcaaatacaaaggatttcaagtggctccagctgaacttgaagcccttcttctcactcatcctaagatctctgat

SEQ ID NO: 132949 - DNA, 254 bp, Glycine max
aatggtttgccttcaaatctaacagctagtcgcaatccgagcttagattatggattcaaaggtgctgaaattgcaatggcatcctattgttcagaacttcaataccttgccaatcctgtcaccaatcatgtccaaagcgctgagcaacataaccaagatgtgaactctttaggcttagtttcttcaagaaagacagctgaagcaatagatatattaaagcttatgtcatccactttcttagttgctttgtgcca

SEQ ID NO: 132950 - DNA, 254 bp, Glycine max
agatagtgctctagtttggaattacgagtatgcagaccgggactttggttcatgccaagctaaagagctttttgatcatctggaaagtgttcttgccaatgagcctgtttctgttaagagtagtccaaacattgtggaagtaaaacctcagggtgtgagtaagggaatcgtagcagaacgtcttctcttaacaatgcaacaaaggggagtgattccagattttgttctatgcattggagatgacagatcagacg

SEQ ID NO: 132951 - DNA, 255 bp, Glycine max
tcttcctctctatcacactcacctatggctcccatctcaaaactcattcctttcctattcttaacaacccttttagtgtctctccaagttaatgccagagacagccaattcttcagcaaagtcacccctctcaacaacaacattaaagagactgaggttcccaaaaatgaaggccaagtaaacaagccagaacaacaaccagttttcaccccagaaacagaaaacagctatggtctatatggtcatgagactggt

SEQ ID NO: 132952 - DNA, 255 bp, Glycine max
gataaccattagggaaatgtggaggacaagctccaaacagcttcctgttgtgacagaggttcaagatgatgagaattctcaactgcaatcagaagaaaagaagagggaagaagtatttttgaaggacaggatacccacctggtttgcagcttctggatatgtgggcttggctgcgatatccatagcaacaataccaattatcttccctcctctcaaatggtacttggttctgtgctcttacatcctcgcccctgc

SEQ ID NO: 132953 - DNA, 255 bp, Glycine max
tccaaacaaccttctttctttttctgtgagcctttctttcaggttcttaacttgatcagtgtgcagtgtccaaatcataagggtagttgcaaattgcaatggctaagcatgatgttgagggtggttccttctctgcaaaggactaccatgatcctcctccagcaccgttgattgatgctgaggaactcacacagtggtccttctacagggctttgattgctgagttcattgccacaatgctcttcctttacatca

SEQ ID NO: 132954 - DNA, 252 bp, Glycine max
gggatttgcattggctagcattgcattgagcactagaattgaacctggtttagagcaagaaattgttcttccccgagattcatatcttcagggttatttcaataatgtttcagaatatcttagaattggacctcctgtgtattttgttgtgaaaaactataactacagctcagaatcaacgcatacaaatcagctttgctccattagccattgcaattcagactctcttttaaatgagattgtgagagcagc

SEQ ID NO: 132955 - DNA, 247 bp, Glycine max
gttgttcgtgatgttttagttgttgttgttgatgatggtggtgttgttcgtgatgatttagttgttgttgatgatgatgatgatggttttcgtgatgatgtagttgttgttgttgatgatgatgatggttggaatggtggtggtgatgaggggtgtgattgtattgagaatgtgaatgtgaatgagagtgagagtgataaggtgggtggagatgttgagggagttaagggtgagaggagcagtggta

SEQ ID NO: 132956 - DNA, 252 bp, Glycine max
ctggagctctccaagctgccaaaaataagcttgaaaaacaagttgaagaccttacattgaggttgcagctggaaaaacgcctgaggattgacattgaagaatcaaaaacacaagaaaatgaaaaactacaatctgctttgcaagcgatgcaacttcagtttaaagaaactaagttgttacttaaaaaggagcgtgaggctgcaaaaagagaagctgagagagcgcctttcatacaggaggttcctgttgttg

SEQ ID NO: 132957 - DNA, 251 bp, Glycine max
gaaaattccagactcaagtgcagtaaagccagatgactgggatgagaatgcacccttggaaattgttgatgaagaagctgagaaacctgaaggatggttagacaatgaacctgaggagatagatgatccagaggcaacaaaaccagaagattgggacgatgaggaggatggtgaatgggaagccccaaagattgagaacccaaaatgtgaagcagcccccggttgtggtgagtggaagaggccaatgaaga

SEQ ID NO: 132958 - DNA, 250 bp, Glycine max
ggttggagcatccatttgtggatgtgaaggaataggaggttgttttggggtgaaatgagggatgctatcaaggttgatggactttctgactgcctgctggcggcgaagatccttctccgacggcaagggtggttccgaggttacggggcggaaggaagggctgctgtggtacaaggatgcggggcagcacttgtttggtgaatactcaatggctgttgtccaggccaacaacctgctcgaggaccagagc

SEQ ID NO: 132959 - DNA, 249 bp, Glycine max
gcgtcttcgagtttcacagcgaagtcgtaggagggtttcaaaagatggagaacatgcagagcttctggcaattgggcgatgaactccgtggacactcaaaagcatcggaggatcacaaatggttaatggttgcttcgaaattggcggaacagacaagattgaagggggagcgtgtgaacaaccttgatctttcaaagggccccattgaaacaaggtcaagggataaatttgggttccaggaagagaaca

SEQ ID NO: 132960 - DNA, 250 bp, Glycine max
gcagaatttgctgagtctctattaatcattcctaaggtgctttctgttaatgctgctaaggatgccactgagctggtggcaaaattacgggcctaccaccattcagcgcaaactaaagccgataagaaacatttatcaagtatgggtttggacctttcgcaagggaaaatcagaaacaacttggaggccggagtcattgagcctgcaatgagcaaagtaaaaacttatcagtttgcaactgcaagctgct

SEQ ID NO: 132961 - DNA, 254 bp, Glycine max
ctctgttccagagacagccagactgggtcatctaccatgagcttcgtgatgacaactaaggaatatatgcgtgaggtcactgtcatagaccccaaatggcttgttgaattggctccaagatacttcaaagtggcagatcctacaaagatgagcaagcgaaagcgtcaagagcgaattgaacccctttatgacagataccacgagccaaattcatggcgtttgagtaaacgccgtgcataactaagttctatcaa

SEQ ID NO: 132962 - DNA, 273 bp, Glycine max
ctccggattcggctcgatataccattgctaggcgcttagggcagcaatcgctgaggccatcgacgtcgctcaagtccatctatccaatttccgatcaccattatggaatgtatcacgagcgttacgtttctaccctcgccaccaagggagttggtcacctcgttcgtaagggcactggtggacgatcctccgtcagtggcattattgctacagtatttggggcaactggattcttaggtcgttatgttgtccaacaacttgctaaaatgggat

SEQ ID NO: 132963 - DNA, 248 bp, Glycine max
ccatgtttcaaatttggattcattgctgctaacaatgcaattacagaagcagtgaaagatgacatgaagattcatataatagattttgacatcaatcaaggaagtcagtacataaatctaatccaaacacttgcttcaaggtcaagcaagccaccacatgttaggttgactggagttgatgatccagaatctgtgcagcgatctgttggaggcctacggaacataggacaaagactagaaaaactggc

SEQ ID NO: 132964 - DNA, 250 bp, Glycine max
  unsure (1)..(250): unsure at all n locations
actagctctgtgcattcttctctcgctctctgccttccatcacactcggcatacgcctntcccaagatagtagaagatggcagacactgaggatattcaacctcttgtttgtgacaatggaacaggaatggttaaagctggatttcctcggagctgatgccccacgtgctgtgtttcccagcattgtaggtcgttctcgtcacactggtgtgatggttggcatgggccaaaaagatgcatatgttggtga

SEQ ID NO: 132965 - DNA, 249 bp, Glycine max
cacaagaatgagggagatattgcacgtgcaaggtgggcaatgcgggaaccaaatcggttccaagttctgggaagtgatatgcgacgaacacggcatcgaccccaccggaaagtacaccggcgacgagggctccgatctccaactggagaggatcaacgtctactacaatgaggcctccggcggaaggtacgttccccgggccgtcctcatggatctggagcccggcaccatggacagcatcagatccgg

SEQ ID NO: 132966 - DNA, 247 bp, Glycine max
gagaaatatggcacagagttctatatccttcaccggtaccctttggctgtaaggccattctatacaatgccttgctacgacaatcctgcatacagcaactcgtttgatgtctttattcgaggtgaggagataatttcaggagctcagcgtgttcatgtgccagaatttttggaacaacgtgcagcagcttgtggcatcgatgtcaaaacaatatctacatacattgattctttcagatatggggcac

SEQ ID NO: 132967 - DNA, 247 bp, Glycine max
cataaacgccgcccaaaacttctcatacccttttattcattccattcgtttctagggttttcttttctttgccgagaaaatgagagagtgcatttcgatccacattggccaggccggtatccaggttggaaacgcctgctgggaactctattgccttgaacacggcattcagcccgatggacagatgccgagtgacaagaccgttggcggaggagacgacgccttcaacacatttttcagcgagacc

SEQ ID NO: 132968 - DNA, 253 bp, Glycine max
tacagatccaaacatggccgaagaacaccgatgccaagctcccgaaggtcacagactctgctccaacaactgcggcttcttcggtagccccgccacaatgaatctctgttccaaatgctacagagacatccgtttgaaggaagaagaacaagccaaaactaaatccacaatcgaaaccgctctttctggatcttcctccgccaccgtcgccgttgcctccgccgtggattctcttccggcgccggttgaatcc

SEQ ID NO: 132969 - DNA, 248 bp, Glycine max
agaatcattaaagataagattatattgctaagaagaaaaaatatgaaggttgtctacttgcttgttgccctcttggctttgacatcaactgttgtctctgcctatgaccctagtcctctgcaagatttttgtgtggcagccaaagaaaaagatggtgtatttgtgaacgggaaattctgcaaggaccccaagcttgtcaaagcagaagatttcttcagacatgtggaacctgggaaaactgacaaccc

SEQ ID NO: 132970 - DNA, 251 bp, Glycine max
ctctatctctcttcgttttgttcttccttgcgctcctcctcgttacgttcgttctccctcgcgtagatcggcaatggcggagaccgagacgtttgctttccaggctgagatcaaccagctccactttctcatcatcaacaccttctcctccaacaaggaaatcttccttcgtgaactcatcagcaacgcctctgatgctttggacaagattagatttgagagtttgacggacaagagcaagctcgatgctc

SEQ ID NO: 132971 - DNA, 253 bp, Glycine max
tctcgagccgaatcggctcgaggtgacaacagttttatagtggcactggatgctattggggtcacttccttgtacattggactggggattagatggctctgtttggatttcatcagaaatgaaaggcctgaatgatgattgtgaacactttgagtgttttccacctggtcacttgtactctagcaaagaaagagggtttcgcagatggtacaatcctccttggttctctgaggctactccatccaccccttat

SEQ ID NO: 132972 - DNA, 251 bp, Glycine max
cggggaggtagtgacaataaataacaataccgggctcattgagtctggtaattggaatgagtacaatctaaatcccttaacgaggatccattggagggcaagtctggtgccagcagccgcggtaattccagctccaatagcgtatatttaagttgttgcagttaaaaagctcgtagttggaccttgggttgggtcgatcggtccgactccggtgtgcaccggtcggctcgtcccttctgacggcgatgcgc

SEQ ID NO: 132973 - DNA, 251 bp, Glycine max
ctaaaaaagagagagagacaagacaaaaatgccttctcctgcacccaccatgctctccaaatgcaccgtcttcccagaccaaaagtccactctgggaaacctcaaactctccgtttcggacctccccatgttgtcctgccactacatccaaaagggatgcctcttcacccaccccaatctcccactaccactctttaatccctctccttaaatccgcactctctcgacatctatctctctttccccctctc

SEQ ID NO: 132974 - DNA, 250 bp, Glycine max
gaagaagagatgggtagaggagaagatcgagaaggggtcgcagtagccgggggcttcttctggtcctacacagacgaaccccatgccacacgacgtcgtcagatcctctccaaataccctcaaatcaaacaactctttggccccgaccactctgctttcttcaagattagtggagttgttctgcttcagcttggtacgggtgctttacttcatgatgctggctggctgaagatatttttagtagcatatt

SEQ ID NO: 132975 - DNA, 254 bp, Glycine max
caagcgcttctcctctttgtgttctggctatgcttcttggcaagagttagatcggacgaggattgcgtgtacacggtgtacgttcggacgggttcgatcatcaagggaggcaccgattcagtaattggtactgaagctatacgacaagtccggctacggcatatacatcaccaacctacgaggcatggggcgggttaatggatccgggtcacaactactacgagcggggcaacctcgacatattcagtggtaga

SEQ ID NO: 132976 - DNA, 252 bp, Glycine max
ggccaggcaagccccactcaaccaccacacctctcctcgttcacgctacccctttctgctcttcttctacctttcaagttttaaaagtataaagatggcagagacattcctatttacctcagagtcggtgaacgagggacaccctgacaagctctgcgaccaaatctccgatgctgtcctacgacgcttgcctcgagcaggacccagacagcaaagttgcctgcgaaacatgcaccagcaccaacttggtca

SEQ ID NO: 132977 - DNA, 255 bp, Glycine max
caggagatccagttgatgagatgctcttcatcatacggggtcgccttgagagtgttactacagatggtgggaggagtggattcttcaatcgtggttttttaaaagaggccgacttctgtggggaggagcttttgacctgggcactggatcccaaatactggctactaatactacccatactatctactcgaacagttaaagctttaacagaagttgaagcttttgccttaactgctgaagagttaaatttgttgc

SEQ ID NO: 132978 - DNA, 250 bp, Glycine max
taattgcaagaatggcacttcgttgcttggtgatgtccctttctgttctcttcactcttggtacttgcgagagaaagccatgccagagacgaagatttttggcatgctgtttggccaaacactcccattccaagttcattgcgagatcttctaaagcctggccctgcaagtgttgctatcgatgatcaccctatgcaaattgaagaaacacagtacccgaaaacttcttctataaagaagacttcatcca

SEQ ID NO: 132979 - DNA, 255 bp, Glycine max
gatttctctttctcactttttttgtgtgtccaaaatggctcctagttctgctcacaacaatgggttctatgtgcttatgctagttgggatagtggttagcactatggttgctacctgtgctggtagcttctaccaagactttgatctaacatggggtggtgaccgtgctaagatattcaatggtggccagcttctatcactttccctagacaaagtctctggctctggcttcaaatcaaagcaagaatacctatt

SEQ ID NO: 132980 - DNA, 245 bp, Glycine max
taattgcaagagtggcacttcgttgcttggtgatgtccctttctgttctcttcactcttggtcttgcgagagaaagccatgccagagacgaagatttttggcatgctgtttggccaaacactcccattccaagttcattgcgagatcttctaaagcctggccctgcaagtgttgcgatcgctgatcaccctatgcaaattgaagaaacacagtacccgaaaaccttcttctagaaagaagacctt

SEQ ID NO: 132981 - DNA, 246 bp, Glycine max
gcaagttctgcagtgccagatgaacaggttgttgttggagaggagattgagcatgtaagagtggtcactttgaacaggccaaggcaattgaatgccatctcaccagaactggtttctcagctagcaacatatttggaaaagtgggagaaggatgagaaagcagaactagttattataaagggagctggtcgggctttttgtgctggaggagatttgagagtcttctatgatggaagaaaaataaag

SEQ ID NO: 132982 - DNA, 246 bp, Glycine max
gtcaaacgcacacagttacgctcttcaaatcaatctcttctcagaaatgggtgtggctcaaaacattcccgatgcggaggagggaaccttggagattggaatggaatacagaactgtgtctggagttgctgggccattggtcattcttgataaagttaagggacctaagtttcaagagattgttaatattcgcttgggagatggaactactcggcgtggacaagtgctagaagttgatggtgaaaa

SEQ ID NO: 132983 - DNA, 240 bp, Glycine max
cgagatcggagaaacgcacgtggaaaccgaagcgcactgcgccgtgtgcaaagaagcgtttgagctgcacgcggaggcgcgtgagttaccgtgcaagcacatctaccactccgattgcatcctcccgtggctctcgatgcggaattcgtgcccggtgtgccgccacgagacttccttccgatttggaaactagggttcccagccagatcgacgaggagacgatagggttaacgatttgga

SEQ ID NO: 132984 - DNA, 246 bp, Glycine max
gctgagatgctatgctgtttttgccctgctccttttaggcagttccttgagattgtagtaaacatgaagtttgatgaagaacctaactattccaggctaatatctttgtttgatggtatgcttggaccgaatcctgcattgaggccaattaacactgaaggtgctcaaaaggttgggcagaagaggggtagattgaatattgaggacgaggatgattcacagcccaaaaagaaggttcgtttgggg

SEQ ID NO: 132985 - DNA, 242 bp, Glycine max
gtgatatcgtgcaattacaagtgcatactaccgaggagccgtgggtgctttgatcgtgtacgatgtaacccgacacgtgacattcgagaacgtggagagatggttgaaggagcttcgggatcacacagaagcatacgttgtggtcatgctggtgggaaacaaagcagaccttcgacatttgcgtgcagtgtccacagaagaagccacagaatatgcggagaaagagaacatctattcatgga

SEQ ID NO: 132986 - DNA, 251 bp, Glycine max
tgttgaacaagggtttctctgtctgcttcttcactttctcacgtttcaatcgaaaccaaaacaaaaacatgggcagaaaattcttcgtcggtggcaactggaaatgcaatgggaccactgaggaggtaaagaagattgttactactttgaatgaggctaaagtccctggagaagatgtcgtagaagttgttgtgagccctaccttttgtgttcctacctgttgtaaaaagtttgctgcgccctgatttcca

SEQ ID NO: 132987 - DNA, 252 bp, Glycine max
ttgcaatgcacaagagttcaggaacacaactgtgaacagtgatttacatttcatttcttgggacaatcctcccaagcagcatcctcactaccttacagttgatgacatgaaagggatggttggcagcaatgctccgtttgcaaggaaattccacagagaagatccaggtttggataaaattgatgctgaactattatccagaggtcctggaatgactgttcccggaggttggtgcatagggaaaagggagaa

SEQ ID NO: 132988 - DNA, 248 bp, Glycine max
ccaagttctgcagtgccagatgaacaggttgttgttggagaggagattgagcatgtaagagtggtcactttgaacaggccaaggcaattgaatgccatctcaccagaactggtttctcagctagcaacatatttggaaaagtgggagaaggatgagaaagcagaactagttattataaagggagctggtcgggctttttgtgctggaggagatttgagagtcttctatgatggaagacaaataaagga

SEQ ID NO: 132989 - DNA, 230 bp, Glycine max
tctttgcgcagttccctacctctcctttcaagatgcagatcttcgtcaagaccctcaccggaaagaccatcacccttgaggtggaaagctctgacaccatcgacaacgtcaaggccaagatccaggacaaggaaggaattcccccggatcagcaacgtctcatcttcggcggaaagcagctcgaggacggccgtaccctacgacgactacaacatccagaaggagtcaac

SEQ ID NO: 132990 - DNA, 246 bp, Glycine max
ttacatgcttgtcattcttgatattctagtgcagcatccaaacatagtggttgatgattcggtggaaccagatgagaatgagactacagaaaggggttgactataatgggccgattcgggtttggggtaacttggttgctttcttagaaagaattgatgttgaatttttcaagagcttgcagtgcatagatcctcatacccgggactatgttgagagactcagggatgagcccttgtttctggttc

SEQ ID NO: 132991 - DNA, 243 bp, Glycine max
ttcagccacagttggaaaaaaaaaaaaagttgttcgagatggcacgtacgaagcaaactgctcgtaagtccacaggaggaaaggcacctaggaagcagctcgcaaccaaggctgcacgtaagtctgcaccaactactggtggtgtgaagaagccacatcgttatcgtcctggtaccgttgctcttcgtgagattaggaaataccagaagagtaccgagcttttgatcaggaagctccccttcc

SEQ ID NO: 132992 - DNA, 232 bp, Glycine max
ggctcgagcgactcgagcacacacaaacccgtccctcacactctccagtccctagcggcactacacaagagttctaacgctatctccccaagatgtcgagcgccgatcccgagcacagagaagaggaggaggcacccgccgttggcgacgacgaggacaccggagctcacgtcgctccaatcgtcaagctcgaggcggttgctgtcaccaccggcgaggaggacgaagatgc

SEQ ID NO: 132993 - DNA, 245 bp, Glycine max
acaacctctaacctacctctttttcttctctctcaacaacttcaccttcttcctcctcgatcatgtctcacttcaagggcaagtaccatgatgagcttatcgccaatgctgcgtacattggcactcctggaaagggtattcttgctgctgatgagtcaacagggacaattggcaagcgtttggccagcatcagtgtagagaacattgaatccaacaggcgagctcttagggagctgcttttcact

SEQ ID NO: 132994 - DNA, 244 bp, Glycine max
gtttatgtttagctgcgatttagtgtcttgctcgagcaaaaaatgagaggtctgaataaatcggtttctgaaaccagtggtgttacttgttggaggagcattagctcttttttggacttttgatgttttctcttgtggagggggatcgagtttttggatttttatatactcgctgatgtacttggcttgaatacttgctaatgtacttgttcattgattgttatagtagatatttgtccgtcct

SEQ ID NO: 132995 - DNA, 242 bp, Glycine max
ttcaactctctctctccccccctctttctctcacacacaaatgtctagaataacaataacctctccaaaacactgtgctgacaaagaaggactaaaaatcaagaactacaagaagatctacttcactttctcagcatttttcatcacaatcctactactaatacttgtgatatggctcatcctccaccctgcaaagcctcgattctccctcaaagaagtcgacatcttccaacttaaccttt

SEQ ID NO: 132996 - DNA, 243 bp, Glycine max
caacaaatgacttcgatgaggctctacttataggcactggtggatttggaagtgtttacaagggtagctttgatggtggggcaacttctgtggccataaaacgtgccaatccaatgtcacaccaaggtgtttcagaattcgagacagagatcctttggctctcacagcttaggcatgccaacctagtctcacttttgggttactgcaatgaagatggggagatgatattggtctatgacttca

SEQ ID NO: 132997 - DNA, 241 bp, Glycine max
gtgaagatagctcttggtactttggatgcctcttttagcgctgcctctcttaaggcttatttcgcagagttccacgcaactctgaatagaaagttcgctggtgttggatcagccatcgcttacaacgagcttacaaaagatgcagccttggatccaacggggctggtggcagtagctgtggcacatgcatttgcactgtttgtcggtgtctccgtcgccgacaacatctcaggtggccatt

SEQ ID NO: 132998 - DNA, 242 bp, Glycine max
gtgggatgacaccctcgccggtcctcgcccggaggacggcctcggcaagctccgaaagcaccactccttcgctagccgatctgcctccgccaaggaatcagacagcggaagcgtgaaatcgtacggtgaggattcgcccaagaatgcggtgagagtgacgcgaagtataatgatcgtgaaaccacctggtaaccagagtcccagtggatccgatccggcttcccccgacggttctactcctc

SEQ ID NO: 132999 - DNA, 204 bp, Glycine max
ctcgagctctgcgagatcttcattcgccgattttaaaagatgagtaagctacagagtgatgctttgcgtgaagccatttcaggaatcatggccgattccaaggagaagaatcgcaaatttgtggagaccatcgaactccaaatcggattgaaaaactacgatccacagaaggacaagcgtttcagtggctctgtcaagctgccc

SEQ ID NO: 133000 - DNA, 238 bp, Glycine max
ccatgtttcacatttggctacattactgctaacaatgcaattccagcagcagtgacagctgacatgaagattcatataatagattttgccatcaatcaaagcagtcagtacataaatctaatacaaacacttgcttcaaggtcaagcaagccaccacatgttacgttgactggagttgatgctccagaatctgtgcagcgatctgttggaagcctacggaacataggacccagactag

SEQ ID NO: 133001 - DNA, 222 bp, Glycine max
gtggtgatcgggatggtaatccaagagtaactcctgaagtgacaagggatgtttgcttattggctagaatgatggctgctaatttgtattattcccagatagaagatcttatgtttgagctctctatgtggcgctgcaatgatgaactacgcgttcgtgcagaagaacttcacaggtcttccaagaaagatgaagttgcaaagcactatatagcattctgga

SEQ ID NO: 133002 - DNA, 243 bp, Glycine max
caaaactcagtttccaattcaccaaactcacaatggttgatctagattggcaaacaaagatggttcactccaacatcatgcctccaatgtcccccaaactctctctcccggatcataacattccaatcccaactttgcaactcccccttcgccaaaacgacatcaccgcagcgtcgtctcctatctgcgctgcatacgacaactaccttcgtctccctgagctcagagccctctgggcctcca

SEQ ID NO: 133003 - DNA, 242 bp, Glycine max
gtatggcacaatctagtggcaaaaaattggttgagtggctggttgcagcattattgttcattgccttgttgagtggtagtgcacatgctgttgcaatatgtaacattggctcaagtcaactgaacttgtgtcgtgctgcagttactggtcaaaaccctaccaccacctgatgagaaatgctgtgcagttattcgccaggccaatttgcgttgactctgcagttacaagtctatcctaccttc

SEQ ID NO: 133004 - DNA, 212 bp, Glycine max
  unsure (1)..(212): unsure at all n locations
gttcatttgggtgttctccttttttagctgatccaattgggcactgagaccttccaggtgctgctgtttcnncatcctcgatctaagngccgantccctattgganagcattctcttcctcttcctcngttccatgatgtctctgtctccctcagaaccagagttttgaagagaacttgaaaccagatgaataggtcccnctnnccacnang

SEQ ID NO: 133005 - DNA, 249 bp, Glycine max
ggcagaaatccaaggacgtggcgcagaggattctcaattcggtggactacgagatggggaggtgcacctacaccttaggtttaggagaggcgaatatcgcgggaaagaagatatttctcttcgacgcggtttgcaggccgagggagattcactcgttggagacgacgccgtttgatgattacgtggggaaccacgagaacaagacgctgcacgccacgcagcagatcgccgagtgttggacgcgctcgg

SEQ ID NO: 133006 - DNA, 248 bp, Glycine max
gttggagtgagcgaagaatatgtattctagagattcatggggtggaccgttggagataaacgcgacggactcggcgacggaggacgagcggagccggaacctgcaggacgttgacagggcagcgctgtcgcgtcccttggatgagacgcagcagagctggctccttggccccggcgagcagaagaagaagaagtacgtcgatctcggctgcatcatcgccagccgcaagatcttcaagtggaccctcg

SEQ ID NO: 133007 - DNA, 243 bp, Glycine max
gtttctgtgcttttactctgctaccttgtgacaatggtgagggttagtgtgttgaatgatgctcttaagagcatgtacaatgctgagaaacgggggaagcgccaggtcatgattaggccatcctcaaaagtgattataaaattccttttggtgatgcaaaagcatgggtacattggagagtttgagtacgttgatgatcacagagctggaaaaattgttgttgaattgaatggtagactgaac

SEQ ID NO: 133008 - DNA, 245 bp, Glycine max
ggatgtgtcgttgggagcgaacaagttccccgagagacagccaattgggacggcggcgcagagccaagacgacggcaaggactaccaggagccggcgccggcgccgctggttgacccgacggagtttacgtcatggtcgttttacagagcagggatagcagagtttgtggccacttttctgtgtctctacatcactgtcttaaccgttatgggagtcgccggggctaagtctaagtgtagtaccg

SEQ ID NO: 133009 - DNA, 246 bp, Glycine max
cttcattcctcatttttccctcaaacaatcaatcaattttcatacagattcgtaaatttctcgattagatcacggggtattggtgtgattgtttgtaccatccggtggtggagcttgttggaaattggagatgagtcagaggggtttaatatatagctttgttgccaaaggaactgttgtgctagcagagcacacgcaatataccgggaatttcagtaccattgccgttcagtgcctgcagaagct

SEQ ID NO: 133010 - DNA, 253 bp, Glycine max
tgcggaataacgaagcctcctcgttcttcttcttccgccctttctctctctagaaccgtacggtcgtttctttctctctcctcaaccggagacagcgtcgccttcttttctgaatctcgcggtgttgttagttctgcggcggttgtagttccggcggcgatgggacagcaatcgttgatctacagcttcgtcgctcgcggcaccgtgatcctagcggagtacaccgagttcaccggaaacttcaccagcgtgg

SEQ ID NO: 133011 - DNA, 250 bp, Glycine max
gtaagatagtaatatgcgacagaggaagtagcccgagggtagcaaaggggttagtggtgaagaaagcagggggagtgggaatgattctggccaacggaatatccaacggcgaaggactcgtgggagacgctcatcttctcccagcttgtgctgttggtgccaacgaaggagacgtaatcaagtcacacatttcctcttcaacaaaccccacagccactcttgatttcaaaggtactatcttaggaatcaa

SEQ ID NO: 133012 - DNA, 247 bp, Glycine max
gaaaaagttcgtggaactttgcaccttgttaggtcatattcctttcaaaattacgcacatcggcttgacatcgattcctttgcacttccaaaagaattggttgtgcagtccttgttttcagacaccatctttaactttctgtcgacgtttgagctctataatggctggtgattcttctgtaatgtccaatggatacagcaagggcagtgtcaatccactaactaacctgcgaaggacttaccaagtg

SEQ ID NO: 133013 - DNA, 244 bp, Glycine max
ggtcaatcgagcaaggatgcacaacaagaaggctgggttggactctctctgcgaggtcgtgtgtgggaatttccttaagatgccgtttgtcgacaacagcttcgacggagcgtactccatcgaggccacgtgtcacgctcccaagctggaagaagtgtacgccgaaatcttccgagttctgaaaccgggggcgctctacgtttcctacgagtgggtgacgacggataagtacagcggcgatgac

SEQ ID NO: 133014 - DNA, 248 bp, Glycine max
gtcgtttgtaacgcctttgtttgcgttttttgcacagaagaattaacacatatatagcaagcatggcagtcacactctacgaccttagctctgcctctgggttgaagaagcttgatgagtaccttctcccacgcagctacatcaccgggtaccaagctacaaaggatgatcttactgtttatgcagctttgccaactgctccatcagatgaatatggaaatgtttccaggtggtacaagcacattgat

SEQ ID NO: 133015 - DNA, 248 bp, Glycine max
tctcttgcggctagggttttagcgcagcttcttctagatttaaggaagatgggtaaggaaaaggttcacatcagtattgtggttattggccatgttgactctgggaagtccactaccactggccacctgatctacaagcttggaggcattgacaagcgtgttattgagagatttgagaaggaagctgctgagatgaacaagaggtctttcaagtatgcctgggtgcttgataagcttaaggctgagcg

SEQ ID NO: 133016 - DNA, 244 bp, Glycine max
tgagtttccacattgcataccttaggtcttccgaattcgaagttaatttgcaagatgggttatgaaaaggctcagatcaacattgtggtggttggtcatgtggaccctgaggaggcaaccaccattaacgagctgaagaagcctgttgtggagaagaaagctccagggcatgcgatatgagggcatgcacgcacggcctcggaggggaatcagaaaattatgttaacaaaataatctggaaccc

SEQ ID NO: 133017 - DNA, 246 bp, Glycine max
gttgtgactcgttcttcttcgtcgttatcttcttcttttgttgtttgtgtgtttgttttttctctcacctgaaaatgtcttgctgcggtggtaactgtggttgcggaagcgcctgcaagtgcggcaacggctgcggaggctgcaagatgtacccagacttgagctacaccgagtcaaccaccaccgagaccttggtcatgggagtggcaccagttaaggctcaattcgagagtgctgaaatgggtg

SEQ ID NO: 133018 - DNA, 245 bp, Glycine max
tccaaacaaccttctttctttttctgtgagcctctctttcaggttcttaacttgatcagtgtgcagtgtccaaatcataagggtagttgcaaattgcaatggctaagcatgatgttgagggtggttccttctctgcaaaggactaccatgatcctcctccagcaccgttgattgatgctgaggaactcacacagtggtccttctacagggctttgattgctgagttcattgccacaatgctcttc

SEQ ID NO: 133019 - DNA, 243 bp, Glycine max
gggtgagtcagagagacattttggtccttgaacataatttggaccaaaaccaaaagatgatggaatccggggctcacttctgtaactcttgtggtgaacaaattggacttgatgctaatggggaggtgtttgtggcttgtcatgagtgttattttccaatttgcaaggcttgttttgaatatgaaatcaatgaggggcgtaaagtctgcttgagatgtgccactccctatgctgatagagcaa

SEQ ID NO: 133020 - DNA, 246 bp, Glycine max
ctttttataattattagttcatttgttcaaaaaagttgagtttggcaagcaagaaagggcctctcatttgtattaacctttgaatcagagagagacagaaatgcagccattatggttgccaggaaatatgctcttgattgcaatgtcgtgctcgctgggccagatgatctagtgtaggagcaaaatttaactgactgagtttttccatcaaacaagcccattatcagattcttggtgtgagtatac

SEQ ID NO: 133021 - DNA, 251 bp, Glycine max
tgaaagccgtgacttaggagatggccacagagctataaggatggtcaacaatgttcatcttaatgttgagtgttttcacggtgacaagaattctggaggtgttcgtgatggcactacaatagtcctctgggactggaacaaaggtgataaccagcagtggaagatcttaccttactgatttcaattgacgaaattatcaatggctttgaagatgcatcaagttaagaggatagttggcccttgtatttgag

SEQ ID NO: 133022 - DNA, 254 bp, Glycine max
cggctcgagaaaccctcttttttctctctcttgcaaaacctaattttcatttcttccctcaaatttcaaaatgcgtgagatccttcacatccagggtggccaatgcggcaaccagatcggcgccaagttctgggaggtggtttgcgcggagacgggatcgaccctaccggaaggtacggtggggactcggagttgcagctcgagaggatcaatgtctactacaacgaggccagttgcggtcggttcgtgccgcg

SEQ ID NO: 133023 - DNA, 254 bp, Glycine max
gtggtttcagtgagtgatcggtgttcacttgatccttcataagtcgtcatcatcatcatcatcatcaccgttgattgaagaagatgccgatcagaaacatcgccatcggaaggcctgaagaggctactcaccccgacacgttgaaggcggggttggctgagttcatctccaccttgatcttcgtgttcgccggttcaggttccggcatcgcctacaacaagctcaccgacaacggcgccgccactcccgccggc

SEQ ID NO: 133024 - DNA, 249 bp, Glycine max
cgaagaagtggttgcggcggcgcggaggagccgcgccggagccgggttgaagcacaaactggagagaaaatggacgttttggtgcgacaaccaatccaaacccaagcaaggcgctgcttggggaacctctcttcgcaaggtctacaccttcgacaccgttgaagagttctggtgtttgtatgatcaggtattcaagcccagcaagttgcaaatcaatgccgattttcacttgttcaagactgggattga

SEQ ID NO: 133025 - DNA, 251 bp, Glycine max
caacgctttgtctaccgctccggcagcgggtagtaggaagaacgcgacgctaatttgcgtcccaataatgggagaatcagttgaaaagatggagattgacgtggacaaagcgaaagccggaggcgcggaccttgttgaaattcgattggattctttgaaaacctttgacccctatcgagatctcaacgctttcattcaacaccgttctttacccttgttgttcacttacaggcccaaatgggagggtggta

SEQ ID NO: 133026 - DNA, 244 bp, Glycine max
cgccttcgcccacaacaactcctccttcaggatcgctgccaacgttactttccatttttacccttcatcctcgagaaaaaaatggcgaacgcagcatctggtatggccgtccatgatgagtgcaagctaaagtttctggagctcaaggcaaagaggacgtaccggtatatcgtttttaagattgaggagaaatcgaagcaagttattgtggagaagctgggtgaccctgcaaatggctatgatg

SEQ ID NO: 133027 - DNA, 245 bp, Glycine max
cactaaccaacttctttctttgttccgttctactttcccttcccaacaacaacaagaatatgccttctgcagaagcttcctccgaaaccatttgtgtcaccggcgctggtggcttcatcgcctcttggatggtcaaactcctcttggaaaaaggctacactgtccgaggaaccctcagaaatccagatgatcccaagaacgggcacttgaaggagtttgaaggagcctccgagaggttaactctg

SEQ ID NO: 133028 - DNA, 246 bp, Glycine max
caaaatcaagaatcaggcgaagaacagaatgaagaggaagaacaagaggatgacaaggatgaagagaatgaacaacagcaagaacaattacctgaagagtttatctttgatgctgaaggtggcttggtagatgaaaaactcctcttctttgcccaacaagcacagagacgccgtgggagggctggaagggcaaaaaatgttatattttccgaggatagaggccgatacatcaagcccatgcttcca

SEQ ID NO: 133029 - DNA, 246 bp, Glycine max
ttgaaacgcacagcttcaatcaccgaccacaccacccaccaacgacatgcttcctctttcccttctcaagactgcccaaggccaccctatgttggtggaactgaaaaatggggagacatataacgggcatttggttaattgcgacacatggatgaacatccatctgcgagaagtcatttgtacatctaaagacggagatagattttggaggatgcctgaatgctacatacgaggcaatacaatcaa

SEQ ID NO: 133030 - DNA, 250 bp, Glycine max
tccatccatctccgccaccgtcgccacctctctctctctctcacagttcgtatttatacatcttctctggtcttagcaatgagcttctcaacatgcgccgagatatcgcgttgtttcgccgcagcaacggcagcagcttcagcgaaacctaattccgggaagtcaaacggcaccgccacaacaagcctcagttttctcactccaatcggtcgttacggcgccgtttcatcagtgtcgaggtcgaataaga

SEQ ID NO: 133031 - DNA, 252 bp, Glycine max
cgccttcgcccacaacaactcctccttcaggatcgctgccaacgttactttccatttttacccttcatcctcgagaaaaaaatggcgaacgcagcatctggtatggccgtccatgatgagtgcaagctaaagtttctggagctcaaggcaaagaggacgtaccggtatatcgtttttaagattgaggagaaatcgaagcaagctattgtggagaagctgggtgaccctgcaaatggctatgatgaattcgct

SEQ ID NO: 133032 - DNA, 237 bp, Glycine max
gcgttcattctgttttcctgttgaagtctttccctagccaatggccatcgatcgtttgacccgggttcacagtctccgtgagaggcttgatgaaaccctcactgccaacaggaatgaaattttggcccttctgtcaaggatcgaagccaagggcaagggcatcctgcaacaccaccaggtcattgctgagtttgaggaaatccctgaggagaacagacagaagctcactgatggtgc

SEQ ID NO: 133033 - DNA, 242 bp, Glycine max
tctggatccttgaatgatgcaataaccaaatggacaaacctcaggtatttgtctcttgctcagaacaagttcagtggaaatctgcctagttggttgttcacatttaacgcaatagaaatgatggatttctcgcataacaagtttactggcttcatacctgatattaattttaagggtagcttaatatttaacaccaggaatgtcactgttaaagagccattggttgcagcaagaaaggttca

SEQ ID NO: 133034 - DNA, 246 bp, Glycine max
cggctcgagctcgagccgtgcagcgccatgttcttgttgatggcaaagtcaggactgacaagacttaccatgctggtttcatggatgttgtttcaatcccaaaaacaaatgagaacttccgcctgctctatgacactaaaggccgattccgtcttcattccatcagggatgatgaggcaaagttcaagctctgcaaggttaggtcagtacagtttggccagaaaggtatcccatacctgaacacct

SEQ ID NO: 133035 - DNA, 243 bp, Glycine max
gcagtggccgctggttgatcattggtgccagttcttgcaggctcggcataacaaagcaatatctagggacacatggtctcagcttttggagtttgcaaagactgttggctcaaatttatctgattatgatgccgaaggtgcttggccatatcttattgatgaatttgtggagtatctcaacgagaatggcataatccaaaatgatctgatcaatgattctagtctaaaacgatgatgcattca

SEQ ID NO: 133036 - DNA, 244 bp, Glycine max
tgggcatcaaaagaaggtgctttggccgaagaaaacatgagagccatttgctttgaagtatgtgatgttgttctgcacgctgatgctatccacagaggaggtggtcaaatcatccctactgccaggagagtcttctatgcttcccagattactgccaaacccaggcttcttgagcctgtctacctggttgaaatccaggctcctgagcaagctcttggtggaatctacagtgttcttaaccaga

SEQ ID NO: 133037 - DNA, 259 bp, Glycine max
tcggctcgagcaaaatggagagacacctccagtggacagcatgttgactatgatcaacgccctgatatgtttagaggaactgttcgatatgctagtgttcatgctcatttggggagaactgctagtagaagagatgatcttgaatctcttgcatacacactagtattccttcataagggccgattaccatggcaaggttatcagggtgatagcaaatccttccttgtttgcaaaaagaagatgggaacatctcccgaga

SEQ ID NO: 133038 - DNA, 254 bp, Glycine max
taatccctctttcttcctcttcctcagtagtgcgattttcgattctcttctctgcaactatgcctaaccctaaggtcttcttcgacatgaccatcggcggtcaacctgccggccgcatcgtgatggagctctacgccgacgtgactccgagcaccgccgagaacttccgcgcgctctgcaccggcgagaagggcgccgggcggagcggcaagcccctccactacaaaggctcgtccttccaccgcgtgatcccg

SEQ ID NO: 133039 - DNA, 249 bp, Glycine max
aagaaaccctagcaagtggagcaatggcagacgttgaagtcgatgtggcggcagcagcagcagcagggctgccgaagaagagaacgttcaagaagttcagttttcgaggcgtggatctcgatgcacttctcgacatgtccaccgatgaactcgtcaagatgttcagtgcccgcgctcgtagaaggttccagagaggcctcactagaaagcccatggccttgatcaagaagctccgtaaagcgaaaaggg

SEQ ID NO: 133040 - DNA, 247 bp, Glycine max
cgaggcgaagagaagagaaaaattaagatggaggggaaggagcaggatgtgtcactgggagcgaacaagttcccggagagacagccgattgggacggcggcgcagagccaagacgacggcaaggactaccaggagccggcgccggcgccactggttgacccgacggagtttacgtcatggtccttttacagagcagggatagcagagtttgtggccacttttctgtttctatacatcactgtcttaa

SEQ ID NO: 133041 - DNA, 244 bp, Glycine max
ctcgagccgctcgagccgcattaggcaatcaacaacacactttgtaattggcatcaaatgggcactgaaggcgatgctcctgtcattcctcttctcactccctacaaaatgggtaacttcaatctgtcccatagagttgttttggccccgttgaccagaatgagatcttacaataacgttcctcagcctcatgctgtattgtattactctcagagaacttctccaggaggtcttttgataagtg

SEQ ID NO: 133042 - DNA, 245 bp, Glycine max
gctgacatccctgtttgtcagatatctattcaatctcagcaagatggaacttatcattataacttaggaaaggcattggcccctcttaaagatgaaggtgtattgatcatgggttctgggagtgctgttcacaacttgagagcacttgagcctcactccactgttgctccctgggctctagagtttgataattggttgaaagatgctcttcttgaaggaagatatgaagatgtaaatcattatga

SEQ ID NO: 133043 - DNA, 257 bp, Glycine max
ctcttcttcgccggaatccctctccctctctctgtcgcatctcacaccttcgaactcttctacgtcgtcgtcttgttcttcgccttctgctgctgctgcttcttcttctccttctctctccgtttcgacttcgccttcccaagcctcccaccgcgttctccgcgtcttctgctgcttctgcttcgtctacctctccgaactgcaccgttttgaagatgaagcgacccgctatgttggacatacccgtgtcctccctc

SEQ ID NO: 133044 - DNA, 243 bp, Glycine max
attttggagcccatttgctttatttttgggttatactgatcctgcaaagcctgatctccctcgaatgcatgagtggcatttcagatctgggcttgatcgctacatctggataattggaatgatttatgcctattttcatccaaatgttgagaaatggatggaaaaattggaagagagtgataccaagaggagagttaccatcaaaactggcatcgtttctgttgcattatttgttgggtactt

SEQ ID NO: 133045 - DNA, 243 bp, Glycine max
ccctctctctctttctctttctctctcatccagatcttgcaaaaaaaaaaaaaacacaatggcagcgagcgctcccactccacgcgaagagttcgtgtacatggcgaactggcggaacaggccgagcgctacgaggaaatggtggagttcatggaaaaggtctccgcttccgccgagagcgaggagctgaccgtggaggagcgcaacctcctctccgtcgcctacaagaacgtaatcggcgct

SEQ ID NO: 133046 - DNA, 239 bp, Glycine max
gttcactcttcttctcttgcggctagggctttagcgcacttcttctagatttaaggaagatgggtaaggaaaaggttcacatcagtattgtggttattggccatgttgactctgggaagtccactaccactggccacctgatctacaagcttggaggcattgacaagcgtgttattgagagatttgagaaggaagctgctgagatgaacaagaggtctttcaagtatgcctgggtgctt

SEQ ID NO: 133047 - DNA, 243 bp, Glycine max
tcctgtacatgattgggatgagaaatggatagacgtgtacttggacattagtgtgaagttgctagatatatgcattgcatttagctctgaattatcacgcctgaaccagggtcatcttttacttcagtgtgcattgcacaatttaggttcttcctcttcagagcagtatgttcgggcatgttcttcacttgatggttggaaacagcatattggttctggaaaccctaggattgagaaatgtgg

SEQ ID NO: 133048 - DNA, 245 bp, Glycine max
cttattattctccaaaacttccttcttactcttcttctttctgtttcgcaccctccaaacgacgttgtttctcgtcgttcagccatgtcgtacgactacctcttcaagtacatcatcatcggtgacacaggtgtagggaaatcgtgcctgctcctgcagttcaccgataagaggttccaaccggttcatgatctcaccattggtgtcgagtttggtgctcgcatggtcaccatcgattctcgacc

SEQ ID NO: 133049 - DNA, 277 bp, Glycine max
ctttgcgcagttccctacctctcctttcaagatgcagatcttcgtcaagaccctcaccggaaagaccatcacccttgaggtggaaagctctgacaccatcgacaacgtcaaggccaagatccaggacaaggaaggaattcccccggatcagcaacgtctcatcttcgccggaaagcagctcgaggacggccgtaccctcgccgactacaacatccagaaggagtcaacccttcaccttgtccttcgtctccgtggtggcatgcagatcttcgtcaag

SEQ ID NO: 133050 - DNA, 198 bp, Glycine max
gaaagtggcaccgggtgtgccagctccaagctggaagatctccccgcagtggccctgtgccgggagcggtgtggtttcctggacgaagcaattcacccgcgctatgcactcgccgccgctcacatcgcttacataaattctctccagtcaattggtcactccttacaccttttcattcagcaagacatggattctcct

SEQ ID NO: 133051 - DNA, 270 bp, Glycine max
tttaaatacacacacacacacactcactttcttgcttgttctaactaccatgacaacccacattgataacctgtgggtgttggccttggtctcaaaatgcacacaagagaacattccatggtcactcttgaccatcatggtcactctctggctctccatgaccttcttctgctggtctcatcccggtggtcctgcttggggcaagtactactcctttcattactggaaaaaaacaaccacaaccacaacctcaacctcaaacaacacaaa

SEQ ID NO: 133052 - DNA, 263 bp, Glycine max
gttgaacaagggtttctctgtctgcttcttcactttctctcgtttcaatcgaaaccaaaacaaaaacatgggcagaaaattcttcgtcggtggcaactggaaatgcaatgggaccactgaggaggtaaagaagattgttactactttgaatgaggctaaagtccctggagaagatgtcgtagaagttgttgtgagccctccttttgtgttccttcctgttgtaaaaagtttgctgcgccctgatttccatgtttcggcacaaa

SEQ ID NO: 133053 - DNA, 262 bp, Glycine max
ctgcaattccttcttctcccagaatcggtcactaaatccgcaatcatgaagctcgataccaccggtctcgaatcgtttcccacactgcttgcgcctcaaaacgacgtcgttggagaactctccgccgctccatccttcgaccttccgaattccaacgatttcgatgggtttgtgaaagaagctattcagatggtgaagcccgcgaagggtactacgactcttgcttttatatttaaggagggtgttatggtagctgctgatt

SEQ ID NO: 133054 - DNA, 267 bp, Glycine max
ggatttgtaaccttcgcctcggagcagtccatgaaagacgccatcgaagggatgaacggccaaaaccttgacggccgtaacatcactgttaacgaagctcagtcccgtggtggcggtggcggcggtggaggtggtggatatggtggtggtcgcggtggtggatatggtggtggtggtcgcggtggtggagggggatacaaccgtagcggtggcggtggaggctatggcggcggcggtggatatggcggtggcggtggcggtggctat

SEQ ID NO: 133055 - DNA, 265 bp, Glycine max
gccaaggttttcagccatcctgatgttgttgctgaagtgccatggtacggtattgaacaagaatacaccttgttgcagaaagatatccaatggcctcttgggtggcctgttggtggtttccctggacctcagggtccatactactgtggtgttggcgctgacaaggcttttggccgtgacattgttgacgcacactacaaagcctgtatttatgctggcatcaacatcagtggaattaatggagaagtgatgcccggtcagtggg

SEQ ID NO: 133056 - DNA, 262 bp, Glycine max
gcgctttgtctgttataatcaacgcgctcctcacgagtgaatttctggttcggaaggatctgattgttagggtttggtatggggagaggtaagatcgtgataaggaggatcgacaattccacgagcaggcaagtgacgttctcgaagcgaaggaacggtttgctgaagaaggcgaaggagcttgcgatcttgtgcgatgctgaagtcggagttatgatcttctccagcaccggaaaactctacgatttcgccagctccagca

SEQ ID NO: 133057 - DNA, 271 bp, Glycine max
gggtttcagcgttccgcttcaacttcaaattctcagtgaaaccaattcagttcagtccaaatcccaaatccgaagtgagatttgcgatggagaggcttcagcgaatgttcgcaggtgcaggtggagctctagggcaccctcccccagattccccaactctcgattcctccgagcaggtctacatctcctcactcgctctcctcaagatgctgaagcacggaagggctggggttcccatggaagtgatgggtttgatgcttggagaattcgt

SEQ ID NO: 133058 - DNA, 266 bp, Glycine max
caattaactatcatagccatattggtgtccttgttagtgtttctctggcacactaagagaaatagaggaggtagcaagaacaagagtaaagaggctcctatcccagctggtgcatggccactaattggtcacctccaccttctgggtggcgatgatcaacttctctaccgaacacttggaacaatggctgaccaatatggaccagcattcaacatctggctcggcactcgccgcgcatttgtggtgagtagctgggaagtggcaaa

SEQ ID NO: 133059 - DNA, 265 bp, Glycine max
gttaaacttggaacccaaggctttgaggtactattaactacattacttgctcttattttgataattgatacaattaatctcattctaggtttcaaaattgggattcggatgtatgggccttactggagcgtacaatgaccctctccaagaacaggatggcatatctgttatcaagtatgcgttcagtaagggaatcacattttttgatactgcggatgtttatggagccaatgctaatgaacttttggttggaaaggctttgaag

SEQ ID NO: 133060 - DNA, 264 bp, Glycine max
caaatacgaaggtttccccagttgagttgccaccggctagttctcagaattttgaggagggttctgaggagacatctaagcctaagttgaagcctttgcattgggacaaagtgagggccagctctgatcgtgagatggtgtgggatcagttgaggtccagttctttcaagttgaatgaggagatgatcgaaactttgtttgtagtgaacacgccaaacccaaaacccaaggatactactccacgctcagttcttgcgccacaaa

SEQ ID NO: 133061 - DNA, 266 bp, Glycine max
gcaattttcatttttctctctcccttagtcaaagggattcatcgttcttcttcccaggttacttagaaaagcaaaatggtgaagatttgctgcattggtgctggatatgtggggggtcctactatggcagtcattgcacttaagtgcccatccattgaagtcgctgttgttgatatctctaaatcccgcattgcagcctggaacagcgaccagcttcctatctatgaacctggccttgatggtgttgtgaagcaatgccgtggcaa

SEQ ID NO: 133062 - DNA, 267 bp, Glycine max
caaatacttctcttggcattttgtgtcccttctctctttctcttgctcgatattttccaaccaaaataattattcaaaccaaacgtagctaggcaccactgctaggaatggcaagtgagatatttcttgcccttctgatcacaacctttgtggttgcagcctctgctggtaacttcaaccaagactttgagataacatggggtgatggtcgtgccaaaatcctcaatagtggggaacttctcaccttgtccctagacaagactctgg

SEQ ID NO: 133063 - DNA, 266 bp, Glycine max
tgggagtgctgaccagtgtattagcagtggtcaagagggccttacttatgatgacaactctatacatggatacttaaatgatgttttggttgaaaatgcaattgtggatgatactgatctgaatcctttggagtttttagcttccctgttccctggttttgcagcagaaagccttgcggaagcttactttgctaatggatgtgatttacatctgaccactgagatgctcaatcagttagagcttcaagttgatggcggtttcaatc

SEQ ID NO: 133064 - DNA, 264 bp, Glycine max
gcaaaggattctacccgccgctcgatgggaattgcgcttcaaggcgtctcgtagggctaatccgcctcacgagggtcaccaacggcacgtgcctttggggggccgaggccccctactgctggtcggcaaacggacggcgggcgcacgcgtcgcttctagcccggattctgacttagaggcgttcagtcataatccaacgcacggtagcttcgcgccactggctcttcaaccaagcgcgatgaccaattgtgcgaatcaacggtt

SEQ ID NO: 133065 - DNA, 269 bp, Glycine max
caagttttaagttgatgaaggaaagatgatggaaaggctctggggtgaaaacttttttgatccagccatttagaaatgaaccagcaagaatagtggttctgctacctgcaagcgtgggtctgttcagttctgttatgagcccatcaagcagattattaatcacttgtatgaatgatcagaaggatacgctgtggcctatgctgcaaaagcttggggtcaccatgaaatctgtgcgaaaggacctcatgggtaaaacattgatgaagcgt

SEQ ID NO: 133066 - DNA, 265 bp, Glycine max
gcaaatttcgccacttgcagatgaaaagttccaaactttccactccaatccccggttaaatcctaaccccttgttcctttcactggttcttagaactactaggaccttgccaccaccatggctgccaaaaaggcatgtgagacattctcaaagtcattgattgaggaagtgaatagatggggttgcttgaagcagacaggggtgagtctcaggtacatgatggaattcgggtccaaacccactaacaagaatttgctgatctctg

SEQ ID NO: 133067 - DNA, 262 bp, Glycine max
tctcgagccgaatcggctcgagcttcaagattcaggtactgcgttgcggaagcagacacagatggctcgtacgaagcaaacacgctcgtaagtccacaggaggaaaggctcctaggaagcagcttgcaaccaaggctgcacgtaagtctgcaccaactactggtggtgtgaagaagccccaccgttatcgtcctggtaccgttgctcttcgtgaaattaggaaataccagaagagtaccgagcttttgatccggaagctccc

SEQ ID NO: 133068 - DNA, 259 bp, Glycine max
gtaattctgattttcattatgggattcattgctggtgcttttattcttggagctgtccacaatgtcattctccttgttgttgtagtagttctttttggtgctgttgcggcattgttcacttggaacagttgttgtgggaggacagccattgttggtttcatttctcgttatcctgatgctgagcttcgaactgccaagaatgggcaatttgtgaaggtttctggggttgttacctgtggtaatgttccattggagtcct

SEQ ID NO: 133069 - DNA, 263 bp, Glycine max
caaaatgattgtgctgctgctgtgaagaagcttagggctatgctccactcaacagaggagcagcttcatgtgcacaagaagcagaccttgttcttaacacagttgacagcaaaaacattgcctaaaggtctccactgtcttccgttgcgccttacaaactgagtattatagcttgaatacttctcagcaacaactccccaaccaacagaagttagaaaaccctagactataccattatgcaatattctcagataacatattgg

SEQ ID NO: 133070 - DNA, 262 bp, Glycine max
gttgttctgatcttctctcatagcaatcaaatcacactcccatcttctcatctcgtaaaccctaaaccccgttttcagtgacatcgagatcgatcgaacatggatgaggagtacgatgtgatcgtgttgggcacgggtctcaaggagtgcattctcagcggtcttctctccgtcgatggcctcaaggttctgcacatggacaggaatgactattacggaggagaatccacttcgctcaatcttattcagctttggaagagat

SEQ ID NO: 133071 - DNA, 267 bp, Glycine max
ctttcggagtcagaggtttgtgtcacagacacggaaagggatagagaagacacagagagaaacaaaacattacttctttgaacttgatgtgtattgtagcaaatgtccttccgcagtattgttcgtgatgttagggacggatttggaagcttatcaaggcggagttttgatgtaaggctttctggtgggggcaagttgaatagtttggtccatgaggagcacgaatgcctgccagttgtacagaacagccggtgggctagccttccg

SEQ ID NO: 133072 - DNA, 258 bp, Glycine max
ttcttctcttgtggctagggttttagcgcagttcttctagatttaaggaagatgggtaaggaaaaggttcacatcagtattgtggttattggccatgttgactctgggtagtgcactaccactggccacctgatctacaagcttggaggcattgacaagcgtgttattgagagatttgagaaggaagctgctgagatgaacaagaggtctttcaagtatgcctgggtgcttgataagcttaaggctgagcgtgaaaga

SEQ ID NO: 133073 - DNA, 261 bp, Glycine max
aaggaaggccttgcccttgtgaatggcactgctgttggttctggcttggcctcaattgttctatttgaagccaacatcattgctgtcttgtctgaagttatttcagcaatttttgctgaagttatgcaaggaaagcctgaattcactgaccatttgactcataaactaaagcaccaccctggtcagattgaagctgctgctattatggaacacattttggaaggaagctcttacgtgaaagctgctaagaagttgcatgag

SEQ ID NO: 133074 - DNA, 262 bp, Glycine max
ctcgagccgctcgagccgattcggctcgagctctctctatattccattgccacccagtttactatatatacttattccttctttgtttcttcactttcttccatacacataaccatgtcttctcagactgttgtcctcaaagttggtatgtcatgtcaagggtgtgctggagcagtgaacagggttttgggaaaaatggaaggtgttgagtcatttgacattgatctgaaggagcagaaggtgacagtgaaaggaaatgtgg

SEQ ID NO: 133075 - DNA, 259 bp, Glycine max
ggattctacccgccgctcgatgggaattgcgcttcaaggcgtctcgtagggctaatccgcctcacgagggtcaccaacggcacgtgcctttggggggccgaggccccctactgctggtcggcaaacggacggcgggcgcacgcgtcgcttctagcccggattctgacttagaggcgttcagtcataatccaacgcacggtagcttcgcgccactggcttttcaaccaagcgcgatgaccaattgtgcgaatcaacggtt

SEQ ID NO: 133076 - DNA, 256 bp, Glycine max
ctaacctacctctttttcttctctctcaacaacttcaccttcttcctcctcgatcatgtctcacttcaagggcaagtaccatgatgagcttatcgccaatgctgcgtacattggcactcctggaaagggtattcttgctgctgatgagtcaacagggacaattggcaagcgtttggccagcatcagtgtagagaacattgaatccaacaggcgagctcttagggagctgcttttcactgctcctggtgttcttcaa

SEQ ID NO: 133077 - DNA, 263 bp, Glycine max
ctggacttatcaaaacacttcatcctaattggagtcctgcagctattaaatcagcaatcatgaccacagcaaccacacgtgacaacacaaataggccaataaaggatgcgtttgataataaagtggcagatgcctttgcatatggttcaggacatgtgcaaccggaccttgccatagatccgggacttgtttatgatctaagcctcgctgattacttgaactttttgtgcgcttccggatacgaccaacaactcatctccgca

SEQ ID NO: 133078 - DNA, 264 bp, Glycine max
ctctatctctcttcgttttgttcttccttgcgctcctcctcgttcgttcgttctccctcgcgtagatcggcaatggcggagaccgagacgtttgctttccaggctgagatcaaccagctcctcagtctcatcatcaacaccttctactccaacaaggaaatcttccttcgtgaactcatcagcaacgcctctgatgctttggacaagattagatttgagagtttgacggacaagagcaagctcgatgctcagccagagttgttc

SEQ ID NO: 133079 - DNA, 262 bp, Glycine max
ttttctttcttttttttcccctctttaaaagtctggcttttggtcctttgattcccaacttcacttgtcacatatcatattatgaagctcacaggtttcctgcaagcggtgactcttgctttggtgttagccaccgtctctgcatcagatcctgatcctcttcaagacctctgtgtcgcagaccttgcttcagcggttaaagtgaatggattcacatgcaaagatgctgccaaggtaaatgcgagtgatttcttctcagaca

SEQ ID NO: 133080 - DNA, 264 bp, Glycine max
cttattctttctttttctccttctaattctttgttacccttcacctattacaagccactcacactaacacaaaaacatggaactaagcaccatgttttgcttgtgtgcttcgtttctcttcattgttctcttcagggcactcatcaaaccttattatgtctccaaacgccgtgacttgccactcccacctggctccatgggttggccttacataggagaaaccatcactgtttttctcaagatccaaatgtcttctttgcctca

SEQ ID NO: 133081 - DNA, 261 bp, Glycine max
aaccgtcgtgccagatggaagacaaagcaattggaaagagattacggcgtcctcaaagccaattatgaatcacttaaacttaactacgacaccctccaacaagaccacgaagccttactcaaagagataaaggaattgaaatcgaggctggtgcaagaagagaacaacaacaacactgaaagcgatgtttcggtgaaggaagagatgctgaccaccacgctctgtgaaaccgccattcctggatcggacacgaaggagttg

SEQ ID NO: 133082 - DNA, 257 bp, Glycine max
atccttcataagtcgtcatcatcatcatcatcatcaccgttgattgaagaagatgccgatcagaaacatcgccatcggaaggcctgaagaggctactcaccccgacacgttgaaggcggggttggctgagttcatctccaccttgatcttcgtgttcgccggttcaggttccggcatcgcctacaacaagctcaccgacaacggcgccgccactcccgccggcctcatctccgcttccatcgcccatgctttcgccc

SEQ ID NO: 133083 - DNA, 257 bp, Glycine max
aaaatggtccggcttccaaagagactgcatcttccaaaaagattgtgtcagctaccccagctagtgttgcaggaacattagttggacctgtagtttcttcaggtatggccacagcactggagctgaggaacccttcgactgttcattctaaggcaaattccacaagtgccgcacaaccttgtgcagttgtgcgtaatgaaacttggttacagaatgagcgtgagctgaaacgggagaggagaaaacaatctaaccgt

SEQ ID NO: 133084 - DNA, 257 bp, Glycine max
ctaacctacctctttatcttctctctcaacaacttcaccttcttcctcctcgatcatgtctcacttcaagggcaagtaccatgatgagcttatcgccaatgctgcgtacattggcactcctggaaagggtattcttgctgctgatgagtcaacagggacaattggcaagcgtttggccagcatcagtgtagagaacattgaatccaacaggcgagctcttagggagctgcttttcactgctcctggtgttcttcaat

SEQ ID NO: 133085 - DNA, 260 bp, Glycine max
gtttttagtttgatagaaatcaagcccttactgctgtttccgactctagtgacagatcaaaagataaatcagatcagaagactctccgcaggcttgctcagaaccgtgaagctgccagaaaaagccgcttgcgaaagaaagcgtatgtccaacagttggaaagtagtcgtttgaagctgacccaactagagcaagagcttcagcgagctaggcagcaggggattttcatatcaagctcgggtgatcaagcacatacattg

SEQ ID NO: 133086 - DNA, 261 bp, Glycine max
cacacactctctttcttctgctgcaccagcaacaacagagaatgaacagtactgaggaggggatgcaaggcataggcataggcataggctgcttccaaaacgacgtcgtagggcagctggagctgatccccactatgagcaactcctcctcctcgctatccatggagctggacgagtccccggagagcagaatccaacggttgatatcggagcacccggtcatcatcttcacccgatcctcctgctgcatgtgccacgtca

SEQ ID NO: 133087 - DNA, 259 bp, Glycine max
cgttatgagaatgattggagtgttgtgaaacgagggtgggatgctcaagttcttggtgaagccccttataagtttacaaatgctcttgaagctgtcaagaagctgagggcagaaccaaaggccaatgaccaatatttgcctccttttgttattgttgacgagagtgggaaacctgttggtccgatagttgatggtgatgctgttgttacattcaacttccgagctgatcgtatgacaatgattgctaaagctcttgagt

SEQ ID NO: 133088 - DNA, 259 bp, Glycine max
caaactcaaagaagaaagaagaaaatccagcgaaagtaaaaccagcatccgaaaaagatgagcagcatcggaacaggttacgatctctccgtcaccactttctcccccgatggccgtgttttccagatcgagtatgctgccaaagccgtcgataacagcgggactgttattgggatcaagtgcaaagatggggttgtgttgggcgttgagaagcttattccgtcgaaaatgatgcttccgggttccaatagaagaatac

SEQ ID NO: 133089 - DNA, 259 bp, Glycine max
cggctcgaggcgaaacagagaagacatagcacatagagtcatagagacatcatcatcgtatgggaatggaagaggagagtagcaacaacagcagcatcatagaaggtggtgcttcgctgccatcaacgggttcagacgccaagaagcgaagagtgacgtacttctacgagcccacgatcggcgattactactacggtcaggggcaccaatgaagccgcaccgaatccgcatggcgcacaacctcatcgtccactactcc

SEQ ID NO: 133090 - DNA, 257 bp, Glycine max
gagggtttgatgaccactgttcattccatcactgccacccagaagactgttgatgggccatcagccaaagactggagaggtggaagagctgcttcatttaacatcattcctagcagcactggagctgccaaggctgtcggaaaagtcctccctgctttgaacggaaaattgactggtatggcattccgtgttcccaccgtggatgtctctgttgttgacctcacagtgaggctggagaaggaagcctcctacgatga

SEQ ID NO: 133091 - DNA, 256 bp, Glycine max
tgagattgctagctgaagagagaaaagcaaaatcgaattatcatagaaagaagtgaattgaatttcattgacagagtcagagtgaagtgttgcgcaaatctgaggtgcgcattgcattgtggttgatttgtaagaatggcgccagtgtcggctctcgcaaagtacaagctggtgttcttgggtgatcagtccgttgggaaaaccagcatcatcactcgcttcatgtacgacaaattcgacaacacttatcaggcta

SEQ ID NO: 133092 - DNA, 255 bp, Glycine max
gttcttttgttattcggtgcgtgtgtctaagtttgaaacccctgtgatctcacacaattccaattcctctggatctcgtctcgatcgatcgatctcgaacatgagcactggggagcttctacaacatcgaacctctcgaactacagttcccctttgagctgaagaagcagatctcatgttctcttcaattgtccaataagaccgatagctatgtggccttcaaggtgaaaacaaccaatccgaagaagtattgtg

SEQ ID NO: 133093 - DNA, 250 bp, Glycine max
ggcatggagtgttccctcccttcccaccaccaaagtctcctgcgcaggctacgtgccccattgacacgctcaaacttggtgcctgtgtggatcttcttggagggttggttcacattggtttgggtgaccctgttgcgaaccagtgctgccccgtgcttcaagggcttgttgaggttgaagctgcggtgtgtctttgcaccactcttaaactgaagcttctcaacctcaacatttatgtcccacttgccct

SEQ ID NO: 133094 - DNA, 256 bp, Glycine max
attccccctaaccaagtttaagtttctagaatggaagaaatgaacagaagctcctcctccacttcctcttcctctcactgttgctctttagagtccaaccataggagccccaacaagccagacagaatcaaaggcccatggagcgcccaagaggatcggatcctgacacgactagtcgaacaatacggccctcgaaactggtccctcatcagccgctacattaagggcaggtccggcaaatcgtgccggctgcggt

SEQ ID NO: 133095 - DNA, 254 bp, Glycine max
tgttattatagtttccaaaggcacgcagcgagtttaggcgcggcgggatcatcacgagattgcaaaatgaagttcaacattgcaaatcccaccactgggtgccagaagaagctggaaatcgatgacgacctgaagcttcgggcattttgggacaagaggatctcccaggaggtccttggtgacgccctgggtgaggagtttaaaggatatgttttcaaaatcactggtgggtgtgacaaacaaggattcccaat

SEQ ID NO: 133096 - DNA, 257 bp, Glycine max
attcaattgagaagcttgaggttcagaagcacttgaagaacttgaatagacctcctgttaggtccatcaagagtcctgatggagatgttattgactgtatccatgtctcacaccagccagcttttgatcaccctgacctcaaaaatcacaagattcagatgaaaccaaatttccatccagaaggtcacccttttggagaaagcaaagtctcttcaaattccaagccaattactcagccgtggcaccaaaatgggagg

SEQ ID NO: 133097 - DNA, 256 bp, Glycine max
cttcattcctcatttttccctcaaacaatcaatcaattttcattcagattcgtaaatttctcgattagatcacggggtattggtgtgattgtttgtaccatccggtggtggagcttgttggaaattggagatgagtcagaggggtttaatatatagctttgttgccaaaggaactgttgtattagcagagcacacgcaatataccgggaatttcagtaccattgccgttcagtgcctgcagaagctgccatcaaat

SEQ ID NO: 133098 - DNA, 281 bp, Glycine max
ctctcgtgcttctcagcatcgtcgacaactacaacagagtcgccaaagacactcgcaagcgcgtcgtcggcgtcttgctcggctcctccttcaaaggcaccgtcgacgtcaccaacagctacgccgtgccctttgaagaagatgacaaggatcctagcatctggtttcttgaccacaattaccatgaatctatgttttccatgtttaaaagaataaatgcaaaggagcatgttgtggggtggtatagcactggtccaaagctgcgcgaaaatgatcttgac

SEQ ID NO: 133099 - DNA, 270 bp, Glycine max
caacacatcaaactattagcaatttagcaccttctactactttgcaatcgttcaagagttgtgaactgtgaagaatgagttcaacaagccgtgcttggacttggagcgtggcagcaagtgttggagtggtggaggccttgaaggaccagggtatatgcaggtggaacagtgtgatgagatcagcacaacaacatgctaaacataatatgaggtctttgtctcaaaccaagaagttttcttttcaatcatctgcgatggcttctgccaaat

SEQ ID NO: 133100 - DNA, 254 bp, Glycine max
actagatgatgcttggaaattcatccaggatatgcctgtcaaaccaggaattactgtcttaggtgcaatgctaggtgcttgcagaatccataaaaatgtagaattgggtgagaagactgcagacgaactatttgacttggacccagatgatggtggctatcatgtattgcttgccaacatgtatgcatctgcttcaatgtgggacaaagttgctcgggtgaggacggccatggagaagaaaggggatcagaaaa

SEQ ID NO: 133101 - DNA, 275 bp, Glycine max
  unsure (1)..(275): unsure at all n locations
cggctcgagcttgtctcaaagattaagccatgcatgtgtaagtatgaactaattcagactgtgaaactgcgaatggctcattaaatcagttatagtttgtttgatggtatctactactcggataaccgtagtaattctagagctaatacgtgcaacaaaccccgacttctggaagggatgcatttattagataaaagggtaacacaggcatctgcctattgcttgangtatcantantacacgacggaatgcacggccatttagtcggcgacgca

SEQ ID NO: 133102 - DNA, 223 bp, Glycine max
atcgtgccttcattgcagaagctggggcgattccgtatcttcggaatttactttcatcacccaatgcggttgctcaggagaattctgtgactgcgctgctcaatttgtccatttttgacaagaacaaaagtaggattatggacgaggaagggtgtcttggatcaattgtctgacgtgttgagatttgacacaccacagaggcaaaggaaaactcatcatcaac

SEQ ID NO: 133103 - DNA, 264 bp, Glycine max
  unsure (1)..(264): unsure at all n locations
ctgaaactgagcgtaggttaacagaattccactctgacatcgaagcgcttctttacagctcagtggagaatgaggaacacatatgcgtattgaaggaccgcaacaaaccaataatcttcaccatggcaaggcttgaccgtgtgaagaacatcacggggcttgtcgagtggtacgggaagaacgcacgccttcgcgagattgntaaccatgctgatgntgcatgagacaggaggaaggagactgaagactttgaagagaaggccg

SEQ ID NO: 133104 - DNA, 222 bp, Glycine max
gtgcactcagagcgtgcagttcagcagagagcccaacaatctctacaacctcaacactttcaagtactccggtttggcgaacaagaaaactgtcactgttcaacctgcgggtaaagaccagtctgtgttgctggcaacaaccaagacaaagaagcaaaacaagcctgctgctttgcttcacaaatctgtcaataaaaaggagatccggaggaatgcaaaggc

SEQ ID NO: 133105 - DNA, 165 bp, Glycine max
gggccaatgttatcctctgcttttaagttggaagaggcccaactcatgtgtgatgtacggctgtgattgtgtaatttaatttgcaaaatcaaaaataacaccagagtcatataaaaaaaaagaaaaaaaaaaaaaaaaaaaaaaaaagggggggcccccgtttat

SEQ ID NO: 133106 - DNA, 270 bp, Glycine max
cggctcgagctcgaccgtgctgttcctgcgcgtgaacaagcctcaggtaagccaaagccatggtgccgcataacaatgttatccccaacggacacttccgtaagcactggcagaactatgtgaagacctggttcaatcagccagcacggaagacaagaagacggttggctcgtcagaagaaagctgtgaagattttccccagacctacagctggacctcttagacccattgtacatggtcaaactttgaaatacaacatgaaagtgagag

SEQ ID NO: 133107 - DNA, 242 bp, Glycine max
  unsure (1)..(242): unsure at all n locations
cacccaaccttcatatggttctaaatggcaaaaccaagttcagctgatggtaggactagaagttctgtgcagatctttatagtagttggtctatgctgtttcttctatatattaggcgcatggcagagaagtggtttcggaaagggagatagcatagcattggagattactaagactaaagcagaatgtaatatagttccaaatttaagttttgatcccaccaatgatgagaagnttgcgaa

SEQ ID NO: 133108 - DNA, 230 bp, Glycine max
  unsure (1)..(230): unsure at all n locations
gggcactcagagcgtgcagttcagcagagagcccaacaatctctacaacctcaacactttcaagtactccggtttggcgaacaagaaaactgtcactgttcaacctgcgggtaaagaccagtctgtgttgctggcaacaaccaagacaaagaagcaaaacaagcctgctgctttgcttcacaaatctgtcatgaaaaaggagtaccggaggatggcaaaggcagntcaaa

SEQ ID NO: 133109 - DNA, 241 bp, Glycine max
  unsure (1)..(241): unsure at all n locations
ctcgcgccctcgctcttcccttcctggtggcgacaatgtcgactcctgctaggaagaggctgatgagagacttcaagaggctgcaacaagacccgcctgcagggatcagcggtgccccccaggataacaacataatgctgtggaatgctgtcatatttggtcctgatgatactccatgggatggaggcacgttcgaagttactctccagntttactgaggataatcaaantaaccaccaac

SEQ ID NO: 133110 - DNA, 229 bp, Glycine max
  unsure (1)..(229): unsure at all n locations
agagaagcgtcttaataaacgctaacctctgtacccttcgctaaaatgagagagtgcatttccatccacattggccaggccggaattcaggtcggaaatgcttgctgggagctctattgcctcgagcatgccattcaggctgatgggcagatgccaagtgataagaccattggtggaggttacgatgcattcaacacnctcatcagcgagaccggatcaggaaagcacg

SEQ ID NO: 133111 - DNA, 278 bp, Glycine max
tggatctgttgacccggatgcaccacctgatccagagaaaatcaggctggagcaagcagcatcaaaggcacaagctgctttcaggggttacttggcacgaagggcatttagggccctgaaaggcataataaggttgcaagcacttattcgtgggcacttggttatgaaacaagccgttgttacattatgctgcatgtatggaattgtaaagttacaagcacttgtccgtggagtaaggattagacagtctaatgaaatccatgagaagtgcaatctat

SEQ ID NO: 133112 - DNA, 256 bp, Glycine max
ctcgagcgtttcaaccaaaatggagaagcgattaatctccgtagaccgttgggcagagggaagcgaacgaacttcctcacccacctccactccgaccacacccacggcctcaccccctcctggcaccacgcccccctcttctgctccgccgtcaccgccaaactcctccccttcaagttccccggtttcgacctctccctcctccgcgatctccaccccggcaccacccacaccgtcacctctccctccctcaccc

SEQ ID NO: 133113 - DNA, 238 bp, Glycine max
caaagagattcaatctcagtcttgaacaaataaaagatatctctgatcgctctcaagaatttgtggataagctatttgaagaatcaaaaaagcttgaagactatgcatcacaggctgaccaaatgcaaatgaagagcattgatgagtttaagaaagcatatgaggagcaatcaaaatctgatacagagaaacttattgccaatatgactagtttagtttctgaatcacatcggcgaca

SEQ ID NO: 133114 - DNA, 248 bp, Glycine max
  unsure (1)..(248): unsure at all n locations
caaccacttatcccctttctccttctaacgagtgaggaaaaatggcgcgtaagaagatcagagagtatgactcaaagaggttgttgaaggagcactttaagagactctctggcaaggagttgccgatcaagtctgcacaaattaccgcatcaactgatttcactgagctacaagagaaggaacccatggcttcaatctcaaaanttggtgntaaaccngacantgtantttgaaagcgttgcaaaagg

SEQ ID NO: 133115 - DNA, 247 bp, Glycine max
cggctcgagcttgtctcaaagattaagccatgcatgtgtaagtatgaactaattcagactgtgaaactgcgaatgtctcattaaatcagttatagtttgtttgatggtatctactactcggataaccgtagtaattctagagctaatacgtgcaacaaaccccgacttctggaagggatgcatttattagataaaaggtcaacacaggctctgcctgttgctttgatgattcatgataactcgtcgg

SEQ ID NO: 133116 - DNA, 257 bp, Glycine max
ggaatggtggtgtgatcatagactctggcaccacaatcacctacgttcaacaaaaggcctatgaggcactcaaaaaagagttcatttctcaaaccaaacttgctttggacaaaactagctcaacagggttggatctttgtttctccttgccatcagggtcaacacaagtggagattccaaagcttgttttccatttcaagggtggggacttggagcattcctgctgagaactacatgattgctacatccaatttgga

SEQ ID NO: 133117 - DNA, 261 bp, Glycine max
tttttgacgcgtgaaataggcgccggcgttcatcgttgaaaagcgaaaatggatatacctcgtctgatacttggaacccaaggcctggaggtttccaagttgggatttggttgtgcggggcttagtggagtgtttgacggccctgttcctgacgaggttgtcatctctctaatcaagtatgcattcagtaatggaatcactttctttgatacttccgatttttacggtcctacactaatgaagttctccaggaaaggcact

SEQ ID NO: 133118 - DNA, 238 bp, Glycine max
tttttgacgcgtgaaataggcgccggcgttcatcgttgaaaagcgagaatggatatacctcgtctgatacttggaacccaaggcctggaggtttccaagttgggatttggttgtgcggggcttagtggagtgtttgacggccctgttcctgacgaggttgtcatctctctaatcaagtatgcattcagtaatggaatcacttactttgatacttccgatttttacggtcctacactaa

SEQ ID NO: 133119 - DNA, 210 bp, Glycine max
  unsure (1)..(210): unsure at all n locations
gtagtcatatgcttgtctcaaagattaagccatgcatgtgtaagtatgaactaattcagactgtgaaactgcgaatggctcattaaatcagttatagtttgtttgatggtatctactactcggataaccgtagtaattctagagctaatacgtgcaacaaaccccgaacttctgaagggantgcatttnttgantaaaggacaacacagg

SEQ ID NO: 133120 - DNA, 239 bp, Glycine max
  unsure (1)..(239): unsure at all n locations
ggaaaagcttgctgtagggataaaactttatgctatagcagccactgccacttcaaagcggacaattctttctgatcttgtaactgtttatgcaaagggtgggaagactatagtttttacacagacaaaaagagatgctgatgaagtatcattgtcattaacaaatagtataatgtctgaagcatctcaatgctgatatgcacagcantagagagagagaacatttaagtgctccggca

SEQ ID NO: 133121 - DNA, 272 bp, Glycine max
attttcaaacaccaccgcgtaacacaacacttgcccattcccttataatagacaaacgaaacacacctcactcacactttccgtgtaaacagaacagagcaacactgaacaatggcgcaaccttcctcctcctcgaagcctgttgtccctctcctgaaggacgagctggacatcgtgatcccgacaatccgaaacctcgacttcctcgagatgtggcggcccttcttcgaaccttaccacctcatcatcgtgcaggacggagaccccaacag

SEQ ID NO: 133122 - DNA, 260 bp, Glycine max
tctcgagccgaatcggctcgagcggctcgagcttggtggtagtagcaaaaacaggaaatgaggctgccaccagaatcttagctcgtcaacttgttaggttacgtcaacagataaccaatttgcagggaagtcgtgctcagatcaggggtgtagcaactcacacacaggcattatatgcaagcacttcaatctctacaggaatgaagggtgcaactaaagcaatggtgacaatgaataagcaaatggcaccggcaaaacag

SEQ ID NO: 133123 - DNA, 250 bp, Glycine max
  unsure (1)..(250): unsure at all n locations
agatgggcaaattcaatctgtcccatagagttgttttggcaccgctgaccagacagaggtcttacgacaacgtcccacaaccccatgccatcctctactactcccagagaacttccaacggaggccttctcattactgaagccactggcgtctctgacacggctcaaggctatccgcaaacccctggcatatggacgaaagaccatgctcaagcattgaaacccactgncgantccgatcacgccaaagg

SEQ ID NO: 133124 - DNA, 194 bp, Glycine max
tttctctcgcatccactgaaccaagattcctattccaaaatgaccgctcctacttcttccagcctgtggctggctccaaaccccagcaaaagatggggcgaactcttcttccttctctacacccccttctggctcaccctttgtctcggcattgttattcccttcaatcattacgagaacatcacagagcatga

SEQ ID NO: 133125 - DNA, 255 bp, Glycine max
  unsure (1)..(255): unsure at all n locations
ggtcaatgaatttgtgaacccaaaagaccatgacaagcctgtacaagaggtgattgctgcaatgacgaatgggggtgtggatcgtgctgttgaatgtactggcagcatccaagccatgatctcggcattcgaatgcgtccacgatggttggggtgttgctgtacttgttggagntccaaacaaagactacgcantcaaaacgcagtcagngaanttcatgaacgagagaacactataggggatcgactatggaaa

SEQ ID NO: 133126 - DNA, 245 bp, Glycine max
  unsure (1)..(245): unsure at all n locations
ccggaagaagaatactacacctcccaaggcgttcgcaacaccaagtcccacttcgaaacccccaacggcaaaatcttcacccagtccttcctccctctcaacctccaaccccaccaagtcaaagccaccgtctttatgacccacggctacggctccgacaccggctggcatctccagaaaattctcantcaactcgccaccntgggcnacgccgacatcgccgccgaccatcactgccacggccg

SEQ ID NO: 133127 - DNA, 273 bp, Glycine max
gcttcaacttgctccctcagaccccaagatcaagccacagagcaccagtctcctactctctctcacccacaagagaaatggcatctcacatcgttggatgaccccgcatcggtcccaagacagagctcaagttcgctctccagtctttctgggatggcaagagcagcgccgaggatttgcagaaggtggctgctgatctcaggtcatccatctggaagcagatggctggtgctgggatcaagtacatccccagcaacactttctcgttctatg

SEQ ID NO: 133128 - DNA, 244 bp, Glycine max
tgctgacttcctctttgttttctgatctatggcttccaaggagttctctggtctttgctccttggctccttcactatctgagagcattttgtgcactactgggttgaaaatgtatatgctggagagcaaaggaggtgccatagcatgcatgttctagtctcttttcttcttggggacatggcctgctcttttgactatgttagagaggcgtggtcgtcttcctcagcatacctaccttgattac

SEQ ID NO: 133129 - DNA, 218 bp, Glycine max
tgctaatgataattttacttttgtgcataaaaactcattggtgccaccttcaaaagcagtcaaccaacgtgatgcagatctcatccatttctgggataagttccgcaaagctcctgtgggttcttctaggaaagctgcagctgagaaagaaattctggaagcaatgtctcacagaatgcatatagatgacaacatgaaacttattggaaagctcttat

SEQ ID NO: 133130 - DNA, 251 bp, Glycine max
  unsure (1)..(251): unsure at all n locations
cggctcgagccgcctttcgcattgcaagcggtctctttctttgctttcccccctttctggtttccgcgctgcaactatccatggcaaaccactggctcagacccgaggtgtatccactgttcgctgcggttggtgccgctgttgggatctgtggattccaattggttcgtaatatctgcatcaaccctgaagtcaggcgtactaaggagggaagaaaggcaggagntcttgagaacntttcntagggagag

SEQ ID NO: 133131 - DNA, 261 bp, Glycine max
acctcctaaaggcaaaacaagcatatcaagcccgtttcaaaaagtcccttgaagaagacgttgcctatcatactaaaggggacatccgcaagctattggttcctcttgtgagcacattccgttatgagggggatgaggtgaacatgacattggcaaaatctgaggctaaactgcttcaccagaagattgcagagaaggcctacaacgacgaggacctgatcaggattttgtcaacaaggagtaaagcacagttaacagcga

SEQ ID NO: 133132 - DNA, 258 bp, Glycine max
gcgaagagaagagaaaaattaagatggaggggaaggagcaggatgtgtcgctgggagcgaacaagttcccggagagacagccgattgggacggcggcgcagagccaagacgacggcaaggactaccaggagccggcgccggcgccactggttgacccgacggagtttacgtcatggtccttttacagagcagggatagcagagtttgtggccacttttctgtttctatacatcactgtcttaaccgtcatgggagtcg

SEQ ID NO: 133133 - DNA, 255 bp, Glycine max
ttacgatggcgcccagggacaagactagtgccgttaagcctagcggtaacgccggggtgaaggacctgcattttcgtggagtcaggaagagaccgtgggggaggttcgccgccgagatcagagatcccgccaagaagacccgcgtctggctcggaaccttcgacaccgcggaggaggcggcccgtgcctacgacgccgccgcgcgggagtttcgcggccctaaggcgaagacaaacttccctctcccttcggaaa

SEQ ID NO: 133134 - DNA, 256 bp, Glycine max
gcagacgcaaacgcaaacgcaaacgcaaacgcaaacgcagagcgtgatccattgacgaagatggtgcagcgtctcacctaccgcaagcggcacagctatgccaccaagtccaaccaacacagggtcgtcaaaacccctggtgggaagctcgtttatcagactaccaagaagagggccagcggacccaagtgccccgtcactggcaagaggattcaggggattccacacttgaggcctgcagagtacaagaggtcaa

SEQ ID NO: 133135 - DNA, 256 bp, Glycine max
gggagtatcccgaaaagtctcataacaagaaacacctcaaaggtgctgttgtggaggtgaaatgcaaagcaggaagaaatattatcaaggcttatggtgaaactaagagcaacggaaagtatagcatcacagttaaggacttcaattatgtcaaatatggacctacagtgtgcaaggccaagctttatgctccacctaagggatcacccttcaacatacctaccaagttgaacgaaggaacagacttgaaggtgaa

SEQ ID NO: 133136 - DNA, 255 bp, Glycine max
  unsure (1)..(255): unsure at all n locations
tctcgagccgctcgagccgctcgagccgctcgagccgctcgagccgattcggctcgagntttaccaagctgtacactcgagtacagacctacattagcactatgccactgagaatggatgagggatggaatcaaatccagtttaacctggtagatttcaccaagagagcttatggtactaattatgtggagacactgcgagtacaggtccatgcaaactgtcgcctgagaaggatatacttctctgatcgcctgt

SEQ ID NO: 133137 - DNA, 254 bp, Glycine max
atttcgtgttagcgaagacagacagatctgaagtgtgtagagttaaagactgagagagacgaagccagagaaaaccaaaaaccttactctttttcacgcgacgccctagttcatttttcttctccgttctcttctctctctgttcttcactcactctcattcattcaccatgacgaaacaacatgccaattggtctccttacgataacaacggaggatcatgtgttgcgattgctggagcagattactgcgtta

SEQ ID NO: 133138 - DNA, 250 bp, Glycine max
ctgtttgataggattgtggcacaagataggtactcagagactgaagctgcaggtgtggttcggcagatagcttcaggattagaggctattcataaagctaaaattgtccacagggacttgaagcctgagaattgcctcttcttggatgtgaggagggactctcctcttaagatcatggactttgggttgagttctgttgaggaattcactgacccaattgttggtttgtttggatccattgattatgttt

SEQ ID NO: 133139 - DNA, 252 bp, Glycine max
atattttcttctatctcatcctttcttttagttttatttttatttttttatcttgggtaaaaaaaatcatgggtgttttcacttctgaaagcgaacacgtttcccccgtctctgctgcaaaattatacaaagctattgtcctagatgccagcaatgtcttcccaaaagcattgccaaatttcattaagagcgtagaaaccattgaaggagatggagggccaggaaccattaagaagcttactcttgctgaag

SEQ ID NO: 133140 - DNA, 255 bp, Glycine max
tttttggattcaggaaccctgaggaaattccatggggtgaggttggtgctgattatgttgttgagtcaactggcgtattcactgacaaggacaaggctgctgctcacttgaagggtggtgccaagaaggttgtcatctctgccccaagcaaagatgcacccatgtttgttgttggtgttaacgagaaggagtacaagccagagcttgacattgtttctaatgctagctgcactaccaattgccttgctcccctcg

SEQ ID NO: 133141 - DNA, 256 bp, Glycine max
agatacatggcttccttaagctccttagtgctgctccttgcagctctaattctatcccctcaagttcttgcaaactatgagaattccccagtgtacaagcctcccactgagaaaccaccagtttataagccaccagttgagaagcctcctgtttacaaacctccagttgaaaagcctccagtttataagcctccagtagagaagccaccagtgtacaagcccccagttgagaaacctccagtttacaagcccccag

SEQ ID NO: 133142 - DNA, 254 bp, Glycine max
attttgtgcaatggcagccaagagcaaaatcctagtccttggaggaacaggatacattggaaaattcatagttaaggcaagcgcagaagcaggacaccccacttttgccttagttagagagagcaccctttctcatcctgaaaaatctaaacttattgagagcttcaagacctccggagttactcttctttatggtgatctaactgatcatgaaagccttgttaaggctatcaagcaagttgatgttgtgattt

SEQ ID NO: 133143 - DNA, 253 bp, Glycine max
gcaaccaccgatcaaagaagaaacaaccgcaacagatctccgtttctcgccaaacaaacacacaatggctgccttcagcgacgacgaaaccgcacctttctttggcttcctcggagccgccgctgccctcgttttttcctgtatgggagcggcgtacggaaccgcgaagagcggcgtcggggttgcgtcgatgggcgtgatgaggccggagctggtgatgaaatcgatactgccggttgtgatggctggtgtg

SEQ ID NO: 133144 - DNA, 254 bp, Glycine max
agctttgccaagtcccagattgattacatccttggaaataacccaaggcaaatgagttatgtcgtaggttttggtaatcattacccaaaacacgtccaccatagaggagcatctgtaccgaagaacaagatcaagacatagctgtaaaggtggatggaaatggagggacacttctaagccaaacccaaatacaattgttggtgccatggttgccggtcctgacaagcatgatggcttccatgatgttcgtacaa

SEQ ID NO: 133145 - DNA, 253 bp, Glycine max
ttcaaatctagggtttcctccttctgcaaccatcaatgtcggcaatcgcggctccccaacacagatcctcgaagacagagtcctacgtggacaataagcgcaaggaggatatccgccatgccaacatcgtggccgcacgctcagtcgccaacgcggttcgcaccagtctgggccctaagggcatggacaagatgatctccacctcctccgacgaggtcatcatcaccaacgacggcgccaccatcctcaacaa

SEQ ID NO: 133146 - DNA, 248 bp, Glycine max
ccggaggtcaggcacagtaattttccccagatccttatattctcataattggccgtgttttggttggtttgggtgtgggtatagcttctgttactgctcctgtgtatattgcagaatcatcaccatcagaaataaggggagcattagtaggcataaatgtgcttatgataactggtggacaatttctttcctatctcataaatcttgctttcacacaggttcctgggacgtggcggtggatgttggga

SEQ ID NO: 133147 - DNA, 253 bp, Glycine max
tgtaacccagagctccttcgcctcatcgatagtttaaagtctcgttttgacaatggtgagggttagtgtgttgaatgatgctctgaagagcatgtacaacgccgagaagcgcgggaagcgccaggtcatgattaggccatcctccaaggtcatcataaaattcctattggtcatgcagaagcacgggtacattggtgagttcgagtatgttgatgaccacagggctgggaaaatcgtggttgaattgaatggg

SEQ ID NO: 133148 - DNA, 253 bp, Glycine max
aagaacaaaacaaataagatgaagaaagaaatatggctggaggatcatacgaggaagccattgcagcgttgacgaagcttctcagcgagaaagccgacctgggtggtgtcgccgccgcaaagataaaacagctgacggcggactggataccgccaccgcaaacgggtcgacgccgtttaacccggacgagaggatccgaaccgggttcgcccacttcaagaacgagaaataccagaagaacccggaattatat

SEQ ID NO: 133149 - DNA, 257 bp, Glycine max
  unsure (1)..(257): unsure at all n locations
gattgctagaatggaatttcgatgctcagtcatctcttttaccattctcttctctcttgctcttgcaggagagagccatgtccatgcatcgctacctgaggaagattattgggaagctgtttggccaaacactcccattcccactgcactgcgagagcntctaaagcctctccctgcaggcgttgaaatcgatgaactccctaagcaaattgatgatacacagtacccaaaaacattcttctataaagaagaccttc

SEQ ID NO: 133150 - DNA, 253 bp, Glycine max
cgagtagcaacaatgtcgaagcgaggtcgcggaggatcggcagggaacaagttccgcatgtcactgggtctgccggtggcggcgacggtgaactgcgccgacaacaccggcgcgaagaatctctacatcatatcagtgaaggggatcaagggaaggctgaaccggttgccgtcagcttgcgtgggtgacatggttatggccaccgtcaagaagggaaagcctgatctccgtaaaaaggtgctccccgctgtca

SEQ ID NO: 133151 - DNA, 249 bp, Glycine max
ctttgttcactcttcttctcttgcggctagggttttagcgcagttcttctagatttaaggaagatgggtaaggaaaaggttcacatcagtattgtggtcattggccatgtcgactctgggaaatccactaccactggtcacctgatttacaagcttggaggcattgacaagcgtgttattgagaggtttgagaaggaagctgctgagatgaacaagaggtctttcaagtatgcctgggtgctggacaaa

SEQ ID NO: 133152 - DNA, 251 bp, Glycine max
aacttgctccctcagaagcgaagaagaagccacagagaaccagtctcctactctctctcacccacaagaaaaatggcatctcacatcgttggatacccccgcatgggtcccaagagagagctcaagttcgctctcgagtctttctgggatggcaagagcagcgccgaggatttgcagaaggtggctgctgatctcaggtcatccatctggaagcagatggctggtgctgggatcaagtacatccccagcaa

SEQ ID NO: 133153 - DNA, 248 bp, Glycine max
gttaatttgtgtagcgtttccattaaaacggcgtcgtaatcatacgttggtattcagacagcatgaaaactccgatttcaggtttctacagaaaccccgtgaagttcagaatgccaactgcggagaacttggttcccattcgattggacatcgaaatcgaggggcagagatacaaggacgcgttcacttggaacccttctggtaatttcaaactaaacctgttcttgtttattcattacctttgattc

SEQ ID NO: 133154 - DNA, 245 bp, Glycine max
gaggactctcaccacaggtgtcaatggagagcttcacccttcaaggttttgtgagaaggacttgctcaaggttgttgatagggagtacacatttgcatacattgatgacccctgcagtggaacataccctttgatgcaaaagctaaggcaagtgcttgtggactatgcattggccaatggagagaacgagaagaacacaaacacatcaatcttccaaaagattgcaacatttgaggaagagttga

SEQ ID NO: 133155 - DNA, 252 bp, Glycine max
ctcgagccgctctaaaataaaaaaccctaacttctgaacctttcaccgcatcgccaccgattccctatctccactaatcaaagaaaagaaaatgagtagacgctcgagcagaactgtctacgttgggaatctacccggtgatatccgtgaaagagaagttgaagatttgtttcctgaagtacggacacataacacacatcgacctaaaggttcccccaagaccacctggttatgcatttgtagagtttgaag

SEQ ID NO: 133156 - DNA, 249 bp, Glycine max
agaaaatcctcaattttctgagcagccaaacactctctctctgtctctcgaaaattctcagtttgcagagaaaatctgaatcatgtcgtggcaagcgtatgtcgacgatcaccttctgtgtgacatcgaaggtaaccacctcactcacgctgctatcatcggccaagacggcagcgtttgggctcagagtaccgacttccctcagttcaaacctgaggagataactgccatcatgaatgactttaatga

SEQ ID NO: 133157 - DNA, 248 bp, Glycine max
gctgacgatgataatcatccagagtttcaattgaaaagatttgactattttggttttggtttatcaaatgaagttcaccatgctgatgttgtagctttgacaaagctatcatgcttggtgctgccccatgagcactcagcattgctgcagccaaagtctatttggagtgcagaaaaatctcatgatacatgctcacttgtggagcatatattgcatttggaccctatagaggtagacatcttccgagg

SEQ ID NO: 133158 - DNA, 249 bp, Glycine max
cggaaagtagatttactcagaagccttgcagaattttcaccttatacaacaccacaagattcacgccaaatgcttccttctattgttcagttgcttaagaaatacatgacttggaagaagactggagaagagatgaactttacctatgttgagtgcttgttgtacacatttcatcacttagctcataaggttcctaatgcgacaaatagtttatgtggatacaaaattgttactggccagccatctgat

SEQ ID NO: 133159 - DNA, 251 bp, Glycine max
ctcgagccgtgaatggcgacgagaaatcgcactctgcttttcagaaagcacagagatgcgttagaagagtgttcgaattccctcattctcttcggcgccgtccaccgcttccggcgccggcggtggccccgtcatcgaattggccaccacttcatttctcaattccaatcgctcttacactccgatcagtaccgatgatcccggcaattcaagtaggggtccaaatgcaattactgtggggctacctccgg

SEQ ID NO: 133160 - DNA, 240 bp, Glycine max
gcttccttaagctccttagtgctgctccttgcagctctaattctatcccctcaagttcttgcaaactatgagaatcccccagtgtacaagcctcccactgagaaaccaccagtttagaagcccccagttgagaagcctcctgtttacaaacctccagttgaaaagcctccagtttataagcctccagtagagaagccaccagtgtacaagcccccagttgagaatcctccagtttacaag

SEQ ID NO: 133161 - DNA, 246 bp, Glycine max; identical to SEQ ID NO: 110187

SEQ ID NO: 133162 - DNA, 246 bp, Glycine max
taaaaaccagtttctctgtacttcatacattttcacaaaccccaagaagaatggaacagggaagaagaagaagaagctcttttggtcctatgtcctcaactattccttgtcttctcctccttttgttctgtctctcaggatctgctgaggcctacaagaattacacagttggcgactctttaggatggtttgacaatactgagaaatccaatgtcaattaccagaagtgggctgacagtaaagaat

SEQ ID NO: 133163 - DNA, 242 bp, Glycine max
aattgttgaggtggaaggaacccacactctccaaaacgtttatgactcacttgatgttcatctggggcagacttactctgtgttggttactgctgatcaaccaccccaagactacctcattgtcgtcacgacacgattcacctcccaagtgttgaatgctacctccatttttcgttacagtaactctggtggaggtgttactggccttttcccttgggggccaactattcaagttgattggt

SEQ ID NO: 133164 - DNA, 248 bp, Glycine max
cctgccagtagtcatatgcttgtctcaaagattaagccatgcatgtgtaagtatgaactaattcagactgtgaaactgcgaatggctcattaaatcagttatagtttgtttgatggtatctactcggataaccgtagtaattctagagctaatacgtgcaacaaaccccgacttctggaagggatgcatttattagataaaaggtcaacacaggctctgcctgttgctttgatgattcatgataactc

SEQ ID NO: 133165 - DNA, 247 bp, Glycine max
gtcgcactttgcgttttctgcgtcatctccgattccccgacaatggccacccaaatgagcaagaagagaaagttcgtagctgatggagtgttcttcgctgaactgaacgaggttctgacaagggagttagccgaggacggatactccggcgtggaagttagggttacgccgatgcgcaccgaaatcatcatcagagccaccagaacccaagccgttctcggtgagaagggaaggagaatcagggaac

SEQ ID NO: 133166 - DNA, 246 bp, Glycine max
tctttgcgcagttccctacctctcctttcaagatgcagatcttcgtcaagaccctcaccggaaagaccatcacccttgaggtggaaagctctgacaccatcgacaacgtcaaggccaagatccaggacaaggaaggaattcccccggatcagcaacgtctcatcttcgccggaaagcagctcgaggacggccgtaccctcgccgactacaacatccagaaggagtcaacccttcaccttgtccttc

SEQ ID NO: 133167 - DNA, 246 bp, Glycine max
gagagaatgagtacggtgggagaagggaaggtgagcagtaatggtcatggatgttgcaaatcagggccaggctatgcttccccactggaagccatttctggtcccagagagtctctcatttatgtaacctctgtctacacagggaccggaatagagaagccagactatttggcgacagtggatgtggatccaaactctccaacttattccaaagtcatccataggcttcctgttccttatttaggt

SEQ ID NO: 133168 - DNA, 246 bp, Glycine max
ctcttctgaaacgccactttttctgctttctctctcattaataataatattattgccttactctttttccacaatggagttgggatgcatactccattttcttcaggacaagaacattttgatcactggagccactggctttcttgccaaagttttgttggagaagatattgagggtccaaccaaatgttaagaagctttaccttcttctaagagctgcagatgccaaatctgccactcatcgctt

SEQ ID NO: 133169 - DNA, 244 bp, Glycine max
ctcgagccgcaaattctctgtgttgtgttgtgtacttgtgttaattgtgttgttgttgtaggaaatttaagtgaagagagaatgatgatgaagtctgctatgtgtgcattggtgcttgtggcactggttgtggttgaagtggggcccatggctgaggctgcggtgacttgcaacccaacacagttgactccttgtcttccggcaattaattcaggttctgcaccttcgagtgcttgttgccaga

SEQ ID NO: 133170 - DNA, 246 bp, Glycine max
gttgttaccatttgctcccagtacagagcttaaccgagcttcacaaagatgaatcgggaaaagttgatgaagatggccggttcggttagaactgggggaaagggtaccatgagaagaaagaagaaggctgtccacaagacaacaaccacagatgacaaaaggcttcagagcaccctgaagagaataggggtgaatgccatcccggctattgaggaggtcaatatctttaaggatgacgtagttatc

SEQ ID NO: 133171 - DNA, 245 bp, Glycine max
ccgattgctagaatggaatttcgatgctcagtcatctcttttaccattctcttctctcttgctcttgcaggagagagccatgtccatgcatcgctacctgaggaagattattgggaagctgtttggccaaacactcccattcccactgcactgcgagagcttctaaagcctctccctgcaggtgttgaaatcgatgaactccctaagcaaattgatgatacacagtacccaaaaacattcttcta

SEQ ID NO: 133172 - DNA, 242 bp, Glycine max
tttagtttgtgtaaccaatgctacagtgagggaaaggtgccttcttcatttaagcaggatgagtacagatttaaagagtatggaagtgagggtgaagccatgaaagataagtgtatgtgcttcagtttgcaattccataatgaaaagtagatagtggcattcgattttttgtcttttgatttttttgttctactatcttgtattatcccatcttgtttatcctagcttttcaggtgtgaatg

SEQ ID NO: 133173 - DNA, 244 bp, Glycine max
tactcgagccgaatcggctcgagcggctcgagcggctcgagcggctcgagatcaaagtttcttccattctctgctctttgtcttcactgacacatatggggccttgttgagtgtgtttttgcaagagggtatggcgaaggacgttgaggttgctgagcgtggctccttctctgggaaggactaccaggaccctccaccagcaccactcattgatgctgaggagctcacaaagtggtccttttac

SEQ ID NO: 133174 - DNA, 243 bp, Glycine max
cttctgaatcacttagttgaattgaattatcttcaaaatgagagaaatccttcatgttcaagctggtcaatgtggcaaccaaattggaggcaagttttgggaggtgatgtgtgatgaacatgggattgatgccactggaaattacgtaggcaattcccatcttcaacttgagagggttaacgtgtactacaatgaagcaagtggaggacgctatgttcctcgagctgtgcttatggaccttga

SEQ ID NO: 133175 - DNA, 243 bp, Glycine max
gtgttcaacaggcaggcattgtatggctacgatccaccagtatctgagaaaaggccaaagatgacatgtgactgctggccatcatggtgttgctgttgctgtggtggttcaaggaagtccaagtcaaaaaagaaatcaggaaaaggtctcttcagtgtgttctccaagaacaagaacaagaagaaaatgatggggaaagactatgttagaaaagggtcagggtccatgtttgatcttgaagag

SEQ ID NO: 133176 - DNA, 245 bp, Glycine max
ctcgagccgcaggtttgtcctccccaatggattatgcactcaaagagacaagcccttttcttggagggggacaagtagttggtgggcgagttattcgcgggtacaggccatccagctcctatgaccttgttgaaccaatgcaatacctatttgtacgagttgtaagagctcgtttggctgggagcattgatccatatgtggaggtaaaggttggaaatttcaaaggaattaccaaacactatgag

SEQ ID NO: 133177 - DNA, 245 bp, Glycine max
tcccaggcgaggagaaagatggaggggaaggagcaggatgtgtcgttgggagcgaacaagttccccgagagacagccaattgggacggcggcgcagagccaagacgacggcaaggactaccaggagccggcgccggcgccgctggttgacccgacggagtttacgtcatggtcgttttacagagcagggatagcagagtttgtggccactattctgtttctctacatcactgtcttaaccgttat

SEQ ID NO: 133178 - DNA, 240 bp, Glycine max
ctttttattggtgaattgctatttgctacactatattttaaggacaattatacatagactatatggggttgatggctgcgaaccaaactcaattgttgtctaagatggccatcggagatggacatggtgaagcatccccatattttgatggatggaaggcttatgatgaaaacccctttcatcccaaagagaatcctaacggggttattcaaatgggtcttgctgagaatcagcttactt

SEQ ID NO: 133179 - DNA, 241 bp, Glycine max
ttatcattttcttactttcctctcacgctctgccacaaaactccgtctccgcaataacggaataaaaaaaacaagtttaattactattatggcgccgagggatcataagacaagcaacgctaaggctaacggtaacggtaacagcggggtgaaggaggtgcattttcgtggagtgagaaagaggccgtgggggagatacgccgcggagatcagagatcccggcaagaagagccgcgtctgg

SEQ ID NO: 133180 - DNA, 244 bp, Glycine max
atttgacatttcacgaccgcgttcttttctacggagcctcgaccaagaagaatcgcagagagaagagggtcagagtgagaaagagagagagagagagagaaactgagagaaattcgcaaaccctaatttcggaaagatcggcgatggctgcctccaaggatcgcgagaacttcgtctacatcgccaagctcgccgaacaggccgagcgatacgaagagatggtggaatcaatgaagaacgttgc

SEQ ID NO: 133181 - DNA, 243 bp, Glycine max
ctcagtgaaagagaatccgaggcgaagagaagagaaaaattaagatggaggggaaggagcaggatgtgtcgctgggagcgaacaagttcccggagagacagccgattgggacggcggcgcagagccaagacgacggcaaggactaccaggagccggcgccggcgccactggttgacccgacggagtttacgtcatggtccttttacagagcagggatagcagagtttgtggccacttttctgt

SEQ ID NO: 133182 - DNA, 242 bp, Glycine max
tgaccatgacctcgagcacgatcacgagcatgagcatgaccaccacgaggaccgcgatgatcacgccgccgtggcagctgtctccttggaagatctcaaactcaagatcattaagcaggtggagtattatttcagcgatgaaaatctgcccactgacaagtatctgttgggttttgtcaagaggaacaaggaagggtttgttcctgtatcagtaattgcttcttttagaaaaataaagaagc

SEQ ID NO: 133183 - DNA, 237 bp, Glycine max
gtcagagagaggatacgtcaggtcactacaatatatttgttggcgatctaagtcctgaggttactgatgctacgttgtttgcatgcttttctgtctatcccagttgttcagatgcaagggttatgtgggatcagaagactgggcgttcaaggggatttggatttgtttcattccgtaaccaacaggatgcacaaagctctataaatgatttgactggtaagtggcttggaagtagac

SEQ ID NO: 133184 - DNA, 241 bp, Glycine max
cgacaacctcctttctctctatctctagctccgatgagtgctctctctaactccagtagtagccacggcaattccttcctcaagatgcccgccatcaagtttaccaagctcttcatcaatggagattttgttgattccatatcaggaaggacatttgagactatagaccccagaaaagaagaggtaattgcaagagttagtgagggagataaagaagacattgatattgctgttaaagcag

SEQ ID NO: 133185 - DNA, 239 bp, Glycine max
  unsure (1)..(239): unsure at all n locations
tccatctgtcacaagagtttccctaccggtcaggccctgggtggccacaagcgctgccactacgacggcgggaacaaccacagtaacagcaacgccaacggaaacaacagcagcggcgccactacctccgacggcggcgctgcctcctcctcccacacgctccgtgggtttgacctgaaccttccggcgccgctgacggagttctggtcgccgatggggtttgatttcgggnagaagaa

SEQ ID NO: 133186 - DNA, 237 bp, Glycine max
gttgttaccatttgctcccagtacagagcttaaccgagcttcacaaagatgaatcgggaaaagttgatgaagatggccggttcggttagaactgggggaaagggtaccatgagaagaaagaagaaggctgtccacaagacaacaaccacagatgacaaaaggcttcagagcaccctgaagagaataggggtgaatgccatcccggctattgaggaggtcaatatctttaaggatgac

SEQ ID NO: 133187 - DNA, 232 bp, Glycine max
caacgccgcgccaccagatagttacacttttttcttcaactcaagagaagagacaacatggagaatgcagacatccctgagaatgccaacgagcattgcccaggtcctcagtctgaatctgctggaaaatctgatgcatgtgaagggtgcccgaatcaacaaatttgtgcgcctgcccccaaaggacctgaccctgatctggttgccattgcagaaagaatggctactgtga

SEQ ID NO: 133188 - DNA, 246 bp, Glycine max
cggaatcagaggctccccctaacttctggggccacaccccggaagaagaatactacacctcccaaggcgttcgcaacaccaagtcccactccgaaacccccaacggcaaaatcttcacccagtccttcctccctctcaacctccaaccccaccaagtcaaagccaccgtctttatgacccacggctacggctccgacaccggctggctcttccagaaaatctgcatcaacttcgccacctggggct

SEQ ID NO: 133189 - DNA, 232 bp, Glycine max
aatttctatctctcttatactctcactactctctttgctctttcttttctccactatggctgcacaagaaaacaacttccaagactacttgcctgtgatggccaacaagcttggtggggatggcctaattgatgaactgtgcaatgggttcgatcttttgaaggattctgataaaggggtcatcacttttgagagcctcaagaggaattcttacttgcttggtcttcagggt

SEQ ID NO: 133190 - DNA, 236 bp, Glycine max
gctgaaactgcagaagcggctggccgcaagcgtgctcaagtgtggcagaggaaaggtgtggcttgaccccaatgaagtcaacgaaatctccatggccaattctcggcaaaacatcaggaagttggttaaggatgggtttatcatcaggaagccaaccaagattcactcacgctcgcgtgctcgtaggatgaaggaggcaaagaagaagggccggcactctggttatggtaagagaa

SEQ ID NO: 133191 - DNA, 233 bp, Glycine max
catcaatctcgtttgttctcactaactattacttcatcatgtcgtcgagcacagttggtcaagtcatcaaatgcaaagctgcggtttcatgggaggcagggaagccacttgtgattgaagaagtagaggtggcaccaccacaagctggtgaagtgcgtttgaagatcctctacacctctctttgccacactgatgtttacttctgggaagccaagggccaaactccattgttt

SEQ ID NO: 133192 - DNA, 233 bp, Glycine max
cacagagctgagtgaaagatgggacgcgaagatcgaagaagtggaagatgaagaagaatgcaaaatctgggggttttgaatcacttggtctgaatcccaatgtgttcaaaggaatcaagcgcaaagggtacaaagtgcccactccaattcagcggaagaccatgcccaccatcctttctggctccgacgtcgttgccatggctcgcacgggctctggcaaaacggcagcgttt

SEQ ID NO: 133193 - DNA, 233 bp, Glycine max
  unsure (1)..(233): unsure at all n locations
ctcgagccgaatcggctcgagaacatcacaggactcgtggagtggcacggtaagaacgcgacctgnagggagttggtgaaccttgtggttgttgccggagacaggaggaaggagtcgaaggacttggaagagaaggccgagatgaagaagatgtacggcctgatcgagacctacaagttgaacgggcaattcagatggatttcatctcagatgaaccgtgtgaggaacggaga

SEQ ID NO: 133194 - DNA, 235 bp, Glycine max
ggcattgcttgggccttcggtggcatgatcttcgctctcgtttactgcactgctggcatctctgggggacacataaacccggctgtgacattcggattgttcttggcgaggaaattgtcgttgaccagggcgctgttctacatggtgatgcaggttctgggtgctatcgttggtgctggcgtggtgaaaggtttcgagggaaaaaccttctacggccaacacaacggtggtgcca

SEQ ID NO: 133195 - DNA, 238 bp, Glycine max
gaaggatattagtggaaatgccagagcattgaggaggttgagaacagcatgtgagagggccaagaggactctctcttccactgctcaaaccaccattgagattgaataccttgtatgagggtattgacttctacacaaccatcacccgtgcccgtttcgaagagcttaacatggacctattcaggaagtgcatggagcccgtggagaagtgtttgcgggatgctaagatggacaagag

SEQ ID NO: 133196 - DNA, 235 bp, Glycine max
atctttgtgaaaaattgatgtacaggttctggcatatcttctgatatcgtcatcatcgtctgcagccacacgggttgaggattggatattgaactgggggaaagacgagttcacagaaatggccactgcttcaattggaatggccttcctcgctttcgttgcctttgctatcagctcactcatctctggttacactctatgcaaccgaagctccatgtgaacctcacacttccta

SEQ ID NO: 133197 - DNA, 229 bp, Glycine max
gactttcaatgtgcctgccatgtatgttgcaattcaggctgtcttgtctctgtatgccagtggaagaactacaggtattgtgcttgattctggtgatggtgtgagccacacagttcccatatatgaagggtatgctcttcctcatgcaattcttcggttggaccttgctggccgtgatttaacggagtacttggtgaaaatccttactgagagaggatactccttcagc

SEQ ID NO: 133198 - DNA, 232 bp, Glycine max
gattgctagaatggaatttcgatgctcagtcatctcttttaccattctcttctctcttgctcttgcaggagagagccatgtccatgcatcgctacctgaggaagattattgggaagctgtttggccaaacactcccattcccactgcactgcgagagcttctaaagcctctccctgcaggtgtagcaatcgatgaactccctaagcaaattgatgatacacagtacccaaaa

SEQ ID NO: 133199 - DNA, 230 bp, Glycine max
gccagcctgctaacactaagctgtcaagcaacaagacagtcaggaggatccgggttagaggtggaaatgtgaagtggagggcactgagattggatactggaaattactcctggggaagtgaagctgtaactcgcaagactcgtatactagatgtggtttacaatgcctcaaacaacgagcttgtgcgtactcagactcttgtaaaaagtgctattgttcaggttgatgct

SEQ ID NO: 133200 - DNA, 228 bp, Glycine max
tggacctccgtgaatcgataagcaaccaaaccgacgtggccctgagcatctcaaagctcctgttgtcgaaagaagctcgggacaagaacctcgtgtattcgccgctgtcgttgcacgttgttctgagcatcatcgccgctggctccaagggccccacactcgatcagcttctctccttcctccgatccaaatccaccgatcatctcaactccttcgcctctcagctct

SEQ ID NO: 133201 - DNA, 232 bp, Glycine max
gaaaacctagtgcaccgtaagggttgtgaagcaggcagagaagagccatggtgcacgtttctttctaccgaaactatgggaaaacgttcaagaagcctcgtcgtccctacgagaaggagcgtttggacgccgagttgaagctggtcggtgagtacgggcttcgctgcaagagggagttatggagggtccagtacgccctgagccgcatccgtaacaacgccagaaacctatt

SEQ ID NO: 133202 - DNA, 233 bp, Glycine max
gttgctaaggtcaccggcggtgcacctaacaagctctctaagatcaaggtggtgaggttgaacattgcccaggttttgacggtgatttctcagaagcagaaggccgcgttgagggatgcctacaagaacaagaagtacttgcctctcgatctccgccctaagaagaccagggccattcgcaggaggcttactaagcaccaggcatcattgaagacagagagggagaagaagaa

SEQ ID NO: 133203 - DNA, 234 bp, Glycine max
aaagacggcgtcttcataaacgcctttcttctccgtttccgtttcctcgttcaaattcgctttttgatctgcgaaaatgagagagtgcatctcgatccacattggtcaggctggtatccaggtcggaaatgcttgctgggagctctactgcctcgagcacggcatcgggcccgatgggcaaatgccaagtgacaagacagttggcggtggtgatgatgctttcaatactttctt

SEQ ID NO: 133204 - DNA, 233 bp, Glycine max
tgaagactttgacaggcaagactattaccttggaagttgaaagctcagacacaatcgataatgtcaaagcaaaaatccaggacaaggagggtatcccaccagaccagcagaggttgatatttgctgggaagcaattggaggatggaaggactcttgctgactacaacattcagaaagagtctactcttcaccttgtgttgcgtcttcgtggtgggttttaaaagtctgagaat

SEQ ID NO: 133205 - DNA, 229 bp, Glycine max
gtgacaacgcagagcgtgttcttgagtcaattcaacttctcttggatcttcttgaggcccctgacccttgcacccttgagactttccttggaagaattcctatggtcttcaatgttgtcattctttctccccatggttactttgcccaagataatgtcttgggataccctgacactggtggccaggttgtttacatcttggatcaagttcgtgctttggagaacgagat

SEQ ID NO: 133206 - DNA, 227 bp, Glycine max
gtttcacaatcactttttgcgcttctctcactcgctcactcttcttcttcctcttcgtgtggttttctttctcgaactcgaacgaagatgcgtgagattcttcacatccagggagggcaatgcgggaaccagatcggagccaagttctgggaggtggtgtgcgcggacacgggatcgattcaacggggaggtagcaaggggacaacgagttgcaactcgagcgagtc

SEQ ID NO: 133207 - DNA, 229 bp, Glycine max
cgcaagcaaaaagaaagaatcccaggcgaggagaaagatggaggggaaggagcaggatgtgtcgttgggagcgaacaagttccccgagagacagccaattgggacggcggcgcagagccaagacgacggcaaggactaccaggagccggcgccggcgccgctggttgacccgacggagtttacgtcatggtcgttgttacagagcagggatagcagagtttgtggccac

SEQ ID NO: 133208 - DNA, 230 bp, Glycine max
  unsure (1)..(230): unsure at all n locations
aaagattctgtgccacattaccataaatgtgtgaaattctatgatggactttcgaagcagcttgtgcatcaaggtcatgtactagatctttttgcttgtgctcttgatcaggttggaattgctgaacttaaaactgctgttgaaagaaccggaggtcttgttgtnattgctgaaagttttggccattcagtgttcaaggattcactaaagcgtattttccaatcgggtga

SEQ ID NO: 133209 - DNA, 233 bp, Glycine max
ccaaacagcatccgcggcagcgacggtaaccctccaacaacaacacttccgctgcgaaaaatgtctctggtggcgaacgaggatttccagcacattctgcgtgtgctgaacaccaacgtggatgggaagcagaagataatgttcgcaatgacctccatcaagggtattggaaggagattcgccaacatcgcttgcaagaaggctgatgttgacatgaacaaaagggctggtga

SEQ ID NO: 133210 - DNA, 258 bp, Glycine max
aaacgctgcagcagctgcaacaagcgagttggtttgacagggtttaattgtcgatgtggtgaccttttttgtgctgtacatcgctactcagacaagcataattgcccatttgattaccgcactgctgctcgggatgccatagctaaagcaaacccagttgtcaaggctgagaagcttgataagatctaagatttgaagtcaaagtttcatggcctgagatgaagttatgcataatttcatcatgaaatgatccgagtt

SEQ ID NO: 133211 - DNA, 251 bp, Glycine max
ctttcatcgcttcggatcttcaatctcatctccgatctcaaaatgcccgccgtttatggagctcgcttgaccaccttcgaagactccgagaaggagagtgaatacggttacgttcgcaaggtttcaggacccgtcgtcgttgcggatggcatggctggtgctgctatgtatgaactcgtgcgtgttggtcatgataatctcattggtgaaattattcgtctcgaaggggattctgctaccatccaagttta

SEQ ID NO: 133212 - DNA, 258 bp, Glycine max
ccgaaggttcatccaatctccgaaggccttcaccggattgcaaccatgtcgaggagaaaggttagagagccaaaggaggaaaacgtgactctgggcccagctgttagagatggtgaacatgtttttggagtcgctcgcatctttgcctccttcaatgacaccttcattcatgtcactgatctgtctgggagggaaacacttgtccgcatcactggcgggatgaaggttaaagctgacagagatgaatcatctccatat

SEQ ID NO: 133213 - DNA, 258 bp, Glycine max
aaacgctgcagcagctgcaacaagcgagttggtttgacagggtttaattgtcgatgtggtgaccttttttgtgctgtacatcgctactctgacaagcataattgcccatttgattaccgcactgctgctcgggatgccatagctaaagcaaacccagttgtcaaggctgataagcttgataagatctaagatttgaagtcaaagtttcatggcctgagatgaagttatgcataatttcatcatgaaatgatccgagtt

SEQ ID NO: 133214 - DNA, 260 bp, Glycine max
gaggaagaggaaaaagaggattggagggtcgccacgtttagcaacaaccaaaccctctctactctttcttcttctcttcgctagggttttagcttcttcctcttcacttcgttcttctggcctctacaatgagcaacgacaaggacaccttcaacgtcgctgatctcacttccgctctcaacgaggacaatagagcagaccttgtcaatgctctcaagagcaagatacagagtttggctggacagcattctgatattcta

SEQ ID NO: 133215 - DNA, 264 bp, Glycine max
  unsure (1)..(264): unsure at all n locations
ggaaggtccccttgctgtgagaaagcacacacaaacaaaggtgcatggaccaaagaagaagatcatcgcctcatttcttacattagagctcacggtgaaggctgctggcgctctctccccaaagccgccggccttctccgttgcggcaagagctgtcgtctccgctggatcaactatctccgccctgacctcaagcgcggcaatttctaccctcgaagaagaccaacttcatcatcaaactnccatagcctccttggcaacaag

SEQ ID NO: 133216 - DNA, 261 bp, Glycine max
tttctttcgtcttaatttgttctcttcagccatggcgatggtgcaagatgaacgatgcgttcagaaaagctactggattgaacatacgacggacttgtccgtagagtcaatgatgctcgattccaacgcctctgatctcgacaaggaggagagacccgaagttttgtccctactaccaccatatgaaggaaaatcagttgtagaacttggagcaggtattggaagattcacagttgaattggccaagaaagctggccagtt

SEQ ID NO: 133217 - DNA, 217 bp, Glycine max
tcctctctccaaacacttactctttgtcttcatggctctctttctctctgctattttaatcttgatggtcccttctagtaatgcctattggccaccttcacctggctactggccaagttccaaattcaggtccatgagtttttacaaagggtttagaaacctctggggccctcagcaccaaagcctagaccaaaatgcattaacaatctggcttgat

SEQ ID NO: 133218 - DNA, 255 bp, Glycine max
ggaaagtttctcaaagccaaggaccagaagtcgctctacgaagctctccagaagatcaaagaaggtttctttttctttctttctttgcactgagccttcaaatcaaattcatgatctgttggctgcactggcagagctgatgcttctgggcttcatttccctgcttctcacggttacacaaaacggcattaccaaaatctgcgttcgtcccagtttgacgcgccacatgctcccttgtaatctcgacgccggtga

SEQ ID NO: 133219 - DNA, 253 bp, Glycine max
gctggtgatactcacttgggaggtgaagattttgataacagaatggtgaaccattttgttcaggaattcaagaggaagaacaagaaggatattagtggaaatgccagagcattgaggaggttgagaacagcatgtgagagggccaagaggactctctcttccactgctcaaaccaccattgagattgattccttgtatgagggtattgacttctacacaaccatcaccgcagcccgtttcgaagagcttaaca

SEQ ID NO: 133220 - DNA, 254 bp, Glycine max
ataggctctctctctagggtttgatcagactcaagggtttaagccatgggaaaaaggaaggcaaaggcaaagcctcctccaaagaagcgaatggataagctcgataccgtcttcagctgccctttctgcaatcatggcagcagcgtcgaatgccgccttgacatgaagaacttgataggggaagctatttgcgggatatgccaagagagctttagcactaccatcacagctttatcagagccaatagacatata

SEQ ID NO: 133221 - DNA, 255 bp, Glycine max
ttgagacctattcttcttcttacatactcgttttggatacctcaaataatcaccaatgttattcgcgattcacgcaaaccattgcatcctcattatatcttagggataactgttactcggctcgcaatcccattatatatttttggttgccctaacaacttcatgcgcatagagccagacaagagctggtgtgtgtgtttggctgtatttattggacttcaagctgcaattctcctacttcagcactatcttggg

SEQ ID NO: 133222 - DNA, 253 bp, Glycine max
gggtgccaaagaagttgatgccacaaggcagaaccttggatggtcacatgagccattccacgtgcctgaggatgtcaaaaagcattggagtcgccacacccctgagggtgctgcacttgaagctgagtggaatgctaagtttgctgagtatgaaaagaaatacaaggaggaagctgcagaattgaaatctattatcaatggtgaattccctgctggttgggagaaagcacttccgacatacactccagagagc

SEQ ID NO: 133223 - DNA, 251 bp, Glycine max
ctctgccaacatgggtatctccagagattctatgcacaagaggcgtgccactggtggcaagaagaaggcctggaggaaaaagagaaagtatgagcttggtcgccagcctgctaacactaagctgtcaagcaacaagacagtcaggaggatccgtgttagaggtggaaatgtgaaatggagggcattgagattggatactggaaattactcctggggaagtgaagctgtaactcgcaagactcgtgtactag

SEQ ID NO: 133224 - DNA, 254 bp, Glycine max
tgttgttgtaactcgttcttcttcttttgttgttctgtgtttgtgtttgttttttctctcacctgaaaatgtcttgctgcggtggtaactgtggttgcggaagctcctgcaagtgcggcaacggctgcggaggctgcaagatgtacccagacttgagctacactgagtcaaccaccaccgagaccttggtcatgggagtggcacctgttaaggctcaatttgagggtgctgaaatgggtgtgcccgctgagaac

SEQ ID NO: 133225 - DNA, 249 bp, Glycine max
ggcgtcttcataaacgcctttcttctccgtttccgtttcctcgttcaaattcgctttttgatctgcgaaaatgagagagtgcatctcgatccacattggtcaggctggtatccaggtcggaaatgcttgctgggagctctactgcctcgagcacggcatcgggcccgatgggcaaatgccaagtgacaagacagttggcggtggtgatgatgctttcaatactttcttcagcgagactggtgctggaaa

SEQ ID NO: 133226 - DNA, 250 bp, Glycine max
aggacacaagaagtacgacaaattaagacagggcctaagagaaggtgttgtagagaggatacagcgagagcaaaatgtattctcattgggttcgattgatgcttctcattgcttgcattcttccagctttggttgaatgcagagtgaggcactacaaatttcatgtggtgtctaaacaaactaatagattgtgttcaagcaaatctattgtcaccattaatggcaagttcccgggacccactctttacgc

SEQ ID NO: 133227 - DNA, 249 bp, Glycine max
cgccgggggtaagtctaagtgcagtaccgttgggattcccatgacggttaagacagtgatgtatagaaacagaaaagtggccacaaactctgctatccctgctctgtcttaaccgtcatgggagtcgccggggctaagtctaagtgcagtaccgttgggattcaaggaatcgcttgggccttcggtggcatgatcttcgccctcgtttactgcaccgctggcatactcaggggacacataaacccggcg

SEQ ID NO: 133228 - DNA, 249 bp, Glycine max
ctcagctcgaagaaaactgggaagggaaagagacccggaaagggtgggaaccgcttttggaaatccattgggcttggatttaagactcccagggaagccatcgaaggaacctacattgacaagaagtgccccttcactggcaatgtttccatccgtggccgtatcttggctggaacatgtcacagtgctaagatgaacaggactattattgttaggaggaattatctccattttatcaagaagtaccag

SEQ ID NO: 133229 - DNA, 250 bp, Glycine max
ctgattcttactgggtcagcagataattctgttcgcatgtttgatcgccgcattctcaccactaatggagttgggtcacccatccataaatttgagggtcacaaagctgctgttctttgtgttcagtggtctccagacaaatcatctgtatttggaagttcagctgaagatggtctcttaaacatttgggactatgagaaggttggtaaaaagatagagcgatctggaaaatcaataagttctcctccag

SEQ ID NO: 133230 - DNA, 248 bp, Glycine max
cttggaatccaaaaatgagagaaatcatcagcattcacataggtcaggccgggatccaggttggcaactcctgctgggaactctactgcctggaacatggcatccagcccgatggcatgatgccaagtgactcctccttcggtgtagcccacgacgccttcaacaccttcttcagcgcaaccggatccggcaagcacgtccctcgcgccgtactcgtcgatctcgagcccaccgtcatcgacgaatcc

SEQ ID NO: 133231 - DNA, 251 bp, Glycine max
ccgccggcgacttgacccagatgcaggctcagatcgaactcgtcggcaccgtgttcggggtggcgccgcccagtgttccgatgccgaaatccatcaacctcgccaatgatggtttcctctgtcgcaaatccaccgctcaagggaagaatgcgagtagtgtgtgttgcacgagagatcccaagttcaaaactaacattactacggatgaagagtttctgccacgtcagagtggtgatcttaccattatgtat

SEQ ID NO: 133232 - DNA, 250 bp, Glycine max
cgcacatagtttcttctgataataatttttctgtcactacccactcctttctctgtctccatcgtttcgcattgcacaagcactctctctttcccttaccctttttcaggtttcaacgctccaactatccatggcaaaccgctggctcagacccgatgtgtatccactgttcgctgcggttggtgctgctgttgggatctgtggattccaactggttcgtaatatctgcatcaaccctgaagtcagggtg

SEQ ID NO: 133233 - DNA, 253 bp, Glycine max
ctctcttctcgctcttggctttacgctcttcactcactctcattcattcatttccaccgttcatggatccactaagcgtgtggggtaacacgcccttggcgacggtggatcccgagatccatgacctcatcgacaaggagatgcgccgtcaatgccgcggaatcgagctcatcgcctccgagaacttcacctccttcgccgtcatcgatgccctcggcagcgctctctcgaacaactactccgagggcatgcc

SEQ ID NO: 133234 - DNA, 243 bp, Glycine max
gttgaatcgtgaaaatgttcagaaaccagtacgacacggacgtgaccacatggagccctgcggggaggctgttccaggtggagtacgctatggaggcggtgaagcagggctcggcggcgatagggctccgatcaaagacccacgtggtcctcgcatgcgtcaacaaggccaactccgaactctcctcgcaccagaagaagatcttcaaggtcgacaatcacatcggcgtcgccatcgccggcc

SEQ ID NO: 133235 - DNA, 243 bp, Glycine max
gaagaagaagaaatagagggttttggtgtttggtgtttgaatcgtgaaaatgttcagaaaccagtatgacacggacgtgacgacatggagcccggcggggaggctgttccaggtggagtacgcgatggaggcggtgaagcagggctcggctgcgatagggctccgatccaagacccacgtggtcctcgcatgcgtcaacaaggctaactccgaactttcatcgcaccagaagaagatcttcaa

SEQ ID NO: 133236 - DNA, 243 bp, Glycine max
gagactcccatgttccaattttggcaccactgcctattggttttgctgtgtttctagtgcatttggctacaattcctgttacagggactggtatcaaccctgctagaagtctaggtgcagccattatcttcaacaaggaccaagcttgggatgaccattggatattttgggttgggcctttcattggggcagcacttgcagctttgtaccatcagatagtgatcagggccatccccttctcgt

SEQ ID NO: 133237 - DNA, 247 bp, Glycine max
gctaattctgattcaatgcaacagccctcacaaaatctaagcctgctgagtgttgatgacattttgggttcagtttcggagacaacacatcaagtaggacggatttctatttcaacaccgtttgacatgccttacaaggaaatggctctccattgtgaggccctcctcgtgggaaagcagcagaagatgtccactttcatgggtacccttccaatgcaaggatattcatttaggattcctgctcctg

SEQ ID NO: 133238 - DNA, 248 bp, Glycine max
ttgagacctattcttcttcttacatactcgttttggatacctcaaataatcaccaatgttattcgcgattcacgcaaaccattgcatcctcattatatcttagggataactgttactcggctcgcaatcccattatatatttttggttgccctaacaacttcatgcgcatagagccagacaagagctggtgtgtgtgtttggctgtatttattggacttcaagctgcaattctcctacttcagcacta

SEQ ID NO: 133239 - DNA, 251 bp, Glycine max
tccagttgtttcaattgaggatccacttgaccaggatgactgggagcactatgctaagctaactgctgaagtttgagccattgtacagattgttggtgatgatctcttggttaccaaccccaagacggttcagaaggctattgatactatagcatgcaatgctcttctcctcaaggtcaaccatattggatctgtgactgagagtattgaggctgtcaggatgtccaaaagagctggctggggtgtcatgg

SEQ ID NO: 133240 - DNA, 237 bp, Glycine max
gtcagagtgagaaagagagagagagagagagaaactgagagaaattcgcaaaccctaagatcggaaaccatcggcgatggctgcctccaaggatcgcgagaacttcctctacatcgccaagctcgccgaacaggccgagcgatacgaagagatggtggaatcaatgaagaacgttgcgaatctcgacgttgaactgactgtggaggagcggaatttactttctgttgggtacaagaa

SEQ ID NO: 133241 - DNA, 237 bp, Glycine max
ctgattcttactgggtcagcagataattctgttcgcatgtttgatcgccgcaatctcaccactaatctggttgggtcacccatccataaatttgagggtcacaaagctgctgttctttgtgttcagtggtctccagacaaatcatctgtatttggaagttcagctgaagatggtctcttaaacatttgggactatgagaaggttggtaaaaagatagagcgatctggaaaatcaata

SEQ ID NO: 133242 - DNA, 238 bp, Glycine max
tgctcgagccgaatcggctcgagctcgacgctttgtgtgatagagagcctcattctcatggacattaccggcgatattttcaggcagagcataacggaaatgcttgcggagtccccttccggtgcgccagaacttcacgttctcgccgtcgatgacagcctcgttgatcgcaaggtgatcgaacggttgctgaagatttcttcctgcaaagtgacggttgtggagagtggaacgcgcg

SEQ ID NO: 133243 - DNA, 240 bp, Glycine max
cgcacatagtttcttctgataataatttttctgtcactacccactcctttctctgtctccatcgtttcgcattgcacaagcactctctctttcccttaccctttttcaggtttcaacgctccaactatccatggcaaaccgctggctcagacccgaagtgtatccactgttcgctgcggttggtgctgctgttgggatctgtggattccaactggttcgtaatatctgcatcaaccctga

SEQ ID NO: 133244 - DNA, 241 bp, Glycine max
gagctaacaagagattcaagaccggcatggctaatgaagaggaacagaaaaaccacctcttcggcatcaaagatctcggtcacaagactctccttcagagtgatgcactctatcagtatatacttgaaaccagtgtctatccaagagagcacgagtgcttgaaagagatacgcaagatgactgcaaaacacccactgaacatcatggcaacaccagcagacgaaggacaacttctgagcat

SEQ ID NO: 133245 - DNA, 235 bp, Glycine max
gctaattctgattcaatgcaacagccctcacaaaatctaagcctgctgagtgttgatgacattttgggttcagtttcggagacaacacatcaagtaggacggatttctatttcaacaccgtttgacatgccttacaaggaaatggctctccattgtgaggccctcctcgtgggaaagcagcagaagatgtccactttcatgggtacccttccaatgcaaggatattcatttagga

SEQ ID NO: 133246 - DNA, 237 bp, Glycine max
gcaaaaagaaagaatcccaggcgaggagaaagatggaggggaaggagcaggatgtgtcgttgggagcgaacaagttccccgagagacagccaattgggacggcggcgcagagccaagacgacggcaaggactaccaggagccggcgccggcgccgctggttgacccgacggagtttacgtcatggtcgttttacagagcagggatagcagagtttgtggccacttttctgtttctct

SEQ ID NO: 133247 - DNA, 233 bp, Glycine max
ctcgagccgattcggctcgagaaaagagagagaagggtaaggtaaacctagagtggtgaatcgaatctgcaaagatggaagctgtttctcgaagaagaggtggaggcattttcgaaagcctctacaaggtcgttatgcgtcgcaactctgtctacgttaccttcgtcatcgctggcgccttcctcggagaacgggctgtagattatggagtccacaagctctgggaggctaat

SEQ ID NO: 133248 - DNA, 153 bp, Glycine max
gaacaatcacttgcttttgatagttatatgattccagaagatgatctaggattagggcaattacggttactagaagtggacaatagagtggtagtgccaactaaaactcatctgcgtgttattataacattcgctgatggacttcataattgg

SEQ ID NO: 133249 - DNA, 236 bp, Glycine max
cccaggcgaggagaaagatggaggggaaggagcaggatgtgtcgttgggagcgaacaagttccccgagagacagccaattgggacggcggcgcagagccaagacgacggcaaggactaccaggagccggcgccggcgccgctggttgacccgacggagtttacgtcatggtcgttttacagagcagggatagcagagtttgtggccacttttctgtttctctacatcactgtctta

SEQ ID NO: 133250 - DNA, 241 bp, Glycine max
gagctaacaagagattcaagaccggcatggctaatgaagaggaacagttaaaccacctcttcggcatcaaagatctcggtcacaagactctccttcagagtgatgcactctatcagtatatacttgaaaccagtgtctatccaagagagcacgagtgcttgaaagagatacgcaagatgactgcaaaacacccactgaacatcatggcaacaccagcagacgaaggacaacttctgagcat

SEQ ID NO: 133251 - DNA, 244 bp, Glycine max
gagaggagatgtcggtggagcagaaagcagcagggaaggaggaggagggaaaactgcagaagggaattgcagagttctacgacgagtcgtctggcatatgggagaacatttggggcgatcacatgcaccacggcttttatgacccggattccaccgtttctgtttctgatcatcgcgctgctcagatccgaatgatccaagaatctcttcgttttgcctctctgctttctgagaacccttctaa

SEQ ID NO: 133252 - DNA, 257 bp, Glycine max
tgctctacacgaagcagcaagaaaacgagtaatgcgatattcagacctccgtaagattgacaagaaggttcgacgccattttcatgatgatatatccgttattgttttattcttaaatcacgaccttatttccagaggcacagtgctagacccggcactttcaattcgaagtgctcttgatcactgacttgtatcattgtaagcagtcttgtaccgatacctgaagcatacgccattggtttgctggtacctggcta

SEQ ID NO: 133253 - DNA, 248 bp, Glycine max
agctgtctctacagcttctatagatgatgcagcggttattaatgatctagtaatcaagttagagaggtgccgggcaaatcttccaccagtgttcatgatgaaaccaattcaatttgagaaggatgatgacacaaactaccatatggatgtgattgctgggcttgccaacatgagggcccgcaattacagcattcctgaggttgacaagcttaaagccaagtttattgctggatgatcattcctgcaat

SEQ ID NO: 133254 - DNA, 253 bp, Glycine max
gtgtatctctgtctaccttaccttacctcacctcacaagggacaaagataaaaaatgaagatcattgagaaaattcacgcagcctcggctgatccaaacagggtggtgttctcatttgagttcttcccgcccaagactgaggatggggtggacaatctgtttgagaggatggactgcatggtggtgcacaacccctcgttttgcgacatcacttggggtgctggagggacaacggctgatttacattggaaat

SEQ ID NO: 133255 - DNA, 249 bp, Glycine max
ctcagacccctcttatttacagagctgttccaagctggtttgttagagtggagtcgttgaaagagaaattgttggaaaacaataagaagacctactgggtccctgattttgtcaaggataagcgatttcacaattggctggaaaatgcaagagattgggcaattagtcgtagtacattttgggggacccctctccctatatggattagtgaggatgaggaggaagtagttgtcatagatttgttgcaaa

SEQ ID NO: 133256 - DNA, 254 bp, Glycine max
cgctcctaagtcctaatacctgtttcatgctaatgtcattgtgttagtggctttcgggtttgattagcaatcttaggtttccacaggaaaaggccatcattttctgtgacaatctgagtgcaatctgtttagccaaggatcaagtccatcatgagaggactaagcacattgacattagataccacttcatccattttgagaaaagggtcaaagtccagaaagttgatacgagggagaatcaacagatatgttca

SEQ ID NO: 133257 - DNA, 251 bp, Glycine max
agcaaatcctccttcaccagatgaggacaacaagctagtggtgctcaagagtcccaatgctgtgaacccccttgtttggggaggctattatccacttcttaccattgatgtttgggagcatgcttactaccttgattttcagaaccggcgccctgattatatatcagtgttcatggataagcttgtttcctgggatgcagtgagttctagacttgaacaagcaaggctttaattaacagtgcatgatgctg

SEQ ID NO: 133258 - DNA, 248 bp, Glycine max
cggctcgagattttcagggatccattcagaaggggcaacaatatcttggttatctgtgatgcttacactccagctggagaacccattcccactaacaagaggcacgatgctgccaaggttttcagccatcctgatgttgttgctgaagagacatggtatggtattgagcaggaatacaccttgttgcagaaagatatccaatggcctcttgggtggcctgttggtggtttccctggccacagggtcca

SEQ ID NO: 133259 - DNA, 248 bp, Glycine max
ggacatatcattgtgactaccattgggggtagaaatggtcagcccaagcagactataagctacatggcagagcgtgttgtagggcatggatcatttggagttgtcttccaggctaagtgcttggaaaccggtgaaactgtggctatcaaaaaggttcttcaagataagaggtacaagaaccgggagctgcaaacaatgcgccttcttgaccacccaaatgttgtcgctttgaagcctgtttcttttca

SEQ ID NO: 133260 - DNA, 251 bp, Glycine max
aaaaagcgaagacagcacagcactgcactcttcgcaacacaacaaaaaaagacaacccagagagcgcgtcttaataaacgctcttctctgaaaacccccatttcttttcttctttcttcttctctttcgcttcttcgatcttcgatcttcgtcgctgaaaatgagagagtgcatttcaatccacatcggccaggccgggattcaggttggaaacgcctgctgggagctttactgcctcaacacggcattca

SEQ ID NO: 133261 - DNA, 250 bp, Glycine max
ttatcatggcttcgggatcaccttcctcttcctcttcctccaattacgatgtgttcctcagcttcagaggggaagacacacgtcttggttttactggccatctctacaacactcttcagagcaagggaatccacactttcattgatgatgaggagcttccaagaggggaggcaataacaccagcacttatgaaggcaattcaagattccagagttgccatcactgtgctctctgaacctatgcttctgtt

SEQ ID NO: 133262 - DNA, 249 bp, Glycine max
tttcattcattgacatggttgctggtgactactacaggatactgaaggtgaagcatgatgccacggatgaagagttgaagaaggcttataaaaagttggccatgaaatggcacccagataagaaccttgaagaccctcttaggaaagaagagtttgaggccaagtttaaacaagtttctgaggcctatgatgtgctaagtgaccccaagaagcgccagatctatgacttgtacggtcctatccccttaa

SEQ ID NO: 133263 - DNA, 251 bp, Glycine max
gctgtggttatcatcttcttcttcctctttcttagatctcttctttctctacgccgcacgccgaaaccatggccggaaaaggagagggtcctgctatcggaatcgatctcggaaccacctactcttgcgtcggtgtgtggcaacatgaccgcgttgaaatcatcggcaacgtccaggggaacagaaccacgccgtcttacgtcggattcactgacaccgagcgtctcatcggtgatgcatcaagaatcaag

SEQ ID NO: 133264 - DNA, 246 bp, Glycine max
cggctcgagacgaaaatccccaatcctgcgttgtgttgcgacttgcgagccatgagaggggtcgtgaaagcgtttgcggggaatctgttgttccatggaagaaagactcagactcagtgcattcgctcctacagtctgatcccaatggtgatagagcactcttcccgagttgagagggcatacgacatcttctcgcgccttctgaaggagcgcattatctgcatcaacggacccactccgacgaca

SEQ ID NO: 133265 - DNA, 246 bp, Glycine max
tctcgagccgattcggctcgagatccttacctgtggatgagcataccacaggaaaatgggacggcatgtgttgattgatgactgtgcattgggaccaaaagacatggacagctttggcctctctctctttcaaccagactttctcatctgttctttctacaaggtctttcgagaaaatccatcagggtttggatgcctttttgtcaagaaatctgctatcaccactcttgaatctcatcttgtgca

SEQ ID NO: 133266 - DNA, 244 bp, Glycine max
ctcgagccgcctgagtgtaaacttggattaaatgatagagtattattagaggcacaaggaagaacaaccaagggaaaatcaattgacttggaagacatcaaatttcatcagtgtgtgcgtttggcccgatttgagaatgatcgaacgatttcatttatccctcctgatggatcatttgatttaatgacatataggctcagtacacaggttaagcctttagtttgggtggaacacaagttgaaaa

SEQ ID NO: 133267 - DNA, 245 bp, Glycine max
aaccatgcaaattgtagctcatctcaaatgcagttcctccaagacttcagaaatcaaatgcttagtgacattaaagacttctcgagatcatctcaaactgggctattcataaattcttgttttgctcattgtcagtctgagagacaggagacatggtttgctgatgactctccccttatcgaggacaagccaattgcagttgctattggagactggtattttgatcgagaagtgtcaaagctatt

SEQ ID NO: 133268 - DNA, 217 bp, Glycine max
gttcattcattgatatggatgatggtgactattacaggatactgaaggtgcagcatgatgtcacggatgaacgattgaagaaggcttatatggagttggcgatgaaatggcacccagataagaaccttggagacccttcttaggaaagaagagtttgaggctaagtttacacaagtttctgagggctatgatgtggtaagtgaccgcaggaagcgcc

SEQ ID NO: 133269 - DNA, 265 bp, Glycine max
caatcccaacctttcagttcccccacaaataaaatagttaccacaacccactatttgttgcttgctgcgagcgaatccctctctctatctctcacacacactttctctctctctctctctcacccagatcttgtagcaatggcgagcgctcccactccacgcgaagagttcgtgtacatggcgcagctggcggagcaggccgagcgctacgaggagatggtggagttcatggagaaggtctccgcctccgcgagagcgaggagct

SEQ ID NO: 133270 - DNA, 247 bp, Glycine max
gccaaggggaaggaagggttgggacaaggcgtgattttatactgaaagactatgcaactgatgaagttattggaagggcaacaagcaaatgggtaatgatgaatcaggacaccagacgactccagaaggtttctgatgatgttaaagaagagtatttggttttctgtcctcgagagcccaggttagctattccagaggcagatagtaatagcttgaagaaaataccaaaattggagaccctgctcag

SEQ ID NO: 133271 - DNA, 248 bp, Glycine max
gaccatcacccttgaggtggaaagctctgacaccatcgacaacgtcaaggccaagatccaggacaaggaaggaattcccccggatcagcaacgtctcatcttcgccggaaagcagctcgaggacggccgtaccctcgccgactacaacatccagaaggagtcaaccctctacttggccttccgcctccgtggtggattgaagacctcggtaaagactctcactggcaaaactataccctagaggtcga

SEQ ID NO: 133272 - DNA, 246 bp, Glycine max
aatttacagattcctgcaaatggaggaatgctcactgccctataccaattccactctcgcgatgtgtcaagattcgtgctagggttaacaagtttttttgtagtggtgaatggtttgtgctcgtttcaaatctatggcatgccagcatttgatgacatggaatcaggctacactacaaggatgaagaagccatgcccgtggtggctgcgtgcatttattagggtgttctttggttcttgtgcttct

SEQ ID NO: 133273 - DNA, 248 bp, Glycine max
attttgttctaccatcaaaaaagtacgctgacgtgatcattcctcgtggaggtgataatcatgttgccattgatttgattgtgcaacatatccgtacaaagctcggccaacatgatctatgcaaaatatatccaaatgcctatgttattcagtctacattccaggtatctttaaacttagtttgccaattttattattttattttattttccaccttttatgatttaaaatttgggaagatccagtgg

SEQ ID NO: 133274 - DNA, 244 bp, Glycine max
gattgctagaatggaatttcgatgctcagtcatctcttttaccattctcttctctcttgctcttgcaggagagagccatgtccatgcatcgctacctgaggaagattattgggaagctgtttggccaaacactcccattcccactgcactgcgagagcttctaacgcctctccctgcaggtgttgaaatcgatgaactccctaagcaaattgatgatacacagtacccaacaacattcttctat

SEQ ID NO: 133275 - DNA, 241 bp, Glycine max
aaaagccataggttactactcttcgccttttcctttgcaattgttaccaaacaattcttgcttagcccttacaagcaagcattaacaacaatgaagaaagtagtgttaaaggtgggcttacatgatgatagaatcaagcgaaaagttatgagaacagcatctggtctttcaggggttgaatcagtttctattgacatgaaagacgagacaatgaccttattagggaacatgatccagtgaa

SEQ ID NO: 133276 - DNA, 242 bp, Glycine max
caggaaagcattcatttaacagaaaaagtttgcatcacattgggaatggtccaaacccctatgaacaagcaatatcaattattgggaagaccttggctgcatttgatcaggataacttgattccttgttttggatttggggatgcatcaacacatgatcaagatctctttagtttctatccagatgaacgaatttgcaatggatttgaagaagtgttgagtcggtataggaaattgttccta

SEQ ID NO: 133277 - DNA, 241 bp, Glycine max
caggcgtgggagtgctctcctgggaaagagtttgcgtggaacttgttgtccctctttactacttctggaatgttgtttctagaagtgagcttgctggcttttttgcttcaaggaaatagtaccactggcttagaggcgttgacacgaacttttggtatatcagggattattgttggttttgatatcttgttgaaggtaattctgtcgttttctctgtgagcttgctgctttcgttattata

SEQ ID NO: 133278 - DNA, 238 bp, Glycine max
tctcgagccgaatcggctcgaggcaccagtttcaccgcacgaataatttgttgtttggagcgttccgagaaaaactctgtaaacatgttggtttaccaggacctccttacaggtgatgagcttctctctgactccttccgttacaaggaaattgagaatggtatgctgtgggaagttgaggggaagtgggttgttaaaggagcagttgatgtagacattggtgcaacccttctgctga

SEQ ID NO: 133279 - DNA, 237 bp, Glycine max
ggagttggcatcaaattggtggaagatataaagaaaggtgcccaagaactcttaaacctttcaatagaagagaagaaaaagctttggcagaaaccaggagagacggaggggtttggtcaaatgtttggttataaagaggggccatctgattgggtagatttcttttacattttcacacttccatcccatttaaggaatccccacctattccctaatataccactgccttcagggaaa

SEQ ID NO: 133280 - DNA, 239 bp, Glycine max
gttacttttgaagttgggaggggagcaaatatatgctggtccattaggccgccactgttcccatctgattcagtactttgaggctattcaaggagttcctaagatcaaagaaggttataatcctgcaacctggatgttggaagttacatcagcaggcacagacgcatctattaaggtcaacttcaccaatgtgtacagaaactcagaactatacgggagaaacaaacattgatccaaga

SEQ ID NO: 133281 - DNA, 235 bp, Glycine max; identical to SEQ ID NO: 127427

SEQ ID NO: 133282 - DNA, 217 bp, Glycine max
  unsure (1)..(217): unsure at all n locations
gcgaagacgacaccaccttcgtcacttggcgtcctcctgaattcgccagagaccttcttcctaactacttcaaacacaacaacttctccagcttcgttcgccaactcaacacctatggttttagaaagattgtgccacaccgatgggagttcgcgaacgaattcttcaagaagggagagaaacacttgctgtgcgagatccntagaagaaaaacggc

SEQ ID NO: 133283 - DNA, 236 bp, Glycine max
ctcgagccgtagcaagctagctaggttgaaaatagtttggttttgtagtaagtgaggtgaggtgccaaaatggtgaagataactcttggtactttcgatgactcttttggtgttgcctctcttaaggcttatttggcagagttccatgcaactctgattttcgtgttcgctggtgttggttcagccatcgcttacaacgagcttacaaaagatgcagccttggatccaacggggct

SEQ ID NO: 133284 - DNA, 236 bp, Glycine max
tagcaatcaaccatctttggatcaaccctccaatttgtttacaatatggaacagaccctctcctttgaatttgagcatgaatttgttcaaaacacggcaagagtgaaatctgttgatatgcatccaactgagccatggattctactgggtttgtattcaggaactatttctatttggaactatcagacaaagactgaagagaagtctttaaaaatcagcgaattccagtgagatca

SEQ ID NO: 133285 - DNA, 235 bp, Glycine max
caggcgttgagttgagaatggaaggagggaaacgaggcacgattctggtcaccaacgacgacggtatcgatgctcctggcttaagagcattggttcactccctcgtcaacgccaaccttttcaacgttctagtgtgcgctcctgatagcgagaaatcacctgttagccacagcatcacttggctccatccagtagctgttaagcaagtacagatcgagggaacaccgcatttgct

SEQ ID NO: 133286 - DNA, 236 bp, Glycine max
gtgcctctagggttatcatatctccatttccatttcctctctctcagtttccaagaatcttaagctatgggaaagtcttacccaaccgtgagcgctgattaccagaaggccgttgagaaggcgaagaagaagctcagaggcttcatcgctgagaagagctgcgctcctctaatgctccgtttggcatggcactctgctggaacttacgacgtgagctcgaagacggtggtcccttc

SEQ ID NO: 133287 - DNA, 236 bp, Glycine max
ctcgagccgttgtgtttgttttttctctcacctgaaaatgtcttgctgcggtggtaactgtggttgcggaagctcctgcaagtgcggcaacggctgcggaggctgcaagatgtacccagacttgagctacactgagtcaaccaccaccgagaccttggccatgggagtggcacctgttaaggctcaatttgagggtgctgaaatgggtgtgcccgctgagaacatggctgcaaatg

SEQ ID NO: 133288 - DNA, 237 bp, Glycine max
agtgatttggagtttggagcgactgaactaatcattaatttgcactcgctgtttcagcttcatcacccttcttttgcatcatttatatctcttgagaaatggcacaagaaacctttctattcacatctgaatctgtaaacgagggtcaccccgacaagctgtacgaccagatctctgatgcagtacttgatgcgtgccttgaacaggaccctgacagcaaggtgcctgtgagacatg

SEQ ID NO: 133289 - DNA, 217 bp, Glycine max
ggcgatcgtggcggcgaccgtggcggtttcggacgtggattcggcgggcgaggacgcggaggtgacaggggccgaggccggcgccgaggcccccggcgcgaggaagaggagaagtgggtcccagtgaccaaactgggccgcctggtgaaggagggaagaatccgaagccttgaacagatctacctccactcgctcccgatcaaggagcaccagatca

SEQ ID NO: 133290 - DNA, 182 bp, Glycine max
gtttgtccttgaggtttgagcgcgaaggggagacaaacgaactagctccagttgatttctttgtgagtacagtggaccctttgaaggaacctcccattataacagccaacactgtcctttcaatcctctctgtggatatcctgttgacaaagtcatctgctatgtctcagatgatggtgcat

SEQ ID NO: 133291 - DNA, 251 bp, Glycine max
gcagcacctgaagcacatcctcttctggttgctaaagaggaaactaacgcgctaaaacaagaaatccaaacattgcaaaagggtatcagttatttgtttgaaggaggaaataagactatggcaattgatgaatacaactgctagagaagaatctcgaaacttggatatatcatattcgttcaatgaagatgaacattatgttacaagaaattcaagcttgaaagataaggagggaacattaaagcggcaaa

SEQ ID NO: 133292 - DNA, 248 bp, Glycine max
gcctgttgggagtttcacgaggaggacctggagtcagtgatattgcgaacagtctggagaaaagagggatcaacatgctttttgtattgggtggaaatggcacacatgctggtgccaatgcaattcaccacgagtgccgcaaaagacggctgaaggtatctgtaattggcgtgcccaaaactatagacaatgatattttattgatggacaaaattttggctttgatactgctgttgaagaagcacaaa

SEQ ID NO: 133293 - DNA, 255 bp, Glycine max
ctaacctacctctttttcttctctctcaacaacttcaccttcttcctcctcgatcatgtctcacttcaagggcaagtaccatgatgagcttatcgccaatgctgcgtacattggcactcctggaaagggtattttgctgctgatgagtcaacagggacaattggcaagcgtttggccagcatcagtgtagagaacattgaatccaacaggcgagctcttagggagctgcttttcactgctcctggtgttcttcaa

SEQ ID NO: 133294 - DNA, 249 bp, Glycine max
ggggtccagaagggccgcaccgtggagatcttcaacagcttcgaactcctctacgatccttcctcccactccctcgatcgcaccttcctcgagaagaagcaagaactctataagaaggtgttcccgcacttctaatactggggtggtattcgactgggagtgatgcagaggaatcagacatgcatattcacaaagctttgatggatatcaatgaaagtccagtttatgttcttctcaatccttctatca

SEQ ID NO: 133295 - DNA, 251 bp, Glycine max
cgcaagcaacaagaaagaatcccacgcgaggagaaagatggactcgaaggagcaggatgtgtcgttgggagcgaacaagttccccgagagacagccaattgggacggcggcgcagagccaagacgacggcaaggctaccaggagccggcgccggcgccgctggttgacccgacggagtttacgtcatggtcgttttacagagcagggatagcagagtttgtggccacttttctgtttctctacatcactgt

SEQ ID NO: 133296 - DNA, 261 bp, Glycine max
aatttcttttctaattaaactgaaatgcagaatcatgatagacaactatggaagttaggaacactgccaccgggtctcataacattctggaaacgcactttccctctgaaccgatcttggcacatcttaggtcttggtacaaccccaatgtcaaccaaagagatatcgagcagtctgctgttgtacactataatgggaacatgaaaccttggcttgagataagtattcccaagttccgaagttactggacgaatatgttga

SEQ ID NO: 133297 - DNA, 248 bp, Glycine max
ctgtcatattgaacccagggcaacagatatataaatacaaatcgccacgccgctacgtcttcttcagccatttagctccatagctgcagcattagggtttttcatctgcttcaatggggaagggaacaggagttttggtaagagaaggaacaagactcacactctctgtgtgaggtgtggccgccgcagcttccatctccagaagagtcgttgcgccgcttgtgctttccccgccgcacgcactagga

SEQ ID NO: 133298 - DNA, 253 bp, Glycine max
gcaagaatggcacttcgttgcttggtgatgtccctttctgttctcttcactcttggtcttgcgagagaaagccatgccagagacgaagatttttggcatgctgtttggccaaacactcccattccaagttcatgcgagatcttctaaagcctggccctgcaagtgttgaaatcgatgatcaccctatgcaaattgaagaaacacagtacccgaaaaccttcttctataaagaagacttcatccaggcaaaaca

SEQ ID NO: 133299 - DNA, 256 bp, Glycine max
cactttcaattttgttggaagacttctgggccctagaggcaattctttgaaacgggtagaagctacaactggttgtcgtgtgtatattagaggaaaaggatcgataaaggatccagacaaggaagagaaattagaggaagaccaggttatgagcatctcaatgaaccgctgcacattttgattgaggctgaattacctgctaatgttgttgacataaggctcaggcaggctcaggaaattattgaagaactgctca

SEQ ID NO: 133300 - DNA, 226 bp, Glycine max
  unsure (1)..(226): unsure at all n locations
gcctagccaatcctaattcctatacctatccttattactacataactctaaagtaagtaagaaaaatagagcaatttcacaacacaacacaactcttataattgtgtgagttattaattgagtatgggaaggtccccttgctgtgagaaagctcacacaaacaaaggtgcatggactaaagaagaagatgacagactcatatcttatattcgagctcaggcgangc

SEQ ID NO: 133301 - DNA, 247 bp, Glycine max
aggaaaacttaagtacctacagaggatggcttacaccaacaccattgtttatccatggacttccatccctctgcttgcatactgcacaattccagctgtgtgtctcctgactggaaagttcatcatcccacactaaacaaccttgctagcatttggtttatggctctatttatctccatcattttaactagcgtgctggagctccgatggagtggtgttaccatcgaagccctttggcgtaacgagc

SEQ ID NO: 133302 - DNA, 245 bp, Glycine max
ctcgagccgctcgagccgcgcaagggtcttcgcggcgactctgttgtcctcatggggaagatcaccatcactaagcgctctgtcaggatgcacgctgagaaaaccggaaacaatgcctatctcaaccttaccccctccttgtcggcaatgtgggattgattttcaccaagggtgacctgtcggaggtcagtgaggaggttgctaagtacaaggttggagctcctgctcgtgttggtttggctgct

SEQ ID NO: 133303 - DNA, 242 bp, Glycine max
ggcctcgagagcagtgctattgttggctatgtgtgtgcttccggccatggttgtggccattcgcccagcaaagaaccctttttgcgtgaagggtcgcgtctactgtgacccttgccgtgctggtttgagacctcagcaaccacctacattgccggtgctgagattatgttgcaatgcaagagcagggttagcaacgaggttgtgtacaccaagaaggggtacactgactcaactggagcata

SEQ ID NO: 133304 - DNA, 243 bp, Glycine max
aatttcttttctaattaaactgaaatgcagaatcatgatagacaactatggaagttaggaacactgccaccgggtctcataacattctggaaacgcactttccctctgaaccgatcttggcacacttaggtcttggctacaaccccaatgtcaaccaaagagatatcgagcagtctgctgttgtacactataatgggaacatgaaaccttggcttgagataagtattcccaagttccgaagtt

SEQ ID NO: 133305 - DNA, 246 bp, Glycine max
ataagccataggttactacacttcggcttttcctttgcaattgttaccaaacaattcttgcttagcccttacaagcaagcattaacaacaatgaagaaagtagtgttaaaggtgggcttacatgatgatagaatcaagcgaaaagttatgagaacagcatctggtctttcaggggctgaatcagtttctattgacatgaaagacgagaaaatgaccttattagggaacattgatccagtgaatgca

SEQ ID NO: 133306 - DNA, 247 bp, Glycine max
ataaggatcaaattgggatgagattgactttgaattcttggggaatctgagcggtgacccatacattcttcacaccaatgtgttcagtcagggcaaaggcagcagagagcaacagttctatctgtgttcgacccaactgcagatttccatacctattccattctttggaatcctcagcgcataatgtaagcacttgtcaatggcctaagtaccctcaagcattcctcaaaaatgttttatatttata

SEQ ID NO: 133307 - DNA, 247 bp, Glycine max
tcggaagactattgacctagaacagggatgggatttcatgcagaagggcatcaccaagctcaagaacattctagaaggcttgcccgagcctcaattcagctccgaggactacatgatgctttacacgccatctacaacatgtgcactcaaaagcctcctcatgactattcccaacaactttatggacagtataaggagtcttttgaagagtacatcgtatcgacggtattgccttctttgagagaga

SEQ ID NO: 133308 - DNA, 245 bp, Glycine max
gtttagtgttatatctccgcagtggatcaaatcaaacaaacacttccatccatcaccctttctcctctgcttagggttttgatcgcatcggatcttcactctcttctccgatctcaaaatgcccgcgtttatggagctcgcttgaccaccttcgaagactccgagaaggagagtgaatacggttacgttcgcaaggtatcaggaccagtcgtcgttgcagatggcatggctggggctgctatgta

SEQ ID NO: 133309 - DNA, 247 bp, Glycine max
gaaactctaacgaaagagcgagaaagcgaagacagccatggcgtcgtttcttcaatcgtttctggatccgaagaagaactggttcgccgctcagcacatgaaatccctctccaaacgcctccgcaaaatgggctccgatacgacgatttgtacgatccttactacgatctggatgtgaaggaggcgctgaatcggcttccgaaagaggtggtggacgctcgccacgcgcgtcttaaacgcgccatcg

SEQ ID NO: 133310 - DNA, 261 bp, Glycine max
ttcccctcttcttcccctctctcgtgttatccgctttagttttctcgggaaaatcatggtgaaaggtccaggtctctactctgacatcggcaagagagctcgcgatcttctgttcaaggattatcagaatgaccacaagtcaccatcaccacttacacttccactggagtggaaatcacttcaactggagtcaggaaaggtgaaatatatttggccgatgtcagcactaaggtgaagaacaagatcatcacaactgatgtc

SEQ ID NO: 133311 - DNA, 255 bp, Glycine max
gtttgttgttgtaactcgttcttcttcttttgttgttctgtgtttgtgtttgttttttctctcacctgaaaatgtcttgctgcggtggtaactgtggttgcggaagctcctgcaagtgcggcaacggctgggaggctgcaagatgtacccagacttgagctacactgagtcaaccaccaccgagaccttggtcatgggagtggcacctgttaaggctcaatttgagggtgctgaaatgggtgtgcccgctgagaa

SEQ ID NO: 133312 - DNA, 244 bp, Glycine max
ctttttctttctttgaccttttaccggttgttgcgttggcgcaaatggcattcttcagaagcgtttctgcactttctcgactctgctctcgcgtgggccaacaatctaatctggcgaattcagtagatggctccaaactccgagctccagtaacactgatctttattctgagttgaaggaactggttccagagtatcaggaacgtgttaagaagctgaagaaagatcatggaagtgttgaatta

SEQ ID NO: 133313 - DNA, 243 bp, Glycine max
actcgagccgaatcggctcgagctttgttcttctaccttattttcattccctagtcaaggaatttcatctctgcagcaggtacttttagaaaagaaaaaatgctgaagatttgctgcattggggtggatatgtggggggtccaacaatggcagtcattgcactgaaatgcccctcaattgaagtggctgttgttgacatctctaaatccaggattgcagcatggaacagtgaccagctcccta

SEQ ID NO: 133314 - DNA, 245 bp, Glycine max
tttgattctctgttctctgttttgttctgtttcgcgtattgtcttcatacaggaacttgaacaatgaagaatgcaaagggcaagggagcagcaagggcctcaaaagaatcactgaagcccgttgtgaccgaaaggttggaaagcggaaggcttccggtaagcctgggagaagtagtgcaccaaagaaggagaagaaggccaagaaagaccccaacaagcctaaaagaccacccagtgctttcttt

SEQ ID NO: 133315 - DNA, 246 bp, Glycine max
gtggttatcatcttcttcttcctctttcttagatctcttctttctctacgccgcacgccgaaaccatggccggaaaaggagagggtcctgctatcggaatcgatctcggaaccacctactcttgctcggtgtgtggcaacatgaccgcgttgaaatcatcgccaacgaccaggggaacagaaccacgccgtcttacgtcggattcactgacaccgagcgtctcatcggtgatgcggccaagaatca

SEQ ID NO: 133316 - DNA, 253 bp, Glycine max
tctcgagccgaatcggctcgagcgtgctcgagctcaaactcactctttctaagttttttctatactcttctctctctctgtctaccatggttatctccaaaaccacctccgaatccgacgtctctgtccatcaaccttcgcttctcgatatgtcagaacttcgcttcccaggtttaagatgccggaggagtcgataccaaaggaggcagcgtatcaaataataaacgatgagttgatgttggatgggaaccca

SEQ ID NO: 133317 - DNA, 244 bp, Glycine max
cagcaattcacactggtctttgcttctcgttactcatttctcaccaaactttctattcttctcagtctcagatcagaaccttagccatggcagcgttccagaagatcaaggtcgccaaccccatgtcgagatggacggagatgaaatgactagggttatctggaagtcaatcaaggacaagctcattttgcccttcttggagttggacatcaagtattatgacttaggccttccttaccgtgat

SEQ ID NO: 133318 - DNA, 241 bp, Glycine max
ccctctcttgctctctttttaacaactatgcctcccactgatggagacttggatcttaggccaccttctcaatcttccttcacagccggcgactacacgttcgccgatgttgagaatttgggcattgcgctaagtatctcaaccaatcgctcgtcacgtttggtttcccggcttctctcgatctcttcgcaaatgaccccgtttcaattgcgaggacttgcaattgcatttacttcttgct

SEQ ID NO: 133319 - DNA, 242 bp, Glycine max
ggagcttgaacgtggtgaaaaaggaattggagatggcacagttagctatggaatggatgatggtgatgacatttacatgcgctcttggactggcacgattattggcccccataatactgtagtgaaggaagaatttatcaactgaagctgttttgtgataaagactacccagaaaagccccctagtgttcggtttcattcacggatcaacatgacttgtgttaatcatgaaactggagtggt

SEQ ID NO: 133320 - DNA, 241 bp, Glycine max
ataatctgctttcaacattttccggaaacggagatttcagcagtttttgaatctgtggatgagccggaggaggcactgaagctgttgaacagggcgatgaagttgttggaggataagccaggcagcagagcacgattgcagggattgaggcacgaatgggagtgatgtattacatgattgggaggtatgaggactcaaggaactcgtttgagagtgctgtggcgaaactcagggctagtgg

SEQ ID NO: 133321 - DNA, 240 bp, Glycine max
caaggtcaagatcggaatcaacggatttggaagaattggccgtttggtagccagagtggctctgcagagagacgatgttgaactcgttgccgttaacgaccctttcatcaccaccgattactgacatacatgtttaaatacgacagtgttcatggacactggaagcatcacgatgtcactattaaggacgagaagacccttctcttcggtgacaagccagtcactatttttggacacaga

SEQ ID NO: 133322 - DNA, 241 bp, Glycine max
gccccactcaaccaccacaccactctctctgctcttcttctacctttcaagtttttaaagtattaagatggcagagacattcctatttacctcagagtcagtgaacgagggacaccctgacagctctgcgaccaaatctccgatgctgtcctcgacgcttgccttgaacaggacccagacagcaaggttgcctgcgaaacatgcaccaagaccaacttggtcatggtcttcggagagatca

SEQ ID NO: 133323 - DNA, 276 bp, Glycine max
gctgaaacaaggagcaccccctcagacgaagaagtgattctagcgtcagcgcggccaaagaagcgagcgggaagaagagtcttcaaggagacaaggcaccccgtctaccgaggagtgcgtcgcaggaacaagaaaagtgggtctgcgagatgcgagtccccaacaacaactcacggatttggctcgggacatacccaacgcccgaaatggccgcacgtgcgcacgacgttgcggcgctcgcgctcaggggaaagtccgcgtgcctcaacttcgcgg

SEQ ID NO: 133324 - DNA, 270 bp, Glycine max
ctgcatcaaacgcttaccctttctgaaattgcaaaacagattactgatgcagttcaggctagagcagagcaagataaataccatggagtaattctccttccagaagggctgatagagagtattcctgagtgtatgcactcttgaaggaaattcatggtttactcagacaaggtgttgctgttgacaagatatcttctcagcttaccccatgggcatctgccctatttgaatttctgccaccctttattaggagacagttactcctttacc

SEQ ID NO: 133325 - DNA, 272 bp, Glycine max
agcgtaacaaggatcacaagaaattccaaccactaaagaccattttgtgtgtcaaaaaccactacaagagaacacactgtgacaagagctacacttgcagcagatgcaacaccaagaagttttcagtcatgcagaccttaaaactcatgaaaaacactgcggtaaggataaatggctttgttcatgtggcacaacattttcaaggaaagacaagctttttggacacattgctctattccaaggccatacaccagctattcctttggatgaaa

SEQ ID NO: 133326 - DNA, 258 bp, Glycine max
aaagattccatttccagaagtagcactgcactagtactctcttttgtttagaaaaaaaaaaatggttcaacaggaagtgcgtaaaggtccttggacagaacaggaagacttcaaattgtggcccttgttgcctgtttggggacgtaagatgggactttaaagcaaagggtatcagtttgaattacaacgggaaagattgccaattccgggggggtaattacacaacacggggcctcaaacggggaaagatgacccccc

SEQ ID NO: 133327 - DNA, 275 bp, Glycine max
cggctcgagaaaaccctatctcgctcgcactcacccacacaccatccgttctacggttctagtctcaacttctgctcttccaactcctacaacgcttttctctgcactcatgggcaaggtcaagatcggaacaacggatttggaagaattggccgtttggttgccagagtcgctctgcaaagagacgatgttgaactcgttgccgttaacgaccctttcattaccaccgattacatgacatacatgtttaaatacgacagtgttcacggacactg

SEQ ID NO: 133328 - DNA, 275 bp, Glycine max
attttgtacaggtctttacttgtagccaatgctggagattgccgagctgttttgtcccaccatggaagggccatagaaatgtccaaagatcataggccaaactgcatcaatgaaaggacacgagttgagtcctaggtggctctcattgatgatggttacctaaatggccagttaggtgtcactcgtgctcttggagactggcacattgaaggaatgaaggaaatgagtgaaagaggaggaccactgagtgctgaacctgaacttaaattgatgac

SEQ ID NO: 133329 - DNA, 268 bp, Glycine max
gtagttatttcaagaattatgtcaagacaattttgacaaggaagaatactataactggaattgaatatagaaatgaccccaccatttttggttgggaattgattaacgaacctcggtgcctaactgatcttctggtgatactctccaagattggatagaggaaatgtcagcttttgtcaaattgattgacaagcgccatcttgtgactgttggacttgaaggtttctatggtcctaatgatccgaaaagattgactgtgaaccctgag

SEQ ID NO: 133330 - DNA, 269 bp, Glycine max
gaccggaaagacaatcacccttgaggtggagagctctgacaccattgacaatgttaaggccaagattcaggacaaagagggtatcccaccagatcaacagaggctgatctttgctggaaagcagcttaggatggccgtacccttgctgattacaacatccagaaggagtccactcttcacttggtactccgtctacgtggtggaatgcaaatctttgttaagactctgaccggaaagacaatcacccttgaggtggagagctctgacac

SEQ ID NO: 133331 - DNA, 268 bp, Glycine max
ctttcaatcttcacttctctctttctctcaaaacacaccaaaccattcattcattcattcatagtttcattcaacaaatcaaataatatcaaacaaataaatgtcacctaacaatccttccaggattttcccgacgcggtggctccgcaccacacccatgtcgtgtccccgcaccagtgctgctccgccgtggtgcaggagatcgccgccccggtctccaccgtgtggtccgtcgtgcggcgcttcgacaacccgcaggcctacaagc

SEQ ID NO: 133332 - DNA, 270 bp, Glycine max
agcgtaacaaggatcacaagaaattccaaccactaaagaccattttgtgtgtcaaaaaccactacaagagaacacactgtgacaagagctacacttgcagcagatgcaacaccaagaagttttcagtatggcagaccttaaaactcatgaaaaacactgcggtaaggataaatggctttgttcatgtggcacaacattttcaaggaaagacaagctttttggacacattgctctattccaaggccatacaccagctattcctttggatga

SEQ ID NO: 133333 - DNA, 264 bp, Glycine max
tcaagattgttccagaacccttcaaaaccctctcttctctctttcttcgatcgcttcgcctgatattctttttggctgagatcaagcaaaaatgagcgtggttggatttgattttggtaatgagagtgcattgttgctgtcgcaagacaaagggggattgacgttgtgctcaacgatgagtcaaagcgtgaaacacctgcaattgtatgctttggtgacaaacagcggttccttgggacagccggggctgcttctactatgatg

SEQ ID NO: 133334 - DNA, 269 bp, Glycine max
ctgtcatattgaacccagggcaacagatatataaatacaaatcgccacgccgctacgtcttcttcagccatttagctccatagctgcagcattagggtttttcatctgcttcaatggtgaagggaaagggagttttggtaagagaaggaacaagactcacactctctgtgtgaggtgtggccgccgcagcttccatctccagaagagtcgttgcgccgcttgtgctttccccgccgcacgcactaggaaatataactggagcgtcaagg

SEQ ID NO: 133335 - DNA, 271 bp, Glycine max
cggctcgaggtcaaaagaagcatctcgtgtatcgtctcctaaaaaaaatggaattgatgtgtcattgttcgagctttcttcttccgccggagaatcctaacacgacgtgttcgctttctctaaagtagctctcgttgttctcaaccaaagcctcccgagatttgctcccctgctttgggaccacgctcaagtgcgagtttgtgctgatggaggtgccaatagggtgtatgatgaaatgcctcttttcttccctcatcaacaaccttcccat

SEQ ID NO: 133336 - DNA, 272 bp, Glycine max
tttgaattgatatgctatcatggttcagtgtccttttgaattgatatgctatcatggtgtatcctgtgtggaagtggtttgagaaacaagatgggattcgatctctgcagaagaatagtaatgatcctcaccagagttctataacatctaccttgaaaggccaaagggtgacgcttatgggtacgacttagttgtcgttgatgccatgcataaggctaactatgccagtcggatatgtcattcatgccgaccgaattgtgaagcaaaagtta

SEQ ID NO: 133337 - DNA, 271 bp, Glycine max
gccgttgctctgcttcaaccttgcggaagaagaagacgccgcagccatggtgaagtactccagagaacccgacaatcccaccaagtcctgcaaggccagaggcgctgacctcagagtgcatttcaagacactagggagactgcctttgccatcaggaagttgcccctggttaaagctaaaagatacctggaggatgttttggcccacaaacaggccatccctttccgacgcttctgtggtggtgttgggaggacagcccaggctaagagca

SEQ ID NO: 133338 - DNA, 268 bp, Glycine max
cgcaaagcgagtggtgtgctaccataacctggcggtgagcttcgtgatccccactgacggcccaccttcaaaagcccaaaaggcagttctggaggcccttccggactcaatttcccacaccttccgccggacaccaaaatcgaaaccctgatctcccacaccgtcctccgctcccttccttccctccgccaagcattccactccctctccgccacaaacaccctctccgccgtcgtcgtagacctcttctccaccgacgccttcgacg

SEQ ID NO: 133339 - DNA, 267 bp, Glycine max
ctcgcccgtgactcaccgcagagctgccccgcccctgaccccaacctctacaacaagccagtcatcggaatcgtcagccatcccggcgacggcgcctccggccgcctcagcaacgccaccggcgctcctacatcgccgcctcctatgtcaaattcgttgaggccgccggcgcccgtgtcgttcccctcatctataccgagcctccggagaagcttctcaagaagctcgaattggtaaatggggttctcttcactggtggatgggcta

SEQ ID NO: 133340 - DNA, 268 bp, Glycine max
ggccaggcaagccccactcaaccaccacacctctcctcgttcacgctacccctttctgctcttcttctacctttcaagttttaaaagtataaagatggcagagacattcctatttacctcagagcggtgaacgagggacaccctgacaagctctgcgaccaaatctccgatgctgtcctcgacgcttgcctcgagcaggacccagacagcaaagttgcctgcgaaacatgcaccacaaccaacttggtcatggtcttcggagaaatca

SEQ ID NO: 133341 - DNA, 266 bp, Glycine max
tcaagattgttccagaacccttcaaaaccctctcttctctctttcttcgatcgcttcgcctgatattctttttggctgagatcaagcaaaaatgagcgtggttggatttgattttggtaatgagactgcattgttgctgtcgcaagacaaagggggattgacgttgtgctcaacgatgagtcaaagcgtgaaacacctgcaattgtatgctttggtgacaaacagcggttccttgggacagccggggctgcttctactatgatgaa

SEQ ID NO: 133342 - DNA, 265 bp, Glycine max
tagcaagctagctaggttgaaaatagtttggttttgtagtaagtgaggtgaggtgccaaaatggtgaagataactcttggtactttcgatgactcttttggtgttgcctctcttaaggcttattggcagagttccatgcaactctgattttcgtgttcgctggtgttggttcagccatcgcttacaacgagcttacaaaagatgcagccttggatccaacggggctggtggcagtagctgtggcccatgcatttgcactgtttgt

SEQ ID NO: 133343 - DNA, 263 bp, Glycine max
cgactctccgccatgatgagctgggacaggaaacacttcttaatttgttacttcgaaactaccttcactacaacctatatgatcaggctgagaagttgaggtccaaggctcctcgatttgaacacattcaaaccagcagttttgtcgttatctcttctaccttgggaaaattcggacaattcagctggagtatacagatgcaaaagagtctctcctgcaggccgcccggaaagctcctgttgctgcaaggggttttcgaattc

SEQ ID NO: 133344 - DNA, 270 bp, Glycine max
gttgggtgttggaaaggcagagcaagaggagtaacataatcaaacatggcggttaggcaaagagccgtgtctgcacttccaactcttctacgcactctccgcaaagaacctttgaagcctcgcaacacgcacacgtcaatgccttgccccctcttcgacgcgctttctctttgtacgatcagatcaacctcatcgatcaagtccccgaagaccagctccgatttcaagggtataatgatacggggtttactgtaaatggggttgaatacg

SEQ ID NO: 133345 - DNA, 269 bp, Glycine max
ctttttcaacttcgcggtgtgagtgagacggagagtgctaagcaatcgtcttctcttctcggagcttggctttgcttatcgattctctctcctctcgtttctctaattccaaggtttgtaaaagaggcagatgccgaggatattcaaccccttgtttgcgacaatggaactggaatggtcaaggcaggatttgctggtgacgatgctcctagggctgtctttcccagtattgttggccgacctcgacatactggtgttatggttgggat

SEQ ID NO: 133346 - DNA, 256 bp, Glycine max
attgggtttgcctgtaattatcaaagctggtgttgaccacaaaattgaattcagagaaggtcctgctctaccagttcttgatgaaatgattaaagatgagaagaaccatggaagctatgcttcatctttgttgatgcggacaaggacaactacctcaactaccacaagaggttgatagagcttgtaaaagttgggggcgtgatcgggtacgacaacaccctatggaacggatctgtggtggcacccctgatgctct

SEQ ID NO: 133347 - DNA, 261 bp, Glycine max
aaacagagaatgcccctaatctatgtgaaattatatacatatcaaatctttaggggactggcgtatatccatactgtaccaggaatctgccatagggatttgaagcctcaaaatcttttgttgatcgactcacacaccaagtcaagctctgtgattttgggagtgcaaaagttctggtggagggtgaatcaaacatttcatacatatgttcacggtactatcgtgccccagagctaatatttggtgcggcagaatacacaa

SEQ ID NO: 133348 - DNA, 261 bp, Glycine max
gcagagtagagcagcagagaagagagaaaacggcactgcagccgtagaaggaaaaccgaccatggtgcacgtctccttttacaggaactatggtaagacgttttaagaagccccgccgtcgtacgagaaggagcgtctagacgcggagctgaagctggtgggggagtacgggctgcggtgcaagagggagctgtggagggtgcagtacgcgctcagccgcatccgcaacaacgcgcggaatctccttaccctcgacgagaa

SEQ ID NO: 133349 - DNA, 263 bp, Glycine max
gtttctctgtctgcttcttcactttctctcgtttcaatcgaaaccaaaacaaaaacatgggcagaaaattcttcgtcggtggcaactggaaatgcaatgggaccactgaggaggtaaagagattgttactactttgaatgaggctaaagtccctggagaagatgtcgtagaagttgttgtgagccctccttttgtgttccttcctgttgtaaaaagtttgctgcgccctgatttccatgtttcggcacaaaactgttgggttc

SEQ ID NO: 133350 - DNA, 263 bp, Glycine max
cgaaaggacatggaccggatcaagggcccgtggagcccggaggaggacgaggcccttcagaagcttgtggagcggcacgggcccagaaactggtcgctcatcagcaggtccattccgggcggtctgggaagtcatgcaggcttcggtggtgcaaccagctgtcgccccaggtcgagcaccgggccttcacaccggaagaggacgagaccattattcgggcccatgcccggtttggtaacaagtgggccaccattgcgcgcctc

SEQ ID NO: 133351 - DNA, 260 bp, Glycine max
aacgaatcgaaaaaagaaagatcatggcgatggcaaacttggctcgacggaagggttacgccgtcgttttgtcgtcgaggtcgtcgctttgtctgacaaggtggagggggttcgcgtccggactgacgaaaacgacgtcgtggtcatcggcggcggtcccggcggctacgtggcggccattaaagcggcgcactgggtctgaaaaccacttgcatcgaaaaacgtggcactctcggcggtacctgcctcaacgtcggatg

SEQ ID NO: 133352 - DNA, 257 bp, Glycine max
gtggtccacacaatcacactatttcaggcttagcagttgcactgaagcaggctatgacaccagaattcaagaattaccaaaagcaagtacttagcaactgctcagcatttgcacagatttgttagaaaaaggctacgaacttgtatctggtggaactgacaaccatttagtgttggtgaacttaagaaacaagggttgagaaggtactggaagcagttcatatagctgccaataaaaataccgttccaggggatgtg

SEQ ID NO: 133353 - DNA, 261 bp, Glycine max
cgacccgagaccgtacatcaacaaacgcgagtggacccgacgcgtcgagtctctcgccacggcccaaatccagatcatagccatgttatgcgaagacgaagaagaaaaccccgagacagtggcaaggcacccgtgactgacattaacggctttaccggtcaaagcagaagctacagcgaggaaagcctgctcccgcgcctcgccacgtggcagaaatccaaggacgtggcgcagaggattctcaattcggtggactacgag

SEQ ID NO: 133354 - DNA, 260 bp, Glycine max
gtcttctcaatcttgggtaccaagcagttgcttatattgaagcgtctgcattcatctatcaggatggaaagattctaattgaggttgatcatctacaagatgtccctggcccatacatcagataaagggtgctaataaagatgcagtagcagcagcaggttcaatgcttaaattggatggttcatatactactaagagttatcttgaaataattttggaaagactaccggctatagaaagaacttctggtgggattcatt

SEQ ID NO: 133355 - DNA, 261 bp, Glycine max
ctcacgcatttcctcgtttttttcttcccttttctctttctccggcgacgatctcagattccggccactcctctcgccggcgagcccttactcttccctcctccgtcgagccctctcgattcgaatcgttcccagcctcgcaccaccatgaatcccgaatacgattatttgttcaagcttttgctgattggagattctggtgtaggcaagtcatgtcttctcctgaggtttgctgatgattcataccttgacagctatatc

SEQ ID NO: 133356 - DNA, 258 bp, Glycine max
gaaatttcttagacaaaaaacaaggatcagaaccgttgaatcaagttgaggaagatggcactagtctctggaggaagatcaacactgaaccctaacgcccctctttacattcctgcgcgtttcgccaagtggaggatttctctccggaatggtggcagctggtgacgacgctgacatggtaccatgactactggctaagccagcagcacgatgagggagccttctacggcgaggacgacgggtttgatggcaatgatg

SEQ ID NO: 133357 - DNA, 260 bp, Glycine max
ctcgagccgttgtgtttgttttttctctcacctgaaaatgtcttgctgcggtggtaactgtggttgcggaatctcctgcaagtgcggcaacggctgcggaggctgcaagatgtaccagacttgagctacactgagtcaaccaccaccgagaccttggtcatgggagtggcacctgttaaggctcaatttgagggtgctgaaatgggtgtgcccgctgagaacgatggctgcaaatgtggaccaaactgctcctgcaaccc

SEQ ID NO: 133358 - DNA, 252 bp, Glycine max
gctctggcacggttacagtgtacaagcaatcttcttcataccctataacagctccttcacctctatctggccttccagaattctctcacttgggttggggtcactggtttacctgagggatcttgaacttgctacgaaccgtttttccaaagaaaatgtcctcggtgaaggcggctatggagtggtttataggggacagttgatcaatggaactccagtggcagttaaaaagatacttaataacacaggtca

SEQ ID NO: 133359 - DNA, 252 bp, Glycine max
  unsure (1)..(252): unsure at all n locations
gcgcgtctatcccaaagagagtgagcgagtcagtactgagtagggtttcaaatttccaatcggaatcggaaaaaatgnnnnnnnnnnnnnnnnnnnnnnnncatggacacgacacggcgatttcaggaacaaggtctggagtatgagcggtggcccttactgccgtcccaagcactggaagcgcaataccgccattgccatggtcggcgtcgttctcatctgcatccccatcgctatgaaatccgctgaact

SEQ ID NO: 133360 - DNA, 253 bp, Glycine max
gaaaaacacatacaaatagtagtgtagtgctaactctctctctctctctctctctcacacacacacacacactctccccgaggtttgagagggtactggcatccaaaaaatggttctaaaactaatgcttcgggccatagagcacgaaggccgctgtcaatatttgctgtgcttggtctttgctgtttcttttatcttttgggagcatggcaaagaagtggatctgggaagggagataaccttgcattgagag

SEQ ID NO: 133361 - DNA, 250 bp, Glycine max
ccgagagtgttgatagtcgttttgagggacttgggtggcatgttatttgggtaaagaatggaaataatggctatgatgatattcgtgctgccattaaggaagcaaaagctgcaaagacaaacccacattaatcaaggtcacaacaaccattggttatggttctcctaacaaggctaactcctacagtgtgcatggaagtgcactgggtgccaaagaagttgatgccacaaggcagaaccttggatggtca

SEQ ID NO: 133362 - DNA, 257 bp, Glycine max
tgtataaggactacatagatcatgctaggagcatggaagttgaaatatggcatgatcttgcttttgtgtacataagtctgtcacggtggcatgatgcagaggtgtgtctttcaaatctaaggccatcaaactatactctgcttctagatgtcatgcataggtaattaatatgttttatctttgagttttatgatttttggaaaggacatcaatggaaacaacttgcagatattgtctaattcttaatagtatccttt

SEQ ID NO: 133363 - DNA, 260 bp, Glycine max
gttctaatgatgaaacagctcctatggtggtacaacttgttcctctcatcatgatggaactccatcagactcttgagaatcagaaggtttcatctgacgagaggcagaatgagttacaaggccttctatgtggttgcttgaggttatcatacagaagttaggatcatctgaaccaacaaaatatcatttcatgcagtatgctgaccaaattatgggtttgtttttgagagtgtttgcttctcgaagtgcaacagctcatg

SEQ ID NO: 133364 - DNA, 252 bp, Glycine max
ttctaagaatgcttccagactatcatcaccatgtgaagacatatgataatacacttatcacaaaattttttggtctgcacaggattataccttcgagtggtcaaaagtttcgctttgtcgtgatgggaaatatgttcgcacagaattaaggatccataggagatatgatttgaaaggttcatctcttggacgttcttcggacaagatagaaattgatgaaaacaccactcttaaagatttggatctgaacta

SEQ ID NO: 133365 - DNA, 251 bp, Glycine max
gtgatttagagcgctcaattaagttttatgaaaaggctttgggcatgaaggtggtgaggaaggttgataagcctgagtacaagtacactatagctatgctcgggtatggagaggagcacgagacaactgtgttggattgacatataactatggtgtgactgaatactctaagggaaatgcttatgcacagattgccattggtactgatgatgtatataagagtgctgaggtagttaaccaagtcataaaag

SEQ ID NO: 133366 - DNA, 247 bp, Glycine max
cggctcgtcgtggtgccttatcgctgtggttatcatcttcttcttccctttcatagatctcctctatctctacgccgcacgccgaaaccatggccggaaaaggagagggtcctgctatcggaatcgatctcggaccacctactcttgcgtcggtgtgtggcaacatgagcgcgttgaaatcatcgccaacgaccaggggaacagaaccacgccggcttacgtcggattcactgacaccgagcgtctc

SEQ ID NO: 133367 - DNA, 242 bp, Glycine max
atagcttgaaaacacagtgcttgtttagactagtatcttccatggctccgaaagatagaatcctggttttgggacccacaggagccattggaagacacatagtttgggcaagtgtaaaggcagggaatcccactttatattggttagggacacccctgcctctgttaacaagccaaggcttgtcactgctgctaatcctgaaaccagggaagagctcattcagagcttccaaaattctggag

SEQ ID NO: 133368 - DNA, 249 bp, Glycine max
gggtttccctgggagttggtatgcaacatcatgtagcagatggagcctctggtctgcacttcatcagtacatggtcagatgtggctcgtggcttggatgtctccattccaccattcattgatcgtacaatacttctgcccgtgatccacctcgacccgtttttgatcacgttgaatactagcccccaccagccatgaaggctcaacagcctactggtgcatcagcagctgtctctattttcagactcgc

SEQ ID NO: 133369 - DNA, 243 bp, Glycine max
atcggctcagaaaaagctcaagtcacagatttacactctgcaagcttatcagagccaccagtattgagccaaggctcaaccgagcaattagcactgaaaaacaaggctcccagatggcatgagcagcacagtgctggtgtctaaacttcaagggtcgcgtttcagtggcttctgttaagaactttcaacttgtagctgctgttgatccatctcataatatttctgccgaggagcaagaaaagg

SEQ ID NO: 133370 - DNA, 253 bp, Glycine max
gttgtggggttagggctttagagtgtcttttcttctttttcttcttcttcttcttcgttgaatcgcgattgttctgttgtgcgactgaaagaagagagatcgaaaatggcgttggctttcgacgagttcggaaggccttcataatcctgaaggaacaggagcagaagagcagacttcgaggtttggacgctcagaaagccaacatctccgccggcaaagccgtcgctcgcatcctccgaacctccctcggccc

SEQ ID NO: 133371 - DNA, 244 bp, Glycine max
aacaagaccagagagagagacgaagccgaacgaaacataaataaaaccttgctcttttttcacgccctagctcattttcttctccgttctcttctctctgttcctcactcactcgcatttattcaccatgataagcaacaagctaattggtctccatacgataacaacggaggatcatgtgttgcaattgctggagcagattactgcgtcatcgccgcggatacgaggatgtccaccggttaca

SEQ ID NO: 133372 - DNA, 249 bp, Glycine max
actcgagccgattcggctcgagttgctccctcagaagcgaagaagctgccacagagaaccagtctcctactctctctcaaccacaagaaaaatggcatctcacatcgttggatacccccgcatgggtcccaaggagagctcaagttcgctctcgagtctttctgggatggcaagagcagcgccgaggatttgcagaaggtggctgctgatctcaggtcatccatctggaagcagatggctggtgctggg

SEQ ID NO: 133373 - DNA, 255 bp, Glycine max
tgtttgttgttgtaactcgttcttcttcttttgttgttctgtgtttgtgtttgttttttctctcacctgaaaatgtcttgctgcggtggtaactgtggttgcggaagctcctgcaagtgcggcaacggctgcggagctgcaagatgtacccagacttgagctacactgagtcaaccaccaccgagaccttggtcatgggagtggcacctgttaaggctcaatttgagggtgctgaaatgggtgtgcccgctgaga

SEQ ID NO: 133374 - DNA, 251 bp, Glycine max
atcgagccgcctgagtgtaaacttggattaaatgatagagtattattagaggcacaaggtagaacaaccaagggaaaatcaattgacttggaagacatcaaatttcatcagtgtgtgcgtttggcccgatttggaatgatcgaacgatttcatttatccctcctgatggatcatttgatttaatgacatataggctcagtacacaggttaagcctttagtttgggtggaagcacaagttgaaaaacattca

SEQ ID NO: 133375 - DNA, 252 bp, Glycine max
tctcgagccgaatcggctcgaggttctagatcgcgatctagaactatgtcgtgtcctttagattgtgaaagaaacaactacacatcaatggccacttcactaaccctattcaaaacaaccttagttttcttcatcacttcactctcctcacacaccaagccacggctgattgtgaagccgaatccaaaaacagttgcaacaacaaagagaaagccctacctctaaaaatcatagccatatttaccatcttag

SEQ ID NO: 133376 - DNA, 242 bp, Glycine max
gaagtaccttgatgagaagaccattttccatttgaacccttctggcaggtttgtcattggagggccgcatggcgatgctggtctcaccggccgcaagatcatcatcgacacctatggaggatggggtgcaatggtggtggtgccttctctgggaaggatcctaccaaggttgataggagtggtgcctacattgtgaggcaagctgcaaagagcattgttgcaaatggacttgctaggagggc

SEQ ID NO: 133377 - DNA, 254 bp, Glycine max
aaccactcttaatttctctctgccttgctcatttacacacctctccaacctttcactttcagctttatttgaatccctctctctcctttccaaatggccagcgttgaggttgcacatcaaacaccaacaacagtccagaaaatgaaacaaccgaggtaatcaagacccaggaaacaaccccggaaccagtaccagccactgaggctcctgcaacagaacaagcagcagctgaggttcctgctcaagaagaacaa

SEQ ID NO: 133378 - DNA, 248 bp, Glycine max
caaattgcaggtcctctcttcttttttcctcctttggttttttgtatgtatattacaggaaatcttgaatcagtatttccagaagaacatcgcaagaaaattcttcgttacacatattatcaccagaatgagacggaggatggggactacacatagagggtcatagcactatgttttgtactgcactgaactatatatgcatgcgaatgcttggagaaggacctaatggaggtcatgacaatgcttgt

SEQ ID NO: 133379 - DNA, 242 bp, Glycine max
gaaatattttcatttcatttcgagtaaaagtaaaacacagttcctgatccatggcatctcgccgccgcatgttgttgaaggtcataatcctcggagacagcggggttggtaaaacatcactgatgaatcgtatgtgaatcgtaaatttagtaatcagtataaggcaaccatcggcgcagattttcttaccaaggaagttcaatttgaagataggttgttcacattgcagatttgggatactg

SEQ ID NO: 133380 - DNA, 236 bp, Glycine max
tgccgaaccgcaacggaatgattctgttgttcctcttgcagcaactatcgttgctcatgaggttgagaaggagaaagaagattttgagcaattagcgaaagaccttgaaaattcatctcctcttagattatggataaggccctcgagaaatttgggaacgacatcgctattgcctttagtggtgctgaagatgttgctttgattgagtatgcacatttgacgggtcgaccctacag

SEQ ID NO: 133381 - DNA, 236 bp, Glycine max
gcgacaccgacgaatctcactcaccggaatttcggattcagaaaatggctttaggtggaacagctcccccaagaggaagtgcagcggctactgcaagcatgaggagaaggagaacaaccggtggtcggcctctggaggagcagctggaactatgctccaattttacacagatgatgcccctggactcaagatctccccaaatgttgttcttgtaatgagcattggcttcatagcat

SEQ ID NO: 133382 - DNA, 239 bp, Glycine max
tgaatccacacagttctactctacgctctaaaccctctctctctctctctctcgatctatcatggctttgcccaatcagcaaaccgtggattaccctagtttcaaactcgtcatcgtcggtgacgcggtacaggaaagacaacgttcgtgaaaaggcatcttaccggtgaattcgagaaaaaatacgaaccgaccattggagtgcaggttcacccattggatttcttcacaaactgcgg

SEQ ID NO: 133383 - DNA, 247 bp, Glycine max
tgaatctcaagattctaagagagattttgctgctctttgaagaagggtgtttgcttgattttggtgatgtcgctgctctcagatctcatcaaccttaacctctcagacactactgagaaggtgatcgcaggtacatatggatcggtggatcaggaatggacctgaggagcaaagcaaggactctcccaggaccagttagcgacccttcaaagcttcccaagtggaactatgatggttccagcacagg

SEQ ID NO: 133384 - DNA, 247 bp, Glycine max
gttaaatagaaaagaggagtttgagaatggcaacgatcagcgcggttcaggtggagttcctggagtttccagcggtggttacttcaccagcctccggcaagacctatttcctcggcggcgcaggggaggaggattgacgattgaggggaagttcataaagttcacaggcataggagtatacttggaggataaggcggtgccatcactcgccgctaagtggaagggtacaacttcagaggagttagtt

SEQ ID NO: 133385 - DNA, 245 bp, Glycine max
gaaattctttagttgtaactgacaaagttttctgagaaaataaggattattattgagagaatggctggctcatcggaagagggacaagtcattagctgccacaccgttgaagaatggaacgatcaacccagaagggcaacgaatccaagaaactcattgttgtggattttactgcttcttggtgtggaccatgccgtttcattgcaccattcttggctgagctggctaagaagttcacaagtgtc

SEQ ID NO: 133386 - DNA, 242 bp, Glycine max
ctttcttcaccgttcgctctttctttctcccctacacaaaacatggctttgcccaatcagcaaaccgtcgattaccccagcttcaagcttgtcatcgtcggcgacggtggcacaggaaagacaacctcgtgaagaggcatctcactggtgaattcgagaagaaatatgaaccgaccattggtgtggaggttcatccgttggattttttcacgaactgtggaaagattcgcttctattgttgg

SEQ ID NO: 133387 - DNA, 240 bp, Glycine max
accctactcattctccatacctcaacgaagaggttaaagagacggcaacactttgctgtccgccttgaccgagcagagcttcgtcttggccctcgattttgccctaaagtactctcagtcacaacaacaccgtcgtcgtcgtcgtcgtcatcaatggcaccgaagcagaccaaggctgagaagaagatcgcttacgatgcgaactgtgcgacctaatggaggagtacggccagatcctcg

SEQ ID NO: 133388 - DNA, 239 bp, Glycine max
ctgaaaaggaagatcaagaaaaacccaaaaagattgatgccagattgagacaaagaatagatcctcaatacaatgaggttcaggctcagatggaaacaaatttgtttaaattgtctcttgatgatttgaaactcctaaaggttccatgttggatcttaaaatttctcaatctaaaattgcacttcccaaaaacacagttggaggaactattctgcgtagtgatctattggcaaattttt

SEQ ID NO: 133389 - DNA, 236 bp, Glycine max
aaagattccatttccagaagtagcactgcactagtactctcttttgtttagaaaaaaaaaaatggttcaacaggaagtgcgtaaaggtccttggacagaacaggaagacttcaaattggtgcctttgttggcttgtttggggaccgtagatgggactttatagctaaggtatcaggtttgaatagaacaggtaagagttgcagattacggtgggttaattacctacatcctggcct

SEQ ID NO: 133390 - DNA, 237 bp, Glycine max
ataacaagctagctattagttcgattttgtagtaagtgaggtgccaatatggtgaagatagctcttggtactttggatgactcttttagcgctgcctctcttaaggcttatttcgcagagtccacgcaactctgattttccgtgttcgctggtgttggatcagccatcgcttacaacgagcttacaaaagatgcagccttggatccaacggggctggtggcagtagctgtggcacat

SEQ ID NO: 133391 - DNA, 235 bp, Glycine max
ggagcttgaacgtggtgaaaaaggaattggagatggcacagttagctatggaatggatgatggtgatgacatttacatgcgctcttggactggcacgattattggcccccataatactgtaatgaaggaagaatttatcaactgaagctgttttgtgataaagactacccagaaaagccccctagtgttcggtttcattcacggatcaacatgacttgtgttaatcatgaaactg

SEQ ID NO: 133392 - DNA, 264 bp, Glycine max
ctggccttttgttctcgtgtcaatttctaaatccaccaccacaccctctcttctattctctattattattatctccacacccttcactctccctcagtcttctctcgaatcttccaccgcaatggccacccctgccgagaaactctccgctctcaaatccgccgtcgccggattgaacgaaatcagtgagaatgagaagaacggattcatcagcctcgtcggccgctatctcagtggcgaacgcagcatgtggaatggagcaag

SEQ ID NO: 133393 - DNA, 263 bp, Glycine max
caaattcctgctgttgacaagttgtattctactaaggttaataagtttgcaaaaattatgaaccttagacaaagtgttgttggtgatcttaaacttcttactgatgggaagttgtatgagggtaagcatattcctgtatctaatattagtgcaggggaaaatcatgtagttcagatacccctaatggcacaggaggaaattctgtcttctagtgcaagtgatttcagaactgcaatggtgagtaaaaatagcaagcctcaggc

SEQ ID NO: 133394 - DNA, 265 bp, Glycine max
gggttatagttataccacaacacttggaaggaagagggtcgtgttattacacaatgaagcttcttctctcaactctaattcggcggtgaatccattgaagagaatgtgcagcggaaaattcacttttgactctgaaaggtctcgccttgaggcccttcctcttgatgttctgattagggtgttgtgtggtgtcgatcatgaagatttggagcaacttgttcgtgtctcaaaaactgttagagaagcggctgagattgctaggaga

SEQ ID NO: 133395 - DNA, 263 bp, Glycine max
atcaatcatcatatttatctttgcaactaaaatggcgtcgtcacaaccagagatgcagcatccaaagaaggtttttggttgggctgctcgggactcatctgggcttctctccccattcaacttctccagaagagaaacgggggagaaagatttggtattcaaagtgcaatactgtggaatatgccactcagatctacatatgttaaagaacgagtggggcaacacaacctatcctctggttcctgggcacgagattgctggtg

SEQ ID NO: 133396 - DNA, 242 bp, Glycine max
aagaaaagaaaatcctcaattttctgagcagccaaacactctctctctgtctctcgaaaattctcagtttgcagagaaaatctgaatcatgtcgtggcaagcgtatgtcgacgatcaccttctgtgtgacatcgaaggtaaccacctcactcacgctgctatcatcggccaagacggcagcgtttgggctcagagtaccgacttccctcagttcaaacctgaggagataactgccatcatga

SEQ ID NO: 133397 - DNA, 259 bp, Glycine max
tgtagattaccttccatatgattcgtttgtcaggaagagtgtggggtatttgttcgcgattcagcacggtgctaagcagatttttgatgctgatgatagaggggaggtgatagatggtgatttggggaagcattctgatgtggagttggtatgggaagctgctaggcaagaggttctgttgcagtatagtcatgataaccctaatcgaacagttgtgaacccttatgtgcattttgggcagcgttcggtttggcccaga

SEQ ID NO: 133398 - DNA, 262 bp, Glycine max
  unsure (1)..(262): unsure at all n locations
tcaaagagctcatagaaattctcgtcctcttcctacataagtcttctcttatcataaacgcgtgttgctcggataaggttgtgctgcggtgattcactcgtactttgcttaatatggcggttgagaagttgagcattgcaaaagatgtgactgaattaattggcaaaactccattggtatatctcaaccgcatcgtggatggctgtgttgccaaagttgctgcgaacntagaaatgatggaaccttgctccagtgtcaaaga

SEQ ID NO: 133399 - DNA, 260 bp, Glycine max
gaaatttcttagacaaaaaacaaggatcagaaccgttgaatcaagttgaggaagatggcactagtctctggaggaagatcaacactgaaccctaacgcccctctttacattcctgccgcgtttcgccaagtggaggatttctctccggaatggtggcagctggtgacgacgctgacatggtaccatgactactggctaagccagcagcacgatgagggagccttctacggcgaggacgacgggtttgatggcaatgatgt

SEQ ID NO: 133400 - DNA, 257 bp, Glycine max
gccgtttgtgttgttttcgggacgaagaagaagatggtgtcaggttctggaatctgcgcaaagcgggtggtggtggacgcgcgccaccacatgctgggtcgtctagcctccatcgtggcgaaggagcttctgaacggccagaaagtggtggtcgttcgctgtgaagagatttgcatctcgggcgggctggtgaggcagaagatgaaatacttgaggttccttcgcaaacgcatgaacaccaaaccctcccatggccc

SEQ ID NO: 133401 - DNA, 257 bp, Glycine max
gagaggaaaaaaggatgggaaataacatggcaacatacaacaaatacaaaagtttcttgttctttatcagaaagttacaggtcaccgagccagtttcacctcaggaccttgaggaggcgttttcaaagttcaccggaggaggttcccacatgtctgcggactatctccaccgtttcctggtggagcaccagggtgaagaagactacacgttattgaattcggagaaagttgttgagaaggttctgaaagagagaaag

SEQ ID NO: 133402 - DNA, 262 bp, Glycine max
caacacttcatttcttactctcactgaaaaaaaatagcttgttcacaccatcctattttctcaactcatatatacaaatatatataacatggcttctaccttctctcgaagcctagcacttgtaagcttttacattgtcgtttgtgctgccggtaacttgaaccaagactttcagcttacgtggggagatggtcgtgctaaaatactcaacaacgaaaatcttctcactctctcccttgacaaggcctctggctctggcttc

SEQ ID NO: 133403 - DNA, 259 bp, Glycine max
ccgacagttggattgtagtggaaaagatgaaatgagagaattattatgtgtctataataatagttattgaaagttgtgaggaaggaggaggatggtgtccccgatgtcaacggttctggtgacgggaggggcaggcttcatcggatcccacacggtgcttcagcttctgaagcagggcttcagggtttccatcatcgacaacctttacgagtccctcatcgaagccgtccagcaggttcgccgcctggtcggtcctcat

SEQ ID NO: 133404 - DNA, 191 bp, Glycine max
ctttcagagaatctcttataacaaatatcatgtggagaaacttgatcgtacaggctgtctatcaaatcgcagttcttctcgttcttaacttttgtggtgaaagtattctaccaaaacaagataccaaagctgatgcctttcaagtgaagaatactttaatattcaacgcgttcgtcctgtgccaaatattc

SEQ ID NO: 133405 - DNA, 256 bp, Glycine max
gttttgtagagggagagaattccaaaccaaaaatccgaaataaataattttttttttttaaaaaaaaagaaccgggtgtgggtgttgttggtgttggcggaggcagatcggagatctgtgatagatatagatggagggagttggggcccggcttgggcggtcctcgacccgctacggaccggccacggtgttcactggaccggtccggaagtggaagaagaaatggatccacgtgtccccttcttctgcttcctct

SEQ ID NO: 133406 - DNA, 257 bp, Glycine max
ctcgagccgctcgagccgcacgttccgagttttctgatcgctcatagagagttcgacgcggcggttgcagaatcagattgcaagatgaagttcaacatcgcgagtcccaccactggatgccagaagaagctcgagatcgacgacgatcagaaactacgagcattttgggacaagaggatctcacaggaggtcagcggagatgcacttggtgaggaatttaagggctatgtcttcaaaattactggaggttgtgacaa

SEQ ID NO: 133407 - DNA, 245 bp, Glycine max
attgccaccaatctttcccgtcatatcagtccagtgaacggtctaactaaagctatggcaagactcgtgcttaaaaatgtccagcagggagcatcaacaacatgctatgtagcattgcacccacaagtgcagggaactagtggcaattatgtgtcagccagtaatgtggcatgaacaacctcacaggggactgatgctgatttggcaaagaaacctatgggatttcagcatggatttgaccaagt

SEQ ID NO: 133408 - DNA, 255 bp, Glycine max
ggcgcctgtttcagctttagccaagtacaagctcgtcttcctgggtgaccaatccgtgggaaaaaccagcatcatcactcgcttcatgtatgataaattcgataacacctatcaggctacaattggtattgattttctatcaaaaactatgtatcttgaagatcgaactgttcgactgcagttgtgggatacagctgggcaggaaagatttagaagtcttattccaagctacatcagggactcatctgtagctgt

SEQ ID NO: 133409 - DNA, 259 bp, Glycine max
gcggagggatcgggcatcaaagtcagccccaaaaacgacaaccttgttctcttgatcggcaccattcctggccccgtcggaactccatatgaagggggcattttccagattgatatcacattgcctgatgggtacccgtttgaaccccccaagatgcagtttaaaaccaaagtttggcaccctaatatcagcagccaaagtggagctatttgcctggatatcttgaaggaccagtggagcccagcactcactctgaaga

SEQ ID NO: 133410 - DNA, 258 bp, Glycine max
gtgaaccacatgttgctaccttttttactgctttcttatgcattgggtgtgtcgttattgggaatctggatcttatcactccaactgtaactatgtttttccttctatgttacactggtgtcaacttatcctgcttccttctcgatcttctagatgcccctagttggcgtcctcggtggaaatttcaccattggagtctgtcccttgtgggagcattactttgcatagtgatcatgttcctaatctcttggtcattca

SEQ ID NO: 133411 - DNA, 257 bp, Glycine max
gaagaacgcacgcctccgcgagttggtgaacctggtggtggtggctggagacaggaggaaggagtcgaaggacttggaagagaaggccgagatgaagaagatgtatggcctcatcgagacctacaagttgaacggccaattcagatggatatcctctcagatgaaccgtgtgaggaacggagagctctaccgtgtcatctgtgacacaaggggtgcctttgtgcagcctgcagtttatgaggcctttgggttgactg

SEQ ID NO: 133412 - DNA, 257 bp, Glycine max
gccatgcatgtgtacgtatgaactacttcagactgtgaaactgcgagtggctcattcaatcagtcataggttgtttgatggtatctactactcggataaccgtagtaattctagagctagtacgtcctccaaccccgacttctggaagggatgcatttattaggtagcaggtcaacacaggctctgcctgttgctttgatgattcatggataactcgtcggatcgcacggcctttgtgccggcgacgcatcattcaa

SEQ ID NO: 133413 - DNA, 255 bp, Glycine max
gttctaccagaattcccaaggttcaacaactgctgcaggacttctttaatggaaaagagctttgcaagagcattaatcccgatgaggctgttgcatatggtgctgctgttcaggctgcaatcttaagtggtgagggcaatgagaaggttcaggatcttctcctcctggatgtcacccctctgtctcttggtttggagactgccggtggtgtgatgactgtcctgatccctaggaacactacaattccaacaaaga

SEQ ID NO: 133414 - DNA, 212 bp, Glycine max
gtgaaccacatgttgctaccttttttactgctttcttatgcattgggtgtgtcgttattgggaatctggatcttatcactccaactgtaactatgtttttccttctatgttacactggtgtcaacttatcctgcttccttctcgatcttctagatgcccctagttggcgtcctcggtggaaatttcaccattggagtctgtccctggtggga

SEQ ID NO: 133415 - DNA, 253 bp, Glycine max
aacgaaaccctcttcatcttgttctatctgtgacgagcatcatggcctcaagagcagtgttattgttggctatgtgtgtgcttccggcgatggttgtggccattcgcccagcaaagaaccctttttgcgtgaagggtcgtgtctactgtgacccttgccgtgctggttttgagacctcagctaccacctacattgctggtgctgagattatgttgcaatgcaagagcagggttagcaacgaggttgtgtacac

SEQ ID NO: 133416 - DNA, 257 bp, Glycine max
acctctcaagtttttgaagtatagagatggcagagacattcctatttacctcagagtcagtgaacgagggacaccctgacaagctctgtgaccaaatctcatgctgtcctcgacgcttgcctcgaacaggacccagacagcaaggttgcctgcgaaacatgcaccaaaaccaacttggtcatggtcttcggagaaatcacgaccaaggccaatgttgactacgagaagatagtgcgtgacacctgcaggaacatcgg

SEQ ID NO: 133417 - DNA, 254 bp, Glycine max
ccaaggggcactacacggagggcgccgagctcatcgactccgtccttgacgtcgtgcgcaaggaggccgagaactgcgactgcctccaggggttccaggtctgccactcgctcggcggaggaaccggctccgggatggggacgcttttgatttccaagatcagagaggagtaccctgacagaatgatgctcaccttctccgtttttccttcccccaaggtctctgatactgtggttgagccttataacgctact

SEQ ID NO: 133418 - DNA, 256 bp, Glycine max
gcaacatcacctaatccaagattgattgatgggatcttgctcacgaaatttgacaccatagatgataaggtgggagctgcactttcaatggtttacatatctggagctcctgtcatgtttgtgggctgtggacagtcttatactgacctcaagaagctcaatgtcaaatcaattgtgaagactctccttaaatgagggcacaaagtggtttattttcccttgcaatcctgtttacctgtcatgtttgtttctgttg

SEQ ID NO: 133419 - DNA, 257 bp, Glycine max
catgtctggagagtattgaatccattgatgaacagagcaaaacaatcacctacaagctcttcagtggtgacattgatcataattataagaactttaagttcatctttcaagccattgatgataatgatcatggcggtactattatcaaatggaccgttgaatacgagaggcttcgtgaggaggttgatcctccatatggccacattgaatacctgcacaaatgcactaaagatattgatggtcatcttctcaaagca

SEQ ID NO: 133420 - DNA, 251 bp, Glycine max
caagtattaaagacttgcagattttcaggtttcttaaaaatggaggtctgttgttggcaagagtaatagctgtgacattctgccagaccttggcagcctcattggcagcaaggtttggtccaattcctatggctgcattccaaacctgcttgcaagtgtggctcacatcttcccttcttgctgatggtttggctgttgctgtacaggcaattctagcttgttcctttgctgagaaagattatgaaaaggtg

SEQ ID NO: 133421 - DNA, 250 bp, Glycine max
cttatgagcgagaagatcagaactacattgtatcaactcgtcattatagggctcctgaagttatccttggacttggctggagctatccatgtgatatatggagtgtgggatgtatattggttgaattatgcacaggtgaagctttgtttcagactcatgaaaatttagagcatcttgcaatgatggaaagggtacttggttcattaccacagaccatgatgaagagagtcgaccgacatgctgagaagta

SEQ ID NO: 133422 - DNA, 245 bp, Glycine max
ctcgagccgtggattattgccattcacaaggaatcatgcatcgtgatgtgaaaccacataatgtaatgattgatcatgagcagcgtaagcttcgccttatagattgggggcttgcagagttctatcatcctgggaaagaatataatgttcgcgtggcatcaagatatttcaaaggtcctgagcttcttgttgatcttcaagactatgattactctctagatttatggagtcttggttgtaagttt

SEQ ID NO: 133423 - DNA, 145 bp, Glycine max
gaaaaggaaaataaagaaattagcgtgaaaaatgttgggtgtgttcagcagctccatagtgtcgccgccggaggagctcgttgccgccggcagccgtacaccgtcgccgaagatgacggcggcggcgctgcggaagtggttcgag

SEQ ID NO: 133424 - DNA, 238 bp, Glycine max
gtttagtgttatatctccgcagtggatcaaatcaaacaaacacttccatccatcaccctttccctctgcttagggttttgatcgcatcggatcttcactctcttctccgatctcaaaatgcccgccgtttatggagctcgcttgaccactttcggagactccgagaaggagagtgaatgcggttacgttcgcaacgtatcaggaccagtcgtcgttgcagatggcatggctggggctg

SEQ ID NO: 133425 - DNA, 251 bp, Glycine max
ttcaaaattcaacactcttgaattttggactagtactgggcgcgcttcagtcttgagttgtggaatcaagagatttgccgcaaaagttctactattgcttttggtggggcctcagaaatttgagttctcttggtcagagccttgcaacaagtacctgtgtttggactatctgctatgcaatttgcatatcaattgctggatttgtgttatttgcattcctcataggaaatattcagacatatttgtattca

SEQ ID NO: 133426 - DNA, 255 bp, Glycine max
gatagagttgatgcatggatacaagaaagctggcaggaaggagtcataacagagaagaataaaaaagatgaaacaacatttactgttcactttcctgctagtggagaaacgttggttgttagagcttggcatctccgtccatcccttatctggaaggatggaaaatggattgaatcttacaaagtggggacaaatgacagttctacccatgagggtgatacaccaaatgaaaaacgacctaaattgggtagtcat

SEQ ID NO: 133427 - DNA, 261 bp, Glycine max
tccgtctctgcaattacgatggcgcccagggacaagactagtgccgttaagcctagcggtaacgccggggtgaaggacctgcattttcgtggagtcaggaagagaccgtgggggatgttcgccgccgagatcagagatcccgccaagaagacccgcgtctggctcggaaccttcgacaccgcggaggaggcggcccgtgcctacgacgccgccgcgcgggagtttcgcggccctaaggcgaagacaaacttccctctccct

SEQ ID NO: 133428 - DNA, 257 bp, Glycine max
tcgagttccgagttgcgagttgcagagagagcaatgagtcaggaatcgtttatatatagcttcgtggctcgggggacgatggtgttagccgagtacaccgagttcactgggaacttccctgcaattgcagctcagtgcctccagaaactaccctcttccaataacaagttcacctacaattgcgaccaccacaccttcaattttctcgtcgaagacggttacgcttactgtgttgttgccaaggaatctgttagcaa

SEQ ID NO: 133429 - DNA, 251 bp, Glycine max
gtaagtatgaactaattcagactgtgaaactgcgaatggctcattaaatcagttatagtttgtttgatggtatctactactcggataaccgtagtaattctagagctaatacgtgcaacaaaccccgacttctggaagggatgcatttattagataaaaggtcaacacaggctctgcctgttgctttgatgattcatgataactcgtcggatcgcacggcctttgtgccggcgacgcatcattcaaatttc

SEQ ID NO: 133430 - DNA, 254 bp, Glycine max
atgggttcaacaggtgagactcagattactccaacccatgtatctgatgaagaggcaaaccttttcgccatgcaactagccagtgcctcagtactccctatggttctcaaatcagctcttgagcttgatctgttggaaatcatagccaaggctggccctggtgttcacctttccccctccgacattgcttctcggctcccaacacacaaccctgatgcacccgttatgttggaccgtatattgcgcctcttggc

SEQ ID NO: 133431 - DNA, 252 bp, Glycine max
cacagaacttggacggccgtaacatcactgtcaatgaagctcagtcccgcggtggcggcggcggcggcggaggaggaggatacaatcgtggtggcggtggatatggtggtcgtagtggcggtggcggtggtggataccgtagccgtgacggtggttatggcggtggctatggtggtggtggtggtggtggttatggcggtggcagagaccgtggttactctcgtggtggtgatggtggtgatggaggctgga

SEQ ID NO: 133432 - DNA, 251 bp, Glycine max
ttgcaacaacacaagctggggtgttaaatagaaaagaggagtttgagaatggcaacgatcagcgcggttcaggtggagttcctggagtttccagcggtggttacttcaccagcctccggcaagacctatttcctcggcggcgcaggggagagaggattgacgattgaggggaagttcataaagttcacaggcataggagtatacttggaggataaggcggtgccatcactcgccgctaagtggaagggtaa

SEQ ID NO: 133433 - DNA, 254 bp, Glycine max
atcaaaacaaccttctttctttcaggttcttgatcagtgtcaaaaccaaaagggtggttgcaaattgcaatggctaagcatgatgttgagggtggttccttcgctgcaaaggactaccatgatcctcctccagcaccattgattgatgctgaggaactcacacagtggtccttctacagggctttgattgctgagttcattgccacaatgctcttcctttacatcacagtgctcactgtgattggttacaagag

SEQ ID NO: 133434 - DNA, 254 bp, Glycine max
cttagttatctaattacctcaattaatcccttaattgcaagcatcatggctgaggagaagcaccaccaccactttcaccaccacaagggcgatgatgtgcctggcgaggttgattataagaaggaggagaagcaccacaagcatcttgagcaccttggggaacttggtgctgcagctgccggtgcttatgccttgcatgagaagcatgaggccaagaaagacccagagcatgctcacaggcacaaggtagaaga

SEQ ID NO: 133435 - DNA, 259 bp, Glycine max
caatgaccctcaataccctggcatctctgcggttattcccggttggttctccgaaatcagcccaatgtggcccggggaggcacattccttgaagatggaaaagattttgtttcaagggaagtctgactatcagaatgtcatggtcttccagtcatcaacatatggcaaagttcttgttttggatggagtcattcagcttacagaaagggatgagtgtgcctaccaagagatgatcactcatcttcctctttgctctatt

SEQ ID NO: 133436 - DNA, 251 bp, Glycine max
aaaccatggcttccaggaaattcgacaaccctcactccggcgacggcgccagtccaggcaaaatcttcatcggaggtttagccaaagacaccaccctagagacgttcgtgaagtactttgagaagtacggggagataacggactccgttataatgaaagaccgtcacacgggtcggccaaggggattcggcttcatcacctacgccgatccctccgtcgttgaccaagtcattcaggagaaccacgtcatc

SEQ ID NO: 133437 - DNA, 256 bp, Glycine max
gctgtggttatcatcttcttcttcctctttcttagatctcttctttctctacgccgcacgccgaaaccatggccggaaaaggagagggtcctgctatcggaatcgatctcggaaccacctactcttgcgtcggtgtgtggcaacatgaccgcgttgaaatcatcgccaacgaccaggggaacagaaccacgccgtcttacgtcggattcactgacaccgagcgtctcatcggtgatgcggccaagaatcaagtcgc

SEQ ID NO: 133438 - DNA, 257 bp, Glycine max
cttggtcatacaattgaacatgaagagatgctggaagttattaggctggaaggtcactctcttgctcaagaagatgcttttgtttctagggacattcatctcttacagatatgtagtgggattgatgagaatgctgtgggggcttgttctgagcttgtatttgctccaattgatgaaatgttccccgatgatgctccattgattccttctggtttccgcattatcccattagattcaaaaccaggtgacaaaaagga

SEQ ID NO: 133439 - DNA, 246 bp, Glycine max
tgcagacacagattcaagagctgagcctcagactatcaagattaaccaaccagaccaggcagccagtggtggtcaacctgcacaaaagtcggcttgctgcggttcatgaaaagaatcagtatctgtagcaagaggtgcaggtttctgcaatagcactcttctgggtgctaatgttattctgatgacattagaaagtgggagcatgtatttgtccctctgtatctcccaactgcagatgtcgtgttt

SEQ ID NO: 133440 - DNA, 250 bp, Glycine max
gtgtgaggaaagtttttcaagtgacacgtatgaagcaaatattatggacaaatgaaggcaacagtgatggtgaagagagtgtaaatcttttcctcagggccattggacttagggagtactcacgctatctttgtttcaactttcctttcacccatgagaaagcacttctgggacacttaaagttttttccttggaatcctgatgctgatatctttaagaattggagacaaggtaggactggctttccttt

SEQ ID NO: 133441 - DNA, 249 bp, Glycine max
gcgagagagagagatggatactggtatgctatgaagatgggatctcagactcagcgtcatcaccactctctttgattctcttcaatcttgagtctccagtattactttgagtaccacttcaacaaactggtgctgctttgaaaaagtctgatgggttcaagattcccatctcatcagctcagcaatggcctgtatgtatcaggccggcctgaacagccaaaagaaaagactcccacaatgagctcagtt

SEQ ID NO: 133442 - DNA, 250 bp, Glycine max
aggaaattgagaatggaatgctgtgggaagttgaggggaagtgggttgttaaaggagcagttgatgtagacattggtgcaaacccttctgctgagggtggaggagaagatgagggagttgatgatgcagctgttaaggttgttgacattgttgacacattcagacttcaggagcaacccgcattcgataagaagcagtttgttaccttcatgaagaggtttatcaagaatttgactcccaagctcgatgc

SEQ ID NO: 133443 - DNA, 253 bp, Glycine max
gctgatcatgcccatgttgctttccttgttgttggggatccttttggggctaccactcacactgacctggttgttcgagcaaagaagatggcaattgaagtcaaagtagtacacaatgcatctgtgatgaatgctattggagtttgtggtctacagctttaccgttatggggagaccgtttctataccattctttacagagacttggagacctgatagcttctatgaaaagattcaaagaaacctatcaatgg

SEQ ID NO: 133444 - DNA, 249 bp, Glycine max
cccataccttgaactgaatcctgtatggcgagattcaagctccttcatggatatatttgatgtggatcatttcattgatgtattgaaggatgatatttctatagttaaagagttgcccaaagagttcgcctggagcacaagggagtattatggcttggctattcgagaaaccagaatcaaggctgcacctgtgcatgcatcagcctactggtatctggagaatgttttgcctgtcctacagagttatgg

SEQ ID NO: 133445 - DNA, 247 bp, Glycine max
gattgctagaatggaatttcgatgctcagtcatctcttttaccattctcttctctcttgctcttgcaggagagagccatgtccatgcatcgctacctgaggaagattattgggaagctgtttggccaaacactcccattcccactgcactgcgagagcttctaaagcctctccctgcaggtgttgaaatcgatgaactccctaagcaaattgatgatacacagtacccaaaaacattcttctataaa

SEQ ID NO: 133446 - DNA, 247 bp, Glycine max
cgctctctcactcacaaacgcacactgaattcaaaaacatcgaaagagagaggcatggccgagcaaaccttcatcatgatcaagccagatggcgttcaaagaggccttattggcgagattattagcagatttgagaggaagggtttttacttgaaagggttgaaactcgttactgtggaccgtccttttgctgagaagcactatgctgatttgtctgcaaagcctttctttagtggtttggtggatt

SEQ ID NO: 133447 - DNA, 248 bp, Glycine max
aaggaaacaaaacgcacaaaggattattatagcaatggcagaacaaaaccaaaaccagacaactgaagctggaaggcaccaagaggttggccacaagagccttctccagagtgatgctctttaccagtatattctggagaccagtgtctacccaagagaacctgaatccatgaaagaactgagagagttgacagcaaaacacccatggaacatcatgacaacctctgcagacgaagggcatttcttga

SEQ ID NO: 133448 - DNA, 246 bp, Glycine max
agcggggcgaagcagaggaaactctggtggaggcccgcagcgatactgacgtgcaaatcgttcgtctgacttgggtataggggcgaaagactaatcgaaccgtctagtagctggttccctccgaagtttccctcaggatagctggagcccgcgggcgagttctatcgggtaaagccaatgattagaggcatcgggggcgcaacgccctcgacctattctcaaactttaaataggtaggacggtgcg

SEQ ID NO: 133449 - DNA, 248 bp, Glycine max
cccagttcaaaggtaaggtaggttaacactcttcttcatcgtcgtcgcaatgggacgtgtgatccgtgcgcagcgtaagggagcaggctcggtcttcaagtcccacacgcaccaccgcaagggccctgctcgcttccggagcctggacttcggggagcgcaacggctacctcaagggcgtggtcaccgacgtcatccatgaccctggccgcggcgcgccgctcgccaaggtcgccttccgccaccctt

SEQ ID NO: 133450 - DNA, 247 bp, Glycine max
aaaaaatagtgatggaagaacaagagtgccaagttgtggaaaataaggaaactccaactcctcctgttcgagtctatgctgatgggatttatgatctctttcacttcggccatgcccgttctctcgagcaagccaaaaaactgtttccaaacacttatctccttgttggatgctgcaatgatgagatcacacataagtataaaggcaaaactgtcatgactgagaaggaacgctatgagtctcttcg

SEQ ID NO: 133451 - DNA, 252 bp, Glycine max
gccatgcatgtgtaagtatgaactaattcagactgtgaaactgcgaatggctcattaaatcagttatagtttgtttgatggtatctactactcggataaccgtagtaattctagagctaatacgtgcaacaaaccccgacttctggaagggatgcatttattagataaaaggtcaacacaggctctgcctgttgctttgatgattcatgataactcgtcggatcgcacggcctttgtgccggcgacgcatca

SEQ ID NO: 133452 - DNA, 249 bp, Glycine max
gcagcacgaggagcagctataggaggagaaggatgtctcacaggaagttcgagcacccaaggcacggttcactgggatttcttcccaggaagcgtgctgctcgtcacaggggaaaagtgaaggcattccccaaggatgacccatccaaggcacccaagctcactgcattcttgggttacaaggccggtatgactcacattgttagagaggtcgagaagccaggatcaaagcttcacaagaaggaaactt

SEQ ID NO: 133453 - DNA, 240 bp, Glycine max
caagaattggtggattgtgatacaggatataacgaaggatgcaatggaggacttatggactatgcatttgagttcattatcaacaatggcggcattgattccgaagaggattacccttaccgtggtgttgatggtagatgtgacacatataggaaaaatgctaaggttgtttctattgatgactacgaagatgttcctgcctatgatgagttagctttgaaaaaggctgttgcaaatcag

SEQ ID NO: 133454 - DNA, 244 bp, Glycine max
atcaagaaccgctctgctatggctgctctgcaatacttggaatcgctgcgtaattcgcaccctgagctctccgattggtacaattcgctggcggatctgtaccagaagaagctctggcaccagctcactctcaagctcgagcagtttgtggctctcgccgtcttccaggctggtgatgctttaatacaattatatcacaatttcatcacagactttgagacgaaaatcaaccttctcaagcttg

SEQ ID NO: 133455 - DNA, 245 bp, Glycine max
tgggaaacatgccaaatgtggttgtgttgtgtttctgtctctggaccctgttgtttcctcttgtgttctgtgcacccaacgatgggttgcgtaggattggacttaaaaaggtgaagttggacaccgatgacgttgtggggtttaaggaatttcggtcttcaattagaaagcatcaccttcagaacatccttggaggcgctgaggacaccgatgttgttgcgctgaagaattacttggatgctcag

SEQ ID NO: 133456 - DNA, 245 bp, Glycine max
ctcgagccgcgaaaaaagaaaaaaaaaaccctaacgcactcgagaccctgagatttttcatcttcgtttctcattctctttttgatcatggacgtcgaggtgcggcagatcttcaacaagttcgacaagaacggcgacggaaaaatctcggtaacggagctgaaggacatgctcgcggccctcggatccaaaacgacggacgaggagttgaaacgcatgatggaggagctcgaccagaacggcga

SEQ ID NO: 133457 - DNA, 243 bp, Glycine max
tcttcctcaccgattgctagaatggaatttcgatgctcagtcatctcttttaccattctcttctctcttgctcttgcaggagagagccatgtccatgcatcgctacctgaggaagattattgggaagctgtttggccaaacactcccattcccactgcactgcgagagcttctaaagcctctccctgcaggtgttgaaatcgatgaactccctaagcaaattgatgatacacagtacccaaaa

SEQ ID NO: 133458 - DNA, 244 bp, Glycine max
cttgttgaaactgcagttaaggagggttttggtaccaccatgcagcgccaaactatctaatgctagtttactggattcccaaaactgactgcacaatacctccaaatgcttctcattgtgtagcagttggagctattgtcttgaacgataataaagaggtgcttgtggttctggaaaaaaaaggaggatttcatgggattggtgtttggaagatacctactggagttgttgatgcaggtgagga

SEQ ID NO: 133459 - DNA, 243 bp, Glycine max
cacacacacatactaagaagcaacaattcttctaccatggatctcctccttctggtcgagaccctcataggtctcttcctcgctgcggtggtcgccatcggcgtctccaccctccgcggacggcaattcaagctccgaccggtcccactccccgtgccaatcttcggcaactggctccaagtcggcgacgacctcaaccaccgcaacctcaccgatttggccacaagattcggtgacatcttc

SEQ ID NO: 133460 - DNA, 241 bp, Glycine max
ggacaaactcccaaagtggcgaacaagacaagaagaagaagccacgcggacgtgctcacaagagaatgcaatacaaccgccgattcgtcaccgccgtggtgggattcggaaagaagcgtggaccaaactcgtcggagaagtgagggaggcgtttggaagatgatggtttttcttagtttgagttcatcaatcaaataaaaagaggtgatacatttcgcaaactaagaaaaaccatcatctc

SEQ ID NO: 133461 - DNA, 244 bp, Glycine max
tcctcacccagtcaccaaccccgttgtccggagccaccattttgcgctccggcaatgttcttcccggtggccatcgtcccttaaacccaccacacttcaaagtcatgggtattccatgggacgacgtcgttgtgatccagcaagggaaggatcacaatgagccctgcatcgtcaccgtcaattgccccgacaaggctggtctcggctgtgatctttgcagaatcatcctcgagttcggtctccg

SEQ ID NO: 133462 - DNA, 243 bp, Glycine max
gcagtcactaatttctcaattcagaaagatctgctattctctctctctccttttagagcgttataataatataagctgcataagttgaagactcaactgattcttcttcgtctgctgcaaattcagaagtagagatggcaagtcgactgaaggaagatgagaaaaatgaacgaataattcgaggtcttctcaaactcacaccaaatcgaagatgcattaactgtaacagcttgggaccacaat

SEQ ID NO: 133463 - DNA, 246 bp, Glycine max
tctcgagccgaatcggctcgagatttcattttgactctctctctctactctgattgcttccttatcccttttattttgctctcactctctgcacaacaattccttctcattccagatattccaaccatcgaccgatctcaattctcaaccttaacctctcagaatgtcttacgcttatctcttcaaatacatcatcatcggtgacaccggagttgggaagtcttgtcttctacttcaattcacaga

SEQ ID NO: 133464 - DNA, 244 bp, Glycine max
ctctcttgcaaaacctaattttcatttcttccctcaaatttcaaaatgcgtgagatccttcacatccagggtggccaatgcggcaaccagatcggcgccaagttctgggaggtggtttgcgcggagcacgggatcgaccctaccggaaggtacggtggggactcggagttgcagctccagaggatcaatgtctactacaacgaggccagttgcggtcggttcgtgccgcgcgcggttctcatgg

SEQ ID NO: 133465 - DNA, 267 bp, Glycine max
gctgttcagaaggctgctgctgcattgaagggttcagatcatcgccgtgcaacaaatgtcagtgccagactggatgctcaacaaaagaagctcaaccttccaatccttccaaccaccactattggatccttccctcagactgtagaactgaggagggtacgccgtgagttcaaggctaacaagatctccgaggaagagtatgttaagtcaattaaggaggaaattcgcaaagttgttgaacttcaagaagagcttgatattgatgtt

SEQ ID NO: 133466 - DNA, 265 bp, Glycine max
ggacttaccaaggatttcgtaagcgatctttgggtgtcgtgcaatttgatactaccaaaaatcgatttttggctgctggtgatgatttctccatcaaattctgggatatggataatgttcagcttttgacaactgttgatgctgatgggggtctccctgcaagcccgcgtattcgcttcaacaaggatggaactcttttagctgtctctgcaaatgagaatggaattaaaattttagccaatggggatggtattcgcttgtcgcg

SEQ ID NO: 133467 - DNA, 263 bp, Glycine max
aactttgccaagatgtatgcatctaagtttggagttgatgaaggaaaaatgatggaaaggctctggggtgaaaacttctttgatccagccacaaagaaatggtccagcaagaatactggttctgctacctgcaagcgtgggtttgttcagttctgttacgagcccatcaagcagattattaacacttgtatgaatgatcagaaggataagctgtggcctatgctgcaaaagcttggggtcaccatgaaatctgaggagaagga

SEQ ID NO: 133468 - DNA, 263 bp, Glycine max
gttgaattaagtggcagtggaatctattcgacaaataaatgatgctcaagctgcagcaaagcacttgatagaagaggcagtttccaggaaaagcaaggatgatatatcttgcatagttgtaaggttctaatgacatgtttttatggataagcagaggaatcctttcccaaaccaagattgaaggccctggtggacatttagaattttagatgatcagatgaacttcatcatgttctttcttagctaaaatgcctgcagaaatt

SEQ ID NO: 133469 - DNA, 262 bp, Glycine max
cacgagggctgcacagcaatgggtggggagcgcaacaaggttttcactttggccgagatctctcagcacaacaatgccaaagactgttggcttgtcattcatggcaaggtttataatgtaacaaagttcgtggaagatcaccctggtggggatgaggtcctgttgtcttccacagggaaagatgcaaccaatgattttgaggatattggtcacagcacagggcccgtagccatgatggatgagttctatgttggagacattg

SEQ ID NO: 133470 - DNA, 267 bp, Glycine max
tgctggaatcacatggacttgtctttctcttgctgggtcctccattaaaattttcttctctcccttctctctctcaccattctcttcttcttcttcttagattccttctctctctctctctcccctccgccatggctgaggataaggagatgtctacctctgtcatcaatgggaatgattccctaactggacacatcatatctacaactattggaggcaaaaatggggaacccaaacagactattagttacatggcagaacgggttg

SEQ ID NO: 133471 - DNA, 267 bp, Glycine max
cttggtctgtgatcagggatatcattcttaataaaaacaacaaccacactttctccgtttctcgtggttcatgctatggcggcagaggcggctttgttcttttctgtggcatcagtggtggaggacgtgcttcagcagcacggtcctcgcctcaaagatcttgatttggaatctaggaaagccgaagaagctgcatcaagaagatacgaagctgcggggtggttgagaaaaatggttggagttgttgcagccaaagatttaccagca

SEQ ID NO: 133472 - DNA, 264 bp, Glycine max
cagtttcaccgcacgaatatcttgttgtttggagcgatccgagaaaaactctgtaaacatgttggtttaccaggacctccttacaggtgatgagcttctctctgactccttccgttacaaggaaattgagaatggaatgctgtgggaagttgaggggaagtgggttgttaaaggagcagttgatgtagacattggtgcaaacccttctgctgagggtggaggagaagatgagggagttgatgatgcagctgttaaggttgttga

SEQ ID NO: 133473 - DNA, 274 bp, Glycine max
tgcactagcagctttgaaacccggttcatccgaagcccttcaccgaaccatgtcgaggagaaaggttagagagccaaaggaggaaaatgtgactctgggtccagctgttagagatggtgaacacgtttttggcgttgctcgcatctttgcctccttcaacgacaccttcatccatgtcactgatttgtctggcagggaaacccttgtccgaatcactggtggtatgaaagttaaagctgacagagatgaatcatctccttatgctgctatgctt

SEQ ID NO: 133474 - DNA, 271 bp, Glycine max
cacgagggctgcacagcaatgggtggggagcgcaacaaggttttcactttggccgaggtctctcagcacaacaatgccaaagactgttggcttgtcattcatggcaaggtttataatgtaacaaagtttttggaagatcaccctggtggggatgaggtcctgttgtcttccacagggaaagatgcaaccaatgattttgaggatattggtcacagcaccagtgccgtagccatgatggatgagttctatgttggagacattgatacatcaa

SEQ ID NO: 133475 - DNA, 268 bp, Glycine max
ctccaactccattgttggaatctggtttgcaaaaagacagagggttaattgtggagtactttggaaggatgtcatacgttgctcataacgttaatcagccccaagagaaagatttgttggagggaaatttttcctttgatattaaatctcgctctagattggaaaaagtttcctctacaaaagcacaatttgttagtggaaaaactttcaaatatgatataattggtgctggttcacattcttcagaagattttcctgaaaaggaaga

SEQ ID NO: 133476 - DNA, 264 bp, Glycine max
tggagacgagccagctttttaatgttcttgccatttttcttctctcggacccttttgctgttgtgaatgcaaactctgaaggtgatgctctgttcgcgttcagaagagctgtgaaagacccaaataacgttctagagagctgggatccaactttggtggatccttgtacatggttccatattacctgtgatgatgataagcgagttacccgactagacctcggacacgcaaaactgtctggccatttggttccagagctaggga

SEQ ID NO: 133477 - DNA, 266 bp, Glycine max
gcaaaaggaaagaatatcaacaaggtaaagtagattccttactagacatggcgttgaaggacacattctacatatctcatggatcaccaactttgtccatagatgaatccattctggccaggaagttccttcagtcatggaagaaggacgtgtttcctcaaagaccctcttcaattcttgtcatctctggtcattgggaaaccgcagttcccacggtcaacgtcgttgactccatcaacgacaccatctacgatttctatggcttc

SEQ ID NO: 133478 - DNA, 259 bp, Glycine max
gcttggactgtatgaatggagccctttgctctacctgtcttgcttctcacagagaacacagagctattcagattaggagatcttcataccatgatgtaataagagtgtcggagatacagaaatttctggacataacaggggtccaaacttacattataaacagtgccaagattgtgttcttgaatgaaaggcctcaacctaggcctggcaaaggagttaccaacacctgccaagtctgtgagcgcagcttctcgattca

SEQ ID NO: 133479 - DNA, 261 bp, Glycine max
gcgagtcagtcttcttgcgtaacccagatctgacaatatgcgaagaactggcttgttacattacgttatgccttgtcattgctttagtaagtgtgcaagcagaagatgcgtataagtattacacatggacggtgacttatggaactatttctccattgggtagtccccagcaggttattcttatcaatggtcagtttcctgggcctagacttgacttggtgactaatgagaatgtaattctcaaccttatcgacaagctgg

SEQ ID NO: 133480 - DNA, 264 bp, Glycine max
ctcgagcgctcgagccgaatgccaagaacaccatggaaattggtgtctacactgactattcaactcttgccaccgctctcgctcttcctgaagatggaaagatcttggccatggacattaacagggagaattatgaattgggtttgcctgtaattaaaaaagctggtgttgaccacaaaattgaattcagagaaggtcctgctctaccagttcttgatgaaatgattaaagatgagaagaaccatggaagctatgacttcatct

SEQ ID NO: 133481 - DNA, 263 bp, Glycine max
cgatctcgttctgtacgtgcagccgcagcaagtgatcgaagcgaaaagagagaaattcatcgtcgcagtaatcatgggtaaggttcatggatcacttgcacgtgctggtaaggttagagggcaaaccccgaaggtggccaagcaggataagaagaagaagccacgtggccgcgcccacaagaggatgcagtacaatcgccgattcgtcaccgccgtggtgggattcggcaagaagaggggaccaactcgtctgagaagtgagg

SEQ ID NO: 133482 - DNA, 267 bp, Glycine max
ggcaatttgtaagaaagatgtttggagagttgaatgtggaatcccttctggatttccgctcacagttatttgcaatagcatttttaatgagatgctcattagatatagctatgaaaaattactgcgccaggctaaagctccaagtatgtttttacaatccttcaaaaattttgtttctttgtgtgtgtatggtgatgataacttaattagtgttcatgaatatgtcaagccttactttagtggttctaaattgaaaagctttctagc

SEQ ID NO: 133483 - DNA, 269 bp, Glycine max
gaagattctggtgaatgcgtagaaaaggaaaataaagaaattagcgtgaaaaatgttgggtgtgttcagcagctccatagtgtcgccgccggaggagctcgttgccgccggcagccgtacaccgtcgccgaagatgacggcggcggcgctgcggaagtggttcgaggagaagaacccctccgcagtgtcggtggaggtcggagagcatgtccagctcgcttatacccaccagaacgagtcgccgtttcagcccagatcctttgctgtga

SEQ ID NO: 133484 - DNA, 271 bp, Glycine max
atttcgttgcgcctttgatctctgtccccgctgcgtctctcgtaatcatgcctaagcaaatccacgagattaaggatttccttctcactgccagaaggaaggatgcgaggtcagtgaagatcaagaggagcagagatgtggttaagttcaaggtcagatgctccaagtacctctacacactttgtgtgtttgacccagagaaagctgataaattgaagcaatctcttgctccaggtttgagtgttcaagacctgtaaatgtactgggcgag

SEQ ID NO: 133485 - DNA, 262 bp, Glycine max
  unsure (1)..(262): unsure at all n locations
cgatctcgttctgtacgtgcagccgcagcaagtgatcgaagcgaatagagtganattcatcgtcgcagtaatcatgggtaaggttcatggatcacttgcacgttctggtaaggttagagggcaaaccccgaaggtggccaagcaggataagaagaagaagccacgtggccgcgcccacaagaggatgcagtacaatcgccgattcgtcaccgccgtggtgggattcggcaagaagaggggacccaactcgtctgagaagtga

SEQ ID NO: 133486 - DNA, 261 bp, Glycine max
ctaagatatgtctacatctgataagtcagaagtggtggaaaggggtgctaaggatgatgaaaagccaaaggaagaacatgagaagggtggatttcttgatacagtgaaggatttcattcaagacattggtgagaagattgagggagcagttgggtttgggaagccaactgcagatgtcactgggatacacattccatcaattaatcttgagaaggcagagctagttgttgatgttcttatagagaacgcgaatccggtgcc

SEQ ID NO: 133487 - DNA, 262 bp, Glycine max
gtgatcgggtacgacaacaccctatggaacggctctgtggtggcacccccagatgctcctctcaggaagtacgttagatactacagggacttcgtgctcgagctcaacaaggcactcgctgtggaccccaggatcgagatttgcatgctcccggttggtgatggaatcactatatgccgtcggatcaagtgattctgattttctgataatcacacaatcgtggaccaagaccaccgttgcttcttctgcaccctagtgatga

SEQ ID NO: 133488 - DNA, 261 bp, Glycine max
ctctctttctctctcttccaaaacctaattttcacgttttctcttcaaacaaattttcaaaatgcgtgagatccttcacatccagggtggccaatgcggcaaccagatcggcgccaagttctgggaggtggtttgcgcggacacgggatcgaccccactggaaggtacggtggggactcagagcttcagctcgagaggatcaatgtctactacaacgaagccacctgcggccggttcgtgccgcgcgcggttctcatggac

SEQ ID NO: 133489 - DNA, 269 bp, Glycine max
ctcgagcgcttaactagtaatatttattagaatttgctagagaattagaagaatacacataataccccagatggcttcaaaaacttgttcctcccttgcccttttcctcacactcaacctcgttttcttctcacttgtctctgcatgcggttatacaccatgccctggtccaaacccaaagccaaggcccaaccccaaccctaaccctaaccccagcccaagtggctcgtgcccccgtgacgcactcaaactaggtgtatgcgccaatg

SEQ ID NO: 133490 - DNA, 265 bp, Glycine max
cttcgcaacacaacaaaaaaagacaacccagagagcgcgtcttaataaacgctcttctctgaaaacccccatttcttttcttctttcttcttctctttcgcttcttcgatcttcgatcttcgtcgctgaaaatgagagagtgcatttcaatccacatcggccaggccgtgattcaggttggaaacgcctgctgggagctttactgcctcgaacacggcattcagcctgatgggcagatgccaagtgacaagaccgttggtggagg

SEQ ID NO: 133491 - DNA, 271 bp, Glycine max
tgggcgcctccaccacctgatccacctctgtttcttcttcctttcatccgttcatacgggcgttagatgatggagtcctgtgattgtatagatacgcagtatccgccggatgaacttcttgtgaagtatcagtatatctcggatgtgctaattgctcttgcgtatttttcgattccggtggagctcatctattttgttcagaagtctgctttctttccgtatagatgggtgcttatgcagtttggtgcctttattgttctctgtggagcaa

SEQ ID NO: 133492 - DNA, 260 bp, Glycine max
gtttttctctctttccgcggcctagatctgagcagtttggaaaccctaactgctctcaccaacgacatcaccactctctccgatcaactacctctttcgtcgccctaagtcatggcaggaattgcacccgagggatcacagtttgatgctcgtcaatatgataccaagatgaatgagctgcttacgtccgatggacaggatttcttcacatcctacgatgaggtttatgacagttttgatgctatgggcttgcaagagaa

SEQ ID NO: 133493 - DNA, 259 bp, Glycine max
gatccgtgctctgtgattcccagaccttattttttctctcatttgcttcaaatttcaggagattaattatggctcaacccacaacaagaataggccttgctggattggctgttatgggccaaaatctggcactcaatattgctgagaaaggctttcccatttctgtttacaaccgaaccacttccaaggttgatgagacagtagaacgagcaaaacaagaaggaaatcttccagtttatggctaccatgaccctgaagc

SEQ ID NO: 133494 - DNA, 257 bp, Glycine max
cttaacaacagcacaaagcgggttactgtctgttcaagctaccatctctctctctctttcttagtgcctccttgccagaagttaaaatggcccaagaaactttcctattcacatctgaatcagtgaacgaggggcaccctgacaagctctgtgaccagatctccgatgctgtgctcgatgcatgcttggagcaggaccctgacagcaaggttgcctgtgaaacctgcaccaagaccaacatggtgatcgttttcgga

SEQ ID NO: 133495 - DNA, 255 bp, Glycine max
caggcaaagagctcatagaaattctcgtcctcttcctacataagtcttctcttatcataaacgcgtgttgctcggataaggttgtgctgcggtgattcactcgtactttgcttaatatggcggttgagaagttgagcattgcaaaagatgtgactgaattaattggcaaaactccattggtatatctcaaccgcatcgtggatggctgtgttgccaaagttgctgcgaactagaaatgatggaaccttgctccag

SEQ ID NO: 133496 - DNA, 260 bp, Glycine max
caaccctgcggtgacattcgggttgttcctgggacgcaaggtgtctttggtgagggcgttgttgtacatgatagcacagtgcgccggtgcaatctgcggtgctgggttggccaaagggttccagaaatcgtactacaacaggtacggaggtggagttaacactgttagcgatggctacaacaaaggtaccgctttgggagctgagataattggtacctttgttcttgtctacaccgttttctccgccactgatcctaaga

SEQ ID NO: 133497 - DNA, 263 bp, Glycine max
ctcgagcgcgcccagaggaggttggtgctggtgaccagggtcacatgtttggctatcgccactgatgaaacccctgagtacatgcccctcagccatgtccttgcaaccaaactcggtgctcgcctcaccgaggttaggaaaaatggtacctgtgcttggctgaggccagatggcaagacacaagtaactgttgagtactacaatgacaatggtgccatggttccagttcgtgtccacactgtcctaatttccacccaacatga

SEQ ID NO: 133498 - DNA, 257 bp, Glycine max
gcacaacactagttcccaacgccgtcaccccctttgtgcagtgaagaagaagaagatggccgtaaaatcgaagaaagagaaagaacacctgaatcttctcctaggttcccaccttactactatccatgaaaccctccaggttttggatcaaacaccgccatcttcttcttccgccaaagtcacctgggacgatgtcattaagatggctgaccaagtctcagaacaagctaccacggtgggaatgctgtggactggag

SEQ ID NO: 133499 - DNA, 260 bp, Glycine max
caaggttgtgattactgacagaatgtgggcaagactcctttcttcaaccaaccagcctagctttttgagccccaaagatttagaagaagccaagaaagcagaacaacctccgactgaattgttggaaggaaacaattgcaatgatgttggtgatgccgggaaagaagaacaacctcccaaagatgaacaagaatcaggaaatcacgcagacaatggtatcaagacagaaaattagatttagacttgttcatctacaagac

SEQ ID NO: 133500 - DNA, 257 bp, Glycine max
aaaaccctaacaaaaacccgaaggggggaaagcttcaatggggaaggcgaaggggaagcaccgtttggacaagtattaccacttagcgaaagagcacggttacaggtctcgagcctcatggaagctggtccagctcaactccaagttcggcttcctggaatcggcccgcgccgtgctggacctctgcgccgcccccggatggtggatgcaggtggtggtccagcgcgtacccgtggaccacctggtgatcggcgtgg

SEQ ID NO: 133501 - DNA, 258 bp, Glycine max
cacacacacatactaagaagcaacaattcttctacaatggatctcctccttctggaaaagaccctcataggtctcttcctcgctgcggtggtcgccatcgccgtctccaccctccgcggccggaaattcaagctcccaccgggcccactccccgtcccaatcttcggcaactggctccaagtcggcgacgacctcaaccaccgcaacctcaccgatttggccaaaaaattcggtgacatcttcctcctccgcatgggg

SEQ ID NO: 133502 - DNA, 252 bp, Glycine max
gacttaattactgtgttggtggtgaggtaactacgatgtttcatttggaccgccccatgtacttgttgggatatcttgcaaaccaaagtcgtgtttatttgattgacaaagagtttaatgttatgggatacacactgcttttaagcttgattgagtacaagacacttgtgatgcgtggtgatttggaaagggccaatgaaattctaccatcaatccccaaagagcatcataacagtgtggctcattttctgg

SEQ ID NO: 133503 - DNA, 257 bp, Glycine max
gtttcttctcagatcttcttccatggaacagtacgagcaggtggagaagataggcgagggaacatacggcgtcgtttacaaggctcgcgaccgcgtcaccaatgagaccatcgctctcaagaagattcgcctcgagcaggaggacgaaggcgttcccagcaccgccattcgcgagatttctctcctcaaagagatgcagcataggaacattgttaggttgcaggatgtagtacacagtgagaagcgattgtatctgg

SEQ ID NO: 133504 - DNA, 257 bp, Glycine max
ggcagaagtgatgagactgtttctatgatagaatcctacttacgagcaaataagatgtttgtggattacagcgagccccaagtggagagagtgtactcatcgtatttggaactcaatcttgaggatgtagaaccctgtgtctcaggtccaaaaaggcctcatgaccgtgtccctttgagagaaatgaaggtagactggcatgcctgcctcaacaataaagttggattcaagggttttgctgtaccagaagaatctca

SEQ ID NO: 133505 - DNA, 260 bp, Glycine max
tttccacctgagccgagaaacctacagttactctttcattctttaacgttcgcacactccgtcttcaaaccaagatccgtgttcttcacccacgtctctctcccgcttcagatcgtaaacgtctcgctgttccaagatgggtgtggctgagaacattcccgatatggaggagggtaccttggagattggaatggaatacagaactgtatctggagttgctggaccattggtcattcttgacaaagttaagggacccaaat

SEQ ID NO: 133506 - DNA, 260 bp, Glycine max
ttctaatctcattctccttctgttcaaacactctcatggcatcagataagaagattaggatcggcatcaacggatttggaaggattggccgtttggtggccagggttgcccttcaaaggaatgatgttgaacttgttgctgtcaacgatcctttcatcaccactgattacatgacatacatgttcaagtacgacaccgttcatggccagtggaagcattttgatgtgaaggtgaaggactctaagacccttctctttggt

SEQ ID NO: 133507 - DNA, 267 bp, Glycine max
atccctgtcaaacaaaccatggcttccgaaacaaaccagtccaagaatgtgtgtgtaattggagctggaccctcggggctattggcagcgagggagctgagaaaagaaggtcacaaggtggttgtgttggagcagaaccatgatattggaggtcaatggctatatgacccaaatgtacaagaggaggatcccttaggaagagacccatggctaaaggtgcatagcagcatctatgagtctttaaggttcatgtctcccagagagatc

SEQ ID NO: 133508 - DNA, 270 bp, Glycine max
cttgcaccttaaaaccatccaatccaattgaattctccagagagaagaagaaacttaatcgatcatcacttcacttcactaatacatcatggcagacgagacccagaacaagtatgagagctctgaggttgaggtccaggatcgtggtgtttttgactttctcggtaagaaaaaggatgaagaagacaagcctcatcctcaggaggaggtcatcgccaacgagtttcaaaaagtcactgtctcagaccaaggagagaacaagcacagcct

SEQ ID NO: 133509 - DNA, 269 bp, Glycine max
gctggaatcacatggacttgtctttctcttgctgggtcctccattaaaattttcttctctcccttctctctctcaccattctcttcttcttcttcttagattccttctctctctctctctcccctccgccatggctgaggataaggagatgtctacctctgtcatcaatgggaatgattccctaactggacacatcatatctacaactattggaggcaaaaatggggaacccaaacagactattagttacatggcagaacgggttgtag

SEQ ID NO: 133510 - DNA, 267 bp, Glycine max
aaaattttggttgagtgagaggcttgtctttgttccgctaccatgtctcatgagacatgcccttctgtaaagaatgtccttcttttggattccgatgggaaacgtgttgcggtcaaatacttctctgaagactggccgacaaatagtgccaaggaaaattttgagaaagttgtattcaacaagactcagaaaaccaatgcccgcacggaagcagaaatagcaatgtttgagaataacattgttctttacaagtttgtccaagatctt

SEQ ID NO: 133511 - DNA, 268 bp, Glycine max
cgagcgattcggctcgaggacatatggggggagcaaagagttactcttgttttgacgtaatagctgtggccttggttttgctacttctgaatgtggctgtggtttgcaatggaggcaagacaagcacattcattaggaaggttgagaaaactgaggacatgccccttcatagtgatgtatttgttgccccttctggctataatgctcctcagcaggttcatataacacaaggtgaccaagtgggaagggccatgatcgtgtcatgggt

SEQ ID NO: 133512 - DNA, 273 bp, Glycine max
ccctgagccatggtaccatttccctcataaaattctctcttcctttttgggttctcctattccaagcttcaatcttttctctcttctcacagccttcttcactcacaggaggtgaagatgtcgactccggctaggaagagactgatgagggattttaaaagattgcaacaagatcctcctgctggcatcagtggggctccccaagacaataatattatgctttggaatgctgttatctttggcccagatgacaccccttgggatggaggtacg

SEQ ID NO: 133513 - DNA, 264 bp, Glycine max
gcataggcaaggttggagttcacggtcatcctgtcacaggtggttttgaacttgagcagcaaaagtctgatgaacgtaccagaaatgttgttccatacaagcgcactcgaacttctatggttgatgtaaggatggatgtgcggactaattctctcgtcaggccatcagggacagttgacagagattaggtcaagctacggattgccaacaatggtgtcgttcagagtgaagatcgaaccttagctattggaggtgatggttggg

SEQ ID NO: 133514 - DNA, 269 bp, Glycine max
ggagtgagtcactcttcttgcataacccagatctgacagtatgcgaagaactggcttgttacatttgttatgccttgtcattgctttagtaagtgtgcaagcagaagatgcgtataagtattacacatggacggtgacttatggaactatttccccattgggtagtccccagcaggttattcttatcaatggtcagtttcctgggcctagacttgacttggtgactaatgagaatgtaattctcaaccttatcaacaagctggacgagc

SEQ ID NO: 133515 - DNA, 266 bp, Glycine max
aagctcacagagcaagaacactgttccaatacggaatctaaggcaaagcaaaccaaacatcttgaatcatgggttcaacaggtgagactcagattaccccaacccacgtatctgatgaagaagcaaaccttttcgccatgcaactagccagtgcttctgtccttccaatgatcctcaaatcagcacttgagcttgatctgttggaaatcatagccaaggctggccctggtgttcatctttcccccactgacatttcttctcagctc

SEQ ID NO: 133516 - DNA, 265 bp, Glycine max
gttaatttgttagtctcggttagagagggttgagagacacaaagaagaatcatggaggtgaacaaccaaatcgtggagaggagcaagagggttaaagggagagtggttttgatgaagaagggtgtgttggacttccacgccatctaagcccctgttctcgatcgagttcacgagttattaggcaagggtgtctctcttcagcttattagtgctactactcctgatccagcaaaggggttatagaaggggaaggtggcaaacttgg

SEQ ID NO: 133517 - DNA, 268 bp, Glycine max
tcaagatgaagggagattaccacaggtacctcgccgagttcaagaccggcgccgagcgtaaggaggctgccgagagcactctctctgcatacaaagccgctcaggacattgcaaatgccgaactgcctccaactcatccaattaggcttggccttgcacttaacttctctgtattttactacgaaatccttaactctcccgatcgtgcctgcaaccttgcaaaacaggcttttgatgaagctattgctgaattggatacactgggaga

SEQ ID NO: 133518 - DNA, 267 bp, Glycine max
aaccaatcatctttagttcttcagtaatttattgtgggattctattctaagattttgagaatgtctagctgtgggtgtggaagcagctgcaactgtggcagcaactgcggttgcaacaagtactcttttgacttgagttacgttgagaagacaaccacagagactctagttttgggtgttgggcctgtgaaggccaattggagggtgctgaaatgggtgttgcatctgagaacggtggctgcaactgtggatcaagctgcacctgtg

SEQ ID NO: 133519 - DNA, 274 bp, Glycine max
ttctttttcttttccctttttcctaggcacagcacacgccctctcaaatagaaactgagagatgaattctgatcagtttcagaagaacagcatgttcgtagaaacccctgaagatggtggcaaaaacttcgacgatgatggacgagtcagaagaacgggtacatggataactgcgagtgcccatatcataacggcagtgatagggtcaggagtgttgtcacttgcatgggcaattgcacaaatgggttgggtggctggccctgccgttctcttt

SEQ ID NO: 133520 - DNA, 277 bp, Glycine max
gtttatttcacacatttatgcctcacttcactactggaggcttggcttctacttgggaggcataaatgtgtgaaataaacagaatggaagaaatcaagaacaaaggataagccaagcccccagtagtgaagggactgtaatattctttctattccaaaacatgccccaagcttgagtccattgtgaggaaacatctcaagaaggtgttcaaggatgacaatagccaagctcctgccttactccgcattttcttccatgattgttttgttcagggatg

SEQ ID NO: 133521 - DNA, 271 bp, Glycine max
ggcagactacatagagacagaccaatgtgtggaggcatgtggggttgataggaactctgttgggatttcatctgatgccttctttgagcctcaattcaccggcaagctttgctctcctgcatgttaccagaagtgccccaacattgttgaccttttcttcaacttggctgctggagagggggtatttttgccagaactgtgtgaaaagcacaagaccaaccctcgtcgtgccatggttgaacttgtgagctcaggagctgcccctggccct

SEQ ID NO: 133522 - DNA, 263 bp, Glycine max
ctcagcagaggatttgggaggtgctactgtgcactgcaagacgtcaggtgtttctgattattttgctcaagatgaactccatgctcttgcgcttgggaggaatataattaagaatttgcatatggctgggaaagatgtcttggcaaatggattgcaaaatataaattatgaatataaagagccactgtatgatatcaatgaacttcgttctattgcccccactgatcttaggcaacagtttgatatccgatcagttattgata

SEQ ID NO: 133523 - DNA, 264 bp, Glycine max
cctacttcaaggacatcaaagaaaaaagggatgaagatctattggtattgccaactgatgctgctctttttgaagacccatcctttaaggtatatgctgagaaatatgctgaagatcaggaagcattctttaaagattatgctgaagcccatgctaaacttagcaacctaggagccaaatttgatcctctagagggcattgtgatagatgattctccaaatgcagggggagagaagtttgtagcagccaagtactccactggaa

SEQ ID NO: 133524 - DNA, 267 bp, Glycine max
tctgaaacagagcatggctcctctcacattctccttcttcttcatccttatctcttacatttcttcatcatcagaagcgcgatcaatcggaataaactatggaagaattgcgaacgacctacctacaccggcgaaagtggtggagcttcttaagagtcaggggctgaaccgtgtgaagctctacgacaccgacgccaccgtcttaaccgcgtttgccaactcaggaatgaaggtggtggttgccatgccaaacgagcttctcgccaa

SEQ ID NO: 133525 - DNA, 271 bp, Glycine max
cactcgagccgattcggctcgagcaacactattcttcttcgcagcactggcgcgagtggatatggacgggaaccccatgaaggcacttacgatctgcatgatcggcgctggcggcttcataggctcgcatctctgcgagaagctcatgtccgaaacccctcacaccgtcctcgccctcgacgtctacaacgacaagatcaaacacctcctcgaaccctccgattccccctgggccggccgcatcaccttccaccgcctcaacatcaaacac

SEQ ID NO: 133526 - DNA, 266 bp, Glycine max
attgccaccaatctttcccgtcatatcagtccagtgaacggtctaactaaagctattgcaagactcgtgcttaaaaatgtccagcagggagcagcaacaacatgctatgtagcattgcacccacaagtgaagggaactagtggcaagtatttttcagccagtaatgtggccaaaacaacctcacaggggactgatgctgatttggcaaaaaaacctatgggatttcagcatggatttgaccaagtaaaaaacccaattgttatttg

SEQ ID NO: 133527 - DNA, 263 bp, Glycine max
cttgaatcttcgttatccttctttttttctccttgaactcgaatattcactatggcagatgaggtggttctgctagatttctggccaagtccatttgggatgagggtcaggattgcacttgctgaaaagggtatcaaatatgagtccaaagaagaggacttgcagaacaagagccctttgctcctcaaaatgaacccggttcacaagaaaatcccggttctcatccacaatggcaaacccatttgtgaatctctcgttgctgt

SEQ ID NO: 133528 - DNA, 259 bp, Glycine max
gatattttggggctctggagctgtcatggagaatccaatcctccaagacatagcaaaggcaaaagggaagaccatagctcaggttgcacttagatgggtgtaccaacaagggtcaagtgccatggctaaaagcaccaacagcgagaggatgaagcagaacctggacatatttgattttgtgctgagtgaagaggatttagagaggatcagtcaggttccacaacgcaggcaatacacaggggacatatggctatctgaa

SEQ ID NO: 133529 - DNA, 262 bp, Glycine max
ctgaactcgctgactgaaactcgcaaaaattagggttttgcagtgatggcactgtccaaccgcgtccgatcgggaatctctctcttcaccaaatccacgttcctcacttccgagcgatccactctccaacgattcctcgttgccccttccatttccttcgcctccagaaattacgccaacgtgccggggcaaaaggaaaacaaagttaagtcccctctggctttgtttggaggttcaggaaactatgcctctgctttgtata

SEQ ID NO: 133530 - DNA, 261 bp, Glycine max
ttttcccgcagtcatgggcaaggtcaagatcggaatcaacggatttggaagaattggccgtttggtggccagggtggctctgcagagagacgatgttgaactcgttgccgttaacgatcctttcattaccaccgattacatgacatacatgtttaaatacgacagtgttcacgggcactggaagcatcacgatgtcaccgttaaggatgagaagacccttctcttcggtgacaagccagtcactgtttttggacacaggaa

SEQ ID NO: 133531 - DNA, 269 bp, Glycine max
ctcaccaccaacgccaaacaagccctaaatctctcttctctttcatcttcttcctttaaccatgagagagatcttgcacgaccagggacgccaatgcggtaaccaaatcggttccaagttctgggaggtgatctgcgacgagcacggcatcgatcccaccggaaagtacaacgaggaaggcaacagcagcatccaactcgaaaggatcaatgtgtattacaacgaggcctctggcggaaggtacgttccccgagccgtgcttatggatc

SEQ ID NO: 133532 - DNA, 262 bp, Glycine max
cttctctcttcttctctccatacatacacttttatcggtgaactagatttcattattgtaatcagatctgagagagagacagtgtttgcgattgagggaagatgctgaccaagttcgagaccaaaagtaatagagtgaagggactcagtttcctgaagttgcgctccattttgtgaaagatgagagaatccgattcaatttggctttggagagtggcaacattcaaattgcagttgcatcagcaacagcaatcgatgaaaaa

SEQ ID NO: 133533 - DNA, 262 bp, Glycine max
ctgaactcgctgactgaaactcgcaaaaattagggttttgcagtgatggcactgtccaaccgcgtccgatcgggaatctctctcttcaccaaatccacgttcctcacttccgagcgatacactctccaacgattcctcgttgccccttccatttccttcgcctccagaaattacgccaacgtgccggggcaaaaggaaaacaaagttaaggtccctctggctttgtttggaggttcaggaaactatgcctctgctttgtata

SEQ ID NO: 133534 - DNA, 259 bp, Glycine max
aacaactccttctgttcacaaactcatcttcaattccttttctgatctacgcaaggttaaggttaattttatctatctacttggacatgaacgaaatcgatgttccttcgttctttctctgccccatttcgctagatatcatgaaggatccagtgacggtctcaacgggcatcacctacgaccgtgaaagcatcgaaacctggctgttctcgaagaaaaacacgacatgccccattaccaaactgcccttgatagatta

SEQ ID NO: 133535 - DNA, 257 bp, Glycine max
gtacaaggtgcacacatacaacaggaatggtctttgcgcgttgggatttatggatgatcattacccgattcggagtgcgttttctcttctcaatcaggtaatagatgaatatcaaaaaaactttggcgagtcatggagaaatgctcaggaagacagtactcaaccatggccctatttgaatgaagctctggcaaaattccaggatcctgcagaggcagacaagttgatgaaaatccagagagagttggatgaaacca

SEQ ID NO: 133536 - DNA, 259 bp, Glycine max
tcctgccagtagtcatatgcttgtctcaaagattaagccatgcatgtgtaagtatgaactaattcagactgtgaaactgcgaatggctcattaaatcagttatagtttgtttgatggtatctactactcggataaccgtagtaattctagagctaatacgtgcaacaaaccccgacttctggaagggatgcatttattagataaaaggtcaacacaggctctgcctgttgctttgatgattcatgataactcgtcggat

SEQ ID NO: 133537 - DNA, 259 bp, Glycine max
ctcgagccgcggcaaagaagatgccgccaacaactttgcccgtggccattataccattggaccagagattgttgatctgtgcttggaccgcatcagaaagcttgctgacaattgcactggactccaagggtttttggtcttcaatgccgttggtggaggaactggttctggacttggttcccttctcttggagcgtctctccgttgattatggcaagaaatcaaagcttggtttcacagtctacccctctcctcaggtg

SEQ ID NO: 133538 - DNA, 265 bp, Glycine max
ctgctattgacaacttaatggttcaacagcttgatggaactgttaacgaatggggttggtgcaagcaaaagctaggagcaaatgccatattggcagtgtctcttgcagtctgcaaagctggtgctagcgtcctgaaaattcctctttacaagcatattgctaatatcgcgggtaacaaaaagttggttttgcctgttcctgctttcaatgtcattaatggtggatcacatgctggaaacaaacttgctatgcaggagtttatggt

SEQ ID NO: 133539 - DNA, 266 bp, Glycine max
aattgcggaatcagctagaattttctaataatggccaaagacgttgagcaggttacagagcaaggtgaatactccgcgaaggattaccatgacccacctccggcgccgttgatcgacccagatgagctcactaagtggtccttgtacagagccgccatagctgagttcatagcaacactccttttcctttacatcaccgtgttgaccattattggctacaagagacagagtgacaccaaaatccccggtaacaccgagtgcgacgg

SEQ ID NO: 133540 - DNA, 266 bp, Glycine max
ctggaggagctcgagccgttcccaccagagaatctgaagaagcgacttgaccagttggagaaggtgaagagggtgaagaccgagaaaaggaaaccggttgctgttcctgccaataagagaactcgagcaagcaacagcaatggaggtccaatgccaccagccaaagctgggcgtttgactaatgcatatgtatcatctttccctgctgctcctacatttgtcaggtctccatcacacgggcaatacccagctgctcttccagctta

SEQ ID NO: 133541 - DNA, 257 bp, Glycine max
tttcttcgttccttccccaacccaatcttcgccttcgcccacaacaactcctccttcaggatcgctgccaacgttactttccatttttacccttcatcctcgagaaaaaaatggcgaacgcagcatctggtatggccgtccatgatgagtgcaagctaaagtttctggagctcaaggcaaagaggacgtaccggtatatcgtttttaagattgaggagaaatcgaagcaagttattgtggagaagctgggtgaccct

SEQ ID NO: 133542 - DNA, 258 bp, Glycine max
agtgaataagatttaattaacatggagggatacaacatgaaggttatgattgtggggatggtgttgggcatggtgatgattgggatggccaatgggcaatattactcgttttgtcgcatgcccagcgatgggatggcggcatgcaagccgagtgtgagtggagacaaccctgttgatccttccactgattgctgctcagccattgctaaggctgatcttaaatgcttctgccgctacaaggattcgggacttctctct

SEQ ID NO: 133543 - DNA, 261 bp, Glycine max
ttgacagactgagagctctttcttgattctatgggtggtggtgcatggccgttcttagttggtggagcgatttgtctggttaattccgttaacgaacgagacctcagcctgctaaatagctatgtggaggtaaccctccacggccagcttcttagagggactatggccgcttaggccacggaagtttgaggcaataacaggtctgtgatgcccttagatgttctgggccgcacgcgcgctacactgatgtattcaacgagt

SEQ ID NO: 133544 - DNA, 125 bp, Glycine max
caccaacataacaatgtcgttgattccaagtttcttcggcaccgggcgaagaaccaacgtcttcgaccccttctccctcgacgtgtgggacccattccatggcttccccggcaccaccgccctct

SEQ ID NO: 133545 - DNA, 237 bp, Glycine max
cgggctggggatgtgactgtggacaggttgaagtgggggaatgatttcttgaagaagaggttggagcctggttcacactcccaggttagtcctcaggcactggagagcatcaaaagggttaagaagttgaccaagatgtctgagaaggttgccactggtgtcctctctggggttgtcaaggtatctggattcttcacaagttctgtagtcaactccaatgctggaaagaagttcttt

SEQ ID NO: 133546 - DNA, 235 bp, Glycine max
acttggtacaactcaaagtcatgattctatttggtttgctcaaccaacaaattattccgagaatatacaagaagataaaaaaatacgagattgtatcaaaaattatatacaaaaaaatataagaatatcctctggtgttgagggaattggacagataaagattcaaaaaagaattgatcttattcaagttataatatatatgggatttccaaagtttttaatagagggtaagtct

SEQ ID NO: 133547 - DNA, 234 bp, Glycine max
caaagaaaggggtggtggctgcttcgaaagcttaataatttgtttatttccagaacatcatagttttcgcagcagcaaactaacaaattactcatatcatataataagatggcccgttctctctcgcaagccaaacgtattggtgtctttgttgctcaatctatctccctaattcccgttcatcggcgcggttacgcagtggcatccgatgtatcgttaagagttggattgggt

SEQ ID NO: 133548 - DNA, 238 bp, Glycine max
gcaccatctaaggaaacaaaggcacagagtgatgaatcagttaaagaaagcagcactgaagggcttccaatggaggatagtccctatgtgaaatacaaggatttggaggattataagcgtcagggttatggtacacaaggtcatcaagaaccaaagacaggtcgtggagctggagccactgaagcaccctctctctctggtgctgcagtttcatctgctgcacaagtcgctgccactg

SEQ ID NO: 133549 - DNA, 236 bp, Glycine max
acaaaattgaactgtaattgtagtagtagacagtagcaccatgagccaggaacagctcaagaaacctcaaggggagcaggaccccatcaaatacggcgacgttttcaaagtctccgacgaactcgctttcaaacccatcgcgccaagagacgcagctctcatgcaagccacggagaaccaagaattgggccaaactcaaaaaggaggtcccgcctcgctgatgcaatccgccgcaa

SEQ ID NO: 133550 - DNA, 237 bp, Glycine max
agtatagagtcagaaggagggctcattgagacatggaaccctaacaacaagccattccagtgtgccggtgttgccctctctcgctgcaccctcaaccgcaacgcccttcgtagaccttcctacaccaacggtccccaggaaatctacatccaacaaggtaagggtatttttggcatgatatacccgggtcgtcctagcacatttgaagagcctcaacaacctcaacaaagaggacaa

SEQ ID NO: 133551 - DNA, 241 bp, Glycine max
cggagaccgccgaggcgacggcgaataaggcaggggagatgaaggaggcaacaaagaaaaagacggcggagaccgcggaggcggcgaagaataaggcgggggagatcaaggacagagccgcggagacggcggaggccgcgaaaaacaagaccgcggagaccgcggaagtgacgaagaataaggctttggagatgaaggatgcagcgaaggacaggaccgctgagacaacggatgcggcgaa

SEQ ID NO: 133552 - DNA, 236 bp, Glycine max
cacacaactactacaagtacttccttacaatcaaaaccaacaacaactatggcaagttatcaaaagcactacgatgatcagggtcgcaaggttgacgagtatggcaacgttgagaagcaaaccgacgaatacggcaaccctgttcatgctgctagtgtcacctatgtagccaccagaactgctgctggtggttacagtgatgacattaataagcaacatgataccaccaatgccta

SEQ ID NO: 133553 - DNA, 235 bp, Glycine max
aactactacaagtacttccttacaatcaaaaccaacaacaactatggcaagttatcaaaagcactacgatgatcagggtcgcaaggttgacgagtatggcaacgttgagaagcaaaccgacgaatacggcaaccctgttcatgctgctagtgtcacctatgtagccaccagaactgctgctggtggtcacagtgatgacattaataagcaacatgttaccaccaatgcctacggc

SEQ ID NO: 133554 - DNA, 236 bp, Glycine max
gcacgcattgccttccatccatcagggaagtacctgggcactgctagctttgacaagacatggagattatgggacatagaaacaggagacgagttgctttttcaagaaggccatagtagaagtgtatatggtttggctttccacaatgatggatcattggctgcatcttgtggactagactccctggctcgtgtttgggacctccgaactggaagaagtatccttgcactggaagg

SEQ ID NO: 133555 - DNA, 233 bp, Glycine max
gtcatcgaataatgccgccggcggtattgcgccgccgttggaggtggacgggctgccggagaattttgattggagatagagaggagctgtcaccgcagttaagttacagggtagatgtggatcatgctgggctttcagcaccacaggatctatagaaggagccaattttcttgccaccggaaagctcttcagtcttagtgaacaacagctccttgtctgtgacaacaagtgtg

SEQ ID NO: 133556 - DNA, 233 bp, Glycine max
gttgcagaccgagctagctagctagcaagcaagcacagagatggaggcaaagcgaggccatgccctcatgtgcttggcacgtgtttcactcttcctctgcgctctaaccctatccgctgctcacggaagcaccacggttcaagacatcgcgagaaagttgaaactcggggacaacgagcttctgcgctcggagaagaagttcaaggttttcatggtgaattacgggaggagct

SEQ ID NO: 133557 - DNA, 235 bp, Glycine max
ctacacagtacacacactagaagaataatggcttccatcctccactactttttagccctctctctttcttgctcttttcttttcttcttatccgactcagtcacccctacaaaaccaataaaccttgttgttctacccgttcaaaatgatggttccacagggctccattgggccaacctccaaaaaagaacccctctaatgcaagtaccagtcctgctggacctcaatggaaatc

SEQ ID NO: 133558 - DNA, 234 bp, Glycine max
gtcatcgaataatgccgccggcggtattgcgccgccgttggaggtggacgggctgccggagaattttgattggagagagaaaggagctgtcaccgaagttaagttacagggtagatgtggatcatgctgggctttcagcaccacaggatctatagaaggagccaattttcttgccaccggaaagctcgtcagtcttagtgaacaacagctccttgactgtgacaacaagtgtga

SEQ ID NO: 133559 - DNA, 231 bp, Glycine max
ccttgcaaggctaaatactcctgggtgaccgatagtgaagtagtaccgtgagggaagggtgaaaagaacccccatcggggagtgaaatagaacatgaaaccgtaagctcccaagcagtgggaggaggctcgggactctgaccgcgtgcctgttgaagaatgagccggcgactcataggcagtggcttggttaagggaaaccaccggagccgtagcgaaagcgagtcttcac

SEQ ID NO: 133560 - DNA, 236 bp, Glycine max
aatcctagtacaccgtattaaagaatttaagatatactatgatgagagcgcggttcccattactgttgctgggagttgttttcctggcatcagtttctgtctcatttggcattgcgtattgggaaaagcagaaccccagtcacaacaagtgcctccgaagttgcaatagcgagaaagactcctacaggtaccaagcatgccacgctcgttgcaacctccttaaggtggaggaagaa

SEQ ID NO: 133561 - DNA, 236 bp, Glycine max
cacacaactactacaagtacttccttacaatcaaaaccaacaacaactatggcaagttatcaaaagcactacgatgatcagggtcgcaaggttgacgagtatggcaacgttgagaagcaaaccgacgaatacggcaaccctgttcatgctgctagtgtcacctatgtagccaccagaactgctgctgctggttacagtgatgacattaataagcatcatgataccaccaatgccta

SEQ ID NO: 133562 - DNA, 232 bp, Glycine max
ctcgagccgctttgctggagacactgaccttggactccaatatgttctacaaggatgtcctaatctgcagaagcttgaaatcagggacagtccatttggggatggagctttgcattctggcttgcatcacttttacaacatgaggttcctctggatgtcctcatgtaagttgacgcgccaagcttgccaagaagttgcgcagacattgccccatctggtgttggaagtcatt

SEQ ID NO: 133563 - DNA, 234 bp, Glycine max
gttatacaggcgctatggcatttgatgtagagtacgcacgatggttagaagagcataatagacaaaccaatgagctaagggctgcaataaattctcatgctggagatattgaacttcgaaccattgttgacaatttcatgacacaatttgatgatatcttcaggctgaaaggtattgcagcaaaacctgatgttttccacattctgtcaggaatgtggaagactccagctgaga

SEQ ID NO: 133564 - DNA, 235 bp, Glycine max
aaaagatcaatgttaatggaggtgcaatggcaattgggcatcctctgggttcaacaggtgctcgatgtgttgcaactctgttgcatgaaatgaagaaacgtggcagggactgtcgatttggagttatatctatgtgcataggtactggaatgggggcagctgctgtttttgagagtggtgattgtgctgatgagctatgcaatgcccggaaagtgtatgaccttcttttatccaa

SEQ ID NO: 133565 - DNA, 236 bp, Glycine max
tttatttacaacaacaatggcttctgtgcctcaaccaaaaatctcccttctaaccttattcttcttctcgtccttcaccatcattgcgcatgcaattgttcctcaaaacgaaaccttcaaatttgagaactcaggtgaacttggaccctacatcgttgagtacggtgcagattacagaatgataagcatcttcaactctccattccaagttggtttctacaacaccaccccaaatg

SEQ ID NO: 133566 - DNA, 236 bp, Glycine max
gggtgatgtagcactgaatgccaaagattatgctcaaaaaagcaaagattacgcaggtgatgctgcacagaatgtcaaagattatgcaagtgatgcagtgcagaagagaaaagagtattctggtgatgcttctcacaagagcaaagaggcttctgattatgccagtgagacggctaagaagaccaaagattatgtcggtgatgctgctcagagaagcaaaggggctgctgaatatg

SEQ ID NO: 133567 - DNA, 235 bp, Glycine max
atcacacacaactactacaagtacttccttacaatcaaaaccaacaacaactatggcaagttatcaaaagcactacgatgatcagggtcgcaaggttgacgagtatggcaacgttgagaagcaaaccgacgaatacggcaaccctgttcatgctgctagtgtcacctatgtagccaccagaactgctgctggtggttacagtgatgacattaatatgcaacatgataccaccaat

SEQ ID NO: 133568 - DNA, 236 bp, Glycine max
gacgcaacgttagagaagggtcagcaaggctatgctgtgacaaaggacaccatttcaagtgcagcgaaaaccgcttcggagaaaactgcgccagtggcagagaaggccaaagactacactcttcaggctgcggagaaggccaagagtgcgggtggcacaacggcgagttacgtcggagagaaagcggtgcaggccaaggatgtcgccgtggagagtgggaagagtgcggctgggta

SEQ ID NO: 133569 - DNA, 232 bp, Glycine max
cagatttttgatactggatcacttgagggcccacatgctttatttgaagtgcgtaatgttcaagtttatggaggctttgttcttcacattggtaatgggactggtgtctcagttggcgacaaagtagtgtgcaaggttgattatggaagacgcgcccttatagcccctaaccatacctgcacacatatgttaaattttgcccttagggaagtatttggtgatcatgttgacc

SEQ ID NO: 133570 - DNA, 232 bp, Glycine max
caacagccatgcttggggcagttccatctagatataattggaatggtggggagattgggtttgatgtttacttctcgatggcaagagggaattcatctgtaccagctatggaaatgaccaagtggtttgacacaaactatcattacattgttcctgaattgggtccagatgttaagttctcctatccatcacacaaggttgtggatgaatacatagaggctaaagttctggg

SEQ ID NO: 133571 - DNA, 231 bp, Glycine max
acacgttcgtgtccccacgccactttgattccgaggttgtcttgttcaacattaaggggagagccgtacttgggttggtgagggaaagtgaaacagaaaaaatcaccctagaacctggagacatgatacacataccagcaggcacaccactgtacatcgttaacagagatgagaatgagaagctcctcattgccatgctccatatacctgtctctactcctggaaatttga

SEQ ID NO: 133572 - DNA, 232 bp, Glycine max
cacaactactacaagtacttccttacaatcaaaaccaacaacaactatggcaagttatcaaaagcactacgatgatcagggtcgcaaggttgacgagtatggcaacgttgagaagcaaaccgacgaatacggcaaccctgttcatgctgctagtgtcacctatgtagccaccagaactgctgctggtggttacagtgatgacattaataagcaacatgataccaccaatgcc

SEQ ID NO: 133573 - DNA, 234 bp, Glycine max
gcgggagagtccattaaggaaacagctacaaacattggtgcttctgccaaggctggcatggagaagaccaaggccactgtccaagagaaggcagaaagaatgacagcacgtgatccggtgcaaaaggagttggcaacccaaaagaaagaggcaaagatgaaccaggcggagctggacaagcaggcggcgcgtcagcataacacggcggccaaatagtccgccaccacggctggg

SEQ ID NO: 133574 - DNA, 232 bp, Glycine max
tttctgaagccagtaacgtttcaaaaactcaagaatcaccatttgaccagcgcaggctgtttggttttcgtcctcgctccccaccacttccatacttgttgtcttggttattgcagacacgtacctacccaaaactccctgctgatcagggtggggctgacaatggtgattctgatattgaaatggctgatttatctgattctgatctagatgtagatgaggatgagtatga

SEQ ID NO: 133575 - DNA, 234 bp, Glycine max
ctcagtacggtgacgtcgttgaatcgaagattatcaacgatcgtgagactggaagatccaggggatttggatttgttaccttcgcctccgaggattcaatgagggatgcgatcgaagggatgaacggtcagaaccttgatggacgcaacatcactgtgaacgaagctcagtcccgcggaagccgcggtggaggcggtggcggttacggaagtggcggtggatacaaccgcagtg

SEQ ID NO: 133576 - DNA, 231 bp, Glycine max
gccatcttcaacttcacctgtattgagatgcgcgatcacgagcagccacaagatgccctttgtgcacccgagaagcttgtgaagcaagtggctctggcaacgcagaaggcacaggttccacttgctggtgaaaatgcgctgccacggtacgatgagtatgctcatgagcagatcataagggcattacagttggatgttgatggtgactctggcggaagagagatgtgtgca

SEQ ID NO: 133577 - DNA, 231 bp, Glycine max
atcgattaaagacttgcttccaagatggttctgctagagaagctctgggatgacgttgttgctggccctcaacctgagcgtggccttggcaagctcagaaaactcaccaccctcaaaactattgatgaaggagacagtagcaagctgcagaagacgttgtcgatgccgtcgacaccgacaaccctgatgactcccacgactccaacgacaccgggatccgcgcgtaaagct

SEQ ID NO: 133578 - DNA, 232 bp, Glycine max
gtcacctttccgttcatttcctctgttttttcttcaaatccattgtttcgtggaaatcccgaaatttaaccatgcttctccgaaccgccgcctccgccgcttctgcttcgtccctctccctcttcagccctacctccgaacctctccgttcggttcccgctcgtggattggtggttcgcgccgcttaaggatccacgaaccaccgcgccctatccggcgtgatctttgaacc

SEQ ID NO: 133579 - DNA, 233 bp, Glycine max
cagtgggtgaacttaagaaattggtcgaagagggtaaagtcaaatatattggattatctgaagccagcccagatacaataaggagagcacacgcaattcatcccatcacagctgtgcaaatagagtggtctttgtggactcgtgacattgaagaagagatagtccctctctgcagggaacttggtattggaattgtaccatatagtcctcttggtcgtggcttttttggcggc

SEQ ID NO: 133580 - DNA, 234 bp, Glycine max
cgcgtcgctgctccgtaccagtttcactgcataaatttgagagaaaactctgcaaacatgttggtttatcaggacctccttacaggtgatgagcttctctcggactccttccgttacaatgaaattgagaatggaatgctgtgggaagttgaggggaagtgggttgttaagggagcagttgatgttgccattggtgcaaacccttctgctgagggtggagaagatgagggagtc

SEQ ID NO: 133581 - DNA, 233 bp, Glycine max
tgcagaccgagctagctagctagcaagcaagcacagagatggaggcaaagcgaggccatgccctcatgtgcttggcacgtgtttcactcttcctctgcgctctaaccctatccgctgctcacggaagcaccacggttcaagacatcgcgagaaagttgaaactcggggacaacgagcttctgcgctcggagaagaagttcaaggttttcatggtgaattacgggaggagctac

SEQ ID NO: 133582 - DNA, 233 bp, Glycine max
ctccttctctcgttgattcggatctagagtcttttttcactcttcagttctcgttgttgttcttcgctttcctgaaactagggttttcaatttcgattcattcgttaataattaaagatgtttgggagggcaccgaagaagagcgataatacgaggtactacgaaatcctcggcgtctcgaagatcgcttcgcaggatgatctgaagaaggcttacaagaaagccgccatcaa

SEQ ID NO: 133583 - DNA, 236 bp, Glycine max
gagaaaagtagtgtattaagactacaaattttcaatttttcaatggcgtcgaggcaacaaaaagaggatcgagctgaggcagctgcgaaagttgctgcgaaagaactcgaacaactcaaccgagaaaaagaccgtgatttcagtgttggtgttgcagaccaacaccaacaagaagaacatcagttagatcaacaaaagcgtggtgtaatcggatccatgttcaaggcggtgcaaga

SEQ ID NO: 133584 - DNA, 233 bp, Glycine max
actcgagcgattcggctcagatcaccattactgatggtaacgacaaaactagtgcaactttgcaatttagaaagttagcagattgtgattttctcaagagaaactttaagcagatgtctaatgttttgtgggtggctcctgaggacaaggcgagtttatggtcacaacttcattatgtttcgtgtattaatctggaaatgcaagaagcttatcttgtcaatctcgtaaatgtg

SEQ ID NO: 133585 - DNA, 231 bp, Glycine max
cgcccctcagcccgatgatattgccaaagctgttagtggggaagctgctgaaatgattatccaagtgtctgatagtgtggttcctgcattcaagtctgctgctgaagagcttttgaacagttctggtttaccagtcattgaattactggcaaaggctcttgccaaggctgttggttataccgatgtaaagcaaagatcacttctcacttccatggagaactatgttacatt

SEQ ID NO: 133586 - DNA, 230 bp, Glycine max
cacttccttccgcaaatggcttctcacgacagcatctccgcttctccaacctccgcttctgattccgtcttcaatcacctcgttagttctcccgaagatcctatcctcggggtaactgtcgcttataacaaagatccaagtccagttaagctcaacttgggagttggtgcttaccgaactgaggtaggaaaacctcttgttttgaatgtagtgaggcgagttgaacagca

SEQ ID NO: 133587 - DNA, 230 bp, Glycine max
gtgaaaataggctcaaaatctttcttgggcattctccgaatcatcatggttggagttttcattggtctttttggaagtattggttttggaaggcagcttcttttgaaatttcctgaaatattcagccttggttggttcaggaagaatggcccctctgaagaggaggtggaaagtgcttccttctagatgtggtttgttggacatggttatagtgatgggagcattgcttc

SEQ ID NO: 133588 - DNA, 231 bp, Glycine max
gcggagaaaaaggaaacaaggatagaccagaactgaaaacacgaaccagagaggtaataggaagaacggagaaagaaagaggaagagaaagtggaggacaagtagtggcagagaaaggaagagaaacagaaactgcaaggggaagggttggtgctgaaaatgaaggtgcaagaacaaccgctgttataacttgcacgttggaaaaaggtggtggtactcagaaaccaataa

SEQ ID NO: 133589 - DNA, 250 bp, Glycine max
gatggcacaagttgttaagccacatgaacctaagacacagtcatttaaacttttgagtggtcataccataccggctgttggattgggcacatggaagtctggttcacaagctgccaattctgtgatcaccgccattgttgaggctggttacagacacatagacactgcttcgcagtatggagttcaagaggaagttggacatgcactccaatctgccatgcaagcaggagtggaaaggaaggatctattt

SEQ ID NO: 133590 - DNA, 249 bp, Glycine max
ggaaaatcgagttgacatttcatccgtgcagcagcaggatcaagcagttgaagacgaaatgaaggtcaagtttgtttccacctctaaaaaggcctcatcccagggtactagctttctacagcgctacgcaatgccatcatgggagctgctgatgccgtgcgtcgagttgcaaccaagggtgctggggcatttgtcgaagatactaaaagaaccgaagcccttgtgcaaacaggcgatggaatgatttgg

SEQ ID NO: 133591 - DNA, 246 bp, Glycine max
gcgaaaacgctcatttcgtctcaatcgttcatcggcacaccgctcccctcactccctcgccaccacctcccccaccgcaccaggctcgtcgccaccaaagtcctcgtcagcctccacgaaattccccaatccactccataagctcgcaacattgacttcgccggaatcgtgactagagcgaggcttctctacacgctcgccgatgctgcggttgcggcggaccctgcggttgctgcggactctgcg

SEQ ID NO: 133592 - DNA, 245 bp, Glycine max
catggcgataggagagtttgtagctgtgtgcactcagtatgaagttgaggtaggtcaaatgaagagagagatgaataatgaggagaaagacttggagatggggatggagaaaagaggattgcctatccattgcaagctactttggcatctgcagtgtccttttctataggtgcattggtgcctctactttcagctgctttcatagaaaactacaggactagggttattgtggttgtggcaatggt

SEQ ID NO: 133593 - DNA, 246 bp, Glycine max
ggcggacggcaagcccctccactacaagggctcgtccttccaccgcgtgatcccgagtttcatgtgtcagggtggcgacttcaccgccggaaacggaaccggcgacgagtcgatttatggcgcaagttcgccgacgagaacttcgtgaagaagcacaccggtcccggcatcctctccatggcgaacgccggtcccggaaccaacggatctcagttcttcatttgcacggagaagacagagtggctc

SEQ ID NO: 133594 - DNA, 242 bp, Glycine max
tggtgacatgatgctgaaacaactgttgcatcaccaggatgccattctatgctgttcactgaagtcattgccagtgttcatatttgcaaatcaagctggccttgacatgttggaaacaacccagttgccttacaagatatcacattggataaaatatttgatgaggctggacgcaaggcattgtgtacagactttgccaagttaatggagcagggttttgcttatctgccagctggaatctg

SEQ ID NO: 133595 - DNA, 255 bp, Glycine max
ggacttacaaattatgcagcagcttattgcactggtctcctgttggcccgaagagtcctcaaaacacttgaaatggatgaggagtatgaaggaaatgttgaggctactggagaggattattcagtggaactgccgagagcaggaggccattccgtgcactccttgatgttggtcttgttaggactacaacaggaaatcgcgtctttggtgcccttaagggagctctggatgggggtttggatattcctcacagcg

SEQ ID NO: 133596 - DNA, 253 bp, Glycine max
ctgatatcggccttaagccaagaaatgtgaaaaaagctgctgttattggaggaggtctaatgggttctggcattgctacagctcttatactaggcaacattcgtgttatactcaaggaaatcaattctaatttcttctgaagggaataaaaacaatagaagcaaatgttaatggcttagtaagaagaggaaagttgacgaaacagaaggcagatgctgcactgtcactgcttaaaggtgttctggattactca

SEQ ID NO: 133597 - DNA, 248 bp, Glycine max
gtgatgtccaccgtgcagagccagattggaaaataatattgttaagatacttcaacccagtcggtgcacaccccagcggttgtattggggaggatccccgcggaattccaaacaatctcatgccattgttcagcaagtagcagttggccgacggcctgcactgacagtttttggaaatgattataatacaactgatggcactggggtatgctctgactgacttaaacttatgcactgaaatttttcca

SEQ ID NO: 133598 - DNA, 244 bp, Glycine max
gtaggtgaggaatacccaaacagcatctcattctactgtttattggccagatggcttctgcgctatttcgagctattgcagcactgggtagaaacatgattgtttccaacacatttggagccttgcagttctcacgtttcttacattgggtggttacgttatgtcaaaaaatgatatcaaaaactggtggatttggggctactggatttcacctttaatgtatgggcagaatgctttgatggtc

SEQ ID NO: 133599 - DNA, 248 bp, Glycine max
caaaaggcattttagaaagaaatattgagttttctcagctggttgttgactaccaacgaaaattgcgtgaaagcactgagtcattgattgctgctgaggagctttcgcggaaactttctatggactgtcagttttaaagcaagaaaaggaagtcatatcaaatgctgaaaaaagggcatccgatgaagttcacagtttgtctgcaagggtgcagcgtttgcaggctagtttgagtaccatacagagta

SEQ ID NO: 133600 - DNA, 244 bp, Glycine max
gcactgtggacaaatcaggagaagaacgtgctcaagaggaaggcattggcatcgatgagtccaagttcaggactggtaataacaagaaccagaatcagaacgaagaccaggataagtgataatgaacacccttcactagcatgtgtagtgtgttcttatgctagcttaaatgtgagtgtcaagtgttttaggaagtaggaaaagaataggttataaaaaataatgtttaggcaatagttatata

SEQ ID NO: 133601 - DNA, 244 bp, Glycine max
ggattatgcaagtgatgcaactgatgctgcaaaaaagactaaggattatgctgcgcagaagaccaaggactatgccagtggtggtgcgcagaagaccaaggactatgccagtggtgctgcgagaagaccaaggactatgcaagtgatgctgcgcagaggaccaaggaccatgcaagtggtggtgctcaaaagagcaaagaatatgcgggtgatgtagcacagaatgccaaagattatgctcaaa

SEQ ID NO: 133602 - DNA, 242 bp, Glycine max
catttgtgtcactggatggactgccactccaatgcaggatgttcaggttacaattgattggtttatttcctctcaggaatgtgttcccaggacttattgtgttttaaatccacaaaatcctttgtgttgaataggtggatggggaaactgactttcccccagggcacttcccgaagtgttaagagaatgcctctttctatagggggaggagctggtgcaaagaatgctattctcatgaatat

SEQ ID NO: 133603 - DNA, 245 bp, Glycine max
aactactacaagtacttccttacaatcaaaaccaacaacaactatggcaagttatcaaaagcactacgatgatcagggtcgcaaggttgacgagtatggcaacgttgagaagcaaaccgacgatacggcaaccctgttcatgctgctagtgtcacctatgtagccaccagaactgctgctggtggttacagtgatgacattaataagcaacatgataccaccaatgcctacggcgtagacactgg

SEQ ID NO: 133604 - DNA, 249 bp, Glycine max
ggagaattacgggaggagctactccacagaggaggagtatttgcgccgtttggggattttcgcccagaacatggtcagagcggcggacatcaggcgctggaccccaccgccgtccacggcgtcaccagttctccgatctcaccgaggacgagtttgagaagctctacactggcgtcaatggcggcttcccgtcatcgaataatgccgccggcggtattgcgccgccgttggaggtggacgggctgccgg

SEQ ID NO: 133605 - DNA, 248 bp, Glycine max
aaagagagaaagagaggaaattggcgtgtcgtggcgtgatcggggcacagtctgaatctgaaatccatcttcaaaatctcaattcaatataggagggagctgtgccctgccctgacgttaaaaaaattcgctgaatatgaaaaccctaacccaagcattggcgaagaccgcggcggtgatcgagaagacagtgcagacgacggtgcaggaggtgacgggcccgaagcacttcaggactacgagctgct

SEQ ID NO: 133606 - DNA, 247 bp, Glycine max
tagagcttgcacctattggtatcttctacaatatcctaaagtgcttgtcttcttcttcatcaccatgtctttactttcagacctcatcaacctcaatctctcagaatccacagaaaagatcattgctgatacatatgggttggtggatctggtatggacctcagaagcattgccaggactcttcctggggcagtgagtgaccctgcaaaacttccgaagtggaactatgatgggtctagcacagatc

SEQ ID NO: 133607 - DNA, 253 bp, Glycine max
gcagcacctttaaacgccgaaggttcatccaatctccgaaggccttcaccggattgcaaccatgtcgaggagaaaggttagagagctaaaggaggaaaacgtgactctgggcccagctgttagagatgtgaacatgtttttggagtcgctcgcatctttgcctccttcaatgacacctttcttcatgtcactgatctgtctgggagggaaacacttgtccgcatcactggcgggatgaaggttaaagctgaca

SEQ ID NO: 133608 - DNA, 245 bp, Glycine max
ttcgagcgattcggctcgactcttcaccagctatagttcacctgaactaactgcactgccactgaacaccctcacctggcaccttcttcttctcttttctcctcttcaatgcatatggagatgttgctccaaagacatcaaagtgtccccaaaattttgtatgctgtcatagcaaaatctcctatatagaacctaattatttaaaaccagtatgctgtcctaattcaagatctttaagtatgaat

SEQ ID NO: 133609 - DNA, 247 bp, Glycine max
gattactgcaactgcagttgtacttgagtttaatcatgcagcaaggatagtgaagaaaatcaaattggttggttatccatgcaagatattcaagaagacagcacttatcaaggatatgtttactcagatcttgaagtagctcggtttgaaggtgcagctattcggacagtcagtgggatcagggggcaggtcaagaaggctgcaaaagaagagataggtaatcaagcgaaaaggtagggagggcaaa

SEQ ID NO: 133610 - DNA, 245 bp, Glycine max
ggcaatttgtaagaaagatatttggagagttgaatgtggaatcccttctggatttccgctcacagttatttgcaatagcatttttaatgagatgctcattagatatagctatgagaaattattcgccaggctaaagctccaagtatgtttttacaatccttcaaaaattttgtttctttgtgtgtgtatggtgatgataacttaattagtgttcatgaatatgtcaagccttactttagtggttc

SEQ ID NO: 133611 - DNA, 246 bp, Glycine max
ggagagaaagagagagagagagagaaaaatggctgatacaagtggaggagatgcagtgagaccggtggtaatatgtgataacaagtgtggctgcacagttccatgcactggtggttccacttgaggtgcacaagtgtcggcatgacaactggaggcggtgatcacgtgacatgctcgtgcggagagtactgtgggtgcaatccatgctcatgtcccaagactgcggcttctggaactggttgcaga

SEQ ID NO: 133612 - DNA, 243 bp, Glycine max
attttgttcaaggaaaagatctcgcaatggttaaagttaatgtagcatgtgctgctgttggcttgacatcaagttacactccaactccattgttggaatctggtttgcaaaaagacagagggtaattgtggagtattttggaaggatgtcttacgttgctcataacattaatcagccccaagagaaagatttgttggagggaaatttttcctttgacattaaatctcgctctagattggaaaa

SEQ ID NO: 133613 - DNA, 251 bp, Glycine max
acctaatgtaaaaaagccaaaggagtgtaccaaagtcttccttgtgaagctgccagagagtagaaagttcattgtgcctaaaaacatgagggtgcttgcagttccgttgtgccaagttcatgaaaacacaagacatatgggcaaattatatcaggggtcccacagctgctgtcaaaattctctttcaacatgatagaatcttgatacctgattgcaacctattttatcatccagggtgaagggactaaggc

SEQ ID NO: 133614 - DNA, 253 bp, Glycine max
tcttcatccttctctgttctcctagaacttgattacttgaacattccctatgacagatgaggtggttcttctggatttctggccaagtccatttgggatgagggtcaggattgcacttgctgaaaaggtatcgaatatgagtacaaagaagaggacttgaggaacaagagtcctcttctcttacaaatgaacccggttcacaagaagattccggttctcatccacaatggcaaacccatttccgaatccctca

SEQ ID NO: 133615 - DNA, 249 bp, Glycine max
ctcgagccggggcgaagcccgtctgatagcgctctgtgcgcgaactccgaaagggaaacgggttaaaattcctgatccgggacgtggcggctgacggcaacgttagggagtccggagacgtcggcggggccccggaaagagttatcttttctgtttaacagcctgcccaccctggaaacggctcagccggaggtagggtccagcggctggaagagcacagcacgtcgcgtggtgtgcggtgcgcccccg

SEQ ID NO: 133616 - DNA, 249 bp, Glycine max
gtcagcaaggctatgctgtgacaaaggacaccatttcaagtgcagcgaaaaccgcttcggagaaaactgcgccagtggcagagaaggccaaagactacactcttcaggctgcggagaaggccaaggtgcgggtggcacaacggcgagttacgtcggagagaaagcggtgcaggccaaggatgtcgccgtggagagtgggaagagtgcggctgggtatgctgccaaggtggctgctgatttgagggacaa

SEQ ID NO: 133617 - DNA, 246 bp, Glycine max
gcaagatcattatcgatacttatggaggatggggtgctcatggtggtggtgctttctccgggaaggaccctaccaaggttgataggagtggtgcttacattgtgagacaggctgctaagagcatgtggcaagtggacttgccagaaggtgcattgtgcaagtgtcttatgccattggtgtgcctgagcctttgtctgtgtttgttgacacctatggcactgggaagatccatgataaggagattct

SEQ ID NO: 133618 - DNA, 246 bp, Glycine max
cttctcttgcggctagggttttagcgcagttgcttctagatttaaggaagatgggtaaggaaaaggttcacatcagtattgtggtcattggccatgtcgactctgggaaatccactaccactggcacctgatttacaagcttggaggcattgacaagcgtgttattgagaggtttgagaaggaagctgctgagatgaacaagaggtctttcaagtatgcctgggtgctggacaaacttaaggctga

SEQ ID NO: 133619 - DNA, 248 bp, Glycine max
cgcgaggtcgccgccatgatccgcaccaagggcgaggccggcaccggcaacatcatcgaggccgttcgccacgtccgctccgtcatgagcgacattagggttctccgcaacatggacgacgacgggtcttcaccttcgccaagaacatcgctgcgccttatgacctcgtcatgcagaccaagcagcttggccgcctccccgttgtccacttcgccgccggcggagtcgccacccccgccgacgccgcg

SEQ ID NO: 133620 - DNA, 243 bp, Glycine max
agaaaacctaagcttagaattagaaacaaagaaaagaagaaaggaaagaattgatcgttgaaaatgcagggaggaaagaaagcgggagagtccattaaggaaacagctacaaacattggtgctctgccaaggctggcatggagaagaccaaggccactgtccaagagaaggcagaaagaatgacagcacgtgatccggtgcaaaaggagttggcaacccaaaagaaagaggcaaagatgaacc

SEQ ID NO: 133621 - DNA, 246 bp, Glycine max
gtcttctgctaattgttctttgtttatcatttcaattaggaatgggaatttacgatgccatgaagttgtgcaaggcagatgtgtcaactgtttgccttgggcttgctgcatccatgggtgcattattcttgcttctggtacaaaaggcaagaggtattgtatgccgaattcaagagttatgatccatcagccacttggaactgctggtggaaaataaaacataattgcaggctacagaaatgagca

SEQ ID NO: 133622 - DNA, 246 bp, Glycine max
aacttaattagtgttcatgaatatgtcaagccttactttagtggttctaaattgaaaagctttctagctggtcataatatcaccattactgatggtattgacaaaactagtgcaactttgcaattagaaagttagcagattgtgattttctcaagagaaactttaagcagatgtctaatgttttgtgggtggctcctgaagacaaggcgagtttatggtcacaacttcattatgtttcgtgtaata

SEQ ID NO: 133623 - DNA, 254 bp, Glycine max
gcacaagttgaacttcgtgacgagcatgggaacccagttgaactaacagatgcatatgggaatccggtttggttaacggacgagaaaggcaacccggtgcacctcacggctgtggcaaccaatgcaccaaatctatgcttcagaatgacaccccacaagagcttcctcactccaagagttcaagctcgtctgaggatgaagggcatggagagaggatcaggaagggactgaaggataacatagaagaaaagtta

SEQ ID NO: 133624 - DNA, 252 bp, Glycine max
caagaaagaacttccttataaccaaaaccaacaacaactatggcaagttatcagaagcactacgatgatcagggtcgcaaggtcgacgagtatggcaatgttgagaggcaaactgacgaatatggcacccggttcatgccactagtgtcacttatgtagccaccaaaagtgttggtggctacaatgatgacgctaataagcaacatgatattactggtgtctatcccgagaaagacaccggtagacatcatt

SEQ ID NO: 133625 - DNA, 248 bp, Glycine max
gacaagagtcaggttcatgaggttgtgcttgttggaggttccactaggatccccaaggttcagcaactcttacaggatttcttcaacgggaaagagctttgcaagagtattaaccccgatgaactgtggcgtacggtgctgctgttcaggccgcgatcttgagcggcgaaggagacgagaaggttcaggatttattgctgctggatgttacaccactcagtctcggtcttgaaactgctggtggtgtc

SEQ ID NO: 133626 - DNA, 243 bp, Glycine max
cttgttgtttggagcgatccgagaaaaactctgtaaacatgttggtttaccaggacctccttacaggtgatgagcttctctctgactccttccgttacaaggaaattgagaatggaatgctggggaagttgaggggaagtgggttgttaaaggagcagttgatgtagacattggtgcaaacccttctgctgagggtggaggagaagatgagggagttgatgatgcagctgttaaggttgttga

SEQ ID NO: 133627 - DNA, 243 bp, Glycine max
aggaattgatcttcccaatagaggtatgtggtcctaataatggttttgaaatgtggagttctgagtgggcaaatcaaacttcatggcatttgagtttccttattgacaatcccaaacagtctcagtttttgatattctcttgggaatctctcaagattttgaaattgctggtaatactcttatgccagctttttctgttccacaggctactgccagatcttctgaaaatgcggaatcctctgc

SEQ ID NO: 133628 - DNA, 245 bp, Glycine max
caaatacggcgacgttttcaaagtctccgacgaactcgctttcaaacccatcgcgccaagagacgcagctctcatgcaagccacggagaaccaagcattgggccaaactcaaaaaggaggtccgcctcggtgatgcaatccgccgcaaccgaaaacctccgcgccggcgtcgtgggccgccaagacatctccgacgtggcgaggaacgaaggcgtgagcgtgaccgaaaccaaagtgggctgcca

SEQ ID NO: 133629 - DNA, 244 bp, Glycine max
cattttagctttctcttccttcataatttctcacctttcaaatctccattcagcttcattttctgcatagaaaaaacccttttctggagaaagaatatagtcttcagctggacaaggatcatcatcttgaaagaagagtttgtgtgtgacaatctttatagttctaaggagggtgcaagagagaactgaatttgctgtgatggcaactcgtagatatgcttttggaagagctgatgaggccact

SEQ ID NO: 133630 - DNA, 245 bp, Glycine max
cgcagggtttagagaaaatttaacaattagggttgcttctcctttgccgacccatggctcccaaagctgatagttcaaagaaggctgatccaaaggcacaggccttgaaaactgccaaggcattaagtccggtgctaactttaagaagaagaccaagaagatccgaacatctgttaccttccatcgaccaaggactttgaaaaaggataggaaccccaaatatccacgcattagtgctccaccca

SEQ ID NO: 133631 - DNA, 245 bp, Glycine max
gacatttctcacctgacatgtgcagatttccttcgagcccctggagttcagacgcctgtaattgttcgtttctcaactgtcattcatgagcgtggtagccctgaaaccttgagggaccctcgaggttttgccgtgaagttttacaccagagagggtaactttgaccttgttggaaacaaccttcccgtcttctttgtacgtgacggcatgaaatttccagatatggttcatgctcttaaacccaa

SEQ ID NO: 133632 - DNA, 246 bp, Glycine max
gttactatctataattaattaaattcctcgtggaatattgaagaagccatgtctacagctgggcaggtcatcaagtgcagagctgcggtggcatgggaagcagggaagccactgtcaatagaaccatagaagtggcaccaccccagaaaggtgaagtgcgtttgaggatcctcttcaactccctttgccgtagtgatgtttattggtgggatgctaaggaccagactcctctgtttcctcgtatct

SEQ ID NO: 133633 - DNA, 234 bp, Glycine max
cgcagagtagagcagcacagaagagggaaaacggcaccgccgccgtagaagaaaacaaccatggtgcacgtctccttttacaggaactatgggaagacattcaagaagccgcgtcgtccgtacgagaggagcgtctcgacgcggagttgaagctggttggtgagtacgggcttcggtgcaagagaaaactgtggacggtgcagtacgcgctcagccgcatccgcaacaacgcgc

SEQ ID NO: 133634 - DNA, 252 bp, Glycine max
gctagctagctagcaagcaagcacagagatggaggcaaagcgaggccatgccctcatgtgcttggcacgtgtttcactcttcctctgcgctctaaccctatccgctgctcacggaagcaccacggtcaagacatcgcgagaaagttgaaactcggggacaacgagcttctgcgcacgatgaagaagttcaaggttttcatggagaattacgggaggagctactccacagaggaggagtatttgcgccgtttg

SEQ ID NO: 133635 - DNA, 248 bp, Glycine max
aaaacttaaatcaaaatacttaatagcatggcgatacatttatacaaaacttctaccccaagcacacgcaatggagccgtagacagtcaagtaaaatccaatccacgaaatcatttgatctatgacagcatcgttgtggtaaaggccgtaatgccagaggaatcattaccgcagggcatagagggggaggtcataagcgtctataccgtaaaattgattttcgacggtatgaaaaaaacatatatggt

SEQ ID NO: 133636 - DNA, 249 bp, Glycine max
ggtcgaactcgagcgctcgagccgctcgagccggtttataatggcacaacaaagaaactatcactttctagacacatattatgcccaaaatgtaaagggaaaggttcaaaaagtggaactgctggtagtgttttggatgcaaaggcactggtatgaaaattacaagaaggcagattggactaggcatgattcaacaaatgcaacatgtctgtcctgactgcagaggatctggtgaggtcattaacgaga

SEQ ID NO: 133637 - DNA, 247 bp, Glycine max
gattccacaaccagctgggcatcaagaaaacccagccaacaaccacaaccaaacagggtggatagggatgtcgcagcagggcacaggttcagtggtggatttcgacctccccgacgagattctgtcggtgataccaacggacccataccagcagctggatctggctcgcaagataacctccatggccattgcctcccgtgtctcttctctcgaatccgatgcatctcgcctccgccagaagcttctc

SEQ ID NO: 133638 - DNA, 245 bp, Glycine max
gttatgcaggaatggctttgtacggagagaaagagtggtattttttcacgccgagggaccgcaagtacccgaacggttcgcggccgaaccggtccgcgggaaccgggtactggaaggcaaccgagcggataaaccagttggtaaaccgaaaccggttgggatcaagaaagcgttggttttttacgctggaaaagcgcccaagggagagaaaactaactggatcatgcacgagtatcgtcttgcag

SEQ ID NO: 133639 - DNA, 260 bp, Glycine max
cgaaagaacttccttataaccaaaaccaacaacaactatggcaagttatcagaagcactacgatgatcagggtcgcaaggtcgacgagtatggcaatgttgagaggcaaactgacgaatatggcaacccggttcatgccactatgtcacttatgtagccaccaaaagtgttggtggctacaatgatgacgctaataagcaacatgatattactggtgtctatcccgagaaagacaccggtagacatcattttggtcgtgg

SEQ ID NO: 133640 - DNA, 256 bp, Glycine max
ttcgatcttcggtttcattctgcgtttgttcacatcatggccaccgcttcagtggcatttaagtccagggaggaccaccgcaagcagattgagttggaggaggcgcgtaaagcagggcttgcgccggctgaactcgatgagatggaaaggaaatcaatcctcacattccccagtatatgtcttctgcaccttggtatcttaatgctgagagacctagtttgaaacatcaaaggaaatggaaatccgaccccaatta

SEQ ID NO: 133641 - DNA, 253 bp, Glycine max
ggccaggcaagccccactcaaccaccacacctctcctcgttcacgctacccctttctgctcttcttctacctttcaagttttaaaagtataaagatggcagagacattcctatttacctcagagtcggtgaacgagggacccctgacaagctctgcgaccaaatctccgatgctgtcctcgacgcttgcctcgagcaggacccagacagcaaagttgcctgcgaaacatgcaccacaaccaacttggtcatgg

SEQ ID NO: 133642 - DNA, 253 bp, Glycine max
aaaacagtaaagctaacttcaacacctttaattttctaaaagtaattcagcggctgaataccaagcggagaagatgagtcaggagcagccacggcgtcccaaaggccaaaaccccatcaaatacggcgacgtttttgtctctccggcgaccttgcacagaagcccgtcgcaccggaagatgctgccatgatgcaaagcgcggaaactcgagtgctcggacaaacccaacccggcggagcagcttccgtcatgc

SEQ ID NO: 133643 - DNA, 252 bp, Glycine max
gtcgccgaagctgcctccttcgccggggcagagaggtggtttgatgtcgcctgcgggtggaattgatgggaattcggcggccttcagcttggagtttggaaatggggagtttagtgggcctgaattgaagaaaatttggccaatgaaaagcttgcggatgttgccttgaccgatccaaagcgtgcgaaaaggattttggccaaccggcaatcggctgcgcgatccaaagagcgaaagatgcggtacatttcg

SEQ ID NO: 133644 - DNA, 254 bp, Glycine max
ctagctagctagcaagcaagcacagagatggaggcaaagcgaggccatgccctcatgtgcttggcacgtgtttcactcttcctctgcgctctaaccctatccgctgctcacggaagcaccacggttcaagacatcgcagatagttgaaactcggggacaacgagcttctgcgcacggagaagaagttcaaggttttcatggagaattacgggaggagctactccacagaggaggagtatttgcgccgtttgggg

SEQ ID NO: 133645 - DNA, 256 bp, Glycine max
cttcattcattcattcgttcttcttctttcaccaacaacaaagaaaacagagaaactttcatttcatatattttcatcatcgcagcaaaggaatcaatcaatcaaaaaccatggcaggcttcagtggcgacgaaaccgctctatcttcggcttcctcggtgccgctgcggccctcgtcttctcctgtatggcagcggcgtacggaacggcaaagagtagggtgggggtggcgtcgatgggcgtgatgaggccggag

SEQ ID NO: 133646 - DNA, 252 bp, Glycine max
gaggaaggtcacgattttcaggaggctaaagccaagacaacacaaactgcgaacaaggccatggaaactggtaaagatgggaaagaagccgcagagtcatggacagaatgggctaaagagaaactcactgaaggtcttgcttcaaacatgatcaagaatccaccactaagaaagtctctgactatgccggtgatgctgctcagaaatcaaaggactatgccggtgacactgctcagaaaaccaaggactatg

SEQ ID NO: 133647 - DNA, 254 bp, Glycine max
gcttacttaagcagcatgtagaagctcaggccaaggagcttgaccatagaatgcatcgggtagaggaacttgaagagaaggagagagtggcaaatgaaaatattgagggactaatgatggacattgctgccgctgaagagaaattaacagatggaaagtggcagcagagcaagaagctgctgcaggcagaggcgtcgaacaggaatttgtggcacagttgtcagcacttaagcaggaatttgaagaggcaaagc

SEQ ID NO: 133648 - DNA, 255 bp, Glycine max
cacacaactactacaagtacttccttacaatcaaaaccaacaacaactatggcaagttatcaaaagcactacgatgatcagggtcgcaaggttgacgagtatggcaacgttgagaagcaaaccgacgaatacggcaacctgttcatgctgctagtgtcacctatgtagccaccagaactgctgctggtggttacagtgatgacattaataagcaacatgataccaccaatgcctacggcgtagacactggtagac

SEQ ID NO: 133649 - DNA, 252 bp, Glycine max
agagaagaagaaaagaagaacaaagatgcaatcctcaaaggagaagatgaaaaacatggcaagtgctgccaaggaacaagtcgacatctataaagccaaaatagacgagaaggcagagaaagcaacggcaagaacaaagaggagagggtgatagcccatgagcacgcaaaggcaaaggaagctggagcaaagatggagctgcatgaagctaaagcaaggcatgcagcagagaagctaagcgccaaccaatca

SEQ ID NO: 133650 - DNA, 254 bp, Glycine max
attcactaatcactaccaattgctaaagatatttcactcactggtcacactactaatacagctttctggagatggcttcaactgtctcttacatgcttctacttccccttctagtgatggttgcctttgctggggattaaacaaagactttgacatcacatggggagatggccgctccaagatactaaaccatggagagttactcactctttcattggacaaagcatctggctcaggttttcaatcaaagaatg

SEQ ID NO: 133651 - DNA, 213 bp, Glycine max
gtgattgttgtgactcgttcttcttcgtcgttatcttcttcttttgttgtttgtgtgtttgttttttctctcacctgaaaatgtcttgctgcggtggtaactgtggttgcggaagcgcctgcaagtgcggcaacggctcggaggctgcaagatgtacccagacttgagctacaccgagtcaaccaccaccgagaccttggtcatgggagtggc

SEQ ID NO: 133652 - DNA, 250 bp, Glycine max
ttgagatcacccctgagaaaaacccacagcttcgggacttggatatcttcctcagttctgtggatatcaacgaaggagctcttcttctaccacacttcaattcaaaggccatagtgatactagtgattaatgaagggatgcaaacattgaacttgttggcattaaagaacaacaacagaagcagaaacaggaagaggaacctttggaagtgcaaaggtacagagctgaattgtctgaagacgatgtattt

SEQ ID NO: 133653 - DNA, 252 bp, Glycine max
gacgtggcatgcgtcttgctaaagaacctgatgagtttgtgaagttgttacagcaagctaagagtgaggcagctgctgcatttggcaatgacggggtttatttggagaagtacattcaaaacccaaggcacattgattccaggttcttgcagataaatatggtaatgttgttcactttggagaacgtgattgcagcattcagaggcgtaatcagaaactgcttgaagaagcaccatctcctgccctgacccc

SEQ ID NO: 133654 - DNA, 252 bp, Glycine max
ctcgagcgttcaaagtgaactttgcaactttgagcagaaaatctcacagtcgaaggaagaaataatcgccaatggcaattgaacacgaagacgatctcaaagacgagaagaacccacgacccctcgacgaggatgaatcgccctcctcaaaacctacggtttgggaccttattccacaagcataaaaaaggcggagaaggaaatcaaagatatggccaagaaagtgaatgacttatgtggtatcaaggagtc

SEQ ID NO: 133655 - DNA, 249 bp, Glycine max
tgcagaccgagctagctagctagcaagcaagcacagagatggaggcaaagcgaggccatgccctcatgtgcttggcacgtgtttcactcttcctctgcgctctaaccctatccgctgctcacggaagcaccaggttcaagacatcgcgagaaagttgaaactcggggacaacgagcttctgcgcacggagaagaagttcaaggttttcatggagaattacgggaggagctactccacagaggaggagta

SEQ ID NO: 133656 - DNA, 251 bp, Glycine max
gagcgagcgagcagtttcaaagagaggatttgggattgggaaggcgagggattgcgctgcgtctcttcctacttctcttacgattcatccctcattcataatcttccaatccaacaacctcagcctcacactcaacatacacacatctgaacgcgtatcgtccctcccatggcttcaaagcgcatcctcaaggagctcaaggacttgcagaaagacccaccaacttcttgcagcgctggtccagtagctga

SEQ ID NO: 133657 - DNA, 250 bp, Glycine max
ctacaagtacttccttacaatcaaaaccaacaacaactatggcaagttatcaaaagcactacgatgatcagggtcgcaaggttgacgagtatggcaacgttgagaagcaaaccgacgaatacggcaaccctgttcatgctgctagtgtcacctatgtagccaccagaactgctgctggtggttacagtgatgacattaataagcaacatgataccaccaatgcctacggcgtagacactggtagacagca

SEQ ID NO: 133658 - DNA, 250 bp, Glycine max
gctgagtatgaggagctgaggaagaatccccagaaggcttacttgaagactattacaccaaagtttcagacccttattgacctttctgttatagaaatcttgtcaaggcatgcatctgatgaggtgtaccttgggagagggacaatccaaattggacatctgatacaagagcattagaggcttttaaaaggtttggaaataaactggcacaaattgagaataaactctcagagagaaacaacgatgagaa

SEQ ID NO: 133659 - DNA, 251 bp, Glycine max
ggcttctgaatatgctagtgatgcggctcagaggaccaaagagtatgctggtgatgccaccaagagaagcaaagaggcttctgatcatgccaatgacatggctcggaagaccaaagactacgccagtgacactgccagagaaccaaggaaaaactccaagacattgcatctgaggctggtcaatacagtacagagaaggccagagaaatgaaggatgcagcagcagagaaggctagtgacattgcaaaggc

SEQ ID NO: 133660 - DNA, 251 bp, Glycine max
ctctaagttcgttcctttcagcaatggatacaaagatctcgtcaattcattccttttcctcatatatattgtttttaacctaaaaccttaaaacccaataacagcttcccctttcccttctcaagactgcccaagccaccccatgctggtggaactgaaaaatggggagacttataacgggcacttggttaattgtgatacatggatgaacatccatctccgagaagtcatttgtacctctaaagatggag

SEQ ID NO: 133661 - DNA, 246 bp, Glycine max
caataattccttcacttgcagaacttagttctctgttgcatcatcatcatcttcattagtgttagccctaaacttcaccttcaaccatgaccacagtgccaccacacagtgtccaagtgcacacaacaacacacgctacgaagccggcgtcgtcccgccggctcgttttgaggcgccgcgttacgaagccggcatcaaggcgccctcttccatttaccattccgagagaggtccgacgacctctca

SEQ ID NO: 133662 - DNA, 248 bp, Glycine max
gccggtgacactgctcagaaaaccaaggactatgccggtgacactgcacagacatcaaaggactatgccggtgatgctgctcagaaatcaaagggctatgtcggtgatgctgcacaaaagaccaaagaatatgtggtgatgctgctcagaagaccatggattatgccactgatgcagcacagaagaccaaagattatgctactcagaagactaaggactatgcaagtgatgcaactgatgctgcaaaa

SEQ ID NO: 133663 - DNA, 244 bp, Glycine max
caaaaaagaagaagaagaagaagagaggaaagtagtagaagaatacagggcagagctgcagccaacaccacccatggctgaatccgtttcagtggacatggagatgatctttctcggcggaaaggaacatatattcaaactggctgtggttctgtatctgtaatagtctgtggggatcaagaaaaaccagctctgatcacttatccagatatagcgctaaattatatgtcatgtttccaaggat

SEQ ID NO: 133664 - DNA, 249 bp, Glycine max
gtgaatgcgtataaaaggaaaataaagaaattagcgtcaaaatgttgggtgtgttcagcagctccatagtgtcgccgccggacgagctcgtggccgccggcagccgtactccgtcgccgaagatgacggcgcggcgctgcggaagcggttcgaggagaagaacccctccgccgtgtcggtggaggtcggagagcatgtccagctcgcttatacccaccacaacgagtcgccgtttcagcccagatcctt

SEQ ID NO: 133665 - DNA, 248 bp, Glycine max
ggaaaatatactaacctctcagatgcatatctttctgtactgaaggcacttttgcatgcttctactgcttgcaatcataagcttgttgtggatttggttcccgctgaacatctcgaagatgatacctctaaaaggatcctgatgcatataaagctgcttggggtcttttgaagggtgctaatgggattctagttccaggaggttttggtgacagaggagtggaaggaaaaattcttgctgccaagtat

SEQ ID NO: 133666 - DNA, 248 bp, Glycine max
aataagatggcccgttctctctcgcaagccaaacgtattggtgtccttgttgctcaatctatctccctaattcccgttcatcggcgaggttacgcagtggcatccgatgtatcggtaagagttggattgggtaaattgggcgaaggaatggaatcgtgggaggtgtagaagagaagcctgatacaagagatggttcaaaagcctactcaactgattgggccccagacccagtaacaggttactatagg

SEQ ID NO: 133667 - DNA, 250 bp, Glycine max
ctactacaagtacttccttacaatcaaaaccaacaacaactatggcaagttatcaaaagcactacgatgatcagggtcgcaaggttgacgagtatggcaacgttgagaagcaaaccgacgaatacggcaaccctgtcatgctgctagtgtcacctatgtagccaccagaactgctgctggtggttacagtgatgacattaataagcaacatgataccaccaatgcctacggcgtagacactggtagacag

SEQ ID NO: 133668 - DNA, 248 bp, Glycine max
gaaagagagagaagaagaaaagaagaacaaagatgcaatcctcaaaggagaagatgaaaaacatggcaagtgctgccaaggaacaagtcgacatctataaagccaaaatagacgagaaggcagagaaagcaacgcaagaacagaagaggagagggtgatagcccatgagcacgcaaaggcaaaggaagctggagcaaagatggagctgcatgaagctaaagcaaggcatgcagcagagaagctaagcg

SEQ ID NO: 133669 - DNA, 249 bp, Glycine max
caaaaaagaagaagaagaagaagagaggaaagtagtagaagaatacagggcagagctgcagccaacaccacccatggctgaatccgtttcagtggacatggagatgatctttctcggcggaaaggaacatcatatcaaactggctgtggttctgtatctgtaatagtctgtggggatcaagaaaaaccagctctgatcacttatccagatatagcgctaaattatatgtcatgtttccaaggattattt

SEQ ID NO: 133670 - DNA, 248 bp, Glycine max
tgcagaccgagctagctagctagcaagcaagcacagagatggaggcaaagcgaagccatgccctacatgtgcttggcacgtgtttcactcttcctctgcgctctaaccctatccgctgctcacggaagcaccacgttcaagacatcgcgagatagttgaaactcggggacaacgagcttctgcgcacggagaagaagttcaaggttttcatggagaattacgggaggagctactccacagaggaggag

SEQ ID NO: 133671 - DNA, 245 bp, Glycine max
gtctgataagcaaaccggaaccgtacggaagcactacatagggatggtgactatgcttgacattgtggtccacattgctggtgataaccacttgagtggtgacgatgatgatatcaccaaagaccttgataaaggatgtctggccctgtctcctccatcattggccactcctttgaaggccttagcttgtggactctcaatcctaataccagcctgttggattgtatggaagtgttgagcaaagg

SEQ ID NO: 133672 - DNA, 244 bp, Glycine max
gtgaatgcgtataaaaggaaaataaagaaattagcgtcaaaatgttgggtgtgttcagcagctccatagtgtcgccgccggacgagctcgtggcagccggcaaccgtactccgtcgccgaagatgacggcgcggcgctgcggaagcggttcgaggagaagaacccctccgccgtgtcggtggaggtcggagagcatgtccagctcgcttatacccaccacaacgagtcgccgtttcagcccaga

SEQ ID NO: 133673 - DNA, 245 bp, Glycine max
gaagagatgacattgattccgggaaccagcgttgaagaggcttacaacaagctaatagttgaacttgagaaaagtgttcctacattggttggcattgaatgtcccaaggatgagaaacttcctcgtcgcaaatttttgataaacctaagacgcgctgcttcactattctccctatggagtttaatcttgtggttcgtcagaagtttttaaattttgtgaggttcattatgaagaaaagggacaag

SEQ ID NO: 133674 - DNA, 244 bp, Glycine max
cacacacacagctagcagatattacatacacgtgaatcactaattaagccatggagaagaaatcaatagctggaagaagttgtggtgcaaactgaggcaaagacttgcgagaacctggctgatacataaggggtccatgcttcaccactggcagctgcgatgatcactgcaagaacaaagagcacttgctcagaggcagatgcagggacgattttcgctgttggtgcaccaaaaactgttaaat

SEQ ID NO: 133675 - DNA, 158 bp, Glycine max
gtcctatggtaccggtgcttacggtggtggtgcaagtgcaaccaccgttgcagatcttttggcaacccaaccaaggagtggcagggaggctagagagcttcgtcgttcctccagttcaagctctcagtcgtctaggatgatgggcaaggtgggaggag

SEQ ID NO: 133676 - DNA, 244 bp, Glycine max
tttgctgttggcttgttgttcaaggatggcaatttgtaagaaagatgtttggagagttgaatgtggaatcccttctggatttccgctcacagttatttgcaatagcatttttaatgagatgctcattagattagctatgaaaaattactgcgccaggctagagctccaagtatgtttttacaatccttcaaaaattttgtttctttgtgtgtgtatggtgatgataacttaattagtgttcatg

SEQ ID NO: 133677 - DNA, 246 bp, Glycine max
ggcaattgaccacaaggcattgcatgataccttttctacatttggaaatatcctttcgtgcaaggtagctacggattcatctgggcaatcaaaaggctatggctttgttcaatttgataatgaggaatctgccaaaaagctatagagaagctgaatggtatgctgttgaatgataaacaagtgtacgtgggacccttccttcgcaagcaagagagagaaagtgctgctgacaaggcaaaattcaac

SEQ ID NO: 133678 - DNA, 247 bp, Glycine max
gaaaacctaagcttagaattagaaacaaagaaaagaagaaaggaaagaattgatcgttgaaaatgcagggaggaaagaaagcgggagagtccattaaggaaacagctacaaacattggtgcttctgccaaggtggcatggagaagaccaaggccactgtccaagagaaggcagaaagaatgacagcacgtgatccggtgcaaaaggagttggcaacccaaaagaaagaggcaaagatgaaccaggcg

SEQ ID NO: 133679 - DNA, 243 bp, Glycine max
gtagtgtagctagggagggatatatatctgagtaagatggcatcagagcttgaattgcccccaggcttcagattccatccaacggacgaggagctggtgttgcactatctctgccgcaaatgcgcgtcgagccaatcgccgttcccatcatcgccgaaatcgacctctacaaatacgacccctgggacttacccggattggctacttatggagagaaagagtggtacttcttttcaccacggg

SEQ ID NO: 133680 - DNA, 243 bp, Glycine max
ctttgccacaagaaggggactttgctctgtattgatggtacatttgcaactccattgaaccagaaggcccttgcccttggcgctgatctgattctgcactccttaacaaaatacatgggtggacatcagatgtccttggtggttgcataagtggttcaattaaggtggtttcgcaaattcggactttgcaccatgttttgggtggtacacttaacccgaatgctgcatacctattcatcagag

SEQ ID NO: 133681 - DNA, 243 bp, Glycine max
gtttgtttattgtgaaaaatagagaaatgcaggcagcaaagaaagccatagagacctttaaggaaaccgcagccaacattggcgcctctgccaagtctggcttggagaaaaccaaggccactatccagagaaggttgtttttttttgcctcatttttctttctgggaatgataataagtaaatgatgaatgttctatgttggcattacttaagattcatttttcatgatatccaaaccatctt

SEQ ID NO: 133682 - DNA, 174 bp, Glycine max
agaaacttacatggggctgcgttctattggatttaatgttgttgcatctgttattatggctattgttatcaatgttggattgagttaccccactctacctaattggttcccttctctcctttttcctatctacatacacaacatacacaaagcaaagcatgggagtgactctgg

SEQ ID NO: 133683 - DNA, 243 bp, Glycine max
aaaattcttccaccaagttatgggtttccttgtgttgcttcttttctccctcttaggtctctcttctagttccagcatatcaactcatcgttccatattggaccttgacctaaccaagtttaccacacagaaacaggtgtcttcactgttccaactatggaagagtgagcatggacgtgtctaccataaccacgaagaagaggcaaagagacttgagattttcaagaataacttgaactatat

SEQ ID NO: 133684 - DNA, 244 bp, Glycine max
ggaaacttacatggggctgcgttctattggatttaatgttgttgcatctgttattatggctattgttatcaatgttggattgagttaccccactctacctaattggttcccttctctcctttttcctatctacatacacaacatacacaaagcaaagcatgggagtgactctggagtgtatgacacagaaggacgttatgtgccagcaaatattgagaacatattcagtaagtatgccgtacag

SEQ ID NO: 133685 - DNA, 244 bp, Glycine max
gttgcagaccgagctagctagctagcaagcaagcacagagatggaggcaaagcgaggccatgccctcatgtgcttggcacgtgtttcactcttcctctgcgctctaaccctatccgctgctcacggaagcaccacggttcaagacatcgcgagaaagttgaaactcggggacaacgagcttctgcgcacggagaagaagttcaaggttttcatggagaattacgggaggagctactccacagag

SEQ ID NO: 133686 - DNA, 239 bp, Glycine max
gtttatttgttggttgttcaataatcttgtttttgtcaaactgcagacagatgaaataaacagattaaatggactttacaagcggatgttatccaattggggggttaaattatttgaaggtgagggaaagatagttggtccaaatgaagttgaggtgacacaattggatggcactaaactgtcctactcagcaaagcacatattgattgcaactggcggtagagctcaacgtccaaata

SEQ ID NO: 133687 - DNA, 240 bp, Glycine max
tcctgccagtagtcatatgcttgtctcaaagattaagccatgcatgtgtaagtatgaactaattcagactgtgaaactgcgaatggctcattaaatcagttatagtttgtttgatggtatctactactcggataaccgtagtaattctagagctaatacgtgcaacaaaccccgacttctggaagggatgcatttattagataaaaggtcaacacaggctctgcctgttgctttgatgat

SEQ ID NO: 133688 - DNA, 241 bp, Glycine max
tctgaatccgcgcagttaggtttgtgattgattgattgatcaatcaaagagagagagagagagggaatgggagatcaagtggagggaacggtgcagaacgttctggaacaggagactctgaagtggatcttcgttggtggcaaaggcggcgtcggcaaaacgacatgcagttcaatcctctccattctcctcgccaccgttcgctcctccgtcctcatcatctccaccgaccccgcccaca

SEQ ID NO: 133689 - DNA, 241 bp, Glycine max
aactactacaagtacttccttacaatcaaaaccaacaacaactatggcaagttatcaaaagcactacgatgatcagggtcgcaaggttgacgagtatggcaacgttgagaagcaaaccgacgaatacggcaaccctgttcatgctgctagtgtcacctatgtagccaccagaactgctgctggtggttacagtgatgacattaataagcaacatgataccaccaatgcctacgggtagaca

SEQ ID NO: 133690 - DNA, 239 bp, Glycine max
gtgaaactgggaaaatggggagagcctttgtgtatgtgattcttggaggaggcgtggctgctggctatgctgctcttgaattcgtcaagaaaggagtctctcatggtgaactctgtattatttccgatgaaccagttgctccttatgaaaggcctgcattgagcaaaggatttttgcttccagaagctgctgcccggcttccatcctttcatacctgtgttggtgcaaatgaggagagg

SEQ ID NO: 133691 - DNA, 130 bp, Glycine max
tccggtgcaaaaggagttggcaacccaaaagaaagaggcaaagatgaaccaggcggagctggacaagcaggcggcgcgtcagcataacacggcggccaaacagtccgccaccacggctgggcacatggga

SEQ ID NO: 133692 - DNA, 237 bp, Glycine max
atcacacacaactactacaagtacttccttacaatcaaaaccaacaacaactatggcaagttatcaaaagcactacgatgatcagggtcgcaaggttgacgagtatggcaacgttgagaagcaaaccgacgaatacggcaaccctgttcatgctgctagtgtcacctatgtagccaccagaactgctgctggtggttacagtgatgacattaataagcaacatgataccacaatgcc

SEQ ID NO: 133693 - DNA, 236 bp, Glycine max
gtggtcctaataatggttttgaaatgtggagttctgagtgggcaaatcaaacttcatggcatttgagtttccttattgacaatcccaaacagtctacagtttttgatattctcttgggaatttctcaagattttgaaattgctggtaatactcttatgccagctttttctgttccacaggctactgccagatcttctgaaaatgcggaatcctctgcatgatctggaattgtgttt

SEQ ID NO: 133694 - DNA, 235 bp, Glycine max
cacatggtgtgcaatcaaactcctccagtaggaaacaagccaagtctaatgacattccgtgaggttgagactgttttccatgaatttggtcatgcacttcaacatatgcttactaagcaagatgagggtctggttgctggtattagagggatagagtgggatgctgttgagttaccttctcagttcatggaaaactggtgttaccatagagaaactttaatgggtattgaaagca

SEQ ID NO: 133695 - DNA, 239 bp, Glycine max
gtcgttgattccaagtttcttcggcaccgggcgaagaaccaacgtcttcgaccccttctccctcgacgtgtgggacccattccatggcttccccggcaccaccgccctctacgctccgcgctccgagacggcggccttcgccaacacgcgcatcgactggaaggagacggcggaggcgcacgtgttcaaggcagacctgccggggctgaagaaggaagaggtgaaggtggagtcgagga

SEQ ID NO: 133696 - DNA, 238 bp, Glycine max
taaaaatgtcgcagttgctggataaagccaagaacttcgtgtcggagaaggtaaatgatatggccaagccggaggcgagtgtcactgacgtggacttcaagcgcgtgagcaaagataatgtcgagtacttggccaaggtctctgttcgtaacccttattcaacttccatacccatttgtgagatcaactactctttcaaaagcgcatccagggagatagcatcagggaaaattcagac

SEQ ID NO: 133697 - DNA, 240 bp, Glycine max
cttccattttaggctctgatccatggcttgaatagacattattactccatagcaattaattacagaaagaatgaacttgaagagaagatgttgcttaaccttcacaaaaagaagtggactgatggtttgacactcaggcattttgattcacattctaaaactaatgaacagactgttcaggtaagttgagatttttcaatgtaaatgactcaaacttttaatttctgttttctctcccca

SEQ ID NO: 133698 - DNA, 236 bp, Glycine max
ttgcatttcgttactttcatttgttgtgcaatcttacaagttccaaacttctctattttgttattatttgttctcacttctcacacatacagattttagccttttatattatcatggcttctaaggtggtttcggttttggttatagcgatgatgttgtttgccatgaactgtaactgcactagtgttggccacatgccttctaccaaagaggaaggtcacgattttcaggagtct

SEQ ID NO: 133699 - DNA, 238 bp, Glycine max
aaactactctacaaacacaacaaaactctccaattctgaagattttcttatctcttgtcattgaaactagaagctccgtgattgatcaatggcgacaaaagaaggcaaagccataggcatagacctcggcacgacctacagctgcgtgggcgtgtggcaaaacgaccgcgttgagatcatccccaacgaccaaggcaaccgaaccaccccctcctatgtcgccttcaccgacccgaga

SEQ ID NO: 133700 - DNA, 235 bp, Glycine max
ctactgcaatgcatgtgggagctatagaaattatcattgatagtttcgcaagtcctgactgcaacatagttggtgcaatgcttttggttgatacttatcataccaatcctgaaaatgcagttcgtagtatttttgttgcgcctttcagaggcggaaggcccattcgggtggttacatttccgaataccattgtgcagattgaaccagacatgaattcaaggtttcagctttgagt

SEQ ID NO: 133701 - DNA, 130 bp, Glycine max
gtctatgggttatctcacaaaaggtagtgtaataaagcatcaatctaaatcaattcatatctatttatatatgaattaatttataacgtaaacaaattaagagctctgaatcaataaaaactgagaatat

SEQ ID NO: 133702 - DNA, 236 bp, Glycine max
ctttctctttctgggtctccattaaatttttcttctctccctactttctctctctctctctctgaccattctcttcttcttctttttcttctcctctctctctctcccctccgccatggctgaggataaggagatgtctacctctgtcatcaatgggaatgattccctaactggtcacatcatatctacaactattggaggcaaaaatggggaacccaaacagactattagtacat

SEQ ID NO: 133703 - DNA, 233 bp, Glycine max
agagcatgaaagaagtgctgataaatatcaaggcgcaaacttgtatgtaaaaaatttagatgatagcattggtgatgaaaaacttaaggagctgttctccccttttggtaccattacctcttgcaaggttatgagagacccaaatggcttaagtcgtggatcgggttttgttgcattctcgactcccgaggaggcatctagagcactcctggagatgaatggcaaaatgtggt

SEQ ID NO: 133704 - DNA, 230 bp, Glycine max
attccccaattataatactaaattcaaaaaaaggagagtaatgagtataatctttcgctcagacgatgtactgatatattctatggcggaggttcgaagaacaagcaatttattttgggccgttttcactttgttaggttcattggggttattgttcgttgcaatttccagttatcttggtatggatttgttctttatttctgagaaaattagtgatttttcttttattc

SEQ ID NO: 133705 - DNA, 238 bp, Glycine max
gtctcgcagacgtagatcgctccgttcgcaaaaagaacaccctaaggttggatgattgggtgctttgccgtatttacaacaagaagggcacgatcgagaaactgcaaccaagcagcgatgttgctcatagccgaaatatcgaatcctcggagatcgaagacaggaagccggagattctgaaaagcggaggaggttgtcttccgccgcctgtgccggtgcctgcgccgccgaagcgacg

SEQ ID NO: 133706 - DNA, 237 bp, Glycine max
taacaactcacctgccgaatcaactagccccgaaaatggatggcgctaaagcgcgcgacctatacccggccgtcggggcaaggaccaagccccgatgagtaggagggcgcggcggtcgctgcaaaacccagggcgcgagcccgggcggagcggtcgtcggtgcagatcttggtggtagtagcaaatattcaaatgagaactttgaaggccgaagaggggaaaggttccatgtgaacg

SEQ ID NO: 133707 - DNA, 235 bp, Glycine max
ccaaaatgttcctgcttccgctgggggtgagaccagggttgaagagaagaaaccaacacgtgaggatgtcacagatgagaggaaatcagaatcaacttctgctataattaatgcatcagaacttccacctcatgtccttcttgaaatgccagctttgtcaccgacaatgaaccaaggaaacattgctaaatggaggaaacaagaaggagacaagattgaagtgggcgatatatta

SEQ ID NO: 133708 - DNA, 236 bp, Glycine max
gtttgtgcattgtacattattatctctacatgttctgactagaaggtgctctttctgtatcagtggatagaggcatatgggtaaatggcatcaagttgtgaattatttgcaaatctgattcaactacagtgtctattttgactcccaagattgcaagtggcagttatgggtcataggcacttacataacacatcttcattgttcgatggtgagcctgaccagaactggatcatttg

SEQ ID NO: 133709 - DNA, 232 bp, Glycine max
ggataatgaaggcccaagctctaagggacaacagcatggcagggtacatgtcaagcaagaagaccatggagatcaaccctgagaacccaatcatggaggagctcaggaagcgtgctgatgcagacaagaatgacaaatccgtgaaggaccttgttctgttgctgtttgagactgctcttctcacttctggtttcagccttgacgagcccaacacttttggaaacagatccac

SEQ ID NO: 133710 - DNA, 228 bp, Glycine max
ggagagggagaagaagagacgtttggtattggttcatggagcctgccatggggcgtggtgttggtacaaggtggctgctttgttgaaatccaatggacaccaagtcacagctctagacatggctgcatcaggcatccatccaaagcaggtacacgacctcaattcaatttcagaatattttgagccattaatgtactttctagggtctttgccaacagaggagcgtgt

SEQ ID NO: 133711 - DNA, 236 bp, Glycine max
caattttgtattggagcttgattttgagccatttaatgccacatttcctcgtccaactcgctcagcatccattggcaatggtgtccaatttctcaatcgccacctttcatctattatgtttcgcaacaaggattccttgcagcccttgcttgatttcctccgagctcacaaatacaagggccatgctctgatgttaaatgatagaatacaaaccatttccaaacttcagctgcatt

SEQ ID NO: 133712 - DNA, 238 bp, Glycine max
aggagaagaaggagcttgatgctgaggttcatcgcaaatatgtttttggtggacatgttgctgcctatatgaagatcttggcagaagatgaaccagagaaataccagtcacacttcagcgaatacatcaaacgtgggatagaggctgatggtattgaggcactttacaagaaggttcatgctgccatccgtgctgatcctactctcaggaaatctgataagcagcccccgaggagcac

SEQ ID NO: 133713 - DNA, 235 bp, Glycine max
gcaatgggaaaattatctgcctatttttcactgcaaactggtgcagaccttgcagagctttcgttccccgtcttgttgaactttatgaaacactgagaaagaggcgaataaatctagagattatcttcatctcctttgaccgtgatgaggatggatttaaagaacacttcaagaatatgccatggctagctgttccatttgatttaaatttgcacagaagactgattgacagata

SEQ ID NO: 133714 - DNA, 234 bp, Glycine max
aacacaccttacacacttctttatttgagcctttcatataaatatcatggcttcgagggtggtttcggttttggtgatagcgatgatgttgtttgccatgaactgtaactgcactagtgttggccacatgccttcaaccaaagaggaaggtcacgattttcaggaggctaaagccaagacaacacaaactgcgaacaaggccatggaaactggtaaagatgggaaagagccgca

SEQ ID NO: 133715 - DNA, 234 bp, Glycine max
acaactactacaagtacttccttacaatcaaaaccaacaacaactatggcaagttatcaaaagcactacgatgatcagggtcgcaaggttgacgagtatggcaacgttgagaagcaaaccgacgaatacggcaaccctgttcatgctgctagtgtcacctatgtagccaccagaactgctgctggtggttacagtgatgacattaataagcaacatgataccaccaatgctacg

SEQ ID NO: 133716 - DNA, 222 bp, Glycine max
atggaaccaagtccttgtttgttcctcagtacctcgactccaatctcatcatattcatccgtagaggggaagcaaagctgggattcatatatgatgatgaactagcggaaaggagattgaagacaggggacttgtacatgattccatctggttcagcattctatttggtgaacataggagaaggtcagagacttcacgttatctgcagcattgacccctcta

SEQ ID NO: 133717 - DNA, 232 bp, Glycine max
gaagtttaaagatgcattggccaaacacaccccagatagatgcagcttgggcccaaccaaagggttagaagagaaagagcttctagctcttgctgccaacaaagatctttccttcaccaactcaccagaacctttacaacctgcacatgcagatgaagagttgggaaccgaacctgctcctgctcctggttcaaaatctcttccttcaccttcaatgattctcaatctgagg

SEQ ID NO: 133718 - DNA, 234 bp, Glycine max
tggtgacatgatgctgaaacaactgtggcatcaccaggatgccattctatgctgttcactgaagtcattgccagtgttcatatttgcaaatcaagctggccttgacatgttggaaacaaccctagttgccttacaagatatcacattggataaaatatttgatgaggctggacgcaaggcattgagtacagactttgccaagttaatggagcagggttttgcttatctgccagc

SEQ ID NO: 133719 - DNA, 231 bp, Glycine max
tggtgaacaggcccttaagtttcctcctcctaaagtaattcaagtgagtaagtctgcatggatgactgatgaagaatttgcaagagaaatgcttgctggtgtaaatccaaacttgattcgttgtcttaaggatttccctccacgaagcaagctagatagccaagtctatggtgatcatactagtcaaataaccaaagaacacctagagcccaacttagaagggctcatgta

SEQ ID NO: 133720 - DNA, 231 bp, Glycine max
tgacatttgggctgtttttggcgaggaagttgtcgttgcccagggcgattttctacattgtaatgcaatgcttgggtgctatttgtggcgctggcgtggtgaagggtttcgaggggaaaacaaaatacggtacgttgaatggtggtgccaactttgttgcccctggttacaccaagggtgatggtcttggtgctgagattgttggcactttcgtccttgtttacacgtttt

SEQ ID NO: 133721 - DNA, 236 bp, Glycine max
caaattcattttaatcctaattctgcacttcttgatcattcgatttttctcctcaagatgcagatattcgtaaaaactttgaccggcaagaccatcacccttgaggtggaatcctccgacaccattgacaacgtaaaagctaagattcaagtcaaggaagggatcccacctgaccagcagagacttatctttgcgggtaaacaacttgaggatggtcgcacccttgccgattacaa

SEQ ID NO: 133722 - DNA, 235 bp, Glycine max
gagaaagcggtgcaggccaaggatgtcgccgtggagagtgggaagagtgcggctgggtatgctgccaaggtggctgctgatttgagggacaaggccaccgcggtggggtgggccgcggcccatttttcggcggaaaagacggtggaagggaccaaggccgccgcccatgttgtcgagggagcggccgggtatgccggacataaggccgcggacttgcttcgatgtcggcggtgct

SEQ ID NO: 133723 - DNA, 250 bp, Glycine max; identical to SEQ ID NO: 109929

SEQ ID NO: 133724 - DNA, 249 bp, Glycine max
ggctaattgcatacgatccctttgtaatgctgatgtgaaagaaggatttgtttttgggaaggatgcatctcttcccgagacgtatgtccgcgatgctaagatccccactaaggatctcagcgggaattcagcttcgaagaggacaacgcttgcattttttgcagggagcatgcatggttatgtgaggccaattttgttgcagcactgggaaaacaaagaccctgacatgaaaatctttgggagattgcc

SEQ ID NO: 133725 - DNA, 244 bp, Glycine max
cttcaccattcctctctctcagaaaggagagatcaagctaccaaccctctctaccatgttcgcctaatcgcatccacaaagcttaggataaaataaatgcattgcacactccatgatcgatgtgcatgttttacttttatgtaaattttggaccgttttagttctaccttttgttattcgtgtatgctctctaaaactatacatggctttcgtagtaaaaaaaaaaaaaaagggcggccgccga

SEQ ID NO: 133726 - DNA, 250 bp, Glycine max
aggcactgattatggaacaactggtggcactggttatggaagtggaactgggtatggagtcaacactgggggtgcgcacactgaagcaggatataggaaggaacatcgtcagcatgaccaatctcatggtgatcagaacgagaagaaagggattatggacaagattaaggagaagcttcctggaggacacagtgacaagtagatgcatcgtgcatcatgcatgcatgcatatatataatattgttgtctt

SEQ ID NO: 133727 - DNA, 248 bp, Glycine max
aggagagtctctttttccccttcgagttgccgagcgaggagcgtggtcgtcgcgctgttgcgtgagaagcagtgtggagggatgctaacggaataaaatggccacttgtattgctatcccttgtgctagcataatagaaagggttgaatcgagctaatccgagtttcattcagtttaactcgagtttttttttaaaatgaatttttcgggcccagaggacgatacccaaaatcggtcatctcagcatt

SEQ ID NO: 133728 - DNA, 245 bp, Glycine max
atttccataaccttagtcatcttcttctttcatctttctccctaacggtatcgagggaaaaatatggcggaagaacacagatgccaggcaccgcgcttctgcgccaacaattgcggtttctttggcagccctgccacgcagaatatgtgctccaagtgctaccgcgatttccagctcaaggagcagcaatcttccaacgccaagatggttctcaatcagtcgctggttccttcaccgccaccggc

SEQ ID NO: 133729 - DNA, 249 bp, Glycine max
cacacttccatctcttggtgttggccgcttgaagttacgtggagatgattctcgtgtttacgggacagacaaagaatatggattgagactgcctgatgatccattctataaacaaatggctgctgagttttccaagtaccaaatctcaacaaatgtgtatgcattcagtgataagtacactgacatagcctccttaggaactctggcaaagtatactgctggtcaagtgtattactacccagctttcca

SEQ ID NO: 133730 - DNA, 253 bp, Glycine max
agatcggaaagcccacaccgttccctgcaaggttaccggaaagtgtggctccgtcaccgtccgcatggtccccgcccctcgtgggtccggaatcgtcgccgctagggtccccaagaaggtcttgcagttcgctggaatcgatgacgtcttcacttcctccaggggttccaccaaaaccctcggaaatttcgtcaaggctacttttgactgtttgctgaaaacctacggttttctaacacctgaattctggaag

SEQ ID NO: 133731 - DNA, 252 bp, Glycine max
tgaaattttgataaaccgcgatcacaggttgccgcaccttaaaaccggaaacaaaagcaatcgttacttgatttcaagaatctctcaatttcttcctacttctttgtgtacgatttcttaagggaaagaaaatcactctctgtgctggccacagacttcgtgaatcattttcttttccactcttagtttatttgctgaacactctcctatttgatataggacttcgtgtcagatttaaacttcttctgtctc

SEQ ID NO: 133732 - DNA, 249 bp, Glycine max
caaaaccaaaacactcaagttaacttcaacacctttaattttctgaacgaaattcagccacagaatatcaaagggagcgaagatgagtcaggagcagccaaggcgcccccaaggccaagaccccatcaaatacggcgacgtttttgacgtctacggtgaccttgcacagatgcccattgcaccggaagatgctgccatgatgcaaagcgcggaagctcgagtactcggaaaaacccaacccggcggact

SEQ ID NO: 133733 - DNA, 249 bp, Glycine max
caagtacttccttacaatcaaaaccaacaacaactatggcaagttatcaaaagcactacgatgatcagggtcgcaaggttgacgagtatggcaacgttgagaagcaaaccgacgaatacggcaaccctgttcatgctgctagtgtcacctatgtagccaccagaactgctgctggtggttacagtgatgacattaataagcaacatgataccaccaatgcctacggcgtagacactggtagacagcatt

SEQ ID NO: 133734 - DNA, 248 bp, Glycine max
tggtgatgataacttaattagtgttcatgaatatgtcaagccttactttagtggttctaaattgaaaagctttctagctggtcataatatcaccattactgatggtattgataaaactagtgcaactttgcaatttagaaagttagcagattgtgattttctcaagagaaactttaagcagatgtctaatgttttgtgggtggctcctgaggacaaggcgagtttatggtcacaacttcattatgttt

SEQ ID NO: 133735 - DNA, 207 bp, Glycine max
caaaaacgaaatgacccctcccccagaattctttcggattgtcgggcacattaaaaaaggaatggataagttcctaaaaataaagaaaactataacacattataaggaggggtcaaatattaattaagataaaagatatagaatatctatctgtatatatatatatatagatataatttattaataattagaactttcttttttctt

SEQ ID NO: 133736 - DNA, 247 bp, Glycine max
gcagaccgagctagctagctagcaagcaagcacagagatggaggcaaagcgaggccatgccctcatgtgcttggcacgtgtttcactcttcctctgcgctctaaccctatccgctgctcacggaagcaccacggttcaagacatcgcgagaaagttgaaactcggggacaacgagcttctgcgcacggagaagaagttcaaggttttcatggagaattacgggaggagctactccacagaggaggag

SEQ ID NO: 133737 - DNA, 246 bp, Glycine max
atgggtatcagcctcatcttatagctccagaacaaggatatcgtcgtctaattgaatcttctctaataactattaggggccctgctgaggcagctgttgatgcggttcactcgctgttaaaggacttggttcacaaagctatcagtgagactttggacttgaagcagtatcctggtctccgggttgaggttggggctgctgctgttgattcactagaaagaatgagggatgaaagcaaaagagcaa

SEQ ID NO: 133738 - DNA, 250 bp, Glycine max
tgcagaccgagctagctagctagcaagcaagcacagagatggaggcaaagcgaggccatgccctcatgtgcttggcacgtgtttcactcttcctctgcgctctaaccctatccgctgctcacggaagcaccacggttcaagacatcgcgagaaagttgaaactcggggacaacgagcttctgcgcacggagaagaagttcaaggttttcatggagaattacgggaggagctactccacagaggaggagta

SEQ ID NO: 133739 - DNA, 246 bp, Glycine max
ccaacttccattacaaaaccaaaacactcaagttaacttcaacacctttaattttctgaacgaaattcagccacagaatatcaaagggagcgaagatgagtcaggagcagccaaggcgcccccaaggccaagaccccatcaaatacggcgacgtttttgacgtctacggtgaccttgcacagatgcccattgcaccggaagatgctgccatgatgcaaagcgcggaagctcgagtactcggaaaaa

SEQ ID NO: 133740 - DNA, 249 bp, Glycine max
aggaaaagcctccaaaaccaacccaccgttggcgcgatggctttcccctccaaaggcgatgacgagcaggttctggtgcagcgtaaatcgaatgcgagagttttgacactaaacaggactaaacagttgaatgccctctctttttatatggtttctcggctacttgaaattttttctgaagatgagaaagattctgatattaaattggttgtcgtgaagggaaatggaagggctttttgtgctggtggt

SEQ ID NO: 133741 - DNA, 251 bp, Glycine max
ctgaagcaaagcaatggctacttcacagttgaaaacccagaatgtggttgtatctctcaccctagccttaacctcggtactggtgctactgtggataatgtgttgcggcatttggacgaaatcagcaggtgcaatccatctccgcccgaatcacgtgcatctactccaacaagtggaagtgacggacacgtgtcgtccactgttttctccccaaagagtttagagaagcactgccgtccgattgagaacat

SEQ ID NO: 133742 - DNA, 250 bp, Glycine max
ctttccgttcatttcctctgttttttcttcaaatccattgtttcgtggaaatcccgaaatttaaccatgcttctccgaaccgccgcctccgccgcttctgcttcgtccctctccctcttcagccctacctccgaacctctccgttcggttcccgctcgtggattggtggttcgcgccgcgaaaggatccacgaaccaccgcgccctaaccggcgtgatctttgaaccgttcgaagaggtgaagaaggagc

SEQ ID NO: 133743 - DNA, 245 bp, Glycine max
cagaccgagctagctagctagcaagcaagcacagagatggaggcaaagcgaggccatgccctcatgtgcttggcacgtgtttcactcttcctctgcgctctaaccctatccgctgctcacggaagcaccacggttcaagacatcgcgagaaagttgaaactcggggacaacgagcttctgcgcacggagaagaagttcaaggttttcatggagaattacgggaggagctactccacagaggagga

SEQ ID NO: 133744 - DNA, 246 bp, Glycine max
atatatactatgatgagagtgcggtttcctttgttggtgttgctgggaactgttttcctggcatcagtttgtgtctcattaaaggtgagagaggatgagaataaccctttctacttgagaagctctaacagcttccaaactctctttgagaaccaaaacggtcgcattcgtctcctccagagattcaacaaacgctccccacaacttgagaaccttcgagactaccggattgtccagtttcagtca

SEQ ID NO: 133745 - DNA, 246 bp, Glycine max
agggaatcaatgttttttgttattcctgcttttggtggcattgtttcctgggagggagaaggggcaccttttggggaatctgaccagagcatttctcatcagattgttgacagggaagcacaaggacatcggttcctctcaagagaatatgttcaaccacagtgggtatatgactgtgtgaatgcacggattattttgccaactgagaattatttggtgggaaggactcctccaccacacttgtca

SEQ ID NO: 133746 - DNA, 231 bp, Glycine max
  unsure (1)..(231): unsure at all n locations
tatgattctgccagcgtgatnatatgtgcagttggagctcgatataagagttattgctcaaacatagctcggacattcttgattgatgcagatcctcttcaaagtagggcttatgaggttcttctgaaagcccatgaagctgtcataggttctatgaagcctggaaacaagtnaagtgttgcataccaagctgcagtttctgtngtggaaagggatgctcctgacctgatt

SEQ ID NO: 133747 - DNA, 249 bp, Glycine max
gaaaacctaagcttagaattagaaacaaagaaaagaagaaaggaaagaattgatcgttgaaaatgcagggaggaaagaaagcgggagagtccattaaggaaacagctacaaacattggtgcttctgccaaggctggcatggagaagaccaaggccactgtccaagagaaggcagaaagaatgacagcacgtgatccggtgcaaaaggagttggcaacccaaaagaaagaggcaaagatgaaccaggcgg

SEQ ID NO: 133748 - DNA, 247 bp, Glycine max
atggaggtacttatggcagaacgggccaatctagtctttcacaataaagtgataggtggaactgccattaaacgacttattagcagattaatagatcactttggaatggcatatacatcacatatcctggatcaagtaaagactctgggattccgtcaagctacggatacatccatttcattaggaattgatgaccttttaacaataccttctaaaggatggctagtccaagatgctgaacaacaaa

SEQ ID NO: 133749 - DNA, 248 bp, Glycine max
atggaggtacttatggcagaacgggccaatctagtctttcacaataaagtgataggtggaactgccattaaacgacttattagcagattaatagatcactttggaatggcatatacatcacatatcctggatcaagtaaagactctgggattccgtcaagctacggatacatccatttcattaggaattgatgaccttttaacaataccttctaaaggatggctagtccaagatgctgaacaacaaag

SEQ ID NO: 133750 - DNA, 247 bp, Glycine max
tatggttgtggaaatcctgaaactgagatcataatcactaagaaccaaatgatccagctgaaatgcgctgcttgtggttttgtgtctgatgttgatatgagagacaagctgactaccttcatcattaagaaccctccagaggttaagaaaggatccaaagacaagaaggccatgaggagagctgagaaggagagactgaaggaaggtgaaatggctgatgaggaacagaagaaagtgaagaaagagg

SEQ ID NO: 133751 - DNA, 242 bp, Glycine max
gaagagttacagaatttcctgtttacgatcttattgcaattttgcaactttcaaagcttattagctaaagtaacatcaaaagatgtcattgattccaagtattttcggtggcccaaggagcaacgtgttcgatccattctcactcgatatgtgggatcccttcaaggattttcatgttcccacttcttctgtttctgctgaaaattctgcatttgtgaacacacgtgtggattggaaggaga

SEQ ID NO: 133752 - DNA, 244 bp, Glycine max
gttttgtgggtggctcctgaagacaaggcgagtttatggtcacaacttcattatgtttcgtgtaataatctggaaatgcaagaagcttatcttgtcaatctcgtaaatgtgttacgagaactgtatttgcacagtccagaggaagctcgccaattgagaaggaaagctctctctcgtattgaatggctgaaaaagctgatgtgcctaccatagcacagattgaagagtcccattcgatgcagag

SEQ ID NO: 133753 - DNA, 245 bp, Glycine max
ggagctgtctgtgcaaatttgcgttgttcttcgcggcacacctcactcactgaacggtaagtatggcggacaaggctgttacaatccgaacccgaaagttcatgaccaacaggcttctttccaggaagcagtttgtcgttgatgtccttcatccagggagggcaaatgtttccaaggctgaacttaaggagaagctggctaggatgtatgaagtgaaagaccctaatactgtatttgtcttcaaa

SEQ ID NO: 133754 - DNA, 252 bp, Glycine max
gctagctagcaagcaagcacagagatggaggcaaagcgaggccatgccctcatgtgcttggcacgtgtttcactcttcctctgcgctctaaccctatccgctgctcacggaagcaccacggttcaagacatcgcgagaaagttgaaactcggggacaacgagcttctgcgcacggagaagaagttcaaggttttcatggagaattacgggaggagctactccacagaggaggagtatttgcgccgtttgggg

SEQ ID NO: 133755 - DNA, 248 bp, Glycine max
atttaatgaaattaaatatttaaattaataaaattagtcgtgttttattcgattttttgaattggtttttttttacagtagctaatgctagtcaccgaacttagtcaatgagctagaatgggttataaagatatctatagatatatatagatatatttatctatagatatctttagaaaaaaaaaaagaaaataaacaaataagacgtatcattttatgtatagtagtggggaattatgggacaaaaa

SEQ ID NO: 133756 - DNA, 246 bp, Glycine max
ctttgagtcttcttgatccttctttttctccttgaactcaaacatggcagatgaggtggttctgctagatttctggccaagtccatttgggatgagggtcaggattgcacttgctgaaaagggtatcaaatatgagtacaaagaagaggacttgaggaacaagagtcctcttctcctccaaatgaacccggttcacaagaagattccggttctcatccacaatggcaaacccatttgtgaatccct

SEQ ID NO: 133757 - DNA, 244 bp, Glycine max
cagtaaagctaacttcaacacctttaattttctaaaagtaattcagcggctgaataccaagcggagaagatgagtcaggagcagccacggcgtcccaaaggccaaaaccccatcaaatacggcgacgtttttgtcgtctccggcgaccttgcacagaagcccgtcgcaccggaagatgctgccatgatgcaaagcgcggaaactcgagtgctcggacaaacccaacccggcggacagcttccgt

SEQ ID NO: 133758 - DNA, 242 bp, Glycine max
acactttccaatacaataatcactaactgaatattcgatcggagatgtctgccgccgccgaagaagctaacgctcccgccgtcgaaaagccggttgaggaggtgaaggcgccgaaccccgcgaaggagaagaaacctaaggctccgaaggaaaagaagccaaaacaggccaaaacagcttcacatcctccatattttcagatgattaaggaggtttgatcgctttgaacgagaaaggaggat

SEQ ID NO: 133759 - DNA, 241 bp, Glycine max
gagagtcttcggaggcaacatcttttctcagttctttttggtcaagcatgctctgaagcacatgaaagaagggagctgcatcataaactctacttcagttaatgcatacaatgggaatccagaagcgttggactacactgctaccaagggagcaattgtggccttcaccagaggtctttctcagcagctagcgagtaggggaattagggtgaatggtgtggcacctggcccagtttggacg

SEQ ID NO: 133760 - DNA, 245 bp, Glycine max
ctggcatggagaagaccaaggccactgtccaagagaaggcagcaagaatgacagcacgtgatccggtgcaaaaggagttggcaacccaaaagaaagaggcaaagatgaaccaggcggactggacaagcaggcggcgcgtcacataacacggcggccaaacagtccgccaccacggctgggcacatgggacatggccaccacaccaccggaaccgggactggaaccgccacgtattccaccaccgg

SEQ ID NO: 133761 - DNA, 244 bp, Glycine max
agaagggatgatccagatgaagatatggatgcagagatgaattgggcattgaagcaggctgggaatttgagtcttgaattcagtgaaattggagatgatcggccactttctggttgctccttctcaagggatggaaaatggcttgctacctgttctctgacaggagcttccaagttgtggagcatgcccaaaataaaaaagcattccagctttaagggtcacacagagcgtgctactgatgttg

SEQ ID NO: 133762 - DNA, 249 bp, Glycine max
cctcacatggttctccagcaatccgtgtaccaggctttcactcaggtgtttgctcagcagctaccaaagcaagcacaggtgaaatctgtggcaccatttgggttatgcttcaactccaacaagatcaatgcatatcctagcgtggaccttgtgatggacaagcccaatggtcctgtttggagaatctctggtgaggacttgatggtgcaggcacaacctggggtcacgtgtttgggtgttatgaatgga

SEQ ID NO: 133763 - DNA, 250 bp, Glycine max
atcaccagtggttcttttccttctgagaagatcgaattgtgttttgcaaaaatgggagttccagagaaagaccctctttcccaattgagtttgcctcctggttttcggttttaccccaccgacgaggagcttctcgttcagtatctgtgccgcaaggtcgctggccaccatttctctcttccaatcattgccgaaattgacttgtacaagttcgacccatgggttcttccaagtaaagcgattttcggtg

SEQ ID NO: 133764 - DNA, 247 bp, Glycine max
cttgtatctttttcttctatagagacacacggagagagtctcagagcaataaacacccttcaatggctaccactaaagtttacattgtttactattctacgtacggacatgttgagaagttagctgaagagattaaaaagggagctggttccgttgaaggtgtggaagcaaagctatggcaggtacctgaaacactttctgaagaggtccttgggaagatgggtgcacctccaaagagtgatgtacc

SEQ ID NO: 133765 - DNA, 243 bp, Glycine max
gagcgtagcagcggaagtctagcttgggtagcgaatcacaatggcgagaggattaaagaagcatctgaagaggcttaatgccccaaagcattggatgcttgacaaactgggtggtgcatttgctcctaagccctcatctggaccacacaaatcgagggaatgcctgccactcatactcattttgcgaaaccggctgaagtatgctctaacataccgtgaagtcattgctattctgatgcagcg

SEQ ID NO: 133766 - DNA, 245 bp, Glycine max
caacaatttgcttggcaaatttgagttatctggaattcctcctgctcccagaggtgttcctcagatcactgtttgcttcgacattgatgccaacggtatattgaacgtgtctgcggaggacaaaaccactggacagaagaacaagattacaattaccaacgacaagggcaggctttctaaggaggagattgagaagatggtgcaggaagctgagaaatacaagtctgaggacgaggagcataaga

SEQ ID NO: 133767 - DNA, 246 bp, Glycine max
gcacaacaaagaaactatctctttctagaaacatattatgcccaaaatgtaaagggaaaggttcaaaaagtggaactgctggtaggtgttttggatgcaaaggcactggtatgaaaattacaagaaggcagattggactaggcatgattcaacaaatgcaacatgtctgtcctgactgcagaggatctggtgaggtcattaacgagagagataaatgtcctctgtgcaaaggaaacaaggtttccc

SEQ ID NO: 133768 - DNA, 243 bp, Glycine max
gcaatactagcgatagtgataagagagataccaacaagaaaagaaaaaaagaagagttgagattccctttgaagaaaagatggcatcccataggcaaagctatgaagctggtcaaactaagggccgaactgaggaaaagacgaaccagacgatgggcaatattggagagaaggctcaagctgcaaaggagaagacccaggaaatggcccaagctgcaaaggagaagacccaacaaacagccca

SEQ ID NO: 133769 - DNA, 245 bp, Glycine max
cagcggatgagttgtggttaggggtgaaatgccactcgaacccagagctagctggttctccccgaaatgcgttgaggcgcacagttgactagacatctaggggtaaagcactgtttcggtgcgggccgcgagagcggtaccaaatcgaggcaaactctgaatactagatatgacctcaaaataacaagggtcaaggtcggccagtgagacgatgggggataagcttcatcgtcgagagggaaaca

SEQ ID NO: 133770 - DNA, 240 bp, Glycine max
ctctactggaagaatatttcagtgtcaggcttttggacgaggcattacagtgtgtggaggaactaaaagctccagcttattaccctgagtttgtcaaggaagccatttcccttgcactagataagagtccaccatgcgttgaacctgttgcaaatctttttgagtacctgctaattaagaagattctttcagccagagacatagggaccgggtgcatgttatttgcttctctgctggatg

SEQ ID NO: 133771 - DNA, 243 bp, Glycine max
ggtggcagcattcgggttctcaagaagttcactgagaaatccaagcttcttcaaggcattgagaatttccgtttggccatcttagaagctagagcacacacgttcgtgtccccacgccactttgattccgaggttgtcttgttcaacattaaggggagagccgtacttgggttggtgagggaaagtgaaacagaaaaaatcaccctagaacctggagacatgatacacataccagcaggcaca

SEQ ID NO: 133772 - DNA, 243 bp, Glycine max
aaaaaaaaaagcagcggatttagtagcacgggctgcaataagagctcggtgtcattatgttaataaaaagtggctcggcggtatgttaacgaattggtatactacagagacacgacttcaaaagtccctgaacttttgaagtcgtgtttctgtagtataccaaaaagagatgccgctatattgaagagacatttagctcatttggaaacatatcttggcggcattaaatatatgacggggtta

SEQ ID NO: 133773 - DNA, 243 bp, Glycine max
ttgacacagtagagactcattcatctgaattagttcttgtattttctataatttaggaaattgattatgttttccttggttttaagttaagttggttgtgtttttcaggtctatggtggagaggcaaggatttcaactttgagggaattatttcctctgatggaagacaagaagagccttgcttcatctgaagagcgttctcagataaagggaaaagcttctctattagctgcacttgactac

SEQ ID NO: 133774 - DNA, 241 bp, Glycine max
cagtttagggtttcggttctctaccctatctttcacgtatcgaaaccttaaatttacgatcaggtctgagcaatctggttggtagaacctttggtcttagtgagtcaagttttatgtctgaattagacgatcaaattcctactgccttcgatccttttgctgatgcaaatgctgatgactcgggtgctgggtcaaaggagtatgtgcatattcgtgtacagcagcgaaatggtaggaaaag

SEQ ID NO: 133775 - DNA, 247 bp, Glycine max
atgaaatcctattttcttgcaagacccgtttggataagggaaaactccagagattgctttgaagtaagatccttgcgttgaccctttcctgaaccagaaccggggggggagaggaaagaaaaggggatccaaatttcccatccatcaataaagtgagggctttccggaccttccccacccctctttccattcttccttcccctctcactccccctttttcaagaaataagccccgctccctaagaag

SEQ ID NO: 133776 - DNA, 246 bp, Glycine max
tgacgaagttgctttgactacagaaccatgcctgtctgttggagtgaattggatgatcgggccgagggctgccccctcttcccctcactctcctttccctaagatgaaccttgcttgagtcatcaaagcctttctgactcggcctggcccggtcgccctacgcgactggcgcttcaaaaggtagttgacttgcttactcgttagagtaggggtcgcgagagagcagagcgtaccgccctgccatag

SEQ ID NO: 133777 - DNA, 245 bp, Glycine max
aaaacctaagcttagaattagaaacaaagaaaagaagaaaggaaagaattgatcgttgaaaatgcagggaggaaagaaagcgggagagtccattaaggaaacagctacaaacattggtgcttctgccaaggctggcatggagaagaccaaggccactgtccaagagaaggcagaaagaatgacagcacgtgatccggtgcaaaaggagttggcaacccaaaagaaagaggcaaagatgaaccagg

SEQ ID NO: 133778 - DNA, 241 bp, Glycine max
cacgcgcttgaggcttccattgctagcaattttactgataacggatgcattgcgtgtatgtgtcacaacactgatggactttatagtgctaagcagactgctattgtgagagcttctgatgatttttaccctcgtgatcctgcttcccataccatccatatttcttctgttgcatacaactcactattccttggagaattcatgcaacctgactgggacatgtttcatagtttacacccag

SEQ ID NO: 133779 - DNA, 240 bp, Glycine max
tgcagaccgagctagctagctagcaagcaagcacagagatggaggcaaagcgaggccatgccctacatgtgcttggcacgtgtttcactcttcctctgcgctctaaccctatccgctgctcacggaagcaccacggttcaagacatcgcgagaaagttgaaactcggggacaacgagcttctgcgcacggagaagaagttcaaggttttcatggagaattacgggaggagctactccaca

SEQ ID NO: 133780 - DNA, 235 bp, Glycine max
ctagctagctagcaagcaagcacagagatggaggcaaagcgaggccatgccctcatgtgcttggcacgtgtttcactcttcctctgcgctctaaccctatccgctgctcacggaagcaccacggttcaagacatcgcgagaaagttgaaactcggggacaacgagcttctgcgcacggagaagaagttcaaggttttcatggagaattacgggaggagctactccacagaggagg

SEQ ID NO: 133781 - DNA, 238 bp, Glycine max
gtgtttttcttcttcttcatcaccatgtctttactttcagacctcatcaacctcaatctctcagaatccacagaaaagatcattgctgagtacatatgggttggtggatctggtatggacctcagaagcaaagccaggactcttcctgggccagtgagtgaccctgcaaaacttccgaagtggaactatgatgggtctagcacagatcaagctccaggggatgacagtgaagtcattc

SEQ ID NO: 133782 - DNA, 236 bp, Glycine max
attgcacttcccaagaacacagttggaggaaccattctgcgtagtgatttattggcaaattttttgacagagggcaattttagagcaagtgttgatttgcagcgcactcatcgtattagaggaatgattaaaatggtggccacagttggtattcctgagaatacaggtatagcattggcctgtgctatgaatagttcttttagggggcgcgccagttctgatatttacaccatctg

SEQ ID NO: 133783 - DNA, 235 bp, Glycine max
gatgacattaataagcaacatgataccaccaatgcctacggcgtagacactggtagacagcattctagtggtggctacgatggtgacactaataaacatcatggaactactggtggctataatgatgacaccaatagacatcatggaactaccggtgtctatggtatagacaccgataggcaacaacatgggactactggtggctatgccggtgacactggtaggcaacatggga

SEQ ID NO: 133784 - DNA, 236 bp, Glycine max
gagaaagagaaatggcaacaagcgaagaagtggttgcagcggcgcggaggagcccgccggaggagggttgaagcacaaactggagagaaaatggacgttttggtgcgacaaccaatccaaacccaagcaaggcgctgcttggggaacctctcttcgcaaggtctacaccttcgacaccgttgaagagttctggtgtttgtatgatcaggtattcaagcccagcaagttgcaaatca

SEQ ID NO: 133785 - DNA, 245 bp, Glycine max
ctctacatctagaccgaacttcacctagtcacagtcaaattgatgagaaagaggaggctccagatgaagatgatggtgatgacgacgtgcaatggctgacagatacatcacttgatgctgctcgtcaacgtatccaagaacagttaagtgctgtgacagctgatatggttatgctttctacagatgaaccagagaagaagaaaaaagcagcaagtaacggaaatggcggttctcagaatggtaac

SEQ ID NO: 133786 - DNA, 247 bp, Glycine max
atttttcttcttcttcatcaccatgtctttactttcagacctcatcaacctcaatctctcagaatccacagaaaagatcattgctgagtacatatgggttggtggatctggtatggacctcagaagcaaagccaggactcttcctgggccagtgagtgaccctgcaaaacttccgaagtggaactatgatgggtctagcacagatcaagctccaggggatgacagtgaagtcattctatacccacaa

SEQ ID NO: 133787 - DNA, 243 bp, Glycine max
cgagatgcagaacttttgttcatgtggcaaatgtatcagagatcaaaccatcagtcagaaaataagacagacatcctcaaacaaattgcggagacagtgaagcataggaaacacatagatggtagcgtggaattgattggagttttactgtatggaccaggaaaaggttcttctgttctacaatccgtgagggctcctggttcgtcccttgttgatgactggacatgcctaaaatcaatggtt

SEQ ID NO: 133788 - DNA, 243 bp, Glycine max
tggagggattgacgctgcgtctcttcctcttctctttcgatccatccctcattcctaatcctccaatccaaccacctcagcctcacactcacatatacacatatctgaacgcgtatcgtccctcctatggcttcaaagcgcatcctcaaggagctcaaggacttgcagaaagacccaccaacttcttgcagcgctggtccagtagctgaggacatgttccattggcaagcaacaataatgggt

SEQ ID NO: 133789 - DNA, 239 bp, Glycine max
aactcgagcgattcggctcgaggtaacttctaatagatgaggcacaccaaagtagtaacgctatagtagcaaccagcaacaatattcaatctcatacacagaaaaatgggtgctttggatcacatctctgagctctttgactgctcccacgccagctccaagctcaagaagaaacgcaaacaattccagacggtggaggtggaagtgaagatggactgcgaagggtgtgaaagaaaggt

SEQ ID NO: 133790 - DNA, 236 bp, Glycine max
gttgtgttatgtaggaatggctttgtacggagagaaagagtggtattttttcacgccgagggaccgcaagtacccgaacggttcgcggccgaaccggtccgcggggaccgatactggaaggcaaccggagcggataaaccggttggcaaaccgaaacctgttgggatcaagaaagcattggttttttacgccggaaaagcgcccaagggagtgaaaactaactggatcatgcacga

SEQ ID NO: 133791 - DNA, 237 bp, Glycine max
ctcactcgctcttctccgccacttctgaatctattgaatcaacaatcatgtcggacgaagagcaccatttcgagtccaaggccgacgccggagcctccaaaacctaccctcagcaagccggtaccatccgcaagaacggctacatcgtcatcaaaggccgcccctgcaaggttgtggaagtttcgacttccaaaactggaaagcacggtcacgctaagtgtcactttgttggaattg

SEQ ID NO: 133792 - DNA, 237 bp, Glycine max
caactacaagaaagaacttccttataaccaaaaccaacaacaactatggcaagttatcagaagcactacgatgatcagggtcgcaaggtcgacgagtatggcaatgttgagaggcaaactgacgaatatggcaacccggttcatgccactagtgtcacttatgtagccaccaaaagtgttggtggctacaatgatgacgctaataagcaacatgatattactggtgtctatcccgag

SEQ ID NO: 133793 - DNA, 239 bp, Glycine max
atcagcaagagcaaggaggtcatcaaagccagaaaggaaagcatcagcaagaagaagaaaacgaaggaggcagcatattgagtggcttcaccctggaattcttggaacatgcattcagcgtggacaagcagatagcgaaaaacctacaaggagagaacgaaggggaagacaagggagccattgtgacagtgaaaggaggtctgagcgtgataaaaccacccacggacgagcagcaacaa

SEQ ID NO: 133794 - DNA, 250 bp, Glycine max
aataaaccttgttgttctacccgttcaaaatgatggttccacagggctccattgggccaacctccaaaaaagaacccctctaatgcaagtaccagtcctggtggacctcaatggaaatcacttgtgggttaactgtgagcagcagtactcatccaaaacgtaccaagcacccttctgccactccacccaatgctctagagccaacacccaccaatgcctcagttgccccgcggcatcaaggccagggtgc

SEQ ID NO: 133795 - DNA, 236 bp, Glycine max
gcctcccaaatgtcagcgagaaagggttctgggttatgggtaatggccacggactgcagaaactaacttcaatcacaatcaattgctgccaaggagtgacagatgttgggcttgaagctattggaaggggttgtccaaatgtgcaaaacttgaagcttcgtaagagtgcttttctgtcagacaagggattagtatcatttgccagggctgctccatcagttgagagcctgcaattg

SEQ ID NO: 133796 - DNA, 234 bp, Glycine max
aaaccaacaacaactatggcaagttatcagaagcactacgatgatcagggtcgcaaggtcgacgagtatggcaatgttgagaggcaaactgacgaatatggcaacccggttcatgccactagtgtcacttatgtagccaccaaaagtgttggtggctacaatgatgacgctaataagcaacatgatattactggtgtctatcccgagaaagacaccggtagacatcattttggt

SEQ ID NO: 133797 - DNA, 233 bp, Glycine max
ccaatgcctacggcgtagacactggtagacagcattctagtggtggctacgatggtgacactaataaacatcatggaactactggtggctataatgatgacaccaatagacatcatggaactaccggtgtctatggtatagacaccgataggcaacaacatgggactactggtggctatgccggtgacactggtaggcaacatgggaacatcagtggcccttactatggaacc

SEQ ID NO: 133798 - DNA, 235 bp, Glycine max
tgagaaacaaagaaaggaaataattgatctttgaaaatgcagggaggaaagaaagctggagagtccatcaaggaaacagctgcaaacattggtgcttctgccaaggctggcatggagaaaaccaaggccactgtccaggagaaggcagaaagaatgacggcacgtgatccgatgcaaaaggagttggcaacccagaagaaagaggcaaagatgagccaggcagagctggacaagc

SEQ ID NO: 133799 - DNA, 235 bp, Glycine max
tttggatgttgaatcctctcatggtgacatgtttaccgaggaacagaatgagttaattgaatcagcagccgagatgctttatggtctgattcatgcccggtacatattgacaagcaaaggaatggctgcaatgctcgacaagtacaagaactatgattttggcagatgcccacgagtttactgctctggacaaccttgtattccagttggtcagtcagacatccctaggtctagt

SEQ ID NO: 133800 - DNA, 236 bp, Glycine max
cacacacaactactacaagtacttccttacaatcaaaaccaacaacaactatggcaagttatcaaaagcactacgatgatcagggtcgcaaggttgacgagtatggcaacgttgagaagcaaaccgacgaatacggcaaccctgttcatgctgctagtgtcacctatgtagccaccagaactgctgctggtggttacagtgatgacattaataagcaacatgataccaccaatgcc

SEQ ID NO: 133801 - DNA, 239 bp, Glycine max
tgcagctatgtcagtggatactgcgaaaggtttagctgctgctgcagctggggagaatgccaaggagtacactgcaaggaagaaggtggaagctgagatggatttggaggccaaaagggaagctcaaaatcaggaatcgaaggagtggccatcagcaaaatccaccactgagagcattcaaagaggacaaggacaacaagaacagcatgagcaaggagaaaaatgggaacatggtgcac

SEQ ID NO: 133802 - DNA, 245 bp, Glycine max
cgagaccagatcaacgcaagccaattggtctctctcttacaccatgagtgcatcaaccaaagcttggattgtggcatcaagcataggggcagtggaggccttgaaagaccaattaggtgtatgcagatggaactatgctttaaggtcactacaacaacatgcaaagaacaacatcagatcttatagtcaagctaggaaattgtcctctgcatcctctgctgcggtttccaacaaggtcaagagaa

SEQ ID NO: 133803 - DNA, 243 bp, Glycine max
ccccctctttctcttttcttgttctgtttttattttcactgttctctgataacaacgttgttagttgtcaccatggttgttctgtctcagccagcattaaaccagtttttccttctgaaaacatgcaagcccacgcccttgttcgcggggattcctgtggtcgacctcacggaccccgatgccaagacccacatagtcaatgcctgcagggacttcggcttcttcaagctcgtgaaccacggt

SEQ ID NO: 133804 - DNA, 237 bp, Glycine max
cgtgaatcggaagcggggcactgccctctttttggacccaaggtcggcttcggccggtcgatccgggcggaagacattgtcaggtggggagtttggctggggcggcacatctgttaaaagataacgcaggtgtcctaagatgagctcaacgagaacagaaatctcgtgtggaacaaaagggtaaaagctcgtttgattctgatttccagtacgaatacgaaccgtgaaagcgtggcc

SEQ ID NO: 133805 - DNA, 231 bp, Glycine max
tgccgaattcgttatcgctttgcactagcagctttgaaacccggttcatccgaagcaccttcaccgaaccatgtcgaggagaaaggttagagagccaaaggaggaaaatgtgactctgggtccagctgttagagatggtgaacacgtttttggcgttgctcgcatctttgcctccttcaacgacaccttcatccatgtcactgatttgtctggcagggaaacccttgtccg

SEQ ID NO: 133806 - DNA, 233 bp, Glycine max
aaaaaagatcatacatagtagtgttggtgggttgcaaagatgcttgggggtcttctccataggggtcataagataaaagggacagtggtgttgatgcgcaagaatgtgttggacgtgaatagcgtaaccagcgttgggggaattattggtcaaggtctcgacttagttggctcaacactcgatactcttactgccttcttgggccgatccgtgtctctccagcttattagtgc

SEQ ID NO: 133807 - DNA, 234 bp, Glycine max
tcaacctcaatctctcagaatccacagaaaagatcattgctgagtacatatgggttggtggatctggtatggacctcagaagcaaagccaggactcttcctgggccagtgagtgaccctgcaaaacttccgaagtggaactatgatgggtctagcacagatcaagctccaggggatgacagtgaagtcattctatacccacaagctattttcaaggacccctttaggagaggaa

SEQ ID NO: 133808 - DNA, 234 bp, Glycine max
  unsure (1)..(234): unsure at all n locations
ctttcccgtgaaaagggaccatggaggcaaattcaggtgccagcgaccgaatttcgagaatcgccggccacctccgcccccagagagaggatgatgtttgtttgaagcgtacannttgccgtgcaaaaggtggggtctccggattcaaggtggccatattgggtgccgcagaggcatagggcaacctctggcgatgttgatgaagatgaatccactcgtttcacttctccacct

SEQ ID NO: 133809 - DNA, 235 bp, Glycine max
aaatgcctcgtcatctaattagtgacgcgcatgaatggattaacgagattcccactgtccctgtctactatccagcgaaaccacagccaagggaacgggcttggcggaatcagcggggaaagaagaccctgttgagcttgactctagtccgactttgtgaaatgacttgagaggtgtaggataagtgggagctggaaacagcgaaagtgaaataccactacttttaacgttattt

SEQ ID NO: 133810 - DNA, 238 bp, Glycine max
agataacttgacaaataaaatcaccatgtctatcatcccaaacttgttcggtggtagacgaagcaacgtcttcgacccattctctctggacgtatgggaccctttcgaggggtttcctttttccacaggtcacgtgccttcctctggtggggaaagcagtgccatagccaacactcgcgtggactggaaggagactccggcggctcacgtgttcaacgttgatcttcccgggttgaag

SEQ ID NO: 133811 - DNA, 245 bp, Glycine max
cttctcttgcggctagggttttagcgcagttcttctagatttaaggaagatgggtaaggaaaaggttcacatcagtattgtggtcattggccatgtcgactctgggaaatccactaccactggtcacctgatttacaagcttggaggcattgacaagcgtgttattgagaggtttgagaaggaagctgctgagatgaacaagaggtctttcaagtatgcctgggtgctggacaaacttaaggctg

SEQ ID NO: 133812 - DNA, 243 bp, Glycine max
ctcgagccgctcgagccgctcgagccgcttgctctatactacacagtacacacactagaagaataatggcttccatcctccactactttttagccctctctctttcttgctcttttcttttcttcttatccgactcagtcacccctacaaaaccaataaaccttgttgttctacccgttcaaaatgatggttccacagggctccattgggccaacctccaaaaaagaacccctctaatgcaag

SEQ ID NO: 133813 - DNA, 232 bp, Glycine max
caagtctgctttgattaactccattcatcaaattgcaaagtctcggtttcctgtgcaggagaagatgaagcgtgctgctgtgggtccgctacctggtgttactcaagacattgctggattcaagatagcacataaaccaagcatatatgtcctagataccccaggggttctggttccaagtatctcagacatagagacagggttaaaactggctctggcagagtctgtcaaa

SEQ ID NO: 133814 - DNA, 233 bp, Glycine max
gttgtgcaatcttacaagttccaaacttctctattttgttattatttgttctcacttctcacacatacagattttagccttttatattatcatggcttctaaggtggtttcggttttggttatagcgatgatgttgtttgccatgaactgtaactgcactagtgttggccacatgccttcaaccaaagaggaaggtcacgattttcaggagtctaaagccaagaccacacaaa

SEQ ID NO: 133815 - DNA, 233 bp, Glycine max
gtctttgggaatagtgctgcaatggcttcaagtcaggaggaggtgacccttttgggagctactggaagcccatttgtgtgcagggttcatattgccctcaagttgaagggagttcaatacaaatatgtcgaagaaaatttgaggaacaagagtgaactgcttctcaaatccaacccagttcacaagaaggttccagtgtttattcacaatgagaagcccatagcagagtctct

SEQ ID NO: 133816 - DNA, 233 bp, Glycine max
ctccttttagcaagttaacaacacttttgtcttcgttccattatctagttctcaattctcttcaccctttgcctctgaaagaaatgggtagtcttgaagcggaaagaacaacagtaggattggcagcaagagacccttcagggattctctccccatacacctacaatctaagaaacacaggccctgatgatgtttacattaaagttcactactgtggaatttgccattctgat

SEQ ID NO: 133817 - DNA, 243 bp, Glycine max
tgagtttgccacatcctcagggagatcaatctggtgcttttagtcaagtttttctgcctgcagatgaaggtgttgaaagttctatttggctgctagcaaaggcttatgtagttgtgaatgactcgtgctatcatcaacttgtcagccattggttaaacactcatgcagttgttgagccattcatcatagcaacaaacaggcatctcagtgttgttcaccctatttataaactccttcaccctc

SEQ ID NO: 133818 - DNA, 239 bp, Glycine max
aaaaaaaaaaaaacatggtggtgaaggtgtatggtccaacctatggatcccccaagagggtcctggtgtgtctgattgagaaggaaattgagtttgaaacagtgcatgttgatctcttcaagggagagaataaggaacctgagttccttaagctgcagccatttggatcccttcctgttattcaagacggtgattatactctctatgaatctcgtgcaataatcagatacttagctgag

SEQ ID NO: 133819 - DNA, 237 bp, Glycine max
tgcagaccgagctagctagctagcaagcaagcacagagatggaggcaaagcgaggccatgccctcatgtgcttggcacgtgtttcactcttcctctgcgctctaaccctatccgctgctcacggaagcaccacggttcaagacatcgcgagaaagttgaaactcggggacaacgagcttctgcgcacggagaagaagttcaaggttttcatggagaattacgggaggagctactcca

SEQ ID NO: 133820 - DNA, 232 bp, Glycine max
attgaaacagaaaatttgaagagtttgtttattgtgaaaaaaagaaaaatgcaggcagcaaagaaagccatagagacctttaaggaaaccgcagccaacattggcgcctctgccaagtctggcttggagaaaaccaaggccactatccaagagaagaatgagaagatgaatgcagaagatcaaactcaaatggatatggctaccaagaggaaagaagagaagatcaaccagg

SEQ ID NO: 133821 - DNA, 233 bp, Glycine max
gaaaatttgaagagtttgtttattgtgaaaaaaagaaaaatgcaggcagcaaagaaagccatagagacctttaaggaaaccgcagccaacattggcgcctctgccaagtctggcttggagaaaaccaaggccactatccaagagaagaatgagaagatgaatgcagaagatcaaactcaaatggatatggctaccaagaggaaagaagagaagatcaaccaggctgagatgga

SEQ ID NO: 133822 - DNA, 232 bp, Glycine max
ctactacaagtacttccttacaatcaaaaccaacaacaactatggcaagttatcaaaagcactacgatgatcagggtcgcaaggttgacgagtatggcaacgttgagaagcaaaccgacgaatacggcaaccctgttcatgctgctagtgtcacctatgtagccaccagaactgctgctggtggttacagtgatgacattaataagcaacatgataccaccaatgcctacgg

SEQ ID NO: 133823 - DNA, 232 bp, Glycine max
taacaaacttctctatatcgtttactttttcaacacaccttacacactactttatttgagcctttcatataaatatcatggcttcgagggtggtttcggttttggtgatagcgatgatgttgtttgccatgaactgtaactgcactagtgttggccacatgccttcaaccaaagaggaaggtcacgattttcaggaggctaaagccaagacaacacaaactgcgaacaaggc

SEQ ID NO: 133824 - DNA, 233 bp, Glycine max
caacaacgccttagacgtcaccaccttcatctcctcccgcgcccaccgcgccaccacagccttcgtcgacgccgccaccgcccgccgcctcacctacacccagctatggcgttccgtggagggcgtggcagcctctctctccgtggacatggggatccgaaagggcaacgtggtcctcatcctctcccccaactccatccacttccccgttgtgtgcctggccgtcatgtccc

SEQ ID NO: 133825 - DNA, 237 bp, Glycine max
ctctccccgtaaatcaacacccttttactaagagcactgcattcctactcggcaacgaggtacgcctctttctcttactcttttgcttcaatttctaattccactctttactcttctactctcactttttaatttctctgtagggcactggtctttctcctaaggaaattgagatatgcgactttttcgtctatatccctcaatatggcggtggcactgcttccttgaatgttactg

SEQ ID NO: 133826 - DNA, 137 bp, Glycine max
aggagaattacgggaggagctactccacagaggaggagtatttgcgccgtttggggattttcgcccagaacatggtcagagcggcggacatcaggcgctggaccccaccgccgtccacggcgtcacgcagttctccg

SEQ ID NO: 133827 - DNA, 245 bp, Glycine max
ccgggtttgacgttgttcacaatcactttctgcgcttcactcactcccttcgtgcggttttctttctttgtcgaactcgtgcgaaaatgcgtgagattcttcacatacagggagggcaatgcggaaaccagatcggagcgaagttctgggaggtggtgtgcgcggacacgggatcgattccacggggaggtaccagggggacaacgagttgcaactcgagcgagtcaacgtctattacaatgaag

SEQ ID NO: 133828 - DNA, 136 bp, Glycine max
caaaacctaagcttagaattagaaacaaagaaaagaagaaaggaaagaattgatcgttgaaaatgcagggaggaaagaaagcgggagagtccattaaggaaacagctacaaacattggtgcttctgccaaggctgg

SEQ ID NO: 133829 - DNA, 245 bp, Glycine max
gaagaaaacctaagcttagaattagaaacaaagaaaagaagaaaggaaagaattgatcgttgaaaatgcagggaggaaagaaagcgggagagtccattaaggaaacagctacaaacattggtgcttctgccaaggctggcatggagaagaccaaggccactgtccaagagaaggcagaaagaatgacagcacgtgatccggtgcaaaaggagttggcaacccaaaagaaagaggcaaagatgaac

SEQ ID NO: 133830 - DNA, 136 bp, Glycine max
atgaggtcgagtttcacagcagcaatggtgtacgtcaaggctcagaaatcaaaagcctacttcaagagatatcaagtcaagttcaagagaagaagagagggaaaaaccgattaccgtgccaggattcggttgatta

SEQ ID NO: 133831 - DNA, 246 bp, Glycine max
gtacagcgttgcttggatggaagatagtgaggctcacaatctaaaaagggaatccgtgaaacaacaatacaaatcggtaaagcaacggacttcaaatttcaacaactatgcgatgggttctcatgtgatgcaatatggtgataccaacatcacagctgaaaagctttatttataccaaggttttgatcctgccactgtgaacttccctccacaaaacggcaggctagaaactaaaatggaagttgt

SEQ ID NO: 133832 - DNA, 246 bp, Glycine max
caacaagaagcttgatgctgcatatcatgaggcacagcagaaacctggtggctgccctgtttttctctttttctcagttaataccagtgggcaatttgtggggcttgctgaaatgattggtcctgttgattttaacaagagtgttgagtattggcagcaagacaagtggaatggctgctttcctcttaagtggcacgttgttaaggatgttcctaacaatttgttgaggcacattaccctggataa

SEQ ID NO: 133833 - DNA, 248 bp, Glycine max
cttcttcttctttttcatcaatcatcaccagtggttcttttccttctgagaagatcgaattgtgttttgcaaaaatgggagttccagagaaagaccctctttcccaattgagtttgcctcctggttttcggttttaccccaccgacgaggagcttctcgttcagtatctgtgccgcaaggtcgctggccaccatttctctcttccaatcattgccgaaattgacttgtacaagttcgacccatgggtt

SEQ ID NO: 133834 - DNA, 248 bp, Glycine max
  unsure (1)..(248): unsure at all n locations
ttcagatcgcagacagacacagagagtgagagagggagatggggagcgacagcganggcagagaagtcggtgcagaaagagaaggagaagaagaagatgttggccctggctcccattgctaaacctcttgctgggaagaagctttgcaagcgaaccctaaaacttgttcgtagagctgccgaacacaaatgcttgaaaagaggagtgaaggaggtcgttaaaagtataaggagaggtcataaaggatt

SEQ ID NO: 133835 - DNA, 248 bp, Glycine max
cacaaatcaccatccgttcatctggaggactctcagaagatgagattgataagatggtcaaagaagcagagttgcacgctcagaaagaccaggaaagaaaggctctcattgacatcagaaacagtgcagatacaagcatctacagcattgagaagagtttaggtgagtacagagataagatccccagtgaagtggccaaagagattgaagatgcagtatcggatttgagaacagcaatggcaggagac

SEQ ID NO: 133836 - DNA, 247 bp, Glycine max
tatgaaaaggagcctggtcccacacatgctggaggacgaagcaggcgagtagagcctgaaagaacactgactgatgcacagagggatgaatttgaggatatgctgcgtgctttaacattagagaggagccagataaaagaggctatgggattttctttagataatgccgatgctgctggcgaggtagttgaagttttgactgaatccttgacacttaaagaaacccctattccaactaaaattgcaa

SEQ ID NO: 133837 - DNA, 248 bp, Glycine max
gaagcagtatcacagtatagaacatatgaagatgcttttgtcaataaagttaaagatggactgatgattgcaaaggagaatccagctgtaagtgctggtgtagctatttctgctgcccttctggctatgcgagctccaagaaggtttctgtttcgccatacattgggtcgattccaaagtgaggaggcgcgatatgctagaattgagaagaatgtaaaggacttgaacctttcagtggatttactgaa

SEQ ID NO: 133838 - DNA, 249 bp, Glycine max
agctgctggtaactatcctgagtggaaactgtttgttcagacaatagatcctgagcacgaagacaaatttgactttgaccctcttgatgttactaagacttggcctgaggacattatacccttgcagcctgttggtcgcttggtcctgaataagaacatagataatttctttgctgagaatgaacaacttgcattttgccctgccattgtggttcctggtgtatactactcagatgataagatgcttca

SEQ ID NO: 133839 - DNA, 253 bp, Glycine max
cgccagctcgagaaaagggtgtatgagagggaaaggaggtcccgagaatgctagttgcacctacaaaggtgtgaggcagagaacatggggaaaatgggttgctgaaatccgtgaacccaatcgaggtgctaggctctggctcgggacttttgagacctctcatgaagctgctttggcttatgatgctgctgcacgtaagctctatggctctgatgccaaactcaacttaccagagctctctatcaaatcacaa

SEQ ID NO: 133840 - DNA, 245 bp, Glycine max
cgccattgtcaaacccttttcacttctctctagggttttagcactctctctctctctcgttttcgttcttcctttctgcctctctcagtcacacaccttctcgatgaccaacgacaacatcgccgtgacagatctcacttctgccctcaatgaagataatcgcgccgacctagtcaatgctctcaagagcaagattcagagtctggctggggcgcattctgatgttctagagactctatccccga

SEQ ID NO: 133841 - DNA, 240 bp, Glycine max
taggaatataagaactaagatggattggatcggagcgtaccgcggaggccagagaagcagggactggtgcgacccttcatcaccattcactgatttgtgggaccctcgtcgtgtcggtgacgctgatgatatcacctcctctctcgcccatgctcacgttgactggcgtgagactgataaagctcatatcttccgtgctgatcttccaggggtgaagaaagaggatctgaaggtgcaggt

SEQ ID NO: 133842 - DNA, 243 bp, Glycine max
ctccttaaacactcatcagtcatcaccatggccaagctagttttttccctttgttttctgcttttcagtggctgctgcttcgctttcagttccagagagcagcctcagcaaaacgagtgccagatccaaaaactcaatgccctcaaaccggataaccgtatagagtcagaaggagggctcattgagacatggaaccctaacaacaagccattccagtgtgccggtgttgccctctctcgctgc

SEQ ID NO: 133843 - DNA, 246 bp, Glycine max
cacacacacagctagcagatattacatacacgtgaatcactaattaagccatggagaagaaatcaatagctgggttgtgcttcctcttccttgttctctttgttgctcaagttgtggtgcaaactgaggcaaagacttgcgagaacctggctgatacatacaggggtccatgcttcaccactggcagctgcgatgatcactgcaagaacaaagagcacttgctcagaggcagatgcagggacgatt

SEQ ID NO: 133844 - DNA, 246 bp, Glycine max
gttcgtgccgcgcgcggttctcatggacctcgaaccgggcaccatggacagcgtccggtccgggccgtacgggcagatcttcaggcacgacaactttgtgtttgggcagtccggggcagggaacaactgggccaaggggcattacactgagggtgcggaattgattgattccgttctcgatgttgtgcgcaaggaggctgagaactgcgattgcttgcaaggttttcaagtgtgccattccctggg

SEQ ID NO: 133845 - DNA, 250 bp, Glycine max
ccgacgaagccaaagccaaaggcaacgcagccttctcctccggggactatcctgccgccatccaccacttctccgatgccatcgccctggctccctccaaccatgtcctctattccaaccgatccgccgcatacgcctccctcaaaaactacgcagatgcattagcggatgccaaaaagacagttgaactcaagcccgactggtccaagggttacagccgtctcggtgccgcgcatcttggcctttccca

SEQ ID NO: 133846 - DNA, 245 bp, Glycine max
agccttatgtgtattttcctttgctgctggtccagacagtgaacctatcacattttctggaaaaactccgggaaagattgttcctccaagagggcctaatgattttggatgggatcctatttttgaacctgatggctatgaccaaacgtatgctcagatgcccaaagaagaaaagaacaaaatttcccaccgctccaaatctcttgcattggtgaaatctcattttgctgaagctagatttactt

SEQ ID NO: 133847 - DNA, 244 bp, Glycine max
tgctattatcatccgcagctgcttttattcgcaccgcaaacagtgagccatggccgtcggaaagaacaagcgcatctccaaggggaagaagggtggcaagaagaaggcagctgatccctttgccaagaaggattggtatgacattaaggctccttctgtttttcaagtgaaaaatgttggcaaaaccctcgtctctcgtactcagggtaccaagattgcttctgaaggactcaagcatagagtg

SEQ ID NO: 133848 - DNA, 240 bp, Glycine max
attttgtaactttcaagactcagctaataaacatcaaaagatgtctctgattccaagtatttttggtggccgaaggagcaacgtgttcgatcctttctcccttgacgtgtgggaccctttcaaggattttcattttcccacttctctttctgctgaaaattctgcatctgtgaacactcgtgtggattggaaagtaaccccagaagcacacgtgttcaaggctgatattccagggctgaa

SEQ ID NO: 133849 - DNA, 244 bp, Glycine max
ccattactcagcactgccattcttcaatcacactaatggctgtcaccttctcagatcttcacaccgaagagggcatcaaatccctcgatcaattcctttctgggaaaacctatatctctggggatcaattgacaaaggatgatatcaaagtgtatgcagctgttgtggaaaagccaggagactcttttcctaatgctgctaagtggtacgatgccgtctcttctcaacttgctccaagcttccc

SEQ ID NO: 133850 - DNA, 244 bp, Glycine max
cccaaaccgaaaccctaaccctaacggagagatggcggacacttggcatcgatattcgggacggagaaggacagggtgaactgtccgttctacttcaagatcggcgcgtgcaggcacggcgaccggtgctcccggcttcacaccaagccgacaattagcccaacattggttctgtcgaacatgtaccagaggcccgacatgaacatgagcattatcaccaaccccgatcagccacaaccccaat

SEQ ID NO: 133851 - DNA, 244 bp, Glycine max
ggcgagttctatcgggtaaagccaatgattagaggcatcgggggcgcaacgccctcgacctattctcaaactttaaataggtaggacggtgcggctgctctgttgagccgcgccatggaatcgagagctccaagtgggccatttttggtaagcagaactggcgatgcgggatgaaccggaagctgggttacggtgcccaactgcgcgctaacctagaccccacaaagggtgttggtcgattaag

SEQ ID NO: 133852 - DNA, 244 bp, Glycine max
ccgctcgagccgcgagtagtggtggctctgtggagttgggtgctgtggcggctattcgcataccgttacttcatgtgtcaaatttcaaaggagggacgccggagttggttgagacgtgttatgctatacttgttttggttctgccaagttcaagcactagggtttggacctaccatgagatggagatagttgaagtggttgctgatcaggtggctgttgccctgtctcatgcatctgttcttga

SEQ ID NO: 133853 - DNA, 180 bp, Glycine max
ggtttctgctgcaatggtgcctcaaccacaaacaacacctacaaagaattatgcttcttattagctatgcacttaaggaaatctaaataaatatttttcattctaggtgatgtatcatgtatgtaccaaaatattttggtacgtaagtcttttaaaaagtttgcatctcctctttggttt

SEQ ID NO: 133854 - DNA, 246 bp, Glycine max
tctcatttgaatacattccttgtagtttatactgaaagatgggtttgaagatggcgttactgatcctaggcctttccctcatgctccttttggtctcctctgaggtggcatccacgaatacaaaagaggaggcaaatggagtggatgatgccaaatatcccggtggaagctatggagggggttacccaggtcatggcggtggcggttatcctggccatggcggtggcggttatcctggccatggcg

SEQ ID NO: 133855 - DNA, 241 bp, Glycine max
  unsure (1)..(241): unsure at all n locations
cagaaacccatttgccagagctggaggcaaganatggaatttccataacaatggaagacattggaacttcacgtgtttggaacatgcgctatagatactggccgaacaacaaaagcagaatgtatttgctcgagaacactggtgactttgtgagagccaatggactccaagagggagatttcatagtgatatactcagatgtgaagtgtggcaaatatatgataagaggagtgaaagtgag

SEQ ID NO: 133856 - DNA, 133 bp, Glycine max
gaaaaaaaaatggctgatacaggtggaggagatgcagtgagaccagtggtaatatgtgataacaagtgtggctgcacacttccatgcactggtggttccacttgcaggtctcttaagttcatgatttcaacaa

SEQ ID NO: 133857 - DNA, 242 bp, Glycine max; identical to SEQ ID NO: 113687

SEQ ID NO: 133858 - DNA, 246 bp, Glycine max
tgaaagcactcagtagggtttgcggtttcagagtttgtgacgcacgcatccatggccaccaccaccaacgccgccgcagccccgccgcgccagctctcccagaaggaagccgacatccagatgatgttagccgccgacgtccacctcggcaccaaaaactgcgacttccaaatggaacgttacatcttcaagcgccgcaacgacgggatttacattattaaccttgggaagacatgggagaagctt

SEQ ID NO: 133859 - DNA, 247 bp, Glycine max
ctctctcaagggttccaaacacaaagccaccattcactgttggccaactcaagaaagccattccaccgcactgctttcagcgttccctcctcacttcattgtcctatgttgtttatgacctttcattggctttcattttctacattgccaccacctacttccacctcctccctcaccccttttccctcattgcatggccaatctattgggttctccaaggttgcattcttactggcgtgtgggtgat

SEQ ID NO: 133860 - DNA, 242 bp, Glycine max
ttttaatcttaattcccccactgacagggatgggaatctagccgtttcacggatgcttagtggacataaaggttatgtttcctcttgtcagtatgttccagatgaagatactcacttgattactggttctggtgatcagacatgtgttttatgggatattactactggccttagaacatctgtttttggtggtgaatttcagtctggacatactgcagatgtacttagcatttccattatgg

SEQ ID NO: 133861 - DNA, 238 bp, Glycine max
cttttcagatctctcattctcactctgttttacatacaatgtcgttctgaatcactgcatcttttcttatttccactctctgcagcttcattttctgcaaaatggatccctctgcggcattgctatttaaccacctcaagggtgcagacccgttcttcctgctagcgggtcctaatgtgattgaatcggaggagcacattctgcggatggctaagaacatcaagagtgttgcatctga

SEQ ID NO: 133862 - DNA, 241 bp, Glycine max
atgagaaacaaagaaaggaaataattgatctttgaaaatgcagggaggaaagaaagctggagagtccatcaaggaaacagctgcaaacattggtgcttctgccaaggctggcatggagaaaaccaaggccactgtccaggagaaggcagaaagaatgacggcacgtgatccgatgcaaaaggagttggcaacccagaagaaagaggcaaagatgagccaggcagagctggacaagcaggcg

SEQ ID NO: 133863 - DNA, 243 bp, Glycine max
gagagagattgtgaagtagaaatcggtgcaagaaattctccactttatctaaaaaaattcggtgagtttgtgaagacaaaaaatcactagctactcaaaaatggccacagtaggaaggaacgttgcagctcctttgctgtttcttaacttgatcatgtattttattgttcttggctttgctagttggtgcctcaacaggttcatcaatggccaaacttaccaccctagttttggtggaaatgg

SEQ ID NO: 133864 - DNA, 241 bp, Glycine max
tgacttctccctacattaaatgtacagtctctttcttcatagcatttggaatttggctgatgacaccatcaattttgaggcttttccccacaagctggtgcagtttggagagattcaggaaaaagttgtattgaaattttcacaagaggaatttcttacagcttggtcaactcaggtgcgtcctgcgacaactctgttggctgatgggtgtccatatttgtatgctatggtgcatgatagc

SEQ ID NO: 133865 - DNA, 246 bp, Glycine max
  unsure (1)..(246): unsure at all n locations
cacacaactacaagaaagaacttccttataaccaaaaccaacaacaactatggcaagttatcagaagcactacgatgatcagggtcgcaaggtcgacgagtatggcaatgttgagaggcaaactgacgaatatggcaacccggttcatgccactagtgtcacttatgtagccaccaaaagtgttggtggctacaatgatgacgctaataagcaacatgatattactggtgtctatcncgagaaaga

SEQ ID NO: 133866 - DNA, 248 bp, Glycine max
aactatggcaagttatcaaaagcactacgatgatcagggtcgcaaggttgacgagtatggcaacgttgagaagcaaaccgacgaatacggcaaccctgttcatgctgctagtgtcacctatgtagccaccagaactgctgctggtggttacagtgatgacattaataagcaacatgataccaccaatgcctacggcgtagacactggtagacagcattctagtggtggctacgatggtgacactaata

SEQ ID NO: 133867 - DNA, 239 bp, Glycine max
ctactacaagtacttccttacaatcaaaaccaacaacaactatggcaagttatcaaaagcactacgatgatcagggtcgcaaggttgacgagtatggcaacgttgagaagcaaaccgacgaatacggcaaccctgttcatgctgctagtgtcacctatgtagccaccagaactgctgctggtggttacagtgatgacattaataagcaacatgataccaccaatgcctacggcgtagac

SEQ ID NO: 133868 - DNA, 234 bp, Glycine max
ctgaagaaaacctaagcttagaattagaaacaaagaaaagaagaaaggaaagaattgatcgttgaaaatgcagggaggaaagaaagcgggagagtccattaaggaaacagctacaaacattggtgcttctgccaaggctggcatggagaagaccaaggccactgtccaagagaaggcagaaagaatgacagcacgtgatccggtgcaaaaggagttggcaccccaaagaaagag

SEQ ID NO: 133869 - DNA, 237 bp, Glycine max
caatggcaaagactgagttagaggtgactgttgagagcaagaacaaagaactaaagcacctgggatttgtgaggattgctgctattcaaacttttgtgattgtgtcaaatctgtatgagtacgcaaagcagaattctgggcctttgagatccgctgttggaacggttgagaacactgtaaccaccgttcttggtcctgtctgcaacaaattcaaggacttccctgatgatgtcctgg

SEQ ID NO: 133870 - DNA, 128 bp, Glycine max
gaaaaccaacataacaatgtcgttgattccaagtttcttcggcaccgggcgaagaaccaacgtcttcgacgccttctccctcgacgtgtgggacccattccatggcttccccggtactatcgtgctct

SEQ ID NO: 133871 - DNA, 240 bp, Glycine max
ccaaaacagtaaagctaacttcaacacctttaattttctaaaagtaattcagcggctgaataccaagcggagaagatgagtcaggagcagccacggcgtcccaaaggccaaaaccccatcaaatacggcgacgtttttgtcgtctccggcgaccttgcacagaagcccgtcgcaccggaagatgctgccatgatgcaaagcgcggaaactcgagtgctcggacaaacccaacccggcgga

SEQ ID NO: 133872 - DNA, 238 bp, Glycine max
gaagattacaacaagttctatgatgctttttcgaagaatttgaagttgggtatccacgaggatagtcagaacaggtccaagttggctgatttgctcagataccactcgacaaagagcggagatgaaatgacaagcttgaaggactacgttacacggatgaaggagggtcagaaggacatttactacatcacaggagagagcaagaaggcagtggagaactctcccttcttggagagac

SEQ ID NO: 133873 - DNA, 241 bp, Glycine max
caaaagggtaaaagctcgtttgattctgatttccagtacgaatacgaaccgtgaaagcgtggcctatcgatcctttagtccttcggaatttgaagctagaggtgtcagaaaagttaccacagggataactggcttgtggcagccaagcgttcatagcgacgttgctttttgatccttcgatgtcggctcttcctatcattgtgaagcagaattcaccaagtgttggattgttcacccacca

SEQ ID NO: 133874 - DNA, 242 bp, Glycine max
tagagaacatgaatttgaaggctacagagttgaggcttggtcttcccggattccaatcgcctgaaagggaaccggatcttttctctttaagctcaccaaagcttgatgagaagccactcttccctttgcttcctactaaagacgggatttgctcgtcggggcagaaagctgttgtttctggcaacaaaagaggttttgctgataccatggatgggttttctcaggggaagtttgctggtaat

SEQ ID NO: 133875 - DNA, 243 bp, Glycine max
aaaggatccaaagacaagaaggccatgaggagagctgagaaggagagactgaaggaaggtgaaatggctgatgaggaacagaagaaagtgaagaaagaggttaagaagaaaggctcttcatcttcaaaagatggcactgctaaatccacctcttcaaagaagaaagcaagtggctctgatgaagaccgcacttcacctactcacagtcaaattgatgagaaagaggaggctccagatgaagat

SEQ ID NO: 133876 - DNA, 240 bp, Glycine max
gctgggcacgggggtcccagtcccgaacccgtcggctgtcggtggactgctcgagctgcttccgcggcgagagcgggtcgtcgcgtgccggtcgggggacggattgggaacgggcccttcggggcctcttccccgggcgtcgaacagtcaactcagaactggtacggacaaggggaatccgactgtttaattaaaacaaagcattgcgatggtccctgcggatgttgacgcaatgtgatt

SEQ ID NO: 133877 - DNA, 244 bp, Glycine max
tctgaggtgaactcgtgtggggtgtggtagtgtggcagcgacacgtatcaacttcaataatcgcatcgcagaagcagtttccggtgcatctcatcgtctccgaaaatgaacgacgcagatgtctcgaagcaaatccagcagatggtgcggttcatccgccaggaagctgaggaaaaggccaacgagatctctgtctccgccgaagaggaattcaatatcgagaagctgcagttggtcgaagccg

SEQ ID NO: 133878 - DNA, 245 bp, Glycine max
ctacaagaaagaacttccttataaccaaaaccaacaacaactatggcaagttatcagaagcactacgatgatcagggtcgcaaggtcgacgagtatggcaatgttgagaggcaaactgacgaatatggcaacccggttcatgccactagtgtcacttatgtagccaccaaaagtgttggtggctacaatgatgacgctaataagcaacatgatattactggtgtctatcccgagaaagacaccgg

SEQ ID NO: 133879 - DNA, 258 bp, Glycine max
gaagaagttcaaggttttcatggagaattacgggaggagctactccacagaggaggagtatttgcgccgtttggggattttcgcccagaacatggtcagagcggcggagcatcaggcgctggaccccaccgccgtccacggcgtcacgcagttctccgatctcaccgaggacgagtttgagaagctctacactggcgtcaatggcggcttcccgtcatcgaataatgccgccggcggtattgcgccgccgttggaggt

SEQ ID NO: 133880 - DNA, 257 bp, Glycine max
caataagcggaggaaaagaaactaacaaggattcccttagtaacggcgagcgaaccgggaaaagcccaccatgaaaatcggtcgccctcggcgtccgaattgtagtctggagaagcgtcctcagtggcggaccgggcccaagtcccctggaagggggcgccagagagggtgagagccccgtcgtgcccggaccctgtcgcaccacgaggcgctgtcggcgagtcgggttgtttgggaatgcagccccaatcgggcgg

SEQ ID NO: 133881 - DNA, 255 bp, Glycine max
gagaacaagaagctgattctggcaatattggacaatcaaaatcttggaaaacttgcagaatgtgcccagtaccaagctcagcttcaaaagaatttgatgtatttagctgcaattggtgatgcccagcctcaaacaccagccatggctccacagatggcaccacaccctgccatgcaaccaggattctatatgcaacatcctcaggctgcagcagcagcaatggctcagcagcagcagcaaggaatgttcccccag

SEQ ID NO: 133882 - DNA, 254 bp, Glycine max
ggagccagttcttccaggttgctttctacgggccaaagctattggactcatgcctatgattgatcagggtgagaaagatgacaagataattgctgtctgtgctgatgatcctgagtataggcattacaatgatatcaaggaccttcctcctcaccgtttagctgaaattcgtcgtttctttgaagattacaagaagaatgagaacaaggaagttgcagtgaacgactttcttcctgcttcagctgcctatgaag

SEQ ID NO: 133883 - DNA, 258 bp, Glycine max
tttgcttcttcgagtttcacagccaagtcgtaaaagggtttcaagggatggaaaacatgcagagcttctggcaattgggtgatgaactccgtgggcactcaaaagcatcggaggatcacaagtggttaatggttgcctcgaaactggccgaacagacaagattgaagggggagcgtgtgaacaaccttgatctttcaaagggacccattgaaacaaggtcaagggataaatttgggttccaggaagagaacaaatttg

SEQ ID NO: 133884 - DNA, 259 bp, Glycine max
gtgcccttgaaaatgagatgctccttcggatcaagaaacagggacttgatttcactccaagaattctaatagttaccaggttaatacctgatgcaaaggggacaacatgcaaccagcggctagaaagagtcagtggtactgaccatactcatattttgcgagttccattcagatcagagtcaggaactctccgtaaatggatttcaaggtttgatgtgtggccttatctagagacttatgcagaggatgttgccagtga

SEQ ID NO: 133885 - DNA, 259 bp, Glycine max
ctctcccagacaaacacatggctttgcccaatcagcaaaccgtcgattaccccagcttcaagctcgtcatcgtcggtgacggtggcacaggaaagacaaccttcgtgaaaaggcatctcactggtgaattcgagaagaaatatgaaccgaccattggtgtggaggttcatccgttggattttttcactaactgcggaaagattcgattctattgttgggatactgctgggcaagagaagtttggcggcctcagagatgg

SEQ ID NO: 133886 - DNA, 266 bp, Glycine max
cacaaaacaaaaagtttacgttacaaatcgcataataaccgtcctaagtttattgagagaattttgcaagtgtgagaaacatggcatctcgtcaaaacaacaagcaagagcttgatgaaagagcaaggcaaggagagactgttgtcccgggtggaactggtggcaagagcctggaggctcagcaacaccttgctgaaggaaggagcaagggagggcaaacaaggaaggaacagctgggtacagaagggtaccaggaaatgggacgc

SEQ ID NO: 133887 - DNA, 248 bp, Glycine max
ggagagcgcaatgggaatgagtatcttatcaatctcattgactcccctgggcacgttgacttctcatctgaggttactgctgcactccgtattactgatggagctctagttgtggtcgattgtgtggaaggagtttgtgtccaaactgaaactgtgctaagacaagcccttggagaaaggattaggcctgttctgactgtcaataagatggacaggtgcttccttgaactccaggttgatggagagga

SEQ ID NO: 133888 - DNA, 254 bp, Glycine max
taaaatcaccatgtctatcatcccaaacttgttcggtggtagacgaagcaacgtcttcgacccattctctctggacgtatgggaccctttcgaggggtttcctttttccacaggtcacgtgccttcctctggtggggaaagcagtgccatagccaacactcgcgtggactggaaggagactccggcggctcacgtgttcaacgttgatcttcccgggttgaagaaggaggaagtgaaggttgaagttgaagatg

SEQ ID NO: 133889 - DNA, 256 bp, Glycine max
cgcagctgcaagggatgcaagggaggcagctgcaagggatgcaagggaagctgctgcaagggatgcaaaggtggaggcaagggatgtaaagagcacaacagtgacagcaacaaccgcaaccgcatgatgagtaattctgatattagagggagcattaatgtgttgttgtgatgtggtttatatggggaaattaaataaatgatgtatgtacctcttgcctatgtaggtttgtgtgttttgttttgttgtctagctt

SEQ ID NO: 133890 - DNA, 255 bp, Glycine max
gttgtcctctacaggaatggaatttactctccacattggaacttgaacgcgaacagtgtgatctatgtgactcgagggaaaggaagagttagagtggtgaactgccaagggaatgcagtgttcgacggtgagctaaggaggggacaattgctagtggtgccgcagaactttgtggtggctgagcaagggggagaacaaggattggaatacgtagtgttcaagacacaccacaacgccgtgagcagctacattaag

SEQ ID NO: 133891 - DNA, 257 bp, Glycine max
cgcgacggactcggcgacggaggacgagcggaccggaacctgcaggacgttgacagggcagcgctgtcgcgtcccttggatgagacgcagcagagctggctccttggccccggcgagcagaagaagaagaagtacgtcgatctcggctgcatcatcgtcagccgcaagatcttcaagtggaccctcggcacaatcctcttcgccgcattcctcgccggcctcatcgccctcatcgtcaacaccgtcccccgccaccg

SEQ ID NO: 133892 - DNA, 259 bp, Glycine max
aatttcaccaccgaacgaaccaacacacgctcaaaccccaaaccctaacacaagccttgatcagatggcatccaaacgaatcaacaaggaattgaaggacctgcagaaagatcctcctacgtcatgcagtgctggcccagtggctgatgacatgttccattggcaagctacaattatgggtcctgcagatagtccatttgctggaggtgtatttcttgtgtcaattcactttcctcctgattatcctttcaaaccaccc

SEQ ID NO: 133893 - DNA, 257 bp, Glycine max
actttctgaaggagatatattagttacatttatctatgaaaaatcgagatcgggtgatataacacaaggtcttccaaaagtagaacaggtattagaagttcgttcgattgattcaatatcgatgaacctagaaaagagagttgatacttggaatgggcgtataacaaaaattcttggcattccttggggattcttgattggtgctgagctaacgatagcgcaaagtcgtatttctttggttaataaaattcaaaaag

SEQ ID NO: 133894 - DNA, 252 bp, Glycine max
ttgcgcgtgaacaagcctcagccaaaaccatggttaagcataacaatgttatcccaaacggacacttccgtaagcactggcagaactatgtgaagacttggttcaatcagccagcacggaagacaaggagacgattggctcgtcagaagaaagctgtgaagatattccccagacctacggctggacctctcaggcccattgtacatggtcaaactttgaaatacaacatgaaagtgagaggtggaaggggat

SEQ ID NO: 133895 - DNA, 256 bp, Glycine max
taacacttccttagttcaatatggggaagcccttcactctctctctttcttccctttgcttgctactcttgtcgagtgcatgctttgctattagctccagcaagctcaacgagtgccaactcaacaacctcaacgcgttggaacccgaccaccgcgttgagtccgaaggtggtttgattcaaacatggaactctcaacaccctgagctgaaatgcgccggtgtcactgtttccaaactcaccctcaaccgcaatgg

SEQ ID NO: 133896 - DNA, 258 bp, Glycine max
gagaaacaaagaaaggaaataattgatctttgaaaatgcagggaggaaagaaagctggagagtccatcaaggaaacagctgcaaacattggtgcttctgccaaggctggcatggagaaaaccaaggccactgtccaggagaaggcagaaagaatgacggcacgtgatccgatgcaaaaggagttggcaacccagaagaaagaggcaaagatgagccaggcagagctggacaagcaggcggcgcgtcagcataacacgg

SEQ ID NO: 133897 - DNA, 254 bp, Glycine max
cctttgttcactcttcttctcttgcggctagggttttagcgcagttcttctagatttaaggaagatgggtaaggaaaaggttcacatcagtattgtggtcattggccatgtcgactctgggaaatccactaccactggtcacctgatttacaagcttggaggcattgacaagcgtgttattgagaggtttgagaaggaagctgctgagatgaacaagaggtctttcaagtatgcctgggtgctggacaaactta

SEQ ID NO: 133898 - DNA, 263 bp, Glycine max
gtttgcttgtctatacttaatgaagatagtgggtggagaccagctataacagtgaagcaaattcttgtgggcatccaagacctgcttgatcaaccaaatcctgctgaccctgcccagacggagggttatcatctattcatccagctgagtacaagagaagagtccgacagcagtcaaagcaatatccacctcttgtctagtgttatatctgctcactttaggaactgttatagtatgttagttgttgtcagttatttcttgtt

SEQ ID NO: 133899 - DNA, 249 bp, Glycine max
gctggttttgttaagatgattccaaccaaacccatggttgttgaaactttctccgagtatcctccacttggtaggtttgctgttagggacatgcgtcaaactgttgctgtgggagttatcaagaacgttgagaagaaggatcctaccggagccaaggtcaccaaggctgcccagaagaagaagtgaatcgtgcgggctggttcatcaggggatgttggttacaataaatgttggtttcttttctgtact

SEQ ID NO: 133900 - DNA, 255 bp, Glycine max
gaaaagtagtgtattaagactacaaattttcaatttttcaatggcgtcgaggcaacaaaaagaggatcgagctgaggcagctgcgaaagttgctgcgaaagaactcgaacaactcaaccgagaaaaagaccgtgatttcagtgttggtgttgcagaccaacaccaacaagaagaacatcagttagatcaacaaaagcgtggtgtaatcggatccatgttcaaggcggtgcaagacacctacgagaacgccaagga

SEQ ID NO: 133901 - DNA, 255 bp, Glycine max
cgacttcaaaagttcagggacttgagaatgcaacaaaagacggggagactcaatagttttccaaaaagagatgccgctatattgaagagacatttagctcatttggaaacatatcttggcggcattaaatatatgacggggttacctgatattgtaataatcgtcgatcaacaagaagaatatacggctcttcgagaatgtataactttggaaattccaacaatttgtttaatcgatacaaattgtgacccggac

SEQ ID NO: 133902 - DNA, 264 bp, Glycine max
aaaaggttcacatcagtattgtggtcattggccatgtcgactctgggaaatccactaccactggtcacctgatttacaagcttggaggcattgacaagcgtgttattgagaggtttgagaaggaagctgctgagatgaacaagaggtctttcaagtatgcctgggtgctggacaaacttaaggctgagcgtgaaagaggaatcaccattgatattgctttgtggaagtttgaaacaacaaagtattattgcacagttattgatg

SEQ ID NO: 133903 - DNA, 250 bp, Glycine max
gcgccgctacttccagcagctcgtttcggcgttgcggttctgccaccgcaacggcgtggcccaccgcgacctgaagccgcagaacctcctcctcgacggcgacggaaacctcaaggtctccgacttcgggctctccgcactgccggagcagctcaagaacggcctcctccacaccgcctgcggcacgccggcgtacaccgcgccggagatactccgccggagcggcggctacgacgggtccaaggccgac

SEQ ID NO: 133904 - DNA, 251 bp, Glycine max
ttgcggacaagcttctcaacatcctcggacctaggttccttgggccccttgcgataatgagaatttggagcttctgtttgttttatgtcatggctgagttgtgggggagtgtggttatttccgtactcttttgggggtttgctaatcagataactactattgaagaagcaaaacgattctacccactgttcggactcggggccaatgtagcccttattttctctggccggacagtcaaatacttttctaat

SEQ ID NO: 133905 - DNA, 254 bp, Glycine max
aagtacttccttacaatcaaaaccaacaacaactatggcaagttatcaaaagcactacgatgatcagggtcgcaaggttgacgagtatggcaacgttgagaagcaaaccgacgaatacggcaaccctgttcatgctgctagtgtcacctatgtagccaccagaactgctgctggtggttacagtgatgacattaataagcaacatgataccaccaatgcctacggcgtagacactggtagacagcattctagtg

SEQ ID NO: 133906 - DNA, 248 bp, Glycine max
gctgaaattaccaaaaaaaatcatggggaagctaacattcggtatgcttggcttgcttcctctaaaggagaactatctacaatgatgaactatggacttagtcattatggactatctggatcaaagtgcacatatggcattggtgttcatcttgctgctgttacttgccctgatgccagtgtgcgttattgtgatgttgacgaaaatggggttcgacacttggccctttgtcgtgtaataatggggaa

SEQ ID NO: 133907 - DNA, 254 bp, Glycine max
gaaaacctaagcttagaattagaaacaaagacaagaagaaaggaaagaattgatcgttgaaaatgcagggaggaaagacagcgggagagtccattaaggaaacagctacaaacattggtgcttctgccaaggctggcatggagaagaccaaggccactgtccaagagaatgcagaaagaatgacagcacgtgatccggtgcaaaaggagttggcaacccaaaagaaagatgcaaagatgaaccaggcggagtgg

SEQ ID NO: 133908 - DNA, 255 bp, Glycine max
agaagcgatctctgaagccgacccattttggaattcggaaaacccagtgctgatcgctctctgggtgttcccaaaatgaagcttcggagatcttcgctgtgcgtctttctagggtttctggtgctgttcctttcgccgccgccatctatggcgaaattcgtggtggagaagaacagcttgacggtgacgtcgccggacgacatcaagggcacgcacgatagcgcgattgggaacttcgggataccccaatacggt

SEQ ID NO: 133909 - DNA, 258 bp, Glycine max
gccgtacctaatcggagagctcccgctgactgcgatcggatttcatggctcctaagaaagacaaggctcccccaccttcatccaagcccgccaagtctggtggtgggaagcagaagaagaagaagtggagcaagggaaagcaaaaggagaaggtgaataaccaggtgctgttcgatcaggctacctatgacaagctcctctccgaggcacccaaatacaaactcattactccttccattctctctgaccgtttgagga

SEQ ID NO: 133910 - DNA, 262 bp, Glycine max
gtcacctttccgttcatttcctctgttttttcttcaaatccattgtttcgtggaaatcccgaaatttaaccatgcttctccgaaccgccgcctccgccgcttctgcttcgtccctctccctcttcagccctacctccgaacctctccgttcggttcccgctcgtggattggtggttcgcgccgcgaaaggatccacgaaccaccgcgccctaaccggcgtgatctttgaaccgttcgaagaggtgaagaaggagctcgatct

SEQ ID NO: 133911 - DNA, 250 bp, Glycine max
gtgaagtactccagagaacccgacaatcccaccaagtcctgcaaggccagaggcgctgacctcagagttcattttaagaacactagggagactgcctttgccatcaggaagttgccccttgttaaagctaaacgatacttagaggatgttttggcccacaaacaggctattcctttccgacgcttttgtggtggtgttgggaggacggcccaggctaagaacagacactccaatgggcaaggacgctggc

SEQ ID NO: 133912 - DNA, 246 bp, Glycine max
ctttggagagacgattccagccagttaaagtgccagagccaactgtagatgaaaccatacaaatactgaaaggacttagagagcggtatgaaattcaccacaagctccgctatactgatgaggctcttgtagctgctgcacagctgtcctaccagtatatcagtgatcgatttttgccagacaaagctatcgatttgattgatgaagctggttcacgagtccggcttcaacatgcacagttacctg

SEQ ID NO: 133913 - DNA, 249 bp, Glycine max
actacaagtacttccttacaatcaaaaccaacaacaactatggcaagttatcaaaagcactacgatgatcagggtcgcaaggttgacgagtatggcaacgttgagaagcaaaccgacgaatacggcaaccctgttcatgctgctagtgtcacctatgtagccaccagaactgctgctggtggttacagtgatgacattaataagcaacatgataccaccaatgcctacggcgtagacactggtagacag

SEQ ID NO: 133914 - DNA, 250 bp, Glycine max
gagtgccagatccaaaagctgaatgccctcaaaccggataaccgtatagagtcggaaggtgggttcattgagacctggaaccctaacaacaagccattccagtgtgccggtgttgccctctctcgctgcacccttaaccgcaatgcccttcgtagaccttcctacaccaacggtccccaggaaatctacatacaacaaggtaatggtatttttggcatgatattcccgggttgtcctagcacttatcaag

SEQ ID NO: 133915 - DNA, 252 bp, Glycine max
aaggattctacccgccgctcgatgggaattgcgcttcaaggcgtctcgtagggctaatccgcctcacgagggtcaccaacggcacgtgcctttggggggccgaggccccctactgctggtcggcaaacggacggcgggcgcacgcgtcgcttctagcccggattctgacttagaggcgttcagtcataatccaacgcacggtagcttcgcgccactggcttttcaaccaagcgcgatgaccaattgtgcgaa

SEQ ID NO: 133916 - DNA, 252 bp, Glycine max
attgtttgttgttgtaactcgttcttcttcttttgttgttctgtgtttgtgtttgttttttctctcacctgaaaatgtcttgctgcggtggtaactgtggttgcggaagctcctgcaagtgcggcaacggctgcggaggctgcaagatgtacccagacttgagctacactgagtcaaccaccaccgagaccttggtcatgggagtggcacctgttaaggctcaatttgagggtgctgaaatgggtgtgcccg

SEQ ID NO: 133917 - DNA, 261 bp, Glycine max
cattgtctttgaacactcatcaccatggccaagcttgttctttccctttgtttccttcttttcagtggctgcttcgctctgagagagcaggcacagcaaaatgagtgccagatccaaaagctgaatgccctcaaaccggataaccgtatagagtcggaaggtgggttcattgagacctggaaccctaacaacaagccattccagtgtgccggtgttgccctctctcgctgcacccttaaccgcaatgcccttcgtagacct

SEQ ID NO: 133918 - DNA, 255 bp, Glycine max
ataacaataggagaggcattggaggccacggcacagacggtgggtcacaagccggtggatcagagtgatgcctcagcgattcaggcggcggaggttagagcaacgggaagtaacgttataacgccgggaggacttgcggctatggctcaatcagctgctgcttataatgctgactgcaagcatgaccaggacaaggtcaagcttgccgacgttctgaccggagcaaccgccacattgctcgcggacaaggccgcg

SEQ ID NO: 133919 - DNA, 247 bp, Glycine max
gggtttttgagtgcggtgcggcgatcctagcactctcttctgcagctttcgccgacagcttcattcaccatggctgagcaaaccgagaaggcttttttgaaacaaccaaaagtgtttctcagctcgaagaaaactgggaagggaaagagacccggaaagggtgggaaccgcttttggaaatccattgggcttggatttaagactcccagggaagccatcgaaggaacctacattgacaagaagtgcc

SEQ ID NO: 133920 - DNA, 241 bp, Glycine max
aaagaatcaaagaaaggggtggtggctgcttcgaaagcttaataatttgtttatttccagaacatcatagttttcgcagcagcaaactaacaaattactcatatcatataataagatggcccgttctctctcgcaagccaaacgtattggtgtccttgttgctcaatctatctccctaattcccgttcatcggcgaggttacgcagtggcatccgatgtatcggtaagagttggattgggt

SEQ ID NO: 133921 - DNA, 250 bp, Glycine max
agcatttcgttactttcatttgttgtgcaatcttacaagttccaaacttctctattttgttattatttgttctcacttctcacacatacagatttccgccttttatattatcatggcttctaaggtggtttcggttttggttatagcgatgatgttgtttgccatgaactgtaactgcactagtgttggccacatgccttcaaccaaagaggaaggtcacgattttcaggagtctaatgccaagaccaca

SEQ ID NO: 133922 - DNA, 247 bp, Glycine max
taacctaagcttagaattagaaacaaagaaaagaagaaaggaaagaattgatcgttgaaaatgcagggaggaaagaaagcgggagagtccattaaggaaacagctacaaacattggtgcttctgccaaggctggcatggagaagaccaaggccactgtccaagagaaggcagaaagaatgacagcacgtgatccggtgcaaaaggagttggcaacccaaaagaaagaggcaaagatgaaccaggcgg

SEQ ID NO: 133923 - DNA, 248 bp, Glycine max
tgaaaggaggattgtttcacaacttttgactcttatggatggattaaaatctcgtgctcatgttattgttattggagctactaatcgtccaaatagcattgacccagcattgagaaggtttggtagatttgatagggaaattgatattggtgttcccgatgaagttgggagacttgaagtccttcgcatacatactaaaaacatgaagctatctgatgatgttgatttagagagaattgcaaaagata

SEQ ID NO: 133924 - DNA, 241 bp, Glycine max
taacagggacagtcgggggcattcgtatttcatagtcagaggtgaaattcttggatttatgaaagacgaacaactgcgaaagatttgccaaggatgttttcattaatcaagaacgaaagttgggggctcgaagacgatcagataccgtcctagtctcaaccataaacgatgccgaccagggatcagcggatgttgcttttaggactccgctggcaccttatgagaaatcaaagtctttggg

SEQ ID NO: 133925 - DNA, 232 bp, Glycine max
gggaattggatttttgggattaggttttcagcctaaatggagactggaagacatacctggagtgcctaaggtacgatataacatcatgcaaaatcacttaggtaaatttggctcacctacaattgaatcattgttcatgacatgctcagttcaggtcaacctggacttcagttctgaagcagacatgatcaagaaaatgcgtgccagtattgctttgcagcctttggcagca

SEQ ID NO: 133926 - DNA, 245 bp, Glycine max
ctttctttctctctgcagcaacaagatgtggaaccaaccattgggaaaaaccgatttggaaagcggttctcgcccgctgtatccgatgatgcttgagagccccgaactgcgctggtctttcatcagaaaagtatactccataatcgccatacagttgctcgtaaccatcgtcgtcggcgccgtcgtcgtcaccgtccgcccaatcagcgtcttcttcgccaccaccggcgccggattggctctct

SEQ ID NO: 133927 - DNA, 242 bp, Glycine max
gcagaccgagctagctagctagcaagcaagcacagagatggaggcaaagcgacgccatgccctcatgtgcttggcacgtgtttcactcttcctctgcgctctaaccctatccgctgctcacggaagcaccacggttcaagacatcgcgagaaagttgaaactcggggacaacgagcttctgcgcacggagaagaagttcaaggttttcatggagaattacgggaggagctactccacagagg

SEQ ID NO: 133928 - DNA, 255 bp, Glycine max
cataaatagaaaaaggagcatgttgattatatagaaagtaaagggcaacaatcatttttgtttaccatgggtaaggacaccatcgctgacataataacctatataagaaatgctgacatgaataaaaaaggaatggttcaaataccatttactaacataacagaaaacattgtaaaaatacttttacgcgagggttttgttgaaaacgtcagaaaacatagagaaaacgataaatattttttagttttaactcta

SEQ ID NO: 133929 - DNA, 248 bp, Glycine max
attctctccattgtctttgaacactcatcaccatggccaagcttgttctttccctttgtttccttcttttcagtggctgcttcgctctgagagagcaggcacagcaaaatgagtgccagatccaaaagctgaatgccctcaaaccggataaccgtatagagtcggaaggtgggttcattgagacctggaaccctaacaacaagccattccagtgtgccggtgttgccctctctcgctgcacccttaac

SEQ ID NO: 133930 - DNA, 242 bp, Glycine max
gggtaaggtggaggatgttgacgaagagaaggagaaggaagaaaaaaaagaaaaagaagattaaggaagtgtcacatgaatgcgtccttggtgaacaagcagaagcccatttggatgagaaagcctgaggagatcacaaaggaggagtattctgctttctacaagagtctcaccaatgactgggaagagcatttggctgtcaagcacttctcagttgagggacagttggagtttaaggctat

SEQ ID NO: 133931 - DNA, 243 bp, Glycine max
gcttgttgtacacatttcatcacttagctcataaggttcctaatgcgacaaatagtttatgtggatacaaaattgttactggccagccatctgataggcttggagaggacttttcagagcattataatgattttactgagagattgaataatgttgaggagttcacccgggctacaatcaagaaattaactcaaggaatggatgaaaacaacaaatctatggccggtgctaaaactgatgaag

SEQ ID NO: 133932 - DNA, 247 bp, Glycine max
ctgggtcaagtagagcagcagagaagagagaaaacggcactgcagccgtagaaggaaaaccgaccatggtgcacgtctccttttacaggaactatggtaagacgtttaagaagccccgccgtccgtacgagaaggagcgtctagacgcggagctgaagctggtgggggagtacgggctgcggtgcaagagggagctgtggagggtgcagtacgcgctcagccgcatccgcaacaacgcgcggaatct

SEQ ID NO: 133933 - DNA, 250 bp, Glycine max
atcatcaggaagatcaacaaaaacgtggtgtaatcgggtccatgtttaaggcggtgcaagacacctacgagaacgccaaggaagctgtcgttggcaagaaagaagctactaataacgcgtacagtaatacagaggttattcacgatgttaacattcagcccgatgacgtgtcggcaacgggggaagtaagggacatatcagccacaaagactcatgatatctacgattctgccacggacaacaacaacaa

SEQ ID NO: 133934 - DNA, 243 bp, Glycine max
ctcaggtgcgtcctgcaacaactctgttggctgatgggtgtccatatttgtatgctatggtgcatgatagttcagtgtctacaataccaggtgattttgtcattggtgttaagttgacaaccataaacaatatgtgtgcatatgggcttaatcctggtatttcaggttctcgtcttttgggcaccattcctcagtccatttcacagcaaactgtttggcatcaaatggcaacagtgagaacac

SEQ ID NO: 133935 - DNA, 247 bp, Glycine max
ccttgctctatactacacagtacacacactagaagaataatggcttccatcctccactactttttagccctctctctttcttgctcttttcttttcttcttatccgactcagtcacccctacaaaaccaataaaccttgttgttctacccgttcaaaatgatggttccacagggctccattgggccaacctccaaaaaagaacccctctaatgcaagtaccagtcctggtggacctcaatggaaatc

SEQ ID NO: 133936 - DNA, 246 bp, Glycine max
cgaccaagtattttggttgtgaacttggggcccagtcaaaatttgatgagaagaccggcacttctcacgtcaatggagcacatgatactgttaagcttgctggccttcttgagaacttcattaagaaatatgttcagtgttatggttgtggaaatcctgaaactgagatcataatcactaagaaccaaatgatccagctgaaatgcgctgcttgtggttttgtgtctgatgttgatatgagagaca

SEQ ID NO: 133937 - DNA, 241 bp, Glycine max
ctcaaagcaacacaagaacactctcttgaacattcatggatccagtgagcgtgtggggtaacacgcccttggcgacggtggatcccgagatcactgacctcatcgagaaggagaagcaccgccaatgccgcggcatcgagctcatcgcctccgagaacttcacctccttcgcagtcatcgaggccctcggcagcgccctcaccaacaaatactccgagggcatgcacggtaaccgctacta

SEQ ID NO: 133938 - DNA, 246 bp, Glycine max
ggggagccggctcaccttcggctcagacttccgggtgggacatcgactgtcatgtggcgtccggctccgtcgggtcggggtgctccgccttcttcaggccgcggctcggggtttccgcgccgtcgatcgaggtctacgtcgccggctgctgctccggcgtgcctgtgattctgagcaagacgattcagatgagtccgaggaggagagtgccgcggcacgccacgctggatgctatacctgaagatg

SEQ ID NO: 133939 - DNA, 245 bp, Glycine max
ctttcttagagatgctggtaatgggggagtttttgttggtcatgttgcttcagcgttcacaacttcaagtgtgcttgaggcccaaagtagaaagcctaacagatatgaagtttcccaatacagatatcgcaatgtgccaataaagcgcagagcatgggttgaaggccagatgtctttcgatcagtctgtagtagcaattatgtctaaatgcaaagccagcatgagaatgggaaacactgatgctc

SEQ ID NO: 133940 - DNA, 246 bp, Glycine max
cagagaatacctttctttaatgaaaaaggtaaatatgtaagtacagatccacttgatatcaatgacttgtcatctctaaattacattggaacaaaactattagaaagttttaaaaggaaaacagctattttagaaaaagagaattcggctctttctcagaaattacagaagctggaacaggaaagaggtataatagcccagcggagagtagaagaaggaaataataccgaagataataatacatta

SEQ ID NO: 133941 - DNA, 247 bp, Glycine max
gcagaccgagctagctagctagcaagcaagcacagagatggaggcaaagcgaggccatgccctcatgtgcttggcacgtgtttcactcttcctctgcgctctaacccatatccgctgctcacggaagcaccacggttcaagacatcgcgagaaagttgaaactcggggacaacgagcttctgcgcacggagaagaagttcaaggttttcatggagaattacgggaggagctactccacagaggagga

SEQ ID NO: 133942 - DNA, 245 bp, Glycine max
cttgctaccaacactgagcttaaccgagcttcgcaaagatgaatcgggaaaagttaatgaagatggccggttcggttagaactggaggaaagggtactgtgagaagaaagaagaaggctgtccacaagacaacaaccacagatgacaaaaggcttcagagcaccctgaagagaataggggtgaatgccatccctgctattgaagaggtcaatatctttaaggatgacgtattatccatttctaaa

SEQ ID NO: 133943 - DNA, 250 bp, Glycine max
attctctccattgtctttgagcactcatcatcatggccaagcgtgttctttccctttgtttccttcttttcagtggctgcttcgctctgagagagcaggcagagcaaaatgagtgccagcatccaaaagctgaatgccctcaaaccggataaccgtatagagtcggaaggtgggttcattgagacctggaaccctaacaacaagccattccagtgtgccggtgttgccctctctcgctgcacccttaacc

SEQ ID NO: 133944 - DNA, 246 bp, Glycine max
caaaacacaaacacaagcacaaggacagtgatctctctttctatctttttgtctgtctctctgaacacgttgatggattccccctctcgcccctccgtcatcatcgtaggtgccggcatctccggtatcgcggcggcgaaggtgttggccgagaacggcatagaggacctggtgatcctggaggcttcggaccgcgtcggcggcaggatccgcaaggagagtttcggcggcgtgtcggtggagctc

SEQ ID NO: 133945 - DNA, 243 bp, Glycine max
attttgatcctgttcatgccaggacaagggatctggagagacattttgattcctatgggaaaatattaaatataaggatcagaaggaattttgcttttattcagtttgaatcccaagaggacgctactagagctttggaggccaccaacctgagcaagtttatggaccgtgttatcactgtggagtatgccattagagatgatgatgacagagacagaaggaatggatacagtcctgatagaa

SEQ ID NO: 133946 - DNA, 241 bp, Glycine max
ataagggttcctctttccttctctagcacaatttacaatctcaatggctggaatttgctgtggtgttgttggagaaggtgacactccggctccactcgagcccactcctcgcccctccaggcgccggagtttggacatcttacctttaaaatatatcgccgacatgcccatgccgccgccggaggctttacggaagcgtcccaagctcaacctcagggactgcgataacgcaattgaaaat

SEQ ID NO: 133947 - DNA, 241 bp, Glycine max
aaaacactcaagttaacttcaacacctttaattttctgaacgaaattcagccacagaatatcaaagggagcgaagatgagtcaggagcagccaaggcgcccccaaggccaagaccccatcaaatacggcgacgtttttgacgtctacggtgaccttgcacagatgcccattgcaccggaagatgctgccatgatgcaaagcgcggaagctcgagtactcggaaaaacccaacccggcggag

SEQ ID NO: 133948 - DNA, 242 bp, Glycine max
cggcggcgggagcgaatggatctcgtgacggtgcttgacgttagtaacagcatgagcggcgcagactttcacatgctaaagcgcgccatgcgtttggttatatcgtcactcggcccggctgaccggctcgccgtcgtggcttcctcggctaattccaaacggttgttacctctgaggagcatgacggctcagggacaacgcgcggcgcggcgcgtcgtggatcggctcgtgtgtgaccatgg

SEQ ID NO: 133949 - DNA, 247 bp, Glycine max
ccgaggaccgagtgcctcccacgcccggtcgtactcataaccgcatcaggtctccaaggtgaacagcctctggtcgatggaacaatgtaggcaagggaagtcggcaaaatggatccgtaacctcgggaaaaggattggctctgagggctgggcacgggggtcccagtcccgaacccgtcggctgtcggtggactgctcgagctgcttccgcggcgagagcgggtcgtcgcgtgccggtcgggggacg

SEQ ID NO: 133950 - DNA, 251 bp, Glycine max
ctcttcctccctttctcacagcaatggccgccgcagcacgccctctcgtcaccgtgcaggccctcgacggtgacatggcaaccgatgcctccgccaccgttcccatccctgacgtcatgaaggcctctatccgccccgacatcgtcaatttcgtacactcgaacatctccaagaacagccgccagccatacgccgtcagtcgtcgcgctggtcaccagacctccgccgaatcctggggtaccggccgagcc

SEQ ID NO: 133951 - DNA, 249 bp, Glycine max
ttttgatctggaagtaacctttttctttccttgggcagtatctctcaacaagattgatctgtttggattttggtctatgatggcctttttattgattttgacgattggatttctctatgaatggaaaaggggtgctttggattgggagtaatcactagtgatagggcaaaatagggaggaaggacaaaggaaagagcgatgcctacattaaatcaattgattcgtcatggtagagaagaaaaacggcgc

SEQ ID NO: 133952 - DNA, 247 bp, Glycine max
attctctccattgtctttgaacactcatcaccatggccaagcttgttctttccctttgtttccttcttttcagtggctgcttcgctctgagagagcaggcacagcaaaatgagtgccagatccaaaagctgaatgccctcaaaccggataaccgtatagagtcggaaggtgggttcattgagacctggaaccctaacaacaagccattccagtgtgccggtgttgccctctctcgctgcacccttaa

SEQ ID NO: 133953 - DNA, 247 bp, Glycine max
gcaggaaaaatggtttcgctgaaactgcagaagcggctcgcagccagcgtcctcaagtgtggcagaggaaaggtttggcttgaccccaatgaagtcaacgaaatctccatggctaattctcgccaaaacataaggaagctggttaaggatgggtttattatcaggaagcccaccaagattcactctcgctcacgtgcccgccgaatgaaggaagccaagaggaaaggacgtcactctggatatggta

SEQ ID NO: 133954 - DNA, 235 bp, Glycine max
aaaggaaataattgatctttgaaaatgcagggaggaaagaaagctggagagtccatcaaggaaacagctgcaaacattggtgcttctgccaaggctggcatggagaaaaccaaggccactgtccaggagaaggcagaaagaatgacggcacgtgatccgatgcaaaaggagttggcaacccagaagaaagaggcaaagatgagccaggcagagctggacaagcaggcggcgcgtc

SEQ ID NO: 133955 - DNA, 243 bp, Glycine max
gaaaatttgaagagtttgtttattgtgaaaaaaagaaaaatgcaggcagcaaagaaagccatagagacctttaaggaaaccgcagccaacattggcgcctctgccaagtctggcttggagaaaaccaaggccactatccaagagaagaatgagaagatgaatgcagaagatcaaactcaaatggatatggctaccaagaggaaagaagagaagatcaaccaggctgagatggagaagcagcag

SEQ ID NO: 133956 - DNA, 244 bp, Glycine max
ctcgagctctgcgagatcttcattcgccgattttaaaagatgagtaagcttcagagtgatgctttgcgtgaagccatttcaggaatcatggccgattccaaggagaagaatcgcaaatttgtggagaccatcgaactccaaatcgggttgaaaaactacgatccacagaaggacaagcgtttcagtggctctgtcaagctgccccacatccctcgccccaagatgaaaatttgcatgcttggtg

SEQ ID NO: 133957 - DNA, 246 bp, Glycine max
gcggccgagggcaaactgacgaatatggcaacccggttcatgccactagtgtcacttatgtagccaccaaaagtgttggtggctacaatgatgacgctaataagcaacatgatattactggtgtctatcccgagaaagacaccggtagacatcattttggtcgtagttacgacggtgacactaacaagcaacatgatgctactggtgtttatcccggaatagacattggtagagatcatgggacta

SEQ ID NO: 133958 - DNA, 237 bp, Glycine max
ctacactggcgtcaatggcggcttcccgtcatcgaataataccgccggcggtattgcgccgccgttggaggtggacgggctgccggagaattttgattggagagagaaaggagctgtcaccgaagttaagttacagggtagatgtggatcatgctgggctttcagcaccacaggatctatagaaggagccaattttcttgccaccggaaagctcgtcagtcttagtgaacaacagct

SEQ ID NO: 133959 - DNA, 245 bp, Glycine max
tgttcaacaagtccaagaaccaacctaccttttgcaatctcaattcaatggcgtcctctctcattgcgaacgcttcctctcctcttccctcctctccaggtccctccttcgccccgccgcttccgcttcccaccgctctttcaacaccaacgccatgcgccagtatgacaaccgcgccgacgaccacagcaccgacatcgatcgtcactccgaacgctctttccctagcactgcgcgccgcgacg

SEQ ID NO: 133960 - DNA, 248 bp, Glycine max
gcgattcagactctaaccaaaacaatcttcctattctcagtgatcgctgcctctccctttcccctctttccaaagatgctgcgatggggctggtgctgagtgctgcaacgggcagaggatggaccacgggttcagggatggaaggcccctctgttcctgcagttggtagggatagcgaatctgggacggggaacatctccactttcccatggtctctcttcacaaaatcccctaggagaaggatgctg

SEQ ID NO: 133961 - DNA, 250 bp, Glycine max
atgttcttatgtggttatgaatgtgcttcttttaggaaaagcaaaagggaaggattgggatcctcttggattttgtttggtatgagcctcttacaagatcaaaggctgacaattttgcagctcaaagagccagagactttcatattggatggtaaaaatctttagcatttgttaactgaggatcctatattgcaagtacaagtctttagttatgaatgtgaattttcccctgcaaagactttcacacgct

SEQ ID NO: 133962 - DNA, 250 bp, Glycine max
gtggtacactgtcaatgtttgaggtcgatggcaaaaagaacaaggtttatgggcagaacctttgttatttggccaagttatttcttgatcacaagaccctctattatgatgtagacctgtttctgttctatgttttgtgtgaatgtgatgatcgaggatgtcacatggttggctatttctccaaggaaaaacattctgaggaatcttacaatttggcatgtatcctcaccctaccaccttaccaaaggaa

SEQ ID NO: 133963 - DNA, 243 bp, Glycine max
cttgagagaaaagtagtgtattaagactacaaattttcaatttttcaatggcgtcgaggcaacaaaaagaggatcgagctgaggcagctgagaaagttgctgcgaaagaactcgaacaactcaaccgagaaaaagaccgtgatttcagtgttggtgttgcagaccaacaccaacaagaagaacatcagttagatcaacaaaagcgtggtgtaatcggatccatgttcaaggcggtgcaagaca

SEQ ID NO: 133964 - DNA, 243 bp, Glycine max
atcggaaccacattcctgggaattgatcttcccaatagaggtatgtggtcctaataatggttttgaaatgtggagttctgagtgggcaaatcaaacttcatggcatttgagtttccttattgacaatcccaaacagtctacagtttttgatattctcttgggaatttctcaagattttgaaattgctggtaatactcttatgccagctttttctgttccacaggctactgccagatcttctga

SEQ ID NO: 133965 - DNA, 240 bp, Glycine max
atctgcccgtcctgctcctcgtgcagcacctcgtcctgctccagttcaccatgctcctcctccagcccctgctcagagcggtggcggatctatgcttggtggcattggttcaaccatagctcaaggtatggcttttggcactggaagtgcagtggcacacagggctgtggatgctgtcatgggtcctcgtaccattcaacatgaagcagtagtcacggaggctgctgctgctgcccctgc

SEQ ID NO: 133966 - DNA, 240 bp, Glycine max
gtaagctaaatcgtctagttacagagaagtgggttgatgggtgggatgatcctcgtttgatgacactagctggtttgcggcgtagaggcatgaccccaactgcaatcaatgcttttgtccgaggaattggaataactagaagtgatggcactttgatttctgtggaacgccttgaatatcatgttagggaagaattgaacaaaacagcacctcgtgcaatggttgtcctacatccactca

SEQ ID NO: 133967 - DNA, 233 bp, Glycine max
atcaaccacagagtggatgtgggggtcatgttgaggatgtcagacgccaagtgaatgaagctgttcaatctcgccataaaattgacaagatgtatagtgtttttactggacagccattagagaaggtgcaacagtacacagagagggaccgttttctgtctgtttctgaggctttggagtttggtcttattgatggtgtcctggaaactgagtattgaatacagtttatttgc

SEQ ID NO: 133968 - DNA, 240 bp, Glycine max
gcagaccgagctagctagctagcaagcaagcacagagatggaggcaaagcgaggccatgccctcatgtgcttggcacgtgtttcactcttcctctgcgctctaaccctatccgctgctcacggaagcaccacggttcaagacatcgcgagaacgttgaaactcggggacaacgagcttctgcgcacggagaagaagttcaaggttttcatggagaattacgggaggagctactccacaga

SEQ ID NO: 133969 - DNA, 227 bp, Glycine max
caaagctggttccagcccattatttgggtatgacttttggtaccaaccacgtcacaataccatgattagcacatcatggggtgctctagtgcttttacaaaaggttttaacttacagcatctctctgatggattatacgggaggcatctccatgtatatagctggcctgggggcgaactgagacaaacaatggaccttggtgattcagggcttatacccttagagat

SEQ ID NO: 133970 - DNA, 235 bp, Glycine max
cggcggcgggatccgatggatctcgtgacggtgcttgacgttaataacagcatgagcggcgcgaactttcacatgctaaagcgcgccatgcgtttggttatatcgtcactcggcccggctgaccggctcgccgtcgtggcttcctcggctaattccaaacggttgttacctctgaggagaatgacggctcagggacaacgcgcggcgcggcgcgtcgtggatcggctcgtgtgtg

SEQ ID NO: 133971 - DNA, 247 bp, Glycine max
ctcgagcgaatcggctcgagtagttgcccaacgccgcgaccaccagatagttaagcttttttcttcaactcacgagaagagcgtccatggagaatgcagacatccctgagaatgccaacgagcattgcccaggtcctcagtctgaatctgctggaaaatctgatgcatgtgaagggtgcccgaatcaacaaatttgtgccactgcccccaaaggacctgaccctgatctggttgccattgcagaaag

SEQ ID NO: 133972 - DNA, 248 bp, Glycine max
tgcacctattgcaagtctgaagagagcaacctgtgtgagcttctcaggatcaacactgacagaggagtgatgctcagtgatggcaaaacaaggttctccaaaaatggacaacctatttaccacttcgttggaacctccactttcagtgaatacactgttctccatgaaggatgtgtcgccaagatcaaccctgctgcccctcttgacaaagttgctgttgtcagttatggattctgcacaggttttgg

SEQ ID NO: 133973 - DNA, 240 bp, Glycine max
ctcgcaagcaaaaagaaagaatcccaggcgaggagaaagatggaggggcaggagcaggatgtgtcgttgggagcgaactaattccccgagagacagccgattgggacggcggcgcagagccaagacgacggcaaagactaccaggagccggcgccggcgccgctggttgacccgacggagttgacgtcatggtcgtgttacagcgcagggatagcagagtttgtggccacttttctgtgt

SEQ ID NO: 133974 - DNA, 261 bp, Glycine max
gctcgaaattcggcgcgaatctcaagtctcaagagatgtcatcatggctccagagaaggacaaggctccaccagcttcctccaagcccgccaaagctggcgatgccaagcagaagaagaagaagtggagcaagggaaagcaaaaggagaaggtgaataacatggtgcggtttgatcagggcacctatgataagctccttgctgaagctcccaaatgcaagctcatcactccttccattctttctgatcgtttgaggattaa

SEQ ID NO: 133975 - DNA, 251 bp, Glycine max
cgagtactggttcttgtgagagacatgatgtcatcttccggcgccgccaggtacatggcttttccaccctcgccctccgcgcctccgtcgccgcacctctccggtgctcttcgctccactcccctctccgacccggacaaatatcttactgaattgttgggagaacgtaacaagcttagtcccttcatggcggtccttccccactgctttcgattgttaaaccaagaaattttgcgtgtaaccacgctgat

SEQ ID NO: 133976 - DNA, 252 bp, Glycine max
tattcgcacagccatacagaatgccactggacctaaatcagcactgtttgttccagaagtcccatttgaagtgcttgtacgcaggcagatatctcgactattggatccaagtcttcagtgtgctaggtttatatatgatgagttaatgaagatcagccatcgatgtatggtcactgaattgcagcggttccctttcttgagaaagtgcatggatgaagttcttgggaactttttacgagaaggcctagaacc

SEQ ID NO: 133977 - DNA, 185 bp, Glycine max
aaagaaaggaaataattgatctttgaaaatgcagggaggaaagaaagctggagagtccatcaaggaaacagctgcaaacattggtgcttctgccaaggctggcatggagaaaaccaaggccactgtccaggagaaggcagaaagaatgacggcacgtgatccgatgcaaaaggagttggcacccc

SEQ ID NO: 133978 - DNA, 252 bp, Glycine max
cccaggtcagacgaggagcaccacttcgagtcaaaggctgatgctggagcatcaaagacatttccccagcaagctggaaccatccgcaaaaacggttacattgtcatcaagaacaggccatgcaaggttgtggaggtttcaacttccaaaactggcaagcatggacacgcaaagtgtcactttgttgcaattgacatcttcactgggaaaaagcttgaggatattgtcccatcttcccataactgtgatgtt

SEQ ID NO: 133979 - DNA, 246 bp, Glycine max
cagaaaagaagaacaaagatgcaatcctcaaaggagaagatgaaaaacatggcaagtgctgccaaggaacaagtcgacatctataaagccaaaatagacgagaaggcagagaaagcaacggcaagaacagaagaggagagggtgatagcccatgagcacgcaaaggcaaaggaagctggagcaaagatggagctgcatgaagctaaagcaaggcatgcagcagagaagcgaagcgccaaccaatca

SEQ ID NO: 133980 - DNA, 244 bp, Glycine max
cctaagcttagaattagaaacaaagaaaagaagaaaggaaagaattgatcgttgaaaatgcagggaggaaagaaagcgggagagtccattaaggaaacagctacaaacattggtgcttctgccaaggctggcatggagaagaccaaggccactgtccaagagaaggcagaaagaatgacagcacgtgatccggtgcaaaaggagttggcaacccaaaagaaagaggcaaagatgaaccaggcgg

SEQ ID NO: 133981 - DNA, 242 bp, Glycine max
ctacactggcgtcaatggcggcttcccgtcatcgaataataccgccggcggtattgcgccgccgttggaggtggacgggctactcggagaattttgattggagagagataggaactgtcaccgaagttaagtgtgacagggtagatgtggatcatgctgggctttcagcaccacaggatctatagaaggagccaattttcttgccaccggaaagctcgtcagtcttagtgaacaacagctcc

SEQ ID NO: 133982 - DNA, 251 bp, Glycine max
gcccttcatcagagataacttgacaaataaaatcaccatgtctatcatcccaaacttgttcggtggtagacgaagcaacgtcttcgacccattctctctggacgtatgggaccctttcgaggggtttcctttttccacaggtcacgtgccttcctctggtggggaaagcagtgccatagccaacactcgcgtggactggacggagactccggcggctcacgtgttcaacgttgatcttcccgggttgaaga

SEQ ID NO: 133983 - DNA, 246 bp, Glycine max
gagaaatcaagcccaagaataggagaatcatgggtgctggaggccctgatgatgaggacaacaacaggtggccaccgtggctgaagcctctgctaaaagaaagtttctttgttcaatgcaagcttcacgctgattcgcacaagagcgagtgcaacatgtactgcttggattgtatgaacggtgctctctgctctctctgcctcgcttaccataaagatcatcgtgctattcagataaggcggtcct

SEQ ID NO: 133984 - DNA, 246 bp, Glycine max
ctctacacaaaagtgttccacttgagtgataagtagtgtgttaagaactaaacaatttttcaatggcgtccaagaaacaagaggagcgagctgaggcagctgcgaaagttgctgccaaagaactcgaacaagtcaacagagaaagaagagaccgtgatttcggtgttgttgctgaacaacaacaacaacatcatcaggaagatcaacaaaaacgtggtgtaatcgggtccatgtttaaggcggtgc

SEQ ID NO: 133985 - DNA, 246 bp, Glycine max
gttgacgagtatggcaacgttgagaagcaaaccgacgaatacggcaaccctgttcatgctgctagtgtcacctatgtagccaccagaactgctgctggtggttacagtgatgacattaataagcaacatgataccaccaatgcctacggcgtagacactggtagacagcattctagtggtggctacgatggtgacactaataaacatcatggaaccactggtggctataatgatgacaccaataga

SEQ ID NO: 133986 - DNA, 242 bp, Glycine max
gactttttgtgaagagagtgttcatttcagatgattttgatggagaactgttcccccgatacttaagctttgtcaaaggtgttgttgactcaaatgaccttccactcaatgtgtcacgtgaaattcttcaagagagccgcatagttcggattatgaggaaacgtctagttcggaaagcttttgacatgattctgggaatatccatgagtgagaacaaagaggactacgagaagttctgggag

SEQ ID NO: 133987 - DNA, 241 bp, Glycine max
atgggctcaatcctggtatttcaggttctcgtcttttgggcaccattcctcagtccatttcacagcaaactgtttggaatcaaatggcaacagtgagaacaccattgaattttgattctagcaagcagagcttttgtcaattttctattgaccttctcggtggaggacattttagtggacaaaactggagattggatcacacttatacaaaattctccaattagtaacttgttgagagttg

SEQ ID NO: 133988 - DNA, 239 bp, Glycine max
ctatttctttgaagaaggggatggaaaagactgtaaaggagttggtcaagttcttgaaggagagaagtgttcctgttgaaggaagggagcatattagagctgtagcatcgatttctgctggaaatgacgagtatgttggtaacttgattgctgaagctatggagaagattggttcagatggggtgatctctattgagtcttcctcatcatctgaaacctctgtgataattgaagaaggg

SEQ ID NO: 133989 - DNA, 239 bp, Glycine max
gggacaatgaggttctgtttgcggacagggttctgaagtttacgggctccgggaagatgaaacgctgcgttctgatgatcacggattctgcgatttacatcgttgaccctgaggtggacgcgctgaagcggagaatagtgcttgcggcggtagagagggtttgtctgagtgaactgagtgataattttttcgcggtgattattccgtcggagtatgatttgctcatggctagtactcgg

SEQ ID NO: 133990 - DNA, 244 bp, Glycine max
  unsure (1)..(244): unsure at all n locations
ctcttcttctcttgcggctagggttttagcgcacntcttctagatttacggaagatgggtaaggatcaggttcacatcagtattgtggttattggccatgttgactctgggaagtccactaccactggccacctgatctacaagcttggaggcattgacaagcgtgttattgagagatttgagacggaagctgctgagatgaacaagaggtctttcaagtatgcctgggtgcttgataagctta

SEQ ID NO: 133991 - DNA, 248 bp, Glycine max
aggctgcagagatggagagggagtcattgataactgaagctcctaatgcaccagtgactgcacagagtagggtcagaaatgactgacaaaattctctaccaaaaccatacttgccaagagcattgaaagctcctgatacgggtcacccaaatggaacagcaggccacaggcagcacaacttatctattcttcagcagcattatgcttttcgtgagcaagatgacaatggaatcagtgacccttgggaa

SEQ ID NO: 133992 - DNA, 252 bp, Glycine max
acagttaacaaaatttcgataagaaaagttcccaacttcagctaagagaaaatgtctctgattccaaactttttcggtggccgtaggagcaatgtgtttgatcctttctcccttgaagtgtgggatcccttcaaggattttcattttccctcttctgtttctgctgaaaatttagcatttgtaagcactcgtgtggattggaaggagactccagaagcgcacgtgttgaaggcagatattccagggctgaag

SEQ ID NO: 133993 - DNA, 244 bp, Glycine max; identical to SEQ ID NO: 133980

SEQ ID NO: 133994 - DNA, 247 bp, Glycine max
cacacaactactacaagtacttccttacaatcaaaaccaacaacaactatggcaagttatcaaaagcactacgatgatcagggtcgcaaggttgacgagtatggcaacgttgagaagcaaaccgacgaatacggcaaccctgttcatgctgctagtgtcacctatgtagccaccagaactgctgctggtggttacagtgatgacattaataagcaacatgataccaccaatgcctacggcgtagaca

SEQ ID NO: 133995 - DNA, 243 bp, Glycine max
tcaaaccttgctctatactacacagtacacacactagaagaataatggcttccatcctccactactttttagccctctctctttcttgctcttttcttttcttcttatccgactcagtcacccctacaaaaccaataaaccttgttgttctacccgttcaaaatgatggttccacagggctccattcggccaacctccaaaaaagaacccctctaatgcaagtaccagtcctggtggacctca

SEQ ID NO: 133996 - DNA, 242 bp, Glycine max
tgtgagaaacaaagaaaggaaataattgatctttgaaaatgcagggaggaaagaaagctggagagtccatcaaggaaacagctgcaaacattggtgcttctgccaaggctggcatggagaaaaccaaggccactgtccaggagaaggcagaaagaatgacggcacgtgatccgatgcaaaaggagttggcaacccagaagaaagaggcaaagatgagccaggcagagctggacaagcaggcg

SEQ ID NO: 133997 - DNA, 217 bp, Glycine max
agactatgcggctcagaaagcaaaagaaaccaaagactatgctgctgagcaggctaagactgcgaaagataccactgtgcagacagctggagagtacaaggattataccgctgagaaggctaagaatgctaaagataccactgtgcagaaagctggagaagacaaggattataccgctaagacggcaattgaagggaaggacagtgcagtgaggaag

SEQ ID NO: 133998 - DNA, 243 bp, Glycine max
actctatactacacagtacacacactagaagaataatggcttccatcctccactactttttagccctctctcgttcttgctctcatcttttcttcttatctgacgctctcacccctacaaaaccaataaaccttgttgttctacccgttcaaaatgatggttccacagggctccattgggccaacctccaaaaaagaacccctctaatgcaagtaccagtcctggtggacctcaatggaaatc

SEQ ID NO: 133999 - DNA, 251 bp, Glycine max
atgggctaaagagaaactcactgaaggtcttggcttcaaacatgatcaagaatccaccactaagaaagtctctgactatgccggtgatgctgctcagaaatcaaaggactatgccggtgacactgctcagaaaaccaaggactatgccggtgacactgctcagaaaaccaaggactatgccggtgacactgcacagacatcaaaggactatgccggtgatgctgctcagcactccaagggctatgtcggtg

SEQ ID NO: 134000 - DNA, 186 bp, Glycine max
ggacatgataaacctgaggtgactgctgtgtcaatggaccctaatttttcaacctatctacactatgacttcctgtctgtcgtctctgacaaaaaacagaagtcaggaattttcttgaagaggaataaacgtagatatgccagtaatgatgaattttcaagccaggctatggcaggactacaattt

SEQ ID NO: 134001 - DNA, 247 bp, Glycine max
gacgtcggcgggggccccggaaagagttatcttttctgtttaacagcctgcccaccctggaaacggctcagccggaggtagggtccagcggctggaagagcaccgcacgtcgcgtggtgtccggtgcgcccccggcggcccttgaaaatccggaggaccgagtgcctcccacgcccggtcgtactcataaccgcatcaggtctccaaggtgaacagcctctggtcgatggaacaatgtaggcaaggg

SEQ ID NO: 134002 - DNA, 242 bp, Glycine max
cccgagaaagacaccggtagacatcattttggtcgtggttacgacggtgacactaacaagcaacatgatgctactggtgtttatcccggaatagacattggtagagatcatgggactaccggtgtttatggcctaaacaccgacagacatcatggcacttctggggtgaatcccgggatagacacccataaccaacaacatgggactaccgttggttatgctggtgacactggaaggcagca

SEQ ID NO: 134003 - DNA, 242 bp, Glycine max
ctctccattgtctttgaacactcatcaccatggccaagcttgttctttccctttgtttccttcttttcagtggctgcttcgctctgagagagcaggcacagcaaaatgagtgccagatccaaaagctgaatgccctcaaaccggataaccgtatagtgtcggacggtgggttcattgagacctggaaccctaacaacaagccattccagtgtgccggtgttgccctctctcgctgcaccctt

SEQ ID NO: 134004 - DNA, 72 bp, Glycine max
gttcaaagtgtggacgtggtttctacttagtactcaaacgtattagtaattggtatcaaaactgtccaacaa

SEQ ID NO: 134005 - DNA, 240 bp, Glycine max
gggagttcgtggagtacaagaagacgatatacctagacggtgacatccaagtatttggaaacatagaccacttgtttgatctgcctgataattatttctatgcggtgatggattgtttctgcgagaagacttggagccacacccctcagttccagattgggtactgccaacagtgccctgataaggttcaatggccctctcactttggttccaaacctcctctatatttcaatgctggca

SEQ ID NO: 134006 - DNA, 240 bp, Glycine max
aaatggctgaagcacaactacgagaccagcatggcaaccctggcccactcaccgatcaatacggtaatccggttatcttaactgacgagcgcggtaatcccgtccaactcactggtgtcgctaccaccgctaccggcacagcaggttctgggtttgggtcctatggtaccggtgcttacggtggtggtgcaagtgcaaccaccgttgcagatcttttggcaacccaaccaaggagtggca

SEQ ID NO: 134007 - DNA, 246 bp, Glycine max
agagaatcgtttgcatctgtactttaagaaagggagagttggggatgatccaaatgcagaggagcgattagaagagtgggacaatgtagatggtgctctgaaagagtttgtgaggctctttgaggaaataacaggaaatgagtttgaaccttgggaaagagagaagaagttccaaaagaaacctttgaagtgttaccccattgacatggatgatggaagtgaagttagacagggggcactaggtct

SEQ ID NO: 134008 - DNA, 244 bp, Glycine max
agaaaacctaagcttagaattagaaacaaagaaaagaagaaaggaaagaattgatcgttgaaaatgcagggaggaaagaaagcgggagagtccattaaggaaacagctacaaacattggtgcttctgccaaggctggcatggagaagaccaaggccactgtccaagagaaggcagaaagaatgacagcacgtgatccggtgcaaaaggagttggcaacccaaaagaaagaggcaaagatgaacc

SEQ ID NO: 134009 - DNA, 256 bp, Glycine max
tgagtatgtacggtagggatccgtggggaggcccgctggagattcacgccaccgactccgccacggacgacgagcgcaccggaatctccaggagctggaccgaggcgctttagacgagacccaacagagctggctcttgggcgccggagaacagaaaaagaacaagaaaacctacgtagaccttggctgcatcatcgtcagccgcaagctcttcatctggaccctcggcaccctcgccgtcttcgccttcctctcc

SEQ ID NO: 134010 - DNA, 251 bp, Glycine max
ctactacaagtacttccttacaatcaaaaccaacaacaactatggcaagttatcaaaagcactacgatgatcagggtcgcaaggttgacgagtatggcaacgttgagaagcaaaccgacgaatacggcaaccctgttcatgctgctagtgtcacctatgtagccaccagaactgctgctggtggttacagtgatgacattaataagcaacatgataccaccaatgcctacggcgtagacactggtagacag

SEQ ID NO: 134011 - DNA, 251 bp, Glycine max
cgaaagtttctttgttcaatgcaagcttcacgctgattcgcacaagagcgagtgcaacatgtactgcttggattgtatgaacggtgctctctgctctctctgcctcgcttaccataaagatcatcgtgctattcagataaggaggtcctcataccatgatgtgattagggtgaatgagattcagaaggtgttggacatcacaggggtccaaacctacattatcaacagcgcgagggttgttttcttgaatg

SEQ ID NO: 134012 - DNA, 248 bp, Glycine max
tggaaaggcacactgtctccaaacttattggttcacctcctggatatgttggttacactgaaggtggtcaattgaccgaggcagttcggcgtcgtccttacactgttgtactgtttgatgagattgagaaagcccatcctgatgtgttcaacatgatgcttcagatcctggaagatggaagactaacagacagtaagggcagaacagtggatttcaagaacacacttcttataatgacatcaaatgtt

SEQ ID NO: 134013 - DNA, 249 bp, Glycine max
ctctccttctcgctctttcagctttgacttttgttggaaactaaggcctaatcaaaatggtgaagttcacagctgaagagctacgtcgtattatggactataagcataatatccgtaatatgtctgtcattgctcatgttgatcacggaaaatcaaccctcactgattctcttgtggctgctgctggtattattgctcaagaagttgccggtgatgtccgtatgactgatacccgtgcagatgaagctg

SEQ ID NO: 134014 - DNA, 251 bp, Glycine max
cgaatagaagtaactttgtctctcttctctgcagtggtggtaatttattttccaatggcttcagcaagcggacggcgaattcctccgttccgccgccgcaaatccacacctcacgaacaaagctgagccaccacagcagcaacaacaacaacaacatcgactccatgagcaaggccatcgcgcagtacacggaggacgcgcggctccacgccgtcttcgagcagtccggcgagtccgggaggtccttcaac

SEQ ID NO: 134015 - DNA, 253 bp, Glycine max
gagtgcctcccacgcccggtcgtactcataaccgcatcaggtctccaaggtgaacagcctctggtcgatggaacaatgtaggcaagggaagtcggcaaaatggatccgtaacctcgggaaaaggattggctctgagggctgggcacgggggtcccagtcccgaacccgtcggctgtcggtggactgctcgagctgcttccgcggcgagagcgggtcgtcgcgtgccggtcgggggacggattgggaacgggcc

SEQ ID NO: 134016 - DNA, 251 bp, Glycine max
caaactgtaaataaggtaggacggtgcagctgctctgatgagccgcgccatggaatcgagagctccaagtgggccatttttggtaagcagaactggcgatgcgggatgaaccggaagcttggttacggtgcccaactgcgcgctaacctagaccccacatagggtgttggtcgattaagacagcaggacggtggtcatggaagtcgaaatccgctaaggagtgtgtaacaactcacctgccgaatcaacta

SEQ ID NO: 134017 - DNA, 249 bp, Glycine max
cgcgtaacagcggctaccctaacctcgtcttcctctctactaatttcagctatggccgacgaagctgtggttgttccagatcccacccagatcgatgtcaagctctttaaccgctggagcttcgaggatattgaggttactgacatttcactggctaatgaattggagttgcggcatccaagcacgccacatatgttcctcacaccgccggaaggtactccgtgaagcggttcaggaaggcgcagtgcc

SEQ ID NO: 134018 - DNA, 258 bp, Glycine max
agcacaaccttatggtgtatatacatggttaacggatattaaagacacctctaaagaaggatatagttttgaagagatatgcatcaagaaagaagcgtttgagggagaagagaagttttgtgcaaaatccttgggaacagtaattggttttgccatttcaaagctgggaaagaacattcaagtactttcaagttcctttgtcaataagcaagagcaatacactgtggaaggagtgcagaatcttggagacaaagcagt

SEQ ID NO: 134019 - DNA, 256 bp, Glycine max
atgagggactgctaaccgaagttttctttggatcccctctttgggtggtcctactaccattgctgctagacaaagtggagctggaatctcttggctttttccatttgtggacggacatccacctttgggttggcaagatactgcagcatatcttgttttacctattcttctagtcgtttctcaatacgtatcaatggaaatcatgaaaccacctcagacagatccttctcaaaagaatcaacttcttattttaaag

SEQ ID NO: 134020 - DNA, 252 bp, Glycine max
atacaagaagtttacgttacaaatcgcataataaccgtcctaagtttattgagagaattttgcaagtgtgagaaacatggcatctcgtcaaaacaacaagcaagagcttgatgaaagagcaaggcaaggagagactgttgtcccgggtggaactggtggcaagagcctggaggctcagcaacaccttgctgaaggaaggagcaagggagggcaaacaaggaaggaacagctgggtacagaagggtaccagga

SEQ ID NO: 134021 - DNA, 252 bp, Glycine max
caagaaaagaaaagaagaggaaaaggagagtggagaggaagaaaaggattgaagttgttgctgtgagaaagagaaagagtgaaatcggagtttgggaaggaattgcaatcaatggatgtgataaagacgcagcaaatctcatctcgaccaatcgagaaggtggtggttcaccctctcgtgcttctcagcatcgtcgacaactacaacagagtcgccaaagacactcgcaagcgcgtcgtcggcgtcttgctc

SEQ ID NO: 134022 - DNA, 249 bp, Glycine max
caagagttgaaggaaatggctgaagcacaactacgagaccagcatggcaaccctgtcccactcaccgatcaatacggtaatccggttatcttaactgacgagcgcggtaatcccgtccaactcactggtgtcgctaccaccgctaccggcacagcaggttctgggtttgggtcctatggtaccggtgcttacggtggtggtgcaagtgcaaccaccgttgcagatcttttggcaacccaaccaaggagt

SEQ ID NO: 134023 - DNA, 251 bp, Glycine max
caaacctcactttccaatggcaatttcttgggcagcagcaacaacctcaaagctcgcataccctcctcatgtccacttctctccttcaccctcctccaattatctcttccttaaaacccacaaaccctccgccacacacctctcctcttccttcatccaccccaccacaatcctccacctcgccgctgccaacaccaccacccgccgccgctccttcaccgtccgcgccgcccgcggcaagttcgagcgca

SEQ ID NO: 134024 - DNA, 248 bp, Glycine max
aagaaacctcaaggggagcaggaccccatcaaatacggcgacgttttcaaagtctccgacgaactcgctttcaaacccatcgcgccaagagacgtagctctcatgcaagccacggagaaccaagcattgggccaaactcaaaaaggaggtcccgcctcggtgatgcaatccgccgcaaccgaaaacctccgcgccggcgtcgtgggccgccaagacatctccgacgtggcgaggaacgaaggcgtgac

SEQ ID NO: 134025 - DNA, 245 bp, Glycine max
aggaattttagtggacaaaactggagattggatcacacttatacaaaattctccaattagtaacttgttgagagttgctgcttggaagaaaggctgtttaatggttaaaattgtgatgtctgggaatgcagcagtcaaaaggagtgattgggcctcattggtacaagtgtttttaacaaacagcaacagtacagagcatttcgatgcatgtaagtggacaaaatcggaaccacattcctgggaat

SEQ ID NO: 134026 - DNA, 246 bp, Glycine max
atttacaatctcaatggctggaatttgctgtggtgttgttggagaaggtgacactccggctccactcgagcccactcctcgcccctccaggcgccggagtttggacatcttacctttaaaatatatcgccgacatgcccatgccgccgccggaggctttacggaagcgtcccaagctcaacctcagggactgcgataacgcaattgaaaattgcgacgaatccactggacacaaggtgacgaagaa

SEQ ID NO: 134027 - DNA, 176 bp, Glycine max
ctggtattgtggggtgtggttcgtttagtggtgtcaagtcttgcgaacgtgagggtgcatgagtggtaatcgggatgtttttgttgcacggctccatgcttgcgcatgcaacgtgtgacatgcatccttttcattggtcaccttgagcctgtccgtggcttgacggtgcttgacga

SEQ ID NO: 134028 - DNA, 252 bp, Glycine max
caaaatgccaggtcttaccatcggagacactattcctgatcttcaagttgaaactaaccaaggcaaaatcaagcttcatcagttctgtgctgatggctggaccatccttttctctcacccaggttctcattcacttaatttaaatatttttctttctatatccatatttggtggttacttgatttcttcttctcatgcatgcatgattgtaatttctaaatgtatgtatagatgatttcaccccggtttgta

SEQ ID NO: 134029 - DNA, 250 bp, Glycine max
caagaaaagttcccaacttcagctaagagaaaatgtctctgattccaaactttttcggtggccgtaggagcaatgtgtttgatcctttctcccttgaagtgtgggatcccttcaaggattttcattttccctcttctgtttctgctgaaaatttagcatttgtaagcactcgtgtggattggaaggagactccagaagcgcacgtgttgaaggcagatattccagggctgaagaaggaggaagtgaaggt

SEQ ID NO: 134030 - DNA, 255 bp, Glycine max
  unsure (1)..(255): unsure at all n locations
cgaaataattgatctttgaaaatgcagggaggaaagaaagctggagagtccatcaaggaaacagctgcaaacattggtgcttctgccaaggctggcatggagaaaaccaaggccactgtccaggagaaggcagaaagaatgacggcacgtgatccgatgcaaaaggagttggcaacccagaagaaagaggcaaagatgagccaggcagagctggacaagcaggcggcgcgtcacantaacacggcggcgaacagg

SEQ ID NO: 134031 - DNA, 257 bp, Glycine max
caaaaaaaccaagtgatttcttctaattacaacacgtataaaaaagaataattggatatcatagataatctctttatcaagaattatatatcggaagatgcgattctagatatggaaaaaaatatgtatagaaagtattttgattggatgggaatcaatagagaaatactaaatcgttccatatcgaatccagaattttggttcttttcaaaatttgtgatattttatgacgcatataggggtaactcgcaggttat

SEQ ID NO: 134032 - DNA, 158 bp, Glycine max
cagaaacaaagaaaggaaataattgatctttgaaaatgcagggaggaaagaaagctggagagtccatcaaggaaacagctgcaaacattggtgcttctgccaaggctggcatggagaagaccaaggccactgtccaggagaaggcagaaagaatgacg

SEQ ID NO: 134033 - DNA, 248 bp, Glycine max
catgtgagaagaagaagaagaaaagtgtgagtgcagaaaagaagagtggtgggcgagctcggaagaacgtgtacagaggaatcaggcaaaggccgtggggcaagtgggccgcggaaataagggacccacataagggcgtccgcgtctggctcggcaccttccccaccgccgaggaagccgcccgagcctacgacgacgccgccaagcgcatccgcggcgacaaggccaagctcaacttcccggccacc

SEQ ID NO: 134034 - DNA, 248 bp, Glycine max
cgaacagtgcaagtccaacccttccctcctcgctgatccttcactctccttcttccgcgactatcttcaaagtctcggcgcgaaacttcctgagtctgcttattccgaatcgacgggcgtggagagggatgaggacatagaggatcttacggaggagcacgagaaggtagaagaagaagaagaagaagaggacgatgtaattattgaatccgatgttgagcttgagggtgaaacctgtgagcctgatg

SEQ ID NO: 134035 - DNA, 245 bp, Glycine max
attggagaattcatgcaacctgactgggacatgtttcatagtttacacccagcagcagattatcatgctgcagctcgtgcaattggtggatgtcctatttatgttagtgacaagccaggctatcacaattttgatcttcttaagaagctggttctcccggatggttcggttctccgtgctcagttacctggcaggccaactcgtgattctctatttgtggatccagccagagataggactagctt

SEQ ID NO: 134036 - DNA, 125 bp, Glycine max
ctctgttgacaatgtcttcggaacagtttgtcgaagtatgaattcaaattctgccttgtagctgaacattttttgaggcatatgttgtgattggtcatcctcttaaatacatttattcaacatgt

SEQ ID NO: 134037 - DNA, 249 bp, Glycine max
aaggctatcaaatggactggaatgcaggatttgcttatgcaaagaatggagtgcctattggtcctagagctaattcttattggctttacaatgtaccatggggcatgtacaaatcattgatatacataaaggaacgttatggaaacccaactgttattttatctgaaaatggcatggatgatccgggtaatgtgactcttcccaagggtttgcatgacaccacaaggataaactattacaaaggctatt

SEQ ID NO: 134038 - DNA, 249 bp, Glycine max
atgtaaccgcttatgaagtcagggataagcgttctactcttaaacccgacgattgggatcgggttgttgctgtttttgtgctcggcaaggagtggcagtttaaggattggcctttcaaggaccatgttgaaattttcaacaaaattattggatttttcatgcgttttgaagatgatagtttggagtcatgcaagactgtcaagcagtggaatgtcaagattatctcatgaagtaagaacaagcgacatc

SEQ ID NO: 134039 - DNA, 249 bp, Glycine max
cagaaaacctaagcttagaattagaaacaaagaaaagaagaaaggaaagaattgatcgttgaaaatgcagggaggaaagaaagcgggagagtccattaaggaaacagctacaaacattggtgcttctgccaaggctggcatggagaagaccaaggccactgtccaagagaaggcagaaagaatgacagcacgtgatccggtgcaaaaggagttggcaacccaaaagaaagaggcaaagatgaaccaggc

SEQ ID NO: 134040 - DNA, 164 bp, Glycine max
agtttgcatctcctctttggttttccttagttctgaaagttatctcctaagaagacaatcatatgtactgtacgtagtgtgaagatatagtattgtatgctgcagaatatgattgtctaataaggtggactagctgtaataaaagatatttccaggtggataac

SEQ ID NO: 134041 - DNA, 240 bp, Glycine max
cactcgttcttcttcgtcgttatcttcttcttttgtcgtttgtgtgtctgttttttctctcacctgaaaatgtcttgctgcggtggtaactgtggttgcggaagcgcctgcaagtgcggcaacggctgcggaggctgcaagatgtacccagacttgagctacaccgagtcaaccaccaccgagaccttggtcatgggagtggcaccagttaaggctcaattcgagagtgctgaaatgggt

SEQ ID NO: 134042 - DNA, 250 bp, Glycine max
catcacacacaactactacaagtacttccttacaatcaaaaccaacaacaactatggcaagttatcaaaagcactacgatgatcagggtcgcaaggttgacgagtatggcaacgttgagaagcaaaccgacgaatacggcaaccctgttcatgctgctagtgtcacctatgtagccaccagaactgctgctggtggttacagtgatgacattaataagcaacatgataccaccaatgcctacggcgtaga

SEQ ID NO: 134043 - DNA, 242 bp, Glycine max
aggccccgtaatggatttcactccgccgccgatcgatgacggtttcaccgccgagaaactcttcacgcagggcttctcctacacatacgatatactcatctttctcccccactacatcgactatactgccgacgtcgtggacctctccacgcgcctcacgcgccgccttccccttgccgtgccgtttgttgcctctccgatggacaccgtgtcggagtccgccatggcctccgccatggcct

SEQ ID NO: 134044 - DNA, 245 bp, Glycine max
gaaagaacttccttataaccaaaaccaacaacaactatggcaagttatcagaagcactacgatgatcagggtcgcaaggtcgacgagtatggcaatgttgagaggcaaactgacgaatatggcaacccggttcatgccactagtgtcacttatgtagccaccaaaagtgttggtggctacaatgatgacgctaataagcaacatgatattactggtgtctatcccgagaaagacaccggtagaca

SEQ ID NO: 134045 - DNA, 245 bp, Glycine max
tctcgagcgctcgagccgctcgagccgcacgcatattctagagatgctatcggagcaatatggtggacgtgtcgaactcgctaaagcatatgacaatgcacacactgcttccgtgatgaagcatatgcataggcaatggtgtcatttcaagcatgcatcagtgcaatgatttcatgttccttggtacggataccatatcacttggacgagtcggtgatgatttttggtgcacggacgcagctgga

SEQ ID NO: 134046 - DNA, 248 bp, Glycine max
acgaagacgatcagataccgtcctagtctcaaccataaacgatgccgaccagggatcagcggatgttgcttttaggactccgctggcaccttatgagaaatcaaagtctttgggttccggggggaggtttgttgtaagacacctagtattagtatcatgtagtggagaaaaagggttgttgatcctaatagctagacaaggcatgttgtagtagtcatggggtggggaagtccttttgttgtagcatg

SEQ ID NO: 134047 - DNA, 155 bp, Glycine max
caagaaaagttcccaacttcagctaagagataatgtctctgattcgaaactttttcggtggccgtagagtaatgtgattgatcctttctgccttgaagtcgtgggatcccttcatggatgatcatgttccctgttctgaatctgctgaaaattta

SEQ ID NO: 134048 - DNA, 248 bp, Glycine max
caagtacacaacacaacagcaacatatggcgtctgaacaattggctcgcagagagaacaccaccaccgagaaggagattcacgttgagaaacacagggttcccaagatggccacccacttcgagcaccttgcggacaagctaaagaatctgacatcaccgctgggaaggatactccgcagggtagcatagaagccttgcaagctggagagagggtcaaagatcatgcaggaaaagccatgggagatat

SEQ ID NO: 134049 - DNA, 247 bp, Glycine max
tagctatccttggcttggacgaattatccgaagaagatcgcttaaccgtagcaagagcacgaaaaattgagcgtttcttatcacaaccttttttcgtagcagaagtttttaccggttcgccggggaaatatgttagtctagcagaaacaattagagggtttaaattgattctttctggagaattagatggtcttcctgaacaagccttttatttggtaggtaatatcgatgaagctactgcgaaagc

SEQ ID NO: 134050 - DNA, 188 bp, Glycine max
cgccagtagtcatatgcttgtctcaaagattaagccatgcatgtgtaagtatgaactaattcagactgtgaaactgcgaatggctcattaaatcagttatagtttgtttgatggtatctctactcggataaccgtagtaattctagagctaatacgtgcaacaaaccccgacttctggaaaggatgca

SEQ ID NO: 134051 - DNA, 249 bp, Glycine max
gttgacaaccataaacaatatgtgtgcatatgggctcaatcctggtatttcaggttctcgtcttttgggcaccattcctcagtccatttcacagcaaactgtttggaatcaaatggcaacagtgagaacaccattgaattttgattctagcaagcagagcttttgtcaattttctattgaccttctcggtggaggaattttagtggacaaaactggagattggatcacacttatacaaaattctccaat

SEQ ID NO: 134052 - DNA, 244 bp, Glycine max
caaggaatgggtggtggcggtggccatgatccatttgatatcttttcatctttctttggcggtgggagtccctttggatcaggtggaagtagtcgaggtaggaggcagaggcgcggagaagacgtggttcaccctctcaaggtctctttggaggacctttatcttggaacttccaagaagctctccctctccagaaatgttatatgctccaagtgcagtggcaagggttctaagtctggtgctt

SEQ ID NO: 134053 - DNA, 242 bp, Glycine max
gacagagcagcactcacattcacaacgaaggtttcctattcatcagacatggtgaaggcaatcagagttcacgaactcggtggccctcaagttctgaagtgggaggatgtggaaattggagatccaaaagaaggcgaggtccgtgtgaggaacaaagccattggggttaatttcattgatgtctactttcgcaaaggagtttacaaagccccttcttttcctttcactccaggtatggaagc

SEQ ID NO: 134054 - DNA, 245 bp, Glycine max
cacaactactacaagtacttccttacaatcaaaaccaacaacaactatggcaagttatcaaaagcactacgatgatcagggtcgcaaggttgacgagtatggcaacgttgagaagcaaaccgacgaatacggcaaccctgttcatgctgctagtgtcacctatgtagccaccagaactgctgctggtggttacagtgatgacattaataagcaacatgataccaccaatgcctacggcgtagaca

SEQ ID NO: 134055 - DNA, 241 bp, Glycine max
aaaggattctacccgccgctcgatgggaattgcgcttcaaggcgtctcgtagggctaatccgcctcacgagggtcaccaacggcacgtgcctttggggggccgaggctccctactgctggtcggcaaacggaccggcgggcgcacgcgtcgcttctagcccggattctgacttagaggcgttcagtcataatccaacgcacggtagcttcgcgccactggcttttcaaccaagcgcgatga

SEQ ID NO: 134056 - DNA, 245 bp, Glycine max; identical to SEQ ID NO: 111704

SEQ ID NO: 134057 - DNA, 246 bp, Glycine max
agttaataaaattctttgagttgaacacaggggccaagattccttctgttgggttaggcacttggcaagctgagcctggtgttgtagccaaagctgtcaccacagccattctggttggatacaggcatattgattgtgctcaagcgtataacaatcaagcagagattggttctgctcttaagaagctttttgatgatggtgtggtgaagcgtgaggacttatggatcacctccaaactctggtgtt

SEQ ID NO: 134058 - DNA, 247 bp, Glycine max
gcaaactggcaagagtgctgcaaaagttgcctcagatttgagggacaaggctttggccacagggtggagtgctgcacattattctactgagataactgtggagggaaccaaggctgcaacaaatgttgttaagggagttgctgagtatgcaggacagaaggcttctgagcttgcagctatgtcagtggatactgcgaaaggtttagctgctgctgcagctggggagaatgccaaggagtacactgca

SEQ ID NO: 134059 - DNA, 245 bp, Glycine max
ctcgagcgatataactccatggataatgggatgctaaggtttgaccatgtacggattccaagaaatcaaatgttaatgagggtttcacaggtaacaagggaaggaaaatatgtacaatccagtgttccacgacaattagtctatggtactatggtatatgtaagacaaacaattgtatctgatgcgtcagttgctttgtcgcgagcagtttgcattgctacaagatatagtgctgttcgaagaca

SEQ ID NO: 134060 - DNA, 246 bp, Glycine max
cgaaaagtagtgtattaagactacaaattttcaattcttcaatggcgtcgaagcaacaaaaagaggatcgagctgaggcagctgcgaaacttgctgcgaaagaactcgaacaactcaaccgagaaaaagaccgtgatttcagtcgtggtgttgcagaccaacaccaacaagaagaacatcagttagatcaacaaaagcgtggtgtaatcggatccatgttcaaggcggtgcaagacacctacgaga

SEQ ID NO: 134061 - DNA, 152 bp, Glycine max
attcggcatccggcacgacgagagaccagatctaaatcctcttccaagatgcagggaagagagacagctggtgagtccgtcgaggaaacagctgcaagcattggcgcttctgccaaggctggcatgcagataaccaaggccactctccagga

SEQ ID NO: 134062 - DNA, 242 bp, Glycine max
cacaactacaatacagaacttccttataaccaaaaccaacaacaactatggcaagttatcagaagcactacgatgatcagggtcgcaaggtcgacgagtatggcaatgttgagaggcaaactgacgaatatggcaacccggttcatgccactagtgtcacttatgtagccaccaaaagtgttggtggctacaatgatgacgctaataagcaagatggtattactggtgtctatcccgagaaa

SEQ ID NO: 134063 - DNA, 244 bp, Glycine max
cttaccaaagagccttggctcgtttctggtccaaattcattgatgacaaggtaactcagcttttcaaatatcttcttcttacttttcttgatttgtgctgatttgatttgtctccaaaacatcacctttcatgccatctagatgtgaaatctttgaataagtttagtgaaccctgaaaaaagttaaaaaaaaatttttcattaattgtatcaactttgtctaagatcataccaatgattggtca

SEQ ID NO: 134064 - DNA, 242 bp, Glycine max
aaaaaccacttggaagcatcattggagagagctttcaaggagttcaagaaaaagggagtgaagtgatggcaagcattggtgaaaaactgggaagtgctgcacatacattagtgaagaagccattggataaggccactgagggagggagagaggtgttgggagctgtaggtgaaactgtggttgagattggtgaaaacatggtgaaaaaaccagcacagaaagtgcagcagcatcaaggtgaa

SEQ ID NO: 134065 - DNA, 244 bp, Glycine max
ctcaaagattaagccatgcatgtgtaagtatgaactaattcagactgtgaaactgcgaatggctcattaaatcagttatagtttgtttgatggtatctactactcggataaccgtagtaattctagagctaatacgtgcaacaaaccccgacttctggaagggatgcatttattagataaaaggtcaacacaggctctgcctgttgctttgatgattcatgataactcgtcggatcgcacggcc

SEQ ID NO: 134066 - DNA, 241 bp, Glycine max
aacctctttatttcggagttttctttctttggatctttgtctaatgtgggagcaatggtgggagctatagcgagtggtcagatagctgaatgtatcgggcgcgaagggtcattgatgattgctgcgatccccaatataatagggtggcttgctatttcttttgccaaagattcctcatttttgtatatggggaggttgttggaaggttttggcgttgggattatctcttatgtggtgcttg

SEQ ID NO: 134067 - DNA, 242 bp, Glycine max
gtccctgcggatgttgacgcaatgtgatttctgcccagtgctctgaatgtcaaagtgaagaaattcaaccaagcgcgggtaaacggcgggagtaactatgactctcttaaggtagccaaatgcctcgtcatctaattagtgacgcgcatgaatggattaacgagattcccactgtccctgtctactatccagcgaaaccacagccaagggaacgggcttggcggaatcagcggggaaagaag

SEQ ID NO: 134068 - DNA, 242 bp, Glycine max
ctcaattttctgagcagccaaacactctctctctgtctctcgaaaattctcagtttgcagagaaaatctgaatcatgtcgtggcaagcgtatgtcgacgatcaccttctgtgtgacatcgaaggtaaccacctcactcacgctgctatcatcggccaagacggcagcgtttgggctcagagtaccgacttccctcagttcaaacctgaggagataactgccatcatgaatgactttaatgag

SEQ ID NO: 134069 - DNA, 247 bp, Glycine max
agaagaagaagaagaaaagtgtgagtgcagaaaagaagagtggtgggcgagctcggaagaacgtgtacagaggaatcaggcaaaggccgtggggcaagtgggccgcggaaataagggacccacataagggcgtccgcgtctggctcggcaccttccccaccgccgaggaagccgcccgagcctacgacgacgccgccaagcgcatccgcggcgacaaggccaagctcaacttcccggccaccgctcc

SEQ ID NO: 134070 - DNA, 245 bp, Glycine max
caggtatgatgaaattgtgaaggaagtttcttcctatttgaagaaagtaggatacaaccctgacaagattccttttgttcctatatctggttttgagggagacaacatgattgagaggtccacaaaccttgactggtacaagggtcctactctgctagatgcacttgaccagatctctgagcccaagaggccttctgacaagcccctcaggctaccccttcaggatgtgtacaagattggaggaa

SEQ ID NO: 134071 - DNA, 249 bp, Glycine max
cacgagtatacattggttagttacatttactcttgtccttcatgttctgtgcttccttttcctggcctaagcactgcgacattgacttttttgctttggtgtttggcagaataatacaaagtttgcattgtctatcgaacctgaaaacgaggaacttcaatcctatgctgcccaagtagcttaccttcgaagtaaaggcctgcccacgattcccaccacactgaagatggaaaaggcttgtaatccatt

SEQ ID NO: 134072 - DNA, 219 bp, Glycine max
aaaacagtaaagctaacttcaacacctttaattttctaaaagtaattcagcggctgaataccaagcggagaagatgagtcaggagcagccacggcgtcccaaaggccaaaaccccatcaaatacggcgacgtttttgtcgtctccggcgaccttgcacagaagcccgtcgcaccggaagatgctgccatgatgcaaagcgcggaaactcgagtgctcgg

SEQ ID NO: 134073 - DNA, 251 bp, Glycine max
cgtgaaaatcatgcccgtcctgttcttggaggaaatgacacctttccttatcctcgtagggggagaactggtagaaaaccaacaaggaaagatcctaatagtgagagtaggagcaatgatgtttatcttccaagagatgaggcttttggacacttgaagtcatctgactttcttacttatggactaaaatccgtatctcaaaatgttcttccattattgcaatctgcttttgatttgaatttcacaccccg

SEQ ID NO: 134074 - DNA, 216 bp, Glycine max
gaaaaaaagaagagttgagattccctttgaagaaaagatggcatcccataggcaaagctatgaagcgggtcaaactaagggcggaactgaggaaaagacgaaccagacgatgggcaatattggagagaaggctcaagctgcaaaggagaagacccaggaaatggcccaagctgcaaaggagaagacccaccaaccagcccaagctgccaaggccaa

SEQ ID NO: 134075 - DNA, 246 bp, Glycine max
tcgctaccctacttcaaagggtgctataatattcggggatgcacctaacaacatgcgacagtttcaaaaccaagatattttccacgatttggccttcaccccattaaccatcaccctgcagggagagtacaacgtgagagtcaactcaataagaatcaaccagcacagtgtgttcccactgaacaagatatcatccaccatcgtagggtcgacctctggaggaaccatgattagcacctcaactcc

SEQ ID NO: 134076 - DNA, 243 bp, Glycine max
ccctgttcctgtgtgtgtgagtgaccgagtgagtttgtttttctcagctgatatatatggcgcttgatcgctccattataagcaaaacgacgtggtacagcgtcgtattatggatgatggtggtgctggtgagagtgcacggtgcagccgcgaggccgaaccggaaggagtgggactcagtcataaagttaccgactgaaccggtggatgctgactcggatgaagtgggaacacgatgggcgg

SEQ ID NO: 134077 - DNA, 241 bp, Glycine max
cagaatataggaatataagaactaagatggattggatcggagcgtaccgcggaggccagagaagcagggactggtgcgacccttcatcaccattcactgatttgtgggaccctcgtcgtgtcggtgacgctgatgatatcacctcctctctcgcccatgctcacgttgactggcgtgagactgataaagctcatatcttccgtgctgatcttccaggggtgaagaaagaggatctgaaggt

SEQ ID NO: 134078 - DNA, 246 bp, Glycine max
actgcttcccctggcaaccttcttcttagttctctccgcttcttatctccagattgctggggcgaaagcacaaccgttgactagtctcaagcttaactctccgatccttcaggagtctattgctaaagagatcaatgaaaatcctgaggcaggatgggaggctgctataaatcctcatttctccaattatacagttgaacaatttaagcgccttcttggagtcaaaccaacgcctaagaaggaact

SEQ ID NO: 134079 - DNA, 243 bp, Glycine max
cgagaggtgaatgcaagtttgatccagagaaaatagcagttaagatcacaaatttcaccaatatccctgctgatgagaaccaaattgccgcatatttagtaaaaaatggtccacttgctatgggcgtgaatgcaattttcatgcaaacatacattggtggtgtctcatgccctctcatatgtagcaagaaaaggctgaaccatggtgtgttacttgtgggatatggtgcaaaaggcttctcaa

SEQ ID NO: 134080 - DNA, 241 bp, Glycine max
ggaaaccgcagccaacattggcgcctctgccaagtctggcttggagaaaaccaaggccactatccaagagaagaatgagaagatgaatgcagaagatcaaactcaaatggatatggctaccaagaggaaagaagagaagatcaaccaggctgagatggagaagcagcaggcccgtaagtactacgccgctgcaaaacaatacgccatggctgagcacatggcaaagggcaaccacgacacc

SEQ ID NO: 134081 - DNA, 239 bp, Glycine max
ctctccgcaagaatgcaatgttcgtgccacactacaacctgaacgcgaacagcataatatacgcattgaatggacgggcattgatacaagtggtgaattgcaacggtgagagagtgtttgatggagagctgcaagagggacgggtgctgatcgtgccacaaaactttgtggtggctgcaagatcacagagtgacaacttcgagtatgtgtcattcaagaccaatgatacactcatgatc

SEQ ID NO: 134082 - DNA, 241 bp, Glycine max
catcaaagaaaggggtagtagcagcttcgaaagcttaataatttgtatatttccagaacatcatagtattcgcagcagcaaactaacaaattactcatatcatataataagatggcccgttctctctcgcaagccaaacgtattagtgtccttgttactcaatctatctccctaattcccgttcatcggcgaggttacgcagtggcatccgatgtatcggtaagagttggattgggtaata

SEQ ID NO: 134083 - DNA, 244 bp, Glycine max
ctcgagcggctcgagtgcagaccgagctagctagctagcaagcaagcacagagatggaggcaaagcgaggccatgccctcatgtgcttggcacgtgtttcactcttcctctgcgctctaaccctatccgctgctcacggaagcaccacggttcaagacatcgcgagatagttgaaactcggggacaacgagcttctgcgcacggagaagaagttcaaggttttcatggagaattacgggaggag

SEQ ID NO: 134084 - DNA, 229 bp, Glycine max
aacttcttaatgctttcatttcgcaaaccccccttggacggattggagacgcagaggaagtgtcttcattggtggcattcctctgcttacctgcagcctcttacataacaggacagaccatttgtgttgatggtggattaacagtgaatggtctctatataaattagagaagtactaccaacacactctctaacacacttctcttgacacatattctaccataagttac

SEQ ID NO: 134085 - DNA, 240 bp, Glycine max
aactatggcaagttatcagaagcactacgatgatcagggtcgcaaggtcgacgagtatggcaatgttgagaggcaaactgacgaatatggcaacccggttcatgccactagtgtcacttatgtagctaccaaaagtgttggtggctacaatgatgacgctaataagcaacatgatattactggtgtctatcccgagaaagacaccggtagacatcattttggtcgtggttacgacggtga

SEQ ID NO: 134086 - DNA, 241 bp, Glycine max
ctcgagcgaatcggctcagaaagaatcaaagaaaggggccgtggctgcttcgcaagcttaataatttgtttatttccagaacatcatagttttcgcagcagcaaactaacaaattactcatatcatataataagatggcccgttctctctcgcaagccaaacgtattggtgtccttgttgctcaatctatctccctaattcccgttcatcggcgaggttacgcagtggcatccgatgtatc

SEQ ID NO: 134087 - DNA, 238 bp, Glycine max
ctttttcttctcccaccaacttcaccgtcttcttcctcgatcatgtctcacttcaagggcaagtaccatgatgagcttattgccaatgctgcttacattggcactcctggaaagggtattcttgctgctgatgagtcaacagggacaattggcaagcgtttggccagcatcagtgtagagaatgttgaatccaacaggcgtgctcttagggagctgcttttcaccgctcccggtgctc

SEQ ID NO: 134088 - DNA, 239 bp, Glycine max
atactctctagagtaattgcggaatctgctagaattttctaataatggcgaaagacgttgagcaggtcacagagcaaggtgaatactccgcgaaggactaccatgaccctcctccggcaccgttgatcgacccagatgagctcacaaagtggtccttgtacagagccgccatagctgagttcatagcaacactcctttttctttacatcaccgtgttgaccattattggctacaagaga

SEQ ID NO: 134089 - DNA, 238 bp, Glycine max
ccccaccgccgtccacggcgtcacgcagttctccgatctcaccgaggacgagtttgagaagctctacactggcgtcaatggcggcttcccgtcatcgaataatgccgccggcggtattgcgccgccgttggaggtggacgggctgccggagaattttgattggagagagaaaggagctgtcaccgaagttaagttacagggtagatgtggatcatgctgggctttcagcaccacagga

SEQ ID NO: 134090 - DNA, 240 bp, Glycine max
cattttgatgagtacgattatcgggtgaaacttctacagaaaaagcaatggagagaggagttgagaaggatgagagagatgaagaaaaaaggtaacacaaaagaagatgactatggttacatggaagaagatgatcaagagaatggaagtccagcagcagtgccagttccattgcctgatatggccatgccaccatcctttgacagtgacaatccagcctatagataccgtttcttagag

SEQ ID NO: 134091 - DNA, 247 bp, Glycine max
agttagcagattgtgattttcttaagagaaactttaagcagatgtctaatgttttgtgggtggctcctgaggacaaggcaagtttatggtcacaacttcattatgtttcgtgtaataatctggaaatgcaagaagcttatcttgtcaatctcgtaaatgtgttacgagaattgtatttgcacagtccagaggaagctcgccaattgagaaggaaagctctctctcgtattgaatggctgcaaaaagc

SEQ ID NO: 134092 - DNA, 245 bp, Glycine max
agaaagctatgaaacaagtctgcggtagtttaaaacttgaattggcacaatatcgcgaagtcgccgcctttgctcaatttggctcagaccttgatgctgcgactcaggcattactcaatagaggtgcaaggcttacagaagtactgaaacaacctcaatatgcaccagttccaattgaaaaacaaattctagtcatttatgcagctgtcaatggattctgtgatcgaatgccattagataaaatt

SEQ ID NO: 134093 - DNA, 240 bp, Glycine max
gtgttggtgggttgcaaagatgcttgggggtcttctccataggggtcataagataaaagggacagtggtgttgatgcgcaagaatgtgttggacgtgaatagcgtaaccagcgttgggggaattattggtcaaggtctcgacttagttggctcaacactcgatactcttactgccttcttgggccgatccgtgtctctccagcttattagtgctaccaaagctgatgccaacggaaaagg

SEQ ID NO: 134094 - DNA, 242 bp, Glycine max
cggctcgagtttgaaaatgcagggaggaaagaaagctggagagtccatcaaggaaacagctgcaaacattggtgcttctgccaaggctggcatggagaaaaccaaggccactgtccaggagaaggcagaaagaatgacggcacgtgatccgatgcaaaaggagttggcaacccagaagaaagaggcaaagatgagccaggcagagctggacaagcaggcggcgcgtcagcataacacggcgg

SEQ ID NO: 134095 - DNA, 242 bp, Glycine max
gaaataattgatctttgaaaatgcagggaggaaagaaagctggagagtccatcaaggaaacagctgcaaacattggtgcttctgccaaggctggcatggagaaaaccaaggccactgtccaggagaaggcagaaagaatgacggcacgtgatccgatgcaaaaggagttggcaacccagaagatagaggcaaagatgagccaggcagagctggacaagcaggcggcgcgtcagcataacacg

SEQ ID NO: 134096 - DNA, 241 bp, Glycine max
gcaacgcagtggaagtatgcaactaaaggagaagaaggtgagggatttgatggtggacaagaagaggctagtggaggtgccgtacatggcgtcgctggcccacacaatgactacactggtagcgaacaaggttgtggcggtgccgttggctgcgccgccggggaaatggatcggagccggaggttccatgatcgtggagtctgataagcaaaccggagacgtacggaagcactacataggg

SEQ ID NO: 134097 - DNA, 241 bp, Glycine max
actcgtgaacatgctctgctttcattcacccttggtgtgaaacagatgatttgctgctgtaacaaaatggatgctactacacccaagtattccaaggccaggtatgatgaaattgtgaaggaagtctcttcctacttgaagaaagtaggatacaaccctgacaagattccttttgttcctatctctggttttgagggagacaacatgattgagaggtccacaaaccttgactggtacaagg

SEQ ID NO: 134098 - DNA, 241 bp, Glycine max
agagaaagccatggagaatggtgaaacctctaatgaagatttattaagcatacttttggaatcaaatcacaaggaaatccagggacatggaaacagtagggctgttggaatgaccaagcaagaagtaattgaggaatgcaagctattttacctggcagggcaagagaccacttcatctctgctggtttggacaatggtcttattggctaggtatccagaatggcaagcacgagcaagggac

SEQ ID NO: 134099 - DNA, 238 bp, Glycine max
agcttagttgtcaagttggaatcaacccatactccatggaatggactggtttggccaataggttactgagtaagggcaacgatattctgtgttgcgattatgctagttttgatggtttgattaccaagcaagttatgagcaagatggcagaaatgataaacagtctttgtggtggtgatgaaaaattgatgcgtgaaaggacacacctgctgttggcttgttgttcaaggatggcaat

SEQ ID NO: 134100 - DNA, 236 bp, Glycine max
gttcatttcctctgttttttcttcaaatccattgtttcgtggaaatcccgaaatttaaccatgcttctccgaaccgccgcctccgccgcttctgcttcgtccctctccctcttcagccctacctccgaacctctccgttcggttcccgctggtggattggtggttcgcgccgcgaaaggatccacgaaccaccgcgccctaaccggcgtgatctttgaaccgttcgaagaggtgaa

SEQ ID NO: 134101 - DNA, 174 bp, Glycine max
gtcgcaaggttgacgagtatggcaacgttgagaatcataccgacgtatacgggaaccctgttcatgctgctagtgtcacctatgtagccatcagatctgctgcttggtggtacagtgctgaccataataagcaacatgataccacccaatgcctaaggcgtagacacctggtag

SEQ ID NO: 134102 - DNA, 243 bp, Glycine max
agctggttctccccgaaatgcgttgaggcgcagagttgactagacatctaggggtaaagcactgtttcggtgcgggccgcgagagcgtaccaaatcgaggcaaactctgaatactagatatgacctcaaaataacaagggtcaaggtcggccagtgagacgatgggggataagcttcatcgtcgagagggaaacagcccggatcaccagctaaggcccctaaatgaccgctcagtgataaagg

SEQ ID NO: 134103 - DNA, 239 bp, Glycine max
agctggttattggggtggagtgaagccagcagcaaccggcatggaacattatgacactgccttggcatatccagtgcagtcaccaggcgtgctaggaaaccaaccagacattgtcatggacagcttggctgtacatggccttggcctagtgcacccaaagaaggttttcaatttctacaacgagctccatgcttacttagcttcttgtggagtagatggagtgaaggttgatgtgcaga

SEQ ID NO: 134104 - DNA, 239 bp, Glycine max
cttgccttcccatatctattgcagtttattcgtgagtacactggcaaagtcgatgaactagtgaaggacaaaattgaagcacaaaatgaagtgaaggctaaagagcaagaagaaaaggatgtagttgcacaacagaacatgtatgctcaattgttgcctcttgctttgcctgcaccaccaatgcctggaatgggaggctttgctcctccccctccaatgggtggactagggatccccca

SEQ ID NO: 134105 - DNA, 240 bp, Glycine max
acgattatgcaactgacactgctcagaaatcaaaggactatgcaggtgatgctgctcagaaatcaaaggactacgcaggtgatgctgctcagaaaaccaaagactatgccagtgacactgcacagacatcaaaggactatgctggtgatgctgctcagaaatcaaagggctatgttggtgatgctgcacaaaagaccaaagaatatgttggtgatgcagcacagaagacaaaggattatg

SEQ ID NO: 134106 - DNA, 238 bp, Glycine max
gagaatttaccgaaaggctttcagagctgaatatgaattcccagaatggatttctccgcaggccaagaatcttatttcgaatctcctcgttgctgatcctggcaagaggtattccattcctgatataatgagggatccttggtttcaagttgggttcatgaggccaatcgcgttttctattaaggagtcttacgttgaagacaacattgatttcgacgatgtggagaacaaccaggag

SEQ ID NO: 134107 - DNA, 235 bp, Glycine max
cggatgcattgcgtgtatgtgtcacaacactgatggactttatagtgctaagcagactgctattgtgagagcttctgatgatttttaccctcgtgatcctgcttcccataccatccatatttcttctgttgcatacaactcactattccttggagaattcatgcaacctgactgggacatgtttcatagtttacacccagcagcagattatcatgctgcagctcgtgcaattggt

SEQ ID NO: 134108 - DNA, 234 bp, Glycine max
tttgccttcccatatctattgcagtttattcgtgagtacactggcaaagtcgatgaactagtgaaggacaaaattgaagcacaaaatgaagtgaaggctaaagagcaagaagaaaaggatgtagttgcacaacagaacatgtatgctcaattgttgcctcttgctttgcctgcaccaccaatgcctggaatgggaggctttgctcctccccctccaatgggtggactggggatg

SEQ ID NO: 134109 - DNA, 237 bp, Glycine max
atcccaggcgaggagaaagatggaggggaaggagcaggatgtgtcgttgggagcgaacaagttccccgagagacagccgattgggacggcggcgcagagccaagacgacggcaaggactaccaggagccggcgccggcgccgctggttgacccgacggagtttacgtcatggtcgttttacagagcagggatagcagagtttgtggccacttttctgtttctctacatcaccgtctt

SEQ ID NO: 134110 - DNA, 236 bp, Glycine max
atttgaagcttcaaataagatcaaggttttgatggccaccaatcggattgatatcctggatcaagccctccttagaccaggacggatagaccggaaaattgaatatccaaaccctaatgaagagtctcggctggatattttgaaaatccattctagaagaatgaatttaatgcgtggcattgatttgaagaagattgccgagaagatgaatggagcatctggtgctgaacttaagg

SEQ ID NO: 134111 - DNA, 239 bp, Glycine max
caaaacattgcccttgttctttcaaagttaccaaacacaagtacacaacacaacagcaacatatggcgtctgaacaattggctcgcagagagaacaccaccaccgagaaggagattcacgttgagaaacacagggttcccaagatggccacccacttcgagcaccttgcggagaagctaaagaatctgacatcaccgctgggaaggatactccgcagggtagcatagaagccttgcaag

SEQ ID NO: 134112 - DNA, 238 bp, Glycine max
atctgcgtgtgtttgtgaattgttgttgagatctgaatcaaaatcagaaacgataatggctacaccggaccacctcttcaacctccgcaacaacttctacctcggcgcttaccaagccgccatcaacagcagcgacgttgccaacctctcccaagaagataccctcgagcgcgacaccctcgtccaccgctgctacatcgccctcggccagctccagttcgtcatctccgagatccac

SEQ ID NO: 134113 - DNA, 238 bp, Glycine max
agaaaacctaagcttagaattagaaacaaagaaaagaagaaaggaaagaattgatcgttgaaaatgcagggaggaaagaaagcgggagagtccattaaggaaacagctacaaacattggtgcttctgccaaggctggcatggagaagaccaaggccactgtccaagagaaggcagaaagaatgacagcacgtgatccggtgcaaaaggagttggcaacccaaaagaaagaggcaaaga

SEQ ID NO: 134114 - DNA, 237 bp, Glycine max
gattcccgaagtgccttcctcctcctcctccttcttcccctctaatcggatccaaatccaaatccaaatccagttcaaagaagatgcaatacaagaacctggggcgatctggcctgaaggtgagccagctctcctacggcgcgtgggtgagcttcgggaaccagctggacgtgaaggaggcgaaggccctcctacagtgctgccgcgaccacggcgtcaacttcttcgacaacgccg

SEQ ID NO: 134115 - DNA, 237 bp, Glycine max
gttttgtgggtggctcctgaagacaaggcgagtttatggtcacaacttcattatgtttcgtgtaataatctggaaatgcaagaagcttatcttgtcaatctcgtaaatgtgttacgagaactgtatttgcacagtccagaggaagctcgccaattgagaaggaaagctctctctcgtattgaatggctgcaaaaagctgatgtgcctaccatagcacagattgaagagttccattcg

SEQ ID NO: 134116 - DNA, 235 bp, Glycine max
cgaagtgaagctggagattcaagatggcagagttcttcagataagcggagagaggaatgttgaaaaagaagacaagaatgatacgtggcatcgcgtggagcgaacagtggcaagttggtgaggaggtttagattgccggagaatgctaaagtggaccaagtgaaggcttccatggaaaatggggttctcactgtaactgttcctaaggaagagattaagaagcctgatgttaagg

SEQ ID NO: 134117 - DNA, 236 bp, Glycine max
gcagaccgagctagctagctagcaagcaagcacagagatggaggcaaagcgaggccatgccctcatgtgcttggcacgtgtttcactcttcctctgcgctctaaccctatccgctgctcacggaagcaccacggttcaagacatcgcgagaaagttgaaactcggggacaacgagcttctgcgcacggagaagaagttcaaggttttcatggagaattacgggaggagctactcca

SEQ ID NO: 134118 - DNA, 234 bp, Glycine max
gtggatccagccagagataggactagcttgctcaaaatatggaacctgaacaaatgctctggagttgttggtgtatttaactgccaaggtgctggatggtgcaagatagagaagaaaacccgcatccatgatacatctcctggtacactcaccgcctctgtctgcgcctctgatgttgacctcatcacacaagtagcaggtgctgaatggcttggagatacaattgtttatgct

SEQ ID NO: 134119 - DNA, 241 bp, Glycine max
cgttgccattctcatcctcctctgtctctctctctccaccattgccatggatccttacaagctccggccatccagcgccttcaattctcccttctggactacaaattctggtgctcctgtttggaacaacaactcctctttaaccgttggagctagaggtccaattctgcttgaggattatcatcttgtggagaagcttgcaaactttgacagggaacgtatcccagaacgtgttgtccat

SEQ ID NO: 134120 - DNA, 238 bp, Glycine max
aaaagatcatacatagtagtgttggtgggttgcaaagatgcttgggggtcttctccataggggtcataagataaaagggacagtggtgttgatgcgcaagaatgtgttggacgtgaatagcgtaaccagcgttgggggaattattggtcaaggtctcgacttagttggctcaacactcgatactcttactgccttcttgggccgatccgtgtctctccagcttattagtgctaccaaa

SEQ ID NO: 134121 - DNA, 237 bp, Glycine max
caagaggtcgagtttcacagcagcaatggtgtacgtcaaggctcagaaatcaaaagcctacttcaagagatatcaagtcaagttcaagagaagaagagagggaaaaaccgattaccgtgccaggattcggttgattaatcaggacaagaacaaatataacactccgaaataccgatttgttgttcgctttagcaacaaggacattgttgcacaaataatatctgctagcattgctgg

SEQ ID NO: 134122 - DNA, 234 bp, Glycine max
atcgtgtaatggaattttgcaacaacaatgatcttcagctgattgttcgtgcacatgaatgtgtgatggatggctttgagcgttttgcccagggacatttgatcacacttttctctgctacaaactactgtggtatttgttactagcttctacattgcacctccacagataattctcccttctaaattttggcactttattgtgtcaatagatacgtcaccagaacgtcatatt

SEQ ID NO: 134123 - DNA, 236 bp, Glycine max
atccgctgctcacggaagcaccacggttcaagacatcgcgagaaagttgaaactcggggacaacgagcttctgcgcacggagaagaagttcaaggttttcatggagaattacgggaggagctactccacagaggaggagtatttgcgccgtttggggattttcgcccagaacatggtcagagcggcggacatcaggcgctggaccccaccgccgtccacggcgtcacgcagttctc

SEQ ID NO: 134124 - DNA, 235 bp, Glycine max
ttcaaaccttgctctatactacactgtacacacactagaagaataatggcttccatcctccactactttttagccctctctctttcttgctcttttcttttcttcttatccgactcagtcacccctacaaaaccaataaaccttgttgttctacccgttcaaaatgatggttccacagggctccattgggccaacctccaaaaaagaacccctctaatgcaagtaccagtcctgg

SEQ ID NO: 134125 - DNA, 233 bp, Glycine max
aaaattgcacttcccaaaaacacagttggaggaaccattctgcgtagtgatctattggcaaattttttgacagagggcaattttagagcaagtgttgatttgcagcgcactcatcgtattaaaggaatgattaaaatggtggccacagttggtattcctgagaatacaggtatagcattggcctgtgctatgaatagttcttttagggggcgtgccagttctgatatttacac

SEQ ID NO: 134126 - DNA, 232 bp, Glycine max
cggaaaggagtgaacattaaagctggtgtgatcacggagtggaaggatattccagttgagcttttgatgcaaattttgtcacttgtggatgatcaaacggttatcatagcttctgaagtgtgtcgtgggtggagagaggcaatttgctttggccttactcggttatcactctcatggtgtagcaagaacatgaataacttggtcctatccctttctcctaaattcacaaaac

SEQ ID NO: 134127 - DNA, 231 bp, Glycine max
ctcaaatcctctgagagaaaaaaaaattagggttttgcatatcgggtcagacagactcagacatgggaggaggcaatgcccagaagtcaaagatggctcgcgagaagaacctcgagaagcagagggctgccgctaagggaagccagttggattcaaacaagaaagccatgtctattcagtgcaaggtgtgcatgcaaacatttatatgcaccacatcagaagtgaagtgca

SEQ ID NO: 134128 - DNA, 235 bp, Glycine max
aaaacagtaaagctaacttcaacacctttaattttctaaaagtaattcagcggctgaataccaagcggagaagatgagtcaggagcagccacggcgtcccaaaggccaaaaccccatcaaatacggcgacgtttttgtcgtctccggcgaccttgcacagaagcccgtcgcaccggaagatgctgccatgatgcaaagcgcggaaactcgagtgctcggacaaacccacccggcg

SEQ ID NO: 134129 - DNA, 216 bp, Glycine max
gttgcagaccgagctagctagctagcaagcaagcacagagatggaggcaaagcgaggccatgccctcatgtgcttggcacgtgtttcactcttcctctgcgctctaaccctatccgctgctcacggaagcaccacggttcaagacatcgcgagaaagttgaaactcggggacaacgagcttctgcgcacggagaagaagttcaaggttttcatgga

SEQ ID NO: 134130 - DNA, 227 bp, Glycine max
cgatattctgtgttgcgattatgctagttttgatggtttgattaccaagcaagttatgagcaagatggcagaaatgataaacagtctttgtggtggtgatgaaaaattgatgcgtgaaaggacacacctgctgttggcttgttgttcaaggatggcaatttgtaagaaagatgtttggagagttgaatgtggaatcccttctggatttccgctcacagttatttgta

SEQ ID NO: 134131 - DNA, 227 bp, Glycine max
gtttgttgttcaatctaacaaacttctctatatcgtttactttttcaacacaccttacacatccctttatttgtgccacacatataaatatcatggcttcgagggtggtttcggttttggtgatagcgatgatgttgtttgccatgaactgtaactgcactagtgttggccacatgccttcaaccaaagaggaaggtcacgattttcaggaggctaaagccaagaca

SEQ ID NO: 134132 - DNA, 224 bp, Glycine max
ctcgagcgaatcggctcagaccgagtgcctcccacgccaggtcgtactcataaacgcatcaggtctccaagacgaacagcctctggtcgatggaacaatgtaggcaagggaagtcggcaaaatggatccgtaacctcgggaaaaggattggctctgagggctgggcacgggggtcccagtcccgaacccgtcggctgtcggtggactgctcgagctgcttccgc

SEQ ID NO: 134133 - DNA, 223 bp, Glycine max
aaagaaacttaatgaagccgaaaaggcaaagaaagaactagaacaacaggaatattttgatccaaagttggctgatgaggagagagaaaaaggaaacgaattcttcaagcagcagaagtatcctgaggctgtgaagcattacacagagtctatacgaagaaatccaaaagatcctagggcttatagtaacagagcagcatgctacactaaactgggggcaatg

SEQ ID NO: 134134 - DNA, 227 bp, Glycine max
atttcgtttgttgttcaatctaacaaacttctctatatcgtttactttttcaacacaccttacacacaactttatttgagcctttcatataaatatcatggcttcgagggtggtttcggttttggtgatagcgatgatgttgtttgccatgaactgtaactgcactagtgttggccacatgccttcaaccaaagaggaaggtcacgattttcaggaggctaaagcca

SEQ ID NO: 134135 - DNA, 228 bp, Glycine max
gcttacaatgatcagttcagggaacttgtgcaaacagggaaagacattgaaagtgcatattgggaacttgtagtgaaggatatccaagatgcttgcagactatttgaaccaatctatgatcaaacagatggtggtgatgggtatgtttctgttgaagtatctcctaggctcgctgatgacactgagggaaccatagaagctgcaaaatggcttcataaagtggttgat

SEQ ID NO: 134136 - DNA, 225 bp, Glycine max
gttttagcgcagttcttctagatttaaggaagatgggtaaggaaaaggttcacatcagtattgtggtcattggccatgtcgactctgggaaatccactaccactggtcacctgatttacaagcttggaggcattgacaagcgtgttattgagaggtttgagaaggaagctgctcagatgaacaagaggtctttcaagtatgcctgggtgctggacaaacttaagg

SEQ ID NO: 134137 - DNA, 223 bp, Glycine max
tctttatatggaaatgaaagaatctggagtaattaatgaacaaaatattgcagaatcaaaagtagctctagtatatggtcaaatgaatgaaccgcccggagctcgtatgagagttggtttaactgccctgactatggcggaatattttcgagatgtcaatgaacaagatgtacttctatttatcgacaatatctttcgcttcgtccaagcaggatctgaagta

SEQ ID NO: 134138 - DNA, 224 bp, Glycine max
attttcttcatccttctctgttctcctagaacttgattacttgaacattccctatgacagatgaggtggttcttctggatttctggccaagtccatttgggatgagggtcaggattgcacttgctgaaaagggtatcgaatatgagtacaaagaagaggacttgaggaacaagagtcttcttctcttacaaatgaacccggttcacaagaagattccggttctc

SEQ ID NO: 134139 - DNA, 225 bp, Glycine max
gaccgagctagctagctagcaagcaagcacagagatggaggcaaagcgcggccatgccctcatgtgcttggcacgtgtttcactcttcctctgcgctctaaccctatccgctgctcacggaagcaccacggttcaagacatcgcgagaaagttgaaactcggggacaacgagcttctgcgcacggagaagaagttcaaggttttcatggagaattacgggaggag

SEQ ID NO: 134140 - DNA, 223 bp, Glycine max
ctacaaacattggtgcttctgccaaggctggcatggagaagaccaaggccactgtccaagagaaggcagaaagaatgacagcacgtgatccggtgcaaaaggagttggcaacccaaaagaaagaggcaaagatgaaccaggcggagctggacaagcaggcggcgcgtcagcataacacggcggccaaacagtccgccaccacggctgggcacatgggacatgg

SEQ ID NO: 134141 - DNA, 224 bp, Glycine max
tggaaataattgatctttgaaaatgcagggaggaaagaaagctggagagtccatcaaggaaacagctgcaaacattggtgcttctgccaaggctggcatggagaaaaccaaggccactgtccaggagaaggcagaaagaatgacggcacgtgatccgatgcaaaaggagttggcaacccagaagaaagaggcaaagatgagccaggcagagctggacaagcagg

SEQ ID NO: 134142 - DNA, 229 bp, Glycine max
ccttgctctatactacacagtacacacactagaagaataatggcttccatcctccactactttttagccctctctctttcttgctcttttcttttcttcttatccgactcagtcacccctacaaaaccaataaaccttgttgttctacccgttcaaaatgatggttccacagggctccattgggccaacctccaaaaaagaacccctctaatgcaagtaccagtcctgg

SEQ ID NO: 134143 - DNA, 224 bp, Glycine max
gacagagccggcggttcccgtggcggtttgagaatggccgacaagtacaacctgaagaaccccgccgtgaagcggatcctccaggaggttaaggagatgcagtccaacccttccgacgatttcatgagcctccctctcgaggaaaatatatttgagtggcaatttgcgattagagggcctcgtgatacggaatttgagggtggtatttatcatggaaggatcca

SEQ ID NO: 134144 - DNA, 218 bp, Glycine max
agcatttagtgacaatgctctggcttaccttgccagcttctgcagaaaactgaaagttctaaatctttgtggatgtgttagagctgcatccgatactgcattacaggctattggacaatactgcaatcagctacaatctttgaaccttggatggtgtgataatgttggcgatgttggagtgactactttagcatatgggtgtcctgatcttaggatag

SEQ ID NO: 134145 - DNA, 229 bp, Glycine max
atagaaagagagagaagaagaaaagaagaacaaagatgcaatcctcaaaggagaagatgaaaaacatggcaagtgctgccaaggaacaagtcgacatctataaagccaaaatagacgagaaggcagagaaagcaacggcaagaacagaagaggagagggtgatagcccatgagcacgcaaaggcaaaggaagctggagcaaagatggagctgcatgaagctaaagcaag

SEQ ID NO: 134146 - DNA, 223 bp, Glycine max
gcagattatcatgctgcagctcgtgcaattggtggatgtcctatttatgttagtgacaagccaggcaatcacaattttgatcttcttaagaagctggttctcccggatggttcggttctccgtgctcagttacctggcaggccaactcgtgattctctatttgtggatccagccagagataggactagcttgctcaaaatatggaacctgaacaaatgctctg

SEQ ID NO: 134147 - DNA, 220 bp, Glycine max
acaacacggcagttaagttattagaatctgtgttgtgttgtgttgtgttgagcagagagagagagtgagggataagaagagaatagggttagggttagggttagggttagggtttgattgaggatgccgaagaacaagggaaagggaggtaagaacaggaagaggggaaagaacgaggcggacgacgagaagcgggagctggtgttcaaggaggacgggc

SEQ ID NO: 134148 - DNA, 222 bp, Glycine max
tgctgattttatcatcaccagtacataccaggagattgcaggaacgaaaaatactgttggccagtatgagagccacgctggttttactcttcctgggctctatagggttgtccatggcattgatgtttttgatcccaagttcaatattgtctctcctggagctgatatgtcaatatatttcccctactctgaaaagcagaacagacttacagccctgcatgg

SEQ ID NO: 134149 - DNA, 221 bp, Glycine max
ctttatttgagcctttcatataaatatcatggcttcgagggaggtttcggttttggtgatagcgatgatgttgtttgccatgaactgtaactgcactagtgttggccacatgccttcaaccaaagaggaaggtcacgattttcaggaggctaaagccaagacaacacaaactgcgaacaaggccatggaaactggtaaagatgggaaagaagccgcagagt

SEQ ID NO: 134150 - DNA, 221 bp, Glycine max
gaggaattttagtggacaaaactggagattggatcacacttatacaaaattctccaattagtaacttgttgagagttgctgcttggaagaaaggctgtttaatggttaagattgtgatgtctggaaatgcagcagtcaaaaggagtgattgggcctcattggtacaagtctttttaacaaacagcaacagtacagagcattttgatgcttgtaagtggaca

SEQ ID NO: 134151 - DNA, 220 bp, Glycine max
ctcaggtgcgtcctgcaacaactctgttggctgatgggtgtacatatttgtatgctatggtgcatgatagttcagtgtctacaataccaggtgattttatcattggtgttaagttgacaaccataaacaatatgtgtgcatatgggctcaatcctggtatttcaggttctcgtcttttgggcaccattcctcagtctatttcacagcaaactgtttggaa

SEQ ID NO: 134152 - DNA, 219 bp, Glycine max
ctttgttcactcttcttctcttgcggctagggttttagcgacttcttctagatttaaggaagatgggtaaggaaaaggttcacatcagtattgtggtcattggccatgtcgactctgggaaatccactaccactggtcacctgatttacaagcttggaggcattgacaagcgtgttattgagaggtttgagaaggaagctgctgagatgaacaagaggt

SEQ ID NO: 134153 - DNA, 223 bp, Glycine max
caagtttttggatgagaagcttcgtgcaggtaataagggtacttctgaagaggaactggaggctacacttgataaagtcctggtgttattcaggttcattcagggcaaggatgtatttgaagcattctataagaaagatcttgctaaaagactgcttttaggaaagagtgcttctattgacgctgagaaatctatgatctccaagttgaagactgagtgtggc

SEQ ID NO: 134154 - DNA, 221 bp, Glycine max
caagtacttccttacaatcaaaaccaacaacaactatggcaagttatcaaaagcactacgatgatcagggtcgcaaggttgacgagtatggcaacgttgagaagcaaaccgacgaatacggcaaccctgttcatgctgctagtgtcacctatgtagccaccagaactgctgctggtggttacagtgatgacattaataagcaacatgataccaccaatgcc

SEQ ID NO: 134155 - DNA, 220 bp, Glycine max
cactcactcactcactcactcactcactcgcaagcaaaaagaaagaatcccaggcgaggagaaagatggaggggaaggagcaggatgtgtcgttgggagcgaacaagttccccgagagacagccgattgggacggcggcgcagagccaagacgacggcaaggactaccaggagccggcgccggcgccgctggttgacccgacggagtttacgtcatggtc

SEQ ID NO: 134156 - DNA, 218 bp, Glycine max
ggcttatggtggatacctaggcacccagagacgaggaagggcgtagtaagcgacgaaatgcttcggggagttgaaaataagcgtagatccggggattcccgatataggtcaacctttcgaactgctgctgaatccacgggcaggcaagagacaacctggtgaactgaaacatcttagtagccagaggaaaagaaagcaaaagcgattcccgtagtagc

SEQ ID NO: 134157 - DNA, 219 bp, Glycine max
gcgaggagaaagatggaggggaaggagcaggatgtgtcgttgggagcgaacaagttccccgagagacagccgattgggacggcggcgcagagccaagacgacggcaaggactaccaggagccggcgccggcgccgctggttgacccgacggagtttacgtcatggtcgttttacagagcagggatagcagagtttgtggccacttttctgtttctctac

SEQ ID NO: 134158 - DNA, 221 bp, Glycine max
cattaaagaacaacaacagaagcagaaacaggaagaggaacctttggaagtgcaaaggtacagagctgaattgtctgaagacgatgtatttgtaattccagcagcttatccatttgtcgtcaacgctacctcaaacctcaatttccttgacttttggtatcaatgctgagaacaaccagaggaacttccttgcaggcgagaaagacaatgtggtaaggcag

SEQ ID NO: 134159 - DNA, 224 bp, Glycine max
gcgaggagaaagatggaggggaaggagcaggatgtgtcgttgggagcgaacaagttccccgagagacagccgattgggacggcggcgcagagccaagacgacggcaaggactaccaggagccggcgccggcgccgctggttgacccgacggagtttacgtcatggtcgttttacagagcagggatagcagagtttgtggccacttttctgtttctctacatcac

SEQ ID NO: 134160 - DNA, 217 bp, Glycine max
cttctgccaaaaccaatgccaccacccattctctagtttctaccacactctatttcaacaaccatgtcactatacgacgccgctttcgtcgacacagagctctccaaacgcacttccatcttcggcctccgcctctgggtcgtcatcggcatcctcgtcggatccctcatcgtcatcaccctcttcctcctctccctctgcctcacctcccgccgcc

SEQ ID NO: 134161 - DNA, 218 bp, Glycine max
gactggctttcctttggttgatgcaggaatgagagaactttggcaaactggctggattcacaacagaataagagtaatagtttccagttttgctgtgaaaatgttgcttctaccctggaaatggggaatgaaatatttctgggacacacttcttgatgctgaccttgaaagtgatatcttgggttggcagtatatctcaggaggcttaccagatggcc

SEQ ID NO: 134162 - DNA, 219 bp, Glycine max
gctgaatttccatcagccaaacctccaattggtgtcttttttgcagcagttgctcctcgcctgcagcctagattttattcgatctcctcatctccaagaatggtgccaaacagaattcatgttacctgtgcattagtacatgagaaaatgcccaccggaaggattcacaaaggagtgtgttcaacatggatgaagaattctgtaccattggagaaaagc

SEQ ID NO: 134163 - DNA, 216 bp, Glycine max
ggagaggttggagcatttggtgaaggctgggttgaatgttgtggtgttggatagttctcaagggaactcaatttatcagttggagatggtgaagtatgtgaagagggtgtaccctgagcttgatgtgattggggggaatgttgtgactatgtaccaggctgagaatctgattcaggctggggttgatgggttgagggttggaatggggtctgggtc

SEQ ID NO: 134164 - DNA, 217 bp, Glycine max
atcacacacaactacaagaaagaacttccttataaccaaaaccaacaacaactatggcaagttatcagaagcactacgatgatcagggtcgcaaggtcgacgagtatggcaatgttgagaggcaaactgacgaatatggcaacccggttcatgccactagtgtcacttatgtagccaccaaaagtgttggtggctacaatgatgacgctaataagca

SEQ ID NO: 134165 - DNA, 219 bp, Glycine max
gagtaatcgagaaagagaagaagcatatatatcaaaatggctgcagagatggagagggagtcattgataactgaagctcctaatgcaccagttactgcacagagaagggtcagaaatgacttagaaaattctctaccaaaaccatacttgccaagagcattgaaagctcctgatacgggtcacccaaatggaacagcaggccacaggcaccacaactta

SEQ ID NO: 134166 - DNA, 225 bp, Glycine max
ccgagctagctagctagcaagcaagcacagagatggaggcaaagcgaggccatgccctcatgtgcttggcacgtgtttcactcttcctctgcgctctaaccctatccgctgctcacggaagcaccacggttcaagacatcgcgagaaagttgaaactcggggacaacgagcttctgcgcacggagaagaagttcaaggttttcatggagaattacgggaggagct

SEQ ID NO: 134167 - DNA, 255 bp, Glycine max
attaccacacgaagtgatgtagcgttgccattctcatcctcttctttctctctctaccattgccatggatccctacaagcaccggccatccagcgccttcaattctcccttctggactacaaattctggtgctcctatttggaacaacaactcctctttaaccgttggagctagaggtccaattctgctggaggattatcatcttgtggagaagcttgcaaattttgatagggaacgtatcccagaacgtgttgt

SEQ ID NO: 134168 - DNA, 248 bp, Glycine max
agaacctaagtgagaaacaaagaaaggaaataattgatctttgaaaatgcagggaggaaagaaagctggagagtccatcaaggaaacagctgcaaacattggtgcttctgccaaggctggcatggagaaaaccaaggccactgtccaggagaaggcagaaagaatgacggcacgtgatccgatgcaaaaggagttggcaacccagaagaaagaggcaaagatgagccaggcagagctggacaagcagg

SEQ ID NO: 134169 - DNA, 247 bp, Glycine max
cttagaaagaaaaaaacttaaatcaaaatacttaatagcatggcgatacatttatacaaaacttctaccccaagcacacgcaatggagccgtagacagtcaagtaaaatccaatccacgaaatcatttgatctatggacagcatcgttgtggtaaaggccgtaatgccagaggaatcattaccgcaggcatagagggggaggtcataagcgtctataccgtaaaattgattttcgacggaatgaaaa

SEQ ID NO: 134170 - DNA, 248 bp, Glycine max
cacacacaactactacaagtacttccttacaatcaaaaccaacaacaactatggcaagttatcaaaagcactacgatgatcagggtcgcaaggttgacgagtatggcaacgttgagaagcaaaccgacgaatacggcaaccctgttcatgctgctagtgtcacctatgtagccaccagaactgctgctggtggttacagtgatgacattaataagcaacatgataccaccaatgcctacggcgtagac

SEQ ID NO: 134171 - DNA, 245 bp, Glycine max
tgtgaattatggaatcctgcttgcacaaaagcaatgactatgtcatttaatccaaatccgtgttctgatgcatggagtttggaatttctgaagcgtaccggatttcattgtgatatcatttgtgtcactggatggactgccactccaatgcaggatgttcaggttacaattgattggtttatttcctctcaggaatgtgttcccaggacctattgtgttttaaatccacaaaatccttttgtgtt

SEQ ID NO: 134172 - DNA, 247 bp, Glycine max
gaaagaggcaaagatgaaccaggcggagctggacaagcaggcggcgcgtcagcataacacggcggccaaacagtccgccaccacggctgggcacatgggacatggccaccacaccaccggaaccgggactggaaccgccacgtattccaccaccggggaatatggtcagcccatgggggcccaccagacgtcggcaatgcctggccatggaaccgggcagcccacgggccatgtcaccgaagagtgg

SEQ ID NO: 134173 - DNA, 249 bp, Glycine max; identical to SEQ ID NO: 112676

SEQ ID NO: 134174 - DNA, 251 bp, Glycine max
gttttctggttgcggttggccaccttccattatacttgagggagattcttcaagggcacaagctaccttagaggctgaaattgcggctgcgtataatttgaattctggcatttgctgcatctgaatatctctgaaactttgtaagtcaacatggctttacagaacattggtgctgcaaacagtgatgatgccttctacaggtataagatgcctaggatgattaccaaaattgagggcagaggtaacggcat

SEQ ID NO: 134175 - DNA, 253 bp, Glycine max
ggctttcataagggacttgaggactgaattcaaaggtttggatgatgtctatgtgtggcatgccctttgtggctcgtggggtggtgtgaggccaggagccacacacttgaattccaaaataacaccttgcaaactctcccctggccttgatgggaccatgcaagatcttgctgtggttaaaatagtggaaggttccataggacttgttcatcctgatcaagctaatgacttgtacgattccatgcactcttat

SEQ ID NO: 134176 - DNA, 247 bp, Glycine max
cgctgatatatgtgaaactctatacataccagatctttagggcgttatcttatattcatcgttgtattggagtctgccatcgggatatcaagcctcaaaatctattggtcaatccacacactcaccaggttaaattatgtgactttggaagtgcaaaggttttggtaaaaggcgaaccaaatatatcatacatatgttctagatactatagagcacctgagctcatatttggcgcaactgaatatac

SEQ ID NO: 134177 - DNA, 246 bp, Glycine max
aaacagaaaaaatcaccctagaacctggagacatgatacacataccagcaggcacaccactgtacatcgttaacagagatgagaatgagaagctcctccttgccatgctccatatacctgtctctactcctggaaaatttgaggaatttttcgggcctggaggacgagacccagaatcggtcctctcagcattcagctggaatgtgctgcaactgcgctccaaaccccaaaaggaaagttagaaag

SEQ ID NO: 134178 - DNA, 246 bp, Glycine max
gaaaatagcagttaagatcacaaatttcaccaatatccctgctgatgagaaccaaattgccgcatatttagtaaaaaatggtccacttgctatgggcgtgaatgcaattttcatgcaaacatacattggtggtgtctcatgccctctcatatgtagcaagaaaaggctgaaccatggtgtgttacttgtgggatatggtgcaaaaggcttctcaattcttaggcttggcaacaaaccatactggat

SEQ ID NO: 134179 - DNA, 244 bp, Glycine max
ggttgctatgaggtttcatcagtaccaggtggtgggaagggctcttcctaccgaatccgatgagcatcctaagatctaccgcatgaaactctgggcaactaacgaggtccgtgccaaatccaagttctggtattttttgagaaaattgaagaaggttaagaaaagcaatgggcaagtgctagccataaatgagatttttgagaggaatcctaccaagattaagaattatggaatttggctgcgg

SEQ ID NO: 134180 - DNA, 245 bp, Glycine max
gcaagttttggtggctctaacatagatccaactgcctgggaggataaaaaatgcaaaggggaatcaaggtttccagctcaggtagtagaatataggactttgaaatggaggagaccatgtatgagctgtatctgtacatcaatgaatacaacagaggatttgtgcctcctcttccttgtaggtaagaatccgtgtcaggaatctctgcaaggcattggaagaggattctatcaggccagtgttgc

SEQ ID NO: 134181 - DNA, 243 bp, Glycine max
gaccgagctagctagctagcaagcaagcacagagatggaggcaaaacgaggccatgccctcatgtgcttggcacgtgtttcactcttcctctgcgctctaaccctatccgctgctcacggaagcaccacggttcaagacatcgcgagaaagttgaaactcggggacaacgagcttctgcgcacggagaagaagttcaaggttttcatggagaattacgggaggagctactccacagaggagga

SEQ ID NO: 134182 - DNA, 243 bp, Glycine max
caagaaccacaacctttggaagcttatgatcttgtctctgatctttctgtggatggcaagggtatcccctgggacaaacaagatcctggggaagaggctatcgaatcactctcagcagaactcaagctttatgggaagagaggagtctataaagataccaagttgcaggaacaaggtggaaagatatttgaaagagatgggatactatacaactgtgccttctctgtttgtgaccaagggcga

SEQ ID NO: 134183 - DNA, 252 bp, Glycine max
ccttgctctatactacacagtacacacactagaagaataatggcttccatcctccactactttttagccctctctctttcttgctcttttcttttcttcttatccgactcagtcacccctacaaaaccaataaaccttgttgttctacccgttcaaaatgatggttccacagggctccattgggccaacctccaaaaaagaacccctctaatgcaagtaccagtcctggtggacctcaatggaaatcacttg

SEQ ID NO: 134184 - DNA, 249 bp, Glycine max
agcccgcgaatatttactcttttattagcaataaaaatatacagataaatgaagaggtgaaagaaagagagaaaaaaaatcaatgatatagaattctaatatgtaaaggtctatgggttatctcataaaaggtagtgtaataaagcatcaatctaaatcaattcatatctatttatatatgaattaatttataacgtaaacaaattaagagctctgaatcaataaaaactgagaatattgattcacgaa

SEQ ID NO: 134185 - DNA, 245 bp, Glycine max
agatatatacatatatacgagagagtgagtaatcgagaaagagaagaagcatatatatcaaaatggctgcagagatggagagggagtcattgataactgaagctcctaatgcaccagttactgcacagagaagggtcagaaatgacttagaaaattctctaccaaaaccatacttgccaagagcattgaaagctcctgatacgggtcacccaaatggaacagcaggccacaggcaccacaactta

SEQ ID NO: 134186 - DNA, 244 bp, Glycine max
gggcaatattggagagaaggctcaagctgcaaaggagaagacccaggaaatggcccaagctgcaaaggagaagacccaacaaacagcccaagctgccaaggacaagacttgcgacacttcccaagcggcaaaggagaagacccaacagaatacaggagctgctcaacaaaagacctcagagatgggccagtccacgaaggaatcggcccagtcagggaaggacaacacccaagggttcctgcag

SEQ ID NO: 134187 - DNA, 242 bp, Glycine max; identical to SEQ ID NO: 125727

SEQ ID NO: 134188 - DNA, 244 bp, Glycine max
gttgaggttacatggaaatcaaagctcaaagctcagtttccaagccccaacgagtactcatcttttatgggagacttctcaactgcaactggaattgctacattcataatgatgcttctaagtcaatttatatttgacaaatatgggtggggagttgctgccaagatcacccccaccgtcctgcttttgacaggagttggtttcttttctcttatattatttggtggcccaattgctcctgtta

SEQ ID NO: 134189 - DNA, 245 bp, Glycine max
ctttgaacactcatcaccatggccaagcttgttctttccctttgtttccttcttttcagtggctgcttcgctctgagagagcaggcacagcaaaatgagtgccagatccaaaagctgaatgccctcaaaccggataaccgtatagagtcggaaggtgggttcattgagacctggaaccctaacaacaagccattccagtgtgccggtgttgccctctctcgctgcacccttaaccgcaatgccct

SEQ ID NO: 134190 - DNA, 249 bp, Glycine max
attgccttggatgttgccagagggatggagtatctccatactctggctcaccaaagcttcattcacagagatcttaagccgtcaaatatcttgcttgctgatgatttcaaagcaaaagtctccgattttgggttggtaaaacttgctcctgaaggggaaaaagcatctgtagtgacccggcttgcagggacgtttggatatttggcgccagaatatgcagtgacaggaaaaatcactaccaaagcagat

SEQ ID NO: 134191 - DNA, 250 bp, Glycine max
ggaaaaggttcacatcagtattgtggttattggccatgttgactctgggaagtccactaccactggccacctgatctacaagcttggaggcattgacaagcgtgttattgagagatttgagaaggaagctgctgagatgaacaagaggtctttcaagtatgcctgggtgcttgataagcttaaggctgagcgtgaaagaggaatcacaattgatattgccttgtggaagtttgaaaccaccaagtactat

SEQ ID NO: 134192 - DNA, 245 bp, Glycine max
cacacaactacaagaaagaacttccttataaccaaaaccaacaacaactatggcaagttatcagaagcactacgatgatcagggtcgcaaggtcgacgagtatggcaatgttgagaggcaaactgacgaatatggcaacccggttcatgccactagtgtcacttatgtagccaccaaaagtgttggtggctacaatgatgacgctaataagcaacatgatattactggtgtctatcccgagaaag

SEQ ID NO: 134193 - DNA, 244 bp, Glycine max
gaacaagggattctcttcatccaagttcgctagtaggacatattgtaatggcaacagtggaagcatcccatgaagctatggctacggtggccaacaaggcaccaatcactgctgagagaaaggtccctgaggacttggacagcaaactccccaaaccatatttgcctagagctttgagtgcccctgacacagagaatgtgaatggcacgtggggccacaaacacaacgacatgtccgttcttca

SEQ ID NO: 134194 - DNA, 243 bp, Glycine max
gtcaaagtgaagaaattcaaccaagcgcgggtaaacggcgggagtaactatgactctcttaaggtagccaaatgcctcgtcatctaattagtgacgcgcatgaatggattaacgagattcccactgtccctgtctactatccagcgaaaccacagccaagggaacgggcttggcggaatcagcggggaaagaagaccctgttgagcttgactctagtccgactttgtgaaatgacttgagagg

SEQ ID NO: 134195 - DNA, 242 bp, Glycine max
ggcacatcctggtgacaatgtgggattcaatgttaagaatgttgctgttaaggatttgaagcgtggttatgttgcctcaaactcaaaggatgaccctgcaaaggaggctgctaacttcacagcccaagtcatcatcatgaaccaccctggtcagattggaaatggctatgcccctgtcctcgactgccacacttctcacattgctgtcaagtttgctgaactcatgaccaagattgacaggc

SEQ ID NO: 134196 - DNA, 241 bp, Glycine max
attactgtcatccagattgatgaagctgctctaagagaaggtttacctctgaggaagtctgaggaggctttctatctaaactgggctgttcactcatttaggattaccaactgtggtgtggaggacactactcagattcacactcacatgtgctactccaacttcaatgacatcattcactcaatcatagacatggatgctgatgtgatcaccattgagaactctagatcagacgagaagt

SEQ ID NO: 134197 - DNA, 239 bp, Glycine max
gttgtattgaaattttcacaagaggaatttcttacagcttggtcaactcaggtgcgtcctgcaacaactctgttggctgatgggtgtccatatttgtatgctatggtgcatgatagttcagtgtctacaataccaggtgattttgtcattggtgttaagttgacaaccataaacaatatgtgtgcatatgggcttaatcctggtatttcaggttctcgtcttttgggcaccattcctca

SEQ ID NO: 134198 - DNA, 242 bp, Glycine max
agctgtcccagattttaacatgggagccatggaaaacaagagcttgaatattttcaattcaaagcttgtattggcctctccagaaactgcaactgatgcagattatgctgcaatattgggagttattggccatgagtatttccacaactggactggcaacagagtgacatgtcgcgattggttccagcttagcctgaaggaaggtctcactgtttttcgtgatcaggaattttcatctgaca

SEQ ID NO: 134199 - DNA, 245 bp, Glycine max
gaagatatgttgcaactgcggtgacttcagttcatgaaatggagaatggtttcaatatatggtctttcaatggcaagcatctatatcggattctgaaggatcacttctttcagttcttatggagaccaaggccaccatctttcttgactccggagaaagaggaagagattgcaaagaacttgaagaaatacagcaagaaatacgaggcagaagatcaagatgtttccttgctgctgagtgaacag

SEQ ID NO: 134200 - DNA, 249 bp, Glycine max
cacacttcttcgccgtttcagctgaagagccatccgcaggtaagcaatggttaagcataataatgttatccccaatgggcacttccggaaacactggcaaaactatgtgaagacttggtttaatcaaccagcccgaaagaccagaagacggttggaagaaggctgtcaagattttccccaggcctactgctggatctctcaggcctattgttcatggccagactctgaaatacaacatgaaagtcagag

SEQ ID NO: 134201 - DNA, 247 bp, Glycine max
gttacagggtagatgtggatcatgctgggctttcagcaccacaggatctatagaaggaagccaattttcgtgccaacggaaagctcgtcagtcttagtgaacaacagctccttgactgtgacaacaaatgtgacataacagaaaagacttcatgtgacaatgggtgtaatggaggtcttatgacaaatgcctacgattatttgctcgagtctggtgggttggaggaggagtcttcatatccctacac

SEQ ID NO: 134202 - DNA, 246 bp, Glycine max
gtgagagcttctgatgatttttaccctcgtgatcctgcttcccataccatccatatttcgttctgttgcatacaactcactattccttggagaattcatgcaacctgactgggacatgtttcatagtttacacccagcagcagattatcatgctgcagctcgtgcaattggtggatgtcctatttatgttagtgacaagccaggcaatcacaattttgatcttcttaagaagctggttctcccgga

SEQ ID NO: 134203 - DNA, 243 bp, Glycine max
aaacagaggatatatccacgacttgacccggtggtcattatgctagtaattgatcgggagaatgaccgtgcccttttgagcaaacaatcgagatttgtacctagaatgtggagctgcttagcaggttttatagagccaggagaaagcttggaggaggctgtaagaagagaaacgtgggaggagactggtattgaagtgggagaagttgtatatcatagctctcagccatggcctgttggaccg

SEQ ID NO: 134204 - DNA, 241 bp, Glycine max
ggagcttgttgatgtcaagcttggccaagaatatgagcttgttgttacaactcatgccggactttataggtacagagtgggagatatactaaaggtatcaggattcaagaacaaggcccctcaattcagctttgtttgtagaaaaaatgttgccctgagcatagattccgacaagactgacgaggttgagcttcagaacgcaatgaaaaatgcagtgacacacttggagccatttgatgca

SEQ ID NO: 134205 - DNA, 244 bp, Glycine max
gggcaccgaagaagagcgataatacgaggtactacgaaatcctcggcgtctcgaagaacgcttcgcaggatgatctgaagaaggcttacaagaaagccggcaatcagaattcaccccgacaaaggcggttgtcccgagaagtttaaagagctggcacaagcatatgagggtcttagtgaccctgagaagcgtgagatatatgatcagtatggtgaagatgcgcttaaggaaggaatgggtggtg

SEQ ID NO: 134206 - DNA, 239 bp, Glycine max
gtgggtggctcctgaggacaaggcgagtttatggtcacaacttcattatgtttcgtgcaataacctggaaatgcaagaagcttatcttgtcaatctcgtaaatgtgttacgagaattgtatttgcacagtccagaggaagctcgccaattgagaaggaaagctctctctcgtattgaatggctgcaaaaagctgatgtgcctaccatagcacagattgaagagttccattcgatgcaga

SEQ ID NO: 134207 - DNA, 239 bp, Glycine max
taatgatgacaccaatagacatcatggaactaccggtgtctatggtatagacaccgataggcaacaacatgggactactggtggctatgccggtgacactggtaggcaacatgggaacatcggtggcccttactatggaaccaacaccgcagacaccggtactggtcccagaagtggaaccacgggcggcaccggttatggaggcactggtggcactgattatggaacaactggtggca

SEQ ID NO: 134208 - DNA, 242 bp, Glycine max
agtttaccgtatgttattatagtttccaaaggcacgcagcgagtttaggcgcggcgggatcatcacgagattgcaaaatgaagttcaacattgcaaatcccaccactgggtgccagaagaagctggaaatcgatgacgacctgaagcttcgggcattttgggacaagaggatctcccaggaggtccttggtgacgccctgggtgaggagtttaaaggatatgttttcaaaatcactggtggg

SEQ ID NO: 134209 - DNA, 243 bp, Glycine max
ttttgaaattgctggtaatactcttatgccagctttttctgttccacaggctactgccagatcttctgaaaatgcggaatcctctgcatgatctggaatttgtgttttctttcgcttgttcgtttgtttaattcaataaaggaaattaggcatgaccctcttgttgagtatgctctgcctatttgagaatttccacacctcttttaattgtcgtaatgatgtgtgaagtgtgtgttattttaa

SEQ ID NO: 134210 - DNA, 247 bp, Glycine max
tttgaacattcacccaatttgcagagttccaagttatatacatacactgcataattaagagaaaatgtctctgattccaagtttcttcggtggccgaaggagcagtgttttcgaccctttctccctcgatgtgtgggagccctttaaggattttccatttcccagttctctttctgctgaaaattcagcctttgtgagcacacgagtggattggaaggagacaccagaagcacacgtgttcaaggct

SEQ ID NO: 134211 - DNA, 246 bp, Glycine max
aaaagcaaagatcaaacaaaccaaggacgagaacacgatgttgcttgaacttgcacttggtttattggttttggctctgtttctgcacttgcgtcccacacccactgcaaaatcaaaagcacttcgccatctcccaaacccaccaagcccaaagcctcgtcttcccttcataggacaccttcatctcttaaaagacaaacttctccactacgcactcatcgacctctccaaaaaacatggtccctt

SEQ ID NO: 134212 - DNA, 241 bp, Glycine max
tgccattttcctttgagtgcaagattaattaatgtctgattttatgtattggtgtgttgctgcagacataccctaatcctttgcaagacaaccctgcttattcagttgttaagcagtattttgtgcatgttgatgacagcgttcctcaaaaggtcgttgttcacaaagatggtgcaagaggggtacattttaggcgtgctgggcctcgtcaaaagatgaagttcaggctgctattgttact

SEQ ID NO: 134213 - DNA, 241 bp, Glycine max
catcctcctctgtctctctctctccaccattgccatggatccttacaagctccggccatccagcgccttcaattctcccttctggactacaaattctggtgctcctgtttggaacaacaactcctctttaaccgttggagctagaggtccaattctgcttgaggattatcatcttgtggagaagcttgcaaactttgacagggaacgtatcccagaacgtgttgtccatgccaggggagct

SEQ ID NO: 134214 - DNA, 240 bp, Glycine max
aaacaaagaaaggaaataattgatctttgaaaatgcagggaggaaagaaagctggagagtccatcaaggaaacagctgcaaacattggtgcttctgccaaggctggcatggagaaaaccaaggccactgtccaggagaaggcagaaagaatgacggcacgtgatccgatgcaaaaggagttggcaacccagaagaaagaggcaaagatgagccaggcagagctggacaagcaggcggcgc

SEQ ID NO: 134215 - DNA, 238 bp, Glycine max
gaactgggcaatggaaagccaaagttctattcaactccagagataattgctttctgccgaaaatggcgccttccaacaaatcatgtgtggttgttttcaacaagaaaatcagcagcttctttcttcgctgcctatgatgccttatgtgaggagggtactgcaacttctgtatgcaaggctcttgatgaaattgcagacatctctgtaccaggttcgaaagaccatgtaaaagcccaag

SEQ ID NO: 134216 - DNA, 247 bp, Glycine max
ccttggtaccgaagccatagcccttgggcgcgtaggagatgatttttggtgcactgatccctctggagatccaaatcacgtattggctccaagggtgtcacatggtgcactgtgcctacaacagcttgtggatggggaattttattcagccggattgggacatgttccagtccactcacccttgtgccgaattccatgcagcctctagggccatctctggtggaccagtttacgttagtgattgtgt

SEQ ID NO: 134217 - DNA, 248 bp, Glycine max
cgaaggggaagacaagggagccattgtgacagtgaaaggaggtctgagcgtgataaaaccacccacggacgagcagcaacaaagaccccaggaagaggaagaagaagaagaggatgagaagccacagtgcaagggtaaagacaaacactgccaacgcccccgaggaagccaaagcaaaagcagaagaaatggcattgacgagaccatatgcaccatgagacttcgccacaacattggccagacttcat

SEQ ID NO: 134218 - DNA, 243 bp, Glycine max
cttccaaagtcatccataggcttcctgttccttatttaggtgacgaattgcatcacacaggctggaattcatgcagctcttgccatggagacccctcagcagaccgacgatttctcatcgtacctgcactcgtatcaggtcgagtatatgtggttgatgtgaaaacaaatccaagggctccatctttgcacaaagttgtcgagcctgccgatatcatacagaagactggattagcttatccac

SEQ ID NO: 134219 - DNA, 245 bp, Glycine max
cagcaaaggacacaattggtagtgtagaccacattactacaccacttgctgaaaaggccaaagctgctggtagcaccactgctcagtatgttggggagaaagcagcacaagccaaagatgctactgtgcaaactggcaagagtgctgcaaaagttgcctcagatttgagggacaaggctttggccacagggtggagtgctgcacattattctactgagataactgtggagggaaccaaggctgca

SEQ ID NO: 134220 - DNA, 242 bp, Glycine max
caaaattgaactgtaattgtagtagtagacagtagcaccatgagccaggaacagctcaagaaacctcaaggggagcaggaccccatcaaatacggcgacgttttcaaagtctccgacgaactcgctttcaaacccatcgcgccaagagacgcagctctcatgcaagccacggagaaccaagcattgggccaaactcaaaaaggaggtcccgcctcggtgatgcaatccgccgcaaccgaaaa

SEQ ID NO: 134221 - DNA, 243 bp, Glycine max
cggctcgagcaaaacagtaaagctaacttcaacacctttaattttctaaaagtaattcagcggctgaataccaagcggagaagatgagtcaggagcagccacggcgtcccaaaggccaaaaccccatcaaatacggcgacgtttttgtcgtctccggcgaccttgcacagaagcccgtcgcgccggaagatgctgccatgatgcaaagcgcggaaactcgagtgctcggacaaacccaacccg

SEQ ID NO: 134222 - DNA, 248 bp, Glycine max
aaagactttctctttacaaattttgtaactttcaagactcagctaataaacatcaaaagatgtctctgattccaagtatttttggtggccgaaggagcaacgtgttcgatcctttctcccttgacgtgtgggaccctttcaaggattttcattttcccacttctctttctgctgaaaattctgcatctgtgaacactcgtgtggattggaaagaaaccccagaagcacacgtgttcaaggctgatatt

SEQ ID NO: 134223 - DNA, 249 bp, Glycine max
tctacacgaatcggctcgaggttaacactcttcttcatcgtcgtcgcaatggcacgtgtgatccgtgcgcacgtaagggagcaggctcggtcttcaagtcccacacgcaccaccgcaagggccctgcacgcttccggagcctggacttcggggagcgcaacggctacctcaagggcgtggtcaccgacgtcatccatgaccctggccgcggcgcgccgctcgccaaggtcgccttccgccaccctttca

SEQ ID NO: 134224 - DNA, 247 bp, Glycine max
acgcggagaagaagccggcagagaaggccccagcggagaagaagccgaagcgaacgaagaagatatcgaaggaaggaggaagcgagaagaagaagaagagaacaaagaagagcgttgagacctacaagatctacatcttcaaggtgttgaagcaagtgcaccccgacatcgggatctccagcaaggctatggggatcatgaacagtttcataaacgacatcttcgagaagctcgcccaggagtcatc

SEQ ID NO: 134225 - DNA, 243 bp, Glycine max
cacaactacaagaaagaacttccttataaccaaaaccaacaacaactatggcaagttatcagaagcactacgatgatcagggtcgcaaggtcgacgagtatggcaatgttgagaggcaaactgacgaatatggcaacccggttcatgccactagtgtcacttatgtagccaccaaaagtgttggtggctacaatgatgacgctaataagcaacatgatattactggtgtctatcccgagaaag

SEQ ID NO: 134226 - DNA, 244 bp, Glycine max
gctgaagaaaacctaagcttagaattagaaacaaagaaaagaagaaaggaaagaattgatcgttgaaaatgcagggaggaaagaaagcgggagagtccattaaggaaacagctacaaacattggtgcttctgccaaggctggcatggagaagaccaaggccactgtccaagagaaggcagaaagaatgacagcacgtgatccggtgcaaaaggagttggcaacccaaaagaaagaggcaaagat

SEQ ID NO: 134227 - DNA, 238 bp, Glycine max
ctctctctctaacccaagacagtctctttctcttcgaagcaagacggtagctttccgacccggaaaacgccctctcctcctgggactcctctgccgccaacccatgccggtggcgcggcgtcacctgtgaccctctcaccgacaccattactgacgttagcctcccctccgtctgcctctccggcccctttcccgtcatcctctgccggatcgtctccctaagcaccctcaacgtcag

SEQ ID NO: 134228 - DNA, 241 bp, Glycine max
tagccttggccgacaggtccgggtaatctttgaaatttcatcgtgatggggatagatcattgcaattgttggtcttcaacgaggaattcctagtaagcgcgagtcatcagctcgcgttgactacgtccctgccctttgtacacaccgcccgtcgctcctaccgattgaatggtccggtgaagtgttcggattgcggcgacgtgagcggttcgctgcccgcgacgttgtgagaagtccactg

SEQ ID NO: 134229 - DNA, 240 bp, Glycine max
attcaaaccttgctctatactacacagtacacacactagaagaataatggcttccatcctccactactttttagccctctctctttcttgctcttttcttttcttcttatccgactcagtcacccctacaaaaccaataaaccttgttgttctacccgttcaaaatgatggttccacagggctccattgggccaacctccaaaaaagaacccctctaatgcaagtaccagtcctggtgga

SEQ ID NO: 134230 - DNA, 242 bp, Glycine max
tagaaagggttgacggacagagaacccaccttttgttgtattgcagatccatccgctctgccaccaggtgaatggaaggaagtggcggtggcggtgcttcaccgtctgcaccggtgaagcagtatttgcacgatttctcgaagctgtttcagtactatctggataaatccactccacattccacgtacagatggattgggactttcgtgatagcatccatctacgttttgcgcgttggatat

SEQ ID NO: 134231 - DNA, 242 bp, Glycine max
agaaaacctaagcttagaattagaaacaaagaaaagaagaaaggaaagaattgatcgttgaaaatgcagggaggaaagaaagcgggagagtccattaaggaaacagctacaaacattggtgcttctgccaaggctggcatggagaagaccaaggccactgtccaagagaaggcagaaagaatgacagcacgtgatccggtgcaaaaggagttggcaacccaaaagaaagaggcaaagatgaa

SEQ ID NO: 134232 - DNA, 246 bp, Glycine max
cttctctcttcaaccctagcttagggtttatgctctaaaaccctcccttttcaggtttattgggagagaaaaatgctcgtattgtttgaaacacccgcgggttttgccctgtttaaagtgctggatgaaggcaagctttctaaagttgaggacttgtggaagaacttttccagtgcagatactgctagacaggtggtcaagttgaaagcattttctaaatttgagaacacttcagaagctctagag

SEQ ID NO: 134233 - DNA, 253 bp, Glycine max
agggtcctagttggcatgactcaacacttcatgaaaagttattctgatcttctcatcaggacgtgccacaggcgcggcgtgcatgctatgggaggaatggcagcgcagattccaatcaaagaagatccagtggctaacgaggtagcactggaacttgtaaggaaggacaagcttagagaagtgaaggcagggcacgatggaacttgggctgcgcaccctggtctcattccagcctgcatggagattttcaaca

SEQ ID NO: 134234 - DNA, 240 bp, Glycine max
tagcgatgcggatgaggcgccactcgatgtttccatttgcctgcatgcctttggtattgtggggtgtggttcgtttagtggtgtcaagtcttgcgaacgtgagggtgcatgagtggtaatcgggatgtttttgttgcacggctccatgcttgcgcatgcaacgtgtgacatgcatccttttcattgtcaccttagccttcgtggcttaggtgctgacgattggttcctgtgttgcctacc

SEQ ID NO: 134235 - DNA, 241 bp, Glycine max
cgatatcttcctcagttctgtggatatcaacgaaggagctcttcttctaccacactccaattcaaaggccatagtgatactagtgattaatgaaggagatgcaaacattgaacttgttggcattaaagaacaacaacagaagcagaaacaggaagaggaacctttggaagtgcaaaggtacagagctgaattgtctgaagacgatgtatttgtaattccagcagcttatccatttgtcgtc

SEQ ID NO: 134236 - DNA, 240 bp, Glycine max
tcatcactacctctgcatttttctctcgctctctgccttccatcaccctcgccatttcccttcccaagatagtagaagatggcagacgctgaggatattcaacctcttgtttgtgacaatggaacaggaatggttaaggctggttttgctggagatgatgccccacgtgctgtgtttcccagcattgtaggtcgtcctcgtcacactggtgtgatggttggcatgggccaaaaagatgca

SEQ ID NO: 134237 - DNA, 241 bp, Glycine max
gctgaagaaaacctaagcttagaattagaaacaaagaaaagaagaaaggaaagaattgatcgttgaaaatgcagggaggaaagaaagcgggagagtccattaaggacacagctacaaacattggtgcttctgccaaggctggcatggagaagaccaaggccactgtccaagagaaggcagaaagaatgacagcacgtgatccggtgcaaaaggagttggcaacccaaaagatagaggcaaa

SEQ ID NO: 134238 - DNA, 242 bp, Glycine max
ggaaatcggtcgtctataccgaataaggaagacggtgatgcagatgctgagggacagaaattttctggttggtgacttcgagatcaacatgtccaagcacgagttcaagtccaagtacggcgaacacatgaagcgcgaggacctcgtcatcaacaaatccaagaaggacaactccggcgaccagatctacgttttcttccccgacgaacccaaggtcggcgtcaagaccatgaagacctaca

SEQ ID NO: 134239 - DNA, 240 bp, Glycine max
gaacaaaacaagattctttagttatatatgtaaaaaaaaatggtttatttataagaatacatattccattctatatcaaaacaaaatataaaaatttggaatagattctatgaaatctcaaaaaatcccgctattcaattattcattaaacatatgaatattagtgcatattattttatcgattagattaaatagattatctatatatatagatagatatctatttgaattgcttcattc

SEQ ID NO: 134240 - DNA, 244 bp, Glycine max
agttgcagaccgagctagctagctagcaagcaagcacagagatggaggcaaagcgaggccatgccctcatgtgcttggcacgtgtttcactcttcctctgcgctctaaccctatccgctgctcacggaagcaccacggttcaagacatcgcgagaaagttgaaactcggggacaacgagcttctgcgcacggagaagtagttcaaggttttcatggagaattacgggaggagctactccacaga

SEQ ID NO: 134241 - DNA, 241 bp, Glycine max
gtgattgattgtgacgaaatctgacaatgaagcgtggagcattgttgtcagtgcttgcctgcgccttcgcggcggtgatctgggcagcgaacggcgacgacaacctcgtcccgcctcgccgggaagtgtacggcaatgggcgaatattcgacatcagtcatcggtaccaacccgagatgccggaatgggaatcgaatgacggcatagggcagttcctgtggcttcccaagagcatgaagaa

SEQ ID NO: 134242 - DNA, 239 bp, Glycine max
gttaaatttcactaaaatagtttcattagcacccgaggtattataagacgaaactgtgctatggatacattatttttttgtgaaatagattaattaatctattttatctaacatatatcccttttgtagtaattattagaatttgtagtaattattataagtattagaagcagcaattcttatttatttcagattaatacttgataacctaaacaatatatctatatatagaatataga

SEQ ID NO: 134243 - DNA, 240 bp, Glycine max
cttatcaccccaatgacccattcgtaacaactttactttatttagtattcctttttttatatttagtattcctaaaaaaaaaatgcaatataataaaaataaatcatttttaacacgataagctaattcttacgtttccacactaaagttagatctatgattttattatttctccattttatgcccattggtgttccaagagtaccctttcgaagccctggggaagaagatgcatcttgg

SEQ ID NO: 134244 - DNA, 240 bp, Glycine max; identical to SEQ ID NO: 134214

SEQ ID NO: 134245 - DNA, 239 bp, Glycine max
atagaacatgagcatataaatggataccctttatattatctatctttatattatctataaagggtaaagatatccgatgtgaatctatttgtttagttttctatcggtatgtatataggtgaataatccaacatgcctttttgtgaagtaaaaaaactaccctcgatccatgcctcaaaagggttgataataagtataaaaaatcaatgtattcgtgataaaacccttctgcgtttttt

SEQ ID NO: 134246 - DNA, 238 bp, Glycine max
tctcgagcgaatcggctcagaatttccatggcttctgcgagatgttgaataccgatgctttgttggtgggctcgcttgggccactgacaactacgatctggagaaagccttctctcagtacggtgacgtcgttgaatcgaagattatcaacgatcgtgagactggaagatccaggggatttggatttgttaccttcgcctccgaggattcaatgagggatgcgatcgaagggatgaac

SEQ ID NO: 134247 - DNA, 238 bp, Glycine max
aaagagagaaatttgagaatggctaatctcattggctttaatcttgaaactaaacctgaaagcagagaaatgctatcaaggtcatcacttcttgctgaactggcatccaagggtgtgatgtcttgtgtgactcaggaagtgaaggacatttaccatcttttggaacatgagttttatccctctgatcttgcattaaaagcgctgcccttaataactaaaatctctaagttagggggta

SEQ ID NO: 134248 - DNA, 240 bp, Glycine max
aaacaattcaattcaatctgcctcgatcatggagaggaaaacatttgggtttttgttcttgctcctccttgtcttagcttctgatgtgacggtgaagagagcagaggcgaaagattgcttgacaaggaggcacgggttccagggtagatgcttattcgacaggcaatgtgcacatgtgtgcaggagcgatggtttcatcggtggtcagtgccgaggccctcttcgcaaatgcttttgcag

SEQ ID NO: 134249 - DNA, 245 bp, Glycine max
gatcaatgcatatcctagcgtggaccttgtgatggacaagcccaatggtcctgtttggagaatctctggtgaggacttgatggtgcaggcacaacctggggtcacgtgtttgggtgttatgaatggaggaatgcaacctagagctgaaattaccttaggggcacgtcagttggaagagaacctggtggtgttcgatcttgcaaggtcaagggttgggtttagcacctcatcactgcactcgcatg

SEQ ID NO: 134250 - DNA, 283 bp, Glycine max
cgatacgtaagctacgctcttcatctggctcgagcttctcatgaatatgccaaatgctgttctttcaatgtggagatattttgttggagatctcgtctttgaagtttctaagatgacttctccctacattaaatgtacagtctctttcttcatagcatttggaaatttggctgatgacaccatcaattttgaggcttttccccacaagctggtgcagtttggagagattcaggaaaaagttgtattgaaattttcacaagaggaatttcttacagcttggtca

SEQ ID NO: 134251 - DNA, 241 bp, Glycine max
gcacgggggtcccagtcccgaacccgtcggctgtcggtggactgctcgagctgcttccgcggcgagatcgggtcgtcgcgtgccggtcgggggacggattgggaacgggcccttcggggcctcttccccgggcgtcgaacagtcaactcagaactcggtacggacaatgtgaatccgactgtttaattaaaacaaagcattgcgatggtccctgcggatgttgacgcaatgtgatttctgc

SEQ ID NO: 134252 - DNA, 236 bp, Glycine max
gacactccttcttctccgcttcctcttcgatcatcgcttcagaatgccgccgaagttcgacccctcccagatcgtcgacgtcttcgtacgcgtcaccggcggttaggtcggcgcggcgagttccctcgccccgaagatcggtcccctcggtctctcccccaagaagatcggagaagatatcgccaaggaaaccgccaaggactggaagggcctccgcgtcagcgtcaagctcaccg

SEQ ID NO: 134253 - DNA, 237 bp, Glycine max
tcagtacccatttttgtactaagaagcatttgttacatttatgtaaccaaaggaaaatcaaaagtacgcaggaggtgaagctcggtggcgaaatcaacatgcaacgcagtgaaagcatgcgactaaaggagaagaaggtgaaggatttgatggttgacaagaagaggctagtggaggtgccgtacatggcgtccctggcccacacaatgactacactggtggcgaacaaagttgtgg

SEQ ID NO: 134254 - DNA, 240 bp, Glycine max
caagcaacatgatgctactggtgtttatcccggaatagacattggtagagatcatgggactaccggtgtttatggcctaaacaccgacagacatcatggaacttctggggtgaatcccgggatagacacccataaccaacaacatgggactaccgttggttatgctggtgacactggaaggcagcatgggaatacaggtggcctttactatggtaccgacaccgcggacacaggaaccgg

SEQ ID NO: 134255 - DNA, 195 bp, Glycine max
  unsure (1)..(195): unsure at all n locations
attagattagacaattagaaaaaaatattgagacaattatgaattccattgagtttcccttacttgatcaaacaaccaaaaattcagttatttcaactacattaaatgatctttcaaattggtcaagattatccagtttatggccgcttctctatggtactagttgttgcttcattgaanttgcttcattaatag

SEQ ID NO: 134256 - DNA, 234 bp, Glycine max
ggcggcttcccgtcatcgaataatgccgccggcggtattgcgccgccgttggaggtggacgggctgccggagaattttgattggagagagaaaggagctgtcaccgaagttaagttacagggtagatgtggatcatgctgggctttcagcaccacaggatctatagaaggagccaattttcttgccaccggaaagctcgtcagtcttagtgaacaacagctccttgactgtgac

SEQ ID NO: 134257 - DNA, 239 bp, Glycine max
ggttggaggaggagtcttcatatccctacactggggagagaggtgaatgcaagtttgatccagagaaaatagcagttaagatcacaaatttcaccaatatccctgctgatgagaaccaaattgccgcatatttagtaaaaaatggtccacttgctatgggcgtgaatgcaattttcatgcaaacatacattggtggtgtctcatgccctctcatatgtagcaagaaaaggctgaaccat

SEQ ID NO: 134258 - DNA, 240 bp, Glycine max
aacataacaatgtcgttgattccaagtttcttcggcaccgggcgaagaaccaacgtcttcgaccccttctccctcgacgtgtgggacccattccatggcttccccggcaccaccgccctctccgcaccgcgctccgagacggcggccttcgccaacacgcgcatcgactggaaggagacggcggaggcgcacgtgttcaaggcagacctgccggggctgaagaaggaagaggtgaaggtg

SEQ ID NO: 134259 - DNA, 241 bp, Glycine max
ctcgagcgatgttttgtgggtggctcctgaggacaaggcgagtttatggtcacaacttcattatgtttcgtgcaataatctggaaatgcaagaagcttatcttgtcaatctcgtaaatgtgttacgagaactgtatttgcacagtccagaggaagctcgccaactgagaaggaaagctctctctcgtattgaatggctgcaaaattgctgatgtgcctaccatagcgcaaattgaagagtt

SEQ ID NO: 134260 - DNA, 217 bp, Glycine max
gatgaggaagagcagccacagtgcgtggagacagacaaaggttgccaacgccaaagcaagaggagcagaaatggcattgatgagaccatttgcacaatgagacttcgccagaacattggtcagaattcatcacctgacatctacaacgctcacgctggtagcatcacaaccgccaccagccttgacttcccagccctctggcttctcaaactcagtg

SEQ ID NO: 134261 - DNA, 233 bp, Glycine max
cacaactactacaagtacttccttacaatcacaaccaacaacaactatggcaagttatcaaaagcactacgatgatcagggtcgcaaggttgacgagtatggcaacgttgagaagcaaaccgacgaatacggcaaccctgttcatgctgctagtgtcacctatgtagccaccagaactgctgctggtggttacagtgatgagattcataagcaacatgataccaccaatggct

SEQ ID NO: 134262 - DNA, 230 bp, Glycine max
ggcagatgctttcgcaccagctgtagcttctggtttgatatgcggggatggaatatggactcttcctgcttcaattcttgctcttgctggtgttaagccaccaatttgtatgaagttcttgtcaagagcagcagatgcgagggtcgatactttcttagggaattaaggactagtttgaaaattggacttggctataaacttgtgcagccgtagttgaacaaaacaacata

SEQ ID NO: 134263 - DNA, 233 bp, Glycine max
tgaaaatgcagggaggaaagaaagcgggagagtccattaaggaaacagctacaaacattggtgcttctgccaaggctggcatggagaagaccaaggccactgtccaagagaaggcagaaagaatgacagcacgtgatccggtgcaaaaggagttggcaacccaaaagagagaggcaaagatgaaccaggcggactggacaagcaggcggcgcgtcacataacacggcggccaa

SEQ ID NO: 134264 - DNA, 239 bp, Glycine max
tacacacacacacacacactaagaataatggcttctatcctccactactttttagccctctctctttctttctctttccttttcttcttatccgactccgtccccattccccaacaccacactaaccctacaaaacctataaaccttctggttctacccgttcaaaatgatgcttccacagggctccattgggccaacctccaaaaaaggacccctctaatgcaagtaccagtcctggt

SEQ ID NO: 134265 - DNA, 237 bp, Glycine max
tgtcattggtgttaagttgacaaccataaacaatatgtgtgtatatgggctcaatcctggtatttcaggttctcgtcttttgggcaccattcctcagtccatttcacagcaaactgtttggaatcaaatggcaacagtgagaacaccattgaattttgattctagcaagcagagcttttgtcaattttctattgaccttctcggtggaggaattttagtggacaaaactggagattg

SEQ ID NO: 134266 - DNA, 238 bp, Glycine max
cggctgaataccaagcggagaagatgagtcaggagcagccacggcgtcccaaaggccaaaaccccatcaaatacggcgacgtttttgtcgtctccggcgaccttgcacagaagcccgtcgcaccggaagatgctgccatgatgcaaagcgcggaaactcgagtgctcggacaaacccaacccggcggagcagcttccgtcatgcaatctgccgccaccaggaatgaacaggctggcct

SEQ ID NO: 134267 - DNA, 102 bp, Glycine max
actgtacgtagtgtgaagatatagtattgtatgctgcagaatatgattgtctaataaggtggactagctgtaataaaagatatttccaggttgaaaacaaaa

SEQ ID NO: 134268 - DNA, 240 bp, Glycine max
caaggttatcaatgacaggtttggcattgttgagggtttgatgaccactgttcattccatcaccgctacccagaagactgttgatggaccatcagccaaggactggagaggtggaagagctgcttcatttaacatcattcctagcagcactggagctgccaaggctgttgggaaagtcctccctgctttgaatggaaaattgactggtatggcattccgtgttcccaccgtggatgtctc

SEQ ID NO: 134269 - DNA, 242 bp, Glycine max
acaaaattgaactgtaattgtagtagtagacagtagcaccatgagccaggaacagctcaagaaacctcaaggggagcaggaccccatcaaatacggcgacgttttcaaagtctccgacgaactcgctttcaaacccatcgcgccaagagacgcagctctcatgcaagccacggagaaccaagcattgggccaaactcaaaaaggaggtcccgcctcggtgatgcaatccgccgcaaccgaaa

SEQ ID NO: 134270 - DNA, 247 bp, Glycine max
caactactacaagtacttccttacaatcaaaaccaacaacaactatggcaagttatcaaaagcactacgatgatcagggtcgcaaggttgacgagtatggcaacgttgagaagcaaaccgacgaatacggcaaccctgttcatgctgctagtgtcacctatgtagccaccagaactgctgctggtggttacagtgatgacattaataagcaacatgataccaccaatgcctacggcgtagacactgg

SEQ ID NO: 134271 - DNA, 235 bp, Glycine max
agagtgacagctccagccatgaggcagccacagcaagaagaagatgatgatgatgaggtagagcagccacagtgtgtggagacagacaaaggttgccaacgccaaagcaaaaggagcagaaatggcattgatgagaccatttgcacaatgatacttcgccaaaacattggtcagaattcatcacctgacatctacaaccctcaagctggtagcatcacaaccgccaccagccttg

SEQ ID NO: 134272 - DNA, 228 bp, Glycine max
ctcatcgaaccggatattggagttttacttgtcaaactctcagcgggatccatgtttgcacctcatgtgaatccaatatcagatgcgtataccatagtgctgagtggttatcgtgaactgcatatagggtatccatacggaagcaaagcaatgaaaactaaaatcaaacaatgggacgtgtttgttgtgccaagatacttccccttctgtcaagtagcatcaagggat

SEQ ID NO: 134273 - DNA, 234 bp, Glycine max
agagctgagagagcttcgaatcgatactcagaagtagaaagatacacaaatcacaatcgttatggctaggtacgtccgagcaatcaccttgttctcccctgtcggccatctctttcaggtcgagtacgccctcgaagctgtccgcaagggttacgccgccgtcttggtccgcggttccgacaatgttgtcctcggcgtctagaagaaatccaccgccaaactctaagactccag

SEQ ID NO: 134274 - DNA, 230 bp, Glycine max
  unsure (1)..(230): unsure at all n locations
agttntgtcggcagtgcattgattagtaacatgatacgatgttttaagacccaagatgaatcatggagccatgaggttgccatattagtgaaaccattgtaagtgcaaaactcgattcttcctgaaatgcctgggcttataactgattttctgatttctcttgatgatcggtttctgtattttgtaaactggcttcttggggatataatgcagtataacatcgaggacgt

SEQ ID NO: 134275 - DNA, 232 bp, Glycine max
ctcgtgaacatgctctgctttcattcacccttggtgtgaatcagatgatttgctgctttaacaaaatggatgttactacacccaagtattccaaggccagttatgatgaaattgtgaaggaagtctcttcctacttgaagaaagtaggttacaaccctgattagattccttttgttcctatctctggttttgagggagacaacatgatttagaggtccacaaaccttgactg

SEQ ID NO: 134276 - DNA, 234 bp, Glycine max
gggaaatgcttgatatcaggccaggcgaggccttggctgtgatcttccccttgcaactctatcacacagctgatgtgagtgttcatgttagcaacccaagggttggacttttgagcttggtaaggttactttctcccaaggtgaccacatttgtggagcaggaatcaaacacaaacacaaccccttttttcaacaggttcattgaaaccttggattactacttggcaatctttg

SEQ ID NO: 134277 - DNA, 122 bp, Glycine max
aaatggaactcgaatcttttgtgcaattgcccgggaattcagacagttaaatttcattaaaatagtttcattagcacccgaggtattataagacgaaactgtgctatggattcattattttt

SEQ ID NO: 134278 - DNA, 230 bp, Glycine max
atgagaaacaaagaaaggaaataattgatctttgaaaatgcagggaggaaagaaagctggagagtccatcatggaaacagctgcaaacattggtgcttttgccaaggctggcatggagaaaatcaaggccactgttcaggagaaggctgaaagaatgacggcacgtgatccgatgcaaaaggatttggcaacccagtagaaagaggcaaagatgagccaggcagagctgg

SEQ ID NO: 134279 - DNA, 228 bp, Glycine max
gtattggtcaacaattattttgtagccaaggccctcctgctatcattccttcccagcctggatttggctatcaacaacaacttatgcctggtatgaggccaggtgcagcttctgtgccgaatcttttcgtgccaatggttcagcagggacaacagggactgcgtcccggtggaaggcgtccatgtgcagttcagctgtcccagcagccagttcctatgatgccacagc

SEQ ID NO: 134280 - DNA, 230 bp, Glycine max
acacaacctaagcttagaatttgaaacaaagaaaagaagtaaggaaagaattgatctttgaaaatgcagggttgaaagaaagcggtagagtccattaagcaaacagctacatacattggtgcttctgccaaggctggcatggagaagtccaaggccactgtccaagagaaggcagaaagaatgtcagcacgtgatccggtgcaaaaggtgttggcaacccttaagagaga

SEQ ID NO: 134281 - DNA, 191 bp, Glycine max
ctcatagattaagccatgcatgtgtaagtatgaactaattcagactgtgaaactgcgtatggctcattaaattagttatagtttgtttgatggtatcttctactcggataatcgtagtaattctagagctaatacgtgcaacaaacctcgacttctggaatggatgcatttattagataaaaggtcaacac

SEQ ID NO: 134282 - DNA, 229 bp, Glycine max
aaatacctaagcttagaattagtaacaaagaaaagaagaaaggaaagaattgatcgttgaaaatgcagggaggaaagaaagcgggtgagtccattaaggaaacagctacaaatattggtgcttctgccaaggctggtatggagaagaccaaggccactgttcaagagaaggctgaaagaatgatagcacgtgatccggtgcaaaaggagttggcaacccattagaaaga

SEQ ID NO: 134283 - DNA, 228 bp, Glycine max
ctcgagccgcgactcataggcagtggcttggttaagggataccaccggagccgtagtgaaaccgagtcttcacagggcaattgtcactgcttatggacccgaacctgggtgttctatccatgaccaggatgaagcttgggtgaaacttagtggaggtccgaaccgactgatgttgaagaatcagcggatgagttgtggttaggggtgtaatgccactcgaacccagag

SEQ ID NO: 134284 - DNA, 230 bp, Glycine max
aagttaacctaagcttagaatttgaaacaaagaaaagaagtaaggaaagaattgatctttgaaaatgcagggaggaaagaaagcggtagagtccattaagtaaacagctacaaacattggtgctgctgccaaggctggcatggagaagaccaaggccactgtccaagagaaggcagaaagaatgacagcacgtgatctggtgcaaaaggagttggcaacccaaaagaaag

SEQ ID NO: 134285 - DNA, 233 bp, Glycine max
attcttcccaaacatgtttctctctctctctctctctcttgatacctgaaaagcaagtagctaaggaaaacaataacatcatcacataaactcacaaaggtaaaacaaacaaacaaacaaaatgtcttctccaagcatgcggcgagaaatggacttgatgaaactgatgatgattgactacaaggtggagatgattaatgatggaatgcacgagttttatgtgcacttccatg

SEQ ID NO: 134286 - DNA, 234 bp, Glycine max
cgtaactgttgcggatgcttcggatgttgaagattctcctaagtacggcgtgacgtcagtatgcggcaggagaagagacatggaagattccgtttcggtgcggccttccttcactcaaggcttccattactttggcgttctcgacggtcactgttgctctcatgtcgcgactatgtgcaaggagcggttacacgagatcgcgaatgaagagattgacagcgcgcgcgagaattt

SEQ ID NO: 134287 - DNA, 231 bp, Glycine max
attgaactgtaattgtagtaggagacagtagcaccatgtgccaggaacagctcaagaaacctcaaggggagtaggaccccatcaaatacggcgacgttttcaaagtctccgtcgaactcgcttccaaacccatcgctccaagagacgctgctctcatgcaatccacggagaatcaagcattgggccaaactcaaaaaggaggtcccgcctcggtgatgcaatccgccgcaa

SEQ ID NO: 134288 - DNA, 227 bp, Glycine max
cgcattcgtggaattgctgtgggcaatgaagttttgggtggcggtgactattctttgtggggagttcttctgggcgctgttaataatatttacaatgctaccgtgaaacttcatctagatctactggttcagatttctactgcaatctcgtttgcagtgttttcgcagtcctaccctcccttctctgattgatgttgcctatgctgttttggaggatgttggatttg

SEQ ID NO: 134289 - DNA, 229 bp, Glycine max
aggagggcaaacaaggaaggatcagctgggtacagaagtgtaccaggaaatgggatgcaaaggagggttgatcactgtggacaattcaggagaagaacttgctcaagaggtaggcattggcatcgatgagtccaagttcaggactgttaataacaagaaccagaatcagatcgaagaccaggttaagtgataatgtaacacccttcactagcatgtgtagtgtgttctt

SEQ ID NO: 134290 - DNA, 231 bp, Glycine max
tagcaaaccaaccagacattgtcatggacagcttggctgtacatggccttggcctattgcacccaaagaaggttttcaatttctacaacgagctccatgcttacttagcttcttgtggagtagataggagtgaaggttgatgtgcagatcattattgagatccttggtgcgggacatggtggccgagtgtcacttactcgcagctatcttcacgcgcttgaggcttccatt

SEQ ID NO: 134291 - DNA, 189 bp, Glycine max
catttttgtactaagaagcatgtgttacatttatgtaatcaaaggaaaatcaaaagtacgcaggaggtgaatctcggtggcgaattcaacatgcaacgtagtgaaagcatgcgactaaaggagaagaaggtgaagtatttgatggttgacaagaagaggttagtggaggtgccgtacatggcgtccctg

SEQ ID NO: 134292 - DNA, 231 bp, Glycine max
cgtcgtttctacaatggcggatctgaaactctctgagagccgcgatctgacccgcatagagcgcgtgggcgttcactcccacattcgcggccttggccttgactcctccctggagccgcgcgtcgtctcggacggtatggttgggcataccgccgcccgttaggccgccggtgtgatcctccagatgataaaagatggcaaaatcgccggccgtgcagttctcctggccgg

SEQ ID NO: 134293 - DNA, 229 bp, Glycine max
cagcttacactctatttaagataggatgacaagtatgaattctcagagccaagcagtattcagggtttggtgaagaattactcacagtttgtttccttccccatctacacatggcaagaaaagtcaagaactgtggaggtggaagagtaggaagaacccatagaaggggaggaaccaaaagaatagggtgagaaaatgaaggtgaaaatgactaaaactgtgaagtatt

SEQ ID NO: 134294 - DNA, 231 bp, Glycine max
  unsure (1)..(231): unsure at all n locations
agaanctcctccttgccatgcttcatatacctgtctctactcctggaaaatttgaggtatttttcgggcctggaggacgagacccataatcggtcctctctgcattcagctggaatgtgctgcatctgcgctccaatccccaaaaggatagttagaaaggttttttaatcaatagaacgagggaagtattttcaaaataagcagagaacgggtgcgtgcgttggcccccac

SEQ ID NO: 134295 - DNA, 230 bp, Glycine max
aaaactttaagcagatgtctaatgttttgtgggtggctgctgaggacaaggcgagtttatggtcacaacttcattatgtttcgtgcaataacctggaattgcaagaagcttatcttgtcaatttcgtaaatgtgtcacgagaattgtatttgcacagtccagaggaagctcgccaattgagaatgaaagctctctctcgtattgaatggctacaaaaagctgatgtgcct

SEQ ID NO: 134296 - DNA, 228 bp, Glycine max
aaaggattctacccgccgctcgatgggaattgcgctttaaggcgtctcgtagggttaatccgcctcacgatggtcaccaacggtacgtgcctttgggcggccgaggccccctactgctggtttgcaaacggacgtcgggcgcacgcttcgcttctagctcggattctgacttagaggcgttcagtcataatccaacgcacggtagcttcgcgccactggctttacaac

SEQ ID NO: 134297 - DNA, 226 bp, Glycine max
agattttgtttctttgtgtgtgtatggtgatgataacttaattagtgttcatgattatgtcaagccttattttagtggttcttaattgaaaagctttctagctggtcattatatcaccattactgatggtattgacaaaactagtgcaactttgcaatttagaaagttagcagattgtgattttcttaagagacactttaagcagttgtctaatgttttgtgggtg

SEQ ID NO: 134298 - DNA, 188 bp, Glycine max
aatagttcagtgtgtcgtttgaaaatgtcgcagttgctggataaagccaagaacttcgtgtcggagaaggtaaatgatatggtcaagccggagggagttgtcactgacgtggacttcaactgatgtgagaaagataatgtcgagtacttggccaaggtctctgttcgtaacccttattcaacttccat

SEQ ID NO: 134299 - DNA, 188 bp, Glycine max
  unsure (1)..(188): unsure at all n locations
gttgctggaagagcaccgcatgtcgcgtggtgtccggttcgcccccggcggcccttgaaaatccggaggatcgagtgcctcccacgcccggtcgtactcataaccgcatctagtctccaaggtgaacagcctcttgtcgatggaactatgtagngcaatgaagtcggcaatatggatccgttacctcg

SEQ ID NO: 134300 - DNA, 190 bp, Glycine max
agcgggtaacattgcaggacttgttgattgtaaagatgctcctaaaccagataagtagcctgtagaggatttaaagctaattcatgagtggaaatgcagtgtaaggaaggtaataaaaattactctggaaaggctttctctaagatctgacaccgaacttaagctttctgtggcacgaaaaatgaaagat

SEQ ID NO: 134301 - DNA, 227 bp, Glycine max
  unsure (1)..(227): unsure at all n locations
aanaaaagttagggttcacaacttttccttttcctttttcttgcgaatctgaatctaataatcaatcatctattcattattcatcatgtagtcggcgaagaaaatcacgctgaagagttcggtcggcgaggctttcgaggtggaggtggcggtggcgcttgagtcgcagattataaagcacatgatcgaggacgtctgcgccgacagcggcatccctctgccgaacg

SEQ ID NO: 134302 - DNA, 228 bp, Glycine max
  unsure (1)..(228): unsure at all n locations
acntaagtgagaaacaaagataggaaataattgatcttcgaaaatgcagggaggatagaaagctggagagtccatcaaggaaactgctgcaaacattgttgcttctgccaatgctggcatggtgaaaaccaaggtcactgtccaggtgaaggcagaaagtatgacggcacgtgatccgatgctaaaggagttggctacccagaagaatgaggcaaagatgagccaggc

SEQ ID NO: 134303 - DNA, 234 bp, Glycine max
  unsure (1)..(234): unsure at all n locations
atganaaacaaagaaaggaaatatttgatctttgaaaatgttgggaggaaagaaagcttgagagtccatcaaggtaacagctgcaaacattggtgcttctgccaaggctggcattgagaaaaccattgccactgtccatgagaaggcagatagaatgacggcacgtgatccgatgcaaaaggagttggcaacccagaagttagaggcaaagatgagccaggcagtgctggacaa

SEQ ID NO: 134304 - DNA, 232 bp, Glycine max
tctcatttcccttgaaaaggaagcgtgaagcgttttctctctgcattaatttgtttctgcagtctgcaactacttcttcttcatttcttcacaccaatcatgtaccgctttgcaacctccctcgcctccaaagctagaattgctaggagcagcactcaatagattggaagttgggtcagttggtacaggaattatgttgccaaagacattaagtttggtgtggaggcccggg

SEQ ID NO: 134305 - DNA, 230 bp, Glycine max
  unsure (1)..(230): unsure at all n locations
tntatatttccacattccangtgaaccttctagaactataatagaaagaaaccttccattccatggctcnnccgctcgaacataacggcgtttccatnagcggtgactcnnagagatccattcccacgccgtttctcaccaaaacttaccagctcgtcnncgatcacaccctcgacgatgttatttcgtggaacgattctggatcgtccttcatcgtctngaacaccacc

SEQ ID NO: 134306 - DNA, 131 bp, Glycine max
ggcgttttcatcggctgcgtcgtcaatcacgccgtcatcgacggcacctccttctggaatttcttcaacaccttcgctcagctttctagaggagccattaactgcatccgcaatataccggttttccaccg

SEQ ID NO: 134307 - DNA, 226 bp, Glycine max
atgtatttcgtttgttgttttatctaacaaacttctctatatcgtttactttttgaacacaccttacacactactttatttgattctttcatataaatatcatggcttcgagggtggtttctgttttggtgatagcgatgatgttgtttgccatgaattgtaactgcactagtgttggccacatgccttcaactaaagaggaaggtcacgattttcatgaggctaa

SEQ ID NO: 134308 - DNA, 229 bp, Glycine max
aaagaaaggaaataattgatttttgaaaatgcagggagtaaagaaagctggagagtccatcaaggaaacagctgcaaacattggtgcttctgccaaggctggcatggagataaccaaggccattgtccaggagaaggcagaaagaatgacggcacgtgatccgatgcaaaatgagttggcaatccagaagaaagaggcaaagatgagccaggcagagctggacaagcag

SEQ ID NO: 134309 - DNA, 133 bp, Glycine max
cggttcgagtagctagcaagcacgcacagagatggaggctaagcgaggccatgccctcatgtgattggcacgtgtttcactcttcctctgcgctctaaccctatccgctgctcacggaagcaccacggttcaa

SEQ ID NO: 134310 - DNA, 80 bp, Glycine max
tgagaaacaaagaaaggaattaattgatctttgaaaatgcagggaggaaagaaatctggagagtccatcaaggaaacagc

SEQ ID NO: 134311 - DNA, 226 bp, Glycine max
tgcaaaggattctacccgctgctcgatgggaattgcgcttcaaggcgtctcgtatggctaatccgcctctcgagggtcaccaacggcacgtgccttttgggggccgaggctccctactgctggtcggcaaacgtacggcgggcgcccgcgtcgcttctagcccggattctgacttagaggcgttcagtcataatccaacgcacggttgcttcgcgccactggcttt

SEQ ID NO: 134312 - DNA, 227 bp, Glycine max
aaattattaacacttccttagttcaatatggggaagtccttcactctctctctctcttccctttgcttgctactcttgtcgattgcatgctttgctattagctccagccagctcaacgagtgccaactcaactacctcaacgcgttggaacccgaccaccgcgttgagtccgaaggtggtttgattcaaacattgaactctcaacaccctgagctgtaatgcgccgg

SEQ ID NO: 134313 - DNA, 226 bp, Glycine max
tgttagcagattgtgattttctcaagagaaactttaatcagatgtctaatgttttgtgggtggctcctgtagacaaggcgagtttatggtcacaacttcattatgttttgtgtaataatctggaaatgcaagatgcttatcttgtcaatctcgtaaatgtgttacgagatctgtttttgctcattccagaggatgctcgccaattgagaaggaaagctctctctcg

SEQ ID NO: 134314 - DNA, 119 bp, Glycine max
ctagtagtggcagagaaagtcagagaaacagaaactgttaggggaagggttggtcctgaaaatgaaggtgcaagaacaaccgctgttataacttgcacgttggaaaaacgtggtggtac

SEQ ID NO: 134315 - DNA, 188 bp, Glycine max
aacaactactacaagtacttccttacaatcaaaaccaacaacaactatggcaagttatcaaaagcactactatgatcagggtctcaaggttgacgagtatggcaacgttgagaagcaaacctacgaatacggcaaccctgttcatgctgctagtgtcacctatgtagccaccagaactgctgctggtg

SEQ ID NO: 134316 - DNA, 181 bp, Glycine max
tgactttacatattaacgatcgggaatcgtcgaggtgtttattcaaataggtataatccacggaattgctgaaattttagaattcttaaaaatgaatgaattcgagataataactataagtatacgaaaaaaatagaaccctttttttgtaattcctttgatgcaattggagcttatcaat

SEQ ID NO: 134317 - DNA, 225 bp, Glycine max
tcgaaacgctcttcgttatcttttctcagactccgcggcgtagatccgaggagttcgggaaatcctaacccatcatctcaactcaagtcatggctgtacttgcacctgagggatcacagttcgatgctcgtcaatatgattctaaaatgagtgacttactttcatctgatggacaggacttcttcacatcctatgacgaggtttatgatagttttgtcgctatgg

SEQ ID NO: 134318 - DNA, 224 bp, Glycine max
tttgggctttcagcaccataggatctatagaaggagcaattttcttgccaccgttaagctcgtcagtctctgtgaacaacagctccttgactgtgacaacatttgtgacataacagaatagacttcatgtgacaatgggtgtaatggaggtcttatgacaaatgcctacaattatttgctcgattctggtgggttggaggaggagtcttcatttccctacactg

SEQ ID NO: 134319 - DNA, 232 bp, Glycine max
tgggaagcaaggctttaaggcggagcgaatccgtaaagattgcctcagttcggattgttctctgcatctcgggaacatgaagctggaatcgctagtattcgcggatcagcatgccgcggtgaatatgtactcgggccctgtacacaccgcccgtcacaccctgtgaattggtttcgcctgaagcatcggacctatgatcacccatgtcttctgtgtaccaccagtgccacaa

SEQ ID NO: 134320 - DNA, 231 bp, Glycine max
gcgcttgaggcttttattgctagcaattttactgataacggatgcattgtgtgtatgtgtcacaattctgatggactttatcgtgctaagcagacttctattgtgagagcttcttatgatttttacccttgtgatcctgcttcccataccatccatatttcttctgttgcatacaactcactattccttggtgaattcatgcaacttgactgggacatgtctcatagttta

SEQ ID NO: 134321 - DNA, 232 bp, Glycine max
ggaaataattgatccttgaaaatgcagggaggtaagaaagctggagagttcatcaaggaaacagctccaaacattggtgcttctgccaaggctggcatggagaaaaccaaggcctctgtccaggagaaggcagaaagaatgacggcacgtgatccgatgcaaaaggagttggcaaccctgaagaaagaggcatagatgagccaggcagagctggacaagcacgcggcgcgtc

SEQ ID NO: 134322 - DNA, 228 bp, Glycine max
tttcaggaagaaacaagtgcaatggacatccgtacctatggctatcctacaccagcagtgaaaaatattgagtcttactattatgtgccagagggattggatattcggggaagatatgatgcagagacttcaaaaatcctcacaatagatgctttgaaattcgttgctgacttgcaccgtgagttcaggattcatatcaagtattcattagagtgcagcgagaagcaa

SEQ ID NO: 134323 - DNA, 230 bp, Glycine max
gcggctgaatacctagcggagaagatgagtcatgagcagccacggcgtctcaaaggccaaaaccccttcaaatacggcgacgtttttgtcgtctccggcgaccttgcacagaagcccgtcgcaccggaagttgctgccatgatgcaaagcgcggaaactcgattgctcggacaaacctaacccggcggagatccttccgtcatgcactctgccgccaccacgaatgaaca

SEQ ID NO: 134324 - DNA, 231 bp, Glycine max
gaacctaagtgagtaacaaagaaaggaaataattgatctttgaaaatgcgcggaggaaagaaagctcgagagtccatcaaggcaacagctgcaaacattggtgcttctgccaagtctggcatggagaaaaccaaggccactgtccaggagaaggcagaaagactgacggcacgtgatccgatgcaaaaggagttggcaacccagatcatagaggcaaagacgagccaggca

SEQ ID NO: 134325 - DNA, 230 bp, Glycine max
ctgctgttcaggctgcgatcttgagcggcgaatgagacgagaaggttcatgatttattgctgctggctgttacaccactcattctcggtcttgaaatgtctggtggtgtcatgtctgtgctgattccgcggaacacaactattcccccgaagaaggagcagtttttctcaacctattctgataaccagccctgggtgttgatccatgtgtttgaaggagcacgggctaga

SEQ ID NO: 134326 - DNA, 240 bp, Glycine max
tggagagagattgtgaagtagaaatcggtgcaagaaattctccactttatctaaattaattcggtgagtttttgaagacaaaaaatccctagctactcaaaaattgccacagtaggaaggttcgttgcagctcctttgttgtttcttaacttgttcatgtattttattgttcttggctttgctagttggtgcctcaacagtgtcatcaatggccttacttaccaccctatttttggtgga

SEQ ID NO: 134327 - DNA, 239 bp, Glycine max
  unsure (1)..(239): unsure at all n locations
gtttcaatgcttgttctgaagaaatttacagggtntcagacagcttggaaggtaccggatgatcagcttcgggaggagctgcggntatctatatcagagtnggtgattcctgcatatcgctcgtttgtggganngtttaggattcagttacagggaaggcatgtgncggaagtacattaagtctacaccagaggatntagagacctatctnttagatttatttgncggatccccggctg

SEQ ID NO: 134328 - DNA, 234 bp, Glycine max
gttgccaacgccaatgcaaaaggagcagaaatgtcattgatgagaccatttgcacaatgagacttcgttaaaacattggtcataattcatcacctgacttctacaaccctcaagctggtagcatcacaaccgccaccagccttgactttccagccctctggcttctcaaactcagtgccctgtatggatcactctgcaagaatgctattttcgtgccacactacgccctgaacg

SEQ ID NO: 134329 - DNA, 233 bp, Glycine max
gcacgtcgcgtggtctccggtgcgccccggcgcccttgaaaatccggtcgaccgagtgcctcccacgcccggtcgtactcttaaccgcatcaggttgccaaggtgaacagcctctggtcgatggaacaatgtaggcaagggaagttggcaaaatggatccgtaacctcgggaaaagtattggctctgaggtctgggcacgggggtcccagtcccgaacccgtcggctgtcggt

SEQ ID NO: 134330 - DNA, 236 bp, Glycine max
caaactcgttgtgtctgcagctgcacagatttccctcttctctgtgcctctgcgagaacgcgcgtttggtttcaattcaattgcgggaggtaaagctaagaaggaaaaggggatgccccatcagcagcagaagcacatgccctacctaggcggaatatcgttccacaaatcaaagggtcagcacattctcaagaaccccttgctcgtcgattccattgtgcagaaggccggcgtca

SEQ ID NO: 134331 - DNA, 233 bp, Glycine max
aaaattccacttgtcatggctggccgtagacctggtgatgctgaaattgtttatgcatcaacaaagtaagcggaaagagagtttaaatggaaggcaatatatggcattgatgagatgtgccgcgatcaatcgaattgggctagcaaatacccttatggctatggagatcaggaggattccaccgtttaactatatatatatatagttttctctttgggttcctttccgaactc

SEQ ID NO: 134332 - DNA, 233 bp, Glycine max
cggctcgagcacaattacaagaaagaacttcctcataaccaaaaccaacatcaactatggcaagttatcagaagcactacgatgatcagggtcgcaaggtcgacgagtatggcaatgttgagaggcaaactcacgaatatggcaaccttgttcatgccactagcgtcacttatgtagctaccaaaagtgttggtggctacaatgatgacgctaataagcaacatgatattact

SEQ ID NO: 134333 - DNA, 232 bp, Glycine max
cacacaactactacaagtacttccttacaatccaaaccaacaacaactatggcaagttatcaaaagtactacgatgatcagggtcgcaaggttgacgtgtatggcaacgttgagtagcaaaccgacgaatacggcaaccctgttcatgctgctagtgtcacctatgtagccaccagaactgctgctggtggttacagtgatgacattaataagcaacatgctaccaccaatg

SEQ ID NO: 134334 - DNA, 229 bp, Glycine max
gtgaaaatcatgtccgtcctgttcttggaggtaatgacacctttccttttcctcgtagggggagatctggtagaaaaccatcaaggaaagatcctactagtgagagtaggagtaatgatgtttatctttcaagagatgaggctttcggacacttgaagtcatctgactttcttacttatggactaaaattcgtatctcaaaatgttcttccattattgcaatctgcttt

SEQ ID NO: 134335 - DNA, 230 bp, Glycine max
gtgtttttgacttcctcggtaagaaaaaggatgaagaagacaagcctcatcctcaggaggaggtcttcgccaccgagtttctaaaagtcactgtcttagaccaaggagagaactagcacagcctcttagttaagcttcaccgatctcacagcagctctagctcttcaagtgaggaggtaggagaagatggatagaaaaggaagaattagaagaaggaaaacaaagggctg

SEQ ID NO: 134336 - DNA, 231 bp, Glycine max
ctacaagtacttctttacaatcaaaaccaacatcaactatggcaagttatcaaaagcactacgatgctcagggtcgcaaggttgacgagtatggcaacgttgagaagcaaaccgacgaatacggcaaccctgttcatgctgctagtgtcacctatgtagccaccagaactgctgctgttggttacagtgatcacattaataagcatcatgataccaccactgcctacggcg

SEQ ID NO: 134337 - DNA, 230 bp, Glycine max
cagtttttgatattctcttgggaatttctcaacattttgaaattgctggcaatactcttatgccagctttttctgttccactggctactgccagattgtctgaaaatgcggaatcctctgcatgatctgtaatttgtgttttctttcgtttgttcgtttgtctaattcaataaaggtaattagacatgactctcttgttgagtatgctctgtctatttgcaaatttccac

SEQ ID NO: 134338 - DNA, 151 bp, Glycine max
tgaattagttcattctctttgcgcagttccctacctcccctttcaagatgcagatcttcgtcaagaccctctccggaaagaccatcacccttgaggtggaaatctctgacaccatcgactacgtcaaggccaagatccaggacaaggaagg

SEQ ID NO: 134339 - DNA, 219 bp, Glycine max
cacaactactacacgtacttccttacaatcattaccaacaacaactatgttaagttatcaaaagcactacgatgatcagggccgcaaggttgacgagtatggcaacgttgagatgcaaaccgacgaatactgcaaccctgttcatgctgctagtgtcacctatttagccaccagaactgttgctggtggttactgtgatgacattaataagcaacatga

SEQ ID NO: 134340 - DNA, 230 bp, Glycine max
cttcgccctcgtttactgcaccgctggcatctcagggggacacataaatccggcggtgacatttgtgctgtttttggcgtcgaagttgtcgttgctcagggcgattttctacatcgtgatgcaatgctttggtgctatttgtggcgctggcgtggtgaagggtttcgaggggaaaatcaaatacggtgcgttgaatggtggtgctactttgttgccctcggttacaccaa

SEQ ID NO: 134341 - DNA, 231 bp, Glycine max
cttctgggtgggtccactgattggggcagctctagcagcactggtctacgaatatgttgtgatctcaactgaaccccctcctcaacaccaacctttggctcctgaagattactagttgcttccactagttgtatcaaaatatgagtgttattaatagctttctgtgtatctaaatataagggtatgcttgtgttttcttttgtttttgcaaccacccttctgcttgagtgg

SEQ ID NO: 134342 - DNA, 226 bp, Glycine max
tctgagtattccgatcgctccctgagagatctcgtcgcggcggttgtcgaagaagattgcaagttgaagttcaacatcgcgaatcccaccactggatgccagaagaagctctagatcgacgacgatctgaaactgcgagcatttcgggacaagaggatctcacaggaggtcatcggagatgcactcggttaggaatttaagcgctatgtcttcaaaactaccggag

SEQ ID NO: 134343 - DNA, 229 bp, Glycine max
acaagtacttctttacaatcaaaaccaacatcaactatggcaagttatcaaaagcactacgatgttcagggtcgcaaggttgacgagtatggcaacgttgagaagcaaaccgtcgaatacggcaaccctgttcatgctgctagtgtcacctatgtagccaccagaactgctgctgttggttacagtgatgacattaataagcaccatgataccaccaatgcctacggcg

SEQ ID NO: 134344 - DNA, 229 bp, Glycine max
ggtcgatggaataatgtaggcaagggaagtcggcaaaatggatccgttacctcgggaaaaggattggctctgagggctgtcgcacgggggtcccaggcccgaacccgtcggctgtcggtggactgctcgagctgcttccgcggcgtgagcgggtcgtcgcgtgccggtcgggggattgattgggaacgggcccttcggggccttttccccgggcgtcgcacagtcaact

SEQ ID NO: 134345 - DNA, 216 bp, Glycine max
gtgacgaaaggaatgaagaagaagaagcgttctttcggagagttcgaagatgtcgggcgttaccaataacaacgaggaagactagaagccaaccgaatcgggagcacacatcaaccttaaggttaaggggctggatgggaatgaagttcttttcaggatcaagataagcactcaattgatgaagcttatgaattcttactgtgaccgttagtcggg

SEQ ID NO: 134346 - DNA, 231 bp, Glycine max
gaacagctcaagtaacctcaaggggagcagtaccccatcaaatacggttacgttttcaaagtcttcgacgaactcgctttcaaacccatcgcgccacgagacgcagctctcatgcaagccacggagaaccaagcattgggccaaattcaaaaaggaggtcccgcctcggtgatgcaatccgccgcaaccgataacctccgcgccggcgtcgtgggccgcccagacatctcc

SEQ ID NO: 134347 - DNA, 233 bp, Glycine max
cttagcaccatttagatatgctactgtctattgatgttcagatgcaactatagttctaggagcagttggcaaggctgtgatagttgaacactgtgatcgagttcatgtaattttagcagcaaaacgtatctgtattgctaattgctgtgaatgtgttttctctttgggggtgaatctgcaaccacttatttttggtgataaccataagctgcaggtggtcccctataatactt

SEQ ID NO: 134348 - DNA, 235 bp, Glycine max
  unsure (1)..(235): unsure at all n locations
tccgaactcgagcgattcggctcgagttcaagtgccgcgaaaaccgctacggngaaaactgcgcaagtgtcagagaaggccaaagactacactcttcaggctgcggagaaggccaagtgtgcgggtggcacaacggcgagttacgtcggatagaaagcggtgcagtccaaggatgtcgccgtggagagtgggaagagtgcggctgggtatgctgccaaggtggctgctgatttga

SEQ ID NO: 134349 - DNA, 233 bp, Glycine max
ctctgttctctcttttgttctgtttcgcgtattgtcttcatacaggaccttgaacaatgaagattgcaaagggcaagggcgcagcaagggcctcataagaatcactgaagctcgttgatgaccgaaagtttggaaagcggaaggtttccggtaagcctggtagaagtagtgcaccaaagaaggagaagatggccaagaaagactccaacaagcctaaactaccacccagtgtt

SEQ ID NO: 134350 - DNA, 232 bp, Glycine max
caagagttgattgaaatggctgaagcacaactacgagaccagcatggtaaccctgtcccactcaccgatcaatacggtattccggttatcttaactgacgagcgcggtaatctcgtccaactcactggtctcgctaccaccgctaccggcacagcaggttcttggtttgggtcctattgtaccggtgcttatggtggtggtgcaattgcaaccaccgttgtcgatcttttgg

SEQ ID NO: 134351 - DNA, 232 bp, Glycine max
ggaaataatttatctttgaaaatgcagggcggaaagaaagctggagtttccatcaaggaaacatctgcaaacattggtgcttctgccaaggctggcatggagaaaaccaaggccactgtccaggagaatgcagaaagaatgacggtacgtgatccgatgcataaggagttggcaacccagaagaaagaggctaagatgagccaggtagagctggacaagccggcggcgcgtc

SEQ ID NO: 134352 - DNA, 230 bp, Glycine max
gctgcaaacattgatgatgccttctacagctataagatgcctaagatgattaccaaaattgattgcagaggtaatggcttcaaaactaatgttgccaatatggttgacattccaaaggcattggcaatgcctgcgtcttacacgtccaagtattttggttctgaacttggggcccactcgaaatttgatgcgaagaccggaacttctcacgtcaatggtgcacatgatac

SEQ ID NO: 134353 - DNA, 232 bp, Glycine max
acctcaaccttcttgaggctcagagaaatgagctcaattccagggttaggatgctgcgcgaataattacagcttttgttggaaccaggctcttaggttggtgaagttgtcttagtcatgggcaagaacaaagtccttgtcaaggtccacccagaaggaatatatgtcgttgatattgacaaaagtattgccattacaaagattgctccatccactagtcttgcacttcgcat

SEQ ID NO: 134354 - DNA, 232 bp, Glycine max
tcttcctcctagagaagtaaacaaccctcacattcaccacagcagttcacacagacaaagactaccttgtttgtctcctatcaaaacctttcaatctggcgttcgaaaacttagacaaccctgtccgtgaaatcaagcccaagaataggagaatcatgggtgctggaggccctgatgatgaggacaacatcaggtggccaccgtggctgaagcctctgctaaaagaaagttt

SEQ ID NO: 134355 - DNA, 228 bp, Glycine max
ctcgagccgtttcttccaccaagttatttgtttccttgtgttgctccttttctccctctacattctctcttctagtttcagcatatcaactcagcgttccatattggactctgacctaaccaagttcaccacacagaaacaggtgtcttcactgttcctactatggaagagtgaccatggacgtgtcttccataaccacgaattagaggcaaagagacttgagatttt

SEQ ID NO: 134356 - DNA, 227 bp, Glycine max
actctgttgcctgatgggtgtccatatttgtatgctatggtgcattatagttcagtgtctattataccaggtgatttcttcattggtgttaatgtgacaaccataaacattatgtgtgcatatggtctcaatcctggtatttcaggttctcgtctttttggcaccattcctcattctatttcacagctaactgtttggaatcaaatggcaacagtttgaacaccatt

SEQ ID NO: 134357 - DNA, 226 bp, Glycine max
tgcccctcccgtgagttgcatagtttcttatggtgtcatgagcttcactcttgatgctgcttaagaattgggtgtctcacagttgctgtttttgacccctagtgcatgttggttcatgtgctatgtccaatttggacaactctttgaaaagggcctattacccctcaaagactcgagttgtatcacgtatggttatttggttactacaatcgatttgataccggga

SEQ ID NO: 134358 - DNA, 227 bp, Glycine max
gttgcagatcgagctagctagctagcacgcaagcacagagatgtgtggcaaagcgaggccattccctcatgtgcttgtcacgtgtttcactctgcctctgcgctctaaccctatccgctgctcacgtaagcaccacggttcatgacatcgcgagaaagttgaaactcggggactacgagcttctgcgtacggagaagaagttcaaggttttcatggcgaattacggg

SEQ ID NO: 134359 - DNA, 229 bp, Glycine max
gtggaagcatttgcagaccgagctagcttgctagcaagcaagcacatagatggaggcaaagcgtggccatgccctcatttgcttggcacgtgttccactcttcctctgcgctctaaccctatccgcttctcacggaagcaccactgttcaagacatcgcgtgaaagttgaaactctgggacaacaagcttctgcgcacggagatgaagttcaaggttttcatggagaat

SEQ ID NO: 134360 - DNA, 201 bp, Glycine max
ctggattagattatcaaattcctactgccttcgatccttttgctgatccaaatgctgatgactctggtgctgggtcaaatgagtatgtgcatattcgcgttcagcagcgaaatggtaggaaaagcctgtcaaccgttcagggatttaaaaaagaattcagccataacaagatacttatagacgttaagaattagttctgtt

SEQ ID NO: 134361 - DNA, 233 bp, Glycine max
gtgcggtttccattgttggtgttgctgggtactgttttcctggcatcagtttgtgtctcattaaaggtgagagaggatgtgaataaccctttctatttgagaagctctaacatcttccaaactctctttgagaaccaaaacggtcgcattcgtctcctccagagattcaacaaacgctccccacaacttgagtaccttcgagactatcggattgtccagttctagtcaaaacc

SEQ ID NO: 134362 - DNA, 234 bp, Glycine max
cacacaactattacaagtacttccttacattcaaaaccaacaacaactatggcaagttatcaaatgcactacgatgatcatggtcgcaaggttgatgagtatggcaacgttgtgaagcaaaccgacgaatacggcaaccctgttcacgctgctagtgtcacttatgtagccaccagatctgctgctggtggttacagtgatgacatcaataagcaacatgtcaccaccaatgcc

SEQ ID NO: 134363 - DNA, 230 bp, Glycine max
gcgttgtccttgcttcacatttataagctcctcctcaattacaccgtgcctacttatcagcgcttcatcgttcggatcttttttatggtcccggtttatgcgttgatgtcattcttatcactttttcttccacagggttcaatcctttttaattcaatccgggaaatctatgaagcttgggttatttatattttcctatcactatttctcgaatgggtttgtggtcctgg

SEQ ID NO: 134364 - DNA, 231 bp, Glycine max
gaccccatcatatacggcgacgtttttgtcgtctacggtgacctttctcagatgcccattgctccggaagatgctgccttgatgcaaagcgcggtcatctcgagtactcggattaacccaacccggcgtatgttcttccgtcatgtaatccgccgccacaacgaatgaacaggctggtcttgtcggtcacctggacgtcaccgacttcaccggcgaccatcgcgtcacagt

SEQ ID NO: 134365 - DNA, 228 bp, Glycine max
gttctagatcgcgagcggccgcccgcgattaagaatttttctttataaaaatcattttgctatttctatactttttattaattttgtccctgaattcttcttgttctatttctttttcaaagtgtgccataacagaaaagacttcatgtgacaatgggtgtaatggaggtcttatgacaaatgcctactattatttgctcgattctggtgggttggtggaggagtctt

SEQ ID NO: 134366 - DNA, 226 bp, Glycine max
cccgagaatgacaccggtagacatcattttggtcgtggttacgattgtgacactaacaagctacatgatgctactggtgtttatcccggaattgacattggtagagatcttgggactaccggtgtctatggcctaaacaccgtcagacatcatggacattctggggtgaatctcgggatagacacctataaccaacaacctgggactaccgttggctatgctggtg

SEQ ID NO: 134367 - DNA, 224 bp, Glycine max
ggagcttgctcagcaaattgaaaaggttatgcgggcactcggagtttatcttggtgtgaatgtgcacgcatgtgtgtgaggtaccagtgtttgtgaagaccaacgcatcctatcaagtggtgttcatgttgttgttggtattcctggtcgtgtatttgatatgctgcgcagacagtcacttcggccagactatatcaagatgtttgtattggacgaggctgatg

SEQ ID NO: 134368 - DNA, 223 bp, Glycine max
atttgcgctgtttggggattttcgccctgaacatggtcagagcgtcggacatcaggcgcttgaccccaccgccgttcacggcgtcacgcagttctccgatctcaccgatgacgagtttgagaagctctacactggcgtcaatggcggcttcccgtcttcgaataatgccgctggcggtattgcgctgccgttggaggtgtacgggctgccggacaattttgat

SEQ ID NO: 134369 - DNA, 227 bp, Glycine max
gctgaagatagggttaggtttaggcgatatggcgttcaacgccggctgcgagccatcaccttgttccccggccacatggccgccgccacacgcgccatccgccaccgcctcaaactcgccgacctcgtcatcgaagtccgcgtcgctcgcattcccttctcctccgccaacgccgatctccagcccctcctctccgccaaacgacgcgtcgtcgcactcaataaaaa

SEQ ID NO: 134370 - DNA, 230 bp, Glycine max
gtacttccttacaatcaaaaccaacaataactatggcaagttatctaaagcactacgatgatcagggtcgcaaggttgacgagtatggcaacggtgagaagcaaaccgatgaatacggcaaccctgctcatgctgctagtgttacctatgtagccacctgaactgctgctggtcgttacagtgatgacattaataagcaacttgataccaccaattcctacggcgtagac

SEQ ID NO: 134371 - DNA, 228 bp, Glycine max
gaaagaactttcttataaccaaaaccaatcacaactatggcaagttttcagaagcactacgatgatcagggtcgcaaggtcgacgagtatggcaaggttgagaggcaaactgacgaatatggcaacctggttcatgccactagtgtcacttatgtagccaccaaaagtgttggtgtctacaatgatgacgctaataagcaacatgatattactggtatgtatcccgag

SEQ ID NO: 134372 - DNA, 189 bp, Glycine max
gaaacgacgtataactccatcatgaaatgttatgttgatattagaaagcatctgtatggaaacatcgtgcttagtggagggtctactatgtttccgtgaattgctgatcgtatgagcaaggaaattggtgctcttgcacccagcagcatgaaaatcaaggtggttgcacctcctgagataaagtacagt

SEQ ID NO: 134373 - DNA, 260 bp, Glycine max
gtgggtgacttgaaacggcatgcggttcattatgacaggagtggcagatcaaagggtacagcagaagtagtattttcacgacgagctgatgctgtatctgctgtaaagagatacaacaacgttcaattagatgggaaaccaatgaagattgaaattgtgggaacaaacatttccacacctggtgtagctcctgctcctaacggagctattggaaattttaatggagttcctcgaagtggacaaggaagaggtggggcatt

SEQ ID NO: 134374 - DNA, 254 bp, Glycine max
ggcacaagttgaacttcgtgacgagcatgggaacccagttgaactaacagatgcatatgggaatccggtttggttaacggacgagaaaggcaacccggtgcacctcacggctgtggcaaccaatgcacacaaatctatgcttcagaatgacaccccacaagagcttcctcactccaagagttcaagctcgtctgaggatgaagggcatggagagaggatcaggaagggactgaaggataacatagaagaaaagt

SEQ ID NO: 134375 - DNA, 255 bp, Glycine max
gtgaaggatctggacgtgaagcggtacatgggtcggtggtacgagattgcgtgcttcccgtcgaggtttcaacccagtgacggcaccaacaccagagccacctacactctccgagatgacggcaccatcaacgttcttaacgagacttggagtggcggcaaaagaggtttcattgagggcactgcttataaggctgatcccaacagcgacgaggccaagttgaaggtcaagttctgggtgcctccctttttaccc

SEQ ID NO: 134376 - DNA, 254 bp, Glycine max
gttcattcccaggttgtgatggcagcagcaccagcagctaccttcgctattggaaccaccggttccctcggccaaagaggaagctcgcttcctcaatcaaagtcctttgggttgaaattcaactctctgaatcatttgaagagcttctgtggcctcaaggccatgtcatccgtgagatgtgagtcggaatcctccttcttcggtaacaaaaccggtgctgctctacgggcgtcttttgcatccaaagctcaaaa

SEQ ID NO: 134377 - DNA, 253 bp, Glycine max
ggggtttgggattggagggattgacgctgcgtctcttcctcttctctttcgatccatccctcattcctaatcctccaatccaaccacctcagcctcacactcacatatacacatatctgaacgcgtatcgtccctcctatggcttcaaagcgcatcctcaaggagctcaaggacttgcagaaagacccagcaacttcttgcagcgctggtccagtagctgaggacatgttccattggcaagcaacaataatgg

SEQ ID NO: 134378 - DNA, 256 bp, Glycine max
agaaaacctaagcttagaattagaaacaaagagaagaagaaaggaaagaattgatcgttgaaaatgcagggaggaaagaaagcgggagagtccattaaggaaacagctacaaacattggtgcttctgccaaggctggcatggagaagaccaaggccactgtccaagagaaggcagaaagaatgacagcacgtgatccggtgcaaaaggagttggcaacccaaaagaaagaggcaaagatgaaccaggcggactgga

SEQ ID NO: 134379 - DNA, 251 bp, Glycine max
ctcgagccgctcgagccgattcggctcgaggccagttaaggttgcatacagcatattgaattgcttggactaggacattggtgctgactgggacaacgactatcaattggatcttggtctggttattgatgttcctgtcattggcatcttcaccattcctctctctcagaaaggagagatcaagctaccaaccctctctaccatgttcgcctaatcgcatccacaaagcttaggataaaataaatgcattg

SEQ ID NO: 134380 - DNA, 251 bp, Glycine max
cggcatttgattccaagagttttagaccagcatggattgagttctgagtttcttcagattcctgaggcaatggtgaagcttgttattcagagatatactagggaagctggtgtgcgaaacttggagaggaatctagctgccttggctcgagctgctgcagtaagagttttagagcaagaacaagtagttccattaaacaaagggatgcaaggacttgctacaccacttgtggaaaacagacttgctgatgg

SEQ ID NO: 134381 - DNA, 250 bp, Glycine max
ggtaggcaacatgggaacatcggtggcccttactatggaaccaacaccgcagacaccggtactggtcccagaagtggaaccacgggcggcaccggttatggaggcactggtggcactgattatggaacaactggtggcactggttatggaagtggaactgggtatggagtcaacactgggggtgcgcacactgaagcaggatataggaaggaacatcgtcagcatgaccaatctcatggtgatcagaacg

SEQ ID NO: 134382 - DNA, 233 bp, Glycine max
ccctcaacaatctctttccgagattacaataaccttcgacgtgctccaaagcctccaccgccccgccaacttcctcgtgtttgggctgggccgcgattctctcatgtgggccagcctcaaggcccacggcaccacgctgttcctcgtggtggagactgaatggttcgggatcgtcacgaaggaggggtcctactacggggcccacacggtccgttaccggacagagctccgag

SEQ ID NO: 134383 - DNA, 257 bp, Glycine max
cacaactactacaagtacttccttacaatcaaaaccaacaacaactatggcaagttatcaaaagcactacgatgatcagggtcgcaaggttgacgagtatggcaacgttgagaagcaaaccgacgaatacggcaaccctgttcatgctgctagtgtcacctatgtagccaccagaactgctgctggtggttacagtgatgacattaataagcaacatgatactaccaatgcctacggcgtagacactggtagacagc

SEQ ID NO: 134384 - DNA, 257 bp, Glycine max
ggaaaacaaaaattaatttgaaaagcaagttgaaaaagaaagtagaagagtctccaccatgggtgaagaacttgctaagctttgttgaacttccaccaactgaagttatcctcagaagattgtttctctttggcttcatgggtggctggagtattatgaattctgctgaaactggacctgcttttcaggtggcaatctctttggctgcttgcatatattttctcaacgaaaagacaaagagcttggctagagcattc

SEQ ID NO: 134385 - DNA, 253 bp, Glycine max
cgtgttctcttcttcagcaactgtatatggttggccaaaggaagttccatgcacagaagagttccctctgtcagcaatgaacccatatggacgaactaagcttatcattgaagaaatttgtcgtgatgtccaccgtgcagagccagattggaaaataatattgttaagatacttcaacccagtcggtgcacaccctagcggttgtattggggaggatcccgcggaattccaaacaatctcatgccatttgttg

SEQ ID NO: 134386 - DNA, 253 bp, Glycine max
ggttaagcctttaatttgggtggaagcaaatgttgaaaagcattcaaagagtcggattgagattatggtaaaagctaggagtcaatttaaggaacgtagcactgccacaaacgttgagattgagttgcctgtgcctgttgatgcaaccaatcctaatgttcgaacttcaatgggatctgcatcatatgcacccgaaaaagatgcgttaatctggaaaattagatccttccccggaggcaaggagtatatgtta

SEQ ID NO: 134387 - DNA, 254 bp, Glycine max
aaaacactcaagttaacttcaacacctttaattttctgaacgaaattcagccacagaatatcaaagggagcgaagatgagtcaggagcagccaaggcgcccccaaggccaagaccccatcaaatacggcgacgtttttgacgtctacggtgaccttgcacagatgcccattgcaccggaagatgctgccatgatgcaaagcgcggaagctcgagtactcggaaaaacccaacccggcggacttcttccgtcatg

SEQ ID NO: 134388 - DNA, 255 bp, Glycine max
cacacaactactacaagtacttccttacaatcaaaaccaacaacaactatggcaagttatcaaaagcactacgatgatcagggtcgcaaggttgacgagtatggcaacgttgagaagcaaaccgacgaatacggcaaccctgttcatgctgctagtgtcacctatgtagccaccagaactgctgctggtggttacagtgatgacattaataagcaacatgataccaccaatgcctacggcgtagacactggtaga

SEQ ID NO: 134389 - DNA, 250 bp, Glycine max
attattttaggaacagcaatggtgaaaatgctgctattgtgaaaccaactgatgaggagccttatgcaccaaacaatcctaaaggttttgttggcaaagcccttggacaaccaggactgaaacgttcagtgagggttggggagacaggtttaagagaagttgcagcttaccttcttgaccatgatcattttgccaatgtgccctctactgcccttgtaaaggtcacacattctatttttaatattaatga

SEQ ID NO: 134390 - DNA, 253 bp, Glycine max
ggccaatctagtctttcacaataaagtgataggtggaactgccattaaacgacttattagcagattaatagatcactttggaatggcatatacatcacatatcctggatcaagtaaagactctgggattccgtcaagctacggatacatccatttcattaggaattgatgaccttttaacaataccttctaaaggatggctagtccaagatgctgaacaacaaagttttattttggaacaacatcatcattat

SEQ ID NO: 134391 - DNA, 257 bp, Glycine max
ctcgagccgtgacgagtcacttttatatgagactgctgaaactgaatctgctataaaaggaagccgaaagcttgaccacacaaatgagctaagattttttgacaaagcagcagtgctagcacagtcagataaagtgaaggaatcaacaaacccttggagactttgcactgtaactcaagtggaagagctgaaatccattttaagaatacttcctgtatgggccactggcatcatattttccactgtctatggtcaaa

SEQ ID NO: 134392 - DNA, 251 bp, Glycine max
aaatggcaacagtgagaacaccattgaattttgattctagcaagcagagcttttgtcaattttctattgaccttctcggtggaggaattttagtggacaaaactggagattggatcacacttatacaaaattctccaattagtaacttgttgagagttgctgcttggaagaaaggctgtttaatggttaagattgtgatgtctgggaatgcagcagtcaaaaggagtgattgggcctcattggtacaagtg

SEQ ID NO: 134393 - DNA, 253 bp, Glycine max
actttccaatacaataatcactaactgaatattcgatcggagatgtctgctgccgccgaagaagctaacgctcccgccgtcgaaaagccggttgaggaggtgaaggcgccgaaccccgcgaaggagaagaaacctaaggctccgaaggaaaagaagccaaaacaggccaaaacagcttcacatcctccatattttcagatgattaaggaggctttgatcgctttgaacgagaaaggaggatcgagtccttatg

SEQ ID NO: 134394 - DNA, 244 bp, Glycine max
gcagaattctgggcctttgagatccgctgttggaacggttgagaacactgtaaccaccgttcttggtcctgtctgcaacaaattcaaggacttccctgatgatgtcctggtttatgttgacaaaaaggtggatgaagcttcccacaagttcgatgagcatgctccttcctttgccaagcaccttgcggatcaagccaagggtgtgattcagaaagtgacttgtgaggcagggaaagttgcaagt

SEQ ID NO: 134395 - DNA, 252 bp, Glycine max
cgatccgggcggaagacattgtcaggtggggagtttggctggggcggcacatctgttaaaagataacgcaggtgtcctaagatgagctcaacgagaacagaaatctcgtgtggaacaaaagggtaaaagctcgtttgattctgatttccagtacgaatacgaaccgtgaaagcgtggcctatcgatcctttagtccttcggaatttgaagctagaggtgtcagaaaagttaccacagggataactggcttgt

SEQ ID NO: 134396 - DNA, 253 bp, Glycine max
ctcgagccgattcttccaccaagttatgggtttccttgtgttgcttcttttctccctcttaggtctctcttctagttccagcatatcaactcatcgttccatattggaccttgacctaaccaagtttaccacacagaaacaggtgtcttcactgttccaactatggaagagtgagcatggacgtgtctaccataaccacgaagaagaggcaaagagacttgagattttcaagaataacttgaactatatcagg

SEQ ID NO: 134397 - DNA, 252 bp, Glycine max
aaaacagtaaagctaacttcaacacctttaattttctaaaagtaattcagcggctgaataccaagcggagaagatgagtcaggagcagccacggcgtcccaaaggccaaaaccccatcaaatacggcgacgtttttgtcgtctccggcgaccttgcacagaagcccgtcgcaccggaagatgctgccatgatgcaaagcgcggaaactcgagtgctcggacaaacccaacccggcggagagcttccgtcatg

SEQ ID NO: 134398 - DNA, 249 bp, Glycine max
tcctagtataccttaataaataatttaagatactatgatgagagcacggttcccattactgttgctgggacttgttttcctggcttcagtttctgtctcatttggcattgcttactgggaaaaagagaaccccaaacacaacaagtgtctccagagttgcaatagcgagagagactcgtacaggaaccaagcatgccacgctcgttgcaacctccttaaggtggagaaagaagaatgtgatgatggtga

SEQ ID NO: 134399 - DNA, 246 bp, Glycine max
cggctcgagcacacaactactacaagtacttccttacaatcaaaaccaagaacaactatggcaagttatcaaaagcactacgatgatcagggtcgcaaggttgacgagtatggcaacgttgagaagcaaaccgacgaatacggcaaccctgttcatgctgctagtgtcacctatgtagccaccagaactgctgctggtggttacagtgatgacattaataagcaacatgataccaccaatgcctac

SEQ ID NO: 134400 - DNA, 246 bp, Glycine max
ctcaaaatgttcttccattattgcaatctgcttttgatttgaatttcacaccccgtgagtttgatagctttgatgaagttcatggactctattcaggcggaattaagctgccaacagagataatcagcaagattagtccactacccgtgcttaaggaaatcttccgaactgatggtgaacaggcccttaagtttcctcctcctaaagtaattcaagtgagtaagtctgcatggatgactgatgaag

SEQ ID NO: 134401 - DNA, 257 bp, Glycine max
ggcttcaaacatgatcaggaatccaaagaatccaccactaacaaagtctctgattatgccactgacactgcacagaaatccaaggattatgcaactgacactgctcagaaatcaaaggactatgcaggtgatgctgctcagaaatcaaaggactacgcaggtgatgctgctcagaaaaccaaagactatgccagtgacactgcacagacatcaaaggactatgctggtgatgctgctcagaaatcaaagggctatgt

SEQ ID NO: 134402 - DNA, 254 bp, Glycine max
cacgaaatgaattagcgttgccattctcatcctcctctgtctctctctctccaccattgccatggatccttacaagctccggccatccagcgccttcaattctcccttctggactacaaattctggtgctcctgtttggaacaacaactcctctttaaccgttggagctagaggtccaattctgcttgaggattatcatcttgtggagaagcttgcaaactttgacagggaacgtatcccagaacgtgttgtcc

SEQ ID NO: 134403 - DNA, 252 bp, Glycine max
cacaaaacaaaaagtttacgttacaaatcgcataataaccgtcctaagtttattgagagaattttgcaagtgtgagaaacatggcatctcgtcaaaacaacaagcaagagcttgatgaaagagcaaggcaaggagagactgttgtcccgggtggaactggtggcaagagcctggaggctcagcaacaccttgctgaaggaaggagcaagggagggcaaacaaggaaggaacagctgggtacagaagggtacc

SEQ ID NO: 134404 - DNA, 209 bp, Glycine max
tcacaatttttattttttaatgatactattttgttattgttattgatggtatcatcatcgggaaaaagcagagaaatggatagggtgaagggtccatggagcccagaagaggacgaggccctgcgggcgctggttcaggcccacgggcctcgaaactggtcggtgataagcaagtccattccggggagatccgggaaatcgtgccgctt

SEQ ID NO: 134405 - DNA, 252 bp, Glycine max
caaagctcttggacaaccaggactgaaacgttcagtgagggttggggagacaggtttcagagaagttgcagcctaccttcttgaccatgatcattttgccaatgtaccctttactgcccttgtaaaggtcacacattctatttgtaatgtgaatgacagggtcaatggtagtatgcatcattacaaaaagcaaataagcaagattgcatctctgcagcagtttattcctcatgattttgatgcaagtgatca

SEQ ID NO: 134406 - DNA, 254 bp, Glycine max
gcctcacaaaagcaaagatcaaacaaaccaaggacgagaacacgatgttgcttgaacttgcacttggtttattggttttggctctgtttctgcacttgcgtcccacacccactgcaaaatcaaaagcacttcgccatctcccaaacccaccaagcccaaagcctcgtcttcccttcataggacaccttcatctcttaaaagacaaacttctccactacgcactcatcgacctctccaaaaaacatggtccctta

SEQ ID NO: 134407 - DNA, 249 bp, Glycine max
gtgccaacaaagaatctccgggtgcaaattctaggctactggccaccattgtagccggttcagtcctcgccggggagctatcgctcatgtctgctattgcagctggacaacttgttaagagccacatgaaatacaacagatctagcagggatatatctacaattgtccaatgaactggccacagtacacttaaacttgtgtcagagactaatattctaataagcaaaccatcagataaagacatatata

SEQ ID NO: 134408 - DNA, 248 bp, Glycine max
gaaacttcctcgtcgcaaaatttttgacaaacctaagacgcgctgcttcactattctccctatggagtttaatcttgtggttcgtcagaagtttttaaattttgtgaggttcattatgaagaaaagggacaagcttagttgtcaagttggaatcaacccatactccatggaatggactggtttggccaatagattactgagtaagggcaacgatattctgtgttgcgattatgctagttttgatggtt

SEQ ID NO: 134409 - DNA, 228 bp, Glycine max
aaatatttttcattctaggtgatgtatcatgtatgtaccaaaatattttggtacgtaagtcttttaaaaagtttgcatctcctctttggttttccttagttctgaaagttatctcctaagaagacaatcatatgtactgtacgtagtgtgaagatatagtattgtatgctgcagaatatgattgtctaataaggtggactagctgtaataaaagatatttccaggttg

SEQ ID NO: 134410 - DNA, 246 bp, Glycine max
cacaactacaagaaagaacttccttataaccaaaaccaacaacaactatggcaagttatcagaagcactacgatgatcagggtcgcaaggtcgacgagtatggcaatgttgagaggcaaactgacgaatatggcaacccggttcatgccactagtgtcacttatgtagccaccaaaagtgttggtggctacaatgatgacgctaataagcaacatgatattactggtgtctatcccgagaaagaca

SEQ ID NO: 134411 - DNA, 255 bp, Glycine max
accgttcagggattgaaaaaagaattcagctataacaagatacttaaagatgttaagaaagagttctgttgcaatggaacagttgttcaggacccagaactaggacaggttattcaacttcaaggtgatcagaggaagaatgtttctaccttcctggtccaggctggtatcgtgaagaaggagcatatcaagattcatggtttctgagcggttggagtctcaagtgtcaagtcttacgtgcctgcctatgtgttg

SEQ ID NO: 134412 - DNA, 251 bp, Glycine max
cttcatagttcagtgtgtcgtttaaaaatgtcgcagttgctggataaagccaagaacttcgtgtcggagaaggtaaatgatatggccaagccggagggaggtgtcactgacgtggacttcaagcgcgtgagcaaagataatgtcgagtacttggccaaggtctctgttcgtaacccttattcaacttccatacccatttgtgagatcaactactctttcaaaagcgcatccagggagatagcatcagggaa

SEQ ID NO: 134413 - DNA, 250 bp, Glycine max
cagcttcaatcctcgaccacaccacccatcagcgacatgcttcctctttcccttctcaagactgcccaaggccaccctatgttggtggaactgaaaaatggggagacatataacgggcatttggttaattgcgatacatggatgaacatccatctccgagaagtcatttgtacatctaaagacggagatagattttggaggatgcctgaatgctatatacgaggcaatacaatcaagtaccttcgagttc

SEQ ID NO: 134414 - DNA, 246 bp, Glycine max
cacacaactactacaagtacttccttacaatcaaaaccaacaacaactatggcaagttattaaaagcactacgatgatcagggtcgcaaggttgacgagtatggcaacgttgagaagcaaaccgacgaatacggcaaccctgttcatgctgctagtgtcacctatgtagccaccagaactgctgctggtggttacagtgatgacattaataagcaacatgataccaccaatgcctacggcgtagac

SEQ ID NO: 134415 - DNA, 246 bp, Glycine max
gacggagcggacggaggaggacgagtgtttgatactggcgagtgatgggttgtgggatgtggtatcgaatgagaccgcatgtggggtggtgaggatgtgcctcaaggcgcagaagccgccggggtctccggggagtgacgtggcggctgacggttccgaccgtgcttgctccgatgcgtcgattctgttgaccaagttggcgctggcaaggcatagttcggataatgtgagcgtggtggtggttga

SEQ ID NO: 134416 - DNA, 247 bp, Glycine max
cggccaactgttccaaggaagtttgataaggacaagcagttcacatcagaaagaatgggaaggcaactgtcatctttggggcttgatcccagtttggcaattaagagaatgcacagcagatctgtctctagaggtcggaaaagggatagatcgcctgaaacaagaagtgctgatggtatggatactgatggtgacacacctagcaaaaaacagcgtctgagtagatcactgtcacggtccaggtcag

SEQ ID NO: 134417 - DNA, 248 bp, Glycine max
agagtgaaaaaaccttctcttttccttctctcaagtctcaagagatttcatcatggctccaaagaaggacaaggctccaccaccttcctccaagcccgccaaatctggcggtggcaagcagaagaagaagaagtggagcaagggaaagcaaaaggagaaggtgaataacatggtgctgtttgatcagggcacctatgataagctcctttctgaagctcccaaattcaagctcatcactccttccattc

SEQ ID NO: 134418 - DNA, 252 bp, Glycine max
aggaaggcataattggcactccacagcttacggactcattagagataccggaaaatgtggaatttctgggtcaaaagattgaccttacacttttcaaaggcatccttacctctgtccaagacacagccacatcggtagtgaaaacaatttcaagtaggcctcccttgaagatcccaatttccaacagcaatgctcagtcctggttactcaccacatacctcgacgaagaattgcgtatctcaaggggcgatg

SEQ ID NO: 134419 - DNA, 235 bp, Glycine max
ccgagcttgaccctttctctgacctccttggcttcgataccaccaccagcaccaccaaccaaccaccccttccagacaaaaaagtggtgtcatcatgtgagaagaagaagaagaaaagtgtgagtgcagaaaagaagagtggtgggcgagctcggaagaacgtgtacagaggaatcaggcaaaggccgtggggcaagtgggccgcggaaataagggacccacataagggcgtccg

SEQ ID NO: 134420 - DNA, 250 bp, Glycine max
gaaacatcaggactaaaaagatatttgttggagggttgcctcccaccctgactgaagaaaaatttcgtctgtactttgagtcttatggacatgtaactgatgtagtagtcatgtatgaccagaatactgggcgtccacggggatttgggtttatttcatttgatactgaggaggcagttgatagggttttgcacaaatcatttcatgatttaaatggtaaacaagttgaggtaaagcgtgcacttcccaa

SEQ ID NO: 134421 - DNA, 249 bp, Glycine max
gcttcaactccaacaagatcaatgcatatcctagcgtggaccttgtgatggacaagcccaatggtcctgtttggagaatctctggtgaggacttgatggtgcaggcacaacctggggtcacgtgtttgggtgttatgaatggaggaatgcaacctagagctgaaattaccttaggggcacgtcagttggaagagaacctggtggtgttcgatcttgcaaggtcaagggttgggtttagcacctcatcac

SEQ ID NO: 134422 - DNA, 251 bp, Glycine max
gttgcagaccgagctagctagctagcaagcaagcacagagatggaggcaaagcgaggccatgccctcatgtgcttggcacgtgtttcactcttcctctgcgctctaaccctatccgctgctcacggaagcaccacggttcaagacatcgcgagaaagttgaaactcggggacaacgagcttctgcgcacggagaagaagttcaaggttttcatggagaattacgggaggagctactccacagaggaggagt

SEQ ID NO: 134423 - DNA, 251 bp, Glycine max
gccacatagagacacaatacagagtgagttgttgctccttcgccacaactctctgccaacatgggtatctccagagattctatgcacaagaggcgtgccactggtggcaagaagaaggcctggaggaaaaagagaaagtatgagcttggtcgccagcctgctaacactaagctgtcaagcaacaagacagtcaggaggatccgtgttagaggtggaaatgtgaaatggagggcattgagattggatactgg

SEQ ID NO: 134424 - DNA, 248 bp, Glycine max
gcatttattagataaaaggtcaacacaggctctgcctgttgctttgatgattcatgataactcgtcggatcgcacggcctttgtgccggcgacgcatcattcaaatttctgccctatcaactttcgatggtaggatagtggcctaccatggtggtgacgggtgacggagaattagggttcgattccggagagggagcctgagaaacggctaccacatccaaggaaggcagcaggcgcgcaaattaccc

SEQ ID NO: 134425 - DNA, 248 bp, Glycine max
gttgagattccctttgaagaaaagatggcatcccataggcaaagctatgaagctggtcaaactaagggccgaactgaggaaaagacgaaccagacgatgggcaatattggagagaaggctcaagctgcaaaggagaagacccaggaaatggcccaagctgcaaaggagaagacccaacaaacagcccaagctgccaaggacaagacttgcgacacttcccaagcggcaaaggagaagacccaacagaa

SEQ ID NO: 134426 - DNA, 253 bp, Glycine max
agaggagaacacaaacagcagcgtcttggtttgtgagagagacagaggcacagagagaaaatggtttcggggtcaggaatctgcgcgaagagggtagttgtggacgcgcggcaccacatgctggggaggctggcatcgatcgtggcgaaggaacttctgaatgggcagaaggtggtggtggtgcgctgcgaggagatttgcatctccggtgggctcgtcaggcagaagatgaagtacttgcgtttcctccgca

SEQ ID NO: 134427 - DNA, 275 bp, Glycine max
cacaaaattgaactgtaattgtagtagtagacagtagcaccatgagccaggaacagctcaagaaacctcaaggggagcaggaccccatcaaatacggcgacgttttcaaagtctccgacgaactcgctttcaaacccatcgcgccaagagacgcagctctcatgcaagccacggagaaccaagcattgggccaaactcaaaaaggaggtcccgcctcggtgatgcaatccgccgcaaccgaaaacctccgcgccggcgtcgtgggccgccaagac

SEQ ID NO: 134428 - DNA, 272 bp, Glycine max
  unsure (1)..(272): unsure at all n locations
tgttatcacctataaatactaatttgctgtctcctaagaatgttgagcatcctctttttcaggcttcttttggtgtctctccttctggaaggatgtcancaagaagtgttgaaccaatctctccaatgagtgctcgtttatctgcatttgctcagcgagagaaacagcancaacagctgcgcagtgttagttcaagagaccttggtgccaanagtccngcctcanttgttgggctcccctgcaaacccttggncaaagtggggttntnnttt

SEQ ID NO: 134429 - DNA, 261 bp, Glycine max
agaaggtagatcatacatagtagtgttggtgggttgcaaagatgcttgggggtcttctccatatgggtcataagataaaagggacagtggtgttgatgcgcaagactgtgttggacgtgaatagcgtaaccagcgttgggggaattattggtcaaggtctcaacttagttggctcaacactcgatactcttactgccttcttgggacgatccgtgtctctccagcttattagtgctaccaaagctgatgccaacggaaaag

SEQ ID NO: 134430 - DNA, 265 bp, Glycine max
aacaaacagcccaagctgccaaggacaagacttgcgacacttcccaagcggcaaaggagaagacccaacagaatacaggagctgctcaacaaaagacctcagagatgggccagtccacgaaggaatcggcccagtcagggaaggacaacacccaagggttcctgcagcagacaggggagaaggtgaagggcgcagccaaggtgctacagaggctgtgaagcaaacccttggcttgggcgagcatgatcaagacaaccgcagaaat

SEQ ID NO: 134431 - DNA, 264 bp, Glycine max
tctcgagccgattcggctcgagtaacaactggcccgaaccggattgggtggggcggcaggagctcgagattgttatggggaacgagcacatttcgttcaccacgtcgaagattgggtctcttgttgatgttcagagcagtgctgaccccgagggtcttcgcatcttttactatcttgttcaggatttgaagtgctttgtcttctctcttatttcacttcacttcaagatcaagcgtatctaatgtgtttgcaataatatgagtt

SEQ ID NO: 134432 - DNA, 267 bp, Glycine max
atgcagcctggtttcatgttgaaccaaccttattcttcccagcccctcaattacagtgccatgggaacccttttagctcaacagcaattcctggcaacaatggctaatttccaacaccttagtaatgtcaacatgcaagatgatggtgttgctcaaatggctggacccaatggaagatcacctttgccagacatatttcaaccaaattttcaaactcaaactcctagctcaatgatcaacacttcaaggaaagaagaaactaaagca

SEQ ID NO: 134433 - DNA, 266 bp, Glycine max
cagtggttcttttccttctgagaagatcgaattgtgttttgcaaaaatgggagttccagagaaagaccctctttcccaattgagtttgcctcctggttttcggttttaccccaccgacgaggagcttctcgttcagtatctgtgccgcaaagtcgctggccaccatttctctcttccaatcattgccgaaattgacttgtacaagttcgacccatgggttcttccaagtaaagcgattttcggtgataaagagtggtactttttca

SEQ ID NO: 134434 - DNA, 266 bp, Glycine max
gtgatatcatttgtgtcactggatggactgccactccaatgcaggatgttcaggttacaattgattggtttatttcctctcaggaatgtgttcccaggacctattgtgttttaaatccacaaaatccttttgtgttaaataggtggatggggaaactgactttcccccagggcacttcccgaagtgttaaaaggatgcctctttctatagggggaggagctggtgcaaagaatgctattctcatgaatatgccaaatgctgttctt

SEQ ID NO: 134435 - DNA, 268 bp, Glycine max
cttcgagggtttgggtttctcttcctcccttggagaaaaagaagagccaccgctgcgacgccgttcgtgcatttttgaggtgccgctgtcatgtttgggcgtggtggaccaaggaggagtgataactccaaatattatgatattctcgggatttccaaaaatgccagtgaagatgaaatcaagaaggcctatagaaaggcggctatgaagaaccatccagataagggaggagatcctgaaaagtttaaggagttaggtcaagcatatg

SEQ ID NO: 134436 - DNA, 224 bp, Glycine max
atctgtaacatcacctgtatcgagatgcgcgatcacgagcagccacaagaggccctttgtgcacctgagaagctggtgaagcaagtggctctggcaacgcagaaggcacaggttccacttgccggcgaaaacgcgctgccacggtacgacgagtatgcacatgagcagatcataagggcatcacaattggatgttgatggtgatctcggtaatagagatatgtg

SEQ ID NO: 134437 - DNA, 267 bp, Glycine max
aacttccttataaccaaaaccaacaacaactatggcaagttatcagaagcactacgatgatcagggtcgcaaggtcgacgagtatggcaatgttgagaggcaaactgacgaatatggcaacccggttcatgccactagtgtcacttatgtagccaccaaaagtgttggtggctacaatgatgacgctaataagcaacatgatattactggtgtctatcccgagaaagacaccggtagacatcattttggtcgtggttacgacggtga

SEQ ID NO: 134438 - DNA, 265 bp, Glycine max
ctcgagccgatttgctctcaagactgtgaattatggaatcctgcttgcacaaaagcaatgactatgtcatttaatccaaatccgtgttctgatgcatggagtttggaatttctgaagcgtaccggatttcattgtgatatcatttgtgtcactggatggactgccactccaatgcaggatgttcaggttacaattgattggtttatttcctctcaggaatgtgttcccaggacctattgtgttttaaatccacaaaatccttttg

SEQ ID NO: 134439 - DNA, 264 bp, Glycine max
gggtaatatataatgaatatgttcttactagtcggaattttattcgaactgtgacagatatacgtggagaatggttagtggatgtagccccacattactatgatttgtcgaattttccacaatgtgaagctaagcgtgttcttgagaggctttacaagaagcgagagaaggaaaaggaggaagccaggagtcgtaaatgaagtcccctaccatccatgcctttttttgcctttagattggaattggatatttagtctcctgtaa

SEQ ID NO: 134440 - DNA, 264 bp, Glycine max
atcacaatcacagaaacatgcccgtgagagtattggagaataccgcagcaccttcttctcaggtttcaggtgccaattcgggaaggagttcgtgccaatcttgtagtcttctaggcgttgggcagaaatcttagagaattttattagagatcaactctaatagccagaaatcagcaactctgacttgattgagaccattgagttggaaaatcttctgataaatgcctgcatcaccatgcactctgctgaagcaagaaaagagag

SEQ ID NO: 134441 - DNA, 263 bp, Glycine max
gcggttgagaagttgagcattgcaaaagatgtgactgaattaattggcaaaactccattggtatatctcaaccgcatcgtggatggctgtgttgccaaagttgctgcgaactagaaatgatggaaccttgctccagtgtcaaagacaggatagggtatagcatgattgtagatgctgaggagaaaggactcatcacaccgggtgaaagtgtcctcattgagcctactagtggaaacactggcataggtttggcattcatggca

SEQ ID NO: 134442 - DNA, 264 bp, Glycine max
ccaacctctcaagtccaacctacccctttttcttctcccaccaacttcaccgtcttcttcctcgatcatgtctcacttcaagggcaagtaccatgatgagcttattgccaatgctgcttacattggcactcctggaaagggtattcttgctgctgatgagtcaacagggacaattggcaagcgtttggccagcatcagtgtagagaatgttgaatccaacaggcgtgctcttagggagctgcttttcaccgctcccggtgctct

SEQ ID NO: 134443 - DNA, 267 bp, Glycine max
caagaaaagaaaaaaagaagagttgagattccctttgaagaaaagatggcatcccataggcaaagctatgaagctggtcaaactaagggccgaactgaggaaaagacgaaccagacgatgggcaatattggagagaaggctcaagctgcaaaggagaagacccaggaaatggcccaagctgcaaaggagaagacccaacaaacagcccaagctgccaaggacaagacttgcgacacttcccaagcggcaaaggagaagacccaacag

SEQ ID NO: 134444 - DNA, 266 bp, Glycine max
aaaacctgcgtactggaatctataaagaaacaatccaattaatcaaaacgcacaacgaagatcgtatgaatacgattttgcacttctcgacaaatataatttgtttctttattctaagcggttattctattcttggtaatcaagaacttgttcttattaactctttggttcgagaatttatatataatttaagtgacacaataaaagctttttctattcttctattaactgatttatgtataggattccattcaacccatggttgg

SEQ ID NO: 134445 - DNA, 265 bp, Glycine max
ttctcatttcttcatcgttcgattcttctcctcctaaagatgcagatcttcgtgaaaactttgaccggtaagaccatcacccttgaggtggagtcctccgacaccatcgataacgtgaaagctaagattcaagacaaggaagggatcccacctgaccagcagagacttatctttgcgggtaaacagcttgaggatggtcgaacccttgccgactacaacatccaaaaggaatccactctccacctcgtgcttcgcctcaggggtg

SEQ ID NO: 134446 - DNA, 263 bp, Glycine max
aaaccaaaacactcaagttaacttcaacacctttaattttctgaacgaaattcagccacagaatatcaaagggagcgaagatgagtcaggagcagccaaggcgcccccaaggccaagaccccatcaaatacggcgacgtttttgacgtctacggtgaccttgcacagatgcccattgcaccggaagatgctgccatgatgcaaagcgcggaagctcgagtactcggaaaaacccaacccggcggagcttcttccgtcatgcaa

SEQ ID NO: 134447 - DNA, 262 bp, Glycine max
cttatccctctaatcactctagctgttgcaaatttctactatttttcaatggcttctgcagatgttgagttccgttgctttgttggtgggcttgcttgggtcaccggcaacgatgccctcgagaaagccttttcaatctacggcgacatcgttgaatcgaaggttatcaacgaccgtgagactggaaggtccagaggattcggatttgtgaccttcgcctcagagcagtcaatgaaagatccgatcgcaggaatgaacggcc

SEQ ID NO: 134448 - DNA, 253 bp, Glycine max
ttcgagactaccggattgtccagtttcagtcaaaacccaacacaatccttctcccccaccatgctgacgccgatttcctcctctttgtccttaaggggagatccatacttaccttggtgaacaacgacgacagagactcctacaaccttcagcctggcgatgcccagagaatcccagctggaaccacttactatttggttaaccctcacgaccaccagagtctcagaataatcaaacttgccatacccgtcaa

SEQ ID NO: 134449 - DNA, 259 bp, Glycine max
gcttcacaagccaaatctaacttgtctctgttttctccgatctagtactactatcaatggccggaaaaggagatggtcctgctatcggaatcgatctcggcaccacctactcctgcgtcggagtgtggcagcacgaccgtgtcgaaatcatcgccaatgaccagggtaacagaaccacgccgtcttacgtcgctttcactgattccgagcgtttgatcggtgacgccgccaagaaccaggtcgccatgaaccccgtcaa

SEQ ID NO: 134450 - DNA, 261 bp, Glycine max
gttgatatattgcgccactatgaggttatgtacttaattcatgagaagcatgaagaggaggttgtagctgtcaatgagaaaattcaagactttttgagggagaagaaaggtcaggtttggagattgaatgattggggtatgagaaggctagcttacaaaataaaaaaagctaacaatgcccactacatgttgataaactttgagttggatgccaaatatatcaacgatttcaagactctgttggaccaagatgaaagagtt

SEQ ID NO: 134451 - DNA, 262 bp, Glycine max
cctgaatatgcagcaaatatgtggaatgaagccttgaacaaacgacttggaactaaaggacttgacctttcagaagttttagtagaagttgaaaagcgtggatcatcttttgatgaactactgacaattcccgaacaggatgattggatctacagtgatggaaagtcgacttcttgcattgcttttatacttgagatgtacaaggaggcagggctgtttgatccggttgctagttctgttcaagtgacagagtttacgataa

SEQ ID NO: 134452 - DNA, 263 bp, Glycine max
gccgtttctattattgacaccaacagcttggagaaccagctcgaccagatgcctaggagattctatcttgctgggaaccaagagcaagagtttctaaaatatcagcaagagcaaggaggtcatcaaagccagaaaggaaagcatcagcaagaagaagaaaacgaaggaggcagcatattgagtggcttcaccctggaattcttggaacatgcattcagcgtggacaagcagatagcgaaaaacctacaaggagagaacgaagg

SEQ ID NO: 134453 - DNA, 263 bp, Glycine max
ccttgcagctatgtcagtggatactgcgaaaggtttagctgctgctgcagctggggagaatgccaaggagtacactgcaaggaagaaggtggaagctgagatggatttggaggccaaaagggaagctcaaaatcaggaatcgaaggagtggccatcagcaaaatccaccactgagagcattcaaagaggacaaggacaacaagaacagcatgagcaaggagaaaaatgggaacatggtgcacaaaggactaataagccacatg

SEQ ID NO: 134454 - DNA, 260 bp, Glycine max
cgggggtcccagtcccgaacccgtcggctgtcggtggactgctcgagctgcttccgcggcgagagcgggtcgtcgcgtgccggtcgggggacggattgggaacgggcccttcggggcctcttcctcgggcgtcgaacagtcaactcagaactggtacggacaaggggaatccgactgtttaattaaaacaaagcattgcgatggtccctgcggatgttgacgcaatgtgatttctgcccagtgctctgaatgtcaaagtg

SEQ ID NO: 134455 - DNA, 262 bp, Glycine max
ggtttgattaccaagcaagttatgagcaagatggcagaaatgataaacagtctttgtggtggtgaaaaaattgatgcgtgaaaggacacacctgctgttggcttgttgttcaaggatggcaatttgtaagaaagatgtttggagagttgaatgtggaatcccttctggatttccgctcacagttatttgtaatagcatttttaatgagatgctcattagatatagctatgaaaaattactgcgccaggctaaagctccaagt

SEQ ID NO: 134456 - DNA, 262 bp, Glycine max
caaaattgaactgtaattgtagtagtagacagtagcaccatgagccaggaacagctcaagaaacctcaaggggagcaggaccccatcaaatacggcgacgttttcaaagtctccgacgaactcgctttcaaacccatcgcgccaagagacgcagctctcatgcaagccacggagaaccaagcattgggccaaactcaaaaaggaggtcccgcctcggtgatgcaatccgccgcaaccgaaaacctccgcgccggcgtcgtgg

SEQ ID NO: 134457 - DNA, 259 bp, Glycine max
agcttagttgtcaagttggaatcaacccatattccatggaatggactggtttggccaataggttactgagtaagggcaatgatattctgtgttgcgattatgctagttttgatggtttgattaccaagcaagttatgagcaagatggcagaaatgataaacagtctttgtggtggtgatgaaaaattggtgcgtgaaaggacgcacctgctgttggcttgttgttcaaggatggcaatttataagaaagatgtttggag

SEQ ID NO: 134458 - DNA, 259 bp, Glycine max
tttcgaatagattatcctaagtctttgggaatagtgctgcaatggcttcaagtcaggaggaggtgacccttttgggagctactggaagcccatttgtgtgcagggttcatattgccctcaagttgaagggagttcaatacaaatatgtcgaagaaaatttgaggaacaagagtgaactgcttctcaaatccaacccagttcacaagaaggttccagtgtttattcacaatgagaagcccatagcagagtctcttgtgat

SEQ ID NO: 134459 - DNA, 260 bp, Glycine max
aacaaaactacccttttgcttttgctctttgttctttgccatggagtggccacaacaacaatggccttccatgatgatgagggtggtgataaaaagtcaccaaaaagtttgtttttgatgagcaactccacgagggttttcaagactgatgcaggggaaatgcgtgtgctgaaaagccatggtggtaggatattttataggcacatgcacattggcttcatctctatggaaccaaagtccttgtttgttcctcagtacct

SEQ ID NO: 134460 - DNA, 253 bp, Glycine max
gctcctgggccaaatggaaagcagcggacctcaagtttggaatcaccgatcatgttgctgtcaggtcaccagagtgctatatataccatgaagttcaatccagcaggatcagtcattgcatctggatctcatgacagggaaattttcctctggaatgtgcatggggattgcaagaacttcatggttctgaaaggtcacaagaatgctgttttagatctccactggactactgatgggacacaaatagtctctg

SEQ ID NO: 134461 - DNA, 259 bp, Glycine max
gtgatgaaatttctataatgtgctgattttctgtgattattatcctaaatatcaccatctttcggctgagattgcagatcaaattgttcttttctatgaaaattttatcctagtctgtataaataaccttttctttttttattcaacagacaaactggcgtagaccaaagggtatagattcccgtgttaggagaaagttcaagggatgcactttgatgccaaacatcggttatggttctgacaagaagacccgccacta

SEQ ID NO: 134462 - DNA, 262 bp, Glycine max
aaagaaaggaaataattgatctttgaaaatgcagggaggaaagaaagctggagagtccatcaaggaaacagctgcaaacattggtgcttctgccaaggctggcatggagaaaaccaaggccactgtccaggagaaggcagaaagaatgacggcacgtgatccgatgcaaaaggagttggcaacccagaagaaagaggcaaagatgagccaggcagagctggacaagcaggcggcgcgtcagcataacacggcggcgaacagg

SEQ ID NO: 134463 - DNA, 259 bp, Glycine max
cttggacttgcagggttgctatgttggagatcaaggtctagctgctattggacagtgttgcaaacaacttgaagatttgaatctgcgtttctgtgaaggcactagctgcttgtctttggagttattggctttatatagttttcagagatttactgataagggtttgtgtgctattgggaatggatgtaagaagttaaagaacttgactttaagtgattgctatttcctcagtgacaagggtttggaagtaattgctact

SEQ ID NO: 134464 - DNA, 266 bp, Glycine max
caataattccttcacttgcagaacttagttctctgttgcatcatcatcatcttcattagtgttagccctaaacttcaccttcaaccatgaccacagtgccaccacacagtgtccaagtgcacacaacaacacaccgctacgaagccggcgtcgtcccgccggctcgttttgaggcgccgcgttacgaagccggcatcaaggcgccctcttccatttaccattccgagagaggtccgacgacctctcaggttctcgcagttgtcgcc

SEQ ID NO: 134465 - DNA, 254 bp, Glycine max
cgttactttcatttgttgtgcaatcttacaagttccaaacttctctattttgttattatgtgttctcacttctcacacatacagatttttgccttttatattatcatggcttctaaggtggtttcggttttggttatagcgatgatgttgtttgccatgaactgtaactgcactagtgttggccacatgccttcaaccaaagaggaaggtcacgattttcaggagtctaaagccaagaccacacaaactgcgat

SEQ ID NO: 134466 - DNA, 259 bp, Glycine max
cgagaaagttgaaactcggggacaacgagcttctgcgcacggagaagaagttcaaggttttcatggagaattacgggaggagctactccacagaggaggagtatttgcgccgtttggggattttcgcccagaacatggtcagagcggcggagcatcaggcgctggaccccaccgccgtccacggcgtcacgcagttctccgatctcaccgaggacgagtttgagaagctctacactggcgtcaatggcggcttcccgtc

SEQ ID NO: 134467 - DNA, 182 bp, Glycine max
agaaaacctaagcttagaattagaaacaaagaaaagaagaaaggaaagaattgatcgttgaaaatgcagggaggaaagaaagcgggagagtccattaaggaaacagctacaaacattggtgcttctgccaaggctggcatggagaagaccaaggccactgtccaagagaaggcagaaagaat

SEQ ID NO: 134468 - DNA, 255 bp, Glycine max
agagttcagaacacaaaccctcgaaccgaacgtttttgagggttgatagagcacgatggttcagtacaattttaagaagattaccgtggtgccaaatgggaaggatgtggtcgacattatcctctctcgcacccagcgtcagacaccaaccgttgtgcacaaaggatatgcgatttcacggctgcgccaattctacatgcgcaaagtgaagtcttctcagcagaattttcacgacaagctctccaccataatcga

SEQ ID NO: 134469 - DNA, 257 bp, Glycine max
ctcggcacgacctacagctgcgtgggcgtgtggcaaaacgaccgcgtcgagatcatccccaacgaccaaggcaaccgaaccactccctcttatgtagccttcaccgacaccgagaggctcatcggagacgcggcgaagaaccaagtcgccatgaacccgcagaacaccgtcttcgacgccaagcgtttaatcggtcgcagattctcagactcttcagttcaaaacgacatgaagctgtggccgtttaaggtcgtggc

SEQ ID NO: 134470 - DNA, 257 bp, Glycine max
cgccgacctcgatgaactctctgataacgaggctgaaattcccgaggataacgatgtggatgccgcagacatggaagaggatgtcgatggcgaccttgccgacctagaaaacctaaactatgatgacttggacagtgtttccaagttgcagaaaacccagaggtacactgatgttatccagaaagtggaagaggcacttaataaaaaggagtctgaggtcttgtttcaggtagtggatatagaagatgatcctgaat

SEQ ID NO: 134471 - DNA, 258 bp, Glycine max
gagagagcgagcagtttcagacacagagagaggggtttgggattggagggattgacgctgcgtctcttcctcttctctttcgatccatccctcattcctaatcctccaatccaaccacctcagcctcacactcacatatacacatatctgaacgcgtatcgtccctcctatggcttcaaagcgcatcctcaaggagctcaaggacttgcagaaagacccaccaacttcttgcagcgctggtccagtagctgaggacat

SEQ ID NO: 134472 - DNA, 257 bp, Glycine max
aactactacaagtacttccttacaatcaaaaccaacaacaactatggcaagttatcagaagcactacgatgatcagggtcgcaaggttgacgagtatggcaacgttgagaagcaaaccgacgaatacggcaaccctgttcatgctgctagtgtcacctatgtagccaccagaactgctgctggtggttacagtgatgacattaataagcaacatgataccaccaatgcctacggcgtagacactggtagacagcatt

SEQ ID NO: 134473 - DNA, 259 bp, Glycine max
gcttggaaaattagcctcacaaaagcaaagatcaaacaaaccaaggacgagaacacgatgttgcttgaacttgcacttggtttattggttttggctctgtttctgcacttgcgtcccacacccactgcaaaatcaaaagcacttcgccatctcccaaacccaccaagcccaaagcctcgtcttccgttcataggacaccttcatctcttaaaagacaaacttctccactacgcactcatcgacctctccaaaaaacatg

SEQ ID NO: 134474 - DNA, 258 bp, Glycine max
tgtttattaaaaacacaggactctgctaagtggtaacacgatgtatagagtctgacacctgcccggtgctggaaggtcggaaggagaagtgttataagctttgaatggaagccccggtaaacggcggcagtaactctaactgtcctaaggtagcgaaattccttgtcgcataagtagcgacctgcacgaatggtgtaacgactgccccgctgtctccgacatggacccggtgaaattgaattctccgggaagatgcgg

SEQ ID NO: 134475 - DNA, 254 bp, Glycine max
ggaaaatttcccggtcacttgcagcaaagacggcattggctattaggtgtgatgctcttggagatagccaagataacaccatgggattggagaacagagccaagcttgaagcacgattgaggaaccttgaaggcaaagagttaggtcgttttgctggttctgccaagggaaagcccaagatagaagcatacgacaaggaccgaaagataggagctggaggactgataaccccggccaagacatataatccttca

SEQ ID NO: 134476 - DNA, 255 bp, Glycine max
agaaaacctaagcttagaattagaaacaaagaaaagaagacaggaaagaattgatcgttgaaaatgcagggaggaaagaaagcgggagagtccattaaggaaacagctacaaacattggtgcttctgccaaggctggcatggagaagaccaaggccactgtccaagagaaggcagaaagaatgacagcacgtgatccggtgcaaaaggagttggcaacccaaaagaaagaggcaaagatgaaccaggcggactgg

SEQ ID NO: 134477 - DNA, 256 bp, Glycine max
cacgcacgtctctctctctctctcgccatggctatggctatgcaaagcggaatcggagtctccaagatcctcatcatagcaggagcaggttacaccggcaccgtcctcatcaaaaacggaaaactctcggatttaatcggcgagcttcagttgctggtgaagggattggaaaaatctggggagcatgctgaaggtgaaggtgaatatgctgatgccatagctgctcaggtgcgtcgcctggcgaatgaagttcggc

SEQ ID NO: 134478 - DNA, 254 bp, Glycine max
tagttctagatcgcgagcggcctacttttttttgatgaatttgattctatagcccccaagagagggcatgacaatactggagtaactgatcgtgttgttaatcaatttctgactgagttagatggtgttgagattttaactggtgtatttgtgtttgctgcaaccagtagaccagatttacttgatgcagcactgttgagacctggtaggttagatcgtcttctgttctgtgactttccgtctttgcatgagag

SEQ ID NO: 134479 - DNA, 256 bp, Glycine max
atgcagcataggctcatcaaatctggagtagtggttgctcgtttctttgtggcactgcatgcaagacaagaaattaatgcagagttgaagaaggaagcagaattttttggtgatattgttatagtgccgtatttggataactatgatcttgttgtgttgaaaacagtggccatatgtgaatatggggtacatacggtttctgctaagtatgtcatgaaaggtgatgatgacacttttgttagagtggatgccgtta

SEQ ID NO: 134480 - DNA, 255 bp, Glycine max
acaactactacaagtacttccttacaatcaaaaccaacaacaactatggcaagttatcaaaagcactacgatgatcagggtcgcaaggttgacgagtatggcaacgttgagaagcaaaccgacgaatacggcaaccctgttcatgctgctagtgtcacctatgtagccaccagaactgctgctggtggttacagtgatgacattaataagcaacatgataccaccaatgcctacggcgtagacactggtagacag

SEQ ID NO: 134481 - DNA, 181 bp, Glycine max
gcatcgaacccgtcgtagcagaaaaacttgtcaccatggtttcttccgacaaggatccacgagaggatgtccttcaagcctggtacatggatgatagtgatgaagatcaaagactcccccaccacaaagaacccaaggagtttgtctcgttggaccaacttgctgaacttggagtccttag

SEQ ID NO: 134482 - DNA, 257 bp, Glycine max
atctgcagttgtcagcacttaagcaggaatttgaagaggcaaagcaatccatgttagaatcagagaagaaactaaatttcaaagaagaaacagctgctgctgccatggcagccagagatgcagcagaaaagtctttaagttagcagacttgaggtcatctagactaagagacagagtagaggagcttactcatcagctcgaagagtttgagaacagggaagattcaaggagccataatcggcctagatatgtatgtt

SEQ ID NO: 134483 - DNA, 254 bp, Glycine max
agacattgtcatggacagcttggctgtacatggccttggcctagtgcacccaaagaaggttttcaatttctacaacgagctccatgcttacttagcttcttgtggagtagatggagtgaaggttgatgtgcagacattattgagacccttggtgcgggacatggtggccgagtgtcacttactcgcagctatcatcacgcgcttgaggcttccattgctagcaattttactgataacggatgcattgcgtgtat

SEQ ID NO: 134484 - DNA, 254 bp, Glycine max
gaagaatcccagaacaagccccccagcgagcagtccactaccgaactcatcacgagcgcgaagctggtggcggaggcggcgcagtcggctctgaagagcgacagcgtcaaagtggacaaggccaaggtggctgacgctgccggcgatcttctcgacgcggcggggaagtatggaaaacttgatgacaaacaaggcatagggcaatatgttgacaaggctgctgattatctgcataattaccagggtgataatac

SEQ ID NO: 134485 - DNA, 250 bp, Glycine max
cggctcgagcggctcgaggttggaatcaacccatactccatggaatggactggtttggccaatagattactgagtaagggcaacgatattctgtgttgcgattatgctagttttgatggtttgattaccaacaagttatgagcaagatggcagaaatgataaacagtctttgtggtggtgatgaaaaattgatgcgtgaaaggacacatttgctgttggcttgttgttcaaggatggcaatttgtaagaa

SEQ ID NO: 134486 - DNA, 253 bp, Glycine max
aaaagtgttccacttgagtgaaaagtagtgtgttaagaactaaacaatttttcaatggcgtccaagaaacaagaggagcgagctgatgcagctgcgaaagttgctgccaaagaactcgaacaagtcaacagagaagaagagaccgtgatttcggtgttgttgctgaacaacaacaacaacatcatcaggaagatcaacagaaacgtggtgtaatcgggtccatgtttaaggcggtgcaagacacctacgagaa

SEQ ID NO: 134487 - DNA, 256 bp, Glycine max
agctcgagccgctcgagccgattcggctcgagtgaagattgaagaacagtcgtcggctcctagttcgcccttcgatgctgcgccatcaccgtgcccatctcaaagcgattttaacctaaccgcgttctttttttcttcagaaatcgagcataaggatttgaggattgaagtattgaacaccaaatcctttatactttgactgtccaggttgggcaagaagggagggaaaaaggagaaacacaaaaatgtttttcca

SEQ ID NO: 134488 - DNA, 252 bp, Glycine max
cagaactgctgctggtggttacagtgatgacattaataagcaacatgataccaccaatgcctacggcgtagacactggtagacagcattctagtggtggctacgatggtgacactaataaacatcatggaactctggtggctataatgatgacaccaatagacatcatggaactaccggtgtctatggtatagacaccgataggcaacaacatgggactactggtggctatgccggtgacactggtaggcaa

SEQ ID NO: 134489 - DNA, 267 bp, Glycine max
ttcggctcgagagagaatcttgtgcagcaacgcagtttgtgagtgagttgggatttttctatggttttcctgagctgtgttttattctctttatctctctctctgccctctcatcttcgagctccgatggcgagcctgtggcggcggcgaccggcatgacggaaaacgccaccgattacgacggcgtcgagttctggtccaaccccgagcgcaccggctggctcaccaagcagggcgagtacatcaagacctggcgccgccgctggt

SEQ ID NO: 134490 - DNA, 247 bp, Glycine max
gttccgggcatgccccaggctaaggttgtcactccgaagctgtccaatggactaaaattgacaatgaaggatttagcggtggataagatcgtcagtaacggagttggactggtgccaccacacctggctcacttttgtacgaggggctccactcccgtttggaatctgcgggtattgacggtgttaaggttgacgttatacacttgctcgagatgctatccgaggaatacggtggccgtgttgagct

SEQ ID NO: 134491 - DNA, 179 bp, Glycine max
gtttaaacctaattctcatttcttcatcgttcgattcttctcctcctaaagatgcagatcttcgtgaaaactttgaccggtaagaccatcatccttgaggtggagtcctccgacactatcgataacgtgaagcttagattcaagacaaggaatggatcccacctgaccagcagagactt

SEQ ID NO: 134492 - DNA, 252 bp, Glycine max
gaaaatttgaagagtttgtttattgtgaaaaaaagaaaaatgcaggcagcaaagaaagccatagagacctttaaggaaaccgcagccaacattggcgcctctgccaagtctggcttggagaaaaccaaggcactatccaagagaagaatgagaagatgaatgcagaagatcaaactcaaatggatatggctaccaagaggaaagaagagaagatcaaccaggctgagatggagaagcagcaggcccgtaagt

SEQ ID NO: 134493 - DNA, 249 bp, Glycine max
atttggctgatgacaccatcaattttgaggcttttccccacaagctggtgcagtttggagagattcaggaaaaagttgtattgaaattttcacaagaggaatttcttacagcttggtcaactcaggtgcgcctgcaacaactctgttggctgatgggtgtccatatttgtatgctatggtgcatgatagttcagtgtctacaataccaggtgattttgtcattggtgttaagttgacaaccataaacaa

SEQ ID NO: 134494 - DNA, 253 bp, Glycine max
caaatacggcgacgttttcaaagtctccgacgatctcgctttcaaacccatcgcgccaagagacgcagctctcatgcaagccacggagtaccaagcattgggtcaaactcaaaaacgatgtcacgcatacgggcttcaatccgccgcaaccgataacctccgcgccggcgtcgtgggtagccaagacatctccgacgtggcgatgaatgaacgcgtgacgtggactgataccaagtgcgctgccatcgcgtca

SEQ ID NO: 134495 - DNA, 248 bp, Glycine max
attctttcaggccaaggcaatgcaggatcccgaaattcaaaacatccttcaagaccctgttatgagacaggtttgcttcctttttgattgaatgttggtatgtattgtggtagtgaaacaagagtgaaattgcttataagttggatgcgtactgtctatgcaggtattgattgatttccaagaaaatcccaaggctgcacaggaacacacgaagaatccaatggtgatgaacaagatccaaaagctgg

SEQ ID NO: 134496 - DNA, 249 bp, Glycine max
gactgtttaattacaacaaagcattgcgatggtccctgcggatgttgacgcaatgtgatttctgcccagtgctctgaatgtcaaagtgaagaaattcaaccaagcgcgggtaaacggcgggagtaactaagactctcttaaggtagccaaatgcctcgtcatctaattagtgacgcgcatgaatggattaacgagattcccactgtccctgtctactatccagcgaaaccacagccaagggaacgggct

SEQ ID NO: 134497 - DNA, 249 bp, Glycine max
ctgctcgtagggtttctccacctagagggaaatggctcccaaaacgcctagtacgggtctgtttgttggactgaacaagggtcacgtcgtcaccaagaaggaattgcctccacgcccctcagatcgtaggggaaaacaagcaagagggtgcactttgtgaggtacctcataagagaggtagccggttttgcaccctatgaaaagcgtataactgagttgctgaaggttgggaaggataagagggcactg

SEQ ID NO: 134498 - DNA, 251 bp, Glycine max
ggcaaagcgaggccatgccctcatgtgcttggcacgtgtttcactcttcctctgcgctctaaccctatccgctgctcacggaagcaccacggttcaagacatcgcgagaaagttgaaactcggggacacgagcttctgcgcacggagaagaagttcaaggttttcatggagaattacgggaggagctactccacagaggaggagtatttgcgccgtttggggattttcgcccagaacatggtcagagcggc

SEQ ID NO: 134499 - DNA, 176 bp, Glycine max
gaaaaaaaaaagattcgatagaaactaagaaaataaacaaattgattcgccgagaaagaggagagagagggattcgaaccctcgatagttctttgttccgaactataccggttttcaagaccggggctacaaccactcagcaatctctccataagctaattgatgttttatcttta

SEQ ID NO: 134500 - DNA, 249 bp, Glycine max
aaccaacaacaactatggcaagttatcaaaagcactacgatgatcagggtcgcaaggttgacgagtatggcaacgttgagaagcaaaccgacgaatacggcaaccctgttcatgctgctagtgtcacctatgtagccaccagaactgctgctggtggttacagtgatgacattaataagcaacatgataccaccaatgcctacggcgtagacactggtagacagcattctagtggtggctacgatggtg

SEQ ID NO: 134501 - DNA, 247 bp, Glycine max
atttgtgattccaatttccacatattattagatctctccatggagtgggagatgaggcccggcggcatgttcgttcagagacgcgaggcagcggcggataacggcggcggcggcaacggcaacatgacacgacggtgttgatcactgtcgtccacgcttcctcccactacgacctccacctccctaccaactccactttctgggatgttaagagtctgcttgtacatagaactggtttacagcctga

SEQ ID NO: 134502 - DNA, 248 bp, Glycine max
gcgccactcgatgtttccatttgcctgcatgcctttggtattgtggggtgtggttcgtttagtggtgtcaagtcttgcgaacgtgagggtgcatgagtggtaatcgggatgtttttgttgcacggctccatgcttgcgcatgcaacgtgtgacatgcatccttttcattgtcaccttagccttcgtggcttaggtgctgacgattggttcctgtgttgcctacctaccaaacggtattcgtgtggcta

SEQ ID NO: 134503 - DNA, 248 bp, Glycine max
agcaaaccgacgaatacggcaaccctgttcatgctgctagtgtcacctatgtagccaccagaactgctgctggtggttacagtgatgacattaataagcaacatgataccaccaatgcctacggcgtagacactggtagacagcattctagtggtggctacgatggtgacactaataaacatcatggaactactggtggctataatgatgacaccaatagacatcatggaactaccggtgtctatggt

SEQ ID NO: 134504 - DNA, 269 bp, Glycine max
tcggaatccagctcgagcacacaactactacaagtacttccttacaatcaaaaccaacaacaactatggcaagttatcaaaagcactacgatgatcagggtcgcaaggttgacgagtatggcaacgttgagaagcaaaccgacgaatacggcaaccctgttcatgctgctagtgtcacctatgtagccaccagaactgctgctggtggttacagtgatgacattagtaagcaacatgataccaccaatgcctacggcgtagacactggt

SEQ ID NO: 134505 - DNA, 250 bp, Glycine max
aacaaacatggctttacagaacattggtgctgcaaacagtgatgatgccttctacaggtataagatgcctaagatgattaccaaaattgagggcagaggtaatggcatcaaaactaatgttgtcaatatggttgacattgcaaaggcattggcaaggcctgcgtcttacacgaccaagtattttggttgtgaacttggggcccagtcgaaatttgatgagaagaccggaacttctcacgtcaatggagca

SEQ ID NO: 134506 - DNA, 246 bp, Glycine max
ctcgagccgattcggctcgagctacaagtacttccttacaatcactaccaacaacaactatggcaagttatcaaaagcaatacgatgatcagggtcgcaaggttgacgagtatggcaacgttgagagcaaaccgacgaatacggcaaccctgttcatgctgctagtgtcacctatgtagccaccagaactgctgctggtggttacagtgatgacattaataagcaacatgataccaccaatgccta

SEQ ID NO: 134507 - DNA, 246 bp, Glycine max
gacatttctcacctgacatgtgcagatttccttcgatcccctggagttcagacgcctgtaattgttcgtttctcaactgtcattcatgagcgtggtagccctgaaaccttgagggaccctcgaggtttgccgtgaagttttacaccagagagggtaactttgaccttgttggaaacaaccttcccgtcttctttgtacgtgacggcatgaaatttccagatatggttcatgctcttaaacccaatc

SEQ ID NO: 134508 - DNA, 248 bp, Glycine max
attttcacaagaggaatttcttacagcttggtcaactcaggtgcgtcctgcaacaactctgttggctgatgggtgtccatatttgtatgctatggtgcatgatagttcagtgtctacaataccaggcgattttgtcattggtgttaagttgacaaccataaacaatatgtgtgcatatgggctcaatcctggtatttcaggttctcgtcttttgggcaccattcctcagtctatttcacagcaaactg

SEQ ID NO: 134509 - DNA, 248 bp, Glycine max
aaataaaatcaccatgtctatcatcccaaacttgttcggtggtagacgaagcaacgtcttcgacccattctctctggacgtatgggaccctttcgaggggtttcctttttccacaggtcacgtgccttctctggtggggaaagcagtgccatagccaacactcgcgtggactggaaggagactccggcggctcacgtgttcaacgttgatcttcccgggttgaagaaggaggaagtgaaggttgaagt

SEQ ID NO: 134510 - DNA, 247 bp, Glycine max
ccaagcagtgggaggaggctcgggactctgaccgcgtgcctgttgaagaatgagccggcgactcataggcagtggcttggttaagggaaaccaccggagccgtagcgaaagcgagtcttcacagggcattgtcactgcttatggacccgaacctgggtgatctatccatgaccaggatgaagcttgggtgaaactaagtggaggtccgaaccgactgatgttgaagaatcagcggatgagttgtggt

SEQ ID NO: 134511 - DNA, 245 bp, Glycine max
ggctcagccggaggtagggtccagcggctggaagagcaccgcacgtcgcgtggtgtccggtgcgcccccggcggcccttgaaaatccggaggaccgagtgcctcccacgcccggtcgtactcataacgcatcaggtctccaaggtgaacagcctctggtcgatggaacaatgtaggcaagggaagtcggcaaaatggatccgtaacctcgggaaaaggattggctctgagggctgggcacggggg

SEQ ID NO: 134512 - DNA, 245 bp, Glycine max
tctcgagccgaatcggctcgagcgacaagcaaacgaaaagtaaaactatcaatcgttggaatctctcaacttatcgcttcatcctgatttgggggtttccgtttcaatggacgacggcgagctggattctcgaaccatgaagtgttttcgagtccgaacatgggggagcttccgagcagcggttcaatggacagtttcttcgacgagcttctcaaggacacgcacgcgtgcacccacacccacac

SEQ ID NO: 134513 - DNA, 249 bp, Glycine max
gcgagaaggaggctgaagaaaagttgcaagaaattcaggtagctgctgggtcagctaatgctgacaaatatgaaccgaaagctgtctggaaagaaatattgtgccctactcctcctgttagaagaatgcttataactggttgtggaattcagtgtttccagcagattacaggcatagatacaactgtatattatagccccacaatttttaagaatgctgggatcactggtaactctgagcttcttgcag

SEQ ID NO: 134514 - DNA, 248 bp, Glycine max
tgcagaccgagctagctagctagcaagcaagcacagagatggaggcaaagcgaggccatgccctcatgtgcttggcacgtgtttcactcttcctctgcgctctaaccctatccgctgctcacggaagcaccacggttcaagacatcgcgagaaagttgaaactcggggacaacgagcttctgcgcacggagaagaagttcaaggttttcatggagaattacgggaggagctactccacagaggaggag

SEQ ID NO: 134515 - DNA, 242 bp, Glycine max
cttagaaagaaaaaaacttaaatcaaaatacttaatagcatggcgatacatttatacaaaacttctaccccaagcacacgcaatggagccgtagacagtcaagtaaaatccaatccacgaaatatttgatctatggacagcatcgttgtggtaaaggccgtaatgccagaggaatcattaccgcagggcatagagggggaggtcataagcgtctataccgtaaaattgattttcgacggaat

SEQ ID NO: 134516 - DNA, 241 bp, Glycine max
tgcggatgttgacgcaatgtgatttctgcccagtgctctgaatgtcaaagtgaagaaattcaaccaagcgcgggtaaacggcgggagtaactatgactctcttaaggtagccaaatgcctcgtcatctaattagtgacgcgcatgaatggattaacgagattcccactgtccctgtctactatccagcgaaaccacagccaagggaacgggcttggcggaatcagcggggaaagaagaccc

SEQ ID NO: 134517 - DNA, 244 bp, Glycine max
ggcttatggtggatacctaggcacccagagacgaggaagggcgtagtaagcgacgaaatgcttcggggagttgaaaataagcgtagatccggggattcccgatataggtcaacctttcgaactgctgctgaatccacgggcaggcaagagacaacctggtgaactgaaacatcttagtagccagaggacaagacagcataagcgattcccgtagtagcggcgagcgaaatgggagcagcctaaa

SEQ ID NO: 134518 - DNA, 242 bp, Glycine max
agcgtaccggatttcattgtgatatcatttgtgtcactggatggactgccactccaatgcaggatgttcaggttacaattgattggtttatttcctctcaggaatgtgttcccaggacttatgtgttttaaatccacaaaatccttttgtgttgaataggtggatggggaaactgactttcccccagggcacttcccgaagtgttaagagaatgcctctttctatagggggaggagctggtg

SEQ ID NO: 134519 - DNA, 245 bp, Glycine max
ttcaccctcggttacaagacggttctcaaatcacttaggagctccaaagggacattgattatcattgctaacaactgcccccctttgaggaaatcagagattgaatactatgctatgttggccaggttggagttcatcattacaatgggaacaatgtggatttgggcactgcatgtggaaaatattacaaagtgtgctgccttagcattattgatcctggtgattctgatatcatcaagacacta

SEQ ID NO: 134520 - DNA, 244 bp, Glycine max
gagaaacaaagaaaggaaataattgatctttgaaaatgcagggaggaaagaaagctggagagtccatcaaggaaacagctgcaaacattggtgcttctgccaaggctggcatggagaaaaccaagccactgtccaggagaaggcagaaagaatgacggcacgtgatccgatgcaaaaggagttggcaacccagaagaaagaggcaaagatgagccaggcagagctggacaagcaggcggcgcgt

SEQ ID NO: 134521 - DNA, 242 bp, Glycine max
ctgactttcccccagggcacttcccgaagtgtaaagagaatgcctctttctatagggggaggagctggtgcaaagaatgctattctcatgaatatgccaaatgctgttctttcaatgtggagatattttgttggagatctcgtctttgaagtttctaagatgacttctccctacattaaatgtacagtctctttcttcatagcatttggaaatttggctgatgacaccatcaattttgaggc

SEQ ID NO: 134522 - DNA, 243 bp, Glycine max
  unsure (1)..(243): unsure at all n locations
aagaacttcgtgtcggagaaggtaaatgatatggccaagccggagggangtgtcactgacgtggacttcaagcgcgtgagcaaagataatgtcgagtacttggccaaggtctctgttcgtaaccttattcaacttccatacccatttgtgagatcaactactctttcaaaagcgcatccagggagatagcatcagggaaaattccagacccaggatcgttgaaggcaaaggacacaacaatgg

SEQ ID NO: 134523 - DNA, 244 bp, Glycine max
gggacaagaagccgcagagtcatggacagaatgggctaaagagaaactcagtgaaggtcttggcttcaaacatgatcaggaatccaaagaatccaccactaacaaagtctctgattatgccatgacactgcacagaaatccaaggattatgcaactgacactgctcagaaatcaaaggactatgcaggtgatgctgctcagaaatcaaaggactacgcaggtgatgctgctcagaaaaccaaag

SEQ ID NO: 134524 - DNA, 243 bp, Glycine max
atttaattaaataaatttgacaggagaagctgggtttgggcggaacgggagagagagggttccttccggtcgctgtaatcggtttggctgagaagggaatcgaaaatcaattgaggaagaaggtgtcggtgacagcgggtgttagtgatactgtgatagcagttagggataagctcagaggtaaaattggccaaactaaagttaagcgttattggcctggtaaagttcctgaatgggctgatg

SEQ ID NO: 134525 - DNA, 245 bp, Glycine max
aataaaccgaatgagagcattaacctcttcttcttccactttcattccaaagcgttattccttcttcttcttcctctccattctcttcgctcttcgatcctcgtccgggggctgctccgaataccccaccaccacgcgccgatggccacgataggaggcttacgcgactcccaaggctctcagaacagcgtccaaaccgaggccctcgctcggttcgccgtcgatgaacacaacaagaagcagaa

SEQ ID NO: 134526 - DNA, 238 bp, Glycine max
ctccttttctctccatttttgttgtggagaattgggagtggttacacgacagtgttttcacttctactaggtgcaagcattctgtgtcgtgatgttgtattccttcgtttcaatgaataataaaatcgtggttgtgcaaaaaaagaaaaaaaaaagggtgtcagccaactagggatctcgactgcccgggatttaatcccggaaggggacctgaaggcacacgcattttccaaaaagt

SEQ ID NO: 134527 - DNA, 240 bp, Glycine max
agagaattcgaggtgtagatatgaagaatgattttgcctttgttgaatttagcgatcctcgggatgctgatgatgctagatatagcttggatggtcgtgatgttgaaggaagtcgtatcatgtggaatttgccaaggggggtcctcgtggttcccgggaaaacttgggtcggggactacctcctggatctggacgatgctttaactgtggcattgatggtcattgggcccgagattgcaa

SEQ ID NO: 134528 - DNA, 234 bp, Glycine max
gttctagatcgcgagctaccgcccttttttgtttttatttttttttttgtcttcgtttcattctctctggaggtatttgaccctttcgagggggggccggtggccacaggtcacgtgccttcctctggtggggaaagcagtgccatagccaacactcgcgtggactggaaggagactccggcggctcacgtgttcaacgttgatcttcccgggttgaagaaggaggaagtgaag

SEQ ID NO: 134529 - DNA, 242 bp, Glycine max
ggctgctgctatcgaatactcggataaggagggtaagggcggtgaagtgcagtacttcaatccccttttctctcttctccttttatttcatcactcacacatgcccagttctctccaccagatggattgccttatgatgaattcttttcacaaagatctgagtctctcttgaaggttcttaggtcaggtgccaggataaagaaggaagcctttcaggctgcttccattcctgttgttttggt

SEQ ID NO: 134530 - DNA, 242 bp, Glycine max
ttcagatttttccggtgtcactcctaagaaaaaggagattcagactccaaacccaatgctgactccttctgcaactcctggagctgcaggtctcactcctagaattggcatgacaccaacagagatggtttttcttttagcatgacaccaaagggaactcctcttagggatgagctacatattaatgaggacatgaatatgcatgacagcactaaacttgagctacagagacaggctgatat

SEQ ID NO: 134531 - DNA, 236 bp, Glycine max
gcagcacagaagacaaaggattatgccactgacgcagcacagaagaccaaagattatgctactcagaagaccaaggactatgcaagtgatgcaactgatgctgcaaagaagactaaagatatgctgctcagaagactaaggactatgcaagtgaagctagtgatgttgcacagaacacaaaagattatgctgctcagaagaccaaggactatgccagcggtggtgcgcagaagacc

SEQ ID NO: 134532 - DNA, 244 bp, Glycine max
gcatttcgttactttcatttgttgtgcaatcttacaagttccaaacttctctattttgttattatttgttctcacttctcacacatacagaatatagacttttatattatcatggcttctaaggtggtttcggttttggttatagcgatgatgttgtttgccatgaactgtaactgcactagtgttggccacatgccttcaaccaaagaggaaggtcacgattttcaggagtctaaagccaaga

SEQ ID NO: 134533 - DNA, 221 bp, Glycine max
ccaaggatgtgtcgcagcaaatcaaaatggccaacaagaaaatgaagaaggaacaatattcttgtgaccatccacctgcatcatgggattggaggaaaaaaggtgtcatcacccaagtaaagtaccaagggggttttgaaaccgtttggcgttttctgccacgggagccatagaagcagcacatgcaatagcaacagggagaccttgttagcctttctgaa

SEQ ID NO: 134534 - DNA, 225 bp, Glycine max
tctcgagccgaatcggctcgagcgtatttcatagtcagaggtgaaattcttggatttatgagagacgaacaactgcgaaagcatttgccaaggatgttttcattaatcaagaacgaaagttgggggctcgaagacgatcagataccgtcctagtctcaaccataaacgatgccgaccagggatcagcggatgttgcttttaggactccgctggcaccttatgaga

SEQ ID NO: 134535 - DNA, 226 bp, Glycine max
cacccaacaaacactctctttggtaccaagcggttgattggtaggcgctttgatgacgctcaaacacataaggagatgaaaatggttccattcaagattgttaaggctccaaatggagatgcatgggtggaagccaatgggcagcagtattcccctagtcaaattggtgcctttgttctcaccaagatgaaggaaactgcagaagcttatctaggatagtcaattt

SEQ ID NO: 134536 - DNA, 222 bp, Glycine max
tggtcgcagaagtggaaccacgggcggcaccggttatggaggcactggtggcactgattaaggaacaactcgtggcactggttatggaagtggaactgggtatggagtcaacactgggggtgcgcacactgaagcaggatataggcatgaacatcgtcagcatgaccaatctcatggtgatcagaacgagaagtaagggattatggtcaagattaaggagaa

SEQ ID NO: 134537 - DNA, 225 bp, Glycine max
tgccaggaacaggcctaatatgacacgttttagactatgtattatcgagcctcaagctcctgaccatcttacccatcaacctctggatgctggttttggagctattgtagagcattgcaaggatcttcagcgcctttccctttccgggcttcttactgaccgtgtttttgaatatattgggacttatggcaagaagcttgagatgctttctgtggctttcgcggg

SEQ ID NO: 134538 - DNA, 224 bp, Glycine max
aaagccaatgattagaggcatcgggggcgcaacgccctcgacctattctcaaactttaaataggtaggacggtgcggctgctctgttgagccgcgccatggaatcgagagctccaagtgggccatttttggtaagcagaactggcgatgcgggatgaaccggaagctgggttacggtgcccaactgcgcgctaacctagaccccacaaagggtgttggtcgatt

SEQ ID NO: 134539 - DNA, 223 bp, Glycine max
ggagcaagtttacgagctcttctcgcgtgctggggaaatcaaaaagatcatcatgggcttggacaagaacacaaaaacgccttgcggcttctgtttcgttttatattattctcgtgaagatactgaggatgtttgcaaatacataagtgggacgatactggatgatcgtcccattcgagttgattttgattggggatttcaggatggtagacaatgggggcgt

SEQ ID NO: 134540 - DNA, 212 bp, Glycine max
ggctcgagcttcgcgaaggtgtaccacgcgcgccacctgaagacgggaaagagcgtggcgatgaaggtggtgggcaaagagaaggtggtgaaggtaggcatgatggagcagatcaagagagagatctcagccatgaacatggtgaagcacccaaacatcgtgcagcttcacgaggtcatggcgagcaagtccaagatctacatcgccatgga

SEQ ID NO: 134541 - DNA, 220 bp, Glycine max
ctcgagccgaatcggctcgagttcatgtgacaatgggtgtaattgaggtcttatgacgaatgcctacaattatttgctcgagtctggtggggtggaggaggagtcttcatatccctacactggggagagaggtgaatgcaagtttgatccagagagtatagcagttaagatcacaaatttgaccaatatccctgctgatgggaaccaaattgccgcatat

SEQ ID NO: 134542 - DNA, 223 bp, Glycine max
gcatcgatgagtccaagttcaggactggtaataacaagaaccagaatcagaacgaagaccaggataagtgataatgtaacacccttcactagtatgtgtagtgtgttcttatgctagcttaaatgtgagtgtcaagtgttttaggaagtaggaaaagaataggttataaaaaataatgtttaggcaatagttatataggtcaaagtgtcatgtcatgtgtgtc

SEQ ID NO: 134543 - DNA, 224 bp, Glycine max
gaaaaattgatgcgtgaaaggacacacctgctgttggcttgttgttcaaggatggcaatttgtaagaaagatatttggagagttgaatgtggaatcccttctggatttccgctcacagttatttgcaatagcatttttaatgagatgctcattagatatagctatgaaaaattattgcgccaggctaaagctccaagtatgtttttacaatccttcaaaaattt

SEQ ID NO: 134544 - DNA, 224 bp, Glycine max
ttttgattggagagagaaaggagctgtcaccgaagttaagttacagggtagatgtggatcatgctgggctttcagcaccacaggatctatagaaggagccaattttcttgccaccggaaagctcgtcagtcttagtgaacaacagctccttgactgtgacaacaagtgtgacataacagaaaagacttcatgtgacaatgggtgtaatggaggtcttatgacaa

SEQ ID NO: 134545 - DNA, 223 bp, Glycine max
atgagatgctcattagatatagctatgaaaaattactgcgccaggctaaagctccaagtatgtttttacaatccttcaaaaattttgtttctttgtgtgtgtatggtgatgataacttaattagtgttcatgaatatgtcaagccttactttagtggttctaaattgaaaagctttctagctggtcataatatcaccattactgatggtattgacaaaactag

SEQ ID NO: 134546 - DNA, 223 bp, Glycine max
tgggtggatggggttggatattggtcctgattccatcaagacatttggtgaagcattggatacgactcagaccattatttggaatggaccaatgggtgtttttgagtttgataagtttgccacaggaacagaggctatagccaagaaactggcagagctgagtgggaagggagtgacaaccatcattggaggaggtgactccgttgccgctgtggagaaggtt

SEQ ID NO: 134547 - DNA, 225 bp, Glycine max
cacgagatatggcttcaactctgcttcccctggcaaccttcttcttagttctctccgcttcttatctccagattgctggggcgaaagcacaaccgttgactagtctcaagcttaactctccgatccttcaggagtctattgctaaagagatcaatgaaaatcctgaggcaggatgggaggctgctataaatcctcatttctccaattatacagttgaacaattta

SEQ ID NO: 134548 - DNA, 219 bp, Glycine max
ggattctacccgccgctcgatgggaattgcgcttcaaggcgtctcgtagggctaatccgcctcacgagggtcaccaacggcacgtgcctttggggggccgaggccccctactgctggtcggcaaacggacggcgggcgcacgcgtcgcttctagcccggattctgacttagaggcgttcagtcataatccaacgcacggtagcttcgcgccactggctt

SEQ ID NO: 134549 - DNA, 221 bp, Glycine max
cacaaaacaaaaagtttacgttacaaatcgcataataaccgtcctaagtttattgagagaattttgcaagtgtgagaaacatggcatctcgtcaaaacaacaagcaagagcttgatgaaagagcaaggcaaggagagactgttgtcccgggtggaactggtggcaagagcctggaggctcagcaacaccttgctgaaggaaggagcaagggcaggcaaaca

SEQ ID NO: 134550 - DNA, 222 bp, Glycine max
gaaaacctaagcttagaattagaaacaaagaaaagaagaaaggaaagaattgatcgttgaaaatgcagggaggaaagaaagcgggagagtccattaaggaaacagctacaaacattggtgcttctgccaaggctggcatggagaagaccaaggccactgtccaagagaaggcagaaagaatgacagcacgtgatccggtgcaaaaggagttggcaacccaaa

SEQ ID NO: 134551 - DNA, 223 bp, Glycine max
gcagatcgtgacagtggagggaggcctcagcgttatcagccccaagtggcaagaacaagaagacgaagacgaagatgaagacgaagaatatgaacaaactccctcttatcctccacgacgaccaagccatggaaagcatgaagatgacgaggacgaggacgaagaagaagatcaacctcgtcctgatcaccctccacagcgaccaagcaggcccgaacaacaa

SEQ ID NO: 134552 - DNA, 222 bp, Glycine max
aacctctttatttcggagttttctttctttggatctttgtctaatgtgggagcaatggtgggagctatagcgagtggtcagatagctgaatgtatcgggcgcgaagggtcattgatgattgctgcgatccccaatataatagggtggcttgctatttcttttgccaaagattcctcatttttgtatatggggaggttgttggaaggttttggcgttgggatt

SEQ ID NO: 134553 - DNA, 224 bp, Glycine max
ctcgagccgcaaaaccaacaacaactatggcaagttatcaaaagcactacgatgatcagggtcgcaaggttgacgagtatggcaacgttgagaagcaaaccgacgaatacggcaaccctgttcatgctgctagtgtcacctatgtagccaccagaactgctgctggtggttacagtgatgacattaataagcaacatgataccaccaatgacctacggcgtaga

SEQ ID NO: 134554 - DNA, 223 bp, Glycine max
gccgaagttttcaaaagagctggtacttacgatcccaagagacttttgggagtcactatgcttgatgttgttagagccaatacgtttgtggcagaagttctgggtgttgatccaagggatgtggatgtcccagttgttgggggacatgctggaatcacaattttacctcttctttctcagattaaacctccttgctctttcaccccaaaagatattgagtacc

SEQ ID NO: 134555 - DNA, 224 bp, Glycine max
cggctcgagaacaaagaaaggaaataattgatctttgaaaatgcagggaggaaagaaagctggagagtccatcaaggaaacagctgcaaacattggtgcttctgccaaggctggcatggagaaaaccaaggccactgtccaggagaaggcagaaagaatgacggcacgtgatccgatgcaaaaggagttggcaacccagaagaaagaggcaaagatgagccagg

SEQ ID NO: 134556 - DNA, 218 bp, Glycine max
cttcttctcttgcggctagggttttagcgcacttcttctagatttaaggaagatgggtaaggaacaggttcacatcagtattgtggttattggccatgttgactctgggaagtccactaccactggccacctgatctacaagcttggaggcattgacaagcgtgttattgagagatttgagaaggaagctgctgagatgaacaagaggtctttcaagt

SEQ ID NO: 134557 - DNA, 218 bp, Glycine max
tgcagggcgttgctataactcaagaaaattctttgctggataagactgcaagaattgacggttggttagctagatttccaatgtttgactgggtgggaggtagaacatcagagatgtctgcagtgggcctgcttccagcagcccttcagagcattgacataagagaaatgcttgctggtgcagcattaatggatgaggcgaataggagtactgtgata

SEQ ID NO: 134558 - DNA, 220 bp, Glycine max
aaagaacaagggattctcttcatccaagttcgctagtaggacatattgtaatggcaacagtggaagcatcccatgaagctatggctacggtggccaacaaggcaccaatcactgctgagagaaaggtccctgaggacttggacagcaaactccccaaaccatatttgcctagagctttgagtgcccctgacacagagaatgtgaatggcacgtggggcca

SEQ ID NO: 134559 - DNA, 221 bp, Glycine max
taagcttagaattagaaacaaagaaaagaagaaaggaaagaattgatcgttgaaaatgcagggaggaaagaaagcgggagagtccattaaggaaacagctacaaacattggtgcttctgccaaggctggcatggagaagaccaaggccactgtccaagagaaggcagaaagaatgacagcacgtgatccggtgcaaaaggagttggcaacccaaaagaaag

SEQ ID NO: 134560 - DNA, 223 bp, Glycine max
tgcagggcgttgctataactcaagaaaattctttgctggataacactgcaagaattgagggttggttagctagatttccaatgtttgactgggtgggaggtagaacatcagagatgtctgcagtgggcctgcttccagcagcccttcagagcattgacataagagaaatgcttgctggtgcagcattaatggatgaggcgaataggagtactgtgataaggaa

SEQ ID NO: 134561 - DNA, 220 bp, Glycine max
ggagacgagttgcttcttcaagaaggccatagtagaagtgtatatggtttggctttccacaatgatggatcattggctgcatcttgtggactagactccctggctcgtgtttgggacctccgaactggaagaagtatccttgcactggaaggtcatgtcaaaccggttctcggcatcagtttttcacccaatggatatcatctagccacgggtggtgaag

SEQ ID NO: 134562 - DNA, 219 bp, Glycine max
cgaaccgggaaaagcccaccatgaaaatcggtcgccctcggcgtccgaattgtagtctggagaagcgtcctcagtggcggaccgggcccaagtcccctggaagggggcgccagagagggtgagagccccgtcgtgcccggaccctgtcgcaccacgaggcgctgtcggcgagtcgggttgtttgggaatgcagccccaatcgggcggtaaattccgtcc

SEQ ID NO: 134563 - DNA, 219 bp, Glycine max
caatcaccctcgcgccctcgctcttcccttcctggtggcgacaatgtcgactcctgctaggaagaggctgatgagagacttcaagaggctgcaacaagacccgcctgcagggatcagcggtgccccccaggataacaacataatgctgtggaatgctgtcatatttggtcctgatgatactccatgggatggaggcacgttcaagttgactctccagtt

SEQ ID NO: 134564 - DNA, 218 bp, Glycine max
aaagaaaggaaataattgatctttgaaaatgcagggaggaaagaaagctggagagtccatcaaggaaacagctgcaaacattggtgcttctgccaaggctggcatggagaaaaccaaggccactgtccaggagaaggcagaaagaatgacggcacgtgatccgatgcaaaaggagttggcaacccagaagaaagaggcaaagatgagccaggcagagc

SEQ ID NO: 134565 - DNA, 219 bp, Glycine max
aaaggaagttccatgcacagaagagttccctctgtcagcaatgaacccatatggacgaactaagcttatcattgaagaaatttgtcgtgatgtccaccgtgcagagccagattggaaaataatattgttaagatacttcaacccagtcggtgcacaccctagcggttgtattggggaggatccccgcggaattccaaacaatctcatgccatttgttca

SEQ ID NO: 134566 - DNA, 221 bp, Glycine max
gattcagcacactttcaacctaaaaagccagcaggccaggcagataaagaacaacaaccctttcaagttcctggttccacctcaggagtctcagaagagagctgtggcttagagccctttttgtatgtgctaccccacttttgtctttttggcaatagtgctagcaaccaataaataataataataataatgaataagaaaacaaaggctttagcttgcct

SEQ ID NO: 134567 - DNA, 218 bp, Glycine max
attttgtaagaatgggtctagtcacaactgagaggaacagtctagacccagctgcagctccgtttgctaaaaatccaagagacatagaagggcttactgagggtgctagtataattgaagtggttaagaagattaggtcacatgtgctccttggtttgtctggcgttggtggtatttttaatgaggagccttgcttcatacatggctgaggaagatat

SEQ ID NO: 134568 - DNA, 218 bp, Glycine max
aaaagactttctctttacaaattttgtaactttcaagactcagctaataaacatcaaaagatgtctctgattccaagtatttttggtggccgaaggagcaacgtgttcgatcctttctcccttgacgtgtgggaccctttcaaggattttcattttcccacttctctttctgctgaaaattctgcatctgtgaacactcgtgtggattggaaagaaac

SEQ ID NO: 134569 - DNA, 221 bp, Glycine max
tccagacaaaaaagtggtgtcatcatgtgagaagaagaagaagaaaagtgtgagtgcagaaaagaagagtggtgggcgagctcggaagaacgtgtacagaggaatcaggcaaaggccgtggggcaagtgggccgcggaaataagggacccacataagggcgtccgcgtctggctcggcaccttccccaccgccgaggaagccgcccgagcctacgacgacg

SEQ ID NO: 134570 - DNA, 222 bp, Glycine max
ctccgacgtggcgaggaacgaaggcgtgagcgtgaccgaaaccaaagtgggctgccaccgcgtcatcacggagttcgtgggaagacacgtggtggggcagttcgtggagcccgacgtccccatgaacaccccaggcaccgcgctggagcgtgacgccataaccatcggcgaggctctcgaggcatcggcgatagccggagcaagcgacaagccggtggatga

SEQ ID NO: 134571 - DNA, 222 bp, Glycine max
ctaagcttagaattagaaacaaagaaaagaagaaaggaaagaattgatcgttgaaaatgcagggaggaaagaaagcgggagagtccattaaggaaacagctacaaacattggtgcttctgccaaggctggcatggagaagaccaaggccactgtccaagagaaggcagaaagaatgacagcacgtgatccggtgcaaaaggagttggcaacccaaaagaaag

SEQ ID NO: 134572 - DNA, 197 bp, Glycine max
tcgtaattcggctcgagggaagaaattctgtcttctagtgcaagtgatttcagaactgcaatggtgagtaaaaatagcaagcctcaagctactgcaatgcatgtgggagctataggaattatcattgatagtttcgcaagtcctgactgcaacatagttggtgcagtgcttttggttgatacttatcataccaatcc

SEQ ID NO: 134573 - DNA, 218 bp, Glycine max
caaccagatagacacagtgaaacgcgaagatggggcaaacatcaccgagcaagacctcttgcagataccaagaggagcccgcaccatggaaggtctcagattgaacacaagggtgggaattcagtacgtggcggcgtggctcaccggaagcggttcggtgcctctatacaacctcatggaggatgctgccactgctgagatcagcagggtgcagaatt

SEQ ID NO: 134574 - DNA, 217 bp, Glycine max
cacacacaactactacaagtacttccttacaatcaaaaccaacaacaactatggcaagttatcaaaagcactacgatgatcagggtcgcaaggttgacgagtatggcaacgttgagaagcaaaccgacgaatacggcaaccctgttcatgctgctagtgtcacctatgtagccaccagaactgctgctggtggttacagtgatgacattaataagca

SEQ ID NO: 134575 - DNA, 216 bp, Glycine max
aactactacaagtacttccttacaatcaaaaccaacaacaactatggcaagttatcaaaagcactacgatgatcagggtcgcaaggttgacgagtatggcaacgttgagaagcaaaccgacgaatacggcaaccctgttcatgctgctagtgtcacctatgtagccaccagaactgctgctggtggttacagtgatgacattaataagcaacatga

SEQ ID NO: 134576 - DNA, 215 bp, Glycine max
tctcgagccgaatcggctcgaggttggtgttagtcttggtgtagtgtagctagggagggatatatatctgagtaagatggcatcagagcttgaattgcccccaggcttcagattccatccaacggacgaggagctggtgttgcactatctctgccgcaaatgcgcgtcgcagccaatcgccgttcccatcatcgccgaaatcgacctctacaaat

SEQ ID NO: 134577 - DNA, 218 bp, Glycine max
ctgtggagtacaagaacatcagcttcactgtgtgggatgttggtggtcaggacaagatccgtccactgtggaggcattatttccagaacactcagggtctcatttttgtggttgatagcaatgatagagatcgagtggttgaggcaagggatgagctgcacagaatgttgaatgaggatgaacttagagatgctgttttgcttgtttttgccaacaag

SEQ ID NO: 134578 - DNA, 219 bp, Glycine max
aaagctaacttcaacacctttaattttctaaaagtaattcagcggctgaataccaagcggagaagatgagtcaggagcagccacggcgtcccaaaggccaaaaccccatcaaatacggcgacgtttttgtcgtctccggcgaccttgcacagaagcccgtcgcaccggaagatgctgccatgatgcaaagcgcggaaactcgagtgctcggacaaaccc

SEQ ID NO: 134579 - DNA, 218 bp, Glycine max
tgaaggtgctagtggagaaattgctcttacagcagctggtggattgaggcaaattcctggaataaccgagacctttgaaaatgctgcattgattggaattcattatggtggaaatttttatgaatttgtgccatggaatggtgttgttaactgggaagttactacttggggttattggtttatgtcagcagacaatggcaaaaatgtggttgaattag

SEQ ID NO: 134580 - DNA, 217 bp, Glycine max
gcagcaccttaggatggcatagccttaaagttaagggcgaggttcacacgaagaaaggcttattgtggatacctaggcatgcatgaatgaggaagggcgtagtaagcgacgaaatgcttcggggagttgaaaataagcgtagatccggggattcccgatataggtcaacctttcgaactgctgctgaatccacgggcaggcaagagacaagctggtg

SEQ ID NO: 134581 - DNA, 221 bp, Glycine max
cttgcatacagcactacctagctcgcaagcaagcacagccatggatgcctcgcgtcgccatgttctcatctgctttgcacgtgtttcactcttcctctgcgctctatccctatccgctgctcacggatcctccacggttcaagacatcgcgataaagttgacactcggtgacaaccatcttctgcgcatgtactagaagttcgtggctttcatcgatactt

SEQ ID NO: 134582 - DNA, 252 bp, Glycine max
acaagaaagaacttccttataaccaaaaccaacaacaactatggcaagttatcagaagcactacgatgatcagggtcgcaaggtcgacgagtatggcaatgttgagaggcaaactgacgaatatggcaacccggttcatgccactagtgtcacttatgtagccaccaaaagtgttggtggctacaatgatgacgctaataagcaacatgatattactggtgtctatcccgagaaagacaccggtagacatca

SEQ ID NO: 134583 - DNA, 247 bp, Glycine max
ctttaggttttccttccgtgcgtttactcggaactactcttccactcttcgtttaaaatgtctgacgtggaagagtatcgttgtttcattggtggccttgcgtagtcaacatctgatagaaagttaaaggatacgtttgacaagtttggcaagcttattgaggcacaggtggttgttgacaagttctctgggcgttctcgtggttttggatttgtcacattgatgacaagaaagcaatggacgaggc

SEQ ID NO: 134584 - DNA, 251 bp, Glycine max
gcttctttccccattgctaaagagggaaagtctggtgtttctctcaggtacaccacaatgttcggtgtttcattgtcggatactctcaaatcagacttcagcttttcctcattgacatgcaaaagggaattccaacaaaaaattggccctttgagggttcagtcagtggcaacaaccactccaggagtcaccaaggcttcaccagaaggcaagaaaactttgaggaaaggcagtgttattgtcactgggct

SEQ ID NO: 134585 - DNA, 250 bp, Glycine max
gaaactcggggacaacgagcttctgcgcacggagaagaagttcaaggttttcatggagaattacgggaggagctactccacagaggaggagtatttgcgccgtttggggattttcgcccagaacatggtcagagcggcggagcatcaggcgctggaccccaccgccgtccacggcgtcacgcagttctccgatctcaccgaggacgagtttgagaagctctacactggcgtcaatggcggcttcccgtca

SEQ ID NO: 134586 - DNA, 248 bp, Glycine max
tcaagctttatgtcaggagggtgtttataatggacaattgtgaggagctcattcctgagtaccttggatttgtgaaaggtgttgttgactccgatgacttgccgctcaacatctctcgtgagatgctgcaacaaaacaagatcctgaaggtgatcaggaagaatctcgtgaagaagtgcattgagatgttcaatgaaattgcggagaacaaggaagattacaacaagttctatgatgctttttcgaag

SEQ ID NO: 134587 - DNA, 254 bp, Glycine max
cagcattctagtggtggctacgatggtgacactaataaacatcatggaactactggtggctataatgatgacaccaatagacatcatggaactaccggtgtctatggtatagacaccgataggcaacaacatgggactactggtggctatgccggtgacactggtaggcaacatgggaacatcggtggcccttactatggaaccaacaccgcagacaccggtactggtcccagaagtggaaccacgggcggcac

SEQ ID NO: 134588 - DNA, 257 bp, Glycine max
gctaacttcaacacctttaattttctaaaagtaattcagcggctgaataccaagcggagaagatgagtcaggagcagccacggcgtcccaaaggccaaaaccccatcaaatacggcgacgtttttgtcgtctccggcgaccttgcacagaagcccgtcgcaccggaagatgctgccatgatgcaaagcgcggaaactcgagtgctcggacaaacccaacccggcggagcagcttccgtcatgcaatctgccgccacc

SEQ ID NO: 134589 - DNA, 254 bp, Glycine max
cacacaactacaagaaagaacttccttataaccaaaaccaacaacaactatggcaagttatcagaagcactacgatgatcagggtcgcaaggtcgacgagtatggcaatgttgagaggcaaactgacgaatatggcaacccggttcatgccactagtgtcacttatgtagccaccaaaagtgttggtggctacaatgatgacgctaataagcaacatgatattactggtgtctatcccgagaaagacaccggta

SEQ ID NO: 134590 - DNA, 251 bp, Glycine max
gaaattactttgccattgggtctttttgccattctgcttggtagaactttgaaaggttctgtttttggaggactcagggccatttcagacctttccattttagctgacaaaggccacaaaaaggaattccctcttcaagaactcttcacccatgaggtcacattagcagacataaacaaagcatttgagctactaaaacaacccaattgtgtcaaagttgtcatcaacatgccatagtcatattagcgcaa

SEQ ID NO: 134591 - DNA, 249 bp, Glycine max
atcgagtcatctgtatcatgcatatgcatggttcaagctctttttattgcaaaaaagcttcaataagaatctgagtcagaaagatttgcaattaatagcttcatctgttgttctggctgcactttcagtgcctcctcatgatcacacccacggtgcatctcatttggaactggagcatgaaaaagagagaaatttgagaatggctaatctcattggctttaatcttgaaactaaacctgaaagcagaga

SEQ ID NO: 134592 - DNA, 247 bp, Glycine max
tgggaagctgactgagaaagttctgagactttttatagcaactgggtgttctaaggcaaaatcagactgttagtttgtacgatagtctgtaccttgcaagatgtctcaagcagttatcaacgataatgcagtggacattgtgattggtagcactgcattctgatcgtacaacttttatgaatgaatggaggccaattttctcccgctttcacctgataatagtaaaagatcctgacctcaaggagga

SEQ ID NO: 134593 - DNA, 251 bp, Glycine max
ctcccaacacattctggtcaccggtggtgccggtttcattggcacccacaccgtcgttcagcttctcaaagctggcttcagcgtttcaataatcgacaatttcgataactccgtcatggaagcagtggaccgcgtccgccaagtggttggccctctgctttctcagaacctccaattcacccagggcgatctccggaatagggatgacttggagaaactcttctccaaaacaacatttgatgccgtgatcc

SEQ ID NO: 134594 - DNA, 250 bp, Glycine max
ggagcgagctgaggcagctgcgaaagttgctgccaaagaactcgaacaagtcaacagagaaagaagagaccgtgatttcggtgttgttgctgaacaacaacaacaacatcatcaggaagatcaacaaaaacgtggtgtaatcgggtccatgtttaaggcggtgcaagacacctacgagaacgccaaggaagctgtcgttggcaagaaagaagctactaataacgcgtacagtaatacagaggttattcac

SEQ ID NO: 134595 - DNA, 250 bp, Glycine max
caacaacttctgctacttcctactccaaccgcacttctgctccgcaattatcatgggcaaggtcaagatcggaatcaacggatttggaagaattggccgtttggtagccagagtggctctgcagagagacgatgttgaactcgttgccgttaacgaccctttcatcaccaccgattacatgacatacatgtttaaatacgacagtgttcatggacactggaagcatcacgatgtcaccgttaaggacgag

SEQ ID NO: 134596 - DNA, 253 bp, Glycine max
caaaacagtaaagctaacttcaacacctttaattttctaaaagtaattcagcggctgaataccaagcggagaagatgagtcaggagcagccacggcgtcccaaaggccaaaaccccatcaaatacggcgacgtttttgtcgtctccggcgaccttgcacagaagcccgtcgcaccggaagatgctgccatgatgcaaagcgcggaaactcgagtgctcggacaaacccaacccggcggagcagcttccgtcat

SEQ ID NO: 134597 - DNA, 254 bp, Glycine max
gttctcttttgtgttagtgagagaaagttctctctgcttctctctcttagactcaaaaccctattgcgtgctttgcaatcgaccccgattatggccaacagtaacctccctcgaagaatcatcatggaaacgcagcgtttgctcagtgagccagcacctggaattagtgcgtccccttcggaagacaatatgcggtatttcaatgtgatgatccttggcccaactcagtcgccttatgaagggggcgttttcaa

SEQ ID NO: 134598 - DNA, 260 bp, Glycine max
cacaaaattgaactgtaattgtagtagtagacagtagcaccatgagccaggaacagctcaagaaacctcaaggggagcaggaccccatcaaatacggcgacgttttcaaagtctccgacgaactcgctttcaaacccatcgcgccaagagacgcagctctcatgcaagccacggagaaccaagcattgggccaaactcaaaaaggaggtcccgcctcggtgatgcaatccgccgcaaccgaaaacctccgcgccggcgtc

SEQ ID NO: 134599 - DNA, 253 bp, Glycine max
aacatgtcgaaaaattaaagctcttcatctttatgactgcctgagagccaataaatcaactgcagcatggggtgtagaggcacgtgtaccattcttggataaagaatttatcaacgtagccatgagtatagatccggaatggaaaatgataaggcctgatcttggaaggatagagaagtgggtattacgcaatgcatttgatgacgataagaatccatatttaccaaagcacatattgtacaggcagaaggaa

SEQ ID NO: 134600 - DNA, 251 bp, Glycine max
tttttacagatgatgtactcattcctagaccgagttgtcaacttgggacttcctaggacaagagatttccaaggtgtgaaccccaacagctttgatgggcatgggaactacagcattggcattaaggaccagggtgtcttcccagagatcagagctgatgttgttggtaagcctcggggaatggatatctgcctcgcaacaacagctaaaaccgaccaagaagcacacaaattgttggctcttatgggtat

SEQ ID NO: 134601 - DNA, 250 bp, Glycine max
gttgaaggaaatggctgaagcacaactacgagaccagcatggcaaccctgtcccactcaccgatcaatacggtaatccggttatcttaactgacgagcgcggtaatcccgtccaactcactggtgtcgctaccaccgctaccggcacagcaggttctgggtttgggtcctatggtaccggtgcttacggtggtggtgcaagtgcaaccaccgttgcagatcttttggcaacccaaccaaggagtggcagg

SEQ ID NO: 134602 - DNA, 245 bp, Glycine max
gttagttttttgcgatcaaagtaaaatcaaagctatgcaggaggcgaactcggtggcgaaatcaacatgcaacgcatggaagtatgcaactaaaggagaagaaggtgagggatttgatggtggacaagaagaggctagtggaggtgccgtacatggcgtcgctggcccacacaatgactacactggtagcgaacaaggttgtggcggtgccggtggctgcgccgccggcggaaatggatcggagc

SEQ ID NO: 134603 - DNA, 248 bp, Glycine max
gttggaaaaggctcgtgaggaggtctacagtgttgtgggaaaggacagacttgtggacgaagttgacactcaaaaccttccttacattagagcaatcgtgaaggagacattccgcatgcacccgccactcccagtggtcaaaagaaagtgcacagaagagtgtgagattaatggatatgtgatcccagagggagcattgattctcttcaatgtatggcaagtaggaagagaccccaaatactgggaca

SEQ ID NO: 134604 - DNA, 244 bp, Glycine max
attaagactacaaattttcaatttttcaatggcgtcgaggcaacaaaaagaggatcgagctgaggcagctgcgaaagttgctgcgaaagaactcgaacaactcaaccgagaaaaagaccgtgatttcagcgttggtgttgcagaccaacaccaacaagaagaacatcagttagatcaacaaaagcgtggtgtaatcggatccatgttcaaggcggtgcaagacacctacgagaaacaaagaagc

SEQ ID NO: 134605 - DNA, 247 bp, Glycine max
gcttacaaagctttacgtgatcgagcaccataccctgccaatcgtgttgtatgccatctcagtgggagctttgctttcatagtttttgacaagtccacttctaccctttttgtggcttctgatcaagctggtaaggttcctctttattggggaatcacagctgatggatatgtagcatttgctgatgatgcagatttgcttcaaggttcttgtggcaagtcacttgcttctttccctcaagggtgtt

SEQ ID NO: 134606 - DNA, 249 bp, Glycine max
atatgatatagaaagagagagaagaagaaaagaagaacaaagatgcaatcctcaaaggagaagatgaaaaacatggcaagtgctgccaaggaacaagtcgacatctataaagccaaaatagacgagaaggcagagaaagcaacggcaagaacagaagaggagagggtgatagcccatgagcacgcaaaggcaaaggaagctggagcaaagatggagctgcatgaagctaaagcaaggcatgcagcagag

SEQ ID NO: 134607 - DNA, 248 bp, Glycine max
ccagcttcgcatgagatcaactcaagatttgaagggaaggttgactgtccacttccaaggggaggagggtattgatgcaggtgggcttacaagggaatggtatcaattattgtccagagttatttttgataaaggagcactgctttttactacagtgggcaatgaatcaacatttcagccaaaccctaactctgtttaccaaacagaacatttatcttatttcaaatttgttggtagagtggtcggta

SEQ ID NO: 134608 - DNA, 250 bp, Glycine max
agcagcaagtagatgatgcggctaagttagtaggaactttgctagaagagaaagtttcatcattgaaaagcaatattgaaactttatctattcctgctgccaagaaagctgacatcaagatcaagatagttcggcttcaggatcaagtaagaaaagcacaaaagcaggtcgctgaggaaaacaagcgtaaagctgtaatgattacagcagagaaggctgaacttgctgtttcaaatgggaaaacattttg

SEQ ID NO: 134609 - DNA, 249 bp, Glycine max
cactgatgtggttgtgcttttggacaacgaagcaatatacgatatctgcagaagatcattagatatagaaaggccaacttacactaacttgaaccgtctgatatctcaaattatctcttccttgaccacttccttgagatttgatggtgcgattaatgtggacattaccgagttccagactaatctcgtgccatatcctcgtattcacttcatgctttcatcttatgcccctgtaatatctgctgcaaa

SEQ ID NO: 134610 - DNA, 253 bp, Glycine max
tgcagaccgagctagctagctagcaagcaagcacagagatggaggcaaagcgaggccatgccctcatgtgcttggcacgtgtttcactcttcctctgcgctctaaccctatccgctgctcacggaagcaccacggttcaagacatcgcgagaaagttgaaactcggggacaacgagcttctgcgcacggagaagaagttcaaggttttcatggagaattacgggaggagctactccacagaggcggcatattt

SEQ ID NO: 134611 - DNA, 258 bp, Glycine max
gttctcttttgtgttagtgagagaaagttctctctgcttctctctcttagactcaaaaccctattgcgtgctttgcaatcgaccccgattatggccaacagtaacctccctcgaagaatcatcaaggaaacgcagcgtttgctcagtgagccagcacctggaattagtgcgtccccttcggaagacaatatgcggtatttcaatgtgatgatccttggcccaactcagtcgccttatgaagggggagttttcaagttg

SEQ ID NO: 134612 - DNA, 250 bp, Glycine max
caattactttaaggatgagtaaacaagacttgttgaaagttcagcagagctgtgttctcaaggttaatatccactgcgatggctgtgagcaaaaagtcaagaaactgctgcagaaaatcgatggggtttattctgtgagagtagatgcagatgaagggaaagtggtagtggcaggagatgtggatccagcgaaactggtaaaaaagctaaagaggggagggaagcatgctgagatatgccagaaccagaa

SEQ ID NO: 134613 - DNA, 249 bp, Glycine max
gaaagaagtgcaatggacatcggaacctatggctatcctacaccagcagtgaaaaagattgagtcttactatgatgtgccagagggagtggatattcggggaagatatgatgcagagtttgcaaaaatcctcacaaaagatgctttgaaattcgttgctgacttgcaacgtgagttcaggaaccatatcaagtatgcattagagtgcagaagagaagcaaagaagaagtacaatgaaggggctcttcca

SEQ ID NO: 134614 - DNA, 249 bp, Glycine max
ccttgttctttcaaagttaccaaacacaagtacacaacacaacagcaacatatggcgtctgaacaattggctcgcagagagaacaccaccaccgagaaggagattcacgttgagaaacacagggttcccaagatggccacccacttcgagcaccttgcggagcaagctaaagaatctgacatcaccgctgggaaggatactccgcagggtagcatagaagccttgcaagctggagagagggtcaaagat

SEQ ID NO: 134615 - DNA, 247 bp, Glycine max
tcaacctcaatctctcagaatccacagaaaagatcattgctgagtacatatgggttggtggatctggtatggacctcagaagcaaagccaggactcttcctgggccagtgagtgaccctgcaaaacttccgaagtggaactatgatgggtctagcacagatcaagctccaggggatgacagtgaagtcattctatacccacaagctattttcaaggacccctttaggagaggaaacaatattcttgt

SEQ ID NO: 134616 - DNA, 244 bp, Glycine max
cgcaggtgatgctgcacagaatgtcaaagattatgcaagtgatgcagtgcagaagagaaaagagtattctggtgatgcttctcacaagagcaaagaggcttctgattatgccagtgagacggctaagaagaccaaagattatgtcggtgatgctgctcagagaagcaaaggggctgctgaatatgctagtgatgcggctcagaggaccaaagagtatgctggtgatgctaccaagagaagcaaa

SEQ ID NO: 134617 - DNA, 246 bp, Glycine max
caagtatgcctgggtgctggacaaacttaaggctgagcgtgaaagaggaatcaccattgatattgctttgtggaagtttgaaacaacaaagtattattgcacagttattgatgcgcctggacatagggatttcattaagaatatgattactgggacatcccaagctgactgtgctgttcttatcattgattcgaccactggtggttttgaagctggtatttccaaggatggacagactcgtgaaca

SEQ ID NO: 134618 - DNA, 249 bp, Glycine max
ctactacaagtacttccttacaatcaaaaccaacaacaactatggcaagttatcaaaagcactacgatgatcagggtcgcaaggttgacgagtatggcaacgttgagaagcaaaccgacgaatacggcaaccctgttcatgctgctagtgtcacctatgtagccaccagaactgctgctggtggttacagtgatgacattaataagcaacatgataccaccaatgcctacggcgtagacactggtagac

SEQ ID NO: 134619 - DNA, 250 bp, Glycine max
gatgaggatgaggtcaaagagagggaaaacaagcaagaatacaacctactctgtgattggataaaacaacaacttggtgacaaggtggccaaagttcaaatctcaaatcgcttgagttcatctccttgtgtgcttgtatcagggaagtttggttggtctgcaaacatggagagactaatgaaggcacaagcccttggggacactgcaagtttggagtttatgagggggaggagaatattggagattaatg

SEQ ID NO: 134620 - DNA, 254 bp, Glycine max
ggttgatctagattggcaaacaaagatggttcactccaacatgcctccaaagtcccccaaactctctctcccggataataacattccaatcccccttcgccagaacgacatcaccgcagcgtcgtctccaatctgcgctgcctacgacaactacctccgcctccctgagctcagagccctctgggcctccaacgacttccctaattgggccaacgagcccatcttaaagcccaccttacacgccctcgaaatca

SEQ ID NO: 134621 - DNA, 256 bp, Glycine max
caaaaccaaaacactcaagttaacttcaacacctttaattttctgaacgaaattcagccacagaatatcaaagggagcgaagatgagtcaggagcagccaaggcgcccccaaggccaagaccccatcaaatacggcgacgtttttgacgtctacggtgaccttgcacagatgcccattgcaccggaagatgctgccatgatgcaaagcgcggaagctcgagtactcggaaaaacccaacccggcggacttcttccg

SEQ ID NO: 134622 - DNA, 252 bp, Glycine max
taataaagaaaatcgtgaataaaagagcgtgacgagactttttatcaattcgagatgttagaaggtgcaaaattaataggtgccggagctgctacaattgctttagcgggagctgctgtaggtattggaaacgtattcagttcattaattcattccgtggcaagaaatccatcattggcaaaacagttattcggatatgcaatcctgggctttgctctaaccgaggctattgccttgttcgcattaatgatg

SEQ ID NO: 134623 - DNA, 248 bp, Glycine max
ggttcatcatcataaccttcaatgaaaagaaatggctgaggcaagcattggcagcaaaagcagcagatggtctttacagggaatgacagctctcgtcaccggtggatccaaaggaatcggatatgctatcgtggaggagttggcacagcttggagccactgtgcacacttgcgctcggaacgaagctgaactcaatgaatccgtaaatgaatggaacacaaaaggatacagagtaactggttccgtct

SEQ ID NO: 134624 - DNA, 249 bp, Glycine max
cggtcacggacaagcgaagagtaaagaaagaagaaatgttggtgaggaagctgaaactgaaagcggttagtggggtccacttgagatggatgagcaccgtgatgtgtttcggagatggcagccagggtgccgttggatccccagtaggtgtgggactagacgcatacgaacccacacctgttaccgctcttccttccgacatcgttagcgtccacgccggacactaccattccctcgccctcacttccc

SEQ ID NO: 134625 - DNA, 245 bp, Glycine max
ctcagagtaaagagaaaactcttgcaaaaatggagcggggtggacttgcagagaaggtggtaagagacaaagttttggtattccgctttgttgatgtgggaaaacttcccccgcctgtcctccagtttgttgaggtgacatttgggtacactcctgataatctgatctacaagaaccttgactttggggttgatttagactctaggattgctctggttggacccaatggagctgggaagagtacg

SEQ ID NO: 134626 - DNA, 244 bp, Glycine max
gaaacaaagaaaggaaataattgatctttgaaaatgcagggaggaaagaaagctggagagtccatcaaggaaacagctgcaaacattggtgcttctgccaaggctggcatggagaaaaccaaggccactgtccaggagaaggcagaaagaatgacggcacgtgatccgatgcaaaaggagttggcaacccagaagaaagaggcaaagatgagccaggcagagctggacaagcaggcggcgcgtc

SEQ ID NO: 134627 - DNA, 246 bp, Glycine max
gtgagaagaaggcagggttgatgttgggcagtgagacgatgggggagagcgagaaaggagagcgatggagcggacgatgacgaatctgacggagatggcctccaatctcgactctctccagaagcttctcctcaccaaagccgtcttcgtcgacgacgacaccttctccaaagcctccctcgccgccgaccaagcccgctccatcaagctcctccaccaacgagtccaaaccgtggagagagaggt

SEQ ID NO: 134628 - DNA, 245 bp, Glycine max
tgaacttttaagggaggcagaaaagctggttgcaaccaagattcatccgatgacaataatatcaggttttcgaatggcagcagagtgtgctcgtaatgctttgttggagaaggttgtggacaataaagcagattctgagaaattcaggtcagacttattgaacattgcaatgactactttgagctccaagattctctcacaggacaaggagcattttgcaaaattagctgtggatgctgtaatga

SEQ ID NO: 134629 - DNA, 248 bp, Glycine max
tggcacaagttgaacttcgtgacgagcatgggaacccagttgaactaacagatgcatatgggactccggtttggttaacggacgagaaaggcaacccggtgcacctcacggctgtggcaaccaatgcacacaaatctatgcttcagaatgacaccccacaagagcttcctcactccaagagttcaagctcgtctgaggatgaagggcatggagagaggatcaggaagggactgaaggataacatagaa

SEQ ID NO: 134630 - DNA, 251 bp, Glycine max
ctcgagccgattcggctcgaggctgaatttccatcagccaaaccggcaattggtgtctttgttgcagcagttgctcctcggctgcagcctagattttattcgatctcctcatctccaagaatggtgccaaacagaattcatgttacctgtgcattagtacatgagaaaatgcccaccggaaggattcacaaaggagtgtgttcaacatggatgaagaattctgtaccattggagaaaagccaggactgcag

SEQ ID NO: 134631 - DNA, 239 bp, Glycine max
tgaaggtgctagtggagaaattgctcttacagcagctggtggattgaggcaaattcctggaataaccgagacctttgaaaatgctgcattgattggaattcattatggtggaaatttttatgaatttgtgccatggaatggtgttgttaactgggaagttactacttggggttattggtttatgtcagcagacaatggcatatatgtggttgaatgagatgcaacaactgaggatccag

SEQ ID NO: 134632 - DNA, 243 bp, Glycine max
attgaaacagaaaatttgaagagtttgtttattgtgaaaaaaagaaaaatgcaggcagcaaagaaagccatagagacctttaaggaaaccgcagccaacattggcgcctctgccaagtctggcttggagaaaaccaaggccactatccaagagaagaatgagaagatgaatgcagaagatcaaactcaaatggatatggctaccaagaggactcaagagaagatcaaccaggctgagatggag

SEQ ID NO: 134633 - DNA, 244 bp, Glycine max
agctggtgcagtttggagagattcaggaaaaagttgtattgaaattttcacaagaggaatttcttacagcttggtcaactcaggtgcgtcctgcaacaactctgttggctgatgggtgtccatatttgtatgctatggtgcatgatagttcagtgtctacaataccaggtgattttgtcattggtgttaagttgacaaccataaacaatatgtgtgcatatgggctcaatcctggtatttcagg

SEQ ID NO: 134634 - DNA, 249 bp, Glycine max
cactcactcactcactcactcactcactcgcaagcaaaaagaaagaatcccaggcgaggagaaagatggaggggaaggagcaggatgtgtcgttgggagcgaacaagttccccgagagacagccgattgggacggcggcgcagagccaagacgacggcaaggactaccaggagccggcgccggcgccgctggttgacccgacggagtttacgtcatggtcgttttacagagcagggatagcagagtttg

SEQ ID NO: 134635 - DNA, 251 bp, Glycine max
gtgagaaacaaagaaaggaaataattgatctttgaaaatgcagggaggaaagaaagctggagagtccatcaaggaaacagctgcaaacattggtgcttctgccaaggctggcatggagaaaaccaaggccactgtccaggagaaggcagaaagaatgacggcacgtgatccgatgcaaaaggagttggcaacccagaagaaagaggcaaagatgagccaggcagagctggacaagcaggcggcgcgtcaca

SEQ ID NO: 134636 - DNA, 254 bp, Glycine max
cttcctagaaacactcaaggtgtggctgggttaggccatgcaccacatttctcttccaaaccaactcgcttcccactttggcctacaacgccaattcaccacttgcctttctcgctaccctacttcaaagggtgctataatattcggggatgcacctaacaacatgcgacagtttcaaaaccaagatattttccacgatttggccttcaccccattaaccatcaccctgcagggagagtacaacgtgagagtca

SEQ ID NO: 134637 - DNA, 253 bp, Glycine max
gagagagcgagcagtttcagacacagagagaggggtttgggattggagggattgacgctgcgtctcttcctcttctctttcgatccatccctcattcctaatcctccaatccaaccacctcagcctcacactcacatatacacatatctgaacgcgtatcgtccctcctatggcttcaaagcgcatcctcaaggagctcaaggacttgcagaaagacccaacaacttcttgcagcgctggtccagtagctgag

SEQ ID NO: 134638 - DNA, 243 bp, Glycine max
gacgtcggcgggggccccggaaagagttatcttttctgtttaacagcctgcccaccctggaaacggctcagccggaggtagggtccagcggctggaagagcaccgcacgtcgcgtggtgtccggtgcgcccccggcggcccttgaaaatccggaggaccgagtgcctcccacgcccggtcgtactcataaccgcatcaggtctccaaggtgaacagcctctggtcgatggaacaatgtaggca

SEQ ID NO: 134639 - DNA, 246 bp, Glycine max
cttttgggtatatggcccctgagtatgcgtcaagtggcaaattgactgagaagtctgatgtatattcttttggagtcgtgcttttggagctaattaccggaaggaagccagtagatgcatcccaacctttgggagatgagagcttagttgaatgggctcgacctttactgagtcatgcactcgacactgaggaatttgatagtttggcagatccaaggctagaaaagaattatgttgagagtgaat

SEQ ID NO: 134640 - DNA, 249 bp, Glycine max
ggcaaaatggatccgtaacctcgggaaaaggattggctctgagggctgggcacgggggtcccagtcccgaacccgtcggctgtcggtggactgctcgagctgcttccgcggcgagagcgggtcgtcgcgtgccggtcgggggacggattgggaacgggtccttcggggcctcttccccgggcgtcgaacagtcaactcagaactggtacggacaaggggaatccgactgtttaattaaaacaaagcatt

SEQ ID NO: 134641 - DNA, 253 bp, Glycine max
cgacaaaaacggtatggagatatattcaagacaaacatattggggtgtccttgtgtgatgatatcaagccctgaggccgctagaattgtgcttgtgactcaagcacatctcttcaagccaacataccctccaagcaaagagaagttgatagggccagaggctgtgttctttcaacaaggtgcctatcactccatgctcaagaggttggttcaagcctcttttttaccctccacaattaagcactcagtctctg

SEQ ID NO: 134642 - DNA, 249 bp, Glycine max
aaacagtaaagctaacttcaacacctttaattttctaaaagtaattcagcggctgaataccaagcggagaagatgagtcaggagcagccacggcgtcccaaaggccaaaaccccatcaaatacggcgacgtttttgtcgtctccggcgaccttgcacagaagcccgtcgcaccggaagatgctgccatgatgcaaagcgcggaaactcgagtgctcggacaaacccaacccggcggagcagcttccgtc

SEQ ID NO: 134643 - DNA, 249 bp, Glycine max
caagaacatcagcttcactgtgtgggatgttggtggtcaggacaagatccgtccactgtggaggcattatttccagaacactcagggtctcatttttgtggttgatagcaatgatagagatcgagtggttgaggcaagggatgagctgcacagaatgttgaatgaggatgaacttagagatgctgttttgcttgtttttgccaacaagcaagatcttcctaatgcaatgaatgctgcagaaataactga

SEQ ID NO: 134644 - DNA, 248 bp, Glycine max
ctctcttttagtcttactcacaaacacttttttcactgcttccattacgaacatatatttattatatggctcctgaacttgtccccaccgttgtgaaatccagtgctgcgttcacgaaacccgcgacccttccaaggcgtgcctacgtgacattcctcgccggaaacggtgactacgtgaaaggggtggttggcctcgccaaagggttgcgaaaggtgaaaaccgcgtacccgttggtggtggctgtc

SEQ ID NO: 134645 - DNA, 247 bp, Glycine max
gtggctatgccggtgacactggtaggcaacatgggaacatcggtggcccttactatggaaccaacaccgcagacaccggtactggtcccagaagtggaaccacgggcggcaccggttatggaggcactggtggcactgattatggaacaactggtggcactggttatggaagtggaactgggtatggagtcaacactgggggtgcgcacactgaagcaggatataggaaggaacatcgtcagcatga

SEQ ID NO: 134646 - DNA, 257 bp, Glycine max
cctcgatcggaaaccttgcaggggcaaactcattgttgaacgcattgccagaggaagtgattcagcacacttttaacctaaagagccagcaggccaggcaggtgaagaacaacaaccctttcagcttcctggttccacctcaggagtctcagaggagagctgtggcttagagagccctttttgcatgtgctaccacacttttgtccttttgggctctagctagtgctggtagcagtaaataagaatgaataaaagaa

SEQ ID NO: 134647 - DNA, 250 bp, Glycine max
cacacaactactacaagtacttccttacaatcaaaaccaacaacaactatggcaagttatcaaaagcactacgatgatcagggtcgcaaggttgacgagtatggcaacgttgagaagcaaaccgacgaatacggcaaccctgttcatgctgctagtgtcacctatgtagccaccagaactgctgctggtggttacagtgatgacattaataagcaacatgataccaccaatgcctacggcgtagacactg

SEQ ID NO: 134648 - DNA, 248 bp, Glycine max
gaagaaaacctaagcttagaattagaaacaaagaaaagaagaaaggaaagaattgatcgttgaaaatgcagggaggaaagaaagcgggagagtccattaaggaaacagctacaaacattggtgcttctgccaaggctggcatggagaagaccaaggccactgtccaagagaaggcagaaagaatgacagcacgtgatccggtgcaaaaggagttggcaacccaaaagaaagaggcaaagatgaaccag

SEQ ID NO: 134649 - DNA, 251 bp, Glycine max
gctacttgccatggtggtccggctgagatcattgagcatggtatatcaggattccacattgatccttatcaccctgatcaagcttcacagctattagttgaatttttccaaaagagcaaggaggacccaagccattggaagaaaatatctgatggtggtcttcaaagaatttatgaaaggtacacgtggaagatttattccgaaaggcttatgactttggcgggagtttatagtttctggaaatacgtttc

SEQ ID NO: 134650 - DNA, 248 bp, Glycine max
gaatatgtcaagccttactttagtggttctaaattgaaaagctttctagctggtcataatatcaccattactgatggtattgacaaaactagtgcaactttgcaatttagaaagttagcagattgtgattttctcaagagaaactttaagcagatgtctaatgttttgtgggtggctcctgaggacaaggcgagtttatggtcacaacttcattatgtttcgtgcaataatctggaaatgcaagaagc

SEQ ID NO: 134651 - DNA, 248 bp, Glycine max
gttgaatacatcagtgtagcgccttggccgacaggtccgggtaatctttgaaatttcatcgtgatggggatagatcattgcaattgttggtcttcaacgaggaattcctagtaagcgcgagtcatcagctcgcgttgactacgtccctgccctttgtacacaccgcccgtcgctcctaccgattgaatggtccggtgaagtgttcggattgcggcgacgtgagcggttcgctgcccgcgacgttgtga

SEQ ID NO: 134652 - DNA, 246 bp, Glycine max
agggtcgcaaggtcgacgagtatggcaatgttgagaggcaaactgacgaatatggcaacccggttcatgccactagtgtcacttatgtagccaccaaaagtgttggtggctacaatgatgacgctaataagcaacatgatattactggtgtctatcccgagaaagacaccggtagacatcattttggtcgtggttacgacggtgacactaacaagcaacatgatgctactggtgtttatcccggaa

SEQ ID NO: 134653 - DNA, 233 bp, Glycine max
aaacctaagcttagaattagaaacaaagaaaagaagaaaggaaagaattgatcgttgaaaatgcagggaggaaagaaagcgggagagtccattaaggaaacagctacaaacattggtgcttctgccaaggctggcatggagaagaccaaggccactgtccaagagaaggcagaaagaatgacagcacgtgatccggtgcaaaaggatttggcaacccaaaagaaagaggcaaa

SEQ ID NO: 134654 - DNA, 249 bp, Glycine max
aactactacaagtacttccttacaatcaaaaccaacaacaactatggcaagttatcaaaagcactacgatgatcagggtcgcaaggttgacgagtatggcaacgttgagaagcaaaccgacgaatacggcaaccctgttcatgctgctagtgtcacctatgtagccaccagaactgctgctggtggttacagtgatgacattaataagcaacatgataccaccaatgcctacggcgtagacactggtag

SEQ ID NO: 134655 - DNA, 255 bp, Glycine max
acctaagtgagaaacaaagaaaggaaataattgatctttgaaaatgcagggaggaaagaaagctggagagtccatcaaggaaacagctgcaaacattggtgcttctgccaaggctggcatggagaaaaccaaggccactgtccaggagaaggcagaaagaatgacggcacgtgatccgatgcaaaaggagttggcaacccagaagaaagaggcaaagatgagccaggcagagctggacaagcaggcggcgcgtca

SEQ ID NO: 134656 - DNA, 244 bp, Glycine max
gttgatttggagcctgccattaacaatgctgtttttcctggtctacaggggggtcctcataaccacacaattggaggactagcagtttgcttgaagtatgctcagtctccagaatttaaaaattatcaaaatcaggtggttgctaactgtagagctcttgctaagcgattaattgagcatggatataaactggtttctggtggtagtgacaatcacctggttcttgtcgatctaaggccatctg

SEQ ID NO: 134657 - DNA, 244 bp, Glycine max
cgaccactgtaattgatccagcagatgttggagccttggaatctgcattggagcagcacaatgtgtctctattcttcactgagtctcctaccaatccattcctgagatgtgttgatattaagctggtttcagagctttgccacaagaaggggactttgctctgtattgatggtacatttgcaactccattgaaccagaaggcccttgcccttggcgctgatctgattctgcactccttaacaaa

SEQ ID NO: 134658 - DNA, 244 bp, Glycine max
gtcagagaaaccctaggtaagaagaaaagatgccggctggtcatggtttgagatcccgcaccagagattccttctctcgtcctttcaggaagaagggaaccatcgccctcaccacatacctgagaacctaccacgtcggcgactatgttgacgtcaaggttaacggtgccgttcacaagggaatgccccacaaattctaccatggccgcaccggacgcgtctggaatgtcaccaaacgtgctgt

SEQ ID NO: 134659 - DNA, 250 bp, Glycine max
ctcgagccgctcgagccgtgcagaccgagctagctagctagcaagcaagcacagagatggaggcaaagcgacgacatgccctcatgtgcttggcacgtgtttcactcttcctctgcgctctaaccctatccgctgctcacggaagcaccacggttcaagacatcgcgagaaagttgaaactcggggacaacgagcttctgcgcacggagaagaagttcaaggttttcatggagaattacgggaggagcta

SEQ ID NO: 134660 - DNA, 247 bp, Glycine max
aagaaatacaacgagctgatagaggagacaagaaaagaaagagaaagagtttgcagagttgaattccgaaagaggaatggcgaagcacgaggagcttcctatcccgattaacaataacctagaacccgtctatggcggaggttccgcactcgaagaagctcagcttcgtttcgataatttgaagtccaaattcgtcgaaatcttcggtcatcatcctcaaatcttcgctcgctcacctggaagagtg

SEQ ID NO: 134661 - DNA, 245 bp, Glycine max
gaaaaagaaaaaagcgatcatagtttcacttcggccttatccagtttagggtttcggttctctaccctatctttcacgtatcgaaaccttaaatttacgatcaggtctgagcaatctggttggtagaacctttggtcttagtgagtcaagttttatgtctgaattagacgatcaaattcctactgccttcgatccttttgctgatgcaaatgctgatgactcgggtgctgggtcaaaggagtatg

SEQ ID NO: 134662 - DNA, 244 bp, Glycine max
tctatctattattttggagatttataattcgtccattttactcgacggaatttctatgaattagattcacaagaatcgggtaattagtttttcaatagaaaggaaagttaagcattttggtttcttattgtttgttagtctatttcatttggatttggtagtttgatcgtggaatttctttgtttctgtatttccggaatatgagtgtgcggcttgttttaatggatcctattgaaagtacaga

SEQ ID NO: 134663 - DNA, 250 bp, Glycine max
ggcctttcctgtgtaggtatcgtgctcctgaggtgctgcttcagtcttatctgtatacctctaaagttgacatgtgggcaatgggtgctataatggctgagcttttctctcttcgtcctcttttcccaggtgccagtgaagcggatgagatttacaaaatatgtggtgtgataggcaatccaacctttgaatcatgggcggatggactcaaacttgcaagggatattaactaccagtttccacagcttgc

SEQ ID NO: 134664 - DNA, 250 bp, Glycine max
acgaaattcagccacagaatatcaaagggagcgaagatgagtcaggagcagccaaggcgcccccaaggccaagaccccatcaaatacggcgacgtttttgacgtctacggtgaccttgcacagatgcccattgcaccggaagatgctgccatgatgcaaagcgcggaagctcgagtactcggaaaaacccaacccggcggagcttcttccgtcatgcaatccgccgccacaaggagatgaacaggctggt

SEQ ID NO: 134665 - DNA, 253 bp, Glycine max
agagaaccttctcctcgacgacgacggcaacctcaaggtcaccgacttcggcctcagcactttctccgagcacctccggcacgacggcctgctgcacactacgtgcggcacgccggcctatgtcgcgcccgaggtgattgggaaaagaggctacgacggcgccaaggccgatatttggtcttgtggcgtaatcctctacgtacttcttgctggttttttacccttccaggatgacaacctggtggccatgtac

SEQ ID NO: 134666 - DNA, 249 bp, Glycine max
aggctatcaaatggactggaatgcaggatttgcttatgcaaagaatggagtgcctattggtcctagagctaattcttattggctttacaatgtaccatggggcatgtacaaatcattgatatacataaaggaacgttatggaaacccaactgttattttatctgaaaatggcatggatgatccgggtaatgtgactcttcccaagggtttgcatgacaccacaaggataaactattacaaaggctattt

SEQ ID NO: 134667 - DNA, 251 bp, Glycine max
gaggtctttcaagtatgcctgggtgctggacaaacttaaggctgagcgtgaaagaggaatcaccattgatattgctttgtggaagtttgaaacaacaaagtattattgcacagttattgatgcgcctggacatagggatttcattaagaatatgattactgggacatcccaagctgactgtgctgttcttatcattgattcgaccactggtggttttgaagctggtatttccaaggatggacagactcgtg

SEQ ID NO: 134668 - DNA, 252 bp, Glycine max
ctcgagccgaatcggctcgaggctagctagctagcaagcaagcacagagatggaggcaaagcgaggccatgccctcatgtgcttggcacgtgtttcactcttcctctgcgctctaaccctatccgctgctcacggaagcaccacggttcaagacatcgcgagaaagttgaaactcggggacaacgagcttctgcgcacggagaagaagttcaaggttttcatggagaattacgggaggagctactccacaga

SEQ ID NO: 134669 - DNA, 246 bp, Glycine max
gagcttcgtgtggctcctgaggaacaccctgtgcttctcaccgaggcacctcttaatcctaaggctaatcgtgagaaaatgactcagatcatgtttgagaccttcaacacccctgctatgtatgtcgctatccaggccgtgctttccctttatgctagtggccgtacaactggtattgttctggactctggagatggtgtcagtcacacggttcctatctacgaaggttatgccctcccacatgca

SEQ ID NO: 134670 - DNA, 242 bp, Glycine max
gagagagattgtgaagtagaaatcggtgcaagaaattctccactttatctaaaaaaattcggtgagtttgtgaagacaaaaaatcactagctactcaaaaatggccacagtaggaaggaacgttgcagctcctttgctgtttcttaacttgatcatgtattttattgttcttggctttgctagttggtgcctcaacaggttcatcaatggccaaacttaccaccctagttttggtggaaatg

SEQ ID NO: 134671 - DNA, 243 bp, Glycine max
ctaagcttagaattagaaacaaagaaaagaagaaaggaaagaattgatcgttgaaaatgcagggaggaaagaaagcgggagagtccattaaggaaacagctacaaacattggtgcttctgccaaggctggcatggagaagaccaaggccactgtccaagagaaggcagaaagaatgacagcacgtgatccggtgcaaaaggagttggcaacccaaaagacagaggcaaagatgaaccaggcgg

SEQ ID NO: 134672 - DNA, 246 bp, Glycine max
gaaaaaataactgattagtctttctattataaaatagagtataggcattatttttttcttctaaaaaaataaaattaagaaattttcatggtaaccattcgtgcagatgaaattagtaaaattatccgtgaacgcattgagcaatataatacggaagtaaaaattgtaaatacgggtaccgtacttcaagtaggcgacggtattgctcgtatttatggtcttgatgaagtaatggcgggtgaatta

SEQ ID NO: 134673 - DNA, 248 bp, Glycine max
ttacggggaagtgcggctccgttaccgttaggatggttcccgcgccgagaggttcggggatcgtggcggctagggttcccaagaaggtgctgcagttcgcggggattgatgatgttttcacctcctccagaggatccaccaagaccctcggcaacttcgttaaggctacttttgattgcttgatgaaaacctatggattcctgacaccagaattctggaaggagactcgcttctccaaatctccattc

SEQ ID NO: 134674 - DNA, 254 bp, Glycine max
gagaaactttaagcagatgtctaatgttttgtgggtggctcctgaagacaaggcgagtttatggtcacaacttcattatgtttcgtgtaataatctggaaatgcaagaagcttatcttgtcaatctcgtaaatgtgttacgagaactgtatttgcacagtccagaggaagctcgccaattgagaaggaaagctctctctcgtattgaatggctgcaaaaagctgatgtgcctaccatagcacagattgaagagt

SEQ ID NO: 134675 - DNA, 251 bp, Glycine max
ctattcctcgccttcccataactcatgggattaaatgcaatggtgtgtaattgattgaactagctttcaagtaactgggctttataattatttataaccttacttcttttcatagatctgtatgcatttatcattggaagctatgtgatctggactgctgttgctggagttagatactcgattgagcaaataagaaaaaggagatcttctgttttgtttggccaaatatggaagtggtgtggcattcttgt

SEQ ID NO: 134676 - DNA, 251 bp, Glycine max
cacacaactactacaagtacttccttacaatcaaaaccaacaacaactatggcaagttatcaaaagcactacgatgatcagggtcgcaaggttgacgagtatggcaacgttgagaagcaaaccgacgaatacggcaaccctgttcatgctgctagtgtcacctatgtagccaccagaactgctgctggtggttacagtgatgacattaataagcaacatgataccaccaatgcctacggcgtagacactgg

SEQ ID NO: 134677 - DNA, 253 bp, Glycine max
gttcgcatcgaggcagataaatcactgtatccagtgttattgtctaatggaaacctagctgaacaaggtgacttagaggatggcaggcattatgctgtttgggaggaccccttcaagaaaccttcttatctgtttgccttggttgccgggcaattgcagagcagagatgacacatttgttacccgttcagggaggaaggtgtcccttaggatatggacacctgcagatgatgtacctaagactgcacatgcta

SEQ ID NO: 134678 - DNA, 246 bp, Glycine max
cggctcgagctcttctataaagggctccatcaggttggtttagtttgcaagattttggcagtaaagaagggaatgcaggaagtgctgaaaatggtgaaaagcaatgaacaagttgttcctggagccaaatattgtgtcacaggttccacagggtatatcggttcatggctagtggaggctcttcttgaaaggggatgcacggttcatgccactgttagagatcctgcaaagtcattgcaccttctg

SEQ ID NO: 134679 - DNA, 244 bp, Glycine max
ggtgcctcttctctcgaagaagatcgtgaagaagaggctgaagaagttcaagaggcctcaaagtgacaggaagatttctgtgaagacaaactggcgcagaccaaagggtatcgattcccgtgttaggagaaagttcaagggatgcactttgatgccgaacattggttatgcttcagacaagaagacccgccactatctcccgaatggtttcaagaaatttgttgttcacaatgtgaaggatttg

SEQ ID NO: 134680 - DNA, 241 bp, Glycine max
attttgattctagcaagcagagcttttgtcaattttctattgaccttctcggtggaggaattttagtggacaaaactggagattggatcacacttatacaaaattctccaattagtaacttgttgagagttgctgcttggaagaaaggctgtttaatggttaagattgtgatgtctgggaatgcagcagtcaaaaggagtgattgggcctcattggtacaagtgtttttaacaaacagcaa

SEQ ID NO: 134681 - DNA, 242 bp, Glycine max
aactgaggtcttgaacttgagctttgagaagcttatgatggttgaatgtggtggaaatagtgggaaaggagtgaacattaaagctggtgtgatcacggagtggaaggatattccagttgagcttttgatgcaaattttgtcacttgtggatgatcaaacggttatcatagcttctgaagtgtgtcgtgggtggagagaggcaatttgctttggccttactcggttatcactctcatggtgta

SEQ ID NO: 134682 - DNA, 250 bp, Glycine max
aaagaaaggaaataattgatctttgaaaatgcagggaggaaagaaagctggagagtccatcaaggaaacagctgcaaacattggtgcttctgccaaggctggcatggagaaaaccaaggccactgtccaggagaaggcagaaagaatgacggcacgtgatccgatgcaaaaggagttggcaacccagaagaaagaggcaaagatgagccaggcagagctggacaagcaggcggcgcgtcagcataacacg

SEQ ID NO: 134683 - DNA, 149 bp, Glycine max
gtccaacctacccctttttcttctcccaccaacttcaccgtcttcttcctcgatcatgtctcacttcaagggcaagtaccatgatgagcttattgccaatgctgcttacattggcactcctggaaagggtattcttgctgctgatgagt

SEQ ID NO: 134684 - DNA, 270 bp, Glycine max
gcggcttcccgtcatcgaataatgccgccggcggtattgcgccgccgttggaggtggacgggctgccggagaattttgattggagagagaaaggagctgtcaccgaagttaagttacagggtagatgtggatcatgctgggctttcagcaccacaggatctatagaaggagccaattttcttgccaccggaaagctcgtcagtcttagtgaacaacagctccttgactgtgacaacaagtgtgacataacagacaagacttcatgtgaca

SEQ ID NO: 134685 - DNA, 267 bp, Glycine max
cacacaactactacaagtacttccttacaatcaaaaccaacaacaactatggcaagttatcaaaagcactacgatgatcagggtcgcaaggttgacgagtatggcaacgttgagaagcaaaccgacgaatacggcaaccctgttcatgctgctagtgtcacctatgtagccaccagaactgctgctggtggttacagtgatgacattaataagcaacatgataccaccaatgcctacggcgtagacactggtagacagcattctagt

SEQ ID NO: 134686 - DNA, 260 bp, Glycine max
aactactacaagtacttccttacaatcaaaaccaacaacaactatggcaagttatcaaaagcactacgatgatcagggtcgcaaggttgacgagtatggcaacgttgagaagcaaaccgacgaatacggcaaccctgttcatgctgctagtgtcacctatgtagccaccagaactgctgctggtggttacagtgatgacattaataagcaacatgataccaccaatgcctacggcgtagacactggtagacagcattcta

SEQ ID NO: 134687 - DNA, 254 bp, Glycine max
gttcctcgatggtcatacaaatttattgacgaattggaacaactggagggaaaaaatgaagcagagaattatcaaattcgttctagaaaagccaaacgtgtagtaattttgactaataaatctaaattttttaagaagtacgatacttataatcctacaggagatactgataacgctgaaaaaaaaaaaaatgaattggctttaatacgttattcccaacaatcggattttcggcgggacataatcaaagggtc

SEQ ID NO: 134688 - DNA, 260 bp, Glycine max
agagcatttcgatgcatgtaagtggacaaaatcggaaccacattcctgggaattgatcttcccaatagaggtatgtggtcctaataatggttttgaaatgtggagttctgagtgggcaaatcaaacttcatggcacttgagtttccttattgacaatcccaaacagtctacagtttttgatattctcttgggaatttctcaagattttgaaattgctggtaatactcttatgccagctttttctgttccacaggctactg

SEQ ID NO: 134689 - DNA, 259 bp, Glycine max
gttcttgatcagtgtcaaaaccaaaagggtggttgcaaattgcaatggctaagcatgatgttgagggtggttccttcgctgcaaaggactaccatgatcctcctccagcaccattgattgatgctgaggaactcacacagtggtccttctacagggctttgattgctgagttcattgccacaatgctcttcctttacatcacagtgctcactgtgattggttacaagagccagagtgatgtaaaggctgggggtgatgt

SEQ ID NO: 134690 - DNA, 256 bp, Glycine max
atcaaagcatccatactgcttatgtgagagcaataagatccgctgagcactttgtatatattgagaatcagtattttttgggctcctcctatcattggccttcatataaaaacaatgcaggtagataaacttaattttccaatatcttcaactttataaggcattgctagtttttgcgttgttacaaaatcaaattctggcctttaggtaatgtacctatatatatgccacagacccagaagatataattgtgtat

SEQ ID NO: 134691 - DNA, 255 bp, Glycine max
tagagttaagaattggatgacgtttaacgaacctcgtgtggtggctgctcttggctatgataatggtttctttgcccctggaagatgctcaaaagaatatgggaattgtactgctggcaactcaggcactgagccttacattgttgcccacaatttgatattgtcgcatgcagcagctgttcaaagataccgagcgaagtaccaagaaaagcaaaagggaaggattgggatcctcttggattttgtttggtatga

SEQ ID NO: 134692 - DNA, 261 bp, Glycine max
tctcgagccgattcggctcgagagaaaacaaaccccaaactgtctaccattcactctctcgccaccggcaagaaagtcatcaactttggggttcccggtgccttcactcctacttgcagcttgaagcacgttcctggcttcattgagagagcagaagagctgaaagggaagggtgtggacgatataatctgtatcagtgtgaatgatccatttgtgatgaactcatgggccaaaacattcccagagaacaagcatgttaag

SEQ ID NO: 134693 - DNA, 256 bp, Glycine max
tgcgattatgctagttttgatggtttgattaccaagcaagttatgagcaagatggcagaaatgataaacaatctttgtggtggtgatgaaaaattgatgcgtgaaaggacacacctgctgttggcttgttgttcaaggatggcaatttgtaagaaagatgtttggagagttgaatgtggaatcccttctggatttccgctcacagttatttgtaatagcatttttaatgagatgctcattagatatagctatgaaa

SEQ ID NO: 134694 - DNA, 264 bp, Glycine max
cgtcgctccgcaccagtttcaccgcacgaatatcttgttgtttggagcgatccgagaaaaactctgtaaacatgttggtttaccaggacctccttacaggtgatgagcttctctctgactccttccgttacaaggaaattgagaatggaatgctgtgggaagttgaggggaagtgggttgttaaaggagcagttgatgtagacattggtgcagacccttctgctgagggtggaggagaagatgagggagttgatgatgcagctg

SEQ ID NO: 134695 - DNA, 148 bp, Glycine max
aaattatggaattctctgtaagagctgcggaactaacaactctattagaaagtagaattaccaacttttacactaattttcaagtggatgagatcggtcgagtggtctccgttggagatgggattgcacgtgtttatggattgaacga

SEQ ID NO: 134696 - DNA, 270 bp, Glycine max
acaagatctccatatctgttcccaaaagcttgtttgtaagaatggcttccggtgaacagaaattccctcctcaacaacaacaaacacagcctgggaaggagcatgctatgactccagtaccccaattcactagccctgactacaagccttcaaataaacttcaagggaagattgcattagtcactgggggtgattctgggattggacgagcggtgtgtaacttgtctgccttagaaggtgctaccgtggccttcacgtatgtgaaggggc

SEQ ID NO: 134697 - DNA, 257 bp, Glycine max
tgcacgcgggtcttgcttctgaaggtggcagcaagctcaagatgttgatcacttatgttgataatctcccttctggggatgagaaaggactcttttatgcattagaccttggtggcacaaacttccgaacccttcgcgtgcatttaggtgggaaggagaaaggtgttgtcaaaatagagtctgatgaagtttccattcctcctcatttgatgactggttcttcacaagaattatttgattttatagcatctaaacta

SEQ ID NO: 134698 - DNA, 256 bp, Glycine max
ttttgagggagacaacatgattgagaggtccacaaaccttgactggtacaagggtccaactctgcttgatgcacttgaccagattagtgagcccaagaggccctctgacaagcccctcaggcttccccttcaggatgtgtacaagattggaggtattggaactgtgccagtgggacgtgttgagaccggtgtcttgaagcctggaatggtggtgacttttgcaccaactggactgacaactgaagtcaagtctgtg

SEQ ID NO: 134699 - DNA, 261 bp, Glycine max
gtctgcatggatgactgatgaagaatttgcaagagaaatgcttgctggtgtaaatccaaacttgattcgttgtcttaaggatttccctccacgaagcaagctagatagccaagtctatggtgatcatactagtcaaataaccaaagaacacctagagcccaacttagaagggctcactgtagatgaggcaattcaaaacaagagattgttcctactagatcatcatgacccaatcatgccatatttgaggcgaataaatgc

SEQ ID NO: 134700 - DNA, 141 bp, Glycine max
aaaagatcatacatagtagtgttggtgggttgcaaagatgcttgggggtcttctccataggggtcataagataaaagggacagtggtgttgatgcgcaagaatgtgttggacgtgaatagcgtaaccagcgttgggggaat

SEQ ID NO: 134701 - DNA, 268 bp, Glycine max
ccgagattcattcttcaccaaaacttcgcaaagaaacactacacatccatggcaactgctggcgtgcaagaagttcgtgttccccctctaacttccacctctgagccaccttctctctttgacggaaccaccaggttgtacatcagttatatttgtccctatgcgcagcgtgtttggatcactcggaactataagggactacaagacaagatcaaactggttcctattgacctacaaaacaggcctgcttggtataaggagaaagtct

SEQ ID NO: 134702 - DNA, 267 bp, Glycine max
caaaaagtttacgttacaaatcgcataataaccgtcctaagtttattgagagaattttgcaagtgtgagaaacatggcatctcgtcaaaacaacaagcaagagcttgatgaaagagcaaggcaaggagagactgttgtcccgggtggaactggtggcaagagcctggaggctcagcaacaccttgctgaaggaaggagcaagggagggcaaacaaggaaggaacagctgggtacagaagggtaccaggaaatgggacgcaaaggagg

SEQ ID NO: 134703 - DNA, 259 bp, Glycine max
gcagaaaccccaacgtcagaaccgtcgatggcatgcgcgctatgtatggagaagactactatatctgcagatttcagaaaccaggggaaatggaggctcagatggctcaagttggcacagaacgatgatcttgcctattatgtttccaaatatgagaaatcgggcttcactggacccttgaactattaccgaaatatgaacttaaattgggagctgacggcaccatggactggagtgcaaatccaagtggcggtaaaat

SEQ ID NO: 134704 - DNA, 256 bp, Glycine max
acacggcggcgaacaggctgccacggcagggcacatgggacaacccatggggacccatcagacgtcagctatgcccggtcatggaaccggacagcccacgggccatgtcaccgagggagtggtgggctcacaccctattggaaccaacagaggcccgggtgggactgctacggcccataatacccgtgcggggggaaacccaaatgattatgggtatggaactgggggtacttacaattaaataatgatgatttag

SEQ ID NO: 134705 - DNA, 254 bp, Glycine max
taaaaagtttgaagctgatgtttcacttgaggtaattgctatgagaacacctggttttagtggagcagatctggcaaacctgctgaatgaagctgctatattagctggtcggcgtggaaagacggcaatttcttccaaagagatcgatgattctattgataggattgtggctggaatggaaggaactgtgatgacagatggaaagagcaaaagcttagtggcatatcatgaagttgggcatgctatttgtggaa

SEQ ID NO: 134706 - DNA, 254 bp, Glycine max
ttaacaacagcacaaagcgggttactgtctgttcaagctaccatctctctctctctttcttagtgcctccttgccagaagttaaaatggcccaagaaactttcctattcacatctgaatcagtgaacgaggggcaccctgacaagctctgtgaccagatctccgatgctgtgctcgatgcatgcttggagcaggaccctgacagcaaggttgcctgtgaaacctgcaccaagaccaacatggtgatggttttcg

SEQ ID NO: 134707 - DNA, 262 bp, Glycine max
atactagcgatactgataagagagataccaacaagaaaagaaaaaaagaagagttgagattccctttgaagaaaagatggcatcccataggcaaagctatgaagctggtcaaactaagggccgaactgaggaaaagacgaaccagacgatgggcaatattggagagaaggctcaagctgcaaaggagaagacccaggaaatggcccaagctgcaaaggagaagacccaacaaacagctcaaagctgcaaagacaagacttgc

SEQ ID NO: 134708 - DNA, 264 bp, Glycine max
ggctggccttgtcggtcaccgggacgtcaccgacgttaccggcgaccgtggcgtcacagtcacagaaactaaagtccctggaagacgcattataaccgaggctgttggtggccaggttgtggagcagtatgtggaggcaactccggttgaggcagggcgaacagtgcaattaaggagaatgccataacaataggagaggcattggaggcgacggcacagactgtgggtcagaaagcggtggatcagagtgacgcctccgcgatt

SEQ ID NO: 134709 - DNA, 260 bp, Glycine max
cacacaactactacaagtacttccttacaatcaaaaccaacaacaactatggcaagttatcaaaagcactacgatgatcagggtcgcaaggttgacgagtatggcaacgttgagaagcaaaccgacgaatacggcaaccctgttcatgctgctagtgtcacctatgtagccaccagaactgctgctggtggttacagtgatgacattaataagcaacatgataccaccaatgcctacggcgtagacactggtagacagca

SEQ ID NO: 134710 - DNA, 256 bp, Glycine max
  unsure (1)..(256): unsure at all n locations
atttctctttatttattcaattataaaaaccttatcataaaactctatttatttacaaataacaactccttttaaattagtctacaaaaaatgggatgttacaagggtcattatgaattcttggtcatgccttttgggttgactaatgcatcatccacctttcaggcacttatgaatgaagtngttcaacccttcttaaggcagtttgcatgagtattttttgatgatatacttgtatatagtagtagccttgagg

SEQ ID NO: 134711 - DNA, 254 bp, Glycine max
cgagaacaaaaaaaaaaacgtgattcgctcttctcttcgaataaaccacaaaaccaacaaacgagaagaggattgagagaagatggggttgtcgttcacgaagctgttcagcaggttgtttgcgaagaaggaaatgaggattctgatggtaggtctcgatgctgctggtaagacaaccatcttgtacaagctcaagcttggagaaatcgtcaccaccatccccaccatcggatttaatgttgagactgtggagt

SEQ ID NO: 134712 - DNA, 258 bp, Glycine max
agttcatggactctattcaggcggaattaagctgccaacagatataatcagcaagattagtccactacccgtgcttaaggaaatcttccgaactgatggtgaacaggcccttaagtttcctcctcctaaagtaattcaagtgagtaagtctgcatggatgactgatgaagaatttgcaagagaaatgcttgctggtgtaaatccaaacttgattcgttgtcttaaggatttccctccacgaagcaagctagatagcca

SEQ ID NO: 134713 - DNA, 139 bp, Glycine max
aaatggccttgctcggttatcactggtcaacgacggtggcgttatagaacaaacatttttgtggggaaggtattctgtggaaatgtctgctgtagtttacaaggattgggtttttacagatcaagcattgcctgctgat

SEQ ID NO: 134714 - DNA, 145 bp, Glycine max
ttcaaaccttgctctatactacacagtacacacactagaagaataatggcttccatcctccactactttttagccctctctctttcttgctcttttcttttcttcttatccgactcagtcacccctacaaaaccaataaaccttg

SEQ ID NO: 134715 - DNA, 267 bp, Glycine max
ctcgagccgttgctccaatgtgttctgacgccaggagatccatacatgcccttaccaaatgacgaaattattgcaagggtagcaaaacaggttttggcactgttcccatcatctcaaggtttggaagtgacttggtcttctgttgttaaaattggccaatctctgtaccgtgagggtcctggtaaagatccatatagacctgatcaaaagacaccagtgaggaatttctttcttgctggctcttacacaagcaggactacatagaca

SEQ ID NO: 134716 - DNA, 140 bp, Glycine max
gaaaacctaagcttagaattagaaacaaagaaaagaagaaaggaaagaattgatcgttgaaaatgcagggaggaaagaaagcgggagagtccattaaggaaacagctacaaacattggtgcttctgccaaggctggcatg

SEQ ID NO: 134717 - DNA, 262 bp, Glycine max
ctcacagtcaaattgacgagaaagaggaggctccagatgaagatgatgacgacgacgtgcaatggctgacagatacatcacttgatgctgcccgtcaacgtatccaagaacagttaagtgctgtgacagctgatatggttatgctttctacagatgaaccagagaagaagaaaaaaacaataagtaacagaaatggtggttctcacaatggtaactcaatgcactacgggaccctggttggtgaagtgaaagcaaatttcaa

SEQ ID NO: 134718 - DNA, 252 bp, Glycine max
ggaaaaaccttcaaatatgatataattggtgctggttcacattcttcaggagattttcctgaaaaggaagatcaagaaaaacccaaaaagattgatgccagattgagacaaagaatagatcctcaatacaatgaggttcaggctcagatggaaacaaatttgtttaaattgtctcttgatgatgttgaaactcctaaaggttccatgttggatcttaaaatttctcagtctaaaattgcacttcccaaaaac

SEQ ID NO: 134719 - DNA, 252 bp, Glycine max
ctcgagccgagaagctttgcagacttccaacgctttggaaattctcagcaaatatgatataatagtagatgcaacagataatgctcctacccgatacttgatcagtgattgctgtgtggttctaggaaagcctcttgtatcaggtgctgcactgggattggaagggcagcttactgtctacaattacaatggtggtccttgctatcgatgcctctttccaactccaccacctagaacagcatgccaaagttg

SEQ ID NO: 134720 - DNA, 261 bp, Glycine max
tgcagaccgagctagctagctagcaagcaagcacagagatggaggcaaagcgaggccatgccctcatgtgcttggcacgtgtttcactcttcctctgcgctctaaccctatccgctgctcacggaagcaccacggttcaagacatcgcgagaaagttgaaactcggggacaacgagcttctgcgcacggagaagaagttcaaggttttcatggagaattacgggaggagctactccacagaggacgagtatttgcgccgtt

SEQ ID NO: 134721 - DNA, 259 bp, Glycine max; identical to SEQ ID NO: 104206

SEQ ID NO: 134722 - DNA, 256 bp, Glycine max
gttcaaatgagaactttgaaggccgaagaggggaaaggttccatgtgaacggcacttgcacatgggttagtcgatcctaagggacgggggaagcccgtctgatagcgctctgtgcgcgtactccgaaagggaatcgggttaaaattcctgaaccgggacgtggcggctgacggcaacgttagggagtccggagacgtcggcgggggccccggaaagagttatcttttctgtttaacagcctgcccaccctggaaac

SEQ ID NO: 134723 - DNA, 254 bp, Glycine max
ggaagactattgacctagaacagggatgggatttcatgctgaagggcatcaccaagctcaagaacattctcgaaggcttgcccgagcctcaattcagctccgaggactacatgatgctttacacgaccatctacaacatgtgcactcaaaagcctcctcatgactattcccaacagatttacgacaagtataaggagtcttttgaagagtacatcgtatcaacggtattaccttctttgagagagaaacacgat

SEQ ID NO: 134724 - DNA, 248 bp, Glycine max
ggcgagagaatcggatgcccccggagcaaaggagtatgtgcatattcgaattcagcagaggaatgggaagaagagtctgaccacagtgcaagggctgaagaaggagttcagctacgagaagatcctcaaggacctcaagaaggagttctgctgcaacggaaccgtggtgcaggacaaggagcttggcaagatcatccaactccaaggcgaccagcgtaagaacgtctcccacttcctcgttcaggctg

SEQ ID NO: 134725 - DNA, 250 bp, Glycine max
ctgagagcatatgctgctgcacaaggggtacagccggatcaaattattttcacagatgttgcaatgaagaatgaacacatcagacggagttctttagcagacttattccttgactcgcctttatgcaatgcacatacaacaggaacagatatactatgggcaggtttgccaatggttactctgcctcttgagaaaatggctactagggttgctgggtcactctgtcttgccactggactaggggaggaga

SEQ ID NO: 134726 - DNA, 251 bp, Glycine max
gctggtgcagtttggagagattcaggaaaaagttgtattgaaattttcacaagaggaatttcttacagcttggtcaactcaggtgcgtcctgcaacaactctgttggctgatgggtgtccatatttgtatgctatggtgcatgatagttcagtgtctacaataccaggtgattttgtcattggtgttaagttgacaaccataaacaatatgtgtgcatatgggctcaatcctggtatttcaggttctcgtc

SEQ ID NO: 134727 - DNA, 255 bp, Glycine max
ggtcctaataatggttttgaaatgtgagttctgagtgggcaaatcaaacttcatggcatttgagtttccttatgacaatcccaaacagtctacagtttttgatattctcttgggaatttctcaagattttgaaattgctggtaatactcttatgccagctttttctgttccacaggctactgccagatcttctgaaaatgcggaatcctctgcatgatctggaatttgtgttttctttcgcttgttcgtttgttt

SEQ ID NO: 134728 - DNA, 257 bp, Glycine max
gagtgagtaatcgagaaagagaagaagcatatatatcaaaatggctgcagagatggagagggagtcattgataactgaagctcctaatgcaccagttactgcacagagaagggtcagaaatgacttagaaaattctctaccaaaaccatacttgccaagagcattgaaagctcctgatacgggtcacccaaatggaacagcaggccacaggcaccacaacttatctgttcttcagcagcattgtgctttttttgatc

SEQ ID NO: 134729 - DNA, 252 bp, Glycine max
gtggcatccgatgtatcggtaagagttggattgggtaatattgggcgaaggaatggaatcgtgggaggtgtagaagagaagcctgatacaagagatggttcaaaagcctactcaactgattgggccccagacccagtaacaggttactataggcccattaaccacacccctgaaattgacccggtggagcttcggcataggttgctccgatcacctccactagagcctagaggagttgctggacacccatga

SEQ ID NO: 134730 - DNA, 252 bp, Glycine max
gttgtttgccatgaactgtaactgcactagtgttggccacatgccttcaaccaaagaggaaggtcacgattttcaggaggctaaagccaagacaacacaaactgcgaacaaggccatggaaactggtaaagatgggaaagaagccgcagagtcatggacagaatgggctaaagagaaactcactgaaggtcttggcttcaaacatgatcaagaatcaccactaagaaagtctctgactaagccggtgatgct

SEQ ID NO: 134731 - DNA, 263 bp, Glycine max
gagaagctcgtggtggtgttcgtgatgttgggaagttcgaaatgagaactgaagggggagaaaaaggaaacaaggatagaccagaactgaaaacacgaaccagagaggtaataggaagaacggagaaagaaagaggaagagaaagtggaggacaagtagtggcagagaaaggaagagaaacagaaactgcaaggggaagggttggtgctgaaaatgaaggtgcaagaacaaccgctgttataacttgcacgttggaaaaagga

SEQ ID NO: 134732 - DNA, 245 bp, Glycine max
gtgagaaacaaagaaaggaaataattgatctttgaaaatgcagggaggaaagaaagctggagagtccatcaaggaaacagctgcaaacattggtgcttctgccaaggctggcatggagaaaaccaaggccactgtccaggagaaggcagaaagaatgacggcacgtgatccgatgcaaaaggagttggcaacccagaagaaagaggcaaagatgacccaggcagatctggaccagcaggcggcgc

SEQ ID NO: 134733 - DNA, 248 bp, Glycine max
cggctcgagcttgcttcgtgcttgggatgcttagccgtgtcgatccaaaggtacaggctccacaggcgctctgcatctgccccacccgggagctggccattcagaacatcgaggtgctccgcaggatgagggaagtacacggggattgcatccgagtgccttgtgccattggaccgggatgcggttcatgtatcgaaaagggcacctattatggcacaggtggtgattgggaccccagggacagtcaa

SEQ ID NO: 134734 - DNA, 246 bp, Glycine max
cacacacaactactacaagtacttccttacaatcaaaaccaacaacaactatggcaagttatcaaaagcactacgatgatcagggtcgcaaggttgacgagtatggcaacgttgagaagcaaaccgacgaatacggcaaccctgttcatgctgctagtgtcacctatgtagccaccagaactgctgctggtggttacagtgatgacattaataagcaacatgataccaccaatgcctacggcgtag

SEQ ID NO: 134735 - DNA, 246 bp, Glycine max
gttagatacttcgttcatcacggcggtggacagatcacaaccacgagatatccacttccgctgatgatggtaatgattctctgaatggtcacatcatatctactacagttggaggaaaaaatgggaagcccaaacagactaaaagttatatagcagaacgcattgtggggactgggtcatttggaattgtcttcctggctaaatgcttggtaactggcgagccagtggccattaagacggttttac

SEQ ID NO: 134736 - DNA, 242 bp, Glycine max
gagtaattgcggaatctgctagaattttctaataatggcgaaagacgttgagcaggtcacagagcaaggtgaatactccgcgaaggactaccatgaccctcctccggcaccgttgatcgacccagatgagctcacaaagtggtccttgtacagagccgccatagctgagttcatagcaacactcctttttctttacatcaccgtgttgaccattattggctacaagagacagagtgacacca

SEQ ID NO: 134737 - DNA, 240 bp, Glycine max
ggctgcttcgaaagcttaataatttgtttatttccagaacatcatagttttcgcagcagcaaactaacaaattactcatatcatataataagatggcccgttctctctcgcaagccaaacgtattggtgtccttgttgctcaatctatctccctaattcccgttcatcggcgaggttacgcagtggcatccgatgtatcggtaagagttggattgggtaatattgggcgaaggaatggaa

SEQ ID NO: 134738 - DNA, 241 bp, Glycine max
cgagcttcgatagtgatttagcagattcttcctttgcggtcgaatcatggagcccatggacatcgttggtaaatcaaaggaagacgcttcgcttcctaaagcaacaatgacaaaaattattaaagagatgttacccccagatgtacgtgttgcaagagatgcccaagatctattgattgagtgttgtgtagagtttaaaaaccttgtctcgtaagaatccaatgaagtctgtaatagagag

SEQ ID NO: 134739 - DNA, 252 bp, Glycine max
aaagaagaaaggaaagaattgatcgttgaaaatgcagggaggaaagaaagcgggagagtccattaaggaaacagctacaaacattggtgcttctgccaaggctggcatggagaagaccaaggccactgtccaagagaaggcagaaagaatgacagcacgtgatccggtgcaaaaggagttggcaacccaaaagaaagaggcaaagatgaaccaggcggagctggtacaagcaggcggcgcgtcagcataaca

SEQ ID NO: 134740 - DNA, 246 bp, Glycine max
atttgaaagaaattttcagtaactttggtgaggttataagtgtggagttggcaatggatcgaactgtcaatcttccaaaagggtatggatatgtgcagttcaagacaagaggggaggctgaaaaagcattattgtacatggatggtgcccaaatagatggcaatgtcatcaaggcaagatttactctacctccaaggcagaaagtttcaccacccccaaagacttctgctgttgctccaaagagag

SEQ ID NO: 134741 - DNA, 245 bp, Glycine max
gtagacagtagcaccatgagccaggaacagctcaagaaacctcaaggggagcaggaccccatcaaatacggcgacgttttcaaagtctccgacgaactcgctttcaaacccatcgcgccaagagacgcagctctcatgcaagccacggagaaccaagcattgggccaaactcaaaaaggaggtcccgcctcggtgatgcaatccgccgcaaccgaaaacctccgcgccggcgtcgtgggccgcca

SEQ ID NO: 134742 - DNA, 247 bp, Glycine max
gaaaaaccatctcaacctcaggaagctgaagagaggccatcagaaggaattggcgaaactgtgaggcagtatgcacaaaaaccaaagccaagtgaaagaaaccctcagaaggagggaaccggaagcatcgtgtttacagcaataggcgaaacagtaagcagtgccggtgagaaggtaaagaaaccgtttaaaaacactatgggaggagaaagtgaaggaggaggagggaaagaagaggggaagagtg

SEQ ID NO: 134743 - DNA, 240 bp, Glycine max
ggaaactcgtgcgatatgccgccgcctccaacctcgcccgatcgcggcggttctccgcgcgattcctggtccgtgcattgttcacaagcgcggtgccgacatactccatgacccctggttcaacaaggatacagggtttcctttgactgaacagggatatgttggggcttcggggcctcttacctcctcgtgttatatcctttgagcagcaatatgatcgctttatgaattcattccgat

SEQ ID NO: 134744 - DNA, 239 bp, Glycine max
ttcagagacagacactgccaactatatcatcgacagatggtatagaaaccacgggaatagttggtggtaacatggcttccaaaagaaaaagaaaggcatggtcagaagaagaggacatgcagctacgagctgctgttcaaagatggggtgaagggaattgggcaaccatggcaaaaggagacgactttcctattaagagaagtgctacacagttggctcagaggtggagcattttacga

SEQ ID NO: 134745 - DNA, 240 bp, Glycine max
ggacaagaaggatttgtatgttaaaagtgttcaaagaactgtcatttggatgggaaaaagacaggaaactgtggaagatgtcccctgtggtaacactgttgctatggttggtttggatcagttcataacaaagaatgctactttgactaatgaaaaggaagttgatgcccatcccattcgagctatgaagttttctgtctcacctgttgttcgtgttgctgttcaatgtaaggttgcatc

SEQ ID NO: 134746 - DNA, 216 bp, Glycine max
ctactacaagtacttccttacaatcaaaaccaacaacaactatggcaagttatcaaaagcactacgatgatcagggtcgcaaggttgacgagtatggcaacgttgagaagcaaaccgacgaatacggcaaccctgttcatgctgctagtgtcacctatgtagccaccagaactgctgctggtggttacagtgatgacattaataagcaacatgata

SEQ ID NO: 134747 - DNA, 251 bp, Glycine max
ggagaaattaaaccaaccatactacaccagacactcctcctaaccttcaataattctcttctcacccttataaaaagaaactcattttaactcagactttgcatttcaccttatctatctatcttttctaacatggctgctgggactggactctttgcagagattttggatggagatgtgtacaagtactatgctgatggagaatggaagaaatctgcttctgggaaaagtgttgccatcatcaaccccac

SEQ ID NO: 134748 - DNA, 206 bp, Glycine max
gtccattatgaaaagagaaagaggtttaaaattgacacattgattccttttttgcttatatgatttttggtgaactgtatgcatcaaaaggtgcatgtacggctcttaaggaaaaaaatggaatcctaatcaatcgactttatcgagaaagattactttttttaggtcaagaggttgatagtgaaatatcgaatcaactaattagt

SEQ ID NO: 134749 - DNA, 249 bp, Glycine max
tctcgagccgaatcggctcgaggattgttgtgactcgttcttctgcgtcgttatcttcttcttttgttgtttgtgtgttagttttttctctcacctgaaaatgtcttgctgcggtggtaactgtggttgcggaagcgcctgcaagtgcggcaacggctgcggaggctgcaagatgtacccagacttgagctacaccgagtcaaccaccaccgagaccttggtcatgggagtggcaccagttaaggctca

SEQ ID NO: 134750 - DNA, 248 bp, Glycine max
ggccatccttagaaagaaggacgatgatcatttttcaccagtggattcttacttcaccgaaaataaagatgtggtgctgagatgttctgaatctccccaagcctctttaagggaaaggactgtgaaggttcttggtcttttaggtggaggccagccaaacagctctatgataaattcagagaaggctgtgaaaactgagaatgctactgttgctgagttgcctgacttgatagacactggtgattcaa

SEQ ID NO: 134751 - DNA, 243 bp, Glycine max
gttcgttcgattgattcaatatcgatgaacctagaaaagagagttgatacttggaatgggcgtataacaaaaattcttggcattccttggggattcttgattggtgctgagctaacgatagcgcaaagtcgtatttctttggttaataaaattcaaaaagtttatcgatcccagggagttcacattcataatagacatatagaaattattgtgcgtcaaataacatcaaaagtcttggtttcc

SEQ ID NO: 134752 - DNA, 244 bp, Glycine max
cacacaactactacaagtacttccttacaatcaaaaccaacaacaactatggcaagttatcaaaagcactacgatgatcagggtcgcaaggttgacgagtatggcaacgttgagaagcaaaccgacgaatacggcaaccctgttcatgctgctagtgtcacctatgtagccaccagaactgctgctggtggttacagtgatgacattaataagcaacatgataccaccaatgcctacggcgtag

SEQ ID NO: 134753 - DNA, 242 bp, Glycine max
gcctcgagcaggacccagacagcaaagttgcctgcgaaacatgcaccaaaaccaacttggtcatggtcttcggagaaatcacgaccaaggccaacgttgactacgagaagatagtgcgtgacacctgcaggaacatcggcttcgtctcaaatgatgtgggactggatgccgacaactgcaaggtcctcgtcaacattgagcagcagagccctgatattgctcagggtgtaaacggccacctt

SEQ ID NO: 134754 - DNA, 243 bp, Glycine max
cgagaaagttgaaactcggggacaacgagcttctgcgcacggagaagaagttcaaggttttcatggagaattacgggaggagctactccacagaggaggagtatttgcgccgtttggggattttcgcccagaacatggtcagagcggcggagcatcaggcgctggaccccaccgccgtccacggcgtcacgcagttctccgatctcaccgaggacgagtttgagaagctctacactggcgtca

SEQ ID NO: 134755 - DNA, 246 bp, Glycine max
gcattgcatttcgttactttcatttgttgtgcaatcttacaagttccaaacttctctattttgttattatttgttctcacttctcacacatacagatttaagccttttatattatcatggcttctaaggtggtttcggttttggttatagcgatgatgttgtttgccatgaactgtaactgcactagtgttggccacatgccttcaaccaaagaggaaggtcacgattttcaggagtctaaagcca

SEQ ID NO: 134756 - DNA, 246 bp, Glycine max
caagaggctgctgaggcataccttgttgggctctttgaggacactaacttgtgtgccattcacgccaagcgtgtgactattatgcccaaggatattcagctggcaagaaggattcgtggtgagcgtgcttgagttggtgcgttctgtgtttgtgaagatggattgttggtggctgcggatggtgttttgttactaagttttctttttgttgaagcctataggttattagggaaaaataggtgttta

SEQ ID NO: 134757 - DNA, 249 bp, Glycine max
tgcaaaaaagactaaggattatgctgcgcagaagaccaaggactatgccagtggtggtgcgcagaagaccaaggactatgccagtggtgctgcgcagaagaccaaggactatgcaagtgatgctgcgcagaggaccaaggaccatgcaagtgatggtgctcaaaagagcaaagaatatgcgggtgatgtagcacagaatgccaaagattatgctcaaaagagcaaagattatgcgggtgatgctgtaca

SEQ ID NO: 134758 - DNA, 245 bp, Glycine max
caagccccactcaaccaccacacctctcctcgttcacgctacccctttctgctcttcttctacctttcaagttttaaaagtataaagatggcagagacattcctatttacctcagagtcggtgaacgagggacaccctgacaagctctgcgaccaaatctccgatgctgtcctcgacgcttgcctcgagcaggacccagacagcaaagttgcctgcgaaacatgcaccaaaaccaacttggtcat

SEQ ID NO: 134759 - DNA, 243 bp, Glycine max
gactacgatcttcgatagtgctttctcagattcttccttcgtggtaaccggtcgaatcatggagcccatggacattgttggcaagtcaaaggaagacgcttcgcttcctaaagcaacaatgacaaaaattattaaagagatgttacccccagatgtacgtgttgcaagagatgcccaagatctattgattgagtgttgtgtagagtttataaaccttgtctcgtcagaatccaatgaagtttg

SEQ ID NO: 134760 - DNA, 243 bp, Glycine max
ggcattgttgttggagtgagcgaagaatatgtattctagagattcatggggtggaccgttggagataaacgcgacggactcggcgacggtggacgagcggagccggaacctgcaggacgttgacagggcagcgctgtcgcgtcccttggatgagacgcagcagagctggctccttggccccggcgagcagacgaagaagaagtacgtcgatctcggctgcatcatcgtcagccgcaagatctt

SEQ ID NO: 134761 - DNA, 240 bp, Glycine max
agaaaacctaagcttagaattagaaacaaagaaaagaagaaaggaaagaattgatcgttgaaaatgcagggaggaaagaaagcgggagagtccattaaggaaacagctacaaacattggtgcttctgccaaggctggcatggagaagaccaaggccactgtccaagagaaggcagaaagaatgacagcacgtgatccggtgcaaaaggagttggcaacccaaaagaaagaggcaaagatg

SEQ ID NO: 134762 - DNA, 241 bp, Glycine max
tgcagaccgagctagctagctagcaagcaagcacagagatggaggcaaagcgaggccatgccctcatgtgcttggcacgtgtttcactcttcctctgcgctctaaccctatccgctgctcacggaagcaccacggttcaagacatcgcgagaaagttgaaactcggggacaacgagcttctgcgcacggagaagaagttcaaggttttcatggagaattacgggaggagattatccacaga

SEQ ID NO: 134763 - DNA, 239 bp, Glycine max
gaaaggaaataattgatctttgaaaatgcagggaggaaagaaagctggagagtccatcaaggaaacagctgcaaacattggtgcttctgccaaggctggcatggagaaaaccaaggccactgtccaggagaaggcagaaagaatgacggcacgtgatccgatgcaaaaggagttggcaacccagaagaaagaggcaaagatgagccaggcagagctggacaagcaggcggcgcgtcaca

SEQ ID NO: 134764 - DNA, 240 bp, Glycine max
aaggcttatggtggatacctaggcacccagagacgaggaagggcgtagtaagcgacgaaatgcttcggggagatgaaaataagcgtagatccggggattcccgatataggtcaacctttcgaactgctgctgaatccacgggcaggcaagagacaacctggtgaactgaaacatcttagtagccagaggaaaagaaagcaaaagcgattcccgtagtagcggcgagcgaaatgggagcag

SEQ ID NO: 134765 - DNA, 244 bp, Glycine max
gtttagttcgcacaaggttttaaaaaatggctgatgctgaggacattcaacctcttgttgttgataatggaactggaatggtcaaggcgggttttgcaggtgatgacgctcctagggccgtgttccccagtattattgggcgaccacgccataccggtgtaatggttgggatgggtcagaaggatgcttacgtgggtgatgaagctcaatcaaaaaggggtatactcaccttgaagtatcctat

SEQ ID NO: 134766 - DNA, 255 bp, Glycine max
gtgactcgttcttcttcgtcgttatcttcttcttttgttgtttgtgtgtttgttttttctctcacctgaaaatgtcttgctgcggtggtaactgtggttgcggaagcgcctgcaagtgcggcaacggctgcggaggctgcaagatgtacccagacttgagctacaccgagtcaaccaccaccgagaccttggtcatgggagtggcaccagttaaggctcaattcgagagtgctgaaatgggtgttcccgctgaga

SEQ ID NO: 134767 - DNA, 247 bp, Glycine max
atcgcgaacatcccaatgaccaaaaatcctccaatatatatatataacttccccgttctctcatactcaacagaaaattgaaaaccaacataacaatgtcgttgattccaagtttcttcggcaccgggcgaagaaccaacgtcttcgaccccttctccctcgacgtgtgggacccattccatggcttccccggcaccaccgccctctccgctccgcgctccgagacggaggccttcgccaacacgcg

SEQ ID NO: 134768 - DNA, 245 bp, Glycine max
tgccagtagtcatatgcttgtctcaaagattaagccatgcatgtgtaagtatgaactaattcagactgtgaaactgcgaatggctcattaaatcagttatagtttgtttgatggtatctactactcggataaccgtagtaattctagagctaatacgtgcaacaaaccccgacttctggaagggatgcatttattagataaaaggtcaacacaggctctgcctagttgctttgatgattcatgat

SEQ ID NO: 134769 - DNA, 241 bp, Glycine max
tacaagaaagaacttccttataaccaaaaccaacaacaactatggcaagttatcagaagcactacgatgatcagggtcgcaaggtcgacgagtatggcaatgttgagaggcaaactgacgaatatggcaacccggttcatgccactagtgtcacttatgtagccaccaaaagtgttggtggctacaatgatgacgctaataagcaacatgatattactggtgtctatcccgagaaagacac

SEQ ID NO: 134770 - DNA, 240 bp, Glycine max
ggaatcccttctggatttccgctcacagttatttgtaatagcatttttaatgagatgctcattagatatagctatgaaaaattactgcgccaggctaaagctccaagtatgtttttacaatccttcaaaaattttgtttctttgtgtgtgtatggtgatgataacttaattagtgttcatgaatatgtcaagccttactttagtggttctaaattgaaaagctttctagctggtcataat

SEQ ID NO: 134771 - DNA, 244 bp, Glycine max
aaaacttccacttgagagaaaagtagtgtattaagactacaaattttcaatttttcaatggcgtcgaggcaacaaaaagaggatcgagctgaggcagctgcgaaagttgctgcgaaagaactcgaacaactcaaccgagaaaaagaccgtgatttcagtgttggtgttgcagaccaacaccaacaagaagaacatcagttagatcaacaaaagcgtggtgtaatcggatccatgttcaaggcgg

SEQ ID NO: 134772 - DNA, 246 bp, Glycine max
caaaaatatgccactcccatgatgcctctagatgaagaaattctttctaaggttgcacaagatatggttgaggaatggtttgattgtgttgatgaggaagattcctttgaggaagtttctttaagtgcagcactcaatggtgttgagggtttggactatatggaaagaattcctcttgccacatctgagggttttcctcatgtgctttcgcgcaaaaatggtgaaaaaggcaaaaggagatttgtt

SEQ ID NO: 134773 - DNA, 243 bp, Glycine max
ctactacaagtacttccttacaatcaaaaccaacaacaactatggcaagttatcaaaagcactacgatgatcagggtcgcaaggttgacgagtatggcaacgttgagaagcaaaccgacgaatacggcaaccctgttcatgctgctagtgtcacctatgtagccaccagaactgctgctggtggttacagtgatgacattaataagcaacatgataccaccaatgcctacggcgtagacactg

SEQ ID NO: 134774 - DNA, 241 bp, Glycine max
tgcagaccgagctagctagctagcaagcaagcacagagatggaggcaaagcgaggccatgccctcatgtgcttggcacgtgtttcactcttcctctgcgctctaaccctatccgctgctcacggaagcaccacggttcaagacatcgcgagaaagttgaaactcggggacaacgagcttctgcgcacggagaagaagttcaaggttttcatggagaattacgggaggagcttatccacaga

SEQ ID NO: 134775 - DNA, 239 bp, Glycine max; identical to SEQ ID NO: 134763

SEQ ID NO: 134776 - DNA, 237 bp, Glycine max
tgaatcgactaaaaaatgaaatgaatcatttcatattgatagtattgctatgcttagtccccaaagaaccagatttcgtaaacaacatagaggaagaatgaaaggaatatcctatcgagggaatcatatttgcttcggaagatatgctcttcaagcacttgagccagcttggataacatctagacaaatagaagcgggacggcgggcaatgtcacgaaatgttcgccgaggtggaca

SEQ ID NO: 134777 - DNA, 260 bp, Glycine max
gacagcgtgtgagagagccaagagaacgctctcttccacagcgcagacaactattgaaatcgattcactatacgaagggattgatttctatgctacaattacgagagctaggtttgaggagatgaacatggatttgttcaggaagtgcatggagccggtggagaagtgtttgcgtgacgccaagatagacaagagtcaggttcatgaggttatgcttattggaggttccactaggatccccaaggttcagcaactcttgc

SEQ ID NO: 134778 - DNA, 254 bp, Glycine max
gctatgtttgcgtactttgatagggacaacgttgcgctgagaggtcttgctaagttttttaaggaatcgagtgaagaagaaagagagcatgctgagaaattgatggagtatcagaacaaacgtggtggaagagtgaagttgcagtcaattgtgatgccgctttctgagtttgatcatgcagataagggagatgcgctgcacgcaatggaactcgctctctcattagagaagctaacgaacgaaaagctccttaa

SEQ ID NO: 134779 - DNA, 253 bp, Glycine max
aaaggattctacccgccgctcgatgggaattgcgcttcaaggcgtctcgtagggctaatccgcctcacgagggtcaccaacggcacgtgcctttggggggccgaggccccctactgctggtcggcaaacggacggcgggcgcacgcgtcgcttctagcccggattctgacttagaggcgttcagtcataatccaacgcacggtagcttcgcgccactggctttctaaccaagcgcgatgaccaattgtgcgaa

SEQ ID NO: 134780 - DNA, 249 bp, Glycine max
ggggagtttggctggggcggcacatctgttaaaagataacgcaggtgtcctaagatgagctcaacgagaacagaaatctcgtgtggaacaaaagggtaaaagctcgtttgattctgatttccagtacgaatacgaaccgtgaaagcgtggcctatcgatcctttagtccttcggaatttgaagctagaggtgtcagaaaagttaccacagggataactggcttgtggcagccaagcgttcatagcgacg

SEQ ID NO: 134781 - DNA, 244 bp, Glycine max
tgcagaccgagctagctagctagcaagcaagcacagagatggaggcaaagcgaggccatgccctcatgtgcttggcacgtgtttcactcttcctctgcgctctaaccctatccgctgctcacggaagcaccacggttcaagacatcgcgagaaagttgaaactcggggacaacgagacttctgcgcacggagaagaagttcaaagttttcatggagaattacgggaggagctactccacagagg

SEQ ID NO: 134782 - DNA, 257 bp, Glycine max
gtcttttttcactcttcagttctcgttgttgttcttcgctttcctgaaactagggttttcaatttcgattcattcgttaataattaaagatgtttgggagggcaccgaagaagagcgataatacgaggtactacgaaatcctcggcgtctcgaagaacgcttcgcaggatgatctgaagaaggcttacaagaaagccgccatcaagaatcaccctgacaagggcggtgatcccgagaagtttaaagagctggcacaa

SEQ ID NO: 134783 - DNA, 256 bp, Glycine max
ggaatttgctagcggacactacaaagatcattgagaagaataaaacaacgtgcaaacgcaaagacgattgttgcagaaagatcgttactgaagcgttgttagctctcggatacgacgcttccgtatgcaaatctcgctgggaaaaatcaactttctgtccagctggggaatatgaatacattgatgtgataatgggaaaggagcgggtggtggttgacgttgacttcagatcagaattcgagatagctcgacccac

SEQ ID NO: 134784 - DNA, 257 bp, Glycine max
tgaggatgatgacgatgatgtgcaatggcagacagatacgtcacttgatgctgctcgtcaacgtatccaagaacaattaagtgctgtgacagctgatatggttatgctttctacagatgaaccagagaagaaaaaagaagcaagtaatggaaatgatggttctcagaatggtaactcaatgcactgcaggaccttggttggtgaagtgaaagcaaatttgaagaaaggtgttggagcaaatgaattgctgtcgcaac

SEQ ID NO: 134785 - DNA, 254 bp, Glycine max
ctttaattttctgaacgaaattcagccacagaatatcaaagggagcgaagatgagtcaggagcagccaaggcgcccccaaggccaagaccccatcaaatacggcgacgtttttgacgtctacggtgaccttacacagatgcccattgcaccggaagatgctgccatgatgcaaagcgcggaagctcgagtactcggaaaaacccaacccggcggagcttcttccgtcatgcaatccgccgccacaaggactgaa

SEQ ID NO: 134786 - DNA, 255 bp, Glycine max
tttccgttcatttcctctgttttttcttcaaatccattatttcgtggaaatcccgaaatttaaccatgcttctccgaaccgccgcctccgccgcttctgcttcgtccctctccctcttcagccctacctccgaacctctccgttcggttcccgctacgtggattggtggttcgcgccgcgaaaggatccacgaaccaccgcgccctaaccggcgtgatctttgaaccgttcgaagcggtgaagaaggagctcgat

SEQ ID NO: 134787 - DNA, 252 bp, Glycine max
tgaaaaattgatgcgtgaaaggacacacctgctgttggcttgttgttcaaggatggcaatttgtaagaaagatgtttggagagttgaatgtggaatcccttctggatttccgctcacagttatttgcaatagcatttttaatgagatgctcattagatatagctatgaaaaattactgcgccaggctaaagctccaagtatgtttttacaatccttcaaaaattttgtttctttgtgtgtgtatggtgatga

SEQ ID NO: 134788 - DNA, 248 bp, Glycine max
gggattgaaaaaagaattcagctataacaagatacttaaagatgttaagaaagagttctgttgcaatggaacagttgttcaggacccagaactaggacaggttattcaacttcaaggtgatcagaggaagaatgtttctaccttcctggtccaggctggtatcgtgaagaaggagcatatcaagattcatggtttctgagcggttggagtctcaagtgtcaagtcttacgtgcctgcctatgtgttgg

SEQ ID NO: 134789 - DNA, 238 bp, Glycine max
caaaacagtaaagctaacttcaacacctttaattttctaaaagtaattcagcggctgaataccaagcggagaagatgagtcaggagcagccacggcgtcccaaaggccaaaaccccatcaaatacggcgacgtttttgtcgtctccggcgaccttgcacagaagcccgatgcaccggaagcatgctgccagaagcaaagcgcggaaacacgagagcacggacaaacccaacccagcgg

SEQ ID NO: 134790 - DNA, 260 bp, Glycine max
cgcttgtgctgccttcgtttgcgtttttatcacagaggaattaacatatatatagcaagcatggcagtcacactctacgaccttagctcttcctctgggttgaagaaacttgatgagtaccttctcccacgcagttacatcaccgggtaccaagctacaaaggatgatcttactgtttatgcagctttgccaactgctccatcagatgaatatggaaatgtttccaggtggtacaagcacattgatgctttgttgagaat

SEQ ID NO: 134791 - DNA, 248 bp, Glycine max
cacaactactacaagtacttccttacaatcaaaaccaacaacaactatggcaagttatcaaaagcactacgatgatcagggtcgcaaggttgacgagtatggcaacgttgagaagcaaaccgacgaatacggcaaccctgttcatgctgctagtgtcacctatgtagccaccagaactgctgctggtggttacagtgatgacattaataagcaacatgataccaccaatgcctacggcgtagacactg

SEQ ID NO: 134792 - DNA, 255 bp, Glycine max
gggcacttcccgaagtgttaaaagaatgcctctttctatagggggaggagctggtgcaaagaatgctattcttatgaatatgccaaatgctgttctttcaatgtggagatattttgttggagatctcgtctttgaagtttctaagatgacttctccctacattaaatgtacagtctctttcttcatagcatttggaaatttggctgatgacaccatcaattttgaggcttttccccacaagctggtgcagtttgg

SEQ ID NO: 134793 - DNA, 252 bp, Glycine max
gctatgtttgcgtactttgatagggacaacgttgcgctgagaggtcttgctaagttttttaaggaatcgagtgcagaagaaagagagcatgctgagaaattgatggagtatcagaacaaacgtggtggaagagtgaagttgcagtcaattgtgatgccgctttctgagtttgatcatgcagataagggcgatgcgctgcacgcaatggaactcgctctctcattagagaagctaacgaacgaaaagctcctt

SEQ ID NO: 134794 - DNA, 248 bp, Glycine max
ctcgagccgctaagcttagaattagaaacaaagaaaagaagaaaggaaagaattgatcgttgaaaatgcagggaggaaagaaagcgggagagtccattaaggaaacagctacaaacattggtgcttctgccaaggctggcatggagaagaccaaggccactgtccaagagaaggcagaaagaatgacagcacgtgatccggtgcaaaaggagttggcaacccaaaagaaagaggcaaagatgaaccag

SEQ ID NO: 134795 - DNA, 248 bp, Glycine max
gaagaagaaacttaatcgatcatcacttcacttcactaatacatcatggcagacgagacccagaacaagtatgagagctctgaggttgaggtccaggatcgtggtatttttgactttctcggtaagaaaaaggatgaagaagacaagcctcatcctcaggaggaggtcatcgccaccgaatttcaaaaagtcactgtctcagaccaaggagagaacaagcacagcctcttagaaaagcttcaccgatc

SEQ ID NO: 134796 - DNA, 247 bp, Glycine max
aaacaattcaattcaatctgcctcgatcatggagaggaaaacatttgggtttttattcttgctcctccttgtcttagcttctgatgtgacggtgaagagagcagaggcgaaagattgcttgacaaggaggcacgggttccagggtagatgcttattcgacaggcaatgtgcacatgtgtgcaggagcgatggtttcatcggtggtcagtgccgaggccctcttcgcaaatgcttttgcagcaagcca

SEQ ID NO: 134797 - DNA, 226 bp, Glycine max
aacaaatttgtttaaattgtctcttgatgatgttgaaactcctaaaggttccatgttggatcttaaaatttctcagtctaaaattgcacttcccaaaaacacagttggaggaaccattctgcgtagtgatctattggcaaattttttgacagagggcaattttagagcaagtgttgatttgcagcgcactcatcgatattaaggacatgattactatgcggccaca

SEQ ID NO: 134798 - DNA, 239 bp, Glycine max
  unsure (1)..(239): unsure at all n locations
ccaaaacactcaagttaacttcaacacctttaattttctgaacgaaattcagccacagaatatcaaagggagcgaagatgagtcaggagcagccaaggcgcccccaaggccaagaccccatcaaatacggcgacgtttttgacgtctacggtgacgctgcacagatgcccattgcaccggaagcatgcgccatgangcaaagcgcggaagcacgagntaacagaaaaacccaacccggc

SEQ ID NO: 134799 - DNA, 246 bp, Glycine max
gttgaaggaaatggctgaagcacaactacgagaccagcatggcaaccctgtcccactcaccgatcaatacggtaatccggttatcttaactgacgagcgcggtaatcccgtccaactcactggtgtcgctaccaccgctaccggcacagcaggttctgggtttgggtcctatggtaccggtgcttacggtggtggtgcaagtgcaaccaccgttgcagatcttttggcaacccaaccaaggagtgg

SEQ ID NO: 134800 - DNA, 254 bp, Glycine max
caacttcacatcccaagtcattataatgaaccatcctggccaaattggaaatggttatgctcctgtgcttgactgccacacttctcacattgccgtcaagtttgccgaacttgtgaccaagattgacaggcgatctggtaaggagattgagaaggagcccaaattcttgaaaaatggagatgcaggttatgttaagatgattcccaccaagcctatggtggtcgaaactttctccgagtatcctcctcttggtc

SEQ ID NO: 134801 - DNA, 255 bp, Glycine max
ggatcgccgccggagacatcatcctggttggactcagggactaccaggacgacaaggctgacgtcatcctcaagtacatgcccgacgaggccaggctcctcaaggcctacggcgagctccccgataccagctcgcctcaacgagggcatcggcgccggcttggacgaggaggacgacgccaccgccaacgactacatcgagttcgaggatgaggatattgataaaatctaatccctctctcgccctcaattatca

SEQ ID NO: 134802 - DNA, 255 bp, Glycine max
cactcactcactcactcactcactcactcgcaagcaaaaagaaagaatcccaggcgaggagaaagatggaggggaaggagcaggatgtgtcgttgggagcgaacaagttccccgagagacagccgattgggacggcggcgcagagccaagacgacggcaaggactaccaggagccggcgccggcgccgctggttgacccgacggagtttacgtcatggtcgttttacagagcagggatagcagagtttgtggcca

SEQ ID NO: 134803 - DNA, 254 bp, Glycine max
aaaacccttctgcgtttttttattataaatttttttgtcaataaagggatcaaggggttgggggatcaaatggtaaagttcttttgttggtaaattggaggattagaaacatgactattgctttccaattagctgtttttgcattaattgctatttcatttattttattgattagtgtacctgttgtatttgcttctcctgaaggttggtcgaataacaaaaatgttgtattttccggtacatcattatggatt

SEQ ID NO: 134804 - DNA, 250 bp, Glycine max
ggagctggagctcactcaaactacagcaccaagtccatgagagatgagggtggttatgaggtgattaagaaggccattgaaaagcttggattgaggcacaaggagcacattgcagcatatggagaaggcaacgagagacgtctcactggaagacatgaaactgcagacatcaacaccttctcttggggtgtggcaaaccgtggaagctccattagagttggaagagacacagagaaaaatggcaaaggtt

SEQ ID NO: 134805 - DNA, 250 bp, Glycine max
ctccttgactgtgacaacaagtgtgacataacagaaaagacttcatgtgacaatgggtgtaatggaggtcttatgacaaatgcctacaattatttgctcgagtctggtgggttggaggaggagtcttcatatccctacactggggagagaggtgaatgcaagtttgatccagagaaaatagcagttaagatcacaaatttcaccaatatccctgctgatgagaaccaaattgccgcatatttagtaaaaa

SEQ ID NO: 134806 - DNA, 251 bp, Glycine max
cttctctggttgattcggatctagagtcttcagtttctcctcgttgttcttcgctttcctgttttcaatttcgattctttcgttaatttaataagatgtttgggagggcaccgaagaagagcgataatacgaggtactacgaaatcctcggcgtctccaagaacgcttcgcaggatgatctgaagacggcttacaagaaagccgccattaagaatcaccccgacaagggcggtgatcccgagaagtttaaa

SEQ ID NO: 134807 - DNA, 249 bp, Glycine max
gagactagttcataggctgggttttactacagaagaatcaatagcagcacaggtgctgtatcggatgacacttattgcaggcaggcaaagtggtcaaatgtttagcgtagagtctgcaaaggagactgcttcgcgtcttgaagctgagggaagagatgattttgatttttctataaatattctggttcttgggaaagcaggtgtgggcaagagtgctacaataaattcaattttcggcgagacaaagac

SEQ ID NO: 134808 - DNA, 228 bp, Glycine max
cacaactactacaagtacttccttacaatcaaaaccaacaacaactatggcaagttatcaaaagcactacgatgatcagggtcgcaaggttgacgagtatggcaacgttgagaagcaaaccgacgaatacggcaaccctgttcatgctgctagtgtcacctatgtagccaccagaactgctgctggtggctacagtgatgacattaataagcaaccatgatccaccaa

SEQ ID NO: 134809 - DNA, 255 bp, Glycine max
aacaataccgggctcattgagtctggtaattggcatgagtacaatctaaatcccttaacgaggatccattggagggcaagtctggtgccagcagccgcggtaattccagctccaatagcgtatatttaagttgttgcagttaaaaagctcgtagttggaccttgggttgggtcgatcggtccgcctccggtgtgcaccggtcggctcgtcccttctgccggcgatgcgctcctgtccttaactggccgggtcgtg

SEQ ID NO: 134810 - DNA, 254 bp, Glycine max
ctctatataaaccctttaacctatctcttcttgtcacatagcatagctttgaatacaaaaccaagttaatgttgcaatcgcataataataaccatccaaagtttattgagagaaatttgcaagtttgaaaagaaacatggcatctcatcaacaaaacaagcaagagcttgatgaaagggcaaggcaaggagagactgttgttccgggtggcactggtggcaagagccttgaggctcagcaacatcttgctgaag

SEQ ID NO: 134811 - DNA, 252 bp, Glycine max
gaatgaatgtgaaagatgatttggtggtgttgcttgatcatattcagtatgcttgcaagagaattgcagcacttgtggcttctcctttcaattacagccttggcaaacaaactgctcttggttctgttggttctgatagggatgctccaaagcctcttgatattgtctcgaatgaaattatcttgtcatcactccgaaaatccggaagagttgctgtcatggcttcagaagaaaatgacgcaccgacttgga

SEQ ID NO: 134812 - DNA, 253 bp, Glycine max
gggtcgtcttcggatcggtggaacttgactgcgccggcgtgaattccgacgctgcgagtggcaccgaattgcgatagcggtgacgaatatgaaggttttcgttaagactctcaaaggcactcacttcgaaatcgaagtgacgccgcaagacacggtttctgaagtgaagaaaaatatagaaactgttcagggtgcagatgtctatcctgctgcacagcaaatgctaattcatcaagggaaagttcttagggat

SEQ ID NO: 134813 - DNA, 252 bp, Glycine max
ggcgagagaatcggatgcccccggagcaaaggagtatgtgcatattcgaattcagcagaggaatgggaagaagagtctgaccacagtgcaagggctgaagaaggagttcagctacgagaagatcctcaaggacctcaagaaggagttctgctgcaacggaaccgtggtgcaggacaaggagcttggcaagatcatccaactccaaggcgaccagcgtaagaacgtctcccacttcctcgttcaggctagcct

SEQ ID NO: 134814 - DNA, 250 bp, Glycine max
cgcattaaaaaaaaaaattagaaaacaatatagatacgatcttttatcctataattttatcaattatgcagataagaaagactcatatatttatggatatagatccctatttcaagtaaaaaaaaaccaagtgatttcttctaattacaacacgtataaaaaagaattattggatatcatagataatctctttatcaagaattatatatcggaagatgcgattctagatatggaaaaaaatatgtataga

SEQ ID NO: 134815 - DNA, 250 bp, Glycine max
ggaaaattagcctcacaaaagcaaagatcaaacaaaccaaggacgagaacacgatgttgcttgaacttgcacttggtttattggttttggctctgtttctgcacttgcgtcccacacccactgcaaaatcaaaagcacttcgccatctcccaaacccaccaagcccaaagcctcgtcgtcccttcataggacaccttcatctcttaaaagacaaacttctccactacgcactcatcgacctctccaaaaa

SEQ ID NO: 134816 - DNA, 237 bp, Glycine max
gtgcaacaagctatgcaatatattgatgagacaccagatatcgaaactcgcatagaactcatcaaaacgttgaacagtgtgtctgcagggaagatatacgtggaaattgagagagctagattgatcaagaaacttgcaaagattaaggaagaacaagggcttatagctgaagctgctgatttgatgcaagaaatgcggcggaaactttggcgccaggccaagacgtagaaatgcatc

SEQ ID NO: 134817 - DNA, 251 bp, Glycine max
agcttctgaagtgtgtcgtgggtggagagaggcaatttgctttggccttactcggttatcactctcatggtgtagcaagaacatgaataacttggtcctatccctttctcctaaattcacaaaactgcagactttaatccttcgtcaagacaagcctcaactagaggacaatgctgttgaaactatagcaaatttctgtcatgacctccaaatcttggacctcagcaaaagtttcaagcttactgatcgct

SEQ ID NO: 134818 - DNA, 253 bp, Glycine max
gcggcggaatcccacctgggattctgctaatacgaggaaagcaatggaacctccagacgcaccgctacatggtgctcctcaccaccttcgtcgcctacgcgtgctaccacgcgtcaagaaaacccaccggaatagtcaagagcgtcttatgccccgaacacaaaggaacctcgcaaggctggagcccattcaacggtcacgatggaacgtcgaagctgggcgaaatcgacgtggcgttcttagcgtgttcact

SEQ ID NO: 134819 - DNA, 253 bp, Glycine max
cggaagaagaacagtcctttcttgtatgatctggtcattacgcatgccctcgagtggccttctctcactgtggagtggcttcctgaccgccacgaaccacctggcaaagactagtccctccagaaggtcatcttgggcacccacacttctgagaatgagcccaattacctcatgctggcccaggtccaactccctcttgatgatactgagaatgatgcccgccactatgacgatgatcgccccgacattggtg

SEQ ID NO: 134820 - DNA, 231 bp, Glycine max
  unsure (1)..(231): unsure at all n locations
aaaccttgttgttctacccgttcaaaatgatggttccacagggctccattgggccaacctccaaaaaagaacccctctaatgcaagtaccagtcctggtggacctcaatggaaatcacttgtgggttaactgtgagcagcagtactcatccaaaacgtaccaagcacccttctgccactccacccaatgctctagagccaacacccaccacagccacagntgccccgcggc

SEQ ID NO: 134821 - DNA, 223 bp, Glycine max
cttccaccaagttatgggtttccttgtgttgcttcttttctccctcttaggtctctcttctagttccagcatatcaactcatcgttccatattggaccttgacctaaccaagtttaccacacagaaacaggtgtcttcactgttccaactatggaagagtgagcatggacgtgtctaccataaccacgaagaagaggcaaagagacatgtagattttcaagaa

SEQ ID NO: 134822 - DNA, 210 bp, Glycine max
gcagagatgggcacatcggtggcccttactatggaaccaacaccgcagacaccggtactggtcacagaagtggaaccacgggcggcaccggttatggaggcactggtggcactgattatggaacaactggtggcactggttatggaagtggaactgggtatggagtcaacactgggggctcgcacaccgaagcaggactctggaaggaac

SEQ ID NO: 134823 - DNA, 261 bp, Glycine max
aaaaaacattgcccttgttctttcaaagttaccaaacacaagtacacaacacaacagcaacatatggcgtctgaacaattggctcgcagagagaacaccaccaccgagaaggagattcacgttgagaaacacagggttcccaagatggccacccacttcgagcaccttgcggagcaagctaaagaatctgacatcaccgctgggaaggatactccgcagggtagcatagaagccttgcagctggagagagggtcaaagatc

SEQ ID NO: 134824 - DNA, 262 bp, Glycine max
ctagaaagtgggaaagacagtgatgtcagttttgaagtgaatggagaaattttcgctgctcataaattggttctagcagctcgctcacctgttttcagggctcaacttttcggtccgatgaaaaatcagaatacccattgtataaaagttgaagacatggaggctccagtctttaaggcattgcttcatgttatatattgggactcactacctgacatgcaagagcttactgggttgagctcaaaatgggctactaccttga

SEQ ID NO: 134825 - DNA, 257 bp, Glycine max
cgtgaatcgtgatttagcatttaccacaccaaaatcaatctgcggagtcagaaagccatggatccctacaagaatcggccatcaagcgccttcaattctcccttctggactacaaattccggtgctcccatctggaacaataactcatcgctgactgttggatctagaggtccaattctgctggaggattaccatctggtggagaagcttgcaaactttgacagggaacggatccccgaacgtgttgtccacgctcg

SEQ ID NO: 134826 - DNA, 259 bp, Glycine max
gcagaaagaaaagaccatcaaagtttcacttcagccttatccggtttagggtttcggtttttgacccaacctttgacgtatcgaaaccttaagtttcggatcaggtctgagcaatctggttggtagaacctttggtcttagagagtcaagttttatgtctgaattagacgatcaaattcctactgccttcgatccttttgctgatgcaaatgctgatgactcgggtgctgggtcaaaggagtatgtgcatattcgcgta

SEQ ID NO: 134827 - DNA, 257 bp, Glycine max
aaataattgaaaaatacattcaattatgtcttcgcgtatcaaatattttcttttcatatcgatgcgtacgatatttttccagcaattaatgtatgtgagacagaaactttcacttacagttttttctttttaatattgtatttcattttttttaataattaataaaataataataataatgaataaaaaaatcaaataataattaataaaaagaaaaaagtgtaaatcaaatagaaatttataaaatctatgatcct

SEQ ID NO: 134828 - DNA, 254 bp, Glycine max
actctctatgaatctcgtgcaataatcagatacttagctgagaagtataaagaccaagggactgacttattaggaaagacaatagaagaaaagggtctagtggaacaatggcttgaagtggaagctcataactttcacccaccactctacaacttggttattaatgttctgtttgcgccattaacgggggctccttcggaccaaaaagtgatagaagaaagtgataaaaagattgagaaggtgctggatgttta

SEQ ID NO: 134829 - DNA, 258 bp, Glycine max
gtcttttttcactcttcagttctcgttgttgttcttcgctttcctgaaactagggttttcaatttcgattcattcgttaataattaaagatgtttgggagggcaccgaagaagagcgataatacgaggtactacgaaatcctcggcgtctcgaagaacgcttcgcaggatgatctgaagaaggcttacaagaaagccgccatcaagaatcaccctgacaagggcggtgatcccgagaagtttaaagagctggcacaag

SEQ ID NO: 134830 - DNA, 258 bp, Glycine max
gagtaatcgagaaagagaagaagcatatatatcaaaatggctgcagagatggagagggagtcattgataactgaagctcctaatgcaccagttactgcacagagaagggtcagaaatgacttagaaaattctctaccaaaaccatacttgccaagagcattgaaagctcctgatacgggtcacccaaatggaacagcaggccacaggcaccacaacttatctgttcttcagcagcattgtgctttttttgatcaagat

SEQ ID NO: 134831 - DNA, 255 bp, Glycine max
gtccttaaacactcatcagtcatcaccatggccaagctagttttttccctttgttttctgcttttcagtggctgctgcttcgctttcagttccagagagcagcctcagcaaaacgagtgctagatccaaaaactcaatgccctcaaaccggataaccgtatagagtcagaaggagggctcattgagacatggaaccctaacaacaagccattccagtgtgccggtgttgccctctctcgctgcaccctcaaccgc

SEQ ID NO: 134832 - DNA, 257 bp, Glycine max
cacacaactactacaagtacttccttacaatcaaaaccaacaacaactatggcaagttatcaaaagcactacgatgatcagggtcgcaaggttgacgactatggcaacgttgagaagcaaaccgacgaatacggcaaccctgttcatgctgctagtgtcacctatgtagccaccagaactgctgctggtggttacagtgatgacattaataagcaacatgataccaccaatgcctacggcgtagacactggtagaca

SEQ ID NO: 134833 - DNA, 256 bp, Glycine max
gcattgtatttggaacagttatgggaagtgttggggcattacatgcctttacttcacgagatgatgttgatttcttttctcatttggagatgcatatgaggcaggatcacccacctttgtgtggaagagaccacatggcatatagatctgcctattttcctgttaaggatgttattgatggggatctatgtgagcaatacccaacattgccaatggatttgcagagaaaaattgctgatgaattggacagaacccc

SEQ ID NO: 134834 - DNA, 252 bp, Glycine max
caaaaagtttacgttacaaatcgcataataaccgtcctaagtttattgagagaattttgcaagtgtgagaaacatggcatctcgtcaaaacaacaagcaagagcttgatgaaagagcaaggcaaggagagactgttgtcccgggtggaactggtggcaagagcctggaggctcagcaacaccttgctgaaggaaggagcaagggagggcaaacaaggaaggaacagctgggtacagaagggtaccaggaaat

SEQ ID NO: 134835 - DNA, 252 bp, Glycine max
ctggcgtcggcctgtgggctccccattcggcccgtctcaacacggaccaaggagtctgacatgtgtgcgagtcaacgggcgagtaaacccgtaaggcgcaaggaagctgattggtgggatccccctgtgggttgcaccgccgaccgaccctgatcttctgtgaagggttcgagtgagagcatacctgtcgggacccgaaagatggtgaactatgcctgagcggggcgaagccagaggaaactctggtggagg

SEQ ID NO: 134836 - DNA, 250 bp, Glycine max
gaccaacaccaacaagaagaacatcagttagatcaacaaaagcgtggtgtaatcggatccatgttcaaggcggtgcaagacacctacgagaacgccaaggaagctgtcgttggcaagaaagaaccttcgacgacgactaactcgtacagtaccagagaggttattcacgacgttgacattcaacccgatgacgcggctgcagcgagggaagtgagagacaaatcagcctcaaagtcaccaggtatctaca

SEQ ID NO: 134837 - DNA, 249 bp, Glycine max
tatagatagatatctatttgaattgcttcattcgcgaggagccgtatgaggtgaaaatctcatgtacggttctgtaataaagatggaattgagaaacaaccatcaattataacccccaaagaaccagatttcgtaaacaacatagaggaagaatgaaaggaatatcctatcgagggaatcatatttgcttcggaagatatgctcttcaagcacttgagccagcttggataacatctagacaaatagaag

SEQ ID NO: 134838 - DNA, 250 bp, Glycine max
gtgccaccacacagtgtccaagtgcacacaacaacacaccgctacgaagccggcgtcgtcccgccggctcgttttgaggcgccgcgttacgaagccggcatcaaggcgccctcttccatttaccattccgagagaggtccgacgacctctcaggttctcgcagttgacgccggccttccggtcggcggcatcctcctgctcctggcaggactgaccctggctggaactctcaccgggctggtggtggcaa

SEQ ID NO: 134839 - DNA, 258 bp, Glycine max
aagttatggtggatgactcagagaatgggaacttgtgggagggatgttcctctggagactcaattcatgcttattgagagcaaagagagtgaaactgatggggagaattctccaatcatctacactgtcttgcttcctctcctcgaaggtcaattccgagctgttcttcaaggcaatgacaagaacgagatagagatttgcctcgagagtggggataatgcagttgagactgaccaaggccttcacatggtttacatg

SEQ ID NO: 134840 - DNA, 250 bp, Glycine max
ctcgagccggtttgtttgatggtatctactactcggataaccgtagtaattctagagctactacgtgcaacaaaccccgacttctggaagggatgcatttattagataaaaggtcaacacaggctctgcctgttgctttgatgattcatgataactcgtcggatcgcacggcctttgtgccggcgacgcatcattcaaatttctgccctatcaactttcgatggtaggatagtggcctaccaggtggtga

SEQ ID NO: 134841 - DNA, 252 bp, Glycine max
gaaagaacttccttataaccaaaaccaacaacaactatggcaagttatcagaagcactacgatgatcagggtcgcaaggtcgacgagtatggcaatgttgagaggcaaactgacgaatatggcaacccggttcatgccactagtgtcacttatgtagccaccaaaagtgttggtggctacaatgatgacgctaataagcaacatgatattactggtgtctatcccgagaaagacaccggtagacatcatttt

SEQ ID NO: 134842 - DNA, 252 bp, Glycine max
ccgtttcgaaccgccgcgttatgaagccggcgtcaaagcgccctccatttaccattccgagagaggtccaacgacttcccaggtcctcgccgtcctcgccggcctcccggtcggtggcatcctgctcctcctggcgggattgaccctggcaggaaccctcaccggactggcagttgccacgccgctcttcgtcctcttcagcccggtgctggttccagccacggtcgccatcggcctggccgtggccgggtt

SEQ ID NO: 134843 - DNA, 249 bp, Glycine max
gctagctagctagcaagcaagcacagagatggaggcaaagcgaggccatgccctcatgtgcttggcacgtgtttcactcttcctctgcgctctaaccctatccgctgctcacggaagcaccacggttcaagacatcgcgagaaagttgaaactcggggacaacgagcttctgcgcacggagaagaagttcaaggttttcatggagaattacgggaggagctactccacagaggaggagtatttgcgccg

SEQ ID NO: 134844 - DNA, 248 bp, Glycine max
caagaaccacatccaagagaattggaggatccttgggattgggtttaagagcatgaaccatatcccaagaaccacatccaagagaattggaggatccttgacttcttctctcactttccagaaagccttcacatgttcacctttttatttgatgatttgggtgttccacaagattacaggcatatggatggttttggagttaacacatatacgctgatcaacaaggctgggaaagcagtgtatgtgaa

SEQ ID NO: 134845 - DNA, 242 bp, Glycine max
caagaagcttatcttgtcaatctcgtaaatgtgttacgagaactgtatttgcacagtccagaggaagctcgccaattgagaaggaaagctctctctcgtattgaatggctgcaaaaaactgatgtgcctaccatagcacagattgaagagttccattcgatgcagaggatgatgaatgctcctgattcaaatgataatattgatctactgttgagcattgatttgttgggtttacaaggagc

SEQ ID NO: 134846 - DNA, 246 bp, Glycine max
tagtggcctaccatggtggtgacgggtgacggagaattagggttcgattccggagagggagcctgagaaacggctaccacatccaaggaaggcagcaggcgcgcaaattacccaatcctgaccgttctctaggccaaaagatagcatctcgtctgagcatgaggccaaatatttaatgttgttgccaaccccagaatgattgttagagttgcagacgtgcaaagagtacgataaggatgtgatttt

SEQ ID NO: 134847 - DNA, 260 bp, Glycine max
ctcgggatccggctcgagggactctgcggctgatgcggcgaagagggcagtgggttacttgagcggcaagacagaggaaaccaaagagaaagtctcggagacggcagaggcgacggctaataaggcggcggagatgaaggaggccaccagggagaaggctgccgggactgcggaggcggccaagaacaaggccgcagaggtaaaggacagagctgcagaaaccgcggaggcggccaagaacaagactgccgagactgctg

SEQ ID NO: 134848 - DNA, 256 bp, Glycine max
aaaagaagaaaggaaagaattgatcgttgaaaatgcagggaggaaagaaagcgggagagtccattaaggaaacagctacaaacattggtgcttctgccaaggctggcatggagaagaccaaggccactgtccaagagaaggcagaaagaatgacagcacgtgatccggtgcaaaaggagttggcaacccaaaagacagaggcaaagatgaaccaggcggagctggcacaagcaggcggcgcgtcagcataacacgg

SEQ ID NO: 134849 - DNA, 252 bp, Glycine max
cggagtgtctgtgcaaatttgcgttgttcttcgcggcacacctcactcactgaacggtaagtatggcggacaaggctgttacaatccgaacccgaaagttcatgaccaacaggcttctttccaggaagcagtttgtcgttgatgtccttcatccagggagggcaaatgtttccaaggctgaacttaaggagaagctggctaggatgtatgaagtgacagaccctaatactgtatttgtcttcacattccgaa

SEQ ID NO: 134850 - DNA, 254 bp, Glycine max
gaataatggcttccatcctccactactttttagccctctctctttcttgctcttttcttttcttcttatccgactcagtcacccctacaaaaccaataaaccttgttgttctacccgttcaaaatgatggttccacagggctccattgggccaacctccaaaaaagaacccctctaatgcaagtaccagtcctggtggacctcaatggaaatcacttgtgggttaactgtgagcagcagtactcatccaaaacg

SEQ ID NO: 134851 - DNA, 252 bp, Glycine max
attgaagcctctgacatgtctgcattggaggctgtcataagctgtgatgaggaaaggttgagattggagaaagaagctgaagctttggcagcgcaggatgatggaggtggggaagctcttgaacgtatttatgaacgattggaagccattgatgcatctactgcagaaaagcgtgctgctgaaattttatttggtcttggtttcaacaagcagatgcaagcaaagaagacacgcgatttctctggtggttgg

SEQ ID NO: 134852 - DNA, 251 bp, Glycine max
  unsure (1)..(251): unsure at all n locations
gtgtcgtttaaaaatgtcgcagttgctggataaagccaagaacttcgtgtcggagaaggtaaatgatatggccaagccggagggangtgtcactgacgtggacttcaagcgcgtgagctaagataatgtcgagtacttggccaaggtctctgttcgtaacccttattcaacttccatacccatttgtgagatcaactactctttcaaaagcgcatccagggagatagcatcagggaaaattccagacccag

SEQ ID NO: 134853 - DNA, 248 bp, Glycine max
cccaacaaaccggtttaggtgaactaggagaagacgttcttgcaatccacgccacacaagggtcgacccaacaacttggcccattggtcacagtcccacaattcctcttttcttgtgcaccttccttccttgttcaaaagggtcttcctagaaacactcaaggtgtggctgggttaggccatgcaccaatttctcttccaaaccaactcgcttcccactttggcctacaacgccaattcaccacttgc

SEQ ID NO: 134854 - DNA, 247 bp, Glycine max
acaagttgaaggcagatcaattcaaaccattcgagcaagtcacccttgaaccatttgagagggaccatgcctgtgtggttggtggatacagaatgcccaagaagaaaaaagatgctgctgagtagattgttttccagtagcccgtaggcgtgtaccaatgtcatttcatgagatttcgtgttaattttgttttgaaaccttggttatcaaaatactttgtaccttttatagtaaagtagtcaagtta

SEQ ID NO: 134855 - DNA, 246 bp, Glycine max
cacacaactactacaagtacttccttacaatcaaaaccaacaacaactatggcaagttatcaaaagcactacgatgatcagggtcgcaaggttgacgagtatggcaacgttgagaagcaaaccgacgaatacggcaaccctgttcatgctgctagtgtcacctatgtagccaccagaactgctgctggtggttacagtgatgacattaataagcaacatgataccaccaatgcctacggcgtagac

SEQ ID NO: 134856 - DNA, 244 bp, Glycine max
tcgtgagggagtgttacaggaggaaagggtttgggagaatgttgctgtctgcggtggcgaacaggcggtgaagatggagtacggaagagtcgaatgggttgttctcgattggaatgtgaatgcgattagattttatcaagagatgggtgctgaggtcttgaacgagtggagggtttgcaggttgactggggaggcacttcaggcttatggaggtgctgattagaatttaaaaatgtttcttttt

SEQ ID NO: 134857 - DNA, 244 bp, Glycine max
gaattagtggatgctgccaaaggtagtggcgatgccatacgcaaaaaggaagagactcatagaatggcagaggcaaatagagcttttgcacattttcgttaatccatgaacaggatctatatagacacatagacccatgaatccatacatctcgatcgaaaaagaatcgaaattgatgaatatatctctcgaaacaaacgaaaaggaaacgaaaaacaaaaacataaatcatggatcaattaag

SEQ ID NO: 134858 - DNA, 252 bp, Glycine max
cttgtttggatggaatatgtgatttgttttgtagatatggagtatgaagcaggatacttatcttcatgacttaagggagcattccaaggagatatataccatcagatggagccccactggtcctggtacaaataaccctaatcataaactggtgttggctagtgcttcatttgactcaactgtaaagctatgggatgtggaacttgggaaactcatgtacagcttggatggacacaggcatcccgtatattc

SEQ ID NO: 134859 - DNA, 252 bp, Glycine max
gagacaacctggtgaactgaaacatcttagtagccagaggaaaagaaagcaaaagcgattcccgtagtagcggcgagcgaaatgggagcagcctaaaccgtgaaaacggggttgtgggagagctatacaagtgtcgtgctgctaggcgaacagcagagaatgctgcaccctagatggcgagagtccagtagccgaaagcatcactagcttacgctctgacccgagtagcatggggcacgtggaatcccgtgt

SEQ ID NO: 134860 - DNA, 247 bp, Glycine max
ccaagaggaggatgaggaggagaagcaaacaagtaggtcatggaggaagctcttggaaaccgtatttgggaaggtgaatgagaagatagagaacaaagacactgctggttcccctgcctcttacaacctctacgatgacaaaaaagccgatttcaaaaacgcttatggttggagcaaggcactgcatggaggcgagtatcctccactcagcgaaccggatattggagttttacttgtcaaactctca

SEQ ID NO: 134861 - DNA, 245 bp, Glycine max
cacacacacacacactaagaataatggcttctatcctccactactttttagccctctctctttctttctctttccttttcttcttatccgactccgtccccattccccaacaccacactaaccctacaaaacctataaaccttctggttctacccgttcaaaatgatgcttccacagggctccattgggccaacctccaaaaaaggacccctctaatgcaagtaccagtcctggtggacctcaat

SEQ ID NO: 134862 - DNA, 250 bp, Glycine max
tcggaaacgaagaagggttctgttttcttttcgcgatgagggccaagtggaagaagaagcgtatgaggaggctgaagaggaagcgccgaaagatgagacagagatccaagtagtgcgttaaacctagtttgtttccgttgcttttacaattgcttatgttgtcaaataggacacccagttgttagtggcactggtctctcctctttgatgtcttgatacattttgttggattttatatcgtctcatgttc

SEQ ID NO: 134863 - DNA, 252 bp, Glycine max
atcgagaaagagaagaagcatatatatcaaaatggctgcagagatggagagggagtcattgataactgaagctcctaatgcaccagttactgcacagagaagggtcagaaatgacttagaaaattctctaccaaaaccatacttgccaagagcattgaaagctcctgatacgggtcacccaaatggaacagcaggccacaggcaccacaacttatctgttcttcagcagcattgtgctttttttgatcaaga

SEQ ID NO: 134864 - DNA, 251 bp, Glycine max
gccatttgggagttaggttctgcacgctctgcttccagcgagtgttctttcttcgtttcaacaccttaatttgcacacgctgcttcttcagcttgagaaatggcacaagaaacctttctattcacatctgaatctgtaaacgagggtcaccccgacaagctgtgcgaccagatctctgatgcagtgctcgatgcgtgccttgaacaggaccctgacagcaaggttgcctgtgagacatgcaccaagaccaa

SEQ ID NO: 134865 - DNA, 250 bp, Glycine max
cgaagtgctccaacttgaggaagtggaagatcccctagtcggagacgacgagcttctcatcggagtccacgccacttcccttaacagagccgatacctttcagaggaaaggctcctaccctccccctaagggcgccagcccttacctcggtctcgaatgttccggaactgtcctttccctgggtaaaaacgtttccagctggaaaatcggtgatcaggtgtgtgctcttctcgccggaggcgatatgccg

SEQ ID NO: 134866 - DNA, 247 bp, Glycine max
gtttgtgggagtactgcttatgttgcacaaacatcttggattcaaaatgggaccatcgaagagaacattatctttggtttaccaatgaacagacagaagtacaatgaagttgttagagtttgtagcttggagaaggacttggaaatgatggaacatggggaccagacagagattggagagcgcggaatcaacctaagtgggggtcagaagcagcgcatacagcttgccagggctgtgtatcaagact

SEQ ID NO: 134867 - DNA, 247 bp, Glycine max
cacaactactacaagtacttccttacaatcaaaaccaacaacaactatggcaagttatcaaaagcactacgatgatcagggtcgcaaggttgacgagtatggcaacgttgagaagcaaaccgacgaatacggcaaccctgttcatgctgctagtgtcacctatgtagccaccagaactgctgctggtggttacagtgatgacattaataagcaacatgataccaccaatgcctacggcgtagacact

SEQ ID NO: 134868 - DNA, 249 bp, Glycine max
caaagaaaggaaataattgatctttgaaaatgcagggaggaaagaaagctggagagtccatcaaggaaacagctgcaaacattggtgcttctgccaaggctggcatggagaaaaccaaggccactgtccaggagaaggcagaaagaatgacggcacgtgatccgatgcaaaaggagttggcaacccagaagaaagaggcaaagatgagccaggcagagctggacaagcaggcggcgcgtcagcataaca

SEQ ID NO: 134869 - DNA, 250 bp, Glycine max
aacaaagaaaagaagaaaggaaagaattgatcgttgaaaatgcagggaggaaagaaagcgggagagtccattaaggaaacagctacaaacattggtgcttctgccaaggctggcatggagaagaccaaggccactgtccaagagaaggcagaaagaatgacagcacgtgatccggtgcaaaaggagttggcaacccaaaagaaagaggcaaagatgaaccaggcggagactggacaagcaggcggcgcgt

SEQ ID NO: 134870 - DNA, 246 bp, Glycine max
caagaagccacaagcagacggtgaacccaccgaatgcggcgacgttttcggtgtctccaccgccgcggagcctcacgctgcgccggtggtgtccgccggtatcggttcggctgccatagatggcgaccccataaccatcggagaagctctggaagcggcggcaatatcgatcggggataaaccagtggaccaaaatgacgccgatgcgattggcgtcgcggagattagggccaccggagagaataa

SEQ ID NO: 134871 - DNA, 246 bp, Glycine max
gctttctcttccttcataatttctcacctttcaaatctccattcagcttcattttctgcatagaaaaaacccttttctggagaaagaatatagtcttcagctggacaaggatcattcatcttgaaagaagagtttgtgtgtgacaatctttatagttctaaggagggtgcaagagagaactgaatttgctgtgatggcaactcgtagatatgcttttggaagagctgatgaggccactcatccaga

SEQ ID NO: 134872 - DNA, 255 bp, Glycine max
tgatgatattcgcacagccatacagaatgcaactggacctaaatcagcactgtttgttcctgaagtcccgtttgaagtgcttgtacgcaggcagatatctcgactattggatccaagtcttcagtgcgctaggtttatatatgacgagttaatgaaaatcagccatcactgtatggtcactgaattgcagcggttccctttcttgagaaagcgcatggatgaagttattgggaactttttacgagaaggcctaga

SEQ ID NO: 134873 - DNA, 269 bp, Glycine max
tcgcatgcacgcgcaagtccgtcgtcaagcgccagtccggattcggaccatctacgaaagtcagctccttgagtatgaccctgataggcacttggctgttttctggatttcctgtgaggctggcacctatgttaggactatgtgtgtgcacttaggcttgcttcttggtgtgggtagccacatgcaggagcttaggagggtcaggtctgggatcatgggggagaaggataacatggtctccatgcatgatgtcatggatgctcagtggg

SEQ ID NO: 134874 - DNA, 249 bp, Glycine max
cctttgttcactcttcttctcttgcggctagggttttagcgcagttcttctagatttaaggaagatgggtaaggaaaaggttcacatcagtattgtggtcattggccatgtcgactctgggaaatccactaccactggtcacctgatttacaagcttggaggtattgacaagcgtgttattgagaggtttgagaaggaagctgctgagatgaacaagaggtctttcaagtatgcctgggtgctggacaa

SEQ ID NO: 134875 - DNA, 244 bp, Glycine max
ggaatataagaactaagatggattggatcggagcgtaccgcggaggccagagaagcagggactggtgcgacccttcatcaccattcactgatttgtgggaccctcgtcgtgtcggtgacgctgatgatatcacctcctctctcgcccatgctcacgttgactggcgtgagactgataaagctcatatcttccgtgctgatcttccaggggtgaagaaagaggatctgaaggtgcaggtggagga

SEQ ID NO: 134876 - DNA, 243 bp, Glycine max
gagaaaccctagcaaaaatgccggctggtcacggtttgagatcccgcaccagagattccttctctcgtcccttcaggaagaagggtaccatcgccctcaccacatacctcagaacctaccacgtcggcgattatgtcgacgtcaaggttaacggcgccgtccacaagggaatgcctcacaagttctaccatggccgcaccggtcgcgtctggaatgtcaccaaacgtgctgttggggtcgaag

SEQ ID NO: 134877 - DNA, 244 bp, Glycine max
actactacaagtacttccttacaatcaaaaccaacaacaactatggcaagttatcaaaagcactacgatgatcagggtcgcaaggttgacgagtatggcaacgttgagaagcaaaccgacgaatacggcaaccctgttcatgctgctagtgtcacctatgtagccaccagaactgctgctggtggttacagtgatgacattaataagcaacatgataccaccaatgcctacggcgtagacactg

SEQ ID NO: 134878 - DNA, 245 bp, Glycine max
gttaacacatatacgctgatcaacaaggctgggaaagcagtgtatgtgaaatttcactggaagaccactagtggtataaagtgtctattggaggaagaggccattaaggtgggaggagccaaccacagccatgccactcaagacctccatgattcaattgctgctggtaactatcctgagtggaaactgtttgttcagacaatagatcctgagcacgaagacaaatttgactttgaccctcttga

SEQ ID NO: 134879 - DNA, 243 bp, Glycine max
gaagaagaaaaaaacaataagtaacagaaatggtggttctcacaatggtaactcaatgcactacgggatcctggttggtgaagtgaaagcaaatttcaagaaaggtgttggggcaaatgaattgctgtcccatcttgcagcacttcctgcacctgctcaagaaaagatgagtgcactggttgaagctctatttgatggaattgataaaggttttgctaaagaagctgataagaagaagaacta

SEQ ID NO: 134880 - DNA, 241 bp, Glycine max
ttcgaaatggctgaggtagaaccaatatccacctacgtagacttcggggagagagaatattttgttgcggatgaaagagggtacgattacttgctgtacaaaatggctgaagaatttctcttcacatccaagggaagaatcttggacaatcgtctcaaactcaacaaggtcgtccgggaattgcagtattcaaaaagtggtgttacggtgaaaacggaggatggttgcgtttacgagacca

SEQ ID NO: 134881 - DNA, 243 bp, Glycine max
gaaaacctaagcttagaattagaaacaaagaaaagaagaaaggaaagaattgatcgttgaaaatgcagggaggaaagaaagcgggagagtccattaaggaaacagctacaaacattggtgcttctgccaaggctggcatggagaagaccaaggccactgtccaagagaaggcagaaagaatgacagcacgtgatccggtgcaaaaggagttggcaacccaaaagaaagaggcaaagatgaacc

SEQ ID NO: 134882 - DNA, 262 bp, Glycine max
tgcagctccaggcgcttcgcaagaaatcgcagttccaataatcgccgaaatcgatctctacaagtacgacccatgggaccttccaggaatggctttgtacggagagaaagagtggtattttttcacgccgagggaccgcaagtacccgaacggttcgcggccgaaccggtccgcggggaccggatactggaaggcaaccggagcggataaaccggttggctaaccgaaacctgttgggatcaagaaagcattggttttttac

SEQ ID NO: 134883 - DNA, 246 bp, Glycine max
ggaggaccgagtgcctcccacgcccggtcgtactcataaccgcatcaggtctccaaggtgaacagcctctggtcgatggaacaatgtaggcaagggaagtcggcaaaatggatccgtaacctcgggaaaaggattggctctgagggctgggcacgggggtcccagtcccgaacccgtcggctgtcggtggactgctcgagctgcttccgcggcgagagcgggtcgtcgcgtgccggtcgggggacg

SEQ ID NO: 134884 - DNA, 245 bp, Glycine max
gctgataatagcggagacgcgaactgatgtgtattcgaatcctaggagctagtaatcgacgatatgcttatattggtgacattgttgttgctgtaatcaaacaagcagtaccaaatacgaacttagaaagatcagaagtgatcagagctgtaattgtacgtacttgtaaagaactcaaacgtagcaacggtataataattcagtatgatgataatgctgcagttgtcattgatcaagaaggaaat

SEQ ID NO: 134885 - DNA, 242 bp, Glycine max
aagatcgtcagtaacggagttggactggtgccaccacacctggctcaccttttgtacgaggggctccactcccgtttggaatctgcgggtattgacggtgttaaggttgacgttatacacttgctcgagatgctatccgaggaatacggtggccgtgttgagctagccaaagcttattacaaagcgctcactgcttcggtgaagaagcatttcaaaggcaatggggtcattgcgagcatgga

SEQ ID NO: 134886 - DNA, 241 bp, Glycine max
gagagaggttttgatgcaacgctgtcactgagaaaggatctctatctacgaaggagcggaataaaacccttctctctgtgattaagagaatggcttcagatcggaaacttcacacttttgaggaggtggcaaagcacaaccagaccaaggattgctggctcatcatttctggcaaggtgtatgatgtcacccctttcatggaggatcatcccggaggtgatgaggttttgttatctgcaac

SEQ ID NO: 134887 - DNA, 240 bp, Glycine max
gagacaaagaatagatcctcaatacaatgaggttcaggctcagatggaaacaaatttgtttaaattgtctcttgatgatgttgaaactcctaaaggttccatgttggatcttaaaatttctcagtctaaaattgcacttcccaaaaacacagttggaggaaccattctgcgtagtgatctattggcaaattttttgacagagggcaattttagagcaagtgttgatttgcagcgcactca

SEQ ID NO: 134888 - DNA, 244 bp, Glycine max
cgtcgctccgcaccagtttcaccgcacgaatatcttgttgtttggagcgatccgagaaaaactctgtaaacatgttggtttaccaggacctccttacaggtgatgagcttctctctgactccttccgttacaaggaaattgagaatggaatgctgtgggaagttgaggggaagtgggttgttaaaggagcagttgatgtagacattggtgcaaacccttctgctgagggtggaggagaagatga

SEQ ID NO: 134889 - DNA, 234 bp, Glycine max
gagtcaacagggacaattggcaagcgtttggccagcatcagtgtagagaacattgaatccaacaggcgagctcttagggagctgcttttcactgctcctggtgttcttcaatatctcagtggtgtcatcctctttgaggaaaccctctaccagaggacagctgcaggcaagccctttgtgaatgtcttgaaggaagctggtgtgcttcctggcatcaaggttgacaagggcaca

SEQ ID NO: 134890 - DNA, 239 bp, Glycine max
aaggtcaaggacctttcccaggccgacttcggccgcctcgagatcgagctggccgaggttgagatgcccggcctcatggcctgtcggaccgagttcggcccctcccagcccttcaagggggcccgcatcaccggctccctccacatgaccatccagaccgccgttctcattgagaccctcaccgcccttggcgccgaggtccgctggtgctcctgcaacatcttctccacccaggacca

SEQ ID NO: 134891 - DNA, 238 bp, Glycine max
gttttgagggagacaacatgattgagaggtccacaaaccttgactggtacaagggtcctactctgctagatgcacttgaccagatctctgagcccaagaggccttctgacaagcccctcaggctaccccttcaggatgtgtacaagattggaggaattggaactgtgcctgtgggacgggttgagactggtgtcttgaagcctggaatggtggtgacttttgcaccaactggactgac

SEQ ID NO: 134892 - DNA, 240 bp, Glycine max
aaagaatcaaagaaaggggtggtggctgcttcgaaagcttaataatttgtttatttccagaacatcatagttttcgcagcagcaaactaacaaattactcatatcatataataagatggcccgttctctctcgcaagccaaacgtattggtgtccttgttgctcaatctatctccctaattcccgttcatcggcgaggttacgcagtggcatccgatgtatcggtaagagttggattggg

SEQ ID NO: 134893 - DNA, 237 bp, Glycine max
accttgtttgtctccaatcaaaacctttcaagctggcgttcgaaaaccaagacaaccctgtccgagaaatcaagcccaagaataggagaatcatgggtgctggaggccctgatgatgaggacaacaacaggtggccaccgtggctgaagcctctgctaaaagaaagtttctttgttcaatgcaagcttcacgctgattcgcacaagagcgagtgcaacatgtactgcttggattgta

SEQ ID NO: 134894 - DNA, 238 bp, Glycine max
gaaatccgcagtgtctggatatcttactggtctcaggctgaccgttctctaggccaaaagatagcatctcgtctgagcatgaggccaaatatttaatgttgttgccaaccccagaatgattgttagagttgcagacgtgcaaagagtacgataaggatgtgattttcgatcaatttgaaagaacttatccatttcttgcaattttagttgtgtacccataactccatgcatgcaactc

SEQ ID NO: 134895 - DNA, 240 bp, Glycine max
tatcggccacatttagattcccttctggggaggtccgtttgatatccaaaaactgctcggcaacagtcggacaagtgggaaatgttggagtagaccagaaaaatttaggtagagccggatctaaatgttggctaggtaagcgtcctgtagtaagaggagtagttatgaaccccgtagaccatccgcatgggggtggtgaagggagggccccaattggtagaaaaaaacccgcaactcctt

SEQ ID NO: 134896 - DNA, 240 bp, Glycine max
ggcaggaagagcaggtaatactggggttgctgtcatgctttatgatccaaaaagatctaacatacctagaatagaaagagagtccggtgtaaaatttgaacacgtatccgcccctcagcccgatgatattgccaaagctgttagtggggaagctgctgaaatgattatccaagtgtctgatagtgtggttcctgcattcaagtctgctgctgaagagcttttgaacagttctggtttacc

SEQ ID NO: 134897 - DNA, 238 bp, Glycine max
agagtccattaaggaaacagctacaaacattggtgcttctgccaaggctggcatggagaagaccaaggccactgtccaagagaaggcagaaagaatgacagcacgtgatccggtgcaaaaggagttggcaacccaaaagaaagaggcaaagatgaaccaggcggagctggacaagcaggcggcgcgtcagcataacacggcggccaaacagtccgccaccacggctgggcacatggga

SEQ ID NO: 134898 - DNA, 238 bp, Glycine max; identical to SEQ ID NO: 134113

SEQ ID NO: 134899 - DNA, 236 bp, Glycine max
ggcggccaccgcaagcaacaatgacgtcgccgccgccaacgacggtcccgtgatgagccttatcaacaagcgcctccgcgctctccgcaagaagctgaaccgcatcctcgccatggaagaggccgtcaccttgggcaagcccttgaacaaggagcaggaagaggttctacgctccaaaccctccgtcctcgccctcatcgatgagctcgataagctccggcaacctctcgccaccg

SEQ ID NO: 134900 - DNA, 237 bp, Glycine max
gaaaacctaagcttagaattagaaacaaagaaaagaagaaaggaaagaattgatcgttgaaaatgcagggaggaaagaaagcgggagagtccattaaggaaacagctacaaacattggtgcttctgccaaggctggcatggagaagaccaaggccactgtccaagagaaggcagaaagaatgacagcacgtgatccggtgcaaaaggagttggcaacccaaaagaaagaggcaaaga

SEQ ID NO: 134901 - DNA, 222 bp, Glycine max
gcacatgatcgaggacgactgcgccgacagcggcatccctctgccgaacgtgacgagcaagatcctggcgaaagtgatcgagtactgcaagaagcacgtcgaggccgcgaatcccgaagacaaaccctccgaggacgatctcaaagcctgggacgccgatttcgtcaaggtcgaccaggccacgctcttcgatcttatcctggctgcgaactacttgaacat

SEQ ID NO: 134902 - DNA, 233 bp, Glycine max
cggatctagagtcttcagtttctcctcgttgttcttcgctttcctgttttcaatttcgattctttcgttaatttaataagatgtttgggagggcaccgaagaagagcgataatacgaggtactacgaaatcctcggcgtctccaagaacgcttcgcaggatgatctgaagaaggcttacaagaaagccgccattaagaatcaccccgacaagggcggtgatcccgagaagttt

SEQ ID NO: 134903 - DNA, 235 bp, Glycine max
gttgaaggaaatggctgaagcacaactacgagaccagcatggcaaccctgtcccactcaccgatcaatacggtaatccggttatcttaactgacgagcgcggtaatcccgtccaactcactggtgtcgctaccaccgctaccggcacagcaggttctgggtttgggtcctatggtaccggtgcttacggtggtggtgcaagtgcaaccaccgttgcagatcttttggcaacccaa

SEQ ID NO: 134904 - DNA, 236 bp, Glycine max
tggaatgccattgccatattctgaacgctttctactaactgtgaagcctctagcaaagcatgttcctccaatgttacatgagaaggacatgaattcacgagttttctatggaaacgattccatttatgtgctgcttagacttcatcagacattgtatgagaggatacaatcagcaaagattaactcatcatctgctgataggaaatggaaggcttcaagtgatacaagctccaccg

SEQ ID NO: 134905 - DNA, 240 bp, Glycine max
cacacaactacaagatagaacttccttataaccaaaaccaacaacaactatggcaagttatcagaagcactacgatgatcagggtcgcaaggtcgacgagtatggcaatgttgagaggcaaactgacgaatatggcaacccggttcatgccactagtgtcacttatgtagccaccaaaagtgttggtggctacaatgatgacgctaataagcaacatgatattactggtgtctatcccga

SEQ ID NO: 134906 - DNA, 229 bp, Glycine max
gaagagattaaggggaagaaatattttggaggggagaatataggataccttgacattgcacttggatggatctcttactggcttcctatttgggaggaagttggatcgatacagataattgacccattgaaatttccagccatcactgcatggatcaccaattttcttagccatcctgtgatcaaggacaacttgcccccaagagacaagatgcttgtttacttccaca

SEQ ID NO: 134907 - DNA, 231 bp, Glycine max
agctgataagagagataccaacaagaaaagaaaaaaagaagagttgagattccctttgaagaaaagatggcatcccataggcaaagctatgaagctggtcaaactaagggccgaactgaggaaaagacgaaccagacgatgggcaatattggagagaaggctcaagctgcaaaggagaagacccaggaaatggcccaagctgcaaaggagaagacccaacaaacagcccaa

SEQ ID NO: 134908 - DNA, 230 bp, Glycine max
ggaaacagctgcaaacattggtgcttctgccaaggctggcatggagaaaaccaaggccactgtccaggagaaggcagaaagaatgacggcacgtgatccgatgcaaaaggagttggcaacccagaagaaagaggcaaagatgagccaggcagagctggacaagcaggcggcgcgtcagcataacacggcggcgaacaggctgccacggcagggcacatgggacaacccat

SEQ ID NO: 134909 - DNA, 229 bp, Glycine max
agagaaggttgctctagatgaacttttgtgcggaaaagttctacctcacttaagagtcatatcagaaaatgttcaagatgcaataacaagaacagaacggattattgcttccctatctggggtctggtctggtccaagtgtcattggagacaaaaagtatgttgatgccgcaaattgcagcctctggtgacttatgtgctgtcacttggaaggattctagagagaagaa

SEQ ID NO: 134910 - DNA, 236 bp, Glycine max
gtactaagctaaaccatttcttattccctcaaaatcaaaacctttttctttctagctatttcccttttcaaatcatgccacctaacatcaccaccgttgttgccaatgtcaccaccgagcaattacccaaggctcgtggaggaagtgggcgtgccttcgtgacctttcttgctgggaacggtgattacgtaaagggtgtcgtgggtttggccaaaggactgagaaaggccaaaagc

SEQ ID NO: 134911 - DNA, 234 bp, Glycine max
cttgagagaaaagtagtgtattaagactacaaattttcaattttacaatggcgtcgaggcaacaaaaagaggatcgagctgaggcagctgcgaaagttgctgcgaaagaactcgaacaactcaaccgagaaaaagaccgtgatttcagtgttggtgttgcagaccaacaccaacaagaagaacatcagttagatcaacaaaagcgtggtgtaatcggatccatgttcaaggcgg

SEQ ID NO: 134912 - DNA, 232 bp, Glycine max
acacaactactacaagtacttccttacaatcaaaaccaacaacaactatggcaatttatcaaaagcactacgatgatcagggtcgcaaggttgacgagtatggcaacgttgagaagcaaaccgacgaatacggcaaccctgttcatgctgctagtgtcacctatgtagccaccagaactgctgctggtggttacagtgatgacattaataagcaacatgataccaccaatgc

SEQ ID NO: 134913 - DNA, 230 bp, Glycine max
cggttcatcagcgtgtgtctcagccatggcgtttccctacatggaagccgttgtcggatttatgatattaatgtacatttttgaaacttacttggatgtgcgacaacatagggccctcaaacttcctactcttccaaagactttagaaggtgttatcagccaagagaaatttgagaaatctagagcctatagtcttgataaaagccacttccattttgttcacgagtttg

SEQ ID NO: 134914 - DNA, 230 bp, Glycine max
gctaaccatgcaatacggcaatatgttgacattgtttcggaaaagcagaaatatgataaattggtaaagttgctagaagacatcatggatggcagccgaatactgatatttatggataccaaaaaaggatgtgatcagattactaggcaactccgcatggatggatggcctgcactttcatttcatggagataaaagtcaagcagaaagagtttgggtgctctcagaatt

SEQ ID NO: 134915 - DNA, 227 bp, Glycine max
ggtcgatggaacaatgtaggcaagggaagtcggcaaaatggatccgtaacctcgggaaaaggattggctctgagggctgggcacgggggtcccagtcccgaacccgtcggctgtcggtggactgctcgagctgcttccgcggcgagagcgggtcgtcgcgtgccggtcgggggacggattgggaacgggcccttcggggcctcttccccgggcgtcgaacagtcaac

SEQ ID NO: 134916 - DNA, 229 bp, Glycine max
cacacaactactacaagtacttccttacaatcaaaaccaacaacaactatggcaagttatcaaaagcactacgatgatcagggtcgcaaggttgacgagtatggcaacgttgagaagcaaaccgacgaatacggcaaccctgttcatgctgctagtgtcacctatgtagccaccagaactgctgctggtggttacagtgatgacattaataagcaacatgataccacca

SEQ ID NO: 134917 - DNA, 231 bp, Glycine max
aaagaatcaaagaaaggggtggtggctgcttcgaaagcttaataatttgtttatttccagaacatcatagttttcgcagcagcaaactaacaaattactcatatcatataataagatggcccgttctctctcgcaagccaaacgtattggtgtccttgttgctcaatctatctccctaattcccgttcatcggcgaggttacgcagtggcatccgatgtatcggtaagagt

SEQ ID NO: 134918 - DNA, 229 bp, Glycine max
cacacacaactactacaagtacttccttacaatcaaaaccaacaacaactatggcaagttatcaaaagcactacgatgatcagggtcgcaaggttgacgagtatggcaacgttgagaagcaaaccgacgaatacggcaaccctgttcatgctgctagtgtcacctatgtagccaccagaactgctgctggtggttacagtgatgacattaataagcaacatgataccac

SEQ ID NO: 134919 - DNA, 229 bp, Glycine max
ctctctcaagggttccaaacacaaagccaccattcactgttggccaactcaagaaagccattccaccgcactgctttcagcgttccctcctcacttcattgtcctatgttgtttatgacctttcattggctttcattttctacattgccaccacctacttccacctcctccctcaccccttttccctcattgcatggccaatctattgggttctccaaggttgcattct

SEQ ID NO: 134920 - DNA, 230 bp, Glycine max
gaacaatcattctctgattctctgcgctccagatttaatgcagtatccatgagatacaaagattcaatttcgaagggcacaaggggatggaaggagaggctcttctctcccaattcttctatgtcagaacttggttcagaagttaggagagaattgaatgctaaaattgctagcgtgtcccgattgatggagcgccttgaaacaagagaaaataatagtgctgcaggaac

SEQ ID NO: 134921 - DNA, 243 bp, Glycine max
cacacaactactacaagtacttccttacaatcaaaaccaacaacaactatggcaagttatcaaaagcactacgatgatcagggtcgcaaggttgacgagtatggcaacgttgagaagcaaaccgacgaatacggcaaccctgttcatgctgctagtgtcacctatgtagccaccagaactgctgctggtggttacagtgatgacattaataagcaacatgataccaccaatgcctacggcgta

SEQ ID NO: 134922 - DNA, 232 bp, Glycine max
ggaaatggctatgcccctgttcttgactgccacacttcccacattgctgtcaagtttgctgaactcatgaccaagattgacaggcgatctggcaaagagcttgagaaggaacccaagtttttgaagaatggtcatgctggtgttgttaagatgattccgaccagacccatggtggttgaaactttctctgagtaccccccacttggtcgctttgctgtcagggatatgcgtc

SEQ ID NO: 134923 - DNA, 234 bp, Glycine max
caaaacagtaaagctaacttcaacacctttaattttctaaaagtaattcagcggctgaataccaagcggagaagatgagtcaggagcagccacggcgtcccaaaggccaaaaccccatcaaatacggcgacgtttttgtcgtctccggcgaccttgcacagaagcccgtcgcaccggaagatgctgccatgatgcaaagcgcggaaactcgagtgctcggacaaacccaacccg

SEQ ID NO: 134924 - DNA, 235 bp, Glycine max
gagaaagacaccggtagacatcattttggtcgtggttacgacggtgacactaacaagcaacatgatgctactggtgtttatcccggaatagacattggtagagatcatgggactaccggtgtttatggcctaaacaccgacagacatcatggaacttctggggtgaatcccgggatagacacccataaccaacaacatgggactaccgttggttatgctggtgacactggaaggc

SEQ ID NO: 134925 - DNA, 235 bp, Glycine max
tacttattcagtagttcttctctctcgaattttcactcactttctgtgcatcaatggcggcgataagtctccggaaggggaacacgcggcttccgccggaggtgaaccgcgtgctgtacgttcggaaccttcccttcaacatcaccagcgaggagatgtacgacatctttggcaaatacggcgccattcgccagatccgcatcggcaccaacaaggacactcgcggaaccgcttt

SEQ ID NO: 134926 - DNA, 236 bp, Glycine max
gtttcgaatagattatcctaagtctttgggaatagtgctgcaatggcttcaagtcaggaggaggtgacccttttgggagctactggaagcccatttgtgtgcagggttcatattgccctcaagttgaagggagttcaatacaaatatgtcgaagaaaatttgaggaacaagagtgaactgcttctcaaatccaacccagttcacaagaaggttccagtgtttattcacaatgagaa

SEQ ID NO: 134927 - DNA, 237 bp, Glycine max
tcccatgctaatgtatacagagcgtaggcttgctttgagcactctaatttcttcaaagtaacagcaccggaggcacgacccggccagttaaggacaggagcgcatcgccggcagaagggacgagccgaccggtgcacaccggaggcggaccgatcgacccaacccaaggtccaactacgagctttttaactgcaacaacttaaatatacgctattggagctggaattaccgcggctg

SEQ ID NO: 134928 - DNA, 234 bp, Glycine max
gcaattttcgggatcctgagagcaatgctgattttgaggttcaggagaagttgtctctgctggagtggtttgcaaatgaatacaaacgcttcggttgcactcttgagtttgtcaccaataaatcacaagaaggctcacaattttgcagaggttttggtgggataggtgggatcttgcggtaccagctggatatgcgatcatttgatgatttctctgatgatggaggcgtgtacg

SEQ ID NO: 134929 - DNA, 235 bp, Glycine max
gcagttaacaatcgctcctcagatatcaacaaaaggattcgcacagcacttgggaaaggtaagaaaattgtttttcttactagagttgatccttttccagtagctttactggctgttctttttggtgttaagaatgaaattctgagttctaacgccactaatcctatgctgacgcgacttcttgaaaactgtaggagtctcaaatatctggttgatgagtgtccttttgcatttg

SEQ ID NO: 134930 - DNA, 233 bp, Glycine max
ctcttctttctctctctaccattgccatggatccctacaagcaccggccatccagcgccttcaattctcccttctggactacaaattctggtgctcctatttggaacaacaactcctctttaaccgttggagctagaggtccaattctgcttaaggattatcatcttgtggagaagcttgcaaattttgatagggaacgtatcccagaacgtgttgtccatgccaggggcgct

SEQ ID NO: 134931 - DNA, 239 bp, Glycine max
gatctttgaaaatgcagggaggaaagaaagctggagagtccatcaaggaaacagctgcaaacattggtgcttctgccaaggctggcatggagaaaaccaaggccactgtccaggagaaggcagaaagaatgacggcacgtgatccgatgcaaaaggagttggcaacccagaagaaagaggcaaagatgagccaggcagagctggacaagcaggcggcgcgtcagcataacacggcggcg

SEQ ID NO: 134932 - DNA, 234 bp, Glycine max
cacaaggatatagggactctatatttcatcttcggtgccattgctggagtgatgggcacatgcttctccgtattgattcgtatggaattagcacgacccggcgatcaaattcttggtgggaatcatcaactttataatgttttaataacggctcacgcttttttaatgatcttttttatggttatgccggcgatgataggtggatttggtaattggtttgttccgattctgata

SEQ ID NO: 134933 - DNA, 227 bp, Glycine max
ctctgactatgccggtgatgctgctcagaaatcaaaggactatgccggtgacactgctcagaaaaccaaggactatgccggtgacactgctcagaaaaccaaggactatgccggtgacactgcacagacatcaaaggactatgccggtgatgctgctcagaaatcaaagggctatgacggtgatgctgcacaaaagaccaaagaatctgctggtgatgctgctcaga

SEQ ID NO: 134934 - DNA, 234 bp, Glycine max
gcaacacacagtaatgatccatatgttgatgactattaccaccaaggctgtcttgcgagaaagtcatctggtgctaaattgaggcatcacttgtctccagctcagataaaggaactccctctacgacgctcttctaatgctgaaccacatgctttacttcaagttgatgcactagggagacttccattctcatcaattcgcaggcctcgtcctctgatggaagttgatactccc

SEQ ID NO: 134935 - DNA, 234 bp, Glycine max
ggtggctataatgatgacaccaatagacatcatggaactaccggtgtctatggtatagacaccgataggcaacaacatgggactactggtggctatgccggtgacactggtaggcaacatgggaacatcggtggcccttactatggaaccaataccgcagacaccggtactggtcccagaagtggaaccacgggcggcaccggttatggaggcactggtggcactgattatgga

SEQ ID NO: 134936 - DNA, 235 bp, Glycine max
atgatatagaaagagagagaagaagaaaagaagaacaaagatgcaatcctcaaaggagaagatgaaaaacatggcaagtgctgccaaggaacaagtcgacatctataaagccaaaatagacgagaaggcagagaaagcaacggcaagaacagaagaggagagggtgatagcccatgagcacgcaaaggcaaaggaagctggagcaaagatggagctgcatgaagctaaagcaagg

SEQ ID NO: 134937 - DNA, 235 bp, Glycine max
gaaagcttgaagcagaagagagagatgtcatcatcttcagacctggacaggcaaatagagcagttgaagaggtgtgagcctcttaaggagtctgaagtgaaggtgctctgcctcaaagccatggaaatcctcgtcgaagagagcaacgttcaaagggtcgacgctcctgtcaccatatgtggtgatattcacggtcagttttatgacatgaaggagcttttcaaagtaggagggg

SEQ ID NO: 134938 - DNA, 234 bp, Glycine max
tttcaatctctctacctaatttctgtctctctctctcctgtatttgtcttgattccaatgctccgcaaggtttcgagcatcgtagagaacagttttgccatattaggtgcatcttccatttaagataagctgcaacaaggtgtgcctgaatccattgagtctctaaggattgcaggcattaaagtatgggttctgactggagacaaacaagaaactgccatatccattggctac

SEQ ID NO: 134939 - DNA, 234 bp, Glycine max
gaaaacctaagcttagaattagaaacaaagaaaagaagaaaggaaagaattgatcgttgaaaatgcagggaggaaagaaagcgggagagtccattaaggaaacagctacaaacattggtgcttctgccaaggctggcatggagaagaccaaggccactgtccaagagaaggcagaaagaatgacagcacgtgatccggtgcaaaaggagttggcaacccaaaagaaagaggcaa

SEQ ID NO: 134940 - DNA, 231 bp, Glycine max
tgccgaagaacaagggaaagggaggtaagaacaggaagaggggaaagaacgaggcggacgacgagaagcgggagctggtgttcaaggaggacgggcaggagtacgcgcaggtgctccggatgctggggaacgggcggtgcgaggcgatgtgcatcgacgggacgaagaggctctgccacatccgcgggaagatgcacaagaaggtgtggatcgccgccggagacatcatcc

SEQ ID NO: 134941 - DNA, 235 bp, Glycine max
gcgaactctacgactccatcttcgacaagttcgacggcgaccggagcggcgccgtcgaccgccgcgagttccgcgacgagatgaggaagatcatgctcgccatcgccgacggcctcggatcgttccccataaggatggtcctcgaagacgatcccaatagtcttcttcagaaagccgcggatcttgaagcctccaagacctgaaatccaaacggcgacgttttgagttcggttcg

SEQ ID NO: 134942 - DNA, 233 bp, Glycine max
cacaactacaagaaagaacttccttataaccaaaaccaacaacaactatggcaagttatcagaagcactacgatgatcagggtcgcaaggtcgacgagtatggcaatgttgagaggcaaactgacgaatatggcaacccggttcatgccactagtgtcacttatgtagccaccaaaagtgttggtggctacaatgatgacgctaatagcaacatgatattactggtgtctatc

SEQ ID NO: 134943 - DNA, 230 bp, Glycine max
atcccaggcgaggagaaagatggaggggaaggagcaggatgtgtcgttgggagcgaacaagttccccgagagacagccgattgggacggcggcgcagagccaagacgacggcaaggactaccaggagccggcgccggcgccgctggttgacccgacggagtttacgtcatggtcgttttacagagcagggatagcagagtttgtggccacttttctgtttctctacatca

SEQ ID NO: 134944 - DNA, 231 bp, Glycine max
cttaattagtgttcatgaatatgtcaagccttactttagtggttctaaattgaaaagctttctagctggtcataatatcaccattactgatggtattgacaaaactagtgcaactttgcaatttagaaagttagcagattgtgattttctcaagagaaactttaagcagatgtctaatgttttgtgggtggctcctgaggacaaggcgagtttatggtcacaacttcatta

SEQ ID NO: 134945 - DNA, 232 bp, Glycine max
caaaaggatacagagtaactggttccgtctgtgacgtggcgtctcgtgcagaaagacaagacctcatagctagagtctccaatgagtttaatggcaaactcaatatccttgtaaacaacgtgggaacaaacgtaccgaaacatacccttgatgttacggaggaagacttctcatttctgataaatacaaatcttgaatctgcttaccacctaagccagcttgcacatcctct

SEQ ID NO: 134946 - DNA, 234 bp, Glycine max
ctcgagccgattcggctcgaggcagggagagtacaacgtgagagtacaactcaataagaatcaaccagcacagtgtgttcccactgaacaagatatcatccaccatcgtagggtcgacctctggaggaaccatgattagcacctcaactcctcacatggttctccagcaatccgtgtaccaggctttcactcaggtgtttgctcagcagctaccaaagcaagcacaggtgaaat

SEQ ID NO: 134947 - DNA, 232 bp, Glycine max
gagaaaaaggaaacaaggatagaccagaactgaaaacacgaaccagagaggtaataggaagaacggagaaagaaagaggaagagaaagtggaggacaagtagtggcagagaaaggaagagaaacagaaactgcaaggggaagggttggtgctgaaaatgaaggtgcaagatcaaccgctgttataacttgcacgttggaaaaaggtggtggtactcagaaaccaataagaga

SEQ ID NO: 134948 - DNA, 230 bp, Glycine max
aaaagggaccatggaggcaaattcaggtgccagcgaccgaatttcgagaatcgccggccacctccgcccccagagagaggatgatgtttgtttgaagcgtacgacttgccgtgcaaaaggtggggtctccggattcaaggtggccatattgggtgccgcagaggcatagggcaacctctggcgatgttgatgaagatgaatccactcgtttcacttctccacctctacga

SEQ ID NO: 134949 - DNA, 232 bp, Glycine max; identical to SEQ ID NO: 133822

SEQ ID NO: 134950 - DNA, 235 bp, Glycine max
gttcttcgctgaactgaacgaggttctgacaagggagttagccgaggacggatactccggcgtggaagttagggttacgccgatgcgcaccgaaatcatcatcagagccaccagaacccaagccgttctcggtgagaagggaaggagaatcagggaacttacctcggtggttcagaagaggttcaagtttcccgagaacagtgttgaactttatgctgaaaaggtcaacaatagg

SEQ ID NO: 134951 - DNA, 235 bp, Glycine max
gtttattgaaagacaagtcaaagcccataattttctccatggcaaggctagacagagtaaaaaacataactggattggtagaaagctttggtaagaacagcaaattgagggaactggtcaaccttgtcatagtagctggttatattgatgtaaagaagtccagtgacagagaagaaattgcagaaattgagaagatgcatgagctcatgaaaaagtataacttagttggtgattt

SEQ ID NO: 134952 - DNA, 233 bp, Glycine max
tctcttttgatggacaagctaagtatcctctaaaccttggccttggaaacaaggaattgaagaatgcaaagaatgttcagtatcttccatctagatggtgtgtggcaagcccctctactgatgctcaaaatgtagcaaaccatatgagaattgcatgcagtgttgcggattgcaccacacttgattatgggggttcatgtaatggaattggagagaagggtaacatctcatat

SEQ ID NO: 134953 - DNA, 228 bp, Glycine max
attcaatctgcctcgatcatggagaggaaaacatttgggtttttgttcttgctcctccttgtcttagcttctgatgtgacggtgaagagagcagaggcgaaagattgcttgacaaggaggcacgggttccagggtagatgcttattcgacaggcaatgtgcacatgtgtgcaggagcgatggtttcatcggtggtcagtgccgaggccctcttcgcaaatgcttttgc

SEQ ID NO: 134954 - DNA, 227 bp, Glycine max
aagactttgaccgggaagaccatcacccttgaggtggaatcctcggacaccattgataatgttaaggccaagatccaggacaaagagggcatccccccagatcagcagaggctgatttttgccggtaaacaacttgaggatggaagaacccttgctgattacaacattcagaaggaatccacccttcacttggtgcttcgtttgagaggtggtatgcagattttcgt

SEQ ID NO: 134955 - DNA, 228 bp, Glycine max
gcggtgtcaacattatgcacttcccacccgagactgcttatttgtagatcctttacatgatgggaaaacaatgctcaaaatttggaacctcaataaatgttccggggttttgggtctgttcaattgccaaggaggaggttggtgccctgttactaggcgaaacaagagtagctctgactattcacactccgtgacttgctttgcaagtcctcaagacattgaatgggg

SEQ ID NO: 134956 - DNA, 222 bp, Glycine max
gtgaaagcaaatttcaagaaaggtgttgggagcaatgaattgctgtcccatcttgcagcacttcctgcacctgctcaagaaaagatgagtgcactggttgaagctctatttgatggaattgataaaggttttgctaaagaagctgataagaagaagaactactttgctgctgctgttgctgaggagggatcccagctgttattgcttcatgctattgaagaa

SEQ ID NO: 134957 - DNA, 233 bp, Glycine max
attcaattcaatctgcctcgatcatggagaggaaaacatttgggtttttgttcttgctcctccttgtcttagcttctgatgtgacggtgaagagagcagaggcgaaagattgcttgacaaggaggcacgggttccagggtagatgcttattcgacaggcaatgtgcacatgtgtgcaggagcgatggtttcatcggtggtcagtgccgaggccctcttcgcaaatgcttttgc

SEQ ID NO: 134958 - DNA, 229 bp, Glycine max
cctttcgggattggtttctatggcttctgaagtaatagagtaccgatgctttgtcggtgggcttgcttgggccaccgacagcgatgctctcgagaaagccttctctcattatggtgagatcgtcgaatcgaaggttatcatcgatcgtgaaactggaagatcgagagggtttggatttgtgaccttcgaatcggagcaggcgatgaaagacgcaatcgaaggaatgaac

SEQ ID NO: 134959 - DNA, 227 bp, Glycine max
ctcgctgaaaattagggtttcgtttcggaggtagacgaagatgttcggaagggcaccgaagaaaagcgacagcaccaggtactacgaaatcctcggcgtttcgaagaacgcttcgccggatgatttaaagaaggcttacaagaaagccgccattaagaaccaccctgacaaaggcggtgatcctgagaagttcaaagagcttgctcaagcctatgaggttctgagtg

SEQ ID NO: 134960 - DNA, 226 bp, Glycine max
caaacctgttgtttatggtcggagttggaaggcgtctgaactgcgtctgaagtcttgggacgaccttcataagttgtggtatgtgttgttaaaggaaaagaacatgttgatgactcaacgtcaaatgcttaatgcacagaacctgcgttttcctaacccggagcgcatccctaaggtgaggaagtcaatgtgtcgcatcaagcatgtacttactgagagagcaatt

SEQ ID NO: 134961 - DNA, 226 bp, Glycine max
gtctgtatctgaggtgaatgatgaggatgatgacgaggaaggcagtggcgaggaggaggatgacgattagagaatggactgatgataatagcatttatgtaggttctgatgattttgatcatccgtgtaggtggtctggtcatttccttataaacatatttctctttccaaaaaatatttccctgctcctccgtccgtaaattgctcgtctttccaaaacgtgaat

SEQ ID NO: 134962 - DNA, 224 bp, Glycine max
gtcacaaccgtcttgaaattaagaccaactgggtcattgatcacaatctcaattggtagcacaacatcaagggaaagtgaaaaagaaaggtatatttgatcagggatatggcaactcgaagatatgagtttggaaggatgaatgaggctagccacccagactccatcagagctgccttggctgaattcctctccacttgcatctttgtctttgctggagaaggc

SEQ ID NO: 134963 - DNA, 84 bp, Glycine max
gcgatactgacgtgcatatcgcacgtctgacttgggtataggggcaaaagactaatcgaaccgtctagtagctggttccctccg

SEQ ID NO: 134964 - DNA, 226 bp, Glycine max
gtttggggattttcgcccagaacatggtcagagcggcggagcatcaggcgctggaccccaccgccgtccacggcgtcacgcagttctccgatctcaccgaggacgagtttgagaagctctacactggcgtcaatggcggcttcccgtcatcgaataatgccgccggcggtattgcgccgccgttggaggtggacgggctgccggagaattttgattggagagagaa

SEQ ID NO: 134965 - DNA, 225 bp, Glycine max
ctagttctagatcgcgagccaaacgtattggtgtccttgttgctcaatctatctccctaattcccgttcatcggcgaggttacgcagtggcatccgatgtatcggtaagagttggattgggtaatattgggcgaaggaatggaatcgtgggaggtgtagaagagaagcctgatacaagagatggttcaaaagcctactcaactgattgggccccagacccagtaa

SEQ ID NO: 134966 - DNA, 230 bp, Glycine max
gcaccatgagccaggaacagctcaagaaacctcaaggggagcaggaccccatcaaatacggcgacgatttcaaagtctccgacgaactcgctttcaaacccatcgcgccaagagacgcagctctcatgcaagccacggagaaccaagcattgggccaaactcaaaaaggaggtcccgcctcggtgatgcaatccgccgcaaccgaaaacctccgcgccggcgtcgtgggc

SEQ ID NO: 134967 - DNA, 227 bp, Glycine max
aaaaaggatagattattatgtatcgattgaatcaatgactattcatgattccataattgaatcaattacatactggatccaagctaaaggaatgttatggtaaaacttcgtttgaaacgatgtggtaaaaagcaacgtgcgacttgaaagacatgattagattagctgtggattcttacatccgccattttttctagtatatagaaatgaacatgctcttgactcga

SEQ ID NO: 134968 - DNA, 231 bp, Glycine max
gttgcagaccgagctagctagctagcaagcaagcacagagatggaggcaaagcgaggccatgccctcatgtgcttggcacgtgtttcactcttcctctgcgctctaaccctatccgctgctcacggaagcaccacggttcaagacatcgcgagaaagttgaaactcggggacaacgagcttctgcgcacggagaagaagttcaaggttttcatggagaattacgggaggag

SEQ ID NO: 134969 - DNA, 232 bp, Glycine max
ggagaggacggcccaacccaccagcctattgagacgcttgctcacttccgcgctctgcccaacatgatggtctggcgtccagctgacggaaacgagacttctgctgcatactacgtcgctctcacttcggagaagaccccatcgatcctcgcactcacccgccagaacctgccacagctcgagggctcaactatcgagaacggaatcaagggtggttacgttgcagttgagg

SEQ ID NO: 134970 - DNA, 202 bp, Glycine max
atactagcgatactgataagagagataccaacaagaaaagaaaaaaagaagagttgagattccctttgaagaaaagatggcatcccataggcaaagctatgaagctggtcaaactaagggccgaactgaggaaaagacgaaccagacgatgggcaatattggagagaaggctcaagctgcaaaagagaagacccaggaaatg

SEQ ID NO: 134971 - DNA, 223 bp, Glycine max
tgtcaagccttactttagtggttctaaattgaaaagctttctagctggtcataatatcaccattactgatggtattgacaaaactagtgcaactttgcaatttagaaagttagcagattgtgattttctcaagagaaactttaagcagatgtctaatgttttgtgggtggctcctgaagacaaggcgagtttatggtcacaacttcattatgtttcgtgtaat

SEQ ID NO: 134972 - DNA, 226 bp, Glycine max
aagtaattcagcggctgaataccaagcggagaagatgagtcaggagcagccacggcgtcccaaaggccaaaaccccatcaaatacggcgacgtttttgtcgtctccggcgaccttgcacagaagcccgtcgcaccggaagatgctgccatgatgcaaagcgcggaaactcgagtgctcggacaaacccaacccggcggagaagcttccgtcatgcaatctgccgcc

SEQ ID NO: 134973 - DNA, 225 bp, Glycine max
aaagaaaggggtggtggctgcttcgaaagcttaataatttgtttatttccagaacatcatagttttcgcagcagcaaactaacaaattactcatatcatataataagatggcccgttctctctcgcaagccaaacgtattggtgtccttgttgctcaatctatctccctaattcccgttcatcggcgaggttacgcagtggcatccgatgtatcggtaagagttg

SEQ ID NO: 134974 - DNA, 224 bp, Glycine max
ctctaagttcgttcctttcagcaatggatacaaagatctcgtcaattcattccttttcctcatatatattgtttttaacctaaaaccttaaaacccaataacagcttcccctttcccttctcaagactgcccaaggccaccccatgctggtggaactgaaaaatggggagacttataacgggcacttggttaattgtgatacatggatgaacatccatctccga

SEQ ID NO: 134975 - DNA, 223 bp, Glycine max
atggaaacaaatttgtttaaattgtctcttgatgatgttgaaactcctaaaggttccatgttggatcttaaaatttctcaatctaaaattgcacttcccaaaaacacagttggaggaaccattctgcgtagtgatctattggcaaattttttgacagagggcaattttagagcaagtgttgatttgcagcgcactcatcgtattaaaggaatgattaaaatgg

SEQ ID NO: 134976 - DNA, 227 bp, Glycine max
gcaaactgagtttttccttgtgagtttgactcttgaagacattccaaaccatggaagcattcactttgtttgcaattcgtggatttacaatgccaaactcttcaaaagtgaccgcattttctttgccaaccagacatatcttccaagtgagacaccagctccactagtcaaatatagagaagaagagttgcataatttaagaggagatggaactggagaacgcaaag

SEQ ID NO: 134977 - DNA, 222 bp, Glycine max
ctaattgcaaagatgaataccaagcccgttttcttcttgtgcttcctctgtgcactgcttctcatctctgttgtggcaactgagccatccaaagatgagacacaagcagaagaaccaaagacacagccagatgcctggggaagaggtggaagtggggggcatgatggaagctggggacacggtggagactgggggcatggcggaggaggacacggtggagga

SEQ ID NO: 134978 - DNA, 231 bp, Glycine max
tgatctttgaaaatgcagggaggaaagaaagctggagagtccatcaaggaaacagctgcaaacattggtgcttctgccaaggctggcatggagaaaaccaaggccactgtccaggagaaggcagaaagaatgacggcacgtgatccgatgcaaaaggagttggcaacccagaagaaagaggcaaagatgagccaggcagagctggacaagcaggcggcgcgtcagcataac

SEQ ID NO: 134979 - DNA, 262 bp, Glycine max
gatgcatgtaagtggacaaatcggaaccacattcctgggaattgatcttcccaataggtatgtggtcctaataatggttttgaaatgtggagttctgagtgggcaaatcaaacttcatggcatttgagttttccttattgacaatcccaaacagtctacagtttttgatattctcttgggaatttctcaagattttgaaattgctggtaatactcttatgccagctttttctgttccacaggctactgccagatcttctgaa

SEQ ID NO: 134980 - DNA, 95 bp, Glycine max
gtctgatataatatattagcaactacgtagtcgaggttggaatattttgtactgaatgtcctcatgttttcttcaagtttagttaaaaaataata

SEQ ID NO: 134981 - DNA, 254 bp, Glycine max
gtcaactgattcctagcaaacatgctcgagagcttaactttgacatggaggatttggacataccatggagtgatcttgtcctaagagagaaaatagggtcaggttcttttggaactgtacatcgtgctgagtggaatggctcggatgttgctgtgaaaattttgatggaacaggattttcatgctgagcgcttcaaggaattcctaagggaggttgcaataatgaaacgtttacggcatccaaacattgttttg

SEQ ID NO: 134982 - DNA, 256 bp, Glycine max
accgcacgaatatcttgttgtttggagcgatccgagaaaaactctgtaaacatgttggtttaccaggacctccttacaggtgatgagcttctctctgactccttccgttacaaggaaattgagaatggaatgctgtgggaagttgacgggaagtgggttgttaaaggagcagttgatgtagacattggtgcaaacccttctgctgagggtggaggagaagatgagggagttgatgatgcagctgttaccgttgttg

SEQ ID NO: 134983 - DNA, 248 bp, Glycine max
cgtttaggttaatggaagagaaaaccgtgccggggattattgacaagttcgggtggtgcacgtgggacgcgttttaccttaacgtgcacccggaggaggtgcgggaaggaattaagggcctggtggagggagggtgtcctccggggttggtactgatcgacgacggttggcaaacattttgccgtgacgacgaagccgtgagcgacggggggagtttaaattgctctgtgccgggggagcagatgctg

SEQ ID NO: 134984 - DNA, 257 bp, Glycine max
cttttatcttcccaagatggagcattcaagggaagctaagatttggaacaatgtgtttgagaaagctgagaaggtagcaggcatcgaaagaggaagcataagggcaactgttctgatagaaacacttcctgcagtgtttcaaatgaatgaaattttgtatgaactgaaggaccattcagtgggtttgaactgtgggcgttgggattacattttcagttatgttaagaccttccaagctcatccagatcgcctcttac

SEQ ID NO: 134985 - DNA, 257 bp, Glycine max
cccggtcgccctacgcgactggcgcttcaaaaggtagttgacttgcttactcgttagagtaggggtcgcgagagagcagagcgtaccgccctgccatagtcgcgagtctgtttatagtcgcgactgttgtcatagtcaacaaggttgaaacttccaggaaaaaacttcgaattgggagggcgatcctcccggtgaactgaccgtaccccaaaccgacacaggtgaacaagtagagtatactagggcgcttgagagaa

SEQ ID NO: 134986 - DNA, 257 bp, Glycine max
ggagcatcagtgagagaaactgtttaggcacaatcaggaatgctgctaatgtctgctgtgttcagttctctgctcattcctcccatttgctggcctttggatctgcggattactcaacatattgttatgatcttcgcaatcttagaagtccctggtgtgtactggctggccatcgtaaagctgtgagctatgtcaaattcttggactctgaaacacttgtttctgcttctactgataatacattgaagatctgggat

SEQ ID NO: 134987 - DNA, 261 bp, Glycine max
cttttccttttcccttccgttggtgccattcgtgcagcaccgagctctctcatttctccggcgataactctcccttttccggcgaattcaccgcttcctcgatatgaatcccgagtatgactatctgttcaagctccttctgattggagactctggtgttggtaaatcatgccttcttctaagatttgctgatgattcatacattgagagctacataagcaccatcggagttgattttaaaattcgcactgttgagcagga

SEQ ID NO: 134988 - DNA, 263 bp, Glycine max
caactacaagaaagaacttccttataaccaaaaccaacaacaactatggcaagttatcagaagcactacgatgatcagggtcgcaaggtcgacgagtatggcaatgtcaagaggcaaactgacgaatatggcaacccggttcatgccactagtgtcacttatgtagccaccaaaagtgttggtggctacaatgatgacgctaataagcaacatgatattactggtgtctatcccgagaaagacaccggtagacatcattttgg

SEQ ID NO: 134989 - DNA, 250 bp, Glycine max
agaaaacctaagcttagaattagaaacaaagaaaagaagaaaggaaagaattgatcgttgaaaatgcagggaggaaagaaagcgggagagtccattaaggaaacagctacaaacattggtgcttctgccaaggctggcatggagaagaccaaggccactgtccaagagaaggcagaaagaatgacagcacgtgatccggtgcaaaaggagttggcaacccaaaagaaagaggcaaagatgaaccaggcgg

SEQ ID NO: 134990 - DNA, 258 bp, Glycine max
ccagtgttgaagaggcctacaacaagctaatagttgaacttgagaaaagtgttcctacattggttggcattgaatgtcccaaggatgagaaacttcctcgtcgcaaaatttttgacaaacctaagacgcgctgcttcactattctccctatggagtttaatcttgtggttcgtcagaagtttttaaattttgtgaggttcattatgaagaaaagggacaagcttagttgtcaagttggaatcaacccatactccatgg

SEQ ID NO: 134991 - DNA, 256 bp, Glycine max
caactacaagaaagaacttccttataaccaaaaccaacaacaactatggcaagttatcagaagcactacgatgatcagggtcgcaaggtcgacgagtatggcaatgttgagaggcaaactgacgaatatggcaacccggttcatgccactagtgtcacttatgtagccaccaaaagtgttggtggctacaatgatgacgctaataagcaacatgatattactggtgtgtatcccgagaaagacaccggtagacatc

SEQ ID NO: 134992 - DNA, 257 bp, Glycine max
tgtaattgtagtagtagacagtagcaccatgagccaggaacagctcaagaaacctcaaggggagcaggaccccatcaaatacggcgacgttttcaaagtctccgacgaactcgctttcaaacccatcgcgccaagagacgcagctctcatgcaagccacggagaaccaagcattgggccaaactcaaaaaggaggtcccgcctcggtgatgcaatccgccgcaaccgaaaacctccgcgccggcgtcgtgggccgcc

SEQ ID NO: 134993 - DNA, 258 bp, Glycine max
ctcagttacacagtgatatattaaagtcagaattatttgcaaattatgtttcaatatggccaacaaagttccaaaataaaaccaatgggataacacctcgaagatggctccaattttgcaaccctgagctaggcgggataatcaccaagtggttaaaaactgataaatgggtaaccaatcttgacttgttaacaggtcttcgacagtttgctgacaatgaagatctgcaagcagaatggctgtctgcaaagatggcta

SEQ ID NO: 134994 - DNA, 257 bp, Glycine max
gagagacacaaaggatgttctggttgttactgccaaagggagcagtgcggagattataccctttctcaaaacgtgggtgaaccttcccatggccgttgggttcatgttgctgtacacaaagctagcgaatgttttgtcaaagcaagctcttttctactccgtgattcttccattcattgctttctttggggctttcgggtttgtgttgtaccctctcagcaactatattcaccctgaggcgtttgcggacaagcttc

SEQ ID NO: 134995 - DNA, 278 bp, Glycine max
tcggagttcggcacgcgcaactactaccttacaatcagaacgcagcaacaactcatcggcaagttatcaggagcactacgatgatcagggtcgcaaggttgacgagtatggcaacgttgagaagcaaaccgacgaatacggcaaccctgttcatgctgctagtgtcacctatgtagccaccagaactgctgctggtggttacagtgatgacattaataagcaacatgataccaccaatgcctacggcgtagacactggtagacagcattctagtggtg

SEQ ID NO: 134996 - DNA, 254 bp, Glycine max
aatttttgacaaacctaagacgcgctgcttcactattctccctatggagtttaatcttgtggtccgtcagaagtttttagattttgtgaggttcattatgaagaaaagggacaagcttagttgtcaagttggaatcaacccatactccatggaatggactggtttggccaatagattactgagtaagggcaacgatattctgtgttgcgattatgctagtcttgatggattgattaccaggcaagttatgagca

SEQ ID NO: 134997 - DNA, 263 bp, Glycine max
gagataccaacaagaaaagaaaaaaagaagagttgagattccctttgaagaaaagatggcatcccataggcaaagctatgaagctggtcaaactaagggccgaactgaggaaaagacgaaccagacgatgggcaatattggagagaaggctcaagctgcaaaggagaagacccaggaaatggcccaagctgcaaaggagaagacccaacaaacagcccaagctgccaaggacaagacttgcgacacttcccaagcggcaaagg

SEQ ID NO: 134998 - DNA, 255 bp, Glycine max
cggctcgagcggctcgagctgaagcatctagtacatggagcaaagcagcatcacaatgtgaaaaatgtatatgtatggcatgcactagctggttattggggtggagtgaagccagcagcaaccggcatggaacattatgacactgccttggcatatccagtgcagtcaccaggcgtgctaggaaaccaaccagacattgtcatggacagcttggctgtacatggccttggcctagtgcacccaaagaaggttttc

SEQ ID NO: 134999 - DNA, 254 bp, Glycine max
gtcgcattcgtctcctccagagattcaacaaacgctccccacaacttgagaactttcgagactaccggattgtccagtttcagtcaaaacccaacacaatccttctcccccaccatgctgacgccgatttcctcctctttgtccttagcgggagagccatacttaccttggtgaacaacgacgacagagactcctacaaccttcaccctggcgatgcccagagaatcccagctggaaccacttactatttggtt

SEQ ID NO: 135000 - DNA, 255 bp, Glycine max
gtgtgtgcaagcgtgtcatcagagtcaacaaatatgaatgagctactccaatggaatgacctctatggagaaggaggatcaagaaaaatgagatctctgagctatttcatgtaaagctctctctctgtatagcatttcttgcttaggctattcttatatcaccaactattgatgtggaaatcccatcattggttctgcctctctctattgtgatatatcatcataggttttctttcccctttttccaaccctcac

SEQ ID NO: 135001 - DNA, 255 bp, Glycine max
cgccgaagaaggttcatccaatccccgaagcccttcaccgcattgcaaccatgtcgaggagaaaggtcagagagccaaaggaagaaaacgtgattctgggcccagctgttagagatggtgaacatgtctttggcgtcgctcgcatctttgcctccttcaatgataccttcattcatgtcactgatttgtctgggagggaaacgcttgtccgcatcactggtggaatgaaggttaaggctgacagagatgaatcgt

SEQ ID NO: 135002 - DNA, 258 bp, Glycine max
atatgatatagaaagagagagaagaagaaaagaagaacaaagatgcaatcctcaaaggagaagatgaaaaacatggcaagtgctgccaaggaacaagtcgacatctataaagccaaaatagacgagaaggcagagaaagcaacggcaagaacagaagaggagagggtgatagcccatgagcacgcaaaggcaaaggaagctggagcaaagatggagctgcatgaagctaaagcaaggcatgcagcagagaagctaagc

SEQ ID NO: 135003 - DNA, 255 bp, Glycine max
aaaagaaaagaagaggaaaaggagagtggagaggaagaaaaggattgaagttgttgctgtgagaaagagaaagagtgaaatcggagtttgggaaggaattgcaatcaatggatgtgataaagacgcagcaaatctcatctcgaccaatcgagaaggtggtggttcaccctctcgtgcttctcagcatcgtcgacaactacaacagagtcgccaaagacactcgcaagcgcgtcgtcggcgtcttgctcggctcct

SEQ ID NO: 135004 - DNA, 250 bp, Glycine max
ctactacaagtacttccttacaatcaaaaccaacaacaactatggcaagttatcaaaagcactacgatgatcagggtcgcaaggttgacgagtatggcaacgttgagaagcaaaccgacgaatacggcgaccctgttcatgctgctagtgtcacctatgtagccaccagaactgctgctggtggttacagtgatgacattaataagcaacatgataccaccaatgcctacggcgtagacactggtagaca

SEQ ID NO: 135005 - DNA, 249 bp, Glycine max
tccgagtatcctccacttggtaggtttgctgttagggacatgcgtcaaactgttgctgtgggagtcatcaagaacgttgagaagaaggatcctaccggagccaaggtcaccaaggctgcccagaagaagaagtgaatcgtgcgggctggttcatcaggggatgttggttacaatagatgtaggtttcttttctgtactcttgtgtcttctgttctaggtagcttgatattcggacaaagtttgaagtct

SEQ ID NO: 135006 - DNA, 257 bp, Glycine max
gatcatactagtcaaataaccaaagaacacctagagcccaacttagaagggctcactgtagatgaggcaattcaaaacaagagattgttcctactagatcatcatgacccaatcatgccatatttgaggcgaataaatgcaacctccacaaaggcttatgctaccagaaccatccttttcctgaaaaatgacggaactttaaggccacttgccatagagttgagtttgccacatcctcagggagatcaatctggtgc

SEQ ID NO: 135007 - DNA, 251 bp, Glycine max
gccattctcatcctcctctgtctctctctctccaccattgccatggatccttacaagctccggccatccagcgccttcaattctcccttctggactacaaattctggtgctcctgtttggaacaacaactcctctttaaccgttggagctagaggtccaattctgcttgaggattatcatcttgtggagaagcttgcaaactttgacagggaacgtatcccagaacgtgttgtccatgccaggggagctag

SEQ ID NO: 135008 - DNA, 254 bp, Glycine max
cttagagaagatcctgaactccaagcctgctggaaagaactcgaagaggtgggtcatggagacaagaaaaatgagccatggtggcctaagatgcaaactcgtgaagagctagttgaagcttgcgctatcatcatatggactgcttcagcacttcatgcagctgttaattttggacagtatccctatggaggtttaatcttaaaccgtccaactcttagtaggcgattcatgcctgagaaaggttctgctgagta

SEQ ID NO: 135009 - DNA, 249 bp, Glycine max
cctaattcggagggtttcagttttcgccctcttttctcatctccaacatcttcgacgtcacggaggctagtcttcctgttatcacaaacaatgtctgacggtcaagaatcagacaagaatattgagatatggaagatcaagaaattgataaaggcattggaagctgctcgaggtaatggtaccagcatgatttctctgataatgcctccacgtgatcaaatatctcgggtcactaagatgttgggagat

SEQ ID NO: 135010 - DNA, 254 bp, Glycine max
gtaaagctaacttcaacacctttaattttctaaaagtaattcagcggctgaataccaagcggagaagatgagtcaggagcagccacggcgtcccaaaggccaaaaccccatcaaatacggcgacgtttttgtcgtctccggcgaccttgcacagaagcccgtcgcaccggaagatgctgccatgatgcaaagcgcggaaactcgagtgctcggacaaacccaacccggcggacagcttccgtcatgcaatctgc

SEQ ID NO: 135011 - DNA, 254 bp, Glycine max
caaagtataattgcaaaaagatggttttctcatcatctgcaaccgtttatggccaacctgaaaagataccgtgtgaggaggatttcaagttacaagctatgaatccctatggacggaccaagcttttcctggaagaaattgcccgagatattcagaaagctgaaccagaatggaagatcatattactgagatacttcaatccagttggggctcatgaaagtggcaaactcggtgaagatcccaagggcatccca

SEQ ID NO: 135012 - DNA, 258 bp, Glycine max
gttcggcaccagcgaaacgctcttcgttatcttttctcagactccgcggcgtagatccgaggagttcgggaaatcctaactcatcatctcaactcaagtcatggctggacttgcacctgagggatcacagttcgatgctcgtcaatatgattctaaaatgagtgacttactttcatctgatggacaggacttcttcacatcctatgacgaggtttatgatagttttgacgctatgggtttgcaggaaaatcttctcag

SEQ ID NO: 135013 - DNA, 257 bp, Glycine max
agaacaaaaaaaaaaacgtgattcgctcttctcttcgaataaaccacaaaaccaacaactgagaagaggagtgagagaagatggggttgtcgttcacgaagctgttcagcaggttgtttgcgaagaaggaaatgaggattctgatggtaggtctcgatgctgctggtaagacaaccatcttgtacaagctcaagcttggagaaatcgtcaccaccatccccaccatcggatttaatgttgagactgtggagtacaag

SEQ ID NO: 135014 - DNA, 253 bp, Glycine max
tgctgctcagaaaagcaaagaggcttctgaatatgctagtgatgcggctcagaggaccaaagagtatgctggtgatgccaccaagagaagcaaagaggcttctgatcatgccaatgacatggctcggaagaccaaagactacgccagtgacactgctcagagaaccaaggaaaaactccaagacattgcatctgaggctggtcaatacagtacagagaaggccagagaaatgaaggatgcagcagcagagaag

SEQ ID NO: 135015 - DNA, 253 bp, Glycine max
cttgctctatactacacagtacacacactagaagaataatggcttccatcctccactactttttagccctctctctttcttgctcttttcttttcttcttatccgactcagtcacccctacaaaaccaataaaccttgttgttctacccgttcataatgattgttccacagggctccattgggtcaacctccaaagaagaacccctctaatgcaagtaccagtcctggtggacctcaatggaaatcacttgtg

SEQ ID NO: 135016 - DNA, 253 bp, Glycine max
gagggaaggggcttgtggccggaaaaaccacggcagcgaacaaggacaaagacaaggataagaagaggcccgtctctcgttcatcccgtgctgggatccagtttcctgtgggacgtatccacaggcagttgaagcaaagggtgcaagcaaatggacgtgtgggggcgactgctgctgtgtacttggcctccattctggaatatctgactgctgaggtgctggagctggcagggaatgctagcaaagatcttaa

SEQ ID NO: 135017 - DNA, 250 bp, Glycine max
accgcacgaatatcttgttgtttggagcgatccgagaaaaactctgtaaacatgttggtttaccaggacctccttacaggtgatgagcttctctctgactccttccgttacaaggaaattgagaatggaatgctgtgggaagttgaggggaagtgggttgttaaaggagcagttgatgtagacattggtgcaaacccttctgctgagggtggaggagaagatgagggagttgatgatgcagctgttaagg

SEQ ID NO: 135018 - DNA, 252 bp, Glycine max
gaaaacctaagcttagaattagaaacaaagaaaagaagaaaggaaagaattgatcgttgaaaatgcagggaggaaagaaagcgggagagtccattaaggaaacagctacaaacattggtgcttctgccaaggctggcatggagaagaccaaggccactgtccaagagaaggcagaaagaatgacagcacgtgatccggtgcaaaaggagttggcaacccaaaagaaagaggcaaagatgaaccaggcggact

SEQ ID NO: 135019 - DNA, 255 bp, Glycine max
cttctatatatgaagataacaatcagctgaatgttgacaatgcacaacgtgcactagtctcattattgctccggaaaatggggaagattgccctccaaatagatgttattcagatgggaatagtcttcaacagttttgggaatattatggcgcagattagtcaggatgactgccaacactatgcacacgtgatcttgttgcctctatataaagtttgtgaaggatttgcgggaaaagttgttactgataatgtca

SEQ ID NO: 135020 - DNA, 260 bp, Glycine max
ctcatgtgctttcacgcaaaaatggtgagaaaggcaaaaggagatttgtctctggggatggtgaagagatgacattgattccgggaaccagtgttgaagaggcttacaacaagctaatagttgaacttgagaaaagtgttcctacattggttggcattgaatgtcccaaggatgagaaacttcctcgccgcaaaatttttgacaaacctaagacgcgctgcttcactattctccctatggagtttaatcttgtggtccgt

SEQ ID NO: 135021 - DNA, 267 bp, Glycine max
caactacaagaaagaacttccttataaccaaaaccaacaacaactatggcaagttatcagaagcactacgatgatcagggtcgcaaggtcgacgagtatggcaatgttgagaggcaaactgacgaatatggcaacccggttcatgccactagtgtcacttatgtagccaccaaaagtgttggtggctacaatgatgacgctaataagcaacatgatattactggtgtctatcccgagaaagacaccggtagacatcattttggtcgt

SEQ ID NO: 135022 - DNA, 258 bp, Glycine max
caaaccttgctctatactacacagtacacacactagaagaataatggcttccatcctccactactttttagccctctctctttcttgctcttttcttttcttcttatccgactcagtcacccctacaaaaccaataaaccttgttgttgtacgcgttcaaaatgatggttccacagggctccattgggccaacctccaaaaaagaacccctctaatgcaagtaccagtcctggtggacctcaatggaaatcacttgtg

SEQ ID NO: 135023 - DNA, 249 bp, Glycine max
cttggttggttcaggaagaatggcccctctgaagaggaggtggaaagtgcttccttcaagatgtggtttgttggacatggttatagtgatgggagcattgcttcacagggaaacacaaaacctgacatggagattgtaacaagggttatgggacctgaagttggatatctgaccacaccaataattcttattcagtgtgctcttgttcttctctgccaacgtgacaaccttccaaaaggaggagtttac

SEQ ID NO: 135024 - DNA, 249 bp, Glycine max
atcgagcttcagcaatggtgtacgtcaaggctcagaaatcaaaagcctacttcaagagatatcaagtcaagttcaagagaagaagagagggaaaaaccgattaccgtgccaggattcggttgattaatcaggacaagaacaaatataacactccgaaataccgatttgtggttcgctttagcaacaaggacattgttgcacaaataatatctgctagcattgccggcgatttagttcttgctacagcat

SEQ ID NO: 135025 - DNA, 249 bp, Glycine max
ctctttcttaagttctcagaaaccttaaaaacaacaacgtaggagtgttcggaaaagatggctaagcaggaagtggtggaagggttcaagttcgagcagaggcacgggaaagaacgcgtgagagtggcgcgcgtgtggaagacgaggcaggggcagcacttcattgtggagtggcgcgtggggatcactctcttttcggattgcgtcaactcgtacctccgcgatgacaactctgacatcgttgctact

SEQ ID NO: 135026 - DNA, 251 bp, Glycine max
catttattagataaaaggtcaacacaggctctgcctgttgctttgatgattcatgataactcgtcggatcgcacggcctttgtgccggcgacgcatcattcaaatttctgccctatcaactttcgatggtaggatagtggcctaccatggtggtgacgggtgacggagaattagggttcgattccggagagggagcctgagaaacggctaccacatccaaggaaggcagcaggcgcgcaaattacccaatc

SEQ ID NO: 135027 - DNA, 251 bp, Glycine max; identical to SEQ ID NO: 134010

SEQ ID NO: 135028 - DNA, 251 bp, Glycine max
caaaattcaacaatgtttttgtgaagaatctatcagaatcaaccaccgatgatgagttgaagaacacttttggtgaatttggaactattactagtgctgtagtaatgagggatggggatgggaaatcaaagtgttttggatttgtgaattttgagaatgctgatgatgctgctagggctgttgaggctctcaatggcaaaaattttgatgacaaagaatggtatgttggaaaagctcagaagaaatctgaa

SEQ ID NO: 135029 - DNA, 254 bp, Glycine max
gagaaacaaagaaaggaaataattgatctttgaaaatgcagggaggaaagaaagctggagagtccatcaaggaaacagctgcaaacattggtgcttctgccaaggctggcatggagaaaaccaaggccactgtccaggagaaggcagaaagaatgacggcacgtgatccgatgcaaaaggagttggcaacccagaagaaagaggcaaagatgagccaggcagagctggacaagcaggcggcgcgtcagcataac

SEQ ID NO: 135030 - DNA, 260 bp, Glycine max
caggcgcgcaaattacccaatcctgacacggggaggtagtgacaataaataacaataccgggctcattgagtctggtaattggaatgagtacaatctaaatcccttaacgaggatccattggagggcaagtctggtgccagcagccgcggtaattccagctccaatagcgtatatttaagttgtagaagttaaaaagctcgtagttggaccttgggttgggtcgatcggtccgcctccggtgtgcaccggtcggtcgtcc

SEQ ID NO: 135031 - DNA, 257 bp, Glycine max
cttcatttgagctttgaagaatcaatatttggaggacagagggagatcgaagtttcctgttttcagacatgtaatatgtgtgatggtacaggagctaaatcaaagaattgcattaaacaatgcaacaattgtggtggcagagggggagaaatgaaaactcagagaacaccctttggaatgatgtctcaggtttctacctgctctaagtgtggtggccttggcaaaataatcaccgatcaatgtcgaaggtgtatggc

SEQ ID NO: 135032 - DNA, 259 bp, Glycine max
gtcgtcgttagggtcttcttcggatcggtggaacttgaccctgccggcgtgaattccgacgctactcgtggcgccgaattgctatagcggtgacgaatatgaaggttttcgttaagactctcaatggcactcacttcgaaatcgaagtgacgccgcaagacacggtttctgaagtgaaaaaaaatatagaaactgttcaggctgcagatgtctatcctgctgcacagcaaatgctaattcatcaagggaaagtcttagg

SEQ ID NO: 135033 - DNA, 259 bp, Glycine max
cacgcagttctccgatctcaccgaggacgagtttgagaagctctacactggcgtcaatggcggcttcccgtcatcgaataatgccgccggcggtattgcgccgccgttggaggtggacgggctgccggagaattttgattggagagagaaaggagctgtcaccgaagttaagttacagggtagatgtggatcatgctgggctttcagcaccacaggatctatagaaggagccaattttcttgccaccggaaagtcgtca

SEQ ID NO: 135034 - DNA, 247 bp, Glycine max
atcagtgggaatgctagagcgttgagaaggttgaggacagcgtgtgagagagcaaagagaacactctcttctaccgcgcagacaactattgaaatcgattctttatatcaagggattgatttctatgctacaatcacgagggcgaggtttgaggaaatgaacatggatttgttcaggaagtgcatggagccggtggagatatgtttgcgtgatgccaagatagacaagagtcatgttcatgggttgt

SEQ ID NO: 135035 - DNA, 254 bp, Glycine max
ctttgcacaagccactcatgcgcgacaagactgtgctggtaacggcggacgttacatcggcacccacaccgttcttcagctcttgctcggaggttgcagaaccgtcgtcgtcgacaatctcgacaattcctccgaggtttctatccaccgagtcagggagcttgccggcgaatttgggaacaacctctcctttcacaaggtggacctacgggacagggatgcactagagcaaatttttgtttccacacatttga

SEQ ID NO: 135036 - DNA, 245 bp, Glycine max
agaggactctgtctagttaaaatagttattgtgcttttgttttatcagacagttgtaaggcactgtgttctacatgttcttgcagttgtctgcatgcattgttattttcaaagtccgctttatcaagctgacaagtcaaataaattattccctctctcctagtagtgggggaatagatttgttcctgtatctgatcgaggtttttataatcgtcataatataataacaatttacgttcatttgtt

SEQ ID NO: 135037 - DNA, 253 bp, Glycine max
aaattttccagtggattcttggttaccaatttttgtgaattgtctttatcctgtaagtcaattacctccagaagctgtcgttgtaaatgttacatgtggtagtggacgtggtggtttacccaccactgcttggattagttctgcagttaacaatcgctcctcagatatcaacaaaaagattcgcacagcacttgggaaaggtaagaaaattgtttttcttactagagttgatccttttccagtagcttactgg

SEQ ID NO: 135038 - DNA, 256 bp, Glycine max
gttttctgcgccgtctccgatctccgacaatggcgacccaaatgagcaagaagagaaagttcgtagctgatggagtgttcttcgctgaactgaacgaggttctgacaagagagttggacgaggacggttactccggcgtggaagttagggttacgccgatgcgcacggggatcataattagagtcaccagatcccaggctgtactcggtgagaagggaaggagaataagggaacttacctctgtggttcagagagt

SEQ ID NO: 135039 - DNA, 245 bp, Glycine max
agaacaaaaaaaaaaacgtgattcgctcttctcttcgaataaaccacaaaaccaacaaacgagaagaggagtgagagaagatggggttgtcgttcacgaagctgttcagcaggttgtttgcgaagaaggaaatgaggattctgatggcaggtctcgatgctgctggtaagacaaccatctagtacaagctcaagcttggagaaatcgtcaccaccatccccaccatcggatttaatgttgacact

SEQ ID NO: 135040 - DNA, 250 bp, Glycine max
ctcgagccgctcgagccgattcggctcgagcacaactacaagaaagaacttccttataaccaacaccaacaccaactatggcaagttatcagaagcacaacgatgatcagggtcgcaaggtcgacgagtatggcaatgttgagaggcaaactgacgaatatggcaacccggttcatgccactagtgtcacttatgtagccaccaaaagtgttggtggctacaatgatgacgctaataagcaacatgatat

SEQ ID NO: 135041 - DNA, 253 bp, Glycine max
cggctcgagcttctgttaaagctgcaaaagttgtttttgatgccaatactggccgttcaaagggctatggtttcgtcaggtttggagatgacaatcagagaacccaggccatgactcagatgaatggtgtttactgttctagcaggcctatgcgtattggagctgcaactccaaggaaatcatctggccatcaacaaggtgggcagtcaaatggcacagccaaccaatctgaagcagattctacaaacaaact

SEQ ID NO: 135042 - DNA, 253 bp, Glycine max
ctcatttgaatacattccttgtagtttatactgaaagatgggtttgaagatggcgttactgatcctaggcctttcccacatgctccttttggtctcctctgaggtggcatccacgaatacaaaagaggacgcaaatggagtggatgatggcaaatatcccggtggaagctatggagggggttacccaggtcatggcggtggcggttatcctggccatggcggtggcggttatcctggccatggcggtggtgtg

SEQ ID NO: 135043 - DNA, 250 bp, Glycine max
gcgggagagtccattaaggaaacagctacaaacattggtgcttctgccaaggctggcatggagaagaccaaggccactgtccaagagaaggcagaaagaatgacagcacgtgatccggtgcaaaaggagttggcaacccaaaagaaagaggcaaagatgaaccaggcggagctggacaagcaggcggcgcgtcagcataacacggcggccaaacagtccgccaccacggctgggcacatgggacatgcca

SEQ ID NO: 135044 - DNA, 251 bp, Glycine max
ttagaaacaaagaaaagaagaaaggaaagaattgatcgttgaaaatgcagggaggaaagaaagcgggagagtccattaaggaaacagctacaaacattggtgcttctgccaaggctggcatggagaagaccaaggccactgtccaagagaaggcagaaagaatgacagcacgtgatccggtgcaaaaggagttggcaacccaaaagaaagaggcaaagatgaaccaggcggagctggacaagcaggggcgc

SEQ ID NO: 135045 - DNA, 252 bp, Glycine max
agggtcctagttggcatgactcaacacttcatgaaaagctattctgatcttctcatcaggacgtgccacaggcgcggcgtgcatgctatgggaggaatggcagcgcagattccaatcaaagaagatccagtggctaacgaggtagcactggaacttgtaaggaaggacaagcttagagaagtgaaggcagggcacgatggaacttgggctgcgcaccctggtctcattccagcctgcatggagatttcaaca

SEQ ID NO: 135046 - DNA, 88 bp, Glycine max
gtctgatataatatattagcaactacgtagtcgaggttggaatattttgcactgaatatcctcatgttttcttcaagtttagttcaaa

SEQ ID NO: 135047 - DNA, 255 bp, Glycine max
gaactacatccgggagacccagccagcctcggagaacctcgccgccgccgcgaacatcacctcgccgaggcggcggagtacgtggggcagaagacgaaggaagtggggcagaagaccaaggaggttgggcaggatattcagagcaaggcacaggatacaagggaggcagctgcaagggatgcaagggaggcagctgcaagggatgcaagggaagctgctgcaagggatgcaaaggtggaggcaagggattaaaga

SEQ ID NO: 135048 - DNA, 255 bp, Glycine max
cttttatcttcccaagatggagcattcaagggaagctaagatttggaacaatgtgtttcagaaagctgagaaggtagcaggcatccaaagaggaagcataagggcaactgttctgatagaaacacttcctgcagtgtttcaaatgaatgaaattttgtatgaactgaaggaccattcagtgggtttgaactgtgggcgttgggattacattttcagttatgttaagaccttccaagctcatccagatcgctctta

SEQ ID NO: 135049 - DNA, 249 bp, Glycine max
ggaattagcagacaagatagtgcaaatgagtcaacagaagtttgactccaatgttgtggatcaatgtttgacctttggaggtccttctgaacgccaattactagtgagtcagatgcttggcaccacagatgaaaacgaacctcttcaggcgatgatgaaagatcaatttgcaaattacgttgtacaaaaggtgctggaaacttgtgatgatcaacagcgcgagtgattctatcccgaattaaggtcatt

SEQ ID NO: 135050 - DNA, 252 bp, Glycine max
gaaggaaggagcaagggagggcaaacaaggaaggaacagctgggtacagaagggtaccaggaaatgggacgcaaatgagggttgagcactgtggacaaatcaggagaagaacgtgctcaagaggaaggcattggcatcgatgagtccaagttcaggactggtaataacaagaaccagaatcagaacgaagaccaggataagtgataatgtaacacccttcactagcatgtgtagtgtgttcttatgctgctt

SEQ ID NO: 135051 - DNA, 248 bp, Glycine max
attcattttaatcctaattctgcacttcttgatcattcgatttttctcctcaagatgcagatattcgtaaaaactttgaccggcaagaccatcacccttgaggtggaatcctccgacaccattgacaacgtaaaagctaagattcaagacaaggaagggatcccacctgaccagcagagacttatctttgcgggtaaacaacttgaggatggtcgcacccttgccgattacaacatccaaaaggatca

SEQ ID NO: 135052 - DNA, 247 bp, Glycine max
ctcgagccgggaaagttgattggttgactgacaagatgagaagccgtgaccacacagtctcagcaacccacggagacatggaccagaataccagggacattattatgcgtgaattccgttctgggtcttcccgtgtcttgataaccactgatcttttggctcgtggtattgatgtgcaacaagtgtctctagtcataaactttgatctccctacacagcctgagaactatctccaccgtattggtcg

SEQ ID NO: 135053 - DNA, 251 bp, Glycine max
cgaaacccttcttccattaccggcgaacgaagtcggtggcagaaaaggaacaacctcgattcccaaatcgtaaaatccgatgacgaccgctgcaagacccacatgggcacctgctaaaggtggcaatgaacaaggcggtactcgaattttcggtccctcacaaaagtactcttctagggacatcgcatcgcacacccctctcaagcccaggaaggaagggcaggacactcaggatgaattaaagagaaaaa

SEQ ID NO: 135054 - DNA, 255 bp, Glycine max
ctgtaattgtagtagtagacagtaggactatgagccaggaacagctcaagaaacctcaacgtgagcatagccaccatcacatactgcggcgttttcacagtctccgacgaactcgctttcaaacccatcgcgcgaatagacgcagctctcatggcagccacggagatccaggcattgggccaaactcactaaggaggtctcgcctcggtgatgcaatctgccgcaatcgaaaacctccgcgccggcgtcgtggcc

SEQ ID NO: 135055 - DNA, 251 bp, Glycine max
actttgttatggaatatgctaaaggtggagagttgtttaagaaggtggccaaaggaaagctcaaagaagaagttgcacacaagtattttaggcagctagtgagtgcagtggatttttgtcacagtcgaggtgtataccatagagatataaagccagagaacattctgttggatgaaaatgagaatttgaaggtctcggatttcgggttaagtgcgttggccgagtccaaacggcaagatggcttgtgcaca

SEQ ID NO: 135056 - DNA, 248 bp, Glycine max
gtttcactcttcctctgcgctctaaccctatccgctgctcacggaagcaccacggttcaagacatcgcgagccagttgaaactcggggacaacgagcttctgcgcacggagaagaagttcaaggttttcatggagaattacgggaggagctactccacagaggaggagtatttgcgccgtttggggattttcgcccagaacatggtcagagcggcggagcatcaggcgctggaccccaccgccgtcac

SEQ ID NO: 135057 - DNA, 249 bp, Glycine max
gacaagatctccatatctgttcccaaaagcttgtttgtaagaatggcttccggtgaacagaaattccctcctcaacaacaacaaacacagcctgggaaggagcatgctatgactccagtaccccaattcactagccctgactacaagccttcaaataaacttcaagggaagattgcattagtcactgggggtgattctgggattggacgagcggtgtgtaacttgtttgccttagaaggtgctacgtgg

SEQ ID NO: 135058 - DNA, 248 bp, Glycine max
ggaaataattgatctttgaaaatgcagggaggaaagaaagctggagagtccatcaaggaaacagctgcaaacattggtgcttctgccaaggctggcatggagaaaaccaaggccactgtccaggagaaggcagaaagaatgacggcacgtgatccgatgcaaaaggagttggcaacccagaagaaagaggcaaagatgagccaggcagagctggacaagcaggcggcgcgtcagcataacacgcggcg

SEQ ID NO: 135059 - DNA, 249 bp, Glycine max
ggcacagctatgccaccaaatccaaccaacacagggtcgtcaaaacccctggtgggaagctcgtttatcagaccaccaagaagagggccagctggcccaagtgccccgtcactggcaagaggattcaggggattccacacttgaggcctgcagagtacaagagatcaaggttacccagaaaccgtaggactgtcaaccgtgcatatggcggagttttgtctggaagtgctgtcagggagaggatatccg

SEQ ID NO: 135060 - DNA, 247 bp, Glycine max
  unsure (1)..(247): unsure at all n locations
cacaactactacaagtacttccttacaatcaaaaccattaatnactatcggcaagttatcaaaagcactacgatgatcagggtcgcaatgttgacgagtatggcaacgttgagaagcaaaccgacgaatacggcaaccctgttcatgctgctagtgtcacctatgtagccaccagaactgctgctggtggttacagtgatgacattaataagcaacatgataccaccaatgcctacggcgtaacact

SEQ ID NO: 135061 - DNA, 248 bp, Glycine max
cgacaaggagggtatccccccggaccagcaacgtctcatcttcgccggaaagcagctcgaggacggccgcaccctcgccgactacaacatccagaaggaatcaacccttcacctcgtcctccgtctccgtggtggcatgcagatcttcgttaagaccctcaccggcaagactattaccctagaagtcgaaagctccgacaccatcgacaacgtcaaggctaagattcaggacaaggagggaacccccc

SEQ ID NO: 135062 - DNA, 250 bp, Glycine max
cacacacaactactacaagtacttccttacaatcaaaaccaacaacaactatggcaagttatcaaaagcactacgatgatcagggtcgcaaggttgacgagtatggcaacgttgagaagcaaaccgacgaatacggcaaccctgttcatgctgctagtgtcacctatgtagccaccagaactgctgctggtggttacagtgatgacattaataagcaacatgataccaccaatgcctacggcgtagcact

SEQ ID NO: 135063 - DNA, 204 bp, Glycine max
tttggacagcgtgacggcggggaacgcggtgaaccggaaaaaggcgatgaacgcggcgatggctgcgctgaagagcgcgggggtggagggggtgatgatggacgtgtggtggggtttggtggagagagagaagcctggggagtataattggggagggtacgtggtactcatggaaatggcgaagaagcatggcctcatggtgca

SEQ ID NO: 135064 - DNA, 247 bp, Glycine max
cgccgaagaaggttcatccaatccccgaagcccttcaccgcattgcaaccatgtcgaggagaaaggtcagagagccaaaggaagaaaacgtgactctgggcccagctgttagagatggtgaacatgtctttggcgtcgctcgcatctttgcctccttcaatgataccttcattcatgtcactgatttgtctgggagggaaacgcttgtccgcatcactggtggaatgaaggttaaggctgacagaga

SEQ ID NO: 135065 - DNA, 245 bp, Glycine max
atccctttccctctctactcttcactttccatttccatttttttctggttttctttctccatggcctccggcgccgccgtcgccgccgaagacgacgctgtcaacggcttcactcggtcggagatgtactcggaaaacctcgccggcactgtcgacgcctacgaccgacacgtgttcctctgctacaagagctacgtgtcctggccggcacgcatcgaggcatccgacgccgatcccttcccaag

SEQ ID NO: 135066 - DNA, 246 bp, Glycine max
gtcccacaattcctcttttcttgtgcaccttccttccttgttcaaaagggtcttcctagaaacactcaaggtgtggctgggttaggccatgcaccaatttctcttccaaaccaactcgcttcccactttggcctacaacgccaattcaccacttgcctttctcgctaccctacttcaaagggtgctataatattcggggatgcacctaacaacatgcgacagtttcaaaaccaagatatttccacg

SEQ ID NO: 135067 - DNA, 246 bp, Glycine max
ctgctcgagcggctcgagcggctcgagcggctcgagcggctcgagcggctcgagagatgatcagaggcttcttcgtttacgagtttatgaaccgtggaagtctagaaaatcatctattcagaagaactgtacctcttccgtggtccaacaggattaagattgcccttggtgcagcaaaaggattggccttcctccataatggtcccgaaccagtcatttatagagattttaaaacatctacatctt

SEQ ID NO: 135068 - DNA, 249 bp, Glycine max
tgagaggcaaagcggttgttggtgttggttccagaatgataaggtgcatggctaaccccagaagagttcaaatggtggccaagcaaattaggagagagctttctcatatgcttctcaccgataaagtcttgcagtatgctgttcttcccgaagcctccttaggagccgaccgttacctctcttctctcaccaccatcaccgacgtccaagtctccgccgacttgcaggttgttaaggtgtatgttctgt

SEQ ID NO: 135069 - DNA, 249 bp, Glycine max
cttagagaagatcctgaactccaagcctgctggaaagaactcgtagaggtgggtcatggagacaagaaaaatgagccatggtggcctaagatgcaaactcgtgaagagctagttgaagcttgcgctatcatcatatggactgcttcagcacttcatgcagctgttaattttggacagtatccctatggaggtttaatcttaaaccgtccaactcttagtaggcgattcatgcctgagaaaggttctctg

SEQ ID NO: 135070 - DNA, 245 bp, Glycine max
atcggaacgtgcggaagacacgtgtggtcgacctggtcctcgactgtgtcatcccttacatcgacgaccccaaggaccgcgacgccgtctcacaggtctgccgacgctggtacgaactcgactccctcactcggtagcacgtcaccatcgcgctctgctacaccaccacgccgtcgagcctccgccgccgcttcccgcaccttgagtcgctcaagctcaacggcaagccccgatcagcaatgtca

SEQ ID NO: 135071 - DNA, 271 bp, Glycine max
aatgcaagttcagcattcggctcgatgcggattcatcttcggtcattgtattttgtataataaaagaaagataataaagagaataatcatattaaatattaaatagaaaaaatggcccgatcatttatcaaaggccaatcttcggtagaagagaaggttcctttggaacacttatttctatttcagtataccgggtctctttctttcatttcaaaaaatttatagaatttcgattttgaaatgaaagaaaagtgtggggataaataaaatg

SEQ ID NO: 135072 - DNA, 231 bp, Glycine max
caaagagatgcagaacttttgttcatgtggcaactgtatcagagatcaaaccatcagtcagaaaataagacagacatcctcaaacaaattgcggagacagtgaagcataggaaacacatagatggtagcgtggaattgattggagttttactgtatggaccaggaaaaggttcttctgttctacaatccgtgagggctcctggttcgtcccttgttgatgactggacatgc

SEQ ID NO: 135073 - DNA, 241 bp, Glycine max
ccaaacttgttcggtggtagacgaagcaacgtcttcgacccattctctctggacgtatgggaccctttcgaggggtttcctttttccacaggtcacgtgccttcctctggtggggaaagcagtgccatagccaacactcgcgtggactggaaggagactccggcggctcacgtgttcaacgttgatcttcccgggttgaagaaggaggaagtgaaggttgaagttgaagatgggaggtgct

SEQ ID NO: 135074 - DNA, 243 bp, Glycine max
gaaatggctgaagcacaactacgagaccagcatggcaaccctgtcccactcaccgatcaatacggtaatccggttatcttaactgacgagcgcggtaatcccgtccaactcactggtgtcgctaccaccgctaccggcacagcaggttctgggtttgggtcctatggtaccggtgcttacggtggtggtgcaagtgcaaccaccgttgcagatcttttggcaacccaaccaaggagtgcaggg

SEQ ID NO: 135075 - DNA, 227 bp, Glycine max
caacaactactacaagtacttccttacaatcaaaaccaacaacaactatggcaagttatcaaaagcactacgatgatcagggtcgcaaggttgacgagtatggcaacgttgagaagcaaaccgacgaatacggcaaccctgttcatgctgctagtgtcacctatgtagccaccagaactgctactggtggttacagtgagtgcttcaataagcacatgataccacca

SEQ ID NO: 135076 - DNA, 225 bp, Glycine max
atacaacaagaaaagaaaaaaagaagagttgagattccctttgaagaaaagatggcatcccataggcaaagctatgaagctggtcaaactaagggccgaactgaggaaaagacgaaccagacgatgggcaatattggagagaaggctcaagctgcaaaggagaagacccaggaaatggcccaagctgcaaaggagaagacccaacaaacagcccaagctgccaag

SEQ ID NO: 135077 - DNA, 218 bp, Glycine max
ccatttctcacctgacatgtgcagatttccttcgagcccctggagttcagacgcctgtaattgttcgtttctcaactgtgattcatgcgcgtgggagccctgaaaccttgacggaccatcgaggatgtgcagtgaagttttacaccagagagggtaactttgaccttgttggaaacaaccttcccgtcttctctgtacgtgacggcatgaaatttcca

SEQ ID NO: 135078 - DNA, 219 bp, Glycine max
gtggctataatgatgacaccaatagacatcatggaactaccggtgtctatggtatagacaccgataggcaacaacatgggactactggtggctatgccggtgacactggtaggcaacatgggaacatcggtggcccttactatggaaccaataccgcagacaccggtactggtcccagaagtggaaccacgggcatcaccggttatggaggcactggtg

SEQ ID NO: 135079 - DNA, 223 bp, Glycine max
tcagatcgcgggctgccggagaatctcgattggagagagaaaggagctgtcaccgaagttaagttacagggtagatgtggatcatgctgggctttcagcaccacaggatctatagaaggagccaattttcttgccaccggaaagcctttcagtcttagtgaacaacagctccttgactgtgacaacaagtgtgacataacagaaaagacttcatgtgacaatg

SEQ ID NO: 135080 - DNA, 111 bp, Glycine max
cacaggatatacgggactctatatctcatcttcggtgccaattgtggagtgatgggcacatgcttctccgtattgattcgtatggaattagcacgacccggcgatcaaatt

SEQ ID NO: 135081 - DNA, 222 bp, Glycine max
agaccgagctagctagctagcaagcaagcacagagatggaggcatagcgaggccatgtcctcatgtgcttggcacgtgtgtcactcttcctctgcgctctaaccctatccgctgctcacggaagcaccacggttcaagacatcgcgagaaagttgaaactcggggacaacgagcttctgcgcacggagaagaagttcaaggttttcatggagaattacggga

SEQ ID NO: 135082 - DNA, 215 bp, Glycine max
acccggtggccttttccctctctttctctggaaaattcccccgattttctcgagaaagtgaaacgcaattatgagctttcaggacatctcggctgggcggcccttcagttcgaggcgcgggttgatgaacgggtagcaagacccgacgcaagcggtggctgccggaatattccagatcaacaccgccgtctccaccttccagagactcgtcaaca

SEQ ID NO: 135083 - DNA, 220 bp, Glycine max
agagctaacttcaacacctttaattttctaaaagtaattcagcggctgaataccaagcggagaagatgagtcaggagcagccacggcgtcccaaaggccaaaaccccatcaaatacggcgacgtttttgtcgtctccggcgaccttgcacagaagcccgtcgcaccggaagatgctgccatgatgcaaagcgcggaaactcgagtgctcggacaaaccca

SEQ ID NO: 135084 - DNA, 202 bp, Glycine max
atatgtttgcgaggactttcattgagccctctcagaaaattagggactttggtgtgaagctgaagctatcgcccgttcgtgccgtgcttgaaggtaaacgtgttgtggttgtggatgattccattgtgagaggaaccacgtcgtccaagattgttaggctgctgaaggaggccggtgctaaggaggttcacatgaggattgc

SEQ ID NO: 135085 - DNA, 221 bp, Glycine max
aaaaacctaagcttagaattagaaacaaagaaaagaagaaaggaaagaattgatcgttgaaaatgcagggaggaaagaaagcgggagagtccattaaggaaacagctacaaacattggtgcttctgccaaggctggcatggagaagaccaaggccactgtccaagagaaggcagaaagaatgacagcacgtgatccggtgcaaaaggagttggcaacccaa

SEQ ID NO: 135086 - DNA, 225 bp, Glycine max
cagtgatgctgcacagaatgtcaaagattatgcaagtgatgcagtgcagaagagaaaagagtattctggtgatgcttctcacaagagcaaagaggcttctgattatgccagtgagacggctaagaagaccaaagattatgtcggtgatgctgctcagagaagcaaaggggctgctgaatatgaaagtgatgcggctcagaggaccaaagagtatgctggtgatgc

SEQ ID NO: 135087 - DNA, 221 bp, Glycine max
tactacaagtacttccttacaatcaaaaccaacaacaactatggcaagttatcaaaagcactacgatgatcagggtcgcaaggttgacgagtatggcaacgttgagaagcaaaccgacgaatacggcaaccctgttcatgctgctagtgtcacctatgtagccaccagaactgctgctggtggttacagtgatgacattaataagcaacatgataccacca

SEQ ID NO: 135088 - DNA, 218 bp, Glycine max
ggaaaagcttgggtaggcctggtggtattgctgtgtttgattgtcacggccatcgccgaacaatgcggtcgtcaagctggcgggcagacatgtcccaacaacctatgctgcagccagtacggttggtgtggaaacaccgaagaatactgttccccttctaagaactgccagagcaactgctggggaggcggcggcggtggcggtggcggcggcggcgg

SEQ ID NO: 135089 - DNA, 223 bp, Glycine max
agcaatcctctacaggtttcaaaatgttgaaatcgggcatgggaattgaggagagatagcaagtgaagaagccagcacaagccagctcgagaaaagggtgtatgagagggaaaggaggtcccgagaatgctagttgcacctacaaaggtgtgaggcagagaacatggggaaaatgggttgctgaaatccgtgaacccaatcgaggtgctaggctctggctcgg

SEQ ID NO: 135090 - DNA, 221 bp, Glycine max
gaatttcatcatccaacatcacacacaactactacaagtacttccttacaatcaaaaccaacaacaactatggcaagttatcaaaagcactaccttgatcagggtcgcaaggttgacgagtatggcaacgttgagaagcaaaccgacgaatacggcaaccctgttcatgctgctagtgtcacctatgtagccaccagaactgctgctggtggttacagtga

SEQ ID NO: 135091 - DNA, 221 bp, Glycine max
cgacaaaattgaactgtaattgtagtagtagacagtagcaccatgagccaggaacagctcaagaaacctcaaggggagcaggaccccatcaaatacggcgacgttttcaaagtctccgacgaactcgctttcaaacccatcgcgccaagagacgcagctctcatgcaagccacggagaaccaagcattgggccaaactcaaaaaggaggtcccgcctcggt

SEQ ID NO: 135092 - DNA, 221 bp, Glycine max
ggaattgcttgagaaggatctaggatgggcagcatggaaggtgcacgtggctgttgcgaaccaaaacgacaaagcggtgagacaaaagctcaaagagtggttgaagcttcctgtggtgtaccaacttggtgtgcactttgatccttgtactgtgaccatgtcgagttccccgaggttcaacatgtatgggaatgaatttgggatggggaaagcggttgcag

SEQ ID NO: 135093 - DNA, 78 bp, Glycine max
atgtcatttaatccaaacccgtgttctgatgcatggagtttggaatttttgaagcgtaccggatttcattgtgatatc

SEQ ID NO: 135094 - DNA, 221 bp, Glycine max
cgagaaaacagtaaagctaacttcaacacctttaattttctaaaagtaattcagcggctgaataccaagcggagaagatgagtcaggagcagccacggcgtcccaaaggccaaaaccccatcaaatacggcgacgtttttgtcgtctccggcgaccttgcacagaagcccgtcgcaccggaagatgctgccatgatgcaaagcgcggaaactcgagtgctc

SEQ ID NO: 135095 - DNA, 218 bp, Glycine max
cagagataacttgacaaataaaatcaccatgtctatcatcccaaacttgttcggtggtagacgaagcaacgtcttcgacccattctctctggacgtatgggaccctttcgaggggtttcctttttccacaggtcacgtgccttcctctggtggggaaagcagtgccatagccaacactcgcgtggactggaaggagactccggcggctcacgtgttca

SEQ ID NO: 135096 - DNA, 197 bp, Glycine max
cacatctgttaaaagataacgcaggtgtcctaagatgagctcaacgagaacagaaatctcgtgtggaacaaaagggtaaaagctcgtttgattctgatttccagtacgaatacgaaccgtgaaagcgtggcctatcgatcctttagtccttcggaatttgaagctagaggtgtcagaaaagttaccacagggataac

SEQ ID NO: 135097 - DNA, 217 bp, Glycine max
agatcaccattactgatggtattgacaaaactagtgcaactttgcaatttagaaagttagcagattgtgattttcttaagagaaactttaagcagatgtctaatgttttgtgggtggctcctgaggacaaggcaagtttatggtcacaacttcattatgtttcgtgtaataatctggaaatgcaagaagcttatcttgtcaatctcgtaaatgtgtt

SEQ ID NO: 135098 - DNA, 216 bp, Glycine max
ggagaaacaaagaaaggaaataattgatctttgaaaatgcagggaggaaagaaagctggagagtccatcaaggaaacagctgcaaacattggtgcttctgccaaggctggcatggagaaaaccaaggccactgtccaggagaaggcagaaagaatgacggcacgtgatccgatgcaaaaggagttggcaacccagaagaaagaggcaaagatgagc

SEQ ID NO: 135099 - DNA, 219 bp, Glycine max
gggactgttattgttggggatgattgtgcactacctccacctcgagggattgcgggaagaagaggtttggcagggactattctggttcacaaggttgcaggagctgctgctgctggtggtctttctcttgctgatgttgctgctgaagcaaaacatgcatctgaaatagtgggaacaatgggtgttgctttgactgtgtgctcaattcctggtcaagtt

SEQ ID NO: 135100 - DNA, 253 bp, Glycine max
atcaaaaccaacaacaactatggcaagttatcaaaagcactacgatgatcagggtcgcaaggttgacgagtatggcaacgttgagaagcaaaccgacgaatacggcaaccctgttcatgctgctagtgtcacctatgtagccaccagaactgctgctggtggttacagtgatgacattaataagcaacatgataccaccaatgcctacggcgtagacactggtagacagcattctagtggtggctacgatggt

SEQ ID NO: 135101 - DNA, 266 bp, Glycine max
caaaaccaaaacagtaaagctaacttcaacacctttaattttctaaaagtaattcagcggctgaataccaagcggagaagatgagtcaggagcagccacggcgtcccaaaggccaaaaccccatcaaatacggcgacgtttttgtcgtctccggcgaccttgcacagaagcccgtcgcaccggaagatgctgccatgatgcaaagcgcggaaactcgagtgctcggacaaacccaacccggcggagcagcttccgtcatgcaatct

SEQ ID NO: 135102 - DNA, 266 bp, Glycine max
accaaaactaatgttgtcaatatggttgacattgcaaaggcattggcaaggcctgcgtcttacacgaccaagtattttggttgtgaacttggggcccagtcgaaatttgatgagaagaccggaacttctcacgtcaatggagcacatgatactactaagcttgctggccttcttgagaacttcattaagaaatatgtccagcgttatggttgtggaaatcctgaaactgagatcataatcactaagaaccaaatgatccagctgaa

SEQ ID NO: 135103 - DNA, 235 bp, Glycine max
ctcggctgacgcttgtgctggcgcttgcgttgttggacgcggtgctacgactcttagttagctagggccggcaatgctcgtggctggtgcttggtcattatcggctgctacctggttgctcctgcgagtggtcatatgctattctcaaagattaagccatgcatgtgtcagtttgaactagttcagattgagcaactgcgtatgggtcattatgtcagttattgtttgcttgatg

SEQ ID NO: 135104 - DNA, 247 bp, Glycine max
ggaccgctacagctcataatacccgtgcgggtggaaccgccacgtattccaccaccggggaatatggtcagcccatgggggcccaccagacgtcggcaatgcctggccatggaaccgggcagcccacgggccatgtcaccgaaggagtggtgggctcacatcccattggaaccaacagagggccgggtgggaccgttagggctaaaaatccccgggggggtaacccgccgaatgattgtgggtactg

SEQ ID NO: 135105 - DNA, 267 bp, Glycine max
cctacacgcagggtttcccgaagatttaacacctatggctcctaaagctgatagtttaaagaaggctgatccaaaggcacaagccttgaaaactgctaaggcagttaagtcaggtgctactttaaagaaaaagaccaagaagatccgaacatctgttaccttccatcgaccaaagaccttgaaagaggataggaacctaaatacccacgcattagtgctccacccaggaacaagcttgatcactatcagatattgaagtatcctctc

SEQ ID NO: 135106 - DNA, 265 bp, Glycine max
cacacaactactacaagtacttccttacaatcacaaccagcaacaactatggcaagttatcacaagcactacgatgatcagggtcgcaaagttgacgagtatggcaacgttgagaagcaaaccgacggatacggcaaccctgttcatgctggtaatgtcacctatgtagacaacagaagttgttctggaggttacagtgatgacattgataagcaacatgataccacgcaatgggtacggcgtagacactggtagacagcattct

SEQ ID NO: 135107 - DNA, 263 bp, Glycine max
gaacacctaagcttagaattagaaacaaagaaaagcagaaaggaaagaattgatcgttgaaaatgcagggacgaaagaaagcgggagagtccattaaggtaacagctacaaacattggtgcttctgccaaggctggcatggagaagaccaaggccactgtccaagagaaggcagaaagaatgacagcacgtgatccggtgcaaaaggagttggcaacccaaaagaaagaggcaaagatgatccaggcggagctggacaagcag

SEQ ID NO: 135108 - DNA, 263 bp, Glycine max
ggaagtcggcaaaatggatccgtaacctcgggaaaaggattggctctgagggctgggcacgggggtcccagtcccgaacccgtcggctgtcggtggactgctcgagctgcttccgcggcgatagcgggtcgtcgcgtgccggtcgggggacggattgggaacgggcccttcggggcctcttccccgggcgtcgaacagtcaactcagaactggtacggacaaggggaatccgactgtttaattaatacaaagcattgcgatgg

SEQ ID NO: 135109 - DNA, 260 bp, Glycine max
gccctgtagattcgttcccatggttcgatccttcccagtacaacgcggcgtgttcgaattctgatcgcttttacgcgacaaagggggacgaccctctaagcctaagtattcctcaatgaccgatagcgtacaagtaccgtgagggaaaggtgaaaagaaccctatttagggagtgcaatagagaacctgagatccgatgcgaacaatcagtcgaaggagcttagagcctttacttgatatttagtacagcgcactcactc

SEQ ID NO: 135110 - DNA, 258 bp, Glycine max
gttgaacttcgtgacgagcatgggaacccagttgcactgacagatgcatatgggaatccggtttggttaacggacgaggtaggcaacccggtgcacctcacggctgtggcaaccagtgcacacaaatctatgcttcagaatgacaccccacaagagcttcctcactaccaagagttcaagctcgtctcgaggatgaagggcatggagagatgatcagggacggactgaaggatgacatcgaagaggagttacgagctg

SEQ ID NO: 135111 - DNA, 260 bp, Glycine max
agcggcagaagaagacgccgcctccatggtgaagtactccagagaatccgagaatctcaacaagtcatgagatgccacatgcgctgacctcagactgcggtacaagaacactaggcagactgcctttgccatcaggacgttgcccctggataaaagcgtagatagcatacctggaaagatgctttggctcattaacaggccatcccattccgaacgttctgtggtggtgttgggaggcgaactaatctaacagcagacac

SEQ ID NO: 135112 - DNA, 175 bp, Glycine max
agtcacccctacaaaatctgtaaacctcgttgtactacccgtacaatatggtagatccacagggcgccattggcggaacctccaatcaagatgcccactaatgcaagtctgagtcctgcgaggacctgcactggatgtcacttctgggtcaactgcgagtagcagtactcatcca

SEQ ID NO: 135113 - DNA, 279 bp, Glycine max
gctcagaattgggctcgcggaaagatttcgggagctttaggattactggaatgagtctcaaggtaaccttagacttggtcctcctgctccagacgggtggatttctgagtttagtcaacaaagggagagatatgagagttccgatacatgggctaactcatctgagctggagtattgtgcaagtggttgggtgtctgggtttgtgcattcctaattgtcatcgctagatctcgtgtgatggatgaacatgtctaagtatgctgcaagggagcaatgtcg

SEQ ID NO: 135114 - DNA, 262 bp, Glycine max
ggaaatgaggattctgatggtaggtctcgatgctgctggtaagacaaccatcttgtacaagctcaagcttggagaaatcgtcaccactatccccaccatcggattcaatgttgagactgtggagtacaagaccatcagcttcactgtgtgggatgttggtggtcaggacaagatccgtccactgtggaagcattatttccagaacactcagggtctcattttactggttgatagctatgatagagatcgagtagttgaggca

SEQ ID NO: 135115 - DNA, 265 bp, Glycine max
tcggttgcagaccgagctaactagctagcaagcaaacacagagctggacacttatcgaggacatgcgctcatgtacatggtacgtgtcacactcaaccttaacgctctaatcctaactgctgctcaccgtatcaccactgttcatgacatcgccaaaaagttcactctccaggacaacgatcttctgatgcacggagtagaagttcaaagttttcatccagaattactcgcagaactactgcacagtgccggagtcttttcgccg

SEQ ID NO: 135116 - DNA, 259 bp, Glycine max
cgcatattacgtcatcaactattccatggcaaactgggtttgattctctggggggtacacgggctcaatctcagtatgccatggcatattacgtcatcaactattccacgctacgtatttgggagtttgtggagtacagcaagatgatatacctagacggtgatatccacgtttttgacaacattgaccacttgtttgacttgcctgataactacttctatgcggtgatggactgtctctgtgagccaacttggggcca

SEQ ID NO: 135117 - DNA, 258 bp, Glycine max
gcgatagctgataagagagataccaacaagacaagaaaaatagaagagttgagattccctttgaagaaaagatggcatcccataggcaaagctatgaagctggtcaaactaagggccgaactgaggaaaagacgaaccagacgatgggcaatattggagagaaggctcaagctgcaaaggagaagacccaggaaatggcccaagctgcaaaggagaagacccaacaaacagcccaagctgccaaggacaagacttgcg

SEQ ID NO: 135118 - DNA, 260 bp, Glycine max
agacaatttgaggaacaagagtgaactgcttctcaaatccaacccagttcacaagaaggttccagtgtttattcacaatgagaagcccatagcagagtctcttgtgattgttgaatacattgatgagacatggaagaacaaccccatcttgccttctgatccttaccaaagagccttggctcgtttctggtatcaattcattgatgataaggtaattcaacttttcttctttccttgtgttgttcttatttgtcccctaa

SEQ ID NO: 135119 - DNA, 265 bp, Glycine max
cacaactactacaagtacttccttacaatcaaaaccaacaacaactatggcaagttatcataagcactacgatgatcagggtcgcaaagttgacgagtatggcaacgttgagaagcaaaccgacgaatacggcaaccctgttcatgctgctagtgtcacctatgtagccaccagaactgctgctggtggatacagtgatgacattaataagccaccatgttacgaaccaatgcctaagggcgtaaacactggtagacagcattct

SEQ ID NO: 135120 - DNA, 245 bp, Glycine max
gctctgaatactgctcgcgcgctcgtgacgctaatcatcgtcatggaactaatggttgctaaagtgcatacaccaataatcatcgttgatctattcgaagtctatggtaacgactacgataggcaacaccatgggactactggtggctatgccggtgacactggtaggccacatgggaacatcggtggcccttactatggaaccaacaccgcagacaccggtactggtcccagaagtggaaccac

SEQ ID NO: 135121 - DNA, 261 bp, Glycine max
attggatcacacttatacaaaattctccaattagtaacttgttgagagttgctgcttggaagaaaggctgtttaatggttaagattgtgatgtctgggaatgcagcagtcaaaaggagtgattgggcctcattggtacaagtgtttttaacaaacagcaacagtacagagcattttgatgcatgtaagtggacaaaatcggaaccacattcctgggaattgatcttcccaatagaggtatgtggtcctaatactggttttg

SEQ ID NO: 135122 - DNA, 266 bp, Glycine max
cgcacacaactactacaagtacttccttactatcaaaaccaacaacgtctatggcaagttatcaaaagcactacgatgatcagggtcgcaaggttgacgagtatggccacgttgagaaccaaagcgacgaatacggcaaccctgtacatgctgatagtgacagctatgtagacaccagaactgctgctggtagatactgtgatgacatttataagcaacatgataccaccagtgcctacggtgtacacactggtagacaacattct

SEQ ID NO: 135123 - DNA, 262 bp, Glycine max
gagaaggtgaagaccgagaaaaggaaaccagtggcagttcctgccaataacagaactagagcaagcaacggcaatggacgtccaatgccaccagccaaagctgggcgtttgactaatgcgtatgtatcatctttccctgctgctcctacatttgtcaggtctccatcacacgggcaatacccagctgctcttccaacatacccttccccaccccacatgtacggcagcagaagtcccccagcaaatccttatgctgcttatt

SEQ ID NO: 135124 - DNA, 259 bp, Glycine max
attcacccaatttgcagagttccaagttatatacatacactgcataattaagagaaaatgtctctgattccaagtttcttcggtggccgaaggagcagtgttttcgaccctttctccctcgatgtgtgggagccctttaaggattttccatttcccagttctctttctgctgaaaattcagcctttgtgagcacacgagtggattggaaggagacaccagaagcacacgtgttcaaggctgatattccagggctgaaga

SEQ ID NO: 135125 - DNA, 260 bp, Glycine max
gccagctagcgcttcttctctcgcattccgtggagatctagtgctgccaaacctcgctgaaaattaaggtttcgtttcggaggtagacgacgatgttcggaagggcaccgaagacaagcgacagcaccaggtactacgagatcctcggcgtatcgaagaacgcttcgccggatgagttaaagaaggcttacaagaaagccgccattaagaaccaccctgacaaaggcggtgatcctgagacgttcagagagcttgctcaa

SEQ ID NO: 135126 - DNA, 259 bp, Glycine max
cacaactactacaagtacttccttacaatcaaaaccaacaacaactatggcaagttatcaaaagcactacgatgatcagggtcgcaaggttgacgagtatggcaacgttgagaagcaaaccgacgaatacggcaaccctgttcatgctgctagtgtcacctatgtagccaccagaactgctgctggtggttacagtgatgacattaataagcaacatgataccaccaatgcctacggcgtagacactggtagacagcat

SEQ ID NO: 135127 - DNA, 263 bp, Glycine max
tgctcgagccgaatcggctcgagcacaatgccaatgcttgggaggccgaagatgaagttgttctgatcacatgccgccttcagaatccaaatttggatttggtcggtgggactgccaaggaaaagcttgaaaatttctcaaatgagctgtatgagatgagatttaacatgaaaacgggtgaagcttctcaaaagatactatcagcatctgctgtagattttcctagggtgaatgagagctacactggaaggcagcagcgatat

SEQ ID NO: 135128 - DNA, 260 bp, Glycine max
cttaagttcgagatccttcttgataagctctcttatagtcttttagggtcttcctctgcctcgaattgtatgccttctctccatctggtctactctcctcactacagagtctaccggtcttctctctacatgcccaaaccacctaagtctattttccaccatcttctctacaataggcgctactccaaccctctctctaatagcttcgtcactaattttatcctgtcgagtcttaccacacatccaccgcaacatcctca

SEQ ID NO: 135129 - DNA, 282 bp, Glycine max
gctcagacttcggctcgagctactaccagtacttccttacaatcaataccaacaacaactatggctagctatcaatagcactacgatgatcaaggtcgcaaggttgacgagcatggcaacgttgagaagcaaaccgacgaatacggcaaccctgtccatgctgctagtgtcacctaagtagccaccagaactgctgctggtggttacagtgatgacattaataagctacatgataccaccaatgcctacggcgtagacactggtagacagcattctagtggt

SEQ ID NO: 135130 - DNA, 262 bp, Glycine max
gctaggtcgtgtgctggggcacggaagcttcgccaatgtctaccacgcgcggaacctgaagacgggacagcacgtggctattgaaggtcggtggaaaagaacaggtgatcaacgtcggaataatggagcatgtcgagacggagatctcagtcatgaagatggtcaagcacgcaaacagcgtcgagctccacgaagtcatggccagtaagtccaagatctacatctccatcgaactcgtccgcggcggagagctcttcagcaa

SEQ ID NO: 135131 - DNA, 259 bp, Glycine max
atgccaagtacgcgcccgtctacttcgagacgtactaggtcgacggcaacatgaatgctgagccgccggacgtcgtcgattcgattcggactatcaaggtctgtctcaatggatgactcgttagccccataggcggtggcgtcagctgccacaatgttcagactctggaaagagcttgatctctatgcttctctggttagttgtctcaatctccctggcttacccacgcgacatgataatgaggatatcgttgtcatca

SEQ ID NO: 135132 - DNA, 272 bp, Glycine max
ttcggctcgacgaagcgtgtggttgtcaacgaactcgaatgtaagtttctataagacatcttggcacgtccatgattcagcagatgcagcatgcttgcaatgaatgcaacggtactggagactccatcagctacacatgtcgatacgcacagtgcactggataaaacgatgtgctacatggaaaagtccttggcgttattgtaggcaatggcatgccgaagcgtctgtggattacattccctggcgaactaagtcaagcgccagacacaatt

SEQ ID NO: 135133 - DNA, 263 bp, Glycine max
ctgacatacaagtttctcaacaccataattgatgacctttttgcctttgtcattaaaatgccaacactccatcggctttctgtcttccgtgatgatcttatctttgtcatatacttataccagaggtggatttataaagtggacaagaaacgtgttaatgaatttggttttggaggcgaggatgatcaggttgtggcagagacagacgccacaaaggaagatgagaacactacaacggaagaagagaagaacactaattgatt

SEQ ID NO: 135134 - DNA, 263 bp, Glycine max
tcgcaaaagcaaataactattaccaacaaactctactttcggcaaccttcaatttttttgaaagtcatggatttcagagtgatgggtttggagcctccgttgttccacacgctgcaacacatgatggacatgtcagaggacgctgcaggggaaaacaagacgtacagtgctccgacacggtcagacgttcgagacgccaaagcaatggctgcaacacctgcggatgtgaaggaatatcccaactcctacgtgttcgagatcga

SEQ ID NO: 135135 - DNA, 260 bp, Glycine max
cgaaaacctaagcttagaattagaaacaaagaaaagaagaaaggctagagttgatcgttgaaaatgcagggatgaaagaaatcgggagagtccattaaggagacagctacaaacattggtgcttctgccagggctggcatggcgaagaccaaggccactgtccaagagaaggcagaaagaatgacagcacgtgatccggtgcaaaaggagttggcaacccaaaagaaagaggctaagatgaaccaggcggagctggacaa

SEQ ID NO: 135136 - DNA, 261 bp, Glycine max
acctttaattttctaaaagtaattcagcggctgaataccaagcggagaagatgagtcaggagcagccacggcgtcccaaaggccaaacccccatcaaatacggcgacgtttttgtcgtctccggcgaccttgcacagaagcccgtcgcaccggaagatgctgccatgatgcaaagcgcggaaactcgagtgctcggacaaacccaacccggcggagcagcttccgtcatgcaatctgccgccaccaggtatgaacaggctg

SEQ ID NO: 135137 - DNA, 259 bp, Glycine max
gtccgctatgctattattcaggcggcaaaggctgttgctgatgtagtccgaactacattgggacctaggtctatgctatcaatgcttcttgatgctcatggaggaattgtggttaccaatgattggtatgccatcgtacgtgatacatacctcgcgcatcctgctgcaaagtctatgactgaggctagtcgcacataagattaagaagtcggcgtttgaacgacatctgtcatcatacttgctggtgagatgctcatgt

SEQ ID NO: 135138 - DNA, 257 bp, Glycine max
cggccatatatgccataggcatcattctcggaaagggtggcatatttgctagagcatgaggtgctgtcagcgtactaattgcggcagagggcgcatcggccacgttccaattaccttctatggtggtccgtttgatatcgaaaaactgctcggcaacagtctgacagctgggatatgtccgagtaaccagctcgatttgggtagagccggatctagatgttggctagttcaacgtcctgtagtaagaggtgtagtta

SEQ ID NO: 135139 - DNA, 256 bp, Glycine max
cgttctgcccctatcaatctttctgatcgtctcaatcaggtgcttcggtgggccttaggttcaattgagatctttcttagcaggcattgtcccttgtggtatggctacaatgggaagttgaagcctctgatgatgttttcttatatcaacaccattgtctacccatttacctcaatcccattgattgcttactgtacgcttcctgcattctgtcttctcacaaataaatttattattcctcagataagcaactttg

SEQ ID NO: 135140 - DNA, 234 bp, Glycine max
tagaagagacttcatgtgacacttgttgtcacagtcaaggagctgttgttcactaagactgtcataacagaaaagacttcatgtgacaatgggtgtaatggatgtcttatgacgaatgcctacaattatttgctcgagtctggtgggctggacgaggagtcttcatatgcctacacttgggtgagatgtgaatgctaatttgatctggagtgtatagcagttgagatccaaatt

SEQ ID NO: 135141 - DNA, 237 bp, Glycine max
gttgtttggagcgatccgagaaaaactctgtaaacatgttggtttaccaggacctccttacaggtgatgagcttctctctgactccttccgttacaaggaaattgagaatggaatgctgtgggaagttgaggggaagtgggttgttaaaggagcagttgatgtagacattggtgcaaacccttctgctgagggtggaggagaagatgagggagttgatgatgcagctgttaggttgt

SEQ ID NO: 135142 - DNA, 238 bp, Glycine max
cacaactactacaagtacttccttacaatcaaaaccaacaacaactatggcaagttatcaaaagcactacgatgatcagggtcgcaaggttgacgagtatggcaacgttgagaagcaaaccgacgaatacggcaaccctgttcatgctgctagtgtcacctatgtagccaccagaactgctgctggtggttaacgtgatgacattaataagcaacatgataccaccaatgcctacggc

SEQ ID NO: 135143 - DNA, 240 bp, Glycine max
gcgacgcagcagatcgcggagtgttggacgcgcgcggtgaggaagctgctggagagagtggtggagtcggtggagagaaaaacgttggagaaggcggcgagggagtgtcacgcggtggagcggatctggaagttgttaacggaggttgaggacgtgcacgtgatgatggatccggaggatttcttgaggttgaagaaggagttggggatgatgagaaattgcggggaaatggtgcgtttt

SEQ ID NO: 135144 - DNA, 238 bp, Glycine max
cacacacaactactacaagtacttccttacaatcaaaaccaacaacaactatggcaagttatcaaaagcactacgatgatcagggtcgcaaggttgacgagtatggcaacgttgagaagcaaaccgacgaatacggcaaccctgttcatgctgctagtgtcacctatgtagccaccagaactgctgctggtggttacagtgatgacattaataagctacatgataccaccatgcctac

SEQ ID NO: 135145 - DNA, 237 bp, Glycine max
aaaaacatagataatttctttgctgagaatgaacaacttgcattttgccctgccattgtggttcctggtgtatactactcagatgataagatgcttcagaccaggatattctcttatgctgattcacaaaggcacagacttggaccatactatctgcaacttcctgctaatgctcccaagtgtgctcaccacaataatcatcatgaaggtttcatgaatttcattcacaggatgagg

SEQ ID NO: 135146 - DNA, 234 bp, Glycine max
ctaattcagactgtgaaactgcgaatggctcattaaatcagttatatgactgtatgatagtatctactactcggataaccgtagtaattctagagctaatacgtgcaacaaaccccgacttctggaagggatgcatttattagataaaaggtcaacacaggctctgcctgatgctttgatgattcatgataactcgtcggatcgcacggactttgtgccggcgacgcacattca

SEQ ID NO: 135147 - DNA, 236 bp, Glycine max
caagtacttccttacaatcaaaaccaacaacaactatggcaagttatcaaaagcactacgatgatcagggtcgcaaggttgacgagtatggcaacgttgagaagcaaaccgacgaatacggcaaccctgttcatgctgctagtgtcacctatgtagccaccagaactgctgctggtggttacagtgatgacattaataagcaacatgataccaccaatgcctacggcgtagacact

SEQ ID NO: 135148 - DNA, 237 bp, Glycine max
caagtacttccttacaatcaaaaccaacaacaactatggcaagttatcaaaagcactacgatgatcagggtcgcaaggttgacgagtatggcaacgttgagaagcaaaccgacgaatacggcaaccctgttcatgctgctagtgtcacctatgtagccaccagaactgctgctggtggttacagtgatgacattaataagcaacatgataccaccaatgcctacggcgtagcactgg

SEQ ID NO: 135149 - DNA, 238 bp, Glycine max
cgtctttgaagtttctaagatgacttctccctacattaaatgtacagtctctttcttcatagcatttggaaatttggctgatgacaccatcaattttgaggcttttccccataagctggtgcagtttggagagattcaggaaaaagttgtattgaaattttcacaagaggaatttcttacagcttggtcaactcaggtgcgtcctgcaacaactctgttggctgatgggtgccatatt

SEQ ID NO: 135150 - DNA, 237 bp, Glycine max
gctgaagatgctggaacaaagcttgaggcagcaaagagcgtttcatcaaatggggatgatggaacaggaggcttggaggccccagagagggttgccagaacgatctgtcaacattttgagagcctggcttttcgagcatttccttcatccgtacccaagcgatgcagataagcatctgttggcacgacagactgggctatcgagaaatcaggtatcaaactggttcattatgcgagg

SEQ ID NO: 135151 - DNA, 238 bp, Glycine max
aactcagtgaaagagatccgaggcgaagagaagagaaaaattaagatggaggggaaggagcaggatgtgtcgctgggagcgaacaagttcccggagagacagccgattgggacggcgtcgcgagccaagacgacggcaaggactaccaggagccggcgccggcgccactggttgacccgacggagtttacgtcatggtccttttacagagcagggatagcagagtttgtggcactttt

SEQ ID NO: 135152 - DNA, 236 bp, Glycine max
tgcagaccgagctagctagctagcaagcaagcacagagatggaggcaaagcgaggccatgccctcatgtgcttggcacgtgtttcactcttcctctgcgctctaaacctatccgctgctcacggaagcaccacggttcaagacatcgcgagacagttgaaactcggggacaacgagcttctgcgcacggagaagaacttcaaggtcttcatggagaattacgggaggagtactcca

SEQ ID NO: 135153 - DNA, 227 bp, Glycine max
aaaaaaatagtaaaaatttattttgtaaactgatttattttatattgtagtgatcatagacaagtttggttggtgtacatgggacgcgttttacttgaaggtgcatccctcaggtgtgtgggaaggggtgaaagggttggtggagggagggtgccctccagggatggtcctaatcgacgacgggtggcaagccatttgtcacgacgaggaccccataacgaccaaga

SEQ ID NO: 135154 - DNA, 237 bp, Glycine max
ggagaagtatcacatctggagcaggagaatagcgttcgcagcgtttgcgttcgctctgatgttccaatcggcctcagcagacgacgtcgttgtgctcatagaagataacttcgagaaggaagttggtcaggacagaggagctctcgttgagttctatgctccttggtgtggacactgcaaaaagcttgctccagaatatgaaaagcttggtagcagcttcaagaaagccaaactgtt

SEQ ID NO: 135155 - DNA, 236 bp, Glycine max
cacacaactactacaagtacttccttacaatcaaaaccaacaacaactatggcaagttatcaaaagcactacgatgatcagggtcgcaaggttgacgagtatggcaacgttgagaagcaaaccgacgaatacggcaaccctgttcatgctgctagtgtcacctatgtagccaccagaactgctgctggtggttacagtgatgacattaataagcaacatgataccaccatgcctac

SEQ ID NO: 135156 - DNA, 234 bp, Glycine max
gttgacgcaatgtgatttctgcccagtgctctgaatgtcaaagtgaagaaattcaaccaagcgcgggtaaacggcgggagtaactatgactcttaaggtagccaaatgcctcgtcatctaattagtgacgcgcatgaatggattaacgagattcccactgtccctgtctactatccagcgaaaccacagccaagggaacgggcttggcggaatcagcggggaaagaaaccctgt

SEQ ID NO: 135157 - DNA, 234 bp, Glycine max
ctaattcagactgtgaaactgcgaatggctcattaaatcagttatagtttgtttgatggtatctactactcggataaccgtagtaattctagagctaatacgtgcaacaaaccccgacttctggaagggatgcatttattagataaaaggtcaacacaggctctgcctgttgctttgatgattcatgataactcgtcggatcgcacggcctttgtgccggcgacgcacattcaa

SEQ ID NO: 135158 - DNA, 234 bp, Glycine max
  unsure (1)..(234): unsure at all n locations
agaaaacctaagcttagaattagaaacaaagaaaagaagaaaggaaagaattgatcngagaaaatgcagggaggaaagaaagcgggagagtccattaaggaaacagctacaaacattggtgcttctgccaaggctggcatggagaagaccaaggccactgtccaagagaaggcagaaagaatgacagcacgtgatccggtgcaaaaggagttggcaacccaaaagaaagagcaa

SEQ ID NO: 135159 - DNA, 235 bp, Glycine max
aaatattcgtcattctacgcgatgtaccgtgtatgtaccaaaatattttggtacttaagtcttttaaaaagttttcatctcctctttggttgtccttagttccgatagttatctcctaagaatacaatcatatgtactgtacgcagtgtgaagatatagtattgtatgctgcttaatatgatcgtctaattaggctgactagctgtaatataagatatttccaggttgtaaaaac

SEQ ID NO: 135160 - DNA, 242 bp, Glycine max
aagcaaagaaaggggtggtggctgcttcgaaagcttaataatttgcatatttccagaacatcatagttttcgcagcagcaaactaacaaattactcatatcatataataagatggcccgttctctctcgcaagccaaacgtattggtgtccttgttgctcaatctatctccctaattcccgttcatcggcgaggttacgcagtggcatccgatgtatcggtaagagttggattggcaatatt

SEQ ID NO: 135161 - DNA, 228 bp, Glycine max
atccaacgggcaatccagatgcaccgtgacgtgaacgatccgaacgtggtgaagtaccacgagatgtacgatcagaacagcgaaatccaggtgctgctggagttcatggacggagggtcactggaggggaaacacatcccgcaggagcagcagctggcagatctgtctcggcagattctgcgggggctggcgtacctacaccggcggcacatcgtgcacagggacatc

SEQ ID NO: 135162 - DNA, 235 bp, Glycine max
ctcgagccgaatcggctcgaggcagattaaaagggatggaattaccaagcttgttattcttccactttatccacaattttcaatatcaaccagtggctcaagcctacgtctactggagagtatattccgagaggatgagtatctagtcaacatgcagcacacagtaataccatcatggtatcaacgtgaaggatacataaaggccatggcaaatttgattgagaaagagttgaga

SEQ ID NO: 135163 - DNA, 224 bp, Glycine max
ggattttactgcttcttggtgcggtccatgccgtttcattgccccaattcttgcagagtttgctaaaaagttgccgaatgtcaccttcctcaacgtggatgtgtgatgaattggagactgttgtctcaaggagtggggaattgaggctatgccaaccttcctgttcttgaaagaaggcaagctcgtggacaaggttgtgggtgccaagtaagagcagctgctaa

SEQ ID NO: 135164 - DNA, 235 bp, Glycine max
gaaagtggagaagagaagatggagaaaatagagcacaaaacggtgaggccgaatggaatagacatgcacgtggcatccattgggtcaggcccagttgtactgttcctccacggcttcccggagctttggtacacgtggcgccaccagcttctgtccctctgcgccgtgggctaccgggccatcgcccccgacctccgcggctacggcgacaccgacgccccgcccgacgttcctc

SEQ ID NO: 135165 - DNA, 232 bp, Glycine max
cttgagatgatacaatcagagatgaaacacttaaggaaatgtctaccgactatggtacaatctcttcttgcaaagttatgcgagaaccgactggaatcagcagtggatcacgattagttgcagtatcaactcctgaggtagcaactcgagctattggtgcgatggatggtaaaatgcttgctggagaacctctgtatgttgcccttgcacatagaacagttgagagaagaca

SEQ ID NO: 135166 - DNA, 235 bp, Glycine max
gcttagaattagaaacaaagaaaagaagaaaggaaagaattgatcgttgaaaatgcagggaggaaagaaagcgggagagtccattaaggaaacagctacaaacattggtgcttctgccaaggctggcatggagaagaccaaggccactgtccaagagaaggcagaaagaatgacagcacgtgatccggtgcaaaaggagttggcaacccaaaagaaagaggcaaagataaccagg

SEQ ID NO: 135167 - DNA, 233 bp, Glycine max
cttccttataaccaaaaccaacaacaactatggcaagttatcagaagcactacgatgatcagggtcgcaaggtcgacgagtatggcaatgttgagaggcaaactgacgaatatggcaacccggttcatgccactagtgtcacttatgtagccaccaaaagtgttggtggctacaatgatgacgctaataagcaacatgatattactggtgtctatcccgagaaagacacggta

SEQ ID NO: 135168 - DNA, 236 bp, Glycine max
cgtctttgaagtttctaagatgacttctccctacattaaatgtacagtctctatcttcatagcatttggaaatttggctgatgacaccatcaattttgaggcttttccccataagctggtgcagtttggtaagattcaggaaaaagttgtattgaaattttcacaagaggaatttcttacagcttggtcaactcaggtgcgtcctgcaacaactctgttggctgatgggtgccata

SEQ ID NO: 135169 - DNA, 232 bp, Glycine max
aatttttaccctcgtgatcctgcttcccataccatcgatatttcttctgttgcatacaactcactattccttggagacttcatgcaacctgactgggacatgtttcatagtttacacccagcagcagattatcatgctgcagcacgtgcaattggtggatgtcctattgatgttagtgacaagccaggcaatcacaattttgatcttcgtaagaagctggttctcccggatg

SEQ ID NO: 135170 - DNA, 241 bp, Glycine max
tccaagagaagtaaacaaccctcacattcaccacagcagcacacacagacaaagacaaccttgtttgtctccaatcaaaacctttcaagctggcgttcgaaaaccaagacaaccctgtccgagaaatcaagcccaagaataggagaatcatgggtgctggaggccctgatgatgaggacaacaacaggtggccaccgtggctgaagcctctgctaaaagaaagtttctttgttcatgcaag

SEQ ID NO: 135171 - DNA, 236 bp, Glycine max
ctctctttctcttcgagggtttgggattctcttcctcccttggagaaaaagaagagccaccgatgcgacgcagatcgtgcatttttgaggtgcagctgtcatgtttcggcgtggtggaccaaggaggaatgataactccaaatattatgatattctcgggatttccaaaaatgccagtgaagatgaaatcaagaaggactatagaaaggcggatatgaagaaccgtcaagaaaggg

SEQ ID NO: 135172 - DNA, 238 bp, Glycine max
gttgtttggagcgatccgagaaaaactctgtaaacatgttggtttaccaggacctccttacaggtgatgagcttctctctgactccttccgttacaaggaaattgagaatggaatgctgtgggaagttgatgggaagtgggttgttaaaggagcagttgatgtagacattggtgcaaacccttctgctgagggtggaggagaagatgagggagttgatgatgcagctgttaggttgtt

SEQ ID NO: 135173 - DNA, 248 bp, Glycine max
tcggctctcgcacaactactacaagtacttccttacaatcaaaaccaacaacaactatggcaagttatcaaaagcactacgatgatcagggtcgcaaggttgacgagtatggcaacgttgagaagcaaaccgacgaatacggcaaccctgttcatgctgctagtgtcacctatgtagccaccagaactgctgctggtggttaagatgatgacattaataagcaacatgataccaccaatgccacggcg

SEQ ID NO: 135174 - DNA, 238 bp, Glycine max
attcggggatgcacctaacaacatgcgacagtttcaaaaccaagatattttccacgatttggccttcaccccattaaccatcaccctgcagggagagtacaacgtgagagtcaactcaataagaatcaaccagcacagtgtgttcccactgaacaagctatcatccaccatcgtagggtcgacctctggaggaaccatgattagcacctcaactcctcacatggttctccagcaatcc

SEQ ID NO: 135175 - DNA, 255 bp, Glycine max
tcgggattcggctcgcgcaaagaaaggggtggtggctgcttcgaaagcttaataatttgtttatttccagaacatcatagttttcgcagcagcaaactaacaaattactcatatcgtataataagatggcccgttctctctcgcaagcgcagacgtattggtgtccttgttgctcaatctatctcgcctaatgcccgttcatcggcgaggttacgcagtggcatccgatgtatcggtaagagttggattgggaat

SEQ ID NO: 135176 - DNA, 258 bp, Glycine max
cgattctcttccgcctcccttcccttcaactccacggcgcagatccgaggagtttgggaaaccctaattcattcctctttgcttcttctatctctattcctctaacaccagtgatggcaggtttggctccagaaggatcgcagtttgatgctcggcaatatgattctaagatgaatgaattgctttccgccgatggacaagaatttttcacttcatatgacgaatctatgatagttttgatgcaatgggccttcaaga

SEQ ID NO: 135177 - DNA, 256 bp, Glycine max
acctaagtgagaaacaaagaaaggaaataattgatctttgaaaatgcagggaggaaagaaagctggagagtccatcaaggaaacagctgcaaacattggtgcttctgccaaggctggcatggagaaaaccaaggccactgtccaggagaaggcagaaagaatgacggcacgtgatccgatgcaaaaggagttggcaacccagaagaaagaggcaaagatgagccaggcagagctggacaagcaggcggcgcgtcag

SEQ ID NO: 135178 - DNA, 254 bp, Glycine max
gaccaaggccactgtccaagagaaggcagaaagaatgacagcacgtgatccggtgcaaaaggagttggcaacccaaaagaaagaggcaaagatgaaccaggcggagctggacaagcaggcggcgcgtcacataacacggcggccaaacagtccgccaccacggctgggcacatgggacatggccaccacaccaccggaaccgggactggaaccgccacgtattccaccaccggggaatatggtcagcccatggg

SEQ ID NO: 135179 - DNA, 255 bp, Glycine max
gcaattatgagaatatggagcttctgtttgttctatgtcatggctgaattgtgggggagtgtggtcatttcagtgctgttttgggggtttgccaatcagattactaccattgatgaagcaaaaagattctatcctctatttggacttggggccaatgtagcccttgtgttctctggtcggacagtgaaatacttttctaatctgaggagtactttaggtcctggagttgatggttgggccatctctctgaaagca

SEQ ID NO: 135180 - DNA, 254 bp, Glycine max
gtctgaatatgaccattcttgtctacgttcctgtcgatcacgagctttgtacaaagggatgaaggttggggcaactccggatttaatggtagcatacattgatttttttcttggtggtgatgagaagcgattagacattgtatcaattatacagaagagatttcccatgtgcataatttttggtggggatgggagctacatggcaccttataatcttcacaatgatacactgttgaccaacctccttggtcagc

SEQ ID NO: 135181 - DNA, 258 bp, Glycine max
cttgcaacgattaacaatggcttcaaccgacaagtcaccggacccaacgacggcgaagggtccggatccaactccggggaagccgatgagtgttggtcagcacgtgatcgacaagagtgcaatgatggtgcagtcgctggaccccattaagcagatgagtcagcacgtgtgctccttcgctatctacagccatgacatgtctcgccagatagagacacatcactactgctccagactccaccagaacttcatacaatg

SEQ ID NO: 135182 - DNA, 259 bp, Glycine max
gcgggcatcgcgataagtcctctgtcctactacaggtgctgcgacaacctttatcaagtccgaacgattgtcgactaccagatccgctggtctgcaatattcaccctagcccacaagcacaaatcctcggcgcggcatataatccccaagtactccaaagacttaaatatagtcaatcaagaaggtggtaagacccttgcagagttccccaacagcatagagcttgggaagctcggacccggtcaagatccgaacaaca

SEQ ID NO: 135183 - DNA, 263 bp, Glycine max
cacaactactacaagtacttccttacaatcaaaaccaacaacaactatggcaagttatcaaaagcactacgatgatcagggtcgcaaggttgacgagtatggcaacgttgagaagcaaaccgacgaatacggcaaccctgttcatgctgctagtgtcacctatgtagccaccagaactgctgctggtggttacagtgatgacattaataagcaacatgataccaccaatgcctacggcgtagacactggtagacagcattcta

SEQ ID NO: 135184 - DNA, 254 bp, Glycine max
gacacaattgacaatgtgaaggcaaagatccaagacaaggagggtatcccaccagaccaacagaggctcatttttgctggcaaacagcttgaagatggccgaaccttggctgattacaacatccaaaaagaatctaccctccacttggtgctccgtctgcgcggtggtatgcaaatctttgtgaagacccttactgggaagaccattactttggaggtagagagctcagacacaattgacaatgtgaaggcaaa

SEQ ID NO: 135185 - DNA, 253 bp, Glycine max
cccagaaaacaaccccacacagcaatttcaaaatcgatatactgagccagataatcgtgactggcgtggaagatctggccaactttctggtaatgcagatgagaggtcttgggataatctcaaggagaatagggagtttggcaatactagtaatcgtcaagaccaactgaactctcagtttgcaaggacacaaatctcttctaaccaagggggaggacctactccgacactagtcaaggctgaggtgccatgg

SEQ ID NO: 135186 - DNA, 253 bp, Glycine max
caccgataggcaacaacatgggactactggtggctatgccggtgacactggtaggcaacatgggaacatcggtggcccttactatggaaccaacaccgcagacaccggtactggtcccagaagtggaaccacgggcggcaccggttatggaggcactggtggcactgattatggaacaactggtggcactggttatggaagtggaactgggtatggagtcaacactgggggtgcgcacactgaagcaggatat

SEQ ID NO: 135187 - DNA, 255 bp, Glycine max
gcctattcctcaccacaatttgattccttcctcttctcttcttcgctcactatataattcattcatctctctcttttctcttttcagctactttaggcagccggctattcaggaatcatggctagggttttggctcagtctattaatgtccctggtctattggctgagcataggcatggtcagcaaaaggaatcaggaaaattaaaaagatcgaccaaaatgatgagtgctttacgaacaaatggattaagaatg

SEQ ID NO: 135188 - DNA, 257 bp, Glycine max
ggcacaagttgaacttcgtgacgagcatgggaacccagttgaactaacagatgcatatgggaatccggtttggttaacggacgagaaaggcaacccggtgcacctcacggctgtggcaaccaatgcacacaaatctatgcttcagaatgacaccccacaagagcttcctcactccaagagttcaagctcgtctgaggatgaagggcatggagagaggatcaggaagggactgaaggataacatagaagaaaagttac

SEQ ID NO: 135189 - DNA, 255 bp, Glycine max
gcagttgcagaccgagctagctagctagcaagcaagcacagagatggaggcaaagcgaggccatgccctcatgtgcttggcacgtgtttcactcttcctctgcgctctaaccctatccgctgctcacggaagcaccacggttcaagacatcgcgagaaagttgaaactcggggacaacgagcttctgcgcacggagaagaagttcaaggttttcatggagaattacgggaggagctactccacagaggaggagta

SEQ ID NO: 135190 - DNA, 255 bp, Glycine max
caaagaaaggggtggtggctgcttcgaaagcttaataatttgtttatttccagaacatcatagttttcgcagcagcaaactaacaaattactcatatcatataataagatggcccgttctctctcgcaagccaaacgtattggtgtccttgttgctcaatctatctccctaattcccgttcatcggcgaggttacgcagtggcatccgatgtatcggtaagagttggattgggtaatattgggcgaaggaatgga

SEQ ID NO: 135191 - DNA, 256 bp, Glycine max
aaggattttctcgtttggaagaagtcctagatgatcttgctcttgatattccatcagctaaaactcagtttcagtcattggtgcctaaggcaatatcagaagggtggcttgatgcctcatttttgaaaccatctagtgaagatggggatatagtagttgaagatgaaaaggtgaggaagtataaaaaagaggttgtaactataattcatgaatattttctttctgatgacattcctgaactcattcgaagtcttga

SEQ ID NO: 135192 - DNA, 253 bp, Glycine max
ggactgcggaggcggccaagaacaaggccgcagaggtaaaggacagagctgcagaaaccgcggaggcggccaagaacaagactgccgagactgctgaggcagcgaacagaaaaccgcacaggcaaaggacaacgccaaggaaaatgtgagtggtgcagatgaaggagcaaggaggaaaatggaggacctaaggcttcgaggtaaagggtatggaagtcatgaatctgcaggggggcgtggagataaggtggtg

SEQ ID NO: 135193 - DNA, 251 bp, Glycine max
ctcgagccgctcgagccggtttaaacctaattctcattacttcatcgttcgattcttctcctcctaaaggtacgtctctggtttcctctctctcttgttcattctcttcgtaatagcaaccttattagccttcgtttattgatttttctcctaattacacttcaattttttcgatttgtgtttgttacgtcaatctgtatatctgttttgttgtcgtcgaatccgaaacttttcattcgcctttctgattc

SEQ ID NO: 135194 - DNA, 254 bp, Glycine max
ctcgagccgattcggctcgagcaaaagagcaaagaatatgctggacatgctaccaagagaagcaaagaggcttctaatgatacatgccaatgacatggctcagaagaccaaagactacgccagtgacactgctcagagaaccaaggaaaaactccaagacattgcatctgaagctggtcaatacagtgcagagaaagctagagaaatgaaggatgcagcagcagagaaggcaagtgacatagcaaaggctgcaa

SEQ ID NO: 135195 - DNA, 253 bp, Glycine max
cgttcatcggcgaggttacgcagtggcatccgatgtatcggtaagagttggattgggtaatattgggcgaaggaatggaatcgtgggaggtgtagaagagaagcctgatacaagagatggttcaaaagcctactcaactgattgggccccagacccagtaacaggttactataggcccattaaccacacccctgaaattgacccggtggagcttcggcataggttgctccgatcacctccactagagcctaga

SEQ ID NO: 135196 - DNA, 252 bp, Glycine max
cttaaatttcacaagcaagttgtatttttggagtattgtattatatgaccaaatattttagtgttttaggactagatattttgcttctggtggcaatttttctcttctccttctggttttcatcttttgtgttcttctttgtttctcacctttctgaggatttttccatcttagttcctggaggcaccaggaacctgaccaaataaataaaccttttttttcttctaatttttctgaagtttcattttttag

SEQ ID NO: 135197 - DNA, 254 bp, Glycine max
cgttcatcggcgaggttacgcagtggcatccgatgtatcggtaagagttggattgggtaatattgggcgaaggaatggaatcgtgggaggtgtagaagagaagcctgatacaagagatggttcaaaagcctactcaactgattgggccccagacccagtaacaggttactataggcccattaaccacacccctgaaattgacccggtggagcttcggcataggttgctccgatcacctccactagagcctagag

SEQ ID NO: 135198 - DNA, 257 bp, Glycine max
attctggtcaacaatgcagctgagcagtacgagtgtggaaccgtggaggacatagacgagcctaggcttgagagggtctttcgtacaaatatcttctcctatttcttcatggcgaggcatgccttgaagcacatgaaggaaggaagcagcattatcaacacgacatcagtgaatgcatacaagggacatgcgaaactattggactacacgtccaccaagggggcaattgtggcctatacaaggggtcttgcccttca

SEQ ID NO: 135199 - DNA, 260 bp, Glycine max
aagacttcatgtgacaatgggtgtaatggaggtcttatgacaaatgcctacaattatttgctcgagtctggtgggttggaggaggagtcttcatatccctacactggggagagaggtgaatgcaagtttgatccagagaaaatagcagttaagatcacaaatttcaccaatatccctgctgatgagaaccaaattgccgcatatttagtaaaaaatggtccacttgctatgggcgtgaatgcaattttcatgcaaacata

SEQ ID NO: 135200 - DNA, 251 bp, Glycine max
aggacgcatgatagttcagtgtctacaataccaggtgattttgtcattggtgttaagttgacaaccataaacaatatgtgtgcatatgggcttaatcctggtatttcaggttctcgtcttttgggcaccattcctcagtccatttcacagcaaactgtttggaatcaaatggcaacagtgagaacaccattgaattttgattctagcaagcagagcttttgtcaattttctatcgaccttctcggtggagg

SEQ ID NO: 135201 - DNA, 249 bp, Glycine max
gatggcacaagttgaacttcgtgacgagcatgggaacccagttgaactaacagatgcatatgggaatccggtttggttaacggacgagaaaggcaacccggtgcacctcacggctgtggcaaccaatgcacacaaatctatgcttcagaatgacaccccacaagagcttcctcactccaagagttcaagctcgtctgaggatgaagggcatggagagaggatcaggaagggactgaaggataacataga

SEQ ID NO: 135202 - DNA, 251 bp, Glycine max
gtttttgtgtgtcgcttcttcgtaggtgcagctgcaatggtgaagggacgccaaggagaacgtgtcagactctacgtgaggggtacaatccttggatacaaaaggtccaagtcaaaccagtatccaaatacatccctgatccaaattgagggtgtgaatgccaaagaagaagtagcatggtatgctggcaagaaaatggcctatatctacaaggctaaggtgaagaagaatggaagccattaccgctgcat

SEQ ID NO: 135203 - DNA, 251 bp, Glycine max
gagaaggtgaataccgagataaggaaaccagtggcagttcctgccaataagagaactagagcaagcaacggcaatggaggtccaatgccaccagccaaagctgggcgtttgactaatgcgtatgtatcatctttccctgctgctcctacatttgtccggtctccatgacacgggcaatacccagctgctcttccaccatacccttccccaccccacatgtacggcagcagaagtcccccagcaaatcctta

SEQ ID NO: 135204 - DNA, 251 bp, Glycine max
gaaaacagcatcgaacccgtcgtagcagaaaaacttgtcaccatggtttcttccgacaaggatccacgagaggatgtccttcaagcctggtacatggatgatagtgatgaagatcaaagactcccccaccacaaagaacccaaggagtttgtctcgttggaccaacttgctgaacttggagtccttagctggaaactagatgctgataaccatgaaaatgatccagagctgaagaagattcgtgaagagcg

SEQ ID NO: 135205 - DNA, 257 bp, Glycine max
gttttaaatccacaaaatccttttgtgttaaataggtggatggggaaactgactttcccccagggcacttcccgaagtgttaaaagaatgcctctttctatagggggaggagctggtgcaaagaatgctattcttatgaatatgccaaatgctgttctttcaatgtggagatattttgttggagatctcgtctttgaagtttctaagatgacttctccctacattaaatgtacagtctctttcttcatagcatttgg

SEQ ID NO: 135206 - DNA, 247 bp, Glycine max
gaaacaaagaaaagaagaaaggaaagaattgatcgttgaaaatgcagggaggaaagaaagcgggagagtccattaaggaaacagctacaaacattggtgcttctgccaaggctggcatggagaagaccaaggccactgtccaagagaaggcagaaagaatgacagcacgtgatccggtgcaaaaggagttggcaacccaaaagaaagaggcaaagatgaaccaggcggactggacaagcaggcggcg

SEQ ID NO: 135207 - DNA, 247 bp, Glycine max
atttcaagttgttcttgaaattactactaacaaaaacaagaccaattggtcaaaaaccatgaatcttgatctggtccttcctaacaaggccagcctgaacgaggaagtgggagacgttcttacgctggtcgccttggagttggatgatcttgccaagctccttgtcctgcaccacggttccgttgcagcagaactccttcttgaggtccttgaggatcttctcgtagctgaactccttcttcagccc

SEQ ID NO: 135208 - DNA, 248 bp, Glycine max
cacacaactacaagaaagaacttccttataaccaaaaccaacaacaactatggcaagttatcagaagcactacgatgatcagggtcgcaaggtcgacgagtatggcaatgttgagaggcaaactgacgaatatggcaacccggttcatgccactagtgtcacttatgtagccaccaaaagtgttggtggctacaatgatgacgctaataagcaacatgatattactggcgtctattccgagaaagaca

SEQ ID NO: 135209 - DNA, 250 bp, Glycine max
gcgcttcgcaagaaatcgcagttccaataatcgccgaaatcgatctctacaagtacgacccatgggaccttccaggaatggctttgtacggagagaaagagtggtattttttcacgccgagggaccgcaagtacccgaacggttcgcggccgaaccggtccgcggggaccggatactggaaggcaaccggagcggataaaccggttggcaaaccgaaacctgttgggatcaagaaagcattggtttttta

SEQ ID NO: 135210 - DNA, 246 bp, Glycine max
atcaaaactccaacctgtgtcattctcgctgtgacgccggcgaattcggatttggcgaactcggatgctcttcagatggctggaattgccgatcctgatgggaacagaacgattggtgtcatcacgaagttggatatcatggatagaggcactgatgcgcggtatctgttgctaggaaaagttattcccctccgacttggttatgtcggtgttgtgaatcgtagtcaagaggatattctaatgaac

SEQ ID NO: 135211 - DNA, 243 bp, Glycine max
ctgttgttgatatctctaaatcccgcattgcagcctggaacagtgaccagcttcctatctatgaacctggccttgatggtgttgtgaagcaatgccgtggcaagaacctcttcttcagcactgatgttgaaaagcatgtctttgaggctgacatagtgtttgtctctgtcaacaccccaaccaaaactcagggtcttggagctggtaaagcagcagatttgacatattgggagagcgcactcg

SEQ ID NO: 135212 - DNA, 249 bp, Glycine max; identical to SEQ ID NO: 133913

SEQ ID NO: 135213 - DNA, 249 bp, Glycine max
attgaattctccagagagaagaagaaacttaatcgatcatcacttcacttcactaatacatcatggcagacgagacccagaacaagtatgagagctctgaggttgaggtccaggatcgtggtgtttttgactttctcggtaagaaaaaggatgaagaagacaagcctcatcctcaggaggaggtcatcgccaccgagtttcaaaaagtcactgtctcagaccaaggagagaacaagcacagcctcttag

SEQ ID NO: 135214 - DNA, 255 bp, Glycine max
gtattcgcagaactttgtttcccaatttccattgcctccgcttccacctcgcaaccatgatcatcccggagaagaaccgcaaggagatctgcaaatacctcttccaagagggagtttgcttcgcgaagaaggacttcaatttggccaagcaccctgagatcgacgtgccgaatctgcaggtgattaagctgatgcagagtttcaagtctcgcgagtacgtgagagaaacttttgcttggatgcactattactggt

SEQ ID NO: 135215 - DNA, 247 bp, Glycine max
cggcaaaggacatggatcggataaaagggccatggagtcctgaagaggacgaagcgttacggaggttggttcagacttacggccctaggaactggtccgttataagcaaatccattccgggtcggtctgggaaatcgtgccgcttgcggtggtgcaaccagctgtctccggaggtggagcgccggcctttcacggcggaggaagacgaggcgatcctgaaggctcacgccaggttcgggaacaagtg

SEQ ID NO: 135216 - DNA, 248 bp, Glycine max
cgactatgcaagtgatgctgcgcagaagaccaaggactatgcaagtgatggtgctcaaaagagcaaagaatatgcgggtgatgtagcactgaatgccaaagattatgctcaaaaaagcaaagattacgcaggtgatgctgcacagaatgtcaaagattatgcaagtgatgcagtgcagaagagaaaagagtattctggtgatgcttctcacaagagcaaagaggcttctgattatgccagtgagacgg

SEQ ID NO: 135217 - DNA, 246 bp, Glycine max
gtgaagggaaggtgggagaaaccgggtcacagcccactatttgggtatgacttttggtaccaaccacgtcacaataccatgattagcacatcatggggtgctcctagtgcttttacaaaaggttttaacttacagcatctctctgatggattatacgggaggcatctccatgtatatagctggcctgggggcgaactgagacaaacaatggaccttggtgattcagggcttatacccttagagata

SEQ ID NO: 135218 - DNA, 156 bp, Glycine max
tgtgtcgggtggggtgtgtgctggttgttgtgtgttgtgtgttgtggtccgtgtgtggtgtttgtttgtgtgtggtgtgtttcgtgtcgttctgttgtgttgttgtgatgtgtgtgttgtgggtgtgtgtgtgtgtatgtgatggtgtggtgtgtg

SEQ ID NO: 135219 - DNA, 246 bp, Glycine max
acaactactacaagtacttccttacattcagaaccaacaacaactattgcaagttatcaaatgcactacgatgaacatggacgctaggttgacgagtatggcaacgttgagaagcaaaccgacgaatacggcaaccctggtcatgcttctagtatctcctatgtagccaccagaactgctgctggtggttacagtgatgacattaataagcaacatgataccaccaatgcctacggcgtagacact

SEQ ID NO: 135220 - DNA, 248 bp, Glycine max
ggccaccgctccttcgcttctacactcatctgggtcctctttcttctctcaatttcgtgcctttcaattctcttcttctttgctgttccctcatagtaacaagcatgggaatgcactggtctctgtgaaggcctctgtttctggggttgtgttggtggagaagtctgaggcagagaaggccaataggctcaaaacagcttacactgagaaaattattcccttgctcatggaagagttctcctacacca

SEQ ID NO: 135221 - DNA, 267 bp, Glycine max
taataactctatttgcatcgagaagttctctgattttccccagcttgggaggttcactcttcgcactgaaggaaaaactgttgctgtgggaaaagtcactggtctgtgaatttgtaacaattttgacttgaggacgggaattcctgcacaaatatagtggagtggcagctgaggcataattgacagcatcaagtttaccatatattcatttcggtatttattttgcttttacttggggtagtattcagtgaagagttatttgttgcc

SEQ ID NO: 135222 - DNA, 258 bp, Glycine max
gggagtttgcttcgcgaagaaggacttcaatttggccaagcaccctgagatcgacgtgccgaatctgcaggtgattaagctgatgcagagtttcaagtctcgcgagtacgtgagagaaacttttgcttggatgcactattactggttcctcaccaacgatggcatcgagtttctcagaacttaccttaaccttccttccgaaattgtccctgctactttgaagaagcaagccaagccacctggcaggccctttggagg

SEQ ID NO: 135223 - DNA, 256 bp, Glycine max
gtttgttgttcaatctaacaaacttctctatatcgtttactttttcaacacaccttacacatttctttatttgtgccttttatataaatatcatggcttcgagggtggtttcggttttggtgatagcgatgatgttgtttgccatgaactgtaattgcactagtgttggccacatgccttcaaccaaagaggaaggtcacgattttcaggaggctaaagccaagacaacacaaactgcgaacaaggccatggaaac

SEQ ID NO: 135224 - DNA, 254 bp, Glycine max
cgtaagtcccaagcagtgggaggaggctcgggactctgaccgcgtgcctgttgaagaatgagccggcgactcataggcagtggcttggttaagggaaaccaccggagccgtagcgaaagcgagtcttcacagggcaattgtcactgcttatggacccgaacctgggtgatctatccatgaccaggatgaagcttgggtgacactaagtggaggtccgaaccgactgatgttgaagaatcagcggatgagttgtg

SEQ ID NO: 135225 - DNA, 165 bp, Glycine max
cttcttttattatatgtgtgtttgtcttttctctcacctgaacatgtcttgttgcggtggtaactgtggttgcggaagcgcctgcaagtgcgggaacggctgcggtggctgcaagatgtccccagacttgcgcttcaccgagtcaaccagcatcgcgaccttggt

SEQ ID NO: 135226 - DNA, 253 bp, Glycine max
ggagaattacgggaggagctactccacagaggaggagtatttgcgccgtttggggattttcgcccagaacatggtcagagcggcggacatcaggcgctggaccccaccgccgtccacggcgtcacgcagttctccgatctcaccgaggacgagtttgagaagctctacactggcgtcaatggcggcttcccgtcatcgaataatgccgccggcggtattgcgccgccgttggaggtggacgggctgccggaga

SEQ ID NO: 135227 - DNA, 257 bp, Glycine max
cggatatctcggctcttgcatcgatgaagaacgtagcgaaatgcgatacttggtgtgaattgcagaatcccgtgaaccatcgagtctttgaacgcaagttgcgcccgaagccattaggccgagggcacgcctgcctgggtgtcacacatcgtttccccaacgcaaacatgtcacaatgttgctgcgcggggtgtatgctgacctcccgcgagcacccgcctcgtggttggttgaaatctgggttcatggccgacttc

SEQ ID NO: 135228 - DNA, 257 bp, Glycine max
ctcatttgaatacattccttgtagtttatactgaaagatgggtttgaagatggcgttactgatcctaggcctttccctcatgctccttttggtctcctctgaggtggcatccacgaatacaaaagaggaggcaaatggagtggatgatgccaaatatcccggtggaagctatggagggggttacccaggtcatggcggtggcggttatcctggccatggcggtggcggttatcctggccatggcggtggtggtggct

SEQ ID NO: 135229 - DNA, 253 bp, Glycine max
tgggaaacaaaactacccttttgcttttgctctttgttctttgccatggagtggccacaacaacaatggccttccatgatgatgagggtggtgataaaaagtcaccaaaaagtttgtttttgatgagcaactccacgagggttttcaagactgatgcaggggaaatgcgtgtgctgaaaagccatggtggtaggatattttataggcacatgcacattggcttcatctctatggaaccaaagtccttgtttgt

SEQ ID NO: 135230 - DNA, 265 bp, Glycine max
caccatcaattttgaggcttttccccacaagctggtgcagtttggagagattcaggaaaaagttgtattgaaattttcacaagaggaatttcttacagcttggtcaactcaggtgcgtcctgcaacaactctgttggctgatgggtgtccatatttgtatgctatggtgcatgatagttcagtgtctacaataccaggtgattttgtcattggtgttaagttgacaaccataaacaatatgtgtgcatatgggctcaatcctggt

SEQ ID NO: 135231 - DNA, 259 bp, Glycine max
cgagctagctagctagcaagcaagcacagagatggaggcaaagcgaggccatgccctcatgtgcttggcacgtgtttcactcttcctctgcgctctaaccctatccgctgctcacggaagcaccacggttcaagacatcgcgagaaagttgaaactcggggacaacgagcttctgcgcacggagaagaagttcaaggttttcatggagaattacgggaggagctactccacagaggaggagtatttgcgccgtttgggg

SEQ ID NO: 135232 - DNA, 255 bp, Glycine max
ggcatctggttttgaggaatctatgaagtataagaagctcaccaatgctcagaggtctggtctaaaccagatacccaaccgaagatttacactatggtggtcgccaaccattaaccgagccaatgtttatgtgggtttccaagtgcagctagatctgactggtattttcatgcatggaaaaataccaactttgaagatatcccttattcagatattcagagctcacttgtggcagaagatccacgagagtgttgt

SEQ ID NO: 135233 - DNA, 247 bp, Glycine max
gtcgctggttccttcacgccaccgggtgatttctcagccgtcgtcttcttcttcggccgcggtagatccgtcatcggcggtggttgatgacgcgccgcggaggcggaggaggttaaggcgccgcagcagaaccggtgtatgacgtgcaggcggcgcgtggggctcacagggttcaagtgtcggtgcgggatgatgctgtgcgggacccaccgttacccggagcagcacgcgtgcgagttcgacttca

SEQ ID NO: 135234 - DNA, 252 bp, Glycine max
acagacttgacccctgaaagagttagacctgctatcaacaatactcttcaagaactccaacttgactaccttgatctttacttgattcattggccatttagattgaaagatggtgccagcagaccccccaaagaaggagaagtgttggagcttgacatggaaggggtgtggagagaaatggagaagcttgtcaaggaaaaccttgtcagagacattggaatatgcaatttcactcttacaaagctagataag

SEQ ID NO: 135235 - DNA, 254 bp, Glycine max
tgagaaacaaagaaaggaaataattgatctttgaaaatgcagggaggaaagaaagctggagagtccatcaaggaaacagctgcaaacattggtgcttctgccaaggctggcatggagaaaaccaaggccactgtccaggagaaggcagaaagaatgacggcacgtgatccgatgcaaaaggagttggcaacccagaagaaagaggcaaagatgagccaggcagagctggacaagcaggcggcgcgtcacataac

SEQ ID NO: 135236 - DNA, 235 bp, Glycine max
gttcttatgctagcttaaatgctagtgtcttagtgttttaggaaaggataggttataaaaatggtataggtagcagctaggtcaaagtgtcatgtcattgtgtcgtgaaattattagctagcatgtttagtgttttagggtttcttttgcatgtgtgtttctcttatggggtgtaactgatgagtgaggcatggctctactatagctatctaaaaaataatgcaagctttttttt

SEQ ID NO: 135237 - DNA, 259 bp, Glycine max
caagaaagaacttccttataaccaaaaccaacaacaactatggcaagttatcagaagcactacgatgatcagggtcgcaaggtcgacgagtatggccatgttgagaggcaaactgacgaatatggcaacccggttcatgccactagtgtcacttatgtcgccaccaaaagtgttggtggctacaatgatgacgctaataagcaacatgatattactggtgtctatcccgagaaagacaccggtagacatcattttggtc

SEQ ID NO: 135238 - DNA, 262 bp, Glycine max
gacaaatgcctacaattatttgctcgagtctggtgggttggaggaggagtcttcatatccctacactggggagagaggtggatgcaagtttgatccagagaaaatagcagttaagatcacaaatttcaccaatatccctgctgatgagaaccaaattgccgcatatttagtaaaaaatggtccacttgctatgggcgtgaatgcaattttcatgcaaacatacattggtggtgtctcatgccctctcatatgtagcaagaaa

SEQ ID NO: 135239 - DNA, 255 bp, Glycine max
tgttggatgagtttggaagtcctaaagtggtcaacgatggtgtcaccattgctcgcgccatagagcttcccgctcctatggagaatgctggtgaagctcttatcagagaggttgctagcacgcataccgactctgcgggtgataggactaccacggcttcggttcttgctcgcgagataatctagctggggcttctcagtgtaacttctggggcaaatcctgtgtctcttaagagagggattgctaagactgtgc

SEQ ID NO: 135240 - DNA, 255 bp, Glycine max
caacgatattctgtgttgcgattatgctagttttgatggtttgattaccaagcaagttatgggcaagatggcagaaatgataaacagtctttgtggtggtgatgaaaaattgatgcgtgaaaggacacatttgctgttggcttgttgttcaaggatggcaatttgtaagaaagatgtttggagagttgaatgtggaatcccttctggatttccgctcacagttatttgcaatagcatttttaatgagatgctcat

SEQ ID NO: 135241 - DNA, 253 bp, Glycine max
gaaaggaaataattgatctttgaaaatgcagggaggaaagaaagctggagagtccatcaaggaaacagctgcaaacattggtgcttctgccaaggctggcatggagaaaaccaaggccactgtccaggagaaggcagaaagaatgacggcacgtgatccgatgcaaaaggagttggcaacccagaagaaagaggcaaagatgagccaggcagagctggacaagcaggcggcgcgtcagcataacacggcggcg

SEQ ID NO: 135242 - DNA, 251 bp, Glycine max
gagaaaagtagtgtattaagactacaaattttcaatttttcaatggcgtcgaggcaacaaaaagaggatcgagctgaggcagctgcgaaagttgctgcgaaagaactcgaacaactcaaccgagaaaaagaccgtgatttcagtgttggtgttgcagaccaacaccaacaagaagaacatcagttagatcaacaaaagcgtggtgtaatcggatccatgttcaaggcggtgcaagacacctacgagaacgc

SEQ ID NO: 135243 - DNA, 250 bp, Glycine max
cacaactacaagaaagaacttccttataaccaaaaccaacaacaactatggcaagttatcagaagcactacgatgatcagggtcgcaaggtcgacgagtatggcaatgttgagaggcaaactgacgaatatggcaacccggttcatgccactagtgtcacttatgtcgccaccaaaagtgttggtggctacaatgatgacgctaataagcaacatgatattactggtgtctatcccgagaaagacaccgg

SEQ ID NO: 135244 - DNA, 249 bp, Glycine max
agaaaacctaagcttagaattagaaacaaagaaaagaagaaaggaaagaattgatcgttgaaaatgcagggaggaaagaaagcgggagagtccattaaggaaacagctacaaacattggtgcttctgccaaggctggcatggagaagaccaaggccactgtccaagagaaggcagaaagaatgacagcacgtgatccggtgcaaaaggagttggcaacccaaaagaaagaggcaaagatgaaccaggcg

SEQ ID NO: 135245 - DNA, 253 bp, Glycine max
cttagaattagaaacaaagaaaagaagaaaggaaagaattgatcgttgaaaatgcagggaggaaagaaagcgggagagtccattaaggaaacagctacaaacattggtgcttctgccaaggctggcatggagaagaccaaggccactgtccaagagaaggcagaaagaatgacagcacgtgatccggtgcaaaaggagttggcaacccaaaagaaagaggcaaagatgaaccaggcggagctggacaagcagg

SEQ ID NO: 135246 - DNA, 258 bp, Glycine max
agaaaacctaagcttagaattagaaacaaagaaaagaagaaaggaaagaattgatcgttgaaaatgcagggaggaaagaaagcgggagagtccattaaggaaacagctacaaacattggtgcttctgccaaggctggcatggagaagaccaaggccactgtccaagagaaggcagaaagaatgacagcacgtgatccggtgcaaaaggagttggcaacccaaaagaaagaggcaaagatgaaccaggcggagctggac

SEQ ID NO: 135247 - DNA, 198 bp, Glycine max
gtgaaatttgggaaatcatctagaatttcatgtgcttgtttgtatggaggagcaccaaagggtcctcaactgagagacattgatcgtggagcagatattgtggtagccactcctggtcgcttgaatgatattcttgagatgagaagaattagtcttaatcaggtttcttacctggtgctagatgaggcagacaggatg

SEQ ID NO: 135248 - DNA, 255 bp, Glycine max
caaaaagtttacgttacaaatcgcataataaccgtcctaagtttattgagagaattttgcaagtgtgagaaacatggcatctcgtcaaaacaacaagcaagagcttgatgaaagagcaaggcaaggagagactgttgtcccgggtggaactggtggcaagagcctggaggctcagcaacaccttgctgaaggaaggagcaagggagggcaaacaaggaaggaacagctgggtacagaagggtaccaggaaatggg

SEQ ID NO: 135249 - DNA, 251 bp, Glycine max
cagccaagtcgtaaaagggtttcaagggatggaaaacatgcagagcttctggcaattgggtgatgaactccgtgggcactcaaaagcatcggaggatcacaagtggttaatggttgcctcgaaactggccgaacagacaagattgaagggggagcgtgtgaacaaccttgatctttcaaagggacccattgaaacaaggtcaagggataaatttgggttccaggaagagaacaaatttgattctcttaact

SEQ ID NO: 135250 - DNA, 250 bp, Glycine max
aggaggcacctcctgacatgcaatgcaaggataagtttctccttcaaagtgtagttgctagccctggggcaaccacaaaagatatcactccagaaatggtcaataaagaatctggtcatgatgttgaagagtgcaagttgagagttgtttatgttgctcctcctcaaccaccatccccagttcgagaaggatctgatgaagattcatcccctcgtgcatctgtatctgagaatgggcattcaagtgctgc

SEQ ID NO: 135251 - DNA, 247 bp, Glycine max
gaagaaggttatttattgcacaagtttgaactggagtgcggatggaagcactttgtttagtggctataccgatggtgtggtcagagtttgggctattggacgttattaggttaagctttttagtgttttcagatgcgaatctgtttttgagttttgggacaaagttagttactgctttactgtagaattgatttttatgttgaagaccgtggcactgaggccttttatttatttttaaaacgttcgt

SEQ ID NO: 135252 - DNA, 248 bp, Glycine max
ttagaaacaaagaaaagaagaaaggaaagaattgatcgttgaaaatgcagggaggaaagaaagcgggagagtccattaaggaaacagctacaaacattggtgcttctgccaaggctggcatggagaagaccaaggccactgtccaagagaaggcagaaagaatgacagcacgtgatccggtgcaaaaggagttggcaacccaaaagaaagaggcaaagatgaaccaggcggagctggacaagcaggcg

SEQ ID NO: 135253 - DNA, 253 bp, Glycine max
gaaacaacaaagtattattgcacagttattgatgcgcctggacatagggatttcattaagaatatgattactgggacatcccaagctgactgtgctgttcttatcattgattcgaccactggtggttttgaagctggtatttccaaggatggacagactcgtgaacatgctctgctttcattcacccttggtgtgaaacagatgatttgctgctgtaacaaaatggatgctactacacccaagtattccaagg

SEQ ID NO: 135254 - DNA, 255 bp, Glycine max
acgaagcagaaggctggggagtatacagactatgcggctcagaaagcaaaagaaaccaaagactatgctgctgagaaggctaagaatgctaaagataccactgtgcagaaagctggagagtacaaggattataccgctgagaaggctaagaatgctaaagataccactgtgcagaaagctggagaatacaaggattataccgctgagaaggcaattgacgggaaggacagtgcagtggggaagcttggggagcta

SEQ ID NO: 135255 - DNA, 257 bp, Glycine max
ctaattcagactgtgaaactgcgaatggctcattaaatcagttatagtttgtttgatggtatctactactcggataaccgtagtaattctagagctaatacgtgcaacaaaccccgacttctggaagggatgcatttattagataaaaggtcaacacaggctctgcctgttgctttgatgattcatgataactcgtcggatcgcacggcctttgtgccggcgacgcatcattcaaatttctgccctatcaactttcg

SEQ ID NO: 135256 - DNA, 262 bp, Glycine max
tgcagaccgagctagctagctagcaagcaagcacagagatggaggcaaagcgaggccatgccctacatgtgcttggcacgtgtttcactcttcctctgcgctctaaccctatccgctgctcacggaagcaccacggttcaagacatcgcgagaaagttgaaactcggggacaacgagcttctgcgcacggagaagaagttcaaggttttcatggagaattacgggaggagctactccacagaggaggagtatttcgccgttt

SEQ ID NO: 135257 - DNA, 246 bp, Glycine max
ttgccatggatccttacaagctccggccatccagcgccttcaattctcccttctggactacaaattctggtgctcctgtttggaacaacaactcctctttaaccgttggagctagaggtccaattctgcttgaggattatcatcttgtggagaagcttgcaaactttgacagggaacttatcccagaacgtgttgtccatgccaggggagctagtgcaaagggtttctttgaggtcacacatgaca

SEQ ID NO: 135258 - DNA, 246 bp, Glycine max
tggctgatgggtgtccatatttgtatgctatggtgcatgatagctcagtgtctacaataccaggtgattttgtcattggtgttaagttgacaaccataaacaatatgtgtgcatatgggctcaatcctggtatctcaggttctcgtcttctgggcaccattcctcagtccatttcacagcaaactgtttggaatcaaatggcaacagtgagaacaccattgaattttgattctagcaagcagagct

SEQ ID NO: 135259 - DNA, 248 bp, Glycine max
ctgaagagaggccatcagaaggaattggcgaaactgtgaggcagtatgcacaaaaaccaaagccaagtgaaagaaaccctcagaaggagggaaccggaagcatcgtgtttacagcaataggcgaaacagtaagcagtgccggtgagaaggtaaagaaaccgtttaaaaacactatgggaggagaaagtgaaggaggaggagggaaagaagaggggacgagtgtcattggtaaaagtttgaccagcatt

SEQ ID NO: 135260 - DNA, 251 bp, Glycine max
cataatacaaacctctctaatttttgaagcttattatacccaatctcgatatgcagatcttcgtgaaaaccctaactggcaagacgatcaccttggaggtggagtcctctgacaccatcgacaacgtgaaggccaaaatccaagacaaggagggcattcctccggatcaacagcgtttaatcttcgccggaaaacagctcgaagacggcagaaccctcgccgactacaacatccaaaaggagtccacgctc

SEQ ID NO: 135261 - DNA, 254 bp, Glycine max
caaaatggctgcagagatggagagggagtcattgataactgaagctcctaatgcaccagttactgcacagagaagggtcagaaatgacttagaaaattctctaccaaaaccatacttgccaagagcattgaaagctcctgatacgggtcacccaaatggaacagcaggccacaggcaccacaacttatctgttcttcagcagcattgtgctttttttgatcaagatgacaatggaatcatttacccttgggaaa

SEQ ID NO: 135262 - DNA, 248 bp, Glycine max
ggtgattttgtcattggtgttaagttgacaaccataaacaatatgtgtgcatatgggctcaatcctggtatttcaggttctcgtcttttgggcaccattcctcagtctatttcacagcaaactgtttggcatcaaatggcaacagtgagaacaccattgaattttgattctagcaagcagagcttttgtcaattttctattgaccttcttggtggaggaattttagtggacaaaactggagattggat

SEQ ID NO: 135263 - DNA, 200 bp, Glycine max
ggactatgcaagtgatgctagcgagaggaaccaaggaccatgcaagtgatggtgctcaaaagagcaaagaatatgcgggtgatgtagcacagaatgccaaagattatgctcaaaagagcaaagattatgcgggtgatgctgtacagaatatcaaagattatgcaaatgatgcagcgcacaagagcaaagattatgctggt

SEQ ID NO: 135264 - DNA, 242 bp, Glycine max
gagaagtacaaggctgaggatgaggagcatcttctcaatctcctccttagaaagccttcctttgtcgttggtaattgtaatcttgatcttctgttgttggatgttactcctctctcccttgggttggagaccgcgggaggagtcatgactgtgttgattcccagaaacacaaccattcccaccaagaaggagcaggtattttcgacctattccgacaaccagcctggtgtgttgattcaggt

SEQ ID NO: 135265 - DNA, 245 bp, Glycine max
ctacaagtacttccttacaatcaaaaccaacaacaactatggcaagttatcaaaagcactacgatgatcagggtcgcaaggttgacgagtatggcaacgttgagaagcaaaccgacgaatacggcaaccctgttcatgctgctagtgtcacctatgtagccaccagaactgctgctggtggttacagtgatgacattaataagcaacatgataccaccaatgcctacggcgtagacactggtaga

SEQ ID NO: 135266 - DNA, 245 bp, Glycine max
ccgatgcggatgtgattgcggagagcacatttgggccgcggttgatccctatgcgcggaacgaggcgtttaactgctccaatggcgacgtgttcaggtggaagcatctttggaaggtgctagcggaacagtttgggattgaggcgtatgggtttgaggaagtaggtctgagtttgtcggaattgatgaaggatcagggtcctgtttgggatgagattgtgagtgagaatcagcttctgcctacca

SEQ ID NO: 135267 - DNA, 254 bp, Glycine max
gtgcgagtcaacgggcgagtaaacccgtaaggcgcaaggaagctgattggtgggatccccctgtgggttgcaccgccgaccgaccctgatcttctgtgaagggttcgagtgagagcatacctgtcgggacccgaaagatggtgaactatgcctgagcggggcgaagcagcaggaaactctggcggaggcccgcagcgatactgacgtgcaaatcgttcgtctgacttgggtataggggcgaaagactaatcgaa

SEQ ID NO: 135268 - DNA, 247 bp, Glycine max
gcattagtgactgggggtgactctgggattggacgagcggtgtgtaacttgtatgccttagaaggtgctaccgtgggcttcacatatgtgaaggggcatgaggacaaggacgcgagggacacgttggaaatgatcaagagggctaagactgcggatgctaaagatccaatggcggtaccagctgatttgggttacgacgagacttgcaagagagtggttgatgaggttcgtgaatgcctatggttgt

SEQ ID NO: 135269 - DNA, 265 bp, Glycine max
cggcgacgttttgagcacttccgtcatgcgggagaagaacactgggaagccaaggggctttggtttcgtcgtttttgcggatcctaacattctagatagggttttggaagacaaacatgtcatagacggcagaacggttgatgccaaaaaggccttctcaagagaggatcaacaaatttctgtcacttccagaggtggaaattccaattctggcatgaattctgaaaatggaggaaacatcaggactaaaaagatatttgttgga

SEQ ID NO: 135270 - DNA, 266 bp, Glycine max
attcccaattacccttcccaattttcaccaaaacctaatactcccacaccaatcttcgatcatggacgccgattcacaacctcaacaactcgaagagagaacagaggagcaagaactgaagtacctggaattcgtgcaattcgcgaccatacaggctctgatgcgctgcgccatcctctactcatacgccaaggagcgcgcgggtcctctgaagcccggtgtcgacaccgtggaggaggccgtgaagaccgtcgtggctccggtct

SEQ ID NO: 135271 - DNA, 278 bp, Glycine max
tcggtcgaggcaacagtgagaacaccattgaattttgattctagcaagcagagcttttgtcaattttctattgaccttctcggtggaggaattttagtggacaaaactcgagattggatcacacttatacaaaattctccaattagtaacttgttgagagttctgcttggaagaaaggctgtttaatggtcaagattgtgatgtctgggaatgcagcagtcaaaaggagtgattgggcctcattggtacaagtgtttttaacaaacagcaacagtaca

SEQ ID NO: 135272 - DNA, 276 bp, Glycine max
tcggctcgagcaacaactatggcaagttatcaaaagcactacgatgatcagggtcgcaaggttgacgagtatggcaacgttgagaagcaaaccgacgaatacggcaaccctgttcatgctgctagtgtcacctatgtagccaccagaactgctgctggtggttacagtgatgacattaataagcaacatgataccaccaatgcctacggcgtagacactggtagacagcattctagtggtggctacgatggtgacactaataaacatcatggaact

SEQ ID NO: 135273 - DNA, 263 bp, Glycine max
gcggatgttgacgcaatgtgatttctgcccagtgctctgaatgtcaaagtgaagaaattcaaccaagcgcgggtaaacggcgggagtaactatgactctcttaaggtagccaaatgcctcgtcatctaattagtgacgcgcatgaatggattaacgagattcccactgtccctgtctactatccagcgaaaccacagccaagggaacgggcttggcggaatcagcggggaaagaagaccctgttgagcttgactctagtccga

SEQ ID NO: 135274 - DNA, 263 bp, Glycine max
gaagcattatccaccagcattgactgatgaagtgtggagattggagaagataggcaaggatgggtcattccataagaagctgaataatgcaggaatagtcacagttgaagaatttcttcggcttgtggttaaagatcaacaaaaattgcggaatatccttgggagtggtatgtcaaacaagatgtgggaggctcttttagaccatgcaaaaacatgtgttctaagtgggaagctctatgtttattatccagaagatgcaagaa

SEQ ID NO: 135275 - DNA, 259 bp, Glycine max
tttccgttcatttcctctgttttttcttcaaatccattgtttcgtggaaatcccgaaatttaaccatgcttctccgaaccgccgcctccgccgcttctgcttcgtccctctccctcttcagccctacctccgaacctctccgttcggttcccgctcgtggattggtggttcgcgccgcgaaaggatccacgaaccaccgcgccctaaccggcgtgatctttgaaccgttcgaagaggtgaagaaggagctcgatctcgt

SEQ ID NO: 135276 - DNA, 256 bp, Glycine max
gatgcatcagataagatcttcactggtggtattgacaatgatgtcaagatttgggatttgcgtaaaggggaagttaccatgacacttcaaggtcatcaagacatgattactgatatgcagctgagtcctgatgggtcctaccttcttacaaatggcatggattgcaaactttgcatttgggatatgcgtccgtatgctccgcaaaatcgctgtgtgaaggtgttggaagggcatcaacacaactttgaaaagaact

SEQ ID NO: 135277 - DNA, 240 bp, Glycine max
tcggctcgaggtgactcgttcttcttcgtcgttatcttcttcttttgttgtttgtgtgtttgttttttctctcacctgaaaatgtcttgctgcggtggtaactgtggttgcggaagcgcctgcaagtgcggcaacggctgcggaggctgcaagatgtacccagacttgagctacaccgagtcaaccaccaccgagaccttggtcatgggagtggcaccagttaaggctcaattcgagagt

SEQ ID NO: 135278 - DNA, 264 bp, Glycine max
gctcgagcacaactactacaagtacttccttacaatcaaaaccaacaacaactatggcaagttatcaaaagcactacgatgatcagggtcgcaaggttgacgagtatggcaacgttgagaagcaaaccgacgaatacggcaaccctgttcatgctgctagtgtcacctatgtagccaccagaactgctgctggtggttacagtgatgacattaataagcaacatgataccaccaatgcctacggcgtagacactggtagacagc

SEQ ID NO: 135279 - DNA, 261 bp, Glycine max
atcagaattctcaacctcaaggttcacagaatgagaatgatccaaataatacaactaattttgttggtaatttggatcctaatgtcactgatgatcatctgaggcaagttttcagccagtatggagaattagtgcatgtgaagattccagcaggcaagcgatgtgggtttgtccaattcgcagacaggagctgtgccgaagaggcacttcgggtgttgaatgggaccctgttgggtggtcaaaatgttcgtctttcatggg

SEQ ID NO: 135280 - DNA, 236 bp, Glycine max
aaattgaaaagctttctagctggtcataatatcaccattactgatggtattgacaaaactagtgcaactttgcaatttagaaagttagcagattgtgattttctcaagagaaactttaatcagatgtctaatgttttgtgggtggctcctgaggacaaggcgagtttatggtcacaacttcattatgtttcgtgtaataatctggaaatgcaagaagcttatcttgtcaatctcgt

SEQ ID NO: 135281 - DNA, 259 bp, Glycine max
cgaggacaaggaaaggttagagttgtgaactgccaagggaatgcagtgttcgacggtgagcttaggaggggacaattgctggtggtaccacagaacttcgtggtggcggagcaagccggagaacaaggattcgaatacatagtattcaagacacaccacaacgcagtcactagctacttgaaggatgtgtttagggcaattccctcagaggttcttgcccattcttacaaccttcgacagagtcaagtgtctgagctta

SEQ ID NO: 135282 - DNA, 257 bp, Glycine max
cctctcttaattcataattcctcaccttcaaatctccattctgcttcattttctgcaaagaacaaacccctttctgaagaaagaatatagtcttcagctggacaaggatcatttattttgaaagacaagtttgtgtgacaatcttatagttctaagaagggtgcaagtgagagctttgctgtgatggcaacccgtagatattcttttggaagggctgatgaggccactcatccagactccatgagggccactttggc

SEQ ID NO: 135283 - DNA, 254 bp, Glycine max
tggagataaggtggtggtgaaagtggaagagagtcgaccaggggcaattgcggaaacactgaaagcagcggatcagattgcgggacagaccttcaacgatgtgggacgcttcgatgaagaagagggtgtcgtcaatgtggagcgccgcaagaaataaaataaaacgtcgtctatgatacaaatatagacgcatttatattatagtatattatcatgatgtatgttgtttactttttggtttgcttcctttacaa

SEQ ID NO: 135284 - DNA, 249 bp, Glycine max
cgagccgctcgagccgcaaggatggcaatttgtaagaaagatatttggagagttgaatgtggaatcacttctggatttccgctcacagttatttgcaatagcatttttaatgagatgctcattagatatagctatgaaaaattattgcgccaggctaaagctccaagtatgtttttacaatccttcaaaaattttgtttctttgtgtgtgtatggtgatgataacttaattagtgttcatgaatatgtc

SEQ ID NO: 135285 - DNA, 273 bp, Glycine max
cgagtgaggggggacagcgtaagtgagcgaatgtgtgtaagcccagtcaaacatgactgttctaggcggggcgggccacccaccttcgaatggtgttggtcctacggaccgtgaatggattcgcctctggcctctgggcacgtcggaaccgcatgagttcaccggggtggagcacagtccgccaaaatcggcataggttacgtgctattgatggaacatggtaagcctatctttctccatatggaagtgctgcgggcacatagagatgtgggt

SEQ ID NO: 135286 - DNA, 252 bp, Glycine max
tgcaaattgacacataaggttattccagagagaatgccagattgttcttatttcttgcaaggcttatgctcaaatagaaattgtccatatagacatgtcaatgtgaaccccaaggcatctatttgtgaaggatttctcaaggggtattgtgctgatgggaatgagtgtcggaagaagcacagctatgtctgtcctacttttgaagcaacaggaacctgtactcaaggaaccggatgcaaacttcatcacccc

SEQ ID NO: 135287 - DNA, 251 bp, Glycine max
tactacaagtacttccttacaatcaaaaccaacaacaactatggcaagttatcaaaagcactacgatgatcagggtcgcaaggttgacgagtatggcaacgttgagaagcaaaccgacgaatacggcaaccctgttcatgctgctagtgtcacctatgtagccaccagaactgctgctggtggttacagtgatgacattaataagcaacatgataccaccaatgcctacggcgtagacactggtagacagc

SEQ ID NO: 135288 - DNA, 248 bp, Glycine max
aattttagtggacaaaactggagattggatcacacttatacaaaattctccaattagtaacttgttgagagttgctgcttggaagaaaggctgtttaatggttaagattgtgatgtctgggaatgcagcagtcaaaaggagtgattgggcctcattggtacaagtgtttttaacaaacagcaacagtacagagcattttgatgcatgtaagtggacaaaatcggaaccacattcctgggaattgatct

SEQ ID NO: 135289 - DNA, 248 bp, Glycine max
aagtacttggattttggtcaagccctttcgttcatagagtgatatgggctctaaagttgaagaacattagttatgagtacatagaggttgataggttcaacaaaagtgagctacttcttcaatccaatccagtttacaagaaagtccctgtgcttattcatggaggcaaagccattgcagagtctcttgtcattcttgaatacatcgaagaaacgtggccagagaaccacccattgctgccaaaagac

SEQ ID NO: 135290 - DNA, 247 bp, Glycine max
agaaaggaaataattgatctttgaaaatgcagggaggaaagaaagctggagagtccatcaaggaaacagctgcaaacattggtgcttctgccaaggctggcatggagaaaaccaaggccactgtccaggagaaggcagaaagaatgacggcacgtgatccgatgcaaaaggagttggcaacccagaagaaagaggcaaagatgagccaggcagagctggacaagcaggcggcgcgtcagcataacac

SEQ ID NO: 135291 - DNA, 240 bp, Glycine max
attttcttctttccttcacattttctctctcaccattctcttcttcttctccctttcttagattctcccttttttctctttaccctccgccatggctgaggataaggagatgtcttcctctgtcaccaatggcgatgattctctcactggccacatcatatctacaactattggaggcaaaaatggggaacccaaacagactattagttacatggctgaacgggttgtaggaactggatc

SEQ ID NO: 135292 - DNA, 244 bp, Glycine max
catctctctgctctaaacgacaccgttttagtcctctcctcaagtcatggccacactcaagagcctctgcttcagaggaactgcctttcccgtttgcccctccaatgtcaccaacaatagaaactccaggagctcatattggaggcctgcacaagcagccgtgaagcccaatttccatctcccaatgcgcagttttgagttaaaaaataggacttctccagaggacataaaggctctgagattg

SEQ ID NO: 135293 - DNA, 130 bp, Glycine max
gttcagtgtgtcgtttaaaaatgtcgcagttgctggataaagccaagaacttcgtgtcggagaaggtaaatgatatggccaagccggagggacgtgtcactgacgtggacttcaagcgcgtgagctaaga

SEQ ID NO: 135294 - DNA, 212 bp, Glycine max
cggctcgaggtacggaattgaaagctgggcgagagggagtcgctataggggacaatataggcaagggttgaggcacggttatggggtttataggttctacactggggattcttattcaggagagtggtgtaacggtcagagccatggcgtgggtcttcaaacttgctccgatgctagctgttatattggtcaatttaagtatggcgtcaaac

SEQ ID NO: 135295 - DNA, 246 bp, Glycine max
tcgagccgaatcggctcgagccataaccatgtcagacgaggagcaccacttcgagtcaagcggctgatgctggagcatcgaagacatttccccagcaagctggaaccatccgcaaaaacggttacattgtcatcaagaacaggccatgcaaggttgtggaggtttcaacttccaaaactggcaagcatggacacgcaaagtgtcactttgttgcaattgacatcttcactgggaaaaagcttgagg

SEQ ID NO: 135296 - DNA, 245 bp, Glycine max
aagaggagaaacaaggaagaacaagagagaaagtagaggcagagaaagcaagatcaatggagaaaactagagatgaagctaaaggaagagaacaagctgaaaccaaaggtcaaaccaagaagggtggtggtgaggaacagggaagaagaagagaagaaataggagaagaagataaacaatgccagcctcgaaggatttctaaatgcagagctgtagctgaagagaaagttaaggagagataggag

SEQ ID NO: 135297 - DNA, 253 bp, Glycine max
accaaaacagtaaagctaacttcaacacctttaattttctaaaagtaattcagcggttgaataccaagcggagaagatgagtcaggagcagccacggcgtcccaaaggccaaaaccccatcaaatacggcgacgtttttgtcgtctccggcgaccttgcacagaagcccgtcgcaccggaagatgctgccatgatgcaaagcgcggaaactcgagtgctcggacaaacccaacccggcggagcagcttccgtc

SEQ ID NO: 135298 - DNA, 245 bp, Glycine max
gtttatggtcacaacttcattatgtttcgtgtaataatctggaaatgcaagaagcttatcttgtcaatctcgtaaatgtgttacgagaattgtatttgcacagtccagaggaagctcgccaattgagaaggaaagctctctctcgtattgaatggctgcaaaaagctgatgtgcctaccatagcacagattgaagagttccattcgatgcagaggatgatgaatgctcctgattcaaatgataat

SEQ ID NO: 135299 - DNA, 241 bp, Glycine max
ccgcacttctgctccgcaattatcatgggcaaggtcaagatcggaatcaacggatttggaagaattggccgtttggtagccagagtggctctgcagagagacgatgttgaactcgttgccgttaacgaccctttcatcaccaccgattacatgacatacatgtttaaatacgacagtgttcatggacactggaagcatcacgatgtcaccgttaaggacgagaagacccttctcttcggtg

SEQ ID NO: 135300 - DNA, 105 bp, Glycine max
caagtacttccttacaatcaaaaccaacaacaactatggcaagttatcaaaagcactacgatgatcagggtcgcaaggttgacgagtatggcaacgttgagaagc

SEQ ID NO: 135301 - DNA, 235 bp, Glycine max
gttggattgagttaccccactctacctaattggttcccttctctcctttttcctatctacatacacaatctacacaaagccgtttggggattttcgcccagaacatggtcagagcggcggacatcaggcgctggaccccaccgccgtccacggcgtcacgcagttctccgatctcaccgaggacgagtttgagaagctctacactggcgtcaatggcggcttcccgtcatcgaat

SEQ ID NO: 135302 - DNA, 238 bp, Glycine max
atcccggggaagttgtgaagcctgattcatacaaggctataaatgatgagggaatgcccatgtatcagaggccattcatgaaggggaaactttacattcacttcactgtggagtttccagattctctaaaccctgatcaagttaaggccttggaggctgttctgccaccaaagccttcttcacaattgacagacatggagctggatgaatgtgaggaaactacactccatgatgtcaa

SEQ ID NO: 135303 - DNA, 241 bp, Glycine max
gtggaagggaccaaggccgccgcccatgttgtcgagggagcggccgggtatgccggacataaggccgcggacttgcttcgatgtcggccggtgctgttaaagggctggctgcttctgctggtgagactgctaaggaatacaccgcaaagaagaaagaggaggcacagcgggaattggaggccaaaaaaaccatctcaacctcaggaagctgaagagaggccatcagaaggaattggcgaaa

SEQ ID NO: 135304 - DNA, 244 bp, Glycine max
cctcgtcatgaagatgctccagattcagcccgagaaagaaatcgtcattgagttcataaaaaacgaggattacaagtacgttaggattctcggtgctttttacttgcgtatcactggttctgacattgacgtctaccgctacctcgaacctttatacaatgactatcgcaaacttagacgaaagctcgctgatggacagtttacattgacgcacgtggatgaggttatagatgaacttctcaca

SEQ ID NO: 135305 - DNA, 243 bp, Glycine max
acacaactactacaagtacttccttacaatcaaaaccaacaacaactatggcaagttatcaaaagcactacgatgatcagggtcgcaaggttgacgagtatggcaacgttgagaagcaaaccgacgaatacggcaaccctgttcatgctgctagtgtcacctatgtagccaccagaactgctgctggtggttacagtgatgacattaataagcaacatgataccaccaatgcctacggcgtag

SEQ ID NO: 135306 - DNA, 237 bp, Glycine max
caaaaagtttacgttacaaatcgcataataaccgtcctaagtttattgagagaattttgcaagtgtgagaaacatggcatctcgtcaaaacaacaagcaagagcttgatgaaagagcaaggcaaggagagactgttgtcccgggtggaactggtggcaagagcctggaggctcagcaacaccttgctgaaggaaggagcaagggagggcaaacaaggaaggaacagctgggtacaga

SEQ ID NO: 135307 - DNA, 236 bp, Glycine max
gaccactgttcattccatcaccgctacccagaagactgttgatggaccatcagccaaggactggagaggtggaagagctgcttcatttaacatcattcctagcagcactggagctgccaaggctgttgggaaagtcctccctgctttgaatggaaaattgactggtatggcattccgtgttcccaccgtggatgtctctgttgttgacctcacagtgaggctggagaaagaagctt

SEQ ID NO: 135308 - DNA, 233 bp, Glycine max
tgcagaccgagctagctagctagcaagcaagcacagagatggaggcaaagcgaggccatgccctcatgtgcttggcacgtgtttcactcttcctctgcgctctaaccctatccgctgctcacggaagcaccacggttcaagacatcgcgagaaagttgaaactcggggacaacgagcttctgcgcacggagaagaagttcaaggttttcatggagaattacgggaggagctac

SEQ ID NO: 135309 - DNA, 230 bp, Glycine max
aaagctaacttcaacacctttaattttctaaaagtaattcagcggctgaataccaagcggagaagatgagtcaggagcagccacggcgtcccaaaggccaaaaccccatcaaatacggcgacgtttttgtcgtctccggcgaccttgcacagaagcccgtcgcaccggaagatgctgccatgatgcaaagcgcggaaactcgagtgctcggacaaacccaacccggcgga

SEQ ID NO: 135310 - DNA, 233 bp, Glycine max
ggatattgtcgtagggagtgtattggctcctggagctcaaagagctagtgaatgccgaatggctgcattttatgctggttttcctgaaactgtgcctgttaggactgttaataggcaatgttcatctgggctccaggctgttgctgatgtagctgctgctataagggctgggttctatgacattggtattggtgccggtttggaatctatgacaactaatccaatgggatggg

SEQ ID NO: 135311 - DNA, 241 bp, Glycine max
cagtttggagagattcaggaaaaagttgtattgaaattttcacaagaggaatttcttacagcttggtcaactcaggtgcgtcctgcaacaactctattggctgatgggtgtccatatttgtatgctatggtgcatgatagttcagtgtctacaataccaggtgattttgtcattggtgttaagttgacaaccataaacaatatgtgtgtatatgggctcaatcctggtatttcaggttctc

SEQ ID NO: 135312 - DNA, 237 bp, Glycine max
gaaagagagagaagaagaaaagaagaacaaagatgcaatcctcaaaggagaagatgaaaaacatggcaagtgctgccaaggaacaagtcgacatctataaagccaaaatagacgagaaggcagagaaagcaacggcaagaacagaagaggagagggtgatagcccatgagcacgcaaaggcaaaggaagctggagcaaagatggagctgcatgaagctaaagcaaggcatgcagcag

SEQ ID NO: 135313 - DNA, 235 bp, Glycine max
aatgggaacttttcttgtggtccaaacaattaccgtcagaaaggtcctcggattgcaaaggttgtccggcgcatcaactgcaatgttgaaccattagaatttggagttgtgctctctggaaagtcttggtgcagtagtcaggctatctttccaaagggatttagaagccgtgttagatacataaatgtcttagatccatccagtatgtgttattatatttcagaaattcttgatg

SEQ ID NO: 135314 - DNA, 239 bp, Glycine max
gatggggtatttgtacgtcaaaggctatggagttgaccagaagaactacaccaaggccaaagagtattttgagaaggctgctgataatgacgaggttggcggccactataaccttggcgtcatgtatctcaaggggattggagtcaatagggatgttaagctcgcctgtaagttctttgttttcgccgctaaccatggccaaccaaaggccttctaccagctcgctaagattttccata

SEQ ID NO: 135315 - DNA, 218 bp, Glycine max
gagctatagaaattatcattgatagtttcgcaagtcctgactgcaacatagttggtgcaatgcttttggttgatacttatcataccaatcctgaaaatgcagttcgtagtatttttgttgcgcctttcagaggcggaaggcccatacgggtggttacatttccgaataccatcgtgcagattgaaccagacatgaattcaaggtttcagcttttgagt

SEQ ID NO: 135316 - DNA, 216 bp, Glycine max
taatgggtgatgtggttacagtttgtgatatctgtggggatcaaggatttgaagagtatcttgctatttgtaacaagtgtcctgatggggcagaacacatttattgtaatgatgaaaagttggaaaaagtgccagatggtgattggtggacctgcgaagactgcaggaagtcaccaggtaatgaattaccaacattgggctcacaaaccgagatag

SEQ ID NO: 135317 - DNA, 248 bp, Glycine max
cctggaggacacagtgacaagtagatgcatcgtgcatcatgcatgcatgcatatatataatattgttgtctttgaataaatttgctgcatatgtacttacgtacgtacagtgtcttgtcatgtatgtggaggatatagtatatggttatagtttatgtagaagaataaaaaatgtatgcatgtagtaatgtaagggtcttatatatgtggctgaaatataaaccataataaaggcagagatgttgtgc

SEQ ID NO: 135318 - DNA, 251 bp, Glycine max
tctctcctttcattaacgttgtgttgggtttgctagtgtacttggttttcattatggcgtcttcttcagcctctcgtgagggacactacagaggagttaggaagcgaccatggggacgctacgctgcagaaataagagatccgtggaagaagacacgtgtctggctgggcacattcgatactcccgaggaagccgccctcgcctacgacggcgccgctcgctccctccgcggcgccaaggccaagaccaac

SEQ ID NO: 135319 - DNA, 193 bp, Glycine max
ccggtcgcttcgtgcgccaaggaactcaaatctgttaagtgcgactcccgggggcccggagacggtgtcccgcgggagtcgtcatgacacaacatttacatacaatgactctcgtcaacggatatctcggctcttgcatcgatgaagaacgtagcgaaatgcgatacttggtgtgaattgcagaatcccgtga

SEQ ID NO: 135320 - DNA, 229 bp, Glycine max
ctctcttctattctattctaaactcgaaacaatcttagagaaagaagcagaagaaaatgccgatttctagaattgccattggaaattcttcggagttgaaccaatctgatgcacttaaggctgcactagctgagttcatctcaatgctcatctttgtttttgccggggaaggctctggaatggcttataataagctgacaaacaatggttcagcaacaccagcagggtt

SEQ ID NO: 135321 - DNA, 232 bp, Glycine max
aaaccttgctctatactacacagtacacacactagaagaataatggcttccatcctccactactttttagccctctctctttcttgctcttttcttttcttcttatccgactcagtcacccctacaaaaccaataaaccttgttgttctacccgttcaaaatgatggttccacagggctccattggtccaacctccaaaaaagaacccctctaatgcaagtaccagtcctgg

SEQ ID NO: 135322 - DNA, 231 bp, Glycine max
gaaaaggcatctggttttgaggaatctatgaagtataagaagctcaccaatgctcagaggtctggtctaaaccagatacccaaccgaagatttacactatggtggtcgccaaccattaaccgagccaatgtttatgtgggtttccaagtgcagctagatctgactggtattttcatgcatggaaaaataccaactttgaagatatcccttattcagatattcagagctcac

SEQ ID NO: 135323 - DNA, 236 bp, Glycine max
gcgaggtgttaccggcagataaagaacaaaccgtacccgaaatcccgtttctgccgcggcgtgccggagccgaagatccgaatctacgacgtgggaatgaagaagaaaggcgtggacgagttcccgttctgcgtgcacctggtctcgtgggagaaggagaacgtctccagcgaggctttggaggcggcgcgcatcgcatgcaacaagtacatggccaagttcgccggaaaagatgc

SEQ ID NO: 135324 - DNA, 224 bp, Glycine max
attcccaattacccttcccaattttcaccaaaacctaatactcccacaccaatcttcgatcatggacgccgattcacaacctcaacaactcgaagagagaacagaggagcaagaactgaagtacctggaattcgtgcaattcgcgaccatacaggctctgatgcgctgcgccatcctctactcatacgccaaggagcgcgcgggtcctctgaagcccggtgtcg

SEQ ID NO: 135325 - DNA, 226 bp, Glycine max
gtgcaacctttgctgtggtagtggaagcacacaaagagcacaacgttacatatagtaactatggcgagagtgggtagaatgaaacttggttcagaagggtttgaagtgtctatgcagggacttgggtgcatgggcatgtctgcattctatggtcctcctaagccagagcccgatatgattgcactcatccaccacgccgtccaaagcggtgtcacttttcttgaca

SEQ ID NO: 135326 - DNA, 246 bp, Glycine max
tgatcagggtcgcaaggttgacgagtatggcaacgttgagaagcaaaccgacgaatacggcaaccctgttcatgctgctagtgtcacctatgtagccaccagaactgctgctggtggttacagtgatgacattaataagcaacatgataccaccaatgcctacggcgtagacactggtagacagcattctagtggtggctacgatggtgacactaataaacatcatggaactactggtggctataa

SEQ ID NO: 135327 - DNA, 220 bp, Glycine max
gagccgattcggctcgagctactacaagtacttccttacaatcactaccaacaacaactatggcaagttatcaaaagcactacgatgatcagggtcgcaaggttgacgagtatggcaacgttgagaagcaaaccgacgaatacggcaaccctgttcatgctgctagtgtcacctatgtagccaccagaactgctgctggtggttacagtgatgacattaa

SEQ ID NO: 135328 - DNA, 223 bp, Glycine max
gcatatatatcaaaatggctgcagagatggagagggagtcattgataactgaagctcctaatgcaccagttactgcacagagaagggtcagaaatgacttagaaaattctctaccaaaaccatacttgccaagagcattgaaagctcctgatacgggtcacccaaatggaacagcaggccacaggcaccacaacttatctgttcttcagcagcattgtgcttt

SEQ ID NO: 135329 - DNA, 227 bp, Glycine max
cttctgcacctatgctttcctctaccaccagaaggagatgctctccgaccgcgttcgcatggacgcttacttcgacgccatttttcaaaacaaacgccacttcgctggcaagactgttttggatgtggggactggaagtggcattcttgctatatggtcggcacaagcgggtgcgaggaaggtgtatgcagtggaagcaaccaagatgtcagaacatgcgcgtgcac

SEQ ID NO: 135330 - DNA, 178 bp, Glycine max
ggtgttgcagaccaacaccaacaagaagaacatcagttagatcaacaaaagcgtggtgtaatcggatccatgttcaaggcggtgcaagacacctacgagaacgccaaggaagcagtcgacggcaagaaagaaccttcgacgacgactaactcgtacagtaccagagaggttattcacg

SEQ ID NO: 135331 - DNA, 240 bp, Glycine max
gtgatgataacttaattagtgttcatgaatatgtcaagccttactttagtggttctaaattgaaaagctttctagctggtcataatatcaccattactgatggtattgacaaaactagtgcaactttgcaatttagaaagttagcagattgtgattttctcaagagaaactttaagcagatgtctaatgttttgtgggtggctcctgaggataaggcgagtttatggtcacaacttcatt

SEQ ID NO: 135332 - DNA, 216 bp, Glycine max
caatgccgccgccgccccaccacgccagctctcccagaaggaagctgacatccagatgatgttggccgccgacgtccacctcggcaccaagaactgcgacttccaaatggaacgttacatcttcaagcgccgcaacgacgggatttacattattaaccttgggaagacgtgggagaagcttcagctagcagctagggttatagttgcaattgagaa

SEQ ID NO: 135333 - DNA, 214 bp, Glycine max
ttccttctctagcacaatttacaatctcaatggctggaatttgctgtggtgttgttggagaaggtgacactccggctccactcgagcccactcctcgcccctccaggcgccggagtttggacatcttacctttaaaatatatcgccgacatgcccatgccgccgccggaggctttacggaagcgtcccaagctcaacctcagggactgcgataa

SEQ ID NO: 135334 - DNA, 216 bp, Glycine max
gtttgatcctggctcagaaggaacgctagctatatgcttaacacatgcaagtcgaacgttgttttcggggagctgggcagaaggaaaagaggctcctagcgtgaaggttgcttgtctcgcccaggaggtgggaacagttgaaaacaaagtggcgaacgggtgcgtaatgcgtgggaatctgccgaacagttcgggccaaatcctgaagaaagctaa

SEQ ID NO: 135335 - DNA, 219 bp, Glycine max
ctcgagccgtggaatttcgatgctcagtcatctcttttaccattctcttctctcttgctcttgcaggagagagccatgtccatgcatcgctacctgaggaagattattgggaagctgtttggccaaacactcccattcccactgcactgcgagagcttctaaagcctctccctgcaggtgttgaaatcgatgaactccctaagcaaattgatgatacac

SEQ ID NO: 135336 - DNA, 246 bp, Glycine max
tgatgctattttggcttacaaaaggggtctcgaaatcgaccctcacaacgagccccttaagtctggtttggcagatgcgcagaaggccttggccgcggcctccaggcctcgcccctcggcctctaaccccttcggtgatgctttctctgggcctgagatgtgggcccgtctcaccgcagaccccaccactagggcttacctccaacagcctgatttcgtgaagatgatgcaggatatccagagaga

SEQ ID NO: 135337 - DNA, 246 bp, Glycine max
aaaagaaagaatcccaggcgaggagaaagatggaggggaaggagcaggatgtgtcgttgggagcgaacaagttccccgagagacagccgattgggacggcggcgcagagccaagacgacggcaaggactaccaggagccggcgccggcgccgctggttgacccgacggagtttacgtcatggtcgttttacagagcagggatagcagagtttgtggccacttttctgtttctctacatcaccgtct

SEQ ID NO: 135338 - DNA, 195 bp, Glycine max
caagcttcagcctttgatgatgaagtaccgaaaagagaaagagagggttgatgagattcgaaggctcaagaagaaaagagaagagcttctttttgctttacaagaggctgagagaagatatgatctggctagagctgcagacctgcgatatggagcaattcaagaggtggaaactgcaatacaacaacttgaagg

SEQ ID NO: 135339 - DNA, 243 bp, Glycine max
aatggaggatagtcgctatgtgaaatacaaggatttggaggattataagcgtcagggttatggtacacaaggtcatcaagaaccaaagacaggtcgtggagctggagccactgaagcacccactctctctggtgctgcagtttcatctgatgcacaagtcgctgccactgatgccattaacagtaaaggagtcccttaattattcacacttcctagaatagatcgttcctttgctaataagaa

SEQ ID NO: 135340 - DNA, 214 bp, Glycine max
gacattgtattgtgtctatgtagcgataggacagaaacgctcaactgtggcacaattagttcaaattctttcagaagcgaatgctttagaatattccattcttgtagcagccaccgcttcggatcctgcacctctgcaatttctggccccatattctgggtgtgccatgggggaatatttccgcgataatggaatgcacgcattaataatctat

SEQ ID NO: 135341 - DNA, 245 bp, Glycine max
ggctcttatgttggtgaagttgtcaaagtcatgggcaagaacaaagtccttgtcaaggtccacccagaaggaaaatatgtcgttgatattgacaaaagtattgacattacaaagattactccatccactagagttgcacttcgcaacgacagttatgttcttcacttagttctgccaagtaaagttgatccattggtcaatctgatgaaagttgagaaggttcccgattctacttacgacatgat

SEQ ID NO: 135342 - DNA, 238 bp, Glycine max
ccgctcgagccgaatcggctcgagcagttgcagaccgagctagctagctagcaagcaagcacagagctggaggcaaagcgaggccatgccctcatgtgcttggcacgtgtttcactcttcctctgcgctctaaccctatccgctgctcacggaagcaccacggttcaagacatcgcgagaaagttgaaactcggggacaacgagcttctgcgcacggagaagaagttcaaggttttca

SEQ ID NO: 135343 - DNA, 236 bp, Glycine max
aaacagtaaagctaacttcaacacctttaattttctaaaagtaattcagcggctgaataccaagcggagaagatgagtcaggagcagccacggcgtcccaaaggccaaaaccccatcaaatacggcgacgtttttgtcgtctccggcgaccttgcacagaagcccgtcgcaccggaagatgctgccatgatgcaaagcgcggaaactcgagtgctcggacaaacccaacccggcgg

SEQ ID NO: 135344 - DNA, 227 bp, Glycine max
gaccgagctagctagctagcaagcaagcacagagatggaggcaaagcgaggccatgccctcatgtgcttggcacgtgtttcactcttcctctgcgctctaaccctatccgctgctcacggaagcaccacggttcaagacatcgcgagaaagttgaaactcggggacaacgagcttctgcgcacggagaagaagttcaaggttttcatggagaattacgggaggagct

SEQ ID NO: 135345 - DNA, 249 bp, Glycine max
agaatcaaagaaaggggtggtggctgcttcgaaagcttaataatttgtttatttccagaacatcatagttttcgcagcagcaaactaacaaattactcatatcatataataagatggcccgttctctctcgcaagccaaacgtattggtgtccttgttgctcaatctatctctctaattcccgttcatcggcgaggttacgcagtggcatccgatgtatcggtaagagttggattgggtaatattgggc

SEQ ID NO: 135346 - DNA, 249 bp, Glycine max
gtacttccttacaatcaaaaccaacaacaactatggcaagttatcaaaagcactacgatgatcagggtcgcaaggttgacgagtatggcaacgttgagaagcaaaccgacgaatacggcaaccctgttcatgctgctagtgtcacctatgtagccaccagaactgctgctggtggttacagtgatgacattaataagcaacatgataccaccaatgcctacggcgtagacactggtagacagcattcta

SEQ ID NO: 135347 - DNA, 218 bp, Glycine max
acctgtttgcgatctcattacaatctccccagtttctaatctcagctaagaaaaaccaaaagatgtctctgattccaggtttcttcggtgcccgaaggagcaacgtcttcgatccattctcactcgacatttgggatcccttcaaggattttcatgttcccacttcttctgtttctgctgaaaattctgcattcgtgagcactcgtgtggattggaag

SEQ ID NO: 135348 - DNA, 222 bp, Glycine max
aggagctgtcaccgaagttaagttacagggtagatgtggatcatgctgggctttcagcaccacaggatctatagaaggagccaattttcttgccaccggaaagctcgtcagtcttagtgaacaacagctccttgactgtgacaacaagtgtgacataacagaaaagacttcatgtgacaatgggtgtaatggaggtcttatgacaaatgcctacaattattt

SEQ ID NO: 135349 - DNA, 274 bp, Glycine max
cggaatcggctcactcgagcgaatcggctcgagcaccagcttcactgtccatctacgacaccctcagtgtactattttgggtcccagtgactgacaggatcattgtgccaattgctacaaagttcactgggaacaaaaatggcctaactagctccagagaatgggaattggcctcttcatatccatattttccatggtagctgcagcaatattggagctcatacggcttagaatggtgaggaggcacaactactatcaacttgaggagatacca

SEQ ID NO: 135350 - DNA, 259 bp, Glycine max
atcctttgatcaaccaaggtgcatggacgaatgaagaggacaaatctcttttacttattgtccaagatattggcatcaggaactggtttgatattgccacatcattgggcacaagcaggactccatttcaatgcttgcacgattccaaaggagcttaaatccttccatgctaaatagtgaatggactgaggaagaagattctcaactctgtcctgctgtggcaagttttggtgctagggattggcaatctgtggcttct

SEQ ID NO: 135351 - DNA, 257 bp, Glycine max
caagattgctgattttggcctagccagagagatcagttcactaccaccctatactgagtatgtctccacacggtggtatcgtgctcctgaagtcctgcttcagtcccatctatatagctctaaagttgatatgtggcaatgggtgctataatggctgagttgttcactctccgtcctctattccccggttccagtgaagcagatgagatttacaaaatatgcagtgtgctaggtagtccaaccactgaatcttgggc

SEQ ID NO: 135352 - DNA, 260 bp, Glycine max
agacacgtaatcaaaaccatgcagatacgaacctgccactccatcaccacccaaacccttccacaacttccgtgttcctctagacaagcccaccaccgccaccttcttccgccgttaaacgctgcggtttccgcggcgcgttcaaagcccggaaggcccactcaatgcctccagataagacagagattttcaagtccttggagcgatgggcctcggagtgggtcctaccgctgctgaagcccgtggagcaatgctggcag

SEQ ID NO: 135353 - DNA, 254 bp, Glycine max
aagcttagaattagaaacaaagaaaagaagaaaggaaagaattgatcgttgaaaatgcagggaggaaagaaagcgggagagtccattaaggaaacagctacaaacattggtgcttctgccaaggctggcatggagagaccaaggccactgtccaagagaaggcagaaagaatgacagcacgtgatccggtgcaaaaggagttggcaacccaaaagaaagaggcaaagatgaaccaggcggagctggacaagcag

SEQ ID NO: 135354 - DNA, 258 bp, Glycine max
caagtttcctctcaattgtccaccacttactaggatttattttttatttttgtttcaggaaatagtttcaatataccctgttctttcaccaccaaatcttactcctgcacaatcgaaccgagtatgcaatgctcttctcttcttcagtgtgtagcatctcaccctgatacaaggatgctattcctcaatgctcatatacctctatatctgtatcccttccttaatacaacaagcaagtcaagaccatttgagtacttg

SEQ ID NO: 135355 - DNA, 262 bp, Glycine max
caactacaagaaagaacttccttataagcaaaaccaacaacaactatggcaagttatcagaagcactacgatgatcagggtcgcaaggtcgacgagtatggcaatgttgagaggcaaactgacgaatatggcaacccgttcatgccactagtgtcacttatgtagccaccaaaagtgttggtggctacaatgatgacgctaataagcaacatgatattactggtgtctatcccgagacagacaccggtagacatcattttgg

SEQ ID NO: 135356 - DNA, 257 bp, Glycine max
agctgctgttggcttgttgttcaaggatggcaatttgtaagacagatatttggagagttgaatgtggaatcccttctggatttccgctcacagttatttgcaatagcatttttaatgagatgctcattagaatagctatgaaaaattattgcgccaggctaaagctccaagtatgtttttacaatccttcaaaaattttgtttctttgtgtgtgtatggtgatgataacttaattagtgttcatgaatatgtcaagc

SEQ ID NO: 135357 - DNA, 259 bp, Glycine max
cacacaactactacaagtacttccttacaatcaaaaccaacaacaactatggcaagttatcaaaagcactacgatgatcagggtcgcaaggttgacgagtatggcaacgttgagaagcaaaccgacgaatacggcaccctgttcatgctgctagtgtcacctatgtagccaccagaactgctgctggtggttacagtgatgacattaataagcaacatgataccaccaatgcctacggcgtagacactggtagacagca

SEQ ID NO: 135358 - DNA, 264 bp, Glycine max
caaagccataggcatcgatctcggcacgacctacagctgcgtgggcgtgtggcaaaacgaccgcgtcgagatcatccccaacgaccaaggcaaccgaaccactccctcttatgtagccttcaccgacaccgagaggccatcggagacgcggcgaagaaccaagtcgccatgaacccgcagaacaccgtcttcgacgccaagcgtttaatcggtcgcagattctcagactcttcagttcaaaacgacatgaagctgtggccgttt

SEQ ID NO: 135359 - DNA, 171 bp, Glycine max
gctctatactacacagtacacacactagaagaattatggcttccatcctccactactttttagccctctctctttcttgctcttttcttttcttcttatccgactcagtcacccctacaaaaccaataaaccttttgttctacccgttcaaaatgatggttccacacaaca

SEQ ID NO: 135360 - DNA, 255 bp, Glycine max
tagaaagagagagaagaagaaaagaagaacaaagatgcaatcctcaaaggagaagatgaaaaacatggcaagtgctgccaaggaacaagtcgacatctataaagccaaaatagacgagaaggcagagaaagcacggcaagaacagaagaggagagggtgatagcccatgagcacgcaaaggcaaaggaagctggagcaaagatggagctgcatgaagctaaagcaaggcatgcagcagagaagctaagcgccaac

SEQ ID NO: 135361 - DNA, 256 bp, Glycine max
caaaagtgttccacttgagtgaaaagtagtgtgttaagaactaaacaatttttcaatggcgtccaagaaacaagaggagcgagctgaggcagctgcgaaagttgctgccaaagaactcgaacaagtcaacaggaaagaagagaccgtgatttcggtgttgttgctgaacaacaacaacaacatcatcaggaagatcaacaaaaacgtggtgtaatcgggtccatgtttaaggcggtgcaagacacctacgagaacg

SEQ ID NO: 135362 - DNA, 257 bp, Glycine max
aaaatgatacgtcttatttgtatagtagtggggaattatgggacaaaaaataaatccgcttggtttcagacttggtacaactcaaagtcatgattctatttggtttgctcaaccaacaaattattccgagaaatacaagaagataaaaaaatacgagattgtatcaaaaattataacttgaataagatcaattcttttttgaatctttatctgtccaattccctcaacaccagaggatattcttatatttggttgta

SEQ ID NO: 135363 - DNA, 252 bp, Glycine max
gtgctctggttgaagctttgttcgagggaactgagaaaggttttgctaaagaagctgataaaaagaagaactacttttctgttgctgttgcggatgagggatcccagccgttgttgctttttgctattgagagttttcttgcaagtctacttcaaatgctttgaaggaggttgccctggttctaaaggcactctacgatgctgatgtgttagaggaagaacacatagtgcagtggtatcaaaagggactgaa

SEQ ID NO: 135364 - DNA, 248 bp, Glycine max
gctgcacatacattagtgaagaagccattggataaggccactgagggagggagagaggtgttgggagctgtaggtgaaactgtggttgagattggtgaaaacatggtgaaaaaaccagcacagaaagtgagcagcatcaaggtgaaggtggaggaggggtgctgaatgccattggtgaaaccatagcagagatagcagagacaactaaggtgattgttgctggagagggagaaaaggagataatagta

SEQ ID NO: 135365 - DNA, 249 bp, Glycine max
cagtttggagagattcaggaaaaagttgtattgaaattttcacaagaggaatttcttacagcttggtcaactcaggtgcgtcctgcaacaactctattggctgatgggtgtccatatttgtatgctatgtgcatgatagttcagtgtctacaataccaggtgattttgtcattggtgttaagttgacaaccataaacaatatgtgtgtatatgggctcaatcctggtatttcaggttctcgtcttttgg

SEQ ID NO: 135366 - DNA, 250 bp, Glycine max
gtcctagtctcaaccataaacgatgccgaccagggatcagcggatgttgcttttaggactccgctggcaccttatgagaaatcaaagtctttgggttccggggggagtatggtcgcaaggctgaaacttaaggaattgacggaagggcaccaccaggagtggagcctgcggcttaatttgactcaacacggggaaacttaccaggtccagacatagtaaggattgacagactgagagctctttcttgatt

SEQ ID NO: 135367 - DNA, 257 bp, Glycine max
ctggcgtcaatggcggcttcccgtcatcgaataatgccgacggcggtattgcgccgccgttggaggtggacgggctgccggagaattttgattggagagagaaaggagctgtcaccgaagttaagttacagggtagatgtggatcatgctgggctttcagcaccacaggatctatagaaggagccaattttcttgccaccggaaagctcgtcagtcttagtgaacaacagctccttgactgtgacaacaagtgtgac

SEQ ID NO: 135368 - DNA, 258 bp, Glycine max
cccaacaaaccggtttaggtgaactaggagaagacgttcttgcaatccacgccacacaagggtcgacccaacaacttggcccattggtcacagtcccacaattcctcttttcttgtgcaccttccttccttgtcaaaagggtcttcctagaaacactcaaggtgtggctgggttaggccatgcaccaatttctcttccaaaccaactcgcttcccactttggcctacaacgccaattcaccacttgcctttctcgcta

SEQ ID NO: 135369 - DNA, 253 bp, Glycine max
gactgaggttgggtttggaaggcaagggcttgtgttgtcacaatccaagagagaagtaatggcgaacatagacatcgaagggatcttgaagcagcagcagccttatgatgggcgcgttccgaagacgaagtagtgtgtactttgggccctgcttctcgatccgtagaaatgaccgagaagcttctgagggcagggatgaacgttgctcgtttcaatttctctcatggcacccacgactatcaccaggaaaccc

SEQ ID NO: 135370 - DNA, 252 bp, Glycine max
ggagcatttggtgaaggctgggttgaatgttgtagtgttggatagttctcaggggaactcaatttatcagttagagatggtgaagtatgtgaagagggtttaccctgagcttgatgtgattggggggaatttgtgactatgtaccaggctgagaatctgattcaggctggggttgatgggttgagggttggaatggggtctgggtccatttgtactactcaggaggtttgtgctgtggggcgtggtcaggca

SEQ ID NO: 135371 - DNA, 253 bp, Glycine max
taggaatataagaactaagatggattggatcggagcgtaccgcggaggccagagaagcagggactggtgcgacccttcatcaccattcactgatttgtgggaccctcgtcgtgtcggtgacgctgatgatatcacctcctctctcgcccatgctcacgttgactggcgtgagactgataaagctcatatcttccgtgctgatcttccaggggtgaagaaagaggatctgaaggtgcaggtggaggagaataag

SEQ ID NO: 135372 - DNA, 251 bp, Glycine max
gcagaagcaggcgagtgaggaagagcgaagagtgaagagaatggctcccaagggtttaacctttctggctgtgttaatatgcgtttcagcactgtcactgagtccttctgttgcgggggaagggcaaaaaatggccttgttatgaacttctacaaggaatcatgccctcaggctgaagacatcatcacagaacaagtcaagcttctctacaagcgccacaagaacactgctttctcctggctcaggaacat

SEQ ID NO: 135373 - DNA, 247 bp, Glycine max
tatgatgtgacaacaattagagcaagcattcccatgtttcttatgtctcgtaagatcaagtcattgggagtcaaatgggttatatctggagaaggatctgatgagatctttggagggtatctatattccacaaggcaccaaacaaagaagaatttcatcaagaaacatgccgcaagattaaagcactccacaaatatgattgcttgcgagccaataaatcgacctttgcctggggtctagaagccag

SEQ ID NO: 135374 - DNA, 250 bp, Glycine max
tgtagtttcttcttccagcgcaagaactcgcggtctctgatccgaaaagtggaagtttttcagttgcttttggagtatttgcgtgattcccaatcgggttcttcgtgtcttccacccacgacggtactcatctcaaggagctctacctcttgctctaccgctccaagattctcctcgattactgcgcccaatcgagtaagttgtggctcttgcttcagactcattccatctctggtcacttccatgattt

SEQ ID NO: 135375 - DNA, 252 bp, Glycine max
gaagagaagttttgtgcaaaatccttgggaacagtaattggttttgccatttcaaagctgggaaagaacattcaagtactttcaagttcctttgtcaataagcaagagcaatacactgtggaaggagtgagaatcttggagacaaagcagtgatgtgtcatgggctaaatttcagaactgcagtattttactgccataaagtccgtgaaacaacagctttcatggttccattggtggctggtgatggaacca

SEQ ID NO: 135376 - DNA, 253 bp, Glycine max
agaaaccttaaaaacaacaacgtaggagtgttcggaaaagatggctaagcaggaagtggtggaagggttcaagttcgagcagaggcacgggaaagaacgcgtgagagtggcgcgcgtgtggaagacgagcaggggcagcacttcattgtggagtggcgcgtggggatcactctcttttcggattgcgtcaactcgtacctccgcgatgacaactctgacatcgttgctactgataccatgaaaaacaccgtgt

SEQ ID NO: 135377 - DNA, 251 bp, Glycine max
agaagaaaggctcttcatcttctaaggatggcactgctaaatcaacctcttctaagaaaaaagcaagtggctctgatgaagaccacacttcacctactcacagtcaaattgacgagaaagaggaggctcagatgaagatgatgacgacgacgtgcaatggctgacagatacatcacttgatgctgcccgtcaacgtatccaagaacagttaagtgctgtgacagctgatatggttatgctttctacagatg

SEQ ID NO: 135378 - DNA, 245 bp, Glycine max
cctcgagccgattcggctcgacacacaactactacaagtacttcactacaatcaaaaccaacaacaactatggcaagttatcaaaagcactacgatgatcagggtcgcaaggttgacgagtatggcacgttgagaagcaaaccgacgaatacggcaaccctgttcatgctgctagtgtcacctatgtagccaccagaactgctgctggtggttacagtgatgacattaataagcaacatgatacc

SEQ ID NO: 135379 - DNA, 244 bp, Glycine max
gaaaaagttgtattgaaattttcacaagaggaatttcttacagcttggtcaactcaggtgcgtcctgcaacaactctgttggctgatgggtgtccatatttgtatgctatggtgcatgatagttcgtgtctacaataccaggtgattttgtcattggtgttaagttgacaaccataaacaatatgtgtgcatatgggctcaatcctggtatttcaggttctcgtcttttgggcaccattcctca

SEQ ID NO: 135380 - DNA, 249 bp, Glycine max
gatctccatatctgttcccaaaagcttgtttgtaagaatggcttccggtgaacagaaattccctcctcaacaacaacaaacacagcctgggaaggagcatgctatgactccagtaccccaattcacagccctgactacaagccttcaaataaacttcaagggaagattgcattagtcactgggggtgattctgggattggacgagcggtgtgtaacttgtttgccttagaaggtgctaccgtggccttc

SEQ ID NO: 135381 - DNA, 253 bp, Glycine max
agtttatcgatcccagggagttcacattcataatagacatatagaaattattgtgcgtcaaataacatcaaaagtcttggtttccgaagatggaatgtctaatgtttttttgcccggtgaactaattgattgttgcgagccgaacgagcagggcgttccttagaagaggcgatttgctatcgagttctattattggggataacaaaaacatctctgaatactcaaagtttcatatctgaagcaagttttcaag

SEQ ID NO: 135382 - DNA, 249 bp, Glycine max
gctataatgatgacaccaatagacatcatggaactaccggtgtctatggtatagacaccgataggcaacaacatgggactactggtggctatgccggtgacactggtaggcaacatgggaacatcgtggcccttactatggaaccaacaccgcagacaccggtactggtcccagaagtggaaccacgggcggcaccggttatggaggcactggtggcactgattatggaacaactggtggcactggtta

SEQ ID NO: 135383 - DNA, 247 bp, Glycine max
gtccaagtccacacaacaacacacctctacgaagctggcgtcgtcccccccggagcccgtttcgaaccgccgcgttatgaagccggcgtcaaagcgccctccatttaccattccgagagaggtccaagacttcccaggtcctcgccgtcctcgccggcctcccggtcggtggcatcctgctcctcctggcgggattgaccctggcaggaaccctcaccggactggcagttgccacgccgctcttcgt

SEQ ID NO: 135384 - DNA, 241 bp, Glycine max
caacacacaccccataacaccatggcggggaaggtggcagcggcattctgaacctcatcccggagatgtccctcacgggttcccaactcctagctctcctcgccggcgttccccttggtgcaatctgctcctcctctccggcatctcgctcatcgccagcctcttggggctggcggtggcgacgccgctcttcatcttcttcagcccgctgctggtccccgccgccttcgccataggaatg

SEQ ID NO: 135385 - DNA, 244 bp, Glycine max
aggccatataattttttttatttgaaataatgtccgggatcatccacaagattgaggagaccctccatgtgggagggcacaagaaagaggagcacaaaggagaacaccatggtgagcacaaagtgaacacaaaggagaacaccatggtgagcacaaaggtgaacacaaaggagaacaacaccatggggagcacaaggagggacttgtggataagatcaaggacaagatccatggtgatggccat

SEQ ID NO: 135386 - DNA, 250 bp, Glycine max
cgcaacaaaaagaaagaatcccaggcgaggagaaagatggaggggaaggagcaggatgtgtcgttgggagcgaacaagttccccgagagacagccgattgggacggcggcgcagagccaagacgacgcaaggactaccaggagccggcgccggcgccgctggttgacccgacggagtttacgtcatggtcgttttacagagcagggatagcagagtttgtggccacttttctgtttctctacatcaccgt

SEQ ID NO: 135387 - DNA, 263 bp, Glycine max
ttttaagatatgagaaaggctccattgtcgaattcagacctaaccattaatcgagaagtgatgggaacgacgaaacctgcaaatacttaagattttattaaaaacaaatcttaatgattcattaggtgggatggcggaagaaaccaaaaagcaatcctttttttaggagttgtgccctacattacatctgaatttgattgataataaaagagtaaatattcgcccgcgataattttgattttattgacttttttttttatttt

SEQ ID NO: 135388 - DNA, 264 bp, Glycine max
gaaaaaaagaagagttgagattccctttgaagaaaagatggcatcccataggcaaagctatgaagctggtcaaactaagggccgaactgaggaaaagacgaaccagacgatgggcaatattggagagaaggctcaagctgcaaaggagaagacccaggaaatggcccaagctgcaaaggagaagacccaacaaacagcccaagctgccaaggacaagacttgcgacacttcccaagcggcaaaggagaagacccaacagaatac

SEQ ID NO: 135389 - DNA, 259 bp, Glycine max
agcacaaggacagtgatctctctttctatctttttgtctgtctctctgaacacgttgatggattccccctctcgcccctccgtcatcatcgtaggtgccggcatctccggtatcgcggcggcgaaggtgttggccgagaacggcatagaggacctggtgatcctggaggcttcggaccgcgtcggcggcaggatccgcaaggagagtttcggcggcgtgtcggtggagctcggtgccggatggatcgcaggcgttgggg

SEQ ID NO: 135390 - DNA, 263 bp, Glycine max
ctcgagcgcgttgccattctcatcctcctctgtctctctctctccaccattgccatggctccttacaagctccggccatccagcgccttcaattctcccttctggactacaaattctggtgctcctgtttggaacaacaactcctctttaaccgttggagctagaggtccaattctgcttgaggattatcatcttgtggagaagcttgcaaactttgacagggaacgtatcccagaacgtgttgtccatgccaggggagctag

SEQ ID NO: 135391 - DNA, 262 bp, Glycine max
ggctccatgccaaccgttgttgcctccacaccagaattgttcaagctcttcctccaaacgcacgaggtaacttccttcaacacaaggttccaaatctcagccataagacgcctcacctatgatagctcagtggccatggttcccttcggaccttactggaagttcgtgaggaagctcatcatgaacgaccttctcaacgccaccactgtaaacaagttgaggcctttgaggacccaacagatccgcaagttccttagggtta

SEQ ID NO: 135392 - DNA, 252 bp, Glycine max
gtgaaatagattaattaatctattttatctaacatatatcccttttgtagtaattattagaatttgtagtaattattataagtattagaagcagcaattcttatttatttcagattaatacttgataacctaatcaatatatctatatatagaatatagatagatatatatataatagaacgtaaaaggaaatcagagtattacatagagaaaggagcatgttgattatatagaatgtaatgggcaacaatc

SEQ ID NO: 135393 - DNA, 256 bp, Glycine max
ctcgagcgaaccaaacgaaggcagaaacaggcaaagagctcatagaaattctcgtcctcgtcctacataagtcttctcttatcataaacgcgtgttgctcggataaggttgtgctgcggtgattcactcgtactttgcttaatatggcggttgagaagttgagcattgcaaaagatgtgactgaattaattggcaaaactccattggtatatctcaaccgcatcgtggatggctgtgttgccaaagttgctgcgaa

SEQ ID NO: 135394 - DNA, 260 bp, Glycine max
  unsure (1)..(260): unsure at all n locations
gtgttcttcatagttcagtgtgtcgtttaaaaatgtcgcagttgctggataaagccaagaacttcgtgtcggagaaggtaaatgatatggccaagccggagggangtgtcactgacgtggacttcaagcgcgtgagaaagataatgtcgagtacttggccaaggtctctgttcgtaacccttattcaacttccatacccatttgtgagatcaactactctttcaaaagcgcatccagggagatagcatcagggaaaattc

SEQ ID NO: 135395 - DNA, 259 bp, Glycine max
aagagtgcgggtggcacaacggcgagttacgtcggagagaaagcggtgcaggccaaggatgtcgccgtggagagtgggaagagtgcggctgggtatgctgccaaggtggctgctgatttgagggacaaggccaccgcggtggggtgggccgcggcccatttttcggcggaaaagacggtggaagggaccaaggccgccgcccatgttgtcgagggagcggccgggtatgccggacataaggccgcggacttgcttcgat

SEQ ID NO: 135396 - DNA, 260 bp, Glycine max
ggctcgagggaggccttctaaagccttgtagaggaattttgctgtttggacctcctggaactgggaagacaatgctggcaaaggccattgcaaaggaggccggagcaagtttcatcaatgtgtccatgtctaccatcacttctaagtggtttggtgacgatgagaagaatgttcgcgctttattcacacttgcagccaaggtctccccaactataatattcgtggatgaggttgatagcatgcttgggcaacggaccaga

SEQ ID NO: 135397 - DNA, 259 bp, Glycine max
caatcgcctctaccgggacgatgtcgggctgttgctctattcaaatcatattttggtggtgcctttgacgaggatgcaattcgcaataattttgtactcatttatgaactcctagatgaaatcatggactttggttatcctcaaaatctttcaccggaaatcttaaagctttatatcactcaggaaggagtgcgttccccattttcatccaagccctcagatagacctgttccaaatgcgactttacaagttaccggtg

SEQ ID NO: 135398 - DNA, 259 bp, Glycine max
cacaactacaagaaagaacttccttataaccaaaaccaacaacaactatggcaagttatcagaagcactacgatgatcagggtcgcaaggtcgacgagtatggcaatgttgagaggcaaactgacgaatatggcaacccggttcatgccactagtgtcacttatgtagccaccaaaagtgttggtggctacaatgatgacgctaataagcaacatgatattactggtgtctatcccgagaagacaccggtagacatcat

SEQ ID NO: 135399 - DNA, 262 bp, Glycine max
gccaagccaacacaaagggcacagaagagggtttcttttcgtttcgtttcaatggggagcgaagaggagaacggcgaattctacctgcgatactacgtcgggcacaagggcaagttcggtcacgagttcttggagttcgagttccgccccgacgggaagctccgctacgccaacaactccaactacaaaaacgacaccatcatccgcaaggaggtttacctcacccccgccgttctccgcgagtgccgtcgcatcatctccg

SEQ ID NO: 135400 - DNA, 260 bp, Glycine max
caaagaatcaaagaaaggggtggtggctgcttcgaaagcttaataatttgtttatttccagaacatcatagttttcgcagcagcaaactaacaaattactcatatcatataataagatggcccgttctctctcgcaagccaaacgtattggtgtccttgttgctcaatctatctccctaattcccgttcatcggcgaggttacgcagtggcatccgatgtatcggtaagagttggattgggtaatattgggcgaaggaat

SEQ ID NO: 135401 - DNA, 258 bp, Glycine max
cttaaatctgcttgtgaagggaagtatgatgccataattgttgattcctcagatcccgtgggtcctgcccaggaacttgttgagaaacctttttttgatacaatagctagggcactaaggcctggcggagttctttgtaatatggcagaaagtatgtggcttcatacacaccttattcaagatatgatctctatttgccgagaaacattcaaaggttctgtatgttatgcttgggccagtgtaccaacatatcctagt

SEQ ID NO: 135402 - DNA, 258 bp, Glycine max
gctttggtgttttacgcagggaaagctcctaaaggggacaaaagcaattggatcatgcacgagtatcgtctcgcagacgtagatcgctccgttcgcaaaaagaacaccctaaggttggatgattgggtgctttgccgtatttacaacaagaagggcacgatcgagaaactgcaaccaagcagcgatgttgctcatagccgaaatatcgaatcctcggagatcgaagacaggaagccggagattctgaaaagcggagga

SEQ ID NO: 135403 - DNA, 259 bp, Glycine max
ctcagacgattcggctcagtggaggacgagacccagaatcggtcctctcagcattcaactggaatgtgctgcaagctgcgctccaagtatatagacccttaatttcttgctatcatgcatcattaacattaaatgctactaattaatttggctttgtcaatttgatttcttgttattttgggaaattaattacagaccccaaaaggaaagttagaaaggctttttaatcaacagaacgagggaagtattttcaaaataa

SEQ ID NO: 135404 - DNA, 258 bp, Glycine max
ttcaaaaccagacacacacacaaacaaacgctgaatctctcgtcgttctttttatttgcggtttcttcttcttctcacgttctacctaacattttctaaaacatgtctggggaagaggaagaaaacgccgcagagctcaaaattggagacgagtttttgaaggcaaagtgcttaatactctgtgaagtttcattgattcttgagcacaagtatgagcagcttcaacagacatccgatgatcccatgaatcaagtttct

SEQ ID NO: 135405 - DNA, 253 bp, Glycine max
tggcaacccggttcatgccactagtgtcacttatgtagccaccaaaagtgttggtggctacaatgatgacgctaataagcaacatgatattactggtgtctatcccgagaaagacaccggtagacatcattttggtcgtggttacgacagtgacactaacaagcaacatgatgctactggtgtttatcccggaatagacattggtagagatcatgggactaccggtgtttatggcctaaacaccgacagacat

SEQ ID NO: 135406 - DNA, 256 bp, Glycine max
ggaaaagctcaaaagaaatctgaaagggagaatgaattgaaacaacgatttgagcagagcatgaaagaagctgctgataaatatcaaggggcaaacttgtatgtcaaaaatttagatgatagcctcggtgatgataaacttaaggagctgttctccccttttggtaccataacttcttgcaaggttatgagagacccaaatggcataagtcgtggatcaggatttgttgcattctcaactcctgatgaggcatcta

SEQ ID NO: 135407 - DNA, 258 bp, Glycine max
ctgctacttcctactccaaccgcacttctgctccgcaattatcatgggcaaggtcaagatcggaatcaacggatttggaagaattggccgtttggtagccagagtggctctgcagagagacgatgttgaactcgttgccgttaacgaccctttcatcaccaccgattacatgacatacatgtttaaatacgacagtgttcatggacactggaagcatcacgatgtcaccgttaaggacgagaagacccttctcttcgg

SEQ ID NO: 135408 - DNA, 264 bp, Glycine max
ccaaaacagtaaagctaacttcaacacctttaattttctaaaagtaattcagcggctgaataccaagcggagaagatgagtcaggagcagccacggcgtcccaaaggccaaaaccccatcaaatacggcgacgtttttgtcgtctccggcgaccttgcacagaagcccgtcgcaccggaagatgctgccatgatgcaaagcgcggaaactcgagtgctcggacaaacccaacccggcggagcagcttccgtcatgcaatctgcc

SEQ ID NO: 135409 - DNA, 257 bp, Glycine max
ggacaaaaagcgcttttgagaagctggattcgatttatgggtcttttgataagccctctgagaagaagaaggggtacttgcttcccaggcccaagatggttaactctgatcttgccaggattattaattctgacgaggttcagtctgttgtgaggcccattaagaaggatgtgaagaaggccacgctgaagaagaaccctcttaagaacctgaactctatgctgaagctgaatccttatgccaagactgctaagagg

SEQ ID NO: 135410 - DNA, 264 bp, Glycine max
ggctcgagaccgaattcgcgctcgagcgagctcgagcaccaaacatgcagtacaaagcttggcgtcacgatcctgagacaggtcctactgtttactgtagtagaactgtcttcgatgatgcaactccagagttggtgagggatttcttctgggatgatgactttcgtcctaaatgggatgctatgcttgcatactgcaaagtattggaggaatgccctcgtaatgggacaatgatttctcactggattaaaaagttcccctttt

SEQ ID NO: 135411 - DNA, 258 bp, Glycine max
aacgatttgagcagagcatgaaagaagctgctgataaatatcaaggggcaaacttgtatgtcaaaaatttagatgatagcctcggtgatgataaacttaaggagctgttctccccttttggtaccataacttcttgcaaggttatgagagacccaaatggcataagtcgtggatcaggatttgttgcattctcaactcctgatgaggcatctagagcactcttggagatgaatggcaaaatggtggtaagcaaacctc

SEQ ID NO: 135412 - DNA, 256 bp, Glycine max
tgtaacttcaaaacatacacctcttctctctgtttctcttcactctctctctccctccctcttcaactaacatggcaattgaaaaccaagacaccgctgtcagagaaatcaagcccaagaacaggagaatcatgggtgctggagggcctgatgatgaggacaataggtggccaccgtggttgaagccactgctgaaagagagcttctttgttcaatgcaagttgcatgctgattctcacaagagcgaatgcaacat

SEQ ID NO: 135413 - DNA, 253 bp, Glycine max
acaaaattgaactgtaattgtagtagtagacagtagcaccatgagccaggaacagctcaagaaacctcaaggggagcaggaccccatcaaatacggcgacgttttcaaagtctccgacgaactcgctttcaaacccatcgcgccaagagacgcagctctcatgcaagccacggagaaccaagcattgggccaaactcaaaaaggaggtcccgcctcggtgatgcaatccgccgcaaccgaaaacctccgcgcc

SEQ ID NO: 135414 - DNA, 252 bp, Glycine max
ggcaaccctgttcatgctgctagtgtcacctatgtagccaccagaactgctgctggtggttacagtgatgacattaataagcaacatgataccaccaatgcctacggcgtagacactggtagacagcattctagtggtggctacgatggtgacactaataaacatcatggaactactggtggctataatgatgacaccaatagacatcatggaactaccggtgtctatggtatagacaccgataggcaacaa

SEQ ID NO: 135415 - DNA, 238 bp, Glycine max
gagaaactttaagcagatgtctaatgttttgtgggtggctcctgaggacaaggcgagtttatggtcacaacttcattatgtttcgtgtaataatctggaaatgcaagaagcttatcttgtcaatctcgtaaatgtgttacgagaactgtatttgcacagtccagaggaagctcgccaactgagaaggaaagctctctctcgtattgaatggctgcaaaaagctgatgtgcctaccata

SEQ ID NO: 135416 - DNA, 261 bp, Glycine max
ggcggggcgaccgctgagtttaagcatatcaataagcggagaaaaaggaaacaaggatagaccagaactgaaaacacgaaccagagaggtaataggaagaacggagaaagaaagaggaagagaaagtggaggacaagtagtggcagagaaaggaagagaaacagaaacggcaaggggacgggttggtgtgtaccatatgccaacaactgagaatgatatgcccactggtagcatccctttggccttacaaagtttattcta

SEQ ID NO: 135417 - DNA, 287 bp, Glycine max
cagcattcaattcgactcgaggcttggtcaactcaggtgcgtcctgaaacaactctgttggctgatgggtgtccatatttgtatgctatggtgcatgatagttcagtgtctacaataccaggtgattttgtcattggtgttaagttgacaaccataaacaatatgtgtgcatatgggctcaatcctggtatttcaggttctcgtcttttgggcaccattcctcagtctatttcacagcaaactgtttgagcagaaatggcaacagtgagaacaccattgaattttga

SEQ ID NO: 135418 - DNA, 254 bp, Glycine max
ctactacaagtacttccttacaatcaaaaccaacaacaactatggcaagttatcaaaagcactacgatgatcagggtcgcaaggttgacgagtatggcaacgttgagaagcaaaccgacgaatacggcaaccctgttcatgctgctagtgtcacctatgtagccaccagaactgctgctggtggttacagtgatgacattaataagcaacatgataccaccaatgcctacggcgtagacactggtagacagcat

SEQ ID NO: 135419 - DNA, 254 bp, Glycine max
gcgagcgagcagtttcaaagagaggatttgggattgggaaggcgagggattgcgctgcgtctcttcctcttctctttcgattcatccctcattcataatcttccaatccaacaacctcagcctcacactcacacatacacacatctgaacgcgtatcgtccctcccatggcttcaaagcgcatcctcaaggagctcaaggacttgcagaaagacccaccaacttcttgcagcgctggtccagtagctgaggaca

SEQ ID NO: 135420 - DNA, 246 bp, Glycine max
atttgatgactggttcttcacaagaattatttgattttatagcatctaaactagcaaaattcgttagttctgagcctgaagagttacaccctccccctggcagacaaagggaattgggttttaccttctcatttccagtgaggcaaacatcaattgcatctgggaatataataaagtggactaaaggtttcaatcttgaggatgcggttggagaagatgtggtgggtgaactgaccaagtccttag

SEQ ID NO: 135421 - DNA, 254 bp, Glycine max
gtttcatccgaacatcaacagcaatggtagcatttgtcttgatatccttaaggagcagtggagccctgcactcaccatctctaaggtactgctttctatctgctcattgctgactgatccaaatcctgatgatccacttgttccggaaatcgctcacatgtacaaaactgaccgggccaagtatgaggccactgcacgcagctggacccagaagtatgccatgggctgatttgtgtttagataatgtatattga

SEQ ID NO: 135422 - DNA, 251 bp, Glycine max
ccgattgctagaatggaatttcgatgctcagtcatctcttttaccattctcttctctcttgctcttgcaggagagagccatgtccatgcatcgctacctgaggaagattattgggaagctgtttggccaaacactcccattcccactgcactgcgagagcgtctaaagcctctccctgcaggtgctgaaatcgatgaactccctaagcaaattgatgatacacagtacccaaaaacattcttctataaaga

SEQ ID NO: 135423 - DNA, 246 bp, Glycine max
ggctcgagaccaaacacaatgatgatgaacagtatgtttgggagtcacaagctggaggttctttcactgtcaccagggataacactgctgaggttcttggcaggggtactaagatcactctctacctcaaggaagatcagcttgagtaccttgaggagcgtcgcttgaaggatctgatcaagaagcattctgagttcattagctacccattaataatttggattgagaaaactactgagaaggaga

SEQ ID NO: 135424 - DNA, 270 bp, Glycine max
cgggatttggctcgagtagcgctctgtgcgcgtactccgaaagggaatcgggttaaaattcctgaaccgggacgtggcggctgacggcaacgttagggagtccggagacgtcggcgggggccccggaaagagttctcgtttctgtttaacagcctgcccaccctggaaacggctcagccggaggtagggtccagcggctgtaagagcaccgcacgtcgcgtggtgtccggtgcgcccccggcggcccttgaaaatccggaggaccgagtg

SEQ ID NO: 135425 - DNA, 253 bp, Glycine max
aaacagtaaagctaacttcaacacctttaattttctaaaagtaattcagcggctgaataccaagcggagaagatgagtcaggagcagccacggcgtcccaaaggccaaaaccccatcaaatacggcgacgtttttgtcgtctccggcgaccttgcacagaagcccgtcgcaccggaagatgctgccatgatgcaaagcgcggaaactcgagtgctcggacaaacccaacccggcggagagcttccgtcatgca

SEQ ID NO: 135426 - DNA, 254 bp, Glycine max
tgggtgtccatatttgtatgctatggtgcatgatagttcagtgtctacaataccaggtgattttgtcattggtgttaagttgacaaccataaacaatatgtgtgcatatgggctcaatcctggtatttcaggttctcgtcttttgggcaccattcctcagtctatttcacagcaaactgtttggaatcaaatggcaacagtgagaacaccattgaattttgattctagcaagcagagcttttgtcaattttcta

SEQ ID NO: 135427 - DNA, 253 bp, Glycine max
gagaaactttaagcagatgtctaatgttttgtgggtggctcctgaggacaaggcgagtttatggtcacaacttcattatgtttcgtgtaataatctggaaatgcaagaagcttatcttgtcaatctcgtaaatgtgttacgagaactgtatttgcacagtccagaggaagctcgccaactgagaaggaaagctctctctcgtattgaatggctgcaaaaagctgatgtgcctaccatagcacagattgaagag

SEQ ID NO: 135428 - DNA, 253 bp, Glycine max
gagaaagagttaagtgaattaaaaacccaagggaggttcatggccaaaggtaaagatatccgagtaattgttattttggaatgtaccggttgtgataaaaagagtgttaataaggaatcaacgggtatttctagatatataactaaaaagaatcgacagaatacgcctagtcgattggaattgagaaaattttgtccccgttgttgcaaacatacaattcacgcagaaataaagaaatagatcaaattgatcg

SEQ ID NO: 135429 - DNA, 251 bp, Glycine max
ctcatcctcatttttgctgaagcacttgccctttatggtctcattgttggtattatcctgtcttctcgtgctggccagtctagagccgactaagaaaggagttgtgctgcaaaatattctttgaccacccatctgttttaacctccttttaaagggggtgagggaggtaattattagttgttccgagcttagcgatgttcaggcagcattttcaggatttagcaatggtgtgaaagttcaattcgccattt

SEQ ID NO: 135430 - DNA, 256 bp, Glycine max
agaaaacctaagcttagaattagaaacaaagaaaagaagaaaggaaagaattgatcgttgaaaatgcagggaggaaagaaagcgggagagtccattaaggaaacagctacaaacattggtgcttctgccaaggctggcatggagaagaccaaggccactgtccaagagaaggcagaaagaatgacagcacgtgatcggttgcaaaaggagttggccacccaaaagacagaggcaaagatgaaccaggcggagctgg

SEQ ID NO: 135431 - DNA, 250 bp, Glycine max
cagaaagcaagtatcctgtggttcgattatctgaaatacctgctaagcagttggaaaatgataaatctgagctgaaaaaatttgttattagacctaggcccaatagaaacagtttgaatgatgccaacggagttgggacgaaaggaaatcctgtaagaagtgtggaagaaaggaaggaggaatatgaccgggcgcgggcacgtatctttagtagccctagaagctctgaatcaggcgatacctcatccat

SEQ ID NO: 135432 - DNA, 262 bp, Glycine max
atttgagggtttgaacaaacaggctcttgaagttgtttacagggtcactgttgggggtgttaaagttaccccttttaatgattccttgtggagaacttgggttcctgatgatgggtttttcagaccaagtgttgggtcggaaaagctttactttggtgggagaatcaattaccatgttggaggggctagtcgtgaggttgggcctgataatgtgtataatagtgctaggttgattaggagtaagaatgattctgttcctaac

SEQ ID NO: 135433 - DNA, 205 bp, Glycine max
gtcgtcgcgtgtactttcttgcgaaacagaagggcgaaggggcaaacacaacttttttgtttttttgtagagcgagagagaaaaaaatgttggggatcttcagcagttccgtggtgtcgccgccggaggagctggtggctgccggcagcagaacgccgtcgccgaagacgacggcggggaagctgctgaaccggttcgtggagaa

SEQ ID NO: 135434 - DNA, 261 bp, Glycine max
cttactcttcttcctccaagagaagtaaacaaccctcacattcaccacagcagcacacacagacaaagacaaccttgtttgtctccaatcaaaacctttcaagctggcgttcgaaaaccaagacaaccctgtccgagaaatcaagcccaagaataggagaatcatgggtgctggaggccctgatgatgaggacaacaacaggtggccaccgtggctgaagcctctgctaaaagaaagtttctttgttcaatgcaagcttca

SEQ ID NO: 135435 - DNA, 258 bp, Glycine max
cttggaggagaaaatactgccttattgtgatgggataatgacccaacttcttacggatttgtctagcaatcagttgcacaggtccgttaagcctcctattttttcatgttttggagacattgccttggctattggagaatactttgagaaatacctgttatatgcaatgcctatgcttcagagtgccgcagagctctctgctcatacatctggtgctgatgacgatatgacagaatacactaattctttgagaaatgg

SEQ ID NO: 135436 - DNA, 261 bp, Glycine max
aaagccaagaacttcgtgtcggagaaggtaaatgatatggccaagccggaggcgagtgtcactgacgtggacttcaagcgcgtgagcaaagataatgtcgagtacttggccaaggtctctgttcgtaacccttattcaacttccatacccatttgtgagatcaactactctttcaaaagcgcatccagggagatagcatcagggaaaattccagacccaggatcgttgaaggcaaaggacacaacaatggtggatgtgcca

SEQ ID NO: 135437 - DNA, 251 bp, Glycine max
attttctcaagagaaactttaagcagatgtctaatgttttgtgggtggctcctgaggacaaggcgagtttatggtcacaacttcattatgtttcgtgtaataatctggaaatgcaagaagcttatcttgtcaatctcgtaaatgtgttacgagaactgtatttgcacagtccagaggaagcttcgccaactgagaaggaaagctctctctcgtattgaatgctgcaaaagctgatgtgcctacatagcaca

SEQ ID NO: 135438 - DNA, 258 bp, Glycine max
aagtacttggattttggtcaagccctttcgttcatagagtgatatgggctctaaagttgaagaacattagttatgagtacatagaggttgataggttcaacatgagtgagctacttcttcaatccaatccagtttacaagagagtccctgtgcttattcatggaggcaaagccattgcagagtctcttgtcattcttgaatacatcgaagaaacgtggctagagaaccacccattgctgccaaaagataaccatcaaa

SEQ ID NO: 135439 - DNA, 260 bp, Glycine max
aaaaccaacaacaactatggcaagttatcaaaagcactacgatgatcagggtcgcaaggttgacgagtatggcaacgttgagaagcaaaccgacgaatacggcaaccctgttcatgctgctagtgtcacctatgtagccaccagaactgctgctggtggttacagtgatgacattaataagcaacatgataccaccaatgcctacggcgtagacactggtagacagcattctagtggtggctacgatggtgacactaata

SEQ ID NO: 135440 - DNA, 256 bp, Glycine max
ccgctaattaacccttttctccccagcattcaatttctattagtatccaaaccttgattgcgttcttggattttcttgtgggtagggggtttctcctctctttctctgcagtttgatggatcgggaaggaggatccaacgccggatcttgctactactccgttctcgggattcgtagggatgcctccttctctgatattcgcactgcctaccgcaaactcgctatgaggtggcacccggacaagtgggctctgaat

SEQ ID NO: 135441 - DNA, 259 bp, Glycine max
aacaactatggcaagttatcaaaagcactacgatgatcagggtcgcaaggatgacgagtatggcaacgttgagaagcaaaccgacgaatacggcaaccctgttcatgctgctagtgtcacctatgtagccaccagaactgctgctggtggttacagtgatgacattaataagcaacatgataccaccaatgcctacggcgtagacactggtagacagcattctagtggtggctacgatggtgacactaataaacatcat

SEQ ID NO: 135442 - DNA, 265 bp, Glycine max
aaactactggtttttgcttgcggattctgtttcaaacaacgtgtggttttctcagaaggttagtttcatggatgaagctgctgctgtaactgctgcatctaaggcaattgaggagtctatggaggggtcaggagcaaatgtgaaggagaccagtaaggtagttgcagaagcagttgagaaggtgaaagggcgctctagattagtattgggcaagttccaggccccatcagagggtaactacaatttgacttgctattgtttgtgt

SEQ ID NO: 135443 - DNA, 254 bp, Glycine max
aaaatgaccaagcttacaattctcctcatcgctcttctcttcatcgcccacacctgctgcgcctccaaatggcaacagcaccagcaagagagctgccgcgagcagctcaaggggatcaacctcaacccctgtgagcacatcatggagaagatccaagctggccgccgcggcgaggacggcagcgacgaagatcacattctcatcaggaccatgccgggaagaatcaactacatcaggaagaaggtaggaaaaga

SEQ ID NO: 135444 - DNA, 255 bp, Glycine max
cttattgagagaattttgcaagtgacagaaacatggcatctcgtcaaaacaacaagcaagagcttgatgaaagagcaaggcaaggagagactgttgtcccgggtggaactggtggcaagagcctggaggctcagcaacaccttgctgaaggaaggagcaagggagggcaaacaaggaaggaacagctgggtacagaagggtaccaggaaatgggacgcaaaggagggttgagcactgtggacaaatcaggagaag

SEQ ID NO: 135445 - DNA, 256 bp, Glycine max
aagaagagaagaatggtggtatgaatatgattaatgattatgaagctcagctcatagaaagcattttggaaacgaaacctcttctcactagacactgactaacaatggcggctgaggctcagcttcctgaccacttcaagtgtccgatttccctgcaaatcatgtccgaccccgtcatcctctcttccggccacaccttcgaccgctcctccatccagcgctggctggacgccggccaccgcacttgcccaattac

SEQ ID NO: 135446 - DNA, 255 bp, Glycine max
agtgtctcttctctcgaagaagatcgtgaagaagaggctgaagaagttcaagaggcctcaaagtgacaggaagatttctgtgaagacaaactggcgcagagcaaagggtatcgattcccgtgttaggagaaagttcaagggatgcactttgatgccgaacattggttatgcttcagacaagaagacccgccactatctcccgaatggtttcaagaaatttgttgttcacaatgtgaaggatttggaactgctcat

SEQ ID NO: 135447 - DNA, 255 bp, Glycine max
ctcgagccggatttgggagcaagatcattttggatacacaacacaggacccattggctgcctcccttacattttggccaattttctatcagctgaaagggatgcctatggttgtgcaaagacatataatgatatagctcagtatttcaaccacaaattgaaggaagttgtggttcaacttcgcaaagaccttcctctggctgcaattacatatgtagatatttattctgttaagtactctctattcagccaccca

SEQ ID NO: 135448 - DNA, 258 bp, Glycine max
ctcgcaagcaaaaagaaagaatcccaggcgaggagaaagatggacgggaaggagcaggatgtgtcgttgggagcgaacaagttccccgagagacagccgattgggacggcggcgcagagccaagacgacggcaaggactaccaggagccggcgccggcgccgctggttgacccgacggagtttacgtcatggtcgttttacagagcagggatagcagagtttgtggccacttttctgtttctctacatcaccgtctta

SEQ ID NO: 135449 - DNA, 259 bp, Glycine max
aaaaggaaataattgatctttgaaaatgcagggaggaaagaaagctggagagtccatcaaggaaacagctgcaaacattggtgcttctgccaaggctggcatggagaaaaccaaggccactgtccaggagaaggcagaaagaatgacggcacgtgatccgatgcaaaaggagttggcaacccagaagaaagaggcaaagatgagccaggcagagctggacaagcaggcggcgcgtcagcataacacggcggcgaacagg

SEQ ID NO: 135450 - DNA, 256 bp, Glycine max
atcgagccgattcggctcgagatgatatagaaagagagagaagagcaaaagaagaacaaaactgcaatcctcaaaggagaagatgaaaaacatggcaagtgctgccaaggaacaagtcgacatctataaagccaaaatagacgagaaggcagagaaagcaacggcaagaacagaagaggagagggtgatagcccatgagcacgcaaaggcaaaggaagctggagcaaagatggagctgcatgaagctaaagcaagg

SEQ ID NO: 135451 - DNA, 250 bp, Glycine max
ccggtaccttcaccaatcagcttcagacttcgttcagtgagcctcgtctccttatcctcactgatccaagaacagatcaccagcctattaaggaagctgctcttgggaatattcccaccattgctttctgtgacactgattcgcctatgaggtatgtggacattggaattcctgccaacaacaagggaaaacacagcattggttgtctcttttggctccttgcaaggatggtattgcagatgaggggtac

SEQ ID NO: 135452 - DNA, 253 bp, Glycine max
cctgaaaatatcctactagacgctgatggccatgtaatgttgactgattttggcttagctaaacaatttgtagagagtactagatcaaattcgatgtgtggtacattagagtacatggcacctgaaattattcttggcgaaggccatgataaggctgctgattggtggagcgtaggtattctactagttgagatgcttactggaaagccgcctttctgtggcggaaaccgtgacaaaattcagcagttgatag

SEQ ID NO: 135453 - DNA, 156 bp, Glycine max
caagtacttccttacaatcaaaaccaacaacaactatggcaagttatcaaaagcactacgatgatcagggtcgcaaggttgacgagtatggcaacgttgagaagcaaaccgacgaatacggcaaccctgttcatgctgctagtgtcacctatgtag

SEQ ID NO: 135454 - DNA, 249 bp, Glycine max
ctcaagtctctcgaagcttctttctctctcttctagaagctatctgtgtttggtgttactaagtctccaacaagcaaagtacatggttgatttggaaatccaggtccccaccccattcgacccgtttgccgaggcgagagaatcggatgcccccggagcaaaggagtatgtgcatattcgaattcagcagaggaatgggaagaagagtctgaccacagtgcaagggctgaagaaggagttcagctacga

SEQ ID NO: 135455 - DNA, 193 bp, Glycine max
gacgaatacggcaaccctgttcatgctgctagtgtcacctatgtagccaccagaactgctgctggtggttacagtgatgacattaataagcaacatgataccaccaatgcctacggcgtagacactggtagacagcattctagtggtggctacgatggtgacactaataaacatcatggaactactggtggct

SEQ ID NO: 135456 - DNA, 236 bp, Glycine max
cgagaaagagagagagagagatagagactgagataaattcgcaaaccctaatttcggaaagatcggcgatggctgcctccaaggatcgcgagaacttcgtctacatcgccaagctcgccgaacaggccgtgcgatacgtagagatggtggaatcaatgaagatcgttgcgaatctcgacgttgaactgactgtcgaggagcggaatttactttctgttgggtacaagaatgtgatt

SEQ ID NO: 135457 - DNA, 252 bp, Glycine max
cagaaaagaagagagaagagcaaggttacaggcacaattttcacagatgaggcctgttgcaataacgccttctgttgcgccccgtatgcctctctaccctcctggtgctcctggtcttggacaacaatttttgtatgggcaaggacccccagccatgatgcctccacaagctggatttggttaccagcagcaactagttccgggaatgagacctggtggtggtcccatgccaagcttctttgttcccatggt

SEQ ID NO: 135458 - DNA, 239 bp, Glycine max
gagaagtaaaagatcttagtgcaagtaattaacatggaatctcagcaagcaaaccgtgaagaacttgatgagaaggcaaggcaaggtgaaactgttgttcctggaggaactggtgggaagagtcttgaggctcaagaacatcttgctgaaggaaggagccgtggagggcagacgaggaagcagcagctagggtcagaggggtatcatgaaatggggaccaaaggagggcagacaaggaa

SEQ ID NO: 135459 - DNA, 249 bp, Glycine max
atcaagagtacataaagtcatattcattatctgaatcaggtccatggagatcatttacagggctaggtgcttctgaaatttgcaaggttgaagaacttgagtatgcagagctaccaggctctggggatagctgttgtaaacttaaacttagatttctagatccttcttcgtgtgtgcatggcaaatcgtttaaattaactctacctgaattgattaacttcactgattttgttattgagaaaacatggt

SEQ ID NO: 135460 - DNA, 253 bp, Glycine max
agagaatataggaatataagaactaagatggattggatcggagcgtaccgcggaggccacagaagcagggactggtgcgacccttcatcaccattcactgatttgtgggaccctcgtcgtgtcggtgacgctgatgatatcacctcctctctcgcccatgctcacgttgactggcgtgagactgataaagctcatatcttccgtgctgatcttccaggggtgaagaaagaggatctgaaggtgcaggtggagg

SEQ ID NO: 135461 - DNA, 153 bp, Glycine max
cggcaaaggacatggatcggataaaagggccatggagtcctgaagaggacgaagcgttacggaggttggttcagacttacggccctaggaactggtccgttataagcaaatccattccgggtcggtctgggaaatcgtgccgcttgcggtggt

SEQ ID NO: 135462 - DNA, 246 bp, Glycine max
gggcaatcagctctgcgttttgcccgtcttcggatggagaagcgtcataactatgtgaggaagacagcggagcatgctacccaattctatatcaatgctgccaccagccaacccaatgtttctggattaatattggctggttcagctgatttcaaaactgagcttagtcagtcagatatgtttgatcctcgtcttcaggcaaaaatactgaatgttgttgacgtctcctatggaggtgagaatggg

SEQ ID NO: 135463 - DNA, 248 bp, Glycine max
caagcaatggagaagcaagatgcctgtcctatatttctttttttttcggtaaatgctagtgctcagttctgtggggtagctgaaatggttggacctgtcaattttgacaagagtgtggacttttggcagcaagacaagtggagtgggcagtttcccgtgaagtggcacataattaaagatgttccaaacagtcagtttcgtcacattgttcttgaaaataatgataacaagcctgtgaccaacagtcg

SEQ ID NO: 135464 - DNA, 249 bp, Glycine max
acttgatctccatcaccacttccattctcttggagctggagtgattgaggaggttcgtgtccagcgtgataaagggtttggttttgtgaggtacagtactcatgctgaagcagctctagccattcagatgggaaatgcccagtctcttctctgtggaaaacaaattaagtgctcttgggggagcaagcccactccagccggaactgcttcaaatccccttcccccacctgctgctgcatctttgcctgg

SEQ ID NO: 135465 - DNA, 248 bp, Glycine max
aaaaagaagagttgagattccctttgaagaaaagatggcatcccataggcaaagctatgaagctggtcaaactaagggccgaactgaggaaaagacgaaccagacgatgggcaatattggagagaaggctcaagctgcaaaggagaagacccaggaaatggcccaagctgcaaaggagaagacccaacaaacagcccaagctgccaaggacaagacttgcgacacttcccaagcggcaaaggagaaga

SEQ ID NO: 135466 - DNA, 251 bp, Glycine max
aaaagaaagcatcccaggcgaggagaaagatggaggggaaggagcaggatgtgtcgttgggagcgaacaagttccccgagagacagccgattgggacggcggcgcagagccaagacgacggcaaggactaccaggagccggcgccggcgccgctggttgacccgacggagtttacgtcatggtcgttttacagagcagggatagcagagtttgtggccacttttctgtttctctacatcaccgtcttaacc

SEQ ID NO: 135467 - DNA, 252 bp, Glycine max
cacacacaactactacaagtacttccttacaatcaaaaccaacaacaactatggcaagttatcaaaagcactacgatgatcagggtcgcaaggttgacgagtatggcaacgttgagaagcaaaccgacgaatacggcaaccctgttcatgctgctagtgtcacctatgtagccaccagaactgctgctggtggttacagtgatgacattaataagcaacatgataccaccaatgcctacggcgtagacactg

SEQ ID NO: 135468 - DNA, 252 bp, Glycine max
ctcggtggaggaattttagtggacaaaactggagattggatcacacttatacaaaattctccaattagtaacttgttgagagttgctgcttggaagaaaggctgtttaatggtcaagattgtgatgtctgggaatgcagcagtcaaaaggagtgattgggcctcattggtacaagtgtttttaacaaacagcaacagtacagagcattttgatgcatgccagtggacaaaatcagaaccacattcctgggaa

SEQ ID NO: 135469 - DNA, 257 bp, Glycine max
cacaaatctggaatatctgaatgttagcagtaactttagtgacatgacagagctacctgaaacacttggtgatctggtcaacttaagggagcttgacctcagcaacaaccaaatccgagctcttccttactcgttcggtaggcttgaaaaattgacaaagctcaacctggaccagaatccaatcatagttcccccaattgaggttgtaaatcaaggggctgaggctgtgaaggagttcatggccaagtggtggctcg

SEQ ID NO: 135470 - DNA, 238 bp, Glycine max
cacagacatcaaaggactatgctggtgatgctgctcagaaatcaaagggctatgttggtgatgctgcccaaaagaccaaagaaacgattggtgatgcagcacagaagacaaaggattatgccactgacgccgcacagaagaccaaagattatgctactcagaagaccaaggactatgcaagtgatgcaactgatgctgcaaagaagactaaagcttatgctgctcagaagactaagga

SEQ ID NO: 135471 - DNA, 240 bp, Glycine max
caagtacttccttacaatcaaaaccaacaacaactatggcaagttatcaaaagcactacgatgatcagggtcgcaaggttgacgagtatggcaacgttgagaagcaaaccgacgaatacggcaaccctgttcatgctgctagtgtcacctatgtagccaccagaactgctgctggtggttacagtgatgacattaataagcaacatgataccaccaatgcctacggcgtagacactggta

SEQ ID NO: 135472 - DNA, 237 bp, Glycine max
cggcgactcagatcctctctcgcatctcccccaaaaccctaacccctgcccccttcctcttccgctccctcaccaccgccccctctcgtccttccctccccgcgctctccttcctccgccgtatctccgttgcagccactccctccctccgccgcgtcctcctcccaaacgccccctccctccgcgccctctccacacgcgccaccacctcctccctcaacgaccccaaccctaact

SEQ ID NO: 135473 - DNA, 242 bp, Glycine max
cctaagtgagaaacaaagaaaggaaataattgatctttgaaaatgcagggaggaaagaaagctggagagtccatcaaggaaacagctgcaaacattggtgcttctgccaaggctggcatggagaaaaccaaggccactgtccaggagaaggcagaaagaatgacggcacgtgatccgatgcaaaaggagttggcaacccagaagaaagaggcttagatgagccaggcagagctggacaagca

SEQ ID NO: 135474 - DNA, 232 bp, Glycine max
cctcgagcgaatcggctcgagttttacaatcctgcaaaaattacgtttctttgtgtgtacatggtgatgataacttaattagtgttcatgaatatgtcaagccttactttagtggttctaaattgaaaagctttctagctggtcataatatcaccattactgatggtattgacaaaactagtgcaactttgcaatttagaaagttagcagattgtgattttctcaagagaaa

SEQ ID NO: 135475 - DNA, 237 bp, Glycine max
ccgagggattgcgctgcgtctcttcctcttctctttcgattcatccctcattcataatcttccaatccaacaacctcagcctcacactcacacatacacacatctgaacgcgtatcgtccctcccatggcttcaaagcgcatcctcaaggagctcaaggacttgcagaaagacccaccaacttcttgcagcgctggtccagtagctgaggacatgttccattggcaagcaacgatta

SEQ ID NO: 135476 - DNA, 236 bp, Glycine max
acaactactacaagtacttccttacaatcaaaaccaacaacaactatggcaagttatcaaaagcactacgatgatcagggtcgcaaggttgacgagtatggcaacgttgagaagcaaaccgacgaatacggcaaccctgttcatgctgctagtgtcacctatgtagccaccagaactgctgctggtggttacagtgatgacattaataagcaacatgataccaccaatgcctacgg

SEQ ID NO: 135477 - DNA, 237 bp, Glycine max
ctctagctgttgcaaatttctactatttttcaatggcttctgcagatgttgagttccgttgctttgttggtgggcttgcttgggtcaccggcaacgatgccctcgagaaagccttttcaatctacggcgacatcgttgaatcgaaggttatcaacgaccgtgagactggaaggtccagaggattcggatttgtgaccttcgcctcagagcagtcaatgaaagatgcgatcgcaggaa

SEQ ID NO: 135478 - DNA, 233 bp, Glycine max
tgtaggcaaggtaagtcggcaaaatggatccggaacctcgggaaaatgatttgctctgatggctgggcacgggggtcccagtcccgaacccgtcggctgtcggtggactgctcgagctgctgccgcggcgagagtgggtcgtcgcgtgtcggtcgggggacggattgggaacgggcccttcggggcctcttccccgggcgtcgaacagtcaactcagaactggtacggacaag

SEQ ID NO: 135479 - DNA, 233 bp, Glycine max
ataacttgacaaataaaatcaccatgtctatcatcccaaacttgttcggtggtagacgaagcaacgtcttcgacccattctctctggacgtatgggaccctttcgaggggtttccttgttccacaggtcacgtgccttcctctggtggggaaagcagtgccatagccaacactcgcgtagactggaaggagactccggcggctcacgtgttcaacggtgatcttgccgggttg

SEQ ID NO: 135480 - DNA, 202 bp, Glycine max
cgaagaagcattatgcaaggtggaaactagtgatccaaatgcggtgtctgcaatcatcaataagtattcagagcaacctttcctaaaagaggatagtgtttatcacaggatggatgtgatcaataagtgcttctctaaaaaggctgttaaggaaatattatcttctctcgaggtggaagctacgagaaaggctgatccgtgg

SEQ ID NO: 135481 - DNA, 235 bp, Glycine max
caatcgaccctccatttctgtgaactgagatggctggaggtgttattcggcagttatttaggaggaaactccaatctcattctcctaattcttcttttaagtcattcattatcacaaagacagatggtgctgactctattggcaacaactccttaagagtgcttgcattagttggagctggtgtctcagggtttctaggtgttgcaacaacagcatttgctgatgaagctgagca

SEQ ID NO: 135482 - DNA, 234 bp, Glycine max
cccagtaggtgtgggactagacgcatacgaacccacacctgttaccgctcttccttccgacatcgagaacgtccacgccggacactaccattccctcgccctcacttcccacggccacctctgggcctggggcagaaacaacgaggcccaacttggccgcggcccatcctctagagaatcatggcatgagccagaaagagtgaagggattgttagagaatgtgaacgtgtgtgg

SEQ ID NO: 135483 - DNA, 233 bp, Glycine max
tggcttatggtgactacctaggcacccagagacgatgacgggtctagtaagcgacgaaatgcttcggggaggtgatgataagcggagatccggggattccctctatagggcaacctttcgaactgctgttgaagccacgggtatgcaatagacaacctggtgaactgaaacttctgagtagccagatgaaaagaatgcgaaagcgattcccgtagtagcgtcgagcgtaatgg

SEQ ID NO: 135484 - DNA, 238 bp, Glycine max
gctttgaatgctgcatattaccatgtagttaaccccttgaccaacactgctgttggtgctgaagtgacccatagattctcaactaatgagaacactctcacccttggtacccagcatcagttggatccattgaccacattgaaggcacgtgtgaacaactttggaaggacaagtgctctgatccagcacgagtggcgtcccaaatcgttctttaccatttctggtgaggtagacacca

SEQ ID NO: 135485 - DNA, 236 bp, Glycine max
ttttgagggagacaacatgattgagaggtccacaaacctcgactggtacaagggtccaactctgcttgatgcacttgaccagattagtgagcccaagaggccctctgacaaacccctcaggcttccccttcaggatgtgtacaagattggaggtattggaactgtgccagtgggacgtgttgagaccggtgtcttgaagcctggaatggtggtgacttttgcaccaactggactga

SEQ ID NO: 135486 - DNA, 227 bp, Glycine max
cccaagcactgggaggaggctcgggactctgaccgcgtgcctgttgaagaatgagccggcgactcataggcagtggcttggttaagggaaaccaccggagccgtagcgaaagcgagtcttcacagggcaattgtcactgcttatggacccgaacctgggtgatctatccatgaccaggatgaagcttgggtgaaactaagtggaggtccgaaccgactgatgttgaa

SEQ ID NO: 135487 - DNA, 238 bp, Glycine max
acaagaaacaacttccttataaccaaaaccatgaacaactacggcgaattatcagaagcactacgatgatcagggtcgcaaggtcgacgagtatggcaagcttgagaggcaaactgacgaatatggcaacccggttcatgccactagtgtcacttatgtagccaccaaaagtgttggtggctacaatgatgacgctaagaagcaacatgataggactggtcgctatcccgagaaagac

SEQ ID NO: 135488 - DNA, 230 bp, Glycine max
ccgagggcggtggtatgttgtaagacacctagtattagtgtcactggaattgaaaccccttttggtagccgaatcacctcacctgatctgtaagcataaacaattgtatctccaagccattcagcaccgctacttgtgtgatgaggtcaacatcagaggcgcagacagaggcggtgagtgtaccaggagatgtatcatggatgcgggttttgttgtaattaagcattgag

SEQ ID NO: 135489 - DNA, 232 bp, Glycine max
aggtgctgtagcactgaatgccatagattatgctcaaaaaagcaaagattacgcaggagatgctgcatagaatgtcaaagactatgcaagtgatgcagtgcagaagagtatcgagtagtctggtgatgcttctcataagagcaaagaggcttctgatgatgccagtgtgacggctaagaagatctcagagtatgtcggtgatgctgctcagagatgcactggtgctgctgaa

SEQ ID NO: 135490 - DNA, 231 bp, Glycine max
gcgacacgacacaacacaacacaagctttattcttgttcgtcgcttcttctgtacagcacccaagattgaagatgatagaccttgcgcgcgtgcagcaggagcttctggactgcagcaaggacgcggagggatcgggcatcaaagtcagccccaaaaacgacaaccttgttctcttgatcggtaccattcctggcgccgtcggaactccacatgaagggggcattttccag

SEQ ID NO: 135491 - DNA, 237 bp, Glycine max
attttcttctttccttcacattttctctctcaccattctcttcttcttctccctttcttagattctcccttttttctctttaccctccgccatggctgaggataaggagatgtcttcctctgtcaccaatggcgatgattctctcactggccacatcatatctacaactattggaggcaaaaatggggaacccaaacagactattagttacatggctgaacgggttgtaggaactgg

SEQ ID NO: 135492 - DNA, 238 bp, Glycine max
gaaagatggaaatggttgtggtgatgtgattttgcatccttctcttcaaaaaagaattcagcagctgtcatctgcaactgcaaatacaaaagcacatcaagcgccattcagaaacatgcttttttatggccctcctggaataggaaagacaatggctgctagggagttagctcgtaaatctggattagattatgcattaatgactggaggtgatgttgctccactgggatcacaggct

SEQ ID NO: 135493 - DNA, 232 bp, Glycine max
aggcaatacttgatctttgaaaatgcagggaggaaagagagctggagagtccatcaaggaaacagctgcaaacattggtgcttctgccaaggctggcatggagaaaaccaaggccactgtccaggagaaggcagaaagaatgacggcacgtgatccgatgcaaaaggagttggcaacccagtagaaagaggcttagatgagccaggcagagctggacaagcaggcggcgcgt

SEQ ID NO: 135494 - DNA, 234 bp, Glycine max
gcttgcacaaaagcaatgactatgtcagttaatccattcccgggttctgatgcatggagtttggaattgctgaagcgtaccggagttcattgtgatatcatttgtgtcactggatggactgccactccaatgcaggatgttcatgttacaattgattggtttattgcctctcaggaatgtgttcccaggacttattgtgtggtaaatccacaaaatcctcatgtgttgaatagg

SEQ ID NO: 135495 - DNA, 218 bp, Glycine max
tacaagtacttccttacaatcaaaaccatcaacaactatggcaagttatcaaaagcactacgatgatcagggtcgcaaggttgacgagtatggcaacgttgagaagcaaaccgacgaatacggcaaccctgttcatgctgctagtgtcacctatgtagccaccagaactgctgctggtggttacagtgatgacattaataagcaacatgatactacca

SEQ ID NO: 135496 - DNA, 236 bp, Glycine max
gccatgaccgagagagaggtcgagtaagtctttccactaagaagttagagcccacacctggagacatgattcgcaatccaaagcttgtctttgagaaggcggaggagatggctcagacattcagacagagaatagcccaagcagaagctatggctcgtgcagacatgctaaggttccagcctgagagtggattgactatcagcggtgatgggatcctgggaccatttacttcagac

SEQ ID NO: 135497 - DNA, 237 bp, Glycine max
ccagaacttagttctctgttgcatcatcatcatcttcattagtgttagccctaaacttcaccttcaaccatgaccacagtgccaccacacagtgtccaagtgcacacaacaacacaccgctacgaagccggcgtcgtcccgccggctcgttttgaggcgccgcgttacgaagccggcatcaaggcgccctcttccatttaccattccgagagaggtccgacgacctctcaggttctc

SEQ ID NO: 135498 - DNA, 233 bp, Glycine max
aagaaagatgtttggagagttgaatgtggaatcccttctggatttccgctcacagttatttgtaatagcatttttaatgagatgctcattagatatagctatgacaaattactgcgccaggctaaagctccaagtatgtttgtacaatccttcaaaaattttgtttctttgtgtgtgtatggtgatgataacttaattagtgttcatgaatatgtcatgccttattttagtgg

SEQ ID NO: 135499 - DNA, 242 bp, Glycine max
gcagaaatactacatggcttcctcaagggaactggttcgtattgttagcatacagaagtctccaattatacatctttttggtgaatcaattgctggagcatccaccatcaggggttttggacaagaaaaaaggttcatgaagcggaacctctatcttcttgattgctttgcacgaccattcttctgcagtctttctgcaattgagtggctctgcctgcggatggagttactgtcaacctttg

SEQ ID NO: 135500 - DNA, 240 bp, Glycine max
aaagaaaggaaataattgatctttgaaaatgcagggaggaaagaaagctggagagtccatcaacgaaacagctgcaaacattggtgcttctgccaaggctggcatggagaaaaccaaggccactgtccaggagaaggcagatagaatgacggcacgtgatccgatgcaaaaggagttggcaacccagaagaaagatgcaaagatgatccaggcagagctggacaatcacgcggcgcgtca

SEQ ID NO: 135501 - DNA, 239 bp, Glycine max
gtaatgtaaccatccatgaccgtaacgttatggctatgtataagagaatttgcaagggtgagtttcggtgtaacaagtggtttacttctgaacttacaagacttttctctaggctactcgatactaaccctcagacaaggatttctattcccgaaatcatagagaatcgctggttcaagaaaggtttcaagcagattaagttttatgtggaggatgatatcgtttgtagaactgatgag

SEQ ID NO: 135502 - DNA, 238 bp, Glycine max
ataaaatcaccatgtctatcatcccaaacttgttcggtggtagacgaagcaacgtcttcgacccattctctctggacgtatgggaccctttcgaggggtttcctttttccacaggtcacgtgccttcctctggtggggaaagcagtgccatagccaacactcgcgtggactggaaggagactccggcggctcacgtgttcaacgttgatcttcccgggttgaagaaggaggaagtgaa

SEQ ID NO: 135503 - DNA, 242 bp, Glycine max
agaaccagaattatggtaagaaagatggcggaaagcaggtatcccatggttcgcttatctgaaatacctgctaaacaggtggaaaatgataaacctgagaagataaaaattgccataaggcctaggcctaacaaaatcagtttaaatgaagccaatgaagctggcaggaaaagcaatcctcctagaagtgtggaagagagaaaggtggaatatgatcgggcacgagcacgcatttttagtag

SEQ ID NO: 135504 - DNA, 242 bp, Glycine max
gaatggagaaagctttaaggccttactttgagcttacaaatgctgtgcggattggagacttggaactgtttaggaatattgcagacaagtttgccactacctttaatgcagacagaacccataatttgattgttcgtttgcggcataatgtcatcaggactggtttacgcaacatcagcatctcatattctcgaatctctctagctgatgttgctaaaaaactgacgctgaactctgcaaat

SEQ ID NO: 135505 - DNA, 245 bp, Glycine max
ggaaataattgatctttgaaaatgcagggaggaaagaaagctggagagtccatcaaggaaacagctgcaaacattggtgcttctgccaaggctggcatggagaaaaccaaggccactgtccaggagaaggcagaaagaatgacggcacgtgatccgatgcaaaaggagttggcaacccagaagaaagaggcaaagatgagccaggcagagctgggacaagcaggtggcgcgtcagcataacacgg

SEQ ID NO: 135506 - DNA, 238 bp, Glycine max
gagagatccatcgatcaattaatttccaatggccgatcagctcaccgacgaacagatctctgagttcaaggaagcctttagcctcttcgacaaggacggcgatggttgtattaccaccaaggaacttgggactgtgatgcggtcgcttgggcagaacccaactgaggctgagctgcaggacatgataaatgaggttgatgctgatgtcaatggtaccattttatttcccagaattcct

SEQ ID NO: 135507 - DNA, 240 bp, Glycine max
aacgaaagttgggggctcgaagacgatcagataccgtcctagtctcaaccataaacgatgccgaccagggatcagcggatgttgcttttaggactccgctggcaccttatgagaaatcaaagtctttgggttccggggggagtatggtcgcaaggctgaaacttaaaggacttgacggaagggcaccaccaggagtggagcctgcggcttaatttgactcaacacggggaaacttaccag

SEQ ID NO: 135508 - DNA, 241 bp, Glycine max
cacacacaactacaatgaagaacttcctgataaccagaaccatcaacaactatggcaagatatcagaagcaccacgatgatcagggtcgcaaagtcgacgagtatggcaatgttgagaggcaaactgacgaatatggcaacccggttcatgccagtagtgtcacttatgtagccaccataagtgttggtggctagaatgatgacgctactaagcaacatgatattactggtgtctatgccg

SEQ ID NO: 135509 - DNA, 246 bp, Glycine max
atactcctctgttctctctgtatctcttcaatcttcctgaaaaaaacaaaaacacgataaatcatccaccctctcacattctctctctctctcctgtcaactaatatggcaattgaagaccaagacaacactgtcagagatatcaatccaaagaatatgagaatcatgggtgctggaggccctgatgatgacgacaataggtggccaccgtggttgaagccactgctgaaagagagcttctttgtt

SEQ ID NO: 135510 - DNA, 237 bp, Glycine max
aatgagactaaagggaagcactaatttagaatctatccagattataaagaaacctggaggctcattaatggattcattcttagatgaaggattcattcttgacaagaaaattggtattggacaacccaagcggatagagaatgcaaagatactggtggcaaacactgccatggacacagacaaagtgtagatatatggtgcacgtgttcgtgttgattctatggctagagttgctca

SEQ ID NO: 135511 - DNA, 237 bp, Glycine max
gagagatccatctatcaattaatttccaatggccgatcagctctgcgacgaccagatctctgagttcaaggaagcctttagcctcttcgacaaggacggcgatggctgtattaccaccaatgaacttgggactgtgatgcggtcgcttgggcagaacccaactgaggctgagctgcaggacatgataaatgaggttgatgctgatgggtatggtaccattgatttcccagaattcct

SEQ ID NO: 135512 - DNA, 241 bp, Glycine max
cgctagctagcaagcaagaacagctatggaggcaaagcgatgccatgcactcatgtgcttggcacgtgtatcactcttcctctgcgctctaaccctatccgctgctcacggctgcaccacggttcaagacatcgctagaaagttgaaactcggggacaacgagcttctgcgcacggagatgacgttcaaggtcttcatggagacttacgggcgtagctactccacagaggtagagtatttg

SEQ ID NO: 135513 - DNA, 237 bp, Glycine max
catgcatcagataagatcttcactggtggtattgacaatgatgccaagatttgggattcgcgtaaaggggcagttaccatgacacttcaaggtcatcaagacatgattactgatatgcagccgagtcctgatgggtcctaccttcttacaaatggcatggattgcaaactttgcatttgggatatgcgtccgtatgctccgcaaaatcgctgtgtgacggtagctggaagggcatca

SEQ ID NO: 135514 - DNA, 194 bp, Glycine max
acgttgaatgctgcatagtaccatgtacttagccccgttgaccaacactgactgtaggctgctgaagtgacccatagattctcagctagtgagaacactctcgcccttggtacccagcatcagtcggatgcattggccacaatggaggcacgtgtgaccaactttagaaggacgagtgctctgatccagcacga

SEQ ID NO: 135515 - DNA, 244 bp, Glycine max
agtcagcagccacgcggaatactcgtactgtgtcccactctcacaagacaaccttgtctgatgtcttaacggatgcgaaggagaagctaccagcggataaggcggtgacgcgagaagatgcggagggactgattggagctgagcttaggagcaacctggacatgagaaccacccctggtggggtcgctgcatccatggctgcagcagccacacttaatcaaaacagacaagtgactgatgcgtg

SEQ ID NO: 135516 - DNA, 241 bp, Glycine max
cgattttctcaagagaaactttaagcagatgtctaatgttttgtgggtggctcctgaggacaaggcgagtttatggtcacaacttcattatgtttcgtgtaatagtctgggaatgcaagaagcttatcttgtcaatctcgtaaatgtgttacgagaactgtatttgctcagtccagaggaagctcgctaactgagaaggaaagctctctctcgtattgaatggctgcaaaaagctgatgtg

SEQ ID NO: 135517 - DNA, 211 bp, Glycine max
atgcagagcttgtgtcaatgttctattgaccttcttggtggaggaattttagttgacaaaactggatattgtatcacacttattcgaaattctccaattagtaacttgtgtagagttgctgcttggaagaaaggcatgttaatggttaacgattgtgatgtctggtaatgcatgcagtcagaaggactgattcggcttcattggttcaagc

SEQ ID NO: 135518 - DNA, 237 bp, Glycine max
aaactttgaacggtatgaccattaaccttgtaggtggagtcctccgacaccatcgataacgcgatagctagagattcacgacaaggaagggatcccacctgaccagcagatacttatcttgtgcagggaagcagcttgaggatgctcgaatccttgccgactacactgtcctggaggcatccactctccttctcgagcttcgactttttcgtggcattttttttcgctgtcaagact

SEQ ID NO: 135519 - DNA, 235 bp, Glycine max
ctggttttgagggagacaacatgattgagaggtccacaaaccttgactggtacaagggtcctactctgctagatgcacttgaccagatctctgagcccaagaggccttctgacaagcccctcaggctaccccttcaggatgtgtacaagattggaggaattggaactgtgcctgtgggacgggttgagactggtgtcttgaagcctggaatggtggtgacttttgcaccaactgg

SEQ ID NO: 135520 - DNA, 235 bp, Glycine max
cgattccgtccatgtctcacttgagactctcaatgaacgaaagtagcaagccatgatttaaatggcgaagggttttgctcaaagtcagcggagaagcacttgctggagaccactctcagaacattgaccctaagataaccatggccattgcaagggaggtggcagcagtgactcgccttggcattgaggttgcactggtagttggtgggggtaacatcttccgtggatcctcctg

SEQ ID NO: 135521 - DNA, 267 bp, Glycine max
ttacgtaagcattcagctcgacgcatggtgaaagctttaaggccacactatgagcttaacaatgctgtgcacattgtgacgacttggaactacttatagaatattagcagactagattgccactacctttactgcagactgaacccataatatgactgtacgatcgcggcataatgtcatcacgactgctctacgcgacatcagcatctccaattcacgcatcactctagcagatgttgctaataaactgaggctgaactctgataa

SEQ ID NO: 135522 - DNA, 228 bp, Glycine max
gaaaacctaagcttagaacaggtactagccagagacagacagaggagcgtgaaatgccggagatagacagcgggagagtccattaacgaaacagctacacacattcgtgcttctgccaaggctagcatggagaagaccaaggccactgtccaagagacggcagctagaatgacagcacgtgatccggtgctttaggagttggcaacccataagaaagaggcaacgatg

SEQ ID NO: 135523 - DNA, 249 bp, Glycine max
gcccttcatcagagataacttgacaaataaaatcaccatgtctatcatcccaaacttgttcggtggtagacgaagcaacgtcttcgacccattctctctggacgtatgggaccctttcgaggggtttcctttttccacaggtcacgtgccttcctctggtggggaaagcagtgccatagccaacactcgcgtggactggaaggagactccggcggctcacgtgttcaacgttgatcttcccgggttgaa

SEQ ID NO: 135524 - DNA, 241 bp, Glycine max
ctttgaaggccgaagaggggaaaggttccatgtgaacggcacttgcacatgggttagtcgatcctaagggacgggggaagcccgtctgatagcgctctgtgcgcgtactccgaaagggaatcgggttaaaattcctgaaccgggacgtggcggctgacggcaacgttagggagtccggagacgtcggcgggggccccggaaagagttatcttttctgtttaacagcctgcccaccctggaa

SEQ ID NO: 135525 - DNA, 240 bp, Glycine max
cgaaactactctacaaacacaacaaaactctccaattctgaagattttcttatctcttgtctttgaaactagaagctccgtgattgatcaatggcgacaaaagaaggcaaagccataggcatagacctcggcacgacctacagctgcgtgggcgtgtggcaaaacgaccgcgttgagttcatccccaacgaccaaggcaaccgaaccaccccctcctatgtcgccttcaccgacaccgag

SEQ ID NO: 135526 - DNA, 205 bp, Glycine max
ttagagagaaaaaaaaatggctgatacaggtggaggagatgcagtgagaccagtggtaatatgtgataacaagtgtggctgcacacttccatgcactggtggttccacttgcaggtgcacaagtgctggcactgccacaggagggggtgatcacgtgacatgctcgtccggaaaccactgtggttgcaatccatgtccaggtccc

SEQ ID NO: 135527 - DNA, 236 bp, Glycine max
cttccttacaatcaaaaccaacaacaactatggcaagttatcaaaagcactacgatgatcagggtcgcaaggttgacgagtatggcaacgttgagaagcaaaccgacgaatacggcaaccctgttcatgctgctagtgtcacctatgtagccaccagaactgctgctggtggttacagtgatgacattaataagcaacatgataccaccaatgcctacggcgtagacactggtaga

SEQ ID NO: 135528 - DNA, 233 bp, Glycine max
cacaactactacaagtacttccttacaatcaaaaccaacaacaactatggcaagttatcaaaagcactacgatgatcagggtcgcaaggttgacgagtatggcaacgttgagaagcaaaccgacgaatacggcaaccctgttcatgctgctagtgtcacctatgtagccaccagaactgctgctggtggttacagtgatgacattaataagcaacatgataccaccaatgcct

SEQ ID NO: 135529 - DNA, 232 bp, Glycine max
cttgcggctagggttttagcgcagttcttctagatttaaggaagatgggtaaggaaaaggttcacatcagtattgtggtcattggccatgtcgactctgggaaatccactaccactggtcacctgatttacaagcttggaggcattgacaagcgtgttattgagaggtttgagaaggaagctgctgagatgaacaagaggtctttcaagtatgcctgggtgctggacaaatt

SEQ ID NO: 135530 - DNA, 236 bp, Glycine max
gcaatccgtgtaccaggctttcactcaggtgtttgctcagcagctaccaaagcaagcacaggtgaaatctgtggcaccatttgggttatgcttcaactccaacaagatcaatgcatatcctagcgtggaccttgtgatggacaagcccaatggtcctgtttggagaatctctggtgaggacttgatggtgcaggcacaacctggggtcacgtgtttgggtgttatgaatggaggaa

SEQ ID NO: 135531 - DNA, 247 bp, Glycine max
ggaaagaattgatcgttgaaaatgcagggaggaaagaaagcgggagagtccattaaggaaacagctacaaacattggtgcttctgccaaggctggcatggagaagaccaaggccactgtccaagagaaggcagaaagaatgacagcacgtgatccggtgcaaaaggagttggcaacccaaaagaaagaggcaaagatgaaccaggcggagctggacaagcaggcggcgcgtcagcataacacggcgg

SEQ ID NO: 135532 - DNA, 242 bp, Glycine max
gttaatcaaagatgtacttaataagatgcatgatttcccaaagcctgacacgagtccgcttgtcaagttacttgctactggtcttttaaaccatgagggagaaaaatggaacaagcacagaagaataattagccctgcattcaatttagaaaaattgaagaatatgttaccaatattctacaaaagttgcaatgatttaattatcaagtgggaggaaatgttgtcttctgatggatcatgtg

SEQ ID NO: 135533 - DNA, 240 bp, Glycine max
gatttgtacggaaagagaatcttgaatagggatttggaaccggggttcttcgtgaaccacttcgttaaggatttggggatttgcttgaaggagtgtcagaatatggggattgctttgcctggcttggctctcgctcaacagctttatgtgtcgcttagggctcacggtgaaggtaatttgggcactcaggctcttattttggtccttgagcgactcaacaatgttactcttcctccctcc

SEQ ID NO: 135534 - DNA, 236 bp, Glycine max
ttgaggagttcggaaattttggatcatccacacactcagatttgtaatgaaggtcgtcagaatgcattatcagagatcttggagatattgacagtggtatgtgaaactcacaatttacctctggcccagacatggattccctgtaagcatcgaagtgttttggcccaaggtggtggtgtaaagaaaagttgttctagttttgatggtagatgcatggggaaagtttgcatgtctac

SEQ ID NO: 135535 - DNA, 234 bp, Glycine max
ataaaatcctcatatctgttcccaaaagcttgtttgtgagaatggcttcgggtgaaaagaaattcccacctcaacaacaacaaacacagcctgggaaggagcatgctatgaatccagtaccccaattcactagccctgactacaagccttcaaataaacttcaaggaaagatagcattagtgactgggggtgactctgggattggacgagcggtgtgtaacttgtttgccttag

SEQ ID NO: 135536 - DNA, 236 bp, Glycine max
ctcaaaaaagcaaagattacgcaggtgatgctgcacagaatgtcaaagattatgcaagtgatgcagtgcagaagagaaaagagtattctggtgatgcttctcacaagagcaaagaggcttctgattatgccagtgagacggctaagaagaccaaagattatgtcggtgatgctgctcagagaagcaaaggggctgctgaatatgctagtgatgcggctcagaggaccaaagagtat

SEQ ID NO: 135537 - DNA, 202 bp, Glycine max
cttagaattcagaaacaaagaaaagaagaaaggaaagaattgatcgttgaaaatgcagggaggaaagaaagcgggagagtccattaaggaaacagctacaaacattggtgcttctgccaaggctggcatggagaagaccaaggccactgtcccaagagaaggcagaaagaatgacaccacgtgatccggtgcaaaaggagtt

SEQ ID NO: 135538 - DNA, 241 bp, Glycine max
ctcgagccggctaacttcaacacctttaattttctaaaagtaattcagcggctgaataccaagcggagaagatgagtcaggagcagccacggcgtcccaaaggccaaaaccccatcaaatacggcgacgtttttgtcgtctccggcgaccttgcacagaagcccgtcgcaccggaagatgctgccatgatgcaaagcgcggaaactcgagtgctcggacaaacccaacccggcggagcagc

SEQ ID NO: 135539 - DNA, 240 bp, Glycine max
cggctcgagcggctcgagcggctcgagcggctcgagcacaactacaagaaagaacttccttatgaaccaaaagcaacaacaactatggcaagttatcagaagcactacgatgatcagggtcgcaaggtcgacgagtatggcaatgttgagaggcaaactgacgaatatggcaacccggttcatgccactagtgtcacttatgtagccaccaaaagtgttggtggctacaatgatgacgct

SEQ ID NO: 135540 - DNA, 238 bp, Glycine max
cataaaaaaccactctacaaaactctccagtaattctgaaaattttattttcttttggtgaaattaacagctctgtgattgatcaatggcgacaaaggaaggcaaagccataggcatcgatctcggcacgacctacagctgcgtgggcgtgtggcaaaacgaccgcgtcgagatcatccccaacgaccaaggcaaccgaaccactccctcttatgtagccttcaccgacaccgagagg

SEQ ID NO: 135541 - DNA, 235 bp, Glycine max
gttcggcataggttgctccgatcacctccactagagcctagaggagttgctggacacccatgacatgcccaaattttacttaggatttggtttggtttggtttggtttggtagggtaaccttgtgttgttgttccaaaaaataaaaggttttgttaaagttaaactacttcctatgtaccctagaatctacttttaaggttatggttcttattattagtgcaataaaattggttg

SEQ ID NO: 135542 - DNA, 235 bp, Glycine max
ctatgacaaggcttcggaaacgagttgctacacggctgaaagattcccaaaacacatttgctatgctgactaccttcaatgaagttgatatgactaatttgatgaagctccgttctgattataaggatgcttttgttgaaaagcatggagtcaaattggggcttatgtctggctttgtcaaagtatgttttctaattactgaaatataaactagctgggctttctcctttgattt

SEQ ID NO: 135543 - DNA, 232 bp, Glycine max
gctagctagctagcaagcaagcacagagatggaggcaaagcgaggccatgccctcatgtgcttggcacgtgtttcactcttcctctgcgctctaaccctatccgctgctcacggaagcaccacggttcaagacatcgcgagaaagttgaaactcggggacaacgagcttctgcgcacggagaagaagttcaaggttttcatggagaattacgggaggagctactccacagag

SEQ ID NO: 135544 - DNA, 231 bp, Glycine max
gcgacacgacacaacacaacacaagctttattctttttcttcgcttcttctgtacagcacccaagattgaagatgatagaccttgcgcgcgtgcagaaggagcttgtggaatgcagcaaggacgcggagggatcgggcatcaaagtcagccccaaaaacgacaaccttgttctcttgatcggcaccattcctggccccgtcggaactccagatgaagggggcattttccag

SEQ ID NO: 135545 - DNA, 232 bp, Glycine max
ctactctacactgcgattttctccgaaatgcttttgattctcacgctcgtcttcaaaaccccactgagaaaactcgtcatcgtttccctcgatagtgtgaagcgcggtcgcggtcccgtggtggtttccaccgtgggcgccacattgatggtggttctcgcttcgagcctctacagcatggccaagatccagcaacgcaccctcgaggccggcatagtcaaccccaccgacc

SEQ ID NO: 135546 - DNA, 231 bp, Glycine max
gctacttcctactccaaccgcacttctgctccgcaattatcatgggcaaggtcaagatcggaatcaacggatttggaagaattggccgtttggtagccagagtggctctgcagagagacgatgttgaactcgttgccgttaacgaccctttcatcaccaccgattacatgacatacatgtttaaatacgacagtgttcatggacactggaagcatcacgatgtcaccgtta

SEQ ID NO: 135547 - DNA, 197 bp, Glycine max
cagcagccttcttcgccgtttcagctcaagagccaccagcaggtaagatatggttaagcataacaacgttatccccaatgggcacttcaggaaacactggcaaaactatgtgaagacttggtttaatcaaccagcacggaagaccagaaggcgtttagctcggcagaagaaggctgtcaagattttcccagggctta

SEQ ID NO: 135548 - DNA, 236 bp, Glycine max
cacacacaactacaagaaagaacttccttataaccaaaaccaacaacaactatggcaagttatcagaagcactacgatgatcagggtcgcaaggtcgacgagtatggcaatgttgagaggcaaactgacgaatatggcaacccggttcatgccactagtgtcacttatgtagccaccaaaagtgttggtggctacaatgatgacgctaataagcaacatgatattactggtgtcta

SEQ ID NO: 135549 - DNA, 231 bp, Glycine max
gaagaaccttaccagggcttgacatgccgcgaatcctcttgaaagagaggggtgccttcgggaacgcggacacaggtggtgcatggctgtcgtcagctcgtgccgtaaggtgttgggttaagtcccgcaacgagcgcaaccctcgtgtttagttgccaacatttagtttggaaccctgagcagactgccggtgataagccggaggaaggtgaggatgacgtcaagtcatca

SEQ ID NO: 135550 - DNA, 227 bp, Glycine max
gctactcgctcatcccgtggagataatgggagaaacaaaggacgaagcatacgaggacacgcttctcgatcacgaggaggaagacgaaaaggcccccgactccgccggagctaaagtcaacggcgaagtaccaagaagggctatgttggaattcacagttcgggattcagggacttccttctgaagccagagcttcttcgggctattgtggactcgggatttgagca

SEQ ID NO: 135551 - DNA, 241 bp, Glycine max
tggaaacgaaacctcttctcactagacactgactaacaatggcggctgaggctcagcttcctgaccacttcaagtgtccgatttccctgcaaatcatgtccgaccccgtcatcctctcttccggccacaccttcgacggctcctccatccagcgctggctggacgccggccaccgcacttgcccaattaccaaactgcccctccctgcacactcctccctcatccccaaccacgccctccg

SEQ ID NO: 135552 - DNA, 239 bp, Glycine max
gaaaacctaagcttagaattagaaacaaagaaaagaagaaaggaaagaattgatcgttgaaaatgcagggaggaaagaaagcgggagagtccattaaggaaacagctacaaacattggtgcttctgccaaggctggcatggagaagaccaaggccactgtccaagagaaggcagaaagaatgacagcacgtgatccggtgcaaaaggagttggcaacccaaaagaaagaggcaaagatg

SEQ ID NO: 135553 - DNA, 229 bp, Glycine max
atcacacacaactactacaagtacttccttacaatcaaaaccaacaacaactatggcaagttatcaaaagcactacgatgatcagggtcgcaaggttgacgagtatggcaacgttgagaagcaaaccgacgaatacggcaaccctgttcatgctgctagtgtcacctatgtagccaccagaactgctgctggtggttacagtgatgacattaataagcaacatgatacc

SEQ ID NO: 135554 - DNA, 230 bp, Glycine max
cttctgatgatttttaccctcgtgatcctgcttcccataccatccatatttcttctgttgcatacaactcactatctcttggagaattcatgcaacctgactgggacatgtttcatagtttacacccagcagcagattatcatgctgcagctcgtgcaattggtggatgtcctatttatgttagtgacaagccaggcaatcacaattttgatcttcttaagaagctggtt

SEQ ID NO: 135555 - DNA, 211 bp, Glycine max
gggaggaaagaaagctggagagtccatcaaggaaacagctgcaaacattggtgcttctgccaaggctggcatggagaaaaccaaggccactgtccaggagaaggcagaaagaatgacggcacgtgatccgatgcaaaaggagttggcaacccagaagaaagaggcaaagatgagccaggcagagctggacaagcaggcggcgcgtcacata

SEQ ID NO: 135556 - DNA, 240 bp, Glycine max
gaacagtacagagcattttgatgcatgtaagtggacaaaatcagaaccacattcctgggaattgatcttcccaatagaggtatgtggtcctaataatggttttgaaatgtggagttctgagtgggcaaatcaaacttcatggcatttgagtttccttattgacaatcccaaacagtctacagtttttgatattctcttgggaatctctcaagattttgaaattgctggtaatactcttat

SEQ ID NO: 135557 - DNA, 235 bp, Glycine max
caataagcggaggaaaagaaactaacaaggattcccttagtaacggcgagcgaaccgggaaaagcccaccatgaaaatcggtcgccctcggcgtccgaattgtagtctggagatgcgtcctcagtggcggaccgggcccaagtcccctggaagggggcgccagagagggtgagagccccgtcgtgcccggaccctgtcgcaccacgaggcgctgtcggcgagtcgggttgtttgg

SEQ ID NO: 135558 - DNA, 231 bp, Glycine max
caatcatctatacgttctcatacacaatggctctctatgctcttgttttgttttatgtggcatgcaaggatctgcttcaaccattcaatccagtcccaaagtttattataataaaatctgttgtattcctaacttattggcagggtgtcttagttttccttgccgcaaagtcagaatttgttaaggatgcagatgaagctgctctacttcaagattttttcatttgcgttg

SEQ ID NO: 135559 - DNA, 230 bp, Glycine max
ttttcccagtccaagcagcctccaattcgtgccactctcttcaaaatggccgttaccttctcaaatctccacacagaatcaggtctcaagtccctcgacgacttcctctctgggaaggtctacgtttctggggatcagttcacaaaggacgacatcaaagtgtatggtgctgttttggagaagccaggtgactcttttcccaatgctgccaagtggtacgaggttgtctc

SEQ ID NO: 135560 - DNA, 229 bp, Glycine max
tgaaattttcacaagaggaatttcttacagcttggtcaactcaggtgcgtcctgcaacaactctgttggctgatgggtgtccatatttgtatgctatggtgcatgatagttcagtgtctacaataccaggtgattttgtcattggtgttaagttgacaaccataaacaatatgtgtgcatatgggctcaatcctggtatttcaggttctcgtcttttgggcaccattcc

SEQ ID NO: 135561 - DNA, 227 bp, Glycine max
gctaaagttcctaaaccatcttctacttcttcaattcagataccactggcaccttcatatcctgattggtcaagctcgatgcaggcttactatgctcctggagccactccacctgcattttttgcctcaaatattgcttctccaactccccattcttatatgtggggaagccagcaccctctaattccaccatatagtactcctgttccatatccagctatatatcc

SEQ ID NO: 135562 - DNA, 215 bp, Glycine max
cggctcgagcgctgttccaatgccaaatctgagaggcaaagcggttgttggtgttggttccagaatgataaggtgcatggctaaccccagaagagttcaaatggtggccaagcaaattaggagagggctttctcatatgcttctcaccgataaagtcttgcagtatgctgttcttcccgaagcctccttaggagccgaccgttacctctcttctc

SEQ ID NO: 135563 - DNA, 229 bp, Glycine max
atcaaagaaaggggtggtggctgcttcgaaagcttaataatttgtttatttccagaacatcatagttttcgcagcagcaaactaacaaattactcatatcatataataagatggcccgttctctctcgcaagccaaacgtattggtgtccttgttgctcaatctatctccctaattcccgttcatcggcgaggttacgcagtggcatccgatgtatcggtaagagttgg

SEQ ID NO: 135564 - DNA, 248 bp, Glycine max
gtgagagaaagagaaatggcaacaagcgaagaagtggttgctgcggcgcggaggagccgcgccggaggagggttgaagcacaaactggagagaaaatggacgttttggtgcgacaaccaatccaaacccaagcaaggcgctgcttggggaacctctcttcgcaaggtctacaccttcgacaccgttgaagagttctggtgtttgtatgatcaggtattcaagcccagcaagttgcaaatcaatgccga

SEQ ID NO: 135565 - DNA, 251 bp, Glycine max
ggagtcttcatatccctacactggggagagaggtgaatgcaagtttgatccagagaaaatagcagttaagatcacaaatttcaccaatatccctgctgatgagaaccaaattgccgcatatttagtaaaaaatggtccacttgctatgggcgtgaatgcaattttcatgcaaacatacattggtggtgtctcatgccctctcatatgtagcaagaaaaggctgaaccatggtgtgttacttgtgggatatg

SEQ ID NO: 135566 - DNA, 248 bp, Glycine max
attgtttgttgttgtaactcgttcttcttcttttgttgttctgtgtttgtgtttgttttttctctcacctgaaaatgtcttgctgcggtggtaactgtggttgcggaagctcctgcaagtgcggcaacggctgcggaggctgcaagatgtacccagacttgagctacactgagtcaaccaccaccgagaccttggtcatgggagtggcacctgttaaggctcaatttgagggtgctgaaatgggtgtg

SEQ ID NO: 135567 - DNA, 251 bp, Glycine max
atcccaggcgaggagaaagatggaggggaaggagcaggatgtgtcgttgggagcgaacaagttccccgagagacagccgattgggacggcggcgcagagccaagacgacggcaaggactaccaggagccggcgccggcgccgctggttgacccgacggagtttacgtcatggtcgttttacagagcagggatagcagagtttgtggccacttttctgtttctctacatcaccgtcttaaccgttatgggag

SEQ ID NO: 135568 - DNA, 253 bp, Glycine max
agaacctaagtgagaaacaaagaaaggaaataattgatctttgaaaatgcagggaggaaagaaagctggagagtccatcaaggaaacagctgcaaacattggtgcttctgccaaggctggcatggagaaaaccaaggccactgtccaggagaaggcagaaagaatgacggcacgtgatccgatgcaaaaggagttggcaacccagaagaaagaggcaaagatgagccaggcagagctggacaagcaggcggcg

SEQ ID NO: 135569 - DNA, 256 bp, Glycine max
tcacacacaactactacaagtacttccttacaatcaaaaccaacaacaactatggcaagttatcaaaagcactacgatgatcagggtcgcaaggttgacgagtatggcaacgttgagaagcaaaccgacgaatacggcaaccctgttcatgctgctagtgtcacctatgtagccaccagaactgctgctggtggttacagtgatgacattaataagcaacatgataccaccaatgcctacggcgtagacactggta

SEQ ID NO: 135570 - DNA, 247 bp, Glycine max
atttctcagtctctgtgtttgcggctgaggattccgaacgagtgaccttcttcgtttctcgcaaagtttaagtaatcatgggtaaggaaaaggttcacatcaacattgtcgtcattggacatgtcgactctgggaagtcaactaccactggtcacttgatctacaagcttggaggtattgacaagcgtgtgattgagaggttcgagaaggaggctgccgagatgaacaagaggtcattcaagtatgc

SEQ ID NO: 135571 - DNA, 248 bp, Glycine max
aatctttctgcaccatcgttctccatttttggctttacaaaaccactgtgtctgattaagggttctttaatatttccaatatttcttgtagtgaaaaagttgttacctaaaagaagacctagtttttggtgttgtagaaggaagagaagaattaacatgaaaattcagtgtgacgtgtgtgagatagctccagcaacagtgatttgttgcgcggatgaggctgctttgtgtgccaaatgtgacgttga

SEQ ID NO: 135572 - DNA, 250 bp, Glycine max
tcgcaagcaaaaagaaagaatcccaggcgaggagaaagatggaggggaaggagcaggatgtgtcgttgggagcgaacaagttccccgagagacagccgattgggacggcggcgcagagccaagacgacggcaaggactaccaggagccggcgccggcgccgctggttgacccgacggagtttacgtcatggtcgttttacagagcagggatagcagagtttgtggccacttttctgtttctctacatcac

SEQ ID NO: 135573 - DNA, 250 bp, Glycine max
tgagaaacaaagaaaggaaataattgatctttgaaaatgcagggaggaaagaaagctggagagtccatcaaggaaacagctgcaaacattggtgcttctgccaaggctggcatggagaaaaccaaggccactgtccaggagaaggcagaaagaatgacggcacgtgatccgatgcaaaaggagttggcaacccagaagaaagaggcaaagatgagccaggcagagctggacaagcaggcggcgcgtcaca

SEQ ID NO: 135574 - DNA, 246 bp, Glycine max
gtccactttatcaaattgggccaaagaattcaggaagtggcttcctgatatgaatattatcatatatgttggtactcgtgcaagtcgagaggtttgtcaacaatatgaattttataatgagaaaaaacctgggaagccaataaaattcaatgcactgttgactacatatgaagtagttttgtaggataaggctgttctctctaagataaaatggaattatctgatggtggatgaggctcataggct

SEQ ID NO: 135575 - DNA, 245 bp, Glycine max
cttagaaagaaaaaaacttaaatcaaaatacttaatagcatggagatacatttatacaaaacttctaccccaagcacacgcaatggagccgtagacagtcaagtaaaatccaatccacgaaatcatttgatctatggacagcatcgttgtggtaaaggccgtaatgccagaggaatcattaccgcagggcatagagggggaggtcataagcgtctataccgtaaaattgattttcgacggaatga

SEQ ID NO: 135576 - DNA, 246 bp, Glycine max
catggtcgttttacagagcagggatagcagagtttgtggccacttttctgtttctctacatcaccgtcttaaccgttatgggagtcgccggggctaagtctaagtgtagtaccgttgggattcaaggaatcgcttgggccttcggtggcatgatcttcgccctcgtttactgcaccgctggcatctcagggggatacataaacccggcggtgacatttgggctgtttttggcgaggaagttgtcgt

SEQ ID NO: 135577 - DNA, 245 bp, Glycine max
ccgatgacgcggctgcagcgagggaagtgagagacaaatcagcctcaaagtcaccaggtatctacaattctgccactgctgacaacaaaaccggttccaaggtcggagagtacgcagattatggttctcagaaggcgaaagaaacaaaagatgcaacgaaggaaaaagctggagagtacacagattatgcttcgcagaaggcaaaggaaacgaaggacaagacaatggaaaaggctggagagtac

SEQ ID NO: 135578 - DNA, 246 bp, Glycine max
catttttgtactaagaagcatttgttacatttatgtaaccaaaggaaaatcaaaagtacgcaggaggtgaagctcggtggcgaaatcgacatgcaacgcagtgaaagcatgcgactaaaggagaagaaggtgaaggatttgatggttgacaagaagaggctagtggaggtgccgtacatggcgtccctggcccacacaatgactacactggtggcgaacaaggttgtggcggtgccggtggctgcg

SEQ ID NO: 135579 - DNA, 246 bp, Glycine max
agtgaacgagcttgtttatgatgacccgccagtgatttacacccgctcacattctttggttgtcccttctatttgtgttagtcaatcacttaagcttggcaagctcactattcatgagaccgaggattctttggaactagtggatcatgtcaatggagagaccattaaagacatcaaagattcttcatttgtcgacaaatcattgaaagatgaagatgggaatctcaagaagatccagagagttag

SEQ ID NO: 135580 - DNA, 248 bp, Glycine max
agcgggaattggaggccaaaaaaccatctcaacctcaggaagctgaagagaggccatcagaaggaattggcgaaactgtgaggcagtatgcacaaaaaccaaagccaagtgaaagaaaccctcagaaggagggaaccggaagcatcgtgtttacagcaataggcgaaacagtaagcagtgccggtgagaaggtatcgaaaccgtttaaaaacactatgggaggagaaagtgaaggaggaggagggaaa

SEQ ID NO: 135581 - DNA, 249 bp, Glycine max
cgagcattcgccaacatttgcaacagtggcgtttctgaggcctccatggaagaggcttgtttggcagcctgtgaaggctacaatgctgggctattgcatccatcaaacagaggctacagtgcttgattttgggttttgtacacaaaagctttaaagcccggttgatgatgtaatatttctctattgcattctgcctactggtttctgctgcttgtgtcaaattttctctaaactagagtagcccaatag

SEQ ID NO: 135582 - DNA, 242 bp, Glycine max
ggacaaaatcggaaccacattcctgggaattgatcttcccaatagaggtatgtggtcctaataatggttttgaaatgtggagttctgagtgggcaaatcaaacttcatggcatttgagtttccttattgacaatcccaaacagtctacagtttttgatattctcttgggaatttctcaagattttgaaattgctggtaatactcttatgccagctttttctgttccacaggctactgccaga

SEQ ID NO: 135583 - DNA, 241 bp, Glycine max
gggtttagcgcagttcttctagatttaaggaagatgggtaaggaaaaggttcacatcagtattgtggtcattggccatgtcgactctgggaaatccactaccactggtcacctgatttacaagcttggaggcattgacaagcgtgttattgagaggtttgagaaggaagctgctgagatgaacaagaggtctttcaagtatgcctgggtgctggacaaacttaaggctgagcgtgaaagag

SEQ ID NO: 135584 - DNA, 247 bp, Glycine max
ggagccaaatccagttgaggctggacgaaccagtgcaattaaggagagtgctataacaataggagaggcattggaggccacggcacagacggtgggtcacaagccggtggatcagagtgatgcctcagcgattcaggcggcggaggttagagcaacgggaagtaacgttataacgccgggaggacttgcggctatggctcaatcagctgctgcttataatgctgactgcaagcatgaccaggacaag

SEQ ID NO: 135585 - DNA, 248 bp, Glycine max
agctgaagaaaacctaagcttagaattagaaacaaagaaaagaagaaaggaaagaattgatcgttgaaaatgcagggaggaaagaaagcgggagagtccattaaggaaacagctacaaacattggtgcttctgccaaggctggcatggagaagaccaaggccactgtccaagagaaggcagaaagaatgacagcacgtgatccggtgcaaaaggagttggcaacccaaaagaaagaggcaaagatgaa

SEQ ID NO: 135586 - DNA, 241 bp, Glycine max
caaagtttcacttcagccttatccggtttagggtttcggtttttgacccaacctttgacgtatcgaaaccttaagtttcggatcaggtctgagcaatctggttggtagaacctttggtcttagagagtcaagttttatgtctgaattagacgatcaaattcctactgccttcgatccttttgctgatgcaaatgctgatgactcgggtgctgggtcaaaggagtatgtgcatattcgcgta

SEQ ID NO: 135587 - DNA, 241 bp, Glycine max
attttagctttctcttccttcataatttctcacctttcaaatctccattcagcttcattttctgcatagaaaaaacccttttctggagaaagaatatagtcttcagctggacaaggatcattcatcttgaaagaagagtttgtgtgtgacaatctttatagttctaaggagggtgcaagagagaactgaatttgctgtgatggcaactcgtagatatgcttttggaagagctgatgaggcc

SEQ ID NO: 135588 - DNA, 239 bp, Glycine max
caatcctggtatttcaggttctcgtcttttgggcaccattcctcagtctatttcacagcaaactgtttggaatcaaatggcaacagtgagaacaccactgaattttgatcctagcaagcagagcttttgtcaattttctattgaccttcttggtggaggaattttagtggacaaaactggagattggatcacacttatacaaaattctccaattagtaacttgttgagagttgctgctt

SEQ ID NO: 135589 - DNA, 242 bp, Glycine max
acacggcggcgaacaggctgccacggcagggcacatgggacaacccatggggacccatcagacgtcagctatgcccggtcatggaaccggacagcccacgggccatgtcaccgagggagtggtgggctcacaccctattggaaccaacagaggcccgggtgggactgctacggcccataatacccgtgcggggggaaacccaaatgattatgggtatggaactgggggtacttacaattaaa

SEQ ID NO: 135590 - DNA, 244 bp, Glycine max
ctcaaggacatcgtcggaatccccacctccacaaaaacccacgaacaagccctctccctcgggatccccctctccgatctcgacgcccaccccgccatcgatctcgccatcgacggcgccgacgaggtcgatcccttcctcaacctcgtcaagggccgtggcggctccctcctccgagaaaaaatggtcgaaggcgcatgcaagaagttcatcgtcatcgttgatgagtccaagctcgtaaact

SEQ ID NO: 135591 - DNA, 247 bp, Glycine max
caaaaccaacaacaactatggccagttatcaaaagcactacgatgatcagggtcgcaaggttgacgagtatggcaacgttgagaagcaaaccgacgaatacggcaaccctgttcatgctgctagtgtcacctatgtagccaccagaactgctgctggtggttacagtgatgatccaaataaacaacatgataccaccaatgcctacggcgtagacactggtagacagcattctagtggtggctacga

SEQ ID NO: 135592 - DNA, 241 bp, Glycine max
tgagaaagagagagagagagagagaaactgagagaaattcgcaaaccctaatttcggaaagatcggcgatggctgcctctccggatcgcgagaacttcgtctacatcgccaagctcgccgaacaggccgagcgatacgaagagatggtggaatcaatgaagaacgttgcgaatctcgacgttgaactgactgtggaggagcggaatttactttctgttgggtacaagaatgtgattggtgc

SEQ ID NO: 135593 - DNA, 240 bp, Glycine max
ctaaagaatccaccagtaacaaagtctctgagtatgccactgacactgcacagaaatccaaggattatgcaactgacactgctctgaaatcagaggactatgcaggtgatgctgctcagaaatcaaaggactacgcaggtgatgctgctcagaaaaccaaagactatgccagtgacactgcacagacatcaaaggactatgctggtgatgctgctcagaaatctaagggctatgttggtg

SEQ ID NO: 135594 - DNA, 241 bp, Glycine max
ctcgagccgctcgagccgctctttctccgagaacaaaaaaaaaaacgtgattcgctcttcagcttcgaatacaccacaaaaccaacaaacgagaagaggagtgagagaagatggggttgtcgttcacgaagctgttcagcaggttgtttgcgaagaaggaaatgaggattctgatggtaggtctcgatgctgctggtaagacaaccatcttgtacaagctcaagcttggagaaatcgtcac

SEQ ID NO: 135595 - DNA, 239 bp, Glycine max
ggcatctcgtcaaaacaacaagcaagagcttgatgaaagagcaaggcaaggagagactgttgtcccgggtggaactggtggcaagagcctggaggctcagcaacaccttgctgaaggaaggagcaagggagggcaaacaaggaaggaacagctgggtacagaagggtaccaggaaatgggacgcaaaggagggttgagcactgtggacaaatcaggagaagaacgtgctcaagaggaag

SEQ ID NO: 135596 - DNA, 243 bp, Glycine max
  unsure (1)..(243): unsure at all n locations
ccaggctcttatgttggtgaagttgtcaaantcatgggcaagaacaaagtccttgttaaggtccacccagaaggaaaatatgtcgttgatattgacaaaagtattgacattacaaagattactccatccactagagttgcacttcgcaacgacagttatgttcttcacttagttctgccaagtaaagttgatccattggtcaatctgatgaaagttgagaaggttcccgattctacttacgac

SEQ ID NO: 135597 - DNA, 243 bp, Glycine max
aagaaaataactttgctttttcccttctttttaacccccttaaatgaaaaaaggggttccccgacttggatagggaactatgcgagtgacctacctaatcttattgtagaaattttcaggatcaatgattagaccatgcagactagaaatgctttttcttgtataaaggaagggattactcgatccatttccatatcgatcatgatatatataataattcgagcacccatttcaaacgcatat

SEQ ID NO: 135598 - DNA, 243 bp, Glycine max
cgggcgcgtaggagatgatttttggtgcactgatccctctggagatcctgatggcacgtattggctccaagggtgtcacatggtgcactgtgcctacaacagcttgtggatggggaattttattcagccggattgggacatgttccagtccactcacccttgtgccgaattccatgcagcctctagggccatctctggtggaccagtttacgttagtgattgtgttggaaagcacaacttcaa

SEQ ID NO: 135599 - DNA, 243 bp, Glycine max
caacaactatggcaagttatcaaaagcactacgatgatcagggtcgcaaggttgacgagtatggcaacgttgagaagcaaaccgacgaatacggcaaccctgttcatgctgctagtgtcacctatgtagccaccagaactgctgctggtggttacagtgatgacattaataagcaacatgataccaccaatgcctacggcgtagacactggtagacagcattctagtggtggctacgatggtg

SEQ ID NO: 135600 - DNA, 215 bp, Glycine max
aaagatacctgtttgcgatttcattacaatctccccagtttctaatctcagctaagaaaaaccaaatgatgtctctgattccaggtttcttcggtgcccgaaggagcaacgtcttcgatccattctcactcgacatttgggatcccttcaaggattttcatgttcacactgcttctgtttctgctgaaaattctgcattcgtgagccctcgtgtg

SEQ ID NO: 135601 - DNA, 237 bp, Glycine max
gttgaatttctggttaagctattatgggatgaggttctggattgcactagtggaaaagggcatcaagtatgagaatagactagagaatattagtaataagagccagttactcttgttaatgaaccctgttcacaagataataccagtcctcttcgacaatagcagacactgctgtgattcactcattgctgttgagtatattgatgaggtttggaatgatcaatctcccttgttgcc

SEQ ID NO: 135602 - DNA, 234 bp, Glycine max
tgcactgtaacaaaacatgtgtccctggagattttagctgctcttgcattcaaagaaatgaaggtgactttccatatactccaaatggtgttttagtgagtcggtaaccattggttcatgagtgtggcccattgtgcaagtgttctcctaactgcaataatcgagtattccagactggtttgaagcaccacttggaagtgttcataacaaaagatttagggtggggtcttagat

SEQ ID NO: 135603 - DNA, 103 bp, Glycine max
ctactgagtacacacactagtagaatggtggcttcgatcctccactactttctagccctctctctttctggctcttttcttctcttcttatccgagtcagtca

SEQ ID NO: 135604 - DNA, 228 bp, Glycine max
actgttgccaaggatcctgttggaaatgatgtaattgcagagaattggctcaaggaacatggacctggtgaccgtctccttgcacaacgattgaagggagatcctacctatcttgttgtgcagaaagacagaacccttgcaccatatgcaactaatgccgtgtgcactcaccttggatgtgtcgtgccatggaatcaaccagagaacaacttcatctgcccttgccat

SEQ ID NO: 135605 - DNA, 233 bp, Glycine max
agcttatcatgtcaatctcttaaatgtgatacgataactgtatttgcacactccagaggaagatcgccaattgagaaggatagctctctctcttattgaatggctgcaaaaagctcatgtgcctaccatagcacagattgaagagttccattcgatgcagaggatgatgaatgctcctgattcaaatgataatattgatctaccgttgagcattcatttgttgggtttacaag

SEQ ID NO: 135606 - DNA, 234 bp, Glycine max
gattcattcttcaccaaatcttcgcaaagaaacactacacatccatggtaactgctggcgtgcatgaagttcgtgttcaccctctaactttcacctctgagctaccttctctctttgacggaatcaccaggttgcacatcagttatatttgtccctatgcgcagcgtgtttggatcactcggaactattagggactacaagacaagatcaaactggttcctattgacctacaaa

SEQ ID NO: 135607 - DNA, 228 bp, Glycine max
ggctcgagcggctcgtggcacggccacctcccaaagaggcctgaggagattggtgctggtgaccaaggtcatatgttcggctatgccactgacgagacttccgagctcatgcccttgagcaatgtccttgccacgaagctccgtgccaagctcaccgaggttcggaagaacgggacatgcccttggctgagacctgatcgcaagacccacgtcactgttgagtactac

SEQ ID NO: 135608 - DNA, 238 bp, Glycine max
  unsure (1)..(238): unsure at all n locations
gtaccatttttgtactaanaagcatttgttacatttatgtaaccaaaggcaaatcaaaagtacgccggaggtgaagctcggtggcgaaatcancatgcaacgcagtgaaagcatgcgactaaaggacaagaaggtgaaggatttgatggttgacaagacgaggctagtggaggtgccgtacatggcgtccctgccccacacaatgactacactggtggcgaacaaggttgtggcggtg

SEQ ID NO: 135609 - DNA, 240 bp, Glycine max
agaaaacctaagcttagatttagaaacaaagaaatgaagaaaggaaagatttgatcgttgaaaatgcagggaggaaagaatgcgggagagtcaattaaggaaacagctacaaacattggtgcttctcccaaggctggcatggagaagaccaaggccatctgtccaagagacggcagaaagattgacagcacgtgatccggtgcaaacggagttggcaacccaaaagacataggcaaagat

SEQ ID NO: 135610 - DNA, 236 bp, Glycine max
  unsure (1)..(236): unsure at all n locations
aaanaatcaaagaaaggggcggtggctgcttcgatagcttaataatttgtttatttccagaacattatagttttcgcagccgcaaactaacatattactcatattatataataagttggcccgttctctctcgcaagccaaacgtattggtgtccttcttgctcaatctatctccctaattaccgttcatcgtcgaggttacgcagtggcatccgatgtatcggtatgagttggat

SEQ ID NO: 135611 - DNA, 239 bp, Glycine max
gcacaactgttgcatcatcatcttcattgcaaaaccctaaacttcaccttcaaccatgaccacacatgtaccaccacacagtgtccaagtccatacaacaacacatacctacgaagctggcgtcgtcacccccggagcccgtttcgaaccgccgcgttatgaagccggcggcaaagcgccctccatttaccataagcagagaggtccaacgacttcccaggtcctcgccgtcctcgccg

SEQ ID NO: 135612 - DNA, 101 bp, Glycine max
cgtcgatcagggtcgcaagtatgacgagtatggcttcgttgagaagcaatccgtcgaatacggcttccctgttcatgcttttagtgtcacctatgtagcca

SEQ ID NO: 135613 - DNA, 231 bp, Glycine max
cccaagattacaggcatctggatggttttggacttaacacatacacattgatcaacaaggctgcgaaagcagtgtatctgaaatttcactggaagaccactcgtggtataaactgtctattgcaggaagaggtcattaaggtcggaggagccatccacagccatgccactcaagaccttcatgattcaattgctgctggcaactatcctgggtggaaactgttcgttcaga

SEQ ID NO: 135614 - DNA, 237 bp, Glycine max
ttctaatgagatgctcattagatatagctatgaaaaattattgagccaggctaaagctccaagtatgtttttacaatccttcaaaaattttgtttctttgtgtgtgtatggtgatgataacttaattagtgttcatgaatatgtcaagccttactttcagtggttctaagttgaaaagctttctagctggtcataatatcaccattactgatggtattgacaaaactagtgcaattt

SEQ ID NO: 135615 - DNA, 235 bp, Glycine max
gtctgcacaaaagcaatgactatgtcatttaatccaaacccgtgttctgatgcatggagtttggtatttctgaagcgtaccggatttcattctgatatcatttctgtcactggatggactgccactccaatgcaggatgttcaggttacaattgactggtttattttctctcaggaatgtgttcccaggacttattgtgtttcaaatccacaaaatccttttgtcttgaataggt

SEQ ID NO: 135616 - DNA, 234 bp, Glycine max
  unsure (1)..(234): unsure at all n locations
ganataccaacaagaaaaaaaaaaaagaagagttgagattccctttgaagaaaagatggcatcccataggcaaagctatgaagctggtcaaactaagggccgaactgaggaaaagacgaaccagacgatgggcaatattggagagcaggatcaagccgcaaaggagatgacccaggaactggcccaagctgcaaaggagaagacccaacaaacatcccaagctgccaaggacaa

SEQ ID NO: 135617 - DNA, 235 bp, Glycine max
attaagagagagaagaagtaaagaagaacaaagacgcaatcctcaaaggtgaagatgaaaaacatggcaagtgctgccaatgaacaagtcgatatctataaagctaaaatagacgagaaggcagagcaagcaacggcaagaacagatgaggagagggcgatagcccatgagcacgcaaagtcaaaggaagcttgagcaaagatggagctgcatgatgctaaagcaagtcatgcag

SEQ ID NO: 135618 - DNA, 231 bp, Glycine max
tctcatcagagataacttgacaaataaaatcaccatgtctatcatcccaaacttgttcggtggtagacgaagcaacgtcttcgacccattctctctggacgtatgggaccctctcgaggggtctcctttttcaacaggtcacttgccttcctccggtggggaaagcagtgccatatccaacactcgcgtggactggaagcagactccggcggctcacgtgttcaacgttga

SEQ ID NO: 135619 - DNA, 218 bp, Glycine max
accagcgggctggacaacagcggggtcagatatcacggcggccaaacattccgccaccacggctgggcacatgggacatggccaccacaccaccggaaccgggactggaaccgccacgtattccaccaccggggaatatgcgtcagcccatgtgggcccaccacacgtcggcaatgcctggccatggaaccgggcagcccacgggccatgtcaccgaa

SEQ ID NO: 135620 - DNA, 235 bp, Glycine max
tctaaagctaacttcaacacctttaattttctcaaagtaattcagcggctgaataccaagcggtgaagatgagtcaggcgcagccacggcgtcccaaaggccacaaccccatcacatacggcgacgtttttgtcgtctccggcgaccttgcacagacgcccgtcgcaccggaagatgctgccatgatgcaacgcgcggaaacttcagtgctcggacaaacccaacccggcggagc

SEQ ID NO: 135621 - DNA, 247 bp, Glycine max
ttcggctcgagctacaaaatccttttgtcttgaataggtggatcgggaaactgacttttccccagggcacttcctgaagtgttaagagattgcctctttctatagggggaggagctggtgcaaagaatgctattctcatgaatatgccaaatgctgttctttcaatgtggagatatttgtttggagatctcgtctttgaagtttctaagatgacttctccctacattaaatgtacattctctttctt

SEQ ID NO: 135622 - DNA, 231 bp, Glycine max
gcggttgagggagtgcggaaatggtgcacagctcgtacgattgtctgtaactggtgcgcgagtccccagccaagatcgaatccatcgaatcctacgattcgatgcttctcgtgtgctgctccgttggatcgcttcgaatattcgccccggaaaccgaatcttccttctccaacgggtccaagtcctacgcgttggagaagatactcgccgggttcgcgaagagatccgtgc

SEQ ID NO: 135623 - DNA, 231 bp, Glycine max
aaagtttccttgacattttaattctgcaaatatggcaagcaataagtagtctaagttcccagcacagagccagaaatctcagccaggacaagaacatgtattgaatccactcccacaagccacaaatcctgatcacaaggccgccaataaactccagggaaagggggcgttggtgacaggaggtgaatcaggaattggcagagcggtttgcctgtgtttcacaaaagaggg

SEQ ID NO: 135624 - DNA, 102 bp, Glycine max
atgaatttcattcacacggatgaggaggttaattacttcccttcaaggtatgatcctgttcgtcatgcagaaacgttccccatacctcctgctatctgcagt

SEQ ID NO: 135625 - DNA, 237 bp, Glycine max
  unsure (1)..(237): unsure at all n locations
naacagggttttgttttgtggagaggggaggcggcaccagcaagagggagtgattttggaactatcaaaggaacagattcgggaactgagcaagcgtgccaaatctagttcaaggagtactaattccttcgattatgaaccattctacttgagagcgctcccaaatcgcttccaacaactttggaaagttctatgagatcacccctgagaagaatccccagcttcgggactttgata

SEQ ID NO: 135626 - DNA, 232 bp, Glycine max
aacggatttggaagaactggccgtttggtagccagagtggctctgcagagagacgatgttgagctcgttgccgttaacgaccctttcatcaccaccgattacatgacatacatgtttaaataccacagtgttcttggacactgcaagcatcacgctgtcaccgttcaggacgagaacacccttctcttaggtgacaagccactcactatttttggacacagaaaccctgaag

SEQ ID NO: 135627 - DNA, 231 bp, Glycine max
  unsure (1)..(231): unsure at all n locations
tagaggtcaagatattnaaagcacttactggtcatgagaatgtggttcagttctataatgcttctgaagatggttcttatgtgtacatagttatggagttgtgcgagggtggtgaactgctagatcggatattcgccaagaaggacagtcgttactactgaaagagccgcagcggtggttgtaaggcagatgctcaaggttgcagctgagtgtcatttacatgttttggta

SEQ ID NO: 135628 - DNA, 192 bp, Glycine max
gcaaaaagaaagaatcccaggcgaggagaatgatggaggggaaggtgcaggatgtgtcgtttggagcgaacaagttccccgagagacagccgattgggatggcggcgcagtgccaagacgacggcaaggactaccaggagtcggcgccggcgccgctggttgacccgacggagtctacgtcatggtcgtttt

SEQ ID NO: 135629 - DNA, 194 bp, Glycine max
ttctacacaaaagtgttccacttgagtgaaaagtagtgtgttaagacctaaacaatttttcaatggcgtccaagaaccaagaggagcgagctgaggcagctgcgaaagttgctgccaaagaactcgaacaagccaacagagacagaagagaccctgatttcggtcttgttgctgaacaacaacaacaacatcat

SEQ ID NO: 135630 - DNA, 236 bp, Glycine max
  unsure (1)..(236): unsure at all n locations
acaagtacttccttacaatcaaaaccaacaacatctatggcaagttatccaaagcactacgatgatcagggtcgcaaggctgacgagtatggcaacgttgagaagcaaaccgacgaatacggcaaccctgttcatgctgctagtgtcacctatgtanccaccagaactgctgctggtggttacagtgatgacattaataagcaacatgataccaccaatgcctacggcgtagacac

SEQ ID NO: 135631 - DNA, 245 bp, Glycine max
cacaactactacaagtacttccttacaatcaaaaccctcaacaactatggcaagttatcaaaagcactacgatgatcagggtcgcaaggttgacgagtatggcaacgttgagaagcaaaccgacgaatacggcaaccctgttcatgctgctagtgtcacctatgtagccaccagaactgctgctggtggctacagtgatgacattaataagcaacatgataccaccaatgcctacggcgtagaca

SEQ ID NO: 135632 - DNA, 239 bp, Glycine max
accaaaacattaaagctaacttcaacacctttaattttctaaaagtaattcagcggctgaataccaagcggagaagatgagtcaggagcagccacggcgtcccaaaggccaaaaccccatcaaatacggcgacgtttttgtcgtctccggcgaccttgcacagaagcccgtcgcactggaagatgctgtcatgatgcaaagcgcggaaactcgagtgctcggacaaacccaacccggcg

SEQ ID NO: 135633 - DNA, 240 bp, Glycine max
tagctagctagcaagcaagcacagagatggaggcaaagcgaggccatgccctcatgtgcttggcacgtgtttcactcttcctctgcgctctaaccctatccgctgctcacggaagcaccacggttcaagacatcgcgagaaagttgaaactcggggacaacgagcttctgcgcacggagaagaagttcaaggttttcatggagaattacgggaggagctactccacagaggaggagtatt

SEQ ID NO: 135634 - DNA, 235 bp, Glycine max
ggcacatgggacaacccatggggacccatcagacgtcagctatgcccggtcatggaaccggacagcccacgggccatgtcaccgagggagtggtgggctcacaccctattggaaccaacagatgcccgggtgggactgctacggcccataatacccgtgcggggggaaacccaaatgattatgggtatggaactgggggtacttacaattaaataatgatgatttagaaaaggaa

SEQ ID NO: 135635 - DNA, 237 bp, Glycine max
atactgtcacaagtgtatatagatggccaaaaattggaggccatcgattaataggcatgagctctcaagctcaacggctgcctagaaagtgtgaagttacagctattcttgttctgtatggtcttccaaggttactcacaggtgctatacttgcacatgagttgatgcatgcttggttacgcctcaaaggttaccaaaaccttagtcctgaagtagaggaaggtatttgtcaggttc

SEQ ID NO: 135636 - DNA, 215 bp, Glycine max
tacacaactactacaagtacttccttacaatcaaaaccatcaacaactatggcaagttatcaaaagcactacgatgatcagggtcgcaaggttgacgagtatggcaacgttgagaagcaaaccgacgaatacggcaaccctgttcatgctgctagtgtcacctatgtagccaccagaactgctgctggtggttacagtgatgacattaataagca

SEQ ID NO: 135637 - DNA, 144 bp, Glycine max
cggcctctttctatcagggggaggagctggtgcaaagaatgctattctcatgaatatgccaaatgctgttctttcaatgcggagctatcctgttggagatctcgtctttgcaagtttctacgatgacttctccctacattaaat

SEQ ID NO: 135638 - DNA, 237 bp, Glycine max
tgatcttttagaatttcttcagcaggttgctgtcactgatggatcatcaacaatgccaccatctgtcttacgagtgctaaatttgaaagcatgcagaggtgcaattatgtttggggactcattgctaccatcagaatgctcctttatagttgaagagctaaaacatacatcgctttgtttccaatgtgctcatgggcgaccagcaactgttcctctagtcaacttggaggcactgca

SEQ ID NO: 135639 - DNA, 241 bp, Glycine max
taagtacttccttacaatcaaaaccaacaacaactatggcaagttatcaaaagcactacgatgatcagggtcgcaaggttgacgagtatggcaacgttgagaagcaaaccgacgaatacggcaaccctgttcatgctgctagtgtcacctatgtagccaccagaactgctgctggtggttacagtgatgacattaataagcaacatgataccaccaatgcctacggcgtagacactggtag

SEQ ID NO: 135640 - DNA, 238 bp, Glycine max
ctcgtttgttccacacgagatttctgttctcgttgagctcatcttaggacacctgcgttatcttttaacagatgtgccgccccagccaaactccccacctgacaatgtcttccgcccggatcgaccggccgaagccgaccttgggtccaaaaagaggggcagtgccccgcttccgattcacggaataagtaaaataacgttaaaagtagtggtatttcactttcgctgtttccagctc

SEQ ID NO: 135641 - DNA, 236 bp, Glycine max
gtctttgaacactcatcaccatggccaagcttgttctttccctttgtttccttcttttcagcggctgcttcgctctgagagagcaggcagagcaaaatgagtgccagatccaaaagctgaatgccctcaaaccggataaccgtatagagtcggaaggtgggttcattgagacctggaaccctaacaacaagccattccagtgtgccggtgttgccctctctcgctgcacccttaac

SEQ ID NO: 135642 - DNA, 236 bp, Glycine max
attttgtacagatttgccattgggtatttaatgaattgttaatattatttttccctttaattatcaaatgtataattttttcttttaaattccaatgtttcaatatttataaacagacaagcttttctggtgttgaggtcatgcctcttcttccagatgaatctatgaatgttgaaattccttaggaggacctggaaattagtttttcaagagcaggtggaaagggaggtcagaat

SEQ ID NO: 135643 - DNA, 233 bp, Glycine max
atcacgaagctcaaacctcttgaggcacttgcaaaagggattcttgccagcaatatgctcattacctattccgggttatatgtttggcaaagctattgtctgttctgatgctgcagcagaggctgcaagatatggttttactgctgtggacaggccagaaggattcttggttttggccattgcttctctaggaaatgagattaccgagttgaaaaccccacctgaggtatcca

SEQ ID NO: 135644 - DNA, 237 bp, Glycine max
gaaaaaaagaaaaatgcaggcagcaaagaaagccatagagacctttaaggaaaccgcagccaacattggcgcctctgccaagtctggcttggagaaaaccaaggccactatccaagagaagaatgagaagatgaatgcagaagatcaaactcaaatggatatggctaccaagaggaaagaagagaagatcaaccaggctgagatggagaagcagcaggcccgtaagtactacgccgc

SEQ ID NO: 135645 - DNA, 234 bp, Glycine max
tgataatcagttattgccgttgttgttttgtttccggttcggtttatttcaatggatcgggcggcgttgacggttggaccgggcatggacatgccgatcatgcacgacagcgaccgttacgatctggtacgcgacatcgggtccggaaatttcggcgtggcgaggctgatgcaggataaacaaaccaaggaactggtcgccgtcaagtacatcgaaaggggtgataagattgat

SEQ ID NO: 135646 - DNA, 235 bp, Glycine max
ttcgagccgcacgaagagaaaataactgatttgccacttgacaatggggtgagggctctattgaggggctgtaactagctgaggagatttgctctatatctcaggcgtggcgggttgaccgatgtaggtcttggttacattggacagtacagtccaaatgtgagatggatgctgcttggttatgtgggggagtctgatgcagggcttttggaattctctaaagggtgtcctagtc

SEQ ID NO: 135647 - DNA, 235 bp, Glycine max
tgcagttcaacattgcgaatcccaccactggttgtcagaagaagctggagatcgatgatgacctgaagctacgagcattttgggacaagaggatctcacaagaggttgttggtgatgctctgggtgaggaattcaaaggctatgtcttcaaaattactggaggttgcgacaagcaaggatttccaatgcagcaaggagtgttgacccctggacgtgtgatgctcttgctgcatag

SEQ ID NO: 135648 - DNA, 235 bp, Glycine max
taagaaaggggtggtggctgcttcgaaagcttaataatttgtttatttccagaacatcatagttttcgcagcagcaaactaacaaattactcatatcatataataagatggcccgttctctctcgcaagccaaacgtattggtgtccttgttgctcaatctatctccctaattcccgttcatcggcgaggttacgcagtggcatccgatgtatcggtaagagttggattgggtaa

SEQ ID NO: 135649 - DNA, 233 bp, Glycine max
gtgatccggtgcaaaaggagttggcaacccaaaagaaagaggcaaagatgaaccaggcggactggacaagcaggcggcgcgtcacataacacggcggccaaacagtccgccaccacggctgggcacatgggacatggccaccacaccaccggaaccgggactggaaccgccacgtattccaccaccggggaatatggtcagcccatgggggcccaccagacgtcggcaatgcc

SEQ ID NO: 135650 - DNA, 235 bp, Glycine max
ccaccaccgagaaggagattcacgttgagaaacacagggttcccaagatggccacccacttcgagcaccttgcggacaagctcacacactctgacatcaccgctgggaaggatactccgcagggtagcatagaagccttgcaagctggagagagggtcaaagatcatgcaggaaaagccatgggagatattggtggacgtgggaaagccagagagactcacgagctgggtgcaca

SEQ ID NO: 135651 - DNA, 232 bp, Glycine max
gtacttccttacaatcaaaaccatcaacaactctggcaagttatcaaaagcactacgatgatcagggtcgcaaggttgacgagtatggcaacgttgagaagcaaaccgacgaatacggcaaccctgttcatgctgctagtgtcacctatgtagccaccagaactgctgctggtggttacagtgatgacattaataagcaacatgataccaccaatgcctacggcgtagacac

SEQ ID NO: 135652 - DNA, 234 bp, Glycine max
gctgaagaaaacctaagcttagaattagaaacaaagaaaagaagaaaggaaagaattgatcgttgaaaatgcagggaggaaagaaagcgggagagtccattaaggaaacagctacaaacattggtgcttctgccaaggctggcatggagaagaccaaggccactgtccaagagaaggcagaaagaatgacagcacgtgatccggtgcaaaaggagttggcaacccaaaagaaag

SEQ ID NO: 135653 - DNA, 240 bp, Glycine max
gcaccactgctcagtatgttggggagaaagcagcacaagccaaagatgctactgtgcaaactggcaagagtgctgcaaaagttgcctcagatttgagggacaaggctttggccacagggtggagtgccgtgtcattattctactgagataactgtggagggaaccaaggctgcaacaaacgttgttaagggagttgctgagtatgcaggacagaaggcttctgagcttgcagctatgtca

SEQ ID NO: 135654 - DNA, 235 bp, Glycine max
tttacgcttctcttctctgcagcaactatgcctaaccctaaggtcttcttcgacatgaccatcggcggtcaatctgctggccgcatcgtgatggagctctacgccgacgtcactccccgcaccgccgagaacttccgcgcgctttgcaccggcgagaagggcgtagggcggagcggcaagcccctccactacaagggctcgtccttccaccgcgtgatcccgagtttcatgtgtc

SEQ ID NO: 135655 - DNA, 234 bp, Glycine max
gttcttgaattcattcgagacgtgagctaaactcaaattggagaagaatatggtccgtgggttccttttattggaactttgtttctatttatttttgtttctaattggtcgggggctcttttaccttggaaaatcatacaattacctcacggggagttagctgcacccacaaatgatataaatactaccgttgctttagctttacttacatcaattgcatatttctatgcgggt

SEQ ID NO: 135656 - DNA, 233 bp, Glycine max
agattatgcaagtgatgcagtgcagaagagaaaagagtattctggtgatgcttctcacaagagcaaagaggcttctgattatgccagtgagacggctaagaagaccaaagattatgtcggtgatgctgctcagagaagcaaaggggctgctgaatatgctagtgatgcggctcagaggaccatagagtatgctggtgatgctaccaagagaagcaaagaggcttctaatgatc

SEQ ID NO: 135657 - DNA, 233 bp, Glycine max
gggaaatattggtccacttgtgatttgcaccaaggttaccaacagcattgctttgctcgatccatttaccttgagacactgtttcatagatgctgatcagtactggagaacatcctttaagtcgttacttactagcagacaattggtggaatatatagtgctggatgtggagactgtttcatctgaggtcactattggtggcacgaaatatcgtttagcagatgctcaggtgg

SEQ ID NO: 135658 - DNA, 234 bp, Glycine max
cacacaactactacaagtacttccttacaatcaaaaccatcaacaactatggcaagttatcaaaagcactacgatgatcagggtcgcaaggttgacgagtatggcaacgttgagaagcaaaccgacgaatacggcaaccctgttcatgctgctagtgtcacctatgtagccaccagaactgctgctggtggttacagtgatgacattaataagcaacatgataccaccaatgcc

SEQ ID NO: 135659 - DNA, 204 bp, Glycine max
ttccaagctacgtatttgggagtttgtggagttcagcaagatgatatacctagacggtgatatacaagtgtttgacaatattgaccacttgtttgacttgcctgataactacttttatgcggtgatggactgtttttgtgagcccacttggggccacactctgcagtatcaaatcggatactgccagcagtgccctcataaggt

SEQ ID NO: 135660 - DNA, 234 bp, Glycine max
gttaatgggaacttttcttgtggtccaaacaattaccgtcagaaaggtcctcggattgcaaaggttgtccggcgcatcaactgcaatgttgaaccattagaatttggagttgtgctctctggaaagtcttggtgcagtagtcaggctatctttccaaagggatttagaagccgtgttagatacataaatgtcttagatccatccagtatgtgttattatatttcagaaattctt

SEQ ID NO: 135661 - DNA, 250 bp, Glycine max
ccctgttcatgctgctagtgtcacctatgtagccaccagaactgctgctggtggttacagtgatgacattaataagcaacatgataccaccaatgcctacggcgtagacactggtagacagcattctagtggtggctacgatggtgacactaataaacatcatggaactactggtggctataatgatgacaccaatagacatcatggaactaccggtgtctatggtatagataccgataggcaacaacat

SEQ ID NO: 135662 - DNA, 247 bp, Glycine max
cagtttcaccgcacgaatatcttgttgtttggagcgatccgagaaaaactctgtaaacatgttggtttaccaggacctccttacaggtgatgagcttctctctgactccttccgttacaaggaaattgagaatggaatgctgtgggaagttgaggggaagtgggttgttaaaggagcagttgatgtagacattggtgcaaacccttctgctgagggtggaggagaagatgagggagttgatgatgca

SEQ ID NO: 135663 - DNA, 249 bp, Glycine max
gttggcaggctgtttgcagtcgtggatgacattttctgtttgtttcaaggtcatcttgagaatgttgctaaccttaagcaacaatatggattgaacaaaacagcaactgaggtgatcattatcattgaagcatacaggactctaagagatcgtggtccctatcctgctgctcaggttgtgagagacttccaaggcaaatttgcatttattctgtatgacagtggttctaagactgcatttgttgctgcg

SEQ ID NO: 135664 - DNA, 248 bp, Glycine max
tatttttcttcctcagtagtgtcatttacgcttctcttctctgcagcaactatgcctaaccctaaggtcttcttcgacatgaccatcggcggtcaatctgctggccgcatcgtgatggagctctacgccgacgtcactccccgcaccgccgagaacttccgcgcgctttgcaccggcgagaagggcgtagggcggagcggcaagcccctccactacaagggctcgtccttccaccgcgtgatcctgag

SEQ ID NO: 135665 - DNA, 252 bp, Glycine max
  unsure (1)..(252): unsure at all n locations
aatccaccgatgctgagtcanactcggagtttccgtctcgggnaccgganntngatgacccttcagtanaatcctgcaaaccctattcatgangtgnnacncgctcngnnnngcgtntgtggtacgtccacatgactggaccgagtgtccgtacgcccaccccggggagaaggctcgccgccgtgatccccggaagtaccattactccggcacggcgtgccccgatttccgcaagggagttgcaagaagggt

SEQ ID NO: 135666 - DNA, 253 bp, Glycine max
caactagctacatagaaagcacaatagtgtaccattaatggcagccaaaatattttgcttccttatgctccttggtctttctgcaagtgttgctatcgcaaccattttcccacaatgctcacaactctcctatatcttcccttcttcccccatacctctcaccagcggtgtcttcaatgtgtgaaaacccaattgttcaaccctacaggttccaacaggcaatcgcaacaggcatcttaccattatcaccctt

SEQ ID NO: 135667 - DNA, 252 bp, Glycine max
ctttcttgcgaaaccgagagagcgaaggggcaaacacaattttttttatcttcttttttattttttgtagagagagagagagagaaaatgttggggatcttcagcagttcagtggtgtcgccgccggaggagctggtggccgctggcagcagaacgccgtcgccgaagacgacggcggggaagctgctgaaccggttcgtggagagcaaggcgtcggcggtgtcgctgcaggtgggggaacacgtgcagttg

SEQ ID NO: 135668 - DNA, 249 bp, Glycine max
ccaatcccaagaaccacatccaagagaattggaggatccttgacttcttctctcactttccagaaagccttcacatgttcacctttttatttgatgatttgggtgttccacaagattacagacagatagatggttttggagttaacacatatacgctgatcaacaaggctgggaaagcagtgtatgtgaaatttcactggaagaccactagtggtataaagtgtctattggaggaagaggccattaagg

SEQ ID NO: 135669 - DNA, 248 bp, Glycine max
ctttagtggttctaaattgaaaagctttctagctggtcataatatcaccattactgatggtattgacaaaactagtgcaactttgcaatttagaaagttagcagattgtgattttctcaagagaaactttaagcagatgtctaatgttttgtgggtggctcctgaggacaaggcgagtttatggtcacaacttcattatgtttcgtgtaataatctggaaatgcaagaagcttatcttgtcaatctcg

SEQ ID NO: 135670 - DNA, 248 bp, Glycine max
ggaagagtgagcgtgaaagatgccttgggcgaggctttcagggtctccaaggctcgacgttgctattgacatgggcaatccatttctcaatctcactgttgatggtttccttaagatcggagctgtcgcagccacgcgatcagctgctgaagatacttatcatattatccaaaaggggaatatctcaagtcatgatttcgagaaaacgttgaagaagatgtgcaaagaaggtgtatattggggaacta

SEQ ID NO: 135671 - DNA, 234 bp, Glycine max
cgagattgctttgctgtaagtttctgattcctttcttcagaattccaagttttcatttcgttagggacataagattgtgcgatcgagtatggctggctacggcgaaggtcctgctatcggactcgatttgggtacgtcgtcttctagcgtcgacgtgtggccacaggatcgtgttaaatccttcgccaccgatcagggtactagagctaccccatccaacgtggctttctgcga

SEQ ID NO: 135672 - DNA, 237 bp, Glycine max
ctagtaaggaaggattaactttcagaggaattcccaacagtatctctatctgaagaggtttgtggttccttaagttttgtggctttgaataaaagatagaagagaaggaatctgaatttcttcatccaacctgcacatggtaatctagtgtgtttgagtgctttcatgtttggctttaataaaataaaagcagttgttttgtaaaatgttcagaatcaataaaagcatttactgctt

SEQ ID NO: 135673 - DNA, 247 bp, Glycine max
ataaaaaaccactctacaaaactcttcagttattctgtaaattttattttcttttggtgaaattaacagctctgtgattgatcaatggctccaaaggaaggcaaagccataggtatcgatctcggcacgacctacagctgcgtgggcgtgtggcaaaacgaccgcgtcgagatcatccccagagaccaaggcaaccgaaccactccctcttatgtagacttcaccgacaccgagaggctcttcggag

SEQ ID NO: 135674 - DNA, 247 bp, Glycine max
ctaactctttgctttatccttgtcttcattttctttctctctttcctttgttgttgtcaccaaaatggctactagtacactcagccatgcagaagaagtacttcccaatccagcaaaaaatactgatcagaagcaaatccaagttactgaagatcataccaacaacattgactatgtacaaaggggacagtggcttcgtgcagcggttttaggagccaatgatgggttggtttcggtttcttcattg

SEQ ID NO: 135675 - DNA, 237 bp, Glycine max
  unsure (1)..(237): unsure at all n locations
agcaaagtccaggatttacaaggaccctgctttgcgctatgttttcttgatnnntaatgggaggtacattgttcagaagaccaaagatagtgaattgggaacccttttgggagatgattggatcagaaaacacgctgcaaaagttaggcaattccatgtgcactatcaaagatgctcgtggactaaggtattagggattttgaagcttgatagtaatggctcatcattgccccctaa

SEQ ID NO: 135676 - DNA, 249 bp, Glycine max
gtaactgcactagtgttggccacatgccttcaaccaaagaggaaggtcacgattttcaggtggctaaagccaagacaacacaaactgcgaacaaggccatggaaactggtaaagatgggaaagaagccgcagagtcatggacagaatgggctaaagagaaactcactgaaggtcttggcttcaaacatgatcaagaatccaccactaagaaagtctctgactatgccggtgatgctgctcagaaatcaa

SEQ ID NO: 135677 - DNA, 250 bp, Glycine max
gcagaacttagttctctgttgcatcatcatcatcttcattagtgttagccctaaacttcaccttcaaccatgaccacagtgccaccacacagtgtccaagtgcacacaacaacacaccgctacgaagccggcgtcgtcccgccggctcgttttgaggcgccgcgttacgaagccggcatcaaggcgccctcttccatttaccattccgagagaggtccgacgacctctcaggttctcgcagttgtcgccg

SEQ ID NO: 135678 - DNA, 249 bp, Glycine max
tgtttattcatctaccgtcgggagggaggggatgaccacggcgccccgtgcgcccggcctcctcgtcctcgcgacaaacacaaaccccggcgcttcgtgcgccaaggaactcaaatctgttaagtgcgactcccgggggcccggagacggtgtcccgcggggctcgtcacgacacaacatttacatacaatgactctcggcaacggatatctcggctcttgcatcgatgaagaacgtagcgaaatgcga

SEQ ID NO: 135679 - DNA, 249 bp, Glycine max
cacacaactactacaagtacttccttacaatcaaaaccatcaacaactatggcaagttatcaaaagcactacgatgatcagggtcgcaaggttgacgagtatggcaacgttgagaagcaaaccgacgaatacggcaaccctgttcatgctgctagtgtcacctatgtagccaccagaactgctgctggtggttacagtgatgacattaataagcaacatgataccaccaatgcctacggcgtagacact

SEQ ID NO: 135680 - DNA, 247 bp, Glycine max
gggataaccgtgaccttgtaataatatatataaataaatcttcgatgctgtcatttcgaaatgtccgcttcaaccgcagtttcacctcccaaaaagcaaagttggcttgacgagcgcagatgcgaggaagcgggagcaataaaacaaaaaatctcattcttgtccttccttctacttaaggggcaaagagaagcgcttttgctactgagaaagcgaacgcgcgaaggttcaagacttagccgagcgt

SEQ ID NO: 135681 - DNA, 247 bp, Glycine max
agcgggaattggaggccaaaaaaccatctcaacctcaggaagctgaagagaggccatcagaaggaattggcgaaactgtgaggcagtatgcacaaaaaccaaagccaagtgaaagaaaccctcagaaggagggaaccggaagcatcgtgtttacagcaataggcgaaacagtaagcagtgccggtgagaaggtaaagaaaccgtttaaaaacactatgggaggagaaagtgaaggaggaggagggaa

SEQ ID NO: 135682 - DNA, 247 bp, Glycine max
ctgcgttagagggggtgagagacataacccaggcttctcacctcataggagatatgacaggctcaaccattgatgaccctttatcagagacatacaagaaattgggctgctcaatttctgccttggacaaaagttcagatgattatgagatgattgtgaaataccttgaaaaaacttatgagccggtcaaagttggtgacattgaatatggggtgtcagtggaaaacatttttgcggttcaaacagg

SEQ ID NO: 135683 - DNA, 250 bp, Glycine max
gaaaacctaagcttagaattagaaacaaagaaaagaagaaaggaaagaattgatcgttgaaaatgcagggaggaaagaaagcgggagagtccattaaggaaacagctacaaacattggtgcttctgccaaggctggcatggagaagaccaaggccactgtccaagagaaggcagaaagaatgacagcacgtgatccggtgcaaaaggagttggcaacccaaaagaaagaggcaaagatgaaccaggcgga

SEQ ID NO: 135684 - DNA, 246 bp, Glycine max
ataccaacaagaaaagaaaacaagaagagttgagattccctttgaagaaaagatggcatcccataggcaaagctatgaagctggtcaaactaagggccgaactgaggaaaagacgaaccagacgatgggcaatattggagagaaggctcaagctgcaaaggagaagacccaggaaatggcccaagctgcaaaggagaagacccaacaaacagcccaagctgccaaggacaagacttgcgacacttc

SEQ ID NO: 135685 - DNA, 114 bp, Glycine max
aagtaggatacaaccctgacaagattccttttgttcctatcactggttttgagggagacaacatgattgagaggtccacacaccttgactggtacaagggtccaactctgcttg

SEQ ID NO: 135686 - DNA, 248 bp, Glycine max
gcaaaaccaagttaatgttgcaatcgcataataataaccatccaaagtttattgagagaaatttgcaagtttgaaaagaaacatggcatctcatcaacaaaacaagcaagagcttgatgaaagggcaaggcaaggagagactgttgttccgggtggcactggtggcaagagccttgaggctcagcaacatcttgctgaaggaaggtgcaggggagttttttaccatccatgagcagctggggacagaa

SEQ ID NO: 135687 - DNA, 146 bp, Glycine max
gatttattgagtcaatttctcctttttcccatattttgggagaatgtggttatatatttgtagtcagggatgctgtgatttgttactgttggaatttgtacgtcattccagacacttcacatatattataggttgtgctttgttac

SEQ ID NO: 135688 - DNA, 247 bp, Glycine max
atcagaattctcaacctcaaggttcacagaatgagaatgatccaaataatacaactatgtttgttggtaatttggatcctaatgtcactgatgatcatctgaggcaagttttcagccagtatggagaattagtgcatgtgaagattccagcaggcaagcgatgtgggtttgtccaattcgcggacaggagctgtgccgaagaggcacttcgggtgttgaatgggaccctgttgggtggtcaaaatgt

SEQ ID NO: 135689 - DNA, 247 bp, Glycine max
cgagaacagaaatctcgtgtggaacaaaagggtaaaagctcgtttgattctgatttccagtacgaatacgaaccgtgaaagcgtggcctatcgatcctttagtccttcggaatttgaagctagaggtgtcagaaaagttaccacagggataactggcttgtggcagccaagcgttcatagcgacgttgctttttgatccttcgatgtcggctcttcctatcattgtgaagcagaattcaccaagtgt

SEQ ID NO: 135690 - DNA, 246 bp, Glycine max
aagatgaaggaaaaagttttgggctcatctgatcctgattctggtaaaggaaagagcaagatgaagaagaacataactcatggctttcacttggtaaaggggagatcaggtcatgccatggaagactatcttgttgctcaattcaagcaagttgacgacaatgaattgggtttatttgcaatatttgatggccactcaggtcacagtgtacctgattacttgaagtctcatttgtttgataatatc

SEQ ID NO: 135691 - DNA, 242 bp, Glycine max
  unsure (1)..(242): unsure at all n locations
cggctcgagcacacacaactactacaagtacttccttacaatcaaaaccataaacaantatggcaagttatcaaaagcactacgatgatcagggtcgcaaggttgacgagtatggcaacgttgagaagcaaaccgacgaatacggcaaccctgttcatgctgctagtgtcacctatgtagccaccacttctgctgctggtggttacagtgatgacattaataagcaacatgataccaccaat

SEQ ID NO: 135692 - DNA, 242 bp, Glycine max
tgcagaccgagctagctagctagcaagcaagcacagagatggaggcaaagcgaggccatgccctcatgtgcttggcacgtgtttcactcttcctctgcgctctaaccctatccgctgctcacggaagcaccacggttcaagacatcgcgagaaagttgaaactcggggacaacgagcttctgcgcacggagacgaatttcaaggttttcatggacaattacgggacgagctactccacagag

SEQ ID NO: 135693 - DNA, 244 bp, Glycine max
cttctgcacctatgctttcctctaccaccagaaggagatgctctccgaccgcgttcgcatggacgcttacttcgacgccatttttcaaaacaaacgccacttcgctggcaagactgttttggatgtggggactggaagtggcattcttgctatatggtcggcacaagcgggtgcgatgaaggtgtatgcagtggaaacaaccaagatgtcagcacatgcgcgtgcacttgtcaaagcgaataat

SEQ ID NO: 135694 - DNA, 247 bp, Glycine max
caagtacttccttacaatcaaaaccacaaacaactacggcaagttatcaaaagcactacgatgatcagggtcgcaaggttgacgagtatggcaacgttgagaagcaaaccgacgaatacggcaaccctgttcatgctgctagtgtcacctatgtagccaccagaactgctgctggtggttacagtgatgacattaataagcaacatgataccaccaatgcctacggcgtagacactggtagacagca

SEQ ID NO: 135695 - DNA, 247 bp, Glycine max
tgaaggccgaagaggggaaaggttccatgtgaacggcacttgcacatgggttagtcgatcctaagggacgggggaagcccgtctgatagcgctctgtgcgcgtactccgaaagggaatcgggttaaaattcctgaaccgggacgtggcggctgacggcaacgttagggagtccggagacgtcggcgggggccccggaaagagttatcttttctgtttaacagcctgcccaccctggaaacggctcag

SEQ ID NO: 135696 - DNA, 240 bp, Glycine max; identical to SEQ ID NO: 124328

SEQ ID NO: 135697 - DNA, 233 bp, Glycine max
gtaagctcccaagcagtgggaggaggctcgggactctgaccgcgtgcctgttgaagaatgagccggcgactcataggcagtggcttggttaagggaaaccaccggagccgtagcgaaagcgagtcttcacagggcaattgtcactgcttatggacccgaacctgggtgatctatccatgaccaggatgaagcttgggtgaaactaagtggaggtccgaaccgactgatgttga

SEQ ID NO: 135698 - DNA, 237 bp, Glycine max
acaagagagagagagaaggtctggaagaatcgcgatggaaggtcaggaacgcagaggcatacggctgagcaagcgaatcgcaaacggcgaggttgcctacaagccgaaatccggcaccgcctggagccactcctatctcaaccagacgccatggcaccctctttcttaccccaaccaacgccgcaagtggatcgccgaacagccccacgccaatcgcgaacgccgcaccgaagaggt

SEQ ID NO: 135699 - DNA, 240 bp, Glycine max
acaagccttggcgccgaaaggacggtgtttacatgtacttcgaagataatgctggtgttatcgtgaagcccaagggtgaaatgaaaggttctgctatcactggtccaattgggaaggagtgtgctgatctgtggcccaggattgcaagtgctgccaatgctattgtttaagctaggattttagtttttgtaatgtttcagcttcttgaagttgtttcagatattgttttaggttgaattg

SEQ ID NO: 135700 - DNA, 238 bp, Glycine max
cccaagcagtgggaggaggctcgggactctgaccgcgtgcctgttgaagaatgagccggcgactcataggcagtggcttacttaagggaaaccaccggagccgtagcgaaagcgagtcttcacagggcaattgtcactgcttatggacccgaacctgggtgatctatccatgaccaggatgaagcttgggtgaaactaagtggaggtccgaaccgactgatgttgaagaatcagcgga

SEQ ID NO: 135701 - DNA, 239 bp, Glycine max
cgaagagcggtcacgaaatctcaaaaacaccatcctcttctaagagaacactaagccagggttcagttgatatatatgctgctcagtgcaaaaattgtttgaaatggagagagattgatacacaggaagagtttgaagagattagaagtaaagtgactgaggaaccttttctttgcagcagaaaggctaatagttcctgtgatgaacctggtgatattgaatatgattccactcggacg

SEQ ID NO: 135702 - DNA, 241 bp, Glycine max
tcgataacatatttcacttgagacagttatctttatctacgcaagagaagaatagaaaatggatatcaggttgatggatttggactctccattgttcaacactctgcaccgaatcatggatctgacagaggacgcagagaagaacttgaacgctccgacgcggacatacgtgcgcgacgcgaaggcaatggctgcgactcctgcggacgtgcaggagtactctaactactacgtgttcgtg

SEQ ID NO: 135703 - DNA, 244 bp, Glycine max
caattttccagaaggaatggcagtgttccttggatccttaaagggcctccgtgttggcctcaatttagcattagccattgctctgcacaatatcccagagggtgttgctgttgcacttcctgtttattttgcgacacaaagtaaatggcaggcattcaaattagcatcactttctggctttgctgaacccctgggagttataatcgtagcctatctattccctagcagcttaagtcctgagatt

SEQ ID NO: 135704 - DNA, 238 bp, Glycine max
cgtggatgtacaacaatgaagacactcctgttgttgccgtttctattattgacaccaacagcttggagaaccagctcgaccagatgcctaggagattctatcttgctgggaaccaagagcaagagtttctaaaatatcagcagcagcagcaaggaggttcccaaagccagaaaggaaagcaacaagaagaagataacgacggaagcaacatattgagtggcttcgcccctgaattctt

SEQ ID NO: 135705 - DNA, 257 bp, Glycine max
acgcaattcgacgcgagcacaagcactccgatgatcagggtcgcaaggttgacaagtatgacaacattacgaaacaagctaacgaatacggcaaccctattcatcctgctagtgtcacctcatgtaccccaccaaaccacctactggtagttacagtgatgacattaataagcaacatgataccaccaatgcctacgacgtagacactcgtaaacagcattctagtggtagctacgatggtgacactaataaacatc

SEQ ID NO: 135706 - DNA, 256 bp, Glycine max
cggctcgacccgagctagctagcaagcaagcacagagatggaggcaaagcgcggccatgccctcatgtgcttagcacgtgtggcactcttcctctgcgctctaaccctatccgctgctcacggaagcaccacggttcaagacatcgcgagacaggtgacactcggggacaacgagcttctgcgcacggtgaagcaggtcacggttttcatggcgaatgacgggcggcgctactccacagaggcggcgtagtggcgc

SEQ ID NO: 135707 - DNA, 236 bp, Glycine max
ctttcctttgttggtgttgctgggaactgttttcccggcatcagtctgtgtctcattacaggtgagagaggatgagcataaccctttctacttgacatgctctaacagcttccaaactctctttgagaacctaaacggtcgcattcatctcctccagagattcaacaaacgctccccacaacttgagcatcttcgagcctaccggattgtccagtttcagtccaaacccaccacaa

SEQ ID NO: 135708 - DNA, 239 bp, Glycine max
cacacaactactacaagtacttccttacaatcaaaaccaacaacaactatggcaagtgatcaacagcactacgatgatcagggtcgcaaggttgacgagtatggcaacgttgagaagcaaaccgacgaatacggcaaccctgttcatgctgctagtgtcacctatgtagccaccagaactgctgctggtggttacagtgatgacattaataagcaacatgataccaccaatgcctacgg

SEQ ID NO: 135709 - DNA, 242 bp, Glycine max
cgtacccgttggtggtggctgtcctccccgatgtgccggaggagcaccgtaagatcctggagtctcagggctgcatcgttcgcgagatcgaacccgtttacccacccgaaaaccaaacccaatttgccatggcttattacgtcatcaactactccaagcgccgtatatgggagtttgtggagtacagcgagatgatatcacttggacggagacattgcggtatatgagcacatagacgacct

SEQ ID NO: 135710 - DNA, 241 bp, Glycine max
ggaaatgcaagaagcttatcttgtcaatctcgtaaatgtgttacgagaattgtatttgcacagtccagaggaagctcgccaattgagaaggaaagctctctctcgtattgaatggctgcaaaaagctgatgtgcctaccatagcacagattgaagagttccattcgatgcagaggatgatgaatgctcctgattcaaatgataatattgatctactgttgagcattgatttgttgggttta

SEQ ID NO: 135711 - DNA, 103 bp, Glycine max
gccagaaggtgcttcctaatggtcaaagttggcggcctctcttgttgctcttatgctactcaatgaagattctttctgaagccagtaacgtttcaaaaagtca

SEQ ID NO: 135712 - DNA, 224 bp, Glycine max
cattctggtgctcttagtcaagtttttctgcctgcagatgaaggtgttgaaagttctatttggctgctagcaaaggcttatgtagttgtgaatgactcgtgctatcatcaacttgtcagccattggttaaacactcatgcagttgttgagccattcatcatagcaacaaacaggcatctcagtgttgttcaccctatttataaactccttcaccctcactatcg

SEQ ID NO: 135713 - DNA, 233 bp, Glycine max
aagcccaccaagattcactctcgctcacgtgcccgccgaatgaaggaagccaagaggcaaggacgtcactctggatatggtaagcgtaagggtacaagggaggcaaggcttcccactaaaatcctttggatgaggagaatgcgtgtgcttagacgcttgcttcgcaaatacagggaatctaagaagagtgacaagcacatgtatcatgacatgtacatgcaggtcaagggtaa

SEQ ID NO: 135714 - DNA, 234 bp, Glycine max
acccatactccatggaatggactggtttggccaatagattactgagcaagggcaacgatattctgtgttgcgattatgctagttttgacggtctgattaccaagcaagttatgagcaagatggcagacatgataaacagtctttgtggtggtgatgaaaaattgatgcgtgaaaggacacacctgctgttggcttgttgttcaaggctggcaatttgtaagatagatatctgga

SEQ ID NO: 135715 - DNA, 237 bp, Glycine max
cccaaaggcaccgtcacaaaccctcacgtgcgagtcacgtgtttttgtgaattctctttgccatggctctcgaccagctttcgaatcccaacgccgttgacggtgccggtaacggcgcgacgccgtgctccgctgtggacggcggcatcgaggacgggaggccggctgcgaggctaccgcggtggacgcggcaggagattctggtgctgattcagggaaagagcgatgcggagagcc

SEQ ID NO: 135716 - DNA, 237 bp, Glycine max
caaaagcactacgatgatcagggtcgcaaggttgacgagtatggcaacgttgagaagcaaagcgacgaatacggcaaccctgttcatgctgctagtgtcaccgatgtagccaccagaactgctgctggtggttacagtgctgacattaataagcaacatgataccaccaatgcctacggcgtagacactggtagacagcattctagtggtggctacgatggtgacactaagaaacat

SEQ ID NO: 135717 - DNA, 242 bp, Glycine max
cattcataaagacataaaaacaaaagagaagcacgaacagtaactttagaagatcgatcatcatcaatggctgtccaagtttatattgtgtactactctatgtacgggcatgtggagagattagcagaagaaataaagaaaggagctgattcggtggaaggcgttgaggccaaactatggcaggtagctgagatattgccagaagaggttcttggcaaaatgggagcaccaccaaagagtga

SEQ ID NO: 135718 - DNA, 240 bp, Glycine max
cccaaggccgctttagagaaaattgtgaacgttaggttaagcgctgcgcaaccgaagaacgttccgaagcagaacaccgatgcgaagtatataaaatacaaaccctcacagcaatccgcggcgttcaattcgggtgctaaggagagggttattaggatggttgagatggcggtggatcctcttgagcctccgaagttcaagcacaagcgtgttcccaaggcgtcggggtctccgccggtg

SEQ ID NO: 135719 - DNA, 239 bp, Glycine max
ggtattctgtggaaatgtctgctgtagtttacaaggattgggtttttacagatcaagcattgcctgctgatcttataaaaagaggaatggcaattgaggatccatcgtgtcctcatggcattcgccttgtgatagaggactacccttatgctgttgatggacttgagatatgggatgctatctagacatgggtccatgactacgttttcttgtactacaaatcagatgacacacttaga

SEQ ID NO: 135720 - DNA, 233 bp, Glycine max
cttggcagttgcacttgcacatggatttgctctatttgctgctgtttctgcaagcatgcatgtatcaggtggccatgtcaacccagctgtgacatttggtgctctcattggaggcagaatttctgttctccgtgccgtatactactggattgctcaaattctaggtgctatagtggctgccctcgttctcaggcttgtcactaataacatgagaccatcagggttccacgtgg

SEQ ID NO: 135721 - DNA, 232 bp, Glycine max
catggctcttgctccatccaaagtttccaccttttctggtttttctcccaaacccagtgttgggggtgctcagaaaaacccaacttgctctgtttctctgagctttttgaatgagcaacttggaagcagaaaccttagggtttgtgcctcaacggtgcctctcactggggtcatttttgaaacgtttgaggaggttaagaagagcgagcttgctgttccaactgctccccaa

SEQ ID NO: 135722 - DNA, 109 bp, Glycine max
ccacaatggcaaacccatttgtgaatccctcattgctgttcagtacattgaggcggtttggaatgacagaaatcccttgttgcctactgacccttagcagagagctcag

SEQ ID NO: 135723 - DNA, 237 bp, Glycine max
cactggtggctatgccggtgacactggtaggcaacatgggaacatcggtggcccttactatggaaccaacaccgcagacaccggtactggtcccagaagtggaaccacgggcggcaccggttatggaggcactggtggcactgattatggaccaactggtggcactggttatggaagtggaactgggtatggagtcaacactgggggtgcgcacactgaagcaggatataggaagga

SEQ ID NO: 135724 - DNA, 226 bp, Glycine max
caatctggtgcttttagtcaagtttttctgcctgcagatgaaggtgttgaaagttctatttggctgctagcaaaggcttatgtagttgtgaatgactcgtgctatcatcaacttgtcagccattggttaaacactcatgcagttgttgagccattcatcatagcaacaaacaggcatctcagtgttgttcaccctatttataaactccttcaccctcactatcgtg

SEQ ID NO: 135725 - DNA, 240 bp, Glycine max
tcttgattcggatctagagtcatcagtttctcctcgttgttcttcgctttcctgttttcaatttcgattctttcgttaatttaataagatgtttgggagggcaccgaagaagagcgataatacgaggtactacgacatcctcggcgtctccaagaacgcttcgcaggatgatctgaagacggcttacaagaaagccgccattaagaatcaccccgacaagggcggtgatcccgagaagtt

SEQ ID NO: 135726 - DNA, 243 bp, Glycine max
tctcagtgaaagagaatccgaggcgaagagaagagatcaattaagctggaggggaaggagcaggatgtgtcgctgggagcgaacaagttcccggagagacagccgattgggacggcggcgcagagccaagacgacggcaaggactaccaggagccggcgccggcgccactggttgacccgacggagtttacgtcatggtccttttacagagcagggatagcagagtttgtggccacttttctg

SEQ ID NO: 135727 - DNA, 230 bp, Glycine max
cttcagtgtgtcgtttaaaaatgtcgcagttgctggataaagccaagaacttcgtgtcggagaaggtaaatgatatggccaagccggaggcgagtgtcactgacgtggacttcaagcgcgtgagcaaagataatgtcgagtacttggccaaggtctctgttcgtaacccttattcaacttccatacccatttgtgagatcaactactctttcaaaagcgcatccagggag

SEQ ID NO: 135728 - DNA, 233 bp, Glycine max
cgtcatcaaagccagaaaggaaagcatcagcaagaagaagaaaacgaaggaggcagcatattgagtggcttcaccctggaattcttggaacatgcattcagcgtggacaagcagatagcgaaaaacctacaaggagagaacgaaggggaagacaagggagccattgtgacagtgacaggaggtctgagcgtgataaaaccacccacggacgagcagcaacaaagaccccagga

SEQ ID NO: 135729 - DNA, 239 bp, Glycine max
gttcagtgtgtcgtttaaaaatgtcgcagttgctggataaagccaagaacttcgtgtcggagaaggtaaatgatatggccaagccggaggcgagtgtcactgacgtggacttcaagcgcgtgagcaaagataatgtcgagtacttggccaaggtctctgttcgtaacccttattcaacttccatacccatttgtgagatcaactactctttcaaaagcgcatccagggagatagcatca

SEQ ID NO: 135730 - DNA, 240 bp, Glycine max
ctggtgcaaagaatgctattctcatgaatatgccaaatgctgttctttcaatgtggagatattttgttggagatctcgtctttgaagtttctaagatgacttctccctacattaaatgtacagtctcttcttcatagcatttggaaatttggctgatgacaccatcaattttgaggcttttccccacaagctggtgcagtttggagagattcaggaaaaagttgtattgaaattttcaca

SEQ ID NO: 135731 - DNA, 234 bp, Glycine max
agggaatgaaggaaccaacaatgagaagacatccaatctgactcaaacaaagttggagaagaggtttggacagtctccagtatttgtggcctccacactcttggataatggtggagttccacagggcgtgagtcctgcatcacttttaaaagaagccatccaagtcatcagttgtggttatgaagacaaaactgaatggggaaaagaagttgggtggatatatggttctgtgac

SEQ ID NO: 135732 - DNA, 242 bp, Glycine max
gagcgagcagtttcagacacagagagaggggtttgggattggagggattgacgctgcgtctcttcctcttctctttcgatccatccctcattcctaatcctccaatccaaccacctcagcctcacactcacatatacacatatctgaacgcgtatcgtccctcctatggcttcaaagcgcatcctcaaggagctcaaggacttgcagaaagacccaccaacttcttgcagcgctggtccagt

SEQ ID NO: 135733 - DNA, 261 bp, Glycine max
cgcgaacgcgaacttcggctcgagcacgactacaaggaagaacttccttataaccaaaaccaacaacaactatggcaagttatcagaagcactacgatgatcagggtcgcaaggtcgacgagtatggcaatgttgagaggcaaactgacgatatggcaacccggttcatgccactagtgtcacttatgtagccaccaaaagtgttggtggctacaatgatgacgctaataagcaacatgatattactggtgtctatcccga

SEQ ID NO: 135734 - DNA, 238 bp, Glycine max
cttcgagtttcacagccaagtcgtaaaagggtttcaagggatggaaaacatgcagagcttctggcaattgggtgatgaactccgtgggcactcaaaagcatcggaggatcacaagtggttaatggttgcctcgaaactggccgaacagacaagattgaagggggagcgtgtgaacaaccttgatctttcaaagggacccattgaaacaaggtcaagggataaatttgggttccaggaa

SEQ ID NO: 135735 - DNA, 239 bp, Glycine max
caccattgaattttgattctagcaagcagagcttttgtcaattttctattgaccttctcggtggaggaattttagtggacaaaactggagattggatcacacttatacaaaattctccaattagtaattgttgagagttgctgcttgagaagaaaggctgtttaatggttaagattgtgatgtctgggaatgcagcagtcaaaaggagtgattgggcctcattggtacaagtgttttta

SEQ ID NO: 135736 - DNA, 233 bp, Glycine max
tgcagaccgagctagctatctagcaagcaagcacagagatggaggcaaagcgacgccatgccctcatgtgcttggcacgtgtttcactcttcctctgcgctctaaccctatccgctgctcacggaacaccacggttcaagacatcgcgagatagttggaactcggggacaacgagcttctgcgcacggagaagaagttcaatgtcttcatggagaattaacggaggtgctact

SEQ ID NO: 135737 - DNA, 235 bp, Glycine max
cggcgagcgaaccgggaaaagcccaccatgaaaatcggtcgccctcggcgtccgaattgtagtctggagaagcgtcctcagtggcggaccgggcccaagtcccctggaagggggcgccagagaggggagagccccgtcgtgcccggaccctgtcgcaccacgaggcgctgtcggcgagtcgggttgtttgggaatgcagccccaatcgggcggtaaattccgtccaaggctaaat

SEQ ID NO: 135738 - DNA, 238 bp, Glycine max
ctcaattccaaagctaacaactttatagagagagagagagagagacagagagatggagggtgaaggaagaagaagagaaggaggagagagagagacagccacagcagcagcaacgaggaaggtggtgggggtgctgatcagagaagatacaaaggaataaggatgaggaagtggggcaagtgggtcgctgaaattagagaacccaataagcgttcaaggatttggctcggttcctatt

SEQ ID NO: 135739 - DNA, 234 bp, Glycine max
gtttttctgcctgcagatgaaggtgttgaaagttctatttggctgctagcaaaggcttatgtagttgtgaatgactcgtgctatcatcaacttgtcagccattggttaaacactcatgcagttgttgagccattcatcatagcaacaaacaggcatctcagtgttgttcaccctatttataaactccttcaccctcactatcgtgacaccatgaacataaatggccttgctcgg

SEQ ID NO: 135740 - DNA, 239 bp, Glycine max
caagtacttccttacaatcaaaaccaacaacaactatggcaagttatcaaaagcactacgatgatcagggtcgcaaggttgacgagtatggcaacgttgagaagcaaaccgacgaatacggcaaccctttcatgctgctagtgtcacctatgtagccaccagaactgctgctggtggttacagtgatgacattaataagcaacatgataccaccaatgcctacggcgtagacactggta

SEQ ID NO: 135741 - DNA, 237 bp, Glycine max
cacacaactactacaagtacttccttacaatcaaaaccaacaacaactatggcaagttatcaaaagcactacgatgatcagggtcgcaaggttgacgagtatggcaacgttgagaagcaaaccgacgatacggcaaccctgttcatgctgctagtgtcacctatgtagccaccagaactgctgctggtggttacagtgatgacattaataagcaacatgataccaccaatgcctacg

SEQ ID NO: 135742 - DNA, 238 bp, Glycine max
gttagaaatcagttaactgaacttatatctggtctagctgttcaagacatggccccaatgagcttgggtttatctcacagcttatccagatacaaattgaagtttagtgcagagaaggtggataccatgattgtccaggctattggtttactagatgatcttgataaagagttgaatacctatgccatgagggttcgagaatggtatggttggcattttcccgagcttactaaaataa

SEQ ID NO: 135743 - DNA, 244 bp, Glycine max
aacttatgaaagacagggaaaaactgttttctgaaggtgaagttagaaattggtgttttcaagttttccaaggccttgcttacatgcaccagcgtggatacttccatcgcgacctgaagcctgaaaacttgctggttaccaaggattttatcaaaatcgctgattttggcctagcccgagagatcagttcacaaccaccctacactgagtatgtctccacacgatggtatcgtgctcctgaggt

SEQ ID NO: 135744 - DNA, 237 bp, Glycine max
ttgaaagggaacgagaaaacacagagagaaacaaaacattgcttctttgaacttgatgcctggttcaagggatggaaccatccagtgtttcatcaagagagtcaaatctaatctgacataccagctatcctgtgtcttagtcctgcattgctagttgaaaatggaaagtttcttctttctgcgaaacggaccagaagaactacatgcacagagtatactatatcgatggatgcagat

SEQ ID NO: 135745 - DNA, 238 bp, Glycine max
gggaggagctggtgcaaagaatgctattcttatgaatatgccaaatgctgttctttcaatgtggagatattttgttggagatctcgtctttgaagtttctaagatgacttctccctacattaaatgacagtctctttcttcatagcatttggaaatttggctgatgacaccatcaattttgaggattttccccacaagctggtgcaatctggagagattcaggacaaagttgtattga

SEQ ID NO: 135746 - DNA, 236 bp, Glycine max
gaaaatttgaagagtttgtttattgtgaaaaaaagaaaaatgcaggcagcaaagaaagccatagagacctttaaggaaaccgcagccaacattggcgcctctgccaagtctggcttggagaaaacaaggccactatccaagagaagaatgagaagatgaatgcagaagatcaaactcaaatggatatggctaccaagaggaaagaagagaagatcaaccaggctgagatggagaag

SEQ ID NO: 135747 - DNA, 231 bp, Glycine max
cgcaccagcaccgccgagcccagccctgccggcatcttctggaacgtccgcaaggacgtctcgaaatactcctccctcctcgccaagcccaaccaggacctcaccatgatgctcgaaaacatcgtcaataatgaattcaccggcgtctaccacgttaccgtcactctcctcttctacaacgagtacgccgttagggttccgtttgtcccctgccccgaagaactcaataat

SEQ ID NO: 135748 - DNA, 237 bp, Glycine max
cacacaactactacaagtacttccttacaatcaaaaccaacaacaactatggcaagttatcaaaagcactacgatgatcagggtcgcaaggttgacgagtatggcaacgttgagaagcaaaccgacaatacggcaaccctgttcatgctgctagtgtcacctatgtagccaccagaactgctgctggtggttacagtgatgacattaataagcaacatgataccaccaatgcctacg

SEQ ID NO: 135749 - DNA, 233 bp, Glycine max
acacaactactacaagtacttccttacaatcaaaaccaacaacaactatggcaagttatcaaaagcactacgatgatcagggtcgcaaggttgacgagtatggcaacgttgagaagcaaaccgagaatacggcaaccctgttcatgctgctagtgtcacctatgtagccaccagaactgctgctggtggttacagtgatgacattaataagcaacatgataccaccaatgcct

SEQ ID NO: 135750 - DNA, 244 bp, Glycine max
tcgagattctttgtttgctaccttctctcggaacaatggttacgttcaggtttcaccagtaccaggtggttgggagggctcttcccacggaagcagatcagcaccccaagatctaccgaatgaagctctggacaccaacgaggttcgcgaccaagtccaagttctggtatgtttctgaggaaactgaaaaaggtgaagagagagcaatggccaagtgcatgccatcaacgagatttttgagaag

SEQ ID NO: 135751 - DNA, 236 bp, Glycine max
cgagaaagttgaaactcggggacaacgagcttctgcgcacggagaagaagttcaaggttttcatggagaattacgggaggagctactccacagaggaggagtatttgcgccgtttggggatttcgcccagaacatggtcagagcggcggagcatcaggcgctggaccccaccgccgtccacggcgtcacgcagttctccgatctcaccgaggacgagtttgagaagctctacactg

SEQ ID NO: 135752 - DNA, 235 bp, Glycine max
tacaagtacttccttacaatcaaaaccaacaacaactatggcaagttatcaaaagcactacgatgatcagggtcgcaaggttgacgagtatggcaacgttgagaagcaaaccgacgaatacggcaccctgttcatgctgctagtgtcacctatgtagccaccagaactgctgctggtggttacagtgatgacattaataagcaacatgataccaccaatgcctacggcgtagaca

SEQ ID NO: 135753 - DNA, 231 bp, Glycine max
ctcaaacattgtttgttgtaggaagaggaatcttgagaaatggcaggggacagcaagagcaagattctgttcatcggagggactggttacatcggaaaattcatcgtggaagccagcgccaaactggccacccaactttccttttggtgagggagtccactctctccaaccccgcaaaatcacccctcatcgacaatttcaaaggcctcggtgtcaatcttgttttaggag

SEQ ID NO: 135754 - DNA, 233 bp, Glycine max
agaaaacctaagcttagaattagaaacaaagaaaagaagaaaggaaagaattgatcgttgaaaatgcagggaggaaagaaagcgggagagtacattaaggaaacagctacaaacattggtgctctgccaaggctggcatggagaagaccaaggccactgtccaagagaaggcagaaagaatgacagcacgtgatccggtgcaaaaggagttggcaacccaaaagaaagaggca

SEQ ID NO: 135755 - DNA, 236 bp, Glycine max; identical to SEQ ID NO: 135343

SEQ ID NO: 135756 - DNA, 233 bp, Glycine max
gcgccagtggcagagaaggccaaagactacactcttcaggctgcggagaaggccaagagtgcgggtggcacaacggcgagttacgtcggagagaaagcggtgcaggccaaggatgtcgccgtggaagtgggaagagtgcggctgggtatgctgccaaggtggctgctgatttgagggacaaggccaccgcggtggggtgggccgcggcccatttttcggcggaaaagacggtg

SEQ ID NO: 135757 - DNA, 235 bp, Glycine max
tcggagagaaagagagagagagagagaaaaatggctgatacaagtggaggagatgcagtgagaccggtggtaatatgtgataacaagtgtggctgcacagttccatgcactggtggttccacttgcaggtgcacaagtgtcggcatgacaactggaggcggtgatcacgtgacatgctcgtgcggagagtactgtgggtgcaatccatgctcatgtcccaagactgcggcttctg

SEQ ID NO: 135758 - DNA, 237 bp, Glycine max
aaagaaaggaaataattgatctttgaaaatgcagggaggaaagaaagctggagagtccatcaaggaaacagctgcaaacattggtgcttctgccaaggctggcatggagaaaaccaaggccactgtccaggagaaggcagaaagaatgacggcacgtgatccgatgcaaaaggagttggcaacccagaagaaagaggcaaagatgagccaggcagagctggacaagcaggcggcgcg

SEQ ID NO: 135759 - DNA, 120 bp, Glycine max
gttagaaatcagttaactgaacttatatctggtctagctgttcaagacatggccccaatgagcttgggtttatctcatagcttatccagctacaaattgacgtttactgcagagaaggtg

SEQ ID NO: 135760 - DNA, 237 bp, Glycine max
aaagagctttgcactcgataaactgaacggcaaaatatgctacatgctctcagcccgaagtctctcaattgtttggggagacactcccaggtattggagatggacttctgttccagcggccaggtttcggaggtggcggaacttgttagtgtgtgttggttggaaataaaaggtggaatcaaaagtggcacgttgtctgaaaaaacattgtacggggcatacctagtgtttaagcaa

SEQ ID NO: 135761 - DNA, 235 bp, Glycine max
tggcagggatctaccgtctagcggaggacagcctccggcagatattctgcaggctgccactgagggaaataatgatatgccgctcagtgtcaaaattcttcctgcagctgctctcaacaccttcttcctccaggtcctctccagctcccatccacccctccagctcctggccctccgcaaccgccaccacaccccttctcacacctctctgcccctcttcgacgccgccaccaaa

SEQ ID NO: 135762 - DNA, 230 bp, Glycine max
gacagcacgtgatccggtgcaaaaggagttggcaacccaaaagatagaggcaaagatgaaccaggcggactggacaagcaggcggcgcgtcacataacacggcggccaaacagtccgccacacggctgggcacatgggacatggccaccacaccaccggaaccgggactggaaccgccacgtattccaccaccggggaatatggtcagcccatgggggcccaccagacgt

SEQ ID NO: 135763 - DNA, 229 bp, Glycine max
caacgatattctgtgttgcgattatgctagttttgatggtttgattaccaagcaagttatgagcaagatggcagaaatgataaacagtctttgtggtggtgatgaaaaattgatgcgtgaaagacacacctgctgttggcttgttgttcaaggatggcaatttgtaagaaagatgtttggagagttgaatgtggaatcccttctggatttccgctcacagttatttgta

SEQ ID NO: 135764 - DNA, 229 bp, Glycine max
atccttcaaaaattttgtttctttgtgtgtgtatggtgatgataacttaattagtgttcatgaatatgtcaagccttactttagtggttctaaattgaaaagctttctagctggtcataaatcaccattactgatggtattgacaaaactagtgcaactttgcaatttagaaagttagcagattgtgattttctcaagagaaactttaagcagatgtctaatgttttgt

SEQ ID NO: 135765 - DNA, 234 bp, Glycine max
cgactttttctcggcaggaacagactccacagcggtggcaacagagtgggcattggcagaactcatcaacaatcctaaggtgttggaaaaggctcgtgaggaggtctacagtgttgtgggaaagacagacttgtggacgaagttgacactcaaaaccttccttacattagagcaatcgtgaaggagacattccgcatgcacccgccactcccagtggtcaaaagaaagtgcaca

SEQ ID NO: 135766 - DNA, 235 bp, Glycine max
aaccaaaacagtaaagctaacttcaacacctttaattttctaaaagtaattcagcggctgaataccaagcggagaagatgagtcaggagcagccacggcgtcccaaaggccaaaaccccatcaatacggcgacgtttttgtcgtctccggcgaccttgcacagaagcccgtcgcaccggaagatgctgccatgatgcaaagcgcggaaactcgagtgctcggacaaacccaaccc

SEQ ID NO: 135767 - DNA, 238 bp, Glycine max
caatgtcgttgattccaagtttcttcggcaccgggcgaagaaccaacgtcttcgaccccttctccctcgacgtgtgggacccattccatggcttccccggcaccaccgccctctccgctccgcgctccgagacggcggccttcgccaacacgcgcatcgactggaaggagacggcggaggcgcacgtgttcaaggcagacctgccggggctgaagaaggaagaggtgaaggtggagat

SEQ ID NO: 135768 - DNA, 233 bp, Glycine max
tggggctacccgctgagtttaagcatatcaataagcggaggaaaagaaactaacaaggattcccttagtaacggcgagcgaaccgggaaaagcccaccatgaaaatcggtcgccctcggcgtcgaattgtagtctggagaagcgtcctcagtggcggaccgggcccaagtcccctggaagggggcgccagagagggtgagagccccgtcgtgcccggaccctgtcgcaccacg

SEQ ID NO: 135769 - DNA, 230 bp, Glycine max
aagcaacatgataccaccaatgcctacggcgtagacactggtagacagtattctagtggtggctacgatggtgacactaataaacatcatggaactactggtggctataatgatgacaccatagacatcatggaactaccggtgtctatggtatagacaccgataggcaacaacatgggactactggtggctatgccggtgacactggtaggcaacatgggaacatcggt

SEQ ID NO: 135770 - DNA, 231 bp, Glycine max
ctaagcttagaattagaaacaaagaaaagaagaaaggaaagaattgatcgttgaaaatgcagggaggaaagaaagcgggagagtccattaaggaaacagctacaaacattggtgcttctgcaaggctggcatggagaagaccaaggccactgtccaagagaaggcagaaagaatgacagcacgtgatccggtgcaaaaggagttggcaacccaaaagaaagaggcaaagat

SEQ ID NO: 135771 - DNA, 230 bp, Glycine max
  unsure (1)..(230): unsure at all n locations
aagaccatctatcagatggcttttatgatgcaggacgagatcggctgtttatgcctcttgagtgttatgagcaaaatcnattgtttgcttctcgtgaagtcatccttttggacagaaaaacgatgaagagttggatgctgttatgctagctgctcaggcattggtttataatttgaagaagttaaatggtttaagcagatatgggaaccaggatggggttgataacttgc

SEQ ID NO: 135772 - DNA, 239 bp, Glycine max; identical to SEQ ID NO: 134763

SEQ ID NO: 135773 - DNA, 272 bp, Glycine max
gtacagaccacctgagttgctgctaggaacaacaaagtatgggccagctgtggatatgtggtctgttgggtgcatttttgctgagcttcttcaagggaagcctatatttcctggaaaagatgagccagaacaattaaataaaatatatgagctgtgtggagcaccaaatgaagtcaattggcctggggtttccaagataccttattataataaatttatgccaacaaggccgatgaaaagacgtttgagggaagttttcaggcattttgatc

SEQ ID NO: 135774 - DNA, 271 bp, Glycine max
cacaactactacaagtacttccttacaatcaaaaccaacaacaactatggcaagttatcaaaagcactacgatgatcagggtcgcaaggttgacgagtatggcaacgttgagaagcaaaccgacgaatacggcaaccctgttcatgctgctagtgtcacctatgtagccaccagaactgctgctggtggttacagtgatgacattaataagcaacatgataccaccaatgcctacggcgtagacactggtagacagcattctagtggtggc

SEQ ID NO: 135775 - DNA, 270 bp, Glycine max
gcaaggcaagcgcttctcctctttgtgttctggctatgcttcttggcaagagttagatcggacgaggattgcgtgtacacggtgtacgttcggacgggttcgatcatcaagggaggcaccgattcagtaattggtctgaagctatacgacaagtccggctacggcatatacatcaccaacctcgaggcatggggcgggttaatggatccgggtcacaactactacgagcggggcaacctcgacatattcagtggtagaggcccttgcttg

SEQ ID NO: 135776 - DNA, 274 bp, Glycine max
agaaaacctaagcttagaattagaaacacagattagaagaaaggacaggcttgatcgttgacaatgcagggaggaaagacagcgggagagtccattaaggatacagctacaaacattggtgcttctgccaaggctggcatggagaagaccaaggccactgtccaagagaaggccgaaagaatgacagcacgtgatccggtgcaaaaggcgttggcaacccaaaagagcagatgcaaagatgaacccgggcggagctgcgacaagcaggcggcgc

SEQ ID NO: 135777 - DNA, 269 bp, Glycine max
cacacaactactacaagtacttccttacaatcaaaaccatagaaaactatggctagttatcaaaagcactacgatgatcagggtcgcaaggttgacgagtatggcaacgttgagaagcaaaccgacgaatacggcaaccctgttcatgctgctagtgtcacctatgtagccaccataactgctgctggtggttacagtgatgacattaataagcaacatgataccaccaatgactacggcgtagatactggtagacagcattctagtgg

SEQ ID NO: 135778 - DNA, 269 bp, Glycine max
tgggcttcaagggatggaaaacatgcagagcttctggcaattgggtgatgaactccgtgggcactcaaaagcatcggaggatcacaagtggttaatggttgcctcgaaactggccgaacagacaagattgaagggggagcgtgtgaacaaccttgatctttcaaagggacccattgaaacaaggtcaagggataaatttgggttccaggaagagaacaaatttgattctcttaacttgagcatgttgaacctggactctaaatttactg

SEQ ID NO: 135779 - DNA, 267 bp, Glycine max
gaaatggctgaagcacaactacgagaccagcatggcaaccctgtcccactcaccgatcaatacggtaatccggttatcttaactgacgagcgcggtaatcccgtccaactcactggtgtcgctaccaccgctaccggcacagcaggttctgggtttgggtcctatggtaccggtgcttacggtggtggtgcaagtgcaaccaccgttgcagatcttttggcaacccaaccaaggagtggcagagaggctagagagcttcgtcgttcc

SEQ ID NO: 135780 - DNA, 274 bp, Glycine max
gatggcacaagttgaacttcgtgacgagcatgggaacccagttgaactaacagatgcatatgggaatccggtttggttaacggacgagaaaggcaacccggtgcacctcacggctgtggcaaccaatgcacacaaatctatgcttcagaatgacaccccacaagagcttcctcactccaagagttcaagctcgtctgaggatgaagggcatggagagaggatcaggaagggactgaaggataacatagaagaaaagttaccagctggagaagga

SEQ ID NO: 135781 - DNA, 272 bp, Glycine max
ccaaattcattttaatcctaattctgcacttcttgatcattcgatttttctcctgcagatgcagatattcgtaaaaactttgaccggcaagaccatcacccttgaggtggaatcctccgacaccattgacaacgtaaaagctaagattcaagacaaggaagggatcccacctgaccagcagagacttatctttgcgggtaaacaacttgaggatggtcgcacccttgccgattacaacatccacaaggaatcaaccctgcatctggtgcttc

SEQ ID NO: 135782 - DNA, 268 bp, Glycine max
ggagcttcctgtttccatttcctctcacaaaaatcacttattatgaacacacgaaaagacatggaccggatcaaaggcccatggagcccggaggaggacgaggctctgcagaagctggtggagaaacacgggcccaggaactggtccctcatcagcaagtccatcccgggccgctccggcaagtcctgcaggctccgctggtgcaaccagctgtccccccaggtggagcaccgggccttcacccacgaagatgacgacaccattatcc

SEQ ID NO: 135783 - DNA, 275 bp, Glycine max
tgaggattttgtatgtatgatgtgttctgacagtgaccaactactcaatcacaatcctgatcttcttaagaagctggaactctcggatggtctcggttcgccgtagctcagttaactaggcaagcgaactcgtgaatcactatttgaggatccagccagagatatgactagcttgctcaaaatatggtacctgaacatatgctctggagttgtctgtttatgttactgccaatgttctggttggtgcgagatatagtagaaaacccgcatccatg

SEQ ID NO: 135784 - DNA, 258 bp, Glycine max
aacctctcctcaatgggtagacacgaagccgccatttccatcctcaccaacgtcgcccccactgccttcggcctgggcgcacggccaccgccgtctcctcttccctctacaccgtcgacggcggccagcgcgccgtcctcttcgaccgcttccgcggcatcctggactccaccgtcggcgaacggacccacttcctcatcccctgggtccagataccctacatcttcgccatccgcactcgtccccacacctgctgct

SEQ ID NO: 135785 - DNA, 257 bp, Glycine max
tttagattctcgggttgcgctggttgggcccaatggtgctgggaagagtacactactgcagctaatgacatgtgacttgctgcctagtgatggcatggtccgacgtcataatcatcttcgaattgcacaatatcaccagcgtttggccgaacagctacacatggaactgtctgctctccagattctgattagcgcataccctggcaacgcggcagaggagatgacggcggcgattgggaagtttcggctgtcaggta

SEQ ID NO: 135786 - DNA, 271 bp, Glycine max
atccgcgcatattctcatttcaatttgcatttgcatttgcgtttcatttggcgttttgtttctttctggaagcttcgttcgggcatcaatggcgtccttcgatgaagctcctcccggaaactccaagaacggcgagaagatcttcaaaaccaagtgcgctcagtgccacaccgtcgacaaaggtgccggccacaaacaaggacccaatctgaatggtttgtttggtagacaatctggtacaactcctggatattcctattctactgctaac

SEQ ID NO: 135787 - DNA, 270 bp, Glycine max
agacaagatctccatatctgttcccaaaagcttgtttgtaagaatggcttccggtgaacagaaattccctcctcaacaacaacaaacacagcctgggaaggagcatgctatgactccagtaccccaattcactagccctgactacaagccttcaaataaacttcaagggaagattgcattagtcactgggggtgattctgggattggacgagcggtgtgtaacttgtttgccttagaaggtgctaccgtggccttcacgtatgtgaaggg

SEQ ID NO: 135788 - DNA, 268 bp, Glycine max
agaaaacctaagcttagaattagaaacaaagaaaagaagaaaggagagaattgatcgttgaaaatgcagggaggaaagaaagcgggagagtccattaaggaaacagctacaaacattggtgcttctgccaaggctggcatggagaagaccaaggccactgtccaagagaaggcagaaagaatgacagcacgtgatccggtgcaaaaggagttggcaacccaaaagaaagaggcaaagatgaaccaggcggactagacaagcaggcggc

SEQ ID NO: 135789 - DNA, 258 bp, Glycine max
cacacacaactactacaagtactaccttaaaatcaaaaccaacaacaactatggcaagtcatcacaagcactacgatgatcagggtcgcaatgttgacgagtatggcaacgttgagaagcaaaccgacgaatacggcaaccctgttcatgctgctagtgtcacctatgtagccaccagaactgctgctggtggtcacagtgatgacattaatacgctacatgataccaccaatgcctacggcgtcgacactggtagac

SEQ ID NO: 135790 - DNA, 269 bp, Glycine max
gcctcgagccgaatcggctcgacggctcgagctcatttcttcatcgttcgattcttctcctactaaagatgcagatcttcgacaaaacttagaccggtaagaccatcacccttgaggtggagtcctccgacaccatcgataacgtgaaagctaagattcaagacaaggaagggatcccacctgaccagcagagacttatctttgcgggtaaacagcttgaggatggtcgaacccttgccgactacaacatccaaaaggaatccactctc

SEQ ID NO: 135791 - DNA, 264 bp, Glycine max
  unsure (1)..(264): unsure at all n locations
ccagattgagacaaagaatagatcctcaatacaatgaggttcaggctcagatggaaacaaatttgtttaaattgtctcttgatgatgttgaaactcctaaaggttccatgttggatcttaaaatttctcaatctaaaattgcacttcccaagaacacagttggaggaaccattctgcgtagtgatctattggcaaattttttgacagagggcaattttagagcaagtgttgatttgcaaaggggnatcgtattagaggaatgat

SEQ ID NO: 135792 - DNA, 265 bp, Glycine max
cacacacagctagcagatattacatacacgtgaatcactaattaagccatggagtagaaatcaatagctgggttgtgcttcctcttccttgttctctttgttgctcaagaagttgtggtgcagactgaggcaaagacttgcgagaacctggctgctacatacaggggtccatgacttccacgcactggcagctgcgatgatcactgcaagaacaaagagcacttgctcagaggcagatgcagggacgattttcgctgttggtgca

SEQ ID NO: 135793 - DNA, 264 bp, Glycine max
gtgaacttaaaggatgctgtggctgggctcatgagcttgcatgacaacgccagatacagggtttacaagctcaatgatcaaacagcaaagctttttgtgcgatcaagacagtttgcacctaccggaggcacatattctgattgctggtgatcctgcaactggttgccttgttgattttggactctatgtctaccacagctactcagcattccggcgcactcaaggtgctagctttggctctttcgtatatcttcgcaagatgga

SEQ ID NO: 135794 - DNA, 269 bp, Glycine max
ctgaaattttaattgacttttctcccctcatacaaaaaacctaccaatggctcccgcaaaggcagagaataagcccgcggagaagaagccggcagagaaggccccagcggagaagaagccgaacgcgtagtagaagatatcgaaggaatgaggacagcgagcagaagccgacgtgaccaaagacgagcgttgagacctacaagatctacatcttcaaggtgttgacagcaagtgcaccccgacatcgggatctccagcaaggctatggg

SEQ ID NO: 135795 - DNA, 267 bp, Glycine max
ctattctcatgaatatgccaaatgctgttctttcaatgtggagatattttgttggagatctcgtctttgaagtttctaagatgacttctccctacattaaatgtacagtctctttcttcatagcatttggaaatttggctgatgacaccatcaattttgaggcttttccccacaagctggtgcagtttggagagattcaggaaaaagttgtattgaaattttcacaagaggaatttcttacagcttggtcaactcaggtgcgtcctg

SEQ ID NO: 135796 - DNA, 263 bp, Glycine max
agtaattctcccaagggaacggaagacgcatgagtatcatgaagccataaatagacgctataagcacctccctgaagttaaccgtatcgcaagacatagacacttgccaagaccaatattcacagcttctgctttaatgcgcgttatggcggatgctaagagtaggaaggttgagaagaggatagctcacagtgctccagggagtattaccacacagccattacgaagacgaagcattatcgtaatagtcgcgtgaggttttt

SEQ ID NO: 135797 - DNA, 267 bp, Glycine max
ccgctcgagcggctcgagcggctcgagcacaactactacaagtacttccttacaatcaaaaccaacaacaactatggcaagtgtatcaaaagcactacgatgatcagggtcgcaaggttgacgagtatggcaacgttgagaagcaaaccgacgaatacggcaaccctgttcatgctgctagtgtcacctatgtagccaccagaactgctgctggtggttacagtgatgacattaatacgcaacatgataccaccaatgcctacggcg

SEQ ID NO: 135798 - DNA, 266 bp, Glycine max
gtgagctacaaagaaaggacataattgatctttgaaaatgcagggaggatagaaagctggatagtccatcatggaaacagctgcaaacattggtgcttctgccaaggctggcatggagaaaaccaaggccactgaccaggagaatgcagaaagaatgacggcacgtgatccgatgcaaaaggagttggcaaaccagaagaaagaggcaaagatgagccactgcatagctggacaagcaggcggcacgtcagcataacacggcggcg

SEQ ID NO: 135799 - DNA, 264 bp, Glycine max
tctacaagtgaatattttcgccaagaaatgaatcctaattttaggatgaccgaccccattaatccagtccatatcatgtcctttacgggagctagaggaaatgcgtctcaagtagaccaattagtgggtatgagaggattaatgtcggatccacaaggataaatgattgatttacctattcaaagcaatttgcgcgaagggctttctttaacagaatatataatgtcttgctacggagctcgtaaaggggttgtagatactgct

SEQ ID NO: 135800 - DNA, 263 bp, Glycine max
ctggagagtccatcaaggaaacagctgcaaacattggtgcttctgccaaggctggcatggagaaaaccaaggccactgtccaggagaaggcagaaagaatgacggcacgtgatccgatgcaaaaggagttggcaacccagaagaaagaggcaaagatgagccaggcagagctggacaagcaggcggcgcgtcagcataacacggcggcgaacaggctgccacggcaaggcacatgggacaaccatggggacccatcagacgtc

SEQ ID NO: 135801 - DNA, 269 bp, Glycine max
cacacaactactacaagtacttccttacaatcaaaaccaacaacaactatggcaagttatcaaaagcactacgatgatcagggtcgcaaggttgacgagtatggcaacgttgagaagcaaaccgacgaatacggcaaccctgttcatgctgctagtgtcacctatgtagccaccagaactgctgctggtggttacagtgatgacattaataagcaacatgataccaccaatgcctacggcgtagacactggtagacagcattctagtgg

SEQ ID NO: 135802 - DNA, 266 bp, Glycine max
acaattcatactgatgataacattggttgttagtgtaaaattcttttacactaattaatggtatcggtatgaagtatgatttattactttgtggatgcttaagatgcttcataaatgatgattgcaggtacgagtgataactaggaaaacttgtgaaccactggaggaagattccttcaggccaatccttcaccactatgagggtcccaagttccgtcttgagctgaatgtgcccgaggtattttatttttatcttgctgaatatt

SEQ ID NO: 135803 - DNA, 264 bp, Glycine max
ggttctgcttctggctttccccactgtatttggagctgaccatgaagttggtgacactggtggatgggccctaggggttaattacaacacctgggcctctgggaaaactttcagaattggtgacaatttggttttcaagtatgactctacccatcaagttgatgaggttgatgagagtggctacaacagctgcagctcaagcaacatcatcaagaactacaaggatggaaacaccaagattgaattgacttcaactggcaaaag

SEQ ID NO: 135804 - DNA, 261 bp, Glycine max
ccgtgatttcagtgttggtgttgcagaccaacaccaacaagaagaacatcagttagatcaacaaaagcgtggtgtaatcggatccatgttcaaggcggtgcaagacacctacgagaacgccaaggaagctgtcgttggcaagaaagaaccttcgacgacgactaactcgtacagtaccagagaggttatacacgacgttgacattcaacccgatgacgcggctgcagcgagggaagtgagagacaaatcagcctcaaagtc

SEQ ID NO: 135805 - DNA, 258 bp, Glycine max
cacacaactactacaagtacttccttacgatcaaaaccaacaacaactatggcaagttatcagaagtactacgatgatcagggtcgcaatgttgacgagtatggcaacgttgagaagcaaaccgacgaatacggcaaccctgttcatgctgctagtgtcacctatgtagataccagaactgctgctggtggttacagtgatgacattcataagcgacatggtaccaccaatgcctacggcgtagacactggtagacag

SEQ ID NO: 135806 - DNA, 261 bp, Glycine max
ctagttcacagctctcagttcgtatttgatgatcctgtgtaattaaggctgacggcgtggatctgttggatacatgggctagcatgcttgggatgctggttaggattgcatcaactgataagggtgttgagtatgaatacaagggagaaaatctcaggatcaagagtcctatgcttttgcaaatgaacccaattcacaagataattccagttctgatccataatggcacaccaatttgtgaatctgcaattatagtgcagt

SEQ ID NO: 135807 - DNA, 258 bp, Glycine max
ccaacagagtacaagagctgctcaacagaagacctcagagatgggccagtccacgaaggaatcggcccagtcagggaaggacaacacccaagggttcctgcagcagacaggggagaaggtgaagggcgcagccaaggagctacagaggctgtgaagcaaacccttggcttgggcgagcatgatcaagacaaccgcagaaattactaataccataattggaagtgctttcttgtagtagtggattacgcagcatggctt

SEQ ID NO: 135808 - DNA, 259 bp, Glycine max
acagaaaggcaataattgatctttgaaaatgcagggaggaaagctagctggagagtccatcaaggaaacagctgcaaacattggtgcttctgccaaggctggcatggagacaaccaaggccactgtccaggagatggcagaaagaatgacggcacgtgatccgatgcaaaaggagttggcaacccagaagaaagaggcaaagatgagccaagcagagctggacaagcaggcggcgcgtcagcataacacggcggcgaac

SEQ ID NO: 135809 - DNA, 263 bp, Glycine max
caactacaagaaagaacttccttataaccaaaaccaacaacaactatggcaagttatcagaagcactacgatgatcatggtcgcaaggtcgacgagtatggcaatgttgagaggcaaactgacgaatatggcaacccggttcatgccactagtgtcacttatgtcgccaccataagtgttggtggctacaatgatgacgctaataagctacatgatattactggtgtctatcccgagatagacaccggtagacatcattttgg

SEQ ID NO: 135810 - DNA, 260 bp, Glycine max
cagaggtgaatgcaagtttgatccagagaaaatagcagttaagatcacaaatttcaccaatatccctgctgatgagaaccacattgccgcatatatagtcaaaaatggtccacttgctatgggcgtgcatgcaattttcatgcgaacatacattggtggtgtctcatgccctctcatatgtagctagaaaaggctgaaccatggtgtgttacttgtgggatatggtgcaaaaggcttctcaattcataagcttggcaaca

SEQ ID NO: 135811 - DNA, 266 bp, Glycine max
cacgagccgcagtaaaacctcaagctatacaattagggaacacgcgactacgaagaagcagtcagaattgatcgttgaaaatgcagggaggaaagatagcgggagagtccattaaggagacagctacaaacattggtgcttctgccaaagctggcatggagaagaccaaggccactgtccaagagaaggcagaaagaatgacagcacgtgatccggtgcaaaaggagttggcaacccagaagatagaggcaaagatgaaccatgcg

SEQ ID NO: 135812 - DNA, 262 bp, Glycine max
gggatccttctggggagtttctggcatctgtcagtgaggactctgtcagagtttggactcttggatcagggagtgaaggggagtgtgttcacgagcttagctgtaatggcaacaagtttcactcatgtgttttccatccaacatattcttcgctgttggtcgttggttgttaccagtcattggagctctggaacatgactgagaacaagacgatgacactatctgctcatgaaggtcttattgcggcattggcggtttctac

SEQ ID NO: 135813 - DNA, 263 bp, Glycine max
  unsure (1)..(263): unsure at all n locations
agcattccatagttctcagatagagnacgtctctcgcggcctcttctctccctcgcgccgcccacactaaaaggttattcgtctattattgtttgacgatggctgatgctcatgggactgataagaacattgaggtgtggaaaatcaagaaattgatcaaagctcttgaggctgccagaggaaatgggacaagtatgatttcccttatcatgcctccacgtgatcaaatatctcgtgtcaccaagatgcttggtgatgagttt

SEQ ID NO: 135814 - DNA, 260 bp, Glycine max
catcattttctctcttctctgcttcttcttgttcaaatcttaggagctgaggagaatcaatcgagagaaatatgtctggtatcgctcgtggacgccttgctgaggaacgaaagtcatggcgcaaaaaccatccacacggtttcgttgccaagcccgagactctacctgatggcaccgtaaatttgatggtctggcattgcactattcctggcaagaccgggactgattgggagggtggatatttcccactgacaatgcac

SEQ ID NO: 135815 - DNA, 261 bp, Glycine max
gccactcatactcattttgcgaaaccggctgaagtatgctctaacataccgtgaagtcattgctattctgatgcagcgacatgtccttgttgatggcaaagtcaggactgacaaaacataccctgctggttttatggatgttgtatcaatccctaaaacaaatgagaacttccgcctgctgtatgacaccaaaggtcgattccgtctccactcagtcagggatgacgaggctaagttcaagctttgcaaagttcgctcagt

SEQ ID NO: 135816 - DNA, 256 bp, Glycine max
gcagcggcggcaacagggagagaagatgaagttcaatccacgtgtgtcgagcagccgccgcaagagccgaaaggctcatttcacggcgccatcgagcgtgcggcgggtgcttatgagcgcccctctgtcggcggactgcggtctaagtacaacgtgaggtcgatcccagtacggaaggaggacgaggtgcaggtgatgcgaggaacatacaagggtcgcgaggggaaggtgactcaggtctaccgtcgaaagtggg

SEQ ID NO: 135817 - DNA, 259 bp, Glycine max
aaacttttcattagtgaatgttgctggtaatgatattgtacaagggaataagaagctcttattggcatttttgtggcagctgatgaggtttactatgcttcaacttctgagaaatttgagatcgcactcacaaggtaaagagattactgatgctgatattctaaactgggcaaacaataaagtgaaaagagcaggaagaacttctcaaatggatagtttcaaggataagaatctttctggtggcgttttcttccttgag

SEQ ID NO: 135818 - DNA, 260 bp, Glycine max
aaaatgcaccacacctaaaatcgggtcaaattctaacagttcaaatggattctgtaggaataagatcggctaacccttatttggcgactcctggagcaacggttcatggccattatggggaaatactttctgaaggagatatattagttacatttatctatgaaaaatcgagatcgggtgatataacacaaggtcttccaaaagtagaacaggtattagaagttcgttcgattgattcaatatcgatgaacctagaaaag

SEQ ID NO: 135819 - DNA, 259 bp, Glycine max
ctcgagccgaaaggaaataattgatctttgaaaatgcagggaggaaagaaagctggagagtccatcaaggaaacagctgcaaacattggtgcttctgccaaggctggcatggagaaaaccaaggccactgtccaggagaaggcagaaagaatgacggcacgtgatccgatgcaaaaggagttggcaacccagaagaaagaggcaaagatgagccaggcagagctggacaagcaggcggcgcgtcagcataacacggcgg

SEQ ID NO: 135820 - DNA, 252 bp, Glycine max
agatggtccagattagtaccacaaaaatggagaaatataataactgaatatcgtatagctcaaaataaagatttaaccaaatgcaattcatatgaaaaaagccaattaattctttacaaagaacaacaagtaaacgcattaaaaaaaaaaaattagaaaacaatatagatacgatcttttatcctataattttatcaattatgcagataagaaagactcatatatttatggatatagatccctatttcaagt

SEQ ID NO: 135821 - DNA, 259 bp, Glycine max
gtttcaccgcacgaatatcttgttgtttggagcgatccgagaaaaactctgtaaacatgttggtttaccaggacctccttacaggtgatgagcttctctctgactccttccgttacaaggaaattgagaatggaatgctgtgggaagttgaggggaagtgggttgttaaaggagcagttgatgtagacattggtgcaaacccttctgctgagggtggaggagaagatgagggagttgatgatgcagctgttaaggttgt

SEQ ID NO: 135822 - DNA, 258 bp, Glycine max
atttgaagagtttgtttattgtgaaaaaaagaaaaatgcaggcagcaaagaaagccatagagacctttaaggaaaccgcagccaacattggcgcctctgccaagtctggcttggagaaaaccaaggccactatccaagagaagaatgagaagatgaatgcagaagatcaaactcaaatggatatggctaccaagaggaaagaagagaagatcaaccaggctgagatggagaagcagcaggcccgtaagtactacgccg

SEQ ID NO: 135823 - DNA, 255 bp, Glycine max
ggagaattggaggatccttgacttcttctctcactttccagaaagccttcacatgttcacctttttatttgatgatttgggtgttccacaagattacaggcatatggatggttttggagttaacacatacacactgatcaacaaggctgggaaagcagtgtatgtgaaatttcactggaagaccactagtggtataaagtgtctattggaggaagaggccattaaggtgggaggagccaaccacagccatgccac

SEQ ID NO: 135824 - DNA, 259 bp, Glycine max
ataagaactaagatggattggatcggagcgtaccgcggaggccagagaagcagggactggtgcgacccttcatcaccattcactgatttgtgggaccctcgtcgtgtcggtgacgctgatgatatcacctcctctctcgcccatgctcacgttgactggcgtgagactgataaagctcatatcttccgtgctgatcttccaggggtgaagaaagaggatctgaaggtgcaggtggaggagaataagatcctgcagataa

SEQ ID NO: 135825 - DNA, 258 bp, Glycine max
gagagagtgagtaatcgagaaagagaagaagcatatatatcaaaatggctgcagagatggagagggagtcattgataactgaagctcctaatgcaccagttactgcacagagaagggtcagaaatgacttagaaaattctctaccaaaaccatacttgccaagagcattgaaagctcctgatacgggtcacccaaatggaacagcaggccacaggcaccacaacttatctgttcttcagcagcattgtgctttttttg

SEQ ID NO: 135826 - DNA, 257 bp, Glycine max
gcttggaagaaaggctgtttaatggtcaagattgtgatgtctgggaatgcagcagtcaaaaggagtgattgggcctcattggtacaagtgtttttaacaaacagcaacagtacagagcattttgatgcatgtaagtggacaaaatcagaaccacattcctgggagttgatcttcccaatagaggtatgtggtcctaataatggttttgaaatgtggagttctgagtgggcaaatcaaacttcatggcatttgagttt

SEQ ID NO: 135827 - DNA, 258 bp, Glycine max
ccgagctagctagctagcaagcaagcacagagatggaggcaaagcgaggccatgctcctcatgtgcttggcacgtgtttcactcttcctctgcgctctaaccctatccgctgctcacggaagcaccacggttcaagacatcgcgagatagttgaaactcggggacaacgagcttctgcgcacggagaagaagttcaaggttttcatggagaattacgggaggagctactccacagaggaggagtatttgcgccgtttg

SEQ ID NO: 135828 - DNA, 248 bp, Glycine max
agaaaacctaagcttagaattagaaacaaagaaaagaagaaaggaaagaattgatcgttgaaaatgcagggaggaaagaaagcgggagagtccattaaggaaacagctacaaacattggtgcttctgccaaggctggcatggagaagaccaaggccactgtccaagagaaggcagaaagaatgacagcacgtgatccggtgcaaaaggagttggcaacccaaaagaaagaggcaaagatgaaccaggc

SEQ ID NO: 135829 - DNA, 254 bp, Glycine max
atctgattcaggctggggttgatgggttgagggttggaatggggtctgggtccatttgtactactcaggaggtttgtgctgtggggcgtggtcaggcaactgctgtttacaaggtctcgtccattgcttataaaagtggtgttcctgtgattgctgatggtggcatctcaaactctggtcatattgttaaggctttgtcattgggagcgtcaactgttatgatgggaagcttcttagctggtagtcttgaggct

SEQ ID NO: 135830 - DNA, 258 bp, Glycine max
aaagaagggaatgcaggaagtgctgaaaatggtgaaaagcaatgaacaagttgttcctggagccaaatattgtgtcacaggttccacagggtatatcggttcatggctagtggaggctcttcttgaaaggggatgcacggttcatgccactgttagagatcctgcaaagtcattgcaccttctgtctctgtggaagggtggtgaccaattgagatttttccaagcggatttgcatgaagaaggaagcttcgatgaggc

SEQ ID NO: 135831 - DNA, 258 bp, Glycine max
cacaaaagtgttccacttgagtgaaaagtagtgtgttaagaactaaacaatttttcaatggcgtccaagaaacaagaggagcgagctgaggcagctgcgaaagttgctgccaaagaactcgaacaagtcaacagagaaagaagagaccgtgatttcggtgttgttgctgaacaacaacaacaacatcatcaggaagatcaacaaaaacgtggtgtaatcgggtccatgtttaaggcggtgcaagacacctacgagaac

SEQ ID NO: 135832 - DNA, 255 bp, Glycine max
aggtggctcctgaggacaaggcgagtttatggtcacaacttcattatgtttcgtgtaataatctggaaatgcaagaagcttatcttgtcaatctcgtaaatgtgttacgagaattgtatttgcacagtccagaggaagctcgccaattgagaaggaaagctctctctcgtattgaatggctgcaaaaagctgatgtgcctaccatagcacagattgaagagtttcattcgatgcagaggatgatgaatgctcctg

SEQ ID NO: 135833 - DNA, 254 bp, Glycine max
cttccttacaatcaaaaccaacaacaactatggcaagttatcaaaagcactacgatgatcagggtcgcaaggttgacgagtatggcaacgttgagaagcaaaccgacgaatacggcaaccctgttcatgctgctagtgtcacctatgtagccaccagaactgctgctggtggttacagtgatgacattaataagcaacatgataccaccaatgcctacggcgtagacactggtagacagcattctagtggtggc

SEQ ID NO: 135834 - DNA, 253 bp, Glycine max
ccttcatctcttaaaagacaaacttctccactacgcactcatcgacctctccaaaaaacatggtcccttattctctctctactttggctccatgccaaccgttgttgcctccacaccagaattgttcaagctcttcctccaaacgcacgaggcaacttccttcaacacaaggttccaaacctcagccataagacgcctcacctatgatagctcagtggccatggttcccttcggaccttactggaagttcgtg

SEQ ID NO: 135835 - DNA, 250 bp, Glycine max
gcggacacgcgaactgatgtgtattcgaatcctaggagctagtaatcgacgatatgcttatattggtgacattgttgttgctgtaatcaaacaagcagtaccaaatacgaacttagaaagatcagaagtgatcagagctgtaattgtacgtacttgtaaagaactcaaacgtagcaacggtataataattcagtatgatgataatgctgcagttgtcattgatcaagaaggaaatccaaaaggaactcga

SEQ ID NO: 135836 - DNA, 256 bp, Glycine max
gaacactcatcaccatggccaagcttgttctttccctttgtttccttcttttcagtggctgcttcgctctgagagagcaggcacagcaaaatgagtgccagatccaaaagctgaatgccctcaaaccggataaccgtatagagtcggaaggtgggttcattgagacctggaaccctaacaacaagccattccagtgtgccggtgttgccctctctcgctgcacccttaaccgcaatgcccttcgtagaccttccta

SEQ ID NO: 135837 - DNA, 257 bp, Glycine max
gggcttcttgggcgttgtaattttaaagctgatatgcttgaccgaaaagtttcactattgagtggtggtgagaaggcacggctggccttttgcaaattcatggtaaagccatcaactatgcttgtgttggatgaaccaaccaatcacttggatataccttctaaagaaatgctcgaggaagcaataaatgaataccagggcactgttatcacagtatctcatgaccgatactttataaagcaaatagttaatagagt

SEQ ID NO: 135838 - DNA, 257 bp, Glycine max
ctagcttccaaaccctaacactcctcttcctcttcgatcatcacctctccacaatgccgccgaagttcgacccctcccagatagtcgacgtcttcgtccgcgttaccggcggcgaagtcggcgcggcgagttccctggccccgaagatcggtcccctcggtctctcccccaagaagatcggagaagacatcgccaaagaaaccgccaaggactggaagggcctccgcgtcaccgtcaagctcaccgttcagaatcgt

SEQ ID NO: 135839 - DNA, 257 bp, Glycine max
gttttaaatccacaaaatccttttgtgttaaataggtggatgggaaaactgactttcccccagggcacttcccgaagtgttaagagaatgcctctttctatagggggaggagctggtgcaaagaatgctattctcatgaatatgccaaatgctgttctttcaatgtggagatattttgttggagatctcgtctttgaagtttctaagatgacttctccctacattaaatgtacagtctctttcttcatagcatttgg

SEQ ID NO: 135840 - DNA, 255 bp, Glycine max
aagagagagaagaagaaaagaagaacaaagatgcaatcctcaaaggagaagatgaaaaacatggcaagtgctgccaaggaacaagtcgacatctataaagccaaaatagacgagaaggcagagaaagcaacggcaagaacagaagaggagagggtgatagcccatgagcacgcaaaggcaaaggaagctggagcaaagatggagctgcatgaagctaaagcaaggcatgcagcagagaagctaagcgccaaccaa

SEQ ID NO: 135841 - DNA, 255 bp, Glycine max
ctttgagatttttcagcaccccaccaaggttttgtccgaaaagcttgaatttttcgcctaccctttacaatgatctcttcattgagacaacctgttgtagggatcagtggttctgatcttcttttgaggcaaagacatgcaaccctaattaaggcaaggtcctttttaccctctttgtcaagagaaaagggtcaaagatctcttgtttcagttcaaaagccacttcacattgctgcttctcttggtgttggaaat

SEQ ID NO: 135842 - DNA, 255 bp, Glycine max
caaagaatcaaagaaaggggtggtggctgcttcgaaagcttaataatttgtttatttccagaacatcatagttttcgcagcagcaaactaacaaattactcatatcatataataagatggcccgttctctctcgcaagccaaacgtattggtgtccttgttgctcaatctatctccctaattcccgttcatcggcgaggttacgcagtggcatccgatgtatcggtaagagttggattgggtaatattgggcgaa

SEQ ID NO: 135843 - DNA, 252 bp, Glycine max
agcagtagccgagattccgtgagttgcaaaaatgaagacgattctttccaccgagaccatgaacatcccggacggcgtgagcatcaaagttcatgccaaggtcatcgaagttgagggcccccgcggaaaattggtgcgagacttcaagcatttgaatctcgattttcagctcattactgacgaaaacggtaaaagaaagctgaaaatcgacgcgtggtttggttctcggaaaacatccgccgccattcgcac

SEQ ID NO: 135844 - DNA, 252 bp, Glycine max
tgatgttgaaactcctaaaggttccatgttggatcttaaaatttctcagtctaaaattgcacttcccaaaaacacagttggaggaaccattctgcgtagtgatctattggcaaattttttgacagagggcaattttagagcaagtgttgatttgcagcgcactcatcgtattaaaggaatgattaaaatggtggccacagttggtattcctgagaatacaggtatagcattggcctgtgctatgaatagttc

SEQ ID NO: 135845 - DNA, 252 bp, Glycine max
ccacactacaacctgaacgcgaacagcataatatacgcattgaatggacgggcattgatacaagtggtgaattgcaacggtgagagagtgtttgatggagagctgcaagagggacgggtgctgatcgtgccacaaaactttgtggtggctgcaagatcacagagtgacaacttcgagtatgtgtcattcaagaccaatgatacacccatgatcggcactcttgcaggggcaaactcattgttgaacgcatta

SEQ ID NO: 135846 - DNA, 255 bp, Glycine max
gcaaaaatggcagcttctggggttcattctagcaagcaaatgaggaggttggaatcgaggaagtcacattcttggtggtgggatagtcacatcagccccaagaattctaagtggctttcagaaaaccttgaagagatggaccggagtgtgaagcgaatgttgaagctgatagaagaggatgcagattcatttgccaaaaaagctgaaatgtattatcagaagaggccagaattggttgctctggttgaggagttt

SEQ ID NO: 135847 - DNA, 252 bp, Glycine max
acaacttctgctacttcctactccaaccgcacttctgctccgcaattatcatgggcaaggtcaagatcggaatcaacggatttggaagaattggccgtttggtagccagagtggctctgcagagagacgatgttgaactcgttgccgttaacgaccctttcatcaccaccgattacatgacatacatgtttaaatacgacagtgttcatggacactggaagcatcacgatgtcaccgttaaggacgagaaga

SEQ ID NO: 135848 - DNA, 253 bp, Glycine max
agtatatcctagtgttgaagtcggacaatgtggcaacagtccttgatccaaacatactaaatcatttgatgataaatgatattgaatattgcatggaggtgacaccaagcaattcgtttaatttaatgttacccacaacgaaatttaagcttcgggagattggtggagaccaagataaacacttgaaggacaatttcaaactcatcgatacaacaaacatgtgggtgagtttaagagccatcaagaggtttgt

SEQ ID NO: 135849 - DNA, 253 bp, Glycine max
tgcagaccgagctagctagctagcaagcaagcacagagatggaggcaaagcgaggccatgccctcatgtgcttggcacgtgtttcactcttcctctgcgctctaaccctatccgctgctcacggaagcaccacggttcaagacatcgcgagatagttgaaactcggggacaacgagcttctgcgcacggagaagaagttcaaggttttcatggagaattacgggaggagctactccacagaggaggagtattt

SEQ ID NO: 135850 - DNA, 252 bp, Glycine max
cgaaagtgaaataccactacttttaacgttattttacttattccgtgaatcggaagctgggcactgcccctctttttggacccaaggtcggcttcggccggtcgatccgggcggaagacattgtcaggtggggagtttggctggggcggcacatctgttaaaagataacgcaggtgtcctaagatgagctcaacgagaacagaaatctcgtgtggaacaaaagggtaaaagctcgtttgattctgatttcca

SEQ ID NO: 135851 - DNA, 250 bp, Glycine max
acaaaacagagcaaagagagagtgtgtgaaaagtgaaacaaaaaacagaacaacaatggcgacacttaaggttcctcagcctcttccccccgttgcagatgattgtgagcagctccgaaaagccttctcaggttggggaactaacgaggagctgattgtatcgatcttggctcataggaatgctgctcagaggaagcttatcagagaaacttatgcccagacctatggagaagatctcctcaaggccttg

SEQ ID NO: 135852 - DNA, 248 bp, Glycine max
ggaaataattgatctttgaaaatgcagggaggaaagaaagctggagagtccatcaaggaaacagctgcaaacattggtgcttctgccaaggctggcatggagaaaaccaaggccactgtccaggagaaggcagaaagaatgacggcacgtgatccgatgcaaaaggagttggcaacccagaagaaagaggcaaagatgagccaggcagagctggacaagcaggcggcgcgtcagcataacacggcggc

SEQ ID NO: 135853 - DNA, 251 bp, Glycine max
atcagggtcgcaaggttgacgagtatggcaacgttgagaagcaaaccgacgaatacggcaaccctgttcatgctgctagtgtcacctatgtagccaccagaactgctgctggtggttacagtgatgacattaataagcaacatgataccaccaatgcctacggcgtagacactggtagacagcattctagtggtggctacgatggtgacactaataaacatcatggaactactggtggctataatgatgac

SEQ ID NO: 135854 - DNA, 252 bp, Glycine max
ctcacaatcagattgacccgcgaacttgtttattcatctaccgtcgggagggaggggatgaccacggcgccccgtgcgcccggcctcctcgtcctcgcgacaaacacaaaccccggcgcttcgtgcgccaaggaactcaaatctgttaagtgcgactcccgggggcccggagacggtgtcccgcgggagtcgtcacgacacaacatttacatacaatgactctcggcaacggatatctcggctcttgcatcg

SEQ ID NO: 135855 - DNA, 250 bp, Glycine max
tgcgaaagatttgccaaggatgttttcattaatcaagaacgaaagttgggggctcgaagacgatcagataccgtcctagtctcaaccataaacgatgccgaccagggatcagcggatgttgcttttaggactccgctggcaccttatgagaaatcaaagtctttgggttccggggggagtatggtcgcaaggctgaaacttaaaggaattgacggaagggcaccaccaggagtggagcctgcggcttaat

SEQ ID NO: 135856 - DNA, 252 bp, Glycine max
caaaaccaaaacagtaaagctaacttcaacacctttaattttctaaaagtaattcagcggctgaataccaagcggagaagatgagtcaggagcagccacggcgtcccaaaggccaaaaccccatcaaatacggcgacgtttttgtcgtctccggcgaccttgcacagaagcccgtcgcaccggaagatgctgccatgatgcaaagcgcggaaactcgagtgctcggacaaacccaacccggcggatcagctt

SEQ ID NO: 135857 - DNA, 252 bp, Glycine max
cttgcacgttggaaaaaggtggtggtactcagaaaccaataagagaagaagagagagagagtgaaagtgaaagatcagcgtgggaacagatttccaactacagtgatcaagccacacaaggtgtgaaggaaaagtacgagagagcaaagcaagcagcaagcgagacactgaacaccacaacacaaaccgcacaagagaaaagcgcacaggcaaagaatcttgcagcacaagcaaaggacgcaacgttagaga

SEQ ID NO: 135858 - DNA, 89 bp, Glycine max
gcggaaaacgatataataataacttggtccagagcatctaccattatacctacaatgattggccataccattgctatccacacaacata

SEQ ID NO: 135859 - DNA, 250 bp, Glycine max
aaaagaggaaaaaaaaaaaacgaaaatgctgagaatcgccgcaagcgcaaagagaattgttcaaacggcgtcgttggaggcgccaccgttggggattagggttctgccgcgtctctaccacgagagggtggtggaccactacgacaacccccgcaacgttggatccttcgacaagaacgaccccaccgtcggaacgggtcttgttggtgcacccgcgtgtggcgacgtcatgaagctccagattaaggtt

SEQ ID NO: 135860 - DNA, 250 bp, Glycine max
gtttccttgacaatctaattctgcaaaaatggcaagcaataaggagtctaagttcccagcacagagccagaaaactcagccaggaaaagaacatgtaatgaatccactcccacaagccacaaatcctgatcacaaggccgccaataaactccagggaaaggtggcgttggtgacaggaggtgactcaggaattggcagagcggtttgcctgtgtttcgcaaaagagggtgcaacgtggcctttacatacg

SEQ ID NO: 135861 - DNA, 246 bp, Glycine max
gaagcccaaaatgggaacaatggagagcttgaagttcttggtgtcttcaaagtacatcagagatcttgccactttagtggttgcttatggaatcagcatcaatcttgttgaggttacctggaagtctaagctcaaagctcagtttcctagtcccaacgagtactcttcttttatgggtgacttctcaactgcaactggaattgccacattcacaatgatgcttgtcagccaatttatatttgacaa

SEQ ID NO: 135862 - DNA, 244 bp, Glycine max
ggctgaagcacaactacgagaccagcatggcaaccctgtcccactcaccgatcaatacggtaatccggttatcttaactgacgagcgcggtaatcccgtccaactcactggtgtcgctaccaccgctaccggcacagcaggttctgggtttgggtcctatggtaccggtgcttacggtggtggtgcaagtgcaaccaccgttgcagatcttttggcaacccaaccaaggagtggcagggaggct

SEQ ID NO: 135863 - DNA, 245 bp, Glycine max
ctactacaagtacttccttacaatcaaaaccaacaacaactatggcaagttatcaaaagcactacgatgatcagggtcgcaaggttgacgagtatggcaacgttgagaagcaaaccgacgaatacggcaaccctgttcatgctgctagtgtcacctatgtagccaccagaactgctgctggtggttacagtgatgacattaataagcaacatgataccaccaatgcctacggcgtagacactggt

SEQ ID NO: 135864 - DNA, 251 bp, Glycine max
gaagggaagaaggttgagagcgcttccggggatacgaatttccaagctttgaagacttatgggcgtgaccttgttgaacaagcggggaagcttgaccctgttattggccgtgacgaagagattagaagggttgtgaggattctatcacggaggactaagaacaacccggttctcattggagaaccgggtgtgggaaaaactgcggttgtggaagggttggcacagaggatagtaagaggggatgttccaag

SEQ ID NO: 135865 - DNA, 245 bp, Glycine max
atttcatatataagaaaaaggaataatccgcccggttcaagatttatcttggataatgagtcggaccgcaccaccatcaatccatttttttctattgatttgagggaaaaaattcaacaatcacttagtaaaaatcatggaactattcgtatgttgttgaatagaaatgaaaaatgccgatctttgataattttgtcatcatcgaattgttttcaaatacgatcattcaaccatggaaaatatta

SEQ ID NO: 135866 - DNA, 242 bp, Glycine max
cacacaactactacaagtacttccttacaatcaaaaccaacaacaactatggcaagttatcaaaagcactacgatgatcagggtcgcaaggttgacgagtatggcaacgttgagaagcaaaccgacgaatacggcaaccctgttcatgctgctagtgtcacctatgtagccaccagaactgctgctggtggttacagtgatgacattaataagcaacatgataccaccaatgcctacggcgt

SEQ ID NO: 135867 - DNA, 239 bp, Glycine max
aaaacaaaaagtttacgttacaaatcgcataataaccgtcctaagtttattgagagaattttgcaagtgtgagaaacatggcatctcgtcaaaacaacaagcaagagcttgatgaaagagcaaggcaaggagagactgttgtcccgggtggaactggtggcaagagcctggaggctcagcaacaccttgctgaaggaaggagcaagggagggcaaacaaggaaggaacagctgggtaca

SEQ ID NO: 135868 - DNA, 239 bp, Glycine max
ggcagattcattagaagaaaatggcgggtggtggaaaggtttcgttcaaagtcacactcacctccgatccaaagttacccttcaaagtgtttagcgttccagaggcggcaccttttactgccgttctcaaattcgccgccgaagaattcaaagtcccgccccagaccagcgctatcatcaccaacgatggtgttggcataaatccccagcagagcgcaggcaatgtcttccttaagcat

SEQ ID NO: 135869 - DNA, 236 bp, Glycine max
gcacagagtgcagtatccaaggggcatgaaaatgccaccgctgagaatgggccatggataattacattagatgctcctagttttattgctgttatgcaacatgctcgcaaccgttctttgcgtgaagaaatctaccgtgcatatgtatcacgtgcatctagtggagatttggataatacaggaataattgatcaaattttaaagctaaggttggaaaaggccaagcttctaaacta

SEQ ID NO: 135870 - DNA, 236 bp, Glycine max
aatggctgaagcacaactacgagaccagcatggcaaccctgtcccactcaccgatcaatacggtaatccggttatcttaactgacgagcgcggtaatcccgtccaactcactggtgtcgctaccaccgctaccggcacagcaggttctgggtttgggtcctatggtaccggtgcttacggtggtggtgcaagtgcaaccaccgttgcagatcttttggcaacccaaccaaggagtg

SEQ ID NO: 135871 - DNA, 238 bp, Glycine max
atacaattctcctcatcgctcttctcttcatcgcccacacctgctgcgcctccaaatggcaacagcaccagcaagagagctgccgcgagcagctcaaggggatcaacctcaacccctgtgagcacatcatggagaagatccaagctggccgccgcggcgaggacggcagcgacgaagatcacattctcatcaggaccatgccgggaagaatcaactacatcaggaagaaggaaggaaa

SEQ ID NO: 135872 - DNA, 238 bp, Glycine max
caacatccaaatagtgtttgagttagtatcgttcttcagcgcttgttcttcgttcaacgtgtacctaatttacaccacggagctgttcccgacctgcgtgaggaactcggcgctgtcgatggcgaggctggcagtggtgctcggtggcacgttcagcccgttgctggtgagtgctgcaagagggaacaagtttatgtgttatggggtttttgggttggtgatagggtttagcggggtc

SEQ ID NO: 135873 - DNA, 239 bp, Glycine max
cttgaaaataggcttgagaagattttcagagaaatggataacttttatgaccaagtgattaaggagcatattgctgataactcttctgagaggtcaggagcagaacatgaagatgtagtcgatgtgcttcttcgagttcagaaggatccaaatcaagcaattgccatcactgatgaccaaatcaagggtgtactcgtggacatctttgtagcgggaactgacactgcttcggccacgat

SEQ ID NO: 135874 - DNA, 247 bp, Glycine max
aaacaatacaaaataattcctactactgaaactaacttacaaacttttctttttcgtctttttttttacttagttgatatagattcattacatatactccagtaatcttttaaaataaaaatgagtcttatgcgtcaagaatggtcgggatagctcagttggtagagcagaggactgaaaatcctcgtgtcaccagttcaaatctggttcctggcacatgattcatttgtctgaatatctatttaag

SEQ ID NO: 135875 - DNA, 245 bp, Glycine max
caaaacagtaaagctaacttcaacacctttaattttctaaaagtaattcagcggctgaataccaagcggagaagatgagtcaggagcagccacggcgtcccaaaggccaaaaccccatcaaatacggcgacgtttttgtcgtctccggcgaccttgcacagaagcccgtcgcaccggaagatgctgccatgatgcaaagcgcggaaactcgagtgctcggacaaacccaacccggcggacagctt

SEQ ID NO: 135876 - DNA, 235 bp, Glycine max
caacaactctgttggctgatgggtgtccatatttgtatgctatggtgcatgatagttcagtgtctacaataccaggtgattttgtcattggtgttaagttgacaaccataaacaatatgtgtgcatatgggctcaatcctggtatttcaggttctcgtcctttgggcaccattcctcagtctatttcacagcaaactgtttggaatcaaatggcaacagtgagaacaccattgaa

SEQ ID NO: 135877 - DNA, 235 bp, Glycine max
cgttatttccctaagcatggcgcataggttgctcagagatcacgaagccgacggttgggaacgctccgacttccccatcatctgcgaatcctgcctcggcgacagcccctatgttcgaatgacaagagctgagtatgacaaggagtgcaagatttgtacacggccattcactgtttttagatggagacctggtcgagatgcaagatataagaaaactgagatctgtcagacatgt

SEQ ID NO: 135878 - DNA, 235 bp, Glycine max
caggggcaaaattgaggctgaactcagcaagatctgtgacgggattttgaacctccttgagtccaacctcatcccatccgccgcatctcccgagagtaaagtgttttaccttaaaatgaagggtgattaccacaggtaccttgccgagttcaagactggggcagagaggaaagaggcagcagagagtactttgcttgcttacaaatctgctcaggatattgctcttgctgacttg

SEQ ID NO: 135879 - DNA, 233 bp, Glycine max
ctcgagccgctcgagccgattcggctcaggcggaggaaaagagactaacaaggattccgctagtaaaggcgagcgaaccgggaaaagcccaccatgaaaatcggtcgccctcggcgtccgaattgtagtctggagaagcgtcctcagtggcggaccgggcccaagtcccctggaagggggcgccagagagggtgagagccccgtcgtgcccggaccctgtcgcaccacgaggc

SEQ ID NO: 135880 - DNA, 239 bp, Glycine max
aaagctttctagctggtcataatatcaccattactgatggtattgacaaaactagtgcaactttgcaatttagaaagttagcagattgtgattttctcaagagaaactttaagcagatgtctaatgttttgtgggtggctcctgaagacaaggcgagtttatggtcacaacttcattatgtttctcgtaataatctggaaatgcaagaagcttatcttgtcaatctcgtaaatgtgtta

SEQ ID NO: 135881 - DNA, 239 bp, Glycine max
atcagtacccatttttgtactaagaagcatttgttacatttatgtaaccaaaggaaaatcaaaagtacgcaggaggtgaagctcggtggcgaaatcaacatgcaacgcagtgaaagcatgcgactaaaggagaagaaggtgaaggatttgatggttgacaagaagaggctagtggaggtgccgtacatggcgtccctggcccacacaatgactacactggtggcgaacaaggttgtggc

SEQ ID NO: 135882 - DNA, 243 bp, Glycine max
gaaaaaacgaaaatgctgagaatcgccgcaagcgcaaagagaattgttcaaacggcgtcgttggaggcgccaccgttggggattagggttctgccgcgtctctaccacgagagggtggtggaccactacgacaacccccgcaacgttggatccttcgacaagaacgaccccaccgtcggaacgggtcttgttggtgcacccgcgtgtggcgacgtcatgaagctccagattaaggttgacgac

SEQ ID NO: 135883 - DNA, 232 bp, Glycine max
ggccattgttcatcgtcttcgccaccctacagaagggaatgactatccgctggaggaaactgataagtttggaaaacagcaaactgggaagtttgttgtgttgcatctgcgttttgacaaagatatggcagctcattcagcctgtgattttggtgggggtaaagctgagaaacttgctctagcgaagtaccggcaggtgctttggcagggaagggtattgaactctcaattc

SEQ ID NO: 135884 - DNA, 230 bp, Glycine max
  unsure (1)..(230): unsure at all n locations
tncagcgattcggctcagaatctatgaccactaatccaatgggatgggatggatcagtgaatcctaaggtaaaaatgtttgaacaagcacaaaactgccttcttcctatgggaattacctctgaaaatgttgcacagcgctttggggtttcaaggaaggaacaagaccaggctgcagttgagtctcacaggcgagctgctgcagctactgctgctggtaaatttaaagat

SEQ ID NO: 135885 - DNA, 233 bp, Glycine max
acgattttcaggaggctaaagccaagacaacacaaactgcgaacaaggccatggaaactggtaaagatgggaaagaagccgcagagtcatggacagaatgggctaaagagaaactcactgaaggtcttggcttcaaacatgatcaagaatccaccactaagaaagtctctgactatgccggtgatgctgctcagaaatcaaaggactatgccggtgacactgctcagaaaacc

SEQ ID NO: 135886 - DNA, 234 bp, Glycine max
cagtttctcctcgttgttcttcgctttcctgttttcaatttcgattctttcgttaatttaataagatgtttgggagggcaccgaagaagagcgataatacgaggtactacgaaatcctcggcgtctccaagaacgcttcgcaggatgatctgaagaaggcttacaagaaagccgccattaagaatcaccccgacaagggcggtgatcccgagaagtttaaagagctggcgcaac

SEQ ID NO: 135887 - DNA, 234 bp, Glycine max
aagatcatacatagtagtgttggtgggttgcaaagatgcttgggggtcttctccataggggtcataagataaaagggacagtggtgttgatgcgcaagaatgtgttggacgtgaatagcgtaaccagcgttgggggaattattggtcaaggtctcgacttagttggctcaacactcgatactcttactgccttcttgggccgatccgtgtctctccagcttattagtgctacca

SEQ ID NO: 135888 - DNA, 238 bp, Glycine max
aaaacactcaagttaacttcaacacctttaattttctgaacgaaattcagccacagaatatcaaagggagcgaagatgagtcaggagcagccaaggcgcccccaaggccaagaccccatcaaatacggcgacgtttttgacgtctacggtgaccttgcacagatgcccattgcaccggaagatgctgccatgatgcaaagcgcggaagctcgagtactcggaaaaacccaacccggcg

SEQ ID NO: 135889 - DNA, 228 bp, Glycine max
ggattttcttgtgggtagggggtttctcctctctttctctgcagtttgatggatcgggaaggaggatccaacgccggatcttgctactactccgttctcgggattcgtagggatgcctccttctctgatattcgcactgcctaccgcaaactcgctatgaggtggcacccggacaagtgggctctgaatcccgcaaccgccggcgaagcaagcgccggtttcagcaaa

SEQ ID NO: 135890 - DNA, 227 bp, Glycine max
gtgactctggagtttatgacacagaaggacgttatgtgccagcaaatattgagaacatattcagtaagtatgctcgtacagtacctgacaagctcacacttggggagctctgggacttgacagagggaaaccgaaatgcttttgacatatttggctggcttgcagcaaaatttgaatggggggttctgtacattctggcaagggatgaggaaggtttcctgtctaaa

SEQ ID NO: 135891 - DNA, 229 bp, Glycine max
ggtgatgataacttaattagtgttcatgaatatgtcaagccttactttagtggttctaaattgaaaagctttctagctggtcataatatcaccattactgatggtattgacaaaactagtgcaactttgcaatttagaaagttagcagattgtgattttctcaagagaaactttaagcagatgtctaatgttttgtgggtggctcctgaagacaaggcgagtttatggt

SEQ ID NO: 135892 - DNA, 231 bp, Glycine max
attatgacatagggtcaacaataagagacaagattattccccatgctgtatcatggtttactggggaggccattcagggggatgagtttggagatctggaggatgacgaggatgatgaagatattgaagaggatgatgatgaagaggaggaggaagatgaagatgacgatgatgacgaagatgatgaggaagaaagcaagactaaaaagaagttggtgtcaatttatctgt

SEQ ID NO: 135893 - DNA, 141 bp, Glycine max
gtcaaatgagcaccttatttgtgttgcaaggacaaaccatggacactcgtgttggcaactccactttcaaaatcccaccagcttcactgtccatctttgacaccctcagtgtcatattttgggtcccagtgtatgacagga

SEQ ID NO: 135894 - DNA, 241 bp, Glycine max
cagttctgaagcagacatgatcaagaaaatgcgtgccagtattgctttgcagcctttggcagcagccttattcgctaattcacctttcaaggaaggggttccaaatggttatctcaccataagaagccatagggtgggtcagatggacaaaagtcgcgctggcatactcccctttgttttttatgacacttttgggtttgagaagtatgttgattacgctcttgatgtgccaatgttgttt

SEQ ID NO: 135895 - DNA, 239 bp, Glycine max
agctgatactgttggttgctgcacattaaaagtagagaatgtgacaagagaaccccccaacaaacttaagtttaacttccttggtaaagattctatcaagtacgaaaatacggttgaggttgagcttcctgtttataatgcaattttgaagttccaaaaagataaaaagcctggtgatgatcttttcgataagctggatacaagtaaactaaatgctcatcttaaggaactcatgcccg

SEQ ID NO: 135896 - DNA, 229 bp, Glycine max
cgtcgttagggtcttcttcggatcggtggaacttgaccctgccggcgtgaattccgacgctactcgtggcgccgaattgctatagcggtgacgaatatgaaggttttcgttaagactctcaaaggcactcacttcgaaatcgaagtgacgccgcaagacacggtttctgaagtgaaaaaaaatatagaaactgttcagggtgcagatgtctatcctgctgcacagcaaa

SEQ ID NO: 135897 - DNA, 228 bp, Glycine max
aattaggaggattcgatgaaaggacatcaattcaaatcctggattttcgaattgagagagatattgagagaaatcaagaattctcgctatttcttagattcatggacccaattcaattcagcgggatttttcattcatatttttttccatcaagatagttttataaaactcttggactcccgaatttggattatcctactttcacgcaattcacagggttcaacaagc

SEQ ID NO: 135898 - DNA, 228 bp, Glycine max
gtgagtttgttgttcctcactgacctcaccatggcgaccagagccaagctttctttagctatcttccttttctttcttttagccttgatttcaaacctagccttgggcaaacttaaagaaaccgaggtcgaagaagatcccgagctcgtaacatgcaaacaccagtgccaacagcaacggcaatacactgagagtgacaagcgaacatgcttgcaacaatgtgacagt

SEQ ID NO: 135899 - DNA, 228 bp, Glycine max
ggaaattttggggagatagcaacttaaagagtaaattttggggtcggtcaattcagcttgatcctgttggcattttgactttggaatttgatgatggtgaagtatgccagtggagtaaggttacaacatcaatatacaatctcatattgggaaagctgtattgtgatcattatggtacaatgcgtatacagggaaatcaagactactcatgtaaactgaaattcaagg

SEQ ID NO: 135900 - DNA, 228 bp, Glycine max
ctgatggtattgacaaaactagtgcaactttgcaatttagaaagttagcagattgtgattttctcaagagaaactttaagcagatgtctaatgttttgtgggtggctcctgaagacaaggcgagtttatggtcacaacttcattatgtttcgtgtaataatctggaaatgcaagaagcttatcttgtcaatctcgtaaatgtgttacgagaactgtatttgcacagtc

SEQ ID NO: 135901 - DNA, 230 bp, Glycine max
gtttgaaagagcaaatagtataaaaatatatccagattcatcaacatttaaacttctttataaggcttacactaaagccaaccagaaggagcttcttgataaattgctgaagcatatggataaagatggtattgtccctaataagaggttcttcttggatgctttgggtgctgttgcgtctttaccagcaaattcagaatctgctaatgctgcaactgattcaaaaacag

SEQ ID NO: 135902 - DNA, 231 bp, Glycine max
caaaacttccacttgagagaaaagtagtgtattaagactacaaattttcaatttttcaatggcgtcgaggcaacagaaagaggatcgagctgaggcagctgcgaaagttgctgcgaaagaactcgaacaactcaaccgagaaaaagaccgtgatttcagtgttggtgttgcagaccaacaccaacaagaagaacatcagttagatcaacaaaagcgtggtgtaatcggatc

SEQ ID NO: 135903 - DNA, 232 bp, Glycine max
ttcccggcaaacaaaaacaggtttttgtggtgttgaagatgttcaagaacacattccaatctggatttctttccattttatacagccttgggagtaaacctttgcagatatgggacaaagaagttgttgatggccacattaaacgactacaggatgaagacatacagtccaatgtactagaaataattggatcaaatattcagtccacatacattacttgcccagctgaccc

SEQ ID NO: 135904 - DNA, 232 bp, Glycine max
attaacctttctcattccccatctcctcaccttattcagccactgctaatttctagggttccgaaatggacgctggcggaaagatcaagaagggcgccggaggaagaaagggcggcggccctaagaagaagccggtttcaaggtccgtcaaggccggtctccaattccccgtcggaagaattggccgttatttgaagaaaggaaggtacgcccagcgtgtcggtaccggtgc

SEQ ID NO: 135905 - DNA, 231 bp, Glycine max
gtctttcttagctgatatggcggttgatcgctcccttacgaggtgctgtagcctcgtactgtggtcgtggatgttgctgaggatgatgatggcgcagggtgcagccgcgagggccaaccggaaggagtgggactcggtcataaagttaccggctgaaccggtcgatgctgactcggatcatgaagtgggaacacgatgggcggttcttgtggctggttcaaacggctatgg

SEQ ID NO: 135906 - DNA, 234 bp, Glycine max
gtcgagccgaatcggctcgagggttaacactcttcttcatcgtcgtcgcaatgggacgtgagatccgtgcgcacgtaagggagcaggctcggtcttcaagtcccacacgcaccaccgcaagggccctgcacgcttccggagcctggacttcggggagcgcaacggctacctcaagggcgtggtcaccgacgtcatccatgaccctggccgcggcgcgccgctcgccaaggtcgc

SEQ ID NO: 135907 - DNA, 231 bp, Glycine max
tcttgtttaaaaaacgtgttaccatgcatctaccatggaataaaagaaatatctcctaactgagctcttcttctcttgcggctagggttttagcgcacttcttctagatttaaggaagatgggtaaggaaaaggttcacatcagtattgtggtcattggccatgtcgactctgggaaatccactaccactggtcacctgatttacaagcttggaggcattgacaagcgtgt

SEQ ID NO: 135908 - DNA, 229 bp, Glycine max
ggccatataatttttttttatttgaaataatgtccgggatcatccacaagattgaggagaccctccatgtgggagggcacaagaaagaggagcacaaaggagaacaccatggtgagcacaaaggtgaacacaaaggagaacaccatggtgagcacaaaggtgaacacaaaggagaacaacaccatggggagcacaaggagggacttgtggataagatcaaggacaagat

SEQ ID NO: 135909 - DNA, 228 bp, Glycine max
aaaacactcaagttaacttcaacacctttaattttctgaacgaaattcagccacagaatatcaaagggagcgaagatgagtcaggagcagccaaggcgcccccaaggccaagaccccatcaaatacggcgacgtttttgacgtctacggtgaccttgcacagatgcccattgcaccggaagatgctgccatgatgcaaagcgcggaagctcgagtactcggaaaaacc

SEQ ID NO: 135910 - DNA, 227 bp, Glycine max
atcatgcttccccaccagctctctgccgaagacatggctctgcgccgccgccaccccaacggtggctccgtcaaccaccacctcctcctcggaggtggaggcttccaggttggagcctagagtggaggagagagatgggttctgggttttaaaggaagagtacaggggaggcatcagccctcaggagaaagtgaagcttgagaaagatcccatgaagcttttcatgg

SEQ ID NO: 135911 - DNA, 225 bp, Glycine max
gcccaagctctaagggacaacagcatggcagggtacatgtcaagcaagaagaccatggagatcaaccctgagaacccaatcatggaggagctcaggaagcgtgctgatgcagacaagaatgacaaatccgtgaaggaccttgttctgttgctgtttgagactgctcttctcacttctggtttcagccttgacgagcccaacacttttggaaacaggatccacaga

SEQ ID NO: 135912 - DNA, 227 bp, Glycine max
tgatagttcagtgtctacaataccaggtgattttgtcattggtgttaagttgacaaccataaacaatatgtgtgcatatgggctcaatcctggtatttcaggttctcgtcttttgggcaccattcctcagtctatttcacagcaaactgtttggaatcaaatggcaacagtgagaacaccattgaattttgattctagcaagcagagcttttgtcaattttctattg

SEQ ID NO: 135913 - DNA, 226 bp, Glycine max
atttgggttatgcttcaactccaacaagatcaatgcatatcctagcgtggaccttgtgatggacaagcccaatggtcctgtttggagaatctctggtgaggacttgatggtgcaggcacaacctggggtcacgtgtttgggtgttatgaatggaggaatgcaacctagagctgaaattaccttaggggcacgtcagttggaagagaacctggtggtgttcgatctt

SEQ ID NO: 135914 - DNA, 231 bp, Glycine max
  unsure (1)..(231): unsure at all n locations
tcttcatagttcagtgtgtcgtttaaaaatgtcgcagttgctggataaagccaagaacttcgtgtcggagaaggtaaatgatatggccaagccggagggangtgtcactgacgtggacttcaagcgcgtgagcaaagataatgtcgagtacttggccaaggtctctgttcgtaaccagtattcaacttccatacccatttgtgagatcaactactctttcaaaagcgcatc

SEQ ID NO: 135915 - DNA, 139 bp, Glycine max
tgcagaatcaattttctctctcaatcgtctttcatggctcgtaccaagcaaaccgctcgcaaatccaccggtgggaaggctcctaggaagcaactcgccaccaaggctgcaagaaaatctgcacctaccaccggtggag

SEQ ID NO: 135916 - DNA, 249 bp, Glycine max
cttcgatcgtgttcaagaggttcctcatgaagggcccatgtgcgatctgttgtggtctgatccagatgataggtgcggctggggaatttctcctcgtggtgctggatatacatttggccaggatatatccgaacaatttaatcactcaaacaagctcaagttaattgctagagctcatcagctggttatggatggatttaactgggctcatgaacaaaaggtggttaccatttttagtgcacctaacta

SEQ ID NO: 135917 - DNA, 149 bp, Glycine max
ggagaattacgggaggagctactccacagaggaggagtatttgcgccgtttggggattttcgcccagaacatggtcagagcggcggacatcaggcgctggaccccaccgccgtccacggcgtcacgcagttctccgatctcaccgagga

SEQ ID NO: 135918 - DNA, 247 bp, Glycine max
atcacacacaactactacaagtacttccttacaatcaaaaccaacaacaactatggcaagttatcaaaagcactacgatgatcagggtcgcaaggttgacgagtatggcaacgttgagaagcaaaccgacgaatacggcaaccctgttcatgctgctagtgtcacctatgtagccaccagaactgctgctggtggttacagtgatgacattaataagcaacatgataccaccaatgcctacggcgta

SEQ ID NO: 135919 - DNA, 249 bp, Glycine max
gggagattaatggttcggtgtcggatgagaggggtgatggactggtgtttggaagcactgaggctgccaataagttcctggaggatttggaattacatcaatcgcgtgatgctgagaggattgttactgactcggacgaagaagaggagtctgacgatgaaggagaaggcaaggagctgtttgatactgctacattggcagctcttttgaaagcggcatcgggtgcggaccaagatggcggcagcatca

SEQ ID NO: 135920 - DNA, 157 bp, Glycine max
gtacgcgagctacaagttcagatcttccttataaccaaaaccatcaacaactatggcaagttatcagaagcactacgatgatcagggtcgcaaggtcgacgagtatggcaatgttgagaggcaaactgacgaatatggcaacccggttcatgccact

SEQ ID NO: 135921 - DNA, 253 bp, Glycine max
ctcgaggttggttctctgtctagggtctattgttaaaaaatgtcgtcgcagttaagccaagaactttgtgaaatgatatggccaagaactttgcttgatacccatctgtgagatcaactactctttcaaaagcgcatccagggagatagcagcagggacaatagcagacccaggatcattgaaggcaaaggacaagacaatgggggatgtggctgcatgttaaggtgccatagagcatattgatgagcttggc

SEQ ID NO: 135922 - DNA, 246 bp, Glycine max
gcaaaaagaaagaatcccaggcgaggagaaagatggaggggaaggagcaggatgtgtcgttgggagcgaacaagttccccgagagacagccgattgggacggcggcgcagagccaagacgacggcaaggactaccaggagccggcgccggcgccgctggttgacccgacggagtttacgtcatggtcgttttacagagcagggatagcagagtttgtggccacttttctgtttctctacatcaccg

SEQ ID NO: 135923 - DNA, 247 bp, Glycine max
agcaaaccgacgaatacggcaaccctgttcatgctgctagtgtcacctatgtagccaccagaactgctgctggtggttacagtgatgacattaataagcaacatgataccaccaatgcctacggcgtagacactggtagacagcattctagtggtggctacgatggtgacactaataaacatcatggaactactggtggctataatgatgacaccaatagacatcatggaactaccggtgtctatgg

SEQ ID NO: 135924 - DNA, 248 bp, Glycine max
cacacaactactacaagtacttccttacaatcaaaaccaacaacaactatggcaagttatcaaaagcactacgatgatcagggtcgcaaggttgacgagtatggcaacgttgagaagcaaaccgacgaatacggcaaccctgttcatgctgctagtgtcacctatgtagccaccagaactgctgctggtggttacagtgatgacattaataagcaacatgataccaccaatgcctacggcgtagacac

SEQ ID NO: 135925 - DNA, 246 bp, Glycine max
gtaaaatatccacaacaattggggcgtctgctaatcttgtgttcgcatataatacaggaatgcttcctgagatacaggcgacaatcaggcagccagtagtcaagaacatgatgaaagccctgtattttcagtttactgttggagttctgccattatatctggtaacctttgcaggatactgggcttatggatcttcaacagctacctatttgatgagtgatgtcaatggtccagtttgggctaagg

SEQ ID NO: 135926 - DNA, 249 bp, Glycine max
catggctagggttttggctcagtctgttaatgtccctggtctagtggctgagcataggcatggtcagcaaaacgggatcaggaaaattaaaaagatcgaccaaaatgatgagtgctttacggacaaatggattaagaatgtcaggtttctcagggcttcgtactttcaatcctttggatactatgttgagacctggcatagattttcattctaaggtatccattgcaacgtcttcgcggcaagcaagag

SEQ ID NO: 135927 - DNA, 244 bp, Glycine max
gacgcgcatgaatggattaacgagattcccactgtccctgtctactatccagcgaaaccacagccaagggaacgggcttggcggaatcagcggggaaagaagaccctgttgagcttgactctagtccgactttgtgaaatgacttgagaggtgtaggataagtgggagctggaaacagcgaaagtgaaataccactacttttaacgttattttacttattccgtgaatcggaagcggggcactg

SEQ ID NO: 135928 - DNA, 246 bp, Glycine max
ggaaagagcaacatcagcatgatgagaacaaacccggtgtgatagggtccatgtttagagccgccaaggaagccgtggttgggaagcctcaccacgaggaagtttatgcaaaggaaacaaagatgggtgaatattcagattatgcgactcagaaggcgagggaaacgaagcagaaggctggggagtatacagactatgcggctcagaaagcaaaagaaaccaaagactatgctgctgagaaggcta

SEQ ID NO: 135929 - DNA, 247 bp, Glycine max
tgcggatgaggcgccactcgatgtttccatttgcctgcatgcctttggtattgtggggtgtggttcgtttagtggtgtcaagtcttgcgaacgtgagggtgcatgagtggtaatcgggatgtttttgttgcacggctccatgcttgcgcatgcaacgtgtgacatgcatccttttcattgtcaccttagccttcgtggcttaggtgctgacgattggttcctgtgttgcctacctaccaaacggtat

SEQ ID NO: 135930 - DNA, 134 bp, Glycine max
agaaaatcggaaagtccacgcgccgccccggctcgtcctccaaggcccgcgtctacgccgatgtcaacgtcgttcgccccaaggaatattgggactacgagtccctcaacgtccagtggggggagcaagatgat

SEQ ID NO: 135931 - DNA, 244 bp, Glycine max
agaagaacctgttttcggaactaaccgacgacatcgttctgaacatcttctacaaactcgaagacgatcctcgccactgggctcgcttagcctgtgtctgcaccaaattctcttccctcgttagggatttctgttggaagaccaaatgctccctcaccatcccccaagacctcctctccgccgccgcctccgacccccctctctccctccacaaactctccttctgctgccccggcctccgcca

SEQ ID NO: 135932 - DNA, 245 bp, Glycine max
ttttgttgagaagagagaatggctgtggcgtcgtcatcatcccttatcacgttgaaggtgaaaccttgcattttcgggtctcctcggagatccgcggtggttcggaattgtgcgaagtcaacggcggggacaatatcgatcagttggagcctggacagctggagggcgaagaaggcgcttcagcttccggagtacccagatgcgaatgaattggacctagtcctccaaaccctctcttcttttcc

SEQ ID NO: 135933 - DNA, 244 bp, Glycine max
gaaagataaagcattccatagcctcccataaaaatgaagaatactatcttctctgctctctttctactttgtgccttcaccacctcatacctaccttcaaccaccgcggtggtcgataccgacggtgatattcttcagaatcctggcacatactttatcttgtccgtttttcgacccggcggcggagtagaattcgccgccactggaaacgaaacttgccctctcactgtcgtgcagactctct

SEQ ID NO: 135934 - DNA, 248 bp, Glycine max
acaaaacttccacttgagagaaaagtagtgtattaagactacaaattttcaatttttcaatggcgtcgaggcaacaaaaagaggatcgagctgaggcagctgcgaaagttgctgcgaaagaactcgaacaactcaaccgagaaaaagaccgtgatttcagtgttggtgttgcagaccaacaccaacaagaagaacatcagttagatcaacaaaagcgtggtgtaatcggatccatgttcaaggcggtg

SEQ ID NO: 135935 - DNA, 240 bp, Glycine max
gctctacactggcgtcaatggcggcttcccgtcatcgaataatgccgccggcggtattgcgccgccgttggaggtggacgggctgccggagaattttgattggagagagaaaggagctgtcaccgacgttaagttacagggtagatgtggatcatgctgggctttcagcaccacaggatctatagaaggagccaattttcttgccaccggaaagctcgtcagtcttagtgaacaacagct

SEQ ID NO: 135936 - DNA, 241 bp, Glycine max
gaagacattccaaaccatggaagcatccactttgtttgcaattcgtggatttacaatgccaaactcttcaaaagtgaccgcattttctttgccaaccagacatatcttccaagtgagacaccagctccactagtcaaatatagagaagaagagttgcataatttaagaggagatggaactggagaacgcaaagagtgggaaaggatctatgattatgatgtctacaatgatttaggtgatc

SEQ ID NO: 135937 - DNA, 240 bp, Glycine max
gtggcagaagacacttgaaaggattatgttcaagtatgtggagctttgcgtcgacatgcgaaaaggccgttttgcaaaagatggtcttattcagtatagaattatatgtcaacaagtgaacgttagttcactggaggaggtcataaagcattttatgcagctttctaccgagaaagctgaacaagcccgtagccaggcgcaggcactagaagaagcccttgatgttgatgatttagaggc

SEQ ID NO: 135938 - DNA, 239 bp, Glycine max
cctgccagtagtcatatgcttgtctcaaagattaagccatgcatgtgtaagtatgaactaattcagactgtgaaactgcgaatggctcattaaatcagttatagtttgtttgatggtatctactactcggataaccgtagtaattctagagctaatacgtgcaacaaaccccgacttctggaagggatgcatttattagatagaaggtcaacacaggctctgcctgttgctttgatgat

SEQ ID NO: 135939 - DNA, 240 bp, Glycine max
agaagactaaggactatgcaagtgatgcaactgatgctgcaaaaaagactaaagattatgctgctcagaagaccaaggattatgcaagtgatgcaactgatgctgcaaaaaagactaaggattatgctgcgcagaagaccaaggactatgccagtggtggtgcgcagaagaccaaggactatgccagtggtgctgcgcagaagaccaaggactatgcaagtgatgctgcgcagaggacca

SEQ ID NO: 135940 - DNA, 240 bp, Glycine max
agctaacttcaacacctttaattttctaaaagtaattcagcggctgaataccaagcggagaagatgagtcaggagcagccacggcgtcccaaaggccaaaaccccatcaaatacggcgacgtttttgtcgtctccggcgaccttgcacagaagcccgtcgcaccggaagatgctgccatgatgcaaagcgcggaaactcgagtgctcggacaaacccaacccggcggagcagcttccgtc

SEQ ID NO: 135941 - DNA, 245 bp, Glycine max
cagcaatcaacacgtgaggttacactgtctggctttaggtctgggaaattcatgacattagttgccacaaatgtggcagctcgaggtcttgatattaatgatgttcagttaattatacagtgtgaacccccacgggatgtagaagcctatatccatcgttctggacgcacaggaagagcaggtaatactggggttgctgttatgctttatgacccaaaaagatcgaacatatctagaatagagag

SEQ ID NO: 135942 - DNA, 237 bp, Glycine max
ggaaatcaggacaaagggtaattggagagcccgttgcctctgggttagcccttgatgaatcttggctttggcatcctgactttgagactgctgcaaagtatgtcatgagtccccctattaggaaacgaggacatgataaggcccttcaagctgccctttcaacaggagttttgcagctggtaggaactgatcattgtgcctttaattccacccagaaagctcttggaattgatgact

SEQ ID NO: 135943 - DNA, 238 bp, Glycine max
caactactacaagtacttccttacaatcaaaaccaacaacaactatggcaagttatcaaaagcactacgatgatcagggtcgcaaggttgacgagtatggcaacgttgagaagcaaaccgacgaatacggcaaccctgttcatgctgctagtgtcacctatgtagccaccagaactgctgctggtggttacagtgatgacattaataagcaacatgataccaccaatgcctacggcgt

SEQ ID NO: 135944 - DNA, 129 bp, Glycine max
atttaatgaaattaaatatttaaattaataaaattagtcgtgttttattcgattttttgaattggtttttttttacagtagctaatgctagtcaccgaacttagtcaatgagctagaatgggttataaa

SEQ ID NO: 135945 - DNA, 137 bp, Glycine max
ctccggaaaaggtttttgagtactttgcatctgatcgtagttcagaaggagaagttttgatgaaaccagcagacctaatgcgagcagtggttcctgttttccctccttctgaatcccaccttgttagagatggatac

SEQ ID NO: 135946 - DNA, 239 bp, Glycine max
agaaaacctaagcttagaattagaaacaaagaaaagaagaaaggaaagaattgatcgttgaaaatgcagggaggaaagaaagcgggagagtccattaaggaaacagctacaaacattggtgcttctgccaaggctggcatggagaagaccaaggccactgtccaagagaaggcagaaagaatgacagcacgtgatccggtgcaaaaggagttggcaacccaaaagaaagaggcaaagat

SEQ ID NO: 135947 - DNA, 239 bp, Glycine max
tgagaaacaaagaaaggaaataattgatctttgaaaatgcagggaggaaagaaagctggagagtccatcaaggaaacagctgcaaacattggtgcttctgccaaggctggcatggagaaaaccaaggccactgtccaggagaaggcagaaagaatgacggcacgtgatccgatgcaaaaggagttggcaacccagaagaaagaggcaaagatgagccaggcagagctggacaagcaggc

SEQ ID NO: 135948 - DNA, 237 bp, Glycine max
gcggggctaccgctgagtttaagcatatcaataagcggaggaaaagaaactaacaaggattcccttagtaacggcgagcgaaccgggaaaagcccaccatgaaaatcggtcgccctcggcgtccgaattgtagtctggagaagcgtcctcagtggcggaccgggcccaagtcccctggaagggggcgccagagagggtgagagccccgtcgtgcccggaccctgtcgcaccacgagg

SEQ ID NO: 135949 - DNA, 242 bp, Glycine max
gttaccatttgctcccagtacagagcttaaccgagcttcacaaagatgaatcgggaaaagttgatgaagatggccggttcggttagaactgggggaaagggtaccatgagaagaaagaagaaggctgtccacaagacaacaacaacagatgacaaaaggcttcagagcaccctgaagagaataggggtgaatgccatcccggctattgaggaggtcaatatctttaaggatgacgtagttat

SEQ ID NO: 135950 - DNA, 232 bp, Glycine max
gccggagaatgcaaaagtgaatgaagtgaaggcttctatggaaaatggggttcttactgttactgttcctaagaaagaggttaagaatcatgatgttaaggccatagaaatctctggttaagcagaagcaaatgttgttggtcttttttgtttgaagtcgtgtgcttttctttgttctaatatgatgtgagtgggagttgtgattgtacaaacaaataaaatagttgtataa

SEQ ID NO: 135951 - DNA, 235 bp, Glycine max
gtgataaatcagattgttggatctgctccagggtttcctcatggagtaattgaccccattgaaataatttggcaatttcttccgtaggaacttggtcatctggcatcaagctttggtatttgtttccatgtggacctttgccttggtggctttgtattaccatttgctcgtgagcttgggtaccacattccaccttttgatttttctgttaaaggggtttcttcaatatcagtgg

SEQ ID NO: 135952 - DNA, 236 bp, Glycine max
gcaaaggattctacccgccgctcgatgggaattgcgcttcaaggcgtctcgtagggctaatccgcctcacgagggtcaccaacggcacgtgcctttggggggccgaggccccctactgctggtcggcaaacggacggcgggcgcacgcgtcgcttctagcccggattctgacttagaggcgttcagtcataatccaacgcacggtagcttcgcgccactggcttttgaaccaagcg

SEQ ID NO: 135953 - DNA, 238 bp, Glycine max
aggccccctactgctggtcggcaaacggacggcgggcgcacgcgtcgcttctagcccggattctgacttagaggcgttcagtcataatccaacgcacggtagcttcgcgccactggcttttcaaccaagcgcgatgaccaattgtgcgaatcaacggttcctctcgtactaggttgaattactattgcgacactgtcatcagtagggtaaaactaacctgtctcacgacggtctaaac

SEQ ID NO: 135954 - DNA, 127 bp, Glycine max
cagcttctctctgactccttccgttacaaggaaattgagaatggaatgctgtgggaagttgaggggaagtgggttgttaaaggagcagttgatgtagacattggtgcaaacccttctgctgagggtg

SEQ ID NO: 135955 - DNA, 233 bp, Glycine max
gcaaaatcactttgtcctggtgcatggtataggccatggtgcctggtgttggtacaagcttaagccactgttggaatccgccggccacaaagtcacagtccttgaccttgcagcttctggcatcgacacacacgacattgaagacatccacacattttctgagtattctaagcctttgttggatctcttggcgtcgcttgctcctaatgaaaaagtggtccttgtcgggcata

SEQ ID NO: 135956 - DNA, 232 bp, Glycine max
atttttatttttgtttatctttctcactttctctcttccgcttttgcttctgcttctgctttgtatctctgtaacatactttgcttaatatggcggctgagaagtcaaacattgcaaaagatgtgactgaattaattggcaaaactccattggtatatctcaaccacatcgtggatggttgtgttgccaaagttgctgccaagcttgaaatgatggaaccttgctccagtgt

SEQ ID NO: 135957 - DNA, 239 bp, Glycine max
gcagttctccgatctcaccgaggacgagtttgagaagctctacactggcgtcaatggcggcttcccgtcatcgaataatgccgccggcggtattgcgccgccgttggaggtggacgggctgccggagaattttgattggagagagaaaggagctgtcaccgaagttaagttacagggtagatgtggatcatgctgggctttcagcaccacaggatctatagaaggagccaattttcttg

SEQ ID NO: 135958 - DNA, 233 bp, Glycine max
cattggtccttaaacactcatcagtcatcaccatggccaagctagttttttccctttgttttctgcttttcagtggctgctgcttcgctttcagttccagagagcagcctcagcaaaacgagtgccagatccaaaaactcaatgccctcaaaccggataaccgtatagagtcagaaggagggctcattgagacatggaaccctaacaacaagccattccagtgtgccggtgtt

SEQ ID NO: 135959 - DNA, 235 bp, Glycine max
actactacaagtacttccttacaatcaaaaccaacaacaactatggcaagttatcaaaagcactacgatgatcagggtcgcaaggttgacgagtatggcaacgttgagaagcaaaccgacgaatacggcaaccctgttcatgctgctagtgtcacctatgtagccaccagaactgctgctggtggttacagtgatgacattaataagcaacatgataccaccaatgcctacggcg

SEQ ID NO: 135960 - DNA, 258 bp, Glycine max
cacacaactactacaagtacttccttacaatcaaaaccaacaacaactatggcaagttatcaaaagcactacgatgatcagggtcgcaaggttgacgagtatggcaacgttgagaagcaaaccgacgaatacggcaaccctgttcatgctgctagtgtcacctatgtagccaccagaactgctgctggtggttacagtgatgacattaataagcaacatgataccaccaatgcctacggcgtagacactggtagacag

SEQ ID NO: 135961 - DNA, 256 bp, Glycine max
gcagaaatggcattgatgagaccatttgcacaatgagacttcgccaaaacattggtcagaattcatcacctgacatctacaaccctcaagctggtagcatcacaaccgccaccagccttgacttcccagccctctggcttctcaaactcagtgcccagtatggatcactccgcaagaatgctatgttcgtgccacactacaccctgaacgcgaacagcataatatacgcattgaatgggcgggcattggtacaagt

SEQ ID NO: 135962 - DNA, 256 bp, Glycine max
gtaccatcacacgttgcacttcccactaccctttttaccacatgtcctccctcatgcaaaccccacctcttccaaaccgccaacgttaacccttcccttctcctttttaatcacacttccattcccatgcacaccccacacacatcctactaaaaaacattgcccttgttctttcaaagttaccaaacacaagtacacaacacaacagcaacatatggcgtctgaacaattggctcgcagagagaacaccaccacc

SEQ ID NO: 135963 - DNA, 252 bp, Glycine max
gcttcatcggctccgagccgaagccgagcaacgttcgcttcgccaccatccccaacgttatccctttccaatcttagatagcctccgatatccccgctttcttcaaagccgtcgtcaccaacatggaacctcccttcgaccacctcctccgccgccttcaccctcccgtcaccgccctcgtcgccgacgtcgagcttcacttccctgtcgccgtcgcccgccgcagtaatattccggtcgcgctgctttgga

SEQ ID NO: 135964 - DNA, 252 bp, Glycine max
gcgcgacaagaagcggcggcgttacccaaaccttgggcttcaagccgtaccgtcacctgaaaactctaaccgaccatgaaaacgcggtgtcgtgcgtgaagttctcgaacgatggaaccctcctagcctcggcctccctggacaaaaccctaatcatatggtcctccgccaccctcaccctctgccaccgcctcgtgggccactccgagggcatctccgacctagcctggtcctccgactcccactacatct

SEQ ID NO: 135965 - DNA, 256 bp, Glycine max
gatgaattccatgcaaacggcgtcatcccaaggggagccaatgcttctttcattactttaattcctaaagtgtccgaccctcattgcctcaatgatttcagacctatcttgctcataggttgcgtttacaagatagtggctaagttactagccaacagagtgaagagggtaatgccatctattatagacgaatgccaatccgctttcatagctggaagacacctcttgcacagcgtagtcatcaccaatgtagtgg

SEQ ID NO: 135966 - DNA, 262 bp, Glycine max
gaaaaacatggcaagtgctgccaaggaacaagtcgacatctataaagccaaaatagacgagaaggcagagaaagcaacggcaagaacagaagaggagagggtgatagcccatgagcacgcaaaggcaaaggaagctggagcaaagatggagctgcatgaagctaaagcaaggcatgcagcagagaagctaagcgccaaccaatcacattatggtctccaccatggccacaacaaccctcccttagtaggaacaactcagact

SEQ ID NO: 135967 - DNA, 253 bp, Glycine max
cacacaactactacaagtacttccttacaatcaaaaccaacaacaactatggcaagttatcaaaagcactacgatgatcagggtcgcaaggttgacgagtatggcaacgttgagaagcaaaccgacgaatacggcaaccctgttcatgctgctagtgtcacctatgtagccaccagaactgctgctggtggttacagtgatgacattaataagcaacatgataccaccaatgcctacggcgtagacactggta

SEQ ID NO: 135968 - DNA, 250 bp, Glycine max
ctcgagccgcgtctataccgtaaaattgattttcgacggaatgaaaaaaacatatatggtagaatcgtaaccatagaatatgaccctaatcgaaatgcatacatttgtctcatacactatggggatggtgagaaaaaatatattttacaccccagaggggctataattggagataccattgtttttggtacagaagttcctataaaaatgggaaatgccctacctttgaccgatatgcccttaggcacgg

SEQ ID NO: 135969 - DNA, 252 bp, Glycine max
agcggaggaggttgtcttctgccgccggttccgccgccgcaagcgaaggcggcggtgaagacggattacatgtacttcgacccgtcggattcaatcccgaagctgcacacggactcgagctgttcggagcacgtggtatcgccggaattcgcgagcgaggtgcagagcgagccaaagtggaaggagtgggagaaaagcctcgagtttccgtttaattacgtggatgccactctgaacaacagcaacagcttc

SEQ ID NO: 135970 - DNA, 252 bp, Glycine max
cacaactacaagaaagaacttccttataaccaaaaccaacaacaactatggcaagttatcagaagcactacgatgatcagggtcgcaaggtcgacgagtatggcaatgttgagaggcaaactgacgaatatggcaacccggttcatgccactagtgtcacttatgtagccaccaaaagtgttggtggctacaatgatgacgctaataagcaacatgatattactggtgtctatcccgagaaagacaccggta

SEQ ID NO: 135971 - DNA, 253 bp, Glycine max
cacgatactgataagagagataccaacaagaaaagaaaaaaagaagagttgagattccctttgaagaaaagatggcatcccataggcaaagctatgaagctggtcaaactaagggccgaactgagaaaatgagtaaccttccttatgttttaggaaaagacgaaccagacgatgggcaatattggagagaaggctcaagctgcaaaggagaagacccaggaaatggcccaagctgcaaaggagaagacccaac

SEQ ID NO: 135972 - DNA, 255 bp, Glycine max
acaaaatctagcactctcttcagccttgttgctccttttggtcggttttgcaacctcagacatcaatcaagacaaagcagaatgtacggataaacttcttggtctagctggttgtctttcctatgttggtggcgaagcaaagtccccaccatggattgttgctctggtatcaaagaggttattaacaagagcaagaggtgcctctgcatcctcatcaaggatcgtgatgatcctagtcttggcctcaagatcaac

SEQ ID NO: 135973 - DNA, 262 bp, Glycine max
aaaaccaaaacagtaaagctaacttcaacacctttaattttctaaaagtaattcagcggctgaataccaagcggagaagatgagtcaggagcagccacggcgtcccaaaggccaaaaccccatcaaatacggcgacgtttttgtcgtctccggcgaccttgcacagaagcccgtcgcaccggaagatgctgccatgatgcaaagcgcggaaactcgagtgctcggacaaacccaacccggcggagcagcttccgtcatgcaa

SEQ ID NO: 135974 - DNA, 112 bp, Glycine max
ggtaccaaagctagggaaagaggctgcagtagaggccataaaggagtggggccagccaaagtcaaagattacccacttgatcttctgcaccactagcggtgtggacatgcct

SEQ ID NO: 135975 - DNA, 258 bp, Glycine max
gtaaagatgggaaagaagccgcagagtcatggacagaatgggctaaagagaaactcactgaaggtcttggcttcaaacatgatcaagaatccaccactaagaaagtctctgactatgccggtgatgctgctcagaaatcaaaggactatgccggtgacactgctcagaaaaccaaggactatgccggtgacactgctcagaaaaccaaggactatgccggtgacactgcacagacatcaaaggactatgccggtgatg

SEQ ID NO: 135976 - DNA, 252 bp, Glycine max
ctccaaagagtttgcctatggatacatcggtttatcgacaagcaattttacattcaaaatctggacttggcagtgcaggattaaatcaaggagttacaggtcttccgttgaagggttggcctctagcatctggaattgatcaactaagacctaatttgggtgtccaaattccgaagcccaatttgacagcccagaatcaatttgttttggcatcacaacagcaacaggtcttggcacaggctcaggcacaaa

SEQ ID NO: 135977 - DNA, 249 bp, Glycine max
ctccgcaccagtttcaccgcacgaatatcttgttgtttggagcgatccgagaaaaactctgtaaacatgttggtttaccaggacctccttacaggtgatgagcttctctctgactccttccgttacaaggaaattgagaatggaatgctgtgggaagttgaggggaagtgggttgttaaaggagcagttgatgtagacattggtgcaaacccttctgctgagggtggaggagaagatgagggagttgat

SEQ ID NO: 135978 - DNA, 250 bp, Glycine max
gtacttccttacaatcaaaaccaacaacaactatggcaagttatcaaaagcactacgatgatcagggtcgcaaggttgacgagtatggcaacgttgagaagcaaaccgacgaatacggcaaccctgttcatgctgctagtgtcacctatgtagccaccagaactgctgctggtggttacagtgatgacattaataagcaacatgataccaccaatgcctacggcgtagacactggtagacagcattctag

SEQ ID NO: 135979 - DNA, 255 bp, Glycine max
gtgcaatggacatcggaacctatggctatcctacaccagcagtgaaaaagattgagtcttactatgatgtgccagagggagtggatattcggggaagatatgatgcagagtttgcaaaaatcctcacaaaagatgctttgaaattcgttgctgacttgcaacgtgagttcaggaaccatatcaagtatgcattagagtgcagaagagaagcaaagaagaagtacaatgaaggggctcttccagagtttgatcctg

SEQ ID NO: 135980 - DNA, 260 bp, Glycine max
cacaactacaagaaagaacttccttataaccaaaaccaacaacaactatggcaagttatcagaagcactacgatgatcagggtcgcaaggtcgacgagtatggcaatgttgagaggcaaactgacgaatatggcaacccggttcatgccactagtgtcacttatgtagccaccaaaagtgttggtggctacaatgatgacgctaataagcaacatgatattactggtgtctatcccgagaaagacaccggtagacatcat

SEQ ID NO: 135981 - DNA, 246 bp, Glycine max
gcagatattttcgccgagtggaaccgaggggaacttgagaccttcttaattgaaattaccgcagatatttttaaagtgaaggatgaagatggtgaagggtttttggtggataagattttggataagaccgggatgaaggggaccgggaaatggacggtgcagcaggcggcggactttcgatagcggcgcccacgattgcggcttcgttggattgccggtacttgagtgggttgaaggaggagaggg

SEQ ID NO: 135982 - DNA, 255 bp, Glycine max
cgatgatcagggtcgcaaggttgacgagtatggcaacgttgagaagcaaaccgacgaatacggcaaccctgttcatgctgctagtgtcacctatgtagccaccagaactgctgctggtggttacagtgatgacattaataagcaacatgataccaccaatgcctacggcgtagacactggtagacagcattctagtggtggctacgatggtgacactaataaacatcatggaactactggtggctataatgatga

SEQ ID NO: 135983 - DNA, 244 bp, Glycine max
tttgactttaattataaatttactgacaaaatgaggagaatcaagattcctcttcctcccgtggatgattagatacaagtaattgaggatgttgacaaggacagaagatatgctattgatgcctcaattgtgcgtattatgaagagtagaaaagttttgggctaccaacaattagtcgttgagtgtgttgagcagttaggtcgcatgtttaagcctgacgtcaaggctattaaaaagcggattg

SEQ ID NO: 135984 - DNA, 247 bp, Glycine max
ctcgagccgggggctttgtctgtcaaactaacaccagaagatatggcggaacttgagtcccttgctgctctagatgctgtcaagggtgatagatatgcggatgatggtttatctacgtggaaggactctgaaactccaccactttcttcttggaaagctgcatgatgaagtgcattgcttaatgcttatacatgtgatccttaaatatttgatggtgctactttaagaaacagattagtccgaggga

SEQ ID NO: 135985 - DNA, 247 bp, Glycine max
ggtggataagcctgcggctagtcgttctgaatcagctgagatatatgttttggggcttaaatataaggcccctgccaaaattgatccgcggcttcttgatgtgaagcatctctttcagggatctgtggaaccgcagcctaatgtggtggatgtacttagagatagtaagcaaaaaatgcaccgtgatggctatgaagatggagacacaactttgaggaagctgtcttcagctgcaaatttcatttgg

SEQ ID NO: 135986 - DNA, 249 bp, Glycine max
gtgagaacaagaaaaagaggcgcaagatgagtggtagggtttctgggaaggtgaagtggttcaatgatcagaaggggtttggattcataagccctgacgatggcagcgacgatctcttcgttcaccaatctcagatcaaatctgacggtttccgaagcctcgccgaaggagagtccgttgagttcgccattgaatctgaatctgacggacgcgcgaaggctgttgatgtcactggccccgacggcgcca

SEQ ID NO: 135987 - DNA, 259 bp, Glycine max
tctcgagccgagttcggctcgagcaggtgagaacaccattgaatttacattctagcaagcagaccttttgtcaattttctattgaccttctcggtggaggaattttagtggacaaaactggagattggatcacacttatacaaaattctccaattagtaacttgttgagagttgctgcttggaagaaaggctgtttaatggttaaaattgtgatgtctgggaatgcagcagtcaaaaggagtgattgggcctcattggt

SEQ ID NO: 135988 - DNA, 259 bp, Glycine max
atcatctgttccagaggtgcaattagctcagtatgttccagcacttgaaagactggctaccatgaggttgctgcagcaggtgtctaatgtgtaccaatctatgaagattgaaaccttatcggggatgatccccttctttgatttctctcaagtggaaaaggtttcggtagatgctgttaagcagaagtttgtatcgatgagagttgaccacatgaaaaatgctgtgattttttgcaaaaagagtcttgagtctgatggc

SEQ ID NO: 135989 - DNA, 266 bp, Glycine max
gccaaatccagttgaggctggacgaaccagtgcaattaaggagagtgctataacaataggagaggcattggaggccacggcacagacggtgggtcacaagccggtggatcagagtgatgcctcagcgattcaggcggcggaggttagagcaacgggaagtaacgttataacgccgggaggacttgcggctatggctcaatcagctgctgcttataatgctgactgcaagcatgaccaggacaaggtcaagcttgccgacgttctga

SEQ ID NO: 135990 - DNA, 243 bp, Glycine max
atccttttgtgtggggaattatggtaattgattttgagggtttgactactcatggattatgatggtatgagaaaaccttccaaaaacttatttcactctcgcttcttcctttttgggttctattgctgggattgggagttcttgaccgctctcctcctttttagttcttccccttaatcttctttcttcacaatttttatttccttccttattagacgtattagatcagattgaacaaaaggg

SEQ ID NO: 135991 - DNA, 249 bp, Glycine max
aaatttggctgatgacaccatcaattttgaggcttttccccacaagctggtgcagtttggagagattcaggaaaaagttgtattgaaattttcacaagaggaatttcttacagcttggtcaactcaggtgcgtcctgcaacaactctgttggctgatgggtgtccatatttgtatgctatggtgcatgatagttcagtgtctacaataccaggtgattttgtcattggtgttaagttgacaaccataaa

SEQ ID NO: 135992 - DNA, 249 bp, Glycine max
gttgcagaccgagctagctagctagcaagcaagcacagagatggaggcaaagcgaggccatgccctcatgtgcttggcacgtgtttcactcttcctctgcgctctaaccctatccgctgctcacggaagcaccacggttcaagacatcgcgagaaagttgaaactcggggacaacgagcttctgcgcacggagaagaagttcaaggttttcatggagaattacgggaggagctactccacagaggagga

SEQ ID NO: 135993 - DNA, 245 bp, Glycine max
cgaggtagaagacagaagcatggtgaagatgtggtgcattctttaaaggtttccttggaggacgtttataatggcacaacaaagaaactatctctttctagaaacatattatgcccaaaatgtaaagggaaaggttcaaaaagtggaactgctggtaggtgttttggatgcaaaggcactggtatgaaaattacaagaaggcagattggactaggcatgattcaacaaatgcaacatgtctgtcc

SEQ ID NO: 135994 - DNA, 248 bp, Glycine max
tcaagccgcagagtcatggacagaatgggctaaagagaaactcagtgaaggtcttggcttcaaacatgatcaggaatccaaagaatccaccactaacgaagtctctgattatgccactgacactgcacagaaatccaaggattatgcaactgacactgctcagaaatcaaaggactatgcaggtgatgctgctcagaaatcaaaggactacgcaggtgatgctgctcagagaaccaaagactatgcca

SEQ ID NO: 135995 - DNA, 247 bp, Glycine max
caaacagcatccgcggcagcgacggtaaccctccaacaacaacacttccgctgcgaaaaatgtctctggtggcgaacgaggatttccagcacattctgcgtgtgctgaacaccaacgtggatgggaagcagaagataatgttcgcaatgacctccatcaagggtattggaaggagattcgccaacatcgcttgcaagaaggctgatgttgacatgaacaaaagggctggtgagttgactgctgctga

SEQ ID NO: 135996 - DNA, 251 bp, Glycine max
aaaacattgcccttgttctttcaaagttaccaaacacaagtacacaacacaacagcaacatatggcgtctgaacaattggctcgcagagagaacaccaccaccgagaaggagattcacgttgagaaacacagggttcccaagatggccacccacttcgagcaccttgcggacaagctaaagaatctgacatcaccgctgggaaggatactccgcagggtagcatagaagccttgcaagctggagagagggt

SEQ ID NO: 135997 - DNA, 254 bp, Glycine max
atagccaaggccctcctgctatcattccttcccagcctggatttggctatcaacaacaacttatgcctggtatgaggccaggtgcagctcctgtgccgaattttttcgtgccaatggttcagcagggacaacagggacagcgtcccggtggaaggcgtccaggtgcagttcagcagtcccagcagccagttcctatgatgccacagcagatgcttcctaggggacgtgtctatcgttatcctcctggtaggggt

SEQ ID NO: 135998 - DNA, 258 bp, Glycine max
gccagaaatagaccgattttatatcacctttcaattcgaattagcaaaagcaatgtctccttgcataatatggattccaaacatccatgatctggatgtgaatgagtcgaattacttatccctcggtcttttagtgaactatctctccagggattgtgaaagatgttctactagaaatattcttgttattgcttcgactcatattccccaaaaagtagatccggctctaatagctccgaataaattaaatacatgcat

SEQ ID NO: 135999 - DNA, 254 bp, Glycine max
cacaacaatgagtcgcaagagagacaggtcagcttacttttcccgccacgacgccgccaagcgccgcctccccttgccggagcccgcggaggaggagacgcctacgatgagaccggcgccgccgtccgcggtggtcgtgatgggcctcccccaggactgctccgtcctcgatctcaagtcccgattcgagatctacggcgccatctcccgcatccgcatcgaccgcgacgccgtcggatacatcacctaccgga

SEQ ID NO: 136000 - DNA, 245 bp, Glycine max
gttctcttctgtgttagtgagagaaagttctctctgcttctctctcttagactcaaaaccctattgcgtgctttgcactcgaccccgattatggccaacagtaacctccctcgaagaatcatcaaggaaacgcagcgtttgctcagtgagccagcacctggaattagtgcgtccccttcggaagacaatatgcggtatttcaatgtgatgatccttggcccaactcagtcgccttatgaaggggg

SEQ ID NO: 136001 - DNA, 245 bp, Glycine max
tccaaatacagaaatatcattttccgagacaatcccatcttccatttccatcttcaatatttcttctcatcgagaagcttcgcgaacgaaaacaaagaaccctagacagatccattccatagccatgtcaggtgttggccctctatctcaggattgggaacccgtcgtcctccgcaagaaggctcccaccgccgccgccaagaaggacgagaaagccgtcaacgccgcccggcgctccggcgcgg

SEQ ID NO: 136002 - DNA, 242 bp, Glycine max
ggcggcgaagggacaagagagggtgctgagggaactggacgaggttctggacaagtacagctttctgtcgaaggagaaactgaagggggttggaggttgggaagttttggatggttcagtttcgacggagacatcgccggattagttacaaggatcggaagagaggaaggaagtggtggaggagcgttctggggcatactggacgacgttggcgccaaacgtggaggattacagtgggagtt

SEQ ID NO: 136003 - DNA, 245 bp, Glycine max
cagatgcatatgggaatccggtttggttaacggacgagaaaggcaaaccggtgcacctcaccggtgtggcaaccactgcacacaaatgtttgcaagagaatgacacaccacaagagcttcctcactccaagagctcaagctctagctcttctgaggatgaagagcatggagggaggagcaagaagggactgaaggataaaatagaagagaagttgccaggaggagaagaaggagagggaaaggag

SEQ ID NO: 136004 - DNA, 244 bp, Glycine max
ggcggggctaccgctgagtttaagcatatcaataagcggaggaaaagaaactaacaaggattcccttagtaacggcgagcgaaccgggaaaagcccaccatgaaaatcggtcgccctcggcgtccgaattgtagtctggagaagcgtcctcagtggcggaccgggcccaagtcccctggaagggggcgccagagagggtgagagccccgtcgtgcccggaccctgtcgcaccacgaggcgctgt

SEQ ID NO: 136005 - DNA, 257 bp, Glycine max
  unsure (1)..(257): unsure at all n locations
tgttcttcatagttcagtgtgtcgtttaaaaatgtcgcagttgctggataaagccaagaacttcgtgtcggagaaggtaaatgatatggccaagccggaggcangtgtcactgacgtggacttcaagcgcgtgagcaaagataatgtcgagtacttggccaaggtctctgttcgtaacccttattcaacttccatacccatttgtgagatcaactactctttcaaaagcgcatccagggagatagcatcagggaaaa

SEQ ID NO: 136006 - DNA, 263 bp, Glycine max
aaagaaaggaaataattgatctttgaaaatgcagggaggaaagaaagctggagagtccatcaaggaaacagctgcaaacattggtgcttctgccaaggctggcatggagaaaaccaaggccactgtccaggagaaggcagaaagaatgacggcacgtgatccgatgcaaaaggagttggcaacccagaagaaagaggcaaagatgagccaggcagagctggacaagcaggcggcgcgtcagcataacacggcggcgaacaggc

SEQ ID NO: 136007 - DNA, 250 bp, Glycine max
aagctctccattcttagagaagttgaagaagaagggatacgaggttctttatatggttgatgccattgatgaatatgctgttggtcagctcaaggaatttgagggcaagaagcttgtctctgccaccaaggaagggctcaagcttgacgagagtgaagatgagaagaagaagcaagaagagttgaaggagaagtttgacaacctctgcaaggtgatcaaggatgtttgggtgacaaggttgagaaggttg

SEQ ID NO: 136008 - DNA, 259 bp, Glycine max
cacacaactacaagaaagaacttccttataaccaaaaccaacaacaactatggcaagttatcagaagcactacgatgatcaaggtcgcaaggtcgacgagtatggcaatgttgagaggcaaactgacgaatatggcaacccggttcatgccactagtgtcacttatgtagccaccaaaagtgttggtggctacaatgatgacgctaataagcaacatgaattactggtgtctatcccgagaaagacccggtagacatca

SEQ ID NO: 136009 - DNA, 257 bp, Glycine max
cacacaactactacaagtacttccttacaatcaaaaccaacaacaactatggcaagttatcaaaagcactacgatgatcagggtcgcaaggttgacgagtatggcaacgttgagaagcaaaccgacgaatacggcaaccctgttcatgctgctagtgtcacctatgtagccaccagaactgctgctggtggttacagtgatgacattaataagcacatgataccaccaatgcctacggcgtagacactggtagacag

SEQ ID NO: 136010 - DNA, 251 bp, Glycine max
  unsure (1)..(251): unsure at all n locations
gttttcattaatcaagaacgaaagttgggggctcgaagacgatcagataccgtcctagtctcaaccataaacgatgccgaccagggatcagcggatgttgcttttaggactccgctggcaccttatgagaaatcaaagtctttgggttccggggggagtatggtcgcaaggctgaaacttaaaggaattgacggaagggcaccaccaggagtgggcctgcggcttaatttgactcaacacgggganactta

SEQ ID NO: 136011 - DNA, 250 bp, Glycine max
aatggctgaagcacaactacgagaccagcatggcaaccctgtcccactcaccgatcaatacggtaatccggttatcttaactgacgagcgcggtaatcccgtccaactcactggtgtcgctaccaccgctaccggcacagcaggttctgggtttgggtcctatggtaccggtgcttacggtggtggtgcaagtgcaaccaccgttgcaatcttttggcaacccaaccaaggagtggcagggaggctagag

SEQ ID NO: 136012 - DNA, 247 bp, Glycine max
aaagatcttagtgcaagtaattaacatggaatctcagcaagcaaaccgtgaagaacttgatgagaaggcaaggcaaggtgaaactgttgttcctggaggaactggtgggaagagtcttgaggctcaagaacatcttgctgaaggaaggagccgtggagggcagacgaggaagcagcagctagggtcagaggggtatcatgaaatgggaccaaaggagggcagacaaggaaggaacagtggggagaga

SEQ ID NO: 136013 - DNA, 247 bp, Glycine max
aaacaaccttctttctttcaggttcttgatcagtgtcaaaaccaaaagggtggttgcaaattgcaatggctaagcatgatgttgagggtggttccttcgctgcaaaggactaccatgatcctcctccagcaccattgattgatgctgaggaactcacacagtggtccttctacagggctttgattgctgagttcattgccacaatgtcttcctttacatcacagtgctcactgtgattggttacaag

SEQ ID NO: 136014 - DNA, 245 bp, Glycine max
tgatttggtctttagatagcattcttgctgacttgggtagccagcaaaatgtggccaagggttccaaaaaggccgtgcaacaagtgtcctcaaaatctcaggttgcaatgttcgttgttttagcaatggtattgcgtcggaagcctgatgctcttatatctgtattgcccacattgagggagagtacaaagtatcaagggctagtaagcttccagtcattgtatggatgatagctcaggctgctg

SEQ ID NO: 136015 - DNA, 245 bp, Glycine max
ggccttcgggatcggagtaatgattaacagggacagtcgggggcattcgtatttcatagtcagaggtgaaattcttggatttatgaaagacgaacaactgcgaaagcatttgccaaggatgttttcattaatcaagaacgaaagttgggggctcgaagacgatcagataccgtcctagtctcaaccataaacgatgccgaccagggtcagcggatgttatccctctagatcgcgggcggccgccg

SEQ ID NO: 136016 - DNA, 248 bp, Glycine max
gttcagtgtgtcgtttaaaaatgtcgcagttgctggataaagccaagaacttcgtgtcggagaaggtaaatgatatggccaagccggagggaagtgtcactgacgtggacttcaagcgcgtgagcaaagataatgtcgagtacttggccaaggtctctgttcgtaacccttattcaacttccatacccatttgtgagatcaactacctttcaaaagcgcatccagggagatagcatcagggaaaattc

SEQ ID NO: 136017 - DNA, 251 bp, Glycine max
actactacaagtacttccttacaatcaaaaccaacaacaactatggcaagttatcaaaagcactacgatgatcagggtcgcaaggttgacgagtatggcaacgttgagaagcaaaccgacgaatacggcaaccctgttcatgctgctagtgtcacctatgtagccaccagaactgctgctggtggttacagtgatgacattaataagcacatgataccaccaatgcctacggcgtagacactggtagacag

SEQ ID NO: 136018 - DNA, 261 bp, Glycine max
gacagaaagatccaacactcactcttccaacttccactctctctctttccgaccaaaatgtcgatcaacagcgaatctacgccgccaccggtgatcggaaaaatcgggccttacaccgtcttcatgacgccgccgtctacacccaaacccgccgacgacaaccccgttaccaccaccaagatcgcacctccgccgcctcagattcccaaagccgttcttcccccaaacccaaacctctctccgattccgacgattccgttt

SEQ ID NO: 136019 - DNA, 256 bp, Glycine max
cgagctagctagctagcaagcaagcacagagatggaggcaaagcgaggccatgccctcatgtgcttggcacgtgtttcactcttcctctgcgctctaaccctatccgctgctcacggaagcaccacggttcaagacatcgcgagaaagttgaaactcggggacaacgagcttctgcgcacggagaagaagttcaaggttttcatggagaattcgggaggagctactccacagaggaggagtatttgcgccgtttgg

SEQ ID NO: 136020 - DNA, 251 bp, Glycine max
ggcgcagaggcacagaagccccttgacttgaccgaggagcttctgaaatggaccaacagcaccatctccatgatgatgctcggcgaggctgaggagatcagagacatcgctcgcgaggttcttaagatctttggcgaatacagactcactgacttcatctggccattgaagcatctcaaggttggatagtatgcgaagaggatcgacgcatcttgaacaagttcgaccctgtcgttgaaagggtcatcaag

SEQ ID NO: 136021 - DNA, 249 bp, Glycine max
caaaaatggtgaaaaaggcaaaaggagatttgtttctggggatggtgaagagatgacattgattccgggaaccagcgttgaagaggcttacaacaagctaatagttgaacttgagaaaagtgttcctacattggttggcattgaatgtcccaaggatgagaaacttcctcgtcgcaaaatttttgataaacctaagacgcgctgcttcctattctccctatggagtttaatcttgtggttcgtcagaag

SEQ ID NO: 136022 - DNA, 246 bp, Glycine max
gaaaaagttgtattgaaattttcacaagaggaatttcttacagcttggtcaactcaggtgcgtcctgcaacaactctgttggctgatgggtgtccatatttgtatgctatggtgcatgatagttcattgtctacaataccaggtgattttgtcattggtgttaagttgacaaccataaacaatatgtgtgcatatgggcttaatctggtatttcagttctcgtcttttgggcaccattcctcagtc

SEQ ID NO: 136023 - DNA, 244 bp, Glycine max
ggatatttgtccctgatgggcatcctttgaaggctgcacccagagagcctttgagggttaatgttctgttccaacatatacaaaatatgctgtctggtgaaactgctgtaattgctgagacaggggactcctggtttaattgccaaaagctgaaattgccaaaggcatgtgggtatgagttccaaatgcaatatggttcaattgatggtctgttggtgctactctgggttatgctcaagccgtt

SEQ ID NO: 136024 - DNA, 244 bp, Glycine max
ggacagactcgtgaacatgctctgctttcattcacccttggtgtgaaacagatgatttgctgctgtaacaaaatggatgctactacacccaagtattccaaggccaggtatgatgaaattgtgaaggaagtctcttcctacttgaagaaagtaggatacaaccctgacaagattccttttgttcctatctctggttttgagggaacaacatgattgagaggtccacaaaccttgactggtacaa

SEQ ID NO: 136025 - DNA, 244 bp, Glycine max
ttgtgcgaggaggttgggtcaggagtttcatgcttatgttgtgaaaactaaatcgtactctaagctggtgcccgttcagtcttctttgattgatatgtattgcaagtgtggggatatgatttcggcgagacgggttttttatggttcaaaggagaggaatgtggtttgttggactgctctgatgtcggggtatgctgcgaatggaaactagagcaggcgctgaggtccacgatttggatgcagc

SEQ ID NO: 136026 - DNA, 246 bp, Glycine max
ccttgtgttgcttcttttctccctcttaggtctctcttctagttccagcatatcaactcatcgttccatattggaccttgacctaaccaagtttaccacacagaaacaggtgtcttcactgttccaactatggaagagtgagcatggacgtgtctaccataaccacgaagaagaggcaaagagacttgagattttcaagaatacttgaactatatcagggacatgaatgcaaacagaaaatcaccc

SEQ ID NO: 136027 - DNA, 251 bp, Glycine max
ctaagtgagaaacaaagaaaggaaataattgatctttgaaaatgcagggaggaaagaaagctggagagtccatcaaggaaacagctgcaaacattggtgctactgccaaggctggcatggagaaaaccaaggccactgtccaggagaaggcagaaagaatgacggcacgtgatccgatgcaaaaggagttggcaacccagaagaaagagcaaagatgagccaggcagagctggacaagcaggcggcgcgtc

SEQ ID NO: 136028 - DNA, 263 bp, Glycine max
cacaagttgaacttcgtgacgagcatgggaacccagttgaactaacagatgcatatgggaatccggtttggttaacggacgagaaaggcaacccggtgcacctcacggctgtggcaaccaatgcacacaaatctatgcttcagaatgacaccccacaagagcttcctcactccaagagttcaagctcgtctgaggatgaagggcatggagagaggatcgaagggactgaaggataacatagaagaaaagttaccagctggaga

SEQ ID NO: 136029 - DNA, 258 bp, Glycine max
ggccaaaaaaccatctcaacctcaggaagctgaagagaggccatcagaaggaattggcgaaactgtgaggcagtatgcacaaaaaccaaagccaagtgaaagaaaccctcagaaggagggaaccggaagcatcgtgtttacagcaataggcgaaacagtaagcagtgccggtgagaaggtaaagaaaccgtttaaaaacactatgggaggagagtgaaggaggaggagggaaagaagaggggaagagtgtcattggtt

SEQ ID NO: 136030 - DNA, 255 bp, Glycine max
cacaaaagtgttccacttgagtgaaaagtagtgtgttaagaactaaacaatttttcaatggcgtccaagaaacaagaggagcgagctgaggcagctgcgaaagttgctgccaaagaactcgaacaagtcaacagagaaagaagagaccgtgatttcggtgttgttgctgaacaacaacaacaacatcatcaggaagatcaacaaaaacgtgtgtaatcgggtccatgtttaaggcggtgcaagacacctacgaga

SEQ ID NO: 136031 - DNA, 249 bp, Glycine max
gaagaggctagtggaggtgccgtacatggcgtccctggcccacacaatgactacactggtggcgaacaaggttgtggcggtgccggtggctgcgccgccggggcaatggatcggagccggagggtccatgatcgttgagtctgataagcaaaccggaaccgtacggaagcactacatagggatggtgactatgcttgacattgtggtcacattgctggtgataaccacttgagtggtgacgatgatgat

SEQ ID NO: 136032 - DNA, 248 bp, Glycine max
acgagatcgtgaatgaagaaattgaaagcgcgcgcgagaatttggagtggaaactgacgatggagaacggattcgctcgcatggacgacgaggttcatcgccggagccagagcaaccagaccttcacctgcaggtgtgagctccagactcctcactgcgacgccgtcggatccaccgccgtcgtcgccgtcgtcacgccggacaaatcgtcgtctctaactgcggcgactcccgcgccgtcctctgcc

SEQ ID NO: 136033 - DNA, 242 bp, Glycine max
cggctcgagaaagccttcaagatggactgtgacaaatctgaatgatgttaactggaatttgtatctgaatactctattttggaatctcaactattgggactccataagtactcttgctggagacatagaaaatccgaagaaaactcttccgaaggctttgttttatgctgtgatcctagtagttctagggtacttctttcctctctaattggtatggtgctgttcctgtcaaccgtgagttg

SEQ ID NO: 136034 - DNA, 242 bp, Glycine max
aaaacagtaaagctaacttcaacacctttaattttctaaaagtaattcagccgctgaataccaagcggagaagatgagtcaggagcagccacggcgtcccaaaggccaaaaccccatcaaatacggcgacgtttttgtcgtctccggcgaccttgcacagaagcccgtcgcaccggaagatgctgccatgatgcaaagcgcggaactcgagtgctcggacaaacccaaccggcggagcagct

SEQ ID NO: 136035 - DNA, 240 bp, Glycine max
tgcagaccgagctagctagctagcaagcaagcacagagatggaggcaaagcgaggccatgccctcatgtgcttggcacgtgtttcactcttcctctgcgctctaaccctatccgctgctcacggaagcaccacggttcaagacatcgcgagaaagttgaaactcggggacaacgagcttctgcgcacggagaagaagttcaagttttcatggagaattacgggaggagctactccacaga

SEQ ID NO: 136036 - DNA, 244 bp, Glycine max
aaaacagtaaagctaacttcaacacctttaattttctaaaagtaattcagcggctgaataccaagcggagaagatgagtcaggagcagccacggcgtcccaaaggccaaaaccccatcaaatacggcgacgtttttgtcgtctccggcgaccttgcacagaagcccgtcgcaccggaagatgctgccatgatgcaaagcgcgaaactcgagtgctcggacaaacccaacccggcggagcagctt

SEQ ID NO: 136037 - DNA, 244 bp, Glycine max
gcatatatatcaaaatggctgcagagatggagagggagtcattgataactgaagctcctaatgcaccagttactgcacagagaagggtcagaaatgacttagaaaattctctaccaaaaccatacttgccaagagcattgaaagctcctgatacgggtcacccaaatggaacagcaggccacaggcaccacaacttatctgtcttcagcagcattgtgctttttttgatcaagatgacaatgga

SEQ ID NO: 136038 - DNA, 242 bp, Glycine max
gtcaagaatctaaagaagtatttcacatttgagattcaagttttggatgataagaatgtcagacgacgatttcgagcttcaaattttcaagtgtgctgtcactcgagtaaagccctacatttgcactatgccactgagaatggatgagggatggaatcaaatccagtttaacctggttgatttcaccaagagagcttatggactaattatgtggagacactgcgagtacaggtccatgcaaa

SEQ ID NO: 136039 - DNA, 243 bp, Glycine max
ttccttgacaatctaattctgcaaaaatggcaagcaataaggagtctaagttcccagcacagagccagaaaactcagccaggaaaagaacatgtaatgaatccactcccacaagccacaaatcctgatcacaaggccgccaataaactccagggaaaggtggcgttggtgacaggaggtgactcaggaattggcagagcggtttcctgtgtttcgcaaaagagggtgcaacgtggcctttaca

SEQ ID NO: 136040 - DNA, 249 bp, Glycine max
gtggaatacgaacctgcgtggaagctgtcttactggttgaattgttcaaacatcctcatttgttgctgttgcaaataagaaattccatatataaacttcctggtggccgattaaggccaggtgaatcagatactgatgggttgaagcgtaactggcaaggaagctctctgtgaatgaagatggggacgggtcagaatgggaggtggggaatgccttggaatgtggtggaggcctgattttgaaacatta

SEQ ID NO: 136041 - DNA, 251 bp, Glycine max
cgcacaggcatcaggtgagtttgttgtgatttgaatggagggaagtggaggtggcggtggcagtggcggtggttcaccttctgcacctgtgaagcaatacttgcaggaattctcgaagctttttcagtactatctggataaatccactccccatgccctctacagatggattgggactttcgtgattgcatccatctacgttctgcgcgggattatttgcaggggttttacattgtctcctacggcctcgg

SEQ ID NO: 136042 - DNA, 250 bp, Glycine max
aaaaatatattttacaccccagaggggctataattggagataccattgtttctggtacagaagttcctataaaaatgggaaatgccctacctttgaccgatatgcccttaggcacggcaatacataacatagaaatcacactcggaaagggtggacaattagctagagcagcaggtgctgtagcgaaactaattgcaaaagaggggaatcggccacattaaaattaccttctggggaggtccgtttgata

SEQ ID NO: 136043 - DNA, 243 bp, Glycine max
cagattcagatttatattggaatctggatattttgtcttctcaagtgcatgcgcgattgtgcactgtgtaactcccatttgatacactcaatgaagatgcacttgagaagacaaaatatccagattcagatttatattggaagaaatttgaggataaataccacttttcatgccaatttactgctgacctaatagccatgaaaatgcgtgttttatcatcaccagtacataccaggagattgc

SEQ ID NO: 136044 - DNA, 241 bp, Glycine max
caagtacttccttacaatcaaaaccaacaacaactatggcaagttatcaaaagcactacgatgatcagggtcgcaaggttgacgagtatggcaacgttgagaagcaaaccgacgaatacggcaaccctgttcatgctgctagtgtcacctatgtagccaccagaactgctgctggtggttacagtgatgacattaataagaacatgataccaccaatgcctacggcgtagacactggtaga

SEQ ID NO: 136045 - DNA, 242 bp, Glycine max
gaacgggaggaggagtcgaagaggctaagacttcagaaaataaccgaagaagcggaacaaagaaggcttgccactgagtatgaacagagaaagaatcagaggatccttagggagatagaggagagagaaaatgaagaagcacaagctttactccaggaagctgaaaagcgtattaaaaagaagggaaagaaaccaatcataagggggtaagttgaagtctgcctttcgttaaactcctgatt

SEQ ID NO: 136046 - DNA, 241 bp, Glycine max
aaggaaataattgatctttgaaaatgcagggaggaaagaaagctggagagtccatcaaggaaacagctgcaaacattggtgcttctgccaaggctggcatggagaaaaccaaggccactgtccaggagaaggcagaaagaatgacggcacgtgatccgatgcaaaaggagttggcaacccagaagaaagaggcaaagatggccaggcagagctggacaagcaggcggcgcgtcagcataac

SEQ ID NO: 136047 - DNA, 244 bp, Glycine max
caagtacttccttacaatcaaaaccaacaacaactatggcaagttatcaaaagcactacgatgatcagggtcgcaaggttgacgagtatggcaacgttgagaagcaaaccgacgaatacggcaaccctgttcatgctgctagtgtcacctatgtagccaccagaactgctgctggtggttacagtgatgacattaataagcaactgataccaccaatgcctacggcgtagacactggtagacag

SEQ ID NO: 136048 - DNA, 258 bp, Glycine max
gtatcgaggtcgaataagaccaacagaatagtcgcggaagctactcaaggtcttacttacagggacgccggcgtggacatcgacgccggctccgaactcgtgcgcaggatagcgaagatggcgccagggattggaggcttcggtggtttattccctctcggtgactcgtacctcgttgctggtaccgatggcgtgggaacgaaggtgatgcttccttcgaaactggaatccacgatactattgggattgacctggttg

SEQ ID NO: 136049 - DNA, 251 bp, Glycine max
aggcaacatgggaacatcggtggcccttactatggaaccaacaccgcagacaccggtactggtcccagaagtggaaccacgggcggcaccggttatggaggcactggtggcactgattatggaacaactggtggcactggttatggaagtggaactgggtatggagtcaacactgggggtgcgcacactgaagcaggatataggaaggacatcgtcagcatgaccaatctcatggtgatcagaacgagtag

SEQ ID NO: 136050 - DNA, 243 bp, Glycine max
aaagaacttccttataaccaaaaccaacaacaactatggcaagttatcagaagcactacgatgatcagggtcgcaaggtcgacgagtatggcaatgttgagaggcaaactgacgaatatggcaacccggttcatgccactagtgtcacttatgtagccaccaaaagtgttggtggctacaatgatgacgctaataagcaacagatattactggtgtctatcccgagaaagacaccggtagaca

SEQ ID NO: 136051 - DNA, 240 bp, Glycine max
cacaactactacaagtacttccttacaatcaaaaccaacaacaactatggcaagttatcaaaagcactacgatgatcagggtcgcaaggttgacgagtatggcaacgttgagaagcaaaccgacgaatacggcaaccctgttcatgctgctagtgtcacctatgtagccaccagaactgctgctggtggttacagtgagacattaataagcaacatgataccaccaatgcctacggcgta

SEQ ID NO: 136052 - DNA, 238 bp, Glycine max
aatttccattgcctccgcttccacctcgcaaccatgatcatcccggagaagaaccgcaaggagatctgcaaatacctcttccaagagggagtttgcttcgcgaagaaggacttcaatttggccaagcaccctgagatcgacgtgccgaatctgcaggtgattaagctgatgcagagtttcaagtctcgcgagtacgtggagaaacttttgcttggatgcactattactggttcctcac

SEQ ID NO: 136053 - DNA, 239 bp, Glycine max
ggcacaattcctacctgactgggaatcagctgagcagcgattgcagtgatgtgccaatcataaaggctttgcaacgaggtgtgcgagtaattgaactagatttatggccaaattcaactaaagatgatatcgacgtagttcatggaaggacacttactgctcctgtctcacttatccaatgtttaaagtccataaaaggtatgcttttgctaaatctgactacccagtcatcataactt

SEQ ID NO: 136054 - DNA, 238 bp, Glycine max
caactctctttttcttccaaaagggaaaacgaatctcaaacttcacaagtgtttgaggcgccatggcggatcggttgacgcgtattgccatcgtcagcaacgacaggtgcaagcccaaaaagtgccgccaggagtgcaagaagagttgctccgtcgtcagaaccgggaggttgtgtattgaggttacttcctcgtccagattgctttcatttcggaggaattgtgtattggatgcggt

SEQ ID NO: 136055 - DNA, 242 bp, Glycine max
atttccctacctctcccttcaagatgcagatcttcgtcaagaccctcaccggcaagaccatcacccttgaggtggaaagctctgacaccatcgacaacgtcaaggccaagatccaggacaaggaaggaatccccccggaccagcaacgtctcattttcgccggaaagcaacttgaggacggccgtacccttgctgactacacattcagaaggagagtactcttcacctcgtcctccgtctcc

SEQ ID NO: 136056 - DNA, 242 bp, Glycine max
  unsure (1)..(242): unsure at all n locations
gcatttcgttactttcatttgttgtgcaatcttacaagttccaaacttctctattttgttattatttgttctcacttctcacacatacagattcccgncttttatattatcatggcttctaaggtggtttcggttttggttatagcgatgatgttgtttgccatgaactgtcactgcactattcacccccacatgccttcaccaaagaggaaggtcacgattttcaggagtctaaagccaag

SEQ ID NO: 136057 - DNA, 95 bp, Glycine max
gcattgcatttcgttactttcatttgttgtgcaatcttacaagttccaaacttctctattttgttattatttgttctcacttctcacacatacag

SEQ ID NO: 136058 - DNA, 253 bp, Glycine max
attccgtgttcccaccgtggatgtctctgttgttgacctcacagtgaggctggagaaagaagcttcctacgatgaaattaaaaatgctatcaaggaggaatcagagggcaagttgaagggaattcttggttacactgaagatgatgtggtctccactgactttatcggcgatagcagatcaagtatttttgatgcaaaggctggaattgattgaataagaactttgtgaagcttgtttcttggtacgacaacg

SEQ ID NO: 136059 - DNA, 250 bp, Glycine max
tttgattaccaagcaagttatgagcaagatggcagaaatgataaacagtctttgtggtggtgatgaaaaattgatgcgtgaaaggacacacctgctgttggcttgttgttcaaggatggcaatttgtaagaaagatatttggagagttgaatgtggaatcccttctggatttccgctcacagttatttgcaatagcatttttaatggatgctcattagatatagctatgaaaaattattgcgccaggcta

SEQ ID NO: 136060 - DNA, 245 bp, Glycine max
cggatatctcggctcttgcatcgatgaagaacgtagcgaaatgcgatacttggtgtgaattgcagaatcccgtgaaccatcgagtctttgaacgcaagttgcgcccgaagccattaggccgagggcacgcctgcctgggtgtcacacatcgtttccccaacgcaaacatgtaacaatgttgctgcgcggggtgtatgctgactcccgcgagcacccgcctcgtggttggttgaaatctgggttca

SEQ ID NO: 136061 - DNA, 241 bp, Glycine max
aaaatatcctatatacgtaggtgggaacaggggaaggggtcagatttatcttgacgggagcaagagtaataataatgtgtataatgctacagcagcgggtatggtaaaaaaaatcatacgaaaagaaaaagggggatacgaaataactatagtggatgcattggatgggcgtgaagtgattgatattatacctccaggacagaacttcttgtttcagaaggtgaatctatcaaacttgatc

SEQ ID NO: 136062 - DNA, 237 bp, Glycine max
aatggctgaagcacaactacgagaccagcatggcaaccctgtcccactcaccgatcaatacggtaatccggttatcttaactgacgagcgcggtaatcccgtccaactcactggtgtcgctaccaccgctaccggcacagcaggttctgggtttgggtcctatggtaccggtgcttacggtggtggtgcaagtgcaccaccgttgcagatcttttggcaacccaaccaaggagtggc

SEQ ID NO: 136063 - DNA, 237 bp, Glycine max
gaaaaattgatgcgtgaaaggacacacctgctgttggcttgttgttcaaggatggcaatttgtaagaaagatgtttggagagttgaatgtggaatcccttctggatttccgctcacagttatttgcaatagcatttttaatgagatgctcattagatatagctatgaaaaattactgcgccaggctaaagctccaagatgtttttgcaatccttcaaaaattttgtttctttgtgtg

SEQ ID NO: 136064 - DNA, 236 bp, Glycine max
cggctccgttaggttttccttccgcgtgtttgctcggaactactcctccactcatcgtttaaaatgtctgacgtggaagagtttcgttgcttcattggtggccttgcatggtcaacgtctgatagaaagttaaaggatacatttgaaaagtttggcaagcttattgaggcaaaggtggttgttgacagtttctctggcgttctcgtggttttggatttgtcacatttgatgacaag

SEQ ID NO: 136065 - DNA, 237 bp, Glycine max
ccggtcgtactcataaccgcatcaggtctccaaggtgaacagcctctggtcgatggaacaatgtaggcaagggaagtcggcaaaatggatccgtaacctcgggaaaaggattggctctgagggctgggcacgggggtcccagtcccgaacccgtcggctgtcggtggactgctcgagctgcttccgcggcgagagcggtcgtcgcgtgccggtcgggggacggattgggaacgggcc

SEQ ID NO: 136066 - DNA, 238 bp, Glycine max
ccagcactgagcttaaccgagcttcacaaagatgaatcgggaaaaattgatgaagatggccggttcggttagaactgggggaaagggcaccgtgagaagaaagaagaaggctgtccacaagacaacaaccacagatgacaaaaggcttcagagcaccctgaagagaataggggtgaatgccatcccggctattgaggggtcaatatctttaaggatgacgtattatccagtttctaaa

SEQ ID NO: 136067 - DNA, 250 bp, Glycine max
caaagaaaggaaataattgatctttgaaaatgcagggaggaaagaaagctggagagtccatcaaggaaacagctgcaaacattggtgcttctgccaaggctggcatggagaaaaccaaggccactgtccaggagaaggcagaaagaatgacggcacgtgatccgatgcaaaaggagttggcaacccagaagaaagaggcaaagatgagccaggcagagctggacaagcaggcggcgcgtcagcataacac

SEQ ID NO: 136068 - DNA, 250 bp, Glycine max
gcggcagagagtgagggagttcgaggagaggagggagctcgagaagaaggccgaggagttgcagagtcgcgttggagaggaaggcgaggaggaagaaaccgaggaagaaaagaggatgagagtcaggaaagagctcgaaaaggtagctaaggaacaggcagagaggagggccactgctcagttgatgtttgatttgggtcacaaggcttatgggaagggatcctatggacgtgccattgagtttcttgaa

SEQ ID NO: 136069 - DNA, 250 bp, Glycine max
gttcctcactgacctcaccagggcgaccagagccaagctttctttagctatcttccttttctttcttttagccttgatttcaaacctaaccttgggcaaacttaaagaaaccgaggtcgaagaagatcccgagctcgtaacatgcaaacaccagtgccaacagctacggcaatacactgcgagtgacaagcgaacatgcttgcaacaatgtgacagtatgaagcaagatcgagagaaacaagtcgaagag

SEQ ID NO: 136070 - DNA, 251 bp, Glycine max
cttctgataaaaaagaaagaaggatttcagattattcaatattaaatcaaatcatatctatagatcattgtcattttacacatcctactattttccatgatactacggatttattagcaaagaggcggagaaatagattaattattccatttcaattccaatcgattcaagaacgagacaaagagctaatgttagcttccagtatctcgattgagataccaatcaatggtatttttcgtagaaatagcatt

SEQ ID NO: 136071 - DNA, 248 bp, Glycine max
cttttagcaagttaacaacacttttgtcttcgttccattatctagttctcaattctcttcaccctttgcctctgaaagaaatgggtagtcttgaagcggaaagaacaacagtaggattggcagcaagagacccttcagggattctctccccatacacctacaatctaagaaacacaggccctgatgatgtttacattaaagttcactactgtggaatttgccattctgatctccaccagattaaaaat

SEQ ID NO: 136072 - DNA, 249 bp, Glycine max
ttgggcctcattggtacaagtgtttttaacaaacagcaacagtacagagcattttgatgcatgtaagtggacaaaatcagaaccacattcctgggagttgatcttcccaatagaggtatgtggtcctaataatggttttgaaatgtggagttctgagtgggcaaatcaaacttcatggcatttgagtttccttattgacaatcccaaacagtctacagtttttgatattctcttgggaatctctcaaga

SEQ ID NO: 136073 - DNA, 250 bp, Glycine max
gtcatcatccgcagctgctgttattcgcaccgcaaacaaacagtgagccatggccgtcggaaagaacaagcgcatctccaaagggaaaaagggtggcaagaagaaggcagctgatccctttgccaagaaggattggtatgacattaaggccccttctctttttcaagtgaaaaatgttggcaaaaccctcgtctctcgtacgcagggtaccaagattgcttctgaaggacttaaacatagagtgtttgag

SEQ ID NO: 136074 - DNA, 253 bp, Glycine max
gttgcaatcgcataataataaccatccaaagtttattgagagaaatttgcaagtttgaaaagaaacatggcatctcatcaacaaaacaagcaagagcttgatgaaagggcaaggcaaggagagactgttgttccgggtggcactggtggcaagagccttgaggctcagcaacatcttgctgaaggcaggagcaggggagggaaaacaaggaaggagcagctggggacagaagggtaccatgaaatgggacgca

SEQ ID NO: 136075 - DNA, 256 bp, Glycine max
caggcaagccccactcaaccaccacacctctcctcgttcacgctacccctttctgctcttcttctacctttcaagttttaaaagtataaagatggcagagacattcctatttacctcagagtcggtgaacgagggacaccctgacaagctctgcgaccaaatctccgatgctgtcctcgacgcttgcctcgagcaggacccagacagcaaagttgcctgcgaaacatgcaccaaaaccaacttggtcatggtcttc

SEQ ID NO: 136076 - DNA, 138 bp, Glycine max
ggcagatgcaggaagcttatcggtacattttcttcaactgatttgaggggatgccacatagccacgctgaaatcatggttgggaataagtgcactagcattcactgaagatgttgcatcgagtcctttgtacacagaa

SEQ ID NO: 136077 - DNA, 248 bp, Glycine max
caatgatgtttatcttccaagagatgaggcttttggacacttgaagtcatctgactttcttacttatggactaaaatccgtatctcaaaatgttcttccattattgcaatctgcttttgatttgaatttcacaccccgtgagtttgatagctttgatgaagttcatggactctattcaggcggaattaagctgccaacagatataatcagcaagattagtccactacccgtgcttaaggaaatcttcc

SEQ ID NO: 136078 - DNA, 248 bp, Glycine max
ctcgagccgcaagtacttccttacaatcaaaaccaacaacaactatggcaagttatcaaaagcactacgatgatcagggtcgcaaggttgacgagtatggcaacgttgagaagcaaaccgacgaatacggcaaccctgttcatgctgctagtgtcacctatgtagccaccagaactgctgctggtggttacagtgatgacattaataagcaacatgataccaccaatgcctacggcgtagacactggt

SEQ ID NO: 136079 - DNA, 249 bp, Glycine max
gaaaactactgagaaggagatctctgatgatgaggatgaggaagagaagaaggatgaggagggtaaggtggaggatgttgacgaagagaaggagaaggaagaaaaaaaagaaaaagaagattaaggaagtgtcacatgaatggtccttggtgaacaagcagaagcccatttggatgagaaagcctgaggagatcacaaaggaggagtattctgctttctacaagagtctcaccaatgactgggaagagc

SEQ ID NO: 136080 - DNA, 247 bp, Glycine max
gcctacaattatttgctcgagtctggtgggttggaggaggagtcttcatatccctacacgggggagagaggtgaatgcaagtttgatccagagaaaatagcagttaagatcacaaatttcaccaatatccctgctgatgagaaccaaattgccgcatatttagtaaaaaatggtccacttgctatgggcgtgaatgcaattttcatgcaaacatacattggtggtgtctcatgccctctcatatgta

SEQ ID NO: 136081 - DNA, 252 bp, Glycine max
cgattgcccttgttctttcaaagttaccaaacacaagtacacaacacaacagctacatatggcgtctgaacaattggcgcgcagacaggacaccaccaccgagaaggagattcacgttgagaaacacacggttcccaagatggccacccacttcgagcaccttgcggagcaagctaaagaatctgacatcaccgctgggaaggatactccgcagggtagcatagaagccttgcaagctggagagagggtcaa
